(19) United States
(12) Patent Application Publication
(10) Pub. No.: US 2005/0244851 A1
(43) Pub. Date: Nov. 3, 2005

(54) Methods of analysis of alternative splicing in human

(75) Inventors: John E. Blume, Danville, CA (US); Alan J. Williams, Albany, CA (US)

Correspondence Address: AFFYMETRIX, INC;ATTN: CHIEF IP COUNSEL, LEGAL DEPT., 3380 CENTRAL EXPRESSWAY, SANTA CLARA, CA, 95051, US

(73) Assignee: Affymetrix, INC., Santa Clara, CA (US)

(21) Appl. No.: 11/036,498

(22) Filed: Jan. 13, 2005

Related U.S. Application Data
(60) Provisional application No. 60/536,315, filed on Jan. 13, 2004.

(51) Int. Cl. C12Q 1/68; C12M 1/34

(52) U.S. Cl. 435/6; 435/287.2

(57) ABSTRACT

The invention provides nucleic acid sequences which are complementary, in one embodiment, to a wide variety of human exons. The invention provides the sequences in such a way as to make them available for a variety of analyses including analysis of alternative splicing events. In one embodiment the nucleic acid sequences provided are present as an array of probes that may be used to measure gene expression of at least 5,000 alternatively spliced human genes. As such, the invention relates to diverse fields impacted by the nature of molecular interaction, including chemistry, biology, medicine, pharmacology and medical diagnostics.

### RELATED APPLICATIONS

[0001] This application claims the benefit of U.S. Provisional Application No. 60/536,315, filed Jan. 13, 2004. The entire teachings of the above application are incorporated herein by reference in their entirety for all purposes.

### FIELD OF THE INVENTION

[0002] The present invention provides pools of nucleic acid sequences and arrays of nucleic acid sequences that are useful for analyzing alternative splicing in nucleic acid samples derived from mice. The invention also provides a collection of probes that hybridize to regions of transcripts to detect splicing events. The invention relates to diverse fields, including genetics, genomics, biology, population biology, medicine, and medical diagnostics.

### REFERENCE TO SEQUENCE LISTING

[0003] The Sequence Listing submitted on compact disk is hereby incorporated by reference. The machine format for the discs is IBM-PC, the operating system compatibility is MS-WINDOWS 2000, the file on the disc is titled “3655.1seqlist.exe” (a compressed text file in a self-extracting format), the file is 864 MB (uncompressed) and the compact discs were created on Jan. 11, 2005.

### BACKGROUND OF THE INVENTION

[0004] Recent genome-wide analysis of alternative splicing indicates that a large portion of human genes, probably more than half, have alternative splice forms. Alternative splicing provides the cell with a mechanism to generate multiple gene products from the same transcript, adding to the functional complexity of the genome. Recent reports that the human genome may contain many fewer genes than expected have resulted in the suggestion that alternative splicing may play a major role in the production of complexity.

[0005] The identities of the genes that are being expressed in a biological sample at any given time and the amount of expression of those genes provide a gene expression profile for that sample. The gene expression profile is an indication of the status of that sample. For example, different tissue types will have different gene expression profiles reflecting the expression of different genes and differences in the spliced forms of individual genes. Differences in expression profile may also be observed between samples from the same tissue type when one sample is diseased. High-throughput methods to analyze and detect expression of alternative splice forms, characterization of alternative splicing, and regulation of alternative splicing are an important research focus.

### SUMMARY OF THE INVENTION

[0006] Methods and probe arrays for measurement of the expression of multiple isoforms of RNA from human genes are disclosed. In one aspect probe arrays that include more than 100,000 different probe sets are disclosed. Each probe set includes at least one probe, and preferably, 2, 4, 6 or more probes that are complementary to different regions of the same exon or a subsequence of an exon from a human gene. More than 100, 1000, or 10,000 different genes are interrogated by the array and each multi-exon gene is preferably interrogated by at least two probe sets and preferably by a probe set for each exon in the gene.

[0007] The arrays and methods may be used to measure the expression of each form of an alternatively spliced gene. In one embodiment an array comprising a plurality of nucleic acid probes, wherein each probe in the plurality of nucleic acid probes comprises one of the sequences listed in SEQ ID Nos. 1-6, 102, 149 and wherein the plurality of nucleic acid probes of the array comprises at least 1,000,000 of the sequences listed in SEQ ID Nos. 1-6, 102, 149 is disclosed. The probes may be attached to a solid support which may be a membrane, a glass slide, or a bead, for example. The probes may be attached to a single solid support or to two or more solid supports.

[0008] In one embodiment a method of monitoring alternative splicing in a biological sample from a human is disclosed. Nucleic acid is isolated from the sample and amplified and labeled. The labeled sample is hybridized to the array and a hybridization pattern is detected and analyzed. The intensity of signal resulting from hybridization to probes on the array is used to monitor the levels of alternatively spliced forms of a gene. The hybridization patterns from two or more different samples may be compared to detect differences in alternative splicing.

[0009] In one embodiment labeled cDNA is hybridized to the array. In another embodiment labeled RNA is hybridized to the array. The labeled RNA may be complementary to the mRNA (antisense) in another embodiment the labeled RNA may be sense RNA.

### BRIEF DESCRIPTION OF THE FIGURES

[0010] FIG. 1 shows an example of alternative splicing. Two mature RNA isoforms re generated differing in the inclusion of exons 2 and 3. The isoforms can be distinguished by probes that are specifically complementary to exon 2 or exon 3.

[0011] FIG. 2 shows examples of transcript clusters, exon clusters and probe selection regions. Individual probe sets are designed to be detect individual probe selection regions. A transcript cluster may be represented by many probe sets each corresponding to different probe selection regions. Transcript clusters may include multiple exon clusters.

[0012] FIG. 3 shows a series of input transcript evidence from a number of sources and the output probe selection regions.

### DETAILED DESCRIPTION OF THE PREFERRED EMBODIMENTS

a) General

[0013] The present invention has many preferred embodiments and relies on many patents, applications and other references for details known to those of the art. Therefore, when a patent, application, or other reference is cited or repeated below, it should be understood that it is incorporated by reference in its entirety for all purposes as well as for the proposition that is recited.

[0014] As used in this application, the singular form “a,” “an,” and “the” include plural references unless the context clearly dictates otherwise. For example, the term “an agent” includes a plurality of agents, including mixtures thereof.

[0015] An individual is not limited to a human being but may also be other organisms including but not limited to mammals, plants, bacteria, or cells derived from any of the above.

[0016] Throughout this disclosure, various aspects of this invention can be presented in a range format. It should be understood that the description in range format is merely for convenience and brevity and should not be construed as an inflexible limitation on the scope of the invention. Accordingly, the description of a range should be considered to have specifically disclosed all the possible subranges as well as individual numerical values within that range. For example, description of a range such as from 1 to 6 should be considered to have specifically disclosed subranges such as from 1 to 3, from 1 to 4, from 1 to 5, from 2 to 4, from 2 to 6, from 3 to 6 etc., as well as individual numbers within that range, for example, 1, 2, 3, 4, 5, and 6. This applies regardless of the breadth of the range.

[0017] The practice of the present invention may employ, unless otherwise indicated, conventional techniques and descriptions of organic chemistry, polymer technology, molecular biology (including recombinant techniques), cell biology, biochemistry, and immunology, which are within the skill of the art. Such conventional techniques include polymer array synthesis, hybridization, ligation, and detection of hybridization using a label. Specific illustrations of suitable techniques can be had by reference to the example herein below. However, other equivalent conventional procedures can, of course, also be used. Such conventional techniques and descriptions can be found in standard laboratory manuals such as Genome Analysis: A Laboratory Manual Series (Vols. I-IV), Using Antibodies: A Laboratory Manual, Cells: A Laboratory Manual, PCR Primer: A Laboratory Manual, and Molecular Cloning: A Laboratory Manual (all from Cold Spring Harbor Laboratory Press), Stryer, L. (1995) Biochemistry (4th Ed.) Freeman, New York, Gait, “Oligonucleotide Synthesis: A Practical Approach” 1984, IRL Press, London, Nelson and Cox (2000), Lehninger, Principles of Biochemistry 3^{rd} Ed., W.H. Freeman Pub., New York, N.Y. and Berg et al. (2002) Biochemistry, 5^{th} Ed., W.H. Freeman Pub., New York, N.Y.

[0018] The present invention can employ solid substrates, including arrays in some preferred embodiments. Methods and techniques applicable to polymer (including protein) array synthesis have been described in U.S. Ser. No. 09/536,841, WO 00/58516, U.S. Pat. Nos. 5,143,854, 5,242,974, 5,252,743, 5,324,633, 5,384,261, 5,405,783, 5,424,186, 5,451,683, 5482,867, 5,491,074, 5,527,681, 5,550,215, 5,571,639, 5,578,832, 5,593,839, 5,599,695, 5,624,711, 5,631,734, 5,795,716, 5,831,070, 5,837,832, 5,856,101, 5,858,659, 5,936,324, 5,968,740, 5,974,164, 5,981,185, 5,981,956, 6,025,601, 6,033,860, 6,040,193, 6,090,555, 6,136,269, 6,269,846 and 6,428,752, in PCT Applications Nos. PCT/US99/00730 (International Publication Number WO 99/36760) and PCT/US01/04285, which are all incorporated herein by reference in their entirety for all purposes. See also, Fodor et al., Science 251(4995), 767-73, 1991, Fodor et al., Nature 364(6437), 555-6, 1993 and Pease et al. PNAS USA 91(11), 5022-6, 1994 for methods of synthesizing and using microarrays.

[0019] Patents that describe synthesis techniques in specific embodiments include U.S. Pat. Nos. 5,412,087, 6,147,205, 6,262,216, 6,310,189, 5,889,165, and 5,959,098. Nucleic acid arrays are described in many of the above patents, but the same techniques are applied to polypeptide arrays.

[0020] Nucleic acid arrays that are useful in the present invention include those that are commercially available from Affymetrix (Santa Clara, Calif.) under the brand name GeneChip®. Example arrays are shown on the website at affymetrix.com.

[0021] The present invention also contemplates many uses for polymers attached to solid substrates. These uses include gene expression monitoring, profiling, library screening, genotyping and diagnostics. Gene expression monitoring, and profiling methods are shown in U.S. Pat. Nos. 5,800,992, 6,013,449, 6,020,135, 6,033,860, 6,040,138, 6,177,248 and 6,309,822. Genotyping and uses therefore are shown in U.S. Ser. Nos. 60/319,253, 10/013,598, and U.S. Pat. Nos. 5,856,092, 6,300,063, 5,858,659, 6,284,460, 6,361,947, 6,368,799 and 6,333,179. Additional methods of genotyping, complexity reduction and nucleic acid amplification are disclosed in U.S. Patent Application Nos. 60/508,418, 60/468,925, 60/493,085, Ser. Nos. 09/920,491, 10/442,021, 10/654,281, 10/316,811, 10/646,674, 10/272,155, 10/681,773 and 10/712,616 and U.S. Pat. No. 6,582,938. Other uses are embodied in U.S. Pat. Nos. 5,871,928, 5,902,723, 6,045,996, 5,541,061, and 6,197,506.

[0022] The present invention also contemplates sample preparation methods in certain preferred embodiments. Prior to or concurrent with genotyping, the genomic sample may be amplified by a variety of mechanisms, some of which may employ PCR. See, e.g., PCR Technology: Principles and Applications for DNA Amplification (Ed. H. A. Erlich, Freeman Press, NY, N.Y., 1992); PCR Protocols: A Guide to Methods and Applications (Eds. Innis, et al., Academic Press, San Diego, Calif., 1990); Mattila et al., Nucleic Acids Res. 19, 4967 (1991); Eckert et al., PCR Methods and Applications 1, 17 (1991); PCR (Eds. McPherson et al., IRL Press, Oxford); and U.S. Pat. Nos. 4,683,202, 4,683,195, 4,800,159 4,965,188,and 5,333,675, and each of which is incorporated herein by reference in their entireties for all purposes. The sample may be amplified on the array. See, for example, U.S. Pat. No. 6,300,070 and U.S. Ser. No. 09/513,300, which are incorporated herein by reference.

[0023] Other suitable amplification methods include the ligase chain reaction (LCR) (e.g., Wu and Wallace, Genomics 4, 560 (1989), Landegren et al., Science 241, 1077 (1988) and Barringer et al. Gene 89:117 (1990)), transcription amplification (Kwoh et al., Proc. Natl. Acad. Sci. USA 86, 1173 (1989) and WO88/10315), self-sustained sequence replication (Guatelli et al., Proc. Nat. Acad. Sci. USA, 87, 1874 (1990) and WO90/06995), selective amplification of target polynucleotide sequences (U.S. Pat. No. 6,410,276), consensus sequence primed polymerase chain reaction (CP-PCR) (U.S. Pat. No. 4,437,975), arbitrarily primed polymerase chain reaction (AP-PCR) (U.S. Pat. No. 5,413,909, 5,861,245) and nucleic acid based sequence amplification (NABSA). (See, U.S. Pat. Nos. 5,409,818, 5,554,517, and 6,063,603, each of which is incorporated herein by reference). Other amplification methods that may be used are described in, U.S. Pat. Nos. 5,242,794, 5,494,810, 4,988,617 and in U.S. Ser. No. 09/854,317.

[0024] Additional methods of sample preparation and techniques for reducing the complexity of a nucleic sample are described in Dong et al., Genome Research 11, 1418 (2001), in U.S. Pat. No. 6,361,947, 6,391,592 and U.S. Ser. Nos. 09/916,135, 09/920,491, 09/910,292, and 10/013,598.

[0025] Methods for conducting polynucleotide hybridization assays have been well developed in the art. Hybridization assay procedures and conditions will vary depending on the application and are selected in accordance with the general binding methods known including those referred to in: Maniatis et al. Molecular Cloning: A Laboratory Manual (2^{nd} Ed. Cold Spring Harbor, N.Y, 1989); Berger and Kimmel Methods in Enzymology, Vol. 152, Guide to Molecular Cloning Techniques (Academic Press, Inc., San Diego, Calif., 1987); Young and Davis, P.N.A.S, 80: 1194 (1983). Methods and apparatus for carrying out repeated and controlled hybridization reactions have been described in U.S. Pat. Nos. 5,871,928, 5,874,219, 6,045,996 and 6,386,749, 6,391,623 each of which are incorporated herein by reference

[0026] The present invention also contemplates signal detection of hybridization between ligands in certain preferred embodiments. See U.S. Pat. Nos. 5,143,854, 5,578,832; 5,631,734; 5,834,758; 5,936,324; 5,981,956; 6,025,601; 6,141,096; 6,185,030; 6,201,639; 6,218,803; and 6,225,625, in U.S. Ser. No. 60/364,731 and in PCT Application PCT/US99/06097 (published as WO99/47964), each of which also is hereby incorporated by reference in its entirety for all purposes.

[0027] Methods and apparatus for signal detection and processing of intensity data are disclosed in, for example, U.S. Pat. Nos. 5,143,854, 5,547,839, 5,578,832, 5,631,734, 5,800,992, 5,834,758; 5,856,092, 5,902,723, 5,936,324, 5,981,956, 6,025,601, 6,090,555, 6,141,096, 6,185,030, 6,201,639; 6,218,803; and 6,225,625, in U.S. Ser. No. 60/364,731 and in PCT Application PCT/US99/06097 (published as WO99/47964), each of which also is hereby incorporated by reference in its entirety for all purposes.

[0028] The practice of the present invention may also employ conventional biology methods, software and systems. Computer software products of the invention typically include computer readable medium having computer-executable instructions for performing the logic steps of the method of the invention. Suitable computer readable medium include floppy disk, CD-ROM/DVD/DVD-ROM, hard-disk drive, flash memory, ROM/RAM, magnetic tapes and etc. The computer executable instructions may be written in a suitable computer language or combination of several languages. Basic computational biology methods are described in, e.g. Setubal and Meidanis et al., Introduction to Computational Biology Methods (PWS Publishing Company, Boston, 1997); Salzberg, Searles, Kasif, (Ed.), Computational Methods in Molecular Biology, (Elsevier, Amsterdam, 1998); Rashidi and Buehler, Bioinfornatics Basics: Application in Biological Science and Medicine (CRC Press, London, 2000) and Ouelette and Bzevanis Bioinformatics: A Practical Guide for Analysis of Gene and Proteins (Wiley & Sons, Inc., 2^{nd} ed., 2001). See U.S. Pat. No. 6,420,108.

[0029] The present invention may also make use of various computer program products and software for a variety of purposes, such as probe design, management of data, analysis, and instrument operation. See, U.S. Pat. Nos. 5,593,839, 5,795,716, 5,733,729, 5,974,164, 6,066,454, 6,090,555, 6,185,561, 6,188,783, 6,223,127, 6,229,911 and 6,308,170.

[0030] Additionally, the present invention may have preferred embodiments that include methods for providing genetic information over networks such as the Internet as shown in U.S. Ser. No. 10/063,559 (United States Publication No. US20020183936), 60/349,546, 60/376,003, 60/394,574 and 60/403,381.

b) Definitions

[0031] The term “array” as used herein refers to an intentionally created collection of molecules which can be prepared either synthetically or biosynthetically. The molecules in the array can be identical or different from each other. The array can assume a variety of formats, for example, libraries of soluble molecules; libraries of compounds tethered to resin beads, silica chips, or other solid supports.

[0032] Preferred arrays typically comprise a plurality of different nucleic acid probes that are coupled to a surface of one or more substrates in different, known or determinable locations. Arrays have been generally described in, for example, U.S. Pat. Nos. 5,143,854, 5,445,934, 5,744,305, 5,677,195, 5,800,992, 6,040,193, 5,424,186 and Fodor et al., Science, 251:767-777 (1991).

[0033] Arrays may generally be produced using a variety of techniques, such as mechanical synthesis methods or light directed synthesis methods that incorporate a combination of photolithographic methods and solid phase synthesis methods. Techniques for the synthesis of these arrays using mechanical synthesis methods are described in, e.g., U.S. Pat. Nos. 5,384,261, and 6,040,193. Arrays may be nucleic acids on beads, gels, polymeric surfaces, fibers such as fiber optics, glass or any other appropriate substrate. (See U.S. Pat. Nos. 5,770,358, 5,789,162, 5,708,153, 6,040,193 and 5,800,992.)

[0034] Arrays may be packaged in such a manner as to allow for diagnostic use or can be an all-inclusive device; e.g., U.S. Pat. Nos. 5,856,174 and 5,922,591. Preferred arrays are commercially available from Affymetrix (Santa Clara, Calif.) under the brand name GeneChip® and are directed to a variety of purposes, including genotyping and gene expression monitoring for a variety of eukaryotic and prokaryotic species.

[0035] The term “combinatorial synthesis strategy” as used herein refers to a combinatorial synthesis strategy is an ordered strategy for parallel synthesis of diverse polymer sequences by sequential addition of reagents which may be represented by a reactant matrix and a switch matrix, the product of which is a product matrix. A reactant matrix is a I column by m row matrix of the building blocks to be added. The switch matrix is all or a subset of the binary numbers, preferably ordered, between I and m arranged in columns. A “binary strategy” is one in which at least two successive steps illuminate a portion, often half, of a region of interest on the substrate. In a binary synthesis strategy, all possible compounds which can be formed from an ordered set of reactants are formed. In most preferred embodiments, binary synthesis refers to a synthesis strategy which also factors a previous addition step. For example, a strategy in which a switch matrix for a masking strategy halves regions that were previously illuminated, illuminating about half of the previously illuminated region and protecting the remaining half (while also protecting about half of previously protected regions and illuminating about half of previously protected regions). It will be recognized that binary rounds may be interspersed with non-binary rounds and that only a portion of a substrate may be subjected to a binary scheme. A combinatorial “masking” strategy is a synthesis which uses light or other spatially selective deprotecting or activating agents to remove protecting groups from materials for addition of other materials such as amino acids.

[0036] The term “complementary” as used herein refers to the hybridization or base pairing between nucleotides or nucleic acids, such as, for instance, between the two strands of a double stranded DNA molecule or between an oligonucleotide primer and a primer binding site on a single stranded nucleic acid to be sequenced or amplified. Complementary nucleotides are, generally, A and T (or A and U), or C and G. Two single stranded RNA or DNA molecules are said to be complementary when the nucleotides of one strand, optimally aligned and compared and with appropriate nucleotide insertions or deletions, pair with at least about 80% of the nucleotides of the other strand, usually at least about 90% to 95%, and more preferably from about 98 to 100%. Alternatively, complementarity exists when an RNA or DNA strand will hybridize under selective hybridization conditions to its complement. Typically, selective hybridization will occur when there is at least about 65% complementary over a stretch of at least 14 to 25 nucleotides, preferably at least about 75%, more preferably at least about 90% complementary. See, M. Kanehisa Nucleic Acids Res. 12:203 (1984).

[0037] The term “genome” as used herein is all the genetic material in the chromosomes of an organism. DNA derived from the genetic material in the chromosomes of a particular organism is genomic DNA. A genomic library is a collection of clones made from a set of randomly generated overlapping DNA fragments representing the entire genome of an organism.

[0038] The term “isolated nucleic acid” as used herein mean an object species invention that is the predominant species present (i.e., on a molar basis it is more abundant than any other individual species in the composition). Preferably, an isolated nucleic acid comprises at least about 50, 80 or 90% (on a molar basis) of all macromolecular species present. Most preferably, the object species is purified to essential homogeneity (contaminant species cannot be detected in the composition by conventional detection methods).

[0039] The phrase “massively parallel screening” refers to the simultaneous screening of from about 100, 1000, 10,000 or 100,000 to 1000, 10,000, 100,000, 1,000,000 or 3,000,000 or more different nucleic acid hybridizations.

[0040] The term “microtiter plates” as used herein refers to arrays of discrete wells that come in standard formats (96, 384 and 1536 wells) which are used for examination of the physical, chemical or biological characteristics of a quantity of samples in parallel.

[0041] The term “mixed population” or sometimes refer by “complex population” as used herein refers to any sample containing both desired and undesired nucleic acids. As a non-limiting example, a complex population of nucleic acids may be total genonic DNA, total genomic RNA or a combination thereof. Moreover, a complex population of nucleic acids may have been enriched for a given population but include other undesirable populations. For example, a complex population of nucleic acids may be a sample which has been enriched for desired messenger RNA (mRNA) sequences but still includes some undesired ribosomal RNA sequences (rRNA).

[0042] The term “mRNA” or sometimes refer by “mRNA transcripts” as used herein, include, but not limited to pre-mRNA transcript(s), transcript processing intermediates, mature mRNA(s) ready for translation and transcripts of the gene or genes, or nucleic acids derived from the mRNA transcript(s). Transcript processing may include splicing, editing and degradation. As used herein, a nucleic acid derived from an mRNA transcript refers to a nucleic acid for whose synthesis the mRNA transcript or a subsequence thereof has ultimately served as a template. Thus, a cDNA reverse transcribed from an mRNA, an RNA transcribed from that cDNA, a DNA amplified from the cDNA, an RNA transcribed from the amplified DNA, etc., are all derived from the mRNA transcript and detection of such derived products is indicative of the presence and/or abundance of the original transcript in a sample. Thus, mRNA derived samples include, but are not limited to, mRNA transcripts of the gene or genes, cDNA reverse transcribed from the mRNA, cRNA transcribed from the cDNA, DNA amplified from the genes, RNA transcribed from amplified DNA, and the like.

[0043] The term “nucleic acid library” or sometimes refer by “array” as used herein refers to an intentionally created collection of nucleic acids which can be prepared either synthetically or biosynthetically and screened for biological activity in a variety of different formats (for example, libraries of soluble molecules; and libraries of oligos tethered to resin beads, silica chips, or other solid supports). Additionally, the term “array” is meant to include those libraries of nucleic acids which can be prepared by spotting nucleic acids of essentially any length (for example, from 1 to about 1000 nucleotide monomers in length) onto a substrate. The term “nucleic acid” as used herein refers to a polymeric form of nucleotides of any length, either ribonucleotides, deoxyribonucleotides or peptide nucleic acids (PNAs), that comprise purine and pyrimidine bases, or other natural, chemically or biochemically modified, non-natural, or derivatized nucleotide bases. The backbone of the polynucleotide can comprise sugars and phosphate groups, as may typically be found in RNA or DNA, or modified or substituted sugar or phosphate groups. A polynucleotide may comprise modified nucleotides, such as methylated nucleotides and nucleotide analogs. The sequence of nucleotides may be interrupted by non-nucleotide components. Thus the terms nucleoside, nucleotide, deoxynucleoside and deoxynucleotide generally include analogs such as those described herein. These analogs are those molecules having some structural features in common with a naturally occurring nucleoside or nucleotide such that when incorporated into a nucleic acid or oligonucleoside sequence, they allow hybridization with a naturally occurring nucleic acid sequence in solution. Typically, these analogs are derived from naturally occurring nucleosides and nucleotides by replacing and/or modifying the base, the ribose or the phosphodiester moiety. The changes can be tailor made to stabilize or destabilize hybrid formation or enhance the specificity of hybridization with a complementary nucleic acid sequence as desired.

[0044] The term “nucleic acids” as used herein may include any polymer or oligomer of pyrimidine and purine bases, preferably cytosine, thymine, and uracil, and adenine and guanine, respectively. See Albert L. Lehninger, PRINCIPLES OF BIOCHEMISTRY, at 793-800 (Worth Pub. 1982). Indeed, the present invention contemplates any deoxyribonucleotide, ribonucleotide or peptide nucleic acid component, and any chemical variants thereof, such as methylated, hydroxymethylated or glucosylated forms of these bases, and the like. The polymers or oligomers may be heterogeneous or homogeneous in composition, and may be isolated from naturally-occurring sources or may be artificially or synthetically produced. In addition, the nucleic acids may be DNA or RNA, or a mixture thereof, and may exist permanently or transitionally in single-stranded or double-stranded form, including homoduplex, heteroduplex, and hybrid states.

[0045] The term “oligonucleotide” or sometimes refer by “polynucleotide” as used herein refers to a nucleic acid ranging from at least 2, preferable at least 8, and more preferably at least 20 nucleotides in length or a compound that specifically hybridizes to a polynucleotide. Polynucleotides of the present invention include sequences of deoxyribonucleic acid (DNA) or ribonucleic acid (RNA) which may be isolated from natural sources, recombinantly produced or artificially synthesized and mimetics thereof. A further example of a polynucleotide of the present invention may be peptide nucleic acid (PNA). The invention also encompasses situations in which there is a nontraditional base pairing such as Hoogsteen base pairing which has been identified in certain tRNA molecules and postulated to exist in a triple helix. “Polynucleotide” and “oligonucleotide” are used interchangeably in this application.

[0046] The term “primer” as used herein refers to a single-stranded oligonucleotide capable of acting as a point of initiation for template-directed DNA synthesis under suitable conditions for example, buffer and temperature, in the presence of four different nucleoside triphosphates and an agent for polymerization, such as, for example, DNA or RNA polymerase or reverse transcriptase. The length of the primer, in any given case, depends on, for example, the intended use of the primer, and generally ranges from 15 to 30 nucleotides. Short primer molecules generally require cooler temperatures to form sufficiently stable hybrid complexes with the template. A primer need not reflect the exact sequence of the template but must be sufficiently complementary to hybridize with such template. The primer site is the area of the template to which a primer hybridizes. The primer pair is a set of primers including a 5′ upstream primer that hybridizes with the 5′ end of the sequence to be amplified and a 3′ downstream primer that hybridizes with the complement of the 3′ end of the sequence to be amplified.

[0047] The term “probe” as used herein refers to a surface-immobilized molecule that can be recognized by a particular target. See U.S. Pat. No. 6,582,908 for an example of arrays having all possible combinations of probes with 10, 12, and more bases. Examples of probes that can be investigated by this invention include, but are not restricted to, agonists and antagonists for cell membrane receptors, toxins and venoms, viral epitopes, hormones (for example, opioid peptides, steroids, etc.), hormone receptors, peptides, enzymes, enzyme substrates, cofactors, drugs, lectins, sugars, oligonucleotides, nucleic acids, oligosaccharides, proteins, and monoclonal antibodies.

[0048] Perfect match: The term “match,” “perfect match,” “perfect match probe” or “perfect match control” refers to a nucleic acid that has a sequence that is designed to be perfectly complementary to a particular target sequence or portion thereof. For example, if the target sequence is 5′-GATTGCATA-3′ the perfect complement is 5′-TATGCAATC-3′. Where the target sequence is longer than the probe the probe is typically perfectly complementary to a portion (subsequence) of the target sequence. For example, if the target sequence is a fragment that is 800 bases, the perfect match probe may be perfectly complementary to a 25 base region of the target. A perfect match (PM) probe can be a “test probe”, a “normalization control” probe, an expression level control probe and the like. A perfect match control or perfect match is, however, distinguished from a “mismatch” or “mismatch probe.”

[0049] Mismatch: The term “mismatch,” “mismatch control” or “mismatch probe” refers to a nucleic acid whose sequence is deliberately designed not to be perfectly complementary to a particular target sequence. As a non-limiting example, for each mismatch (MM) control in a high-density probe array there typically exists a corresponding perfect match (PM) probe that is perfectly complementary to the same particular target sequence. The mismatch may comprise one or more bases. While the mismatch(es) may be located anywhere in the mismatch probe, terminal mismatches are less desirable because a terminal mismatch is less likely to prevent hybridization of the target sequence. In a particularly preferred embodiment, the mismatch is located at the center of the probe, for example if the probe is 25 bases the mismatch position is position 13, also termed the central position, such that the mismatch is most likely to destabilize the duplex with the target sequence under the test hybridization conditions. A homo-mismatch substitutes an adenine (A) for a thymine (T) and vice versa and a guanine (G) for a cytosine (C) and vice versa. For example, if the target sequence was: 5′-AGGTCCA-3′, a probe designed with a single homo-mismatch at the central, or fourth position, would result in the following sequence: 3′-TCCTGGT-5′, the PM probe would be 3′-TCCAGGT-5′.

[0050] The term “target sequence”, “target nucleic acid” or “target” refers to a nucleic acid of interest. The target sequence may or may not be of biological significance. Typically, though not always, it is the significance of the target sequence which is being studied in a particular experiment. As non-limiting examples, target sequences may include regions of genomic DNA which are believed to contain one or more polymorphic sites, DNA encoding or believed to encode genes or portions of genes of known or unknown function, DNA encoding or believed to encode proteins or portions of proteins of known or unknown function, DNA encoding or believed to encode regulatory regions such as promoter sequences, splicing signals, polyadenylation signals, etc.

[0051] Target sequences may be interrogated by hybridization to an array. The array may be specially designed to interrogate one or more selected target sequence. The array may contain a collection of probes that are designed to hybridize to a region of the target sequence or its complement. Different probe sequences are located at spatially addressable locations on the array. For genotyping a single polymorphic site probes that match the sequence of each allele may be included. At least one perfect match probe, which is exactly complementary to the polymorphic base and to a region surrounding the polymorphic base, may be included for each allele. In a preferred embodiment the array comprises probes that include 12 bases on either side of the SNP. Multiple perfect match probes may be included as well as mismatch probes.

[0052] Hybridization probes are oligonucleotides capable of binding in a base-specific manner to a complementary strand of nucleic acid. Such probes include peptide nucleic acids, as described in Nielsen et al., Science 254, 1497-1500 (1991), and other nucleic acid analogs and nucleic acid mimetics. See U.S. Pat. application Ser. No. 08/630,427.

C. Human Exon Arrays

[0053] The RNA transcripts of most eukaryotic genes undergo a series of processing reactions. Often this involves removal of unwanted internal segments and rejoining of the remaining segments in a process known as RNA splicing. The 5′ and 3′ ends of the transcripts are typically also processed by, for example, capping at the 5′ end and polyadenylation of the 3′ end. The resulting processed transcript will be used to generate an expression product, which may be either a polypeptide or a noncoding RNA. Generally for vertebrate genes, only a small portion of the sequence of the gene is used to generate the final product. For most genes, the genetic information that will be present in the final transcript (exons) is separated by intervening sequences that do not contribute genetic information directly to the final product (introns) and are typically removed during processing of the primary transcript to the mature transcript. For genes that contain multiple exons the primary transcript contains sequences that are complementary to both the exons and introns of the gene. The RNA transcript undergoes splicing, a process that excises the introns and joins the exons.

[0054] The signals that define the boundaries of introns and exons are not completely understood so predicting exons and introns from primary sequence is difficult. Many introns start with GT (GU in the RNA) and end with AG (GT-AG rule), but this alone is not sufficient to define introns and there is at least one other minor class of introns that start with AT and end with AC (AU-AC spliceosome), see Tarn and Steitz, Trends Biochem. Sci. 22:132-137 (1997). Introns also contain a conserved branch site that includes an A residue.

[0055] Processing of primary transcripts, along with the possible use of alternative promoters and alternative polyadenylation sites, allows a single gene to generate many different mature RNA isoforms, by varying the pattern of splicing in a process known as alternative splicing. In this way a single gene may generate a dozen or more different mRNAs. The human dystrophin gene is one example where different promoters are used to to generate different protein isoforms. The gene has at least 7 different promoters that can be used and has at least 79 exons. Alternative splicing is also known to occur in the 3′ end of the gene.

[0056] Variation in mRNA structure may result from, for example, intron retention, competing 5′ splice sites, competing 3′ splice sites, multiple promoters, multiple poly(A) sites, cassette exons (exon skipping) and mutually exclusive exons. See, Roberts and Smith, Curr. Opin. Chem. Biol. 6:375-383 (2002). These changes may be regulated, for example, depending on tissue type, sexual genotype, cellular differentiation or activation of cell signaling pathways.

[0057] It is currently thought that more than half of all human genes are alternatively spliced, allowing alternative pre-mRNA splicing to account for much of the diversity of the proteins present in human cells. See, for example, Lareau et al. Curr. Op. Struct. Biol. 14:273-282 (2004), Boue et al, Bioessays 25:1031-1034 (2003), Modrek and Lee, Nat. Genet. 30:13-19 (2002), Mironov et al., Genome Res 9:1288-1293 (1999), and Modrek et al., Nucleic Acid Res. 29:2850-2859 (2001). Other mammals such as rats and mice have similar levels of alternative splicing. Alternative splicing functions as a regulatory process that generates biological complexity by controlling the expression of proteins. Splicing analysis using microarrays has been reported by, for example, Clark et al. Science 296: 907-910 (2002) and Johnson et al. Science 302: 2141-2144 (2003).

[0058] Although there are approximately 3,000 human genes known to have only a single exon, the majority of known human genes are multi-exon genes and have 2 or more exons. On average human genes have 8-10 exons with an average exon length of about 170 bp (Sakharkar et al. In Silico Biol. 4, 0032 (2004). There are a number of human genes that have more than 100 exons, for example, Nebulin with 148 exons. Many different mRNAs may be formed from the same gene, varying, for example, in the presence of one or more exons. Methods and arrays to detect and measure the expression levels of individual forms of RNA from the same gene are described herein.

[0059] In one aspect arrays that include a probe set for each exon in each of at least 1,000, 2,000, 3,000, 5,000, 10,000, 15,000, 20,000 or 25,000 human genes are disclosed. The arrays may include a probe set for each exon in each of at least 1,000, 2,000, 3,000 or 5,000 genes where each gene has at least 2, 3, 4, or 5 to 10 exons, for example, a probe set for each exon of at least 3 exons in at least 3,000 genes where each gene has at least 3 exons. In a preferred aspect there is at least one probe set that is specific for each known exon in each known gene in the human genome. Previous array designs utilized amplification methods that resulted in a bias toward the amplification of the 3′ end of the RNA and probe sets were directed at regions that were within about 600 bases of the 3′ end of the mRNA. This typically includes the 3′ untranslated region and the most 3′ exon or exons. Probes to exons that were nearer to the 5′ end of the RNA were not included unless the RNA was short, for example, less than 600 bases. The WTA and small WTA methods of amplification of RNA utilize random primers and are therefore not biased toward the 3′ end of the RNA like methods that use oligo dT primers. Using unbiased amplification methods all exons of a gene may be detected and measured and probes may be accordingly designed to detect exons throughout the RNA, including the 5′ exons. Because each exon can be individually detected differences in expression levels of isoforms may be measured.

[0060] An example of a method to detect the use of mutually exclusive exons is shown in FIG. 1. The primary transcript (100) contains 4 exons, exons 1-4. The transcript can be spliced to generate a first RNA isoform (103) or a second RNA isoform (105). The first (103) and second (105) isoforms both contain exons 1 and 4. The first isoform contains exon 3 but not exon 2 and the second isoform contains exon 2 but not exon 3. A probe (or probe set) to exon 1 (110) and a probe to exon 4 (120) will hybridize to both isoforms, while a probe to exon 3 (115) will hybridize to the first isoform and not the second and a probe to exon 2 (140) will hybridize to the second isoform and not the first. Probes (115) and (140) may be used to differentially detect the two isoforms while probes (110) and 120) may be used to detect both isoforms but do not distinguish between the two isoforms. The signal for the probes to exons 1 and 4 results from the combination of both forms, while the probes to exons 2 and 3 measure the amount of the specific isoforms.

[0061] In one aspect probe arrays that have probe sets that are complementary to individual exons or subsequences of exons are disclosed. Probe sets may have 1, 2, 3, 4, 5, 6, 7 to 10 or more probes. Each probe in the probe set may differ from the other probes in the probe set by at least one base. The probes in a probe set are perfectly complementary to different regions of the same predicted exon or subsequence of an exon. In preferred aspects the probes in a given probe set are selected so that they may be used to detect the presence or absence of a specific exon in RNA or a specific processing event. Arrays including exon specific probe sets may be used for simultaneous measurement of relative gene expression levels of human genes, including genes that are alternatively spliced and different mature isoforms of mature RNA. Probe sets are included on the array to individually detect each of a plurality of known and predicted exons. Alternatively spliced products may be detected and distinguished using probe sets that are targeted to individual exons or to one or more regions within an exon. The probes of the array may be complementary to 20 to 60 contiguous bases of a selected gene, in a preferred aspect the probes are 25 nucleotides in length and are complementary to 25 contiguous bases in the genome.

[0062] In some aspects, probes may be present on the array in pairs, a perfect match probe and a mismatch probe, the mismatch may be used as a control to measure discrimination and specificity. Antisense probes that are derived from the opposite strand of the gene may also be included. Other control sequence probes may also be included. For example, control probes may be included to assay for manufacturing defects, and to detect problems with sample preparation or hybridization.

[0063] In one aspect the disclosed arrays may be used, for example, to identify and measure tissue-specific splicing, to verify the existence of splice variants, to identify novel splice variants and to estimate gene expression levels, including the expression of different isoforms. Hybridization intensity data from exon, probes can be deconvoluted using a computer system and the used to determine the expression levels of alternatively spliced forms of human genes. Different alternatively spliced forms contain different exons or portions of exons-resulting from the use of alternative splice sites within an individual exon.

[0064] In one aspect a high density probe array is disclosed that includes more than 1,000,000 different features, each feature containing a different sequence. Each feature may have many copies, for example more than 1,000,000 copies, of the probe sequence. In one aspect the array includes probes that have sequences corresponding to the sequences in the sequence listing, SEQ ID NOs 1-6, 102, 149. In one aspect the majority of the probes on the array are complementary to known or predicted exons or subsequences of known or predicted exons in the human genome. The array may also include probes that are complementary to known or predicted introns and control probes. Preferably the array includes at least one probe set that is complementary to each of more than 5,000, 10,000, 50,000, 100,000, 500,000, 1,000,000, 1,250,000 or 2,000,000 different known or predicted exons or probe selection regions (PSRs).

[0065] In one embodiment an array comprising a subset of SEQ ID NO: 1-6, 102, 149 is disclosed. The subset preferably includes at least 100,000, 200,000, 500,000, 1,000,000, 2,000,000 or 5,000,000 different sequence probes wherein each probe is one of the sequences of SEQ ID NO: 1-6, 102, 149. Each probe sequence is present in a feature on the array and the location of each feature is known or determinable. The probes may be attached to a single solid support so they can be monitored simultaneously in a single experiment or the probes may be divided so that they are on two or more solid supports. The arrays may also be attached to pegs for high throughput analysis. The probes may be attached to beads and the beads may be associated with a solid support. One of skill in the art will appreciate that the method of amplification or processing of the sample prior to hybridization will determine which strand of the probe is to be used on the array. For example, if the sample will be amplified and a sense product hybridized to the array the probes should be complementary to the sense product. If an antisense product is to be hybridized to the array the probes should be complementary to the antisense product. As such it should be understood that in addition to SEQ ID NO: 1-6, 102, 149 the complements of these sequences may also be included on an array.

[0066] In one aspect an array that includes at least 100,000 different features wherein each feature includes a different sequence probe that contains at least 15 nucleotides from one of the sequences listed in SEQ ID NO: 1-6, 102, 149 is provided. In one aspect the probes may be longer than the sequence provided in the sequence listing, for example, the probes may be 26 to 100 bases in length. The additional sequence may be sequence that is immediately adjacent to the provided sequence in the human genome, for example, bases that are immediately upstream of downstream of the provided sequence. Preferably he probe is complementary to 15 to 100 contiguous bases in the human genome.

[0067] Probe sequences were determined using the high quality human genome assembly (July 2003, hg16, build 34) and a variety of genome annotations including annotations inferred from human, mouse, and rat cDNAs. Publicly available gene annotation sets were also used, including Ensembl, Genscan, SLAM, TwinScan and Vega. In a preferred aspect each probe set includes 1, 2, 3, or 4 to 10 perfect match probes. In a preferred aspect more than 50, 60, 75, 80 or 90% of the probe sets will have at least 4 probes. Probe sets may also include more than 10 perfect match probes, for example, 11, 12, or 13-20 probes. In one aspect a common set of control probes is used for background correction instead of specific mismatch probes for each perfect match probe. Probes in a probe set may be complementary to overlapping regions.

[0068] In one aspect probes were selected for the array by consolidating input sequences and annotations onto the human genome and into transcript clusters. Exon clusters were identified from the transcript clusters and Probe Selection Regions (PSRs) were identified from the exon clusters (FIG. 2). Individual probe sets were designed to be complementary to the PSRs. Each probe set including at least 4 different probes that are complementary to the same PSR. The probes in a probe set may overlap but differ from each of the other probes in the probe set by at least one base. The PSRs were selected to have the property that they are contiguous and do not overlap in genome space. An example of PSRs resulting from the consolidation process is shown in FIG. 3. A collection of input annotations from a plurality of sources were projected onto the genome to infer transcribed regions. Internal splice sites, polyadenylation sites (indicated by triangle) and CDS start and stop positions may be used to infer “hard edges” which are may be used to define the boundary of a PSR. This may result in the fragmentation of a contiguous piece of transcribed sequence (an exon cluster) into multiple PSRs. Each PSR may represent a different possible splicing or processing event or it may be the result of errors in the available annotations. Exon clusters may be further grouped into transcript clusters based on overlapping boundaries of input annotations. A transcript cluster may include more than one gene if the genes overlap. A gene may also be split into multiple transcript clusters if there is fragmented evidence of the gene in the input data source.

[0069] Many annotations are incomplete at the 5′ or 3′ end so in many aspects the outer boundary of a transcript are not treated as hard edges but are treated as “soft edges” which may still be used to define the boundary of a PSR. A single gene that has, for example, 10 exons, may be represented on the array by more than 10 probe sets, each probe set being complementary to a different PSR. One or more of the exons may be divided into two or more PSRs based on variable evidence of the boundary of the exon in the input data.

[0070] Probe sequences were chosen to be complementary to a plurality of human exons. Probe sequences listed in SEQ ID NOS 1-6, 102, 149 corresponds to sequences in the GenBank database. The GenBank sequence database may be searched through the use of computer programs such as BLAST to identify the region of the genome that is complementary to a probe. Access to BLAST is available to the public through the internet at, for example, http://www.ncbi.nim.nih.gov. One of skill in the art will be familiar with the use of the BLAST program to obtain information about particular sequences in order to, for example, determine the GenBank accession number, determine the gene from which the sequence is derived, to determine other genes and species which contain similar sequences and to determine the degree of similarity between one sequence and another.

[0071] When measuring expression one of skill in the art will recognize that the probes of the array should be designed to be complementary to the sequence to be detected. This may vary depending on which amplification method is used. For example, one method of amplification calls for reverse transcription of the mRNA using an oligo-dT-T7 primer. Double stranded cDNA with an RNA polymerase promoter is then generated and antisense RNA is transcribed and labeled. The antisense RNA is then hybridized to the array. The antisense RNA is complementary to the mRNA so the sense probe on the array that is designed to hybridize to the antisense RNA is identical in sequence to a portion of the starting mRNA. In another method the amplified RNA to be hybridized to the array is sense, meaning that it has the same sequence as the starting mRNA. In other embodiments the amplification product that is hybridized to the array may be cDNA that may be of the sense (same as) or antisense (complement of) orientation relative to the starting mRNA.

[0072] In preferred embodiments the mRNA to be analyzed is amplified and labeled using an amplification method that has reduced bias of amplification. Methods of amplification may preferentially amplify selected regions of nucleic acid, for example, amplification of mRNA using oligo-dT primers preferentially amplifies the 3′ end of mRNA because reverse transcription is always primed from the 3′ end. Methods that prime reverse transcription using random primers, for example, show reduced bias toward the 3′ end of mRNA. Other methods for amplification are disclosed in U.S. Patent Application No. 60/498,023, Ser. Nos. 10/917,643, 10/951,983 and 10/090,320 which are each incorporated herein by reference in their entireties.

[0073] In one aspect the RNA to be analyzed is reverse transcribed in a first cycle to generate first strand cDNA using a T7-(N)₆ primer. The primer may include a 5′ T7 promoter sequence and a 3′ random segment. Second strand cDNA is then synthesized and cRNA is generated by in vitro transcription using T7 RNA polymerase and un-labeled ribonucleotides. The cRNA (antisense RNA), which may first be cleaned, is then used in a second cycle to synthesize a second round of first strand cDNA using random primers and in the presence of dUTP. Then second strand cDNA is synthesized also in the presence of dUTP. The double stranded cDNA from the second cycle, with dUTP incorporated is fragmented using uracil DNA glycosylase and an AP endonuclease, such as APE 1. The fragments may be end labeled with a biotin-labeled compound in the presence of terminal deoxytransferase. The labeled fragments may be hybridized to an array. In some aspects polyadenylated controls are added to the total RNA sample prior to the first cycle first strand cDNA synthesis step.

[0074] The present invention provides a pool of unique nucleotide sequences complementary to human exon sequences in particular embodiments which alone, or in combinations of 1,000 or more, 10,000 or more, or 100,000 or more, can be used for a variety of applications. Probe sets are complementary to a single exon or to a subsequence of an exon. Genes with more than one exon are represented on the array by more than one probe set, each probe set being complementary to a different exon. For example, if a gene has 10 different exons the array will include preferably include a unique probe set for each of the 10 exons. In some aspects a single exon will be represented by more than one probe set.

[0075] In one embodiment, the present invention provides for a pool of unique nucleotide sequences which are complementary to alternatively spliced human mRNAs formed into a high density array of probes suitable for array based massive parallel gene expression. Array based methods for monitoring gene expression are disclosed and discussed in detail in U.S. Pat. No. 5,800,992, U.S. Pat. No. 6,309,822, and PCT Application WO 92/10588 (published on Jun. 25, 1992). Generally those methods of monitoring gene expression involve (1) providing a pool of target nucleic acids comprising RNA transcript(s) of one or more target gene(s), or nucleic acids derived from the RNA transcript(s); (2) hybridizing the nucleic acid sample to a high density array of probes and (3) detecting the hybridized nucleic acids and calculating a relative expression (transcription, RNA processing or degradation) level.

[0076] The development of Very Large Scale Immobilized Polymer Synthesis or VLSIPS™ technology has provided methods for making very large arrays of nucleic acid probes in very small arrays. See U.S. Pat. No. 5,143,854 and PCT Patent Publication Nos. WO 90/15070 and WO 92/10092, and Fodor et al., Science, 251, 767-77 (1991), each of which is incorporated herein by reference. U.S. Pat. No. 5,800,992, describes methods for making arrays of nucleic acid probes that can be used to detect the presence of a nucleic acid containing a specific nucleotide sequence. Methods of forming high density arrays of nucleic acids, peptides and other polymer sequences with a minimal number of synthetic steps are known. The nucleic acid array can be synthesized on a solid substrate by a variety of methods, including, but not limited to, light-directed chemical coupling, and mechanically directed coupling.

[0077] In a preferred detection method, the array of immobilized nucleic acids, or probes, is contacted with a sample containing target nucleic acids, to which a flourescent label is attached. Target nucleic acids hybridize to the probes on the array and any non-hybridized nucleic acids are removed. The array containing the hybridized target nucleic acids are exposed to light which excites the flourescent label. The resulting flourescent intensity, or brightness, is detected. Relative brightness is used to determine which probe is the best candidate for the perfect match to the hybridized target nucleic acid because flourescent intensity (brightness) corresponds to binding affinity. Once the position of the perfect match probe is known, the sequence of the hybridized target nucleic is known because the sequence and position of the probe is known.

[0078] In another embodiment, the current invention may be combined with known methods to monitor expression levels of alternatively spliced forms of genes in a wide variety of contexts. For example, where the effects of a drug on gene expression are to be determined, the drug will be administered to an organism, a tissue sample, or a cell and the gene expression levels will be analyzed. For example, nucleic acids are isolated from the treated tissue sample, cell, or a biological sample from the organism and from an untreated organism tissue sample or cell, hybridized to a high density probe array containing probes directed to the gene of interest and the expression levels of that gene are determined. The types of drugs that may be used in these types of experiments include, but are not limited to, antibiotics, antivirals, narcotics, anti-cancer drugs, tumor suppressing drugs, and any chemical composition which may affect the expression of genes in vivo or in vitro. The current invention is particularly suited to be used in the types of analyses described by, for example, pending U.S. Pat. No. 6,309,822 and PCT Application No. 98/11223, each of which is incorporated by reference in its entirety for all purposes. As described in Wodicka et al., Nature Biotechnology 15 (1997), hereby incorporated by reference in its entirety for all purposes, because mRNA hybridization correlates to gene expression level, hybridization patterns can be compared to determine differential gene expression. As non-limiting examples: hybridization patterns from samples treated with certain types of drugs may be compared to hybridization patterns from samples which have not been treated or which have been treated with a different drug; hybridization patterns for samples infected with a specific virus may be compared against hybridization patterns from non-infected samples; hybridization patterns for samples with cancer may be compared against hybridization patterns for samples without cancer; hybridization patterns of samples from cancerous cells which have been treated with a tumor suppressing drug may be compared against untreated cancerous cells, etc. Zhang et al., Science 276 1268-1272, hereby incorporated by reference in its entirety for all purposes, provides an example of how gene expression data can provide a great deal of insight into cancer research. One skilled in the art will appreciate that a wide range of applications will be available using 2 or more, 10 or more, 100 or more, 1000 or more, 10,000 or more or 100,000 or more of the SEQ ID Nos. 1-6, 102, 149 sequences as probes for gene expression analysis.

[0079] In one embodiment, the current invention provides a pool of unique nucleic acid sequences which can be used for parallel analysis of gene expression and alternative splicing under selective conditions. Without wishing to be limited, genetic selection under selective conditions could include: variation in the temperature of the organism's environment; variation in pH levels in the organism's environment; variation in an organism's food (type, texture, amount etc.); variation in an organism's surroundings; etc. Arrays, such as those in the present invention, can be used to determine whether gene expression is altered when an organism is exposed to selective conditions.

[0080] In one aspect the probes of the exon probe sets are on a high density probe array. The array includes more than 100,000, more than 1,000,000 or more than 5,000,000 different sequence oligonucleotide probes immobilized on a single solid support or multiple solid supports. Each different oligonucleotide is preferably localized in a predetermined or determinable region of the solid support and the density of the different oligonucleotides may be greater than about 10,000, 200,000, 5,00,000, 1,000,000, 2,500,000 or 5,000,000 100, 1000, 10,000, or 1,000,000 different oligonucleotides per 1 cm² of the solid support or greater than about 100, 1000, 10,000, or 1,000,000 different oligonucucleotides per 6 mm² of the solid support. Each different oligonucleotide may be a different feature of the array and each feature may be approximately 25, 18, 11, 8, 5, 2 or 1 microns square. The oligonucleotides may be 15 to 20, 21 to 25, 26 to 30, 31 to 40, 40 to 80 or 15 to 100 bases in length.

[0081] In one aspect, the hybridized nucleic acids are detected by detecting one or more labels attached to the sample nucleic acids. The labels may be incorporated by any of a number of means well known to those of skill in the art. In one embodiment, the label is simultaneously incorporated during the amplification step in the preparation of the sample nucleic acids. In a preferred aspect the amplification method results in a DNA target for hybridization and the DNA is fragmented and end labeled using a terminal transferase.

[0082] Alternatively, a label may be added directly to the original nucleic acid sample (e.g., mRNA, polyA mRNA, cDNA, etc.) or to the amplification product after the amplification is completed. Means of attaching labels to nucleic acids are well known to those of skill in the art and include, for example nick translation or end-labeling (e.g. with a labeled RNA) by kinasing of the nucleic acid and subsequent attachment (ligation) of a nucleic acid linker joining the sample nucleic acid to a label (e.g., a fluorophore).

[0083] Detectable labels suitable for use in the present invention include any composition detectable by spectroscopic, photochemical, biochemical, immunochemical, electrical, optical or chemical means. Useful labels in the present invention include biotin for staining with labeled streptavidin conjugate, magnetic beads (e.g., Dynabeads™), fluorescent dyes (e.g., fluorescein, texas red, rhodamine, green fluorescent protein, and the like), radiolabels (e.g., ³H, ¹²⁵I, ³⁵S, ¹⁴C, or ³²P), phosphorescent labels, enzymes (e.g., horse radish peroxidase, alkaline phosphatase and others commonly used in an ELISA), and colorimetric labels such as colloidal gold or colored glass or plastic (e.g., polystyrene, polypropylene, latex, etc.) beads. Quantum dots may also be used for labeling and detection. Patents teaching the use of such labels include U.S. Pat. Nos. 3,817,837; 3,850,752; 3,939,350; 3,996,345; 4,277,437; 4,275,149; and 4,366,241, each of which is hereby incorporated by reference in its entirety for all purposes.

[0084] Means of detecting such labels are well known to those of skill in the art. Thus, for example, radiolabels may be detected using photographic film or scintillation counters, fluorescent markers may be detected using a photodetector to detect emitted light. Enzymatic labels are typically detected by providing the enzyme with a substrate and detecting the reaction product produced by the action of the enzyme on the substrate, and calorimetric labels are detected by simply visualizing the colored label.

[0085] The label may be added to the target nucleic acid(s) prior to, or after the hybridization. So called “direct labels” are detectable labels that are directly attached to or incorporated into the target nucleic acid prior to hybridization. In contrast, so called “indirect labels” are joined to the hybrid duplex after hybridization. Often, the indirect label is attached to a binding moiety that has been attached to the target nucleic acid prior to the hybridization. Thus, for example, the target nucleic acid may be biotinylated before the hybridization. After hybridization, an aviden-conjugated fluorophore will bind the biotin bearing hybrid duplexes providing a label that is easily detected. For a detailed review of methods of labeling nucleic acids and detecting labeled hybridized nucleic acids see Laboratory Techniques in Biochemistry and Molecular Biology, Vol. 24: Hybridization With Nucleic Acid Probes, P. Tijssen, ed. Elsevier, N.Y., (1993), which is hereby incorporated by reference in its entirety for all purposes.

[0086] Arrays may be designed so that the array has probe sets that include 1, 2, 4 or 6 or more perfect match probes that are each complementary to a predicted exon of a gene. Many genes contain multiple exons and preferably a probe set is included for each exon. Probe sets may be designed to recognize a single exon or a single intron. An array with probe sets complementary to more than 5,000, 10,000, 30,000, 50,000, 75,000 or 100,000 exons is disclosed.

[0087] In one aspect a pool of unique nucleic acid sequences which are complementary to exons in human genes are disclosed. These sequences can be used for a variety of types of analyses, including analysis of alternative splicing and measurement of gene expression. An array to detect alternatively splicing, comprising probe sets to exons that are alternatively spliced is also disclosed. Some exons may have alternative 5′ or 3′ splice sites resulting in alternative forms of the exon being present in alternative spliced forms and probe sets may be designed to detect alternative forms of a single exon. Probe sets to detect retained introns, mutually exclusive exons, alternative promoter sites and alternative polyadenylation sites may also be included.

[0088] In one aspect probe sets are designed to be complementary to regions that are within exons or PSRs. In one aspect probe sets are designed to interrogate PSRs that are 25 bp or greater. In another aspect probe sets are also included for PSRs that are less than 25 bp. In another aspect splice events may be interrogated with junction probe sets. Exon junction probe sets include probes that spanning multiple exons which are not contiguous on the genome. Exon-intron junction probe sets span the junction between an exon and an intron. Junction probe sets may be used to detect specific splicing events such as the joining of a first and second exon. Some exons or PSRs may be very short, for example, 1, 2, 3 or 4-24 bp. These exons may be detected by junction probes that include the small exon or PSR and flanking exon sequence that is joined to the small exon or PSR by splicing. The junction probe spans the PSR and flanking sequence from the upstream or downstream PSR.

[0089] In one aspect probe coverage varies from gene to gene depending on how many exons (or more specifically PSRs) a gene has. As such, some single exon transcripts may have fewer than ten probes, although in the array described in Example 1 the majority of the putative full-length mRNAs are covered by 10 or more probes.

### EXAMPLE

[0090] Design of HuExon 1.0 st array. The design concept was to tile a probe set against every potential exon in the entire human genome. The resulting array provides a tool for analyzing the expression of multiple variant transcripts generated from the same gene. The array includes more than 5 million features and more than 1.4 million probe sets on a single contiguous solid support. Genome assemblies used to design the HuExon 1.0 st array included human hg16, July 2003, Mouse mm4, October 2003, and Rat rn3, June 2003. The source for each was the UCSC genome web site. The following sources were used for cDNAs: GenBank release 139 (Dec. 15, 2003), RefSeq Cumulative Update (Feb. 7, 2004), dbEST (Feb. 5, 2004), WUSTL EST Traces (Jan. 30, 2004) and Entrez Query for recent human mRNA sequence submissions (Jun. 7, 2004). Table 1 shows the numbers of cDNA sequences from each source used to design the array.

TABLE 1

| | Reference | # Human |
|---|---|---|
| cDNA Source | Name | Sequences |
| Genbank | fl | 46,753 |
| mRNAs | | |
| RefSeg mRNAs | fl | 34,933 |
| Genbank | mrna | 86,420 |
| mRNAs | | |
| Genbank High | mrna | 7,732 |
| Throughput | | |
| mRNAs | | |
| dbESTs | est | 5,471,625 |

[0091] Table 2 shows publicly available gene annotation sets that were also used in the design of the HuExon 1.0 st array. Generally four perfect match probes were designed for each probe set and a common set of probes was designed for background correction of a plurality of probe sets instead of specific mismatch probes for each probe set.

TABLE 2

| Annotation | Internal Name | Date | Data Source | # Transcripts | # Exons |
|---|---|---|---|---|---|
| Ensembl | ensGene | May 10, | ensembl | 35,685 | 325,353 |
| V21.34d.1 | | 2004 | | | |
| GeneID | geneid | Jun. 15, | UCSC | 32,255 | 216,731 |
| | | 2004 | | | |
| Genscan | genscan | Mar. 12, | UCSC | 42,974 | 326,300 |
| | | 2004 | | | |
| Genscan | genscanSubopt | Mar. 17, | UCSC | | 518,038 |
| suboptimal | | 2004 | | | |
| exons | | | | | |
| Exoniphy | exoniphy | May 25, | UCSC | | 184,616 |
| | | 2004 | | | |
| RNA Gene | rnaGene | Jun. 16, | UCSC | | 7,220 |
| | | 2004 | | | |
| Mitomap | mitomap | | | | 72 |
| Micro RNA | microRNAregistry | Apr. 8, 2004 | UCSC | | 187 |
| Registry | | | | | |
| SPG Gene | spgGene | Mar. 6, | UCSC | 42,880 | 236,382 |
| | | 2004 | | | |
| Twinscan | twinscan | Jun. 15, | UCSC | 21,369 | 193,454 |
| | | 2004 | | | |
| Vega Gene | vegaGene | Mar. 12, | UCSC | 11,700 | 80,546 |
| | | 2004 | | | |
| Vega Pseudo | vegaPseudoGene | Mar. 12, | UCSC | 3,071 | 5,125 |
| Gene | | 2004 | | | |

[0092] The input sequences and annotations were consolidated onto the genome into probe selection regions (PSRs). For the HuExon 1.0 st array design PSRs have the property that they are contiguous and do not overlap in genome space. For the consolidation process all of the input annotations were projected onto the genome to infer transcribed exon regions versus intronic and intergenic regions. The transcribed overlapping exon blocks or exon clusters were further fragmented into individual PSRs when “hard edges” were observed. Hard edges are inferred from 3′ and 5′ splice sites, coding region start and stop positions, and polyadenylation sites. Exon clusters were further grouped into transcript clusters based on overlapping boundaries of input annotations. A transcript cluster may include more than one gene if those genes overlap and a gene may be split into multiple transcript clusters if there is only partial fragmented evidence of that gene in the input data.

[0093] The consolidation process leveraged several metrics that may be varied. The metrics were adjusted for each annotation source to provide sufficient fragmentation of exon clusters into PSRs but to avoid over fragmentation due to error and noise in the input annotation sources. In most cases the outer bounds of the transcript annotation were not treated as hard edges, defining the boundary of a PSR, because of the assumption that many annotations are incomplete at the 5′ or 3′ ends or both. Internal splice sites in the input data set were usually treated as hard edges. Notable exceptions were the syntenic cDNA content from mouse and rat and ESTs which contained non-consensus splice sites. The syntenic content from mouse and rat has a tendency to be fragmented, thus the syntenic content was used only to infer transcribed regions, not splice events. For the EST data we found that using ESTs with non-consensus splice sites to infer transcribed regions, but not to infer splice events, significantly reduced over-fragmentation in highly expressed genes which have thousands and even tens of thousands of EST records. For ensembl and putative full-length mRNA based annotations the coding start and stops were treated as hard edges. This helps to ensure that there is probe coverage in the coding portion of the terminal exons. This ensures better probe coverage for single exon protein coding genes and helps mitigate possible over-extension of the terminal exons by other annotation sources. It should be noted that the coding region start or stop is not treated as a hard edge when the coding region start or stop corresponds to the transcript start or stop. Small gaps in the annotations relative to the genomic coordinates were ignored and the ends of some of the cDNA based annotations were trimmed to prevent bad alignment of extra bases in the cDNA sequence that may result in aberrant hard edges. In addition to these runs, there was no hard edge applied when the splice site inferred by a cDNA alignment contained unaligned cDNA sequence.

[0094] The design resulted in 1,796,124 PSRs from 1,084,639 exon clusters, (overlapping set of exon variants) grouped into 224,158 transcript clusters (overlapping set of annotations based on transcript bounds on the genome). A large number of very small PSRs, less than 10 bp, resulted primarily from noise in the cDNA sequence set (particularly ESTs). The median PSR length was 93 bp. Probe sets were selected against those PSRs greater than 24 bp; this set has a median PSR length of 123 bp. Following probe selection, 1,408,276 probe selection regions representing 996,828 exon clusters and 211,625 transcript clusters are represented on the HuExon 1.0 st array by 1,408,276 probe sets.

[0095] About half of the probe selection regions were based on a single type of annotation. Most of these single annotation type PSRs are derived from ESTs and Genscan predictions. About a quarter of the array content is based solely on ESTs and about a quarter based solely on Genscan predictions; the other half of the array consists primarily of content based on a combination of annotation sources. Roughly a quarter of the PSRs that are only supported by EST evidence are supported by more than one EST. When examining the content of the array by the number of supporting annotations from any annotation type a similar picture emerges with a little over half of the array is supported by only a single annotation and the other half of the array is supported by multiple annotations. Most of the PSRs supported by only a single annotation are from Genscan and EST annotations.

[0096] In one aspect probe sets were selected against each of the PSRs using the same probe model and probe selection process used for previous Affymetrix expression arrays with the exception that some of the probe model parameters were tuned for hybridization of DNA target instead of RNA target. All probes were evaluated for potential cross hybridization to other PSRs in the HuExon 1.0 st design as well as splice junctions observed in the input data set. Probes were not evaluated for cross hybridization against the entire human genome to avoid unnecessarily poor performing probe sets. Probes were selected for hybridization to sense strand target as opposed to antisense target on 3′ biased IVT array designs, because of the method used for amplification (WTA).

[0097] Overall probe quality as predicted by the probe selection algorithm was high. One result of an exon based array design relative to the 3′ biased IVT designs is that the number of candidate probes for any given probe set is much smaller compared to designs based on a 3′ biased assay which used the 3′ 600 bp of the transcript as target for probe design, because the probe selection region may be much smaller. The result is that more of the probes in the probe set may not be independent with respect to the region of the transcript they are interrogating.

[0098] Pobe sets that detect the opposite strand from a characterized gene may fall into several categories: mis-oriented cDNA sequences, correct or incorrect ab initio gene predictions, and legitimate antisense transcripts inferred from cDNA input data. Some mRNA sequences from the input sources did not align to the human genome, unmapped mRNA. Probes were tiled against these sequences at roughly one probe every 6 bases to allow for detection of these mRNAs.

[0099] Table 3: Variable metrics applied to each annotation source when PSRs were generated. Hard edges were inferred from the splice sites of EST alignments only for those EST alignments where all the splice sites were one of the 3 consensus splice sites (gt-ag, at-ac, gc-ag).

| | | | CDS | | |
|---|---|---|---|---|---|
| | | Splice | Start/ | | |
| | Transcript | Site | Stop | | Trim |
| | Hard | Hard | Hard | Merge | Transcript |
| | Edges | Edges | Edges | Gaps | Edges |
| ensGene | | x | x | <9 bp | 0 bp |
| geneid | | x | | <9 bp | 0 bp |
| genscan | | x | | <9 bp | 0 bp |
| genscanSubopt | x | x | | <9 bp | 0 bp |
| Exoniphy | x | x | | <9 bp | 0 bp |
| rnaGene | x | x | | <9 bp | 0 bp |
| mitomap | x | x | | <9 bp | 0 bp |
| microRNAregistry | x | x | | <9 bp | 0 bp |
| spgGene | | x | | <9 bp | 0 bp |
| Twinscan | | x | | <9 bp | 0 bp |
| vegaGene | | x | x | <9 bp | 0 bp |
| vegaPseudoGene | | x | | <9 bp | 0 bp |
| mouse-fl | | | | <19 bp | 10 bp |
| mouse-mrna | | | | <19 bp | 10 bp |
| rat-fl | | | | <19 bp | 10 bp |
| rat-mrna | | | | <19 bp | 10 bp |
| fl | | x | x | <19 bp | 10 bp |
| mrna | | x | | <19 bp | 10 bp |
| est | | x | | <19 bp | 20 bp |

[0100] TABLE 4
cDNA sequence orientation for human cDNA sequences

| Sequence | Number | Number | Percent |
|---|---|---|---|
| Class | Oriented | Unoriented | Unoriented |
| fl | 71,686 | 0 | 0% |
| mrna | 66,834 | 27,318 | 29% |
| est | 4,587,634 | 883,991 | 16% |

Methods for Processing cDNA Sequences into Genomic Annotations for Array Design

[0101] Public genome annotations may be used as a source of input for the identification of regions to be used as PSRs because both exon and intron regions are included. Sequences obtained from cDNA sequences generally do not include introns and it may be more difficult to determine the boundaries of individual exons. In one aspect, methods to generate genome annotations from cDNA sequence were developed. In one aspect the approach included the following steps. (1) When possible, EST read direction and CDS annotations were determined. (2) The cDNA sequence (and WUSTL EST trace when available) was evaluated for polyadenylation sites and signals. (3) cDNA sequences were aligned to their respective genomes using blat. (4) The cDNA-genome alignments were evaluated for consensus splice sites. (5) cDNA orientation was determined using a probabilistic model combining information about: EST read direction, CDS orientation, Polyadenylation sites and signals, and consensus splice site usage. (5) A genome transcript annotation was inferred for each cDNA sequence using the orientation and alignment information.

[0102] Using the above approach all the cDNA sequences which could be oriented and aligned were used as a source of content for the HuExon 1.0 st array. Only genomic alignments where 80% of the cDNA aligned were considered. In addition, only the best alignment in the genome was used; in cases where there were multiple best alignments, all were used.

[0103] The mouse and rat genome annotations were further processed by “lifting” the annotations from their respective genome to the human genome. This was done by using the base level synteny maps between human, mouse, and rat to translate coordinates in one genome to coordinates in human. Some mapped mouse cDNA sequences were nearly identical to a human RefSeq annotation. Other mouse RefSeq annotations mapped onto a region of human with no corresponding annotation.

Control Probes on the HuExon 1.0 st Array

[0104] The majority of the probes on the HuExon 1.0 st array are complementary to human genes. For a plurality of exons there are 4 probes per probe set and the probes are sense target perfect match probes. In addition several types of control probes are included on the array. The types of control probes that may be included are each described below. Exon arrays may include one or more of the types of control probes.

[0105] Antigenomic Background Probes are probes which were selected because they are not present in the human genome (also not present in approximately 8 other genomes analyzed). They are not expected to cross hybridize to transcribed human sequences. Approximately 1000 probes were selected for each probe GC count from 0 to 25. These probes can be used as an alternative to a specific mismatch probe. Both sense and antisense perfect match and mismatch probes are represented on the array.

[0106] Genomic Background Probes may be used as an alternative to specific mismatch probes. Unlike the antigenomic background probes, these probes do match the genome, but in regions not likely to be expressed. About 1000 probes per GC count bin were selected. Both sense, antisense perfect match and mismatch probes are represented on the array.

[0107] A number of the standard AFFX control probe sets were tiled on the HuExon 1.0 array. These include the BioB, C, D, and CreX probe sets for the bacterial spikes and a number of standard tag probe sets. In many cases 5′, middle, and 3′ probe sets are tiled. Some of the controls are tiled multiple times on the chip. Antisense target perfect match and mismatch probes were tiled on the array.

[0108] Sense and antisense target versions of the HG-U133 normalization control probe sets were tiled with both perfect match and mismatch probes.

[0109] Intron-Exon Controls. Probe sets were generated from the main design which matched the consensus sequences from the HG-U133 normalization control probe sets. Six probe sets were generated for all the exon based PSRs as well as for 100 bp intronic regions. Perfect match and mismatch probes were tiled for both sense and antisense target.

[0110] Putative full-length human mRNA sequences which had poor probe coverage in the main design were additionally tiled with one 11 probe perfect match sense target probe set. Putative full-length human mRNA sequences which did not align to the human genome were tiled with 1 perfect match sense target probe set every 5 bp. A set of poorly covered HG-U133 2.0 Plus probe sets (mostly EST based consensus end probe sets) were tiled as 11 probe sense target probe sets with no specific mismatch. A number of pre-selected mouse clone probe sets were also tiled on the array.

[0111] Spikes. Various cDNA clones were tiled on the array with both perfect match and mismatch probes for sense target with 1 probe every 5 bp.

[0112] Mouse, Yeast, and Human Spikes. For a number of human, mouse, and yeast cDNA clones, probes were tiled every other base for both sense and antisense target. Perfect match probes were tiled for all the clones. Mismatch probes were only tiled for the human and mouse clones.

1. A probe array comprising a plurality of nucleic acid probes, wherein each probe in the plurality of nucleic acid probes comprises one of the sequences listed in SEQ ID Nos. 1-6, 102, 149 and wherein the plurality of nucleic acid probes of the array comprises at least 1,000,000 of the sequences listed in SEQ ID Nos. 1-6, 102, 149, each sequence present as a different feature of the array.

2. The probe array of claim 1 wherein each probe of said plurality of nucleic acid probes is attached to a solid support.

3. The probe array of claim 1 wherein the probe array comprises a plurality of beads wherein each of the sequences listed in SEQ ID Nos. 1-6, 102, 149 is attached to a different bead.

4. The probe array of claim 1 wherein the array consists of a single contiguous solid support.

5. The probe array of claim 1 wherein the array consists of a plurality of solid supports.

6. A probe array comprising at least 10,000 different exon probe sets wherein the array comprises a first, second and third probe set for each gene in a plurality of genes, wherein the plurality of genes comprises at least 1,000 human genes, wherein each gene has at least three exons, and wherein the first, second and third probe sets are complementary to a first, second and third exon, respectively, in each gene in the plurality.

7. The array of claim 6 wherein the plurality of genes comprises at least 5,000 human genes.

8. The array of claim 6 wherein the array comprises an exon probe set for each of at least four exons in each of at least 2,000 human genes.

9. The array of claim 6 wherein the array comprises an exon probe set for each of at least five exons in each of at least 1,000 human genes.

10. A nucleic acid array comprising a plurality of at least 100,000 probe sets wherein each probe set comprises:
a plurality of different perfect match probes, wherein the probes of each probe set are complementary to a single probe selection region, and wherein each probe selection region is a single exon or a subsequence of an exon.

11. A probe array comprising a plurality of exon probe sets, wherein each exon probe set comprises at least one probe that is complementary to an exon of a multi-exon gene; wherein each probe in each exon probe set is complementary to the same exon and wherein the array comprises probe sets that are complementary to at least 1,000 different exons in the human genome.

12. The probe array of claim 11 wherein the plurality of exon probe sets comprises at least 5,000 different probe sets.

13. The probe array of claim 11 wherein the plurality of exon probe sets comprises at least 10,000 different probe sets.

14. The probe array of claim 11 wherein the plurality of exon probe sets comprises at least 250,000 different probe sets.

15. The probe array of claim 11 wherein the plurality of exon probe sets comprises at least 500,000 different probe sets.

16. A probe array comprising a plurality of probe sets, wherein each probe set is complementary to a single exon in a transcript, the plurality of probe sets comprising probe sets complementary to a plurality of multi-exon human gene and wherein the plurality of probe sets includes at least one probe set complementary to each exon in each gene in the plurality of multi-exon human genes.

17. The probe array of claim 16 wherein there are at least 1000 different exons in the plurality of multi-exon genes and the array comprises a probe set that is specifically complementary to each of the at least 1000 different exons.

18. The probe array of claim 16, wherein the plurality of multi-exon human genes comprises at least 1000 genes, and wherein each multi-exon human gene in the plurality comprises at least 3 exons.

19. The probe array of claim 16, wherein the plurality of multi-exon human genes comprises at least 1000 genes, and wherein each multi-exon human gene in the plurality comprises at least 4 exons and the array comprises a probe set that is specifically complementary to each exon in each multi-exon human gene in the plurality.

20. The probe array of claim 16 further comprising a plurality of control probes wherein said control probes are antigenomic background probes or genomic background probes.

21. A kit comprising a probe array according to claim 16, a T7-N6 primer, random primers, a T7 RNA polymerase, dUTP, UDG and optionally an AP endonuclease.

22. A method of detecting a plurality of mature RNA isoforms from each of a plurality of human genes in a biological sample from a human comprising:
obtaining a nucleic acid derived from the biological sample;
labeling the nucleic acid;
hybridizing the labeled nucleic acid to an array comprising a plurality of exon probe sets comprising probes that are complementary to a plurality of exons in a plurality of at least 1,000 human multi exon genes, wherein for each multi exon gene there is a probe set on the array for each of at least two exons from the gene;
detecting the hybridization pattern; and
analyzing the hybridization pattern to detect a plurality of mature RNA isoforms from at least two human multi exon genes.

23. The method of claim 22 wherein the labeled nucleic acid hybridized to the array consists essentially of DNA.

24. The method of claim 22 wherein the labeled nucleic acid hybridized to the array consists essentially of RNA that is complementary to the target mRNA.

25. The method of claim 22 wherein the labeled nucleic acid hybridized to the array consists essentially of RNA that is in the sense orientation relative to the target mRNA.

26. The method of claim 22 wherein the labeled nucleic acid is hybridized to the array in a single reaction.

The application's sequence listing, which the Patent Office published only in electronic form, follows.

SEQUENCE LISTING (6102149 sequences)

SEQ ID NO: 1 - DNA, 25 bp, Homo sapien
ggtaactgtttagatatccataagt

SEQ ID NO: 2 - DNA, 25 bp, Homo sapien
acttatggatatctaaacagttacc

SEQ ID NO: 3 - DNA, 25 bp, Homo sapien
attaaagcattaggtctctagtaaa

SEQ ID NO: 4 - DNA, 25 bp, Homo sapien
tttactagagacctaatgctttaat

SEQ ID NO: 5 - DNA, 25 bp, Homo sapien
tcccagagcttcatccggccgcccg

SEQ ID NO: 6 - DNA, 25 bp, Homo sapien
cgggcggccggatgaagctctggga

SEQ ID NO: 7 - DNA, 25 bp, Homo sapien
accgtggagctcctcggtcgcgact

SEQ ID NO: 8 - DNA, 25 bp, Homo sapien
agtcgcgaccgaggagctccacggt

SEQ ID NO: 9 - DNA, 25 bp, Homo sapien
tagatcttggagctcgaacaagtct

SEQ ID NO: 10 - DNA, 25 bp, Homo sapien
agacttgttcgagctccaagatcta

SEQ ID NO: 11 - DNA, 25 bp, Homo sapien
gtccccgtactttacacagtgctgg

SEQ ID NO: 12 - DNA, 25 bp, Homo sapien
ccagcactgtgtaaagtacggggac

SEQ ID NO: 13 - DNA, 25 bp, Homo sapien
caagaagtgcgcaccgtcgaacacg

SEQ ID NO: 14 - DNA, 25 bp, Homo sapien
cgtgttcgacggtgcgcacttcttg

SEQ ID NO: 15 - DNA, 25 bp, Homo sapien
agctcgatgccgactgtggcgtcca

SEQ ID NO: 16 - DNA, 25 bp, Homo sapien
tggacgccacagtcggcatcgagct

SEQ ID NO: 17 - DNA, 25 bp, Homo sapien
gaagacacgtggacggtcgtcgttc

SEQ ID NO: 18 - DNA, 25 bp, Homo sapien
gaacgacgaccgtccacgtgtcttc

SEQ ID NO: 19 - DNA, 25 bp, Homo sapien
acccacaccttctactctcaccatg

SEQ ID NO: 20 - DNA, 25 bp, Homo sapien
catggtgagagtagaaggtgtgggt

SEQ ID NO: 21 - DNA, 25 bp, Homo sapien
gaacgtgtccggtgaatacgaagta

SEQ ID NO: 22 - DNA, 25 bp, Homo sapien
tacttcgtattcaccggacacgttc

SEQ ID NO: 23 - DNA, 25 bp, Homo sapien
taagacactcagcaagtttctttgg

SEQ ID NO: 24 - DNA, 25 bp, Homo sapien
ccaaagaaacttgctgagtgtctta

SEQ ID NO: 25 - DNA, 25 bp, Homo sapien
gcaggcgccccggctcccgcgaatg

SEQ ID NO: 26 - DNA, 25 bp, Homo sapien
cattcgcgggagccggggcgcctgc

SEQ ID NO: 27 - DNA, 25 bp, Homo sapien
gccggacccggaaggcccgcaggcg

SEQ ID NO: 28 - DNA, 25 bp, Homo sapien
cgcctgcgggccttccgggtccggc

SEQ ID NO: 29 - DNA, 25 bp, Homo sapien
gccgccggacccggaaggcccgcag

SEQ ID NO: 30 - DNA, 25 bp, Homo sapien
ctgcgggccttccgggtccggcggc

SEQ ID NO: 31 - DNA, 25 bp, Homo sapien
gatttatggttacactgacacagta

SEQ ID NO: 32 - DNA, 25 bp, Homo sapien
tactgtgtcagtgtaaccataaatc

SEQ ID NO: 33 - DNA, 25 bp, Homo sapien
gtatgtaaaaggtcgtaatttacac

SEQ ID NO: 34 - DNA, 25 bp, Homo sapien
gtgtaaattacgaccttttacatac

SEQ ID NO: 35 - DNA, 25 bp, Homo sapien
ccacttaattaagagtatttctcaa

SEQ ID NO: 36 - DNA, 25 bp, Homo sapien
ttgagaaatactcttaattaagtgg

SEQ ID NO: 37 - DNA, 25 bp, Homo sapien
cctcgccccggctccatgccgccgt

SEQ ID NO: 38 - DNA, 25 bp, Homo sapien
acggcggcatggagccggggcgagg

SEQ ID NO: 39 - DNA, 25 bp, Homo sapien
gccccggctccatgccgccgtgccg

SEQ ID NO: 40 - DNA, 25 bp, Homo sapien
cggcacggcggcatggagccggggc

SEQ ID NO: 41 - DNA, 25 bp, Homo sapien
ccaccaacgggctcagggcgcggac

SEQ ID NO: 42 - DNA, 25 bp, Homo sapien
gtccgcgccctgagcccgttggtgg

SEQ ID NO: 43 - DNA, 25 bp, Homo sapien
ctaggaggtaaggtgccgaggagct

SEQ ID NO: 44 - DNA, 25 bp, Homo sapien
agctcctcggcaccttacctcctag

SEQ ID NO: 45 - DNA, 25 bp, Homo sapien
gtgtcgtcattacccgatgtcggtt

SEQ ID NO: 46 - DNA, 25 bp, Homo sapien
aaccgacatcgggtaatgacgacac

SEQ ID NO: 47 - DNA, 25 bp, Homo sapien
cggccgcacgaactcgggccactga

SEQ ID NO: 48 - DNA, 25 bp, Homo sapien
tcagtggcccgagttcgtgcggccg

SEQ ID NO: 49 - DNA, 25 bp, Homo sapien
gggtggagggtagcgctcggaccga

SEQ ID NO: 50 - DNA, 25 bp, Homo sapien
tcggtccgagcgctaccctccaccc

SEQ ID NO: 51 - DNA, 25 bp, Homo sapien
cgagagtagtctccctgaaacaggg

SEQ ID NO: 52 - DNA, 25 bp, Homo sapien
ccctgtttcagggagactactctcg

SEQ ID NO: 53 - DNA, 25 bp, Homo sapien
tctcctatgtatgacggtgggacac

SEQ ID NO: 54 - DNA, 25 bp, Homo sapien
gtgtcccaccgtcatacataggaga

SEQ ID NO: 55 - DNA, 25 bp, Homo sapien
ccgtccacccgtctcccgcgccgcc

SEQ ID NO: 56 - DNA, 25 bp, Homo sapien
ggcggcgcgggagacgggtggacgg

SEQ ID NO: 57 - DNA, 25 bp, Homo sapien
cccgtccacccgtctcccgcgccgc

SEQ ID NO: 58 - DNA, 25 bp, Homo sapien
gcggcgcgggagacgggtggacggg

SEQ ID NO: 59 - DNA, 25 bp, Homo sapien
taacggaaaaatatactggtttata

SEQ ID NO: 60 - DNA, 25 bp, Homo sapien
tataaaccagtatatttttccgtta

SEQ ID NO: 61 - DNA, 25 bp, Homo sapien
tccagcccgggccacccgcgcgacg

SEQ ID NO: 62 - DNA, 25 bp, Homo sapien
cgtcgcgcgggtggcccgggctgga

SEQ ID NO: 63 - DNA, 25 bp, Homo sapien
gagttcattaaacattattatcaag

SEQ ID NO: 64 - DNA, 25 bp, Homo sapien
cttgataataatgtttaatgaactc

SEQ ID NO: 65 - DNA, 25 bp, Homo sapien
cgaccggcgccaccgcgggagccgc

SEQ ID NO: 66 - DNA, 25 bp, Homo sapien
gcggctcccgcggtggcgccggtcg

SEQ ID NO: 67 - DNA, 25 bp, Homo sapien
aatatttcaggaccgacgatgtatg

SEQ ID NO: 68 - DNA, 25 bp, Homo sapien
catacatcgtcggtcctgaaatatt

SEQ ID NO: 69 - DNA, 25 bp, Homo sapien
gaccgggagcacttcggtgagggta

SEQ ID NO: 70 - DNA, 25 bp, Homo sapien
taccctcaccgaagtgctcccggtc

SEQ ID NO: 71 - DNA, 25 bp, Homo sapien
attcaacataagagtatctaatatt

SEQ ID NO: 72 - DNA, 25 bp, Homo sapien
aatattagatactcttatgttgaat

SEQ ID NO: 73 - DNA, 25 bp, Homo sapien
ataagagacgagaattcttggaata

SEQ ID NO: 74 - DNA, 25 bp, Homo sapien
tattccaagaattctcgtctcttat

SEQ ID NO: 75 - DNA, 25 bp, Homo sapien
ctgagcccagggtcctggcagtcta

SEQ ID NO: 76 - DNA, 25 bp, Homo sapien
tagactgccaggaccctgggctcag

SEQ ID NO: 77 - DNA, 25 bp, Homo sapien
acacctactgccgtcctccgtgtct

SEQ ID NO: 78 - DNA, 25 bp, Homo sapien
agacacggaggacggcagtaggtgt

SEQ ID NO: 79 - DNA, 25 bp, Homo sapien
tcgggttattgacccggacttcaac

SEQ ID NO: 80 - DNA, 25 bp, Homo sapien
gttgaagtccgggtcaataacccga

SEQ ID NO: 81 - DNA, 25 bp, Homo sapien
gtagtcttcgtagggtcgtcacgga

SEQ ID NO: 82 - DNA, 25 bp, Homo sapien
tccgtgacgaccctacgaagactac

SEQ ID NO: 83 - DNA, 25 bp, Homo sapien
tttaattccaggtctcgagctgcat

SEQ ID NO: 84 - DNA, 25 bp, Homo sapien
atgcagctcgagacctggaattaaa

SEQ ID NO: 85 - DNA, 25 bp, Homo sapien
tattattttggtaagaacttgaact

SEQ ID NO: 86 - DNA, 25 bp, Homo sapien
agttcaagttcttaccaaaataata

SEQ ID NO: 87 - DNA, 25 bp, Homo sapien
aaatttcgatgtatatgtttctata

SEQ ID NO: 88 - DNA, 25 bp, Homo sapien
tatagaaacatatacatcgaaattt

SEQ ID NO: 89 - DNA, 25 bp, Homo sapien
catcttccacggattacgtataaag

SEQ ID NO: 90 - DNA, 25 bp, Homo sapien
ctttatacgtaatccgtggaagatg

SEQ ID NO: 91 - DNA, 25 bp, Homo sapien
ggaccagccccgagaaccaggtatt

SEQ ID NO: 92 - DNA, 25 bp, Homo sapien
aatacctggttctcggggctggtcc

SEQ ID NO: 93 - DNA, 25 bp, Homo sapien
aacgtcagtcggcataatattggta

SEQ ID NO: 94 - DNA, 25 bp, Homo sapien
taccaatattatgccgactgacgtt

SEQ ID NO: 95 - DNA, 25 bp, Homo sapien
ggtcggcgcgcgtgtgtgggcccga

SEQ ID NO: 96 - DNA, 25 bp, Homo sapien
tcgggcccacacacgcgcgccgacc

SEQ ID NO: 97 - DNA, 25 bp, Homo sapien
gaaattagactgacaacttgggaag

SEQ ID NO: 98 - DNA, 25 bp, Homo sapien
cttcccaagttgtcagtctaatttc

SEQ ID NO: 99 - DNA, 25 bp, Homo sapien
agtattgtatacaatttttgtaggt

SEQ ID NO: 100 - DNA, 25 bp, Homo sapien
acctacaaaaattgtatacaatact

SEQ ID NO: 101 - DNA, 25 bp, Homo sapien
tcccgtgtttccgtctggtggtcag

SEQ ID NO: 102 - DNA, 25 bp, Homo sapien
ctgaccaccagacggaaacacggga

SEQ ID NO: 103 - DNA, 25 bp, Homo sapien
cactcccgggggcctcagcgcgcgt

SEQ ID NO: 104 - DNA, 25 bp, Homo sapien
acgcgcgctgaggcccccgggagtg

SEQ ID NO: 105 - DNA, 25 bp, Homo sapien
tctcggcgtcctcgttcgcgtggca

SEQ ID NO: 106 - DNA, 25 bp, Homo sapien
tgccacgcgaacgaggacgccgaga

SEQ ID NO: 107 - DNA, 25 bp, Homo sapien
ccactactattctccgtaagggcat

SEQ ID NO: 108 - DNA, 25 bp, Homo sapien
atgcccttacggagaatagtagtgg

SEQ ID NO: 109 - DNA, 25 bp, Homo sapien
cgccggcacagagcgggtgggaccg

SEQ ID NO: 110 - DNA, 25 bp, Homo sapien
cggtcccacccgctctgtgccggcg

SEQ ID NO: 111 - DNA, 25 bp, Homo sapien
ttcgtagacgacacaaagttttccg

SEQ ID NO: 112 - DNA, 25 bp, Homo sapien
cggaaaactttgtgtcgtctacgaa

SEQ ID NO: 113 - DNA, 25 bp, Homo sapien
tgaaaactatttgctgtgattatgt

SEQ ID NO: 114 - DNA, 25 bp, Homo sapien
acataatcacagcaaatagttttca

SEQ ID NO: 115 - DNA, 25 bp, Homo sapien
aaagaggtaagacactgatctcgtc

SEQ ID NO: 116 - DNA, 25 bp, Homo sapien
gacgagatcagtgtcttacctcttt

SEQ ID NO: 117 - DNA, 25 bp, Homo sapien
aggtccacaacctatgtacccgggc

SEQ ID NO: 118 - DNA, 25 bp, Homo sapien
gcccgggtacataggttgtggacct

SEQ ID NO: 119 - DNA, 25 bp, Homo sapien
ggacttaagtccggcgacaccggcg

SEQ ID NO: 120 - DNA, 25 bp, Homo sapien
cgccggtgtcgccggacttaagtcc

SEQ ID NO: 121 - DNA, 25 bp, Homo sapien
catatctcccagtattgtccctgat

SEQ ID NO: 122 - DNA, 25 bp, Homo sapien
atcagggacaatactgggagatatg

SEQ ID NO: 123 - DNA, 25 bp, Homo sapien
tcctatgtaggtgctcgagtaacag

SEQ ID NO: 124 - DNA, 25 bp, Homo sapien
ctgttactcgagcacctacatagga

SEQ ID NO: 125 - DNA, 25 bp, Homo sapien
ttgtaaagaaaaaaccacttctcag

SEQ ID NO: 126 - DNA, 25 bp, Homo sapien
ctgagaagtggttttttctttacaa

SEQ ID NO: 127 - DNA, 25 bp, Homo sapien
gggtgtcattcggtgcaccttgctg

SEQ ID NO: 128 - DNA, 25 bp, Homo sapien
cagcaaggtgcaccgaatgacaccc

SEQ ID NO: 129 - DNA, 25 bp, Homo sapien
cgtcggtcgacacggcgtgagaggg

SEQ ID NO: 130 - DNA, 25 bp, Homo sapien
ccctctcacgccgtgtcgaccgacg

SEQ ID NO: 131 - DNA, 25 bp, Homo sapien
gctgggaggagcacgggccggcacc

SEQ ID NO: 132 - DNA, 25 bp, Homo sapien
ggtgccggcccgtgctcctcccagc

SEQ ID NO: 133 - DNA, 25 bp, Homo sapien
acacctgtttgggtcacgtcggtgt

SEQ ID NO: 134 - DNA, 25 bp, Homo sapien
acaccgacgtgacccaaacaggtgt

SEQ ID NO: 135 - DNA, 25 bp, Homo sapien
gtcattgaaacctgagggaccgaag

SEQ ID NO: 136 - DNA, 25 bp, Homo sapien
cttcggtccctcaggtttcaatgac

SEQ ID NO: 137 - DNA, 25 bp, Homo sapien
acttcaactggacagaaaaccgaga

SEQ ID NO: 138 - DNA, 25 bp, Homo sapien
tctcggttttctgtccagttgaagt

SEQ ID NO: 139 - DNA, 25 bp, Homo sapien
gtcaacgccgggacgcgctcgccct

SEQ ID NO: 140 - DNA, 25 bp, Homo sapien
agggcgagcgcgtcccggcgttgac

SEQ ID NO: 141 - DNA, 25 bp, Homo sapien
ccacggtcactggacaacaagagag

SEQ ID NO: 142 - DNA, 25 bp, Homo sapien
ctctcttgttgtccagtgaccgtgg

SEQ ID NO: 143 - DNA, 25 bp, Homo sapien
gcatgtctcgggtgaccccccggta

SEQ ID NO: 144 - DNA, 25 bp, Homo sapien
taccggggggtcacccgagacatgc

SEQ ID NO: 145 - DNA, 25 bp, Homo sapien
agaacagttttcggtgaggtattaa

SEQ ID NO: 146 - DNA, 25 bp, Homo sapien
ttaatacctcaccgaaaactgttct

SEQ ID NO: 147 - DNA, 25 bp, Homo sapien
ggctcggcccggggctctgggagcg

SEQ ID NO: 148 - DNA, 25 bp, Homo sapien
cgctcccagagccccgggccgagcc

SEQ ID NO: 149 - DNA, 25 bp, Homo sapien
cgaggacgtctccgacgctgtcggg

SEQ ID NO: 150 - DNA, 25 bp, Homo sapien
cccgacagcgtcggagacgtcctcg

SEQ ID NO: 151 - DNA, 25 bp, Homo sapien
gtcatccagaagtagccgaagagcc

SEQ ID NO: 152 - DNA, 25 bp, Homo sapien
ggctcttcggctacttctggatgac

SEQ ID NO: 153 - DNA, 25 bp, Homo sapien
gattttacattgtcttcttgaagta

SEQ ID NO: 154 - DNA, 25 bp, Homo sapien
tacttcaagaagacaatgtaaaatc

SEQ ID NO: 155 - DNA, 25 bp, Homo sapien
tcctcggctcccaggaggaggatag

SEQ ID NO: 156 - DNA, 25 bp, Homo sapien
ctatcctcctcctgggagccgagga

SEQ ID NO: 157 - DNA, 25 bp, Homo sapien
gctcccggatcaagtaggaggtgga

SEQ ID NO: 158 - DNA, 25 bp, Homo sapien
tccacctcctacttgatccgggagc

SEQ ID NO: 159 - DNA, 25 bp, Homo sapien
aggactacgtgaaacgctgagaaac

SEQ ID NO: 160 - DNA, 25 bp, Homo sapien
gtttctcagcgtttcacgtagtcct

SEQ ID NO: 161 - DNA, 25 bp, Homo sapien
agacactacacttaaccaccctggg

SEQ ID NO: 162 - DNA, 25 bp, Homo sapien
cccagggtggttaagtgtagtgtct

SEQ ID NO: 163 - DNA, 25 bp, Homo sapien
atcctttcacaggtaaagactgtaa

SEQ ID NO: 164 - DNA, 25 bp, Homo sapien
ttacagtctttacctgtgaaaggat

SEQ ID NO: 165 - DNA, 25 bp, Homo sapien
caccacggtcactccgacacaataa

SEQ ID NO: 166 - DNA, 25 bp, Homo sapien
ttattgtgtcggagtgaccgtggtg

SEQ ID NO: 167 - DNA, 25 bp, Homo sapien
ccctcggccgtctcgcggcgcgagc

SEQ ID NO: 168 - DNA, 25 bp, Homo sapien
gctcgcgccgcgagacggccgaggg

SEQ ID NO: 169 - DNA, 25 bp, Homo sapien
ggatttcatacaagacattaggcat

SEQ ID NO: 170 - DNA, 25 bp, Homo sapien
atgcctaatgtcttgtatgaaatcc

SEQ ID NO: 171 - DNA, 25 bp, Homo sapien
cattagtaattgaaagtagttgaat

SEQ ID NO: 172 - DNA, 25 bp, Homo sapien
attcaactactttcaattactaatg

SEQ ID NO: 173 - DNA, 25 bp, Homo sapien
tcgcggggcccgccgccgggtagga

SEQ ID NO: 174 - DNA, 25 bp, Homo sapien
tcctacccggcggcgggccccgcga

SEQ ID NO: 175 - DNA, 25 bp, Homo sapien
cgtcgggaacgcagacaccgggacc

SEQ ID NO: 176 - DNA, 25 bp, Homo sapien
ggtcccggtgtctgcgttcccgacg

SEQ ID NO: 177 - DNA, 25 bp, Homo sapien
gacgggcggtccacgtgacctcgac

SEQ ID NO: 178 - DNA, 25 bp, Homo sapien
gtcgaggtcacgtggaccgcccgtc

SEQ ID NO: 179 - DNA, 25 bp, Homo sapien
ttttgaattaaagtcttacaagtag

SEQ ID NO: 180 - DNA, 25 bp, Homo sapien
ctacttgtaagactttaattcaaaa

SEQ ID NO: 181 - DNA, 25 bp, Homo sapien
acacgtttcgcaggacgttggggtc

SEQ ID NO: 182 - DNA, 25 bp, Homo sapien
gaccccaacgtcctgcgaaacgtgt

SEQ ID NO: 183 - DNA, 25 bp, Homo sapien
cctgatagattcttccgggtccagt

SEQ ID NO: 184 - DNA, 25 bp, Homo sapien
actggacccggaagaatctatcagg

SEQ ID NO: 185 - DNA, 25 bp, Homo sapien
tcgatagagtagattgttaagacaa

SEQ ID NO: 186 - DNA, 25 bp, Homo sapien
ttgtcttaacaatctactctatcga

SEQ ID NO: 187 - DNA, 25 bp, Homo sapien
aaagagtagcgtctcctcggacgtg

SEQ ID NO: 188 - DNA, 25 bp, Homo sapien
cacgtccgaggagacgctactcttt

SEQ ID NO: 189 - DNA, 25 bp, Homo sapien
gaccgttctactctctagtctggtt

SEQ ID NO: 190 - DNA, 25 bp, Homo sapien
aaccagactagagagtagaacggtc

SEQ ID NO: 191 - DNA, 25 bp, Homo sapien
ggacggcgactctccggaccaggac

SEQ ID NO: 192 - DNA, 25 bp, Homo sapien
gtcctggtccggagagtcgccgtcc

SEQ ID NO: 193 - DNA, 25 bp, Homo sapien
taagttgtgtcgggaccaaactccg

SEQ ID NO: 194 - DNA, 25 bp, Homo sapien
cggagtttggtcccgacacaactta

SEQ ID NO: 195 - DNA, 25 bp, Homo sapien
gcccgcccgcggtcctgtacctcgg

SEQ ID NO: 196 - DNA, 25 bp, Homo sapien
ccgaggtacaggaccgcgggcgggc

SEQ ID NO: 197 - DNA, 25 bp, Homo sapien
tactacaactatattacccttacac

SEQ ID NO: 198 - DNA, 25 bp, Homo sapien
gtgtaagggtaatatagttgtagta

SEQ ID NO: 199 - DNA, 25 bp, Homo sapien
tcccagttcccacttccgaggaggt

SEQ ID NO: 200 - DNA, 25 bp, Homo sapien
acctcctcggaagtgggaactggga

SEQ ID NO: 201 - DNA, 25 bp, Homo sapien
ggaactcagggacggtcagctcctt

SEQ ID NO: 202 - DNA, 25 bp, Homo sapien
aaggagctgaccgtccctgagttcc

SEQ ID NO: 203 - DNA, 25 bp, Homo sapien
cctaacacgtagagagaactccgaa

SEQ ID NO: 204 - DNA, 25 bp, Homo sapien
ttcggagttctctctacgtgttagg

SEQ ID NO: 205 - DNA, 25 bp, Homo sapien
gtcttctacagtaacacagttagtt

SEQ ID NO: 206 - DNA, 25 bp, Homo sapien
aactaactgtgttactgtagaagac

SEQ ID NO: 207 - DNA, 25 bp, Homo sapien
tgtccggccccactgggagcgagtg

SEQ ID NO: 208 - DNA, 25 bp, Homo sapien
cactcgctcccagtggggccggaca

SEQ ID NO: 209 - DNA, 25 bp, Homo sapien
gcccgagggcgacgcgcgtctgacg

SEQ ID NO: 210 - DNA, 25 bp, Homo sapien
cgtcagacgcgcgtcgccctcgggc

SEQ ID NO: 211 - DNA, 25 bp, Homo sapien
ttacgccgcggaaccgggcgcccta

SEQ ID NO: 212 - DNA, 25 bp, Homo sapien
tagggcgcccggttccgcggcgtaa

SEQ ID NO: 213 - DNA, 25 bp, Homo sapien
cctgggacagggtggtcccataccg

SEQ ID NO: 214 - DNA, 25 bp, Homo sapien
cggtatgggaccaccctgtcccagg

SEQ ID NO: 215 - DNA, 25 bp, Homo sapien
cggcggtcgtaatcatcgcaacaat

SEQ ID NO: 216 - DNA, 25 bp, Homo sapien
attgttgcgatgattacgaccgccg

SEQ ID NO: 217 - DNA, 25 bp, Homo sapien
gtgtaaagtgcatctggtatttaac

SEQ ID NO: 218 - DNA, 25 bp, Homo sapien
gttaaataccagatgcactttacac

SEQ ID NO: 219 - DNA, 25 bp, Homo sapien
ctcgacacgggcttcttctgcggag

SEQ ID NO: 220 - DNA, 25 bp, Homo sapien
ctccgcagaagaagcccgtgtcgag

SEQ ID NO: 221 - DNA, 25 bp, Homo sapien
tgaaactgaagcctcagaaaaggag

SEQ ID NO: 222 - DNA, 25 bp, Homo sapien
ctccttttctgaggcttcagtttca

SEQ ID NO: 223 - DNA, 25 bp, Homo sapien
tattgagcacatcttagtattggag

SEQ ID NO: 224 - DNA, 25 bp, Homo sapien
ctccaatactaagatgtgctcaata

SEQ ID NO: 225 - DNA, 25 bp, Homo sapien
acccatacccacgtctatgtctcac

SEQ ID NO: 226 - DNA, 25 bp, Homo sapien
gtgagacatagacgtgggtatgggt

SEQ ID NO: 227 - DNA, 25 bp, Homo sapien
gtcccgtggccacggagggcagagg

SEQ ID NO: 228 - DNA, 25 bp, Homo sapien
cctctgccctccgtggccacgggac

SEQ ID NO: 229 - DNA, 25 bp, Homo sapien
ctcgtgtcctgaccctcgacctcgg

SEQ ID NO: 230 - DNA, 25 bp, Homo sapien
ccgaggtcgagggtcaggacacgag

SEQ ID NO: 231 - DNA, 25 bp, Homo sapien
gggggacggaagtcccgcacggaca

SEQ ID NO: 232 - DNA, 25 bp, Homo sapien
tgtccgtgcgggacttccgtccccc

SEQ ID NO: 233 - DNA, 25 bp, Homo sapien
ggacggaagtcccgcacggacaccg

SEQ ID NO: 234 - DNA, 25 bp, Homo sapien
cggtgtccgtgcgggacttccgtcc

SEQ ID NO: 235 - DNA, 25 bp, Homo sapien
cgaagtgggctcttcgttgtgttga

SEQ ID NO: 236 - DNA, 25 bp, Homo sapien
tcaacacaacgaagagcccacttcg

SEQ ID NO: 237 - DNA, 25 bp, Homo sapien
aatgttggttattttctgatgtgac

SEQ ID NO: 238 - DNA, 25 bp, Homo sapien
gtcacatcagaaaataaccaacatt

SEQ ID NO: 239 - DNA, 25 bp, Homo sapien
accgtctaagtccagggtgctcctt

SEQ ID NO: 240 - DNA, 25 bp, Homo sapien
aaggagcaccctggacttagacggt

SEQ ID NO: 241 - DNA, 25 bp, Homo sapien
ggtgtaactacttcacgattaggga

SEQ ID NO: 242 - DNA, 25 bp, Homo sapien
tccctaatcgtgaagtagttacacc

SEQ ID NO: 243 - DNA, 25 bp, Homo sapien
cccctctacgacaatggtcgctccc

SEQ ID NO: 244 - DNA, 25 bp, Homo sapien
gggagcgaccattgtcgtagagggg

SEQ ID NO: 245 - DNA, 25 bp, Homo sapien
cgtccgtgaccccggcgtgcaggac

SEQ ID NO: 246 - DNA, 25 bp, Homo sapien
gtcctgcacgccggggtcacggacg

SEQ ID NO: 247 - DNA, 25 bp, Homo sapien
aacgtcgcgtagaggcactgtatgt

SEQ ID NO: 248 - DNA, 25 bp, Homo sapien
acatacagtgcctctacgcgacgtt

SEQ ID NO: 249 - DNA, 25 bp, Homo sapien
cctgagagtagatattgttgatttt

SEQ ID NO: 250 - DNA, 25 bp, Homo sapien
aaaatcaacaatatctactctcagg

SEQ ID NO: 251 - DNA, 25 bp, Homo sapien
taaggcgtcccctcgagggtcaccg

SEQ ID NO: 252 - DNA, 25 bp, Homo sapien
cggtgaccctcgaggggacgcctta

SEQ ID NO: 253 - DNA, 25 bp, Homo sapien
ggcgtcccctcgagggtcaccgagt

SEQ ID NO: 254 - DNA, 25 bp, Homo sapien
actcggtgaccctcgaggggacgcc

SEQ ID NO: 255 - DNA, 25 bp, Homo sapien
gtctcgggggctacaccgacccctc

SEQ ID NO: 256 - DNA, 25 bp, Homo sapien
gaggggtcggtgtagcccccgagac

SEQ ID NO: 257 - DNA, 25 bp, Homo sapien
ttagagtaatatcttacataagaat

SEQ ID NO: 258 - DNA, 25 bp, Homo sapien
attcttatgtaagatattactctaa

SEQ ID NO: 259 - DNA, 25 bp, Homo sapien
gttagagtaatatcttacataagaa

SEQ ID NO: 260 - DNA, 25 bp, Homo sapien
ttcttatgtaagatattactctaac

SEQ ID NO: 261 - DNA, 25 bp, Homo sapien
cggagactgttttcgacgcacgact

SEQ ID NO: 262 - DNA, 25 bp, Homo sapien
agtcgtgcgtcgaaaacagtctccg

SEQ ID NO: 263 - DNA, 25 bp, Homo sapien
ttaaaaagtagacgtagacggagaa

SEQ ID NO: 264 - DNA, 25 bp, Homo sapien
ttctccgtctacgtctactttttaa

SEQ ID NO: 265 - DNA, 25 bp, Homo sapien
gtaagacagtcggtaggccccgagc

SEQ ID NO: 266 - DNA, 25 bp, Homo sapien
gctcggggcctaccgactgtcttac

SEQ ID NO: 267 - DNA, 25 bp, Homo sapien
aggaacggatctgcgggcgtgggga

SEQ ID NO: 268 - DNA, 25 bp, Homo sapien
tccccacgcccgcagatccgttcct

SEQ ID NO: 269 - DNA, 25 bp, Homo sapien
tgtgacgtttccacggccctctcgt

SEQ ID NO: 270 - DNA, 25 bp, Homo sapien
acgagagggccgtggaaacgtcaca

SEQ ID NO: 271 - DNA, 25 bp, Homo sapien
ttactaatctatgtattagtcttat

SEQ ID NO: 272 - DNA, 25 bp, Homo sapien
ataagactaatacatagattagtaa

SEQ ID NO: 273 - DNA, 25 bp, Homo sapien
tggtcgactacgctacacttaaaat

SEQ ID NO: 274 - DNA, 25 bp, Homo sapien
attttaagtgtagcgtagtcgacca

SEQ ID NO: 275 - DNA, 25 bp, Homo sapien
gacacctctcggccggctgccctcg

SEQ ID NO: 276 - DNA, 25 bp, Homo sapien
cgagggcagccggccgagaggtgtc

SEQ ID NO: 277 - DNA, 25 bp, Homo sapien
cgcgcggggcctgcactggagcgcc

SEQ ID NO: 278 - DNA, 25 bp, Homo sapien
ggcgctccagtgcaggccccgcgcg

SEQ ID NO: 279 - DNA, 25 bp, Homo sapien
ggggcctgcactggagcgcccgcgc

SEQ ID NO: 280 - DNA, 25 bp, Homo sapien
gcgcgggcgctccagtgcaggcccc

SEQ ID NO: 281 - DNA, 25 bp, Homo sapien
cgcggggcctgcactggagcgcccg

SEQ ID NO: 282 - DNA, 25 bp, Homo sapien
cgggcgctccagtgcaggccccgcg

SEQ ID NO: 283 - DNA, 25 bp, Homo sapien
aaagacttagacatgccgtgtgacg

SEQ ID NO: 284 - DNA, 25 bp, Homo sapien
cgtcacacggcatgtctaagtcttt

SEQ ID NO: 285 - DNA, 25 bp, Homo sapien
tgtaaaagaagaactagcaactagt

SEQ ID NO: 286 - DNA, 25 bp, Homo sapien
actagttgctagttcttcttttaca

SEQ ID NO: 287 - DNA, 25 bp, Homo sapien
aaagtgttaccgatgtgaaaggaag

SEQ ID NO: 288 - DNA, 25 bp, Homo sapien
cttcctttcacatcggtaacacttt

SEQ ID NO: 289 - DNA, 25 bp, Homo sapien
ctttcaagtgggagaacaggtctaa

SEQ ID NO: 290 - DNA, 25 bp, Homo sapien
ttagacctgttctcccacttgaaag

SEQ ID NO: 291 - DNA, 25 bp, Homo sapien
gatgtcgtggagagactgacgtatt

SEQ ID NO: 292 - DNA, 25 bp, Homo sapien
aatacgtcagtctctccacgacatc

SEQ ID NO: 293 - DNA, 25 bp, Homo sapien
taaaaagtaagggctttgtcatcat

SEQ ID NO: 294 - DNA, 25 bp, Homo sapien
atgatgacaaagcccttacttttta

SEQ ID NO: 295 - DNA, 25 bp, Homo sapien
ggcctcttggtcctacaccgcgaag

SEQ ID NO: 296 - DNA, 25 bp, Homo sapien
cttcgcggtgtaggaccaagaggcc

SEQ ID NO: 297 - DNA, 25 bp, Homo sapien
agtaagtaacacgccgtctagtgag

SEQ ID NO: 298 - DNA, 25 bp, Homo sapien
ctcactagacggcgtgttacttact

SEQ ID NO: 299 - DNA, 25 bp, Homo sapien
ctttttatgtatgtcgataatctta

SEQ ID NO: 300 - DNA, 25 bp, Homo sapien
taagattatcgacatacataaaaag

SEQ ID NO: 301 - DNA, 25 bp, Homo sapien
gtcgacgaggcccactcaccttctg

SEQ ID NO: 302 - DNA, 25 bp, Homo sapien
cagaaggtgagtgggcctcgtcgac

SEQ ID NO: 303 - DNA, 25 bp, Homo sapien
gcgggcggggcacgtccgccggtgt

SEQ ID NO: 304 - DNA, 25 bp, Homo sapien
acaccggcggacgtgccccgcccgc

SEQ ID NO: 305 - DNA, 25 bp, Homo sapien
gggtcaagacggtctctcccccgcc

SEQ ID NO: 306 - DNA, 25 bp, Homo sapien
ggcgggggagagaccgtcttgaccc

SEQ ID NO: 307 - DNA, 25 bp, Homo sapien
ccccgacgagggaatcactttctgg

SEQ ID NO: 308 - DNA, 25 bp, Homo sapien
ccagaaagtgattccctcgtcgggg

SEQ ID NO: 309 - DNA, 25 bp, Homo sapien
ggatcgcacggcaagtcttacttct

SEQ ID NO: 310 - DNA, 25 bp, Homo sapien
agaagtaagacttgccgtgcgatcc

SEQ ID NO: 311 - DNA, 25 bp, Homo sapien
ccgagcgccctctgcgacgcgcgcc

SEQ ID NO: 312 - DNA, 25 bp, Homo sapien
ggcgcgcgtcgcagagggcgctcgg

SEQ ID NO: 313 - DNA, 25 bp, Homo sapien
gagccgctgcggttatacgccaggc

SEQ ID NO: 314 - DNA, 25 bp, Homo sapien
gcctggcgtataaccgcagcggctc

SEQ ID NO: 315 - DNA, 25 bp, Homo sapien
gagacctatagacgtcactgtttaa

SEQ ID NO: 316 - DNA, 25 bp, Homo sapien
ttaaacagtgacgtctataggtctc

SEQ ID NO: 317 - DNA, 25 bp, Homo sapien
aaatctttcactcggtagagattcg

SEQ ID NO: 318 - DNA, 25 bp, Homo sapien
cgaatctctaccgagtgaaagattt

SEQ ID NO: 319 - DNA, 25 bp, Homo sapien
acaaccactcagactagggaagaga

SEQ ID NO: 320 - DNA, 25 bp, Homo sapien
tctcttccctagtctgagtggttgt

SEQ ID NO: 321 - DNA, 25 bp, Homo sapien
aacctgacaagaagtccaaggtctc

SEQ ID NO: 322 - DNA, 25 bp, Homo sapien
gagaccttggacttcttgtcaggtt

SEQ ID NO: 323 - DNA, 25 bp, Homo sapien
gtccctatgtcgttgcggctcgagg

SEQ ID NO: 324 - DNA, 25 bp, Homo sapien
cctcgagccgcaacgacatagggac

SEQ ID NO: 325 - DNA, 25 bp, Homo sapien
tcgtacgacggcctcaacctgtcgt

SEQ ID NO: 326 - DNA, 25 bp, Homo sapien
acgacaggttgaggccgtcgtacga

SEQ ID NO: 327 - DNA, 25 bp, Homo sapien
cggaccctaaggaggcactgtcgtc

SEQ ID NO: 328 - DNA, 25 bp, Homo sapien
gacgacagtgcctccttagggtccg

SEQ ID NO: 329 - DNA, 25 bp, Homo sapien
aggttccctctatgtaaaggtggag

SEQ ID NO: 330 - DNA, 25 bp, Homo sapien
ctccacctttacatagagggaacct

SEQ ID NO: 331 - DNA, 25 bp, Homo sapien
gagatttttctatcgaaaaagacag

SEQ ID NO: 332 - DNA, 25 bp, Homo sapien
ctgtctttttcgatagaaaaatctc

SEQ ID NO: 333 - DNA, 25 bp, Homo sapien
gaccccctgtgggaggcggtgacgg

SEQ ID NO: 334 - DNA, 25 bp, Homo sapien
ccgtcaccgcctcccacagggggtc

SEQ ID NO: 335 - DNA, 25 bp, Homo sapien
ccctcgggataaccacgacaggttc

SEQ ID NO: 336 - DNA, 25 bp, Homo sapien
gaacctgtcgtggttatcccgaggg

SEQ ID NO: 337 - DNA, 25 bp, Homo sapien
tacccccgcagcgtgagcaggaagg

SEQ ID NO: 338 - DNA, 25 bp, Homo sapien
ccttcctgctcacgctgcgggggta

SEQ ID NO: 339 - DNA, 25 bp, Homo sapien
gtcgcacttacctcccggccacgta

SEQ ID NO: 340 - DNA, 25 bp, Homo sapien
tacgtggccgggaggtaagtgcgac

SEQ ID NO: 341 - DNA, 25 bp, Homo sapien
cagaaaagtctccatcttgtgtgcc

SEQ ID NO: 342 - DNA, 25 bp, Homo sapien
ggcacacaagatggagacttttctg

SEQ ID NO: 343 - DNA, 25 bp, Homo sapien
tccgcgacctgagggcgcagggtgt

SEQ ID NO: 344 - DNA, 25 bp, Homo sapien
acaccctgcgccctcaggtcgcgga

SEQ ID NO: 345 - DNA, 25 bp, Homo sapien
cctcgtggactgagtatcctctaca

SEQ ID NO: 346 - DNA, 25 bp, Homo sapien
tgtagaggatactcagtccacgagg

SEQ ID NO: 347 - DNA, 25 bp, Homo sapien
ggacactcaccgagcacgcacgaag

SEQ ID NO: 348 - DNA, 25 bp, Homo sapien
cttcgtgcgtgctcggtgagtgtcc

SEQ ID NO: 349 - DNA, 25 bp, Homo sapien
cccagaggcgtctggagaccgagca

SEQ ID NO: 350 - DNA, 25 bp, Homo sapien
tgctcggtctccagacgcctctggg

SEQ ID NO: 351 - DNA, 25 bp, Homo sapien
actaggtttggtactaagaacttga

SEQ ID NO: 352 - DNA, 25 bp, Homo sapien
tcaagttcttagtaccaaacctagt

SEQ ID NO: 353 - DNA, 25 bp, Homo sapien
acgtaaatctaatagtagaacttcc

SEQ ID NO: 354 - DNA, 25 bp, Homo sapien
ggaagttctactattagatttacgt

SEQ ID NO: 355 - DNA, 25 bp, Homo sapien
cttgttaaaacaagacagactgttt

SEQ ID NO: 356 - DNA, 25 bp, Homo sapien
aaacagtctgtcttgttttaacaag

SEQ ID NO: 357 - DNA, 25 bp, Homo sapien
cccgtgtcacgcctcggggtgtccc

SEQ ID NO: 358 - DNA, 25 bp, Homo sapien
gggacaccccgaggcgtgacacggg

SEQ ID NO: 359 - DNA, 25 bp, Homo sapien
aacagaggtcctcacaaaaggactc

SEQ ID NO: 360 - DNA, 25 bp, Homo sapien
gagtccttttgtgaggacctctgtt

SEQ ID NO: 361 - DNA, 25 bp, Homo sapien
ataacatttatcaaagtttcaggta

SEQ ID NO: 362 - DNA, 25 bp, Homo sapien
tacctgaaactttgataaatgttat

SEQ ID NO: 363 - DNA, 25 bp, Homo sapien
tactccacccaatagtaaatataga

SEQ ID NO: 364 - DNA, 25 bp, Homo sapien
tctatatttactattgggtggagta

SEQ ID NO: 365 - DNA, 25 bp, Homo sapien
taagcactttcgacgagtcaacggg

SEQ ID NO: 366 - DNA, 25 bp, Homo sapien
cccgttgactcgtcgaaagtgctta

SEQ ID NO: 367 - DNA, 25 bp, Homo sapien
tatgagtcaccaatagtctggacgg

SEQ ID NO: 368 - DNA, 25 bp, Homo sapien
ccgtccagactattggtgactcata

SEQ ID NO: 369 - DNA, 25 bp, Homo sapien
ctgacttctctcaggccaaagtcac

SEQ ID NO: 370 - DNA, 25 bp, Homo sapien
gtgactttggcctgagagaagtcag

SEQ ID NO: 371 - DNA, 25 bp, Homo sapien
tggttagactgttattacacaagta

SEQ ID NO: 372 - DNA, 25 bp, Homo sapien
tacttgtgtaataacagtctaacca

SEQ ID NO: 373 - DNA, 25 bp, Homo sapien
tctgtggcgcgcaccgcacccacac

SEQ ID NO: 374 - DNA, 25 bp, Homo sapien
gtgtgggtgcggtgcgcgccacaga

SEQ ID NO: 375 - DNA, 25 bp, Homo sapien
gtcaggacatttctacgggcctagg

SEQ ID NO: 376 - DNA, 25 bp, Homo sapien
cctaggcccgtagaaatgtcctgac

SEQ ID NO: 377 - DNA, 25 bp, Homo sapien
gggcggttgtctcattgctgcacac

SEQ ID NO: 378 - DNA, 25 bp, Homo sapien
gtgtgcagcaatgagacaaccgccc

SEQ ID NO: 379 - DNA, 25 bp, Homo sapien
tatagatacgtatacttaccattat

SEQ ID NO: 380 - DNA, 25 bp, Homo sapien
ataatggtaagtatacgtatctata

SEQ ID NO: 381 - DNA, 25 bp, Homo sapien
aaggaactacttcatggaaggttaa

SEQ ID NO: 382 - DNA, 25 bp, Homo sapien
ttaaccttccatgaagtagttcctt

SEQ ID NO: 383 - DNA, 25 bp, Homo sapien
tagtacttgctttgaattcattaat

SEQ ID NO: 384 - DNA, 25 bp, Homo sapien
attaatgaattcaaagcaagtacta

SEQ ID NO: 385 - DNA, 25 bp, Homo sapien
aaatagtttgacatgaaaaagtgac

SEQ ID NO: 386 - DNA, 25 bp, Homo sapien
gtcactttttcatgtcaaactattt

SEQ ID NO: 387 - DNA, 25 bp, Homo sapien
ccggagcacgagtggttctcagacg

SEQ ID NO: 388 - DNA, 25 bp, Homo sapien
cgtctgagaaccactcgtgctccgg

SEQ ID NO: 389 - DNA, 25 bp, Homo sapien
tcaataactacgtcttacctacggt

SEQ ID NO: 390 - DNA, 25 bp, Homo sapien
accgtaggtaagacgtagttattga

SEQ ID NO: 391 - DNA, 25 bp, Homo sapien
ctcccctggccgactccggacgaac

SEQ ID NO: 392 - DNA, 25 bp, Homo sapien
gttcgtccggagtcggccaggggag

SEQ ID NO: 393 - DNA, 25 bp, Homo sapien
cggatgttagtataaccatagtttt

SEQ ID NO: 394 - DNA, 25 bp, Homo sapien
aaaactatggttatactaacatccg

SEQ ID NO: 395 - DNA, 25 bp, Homo sapien
ttaatgcagatggtagaacatgtac

SEQ ID NO: 396 - DNA, 25 bp, Homo sapien
gtacatgttctaccatctgcattaa

SEQ ID NO: 397 - DNA, 25 bp, Homo sapien
gggacgggggccttgagcgggcgtg

SEQ ID NO: 398 - DNA, 25 bp, Homo sapien
cacgcccgctcaaggcccccgtccc

SEQ ID NO: 399 - DNA, 25 bp, Homo sapien
gacaggtctatcacggaacggacgg

SEQ ID NO: 400 - DNA, 25 bp, Homo sapien
ccgtccgttccgtgatagacctgtc

SEQ ID NO: 401 - DNA, 25 bp, Homo sapien
aagttggaatcgacatattttcgtc

SEQ ID NO: 402 - DNA, 25 bp, Homo sapien
gacgaaaatatgtcgattccaactt

SEQ ID NO: 403 - DNA, 25 bp, Homo sapien
gaacatttccagaagtgggaaaagt

SEQ ID NO: 404 - DNA, 25 bp, Homo sapien
acttttcccacttctggaaatgttc

SEQ ID NO: 405 - DNA, 25 bp, Homo sapien
aggtgttcgagaagataaaattagt

SEQ ID NO: 406 - DNA, 25 bp, Homo sapien
actaattttatcttctcgaacacct

SEQ ID NO: 407 - DNA, 25 bp, Homo sapien
ggcgggggtctagcggaggtgcggg

SEQ ID NO: 408 - DNA, 25 bp, Homo sapien
cccgcacctccgctagacccccgcc

SEQ ID NO: 409 - DNA, 25 bp, Homo sapien
gacggtccgccgtctggactcgggc

SEQ ID NO: 410 - DNA, 25 bp, Homo sapien
gcccgagtccagacggcggaccgtc

SEQ ID NO: 411 - DNA, 25 bp, Homo sapien
cccttcttggcgacctgtcgggacg

SEQ ID NO: 412 - DNA, 25 bp, Homo sapien
cgtcccgacaggtcgccaagaaggg

SEQ ID NO: 413 - DNA, 25 bp, Homo sapien
gaccaggactgcggaacaggccccc

SEQ ID NO: 414 - DNA, 25 bp, Homo sapien
gggggcctgttccgcagtcctggtc

SEQ ID NO: 415 - DNA, 25 bp, Homo sapien
caggactgcggaacaggccccctcg

SEQ ID NO: 416 - DNA, 25 bp, Homo sapien
cgagggggcctgttccgcagtcctg

SEQ ID NO: 417 - DNA, 25 bp, Homo sapien
gtcgagcactacgggcttgcgagaa

SEQ ID NO: 418 - DNA, 25 bp, Homo sapien
ttctcgcaagcccgtagtgctcgac

SEQ ID NO: 419 - DNA, 25 bp, Homo sapien
tattctagtcagagtaagacctgaa

SEQ ID NO: 420 - DNA, 25 bp, Homo sapien
ttcaggtcttactctgactagaata

SEQ ID NO: 421 - DNA, 25 bp, Homo sapien
gagcagcgagagacttgggtccggg

SEQ ID NO: 422 - DNA, 25 bp, Homo sapien
cccggacccaagtctctcgctgctc

SEQ ID NO: 423 - DNA, 25 bp, Homo sapien
aatcggacgatccatagcgttaact

SEQ ID NO: 424 - DNA, 25 bp, Homo sapien
agttaacgctatggatcgtccgatt

SEQ ID NO: 425 - DNA, 25 bp, Homo sapien
tcggcggaggagggctcccgagaga

SEQ ID NO: 426 - DNA, 25 bp, Homo sapien
tctctcgggagccctcctccgccga

SEQ ID NO: 427 - DNA, 25 bp, Homo sapien
cgtagacctacgatggtagcggttt

SEQ ID NO: 428 - DNA, 25 bp, Homo sapien
aaaccgctaccatcgtaggtctacg

SEQ ID NO: 429 - DNA, 25 bp, Homo sapien
cgatatcgatatactaatttaaaaa

SEQ ID NO: 430 - DNA, 25 bp, Homo sapien
tttttaaattagtatatcgatatcg

SEQ ID NO: 431 - DNA, 25 bp, Homo sapien
tgtgtaatactcgacatattgaaag

SEQ ID NO: 432 - DNA, 25 bp, Homo sapien
ctttcaatatgtcgagtattacaca

SEQ ID NO: 433 - DNA, 25 bp, Homo sapien
gtccgggtgtctgtctaaatagaac

SEQ ID NO: 434 - DNA, 25 bp, Homo sapien
gttctatttagacagacacccggac

SEQ ID NO: 435 - DNA, 25 bp, Homo sapien
acatcttttgttccattctaagaat

SEQ ID NO: 436 - DNA, 25 bp, Homo sapien
attcttagaatggaacaaaagatgt

SEQ ID NO: 437 - DNA, 25 bp, Homo sapien
cgtggacgtgtggactcggggacgt

SEQ ID NO: 438 - DNA, 25 bp, Homo sapien
acgtccccgagtccacacgtccacg

SEQ ID NO: 439 - DNA, 25 bp, Homo sapien
acaagtatcttcgttgtagaagaac

SEQ ID NO: 440 - DNA, 25 bp, Homo sapien
gttcttctacaacgaagatacttgt

SEQ ID NO: 441 - DNA, 25 bp, Homo sapien
aaagacaagtatcttcgttgtagaa

SEQ ID NO: 442 - DNA, 25 bp, Homo sapien
ttctacaacgaagatacttgtcttt

SEQ ID NO: 443 - DNA, 25 bp, Homo sapien
atttacctaagaacagtcaatatag

SEQ ID NO: 444 - DNA, 25 bp, Homo sapien
ctatattgactgttcttaggtaaat

SEQ ID NO: 445 - DNA, 25 bp, Homo sapien
aaagtagtcattgtatctgtataag

SEQ ID NO: 446 - DNA, 25 bp, Homo sapien
cttatacagatacaatgactacttt

SEQ ID NO: 447 - DNA, 25 bp, Homo sapien
acgcgcgggacgcgcctgggcgcga

SEQ ID NO: 448 - DNA, 25 bp, Homo sapien
tcgcgcccaggcgcgtcccgcgcgt

SEQ ID NO: 449 - DNA, 25 bp, Homo sapien
agtaacatgtcttaactttaataat

SEQ ID NO: 450 - DNA, 25 bp, Homo sapien
attattaaagttaagacatgttact

SEQ ID NO: 451 - DNA, 25 bp, Homo sapien
acggaaaggttccagagcgggtcga

SEQ ID NO: 452 - DNA, 25 bp, Homo sapien
tcgacccgctctggaacctttccgt

SEQ ID NO: 453 - DNA, 25 bp, Homo sapien
tgacctttagctaaaatccttataa

SEQ ID NO: 454 - DNA, 25 bp, Homo sapien
ttataaggattttagctaaaggtca

SEQ ID NO: 455 - DNA, 25 bp, Homo sapien
gggtaccggagagcgtccgtccttc

SEQ ID NO: 456 - DNA, 25 bp, Homo sapien
gaaggacggacgctctccggtaccc

SEQ ID NO: 457 - DNA, 25 bp, Homo sapien
gtcggtctctggtctatgctaggtc

SEQ ID NO: 458 - DNA, 25 bp, Homo sapien
gacctagcatagaccagagaccgac

SEQ ID NO: 459 - DNA, 25 bp, Homo sapien
tgactgtgatgtaggaaagaacttt

SEQ ID NO: 460 - DNA, 25 bp, Homo sapien
aaagttctttcctacatcacagtca

SEQ ID NO: 461 - DNA, 25 bp, Homo sapien
gtactttagcaaagaggaatagacc

SEQ ID NO: 462 - DNA, 25 bp, Homo sapien
ggtctattcctctttgctaaagtac

SEQ ID NO: 463 - DNA, 25 bp, Homo sapien
aattctgaacaagtcactgatggta

SEQ ID NO: 464 - DNA, 25 bp, Homo sapien
taccatcagtgacttgttcagaatt

SEQ ID NO: 465 - DNA, 25 bp, Homo sapien
gcccttgcggtgtgaggcgggaccg

SEQ ID NO: 466 - DNA, 25 bp, Homo sapien
cggtcccgcctcacaccgcaagggc

SEQ ID NO: 467 - DNA, 25 bp, Homo sapien
tattgtcataatggttttttacaca

SEQ ID NO: 468 - DNA, 25 bp, Homo sapien
tgtgtaaaaaaccattatgacaata

SEQ ID NO: 469 - DNA, 25 bp, Homo sapien
agacatcataattataatccttatt

SEQ ID NO: 470 - DNA, 25 bp, Homo sapien
aataaggattataattatgatgtct

SEQ ID NO: 471 - DNA, 25 bp, Homo sapien
tagacatcataattataatccttat

SEQ ID NO: 472 - DNA, 25 bp, Homo sapien
ataaggattataattatgatgtcta

SEQ ID NO: 473 - DNA, 25 bp, Homo sapien
tttagacatcataattataatcctt

SEQ ID NO: 474 - DNA, 25 bp, Homo sapien
aaggattataattatgatgtctaaa

SEQ ID NO: 475 - DNA, 25 bp, Homo sapien
atttagacatcataattataatcct

SEQ ID NO: 476 - DNA, 25 bp, Homo sapien
aggattataattatgatgtctaaat

SEQ ID NO: 477 - DNA, 25 bp, Homo sapien
ttccacttacttattcaggttgtat

SEQ ID NO: 478 - DNA, 25 bp, Homo sapien
atacaacctgaataagtaagtggaa

SEQ ID NO: 479 - DNA, 25 bp, Homo sapien
aagccggtcgactcgactgaaaagt

SEQ ID NO: 480 - DNA, 25 bp, Homo sapien
acttttcagtcgagtcgaccggctt

SEQ ID NO: 481 - DNA, 25 bp, Homo sapien
cgaaaagaagagatgatgtcgcttc

SEQ ID NO: 482 - DNA, 25 bp, Homo sapien
gaagcgacatcatctcttcttttcg

SEQ ID NO: 483 - DNA, 25 bp, Homo sapien
atgtagttactactataatattccg

SEQ ID NO: 484 - DNA, 25 bp, Homo sapien
cggaatattatagtagtaactacat

SEQ ID NO: 485 - DNA, 25 bp, Homo sapien
gtcaccttacagtcttactcgtgta

SEQ ID NO: 486 - DNA, 25 bp, Homo sapien
tacacgagtaagactgtaaggtgac

SEQ ID NO: 487 - DNA, 25 bp, Homo sapien
gagataaaatctaaacagttagtct

SEQ ID NO: 488 - DNA, 25 bp, Homo sapien
agactaactgtttagattttatctc

SEQ ID NO: 489 - DNA, 25 bp, Homo sapien
ccgaagtcgtgggtcaagtccggtc

SEQ ID NO: 490 - DNA, 25 bp, Homo sapien
gaccggacttgacccacgacttcgg

SEQ ID NO: 491 - DNA, 25 bp, Homo sapien
gcacgggccgctacaggggttgcgc

SEQ ID NO: 492 - DNA, 25 bp, Homo sapien
gcgcaacccctgtagcggcccgtgc

SEQ ID NO: 493 - DNA, 25 bp, Homo sapien
ctccaccttttaccagtaccgagag

SEQ ID NO: 494 - DNA, 25 bp, Homo sapien
ctctcggtactggtaaaaggtggag

SEQ ID NO: 495 - DNA, 25 bp, Homo sapien
tggaaaaggtataaattggtgtaat

SEQ ID NO: 496 - DNA, 25 bp, Homo sapien
attacaccaatttataccttttcca

SEQ ID NO: 497 - DNA, 25 bp, Homo sapien
aataagacttagtagttcaagtaat

SEQ ID NO: 498 - DNA, 25 bp, Homo sapien
attacttgaactactaagtcttatt

SEQ ID NO: 499 - DNA, 25 bp, Homo sapien
agtagtagcaaaagagcctttagtg

SEQ ID NO: 500 - DNA, 25 bp, Homo sapien
cactaaaggctcttttgctactact

SEQ ID NO: 501 - DNA, 25 bp, Homo sapien
aaatacatgaggaccggtatcgagt

SEQ ID NO: 502 - DNA, 25 bp, Homo sapien
actcgataccggtcctcatgtattt

SEQ ID NO: 503 - DNA, 25 bp, Homo sapien
gtcgaagccgtcgttccgggagcca

SEQ ID NO: 504 - DNA, 25 bp, Homo sapien
tggctcccggaacgacggcttcgac

SEQ ID NO: 505 - DNA, 25 bp, Homo sapien
ggtcgacttcctggcagcgaggacc

SEQ ID NO: 506 - DNA, 25 bp, Homo sapien
ggtcctcgctgccaggaagtcgacc

SEQ ID NO: 507 - DNA, 25 bp, Homo sapien
tgttttgtctacgagataatgataa

SEQ ID NO: 508 - DNA, 25 bp, Homo sapien
ttatcattatctcgtagacaaaaca

SEQ ID NO: 509 - DNA, 25 bp, Homo sapien
accacttcaatacgaaggagtgtac

SEQ ID NO: 510 - DNA, 25 bp, Homo sapien
gtacactccttcgtattgaagtggt

SEQ ID NO: 511 - DNA, 25 bp, Homo sapien
gggtagggcgcctcaactcgagtac

SEQ ID NO: 512 - DNA, 25 bp, Homo sapien
gtactcgagttgaggcgccctaccc

SEQ ID NO: 513 - DNA, 25 bp, Homo sapien
tccgaccgcagcacgagagttccat

SEQ ID NO: 514 - DNA, 25 bp, Homo sapien
atggaactctcgtgctgcggtcgga

SEQ ID NO: 515 - DNA, 25 bp, Homo sapien
cgactgtacgacaccccggtgaagt

SEQ ID NO: 516 - DNA, 25 bp, Homo sapien
acttcaccggggtgtcgtacagtcg

SEQ ID NO: 517 - DNA, 25 bp, Homo sapien
cggtttgtggacctacaaatgtggt

SEQ ID NO: 518 - DNA, 25 bp, Homo sapien
accacatttgtaggtccacaaaccg

SEQ ID NO: 519 - DNA, 25 bp, Homo sapien
tcttgtttgaaggtcggtcggcacc

SEQ ID NO: 520 - DNA, 25 bp, Homo sapien
ggtgccgaccgaccttcaaacaaga

SEQ ID NO: 521 - DNA, 25 bp, Homo sapien
cgaggcgggacctggcggcgggaca

SEQ ID NO: 522 - DNA, 25 bp, Homo sapien
tgtcccgccgccaggtcccgcctcg

SEQ ID NO: 523 - DNA, 25 bp, Homo sapien
gcgtcgaggcgggacctggcggcgg

SEQ ID NO: 524 - DNA, 25 bp, Homo sapien
ccgccgccaggtcccgcctcgacgc

SEQ ID NO: 525 - DNA, 25 bp, Homo sapien
gtcgaggcgggacctggcggcggga

SEQ ID NO: 526 - DNA, 25 bp, Homo sapien
tcccgccgccaggtcccgcctcgac

SEQ ID NO: 527 - DNA, 25 bp, Homo sapien
ccggcggagacgtggtgagcggttg

SEQ ID NO: 528 - DNA, 25 bp, Homo sapien
caaccgctcaccacgtctccgccgg

SEQ ID NO: 529 - DNA, 25 bp, Homo sapien
acctcttctggagaagtaaccttcg

SEQ ID NO: 530 - DNA, 25 bp, Homo sapien
cgaaggttacttctccagaagaggt

SEQ ID NO: 531 - DNA, 25 bp, Homo sapien
acggtgtacgcagtcgtctacctgt

SEQ ID NO: 532 - DNA, 25 bp, Homo sapien
acaggtagacgactgcgtacaccgt

SEQ ID NO: 533 - DNA, 25 bp, Homo sapien
cgtctgtctacgtacctccggccga

SEQ ID NO: 534 - DNA, 25 bp, Homo sapien
tcggccggaggtacgtagacagacg

SEQ ID NO: 535 - DNA, 25 bp, Homo sapien
ccattgtttgattcttaaagtaagt

SEQ ID NO: 536 - DNA, 25 bp, Homo sapien
acttactttaagaatcaaacaatgg

SEQ ID NO: 537 - DNA, 25 bp, Homo sapien
ggaaggaactaacatggaccaaggt

SEQ ID NO: 538 - DNA, 25 bp, Homo sapien
accttggtccatgttagttccttcc

SEQ ID NO: 539 - DNA, 25 bp, Homo sapien
gattcaatatacgagcaagtaattt

SEQ ID NO: 540 - DNA, 25 bp, Homo sapien
aaattacttgctcgtatattgaatc

SEQ ID NO: 541 - DNA, 25 bp, Homo sapien
gatagtactgttattactttagatg

SEQ ID NO: 542 - DNA, 25 bp, Homo sapien
catctaaagtaataacagtactatc

SEQ ID NO: 543 - DNA, 25 bp, Homo sapien
ggagcaactcttattgtcattatgt

SEQ ID NO: 544 - DNA, 25 bp, Homo sapien
acataatgacaataagagttgctcc

SEQ ID NO: 545 - DNA, 25 bp, Homo sapien
tctggaactagcattctgacaatct

SEQ ID NO: 546 - DNA, 25 bp, Homo sapien
agattgtcagaatgctagttccaga

SEQ ID NO: 547 - DNA, 25 bp, Homo sapien
gcccgtggtgggtgcgaggttcagg

SEQ ID NO: 548 - DNA, 25 bp, Homo sapien
cctgaacctcgcacccaccacgggc

SEQ ID NO: 549 - DNA, 25 bp, Homo sapien
agttcaatttgctatacaatgtagt

SEQ ID NO: 550 - DNA, 25 bp, Homo sapien
actacattgtatagcaaattgaact

SEQ ID NO: 551 - DNA, 25 bp, Homo sapien
aaaaagaaacggattgtatagactg

SEQ ID NO: 552 - DNA, 25 bp, Homo sapien
cagtctatacaatccgtttcttttt

SEQ ID NO: 553 - DNA, 25 bp, Homo sapien
ctgaaccaatcaaggtatattaagt

SEQ ID NO: 554 - DNA, 25 bp, Homo sapien
acttaatataccttgattggttcag

SEQ ID NO: 555 - DNA, 25 bp, Homo sapien
cccgagggtccactgtgggggtgac

SEQ ID NO: 556 - DNA, 25 bp, Homo sapien
gtcacccccacagtggaccctcggg

SEQ ID NO: 557 - DNA, 25 bp, Homo sapien
gatgtagtaaccacactgtctacga

SEQ ID NO: 558 - DNA, 25 bp, Homo sapien
tcgtagacagtgtggttactacatc

SEQ ID NO: 559 - DNA, 25 bp, Homo sapien
ccctgagccggtcctcccgcgggta

SEQ ID NO: 560 - DNA, 25 bp, Homo sapien
tacccgcgggaggaccggctcaggg

SEQ ID NO: 561 - DNA, 25 bp, Homo sapien
agaaacggacactctcaaacacaca

SEQ ID NO: 562 - DNA, 25 bp, Homo sapien
tgtgtgtttgagagtgtccgtttct

SEQ ID NO: 563 - DNA, 25 bp, Homo sapien
atagtttcaccaacactggagggac

SEQ ID NO: 564 - DNA, 25 bp, Homo sapien
gtccctccagtgttggtgaaactat

SEQ ID NO: 565 - DNA, 25 bp, Homo sapien
cgagggtccacaggcgcaggtggac

SEQ ID NO: 566 - DNA, 25 bp, Homo sapien
gtccacctgcgcctgtggaccctcg

SEQ ID NO: 567 - DNA, 25 bp, Homo sapien
ccagtgtaagcacgagtagtgacag

SEQ ID NO: 568 - DNA, 25 bp, Homo sapien
ctgtcactactcgtgcttacactgg

SEQ ID NO: 569 - DNA, 25 bp, Homo sapien
tttgccgtcagaaaataaaccgtct

SEQ ID NO: 570 - DNA, 25 bp, Homo sapien
agacggtttattttctgacggcaaa

SEQ ID NO: 571 - DNA, 25 bp, Homo sapien
tccatcggagatcccgggaagaccg

SEQ ID NO: 572 - DNA, 25 bp, Homo sapien
cggtcttcccgggatctccgatgga

SEQ ID NO: 573 - DNA, 25 bp, Homo sapien
ccggcccagcggaggtctcgagaac

SEQ ID NO: 574 - DNA, 25 bp, Homo sapien
gttctcgagacctccgctgggccgg

SEQ ID NO: 575 - DNA, 25 bp, Homo sapien
ctcctcgaagacccgggcctctgcg

SEQ ID NO: 576 - DNA, 25 bp, Homo sapien
cgcagaggcccgggtcttcgaggag

SEQ ID NO: 577 - DNA, 25 bp, Homo sapien
gatagataggaaagaacttatgaga

SEQ ID NO: 578 - DNA, 25 bp, Homo sapien
tctcataagttctttcctatctatc

SEQ ID NO: 579 - DNA, 25 bp, Homo sapien
agagacaaaggcgtgttagagggag

SEQ ID NO: 580 - DNA, 25 bp, Homo sapien
ctccctctaacacgcctttgtctct

SEQ ID NO: 581 - DNA, 25 bp, Homo sapien
gacctcctgtccacttaggcctacc

SEQ ID NO: 582 - DNA, 25 bp, Homo sapien
ggtaggcctaagtggacaggaggtc

SEQ ID NO: 583 - DNA, 25 bp, Homo sapien
taccaggtaaaagaatggtgtaggt

SEQ ID NO: 584 - DNA, 25 bp, Homo sapien
acctacaccattcttttacctggta

SEQ ID NO: 585 - DNA, 25 bp, Homo sapien
gtaccacttactctacaaattctct

SEQ ID NO: 586 - DNA, 25 bp, Homo sapien
agagaatttgtagagtaagtggtac

SEQ ID NO: 587 - DNA, 25 bp, Homo sapien
cacatgacgaactaatgagacgacg

SEQ ID NO: 588 - DNA, 25 bp, Homo sapien
cgtcgtctcattagttcgtcatgtg

SEQ ID NO: 589 - DNA, 25 bp, Homo sapien
tactcgtaggcaaatagaaacacca

SEQ ID NO: 590 - DNA, 25 bp, Homo sapien
tggtgtttctatttgcctacgagta

SEQ ID NO: 591 - DNA, 25 bp, Homo sapien
gtcccggtgacatacaagtgagaga

SEQ ID NO: 592 - DNA, 25 bp, Homo sapien
tctctcacttgtatgtcaccgggac

SEQ ID NO: 593 - DNA, 25 bp, Homo sapien
caaaggtcctcgtgattcacaggtt

SEQ ID NO: 594 - DNA, 25 bp, Homo sapien
aacctgtgaatcacgaggacctttg

SEQ ID NO: 595 - DNA, 25 bp, Homo sapien
ggtgactatggagggaccttttcaa

SEQ ID NO: 596 - DNA, 25 bp, Homo sapien
ttgaaaaggtccctccatagtcacc

SEQ ID NO: 597 - DNA, 25 bp, Homo sapien
atatgtcgcgcggtaggtctctcga

SEQ ID NO: 598 - DNA, 25 bp, Homo sapien
tcgagagacctaccgcgcgacatat

SEQ ID NO: 599 - DNA, 25 bp, Homo sapien
ctcgtcctcccgactacgtcaggac

SEQ ID NO: 600 - DNA, 25 bp, Homo sapien
gtcctgacgtagtcgggaggacgag

SEQ ID NO: 601 - DNA, 25 bp, Homo sapien
gtcggtccccagtaacactggattt

SEQ ID NO: 602 - DNA, 25 bp, Homo sapien
aaatccagtgttactggggaccgac

SEQ ID NO: 603 - DNA, 25 bp, Homo sapien
acgtcggtttgggtagattgtggaa

SEQ ID NO: 604 - DNA, 25 bp, Homo sapien
ttccacaatctacccaaaccgacgt

SEQ ID NO: 605 - DNA, 25 bp, Homo sapien
gacttttatcagttttagttcgagt

SEQ ID NO: 606 - DNA, 25 bp, Homo sapien
actcgaactaaaactgataaaagtc

SEQ ID NO: 607 - DNA, 25 bp, Homo sapien
tccgggccgcgtgtccccagaccca

SEQ ID NO: 608 - DNA, 25 bp, Homo sapien
tgggtctggggacacgcggcccgga

SEQ ID NO: 609 - DNA, 25 bp, Homo sapien
attggggactacgcgaccgccggcg

SEQ ID NO: 610 - DNA, 25 bp, Homo sapien
cgccggcggtcgcgtagtccccaat

SEQ ID NO: 611 - DNA, 25 bp, Homo sapien
ttggggactacgcgaccgccggcgt

SEQ ID NO: 612 - DNA, 25 bp, Homo sapien
acgccggcggtcgcgtagtccccaa

SEQ ID NO: 613 - DNA, 25 bp, Homo sapien
tccctacagattcggtccggcatct

SEQ ID NO: 614 - DNA, 25 bp, Homo sapien
agatgccggaccgaatctgtaggga

SEQ ID NO: 615 - DNA, 25 bp, Homo sapien
cggtacgaacttatgaaacatagat

SEQ ID NO: 616 - DNA, 25 bp, Homo sapien
atctatgtttcataagttcgtaccg

SEQ ID NO: 617 - DNA, 25 bp, Homo sapien
ttggtgcccctctcggaagcagttg

SEQ ID NO: 618 - DNA, 25 bp, Homo sapien
caactgcttccgagaggggcaccaa

SEQ ID NO: 619 - DNA, 25 bp, Homo sapien
gactcccactcaggcgacagacgac

SEQ ID NO: 620 - DNA, 25 bp, Homo sapien
gtcgtctgtcgcctgagtgggagtc

SEQ ID NO: 621 - DNA, 25 bp, Homo sapien
taagattgtagatcccagtttaaag

SEQ ID NO: 622 - DNA, 25 bp, Homo sapien
ctttaaactgggatctacaatctta

SEQ ID NO: 623 - DNA, 25 bp, Homo sapien
ttctgttgtgctacaagatccttct

SEQ ID NO: 624 - DNA, 25 bp, Homo sapien
agaaggatcttgtagcacaacagaa

SEQ ID NO: 625 - DNA, 25 bp, Homo sapien
cgtccaggcgccgcaaacccctcgc

SEQ ID NO: 626 - DNA, 25 bp, Homo sapien
gcgaggggtttgcggcgcctggacg

SEQ ID NO: 627 - DNA, 25 bp, Homo sapien
gaacagggaaataatcgtatcacaa

SEQ ID NO: 628 - DNA, 25 bp, Homo sapien
ttgtgatacgattatttccctgttc

SEQ ID NO: 629 - DNA, 25 bp, Homo sapien
gtaggtacttatgtatttcatgaaa

SEQ ID NO: 630 - DNA, 25 bp, Homo sapien
tttcatgaaatacataagtacctac

SEQ ID NO: 631 - DNA, 25 bp, Homo sapien
actccgtcaatcgtggtctcttaat

SEQ ID NO: 632 - DNA, 25 bp, Homo sapien
attaagagaccacgattgacggagt

SEQ ID NO: 633 - DNA, 25 bp, Homo sapien
ggttgagacgacattggcgaggaac

SEQ ID NO: 634 - DNA, 25 bp, Homo sapien
gttcctcgccaatgtcgtctcaacc

SEQ ID NO: 635 - DNA, 25 bp, Homo sapien
gagaaattattctgtttcggactga

SEQ ID NO: 636 - DNA, 25 bp, Homo sapien
tcagtccgaaacagaataatttctc

SEQ ID NO: 637 - DNA, 25 bp, Homo sapien
cacgtcgcggttccgacctgggtcc

SEQ ID NO: 638 - DNA, 25 bp, Homo sapien
ggacccaggtcggaaccgcgacgtg

SEQ ID NO: 639 - DNA, 25 bp, Homo sapien
tactcgttactttaattctacaaat

SEQ ID NO: 640 - DNA, 25 bp, Homo sapien
atttgtagaattaaagtaacgagta

SEQ ID NO: 641 - DNA, 25 bp, Homo sapien
ctactcgttactttaattctacaaa

SEQ ID NO: 642 - DNA, 25 bp, Homo sapien
tttgtagaattaaagtaacgagtag

SEQ ID NO: 643 - DNA, 25 bp, Homo sapien
ttagtgattaaagacttgttcataa

SEQ ID NO: 644 - DNA, 25 bp, Homo sapien
ttatgaacaagtctttaatcactaa

SEQ ID NO: 645 - DNA, 25 bp, Homo sapien
ggacccgcgacagccctgaccgaca

SEQ ID NO: 646 - DNA, 25 bp, Homo sapien
tgtcggtcagggctgtcgcgggtcc

SEQ ID NO: 647 - DNA, 25 bp, Homo sapien
acgccgacgtggcacgggttcgggc

SEQ ID NO: 648 - DNA, 25 bp, Homo sapien
gcccgaacccgtgccacgtcggcgt

SEQ ID NO: 649 - DNA, 25 bp, Homo sapien
gtcctctcacagagtttcgacgacg

SEQ ID NO: 650 - DNA, 25 bp, Homo sapien
cgtcgtcgaaactctgtgagaggac

SEQ ID NO: 651 - DNA, 25 bp, Homo sapien
acgtgaagacttctaggaaagcaac

SEQ ID NO: 652 - DNA, 25 bp, Homo sapien
gttgctttcctagaagtcttcacgt

SEQ ID NO: 653 - DNA, 25 bp, Homo sapien
cgtctcgtttaaccgttgatattaa

SEQ ID NO: 654 - DNA, 25 bp, Homo sapien
ttaatatcaacggttaaacgagacg

SEQ ID NO: 655 - DNA, 25 bp, Homo sapien
cgtctccccgagaaccctgtcggac

SEQ ID NO: 656 - DNA, 25 bp, Homo sapien
gtccgacagggttctcggggagacg

SEQ ID NO: 657 - DNA, 25 bp, Homo sapien
aaatgcatcgataaaggataattat

SEQ ID NO: 658 - DNA, 25 bp, Homo sapien
ataattatcctttatcgatgcattt

SEQ ID NO: 659 - DNA, 25 bp, Homo sapien
gaacacctggatacgtatttagaag

SEQ ID NO: 660 - DNA, 25 bp, Homo sapien
cttctaaatacgtatccaggtgttc

SEQ ID NO: 661 - DNA, 25 bp, Homo sapien
acaggcggaagcgaggttcccagcc

SEQ ID NO: 662 - DNA, 25 bp, Homo sapien
ggctgggaacctcgcttccgcctgt

SEQ ID NO: 663 - DNA, 25 bp, Homo sapien
ttcataattgacttcctagtaaaag

SEQ ID NO: 664 - DNA, 25 bp, Homo sapien
cttttactaggaagtcaattatgaa

SEQ ID NO: 665 - DNA, 25 bp, Homo sapien
gtctcgaaaccggagtgctgccggt

SEQ ID NO: 666 - DNA, 25 bp, Homo sapien
accggcagcactccggtttcgagac

SEQ ID NO: 667 - DNA, 25 bp, Homo sapien
cggccaggtgccagggacgtcgtgg

SEQ ID NO: 668 - DNA, 25 bp, Homo sapien
ccacgacgtccctggcacctggccg

SEQ ID NO: 669 - DNA, 25 bp, Homo sapien
gaagtaaatcttgacacccgtagac

SEQ ID NO: 670 - DNA, 25 bp, Homo sapien
gtctacgggtgtcaagatttacttc

SEQ ID NO: 671 - DNA, 25 bp, Homo sapien
aagatttagattgagttgattctcc

SEQ ID NO: 672 - DNA, 25 bp, Homo sapien
ggagaatcaactcaatctaaatctt

SEQ ID NO: 673 - DNA, 25 bp, Homo sapien
agaggctcggctgggcgagtctccg

SEQ ID NO: 674 - DNA, 25 bp, Homo sapien
cggagactcgcccagccgagcctct

SEQ ID NO: 675 - DNA, 25 bp, Homo sapien
tcctcggtcccaggaggtagactac

SEQ ID NO: 676 - DNA, 25 bp, Homo sapien
gtagtctacctcctgggaccgagga

SEQ ID NO: 677 - DNA, 25 bp, Homo sapien
ggtgtggagatctgtaagaggtgat

SEQ ID NO: 678 - DNA, 25 bp, Homo sapien
atcacctcttacagatctccacacc

SEQ ID NO: 679 - DNA, 25 bp, Homo sapien
ggacaaaaccgagacacctcgtatg

SEQ ID NO: 680 - DNA, 25 bp, Homo sapien
catacgaggtgtctcggttttgtcc

SEQ ID NO: 681 - DNA, 25 bp, Homo sapien
cgacaagaaaaatccccgtgccgtg

SEQ ID NO: 682 - DNA, 25 bp, Homo sapien
cacggcacggggatttttcttgtcg

SEQ ID NO: 683 - DNA, 25 bp, Homo sapien
actgtagtcctactatttttgtgta

SEQ ID NO: 684 - DNA, 25 bp, Homo sapien
tacacaaaaatagtaggactacagt

SEQ ID NO: 685 - DNA, 25 bp, Homo sapien
acagacaagagaatatgaggcgtag

SEQ ID NO: 686 - DNA, 25 bp, Homo sapien
ctacgcctcatattctcttgtctgt

SEQ ID NO: 687 - DNA, 25 bp, Homo sapien
aaggatatcattatcttaagagaga

SEQ ID NO: 688 - DNA, 25 bp, Homo sapien
tctctcttaagataatgatatcctt

SEQ ID NO: 689 - DNA, 25 bp, Homo sapien
ggtccttccgtcagagaggtgttgt

SEQ ID NO: 690 - DNA, 25 bp, Homo sapien
acaacacctctctgacggaaggacc

SEQ ID NO: 691 - DNA, 25 bp, Homo sapien
cacggccacggtgaggccgtccccg

SEQ ID NO: 692 - DNA, 25 bp, Homo sapien
cggggacggcctcaccgtggccgtg

SEQ ID NO: 693 - DNA, 25 bp, Homo sapien
gggtcgggacacctcgagcgactcg

SEQ ID NO: 694 - DNA, 25 bp, Homo sapien
cgagtcgctcgaggtgtcccgaccc

SEQ ID NO: 695 - DNA, 25 bp, Homo sapien
tccccgagggcggtcttgggctcgg

SEQ ID NO: 696 - DNA, 25 bp, Homo sapien
ccgagcccaagaccgccctcgggga

SEQ ID NO: 697 - DNA, 25 bp, Homo sapien
ccaactaaatctggtttcagagacg

SEQ ID NO: 698 - DNA, 25 bp, Homo sapien
cgtctctgaaaccagatttagttgg

SEQ ID NO: 699 - DNA, 25 bp, Homo sapien
agaacctcttgataattatcttaaa

SEQ ID NO: 700 - DNA, 25 bp, Homo sapien
tttaagataattatcaagaggttct

SEQ ID NO: 701 - DNA, 25 bp, Homo sapien
ataaagaacctcttgataattatct

SEQ ID NO: 702 - DNA, 25 bp, Homo sapien
agataattatcaagaggttctttat

SEQ ID NO: 703 - DNA, 25 bp, Homo sapien
aatattattattacactggttcaaa

SEQ ID NO: 704 - DNA, 25 bp, Homo sapien
tttgaaccagtgtaataataatatt

SEQ ID NO: 705 - DNA, 25 bp, Homo sapien
cgtcccacaactggtggtcggcgaa

SEQ ID NO: 706 - DNA, 25 bp, Homo sapien
ttcgccgaccaccagttgtgggacg

SEQ ID NO: 707 - DNA, 25 bp, Homo sapien
tgccgcccccgggagcgcacctgtg

SEQ ID NO: 708 - DNA, 25 bp, Homo sapien
cacaggtgcgctcccgggggcggca

SEQ ID NO: 709 - DNA, 25 bp, Homo sapien
caagtctcggcggtgccggtcatgc

SEQ ID NO: 710 - DNA, 25 bp, Homo sapien
gcatgaccggcaccgccgagacttg

SEQ ID NO: 711 - DNA, 25 bp, Homo sapien
ttaacataaacatctacaggtcatt

SEQ ID NO: 712 - DNA, 25 bp, Homo sapien
aatgacctgtagatgtttatgttaa

SEQ ID NO: 713 - DNA, 25 bp, Homo sapien
gggtgccacccaccgagtctgtcgc

SEQ ID NO: 714 - DNA, 25 bp, Homo sapien
gcgacagactcggtgggtggcaccc

SEQ ID NO: 715 - DNA, 25 bp, Homo sapien
ataaattccactacaagtttttaca

SEQ ID NO: 716 - DNA, 25 bp, Homo sapien
tgtaaaaacttgtagtggaatttat

SEQ ID NO: 717 - DNA, 25 bp, Homo sapien
tatcctaataattgtagtaatggta

SEQ ID NO: 718 - DNA, 25 bp, Homo sapien
taccattactacaattattaggata

SEQ ID NO: 719 - DNA, 25 bp, Homo sapien
atcctaataattgtagtaatggtaa

SEQ ID NO: 720 - DNA, 25 bp, Homo sapien
ttaccattactacaattattaggat

SEQ ID NO: 721 - DNA, 25 bp, Homo sapien
agcctaatgttaattgtcctatgac

SEQ ID NO: 722 - DNA, 25 bp, Homo sapien
gtcataggacaattaacattaggct

SEQ ID NO: 723 - DNA, 25 bp, Homo sapien
acacttttcaacttcaacgacaggg

SEQ ID NO: 724 - DNA, 25 bp, Homo sapien
ccctgtcgttgaagttgaaaagtgt

SEQ ID NO: 725 - DNA, 25 bp, Homo sapien
gacctcagaggcactgaaaggggcg

SEQ ID NO: 726 - DNA, 25 bp, Homo sapien
cgcccctttcagtgcctctgaggtc

SEQ ID NO: 727 - DNA, 25 bp, Homo sapien
cgggtccgacgtgtctgtgggtccg

SEQ ID NO: 728 - DNA, 25 bp, Homo sapien
cggacccacagacacgtcggacccg

SEQ ID NO: 729 - DNA, 25 bp, Homo sapien
aaaggtataacgaccagtgagggag

SEQ ID NO: 730 - DNA, 25 bp, Homo sapien
ctccctcactggtcgttataccttt

SEQ ID NO: 731 - DNA, 25 bp, Homo sapien
gataggtgggacccgccgacaccgg

SEQ ID NO: 732 - DNA, 25 bp, Homo sapien
ccggtgtcggcgggtcccacctatc

SEQ ID NO: 733 - DNA, 25 bp, Homo sapien
gagggagacgctacgacagcagttt

SEQ ID NO: 734 - DNA, 25 bp, Homo sapien
aaactgctgtcgtagcgtctccctc

SEQ ID NO: 735 - DNA, 25 bp, Homo sapien
gtcactacattcacctcttcgaacg

SEQ ID NO: 736 - DNA, 25 bp, Homo sapien
cgttcgaagaggtgaatgtagtgac

SEQ ID NO: 737 - DNA, 25 bp, Homo sapien
gggtgagacaagtacgtcccggtgt

SEQ ID NO: 738 - DNA, 25 bp, Homo sapien
acaccgggacgtacttgtctcaccc

SEQ ID NO: 739 - DNA, 25 bp, Homo sapien
cctcggcggacacgtcccgccagcg

SEQ ID NO: 740 - DNA, 25 bp, Homo sapien
cgctggcgggacgtgtccgccgagg

SEQ ID NO: 741 - DNA, 25 bp, Homo sapien
tcggcggacacgtcccgccagcgtc

SEQ ID NO: 742 - DNA, 25 bp, Homo sapien
gacgctggcgggacgtgtccgccga

SEQ ID NO: 743 - DNA, 25 bp, Homo sapien
gggcagacctgagaacttaaacgac

SEQ ID NO: 744 - DNA, 25 bp, Homo sapien
gtcgtttaagttctcaggtctgccc

SEQ ID NO: 745 - DNA, 25 bp, Homo sapien
gccggttcggccacgggcgcgggtg

SEQ ID NO: 746 - DNA, 25 bp, Homo sapien
cacccgcgcccgtggccgaaccggc

SEQ ID NO: 747 - DNA, 25 bp, Homo sapien
cgcgcgccggttcggccacgggcgc

SEQ ID NO: 748 - DNA, 25 bp, Homo sapien
gcgcccgtggccgaaccggcgcgcg

SEQ ID NO: 749 - DNA, 25 bp, Homo sapien
caccggtcttaacagtaaaggtgac

SEQ ID NO: 750 - DNA, 25 bp, Homo sapien
gtcacctttactgttaagaccggtg

SEQ ID NO: 751 - DNA, 25 bp, Homo sapien
ccggtaaagagaacgtgcgtgtcga

SEQ ID NO: 752 - DNA, 25 bp, Homo sapien
tcgacacgcacgttctctttaccgg

SEQ ID NO: 753 - DNA, 25 bp, Homo sapien
agacgtcgtgtggtcgctcgtaccg

SEQ ID NO: 754 - DNA, 25 bp, Homo sapien
cggtacgagcgaccacacgacgtct

SEQ ID NO: 755 - DNA, 25 bp, Homo sapien
acttgaacctctcgtaccccagaaa

SEQ ID NO: 756 - DNA, 25 bp, Homo sapien
tttctggggtacgagaggttcaagt

SEQ ID NO: 757 - DNA, 25 bp, Homo sapien
agatccttccattatttaatattat

SEQ ID NO: 758 - DNA, 25 bp, Homo sapien
ataatattaaataatggaaggatct

SEQ ID NO: 759 - DNA, 25 bp, Homo sapien
caggtgtgcgccgtcccactgacga

SEQ ID NO: 760 - DNA, 25 bp, Homo sapien
tcgtcagtgggacggcgcacacctg

SEQ ID NO: 761 - DNA, 25 bp, Homo sapien
cgacccacgtgggacggctcggtgg

SEQ ID NO: 762 - DNA, 25 bp, Homo sapien
ccaccgagccgtcccacgtgggtcg

SEQ ID NO: 763 - DNA, 25 bp, Homo sapien
cgtgacttatcgcacggcaaggcgt

SEQ ID NO: 764 - DNA, 25 bp, Homo sapien
acgccttgccgtgcgataagtcacg

SEQ ID NO: 765 - DNA, 25 bp, Homo sapien
aagaccattaactgaatcttccgga

SEQ ID NO: 766 - DNA, 25 bp, Homo sapien
tccggaagattcagttaatggtctt

SEQ ID NO: 767 - DNA, 25 bp, Homo sapien
ggcctctctaaccatacctgtaaag

SEQ ID NO: 768 - DNA, 25 bp, Homo sapien
ctttacaggtatggttagagaggcc

SEQ ID NO: 769 - DNA, 25 bp, Homo sapien
cccgggacagacacggccggcactc

SEQ ID NO: 770 - DNA, 25 bp, Homo sapien
gagtgccggccgtgtctgtcccggg

SEQ ID NO: 771 - DNA, 25 bp, Homo sapien
tgaggaccttgttccccaagtacct

SEQ ID NO: 772 - DNA, 25 bp, Homo sapien
aggtacttggggaacaaggtcctca

SEQ ID NO: 773 - DNA, 25 bp, Homo sapien
ggtgtcacccggacggtacttatgg

SEQ ID NO: 774 - DNA, 25 bp, Homo sapien
ccataagtaccgtccgggtgacacc

SEQ ID NO: 775 - DNA, 25 bp, Homo sapien
tccgtgtgaacgtttatacagaatt

SEQ ID NO: 776 - DNA, 25 bp, Homo sapien
aattctgtataaacgttcacacgga

SEQ ID NO: 777 - DNA, 25 bp, Homo sapien
gttcattttagtgattgtttcctac

SEQ ID NO: 778 - DNA, 25 bp, Homo sapien
gtaggaaacaatcactaaaatgaac

SEQ ID NO: 779 - DNA, 25 bp, Homo sapien
gtgacagtaaaagaacttttaacag

SEQ ID NO: 780 - DNA, 25 bp, Homo sapien
ctgttaaaagttcttttactgtcac

SEQ ID NO: 781 - DNA, 25 bp, Homo sapien
agtgcggtcgccctcccgtttgaac

SEQ ID NO: 782 - DNA, 25 bp, Homo sapien
gttcaaacgggagggcgaccgcact

SEQ ID NO: 783 - DNA, 25 bp, Homo sapien
acctatcgttttatacagagtaata

SEQ ID NO: 784 - DNA, 25 bp, Homo sapien
tattactctgtataaaacgataggt

SEQ ID NO: 785 - DNA, 25 bp, Homo sapien
ggaggcgacagttccgcccccttgg

SEQ ID NO: 786 - DNA, 25 bp, Homo sapien
ccaagggggcggaactgtcgcctcc

SEQ ID NO: 787 - DNA, 25 bp, Homo sapien
gaaaccttcagtgtcacccatatgt

SEQ ID NO: 788 - DNA, 25 bp, Homo sapien
acatatgggtgacactgaaggtttc

SEQ ID NO: 789 - DNA, 25 bp, Homo sapien
ggccgcgtctttgcgcgaccggtca

SEQ ID NO: 790 - DNA, 25 bp, Homo sapien
tgaccggtcgcgcaaagacgcggcc

SEQ ID NO: 791 - DNA, 25 bp, Homo sapien
tccgctgcggccgtgccaccgcgac

SEQ ID NO: 792 - DNA, 25 bp, Homo sapien
gtcgcggtggcacggccgcagcgga

SEQ ID NO: 793 - DNA, 25 bp, Homo sapien
cctcgaccttcagcggcggcccggg

SEQ ID NO: 794 - DNA, 25 bp, Homo sapien
cccgggccgccgctgaaggtcgagg

SEQ ID NO: 795 - DNA, 25 bp, Homo sapien
acagtaagtcaagttgcgcttaaaa

SEQ ID NO: 796 - DNA, 25 bp, Homo sapien
ttttaagcgcaacttgacttactgt

SEQ ID NO: 797 - DNA, 25 bp, Homo sapien
aagggcacacaggtacaaatttccg

SEQ ID NO: 798 - DNA, 25 bp, Homo sapien
cggaaatttgtacctgtgtgccctt

SEQ ID NO: 799 - DNA, 25 bp, Homo sapien
cgtccttgccgggcgtcaccggaga

SEQ ID NO: 800 - DNA, 25 bp, Homo sapien
tctccggtgacgcccggcaaggacg

SEQ ID NO: 801 - DNA, 25 bp, Homo sapien
ggcgcccccgcggaggcgtggggta

SEQ ID NO: 802 - DNA, 25 bp, Homo sapien
taccccacgcctccgcgggggcgcc

SEQ ID NO: 803 - DNA, 25 bp, Homo sapien
gctcgcggcccagggtcggggcgcc

SEQ ID NO: 804 - DNA, 25 bp, Homo sapien
ggcgccccgaccctgggccgcgagc

SEQ ID NO: 805 - DNA, 25 bp, Homo sapien
gtctgtaccacagtgctcaaagaaa

SEQ ID NO: 806 - DNA, 25 bp, Homo sapien
tttctttgagcactgtggtacagac

SEQ ID NO: 807 - DNA, 25 bp, Homo sapien
gtgtttgtttatgttagagaagttt

SEQ ID NO: 808 - DNA, 25 bp, Homo sapien
aaacttctctaacataaacaaacac

SEQ ID NO: 809 - DNA, 25 bp, Homo sapien
gtcgagacggccgtcgcgggacggg

SEQ ID NO: 810 - DNA, 25 bp, Homo sapien
cccgtcccgcgacggccgtctcgac

SEQ ID NO: 811 - DNA, 25 bp, Homo sapien
acagtgaacggtactggcgatcccg

SEQ ID NO: 812 - DNA, 25 bp, Homo sapien
cgggatcgccagtaccgttcactgt

SEQ ID NO: 813 - DNA, 25 bp, Homo sapien
gacaacatatgacttatgacggtat

SEQ ID NO: 814 - DNA, 25 bp, Homo sapien
ataccgtcataagtcatatgttgtc

SEQ ID NO: 815 - DNA, 25 bp, Homo sapien
atgattcttatgctataacgttacc

SEQ ID NO: 816 - DNA, 25 bp, Homo sapien
ggtaacgttatagcataagaatcat

SEQ ID NO: 817 - DNA, 25 bp, Homo sapien
gtaaaaacaactgttcattatagat

SEQ ID NO: 818 - DNA, 25 bp, Homo sapien
atctataatgaacagttgtttttac

SEQ ID NO: 819 - DNA, 25 bp, Homo sapien
ttgagaacaatcgttagaatctaat

SEQ ID NO: 820 - DNA, 25 bp, Homo sapien
attagattctaacgattgttctcaa

SEQ ID NO: 821 - DNA, 25 bp, Homo sapien
gcggctacggaagctccgacacttt

SEQ ID NO: 822 - DNA, 25 bp, Homo sapien
aaagtgtcggagcttccgtagccgc

SEQ ID NO: 823 - DNA, 25 bp, Homo sapien
gggtcagaatattctcgaacataaa

SEQ ID NO: 824 - DNA, 25 bp, Homo sapien
tttatgttcgagaatattctgaccc

SEQ ID NO: 825 - DNA, 25 bp, Homo sapien
gccgagggacgcgttcagcccgctc

SEQ ID NO: 826 - DNA, 25 bp, Homo sapien
gagcgggctgaacgcgtccctcggc

SEQ ID NO: 827 - DNA, 25 bp, Homo sapien
gcggctcgggcagggaaccgccacc

SEQ ID NO: 828 - DNA, 25 bp, Homo sapien
ggtggcggttccctgcccgagccgc

SEQ ID NO: 829 - DNA, 25 bp, Homo sapien
gacgtccaaggcggctcgggcaggg

SEQ ID NO: 830 - DNA, 25 bp, Homo sapien
ccctgcccgagccgccttggacgtc

SEQ ID NO: 831 - DNA, 25 bp, Homo sapien
gaggcagcgatagggctcctgggag

SEQ ID NO: 832 - DNA, 25 bp, Homo sapien
ctcccaggagccctatcgctgcctc

SEQ ID NO: 833 - DNA, 25 bp, Homo sapien
cctggaccaaatagatacggtgact

SEQ ID NO: 834 - DNA, 25 bp, Homo sapien
agtcaccgtatctatttggtccagg

SEQ ID NO: 835 - DNA, 25 bp, Homo sapien
tttatataaagtaatcctcacagtg

SEQ ID NO: 836 - DNA, 25 bp, Homo sapien
cactgtgaggattactttatataaa

SEQ ID NO: 837 - DNA, 25 bp, Homo sapien
tatttatataaagtaatcctcacag

SEQ ID NO: 838 - DNA, 25 bp, Homo sapien
ctgtgaggattactttatataaata

SEQ ID NO: 839 - DNA, 25 bp, Homo sapien
cccgtccgggagttgcgacaggggc

SEQ ID NO: 840 - DNA, 25 bp, Homo sapien
gcccctgtcgcaactcccggacggg

SEQ ID NO: 841 - DNA, 25 bp, Homo sapien
gcccgtccgggagttgcgacagggg

SEQ ID NO: 842 - DNA, 25 bp, Homo sapien
cccctgtcgcaactcccggacgggc

SEQ ID NO: 843 - DNA, 25 bp, Homo sapien
gggttccacattaattactgaacaa

SEQ ID NO: 844 - DNA, 25 bp, Homo sapien
ttgttcagtaattaatgtggaaccc

SEQ ID NO: 845 - DNA, 25 bp, Homo sapien
cctctccggcgggactgtgtactcg

SEQ ID NO: 846 - DNA, 25 bp, Homo sapien
cgagtacacagtcccgccggagagg

SEQ ID NO: 847 - DNA, 25 bp, Homo sapien
tcacgacggtctagggtttacgtag

SEQ ID NO: 848 - DNA, 25 bp, Homo sapien
ctacgtaaaccctagaccgtcgtga

SEQ ID NO: 849 - DNA, 25 bp, Homo sapien
gtgcgaaggccgttctaccaggacg

SEQ ID NO: 850 - DNA, 25 bp, Homo sapien
cgtcctggtagaacggccttcgcac

SEQ ID NO: 851 - DNA, 25 bp, Homo sapien
ctgaaggcacaccaaccgaaccacg

SEQ ID NO: 852 - DNA, 25 bp, Homo sapien
cgtggttcggttggtgtgccttcag

SEQ ID NO: 853 - DNA, 25 bp, Homo sapien
atgagaggtcctaaaacgatatgct

SEQ ID NO: 854 - DNA, 25 bp, Homo sapien
agcatatcgttttaggacctctcat

SEQ ID NO: 855 - DNA, 25 bp, Homo sapien
cgggtagatctaggtgaaatatttg

SEQ ID NO: 856 - DNA, 25 bp, Homo sapien
caaatatttcacctagatctacccg

SEQ ID NO: 857 - DNA, 25 bp, Homo sapien
tggaaggaacttcgcgcctaccgcc

SEQ ID NO: 858 - DNA, 25 bp, Homo sapien
ggcggtaggcgcgaagttccttcca

SEQ ID NO: 859 - DNA, 25 bp, Homo sapien
attcctctcaatgtccgttaaccgg

SEQ ID NO: 860 - DNA, 25 bp, Homo sapien
ccggttaacggacattgagaggaat

SEQ ID NO: 861 - DNA, 25 bp, Homo sapien
cagtctctgtgctcccgccgtgggg

SEQ ID NO: 862 - DNA, 25 bp, Homo sapien
ccccacggcgggagcacagagactg

SEQ ID NO: 863 - DNA, 25 bp, Homo sapien
cgggagcccgtcctcaccggactcg

SEQ ID NO: 864 - DNA, 25 bp, Homo sapien
cgagtccggtgaggacgggctcccg

SEQ ID NO: 865 - DNA, 25 bp, Homo sapien
caacagtcaagtgcagggtcagaag

SEQ ID NO: 866 - DNA, 25 bp, Homo sapien
cttctgaccctgcacttgactgttg

SEQ ID NO: 867 - DNA, 25 bp, Homo sapien
tctaccgacggccgggcgcacctgc

SEQ ID NO: 868 - DNA, 25 bp, Homo sapien
gcaggtgcgcccggccgtcggtaga

SEQ ID NO: 869 - DNA, 25 bp, Homo sapien
ctgttctctggcacgctcagggagg

SEQ ID NO: 870 - DNA, 25 bp, Homo sapien
cctccctgagcgtgccagagaacag

SEQ ID NO: 871 - DNA, 25 bp, Homo sapien
agcgggactgggaccaccgatcgtc

SEQ ID NO: 872 - DNA, 25 bp, Homo sapien
gacgatcggtggtcccagtcccgct

SEQ ID NO: 873 - DNA, 25 bp, Homo sapien
gattcccaagtcttctttacagtgt

SEQ ID NO: 874 - DNA, 25 bp, Homo sapien
acactgtaaagaagacttgggaatc

SEQ ID NO: 875 - DNA, 25 bp, Homo sapien
gaagttttatcactatatctacaaa

SEQ ID NO: 876 - DNA, 25 bp, Homo sapien
tttgtagatatagtgataaaacttc

SEQ ID NO: 877 - DNA, 25 bp, Homo sapien
ggttgacttaccattgttaataata

SEQ ID NO: 878 - DNA, 25 bp, Homo sapien
tattattaacaatggtaagtcaacc

SEQ ID NO: 879 - DNA, 25 bp, Homo sapien
tgcggctgccggtatcggtctcact

SEQ ID NO: 880 - DNA, 25 bp, Homo sapien
agtgagaccgataccggcagccgca

SEQ ID NO: 881 - DNA, 25 bp, Homo sapien
tgtaaagaagatattcagggtatat

SEQ ID NO: 882 - DNA, 25 bp, Homo sapien
atataccctgaatatcttctttaca

SEQ ID NO: 883 - DNA, 25 bp, Homo sapien
aaggtagttccttcgtagaaagtca

SEQ ID NO: 884 - DNA, 25 bp, Homo sapien
tgactttctacgaaggaactacctt

SEQ ID NO: 885 - DNA, 25 bp, Homo sapien
cgaggacgacgcgacgggtggggcc

SEQ ID NO: 886 - DNA, 25 bp, Homo sapien
ggccccacccgtcgcgtcgtcctcg

SEQ ID NO: 887 - DNA, 25 bp, Homo sapien
tctttcatctctagtctatcgttat

SEQ ID NO: 888 - DNA, 25 bp, Homo sapien
ataacgatagactagagatgaaaga

SEQ ID NO: 889 - DNA, 25 bp, Homo sapien
ataagaagtctgtgtcatagaaatg

SEQ ID NO: 890 - DNA, 25 bp, Homo sapien
catttctatgacacagacttcttat

SEQ ID NO: 891 - DNA, 25 bp, Homo sapien
gtttaagtagaacaataggagaaag

SEQ ID NO: 892 - DNA, 25 bp, Homo sapien
ctttctcctattgttctacttaaac

SEQ ID NO: 893 - DNA, 25 bp, Homo sapien
atgttaatggtaattatcacagtac

SEQ ID NO: 894 - DNA, 25 bp, Homo sapien
gtactgtgataattaccattaacat

SEQ ID NO: 895 - DNA, 25 bp, Homo sapien
gacaggactccctgtcccgaccccc

SEQ ID NO: 896 - DNA, 25 bp, Homo sapien
gggggtcgggacagggagtcctgtc

SEQ ID NO: 897 - DNA, 25 bp, Homo sapien
gtccagtgcacataaaagcaaaaac

SEQ ID NO: 898 - DNA, 25 bp, Homo sapien
gtttttgcttttatgtgcactggac

SEQ ID NO: 899 - DNA, 25 bp, Homo sapien
taaacgtcgcgataaaggaattaca

SEQ ID NO: 900 - DNA, 25 bp, Homo sapien
tgtaattcctttatcgcgacgttta

SEQ ID NO: 901 - DNA, 25 bp, Homo sapien
cttcccgtctcgcatgaaaggtcac

SEQ ID NO: 902 - DNA, 25 bp, Homo sapien
gtgacctttcatgcgagacgggaag

SEQ ID NO: 903 - DNA, 25 bp, Homo sapien
cgaccgaggtgtcagggccgggtcc

SEQ ID NO: 904 - DNA, 25 bp, Homo sapien
ggacccggccctgacacctcggtcg

SEQ ID NO: 905 - DNA, 25 bp, Homo sapien
caccgggtatgcaccgtgcacctgt

SEQ ID NO: 906 - DNA, 25 bp, Homo sapien
acaggtgcacggtgcatacccggtg

SEQ ID NO: 907 - DNA, 25 bp, Homo sapien
tcctgcccccggtgtagcgggacag

SEQ ID NO: 908 - DNA, 25 bp, Homo sapien
ctgtcccgctacaccgggggcagga

SEQ ID NO: 909 - DNA, 25 bp, Homo sapien
tgcgcccggtgcgtcaagcacgtgt

SEQ ID NO: 910 - DNA, 25 bp, Homo sapien
acacgtgcttgacgcaccgggcgca

SEQ ID NO: 911 - DNA, 25 bp, Homo sapien
tctcttttgtttgaacggtcagttt

SEQ ID NO: 912 - DNA, 25 bp, Homo sapien
aaactgaccgttcaaacaaaagaga

SEQ ID NO: 913 - DNA, 25 bp, Homo sapien
aacaaacaacttcggatactgtgac

SEQ ID NO: 914 - DNA, 25 bp, Homo sapien
gtcacagtatccgaagttgtttgtt

SEQ ID NO: 915 - DNA, 25 bp, Homo sapien
tgtcctgggacaaatctcttctaga

SEQ ID NO: 916 - DNA, 25 bp, Homo sapien
tctagaagagatttgtcccaggaca

SEQ ID NO: 917 - DNA, 25 bp, Homo sapien
tgtagagacgagatgcaagagatat

SEQ ID NO: 918 - DNA, 25 bp, Homo sapien
atatctcttgcatctcgtctctaca

SEQ ID NO: 919 - DNA, 25 bp, Homo sapien
agtacaaatgtcgaagaaccgaacc

SEQ ID NO: 920 - DNA, 25 bp, Homo sapien
ggttcggttcttcgacatttgtact

SEQ ID NO: 921 - DNA, 25 bp, Homo sapien
aacataaaacgagctcttaaaagaa

SEQ ID NO: 922 - DNA, 25 bp, Homo sapien
ttcttttaagagctcgttttatgtt

SEQ ID NO: 923 - DNA, 25 bp, Homo sapien
actcaggtgtcgaccggctactcgg

SEQ ID NO: 924 - DNA, 25 bp, Homo sapien
ccgagtagccggtcgacacctgagt

SEQ ID NO: 925 - DNA, 25 bp, Homo sapien
caacttgacgggacaatataggtgt

SEQ ID NO: 926 - DNA, 25 bp, Homo sapien
acacctatattgtcccgtcaagttg

SEQ ID NO: 927 - DNA, 25 bp, Homo sapien
cttcaggctacaggcggggtcgaca

SEQ ID NO: 928 - DNA, 25 bp, Homo sapien
tgtcgaccccgcctgtagcctgaag

SEQ ID NO: 929 - DNA, 25 bp, Homo sapien
gggctcgtggcgctgcggtcccagg

SEQ ID NO: 930 - DNA, 25 bp, Homo sapien
cctgggaccgcagcgccacgagccc

SEQ ID NO: 931 - DNA, 25 bp, Homo sapien
tcggaccggtgtggggatataaagc

SEQ ID NO: 932 - DNA, 25 bp, Homo sapien
gctttatatccccacaccggtccga

SEQ ID NO: 933 - DNA, 25 bp, Homo sapien
gaagacgtatgcatatttaagacaa

SEQ ID NO: 934 - DNA, 25 bp, Homo sapien
ttgtcttaaatatgcatacgtcttc

SEQ ID NO: 935 - DNA, 25 bp, Homo sapien
gacgcctcgcgctgttcgggagcgg

SEQ ID NO: 936 - DNA, 25 bp, Homo sapien
ccgctcccgaacagcgcgaggcgtc

SEQ ID NO: 937 - DNA, 25 bp, Homo sapien
cgtgccggaggctacggcgcggagg

SEQ ID NO: 938 - DNA, 25 bp, Homo sapien
cctccgcgccgtagcctccggcacg

SEQ ID NO: 939 - DNA, 25 bp, Homo sapien
tcactctttaccaaataattattag

SEQ ID NO: 940 - DNA, 25 bp, Homo sapien
ctaataattatttggtaaagagtga

SEQ ID NO: 941 - DNA, 25 bp, Homo sapien
gaaaggactgtggtaaaggtaacag

SEQ ID NO: 942 - DNA, 25 bp, Homo sapien
ctgttacctttaccacagtcctttc

SEQ ID NO: 943 - DNA, 25 bp, Homo sapien
gactaatatctgtcatagttaagat

SEQ ID NO: 944 - DNA, 25 bp, Homo sapien
atcttaactatgacagatattagtc

SEQ ID NO: 945 - DNA, 25 bp, Homo sapien
gtcgggtccaggaggtccctcttcg

SEQ ID NO: 946 - DNA, 25 bp, Homo sapien
cgaagagggacctcctggacccgac

SEQ ID NO: 947 - DNA, 25 bp, Homo sapien
tcatgccggtcgctcctctccgtct

SEQ ID NO: 948 - DNA, 25 bp, Homo sapien
agacggagaggagcgaccggcatga

SEQ ID NO: 949 - DNA, 25 bp, Homo sapien
aggaactccgtgagatcaccgcccc

SEQ ID NO: 950 - DNA, 25 bp, Homo sapien
ggggcggtgatctcacggagttcct

SEQ ID NO: 951 - DNA, 25 bp, Homo sapien
acgaaatactctggtttataattcc

SEQ ID NO: 952 - DNA, 25 bp, Homo sapien
ggaattataaaccagagtatttcgt

SEQ ID NO: 953 - DNA, 25 bp, Homo sapien
ttgtagaggtgcactgccgtggtcc

SEQ ID NO: 954 - DNA, 25 bp, Homo sapien
ggaccacggcagtgcacctctacaa

SEQ ID NO: 955 - DNA, 25 bp, Homo sapien
gcagacgtccgtaggcgcgtgtcgg

SEQ ID NO: 956 - DNA, 25 bp, Homo sapien
ccgacacgcgcctacggacgtctgc

SEQ ID NO: 957 - DNA, 25 bp, Homo sapien
ctgaaggttataaagttgaggagaa

SEQ ID NO: 958 - DNA, 25 bp, Homo sapien
ttctcctcaactttataaccttcag

SEQ ID NO: 959 - DNA, 25 bp, Homo sapien
ttattctaacaacgtcaaccactac

SEQ ID NO: 960 - DNA, 25 bp, Homo sapien
gtagtggttgacgttgttagaataa

SEQ ID NO: 961 - DNA, 25 bp, Homo sapien
agggcgttagcttacacctgaaact

SEQ ID NO: 962 - DNA, 25 bp, Homo sapien
agtttcaggtgtaagctaacgccct

SEQ ID NO: 963 - DNA, 25 bp, Homo sapien
gtctatacaagacccttggagtcct

SEQ ID NO: 964 - DNA, 25 bp, Homo sapien
aggactccaagggtcttgtatagac

SEQ ID NO: 965 - DNA, 25 bp, Homo sapien
ccagtggcgtcggacgcgccctgcc

SEQ ID NO: 966 - DNA, 25 bp, Homo sapien
ggcagggcgcgtccgacgccactgg

SEQ ID NO: 967 - DNA, 25 bp, Homo sapien
ggacgcccaggcaggccaagcctcg

SEQ ID NO: 968 - DNA, 25 bp, Homo sapien
cgaggcttggcctgcctgggcgtcc

SEQ ID NO: 969 - DNA, 25 bp, Homo sapien
ggaacccgcgagagggcccacccac

SEQ ID NO: 970 - DNA, 25 bp, Homo sapien
gtgggtgggccctctcgcgggttcc

SEQ ID NO: 971 - DNA, 25 bp, Homo sapien
atatcgttggtctaatttacttatt

SEQ ID NO: 972 - DNA, 25 bp, Homo sapien
aataagtaaattagaccaacgatat

SEQ ID NO: 973 - DNA, 25 bp, Homo sapien
tagttccaataggagaaggtcaggg

SEQ ID NO: 974 - DNA, 25 bp, Homo sapien
ccctgaccttctcctattggaacta

SEQ ID NO: 975 - DNA, 25 bp, Homo sapien
cggacacgaagagacgctccgggac

SEQ ID NO: 976 - DNA, 25 bp, Homo sapien
gtcccggagcgtctcttcgtgtccg

SEQ ID NO: 977 - DNA, 25 bp, Homo sapien
tccgtacactgatctccaacaggct

SEQ ID NO: 978 - DNA, 25 bp, Homo sapien
agcctgttggagatcagtgtacgga

SEQ ID NO: 979 - DNA, 25 bp, Homo sapien
ttttgaacgtctgaaggatccttat

SEQ ID NO: 980 - DNA, 25 bp, Homo sapien
ataaggatccttcagacgttcaaaa

SEQ ID NO: 981 - DNA, 25 bp, Homo sapien
acaacatgagacatgtggcccatgt

SEQ ID NO: 982 - DNA, 25 bp, Homo sapien
acatgggccacatgtctcatgttgt

SEQ ID NO: 983 - DNA, 25 bp, Homo sapien
gacagactacatctaaagtcgttgt

SEQ ID NO: 984 - DNA, 25 bp, Homo sapien
acaacgactttagatgtagtctgtc

SEQ ID NO: 985 - DNA, 25 bp, Homo sapien
gtcaccaacctccacccccaccttc

SEQ ID NO: 986 - DNA, 25 bp, Homo sapien
gaaggtgggggtggaggttggtgac

SEQ ID NO: 987 - DNA, 25 bp, Homo sapien
atacccggtccgagcccagtcgtag

SEQ ID NO: 988 - DNA, 25 bp, Homo sapien
ctacgactgggctcggaccgggtat

SEQ ID NO: 989 - DNA, 25 bp, Homo sapien
tctccagtcagtgagaggggtcccg

SEQ ID NO: 990 - DNA, 25 bp, Homo sapien
cgggacccctctcactgactggaga

SEQ ID NO: 991 - DNA, 25 bp, Homo sapien
cggaagaattaatgaactgactaaa

SEQ ID NO: 992 - DNA, 25 bp, Homo sapien
tttagtcagttcattaattcttccg

SEQ ID NO: 993 - DNA, 25 bp, Homo sapien
gtgacgtcagctcaataaacggtgt

SEQ ID NO: 994 - DNA, 25 bp, Homo sapien
acaccgtttattgagctgacgtcac

SEQ ID NO: 995 - DNA, 25 bp, Homo sapien
agtgtgatttccatttcgtgtccgg

SEQ ID NO: 996 - DNA, 25 bp, Homo sapien
ccggacacgaaatggaaatcacact

SEQ ID NO: 997 - DNA, 25 bp, Homo sapien
cgtcgggaggtgtatagtagccatt

SEQ ID NO: 998 - DNA, 25 bp, Homo sapien
aatggctactatacacctcccgacg

SEQ ID NO: 999 - DNA, 25 bp, Homo sapien
acgttttcacagatttgaccattac

SEQ ID NO: 1000 - DNA, 25 bp, Homo sapien
gtaatggtcaaatctgtgaaaacgt

SEQ ID NO: 1001 - DNA, 25 bp, Homo sapien
cctccctcccgaaggacaggagcct

SEQ ID NO: 1002 - DNA, 25 bp, Homo sapien
aggctcctgtccttcgggagggagg

SEQ ID NO: 1003 - DNA, 25 bp, Homo sapien
gtccattgaaattgggtgacggtgc

SEQ ID NO: 1004 - DNA, 25 bp, Homo sapien
gcaccgtcacccaatttcaatggac

SEQ ID NO: 1005 - DNA, 25 bp, Homo sapien
gacggtcctatcatcgtccactcac

SEQ ID NO: 1006 - DNA, 25 bp, Homo sapien
gtgagtggacgatgataggaccgtc

SEQ ID NO: 1007 - DNA, 25 bp, Homo sapien
tagacatatagagcttaacacattg

SEQ ID NO: 1008 - DNA, 25 bp, Homo sapien
caatgtgttaagctctatatgtcta

SEQ ID NO: 1009 - DNA, 25 bp, Homo sapien
agtgactttactataaaatttaatg

SEQ ID NO: 1010 - DNA, 25 bp, Homo sapien
cattaaattttatagtaaagtcact

SEQ ID NO: 1011 - DNA, 25 bp, Homo sapien
gactctggaggacatgagacccaag

SEQ ID NO: 1012 - DNA, 25 bp, Homo sapien
cttgggtctcatgtcctccagagtc

SEQ ID NO: 1013 - DNA, 25 bp, Homo sapien
gtgaaactaatacacactatccctg

SEQ ID NO: 1014 - DNA, 25 bp, Homo sapien
cagggatagtgtgtattagtttcac

SEQ ID NO: 1015 - DNA, 25 bp, Homo sapien
acggtcttgttgacgaggcatccat

SEQ ID NO: 1016 - DNA, 25 bp, Homo sapien
atggatgcctcgtcaacaagaccgt

SEQ ID NO: 1017 - DNA, 25 bp, Homo sapien
gatacctttgtctatataaatattt

SEQ ID NO: 1018 - DNA, 25 bp, Homo sapien
aaatatttatatagacaaaggtatc

SEQ ID NO: 1019 - DNA, 25 bp, Homo sapien
acgaaggactagtcagaggtcttga

SEQ ID NO: 1020 - DNA, 25 bp, Homo sapien
tcaagacctctgactagtccttcgt

SEQ ID NO: 1021 - DNA, 25 bp, Homo sapien
tcggaagaagtacaccagaggagtt

SEQ ID NO: 1022 - DNA, 25 bp, Homo sapien
aactcctctggtgtacttcttccga

SEQ ID NO: 1023 - DNA, 25 bp, Homo sapien
tgccgggtcccgacggggcttcgcg

SEQ ID NO: 1024 - DNA, 25 bp, Homo sapien
cgcgaagccccgtcgggacccggca

SEQ ID NO: 1025 - DNA, 25 bp, Homo sapien
gtcccgacggggcttcgcgcgggtg

SEQ ID NO: 1026 - DNA, 25 bp, Homo sapien
cacccgcgcgaagccccgtcgggac

SEQ ID NO: 1027 - DNA, 25 bp, Homo sapien
actcaaactacatcttctccagaag

SEQ ID NO: 1028 - DNA, 25 bp, Homo sapien
cttctggagaagatgtagtttgagt

SEQ ID NO: 1029 - DNA, 25 bp, Homo sapien
ctactatgtttaaggcttaatggtg

SEQ ID NO: 1030 - DNA, 25 bp, Homo sapien
caccattaagccttaaacatagtag

SEQ ID NO: 1031 - DNA, 25 bp, Homo sapien
cttccgtgtgacctgcgtcgggtat

SEQ ID NO: 1032 - DNA, 25 bp, Homo sapien
atacccgacgcaggtcacacggaag

SEQ ID NO: 1033 - DNA, 25 bp, Homo sapien
gcccggcccggtacgacacggcact

SEQ ID NO: 1034 - DNA, 25 bp, Homo sapien
agtgccgtgtcgtaccgggccgggc

SEQ ID NO: 1035 - DNA, 25 bp, Homo sapien
acacccacgtgcacctgcgttcccc

SEQ ID NO: 1036 - DNA, 25 bp, Homo sapien
ggggaacgcaggtgcacgtgggtgt

SEQ ID NO: 1037 - DNA, 25 bp, Homo sapien
tacccacgatccgtcgtagtcgaag

SEQ ID NO: 1038 - DNA, 25 bp, Homo sapien
cttcgactacgacggatcgtgggta

SEQ ID NO: 1039 - DNA, 25 bp, Homo sapien
gcggcacgttaatcggcggccccag

SEQ ID NO: 1040 - DNA, 25 bp, Homo sapien
ctggggccgccgattaacgtgccgc

SEQ ID NO: 1041 - DNA, 25 bp, Homo sapien
ccagggctagaatcgaccggggtac

SEQ ID NO: 1042 - DNA, 25 bp, Homo sapien
gtaccccggtcgattctagccctgg

SEQ ID NO: 1043 - DNA, 25 bp, Homo sapien
tctgcccagtcgtcggagacgggaa

SEQ ID NO: 1044 - DNA, 25 bp, Homo sapien
ttcccgtctccgacgactgggcaga

SEQ ID NO: 1045 - DNA, 25 bp, Homo sapien
gaattcagagggtgaaagttttgat

SEQ ID NO: 1046 - DNA, 25 bp, Homo sapien
atcaaaactttcaccctctgaattc

SEQ ID NO: 1047 - DNA, 25 bp, Homo sapien
atcctactcttgtctctacttattc

SEQ ID NO: 1048 - DNA, 25 bp, Homo sapien
gaataagtagagacaagagtaggat

SEQ ID NO: 1049 - DNA, 25 bp, Homo sapien
gacgtcgtcgggtcttaggtagagg

SEQ ID NO: 1050 - DNA, 25 bp, Homo sapien
cctctacctaagacccgacgacgtc

SEQ ID NO: 1051 - DNA, 25 bp, Homo sapien
tgaaccacctacttaagtaattcgt

SEQ ID NO: 1052 - DNA, 25 bp, Homo sapien
acgaattacttaagtaggtggttca

SEQ ID NO: 1053 - DNA, 25 bp, Homo sapien
tcgactcgatttcaccctcgatacg

SEQ ID NO: 1054 - DNA, 25 bp, Homo sapien
cgtatcgagggtgaaatcgagtcga

SEQ ID NO: 1055 - DNA, 25 bp, Homo sapien
ctggactacaggtcgcctccggact

SEQ ID NO: 1056 - DNA, 25 bp, Homo sapien
agtccggaggcgacctgtagtccag

SEQ ID NO: 1057 - DNA, 25 bp, Homo sapien
gggtcgtcggtcagtggccggaggc

SEQ ID NO: 1058 - DNA, 25 bp, Homo sapien
gcctccggccactgaccgacgaccc

SEQ ID NO: 1059 - DNA, 25 bp, Homo sapien
acaagagtgacaccccacgggctaa

SEQ ID NO: 1060 - DNA, 25 bp, Homo sapien
ttagcccgtggggtgtcactcttgt

SEQ ID NO: 1061 - DNA, 25 bp, Homo sapien
aataatgtgtttattacgtacaagt

SEQ ID NO: 1062 - DNA, 25 bp, Homo sapien
acttgtacgtaataaacacattatt

SEQ ID NO: 1063 - DNA, 25 bp, Homo sapien
cgccgcacccgggccgagggacgag

SEQ ID NO: 1064 - DNA, 25 bp, Homo sapien
ctcgtccctcggcccgggtgcggcg

SEQ ID NO: 1065 - DNA, 25 bp, Homo sapien
ccgccgcacccgggccgagggacga

SEQ ID NO: 1066 - DNA, 25 bp, Homo sapien
tcgtccctcggcccgggtgcggcgg

SEQ ID NO: 1067 - DNA, 25 bp, Homo sapien
gaagcgccgcgttccgccccagcgc

SEQ ID NO: 1068 - DNA, 25 bp, Homo sapien
gcgctggggcggaacgcggcgcttc

SEQ ID NO: 1069 - DNA, 25 bp, Homo sapien
agcgccgcgttccgccccagcgccg

SEQ ID NO: 1070 - DNA, 25 bp, Homo sapien
cggcgctggggcggaacgcggcgct

SEQ ID NO: 1071 - DNA, 25 bp, Homo sapien
cacgttcctcctggcccgtcgaccg

SEQ ID NO: 1072 - DNA, 25 bp, Homo sapien
cggtcgacgggccaggaggaacgtg

SEQ ID NO: 1073 - DNA, 25 bp, Homo sapien
cactgggcctgtaggttaaggagac

SEQ ID NO: 1074 - DNA, 25 bp, Homo sapien
gtctccttaacctacaggcccagtg

SEQ ID NO: 1075 - DNA, 25 bp, Homo sapien
ccagtccgttggttcgctcccaaga

SEQ ID NO: 1076 - DNA, 25 bp, Homo sapien
tcttgggagcgaaccaacggactgg

SEQ ID NO: 1077 - DNA, 25 bp, Homo sapien
gtcggagtccgacaacctctacctt

SEQ ID NO: 1078 - DNA, 25 bp, Homo sapien
aaggtagaggttgtcggactccgac

SEQ ID NO: 1079 - DNA, 25 bp, Homo sapien
tcccataaaaggctgaaaactaagt

SEQ ID NO: 1080 - DNA, 25 bp, Homo sapien
acttagttttcagccttttatggga

SEQ ID NO: 1081 - DNA, 25 bp, Homo sapien
cacagtgtggttacgctgacgtgag

SEQ ID NO: 1082 - DNA, 25 bp, Homo sapien
ctcacgtcagcgtaaccacactgtg

SEQ ID NO: 1083 - DNA, 25 bp, Homo sapien
gggaccggggcgacgtcgcagggcc

SEQ ID NO: 1084 - DNA, 25 bp, Homo sapien
ggccctgcgacgtcgccccggtccc

SEQ ID NO: 1085 - DNA, 25 bp, Homo sapien
gtgtcgggcgcgtcgtgtcaggccc

SEQ ID NO: 1086 - DNA, 25 bp, Homo sapien
gggcctgacacgacgcgcccgacac

SEQ ID NO: 1087 - DNA, 25 bp, Homo sapien
agtaagtgttatccgaaaataatca

SEQ ID NO: 1088 - DNA, 25 bp, Homo sapien
tgattattttcggataacacttact

SEQ ID NO: 1089 - DNA, 25 bp, Homo sapien
cgtcgtcgcgtgtggcccccaagta

SEQ ID NO: 1090 - DNA, 25 bp, Homo sapien
tacttgggggccacacgcgacgacg

SEQ ID NO: 1091 - DNA, 25 bp, Homo sapien
ttgcgtctcgcttcagtgcggttag

SEQ ID NO: 1092 - DNA, 25 bp, Homo sapien
ctaaccgcactgaagcgagacgcaa

SEQ ID NO: 1093 - DNA, 25 bp, Homo sapien
gatagtccaaagaataccctctacg

SEQ ID NO: 1094 - DNA, 25 bp, Homo sapien
cgtagagggtattctttggactatc

SEQ ID NO: 1095 - DNA, 25 bp, Homo sapien
tctcgtccgcaaaacaaatacatac

SEQ ID NO: 1096 - DNA, 25 bp, Homo sapien
gtatgtatttgttttgcggacgaga

SEQ ID NO: 1097 - DNA, 25 bp, Homo sapien
cagtaacgatgggaatctctcattt

SEQ ID NO: 1098 - DNA, 25 bp, Homo sapien
aaatgagagattcccatcgttactg

SEQ ID NO: 1099 - DNA, 25 bp, Homo sapien
agtttgtcgtcaaggttcgtagaaa

SEQ ID NO: 1100 - DNA, 25 bp, Homo sapien
tttctacgaaccttgacgacaaact

SEQ ID NO: 1101 - DNA, 25 bp, Homo sapien
gacagaggttgtcttgagttacaat

SEQ ID NO: 1102 - DNA, 25 bp, Homo sapien
attgtaactcaagacaacctctgtc

SEQ ID NO: 1103 - DNA, 25 bp, Homo sapien
gtcgctctcacatcacgggttcctt

SEQ ID NO: 1104 - DNA, 25 bp, Homo sapien
aaggaacccgtgatgtgagagcgac

SEQ ID NO: 1105 - DNA, 25 bp, Homo sapien
aggacgggattgaacctttgagacg

SEQ ID NO: 1106 - DNA, 25 bp, Homo sapien
cgtctcaaaggttcaatcccgtcct

SEQ ID NO: 1107 - DNA, 25 bp, Homo sapien
cgtgtatacacgtgcccttcgacat

SEQ ID NO: 1108 - DNA, 25 bp, Homo sapien
atgtcgaagggcacgtgtatacacg

SEQ ID NO: 1109 - DNA, 25 bp, Homo sapien
tggaagagttctaggggcactttag

SEQ ID NO: 1110 - DNA, 25 bp, Homo sapien
ctaaagtgcccctagaactcttcca

SEQ ID NO: 1111 - DNA, 25 bp, Homo sapien
acgcggcgcgtacgagggacgcggt

SEQ ID NO: 1112 - DNA, 25 bp, Homo sapien
accgcgtccctcgtacgcgccgcgt

SEQ ID NO: 1113 - DNA, 25 bp, Homo sapien
acgtaagtgtgaccgcgtggtcccc

SEQ ID NO: 1114 - DNA, 25 bp, Homo sapien
ggggaccacgcggtcacacttacgt

SEQ ID NO: 1115 - DNA, 25 bp, Homo sapien
agcggcggctactaaccagggacgg

SEQ ID NO: 1116 - DNA, 25 bp, Homo sapien
ccgtccctggttagtagccgccgct

SEQ ID NO: 1117 - DNA, 25 bp, Homo sapien
agtgactcgtgacccggctgaaccg

SEQ ID NO: 1118 - DNA, 25 bp, Homo sapien
cggttcagccgggtcacgagtcact

SEQ ID NO: 1119 - DNA, 25 bp, Homo sapien
aactgtccacacaccccaccgccgt

SEQ ID NO: 1120 - DNA, 25 bp, Homo sapien
acggcggtggggtgtgtggacagtt

SEQ ID NO: 1121 - DNA, 25 bp, Homo sapien
cgtccacggcccgcggaggcgtcgg

SEQ ID NO: 1122 - DNA, 25 bp, Homo sapien
ccgacgcctccgcgggccgtggacg

SEQ ID NO: 1123 - DNA, 25 bp, Homo sapien
acgtccacggcccgcggaggcgtcg

SEQ ID NO: 1124 - DNA, 25 bp, Homo sapien
cgacgcctccgcgggccgtggacgt

SEQ ID NO: 1125 - DNA, 25 bp, Homo sapien
gtccacggcccgcggaggcgtcggc

SEQ ID NO: 1126 - DNA, 25 bp, Homo sapien
gccgacgcctccgcgggccgtggac

SEQ ID NO: 1127 - DNA, 25 bp, Homo sapien
agtcctagtcttagatctggtaaag

SEQ ID NO: 1128 - DNA, 25 bp, Homo sapien
ctttaccagatctaagactaggact

SEQ ID NO: 1129 - DNA, 25 bp, Homo sapien
cctgcggtccgctgtcgcgtctgtg

SEQ ID NO: 1130 - DNA, 25 bp, Homo sapien
cacagacgcgacagcggaccgcagg

SEQ ID NO: 1131 - DNA, 25 bp, Homo sapien
gacccttcttgatcccacgagagac

SEQ ID NO: 1132 - DNA, 25 bp, Homo sapien
gtctctcgtgggatcaagaagggtc

SEQ ID NO: 1133 - DNA, 25 bp, Homo sapien
acgttagagtagagttagtctcaac

SEQ ID NO: 1134 - DNA, 25 bp, Homo sapien
gttgagactaactctactctaacgt

SEQ ID NO: 1135 - DNA, 25 bp, Homo sapien
ctctgacgataacacaaactctcgg

SEQ ID NO: 1136 - DNA, 25 bp, Homo sapien
ccgagagtttgtgttatcgtcagag

SEQ ID NO: 1137 - DNA, 25 bp, Homo sapien
cagtgcccagacctgccccagcgtc

SEQ ID NO: 1138 - DNA, 25 bp, Homo sapien
gacgctggggcaggtctgggcactg

SEQ ID NO: 1139 - DNA, 25 bp, Homo sapien
agatagacccagtcgaaacagaggg

SEQ ID NO: 1140 - DNA, 25 bp, Homo sapien
ccctctgtttcgactgggtctatct

SEQ ID NO: 1141 - DNA, 25 bp, Homo sapien
aaattacacaagtattaagaacgag

SEQ ID NO: 1142 - DNA, 25 bp, Homo sapien
ctcgttcttaatacttgtgtaattt

SEQ ID NO: 1143 - DNA, 25 bp, Homo sapien
cagacccggcgaccccagcggaggt

SEQ ID NO: 1144 - DNA, 25 bp, Homo sapien
acctccgctggggtcgccgggtctg

SEQ ID NO: 1145 - DNA, 25 bp, Homo sapien
ccggtcgctcccactggtccacggg

SEQ ID NO: 1146 - DNA, 25 bp, Homo sapien
cccgtggaccagtgggagcgaccgg

SEQ ID NO: 1147 - DNA, 25 bp, Homo sapien
cccggtcgctcccactggtccacgg

SEQ ID NO: 1148 - DNA, 25 bp, Homo sapien
ccgtggaccagtgggagcgaccggg

SEQ ID NO: 1149 - DNA, 25 bp, Homo sapien
ggatgagggtagatattcccacacg

SEQ ID NO: 1150 - DNA, 25 bp, Homo sapien
cgtgtgggaatatctaccctcatcc

SEQ ID NO: 1151 - DNA, 25 bp, Homo sapien
ttaccaggagccactggccccgccg

SEQ ID NO: 1152 - DNA, 25 bp, Homo sapien
cggcggggccagtggctcctggtaa

SEQ ID NO: 1153 - DNA, 25 bp, Homo sapien
gttaccaggagccactggccccgcc

SEQ ID NO: 1154 - DNA, 25 bp, Homo sapien
ggcggggccagtggctcctggtaac

SEQ ID NO: 1155 - DNA, 25 bp, Homo sapien
aggtcgtaaactgacttagatagaa

SEQ ID NO: 1156 - DNA, 25 bp, Homo sapien
ttctatctaagtcagtttacgacct

SEQ ID NO: 1157 - DNA, 25 bp, Homo sapien
ataacgtgttaataacgtagataaa

SEQ ID NO: 1158 - DNA, 25 bp, Homo sapien
tttatctacgttattaacacgttat

SEQ ID NO: 1159 - DNA, 25 bp, Homo sapien
tacaacgacggtacaacgacatcct

SEQ ID NO: 1160 - DNA, 25 bp, Homo sapien
aggatgtcgttgtaccgtcgttgta

SEQ ID NO: 1161 - DNA, 25 bp, Homo sapien
cacgactctaggttaagactgagag

SEQ ID NO: 1162 - DNA, 25 bp, Homo sapien
ctctcagtcttaacctagagtcgtg

SEQ ID NO: 1163 - DNA, 25 bp, Homo sapien
ggtcaggtcggttcgcactctacgg

SEQ ID NO: 1164 - DNA, 25 bp, Homo sapien
ccgtagagtgcgaaccgacctgacc

SEQ ID NO: 1165 - DNA, 25 bp, Homo sapien
gccgtccgggccttggttggtcagg

SEQ ID NO: 1166 - DNA, 25 bp, Homo sapien
cctgaccaaccaaggcccggacggc

SEQ ID NO: 1167 - DNA, 25 bp, Homo sapien
acgggtgcgcgtgtctgtaggggtc

SEQ ID NO: 1168 - DNA, 25 bp, Homo sapien
gacccctacagacacgcgcacccgt

SEQ ID NO: 1169 - DNA, 25 bp, Homo sapien
gtgaccgggtgaactggaacgttag

SEQ ID NO: 1170 - DNA, 25 bp, Homo sapien
ctaacgttccagttcacccggtcac

SEQ ID NO: 1171 - DNA, 25 bp, Homo sapien
cctcgacgtcgaaagcacgggtaga

SEQ ID NO: 1172 - DNA, 25 bp, Homo sapien
tctacccgtgctttcgacgtcgagg

SEQ ID NO: 1173 - DNA, 25 bp, Homo sapien
agacttattgatggaaaatgtcgtt

SEQ ID NO: 1174 - DNA, 25 bp, Homo sapien
aacgacattttccatcaataagtct

SEQ ID NO: 1175 - DNA, 25 bp, Homo sapien
cagttgtttgaagcaatccacgaag

SEQ ID NO: 1176 - DNA, 25 bp, Homo sapien
cttcgtggattgcttcaaacaactg

SEQ ID NO: 1177 - DNA, 25 bp, Homo sapien
agacgacgatatttgagagtgaaag

SEQ ID NO: 1178 - DNA, 25 bp, Homo sapien
ctttcactctcaaatatcgtcgtct

SEQ ID NO: 1179 - DNA, 25 bp, Homo sapien
acctcttgtaggataggtatctgag

SEQ ID NO: 1180 - DNA, 25 bp, Homo sapien
ctcagatacctatcctacaagaggt

SEQ ID NO: 1181 - DNA, 25 bp, Homo sapien
ggtctaataaagaaggaactcacaa

SEQ ID NO: 1182 - DNA, 25 bp, Homo sapien
ttgtgagttccttctttattagacc

SEQ ID NO: 1183 - DNA, 25 bp, Homo sapien
gtggggtgcagcccgaggtggagtt

SEQ ID NO: 1184 - DNA, 25 bp, Homo sapien
aactccacctcgggctgcaccccac

SEQ ID NO: 1185 - DNA, 25 bp, Homo sapien
acggtggggtgcagcccgaggtgga

SEQ ID NO: 1186 - DNA, 25 bp, Homo sapien
tccacctcgggctgcaccccaccgt

SEQ ID NO: 1187 - DNA, 25 bp, Homo sapien
ggaccctgactcaagagagtccgag

SEQ ID NO: 1188 - DNA, 25 bp, Homo sapien
ctcggactctcttgagtcagggtcc

SEQ ID NO: 1189 - DNA, 25 bp, Homo sapien
tactcttccaagagcgggaggacct

SEQ ID NO: 1190 - DNA, 25 bp, Homo sapien
aggtcctcccgctcttggaagagta

SEQ ID NO: 1191 - DNA, 25 bp, Homo sapien
gtcccgcgggcgggctgtggtggtg

SEQ ID NO: 1192 - DNA, 25 bp, Homo sapien
caccaccacagcccgcccgcgggac

SEQ ID NO: 1193 - DNA, 25 bp, Homo sapien
aggacaggagactcagcccctatca

SEQ ID NO: 1194 - DNA, 25 bp, Homo sapien
tgataggggctgagtctcctgtcct

SEQ ID NO: 1195 - DNA, 25 bp, Homo sapien
taatagttctaaacgacgaagagtt

SEQ ID NO: 1196 - DNA, 25 bp, Homo sapien
aactcttcgtcgtttagaactatta

SEQ ID NO: 1197 - DNA, 25 bp, Homo sapien
gcatatgtaaacaaacaacatcgag

SEQ ID NO: 1198 - DNA, 25 bp, Homo sapien
ctcgatgttgtttgtttacatatgc

SEQ ID NO: 1199 - DNA, 25 bp, Homo sapien
tctaggtgttctctcatacccatct

SEQ ID NO: 1200 - DNA, 25 bp, Homo sapien
agatgggtatgagagaacacctaga

SEQ ID NO: 1201 - DNA, 25 bp, Homo sapien
tgaccaaaagatgggcccgttccgt

SEQ ID NO: 1202 - DNA, 25 bp, Homo sapien
acggaacgggcccatcttttggtca

SEQ ID NO: 1203 - DNA, 25 bp, Homo sapien
catggtgtattccacgaggtgaaag

SEQ ID NO: 1204 - DNA, 25 bp, Homo sapien
ctttcacctcgtggaatacaccatg

SEQ ID NO: 1205 - DNA, 25 bp, Homo sapien
gtcgcggtgagcgacccagaccaag

SEQ ID NO: 1206 - DNA, 25 bp, Homo sapien
cttggtctgggtcgctcaccgcgac

SEQ ID NO: 1207 - DNA, 25 bp, Homo sapien
cctgattctttactacacctgtgac

SEQ ID NO: 1208 - DNA, 25 bp, Homo sapien
gtcacaggtgtagtaaagaatcagg

SEQ ID NO: 1209 - DNA, 25 bp, Homo sapien
ctggcacacggggcctcattgtcag

SEQ ID NO: 1210 - DNA, 25 bp, Homo sapien
ctgacaatgaggccccgtgtgccag

SEQ ID NO: 1211 - DNA, 25 bp, Homo sapien
acctcggaggtgctctttctttacc

SEQ ID NO: 1212 - DNA, 25 bp, Homo sapien
ggtaaagaaagagcacctccgaggt

SEQ ID NO: 1213 - DNA, 25 bp, Homo sapien
gaaattttgactatctttgtagaca

SEQ ID NO: 1214 - DNA, 25 bp, Homo sapien
tgtctacaaagatagtcaaaatttc

SEQ ID NO: 1215 - DNA, 25 bp, Homo sapien
aaattacaataacatcaacgacaaa

SEQ ID NO: 1216 - DNA, 25 bp, Homo sapien
tttgtcgttgatgttattgtaattt

SEQ ID NO: 1217 - DNA, 25 bp, Homo sapien
gggatacctcgggaacgatgacgac

SEQ ID NO: 1218 - DNA, 25 bp, Homo sapien
gtcgtcatcgttcccgaggtatccc

SEQ ID NO: 1219 - DNA, 25 bp, Homo sapien
acactatattcttgtcatcctagac

SEQ ID NO: 1220 - DNA, 25 bp, Homo sapien
gtctaggatgacaagaatatagtgt

SEQ ID NO: 1221 - DNA, 25 bp, Homo sapien
gtattagttgaacagacagaggtag

SEQ ID NO: 1222 - DNA, 25 bp, Homo sapien
ctacctctgtctgttcaactaatac

SEQ ID NO: 1223 - DNA, 25 bp, Homo sapien
gtcagtagtagtaataaacacgttc

SEQ ID NO: 1224 - DNA, 25 bp, Homo sapien
gaacgtgtttattactactactgac

SEQ ID NO: 1225 - DNA, 25 bp, Homo sapien
gatcaatccacctctccccaataat

SEQ ID NO: 1226 - DNA, 25 bp, Homo sapien
attattggggagaggtggattgatc

SEQ ID NO: 1227 - DNA, 25 bp, Homo sapien
tgcgtcggggctcggtaccgtctcc

SEQ ID NO: 1228 - DNA, 25 bp, Homo sapien
ggagacggtaccgagccccgacgca

SEQ ID NO: 1229 - DNA, 25 bp, Homo sapien
gccgggtggtcgggccaaggtcgcc

SEQ ID NO: 1230 - DNA, 25 bp, Homo sapien
ggcgaccttggcccgaccacccggc

SEQ ID NO: 1231 - DNA, 25 bp, Homo sapien
cggacggacacttgcggttcggagg

SEQ ID NO: 1232 - DNA, 25 bp, Homo sapien
cctccgaaccgcaagtgtccgtccg

SEQ ID NO: 1233 - DNA, 25 bp, Homo sapien
ggaccgttactcttcattcagcttc

SEQ ID NO: 1234 - DNA, 25 bp, Homo sapien
gaagctgaatgaagagtaacggtcc

SEQ ID NO: 1235 - DNA, 25 bp, Homo sapien
tccgactggagcaggaatggttact

SEQ ID NO: 1236 - DNA, 25 bp, Homo sapien
agtaaccattcctgctccagtcgga

SEQ ID NO: 1237 - DNA, 25 bp, Homo sapien
tgtccggaggagaggccagccgcga

SEQ ID NO: 1238 - DNA, 25 bp, Homo sapien
tcgcggctggcctctcctccggaca

SEQ ID NO: 1239 - DNA, 25 bp, Homo sapien
gccgggttcgagtgccgcggcgcga

SEQ ID NO: 1240 - DNA, 25 bp, Homo sapien
tcgcgccgcggcactcgaacccggc

SEQ ID NO: 1241 - DNA, 25 bp, Homo sapien
acgagcgagtgcgtgtgtagtgtgt

SEQ ID NO: 1242 - DNA, 25 bp, Homo sapien
acacactacacacgcactcgctcgt

SEQ ID NO: 1243 - DNA, 25 bp, Homo sapien
tgagcctgtcatgggactcgaagga

SEQ ID NO: 1244 - DNA, 25 bp, Homo sapien
tccttcgagtcccatgacaggctca

SEQ ID NO: 1245 - DNA, 25 bp, Homo sapien
acttcgaggcccatccggcaacggg

SEQ ID NO: 1246 - DNA, 25 bp, Homo sapien
cccgttgccggatgggcctcgaagt

SEQ ID NO: 1247 - DNA, 25 bp, Homo sapien
gcgtcgtggccctggcgtcctcgcc

SEQ ID NO: 1248 - DNA, 25 bp, Homo sapien
ggcgaggacgccagggccacgacgc

SEQ ID NO: 1249 - DNA, 25 bp, Homo sapien
ggctcgcgggccctatgcaggggcg

SEQ ID NO: 1250 - DNA, 25 bp, Homo sapien
cgcccctgcatagggcccgcgagcc

SEQ ID NO: 1251 - DNA, 25 bp, Homo sapien
gctccctgtcgggaacgcatgcagg

SEQ ID NO: 1252 - DNA, 25 bp, Homo sapien
cctgcatgcgttcccgacagggagc

SEQ ID NO: 1253 - DNA, 25 bp, Homo sapien
gcaccgaagcccttggcgttgcggc

SEQ ID NO: 1254 - DNA, 25 bp, Homo sapien
gccgcaacgccaagggcttcggtgc

SEQ ID NO: 1255 - DNA, 25 bp, Homo sapien
tgacttctctactcagcgtcgtcac

SEQ ID NO: 1256 - DNA, 25 bp, Homo sapien
gtgacgacgctgagtagagaagtca

SEQ ID NO: 1257 - DNA, 25 bp, Homo sapien
gtcgagggcagactcgtacgttcag

SEQ ID NO: 1258 - DNA, 25 bp, Homo sapien
ctgaacgtacgagtctgccctcgac

SEQ ID NO: 1259 - DNA, 25 bp, Homo sapien
gggttcgggcgccagtcggagtcgg

SEQ ID NO: 1260 - DNA, 25 bp, Homo sapien
ccgactccgactggcgcccgaaccc

SEQ ID NO: 1261 - DNA, 25 bp, Homo sapien
gcccggtggagaccaacttccagtt

SEQ ID NO: 1262 - DNA, 25 bp, Homo sapien
aactggaagttggtctccaccgggc

SEQ ID NO: 1263 - DNA, 25 bp, Homo sapien
tataagtatataaaggaagtcacac

SEQ ID NO: 1264 - DNA, 25 bp, Homo sapien
gtgtgacttcctttatatacttata

SEQ ID NO: 1265 - DNA, 25 bp, Homo sapien
cccaaaggtagtcaatcggaagaag

SEQ ID NO: 1266 - DNA, 25 bp, Homo sapien
cttcttccgattgactacctttggg

SEQ ID NO: 1267 - DNA, 25 bp, Homo sapien
actatctcccgcttcttcgggttct

SEQ ID NO: 1268 - DNA, 25 bp, Homo sapien
agaacccgaagaagcgggagatagt

SEQ ID NO: 1269 - DNA, 25 bp, Homo sapien
gggtgcggccggacgtccggtggcg

SEQ ID NO: 1270 - DNA, 25 bp, Homo sapien
cgccaccggacgtccggccgcaccc

SEQ ID NO: 1271 - DNA, 25 bp, Homo sapien
ggaactcctaaaaagagagccgtcg

SEQ ID NO: 1272 - DNA, 25 bp, Homo sapien
cgacggctctctttttaggagttcc

SEQ ID NO: 1273 - DNA, 25 bp, Homo sapien
aacaaagtgttgtgctctgtatact

SEQ ID NO: 1274 - DNA, 25 bp, Homo sapien
agtatacagagcacaacactttgtt

SEQ ID NO: 1275 - DNA, 25 bp, Homo sapien
ggagagccccaaagctccacgggct

SEQ ID NO: 1276 - DNA, 25 bp, Homo sapien
agcccgtggagctttggggctctcc

SEQ ID NO: 1277 - DNA, 25 bp, Homo sapien
catcctctggttcgaaaacgacagg

SEQ ID NO: 1278 - DNA, 25 bp, Homo sapien
cctgtcgttttcgaaccagaggatg

SEQ ID NO: 1279 - DNA, 25 bp, Homo sapien
accaccgacggcccttctaggcgaa

SEQ ID NO: 1280 - DNA, 25 bp, Homo sapien
ttcgcctagaagggccgtcggtggt

SEQ ID NO: 1281 - DNA, 25 bp, Homo sapien
cccgtcgcaccgactgaccgacggc

SEQ ID NO: 1282 - DNA, 25 bp, Homo sapien
gccgtcggtcagtcggtgcgacggg

SEQ ID NO: 1283 - DNA, 25 bp, Homo sapien
tccgggtagtacctgacttcgttcc

SEQ ID NO: 1284 - DNA, 25 bp, Homo sapien
ggaacgaagtcaggtactacccgga

SEQ ID NO: 1285 - DNA, 25 bp, Homo sapien
agactttcttcatcattagattgaa

SEQ ID NO: 1286 - DNA, 25 bp, Homo sapien
ttcaatctaatgatgaagaaagtct

SEQ ID NO: 1287 - DNA, 25 bp, Homo sapien
attatatttgacctcgtacgagtat

SEQ ID NO: 1288 - DNA, 25 bp, Homo sapien
atactcgtacgaggtcaaatataat

SEQ ID NO: 1289 - DNA, 25 bp, Homo sapien
tacatcccttctaaccattacggcg

SEQ ID NO: 1290 - DNA, 25 bp, Homo sapien
cgccgtaatggttagaagggatgta

SEQ ID NO: 1291 - DNA, 25 bp, Homo sapien
tttcgtaaaacgagattctaagtca

SEQ ID NO: 1292 - DNA, 25 bp, Homo sapien
tgacttagaatctcgttttacgaaa

SEQ ID NO: 1293 - DNA, 25 bp, Homo sapien
gactgaaagaccagttccgatcttc

SEQ ID NO: 1294 - DNA, 25 bp, Homo sapien
gaagatcggaactggtctttcagtc

SEQ ID NO: 1295 - DNA, 25 bp, Homo sapien
cactacaacagaaaatactgttttc

SEQ ID NO: 1296 - DNA, 25 bp, Homo sapien
gaaaacagtattttctgttgtagtg

SEQ ID NO: 1297 - DNA, 25 bp, Homo sapien
gacccgactgacacatagtaccaag

SEQ ID NO: 1298 - DNA, 25 bp, Homo sapien
cttggtactatgtgtcagtcgggtc

SEQ ID NO: 1299 - DNA, 25 bp, Homo sapien
tactaattaatttggtgagttctta

SEQ ID NO: 1300 - DNA, 25 bp, Homo sapien
taagaactcaccaaattaattagta

SEQ ID NO: 1301 - DNA, 25 bp, Homo sapien
caaaaacccagtatgctagatgaag

SEQ ID NO: 1302 - DNA, 25 bp, Homo sapien
cttcatctagcatactgggtttttg

SEQ ID NO: 1303 - DNA, 25 bp, Homo sapien
ctttcggttgtcgtcacaatggtgt

SEQ ID NO: 1304 - DNA, 25 bp, Homo sapien
acaccattgtgacgacaaccgaaag

SEQ ID NO: 1305 - DNA, 25 bp, Homo sapien
tgcgcgaaaccccggtcacggacag

SEQ ID NO: 1306 - DNA, 25 bp, Homo sapien
ctgtccgtgaccggggtttcgcgca

SEQ ID NO: 1307 - DNA, 25 bp, Homo sapien
gaccgacgaccccactcccgccgcc

SEQ ID NO: 1308 - DNA, 25 bp, Homo sapien
ggcggcgggagtggggtcgtcggtc

SEQ ID NO: 1309 - DNA, 25 bp, Homo sapien
agggaccgaacatcatccccgggta

SEQ ID NO: 1310 - DNA, 25 bp, Homo sapien
tacccggggatgatgttcggtccct

SEQ ID NO: 1311 - DNA, 25 bp, Homo sapien
tgagcacggctcagtaccgggaaca

SEQ ID NO: 1312 - DNA, 25 bp, Homo sapien
tgttcccggtactgagccgtgctca

SEQ ID NO: 1313 - DNA, 25 bp, Homo sapien
accgaccccagggtctctgaccact

SEQ ID NO: 1314 - DNA, 25 bp, Homo sapien
agtggtcagagaccctggggtcggt

SEQ ID NO: 1315 - DNA, 25 bp, Homo sapien
ttagctcgctcataaagtgtctact

SEQ ID NO: 1316 - DNA, 25 bp, Homo sapien
agtagacactttatgagcgagctaa

SEQ ID NO: 1317 - DNA, 25 bp, Homo sapien
tgtgtctacaatagactccccccca

SEQ ID NO: 1318 - DNA, 25 bp, Homo sapien
tgggggggagtctattgtagacaca

SEQ ID NO: 1319 - DNA, 25 bp, Homo sapien
gaccttcgtgatacgtccctgtgaa

SEQ ID NO: 1320 - DNA, 25 bp, Homo sapien
ttcacagggacgtatcacgaaggtc

SEQ ID NO: 1321 - DNA, 25 bp, Homo sapien
cgaggcgtcccggggcaccccgcag

SEQ ID NO: 1322 - DNA, 25 bp, Homo sapien
ctgcggggtgccccgggacgcctcg

SEQ ID NO: 1323 - DNA, 25 bp, Homo sapien
gaggcgtcccggggcaccccgcagg

SEQ ID NO: 1324 - DNA, 25 bp, Homo sapien
cctgcggggtgccccgggacgcctc

SEQ ID NO: 1325 - DNA, 25 bp, Homo sapien
gacaccgacctcgagcccctgtacg

SEQ ID NO: 1326 - DNA, 25 bp, Homo sapien
cgtacaggggctcgaggtcggtgtc

SEQ ID NO: 1327 - DNA, 25 bp, Homo sapien
taagattcgcgtgtctctaggtatc

SEQ ID NO: 1328 - DNA, 25 bp, Homo sapien
gatacctagagacacgcgaatctta

SEQ ID NO: 1329 - DNA, 25 bp, Homo sapien
cacgagagccgtccgtacgtacggt

SEQ ID NO: 1330 - DNA, 25 bp, Homo sapien
accgtacgtacggacggctctcgtg

SEQ ID NO: 1331 - DNA, 25 bp, Homo sapien
cgtctctccccaggaacacttgaat

SEQ ID NO: 1332 - DNA, 25 bp, Homo sapien
attcaagtgttcctggggagagacg

SEQ ID NO: 1333 - DNA, 25 bp, Homo sapien
tctcctcccatctaaggggccatct

SEQ ID NO: 1334 - DNA, 25 bp, Homo sapien
agatggccccttagatgggaggaga

SEQ ID NO: 1335 - DNA, 25 bp, Homo sapien
gagacctcataccgtctacccctcc

SEQ ID NO: 1336 - DNA, 25 bp, Homo sapien
ggaggggtagacggtatgaggtctc

SEQ ID NO: 1337 - DNA, 25 bp, Homo sapien
gtcggaatcttgaggagactggtgg

SEQ ID NO: 1338 - DNA, 25 bp, Homo sapien
ccaccagtctcctcaagattccgac

SEQ ID NO: 1339 - DNA, 25 bp, Homo sapien
tggacgtctaacaggggacttcagg

SEQ ID NO: 1340 - DNA, 25 bp, Homo sapien
cctgaagtcccctgttagacgtcca

SEQ ID NO: 1341 - DNA, 25 bp, Homo sapien
catttgagtcaaacgactaagagag

SEQ ID NO: 1342 - DNA, 25 bp, Homo sapien
ctctcttagtcgtttgactcaaatg

SEQ ID NO: 1343 - DNA, 25 bp, Homo sapien
gatgattaaccgctccttaggacac

SEQ ID NO: 1344 - DNA, 25 bp, Homo sapien
gtgtcctaaggagcggttaatcatc

SEQ ID NO: 1345 - DNA, 25 bp, Homo sapien
aactccattgtctcccatccctcct

SEQ ID NO: 1346 - DNA, 25 bp, Homo sapien
aggagggatgggagacaatggagtt

SEQ ID NO: 1347 - DNA, 25 bp, Homo sapien
ttcccactccgccatctcccccgac

SEQ ID NO: 1348 - DNA, 25 bp, Homo sapien
gtcgggggagatggcggagtgggaa

SEQ ID NO: 1349 - DNA, 25 bp, Homo sapien
cctgtcaccgtcatccgcccgggac

SEQ ID NO: 1350 - DNA, 25 bp, Homo sapien
gtcccgggcggatgacggtgacagg

SEQ ID NO: 1351 - DNA, 25 bp, Homo sapien
ccttccctcgtgtcggtccttgggc

SEQ ID NO: 1352 - DNA, 25 bp, Homo sapien
gcccaaggaccgacacgagggaagg

SEQ ID NO: 1353 - DNA, 25 bp, Homo sapien
attaaaaaataagcactgggagacg

SEQ ID NO: 1354 - DNA, 25 bp, Homo sapien
cgtctcccagtgcttattttttaat

SEQ ID NO: 1355 - DNA, 25 bp, Homo sapien
atgcaagcacatcgcaacttcagat

SEQ ID NO: 1356 - DNA, 25 bp, Homo sapien
atctgaagttgcgatgtgcttgcat

SEQ ID NO: 1357 - DNA, 25 bp, Homo sapien
tcaatttccgaccaggttgacgtac

SEQ ID NO: 1358 - DNA, 25 bp, Homo sapien
gtacgtcaacctggtcggaaattga

SEQ ID NO: 1359 - DNA, 25 bp, Homo sapien
cgcgacacccgtgccggctcccacg

SEQ ID NO: 1360 - DNA, 25 bp, Homo sapien
cgtgggagccggcacgggtgtcgcg

SEQ ID NO: 1361 - DNA, 25 bp, Homo sapien
aatggtcttgtctgaactaaccacg

SEQ ID NO: 1362 - DNA, 25 bp, Homo sapien
cgtggttagttcagacaagaccatt

SEQ ID NO: 1363 - DNA, 25 bp, Homo sapien
gacgccagtcgagacggccctggag

SEQ ID NO: 1364 - DNA, 25 bp, Homo sapien
ctccagggccgtctcgactggcgtc

SEQ ID NO: 1365 - DNA, 25 bp, Homo sapien
aagtctcaagtagtaaagttcggag

SEQ ID NO: 1366 - DNA, 25 bp, Homo sapien
ctccgaactttactacttgagactt

SEQ ID NO: 1367 - DNA, 25 bp, Homo sapien
cgacccgacagccactgcgggtcgc

SEQ ID NO: 1368 - DNA, 25 bp, Homo sapien
gcgacccgcagtggctgtcgggtcg

SEQ ID NO: 1369 - DNA, 25 bp, Homo sapien
gtgacaaagagcaggagtatcggac

SEQ ID NO: 1370 - DNA, 25 bp, Homo sapien
gtccgatactcctgctctttgtcac

SEQ ID NO: 1371 - DNA, 25 bp, Homo sapien
aagaaacactatgataaacttgatg

SEQ ID NO: 1372 - DNA, 25 bp, Homo sapien
catcaagtttatcatagtgtttctt

SEQ ID NO: 1373 - DNA, 25 bp, Homo sapien
ctacctcctcacctcgatttatctc

SEQ ID NO: 1374 - DNA, 25 bp, Homo sapien
gagataaatcgaggtgaggaggtag

SEQ ID NO: 1375 - DNA, 25 bp, Homo sapien
cggccgttcattgactgtccccaca

SEQ ID NO: 1376 - DNA, 25 bp, Homo sapien
tgtggggacagtcaatgaacggccg

SEQ ID NO: 1377 - DNA, 25 bp, Homo sapien
gctcccggtctctcggcacgaggtt

SEQ ID NO: 1378 - DNA, 25 bp, Homo sapien
aacctcgtgccgagagaccgggagc

SEQ ID NO: 1379 - DNA, 25 bp, Homo sapien
attctgtatttactcgctcctgtac

SEQ ID NO: 1380 - DNA, 25 bp, Homo sapien
gtacaggagcgagtaaatacagaat

SEQ ID NO: 1381 - DNA, 25 bp, Homo sapien
gacttcgtggaggactgcataaaag

SEQ ID NO: 1382 - DNA, 25 bp, Homo sapien
cttttatgcagtcctccacgaagtc

SEQ ID NO: 1383 - DNA, 25 bp, Homo sapien
accacctcaggagcgggaccgtaca

SEQ ID NO: 1384 - DNA, 25 bp, Homo sapien
tgtacggtcccgctcctgaggtggt

SEQ ID NO: 1385 - DNA, 25 bp, Homo sapien
ttagtaaggcagatatagggtgtcg

SEQ ID NO: 1386 - DNA, 25 bp, Homo sapien
cgacaccctatatctgccttactaa

SEQ ID NO: 1387 - DNA, 25 bp, Homo sapien
tataagagaccaagtatgttagaaa

SEQ ID NO: 1388 - DNA, 25 bp, Homo sapien
tttctaacatacttggtctcttata

SEQ ID NO: 1389 - DNA, 25 bp, Homo sapien
accgtctcacctaggcgaacgggtg

SEQ ID NO: 1390 - DNA, 25 bp, Homo sapien
cacccgttcgcctaggtgagacggt

SEQ ID NO: 1391 - DNA, 25 bp, Homo sapien
tctaaggttcggtaagctatgagat

SEQ ID NO: 1392 - DNA, 25 bp, Homo sapien
atctcatagcttaccgaaccttaga

SEQ ID NO: 1393 - DNA, 25 bp, Homo sapien
gggagctcccacgagcacccgccgt

SEQ ID NO: 1394 - DNA, 25 bp, Homo sapien
acggcgggtgctcgtgggagctccc

SEQ ID NO: 1395 - DNA, 25 bp, Homo sapien
ataaaaaccagcatataattaaagt

SEQ ID NO: 1396 - DNA, 25 bp, Homo sapien
actttaattatatgctggtttttat

SEQ ID NO: 1397 - DNA, 25 bp, Homo sapien
cgggacacaccccgcgtccagacgc

SEQ ID NO: 1398 - DNA, 25 bp, Homo sapien
gcgtctggacgcggggtgtgtcccg

SEQ ID NO: 1399 - DNA, 25 bp, Homo sapien
gcgcgaaagggtgccgcggccggcg

SEQ ID NO: 1400 - DNA, 25 bp, Homo sapien
cgccggccgcggcaccctttcgcgc

SEQ ID NO: 1401 - DNA, 25 bp, Homo sapien
cgcgcgaaagggtgccgcggccggc

SEQ ID NO: 1402 - DNA, 25 bp, Homo sapien
gccggccgcggcaccctttcgcgcg

SEQ ID NO: 1403 - DNA, 25 bp, Homo sapien
ggtcactggaactcagtttcgtaac

SEQ ID NO: 1404 - DNA, 25 bp, Homo sapien
gttacgaaactgagttccagtgacc

SEQ ID NO: 1405 - DNA, 25 bp, Homo sapien
tttgcacgagatacccaatattccg

SEQ ID NO: 1406 - DNA, 25 bp, Homo sapien
cggaatattgggtatctcgtgcaaa

SEQ ID NO: 1407 - DNA, 25 bp, Homo sapien
agagttgttaagagcgttcgtggaa

SEQ ID NO: 1408 - DNA, 25 bp, Homo sapien
ttccacgaacgctcttaacaactct

SEQ ID NO: 1409 - DNA, 25 bp, Homo sapien
gtacctactattatatttggacaaa

SEQ ID NO: 1410 - DNA, 25 bp, Homo sapien
tttgtccaaatataatagtaggtac

SEQ ID NO: 1411 - DNA, 25 bp, Homo sapien
tcccgcaggtagtaccgtctaggac

SEQ ID NO: 1412 - DNA, 25 bp, Homo sapien
gtcctagacggtactacctgcggga

SEQ ID NO: 1413 - DNA, 25 bp, Homo sapien
gtcgaggtcctttcgcacggcgtcc

SEQ ID NO: 1414 - DNA, 25 bp, Homo sapien
ggacgccgtgcgaaaggacctcgac

SEQ ID NO: 1415 - DNA, 25 bp, Homo sapien
acgacaggcgcacaccggaacccga

SEQ ID NO: 1416 - DNA, 25 bp, Homo sapien
tcgggttccggtgtgcgcctgtcgt

SEQ ID NO: 1417 - DNA, 25 bp, Homo sapien
ggtactacaaggtgactccacgggt

SEQ ID NO: 1418 - DNA, 25 bp, Homo sapien
acccgtggagtcaccttgtagtacc

SEQ ID NO: 1419 - DNA, 25 bp, Homo sapien
gagtaaaactgggtttctgacttac

SEQ ID NO: 1420 - DNA, 25 bp, Homo sapien
gtaagtcagaaacccagttttactc

SEQ ID NO: 1421 - DNA, 25 bp, Homo sapien
tacaattagtgttgtaatcgtttgt

SEQ ID NO: 1422 - DNA, 25 bp, Homo sapien
acaaacgattacaacactaattgta

SEQ ID NO: 1423 - DNA, 25 bp, Homo sapien
aaattactcgttcgctcagcatgac

SEQ ID NO: 1424 - DNA, 25 bp, Homo sapien
gtcatgctgagcgaacgagtaattt

SEQ ID NO: 1425 - DNA, 25 bp, Homo sapien
actttcttcgacgaccgaatttgcg

SEQ ID NO: 1426 - DNA, 25 bp, Homo sapien
cgcaaattcggtcgtcgaagaaagt

SEQ ID NO: 1427 - DNA, 25 bp, Homo sapien
gtgtatccattaaatgaaactccgt

SEQ ID NO: 1428 - DNA, 25 bp, Homo sapien
acggagtttcatttaatggatacac

SEQ ID NO: 1429 - DNA, 25 bp, Homo sapien
tgtctgcaaaatagatgtcccaatt

SEQ ID NO: 1430 - DNA, 25 bp, Homo sapien
aattgggacatctattttgcagaca

SEQ ID NO: 1431 - DNA, 25 bp, Homo sapien
ctagaggctgggagccccgatgacc

SEQ ID NO: 1432 - DNA, 25 bp, Homo sapien
ggtcatcggggctcccagcctctag

SEQ ID NO: 1433 - DNA, 25 bp, Homo sapien
agtagtgtgttcactctcccatcgt

SEQ ID NO: 1434 - DNA, 25 bp, Homo sapien
acgatgggagagtgaacacactact

SEQ ID NO: 1435 - DNA, 25 bp, Homo sapien
aatcaaaagcaacttaagtctgaat

SEQ ID NO: 1436 - DNA, 25 bp, Homo sapien
attcagacttaagttgcttttgatt

SEQ ID NO: 1437 - DNA, 25 bp, Homo sapien
gacgagggacgaacgactatggaac

SEQ ID NO: 1438 - DNA, 25 bp, Homo sapien
gttccatagtcgttcgtccctcgtc

SEQ ID NO: 1439 - DNA, 25 bp, Homo sapien
acgtgagacagtactctgacactac

SEQ ID NO: 1440 - DNA, 25 bp, Homo sapien
gtagtgtcagagtactgtctcacgt

SEQ ID NO: 1441 - DNA, 25 bp, Homo sapien
gtccgagcggggctggtcggtcccg

SEQ ID NO: 1442 - DNA, 25 bp, Homo sapien
cgggaccgaccagccccgctcggac

SEQ ID NO: 1443 - DNA, 25 bp, Homo sapien
cgaagacccattggacattaccaac

SEQ ID NO: 1444 - DNA, 25 bp, Homo sapien
gttggtaatgtccaatgggtcttcg

SEQ ID NO: 1445 - DNA, 25 bp, Homo sapien
tacttactacttattgtaaatcaaa

SEQ ID NO: 1446 - DNA, 25 bp, Homo sapien
tttgatttacaataagtagtaagta

SEQ ID NO: 1447 - DNA, 25 bp, Homo sapien
tcgtacacttcgaagtagattctgc

SEQ ID NO: 1448 - DNA, 25 bp, Homo sapien
gcagaatctacttcgaagtgtacga

SEQ ID NO: 1449 - DNA, 25 bp, Homo sapien
aggtacactccgctccgaacttttg

SEQ ID NO: 1450 - DNA, 25 bp, Homo sapien
caaaagttcggagcggagtgtacct

SEQ ID NO: 1451 - DNA, 25 bp, Homo sapien
aaaatttgcgtcataagataatatc

SEQ ID NO: 1452 - DNA, 25 bp, Homo sapien
gatattatcttatgacgcaaatttt

SEQ ID NO: 1453 - DNA, 25 bp, Homo sapien
aagataatatcttctggaactaaaa

SEQ ID NO: 1454 - DNA, 25 bp, Homo sapien
ttttagttccagaagatattatctt

SEQ ID NO: 1455 - DNA, 25 bp, Homo sapien
gacacggagcatgatctttaatagt

SEQ ID NO: 1456 - DNA, 25 bp, Homo sapien
actattaaagatcatgctccgtgtc

SEQ ID NO: 1457 - DNA, 25 bp, Homo sapien
ccacaccttcttcggcatatagaac

SEQ ID NO: 1458 - DNA, 25 bp, Homo sapien
gttctatatgccgaagaaggtgtgg

SEQ ID NO: 1459 - DNA, 25 bp, Homo sapien
gccgctcccgcgggtcttcacggtt

SEQ ID NO: 1460 - DNA, 25 bp, Homo sapien
aaccgtgaagacccgcgggagcggc

SEQ ID NO: 1461 - DNA, 25 bp, Homo sapien
gacgagccgagcgcgcgccgctccc

SEQ ID NO: 1462 - DNA, 25 bp, Homo sapien
gggagcggcgcgcgctcggctcgtc

SEQ ID NO: 1463 - DNA, 25 bp, Homo sapien
acggttcccagagggcgtgcgtcgg

SEQ ID NO: 1464 - DNA, 25 bp, Homo sapien
ccgacgcacgccctctgggaaccgt

SEQ ID NO: 1465 - DNA, 25 bp, Homo sapien
gtcctaatacttcataattaagaag

SEQ ID NO: 1466 - DNA, 25 bp, Homo sapien
cttcttaattatgaagtattaggac

SEQ ID NO: 1467 - DNA, 25 bp, Homo sapien
gggctcacccttgtgtgcgcacgtg

SEQ ID NO: 1468 - DNA, 25 bp, Homo sapien
cacgtgcgcacacaagggtgagccc

SEQ ID NO: 1469 - DNA, 25 bp, Homo sapien
gtgtacacgtttggggagggccgag

SEQ ID NO: 1470 - DNA, 25 bp, Homo sapien
ctcggccctccccaaacgtgtacac

SEQ ID NO: 1471 - DNA, 25 bp, Homo sapien
ggagtactgtccctatcgaaagagg

SEQ ID NO: 1472 - DNA, 25 bp, Homo sapien
cctctttcgatagggacagtactcc

SEQ ID NO: 1473 - DNA, 25 bp, Homo sapien
tgtccagtagttaccaatctaataa

SEQ ID NO: 1474 - DNA, 25 bp, Homo sapien
ttattagattggtaactactggaca

SEQ ID NO: 1475 - DNA, 25 bp, Homo sapien
taatagttacgtcattaaagtattt

SEQ ID NO: 1476 - DNA, 25 bp, Homo sapien
aaatactttaatgacgtaactatta

SEQ ID NO: 1477 - DNA, 25 bp, Homo sapien
gtaattaatagttacgtcattaaag

SEQ ID NO: 1478 - DNA, 25 bp, Homo sapien
ctttaatgacgtaactattaattac

SEQ ID NO: 1479 - DNA, 25 bp, Homo sapien
accggcagtgtgttcatgggaccct

SEQ ID NO: 1480 - DNA, 25 bp, Homo sapien
agggtcccatgaacacactgccggt

SEQ ID NO: 1481 - DNA, 25 bp, Homo sapien
acaaattaacatacttatcattctt

SEQ ID NO: 1482 - DNA, 25 bp, Homo sapien
aagaatgataagtatgttaatttgt

SEQ ID NO: 1483 - DNA, 25 bp, Homo sapien
aacaaattaacatacttatcattct

SEQ ID NO: 1484 - DNA, 25 bp, Homo sapien
agaatgataagtatgttaatttgtt

SEQ ID NO: 1485 - DNA, 25 bp, Homo sapien
gaaacaaattaacatacttatcatt

SEQ ID NO: 1486 - DNA, 25 bp, Homo sapien
aatgataagtatgttaatttgtttc

SEQ ID NO: 1487 - DNA, 25 bp, Homo sapien
aaacaaattaacatacttatcattc

SEQ ID NO: 1488 - DNA, 25 bp, Homo sapien
gaatgataagtatgttaatttgttt

SEQ ID NO: 1489 - DNA, 25 bp, Homo sapien
ccccttgcagacatggcggagacgg

SEQ ID NO: 1490 - DNA, 25 bp, Homo sapien
ccgtctccgccatgtctgcaagggg

SEQ ID NO: 1491 - DNA, 25 bp, Homo sapien
tactcacatctcaagtggtccatgt

SEQ ID NO: 1492 - DNA, 25 bp, Homo sapien
acatggaccacttgagatgtgagta

SEQ ID NO: 1493 - DNA, 25 bp, Homo sapien
aatcaataattatatcatccttaag

SEQ ID NO: 1494 - DNA, 25 bp, Homo sapien
cttaaggatgatataattattgatt

SEQ ID NO: 1495 - DNA, 25 bp, Homo sapien
attatatcatccttaagtagttttc

SEQ ID NO: 1496 - DNA, 25 bp, Homo sapien
gaaaactacttaaggatgatataat

SEQ ID NO: 1497 - DNA, 25 bp, Homo sapien
atcaataattatatcatccttaagt

SEQ ID NO: 1498 - DNA, 25 bp, Homo sapien
acttaaggatgatataattattgat

SEQ ID NO: 1499 - DNA, 25 bp, Homo sapien
cgagtacatggtcgatggctgccac

SEQ ID NO: 1500 - DNA, 25 bp, Homo sapien
gtggcagccatcgaccatgtactcg

SEQ ID NO: 1501 - DNA, 25 bp, Homo sapien
gtccggacgttcgaaagctggtcaa

SEQ ID NO: 1502 - DNA, 25 bp, Homo sapien
ttgaccagctttcgaacgtccggac

SEQ ID NO: 1503 - DNA, 25 bp, Homo sapien
cggatgatgaaagtgccagtacagg

SEQ ID NO: 1504 - DNA, 25 bp, Homo sapien
cctgtactggcactttcatcatccg

SEQ ID NO: 1505 - DNA, 25 bp, Homo sapien
tcgggaccacggacgggttgggatc

SEQ ID NO: 1506 - DNA, 25 bp, Homo sapien
gatcccaacccgtccgtggtcccga

SEQ ID NO: 1507 - DNA, 25 bp, Homo sapien
atagtctccatgattacttaaatta

SEQ ID NO: 1508 - DNA, 25 bp, Homo sapien
taatttaagtaatcatggagactat

SEQ ID NO: 1509 - DNA, 25 bp, Homo sapien
ctcgtacggtccctatactaattag

SEQ ID NO: 1510 - DNA, 25 bp, Homo sapien
ctaattagtatagggaccgtacgag

SEQ ID NO: 1511 - DNA, 25 bp, Homo sapien
ggtgtcccgaacgacactgggccat

SEQ ID NO: 1512 - DNA, 25 bp, Homo sapien
atggcccagtgtcgttcgggacacc

SEQ ID NO: 1513 - DNA, 25 bp, Homo sapien
agttggaacgtaaacggatacagca

SEQ ID NO: 1514 - DNA, 25 bp, Homo sapien
tgctgtatccgtttacgttccaact

SEQ ID NO: 1515 - DNA, 25 bp, Homo sapien
gttcagaaccaaggtctaaggagtc

SEQ ID NO: 1516 - DNA, 25 bp, Homo sapien
gactccttagaccttggttctgaac

SEQ ID NO: 1517 - DNA, 25 bp, Homo sapien
tcagcatgagacttcatcggtaagt

SEQ ID NO: 1518 - DNA, 25 bp, Homo sapien
acttaccgatgaagtctcatgctga

SEQ ID NO: 1519 - DNA, 25 bp, Homo sapien
gagccgcctcgcgtcaagacgcgga

SEQ ID NO: 1520 - DNA, 25 bp, Homo sapien
tccgcgtcttgacgcgaggcggctc

SEQ ID NO: 1521 - DNA, 25 bp, Homo sapien
gtcgtggtttgttccctccctctgg

SEQ ID NO: 1522 - DNA, 25 bp, Homo sapien
ccagagggagggaacaaaccacgac

SEQ ID NO: 1523 - DNA, 25 bp, Homo sapien
tctacgacatcataacctccactgt

SEQ ID NO: 1524 - DNA, 25 bp, Homo sapien
acagtggaggttatgatgtcgtaga

SEQ ID NO: 1525 - DNA, 25 bp, Homo sapien
agccacttgagctgggcctaagccg

SEQ ID NO: 1526 - DNA, 25 bp, Homo sapien
cggcttaggcccagctcaagtggct

SEQ ID NO: 1527 - DNA, 25 bp, Homo sapien
gacgtttacacctacgtccaatgga

SEQ ID NO: 1528 - DNA, 25 bp, Homo sapien
tccattggacgtaggtgtaaacgtc

SEQ ID NO: 1529 - DNA, 25 bp, Homo sapien
gtagagaagcagtatccgtcgtcga

SEQ ID NO: 1530 - DNA, 25 bp, Homo sapien
tcgacgacggatactgcttctctac

SEQ ID NO: 1531 - DNA, 25 bp, Homo sapien
aaaagtgtgacaacttcaattacac

SEQ ID NO: 1532 - DNA, 25 bp, Homo sapien
gtgtaattgaagttgtcacactttt

SEQ ID NO: 1533 - DNA, 25 bp, Homo sapien
gatcgtacccgaccaaattctagct

SEQ ID NO: 1534 - DNA, 25 bp, Homo sapien
agctagaatttggtcgggtacgatc

SEQ ID NO: 1535 - DNA, 25 bp, Homo sapien
gaggtcgcgccgcacgagggtcgaa

SEQ ID NO: 1536 - DNA, 25 bp, Homo sapien
ttcgaccctcgtgcggcgcgacctc

SEQ ID NO: 1537 - DNA, 25 bp, Homo sapien
gcgaggcgggaggtctgggtgcggg

SEQ ID NO: 1538 - DNA, 25 bp, Homo sapien
cccgcacccagacctcccgcctcgc

SEQ ID NO: 1539 - DNA, 25 bp, Homo sapien
ccggccgggacgaggtcaccaggag

SEQ ID NO: 1540 - DNA, 25 bp, Homo sapien
ctcctggtgacctcgtcccggccgg

SEQ ID NO: 1541 - DNA, 25 bp, Homo sapien
cgtcgggtcgagtagtccgtgaagt

SEQ ID NO: 1542 - DNA, 25 bp, Homo sapien
acttcacggactactcgacccgacg

SEQ ID NO: 1543 - DNA, 25 bp, Homo sapien
tttagatttctccatgattgtacgt

SEQ ID NO: 1544 - DNA, 25 bp, Homo sapien
acgtacaatcatggagaaatctaaa

SEQ ID NO: 1545 - DNA, 25 bp, Homo sapien
aacctcgacgagcttgaagtttgcg

SEQ ID NO: 1546 - DNA, 25 bp, Homo sapien
cgcaaacttcaagctcgtcgaggtt

SEQ ID NO: 1547 - DNA, 25 bp, Homo sapien
gtcggccagaggccgggcccgcagg

SEQ ID NO: 1548 - DNA, 25 bp, Homo sapien
cctgcgggcccggcctctggccgac

SEQ ID NO: 1549 - DNA, 25 bp, Homo sapien
ccccgcgtcacggccggtcagcgcg

SEQ ID NO: 1550 - DNA, 25 bp, Homo sapien
cgcgctgaccggccgtgacgcgggg

SEQ ID NO: 1551 - DNA, 25 bp, Homo sapien
gtccgcccccgcgtcacggccggtc

SEQ ID NO: 1552 - DNA, 25 bp, Homo sapien
gaccggccgtgacgcgggggcggac

SEQ ID NO: 1553 - DNA, 25 bp, Homo sapien
tagccgtagtcccagggccctctgt

SEQ ID NO: 1554 - DNA, 25 bp, Homo sapien
acagagggccctgggactacggcta

SEQ ID NO: 1555 - DNA, 25 bp, Homo sapien
cacgacgggcgcgacgggtcgacgc

SEQ ID NO: 1556 - DNA, 25 bp, Homo sapien
gcgtcgacccgtcgcgcccgtcgtg

SEQ ID NO: 1557 - DNA, 25 bp, Homo sapien
ccacgacgggcgcgacgggtcgacg

SEQ ID NO: 1558 - DNA, 25 bp, Homo sapien
cgtcgacccgtcgcgcccgtcgtgg

SEQ ID NO: 1559 - DNA, 25 bp, Homo sapien
accacgacgggcgcgacgggtcgac

SEQ ID NO: 1560 - DNA, 25 bp, Homo sapien
gtcgacccgtcgcgcccgtcgtggt

SEQ ID NO: 1561 - DNA, 25 bp, Homo sapien
ccacgagctatttacgaataagacc

SEQ ID NO: 1562 - DNA, 25 bp, Homo sapien
ggtcttattcgtaaatagctcgtgg

SEQ ID NO: 1563 - DNA, 25 bp, Homo sapien
gtcccggcccgcccgacgcgactcg

SEQ ID NO: 1564 - DNA, 25 bp, Homo sapien
cgagtcgcgtcgggcgggccgggac

SEQ ID NO: 1565 - DNA, 25 bp, Homo sapien
gacacgtcccggcccgcccgacgcg

SEQ ID NO: 1566 - DNA, 25 bp, Homo sapien
cgcgtcgggcgggccgggacgtgtc

SEQ ID NO: 1567 - DNA, 25 bp, Homo sapien
cccggcccgcccgacgcgactcgta

SEQ ID NO: 1568 - DNA, 25 bp, Homo sapien
tacgagtcgcgtcgggcgggccggg

SEQ ID NO: 1569 - DNA, 25 bp, Homo sapien
ctttgtaaatctatttagtgtaaat

SEQ ID NO: 1570 - DNA, 25 bp, Homo sapien
atttacactaaatagatttacaaag

SEQ ID NO: 1571 - DNA, 25 bp, Homo sapien
actttgtaaatctatttagtgtaaa

SEQ ID NO: 1572 - DNA, 25 bp, Homo sapien
tttacactaaatagatttacaaagt

SEQ ID NO: 1573 - DNA, 25 bp, Homo sapien
cgtctgctcccgtgtgcgggacgaa

SEQ ID NO: 1574 - DNA, 25 bp, Homo sapien
ttcgtcccgcacacgggagcagacg

SEQ ID NO: 1575 - DNA, 25 bp, Homo sapien
aagtaacgtaatttgcaattatagg

SEQ ID NO: 1576 - DNA, 25 bp, Homo sapien
cctataattgcaaattacgttactt

SEQ ID NO: 1577 - DNA, 25 bp, Homo sapien
tctattccttaattacctgtgaagt

SEQ ID NO: 1578 - DNA, 25 bp, Homo sapien
acttcacaggtaattaaggaataga

SEQ ID NO: 1579 - DNA, 25 bp, Homo sapien
tctttttcctctattataacattcg

SEQ ID NO: 1580 - DNA, 25 bp, Homo sapien
cgaatgttataatagaggaaaaaga

SEQ ID NO: 1581 - DNA, 25 bp, Homo sapien
gttctccgcccgagggcagaccgtc

SEQ ID NO: 1582 - DNA, 25 bp, Homo sapien
gacggtctgccctcgggcggagaac

SEQ ID NO: 1583 - DNA, 25 bp, Homo sapien
ggccgacgaccgaatcaaaacaggt

SEQ ID NO: 1584 - DNA, 25 bp, Homo sapien
acctgttttgattcggtcgtcggcc

SEQ ID NO: 1585 - DNA, 25 bp, Homo sapien
acttgggtgcgcagtgtacggtcct

SEQ ID NO: 1586 - DNA, 25 bp, Homo sapien
aggaccgtacactgcgcacccaagt

SEQ ID NO: 1587 - DNA, 25 bp, Homo sapien
agtccgtcccactattccgataggg

SEQ ID NO: 1588 - DNA, 25 bp, Homo sapien
ccctatcggaatagtgggacggact

SEQ ID NO: 1589 - DNA, 25 bp, Homo sapien
taggctctcaaatgactacagttag

SEQ ID NO: 1590 - DNA, 25 bp, Homo sapien
ctaactgtagtcatttgagagccta

SEQ ID NO: 1591 - DNA, 25 bp, Homo sapien
taccacccagaagtggcagtccggt

SEQ ID NO: 1592 - DNA, 25 bp, Homo sapien
accggactgccacttctgggtggta

SEQ ID NO: 1593 - DNA, 25 bp, Homo sapien
aagtagaggtattcatataaatatg

SEQ ID NO: 1594 - DNA, 25 bp, Homo sapien
catatttatatgaatacctctactt

SEQ ID NO: 1595 - DNA, 25 bp, Homo sapien
atatattagagatactacttaaacc

SEQ ID NO: 1596 - DNA, 25 bp, Homo sapien
ggtttaagtagtatctctaatatat

SEQ ID NO: 1597 - DNA, 25 bp, Homo sapien
cgtgggtctagacgacctctaccgt

SEQ ID NO: 1598 - DNA, 25 bp, Homo sapien
acggtagaggtcgtctagacccacg

SEQ ID NO: 1599 - DNA, 25 bp, Homo sapien
tagaggaaatgaagtggttccctaa

SEQ ID NO: 1600 - DNA, 25 bp, Homo sapien
ttagggaaccacttcatttcctcta

SEQ ID NO: 1601 - DNA, 25 bp, Homo sapien
gaaggtctattctataaagtcattt

SEQ ID NO: 1602 - DNA, 25 bp, Homo sapien
aaatgactttatagaatagaccttc

SEQ ID NO: 1603 - DNA, 25 bp, Homo sapien
gtcaatcacaatctttacggaaact

SEQ ID NO: 1604 - DNA, 25 bp, Homo sapien
agtttccgtaaagattgtgattgac

SEQ ID NO: 1605 - DNA, 25 bp, Homo sapien
ggacgtgggtgctcatcttttgccg

SEQ ID NO: 1606 - DNA, 25 bp, Homo sapien
cggcaaaagatgagcacccacgtcc

SEQ ID NO: 1607 - DNA, 25 bp, Homo sapien
aagagatggaatcggagtcaacacg

SEQ ID NO: 1608 - DNA, 25 bp, Homo sapien
cgtgttgactccgattccatctctt

SEQ ID NO: 1609 - DNA, 25 bp, Homo sapien
actctcgtcgggtcctccccgtgag

SEQ ID NO: 1610 - DNA, 25 bp, Homo sapien
ctcacggggaggacccgacgagagt

SEQ ID NO: 1611 - DNA, 25 bp, Homo sapien
gtgggaagtggcaaagtcgttatac

SEQ ID NO: 1612 - DNA, 25 bp, Homo sapien
gtataacgactttgccacttcccac

SEQ ID NO: 1613 - DNA, 25 bp, Homo sapien
tatttcatcgaattgagtagtttgt

SEQ ID NO: 1614 - DNA, 25 bp, Homo sapien
acaaactactcaattcgatgaaata

SEQ ID NO: 1615 - DNA, 25 bp, Homo sapien
atttcatcgaattgagtagtttgtc

SEQ ID NO: 1616 - DNA, 25 bp, Homo sapien
gacaaactactcaattcgatgaaat

SEQ ID NO: 1617 - DNA, 25 bp, Homo sapien
cggcgtcgagggtgggtgcgagcga

SEQ ID NO: 1618 - DNA, 25 bp, Homo sapien
tcgctcgcacccaccctcgacgccg

SEQ ID NO: 1619 - DNA, 25 bp, Homo sapien
gaagtccctactagaccgtcttgga

SEQ ID NO: 1620 - DNA, 25 bp, Homo sapien
tccaagacggtctagtagggacttc

SEQ ID NO: 1621 - DNA, 25 bp, Homo sapien
gtcctcgcgcccgacgcgacccgga

SEQ ID NO: 1622 - DNA, 25 bp, Homo sapien
tccgggtcgcgtcgggcgcgaggac

SEQ ID NO: 1623 - DNA, 25 bp, Homo sapien
ggggtcccgtcctcgcgcccgacgc

SEQ ID NO: 1624 - DNA, 25 bp, Homo sapien
gcgtcgggcgcgaggacgggacccc

SEQ ID NO: 1625 - DNA, 25 bp, Homo sapien
actctaggtattcccgataaactat

SEQ ID NO: 1626 - DNA, 25 bp, Homo sapien
atagtttatcgggaatacctagagt

SEQ ID NO: 1627 - DNA, 25 bp, Homo sapien
ccccgtcgtgtcaccttcgggagtg

SEQ ID NO: 1628 - DNA, 25 bp, Homo sapien
cactcccgaaggtgacacgacgggg

SEQ ID NO: 1629 - DNA, 25 bp, Homo sapien
gcaggggtggcttggaggcacgagg

SEQ ID NO: 1630 - DNA, 25 bp, Homo sapien
cctcgtgcctccaagccacccctgc

SEQ ID NO: 1631 - DNA, 25 bp, Homo sapien
cctctttctgcgtccacgtcgagca

SEQ ID NO: 1632 - DNA, 25 bp, Homo sapien
tgctcgacgtggacgcagaaagagg

SEQ ID NO: 1633 - DNA, 25 bp, Homo sapien
ccgtgtcagcgagtagttgtgactg

SEQ ID NO: 1634 - DNA, 25 bp, Homo sapien
cagtcacaactactcgctgacacgg

SEQ ID NO: 1635 - DNA, 25 bp, Homo sapien
gcacgcgccgagaggggcctttggg

SEQ ID NO: 1636 - DNA, 25 bp, Homo sapien
cccaaaggcccctctcggcgcgtgc

SEQ ID NO: 1637 - DNA, 25 bp, Homo sapien
tggttctctttcacttcagtcataa

SEQ ID NO: 1638 - DNA, 25 bp, Homo sapien
ttatgactgaagtgaaagagaacca

SEQ ID NO: 1639 - DNA, 25 bp, Homo sapien
ttttgggaccaagacgactctgttc

SEQ ID NO: 1640 - DNA, 25 bp, Homo sapien
gaacagagtcgtcttggtcccaaaa

SEQ ID NO: 1641 - DNA, 25 bp, Homo sapien
caactaaccggtgacgtgctacttc

SEQ ID NO: 1642 - DNA, 25 bp, Homo sapien
gaagtagcacgtcaccggttagttg

SEQ ID NO: 1643 - DNA, 25 bp, Homo sapien
gggattcggtcgtccctgccgacgc

SEQ ID NO: 1644 - DNA, 25 bp, Homo sapien
gcgtcggcagggacgaccgaatccc

SEQ ID NO: 1645 - DNA, 25 bp, Homo sapien
gtccacaccatcccgggtcccttcc

SEQ ID NO: 1646 - DNA, 25 bp, Homo sapien
ggaagggacccgggatggtgtggac

SEQ ID NO: 1647 - DNA, 25 bp, Homo sapien
ttaaggactgtccttctgaactact

SEQ ID NO: 1648 - DNA, 25 bp, Homo sapien
agtagttcagaaggacagtccttaa

SEQ ID NO: 1649 - DNA, 25 bp, Homo sapien
gaggtaatgacagacggacaagaag

SEQ ID NO: 1650 - DNA, 25 bp, Homo sapien
cttcttgtccgtctgtcattacctc

SEQ ID NO: 1651 - DNA, 25 bp, Homo sapien
ccaatactcaatactcgagaaggag

SEQ ID NO: 1652 - DNA, 25 bp, Homo sapien
ctccttctcgagtattgagtattgg

SEQ ID NO: 1653 - DNA, 25 bp, Homo sapien
tccgtaggccgcctccgaagagagg

SEQ ID NO: 1654 - DNA, 25 bp, Homo sapien
cctctcttcggaggcggcctacgga

SEQ ID NO: 1655 - DNA, 25 bp, Homo sapien
tgccgtcttcggccggacctcggcg

SEQ ID NO: 1656 - DNA, 25 bp, Homo sapien
cgccgaggtccggccgaagacggca

SEQ ID NO: 1657 - DNA, 25 bp, Homo sapien
cggagtaaaataaagcctaggatgc

SEQ ID NO: 1658 - DNA, 25 bp, Homo sapien
gcatcctaggctttattttactccg

SEQ ID NO: 1659 - DNA, 25 bp, Homo sapien
ggtgccggtccccagcgaagggcgc

SEQ ID NO: 1660 - DNA, 25 bp, Homo sapien
gcgcccttcgctggggaccggcacc

SEQ ID NO: 1661 - DNA, 25 bp, Homo sapien
aatgtatgtatgtcgagaggtgtcg

SEQ ID NO: 1662 - DNA, 25 bp, Homo sapien
cgacacctctcgacatacatacatt

SEQ ID NO: 1663 - DNA, 25 bp, Homo sapien
gacccggcaccgtcgaagagacgag

SEQ ID NO: 1664 - DNA, 25 bp, Homo sapien
ctcgtctcttcgacggtgccgggtc

SEQ ID NO: 1665 - DNA, 25 bp, Homo sapien
gtgtaatttcgcgagaaatttaaga

SEQ ID NO: 1666 - DNA, 25 bp, Homo sapien
tcttaaatttctcgcgaaattacac

SEQ ID NO: 1667 - DNA, 25 bp, Homo sapien
acaccatttcattaaacacatgtaa

SEQ ID NO: 1668 - DNA, 25 bp, Homo sapien
ttacatgtgtttaatgaaatggtgt

SEQ ID NO: 1669 - DNA, 25 bp, Homo sapien
gtcggttcgggcctttccgagctca

SEQ ID NO: 1670 - DNA, 25 bp, Homo sapien
tgagctcggaaaggcccgaaccgac

SEQ ID NO: 1671 - DNA, 25 bp, Homo sapien
taagtaaaccggtatgtgcgatgac

SEQ ID NO: 1672 - DNA, 25 bp, Homo sapien
gtcatcgcacataccggtttactta

SEQ ID NO: 1673 - DNA, 25 bp, Homo sapien
tcatactatccatactattacacgt

SEQ ID NO: 1674 - DNA, 25 bp, Homo sapien
acgtgtaatagtatggatagtatga

SEQ ID NO: 1675 - DNA, 25 bp, Homo sapien
catcgtcggtcggaccatcctgagt

SEQ ID NO: 1676 - DNA, 25 bp, Homo sapien
actcaggatggtccgaccgacgatg

SEQ ID NO: 1677 - DNA, 25 bp, Homo sapien
ggtccctcctactggacatcgtcgg

SEQ ID NO: 1678 - DNA, 25 bp, Homo sapien
ccgacgatgtccagtaggagggacc

SEQ ID NO: 1679 - DNA, 25 bp, Homo sapien
gactcccggtcccttgctcccccag

SEQ ID NO: 1680 - DNA, 25 bp, Homo sapien
ctgggggagcaagggaccgggagtc

SEQ ID NO: 1681 - DNA, 25 bp, Homo sapien
gacacccactgggtgaaacaccctt

SEQ ID NO: 1682 - DNA, 25 bp, Homo sapien
aagggtgtttcacccagtgggtgtc

SEQ ID NO: 1683 - DNA, 25 bp, Homo sapien
ataatcaattcagttctagtagaaa

SEQ ID NO: 1684 - DNA, 25 bp, Homo sapien
tttctactagaactgaattgattat

SEQ ID NO: 1685 - DNA, 25 bp, Homo sapien
tataatcaattcagttctagtagaa

SEQ ID NO: 1686 - DNA, 25 bp, Homo sapien
ttctactagaactgaattgattata

SEQ ID NO: 1687 - DNA, 25 bp, Homo sapien
acatttttttcggtgctaggtgtct

SEQ ID NO: 1688 - DNA, 25 bp, Homo sapien
agacacctagcaccgaaaaaaatgt

SEQ ID NO: 1689 - DNA, 25 bp, Homo sapien
atgtcattaagtcctgtacatttat

SEQ ID NO: 1690 - DNA, 25 bp, Homo sapien
ataaatgtacaggacttaatgacat

SEQ ID NO: 1691 - DNA, 25 bp, Homo sapien
gaccgaagggccacggcgctcccgc

SEQ ID NO: 1692 - DNA, 25 bp, Homo sapien
gcgggagcgccgtggcccttcggtc

SEQ ID NO: 1693 - DNA, 25 bp, Homo sapien
gggaggaggagacgcgaccctcact

SEQ ID NO: 1694 - DNA, 25 bp, Homo sapien
agtgagggtcgcgtctcctcctccc

SEQ ID NO: 1695 - DNA, 25 bp, Homo sapien
agacacggggtgtccttattgtcaa

SEQ ID NO: 1696 - DNA, 25 bp, Homo sapien
ttgacaataaggacaccccgtgtct

SEQ ID NO: 1697 - DNA, 25 bp, Homo sapien
ggtcgacctctcgtgctccggtgta

SEQ ID NO: 1698 - DNA, 25 bp, Homo sapien
tacaccggagcacgagaggtcgacc

SEQ ID NO: 1699 - DNA, 25 bp, Homo sapien
ctacgtcggtgcagatcctactgac

SEQ ID NO: 1700 - DNA, 25 bp, Homo sapien
gtcagtaggatctgcaccgacgtag

SEQ ID NO: 1701 - DNA, 25 bp, Homo sapien
atacagtgcccggtcgttgaggtgt

SEQ ID NO: 1702 - DNA, 25 bp, Homo sapien
acacctcaacgaccgggcactgtat

SEQ ID NO: 1703 - DNA, 25 bp, Homo sapien
atatttgtcaaggtacgacgactgt

SEQ ID NO: 1704 - DNA, 25 bp, Homo sapien
acagtcgtcgtaccttgacaaatat

SEQ ID NO: 1705 - DNA, 25 bp, Homo sapien
gatattataactttagagcttatgt

SEQ ID NO: 1706 - DNA, 25 bp, Homo sapien
acataagctctaaagttataatatc

SEQ ID NO: 1707 - DNA, 25 bp, Homo sapien
tattataactttagagcttatgtct

SEQ ID NO: 1708 - DNA, 25 bp, Homo sapien
agacataagctctaaagttataata

SEQ ID NO: 1709 - DNA, 25 bp, Homo sapien
aaacttctagagtttttcatgaaat

SEQ ID NO: 1710 - DNA, 25 bp, Homo sapien
atttcatgaaaaactctagaagttt

SEQ ID NO: 1711 - DNA, 25 bp, Homo sapien
ttccgtcccgtcgtcaaacatgggt

SEQ ID NO: 1712 - DNA, 25 bp, Homo sapien
acccatgtttgacgacgggacggaa

SEQ ID NO: 1713 - DNA, 25 bp, Homo sapien
agagttgaataggaatgtcagaacc

SEQ ID NO: 1714 - DNA, 25 bp, Homo sapien
ggttctgacattcctattcaactct

SEQ ID NO: 1715 - DNA, 25 bp, Homo sapien
ctccctcgagacgcggcccaggaag

SEQ ID NO: 1716 - DNA, 25 bp, Homo sapien
cttcctgggccgcgtctcgagggag

SEQ ID NO: 1717 - DNA, 25 bp, Homo sapien
ttattttcgtcaagatattcattat

SEQ ID NO: 1718 - DNA, 25 bp, Homo sapien
ataatgaatatcttgacgaaaataa

SEQ ID NO: 1719 - DNA, 25 bp, Homo sapien
gggtcctgtcggtggcgggccggcg

SEQ ID NO: 1720 - DNA, 25 bp, Homo sapien
cgccggcccgccaccgacaggaccc

SEQ ID NO: 1721 - DNA, 25 bp, Homo sapien
gtctcgtaacacacacggcattgct

SEQ ID NO: 1722 - DNA, 25 bp, Homo sapien
agcaatgccgtgtgtgttacgagac

SEQ ID NO: 1723 - DNA, 25 bp, Homo sapien
taagggtttttctagtggtattcat

SEQ ID NO: 1724 - DNA, 25 bp, Homo sapien
atgaataccactagaaaaaccctta

SEQ ID NO: 1725 - DNA, 25 bp, Homo sapien
gggcgctgtgcgtgcgtcggccggg

SEQ ID NO: 1726 - DNA, 25 bp, Homo sapien
cccggccgacgcacgcacagcgccc

SEQ ID NO: 1727 - DNA, 25 bp, Homo sapien
ctctctgtcctccggacggccagcg

SEQ ID NO: 1728 - DNA, 25 bp, Homo sapien
cgctggccgtccggaggacagagag

SEQ ID NO: 1729 - DNA, 25 bp, Homo sapien
ctcggtcggagccaagggcgccggg

SEQ ID NO: 1730 - DNA, 25 bp, Homo sapien
cccggcgcccttggctccgaccgag

SEQ ID NO: 1731 - DNA, 25 bp, Homo sapien
gacggccgggcgctcggtcggagcc

SEQ ID NO: 1732 - DNA, 25 bp, Homo sapien
ggctccgaccgagcgcccggccgtc

SEQ ID NO: 1733 - DNA, 25 bp, Homo sapien
gtgtcgacggccgggcgctcggtcg

SEQ ID NO: 1734 - DNA, 25 bp, Homo sapien
cgaccgagcgcccggccgtcgacac

SEQ ID NO: 1735 - DNA, 25 bp, Homo sapien
ggtcggagccaagggcgccgggcgg

SEQ ID NO: 1736 - DNA, 25 bp, Homo sapien
ccgcccggcgcccttggctccgacc

SEQ ID NO: 1737 - DNA, 25 bp, Homo sapien
atatcttaggacgtattttaatcag

SEQ ID NO: 1738 - DNA, 25 bp, Homo sapien
ctgattaaaatacgtcctaagatat

SEQ ID NO: 1739 - DNA, 25 bp, Homo sapien
aatatagacgtcctacatgtatcag

SEQ ID NO: 1740 - DNA, 25 bp, Homo sapien
ctgatacatgtaggacgtctatatt

SEQ ID NO: 1741 - DNA, 25 bp, Homo sapien
agagacaaactactgacaccttact

SEQ ID NO: 1742 - DNA, 25 bp, Homo sapien
agtaaggtgtcagtagtttgtctct

SEQ ID NO: 1743 - DNA, 25 bp, Homo sapien
tggttcctcggctgggagtcgagga

SEQ ID NO: 1744 - DNA, 25 bp, Homo sapien
tcctcgactcccagccgaggaacca

SEQ ID NO: 1745 - DNA, 25 bp, Homo sapien
gtcgttcgccgcgtgtggctcccgc

SEQ ID NO: 1746 - DNA, 25 bp, Homo sapien
gcgggagccacacgcggcgaacgac

SEQ ID NO: 1747 - DNA, 25 bp, Homo sapien
agtcttgcgccgcgtgtgactcccg

SEQ ID NO: 1748 - DNA, 25 bp, Homo sapien
cgggagtcacacgcggcgcaagact

SEQ ID NO: 1749 - DNA, 25 bp, Homo sapien
gggcccacacccgaggaagcgtccg

SEQ ID NO: 1750 - DNA, 25 bp, Homo sapien
cggacgcttcctcgggtgtgggccc

SEQ ID NO: 1751 - DNA, 25 bp, Homo sapien
cgggagaaggtaactcacgacggcg

SEQ ID NO: 1752 - DNA, 25 bp, Homo sapien
cgccgtcgtgagttaccttctcccg

SEQ ID NO: 1753 - DNA, 25 bp, Homo sapien
acgggacgagaaggctcgagggaga

SEQ ID NO: 1754 - DNA, 25 bp, Homo sapien
tctccctcgagccttctcgtcccgt

SEQ ID NO: 1755 - DNA, 25 bp, Homo sapien
ggaccgggttcggtgggcactcctc

SEQ ID NO: 1756 - DNA, 25 bp, Homo sapien
gaggagtgcccaccgaacccggtcc

SEQ ID NO: 1757 - DNA, 25 bp, Homo sapien
gtgtctgcacgtggagacaggaccc

SEQ ID NO: 1758 - DNA, 25 bp, Homo sapien
gggtcctgtctccacgtgcagacac

SEQ ID NO: 1759 - DNA, 25 bp, Homo sapien
aaatctggagggtcgagagaccggg

SEQ ID NO: 1760 - DNA, 25 bp, Homo sapien
cccggtctctcgaccctccagattt

SEQ ID NO: 1761 - DNA, 25 bp, Homo sapien
ttagaagtgctttctaattcgtgta

SEQ ID NO: 1762 - DNA, 25 bp, Homo sapien
tacacgaattagaaagcacttctaa

SEQ ID NO: 1763 - DNA, 25 bp, Homo sapien
cccgacccgacctgggctcgtagac

SEQ ID NO: 1764 - DNA, 25 bp, Homo sapien
gtctacgagcccaggtcgggtcggg

SEQ ID NO: 1765 - DNA, 25 bp, Homo sapien
ggaaggaaggtgagggtccatcgac

SEQ ID NO: 1766 - DNA, 25 bp, Homo sapien
gtcgatggaccctcaccttccttcc

SEQ ID NO: 1767 - DNA, 25 bp, Homo sapien
tcctgaaccagttctacaaataaac

SEQ ID NO: 1768 - DNA, 25 bp, Homo sapien
gtttatttgtagaactggttcagga

SEQ ID NO: 1769 - DNA, 25 bp, Homo sapien
tctctgttctgtctctgcgttactt

SEQ ID NO: 1770 - DNA, 25 bp, Homo sapien
aagtaacgcagagacagaacagaga

SEQ ID NO: 1771 - DNA, 25 bp, Homo sapien
gcgttcacttcgagtcgctctctag

SEQ ID NO: 1772 - DNA, 25 bp, Homo sapien
ctagagagcgactcgaagtgaacgc

SEQ ID NO: 1773 - DNA, 25 bp, Homo sapien
tttaacctaagcgagcaaatacgac

SEQ ID NO: 1774 - DNA, 25 bp, Homo sapien
gtcgtatttgctcgcttaggttaaa

SEQ ID NO: 1775 - DNA, 25 bp, Homo sapien
ggtcataccccgttctgggcccagg

SEQ ID NO: 1776 - DNA, 25 bp, Homo sapien
cctgggcccagaacggggtatgacc

SEQ ID NO: 1777 - DNA, 25 bp, Homo sapien
tccaagaccccctttaaggtgtgct

SEQ ID NO: 1778 - DNA, 25 bp, Homo sapien
agcacaccttaaagggggtcttgga

SEQ ID NO: 1779 - DNA, 25 bp, Homo sapien
gtgaccccaccctgggagaccggta

SEQ ID NO: 1780 - DNA, 25 bp, Homo sapien
taccggtctcccagggtggggtcac

SEQ ID NO: 1781 - DNA, 25 bp, Homo sapien
tgatttccttattgtagaaacgaga

SEQ ID NO: 1782 - DNA, 25 bp, Homo sapien
tctcgtttctacaataaggaaatca

SEQ ID NO: 1783 - DNA, 25 bp, Homo sapien
aaacgtgggattcaccggacacaac

SEQ ID NO: 1784 - DNA, 25 bp, Homo sapien
gttgtgtccggtgaatcccacgttt

SEQ ID NO: 1785 - DNA, 25 bp, Homo sapien
cgttccgtactgtcctgacgtctgt

SEQ ID NO: 1786 - DNA, 25 bp, Homo sapien
acagacgtcaggacagtacggaacg

SEQ ID NO: 1787 - DNA, 25 bp, Homo sapien
cttttgttaagaatatcgttgtttg

SEQ ID NO: 1788 - DNA, 25 bp, Homo sapien
caaacaacgatattcttaacaaaag

SEQ ID NO: 1789 - DNA, 25 bp, Homo sapien
aagatgtgcccgataatgttgtaga

SEQ ID NO: 1790 - DNA, 25 bp, Homo sapien
tctacaacattatcgggcacatctt

SEQ ID NO: 1791 - DNA, 25 bp, Homo sapien
tacgactctgagtatccttcccaca

SEQ ID NO: 1792 - DNA, 25 bp, Homo sapien
tgtgggaaggatactcagagtcgta

SEQ ID NO: 1793 - DNA, 25 bp, Homo sapien
cgaaacccaccggtctcacgtatgg

SEQ ID NO: 1794 - DNA, 25 bp, Homo sapien
ccatacgtgagaccggtgggtttcg

SEQ ID NO: 1795 - DNA, 25 bp, Homo sapien
gggcggtgctgagcgccgcaagggt

SEQ ID NO: 1796 - DNA, 25 bp, Homo sapien
acccttgcggcgctcagcaccgccc

SEQ ID NO: 1797 - DNA, 25 bp, Homo sapien
acgtcggcaccggtacgacagggta

SEQ ID NO: 1798 - DNA, 25 bp, Homo sapien
taccctgtcgtaccggtgccgacgt

SEQ ID NO: 1799 - DNA, 25 bp, Homo sapien
cgaccgccgagtcccgtgtacacgg

SEQ ID NO: 1800 - DNA, 25 bp, Homo sapien
ccgtgtacacgggactcggcggtcg

SEQ ID NO: 1801 - DNA, 25 bp, Homo sapien
aaattgaggtagtccgccggcagcg

SEQ ID NO: 1802 - DNA, 25 bp, Homo sapien
cgctgccggcggactacctcaattt

SEQ ID NO: 1803 - DNA, 25 bp, Homo sapien
aatgacagagttttagaacaattaa

SEQ ID NO: 1804 - DNA, 25 bp, Homo sapien
ttaattgttctaaaactctgtcatt

SEQ ID NO: 1805 - DNA, 25 bp, Homo sapien
tgtcgaagtcgcgtcagagggcacc

SEQ ID NO: 1806 - DNA, 25 bp, Homo sapien
ggtgccctctgacgcgacttcgaca

SEQ ID NO: 1807 - DNA, 25 bp, Homo sapien
aaagacggtcagaaacagacggtgg

SEQ ID NO: 1808 - DNA, 25 bp, Homo sapien
ccaccgtctgtttctgaccgtcttt

SEQ ID NO: 1809 - DNA, 25 bp, Homo sapien
ctccacccgtgcgatcctctccggg

SEQ ID NO: 1810 - DNA, 25 bp, Homo sapien
cccggagaggatcgcacgggtggag

SEQ ID NO: 1811 - DNA, 25 bp, Homo sapien
accccctggtcgctgtcgacggaga

SEQ ID NO: 1812 - DNA, 25 bp, Homo sapien
tctccgtcgacagcgaccagggggt

SEQ ID NO: 1813 - DNA, 25 bp, Homo sapien
cacttgcacctggtctggacgggcc

SEQ ID NO: 1814 - DNA, 25 bp, Homo sapien
ggcccgtccagaccaggtgcaagtg

SEQ ID NO: 1815 - DNA, 25 bp, Homo sapien
gccctaccccagtggttcccgactg

SEQ ID NO: 1816 - DNA, 25 bp, Homo sapien
cagtcgggaaccactggggtagggc

SEQ ID NO: 1817 - DNA, 25 bp, Homo sapien
agggccggtgcggcggcaggcggag

SEQ ID NO: 1818 - DNA, 25 bp, Homo sapien
ctccgcctgccgccgcaccggccct

SEQ ID NO: 1819 - DNA, 25 bp, Homo sapien
ggtagggccggtgcggcggcaggcg

SEQ ID NO: 1820 - DNA, 25 bp, Homo sapien
cgcctgccgccgcaccggccctacc

SEQ ID NO: 1821 - DNA, 25 bp, Homo sapien
gtggcggcgggccaccggcttgcgg

SEQ ID NO: 1822 - DNA, 25 bp, Homo sapien
ccgcaagccggtggcccgccgccac

SEQ ID NO: 1823 - DNA, 25 bp, Homo sapien
ggtcgtggcggcgggccaccggctt

SEQ ID NO: 1824 - DNA, 25 bp, Homo sapien
aagccggtggcccgccgccacgacc

SEQ ID NO: 1825 - DNA, 25 bp, Homo sapien
cgaaacgagcatctcttgaaaacct

SEQ ID NO: 1826 - DNA, 25 bp, Homo sapien
aggttttcaagagatgctcgtttcg

SEQ ID NO: 1827 - DNA, 25 bp, Homo sapien
agtgccgaaacgagcatctcttgaa

SEQ ID NO: 1828 - DNA, 25 bp, Homo sapien
ttcaagagatgctcgtttcggcact

SEQ ID NO: 1829 - DNA, 25 bp, Homo sapien
ctaatcaagtcgaagacggcaccgg

SEQ ID NO: 1830 - DNA, 25 bp, Homo sapien
ccggtgccgtcttcgacttgattag

SEQ ID NO: 1831 - DNA, 25 bp, Homo sapien
cgcgaccccgtctgatatataggat

SEQ ID NO: 1832 - DNA, 25 bp, Homo sapien
atcctatatatcagacggggtcgcg

SEQ ID NO: 1833 - DNA, 25 bp, Homo sapien
ggacgtccttagactgaaacattaa

SEQ ID NO: 1834 - DNA, 25 bp, Homo sapien
ttaatgtttcagtctaaggacgtcc

SEQ ID NO: 1835 - DNA, 25 bp, Homo sapien
gagattctataaccactaccgtcac

SEQ ID NO: 1836 - DNA, 25 bp, Homo sapien
gtgacggtagtggttatagaatctc

SEQ ID NO: 1837 - DNA, 25 bp, Homo sapien
aaaaattctcttacgacgaactgac

SEQ ID NO: 1838 - DNA, 25 bp, Homo sapien
gtcagttcgtcgtaagagaattttt

SEQ ID NO: 1839 - DNA, 25 bp, Homo sapien
ggcggaggcccgcccgtcgatgcac

SEQ ID NO: 1840 - DNA, 25 bp, Homo sapien
gtgcatcgacgggcgggcctccgcc

SEQ ID NO: 1841 - DNA, 25 bp, Homo sapien
cttcgggcgccgacaggacagcgac

SEQ ID NO: 1842 - DNA, 25 bp, Homo sapien
gtcgctgtcctgtcggcgcccgaag

SEQ ID NO: 1843 - DNA, 25 bp, Homo sapien
gacgggcggttcgatctcgagacat

SEQ ID NO: 1844 - DNA, 25 bp, Homo sapien
atgtctcgagatcgaaccgcccgtc

SEQ ID NO: 1845 - DNA, 25 bp, Homo sapien
gggtgccagcccgtgtctgcgaagt

SEQ ID NO: 1846 - DNA, 25 bp, Homo sapien
acttcgcagacacgggctggcaccc

SEQ ID NO: 1847 - DNA, 25 bp, Homo sapien
ggactcctcgcaagaggacccgcag

SEQ ID NO: 1848 - DNA, 25 bp, Homo sapien
ctgcgggtcctcttgcgaggagtcc

SEQ ID NO: 1849 - DNA, 25 bp, Homo sapien
gaccccggcgagacggcggcgtgga

SEQ ID NO: 1850 - DNA, 25 bp, Homo sapien
tccacgccgccgtctcgccggggtc

SEQ ID NO: 1851 - DNA, 25 bp, Homo sapien
gatgttatcaaattgaaaagccagt

SEQ ID NO: 1852 - DNA, 25 bp, Homo sapien
actggcttttcaatttgataacatc

SEQ ID NO: 1853 - DNA, 25 bp, Homo sapien
cgtctcgggagaattcgtccggtgt

SEQ ID NO: 1854 - DNA, 25 bp, Homo sapien
acaccggacgaattctcccgagacg

SEQ ID NO: 1855 - DNA, 25 bp, Homo sapien
aatactagactgtatgaagataaac

SEQ ID NO: 1856 - DNA, 25 bp, Homo sapien
gtttatcttcatacagtctagtatt

SEQ ID NO: 1857 - DNA, 25 bp, Homo sapien
agttatcagacacatactctacgac

SEQ ID NO: 1858 - DNA, 25 bp, Homo sapien
gtcgtagagtatgtgtctgataact

SEQ ID NO: 1859 - DNA, 25 bp, Homo sapien
cgcgtcctcggccacacgccccgcg

SEQ ID NO: 1860 - DNA, 25 bp, Homo sapien
cgcggggcgtgtggccgaggacgcg

SEQ ID NO: 1861 - DNA, 25 bp, Homo sapien
gacgtcggctcctttcactcgaact

SEQ ID NO: 1862 - DNA, 25 bp, Homo sapien
agttcgagtgaaaggagccgacgtc

SEQ ID NO: 1863 - DNA, 25 bp, Homo sapien
tcagccaccagaagaggccttcacg

SEQ ID NO: 1864 - DNA, 25 bp, Homo sapien
cgtgaaggcctcttctggtggctga

SEQ ID NO: 1865 - DNA, 25 bp, Homo sapien
aggacagatcgtacgtctctgtgac

SEQ ID NO: 1866 - DNA, 25 bp, Homo sapien
gtcacagagacgtacgatctgtcct

SEQ ID NO: 1867 - DNA, 25 bp, Homo sapien
tctccctacgtcccgctagaacccc

SEQ ID NO: 1868 - DNA, 25 bp, Homo sapien
ggggttctagcgggacgtagggaga

SEQ ID NO: 1869 - DNA, 25 bp, Homo sapien
cgtcgctgccggtgccccatcacag

SEQ ID NO: 1870 - DNA, 25 bp, Homo sapien
ctgtgatggggcaccggcagcgacg

SEQ ID NO: 1871 - DNA, 25 bp, Homo sapien
accagggcaccgttccttccgtgag

SEQ ID NO: 1872 - DNA, 25 bp, Homo sapien
ctcacggaaggaacggtgccctggt

SEQ ID NO: 1873 - DNA, 25 bp, Homo sapien
aggtatcgtagggaaaatcaacatt

SEQ ID NO: 1874 - DNA, 25 bp, Homo sapien
aatgttgattttccctacgatacct

SEQ ID NO: 1875 - DNA, 25 bp, Homo sapien
aatcttacatttattactactctat

SEQ ID NO: 1876 - DNA, 25 bp, Homo sapien
atagagtagtaataaatgtaagatt

SEQ ID NO: 1877 - DNA, 25 bp, Homo sapien
gtcgaggtgccaagggaaccaaacc

SEQ ID NO: 1878 - DNA, 25 bp, Homo sapien
ggtttggttcccttggcacctcgac

SEQ ID NO: 1879 - DNA, 25 bp, Homo sapien
tgtcctaccatacccctctggctgt

SEQ ID NO: 1880 - DNA, 25 bp, Homo sapien
acagccagaggggtatggtaggaca

SEQ ID NO: 1881 - DNA, 25 bp, Homo sapien
gtcttatggtatccctcttcatctt

SEQ ID NO: 1882 - DNA, 25 bp, Homo sapien
aagatgaagagggataccataagac

SEQ ID NO: 1883 - DNA, 25 bp, Homo sapien
gccggaccgacgcagaagtcctcag

SEQ ID NO: 1884 - DNA, 25 bp, Homo sapien
ctgaggacttctgcgtcggtccggc

SEQ ID NO: 1885 - DNA, 25 bp, Homo sapien
gaccccggggagtcacacgtcgagg

SEQ ID NO: 1886 - DNA, 25 bp, Homo sapien
cctcgacgtgtgactccccggggtc

SEQ ID NO: 1887 - DNA, 25 bp, Homo sapien
tgctgttcccggtggccgctggcac

SEQ ID NO: 1888 - DNA, 25 bp, Homo sapien
gtgccagcggccaccgggaacagca

SEQ ID NO: 1889 - DNA, 25 bp, Homo sapien
cttatattagtcgttattgatttaa

SEQ ID NO: 1890 - DNA, 25 bp, Homo sapien
ttaaatcaataacgactaatataag

SEQ ID NO: 1891 - DNA, 25 bp, Homo sapien
acttatattagtcgttattgattta

SEQ ID NO: 1892 - DNA, 25 bp, Homo sapien
taaatcaataacgactaatataagt

SEQ ID NO: 1893 - DNA, 25 bp, Homo sapien
taacacacttgctgattggcaaaat

SEQ ID NO: 1894 - DNA, 25 bp, Homo sapien
attttgccaatcagcaagtgtgtta

SEQ ID NO: 1895 - DNA, 25 bp, Homo sapien
gttgtaattttatcatcatctcttt

SEQ ID NO: 1896 - DNA, 25 bp, Homo sapien
aaagagatgatgataaaattacaac

SEQ ID NO: 1897 - DNA, 25 bp, Homo sapien
acttataattcccattagtaattta

SEQ ID NO: 1898 - DNA, 25 bp, Homo sapien
taaattactaatgggaattataagt

SEQ ID NO: 1899 - DNA, 25 bp, Homo sapien
tacttataattcccattagtaattt

SEQ ID NO: 1900 - DNA, 25 bp, Homo sapien
aaattactaatgggaattataagta

SEQ ID NO: 1901 - DNA, 25 bp, Homo sapien
gaagtgggcggcaccccagcgctcc

SEQ ID NO: 1902 - DNA, 25 bp, Homo sapien
ggagcgctggggtgccgcccacttc

SEQ ID NO: 1903 - DNA, 25 bp, Homo sapien
cttcgggtgcgaagtgggcggcacc

SEQ ID NO: 1904 - DNA, 25 bp, Homo sapien
ggtgccgcccacttcgcacccgaag

SEQ ID NO: 1905 - DNA, 25 bp, Homo sapien
gagacttatcctgaatttaagagac

SEQ ID NO: 1906 - DNA, 25 bp, Homo sapien
gtctcttaaattcaggataagtctc

SEQ ID NO: 1907 - DNA, 25 bp, Homo sapien
gcggcggcgggcgaccttaggtccc

SEQ ID NO: 1908 - DNA, 25 bp, Homo sapien
gggacctaaggtcgcccgccgccgc

SEQ ID NO: 1909 - DNA, 25 bp, Homo sapien
tcccgacgtgcgcactggcgccgcc

SEQ ID NO: 1910 - DNA, 25 bp, Homo sapien
ggcggcgccagtgcgcacgtcggga

SEQ ID NO: 1911 - DNA, 25 bp, Homo sapien
ctcggtggtccgacctgacccacgt

SEQ ID NO: 1912 - DNA, 25 bp, Homo sapien
acgtgggtcaggtcggaccaccgag

SEQ ID NO: 1913 - DNA, 25 bp, Homo sapien
ttagactaacttggtccgacaacgt

SEQ ID NO: 1914 - DNA, 25 bp, Homo sapien
acgttgtcggaccaagttagtctaa

SEQ ID NO: 1915 - DNA, 25 bp, Homo sapien
catatagactcgatagtttttggta

SEQ ID NO: 1916 - DNA, 25 bp, Homo sapien
taccaaaaactatcgagtctatatg

SEQ ID NO: 1917 - DNA, 25 bp, Homo sapien
tcctcgacatgccggacgtcgacct

SEQ ID NO: 1918 - DNA, 25 bp, Homo sapien
aggtcgacgtccggcatgtcgagga

SEQ ID NO: 1919 - DNA, 25 bp, Homo sapien
agacataaacctatatttacaagat

SEQ ID NO: 1920 - DNA, 25 bp, Homo sapien
atcttgtaaatataggtttatgtct

SEQ ID NO: 1921 - DNA, 25 bp, Homo sapien
cgtgcgggcccacgcgcagggagga

SEQ ID NO: 1922 - DNA, 25 bp, Homo sapien
tcctccctgcgcgtgggcccgcacg

SEQ ID NO: 1923 - DNA, 25 bp, Homo sapien
atatgttcttcttttccttttacag

SEQ ID NO: 1924 - DNA, 25 bp, Homo sapien
ctgtaaaaggaaaagaagaacatat

SEQ ID NO: 1925 - DNA, 25 bp, Homo sapien
tccgccgaatatttcagtgagaaat

SEQ ID NO: 1926 - DNA, 25 bp, Homo sapien
atttctcactgaaatattcggcgga

SEQ ID NO: 1927 - DNA, 25 bp, Homo sapien
ggacgtgcccgtgctgccggggccc

SEQ ID NO: 1928 - DNA, 25 bp, Homo sapien
gggccccggcagcacgggcacgtcc

SEQ ID NO: 1929 - DNA, 25 bp, Homo sapien
cggacgtgcccgtgctgccggggcc

SEQ ID NO: 1930 - DNA, 25 bp, Homo sapien
ggccccggcagcacgggcacgtccg

SEQ ID NO: 1931 - DNA, 25 bp, Homo sapien
gccggacgtgcccgtgctgccgggg

SEQ ID NO: 1932 - DNA, 25 bp, Homo sapien
ccccggcagcacgggcacgtccggc

SEQ ID NO: 1933 - DNA, 25 bp, Homo sapien
agcgccggacgtgcccgtgctgccg

SEQ ID NO: 1934 - DNA, 25 bp, Homo sapien
cggcagcacgggcacgtccggcgct

SEQ ID NO: 1935 - DNA, 25 bp, Homo sapien
ggtgtgcggtggtcacccccgtcgg

SEQ ID NO: 1936 - DNA, 25 bp, Homo sapien
ccgacgggggtgaccaccgcacacc

SEQ ID NO: 1937 - DNA, 25 bp, Homo sapien
gccgcccgaggcgctggaggtcggg

SEQ ID NO: 1938 - DNA, 25 bp, Homo sapien
cccgacctccagcgcctcgggcggc

SEQ ID NO: 1939 - DNA, 25 bp, Homo sapien
tagcataggcttcttatatattgaa

SEQ ID NO: 1940 - DNA, 25 bp, Homo sapien
ttcaatatataagaagcctatgcta

SEQ ID NO: 1941 - DNA, 25 bp, Homo sapien
tgaaccgtcccacgatgaaatgcac

SEQ ID NO: 1942 - DNA, 25 bp, Homo sapien
gtgcatttcatcgtgggacggttca

SEQ ID NO: 1943 - DNA, 25 bp, Homo sapien
actcggtccggcagtctaggggtct

SEQ ID NO: 1944 - DNA, 25 bp, Homo sapien
agacccctagactgccggaccgagt

SEQ ID NO: 1945 - DNA, 25 bp, Homo sapien
cgaggtgcgaacgacgacatagtcc

SEQ ID NO: 1946 - DNA, 25 bp, Homo sapien
ggactatgtcgtcgttcgcacctcg

SEQ ID NO: 1947 - DNA, 25 bp, Homo sapien
tatccgtgtagacccacttagacag

SEQ ID NO: 1948 - DNA, 25 bp, Homo sapien
ctgtctaagtgggtctacacggata

SEQ ID NO: 1949 - DNA, 25 bp, Homo sapien
tgccacacgtatagggcgttcacct

SEQ ID NO: 1950 - DNA, 25 bp, Homo sapien
aggtgaacgccctatacgtgtggca

SEQ ID NO: 1951 - DNA, 25 bp, Homo sapien
aaacggacaagtagattacaaacat

SEQ ID NO: 1952 - DNA, 25 bp, Homo sapien
atgtttgtaatctacttgtccgttt

SEQ ID NO: 1953 - DNA, 25 bp, Homo sapien
catcgtgaaaattgttcctccgcgt

SEQ ID NO: 1954 - DNA, 25 bp, Homo sapien
acgcggaggaacaattttcacgatg

SEQ ID NO: 1955 - DNA, 25 bp, Homo sapien
catcctacatcgtcacaaagaaggg

SEQ ID NO: 1956 - DNA, 25 bp, Homo sapien
cccttctttgtgacgatgtaggatg

SEQ ID NO: 1957 - DNA, 25 bp, Homo sapien
acggtatcgagtccggccgccctcg

SEQ ID NO: 1958 - DNA, 25 bp, Homo sapien
cgagggcggccggactcgataccgt

SEQ ID NO: 1959 - DNA, 25 bp, Homo sapien
ccacggtatcgagtccggccgccct

SEQ ID NO: 1960 - DNA, 25 bp, Homo sapien
agggcggccggactcgataccgtgg

SEQ ID NO: 1961 - DNA, 25 bp, Homo sapien
tcgacgtcctggaggcagaggtcgg

SEQ ID NO: 1962 - DNA, 25 bp, Homo sapien
ccgacctctgcctccaggacgtcga

SEQ ID NO: 1963 - DNA, 25 bp, Homo sapien
aggggccccgaccgaagagtccagc

SEQ ID NO: 1964 - DNA, 25 bp, Homo sapien
gctggactcttcggtcggggcccct

SEQ ID NO: 1965 - DNA, 25 bp, Homo sapien
taaagtttgtatccctataataata

SEQ ID NO: 1966 - DNA, 25 bp, Homo sapien
tattattatagggatacaaacttta

SEQ ID NO: 1967 - DNA, 25 bp, Homo sapien
aataaagtttgtatccctataataa

SEQ ID NO: 1968 - DNA, 25 bp, Homo sapien
ttattatagggatacaaactttatt

SEQ ID NO: 1969 - DNA, 25 bp, Homo sapien
gaataaagtttgtatccctataata

SEQ ID NO: 1970 - DNA, 25 bp, Homo sapien
tattatagggatacaaactttattc

SEQ ID NO: 1971 - DNA, 25 bp, Homo sapien
tacttcaacgccattatgttctttt

SEQ ID NO: 1972 - DNA, 25 bp, Homo sapien
aaaagaacataatggcgttgaagta

SEQ ID NO: 1973 - DNA, 25 bp, Homo sapien
aaaccatagacacttcagtttacgg

SEQ ID NO: 1974 - DNA, 25 bp, Homo sapien
ccgtaaactgaagtgtctatggttt

SEQ ID NO: 1975 - DNA, 25 bp, Homo sapien
ccggacgcaggccttcttccagact

SEQ ID NO: 1976 - DNA, 25 bp, Homo sapien
agtctggaagaaggcctgcgtccgg

SEQ ID NO: 1977 - DNA, 25 bp, Homo sapien
tgtctaggcctacgtggccctcggt

SEQ ID NO: 1978 - DNA, 25 bp, Homo sapien
accgagggccacgtaggcctagaca

SEQ ID NO: 1979 - DNA, 25 bp, Homo sapien
acctacaccggtattgtaaatagta

SEQ ID NO: 1980 - DNA, 25 bp, Homo sapien
tactatttacaataccggtgtaggt

SEQ ID NO: 1981 - DNA, 25 bp, Homo sapien
aggggtcactggagtgggcctcggg

SEQ ID NO: 1982 - DNA, 25 bp, Homo sapien
cccgaggcccactccagtgacccct

SEQ ID NO: 1983 - DNA, 25 bp, Homo sapien
cccgcccgtcatcggagaggggaga

SEQ ID NO: 1984 - DNA, 25 bp, Homo sapien
tctcccctctccgatgacgggcggg

SEQ ID NO: 1985 - DNA, 25 bp, Homo sapien
ccaacttcagtgaccaggagcccga

SEQ ID NO: 1986 - DNA, 25 bp, Homo sapien
tcgggctcctggtcactgaagttgg

SEQ ID NO: 1987 - DNA, 25 bp, Homo sapien
gggatgaatcctggtagtcctactt

SEQ ID NO: 1988 - DNA, 25 bp, Homo sapien
aagtaggactaccaggattcatccc

SEQ ID NO: 1989 - DNA, 25 bp, Homo sapien
gattatcgaacttaactgtagtttt

SEQ ID NO: 1990 - DNA, 25 bp, Homo sapien
aaaactacagttaagttcgataatc

SEQ ID NO: 1991 - DNA, 25 bp, Homo sapien
tttaagttgaggtctataaaaatac

SEQ ID NO: 1992 - DNA, 25 bp, Homo sapien
gtatttttatagacctcaacttaaa

SEQ ID NO: 1993 - DNA, 25 bp, Homo sapien
atttaagttgaggtctataaaaata

SEQ ID NO: 1994 - DNA, 25 bp, Homo sapien
tatttttatagacctcaacttaaat

SEQ ID NO: 1995 - DNA, 25 bp, Homo sapien
gggtaaattcatgactggtttcaac

SEQ ID NO: 1996 - DNA, 25 bp, Homo sapien
gttgaaaccagtcatgaatttaccc

SEQ ID NO: 1997 - DNA, 25 bp, Homo sapien
aattcatgactggtttcaacggaag

SEQ ID NO: 1998 - DNA, 25 bp, Homo sapien
cttccgttgaaaccagtcatgaatt

SEQ ID NO: 1999 - DNA, 25 bp, Homo sapien
agtttcacacttcctcctataagag

SEQ ID NO: 2000 - DNA, 25 bp, Homo sapien
ctcttataggaggaagtgtgaaact

SEQ ID NO: 2001 - DNA, 25 bp, Homo sapien
acgattggatcacgtaaggaactcc

SEQ ID NO: 2002 - DNA, 25 bp, Homo sapien
ggagttccttacgtgatccaatcgt

SEQ ID NO: 2003 - DNA, 25 bp, Homo sapien
ggagtgaattaggtctaacattgag

SEQ ID NO: 2004 - DNA, 25 bp, Homo sapien
ctcaatgttagacctaattcactcc

SEQ ID NO: 2005 - DNA, 25 bp, Homo sapien
ctacctgctacgagtaggtcggtgt

SEQ ID NO: 2006 - DNA, 25 bp, Homo sapien
acaccgacctactcgtagcaggtag

SEQ ID NO: 2007 - DNA, 25 bp, Homo sapien
aattcctattgaactcctttgtgac

SEQ ID NO: 2008 - DNA, 25 bp, Homo sapien
gtcacaaaggagttcaataggaatt

SEQ ID NO: 2009 - DNA, 25 bp, Homo sapien
gtcagtcctcccgggactgcgagtg

SEQ ID NO: 2010 - DNA, 25 bp, Homo sapien
cactcgcagtcccgggaggactgac

SEQ ID NO: 2011 - DNA, 25 bp, Homo sapien
ccgtcagtcctcccgggactgcgag

SEQ ID NO: 2012 - DNA, 25 bp, Homo sapien
ctcgcagtcccgggaggactgacgg

SEQ ID NO: 2013 - DNA, 25 bp, Homo sapien
ggggaagaggcgcgttctagaccgc

SEQ ID NO: 2014 - DNA, 25 bp, Homo sapien
gcggtctagaacgcgcctcttcccc

SEQ ID NO: 2015 - DNA, 25 bp, Homo sapien
gggtgacgacggcgtttgagggatg

SEQ ID NO: 2016 - DNA, 25 bp, Homo sapien
catccctcaaacgccgtcgtcaccc

SEQ ID NO: 2017 - DNA, 25 bp, Homo sapien
cccccgctgccgaacgccggcgtct

SEQ ID NO: 2018 - DNA, 25 bp, Homo sapien
agacgccggcgttcggcagcggggg

SEQ ID NO: 2019 - DNA, 25 bp, Homo sapien
tttcaattcctgtatacctttaagt

SEQ ID NO: 2020 - DNA, 25 bp, Homo sapien
acttaaaggtatacaggaattgaaa

SEQ ID NO: 2021 - DNA, 25 bp, Homo sapien
tagttctttgacataaaaacttgga

SEQ ID NO: 2022 - DNA, 25 bp, Homo sapien
tccaagtttttatgtcaaagaacta

SEQ ID NO: 2023 - DNA, 25 bp, Homo sapien
tccgactcggagcacgcacaccgac

SEQ ID NO: 2024 - DNA, 25 bp, Homo sapien
gtcggtgtgcgtgctccgagtcgga

SEQ ID NO: 2025 - DNA, 25 bp, Homo sapien
aataatagtaggaatccaaaagact

SEQ ID NO: 2026 - DNA, 25 bp, Homo sapien
agtcttttggattcctactattatt

SEQ ID NO: 2027 - DNA, 25 bp, Homo sapien
gacgtcttctacacggaagctctat

SEQ ID NO: 2028 - DNA, 25 bp, Homo sapien
atagagcttccgtgtagaagacgtc

SEQ ID NO: 2029 - DNA, 25 bp, Homo sapien
tttgaagaaaatgtggttaacagtt

SEQ ID NO: 2030 - DNA, 25 bp, Homo sapien
aactgttaaccacattttcttcaaa

SEQ ID NO: 2031 - DNA, 25 bp, Homo sapien
aagacacggggagacctactgatag

SEQ ID NO: 2032 - DNA, 25 bp, Homo sapien
ctatcagtaggtctccccgtgtctt

SEQ ID NO: 2033 - DNA, 25 bp, Homo sapien
agacggactttacgtatctctgcac

SEQ ID NO: 2034 - DNA, 25 bp, Homo sapien
gtgcagagatacgtaaagtccgtct

SEQ ID NO: 2035 - DNA, 25 bp, Homo sapien
gtccacacaagttctttaggactcg

SEQ ID NO: 2036 - DNA, 25 bp, Homo sapien
cgagtcctaaagaacttgtgtggac

SEQ ID NO: 2037 - DNA, 25 bp, Homo sapien
caaacattttaacaatcgtacttat

SEQ ID NO: 2038 - DNA, 25 bp, Homo sapien
ataagtacgattgttaaaatgtttg

SEQ ID NO: 2039 - DNA, 25 bp, Homo sapien
ttaaaaaagtaggtggaacatcagt

SEQ ID NO: 2040 - DNA, 25 bp, Homo sapien
actgatgttccacctacttttttaa

SEQ ID NO: 2041 - DNA, 25 bp, Homo sapien
acggtcggcgtgtgaccacgggcgg

SEQ ID NO: 2042 - DNA, 25 bp, Homo sapien
ccgcccgtggtcacacgccgaccgt

SEQ ID NO: 2043 - DNA, 25 bp, Homo sapien
cacacatattagattatacaaaagt

SEQ ID NO: 2044 - DNA, 25 bp, Homo sapien
acttttgtataatctaatatgtgtg

SEQ ID NO: 2045 - DNA, 25 bp, Homo sapien
aagtcttctgaaagacttaaacaga

SEQ ID NO: 2046 - DNA, 25 bp, Homo sapien
tctgtttaagtctttcagaagactt

SEQ ID NO: 2047 - DNA, 25 bp, Homo sapien
tcactcaccggcacccagtcccggt

SEQ ID NO: 2048 - DNA, 25 bp, Homo sapien
accgggactgggtgccggtgagtga

SEQ ID NO: 2049 - DNA, 25 bp, Homo sapien
tggcctgtccggtggcgcaacggcg

SEQ ID NO: 2050 - DNA, 25 bp, Homo sapien
cgccgttgcgccaccggacaggcca

SEQ ID NO: 2051 - DNA, 25 bp, Homo sapien
gcgccgtgtggcctgtccggtggcg

SEQ ID NO: 2052 - DNA, 25 bp, Homo sapien
cgccaccggacaggccacacggcgc

SEQ ID NO: 2053 - DNA, 25 bp, Homo sapien
acccgcgcgccgtgtggcctgtccg

SEQ ID NO: 2054 - DNA, 25 bp, Homo sapien
cggacaggccacacggcgcgcgggt

SEQ ID NO: 2055 - DNA, 25 bp, Homo sapien
gaggaccttacacgatcgtctcgat

SEQ ID NO: 2056 - DNA, 25 bp, Homo sapien
atcgagacgatcgtgtaaggtcctc

SEQ ID NO: 2057 - DNA, 25 bp, Homo sapien
atcaacatatttaaagaggacaagg

SEQ ID NO: 2058 - DNA, 25 bp, Homo sapien
ccttgtcctctttaaatatgttgat

SEQ ID NO: 2059 - DNA, 25 bp, Homo sapien
aggtacgtgtaaggtgacccctgtg

SEQ ID NO: 2060 - DNA, 25 bp, Homo sapien
cacaggggtcaccttacacgtacct

SEQ ID NO: 2061 - DNA, 25 bp, Homo sapien
cccaggtgaccgtagcacgtaatac

SEQ ID NO: 2062 - DNA, 25 bp, Homo sapien
gtattacgtgctacggtcacctggg

SEQ ID NO: 2063 - DNA, 25 bp, Homo sapien
cacgagtctttacggtatgaaggaa

SEQ ID NO: 2064 - DNA, 25 bp, Homo sapien
ttccttcataccgtaaagactcgtg

SEQ ID NO: 2065 - DNA, 25 bp, Homo sapien
ggacaagtgtcattctcaatccgtc

SEQ ID NO: 2066 - DNA, 25 bp, Homo sapien
gacggattgagaatgacacttgtcc

SEQ ID NO: 2067 - DNA, 25 bp, Homo sapien
tcggtctctcgggggctcctgtcgt

SEQ ID NO: 2068 - DNA, 25 bp, Homo sapien
acgacaggagcccccgagagaccga

SEQ ID NO: 2069 - DNA, 25 bp, Homo sapien
gtcttctgagacgacgctttgaagg

SEQ ID NO: 2070 - DNA, 25 bp, Homo sapien
ccttcaaagcgtcgtctcagaagac

SEQ ID NO: 2071 - DNA, 25 bp, Homo sapien
taaaagactaaaaactgttgttata

SEQ ID NO: 2072 - DNA, 25 bp, Homo sapien
tataacaacagtttttagtctttta

SEQ ID NO: 2073 - DNA, 25 bp, Homo sapien
ctcagggacgtgggaggtgtgggtg

SEQ ID NO: 2074 - DNA, 25 bp, Homo sapien
cacccacacctcccacgtccctgag

SEQ ID NO: 2075 - DNA, 25 bp, Homo sapien
agtcttcacaatgtgaccggtccag

SEQ ID NO: 2076 - DNA, 25 bp, Homo sapien
ctggaccggtcacattgtgaagact

SEQ ID NO: 2077 - DNA, 25 bp, Homo sapien
aggacaccggaaagtcgacctccca

SEQ ID NO: 2078 - DNA, 25 bp, Homo sapien
tgggaggtcgactttccggtgtcct

SEQ ID NO: 2079 - DNA, 25 bp, Homo sapien
ttggtatatagctctcacgaaaaag

SEQ ID NO: 2080 - DNA, 25 bp, Homo sapien
ctttttcgtgagagctatataccaa

SEQ ID NO: 2081 - DNA, 25 bp, Homo sapien
ggtggaagtaactgaccacggagtt

SEQ ID NO: 2082 - DNA, 25 bp, Homo sapien
aactccgtggtcagttacttccacc

SEQ ID NO: 2083 - DNA, 25 bp, Homo sapien
acgaaacaaactagagtcacattac

SEQ ID NO: 2084 - DNA, 25 bp, Homo sapien
gtaatgtgactctagtttgtttcgt

SEQ ID NO: 2085 - DNA, 25 bp, Homo sapien
atgtcatactctcggttatattaag

SEQ ID NO: 2086 - DNA, 25 bp, Homo sapien
cttaatataaccgagagtatgacat

SEQ ID NO: 2087 - DNA, 25 bp, Homo sapien
gacacggcgactggcaaaaattccc

SEQ ID NO: 2088 - DNA, 25 bp, Homo sapien
gggaatttttgccagtcgccgtgtc

SEQ ID NO: 2089 - DNA, 25 bp, Homo sapien
cacttgcggattcctcctaccgtgg

SEQ ID NO: 2090 - DNA, 25 bp, Homo sapien
ccacggtaggaggaatccgcaagtg

SEQ ID NO: 2091 - DNA, 25 bp, Homo sapien
acgtgtcaacgattcgggtggtaat

SEQ ID NO: 2092 - DNA, 25 bp, Homo sapien
attaccacccgaatcgttgacacgt

SEQ ID NO: 2093 - DNA, 25 bp, Homo sapien
tcgacgagcgcgactgaagagcctc

SEQ ID NO: 2094 - DNA, 25 bp, Homo sapien
gaggctcttcagtcgcgctcgtcga

SEQ ID NO: 2095 - DNA, 25 bp, Homo sapien
agggccgccgacacccggccacgga

SEQ ID NO: 2096 - DNA, 25 bp, Homo sapien
tccgtggccgggtgtcggcggccct

SEQ ID NO: 2097 - DNA, 25 bp, Homo sapien
ccactgtacactcccatggggttct

SEQ ID NO: 2098 - DNA, 25 bp, Homo sapien
agaaccccatgggagtgtacagtgg

SEQ ID NO: 2099 - DNA, 25 bp, Homo sapien
acgacgacgtctgcgttctaggagg

SEQ ID NO: 2100 - DNA, 25 bp, Homo sapien
cctcctagaacgcagacgtcgtcgt

SEQ ID NO: 2101 - DNA, 25 bp, Homo sapien
cggtgcattgacaagcatcgatttg

SEQ ID NO: 2102 - DNA, 25 bp, Homo sapien
caaatcgatgcttgtcaatgcaccg

SEQ ID NO: 2103 - DNA, 25 bp, Homo sapien
ggcggcacgccctcgggtctctcga

SEQ ID NO: 2104 - DNA, 25 bp, Homo sapien
tcgagagacccgagggcgtgccgcc

SEQ ID NO: 2105 - DNA, 25 bp, Homo sapien
gcaggtggtgctccctcctcgtaca

SEQ ID NO: 2106 - DNA, 25 bp, Homo sapien
tgtacgaggagggagcaccacctgc

SEQ ID NO: 2107 - DNA, 25 bp, Homo sapien
atcattgtactaaattcctgtagta

SEQ ID NO: 2108 - DNA, 25 bp, Homo sapien
tactacaggaatttagtacaatgat

SEQ ID NO: 2109 - DNA, 25 bp, Homo sapien
aaggatacatttttccatcgacgac

SEQ ID NO: 2110 - DNA, 25 bp, Homo sapien
gtcgtcgatggaaaaatgtatcctt

SEQ ID NO: 2111 - DNA, 25 bp, Homo sapien
attggaccagactccattgttgtag

SEQ ID NO: 2112 - DNA, 25 bp, Homo sapien
ctacaacaatggagtctggtccaat

SEQ ID NO: 2113 - DNA, 25 bp, Homo sapien
aagacatttgcaaagattagtgtcg

SEQ ID NO: 2114 - DNA, 25 bp, Homo sapien
cgacactaatctttgcaaatgtctt

SEQ ID NO: 2115 - DNA, 25 bp, Homo sapien
ggtcggtacaggacgagcaccccgg

SEQ ID NO: 2116 - DNA, 25 bp, Homo sapien
ccggggtgctcgtcctgtaccgacc

SEQ ID NO: 2117 - DNA, 25 bp, Homo sapien
ggtcgccccgacgtcgatccggtac

SEQ ID NO: 2118 - DNA, 25 bp, Homo sapien
gtaccggatcgacgtcggggcgacc

SEQ ID NO: 2119 - DNA, 25 bp, Homo sapien
cctgtacatcgaccaagtttcggtt

SEQ ID NO: 2120 - DNA, 25 bp, Homo sapien
aaccgaaacttggtcgatgtacagg

SEQ ID NO: 2121 - DNA, 25 bp, Homo sapien
ctaccgaagaacgtctgggagagac

SEQ ID NO: 2122 - DNA, 25 bp, Homo sapien
gtctctcccagacgttcttcggtag

SEQ ID NO: 2123 - DNA, 25 bp, Homo sapien
ttttatgcgtctagctgagtcaact

SEQ ID NO: 2124 - DNA, 25 bp, Homo sapien
agttgactcagctagacgcataaaa

SEQ ID NO: 2125 - DNA, 25 bp, Homo sapien
ccctcggaggactttatctctgtgc

SEQ ID NO: 2126 - DNA, 25 bp, Homo sapien
gcacagagataaagtcctccgaggg

SEQ ID NO: 2127 - DNA, 25 bp, Homo sapien
tccacttccctcctcgcgccaagaa

SEQ ID NO: 2128 - DNA, 25 bp, Homo sapien
ttcttggcgcgaggagggaagtgga

SEQ ID NO: 2129 - DNA, 25 bp, Homo sapien
acttaagttactgtcatagaagagg

SEQ ID NO: 2130 - DNA, 25 bp, Homo sapien
cctcttctatgacagtaacttaagt

SEQ ID NO: 2131 - DNA, 25 bp, Homo sapien
acataaaatcgtttgcctgaagact

SEQ ID NO: 2132 - DNA, 25 bp, Homo sapien
agtcttcaggcaaacgattttatgt

SEQ ID NO: 2133 - DNA, 25 bp, Homo sapien
gcacttccagggacacgaggtccaa

SEQ ID NO: 2134 - DNA, 25 bp, Homo sapien
ttggacctcgtgtccctggaagtgc

SEQ ID NO: 2135 - DNA, 25 bp, Homo sapien
gcaagtaaacgagatctcttaaacc

SEQ ID NO: 2136 - DNA, 25 bp, Homo sapien
ggtttaagagatctcgtttacttgc

SEQ ID NO: 2137 - DNA, 25 bp, Homo sapien
acgtcgaggtagactgtgaagtaag

SEQ ID NO: 2138 - DNA, 25 bp, Homo sapien
cttacttcacagtctacctcgacgt

SEQ ID NO: 2139 - DNA, 25 bp, Homo sapien
gaaacaagaaccacggtactaagaa

SEQ ID NO: 2140 - DNA, 25 bp, Homo sapien
ttcttagtaccgtggttcttgtttc

SEQ ID NO: 2141 - DNA, 25 bp, Homo sapien
gtaccgaccggacgcccagtctcgg

SEQ ID NO: 2142 - DNA, 25 bp, Homo sapien
ccgagactgggcgtccggtcggtac

SEQ ID NO: 2143 - DNA, 25 bp, Homo sapien
ccgccgcgccgtaaggaaggcccga

SEQ ID NO: 2144 - DNA, 25 bp, Homo sapien
tcgggccttccttacggcgcggcgg

SEQ ID NO: 2145 - DNA, 25 bp, Homo sapien
tggtgaatcccgataaagggaccgt

SEQ ID NO: 2146 - DNA, 25 bp, Homo sapien
acggtccctttatcgggattcacca

SEQ ID NO: 2147 - DNA, 25 bp, Homo sapien
tgttactacgtatattggagacatt

SEQ ID NO: 2148 - DNA, 25 bp, Homo sapien
aatgtctccaatatacgtagtaaca

SEQ ID NO: 2149 - DNA, 25 bp, Homo sapien
aaacgaggaccttcagcactgacac

SEQ ID NO: 2150 - DNA, 25 bp, Homo sapien
gtgtcagtgctgaaggtcctcgttt

SEQ ID NO: 2151 - DNA, 25 bp, Homo sapien
ctcgcagggtccttcgcaccccgtc

SEQ ID NO: 2152 - DNA, 25 bp, Homo sapien
gacggggtgcgaaggaccctgcgag

SEQ ID NO: 2153 - DNA, 25 bp, Homo sapien
taactgtcgtcaagacatacgaaag

SEQ ID NO: 2154 - DNA, 25 bp, Homo sapien
ctttcgtatgtcttgacgacagtta

SEQ ID NO: 2155 - DNA, 25 bp, Homo sapien
cgggactccagacacaaagtgccga

SEQ ID NO: 2156 - DNA, 25 bp, Homo sapien
tcggcactttgtgtctggagtcccg

SEQ ID NO: 2157 - DNA, 25 bp, Homo sapien
gtcggaagaaccgtgcggtgtgacg

SEQ ID NO: 2158 - DNA, 25 bp, Homo sapien
cgtcacaccgcacggttcttccgac

SEQ ID NO: 2159 - DNA, 25 bp, Homo sapien
cggtgacgccgggtctgtgagccgg

SEQ ID NO: 2160 - DNA, 25 bp, Homo sapien
ccggctcacagacccggcgtcaccg

SEQ ID NO: 2161 - DNA, 25 bp, Homo sapien
ggtgacgccgggtctgtgagccggc

SEQ ID NO: 2162 - DNA, 25 bp, Homo sapien
gccggctcacagacccggcgtcacc

SEQ ID NO: 2163 - DNA, 25 bp, Homo sapien
cctgggtgtcggggcgccggtgacg

SEQ ID NO: 2164 - DNA, 25 bp, Homo sapien
cgtcaccggcgccccgacacccagg

SEQ ID NO: 2165 - DNA, 25 bp, Homo sapien
actgttaattgagttgttatgattg

SEQ ID NO: 2166 - DNA, 25 bp, Homo sapien
caatcataacaactcaattaacagt

SEQ ID NO: 2167 - DNA, 25 bp, Homo sapien
ccatttactgttaattgagttgtta

SEQ ID NO: 2168 - DNA, 25 bp, Homo sapien
taacaactcaattaacagtaaatgg

SEQ ID NO: 2169 - DNA, 25 bp, Homo sapien
atgacaagaaacagtattcaaagtg

SEQ ID NO: 2170 - DNA, 25 bp, Homo sapien
cactttgaatactgtttcttgtcat

SEQ ID NO: 2171 - DNA, 25 bp, Homo sapien
gacttttcttacaggagtcctttat

SEQ ID NO: 2172 - DNA, 25 bp, Homo sapien
ataaaggactcctgtaagaaaagtc

SEQ ID NO: 2173 - DNA, 25 bp, Homo sapien
ggtctcaccctccgggcaaggggta

SEQ ID NO: 2174 - DNA, 25 bp, Homo sapien
taccccttgcccggagggtgagacc

SEQ ID NO: 2175 - DNA, 25 bp, Homo sapien
tgggcgccccctccggtacagcctt

SEQ ID NO: 2176 - DNA, 25 bp, Homo sapien
aaggctgtaccggagggggcgccca

SEQ ID NO: 2177 - DNA, 25 bp, Homo sapien
ataaggaaaaatcactgttagtaaa

SEQ ID NO: 2178 - DNA, 25 bp, Homo sapien
tttactaacagtgatttttccttat

SEQ ID NO: 2179 - DNA, 25 bp, Homo sapien
aaagataaagttactgctataatac

SEQ ID NO: 2180 - DNA, 25 bp, Homo sapien
gtattatagcagtaactttatcttt

SEQ ID NO: 2181 - DNA, 25 bp, Homo sapien
aaagtatgtcaaaacactcttgaag

SEQ ID NO: 2182 - DNA, 25 bp, Homo sapien
cttcaagagtgttttgacatacttt

SEQ ID NO: 2183 - DNA, 25 bp, Homo sapien
cgtcaggagtgatccaacttggact

SEQ ID NO: 2184 - DNA, 25 bp, Homo sapien
agtccaagttggatcactcctgacg

SEQ ID NO: 2185 - DNA, 25 bp, Homo sapien
ggccccgttaggaccccagctcgta

SEQ ID NO: 2186 - DNA, 25 bp, Homo sapien
tacgagctggggtcctaacggggcc

SEQ ID NO: 2187 - DNA, 25 bp, Homo sapien
gggtgtcatcacttgcttaccgact

SEQ ID NO: 2188 - DNA, 25 bp, Homo sapien
agtcggtaagcaagtgatgacaccc

SEQ ID NO: 2189 - DNA, 25 bp, Homo sapien
ccacggtatcgagacgggactctcg

SEQ ID NO: 2190 - DNA, 25 bp, Homo sapien
cgagagtcccgtctcgataccgtgg

SEQ ID NO: 2191 - DNA, 25 bp, Homo sapien
ggtgccctcgcctcagcgcccggcg

SEQ ID NO: 2192 - DNA, 25 bp, Homo sapien
cgccgggcgctgaggcgagggcacc

SEQ ID NO: 2193 - DNA, 25 bp, Homo sapien
ttcatttaaatcaaagtacatatag

SEQ ID NO: 2194 - DNA, 25 bp, Homo sapien
ctatatgtactttgatttaaatgaa

SEQ ID NO: 2195 - DNA, 25 bp, Homo sapien
tcgcacgcccgctgcgcccagagtg

SEQ ID NO: 2196 - DNA, 25 bp, Homo sapien
cactctgggcgcagcgggcgtgcga

SEQ ID NO: 2197 - DNA, 25 bp, Homo sapien
cgtatgaaggcaagatagtaaactc

SEQ ID NO: 2198 - DNA, 25 bp, Homo sapien
gagtttactatcttgccttcatacg

SEQ ID NO: 2199 - DNA, 25 bp, Homo sapien
cctccacggtcttccgggagtgtgt

SEQ ID NO: 2200 - DNA, 25 bp, Homo sapien
acacactcccggaagaccgtggagg

SEQ ID NO: 2201 - DNA, 25 bp, Homo sapien
gagcgtcgtgggctgccccgagccg

SEQ ID NO: 2202 - DNA, 25 bp, Homo sapien
cggctcggggcagcccacgacgctc

SEQ ID NO: 2203 - DNA, 25 bp, Homo sapien
ccggagcgtcgtgggctgccccgag

SEQ ID NO: 2204 - DNA, 25 bp, Homo sapien
ctcggggcagcccacgacgctccgg

SEQ ID NO: 2205 - DNA, 25 bp, Homo sapien
ccccggagcgtcgtgggctgccccg

SEQ ID NO: 2206 - DNA, 25 bp, Homo sapien
cggggcagcccacgacgctccgggg

SEQ ID NO: 2207 - DNA, 25 bp, Homo sapien
ggcccccggagcgtcgtgggctgcc

SEQ ID NO: 2208 - DNA, 25 bp, Homo sapien
ggcagcccacgacgctccgggggcc

SEQ ID NO: 2209 - DNA, 25 bp, Homo sapien
aaccactaatcgagaccgaatacgt

SEQ ID NO: 2210 - DNA, 25 bp, Homo sapien
acgtattcggtctcgattagtggtt

SEQ ID NO: 2211 - DNA, 25 bp, Homo sapien
atcgaaatttcttatcacacgttag

SEQ ID NO: 2212 - DNA, 25 bp, Homo sapien
ctaacgtgtgataagaaatttcgat

SEQ ID NO: 2213 - DNA, 25 bp, Homo sapien
tcatataaaaccagaaaacagaagt

SEQ ID NO: 2214 - DNA, 25 bp, Homo sapien
acttctgttttctggttttatatga

SEQ ID NO: 2215 - DNA, 25 bp, Homo sapien
tcttctttcagcgaagaagagtaat

SEQ ID NO: 2216 - DNA, 25 bp, Homo sapien
attactcttcttcgctgaaagaaga

SEQ ID NO: 2217 - DNA, 25 bp, Homo sapien
agttaaaggtctagtatataagagt

SEQ ID NO: 2218 - DNA, 25 bp, Homo sapien
actcttatatactagacctttaact

SEQ ID NO: 2219 - DNA, 25 bp, Homo sapien
gtcggacgagacagcccgtcgcgac

SEQ ID NO: 2220 - DNA, 25 bp, Homo sapien
gtcgcgacgggctgtctcgtccgac

SEQ ID NO: 2221 - DNA, 25 bp, Homo sapien
aagtcatcccttgaagacttatccg

SEQ ID NO: 2222 - DNA, 25 bp, Homo sapien
cggataagtcttcaagggatgactt

SEQ ID NO: 2223 - DNA, 25 bp, Homo sapien
accgctgcggcgcccgccttacgcg

SEQ ID NO: 2224 - DNA, 25 bp, Homo sapien
cgcgtaaggcgggcgccgcagcggt

SEQ ID NO: 2225 - DNA, 25 bp, Homo sapien
cactcttaaccgtggttgcggaaac

SEQ ID NO: 2226 - DNA, 25 bp, Homo sapien
gtttccgcaaccacggttaagagtg

SEQ ID NO: 2227 - DNA, 25 bp, Homo sapien
acgacttcagtagactcaaatacca

SEQ ID NO: 2228 - DNA, 25 bp, Homo sapien
tggtatttgagtctactgaagtcgt

SEQ ID NO: 2229 - DNA, 25 bp, Homo sapien
aggtcgtccgaccaatcgtctgtgg

SEQ ID NO: 2230 - DNA, 25 bp, Homo sapien
ccacagacgattggtcggacgacct

SEQ ID NO: 2231 - DNA, 25 bp, Homo sapien
gtgatcccatcgtcaggtcccgtaa

SEQ ID NO: 2232 - DNA, 25 bp, Homo sapien
ttacgggacctgacgatgggatcac

SEQ ID NO: 2233 - DNA, 25 bp, Homo sapien
gacccgagaccaccactccacgatc

SEQ ID NO: 2234 - DNA, 25 bp, Homo sapien
gatcgtggagtggtggtctcgggtc

SEQ ID NO: 2235 - DNA, 25 bp, Homo sapien
gagagcgaaggaatgacggctaaat

SEQ ID NO: 2236 - DNA, 25 bp, Homo sapien
atttagccgtcattccttcgctctc

SEQ ID NO: 2237 - DNA, 25 bp, Homo sapien
ctcagtagaggtacgtgtggtgagt

SEQ ID NO: 2238 - DNA, 25 bp, Homo sapien
actcaccacacgtacctctactgag

SEQ ID NO: 2239 - DNA, 25 bp, Homo sapien
gacaactatcaagtaattgttcaag

SEQ ID NO: 2240 - DNA, 25 bp, Homo sapien
cttgaacaattacttgatagttgtc

SEQ ID NO: 2241 - DNA, 25 bp, Homo sapien
taatcaccgtagtatatcttgtagt

SEQ ID NO: 2242 - DNA, 25 bp, Homo sapien
actacaagatatactacggtgatta

SEQ ID NO: 2243 - DNA, 25 bp, Homo sapien
cgttgcacgtgtccttttagttaaa

SEQ ID NO: 2244 - DNA, 25 bp, Homo sapien
tttaactaaaaggacacgtgcaacg

SEQ ID NO: 2245 - DNA, 25 bp, Homo sapien
tcgcgggcgtggagggccctttcgc

SEQ ID NO: 2246 - DNA, 25 bp, Homo sapien
gcgaaagggccctccacgcccgcga

SEQ ID NO: 2247 - DNA, 25 bp, Homo sapien
gacgggctacattcctccagggtct

SEQ ID NO: 2248 - DNA, 25 bp, Homo sapien
agaccctggaggaatgtagcccgtc

SEQ ID NO: 2249 - DNA, 25 bp, Homo sapien
ccggaagagcgtcgcgccccgaagg

SEQ ID NO: 2250 - DNA, 25 bp, Homo sapien
ccttcggggcgcgacgctcttccgg

SEQ ID NO: 2251 - DNA, 25 bp, Homo sapien
aacaagagtaatagtgaccattaaa

SEQ ID NO: 2252 - DNA, 25 bp, Homo sapien
tttaatggtcactattactcttgtt

SEQ ID NO: 2253 - DNA, 25 bp, Homo sapien
gccggggggaagtggaccctgtcga

SEQ ID NO: 2254 - DNA, 25 bp, Homo sapien
tcgacagggtccacttccccccggc

SEQ ID NO: 2255 - DNA, 25 bp, Homo sapien
aatcacattatgtaagtgactacac

SEQ ID NO: 2256 - DNA, 25 bp, Homo sapien
gtgtagtcacttacataatgtgatt

SEQ ID NO: 2257 - DNA, 25 bp, Homo sapien
taccaaagaaacaacaaacagacaa

SEQ ID NO: 2258 - DNA, 25 bp, Homo sapien
ttgtctgtttgttgtttctttggta

SEQ ID NO: 2259 - DNA, 25 bp, Homo sapien
tcgagttacatgataagtaatcctt

SEQ ID NO: 2260 - DNA, 25 bp, Homo sapien
aaggattacttatcatgtaactcga

SEQ ID NO: 2261 - DNA, 25 bp, Homo sapien
aattataatgactctttgaaaagta

SEQ ID NO: 2262 - DNA, 25 bp, Homo sapien
tacttttcaaagagtcattataatt

SEQ ID NO: 2263 - DNA, 25 bp, Homo sapien
aaattataatgactctttgaaaagt

SEQ ID NO: 2264 - DNA, 25 bp, Homo sapien
acttttcaaagagtcattataattt

SEQ ID NO: 2265 - DNA, 25 bp, Homo sapien
gactcccgtcctgccgcggagaccc

SEQ ID NO: 2266 - DNA, 25 bp, Homo sapien
gggtctccgcggcaggacgggagtc

SEQ ID NO: 2267 - DNA, 25 bp, Homo sapien
ggggaccctgctgctcctgtaggac

SEQ ID NO: 2268 - DNA, 25 bp, Homo sapien
gtcctacaggagcagcagggtcccc

SEQ ID NO: 2269 - DNA, 25 bp, Homo sapien
accacggggaccctgctgctcctgt

SEQ ID NO: 2270 - DNA, 25 bp, Homo sapien
acaggagcagcagggtccccgtggt

SEQ ID NO: 2271 - DNA, 25 bp, Homo sapien
tttagtcgtttcctattagtattag

SEQ ID NO: 2272 - DNA, 25 bp, Homo sapien
ctaatactaataggaaacgactaaa

SEQ ID NO: 2273 - DNA, 25 bp, Homo sapien
gtcactttaatttatgtaccttcat

SEQ ID NO: 2274 - DNA, 25 bp, Homo sapien
atgaaggtacataaattaaagtgac

SEQ ID NO: 2275 - DNA, 25 bp, Homo sapien
gtcgagacccgcagacccaggagcg

SEQ ID NO: 2276 - DNA, 25 bp, Homo sapien
cgctcctgggtctgcgggtctcgac

SEQ ID NO: 2277 - DNA, 25 bp, Homo sapien
tacaagcgtcgggaggtcacccatc

SEQ ID NO: 2278 - DNA, 25 bp, Homo sapien
gatgggtgacctcccgacgcttgta

SEQ ID NO: 2279 - DNA, 25 bp, Homo sapien
aatgaaaagcagtacagtatatcaa

SEQ ID NO: 2280 - DNA, 25 bp, Homo sapien
ttgatatactgtactgcttttcatt

SEQ ID NO: 2281 - DNA, 25 bp, Homo sapien
aaactctttaactaatctcttcaat

SEQ ID NO: 2282 - DNA, 25 bp, Homo sapien
attgaagagattagttaaagagttt

SEQ ID NO: 2283 - DNA, 25 bp, Homo sapien
taaactctttaactaatctcttcaa

SEQ ID NO: 2284 - DNA, 25 bp, Homo sapien
ttgaagagattagttaaagagttta

SEQ ID NO: 2285 - DNA, 25 bp, Homo sapien
ccgtcgtggtttcgaagataagtct

SEQ ID NO: 2286 - DNA, 25 bp, Homo sapien
agacttatcttcgaaaccacgacgg

SEQ ID NO: 2287 - DNA, 25 bp, Homo sapien
aatagactttagatcattgaagtaa

SEQ ID NO: 2288 - DNA, 25 bp, Homo sapien
ttacttcaatgatctaaagtctatt

SEQ ID NO: 2289 - DNA, 25 bp, Homo sapien
aaaatagactttagatcattgaagt

SEQ ID NO: 2290 - DNA, 25 bp, Homo sapien
acttcaatgatctaaagtctatttt

SEQ ID NO: 2291 - DNA, 25 bp, Homo sapien
aacgacacgtcgtcaggttcgatag

SEQ ID NO: 2292 - DNA, 25 bp, Homo sapien
ctatcgaacctgacgacgtgtcgtt

SEQ ID NO: 2293 - DNA, 25 bp, Homo sapien
cagggatggtactaaaaatgtaaag

SEQ ID NO: 2294 - DNA, 25 bp, Homo sapien
ctttacatttttagtaccatccctg

SEQ ID NO: 2295 - DNA, 25 bp, Homo sapien
tcgataacgtttcgtgtagttaacg

SEQ ID NO: 2296 - DNA, 25 bp, Homo sapien
cgttaactacacgaaacgttatcga

SEQ ID NO: 2297 - DNA, 25 bp, Homo sapien
catgacccgcggtagctgccccagg

SEQ ID NO: 2298 - DNA, 25 bp, Homo sapien
cctggggcagctaccgcgggtcatg

SEQ ID NO: 2299 - DNA, 25 bp, Homo sapien
ccgagtcctggcgaccaggccggcc

SEQ ID NO: 2300 - DNA, 25 bp, Homo sapien
ggccggcctggtcgccaggactcgg

SEQ ID NO: 2301 - DNA, 25 bp, Homo sapien
gggaccgctcggccacgacctgagc

SEQ ID NO: 2302 - DNA, 25 bp, Homo sapien
gctcaggtcgtggccgagcggtccc

SEQ ID NO: 2303 - DNA, 25 bp, Homo sapien
aggtgggcgtctgggtgaaaggagg

SEQ ID NO: 2304 - DNA, 25 bp, Homo sapien
cctcctttcacccagacgcccacct

SEQ ID NO: 2305 - DNA, 25 bp, Homo sapien
cgacgtggagccctaaggcgcgcgg

SEQ ID NO: 2306 - DNA, 25 bp, Homo sapien
ccgcgcgccttagggctccacgtcg

SEQ ID NO: 2307 - DNA, 25 bp, Homo sapien
ataaagatacttcatgctgtactaa

SEQ ID NO: 2308 - DNA, 25 bp, Homo sapien
ttagtacagcatgaagtatctttat

SEQ ID NO: 2309 - DNA, 25 bp, Homo sapien
atattaattgaggtcctaagaattc

SEQ ID NO: 2310 - DNA, 25 bp, Homo sapien
gaattcttaggacctcaattaatat

SEQ ID NO: 2311 - DNA, 25 bp, Homo sapien
gtcctcatcttgacggtcatcctat

SEQ ID NO: 2312 - DNA, 25 bp, Homo sapien
ataggatgaccgtcaagatgaggac

SEQ ID NO: 2313 - DNA, 25 bp, Homo sapien
aagaagaagttaaaggtattcgtca

SEQ ID NO: 2314 - DNA, 25 bp, Homo sapien
tgacgaatacctttaacttcttctt

SEQ ID NO: 2315 - DNA, 25 bp, Homo sapien
ttaatttacttcgatcaagaaaaag

SEQ ID NO: 2316 - DNA, 25 bp, Homo sapien
ctttttcttgatcgaagtaaattaa

SEQ ID NO: 2317 - DNA, 25 bp, Homo sapien
cgacaccgtcatgtgtgcctgggac

SEQ ID NO: 2318 - DNA, 25 bp, Homo sapien
gtcccaggcacacatgacggtgtcg

SEQ ID NO: 2319 - DNA, 25 bp, Homo sapien
cgtctcgcgcctgtggggccctcgt

SEQ ID NO: 2320 - DNA, 25 bp, Homo sapien
acgagggccccacaggcgcgagacg

SEQ ID NO: 2321 - DNA, 25 bp, Homo sapien
acgtgaaggctcaccgctccaagta

SEQ ID NO: 2322 - DNA, 25 bp, Homo sapien
tacttggagcggtgagccttcacgt

SEQ ID NO: 2323 - DNA, 25 bp, Homo sapien
caaggataccaaggaggtgtttcgt

SEQ ID NO: 2324 - DNA, 25 bp, Homo sapien
acgaaacacctccttggtatccttg

SEQ ID NO: 2325 - DNA, 25 bp, Homo sapien
cgtcccggggaggcgcgcgctcggg

SEQ ID NO: 2326 - DNA, 25 bp, Homo sapien
cccgagcgcgcgcctccccgggacg

SEQ ID NO: 2327 - DNA, 25 bp, Homo sapien
gtccccgcagaccaccgtgggtggg

SEQ ID NO: 2328 - DNA, 25 bp, Homo sapien
cccacccacggtggtctgcggggac

SEQ ID NO: 2329 - DNA, 25 bp, Homo sapien
tagaacggactgtccaaacgagcgt

SEQ ID NO: 2330 - DNA, 25 bp, Homo sapien
acgctcgtttggacagtccgttcta

SEQ ID NO: 2331 - DNA, 25 bp, Homo sapien
ccagggtcacgcgacgtgaccggtc

SEQ ID NO: 2332 - DNA, 25 bp, Homo sapien
gaccggtcacgtcgcgtgaccctgg

SEQ ID NO: 2333 - DNA, 25 bp, Homo sapien
gccgtcagcggttgtcggcccgtcg

SEQ ID NO: 2334 - DNA, 25 bp, Homo sapien
cgacgggccgacaaccgctgacggc

SEQ ID NO: 2335 - DNA, 25 bp, Homo sapien
ggtcgtcggccgtcagcggttgtcg

SEQ ID NO: 2336 - DNA, 25 bp, Homo sapien
cgacaaccgctgacggccgacgacc

SEQ ID NO: 2337 - DNA, 25 bp, Homo sapien
taaggatttttgtaaggttattatg

SEQ ID NO: 2338 - DNA, 25 bp, Homo sapien
cataataaccttacaaaaatcctta

SEQ ID NO: 2339 - DNA, 25 bp, Homo sapien
accctgtactagctggtggtgacgg

SEQ ID NO: 2340 - DNA, 25 bp, Homo sapien
ccgtcaccaccagctagtacagggt

SEQ ID NO: 2341 - DNA, 25 bp, Homo sapien
gggacaccacgtaggtccggcgtcc

SEQ ID NO: 2342 - DNA, 25 bp, Homo sapien
ggacgccggacctacgtggtgtccc

SEQ ID NO: 2343 - DNA, 25 bp, Homo sapien
ctgagtccgggacggcctgggtgta

SEQ ID NO: 2344 - DNA, 25 bp, Homo sapien
tacacccaggccgtcccggactcag

SEQ ID NO: 2345 - DNA, 25 bp, Homo sapien
gcacccggagccagacgccggtgcc

SEQ ID NO: 2346 - DNA, 25 bp, Homo sapien
ggcaccggcgtctggctccgggtgc

SEQ ID NO: 2347 - DNA, 25 bp, Homo sapien
ttcgggaccacggtcgcgccgcacc

SEQ ID NO: 2348 - DNA, 25 bp, Homo sapien
ggtgcggcgcgaccgtggtcccgaa

SEQ ID NO: 2349 - DNA, 25 bp, Homo sapien
ctccgcggagggatcagtcgcagcc

SEQ ID NO: 2350 - DNA, 25 bp, Homo sapien
ggctgcgactgatccctccgcggag

SEQ ID NO: 2351 - DNA, 25 bp, Homo sapien
aagtagactggtagagtacgagtag

SEQ ID NO: 2352 - DNA, 25 bp, Homo sapien
ctactcgtactctaccagtctactt

SEQ ID NO: 2353 - DNA, 25 bp, Homo sapien
atgtgtaatccgaataagtgattaa

SEQ ID NO: 2354 - DNA, 25 bp, Homo sapien
ttaatcacttattcggattacacat

SEQ ID NO: 2355 - DNA, 25 bp, Homo sapien
caccaagacgccgtggcccacgagt

SEQ ID NO: 2356 - DNA, 25 bp, Homo sapien
actcgtgggccacggcgtcttggtg

SEQ ID NO: 2357 - DNA, 25 bp, Homo sapien
ggtggacggagagagtgtcctcgga

SEQ ID NO: 2358 - DNA, 25 bp, Homo sapien
tccgaggacactctctccgtccacc

SEQ ID NO: 2359 - DNA, 25 bp, Homo sapien
cggcccgtgatcaccgacgggctcc

SEQ ID NO: 2360 - DNA, 25 bp, Homo sapien
ggagcccgtcggtgatcacgggccg

SEQ ID NO: 2361 - DNA, 25 bp, Homo sapien
tgatttacacgattctttgaatttg

SEQ ID NO: 2362 - DNA, 25 bp, Homo sapien
caaattcaaagaatcgtgtaaatca

SEQ ID NO: 2363 - DNA, 25 bp, Homo sapien
acacgggaggtacgactctctcggc

SEQ ID NO: 2364 - DNA, 25 bp, Homo sapien
gccgagagagtcgtacctcccgtgt

SEQ ID NO: 2365 - DNA, 25 bp, Homo sapien
atctctatgagtaccacaaggaagt

SEQ ID NO: 2366 - DNA, 25 bp, Homo sapien
acttccttgtggtactcatagagat

SEQ ID NO: 2367 - DNA, 25 bp, Homo sapien
acgaccgtacacaaacgagtagaag

SEQ ID NO: 2368 - DNA, 25 bp, Homo sapien
cttctactcgtttgtgtacggtcgt

SEQ ID NO: 2369 - DNA, 25 bp, Homo sapien
attaggcgacggcactcctggttac

SEQ ID NO: 2370 - DNA, 25 bp, Homo sapien
gtaaccaggagtgccgtcgcctaat

SEQ ID NO: 2371 - DNA, 25 bp, Homo sapien
tccaggtcttcattctgacgggaag

SEQ ID NO: 2372 - DNA, 25 bp, Homo sapien
cttcccgtcagaatgaagacctgga

SEQ ID NO: 2373 - DNA, 25 bp, Homo sapien
tgaacatcctaccttggtttttacg

SEQ ID NO: 2374 - DNA, 25 bp, Homo sapien
cgtaaaaaccaaggtaggatgttca

SEQ ID NO: 2375 - DNA, 25 bp, Homo sapien
gtataaacattcttacccactagaa

SEQ ID NO: 2376 - DNA, 25 bp, Homo sapien
ttctagtgggtaagaatgtttatac

SEQ ID NO: 2377 - DNA, 25 bp, Homo sapien
cggccgccccgacgttccgccactc

SEQ ID NO: 2378 - DNA, 25 bp, Homo sapien
gagtggcggaacgtcggggcggccg

SEQ ID NO: 2379 - DNA, 25 bp, Homo sapien
gttgccctttatacgcgtcccctct

SEQ ID NO: 2380 - DNA, 25 bp, Homo sapien
agaggggacgcgtataaagggcaac

SEQ ID NO: 2381 - DNA, 25 bp, Homo sapien
gcggggtcgatgtcacacaggacga

SEQ ID NO: 2382 - DNA, 25 bp, Homo sapien
tcgtcctgtgtgacatcgaccccgc

SEQ ID NO: 2383 - DNA, 25 bp, Homo sapien
agagacgtaagactccctccatctt

SEQ ID NO: 2384 - DNA, 25 bp, Homo sapien
aagatggagggagtcttacgtctct

SEQ ID NO: 2385 - DNA, 25 bp, Homo sapien
ccgacatcttccaagaaggaggacc

SEQ ID NO: 2386 - DNA, 25 bp, Homo sapien
ggtcctccttcttggaagatgtcgg

SEQ ID NO: 2387 - DNA, 25 bp, Homo sapien
gatgggatcccacactcccatcctt

SEQ ID NO: 2388 - DNA, 25 bp, Homo sapien
aaggatgggagtgtgggatcccatc

SEQ ID NO: 2389 - DNA, 25 bp, Homo sapien
agtaacgaccatcgtagatcatctt

SEQ ID NO: 2390 - DNA, 25 bp, Homo sapien
aagatgatctacgatggtcgttact

SEQ ID NO: 2391 - DNA, 25 bp, Homo sapien
tgactgaatcgtttaggagagataa

SEQ ID NO: 2392 - DNA, 25 bp, Homo sapien
ttatctctcctaaacgattcagtca

SEQ ID NO: 2393 - DNA, 25 bp, Homo sapien
gggcgggtgcaactggtgtaccggt

SEQ ID NO: 2394 - DNA, 25 bp, Homo sapien
accggtacaccagttgcacccgccc

SEQ ID NO: 2395 - DNA, 25 bp, Homo sapien
taagtcaagttcctgatctcagagt

SEQ ID NO: 2396 - DNA, 25 bp, Homo sapien
actctgagatcaggaacttgactta

SEQ ID NO: 2397 - DNA, 25 bp, Homo sapien
ctcggtgaacttatgactaggaact

SEQ ID NO: 2398 - DNA, 25 bp, Homo sapien
agttcctagtcataagttcaccgag

SEQ ID NO: 2399 - DNA, 25 bp, Homo sapien
agtcggcattgaagctgaagctgca

SEQ ID NO: 2400 - DNA, 25 bp, Homo sapien
tgcagcttcagcttcaatgccgact

SEQ ID NO: 2401 - DNA, 25 bp, Homo sapien
actctcgactaatttgacgagcggt

SEQ ID NO: 2402 - DNA, 25 bp, Homo sapien
accgctcgtcaaattagtcgagagt

SEQ ID NO: 2403 - DNA, 25 bp, Homo sapien
agagatatctttatcagactcggta

SEQ ID NO: 2404 - DNA, 25 bp, Homo sapien
taccgagtctgataaagatatctct

SEQ ID NO: 2405 - DNA, 25 bp, Homo sapien
tcgagggtcccctgcggcgtccgtg

SEQ ID NO: 2406 - DNA, 25 bp, Homo sapien
cacggacgccgcaggggaccctcga

SEQ ID NO: 2407 - DNA, 25 bp, Homo sapien
cgacggttgaaactcatagtcagag

SEQ ID NO: 2408 - DNA, 25 bp, Homo sapien
ctctgactatgagtttcaaccgtcg

SEQ ID NO: 2409 - DNA, 25 bp, Homo sapien
cggtgacactcacgggggaaattaa

SEQ ID NO: 2410 - DNA, 25 bp, Homo sapien
ttaatttcccccgtgagtgtcaccg

SEQ ID NO: 2411 - DNA, 25 bp, Homo sapien
acgtgtccgttgtctagacgaagaa

SEQ ID NO: 2412 - DNA, 25 bp, Homo sapien
ttcttcgtctagacaacggacacgt

SEQ ID NO: 2413 - DNA, 25 bp, Homo sapien
ttcctgattattgagtcttttacct

SEQ ID NO: 2414 - DNA, 25 bp, Homo sapien
aggtaaaagactcaataatcaggaa

SEQ ID NO: 2415 - DNA, 25 bp, Homo sapien
aggaactttcctgattattgagtct

SEQ ID NO: 2416 - DNA, 25 bp, Homo sapien
agactcaataatcaggaaagttcct

SEQ ID NO: 2417 - DNA, 25 bp, Homo sapien
actttcgaagaaacatactaactat

SEQ ID NO: 2418 - DNA, 25 bp, Homo sapien
atagttagtatgtttcttcgaaagt

SEQ ID NO: 2419 - DNA, 25 bp, Homo sapien
ctgtcgtcggttagcccaggcgtct

SEQ ID NO: 2420 - DNA, 25 bp, Homo sapien
agacgcctgggctaaccgacgacag

SEQ ID NO: 2421 - DNA, 25 bp, Homo sapien
agttttgccaaatagttgttattag

SEQ ID NO: 2422 - DNA, 25 bp, Homo sapien
ctaataacaactatttggcaaaact

SEQ ID NO: 2423 - DNA, 25 bp, Homo sapien
cgattactgaacgtcggtttaggag

SEQ ID NO: 2424 - DNA, 25 bp, Homo sapien
ctcctaaaccgacgttcagtaatcg

SEQ ID NO: 2425 - DNA, 25 bp, Homo sapien
tgacgaaatcaatgtctttcaaaat

SEQ ID NO: 2426 - DNA, 25 bp, Homo sapien
attttgaaagacattgatttcgtca

SEQ ID NO: 2427 - DNA, 25 bp, Homo sapien
cgacagagaccgtgggactaccacg

SEQ ID NO: 2428 - DNA, 25 bp, Homo sapien
cgtggtagtcccacggtctctgtcg

SEQ ID NO: 2429 - DNA, 25 bp, Homo sapien
cggtcctcggtcttgaagcccaccc

SEQ ID NO: 2430 - DNA, 25 bp, Homo sapien
gggtgggcttcaagaccgaggaccg

SEQ ID NO: 2431 - DNA, 25 bp, Homo sapien
tcctcggtcttgaagcccaccctcg

SEQ ID NO: 2432 - DNA, 25 bp, Homo sapien
cgagggtgggcttcaagaccgagga

SEQ ID NO: 2433 - DNA, 25 bp, Homo sapien
tctcggactacaaacgccaagaagt

SEQ ID NO: 2434 - DNA, 25 bp, Homo sapien
acttcttggcgtttgtagtccgaga

SEQ ID NO: 2435 - DNA, 25 bp, Homo sapien
agtcttatactgttaagatatttct

SEQ ID NO: 2436 - DNA, 25 bp, Homo sapien
agaaatatcttaacagtataagact

SEQ ID NO: 2437 - DNA, 25 bp, Homo sapien
aagtaaatgacgattatttcgttat

SEQ ID NO: 2438 - DNA, 25 bp, Homo sapien
ataacgaaataatcgtcatttactt

SEQ ID NO: 2439 - DNA, 25 bp, Homo sapien
cttcatagacaaggagaggaggtcg

SEQ ID NO: 2440 - DNA, 25 bp, Homo sapien
cgacctcctctccttgtctatgaag

SEQ ID NO: 2441 - DNA, 25 bp, Homo sapien
gccgcgcttgcacggcccaagccgg

SEQ ID NO: 2442 - DNA, 25 bp, Homo sapien
ccggcttgggccgtgcaagcgcggc

SEQ ID NO: 2443 - DNA, 25 bp, Homo sapien
gaccaagagaagggcccacctccct

SEQ ID NO: 2444 - DNA, 25 bp, Homo sapien
agggaggtgggcccttctcttggtc

SEQ ID NO: 2445 - DNA, 25 bp, Homo sapien
cgccgggcctggagcccgtcccgtc

SEQ ID NO: 2446 - DNA, 25 bp, Homo sapien
gacgggacgggctccaggcccggcg

SEQ ID NO: 2447 - DNA, 25 bp, Homo sapien
ggtcgcgaacggaagggacacctga

SEQ ID NO: 2448 - DNA, 25 bp, Homo sapien
tcaggtgtcccttccgttcgcgacc

SEQ ID NO: 2449 - DNA, 25 bp, Homo sapien
ggcaacggcctaccggggtggacga

SEQ ID NO: 2450 - DNA, 25 bp, Homo sapien
tcgtccaccccggtaggccgttgcc

SEQ ID NO: 2451 - DNA, 25 bp, Homo sapien
gttggaacaacatccctttggaggt

SEQ ID NO: 2452 - DNA, 25 bp, Homo sapien
acctccaaagggatgttgttccaac

SEQ ID NO: 2453 - DNA, 25 bp, Homo sapien
agacggtgatcctctagatctattc

SEQ ID NO: 2454 - DNA, 25 bp, Homo sapien
gaatagatctagaggatcaccgtct

SEQ ID NO: 2455 - DNA, 25 bp, Homo sapien
ttttgtggtcgcccctacagtggta

SEQ ID NO: 2456 - DNA, 25 bp, Homo sapien
taccactgtaggggcgaccacaaaa

SEQ ID NO: 2457 - DNA, 25 bp, Homo sapien
gtcctatgtcaagacatatttccag

SEQ ID NO: 2458 - DNA, 25 bp, Homo sapien
ctggaaatatgtcttgacataggac

SEQ ID NO: 2459 - DNA, 25 bp, Homo sapien
gtcgacgattcattttaccttgcag

SEQ ID NO: 2460 - DNA, 25 bp, Homo sapien
ctgcaaggtaaaatgaatcgtcgac

SEQ ID NO: 2461 - DNA, 25 bp, Homo sapien
acgtagacggtgtgcgacaacccaa

SEQ ID NO: 2462 - DNA, 25 bp, Homo sapien
ttgggttgtcgcacaccgtctacgt

SEQ ID NO: 2463 - DNA, 25 bp, Homo sapien
ggactgaccaagggcccgcgtccga

SEQ ID NO: 2464 - DNA, 25 bp, Homo sapien
tcggacgcgggcccttggtcagtcc

SEQ ID NO: 2465 - DNA, 25 bp, Homo sapien
cccgtgtcggccaggtccgtgagaa

SEQ ID NO: 2466 - DNA, 25 bp, Homo sapien
ttctcacggacctggccgacacggg

SEQ ID NO: 2467 - DNA, 25 bp, Homo sapien
ataaactcaagtaataatagacctt

SEQ ID NO: 2468 - DNA, 25 bp, Homo sapien
aaggtctattattacttgagtttat

SEQ ID NO: 2469 - DNA, 25 bp, Homo sapien
agggctctcggcaaggtccttgtac

SEQ ID NO: 2470 - DNA, 25 bp, Homo sapien
gtacaaggaccttgccgagagccct

SEQ ID NO: 2471 - DNA, 25 bp, Homo sapien
gacaaacaaattataccagtagact

SEQ ID NO: 2472 - DNA, 25 bp, Homo sapien
agtctactggtataatttgtttgtc

SEQ ID NO: 2473 - DNA, 25 bp, Homo sapien
tgttggtaccgggcgtcgcgtcttc

SEQ ID NO: 2474 - DNA, 25 bp, Homo sapien
gaagacgcgacgcccggtaccaaca

SEQ ID NO: 2475 - DNA, 25 bp, Homo sapien
aaaattctcaagtcccacctgaact

SEQ ID NO: 2476 - DNA, 25 bp, Homo sapien
agttcaggtgggacttgagaatttt

SEQ ID NO: 2477 - DNA, 25 bp, Homo sapien
cgccgcaggcgctcgcgcgaccgcc

SEQ ID NO: 2478 - DNA, 25 bp, Homo sapien
ggcggtcgcgcgagcgcctgcggcg

SEQ ID NO: 2479 - DNA, 25 bp, Homo sapien
tccgcacgccgcaggcgctcgcgcg

SEQ ID NO: 2480 - DNA, 25 bp, Homo sapien
cgcgcgagcgcctgcggcgtgcgga

SEQ ID NO: 2481 - DNA, 25 bp, Homo sapien
ttttttcaactttagtacattaaga

SEQ ID NO: 2482 - DNA, 25 bp, Homo sapien
tcttaatgtactaaagttgaaaaaa

SEQ ID NO: 2483 - DNA, 25 bp, Homo sapien
gacgtccaggttcaccctccgaccg

SEQ ID NO: 2484 - DNA, 25 bp, Homo sapien
cggtcggagggtgaacctggacgtc

SEQ ID NO: 2485 - DNA, 25 bp, Homo sapien
agcgtcccatgtgaccacgattctg

SEQ ID NO: 2486 - DNA, 25 bp, Homo sapien
cagaatcgtggtcacatgggacgct

SEQ ID NO: 2487 - DNA, 25 bp, Homo sapien
cggccgcactttcgcggtcgcccag

SEQ ID NO: 2488 - DNA, 25 bp, Homo sapien
ctgggcgaccgcgaaagtgcggccg

SEQ ID NO: 2489 - DNA, 25 bp, Homo sapien
cggcggccgcactttcgcggtcgcc

SEQ ID NO: 2490 - DNA, 25 bp, Homo sapien
ggcgaccgcgaaagtgcggccgccg

SEQ ID NO: 2491 - DNA, 25 bp, Homo sapien
ttaaaacactacaagcttaaatcct

SEQ ID NO: 2492 - DNA, 25 bp, Homo sapien
aggatttaagcttgtagtgttttaa

SEQ ID NO: 2493 - DNA, 25 bp, Homo sapien
ttcttacctacgttataatctttgt

SEQ ID NO: 2494 - DNA, 25 bp, Homo sapien
acaaagattataacgtaggtaagaa

SEQ ID NO: 2495 - DNA, 25 bp, Homo sapien
acaaagatgatctagtgcctaatgt

SEQ ID NO: 2496 - DNA, 25 bp, Homo sapien
acattaggcactagatcatctttgt

SEQ ID NO: 2497 - DNA, 25 bp, Homo sapien
gggagacgaggacaaagggaggaga

SEQ ID NO: 2498 - DNA, 25 bp, Homo sapien
tctcctccctttgtcctcgtctccc

SEQ ID NO: 2499 - DNA, 25 bp, Homo sapien
acaaatacttcgaagacattggtcc

SEQ ID NO: 2500 - DNA, 25 bp, Homo sapien
ggaccaatgtcttcgaagtatttgt

SEQ ID NO: 2501 - DNA, 25 bp, Homo sapien
gtcacacggcgcaagggtcactact

SEQ ID NO: 2502 - DNA, 25 bp, Homo sapien
agtagtgacccttgcgccgtgtgac

SEQ ID NO: 2503 - DNA, 25 bp, Homo sapien
ttacgtatacgctaccgacaatgat

SEQ ID NO: 2504 - DNA, 25 bp, Homo sapien
atcattgtcggtagcgtatacgtaa

SEQ ID NO: 2505 - DNA, 25 bp, Homo sapien
gacttactgctatggtttctttctc

SEQ ID NO: 2506 - DNA, 25 bp, Homo sapien
gagaaagaaaccatagcagtaagtc

SEQ ID NO: 2507 - DNA, 25 bp, Homo sapien
tcggtgcccgagattcaactgacac

SEQ ID NO: 2508 - DNA, 25 bp, Homo sapien
gtgtcagttgaatctcgggcaccga

SEQ ID NO: 2509 - DNA, 25 bp, Homo sapien
tgtaaaaggtacttatcacttaata

SEQ ID NO: 2510 - DNA, 25 bp, Homo sapien
tattaagtgataagtaccttttaca

SEQ ID NO: 2511 - DNA, 25 bp, Homo sapien
cccgacattggtgttctcggtccgt

SEQ ID NO: 2512 - DNA, 25 bp, Homo sapien
acggaccgagaacaccaatgtcggg

SEQ ID NO: 2513 - DNA, 25 bp, Homo sapien
cctggccccagtggtctgggtcacg

SEQ ID NO: 2514 - DNA, 25 bp, Homo sapien
cgtgacccagaccactggggccagg

SEQ ID NO: 2515 - DNA, 25 bp, Homo sapien
ctcgacccgcacagagtctgggaga

SEQ ID NO: 2516 - DNA, 25 bp, Homo sapien
tctcccagactctgtgcgggtcgag

SEQ ID NO: 2517 - DNA, 25 bp, Homo sapien
atcaagagttggtgactgagaagat

SEQ ID NO: 2518 - DNA, 25 bp, Homo sapien
atcttctcagtcaccaactcttgat

SEQ ID NO: 2519 - DNA, 25 bp, Homo sapien
ctagactatcagtttcagaagtttt

SEQ ID NO: 2520 - DNA, 25 bp, Homo sapien
aaaacttctgaaactgatagtctag

SEQ ID NO: 2521 - DNA, 25 bp, Homo sapien
aatgttacacatgacggaatgatcc

SEQ ID NO: 2522 - DNA, 25 bp, Homo sapien
ggatcattccgtcatgtgtaacatt

SEQ ID NO: 2523 - DNA, 25 bp, Homo sapien
cctaggaagccccgcgaagcagagg

SEQ ID NO: 2524 - DNA, 25 bp, Homo sapien
cctctgcttcgcggggcttcctagg

SEQ ID NO: 2525 - DNA, 25 bp, Homo sapien
gcctaggaagccccgcgaagcagag

SEQ ID NO: 2526 - DNA, 25 bp, Homo sapien
ctctgcttcgcggggcttcctaggc

SEQ ID NO: 2527 - DNA, 25 bp, Homo sapien
cgaacagggaacaccaactcttagc

SEQ ID NO: 2528 - DNA, 25 bp, Homo sapien
gctaagagttggtgttccctgttcg

SEQ ID NO: 2529 - DNA, 25 bp, Homo sapien
aaagactagaaaatactctattctt

SEQ ID NO: 2530 - DNA, 25 bp, Homo sapien
aagaatagagtattttctagtcttt

SEQ ID NO: 2531 - DNA, 25 bp, Homo sapien
aaaagactagaaaatactctattct

SEQ ID NO: 2532 - DNA, 25 bp, Homo sapien
agaatagagtattttctagtctttt

SEQ ID NO: 2533 - DNA, 25 bp, Homo sapien
ggcgacctaagagcccggaaacact

SEQ ID NO: 2534 - DNA, 25 bp, Homo sapien
agtgtttccgggctcttaggtcgcc

SEQ ID NO: 2535 - DNA, 25 bp, Homo sapien
acaaaaacaataaaatggtctatac

SEQ ID NO: 2536 - DNA, 25 bp, Homo sapien
gtatagaccattttattgtttttgt

SEQ ID NO: 2537 - DNA, 25 bp, Homo sapien
gatgaggaggtgttacttttcttcg

SEQ ID NO: 2538 - DNA, 25 bp, Homo sapien
cgaagaaaagtaacacctcctcatc

SEQ ID NO: 2539 - DNA, 25 bp, Homo sapien
ggacgcccccatgaggacggggacc

SEQ ID NO: 2540 - DNA, 25 bp, Homo sapien
ggtccccgtcctcatgggggcgtcc

SEQ ID NO: 2541 - DNA, 25 bp, Homo sapien
ggactgaatctacggctattttata

SEQ ID NO: 2542 - DNA, 25 bp, Homo sapien
tataaaatagccgtagattcagtcc

SEQ ID NO: 2543 - DNA, 25 bp, Homo sapien
gacttagtgacaatcaacttctata

SEQ ID NO: 2544 - DNA, 25 bp, Homo sapien
tatagaagttgattgtcactaagtc

SEQ ID NO: 2545 - DNA, 25 bp, Homo sapien
tctcaccggccggacgtcactcgag

SEQ ID NO: 2546 - DNA, 25 bp, Homo sapien
ctcgagtgacgtccggccggtgaga

SEQ ID NO: 2547 - DNA, 25 bp, Homo sapien
aatttatagactgttcagcatcata

SEQ ID NO: 2548 - DNA, 25 bp, Homo sapien
tatgatgctgaacagtctataaatt

SEQ ID NO: 2549 - DNA, 25 bp, Homo sapien
aataaagcaacgaaattgacaaagt

SEQ ID NO: 2550 - DNA, 25 bp, Homo sapien
actttgtcaatttcgttgctttatt

SEQ ID NO: 2551 - DNA, 25 bp, Homo sapien
cggatcggtgtcttatctgtataaa

SEQ ID NO: 2552 - DNA, 25 bp, Homo sapien
tttatacagataagacaccgatccg

SEQ ID NO: 2553 - DNA, 25 bp, Homo sapien
ggaggaaacgatcctaacatttgac

SEQ ID NO: 2554 - DNA, 25 bp, Homo sapien
gtcaaatgttaggatcgtttcctcc

SEQ ID NO: 2555 - DNA, 25 bp, Homo sapien
gatcatgtcacgtctgcgtggaccg

SEQ ID NO: 2556 - DNA, 25 bp, Homo sapien
cggtccacgcagacgtgacatgatc

SEQ ID NO: 2557 - DNA, 25 bp, Homo sapien
tccgtccctgagacacacgtgtacg

SEQ ID NO: 2558 - DNA, 25 bp, Homo sapien
cgtacacgtgtgtctcagggacgga

SEQ ID NO: 2559 - DNA, 25 bp, Homo sapien
cttcactcccgttccagagccccgg

SEQ ID NO: 2560 - DNA, 25 bp, Homo sapien
ccggggctctggaacgggagtgaag

SEQ ID NO: 2561 - DNA, 25 bp, Homo sapien
agtgtacactacaaggtacacgtcc

SEQ ID NO: 2562 - DNA, 25 bp, Homo sapien
ggacgtgtaccttgtagtgtacact

SEQ ID NO: 2563 - DNA, 25 bp, Homo sapien
ctaactggatgagccatcgctcaac

SEQ ID NO: 2564 - DNA, 25 bp, Homo sapien
gttgagcgatggctcatccagttag

SEQ ID NO: 2565 - DNA, 25 bp, Homo sapien
ggcttaaggcacagggccccgtgtt

SEQ ID NO: 2566 - DNA, 25 bp, Homo sapien
aacacggggccctgtgccttaagcc

SEQ ID NO: 2567 - DNA, 25 bp, Homo sapien
cggtcacagccctccgggccggcgg

SEQ ID NO: 2568 - DNA, 25 bp, Homo sapien
ccgccggcccggagggctgtgaccg

SEQ ID NO: 2569 - DNA, 25 bp, Homo sapien
cagaaagttctagagtattgaaccc

SEQ ID NO: 2570 - DNA, 25 bp, Homo sapien
gggttcaatactctagaactttctg

SEQ ID NO: 2571 - DNA, 25 bp, Homo sapien
ggactctaaatgctaaaaggagtgt

SEQ ID NO: 2572 - DNA, 25 bp, Homo sapien
acactccttttagcatttagagtcc

SEQ ID NO: 2573 - DNA, 25 bp, Homo sapien
ggcacatgtgaacctgagacgagac

SEQ ID NO: 2574 - DNA, 25 bp, Homo sapien
gtctcgtctcaggttcacatgtgcc

SEQ ID NO: 2575 - DNA, 25 bp, Homo sapien
gaaaatataagttctactgctgtag

SEQ ID NO: 2576 - DNA, 25 bp, Homo sapien
ctacagcagtagaacttatattttc

SEQ ID NO: 2577 - DNA, 25 bp, Homo sapien
gacccatgtttccacgtcattctcg

SEQ ID NO: 2578 - DNA, 25 bp, Homo sapien
cgagaatgacgtggaaacatgggtc

SEQ ID NO: 2579 - DNA, 25 bp, Homo sapien
ccgccccgtgcgcacctccgcagtg

SEQ ID NO: 2580 - DNA, 25 bp, Homo sapien
cactgcggaggtgcgcacggggcgg

SEQ ID NO: 2581 - DNA, 25 bp, Homo sapien
gtcgctcgtagtcgccttggtccct

SEQ ID NO: 2582 - DNA, 25 bp, Homo sapien
agggaccaaggcgactacgagcgac

SEQ ID NO: 2583 - DNA, 25 bp, Homo sapien
ggactcgtcaccggcaccgtgtccg

SEQ ID NO: 2584 - DNA, 25 bp, Homo sapien
cggacacggtgccggtgacgagtcc

SEQ ID NO: 2585 - DNA, 25 bp, Homo sapien
ctagactatgtatgtgaacctttca

SEQ ID NO: 2586 - DNA, 25 bp, Homo sapien
tgaaaggttcacatacatagtctag

SEQ ID NO: 2587 - DNA, 25 bp, Homo sapien
tatattcataagtgtagtcacaaag

SEQ ID NO: 2588 - DNA, 25 bp, Homo sapien
ctttgtgactacacttatgaatata

SEQ ID NO: 2589 - DNA, 25 bp, Homo sapien
agtttatattcataagtgtagtcac

SEQ ID NO: 2590 - DNA, 25 bp, Homo sapien
gtgactacacttatgaatataaact

SEQ ID NO: 2591 - DNA, 25 bp, Homo sapien
ttcataagtgtagtcacaaagatat

SEQ ID NO: 2592 - DNA, 25 bp, Homo sapien
atatctttgtgactacacttatgaa

SEQ ID NO: 2593 - DNA, 25 bp, Homo sapien
tctctttgccggaaggtagaggaaa

SEQ ID NO: 2594 - DNA, 25 bp, Homo sapien
tttcctctaccttccggcaaagaga

SEQ ID NO: 2595 - DNA, 25 bp, Homo sapien
gcactaatagattgtacacgtttat

SEQ ID NO: 2596 - DNA, 25 bp, Homo sapien
ataaacgtgtacaatctattagtgc

SEQ ID NO: 2597 - DNA, 25 bp, Homo sapien
tccagcatgacccacgtcgcgggag

SEQ ID NO: 2598 - DNA, 25 bp, Homo sapien
ctcccgcgacgtgggtcatgctgga

SEQ ID NO: 2599 - DNA, 25 bp, Homo sapien
tcccacctcacgaatcacagatatg

SEQ ID NO: 2600 - DNA, 25 bp, Homo sapien
catatctgtgattcgtgaggtggga

SEQ ID NO: 2601 - DNA, 25 bp, Homo sapien
gacgcaaaaccttcttatgaattaa

SEQ ID NO: 2602 - DNA, 25 bp, Homo sapien
ttaattcataagaaggttttgcgtc

SEQ ID NO: 2603 - DNA, 25 bp, Homo sapien
cggcgggacacgactgtagctcctc

SEQ ID NO: 2604 - DNA, 25 bp, Homo sapien
gaggagctacagtcgtgtcccgccg

SEQ ID NO: 2605 - DNA, 25 bp, Homo sapien
ggtgccgtaacacgtctacactaag

SEQ ID NO: 2606 - DNA, 25 bp, Homo sapien
cttagtgtagacgtgttacggcacc

SEQ ID NO: 2607 - DNA, 25 bp, Homo sapien
ggttcatagataaggggactcgacg

SEQ ID NO: 2608 - DNA, 25 bp, Homo sapien
cgtcgagtccccttatctatgaacc

SEQ ID NO: 2609 - DNA, 25 bp, Homo sapien
cgacaccgcccccgaagggcagcgt

SEQ ID NO: 2610 - DNA, 25 bp, Homo sapien
acgctgcccttcgggggcggtgtcg

SEQ ID NO: 2611 - DNA, 25 bp, Homo sapien
agtcgttggagaaaattatgttata

SEQ ID NO: 2612 - DNA, 25 bp, Homo sapien
tataacataattttctccaacgact

SEQ ID NO: 2613 - DNA, 25 bp, Homo sapien
ccccagacgtcaaccgttgccaccc

SEQ ID NO: 2614 - DNA, 25 bp, Homo sapien
gggtggcaacggttgacgtctgggg

SEQ ID NO: 2615 - DNA, 25 bp, Homo sapien
gacacccagagacagttatgcctac

SEQ ID NO: 2616 - DNA, 25 bp, Homo sapien
gtaggcataactgtctctgggtgtc

SEQ ID NO: 2617 - DNA, 25 bp, Homo sapien
tcgagactacctagtctccaccgtg

SEQ ID NO: 2618 - DNA, 25 bp, Homo sapien
cacggtggagactaggtagtctcga

SEQ ID NO: 2619 - DNA, 25 bp, Homo sapien
gtgggtatagacacgtctctttaga

SEQ ID NO: 2620 - DNA, 25 bp, Homo sapien
tctaaagagacgtgtctatacccac

SEQ ID NO: 2621 - DNA, 25 bp, Homo sapien
tgccgcaggcgtccacccgccgacg

SEQ ID NO: 2622 - DNA, 25 bp, Homo sapien
cgtcggcgggtggacgcctgcggca

SEQ ID NO: 2623 - DNA, 25 bp, Homo sapien
agtcccgtacatccttgcgtctact

SEQ ID NO: 2624 - DNA, 25 bp, Homo sapien
agtagacgcaaggatgtacgggact

SEQ ID NO: 2625 - DNA, 25 bp, Homo sapien
ataaagttgtagaaaatgtcgttgt

SEQ ID NO: 2626 - DNA, 25 bp, Homo sapien
acaacgacattttctacaactttat

SEQ ID NO: 2627 - DNA, 25 bp, Homo sapien
ccgacaccctctcgcggttccacgg

SEQ ID NO: 2628 - DNA, 25 bp, Homo sapien
ccgtggaaccgcgagagggtgtcgg

SEQ ID NO: 2629 - DNA, 25 bp, Homo sapien
cggtcagaaggaggagcccggcagc

SEQ ID NO: 2630 - DNA, 25 bp, Homo sapien
gctgccgggctcctccttctgaccg

SEQ ID NO: 2631 - DNA, 25 bp, Homo sapien
gatactgtcttaaaccagaacctat

SEQ ID NO: 2632 - DNA, 25 bp, Homo sapien
ataggttctggtttaagacagtatc

SEQ ID NO: 2633 - DNA, 25 bp, Homo sapien
cgcgtctgcgacgtccggctgacgt

SEQ ID NO: 2634 - DNA, 25 bp, Homo sapien
acgtcagccggacgtcgcagacgcg

SEQ ID NO: 2635 - DNA, 25 bp, Homo sapien
tctctacccgaatccctgagtctct

SEQ ID NO: 2636 - DNA, 25 bp, Homo sapien
agagactcagggattcgggtagaga

SEQ ID NO: 2637 - DNA, 25 bp, Homo sapien
tgtccgccttcccatgcgcccgggt

SEQ ID NO: 2638 - DNA, 25 bp, Homo sapien
acccgggcgcatgggaaggcggaca

SEQ ID NO: 2639 - DNA, 25 bp, Homo sapien
gtgaccaagacccttacccacactg

SEQ ID NO: 2640 - DNA, 25 bp, Homo sapien
cagtgtgggtaagggtcttggtcac

SEQ ID NO: 2641 - DNA, 25 bp, Homo sapien
agtcacttaccgtttagataatcat

SEQ ID NO: 2642 - DNA, 25 bp, Homo sapien
atgattatctaaacggtaagtgact

SEQ ID NO: 2643 - DNA, 25 bp, Homo sapien
gtctacagggcaccgtatacggtcg

SEQ ID NO: 2644 - DNA, 25 bp, Homo sapien
cgaccgtatacggtgccctgtagac

SEQ ID NO: 2645 - DNA, 25 bp, Homo sapien
gaccaataaattctccgtgcataat

SEQ ID NO: 2646 - DNA, 25 bp, Homo sapien
attatgcacggagaatttattggtc

SEQ ID NO: 2647 - DNA, 25 bp, Homo sapien
gccgcgacccgagtcctgccgtagg

SEQ ID NO: 2648 - DNA, 25 bp, Homo sapien
cctacggcaggactcgggtcgcggc

SEQ ID NO: 2649 - DNA, 25 bp, Homo sapien
gggagggcgaccggccgcgacccga

SEQ ID NO: 2650 - DNA, 25 bp, Homo sapien
tcgggtcgcggccggtcgccctccc

SEQ ID NO: 2651 - DNA, 25 bp, Homo sapien
cagggcaagtagaacagagggtttc

SEQ ID NO: 2652 - DNA, 25 bp, Homo sapien
gaaaccctctgttctacttgccctg

SEQ ID NO: 2653 - DNA, 25 bp, Homo sapien
tttggtcgaggcctgtgacagactg

SEQ ID NO: 2654 - DNA, 25 bp, Homo sapien
cagtctgtcacaggcctcgaccaaa

SEQ ID NO: 2655 - DNA, 25 bp, Homo sapien
cggaagggtactccgcgaccaagac

SEQ ID NO: 2656 - DNA, 25 bp, Homo sapien
gtcttggtcgcggagtacccttccg

SEQ ID NO: 2657 - DNA, 25 bp, Homo sapien
agcccgggcctgtgacgtccctcgg

SEQ ID NO: 2658 - DNA, 25 bp, Homo sapien
ccgagggacgtcacaggcccgggct

SEQ ID NO: 2659 - DNA, 25 bp, Homo sapien
ctcgagggaccgacgcttgagagac

SEQ ID NO: 2660 - DNA, 25 bp, Homo sapien
gtctctcaagcgtcggtccctcgag

SEQ ID NO: 2661 - DNA, 25 bp, Homo sapien
ggttatatctcaggaaatagttttt

SEQ ID NO: 2662 - DNA, 25 bp, Homo sapien
aaaaactatttcctgagatataacc

SEQ ID NO: 2663 - DNA, 25 bp, Homo sapien
agtaacaaatggtaatcgtgacagt

SEQ ID NO: 2664 - DNA, 25 bp, Homo sapien
actgtcacgattaccatttgttact

SEQ ID NO: 2665 - DNA, 25 bp, Homo sapien
tcgacgtcactaacggcgggcccgg

SEQ ID NO: 2666 - DNA, 25 bp, Homo sapien
ccgggcccgccgttagtgacgtcga

SEQ ID NO: 2667 - DNA, 25 bp, Homo sapien
gggagaatccacgtcatgaccatgg

SEQ ID NO: 2668 - DNA, 25 bp, Homo sapien
ccatggtcatgacgtggattctccc

SEQ ID NO: 2669 - DNA, 25 bp, Homo sapien
agtgaggacctctacttgaggtcta

SEQ ID NO: 2670 - DNA, 25 bp, Homo sapien
tagacctcaagtagaggtcctcact

SEQ ID NO: 2671 - DNA, 25 bp, Homo sapien
caccagtacagcaacgacgtcgtac

SEQ ID NO: 2672 - DNA, 25 bp, Homo sapien
gtacgacgtcgttgctgtactggtg

SEQ ID NO: 2673 - DNA, 25 bp, Homo sapien
gggtacgactgtagctacagtccct

SEQ ID NO: 2674 - DNA, 25 bp, Homo sapien
agggactgtagctacagtcgtaccc

SEQ ID NO: 2675 - DNA, 25 bp, Homo sapien
tcggaagtccaaccctcgggaactc

SEQ ID NO: 2676 - DNA, 25 bp, Homo sapien
gagttcccgagggttggacttccga

SEQ ID NO: 2677 - DNA, 25 bp, Homo sapien
tcgttagccggcgcaggtctcgtcg

SEQ ID NO: 2678 - DNA, 25 bp, Homo sapien
cgacgagacctgcgccggctaacga

SEQ ID NO: 2679 - DNA, 25 bp, Homo sapien
tcgtccgccgtaggcccccctcgcc

SEQ ID NO: 2680 - DNA, 25 bp, Homo sapien
ggcgaggggggcctacggcggacga

SEQ ID NO: 2681 - DNA, 25 bp, Homo sapien
gtctgccggggccgggcgccggtgg

SEQ ID NO: 2682 - DNA, 25 bp, Homo sapien
ccaccggcgcccggccccggcagac

SEQ ID NO: 2683 - DNA, 25 bp, Homo sapien
gcgggccctaccggcgggggtctgc

SEQ ID NO: 2684 - DNA, 25 bp, Homo sapien
gcagacccccgccggtagggcccgc

SEQ ID NO: 2685 - DNA, 25 bp, Homo sapien
cacggacccctcgagcaagttggtg

SEQ ID NO: 2686 - DNA, 25 bp, Homo sapien
caccaacttgctcgaggggtccgtg

SEQ ID NO: 2687 - DNA, 25 bp, Homo sapien
agacaaactccatacctttttataa

SEQ ID NO: 2688 - DNA, 25 bp, Homo sapien
ttataaaaaggtatggagtttgtct

SEQ ID NO: 2689 - DNA, 25 bp, Homo sapien
ggtcgagggcgggacctccgtgtcg

SEQ ID NO: 2690 - DNA, 25 bp, Homo sapien
cgacacggaggtcccgccctcgacc

SEQ ID NO: 2691 - DNA, 25 bp, Homo sapien
gcgactccccgctcagcccgtgacc

SEQ ID NO: 2692 - DNA, 25 bp, Homo sapien
ggtcacgggctgagcggggagtcgc

SEQ ID NO: 2693 - DNA, 25 bp, Homo sapien
gcggttgcaccgcatggggctcggg

SEQ ID NO: 2694 - DNA, 25 bp, Homo sapien
cccgagccccatgcggtgcaaccgc

SEQ ID NO: 2695 - DNA, 25 bp, Homo sapien
ccgccgcagggcggttgcaccgcat

SEQ ID NO: 2696 - DNA, 25 bp, Homo sapien
atgcggtgcaaccgccctgcggcgg

SEQ ID NO: 2697 - DNA, 25 bp, Homo sapien
ccagtggcgtcggacgcgccctgcc

SEQ ID NO: 2698 - DNA, 25 bp, Homo sapien
ggcagggcgcgtccgacgccactgg

SEQ ID NO: 2699 - DNA, 25 bp, Homo sapien
ccgacaactactgctcgccgacggt

SEQ ID NO: 2700 - DNA, 25 bp, Homo sapien
accgtcggcgagcagtagttgtcgg

SEQ ID NO: 2701 - DNA, 25 bp, Homo sapien
gagctcgcggcccttcaggtcccgt

SEQ ID NO: 2702 - DNA, 25 bp, Homo sapien
acgggacctgaagggccgcgagctc

SEQ ID NO: 2703 - DNA, 25 bp, Homo sapien
gggcgaggtccagggtgcaagacgg

SEQ ID NO: 2704 - DNA, 25 bp, Homo sapien
ccgtcttgcaccctggacctcgccc

SEQ ID NO: 2705 - DNA, 25 bp, Homo sapien
cccggccccctgacacgaagaagcg

SEQ ID NO: 2706 - DNA, 25 bp, Homo sapien
cgcttcttcgtgtcagggggccggg

SEQ ID NO: 2707 - DNA, 25 bp, Homo sapien
cctacgaggccctctgttcgtcgtg

SEQ ID NO: 2708 - DNA, 25 bp, Homo sapien
cacgacgaacagagggcctcgtagg

SEQ ID NO: 2709 - DNA, 25 bp, Homo sapien
cggtctactgagtccgtctacgaat

SEQ ID NO: 2710 - DNA, 25 bp, Homo sapien
attcgtagacggactcagtagaccg

SEQ ID NO: 2711 - DNA, 25 bp, Homo sapien
ctcggagcgtttggcgagccgcggg

SEQ ID NO: 2712 - DNA, 25 bp, Homo sapien
cccgcggctcgccaaacgctccgag

SEQ ID NO: 2713 - DNA, 25 bp, Homo sapien
ggccttggcgcgctcggagcgtttg

SEQ ID NO: 2714 - DNA, 25 bp, Homo sapien
caaacgctccgagcgcgccaaggcc

SEQ ID NO: 2715 - DNA, 25 bp, Homo sapien
ctccctacccctctggtcggcattt

SEQ ID NO: 2716 - DNA, 25 bp, Homo sapien
aaatgccgaccagaggggtagggag

SEQ ID NO: 2717 - DNA, 25 bp, Homo sapien
gggaccactggacggcacgaggcgg

SEQ ID NO: 2718 - DNA, 25 bp, Homo sapien
ccgcctcgtgccgtccagtggtccc

SEQ ID NO: 2719 - DNA, 25 bp, Homo sapien
agtttgtgtcactctcctctgtcaa

SEQ ID NO: 2720 - DNA, 25 bp, Homo sapien
ttgacagaggagagtgacacaaact

SEQ ID NO: 2721 - DNA, 25 bp, Homo sapien
gccgtcagggatctcctgaggctcc

SEQ ID NO: 2722 - DNA, 25 bp, Homo sapien
ggagcctcaggagatccctgacggc

SEQ ID NO: 2723 - DNA, 25 bp, Homo sapien
agaatatgagtttcgtccataaaaa

SEQ ID NO: 2724 - DNA, 25 bp, Homo sapien
tttttatggacgaaactcatattct

SEQ ID NO: 2725 - DNA, 25 bp, Homo sapien
gtgccgcagccctatcgtgtcggtg

SEQ ID NO: 2726 - DNA, 25 bp, Homo sapien
caccgacacgatagggctgcggcac

SEQ ID NO: 2727 - DNA, 25 bp, Homo sapien
gagcggtgcgcctctctcgcgggct

SEQ ID NO: 2728 - DNA, 25 bp, Homo sapien
agcccgcgagagaggcgcaccgctc

SEQ ID NO: 2729 - DNA, 25 bp, Homo sapien
cccagagagcggtgcgcctctctcg

SEQ ID NO: 2730 - DNA, 25 bp, Homo sapien
cgagagaggcgcaccgctctctggg

SEQ ID NO: 2731 - DNA, 25 bp, Homo sapien
gggaccgcccagagagcggtgcgcc

SEQ ID NO: 2732 - DNA, 25 bp, Homo sapien
ggcgcaccgctctctgggcggtccc

SEQ ID NO: 2733 - DNA, 25 bp, Homo sapien
acttgagacttaggtgtcccattcc

SEQ ID NO: 2734 - DNA, 25 bp, Homo sapien
ggaatgggacacctaagtctcaagt

SEQ ID NO: 2735 - DNA, 25 bp, Homo sapien
ccggtccctgaccgtgacccttgcg

SEQ ID NO: 2736 - DNA, 25 bp, Homo sapien
cgcaagggtcacggtcagggaccgg

SEQ ID NO: 2737 - DNA, 25 bp, Homo sapien
acaagtgagttgagtaatagaaaga

SEQ ID NO: 2738 - DNA, 25 bp, Homo sapien
tctttctattactcaactcacttgt

SEQ ID NO: 2739 - DNA, 25 bp, Homo sapien
acttggtatccactcacttctcctt

SEQ ID NO: 2740 - DNA, 25 bp, Homo sapien
aaggagaagtgagtggataccaagt

SEQ ID NO: 2741 - DNA, 25 bp, Homo sapien
ttcttgtataagtctccgtagtcat

SEQ ID NO: 2742 - DNA, 25 bp, Homo sapien
atgactacggagacttatacaagaa

SEQ ID NO: 2743 - DNA, 25 bp, Homo sapien
aatatgaccttgaaactttacaaat

SEQ ID NO: 2744 - DNA, 25 bp, Homo sapien
atttgtaaagtttcaaggtcatatt

SEQ ID NO: 2745 - DNA, 25 bp, Homo sapien
tcaaagtcttgttcatatcataaag

SEQ ID NO: 2746 - DNA, 25 bp, Homo sapien
ctttatgatatgaacaagactttga

SEQ ID NO: 2747 - DNA, 25 bp, Homo sapien
cgtggccatgtaagtaattcgggta

SEQ ID NO: 2748 - DNA, 25 bp, Homo sapien
tacccgaattacttacatggccacg

SEQ ID NO: 2749 - DNA, 25 bp, Homo sapien
aagagaaatcaagagagacatcctg

SEQ ID NO: 2750 - DNA, 25 bp, Homo sapien
caggatgtctctcttgatttctctt

SEQ ID NO: 2751 - DNA, 25 bp, Homo sapien
gtccagacgtggacatccaactaaa

SEQ ID NO: 2752 - DNA, 25 bp, Homo sapien
tttagttggatgtccacgtctggac

SEQ ID NO: 2753 - DNA, 25 bp, Homo sapien
gatggtccatccccttcctgtgacc

SEQ ID NO: 2754 - DNA, 25 bp, Homo sapien
ggtcacaggaaggggatggaccatc

SEQ ID NO: 2755 - DNA, 25 bp, Homo sapien
ggaagacgttcgaagactcacttct

SEQ ID NO: 2756 - DNA, 25 bp, Homo sapien
agaagtgagtcttcgaacgtcttcc

SEQ ID NO: 2757 - DNA, 25 bp, Homo sapien
acaggacgctggctgaacgccgcca

SEQ ID NO: 2758 - DNA, 25 bp, Homo sapien
tggcggcgttcagccagcgtcctgt

SEQ ID NO: 2759 - DNA, 25 bp, Homo sapien
acgactcgactcgagccagcgccga

SEQ ID NO: 2760 - DNA, 25 bp, Homo sapien
tcggcgctggctcgagtcgagtcgt

SEQ ID NO: 2761 - DNA, 25 bp, Homo sapien
agaggggcagccccgcgcgggagac

SEQ ID NO: 2762 - DNA, 25 bp, Homo sapien
gtctcccgcgcggggctgcccctct

SEQ ID NO: 2763 - DNA, 25 bp, Homo sapien
ggacggacggaatgtgtggacggga

SEQ ID NO: 2764 - DNA, 25 bp, Homo sapien
tcccgtccacacattccgtccgtcc

SEQ ID NO: 2765 - DNA, 25 bp, Homo sapien
cagttccttcatgaacagtttaaag

SEQ ID NO: 2766 - DNA, 25 bp, Homo sapien
ctttaaactgttcatgaaggaactg

SEQ ID NO: 2767 - DNA, 25 bp, Homo sapien
agaaaaactcgtatgtggaaattca

SEQ ID NO: 2768 - DNA, 25 bp, Homo sapien
tgaatttccacatacgagtttttct

SEQ ID NO: 2769 - DNA, 25 bp, Homo sapien
cgacgaacggccgtcggaaggagag

SEQ ID NO: 2770 - DNA, 25 bp, Homo sapien
ctctccttccgacggccgttcgtcg

SEQ ID NO: 2771 - DNA, 25 bp, Homo sapien
gtcgggtacctccaagtggcgatat

SEQ ID NO: 2772 - DNA, 25 bp, Homo sapien
atatcgccacttggaggtacccgac

SEQ ID NO: 2773 - DNA, 25 bp, Homo sapien
tactgaaccacgtggaggacctcac

SEQ ID NO: 2774 - DNA, 25 bp, Homo sapien
gtgaggtcctccacgtggttcagta

SEQ ID NO: 2775 - DNA, 25 bp, Homo sapien
aattcagaacatcccacttatgtag

SEQ ID NO: 2776 - DNA, 25 bp, Homo sapien
ctacataagtgggatgttctgaatt

SEQ ID NO: 2777 - DNA, 25 bp, Homo sapien
attaaagacaggaaagttgaccaac

SEQ ID NO: 2778 - DNA, 25 bp, Homo sapien
gttggtcaactttcctgtctttaat

SEQ ID NO: 2779 - DNA, 25 bp, Homo sapien
tgtttacattcgtcttcaaactagt

SEQ ID NO: 2780 - DNA, 25 bp, Homo sapien
actagtttgaagacgaatgtaaaca

SEQ ID NO: 2781 - DNA, 25 bp, Homo sapien
cggagcccctgtcggtggtgggccg

SEQ ID NO: 2782 - DNA, 25 bp, Homo sapien
cggcccaccaccgacaggggctccg

SEQ ID NO: 2783 - DNA, 25 bp, Homo sapien
cgccgcgcctgtgggggcctacccg

SEQ ID NO: 2784 - DNA, 25 bp, Homo sapien
cgggtaggcccccacaggcgcggcg

SEQ ID NO: 2785 - DNA, 25 bp, Homo sapien
gcgccgcgcctgtgggggcctaccc

SEQ ID NO: 2786 - DNA, 25 bp, Homo sapien
gggtaggcccccacaggcgcggcgc

SEQ ID NO: 2787 - DNA, 25 bp, Homo sapien
ccgcgccgcgcctgtgggggcctac

SEQ ID NO: 2788 - DNA, 25 bp, Homo sapien
gtaggcccccacaggcgcggcgcgg

SEQ ID NO: 2789 - DNA, 25 bp, Homo sapien
gttatcactatacattcgtcgagtt

SEQ ID NO: 2790 - DNA, 25 bp, Homo sapien
aactcgacgaatgtatagtgataac

SEQ ID NO: 2791 - DNA, 25 bp, Homo sapien
gacgaccgtcgccccacggcggagg

SEQ ID NO: 2792 - DNA, 25 bp, Homo sapien
cctccgccgtggggcgacggtcgtc

SEQ ID NO: 2793 - DNA, 25 bp, Homo sapien
ggaggacgaccgtcgccccacggcg

SEQ ID NO: 2794 - DNA, 25 bp, Homo sapien
cgccgtggggcgacggtcgtcctcc

SEQ ID NO: 2795 - DNA, 25 bp, Homo sapien
cgtccctcaagtgctctctctcctc

SEQ ID NO: 2796 - DNA, 25 bp, Homo sapien
gaggagagagagcacttgagggacg

SEQ ID NO: 2797 - DNA, 25 bp, Homo sapien
ggtgcgtctcccaccgcacgcggac

SEQ ID NO: 2798 - DNA, 25 bp, Homo sapien
gtccgcgtgcggtgggagacgcacc

SEQ ID NO: 2799 - DNA, 25 bp, Homo sapien
cgtcggtgcgtctcccaccgcacgc

SEQ ID NO: 2800 - DNA, 25 bp, Homo sapien
gcgtgcggtgggagacgcaccgacg

SEQ ID NO: 2801 - DNA, 25 bp, Homo sapien
atgaaccaggactcaactatttttg

SEQ ID NO: 2802 - DNA, 25 bp, Homo sapien
caaaaatagttgagtcctggttcat

SEQ ID NO: 2803 - DNA, 25 bp, Homo sapien
gtcacaagaaaacattgaaattgta

SEQ ID NO: 2804 - DNA, 25 bp, Homo sapien
tacaatttcaatgttttcttgtgac

SEQ ID NO: 2805 - DNA, 25 bp, Homo sapien
agaacgggaacatctggcgggacac

SEQ ID NO: 2806 - DNA, 25 bp, Homo sapien
gtgtcccgccagatgttcccgttct

SEQ ID NO: 2807 - DNA, 25 bp, Homo sapien
gagtgagtacaatggactacctttt

SEQ ID NO: 2808 - DNA, 25 bp, Homo sapien
aaaaggtagtccattgtactcactc

SEQ ID NO: 2809 - DNA, 25 bp, Homo sapien
aagatcacttaataaaggattcttt

SEQ ID NO: 2810 - DNA, 25 bp, Homo sapien
aaagaatcctttattaagtgatctt

SEQ ID NO: 2811 - DNA, 25 bp, Homo sapien
gttcttgatatcgtggaccttttgg

SEQ ID NO: 2812 - DNA, 25 bp, Homo sapien
ccaaaaggtccacgatatcaagaac

SEQ ID NO: 2813 - DNA, 25 bp, Homo sapien
tcgaccgcggctctgtcggagccgg

SEQ ID NO: 2814 - DNA, 25 bp, Homo sapien
ccggctccgacagagccgcggtcga

SEQ ID NO: 2815 - DNA, 25 bp, Homo sapien
attagaaccgttgtgagagttaaag

SEQ ID NO: 2816 - DNA, 25 bp, Homo sapien
ctttaactctcacaacggttctaat

SEQ ID NO: 2817 - DNA, 25 bp, Homo sapien
gtcgtggaacagtgacttcgatgtc

SEQ ID NO: 2818 - DNA, 25 bp, Homo sapien
gacatcgaagtcactgttccacgac

SEQ ID NO: 2819 - DNA, 25 bp, Homo sapien
cggcccgagccgtcgcgccgggcgt

SEQ ID NO: 2820 - DNA, 25 bp, Homo sapien
acgcccggcgcgacggctcgggccg

SEQ ID NO: 2821 - DNA, 25 bp, Homo sapien
gacagctttagaaaaacattaccct

SEQ ID NO: 2822 - DNA, 25 bp, Homo sapien
agggtaatgtttttctaaagctgtc

SEQ ID NO: 2823 - DNA, 25 bp, Homo sapien
ccccgcaaacgcactggtctcgaag

SEQ ID NO: 2824 - DNA, 25 bp, Homo sapien
cttcgagaccagtgcgtttgcgggg

SEQ ID NO: 2825 - DNA, 25 bp, Homo sapien
aacacgtcctgggtgcagacgccaa

SEQ ID NO: 2826 - DNA, 25 bp, Homo sapien
ttggcgtctgcacccaggacgtgtt

SEQ ID NO: 2827 - DNA, 25 bp, Homo sapien
gtcccggtcgagtccgcccggtgcc

SEQ ID NO: 2828 - DNA, 25 bp, Homo sapien
ggcaccgggcggactcgaccgggac

SEQ ID NO: 2829 - DNA, 25 bp, Homo sapien
aggtagtgacggtaaccgacgattc

SEQ ID NO: 2830 - DNA, 25 bp, Homo sapien
gaatcgtcggttaccgtcactacct

SEQ ID NO: 2831 - DNA, 25 bp, Homo sapien
gctctgagccccaagcgccgaggga

SEQ ID NO: 2832 - DNA, 25 bp, Homo sapien
tccctcggcgcttggggctcagagc

SEQ ID NO: 2833 - DNA, 25 bp, Homo sapien
aggtcgagcagggttcagcgccaac

SEQ ID NO: 2834 - DNA, 25 bp, Homo sapien
gttggcgctgaaccctgctcgacct

SEQ ID NO: 2835 - DNA, 25 bp, Homo sapien
tcgatgtctgtgagaggcccggacc

SEQ ID NO: 2836 - DNA, 25 bp, Homo sapien
ggtccgggcctctcacagacatcga

SEQ ID NO: 2837 - DNA, 25 bp, Homo sapien
aagatatgaggagtttaattagaag

SEQ ID NO: 2838 - DNA, 25 bp, Homo sapien
cttctaattaaactcctcatatctt

SEQ ID NO: 2839 - DNA, 25 bp, Homo sapien
agatatgaggagtttaattagaagt

SEQ ID NO: 2840 - DNA, 25 bp, Homo sapien
acttctaattaaactcctcatatct

SEQ ID NO: 2841 - DNA, 25 bp, Homo sapien
cctgggacaactgacgagcgggtag

SEQ ID NO: 2842 - DNA, 25 bp, Homo sapien
ctacccgctcgtcagttgtcccagg

SEQ ID NO: 2843 - DNA, 25 bp, Homo sapien
actactaatgaaagtgattacttaa

SEQ ID NO: 2844 - DNA, 25 bp, Homo sapien
ttaagtaatcactttcattagtagt

SEQ ID NO: 2845 - DNA, 25 bp, Homo sapien
aataaatgtcaatgagatcttctac

SEQ ID NO: 2846 - DNA, 25 bp, Homo sapien
gtagaagatctcattgacatttatt

SEQ ID NO: 2847 - DNA, 25 bp, Homo sapien
atgagatcttctactttaatagagg

SEQ ID NO: 2848 - DNA, 25 bp, Homo sapien
cctctattaaagtagaagatctcat

SEQ ID NO: 2849 - DNA, 25 bp, Homo sapien
gaggagcaaacgagtcggccgtcca

SEQ ID NO: 2850 - DNA, 25 bp, Homo sapien
tggacggccgactcgtttgctcctc

SEQ ID NO: 2851 - DNA, 25 bp, Homo sapien
cctacccgggcacgccgaggcccac

SEQ ID NO: 2852 - DNA, 25 bp, Homo sapien
gtgggcctcggcgtgcccgggtagg

SEQ ID NO: 2853 - DNA, 25 bp, Homo sapien
gtgtcaatgcgaggttcggaaagag

SEQ ID NO: 2854 - DNA, 25 bp, Homo sapien
ctctttccgaacctcgcattgacac

SEQ ID NO: 2855 - DNA, 25 bp, Homo sapien
ggttcagggccctcgcacagcccgg

SEQ ID NO: 2856 - DNA, 25 bp, Homo sapien
ccgggctgtgcgagggccctgaacc

SEQ ID NO: 2857 - DNA, 25 bp, Homo sapien
ccgaccgtccatacgggacgagtag

SEQ ID NO: 2858 - DNA, 25 bp, Homo sapien
ctactcgtcccgtatggacggtcgg

SEQ ID NO: 2859 - DNA, 25 bp, Homo sapien
ccagtgtctgcggagggaccggacg

SEQ ID NO: 2860 - DNA, 25 bp, Homo sapien
cgtccggtccctccgcagacactgg

SEQ ID NO: 2861 - DNA, 25 bp, Homo sapien
aggtcgacccaagggagacgtatac

SEQ ID NO: 2862 - DNA, 25 bp, Homo sapien
gtatacgtctcccttgggtcgacct

SEQ ID NO: 2863 - DNA, 25 bp, Homo sapien
ctcctggttctcttcgcccgatacg

SEQ ID NO: 2864 - DNA, 25 bp, Homo sapien
cgtatcgggcgaagagaaccaggag

SEQ ID NO: 2865 - DNA, 25 bp, Homo sapien
gtttatcttctatcaccttctcgtg

SEQ ID NO: 2866 - DNA, 25 bp, Homo sapien
cacgagaaggtgatagaagataaac

SEQ ID NO: 2867 - DNA, 25 bp, Homo sapien
ttgcaagcctttcgaccaggagcac

SEQ ID NO: 2868 - DNA, 25 bp, Homo sapien
gtgctcctggtcgaaaggcttgcaa

SEQ ID NO: 2869 - DNA, 25 bp, Homo sapien
ggaacgcttcggtcgagtccctgag

SEQ ID NO: 2870 - DNA, 25 bp, Homo sapien
ctcagggactcgaccgaagcgttcc

SEQ ID NO: 2871 - DNA, 25 bp, Homo sapien
cagtggctcgaacaccggactcagg

SEQ ID NO: 2872 - DNA, 25 bp, Homo sapien
cctgagtccggtgttcgagccactg

SEQ ID NO: 2873 - DNA, 25 bp, Homo sapien
ccgtgcgaggcacggcccggaggcg

SEQ ID NO: 2874 - DNA, 25 bp, Homo sapien
cgcctccgggccgtgcctcgcacgg

SEQ ID NO: 2875 - DNA, 25 bp, Homo sapien
agtctgccgtctcgtacatacagtg

SEQ ID NO: 2876 - DNA, 25 bp, Homo sapien
cactgtatgtacgagacggcagact

SEQ ID NO: 2877 - DNA, 25 bp, Homo sapien
tcacctattaccctctgtgttttgg

SEQ ID NO: 2878 - DNA, 25 bp, Homo sapien
ccaaaacacagagggtaataggtga

SEQ ID NO: 2879 - DNA, 25 bp, Homo sapien
aaccagtagagattgacacatttat

SEQ ID NO: 2880 - DNA, 25 bp, Homo sapien
ataaatgtgtcaatctctactggtt

SEQ ID NO: 2881 - DNA, 25 bp, Homo sapien
gactgtcagaaccattaactaccca

SEQ ID NO: 2882 - DNA, 25 bp, Homo sapien
tgggtagttaatggttctgacagtc

SEQ ID NO: 2883 - DNA, 25 bp, Homo sapien
cattgaacttttatgcctacaatag

SEQ ID NO: 2884 - DNA, 25 bp, Homo sapien
ctattgtaggcataaaagttcaatg

SEQ ID NO: 2885 - DNA, 25 bp, Homo sapien
atgttgactaacattgaacttttat

SEQ ID NO: 2886 - DNA, 25 bp, Homo sapien
ataaaagttcaatgttagtcaacat

SEQ ID NO: 2887 - DNA, 25 bp, Homo sapien
gacaggtccgtaagactcttccgac

SEQ ID NO: 2888 - DNA, 25 bp, Homo sapien
gtcggaagagtcttacggacctgtc

SEQ ID NO: 2889 - DNA, 25 bp, Homo sapien
gtcggacaggtccgtaagactcttc

SEQ ID NO: 2890 - DNA, 25 bp, Homo sapien
gaagagtcttacggacctgtccgac

SEQ ID NO: 2891 - DNA, 25 bp, Homo sapien
tttccaaccgagactatacgggaat

SEQ ID NO: 2892 - DNA, 25 bp, Homo sapien
attcccgtatagtctcggttggaaa

SEQ ID NO: 2893 - DNA, 25 bp, Homo sapien
ggatcccgtatctcacattcgtcgt

SEQ ID NO: 2894 - DNA, 25 bp, Homo sapien
acgacgaatgtgagatacgggatcc

SEQ ID NO: 2895 - DNA, 25 bp, Homo sapien
cggtgtcgttggtctgcgtgctcct

SEQ ID NO: 2896 - DNA, 25 bp, Homo sapien
aggagcacgcagaccaacgacaccg

SEQ ID NO: 2897 - DNA, 25 bp, Homo sapien
cctcgcgccgcgagagacgcaggta

SEQ ID NO: 2898 - DNA, 25 bp, Homo sapien
tacctgcgtctctcgcggcgcgagg

SEQ ID NO: 2899 - DNA, 25 bp, Homo sapien
gacgggacgcccctcgggagacgtc

SEQ ID NO: 2900 - DNA, 25 bp, Homo sapien
gacgtctcccgaggggcgtcccgtc

SEQ ID NO: 2901 - DNA, 25 bp, Homo sapien
ggcctaccgccgaaaaatccttcat

SEQ ID NO: 2902 - DNA, 25 bp, Homo sapien
atgaaggatttttcggcggtaggcc

SEQ ID NO: 2903 - DNA, 25 bp, Homo sapien
gggacctacggaaacagatccctat

SEQ ID NO: 2904 - DNA, 25 bp, Homo sapien
atagggatctgtttccgtaggtccc

SEQ ID NO: 2905 - DNA, 25 bp, Homo sapien
aaactatgaaggatcttaaacggaa

SEQ ID NO: 2906 - DNA, 25 bp, Homo sapien
ttccgtttaagatccttcatagttt

SEQ ID NO: 2907 - DNA, 25 bp, Homo sapien
cgtcggttacctccgcgctccggcc

SEQ ID NO: 2908 - DNA, 25 bp, Homo sapien
ggccggagcgcggaggtaaccgacg

SEQ ID NO: 2909 - DNA, 25 bp, Homo sapien
atctcctgacgggactcgatctgag

SEQ ID NO: 2910 - DNA, 25 bp, Homo sapien
ctcagatcgagtcccgtcaggagat

SEQ ID NO: 2911 - DNA, 25 bp, Homo sapien
ggcggcgagccggaggcctcgcggg

SEQ ID NO: 2912 - DNA, 25 bp, Homo sapien
cccgcgaggcctccggctcgccgcc

SEQ ID NO: 2913 - DNA, 25 bp, Homo sapien
gacctggtgttccaactacctttac

SEQ ID NO: 2914 - DNA, 25 bp, Homo sapien
gtaaaggtagttggaacaccaggtc

SEQ ID NO: 2915 - DNA, 25 bp, Homo sapien
cgcgcgagacttcccgccgcctgaa

SEQ ID NO: 2916 - DNA, 25 bp, Homo sapien
ttcaggcggcgggaagtctcgcgcg

SEQ ID NO: 2917 - DNA, 25 bp, Homo sapien
aacgtaaaatgatcagacaaataaa

SEQ ID NO: 2918 - DNA, 25 bp, Homo sapien
tttatttgtctgatcattttacgtt

SEQ ID NO: 2919 - DNA, 25 bp, Homo sapien
tgacgtcaggttccgagactactaa

SEQ ID NO: 2920 - DNA, 25 bp, Homo sapien
ttagtagtctcggaacctgacgtca

SEQ ID NO: 2921 - DNA, 25 bp, Homo sapien
gaccggacttgatgaaggtcaaagg

SEQ ID NO: 2922 - DNA, 25 bp, Homo sapien
cctttgaccttcatcaagtccggtc

SEQ ID NO: 2923 - DNA, 25 bp, Homo sapien
tcctgggcccatgagacttctggac

SEQ ID NO: 2924 - DNA, 25 bp, Homo sapien
gtccagaagtctcatgggcccagga

SEQ ID NO: 2925 - DNA, 25 bp, Homo sapien
accgtctacataccctttatatacg

SEQ ID NO: 2926 - DNA, 25 bp, Homo sapien
cgtatataaagggtatgtagacggt

SEQ ID NO: 2927 - DNA, 25 bp, Homo sapien
ttgatcggactcaaactcacccaac

SEQ ID NO: 2928 - DNA, 25 bp, Homo sapien
gttgggtgagtttgagtccgatcaa

SEQ ID NO: 2929 - DNA, 25 bp, Homo sapien
ctcagcccggcgtgaccgtccgcgg

SEQ ID NO: 2930 - DNA, 25 bp, Homo sapien
ccgcggacggtcacgccgggctgag

SEQ ID NO: 2931 - DNA, 25 bp, Homo sapien
cgacggcgacagcgccccggagggg

SEQ ID NO: 2932 - DNA, 25 bp, Homo sapien
cccctccggggcgctgtcgccgtcg

SEQ ID NO: 2933 - DNA, 25 bp, Homo sapien
acacagaccatgtgaattttcaaag

SEQ ID NO: 2934 - DNA, 25 bp, Homo sapien
ctttgaaaattcacatggtctgtgt

SEQ ID NO: 2935 - DNA, 25 bp, Homo sapien
caaatattcctctctattgatgtat

SEQ ID NO: 2936 - DNA, 25 bp, Homo sapien
atacatcaatagagaggaatatttg

SEQ ID NO: 2937 - DNA, 25 bp, Homo sapien
taacaagccaagaatattaatcttt

SEQ ID NO: 2938 - DNA, 25 bp, Homo sapien
aaagattaatattcttggcttgtta

SEQ ID NO: 2939 - DNA, 25 bp, Homo sapien
ataacaagccaagaatattaatctt

SEQ ID NO: 2940 - DNA, 25 bp, Homo sapien
aagattaatattcttggcttgttat

SEQ ID NO: 2941 - DNA, 25 bp, Homo sapien
ggtcgtgactcgagcggggtcctgg

SEQ ID NO: 2942 - DNA, 25 bp, Homo sapien
ccaggaccccgctcgagtcacgacc

SEQ ID NO: 2943 - DNA, 25 bp, Homo sapien
cgtcctgtccatagcgtccgtactc

SEQ ID NO: 2944 - DNA, 25 bp, Homo sapien
gagtacggacgctatggacaggacg

SEQ ID NO: 2945 - DNA, 25 bp, Homo sapien
tgtttctctcttgtagtgacacctt

SEQ ID NO: 2946 - DNA, 25 bp, Homo sapien
aaggtgtcactacaagagagaaaca

SEQ ID NO: 2947 - DNA, 25 bp, Homo sapien
aagagaacctgaaacacgatagttt

SEQ ID NO: 2948 - DNA, 25 bp, Homo sapien
aaactatcgtgtttcaggttctctt

SEQ ID NO: 2949 - DNA, 25 bp, Homo sapien
tcctccgacgagtcggcgccctcct

SEQ ID NO: 2950 - DNA, 25 bp, Homo sapien
aggagggcgccgactcgtcggagga

SEQ ID NO: 2951 - DNA, 25 bp, Homo sapien
ggtgaagattataccacccactctt

SEQ ID NO: 2952 - DNA, 25 bp, Homo sapien
aagagtgggtggtataatcttcacc

SEQ ID NO: 2953 - DNA, 25 bp, Homo sapien
taaagactttctatccttagttgtc

SEQ ID NO: 2954 - DNA, 25 bp, Homo sapien
gacaactaaggatagaaagtcttta

SEQ ID NO: 2955 - DNA, 25 bp, Homo sapien
gagatcaaggacttttctctgcacc

SEQ ID NO: 2956 - DNA, 25 bp, Homo sapien
ggtgcagagaaaagtccttgatctc

SEQ ID NO: 2957 - DNA, 25 bp, Homo sapien
tctcagacaaacataacggtacccc

SEQ ID NO: 2958 - DNA, 25 bp, Homo sapien
ggggtaccgttatgtttgtctgaga

SEQ ID NO: 2959 - DNA, 25 bp, Homo sapien
ataggagttcagtcttgggactcgt

SEQ ID NO: 2960 - DNA, 25 bp, Homo sapien
acgagtcccaagactgaactcctat

SEQ ID NO: 2961 - DNA, 25 bp, Homo sapien
agttcacacctttgtctgaacaagt

SEQ ID NO: 2962 - DNA, 25 bp, Homo sapien
acttgttcagacaaaggtgtgaact

SEQ ID NO: 2963 - DNA, 25 bp, Homo sapien
gggggctgcgaggccctgcgctccg

SEQ ID NO: 2964 - DNA, 25 bp, Homo sapien
cggagcgcagggcctcgcagccccc

SEQ ID NO: 2965 - DNA, 25 bp, Homo sapien
agtctagaaatgatcactgatatat

SEQ ID NO: 2966 - DNA, 25 bp, Homo sapien
atatatcagtgatcatttctagact

SEQ ID NO: 2967 - DNA, 25 bp, Homo sapien
gacctgcgggaaggccaagcggtcc

SEQ ID NO: 2968 - DNA, 25 bp, Homo sapien
ggaccgcttggccttcccgcaggtc

SEQ ID NO: 2969 - DNA, 25 bp, Homo sapien
tctccgccgccctccccgtagagtg

SEQ ID NO: 2970 - DNA, 25 bp, Homo sapien
cactctacggggagggcggcggaga

SEQ ID NO: 2971 - DNA, 25 bp, Homo sapien
ctttaggtcaaactattttagcttc

SEQ ID NO: 2972 - DNA, 25 bp, Homo sapien
gaagctaaaatagtttgacctaaag

SEQ ID NO: 2973 - DNA, 25 bp, Homo sapien
gataaagggttctttacttgtgtcc

SEQ ID NO: 2974 - DNA, 25 bp, Homo sapien
ggacacaagtaaagaaccctttatc

SEQ ID NO: 2975 - DNA, 25 bp, Homo sapien
gtttatataacaacacgactcttat

SEQ ID NO: 2976 - DNA, 25 bp, Homo sapien
ataagagtcgtgttgttatataaac

SEQ ID NO: 2977 - DNA, 25 bp, Homo sapien
gcaccccaactccccgcacctcctg

SEQ ID NO: 2978 - DNA, 25 bp, Homo sapien
caggaggtgcggggagttggggtgc

SEQ ID NO: 2979 - DNA, 25 bp, Homo sapien
ctctgggtacccctctgtcgggtaa

SEQ ID NO: 2980 - DNA, 25 bp, Homo sapien
ttacccgacagaggggtacccagag

SEQ ID NO: 2981 - DNA, 25 bp, Homo sapien
gacacttgtggctcccacggcagga

SEQ ID NO: 2982 - DNA, 25 bp, Homo sapien
tcctgccgtgggagccacaagtgtc

SEQ ID NO: 2983 - DNA, 25 bp, Homo sapien
tctgttagacatttaacaagtctgc

SEQ ID NO: 2984 - DNA, 25 bp, Homo sapien
gcagacttgttaaatgtctaacaga

SEQ ID NO: 2985 - DNA, 25 bp, Homo sapien
gccgtcgccaaggacccaggccctc

SEQ ID NO: 2986 - DNA, 25 bp, Homo sapien
gagggcctgggtccttggcgacggc

SEQ ID NO: 2987 - DNA, 25 bp, Homo sapien
cctatcggtcactctaggggtccac

SEQ ID NO: 2988 - DNA, 25 bp, Homo sapien
gtggacccctagagtgaccgatagg

SEQ ID NO: 2989 - DNA, 25 bp, Homo sapien
agacaacgagattccgtaaatagaa

SEQ ID NO: 2990 - DNA, 25 bp, Homo sapien
ttctatttacggaatctcgttgtct

SEQ ID NO: 2991 - DNA, 25 bp, Homo sapien
aggagacaccaactatatactctcg

SEQ ID NO: 2992 - DNA, 25 bp, Homo sapien
cgagagtatatagttggtgtctcct

SEQ ID NO: 2993 - DNA, 25 bp, Homo sapien
ccaagactccgggtgttgtagataa

SEQ ID NO: 2994 - DNA, 25 bp, Homo sapien
ttatctacaacacccggagtcttgg

SEQ ID NO: 2995 - DNA, 25 bp, Homo sapien
ctgtagtctctgaaccataaacatc

SEQ ID NO: 2996 - DNA, 25 bp, Homo sapien
gatgtttatggttcagagactacag

SEQ ID NO: 2997 - DNA, 25 bp, Homo sapien
gagatttcctggtcctgtcgctcat

SEQ ID NO: 2998 - DNA, 25 bp, Homo sapien
atgagcgacaggaccaggaaatctc

SEQ ID NO: 2999 - DNA, 25 bp, Homo sapien
agttcctgtatcatcaaaagtatgt

SEQ ID NO: 3000 - DNA, 25 bp, Homo sapien
acatacttttgatgatacaggaact

SEQ ID NO: 3001 - DNA, 25 bp, Homo sapien
ggtgcatcggtatcgaagggaaacc

SEQ ID NO: 3002 - DNA, 25 bp, Homo sapien
ggtttcccttcgataccgatgcacc

SEQ ID NO: 3003 - DNA, 25 bp, Homo sapien
ccggacccagcctctacgtcgtccg

SEQ ID NO: 3004 - DNA, 25 bp, Homo sapien
cggacgacgtagaggctgggtccgg

SEQ ID NO: 3005 - DNA, 25 bp, Homo sapien
aagaacacttccgtctgagataaga

SEQ ID NO: 3006 - DNA, 25 bp, Homo sapien
tcttatctcagacggaagtgttctt

SEQ ID NO: 3007 - DNA, 25 bp, Homo sapien
tcccctgttgtggtctgtcgtgggc

SEQ ID NO: 3008 - DNA, 25 bp, Homo sapien
gcccacgacagaccacaacagggga

SEQ ID NO: 3009 - DNA, 25 bp, Homo sapien
accatgtgaccagctgttttggaac

SEQ ID NO: 3010 - DNA, 25 bp, Homo sapien
gttccaaaacagctggtcacatggt

SEQ ID NO: 3011 - DNA, 25 bp, Homo sapien
acccactgtcctgtgggccccagtc

SEQ ID NO: 3012 - DNA, 25 bp, Homo sapien
gactggggcccacaggacagtgggt

SEQ ID NO: 3013 - DNA, 25 bp, Homo sapien
gtccacaggtccaggggcacgtcga

SEQ ID NO: 3014 - DNA, 25 bp, Homo sapien
tcgacgtgcccctggacctgtggac

SEQ ID NO: 3015 - DNA, 25 bp, Homo sapien
tgaactccaccgtagtgagcgccgt

SEQ ID NO: 3016 - DNA, 25 bp, Homo sapien
acggcgctcactacggtggagttca

SEQ ID NO: 3017 - DNA, 25 bp, Homo sapien
cgaaccacttactcggcccagtagt

SEQ ID NO: 3018 - DNA, 25 bp, Homo sapien
actactgggccgagtaagtggttcg

SEQ ID NO: 3019 - DNA, 25 bp, Homo sapien
gtcggcgagccagaggccgtcggcg

SEQ ID NO: 3020 - DNA, 25 bp, Homo sapien
cgccgacggcctctggctcgccgac

SEQ ID NO: 3021 - DNA, 25 bp, Homo sapien
ttcgactatatagtagagggacttc

SEQ ID NO: 3022 - DNA, 25 bp, Homo sapien
gaagtccctctactatatagtcgaa

SEQ ID NO: 3023 - DNA, 25 bp, Homo sapien
acctcttccgcaatcccagggccgt

SEQ ID NO: 3024 - DNA, 25 bp, Homo sapien
acggccctgggattgcggaagaggt

SEQ ID NO: 3025 - DNA, 25 bp, Homo sapien
ttcaacgtcacttcagcataaaccg

SEQ ID NO: 3026 - DNA, 25 bp, Homo sapien
cggtttatgctgaagtgacgttgaa

SEQ ID NO: 3027 - DNA, 25 bp, Homo sapien
gtagaacccggaccagataggtccg

SEQ ID NO: 3028 - DNA, 25 bp, Homo sapien
cggacctatctggtccgggttctac

SEQ ID NO: 3029 - DNA, 25 bp, Homo sapien
gactccacctcggcgccctgcggcc

SEQ ID NO: 3030 - DNA, 25 bp, Homo sapien
ggccgcagggcgccgaggtggagtc

SEQ ID NO: 3031 - DNA, 25 bp, Homo sapien
tacatgtccttgactcctatccaaa

SEQ ID NO: 3032 - DNA, 25 bp, Homo sapien
tttggataggagtcaaggacatgta

SEQ ID NO: 3033 - DNA, 25 bp, Homo sapien
gtatggtagaaggaacgctctaagg

SEQ ID NO: 3034 - DNA, 25 bp, Homo sapien
ccttagagcgttccttctaccatac

SEQ ID NO: 3035 - DNA, 25 bp, Homo sapien
gcaaattttattcgttaaagtagtc

SEQ ID NO: 3036 - DNA, 25 bp, Homo sapien
gactactttaacgaataaaatttgc

SEQ ID NO: 3037 - DNA, 25 bp, Homo sapien
tcattgaggaaagatctcacgatct

SEQ ID NO: 3038 - DNA, 25 bp, Homo sapien
agatcgtgagatctttcctcaatga

SEQ ID NO: 3039 - DNA, 25 bp, Homo sapien
acatttatagatatctgaattgaag

SEQ ID NO: 3040 - DNA, 25 bp, Homo sapien
cttcaattcagatatctataaatgt

SEQ ID NO: 3041 - DNA, 25 bp, Homo sapien
ccgcccgtcccgcgctcgacgtgtc

SEQ ID NO: 3042 - DNA, 25 bp, Homo sapien
gacacgtcgagcgcgggacgggcgg

SEQ ID NO: 3043 - DNA, 25 bp, Homo sapien
acagaaactagtaacctcttaacac

SEQ ID NO: 3044 - DNA, 25 bp, Homo sapien
gtgttaagaggttactagtttctgt

SEQ ID NO: 3045 - DNA, 25 bp, Homo sapien
agaaactagtaacctcttaacacca

SEQ ID NO: 3046 - DNA, 25 bp, Homo sapien
tggtgttaagaggttactagtttct

SEQ ID NO: 3047 - DNA, 25 bp, Homo sapien
aagtttcagcaggacactcgaaccg

SEQ ID NO: 3048 - DNA, 25 bp, Homo sapien
cggttcgagtgtcctgctgaaactt

SEQ ID NO: 3049 - DNA, 25 bp, Homo sapien
agtcggtcctggtggctgtcctaaa

SEQ ID NO: 3050 - DNA, 25 bp, Homo sapien
tttaggacagccaccaggaccgact

SEQ ID NO: 3051 - DNA, 25 bp, Homo sapien
gacggactctgccattctcccatta

SEQ ID NO: 3052 - DNA, 25 bp, Homo sapien
taatgggagaatggcagagtccgtc

SEQ ID NO: 3053 - DNA, 25 bp, Homo sapien
gtcgggcctcggcgcactggggccc

SEQ ID NO: 3054 - DNA, 25 bp, Homo sapien
gggccccagtgcgccgaggcccgac

SEQ ID NO: 3055 - DNA, 25 bp, Homo sapien
cgtcgggcctcggcgcactggggcc

SEQ ID NO: 3056 - DNA, 25 bp, Homo sapien
ggccccagtgcgccgaggcccgacg

SEQ ID NO: 3057 - DNA, 25 bp, Homo sapien
gttcgaccgagcagccttcacaaac

SEQ ID NO: 3058 - DNA, 25 bp, Homo sapien
gtttgtgaaggctgctcggtcgaac

SEQ ID NO: 3059 - DNA, 25 bp, Homo sapien
ggcgggtcagcctgccaaggccgcg

SEQ ID NO: 3060 - DNA, 25 bp, Homo sapien
cgcggccttggcaggctgacccgcc

SEQ ID NO: 3061 - DNA, 25 bp, Homo sapien
gacggctaggactccacgggtacaa

SEQ ID NO: 3062 - DNA, 25 bp, Homo sapien
ttgtacccgtggagtcctagccgtc

SEQ ID NO: 3063 - DNA, 25 bp, Homo sapien
cgccggaactgggtgggcgtcgagt

SEQ ID NO: 3064 - DNA, 25 bp, Homo sapien
actcgacgcccacccagttccggcg

SEQ ID NO: 3065 - DNA, 25 bp, Homo sapien
acgagtacacttccacgagccacaa

SEQ ID NO: 3066 - DNA, 25 bp, Homo sapien
ttgtggctcgtggaagtgtactcgt

SEQ ID NO: 3067 - DNA, 25 bp, Homo sapien
aggacgcttcccgtcctccgataaa

SEQ ID NO: 3068 - DNA, 25 bp, Homo sapien
tttatcggaggacgggaagcgtcct

SEQ ID NO: 3069 - DNA, 25 bp, Homo sapien
catccggacgatggtctatacaagt

SEQ ID NO: 3070 - DNA, 25 bp, Homo sapien
acttgtatagaccatcgtccggatg

SEQ ID NO: 3071 - DNA, 25 bp, Homo sapien
cgggtcaggcttcgagtctctacgt

SEQ ID NO: 3072 - DNA, 25 bp, Homo sapien
acgtagagactcgaagcctgacccg

SEQ ID NO: 3073 - DNA, 25 bp, Homo sapien
ccggacctctccgcgcagggaccgg

SEQ ID NO: 3074 - DNA, 25 bp, Homo sapien
ccggtccctgcgcggagaggtccgg

SEQ ID NO: 3075 - DNA, 25 bp, Homo sapien
gacctctccgcgcagggaccgggta

SEQ ID NO: 3076 - DNA, 25 bp, Homo sapien
tacccggtccctgcgcggagaggtc

SEQ ID NO: 3077 - DNA, 25 bp, Homo sapien
aggagtctcggcagggcctgggcct

SEQ ID NO: 3078 - DNA, 25 bp, Homo sapien
aggcccaggccctgccgagactcct

SEQ ID NO: 3079 - DNA, 25 bp, Homo sapien
cagtgatagatgatgacctgatcat

SEQ ID NO: 3080 - DNA, 25 bp, Homo sapien
atgatcaggtcatcatctatcactg

SEQ ID NO: 3081 - DNA, 25 bp, Homo sapien
ccgccggcccgtcatcgcctctccc

SEQ ID NO: 3082 - DNA, 25 bp, Homo sapien
gggagaggcgatgacgggccggcgg

SEQ ID NO: 3083 - DNA, 25 bp, Homo sapien
cccgccggcccgtcatcgcctctcc

SEQ ID NO: 3084 - DNA, 25 bp, Homo sapien
ggagaggcgatgacgggccggcggg

SEQ ID NO: 3085 - DNA, 25 bp, Homo sapien
agtctatacactccagtagttctac

SEQ ID NO: 3086 - DNA, 25 bp, Homo sapien
gtagaactactggagtgtatagact

SEQ ID NO: 3087 - DNA, 25 bp, Homo sapien
acatgtattaggtacgtataggaag

SEQ ID NO: 3088 - DNA, 25 bp, Homo sapien
cttcctatacgtacctaatacatgt

SEQ ID NO: 3089 - DNA, 25 bp, Homo sapien
tagcgggcgttctcaggtcgccgcc

SEQ ID NO: 3090 - DNA, 25 bp, Homo sapien
ggcggcgacctgagaacgcccgcta

SEQ ID NO: 3091 - DNA, 25 bp, Homo sapien
ttcttatttctcaatgtatctaacc

SEQ ID NO: 3092 - DNA, 25 bp, Homo sapien
ggttagatacattgagaaataagaa

SEQ ID NO: 3093 - DNA, 25 bp, Homo sapien
gacacccggccgactgcccgtgggc

SEQ ID NO: 3094 - DNA, 25 bp, Homo sapien
gcccacgggcagtcggccgggtgtc

SEQ ID NO: 3095 - DNA, 25 bp, Homo sapien
gactgcccgtgggctccggtcggga

SEQ ID NO: 3096 - DNA, 25 bp, Homo sapien
tcccgaccggagcccacgggcagtc

SEQ ID NO: 3097 - DNA, 25 bp, Homo sapien
cgcaaccccaacaccgaacgccact

SEQ ID NO: 3098 - DNA, 25 bp, Homo sapien
agtggcgttcggtgttggggttgcg

SEQ ID NO: 3099 - DNA, 25 bp, Homo sapien
tgaactattattcttattaagaaag

SEQ ID NO: 3100 - DNA, 25 bp, Homo sapien
ctttcttaataagaataatagttca

SEQ ID NO: 3101 - DNA, 25 bp, Homo sapien
tactgaactattattcttattaaga

SEQ ID NO: 3102 - DNA, 25 bp, Homo sapien
tcttaataagaataatagttcagta

SEQ ID NO: 3103 - DNA, 25 bp, Homo sapien
gtaataaccaagcatctatggtcag

SEQ ID NO: 3104 - DNA, 25 bp, Homo sapien
ctgaccatagatgcttggttattac

SEQ ID NO: 3105 - DNA, 25 bp, Homo sapien
gattgttttagtaaccacaaattgt

SEQ ID NO: 3106 - DNA, 25 bp, Homo sapien
acaatttgtggttactaaaacaatc

SEQ ID NO: 3107 - DNA, 25 bp, Homo sapien
acaaaagtattgatagcaattatac

SEQ ID NO: 3108 - DNA, 25 bp, Homo sapien
gtataattgctatcaatacttttgt

SEQ ID NO: 3109 - DNA, 25 bp, Homo sapien
tatagaaaggtccttgaatttaata

SEQ ID NO: 3110 - DNA, 25 bp, Homo sapien
tattaaattcaaggacctttctata

SEQ ID NO: 3111 - DNA, 25 bp, Homo sapien
ggccggtccacaccggatccgcggg

SEQ ID NO: 3112 - DNA, 25 bp, Homo sapien
cccgcggatccggtgtggaccggcc

SEQ ID NO: 3113 - DNA, 25 bp, Homo sapien
tgtgtccagacagagcgtatctaga

SEQ ID NO: 3114 - DNA, 25 bp, Homo sapien
tctagatacgctctgtctggacaca

SEQ ID NO: 3115 - DNA, 25 bp, Homo sapien
ctccgggacgaccagagaaccggaa

SEQ ID NO: 3116 - DNA, 25 bp, Homo sapien
ttccggttctctggtcgtcccggag

SEQ ID NO: 3117 - DNA, 25 bp, Homo sapien
tataagtaattcaacgagtcttttt

SEQ ID NO: 3118 - DNA, 25 bp, Homo sapien
aaaaagactcgttgaattacttata

SEQ ID NO: 3119 - DNA, 25 bp, Homo sapien
aaacgtgttatgatgaaaggagagg

SEQ ID NO: 3120 - DNA, 25 bp, Homo sapien
cctctcctttcatcataacacgttt

SEQ ID NO: 3121 - DNA, 25 bp, Homo sapien
aggtgagaaagcattagataataac

SEQ ID NO: 3122 - DNA, 25 bp, Homo sapien
gttattatctaatgctttctcacct

SEQ ID NO: 3123 - DNA, 25 bp, Homo sapien
actcataaagacgaggaaagaggtg

SEQ ID NO: 3124 - DNA, 25 bp, Homo sapien
cacctctttcctcgtctttatgagt

SEQ ID NO: 3125 - DNA, 25 bp, Homo sapien
aggtctcgtctcacccgctctggga

SEQ ID NO: 3126 - DNA, 25 bp, Homo sapien
tcccagagcgggtgagacgagacct

SEQ ID NO: 3127 - DNA, 25 bp, Homo sapien
caggcggcgcgagcacaggagcggc

SEQ ID NO: 3128 - DNA, 25 bp, Homo sapien
gccgctcctgtgctcgcgccgcctg

SEQ ID NO: 3129 - DNA, 25 bp, Homo sapien
aactctgtatttccgaaacagtctt

SEQ ID NO: 3130 - DNA, 25 bp, Homo sapien
aagactgtttcggaaatacagagtt

SEQ ID NO: 3131 - DNA, 25 bp, Homo sapien
tacttgtaacctactcagatatgat

SEQ ID NO: 3132 - DNA, 25 bp, Homo sapien
atcatatctgagtaggttacaagta

SEQ ID NO: 3133 - DNA, 25 bp, Homo sapien
tcgtgatccgtacgtcgacgtggat

SEQ ID NO: 3134 - DNA, 25 bp, Homo sapien
atccacgtcgacgtacggatcacga

SEQ ID NO: 3135 - DNA, 25 bp, Homo sapien
ttcgtttatttatcaggtctttgtg

SEQ ID NO: 3136 - DNA, 25 bp, Homo sapien
cacaaagacctgataaataaacgaa

SEQ ID NO: 3137 - DNA, 25 bp, Homo sapien
acgacccggagtgcgccgacgtccc

SEQ ID NO: 3138 - DNA, 25 bp, Homo sapien
gggacgtcggcgcactccgggtcgt

SEQ ID NO: 3139 - DNA, 25 bp, Homo sapien
gggcacagtaactccgtcgccactc

SEQ ID NO: 3140 - DNA, 25 bp, Homo sapien
gagtggcgacggagttactgtgccc

SEQ ID NO: 3141 - DNA, 25 bp, Homo sapien
ggagacaccgaattacagtactcgg

SEQ ID NO: 3142 - DNA, 25 bp, Homo sapien
ccgagtactgtaattcggtgtctcc

SEQ ID NO: 3143 - DNA, 25 bp, Homo sapien
tagtaaacaacgagagtcattgtaa

SEQ ID NO: 3144 - DNA, 25 bp, Homo sapien
ttacaatgactctcgttgtttacta

SEQ ID NO: 3145 - DNA, 25 bp, Homo sapien
gctcctgggccgactgggacacctg

SEQ ID NO: 3146 - DNA, 25 bp, Homo sapien
caggtgtcccagtcggcccaggagc

SEQ ID NO: 3147 - DNA, 25 bp, Homo sapien
taccggtcatcgacgaaggcctgag

SEQ ID NO: 3148 - DNA, 25 bp, Homo sapien
ctcaggccttcgtcgatgaccggta

SEQ ID NO: 3149 - DNA, 25 bp, Homo sapien
agaataaacacttcagctttattat

SEQ ID NO: 3150 - DNA, 25 bp, Homo sapien
ataataaagctgaagtgtttattct

SEQ ID NO: 3151 - DNA, 25 bp, Homo sapien
aactacttctcacttttcgcaaaac

SEQ ID NO: 3152 - DNA, 25 bp, Homo sapien
gttttgcgaaaagtgagaagtagtt

SEQ ID NO: 3153 - DNA, 25 bp, Homo sapien
tgtggttaaacaacgacaaaggaat

SEQ ID NO: 3154 - DNA, 25 bp, Homo sapien
attcctttgtcgttgtttaaccaca

SEQ ID NO: 3155 - DNA, 25 bp, Homo sapien
cttctaacacgaaactaggtataca

SEQ ID NO: 3156 - DNA, 25 bp, Homo sapien
tgtatacctagtttcgtgttagaag

SEQ ID NO: 3157 - DNA, 25 bp, Homo sapien
aagactaaatcaaatgaggactaat

SEQ ID NO: 3158 - DNA, 25 bp, Homo sapien
attagtcctcatttgatttagtctt

SEQ ID NO: 3159 - DNA, 25 bp, Homo sapien
tatgatttatcaagagaggccgtac

SEQ ID NO: 3160 - DNA, 25 bp, Homo sapien
gtacggcctctcttgataaatcata

SEQ ID NO: 3161 - DNA, 25 bp, Homo sapien
cacaagaaatacaatcactactact

SEQ ID NO: 3162 - DNA, 25 bp, Homo sapien
agtagtagtgattgtatttcttgtg

SEQ ID NO: 3163 - DNA, 25 bp, Homo sapien
tacggtatcctatggcttatcaacc

SEQ ID NO: 3164 - DNA, 25 bp, Homo sapien
ggttgataagccataggataccgta

SEQ ID NO: 3165 - DNA, 25 bp, Homo sapien
aaattgggagagaataacacaaact

SEQ ID NO: 3166 - DNA, 25 bp, Homo sapien
agtttgtgttattctctcccaattt

SEQ ID NO: 3167 - DNA, 25 bp, Homo sapien
tatcttaactttttgtccatactaa

SEQ ID NO: 3168 - DNA, 25 bp, Homo sapien
ttagtatggacaaaaagttaagata

SEQ ID NO: 3169 - DNA, 25 bp, Homo sapien
aggcgtcgggcctgcgagggtccca

SEQ ID NO: 3170 - DNA, 25 bp, Homo sapien
tgggaccctcgcaggcccgacgcct

SEQ ID NO: 3171 - DNA, 25 bp, Homo sapien
gacttattctatagtatttctaact

SEQ ID NO: 3172 - DNA, 25 bp, Homo sapien
agttagaaatactatagaataagtc

SEQ ID NO: 3173 - DNA, 25 bp, Homo sapien
gtcgaggggccgcggtcgacatcga

SEQ ID NO: 3174 - DNA, 25 bp, Homo sapien
tcgatgtcgaccgcggcccctcgac

SEQ ID NO: 3175 - DNA, 25 bp, Homo sapien
aggagcttcggaagtggtcacgaca

SEQ ID NO: 3176 - DNA, 25 bp, Homo sapien
tgtcgtgaccacttccgaagctcct

SEQ ID NO: 3177 - DNA, 25 bp, Homo sapien
tagccgacgtgcctttacctcgagg

SEQ ID NO: 3178 - DNA, 25 bp, Homo sapien
cctcgaggtaaaggcacgtcggcta

SEQ ID NO: 3179 - DNA, 25 bp, Homo sapien
cggtgtccggaccagagacgtgcgg

SEQ ID NO: 3180 - DNA, 25 bp, Homo sapien
ccgcacgtctctggtccggacaccg

SEQ ID NO: 3181 - DNA, 25 bp, Homo sapien
atttatgcatcactggaaacatata

SEQ ID NO: 3182 - DNA, 25 bp, Homo sapien
tatatgtttccagtgatgcataaat

SEQ ID NO: 3183 - DNA, 25 bp, Homo sapien
acggatctctgttcaggcaaccaga

SEQ ID NO: 3184 - DNA, 25 bp, Homo sapien
tctggttgcctgaacagagatccgt

SEQ ID NO: 3185 - DNA, 25 bp, Homo sapien
agaggggttactagggatgaggtcc

SEQ ID NO: 3186 - DNA, 25 bp, Homo sapien
ggacctcatccctagtaacccctct

SEQ ID NO: 3187 - DNA, 25 bp, Homo sapien
ccagcgggccacttggcttcgtcgt

SEQ ID NO: 3188 - DNA, 25 bp, Homo sapien
acgacgaagccaagtggcccgctgg

SEQ ID NO: 3189 - DNA, 25 bp, Homo sapien
gaacatttggtgcaccgtctcttcg

SEQ ID NO: 3190 - DNA, 25 bp, Homo sapien
cgaagagacggtgcaccaaatgttc

SEQ ID NO: 3191 - DNA, 25 bp, Homo sapien
cccaccccgtctctccgacagacct

SEQ ID NO: 3192 - DNA, 25 bp, Homo sapien
aggtctgtcggagagacggggtggg

SEQ ID NO: 3193 - DNA, 25 bp, Homo sapien
aagcggaaggccactgaggtccctt

SEQ ID NO: 3194 - DNA, 25 bp, Homo sapien
aagggacctcagtggccttccgctt

SEQ ID NO: 3195 - DNA, 25 bp, Homo sapien
gtaagtttaatgaccaaaattatta

SEQ ID NO: 3196 - DNA, 25 bp, Homo sapien
taataattttggtcattaaacttac

SEQ ID NO: 3197 - DNA, 25 bp, Homo sapien
ggactcgctccaaccgtcggcggag

SEQ ID NO: 3198 - DNA, 25 bp, Homo sapien
ctccgccgacggttggagcgagtcc

SEQ ID NO: 3199 - DNA, 25 bp, Homo sapien
tttcacttcacacgaaccatacact

SEQ ID NO: 3200 - DNA, 25 bp, Homo sapien
agtgtatggttcgtgtgaagtgaaa

SEQ ID NO: 3201 - DNA, 25 bp, Homo sapien
cacctctcgtggacgaagcagaaag

SEQ ID NO: 3202 - DNA, 25 bp, Homo sapien
ctttctgcttcgtccacgagaggtg

SEQ ID NO: 3203 - DNA, 25 bp, Homo sapien
cgcgcagttctggacgaataaaacg

SEQ ID NO: 3204 - DNA, 25 bp, Homo sapien
cgttttattcgtccagaactgcgcg

SEQ ID NO: 3205 - DNA, 25 bp, Homo sapien
gggttacaggcatccaagggtctac

SEQ ID NO: 3206 - DNA, 25 bp, Homo sapien
gtagacccttggatgcctgtaaccc

SEQ ID NO: 3207 - DNA, 25 bp, Homo sapien
tgtcgagaaacgtctcccactggaa

SEQ ID NO: 3208 - DNA, 25 bp, Homo sapien
ttccagtgggagacgtttctcgaca

SEQ ID NO: 3209 - DNA, 25 bp, Homo sapien
gttacatagttaggtaacgaaggag

SEQ ID NO: 3210 - DNA, 25 bp, Homo sapien
ctccttcgttacctaactatgtaac

SEQ ID NO: 3211 - DNA, 25 bp, Homo sapien
acaaataccgtgtattacttcttta

SEQ ID NO: 3212 - DNA, 25 bp, Homo sapien
taaagaagtaatacacggtatttgt

SEQ ID NO: 3213 - DNA, 25 bp, Homo sapien
attgtaccggtactaagttgcactg

SEQ ID NO: 3214 - DNA, 25 bp, Homo sapien
cagtgcaacttagtaccggtacaat

SEQ ID NO: 3215 - DNA, 25 bp, Homo sapien
agtccgataaactataaatgatagt

SEQ ID NO: 3216 - DNA, 25 bp, Homo sapien
actatcatttatagtttatcggact

SEQ ID NO: 3217 - DNA, 25 bp, Homo sapien
ttcccgcagtcggtgggcacgtgtc

SEQ ID NO: 3218 - DNA, 25 bp, Homo sapien
gacacgtgcccaccgactgcgggaa

SEQ ID NO: 3219 - DNA, 25 bp, Homo sapien
cttccgccggttgcgccaagaggag

SEQ ID NO: 3220 - DNA, 25 bp, Homo sapien
ctcctcttggcgcaaccggcggaag

SEQ ID NO: 3221 - DNA, 25 bp, Homo sapien
attagtgttagaatacaagactcaa

SEQ ID NO: 3222 - DNA, 25 bp, Homo sapien
ttgagtcttgtattctaacactaat

SEQ ID NO: 3223 - DNA, 25 bp, Homo sapien
tgatgtgaaagatctttgaaaacct

SEQ ID NO: 3224 - DNA, 25 bp, Homo sapien
aggttttcaaagatctttcacatca

SEQ ID NO: 3225 - DNA, 25 bp, Homo sapien
aatagacggtctggactccagtccg

SEQ ID NO: 3226 - DNA, 25 bp, Homo sapien
cggactggagtccagaccgtctatt

SEQ ID NO: 3227 - DNA, 25 bp, Homo sapien
cggtgtccctgggtgccggagacac

SEQ ID NO: 3228 - DNA, 25 bp, Homo sapien
gtgtctccggcacccagggacaccg

SEQ ID NO: 3229 - DNA, 25 bp, Homo sapien
tctatggacctatagaccttattcc

SEQ ID NO: 3230 - DNA, 25 bp, Homo sapien
ggaataaggtctataggtccataga

SEQ ID NO: 3231 - DNA, 25 bp, Homo sapien
atacatgttcactgttgctttttac

SEQ ID NO: 3232 - DNA, 25 bp, Homo sapien
gtaaaaagcaacagtgaacatgtat

SEQ ID NO: 3233 - DNA, 25 bp, Homo sapien
tagtgggaccgacctggacagaaaa

SEQ ID NO: 3234 - DNA, 25 bp, Homo sapien
ttttctgtccaggtcggtcccacta

SEQ ID NO: 3235 - DNA, 25 bp, Homo sapien
aaccgtaactgttagtatcgtacaa

SEQ ID NO: 3236 - DNA, 25 bp, Homo sapien
ttgtacgatactaacagttacggtt

SEQ ID NO: 3237 - DNA, 25 bp, Homo sapien
ctcgtccgaaggacgcgaggttacg

SEQ ID NO: 3238 - DNA, 25 bp, Homo sapien
cgtaacctcgcgtccttcggacgag

SEQ ID NO: 3239 - DNA, 25 bp, Homo sapien
aacttacagactgattcgatttgag

SEQ ID NO: 3240 - DNA, 25 bp, Homo sapien
ctcaaatcgaatcagtctgtaagtt

SEQ ID NO: 3241 - DNA, 25 bp, Homo sapien
acccgtagcccgagacgtggaagtg

SEQ ID NO: 3242 - DNA, 25 bp, Homo sapien
cacttccacgtctcgggctacgggt

SEQ ID NO: 3243 - DNA, 25 bp, Homo sapien
aaggagtgacgatattcagtttagg

SEQ ID NO: 3244 - DNA, 25 bp, Homo sapien
cctaaactgaatatcgtcactcctt

SEQ ID NO: 3245 - DNA, 25 bp, Homo sapien
tgtactgttacattaagagtaatcg

SEQ ID NO: 3246 - DNA, 25 bp, Homo sapien
cgattactcttaatgtaacagtaca

SEQ ID NO: 3247 - DNA, 25 bp, Homo sapien
ccacaagtagcatggttccttttac

SEQ ID NO: 3248 - DNA, 25 bp, Homo sapien
gtaaaaggaaccatgctacttgtgg

SEQ ID NO: 3249 - DNA, 25 bp, Homo sapien
tcggtgccgctcctctcccaccgag

SEQ ID NO: 3250 - DNA, 25 bp, Homo sapien
ctcggtgggagaggagcggcaccga

SEQ ID NO: 3251 - DNA, 25 bp, Homo sapien
cattgtccctctcggcatgaagagg

SEQ ID NO: 3252 - DNA, 25 bp, Homo sapien
cctcttcatgccgagagggacaatg

SEQ ID NO: 3253 - DNA, 25 bp, Homo sapien
cataaaaaatctgtcaacctactag

SEQ ID NO: 3254 - DNA, 25 bp, Homo sapien
ctagtaggttgacagattttttatg

SEQ ID NO: 3255 - DNA, 25 bp, Homo sapien
cgtcttggggatggggtctcggccg

SEQ ID NO: 3256 - DNA, 25 bp, Homo sapien
cggccgagaccccatccccaagacg

SEQ ID NO: 3257 - DNA, 25 bp, Homo sapien
tcttacaccactggaaagtgcttgc

SEQ ID NO: 3258 - DNA, 25 bp, Homo sapien
gcaagcactttccagtggtgtaaga

SEQ ID NO: 3259 - DNA, 25 bp, Homo sapien
agacaactcaactcgactatcaatg

SEQ ID NO: 3260 - DNA, 25 bp, Homo sapien
cattgatagtcgagttgagttgtct

SEQ ID NO: 3261 - DNA, 25 bp, Homo sapien
ggcggacagggccgcgggtacatcg

SEQ ID NO: 3262 - DNA, 25 bp, Homo sapien
cgatgtacccgcggccctgtccgcc

SEQ ID NO: 3263 - DNA, 25 bp, Homo sapien
cttatgaagttaaggttcaaattgt

SEQ ID NO: 3264 - DNA, 25 bp, Homo sapien
acaatttgaaccttaacttcataag

SEQ ID NO: 3265 - DNA, 25 bp, Homo sapien
cgacgaaggaccccgtccagcaggt

SEQ ID NO: 3266 - DNA, 25 bp, Homo sapien
acctgctggacggggtccttcgtcg

SEQ ID NO: 3267 - DNA, 25 bp, Homo sapien
ggtggaagtcctggcggtaagcccg

SEQ ID NO: 3268 - DNA, 25 bp, Homo sapien
cgggcttaccgccaggacttccacc

SEQ ID NO: 3269 - DNA, 25 bp, Homo sapien
tgtctcgtgctggtctgactctcga

SEQ ID NO: 3270 - DNA, 25 bp, Homo sapien
tcgagagtcagaccagcacgagaca

SEQ ID NO: 3271 - DNA, 25 bp, Homo sapien
gtaagtatctggtccttagtttcgg

SEQ ID NO: 3272 - DNA, 25 bp, Homo sapien
ccgaaactaaggaccagatacttac

SEQ ID NO: 3273 - DNA, 25 bp, Homo sapien
acacgggtagggtggagatggtcct

SEQ ID NO: 3274 - DNA, 25 bp, Homo sapien
aggaccatctccaccctacccgtgt

SEQ ID NO: 3275 - DNA, 25 bp, Homo sapien
aaaggtaacgaaactacatgaaata

SEQ ID NO: 3276 - DNA, 25 bp, Homo sapien
tatttcatgtagtttcgttaccttt

SEQ ID NO: 3277 - DNA, 25 bp, Homo sapien
gtgggcaaggtatctcgagaactct

SEQ ID NO: 3278 - DNA, 25 bp, Homo sapien
agagttctcgagataccttgcccac

SEQ ID NO: 3279 - DNA, 25 bp, Homo sapien
aaacatgaaaagtgttactaattgt

SEQ ID NO: 3280 - DNA, 25 bp, Homo sapien
acaattagtaacacttttcatgttt

SEQ ID NO: 3281 - DNA, 25 bp, Homo sapien
gacttgaacctaaatcgatctctac

SEQ ID NO: 3282 - DNA, 25 bp, Homo sapien
gtagagatcgatttaggttcaagtc

SEQ ID NO: 3283 - DNA, 25 bp, Homo sapien
ataattgaggcaatgacttgaacct

SEQ ID NO: 3284 - DNA, 25 bp, Homo sapien
aggttcaagtcattgcctcaattat

SEQ ID NO: 3285 - DNA, 25 bp, Homo sapien
tgacagggtgcgtagagacagtaaa

SEQ ID NO: 3286 - DNA, 25 bp, Homo sapien
tttactgtctctacgcaccctgtca

SEQ ID NO: 3287 - DNA, 25 bp, Homo sapien
acctacggtgtagggcgccgtcgct

SEQ ID NO: 3288 - DNA, 25 bp, Homo sapien
agcgacggcgccctacaccgtaggt

SEQ ID NO: 3289 - DNA, 25 bp, Homo sapien
cagccgaccgtttgtcaccagccct

SEQ ID NO: 3290 - DNA, 25 bp, Homo sapien
agggctggtgacaaacggtcggctg

SEQ ID NO: 3291 - DNA, 25 bp, Homo sapien
agactaaggtctcgatagggaagta

SEQ ID NO: 3292 - DNA, 25 bp, Homo sapien
tacttccctatcgagaccttagtct

SEQ ID NO: 3293 - DNA, 25 bp, Homo sapien
tgccctcagccagcgcgtaggggtc

SEQ ID NO: 3294 - DNA, 25 bp, Homo sapien
gacccctacgcgctggctgagggca

SEQ ID NO: 3295 - DNA, 25 bp, Homo sapien
cgcagaccgggggacccctgacttc

SEQ ID NO: 3296 - DNA, 25 bp, Homo sapien
gaagtcaggggtcccccggtctgcg

SEQ ID NO: 3297 - DNA, 25 bp, Homo sapien
gacgcaggtccacatttctgtttgt

SEQ ID NO: 3298 - DNA, 25 bp, Homo sapien
acaaacagaaatgtggacctgcgtc

SEQ ID NO: 3299 - DNA, 25 bp, Homo sapien
cggtgacacataccctagagtttaa

SEQ ID NO: 3300 - DNA, 25 bp, Homo sapien
ttaaactctagggtatgtgtcaccg

SEQ ID NO: 3301 - DNA, 25 bp, Homo sapien
accgagacagaggagcacgacgacg

SEQ ID NO: 3302 - DNA, 25 bp, Homo sapien
cgtcgtcgtgctcctctgtctcggt

SEQ ID NO: 3303 - DNA, 25 bp, Homo sapien
tcgcgaactcgtgtggcgaggatcc

SEQ ID NO: 3304 - DNA, 25 bp, Homo sapien
ggatcctcgccacacgagttcgcga

SEQ ID NO: 3305 - DNA, 25 bp, Homo sapien
acgtacttgtgacgccttagacaga

SEQ ID NO: 3306 - DNA, 25 bp, Homo sapien
tctgtctaaggcgtcacaagtacgt

SEQ ID NO: 3307 - DNA, 25 bp, Homo sapien
acattcagtacatattacaaaagat

SEQ ID NO: 3308 - DNA, 25 bp, Homo sapien
atcttttgtaatatgtactgaatgt

SEQ ID NO: 3309 - DNA, 25 bp, Homo sapien
acccaggcccgacggctcacccaag

SEQ ID NO: 3310 - DNA, 25 bp, Homo sapien
cttgggtgagccgtcgggcctgggt

SEQ ID NO: 3311 - DNA, 25 bp, Homo sapien
accaaacgaacgactaccagtcgtg

SEQ ID NO: 3312 - DNA, 25 bp, Homo sapien
cacgactggtagtcgttcgtttggt

SEQ ID NO: 3313 - DNA, 25 bp, Homo sapien
accttaaggttctactgtcactatt

SEQ ID NO: 3314 - DNA, 25 bp, Homo sapien
aatagtgacagtagaaccttaaggt

SEQ ID NO: 3315 - DNA, 25 bp, Homo sapien
catgagaaagtaatttgcactacaa

SEQ ID NO: 3316 - DNA, 25 bp, Homo sapien
ttgtagtgcaaattactttctcatg

SEQ ID NO: 3317 - DNA, 25 bp, Homo sapien
tgagaaatcccgagtgccttaagta

SEQ ID NO: 3318 - DNA, 25 bp, Homo sapien
tacttaaggcactcgggatttctca

SEQ ID NO: 3319 - DNA, 25 bp, Homo sapien
cgctccggggccaccctagacgagc

SEQ ID NO: 3320 - DNA, 25 bp, Homo sapien
gctcgtctagggtggccccggagcg

SEQ ID NO: 3321 - DNA, 25 bp, Homo sapien
gcgctccggggccaccctagacgag

SEQ ID NO: 3322 - DNA, 25 bp, Homo sapien
ctcgtctagggtggccccggagcgc

SEQ ID NO: 3323 - DNA, 25 bp, Homo sapien
cttccatttctagagtaatgtgtaa

SEQ ID NO: 3324 - DNA, 25 bp, Homo sapien
ttacacattactctagaaatggaag

SEQ ID NO: 3325 - DNA, 25 bp, Homo sapien
gaaaaataatttctcaaagtctact

SEQ ID NO: 3326 - DNA, 25 bp, Homo sapien
agtagactttgagaaattatttttc

SEQ ID NO: 3327 - DNA, 25 bp, Homo sapien
gtgttaaggacgtatgagttgtccc

SEQ ID NO: 3328 - DNA, 25 bp, Homo sapien
gggacaactcatacgtccttaacac

SEQ ID NO: 3329 - DNA, 25 bp, Homo sapien
accctatttgaatatagattttacg

SEQ ID NO: 3330 - DNA, 25 bp, Homo sapien
cgtaaaatctatattcaaatagggt

SEQ ID NO: 3331 - DNA, 25 bp, Homo sapien
tcataatgatttctagggtgttcct

SEQ ID NO: 3332 - DNA, 25 bp, Homo sapien
aggaacaccctagaaatcattatga

SEQ ID NO: 3333 - DNA, 25 bp, Homo sapien
actttaaatctcgtctaagtaatta

SEQ ID NO: 3334 - DNA, 25 bp, Homo sapien
taattacttagacgagatttaaagt

SEQ ID NO: 3335 - DNA, 25 bp, Homo sapien
gaagaaagtctagaatacaattaaa

SEQ ID NO: 3336 - DNA, 25 bp, Homo sapien
tttaattgtattctagactttcttc

SEQ ID NO: 3337 - DNA, 25 bp, Homo sapien
atttgagagaacctggtcggtggac

SEQ ID NO: 3338 - DNA, 25 bp, Homo sapien
gtccaccgaccaggttctctcaaat

SEQ ID NO: 3339 - DNA, 25 bp, Homo sapien
ctcagtcgtgactgctgctacccgt

SEQ ID NO: 3340 - DNA, 25 bp, Homo sapien
acgggtagcagcagtcacgactgag

SEQ ID NO: 3341 - DNA, 25 bp, Homo sapien
gttcgcccgccgagccaggtcgggt

SEQ ID NO: 3342 - DNA, 25 bp, Homo sapien
acccgacctggctcggcgggcgaac

SEQ ID NO: 3343 - DNA, 25 bp, Homo sapien
cgacacgtcctcgttcgcccgccga

SEQ ID NO: 3344 - DNA, 25 bp, Homo sapien
tcggcgggcgaacgaggacgtgtcg

SEQ ID NO: 3345 - DNA, 25 bp, Homo sapien
atcttacttatgaagtctctactag

SEQ ID NO: 3346 - DNA, 25 bp, Homo sapien
ctagtagagacttcataagtaagat

SEQ ID NO: 3347 - DNA, 25 bp, Homo sapien
taggaggttccgtgcgccctctcgg

SEQ ID NO: 3348 - DNA, 25 bp, Homo sapien
ccgagagggcgcacggaacctccta

SEQ ID NO: 3349 - DNA, 25 bp, Homo sapien
aggactctgtataagagaaaccagg

SEQ ID NO: 3350 - DNA, 25 bp, Homo sapien
cctggtttctcttatacagagtcct

SEQ ID NO: 3351 - DNA, 25 bp, Homo sapien
gtacattgtttattgaaagacagag

SEQ ID NO: 3352 - DNA, 25 bp, Homo sapien
ctctgtctttcaataaacaatgtac

SEQ ID NO: 3353 - DNA, 25 bp, Homo sapien
ttatgaataaaccgagtaaacggta

SEQ ID NO: 3354 - DNA, 25 bp, Homo sapien
taccgtttactcggtttattcataa

SEQ ID NO: 3355 - DNA, 25 bp, Homo sapien
agaaaatgtaccattatgaataaac

SEQ ID NO: 3356 - DNA, 25 bp, Homo sapien
gtttattcataatggtacattttct

SEQ ID NO: 3357 - DNA, 25 bp, Homo sapien
gcgccggcgacgaacccactgtact

SEQ ID NO: 3358 - DNA, 25 bp, Homo sapien
agtacagtgggttcgtcgccggcgc

SEQ ID NO: 3359 - DNA, 25 bp, Homo sapien
gccgcccttgctgccctctctgcgg

SEQ ID NO: 3360 - DNA, 25 bp, Homo sapien
ccgcagagagggcagcaagggcggc

SEQ ID NO: 3361 - DNA, 25 bp, Homo sapien
aattatctacacaaacagtaataat

SEQ ID NO: 3362 - DNA, 25 bp, Homo sapien
attattactgtttgtgtagataatt

SEQ ID NO: 3363 - DNA, 25 bp, Homo sapien
tgggcggccggtgtagacctgccgt

SEQ ID NO: 3364 - DNA, 25 bp, Homo sapien
acggcaggtctacaccggccgccca

SEQ ID NO: 3365 - DNA, 25 bp, Homo sapien
gctgccccagggacagcggcgtcgg

SEQ ID NO: 3366 - DNA, 25 bp, Homo sapien
ccgacgccgctgtccctggggcagc

SEQ ID NO: 3367 - DNA, 25 bp, Homo sapien
tctaagagaagagtattcagaagta

SEQ ID NO: 3368 - DNA, 25 bp, Homo sapien
tacttctgaatactcttctcttaga

SEQ ID NO: 3369 - DNA, 25 bp, Homo sapien
tctctagtactctaagttgacaaca

SEQ ID NO: 3370 - DNA, 25 bp, Homo sapien
tgttgtcaacttagagtactagaga

SEQ ID NO: 3371 - DNA, 25 bp, Homo sapien
actgtaaacgatattcgtacttgta

SEQ ID NO: 3372 - DNA, 25 bp, Homo sapien
tacaagtacgaatatcgtttacagt

SEQ ID NO: 3373 - DNA, 25 bp, Homo sapien
atgggtgaagacataacgaaaccac

SEQ ID NO: 3374 - DNA, 25 bp, Homo sapien
gtggtttcgttatgtcttcacccat

SEQ ID NO: 3375 - DNA, 25 bp, Homo sapien
gtccgtgggcgtgcgggtccgaggc

SEQ ID NO: 3376 - DNA, 25 bp, Homo sapien
gcctcggacccgcacgcccacggac

SEQ ID NO: 3377 - DNA, 25 bp, Homo sapien
gaatgaaattgttcagattacaagg

SEQ ID NO: 3378 - DNA, 25 bp, Homo sapien
ccttgtaatctgaacaatttcattc

SEQ ID NO: 3379 - DNA, 25 bp, Homo sapien
tatacaagtctgcttaaagaagatt

SEQ ID NO: 3380 - DNA, 25 bp, Homo sapien
aatcttctttaagcagacttgtata

SEQ ID NO: 3381 - DNA, 25 bp, Homo sapien
gacgacgtacatcacgtaataactc

SEQ ID NO: 3382 - DNA, 25 bp, Homo sapien
gagttattacgtgatgtacgtcgtc

SEQ ID NO: 3383 - DNA, 25 bp, Homo sapien
gggacgcggtgggagtcgccggcga

SEQ ID NO: 3384 - DNA, 25 bp, Homo sapien
tcgccggcgactcccaccgcgtccc

SEQ ID NO: 3385 - DNA, 25 bp, Homo sapien
cgacaggcgtgacgacgtcggggcc

SEQ ID NO: 3386 - DNA, 25 bp, Homo sapien
ggccccgacgtcgtcacgcctgtcg

SEQ ID NO: 3387 - DNA, 25 bp, Homo sapien
gacagttggagacgaccttatttgg

SEQ ID NO: 3388 - DNA, 25 bp, Homo sapien
ccaaataaggtcgtctccaactgtc

SEQ ID NO: 3389 - DNA, 25 bp, Homo sapien
agtatccactggtggaaatgatgat

SEQ ID NO: 3390 - DNA, 25 bp, Homo sapien
atcatcatttccaccagtggatact

SEQ ID NO: 3391 - DNA, 25 bp, Homo sapien
ggtggtgacgtacatagtgggactg

SEQ ID NO: 3392 - DNA, 25 bp, Homo sapien
cagtcccactatgtacgtcaccacc

SEQ ID NO: 3393 - DNA, 25 bp, Homo sapien
acagacgaaacggtcaaggagagga

SEQ ID NO: 3394 - DNA, 25 bp, Homo sapien
tcctctccttgaccgtttcgtctgt

SEQ ID NO: 3395 - DNA, 25 bp, Homo sapien
tgtcgactcaaaaccaccctcccgg

SEQ ID NO: 3396 - DNA, 25 bp, Homo sapien
ccgggagggtggttttgagtcgaca

SEQ ID NO: 3397 - DNA, 25 bp, Homo sapien
tcacgaaaatggtctcggtggtggt

SEQ ID NO: 3398 - DNA, 25 bp, Homo sapien
accaccaccgagaccattttcgtga

SEQ ID NO: 3399 - DNA, 25 bp, Homo sapien
gtggaagaagaaccactgtacgaat

SEQ ID NO: 3400 - DNA, 25 bp, Homo sapien
attcgtacagtggttcttcttccac

SEQ ID NO: 3401 - DNA, 25 bp, Homo sapien
tgtacagtagagtaaaaccttccgt

SEQ ID NO: 3402 - DNA, 25 bp, Homo sapien
acggaaggttttactctactgtaca

SEQ ID NO: 3403 - DNA, 25 bp, Homo sapien
accgaactttggcttgtcgaggaag

SEQ ID NO: 3404 - DNA, 25 bp, Homo sapien
cttcctcgacaagccaaagttcggt

SEQ ID NO: 3405 - DNA, 25 bp, Homo sapien
ttcgggtcgcgttcttgtatctgta

SEQ ID NO: 3406 - DNA, 25 bp, Homo sapien
tacagatacaagaacgcgacccgaa

SEQ ID NO: 3407 - DNA, 25 bp, Homo sapien
gtaaatcaagttcactgtcagagtg

SEQ ID NO: 3408 - DNA, 25 bp, Homo sapien
cactctgacagtgaacttgatttac

SEQ ID NO: 3409 - DNA, 25 bp, Homo sapien
ggccccctcgcgacgccgtgggcac

SEQ ID NO: 3410 - DNA, 25 bp, Homo sapien
gtgcccacggcgtcgcgagggggcc

SEQ ID NO: 3411 - DNA, 25 bp, Homo sapien
gaaagtattcttagatgaaacaaat

SEQ ID NO: 3412 - DNA, 25 bp, Homo sapien
atttgtttcatctaagaatactttc

SEQ ID NO: 3413 - DNA, 25 bp, Homo sapien
gtacaaagaataaaccatccgaggt

SEQ ID NO: 3414 - DNA, 25 bp, Homo sapien
acctcggatggtttattctttgtac

SEQ ID NO: 3415 - DNA, 25 bp, Homo sapien
tagaacttctctctcgtcgttcgga

SEQ ID NO: 3416 - DNA, 25 bp, Homo sapien
tccgaacgacgagagagaagttcta

SEQ ID NO: 3417 - DNA, 25 bp, Homo sapien
ctgcagtaagagtcccgtgacgccc

SEQ ID NO: 3418 - DNA, 25 bp, Homo sapien
gggcgtcacgggactcttactgcag

SEQ ID NO: 3419 - DNA, 25 bp, Homo sapien
aaaaatgtatctacgttacactata

SEQ ID NO: 3420 - DNA, 25 bp, Homo sapien
tatagtgtaacgtagatacattttt

SEQ ID NO: 3421 - DNA, 25 bp, Homo sapien
attggagaccaaccttgggtcttcg

SEQ ID NO: 3422 - DNA, 25 bp, Homo sapien
cgaagacccaaggttggtctccaat

SEQ ID NO: 3423 - DNA, 25 bp, Homo sapien
cgtggtccgcccccaccgctcgcgt

SEQ ID NO: 3424 - DNA, 25 bp, Homo sapien
acgcgagcggtgggggcggaccacg

SEQ ID NO: 3425 - DNA, 25 bp, Homo sapien
ccgtggtccgcccccaccgctcgcg

SEQ ID NO: 3426 - DNA, 25 bp, Homo sapien
cgcgagcggtgggggcggaccacgg

SEQ ID NO: 3427 - DNA, 25 bp, Homo sapien
cccgtggtccgcccccaccgctcgc

SEQ ID NO: 3428 - DNA, 25 bp, Homo sapien
gcgagcggtgggggcggaccacggg

SEQ ID NO: 3429 - DNA, 25 bp, Homo sapien
cgggacgacgcgccgtcacaccgac

SEQ ID NO: 3430 - DNA, 25 bp, Homo sapien
gtcggtgtgacggcgcgtcgtcccg

SEQ ID NO: 3431 - DNA, 25 bp, Homo sapien
tacctccgtgccgtaggtggtgtac

SEQ ID NO: 3432 - DNA, 25 bp, Homo sapien
gtacaccacctacggcacggaggta

SEQ ID NO: 3433 - DNA, 25 bp, Homo sapien
atgtaaaatcgcgtttccataataa

SEQ ID NO: 3434 - DNA, 25 bp, Homo sapien
ttattatggaaacgcgattttacat

SEQ ID NO: 3435 - DNA, 25 bp, Homo sapien
attcaattgtaagacgtaaagaaag

SEQ ID NO: 3436 - DNA, 25 bp, Homo sapien
ctttctttacgtcttacaattgaat

SEQ ID NO: 3437 - DNA, 25 bp, Homo sapien
tcaccccgacctgcttcgtccccta

SEQ ID NO: 3438 - DNA, 25 bp, Homo sapien
taggggacgaagcaggtcggggtga

SEQ ID NO: 3439 - DNA, 25 bp, Homo sapien
ttgcgagactttcctctagtcccgg

SEQ ID NO: 3440 - DNA, 25 bp, Homo sapien
ccgggactagaggaaagtctcgcaa

SEQ ID NO: 3441 - DNA, 25 bp, Homo sapien
cgggacgtaacagaggtctaacgac

SEQ ID NO: 3442 - DNA, 25 bp, Homo sapien
gtcgttagacctctgttacgtcccg

SEQ ID NO: 3443 - DNA, 25 bp, Homo sapien
ttctctaattaagcacaccggtgtt

SEQ ID NO: 3444 - DNA, 25 bp, Homo sapien
aacaccggtgtgcttaattagagaa

SEQ ID NO: 3445 - DNA, 25 bp, Homo sapien
gaacacgggctgtgtcaaggacaaa

SEQ ID NO: 3446 - DNA, 25 bp, Homo sapien
tttgtccttgacacagcccgtgttc

SEQ ID NO: 3447 - DNA, 25 bp, Homo sapien
ttaccaaccgtgtccgaagctactt

SEQ ID NO: 3448 - DNA, 25 bp, Homo sapien
aagtagcttcggacacggttggtaa

SEQ ID NO: 3449 - DNA, 25 bp, Homo sapien
agtcggcataggatggtacagatga

SEQ ID NO: 3450 - DNA, 25 bp, Homo sapien
tcatctgtaccatcctatgccgact

SEQ ID NO: 3451 - DNA, 25 bp, Homo sapien
gcgaacggggagaatacgcggtccc

SEQ ID NO: 3452 - DNA, 25 bp, Homo sapien
gggaccgcgtattctccccgttcgc

SEQ ID NO: 3453 - DNA, 25 bp, Homo sapien
aaacaggaggacacaccgtaaggga

SEQ ID NO: 3454 - DNA, 25 bp, Homo sapien
tcccttacggtgtgtcctcctgttt

SEQ ID NO: 3455 - DNA, 25 bp, Homo sapien
agaggaggtgagagctcgagtggag

SEQ ID NO: 3456 - DNA, 25 bp, Homo sapien
ctccactcgagctctcacctcctct

SEQ ID NO: 3457 - DNA, 25 bp, Homo sapien
ctccggacaggcacgggacttcgtg

SEQ ID NO: 3458 - DNA, 25 bp, Homo sapien
cacgaagtcccgtgcctgtccggag

SEQ ID NO: 3459 - DNA, 25 bp, Homo sapien
taccgacccaacccccaggcactgg

SEQ ID NO: 3460 - DNA, 25 bp, Homo sapien
ccagtgcctgggggttgggtcggta

SEQ ID NO: 3461 - DNA, 25 bp, Homo sapien
attgaccgactaccgacagttcatt

SEQ ID NO: 3462 - DNA, 25 bp, Homo sapien
aatgaactgtcggtagtcggtcaat

SEQ ID NO: 3463 - DNA, 25 bp, Homo sapien
tgtgtccggactcggggccgacggg

SEQ ID NO: 3464 - DNA, 25 bp, Homo sapien
cccgtcggccccgagtccggacaca

SEQ ID NO: 3465 - DNA, 25 bp, Homo sapien
gtgtgtccggactcggggccgacgg

SEQ ID NO: 3466 - DNA, 25 bp, Homo sapien
ccgtcggccccgagtccggacacac

SEQ ID NO: 3467 - DNA, 25 bp, Homo sapien
ggtgtgtccggactcggggccgacg

SEQ ID NO: 3468 - DNA, 25 bp, Homo sapien
cgtcggccccgagtccggacacacc

SEQ ID NO: 3469 - DNA, 25 bp, Homo sapien
ttcacggaaacattatttgactacg

SEQ ID NO: 3470 - DNA, 25 bp, Homo sapien
cgtagtcaaataatgtttccgtgaa

SEQ ID NO: 3471 - DNA, 25 bp, Homo sapien
gacgttcctcccccacggctagtct

SEQ ID NO: 3472 - DNA, 25 bp, Homo sapien
agactagccgtgggggaggaacgtc

SEQ ID NO: 3473 - DNA, 25 bp, Homo sapien
ggtaacgaggactgtaagaatcaac

SEQ ID NO: 3474 - DNA, 25 bp, Homo sapien
gttgattcttacagtcctcgttacc

SEQ ID NO: 3475 - DNA, 25 bp, Homo sapien
gcgccgcgtctaccgcggccccccg

SEQ ID NO: 3476 - DNA, 25 bp, Homo sapien
cggggggccgcggtagacgcggcgc

SEQ ID NO: 3477 - DNA, 25 bp, Homo sapien
cgcgccgcgtctaccgcggcccccc

SEQ ID NO: 3478 - DNA, 25 bp, Homo sapien
ggggggccgcggtagacgcggcgcg

SEQ ID NO: 3479 - DNA, 25 bp, Homo sapien
acgcgccgcgtctaccgcggccccc

SEQ ID NO: 3480 - DNA, 25 bp, Homo sapien
gggggccgcggtagacgcggcgcgt

SEQ ID NO: 3481 - DNA, 25 bp, Homo sapien
gacgcgccgcgtctaccgcggcccc

SEQ ID NO: 3482 - DNA, 25 bp, Homo sapien
ggggccgcggtagacgcggcgcgtc

SEQ ID NO: 3483 - DNA, 25 bp, Homo sapien
tgtcacctcaggacgattcaaatag

SEQ ID NO: 3484 - DNA, 25 bp, Homo sapien
ctatttgaatcgtcctgaggtgaca

SEQ ID NO: 3485 - DNA, 25 bp, Homo sapien
acaggggtctccacactgcccgggt

SEQ ID NO: 3486 - DNA, 25 bp, Homo sapien
acccgggcagtgtggagacccctgt

SEQ ID NO: 3487 - DNA, 25 bp, Homo sapien
gttacttacctctgtgatcctgtgg

SEQ ID NO: 3488 - DNA, 25 bp, Homo sapien
ccacaggatcacagaggtaagtaac

SEQ ID NO: 3489 - DNA, 25 bp, Homo sapien
tcggctattgacctaggaaaacggg

SEQ ID NO: 3490 - DNA, 25 bp, Homo sapien
cccgttttcctaggtcaatagccga

SEQ ID NO: 3491 - DNA, 25 bp, Homo sapien
cttttactcaagagagtccgtttct

SEQ ID NO: 3492 - DNA, 25 bp, Homo sapien
agaaacggactctcttgagtaaaag

SEQ ID NO: 3493 - DNA, 25 bp, Homo sapien
agggagacacgggagatgatcagta

SEQ ID NO: 3494 - DNA, 25 bp, Homo sapien
tactgatcatctcccgtgtctccct

SEQ ID NO: 3495 - DNA, 25 bp, Homo sapien
acttactctagaaagaattttggta

SEQ ID NO: 3496 - DNA, 25 bp, Homo sapien
taccaaaattctttctagagtaagt

SEQ ID NO: 3497 - DNA, 25 bp, Homo sapien
tttatatttttgagacaagtgtatt

SEQ ID NO: 3498 - DNA, 25 bp, Homo sapien
aatacacttgtctcaaaaatataaa

SEQ ID NO: 3499 - DNA, 25 bp, Homo sapien
agtccgtgaccctcgggaacatcca

SEQ ID NO: 3500 - DNA, 25 bp, Homo sapien
tggatgttcccgagggtcacggact

SEQ ID NO: 3501 - DNA, 25 bp, Homo sapien
tatctcctgagattacggaatttat

SEQ ID NO: 3502 - DNA, 25 bp, Homo sapien
ataaattccgtaatctcaggagata

SEQ ID NO: 3503 - DNA, 25 bp, Homo sapien
gaacacaacctcggtcccggactat

SEQ ID NO: 3504 - DNA, 25 bp, Homo sapien
atagtccgggaccgaggttgtgttc

SEQ ID NO: 3505 - DNA, 25 bp, Homo sapien
acgggtcgtagggcatcctcgcgag

SEQ ID NO: 3506 - DNA, 25 bp, Homo sapien
ctcgcgaggatgccctacgacccgt

SEQ ID NO: 3507 - DNA, 25 bp, Homo sapien
actatgacacttcaacagggtcctg

SEQ ID NO: 3508 - DNA, 25 bp, Homo sapien
caggaccctgttgaagtgtcatagt

SEQ ID NO: 3509 - DNA, 25 bp, Homo sapien
gacccccctagacctcgcctcggcc

SEQ ID NO: 3510 - DNA, 25 bp, Homo sapien
ggccgaggcgaggtctaggggggtc

SEQ ID NO: 3511 - DNA, 25 bp, Homo sapien
ggactaaaaggcaccaacaaggaac

SEQ ID NO: 3512 - DNA, 25 bp, Homo sapien
gttccttgttggtgccttttagtcc

SEQ ID NO: 3513 - DNA, 25 bp, Homo sapien
ccacgagtgactacttggcaggact

SEQ ID NO: 3514 - DNA, 25 bp, Homo sapien
agtcctgccaagtagtcactcgtgg

SEQ ID NO: 3515 - DNA, 25 bp, Homo sapien
tttgtcggcacagcggaaccggagc

SEQ ID NO: 3516 - DNA, 25 bp, Homo sapien
gctccggttccgctgtgccgacaaa

SEQ ID NO: 3517 - DNA, 25 bp, Homo sapien
tccctctgggtactgaggaaaaaca

SEQ ID NO: 3518 - DNA, 25 bp, Homo sapien
tgtttttcctcagtacccagaggga

SEQ ID NO: 3519 - DNA, 25 bp, Homo sapien
gtttacgtgattcgagacaagactt

SEQ ID NO: 3520 - DNA, 25 bp, Homo sapien
aagtcttgtctcgaatcacgtaaac

SEQ ID NO: 3521 - DNA, 25 bp, Homo sapien
aaaggttacaccataggtaagaaga

SEQ ID NO: 3522 - DNA, 25 bp, Homo sapien
tcttcttacctatggtgtaaccttt

SEQ ID NO: 3523 - DNA, 25 bp, Homo sapien
cccagggtgtctctgccgagacgac

SEQ ID NO: 3524 - DNA, 25 bp, Homo sapien
gtcgtctcggcagagacaccctggg

SEQ ID NO: 3525 - DNA, 25 bp, Homo sapien
tgtccctcgcgactgacgtcactcg

SEQ ID NO: 3526 - DNA, 25 bp, Homo sapien
cgagtgacgtcagtcgcgagggaca

SEQ ID NO: 3527 - DNA, 25 bp, Homo sapien
ggcccgaccggctcagaccggagtc

SEQ ID NO: 3528 - DNA, 25 bp, Homo sapien
gactccggtctgagccggtcgggcc

SEQ ID NO: 3529 - DNA, 25 bp, Homo sapien
aggcccgaccggctcagaccggagt

SEQ ID NO: 3530 - DNA, 25 bp, Homo sapien
actccggtctgagccggtcgggcct

SEQ ID NO: 3531 - DNA, 25 bp, Homo sapien
acagtccgacttaccatttctatag

SEQ ID NO: 3532 - DNA, 25 bp, Homo sapien
ctatagaaatggtaagtcggactgt

SEQ ID NO: 3533 - DNA, 25 bp, Homo sapien
ctggggtccgcactacagacttgac

SEQ ID NO: 3534 - DNA, 25 bp, Homo sapien
gtcaagtctgtagtgcggaccccag

SEQ ID NO: 3535 - DNA, 25 bp, Homo sapien
cgacgggaggccatgggctgtcggt

SEQ ID NO: 3536 - DNA, 25 bp, Homo sapien
accgacagcccatggcctcccgtcg

SEQ ID NO: 3537 - DNA, 25 bp, Homo sapien
tccttcggagaagtccagggggagt

SEQ ID NO: 3538 - DNA, 25 bp, Homo sapien
actccccctggacttctccgaagga

SEQ ID NO: 3539 - DNA, 25 bp, Homo sapien
cagtttgaggcgtcattactactct

SEQ ID NO: 3540 - DNA, 25 bp, Homo sapien
agagtagtaatgacgcctcaaactg

SEQ ID NO: 3541 - DNA, 25 bp, Homo sapien
tgaggtccgatggctcccggtcgac

SEQ ID NO: 3542 - DNA, 25 bp, Homo sapien
gtcgaccgggagccatcggacctca

SEQ ID NO: 3543 - DNA, 25 bp, Homo sapien
tgctcaccccgtccctcgagaggcc

SEQ ID NO: 3544 - DNA, 25 bp, Homo sapien
ggcctctcgagggacggggtgagca

SEQ ID NO: 3545 - DNA, 25 bp, Homo sapien
gactactggtccactttcgacccaa

SEQ ID NO: 3546 - DNA, 25 bp, Homo sapien
ttgggtcgaaagtggaccagtagtc

SEQ ID NO: 3547 - DNA, 25 bp, Homo sapien
acaggtcgcaacgtagaggtgtcga

SEQ ID NO: 3548 - DNA, 25 bp, Homo sapien
tcgacacctctacgttgcgacctgt

SEQ ID NO: 3549 - DNA, 25 bp, Homo sapien
cgactgggataaccgagaccgaagt

SEQ ID NO: 3550 - DNA, 25 bp, Homo sapien
acttcggtctcggttatcccagtcg

SEQ ID NO: 3551 - DNA, 25 bp, Homo sapien
agcccgcgaagccttcgggcaccgc

SEQ ID NO: 3552 - DNA, 25 bp, Homo sapien
gcggtgcccgaaggcttcgcgggct

SEQ ID NO: 3553 - DNA, 25 bp, Homo sapien
attcaaactgatcaaagaagattat

SEQ ID NO: 3554 - DNA, 25 bp, Homo sapien
ataatcttctttgatcagtttgaat

SEQ ID NO: 3555 - DNA, 25 bp, Homo sapien
gaccgccttttggacgacccacaaa

SEQ ID NO: 3556 - DNA, 25 bp, Homo sapien
tttgtgggtcgtccaaaaggcggtc

SEQ ID NO: 3557 - DNA, 25 bp, Homo sapien
aagacatgtccaccggtataaaccg

SEQ ID NO: 3558 - DNA, 25 bp, Homo sapien
cggtttataccggtggacatgtctt

SEQ ID NO: 3559 - DNA, 25 bp, Homo sapien
tcgtctctcggtctaccgccgacac

SEQ ID NO: 3560 - DNA, 25 bp, Homo sapien
gtgtcggcggtagaccgagagacga

SEQ ID NO: 3561 - DNA, 25 bp, Homo sapien
ccacaccgcagacgtagcagggtca

SEQ ID NO: 3562 - DNA, 25 bp, Homo sapien
tgaccctgctacgtctgcggtgtgg

SEQ ID NO: 3563 - DNA, 25 bp, Homo sapien
cttacgagcaaggctttcgaggggc

SEQ ID NO: 3564 - DNA, 25 bp, Homo sapien
gcccctcgaaagccttgctcgtaag

SEQ ID NO: 3565 - DNA, 25 bp, Homo sapien
agtcgtctagaggacacccctcgta

SEQ ID NO: 3566 - DNA, 25 bp, Homo sapien
tacgaggggtgtcctctagacgact

SEQ ID NO: 3567 - DNA, 25 bp, Homo sapien
ctgtcgaacacttcttctttagaag

SEQ ID NO: 3568 - DNA, 25 bp, Homo sapien
cttctaaagaagaagtgttcgacag

SEQ ID NO: 3569 - DNA, 25 bp, Homo sapien
ccacccgctccgtggtcgctcgggt

SEQ ID NO: 3570 - DNA, 25 bp, Homo sapien
acccgagcgaccacggagcgggtgg

SEQ ID NO: 3571 - DNA, 25 bp, Homo sapien
tcgtgagaccactggtactgagttg

SEQ ID NO: 3572 - DNA, 25 bp, Homo sapien
caactcagtaccagtggtctcacga

SEQ ID NO: 3573 - DNA, 25 bp, Homo sapien
ggacggagaaacttggataagagat

SEQ ID NO: 3574 - DNA, 25 bp, Homo sapien
atctcttatccaagtttctccgtcc

SEQ ID NO: 3575 - DNA, 25 bp, Homo sapien
tgtcgtctgcctgggtgcgaagact

SEQ ID NO: 3576 - DNA, 25 bp, Homo sapien
agtcttcgcacccaggcagacgaca

SEQ ID NO: 3577 - DNA, 25 bp, Homo sapien
cttacactcgactggaccttgtgac

SEQ ID NO: 3578 - DNA, 25 bp, Homo sapien
gtcacaaggtccagtcgagtgtaag

SEQ ID NO: 3579 - DNA, 25 bp, Homo sapien
agacgcccgttgtgccggctaccgg

SEQ ID NO: 3580 - DNA, 25 bp, Homo sapien
ccggtagccggcacaacgggcgtct

SEQ ID NO: 3581 - DNA, 25 bp, Homo sapien
gacccttctcagccgtaggtcatcc

SEQ ID NO: 3582 - DNA, 25 bp, Homo sapien
ggatgacctacggctgagaagggtc

SEQ ID NO: 3583 - DNA, 25 bp, Homo sapien
cgcgagacaccggcggcctgcggca

SEQ ID NO: 3584 - DNA, 25 bp, Homo sapien
tgccgcaggccgccggtgtctcgcg

SEQ ID NO: 3585 - DNA, 25 bp, Homo sapien
gcgcgagacaccggcggcctgcggc

SEQ ID NO: 3586 - DNA, 25 bp, Homo sapien
gccgcaggccgccggtgtctcgcgc

SEQ ID NO: 3587 - DNA, 25 bp, Homo sapien
gcgagacaccggcggcctgcggcac

SEQ ID NO: 3588 - DNA, 25 bp, Homo sapien
gtgccgcaggccgccggtgtctcgc

SEQ ID NO: 3589 - DNA, 25 bp, Homo sapien
ttggtccggaccaggactcggtacc

SEQ ID NO: 3590 - DNA, 25 bp, Homo sapien
ggtaccgagtcctggtccggaccaa

SEQ ID NO: 3591 - DNA, 25 bp, Homo sapien
caggcggcacttgggctcgaggccg

SEQ ID NO: 3592 - DNA, 25 bp, Homo sapien
cggcctcgagcccaagtgccgcctg

SEQ ID NO: 3593 - DNA, 25 bp, Homo sapien
gactcccgttctacactcgtaagaa

SEQ ID NO: 3594 - DNA, 25 bp, Homo sapien
ttcttacgagtgtagaacgggagtc

SEQ ID NO: 3595 - DNA, 25 bp, Homo sapien
cactcccggcaccgtccctcactaa

SEQ ID NO: 3596 - DNA, 25 bp, Homo sapien
ttagtgagggacggtgccgggagtg

SEQ ID NO: 3597 - DNA, 25 bp, Homo sapien
cgggacgccctgaaggaagtcgagg

SEQ ID NO: 3598 - DNA, 25 bp, Homo sapien
cctcgacttccttcagggcgtcccg

SEQ ID NO: 3599 - DNA, 25 bp, Homo sapien
ccggtctcccgcgaccagaacggag

SEQ ID NO: 3600 - DNA, 25 bp, Homo sapien
ctccgttctggtcgcgggagaccgg

SEQ ID NO: 3601 - DNA, 25 bp, Homo sapien
gcgctgggcaccgggcgcggtctgt

SEQ ID NO: 3602 - DNA, 25 bp, Homo sapien
acagaccgcgcccggtgcccagcgc

SEQ ID NO: 3603 - DNA, 25 bp, Homo sapien
gttaatatagacatccataacagac

SEQ ID NO: 3604 - DNA, 25 bp, Homo sapien
gtctgttatggatgtctatattaac

SEQ ID NO: 3605 - DNA, 25 bp, Homo sapien
ggacttgttaccgatagtcatgtag

SEQ ID NO: 3606 - DNA, 25 bp, Homo sapien
ctacatgactatcggtaacaagtcc

SEQ ID NO: 3607 - DNA, 25 bp, Homo sapien
aagttacatctactgtataaagaaa

SEQ ID NO: 3608 - DNA, 25 bp, Homo sapien
tttctttatacagtagatgtaactt

SEQ ID NO: 3609 - DNA, 25 bp, Homo sapien
caaactatactatcttatttaacct

SEQ ID NO: 3610 - DNA, 25 bp, Homo sapien
aggttaaataagatagtatagtttg

SEQ ID NO: 3611 - DNA, 25 bp, Homo sapien
tttactacgagtatagaaagggaag

SEQ ID NO: 3612 - DNA, 25 bp, Homo sapien
cttccctttctatactcgtagtaaa

SEQ ID NO: 3613 - DNA, 25 bp, Homo sapien
agaactaccagtcgtcgtgaggtat

SEQ ID NO: 3614 - DNA, 25 bp, Homo sapien
atacctcacgacgactggtagttct

SEQ ID NO: 3615 - DNA, 25 bp, Homo sapien
acaccagaggtgaatattgtcctac

SEQ ID NO: 3616 - DNA, 25 bp, Homo sapien
gtaggacaatattcacctctggtgt

SEQ ID NO: 3617 - DNA, 25 bp, Homo sapien
tgaggactagaggtgtccacaaaaa

SEQ ID NO: 3618 - DNA, 25 bp, Homo sapien
tttttgtggacacctctagtcctca

SEQ ID NO: 3619 - DNA, 25 bp, Homo sapien
cggactcccacgacgctgaaagggg

SEQ ID NO: 3620 - DNA, 25 bp, Homo sapien
cccctttcagcgtcgtgggagtccg

SEQ ID NO: 3621 - DNA, 25 bp, Homo sapien
tactcgatgaaagggatttactcct

SEQ ID NO: 3622 - DNA, 25 bp, Homo sapien
aggagtaaatccctttcatcgagta

SEQ ID NO: 3623 - DNA, 25 bp, Homo sapien
atctgggtccgtccgtttccatcca

SEQ ID NO: 3624 - DNA, 25 bp, Homo sapien
tggatggaaacggacggacccagat

SEQ ID NO: 3625 - DNA, 25 bp, Homo sapien
gtaaagaaattctgataatcattaa

SEQ ID NO: 3626 - DNA, 25 bp, Homo sapien
ttaatgattatcagaatttctttac

SEQ ID NO: 3627 - DNA, 25 bp, Homo sapien
gtttatgctaatttatacgtgtaag

SEQ ID NO: 3628 - DNA, 25 bp, Homo sapien
cttacacgtataaattagcataaac

SEQ ID NO: 3629 - DNA, 25 bp, Homo sapien
ttcagtctagtcggggcaacagaga

SEQ ID NO: 3630 - DNA, 25 bp, Homo sapien
tctctgttgccccgactagactgaa

SEQ ID NO: 3631 - DNA, 25 bp, Homo sapien
agtctagtcaagtaggtaaagaagt

SEQ ID NO: 3632 - DNA, 25 bp, Homo sapien
acttctttacctacttgactagact

SEQ ID NO: 3633 - DNA, 25 bp, Homo sapien
cacccggcaccggcgacacccgtca

SEQ ID NO: 3634 - DNA, 25 bp, Homo sapien
tgacgggtgtcgccggtgccgggtg

SEQ ID NO: 3635 - DNA, 25 bp, Homo sapien
ctcttggtctccctagggcagtaac

SEQ ID NO: 3636 - DNA, 25 bp, Homo sapien
gttactgccctagggagaccaagag

SEQ ID NO: 3637 - DNA, 25 bp, Homo sapien
tcgtttcgtacagccggtccgtcgt

SEQ ID NO: 3638 - DNA, 25 bp, Homo sapien
acgacggaccggctgtacgaaacga

SEQ ID NO: 3639 - DNA, 25 bp, Homo sapien
tccttggggaggtccaatttactac

SEQ ID NO: 3640 - DNA, 25 bp, Homo sapien
gtagtaaattggacctccccaagga

SEQ ID NO: 3641 - DNA, 25 bp, Homo sapien
gcgcgtctgggtcgcggctcgggct

SEQ ID NO: 3642 - DNA, 25 bp, Homo sapien
agcccgagccgcgacccagacgcgc

SEQ ID NO: 3643 - DNA, 25 bp, Homo sapien
gcgtgcgcgtctgggtcgcggctcg

SEQ ID NO: 3644 - DNA, 25 bp, Homo sapien
cgagccgcgacccagacgcgcacgc

SEQ ID NO: 3645 - DNA, 25 bp, Homo sapien
actgggcgcttgagggcccgcgcgg

SEQ ID NO: 3646 - DNA, 25 bp, Homo sapien
ccgcgcgggccctcaagcgcccagt

SEQ ID NO: 3647 - DNA, 25 bp, Homo sapien
gtcacatacctcgtatacaattcaa

SEQ ID NO: 3648 - DNA, 25 bp, Homo sapien
ttgaattgtatacgaggtatgtgac

SEQ ID NO: 3649 - DNA, 25 bp, Homo sapien
accgtgcctgactacaagttgatac

SEQ ID NO: 3650 - DNA, 25 bp, Homo sapien
gtatcaacttgtagtcaggcacggt

SEQ ID NO: 3651 - DNA, 25 bp, Homo sapien
gacagaacttccacgggtcgagatg

SEQ ID NO: 3652 - DNA, 25 bp, Homo sapien
catctcgacccgtggaagttctgtc

SEQ ID NO: 3653 - DNA, 25 bp, Homo sapien
cgcgccccgcgctactcgccgcgga

SEQ ID NO: 3654 - DNA, 25 bp, Homo sapien
tccgcggcgagtagcgcggggcgcg

SEQ ID NO: 3655 - DNA, 25 bp, Homo sapien
ccccgcgctactcgccgcggacgtg

SEQ ID NO: 3656 - DNA, 25 bp, Homo sapien
cacgtccgcggcgagtagcgcgggg

SEQ ID NO: 3657 - DNA, 25 bp, Homo sapien
tcttcggcgtacctctagaccgtgc

SEQ ID NO: 3658 - DNA, 25 bp, Homo sapien
gcacggtctagaggtacgccgaaga

SEQ ID NO: 3659 - DNA, 25 bp, Homo sapien
ttaccacctctgtcgggccctaccc

SEQ ID NO: 3660 - DNA, 25 bp, Homo sapien
gggtagggcccgacagaggtggtaa

SEQ ID NO: 3661 - DNA, 25 bp, Homo sapien
gaagagaggaccaccagcgggaacc

SEQ ID NO: 3662 - DNA, 25 bp, Homo sapien
ggttcccgctggtggtcctctcttc

SEQ ID NO: 3663 - DNA, 25 bp, Homo sapien
caagagggagtcttagaactctaaa

SEQ ID NO: 3664 - DNA, 25 bp, Homo sapien
tttagagttctaagactccctcttg

SEQ ID NO: 3665 - DNA, 25 bp, Homo sapien
tggagacacactttcgttacgagac

SEQ ID NO: 3666 - DNA, 25 bp, Homo sapien
gtctcgtaacgaaagtgtgtctcca

SEQ ID NO: 3667 - DNA, 25 bp, Homo sapien
tacagaaagaaactcgattctaaac

SEQ ID NO: 3668 - DNA, 25 bp, Homo sapien
gtttagaatcgagtttctttctgta

SEQ ID NO: 3669 - DNA, 25 bp, Homo sapien
ccgttgggatgaaccaaccgtcagg

SEQ ID NO: 3670 - DNA, 25 bp, Homo sapien
cctgacggttggttcatcccaacgg

SEQ ID NO: 3671 - DNA, 25 bp, Homo sapien
ggccgacctcgaggcctctcgcgcg

SEQ ID NO: 3672 - DNA, 25 bp, Homo sapien
cgcgcgagaggcctcgaggtcggcc

SEQ ID NO: 3673 - DNA, 25 bp, Homo sapien
gtcgatataactgcattcccataag

SEQ ID NO: 3674 - DNA, 25 bp, Homo sapien
cttatgggaatgcagttatatcgac

SEQ ID NO: 3675 - DNA, 25 bp, Homo sapien
actgtcattacggtcttaatttatc

SEQ ID NO: 3676 - DNA, 25 bp, Homo sapien
gataaattaagaccgtaatgacagt

SEQ ID NO: 3677 - DNA, 25 bp, Homo sapien
aagattataggtgtgttacagagat

SEQ ID NO: 3678 - DNA, 25 bp, Homo sapien
atctctgtaacacacctataatctt

SEQ ID NO: 3679 - DNA, 25 bp, Homo sapien
agtcatctacgatgaagtgactaag

SEQ ID NO: 3680 - DNA, 25 bp, Homo sapien
cttagtcacttcatcgtagatgact

SEQ ID NO: 3681 - DNA, 25 bp, Homo sapien
aaatgattgtgcttcgtttataaat

SEQ ID NO: 3682 - DNA, 25 bp, Homo sapien
atttataaacgaagcacaatcattt

SEQ ID NO: 3683 - DNA, 25 bp, Homo sapien
gtagcgaaagttgtggagcccgcca

SEQ ID NO: 3684 - DNA, 25 bp, Homo sapien
tggcgggctccacaactttcgctac

SEQ ID NO: 3685 - DNA, 25 bp, Homo sapien
acgaggtgtggtaagctccttcccc

SEQ ID NO: 3686 - DNA, 25 bp, Homo sapien
ggggaaggagcttaccacacctcgt

SEQ ID NO: 3687 - DNA, 25 bp, Homo sapien
actccgccgccggagctgggccggg

SEQ ID NO: 3688 - DNA, 25 bp, Homo sapien
cccggcccagctccggcggcggagt

SEQ ID NO: 3689 - DNA, 25 bp, Homo sapien
tggccgcgacgagggaccgcgcgag

SEQ ID NO: 3690 - DNA, 25 bp, Homo sapien
ctcgcgcggtccctcgtcgcggcca

SEQ ID NO: 3691 - DNA, 25 bp, Homo sapien
ccggggcctcgagcctgggcggacg

SEQ ID NO: 3692 - DNA, 25 bp, Homo sapien
cgtccgcccaggctcgaggccccgg

SEQ ID NO: 3693 - DNA, 25 bp, Homo sapien
gccccactcacaccggccaacatgg

SEQ ID NO: 3694 - DNA, 25 bp, Homo sapien
ccatgttggccggtgtgagtggggc

SEQ ID NO: 3695 - DNA, 25 bp, Homo sapien
ctccgtcgttccaacactctcacac

SEQ ID NO: 3696 - DNA, 25 bp, Homo sapien
gtgtgagagtgttggaacgacggag

SEQ ID NO: 3697 - DNA, 25 bp, Homo sapien
cgggtgtgcgggactcgcgggggac

SEQ ID NO: 3698 - DNA, 25 bp, Homo sapien
gtcccccgcgagtcccgcacacccg

SEQ ID NO: 3699 - DNA, 25 bp, Homo sapien
gccaaagccgcctgatcttaaagat

SEQ ID NO: 3700 - DNA, 25 bp, Homo sapien
atctttaagatcaggcggctttggc

SEQ ID NO: 3701 - DNA, 25 bp, Homo sapien
gaagtggtagacatgtttagtgagg

SEQ ID NO: 3702 - DNA, 25 bp, Homo sapien
cctcactaaacatgtctaccacttc

SEQ ID NO: 3703 - DNA, 25 bp, Homo sapien
gaaattgcgaaaggtattccagcat

SEQ ID NO: 3704 - DNA, 25 bp, Homo sapien
atgctggaatacctttcgcaatttc

SEQ ID NO: 3705 - DNA, 25 bp, Homo sapien
tgtggtcttaagtactctcctttcg

SEQ ID NO: 3706 - DNA, 25 bp, Homo sapien
cgaaaggagagtacttaagaccaca

SEQ ID NO: 3707 - DNA, 25 bp, Homo sapien
gacataatatacatgtggtcttaag

SEQ ID NO: 3708 - DNA, 25 bp, Homo sapien
cttaagaccacatgtatattatgtc

SEQ ID NO: 3709 - DNA, 25 bp, Homo sapien
ctcagtccacccaccgggacgggcc

SEQ ID NO: 3710 - DNA, 25 bp, Homo sapien
ggcccgtcccggtgggtggactgag

SEQ ID NO: 3711 - DNA, 25 bp, Homo sapien
aataaaagacttagtcgtagtctct

SEQ ID NO: 3712 - DNA, 25 bp, Homo sapien
agagactacgactaagtcttttatt

SEQ ID NO: 3713 - DNA, 25 bp, Homo sapien
atactttaatctttaatgtttgaac

SEQ ID NO: 3714 - DNA, 25 bp, Homo sapien
gttcaaacattaaagattaaagtat

SEQ ID NO: 3715 - DNA, 25 bp, Homo sapien
agaagtgaagtggaccgaaaccgtg

SEQ ID NO: 3716 - DNA, 25 bp, Homo sapien
cacggtttcggtccacttcacttct

SEQ ID NO: 3717 - DNA, 25 bp, Homo sapien
agaaatacatctactggggtttata

SEQ ID NO: 3718 - DNA, 25 bp, Homo sapien
tataaaccccagtagatgtatttct

SEQ ID NO: 3719 - DNA, 25 bp, Homo sapien
gacacacgtcatctgactccacagg

SEQ ID NO: 3720 - DNA, 25 bp, Homo sapien
cctgtggagtcagatgacgtgtgtc

SEQ ID NO: 3721 - DNA, 25 bp, Homo sapien
gaaggtttcaactgtgtggtctttg

SEQ ID NO: 3722 - DNA, 25 bp, Homo sapien
caaagaccacacagttgaaaccttc

SEQ ID NO: 3723 - DNA, 25 bp, Homo sapien
agttagggaatagtctcaagtgtaa

SEQ ID NO: 3724 - DNA, 25 bp, Homo sapien
ttacacttgagactattccctaact

SEQ ID NO: 3725 - DNA, 25 bp, Homo sapien
ttctgtaacaggtactataataaat

SEQ ID NO: 3726 - DNA, 25 bp, Homo sapien
atttattatagtacctgttacagaa

SEQ ID NO: 3727 - DNA, 25 bp, Homo sapien
actttaatttaatcactgactttat

SEQ ID NO: 3728 - DNA, 25 bp, Homo sapien
ataaagtcagtgattaaattaaagt

SEQ ID NO: 3729 - DNA, 25 bp, Homo sapien
acggtagtctgtctgtcatagatag

SEQ ID NO: 3730 - DNA, 25 bp, Homo sapien
ctatctatgacagacagactaccgt

SEQ ID NO: 3731 - DNA, 25 bp, Homo sapien
cacccgggtgctcggtaggacctcc

SEQ ID NO: 3732 - DNA, 25 bp, Homo sapien
ggaggtcctaccgagcacccgggtg

SEQ ID NO: 3733 - DNA, 25 bp, Homo sapien
ggtctttcccggtgccgtccaaaga

SEQ ID NO: 3734 - DNA, 25 bp, Homo sapien
tctttggacggcaccgggaaagacc

SEQ ID NO: 3735 - DNA, 25 bp, Homo sapien
gggcgtcgtcgagtcggagacggta

SEQ ID NO: 3736 - DNA, 25 bp, Homo sapien
taccgtctccgactcgacgacgccc

SEQ ID NO: 3737 - DNA, 25 bp, Homo sapien
agactcgtggtctcccgaaggactc

SEQ ID NO: 3738 - DNA, 25 bp, Homo sapien
gagtccttcgggagaccacgagtct

SEQ ID NO: 3739 - DNA, 25 bp, Homo sapien
accactcttaaaactgtcagtaatt

SEQ ID NO: 3740 - DNA, 25 bp, Homo sapien
aattactgacagttttaagagtggt

SEQ ID NO: 3741 - DNA, 25 bp, Homo sapien
ccgcggtcccgcagcctgcggcagt

SEQ ID NO: 3742 - DNA, 25 bp, Homo sapien
actgccgcaggctgcgggaccgcgg

SEQ ID NO: 3743 - DNA, 25 bp, Homo sapien
ttctaaaataatcgttcttactact

SEQ ID NO: 3744 - DNA, 25 bp, Homo sapien
agtagtaagaacgattattttagaa

SEQ ID NO: 3745 - DNA, 25 bp, Homo sapien
aggactacgactacacgaggaacct

SEQ ID NO: 3746 - DNA, 25 bp, Homo sapien
aggttcctcgtgtagtcgtagtcct

SEQ ID NO: 3747 - DNA, 25 bp, Homo sapien
ctgattcggggtgacctgatcccgg

SEQ ID NO: 3748 - DNA, 25 bp, Homo sapien
ccgggatcaggtcaccccgaatcag

SEQ ID NO: 3749 - DNA, 25 bp, Homo sapien
gtccgcacctaccacgccggccccg

SEQ ID NO: 3750 - DNA, 25 bp, Homo sapien
cggggccggcgtggtaggtgcggac

SEQ ID NO: 3751 - DNA, 25 bp, Homo sapien
cggtccgcacctaccacgccggccc

SEQ ID NO: 3752 - DNA, 25 bp, Homo sapien
gggccggcgtggtaggtgcggaccg

SEQ ID NO: 3753 - DNA, 25 bp, Homo sapien
ggcccggtccgcacctaccacgccg

SEQ ID NO: 3754 - DNA, 25 bp, Homo sapien
cggcgtggtaggtgcggaccgggcc

SEQ ID NO: 3755 - DNA, 25 bp, Homo sapien
aattacctctattttacagttacac

SEQ ID NO: 3756 - DNA, 25 bp, Homo sapien
gtgtaactgtaaaatagaggtaatt

SEQ ID NO: 3757 - DNA, 25 bp, Homo sapien
atagtcgtattttggtagtgttcat

SEQ ID NO: 3758 - DNA, 25 bp, Homo sapien
atgaacactaccaaaatacgactat

SEQ ID NO: 3759 - DNA, 25 bp, Homo sapien
gatcaagtcggtggcttccctcgat

SEQ ID NO: 3760 - DNA, 25 bp, Homo sapien
atcgagggaagccaccgacttgatc

SEQ ID NO: 3761 - DNA, 25 bp, Homo sapien
taaaccgggatgtgagtcagagaag

SEQ ID NO: 3762 - DNA, 25 bp, Homo sapien
cttctctgactcacatcccggttta

SEQ ID NO: 3763 - DNA, 25 bp, Homo sapien
tatctaaaatatgaccacaaattat

SEQ ID NO: 3764 - DNA, 25 bp, Homo sapien
ataatttgtggtcatattttagata

SEQ ID NO: 3765 - DNA, 25 bp, Homo sapien
cggtcgtttccgacaaggacacacg

SEQ ID NO: 3766 - DNA, 25 bp, Homo sapien
cgtgtgtccttgtcggaaacgaccg

SEQ ID NO: 3767 - DNA, 25 bp, Homo sapien
tcgacggcaccgtcacccagaccgg

SEQ ID NO: 3768 - DNA, 25 bp, Homo sapien
ccggtctgggtgacggtgccgtcga

SEQ ID NO: 3769 - DNA, 25 bp, Homo sapien
aataacggctgacttaaacgagtat

SEQ ID NO: 3770 - DNA, 25 bp, Homo sapien
atactcgtttaagtcagccgttatt

SEQ ID NO: 3771 - DNA, 25 bp, Homo sapien
tagtcaaagagtatcagtaggagat

SEQ ID NO: 3772 - DNA, 25 bp, Homo sapien
atctcctactgatactctttgacta

SEQ ID NO: 3773 - DNA, 25 bp, Homo sapien
atttactcataattgagtcttttta

SEQ ID NO: 3774 - DNA, 25 bp, Homo sapien
taaaaagactcaattatgagtaaat

SEQ ID NO: 3775 - DNA, 25 bp, Homo sapien
aatttactcataattgagtcttttt

SEQ ID NO: 3776 - DNA, 25 bp, Homo sapien
aaaaagactcaattatgagtaaatt

SEQ ID NO: 3777 - DNA, 25 bp, Homo sapien
ttttttccacagtagtagagaccat

SEQ ID NO: 3778 - DNA, 25 bp, Homo sapien
atggtctctactactgtggaaaaaa

SEQ ID NO: 3779 - DNA, 25 bp, Homo sapien
gtctcgtgcccgtacagcgtcgtcg

SEQ ID NO: 3780 - DNA, 25 bp, Homo sapien
cgacgacgctgtacgggcacgagac

SEQ ID NO: 3781 - DNA, 25 bp, Homo sapien
tcttgtaccgatctagaccaaaggg

SEQ ID NO: 3782 - DNA, 25 bp, Homo sapien
ccctttggtctagatcggtacaaga

SEQ ID NO: 3783 - DNA, 25 bp, Homo sapien
acccggagaaggtgcccccagtcga

SEQ ID NO: 3784 - DNA, 25 bp, Homo sapien
tcgactgggggcaccttctccgggt

SEQ ID NO: 3785 - DNA, 25 bp, Homo sapien
gaccgtcacccgccgcactggagac

SEQ ID NO: 3786 - DNA, 25 bp, Homo sapien
gtctccagtgcggcgggtgacggtc

SEQ ID NO: 3787 - DNA, 25 bp, Homo sapien
ggacactctcaggattagctaaaga

SEQ ID NO: 3788 - DNA, 25 bp, Homo sapien
tctttagctaatcctgagagtgtcc

SEQ ID NO: 3789 - DNA, 25 bp, Homo sapien
ccccggacacctgtagcaagaccta

SEQ ID NO: 3790 - DNA, 25 bp, Homo sapien
taggtcttgctacaggtgtccgggg

SEQ ID NO: 3791 - DNA, 25 bp, Homo sapien
gttcagaagcgagagtcgaacgccc

SEQ ID NO: 3792 - DNA, 25 bp, Homo sapien
gggcgttcgactctcgcttctgaac

SEQ ID NO: 3793 - DNA, 25 bp, Homo sapien
acgtggggccacaaatcggtcaccc

SEQ ID NO: 3794 - DNA, 25 bp, Homo sapien
gggtgaccgatttgtggccccacgt

SEQ ID NO: 3795 - DNA, 25 bp, Homo sapien
acatcccgggcccggtgaggacagg

SEQ ID NO: 3796 - DNA, 25 bp, Homo sapien
cctgtcctcaccgggcccgggatgt

SEQ ID NO: 3797 - DNA, 25 bp, Homo sapien
cgtgggacgtgacatcggtgtagac

SEQ ID NO: 3798 - DNA, 25 bp, Homo sapien
gtctacaccgatgtcacgtcccacg

SEQ ID NO: 3799 - DNA, 25 bp, Homo sapien
gatgagtctagacacagatatcttt

SEQ ID NO: 3800 - DNA, 25 bp, Homo sapien
aaagatatctgtgtctagactcatc

SEQ ID NO: 3801 - DNA, 25 bp, Homo sapien
aagtaataccgtgcccatcagaggg

SEQ ID NO: 3802 - DNA, 25 bp, Homo sapien
ccctctgatgggcacggtattactt

SEQ ID NO: 3803 - DNA, 25 bp, Homo sapien
gctgtgttagatgtgtccaggacaa

SEQ ID NO: 3804 - DNA, 25 bp, Homo sapien
ttgtcctggacacatctaacacagc

SEQ ID NO: 3805 - DNA, 25 bp, Homo sapien
acaaatttcaaatagacttgtaaat

SEQ ID NO: 3806 - DNA, 25 bp, Homo sapien
atttacaagtctatttgaaatttgt

SEQ ID NO: 3807 - DNA, 25 bp, Homo sapien
tctttttatatgtctaaattgcctt

SEQ ID NO: 3808 - DNA, 25 bp, Homo sapien
aaggcaatttagacatataaaaaga

SEQ ID NO: 3809 - DNA, 25 bp, Homo sapien
ttctttttatatgtctaaattgcct

SEQ ID NO: 3810 - DNA, 25 bp, Homo sapien
aggcaatttagacatataaaaagaa

SEQ ID NO: 3811 - DNA, 25 bp, Homo sapien
tattctttttatatgtctaaattgc

SEQ ID NO: 3812 - DNA, 25 bp, Homo sapien
gcaatttagacatataaaaagaata

SEQ ID NO: 3813 - DNA, 25 bp, Homo sapien
agtgccccgcgggcactgcaccccg

SEQ ID NO: 3814 - DNA, 25 bp, Homo sapien
cggggtgcagtgcccgcggggcact

SEQ ID NO: 3815 - DNA, 25 bp, Homo sapien
cgacaccagacagagaaggtcacca

SEQ ID NO: 3816 - DNA, 25 bp, Homo sapien
tggtgaccttctctgtctggtgtcg

SEQ ID NO: 3817 - DNA, 25 bp, Homo sapien
agcgtcgcgcgggacccaccccaga

SEQ ID NO: 3818 - DNA, 25 bp, Homo sapien
tctggggtgggtcccgcgcgacgct

SEQ ID NO: 3819 - DNA, 25 bp, Homo sapien
ccagcgtcgcgcgggacccacccca

SEQ ID NO: 3820 - DNA, 25 bp, Homo sapien
tggggtgggtcccgcgcgacgctgg

SEQ ID NO: 3821 - DNA, 25 bp, Homo sapien
gccccagcgtcgcgcgggacccacc

SEQ ID NO: 3822 - DNA, 25 bp, Homo sapien
ggtgggtcccgcgcgacgctggggc

SEQ ID NO: 3823 - DNA, 25 bp, Homo sapien
acggaagcacgtcccttccggcggc

SEQ ID NO: 3824 - DNA, 25 bp, Homo sapien
gccgccggaagggacgtgcttccgt

SEQ ID NO: 3825 - DNA, 25 bp, Homo sapien
gggttgccccgcagacgccggtggg

SEQ ID NO: 3826 - DNA, 25 bp, Homo sapien
cccaccggcgtctgcggggcaaccc

SEQ ID NO: 3827 - DNA, 25 bp, Homo sapien
ctcccgacgggttgccccgcagacg

SEQ ID NO: 3828 - DNA, 25 bp, Homo sapien
cgtctgcggggcaacccgtcgggag

SEQ ID NO: 3829 - DNA, 25 bp, Homo sapien
cctcccgacgggttgccccgcagac

SEQ ID NO: 3830 - DNA, 25 bp, Homo sapien
gtctgcggggcaacccgtcgggagg

SEQ ID NO: 3831 - DNA, 25 bp, Homo sapien
cgagaggagaggcccggacgcagta

SEQ ID NO: 3832 - DNA, 25 bp, Homo sapien
tactgcgtccgggcctctcctctcg

SEQ ID NO: 3833 - DNA, 25 bp, Homo sapien
ggtcgctacctaggcgcgcgcgctc

SEQ ID NO: 3834 - DNA, 25 bp, Homo sapien
gagcgcgcgcgcctaggtagcgacc

SEQ ID NO: 3835 - DNA, 25 bp, Homo sapien
tgcgaaacttttgttggcagaatct

SEQ ID NO: 3836 - DNA, 25 bp, Homo sapien
agattctgccaacaaaagtttcgca

SEQ ID NO: 3837 - DNA, 25 bp, Homo sapien
tacctactcacatcctcacgacaaa

SEQ ID NO: 3838 - DNA, 25 bp, Homo sapien
tttgtcgtgaggatgtgagtaggta

SEQ ID NO: 3839 - DNA, 25 bp, Homo sapien
aacagtgtcggctgacccatctggt

SEQ ID NO: 3840 - DNA, 25 bp, Homo sapien
accagatgggtcagccgacactgtt

SEQ ID NO: 3841 - DNA, 25 bp, Homo sapien
agtgtaggtcctaatcgtccccgcg

SEQ ID NO: 3842 - DNA, 25 bp, Homo sapien
cgcggggacgattaggacctacact

SEQ ID NO: 3843 - DNA, 25 bp, Homo sapien
gtaacaaacgaaaagcggcccatgc

SEQ ID NO: 3844 - DNA, 25 bp, Homo sapien
gcatgggccgcttttcgtttgttac

SEQ ID NO: 3845 - DNA, 25 bp, Homo sapien
tactactataaacgcacaattgtat

SEQ ID NO: 3846 - DNA, 25 bp, Homo sapien
atacaattgtgcgtttatagtagta

SEQ ID NO: 3847 - DNA, 25 bp, Homo sapien
ggccgtcctcacggtcgaggtgtgt

SEQ ID NO: 3848 - DNA, 25 bp, Homo sapien
acacacctcgaccgtgaggacggcc

SEQ ID NO: 3849 - DNA, 25 bp, Homo sapien
tcgggatccgagtcggggacggtct

SEQ ID NO: 3850 - DNA, 25 bp, Homo sapien
agaccgtccccgactcggatcccga

SEQ ID NO: 3851 - DNA, 25 bp, Homo sapien
aaccacgagtacgatcgattactac

SEQ ID NO: 3852 - DNA, 25 bp, Homo sapien
gtagtaatcgatcgtactcgtggtt

SEQ ID NO: 3853 - DNA, 25 bp, Homo sapien
gatgtagcacgacttctttcgtaaa

SEQ ID NO: 3854 - DNA, 25 bp, Homo sapien
tttacgaaagaagtcgtgctacatc

SEQ ID NO: 3855 - DNA, 25 bp, Homo sapien
aggaagcgtcgctggcgagggtccg

SEQ ID NO: 3856 - DNA, 25 bp, Homo sapien
cggaccctcgccagcgacgcttcct

SEQ ID NO: 3857 - DNA, 25 bp, Homo sapien
attagagaactagggaaaggagacg

SEQ ID NO: 3858 - DNA, 25 bp, Homo sapien
cgtctcctttccctagttctctaat

SEQ ID NO: 3859 - DNA, 25 bp, Homo sapien
aaaccaggtcaagaccgccagggac

SEQ ID NO: 3860 - DNA, 25 bp, Homo sapien
gtccctggcggtcttgacctggttt

SEQ ID NO: 3861 - DNA, 25 bp, Homo sapien
atcgagaaggccattgtcgactaga

SEQ ID NO: 3862 - DNA, 25 bp, Homo sapien
tctagtcgacaatggccttctcgat

SEQ ID NO: 3863 - DNA, 25 bp, Homo sapien
agtaagttatcatgaaagtgtaaga

SEQ ID NO: 3864 - DNA, 25 bp, Homo sapien
tcttacactttcatgataacttact

SEQ ID NO: 3865 - DNA, 25 bp, Homo sapien
gcccctggcccttcgcgcgtcaggg

SEQ ID NO: 3866 - DNA, 25 bp, Homo sapien
ccctgacgcgcgaagggccaggggc

SEQ ID NO: 3867 - DNA, 25 bp, Homo sapien
acttgagaagtgaccgctcggggac

SEQ ID NO: 3868 - DNA, 25 bp, Homo sapien
gtccccgagcggtcacttctcaagt

SEQ ID NO: 3869 - DNA, 25 bp, Homo sapien
aacagccctggtaggtggatacgac

SEQ ID NO: 3870 - DNA, 25 bp, Homo sapien
gtcgtatccacctaccagggctgtt

SEQ ID NO: 3871 - DNA, 25 bp, Homo sapien
acctcgggcacgagctggtcgacga

SEQ ID NO: 3872 - DNA, 25 bp, Homo sapien
tcgtcgaccagctcgtgcccgaggt

SEQ ID NO: 3873 - DNA, 25 bp, Homo sapien
agaacaactgatctaggaccgtcac

SEQ ID NO: 3874 - DNA, 25 bp, Homo sapien
gtgacggtcctagatcagttgttct

SEQ ID NO: 3875 - DNA, 25 bp, Homo sapien
gtgacccaggtattctccacgagga

SEQ ID NO: 3876 - DNA, 25 bp, Homo sapien
tcctcgtggagaatacctgggtcac

SEQ ID NO: 3877 - DNA, 25 bp, Homo sapien
aaagacatgatagaaaacagtatag

SEQ ID NO: 3878 - DNA, 25 bp, Homo sapien
ctatactgttttctatcatgtcttt

SEQ ID NO: 3879 - DNA, 25 bp, Homo sapien
gaaatcttgaaaataagactacaaa

SEQ ID NO: 3880 - DNA, 25 bp, Homo sapien
tttgtagtcttattttcaagatttc

SEQ ID NO: 3881 - DNA, 25 bp, Homo sapien
cctggtcgcgacgaagccgaagcgt

SEQ ID NO: 3882 - DNA, 25 bp, Homo sapien
acgcttcggcttcgtcgcgaccagg

SEQ ID NO: 3883 - DNA, 25 bp, Homo sapien
gttcccgaccacgtgtagacacggg

SEQ ID NO: 3884 - DNA, 25 bp, Homo sapien
cccgtgtctacacgtggtcgggaac

SEQ ID NO: 3885 - DNA, 25 bp, Homo sapien
gtaatgaccaagatagtcaagtcgt

SEQ ID NO: 3886 - DNA, 25 bp, Homo sapien
acgacttgactatcttggtcattac

SEQ ID NO: 3887 - DNA, 25 bp, Homo sapien
ttctactctcccacctgttggaact

SEQ ID NO: 3888 - DNA, 25 bp, Homo sapien
agttccaacaggtgggagagtagaa

SEQ ID NO: 3889 - DNA, 25 bp, Homo sapien
gggcgcggaccgacagcgccaacgg

SEQ ID NO: 3890 - DNA, 25 bp, Homo sapien
ccgttggcgctgtcggtccgcgccc

SEQ ID NO: 3891 - DNA, 25 bp, Homo sapien
tcgaccgccgtgcagcccctggcca

SEQ ID NO: 3892 - DNA, 25 bp, Homo sapien
tggccaggggctgcacggcggtcga

SEQ ID NO: 3893 - DNA, 25 bp, Homo sapien
cgtgcgggagggatgggccgtgtcc

SEQ ID NO: 3894 - DNA, 25 bp, Homo sapien
ggacacggcccatccctcccgcacg

SEQ ID NO: 3895 - DNA, 25 bp, Homo sapien
ctctctccaacttaacttcctaaat

SEQ ID NO: 3896 - DNA, 25 bp, Homo sapien
atttaggaagttaagttggagagag

SEQ ID NO: 3897 - DNA, 25 bp, Homo sapien
agaggagtttaggagtaggagtatt

SEQ ID NO: 3898 - DNA, 25 bp, Homo sapien
aatactcctactcctaaactcctct

SEQ ID NO: 3899 - DNA, 25 bp, Homo sapien
gaggacgtgttcgagttgtaggtcc

SEQ ID NO: 3900 - DNA, 25 bp, Homo sapien
ggacctacaactcgaacacgtcctc

SEQ ID NO: 3901 - DNA, 25 bp, Homo sapien
aatttttgtaggcattacaagaggt

SEQ ID NO: 3902 - DNA, 25 bp, Homo sapien
acctcttgtaatgcctacaaaaatt

SEQ ID NO: 3903 - DNA, 25 bp, Homo sapien
cggccgccgacctgtgccccctgag

SEQ ID NO: 3904 - DNA, 25 bp, Homo sapien
ctcagggggcacaggtcggcggccg

SEQ ID NO: 3905 - DNA, 25 bp, Homo sapien
tgtatataacatgattgtagtgtat

SEQ ID NO: 3906 - DNA, 25 bp, Homo sapien
atacactacaatcatgttatataca

SEQ ID NO: 3907 - DNA, 25 bp, Homo sapien
tcgaccaggggggtgtggtgcacct

SEQ ID NO: 3908 - DNA, 25 bp, Homo sapien
aggtgcaccacacccccctggtcga

SEQ ID NO: 3909 - DNA, 25 bp, Homo sapien
acacgggacacctacggaggagtca

SEQ ID NO: 3910 - DNA, 25 bp, Homo sapien
tgactcctccgtaggtgtcccgtgt

SEQ ID NO: 3911 - DNA, 25 bp, Homo sapien
tccgcgggcacgacgggcgactgtg

SEQ ID NO: 3912 - DNA, 25 bp, Homo sapien
cacagtcgcccgtcgtgcccgcgga

SEQ ID NO: 3913 - DNA, 25 bp, Homo sapien
cagacagattgagaccctaaggtaa

SEQ ID NO: 3914 - DNA, 25 bp, Homo sapien
ttaccttagggtctcaatctgtctg

SEQ ID NO: 3915 - DNA, 25 bp, Homo sapien
ataaccctaaggtatatgttaacat

SEQ ID NO: 3916 - DNA, 25 bp, Homo sapien
atgttaacatataccttagggttat

SEQ ID NO: 3917 - DNA, 25 bp, Homo sapien
cgccggtcgctccgggccggcgcgc

SEQ ID NO: 3918 - DNA, 25 bp, Homo sapien
gcgcgccggcccggagcgaccggcg

SEQ ID NO: 3919 - DNA, 25 bp, Homo sapien
cggtcgctccgggccggcgcgcccg

SEQ ID NO: 3920 - DNA, 25 bp, Homo sapien
cgggcgcgccggcccggagcgaccg

SEQ ID NO: 3921 - DNA, 25 bp, Homo sapien
ccggtcgctccgggccggcgcgccc

SEQ ID NO: 3922 - DNA, 25 bp, Homo sapien
gggcgcgccggcccggagcgaccgg

SEQ ID NO: 3923 - DNA, 25 bp, Homo sapien
gccggtcgctccgggccggcgcgcc

SEQ ID NO: 3924 - DNA, 25 bp, Homo sapien
ggcgcgccggcccggagcgaccggc

SEQ ID NO: 3925 - DNA, 25 bp, Homo sapien
acgactgtgttcaatctgtgctgga

SEQ ID NO: 3926 - DNA, 25 bp, Homo sapien
tccagcacagattgaacacagtcgt

SEQ ID NO: 3927 - DNA, 25 bp, Homo sapien
gcgtggtttttggtcatctcccaat

SEQ ID NO: 3928 - DNA, 25 bp, Homo sapien
attgggagatgaccaaaaaccacgc

SEQ ID NO: 3929 - DNA, 25 bp, Homo sapien
ttcgtccttagagccatcaactacc

SEQ ID NO: 3930 - DNA, 25 bp, Homo sapien
ggtagttgatggctctaaggacgaa

SEQ ID NO: 3931 - DNA, 25 bp, Homo sapien
agctaaaacagcaaggttatttctg

SEQ ID NO: 3932 - DNA, 25 bp, Homo sapien
cagaaataaccttgctgttttagct

SEQ ID NO: 3933 - DNA, 25 bp, Homo sapien
tatataccccagtgcagtagaagga

SEQ ID NO: 3934 - DNA, 25 bp, Homo sapien
tccttctactgcactggggtatata

SEQ ID NO: 3935 - DNA, 25 bp, Homo sapien
ataaagtgctttgttaagaagtaaa

SEQ ID NO: 3936 - DNA, 25 bp, Homo sapien
tttacttcttaacaaagcactttat

SEQ ID NO: 3937 - DNA, 25 bp, Homo sapien
gtgagaaccacgggtcacggtggta

SEQ ID NO: 3938 - DNA, 25 bp, Homo sapien
taccaccgtgacccgtggttctcac

SEQ ID NO: 3939 - DNA, 25 bp, Homo sapien
gaaaaccgtcgtgaacacttcccta

SEQ ID NO: 3940 - DNA, 25 bp, Homo sapien
tagggaagtgttcacgacggttttc

SEQ ID NO: 3941 - DNA, 25 bp, Homo sapien
taagggacgggttcgcacctagaac

SEQ ID NO: 3942 - DNA, 25 bp, Homo sapien
gttctaggtgcgaacccgtccctta

SEQ ID NO: 3943 - DNA, 25 bp, Homo sapien
ggagggcccaatccgtatccgggag

SEQ ID NO: 3944 - DNA, 25 bp, Homo sapien
ctcccggatacggattgggccctcc

SEQ ID NO: 3945 - DNA, 25 bp, Homo sapien
cctgatattggtgtacttgttgtct

SEQ ID NO: 3946 - DNA, 25 bp, Homo sapien
agacaacaagtacaccaatatcagg

SEQ ID NO: 3947 - DNA, 25 bp, Homo sapien
aaagtatcacaacctgatattggtg

SEQ ID NO: 3948 - DNA, 25 bp, Homo sapien
caccaatatcaggttgtgatacttt

SEQ ID NO: 3949 - DNA, 25 bp, Homo sapien
ccctaggatctcgaacaaaaagtat

SEQ ID NO: 3950 - DNA, 25 bp, Homo sapien
atactttttgttcgagatcctaggg

SEQ ID NO: 3951 - DNA, 25 bp, Homo sapien
taagacactagggtttggaagtcga

SEQ ID NO: 3952 - DNA, 25 bp, Homo sapien
tcgacttccaaaccctagtgtctta

SEQ ID NO: 3953 - DNA, 25 bp, Homo sapien
ggtctccgggcgtcaccgaccgtgg

SEQ ID NO: 3954 - DNA, 25 bp, Homo sapien
ccacggtcggtgacgcccggagacc

SEQ ID NO: 3955 - DNA, 25 bp, Homo sapien
gcggtgccgctcacaccaggtcggt

SEQ ID NO: 3956 - DNA, 25 bp, Homo sapien
accgacctggtgtgagcggcaccgc

SEQ ID NO: 3957 - DNA, 25 bp, Homo sapien
tcgtcccctgatcccggtgtcagag

SEQ ID NO: 3958 - DNA, 25 bp, Homo sapien
ctctgacaccgggatcaggggacga

SEQ ID NO: 3959 - DNA, 25 bp, Homo sapien
gtcgtcccctgatcccggtgtcaga

SEQ ID NO: 3960 - DNA, 25 bp, Homo sapien
tctgacaccgggatcaggggacgac

SEQ ID NO: 3961 - DNA, 25 bp, Homo sapien
aagattacgttccaggtcatagaaa

SEQ ID NO: 3962 - DNA, 25 bp, Homo sapien
tttctatgacctggaacgtaatctt

SEQ ID NO: 3963 - DNA, 25 bp, Homo sapien
ctgggcctgggcatgcgacgacgcg

SEQ ID NO: 3964 - DNA, 25 bp, Homo sapien
cgcgtcgtcgcatgcccaggcccag

SEQ ID NO: 3965 - DNA, 25 bp, Homo sapien
agcaatcattttttcgtttcgcgat

SEQ ID NO: 3966 - DNA, 25 bp, Homo sapien
atcgcgaaacgaaaaaatgattgct

SEQ ID NO: 3967 - DNA, 25 bp, Homo sapien
ctccgtcaaaccagagatccggtac

SEQ ID NO: 3968 - DNA, 25 bp, Homo sapien
gtaccggatctctggtttgacggag

SEQ ID NO: 3969 - DNA, 25 bp, Homo sapien
ggccctcccacggacgggctgaagg

SEQ ID NO: 3970 - DNA, 25 bp, Homo sapien
ccttcagcccgtccgtgggagggcc

SEQ ID NO: 3971 - DNA, 25 bp, Homo sapien
cggtggtcgcaaaaccgagggcgca

SEQ ID NO: 3972 - DNA, 25 bp, Homo sapien
tgcgccctcggttttgcgaccaccg

SEQ ID NO: 3973 - DNA, 25 bp, Homo sapien
aagagtatcgaggtcttcaaccttt

SEQ ID NO: 3974 - DNA, 25 bp, Homo sapien
aaaggttgaagacctcgatactctt

SEQ ID NO: 3975 - DNA, 25 bp, Homo sapien
gctcccacgcgggacggtagagtca

SEQ ID NO: 3976 - DNA, 25 bp, Homo sapien
tgactctaccgtcccgcgtgggagc

SEQ ID NO: 3977 - DNA, 25 bp, Homo sapien
cgctgtcgggcggcgaagggaggcg

SEQ ID NO: 3978 - DNA, 25 bp, Homo sapien
cgcctcccttcgccgcccgacagcg

SEQ ID NO: 3979 - DNA, 25 bp, Homo sapien
gcgctgtcgggcggcgaagggaggc

SEQ ID NO: 3980 - DNA, 25 bp, Homo sapien
gcctcccttcgccgcccgacagcgc

SEQ ID NO: 3981 - DNA, 25 bp, Homo sapien
gcgtcgggaccgctggaccccgagg

SEQ ID NO: 3982 - DNA, 25 bp, Homo sapien
cctcggggtccagcggtcccgacgc

SEQ ID NO: 3983 - DNA, 25 bp, Homo sapien
actaacccaatcgagggacagaggg

SEQ ID NO: 3984 - DNA, 25 bp, Homo sapien
ccctctgtccctcgattgggttagt

SEQ ID NO: 3985 - DNA, 25 bp, Homo sapien
tgtaagggtcaatctattcatttat

SEQ ID NO: 3986 - DNA, 25 bp, Homo sapien
ataaatgaatagattgacccttaca

SEQ ID NO: 3987 - DNA, 25 bp, Homo sapien
cggaccgctgacatgccgcgcggat

SEQ ID NO: 3988 - DNA, 25 bp, Homo sapien
atccgcgcggcatgtcagcggtccg

SEQ ID NO: 3989 - DNA, 25 bp, Homo sapien
agagagattgtgagtaccgttcgag

SEQ ID NO: 3990 - DNA, 25 bp, Homo sapien
ctcgaacggtactcacaatctctct

SEQ ID NO: 3991 - DNA, 25 bp, Homo sapien
aggtccaagagtagcacaagggccg

SEQ ID NO: 3992 - DNA, 25 bp, Homo sapien
cggcccttgtgctactcttggacct

SEQ ID NO: 3993 - DNA, 25 bp, Homo sapien
tcttaaaataatcaagcatcgtcgt

SEQ ID NO: 3994 - DNA, 25 bp, Homo sapien
acgacgatgcttgattattttaaga

SEQ ID NO: 3995 - DNA, 25 bp, Homo sapien
ttttttgactcgatagtcgggagac

SEQ ID NO: 3996 - DNA, 25 bp, Homo sapien
gtctcccgactatcgagtcaaaaaa

SEQ ID NO: 3997 - DNA, 25 bp, Homo sapien
cgtccacaacatgcggggcacggag

SEQ ID NO: 3998 - DNA, 25 bp, Homo sapien
ctccgtgccccgcatgttgtggacg

SEQ ID NO: 3999 - DNA, 25 bp, Homo sapien
gggctggcggtgccgtaggcgcgtg

SEQ ID NO: 4000 - DNA, 25 bp, Homo sapien
cacgcgcctacggcaccgccagccc

SEQ ID NO: 4001 - DNA, 25 bp, Homo sapien
gtgaagacgtggacgagaccctaga

SEQ ID NO: 4002 - DNA, 25 bp, Homo sapien
tctagggtctcgtccacgtcttcac

SEQ ID NO: 4003 - DNA, 25 bp, Homo sapien
aacacgcctgacgtatcttttgagt

SEQ ID NO: 4004 - DNA, 25 bp, Homo sapien
actcaaaagatacgtcaggcgtgtt

SEQ ID NO: 4005 - DNA, 25 bp, Homo sapien
cggacgtcccaggagcacggacgac

SEQ ID NO: 4006 - DNA, 25 bp, Homo sapien
gtcgtccgtgctcctgggacgtccg

SEQ ID NO: 4007 - DNA, 25 bp, Homo sapien
tgaatacttcttaaactataataga

SEQ ID NO: 4008 - DNA, 25 bp, Homo sapien
tctattatagtttaagaagtattca

SEQ ID NO: 4009 - DNA, 25 bp, Homo sapien
ctctgggtcttcctgtctgggccga

SEQ ID NO: 4010 - DNA, 25 bp, Homo sapien
tcggcccagacaggaagacccagag

SEQ ID NO: 4011 - DNA, 25 bp, Homo sapien
gatctttgtaagttatctaacaacg

SEQ ID NO: 4012 - DNA, 25 bp, Homo sapien
cgttgttagataacttacaaagatc

SEQ ID NO: 4013 - DNA, 25 bp, Homo sapien
ccaactgaggattcggtcaacaacg

SEQ ID NO: 4014 - DNA, 25 bp, Homo sapien
cgttgttgaccgaatcctcagttgg

SEQ ID NO: 4015 - DNA, 25 bp, Homo sapien
ggagtctggatcctcgtcgcgggca

SEQ ID NO: 4016 - DNA, 25 bp, Homo sapien
tgcccgcgacgaggatccagactcc

SEQ ID NO: 4017 - DNA, 25 bp, Homo sapien
cctcgtcgcgggcatggggcggtcc

SEQ ID NO: 4018 - DNA, 25 bp, Homo sapien
ggaccgccccatgcccgcgacgagg

SEQ ID NO: 4019 - DNA, 25 bp, Homo sapien
tttacattatttggtacgttttcaa

SEQ ID NO: 4020 - DNA, 25 bp, Homo sapien
ttgaaaacgtaccaaataatgtaaa

SEQ ID NO: 4021 - DNA, 25 bp, Homo sapien
gtgaccactactgtgtctaccatag

SEQ ID NO: 4022 - DNA, 25 bp, Homo sapien
ctatggtagacacagtagtggtcac

SEQ ID NO: 4023 - DNA, 25 bp, Homo sapien
cacgagtgtatccactcccgacccc

SEQ ID NO: 4024 - DNA, 25 bp, Homo sapien
ggggtcgggagtggatacactcgtg

SEQ ID NO: 4025 - DNA, 25 bp, Homo sapien
gcgagcgggccgaggcaacgggcta

SEQ ID NO: 4026 - DNA, 25 bp, Homo sapien
tagcccgttgcctcggcccgctcgc

SEQ ID NO: 4027 - DNA, 25 bp, Homo sapien
ggctccggcggaggctcgcggtcca

SEQ ID NO: 4028 - DNA, 25 bp, Homo sapien
tggaccgcgagcctccgccggagcc

SEQ ID NO: 4029 - DNA, 25 bp, Homo sapien
gccgaggtgcggtcccaggaggagt

SEQ ID NO: 4030 - DNA, 25 bp, Homo sapien
actcctcctgggaccgcacctcggc

SEQ ID NO: 4031 - DNA, 25 bp, Homo sapien
gtctcctgtcctcccttgaagtgtg

SEQ ID NO: 4032 - DNA, 25 bp, Homo sapien
cacacttcaagggaggacaggagac

SEQ ID NO: 4033 - DNA, 25 bp, Homo sapien
tatattattaggctattaagatagt

SEQ ID NO: 4034 - DNA, 25 bp, Homo sapien
actatcttaatagcctaataatata

SEQ ID NO: 4035 - DNA, 25 bp, Homo sapien
gttatattattaggctattaagata

SEQ ID NO: 4036 - DNA, 25 bp, Homo sapien
tatcttaatagcctaataatataac

SEQ ID NO: 4037 - DNA, 25 bp, Homo sapien
aggactcggggaggtctgtgacggt

SEQ ID NO: 4038 - DNA, 25 bp, Homo sapien
accgtcacagacctccccgagtcct

SEQ ID NO: 4039 - DNA, 25 bp, Homo sapien
gaccgagtctgagacgtaaaagacg

SEQ ID NO: 4040 - DNA, 25 bp, Homo sapien
cgtcttttacgtctcagactcggtc

SEQ ID NO: 4041 - DNA, 25 bp, Homo sapien
ccgctgggagtaccccttccagtga

SEQ ID NO: 4042 - DNA, 25 bp, Homo sapien
tcactggaaggggtactcccagcgg

SEQ ID NO: 4043 - DNA, 25 bp, Homo sapien
tctcacaaacctgtgtaactgaaac

SEQ ID NO: 4044 - DNA, 25 bp, Homo sapien
gtttcagttacacaggtttgtgaga

SEQ ID NO: 4045 - DNA, 25 bp, Homo sapien
gtgaccatttatctccatcatttac

SEQ ID NO: 4046 - DNA, 25 bp, Homo sapien
gtaaatgatggagataaatggtcac

SEQ ID NO: 4047 - DNA, 25 bp, Homo sapien
ggagagtgacctcgccggtcactac

SEQ ID NO: 4048 - DNA, 25 bp, Homo sapien
gtagtgaccggcgaggtcactctcc

SEQ ID NO: 4049 - DNA, 25 bp, Homo sapien
ggacctcaatcctcaagagacgacc

SEQ ID NO: 4050 - DNA, 25 bp, Homo sapien
ggtcgtctcttgaggattgaggtcc

SEQ ID NO: 4051 - DNA, 25 bp, Homo sapien
tcgtttcatttagagacaaggttaa

SEQ ID NO: 4052 - DNA, 25 bp, Homo sapien
ttaaccttgtctctaaatgaaacga

SEQ ID NO: 4053 - DNA, 25 bp, Homo sapien
cctgtctccgtacagagactccggt

SEQ ID NO: 4054 - DNA, 25 bp, Homo sapien
accggagtctctgtacggagacagg

SEQ ID NO: 4055 - DNA, 25 bp, Homo sapien
tcttataagaacggtagtattcttt

SEQ ID NO: 4056 - DNA, 25 bp, Homo sapien
aaagaatactaccgttcttataaga

SEQ ID NO: 4057 - DNA, 25 bp, Homo sapien
acttcattactcgtgtctattcgga

SEQ ID NO: 4058 - DNA, 25 bp, Homo sapien
tccgaatagacacgagtaatgaagt

SEQ ID NO: 4059 - DNA, 25 bp, Homo sapien
ctggtccttgtatccagactaaagg

SEQ ID NO: 4060 - DNA, 25 bp, Homo sapien
cctttagtctggatacaaggaccag

SEQ ID NO: 4061 - DNA, 25 bp, Homo sapien
accggtgaaggatgctggtagacgg

SEQ ID NO: 4062 - DNA, 25 bp, Homo sapien
ccgtctaccagcatccttcaccggt

SEQ ID NO: 4063 - DNA, 25 bp, Homo sapien
agaagttgtaggttgtataataaaa

SEQ ID NO: 4064 - DNA, 25 bp, Homo sapien
ttttattatacaacctacaacttct

SEQ ID NO: 4065 - DNA, 25 bp, Homo sapien
gagcccccgattcggaggaccggag

SEQ ID NO: 4066 - DNA, 25 bp, Homo sapien
ctccggtcctccgaatcgggggctc

SEQ ID NO: 4067 - DNA, 25 bp, Homo sapien
ggagcccccgattcggaggaccgga

SEQ ID NO: 4068 - DNA, 25 bp, Homo sapien
tccggtcctccgaatcgggggctcc

SEQ ID NO: 4069 - DNA, 25 bp, Homo sapien
gagtccgagtcgtgtcagccccacg

SEQ ID NO: 4070 - DNA, 25 bp, Homo sapien
cgtggggctgacacgactcggactc

SEQ ID NO: 4071 - DNA, 25 bp, Homo sapien
gccggccgcgtgcgcccaagagaca

SEQ ID NO: 4072 - DNA, 25 bp, Homo sapien
tgtctcttgggcgcacgcggccggc

SEQ ID NO: 4073 - DNA, 25 bp, Homo sapien
ataaaacaaactacaaactgataaa

SEQ ID NO: 4074 - DNA, 25 bp, Homo sapien
tttatcagtttgtagtttgttttat

SEQ ID NO: 4075 - DNA, 25 bp, Homo sapien
caactccgaagtaggtgaaaatggt

SEQ ID NO: 4076 - DNA, 25 bp, Homo sapien
accattttcacctacttcggagttg

SEQ ID NO: 4077 - DNA, 25 bp, Homo sapien
cccgacccgagctcctcgccgggcc

SEQ ID NO: 4078 - DNA, 25 bp, Homo sapien
ggcccggcgaggagctcgggtcggg

SEQ ID NO: 4079 - DNA, 25 bp, Homo sapien
ggcccgacccgagctcctcgccggg

SEQ ID NO: 4080 - DNA, 25 bp, Homo sapien
cccggcgaggagctcgggtcgggcc

SEQ ID NO: 4081 - DNA, 25 bp, Homo sapien
caggacgttcggtaccttccaccga

SEQ ID NO: 4082 - DNA, 25 bp, Homo sapien
tcggtggaaggtaccgaacgtcctg

SEQ ID NO: 4083 - DNA, 25 bp, Homo sapien
caggggccatcggaagaggtgtctc

SEQ ID NO: 4084 - DNA, 25 bp, Homo sapien
gagacacctcttccgatggcccctg

SEQ ID NO: 4085 - DNA, 25 bp, Homo sapien
gtatacagtttctttgttaacagta

SEQ ID NO: 4086 - DNA, 25 bp, Homo sapien
tactgttaacaaagaaactgtatac

SEQ ID NO: 4087 - DNA, 25 bp, Homo sapien
gggacgactacaatgggaccatcct

SEQ ID NO: 4088 - DNA, 25 bp, Homo sapien
aggatggtcccattgtagtcgtccc

SEQ ID NO: 4089 - DNA, 25 bp, Homo sapien
aaggacagttcaggcggcgggcgcc

SEQ ID NO: 4090 - DNA, 25 bp, Homo sapien
ggcgcccgccgcctgaactgtcctt

SEQ ID NO: 4091 - DNA, 25 bp, Homo sapien
ggcccacgccccgcagacccgcgcc

SEQ ID NO: 4092 - DNA, 25 bp, Homo sapien
ggcgcgggtctgcggggcgtgggcc

SEQ ID NO: 4093 - DNA, 25 bp, Homo sapien
tggcccacgccccgcagacccgcgc

SEQ ID NO: 4094 - DNA, 25 bp, Homo sapien
gcgcgggtctgcggggcgtgggcca

SEQ ID NO: 4095 - DNA, 25 bp, Homo sapien
gtggcccacgccccgcagacccgcg

SEQ ID NO: 4096 - DNA, 25 bp, Homo sapien
cgcgggtctgcggggcgtgggccac

SEQ ID NO: 4097 - DNA, 25 bp, Homo sapien
gccgcctcgcggaggctggtggacc

SEQ ID NO: 4098 - DNA, 25 bp, Homo sapien
ggtccaccagcctccgcgaggcggc

SEQ ID NO: 4099 - DNA, 25 bp, Homo sapien
cgagtgtggagcttgcgggggtcag

SEQ ID NO: 4100 - DNA, 25 bp, Homo sapien
ctgacccccgcaagctccacactcg

SEQ ID NO: 4101 - DNA, 25 bp, Homo sapien
agcgggctgagcgggacggagcccc

SEQ ID NO: 4102 - DNA, 25 bp, Homo sapien
ggggctccgtcccgctcagcccgct

SEQ ID NO: 4103 - DNA, 25 bp, Homo sapien
ggagcgggctgagcgggacggagcc

SEQ ID NO: 4104 - DNA, 25 bp, Homo sapien
ggctccgtcccgctcagcccgctcc

SEQ ID NO: 4105 - DNA, 25 bp, Homo sapien
agagatccgatgaaccggagtacct

SEQ ID NO: 4106 - DNA, 25 bp, Homo sapien
aggtactccggttcatcggatctct

SEQ ID NO: 4107 - DNA, 25 bp, Homo sapien
cctcgttgacacagaattcgttgac

SEQ ID NO: 4108 - DNA, 25 bp, Homo sapien
gtcaacgaattctgtgtcaacgagg

SEQ ID NO: 4109 - DNA, 25 bp, Homo sapien
ggaccggccccagccgcccacttcg

SEQ ID NO: 4110 - DNA, 25 bp, Homo sapien
cgaagtgggcggctggggccggtcc

SEQ ID NO: 4111 - DNA, 25 bp, Homo sapien
cactggggtcggccaaccacctcag

SEQ ID NO: 4112 - DNA, 25 bp, Homo sapien
ctgaggtggttggccgaccccagtg

SEQ ID NO: 4113 - DNA, 25 bp, Homo sapien
tcccccatccccccgacagtgtgtg

SEQ ID NO: 4114 - DNA, 25 bp, Homo sapien
cacacactgtcggggggatggggga

SEQ ID NO: 4115 - DNA, 25 bp, Homo sapien
gtggtgggcgaggagcaacacccgg

SEQ ID NO: 4116 - DNA, 25 bp, Homo sapien
ccgggtgttgctcctcgcccaccac

SEQ ID NO: 4117 - DNA, 25 bp, Homo sapien
acttcaagagttgttgcatttctac

SEQ ID NO: 4118 - DNA, 25 bp, Homo sapien
gtagaaatgcaacaactcttgaagt

SEQ ID NO: 4119 - DNA, 25 bp, Homo sapien
cgggccggcccgtctgtgcggaggg

SEQ ID NO: 4120 - DNA, 25 bp, Homo sapien
ccctccgcacagacgggccggcccg

SEQ ID NO: 4121 - DNA, 25 bp, Homo sapien
gcgggccggcccgtctgtgcggagg

SEQ ID NO: 4122 - DNA, 25 bp, Homo sapien
cctccgcacagacgggccggcccgc

SEQ ID NO: 4123 - DNA, 25 bp, Homo sapien
tcccgcgccgcgctcacgcaaggcg

SEQ ID NO: 4124 - DNA, 25 bp, Homo sapien
cgccttgcgtgagcgcggcgcggga

SEQ ID NO: 4125 - DNA, 25 bp, Homo sapien
acgggcctctgggagccgccgctaa

SEQ ID NO: 4126 - DNA, 25 bp, Homo sapien
ttagcggcggctcccagaggcccgt

SEQ ID NO: 4127 - DNA, 25 bp, Homo sapien
cgtgagacgaatacgaccgtgtcct

SEQ ID NO: 4128 - DNA, 25 bp, Homo sapien
aggacacggtcgtattcgtctcacg

SEQ ID NO: 4129 - DNA, 25 bp, Homo sapien
tcctcgacgggacttatgcaagtct

SEQ ID NO: 4130 - DNA, 25 bp, Homo sapien
agacttgcataagtcccgtcgagga

SEQ ID NO: 4131 - DNA, 25 bp, Homo sapien
gaaacccattaaatagtcctgaaac

SEQ ID NO: 4132 - DNA, 25 bp, Homo sapien
gtttcaggactatttaatgggtttc

SEQ ID NO: 4133 - DNA, 25 bp, Homo sapien
gaacgtctttatggagcttcaaagg

SEQ ID NO: 4134 - DNA, 25 bp, Homo sapien
cctttgaagctccataaagacgttc

SEQ ID NO: 4135 - DNA, 25 bp, Homo sapien
catccagacaccggacaagccccgg

SEQ ID NO: 4136 - DNA, 25 bp, Homo sapien
ccggggcttgtccggtgtctggatg

SEQ ID NO: 4137 - DNA, 25 bp, Homo sapien
tgagactcgtacgatgaccacaccg

SEQ ID NO: 4138 - DNA, 25 bp, Homo sapien
cggtgtggtcatcgtacgagtctca

SEQ ID NO: 4139 - DNA, 25 bp, Homo sapien
tgactagtatccttacgacgagggt

SEQ ID NO: 4140 - DNA, 25 bp, Homo sapien
accctcgtcgtaaggatactagtca

SEQ ID NO: 4141 - DNA, 25 bp, Homo sapien
aatataaatacaactataaaccagt

SEQ ID NO: 4142 - DNA, 25 bp, Homo sapien
actggtttatagttgtatttatatt

SEQ ID NO: 4143 - DNA, 25 bp, Homo sapien
agtaaagtgcagttttattgcattt

SEQ ID NO: 4144 - DNA, 25 bp, Homo sapien
aaatgcaataaaactgcactttact

SEQ ID NO: 4145 - DNA, 25 bp, Homo sapien
atgttaaacttcttgaggtttgtgt

SEQ ID NO: 4146 - DNA, 25 bp, Homo sapien
acacaaacctcaagaagtttaacat

SEQ ID NO: 4147 - DNA, 25 bp, Homo sapien
ctctgcgaggaggtttctgtcaggt

SEQ ID NO: 4148 - DNA, 25 bp, Homo sapien
acctgacagaaacctcctcgcagag

SEQ ID NO: 4149 - DNA, 25 bp, Homo sapien
ggagcctcgccgacaatccttcttg

SEQ ID NO: 4150 - DNA, 25 bp, Homo sapien
caagaaggattgtcggcgaggctcc

SEQ ID NO: 4151 - DNA, 25 bp, Homo sapien
tgactccgtggacggacagatccat

SEQ ID NO: 4152 - DNA, 25 bp, Homo sapien
atggatctgtccgtccacggagtca

SEQ ID NO: 4153 - DNA, 25 bp, Homo sapien
cccggcgtcgcaccccaggccgtga

SEQ ID NO: 4154 - DNA, 25 bp, Homo sapien
tcacggcctggggtgcgacgccggg

SEQ ID NO: 4155 - DNA, 25 bp, Homo sapien
tccgtctcgacaaccacggagggta

SEQ ID NO: 4156 - DNA, 25 bp, Homo sapien
taccctccgtggttgtcgagacgga

SEQ ID NO: 4157 - DNA, 25 bp, Homo sapien
gtactatcggtttctacttatctaa

SEQ ID NO: 4158 - DNA, 25 bp, Homo sapien
ttagataagtagaaaccgatagtac

SEQ ID NO: 4159 - DNA, 25 bp, Homo sapien
tcgggcaccatagccggggggtctg

SEQ ID NO: 4160 - DNA, 25 bp, Homo sapien
cagaccccccggctatggtgcccga

SEQ ID NO: 4161 - DNA, 25 bp, Homo sapien
gtttctataaatatacttttgacgt

SEQ ID NO: 4162 - DNA, 25 bp, Homo sapien
acgtcaaaagtatatttatagaaac

SEQ ID NO: 4163 - DNA, 25 bp, Homo sapien
caacaactgttttaggtcttgttcg

SEQ ID NO: 4164 - DNA, 25 bp, Homo sapien
cgaacaagacctaaaacagttgttg

SEQ ID NO: 4165 - DNA, 25 bp, Homo sapien
acggcgactgaatctgcggtgtgta

SEQ ID NO: 4166 - DNA, 25 bp, Homo sapien
tacacaccgcagattcagtcgccgt

SEQ ID NO: 4167 - DNA, 25 bp, Homo sapien
aaacgaaagacaggacgatattaac

SEQ ID NO: 4168 - DNA, 25 bp, Homo sapien
gttaatatcgtcctgtctttcgttt

SEQ ID NO: 4169 - DNA, 25 bp, Homo sapien
aactgatatatcaaactcttactca

SEQ ID NO: 4170 - DNA, 25 bp, Homo sapien
tgagtaagagtttgatatatcagtt

SEQ ID NO: 4171 - DNA, 25 bp, Homo sapien
tcacacacctgtgttcggtgaacgt

SEQ ID NO: 4172 - DNA, 25 bp, Homo sapien
acgttcaccgaacacaggtgtgtga

SEQ ID NO: 4173 - DNA, 25 bp, Homo sapien
cttagacttcaaaactctggagact

SEQ ID NO: 4174 - DNA, 25 bp, Homo sapien
agtctccagagttttgaagtctaag

SEQ ID NO: 4175 - DNA, 25 bp, Homo sapien
gatgcacgtcgtgccttggacccgt

SEQ ID NO: 4176 - DNA, 25 bp, Homo sapien
acgggtccaaggcacgacgtgcatc

SEQ ID NO: 4177 - DNA, 25 bp, Homo sapien
actgtttcggcactgtgcggtccac

SEQ ID NO: 4178 - DNA, 25 bp, Homo sapien
gtggaccgcacagtgccgaaacagt

SEQ ID NO: 4179 - DNA, 25 bp, Homo sapien
agtcacgggtatgtaacgagattac

SEQ ID NO: 4180 - DNA, 25 bp, Homo sapien
gtaatctcgttacatacccgtgact

SEQ ID NO: 4181 - DNA, 25 bp, Homo sapien
gaacgttgtccgtcgaacggcccca

SEQ ID NO: 4182 - DNA, 25 bp, Homo sapien
tggggccgttcgacggacaacgttc

SEQ ID NO: 4183 - DNA, 25 bp, Homo sapien
tccaagacaaagattgccgaacagg

SEQ ID NO: 4184 - DNA, 25 bp, Homo sapien
cctgttcggcaatctttgtcttgga

SEQ ID NO: 4185 - DNA, 25 bp, Homo sapien
ttcaaattcggttatcacccaacac

SEQ ID NO: 4186 - DNA, 25 bp, Homo sapien
gtgttgggtgataaccgaatttgaa

SEQ ID NO: 4187 - DNA, 25 bp, Homo sapien
ccgacgacaccaaggctcgtttcgt

SEQ ID NO: 4188 - DNA, 25 bp, Homo sapien
acgaaacgagccttggtgtcgtcgg

SEQ ID NO: 4189 - DNA, 25 bp, Homo sapien
taatagagaagatagccgggttcaa

SEQ ID NO: 4190 - DNA, 25 bp, Homo sapien
ttgaacccggctatcttctctatta

SEQ ID NO: 4191 - DNA, 25 bp, Homo sapien
gtgtcggaaacgagctaacaagaac

SEQ ID NO: 4192 - DNA, 25 bp, Homo sapien
gttcttgttagctcgtttccgacac

SEQ ID NO: 4193 - DNA, 25 bp, Homo sapien
agctcttatccgttaaccgaagtcg

SEQ ID NO: 4194 - DNA, 25 bp, Homo sapien
cgacttcggttaacggataagagct

SEQ ID NO: 4195 - DNA, 25 bp, Homo sapien
cgactgcggtgagcggagggtgcgc

SEQ ID NO: 4196 - DNA, 25 bp, Homo sapien
gcgcaccctccgctcaccgcagtcg

SEQ ID NO: 4197 - DNA, 25 bp, Homo sapien
tatcccgcacacttgcactcgggcg

SEQ ID NO: 4198 - DNA, 25 bp, Homo sapien
cgcccgagtgcaagtgtgcgggata

SEQ ID NO: 4199 - DNA, 25 bp, Homo sapien
gtagctcgaacttctgacagcccac

SEQ ID NO: 4200 - DNA, 25 bp, Homo sapien
gtgggctgtcagaagttcgagctac

SEQ ID NO: 4201 - DNA, 25 bp, Homo sapien
gttagtagtataaagggtcgtgcac

SEQ ID NO: 4202 - DNA, 25 bp, Homo sapien
gtgcacgaccctttatactactaac

SEQ ID NO: 4203 - DNA, 25 bp, Homo sapien
gacgtctgtccgggaccccgcaccc

SEQ ID NO: 4204 - DNA, 25 bp, Homo sapien
gggtgcggggtcccggacagacgtc

SEQ ID NO: 4205 - DNA, 25 bp, Homo sapien
aattttataaggctagcgagtataa

SEQ ID NO: 4206 - DNA, 25 bp, Homo sapien
ttatactcgctagccttataaaatt

SEQ ID NO: 4207 - DNA, 25 bp, Homo sapien
gcgggcagggtcacggcccacagcg

SEQ ID NO: 4208 - DNA, 25 bp, Homo sapien
cgctgtgggccgtgaccctgcccgc

SEQ ID NO: 4209 - DNA, 25 bp, Homo sapien
acccacgttctgtatggtcagtcag

SEQ ID NO: 4210 - DNA, 25 bp, Homo sapien
ctgactgaccatacagaacgtgggt

SEQ ID NO: 4211 - DNA, 25 bp, Homo sapien
gtatcagtttataatgtatagatct

SEQ ID NO: 4212 - DNA, 25 bp, Homo sapien
agatctatacattataaactgatac

SEQ ID NO: 4213 - DNA, 25 bp, Homo sapien
aaatgtatcagtttataatgtatag

SEQ ID NO: 4214 - DNA, 25 bp, Homo sapien
ctatacattataaactgatacattt

SEQ ID NO: 4215 - DNA, 25 bp, Homo sapien
ggcctgggctctgtcggcctgggcg

SEQ ID NO: 4216 - DNA, 25 bp, Homo sapien
cgcccaggccgacagagcccaggcc

SEQ ID NO: 4217 - DNA, 25 bp, Homo sapien
tggcctaccgcagaggccaagcggt

SEQ ID NO: 4218 - DNA, 25 bp, Homo sapien
accgcttggcctctgcggtaggcca

SEQ ID NO: 4219 - DNA, 25 bp, Homo sapien
gtacgggcgcctgcgggtgttgcgc

SEQ ID NO: 4220 - DNA, 25 bp, Homo sapien
gcgcaacacccgcaggcgcccgtac

SEQ ID NO: 4221 - DNA, 25 bp, Homo sapien
gcgggtggtcggacgcgacgcgacg

SEQ ID NO: 4222 - DNA, 25 bp, Homo sapien
cgtcgcgtcgcgtccgaccacccgc

SEQ ID NO: 4223 - DNA, 25 bp, Homo sapien
gccgtcgcgggtggtcggacgcgac

SEQ ID NO: 4224 - DNA, 25 bp, Homo sapien
gtcgcgtccgaccacccgcgacggc

SEQ ID NO: 4225 - DNA, 25 bp, Homo sapien
ggccgtcgcgggtggtcggacgcga

SEQ ID NO: 4226 - DNA, 25 bp, Homo sapien
tcgcgtccgaccacccgcgacggcc

SEQ ID NO: 4227 - DNA, 25 bp, Homo sapien
tatgtgtatagacgaaattagtaat

SEQ ID NO: 4228 - DNA, 25 bp, Homo sapien
attactaatttcgtctatacacata

SEQ ID NO: 4229 - DNA, 25 bp, Homo sapien
agaaagacacaaatgttatcctagt

SEQ ID NO: 4230 - DNA, 25 bp, Homo sapien
actaggataacatttgtgtctttct

SEQ ID NO: 4231 - DNA, 25 bp, Homo sapien
agacacaaatgttatcctagtaaaa

SEQ ID NO: 4232 - DNA, 25 bp, Homo sapien
ttttactaggataacatttgtgtct

SEQ ID NO: 4233 - DNA, 25 bp, Homo sapien
tacgccgaagatttagtccaccatt

SEQ ID NO: 4234 - DNA, 25 bp, Homo sapien
aatggtggactaaatcttcggcgta

SEQ ID NO: 4235 - DNA, 25 bp, Homo sapien
tccgccggctctacgagcacgcgcg

SEQ ID NO: 4236 - DNA, 25 bp, Homo sapien
cgcgcgtgctcgtagagccggcgga

SEQ ID NO: 4237 - DNA, 25 bp, Homo sapien
cgactccgccggctctacgagcacg

SEQ ID NO: 4238 - DNA, 25 bp, Homo sapien
cgtgctcgtagagccggcggagtcg

SEQ ID NO: 4239 - DNA, 25 bp, Homo sapien
aattatagaggggatacccatgact

SEQ ID NO: 4240 - DNA, 25 bp, Homo sapien
agtcatgggtatcccctctataatt

SEQ ID NO: 4241 - DNA, 25 bp, Homo sapien
acgaccagtggtcacccacctcccg

SEQ ID NO: 4242 - DNA, 25 bp, Homo sapien
cgggaggtgggtgaccactggtcgt

SEQ ID NO: 4243 - DNA, 25 bp, Homo sapien
ctaaacagtctaagtatttaacaag

SEQ ID NO: 4244 - DNA, 25 bp, Homo sapien
cttgttaaatacttagactgtttag

SEQ ID NO: 4245 - DNA, 25 bp, Homo sapien
gccgccgcctgtgcgctgggccatg

SEQ ID NO: 4246 - DNA, 25 bp, Homo sapien
catggcccagcgcacaggcggcggc

SEQ ID NO: 4247 - DNA, 25 bp, Homo sapien
acgaaggcgagacacactccccttg

SEQ ID NO: 4248 - DNA, 25 bp, Homo sapien
caaggggagtgtgtctcgccttcgt

SEQ ID NO: 4249 - DNA, 25 bp, Homo sapien
acactcgagtactgtccctcgggac

SEQ ID NO: 4250 - DNA, 25 bp, Homo sapien
gtcccgagggacagtactcgagtgt

SEQ ID NO: 4251 - DNA, 25 bp, Homo sapien
gaaggaactaatttattaagaatga

SEQ ID NO: 4252 - DNA, 25 bp, Homo sapien
tcattcttaataaattagttccttc

SEQ ID NO: 4253 - DNA, 25 bp, Homo sapien
tcacaggacttgtcgtagtaaggtt

SEQ ID NO: 4254 - DNA, 25 bp, Homo sapien
aaccttactacgacaagtcctgtga

SEQ ID NO: 4255 - DNA, 25 bp, Homo sapien
tcagtttaccatatacattttagta

SEQ ID NO: 4256 - DNA, 25 bp, Homo sapien
tactaaaatgtatatggtaaactga

SEQ ID NO: 4257 - DNA, 25 bp, Homo sapien
attagtgacgtaattatgacgactc

SEQ ID NO: 4258 - DNA, 25 bp, Homo sapien
gagtcgtcataattacgtcactaat

SEQ ID NO: 4259 - DNA, 25 bp, Homo sapien
aagcctcacgtgtcggtgcggctcc

SEQ ID NO: 4260 - DNA, 25 bp, Homo sapien
ggagccgcaccgacacgtgaggctt

SEQ ID NO: 4261 - DNA, 25 bp, Homo sapien
gtcgacgtgtagtgtaggacactag

SEQ ID NO: 4262 - DNA, 25 bp, Homo sapien
ctagtgtcctacactacacgtcgac

SEQ ID NO: 4263 - DNA, 25 bp, Homo sapien
tcgcgcccctgcgcttgggcctcgg

SEQ ID NO: 4264 - DNA, 25 bp, Homo sapien
ccgaggcccaagcgcaggggcgcga

SEQ ID NO: 4265 - DNA, 25 bp, Homo sapien
ggaacgtcctggctccgtatacgcc

SEQ ID NO: 4266 - DNA, 25 bp, Homo sapien
ggcgtatacggagccaggacgttcc

SEQ ID NO: 4267 - DNA, 25 bp, Homo sapien
gcggcccggtccgtcagagagaccc

SEQ ID NO: 4268 - DNA, 25 bp, Homo sapien
gggtctctctgacggaccgggccgc

SEQ ID NO: 4269 - DNA, 25 bp, Homo sapien
gaaccgcggcccggtccgtcagaga

SEQ ID NO: 4270 - DNA, 25 bp, Homo sapien
tctctgacggaccgggccgcggttc

SEQ ID NO: 4271 - DNA, 25 bp, Homo sapien
cctgtcggtccgaccgactacgccg

SEQ ID NO: 4272 - DNA, 25 bp, Homo sapien
cggcgtagtcggtcggaccgacagg

SEQ ID NO: 4273 - DNA, 25 bp, Homo sapien
gtcaaccatgattgcagtagcaaat

SEQ ID NO: 4274 - DNA, 25 bp, Homo sapien
atttgctactgcaatcatggttgac

SEQ ID NO: 4275 - DNA, 25 bp, Homo sapien
aggtattattactatgttatttgta

SEQ ID NO: 4276 - DNA, 25 bp, Homo sapien
tacaaataacatagtaataatacct

SEQ ID NO: 4277 - DNA, 25 bp, Homo sapien
aaggtattattactatgttatttgt

SEQ ID NO: 4278 - DNA, 25 bp, Homo sapien
acaaataacatagtaataatacctt

SEQ ID NO: 4279 - DNA, 25 bp, Homo sapien
tagtccttccgctcgggacggcacg

SEQ ID NO: 4280 - DNA, 25 bp, Homo sapien
cgtgccgtcccgagcggaaggacta

SEQ ID NO: 4281 - DNA, 25 bp, Homo sapien
tcagtccgggcttcggttgtaggac

SEQ ID NO: 4282 - DNA, 25 bp, Homo sapien
gtcctacaaccgaagcccggactga

SEQ ID NO: 4283 - DNA, 25 bp, Homo sapien
gggtcttcgatcaaattaccgtaat

SEQ ID NO: 4284 - DNA, 25 bp, Homo sapien
attacggtaatttgatcgaagaccc

SEQ ID NO: 4285 - DNA, 25 bp, Homo sapien
aaagagacagtccgtcacaccggta

SEQ ID NO: 4286 - DNA, 25 bp, Homo sapien
taccggtgtgacggactgtctcttt

SEQ ID NO: 4287 - DNA, 25 bp, Homo sapien
actgctaccgtgctctatcttcgta

SEQ ID NO: 4288 - DNA, 25 bp, Homo sapien
tacgaagatagagcacggtagcagt

SEQ ID NO: 4289 - DNA, 25 bp, Homo sapien
ccctatctctcgtcgaacttccgtc

SEQ ID NO: 4290 - DNA, 25 bp, Homo sapien
gacggaagttcgacgagagataggg

SEQ ID NO: 4291 - DNA, 25 bp, Homo sapien
cgtctcgggaagagggagccgacgg

SEQ ID NO: 4292 - DNA, 25 bp, Homo sapien
ccgtcggctccctcttcccgagacg

SEQ ID NO: 4293 - DNA, 25 bp, Homo sapien
tgaccgtctcgggaagagggagccg

SEQ ID NO: 4294 - DNA, 25 bp, Homo sapien
cggctccctcttcccgagacggtca

SEQ ID NO: 4295 - DNA, 25 bp, Homo sapien
ctctagtctattgttaaactaaaaa

SEQ ID NO: 4296 - DNA, 25 bp, Homo sapien
tttttagtttaacaatagactagag

SEQ ID NO: 4297 - DNA, 25 bp, Homo sapien
ataacgacagtgaaacaactgcaag

SEQ ID NO: 4298 - DNA, 25 bp, Homo sapien
cttgcagttgtttcactgtcgttat

SEQ ID NO: 4299 - DNA, 25 bp, Homo sapien
cgtcggcacggaccgggtcgccgta

SEQ ID NO: 4300 - DNA, 25 bp, Homo sapien
tacggcgacccggtccgtgccgacg

SEQ ID NO: 4301 - DNA, 25 bp, Homo sapien
cgcccgtcggcacggaccgggtcgc

SEQ ID NO: 4302 - DNA, 25 bp, Homo sapien
gcgacccggtccgtgccgacgggcg

SEQ ID NO: 4303 - DNA, 25 bp, Homo sapien
tttctataaggttctacatcgttat

SEQ ID NO: 4304 - DNA, 25 bp, Homo sapien
ataacgatgtagaaccttatagaaa

SEQ ID NO: 4305 - DNA, 25 bp, Homo sapien
gaaccatgtggtctcccatagtcct

SEQ ID NO: 4306 - DNA, 25 bp, Homo sapien
aggactatgggagaccacatggttc

SEQ ID NO: 4307 - DNA, 25 bp, Homo sapien
aggtgcttggcggacgagaaccggg

SEQ ID NO: 4308 - DNA, 25 bp, Homo sapien
cccggttctcgtccgccaagcacct

SEQ ID NO: 4309 - DNA, 25 bp, Homo sapien
ttaaagtaaacgagccacacttatc

SEQ ID NO: 4310 - DNA, 25 bp, Homo sapien
gataagtgtggctcgtttactttaa

SEQ ID NO: 4311 - DNA, 25 bp, Homo sapien
agacgggtgtacaccttggagtcac

SEQ ID NO: 4312 - DNA, 25 bp, Homo sapien
gtgactccaaggtgtacacccgtct

SEQ ID NO: 4313 - DNA, 25 bp, Homo sapien
tggaagaagcttacaagtctgttaa

SEQ ID NO: 4314 - DNA, 25 bp, Homo sapien
ttaacagacttgtaagcttcttcca

SEQ ID NO: 4315 - DNA, 25 bp, Homo sapien
ggtacccacatagaccgagctacgt

SEQ ID NO: 4316 - DNA, 25 bp, Homo sapien
acgtagctcggtctatgtgggtacc

SEQ ID NO: 4317 - DNA, 25 bp, Homo sapien
aagaaaatacacttagacttaataa

SEQ ID NO: 4318 - DNA, 25 bp, Homo sapien
ttattaagtctaagtgtattttctt

SEQ ID NO: 4319 - DNA, 25 bp, Homo sapien
taaaacggtatttatagtgagaact

SEQ ID NO: 4320 - DNA, 25 bp, Homo sapien
agttctcactataaataccgtttta

SEQ ID NO: 4321 - DNA, 25 bp, Homo sapien
ttcatgaacaaccaaactttaacag

SEQ ID NO: 4322 - DNA, 25 bp, Homo sapien
ctgttaaagtttggttgttcatgaa

SEQ ID NO: 4323 - DNA, 25 bp, Homo sapien
cgttgagataataaagtaccacttg

SEQ ID NO: 4324 - DNA, 25 bp, Homo sapien
caagtggtactttattatctcaacg

SEQ ID NO: 4325 - DNA, 25 bp, Homo sapien
ggacatactgtgagaattccggtga

SEQ ID NO: 4326 - DNA, 25 bp, Homo sapien
tcaccggaattctcacagtatgtcc

SEQ ID NO: 4327 - DNA, 25 bp, Homo sapien
gagacggcccctgacatcctaactc

SEQ ID NO: 4328 - DNA, 25 bp, Homo sapien
gagttaggatgtcaggggccgtctc

SEQ ID NO: 4329 - DNA, 25 bp, Homo sapien
cgtaccgtccgcgactcgcaccccc

SEQ ID NO: 4330 - DNA, 25 bp, Homo sapien
gggggtgcgagtcgcggacggtacg

SEQ ID NO: 4331 - DNA, 25 bp, Homo sapien
ccggactagtagcttagggacttcc

SEQ ID NO: 4332 - DNA, 25 bp, Homo sapien
ggaagtccctaagctactagtccgg

SEQ ID NO: 4333 - DNA, 25 bp, Homo sapien
attctacacgtaaagagtcaattga

SEQ ID NO: 4334 - DNA, 25 bp, Homo sapien
tcaattgactctttacgtgtagaat

SEQ ID NO: 4335 - DNA, 25 bp, Homo sapien
aggaagcaccttgtcgtccgcgaca

SEQ ID NO: 4336 - DNA, 25 bp, Homo sapien
tgtcgcggacgacaaggtgcttcct

SEQ ID NO: 4337 - DNA, 25 bp, Homo sapien
aggaaagagaatgagaccagtctcg

SEQ ID NO: 4338 - DNA, 25 bp, Homo sapien
cgagactggtctcattctctttcct

SEQ ID NO: 4339 - DNA, 25 bp, Homo sapien
agacactaggctccctccctttagg

SEQ ID NO: 4340 - DNA, 25 bp, Homo sapien
cctaaagggagggagcctagtgtct

SEQ ID NO: 4341 - DNA, 25 bp, Homo sapien
cttgtatacctataacgagtaatat

SEQ ID NO: 4342 - DNA, 25 bp, Homo sapien
atattactcgttataggtatacaag

SEQ ID NO: 4343 - DNA, 25 bp, Homo sapien
tccgattgtaattccaggtaaaact

SEQ ID NO: 4344 - DNA, 25 bp, Homo sapien
agttttacctggaattacaatcgga

SEQ ID NO: 4345 - DNA, 25 bp, Homo sapien
gacgtaactcgtgccctggacattt

SEQ ID NO: 4346 - DNA, 25 bp, Homo sapien
aaatgtccagggcacgagttacgtc

SEQ ID NO: 4347 - DNA, 25 bp, Homo sapien
aggaagatctaattaagcgtccgag

SEQ ID NO: 4348 - DNA, 25 bp, Homo sapien
ctcggacgcttaattagatcttcct

SEQ ID NO: 4349 - DNA, 25 bp, Homo sapien
tctcgtcgcggcgggactcgtcgag

SEQ ID NO: 4350 - DNA, 25 bp, Homo sapien
ctcgacgagtcccgccgcgacgaga

SEQ ID NO: 4351 - DNA, 25 bp, Homo sapien
caggacctcaaacgacgtgtgacgg

SEQ ID NO: 4352 - DNA, 25 bp, Homo sapien
ccgtcacacgtcgtttgaggtcctg

SEQ ID NO: 4353 - DNA, 25 bp, Homo sapien
cgtaaagacgaagacgccgtagtag

SEQ ID NO: 4354 - DNA, 25 bp, Homo sapien
ctactacggcgtcttcgtctttacg

SEQ ID NO: 4355 - DNA, 25 bp, Homo sapien
cggacattccgctaaggcgtctaag

SEQ ID NO: 4356 - DNA, 25 bp, Homo sapien
cttagacgccttagcggaatgtccg

SEQ ID NO: 4357 - DNA, 25 bp, Homo sapien
cggcagctccctgccgcgatgccga

SEQ ID NO: 4358 - DNA, 25 bp, Homo sapien
tcggcatcgcggcagggagctgccg

SEQ ID NO: 4359 - DNA, 25 bp, Homo sapien
gaattaaaccaataacaagctacgt

SEQ ID NO: 4360 - DNA, 25 bp, Homo sapien
acgtagcttgttattggtttaattc

SEQ ID NO: 4361 - DNA, 25 bp, Homo sapien
ggacccagcaaggtcgaaatgagag

SEQ ID NO: 4362 - DNA, 25 bp, Homo sapien
ctctcatttcgaccttgctgggtcc

SEQ ID NO: 4363 - DNA, 25 bp, Homo sapien
gggtccaagctagggacggagcgtc

SEQ ID NO: 4364 - DNA, 25 bp, Homo sapien
gacgctccgtccctagcttggaccc

SEQ ID NO: 4365 - DNA, 25 bp, Homo sapien
ccgagttcttgtaggttatctctaa

SEQ ID NO: 4366 - DNA, 25 bp, Homo sapien
ttagagataacctacaagaactcgg

SEQ ID NO: 4367 - DNA, 25 bp, Homo sapien
aaatttacctgactatataagacat

SEQ ID NO: 4368 - DNA, 25 bp, Homo sapien
atgtcttatatagtcaggtaaattt

SEQ ID NO: 4369 - DNA, 25 bp, Homo sapien
ttaaagttcaacagatttgaaatcg

SEQ ID NO: 4370 - DNA, 25 bp, Homo sapien
cgatttcaaatctgttgaactttaa

SEQ ID NO: 4371 - DNA, 25 bp, Homo sapien
tcctccagccgggtactccggactc

SEQ ID NO: 4372 - DNA, 25 bp, Homo sapien
gagtccggagtacccggctggagga

SEQ ID NO: 4373 - DNA, 25 bp, Homo sapien
tcccagtctgtaccggaacttaggt

SEQ ID NO: 4374 - DNA, 25 bp, Homo sapien
acctaagttccggtacagactggga

SEQ ID NO: 4375 - DNA, 25 bp, Homo sapien
gtcgggacccaccatcaacggtccg

SEQ ID NO: 4376 - DNA, 25 bp, Homo sapien
cggaccgttgatggtgggtcccgac

SEQ ID NO: 4377 - DNA, 25 bp, Homo sapien
actaagattgtgatttaacaaactt

SEQ ID NO: 4378 - DNA, 25 bp, Homo sapien
aagtttgttaaatcacaatcttagt

SEQ ID NO: 4379 - DNA, 25 bp, Homo sapien
aaaacaattccgtgtgaactaagat

SEQ ID NO: 4380 - DNA, 25 bp, Homo sapien
atcttagttcacacggaattgtttt

SEQ ID NO: 4381 - DNA, 25 bp, Homo sapien
tgccaagagctctaggggtcccagg

SEQ ID NO: 4382 - DNA, 25 bp, Homo sapien
cctgggacccctagagctcttggca

SEQ ID NO: 4383 - DNA, 25 bp, Homo sapien
gagccttgggactgccgacggggcc

SEQ ID NO: 4384 - DNA, 25 bp, Homo sapien
ggccccgtcggcagtcccaaggctc

SEQ ID NO: 4385 - DNA, 25 bp, Homo sapien
ctacctacatgtagaggtccattat

SEQ ID NO: 4386 - DNA, 25 bp, Homo sapien
ataatggacctctacatgtaggtag

SEQ ID NO: 4387 - DNA, 25 bp, Homo sapien
caggacctagcaccccactggtact

SEQ ID NO: 4388 - DNA, 25 bp, Homo sapien
agtaccagtggggtgctaggtcctg

SEQ ID NO: 4389 - DNA, 25 bp, Homo sapien
tcaattaagtacgtcccacatgttc

SEQ ID NO: 4390 - DNA, 25 bp, Homo sapien
gaacatgtgggacgtacttaattga

SEQ ID NO: 4391 - DNA, 25 bp, Homo sapien
gcggcgccgggctgtaggggccccg

SEQ ID NO: 4392 - DNA, 25 bp, Homo sapien
cggggcccctacagcccggcgccgc

SEQ ID NO: 4393 - DNA, 25 bp, Homo sapien
gccgcggcggcgccgggctgtaggg

SEQ ID NO: 4394 - DNA, 25 bp, Homo sapien
ccctacagcccggcgccgccgcggc

SEQ ID NO: 4395 - DNA, 25 bp, Homo sapien
gcacccgctcatcgcgactctccgt

SEQ ID NO: 4396 - DNA, 25 bp, Homo sapien
acggagagtcgcgatgagcgggtgc

SEQ ID NO: 4397 - DNA, 25 bp, Homo sapien
agtccaaaatggttgtcctgaacta

SEQ ID NO: 4398 - DNA, 25 bp, Homo sapien
tagttcaggacaaccattttggact

SEQ ID NO: 4399 - DNA, 25 bp, Homo sapien
aagagagaccatcattagcggaaat

SEQ ID NO: 4400 - DNA, 25 bp, Homo sapien
atttccgctaatgatggtctctctt

SEQ ID NO: 4401 - DNA, 25 bp, Homo sapien
acttgaacagtgcacttctggacag

SEQ ID NO: 4402 - DNA, 25 bp, Homo sapien
ctgtccagaagtgcactgttcaagt

SEQ ID NO: 4403 - DNA, 25 bp, Homo sapien
caccttactcggaatgatggacaac

SEQ ID NO: 4404 - DNA, 25 bp, Homo sapien
gttgtccatcattccgagtaaggtg

SEQ ID NO: 4405 - DNA, 25 bp, Homo sapien
gaaagttgtagtccggacgacctcg

SEQ ID NO: 4406 - DNA, 25 bp, Homo sapien
cgaggtcgtccggactacaactttc

SEQ ID NO: 4407 - DNA, 25 bp, Homo sapien
cttaacaggagaagtgaaacgttgt

SEQ ID NO: 4408 - DNA, 25 bp, Homo sapien
acaacgtttcacttctcctgttaag

SEQ ID NO: 4409 - DNA, 25 bp, Homo sapien
tcggtacgactgtagaaccggggac

SEQ ID NO: 4410 - DNA, 25 bp, Homo sapien
gtccccggttctacagtcgtaccga

SEQ ID NO: 4411 - DNA, 25 bp, Homo sapien
gtccttcgtgtcactaggcgttgaa

SEQ ID NO: 4412 - DNA, 25 bp, Homo sapien
ttcaacgcctagtgacacgaaggac

SEQ ID NO: 4413 - DNA, 25 bp, Homo sapien
tgtcactaggcgttgaacgcgggcc

SEQ ID NO: 4414 - DNA, 25 bp, Homo sapien
ggcccgcgttcaacgcctagtgaca

SEQ ID NO: 4415 - DNA, 25 bp, Homo sapien
ttctaaaaagacatctgtataagtt

SEQ ID NO: 4416 - DNA, 25 bp, Homo sapien
aacttatacagatgtctttttagaa

SEQ ID NO: 4417 - DNA, 25 bp, Homo sapien
gaacattcgacttaagctgaaaaat

SEQ ID NO: 4418 - DNA, 25 bp, Homo sapien
atttttcagcttaagtcgaatgttc

SEQ ID NO: 4419 - DNA, 25 bp, Homo sapien
ggtccgagacgagtgtccgtgagtg

SEQ ID NO: 4420 - DNA, 25 bp, Homo sapien
cactcacggacactcgtctcggacc

SEQ ID NO: 4421 - DNA, 25 bp, Homo sapien
ggtgactacccgctaagtagaccct

SEQ ID NO: 4422 - DNA, 25 bp, Homo sapien
agggtctacttagcgggtagtcacc

SEQ ID NO: 4423 - DNA, 25 bp, Homo sapien
acgttacgacgtgttccatgtttaa

SEQ ID NO: 4424 - DNA, 25 bp, Homo sapien
ttaaacatggaacacgtcgtaacgt

SEQ ID NO: 4425 - DNA, 25 bp, Homo sapien
ggaaacaccgaatcactcccgatag

SEQ ID NO: 4426 - DNA, 25 bp, Homo sapien
ctatcgggagtgattcggtgtttcc

SEQ ID NO: 4427 - DNA, 25 bp, Homo sapien
tatatacactattaagaacattaca

SEQ ID NO: 4428 - DNA, 25 bp, Homo sapien
tgtaatgttcttaatagtgtatata

SEQ ID NO: 4429 - DNA, 25 bp, Homo sapien
caagattgacgggtcagaagaaata

SEQ ID NO: 4430 - DNA, 25 bp, Homo sapien
tatttcttctgacccgtcaatcttg

SEQ ID NO: 4431 - DNA, 25 bp, Homo sapien
agacgccgtggctgtcggaaggtct

SEQ ID NO: 4432 - DNA, 25 bp, Homo sapien
agaccttccgacagccacggcgtct

SEQ ID NO: 4433 - DNA, 25 bp, Homo sapien
acgactaaggtcaaggagcggatgc

SEQ ID NO: 4434 - DNA, 25 bp, Homo sapien
gcatccgctccttgaccttagtcgt

SEQ ID NO: 4435 - DNA, 25 bp, Homo sapien
acggcggtcagcaaggtcgtctcag

SEQ ID NO: 4436 - DNA, 25 bp, Homo sapien
ctgagacgaccttgctgaccgccgt

SEQ ID NO: 4437 - DNA, 25 bp, Homo sapien
caccgagggtgtatggtgaagaccc

SEQ ID NO: 4438 - DNA, 25 bp, Homo sapien
gggtcttcaccatacaccctcggtg

SEQ ID NO: 4439 - DNA, 25 bp, Homo sapien
ttgtgtatattgtttatgtaaaagt

SEQ ID NO: 4440 - DNA, 25 bp, Homo sapien
acttttacataaacaatatacacaa

SEQ ID NO: 4441 - DNA, 25 bp, Homo sapien
tatcgttcaaacagaggtttaaaaa

SEQ ID NO: 4442 - DNA, 25 bp, Homo sapien
tttttaaacctctgtttgaacgata

SEQ ID NO: 4443 - DNA, 25 bp, Homo sapien
gagaccgaacctcgtggcaagcttt

SEQ ID NO: 4444 - DNA, 25 bp, Homo sapien
aaagcttgccacgaggttcggtctc

SEQ ID NO: 4445 - DNA, 25 bp, Homo sapien
cttcttcgactgtggcttcttcgac

SEQ ID NO: 4446 - DNA, 25 bp, Homo sapien
gtcgaagaagccacagtcgaagaag

SEQ ID NO: 4447 - DNA, 25 bp, Homo sapien
ccctccgggactgcatgtggtggtc

SEQ ID NO: 4448 - DNA, 25 bp, Homo sapien
gaccaccacatgcagtcccggaggg

SEQ ID NO: 4449 - DNA, 25 bp, Homo sapien
ggaagactccgctgaccggtcgaac

SEQ ID NO: 4450 - DNA, 25 bp, Homo sapien
gttcgaccggtcagcggagtcttcc

SEQ ID NO: 4451 - DNA, 25 bp, Homo sapien
gccgccctggccggcgacccagggt

SEQ ID NO: 4452 - DNA, 25 bp, Homo sapien
accctgggtcgccggccagggcggc

SEQ ID NO: 4453 - DNA, 25 bp, Homo sapien
cgactgtcactaagatggaagttcc

SEQ ID NO: 4454 - DNA, 25 bp, Homo sapien
ggaacttccatcttagtgacagtcg

SEQ ID NO: 4455 - DNA, 25 bp, Homo sapien
aatcgagggtcgttcaggccccgcg

SEQ ID NO: 4456 - DNA, 25 bp, Homo sapien
cgcggggcctgaacgaccctcgatt

SEQ ID NO: 4457 - DNA, 25 bp, Homo sapien
tcggttggacagggaccaccgacgt

SEQ ID NO: 4458 - DNA, 25 bp, Homo sapien
acgtcggtggtccctgtccaaccga

SEQ ID NO: 4459 - DNA, 25 bp, Homo sapien
atataaagattgtcggaataatagt

SEQ ID NO: 4460 - DNA, 25 bp, Homo sapien
actattattccgacaatctttatat

SEQ ID NO: 4461 - DNA, 25 bp, Homo sapien
gacttctgtcgtgtgataaaaagaa

SEQ ID NO: 4462 - DNA, 25 bp, Homo sapien
ttctttttatcacacgacagaagtc

SEQ ID NO: 4463 - DNA, 25 bp, Homo sapien
caagagaaacctttggagggtcgat

SEQ ID NO: 4464 - DNA, 25 bp, Homo sapien
atcgaccctccaaaggtttctcttg

SEQ ID NO: 4465 - DNA, 25 bp, Homo sapien
aatctaattcagttggaatttaagt

SEQ ID NO: 4466 - DNA, 25 bp, Homo sapien
acttaaattccaactgaattagatt

SEQ ID NO: 4467 - DNA, 25 bp, Homo sapien
cgtcggccggcgtctgggacggtcc

SEQ ID NO: 4468 - DNA, 25 bp, Homo sapien
ggaccgtcccagacgccggccgacg

SEQ ID NO: 4469 - DNA, 25 bp, Homo sapien
gcgtcggccggcgtctgggacggtc

SEQ ID NO: 4470 - DNA, 25 bp, Homo sapien
gaccgtcccagacgccggccgacgc

SEQ ID NO: 4471 - DNA, 25 bp, Homo sapien
cctcatcaatgggagaacgttagag

SEQ ID NO: 4472 - DNA, 25 bp, Homo sapien
ctctaacgttctcccattgatgagg

SEQ ID NO: 4473 - DNA, 25 bp, Homo sapien
gatgtaaaatttcggtaactgtaaa

SEQ ID NO: 4474 - DNA, 25 bp, Homo sapien
tttacagttaccgaaattttacatc

SEQ ID NO: 4475 - DNA, 25 bp, Homo sapien
aattatatttagacaaacctacatt

SEQ ID NO: 4476 - DNA, 25 bp, Homo sapien
aatgtaggtttgtctaaatataatt

SEQ ID NO: 4477 - DNA, 25 bp, Homo sapien
tcactttacacaaatagaactataa

SEQ ID NO: 4478 - DNA, 25 bp, Homo sapien
ttatagttctatttgtgtaaagtga

SEQ ID NO: 4479 - DNA, 25 bp, Homo sapien
cggcccgcccctgctacggtgtcgg

SEQ ID NO: 4480 - DNA, 25 bp, Homo sapien
ccgacaccgtagcaggggcgggccg

SEQ ID NO: 4481 - DNA, 25 bp, Homo sapien
gcccgcccctgctacggtgtcggtc

SEQ ID NO: 4482 - DNA, 25 bp, Homo sapien
gaccgacaccgtagcaggggcgggc

SEQ ID NO: 4483 - DNA, 25 bp, Homo sapien
cgggtagcgcccgtggcggcttcgg

SEQ ID NO: 4484 - DNA, 25 bp, Homo sapien
ccgaagccgccacgggcgctacccg

SEQ ID NO: 4485 - DNA, 25 bp, Homo sapien
tcgcgggtagcgcccgtggcggctt

SEQ ID NO: 4486 - DNA, 25 bp, Homo sapien
aagccgccacgggcgctacccgcga

SEQ ID NO: 4487 - DNA, 25 bp, Homo sapien
gatcgcgggtagcgcccgtggcggc

SEQ ID NO: 4488 - DNA, 25 bp, Homo sapien
gccgccacgggcgctacccgcgatc

SEQ ID NO: 4489 - DNA, 25 bp, Homo sapien
gaacttgttctatcattcattacgg

SEQ ID NO: 4490 - DNA, 25 bp, Homo sapien
ccgtaatgaatgatagaacaagttc

SEQ ID NO: 4491 - DNA, 25 bp, Homo sapien
gaaccaagggacaaaggtcaggtct

SEQ ID NO: 4492 - DNA, 25 bp, Homo sapien
agacctgacctttgtcccttggttc

SEQ ID NO: 4493 - DNA, 25 bp, Homo sapien
taccccatcggtccgagatgggtcg

SEQ ID NO: 4494 - DNA, 25 bp, Homo sapien
cgacccatctcggaccgatggggta

SEQ ID NO: 4495 - DNA, 25 bp, Homo sapien
gaccgtccgcttaggtctcaaatgt

SEQ ID NO: 4496 - DNA, 25 bp, Homo sapien
acatttgagacctaagcggacggtc

SEQ ID NO: 4497 - DNA, 25 bp, Homo sapien
tttggaataatcagagacgacgtcg

SEQ ID NO: 4498 - DNA, 25 bp, Homo sapien
cgacgtcgtctctgattattccaaa

SEQ ID NO: 4499 - DNA, 25 bp, Homo sapien
ggcacgtagaggtacacaactgagt

SEQ ID NO: 4500 - DNA, 25 bp, Homo sapien
actcagttgtgtacctctacgtgcc

SEQ ID NO: 4501 - DNA, 25 bp, Homo sapien
ggtgcgaccacaaacacctcaaggt

SEQ ID NO: 4502 - DNA, 25 bp, Homo sapien
accttgaggtgtttgtggtcgcacc

SEQ ID NO: 4503 - DNA, 25 bp, Homo sapien
cacgagtttcgttgtccacctctat

SEQ ID NO: 4504 - DNA, 25 bp, Homo sapien
atagaggtggacaacgaaactcgtg

SEQ ID NO: 4505 - DNA, 25 bp, Homo sapien
tattttacctttcaagtacaattga

SEQ ID NO: 4506 - DNA, 25 bp, Homo sapien
tcaattgtacttgaaaggtaaaata

SEQ ID NO: 4507 - DNA, 25 bp, Homo sapien
taaagatatacaatgggttcaataa

SEQ ID NO: 4508 - DNA, 25 bp, Homo sapien
ttattgaacccattgtatatcttta

SEQ ID NO: 4509 - DNA, 25 bp, Homo sapien
agtagatgtgaccacaccgtccacg

SEQ ID NO: 4510 - DNA, 25 bp, Homo sapien
cgtggacggtgtggtcacatctact

SEQ ID NO: 4511 - DNA, 25 bp, Homo sapien
accacacaccgtagctggcgtccct

SEQ ID NO: 4512 - DNA, 25 bp, Homo sapien
agggacgccagctacggtgtgtggt

SEQ ID NO: 4513 - DNA, 25 bp, Homo sapien
ggacccggcgccggcggccggagta

SEQ ID NO: 4514 - DNA, 25 bp, Homo sapien
tactccggccgccggcgccgggtcc

SEQ ID NO: 4515 - DNA, 25 bp, Homo sapien
tcgggacggacccggcgccggcggc

SEQ ID NO: 4516 - DNA, 25 bp, Homo sapien
gccgccggcgccgggtccgtcccga

SEQ ID NO: 4517 - DNA, 25 bp, Homo sapien
acaaagaaatcattgataatcctag

SEQ ID NO: 4518 - DNA, 25 bp, Homo sapien
ctaggattatcaatgatttctttgt

SEQ ID NO: 4519 - DNA, 25 bp, Homo sapien
taggtgactttctctaagttgacac

SEQ ID NO: 4520 - DNA, 25 bp, Homo sapien
gtgtcaacttagagaaagtcaccta

SEQ ID NO: 4521 - DNA, 25 bp, Homo sapien
aaaggataagaccgtcacacggtgt

SEQ ID NO: 4522 - DNA, 25 bp, Homo sapien
acaccgtgtgacggtcttatccttt

SEQ ID NO: 4523 - DNA, 25 bp, Homo sapien
ctcaaaaagcagaaggtgtctctcg

SEQ ID NO: 4524 - DNA, 25 bp, Homo sapien
cgagagacaccttctgctttttgag

SEQ ID NO: 4525 - DNA, 25 bp, Homo sapien
tctggactcctgagactcgaaatag

SEQ ID NO: 4526 - DNA, 25 bp, Homo sapien
ctatttcgagtctcaggagtccaga

SEQ ID NO: 4527 - DNA, 25 bp, Homo sapien
cagatacccaggaacctgaggtcca

SEQ ID NO: 4528 - DNA, 25 bp, Homo sapien
tggacctcaggttcctgggtatctg

SEQ ID NO: 4529 - DNA, 25 bp, Homo sapien
ctctgaagactagtctgtcacggtt

SEQ ID NO: 4530 - DNA, 25 bp, Homo sapien
aaccgtgacagactagtcttcagag

SEQ ID NO: 4531 - DNA, 25 bp, Homo sapien
acgcctacgggtgcgtgactgaaga

SEQ ID NO: 4532 - DNA, 25 bp, Homo sapien
tcttcagtcacgcacccgtaggcgt

SEQ ID NO: 4533 - DNA, 25 bp, Homo sapien
accaggcctcgagtacaatcgcagg

SEQ ID NO: 4534 - DNA, 25 bp, Homo sapien
cctgcgattgtactcgaggcctggt

SEQ ID NO: 4535 - DNA, 25 bp, Homo sapien
ccagagtcctgaggaccaccaggcc

SEQ ID NO: 4536 - DNA, 25 bp, Homo sapien
ggcctggtggtcctcaggactctgg

SEQ ID NO: 4537 - DNA, 25 bp, Homo sapien
tcgtctatacccctttagtagaact

SEQ ID NO: 4538 - DNA, 25 bp, Homo sapien
agttctactaaaggggtatagacga

SEQ ID NO: 4539 - DNA, 25 bp, Homo sapien
gaacaagaatccctttgaaccgact

SEQ ID NO: 4540 - DNA, 25 bp, Homo sapien
agtcggttcaaagggattcttgttc

SEQ ID NO: 4541 - DNA, 25 bp, Homo sapien
ttcacggcagtttcctcatcaaacg

SEQ ID NO: 4542 - DNA, 25 bp, Homo sapien
cgtttgatgaggaaactgccgtgaa

SEQ ID NO: 4543 - DNA, 25 bp, Homo sapien
gtcggcggccggtctccagaggttg

SEQ ID NO: 4544 - DNA, 25 bp, Homo sapien
caacctctggagaccggccgccgac

SEQ ID NO: 4545 - DNA, 25 bp, Homo sapien
cttcctcggcggcttactcgagctt

SEQ ID NO: 4546 - DNA, 25 bp, Homo sapien
aagctcgagtaagccgccgaggaag

SEQ ID NO: 4547 - DNA, 25 bp, Homo sapien
agtatcggaacaccctcttcgtgag

SEQ ID NO: 4548 - DNA, 25 bp, Homo sapien
ctcacgaagagggtgttccgatact

SEQ ID NO: 4549 - DNA, 25 bp, Homo sapien
acctaggacttccactccatcgtct

SEQ ID NO: 4550 - DNA, 25 bp, Homo sapien
agacgatggagtggaagtcctaggt

SEQ ID NO: 4551 - DNA, 25 bp, Homo sapien
atcgagaacataggtaccaacttgt

SEQ ID NO: 4552 - DNA, 25 bp, Homo sapien
acaagttggtacctatgttctcgat

SEQ ID NO: 4553 - DNA, 25 bp, Homo sapien
acataccgaaaactagttaactcag

SEQ ID NO: 4554 - DNA, 25 bp, Homo sapien
ctgagttaactagttttcggtatgt

SEQ ID NO: 4555 - DNA, 25 bp, Homo sapien
ggtggtcttcaaatcacctcaatag

SEQ ID NO: 4556 - DNA, 25 bp, Homo sapien
ctattgaggtgatttgaagaccacc

SEQ ID NO: 4557 - DNA, 25 bp, Homo sapien
tcgcccgtcgttcgccaatttatac

SEQ ID NO: 4558 - DNA, 25 bp, Homo sapien
gtataaattggcgaacgacgggcga

SEQ ID NO: 4559 - DNA, 25 bp, Homo sapien
ccgtggcacaaggacaccggaggtc

SEQ ID NO: 4560 - DNA, 25 bp, Homo sapien
gacctccggtgtccttgtgccacgg

SEQ ID NO: 4561 - DNA, 25 bp, Homo sapien
ccgccgtggcacaaggacaccggag

SEQ ID NO: 4562 - DNA, 25 bp, Homo sapien
ctccggtgtccttgtgccacggcgg

SEQ ID NO: 4563 - DNA, 25 bp, Homo sapien
actatccttaaagtttgaactgcag

SEQ ID NO: 4564 - DNA, 25 bp, Homo sapien
ctgcagttcaaactttaaggatagt

SEQ ID NO: 4565 - DNA, 25 bp, Homo sapien
acgacgactcgaggcttgcagttac

SEQ ID NO: 4566 - DNA, 25 bp, Homo sapien
gtaactgcaagcctcgagtcgtcgt

SEQ ID NO: 4567 - DNA, 25 bp, Homo sapien
gtcgaggcgtctagccccggttctg

SEQ ID NO: 4568 - DNA, 25 bp, Homo sapien
cagaaccggggctagacgcctcgac

SEQ ID NO: 4569 - DNA, 25 bp, Homo sapien
aataatattggtgatattcacacgt

SEQ ID NO: 4570 - DNA, 25 bp, Homo sapien
acgtgtgaatatcaccaatattatt

SEQ ID NO: 4571 - DNA, 25 bp, Homo sapien
taataatattggtgatattcacacg

SEQ ID NO: 4572 - DNA, 25 bp, Homo sapien
cgtgtgaatatcaccaatattatta

SEQ ID NO: 4573 - DNA, 25 bp, Homo sapien
gataataatattggtgatattcaca

SEQ ID NO: 4574 - DNA, 25 bp, Homo sapien
tgtgaatatcaccaatattattatc

SEQ ID NO: 4575 - DNA, 25 bp, Homo sapien
gctcaacgagcaaccacaacgcggt

SEQ ID NO: 4576 - DNA, 25 bp, Homo sapien
accgcgttgtggttgctcgttgagc

SEQ ID NO: 4577 - DNA, 25 bp, Homo sapien
aattaagtgggttcaccatcgtctc

SEQ ID NO: 4578 - DNA, 25 bp, Homo sapien
gagacgatggtgaacccacttaatt

SEQ ID NO: 4579 - DNA, 25 bp, Homo sapien
tttacggtcagttgacttctaagta

SEQ ID NO: 4580 - DNA, 25 bp, Homo sapien
tacttagaagtcaactgaccgtaaa

SEQ ID NO: 4581 - DNA, 25 bp, Homo sapien
aaggaagagcagatatactagacaa

SEQ ID NO: 4582 - DNA, 25 bp, Homo sapien
ttgtctagtatatctgctcttcctt

SEQ ID NO: 4583 - DNA, 25 bp, Homo sapien
tctgagctcgttgactcagtctgag

SEQ ID NO: 4584 - DNA, 25 bp, Homo sapien
ctcagactgagtcaacgagctcaga

SEQ ID NO: 4585 - DNA, 25 bp, Homo sapien
cgaactggtactcatgaagggcact

SEQ ID NO: 4586 - DNA, 25 bp, Homo sapien
agtgcccttcatgagtaccagttcg

SEQ ID NO: 4587 - DNA, 25 bp, Homo sapien
tgagccgtcgagagttgcggtcgcc

SEQ ID NO: 4588 - DNA, 25 bp, Homo sapien
ggcgaccgcaactctcgacggctca

SEQ ID NO: 4589 - DNA, 25 bp, Homo sapien
aaatttcagttcgttcaggttgaag

SEQ ID NO: 4590 - DNA, 25 bp, Homo sapien
cttcaacctgaacgaactgaaattt

SEQ ID NO: 4591 - DNA, 25 bp, Homo sapien
aactgtaataacaaggtgaatcaaa

SEQ ID NO: 4592 - DNA, 25 bp, Homo sapien
tttgattcaccttgttattacagtt

SEQ ID NO: 4593 - DNA, 25 bp, Homo sapien
catttataactgaaagggtctcaac

SEQ ID NO: 4594 - DNA, 25 bp, Homo sapien
gttgagaccctttcagttataaatg

SEQ ID NO: 4595 - DNA, 25 bp, Homo sapien
aaaacaatacatgtctaactaaacg

SEQ ID NO: 4596 - DNA, 25 bp, Homo sapien
cgtttagttagacatgtattgtttt

SEQ ID NO: 4597 - DNA, 25 bp, Homo sapien
taccgataatactttatgatagaga

SEQ ID NO: 4598 - DNA, 25 bp, Homo sapien
tctctatcataaagtattatcggta

SEQ ID NO: 4599 - DNA, 25 bp, Homo sapien
gagcccttccgccgcgggctggcgg

SEQ ID NO: 4600 - DNA, 25 bp, Homo sapien
ccgccagcccgcggcggaagggctc

SEQ ID NO: 4601 - DNA, 25 bp, Homo sapien
gcccttccgccgcgggctggcggtg

SEQ ID NO: 4602 - DNA, 25 bp, Homo sapien
caccgccagcccgcggcggaagggc

SEQ ID NO: 4603 - DNA, 25 bp, Homo sapien
acttttcggttagacatttcacaat

SEQ ID NO: 4604 - DNA, 25 bp, Homo sapien
attgtgaaatgtctaaccgaaaagt

SEQ ID NO: 4605 - DNA, 25 bp, Homo sapien
gtcagggctggatcagcgaccgccc

SEQ ID NO: 4606 - DNA, 25 bp, Homo sapien
gggcggtcgctgatccagccctgac

SEQ ID NO: 4607 - DNA, 25 bp, Homo sapien
ctcgaacagtcgaagtcgaggcggt

SEQ ID NO: 4608 - DNA, 25 bp, Homo sapien
accgcctcgacttcgactgttcgag

SEQ ID NO: 4609 - DNA, 25 bp, Homo sapien
gagacttacattaaacgttatgtag

SEQ ID NO: 4610 - DNA, 25 bp, Homo sapien
ctacataacgtttaatgtaagtctc

SEQ ID NO: 4611 - DNA, 25 bp, Homo sapien
cagaagaaagaggacagtccattaa

SEQ ID NO: 4612 - DNA, 25 bp, Homo sapien
ttaatggactgtcctctttcttctg

SEQ ID NO: 4613 - DNA, 25 bp, Homo sapien
gacctattacgcagaactcgtgggt

SEQ ID NO: 4614 - DNA, 25 bp, Homo sapien
acccacgagttctgcgtaataggtc

SEQ ID NO: 4615 - DNA, 25 bp, Homo sapien
cctttgggcggtggtctctggaggt

SEQ ID NO: 4616 - DNA, 25 bp, Homo sapien
acctccagagaccaccgcccaaagg

SEQ ID NO: 4617 - DNA, 25 bp, Homo sapien
gaaggcggtcggggagacacctacc

SEQ ID NO: 4618 - DNA, 25 bp, Homo sapien
ggtaggtgtctccccgaccgccttc

SEQ ID NO: 4619 - DNA, 25 bp, Homo sapien
gcggaggggctgaccccacaggcgt

SEQ ID NO: 4620 - DNA, 25 bp, Homo sapien
acgcctgtggggtcagcccctccgc

SEQ ID NO: 4621 - DNA, 25 bp, Homo sapien
cttcgtggtcggctccttcgcagct

SEQ ID NO: 4622 - DNA, 25 bp, Homo sapien
agctgcgaaggagccgaccacgaag

SEQ ID NO: 4623 - DNA, 25 bp, Homo sapien
tcgagtcacgagcttgaccgaggtc

SEQ ID NO: 4624 - DNA, 25 bp, Homo sapien
gacctcggtcaagctcgtgactcga

SEQ ID NO: 4625 - DNA, 25 bp, Homo sapien
gtttcaccggcaccgccgcggtacg

SEQ ID NO: 4626 - DNA, 25 bp, Homo sapien
cgtaccgcggcggtgccggtgaaac

SEQ ID NO: 4627 - DNA, 25 bp, Homo sapien
cggaccagggcctcgtgtgtcccgt

SEQ ID NO: 4628 - DNA, 25 bp, Homo sapien
acgggacacacgaggccctggtccg

SEQ ID NO: 4629 - DNA, 25 bp, Homo sapien
tccgaggagtggtctaaaaggttct

SEQ ID NO: 4630 - DNA, 25 bp, Homo sapien
agaaccttttagaccactcctcgga

SEQ ID NO: 4631 - DNA, 25 bp, Homo sapien
ggcgcgtcgcggtcaccgtcggtcg

SEQ ID NO: 4632 - DNA, 25 bp, Homo sapien
cgaccgacggtgaccgcgacgcgcc

SEQ ID NO: 4633 - DNA, 25 bp, Homo sapien
acatcgtcacccgaggaataaggga

SEQ ID NO: 4634 - DNA, 25 bp, Homo sapien
tcccttattcctcgggtgacgatgt

SEQ ID NO: 4635 - DNA, 25 bp, Homo sapien
atccacaggggactaagaggttctt

SEQ ID NO: 4636 - DNA, 25 bp, Homo sapien
aagaacctcttagtcccctgtggat

SEQ ID NO: 4637 - DNA, 25 bp, Homo sapien
ctacccgtcagcagggacaggtgag

SEQ ID NO: 4638 - DNA, 25 bp, Homo sapien
ctcacctgtccctgctgacgggtag

SEQ ID NO: 4639 - DNA, 25 bp, Homo sapien
gacgaccgaccttgagggcctcctg

SEQ ID NO: 4640 - DNA, 25 bp, Homo sapien
caggaggccctcaaggtcggtcgtc

SEQ ID NO: 4641 - DNA, 25 bp, Homo sapien
atccaagtctgagttaggtcagttg

SEQ ID NO: 4642 - DNA, 25 bp, Homo sapien
caactgacctaactcagacttggat

SEQ ID NO: 4643 - DNA, 25 bp, Homo sapien
acgaccacacatataaaagggaagt

SEQ ID NO: 4644 - DNA, 25 bp, Homo sapien
acttcccttttatatgtgtggtcgt

SEQ ID NO: 4645 - DNA, 25 bp, Homo sapien
tctccaccgtatcgaagacggtgac

SEQ ID NO: 4646 - DNA, 25 bp, Homo sapien
gtcaccgtcttcgatacggtggaga

SEQ ID NO: 4647 - DNA, 25 bp, Homo sapien
tacgggtggcctcacgaccgttcac

SEQ ID NO: 4648 - DNA, 25 bp, Homo sapien
gtgaacggtcgtgaggccacccgta

SEQ ID NO: 4649 - DNA, 25 bp, Homo sapien
gctcagacgcgctgtccgacccggc

SEQ ID NO: 4650 - DNA, 25 bp, Homo sapien
gccgggtcggacagcgcgtctgagc

SEQ ID NO: 4651 - DNA, 25 bp, Homo sapien
tgcggtcgcagacaaagaactgttt

SEQ ID NO: 4652 - DNA, 25 bp, Homo sapien
aaacagttctttgtctgcgaccgca

SEQ ID NO: 4653 - DNA, 25 bp, Homo sapien
aatttggagtaagaggtcccatgac

SEQ ID NO: 4654 - DNA, 25 bp, Homo sapien
gtcatgggacctcttactccaaatt

SEQ ID NO: 4655 - DNA, 25 bp, Homo sapien
ctttttaatactgttgctgtgtaga

SEQ ID NO: 4656 - DNA, 25 bp, Homo sapien
tctacacagcaacagtattaaaaag

SEQ ID NO: 4657 - DNA, 25 bp, Homo sapien
tacgtaggcgctgcgggccggcggg

SEQ ID NO: 4658 - DNA, 25 bp, Homo sapien
cccgccggcccgcagcgcctacgta

SEQ ID NO: 4659 - DNA, 25 bp, Homo sapien
gcgaggctccggcttcccctgctgg

SEQ ID NO: 4660 - DNA, 25 bp, Homo sapien
ccagcaggggaagccggagcctcgc

SEQ ID NO: 4661 - DNA, 25 bp, Homo sapien
aaaacccctgcgaccgtcgtcaaga

SEQ ID NO: 4662 - DNA, 25 bp, Homo sapien
tcttgacgacggtcgcaggggtttt

SEQ ID NO: 4663 - DNA, 25 bp, Homo sapien
acgtaagtcacaaacggcacctatc

SEQ ID NO: 4664 - DNA, 25 bp, Homo sapien
gataggtgccgtttgtgacttacgt

SEQ ID NO: 4665 - DNA, 25 bp, Homo sapien
accgcagaattccagcggccggctg

SEQ ID NO: 4666 - DNA, 25 bp, Homo sapien
cagccggccgctggaattctgcggt

SEQ ID NO: 4667 - DNA, 25 bp, Homo sapien
agtacatgtaggaagtgtggtttaa

SEQ ID NO: 4668 - DNA, 25 bp, Homo sapien
ttaaaccacacttcctacatgtact

SEQ ID NO: 4669 - DNA, 25 bp, Homo sapien
tactaaggtatacaaggagggaagg

SEQ ID NO: 4670 - DNA, 25 bp, Homo sapien
ccttccctccttgtataccttagta

SEQ ID NO: 4671 - DNA, 25 bp, Homo sapien
accggcgccacaggcgtcccgaccg

SEQ ID NO: 4672 - DNA, 25 bp, Homo sapien
cggtcgggacgcctgtggcgccggt

SEQ ID NO: 4673 - DNA, 25 bp, Homo sapien
gccgggacgggccgggcgcacgagt

SEQ ID NO: 4674 - DNA, 25 bp, Homo sapien
actcgtgcgcccggcccgtcccggc

SEQ ID NO: 4675 - DNA, 25 bp, Homo sapien
ggccgggacgggccgggcgcacgag

SEQ ID NO: 4676 - DNA, 25 bp, Homo sapien
ctcgtgcgcccggcccgtcccggcc

SEQ ID NO: 4677 - DNA, 25 bp, Homo sapien
gatctcgggcgggccgggacgggcc

SEQ ID NO: 4678 - DNA, 25 bp, Homo sapien
ggcccgtcccggcccgcccgagatc

SEQ ID NO: 4679 - DNA, 25 bp, Homo sapien
ccgggacgggccgggcgcacgagtg

SEQ ID NO: 4680 - DNA, 25 bp, Homo sapien
cactcgtgcgcccggcccgtcccgg

SEQ ID NO: 4681 - DNA, 25 bp, Homo sapien
cccttggatagtattttcatagtgt

SEQ ID NO: 4682 - DNA, 25 bp, Homo sapien
acactatgaaaatactatccaaggg

SEQ ID NO: 4683 - DNA, 25 bp, Homo sapien
aatgattattagagttacggaaaag

SEQ ID NO: 4684 - DNA, 25 bp, Homo sapien
cttttccgtaactctaataatcatt

SEQ ID NO: 4685 - DNA, 25 bp, Homo sapien
tctacagtctaagaatgattattag

SEQ ID NO: 4686 - DNA, 25 bp, Homo sapien
ctaataatcattcttagactgtaga

SEQ ID NO: 4687 - DNA, 25 bp, Homo sapien
ggagtctccaaaacggtccttctag

SEQ ID NO: 4688 - DNA, 25 bp, Homo sapien
ctagaaggaccgttttggagactcc

SEQ ID NO: 4689 - DNA, 25 bp, Homo sapien
ccggcgtcgtcttaccgtgtagtcg

SEQ ID NO: 4690 - DNA, 25 bp, Homo sapien
cgactacacggtaagacgacgccgg

SEQ ID NO: 4691 - DNA, 25 bp, Homo sapien
tacattctagaacgataataacagt

SEQ ID NO: 4692 - DNA, 25 bp, Homo sapien
actgttattatcgttctagaatgta

SEQ ID NO: 4693 - DNA, 25 bp, Homo sapien
aaaaaatataagttcaccttgatgt

SEQ ID NO: 4694 - DNA, 25 bp, Homo sapien
acatcaaggtgaacttatatttttt

SEQ ID NO: 4695 - DNA, 25 bp, Homo sapien
tttgtcccggccctcgtcggcatcg

SEQ ID NO: 4696 - DNA, 25 bp, Homo sapien
cgatgccgacgagggccgggacaaa

SEQ ID NO: 4697 - DNA, 25 bp, Homo sapien
gggcgccccacgaaggtcgcgtctc

SEQ ID NO: 4698 - DNA, 25 bp, Homo sapien
gagacgcgaccttcgtggggcgccc

SEQ ID NO: 4699 - DNA, 25 bp, Homo sapien
gtgggggcgccccacgaaggtcgcg

SEQ ID NO: 4700 - DNA, 25 bp, Homo sapien
cgcgaccttcgtggggcgcccccac

SEQ ID NO: 4701 - DNA, 25 bp, Homo sapien
cgagtacaaacactaggagatagac

SEQ ID NO: 4702 - DNA, 25 bp, Homo sapien
gtctatctcctagtgtttgtactcg

SEQ ID NO: 4703 - DNA, 25 bp, Homo sapien
agaagagagagtttatgtcggtgct

SEQ ID NO: 4704 - DNA, 25 bp, Homo sapien
agcaccgacataaactctctcttct

SEQ ID NO: 4705 - DNA, 25 bp, Homo sapien
actcctgtggcaagggtcgccgacg

SEQ ID NO: 4706 - DNA, 25 bp, Homo sapien
cgtcggcgacccttgccacaggagt

SEQ ID NO: 4707 - DNA, 25 bp, Homo sapien
ggccgacagggcccttacggaagac

SEQ ID NO: 4708 - DNA, 25 bp, Homo sapien
gtcttccgtaagggccctgtcggcc

SEQ ID NO: 4709 - DNA, 25 bp, Homo sapien
cacctaagaagtatcaacatgacct

SEQ ID NO: 4710 - DNA, 25 bp, Homo sapien
aggtcatgttgatacttcttaggtg

SEQ ID NO: 4711 - DNA, 25 bp, Homo sapien
taaggtcatctctttccctcccggt

SEQ ID NO: 4712 - DNA, 25 bp, Homo sapien
accgggagggaaagagatgacctta

SEQ ID NO: 4713 - DNA, 25 bp, Homo sapien
cagtcggagtcccttccgtcggtcg

SEQ ID NO: 4714 - DNA, 25 bp, Homo sapien
cgaccgacggaagggactccgactg

SEQ ID NO: 4715 - DNA, 25 bp, Homo sapien
ccaactggacgggtagtgtttccag

SEQ ID NO: 4716 - DNA, 25 bp, Homo sapien
ctggaaacactacccgtccagttgg

SEQ ID NO: 4717 - DNA, 25 bp, Homo sapien
atgaactacagttttcctaaaagat

SEQ ID NO: 4718 - DNA, 25 bp, Homo sapien
atcttttaggaaaactgtagttcat

SEQ ID NO: 4719 - DNA, 25 bp, Homo sapien
tccctctgggaagatgaggcctcgg

SEQ ID NO: 4720 - DNA, 25 bp, Homo sapien
ccgaggcctcatcttcccagaggga

SEQ ID NO: 4721 - DNA, 25 bp, Homo sapien
atatgaaaggactaatccgagtaca

SEQ ID NO: 4722 - DNA, 25 bp, Homo sapien
tgtactcggattagtcctttcatat

SEQ ID NO: 4723 - DNA, 25 bp, Homo sapien
gattcctgccggccgcggcgaattc

SEQ ID NO: 4724 - DNA, 25 bp, Homo sapien
gaattcgccgcggccggcaggaatc

SEQ ID NO: 4725 - DNA, 25 bp, Homo sapien
cgacgccggcgcaggggttgggact

SEQ ID NO: 4726 - DNA, 25 bp, Homo sapien
agtcccaacccctgcgccggcgtcg

SEQ ID NO: 4727 - DNA, 25 bp, Homo sapien
ctccctaccccgtgccggtcctctg

SEQ ID NO: 4728 - DNA, 25 bp, Homo sapien
cagaggaccggcacggggtagggag

SEQ ID NO: 4729 - DNA, 25 bp, Homo sapien
gacctactactccctccctaaggtc

SEQ ID NO: 4730 - DNA, 25 bp, Homo sapien
gaccttagggagggagtagtaggtc

SEQ ID NO: 4731 - DNA, 25 bp, Homo sapien
aaagtcagtcctgtaacttatcagg

SEQ ID NO: 4732 - DNA, 25 bp, Homo sapien
cctgataagttacaggactgacttt

SEQ ID NO: 4733 - DNA, 25 bp, Homo sapien
gacatgcgcaatggtgctcggagac

SEQ ID NO: 4734 - DNA, 25 bp, Homo sapien
gtctccgagcaccattgcgcatgtc

SEQ ID NO: 4735 - DNA, 25 bp, Homo sapien
atcagatattagtcatgttagtcat

SEQ ID NO: 4736 - DNA, 25 bp, Homo sapien
atgactaacatgactaatatctgat

SEQ ID NO: 4737 - DNA, 25 bp, Homo sapien
gaggccatcagaacggccttccgtt

SEQ ID NO: 4738 - DNA, 25 bp, Homo sapien
aacggaaggccgttctgatggcctc

SEQ ID NO: 4739 - DNA, 25 bp, Homo sapien
aacatcttagacttctccacagtta

SEQ ID NO: 4740 - DNA, 25 bp, Homo sapien
taactgtggagaagtctaagatgtt

SEQ ID NO: 4741 - DNA, 25 bp, Homo sapien
ccccgcgacacttcggccgtggccc

SEQ ID NO: 4742 - DNA, 25 bp, Homo sapien
gggccacggccgaagtgtcgcgggg

SEQ ID NO: 4743 - DNA, 25 bp, Homo sapien
ctgagaacgagtcacacgacgaacc

SEQ ID NO: 4744 - DNA, 25 bp, Homo sapien
ggttcgtcgtgtgactcgttctcag

SEQ ID NO: 4745 - DNA, 25 bp, Homo sapien
tacctatctaggagggtgctgagga

SEQ ID NO: 4746 - DNA, 25 bp, Homo sapien
tcctcagcaccctcctagataggta

SEQ ID NO: 4747 - DNA, 25 bp, Homo sapien
tcaggccgagtttcggacgacttcc

SEQ ID NO: 4748 - DNA, 25 bp, Homo sapien
ggaagtcgtccgaaactcggcctga

SEQ ID NO: 4749 - DNA, 25 bp, Homo sapien
gacactcttacaatttattaaaaac

SEQ ID NO: 4750 - DNA, 25 bp, Homo sapien
gtttttaataaattgtaagagtgtc

SEQ ID NO: 4751 - DNA, 25 bp, Homo sapien
tggggtcgacggcattgacagggag

SEQ ID NO: 4752 - DNA, 25 bp, Homo sapien
ctccctgtcaatgccgtcgacccca

SEQ ID NO: 4753 - DNA, 25 bp, Homo sapien
agacagaaccaatcacttcggtgag

SEQ ID NO: 4754 - DNA, 25 bp, Homo sapien
ctcaccgaagtgattggttctgtct

SEQ ID NO: 4755 - DNA, 25 bp, Homo sapien
ggcttattcccacctggtgtcccct

SEQ ID NO: 4756 - DNA, 25 bp, Homo sapien
aggggacaccaggtgggaataagcc

SEQ ID NO: 4757 - DNA, 25 bp, Homo sapien
gccgtcgtcgacactggtggcgtcg

SEQ ID NO: 4758 - DNA, 25 bp, Homo sapien
cgacgccaccagtgtcgacgacggc

SEQ ID NO: 4759 - DNA, 25 bp, Homo sapien
gtactttctacttattcatttgtca

SEQ ID NO: 4760 - DNA, 25 bp, Homo sapien
tgacaaatgaataagtagaaagtac

SEQ ID NO: 4761 - DNA, 25 bp, Homo sapien
gtccggctgcccagaccgggtctga

SEQ ID NO: 4762 - DNA, 25 bp, Homo sapien
tcagacccggtctgggcagccggac

SEQ ID NO: 4763 - DNA, 25 bp, Homo sapien
gagcccctcccctgcgtccagtcgg

SEQ ID NO: 4764 - DNA, 25 bp, Homo sapien
ccgactggacgcaggggaggggctc

SEQ ID NO: 4765 - DNA, 25 bp, Homo sapien
cccctcccctgcgtccagtcgggtg

SEQ ID NO: 4766 - DNA, 25 bp, Homo sapien
cacccgactggacgcaggggagggg

SEQ ID NO: 4767 - DNA, 25 bp, Homo sapien
gcccctcccctgcgtccagtcgggt

SEQ ID NO: 4768 - DNA, 25 bp, Homo sapien
acccgactggacgcaggggaggggc

SEQ ID NO: 4769 - DNA, 25 bp, Homo sapien
ggacctcctccaccgaacccgacag

SEQ ID NO: 4770 - DNA, 25 bp, Homo sapien
ctgtcgggttcggtggaggaggtcc

SEQ ID NO: 4771 - DNA, 25 bp, Homo sapien
cattttcctcatctgtaatcacagg

SEQ ID NO: 4772 - DNA, 25 bp, Homo sapien
cctgtgattacagatgaggaaaatg

SEQ ID NO: 4773 - DNA, 25 bp, Homo sapien
gtatactattcaacaaatcggtgct

SEQ ID NO: 4774 - DNA, 25 bp, Homo sapien
agcaccgatttgttgaatagtatac

SEQ ID NO: 4775 - DNA, 25 bp, Homo sapien
cggtcgctcgctccttactccttcg

SEQ ID NO: 4776 - DNA, 25 bp, Homo sapien
cgaaggagtaaggagcgagcgaccg

SEQ ID NO: 4777 - DNA, 25 bp, Homo sapien
cgagtccgcctctcgtaaaggtgac

SEQ ID NO: 4778 - DNA, 25 bp, Homo sapien
gtcacctttacgagaggcggactcg

SEQ ID NO: 4779 - DNA, 25 bp, Homo sapien
aaactgcgtcgtctgtcagagagac

SEQ ID NO: 4780 - DNA, 25 bp, Homo sapien
gtctctctgacagacgacgcagttt

SEQ ID NO: 4781 - DNA, 25 bp, Homo sapien
aagacacttcaagaatatgaaagga

SEQ ID NO: 4782 - DNA, 25 bp, Homo sapien
tcctttcatattcttgaagtgtctt

SEQ ID NO: 4783 - DNA, 25 bp, Homo sapien
acgacgatcctgaaggggacctcaa

SEQ ID NO: 4784 - DNA, 25 bp, Homo sapien
ttgaggtccccttcaggatcgtcgt

SEQ ID NO: 4785 - DNA, 25 bp, Homo sapien
ggaaggttctctcaaatggttttat

SEQ ID NO: 4786 - DNA, 25 bp, Homo sapien
ataaaaccatttgagagaaccttcc

SEQ ID NO: 4787 - DNA, 25 bp, Homo sapien
agaggtaggctgttactaactaaaa

SEQ ID NO: 4788 - DNA, 25 bp, Homo sapien
ttttagttagtaacagcctacctct

SEQ ID NO: 4789 - DNA, 25 bp, Homo sapien
cagacgcggtgaggctcggccgggt

SEQ ID NO: 4790 - DNA, 25 bp, Homo sapien
acccggccgagcctcaccgcgtctg

SEQ ID NO: 4791 - DNA, 25 bp, Homo sapien
cggagagtgtgaaggcaccggaggt

SEQ ID NO: 4792 - DNA, 25 bp, Homo sapien
acctccggtgccttcacactctccg

SEQ ID NO: 4793 - DNA, 25 bp, Homo sapien
ggaggggactcatcggggcctcccg

SEQ ID NO: 4794 - DNA, 25 bp, Homo sapien
cgggaggccccgatgagtcccctcc

SEQ ID NO: 4795 - DNA, 25 bp, Homo sapien
ttttatgttcttaaacagaaactat

SEQ ID NO: 4796 - DNA, 25 bp, Homo sapien
atagtttctgtttaagaacataaaa

SEQ ID NO: 4797 - DNA, 25 bp, Homo sapien
aaagaggaaaagtgatacatcaagg

SEQ ID NO: 4798 - DNA, 25 bp, Homo sapien
ccttgatgtatcacttttcctcttt

SEQ ID NO: 4799 - DNA, 25 bp, Homo sapien
aaggtaccttcagtactaccacaag

SEQ ID NO: 4800 - DNA, 25 bp, Homo sapien
cttgtggtagtactgaaggtacctt

SEQ ID NO: 4801 - DNA, 25 bp, Homo sapien
tttacttctatacctattatagtcc

SEQ ID NO: 4802 - DNA, 25 bp, Homo sapien
ggactataataggtatagaagtaaa

SEQ ID NO: 4803 - DNA, 25 bp, Homo sapien
ccggattagtctcacttcgagtact

SEQ ID NO: 4804 - DNA, 25 bp, Homo sapien
agtactcgaagtgagactaatccgg

SEQ ID NO: 4805 - DNA, 25 bp, Homo sapien
ccgcgaacgcgcaccctccgcgcgc

SEQ ID NO: 4806 - DNA, 25 bp, Homo sapien
gcgcgcggagggtgcgcgttcgcgg

SEQ ID NO: 4807 - DNA, 25 bp, Homo sapien
gggtcccgcgaacgcgcaccctccg

SEQ ID NO: 4808 - DNA, 25 bp, Homo sapien
cggagggtgcgcgttcgcgggaccc

SEQ ID NO: 4809 - DNA, 25 bp, Homo sapien
atacttcttatcttaaaccaagtac

SEQ ID NO: 4810 - DNA, 25 bp, Homo sapien
gtacttggtttaagataagaagtat

SEQ ID NO: 4811 - DNA, 25 bp, Homo sapien
accttggagctgcaagtggaggtag

SEQ ID NO: 4812 - DNA, 25 bp, Homo sapien
ctacctccacttgcagctccaaggt

SEQ ID NO: 4813 - DNA, 25 bp, Homo sapien
tatatggtgactggtcgggttcaat

SEQ ID NO: 4814 - DNA, 25 bp, Homo sapien
attgaacccgaccagtcaccatata

SEQ ID NO: 4815 - DNA, 25 bp, Homo sapien
cgcacgactcgggtccagagaaggt

SEQ ID NO: 4816 - DNA, 25 bp, Homo sapien
accttctctggacccgagtcgtgcg

SEQ ID NO: 4817 - DNA, 25 bp, Homo sapien
gagcaacgggctctcctaccacatg

SEQ ID NO: 4818 - DNA, 25 bp, Homo sapien
catgtggtaggagagcccgttgctc

SEQ ID NO: 4819 - DNA, 25 bp, Homo sapien
gaccagaatcgtcgtcatccatcgt

SEQ ID NO: 4820 - DNA, 25 bp, Homo sapien
acgatggatgacgacgattctggtc

SEQ ID NO: 4821 - DNA, 25 bp, Homo sapien
ggatcaacgagccactctttacaat

SEQ ID NO: 4822 - DNA, 25 bp, Homo sapien
attgtaaagagtggctcgttgatcc

SEQ ID NO: 4823 - DNA, 25 bp, Homo sapien
gaaactagcagtgtcactattatag

SEQ ID NO: 4824 - DNA, 25 bp, Homo sapien
ctataatagtgacactgctagtttc

SEQ ID NO: 4825 - DNA, 25 bp, Homo sapien
atgagtatatgaagagtccgtaggg

SEQ ID NO: 4826 - DNA, 25 bp, Homo sapien
ccctacggactcttcatatactcat

SEQ ID NO: 4827 - DNA, 25 bp, Homo sapien
ctacgtcttagactccatcctgaca

SEQ ID NO: 4828 - DNA, 25 bp, Homo sapien
tgtcaggatggagtctaagacgtag

SEQ ID NO: 4829 - DNA, 25 bp, Homo sapien
cagtatcggacgtggttagtagtgt

SEQ ID NO: 4830 - DNA, 25 bp, Homo sapien
acactactaaccacgtccgatactg

SEQ ID NO: 4831 - DNA, 25 bp, Homo sapien
attcatcagtcgtcttttagggaaa

SEQ ID NO: 4832 - DNA, 25 bp, Homo sapien
tttccctaaaagacgactgatgaat

SEQ ID NO: 4833 - DNA, 25 bp, Homo sapien
gtgatgcgtccggacacttgcgcgt

SEQ ID NO: 4834 - DNA, 25 bp, Homo sapien
acgcgcaagtgtccggacgcatcac

SEQ ID NO: 4835 - DNA, 25 bp, Homo sapien
agaccgccggggtggcacacgccga

SEQ ID NO: 4836 - DNA, 25 bp, Homo sapien
tcggcgtgtgccaccccggcggtct

SEQ ID NO: 4837 - DNA, 25 bp, Homo sapien
gtcaacaaagagtgtaccccataat

SEQ ID NO: 4838 - DNA, 25 bp, Homo sapien
attatggggtacactctttgttgac

SEQ ID NO: 4839 - DNA, 25 bp, Homo sapien
caagaggttcgacgagtgcacacgg

SEQ ID NO: 4840 - DNA, 25 bp, Homo sapien
ccgtgtgcactcgtcgaacctcttg

SEQ ID NO: 4841 - DNA, 25 bp, Homo sapien
ccgccctgcggaccgccgagaccct

SEQ ID NO: 4842 - DNA, 25 bp, Homo sapien
agggtctcggcggtccgcagggcgg

SEQ ID NO: 4843 - DNA, 25 bp, Homo sapien
tcaccccgccctgcggaccgccgag

SEQ ID NO: 4844 - DNA, 25 bp, Homo sapien
ctcggcggtccgcagggcggggtga

SEQ ID NO: 4845 - DNA, 25 bp, Homo sapien
aagtacaaaattcttcgttgtattg

SEQ ID NO: 4846 - DNA, 25 bp, Homo sapien
caatacaacgaagaattttgtactt

SEQ ID NO: 4847 - DNA, 25 bp, Homo sapien
taaagtgagggtgtttacagtcctt

SEQ ID NO: 4848 - DNA, 25 bp, Homo sapien
aaggactgtaaacaccctcacttta

SEQ ID NO: 4849 - DNA, 25 bp, Homo sapien
gagtccatttgtaacctaagtttct

SEQ ID NO: 4850 - DNA, 25 bp, Homo sapien
agaaacttaggttacaaatggactc

SEQ ID NO: 4851 - DNA, 25 bp, Homo sapien
aactagtctcacttaacaacaatga

SEQ ID NO: 4852 - DNA, 25 bp, Homo sapien
tcattgttgttaagtgagactagtt

SEQ ID NO: 4853 - DNA, 25 bp, Homo sapien
ggtgtgtactcgacccctttaagac

SEQ ID NO: 4854 - DNA, 25 bp, Homo sapien
gtcttaaaggggtcgagtacacacc

SEQ ID NO: 4855 - DNA, 25 bp, Homo sapien
tccggactgacagtgcccgtggatg

SEQ ID NO: 4856 - DNA, 25 bp, Homo sapien
catccacgggcactgtcagtccgga

SEQ ID NO: 4857 - DNA, 25 bp, Homo sapien
tcatcaaattcgaatttttacatag

SEQ ID NO: 4858 - DNA, 25 bp, Homo sapien
ctatgtaaaaattcgaatttgatga

SEQ ID NO: 4859 - DNA, 25 bp, Homo sapien
ggccaacctccggatcgtcctgtga

SEQ ID NO: 4860 - DNA, 25 bp, Homo sapien
tcacaggacgatccggaggttggcc

SEQ ID NO: 4861 - DNA, 25 bp, Homo sapien
gggtctagacaaagtttagagtgac

SEQ ID NO: 4862 - DNA, 25 bp, Homo sapien
gtcactctaaactttgtctagaccc

SEQ ID NO: 4863 - DNA, 25 bp, Homo sapien
tctgtgtcgtggaggcagtccttca

SEQ ID NO: 4864 - DNA, 25 bp, Homo sapien
tgaaggactgcctccacgacacaga

SEQ ID NO: 4865 - DNA, 25 bp, Homo sapien
gtggtcccgtggtgcagaggccggc

SEQ ID NO: 4866 - DNA, 25 bp, Homo sapien
gccggcctctgcaccacgggaccac

SEQ ID NO: 4867 - DNA, 25 bp, Homo sapien
ccactcaccacagacgctgcacgac

SEQ ID NO: 4868 - DNA, 25 bp, Homo sapien
gtcgtgcagcgtctgtggtgagtgg

SEQ ID NO: 4869 - DNA, 25 bp, Homo sapien
tccgatcgggtcagtctacacatat

SEQ ID NO: 4870 - DNA, 25 bp, Homo sapien
atatgtgtagactgacccgatcgga

SEQ ID NO: 4871 - DNA, 25 bp, Homo sapien
tactgacacctaaatacaaacaata

SEQ ID NO: 4872 - DNA, 25 bp, Homo sapien
tattgtttgtatttaggtgtcagta

SEQ ID NO: 4873 - DNA, 25 bp, Homo sapien
ggcgccaagcgtacgggcggaaggc

SEQ ID NO: 4874 - DNA, 25 bp, Homo sapien
gccttccgcccgtacgcttggcgcc

SEQ ID NO: 4875 - DNA, 25 bp, Homo sapien
ccctacctctgcaggtctggaacgg

SEQ ID NO: 4876 - DNA, 25 bp, Homo sapien
ccgttccagacctgcagaggtaggg

SEQ ID NO: 4877 - DNA, 25 bp, Homo sapien
tcgacaggttcgtgccgctcgaccc

SEQ ID NO: 4878 - DNA, 25 bp, Homo sapien
gggtcgagcggcacgaacctgtcga

SEQ ID NO: 4879 - DNA, 25 bp, Homo sapien
acctatgttctgcatcatttaatat

SEQ ID NO: 4880 - DNA, 25 bp, Homo sapien
atattaaatgatgcagaacataggt

SEQ ID NO: 4881 - DNA, 25 bp, Homo sapien
aaatatgaccctcattattaacttt

SEQ ID NO: 4882 - DNA, 25 bp, Homo sapien
aaagttaataatgagggtcatattt

SEQ ID NO: 4883 - DNA, 25 bp, Homo sapien
agaaatatgaccctcattattaact

SEQ ID NO: 4884 - DNA, 25 bp, Homo sapien
agttaataatgagggtcatatttct

SEQ ID NO: 4885 - DNA, 25 bp, Homo sapien
ctcttacagcgggacacctacgggt

SEQ ID NO: 4886 - DNA, 25 bp, Homo sapien
acccgtaggtgtcccgctgtaagag

SEQ ID NO: 4887 - DNA, 25 bp, Homo sapien
caaacgagattactctcgtcgtcct

SEQ ID NO: 4888 - DNA, 25 bp, Homo sapien
aggacgacgagagtaatctcgtttg

SEQ ID NO: 4889 - DNA, 25 bp, Homo sapien
ctacatagaccttagtgataaaagt

SEQ ID NO: 4890 - DNA, 25 bp, Homo sapien
acttttatcactaaggtctatgtag

SEQ ID NO: 4891 - DNA, 25 bp, Homo sapien
actgatacacgagtatctagtgtca

SEQ ID NO: 4892 - DNA, 25 bp, Homo sapien
tgacactagatactcgtgtatcagt

SEQ ID NO: 4893 - DNA, 25 bp, Homo sapien
tgtacctgtaacaactgtagggacc

SEQ ID NO: 4894 - DNA, 25 bp, Homo sapien
ggtccctacagttgttacaggtaca

SEQ ID NO: 4895 - DNA, 25 bp, Homo sapien
tctgaccttgaattcaagtattaat

SEQ ID NO: 4896 - DNA, 25 bp, Homo sapien
attaatacttgaattcaaggtcaga

SEQ ID NO: 4897 - DNA, 25 bp, Homo sapien
tcggcgcagatgtgacggcgccctc

SEQ ID NO: 4898 - DNA, 25 bp, Homo sapien
gagggcgccgtcacatctgcgccga

SEQ ID NO: 4899 - DNA, 25 bp, Homo sapien
cttgtttcagatttaggtctcactt

SEQ ID NO: 4900 - DNA, 25 bp, Homo sapien
aagtgagacctaaatctgaaacaag

SEQ ID NO: 4901 - DNA, 25 bp, Homo sapien
gtagttgtctgtacccgtttcttaa

SEQ ID NO: 4902 - DNA, 25 bp, Homo sapien
ttaagaaacgggtacagacaactac

SEQ ID NO: 4903 - DNA, 25 bp, Homo sapien
cctcgcgtctcggcgcgtccgagtc

SEQ ID NO: 4904 - DNA, 25 bp, Homo sapien
gactcggacgcgccgagacgcgagg

SEQ ID NO: 4905 - DNA, 25 bp, Homo sapien
acctcgcgtctcggcgcgtccgagt

SEQ ID NO: 4906 - DNA, 25 bp, Homo sapien
actcggacgcgccgagacgcgaggt

SEQ ID NO: 4907 - DNA, 25 bp, Homo sapien
ccagggccccgtgctcgaggagatc

SEQ ID NO: 4908 - DNA, 25 bp, Homo sapien
gatctcctcgagcacggggccctgg

SEQ ID NO: 4909 - DNA, 25 bp, Homo sapien
gagatattaaaatcaggacaggacc

SEQ ID NO: 4910 - DNA, 25 bp, Homo sapien
ggtcctgtcctgattttaatatctc

SEQ ID NO: 4911 - DNA, 25 bp, Homo sapien
taaccgaaaggccaagtgtaaccga

SEQ ID NO: 4912 - DNA, 25 bp, Homo sapien
tcggttacacttggcctttcggtta

SEQ ID NO: 4913 - DNA, 25 bp, Homo sapien
ctcacgtgccgcacggcccggcagg

SEQ ID NO: 4914 - DNA, 25 bp, Homo sapien
cctgccgggccgtgcggcacgtgag

SEQ ID NO: 4915 - DNA, 25 bp, Homo sapien
aaatagtccaaaatgatgttagtaa

SEQ ID NO: 4916 - DNA, 25 bp, Homo sapien
ttactaacatcattttggactattt

SEQ ID NO: 4917 - DNA, 25 bp, Homo sapien
caaaatagtccaaaatgatgttagt

SEQ ID NO: 4918 - DNA, 25 bp, Homo sapien
actaacatcattttggactattttg

SEQ ID NO: 4919 - DNA, 25 bp, Homo sapien
gaggtacccctaccgttacatgtgg

SEQ ID NO: 4920 - DNA, 25 bp, Homo sapien
ccacatgtaacggtaggggtacctc

SEQ ID NO: 4921 - DNA, 25 bp, Homo sapien
taagttcacttatatcattgtagta

SEQ ID NO: 4922 - DNA, 25 bp, Homo sapien
tactacaatgatataagtgaactta

SEQ ID NO: 4923 - DNA, 25 bp, Homo sapien
gttctcccggaaagacgccgacgtc

SEQ ID NO: 4924 - DNA, 25 bp, Homo sapien
gacgtcggcgtctttccgggagaac

SEQ ID NO: 4925 - DNA, 25 bp, Homo sapien
caggggtggtcgtgtaccagtccca

SEQ ID NO: 4926 - DNA, 25 bp, Homo sapien
tgggactggtacacgaccacccctg

SEQ ID NO: 4927 - DNA, 25 bp, Homo sapien
gtctcagccccgagttacgggtgag

SEQ ID NO: 4928 - DNA, 25 bp, Homo sapien
ctcacccgtaactcggggctgagac

SEQ ID NO: 4929 - DNA, 25 bp, Homo sapien
gggtaacttcaacattaacttgtag

SEQ ID NO: 4930 - DNA, 25 bp, Homo sapien
ctacaagttaatgttgaagttaccc

SEQ ID NO: 4931 - DNA, 25 bp, Homo sapien
gcgtcatctataagatgtcgctagt

SEQ ID NO: 4932 - DNA, 25 bp, Homo sapien
actagcgacatcttatagatgacgc

SEQ ID NO: 4933 - DNA, 25 bp, Homo sapien
ccgcggcgcccgagcccctcgtgcc

SEQ ID NO: 4934 - DNA, 25 bp, Homo sapien
ggcacgaggggctcgggcgccgcgg

SEQ ID NO: 4935 - DNA, 25 bp, Homo sapien
ggcccccgggggacatcagcggcgt

SEQ ID NO: 4936 - DNA, 25 bp, Homo sapien
acgccgctgatgtcccccgggggcc

SEQ ID NO: 4937 - DNA, 25 bp, Homo sapien
tcggaggcgacttattagacctaag

SEQ ID NO: 4938 - DNA, 25 bp, Homo sapien
cttaggtctaataagtcgcctccga

SEQ ID NO: 4939 - DNA, 25 bp, Homo sapien
tttacgataccggagtagttctaca

SEQ ID NO: 4940 - DNA, 25 bp, Homo sapien
tgtagaactactccggtatcgtaaa

SEQ ID NO: 4941 - DNA, 25 bp, Homo sapien
cgactcttataacgaggaccatttt

SEQ ID NO: 4942 - DNA, 25 bp, Homo sapien
aaaatggtcctcgttataagagtcg

SEQ ID NO: 4943 - DNA, 25 bp, Homo sapien
cttgttgccccgtccgacagtggcg

SEQ ID NO: 4944 - DNA, 25 bp, Homo sapien
cgccactgtcggacggggcaacaag

SEQ ID NO: 4945 - DNA, 25 bp, Homo sapien
cgttttcttaattatatcattgttt

SEQ ID NO: 4946 - DNA, 25 bp, Homo sapien
aaacaatgatataattaagaaaacg

SEQ ID NO: 4947 - DNA, 25 bp, Homo sapien
acgttttcttaattatatcattgtt

SEQ ID NO: 4948 - DNA, 25 bp, Homo sapien
aacaatgatataattaagaaaacgt

SEQ ID NO: 4949 - DNA, 25 bp, Homo sapien
taattatatcattgtttcagattct

SEQ ID NO: 4950 - DNA, 25 bp, Homo sapien
agaatctgaaacaatgatataatta

SEQ ID NO: 4951 - DNA, 25 bp, Homo sapien
acggtataagtattatcacttagaa

SEQ ID NO: 4952 - DNA, 25 bp, Homo sapien
ttctaagtgataatacttataccgt

SEQ ID NO: 4953 - DNA, 25 bp, Homo sapien
tgcgccagacccggggcccaacgag

SEQ ID NO: 4954 - DNA, 25 bp, Homo sapien
ctcgttgggccccgggtctggcgca

SEQ ID NO: 4955 - DNA, 25 bp, Homo sapien
ggtcgtcctggtcctaccgtccttc

SEQ ID NO: 4956 - DNA, 25 bp, Homo sapien
gaaggacggtaggaccaggacgacc

SEQ ID NO: 4957 - DNA, 25 bp, Homo sapien
tcccaaaggactattacttatgaag

SEQ ID NO: 4958 - DNA, 25 bp, Homo sapien
cttcataagtaatagtcctttggga

SEQ ID NO: 4959 - DNA, 25 bp, Homo sapien
aataggtctagatacaaatatatat

SEQ ID NO: 4960 - DNA, 25 bp, Homo sapien
atatatatttgtatctagacctatt

SEQ ID NO: 4961 - DNA, 25 bp, Homo sapien
aaataggtctagatacaaatatata

SEQ ID NO: 4962 - DNA, 25 bp, Homo sapien
tatatatttgtatctagacctattt

SEQ ID NO: 4963 - DNA, 25 bp, Homo sapien
taagcctttagtacgacacatctcg

SEQ ID NO: 4964 - DNA, 25 bp, Homo sapien
cgagatgtgtcgtactaaaggctta

SEQ ID NO: 4965 - DNA, 25 bp, Homo sapien
tcagtttagatctttactaaggtct

SEQ ID NO: 4966 - DNA, 25 bp, Homo sapien
agaccttagtaaagatctaaactga

SEQ ID NO: 4967 - DNA, 25 bp, Homo sapien
acaaaaacgtagagttcattacagg

SEQ ID NO: 4968 - DNA, 25 bp, Homo sapien
cctgtaatgaactctacgtttttgt

SEQ ID NO: 4969 - DNA, 25 bp, Homo sapien
ccgcagagggcgagggcacgtccgt

SEQ ID NO: 4970 - DNA, 25 bp, Homo sapien
acggacgtgccctcgccctctgcgg

SEQ ID NO: 4971 - DNA, 25 bp, Homo sapien
cgcagagggcgagggcacgtccgtg

SEQ ID NO: 4972 - DNA, 25 bp, Homo sapien
cacggacgtgccctcgccctctgcg

SEQ ID NO: 4973 - DNA, 25 bp, Homo sapien
cggggtcctagtccgaccagcggct

SEQ ID NO: 4974 - DNA, 25 bp, Homo sapien
agccgctggtcggactaggaccccg

SEQ ID NO: 4975 - DNA, 25 bp, Homo sapien
gaccgtcgacggggaacagcaaacg

SEQ ID NO: 4976 - DNA, 25 bp, Homo sapien
cgtttgctgttccccgtcgacggtc

SEQ ID NO: 4977 - DNA, 25 bp, Homo sapien
gacaacatactaacttcaccaacaa

SEQ ID NO: 4978 - DNA, 25 bp, Homo sapien
ttgttggtgaagttagtatgttgtc

SEQ ID NO: 4979 - DNA, 25 bp, Homo sapien
gtcttaccagtctacacgcaagaaa

SEQ ID NO: 4980 - DNA, 25 bp, Homo sapien
tttcttgcgtgtagactggtaagac

SEQ ID NO: 4981 - DNA, 25 bp, Homo sapien
gtctgtagcctatatttggtgtcac

SEQ ID NO: 4982 - DNA, 25 bp, Homo sapien
gtgacaccaaatataggctacagac

SEQ ID NO: 4983 - DNA, 25 bp, Homo sapien
ctaatctcactacttgaagatttag

SEQ ID NO: 4984 - DNA, 25 bp, Homo sapien
ctaaatcttcaagtagtgagattag

SEQ ID NO: 4985 - DNA, 25 bp, Homo sapien
gacgacctgtggtccctggtcgggt

SEQ ID NO: 4986 - DNA, 25 bp, Homo sapien
acccgaccagggaccacaggtcgtc

SEQ ID NO: 4987 - DNA, 25 bp, Homo sapien
agtttcttcaggtccttatgtgtag

SEQ ID NO: 4988 - DNA, 25 bp, Homo sapien
ctacacataaggacctgaagaaact

SEQ ID NO: 4989 - DNA, 25 bp, Homo sapien
tccgtcgtgagacagcagtaggtgt

SEQ ID NO: 4990 - DNA, 25 bp, Homo sapien
acacctactgctgtctcacgacgga

SEQ ID NO: 4991 - DNA, 25 bp, Homo sapien
ttggatctcctagttcgtcgcggta

SEQ ID NO: 4992 - DNA, 25 bp, Homo sapien
taccgcgacgaactaggagatccaa

SEQ ID NO: 4993 - DNA, 25 bp, Homo sapien
gaaaagtcctagatttcgatatgag

SEQ ID NO: 4994 - DNA, 25 bp, Homo sapien
ctcatatcgaaatctaggacttttc

SEQ ID NO: 4995 - DNA, 25 bp, Homo sapien
gtggtgccctctccctcaggcgccg

SEQ ID NO: 4996 - DNA, 25 bp, Homo sapien
cggcgcctgagggagagggcaccac

SEQ ID NO: 4997 - DNA, 25 bp, Homo sapien
tgcgcgtcccgtggtgccctctccc

SEQ ID NO: 4998 - DNA, 25 bp, Homo sapien
gggagagggcaccacgggacgcgca

SEQ ID NO: 4999 - DNA, 25 bp, Homo sapien
acgtcagccccgcttgaggggggag

SEQ ID NO: 5000 - DNA, 25 bp, Homo sapien
ctcccccctcaagcggggctgacgt

SEQ ID NO: 5001 - DNA, 25 bp, Homo sapien
gacgtcagccccgcttgagggggga

SEQ ID NO: 5002 - DNA, 25 bp, Homo sapien
tcccccctcaagcggggctgacgtc

SEQ ID NO: 5003 - DNA, 25 bp, Homo sapien
tcgaccttccggagcccgccgtccg

SEQ ID NO: 5004 - DNA, 25 bp, Homo sapien
cggacggcgggctccggaaggtcga

SEQ ID NO: 5005 - DNA, 25 bp, Homo sapien
aacaaccgctagaccggtctgaagg

SEQ ID NO: 5006 - DNA, 25 bp, Homo sapien
ccttcagaccggtctagcggttgtt

SEQ ID NO: 5007 - DNA, 25 bp, Homo sapien
cttggttaaagggagtgttacatcc

SEQ ID NO: 5008 - DNA, 25 bp, Homo sapien
ggatgtaacactccctttaaccaag

SEQ ID NO: 5009 - DNA, 25 bp, Homo sapien
gaagtcccgcgggtctgttttgggc

SEQ ID NO: 5010 - DNA, 25 bp, Homo sapien
gcccaaaacagacccgcgggacttc

SEQ ID NO: 5011 - DNA, 25 bp, Homo sapien
acacctggtccaagtacctctgacg

SEQ ID NO: 5012 - DNA, 25 bp, Homo sapien
cgtcagaggtacttggaccaggtgt

SEQ ID NO: 5013 - DNA, 25 bp, Homo sapien
aacatgaggttaaggtcggcgcaag

SEQ ID NO: 5014 - DNA, 25 bp, Homo sapien
cttgcgccgaccttaacctcatgtt

SEQ ID NO: 5015 - DNA, 25 bp, Homo sapien
ccgaccgcgaaatcaacttgggtcc

SEQ ID NO: 5016 - DNA, 25 bp, Homo sapien
ggacccaagttgatttcgcggtcgg

SEQ ID NO: 5017 - DNA, 25 bp, Homo sapien
cgtcgcctcgcgcgcccagacgcgt

SEQ ID NO: 5018 - DNA, 25 bp, Homo sapien
acgcgtctgggcgcgcgaggcgacg

SEQ ID NO: 5019 - DNA, 25 bp, Homo sapien
acgtcgcctcgcgcgcccagacgcg

SEQ ID NO: 5020 - DNA, 25 bp, Homo sapien
cgcgtctgggcgcgcgaggcgacgt

SEQ ID NO: 5021 - DNA, 25 bp, Homo sapien
gacgtcgcctcgcgcgcccagacgc

SEQ ID NO: 5022 - DNA, 25 bp, Homo sapien
gcgtctgggcgcgcgaggcgacgtc

SEQ ID NO: 5023 - DNA, 25 bp, Homo sapien
caaaattgtttcaatacagtaatgt

SEQ ID NO: 5024 - DNA, 25 bp, Homo sapien
acattactgtattgaaacaattttg

SEQ ID NO: 5025 - DNA, 25 bp, Homo sapien
tccagtcggccttccacgccgatct

SEQ ID NO: 5026 - DNA, 25 bp, Homo sapien
agatcggcgtggaaggccgactgga

SEQ ID NO: 5027 - DNA, 25 bp, Homo sapien
tttttcttatctccttccaacgaag

SEQ ID NO: 5028 - DNA, 25 bp, Homo sapien
cttcgttggaaggagataagaaaaa

SEQ ID NO: 5029 - DNA, 25 bp, Homo sapien
cgagaaagaaggtggagcggatgta

SEQ ID NO: 5030 - DNA, 25 bp, Homo sapien
tacatccgctccaccttctttctcg

SEQ ID NO: 5031 - DNA, 25 bp, Homo sapien
ggtccgtcgcggcaagggtggcggg

SEQ ID NO: 5032 - DNA, 25 bp, Homo sapien
cccgccacccttgccgcgacggacc

SEQ ID NO: 5033 - DNA, 25 bp, Homo sapien
gttctagaatcgcacaagaagtttt

SEQ ID NO: 5034 - DNA, 25 bp, Homo sapien
aaaacttcttgtgcgattctagaac

SEQ ID NO: 5035 - DNA, 25 bp, Homo sapien
ggaggagggcggcgaggtgctccgg

SEQ ID NO: 5036 - DNA, 25 bp, Homo sapien
ccggagcacctcgccgccctcctcc

SEQ ID NO: 5037 - DNA, 25 bp, Homo sapien
cggccggtcaggttccttctcgaag

SEQ ID NO: 5038 - DNA, 25 bp, Homo sapien
cttcgagaaggaacctgaccggccg

SEQ ID NO: 5039 - DNA, 25 bp, Homo sapien
cgagggcggcggctaactgggcgcg

SEQ ID NO: 5040 - DNA, 25 bp, Homo sapien
cgcgcccagttagccgccgccctcg

SEQ ID NO: 5041 - DNA, 25 bp, Homo sapien
gtcggtagactctattctgtgaaga

SEQ ID NO: 5042 - DNA, 25 bp, Homo sapien
tcttcacagaatagagtctaccgac

SEQ ID NO: 5043 - DNA, 25 bp, Homo sapien
ttttagggggctacaagggtagaca

SEQ ID NO: 5044 - DNA, 25 bp, Homo sapien
tgtctacccttgtagccccctaaaa

SEQ ID NO: 5045 - DNA, 25 bp, Homo sapien
agttctcttgtctgtgcatgttgta

SEQ ID NO: 5046 - DNA, 25 bp, Homo sapien
tacaacatgcacagacaagagaact

SEQ ID NO: 5047 - DNA, 25 bp, Homo sapien
ggtggtccgggtgacgagtcaggag

SEQ ID NO: 5048 - DNA, 25 bp, Homo sapien
ctcctgactcgtcacccggaccacc

SEQ ID NO: 5049 - DNA, 25 bp, Homo sapien
gagacacaaatcaaaggcctaaaag

SEQ ID NO: 5050 - DNA, 25 bp, Homo sapien
cttttaggcctttgatttgtgtctc

SEQ ID NO: 5051 - DNA, 25 bp, Homo sapien
ggaccccacatgtacgacggaacgg

SEQ ID NO: 5052 - DNA, 25 bp, Homo sapien
ccgttccgtcgtacatgtggggtcc

SEQ ID NO: 5053 - DNA, 25 bp, Homo sapien
tcccgttaccgtcagccgtcccgga

SEQ ID NO: 5054 - DNA, 25 bp, Homo sapien
tccgggacggctgacggtaacggga

SEQ ID NO: 5055 - DNA, 25 bp, Homo sapien
cttccccatgactcactcacacccg

SEQ ID NO: 5056 - DNA, 25 bp, Homo sapien
cgggtgtgagtgagtcatggggaag

SEQ ID NO: 5057 - DNA, 25 bp, Homo sapien
acaggggcacccaggagagtccagg

SEQ ID NO: 5058 - DNA, 25 bp, Homo sapien
cctggactctcctgggtgcccctgt

SEQ ID NO: 5059 - DNA, 25 bp, Homo sapien
cttccctgtctttttacactcctgt

SEQ ID NO: 5060 - DNA, 25 bp, Homo sapien
acaggagtgtaaaaagacagggaag

SEQ ID NO: 5061 - DNA, 25 bp, Homo sapien
gcccgtatcgcctacgacaaggaga

SEQ ID NO: 5062 - DNA, 25 bp, Homo sapien
tctccttgtcgtaggcgatacgggc

SEQ ID NO: 5063 - DNA, 25 bp, Homo sapien
ttttgaacacatataaaactaagac

SEQ ID NO: 5064 - DNA, 25 bp, Homo sapien
gtcttagttttatatgtgttcaaaa

SEQ ID NO: 5065 - DNA, 25 bp, Homo sapien
gggtccgacacgcacagccttcggg

SEQ ID NO: 5066 - DNA, 25 bp, Homo sapien
cccgaaggctgtgcgtgtcggaccc

SEQ ID NO: 5067 - DNA, 25 bp, Homo sapien
ggacccccggcggcctcggcacgag

SEQ ID NO: 5068 - DNA, 25 bp, Homo sapien
ctcgtgccgaggccgccgggggtcc

SEQ ID NO: 5069 - DNA, 25 bp, Homo sapien
cgcgaggccccaccgcggctgggcg

SEQ ID NO: 5070 - DNA, 25 bp, Homo sapien
cgcccagccgcggtggggcctcgcg

SEQ ID NO: 5071 - DNA, 25 bp, Homo sapien
gcgcgaggccccaccgcggctgggc

SEQ ID NO: 5072 - DNA, 25 bp, Homo sapien
gcccagccgcggtggggcctcgcgc

SEQ ID NO: 5073 - DNA, 25 bp, Homo sapien
tctaataattctgtgtaaaatcggt

SEQ ID NO: 5074 - DNA, 25 bp, Homo sapien
accgattttacacagaattattaga

SEQ ID NO: 5075 - DNA, 25 bp, Homo sapien
cccctacgtccgggcgcaccgacac

SEQ ID NO: 5076 - DNA, 25 bp, Homo sapien
gtgtcggtgcgcccggacgtagggg

SEQ ID NO: 5077 - DNA, 25 bp, Homo sapien
cgtgtgtgcggggtgactggtcctg

SEQ ID NO: 5078 - DNA, 25 bp, Homo sapien
caggaccagtcaccccgcacacacg

SEQ ID NO: 5079 - DNA, 25 bp, Homo sapien
ctcgcccgtccaccgtagcccgtcg

SEQ ID NO: 5080 - DNA, 25 bp, Homo sapien
cgacgggctacggtggacgggcgag

SEQ ID NO: 5081 - DNA, 25 bp, Homo sapien
gatccatcgtttcttttcagacgtg

SEQ ID NO: 5082 - DNA, 25 bp, Homo sapien
cacgtctgaaaagaaacgatggatc

SEQ ID NO: 5083 - DNA, 25 bp, Homo sapien
agtcgacggtccggtaggcggacaa

SEQ ID NO: 5084 - DNA, 25 bp, Homo sapien
ttgtccgcctaccggaccgtcgact

SEQ ID NO: 5085 - DNA, 25 bp, Homo sapien
ccccggcgcgccctcggtcctgagg

SEQ ID NO: 5086 - DNA, 25 bp, Homo sapien
cctcaggaccgagggcgcgccgggg

SEQ ID NO: 5087 - DNA, 25 bp, Homo sapien
gcctggacagtgtcagggtggtctg

SEQ ID NO: 5088 - DNA, 25 bp, Homo sapien
cagaccaccctgacactgtccaggc

SEQ ID NO: 5089 - DNA, 25 bp, Homo sapien
atctttaagatattgatcctcccat

SEQ ID NO: 5090 - DNA, 25 bp, Homo sapien
atgggaggatcaatatcttaaagat

SEQ ID NO: 5091 - DNA, 25 bp, Homo sapien
agggcacagggcgaggggttgacac

SEQ ID NO: 5092 - DNA, 25 bp, Homo sapien
gtgtcaacccctcgccctgtgccct

SEQ ID NO: 5093 - DNA, 25 bp, Homo sapien
cctcgttcaatgtggttgtcctaag

SEQ ID NO: 5094 - DNA, 25 bp, Homo sapien
cttaggacaaccacattgaacgagg

SEQ ID NO: 5095 - DNA, 25 bp, Homo sapien
tgtttcttctactacaaatctcagt

SEQ ID NO: 5096 - DNA, 25 bp, Homo sapien
actgagatttgtagtagaagaaaca

SEQ ID NO: 5097 - DNA, 25 bp, Homo sapien
aaaagaactcatagttaagaaactg

SEQ ID NO: 5098 - DNA, 25 bp, Homo sapien
cagtttcttaactatgagttctttt

SEQ ID NO: 5099 - DNA, 25 bp, Homo sapien
cgaataattttcgagcacgtgtacg

SEQ ID NO: 5100 - DNA, 25 bp, Homo sapien
cgtacacgtgctcgaaaattattcg

SEQ ID NO: 5101 - DNA, 25 bp, Homo sapien
tgacaagtctttactcccgatttaa

SEQ ID NO: 5102 - DNA, 25 bp, Homo sapien
ttaaatcgggagtaaagacttgtca

SEQ ID NO: 5103 - DNA, 25 bp, Homo sapien
aagtaatagtcattcccaaagaagt

SEQ ID NO: 5104 - DNA, 25 bp, Homo sapien
acttctttgggaatgactattactt

SEQ ID NO: 5105 - DNA, 25 bp, Homo sapien
aacatttggacactaagatcctagt

SEQ ID NO: 5106 - DNA, 25 bp, Homo sapien
actaggatcttagtgtccaaatgtt

SEQ ID NO: 5107 - DNA, 25 bp, Homo sapien
ctgaagttcaccgtacacgtgatgt

SEQ ID NO: 5108 - DNA, 25 bp, Homo sapien
acatcacgtgtacggtgaacttcag

SEQ ID NO: 5109 - DNA, 25 bp, Homo sapien
gtcagcgcgtacgtgcgcccgcccg

SEQ ID NO: 5110 - DNA, 25 bp, Homo sapien
cgggcgggcgcacgtacgcgctgac

SEQ ID NO: 5111 - DNA, 25 bp, Homo sapien
aaggtcaaactttgtaaatcgtgaa

SEQ ID NO: 5112 - DNA, 25 bp, Homo sapien
ttcacgatttacaaagtttgacctt

SEQ ID NO: 5113 - DNA, 25 bp, Homo sapien
ctcctcgcacactcgcaggagtaat

SEQ ID NO: 5114 - DNA, 25 bp, Homo sapien
attactcctgcgagtgtgcgaggag

SEQ ID NO: 5115 - DNA, 25 bp, Homo sapien
cgtcgctcccgctgcggcccgaagg

SEQ ID NO: 5116 - DNA, 25 bp, Homo sapien
ccttcgggccgcagcgggagcgacg

SEQ ID NO: 5117 - DNA, 25 bp, Homo sapien
gagtcccccggcttctccagccgcc

SEQ ID NO: 5118 - DNA, 25 bp, Homo sapien
ggcggctggagaagccgggggactc

SEQ ID NO: 5119 - DNA, 25 bp, Homo sapien
ggttacgactttaacgaagagacag

SEQ ID NO: 5120 - DNA, 25 bp, Homo sapien
ctgtctcttcgttaaagtcgtaacc

SEQ ID NO: 5121 - DNA, 25 bp, Homo sapien
gccagtcaggcgttacttccacata

SEQ ID NO: 5122 - DNA, 25 bp, Homo sapien
tatgtggaagtaacgcctgactggc

SEQ ID NO: 5123 - DNA, 25 bp, Homo sapien
gagtgtccttgatcccttaccggaa

SEQ ID NO: 5124 - DNA, 25 bp, Homo sapien
ttccggtaagggatcaaggacactc

SEQ ID NO: 5125 - DNA, 25 bp, Homo sapien
gtccgcaaagggtttccttcattct

SEQ ID NO: 5126 - DNA, 25 bp, Homo sapien
agaatgaaggaaaccctttgcggac

SEQ ID NO: 5127 - DNA, 25 bp, Homo sapien
agacgcttgggaaggaaaccaccat

SEQ ID NO: 5128 - DNA, 25 bp, Homo sapien
atggtggtttccttcccaagcgtct

SEQ ID NO: 5129 - DNA, 25 bp, Homo sapien
tagtgtaacaaaattcctaaataga

SEQ ID NO: 5130 - DNA, 25 bp, Homo sapien
tctatttaggaattttgttacacta

SEQ ID NO: 5131 - DNA, 25 bp, Homo sapien
tcagccctggccaccgcggggacct

SEQ ID NO: 5132 - DNA, 25 bp, Homo sapien
aggtccccgcggtggccagggctga

SEQ ID NO: 5133 - DNA, 25 bp, Homo sapien
gtcagccctggccaccgcggggacc

SEQ ID NO: 5134 - DNA, 25 bp, Homo sapien
ggtccccgcggtggccagggctgac

SEQ ID NO: 5135 - DNA, 25 bp, Homo sapien
gcgcagggcggtcagccctggccac

SEQ ID NO: 5136 - DNA, 25 bp, Homo sapien
gtggccagggctgaccgccctgcgc

SEQ ID NO: 5137 - DNA, 25 bp, Homo sapien
tcgaagggaacccatactatatagg

SEQ ID NO: 5138 - DNA, 25 bp, Homo sapien
cctatatagtatgggttcccttcga

SEQ ID NO: 5139 - DNA, 25 bp, Homo sapien
aattcaagaactactaatatttcat

SEQ ID NO: 5140 - DNA, 25 bp, Homo sapien
atgaaatattagtagttcttgaatt

SEQ ID NO: 5141 - DNA, 25 bp, Homo sapien
gcacccaggccccgagagagccgca

SEQ ID NO: 5142 - DNA, 25 bp, Homo sapien
tgcggctctctcggggcctgggtgc

SEQ ID NO: 5143 - DNA, 25 bp, Homo sapien
tttcaaagtagaagatgtacgagta

SEQ ID NO: 5144 - DNA, 25 bp, Homo sapien
tactcgtacatcttctactttgaaa

SEQ ID NO: 5145 - DNA, 25 bp, Homo sapien
gcgacacgttaatcgccggacgcct

SEQ ID NO: 5146 - DNA, 25 bp, Homo sapien
aggcgtccggcgattaacgtgtcgc

SEQ ID NO: 5147 - DNA, 25 bp, Homo sapien
cgtccctgaaaggtgattcagacca

SEQ ID NO: 5148 - DNA, 25 bp, Homo sapien
tggtctgaatcacctttcagggacg

SEQ ID NO: 5149 - DNA, 25 bp, Homo sapien
aggcacctccctcacccgccgcgta

SEQ ID NO: 5150 - DNA, 25 bp, Homo sapien
tacgcggcgggtgagggaggtgcct

SEQ ID NO: 5151 - DNA, 25 bp, Homo sapien
gtcgtctcgagctcggcgtgacgtc

SEQ ID NO: 5152 - DNA, 25 bp, Homo sapien
gacgtcacgccgagctcgagacgac

SEQ ID NO: 5153 - DNA, 25 bp, Homo sapien
gacgtcactccccagcaacaagggt

SEQ ID NO: 5154 - DNA, 25 bp, Homo sapien
acccttgttgctggggagtgacgtc

SEQ ID NO: 5155 - DNA, 25 bp, Homo sapien
caaatgtagcccttacggaaaacag

SEQ ID NO: 5156 - DNA, 25 bp, Homo sapien
ctgttttccgtaagggctacatttg

SEQ ID NO: 5157 - DNA, 25 bp, Homo sapien
taaagtagtctacataaaaatttct

SEQ ID NO: 5158 - DNA, 25 bp, Homo sapien
agaaatttttatgtagactacttta

SEQ ID NO: 5159 - DNA, 25 bp, Homo sapien
gaagtagtatccactcagacattgt

SEQ ID NO: 5160 - DNA, 25 bp, Homo sapien
acaatgtctgagtggatactacttc

SEQ ID NO: 5161 - DNA, 25 bp, Homo sapien
atcaacgtacttactaattattata

SEQ ID NO: 5162 - DNA, 25 bp, Homo sapien
tataataattagtaagtacgttgat

SEQ ID NO: 5163 - DNA, 25 bp, Homo sapien
tatcaacgtacttactaattattat

SEQ ID NO: 5164 - DNA, 25 bp, Homo sapien
ataataattagtaagtacgttgata

SEQ ID NO: 5165 - DNA, 25 bp, Homo sapien
aagccgggtgctgacactactgact

SEQ ID NO: 5166 - DNA, 25 bp, Homo sapien
agtcagtagtgtcagcacccggctt

SEQ ID NO: 5167 - DNA, 25 bp, Homo sapien
tcaacgaccgacaagcgtcgggaaa

SEQ ID NO: 5168 - DNA, 25 bp, Homo sapien
tttcccgacgcttgtcggtcgttga

SEQ ID NO: 5169 - DNA, 25 bp, Homo sapien
aagtcacttatgtcggagactttcg

SEQ ID NO: 5170 - DNA, 25 bp, Homo sapien
cgaaagtctccgacataagtgactt

SEQ ID NO: 5171 - DNA, 25 bp, Homo sapien
gaaagttaaaataggcttaagttga

SEQ ID NO: 5172 - DNA, 25 bp, Homo sapien
tcaacttaagcctattttaactttc

SEQ ID NO: 5173 - DNA, 25 bp, Homo sapien
actgacaggaggtcagccgaggaca

SEQ ID NO: 5174 - DNA, 25 bp, Homo sapien
tgtcctcggctgacctcctgtcagt

SEQ ID NO: 5175 - DNA, 25 bp, Homo sapien
aaaatgacagtatgaggaacccttc

SEQ ID NO: 5176 - DNA, 25 bp, Homo sapien
gaagggttcctcatactgtcatttt

SEQ ID NO: 5177 - DNA, 25 bp, Homo sapien
gtcggacccaactccagaggaagtc

SEQ ID NO: 5178 - DNA, 25 bp, Homo sapien
gacttcctctggagttgggtccgac

SEQ ID NO: 5179 - DNA, 25 bp, Homo sapien
cccggagtgtcaccgggagtgtacg

SEQ ID NO: 5180 - DNA, 25 bp, Homo sapien
cgtacactcccggtgacactccggg

SEQ ID NO: 5181 - DNA, 25 bp, Homo sapien
ttttaccgttattgtctaagaaata

SEQ ID NO: 5182 - DNA, 25 bp, Homo sapien
tatttcttagacaataacggtaaaa

SEQ ID NO: 5183 - DNA, 25 bp, Homo sapien
aaaccttctgacgactgtcgtttca

SEQ ID NO: 5184 - DNA, 25 bp, Homo sapien
tgaaacgacagtcgtcagaaggttt

SEQ ID NO: 5185 - DNA, 25 bp, Homo sapien
cctatccctctaactgaatgacgga

SEQ ID NO: 5186 - DNA, 25 bp, Homo sapien
tccgtcattcagttagagggatagg

SEQ ID NO: 5187 - DNA, 25 bp, Homo sapien
cgagaccaactcctttagatggggc

SEQ ID NO: 5188 - DNA, 25 bp, Homo sapien
gccccatctaaaggagttggtctcg

SEQ ID NO: 5189 - DNA, 25 bp, Homo sapien
ggaggtttcaaaattcaaggtctat

SEQ ID NO: 5190 - DNA, 25 bp, Homo sapien
atagaccttgaattttgaaacctcc

SEQ ID NO: 5191 - DNA, 25 bp, Homo sapien
gaacaagtatccctagagtgaataa

SEQ ID NO: 5192 - DNA, 25 bp, Homo sapien
ttattcactctagggatacttgttc

SEQ ID NO: 5193 - DNA, 25 bp, Homo sapien
ccgactctactcgctccggtctttc

SEQ ID NO: 5194 - DNA, 25 bp, Homo sapien
gaaagaccggagcgagtagagtcgg

SEQ ID NO: 5195 - DNA, 25 bp, Homo sapien
gaagaggtagtagaactataaagta

SEQ ID NO: 5196 - DNA, 25 bp, Homo sapien
tactttatagttctactacctcttc

SEQ ID NO: 5197 - DNA, 25 bp, Homo sapien
tcaaagttccggaaacatattcgaa

SEQ ID NO: 5198 - DNA, 25 bp, Homo sapien
ttcgaatatgtttccggaactttga

SEQ ID NO: 5199 - DNA, 25 bp, Homo sapien
ccacgtagttatcgcgtagggagac

SEQ ID NO: 5200 - DNA, 25 bp, Homo sapien
gtctccctacgcgataactacgtgg

SEQ ID NO: 5201 - DNA, 25 bp, Homo sapien
atctttcggtgacgcagggccttag

SEQ ID NO: 5202 - DNA, 25 bp, Homo sapien
ctaaggccctgcgtcaccgaaagat

SEQ ID NO: 5203 - DNA, 25 bp, Homo sapien
acaaaagttaacaagaacaccatat

SEQ ID NO: 5204 - DNA, 25 bp, Homo sapien
atatggtgttcttgttaacttttgt

SEQ ID NO: 5205 - DNA, 25 bp, Homo sapien
ggtggggtggcacgccgggcctccg

SEQ ID NO: 5206 - DNA, 25 bp, Homo sapien
cggaggcccggcgtgccaccccacc

SEQ ID NO: 5207 - DNA, 25 bp, Homo sapien
ttgaactagaagcaagatagacggt

SEQ ID NO: 5208 - DNA, 25 bp, Homo sapien
accgtctatcttgcttctagttcaa

SEQ ID NO: 5209 - DNA, 25 bp, Homo sapien
aattagtggtaatcaggtccaaact

SEQ ID NO: 5210 - DNA, 25 bp, Homo sapien
agtttggacctgattaccactaatt

SEQ ID NO: 5211 - DNA, 25 bp, Homo sapien
tgtttaagatgacactcatataaga

SEQ ID NO: 5212 - DNA, 25 bp, Homo sapien
tcttatatgagtgtcatcttaaaca

SEQ ID NO: 5213 - DNA, 25 bp, Homo sapien
aggaactaccccacagttcgagcct

SEQ ID NO: 5214 - DNA, 25 bp, Homo sapien
aggctcgaactgtggggtagttcct

SEQ ID NO: 5215 - DNA, 25 bp, Homo sapien
tgaacatcactaacaaaagaccact

SEQ ID NO: 5216 - DNA, 25 bp, Homo sapien
agtggtcttttgttagtgatgttca

SEQ ID NO: 5217 - DNA, 25 bp, Homo sapien
atggtcaaacgtgtatacgacgttg

SEQ ID NO: 5218 - DNA, 25 bp, Homo sapien
caacgtcgtatacacgtttgaccat

SEQ ID NO: 5219 - DNA, 25 bp, Homo sapien
tttgttgttgtgttacgtattttgt

SEQ ID NO: 5220 - DNA, 25 bp, Homo sapien
acaaaatacgtaacacaacaacaaa

SEQ ID NO: 5221 - DNA, 25 bp, Homo sapien
gttgtagtagattccggtcacgacg

SEQ ID NO: 5222 - DNA, 25 bp, Homo sapien
cgtcgtgaccggaatctactacaac

SEQ ID NO: 5223 - DNA, 25 bp, Homo sapien
taccggtagcgatacccaacgtgaa

SEQ ID NO: 5224 - DNA, 25 bp, Homo sapien
ttcacgttgggtatcgctaccggta

SEQ ID NO: 5225 - DNA, 25 bp, Homo sapien
tgctagaaactgtatttgaaattag

SEQ ID NO: 5226 - DNA, 25 bp, Homo sapien
ctaatttcaaatacagtttctagca

SEQ ID NO: 5227 - DNA, 25 bp, Homo sapien
agacaccggcgaacgaccgcgagac

SEQ ID NO: 5228 - DNA, 25 bp, Homo sapien
gtctcgcggtcgttcgccggtgtct

SEQ ID NO: 5229 - DNA, 25 bp, Homo sapien
cgggtggtgccggagacccctgttg

SEQ ID NO: 5230 - DNA, 25 bp, Homo sapien
caacaggggtctccggcaccacccg

SEQ ID NO: 5231 - DNA, 25 bp, Homo sapien
atgtgtatcgtcatacacgtagtag

SEQ ID NO: 5232 - DNA, 25 bp, Homo sapien
ctactacgtgtatgacgatacacat

SEQ ID NO: 5233 - DNA, 25 bp, Homo sapien
acagatcatgtagtttgtaggtccg

SEQ ID NO: 5234 - DNA, 25 bp, Homo sapien
cggacctacaaactacatgatctgt

SEQ ID NO: 5235 - DNA, 25 bp, Homo sapien
ctcgaggacgacacgaaaagtaccg

SEQ ID NO: 5236 - DNA, 25 bp, Homo sapien
cggtacttttcgtgtcgtcctcgag

SEQ ID NO: 5237 - DNA, 25 bp, Homo sapien
cttgtatattgcgaccagtcgaaaa

SEQ ID NO: 5238 - DNA, 25 bp, Homo sapien
ttttcgactggtcgcaatatacaag

SEQ ID NO: 5239 - DNA, 25 bp, Homo sapien
actcctgtgggactccacgacacac

SEQ ID NO: 5240 - DNA, 25 bp, Homo sapien
gtgtgtcgtggagtcccacaggagt

SEQ ID NO: 5241 - DNA, 25 bp, Homo sapien
gacgcgggcgccacgcaggtctccc

SEQ ID NO: 5242 - DNA, 25 bp, Homo sapien
gggagacctgcgtggcgcccgcgtc

SEQ ID NO: 5243 - DNA, 25 bp, Homo sapien
cggtcgagcaacgacattaacgact

SEQ ID NO: 5244 - DNA, 25 bp, Homo sapien
agtcgttaatgtcgttgctcgaccg

SEQ ID NO: 5245 - DNA, 25 bp, Homo sapien
agaagacaaagttccaggtgaccct

SEQ ID NO: 5246 - DNA, 25 bp, Homo sapien
agggtcacctggaactttgtcttct

SEQ ID NO: 5247 - DNA, 25 bp, Homo sapien
tccaccagccgaaggtccaacccgg

SEQ ID NO: 5248 - DNA, 25 bp, Homo sapien
ccgggttggaccttcggctggtgga

SEQ ID NO: 5249 - DNA, 25 bp, Homo sapien
tcgtcgtctggcagaggtacccacg

SEQ ID NO: 5250 - DNA, 25 bp, Homo sapien
cgtgggtacctctgccagacgacga

SEQ ID NO: 5251 - DNA, 25 bp, Homo sapien
tccccggcgtgtggccggtgagcgg

SEQ ID NO: 5252 - DNA, 25 bp, Homo sapien
ccgctcaccggccacacgccgggga

SEQ ID NO: 5253 - DNA, 25 bp, Homo sapien
aaaggtcacactatcgtgtacatct

SEQ ID NO: 5254 - DNA, 25 bp, Homo sapien
agatgtacacgatagtgtgaccttt

SEQ ID NO: 5255 - DNA, 25 bp, Homo sapien
ggagctcaggtgtccctgccgttac

SEQ ID NO: 5256 - DNA, 25 bp, Homo sapien
gtaacggcagggacacctgagctcc

SEQ ID NO: 5257 - DNA, 25 bp, Homo sapien
gaaaatttaatggtcatagattgac

SEQ ID NO: 5258 - DNA, 25 bp, Homo sapien
gtcaatctatgaccattaaattttc

SEQ ID NO: 5259 - DNA, 25 bp, Homo sapien
tcctgctgctggtccggtcggacga

SEQ ID NO: 5260 - DNA, 25 bp, Homo sapien
tcgtccgaccggaccagcagcagga

SEQ ID NO: 5261 - DNA, 25 bp, Homo sapien
gactcttctcggatgtggggtatgt

SEQ ID NO: 5262 - DNA, 25 bp, Homo sapien
acataccccacatccgagaagagtc

SEQ ID NO: 5263 - DNA, 25 bp, Homo sapien
acggtgtcggattccaactaggaag

SEQ ID NO: 5264 - DNA, 25 bp, Homo sapien
cttcctagttggaatccgacaccgt

SEQ ID NO: 5265 - DNA, 25 bp, Homo sapien
actccgccggcgtgacacgagaccc

SEQ ID NO: 5266 - DNA, 25 bp, Homo sapien
gggtctcgtgtcacgccggcggagt

SEQ ID NO: 5267 - DNA, 25 bp, Homo sapien
catccttaagatgtgggagacagta

SEQ ID NO: 5268 - DNA, 25 bp, Homo sapien
tactgtctcccacatcttaaggatg

SEQ ID NO: 5269 - DNA, 25 bp, Homo sapien
ctcgttttataaacaaatcaactaa

SEQ ID NO: 5270 - DNA, 25 bp, Homo sapien
ttagttgatttgtttataaaacgag

SEQ ID NO: 5271 - DNA, 25 bp, Homo sapien
gctcgggggccgctttcgggtgccg

SEQ ID NO: 5272 - DNA, 25 bp, Homo sapien
cggcacccgaaagcggcccccgagc

SEQ ID NO: 5273 - DNA, 25 bp, Homo sapien
ccacatgccaacttttaactcttat

SEQ ID NO: 5274 - DNA, 25 bp, Homo sapien
ataagagttaaaagttggcatgtgg

SEQ ID NO: 5275 - DNA, 25 bp, Homo sapien
agacagagactcttcaaactgaact

SEQ ID NO: 5276 - DNA, 25 bp, Homo sapien
agttcagtttgaagagtctctgtct

SEQ ID NO: 5277 - DNA, 25 bp, Homo sapien
aaatagacctcattaaagataatta

SEQ ID NO: 5278 - DNA, 25 bp, Homo sapien
taattatctttaatgaggtctattt

SEQ ID NO: 5279 - DNA, 25 bp, Homo sapien
atcggcgaccagcagggcccttccg

SEQ ID NO: 5280 - DNA, 25 bp, Homo sapien
cggaagggccctgctggtcgccgat

SEQ ID NO: 5281 - DNA, 25 bp, Homo sapien
caggcccgcggtacccagcatcggc

SEQ ID NO: 5282 - DNA, 25 bp, Homo sapien
gccgatgctgggtaccgcgggcctg

SEQ ID NO: 5283 - DNA, 25 bp, Homo sapien
gaagagtgtatgtcgttcttcatga

SEQ ID NO: 5284 - DNA, 25 bp, Homo sapien
tcatgaagaacgacatacactcttc

SEQ ID NO: 5285 - DNA, 25 bp, Homo sapien
aacatgatacactaagttaagagac

SEQ ID NO: 5286 - DNA, 25 bp, Homo sapien
gtctcttaacttagtgtatcatgtt

SEQ ID NO: 5287 - DNA, 25 bp, Homo sapien
ccggcttggggctcgggtcggacga

SEQ ID NO: 5288 - DNA, 25 bp, Homo sapien
tcgtccgacccgagccccaagccgg

SEQ ID NO: 5289 - DNA, 25 bp, Homo sapien
agtacactcaagtacccgtacgagt

SEQ ID NO: 5290 - DNA, 25 bp, Homo sapien
actcgtacgggtacttgagtgtact

SEQ ID NO: 5291 - DNA, 25 bp, Homo sapien
actttacctaacgtacttgtcactg

SEQ ID NO: 5292 - DNA, 25 bp, Homo sapien
cagtgacaagtacgttaggtaaagt

SEQ ID NO: 5293 - DNA, 25 bp, Homo sapien
gtgcccccgcccgccgccggctcgg

SEQ ID NO: 5294 - DNA, 25 bp, Homo sapien
ccgagccggcggcgggcgggggcac

SEQ ID NO: 5295 - DNA, 25 bp, Homo sapien
ggtgcccccgcccgccgccggctcg

SEQ ID NO: 5296 - DNA, 25 bp, Homo sapien
cgagccggcggcgggcgggggcacc

SEQ ID NO: 5297 - DNA, 25 bp, Homo sapien
tcttttggattagaacttgaatacc

SEQ ID NO: 5298 - DNA, 25 bp, Homo sapien
ggtattcaagttctaatccaaaaga

SEQ ID NO: 5299 - DNA, 25 bp, Homo sapien
gtgtcctagacggaagaaaatgtaa

SEQ ID NO: 5300 - DNA, 25 bp, Homo sapien
ttacattttcttccgtctaggacac

SEQ ID NO: 5301 - DNA, 25 bp, Homo sapien
ccccacccatatcagcacgtccggt

SEQ ID NO: 5302 - DNA, 25 bp, Homo sapien
accggacgtgctgatatgggtgggg

SEQ ID NO: 5303 - DNA, 25 bp, Homo sapien
tgcctgtgcaatagtgaatgacacc

SEQ ID NO: 5304 - DNA, 25 bp, Homo sapien
ggtgtcattcactattgcacaggca

SEQ ID NO: 5305 - DNA, 25 bp, Homo sapien
aacgagaaacctaaattctattatg

SEQ ID NO: 5306 - DNA, 25 bp, Homo sapien
cataatagaatttaggtttctcgtt

SEQ ID NO: 5307 - DNA, 25 bp, Homo sapien
taggtgaaacctagcataaaacagg

SEQ ID NO: 5308 - DNA, 25 bp, Homo sapien
cctgttttatgctaggtttcaccta

SEQ ID NO: 5309 - DNA, 25 bp, Homo sapien
gggagcggagggtccctgggcgagg

SEQ ID NO: 5310 - DNA, 25 bp, Homo sapien
cctcgcccagggaccctccgctccc

SEQ ID NO: 5311 - DNA, 25 bp, Homo sapien
tcgagaaccactacggtcacttccg

SEQ ID NO: 5312 - DNA, 25 bp, Homo sapien
cggaagtgaccgtagtggttctcga

SEQ ID NO: 5313 - DNA, 25 bp, Homo sapien
caataattggtagtttctatttgac

SEQ ID NO: 5314 - DNA, 25 bp, Homo sapien
gtcaaatagaaactaccaattattg

SEQ ID NO: 5315 - DNA, 25 bp, Homo sapien
ccagtcacccggagcgttgccgagg

SEQ ID NO: 5316 - DNA, 25 bp, Homo sapien
cctcggcaacgctccgggtgactgg

SEQ ID NO: 5317 - DNA, 25 bp, Homo sapien
aacccagagctccttatccgaggaa

SEQ ID NO: 5318 - DNA, 25 bp, Homo sapien
ttcctcggataaggagctctgggtt

SEQ ID NO: 5319 - DNA, 25 bp, Homo sapien
cttccggagtaatcactttcacaac

SEQ ID NO: 5320 - DNA, 25 bp, Homo sapien
gttgtgaaagtgattactccggaag

SEQ ID NO: 5321 - DNA, 25 bp, Homo sapien
attattctcattgtgattcgtaaaa

SEQ ID NO: 5322 - DNA, 25 bp, Homo sapien
ttttacgaatcacaatgagaataat

SEQ ID NO: 5323 - DNA, 25 bp, Homo sapien
aattattctcattgtgattcgtaaa

SEQ ID NO: 5324 - DNA, 25 bp, Homo sapien
tttacgaatcacaatgagaataatt

SEQ ID NO: 5325 - DNA, 25 bp, Homo sapien
gggccgtgaccgtagctccccaggt

SEQ ID NO: 5326 - DNA, 25 bp, Homo sapien
acctggggagctacggtcacggccc

SEQ ID NO: 5327 - DNA, 25 bp, Homo sapien
gagtctgaatcgacctgtccctgcc

SEQ ID NO: 5328 - DNA, 25 bp, Homo sapien
ggcagggacaggtcgattcagactc

SEQ ID NO: 5329 - DNA, 25 bp, Homo sapien
cagccgaggccgtccgggcactcgt

SEQ ID NO: 5330 - DNA, 25 bp, Homo sapien
acgagtgcccggacggcctcggctg

SEQ ID NO: 5331 - DNA, 25 bp, Homo sapien
tctcccagccgaggccgtccgggca

SEQ ID NO: 5332 - DNA, 25 bp, Homo sapien
tgcccggacggcctcggctgggaga

SEQ ID NO: 5333 - DNA, 25 bp, Homo sapien
tctctcccagccgaggccgtccggg

SEQ ID NO: 5334 - DNA, 25 bp, Homo sapien
cccggacggcctcggctgggagaga

SEQ ID NO: 5335 - DNA, 25 bp, Homo sapien
agtgcgaagactctcgggttcgtcc

SEQ ID NO: 5336 - DNA, 25 bp, Homo sapien
ggacgaacccgagagtcttcgcact

SEQ ID NO: 5337 - DNA, 25 bp, Homo sapien
tttctatctgctacagaaataaaat

SEQ ID NO: 5338 - DNA, 25 bp, Homo sapien
attttatttctgtagcagatagaaa

SEQ ID NO: 5339 - DNA, 25 bp, Homo sapien
acgccgaacaatcggtgcaacacac

SEQ ID NO: 5340 - DNA, 25 bp, Homo sapien
gtgtgttgcaccgattgttcggcgt

SEQ ID NO: 5341 - DNA, 25 bp, Homo sapien
cctggctttcaggtcctaaagagac

SEQ ID NO: 5342 - DNA, 25 bp, Homo sapien
gtctctttaggacctgaaagccagg

SEQ ID NO: 5343 - DNA, 25 bp, Homo sapien
gaacccatgacgtccgcgtgggccg

SEQ ID NO: 5344 - DNA, 25 bp, Homo sapien
cggcccacgcggacgtcatgggttc

SEQ ID NO: 5345 - DNA, 25 bp, Homo sapien
ggcggcgggccaggcccggccgtag

SEQ ID NO: 5346 - DNA, 25 bp, Homo sapien
ctacggccgggcctggcccgccgcc

SEQ ID NO: 5347 - DNA, 25 bp, Homo sapien
gactaaaagaaggagcgagaaccgt

SEQ ID NO: 5348 - DNA, 25 bp, Homo sapien
acggttctcgctccttcttttagtc

SEQ ID NO: 5349 - DNA, 25 bp, Homo sapien
actgggtacccacagtaaattgcgt

SEQ ID NO: 5350 - DNA, 25 bp, Homo sapien
acgcaatttactgtgggtacccagt

SEQ ID NO: 5351 - DNA, 25 bp, Homo sapien
gttaccaacattacccaataattgt

SEQ ID NO: 5352 - DNA, 25 bp, Homo sapien
acaattattgggtaatgttggtaac

SEQ ID NO: 5353 - DNA, 25 bp, Homo sapien
gatccatgccatgtctaaaattaag

SEQ ID NO: 5354 - DNA, 25 bp, Homo sapien
cttaattttagacatggcatggatc

SEQ ID NO: 5355 - DNA, 25 bp, Homo sapien
tataatatcttggtcaaacaaaatg

SEQ ID NO: 5356 - DNA, 25 bp, Homo sapien
cattttgtttgaccaagatattata

SEQ ID NO: 5357 - DNA, 25 bp, Homo sapien
agacgacactccggcgcgcgggcgt

SEQ ID NO: 5358 - DNA, 25 bp, Homo sapien
acgcccgcgcgccggagtgtcgtct

SEQ ID NO: 5359 - DNA, 25 bp, Homo sapien
gggtcggagaggcccgaccgcagta

SEQ ID NO: 5360 - DNA, 25 bp, Homo sapien
tactgcggtcgggcctctccgaccc

SEQ ID NO: 5361 - DNA, 25 bp, Homo sapien
cggccgcgtgcacccaagagacacc

SEQ ID NO: 5362 - DNA, 25 bp, Homo sapien
ggtgtctcttgggtgcacgcggccg

SEQ ID NO: 5363 - DNA, 25 bp, Homo sapien
cgactttactgaccagtatggacca

SEQ ID NO: 5364 - DNA, 25 bp, Homo sapien
tggtccatactggtcagtaaagtcg

SEQ ID NO: 5365 - DNA, 25 bp, Homo sapien
taaaacaattatgagtgtccccgat

SEQ ID NO: 5366 - DNA, 25 bp, Homo sapien
atcggggacactcataattgtttta

SEQ ID NO: 5367 - DNA, 25 bp, Homo sapien
cttaagaagagttttactatgaaat

SEQ ID NO: 5368 - DNA, 25 bp, Homo sapien
atttcatagtaaaactcttcttaag

SEQ ID NO: 5369 - DNA, 25 bp, Homo sapien
ataaagttgacttattagtcctgac

SEQ ID NO: 5370 - DNA, 25 bp, Homo sapien
gtcaggactaataagtcaactttat

SEQ ID NO: 5371 - DNA, 25 bp, Homo sapien
acaggcttcggtgcgctacccgaga

SEQ ID NO: 5372 - DNA, 25 bp, Homo sapien
tctcgggtagcgcaccgaagcctgt

SEQ ID NO: 5373 - DNA, 25 bp, Homo sapien
tagacatttacaaaactacatcata

SEQ ID NO: 5374 - DNA, 25 bp, Homo sapien
tatgatgtagttttgtaaatgtcta

SEQ ID NO: 5375 - DNA, 25 bp, Homo sapien
cagaggtcgcagtcctgtgtgaccg

SEQ ID NO: 5376 - DNA, 25 bp, Homo sapien
cggtcacacaggactgcgacctctg

SEQ ID NO: 5377 - DNA, 25 bp, Homo sapien
gaggactgtacataacttaaaggac

SEQ ID NO: 5378 - DNA, 25 bp, Homo sapien
gtcctttaagttatgtacagtcctc

SEQ ID NO: 5379 - DNA, 25 bp, Homo sapien
acggtaacctcccatcctcgactcg

SEQ ID NO: 5380 - DNA, 25 bp, Homo sapien
cgagtcgaggatgggaggttaccgt

SEQ ID NO: 5381 - DNA, 25 bp, Homo sapien
ttattattattcgtgccgacggaac

SEQ ID NO: 5382 - DNA, 25 bp, Homo sapien
gttccgtcggcacgaataataataa

SEQ ID NO: 5383 - DNA, 25 bp, Homo sapien
gggacgacacggctgacgcctcttt

SEQ ID NO: 5384 - DNA, 25 bp, Homo sapien
aaagaggcgtcagccgtgtcgtccc

SEQ ID NO: 5385 - DNA, 25 bp, Homo sapien
cgtattttccataagacagggaggt

SEQ ID NO: 5386 - DNA, 25 bp, Homo sapien
acctccctgtcttatggaaaatacg

SEQ ID NO: 5387 - DNA, 25 bp, Homo sapien
tctatgaacaccaggtccatcctat

SEQ ID NO: 5388 - DNA, 25 bp, Homo sapien
ataggatggacctggtgttcataga

SEQ ID NO: 5389 - DNA, 25 bp, Homo sapien
ggtagtacagataaagtgtttcagg

SEQ ID NO: 5390 - DNA, 25 bp, Homo sapien
cctgaaacactttatctgtactacc

SEQ ID NO: 5391 - DNA, 25 bp, Homo sapien
gaactcgaaacgttgtcatgatccg

SEQ ID NO: 5392 - DNA, 25 bp, Homo sapien
cggatcatgacaacgtttcgagttc

SEQ ID NO: 5393 - DNA, 25 bp, Homo sapien
ggggccgacgagggcctcccgagtg

SEQ ID NO: 5394 - DNA, 25 bp, Homo sapien
cactcgggaggccctcgtcggcccc

SEQ ID NO: 5395 - DNA, 25 bp, Homo sapien
gattaggtgtaggtgcaaccagttc

SEQ ID NO: 5396 - DNA, 25 bp, Homo sapien
gaactggttgcacctacacctaatc

SEQ ID NO: 5397 - DNA, 25 bp, Homo sapien
gtcactacgaaacgagggggtgcag

SEQ ID NO: 5398 - DNA, 25 bp, Homo sapien
ctgcaccccctcgtttcgtagtgac

SEQ ID NO: 5399 - DNA, 25 bp, Homo sapien
tccgaaccccgactgtcacccgagt

SEQ ID NO: 5400 - DNA, 25 bp, Homo sapien
actcgggtgacagtcggggttcgga

SEQ ID NO: 5401 - DNA, 25 bp, Homo sapien
agtccgacgccttgttctgtagacg

SEQ ID NO: 5402 - DNA, 25 bp, Homo sapien
cgtctacagaacaaggcgtcggact

SEQ ID NO: 5403 - DNA, 25 bp, Homo sapien
gagtccgatcacacctcgggtcgtc

SEQ ID NO: 5404 - DNA, 25 bp, Homo sapien
gacgacccgaggtgtgatcggactc

SEQ ID NO: 5405 - DNA, 25 bp, Homo sapien
agcgaggtcgcttcaggaactcgga

SEQ ID NO: 5406 - DNA, 25 bp, Homo sapien
tccgagttcctgaagcgacctcgct

SEQ ID NO: 5407 - DNA, 25 bp, Homo sapien
gtctgtgttcgtggaagcgggttcc

SEQ ID NO: 5408 - DNA, 25 bp, Homo sapien
ggaacccgcttccacgaacacagac

SEQ ID NO: 5409 - DNA, 25 bp, Homo sapien
cggctcccgtgtagctcctacagtg

SEQ ID NO: 5410 - DNA, 25 bp, Homo sapien
cactgtaggagctacacgggagccg

SEQ ID NO: 5411 - DNA, 25 bp, Homo sapien
ggaccaccggacttgacgcgggtcc

SEQ ID NO: 5412 - DNA, 25 bp, Homo sapien
ggacccgcgtcaagtccggtggtcc

SEQ ID NO: 5413 - DNA, 25 bp, Homo sapien
gagggtcccccggtatagatatatt

SEQ ID NO: 5414 - DNA, 25 bp, Homo sapien
aatatatctataccgggggaccctc

SEQ ID NO: 5415 - DNA, 25 bp, Homo sapien
gggaagggctgggtcggtgacagag

SEQ ID NO: 5416 - DNA, 25 bp, Homo sapien
ctctgtcaccgacccagcccttccc

SEQ ID NO: 5417 - DNA, 25 bp, Homo sapien
ggtagcggagggaagggctgggtcg

SEQ ID NO: 5418 - DNA, 25 bp, Homo sapien
cgacccagcccttccctccgctacc

SEQ ID NO: 5419 - DNA, 25 bp, Homo sapien
cacttcccgacatccccccacatct

SEQ ID NO: 5420 - DNA, 25 bp, Homo sapien
agatgtggggggatgtcgggaagtg

SEQ ID NO: 5421 - DNA, 25 bp, Homo sapien
ggccgtgggccctctcgggtcggtc

SEQ ID NO: 5422 - DNA, 25 bp, Homo sapien
gaccgacccgagagggcccacggcc

SEQ ID NO: 5423 - DNA, 25 bp, Homo sapien
gtgggccgtgggccctctcgggtcg

SEQ ID NO: 5424 - DNA, 25 bp, Homo sapien
cgacccgagagggcccacggcccac

SEQ ID NO: 5425 - DNA, 25 bp, Homo sapien
atcctattggtgttcaacgtttcac

SEQ ID NO: 5426 - DNA, 25 bp, Homo sapien
gtgaaacgttgaacaccaataggat

SEQ ID NO: 5427 - DNA, 25 bp, Homo sapien
gtagttaatagggtaccaatgaaaa

SEQ ID NO: 5428 - DNA, 25 bp, Homo sapien
ttttcattggtaccctattaactac

SEQ ID NO: 5429 - DNA, 25 bp, Homo sapien
tacaatgtttatagtagtatgtact

SEQ ID NO: 5430 - DNA, 25 bp, Homo sapien
agtacatactactataaacattgta

SEQ ID NO: 5431 - DNA, 25 bp, Homo sapien
caggacactggacggcgaccccggt

SEQ ID NO: 5432 - DNA, 25 bp, Homo sapien
accggggtcgccgtccagtgtcctg

SEQ ID NO: 5433 - DNA, 25 bp, Homo sapien
tcccctccggcggcgcttgcccgag

SEQ ID NO: 5434 - DNA, 25 bp, Homo sapien
ctcgggcaagcgccgccggagggga

SEQ ID NO: 5435 - DNA, 25 bp, Homo sapien
cttaatataaaggaagtgtactcaa

SEQ ID NO: 5436 - DNA, 25 bp, Homo sapien
ttgagtacacttcctttatattaag

SEQ ID NO: 5437 - DNA, 25 bp, Homo sapien
ttcgattctaaggtaaggtccaccc

SEQ ID NO: 5438 - DNA, 25 bp, Homo sapien
gggtggaccttaccttagaatcgaa

SEQ ID NO: 5439 - DNA, 25 bp, Homo sapien
cccacgcgtcggaaggctagtgctg

SEQ ID NO: 5440 - DNA, 25 bp, Homo sapien
cagcactagccttccgacgcgtggg

SEQ ID NO: 5441 - DNA, 25 bp, Homo sapien
aagctaaaggcgtttcaggaagaac

SEQ ID NO: 5442 - DNA, 25 bp, Homo sapien
gttcttcctgaaacgcctttagctt

SEQ ID NO: 5443 - DNA, 25 bp, Homo sapien
agaagaaagtccaacattttgcgac

SEQ ID NO: 5444 - DNA, 25 bp, Homo sapien
gtcgcaaaatgttggactttcttct

SEQ ID NO: 5445 - DNA, 25 bp, Homo sapien
atcgattatgagttctgatatgtac

SEQ ID NO: 5446 - DNA, 25 bp, Homo sapien
gtacatatcagaactcataatcgat

SEQ ID NO: 5447 - DNA, 25 bp, Homo sapien
catcagtgtgttataacctagagac

SEQ ID NO: 5448 - DNA, 25 bp, Homo sapien
gtctctaggttataacacactgatg

SEQ ID NO: 5449 - DNA, 25 bp, Homo sapien
gcgacgcgcaaacggcggcgggagt

SEQ ID NO: 5450 - DNA, 25 bp, Homo sapien
actcccgccgccgtttgcgcgtcgc

SEQ ID NO: 5451 - DNA, 25 bp, Homo sapien
tgggtcccgggcactacagtcgtcg

SEQ ID NO: 5452 - DNA, 25 bp, Homo sapien
cgacgactgtagtgcccgggaccca

SEQ ID NO: 5453 - DNA, 25 bp, Homo sapien
ctcgggtgtgttcgatacctcagga

SEQ ID NO: 5454 - DNA, 25 bp, Homo sapien
tcctgaggtatcgaacacacccgag

SEQ ID NO: 5455 - DNA, 25 bp, Homo sapien
tcacgacggtgtgttggaactccag

SEQ ID NO: 5456 - DNA, 25 bp, Homo sapien
ctggagttccaacacaccgtcgtga

SEQ ID NO: 5457 - DNA, 25 bp, Homo sapien
acgggtgacttaagaacgagaactg

SEQ ID NO: 5458 - DNA, 25 bp, Homo sapien
cagttctcgttcttaagtcacccgt

SEQ ID NO: 5459 - DNA, 25 bp, Homo sapien
atgtactattatccaagaaaaagaa

SEQ ID NO: 5460 - DNA, 25 bp, Homo sapien
ttctttttcttggataatagtacat

SEQ ID NO: 5461 - DNA, 25 bp, Homo sapien
gttcaaggaaaaatctcagataaac

SEQ ID NO: 5462 - DNA, 25 bp, Homo sapien
gtttatctgagatttttccttgaac

SEQ ID NO: 5463 - DNA, 25 bp, Homo sapien
tgaaaagtagtgtacgcgggggaaa

SEQ ID NO: 5464 - DNA, 25 bp, Homo sapien
tttcccccgcgtacactacttttca

SEQ ID NO: 5465 - DNA, 25 bp, Homo sapien
cttagtgcaacaagttctaaaagtg

SEQ ID NO: 5466 - DNA, 25 bp, Homo sapien
cacttttagaacttgttgcactaag

SEQ ID NO: 5467 - DNA, 25 bp, Homo sapien
gaaatacaggtagcaaaaaatgttt

SEQ ID NO: 5468 - DNA, 25 bp, Homo sapien
aaacattttttgctacctgtatttc

SEQ ID NO: 5469 - DNA, 25 bp, Homo sapien
gagacataatgttaagactggagaa

SEQ ID NO: 5470 - DNA, 25 bp, Homo sapien
ttctccagtcttaacattatgtctc

SEQ ID NO: 5471 - DNA, 25 bp, Homo sapien
agggagacttgcgaccagtagtaag

SEQ ID NO: 5472 - DNA, 25 bp, Homo sapien
cttactactggtcgcaagtctccct

SEQ ID NO: 5473 - DNA, 25 bp, Homo sapien
ggttgaagggtattcaccgaccacc

SEQ ID NO: 5474 - DNA, 25 bp, Homo sapien
ggtggtcggtgaatacccttcaacc

SEQ ID NO: 5475 - DNA, 25 bp, Homo sapien
gagcactctgttctctgcacgacgg

SEQ ID NO: 5476 - DNA, 25 bp, Homo sapien
ccgtcgtgcagagaacagagtgctc

SEQ ID NO: 5477 - DNA, 25 bp, Homo sapien
ggttccatcatctcccacactttgg

SEQ ID NO: 5478 - DNA, 25 bp, Homo sapien
ccaaagtgtgggagatgatggaacc

SEQ ID NO: 5479 - DNA, 25 bp, Homo sapien
cccgaggagggttcgaggctcgcag

SEQ ID NO: 5480 - DNA, 25 bp, Homo sapien
ctgcgagcctcgaaccctcctcggg

SEQ ID NO: 5481 - DNA, 25 bp, Homo sapien
taccgggggtaaccgtcagcggcgc

SEQ ID NO: 5482 - DNA, 25 bp, Homo sapien
gcgccgctgacggttacccccggta

SEQ ID NO: 5483 - DNA, 25 bp, Homo sapien
gcccgcgccgccgagacccgagacc

SEQ ID NO: 5484 - DNA, 25 bp, Homo sapien
ggtctcgggtctcggcggcgcgggc

SEQ ID NO: 5485 - DNA, 25 bp, Homo sapien
gcgccgaagccgggggcccgcgccg

SEQ ID NO: 5486 - DNA, 25 bp, Homo sapien
cggcgcgggcccccggcttcggcgc

SEQ ID NO: 5487 - DNA, 25 bp, Homo sapien
ccggagcctcagagagggcacactg

SEQ ID NO: 5488 - DNA, 25 bp, Homo sapien
cagtgtgccctctctgaggctccgg

SEQ ID NO: 5489 - DNA, 25 bp, Homo sapien
aaatcctttgtatttggactaagat

SEQ ID NO: 5490 - DNA, 25 bp, Homo sapien
atcttagtccaaatacaaaggattt

SEQ ID NO: 5491 - DNA, 25 bp, Homo sapien
cgtgatttgcggaccagggtcccgt

SEQ ID NO: 5492 - DNA, 25 bp, Homo sapien
acgggaccctggtccgcaaatcacg

SEQ ID NO: 5493 - DNA, 25 bp, Homo sapien
ctgccccatactgcgacggagctta

SEQ ID NO: 5494 - DNA, 25 bp, Homo sapien
taagctccgtcgcagtatggggcag

SEQ ID NO: 5495 - DNA, 25 bp, Homo sapien
gacacaccctcgtgtgtgcccctcc

SEQ ID NO: 5496 - DNA, 25 bp, Homo sapien
ggaggggcacacacgagggtgtgtc

SEQ ID NO: 5497 - DNA, 25 bp, Homo sapien
gaagttatctaacattcaagaagta

SEQ ID NO: 5498 - DNA, 25 bp, Homo sapien
tacttcttgaatgttagataacttc

SEQ ID NO: 5499 - DNA, 25 bp, Homo sapien
acgtagacctcgactacaataaaag

SEQ ID NO: 5500 - DNA, 25 bp, Homo sapien
cttttattgtagtcgaggtctacgt

SEQ ID NO: 5501 - DNA, 25 bp, Homo sapien
ggaccgactatttgtaggtcatata

SEQ ID NO: 5502 - DNA, 25 bp, Homo sapien
tatatgacctacaaatagtcggtcc

SEQ ID NO: 5503 - DNA, 25 bp, Homo sapien
ccctcaaggtgcgtcgtgggtgctc

SEQ ID NO: 5504 - DNA, 25 bp, Homo sapien
gagcacccacgacgcaccttgaggg

SEQ ID NO: 5505 - DNA, 25 bp, Homo sapien
agagttacaaattgaattttgatct

SEQ ID NO: 5506 - DNA, 25 bp, Homo sapien
agatcaaaattcaatttgtaactct

SEQ ID NO: 5507 - DNA, 25 bp, Homo sapien
cttgtcctccctcgtggacgcttcc

SEQ ID NO: 5508 - DNA, 25 bp, Homo sapien
ggaagcgtccacgagggaggacaag

SEQ ID NO: 5509 - DNA, 25 bp, Homo sapien
ggttctccatcgtcattcaaaaata

SEQ ID NO: 5510 - DNA, 25 bp, Homo sapien
tatttttgaatgacgatggagaacc

SEQ ID NO: 5511 - DNA, 25 bp, Homo sapien
aacgggaaagaccacctatctgaac

SEQ ID NO: 5512 - DNA, 25 bp, Homo sapien
gttcagataggtggtctttcccgtt

SEQ ID NO: 5513 - DNA, 25 bp, Homo sapien
cgggccagaacctcagggaggtaat

SEQ ID NO: 5514 - DNA, 25 bp, Homo sapien
attacctccctgaggttctggcccg

SEQ ID NO: 5515 - DNA, 25 bp, Homo sapien
caaaatgtagattctcggttcagtc

SEQ ID NO: 5516 - DNA, 25 bp, Homo sapien
gactgaaccgagaatctacattttg

SEQ ID NO: 5517 - DNA, 25 bp, Homo sapien
acggaaggacccctcacaccaagta

SEQ ID NO: 5518 - DNA, 25 bp, Homo sapien
tacttggtgtgaggggtccttccgt

SEQ ID NO: 5519 - DNA, 25 bp, Homo sapien
agtgtgagtctttgagcaacttata

SEQ ID NO: 5520 - DNA, 25 bp, Homo sapien
tataagttgctcaaagactcacact

SEQ ID NO: 5521 - DNA, 25 bp, Homo sapien
gtctacatctagttaaatttcttac

SEQ ID NO: 5522 - DNA, 25 bp, Homo sapien
gtaagaaatttaactagatgtagac

SEQ ID NO: 5523 - DNA, 25 bp, Homo sapien
gcggaggtcagtgctgccgcccggt

SEQ ID NO: 5524 - DNA, 25 bp, Homo sapien
accgggcggcagcactgacctccgc

SEQ ID NO: 5525 - DNA, 25 bp, Homo sapien
tcatcggtgacaccagctccgacgg

SEQ ID NO: 5526 - DNA, 25 bp, Homo sapien
ccgtcggagctggtgtcaccgatga

SEQ ID NO: 5527 - DNA, 25 bp, Homo sapien
tggcgcccgtggtgctcccgccctg

SEQ ID NO: 5528 - DNA, 25 bp, Homo sapien
cagggcgggagcaccacgggcgcca

SEQ ID NO: 5529 - DNA, 25 bp, Homo sapien
gcctggcgcccgtggtgctcccgcc

SEQ ID NO: 5530 - DNA, 25 bp, Homo sapien
ggcgggagcaccacgggcgccaggc

SEQ ID NO: 5531 - DNA, 25 bp, Homo sapien
acctcccttcgagccgggaggagga

SEQ ID NO: 5532 - DNA, 25 bp, Homo sapien
tcctcctcccggctcgaagggaggt

SEQ ID NO: 5533 - DNA, 25 bp, Homo sapien
aaccatttataattctgttcgtaat

SEQ ID NO: 5534 - DNA, 25 bp, Homo sapien
attacgaacagaattataaatggtt

SEQ ID NO: 5535 - DNA, 25 bp, Homo sapien
gaagatatgacggtttaccagacgt

SEQ ID NO: 5536 - DNA, 25 bp, Homo sapien
acgtctggtaaaccgtcatatcttc

SEQ ID NO: 5537 - DNA, 25 bp, Homo sapien
tcttgaagactatcgaaattatact

SEQ ID NO: 5538 - DNA, 25 bp, Homo sapien
agtataatttcgatagtcttcaaga

SEQ ID NO: 5539 - DNA, 25 bp, Homo sapien
cttcatctctttcactgacctttcg

SEQ ID NO: 5540 - DNA, 25 bp, Homo sapien
cgaaaggtcagtgaaagagatgaag

SEQ ID NO: 5541 - DNA, 25 bp, Homo sapien
gcggcgcaacggcccggggtgttcc

SEQ ID NO: 5542 - DNA, 25 bp, Homo sapien
ggaacaccccgggccgttgcgccgc

SEQ ID NO: 5543 - DNA, 25 bp, Homo sapien
cgcccacccgcacggcggcgcaacg

SEQ ID NO: 5544 - DNA, 25 bp, Homo sapien
cgttgcgccgccgtgcgggtgggcg

SEQ ID NO: 5545 - DNA, 25 bp, Homo sapien
gaggtctccactaaaacctagccgg

SEQ ID NO: 5546 - DNA, 25 bp, Homo sapien
ccggctaggttttagtggagacctc

SEQ ID NO: 5547 - DNA, 25 bp, Homo sapien
atttagagggagctagaatctttcc

SEQ ID NO: 5548 - DNA, 25 bp, Homo sapien
ggaaagattctagctccctctaaat

SEQ ID NO: 5549 - DNA, 25 bp, Homo sapien
taaagattatattctcttaatacgt

SEQ ID NO: 5550 - DNA, 25 bp, Homo sapien
acgtattaagagaatataatcttta

SEQ ID NO: 5551 - DNA, 25 bp, Homo sapien
acatcctttctactaaagattatat

SEQ ID NO: 5552 - DNA, 25 bp, Homo sapien
atataatctttagtagaaaggatgt

SEQ ID NO: 5553 - DNA, 25 bp, Homo sapien
cgcgggaggcctgggtcggcctgag

SEQ ID NO: 5554 - DNA, 25 bp, Homo sapien
ctcaggccgacccaggcctcccgcg

SEQ ID NO: 5555 - DNA, 25 bp, Homo sapien
agcgcgggaggcctgggtcggcctg

SEQ ID NO: 5556 - DNA, 25 bp, Homo sapien
caggccgacccaggcctcccgcgct

SEQ ID NO: 5557 - DNA, 25 bp, Homo sapien
caagtttcgttcgacacagacccag

SEQ ID NO: 5558 - DNA, 25 bp, Homo sapien
ctgggtctgtgtcgaacgaaacttg

SEQ ID NO: 5559 - DNA, 25 bp, Homo sapien
ggtcgccccgacaccagggattctg

SEQ ID NO: 5560 - DNA, 25 bp, Homo sapien
cagaatccctggtgtcggggcgacc

SEQ ID NO: 5561 - DNA, 25 bp, Homo sapien
acaggggattaaggagctgccagta

SEQ ID NO: 5562 - DNA, 25 bp, Homo sapien
tactggcagctccttaatcccctgt

SEQ ID NO: 5563 - DNA, 25 bp, Homo sapien
tatactagttttgttctaaaggtag

SEQ ID NO: 5564 - DNA, 25 bp, Homo sapien
ctacctttagaacaaaactagtata

SEQ ID NO: 5565 - DNA, 25 bp, Homo sapien
aaaaaagcgtatctttataacgcat

SEQ ID NO: 5566 - DNA, 25 bp, Homo sapien
atgcgttataaagatacgctttttt

SEQ ID NO: 5567 - DNA, 25 bp, Homo sapien
tagtatctactacagatgtgttggt

SEQ ID NO: 5568 - DNA, 25 bp, Homo sapien
accaacacatctgtagtagatacta

SEQ ID NO: 5569 - DNA, 25 bp, Homo sapien
ttcccgtgtcaggtcattcactagt

SEQ ID NO: 5570 - DNA, 25 bp, Homo sapien
actagtgaatgacctgacacgggaa

SEQ ID NO: 5571 - DNA, 25 bp, Homo sapien
ggtaaaatcaacgttactttacatc

SEQ ID NO: 5572 - DNA, 25 bp, Homo sapien
gatgtaaagtaacgttgattttacc

SEQ ID NO: 5573 - DNA, 25 bp, Homo sapien
gtgacgtccatcagagagtcaacat

SEQ ID NO: 5574 - DNA, 25 bp, Homo sapien
atgttgactctctgatggacgtcac

SEQ ID NO: 5575 - DNA, 25 bp, Homo sapien
gtcgtaaaggccactcgtgcccggc

SEQ ID NO: 5576 - DNA, 25 bp, Homo sapien
gccgggcacgagtggcctttacgac

SEQ ID NO: 5577 - DNA, 25 bp, Homo sapien
ctcgggcgagcgtgggccgtcggcg

SEQ ID NO: 5578 - DNA, 25 bp, Homo sapien
cgccgacggcccacgctcgcccgag

SEQ ID NO: 5579 - DNA, 25 bp, Homo sapien
actcgggcgagcgtgggccgtcggc

SEQ ID NO: 5580 - DNA, 25 bp, Homo sapien
gccgacggcccacgctcgcccgagt

SEQ ID NO: 5581 - DNA, 25 bp, Homo sapien
ttcaatcttattgaactagtaatag

SEQ ID NO: 5582 - DNA, 25 bp, Homo sapien
ctattactagttcaataagattgaa

SEQ ID NO: 5583 - DNA, 25 bp, Homo sapien
ttttcaatcttattgaactagtaat

SEQ ID NO: 5584 - DNA, 25 bp, Homo sapien
attactagttcaataagattgaaaa

SEQ ID NO: 5585 - DNA, 25 bp, Homo sapien
attttcaatcttattgaactagtaa

SEQ ID NO: 5586 - DNA, 25 bp, Homo sapien
ttactagttcaataagattgaaaat

SEQ ID NO: 5587 - DNA, 25 bp, Homo sapien
cctcacccggccgtcaccggtgtcc

SEQ ID NO: 5588 - DNA, 25 bp, Homo sapien
ggacaccggtgacggccgggtgagg

SEQ ID NO: 5589 - DNA, 25 bp, Homo sapien
gagcatatgatatgagacgtgtaaa

SEQ ID NO: 5590 - DNA, 25 bp, Homo sapien
tttacacgtctcatatcatatgctc

SEQ ID NO: 5591 - DNA, 25 bp, Homo sapien
gaagaggcggaccacggcgggcacc

SEQ ID NO: 5592 - DNA, 25 bp, Homo sapien
ggtgcccgccgtggtccgcctcttc

SEQ ID NO: 5593 - DNA, 25 bp, Homo sapien
gagtccacggcggccgaccgccccg

SEQ ID NO: 5594 - DNA, 25 bp, Homo sapien
cggggcggtcggccgccgtggactc

SEQ ID NO: 5595 - DNA, 25 bp, Homo sapien
tactcaaagttaacgttctagaacg

SEQ ID NO: 5596 - DNA, 25 bp, Homo sapien
cgttctagaacgttaactttgagta

SEQ ID NO: 5597 - DNA, 25 bp, Homo sapien
gttagacgctccctgtgacagactg

SEQ ID NO: 5598 - DNA, 25 bp, Homo sapien
cagtctgtcacagggagcgtctaac

SEQ ID NO: 5599 - DNA, 25 bp, Homo sapien
aatcactaaatcgtgtaaatttcat

SEQ ID NO: 5600 - DNA, 25 bp, Homo sapien
atgaaatttacacgatttagtgatt

SEQ ID NO: 5601 - DNA, 25 bp, Homo sapien
gaactactaaggttcctgggtcttc

SEQ ID NO: 5602 - DNA, 25 bp, Homo sapien
gaagacccaggaaccttagtagttc

SEQ ID NO: 5603 - DNA, 25 bp, Homo sapien
ggaccgacgcgggggtctctgggtc

SEQ ID NO: 5604 - DNA, 25 bp, Homo sapien
gacccagagacccccgcgtcggtcc

SEQ ID NO: 5605 - DNA, 25 bp, Homo sapien
agacggacggacgactggcggcggt

SEQ ID NO: 5606 - DNA, 25 bp, Homo sapien
accgccgccagtcgtccgtccgtct

SEQ ID NO: 5607 - DNA, 25 bp, Homo sapien
agttatacatttcatccaaagtatc

SEQ ID NO: 5608 - DNA, 25 bp, Homo sapien
gatactttggatgaaatgtataact

SEQ ID NO: 5609 - DNA, 25 bp, Homo sapien
gacaggcgggctaacggtccccgca

SEQ ID NO: 5610 - DNA, 25 bp, Homo sapien
tgcggggaccgttagcccgcctgtc

SEQ ID NO: 5611 - DNA, 25 bp, Homo sapien
agacgaggttttacagaactaatta

SEQ ID NO: 5612 - DNA, 25 bp, Homo sapien
taattagttctgtaaaacctcgtct

SEQ ID NO: 5613 - DNA, 25 bp, Homo sapien
agaccttcatgacggagtcctactc

SEQ ID NO: 5614 - DNA, 25 bp, Homo sapien
gagtaggactccgtcatgaaggtct

SEQ ID NO: 5615 - DNA, 25 bp, Homo sapien
tcaaacagaattattgacctaatag

SEQ ID NO: 5616 - DNA, 25 bp, Homo sapien
ctattaggtcaataattctgtttga

SEQ ID NO: 5617 - DNA, 25 bp, Homo sapien
taacataaagatctttagcataaag

SEQ ID NO: 5618 - DNA, 25 bp, Homo sapien
ctttatgctaaagatctttatgtta

SEQ ID NO: 5619 - DNA, 25 bp, Homo sapien
aagatctttagcataaaggttttat

SEQ ID NO: 5620 - DNA, 25 bp, Homo sapien
ataaaacctttatgctaaagatctt

SEQ ID NO: 5621 - DNA, 25 bp, Homo sapien
gaactcagcgtatacaagaagtagt

SEQ ID NO: 5622 - DNA, 25 bp, Homo sapien
actacttcttgtatacgctgagttc

SEQ ID NO: 5623 - DNA, 25 bp, Homo sapien
cacgaactacggttcccctcgccca

SEQ ID NO: 5624 - DNA, 25 bp, Homo sapien
tgggcgaggggaaccgtagttcgtg

SEQ ID NO: 5625 - DNA, 25 bp, Homo sapien
ttagaagagaagatagtctggctat

SEQ ID NO: 5626 - DNA, 25 bp, Homo sapien
atagccagactatcttctcttctaa

SEQ ID NO: 5627 - DNA, 25 bp, Homo sapien
tcgttagtcggtacacacgtggaaa

SEQ ID NO: 5628 - DNA, 25 bp, Homo sapien
tttccacgtgtgtaccgactaacga

SEQ ID NO: 5629 - DNA, 25 bp, Homo sapien
agaacaggacttgttcgccaagacg

SEQ ID NO: 5630 - DNA, 25 bp, Homo sapien
cgtcttggcgaacaagtcctgttct

SEQ ID NO: 5631 - DNA, 25 bp, Homo sapien
actcttcgcaactcttgaactttca

SEQ ID NO: 5632 - DNA, 25 bp, Homo sapien
tgaaagttcaagagttgcgaagagt

SEQ ID NO: 5633 - DNA, 25 bp, Homo sapien
cccgtccaccactgctgggtccgta

SEQ ID NO: 5634 - DNA, 25 bp, Homo sapien
tacggacccagcagtggtggacggg

SEQ ID NO: 5635 - DNA, 25 bp, Homo sapien
gatcatttattcttattagaaataa

SEQ ID NO: 5636 - DNA, 25 bp, Homo sapien
ttatttctaataagaataaatgatc

SEQ ID NO: 5637 - DNA, 25 bp, Homo sapien
cacccctcagtagtttctataatta

SEQ ID NO: 5638 - DNA, 25 bp, Homo sapien
taattatagaaactactgaggggtg

SEQ ID NO: 5639 - DNA, 25 bp, Homo sapien
cctctccgggagcagacaagagaca

SEQ ID NO: 5640 - DNA, 25 bp, Homo sapien
tgtctcttgtctgctcccggagagg

SEQ ID NO: 5641 - DNA, 25 bp, Homo sapien
catgtaacaaataacctgttatagt

SEQ ID NO: 5642 - DNA, 25 bp, Homo sapien
actataacaggttatttgttacatg

SEQ ID NO: 5643 - DNA, 25 bp, Homo sapien
tccccctccggtccccagccactcg

SEQ ID NO: 5644 - DNA, 25 bp, Homo sapien
cgagtggctggggaccggaggggga

SEQ ID NO: 5645 - DNA, 25 bp, Homo sapien
tcgtagactttaaagcagaaaaaac

SEQ ID NO: 5646 - DNA, 25 bp, Homo sapien
gttttttctgctttaaagtctacga

SEQ ID NO: 5647 - DNA, 25 bp, Homo sapien
gtgaaaaacaccgatttcaataaag

SEQ ID NO: 5648 - DNA, 25 bp, Homo sapien
ctttattgaaatcggtgtttttcac

SEQ ID NO: 5649 - DNA, 25 bp, Homo sapien
gagattgaagtacaccgttatccgc

SEQ ID NO: 5650 - DNA, 25 bp, Homo sapien
gcggataacggtgtacttcaatctc

SEQ ID NO: 5651 - DNA, 25 bp, Homo sapien
gtcctaaggacagtaccctacagct

SEQ ID NO: 5652 - DNA, 25 bp, Homo sapien
agctgtagggtactgtccttaggac

SEQ ID NO: 5653 - DNA, 25 bp, Homo sapien
acttatccattaggttatttaatct

SEQ ID NO: 5654 - DNA, 25 bp, Homo sapien
agattaaataacctaatggataagt

SEQ ID NO: 5655 - DNA, 25 bp, Homo sapien
tccgacgacgttcacctatgcttgt

SEQ ID NO: 5656 - DNA, 25 bp, Homo sapien
acaagcataggtgaacgtcgtcgga

SEQ ID NO: 5657 - DNA, 25 bp, Homo sapien
cggagcgctcgctgggacccctggg

SEQ ID NO: 5658 - DNA, 25 bp, Homo sapien
cccaggggtcccagcgagcgctccg

SEQ ID NO: 5659 - DNA, 25 bp, Homo sapien
aaccattttactaccagatttgtct

SEQ ID NO: 5660 - DNA, 25 bp, Homo sapien
agacaaatctggtagtaaaatggtt

SEQ ID NO: 5661 - DNA, 25 bp, Homo sapien
taaaacttcaataattgccgttagt

SEQ ID NO: 5662 - DNA, 25 bp, Homo sapien
actaacggcaattattgaagtttta

SEQ ID NO: 5663 - DNA, 25 bp, Homo sapien
tatattccacgtccagaggccatgg

SEQ ID NO: 5664 - DNA, 25 bp, Homo sapien
ccatggcctctggacgtggaatata

SEQ ID NO: 5665 - DNA, 25 bp, Homo sapien
caataataaggaaggtgtatgtcac

SEQ ID NO: 5666 - DNA, 25 bp, Homo sapien
gtgacatacaccttccttattattg

SEQ ID NO: 5667 - DNA, 25 bp, Homo sapien
acgaagacgaacttgccccctgtac

SEQ ID NO: 5668 - DNA, 25 bp, Homo sapien
gtacagggggcaagttcgtcttcgt

SEQ ID NO: 5669 - DNA, 25 bp, Homo sapien
tctgtggtacttttaacaagagtgt

SEQ ID NO: 5670 - DNA, 25 bp, Homo sapien
acactcttgttaaaagtaccacaga

SEQ ID NO: 5671 - DNA, 25 bp, Homo sapien
atatcacaaacaaaagagacaattt

SEQ ID NO: 5672 - DNA, 25 bp, Homo sapien
aaattgtctcttttgtttgtgatat

SEQ ID NO: 5673 - DNA, 25 bp, Homo sapien
tccattttacaagtgtgcaacaaag

SEQ ID NO: 5674 - DNA, 25 bp, Homo sapien
ctttgttgcacacttgtaaaatgga

SEQ ID NO: 5675 - DNA, 25 bp, Homo sapien
accgagacagggtattattaataag

SEQ ID NO: 5676 - DNA, 25 bp, Homo sapien
cttattaataataccctgtctcggt

SEQ ID NO: 5677 - DNA, 25 bp, Homo sapien
ggcgaccggagcggcggtcgaggga

SEQ ID NO: 5678 - DNA, 25 bp, Homo sapien
tccctcgaccgccgctccggtcgcc

SEQ ID NO: 5679 - DNA, 25 bp, Homo sapien
aggcgaccggagcggcggtcgaggg

SEQ ID NO: 5680 - DNA, 25 bp, Homo sapien
ccctcgaccgccgctccggtcgcct

SEQ ID NO: 5681 - DNA, 25 bp, Homo sapien
actattcacggttcaggggttacaa

SEQ ID NO: 5682 - DNA, 25 bp, Homo sapien
ttgtaacccctgaaccgtgaatagt

SEQ ID NO: 5683 - DNA, 25 bp, Homo sapien
cgaccgatagagaaccgacgcacct

SEQ ID NO: 5684 - DNA, 25 bp, Homo sapien
aggtgcgtcggttctctatcggtcg

SEQ ID NO: 5685 - DNA, 25 bp, Homo sapien
cagtatgcattattctaaaggaact

SEQ ID NO: 5686 - DNA, 25 bp, Homo sapien
agttcctttagaataatgcatactg

SEQ ID NO: 5687 - DNA, 25 bp, Homo sapien
gttagtcagggagactcacttcctc

SEQ ID NO: 5688 - DNA, 25 bp, Homo sapien
gaggaagtgagtctccctgactaac

SEQ ID NO: 5689 - DNA, 25 bp, Homo sapien
atgtattctcattgtatttttatag

SEQ ID NO: 5690 - DNA, 25 bp, Homo sapien
ctataaaaatacaatgagaatacat

SEQ ID NO: 5691 - DNA, 25 bp, Homo sapien
tgatgtattctcattgtatttttat

SEQ ID NO: 5692 - DNA, 25 bp, Homo sapien
ataaaaatacaatgagaatacatca

SEQ ID NO: 5693 - DNA, 25 bp, Homo sapien
cgtcgtcactatgggtagaatattt

SEQ ID NO: 5694 - DNA, 25 bp, Homo sapien
aaatattctacccatagtgacgacg

SEQ ID NO: 5695 - DNA, 25 bp, Homo sapien
atgtcggtctatcacctatattttg

SEQ ID NO: 5696 - DNA, 25 bp, Homo sapien
caaaatataggtgatagaccgacat

SEQ ID NO: 5697 - DNA, 25 bp, Homo sapien
ggtcacatttgctcttgggaccttt

SEQ ID NO: 5698 - DNA, 25 bp, Homo sapien
aaaggtcccaagagcaaatgtgacc

SEQ ID NO: 5699 - DNA, 25 bp, Homo sapien
tctcgaaattgaaattctcggttaa

SEQ ID NO: 5700 - DNA, 25 bp, Homo sapien
ttaaccgagaatttcaatttcgaga

SEQ ID NO: 5701 - DNA, 25 bp, Homo sapien
cgttccagtgcttcggacgactcgg

SEQ ID NO: 5702 - DNA, 25 bp, Homo sapien
ccgagtcgtccgaagcactggaacg

SEQ ID NO: 5703 - DNA, 25 bp, Homo sapien
gtgttttttcacccgcaggtcggta

SEQ ID NO: 5704 - DNA, 25 bp, Homo sapien
taccgacctgcgggtgaaaaaacac

SEQ ID NO: 5705 - DNA, 25 bp, Homo sapien
ttaggtagatacaggaggctcttcg

SEQ ID NO: 5706 - DNA, 25 bp, Homo sapien
cgaagagcctcctgtatctacctaa

SEQ ID NO: 5707 - DNA, 25 bp, Homo sapien
cctaaggtatctccggagggactcc

SEQ ID NO: 5708 - DNA, 25 bp, Homo sapien
ggagtccctccggagataccttagg

SEQ ID NO: 5709 - DNA, 25 bp, Homo sapien
agtaatccaaggtgaagtacaaata

SEQ ID NO: 5710 - DNA, 25 bp, Homo sapien
tatttgtacttcaccttggattact

SEQ ID NO: 5711 - DNA, 25 bp, Homo sapien
ttactgttgactattgttatctcat

SEQ ID NO: 5712 - DNA, 25 bp, Homo sapien
atgagataacaatagtcaacagtaa

SEQ ID NO: 5713 - DNA, 25 bp, Homo sapien
caaaacatcagaaatggtctattat

SEQ ID NO: 5714 - DNA, 25 bp, Homo sapien
ataatagaccatttctgatgttttg

SEQ ID NO: 5715 - DNA, 25 bp, Homo sapien
cggtctcctccgcattggtcccgac

SEQ ID NO: 5716 - DNA, 25 bp, Homo sapien
gtcgggaccaatgcggaggagaccg

SEQ ID NO: 5717 - DNA, 25 bp, Homo sapien
gtcaggtgcggaacaaggcgggcgg

SEQ ID NO: 5718 - DNA, 25 bp, Homo sapien
ccgcccgccttgttccgcacctgac

SEQ ID NO: 5719 - DNA, 25 bp, Homo sapien
cagatcaagaagacaagggcaggag

SEQ ID NO: 5720 - DNA, 25 bp, Homo sapien
ctcctgcccttgtcttcttgatctg

SEQ ID NO: 5721 - DNA, 25 bp, Homo sapien
ggggacggcagtcggcccactcggt

SEQ ID NO: 5722 - DNA, 25 bp, Homo sapien
accgagtgggccgactgccgtcccc

SEQ ID NO: 5723 - DNA, 25 bp, Homo sapien
gctcgcggcgccacgtccaagggcc

SEQ ID NO: 5724 - DNA, 25 bp, Homo sapien
ggcccttggacgtggcgccgcgagc

SEQ ID NO: 5725 - DNA, 25 bp, Homo sapien
ctcgtccccagcgtctcgccccgtg

SEQ ID NO: 5726 - DNA, 25 bp, Homo sapien
cacggggcgagacgctggggacgag

SEQ ID NO: 5727 - DNA, 25 bp, Homo sapien
cgccgtgtccctggcatttgtacaa

SEQ ID NO: 5728 - DNA, 25 bp, Homo sapien
ttgtacaaatgccagggacacggcg

SEQ ID NO: 5729 - DNA, 25 bp, Homo sapien
cactcgttaaactctttacttatca

SEQ ID NO: 5730 - DNA, 25 bp, Homo sapien
tgataagtaaagagtttaacgagtg

SEQ ID NO: 5731 - DNA, 25 bp, Homo sapien
ggtccgtcacgtttaccggagagaa

SEQ ID NO: 5732 - DNA, 25 bp, Homo sapien
ttctctccggtaaacgtgacggacc

SEQ ID NO: 5733 - DNA, 25 bp, Homo sapien
tttactgatatctactgtttcataa

SEQ ID NO: 5734 - DNA, 25 bp, Homo sapien
ttatgaaacagtagatatcagtaaa

SEQ ID NO: 5735 - DNA, 25 bp, Homo sapien
cacatctttggttctctcaagtaaa

SEQ ID NO: 5736 - DNA, 25 bp, Homo sapien
tttacttgagagaaccaaagatgtg

SEQ ID NO: 5737 - DNA, 25 bp, Homo sapien
tcagacccctgtcggaaacgaacat

SEQ ID NO: 5738 - DNA, 25 bp, Homo sapien
atgttcgtttccgacaggggtctga

SEQ ID NO: 5739 - DNA, 25 bp, Homo sapien
ttaacgaataatatgaacgagaggt

SEQ ID NO: 5740 - DNA, 25 bp, Homo sapien
acctctcgttcatattattcgttaa

SEQ ID NO: 5741 - DNA, 25 bp, Homo sapien
aactaaacttacaagtgttacatgt

SEQ ID NO: 5742 - DNA, 25 bp, Homo sapien
acatgtaacacttgtaagtttagtt

SEQ ID NO: 5743 - DNA, 25 bp, Homo sapien
aagtttagattcatcaaatatcaag

SEQ ID NO: 5744 - DNA, 25 bp, Homo sapien
cttgatatttgatgaatctaaactt

SEQ ID NO: 5745 - DNA, 25 bp, Homo sapien
tagaacatgtttagcttaaaaattt

SEQ ID NO: 5746 - DNA, 25 bp, Homo sapien
aaatttttaagctaaacatgttcta

SEQ ID NO: 5747 - DNA, 25 bp, Homo sapien
tttagaacatgtttagcttaaaaat

SEQ ID NO: 5748 - DNA, 25 bp, Homo sapien
atttttaagctaaacatgttctaaa

SEQ ID NO: 5749 - DNA, 25 bp, Homo sapien
tgactatatgacgtatcctaaaaat

SEQ ID NO: 5750 - DNA, 25 bp, Homo sapien
atttttaggatacgtcatatagtca

SEQ ID NO: 5751 - DNA, 25 bp, Homo sapien
gtcgtaacgttcatacatctcttat

SEQ ID NO: 5752 - DNA, 25 bp, Homo sapien
ataagagatgtatgaacgttacgac

SEQ ID NO: 5753 - DNA, 25 bp, Homo sapien
aacctaaaaaccttgactctgatgt

SEQ ID NO: 5754 - DNA, 25 bp, Homo sapien
acatcagagtcaaggtttttaggtt

SEQ ID NO: 5755 - DNA, 25 bp, Homo sapien
agtgaccccattagcctctctttgt

SEQ ID NO: 5756 - DNA, 25 bp, Homo sapien
acaaagagaggctaatggggtcact

SEQ ID NO: 5757 - DNA, 25 bp, Homo sapien
cgtggggtctagtccgctctccggt

SEQ ID NO: 5758 - DNA, 25 bp, Homo sapien
accggagagcggactagaccccacg

SEQ ID NO: 5759 - DNA, 25 bp, Homo sapien
aggccccgggcgtgtccctcgtgag

SEQ ID NO: 5760 - DNA, 25 bp, Homo sapien
ctcacgagggacacgcccggggcct

SEQ ID NO: 5761 - DNA, 25 bp, Homo sapien
gctccttaaaggtccaccacctgtt

SEQ ID NO: 5762 - DNA, 25 bp, Homo sapien
aacaggtggtggacctttaaggagc

SEQ ID NO: 5763 - DNA, 25 bp, Homo sapien
ccggaggatatattaactgaaggag

SEQ ID NO: 5764 - DNA, 25 bp, Homo sapien
ctccttcagttaatatatcctccgg

SEQ ID NO: 5765 - DNA, 25 bp, Homo sapien
gacagagcacccaccccgtcgtgca

SEQ ID NO: 5766 - DNA, 25 bp, Homo sapien
tgcacgacggggtgggtgctctgtc

SEQ ID NO: 5767 - DNA, 25 bp, Homo sapien
tcgttctacggcgtggaatctgtgt

SEQ ID NO: 5768 - DNA, 25 bp, Homo sapien
acacagattccacgccgtagaacga

SEQ ID NO: 5769 - DNA, 25 bp, Homo sapien
gtcaaccgaagacctaagtctctac

SEQ ID NO: 5770 - DNA, 25 bp, Homo sapien
gtagagacttaggtcttcggttgac

SEQ ID NO: 5771 - DNA, 25 bp, Homo sapien
tccacaccgtggtttggaaaggaat

SEQ ID NO: 5772 - DNA, 25 bp, Homo sapien
attcctttccaaaccacggtgtgga

SEQ ID NO: 5773 - DNA, 25 bp, Homo sapien
gccgtcgccgaaggaggcaagcccg

SEQ ID NO: 5774 - DNA, 25 bp, Homo sapien
cgggcttgcctccttcggcgacggc

SEQ ID NO: 5775 - DNA, 25 bp, Homo sapien
ctgtgcctcccggccacggtccggg

SEQ ID NO: 5776 - DNA, 25 bp, Homo sapien
cccggaccgtggccgggaggcacag

SEQ ID NO: 5777 - DNA, 25 bp, Homo sapien
tgtctgtgcctcccggccacggtcc

SEQ ID NO: 5778 - DNA, 25 bp, Homo sapien
ggaccgtggccgggaggcacagaca

SEQ ID NO: 5779 - DNA, 25 bp, Homo sapien
ggtccgttccccgactgcgagaagg

SEQ ID NO: 5780 - DNA, 25 bp, Homo sapien
ccttctcgcagtcggggaacggacc

SEQ ID NO: 5781 - DNA, 25 bp, Homo sapien
agcagcacggcccagccgctcccct

SEQ ID NO: 5782 - DNA, 25 bp, Homo sapien
aggggagcggctgggccgtgctgct

SEQ ID NO: 5783 - DNA, 25 bp, Homo sapien
tcctacattatattgaatcccttct

SEQ ID NO: 5784 - DNA, 25 bp, Homo sapien
agaagggattcaatataatgtagga

SEQ ID NO: 5785 - DNA, 25 bp, Homo sapien
tgacttatagacttagatgattatt

SEQ ID NO: 5786 - DNA, 25 bp, Homo sapien
aataatcatctaagtctataagtca

SEQ ID NO: 5787 - DNA, 25 bp, Homo sapien
acgctgtgaccaaggtcgtgggtcc

SEQ ID NO: 5788 - DNA, 25 bp, Homo sapien
ggacccacgaccttggtcacagcgt

SEQ ID NO: 5789 - DNA, 25 bp, Homo sapien
tttatattgtaactcttttaagact

SEQ ID NO: 5790 - DNA, 25 bp, Homo sapien
agtcttaaaagagttacaatataaa

SEQ ID NO: 5791 - DNA, 25 bp, Homo sapien
cgaagtgataaagtccctctagtac

SEQ ID NO: 5792 - DNA, 25 bp, Homo sapien
gtactagagggactttatcacttcg

SEQ ID NO: 5793 - DNA, 25 bp, Homo sapien
ccctgcggggtcttgtttgtgtgcg

SEQ ID NO: 5794 - DNA, 25 bp, Homo sapien
cgcacacaaacaagaccccgcaggg

SEQ ID NO: 5795 - DNA, 25 bp, Homo sapien
cgacaacccaagacctcaattttat

SEQ ID NO: 5796 - DNA, 25 bp, Homo sapien
ataaaattgaggtcttgggttgtcg

SEQ ID NO: 5797 - DNA, 25 bp, Homo sapien
ggttgtcacgcccttcaagtttacg

SEQ ID NO: 5798 - DNA, 25 bp, Homo sapien
cgtaaacttgaagggcgtgacaacc

SEQ ID NO: 5799 - DNA, 25 bp, Homo sapien
gaccacacacctataggtggtccct

SEQ ID NO: 5800 - DNA, 25 bp, Homo sapien
agggaccacctataggtgtgtggtc

SEQ ID NO: 5801 - DNA, 25 bp, Homo sapien
agacaacctttcatgtcgtcaagac

SEQ ID NO: 5802 - DNA, 25 bp, Homo sapien
gtcttgacgacatgaaaggttgtct

SEQ ID NO: 5803 - DNA, 25 bp, Homo sapien
acaagcaaagaggagattcataaac

SEQ ID NO: 5804 - DNA, 25 bp, Homo sapien
gtttatgaatctcctctttgcttgt

SEQ ID NO: 5805 - DNA, 25 bp, Homo sapien
ggtcagaaacatctttatttatacg

SEQ ID NO: 5806 - DNA, 25 bp, Homo sapien
cgtataaataaagatgtttctgacc

SEQ ID NO: 5807 - DNA, 25 bp, Homo sapien
caaaggtatgtgtcgccgttagaag

SEQ ID NO: 5808 - DNA, 25 bp, Homo sapien
cttctaacggcgacacatacctttg

SEQ ID NO: 5809 - DNA, 25 bp, Homo sapien
gacgtgctccttgggccccggtcta

SEQ ID NO: 5810 - DNA, 25 bp, Homo sapien
tagaccggggcccaaggagcacgtc

SEQ ID NO: 5811 - DNA, 25 bp, Homo sapien
cccggtaccgggtcacacgcagaag

SEQ ID NO: 5812 - DNA, 25 bp, Homo sapien
cttctgcgtgtgacccggtaccggg

SEQ ID NO: 5813 - DNA, 25 bp, Homo sapien
attctcgtgatttgtagtaattgag

SEQ ID NO: 5814 - DNA, 25 bp, Homo sapien
ctcaattactacaaatcacgagaat

SEQ ID NO: 5815 - DNA, 25 bp, Homo sapien
gacactcaattattctttacagaaa

SEQ ID NO: 5816 - DNA, 25 bp, Homo sapien
tttctgtaaagaataattgagtgtc

SEQ ID NO: 5817 - DNA, 25 bp, Homo sapien
aagacgcgcccgtggttctacctgt

SEQ ID NO: 5818 - DNA, 25 bp, Homo sapien
acaggtagaaccacgggcgcgtctt

SEQ ID NO: 5819 - DNA, 25 bp, Homo sapien
cccgtggctcccgtggtcgcctccg

SEQ ID NO: 5820 - DNA, 25 bp, Homo sapien
cggaggcgaccacgggagccacggg

SEQ ID NO: 5821 - DNA, 25 bp, Homo sapien
ggacctccaggtagaaggttcctac

SEQ ID NO: 5822 - DNA, 25 bp, Homo sapien
gtaggaaccttctacctggaggtcc

SEQ ID NO: 5823 - DNA, 25 bp, Homo sapien
atgtccggtagcctcgccccggacc

SEQ ID NO: 5824 - DNA, 25 bp, Homo sapien
ggtccggggcgaggctaccggacat

SEQ ID NO: 5825 - DNA, 25 bp, Homo sapien
tgacctatacacatttagaggagaa

SEQ ID NO: 5826 - DNA, 25 bp, Homo sapien
ttctcctctaaatgtgtataggtca

SEQ ID NO: 5827 - DNA, 25 bp, Homo sapien
taccgacaaggcgttcatggttctg

SEQ ID NO: 5828 - DNA, 25 bp, Homo sapien
cagaaccatgaacgccttgtcggta

SEQ ID NO: 5829 - DNA, 25 bp, Homo sapien
ggacgatgaagagagcttcgacaga

SEQ ID NO: 5830 - DNA, 25 bp, Homo sapien
tctgtcgaagctctcttcatcgtcc

SEQ ID NO: 5831 - DNA, 25 bp, Homo sapien
gacacggacctagtcttatttactg

SEQ ID NO: 5832 - DNA, 25 bp, Homo sapien
cagtaaataagactaggtccgtgtc

SEQ ID NO: 5833 - DNA, 25 bp, Homo sapien
ccgtcgtcgtggcttgccaccaaac

SEQ ID NO: 5834 - DNA, 25 bp, Homo sapien
gtttggtggcaagccacgacgacgg

SEQ ID NO: 5835 - DNA, 25 bp, Homo sapien
gtatacataatgtaactgtcccaaa

SEQ ID NO: 5836 - DNA, 25 bp, Homo sapien
tttgggacagttacattatgtatac

SEQ ID NO: 5837 - DNA, 25 bp, Homo sapien
ggcggttcctgtgcgtaccgacaga

SEQ ID NO: 5838 - DNA, 25 bp, Homo sapien
tctgtcggtacgcacaggaaccgcc

SEQ ID NO: 5839 - DNA, 25 bp, Homo sapien
gttcaaaactcactttagaccattt

SEQ ID NO: 5840 - DNA, 25 bp, Homo sapien
aaatggtctaaagtgagttttgaac

SEQ ID NO: 5841 - DNA, 25 bp, Homo sapien
cgttgaagcccgagatgaacaccca

SEQ ID NO: 5842 - DNA, 25 bp, Homo sapien
tgggtgttcatctcgggcttcaacg

SEQ ID NO: 5843 - DNA, 25 bp, Homo sapien
cgagagactagtggtcgttccggtc

SEQ ID NO: 5844 - DNA, 25 bp, Homo sapien
gaccggaacgaccactagtctctcg

SEQ ID NO: 5845 - DNA, 25 bp, Homo sapien
gataatgagtacatgaaatgtttta

SEQ ID NO: 5846 - DNA, 25 bp, Homo sapien
taaaacatttcatgtactcattatc

SEQ ID NO: 5847 - DNA, 25 bp, Homo sapien
gacgagtccatacgtaaggtctgaa

SEQ ID NO: 5848 - DNA, 25 bp, Homo sapien
ttcagaccttacgtatggactcgtc

SEQ ID NO: 5849 - DNA, 25 bp, Homo sapien
accgccattaagatcgactcacaat

SEQ ID NO: 5850 - DNA, 25 bp, Homo sapien
attgtgagtcgatcttaatggcggt

SEQ ID NO: 5851 - DNA, 25 bp, Homo sapien
ggaacttttacacaaggttactcat

SEQ ID NO: 5852 - DNA, 25 bp, Homo sapien
atgagtaaccttgtgtaaaagttcc

SEQ ID NO: 5853 - DNA, 25 bp, Homo sapien
actgtagtacctaaaacaactagaa

SEQ ID NO: 5854 - DNA, 25 bp, Homo sapien
ttctagttgttttaggtactacagt

SEQ ID NO: 5855 - DNA, 25 bp, Homo sapien
ttaatctttgaagtaactgttattt

SEQ ID NO: 5856 - DNA, 25 bp, Homo sapien
aaataacagttacttcaaagattaa

SEQ ID NO: 5857 - DNA, 25 bp, Homo sapien
cactaacgagttccggttgtggccc

SEQ ID NO: 5858 - DNA, 25 bp, Homo sapien
gggccacaaccggaactcgttagtg

SEQ ID NO: 5859 - DNA, 25 bp, Homo sapien
tcgctcacgtgatacaccggtgatc

SEQ ID NO: 5860 - DNA, 25 bp, Homo sapien
gatcaccggtgtatcacgtgagcga

SEQ ID NO: 5861 - DNA, 25 bp, Homo sapien
aaagtatgttatcttcttccactat

SEQ ID NO: 5862 - DNA, 25 bp, Homo sapien
atagtggaagaagataacatacttt

SEQ ID NO: 5863 - DNA, 25 bp, Homo sapien
aggaaaggccaacaccgcgtcatct

SEQ ID NO: 5864 - DNA, 25 bp, Homo sapien
agatgacgcggtgttggcctttcct

SEQ ID NO: 5865 - DNA, 25 bp, Homo sapien
gaccactgacataagttccttcccg

SEQ ID NO: 5866 - DNA, 25 bp, Homo sapien
cgggaaggaacttatgtcagtggtc

SEQ ID NO: 5867 - DNA, 25 bp, Homo sapien
attcccgtgcctcgtctgccggagg

SEQ ID NO: 5868 - DNA, 25 bp, Homo sapien
cctccggcagacgaggcacgggaat

SEQ ID NO: 5869 - DNA, 25 bp, Homo sapien
gaaattcaacaagaagtttcactaa

SEQ ID NO: 5870 - DNA, 25 bp, Homo sapien
ttagtgaaacttcttgttgaatttc

SEQ ID NO: 5871 - DNA, 25 bp, Homo sapien
gtcgggtcagaggacgcagaggtgg

SEQ ID NO: 5872 - DNA, 25 bp, Homo sapien
ccacctctgcgtcctctgacccgac

SEQ ID NO: 5873 - DNA, 25 bp, Homo sapien
cctttgacgcagtaacggacggacg

SEQ ID NO: 5874 - DNA, 25 bp, Homo sapien
cgtccgtccgttactgcgtcaaagg

SEQ ID NO: 5875 - DNA, 25 bp, Homo sapien
aaagttcacctcatgaaacataaag

SEQ ID NO: 5876 - DNA, 25 bp, Homo sapien
ctttatgtttcatgaggtgaacttt

SEQ ID NO: 5877 - DNA, 25 bp, Homo sapien
ctttagttatctgtaatagacttcc

SEQ ID NO: 5878 - DNA, 25 bp, Homo sapien
ggaagtctattacagataactaaag

SEQ ID NO: 5879 - DNA, 25 bp, Homo sapien
ttcttccgtcgagtttttgtgtttg

SEQ ID NO: 5880 - DNA, 25 bp, Homo sapien
caaacacaaaaactcgacggaagaa

SEQ ID NO: 5881 - DNA, 25 bp, Homo sapien
gtattttaagctatttgtatgttca

SEQ ID NO: 5882 - DNA, 25 bp, Homo sapien
tgaacatacaaatagcttaaaatac

SEQ ID NO: 5883 - DNA, 25 bp, Homo sapien
cgacggccgcgtcttggtcccggcg

SEQ ID NO: 5884 - DNA, 25 bp, Homo sapien
cgccgggaccaagacgcggccgtcg

SEQ ID NO: 5885 - DNA, 25 bp, Homo sapien
gacaacattgggtgaagagggaaac

SEQ ID NO: 5886 - DNA, 25 bp, Homo sapien
gtttccctcttcacccaatgttgtc

SEQ ID NO: 5887 - DNA, 25 bp, Homo sapien
gatttacctatcgagaccaacacga

SEQ ID NO: 5888 - DNA, 25 bp, Homo sapien
tcgtgttggtctcgataggtaaatc

SEQ ID NO: 5889 - DNA, 25 bp, Homo sapien
aataattctacgaaagttctatgta

SEQ ID NO: 5890 - DNA, 25 bp, Homo sapien
tacatagaactttcgtagaattatt

SEQ ID NO: 5891 - DNA, 25 bp, Homo sapien
gacctcgcggacgacgccctccact

SEQ ID NO: 5892 - DNA, 25 bp, Homo sapien
agtggagggcgtcgtccgcgaggtc

SEQ ID NO: 5893 - DNA, 25 bp, Homo sapien
accccggcgcgtaggcgacacaagg

SEQ ID NO: 5894 - DNA, 25 bp, Homo sapien
ccttgtgtcgcctacgcgccggggt

SEQ ID NO: 5895 - DNA, 25 bp, Homo sapien
tttatactacgaacggttatataac

SEQ ID NO: 5896 - DNA, 25 bp, Homo sapien
gttatataaccgttcgtagtataaa

SEQ ID NO: 5897 - DNA, 25 bp, Homo sapien
agactgaagatttacgtgtgcacgt

SEQ ID NO: 5898 - DNA, 25 bp, Homo sapien
acgtgcacacgtaaatcttcagtct

SEQ ID NO: 5899 - DNA, 25 bp, Homo sapien
cgtgggaaaagtctcatctacttac

SEQ ID NO: 5900 - DNA, 25 bp, Homo sapien
gtaagtagatgagacttttcccacg

SEQ ID NO: 5901 - DNA, 25 bp, Homo sapien
ccacgggaataaaggtgagtaagga

SEQ ID NO: 5902 - DNA, 25 bp, Homo sapien
tccttactcacctttattcccgtgg

SEQ ID NO: 5903 - DNA, 25 bp, Homo sapien
gagcatgacatatccggaacagaaa

SEQ ID NO: 5904 - DNA, 25 bp, Homo sapien
tttctgttccggatatgtcatgctc

SEQ ID NO: 5905 - DNA, 25 bp, Homo sapien
gtctgtcattcgttgcgcacctctc

SEQ ID NO: 5906 - DNA, 25 bp, Homo sapien
gagaggtgcgcaacgaatgacagac

SEQ ID NO: 5907 - DNA, 25 bp, Homo sapien
tcgcggctactgtctaggcggctgt

SEQ ID NO: 5908 - DNA, 25 bp, Homo sapien
acagccgcctagacagtagccgcga

SEQ ID NO: 5909 - DNA, 25 bp, Homo sapien
ggtcgcatctctctcccaatacaag

SEQ ID NO: 5910 - DNA, 25 bp, Homo sapien
cttgtattgggagagagatgcgacc

SEQ ID NO: 5911 - DNA, 25 bp, Homo sapien
aaaatgacaattgtttagaactgta

SEQ ID NO: 5912 - DNA, 25 bp, Homo sapien
tacagttctaaacaattgtcatttt

SEQ ID NO: 5913 - DNA, 25 bp, Homo sapien
cgtacacagggacggccgtgggtac

SEQ ID NO: 5914 - DNA, 25 bp, Homo sapien
gtacccacggccgtccctgtgtacg

SEQ ID NO: 5915 - DNA, 25 bp, Homo sapien
cgaccccagaggctcgtcggagacg

SEQ ID NO: 5916 - DNA, 25 bp, Homo sapien
cgtctccgacgagcctctggggtcg

SEQ ID NO: 5917 - DNA, 25 bp, Homo sapien
tcgtcccagaccaggtccgggagag

SEQ ID NO: 5918 - DNA, 25 bp, Homo sapien
ctctcccggacctggtctgggacga

SEQ ID NO: 5919 - DNA, 25 bp, Homo sapien
gtaaacaatatagagctggtgtttt

SEQ ID NO: 5920 - DNA, 25 bp, Homo sapien
aaaacaccagctctatattgtttac

SEQ ID NO: 5921 - DNA, 25 bp, Homo sapien
aggtttatcttgttagtgtgggtac

SEQ ID NO: 5922 - DNA, 25 bp, Homo sapien
gtacccacactaacaagataaacct

SEQ ID NO: 5923 - DNA, 25 bp, Homo sapien
acgttggtttattatccgaagtcaa

SEQ ID NO: 5924 - DNA, 25 bp, Homo sapien
ttgacttcggataataaaccaacgt

SEQ ID NO: 5925 - DNA, 25 bp, Homo sapien
atttatcatctctatatcaaaacag

SEQ ID NO: 5926 - DNA, 25 bp, Homo sapien
ctgttttgatatagagatgataaat

SEQ ID NO: 5927 - DNA, 25 bp, Homo sapien
cgcgtacgaggctcgcgccgcgggg

SEQ ID NO: 5928 - DNA, 25 bp, Homo sapien
ccccgcggcgcgagcctcgtacgcg

SEQ ID NO: 5929 - DNA, 25 bp, Homo sapien
gcgcgtacgaggctcgcgccgcggg

SEQ ID NO: 5930 - DNA, 25 bp, Homo sapien
cccgcggcgcgagcctcgtacgcgc

SEQ ID NO: 5931 - DNA, 25 bp, Homo sapien
gcgtacgaggctcgcgccgcggggg

SEQ ID NO: 5932 - DNA, 25 bp, Homo sapien
cccccgcggcgcgagcctcgtacgc

SEQ ID NO: 5933 - DNA, 25 bp, Homo sapien
ggataattcagttaaagtaccgtgt

SEQ ID NO: 5934 - DNA, 25 bp, Homo sapien
acacggtactttaactgaattatcc

SEQ ID NO: 5935 - DNA, 25 bp, Homo sapien
ttaaggatccccctggctccgtagg

SEQ ID NO: 5936 - DNA, 25 bp, Homo sapien
cctacggagccagggggatccttaa

SEQ ID NO: 5937 - DNA, 25 bp, Homo sapien
tccgagaccggatgtggtcattaag

SEQ ID NO: 5938 - DNA, 25 bp, Homo sapien
cttaatgaccacatccggtctcgga

SEQ ID NO: 5939 - DNA, 25 bp, Homo sapien
tcccgacgtggcagaggagaggtgt

SEQ ID NO: 5940 - DNA, 25 bp, Homo sapien
acacctctcctctgccacgtcggga

SEQ ID NO: 5941 - DNA, 25 bp, Homo sapien
gtcccgacgtggcagaggagaggtg

SEQ ID NO: 5942 - DNA, 25 bp, Homo sapien
cacctctcctctgccacgtcgggac

SEQ ID NO: 5943 - DNA, 25 bp, Homo sapien
cttcgtcttattcttttcaacttcc

SEQ ID NO: 5944 - DNA, 25 bp, Homo sapien
ggaagttgaaaagaataagacgaag

SEQ ID NO: 5945 - DNA, 25 bp, Homo sapien
ttccacaggtgacgcggtgccgaga

SEQ ID NO: 5946 - DNA, 25 bp, Homo sapien
tctcggcaccgcgtcacctgtggaa

SEQ ID NO: 5947 - DNA, 25 bp, Homo sapien
aatcttacttatgataactgtcgac

SEQ ID NO: 5948 - DNA, 25 bp, Homo sapien
gtcgacagttatcataagtaagatt

SEQ ID NO: 5949 - DNA, 25 bp, Homo sapien
cactggtcctgacccacggtgccca

SEQ ID NO: 5950 - DNA, 25 bp, Homo sapien
tgggcaccgtgggtcaggaccagtg

SEQ ID NO: 5951 - DNA, 25 bp, Homo sapien
cacgacccaggcacgggtgaggtcg

SEQ ID NO: 5952 - DNA, 25 bp, Homo sapien
cgacctcacccgtgcctgggtcgtg

SEQ ID NO: 5953 - DNA, 25 bp, Homo sapien
gaccccgagacatggtcacgacggt

SEQ ID NO: 5954 - DNA, 25 bp, Homo sapien
accgtcgtgaccatgtctcggggtc

SEQ ID NO: 5955 - DNA, 25 bp, Homo sapien
tactccatacatggatataagggac

SEQ ID NO: 5956 - DNA, 25 bp, Homo sapien
gtcccttatatccatgtatggagta

SEQ ID NO: 5957 - DNA, 25 bp, Homo sapien
accgtgatagtcgaaggtgacttaa

SEQ ID NO: 5958 - DNA, 25 bp, Homo sapien
ttaagtcaccttcgactatcacggt

SEQ ID NO: 5959 - DNA, 25 bp, Homo sapien
tcgaaagaggatgacgcggaaaaac

SEQ ID NO: 5960 - DNA, 25 bp, Homo sapien
gtttttccgcgtcatcctctttcga

SEQ ID NO: 5961 - DNA, 25 bp, Homo sapien
ctacgagggtcggaagatctttact

SEQ ID NO: 5962 - DNA, 25 bp, Homo sapien
agtaaagatcttccgaccctcgtag

SEQ ID NO: 5963 - DNA, 25 bp, Homo sapien
ttgctccagtcccactaaactcatg

SEQ ID NO: 5964 - DNA, 25 bp, Homo sapien
catgagtttagtgggactggagcaa

SEQ ID NO: 5965 - DNA, 25 bp, Homo sapien
tatagactctatgaaagtagctatt

SEQ ID NO: 5966 - DNA, 25 bp, Homo sapien
aatagctactttcatagagtctata

SEQ ID NO: 5967 - DNA, 25 bp, Homo sapien
aaacgacaggtgaaaggggcaccga

SEQ ID NO: 5968 - DNA, 25 bp, Homo sapien
tcggtgcccctttcacctgtcgttt

SEQ ID NO: 5969 - DNA, 25 bp, Homo sapien
gtcttccaccggtgcgcgtcaggga

SEQ ID NO: 5970 - DNA, 25 bp, Homo sapien
tccctgacgcgcaccggtggaagac

SEQ ID NO: 5971 - DNA, 25 bp, Homo sapien
ggaccccaaacatagactgaagtta

SEQ ID NO: 5972 - DNA, 25 bp, Homo sapien
taacttcagtctatgtttggggtcc

SEQ ID NO: 5973 - DNA, 25 bp, Homo sapien
aacccaggaccgagatggttgagaa

SEQ ID NO: 5974 - DNA, 25 bp, Homo sapien
ttctcaaccatctcggtcctgggtt

SEQ ID NO: 5975 - DNA, 25 bp, Homo sapien
ttcggttaaccaatacacttcttat

SEQ ID NO: 5976 - DNA, 25 bp, Homo sapien
ataagaagtgtattggttaaccgaa

SEQ ID NO: 5977 - DNA, 25 bp, Homo sapien
atacggtgaattcattaaaaacagg

SEQ ID NO: 5978 - DNA, 25 bp, Homo sapien
cctgtttttaatgaattcaccgtat

SEQ ID NO: 5979 - DNA, 25 bp, Homo sapien
ggtccggtgcctcggtgcaccgttc

SEQ ID NO: 5980 - DNA, 25 bp, Homo sapien
gaacggtgcaccgaggcaccggacc

SEQ ID NO: 5981 - DNA, 25 bp, Homo sapien
agaggttaagccactacacagtaag

SEQ ID NO: 5982 - DNA, 25 bp, Homo sapien
cttactgtgtagtggcttaacctct

SEQ ID NO: 5983 - DNA, 25 bp, Homo sapien
tccagtcgtaacaatgtacgttcga

SEQ ID NO: 5984 - DNA, 25 bp, Homo sapien
tcgaacgtacattgttacgactgga

SEQ ID NO: 5985 - DNA, 25 bp, Homo sapien
gaacttagtcaaagatgaagggaag

SEQ ID NO: 5986 - DNA, 25 bp, Homo sapien
cttcccttcatctttgactaagttc

SEQ ID NO: 5987 - DNA, 25 bp, Homo sapien
ggcggcaccccggatccgcgcgtcg

SEQ ID NO: 5988 - DNA, 25 bp, Homo sapien
cgacgcgcggatccggggtgccgcc

SEQ ID NO: 5989 - DNA, 25 bp, Homo sapien
cggcggcaccccggatccgcgcgtc

SEQ ID NO: 5990 - DNA, 25 bp, Homo sapien
gacgcgcggatccggggtgccgccg

SEQ ID NO: 5991 - DNA, 25 bp, Homo sapien
ccggcggcaccccggatccgcgcgt

SEQ ID NO: 5992 - DNA, 25 bp, Homo sapien
acgcgcggatccggggtgccgccgg

SEQ ID NO: 5993 - DNA, 25 bp, Homo sapien
agcccggcggcaccccggatccgcg

SEQ ID NO: 5994 - DNA, 25 bp, Homo sapien
cgcggatccggggtgccgccgggct

SEQ ID NO: 5995 - DNA, 25 bp, Homo sapien
cgggtccgactgtttacctgcacat

SEQ ID NO: 5996 - DNA, 25 bp, Homo sapien
atgtgcaggtaaacagtcggacccg

SEQ ID NO: 5997 - DNA, 25 bp, Homo sapien
ctcagacaaaactctcctggtacct

SEQ ID NO: 5998 - DNA, 25 bp, Homo sapien
aggtaccaggagagttttgtctgag

SEQ ID NO: 5999 - DNA, 25 bp, Homo sapien
cccgtcttgcggttgctcagcgtga

SEQ ID NO: 6000 - DNA, 25 bp, Homo sapien
tcacgctgagcaaccgcaagacggg

SEQ ID NO: 6001 - DNA, 25 bp, Homo sapien
ggcgtcgaggggtcgcatcgggagg

SEQ ID NO: 6002 - DNA, 25 bp, Homo sapien
cctcccgatgcgacccctcgacgcc

SEQ ID NO: 6003 - DNA, 25 bp, Homo sapien
cgacaggtccggaggtcagccggag

SEQ ID NO: 6004 - DNA, 25 bp, Homo sapien
ctccggctgacctccggacctgtcg

SEQ ID NO: 6005 - DNA, 25 bp, Homo sapien
tcacctaataatagtttcatgtagt

SEQ ID NO: 6006 - DNA, 25 bp, Homo sapien
actacatgaaactattattaggtga

SEQ ID NO: 6007 - DNA, 25 bp, Homo sapien
cctccgactccttcggcccgcctgc

SEQ ID NO: 6008 - DNA, 25 bp, Homo sapien
gcaggcgggccgaaggagtcggagg

SEQ ID NO: 6009 - DNA, 25 bp, Homo sapien
attcgcaggtagggaggcgtcaccc

SEQ ID NO: 6010 - DNA, 25 bp, Homo sapien
gggtgacgcctccctacctgcgaat

SEQ ID NO: 6011 - DNA, 25 bp, Homo sapien
tcctttgaaacattctaccgtcaac

SEQ ID NO: 6012 - DNA, 25 bp, Homo sapien
gttgacggtagaatgtttcaaagga

SEQ ID NO: 6013 - DNA, 25 bp, Homo sapien
cgacggtctctctagccatgtaaca

SEQ ID NO: 6014 - DNA, 25 bp, Homo sapien
tgttacatggctagagagaccgtcg

SEQ ID NO: 6015 - DNA, 25 bp, Homo sapien
gatcttcagtcgaaaaagacaggta

SEQ ID NO: 6016 - DNA, 25 bp, Homo sapien
tacctgtctttttcgactgaagatc

SEQ ID NO: 6017 - DNA, 25 bp, Homo sapien
gtccgagacagccacgggggtgtcg

SEQ ID NO: 6018 - DNA, 25 bp, Homo sapien
cgacacccccgtggctgtctcggac

SEQ ID NO: 6019 - DNA, 25 bp, Homo sapien
atcattttaaaccatctactctaaa

SEQ ID NO: 6020 - DNA, 25 bp, Homo sapien
tttagagtagatggtttaaaatgat

SEQ ID NO: 6021 - DNA, 25 bp, Homo sapien
agaccgaggggggcccgccgctatg

SEQ ID NO: 6022 - DNA, 25 bp, Homo sapien
catagcggcgggcccccctcggtct

SEQ ID NO: 6023 - DNA, 25 bp, Homo sapien
taagttctttcatgtatattagttg

SEQ ID NO: 6024 - DNA, 25 bp, Homo sapien
caactaatatacatgaaagaactta

SEQ ID NO: 6025 - DNA, 25 bp, Homo sapien
tattaagttctttcatgtatattag

SEQ ID NO: 6026 - DNA, 25 bp, Homo sapien
ctaatatacatgaaagaacttaata

SEQ ID NO: 6027 - DNA, 25 bp, Homo sapien
aggtctccgcttaggaagtcgtaag

SEQ ID NO: 6028 - DNA, 25 bp, Homo sapien
cttacgacttcctaagcggagacct

SEQ ID NO: 6029 - DNA, 25 bp, Homo sapien
ttcggtgaaacaccgaattcggtgt

SEQ ID NO: 6030 - DNA, 25 bp, Homo sapien
acaccgaattcggtgtttcaccgaa

SEQ ID NO: 6031 - DNA, 25 bp, Homo sapien
agaaccaaggtatatgttaattccg

SEQ ID NO: 6032 - DNA, 25 bp, Homo sapien
cggaattaacatataccttggttct

SEQ ID NO: 6033 - DNA, 25 bp, Homo sapien
gacgtggagacctacgggcgtgacg

SEQ ID NO: 6034 - DNA, 25 bp, Homo sapien
cgtcacgcccgtaggtctccacgtc

SEQ ID NO: 6035 - DNA, 25 bp, Homo sapien
cgaaagaggaaccttgactgtggtt

SEQ ID NO: 6036 - DNA, 25 bp, Homo sapien
aaccacagtcaaggttcctctttcg

SEQ ID NO: 6037 - DNA, 25 bp, Homo sapien
tgaagaaagttgataccaaaattat

SEQ ID NO: 6038 - DNA, 25 bp, Homo sapien
ataattttggtatcaactttcttca

SEQ ID NO: 6039 - DNA, 25 bp, Homo sapien
gtgaagaaagttgataccaaaatta

SEQ ID NO: 6040 - DNA, 25 bp, Homo sapien
taattttggtatcaactttcttcac

SEQ ID NO: 6041 - DNA, 25 bp, Homo sapien
gggttcaaaccctcgtgtccatacc

SEQ ID NO: 6042 - DNA, 25 bp, Homo sapien
ggtatggacacgagggtttgaaccc

SEQ ID NO: 6043 - DNA, 25 bp, Homo sapien
taatagaagtagttacctcactccg

SEQ ID NO: 6044 - DNA, 25 bp, Homo sapien
cggagtgaggtaactacttctatta

SEQ ID NO: 6045 - DNA, 25 bp, Homo sapien
gacgtagcttataaaaagctcacag

SEQ ID NO: 6046 - DNA, 25 bp, Homo sapien
ctgtgagctttttataagctacgtc

SEQ ID NO: 6047 - DNA, 25 bp, Homo sapien
agcccctgggtcgcgccgccgacag

SEQ ID NO: 6048 - DNA, 25 bp, Homo sapien
ctgtcggcggcgcgacccaggggct

SEQ ID NO: 6049 - DNA, 25 bp, Homo sapien
gcccgtcaggtctgccggccccgtc

SEQ ID NO: 6050 - DNA, 25 bp, Homo sapien
gacggggccggcagacctgacgggc

SEQ ID NO: 6051 - DNA, 25 bp, Homo sapien
gggcccgtcaggtctgccggccccg

SEQ ID NO: 6052 - DNA, 25 bp, Homo sapien
cggggccggcagacctgacgggccc

SEQ ID NO: 6053 - DNA, 25 bp, Homo sapien
gagacctaaggaacagtcatcccgc

SEQ ID NO: 6054 - DNA, 25 bp, Homo sapien
gcgggatgactgttccttaggtctc

SEQ ID NO: 6055 - DNA, 25 bp, Homo sapien
ggcgcccgagggccgccccgctccg

SEQ ID NO: 6056 - DNA, 25 bp, Homo sapien
cggagcggggcggccctcgggcgcc

SEQ ID NO: 6057 - DNA, 25 bp, Homo sapien
agactcgtgtgaccgagacggaccc

SEQ ID NO: 6058 - DNA, 25 bp, Homo sapien
gggtccgtctcggtcacacgagtct

SEQ ID NO: 6059 - DNA, 25 bp, Homo sapien
aataaacctaatactcgaaagtcga

SEQ ID NO: 6060 - DNA, 25 bp, Homo sapien
tcgactttcgagtattaggtttatt

SEQ ID NO: 6061 - DNA, 25 bp, Homo sapien
ggcagacagtcgtgcaacgacggaa

SEQ ID NO: 6062 - DNA, 25 bp, Homo sapien
ttccgtcgttgcacgactgtctgcc

SEQ ID NO: 6063 - DNA, 25 bp, Homo sapien
gcccgtgcccgggagaccgtcccta

SEQ ID NO: 6064 - DNA, 25 bp, Homo sapien
tagggacggtctcccgggcacgggc

SEQ ID NO: 6065 - DNA, 25 bp, Homo sapien
gtgcccgtgcccgggagaccgtccc

SEQ ID NO: 6066 - DNA, 25 bp, Homo sapien
gggacggtctcccgggcacgggcac

SEQ ID NO: 6067 - DNA, 25 bp, Homo sapien
cccgtcactcccagcggcgccgccg

SEQ ID NO: 6068 - DNA, 25 bp, Homo sapien
cggcggcgccgctgggagtgacggg

SEQ ID NO: 6069 - DNA, 25 bp, Homo sapien
ccccgtcactcccagcggcgccgcc

SEQ ID NO: 6070 - DNA, 25 bp, Homo sapien
ggcggcgccgctgggagtgacgggg

SEQ ID NO: 6071 - DNA, 25 bp, Homo sapien
cccccgtcactcccagcggcgccgc

SEQ ID NO: 6072 - DNA, 25 bp, Homo sapien
gcggcgccgctgggagtgacggggg

SEQ ID NO: 6073 - DNA, 25 bp, Homo sapien
accacatcctgttatggtcatagac

SEQ ID NO: 6074 - DNA, 25 bp, Homo sapien
gtctatgaccataacaggatgtggt

SEQ ID NO: 6075 - DNA, 25 bp, Homo sapien
tgacctgtgaccaaagggagtgacg

SEQ ID NO: 6076 - DNA, 25 bp, Homo sapien
cgtcactccctttggtcacaggtca

SEQ ID NO: 6077 - DNA, 25 bp, Homo sapien
aacaacagtcgaaagtaattcctgt

SEQ ID NO: 6078 - DNA, 25 bp, Homo sapien
acaggaattactttcgactgttgtt

SEQ ID NO: 6079 - DNA, 25 bp, Homo sapien
cggggctaaaggtgtgtccacggac

SEQ ID NO: 6080 - DNA, 25 bp, Homo sapien
gtccgtggacacacctttagccccg

SEQ ID NO: 6081 - DNA, 25 bp, Homo sapien
tctcgtgtaagatcaaattttaata

SEQ ID NO: 6082 - DNA, 25 bp, Homo sapien
tattaaaatttgatcttacacgaga

SEQ ID NO: 6083 - DNA, 25 bp, Homo sapien
gacacgggcgacgtccgtcccggag

SEQ ID NO: 6084 - DNA, 25 bp, Homo sapien
ctccgggacggacgtcgcccgtgtc

SEQ ID NO: 6085 - DNA, 25 bp, Homo sapien
caggactactaatcagagtattcac

SEQ ID NO: 6086 - DNA, 25 bp, Homo sapien
gtgaatactctgattagtagtcctg

SEQ ID NO: 6087 - DNA, 25 bp, Homo sapien
cggcgactgactcgccgggtgccgt

SEQ ID NO: 6088 - DNA, 25 bp, Homo sapien
acggcacccggcgagtcagtcgccg

SEQ ID NO: 6089 - DNA, 25 bp, Homo sapien
tgtattagtttttgagaagtacaaa

SEQ ID NO: 6090 - DNA, 25 bp, Homo sapien
tttgtacttctcaaaaactaataca

SEQ ID NO: 6091 - DNA, 25 bp, Homo sapien
gaatgggaagcacgggacacccgga

SEQ ID NO: 6092 - DNA, 25 bp, Homo sapien
tccgggtgtcccgtgcttcccattc

SEQ ID NO: 6093 - DNA, 25 bp, Homo sapien
gacctggtcgggtccccactacgtg

SEQ ID NO: 6094 - DNA, 25 bp, Homo sapien
cacgtagtggggacccgaccaggtc

SEQ ID NO: 6095 - DNA, 25 bp, Homo sapien
ccctcccagggcggtcgtctccgta

SEQ ID NO: 6096 - DNA, 25 bp, Homo sapien
tacggagacgaccgccctgggaggg

SEQ ID NO: 6097 - DNA, 25 bp, Homo sapien
ttctaaggcactacaagagaagcat

SEQ ID NO: 6098 - DNA, 25 bp, Homo sapien
atgcttctcttgtagtgccttagaa

SEQ ID NO: 6099 - DNA, 25 bp, Homo sapien
ttgaaaggtgcaagtaccatattgg

SEQ ID NO: 6100 - DNA, 25 bp, Homo sapien
ccaatatggtacttgcacctttcaa

SEQ ID NO: 6101 - DNA, 25 bp, Homo sapien
agtcatacctggaagacaccggtcg

SEQ ID NO: 6102 - DNA, 25 bp, Homo sapien
cgaccggtgtcttccaggtatgact

SEQ ID NO: 6103 - DNA, 25 bp, Homo sapien
tcgttcggtcgtgccgagacggtga

SEQ ID NO: 6104 - DNA, 25 bp, Homo sapien
tcaccgtctcggcacgaccgaacga

SEQ ID NO: 6105 - DNA, 25 bp, Homo sapien
tctatgtcttaagacttaaagtccc

SEQ ID NO: 6106 - DNA, 25 bp, Homo sapien
gggactttaagtcttaagacataga

SEQ ID NO: 6107 - DNA, 25 bp, Homo sapien
ggcgcgaggcctggccgacagtggg

SEQ ID NO: 6108 - DNA, 25 bp, Homo sapien
cccactgtcggccaggcctcgcgcc

SEQ ID NO: 6109 - DNA, 25 bp, Homo sapien
ctgtggtccaacgacaacgacctta

SEQ ID NO: 6110 - DNA, 25 bp, Homo sapien
taaggtcgttgtcgttggaccacag

SEQ ID NO: 6111 - DNA, 25 bp, Homo sapien
aggtcgtgggcacgagtccgggtcc

SEQ ID NO: 6112 - DNA, 25 bp, Homo sapien
ggacccggactcgtgcccacgacct

SEQ ID NO: 6113 - DNA, 25 bp, Homo sapien
gcgccccttcctggcgatccgcggg

SEQ ID NO: 6114 - DNA, 25 bp, Homo sapien
cccgcggatcgccaggaaggggcgc

SEQ ID NO: 6115 - DNA, 25 bp, Homo sapien
gacggctgtgccccggtccccgccc

SEQ ID NO: 6116 - DNA, 25 bp, Homo sapien
gggcggggaccggggcacagccgtc

SEQ ID NO: 6117 - DNA, 25 bp, Homo sapien
tatcaataatggacgtagacgatat

SEQ ID NO: 6118 - DNA, 25 bp, Homo sapien
atatcgtctacgtccattattgata

SEQ ID NO: 6119 - DNA, 25 bp, Homo sapien
acaaggtaggtgtagcatgacgtcc

SEQ ID NO: 6120 - DNA, 25 bp, Homo sapien
ggacgtcatgctacacctaccttgt

SEQ ID NO: 6121 - DNA, 25 bp, Homo sapien
aatagagaacctcactgaataaagg

SEQ ID NO: 6122 - DNA, 25 bp, Homo sapien
cctttattcagtgaggttctctatt

SEQ ID NO: 6123 - DNA, 25 bp, Homo sapien
cgacctcaccgacgcagtcgtcccc

SEQ ID NO: 6124 - DNA, 25 bp, Homo sapien
ggggacgactgcgtcggtgaggtcg

SEQ ID NO: 6125 - DNA, 25 bp, Homo sapien
tctctcgtagttttagaactaaagg

SEQ ID NO: 6126 - DNA, 25 bp, Homo sapien
cctttagttctaaaactacgagaga

SEQ ID NO: 6127 - DNA, 25 bp, Homo sapien
atatctccatcaaaatgaatcttat

SEQ ID NO: 6128 - DNA, 25 bp, Homo sapien
ataagattcattttgatggagatat

SEQ ID NO: 6129 - DNA, 25 bp, Homo sapien
tatctccatcaaaatgaatcttatc

SEQ ID NO: 6130 - DNA, 25 bp, Homo sapien
gataagattcattttgatggagata

SEQ ID NO: 6131 - DNA, 25 bp, Homo sapien
ctctcgtcgaagcaaatagtcgtcg

SEQ ID NO: 6132 - DNA, 25 bp, Homo sapien
cgacgactatttgcttcgacgagag

SEQ ID NO: 6133 - DNA, 25 bp, Homo sapien
ccttctttctactctaattctgaac

SEQ ID NO: 6134 - DNA, 25 bp, Homo sapien
gttcagaattagagtagaaagaagg

SEQ ID NO: 6135 - DNA, 25 bp, Homo sapien
aaacaggaattggtgtcgaaatcta

SEQ ID NO: 6136 - DNA, 25 bp, Homo sapien
tagatttcgacaccaattcctgttt

SEQ ID NO: 6137 - DNA, 25 bp, Homo sapien
ttccgcacctctccgggttcggccc

SEQ ID NO: 6138 - DNA, 25 bp, Homo sapien
gggccgaacccggagaggtgcggaa

SEQ ID NO: 6139 - DNA, 25 bp, Homo sapien
ccttaccgactgacgaggagtgagt

SEQ ID NO: 6140 - DNA, 25 bp, Homo sapien
actcactcctcgtcagtcggtaagg

SEQ ID NO: 6141 - DNA, 25 bp, Homo sapien
tagagacatctgaactaagagtgtc

SEQ ID NO: 6142 - DNA, 25 bp, Homo sapien
gacactcttagttcagatgtctcta

SEQ ID NO: 6143 - DNA, 25 bp, Homo sapien
ggaaattccgaagatgattttactt

SEQ ID NO: 6144 - DNA, 25 bp, Homo sapien
aagtaaaatcatcttcggaatttcc

SEQ ID NO: 6145 - DNA, 25 bp, Homo sapien
agtggcgtgaagggacgacgtcctc

SEQ ID NO: 6146 - DNA, 25 bp, Homo sapien
gaggacgtcgtcccttcacgccact

SEQ ID NO: 6147 - DNA, 25 bp, Homo sapien
ggcctgctggcagggagccgtcgtg

SEQ ID NO: 6148 - DNA, 25 bp, Homo sapien
cacgacggctccctgccagcaggcc

SEQ ID NO: 6149 - DNA, 25 bp, Homo sapien
gacggaacgtactgtgcgtagagac

SEQ ID NO: 6150 - DNA, 25 bp, Homo sapien
gtctctacgcacagtacgttccgtc

SEQ ID NO: 6151 - DNA, 25 bp, Homo sapien
ctcgggacttctagtcgttggtatc

SEQ ID NO: 6152 - DNA, 25 bp, Homo sapien
gataccaacgactagaagtcccgag

SEQ ID NO: 6153 - DNA, 25 bp, Homo sapien
gtacacaccatggacgagagatgat

SEQ ID NO: 6154 - DNA, 25 bp, Homo sapien
atcatctctcgtccatggtgtgtac

SEQ ID NO: 6155 - DNA, 25 bp, Homo sapien
gtaccacgttctcagtctcgaaagt

SEQ ID NO: 6156 - DNA, 25 bp, Homo sapien
actttcgagactgagaacgtggtac

SEQ ID NO: 6157 - DNA, 25 bp, Homo sapien
ggcctccctccagcgctccggcccg

SEQ ID NO: 6158 - DNA, 25 bp, Homo sapien
cgggccggagcgctggagggaggcc

SEQ ID NO: 6159 - DNA, 25 bp, Homo sapien
agaattggattatcttatagcgtct

SEQ ID NO: 6160 - DNA, 25 bp, Homo sapien
agacgctataagataatccaattct

SEQ ID NO: 6161 - DNA, 25 bp, Homo sapien
agtctacagaaaattaaacacgtga

SEQ ID NO: 6162 - DNA, 25 bp, Homo sapien
tcacgtgtttaattttctgtagact

SEQ ID NO: 6163 - DNA, 25 bp, Homo sapien
aagatgcgtcgggagaccttttctc

SEQ ID NO: 6164 - DNA, 25 bp, Homo sapien
gagaaaaggtctcccgacgcatctt

SEQ ID NO: 6165 - DNA, 25 bp, Homo sapien
gacttcccaatgacacggagggccg

SEQ ID NO: 6166 - DNA, 25 bp, Homo sapien
cggccctccgtgtcattgggaagtc

SEQ ID NO: 6167 - DNA, 25 bp, Homo sapien
agtcaggcttaaggtcacagtgtgt

SEQ ID NO: 6168 - DNA, 25 bp, Homo sapien
acacactgtgaccttaagcctgact

SEQ ID NO: 6169 - DNA, 25 bp, Homo sapien
aagaagttgcgggagtcaggcttaa

SEQ ID NO: 6170 - DNA, 25 bp, Homo sapien
ttaagcctgactcccgcaacttctt

SEQ ID NO: 6171 - DNA, 25 bp, Homo sapien
tagaagggctttaaataacagaaag

SEQ ID NO: 6172 - DNA, 25 bp, Homo sapien
ctttctgttatttaaagcccttcta

SEQ ID NO: 6173 - DNA, 25 bp, Homo sapien
ggggtgccgtggtgtgccgtctggg

SEQ ID NO: 6174 - DNA, 25 bp, Homo sapien
cccagacggcacaccacggcacccc

SEQ ID NO: 6175 - DNA, 25 bp, Homo sapien
ccgtggtgtgccgtctggggtctcg

SEQ ID NO: 6176 - DNA, 25 bp, Homo sapien
cgagaccccagacggcacaccacgg

SEQ ID NO: 6177 - DNA, 25 bp, Homo sapien
aaactaaccgtcacatattttacat

SEQ ID NO: 6178 - DNA, 25 bp, Homo sapien
atgtaaaatatgtgacggttagttt

SEQ ID NO: 6179 - DNA, 25 bp, Homo sapien
cgcccgtcggtcagaggcgggacct

SEQ ID NO: 6180 - DNA, 25 bp, Homo sapien
aggtcccgcctctgaccgacgggcg

SEQ ID NO: 6181 - DNA, 25 bp, Homo sapien
cgccgccgtcttggccgacgcgctc

SEQ ID NO: 6182 - DNA, 25 bp, Homo sapien
gagcgcgtcggccaagacggcggcg

SEQ ID NO: 6183 - DNA, 25 bp, Homo sapien
accgcattagcccaaggaggctcgg

SEQ ID NO: 6184 - DNA, 25 bp, Homo sapien
ccgagcctccttgggctaatgcggt

SEQ ID NO: 6185 - DNA, 25 bp, Homo sapien
aatacactggattttctgtatacgt

SEQ ID NO: 6186 - DNA, 25 bp, Homo sapien
acgtatacagaaaatccagtgtatt

SEQ ID NO: 6187 - DNA, 25 bp, Homo sapien
attcaagttatgttaaactgacaat

SEQ ID NO: 6188 - DNA, 25 bp, Homo sapien
attgtcagtttaacataacttgaat

SEQ ID NO: 6189 - DNA, 25 bp, Homo sapien
gccacccgcgctcacgacgcacctg

SEQ ID NO: 6190 - DNA, 25 bp, Homo sapien
caggtgcgtcgtgagcgcgggtggc

SEQ ID NO: 6191 - DNA, 25 bp, Homo sapien
tcgcgacggacgaaccgattacttt

SEQ ID NO: 6192 - DNA, 25 bp, Homo sapien
aaagtaatcggttcgtccgtcgcga

SEQ ID NO: 6193 - DNA, 25 bp, Homo sapien
ctcccgccctctacggtaggggtga

SEQ ID NO: 6194 - DNA, 25 bp, Homo sapien
tcacccctaccgtagagggcgggag

SEQ ID NO: 6195 - DNA, 25 bp, Homo sapien
tgatctttgaaaatcgagataatta

SEQ ID NO: 6196 - DNA, 25 bp, Homo sapien
taattatctcgattttcaaagatca

SEQ ID NO: 6197 - DNA, 25 bp, Homo sapien
gaccctacggtgtctggtccgcccg

SEQ ID NO: 6198 - DNA, 25 bp, Homo sapien
cgggcggaccagacaccgtagggtc

SEQ ID NO: 6199 - DNA, 25 bp, Homo sapien
agaaactatagtcaagacattaaat

SEQ ID NO: 6200 - DNA, 25 bp, Homo sapien
atttaatgtcttgactatagtttct

SEQ ID NO: 6201 - DNA, 25 bp, Homo sapien
gaggttgcaccatcaaaacatacac

SEQ ID NO: 6202 - DNA, 25 bp, Homo sapien
gtgtatgttttgatggtgcaacctc

SEQ ID NO: 6203 - DNA, 25 bp, Homo sapien
gacgaaggagcccatgctgaaacat

SEQ ID NO: 6204 - DNA, 25 bp, Homo sapien
atgtttcagcatgggctccttcgtc

SEQ ID NO: 6205 - DNA, 25 bp, Homo sapien
gtcggcgggcgaaggaggaacggtc

SEQ ID NO: 6206 - DNA, 25 bp, Homo sapien
gaccgttcctccttcgcccgccgac

SEQ ID NO: 6207 - DNA, 25 bp, Homo sapien
cccatcccgacgctggcgaggggag

SEQ ID NO: 6208 - DNA, 25 bp, Homo sapien
ctcccctcgccagcgtcgggatggg

SEQ ID NO: 6209 - DNA, 25 bp, Homo sapien
cggacaaatagtgtcagttaattaa

SEQ ID NO: 6210 - DNA, 25 bp, Homo sapien
ttaattaactgacactatttgtccg

SEQ ID NO: 6211 - DNA, 25 bp, Homo sapien
tagtgtgaaacttaatataaaggtt

SEQ ID NO: 6212 - DNA, 25 bp, Homo sapien
aacctttatattaagtttcacacta

SEQ ID NO: 6213 - DNA, 25 bp, Homo sapien
acgaccgaaggtcacacaacgacgg

SEQ ID NO: 6214 - DNA, 25 bp, Homo sapien
ccgtcgttgtgtgaccttcggtcgt

SEQ ID NO: 6215 - DNA, 25 bp, Homo sapien
cctacggcggggtcctgctggacag

SEQ ID NO: 6216 - DNA, 25 bp, Homo sapien
ctgtccagcaggaccccgccgtagg

SEQ ID NO: 6217 - DNA, 25 bp, Homo sapien
ccattcgtatacaaacatcaattgc

SEQ ID NO: 6218 - DNA, 25 bp, Homo sapien
gcaattgatgtttgtatacgaatgg

SEQ ID NO: 6219 - DNA, 25 bp, Homo sapien
ctcaccggtcccacaggagtctcgg

SEQ ID NO: 6220 - DNA, 25 bp, Homo sapien
ccgagactcctgtgggaccggtgag

SEQ ID NO: 6221 - DNA, 25 bp, Homo sapien
gtagaagttgtaggtcgttagggta

SEQ ID NO: 6222 - DNA, 25 bp, Homo sapien
taccctaacgacctacaacttctac

SEQ ID NO: 6223 - DNA, 25 bp, Homo sapien
tctcgagtgccggtcacctctttgg

SEQ ID NO: 6224 - DNA, 25 bp, Homo sapien
ccaaagaggtgaccggcactcgaga

SEQ ID NO: 6225 - DNA, 25 bp, Homo sapien
catcaaagatcgagacctttacaca

SEQ ID NO: 6226 - DNA, 25 bp, Homo sapien
tgtgtaaaggtctcgatctttgatg

SEQ ID NO: 6227 - DNA, 25 bp, Homo sapien
ctccttttcgtctatcgtgacaccg

SEQ ID NO: 6228 - DNA, 25 bp, Homo sapien
cggtgtcacgatagacgaaaaggag

SEQ ID NO: 6229 - DNA, 25 bp, Homo sapien
ggacgctactggaccggagaacggt

SEQ ID NO: 6230 - DNA, 25 bp, Homo sapien
accgttctccggtccagtagcgtcc

SEQ ID NO: 6231 - DNA, 25 bp, Homo sapien
atgaagtgaatctactttttgtttt

SEQ ID NO: 6232 - DNA, 25 bp, Homo sapien
aaaacaaaaagtagattcacttcat

SEQ ID NO: 6233 - DNA, 25 bp, Homo sapien
agtgaaggttcgttatccacgctcg

SEQ ID NO: 6234 - DNA, 25 bp, Homo sapien
cgagcgtggataacgaaccttcact

SEQ ID NO: 6235 - DNA, 25 bp, Homo sapien
ggtttataaagtagtgtccggtgtc

SEQ ID NO: 6236 - DNA, 25 bp, Homo sapien
gacaccggacactactttataaacc

SEQ ID NO: 6237 - DNA, 25 bp, Homo sapien
tgaccagtcgacgttcgaccataga

SEQ ID NO: 6238 - DNA, 25 bp, Homo sapien
tctatggtcgaacgtcgactggtca

SEQ ID NO: 6239 - DNA, 25 bp, Homo sapien
gaagccacatgtcactgttctaacc

SEQ ID NO: 6240 - DNA, 25 bp, Homo sapien
ggttagaacagtgacatgtggcttc

SEQ ID NO: 6241 - DNA, 25 bp, Homo sapien
acattgtcggagatacgtaagaagt

SEQ ID NO: 6242 - DNA, 25 bp, Homo sapien
acttcttacgtatctccgacaatgt

SEQ ID NO: 6243 - DNA, 25 bp, Homo sapien
gagtacttatgaatttccctgatac

SEQ ID NO: 6244 - DNA, 25 bp, Homo sapien
gtatcagggaaattcataagtactc

SEQ ID NO: 6245 - DNA, 25 bp, Homo sapien
tctcaacgcacaaacttttacaagt

SEQ ID NO: 6246 - DNA, 25 bp, Homo sapien
acttgtaaaagtttgtgcgttgaga

SEQ ID NO: 6247 - DNA, 25 bp, Homo sapien
cgaaccctgacaattaaatgaacat

SEQ ID NO: 6248 - DNA, 25 bp, Homo sapien
atgttcatttaattgtcagggttcg

SEQ ID NO: 6249 - DNA, 25 bp, Homo sapien
tcgagtagctcaaagaccgcccacg

SEQ ID NO: 6250 - DNA, 25 bp, Homo sapien
cgtgggcggtctttgagctactcga

SEQ ID NO: 6251 - DNA, 25 bp, Homo sapien
actcggaacagttggagtggttgtc

SEQ ID NO: 6252 - DNA, 25 bp, Homo sapien
gacaaccactccaactgttccgagt

SEQ ID NO: 6253 - DNA, 25 bp, Homo sapien
aaggagttagaatagtttctgacca

SEQ ID NO: 6254 - DNA, 25 bp, Homo sapien
tggtcagaaactattctaactcctt

SEQ ID NO: 6255 - DNA, 25 bp, Homo sapien
tagggcgcgggctcggggtagaccg

SEQ ID NO: 6256 - DNA, 25 bp, Homo sapien
cggtctaccccgagcccgcgcccta

SEQ ID NO: 6257 - DNA, 25 bp, Homo sapien
gaaggtctttgttttgtctgttgtg

SEQ ID NO: 6258 - DNA, 25 bp, Homo sapien
cacaacagacaaaacaaagaccttc

SEQ ID NO: 6259 - DNA, 25 bp, Homo sapien
gggcacggctgctgccaccgtcggt

SEQ ID NO: 6260 - DNA, 25 bp, Homo sapien
accgacggtggcagcagccgtgccc

SEQ ID NO: 6261 - DNA, 25 bp, Homo sapien
cactgggtctctcccgccccggtct

SEQ ID NO: 6262 - DNA, 25 bp, Homo sapien
agaccggggcgggagagacccagtg

SEQ ID NO: 6263 - DNA, 25 bp, Homo sapien
gtccggacccgacgacggtccactg

SEQ ID NO: 6264 - DNA, 25 bp, Homo sapien
cagtggaccgtcgtcgggtccggac

SEQ ID NO: 6265 - DNA, 25 bp, Homo sapien
atatattagtacgaatgtcatataa

SEQ ID NO: 6266 - DNA, 25 bp, Homo sapien
ttatatgacattcgtactaatatat

SEQ ID NO: 6267 - DNA, 25 bp, Homo sapien
ccatatattagtacgaatgtcatat

SEQ ID NO: 6268 - DNA, 25 bp, Homo sapien
atatgacattcgtactaatatatgg

SEQ ID NO: 6269 - DNA, 25 bp, Homo sapien
tcccgacgacttcaggacccgggta

SEQ ID NO: 6270 - DNA, 25 bp, Homo sapien
tacccgggtcctgaagtcgtcggga

SEQ ID NO: 6271 - DNA, 25 bp, Homo sapien
gaccgcgtgtctgctcatgtcttgt

SEQ ID NO: 6272 - DNA, 25 bp, Homo sapien
acaagacatgagcagacacgcggtc

SEQ ID NO: 6273 - DNA, 25 bp, Homo sapien
aaagggaggcgtgtctctcgggcca

SEQ ID NO: 6274 - DNA, 25 bp, Homo sapien
tggcccgagagacacgcctcccttt

SEQ ID NO: 6275 - DNA, 25 bp, Homo sapien
tttcgtctggagtttgaacaacctg

SEQ ID NO: 6276 - DNA, 25 bp, Homo sapien
caggttgttcaaactccagacgaaa

SEQ ID NO: 6277 - DNA, 25 bp, Homo sapien
atctgtcgtctagaatctcttaaag

SEQ ID NO: 6278 - DNA, 25 bp, Homo sapien
ctttaagagattctagacgacagat

SEQ ID NO: 6279 - DNA, 25 bp, Homo sapien
ccactcgtcgtcagtataagtctat

SEQ ID NO: 6280 - DNA, 25 bp, Homo sapien
atagacttatactgacgacgagtgg

SEQ ID NO: 6281 - DNA, 25 bp, Homo sapien
gcccgagacctcctccggcccactc

SEQ ID NO: 6282 - DNA, 25 bp, Homo sapien
gagtgggccggaggaggtctcgggc

SEQ ID NO: 6283 - DNA, 25 bp, Homo sapien
ccaggagtctcccaactaattgaga

SEQ ID NO: 6284 - DNA, 25 bp, Homo sapien
tctcaattagttgggagactcctgg

SEQ ID NO: 6285 - DNA, 25 bp, Homo sapien
agtagttgttagaaacgattatatg

SEQ ID NO: 6286 - DNA, 25 bp, Homo sapien
catataatcgtttctaacaactact

SEQ ID NO: 6287 - DNA, 25 bp, Homo sapien
aaagtagttgttagaaacgattata

SEQ ID NO: 6288 - DNA, 25 bp, Homo sapien
tataatcgtttctaacaactacttt

SEQ ID NO: 6289 - DNA, 25 bp, Homo sapien
attgaagtaaggtgactacaagaaa

SEQ ID NO: 6290 - DNA, 25 bp, Homo sapien
tttcttgtagtcaccttacttcaat

SEQ ID NO: 6291 - DNA, 25 bp, Homo sapien
taattaaaacagtattggtgtgaat

SEQ ID NO: 6292 - DNA, 25 bp, Homo sapien
attcacaccaatactgttttaatta

SEQ ID NO: 6293 - DNA, 25 bp, Homo sapien
aggcccggattcctcgagtatcggt

SEQ ID NO: 6294 - DNA, 25 bp, Homo sapien
accgatactcgaggaatccgggcct

SEQ ID NO: 6295 - DNA, 25 bp, Homo sapien
agtggcgtcgtcagccccgacggcc

SEQ ID NO: 6296 - DNA, 25 bp, Homo sapien
ggccgtcggggctgacgacgccact

SEQ ID NO: 6297 - DNA, 25 bp, Homo sapien
ggagataaatacacttcatccttcg

SEQ ID NO: 6298 - DNA, 25 bp, Homo sapien
cgaaggatgaagtgtatttatctcc

SEQ ID NO: 6299 - DNA, 25 bp, Homo sapien
tccactgggtcccgtcggctggggg

SEQ ID NO: 6300 - DNA, 25 bp, Homo sapien
cccccagccgacgggacccagtgga

SEQ ID NO: 6301 - DNA, 25 bp, Homo sapien
agtggtcaatagtttactaataggt

SEQ ID NO: 6302 - DNA, 25 bp, Homo sapien
acctattagtaaactattgaccact

SEQ ID NO: 6303 - DNA, 25 bp, Homo sapien
aaagtggtcaatagtttactaatag

SEQ ID NO: 6304 - DNA, 25 bp, Homo sapien
ctattagtaaactattgaccacttt

SEQ ID NO: 6305 - DNA, 25 bp, Homo sapien
accctgtgtaatgaaagtattaaac

SEQ ID NO: 6306 - DNA, 25 bp, Homo sapien
gtttaatactttcattacacagggt

SEQ ID NO: 6307 - DNA, 25 bp, Homo sapien
acaaaggacaacgactcttaagtcg

SEQ ID NO: 6308 - DNA, 25 bp, Homo sapien
cgacttaagagtcgttgtcctttgt

SEQ ID NO: 6309 - DNA, 25 bp, Homo sapien
cgggtacccaaagtaggactggtgc

SEQ ID NO: 6310 - DNA, 25 bp, Homo sapien
gcaccagtcctactttgggtacccg

SEQ ID NO: 6311 - DNA, 25 bp, Homo sapien
aggagtgtgacaagaggttcacagt

SEQ ID NO: 6312 - DNA, 25 bp, Homo sapien
actgtgaacctcttgtcacactcct

SEQ ID NO: 6313 - DNA, 25 bp, Homo sapien
ccttcgtacaaataaccggtccaca

SEQ ID NO: 6314 - DNA, 25 bp, Homo sapien
tgtggaccggttatttgtacgaagg

SEQ ID NO: 6315 - DNA, 25 bp, Homo sapien
ccccgaactccgctgggagtccact

SEQ ID NO: 6316 - DNA, 25 bp, Homo sapien
agtggactcccagcggagttcgggg

SEQ ID NO: 6317 - DNA, 25 bp, Homo sapien
acaggtaagtccgtggctccttccg

SEQ ID NO: 6318 - DNA, 25 bp, Homo sapien
cggaaggagccacggacttacctgt

SEQ ID NO: 6319 - DNA, 25 bp, Homo sapien
aattcgatttgttgggtctagactt

SEQ ID NO: 6320 - DNA, 25 bp, Homo sapien
aagtctagacccaacaaatcgaatt

SEQ ID NO: 6321 - DNA, 25 bp, Homo sapien
cgttttcagcacaccggtcgtctca

SEQ ID NO: 6322 - DNA, 25 bp, Homo sapien
tgagacgaccggtgtgctgaaaacg

SEQ ID NO: 6323 - DNA, 25 bp, Homo sapien
aataaacaacctatatcctataaag

SEQ ID NO: 6324 - DNA, 25 bp, Homo sapien
ctttataggatataggttgtttatt

SEQ ID NO: 6325 - DNA, 25 bp, Homo sapien
gtgaccaacttctacggcccgtagg

SEQ ID NO: 6326 - DNA, 25 bp, Homo sapien
cctacgggccgtagaagttggtcac

SEQ ID NO: 6327 - DNA, 25 bp, Homo sapien
tatctactcttataagacttggaaa

SEQ ID NO: 6328 - DNA, 25 bp, Homo sapien
tttccaagtcttataagagtagata

SEQ ID NO: 6329 - DNA, 25 bp, Homo sapien
taggagactacaggagtgtgaggta

SEQ ID NO: 6330 - DNA, 25 bp, Homo sapien
tacctcacactcctgtagtctccta

SEQ ID NO: 6331 - DNA, 25 bp, Homo sapien
cggagaccgtcaccggtccgtcacc

SEQ ID NO: 6332 - DNA, 25 bp, Homo sapien
ggtgacggaccggtgacggtctccg

SEQ ID NO: 6333 - DNA, 25 bp, Homo sapien
gaattctattcgtcgagtcatacca

SEQ ID NO: 6334 - DNA, 25 bp, Homo sapien
tggtatgactcgacgaatagaattc

SEQ ID NO: 6335 - DNA, 25 bp, Homo sapien
gggcctgggccaggtgacctcctcg

SEQ ID NO: 6336 - DNA, 25 bp, Homo sapien
cgaggaggtcacctggcccaggccc

SEQ ID NO: 6337 - DNA, 25 bp, Homo sapien
ttagaacatacaacacgaccccact

SEQ ID NO: 6338 - DNA, 25 bp, Homo sapien
agtggggtcgtgttgtatgttctaa

SEQ ID NO: 6339 - DNA, 25 bp, Homo sapien
gtgccttagtccctgcagtgtcccg

SEQ ID NO: 6340 - DNA, 25 bp, Homo sapien
cgggacactgcagggactaaggcac

SEQ ID NO: 6341 - DNA, 25 bp, Homo sapien
acacttgctatatttacatttactt

SEQ ID NO: 6342 - DNA, 25 bp, Homo sapien
aagtaaatgtaaatatagcaagtgt

SEQ ID NO: 6343 - DNA, 25 bp, Homo sapien
gacacttgctatatttacatttact

SEQ ID NO: 6344 - DNA, 25 bp, Homo sapien
agtaaatgtaaatatagcaagtgtc

SEQ ID NO: 6345 - DNA, 25 bp, Homo sapien
tggtacagggagaacgtctcgggtc

SEQ ID NO: 6346 - DNA, 25 bp, Homo sapien
gacccgagacgttctccctgtacca

SEQ ID NO: 6347 - DNA, 25 bp, Homo sapien
gcccgtggacgtccgcggggacgga

SEQ ID NO: 6348 - DNA, 25 bp, Homo sapien
tccgtccccgcggacgtccacgggc

SEQ ID NO: 6349 - DNA, 25 bp, Homo sapien
gacttgcccgtggacgtccgcgggg

SEQ ID NO: 6350 - DNA, 25 bp, Homo sapien
ccccgcggacgtccacgggcaagtc

SEQ ID NO: 6351 - DNA, 25 bp, Homo sapien
gtccttccgagatgacgggtgggcg

SEQ ID NO: 6352 - DNA, 25 bp, Homo sapien
cgcccacccgtcatctcggaaggac

SEQ ID NO: 6353 - DNA, 25 bp, Homo sapien
gtcctgtcttctgaaacagtaaccg

SEQ ID NO: 6354 - DNA, 25 bp, Homo sapien
cggttactgtttcagaagacaggac

SEQ ID NO: 6355 - DNA, 25 bp, Homo sapien
aagagtttggagctataattcgaag

SEQ ID NO: 6356 - DNA, 25 bp, Homo sapien
cttcgaattatagctccaaactctt

SEQ ID NO: 6357 - DNA, 25 bp, Homo sapien
gtcgtcaccgtaggcccgacagggt

SEQ ID NO: 6358 - DNA, 25 bp, Homo sapien
accctgtcgggcctacggtgacgac

SEQ ID NO: 6359 - DNA, 25 bp, Homo sapien
aatgtacaggtccagattatttaat

SEQ ID NO: 6360 - DNA, 25 bp, Homo sapien
attaaataatctggacctgtacatt

SEQ ID NO: 6361 - DNA, 25 bp, Homo sapien
tcgaaaccgtatcttggaacaagac

SEQ ID NO: 6362 - DNA, 25 bp, Homo sapien
gtcttgttccaagatacggtttcga

SEQ ID NO: 6363 - DNA, 25 bp, Homo sapien
tgtgtccctacaagtctgtccgccg

SEQ ID NO: 6364 - DNA, 25 bp, Homo sapien
cggcggacagacttgtagggacaca

SEQ ID NO: 6365 - DNA, 25 bp, Homo sapien
ttgtctactggactaacctgtctga

SEQ ID NO: 6366 - DNA, 25 bp, Homo sapien
tcagacaggttagtccagtagacaa

SEQ ID NO: 6367 - DNA, 25 bp, Homo sapien
tgatcccaggacatgggcgtccagg

SEQ ID NO: 6368 - DNA, 25 bp, Homo sapien
cctggacgcccatgtcctgggatca

SEQ ID NO: 6369 - DNA, 25 bp, Homo sapien
attatcgacgctactttataaaaaa

SEQ ID NO: 6370 - DNA, 25 bp, Homo sapien
ttttttataaagtagcgtcgataat

SEQ ID NO: 6371 - DNA, 25 bp, Homo sapien
gattactttattttactcaaaggta

SEQ ID NO: 6372 - DNA, 25 bp, Homo sapien
tacctttgagtaaaataaagtaatc

SEQ ID NO: 6373 - DNA, 25 bp, Homo sapien
ctctccccgagaagaacctacgctg

SEQ ID NO: 6374 - DNA, 25 bp, Homo sapien
cagcgtaggttcttctcggggagag

SEQ ID NO: 6375 - DNA, 25 bp, Homo sapien
gccgccgggaggaatagaagttctt

SEQ ID NO: 6376 - DNA, 25 bp, Homo sapien
aagaacttctattcctcccggcggc

SEQ ID NO: 6377 - DNA, 25 bp, Homo sapien
tacgctgattttagtcgtgtccggc

SEQ ID NO: 6378 - DNA, 25 bp, Homo sapien
gccggacacgactaaaatcagcgta

SEQ ID NO: 6379 - DNA, 25 bp, Homo sapien
attaaagttgtaataaatttcgtca

SEQ ID NO: 6380 - DNA, 25 bp, Homo sapien
tgacgaaatttattacaactttaat

SEQ ID NO: 6381 - DNA, 25 bp, Homo sapien
tcaaggggaagctccgccacgaggt

SEQ ID NO: 6382 - DNA, 25 bp, Homo sapien
acctcgtggcggagcttccccttga

SEQ ID NO: 6383 - DNA, 25 bp, Homo sapien
cgccgtcgtgcccgtggggcctccg

SEQ ID NO: 6384 - DNA, 25 bp, Homo sapien
cggaggccccacgggcacgacggcg

SEQ ID NO: 6385 - DNA, 25 bp, Homo sapien
cgacgccgtcgtgcccgtggggcct

SEQ ID NO: 6386 - DNA, 25 bp, Homo sapien
aggccccacgggcacgacggcgtcg

SEQ ID NO: 6387 - DNA, 25 bp, Homo sapien
tcgacgccgtcgtgcccgtggggcc

SEQ ID NO: 6388 - DNA, 25 bp, Homo sapien
ggccccacgggcacgacggcgtcga

SEQ ID NO: 6389 - DNA, 25 bp, Homo sapien
tctagatatctgagttcaggtatcg

SEQ ID NO: 6390 - DNA, 25 bp, Homo sapien
cgatacctgaactcagatatctaga

SEQ ID NO: 6391 - DNA, 25 bp, Homo sapien
ccagggcatgcgtcccgcccgcgcg

SEQ ID NO: 6392 - DNA, 25 bp, Homo sapien
cgcgcgggcgggacgcatgccctgg

SEQ ID NO: 6393 - DNA, 25 bp, Homo sapien
ccgcgtcccgcccagggcatgcgtc

SEQ ID NO: 6394 - DNA, 25 bp, Homo sapien
gacgcatgccctgggcgggacgcgg

SEQ ID NO: 6395 - DNA, 25 bp, Homo sapien
tgttggcgaaaaaacaaatcgacac

SEQ ID NO: 6396 - DNA, 25 bp, Homo sapien
gtgtcgatttgttttttcgccaaca

SEQ ID NO: 6397 - DNA, 25 bp, Homo sapien
aacccacagtcgagggcatgaccgg

SEQ ID NO: 6398 - DNA, 25 bp, Homo sapien
ccggtcatgccctcgactgtgggtt

SEQ ID NO: 6399 - DNA, 25 bp, Homo sapien
aaatctcttagaaatattacaagta

SEQ ID NO: 6400 - DNA, 25 bp, Homo sapien
tacttgtaatatttctaagagattt

SEQ ID NO: 6401 - DNA, 25 bp, Homo sapien
aaaatctcttagaaatattacaagt

SEQ ID NO: 6402 - DNA, 25 bp, Homo sapien
acttgtaatatttctaagagatttt

SEQ ID NO: 6403 - DNA, 25 bp, Homo sapien
cgtcgccagtactttcatttggaac

SEQ ID NO: 6404 - DNA, 25 bp, Homo sapien
gttccaaatgaaagtactggcgacg

SEQ ID NO: 6405 - DNA, 25 bp, Homo sapien
aggtataggaataaaaacctgagtc

SEQ ID NO: 6406 - DNA, 25 bp, Homo sapien
gactcaggtttttattcctatacct

SEQ ID NO: 6407 - DNA, 25 bp, Homo sapien
agtcggcgagtttgccacttcccac

SEQ ID NO: 6408 - DNA, 25 bp, Homo sapien
gtgggaagtggcaaactcgccgact

SEQ ID NO: 6409 - DNA, 25 bp, Homo sapien
tgcacctcatcggccccaaccacct

SEQ ID NO: 6410 - DNA, 25 bp, Homo sapien
aggtggttggggccgatgaggtgca

SEQ ID NO: 6411 - DNA, 25 bp, Homo sapien
tccgagggccacaggaggaggttgg

SEQ ID NO: 6412 - DNA, 25 bp, Homo sapien
ccaacctcctcctgtggccctcgga

SEQ ID NO: 6413 - DNA, 25 bp, Homo sapien
cgtagatgactaggaagcacggagt

SEQ ID NO: 6414 - DNA, 25 bp, Homo sapien
actccgtgcttcctagtcatctacg

SEQ ID NO: 6415 - DNA, 25 bp, Homo sapien
aaattgttgtcgtacagatgctcag

SEQ ID NO: 6416 - DNA, 25 bp, Homo sapien
ctgagcatctgtacgacaacaattt

SEQ ID NO: 6417 - DNA, 25 bp, Homo sapien
gtagcaccgagataaaattgtgctc

SEQ ID NO: 6418 - DNA, 25 bp, Homo sapien
gagcacaattttatctcggtgctac

SEQ ID NO: 6419 - DNA, 25 bp, Homo sapien
actaaatattccattgactcgtaag

SEQ ID NO: 6420 - DNA, 25 bp, Homo sapien
cttacgagtcaatggaatatttagt

SEQ ID NO: 6421 - DNA, 25 bp, Homo sapien
gttccgatgtaaatcagtccgctat

SEQ ID NO: 6422 - DNA, 25 bp, Homo sapien
atagcggactgatttacatcggaac

SEQ ID NO: 6423 - DNA, 25 bp, Homo sapien
actaatgtaagtaagggcactacgt

SEQ ID NO: 6424 - DNA, 25 bp, Homo sapien
acgtagtgcccttacttacattagt

SEQ ID NO: 6425 - DNA, 25 bp, Homo sapien
agtcatgaggagtgacactatcaat

SEQ ID NO: 6426 - DNA, 25 bp, Homo sapien
attgatagtgtcactcctcatgact

SEQ ID NO: 6427 - DNA, 25 bp, Homo sapien
ccggtacccggtgcacagccccctc

SEQ ID NO: 6428 - DNA, 25 bp, Homo sapien
gagggggctgtgcaccgggtaccgg

SEQ ID NO: 6429 - DNA, 25 bp, Homo sapien
ctcaacaggacctttcgcgtcgtgt

SEQ ID NO: 6430 - DNA, 25 bp, Homo sapien
acacgacgcgaaaggtcctgttgag

SEQ ID NO: 6431 - DNA, 25 bp, Homo sapien
agtcgatctgaaaaactacgtaaag

SEQ ID NO: 6432 - DNA, 25 bp, Homo sapien
ctttacgtagtttttcagatcgact

SEQ ID NO: 6433 - DNA, 25 bp, Homo sapien
gaaatttggactgaaatactttacc

SEQ ID NO: 6434 - DNA, 25 bp, Homo sapien
ggtaaagtatttcagtccaaatttc

SEQ ID NO: 6435 - DNA, 25 bp, Homo sapien
ggtcggtgccagaggcccgagaccc

SEQ ID NO: 6436 - DNA, 25 bp, Homo sapien
gggtctcgggcctctggcaccgacc

SEQ ID NO: 6437 - DNA, 25 bp, Homo sapien
gtccagggtcgctcacgggtctagg

SEQ ID NO: 6438 - DNA, 25 bp, Homo sapien
cctagacccgtgagcgaccctggac

SEQ ID NO: 6439 - DNA, 25 bp, Homo sapien
gtactcttcattcggtcttgagcat

SEQ ID NO: 6440 - DNA, 25 bp, Homo sapien
atgctcaagaccgaatgaagagtac

SEQ ID NO: 6441 - DNA, 25 bp, Homo sapien
agaagaactgagtcatggaagacac

SEQ ID NO: 6442 - DNA, 25 bp, Homo sapien
gtgtcttccatgactcagttcttct

SEQ ID NO: 6443 - DNA, 25 bp, Homo sapien
acatttatcgggggttaatataaca

SEQ ID NO: 6444 - DNA, 25 bp, Homo sapien
tgttatattaacccccgataaatgt

SEQ ID NO: 6445 - DNA, 25 bp, Homo sapien
gtaatgctaaaaagtatatcgaaag

SEQ ID NO: 6446 - DNA, 25 bp, Homo sapien
ctttcgatatactttttagcattac

SEQ ID NO: 6447 - DNA, 25 bp, Homo sapien
agtaatcggttcagtaatgaattat

SEQ ID NO: 6448 - DNA, 25 bp, Homo sapien
ataattcattactgaaccgattact

SEQ ID NO: 6449 - DNA, 25 bp, Homo sapien
gcgcacatcccgccgtccccttccc

SEQ ID NO: 6450 - DNA, 25 bp, Homo sapien
gggaaggggacggcgggatgtgcgc

SEQ ID NO: 6451 - DNA, 25 bp, Homo sapien
gccggtgaagtttcgcggcgcacat

SEQ ID NO: 6452 - DNA, 25 bp, Homo sapien
atgtgcgccgcgaaacttcaccggc

SEQ ID NO: 6453 - DNA, 25 bp, Homo sapien
taataggtccaaatgacttatgaaa

SEQ ID NO: 6454 - DNA, 25 bp, Homo sapien
tttcataagtcatttggacctatta

SEQ ID NO: 6455 - DNA, 25 bp, Homo sapien
gtcccaattaagttaaaacgctcag

SEQ ID NO: 6456 - DNA, 25 bp, Homo sapien
ctgagcgttttaacttaattgggac

SEQ ID NO: 6457 - DNA, 25 bp, Homo sapien
cgtctcacctgagtccggtcaccga

SEQ ID NO: 6458 - DNA, 25 bp, Homo sapien
tcggtgaccggactcaggtgagacg

SEQ ID NO: 6459 - DNA, 25 bp, Homo sapien
actcactgcttaaaacataattcac

SEQ ID NO: 6460 - DNA, 25 bp, Homo sapien
gtgaattatgttttaagcagtgagt

SEQ ID NO: 6461 - DNA, 25 bp, Homo sapien
aaataaaggaactacattatgaaat

SEQ ID NO: 6462 - DNA, 25 bp, Homo sapien
atttcataatgtagttcctttattt

SEQ ID NO: 6463 - DNA, 25 bp, Homo sapien
acaacagttggctcccacgccaccg

SEQ ID NO: 6464 - DNA, 25 bp, Homo sapien
cggtggcgtgggagccaactgttgt

SEQ ID NO: 6465 - DNA, 25 bp, Homo sapien
caacagttggctcccacgccaccga

SEQ ID NO: 6466 - DNA, 25 bp, Homo sapien
tcggtggcgtgggagccaactgttg

SEQ ID NO: 6467 - DNA, 25 bp, Homo sapien
aagggccacgcaaaccttccgtctc

SEQ ID NO: 6468 - DNA, 25 bp, Homo sapien
gagacggaaggtttgcgtggccctt

SEQ ID NO: 6469 - DNA, 25 bp, Homo sapien
gagtcttttaattaagattatttgt

SEQ ID NO: 6470 - DNA, 25 bp, Homo sapien
acaaataatcttaattaaaagactc

SEQ ID NO: 6471 - DNA, 25 bp, Homo sapien
taagaccagattattatcaattgag

SEQ ID NO: 6472 - DNA, 25 bp, Homo sapien
ctcaattgataataatctggtctta

SEQ ID NO: 6473 - DNA, 25 bp, Homo sapien
caattatctaagaccagattattat

SEQ ID NO: 6474 - DNA, 25 bp, Homo sapien
ataataatctggtcttagataattg

SEQ ID NO: 6475 - DNA, 25 bp, Homo sapien
tacttatcaaagaacccacctagag

SEQ ID NO: 6476 - DNA, 25 bp, Homo sapien
ctctaggtgggttctttgataagta

SEQ ID NO: 6477 - DNA, 25 bp, Homo sapien
caccaaaacatgaatagaggaagtt

SEQ ID NO: 6478 - DNA, 25 bp, Homo sapien
aacttcctctattcatgttttggtg

SEQ ID NO: 6479 - DNA, 25 bp, Homo sapien
cgcggcgaagaaggccggacgtccg

SEQ ID NO: 6480 - DNA, 25 bp, Homo sapien
cggacgtccggccttcttcgccgcg

SEQ ID NO: 6481 - DNA, 25 bp, Homo sapien
agaaatacgatcgaagaaggtagtc

SEQ ID NO: 6482 - DNA, 25 bp, Homo sapien
gactaccttcttcgatcgtatttct

SEQ ID NO: 6483 - DNA, 25 bp, Homo sapien
aaaacattattatcgatcgtcagta

SEQ ID NO: 6484 - DNA, 25 bp, Homo sapien
tactgacgatcgataataatgtttt

SEQ ID NO: 6485 - DNA, 25 bp, Homo sapien
aataactcgttttctggtctaggga

SEQ ID NO: 6486 - DNA, 25 bp, Homo sapien
tccctagaccagaaaacgagttatt

SEQ ID NO: 6487 - DNA, 25 bp, Homo sapien
gagatcccgacgagcttcccagggt

SEQ ID NO: 6488 - DNA, 25 bp, Homo sapien
accctgggaagctcgtcgggatctc

SEQ ID NO: 6489 - DNA, 25 bp, Homo sapien
gtcggtgcgcacgccgtcctgcacg

SEQ ID NO: 6490 - DNA, 25 bp, Homo sapien
cgtgcaggacggcgtgcgcaccgac

SEQ ID NO: 6491 - DNA, 25 bp, Homo sapien
cgtcggtgcgcacgccgtcctgcac

SEQ ID NO: 6492 - DNA, 25 bp, Homo sapien
gtgcaggacggcgtgcgcaccgacg

SEQ ID NO: 6493 - DNA, 25 bp, Homo sapien
gtgtggtggtgtgcatctgtccctc

SEQ ID NO: 6494 - DNA, 25 bp, Homo sapien
gagggacagatgcacaccaccacac

SEQ ID NO: 6495 - DNA, 25 bp, Homo sapien
accctcggtgcggtccgctctcgtc

SEQ ID NO: 6496 - DNA, 25 bp, Homo sapien
gacgagagcggaccgcaccgagggt

SEQ ID NO: 6497 - DNA, 25 bp, Homo sapien
gtgactgctccggtgtcgtcgctcg

SEQ ID NO: 6498 - DNA, 25 bp, Homo sapien
cgagcgacgacaccggagcagtcac

SEQ ID NO: 6499 - DNA, 25 bp, Homo sapien
gacgacagtgattaacagaagcaaa

SEQ ID NO: 6500 - DNA, 25 bp, Homo sapien
tttgcttctgttaatcactgtcgtc

SEQ ID NO: 6501 - DNA, 25 bp, Homo sapien
tttagtttggagacatagggaaaag

SEQ ID NO: 6502 - DNA, 25 bp, Homo sapien
cttttccctatgtctccaaactaaa

SEQ ID NO: 6503 - DNA, 25 bp, Homo sapien
ccgcacctcgccctgccgtgcggcc

SEQ ID NO: 6504 - DNA, 25 bp, Homo sapien
ggccgcacggcagggcgaggtgcgg

SEQ ID NO: 6505 - DNA, 25 bp, Homo sapien
tcgccctgccgtgcggccccgcaag

SEQ ID NO: 6506 - DNA, 25 bp, Homo sapien
cttgcggggccgcacggcagggcga

SEQ ID NO: 6507 - DNA, 25 bp, Homo sapien
agaccttggcggacccgccggcacc

SEQ ID NO: 6508 - DNA, 25 bp, Homo sapien
ggtgccggcgggtccgccaaggtct

SEQ ID NO: 6509 - DNA, 25 bp, Homo sapien
gggcaccattgaccaatagaggtgt

SEQ ID NO: 6510 - DNA, 25 bp, Homo sapien
acacctctattggtcaatggtgccc

SEQ ID NO: 6511 - DNA, 25 bp, Homo sapien
acgtgcctgaaggtacggtccgacg

SEQ ID NO: 6512 - DNA, 25 bp, Homo sapien
cgtcggaccgtaccttcaggcacgt

SEQ ID NO: 6513 - DNA, 25 bp, Homo sapien
cgcgcctccgggatcctgcggcgta

SEQ ID NO: 6514 - DNA, 25 bp, Homo sapien
tacgccgcaggatcccggaggcgcg

SEQ ID NO: 6515 - DNA, 25 bp, Homo sapien
gaccgccccgacgtaccaaggacca

SEQ ID NO: 6516 - DNA, 25 bp, Homo sapien
tggtccttggtacgtcggggcggtc

SEQ ID NO: 6517 - DNA, 25 bp, Homo sapien
gaaacattttaaatgattggttacg

SEQ ID NO: 6518 - DNA, 25 bp, Homo sapien
cgtaaccaatcatttaaaatgtttc

SEQ ID NO: 6519 - DNA, 25 bp, Homo sapien
tttaattgacgtaactagtatagga

SEQ ID NO: 6520 - DNA, 25 bp, Homo sapien
tcctatactagttacgtcaattaaa

SEQ ID NO: 6521 - DNA, 25 bp, Homo sapien
aagttcgtctctaatgcttcctaag

SEQ ID NO: 6522 - DNA, 25 bp, Homo sapien
cttaggaagcattagagacgaactt

SEQ ID NO: 6523 - DNA, 25 bp, Homo sapien
tacaggctagtgtgccgtccagagt

SEQ ID NO: 6524 - DNA, 25 bp, Homo sapien
actctggacggcacactagcctgta

SEQ ID NO: 6525 - DNA, 25 bp, Homo sapien
gcgtctgggagctggcgctgccgcg

SEQ ID NO: 6526 - DNA, 25 bp, Homo sapien
cgcggcagcgccagctcccagacgc

SEQ ID NO: 6527 - DNA, 25 bp, Homo sapien
tcggaccgcgtctgggagctggcgc

SEQ ID NO: 6528 - DNA, 25 bp, Homo sapien
gcgccagctcccagacgcggtccga

SEQ ID NO: 6529 - DNA, 25 bp, Homo sapien
cctccacggaagatgacacgagcat

SEQ ID NO: 6530 - DNA, 25 bp, Homo sapien
atgctcgtgtcatcttccgtggagg

SEQ ID NO: 6531 - DNA, 25 bp, Homo sapien
tcgggtacaatccttaagaggaggt

SEQ ID NO: 6532 - DNA, 25 bp, Homo sapien
acctcctcttaaggattgtacccga

SEQ ID NO: 6533 - DNA, 25 bp, Homo sapien
gacacgcctgtctccacgtctgtgt

SEQ ID NO: 6534 - DNA, 25 bp, Homo sapien
acacagacgtggagacaggcgtgtc

SEQ ID NO: 6535 - DNA, 25 bp, Homo sapien
gacagcaggacaatcgcacatttgt

SEQ ID NO: 6536 - DNA, 25 bp, Homo sapien
acaaatgtgcgattgtcctgctgtc

SEQ ID NO: 6537 - DNA, 25 bp, Homo sapien
gaaaatactcatttaaaaatgtctt

SEQ ID NO: 6538 - DNA, 25 bp, Homo sapien
aagacatttttaaatgagtattttc

SEQ ID NO: 6539 - DNA, 25 bp, Homo sapien
ccgtgcgtccgtggttcgcggtggt

SEQ ID NO: 6540 - DNA, 25 bp, Homo sapien
accaccgcgaaccacggacgcacgg

SEQ ID NO: 6541 - DNA, 25 bp, Homo sapien
gatacaaagttgaaccctttaacta

SEQ ID NO: 6542 - DNA, 25 bp, Homo sapien
tagttaaagggttcaactttgtatc

SEQ ID NO: 6543 - DNA, 25 bp, Homo sapien
agtgtctcgggcgacgacgtcgggt

SEQ ID NO: 6544 - DNA, 25 bp, Homo sapien
acccgacgtcgtcgcccgagacact

SEQ ID NO: 6545 - DNA, 25 bp, Homo sapien
ctgttgcaagacacaagatatttct

SEQ ID NO: 6546 - DNA, 25 bp, Homo sapien
agaaatatcttgtgtcttgcaacag

SEQ ID NO: 6547 - DNA, 25 bp, Homo sapien
gtgtcctaacatgagttaattcaag

SEQ ID NO: 6548 - DNA, 25 bp, Homo sapien
cttgaattaactcatgttaggacac

SEQ ID NO: 6549 - DNA, 25 bp, Homo sapien
ctctaccccgtctgcgggcggaggg

SEQ ID NO: 6550 - DNA, 25 bp, Homo sapien
ccctccgcccgcagacggggtagag

SEQ ID NO: 6551 - DNA, 25 bp, Homo sapien
aggccggtgtgcacgaaggatccac

SEQ ID NO: 6552 - DNA, 25 bp, Homo sapien
gtggatccttcgtgcacaccggcct

SEQ ID NO: 6553 - DNA, 25 bp, Homo sapien
cacgcacaccagcaaggccggtgtg

SEQ ID NO: 6554 - DNA, 25 bp, Homo sapien
cacaccggccttgctggtgtgcgtg

SEQ ID NO: 6555 - DNA, 25 bp, Homo sapien
tctgaacgtatgtctgtcgatggag

SEQ ID NO: 6556 - DNA, 25 bp, Homo sapien
ctccatcgacagacatacgttcaga

SEQ ID NO: 6557 - DNA, 25 bp, Homo sapien
accgaccgagcgaccaggacgggac

SEQ ID NO: 6558 - DNA, 25 bp, Homo sapien
gtcccgtcctggtcgctcggtcggt

SEQ ID NO: 6559 - DNA, 25 bp, Homo sapien
gcacctacagcacccactaaaggta

SEQ ID NO: 6560 - DNA, 25 bp, Homo sapien
tacctttagtgggtgctgtaggtgc

SEQ ID NO: 6561 - DNA, 25 bp, Homo sapien
tagcacttcgtagcggtttgcgaat

SEQ ID NO: 6562 - DNA, 25 bp, Homo sapien
attcgcaaaccgctacgaagtgcta

SEQ ID NO: 6563 - DNA, 25 bp, Homo sapien
gggcgtctgagtacttgtgcttcct

SEQ ID NO: 6564 - DNA, 25 bp, Homo sapien
aggaagcacaagtactcagacgccc

SEQ ID NO: 6565 - DNA, 25 bp, Homo sapien
gtcctatttaacacagagccattat

SEQ ID NO: 6566 - DNA, 25 bp, Homo sapien
ataatggctctgtgttaaataggac

SEQ ID NO: 6567 - DNA, 25 bp, Homo sapien
gtgtcggaggagcgcggggcaccgg

SEQ ID NO: 6568 - DNA, 25 bp, Homo sapien
ccggtgccccgcgctcctccgacac

SEQ ID NO: 6569 - DNA, 25 bp, Homo sapien
ggaaggactgtgcacgcaccgatac

SEQ ID NO: 6570 - DNA, 25 bp, Homo sapien
gtatcggtgcgtgcacagtccttcc

SEQ ID NO: 6571 - DNA, 25 bp, Homo sapien
tcatcagaagccgtaaagaaacccc

SEQ ID NO: 6572 - DNA, 25 bp, Homo sapien
ggggtttctttacggcttctgatga

SEQ ID NO: 6573 - DNA, 25 bp, Homo sapien
ctcattatgttagaccagaggacac

SEQ ID NO: 6574 - DNA, 25 bp, Homo sapien
gtgtcctctggtctaacataatgag

SEQ ID NO: 6575 - DNA, 25 bp, Homo sapien
tataccctctaagtctttaggaaat

SEQ ID NO: 6576 - DNA, 25 bp, Homo sapien
atttcctaaagacttagagggtata

SEQ ID NO: 6577 - DNA, 25 bp, Homo sapien
cattgtaaggttaaattctataaag

SEQ ID NO: 6578 - DNA, 25 bp, Homo sapien
ctttatagaatttaaccttacaatg

SEQ ID NO: 6579 - DNA, 25 bp, Homo sapien
gagtgtgtatatggaggtactacag

SEQ ID NO: 6580 - DNA, 25 bp, Homo sapien
ctgtagtacctccatatacacactc

SEQ ID NO: 6581 - DNA, 25 bp, Homo sapien
acaatatctaaaacagacattgtga

SEQ ID NO: 6582 - DNA, 25 bp, Homo sapien
tcacaatgtctgttttagatattgt

SEQ ID NO: 6583 - DNA, 25 bp, Homo sapien
tcccggtagacctcgagaccaccgt

SEQ ID NO: 6584 - DNA, 25 bp, Homo sapien
acggtggtctcgaggtctaccggga

SEQ ID NO: 6585 - DNA, 25 bp, Homo sapien
cacccgtggtgctcccggaccgacc

SEQ ID NO: 6586 - DNA, 25 bp, Homo sapien
ggtcggtccgggagcaccacgggtg

SEQ ID NO: 6587 - DNA, 25 bp, Homo sapien
gaagtagatagaaaagtaccaagta

SEQ ID NO: 6588 - DNA, 25 bp, Homo sapien
tacttggtacttttctatctacttc

SEQ ID NO: 6589 - DNA, 25 bp, Homo sapien
tcctcctgagcgactcctgactagg

SEQ ID NO: 6590 - DNA, 25 bp, Homo sapien
cctagtcaggagtcgctcaggagga

SEQ ID NO: 6591 - DNA, 25 bp, Homo sapien
caagaggcaggttgtgaatgtcagt

SEQ ID NO: 6592 - DNA, 25 bp, Homo sapien
actgacattcacaacctgcctcttg

SEQ ID NO: 6593 - DNA, 25 bp, Homo sapien
cgcccctcgctctcacccggcgcct

SEQ ID NO: 6594 - DNA, 25 bp, Homo sapien
aggcgccgggtgagagcgaggggcg

SEQ ID NO: 6595 - DNA, 25 bp, Homo sapien
ccccgcccctcgctctcacccggcg

SEQ ID NO: 6596 - DNA, 25 bp, Homo sapien
cgccgggtgagagcgaggggcgggg

SEQ ID NO: 6597 - DNA, 25 bp, Homo sapien
ccctcgctctcacccggcgcctccg

SEQ ID NO: 6598 - DNA, 25 bp, Homo sapien
cggaggcgccgggtgagagcgaggg

SEQ ID NO: 6599 - DNA, 25 bp, Homo sapien
tagccctcgcccccccccgacagag

SEQ ID NO: 6600 - DNA, 25 bp, Homo sapien
ctctgtcgggggggggcgagggcta

SEQ ID NO: 6601 - DNA, 25 bp, Homo sapien
caaaaacatagtagttctaatgtat

SEQ ID NO: 6602 - DNA, 25 bp, Homo sapien
atacattagaactactatgtttttg

SEQ ID NO: 6603 - DNA, 25 bp, Homo sapien
gctccgtcgggacgaaccctagaaa

SEQ ID NO: 6604 - DNA, 25 bp, Homo sapien
tttctagggttcgtcccgacggagc

SEQ ID NO: 6605 - DNA, 25 bp, Homo sapien
tcggacgtctcaaccacgacgcggg

SEQ ID NO: 6606 - DNA, 25 bp, Homo sapien
cccgcgtcgtggttgagacgtccga

SEQ ID NO: 6607 - DNA, 25 bp, Homo sapien
atgatgtttagacaatgacttccaa

SEQ ID NO: 6608 - DNA, 25 bp, Homo sapien
ttggaagtcattgtctaaacatcat

SEQ ID NO: 6609 - DNA, 25 bp, Homo sapien
cctaaatcgtcgtctttccaaagaa

SEQ ID NO: 6610 - DNA, 25 bp, Homo sapien
ttctttggaaagacgacgatttagg

SEQ ID NO: 6611 - DNA, 25 bp, Homo sapien
ggcccccgccgccgttgaggcagtt

SEQ ID NO: 6612 - DNA, 25 bp, Homo sapien
aactgcctcaacggcggcgggggcc

SEQ ID NO: 6613 - DNA, 25 bp, Homo sapien
tccaccccgtgtccagcgaccgcgt

SEQ ID NO: 6614 - DNA, 25 bp, Homo sapien
acgcggtcgctggacacggggtgga

SEQ ID NO: 6615 - DNA, 25 bp, Homo sapien
acttgttactagataactgtgtaag

SEQ ID NO: 6616 - DNA, 25 bp, Homo sapien
cttacacagttatctagtaacaagt

SEQ ID NO: 6617 - DNA, 25 bp, Homo sapien
cggacgccggacgcacctcctccac

SEQ ID NO: 6618 - DNA, 25 bp, Homo sapien
gtggaggaggtgcgtccggcgtccg

SEQ ID NO: 6619 - DNA, 25 bp, Homo sapien
ttcgcctcccctctgcgaggtccga

SEQ ID NO: 6620 - DNA, 25 bp, Homo sapien
tcggacctcgcagaggggaggcgaa

SEQ ID NO: 6621 - DNA, 25 bp, Homo sapien
ggtctaactcaaagacgttccagac

SEQ ID NO: 6622 - DNA, 25 bp, Homo sapien
gtctggaacgtctttgagttagacc

SEQ ID NO: 6623 - DNA, 25 bp, Homo sapien
ggggaccgtcacgtgggtcgcgtcc

SEQ ID NO: 6624 - DNA, 25 bp, Homo sapien
ggacgcgacccacgtgacggtcccc

SEQ ID NO: 6625 - DNA, 25 bp, Homo sapien
gtcgtcgccgactctgagtcaaagt

SEQ ID NO: 6626 - DNA, 25 bp, Homo sapien
actttgactcagagtcggcgacgac

SEQ ID NO: 6627 - DNA, 25 bp, Homo sapien
tctcggtgtccgtctgtttgcgcgg

SEQ ID NO: 6628 - DNA, 25 bp, Homo sapien
ccgcgcaaacagacggacaccgaga

SEQ ID NO: 6629 - DNA, 25 bp, Homo sapien
cggtcacccctaatacttgtagtaa

SEQ ID NO: 6630 - DNA, 25 bp, Homo sapien
ttactacaagtattaggggtgaccg

SEQ ID NO: 6631 - DNA, 25 bp, Homo sapien
atttcgagtgtagtatagagagtga

SEQ ID NO: 6632 - DNA, 25 bp, Homo sapien
tcactctctatactacactcgaaat

SEQ ID NO: 6633 - DNA, 25 bp, Homo sapien
gggtccgggtctgcagtcgtcccga

SEQ ID NO: 6634 - DNA, 25 bp, Homo sapien
tcgggacgactgcagacccggaccc

SEQ ID NO: 6635 - DNA, 25 bp, Homo sapien
tagaagtattctacatgaaggttct

SEQ ID NO: 6636 - DNA, 25 bp, Homo sapien
agaaccttcatgtagaatacttcta

SEQ ID NO: 6637 - DNA, 25 bp, Homo sapien
acctttatcacgaggcacggtgaac

SEQ ID NO: 6638 - DNA, 25 bp, Homo sapien
gttcaccgtgcctcgtgataaaggt

SEQ ID NO: 6639 - DNA, 25 bp, Homo sapien
cgtccggtctcatgacctaacctta

SEQ ID NO: 6640 - DNA, 25 bp, Homo sapien
taaggttaggtcatgagaccggacg

SEQ ID NO: 6641 - DNA, 25 bp, Homo sapien
gacgcgcaagtctcgcgtgtcgcgg

SEQ ID NO: 6642 - DNA, 25 bp, Homo sapien
ccgcgacacgcgagacttgcgcgtc

SEQ ID NO: 6643 - DNA, 25 bp, Homo sapien
aagtttgaattctagaagtatttct

SEQ ID NO: 6644 - DNA, 25 bp, Homo sapien
agaaatacttctagaattcaaactt

SEQ ID NO: 6645 - DNA, 25 bp, Homo sapien
gtctgttctcctcctgacacggtct

SEQ ID NO: 6646 - DNA, 25 bp, Homo sapien
agaccgtgtcaggaggagaacagac

SEQ ID NO: 6647 - DNA, 25 bp, Homo sapien
accgcgccccggagccgtgctctgt

SEQ ID NO: 6648 - DNA, 25 bp, Homo sapien
acagagcacggctccggggcgcggt

SEQ ID NO: 6649 - DNA, 25 bp, Homo sapien
atatttgacacaccatacgatttta

SEQ ID NO: 6650 - DNA, 25 bp, Homo sapien
taaaatcgtatggtgtgtcaaatat

SEQ ID NO: 6651 - DNA, 25 bp, Homo sapien
attaaaaactgttgtatatgtagaa

SEQ ID NO: 6652 - DNA, 25 bp, Homo sapien
ttctacatatacaacagtttttaat

SEQ ID NO: 6653 - DNA, 25 bp, Homo sapien
aattcctagacagacgtaaatctct

SEQ ID NO: 6654 - DNA, 25 bp, Homo sapien
agagatttacgtctgtctaggaatt

SEQ ID NO: 6655 - DNA, 25 bp, Homo sapien
ttatgaacacttataccaagaggag

SEQ ID NO: 6656 - DNA, 25 bp, Homo sapien
ctcctcttggtataagtgttcataa

SEQ ID NO: 6657 - DNA, 25 bp, Homo sapien
aaaggttacacttataagacactct

SEQ ID NO: 6658 - DNA, 25 bp, Homo sapien
agagtgtcttataagtgtaaccttt

SEQ ID NO: 6659 - DNA, 25 bp, Homo sapien
agtgtcagtaataacattgattttg

SEQ ID NO: 6660 - DNA, 25 bp, Homo sapien
caaaatcaatgttattactgacact

SEQ ID NO: 6661 - DNA, 25 bp, Homo sapien
ggactcgcggaagactaactgacag

SEQ ID NO: 6662 - DNA, 25 bp, Homo sapien
ctgtcagttagtcttccgcgagtcc

SEQ ID NO: 6663 - DNA, 25 bp, Homo sapien
acagtgtactggtgttctcatagag

SEQ ID NO: 6664 - DNA, 25 bp, Homo sapien
ctctatgagaacaccagtacactgt

SEQ ID NO: 6665 - DNA, 25 bp, Homo sapien
attttgtaagagtattctagaaata

SEQ ID NO: 6666 - DNA, 25 bp, Homo sapien
tatttctagaatactcttacaaaat

SEQ ID NO: 6667 - DNA, 25 bp, Homo sapien
ccccagtgtccagccggtcggactc

SEQ ID NO: 6668 - DNA, 25 bp, Homo sapien
gagtccgaccggctggacactgggg

SEQ ID NO: 6669 - DNA, 25 bp, Homo sapien
gagaaggaaatgaccgccttcggta

SEQ ID NO: 6670 - DNA, 25 bp, Homo sapien
taccgaaggcggtcatttccttctc

SEQ ID NO: 6671 - DNA, 25 bp, Homo sapien
tctacagacgtttacgtgggaaatt

SEQ ID NO: 6672 - DNA, 25 bp, Homo sapien
aatttcccacgtaaacgtctgtaga

SEQ ID NO: 6673 - DNA, 25 bp, Homo sapien
tgacataacgttttctgagacctgg

SEQ ID NO: 6674 - DNA, 25 bp, Homo sapien
ccaggtctcagaaaacgttatgtca

SEQ ID NO: 6675 - DNA, 25 bp, Homo sapien
agcggtcggttggtgctgcgcgggc

SEQ ID NO: 6676 - DNA, 25 bp, Homo sapien
gcccgcgcagcaccaaccgaccgct

SEQ ID NO: 6677 - DNA, 25 bp, Homo sapien
agtagcggtcggttggtgctgcgcg

SEQ ID NO: 6678 - DNA, 25 bp, Homo sapien
cgcgcagcaccaaccgaccgctact

SEQ ID NO: 6679 - DNA, 25 bp, Homo sapien
attatcaatgtataaggtactttat

SEQ ID NO: 6680 - DNA, 25 bp, Homo sapien
ataaagtaccttatacattgataat

SEQ ID NO: 6681 - DNA, 25 bp, Homo sapien
taatacaatgaaggtaaaggacaaa

SEQ ID NO: 6682 - DNA, 25 bp, Homo sapien
tttgtcctttaccttcattgtatta

SEQ ID NO: 6683 - DNA, 25 bp, Homo sapien
cgtctccgaccctcgtacaggtcca

SEQ ID NO: 6684 - DNA, 25 bp, Homo sapien
tggacctgtacgagggtcggagacg

SEQ ID NO: 6685 - DNA, 25 bp, Homo sapien
taccgatgtgaaacgactcctataa

SEQ ID NO: 6686 - DNA, 25 bp, Homo sapien
ttataggagtcgtttcacatcggta

SEQ ID NO: 6687 - DNA, 25 bp, Homo sapien
cacccccgcctccccagcgtccgag

SEQ ID NO: 6688 - DNA, 25 bp, Homo sapien
ctcggacgctggggaggcgggggtg

SEQ ID NO: 6689 - DNA, 25 bp, Homo sapien
cccccgcctccccagcgtccgagtg

SEQ ID NO: 6690 - DNA, 25 bp, Homo sapien
cactcggacgctggggaggcggggg

SEQ ID NO: 6691 - DNA, 25 bp, Homo sapien
cctactgaccatcatttaagagtaa

SEQ ID NO: 6692 - DNA, 25 bp, Homo sapien
ttactcttaaatgatggtcagtagg

SEQ ID NO: 6693 - DNA, 25 bp, Homo sapien
cgaaactgttcttctacctaggagg

SEQ ID NO: 6694 - DNA, 25 bp, Homo sapien
cctcctaggtagaagaacagtttcg

SEQ ID NO: 6695 - DNA, 25 bp, Homo sapien
ccgaaggcacccattgaccgacgga

SEQ ID NO: 6696 - DNA, 25 bp, Homo sapien
tccgtcggtcaatgggtgccttcgg

SEQ ID NO: 6697 - DNA, 25 bp, Homo sapien
ttcttagcgaagttatgacctaaag

SEQ ID NO: 6698 - DNA, 25 bp, Homo sapien
ctttaggtcataacttcgctaagaa

SEQ ID NO: 6699 - DNA, 25 bp, Homo sapien
gaacacccaggaagccgtagaagaa

SEQ ID NO: 6700 - DNA, 25 bp, Homo sapien
ttcttctacggcttcctgggtgttc

SEQ ID NO: 6701 - DNA, 25 bp, Homo sapien
ggttccctggcggtgtcgcggtacg

SEQ ID NO: 6702 - DNA, 25 bp, Homo sapien
cgtaccgcgacaccgccagggaacc

SEQ ID NO: 6703 - DNA, 25 bp, Homo sapien
gtcgcccgccgttggtgtctacaag

SEQ ID NO: 6704 - DNA, 25 bp, Homo sapien
cttgtagacaccaacggcgggcgac

SEQ ID NO: 6705 - DNA, 25 bp, Homo sapien
taacaagtatacaaatccctttgag

SEQ ID NO: 6706 - DNA, 25 bp, Homo sapien
ctcaaagggatttgtatacttgtta

SEQ ID NO: 6707 - DNA, 25 bp, Homo sapien
gaggcgggcccgtaggcaaagggcg

SEQ ID NO: 6708 - DNA, 25 bp, Homo sapien
cgccctttgcctacgggcccgcctc

SEQ ID NO: 6709 - DNA, 25 bp, Homo sapien
tcccgggtacccaatcaacgaagtc

SEQ ID NO: 6710 - DNA, 25 bp, Homo sapien
gacttcgttgattgggtacccggga

SEQ ID NO: 6711 - DNA, 25 bp, Homo sapien
aagatgatgtcattctggtaactgt

SEQ ID NO: 6712 - DNA, 25 bp, Homo sapien
acagttaccagaatgacatcatctt

SEQ ID NO: 6713 - DNA, 25 bp, Homo sapien
ggtctcaccagaaccaatgaacccg

SEQ ID NO: 6714 - DNA, 25 bp, Homo sapien
cgggttcattggttctggtgagacc

SEQ ID NO: 6715 - DNA, 25 bp, Homo sapien
tagtcctaaggctagtcgtgcgtcc

SEQ ID NO: 6716 - DNA, 25 bp, Homo sapien
ggacgcacgactagccttaggacta

SEQ ID NO: 6717 - DNA, 25 bp, Homo sapien
gactgttattttacaagaacggctt

SEQ ID NO: 6718 - DNA, 25 bp, Homo sapien
aagccgttcttgtaaaataacagtc

SEQ ID NO: 6719 - DNA, 25 bp, Homo sapien
gagactacaatctgccttcaccgtg

SEQ ID NO: 6720 - DNA, 25 bp, Homo sapien
cacggtgaaggcagattgtagtctc

SEQ ID NO: 6721 - DNA, 25 bp, Homo sapien
gtccttcagagaaaggtccccacag

SEQ ID NO: 6722 - DNA, 25 bp, Homo sapien
ctgtggggacctttctctgaaggac

SEQ ID NO: 6723 - DNA, 25 bp, Homo sapien
ctaaactcataagtaggacttcact

SEQ ID NO: 6724 - DNA, 25 bp, Homo sapien
agtgaagtcctacttatgagtttag

SEQ ID NO: 6725 - DNA, 25 bp, Homo sapien
ggactaaccacgtgagactagaggt

SEQ ID NO: 6726 - DNA, 25 bp, Homo sapien
acctctagtctcacgtggttagtcc

SEQ ID NO: 6727 - DNA, 25 bp, Homo sapien
cccgtcgggagcagtcggagactcg

SEQ ID NO: 6728 - DNA, 25 bp, Homo sapien
cgagtctccgactgctcccgacggg

SEQ ID NO: 6729 - DNA, 25 bp, Homo sapien
tacccgtcgggagcagtcggagact

SEQ ID NO: 6730 - DNA, 25 bp, Homo sapien
agtctccgactgctcccgacgggta

SEQ ID NO: 6731 - DNA, 25 bp, Homo sapien
agtcgacacaagaaccccacgacat

SEQ ID NO: 6732 - DNA, 25 bp, Homo sapien
atgtcgtggggttcttgtgtcgact

SEQ ID NO: 6733 - DNA, 25 bp, Homo sapien
aacgtgattgtataagactccgagg

SEQ ID NO: 6734 - DNA, 25 bp, Homo sapien
cctcggagtcttatacaatcacgtt

SEQ ID NO: 6735 - DNA, 25 bp, Homo sapien
tcgataggcaagtaaagacaggtcc

SEQ ID NO: 6736 - DNA, 25 bp, Homo sapien
ggacctgtctttacttgcctatcga

SEQ ID NO: 6737 - DNA, 25 bp, Homo sapien
cccacccggctccatgtccggggtg

SEQ ID NO: 6738 - DNA, 25 bp, Homo sapien
caccccggacatggagccgggtggg

SEQ ID NO: 6739 - DNA, 25 bp, Homo sapien
caacatttatgctatgtttacttaa

SEQ ID NO: 6740 - DNA, 25 bp, Homo sapien
ttaagtaaacatagcataaatgttg

SEQ ID NO: 6741 - DNA, 25 bp, Homo sapien
ataatatacactaataagaggagga

SEQ ID NO: 6742 - DNA, 25 bp, Homo sapien
tcctcctcttattagtgtatattat

SEQ ID NO: 6743 - DNA, 25 bp, Homo sapien
tgtcaaagattagaaaactacaata

SEQ ID NO: 6744 - DNA, 25 bp, Homo sapien
tattgtagttttctaatctttgaca

SEQ ID NO: 6745 - DNA, 25 bp, Homo sapien
tcgacgtgggcgactgggggtctcg

SEQ ID NO: 6746 - DNA, 25 bp, Homo sapien
cgagacccccagtcgcccacgtcga

SEQ ID NO: 6747 - DNA, 25 bp, Homo sapien
taataaacatatcattttagactct

SEQ ID NO: 6748 - DNA, 25 bp, Homo sapien
agagtctaaaatgatatgtttatta

SEQ ID NO: 6749 - DNA, 25 bp, Homo sapien
gtcatacataataaacatatcattt

SEQ ID NO: 6750 - DNA, 25 bp, Homo sapien
aaatgatatgtttattatgtatgac

SEQ ID NO: 6751 - DNA, 25 bp, Homo sapien
ggtcatacataataaacatatcatt

SEQ ID NO: 6752 - DNA, 25 bp, Homo sapien
aatgatatgtttattatgtatgacc

SEQ ID NO: 6753 - DNA, 25 bp, Homo sapien
aataaacatatcattttagactctt

SEQ ID NO: 6754 - DNA, 25 bp, Homo sapien
aagagtctaaaatgatatgtttatt

SEQ ID NO: 6755 - DNA, 25 bp, Homo sapien
ctaagtatcattaagtctcgttggg

SEQ ID NO: 6756 - DNA, 25 bp, Homo sapien
cccaacgagacttaatgatacttag

SEQ ID NO: 6757 - DNA, 25 bp, Homo sapien
gggagctcacgggaccccacgacgt

SEQ ID NO: 6758 - DNA, 25 bp, Homo sapien
acgtcgtggggtcccgtgagctccc

SEQ ID NO: 6759 - DNA, 25 bp, Homo sapien
gacagtccggcgttcggatctcgcg

SEQ ID NO: 6760 - DNA, 25 bp, Homo sapien
cgcgagatccgaacgccggactgtc

SEQ ID NO: 6761 - DNA, 25 bp, Homo sapien
gaacccgaggaaggaggacggagtg

SEQ ID NO: 6762 - DNA, 25 bp, Homo sapien
cactccgtcctccttcctcgggttc

SEQ ID NO: 6763 - DNA, 25 bp, Homo sapien
gacaccccctgccctcggccggact

SEQ ID NO: 6764 - DNA, 25 bp, Homo sapien
agtccggccgagggcagggggtgtc

SEQ ID NO: 6765 - DNA, 25 bp, Homo sapien
acaccccctgccctcggccggactc

SEQ ID NO: 6766 - DNA, 25 bp, Homo sapien
gagtccggccgagggcagggggtgt

SEQ ID NO: 6767 - DNA, 25 bp, Homo sapien
caacttactaagtgttttgtaataa

SEQ ID NO: 6768 - DNA, 25 bp, Homo sapien
ttattacaaaacacttagtaagttg

SEQ ID NO: 6769 - DNA, 25 bp, Homo sapien
ccgactttccgagtcactatacaat

SEQ ID NO: 6770 - DNA, 25 bp, Homo sapien
attgtatagtgactcggaaagtcgg

SEQ ID NO: 6771 - DNA, 25 bp, Homo sapien
gaatgtcttccacaacaattagaat

SEQ ID NO: 6772 - DNA, 25 bp, Homo sapien
attctaattgttgtggaagacattc

SEQ ID NO: 6773 - DNA, 25 bp, Homo sapien
ggcgccccgggccagggacacgacc

SEQ ID NO: 6774 - DNA, 25 bp, Homo sapien
ggtcgtgtccctggcccggggcgcc

SEQ ID NO: 6775 - DNA, 25 bp, Homo sapien
gataatgagtgctattgtcgagaag

SEQ ID NO: 6776 - DNA, 25 bp, Homo sapien
cttctcgacaatagcactcattatc

SEQ ID NO: 6777 - DNA, 25 bp, Homo sapien
aaggacggtcttggtgaagtaggac

SEQ ID NO: 6778 - DNA, 25 bp, Homo sapien
gtcctacttcaccaagaccgtcctt

SEQ ID NO: 6779 - DNA, 25 bp, Homo sapien
tagaagattcaaaacctcaacgaag

SEQ ID NO: 6780 - DNA, 25 bp, Homo sapien
cttcgttgaggttttgaatcttcta

SEQ ID NO: 6781 - DNA, 25 bp, Homo sapien
cagggacgacatcggccggccggcg

SEQ ID NO: 6782 - DNA, 25 bp, Homo sapien
cgccggccggccgatgtcgtccctg

SEQ ID NO: 6783 - DNA, 25 bp, Homo sapien
ggtctgtggcggcaggagggccctg

SEQ ID NO: 6784 - DNA, 25 bp, Homo sapien
cagggccctcctgccgccacagacc

SEQ ID NO: 6785 - DNA, 25 bp, Homo sapien
gtctaaaacacttactgacacgaag

SEQ ID NO: 6786 - DNA, 25 bp, Homo sapien
cttcgtgtcagtaagtgttttagac

SEQ ID NO: 6787 - DNA, 25 bp, Homo sapien
tgtgtctgacatagactatatgaat

SEQ ID NO: 6788 - DNA, 25 bp, Homo sapien
attcatatagtctatgtcagacaca

SEQ ID NO: 6789 - DNA, 25 bp, Homo sapien
cgtcaaccaggtcggtgtctcaacc

SEQ ID NO: 6790 - DNA, 25 bp, Homo sapien
ggttgagacaccgacctggttgacg

SEQ ID NO: 6791 - DNA, 25 bp, Homo sapien
gggaccgactcgtcactttgaccaa

SEQ ID NO: 6792 - DNA, 25 bp, Homo sapien
ttggtcaaagtgacgagtcggtccc

SEQ ID NO: 6793 - DNA, 25 bp, Homo sapien
gggctcgcgcggctcccagcgcgcg

SEQ ID NO: 6794 - DNA, 25 bp, Homo sapien
cgcgcgctgggagccgcgcgagccc

SEQ ID NO: 6795 - DNA, 25 bp, Homo sapien
gacccggaggggctcgcgcggctcc

SEQ ID NO: 6796 - DNA, 25 bp, Homo sapien
ggagccgcgcgagcccctccgggtc

SEQ ID NO: 6797 - DNA, 25 bp, Homo sapien
gggcgggtcgccctgggcgagggtc

SEQ ID NO: 6798 - DNA, 25 bp, Homo sapien
gaccctcgcccagggcgacccgccc

SEQ ID NO: 6799 - DNA, 25 bp, Homo sapien
taggtttttaatacaggtaatatgg

SEQ ID NO: 6800 - DNA, 25 bp, Homo sapien
ccatattacctgtattaaaaaccta

SEQ ID NO: 6801 - DNA, 25 bp, Homo sapien
atttactttattatttagacgaatg

SEQ ID NO: 6802 - DNA, 25 bp, Homo sapien
cattcgtctaaataataaagtaaat

SEQ ID NO: 6803 - DNA, 25 bp, Homo sapien
cgtgtcaggtcgcaccccgtgagtg

SEQ ID NO: 6804 - DNA, 25 bp, Homo sapien
cactcacggggtgcgacctgacacg

SEQ ID NO: 6805 - DNA, 25 bp, Homo sapien
tcgtgatgtgaataatttaccaggt

SEQ ID NO: 6806 - DNA, 25 bp, Homo sapien
acctggtaaattattcacatcacga

SEQ ID NO: 6807 - DNA, 25 bp, Homo sapien
taacggagtacccatttgtgacaat

SEQ ID NO: 6808 - DNA, 25 bp, Homo sapien
attgtcacaaatgggtactccgtta

SEQ ID NO: 6809 - DNA, 25 bp, Homo sapien
ggtagaatctcttgtcttacgtaag

SEQ ID NO: 6810 - DNA, 25 bp, Homo sapien
cttacgtaagacaagagattctacc

SEQ ID NO: 6811 - DNA, 25 bp, Homo sapien
aaaaggtagaatctcttgtcttacg

SEQ ID NO: 6812 - DNA, 25 bp, Homo sapien
cgtaagacaagagattctacctttt

SEQ ID NO: 6813 - DNA, 25 bp, Homo sapien
ggccgtaatcagagcgggcgacccc

SEQ ID NO: 6814 - DNA, 25 bp, Homo sapien
ggggtcgcccgctctgattacggcc

SEQ ID NO: 6815 - DNA, 25 bp, Homo sapien
cgatcccgtcactgtagacgatgac

SEQ ID NO: 6816 - DNA, 25 bp, Homo sapien
gtcatcgtctacagtgacgggatcg

SEQ ID NO: 6817 - DNA, 25 bp, Homo sapien
ctcactaaaccctgggaaccgatcg

SEQ ID NO: 6818 - DNA, 25 bp, Homo sapien
cgatcggttcccagggtttagtgag

SEQ ID NO: 6819 - DNA, 25 bp, Homo sapien
atgaaaagttgtgttgaagaagttt

SEQ ID NO: 6820 - DNA, 25 bp, Homo sapien
aaacttcttcaacacaacttttcat

SEQ ID NO: 6821 - DNA, 25 bp, Homo sapien
cttctattgaaacacaataagagac

SEQ ID NO: 6822 - DNA, 25 bp, Homo sapien
gtctcttattgtgtttcaatagaag

SEQ ID NO: 6823 - DNA, 25 bp, Homo sapien
cgaagacccagcccggacgtcaagg

SEQ ID NO: 6824 - DNA, 25 bp, Homo sapien
ccttgacgtccgggctgggtcttcg

SEQ ID NO: 6825 - DNA, 25 bp, Homo sapien
agaaactaagaatttagactcaaat

SEQ ID NO: 6826 - DNA, 25 bp, Homo sapien
atttgagtctaaattcttagtttct

SEQ ID NO: 6827 - DNA, 25 bp, Homo sapien
gcgtggcaacgaaccgtagactcgt

SEQ ID NO: 6828 - DNA, 25 bp, Homo sapien
acgagtctacggttcgttgccacgc

SEQ ID NO: 6829 - DNA, 25 bp, Homo sapien
ttcatcaactaattttcataaagat

SEQ ID NO: 6830 - DNA, 25 bp, Homo sapien
atctttatgaaaattagttgatgaa

SEQ ID NO: 6831 - DNA, 25 bp, Homo sapien
gggaggcggacgcagcgcctcaggg

SEQ ID NO: 6832 - DNA, 25 bp, Homo sapien
ccctgaggcgctgcgtccgcctccc

SEQ ID NO: 6833 - DNA, 25 bp, Homo sapien
tcttttttataaggtagatacaact

SEQ ID NO: 6834 - DNA, 25 bp, Homo sapien
agttgtatctaccttataaaaaaga

SEQ ID NO: 6835 - DNA, 25 bp, Homo sapien
tgctgtcggggcattaagaccgtcg

SEQ ID NO: 6836 - DNA, 25 bp, Homo sapien
cgacggtcttaatgccccgacagca

SEQ ID NO: 6837 - DNA, 25 bp, Homo sapien
gaccagacaaaaagcatgagtagac

SEQ ID NO: 6838 - DNA, 25 bp, Homo sapien
gtctactcatgctttttgtctggtc

SEQ ID NO: 6839 - DNA, 25 bp, Homo sapien
gcgtccatggccgtatgtcggtgaa

SEQ ID NO: 6840 - DNA, 25 bp, Homo sapien
ttcaccgacatacggccatggacgc

SEQ ID NO: 6841 - DNA, 25 bp, Homo sapien
cagatcttaatcctgtatgaacgta

SEQ ID NO: 6842 - DNA, 25 bp, Homo sapien
tacgttcatacaggattaagatctg

SEQ ID NO: 6843 - DNA, 25 bp, Homo sapien
agtcacgccggcacgtcgacgtggg

SEQ ID NO: 6844 - DNA, 25 bp, Homo sapien
cccacgtcgacgtgccggcgtgact

SEQ ID NO: 6845 - DNA, 25 bp, Homo sapien
gggccccacacgacagaggagcggc

SEQ ID NO: 6846 - DNA, 25 bp, Homo sapien
gccgctcctctgtcgtgtggggccc

SEQ ID NO: 6847 - DNA, 25 bp, Homo sapien
taacgcacaagagttcgggacgact

SEQ ID NO: 6848 - DNA, 25 bp, Homo sapien
agtcgtcccgaactcttgtgcgtta

SEQ ID NO: 6849 - DNA, 25 bp, Homo sapien
gaactatctgagaaaaagttataat

SEQ ID NO: 6850 - DNA, 25 bp, Homo sapien
attataactttttctcagatagttc

SEQ ID NO: 6851 - DNA, 25 bp, Homo sapien
aagcggagcgaacgccgcccctggg

SEQ ID NO: 6852 - DNA, 25 bp, Homo sapien
cccaggggcggcgttcgctccgctt

SEQ ID NO: 6853 - DNA, 25 bp, Homo sapien
agactgtgctccagggagggtgagg

SEQ ID NO: 6854 - DNA, 25 bp, Homo sapien
cctcaccctccctggagcacagtct

SEQ ID NO: 6855 - DNA, 25 bp, Homo sapien
aacacatgtactttatctcaatcat

SEQ ID NO: 6856 - DNA, 25 bp, Homo sapien
atgattgagataaagtacatgtgtt

SEQ ID NO: 6857 - DNA, 25 bp, Homo sapien
agacttccgcgaacactcggaaaac

SEQ ID NO: 6858 - DNA, 25 bp, Homo sapien
gttttccgagtgttcgcggaagtct

SEQ ID NO: 6859 - DNA, 25 bp, Homo sapien
gacgggtcggcgtcgagtcgtctgg

SEQ ID NO: 6860 - DNA, 25 bp, Homo sapien
ccagacgactcgacgccgacccgtc

SEQ ID NO: 6861 - DNA, 25 bp, Homo sapien
aatgtaattaagtatagctacactg

SEQ ID NO: 6862 - DNA, 25 bp, Homo sapien
cagtgtagctatacttaattacatt

SEQ ID NO: 6863 - DNA, 25 bp, Homo sapien
aatttcgaagtttcttattgaacta

SEQ ID NO: 6864 - DNA, 25 bp, Homo sapien
tagttcaataagaaacttcgaaatt

SEQ ID NO: 6865 - DNA, 25 bp, Homo sapien
ccgccgcctgagacgaaggtgcaga

SEQ ID NO: 6866 - DNA, 25 bp, Homo sapien
tctgcaccttcgtctcaggcggcgg

SEQ ID NO: 6867 - DNA, 25 bp, Homo sapien
gacgagcaacgacctttctcctctt

SEQ ID NO: 6868 - DNA, 25 bp, Homo sapien
aagaggagaaaggtcgttgctcgtc

SEQ ID NO: 6869 - DNA, 25 bp, Homo sapien
tcactcataaagtagtggtcacgct

SEQ ID NO: 6870 - DNA, 25 bp, Homo sapien
agcgtgaccactactttatgagtga

SEQ ID NO: 6871 - DNA, 25 bp, Homo sapien
tccacgacgggctgcggggtacccc

SEQ ID NO: 6872 - DNA, 25 bp, Homo sapien
ggggtaccccgcagcccgtcgtgga

SEQ ID NO: 6873 - DNA, 25 bp, Homo sapien
gtccacgacgggctgcggggtaccc

SEQ ID NO: 6874 - DNA, 25 bp, Homo sapien
gggtaccccgcagcccgtcgtggac

SEQ ID NO: 6875 - DNA, 25 bp, Homo sapien
ctcggtgcgccctcgctgtgggtct

SEQ ID NO: 6876 - DNA, 25 bp, Homo sapien
agacccacagcgagggcgcaccgag

SEQ ID NO: 6877 - DNA, 25 bp, Homo sapien
tcgcccggccctattctccccgcgg

SEQ ID NO: 6878 - DNA, 25 bp, Homo sapien
ccgcggggagaatagggccgggcga

SEQ ID NO: 6879 - DNA, 25 bp, Homo sapien
agaaacatattagttcatatctatt

SEQ ID NO: 6880 - DNA, 25 bp, Homo sapien
aatagatatgaactaatatgtttct

SEQ ID NO: 6881 - DNA, 25 bp, Homo sapien
tttagaaacatattagttcatatct

SEQ ID NO: 6882 - DNA, 25 bp, Homo sapien
agatatgaactaatatgtttctaaa

SEQ ID NO: 6883 - DNA, 25 bp, Homo sapien
aaagtagacacttccaagagtctac

SEQ ID NO: 6884 - DNA, 25 bp, Homo sapien
gtagactcttggaagtgtctacttt

SEQ ID NO: 6885 - DNA, 25 bp, Homo sapien
ctcgggtcgaggacgtgcccggcgg

SEQ ID NO: 6886 - DNA, 25 bp, Homo sapien
ccgccgggcacgtcctcgacccgag

SEQ ID NO: 6887 - DNA, 25 bp, Homo sapien
ttgattaaaatagtaccagtctctc

SEQ ID NO: 6888 - DNA, 25 bp, Homo sapien
gagagactggtactattttaatcaa

SEQ ID NO: 6889 - DNA, 25 bp, Homo sapien
cgcgaccaccgtccatctcaccggg

SEQ ID NO: 6890 - DNA, 25 bp, Homo sapien
cccggtgagatggacggtggtcgcg

SEQ ID NO: 6891 - DNA, 25 bp, Homo sapien
cgactgtgacgaaagggagacccgg

SEQ ID NO: 6892 - DNA, 25 bp, Homo sapien
ccgggtctccctttcgtcacagtcg

SEQ ID NO: 6893 - DNA, 25 bp, Homo sapien
ttttttcgataacaccaaagtatat

SEQ ID NO: 6894 - DNA, 25 bp, Homo sapien
atatactttggtgttatcgaaaaaa

SEQ ID NO: 6895 - DNA, 25 bp, Homo sapien
tgctatcccgacgtaaggttaatat

SEQ ID NO: 6896 - DNA, 25 bp, Homo sapien
atattaaccttacgtcgggatagca

SEQ ID NO: 6897 - DNA, 25 bp, Homo sapien
tctcaaactacagatcgtatcttgt

SEQ ID NO: 6898 - DNA, 25 bp, Homo sapien
acaagatacgatctgtagtttgaga

SEQ ID NO: 6899 - DNA, 25 bp, Homo sapien
gaagaaattcctagtcccatattca

SEQ ID NO: 6900 - DNA, 25 bp, Homo sapien
tgaatatgggactaggaatttcttc

SEQ ID NO: 6901 - DNA, 25 bp, Homo sapien
cctgaaaagaagattgggtgactgt

SEQ ID NO: 6902 - DNA, 25 bp, Homo sapien
acagtcacccaatcttcttttcagg

SEQ ID NO: 6903 - DNA, 25 bp, Homo sapien
gacctcaccccaggcgtcccccacc

SEQ ID NO: 6904 - DNA, 25 bp, Homo sapien
ggtgggggacgcctggggtgaggtc

SEQ ID NO: 6905 - DNA, 25 bp, Homo sapien
cgacatcctataaggtgacttggtt

SEQ ID NO: 6906 - DNA, 25 bp, Homo sapien
aaccaagtcaccttataggatgtcg

SEQ ID NO: 6907 - DNA, 25 bp, Homo sapien
ttagtgattcttataacatcaagta

SEQ ID NO: 6908 - DNA, 25 bp, Homo sapien
tacttgatgttataagaatcactaa

SEQ ID NO: 6909 - DNA, 25 bp, Homo sapien
tcgtaacttctcttctaactttctc

SEQ ID NO: 6910 - DNA, 25 bp, Homo sapien
gagaaagttagaagagaagttacga

SEQ ID NO: 6911 - DNA, 25 bp, Homo sapien
gtcacggtgacgaaaacctacttag

SEQ ID NO: 6912 - DNA, 25 bp, Homo sapien
ctaagtaggttttcgtcaccgtgac

SEQ ID NO: 6913 - DNA, 25 bp, Homo sapien
ctagtccacgacggttctatatgta

SEQ ID NO: 6914 - DNA, 25 bp, Homo sapien
tacatatagaaccgtcgtggactag

SEQ ID NO: 6915 - DNA, 25 bp, Homo sapien
gttcttaaccaacctagataatttc

SEQ ID NO: 6916 - DNA, 25 bp, Homo sapien
gaaattatctaggttggttaagaac

SEQ ID NO: 6917 - DNA, 25 bp, Homo sapien
cgggtcatgacgagggccccaacga

SEQ ID NO: 6918 - DNA, 25 bp, Homo sapien
tcgttggggccctcgtcatgacccg

SEQ ID NO: 6919 - DNA, 25 bp, Homo sapien
agagttatattcaagatattatgta

SEQ ID NO: 6920 - DNA, 25 bp, Homo sapien
tacataatatcttgaatataactct

SEQ ID NO: 6921 - DNA, 25 bp, Homo sapien
aagggcctccgcggccgcactccag

SEQ ID NO: 6922 - DNA, 25 bp, Homo sapien
ctggagtgcggccgcggaggccctt

SEQ ID NO: 6923 - DNA, 25 bp, Homo sapien
ccgcccctgtcctgcgggtgtaccc

SEQ ID NO: 6924 - DNA, 25 bp, Homo sapien
gggtacacccgcaggacaggggcgg

SEQ ID NO: 6925 - DNA, 25 bp, Homo sapien
gcccctcacgcttgtccgggcccgc

SEQ ID NO: 6926 - DNA, 25 bp, Homo sapien
gcgggcccggacaagcgtgaggggc

SEQ ID NO: 6927 - DNA, 25 bp, Homo sapien
gatattttcttctatattttatacg

SEQ ID NO: 6928 - DNA, 25 bp, Homo sapien
cgtataaaatatagaagaaaatatc

SEQ ID NO: 6929 - DNA, 25 bp, Homo sapien
tttcttctatattttatacgaaact

SEQ ID NO: 6930 - DNA, 25 bp, Homo sapien
agtttcgtataaaatatagaagaaa

SEQ ID NO: 6931 - DNA, 25 bp, Homo sapien
ttttcttctatattttatacgaaac

SEQ ID NO: 6932 - DNA, 25 bp, Homo sapien
gtttcgtataaaatatagaagaaaa

SEQ ID NO: 6933 - DNA, 25 bp, Homo sapien
tgtccaattgacacgtctcaaactt

SEQ ID NO: 6934 - DNA, 25 bp, Homo sapien
aagtttgagacgtgtcaattggaca

SEQ ID NO: 6935 - DNA, 25 bp, Homo sapien
caggttcacccgtaccttggagtat

SEQ ID NO: 6936 - DNA, 25 bp, Homo sapien
atactccaaggtacgggtgaacctg

SEQ ID NO: 6937 - DNA, 25 bp, Homo sapien
aggtaacaccgatacaggccctggg

SEQ ID NO: 6938 - DNA, 25 bp, Homo sapien
cccagggcctgtatcggtgttacct

SEQ ID NO: 6939 - DNA, 25 bp, Homo sapien
aactcttactggttctgctgtgtcg

SEQ ID NO: 6940 - DNA, 25 bp, Homo sapien
cgacacagcagaaccagtaagagtt

SEQ ID NO: 6941 - DNA, 25 bp, Homo sapien
gtatcgaacattgtgagacttcaag

SEQ ID NO: 6942 - DNA, 25 bp, Homo sapien
cttgaagtctcacaatgttcgatac

SEQ ID NO: 6943 - DNA, 25 bp, Homo sapien
ggtcgaggtcgaccctggtctgtga

SEQ ID NO: 6944 - DNA, 25 bp, Homo sapien
tcacagaccagggtcgacctcgacc

SEQ ID NO: 6945 - DNA, 25 bp, Homo sapien
gacgggacgagagcaaaaacataac

SEQ ID NO: 6946 - DNA, 25 bp, Homo sapien
gttatgtttttgctctcgtcccgtc

SEQ ID NO: 6947 - DNA, 25 bp, Homo sapien
ataacactaataccaaaaatcgtct

SEQ ID NO: 6948 - DNA, 25 bp, Homo sapien
agacgatttttggtattagtgttat

SEQ ID NO: 6949 - DNA, 25 bp, Homo sapien
ttctttcggatcgtctcaccagtga

SEQ ID NO: 6950 - DNA, 25 bp, Homo sapien
tcactggtgagacgatccgaaagaa

SEQ ID NO: 6951 - DNA, 25 bp, Homo sapien
aaaagtcttgtcagcgggagtgtac

SEQ ID NO: 6952 - DNA, 25 bp, Homo sapien
gtacactcccgctgacaagactttt

SEQ ID NO: 6953 - DNA, 25 bp, Homo sapien
gtgtgcgcggggagccgctctgcgc

SEQ ID NO: 6954 - DNA, 25 bp, Homo sapien
gcgcagagcggctccccgcgcacac

SEQ ID NO: 6955 - DNA, 25 bp, Homo sapien
acaacaaaaacaacactggttacat

SEQ ID NO: 6956 - DNA, 25 bp, Homo sapien
atgtaaccagtgttgtttttgttgt

SEQ ID NO: 6957 - DNA, 25 bp, Homo sapien
gatgtcttctatattagaatattaa

SEQ ID NO: 6958 - DNA, 25 bp, Homo sapien
ttaatattctaatatagaagacatc

SEQ ID NO: 6959 - DNA, 25 bp, Homo sapien
cgaactggctcagttcgggagtacc

SEQ ID NO: 6960 - DNA, 25 bp, Homo sapien
ggtactcccgaactgagccagttcg

SEQ ID NO: 6961 - DNA, 25 bp, Homo sapien
atagtattggtcattaaacaaataa

SEQ ID NO: 6962 - DNA, 25 bp, Homo sapien
ttatttgtttaatgaccaatactat

SEQ ID NO: 6963 - DNA, 25 bp, Homo sapien
tatagtattggtcattaaacaaata

SEQ ID NO: 6964 - DNA, 25 bp, Homo sapien
tatttgtttaatgaccaatactata

SEQ ID NO: 6965 - DNA, 25 bp, Homo sapien
ccgggagccaggaaggtccggtgtc

SEQ ID NO: 6966 - DNA, 25 bp, Homo sapien
gacaccggaccttcctggctcccgg

SEQ ID NO: 6967 - DNA, 25 bp, Homo sapien
cggacgtcttcccggcgtcgacgcg

SEQ ID NO: 6968 - DNA, 25 bp, Homo sapien
cgcgtcgacgccgggaagacgtccg

SEQ ID NO: 6969 - DNA, 25 bp, Homo sapien
gagtctctccggctacgactggcgc

SEQ ID NO: 6970 - DNA, 25 bp, Homo sapien
gcgccagtcgtagccggagagactc

SEQ ID NO: 6971 - DNA, 25 bp, Homo sapien
gacattatagttttcaatttttctt

SEQ ID NO: 6972 - DNA, 25 bp, Homo sapien
aagaaaaattgaaaactataatgtc

SEQ ID NO: 6973 - DNA, 25 bp, Homo sapien
atagagagctatttcaacaacaacg

SEQ ID NO: 6974 - DNA, 25 bp, Homo sapien
cgttgttgttgaaatagctctctat

SEQ ID NO: 6975 - DNA, 25 bp, Homo sapien
gaagtcggacctcgccgggccggcg

SEQ ID NO: 6976 - DNA, 25 bp, Homo sapien
cgccggcccggcgaggtccgacttc

SEQ ID NO: 6977 - DNA, 25 bp, Homo sapien
tacctttcagcgaggaccgacttgt

SEQ ID NO: 6978 - DNA, 25 bp, Homo sapien
acaagtcggtcctcgctgaaaggta

SEQ ID NO: 6979 - DNA, 25 bp, Homo sapien
atgtgaccccaccacgaatcggccg

SEQ ID NO: 6980 - DNA, 25 bp, Homo sapien
cggccgattcgtggtggggtcacat

SEQ ID NO: 6981 - DNA, 25 bp, Homo sapien
aggaatccgagcagcaggtagaccc

SEQ ID NO: 6982 - DNA, 25 bp, Homo sapien
aactgcccgtcacaactgctgggag

SEQ ID NO: 6983 - DNA, 25 bp, Homo sapien
acagtaaccaggatgacgaggagca

SEQ ID NO: 6984 - DNA, 25 bp, Homo sapien
acccagcggtaacgggcggtcacca

SEQ ID NO: 6985 - DNA, 25 bp, Homo sapien
taccacagcaggatgccggccaggt

SEQ ID NO: 6986 - DNA, 25 bp, Homo sapien
gtttatttgcacagaaggggaagca

SEQ ID NO: 6987 - DNA, 25 bp, Homo sapien
aacagcctggtttatttgcacagaa

SEQ ID NO: 6988 - DNA, 25 bp, Homo sapien
cggcgccgctgcaggacagtaacca

SEQ ID NO: 6989 - DNA, 25 bp, Homo sapien
ggcggtctgcgcagcaactgcccgt

SEQ ID NO: 6990 - DNA, 25 bp, Homo sapien
gtcacaactgctgggaggccaagat

SEQ ID NO: 6991 - DNA, 25 bp, Homo sapien
gggttctcgtagcagtaggcctctt

SEQ ID NO: 6992 - DNA, 25 bp, Homo sapien
cctcgaccaacgtctgaaaatagta

SEQ ID NO: 6993 - DNA, 25 bp, Homo sapien
tactattttcagacgttggtcgagg

SEQ ID NO: 6994 - DNA, 25 bp, Homo sapien
tgctgcacacggatggcatttctgc

SEQ ID NO: 6995 - DNA, 25 bp, Homo sapien
aatggaaaatccagtttgggacgtg

SEQ ID NO: 6996 - DNA, 25 bp, Homo sapien
ctttcgtcggtactctgctgcacac

SEQ ID NO: 6997 - DNA, 25 bp, Homo sapien
ttcatagatacgtgcaaccatcagc

SEQ ID NO: 6998 - DNA, 25 bp, Homo sapien
tcagcatgaccagcttcaggacatt

SEQ ID NO: 6999 - DNA, 25 bp, Homo sapien
gacgtggtgtaaactggaattgctt

SEQ ID NO: 7000 - DNA, 25 bp, Homo sapien
gctcagagacattaagcaaggggca

SEQ ID NO: 7001 - DNA, 25 bp, Homo sapien
gccctgggcaacaaccaatcgactt

SEQ ID NO: 7002 - DNA, 25 bp, Homo sapien
ctcatcatctcaaaaggaaactctg

SEQ ID NO: 7003 - DNA, 25 bp, Homo sapien
tattgggaggaattatagtcgaatg

SEQ ID NO: 7004 - DNA, 25 bp, Homo sapien
ccttagacaacgttttgagccctta

SEQ ID NO: 7005 - DNA, 25 bp, Homo sapien
caaaagtatccgtttggacaagagt

SEQ ID NO: 7006 - DNA, 25 bp, Homo sapien
actcttgtccaaacggatacttttg

SEQ ID NO: 7007 - DNA, 25 bp, Homo sapien
agctcggtgctgatgtctctctcct

SEQ ID NO: 7008 - DNA, 25 bp, Homo sapien
agagaacgtccaccgcgctgactgc

SEQ ID NO: 7009 - DNA, 25 bp, Homo sapien
ggagcggcaagaattacgcaattat

SEQ ID NO: 7010 - DNA, 25 bp, Homo sapien
gaggctcacagaaccagggaacgat

SEQ ID NO: 7011 - DNA, 25 bp, Homo sapien
attacgcaattatgcaggggccgct

SEQ ID NO: 7012 - DNA, 25 bp, Homo sapien
gaggggtcccagagaccttgtcact

SEQ ID NO: 7013 - DNA, 25 bp, Homo sapien
cctcgatccacttgagggtggaagt

SEQ ID NO: 7014 - DNA, 25 bp, Homo sapien
cgcttcgcaaaaccaggaaaaggca

SEQ ID NO: 7015 - DNA, 25 bp, Homo sapien
gaaagaatgggcctgaattgctccc

SEQ ID NO: 7016 - DNA, 25 bp, Homo sapien
ggtgatgaatcacacagctgctgcc

SEQ ID NO: 7017 - DNA, 25 bp, Homo sapien
tgctctgggtcagagaacgtccacc

SEQ ID NO: 7018 - DNA, 25 bp, Homo sapien
agctgagatgtctctcttgagtccc

SEQ ID NO: 7019 - DNA, 25 bp, Homo sapien
tcctcgtaacttgatgttgtagctc

SEQ ID NO: 7020 - DNA, 25 bp, Homo sapien
acttgatgttgtagctccctgaggc

SEQ ID NO: 7021 - DNA, 25 bp, Homo sapien
aaacctgtagcctgagccaccactt

SEQ ID NO: 7022 - DNA, 25 bp, Homo sapien
tgtgcccagtccctagccgtctatt

SEQ ID NO: 7023 - DNA, 25 bp, Homo sapien
ttgagtcccagacctctatatccaa

SEQ ID NO: 7024 - DNA, 25 bp, Homo sapien
atatctctccatccctgacatcagt

SEQ ID NO: 7025 - DNA, 25 bp, Homo sapien
tcatctaaacctgtagcctgagcca

SEQ ID NO: 7026 - DNA, 25 bp, Homo sapien
tgcttcactgtcactctactgagta

SEQ ID NO: 7027 - DNA, 25 bp, Homo sapien
gccaccacttacttgctaatgacta

SEQ ID NO: 7028 - DNA, 25 bp, Homo sapien
tttcgttactgttgattactcctcc

SEQ ID NO: 7029 - DNA, 25 bp, Homo sapien
attgagccacaaacatggaaggtca

SEQ ID NO: 7030 - DNA, 25 bp, Homo sapien
gcacaagtggacagattgctcttcc

SEQ ID NO: 7031 - DNA, 25 bp, Homo sapien
cttccataggtacagggactctttc

SEQ ID NO: 7032 - DNA, 25 bp, Homo sapien
agaaagagggaatggtcaaatatat

SEQ ID NO: 7033 - DNA, 25 bp, Homo sapien
gaaacccaggagagtatgaagtcat

SEQ ID NO: 7034 - DNA, 25 bp, Homo sapien
gagtagactctgtggaatgatgaac

SEQ ID NO: 7035 - DNA, 25 bp, Homo sapien
gaaatttttcaaggggctctgctct

SEQ ID NO: 7036 - DNA, 25 bp, Homo sapien
catgaaagttcaatcggaagggact

SEQ ID NO: 7037 - DNA, 25 bp, Homo sapien
tgagatgacaatgtaagacagtgac

SEQ ID NO: 7038 - DNA, 25 bp, Homo sapien
atggagaaaggagctaaatcactga

SEQ ID NO: 7039 - DNA, 25 bp, Homo sapien
agagaagagacactagagcatgtta

SEQ ID NO: 7040 - DNA, 25 bp, Homo sapien
ccagcagtgcctgcagaaagtgaag

SEQ ID NO: 7041 - DNA, 25 bp, Homo sapien
gagagaggaagtaacttttccaatc

SEQ ID NO: 7042 - DNA, 25 bp, Homo sapien
caagagggagaactaagatatcttt

SEQ ID NO: 7043 - DNA, 25 bp, Homo sapien
tattatttaagaacgaggaaactga

SEQ ID NO: 7044 - DNA, 25 bp, Homo sapien
ttaggcccaaatgtacttgccattg

SEQ ID NO: 7045 - DNA, 25 bp, Homo sapien
aatggcatcagtgtgaggtcacgcc

SEQ ID NO: 7046 - DNA, 25 bp, Homo sapien
ggtacacctgagcacacaccagcag

SEQ ID NO: 7047 - DNA, 25 bp, Homo sapien
agggagacccgtgtcacttagacta

SEQ ID NO: 7048 - DNA, 25 bp, Homo sapien
attgtgacacattgcaggattgagc

SEQ ID NO: 7049 - DNA, 25 bp, Homo sapien
attctggcttattccatgggtggag

SEQ ID NO: 7050 - DNA, 25 bp, Homo sapien
gaggtcacgccacatcatccagaat

SEQ ID NO: 7051 - DNA, 25 bp, Homo sapien
agatttccgaagataaaatgtaaac

SEQ ID NO: 7052 - DNA, 25 bp, Homo sapien
gtttacattttatcttcggaaatct

SEQ ID NO: 7053 - DNA, 25 bp, Homo sapien
cgcagatctttaaggccacgggcct

SEQ ID NO: 7054 - DNA, 25 bp, Homo sapien
aggcccgtggccttaaagatctgcg

SEQ ID NO: 7055 - DNA, 25 bp, Homo sapien
tgcctctgaatgacctaaggatgcc

SEQ ID NO: 7056 - DNA, 25 bp, Homo sapien
taaggatgccactgggttgccctcc

SEQ ID NO: 7057 - DNA, 25 bp, Homo sapien
taagcgtcaactggtgtttctgcct

SEQ ID NO: 7058 - DNA, 25 bp, Homo sapien
cttcaggctgaaggcccttaatgct

SEQ ID NO: 7059 - DNA, 25 bp, Homo sapien
ttcccgttgggaatgatgtggttga

SEQ ID NO: 7060 - DNA, 25 bp, Homo sapien
aagtgaacacacagcaaaaagtcca

SEQ ID NO: 7061 - DNA, 25 bp, Homo sapien
ttctcacccatgagagctgcttgcc

SEQ ID NO: 7062 - DNA, 25 bp, Homo sapien
aaaggtggtggttcgaatctgttcc

SEQ ID NO: 7063 - DNA, 25 bp, Homo sapien
tggttcctcttttggggagcagttc

SEQ ID NO: 7064 - DNA, 25 bp, Homo sapien
cttgcccattggagtaagcgtcaac

SEQ ID NO: 7065 - DNA, 25 bp, Homo sapien
aaagccacaaaaccagtctatgaac

SEQ ID NO: 7066 - DNA, 25 bp, Homo sapien
cctgtgcagcgaggcctatcgctat

SEQ ID NO: 7067 - DNA, 25 bp, Homo sapien
cagaaagtggatgtgcagttgatcc

SEQ ID NO: 7068 - DNA, 25 bp, Homo sapien
cggccctccacatgggctttggtcg

SEQ ID NO: 7069 - DNA, 25 bp, Homo sapien
agagaagtaggctcctgagatgcaa

SEQ ID NO: 7070 - DNA, 25 bp, Homo sapien
ttctgcccttgaccacggacaggcc

SEQ ID NO: 7071 - DNA, 25 bp, Homo sapien
catcagcaacgctctgcagaaagtg

SEQ ID NO: 7072 - DNA, 25 bp, Homo sapien
agggaataatgttagggagaataga

SEQ ID NO: 7073 - DNA, 25 bp, Homo sapien
gctcctgagatgcaaagggaataat

SEQ ID NO: 7074 - DNA, 25 bp, Homo sapien
tgcagttgatcccacaggacctgtg

SEQ ID NO: 7075 - DNA, 25 bp, Homo sapien
tccaggctcctgagatctcacttct

SEQ ID NO: 7076 - DNA, 25 bp, Homo sapien
cacagagaaagagctagaataaagt

SEQ ID NO: 7077 - DNA, 25 bp, Homo sapien
aaaatacgcacaagtaaattactgc

SEQ ID NO: 7078 - DNA, 25 bp, Homo sapien
tttgagaacatattgagccagatgc

SEQ ID NO: 7079 - DNA, 25 bp, Homo sapien
tgttcaaatagagatcaagatttac

SEQ ID NO: 7080 - DNA, 25 bp, Homo sapien
ttggcgtgactggaagacttttcat

SEQ ID NO: 7081 - DNA, 25 bp, Homo sapien
aaagaagtacttgtggcaaaggtag

SEQ ID NO: 7082 - DNA, 25 bp, Homo sapien
gtgttgaaagaagctaaaattgatc

SEQ ID NO: 7083 - DNA, 25 bp, Homo sapien
aattgaattaggctttggcgtgact

SEQ ID NO: 7084 - DNA, 25 bp, Homo sapien
gtaagcataggcaagaactgagggt

SEQ ID NO: 7085 - DNA, 25 bp, Homo sapien
ttaacacagtctagaagaagcaatt

SEQ ID NO: 7086 - DNA, 25 bp, Homo sapien
gcaaaggtagagtaagaatccaaat

SEQ ID NO: 7087 - DNA, 25 bp, Homo sapien
gagccagatgctttgagttgagtag

SEQ ID NO: 7088 - DNA, 25 bp, Homo sapien
cctcggtgccagacataaggaaaac

SEQ ID NO: 7089 - DNA, 25 bp, Homo sapien
ctcataaagttttggttagaatcac

SEQ ID NO: 7090 - DNA, 25 bp, Homo sapien
cgtgttacacaaagacaagatatgt

SEQ ID NO: 7091 - DNA, 25 bp, Homo sapien
ggtcccagatccatcgaaggccatt

SEQ ID NO: 7092 - DNA, 25 bp, Homo sapien
atcttactagtatgaagccttcttt

SEQ ID NO: 7093 - DNA, 25 bp, Homo sapien
tttgtcaactaagaacgtgttacac

SEQ ID NO: 7094 - DNA, 25 bp, Homo sapien
agcctgatgtgtaagttctggtccc

SEQ ID NO: 7095 - DNA, 25 bp, Homo sapien
acataaggaaaaccagcataggccc

SEQ ID NO: 7096 - DNA, 25 bp, Homo sapien
ttaaagtctctgaaaatccactctc

SEQ ID NO: 7097 - DNA, 25 bp, Homo sapien
attaagaattgttatgcctacctca

SEQ ID NO: 7098 - DNA, 25 bp, Homo sapien
tgctgattgtgtacacctcggtgcc

SEQ ID NO: 7099 - DNA, 25 bp, Homo sapien
cactgtcccacgctagtctcaccgg

SEQ ID NO: 7100 - DNA, 25 bp, Homo sapien
ccggtgagactagcgtgggacagtg

SEQ ID NO: 7101 - DNA, 25 bp, Homo sapien
tattcatggagactatactttgttc

SEQ ID NO: 7102 - DNA, 25 bp, Homo sapien
ataacattaagaaaacccagagacc

SEQ ID NO: 7103 - DNA, 25 bp, Homo sapien
gagaaaagaacccagagtttgtgtg

SEQ ID NO: 7104 - DNA, 25 bp, Homo sapien
aacccagagaccctaagaattagta

SEQ ID NO: 7105 - DNA, 25 bp, Homo sapien
cttgaggccaaggaaatcatggttt

SEQ ID NO: 7106 - DNA, 25 bp, Homo sapien
ttgacagggttggtcctgcaacttt

SEQ ID NO: 7107 - DNA, 25 bp, Homo sapien
gttacagaattgatacatggcgggt

SEQ ID NO: 7108 - DNA, 25 bp, Homo sapien
agaaaatcaaggcttagaaagttta

SEQ ID NO: 7109 - DNA, 25 bp, Homo sapien
tagcattagcttagttgacagggtt

SEQ ID NO: 7110 - DNA, 25 bp, Homo sapien
ttgatgaggatgtgagatgtcatta

SEQ ID NO: 7111 - DNA, 25 bp, Homo sapien
ttgcctaaggttacagaattgatac

SEQ ID NO: 7112 - DNA, 25 bp, Homo sapien
taggacacactatgagcttaacact

SEQ ID NO: 7113 - DNA, 25 bp, Homo sapien
ctgtgcagcatcactgtgcaaagta

SEQ ID NO: 7114 - DNA, 25 bp, Homo sapien
cttctgaaagatggggtaataccaa

SEQ ID NO: 7115 - DNA, 25 bp, Homo sapien
ttgccgaggtcttaggtgaacttca

SEQ ID NO: 7116 - DNA, 25 bp, Homo sapien
gggtaataccaacagctatcgtttc

SEQ ID NO: 7117 - DNA, 25 bp, Homo sapien
ctggccctggtgacattatgattgc

SEQ ID NO: 7118 - DNA, 25 bp, Homo sapien
ggggcggctccttcagtgctttgtt

SEQ ID NO: 7119 - DNA, 25 bp, Homo sapien
attggctgggagattgttgcttcct

SEQ ID NO: 7120 - DNA, 25 bp, Homo sapien
aagcagagaagctgtcagcagccta

SEQ ID NO: 7121 - DNA, 25 bp, Homo sapien
aatcagatgaaatcagggatgtggc

SEQ ID NO: 7122 - DNA, 25 bp, Homo sapien
ttcctgatacagtggtgattacttc

SEQ ID NO: 7123 - DNA, 25 bp, Homo sapien
agcgtcttgcactaccagcaggctc

SEQ ID NO: 7124 - DNA, 25 bp, Homo sapien
tttaccaaagagacaagcacttgaa

SEQ ID NO: 7125 - DNA, 25 bp, Homo sapien
agttgcagcaacacgccgcgttcat

SEQ ID NO: 7126 - DNA, 25 bp, Homo sapien
tggacagaccacaactctaagaagc

SEQ ID NO: 7127 - DNA, 25 bp, Homo sapien
tatagctgatgcagaaagtccagcc

SEQ ID NO: 7128 - DNA, 25 bp, Homo sapien
gcaatggtaccagcgcggtctttaa

SEQ ID NO: 7129 - DNA, 25 bp, Homo sapien
tctcaccagcgcacagttgcagcaa

SEQ ID NO: 7130 - DNA, 25 bp, Homo sapien
aaacggaatggaatgccaagaatct

SEQ ID NO: 7131 - DNA, 25 bp, Homo sapien
aactacctgagaccagctgtgatgt

SEQ ID NO: 7132 - DNA, 25 bp, Homo sapien
acaactctaagaagctagtgctgct

SEQ ID NO: 7133 - DNA, 25 bp, Homo sapien
atagaattgccacaaactgcatgct

SEQ ID NO: 7134 - DNA, 25 bp, Homo sapien
cagagaatataaacacccatgtaaa

SEQ ID NO: 7135 - DNA, 25 bp, Homo sapien
attcagaagtctgcttttcaggttt

SEQ ID NO: 7136 - DNA, 25 bp, Homo sapien
tcagaaacagttgaaacatcctcgt

SEQ ID NO: 7137 - DNA, 25 bp, Homo sapien
gaaacatcctcgtgtataccgttcc

SEQ ID NO: 7138 - DNA, 25 bp, Homo sapien
aaatatcctgaagctgatgtgcatc

SEQ ID NO: 7139 - DNA, 25 bp, Homo sapien
tccataaatgatacatagtagtgct

SEQ ID NO: 7140 - DNA, 25 bp, Homo sapien
aaacagatacgaaaattttgcttgt

SEQ ID NO: 7141 - DNA, 25 bp, Homo sapien
tcacccacagattaaacagatacga

SEQ ID NO: 7142 - DNA, 25 bp, Homo sapien
tcattataactgtggcatataccac

SEQ ID NO: 7143 - DNA, 25 bp, Homo sapien
atcagtgctgaaattaatatcctaa

SEQ ID NO: 7144 - DNA, 25 bp, Homo sapien
acagagtttgtttggcatgtatact

SEQ ID NO: 7145 - DNA, 25 bp, Homo sapien
ttggacaggtagataaacagagcaa

SEQ ID NO: 7146 - DNA, 25 bp, Homo sapien
gtggatagggaaagaattgttacaa

SEQ ID NO: 7147 - DNA, 25 bp, Homo sapien
aacatgatcagaggagtcacaatcc

SEQ ID NO: 7148 - DNA, 25 bp, Homo sapien
cttttgggtaaagatgaagtcgaag

SEQ ID NO: 7149 - DNA, 25 bp, Homo sapien
agaatgagaaagtagctgatagctt

SEQ ID NO: 7150 - DNA, 25 bp, Homo sapien
cagcccagggttatcttgaatcagt

SEQ ID NO: 7151 - DNA, 25 bp, Homo sapien
aatcagtagaattgagtggctggca

SEQ ID NO: 7152 - DNA, 25 bp, Homo sapien
tgaaggaaataaacacggacagcca

SEQ ID NO: 7153 - DNA, 25 bp, Homo sapien
gaagccagggtatcaatccagtaat

SEQ ID NO: 7154 - DNA, 25 bp, Homo sapien
aaagccagaccgaccacattgatct

SEQ ID NO: 7155 - DNA, 25 bp, Homo sapien
acagtgcagatgttgatgcagaaca

SEQ ID NO: 7156 - DNA, 25 bp, Homo sapien
cacctacagtgacctggacaggctc

SEQ ID NO: 7157 - DNA, 25 bp, Homo sapien
atcctggccagcattcagcgtgttt

SEQ ID NO: 7158 - DNA, 25 bp, Homo sapien
cactgggcaaactggcggctctctc

SEQ ID NO: 7159 - DNA, 25 bp, Homo sapien
gaaagagaatccagacgagaaccaa

SEQ ID NO: 7160 - DNA, 25 bp, Homo sapien
acccaaatgcccaggacgctgatga

SEQ ID NO: 7161 - DNA, 25 bp, Homo sapien
gtgatagaagcagaacgcaaataac

SEQ ID NO: 7162 - DNA, 25 bp, Homo sapien
gccgcttgtcaagaacagaaaccca

SEQ ID NO: 7163 - DNA, 25 bp, Homo sapien
acgctgatgagcatgccgcttgtca

SEQ ID NO: 7164 - DNA, 25 bp, Homo sapien
tgggcaaccacgaagaaacacaatc

SEQ ID NO: 7165 - DNA, 25 bp, Homo sapien
atgtatacaaggttcctacggggct

SEQ ID NO: 7166 - DNA, 25 bp, Homo sapien
gctctgagtcgccagtgtctgtctc

SEQ ID NO: 7167 - DNA, 25 bp, Homo sapien
ccgaaacgattaggaatagaaagaa

SEQ ID NO: 7168 - DNA, 25 bp, Homo sapien
tgccacaagaagatgacaaaccaaa

SEQ ID NO: 7169 - DNA, 25 bp, Homo sapien
atatgaaagatgtactgtattcctc

SEQ ID NO: 7170 - DNA, 25 bp, Homo sapien
tttatacagagaacagattagcatc

SEQ ID NO: 7171 - DNA, 25 bp, Homo sapien
agccttgctaaccatgacaactggg

SEQ ID NO: 7172 - DNA, 25 bp, Homo sapien
ctaggactccaaaccgaaacgatta

SEQ ID NO: 7173 - DNA, 25 bp, Homo sapien
gacaactgggtcattccgcagcctc

SEQ ID NO: 7174 - DNA, 25 bp, Homo sapien
aagctccatagggtagttacagtca

SEQ ID NO: 7175 - DNA, 25 bp, Homo sapien
attaggatgaatgagtcgaatgcaa

SEQ ID NO: 7176 - DNA, 25 bp, Homo sapien
gaaaagatatcagggacagagtaaa

SEQ ID NO: 7177 - DNA, 25 bp, Homo sapien
ggtgctgagatcttgcgatccttct

SEQ ID NO: 7178 - DNA, 25 bp, Homo sapien
cgtaaggggtggatttttctatgta

SEQ ID NO: 7179 - DNA, 25 bp, Homo sapien
aaaaggagggcaatttctagatcaa

SEQ ID NO: 7180 - DNA, 25 bp, Homo sapien
acttagggctaggatgatgattaat

SEQ ID NO: 7181 - DNA, 25 bp, Homo sapien
ggatgatgattaataagagggatga

SEQ ID NO: 7182 - DNA, 25 bp, Homo sapien
ttctatgtagccgttgagttgtggt

SEQ ID NO: 7183 - DNA, 25 bp, Homo sapien
tgattaataagagggatgacataac

SEQ ID NO: 7184 - DNA, 25 bp, Homo sapien
gtaaaaggagggcaatttctagatc

SEQ ID NO: 7185 - DNA, 25 bp, Homo sapien
taggccagacttagggctaggatga

SEQ ID NO: 7186 - DNA, 25 bp, Homo sapien
gagttgtggtagtcaaaatgtaata

SEQ ID NO: 7187 - DNA, 25 bp, Homo sapien
agaagaattttatggagaaagggac

SEQ ID NO: 7188 - DNA, 25 bp, Homo sapien
tatagggtcgaagccgcactcgtaa

SEQ ID NO: 7189 - DNA, 25 bp, Homo sapien
gtcatgagaccggttgtcaatcctt

SEQ ID NO: 7190 - DNA, 25 bp, Homo sapien
tgtgcaccacaaagctgtttctcgc

SEQ ID NO: 7191 - DNA, 25 bp, Homo sapien
tgtttctcgcatggcggcctgtctt

SEQ ID NO: 7192 - DNA, 25 bp, Homo sapien
cttggccgaatgtgccctgtgcacc

SEQ ID NO: 7193 - DNA, 25 bp, Homo sapien
tttggtgagcctgtttctgcctctc

SEQ ID NO: 7194 - DNA, 25 bp, Homo sapien
ttctgcctctctgcctgggtcatga

SEQ ID NO: 7195 - DNA, 25 bp, Homo sapien
tgtcaatccttttcgccgacgcggt

SEQ ID NO: 7196 - DNA, 25 bp, Homo sapien
tctctgcctgggtcatgagaccggt

SEQ ID NO: 7197 - DNA, 25 bp, Homo sapien
cgtgtgtgtccttggccgaatgtgc

SEQ ID NO: 7198 - DNA, 25 bp, Homo sapien
ggcctggcccacgtgaggagattct

SEQ ID NO: 7199 - DNA, 25 bp, Homo sapien
ttccgctttgggtgtgtgaaggcct

SEQ ID NO: 7200 - DNA, 25 bp, Homo sapien
cttcgagtttaagtgggtgtcgcat

SEQ ID NO: 7201 - DNA, 25 bp, Homo sapien
gtcactcggggagacccagcaggtc

SEQ ID NO: 7202 - DNA, 25 bp, Homo sapien
tttaagtgggtgtcgcatctctgca

SEQ ID NO: 7203 - DNA, 25 bp, Homo sapien
tcccaaaagccacgtgcccatgggt

SEQ ID NO: 7204 - DNA, 25 bp, Homo sapien
agactcttcagagatctgtggcagc

SEQ ID NO: 7205 - DNA, 25 bp, Homo sapien
caggtccagactcttcagagatctg

SEQ ID NO: 7206 - DNA, 25 bp, Homo sapien
ccagacagtcactcggggagaccca

SEQ ID NO: 7207 - DNA, 25 bp, Homo sapien
gcaacttcgagtttaagtgggtgtc

SEQ ID NO: 7208 - DNA, 25 bp, Homo sapien
ttgcatctttgcaacttcgagttta

SEQ ID NO: 7209 - DNA, 25 bp, Homo sapien
gtgggtgtcgcatctctgcatgtcc

SEQ ID NO: 7210 - DNA, 25 bp, Homo sapien
tgcatgtcctctgtccaatatccga

SEQ ID NO: 7211 - DNA, 25 bp, Homo sapien
tcccaaaagccacgtgcccatgggt

SEQ ID NO: 7212 - DNA, 25 bp, Homo sapien
ttgcatctttgcaacttcgagttta

SEQ ID NO: 7213 - DNA, 25 bp, Homo sapien
tttaagtgggtgtcgcatctctgca

SEQ ID NO: 7214 - DNA, 25 bp, Homo sapien
caggtccagactcttcagagatctg

SEQ ID NO: 7215 - DNA, 25 bp, Homo sapien
agactcttcagagatctgtggcagc

SEQ ID NO: 7216 - DNA, 25 bp, Homo sapien
ccagacagtcactcggggagaccca

SEQ ID NO: 7217 - DNA, 25 bp, Homo sapien
aacttcgagtttaagtgggtgtcgc

SEQ ID NO: 7218 - DNA, 25 bp, Homo sapien
tcagcagcaacagcggcgtgggcaa

SEQ ID NO: 7219 - DNA, 25 bp, Homo sapien
gtgggtgtcgcatctctgcatgtcc

SEQ ID NO: 7220 - DNA, 25 bp, Homo sapien
tgcatgtcctctgtccaatatccga

SEQ ID NO: 7221 - DNA, 25 bp, Homo sapien
aatatccgagcagaccttggagtca

SEQ ID NO: 7222 - DNA, 25 bp, Homo sapien
ggtgaaggaacctggtagttctcaa

SEQ ID NO: 7223 - DNA, 25 bp, Homo sapien
gagtggggatgagcttcctcagctt

SEQ ID NO: 7224 - DNA, 25 bp, Homo sapien
gtagttctcaagcagagttctgtcc

SEQ ID NO: 7225 - DNA, 25 bp, Homo sapien
gcttcctcagcttggcaaaggcgct

SEQ ID NO: 7226 - DNA, 25 bp, Homo sapien
cactcccgtttgttgcaggctttgc

SEQ ID NO: 7227 - DNA, 25 bp, Homo sapien
ctaaggaatgtggtggcttggacca

SEQ ID NO: 7228 - DNA, 25 bp, Homo sapien
gctcagctttttgtctggagggtga

SEQ ID NO: 7229 - DNA, 25 bp, Homo sapien
aaaggcgctgttgacattctgctgc

SEQ ID NO: 7230 - DNA, 25 bp, Homo sapien
gatatacctcattgccaggcgaagc

SEQ ID NO: 7231 - DNA, 25 bp, Homo sapien
attgccaggcgaagcgtttcatttt

SEQ ID NO: 7232 - DNA, 25 bp, Homo sapien
cctgagcagccactcccgtttgttg

SEQ ID NO: 7233 - DNA, 25 bp, Homo sapien
cttctcacgcatctctggggtgggc

SEQ ID NO: 7234 - DNA, 25 bp, Homo sapien
ggcctcctggcttcggtggaccagc

SEQ ID NO: 7235 - DNA, 25 bp, Homo sapien
aagtggtggccgcacaacttctcac

SEQ ID NO: 7236 - DNA, 25 bp, Homo sapien
gtacagccactgaggcagcagtagc

SEQ ID NO: 7237 - DNA, 25 bp, Homo sapien
gccactgaggcagcagtagcgtgca

SEQ ID NO: 7238 - DNA, 25 bp, Homo sapien
gtacgaagtggtggccgcacaactt

SEQ ID NO: 7239 - DNA, 25 bp, Homo sapien
ggtggccgcacaacttctcacgcat

SEQ ID NO: 7240 - DNA, 25 bp, Homo sapien
caggtcttgttgggtacagccactg

SEQ ID NO: 7241 - DNA, 25 bp, Homo sapien
aacgcgaacaccagggcagggccca

SEQ ID NO: 7242 - DNA, 25 bp, Homo sapien
cgcgtacgaagtggtggccgcacaa

SEQ ID NO: 7243 - DNA, 25 bp, Homo sapien
ggcccaacgcgaacaccagggcagg

SEQ ID NO: 7244 - DNA, 25 bp, Homo sapien
cgggtcggccgcgcgcccgaaggta

SEQ ID NO: 7245 - DNA, 25 bp, Homo sapien
taccttcgggcgcgcggccgacccg

SEQ ID NO: 7246 - DNA, 25 bp, Homo sapien
tcccgggtcggccgcgcgcccgaag

SEQ ID NO: 7247 - DNA, 25 bp, Homo sapien
cttcgggcgcgcggccgacccggga

SEQ ID NO: 7248 - DNA, 25 bp, Homo sapien
ggtcccgggtcggccgcgcgcccga

SEQ ID NO: 7249 - DNA, 25 bp, Homo sapien
tcgggcgcgcggccgacccgggacc

SEQ ID NO: 7250 - DNA, 25 bp, Homo sapien
tcctggacggaatgaaccacgtggt

SEQ ID NO: 7251 - DNA, 25 bp, Homo sapien
accacgtggttcattccgtccagga

SEQ ID NO: 7252 - DNA, 25 bp, Homo sapien
acacctgagtccacacgacctccac

SEQ ID NO: 7253 - DNA, 25 bp, Homo sapien
gtggaggtcgtgtggactcaggtgt

SEQ ID NO: 7254 - DNA, 25 bp, Homo sapien
ccagagaccgctcgtccgcccgacg

SEQ ID NO: 7255 - DNA, 25 bp, Homo sapien
cgtcgggcggacgagcggtctctgg

SEQ ID NO: 7256 - DNA, 25 bp, Homo sapien
atctcaggattggactttctcagct

SEQ ID NO: 7257 - DNA, 25 bp, Homo sapien
agcaatttaacacatgcatgaactc

SEQ ID NO: 7258 - DNA, 25 bp, Homo sapien
tgtacgttagtactccagtttcatt

SEQ ID NO: 7259 - DNA, 25 bp, Homo sapien
ccttcctggaactgagcctggtgat

SEQ ID NO: 7260 - DNA, 25 bp, Homo sapien
ttttatgtaactgaggtgcatcctc

SEQ ID NO: 7261 - DNA, 25 bp, Homo sapien
acttttggggagactgttgtcaggg

SEQ ID NO: 7262 - DNA, 25 bp, Homo sapien
atgattactacagtaaagcaattta

SEQ ID NO: 7263 - DNA, 25 bp, Homo sapien
aggtgcatcctcagtgtactgggca

SEQ ID NO: 7264 - DNA, 25 bp, Homo sapien
aggattggactttctcagctcccat

SEQ ID NO: 7265 - DNA, 25 bp, Homo sapien
ctttaaactgtacgttagtactcca

SEQ ID NO: 7266 - DNA, 25 bp, Homo sapien
tgagcctggtgatgtggtcactttt

SEQ ID NO: 7267 - DNA, 25 bp, Homo sapien
catgcagaaggctctgtgtgcagcc

SEQ ID NO: 7268 - DNA, 25 bp, Homo sapien
tgttatggcccaagcagggctgtta

SEQ ID NO: 7269 - DNA, 25 bp, Homo sapien
tcatttatcaggatcttcaaggagg

SEQ ID NO: 7270 - DNA, 25 bp, Homo sapien
aaggtgccctacatcgtgcgccagt

SEQ ID NO: 7271 - DNA, 25 bp, Homo sapien
atagggagcaggtctcctgtgttat

SEQ ID NO: 7272 - DNA, 25 bp, Homo sapien
aggcatgtcacatccttctctgtgt

SEQ ID NO: 7273 - DNA, 25 bp, Homo sapien
gcaggtctcctgtgttatggcccaa

SEQ ID NO: 7274 - DNA, 25 bp, Homo sapien
gtccaaggtgccctacatcgtgcgc

SEQ ID NO: 7275 - DNA, 25 bp, Homo sapien
cagggctgttaggacactgagaaca

SEQ ID NO: 7276 - DNA, 25 bp, Homo sapien
gcccaagcagggctgttaggacact

SEQ ID NO: 7277 - DNA, 25 bp, Homo sapien
caggcatgcagaaggctctgtgtgc

SEQ ID NO: 7278 - DNA, 25 bp, Homo sapien
tgatagaaacataggcagtagcagt

SEQ ID NO: 7279 - DNA, 25 bp, Homo sapien
ctaaaattcagtgtgatgtggtccc

SEQ ID NO: 7280 - DNA, 25 bp, Homo sapien
tctggaccacagcatgactcatgac

SEQ ID NO: 7281 - DNA, 25 bp, Homo sapien
aaacttggaggacagttctgaatcc

SEQ ID NO: 7282 - DNA, 25 bp, Homo sapien
ccttaacagtgagggatcaggatat

SEQ ID NO: 7283 - DNA, 25 bp, Homo sapien
cagaaaatagcccagcccaggtttt

SEQ ID NO: 7284 - DNA, 25 bp, Homo sapien
ttgcaacacagttaagagactccag

SEQ ID NO: 7285 - DNA, 25 bp, Homo sapien
aaaactgcaagtaagaaagagggta

SEQ ID NO: 7286 - DNA, 25 bp, Homo sapien
ctgaccaaaagtgttgagagattgt

SEQ ID NO: 7287 - DNA, 25 bp, Homo sapien
actgttaagtctgggctgttctacc

SEQ ID NO: 7288 - DNA, 25 bp, Homo sapien
cttataaagggatcgaagatgagaa

SEQ ID NO: 7289 - DNA, 25 bp, Homo sapien
taaatagaagactaccctctgttac

SEQ ID NO: 7290 - DNA, 25 bp, Homo sapien
gtaacagagggtagtcttctattta

SEQ ID NO: 7291 - DNA, 25 bp, Homo sapien
ccagactgaagaattccgaatctat

SEQ ID NO: 7292 - DNA, 25 bp, Homo sapien
atagattcggaattcttcagtctgg

SEQ ID NO: 7293 - DNA, 25 bp, Homo sapien
cagcttcaggtaatctggatctttc

SEQ ID NO: 7294 - DNA, 25 bp, Homo sapien
tcagcagtcactccaatatatcttc

SEQ ID NO: 7295 - DNA, 25 bp, Homo sapien
ttttcagccgttcagtaaagctcat

SEQ ID NO: 7296 - DNA, 25 bp, Homo sapien
aaaaaggcaatttcagcagtcactc

SEQ ID NO: 7297 - DNA, 25 bp, Homo sapien
atgttcaagactacagcatgtccat

SEQ ID NO: 7298 - DNA, 25 bp, Homo sapien
ttccaagtttttcagccgttcagta

SEQ ID NO: 7299 - DNA, 25 bp, Homo sapien
acaaaaaggcaatttcagcagtcac

SEQ ID NO: 7300 - DNA, 25 bp, Homo sapien
agccgttcagtaaagctcatagcag

SEQ ID NO: 7301 - DNA, 25 bp, Homo sapien
agtgaaacaaatggactgtcctctg

SEQ ID NO: 7302 - DNA, 25 bp, Homo sapien
aagaagtgaaacaaatggactgtcc

SEQ ID NO: 7303 - DNA, 25 bp, Homo sapien
tgtccaaccacagcttcaggtaatc

SEQ ID NO: 7304 - DNA, 25 bp, Homo sapien
ctactcagcagcagataaatgattt

SEQ ID NO: 7305 - DNA, 25 bp, Homo sapien
aaaatgcagttctactcagcagcag

SEQ ID NO: 7306 - DNA, 25 bp, Homo sapien
gtagcaaactgatcataaagaaagc

SEQ ID NO: 7307 - DNA, 25 bp, Homo sapien
catggctgtatgcatatgacaaaac

SEQ ID NO: 7308 - DNA, 25 bp, Homo sapien
actttgagagtgatgaatatgttca

SEQ ID NO: 7309 - DNA, 25 bp, Homo sapien
tatgctaagtgacaaaagctagacc

SEQ ID NO: 7310 - DNA, 25 bp, Homo sapien
agaagggatcacaaagaggtactat

SEQ ID NO: 7311 - DNA, 25 bp, Homo sapien
tgacaaaacttatcagattgggtac

SEQ ID NO: 7312 - DNA, 25 bp, Homo sapien
ttaccttgcttatggtgatgatttc

SEQ ID NO: 7313 - DNA, 25 bp, Homo sapien
agaggtactatgaaactttgagagt

SEQ ID NO: 7314 - DNA, 25 bp, Homo sapien
aatgcaacaatatagacaaatcaca

SEQ ID NO: 7315 - DNA, 25 bp, Homo sapien
accagcggtccatgaatgaggtcac

SEQ ID NO: 7316 - DNA, 25 bp, Homo sapien
gataagaaaaagaaactccggcagc

SEQ ID NO: 7317 - DNA, 25 bp, Homo sapien
cttttcgctttgcaggggacgttct

SEQ ID NO: 7318 - DNA, 25 bp, Homo sapien
gtggcctcgcatggccttgggcctt

SEQ ID NO: 7319 - DNA, 25 bp, Homo sapien
tctgtcctgtgtctgcagcactgct

SEQ ID NO: 7320 - DNA, 25 bp, Homo sapien
ctcctacttgggtctgaggacagaa

SEQ ID NO: 7321 - DNA, 25 bp, Homo sapien
aatgaggtcaccacggtggcctcgc

SEQ ID NO: 7322 - DNA, 25 bp, Homo sapien
ggggctggcaaactcaagacctttg

SEQ ID NO: 7323 - DNA, 25 bp, Homo sapien
ttctgggaggcaggcatcccttctc

SEQ ID NO: 7324 - DNA, 25 bp, Homo sapien
aggaagtcggcccaacctggcacca

SEQ ID NO: 7325 - DNA, 25 bp, Homo sapien
actgctgaccggcatgggacgacca

SEQ ID NO: 7326 - DNA, 25 bp, Homo sapien
gacacgggtagtgttttcaccggta

SEQ ID NO: 7327 - DNA, 25 bp, Homo sapien
taccggtgaaaacactacccgtgtc

SEQ ID NO: 7328 - DNA, 25 bp, Homo sapien
ttctgtcttacaacacaggctccag

SEQ ID NO: 7329 - DNA, 25 bp, Homo sapien
ccagtatataaatcaggcaaattcc

SEQ ID NO: 7330 - DNA, 25 bp, Homo sapien
agcgcgggcacatggtcccaagcac

SEQ ID NO: 7331 - DNA, 25 bp, Homo sapien
attcttagaagagggaaaaagtctg

SEQ ID NO: 7332 - DNA, 25 bp, Homo sapien
ccctctgaagtgcagcccataatga

SEQ ID NO: 7333 - DNA, 25 bp, Homo sapien
tggggatcccggctaaatatagctg

SEQ ID NO: 7334 - DNA, 25 bp, Homo sapien
gcccataatgaaggtcttggcggca

SEQ ID NO: 7335 - DNA, 25 bp, Homo sapien
aactgccggcatctgaggtttcctc

SEQ ID NO: 7336 - DNA, 25 bp, Homo sapien
tcttggcggcaggtaaatacacccg

SEQ ID NO: 7337 - DNA, 25 bp, Homo sapien
cgccgcagacacacgaacacttggg

SEQ ID NO: 7338 - DNA, 25 bp, Homo sapien
catgaacctctgaaaactgccggca

SEQ ID NO: 7339 - DNA, 25 bp, Homo sapien
tgctggtgccaaagtcaaattttaa

SEQ ID NO: 7340 - DNA, 25 bp, Homo sapien
tgagaacaagggtccaggatatttt

SEQ ID NO: 7341 - DNA, 25 bp, Homo sapien
ccaaaagtgctgagaacaagggtcc

SEQ ID NO: 7342 - DNA, 25 bp, Homo sapien
ttattcacaatagcctgctggtgcc

SEQ ID NO: 7343 - DNA, 25 bp, Homo sapien
taaaacatatccgtgcggtggctca

SEQ ID NO: 7344 - DNA, 25 bp, Homo sapien
ttttgcacacgatgctcaaagcaac

SEQ ID NO: 7345 - DNA, 25 bp, Homo sapien
acttaaaacatatccgtgcggtggc

SEQ ID NO: 7346 - DNA, 25 bp, Homo sapien
ccaggatatttttgcacacgatgct

SEQ ID NO: 7347 - DNA, 25 bp, Homo sapien
tcacaatagcctgctggtgccaaag

SEQ ID NO: 7348 - DNA, 25 bp, Homo sapien
tgcacacgatgctcaaagcaacatt

SEQ ID NO: 7349 - DNA, 25 bp, Homo sapien
ttacttaaaacatatccgtgcggtg

SEQ ID NO: 7350 - DNA, 25 bp, Homo sapien
gacagtctgtaacacggcaattaat

SEQ ID NO: 7351 - DNA, 25 bp, Homo sapien
attaattgccgtgttacagactgtc

SEQ ID NO: 7352 - DNA, 25 bp, Homo sapien
tttcgaacctcgagatcacccgacg

SEQ ID NO: 7353 - DNA, 25 bp, Homo sapien
cgtcgggtgatctcgaggttcgaaa

SEQ ID NO: 7354 - DNA, 25 bp, Homo sapien
agcggaaaacctcgtatctgtgagt

SEQ ID NO: 7355 - DNA, 25 bp, Homo sapien
acatattctcccacttcaagcggaa

SEQ ID NO: 7356 - DNA, 25 bp, Homo sapien
ttgttagagtcttgtgatcattgaa

SEQ ID NO: 7357 - DNA, 25 bp, Homo sapien
caagcggaaaacctcgtatctgtga

SEQ ID NO: 7358 - DNA, 25 bp, Homo sapien
ggaaaacctcgtatctgtgagtatc

SEQ ID NO: 7359 - DNA, 25 bp, Homo sapien
gttagagtcttgtgatcattgaaaa

SEQ ID NO: 7360 - DNA, 25 bp, Homo sapien
ttcaagcggaaaacctcgtatctgt

SEQ ID NO: 7361 - DNA, 25 bp, Homo sapien
acttcaagcggaaaacctcgtatct

SEQ ID NO: 7362 - DNA, 25 bp, Homo sapien
ttatgaataatatagttatccactt

SEQ ID NO: 7363 - DNA, 25 bp, Homo sapien
cctcgtatctgtgagtatctggagc

SEQ ID NO: 7364 - DNA, 25 bp, Homo sapien
aagaatgcacatattctcccacttc

SEQ ID NO: 7365 - DNA, 25 bp, Homo sapien
taggcactttcattgaggcaacttc

SEQ ID NO: 7366 - DNA, 25 bp, Homo sapien
gcttagaaagtggatcatagacttc

SEQ ID NO: 7367 - DNA, 25 bp, Homo sapien
cagtatgaagagcatcttgggtctc

SEQ ID NO: 7368 - DNA, 25 bp, Homo sapien
ttgagtgcagccacaccaagatatg

SEQ ID NO: 7369 - DNA, 25 bp, Homo sapien
cagaaacatacagaagaccattgac

SEQ ID NO: 7370 - DNA, 25 bp, Homo sapien
ctccaacagaatagatgcagtcatt

SEQ ID NO: 7371 - DNA, 25 bp, Homo sapien
aagtagtagcgtgacacagccatgt

SEQ ID NO: 7372 - DNA, 25 bp, Homo sapien
ttgactgccacaacacacatgcctg

SEQ ID NO: 7373 - DNA, 25 bp, Homo sapien
ttcacagcacccaaagtagtagcgt

SEQ ID NO: 7374 - DNA, 25 bp, Homo sapien
aaaatcatggctggaagatcgacct

SEQ ID NO: 7375 - DNA, 25 bp, Homo sapien
aagtggagaccaacgcttagaaagt

SEQ ID NO: 7376 - DNA, 25 bp, Homo sapien
taggtcctcaaatactctggtgccc

SEQ ID NO: 7377 - DNA, 25 bp, Homo sapien
tggtagaccgtcttgagctcctgct

SEQ ID NO: 7378 - DNA, 25 bp, Homo sapien
tacagaggcaaaatttgatgcagtt

SEQ ID NO: 7379 - DNA, 25 bp, Homo sapien
tacagaaccgtgagaaccatttatt

SEQ ID NO: 7380 - DNA, 25 bp, Homo sapien
agctcctgctgttctgtaggtcctc

SEQ ID NO: 7381 - DNA, 25 bp, Homo sapien
gtttgggcaattctcctccatagct

SEQ ID NO: 7382 - DNA, 25 bp, Homo sapien
atagcttccttccaggtggtgaagt

SEQ ID NO: 7383 - DNA, 25 bp, Homo sapien
tgcagctttacagaaccgtgagaac

SEQ ID NO: 7384 - DNA, 25 bp, Homo sapien
tttgtatccagtggtagaccgtctt

SEQ ID NO: 7385 - DNA, 25 bp, Homo sapien
catcatgtggtcttgtatctctctc

SEQ ID NO: 7386 - DNA, 25 bp, Homo sapien
tctcagggacctattgtagcataac

SEQ ID NO: 7387 - DNA, 25 bp, Homo sapien
cccaggtaaggttagatgatcaatg

SEQ ID NO: 7388 - DNA, 25 bp, Homo sapien
tttaagtgacagctgactcgagaca

SEQ ID NO: 7389 - DNA, 25 bp, Homo sapien
atgccctaagggtaatataagctag

SEQ ID NO: 7390 - DNA, 25 bp, Homo sapien
tatccttaaccacgaagagcagttc

SEQ ID NO: 7391 - DNA, 25 bp, Homo sapien
gccctatagctgaggacccaggtaa

SEQ ID NO: 7392 - DNA, 25 bp, Homo sapien
actcgagacagacggccctatagct

SEQ ID NO: 7393 - DNA, 25 bp, Homo sapien
tgcaacggtgcgacttctccagaag

SEQ ID NO: 7394 - DNA, 25 bp, Homo sapien
atgatcaatgtgtagcggcaccact

SEQ ID NO: 7395 - DNA, 25 bp, Homo sapien
tcagcaagtcaaaccagagaaaatg

SEQ ID NO: 7396 - DNA, 25 bp, Homo sapien
ttactgcccgacgtcaagtcacaga

SEQ ID NO: 7397 - DNA, 25 bp, Homo sapien
agagaagtcattagagtagcccaca

SEQ ID NO: 7398 - DNA, 25 bp, Homo sapien
attcccaccgtctgatccagtctga

SEQ ID NO: 7399 - DNA, 25 bp, Homo sapien
tcagactggatcagacggtgggaat

SEQ ID NO: 7400 - DNA, 25 bp, Homo sapien
gacaagacagaggaaccataatcaa

SEQ ID NO: 7401 - DNA, 25 bp, Homo sapien
agaaacataattaacacgtcctttg

SEQ ID NO: 7402 - DNA, 25 bp, Homo sapien
ccaaagaggggattcttaagttata

SEQ ID NO: 7403 - DNA, 25 bp, Homo sapien
acacattcctgaatgagccggaagc

SEQ ID NO: 7404 - DNA, 25 bp, Homo sapien
ctttgcccggccagaaaatttgcaa

SEQ ID NO: 7405 - DNA, 25 bp, Homo sapien
ctttggagtaggaaacaaaagccaa

SEQ ID NO: 7406 - DNA, 25 bp, Homo sapien
tgattgttaaactaaacaccaagcc

SEQ ID NO: 7407 - DNA, 25 bp, Homo sapien
tgggcactaagaccacaccatagca

SEQ ID NO: 7408 - DNA, 25 bp, Homo sapien
accaagccaactaaatgtgttaggg

SEQ ID NO: 7409 - DNA, 25 bp, Homo sapien
ttaagcagcatatttgtagcaattg

SEQ ID NO: 7410 - DNA, 25 bp, Homo sapien
gcccggccagaaaatttgcaacttc

SEQ ID NO: 7411 - DNA, 25 bp, Homo sapien
ctggggccaatacaaggaaaaactg

SEQ ID NO: 7412 - DNA, 25 bp, Homo sapien
atgtgagataaaatacaagatgctc

SEQ ID NO: 7413 - DNA, 25 bp, Homo sapien
agcaaccctgttttagcatgagaac

SEQ ID NO: 7414 - DNA, 25 bp, Homo sapien
ataagatccaactggggccaataca

SEQ ID NO: 7415 - DNA, 25 bp, Homo sapien
aagccaagctggataagatccaact

SEQ ID NO: 7416 - DNA, 25 bp, Homo sapien
cctagaatagtcaaccaaaggttac

SEQ ID NO: 7417 - DNA, 25 bp, Homo sapien
ttagcatgagaaccagactgtaata

SEQ ID NO: 7418 - DNA, 25 bp, Homo sapien
ctagaggtgggatataaatagttcc

SEQ ID NO: 7419 - DNA, 25 bp, Homo sapien
gtaataaaacaggttgctcagtatc

SEQ ID NO: 7420 - DNA, 25 bp, Homo sapien
aaatctgtcgcaaaccagaaacacc

SEQ ID NO: 7421 - DNA, 25 bp, Homo sapien
agatgctcagttagatatggatttc

SEQ ID NO: 7422 - DNA, 25 bp, Homo sapien
ttgatgcatgtttcaggtttgttcc

SEQ ID NO: 7423 - DNA, 25 bp, Homo sapien
tgtctgtaatagcatctcctaccac

SEQ ID NO: 7424 - DNA, 25 bp, Homo sapien
ctcaaaatgtctggatattcaccaa

SEQ ID NO: 7425 - DNA, 25 bp, Homo sapien
gtagactgaagtccagaatctggcg

SEQ ID NO: 7426 - DNA, 25 bp, Homo sapien
caaagtcaatgactctaggtcactt

SEQ ID NO: 7427 - DNA, 25 bp, Homo sapien
cctggaaataatgtagactgaagtc

SEQ ID NO: 7428 - DNA, 25 bp, Homo sapien
tctaggtcactttgagattgatgca

SEQ ID NO: 7429 - DNA, 25 bp, Homo sapien
gggtgcaacaggtctcaaaatgtct

SEQ ID NO: 7430 - DNA, 25 bp, Homo sapien
agtccagaatctggcgaagattgtc

SEQ ID NO: 7431 - DNA, 25 bp, Homo sapien
gtctacagaagacagtcaccatatg

SEQ ID NO: 7432 - DNA, 25 bp, Homo sapien
attaaatttggggtgcaacaggtct

SEQ ID NO: 7433 - DNA, 25 bp, Homo sapien
attttgttcacctgaatggccagag

SEQ ID NO: 7434 - DNA, 25 bp, Homo sapien
gtttcccgtgtccttccattgagat

SEQ ID NO: 7435 - DNA, 25 bp, Homo sapien
tctgtatctggttggtaaatacctc

SEQ ID NO: 7436 - DNA, 25 bp, Homo sapien
aattgagtaaaagccttcagatttt

SEQ ID NO: 7437 - DNA, 25 bp, Homo sapien
ctgggttcctttggaggcgtcccac

SEQ ID NO: 7438 - DNA, 25 bp, Homo sapien
acatcctgtgtaaattgcttcttcc

SEQ ID NO: 7439 - DNA, 25 bp, Homo sapien
tgtcgcccagcagattttgttcacc

SEQ ID NO: 7440 - DNA, 25 bp, Homo sapien
catgtgctctggaaaactctgtatc

SEQ ID NO: 7441 - DNA, 25 bp, Homo sapien
ccattgagatctgcacatcctgtgt

SEQ ID NO: 7442 - DNA, 25 bp, Homo sapien
ctttggaggcgtcccacttccttgc

SEQ ID NO: 7443 - DNA, 25 bp, Homo sapien
tatccagaattgctgttgacatttc

SEQ ID NO: 7444 - DNA, 25 bp, Homo sapien
gtacgtcatagcctcggtgtcgtcc

SEQ ID NO: 7445 - DNA, 25 bp, Homo sapien
ggacgacaccgaggctatgacgtac

SEQ ID NO: 7446 - DNA, 25 bp, Homo sapien
cgccgggggcgtcgacttggtgttg

SEQ ID NO: 7447 - DNA, 25 bp, Homo sapien
caacaccaagtcgacgcccccggcg

SEQ ID NO: 7448 - DNA, 25 bp, Homo sapien
ctctaaaaccaagcctaggaccagg

SEQ ID NO: 7449 - DNA, 25 bp, Homo sapien
tttggagataagtactcacctgtga

SEQ ID NO: 7450 - DNA, 25 bp, Homo sapien
cacaatagattgctaggacttactc

SEQ ID NO: 7451 - DNA, 25 bp, Homo sapien
atgacgtgtgttaatgaggcctcta

SEQ ID NO: 7452 - DNA, 25 bp, Homo sapien
tgctcctgagcctgactagattcat

SEQ ID NO: 7453 - DNA, 25 bp, Homo sapien
ctaattgacgtagaaaaagctgtac

SEQ ID NO: 7454 - DNA, 25 bp, Homo sapien
gttgctaatgatatgtccacgctac

SEQ ID NO: 7455 - DNA, 25 bp, Homo sapien
ttcatcatgcaagcagcaccaggca

SEQ ID NO: 7456 - DNA, 25 bp, Homo sapien
ccaagatcactggatgacgtgtgtt

SEQ ID NO: 7457 - DNA, 25 bp, Homo sapien
caagcagcaccaggcatatttgtcc

SEQ ID NO: 7458 - DNA, 25 bp, Homo sapien
agctgtggagcgaggatctaatcat

SEQ ID NO: 7459 - DNA, 25 bp, Homo sapien
agtcataatgacagcttagtcgccc

SEQ ID NO: 7460 - DNA, 25 bp, Homo sapien
ctttgttgtcttttcaggaggagga

SEQ ID NO: 7461 - DNA, 25 bp, Homo sapien
ataaaccgctttagaatatgatttt

SEQ ID NO: 7462 - DNA, 25 bp, Homo sapien
aaccatttgagtcataatgacagct

SEQ ID NO: 7463 - DNA, 25 bp, Homo sapien
tgagtcataatgacagcttagtcgc

SEQ ID NO: 7464 - DNA, 25 bp, Homo sapien
cccagataatagcactaaataaact

SEQ ID NO: 7465 - DNA, 25 bp, Homo sapien
gcttagtcgcccttttctgctgata

SEQ ID NO: 7466 - DNA, 25 bp, Homo sapien
tggcatgaacctgggcggcgcagtt

SEQ ID NO: 7467 - DNA, 25 bp, Homo sapien
taatgacagcttagtcgcccttttc

SEQ ID NO: 7468 - DNA, 25 bp, Homo sapien
tagaataaaccgctttagaatatga

SEQ ID NO: 7469 - DNA, 25 bp, Homo sapien
ttctgctgatataactggtccccca

SEQ ID NO: 7470 - DNA, 25 bp, Homo sapien
cttccacgccaatgaccgagcgacc

SEQ ID NO: 7471 - DNA, 25 bp, Homo sapien
ggtcgctcggtcattggcgtggaag

SEQ ID NO: 7472 - DNA, 25 bp, Homo sapien
ttctgctgatataactggtccccca

SEQ ID NO: 7473 - DNA, 25 bp, Homo sapien
cctcactcatggtttttagaataaa

SEQ ID NO: 7474 - DNA, 25 bp, Homo sapien
aaccatttgagtcataatgacagct

SEQ ID NO: 7475 - DNA, 25 bp, Homo sapien
ctttgttgtcttttcaggaggagga

SEQ ID NO: 7476 - DNA, 25 bp, Homo sapien
gagtcataatgacagcttagtcgcc

SEQ ID NO: 7477 - DNA, 25 bp, Homo sapien
gcttagtcgcccttttctgctgata

SEQ ID NO: 7478 - DNA, 25 bp, Homo sapien
gaataaaccgctttagaatatgatt

SEQ ID NO: 7479 - DNA, 25 bp, Homo sapien
tggcatgaacctgggcggcgcagtt

SEQ ID NO: 7480 - DNA, 25 bp, Homo sapien
cccagataatagcactaaataaact

SEQ ID NO: 7481 - DNA, 25 bp, Homo sapien
tttggaatatgtagaatcagccggg

SEQ ID NO: 7482 - DNA, 25 bp, Homo sapien
taatgacagcttagtcgcccttttc

SEQ ID NO: 7483 - DNA, 25 bp, Homo sapien
ttatgaaatggaggagaatgtctat

SEQ ID NO: 7484 - DNA, 25 bp, Homo sapien
tttacactgagtaactcacacattc

SEQ ID NO: 7485 - DNA, 25 bp, Homo sapien
atgaaatggaggagaatgtctattt

SEQ ID NO: 7486 - DNA, 25 bp, Homo sapien
tagaattctagtgctcaagttatga

SEQ ID NO: 7487 - DNA, 25 bp, Homo sapien
gattacaggtacacgttgccatgcc

SEQ ID NO: 7488 - DNA, 25 bp, Homo sapien
tcaagttatgaaatggaggagaatg

SEQ ID NO: 7489 - DNA, 25 bp, Homo sapien
gtcttgctctgtctgagcggttcaa

SEQ ID NO: 7490 - DNA, 25 bp, Homo sapien
tctagtgctcaagttatgaaatgga

SEQ ID NO: 7491 - DNA, 25 bp, Homo sapien
tctgtctgagcggttcaagcaattt

SEQ ID NO: 7492 - DNA, 25 bp, Homo sapien
ggattacaggtacacgttgccatgc

SEQ ID NO: 7493 - DNA, 25 bp, Homo sapien
actgagtaactcacacattccttct

SEQ ID NO: 7494 - DNA, 25 bp, Homo sapien
tctttcacctggactggagtggagt

SEQ ID NO: 7495 - DNA, 25 bp, Homo sapien
atctggctctttcacctggactgga

SEQ ID NO: 7496 - DNA, 25 bp, Homo sapien
tgtgtcacattggtgtgatcgtggc

SEQ ID NO: 7497 - DNA, 25 bp, Homo sapien
ctcactgtgtcacattggtgtgatc

SEQ ID NO: 7498 - DNA, 25 bp, Homo sapien
gctctttcacctggactggagtgga

SEQ ID NO: 7499 - DNA, 25 bp, Homo sapien
cccagcctggtctcgtctcgagttc

SEQ ID NO: 7500 - DNA, 25 bp, Homo sapien
gtctcactgtgtcacattggtgtga

SEQ ID NO: 7501 - DNA, 25 bp, Homo sapien
ggatctggctctttcacctggactg

SEQ ID NO: 7502 - DNA, 25 bp, Homo sapien
ctctttcacctggactggagtggag

SEQ ID NO: 7503 - DNA, 25 bp, Homo sapien
ggtctcgtctcgagttcctgacctc

SEQ ID NO: 7504 - DNA, 25 bp, Homo sapien
cactgtgtcacattggtgtgatcgt

SEQ ID NO: 7505 - DNA, 25 bp, Homo sapien
cttcacgtccggggttccggataca

SEQ ID NO: 7506 - DNA, 25 bp, Homo sapien
tgtatccggaaccccggacgtgaag

SEQ ID NO: 7507 - DNA, 25 bp, Homo sapien
ctgaaaatggcggaacattgcagca

SEQ ID NO: 7508 - DNA, 25 bp, Homo sapien
caacaacacagtactctgcaaggat

SEQ ID NO: 7509 - DNA, 25 bp, Homo sapien
gttcaatctctgaaagttgtgcttt

SEQ ID NO: 7510 - DNA, 25 bp, Homo sapien
cttcaagctgacgtaaaataaatgt

SEQ ID NO: 7511 - DNA, 25 bp, Homo sapien
catggacagcaccaacaacacagta

SEQ ID NO: 7512 - DNA, 25 bp, Homo sapien
agagatatctgaatgaaaagatccc

SEQ ID NO: 7513 - DNA, 25 bp, Homo sapien
tttattttgagctacagcatggaca

SEQ ID NO: 7514 - DNA, 25 bp, Homo sapien
ttttacagctagtccaaatttctct

SEQ ID NO: 7515 - DNA, 25 bp, Homo sapien
atggcggaacattgcagcatgctga

SEQ ID NO: 7516 - DNA, 25 bp, Homo sapien
aacttctgttgatgtattctgcctg

SEQ ID NO: 7517 - DNA, 25 bp, Homo sapien
ttccttgatgaagcatatcatttac

SEQ ID NO: 7518 - DNA, 25 bp, Homo sapien
aggcacgcaaggcacgcttttctct

SEQ ID NO: 7519 - DNA, 25 bp, Homo sapien
ggggaattcaagtagttgctaggtc

SEQ ID NO: 7520 - DNA, 25 bp, Homo sapien
aggcgtagtttcctgaggctagaaa

SEQ ID NO: 7521 - DNA, 25 bp, Homo sapien
ctggggagacatgaaagcatctttt

SEQ ID NO: 7522 - DNA, 25 bp, Homo sapien
tctgtgtcaggtgcctcgcatattc

SEQ ID NO: 7523 - DNA, 25 bp, Homo sapien
gcgaactgtggcaaactgatcttta

SEQ ID NO: 7524 - DNA, 25 bp, Homo sapien
atgaatacgaggaattgatagtgtc

SEQ ID NO: 7525 - DNA, 25 bp, Homo sapien
gctggcgtcaggacttagaactcct

SEQ ID NO: 7526 - DNA, 25 bp, Homo sapien
aagagagaatgatggcagaaatcaa

SEQ ID NO: 7527 - DNA, 25 bp, Homo sapien
ttgctaggtctcagggaatccatct

SEQ ID NO: 7528 - DNA, 25 bp, Homo sapien
tagaactcctgtatgccggacagcc

SEQ ID NO: 7529 - DNA, 25 bp, Homo sapien
atgttctctgcaaaggcgatcctca

SEQ ID NO: 7530 - DNA, 25 bp, Homo sapien
tgggccttccgttcaaagcagagaa

SEQ ID NO: 7531 - DNA, 25 bp, Homo sapien
gagcagtagccgtggcatccctcca

SEQ ID NO: 7532 - DNA, 25 bp, Homo sapien
ccgcaagctggagttagttatagga

SEQ ID NO: 7533 - DNA, 25 bp, Homo sapien
tagttataggaaatcgtggaccacc

SEQ ID NO: 7534 - DNA, 25 bp, Homo sapien
gtggtagaaatctgcagagagaaca

SEQ ID NO: 7535 - DNA, 25 bp, Homo sapien
gtcagctgttcgctcggaatggctt

SEQ ID NO: 7536 - DNA, 25 bp, Homo sapien
tagtgggttccaggccaaatgctct

SEQ ID NO: 7537 - DNA, 25 bp, Homo sapien
aaaggcctggatcatgtgaccgtca

SEQ ID NO: 7538 - DNA, 25 bp, Homo sapien
ggcgtggactactacgtcagcactc

SEQ ID NO: 7539 - DNA, 25 bp, Homo sapien
ggaaaagctacagggcactacacct

SEQ ID NO: 7540 - DNA, 25 bp, Homo sapien
acaaacaggacttcccgtgcaactg

SEQ ID NO: 7541 - DNA, 25 bp, Homo sapien
gccgtggaaacgttgagttcacaaa

SEQ ID NO: 7542 - DNA, 25 bp, Homo sapien
tgtccagccagacctggggcagctc

SEQ ID NO: 7543 - DNA, 25 bp, Homo sapien
tccatggtgcctgagaggccttcat

SEQ ID NO: 7544 - DNA, 25 bp, Homo sapien
aaacgttgagttcacaaacaggact

SEQ ID NO: 7545 - DNA, 25 bp, Homo sapien
taagctgagaagacgatcctgcaca

SEQ ID NO: 7546 - DNA, 25 bp, Homo sapien
atcccatccatggtgcctgagaggc

SEQ ID NO: 7547 - DNA, 25 bp, Homo sapien
ctctgtaagctgagaagacgatcct

SEQ ID NO: 7548 - DNA, 25 bp, Homo sapien
aatggaaaagccgtggaaacgttga

SEQ ID NO: 7549 - DNA, 25 bp, Homo sapien
ccctccaccagatcagttgggcatg

SEQ ID NO: 7550 - DNA, 25 bp, Homo sapien
tcacactaggctctgtaagctgaga

SEQ ID NO: 7551 - DNA, 25 bp, Homo sapien
atgggaggtagaacaggtatcaacc

SEQ ID NO: 7552 - DNA, 25 bp, Homo sapien
tatttcatgtctcgcctagtctctc

SEQ ID NO: 7553 - DNA, 25 bp, Homo sapien
tgaactgttcagtggagtcctaaca

SEQ ID NO: 7554 - DNA, 25 bp, Homo sapien
agggcctggcatctcataggcactc

SEQ ID NO: 7555 - DNA, 25 bp, Homo sapien
gtatcaaccgcaggagacagagtct

SEQ ID NO: 7556 - DNA, 25 bp, Homo sapien
actggaataaaagctctttagggtc

SEQ ID NO: 7557 - DNA, 25 bp, Homo sapien
ctttagggtcaaagacatctcgctc

SEQ ID NO: 7558 - DNA, 25 bp, Homo sapien
tcaaagacatctcgctccacagtgc

SEQ ID NO: 7559 - DNA, 25 bp, Homo sapien
ggcactcaataaaaaggcactgaac

SEQ ID NO: 7560 - DNA, 25 bp, Homo sapien
cagtgcccacaatacccaggacagg

SEQ ID NO: 7561 - DNA, 25 bp, Homo sapien
gtccactgagactcctgtgaccctg

SEQ ID NO: 7562 - DNA, 25 bp, Homo sapien
atttcgaagcaactcatgcactctt

SEQ ID NO: 7563 - DNA, 25 bp, Homo sapien
tgccaccagttttcacctagccagt

SEQ ID NO: 7564 - DNA, 25 bp, Homo sapien
ccattcggaacgagggctgctgacc

SEQ ID NO: 7565 - DNA, 25 bp, Homo sapien
tttcagcactcagaaggaactgtga

SEQ ID NO: 7566 - DNA, 25 bp, Homo sapien
agtcttctccgtgcaaaaaggattc

SEQ ID NO: 7567 - DNA, 25 bp, Homo sapien
gacacctaatccacacagcagggaa

SEQ ID NO: 7568 - DNA, 25 bp, Homo sapien
acctagccagtcttgagtcttctcc

SEQ ID NO: 7569 - DNA, 25 bp, Homo sapien
tgtgagcttttatactactacagcc

SEQ ID NO: 7570 - DNA, 25 bp, Homo sapien
tgaagtaggtggtcctgaaagttaa

SEQ ID NO: 7571 - DNA, 25 bp, Homo sapien
cccagtatctcagcggtaaccatgg

SEQ ID NO: 7572 - DNA, 25 bp, Homo sapien
tctcagcggtaaccatggggaaaaa

SEQ ID NO: 7573 - DNA, 25 bp, Homo sapien
agcacagaggcaaaataggcttcaa

SEQ ID NO: 7574 - DNA, 25 bp, Homo sapien
gcatgggattttggcatcagctgtt

SEQ ID NO: 7575 - DNA, 25 bp, Homo sapien
agaacttgggcctcactgaattgtc

SEQ ID NO: 7576 - DNA, 25 bp, Homo sapien
ctataagagtatagtggtggaaaga

SEQ ID NO: 7577 - DNA, 25 bp, Homo sapien
aaaataaatcgctcagaaacatctg

SEQ ID NO: 7578 - DNA, 25 bp, Homo sapien
caggtcacacaatctatgcatggga

SEQ ID NO: 7579 - DNA, 25 bp, Homo sapien
cttgtcatagggattaaatgaggta

SEQ ID NO: 7580 - DNA, 25 bp, Homo sapien
gatctagagtcaaagcttggggttt

SEQ ID NO: 7581 - DNA, 25 bp, Homo sapien
aatgaggtaattgatgagaagaact

SEQ ID NO: 7582 - DNA, 25 bp, Homo sapien
tggtagaaatcaggtcacacaatct

SEQ ID NO: 7583 - DNA, 25 bp, Homo sapien
aaatgtttctgagggttattagctc

SEQ ID NO: 7584 - DNA, 25 bp, Homo sapien
atcaagtaagcaaaaacttagaact

SEQ ID NO: 7585 - DNA, 25 bp, Homo sapien
ctttttagggagtggcatttcaaaa

SEQ ID NO: 7586 - DNA, 25 bp, Homo sapien
attagtcaggcataggccaggcgcg

SEQ ID NO: 7587 - DNA, 25 bp, Homo sapien
gagactcaggtctcaaagaaaaaag

SEQ ID NO: 7588 - DNA, 25 bp, Homo sapien
gttagtcctactaatcaagtaagca

SEQ ID NO: 7589 - DNA, 25 bp, Homo sapien
aaaaataagagatcagagctgggca

SEQ ID NO: 7590 - DNA, 25 bp, Homo sapien
tgacaaaggtttgataaaactagac

SEQ ID NO: 7591 - DNA, 25 bp, Homo sapien
agacctatcacacattgctaatgac

SEQ ID NO: 7592 - DNA, 25 bp, Homo sapien
attcaaaatattcgttagtcctact

SEQ ID NO: 7593 - DNA, 25 bp, Homo sapien
gacattacaaattgatgcagccttt

SEQ ID NO: 7594 - DNA, 25 bp, Homo sapien
aggctagagtgtgagactcaggtct

SEQ ID NO: 7595 - DNA, 25 bp, Homo sapien
agacctaagatagtgcagaagggta

SEQ ID NO: 7596 - DNA, 25 bp, Homo sapien
tacccttctgcactatcttaggtct

SEQ ID NO: 7597 - DNA, 25 bp, Homo sapien
ggttgtcgtatacaccctggctcca

SEQ ID NO: 7598 - DNA, 25 bp, Homo sapien
tggagccagggtgtatacgacaacc

SEQ ID NO: 7599 - DNA, 25 bp, Homo sapien
tatcaggcctataacggtacaaaca

SEQ ID NO: 7600 - DNA, 25 bp, Homo sapien
agccgggtttgcaatagttggttac

SEQ ID NO: 7601 - DNA, 25 bp, Homo sapien
ttgaaaatacaatcaggagtcctgg

SEQ ID NO: 7602 - DNA, 25 bp, Homo sapien
tagaccgtgatctatcggctgaccg

SEQ ID NO: 7603 - DNA, 25 bp, Homo sapien
ttagaaaatcgtgagcaatgtaaac

SEQ ID NO: 7604 - DNA, 25 bp, Homo sapien
tgagtcagtgggagcatactctcta

SEQ ID NO: 7605 - DNA, 25 bp, Homo sapien
tcagtgggagcatcgcctatttcat

SEQ ID NO: 7606 - DNA, 25 bp, Homo sapien
tgcgactgcgactgctatacagaac

SEQ ID NO: 7607 - DNA, 25 bp, Homo sapien
ctacagacatgtacagcagatgcca

SEQ ID NO: 7608 - DNA, 25 bp, Homo sapien
tgtcagtaaactcaccgataagcct

SEQ ID NO: 7609 - DNA, 25 bp, Homo sapien
ttactacaaagctggaatcgaaacc

SEQ ID NO: 7610 - DNA, 25 bp, Homo sapien
taagatcaaacacttctatttgcaa

SEQ ID NO: 7611 - DNA, 25 bp, Homo sapien
ttgcaaatagaagtgtttgatctta

SEQ ID NO: 7612 - DNA, 25 bp, Homo sapien
taaaaaattgaggacaaaggtgatc

SEQ ID NO: 7613 - DNA, 25 bp, Homo sapien
atccactctggcaatctgtctttta

SEQ ID NO: 7614 - DNA, 25 bp, Homo sapien
ttgattagtgttcgcatgatatgtc

SEQ ID NO: 7615 - DNA, 25 bp, Homo sapien
ataaagcttaataaccaatgggtaa

SEQ ID NO: 7616 - DNA, 25 bp, Homo sapien
tatgaagaattccaccctgccaatt

SEQ ID NO: 7617 - DNA, 25 bp, Homo sapien
aacttgtaaacagaatgagctcttc

SEQ ID NO: 7618 - DNA, 25 bp, Homo sapien
tgtgtgctgaccacaatagcattta

SEQ ID NO: 7619 - DNA, 25 bp, Homo sapien
aggacaaaggtgatctgaactaaac

SEQ ID NO: 7620 - DNA, 25 bp, Homo sapien
ttggaaaaatgtgaaacaatgtctt

SEQ ID NO: 7621 - DNA, 25 bp, Homo sapien
agaactggaataacacagtgtgtgc

SEQ ID NO: 7622 - DNA, 25 bp, Homo sapien
atataccatgtatgtgaatgtcttc

SEQ ID NO: 7623 - DNA, 25 bp, Homo sapien
caaaggctcctaattatatcaagtt

SEQ ID NO: 7624 - DNA, 25 bp, Homo sapien
attgttcctcccttatatatgattc

SEQ ID NO: 7625 - DNA, 25 bp, Homo sapien
cttttgttactagagccccagccaa

SEQ ID NO: 7626 - DNA, 25 bp, Homo sapien
tcgaatctgggagttcaagctttca

SEQ ID NO: 7627 - DNA, 25 bp, Homo sapien
ttcaagctttcagtgaactatgatc

SEQ ID NO: 7628 - DNA, 25 bp, Homo sapien
atcactcgaatctgggagttcaagc

SEQ ID NO: 7629 - DNA, 25 bp, Homo sapien
cccagccaagaaattagaagggtgg

SEQ ID NO: 7630 - DNA, 25 bp, Homo sapien
tgagatacctagataagtaaaattc

SEQ ID NO: 7631 - DNA, 25 bp, Homo sapien
caagaaattagaagggtggaggaaa

SEQ ID NO: 7632 - DNA, 25 bp, Homo sapien
ttggatcactcgaatctgggagttc

SEQ ID NO: 7633 - DNA, 25 bp, Homo sapien
tatcaagttacttccagaaaagtca

SEQ ID NO: 7634 - DNA, 25 bp, Homo sapien
tatcaagttacttccagaaaagtca

SEQ ID NO: 7635 - DNA, 25 bp, Homo sapien
ttggatcactcgaatctgggagttc

SEQ ID NO: 7636 - DNA, 25 bp, Homo sapien
cttttgttactagagccccagccaa

SEQ ID NO: 7637 - DNA, 25 bp, Homo sapien
agaatggtagtcaggctcagtggct

SEQ ID NO: 7638 - DNA, 25 bp, Homo sapien
gtggtggaacatacccgtagtccca

SEQ ID NO: 7639 - DNA, 25 bp, Homo sapien
ctcgaatctgggagttcaagctttc

SEQ ID NO: 7640 - DNA, 25 bp, Homo sapien
acagagagaccatctttcaggagct

SEQ ID NO: 7641 - DNA, 25 bp, Homo sapien
ccagccaagaaattagaagggtgga

SEQ ID NO: 7642 - DNA, 25 bp, Homo sapien
caaaggctcctaattatatcaagtt

SEQ ID NO: 7643 - DNA, 25 bp, Homo sapien
tgagatacctagataagtaaaattc

SEQ ID NO: 7644 - DNA, 25 bp, Homo sapien
ttcaagctttcagtgaactatgatc

SEQ ID NO: 7645 - DNA, 25 bp, Homo sapien
gcatgcggaggaagcaccagctgcc

SEQ ID NO: 7646 - DNA, 25 bp, Homo sapien
ctgccggggcagtactgctggtgtt

SEQ ID NO: 7647 - DNA, 25 bp, Homo sapien
cccagagagccctggtggcgcttct

SEQ ID NO: 7648 - DNA, 25 bp, Homo sapien
gcccgtccagctgcgcgtagaggta

SEQ ID NO: 7649 - DNA, 25 bp, Homo sapien
gcagggagcacacggccatgaccac

SEQ ID NO: 7650 - DNA, 25 bp, Homo sapien
gagcacacggccatgaccactgtca

SEQ ID NO: 7651 - DNA, 25 bp, Homo sapien
atgaccactgtcatgagggccagca

SEQ ID NO: 7652 - DNA, 25 bp, Homo sapien
cttctgctggcggtacatgcggcag

SEQ ID NO: 7653 - DNA, 25 bp, Homo sapien
tggcgcttctgctggcggtacatgc

SEQ ID NO: 7654 - DNA, 25 bp, Homo sapien
tgaccgagccgttgcagaggaagat

SEQ ID NO: 7655 - DNA, 25 bp, Homo sapien
acctcgtcctctccggtgcgcggcc

SEQ ID NO: 7656 - DNA, 25 bp, Homo sapien
ccgaccgccaaaaccacaccggctg

SEQ ID NO: 7657 - DNA, 25 bp, Homo sapien
cagccggtgtggttttggcggtcgg

SEQ ID NO: 7658 - DNA, 25 bp, Homo sapien
aaggttagtcatcatggctgaatcc

SEQ ID NO: 7659 - DNA, 25 bp, Homo sapien
cagcggcattttgaggtaatcccat

SEQ ID NO: 7660 - DNA, 25 bp, Homo sapien
tgtgtgcatacttgcatgagtctcc

SEQ ID NO: 7661 - DNA, 25 bp, Homo sapien
tgttttatgttcagtggccacagga

SEQ ID NO: 7662 - DNA, 25 bp, Homo sapien
gtgctgagtgaatctaaggttagtc

SEQ ID NO: 7663 - DNA, 25 bp, Homo sapien
aatctagtctttcacttaggggccc

SEQ ID NO: 7664 - DNA, 25 bp, Homo sapien
tccatccactcaggcggcaggtgtt

SEQ ID NO: 7665 - DNA, 25 bp, Homo sapien
ggagaacatgagcacagcaagcaat

SEQ ID NO: 7666 - DNA, 25 bp, Homo sapien
gcacagcaagcaatagaccctctca

SEQ ID NO: 7667 - DNA, 25 bp, Homo sapien
agaccctctcatggaacaatctagt

SEQ ID NO: 7668 - DNA, 25 bp, Homo sapien
atctgtgtgtatccacgagtatctc

SEQ ID NO: 7669 - DNA, 25 bp, Homo sapien
ggataagccgcttcagtgcagcctt

SEQ ID NO: 7670 - DNA, 25 bp, Homo sapien
gtcagagcctccagttcaaacacag

SEQ ID NO: 7671 - DNA, 25 bp, Homo sapien
atgcggacataggatcccaggatca

SEQ ID NO: 7672 - DNA, 25 bp, Homo sapien
acaggtggagaatgcctgatgtttc

SEQ ID NO: 7673 - DNA, 25 bp, Homo sapien
cacaggatatgtggcccatgatgac

SEQ ID NO: 7674 - DNA, 25 bp, Homo sapien
tggttcaccctgttggggccacaaa

SEQ ID NO: 7675 - DNA, 25 bp, Homo sapien
tgtcagcacagaccagtgcaataac

SEQ ID NO: 7676 - DNA, 25 bp, Homo sapien
ttgcacagtggccactgaaaaccct

SEQ ID NO: 7677 - DNA, 25 bp, Homo sapien
cagctgacggcatcctgaagatagt

SEQ ID NO: 7678 - DNA, 25 bp, Homo sapien
tcatagtttctgagagcccagggtc

SEQ ID NO: 7679 - DNA, 25 bp, Homo sapien
atcccaggatcagcaagaaaggaaa

SEQ ID NO: 7680 - DNA, 25 bp, Homo sapien
tacaggccttcgatttctccaacca

SEQ ID NO: 7681 - DNA, 25 bp, Homo sapien
tcttccaacggagtctgctgttcct

SEQ ID NO: 7682 - DNA, 25 bp, Homo sapien
ttgctgatctcctggctcggcctca

SEQ ID NO: 7683 - DNA, 25 bp, Homo sapien
gtgaggctgttcatcctccgcgctc

SEQ ID NO: 7684 - DNA, 25 bp, Homo sapien
tcaggcctggattccggctccagct

SEQ ID NO: 7685 - DNA, 25 bp, Homo sapien
tcctgggcttggtcaggctcctcca

SEQ ID NO: 7686 - DNA, 25 bp, Homo sapien
agccatgacctcagcttcagcgtgc

SEQ ID NO: 7687 - DNA, 25 bp, Homo sapien
ctcgcacttgctcggcttgctgatc

SEQ ID NO: 7688 - DNA, 25 bp, Homo sapien
cagctcaggcatggattccagctca

SEQ ID NO: 7689 - DNA, 25 bp, Homo sapien
ttcagcgtgctgctctcgcacttgc

SEQ ID NO: 7690 - DNA, 25 bp, Homo sapien
cttggcatccagtaggtcataggca

SEQ ID NO: 7691 - DNA, 25 bp, Homo sapien
agtagttactaaggtgtatccagat

SEQ ID NO: 7692 - DNA, 25 bp, Homo sapien
ccaccactgggattgattactccca

SEQ ID NO: 7693 - DNA, 25 bp, Homo sapien
agatgccttgcaagaaacttttact

SEQ ID NO: 7694 - DNA, 25 bp, Homo sapien
cttgcaagaaacttttactgaggcc

SEQ ID NO: 7695 - DNA, 25 bp, Homo sapien
tccagatgccttgcaagaaactttt

SEQ ID NO: 7696 - DNA, 25 bp, Homo sapien
ccagatgccttgcaagaaactttta

SEQ ID NO: 7697 - DNA, 25 bp, Homo sapien
tgccttgcaagaaacttttactgag

SEQ ID NO: 7698 - DNA, 25 bp, Homo sapien
cagatgccttgcaagaaacttttac

SEQ ID NO: 7699 - DNA, 25 bp, Homo sapien
actgggattgattactcccatccac

SEQ ID NO: 7700 - DNA, 25 bp, Homo sapien
accactgggattgattactcccatc

SEQ ID NO: 7701 - DNA, 25 bp, Homo sapien
ggattgattactcccatccactcag

SEQ ID NO: 7702 - DNA, 25 bp, Homo sapien
agtagttactaaggtgtatccagat

SEQ ID NO: 7703 - DNA, 25 bp, Homo sapien
ccagcaagcagaagaccctccaggt

SEQ ID NO: 7704 - DNA, 25 bp, Homo sapien
gaatgagcacctggacctacagcca

SEQ ID NO: 7705 - DNA, 25 bp, Homo sapien
ccaccactgggattgattactccca

SEQ ID NO: 7706 - DNA, 25 bp, Homo sapien
agatgccttgcaagaaacttttact

SEQ ID NO: 7707 - DNA, 25 bp, Homo sapien
ggattgattactcccatccactcag

SEQ ID NO: 7708 - DNA, 25 bp, Homo sapien
gcttaccaccactgggattgattac

SEQ ID NO: 7709 - DNA, 25 bp, Homo sapien
cttgcaagaaacttttactgaggcc

SEQ ID NO: 7710 - DNA, 25 bp, Homo sapien
tccagatgccttgcaagaaactttt

SEQ ID NO: 7711 - DNA, 25 bp, Homo sapien
accactgggattgattactcccatc

SEQ ID NO: 7712 - DNA, 25 bp, Homo sapien
agctgcacctgggaatgagcacctg

SEQ ID NO: 7713 - DNA, 25 bp, Homo sapien
taggaacttatgtcaacatggtggc

SEQ ID NO: 7714 - DNA, 25 bp, Homo sapien
gaagagagaagacctggcttcctta

SEQ ID NO: 7715 - DNA, 25 bp, Homo sapien
gacagctcctaggagagaaagcata

SEQ ID NO: 7716 - DNA, 25 bp, Homo sapien
tagatgtctctgataggtaaaatat

SEQ ID NO: 7717 - DNA, 25 bp, Homo sapien
ggtccctgagtttggcactctccta

SEQ ID NO: 7718 - DNA, 25 bp, Homo sapien
gaaagcatagtcaggtaggaactta

SEQ ID NO: 7719 - DNA, 25 bp, Homo sapien
tctcctaagaggaatgaagagagaa

SEQ ID NO: 7720 - DNA, 25 bp, Homo sapien
cagctaggaccctgtagttgggacc

SEQ ID NO: 7721 - DNA, 25 bp, Homo sapien
ttccttacaacagggacaggctggt

SEQ ID NO: 7722 - DNA, 25 bp, Homo sapien
atgatacaaggacctgggcccacca

SEQ ID NO: 7723 - DNA, 25 bp, Homo sapien
gagcccagaaaaatagatgtctctg

SEQ ID NO: 7724 - DNA, 25 bp, Homo sapien
ttcccacacggactataacaagtct

SEQ ID NO: 7725 - DNA, 25 bp, Homo sapien
accataacgtgtgctactcaagatc

SEQ ID NO: 7726 - DNA, 25 bp, Homo sapien
actccgtttactattctgcaccgac

SEQ ID NO: 7727 - DNA, 25 bp, Homo sapien
tgcctctcagaccttaatacaacac

SEQ ID NO: 7728 - DNA, 25 bp, Homo sapien
aggaaccgaccataacgtgtgctac

SEQ ID NO: 7729 - DNA, 25 bp, Homo sapien
tattctgcaccgacttctctcattc

SEQ ID NO: 7730 - DNA, 25 bp, Homo sapien
tgctactcaagatcgtgtggaatgg

SEQ ID NO: 7731 - DNA, 25 bp, Homo sapien
acctgtgggaaacagactccgttta

SEQ ID NO: 7732 - DNA, 25 bp, Homo sapien
aatacaacactcttcggaggaaccg

SEQ ID NO: 7733 - DNA, 25 bp, Homo sapien
ggagatggaagctggcttaacgtta

SEQ ID NO: 7734 - DNA, 25 bp, Homo sapien
acactcttcggaggaaccgaccata

SEQ ID NO: 7735 - DNA, 25 bp, Homo sapien
atgagggccggccacctgcacagtc

SEQ ID NO: 7736 - DNA, 25 bp, Homo sapien
ctacacttggcatgaggtcgcctga

SEQ ID NO: 7737 - DNA, 25 bp, Homo sapien
ccatgctaagctgagggttctgtct

SEQ ID NO: 7738 - DNA, 25 bp, Homo sapien
gaactgggccaaatggtgcccacac

SEQ ID NO: 7739 - DNA, 25 bp, Homo sapien
gaaagttgtcttccctgctcagccc

SEQ ID NO: 7740 - DNA, 25 bp, Homo sapien
ttctggccctgaaaggggccttcaa

SEQ ID NO: 7741 - DNA, 25 bp, Homo sapien
ttccaagccaacctcagatgaactc

SEQ ID NO: 7742 - DNA, 25 bp, Homo sapien
ctgtctctggcaacctgaatcatcc

SEQ ID NO: 7743 - DNA, 25 bp, Homo sapien
ctcagggtcaacagggaagctactt

SEQ ID NO: 7744 - DNA, 25 bp, Homo sapien
aacctcagatgaactcagggtcaac

SEQ ID NO: 7745 - DNA, 25 bp, Homo sapien
acacagaggctgagttaaattaacc

SEQ ID NO: 7746 - DNA, 25 bp, Homo sapien
ccagagtttccgtgatgctgctgct

SEQ ID NO: 7747 - DNA, 25 bp, Homo sapien
tgctgttggctaagaggcggccata

SEQ ID NO: 7748 - DNA, 25 bp, Homo sapien
gtgatggtgatgtgttgagactggt

SEQ ID NO: 7749 - DNA, 25 bp, Homo sapien
ggatgggcattgctgttggctaaga

SEQ ID NO: 7750 - DNA, 25 bp, Homo sapien
attgctgttggctaagaggcggcca

SEQ ID NO: 7751 - DNA, 25 bp, Homo sapien
ggcccagagtttccgtgatgctgct

SEQ ID NO: 7752 - DNA, 25 bp, Homo sapien
gcgtggtgggagctaccgccctcca

SEQ ID NO: 7753 - DNA, 25 bp, Homo sapien
gacatggcgtaagggtgtgcgtggt

SEQ ID NO: 7754 - DNA, 25 bp, Homo sapien
cccagagtttccgtgatgctgctgc

SEQ ID NO: 7755 - DNA, 25 bp, Homo sapien
gggcccagagtttccgtgatgctgc

SEQ ID NO: 7756 - DNA, 25 bp, Homo sapien
ccctggtgggtagggcctcagagac

SEQ ID NO: 7757 - DNA, 25 bp, Homo sapien
caagataggaaccaggaacactgcc

SEQ ID NO: 7758 - DNA, 25 bp, Homo sapien
taggaaccaggaacactgccctgca

SEQ ID NO: 7759 - DNA, 25 bp, Homo sapien
aatgatttatattcagcccaacatc

SEQ ID NO: 7760 - DNA, 25 bp, Homo sapien
ctactgttaagatcctgcagagggc

SEQ ID NO: 7761 - DNA, 25 bp, Homo sapien
gctcccgttcagaggcttcacctgc

SEQ ID NO: 7762 - DNA, 25 bp, Homo sapien
ttcgtccagactactgttaagatcc

SEQ ID NO: 7763 - DNA, 25 bp, Homo sapien
gagggcgttttctctgtctggctcc

SEQ ID NO: 7764 - DNA, 25 bp, Homo sapien
tccagctttggatcatttgcaattt

SEQ ID NO: 7765 - DNA, 25 bp, Homo sapien
ttaagatcctgcagagggcgttttc

SEQ ID NO: 7766 - DNA, 25 bp, Homo sapien
attcagtgtatcttcgtccagacta

SEQ ID NO: 7767 - DNA, 25 bp, Homo sapien
tcaggtcttccagctttggatcatt

SEQ ID NO: 7768 - DNA, 25 bp, Homo sapien
ctttagggacaccactataaccact

SEQ ID NO: 7769 - DNA, 25 bp, Homo sapien
ctccctttagggacaccactataac

SEQ ID NO: 7770 - DNA, 25 bp, Homo sapien
ttagggacaccactataaccactat

SEQ ID NO: 7771 - DNA, 25 bp, Homo sapien
taaccactataacagggtcagcgcc

SEQ ID NO: 7772 - DNA, 25 bp, Homo sapien
cactataacagggtcagcgccaagt

SEQ ID NO: 7773 - DNA, 25 bp, Homo sapien
ctataacagggtcagcgccaagttt

SEQ ID NO: 7774 - DNA, 25 bp, Homo sapien
ctataaccactataacagggtcagc

SEQ ID NO: 7775 - DNA, 25 bp, Homo sapien
ataaccactataacagggtcagcgc

SEQ ID NO: 7776 - DNA, 25 bp, Homo sapien
accactataacagggtcagcgccaa

SEQ ID NO: 7777 - DNA, 25 bp, Homo sapien
ataacagggtcagcgccaagttttc

SEQ ID NO: 7778 - DNA, 25 bp, Homo sapien
tgttctcatacctaactcctatctg

SEQ ID NO: 7779 - DNA, 25 bp, Homo sapien
ctgaaaaccaaaccgcggcatgatc

SEQ ID NO: 7780 - DNA, 25 bp, Homo sapien
ctccctttagggacaccactataac

SEQ ID NO: 7781 - DNA, 25 bp, Homo sapien
taagtggaggcaaattgggattcct

SEQ ID NO: 7782 - DNA, 25 bp, Homo sapien
taaccactataacagggtcagcgcc

SEQ ID NO: 7783 - DNA, 25 bp, Homo sapien
cctatctgaaaaccaaaccgcggca

SEQ ID NO: 7784 - DNA, 25 bp, Homo sapien
tcttccgctcactaagtggaggcaa

SEQ ID NO: 7785 - DNA, 25 bp, Homo sapien
tataacagggtcagcgccaagtttt

SEQ ID NO: 7786 - DNA, 25 bp, Homo sapien
cagggtcagcgccaagttttctctc

SEQ ID NO: 7787 - DNA, 25 bp, Homo sapien
tttcaactgtagcacattcttccgc

SEQ ID NO: 7788 - DNA, 25 bp, Homo sapien
ttagggacaccactataaccactat

SEQ ID NO: 7789 - DNA, 25 bp, Homo sapien
tctgaaaaccaaaccgcggcatgat

SEQ ID NO: 7790 - DNA, 25 bp, Homo sapien
agccacaacttctcttcaaaaaggt

SEQ ID NO: 7791 - DNA, 25 bp, Homo sapien
ctttcttccatcagaggcccatgta

SEQ ID NO: 7792 - DNA, 25 bp, Homo sapien
gaggcccatgtaaactccacataag

SEQ ID NO: 7793 - DNA, 25 bp, Homo sapien
agattagctttcttccatcagaggc

SEQ ID NO: 7794 - DNA, 25 bp, Homo sapien
gtaaactccacataagccacaactt

SEQ ID NO: 7795 - DNA, 25 bp, Homo sapien
cagaggcccatgtaaactccacata

SEQ ID NO: 7796 - DNA, 25 bp, Homo sapien
tagctttcttccatcagaggcccat

SEQ ID NO: 7797 - DNA, 25 bp, Homo sapien
tcttcaaaaaggtccattagagctt

SEQ ID NO: 7798 - DNA, 25 bp, Homo sapien
acttctcttcaaaaaggtccattag

SEQ ID NO: 7799 - DNA, 25 bp, Homo sapien
aaaaggtccattagagctttgaatt

SEQ ID NO: 7800 - DNA, 25 bp, Homo sapien
atactaaacagattagctttcttcc

SEQ ID NO: 7801 - DNA, 25 bp, Homo sapien
gttcaaccagttttggcggcatgat

SEQ ID NO: 7802 - DNA, 25 bp, Homo sapien
cagaggcccatgtaaactccacata

SEQ ID NO: 7803 - DNA, 25 bp, Homo sapien
tggaggcaaattgggattcctgcca

SEQ ID NO: 7804 - DNA, 25 bp, Homo sapien
ccggcgctgctggagtttcaactgt

SEQ ID NO: 7805 - DNA, 25 bp, Homo sapien
ttcaaccagttttggcggcatgatc

SEQ ID NO: 7806 - DNA, 25 bp, Homo sapien
tttcaactgtagcacattcttccgc

SEQ ID NO: 7807 - DNA, 25 bp, Homo sapien
tcaaccagttttggcggcatgatcc

SEQ ID NO: 7808 - DNA, 25 bp, Homo sapien
tcttccgctcactaagtggaggcaa

SEQ ID NO: 7809 - DNA, 25 bp, Homo sapien
ttggctcaccagttcttcccgggtc

SEQ ID NO: 7810 - DNA, 25 bp, Homo sapien
aactgtagcacattcttccgctcac

SEQ ID NO: 7811 - DNA, 25 bp, Homo sapien
tcttcaaaaaggtccattagagctt

SEQ ID NO: 7812 - DNA, 25 bp, Homo sapien
atggaattgttatggctaagcacat

SEQ ID NO: 7813 - DNA, 25 bp, Homo sapien
gctaagcacatagaaggccaaaaaa

SEQ ID NO: 7814 - DNA, 25 bp, Homo sapien
tatgtacgtgctaattatgaaaatc

SEQ ID NO: 7815 - DNA, 25 bp, Homo sapien
tgattgaggctcagttatcacctga

SEQ ID NO: 7816 - DNA, 25 bp, Homo sapien
acccaggcaaacagctccgacatgt

SEQ ID NO: 7817 - DNA, 25 bp, Homo sapien
acatgtttcgtaagtgagacaagcc

SEQ ID NO: 7818 - DNA, 25 bp, Homo sapien
aggtaaatgtattcatcagcccaga

SEQ ID NO: 7819 - DNA, 25 bp, Homo sapien
agtgagacaagccagtgcaagtttt

SEQ ID NO: 7820 - DNA, 25 bp, Homo sapien
aggcattgacaggtacggtacccag

SEQ ID NO: 7821 - DNA, 25 bp, Homo sapien
aaaagtttctgcttgattgaggctc

SEQ ID NO: 7822 - DNA, 25 bp, Homo sapien
attctttagataacagggtgcttcc

SEQ ID NO: 7823 - DNA, 25 bp, Homo sapien
gtacagaccacaatctagaagactc

SEQ ID NO: 7824 - DNA, 25 bp, Homo sapien
ctagaagactcaaatcaagtggtaa

SEQ ID NO: 7825 - DNA, 25 bp, Homo sapien
ttacagcagttacaacacagtttat

SEQ ID NO: 7826 - DNA, 25 bp, Homo sapien
tcaaacaagaagtacagaccacaat

SEQ ID NO: 7827 - DNA, 25 bp, Homo sapien
gcatttcatttatgatcagagacag

SEQ ID NO: 7828 - DNA, 25 bp, Homo sapien
taagcttgttggtctatagctgatt

SEQ ID NO: 7829 - DNA, 25 bp, Homo sapien
acaagaagtacagaccacaatctag

SEQ ID NO: 7830 - DNA, 25 bp, Homo sapien
ggcaagttgagctgtttaagcttgt

SEQ ID NO: 7831 - DNA, 25 bp, Homo sapien
ttataatgcataaagggggggaata

SEQ ID NO: 7832 - DNA, 25 bp, Homo sapien
caagtggtaagaaattaatcttaca

SEQ ID NO: 7833 - DNA, 25 bp, Homo sapien
taatcttacagcagttacaacacag

SEQ ID NO: 7834 - DNA, 25 bp, Homo sapien
atatggcaaccatcttgggtaattt

SEQ ID NO: 7835 - DNA, 25 bp, Homo sapien
ttcaaagggaatgtatatggcaacc

SEQ ID NO: 7836 - DNA, 25 bp, Homo sapien
ctagtagctgccattcaaagggaat

SEQ ID NO: 7837 - DNA, 25 bp, Homo sapien
ggcagctcaggtcttaaggtcacat

SEQ ID NO: 7838 - DNA, 25 bp, Homo sapien
ttggttacacggttgcgggtagtca

SEQ ID NO: 7839 - DNA, 25 bp, Homo sapien
cccaagggcctggtgcatcctgata

SEQ ID NO: 7840 - DNA, 25 bp, Homo sapien
ttaataatacctgcatgagatgggc

SEQ ID NO: 7841 - DNA, 25 bp, Homo sapien
tatatgtccaaaacccaagggcctg

SEQ ID NO: 7842 - DNA, 25 bp, Homo sapien
acagtgcttcagtggtcaagtgttc

SEQ ID NO: 7843 - DNA, 25 bp, Homo sapien
agtccaatagcaggctagtagctgc

SEQ ID NO: 7844 - DNA, 25 bp, Homo sapien
cgggtagtcagccttagggtatttc

SEQ ID NO: 7845 - DNA, 25 bp, Homo sapien
gcctcctcccatctgatttcaagat

SEQ ID NO: 7846 - DNA, 25 bp, Homo sapien
agtcagggcaacttttatttacttg

SEQ ID NO: 7847 - DNA, 25 bp, Homo sapien
ttgaacaacagacatgacacacagc

SEQ ID NO: 7848 - DNA, 25 bp, Homo sapien
aacagacatgacacacagcacgatc

SEQ ID NO: 7849 - DNA, 25 bp, Homo sapien
taattccggcgcattgggagactaa

SEQ ID NO: 7850 - DNA, 25 bp, Homo sapien
gacatgacacacagcacgatctctc

SEQ ID NO: 7851 - DNA, 25 bp, Homo sapien
ttctgtccacgactacccagggtgg

SEQ ID NO: 7852 - DNA, 25 bp, Homo sapien
ctgggggacttcagtgtgcctcctc

SEQ ID NO: 7853 - DNA, 25 bp, Homo sapien
aagcttctgtccacgactacccagg

SEQ ID NO: 7854 - DNA, 25 bp, Homo sapien
acacctgagccacctgtaattccgg

SEQ ID NO: 7855 - DNA, 25 bp, Homo sapien
gagccacctgtaattccggcgcatt

SEQ ID NO: 7856 - DNA, 25 bp, Homo sapien
ttgaagtagaagctcccttgtattc

SEQ ID NO: 7857 - DNA, 25 bp, Homo sapien
ttggagagtgacaggttgtaatttt

SEQ ID NO: 7858 - DNA, 25 bp, Homo sapien
aacgtggctgcagtacaccgcacaa

SEQ ID NO: 7859 - DNA, 25 bp, Homo sapien
ctactgtgtggaaaacggaccctaa

SEQ ID NO: 7860 - DNA, 25 bp, Homo sapien
cggaccctaaagaatcaatagcaga

SEQ ID NO: 7861 - DNA, 25 bp, Homo sapien
gccggggactgcctcttgatcatta

SEQ ID NO: 7862 - DNA, 25 bp, Homo sapien
tctaagctaaggcaacagccaatgt

SEQ ID NO: 7863 - DNA, 25 bp, Homo sapien
acacgtagtgaaggacaggtcatta

SEQ ID NO: 7864 - DNA, 25 bp, Homo sapien
aacagtaggctatagggtcagacac

SEQ ID NO: 7865 - DNA, 25 bp, Homo sapien
aagccacaaagaagagaatcacatt

SEQ ID NO: 7866 - DNA, 25 bp, Homo sapien
gctatctggagaaagagcgttctaa

SEQ ID NO: 7867 - DNA, 25 bp, Homo sapien
agtgattggaggtccctataaaatt

SEQ ID NO: 7868 - DNA, 25 bp, Homo sapien
tgaaatcaggtgtttggctttatga

SEQ ID NO: 7869 - DNA, 25 bp, Homo sapien
tcacatcttgaaaaaagagttacac

SEQ ID NO: 7870 - DNA, 25 bp, Homo sapien
tctttgagacatgctaagtgtgaat

SEQ ID NO: 7871 - DNA, 25 bp, Homo sapien
ctcagaaagttaaggtagaacagga

SEQ ID NO: 7872 - DNA, 25 bp, Homo sapien
ttccatagactcagaaagttaaggt

SEQ ID NO: 7873 - DNA, 25 bp, Homo sapien
tttacaaatgactgacctaatgatt

SEQ ID NO: 7874 - DNA, 25 bp, Homo sapien
atggccatggtttacatgagatttc

SEQ ID NO: 7875 - DNA, 25 bp, Homo sapien
aaatggatggtgaagaactggaaaa

SEQ ID NO: 7876 - DNA, 25 bp, Homo sapien
ataggaaaattagtgattggaggtc

SEQ ID NO: 7877 - DNA, 25 bp, Homo sapien
caagtttatgagatgtgaaattatc

SEQ ID NO: 7878 - DNA, 25 bp, Homo sapien
cagctgagctcatgcaggcattttc

SEQ ID NO: 7879 - DNA, 25 bp, Homo sapien
tgtgctggttggtctccagctagga

SEQ ID NO: 7880 - DNA, 25 bp, Homo sapien
tacgcagtggtaacagctgagctca

SEQ ID NO: 7881 - DNA, 25 bp, Homo sapien
tgtggtacgcagtggtaacagctga

SEQ ID NO: 7882 - DNA, 25 bp, Homo sapien
tagcagtgggatttgagcttgccct

SEQ ID NO: 7883 - DNA, 25 bp, Homo sapien
taacagctgagctcatgcaggcatt

SEQ ID NO: 7884 - DNA, 25 bp, Homo sapien
actcaagacctctgactggtcaggg

SEQ ID NO: 7885 - DNA, 25 bp, Homo sapien
gcagtgggatttgagcttgccctaa

SEQ ID NO: 7886 - DNA, 25 bp, Homo sapien
cttgccctaagttgcccagggaaag

SEQ ID NO: 7887 - DNA, 25 bp, Homo sapien
tttgagcttgccctaagttgcccag

SEQ ID NO: 7888 - DNA, 25 bp, Homo sapien
tggactgtgctggttggtctccagc

SEQ ID NO: 7889 - DNA, 25 bp, Homo sapien
gataccagcaccagctctgattgag

SEQ ID NO: 7890 - DNA, 25 bp, Homo sapien
ttcctggctgcgctctcatgtgtgt

SEQ ID NO: 7891 - DNA, 25 bp, Homo sapien
gtgaacttgtcatgcggaccgactc

SEQ ID NO: 7892 - DNA, 25 bp, Homo sapien
ttcaggatgtccatggggcatctgt

SEQ ID NO: 7893 - DNA, 25 bp, Homo sapien
ctctgagactccctggctgtagata

SEQ ID NO: 7894 - DNA, 25 bp, Homo sapien
gtagataggcttagtgtgctggctt

SEQ ID NO: 7895 - DNA, 25 bp, Homo sapien
gggcatctgtctgggtgcctccatc

SEQ ID NO: 7896 - DNA, 25 bp, Homo sapien
tcatgcggaccgactcaagacctct

SEQ ID NO: 7897 - DNA, 25 bp, Homo sapien
tgtttagaaaattggcctgggctcc

SEQ ID NO: 7898 - DNA, 25 bp, Homo sapien
acaagtctcccagcagtggatacca

SEQ ID NO: 7899 - DNA, 25 bp, Homo sapien
tgaatgttgcccagtccttctgttc

SEQ ID NO: 7900 - DNA, 25 bp, Homo sapien
taagatacccggacatcgggaccta

SEQ ID NO: 7901 - DNA, 25 bp, Homo sapien
gtccacctgggtacgcttgtttata

SEQ ID NO: 7902 - DNA, 25 bp, Homo sapien
tgggctcgtcaaaggattgccaatc

SEQ ID NO: 7903 - DNA, 25 bp, Homo sapien
aaagcgaaacttcaactaagaatgc

SEQ ID NO: 7904 - DNA, 25 bp, Homo sapien
caagtttattaaggcagtgaaggaa

SEQ ID NO: 7905 - DNA, 25 bp, Homo sapien
acgtgctgtactacctgggctcgtc

SEQ ID NO: 7906 - DNA, 25 bp, Homo sapien
tccgggtctgctgcgtaaaagttta

SEQ ID NO: 7907 - DNA, 25 bp, Homo sapien
atcgggacctaagttccgggtctgc

SEQ ID NO: 7908 - DNA, 25 bp, Homo sapien
tagagcagggtgttcccaaaagcac

SEQ ID NO: 7909 - DNA, 25 bp, Homo sapien
tcagtttacccagcgctgttcgagc

SEQ ID NO: 7910 - DNA, 25 bp, Homo sapien
gcctgtcctccgcaagcatctgtat

SEQ ID NO: 7911 - DNA, 25 bp, Homo sapien
aaggcacaatcacgtctacaaggaa

SEQ ID NO: 7912 - DNA, 25 bp, Homo sapien
ctacaaggaaaacgagacagtctga

SEQ ID NO: 7913 - DNA, 25 bp, Homo sapien
aaaagtgcattgtcacaacagatta

SEQ ID NO: 7914 - DNA, 25 bp, Homo sapien
actgaagcctgtaatggtacatgcc

SEQ ID NO: 7915 - DNA, 25 bp, Homo sapien
tcctctaaaatagaaaggcactttc

SEQ ID NO: 7916 - DNA, 25 bp, Homo sapien
gatacaccgtgaagaacaaacctga

SEQ ID NO: 7917 - DNA, 25 bp, Homo sapien
ggacattactgagcaccgaggcaca

SEQ ID NO: 7918 - DNA, 25 bp, Homo sapien
gtacaagagcaaggctaaaactcct

SEQ ID NO: 7919 - DNA, 25 bp, Homo sapien
aagcttcgaaacactcgagtgggca

SEQ ID NO: 7920 - DNA, 25 bp, Homo sapien
gaatgcgatgctgtcagcagcacat

SEQ ID NO: 7921 - DNA, 25 bp, Homo sapien
acattgacacaattaggtaacagtc

SEQ ID NO: 7922 - DNA, 25 bp, Homo sapien
cagcttctcagttaagtgtctgcca

SEQ ID NO: 7923 - DNA, 25 bp, Homo sapien
ggcttgccgtggttaactagagtct

SEQ ID NO: 7924 - DNA, 25 bp, Homo sapien
tgaaaaaccacagcttcatgggcag

SEQ ID NO: 7925 - DNA, 25 bp, Homo sapien
ctgtgcaggacaccctatttccaaa

SEQ ID NO: 7926 - DNA, 25 bp, Homo sapien
cggggagttctaagcacagaaaaat

SEQ ID NO: 7927 - DNA, 25 bp, Homo sapien
tgagcctccaaaccatgactgaaaa

SEQ ID NO: 7928 - DNA, 25 bp, Homo sapien
aagtgtctgccaagactcttttctc

SEQ ID NO: 7929 - DNA, 25 bp, Homo sapien
gcacagaaaaataacctaaggatta

SEQ ID NO: 7930 - DNA, 25 bp, Homo sapien
caatctggtgtatgtttaggaggct

SEQ ID NO: 7931 - DNA, 25 bp, Homo sapien
tctgactacacattgagcctccaaa

SEQ ID NO: 7932 - DNA, 25 bp, Homo sapien
ttaggaggcttgtacactctcagct

SEQ ID NO: 7933 - DNA, 25 bp, Homo sapien
ccacggtattcttaggtgaaggtcc

SEQ ID NO: 7934 - DNA, 25 bp, Homo sapien
ggaccttcacctaagaataccgtgg

SEQ ID NO: 7935 - DNA, 25 bp, Homo sapien
aagttacttcagtcaaaagacgctt

SEQ ID NO: 7936 - DNA, 25 bp, Homo sapien
aggaacgagttaacaacagcaccag

SEQ ID NO: 7937 - DNA, 25 bp, Homo sapien
atgtgggatggttggctcggatccc

SEQ ID NO: 7938 - DNA, 25 bp, Homo sapien
cctatgaggtggttgctaagtcgac

SEQ ID NO: 7939 - DNA, 25 bp, Homo sapien
aaaaaggaacgagttaacaacagca

SEQ ID NO: 7940 - DNA, 25 bp, Homo sapien
gaatatttctccgtacaaaatgaga

SEQ ID NO: 7941 - DNA, 25 bp, Homo sapien
aacgagttaacaacagcaccaggaa

SEQ ID NO: 7942 - DNA, 25 bp, Homo sapien
caaaagacgcttttgaaaagaatat

SEQ ID NO: 7943 - DNA, 25 bp, Homo sapien
gcctatgaggtggttgctaagtcga

SEQ ID NO: 7944 - DNA, 25 bp, Homo sapien
aacagcaccaggaaagttacttcag

SEQ ID NO: 7945 - DNA, 25 bp, Homo sapien
cagcaccaggaaagttacttcagtc

SEQ ID NO: 7946 - DNA, 25 bp, Homo sapien
actctgacaagctgagaatcactgt

SEQ ID NO: 7947 - DNA, 25 bp, Homo sapien
tagatcaccagtgtatcaggagggt

SEQ ID NO: 7948 - DNA, 25 bp, Homo sapien
tctctgaggtcagctttgaactcat

SEQ ID NO: 7949 - DNA, 25 bp, Homo sapien
acaaacgaggaaaacgatgttaaca

SEQ ID NO: 7950 - DNA, 25 bp, Homo sapien
acgtgtgtagccttagatgagttat

SEQ ID NO: 7951 - DNA, 25 bp, Homo sapien
ctattgggatgagcactttattctt

SEQ ID NO: 7952 - DNA, 25 bp, Homo sapien
gcagctaaccacagtcagaagacat

SEQ ID NO: 7953 - DNA, 25 bp, Homo sapien
agttgaggattctgaagttgactac

SEQ ID NO: 7954 - DNA, 25 bp, Homo sapien
cttgagtaagtggtataaggtcctt

SEQ ID NO: 7955 - DNA, 25 bp, Homo sapien
catagcacgctccacagttttaggc

SEQ ID NO: 7956 - DNA, 25 bp, Homo sapien
ttggtcgatagtgagcagctaacca

SEQ ID NO: 7957 - DNA, 25 bp, Homo sapien
agaaaaaattaatgtgagattggat

SEQ ID NO: 7958 - DNA, 25 bp, Homo sapien
gttggtactctcttagccatggcta

SEQ ID NO: 7959 - DNA, 25 bp, Homo sapien
actggtataattcactggcttgccc

SEQ ID NO: 7960 - DNA, 25 bp, Homo sapien
tggctattcctgatgactaactggc

SEQ ID NO: 7961 - DNA, 25 bp, Homo sapien
aatctgagatgcactggtataattc

SEQ ID NO: 7962 - DNA, 25 bp, Homo sapien
ttagccatggctattcctgatgact

SEQ ID NO: 7963 - DNA, 25 bp, Homo sapien
ctggcttgcccagttggtactctct

SEQ ID NO: 7964 - DNA, 25 bp, Homo sapien
gcagtaaaagccaggaaattatgga

SEQ ID NO: 7965 - DNA, 25 bp, Homo sapien
attatggaggtctactgaggagccc

SEQ ID NO: 7966 - DNA, 25 bp, Homo sapien
agccaggaaattatggaggtctact

SEQ ID NO: 7967 - DNA, 25 bp, Homo sapien
tgatgactaactggcagtaaaagcc

SEQ ID NO: 7968 - DNA, 25 bp, Homo sapien
cagcagagtcacataggacacaatt

SEQ ID NO: 7969 - DNA, 25 bp, Homo sapien
atacaagggaagctcattacagact

SEQ ID NO: 7970 - DNA, 25 bp, Homo sapien
aaaccaggtgtaagcctcccacagt

SEQ ID NO: 7971 - DNA, 25 bp, Homo sapien
gaaaaaagcgcatggacaaagtcca

SEQ ID NO: 7972 - DNA, 25 bp, Homo sapien
gaaagcagatgttgggcataaccca

SEQ ID NO: 7973 - DNA, 25 bp, Homo sapien
aaaggctaggaagcaaaatcagcaa

SEQ ID NO: 7974 - DNA, 25 bp, Homo sapien
cagggttctcattgggagctgctca

SEQ ID NO: 7975 - DNA, 25 bp, Homo sapien
tacagactcagtgttcagggttctc

SEQ ID NO: 7976 - DNA, 25 bp, Homo sapien
aattcctccagcaatcagttgtgac

SEQ ID NO: 7977 - DNA, 25 bp, Homo sapien
gcaatgttgtatacaagggaagctc

SEQ ID NO: 7978 - DNA, 25 bp, Homo sapien
ttgtgacaacccatgtgcaatgttg

SEQ ID NO: 7979 - DNA, 25 bp, Homo sapien
ttataaagcaggtaacaagtgggga

SEQ ID NO: 7980 - DNA, 25 bp, Homo sapien
ccattggcaacgacacggccgaagt

SEQ ID NO: 7981 - DNA, 25 bp, Homo sapien
tcctgatcgtgtccagcacgggtca

SEQ ID NO: 7982 - DNA, 25 bp, Homo sapien
gtggcactttgaggcagccagtttt

SEQ ID NO: 7983 - DNA, 25 bp, Homo sapien
gtccaggccatcgagagtcagatcc

SEQ ID NO: 7984 - DNA, 25 bp, Homo sapien
cctgcatgtgctcgggcttcctgct

SEQ ID NO: 7985 - DNA, 25 bp, Homo sapien
tctgcagctgcgcacagacagccaa

SEQ ID NO: 7986 - DNA, 25 bp, Homo sapien
ctgaccctggtgctgacggccattg

SEQ ID NO: 7987 - DNA, 25 bp, Homo sapien
cagcaaggtcaaggtaagagtttga

SEQ ID NO: 7988 - DNA, 25 bp, Homo sapien
gccagtctgcaatgctgtgagagca

SEQ ID NO: 7989 - DNA, 25 bp, Homo sapien
tcgagagtcagatcctagccagtct

SEQ ID NO: 7990 - DNA, 25 bp, Homo sapien
atggggctgacagcacaacgcttcc

SEQ ID NO: 7991 - DNA, 25 bp, Homo sapien
aaggacgcttctatcacccagaaaa

SEQ ID NO: 7992 - DNA, 25 bp, Homo sapien
cacaaatgatgaagccagttgaaga

SEQ ID NO: 7993 - DNA, 25 bp, Homo sapien
aaggacacaaatgatgaagccagtt

SEQ ID NO: 7994 - DNA, 25 bp, Homo sapien
caccactctcctggaacatggatgt

SEQ ID NO: 7995 - DNA, 25 bp, Homo sapien
gggctgacagcacaacgcttccaac

SEQ ID NO: 7996 - DNA, 25 bp, Homo sapien
accataggtctttttggtgaccagt

SEQ ID NO: 7997 - DNA, 25 bp, Homo sapien
agcacaacgcttccaaccataggtc

SEQ ID NO: 7998 - DNA, 25 bp, Homo sapien
ttggggtgcaccactctcctggaac

SEQ ID NO: 7999 - DNA, 25 bp, Homo sapien
gaacaaaggacgcttctatcaccca

SEQ ID NO: 8000 - DNA, 25 bp, Homo sapien
ccaggtttaaggaccaaatgttaga

SEQ ID NO: 8001 - DNA, 25 bp, Homo sapien
tccaaagtagttgccccaattcctg

SEQ ID NO: 8002 - DNA, 25 bp, Homo sapien
aagtagttgccccaattcctgccat

SEQ ID NO: 8003 - DNA, 25 bp, Homo sapien
tgccatcctcatcacagggcttctg

SEQ ID NO: 8004 - DNA, 25 bp, Homo sapien
cagtccagggctaatagagcagttc

SEQ ID NO: 8005 - DNA, 25 bp, Homo sapien
gttctgccatcctcatcacagggct

SEQ ID NO: 8006 - DNA, 25 bp, Homo sapien
agtccagggctaatagagcagttct

SEQ ID NO: 8007 - DNA, 25 bp, Homo sapien
cagttctgccatcctcatcacaggg

SEQ ID NO: 8008 - DNA, 25 bp, Homo sapien
gtccagggctaatagagcagttctg

SEQ ID NO: 8009 - DNA, 25 bp, Homo sapien
ttctgccatcctcatcacagggctt

SEQ ID NO: 8010 - DNA, 25 bp, Homo sapien
gagcagttctgccatcctcatcaca

SEQ ID NO: 8011 - DNA, 25 bp, Homo sapien
agttctgccatcctcatcacagggc

SEQ ID NO: 8012 - DNA, 25 bp, Homo sapien
gtattcagatggtatatggagaaaa

SEQ ID NO: 8013 - DNA, 25 bp, Homo sapien
agggcaagggtaacacatacatatt

SEQ ID NO: 8014 - DNA, 25 bp, Homo sapien
ccaaactttggacaaacccagatgc

SEQ ID NO: 8015 - DNA, 25 bp, Homo sapien
acatattcttttttagggcacaaac

SEQ ID NO: 8016 - DNA, 25 bp, Homo sapien
cagggagttagagtatacaaggaaa

SEQ ID NO: 8017 - DNA, 25 bp, Homo sapien
tatggatatcagtctcattcagaaa

SEQ ID NO: 8018 - DNA, 25 bp, Homo sapien
ttggacaaacccagatgcaagagaa

SEQ ID NO: 8019 - DNA, 25 bp, Homo sapien
ttagcctttaattgagaagccaagc

SEQ ID NO: 8020 - DNA, 25 bp, Homo sapien
ctttaattgagaagccaagcgccca

SEQ ID NO: 8021 - DNA, 25 bp, Homo sapien
gcaagagaagctggtaaattagcct

SEQ ID NO: 8022 - DNA, 25 bp, Homo sapien
caagcgcccagaaagcagggagtta

SEQ ID NO: 8023 - DNA, 25 bp, Homo sapien
gttgaccatgcagggatgccttttc

SEQ ID NO: 8024 - DNA, 25 bp, Homo sapien
ccatgcagggatgccttttcagttc

SEQ ID NO: 8025 - DNA, 25 bp, Homo sapien
cagttcaagctcaaattgggggcca

SEQ ID NO: 8026 - DNA, 25 bp, Homo sapien
atgcagggatgccttttcagttcaa

SEQ ID NO: 8027 - DNA, 25 bp, Homo sapien
ttcaagctcaaattgggggccaacc

SEQ ID NO: 8028 - DNA, 25 bp, Homo sapien
tgaccatgcagggatgccttttcag

SEQ ID NO: 8029 - DNA, 25 bp, Homo sapien
gaccatgcagggatgccttttcagt

SEQ ID NO: 8030 - DNA, 25 bp, Homo sapien
ttttcagttcaagctcaaattgggg

SEQ ID NO: 8031 - DNA, 25 bp, Homo sapien
gcagggatgccttttcagttcaagc

SEQ ID NO: 8032 - DNA, 25 bp, Homo sapien
accatgcagggatgccttttcagtt

SEQ ID NO: 8033 - DNA, 25 bp, Homo sapien
agggatgccttttcagttcaagctc

SEQ ID NO: 8034 - DNA, 25 bp, Homo sapien
ttaagctcccacctggaaagggaca

SEQ ID NO: 8035 - DNA, 25 bp, Homo sapien
catgtcacggtggacggataaaaaa

SEQ ID NO: 8036 - DNA, 25 bp, Homo sapien
gttttatacaggtgttaagctccca

SEQ ID NO: 8037 - DNA, 25 bp, Homo sapien
cacctggaaagggacagttttctat

SEQ ID NO: 8038 - DNA, 25 bp, Homo sapien
gaaaaagcttcatttggtgaggtta

SEQ ID NO: 8039 - DNA, 25 bp, Homo sapien
gtcagacatagaattgatcaaaatc

SEQ ID NO: 8040 - DNA, 25 bp, Homo sapien
ctttaaataactgaagcccaaggaa

SEQ ID NO: 8041 - DNA, 25 bp, Homo sapien
ttcccaacaaaccatgaaacacttg

SEQ ID NO: 8042 - DNA, 25 bp, Homo sapien
taaaggatgcataaccatgtcacgg

SEQ ID NO: 8043 - DNA, 25 bp, Homo sapien
ttggtgaggttaatctaaaggatgc

SEQ ID NO: 8044 - DNA, 25 bp, Homo sapien
ctaaggacaatattatgtaaggaca

SEQ ID NO: 8045 - DNA, 25 bp, Homo sapien
atgaatgaccattaaagaaacagtc

SEQ ID NO: 8046 - DNA, 25 bp, Homo sapien
tatgaaagccctatacacatgttaa

SEQ ID NO: 8047 - DNA, 25 bp, Homo sapien
gatgcatacggatcacactctgtaa

SEQ ID NO: 8048 - DNA, 25 bp, Homo sapien
aggcctcctctaaagatatgctaat

SEQ ID NO: 8049 - DNA, 25 bp, Homo sapien
cctatgaccggaaaaacagactagt

SEQ ID NO: 8050 - DNA, 25 bp, Homo sapien
gatatgctaatatggctaaatacta

SEQ ID NO: 8051 - DNA, 25 bp, Homo sapien
tgtatccctttgatgcatacggatc

SEQ ID NO: 8052 - DNA, 25 bp, Homo sapien
gtttaggctatctagatgtagttta

SEQ ID NO: 8053 - DNA, 25 bp, Homo sapien
cggaaaaacagactagtagaggccc

SEQ ID NO: 8054 - DNA, 25 bp, Homo sapien
gtgtgactacttattatgaaagccc

SEQ ID NO: 8055 - DNA, 25 bp, Homo sapien
ttaaagaaacagtctggggctgtat

SEQ ID NO: 8056 - DNA, 25 bp, Homo sapien
ggtaaatagagaccactcagcaatt

SEQ ID NO: 8057 - DNA, 25 bp, Homo sapien
aggaaagtttgagacaaatggagag

SEQ ID NO: 8058 - DNA, 25 bp, Homo sapien
ctattaggaaagtttgagacaaatg

SEQ ID NO: 8059 - DNA, 25 bp, Homo sapien
gaagccaaggaacaatagcagtcat

SEQ ID NO: 8060 - DNA, 25 bp, Homo sapien
tagagaccactcagcaattttgctc

SEQ ID NO: 8061 - DNA, 25 bp, Homo sapien
ttgctctattaggaaagtttgagac

SEQ ID NO: 8062 - DNA, 25 bp, Homo sapien
ctgtttcatgttggtaaatagagac

SEQ ID NO: 8063 - DNA, 25 bp, Homo sapien
gaacaatagcagtcatgcctccaac

SEQ ID NO: 8064 - DNA, 25 bp, Homo sapien
agagaagccaaggaacaatagcagt

SEQ ID NO: 8065 - DNA, 25 bp, Homo sapien
tcatgttggtaaatagagaccactc

SEQ ID NO: 8066 - DNA, 25 bp, Homo sapien
gccaaggaacaatagcagtcatgcc

SEQ ID NO: 8067 - DNA, 25 bp, Homo sapien
ctcagttcggggatctgtattcaac

SEQ ID NO: 8068 - DNA, 25 bp, Homo sapien
atagaacaaacttagggttgccaac

SEQ ID NO: 8069 - DNA, 25 bp, Homo sapien
ttcaaatgctttggatatggaagta

SEQ ID NO: 8070 - DNA, 25 bp, Homo sapien
atgtttggaataaaaacagtccttc

SEQ ID NO: 8071 - DNA, 25 bp, Homo sapien
gttggcagacctacatcaataaaat

SEQ ID NO: 8072 - DNA, 25 bp, Homo sapien
cttatttctcagttcggggatctgt

SEQ ID NO: 8073 - DNA, 25 bp, Homo sapien
ctgtattcaacagggacatggaata

SEQ ID NO: 8074 - DNA, 25 bp, Homo sapien
acttcaagttgacatggatttcaga

SEQ ID NO: 8075 - DNA, 25 bp, Homo sapien
aggaagagttggcagacctacatca

SEQ ID NO: 8076 - DNA, 25 bp, Homo sapien
attgaaattgaaacgcttgaaacag

SEQ ID NO: 8077 - DNA, 25 bp, Homo sapien
tatggaagtattacaagagaaacat

SEQ ID NO: 8078 - DNA, 25 bp, Homo sapien
acattccgagttaaacaagattgct

SEQ ID NO: 8079 - DNA, 25 bp, Homo sapien
atggtgggacctccaactctagttt

SEQ ID NO: 8080 - DNA, 25 bp, Homo sapien
taggcaggaatgatcttttcaaatc

SEQ ID NO: 8081 - DNA, 25 bp, Homo sapien
ttaagagatccatactttctgtagc

SEQ ID NO: 8082 - DNA, 25 bp, Homo sapien
ttaaaactaactccagcactaaagc

SEQ ID NO: 8083 - DNA, 25 bp, Homo sapien
ctttgctctttaggcaggaatgatc

SEQ ID NO: 8084 - DNA, 25 bp, Homo sapien
ttttagtgaaagaatgtgccatatt

SEQ ID NO: 8085 - DNA, 25 bp, Homo sapien
ctaggttgaatttcaggcaggatct

SEQ ID NO: 8086 - DNA, 25 bp, Homo sapien
atacctgtgatccatggtgggacct

SEQ ID NO: 8087 - DNA, 25 bp, Homo sapien
gatagtgctctgatacctgtgatcc

SEQ ID NO: 8088 - DNA, 25 bp, Homo sapien
aaatgctaagccaaagtatctgcac

SEQ ID NO: 8089 - DNA, 25 bp, Homo sapien
gggccgtgagcgctcccgcggcgtt

SEQ ID NO: 8090 - DNA, 25 bp, Homo sapien
aacgccgcgggagcgctcacggccc

SEQ ID NO: 8091 - DNA, 25 bp, Homo sapien
tagccctttaggagaaatggcgctc

SEQ ID NO: 8092 - DNA, 25 bp, Homo sapien
ctccctgcggctggtattaggttac

SEQ ID NO: 8093 - DNA, 25 bp, Homo sapien
tgcctggatcagagtaagaatgtct

SEQ ID NO: 8094 - DNA, 25 bp, Homo sapien
atgttgacagtggtgtagcccttta

SEQ ID NO: 8095 - DNA, 25 bp, Homo sapien
aatattcgatgagaggttgaaccag

SEQ ID NO: 8096 - DNA, 25 bp, Homo sapien
tcggaggctctcactggcaaatgac

SEQ ID NO: 8097 - DNA, 25 bp, Homo sapien
gtgatgccacaagacccaacagaga

SEQ ID NO: 8098 - DNA, 25 bp, Homo sapien
agcagacatactaggaaatggtgca

SEQ ID NO: 8099 - DNA, 25 bp, Homo sapien
gtgcagcctgtaagaatgccagttt

SEQ ID NO: 8100 - DNA, 25 bp, Homo sapien
tgtgcaaggagcactcccaagtata

SEQ ID NO: 8101 - DNA, 25 bp, Homo sapien
cttagggtcctggtctggcaatttt

SEQ ID NO: 8102 - DNA, 25 bp, Homo sapien
ttgtattaggagaatatgggttttc

SEQ ID NO: 8103 - DNA, 25 bp, Homo sapien
gtttattgctcacgggaaactctgc

SEQ ID NO: 8104 - DNA, 25 bp, Homo sapien
aggcaaaaatgctattacgggttgt

SEQ ID NO: 8105 - DNA, 25 bp, Homo sapien
tgcaaacctttgaaagaaaggaaga

SEQ ID NO: 8106 - DNA, 25 bp, Homo sapien
ctgcctcgaggcaggcaaaaatgct

SEQ ID NO: 8107 - DNA, 25 bp, Homo sapien
agaatatgggttttctcagttttcc

SEQ ID NO: 8108 - DNA, 25 bp, Homo sapien
tcacgggaaactctgcctcgaggca

SEQ ID NO: 8109 - DNA, 25 bp, Homo sapien
gctgagtttattgctcacgggaaac

SEQ ID NO: 8110 - DNA, 25 bp, Homo sapien
tacgggttgtattaggagaatatgg

SEQ ID NO: 8111 - DNA, 25 bp, Homo sapien
aactctgcctcgaggcaggcaaaaa

SEQ ID NO: 8112 - DNA, 25 bp, Homo sapien
agttaatgcaaacctttgaaagaaa

SEQ ID NO: 8113 - DNA, 25 bp, Homo sapien
tttcaggataaagtctaggtgtctt

SEQ ID NO: 8114 - DNA, 25 bp, Homo sapien
agtgtttcaaaatatgggcctctca

SEQ ID NO: 8115 - DNA, 25 bp, Homo sapien
tctttagaactaagcagggtgcagc

SEQ ID NO: 8116 - DNA, 25 bp, Homo sapien
aggagtcagaagcaacatggagtca

SEQ ID NO: 8117 - DNA, 25 bp, Homo sapien
ctcagaggttagttttggaaaggaa

SEQ ID NO: 8118 - DNA, 25 bp, Homo sapien
ttgctcaggtcacagcgctcctaca

SEQ ID NO: 8119 - DNA, 25 bp, Homo sapien
catgattaacttggcccgtgtgcag

SEQ ID NO: 8120 - DNA, 25 bp, Homo sapien
ggcccaaggagattgcaaaactttg

SEQ ID NO: 8121 - DNA, 25 bp, Homo sapien
catggagtcagctatgttcgatttc

SEQ ID NO: 8122 - DNA, 25 bp, Homo sapien
ctaaaagcagttagcttgaggagtc

SEQ ID NO: 8123 - DNA, 25 bp, Homo sapien
ccgtgtgcagaagtgcctaaaagca

SEQ ID NO: 8124 - DNA, 25 bp, Homo sapien
agggaaggaagtcttggcaaattct

SEQ ID NO: 8125 - DNA, 25 bp, Homo sapien
atcacctagaaaatcccaaggatct

SEQ ID NO: 8126 - DNA, 25 bp, Homo sapien
gttagcgtaactatcagagctcact

SEQ ID NO: 8127 - DNA, 25 bp, Homo sapien
tgtctgtattagcaagactgaaaac

SEQ ID NO: 8128 - DNA, 25 bp, Homo sapien
atatgactcaaaactccaaccctct

SEQ ID NO: 8129 - DNA, 25 bp, Homo sapien
caacgtgcagtaacagaactgattc

SEQ ID NO: 8130 - DNA, 25 bp, Homo sapien
agctcactatgaataacaaagatac

SEQ ID NO: 8131 - DNA, 25 bp, Homo sapien
tcccaaggatctagacctggaacct

SEQ ID NO: 8132 - DNA, 25 bp, Homo sapien
tcagaggttgggctaatatcatatg

SEQ ID NO: 8133 - DNA, 25 bp, Homo sapien
ctggaacctggagtggaggcatttt

SEQ ID NO: 8134 - DNA, 25 bp, Homo sapien
caagactgaaaaccaacaacgtgca

SEQ ID NO: 8135 - DNA, 25 bp, Homo sapien
agatagccttaaaagtccagaaacc

SEQ ID NO: 8136 - DNA, 25 bp, Homo sapien
aaacataatctcaaagagctaaggc

SEQ ID NO: 8137 - DNA, 25 bp, Homo sapien
gatcaacagttcatcagatagcctt

SEQ ID NO: 8138 - DNA, 25 bp, Homo sapien
tagcaacgaatcagtaaagatggat

SEQ ID NO: 8139 - DNA, 25 bp, Homo sapien
atgatattgcaataagtcaacaacc

SEQ ID NO: 8140 - DNA, 25 bp, Homo sapien
ccagatcaacagttcatcagatagc

SEQ ID NO: 8141 - DNA, 25 bp, Homo sapien
tccagaaaccaattagcaacgaatc

SEQ ID NO: 8142 - DNA, 25 bp, Homo sapien
aaagatggattatataacacatgat

SEQ ID NO: 8143 - DNA, 25 bp, Homo sapien
ttaagttggatctctaattcatatt

SEQ ID NO: 8144 - DNA, 25 bp, Homo sapien
aagtccagaaaccaattagcaacga

SEQ ID NO: 8145 - DNA, 25 bp, Homo sapien
ataatctcaaagagctaaggctttt

SEQ ID NO: 8146 - DNA, 25 bp, Homo sapien
attacctgaacacggaatcagtcgg

SEQ ID NO: 8147 - DNA, 25 bp, Homo sapien
ttctgaggctagaggaccagtccaa

SEQ ID NO: 8148 - DNA, 25 bp, Homo sapien
ctacctgggttttattgagctgctc

SEQ ID NO: 8149 - DNA, 25 bp, Homo sapien
tacgactctgatgggcaggtaggtt

SEQ ID NO: 8150 - DNA, 25 bp, Homo sapien
agcaggctccactaactggggctac

SEQ ID NO: 8151 - DNA, 25 bp, Homo sapien
cctgaagcgttctggagccctggct

SEQ ID NO: 8152 - DNA, 25 bp, Homo sapien
gctgggagtgctgtgagtcttcctt

SEQ ID NO: 8153 - DNA, 25 bp, Homo sapien
gcaggcaggcagacattacctgaac

SEQ ID NO: 8154 - DNA, 25 bp, Homo sapien
tcctttgcccagagcctgtgttttc

SEQ ID NO: 8155 - DNA, 25 bp, Homo sapien
tcgtcctgagtgcagcccgccgaga

SEQ ID NO: 8156 - DNA, 25 bp, Homo sapien
gaatcagtcggagaaaaagatgctt

SEQ ID NO: 8157 - DNA, 25 bp, Homo sapien
tgtgaaacgtgtggtaaagaacatt

SEQ ID NO: 8158 - DNA, 25 bp, Homo sapien
aaaaaaggagtgaagcaacttagtg

SEQ ID NO: 8159 - DNA, 25 bp, Homo sapien
agaatcccaagagccagagactgga

SEQ ID NO: 8160 - DNA, 25 bp, Homo sapien
tctccaagcaggacacgcatgagac

SEQ ID NO: 8161 - DNA, 25 bp, Homo sapien
aatccaagaggaataacagactttc

SEQ ID NO: 8162 - DNA, 25 bp, Homo sapien
aattgaaggatgttgcagatgtgaa

SEQ ID NO: 8163 - DNA, 25 bp, Homo sapien
tctggccgtagctggtactagattt

SEQ ID NO: 8164 - DNA, 25 bp, Homo sapien
atgagaccctagtaaccagaagcaa

SEQ ID NO: 8165 - DNA, 25 bp, Homo sapien
gctggcaaaactgtctgcaggaaca

SEQ ID NO: 8166 - DNA, 25 bp, Homo sapien
gacacaaagcacaagacagcaattt

SEQ ID NO: 8167 - DNA, 25 bp, Homo sapien
agaggaaggtagaaaattagagaaa

SEQ ID NO: 8168 - DNA, 25 bp, Homo sapien
catggtggtccaattttaggaacac

SEQ ID NO: 8169 - DNA, 25 bp, Homo sapien
ctccatggtggtccaattttaggaa

SEQ ID NO: 8170 - DNA, 25 bp, Homo sapien
gagcagtccctccagaagccattac

SEQ ID NO: 8171 - DNA, 25 bp, Homo sapien
ctgagcagtccctccagaagccatt

SEQ ID NO: 8172 - DNA, 25 bp, Homo sapien
aggaacaccttgtttgagtttggga

SEQ ID NO: 8173 - DNA, 25 bp, Homo sapien
acaccttgtttgagtttgggaagga

SEQ ID NO: 8174 - DNA, 25 bp, Homo sapien
ccattactttgtggggggcatttcc

SEQ ID NO: 8175 - DNA, 25 bp, Homo sapien
aaagtcccagctgcatacagtggcc

SEQ ID NO: 8176 - DNA, 25 bp, Homo sapien
cagactgagcagtccctccagaagc

SEQ ID NO: 8177 - DNA, 25 bp, Homo sapien
aagtcccagctgcatacagtggccc

SEQ ID NO: 8178 - DNA, 25 bp, Homo sapien
ggggcatttcctaacctcatcagtt

SEQ ID NO: 8179 - DNA, 25 bp, Homo sapien
aaattaactgtctagggagcaggct

SEQ ID NO: 8180 - DNA, 25 bp, Homo sapien
taaacacatgaacggtggattggaa

SEQ ID NO: 8181 - DNA, 25 bp, Homo sapien
tgccaagaactgaggagtatggtca

SEQ ID NO: 8182 - DNA, 25 bp, Homo sapien
gttaaatacacgagagtgggtgcct

SEQ ID NO: 8183 - DNA, 25 bp, Homo sapien
gtatggtcaactcaattctgtgcac

SEQ ID NO: 8184 - DNA, 25 bp, Homo sapien
ataaccagatagtaaattaactgtc

SEQ ID NO: 8185 - DNA, 25 bp, Homo sapien
cctctaaatttggtcaaagctgacc

SEQ ID NO: 8186 - DNA, 25 bp, Homo sapien
aacacacagcaataccatacatttt

SEQ ID NO: 8187 - DNA, 25 bp, Homo sapien
tgtgcacctgagagaataaccagat

SEQ ID NO: 8188 - DNA, 25 bp, Homo sapien
gaactgaggagtatggtcaactcaa

SEQ ID NO: 8189 - DNA, 25 bp, Homo sapien
attggaaggacgtacgttaaataca

SEQ ID NO: 8190 - DNA, 25 bp, Homo sapien
atacaggtaaacatcagtattcttc

SEQ ID NO: 8191 - DNA, 25 bp, Homo sapien
catacaatagcagacagaaagggaa

SEQ ID NO: 8192 - DNA, 25 bp, Homo sapien
tacattttagtacagcaaagcaaat

SEQ ID NO: 8193 - DNA, 25 bp, Homo sapien
gagacagcaagtggtcaatcacatt

SEQ ID NO: 8194 - DNA, 25 bp, Homo sapien
cataccaaaatacaacagagacagc

SEQ ID NO: 8195 - DNA, 25 bp, Homo sapien
agagtgccttttcagttgttgttat

SEQ ID NO: 8196 - DNA, 25 bp, Homo sapien
caaaatacaacagagacagcaagtg

SEQ ID NO: 8197 - DNA, 25 bp, Homo sapien
aagctagattattttactggcgaat

SEQ ID NO: 8198 - DNA, 25 bp, Homo sapien
gaaagggaagccagccacaatttag

SEQ ID NO: 8199 - DNA, 25 bp, Homo sapien
ctagataatgcaacaagatggaaag

SEQ ID NO: 8200 - DNA, 25 bp, Homo sapien
agccagccacaatttagagtgcctt

SEQ ID NO: 8201 - DNA, 25 bp, Homo sapien
tgttgaagcttgtagattttggatc

SEQ ID NO: 8202 - DNA, 25 bp, Homo sapien
tgtttgagttttggtagatagcgtt

SEQ ID NO: 8203 - DNA, 25 bp, Homo sapien
gcatcccacaagatttgataagtta

SEQ ID NO: 8204 - DNA, 25 bp, Homo sapien
aaaacatctgagtcttgtgctttcc

SEQ ID NO: 8205 - DNA, 25 bp, Homo sapien
tttcaagaaactggccaatgttatc

SEQ ID NO: 8206 - DNA, 25 bp, Homo sapien
taccaagtttatgggtgtagggctg

SEQ ID NO: 8207 - DNA, 25 bp, Homo sapien
ggtgtagggctgttcatgatattcc

SEQ ID NO: 8208 - DNA, 25 bp, Homo sapien
gatgtaggcccacccagattatatt

SEQ ID NO: 8209 - DNA, 25 bp, Homo sapien
agccatgttaccagtagtgatgccc

SEQ ID NO: 8210 - DNA, 25 bp, Homo sapien
ttttaattgatgtaggcccacccag

SEQ ID NO: 8211 - DNA, 25 bp, Homo sapien
tctgatgtttggaatttgtgtctct

SEQ ID NO: 8212 - DNA, 25 bp, Homo sapien
acataaggtgaacaggaactttgat

SEQ ID NO: 8213 - DNA, 25 bp, Homo sapien
tccaaaggcagtaatgacaataaat

SEQ ID NO: 8214 - DNA, 25 bp, Homo sapien
aaaaattgatgaagctgcatggttt

SEQ ID NO: 8215 - DNA, 25 bp, Homo sapien
ataatacataaggtgaacaggaact

SEQ ID NO: 8216 - DNA, 25 bp, Homo sapien
cttgaagcttggagtatttgcactt

SEQ ID NO: 8217 - DNA, 25 bp, Homo sapien
aatacgatctgaatacagccacacc

SEQ ID NO: 8218 - DNA, 25 bp, Homo sapien
atagaagagctatagaaaataatac

SEQ ID NO: 8219 - DNA, 25 bp, Homo sapien
cagccacaccaaattcgtggtgtat

SEQ ID NO: 8220 - DNA, 25 bp, Homo sapien
cagtagtacccaaagggctgccttt

SEQ ID NO: 8221 - DNA, 25 bp, Homo sapien
catgggaaaggtaacaagtagtaaa

SEQ ID NO: 8222 - DNA, 25 bp, Homo sapien
tttgcactttgcagcagtagtaccc

SEQ ID NO: 8223 - DNA, 25 bp, Homo sapien
tatgcagttgctttttggaaaccat

SEQ ID NO: 8224 - DNA, 25 bp, Homo sapien
aacgcatctcatgtgttaacctgtc

SEQ ID NO: 8225 - DNA, 25 bp, Homo sapien
agaaaactgaaaactgcggtagatt

SEQ ID NO: 8226 - DNA, 25 bp, Homo sapien
taactggacagctcaaatacaaaat

SEQ ID NO: 8227 - DNA, 25 bp, Homo sapien
acaccttgatctaccatcgccggaa

SEQ ID NO: 8228 - DNA, 25 bp, Homo sapien
ccagcaaatgcttctagttccgatt

SEQ ID NO: 8229 - DNA, 25 bp, Homo sapien
gaaaactgcggtagattactcactt

SEQ ID NO: 8230 - DNA, 25 bp, Homo sapien
accatcgccggaaaattgtctctat

SEQ ID NO: 8231 - DNA, 25 bp, Homo sapien
tctaattgtaataactggacagctc

SEQ ID NO: 8232 - DNA, 25 bp, Homo sapien
taacagcactcatggggttaccatc

SEQ ID NO: 8233 - DNA, 25 bp, Homo sapien
ccatcattgtatctgagggtagcca

SEQ ID NO: 8234 - DNA, 25 bp, Homo sapien
aggtattatgttgatgggccactaa

SEQ ID NO: 8235 - DNA, 25 bp, Homo sapien
atagctgaaaattggcaaaatatta

SEQ ID NO: 8236 - DNA, 25 bp, Homo sapien
gggtacataagaagttattcttcca

SEQ ID NO: 8237 - DNA, 25 bp, Homo sapien
tgggccactaatgcttggatgggta

SEQ ID NO: 8238 - DNA, 25 bp, Homo sapien
cggggcgaataggatattcagtgaa

SEQ ID NO: 8239 - DNA, 25 bp, Homo sapien
aaacaaaatgcaagcctttagactt

SEQ ID NO: 8240 - DNA, 25 bp, Homo sapien
tctctaggtattatgttgatgggcc

SEQ ID NO: 8241 - DNA, 25 bp, Homo sapien
ttaaaagcttacgaactgttacata

SEQ ID NO: 8242 - DNA, 25 bp, Homo sapien
gcaagcctttagacttccatgttac

SEQ ID NO: 8243 - DNA, 25 bp, Homo sapien
gcctagggcaggactacaaatctct

SEQ ID NO: 8244 - DNA, 25 bp, Homo sapien
tatccacttacctggacaaatacac

SEQ ID NO: 8245 - DNA, 25 bp, Homo sapien
atcaccagatcttgaatcaggaccc

SEQ ID NO: 8246 - DNA, 25 bp, Homo sapien
ctagacccagggtaatttggagtca

SEQ ID NO: 8247 - DNA, 25 bp, Homo sapien
aatctaggagaactagagcatcgtc

SEQ ID NO: 8248 - DNA, 25 bp, Homo sapien
atgaagtctagagccaagggaactt

SEQ ID NO: 8249 - DNA, 25 bp, Homo sapien
tagtctggaactagtgagtggtaca

SEQ ID NO: 8250 - DNA, 25 bp, Homo sapien
aaccagagagatttgggaaccataa

SEQ ID NO: 8251 - DNA, 25 bp, Homo sapien
tattataagataaggacagggtcgg

SEQ ID NO: 8252 - DNA, 25 bp, Homo sapien
ggtctagaatcagaaggcacttgta

SEQ ID NO: 8253 - DNA, 25 bp, Homo sapien
gaacttacggaatgaggtctagaat

SEQ ID NO: 8254 - DNA, 25 bp, Homo sapien
gtacaggtcatgaggttcagaatct

SEQ ID NO: 8255 - DNA, 25 bp, Homo sapien
tctagaaccagagaaacagcagatc

SEQ ID NO: 8256 - DNA, 25 bp, Homo sapien
agctcatgtctcatttgtccagtgt

SEQ ID NO: 8257 - DNA, 25 bp, Homo sapien
cagtcctctgagctgctgagctcat

SEQ ID NO: 8258 - DNA, 25 bp, Homo sapien
cccgtccatactcgaatgaagatgg

SEQ ID NO: 8259 - DNA, 25 bp, Homo sapien
ggaggccgtgtcaggcaatctaaac

SEQ ID NO: 8260 - DNA, 25 bp, Homo sapien
gtgtcaggcaatctaaacagcagcc

SEQ ID NO: 8261 - DNA, 25 bp, Homo sapien
ccagcacctgagcaacgcctcctct

SEQ ID NO: 8262 - DNA, 25 bp, Homo sapien
gccgtgtcaggcaatctaaacagca

SEQ ID NO: 8263 - DNA, 25 bp, Homo sapien
aggagacgagacaccaggaaagccc

SEQ ID NO: 8264 - DNA, 25 bp, Homo sapien
gcaatctaaacagcagcccaggagg

SEQ ID NO: 8265 - DNA, 25 bp, Homo sapien
aggtcaggggaacagcttccctccc

SEQ ID NO: 8266 - DNA, 25 bp, Homo sapien
ccatactcgaatgaagatggagatc

SEQ ID NO: 8267 - DNA, 25 bp, Homo sapien
aaggaccatcctagttgagttaaag

SEQ ID NO: 8268 - DNA, 25 bp, Homo sapien
tacgagattgtatatgattcagtgc

SEQ ID NO: 8269 - DNA, 25 bp, Homo sapien
tcagggcctgaatgcaggttttgtt

SEQ ID NO: 8270 - DNA, 25 bp, Homo sapien
ctgtgacctattaaaggaggcagga

SEQ ID NO: 8271 - DNA, 25 bp, Homo sapien
aaccaagtttgcacagaaggaccat

SEQ ID NO: 8272 - DNA, 25 bp, Homo sapien
atctcttgagcccacatgaatactg

SEQ ID NO: 8273 - DNA, 25 bp, Homo sapien
acacagccatccaaactacgagatt

SEQ ID NO: 8274 - DNA, 25 bp, Homo sapien
taggcacatgcaagagtcaatcaca

SEQ ID NO: 8275 - DNA, 25 bp, Homo sapien
gctgctgggtaaggtgattgaatct

SEQ ID NO: 8276 - DNA, 25 bp, Homo sapien
gtttggactataggggctaagttca

SEQ ID NO: 8277 - DNA, 25 bp, Homo sapien
caaactgtgagctttggggaatcca

SEQ ID NO: 8278 - DNA, 25 bp, Homo sapien
aagattgagaagcaagattgtgagt

SEQ ID NO: 8279 - DNA, 25 bp, Homo sapien
aatactcaagtattagggttagtga

SEQ ID NO: 8280 - DNA, 25 bp, Homo sapien
tagggttagtgatgttatataaaac

SEQ ID NO: 8281 - DNA, 25 bp, Homo sapien
taagattgagaagcaagattgtgag

SEQ ID NO: 8282 - DNA, 25 bp, Homo sapien
gattaagattgagaagcaagattgt

SEQ ID NO: 8283 - DNA, 25 bp, Homo sapien
actcaagtattagggttagtgatgt

SEQ ID NO: 8284 - DNA, 25 bp, Homo sapien
caagtattagggttagtgatgttat

SEQ ID NO: 8285 - DNA, 25 bp, Homo sapien
tgatgttatataaaacaccaagcac

SEQ ID NO: 8286 - DNA, 25 bp, Homo sapien
gttatataaaacaccaagcacaaat

SEQ ID NO: 8287 - DNA, 25 bp, Homo sapien
caccaagcacaaatagattaagatt

SEQ ID NO: 8288 - DNA, 25 bp, Homo sapien
aaacaccaagcacaaatagattaag

SEQ ID NO: 8289 - DNA, 25 bp, Homo sapien
aatggtgtcccttgaaggctatctg

SEQ ID NO: 8290 - DNA, 25 bp, Homo sapien
catgttgctgtgtggtcatatcacc

SEQ ID NO: 8291 - DNA, 25 bp, Homo sapien
gtcagagggtcaacatgaatttgtg

SEQ ID NO: 8292 - DNA, 25 bp, Homo sapien
aggccactgagcctttcatgagggc

SEQ ID NO: 8293 - DNA, 25 bp, Homo sapien
ataagccagaacttggatatcagat

SEQ ID NO: 8294 - DNA, 25 bp, Homo sapien
acagaagggccaaagtaaatactca

SEQ ID NO: 8295 - DNA, 25 bp, Homo sapien
tcttctgtatgtgtgcgccaggtag

SEQ ID NO: 8296 - DNA, 25 bp, Homo sapien
tggatatcagatgggtcaaaggctt

SEQ ID NO: 8297 - DNA, 25 bp, Homo sapien
caaaggctttcaatgcttaggaggc

SEQ ID NO: 8298 - DNA, 25 bp, Homo sapien
gccagcaaaataggtttcattctga

SEQ ID NO: 8299 - DNA, 25 bp, Homo sapien
tagctctaatcacctgccaaaggcc

SEQ ID NO: 8300 - DNA, 25 bp, Homo sapien
accgcgggttgaacaagcttcatct

SEQ ID NO: 8301 - DNA, 25 bp, Homo sapien
ggtgcagcccgttcgctcacacaaa

SEQ ID NO: 8302 - DNA, 25 bp, Homo sapien
cctaaggggtgagtatcccacggtc

SEQ ID NO: 8303 - DNA, 25 bp, Homo sapien
cgggaacagccagtcggtgcctaac

SEQ ID NO: 8304 - DNA, 25 bp, Homo sapien
aagcgatcaacagctgccggtctgc

SEQ ID NO: 8305 - DNA, 25 bp, Homo sapien
tgagagtgactaggtctaggtgttt

SEQ ID NO: 8306 - DNA, 25 bp, Homo sapien
agctctggttacagaaagctgagag

SEQ ID NO: 8307 - DNA, 25 bp, Homo sapien
ccaggaatctctagacaggatcatt

SEQ ID NO: 8308 - DNA, 25 bp, Homo sapien
tgtatctcgagagagaagcgatcaa

SEQ ID NO: 8309 - DNA, 25 bp, Homo sapien
gtcggtgcctaacgcgagtgtatct

SEQ ID NO: 8310 - DNA, 25 bp, Homo sapien
tctatcggactcagaggacgcgcgc

SEQ ID NO: 8311 - DNA, 25 bp, Homo sapien
cctggcattctaagaggcagtcttg

SEQ ID NO: 8312 - DNA, 25 bp, Homo sapien
tgaacataatttaaggacaggcgcc

SEQ ID NO: 8313 - DNA, 25 bp, Homo sapien
gctctagatgactaatggcatatct

SEQ ID NO: 8314 - DNA, 25 bp, Homo sapien
atcattttagctacaccctcaggtg

SEQ ID NO: 8315 - DNA, 25 bp, Homo sapien
aggcagtcttgttgctctagatgac

SEQ ID NO: 8316 - DNA, 25 bp, Homo sapien
ttctctctagtgtattcccaggcaa

SEQ ID NO: 8317 - DNA, 25 bp, Homo sapien
taacaaaggctacttccaaaatcat

SEQ ID NO: 8318 - DNA, 25 bp, Homo sapien
tgtattcccaggcaaaagtttaagc

SEQ ID NO: 8319 - DNA, 25 bp, Homo sapien
ccctcaggtggttagtgaacataat

SEQ ID NO: 8320 - DNA, 25 bp, Homo sapien
aatttaaggacaggcgcctggcatt

SEQ ID NO: 8321 - DNA, 25 bp, Homo sapien
aaccaaattaaatcgagcttcctta

SEQ ID NO: 8322 - DNA, 25 bp, Homo sapien
ggctgagtgaaatgatgaagaaaca

SEQ ID NO: 8323 - DNA, 25 bp, Homo sapien
tgtggagtgccttcaacaagggttt

SEQ ID NO: 8324 - DNA, 25 bp, Homo sapien
ctgtgggcgtgaaaatctggcaccc

SEQ ID NO: 8325 - DNA, 25 bp, Homo sapien
atatccggagtacatcagagtctgg

SEQ ID NO: 8326 - DNA, 25 bp, Homo sapien
tcacatgctgagacagactcaactt

SEQ ID NO: 8327 - DNA, 25 bp, Homo sapien
acaagggtttttagacacatccatc

SEQ ID NO: 8328 - DNA, 25 bp, Homo sapien
agagagctcagtctgcgtctgctgc

SEQ ID NO: 8329 - DNA, 25 bp, Homo sapien
aggcctagggacctgaaatgctccc

SEQ ID NO: 8330 - DNA, 25 bp, Homo sapien
caccctggagcccacgttggctgtg

SEQ ID NO: 8331 - DNA, 25 bp, Homo sapien
tgtggggcacctaactggctcctga

SEQ ID NO: 8332 - DNA, 25 bp, Homo sapien
ctgggtgtctgtcagtccacgccac

SEQ ID NO: 8333 - DNA, 25 bp, Homo sapien
aaactagaaatagagggcataacct

SEQ ID NO: 8334 - DNA, 25 bp, Homo sapien
ttatagttttggagaaacactcttc

SEQ ID NO: 8335 - DNA, 25 bp, Homo sapien
tatgggaataaaattatcaacctac

SEQ ID NO: 8336 - DNA, 25 bp, Homo sapien
aaagtaccagtcaatgtgatgagtt

SEQ ID NO: 8337 - DNA, 25 bp, Homo sapien
tcatcaaactagaaatagagggcat

SEQ ID NO: 8338 - DNA, 25 bp, Homo sapien
tgatcatcttgacagatgtggaaaa

SEQ ID NO: 8339 - DNA, 25 bp, Homo sapien
agggcataacctgaatgtataattc

SEQ ID NO: 8340 - DNA, 25 bp, Homo sapien
caatgtgatgagttgagaaagtgaa

SEQ ID NO: 8341 - DNA, 25 bp, Homo sapien
taacattgttctaaaagtaccagtc

SEQ ID NO: 8342 - DNA, 25 bp, Homo sapien
gaaataagattacaaatatgggaat

SEQ ID NO: 8343 - DNA, 25 bp, Homo sapien
atcaaataatgtacaatatcagcac

SEQ ID NO: 8344 - DNA, 25 bp, Homo sapien
ttggggtctccctagcctgaatgcc

SEQ ID NO: 8345 - DNA, 25 bp, Homo sapien
atacgggggacaagccagaagctac

SEQ ID NO: 8346 - DNA, 25 bp, Homo sapien
acgtgagatagaacagtgtaaaaaa

SEQ ID NO: 8347 - DNA, 25 bp, Homo sapien
gacttggggtctccctagcctgaat

SEQ ID NO: 8348 - DNA, 25 bp, Homo sapien
agacttcaacgtgagatagaacagt

SEQ ID NO: 8349 - DNA, 25 bp, Homo sapien
tcaacgtgagatagaacagtgtaaa

SEQ ID NO: 8350 - DNA, 25 bp, Homo sapien
ggggacaagccagaagctacttctt

SEQ ID NO: 8351 - DNA, 25 bp, Homo sapien
ccaggaagacttcaacgtgagatag

SEQ ID NO: 8352 - DNA, 25 bp, Homo sapien
ggaagacttcaacgtgagatagaac

SEQ ID NO: 8353 - DNA, 25 bp, Homo sapien
cttcaacgtgagatagaacagtgta

SEQ ID NO: 8354 - DNA, 25 bp, Homo sapien
cctgacttggggtctccctagcctg

SEQ ID NO: 8355 - DNA, 25 bp, Homo sapien
tttggccaaaagtttcgatctagtg

SEQ ID NO: 8356 - DNA, 25 bp, Homo sapien
caaaccttcagtcttttggccaaaa

SEQ ID NO: 8357 - DNA, 25 bp, Homo sapien
atttgttttgtgaacgccctgttaa

SEQ ID NO: 8358 - DNA, 25 bp, Homo sapien
cgatctagtgaggattggatttgtc

SEQ ID NO: 8359 - DNA, 25 bp, Homo sapien
aataacaaaagtcctgtctcccagg

SEQ ID NO: 8360 - DNA, 25 bp, Homo sapien
aaaagtcctgtctcccaggaggaaa

SEQ ID NO: 8361 - DNA, 25 bp, Homo sapien
actacctcgagaatctgctccaacg

SEQ ID NO: 8362 - DNA, 25 bp, Homo sapien
gagaatctgctccaacgatctttcc

SEQ ID NO: 8363 - DNA, 25 bp, Homo sapien
aatagggtatgtcaataacaaaagt

SEQ ID NO: 8364 - DNA, 25 bp, Homo sapien
ttgtcagcttttaatagggtatgtc

SEQ ID NO: 8365 - DNA, 25 bp, Homo sapien
tagtgaggattggatttgtcagctt

SEQ ID NO: 8366 - DNA, 25 bp, Homo sapien
tcaaaatgccttaccatccacttcc

SEQ ID NO: 8367 - DNA, 25 bp, Homo sapien
aactggaacataggaaatgctgaga

SEQ ID NO: 8368 - DNA, 25 bp, Homo sapien
gctataaaactggaacataggaaat

SEQ ID NO: 8369 - DNA, 25 bp, Homo sapien
cttcactatgtgctataaaactgga

SEQ ID NO: 8370 - DNA, 25 bp, Homo sapien
actggaacataggaaatgctgagaa

SEQ ID NO: 8371 - DNA, 25 bp, Homo sapien
gtgctataaaactggaacataggaa

SEQ ID NO: 8372 - DNA, 25 bp, Homo sapien
tgtgctataaaactggaacatagga

SEQ ID NO: 8373 - DNA, 25 bp, Homo sapien
agtcaatattcttcactatgtgcta

SEQ ID NO: 8374 - DNA, 25 bp, Homo sapien
agaaattattggcttggaaatatat

SEQ ID NO: 8375 - DNA, 25 bp, Homo sapien
ctttacacttgctttaccctaacta

SEQ ID NO: 8376 - DNA, 25 bp, Homo sapien
tgctataaaactggaacataggaaa

SEQ ID NO: 8377 - DNA, 25 bp, Homo sapien
aatagttcagggagacaagtttttc

SEQ ID NO: 8378 - DNA, 25 bp, Homo sapien
tctgtacctactggcctaacatggt

SEQ ID NO: 8379 - DNA, 25 bp, Homo sapien
tcagttaagatgtagcctggagatg

SEQ ID NO: 8380 - DNA, 25 bp, Homo sapien
agcaatcgagttcttcctggacagc

SEQ ID NO: 8381 - DNA, 25 bp, Homo sapien
tcctggacagctaaactgccctctt

SEQ ID NO: 8382 - DNA, 25 bp, Homo sapien
ctggagttcaatagttcagggagac

SEQ ID NO: 8383 - DNA, 25 bp, Homo sapien
acctatgctgacataaagagctaat

SEQ ID NO: 8384 - DNA, 25 bp, Homo sapien
agatggaagcctagaactcagttct

SEQ ID NO: 8385 - DNA, 25 bp, Homo sapien
tagccctggttgaagtaatgcaacc

SEQ ID NO: 8386 - DNA, 25 bp, Homo sapien
tatcagtgagagttagcaatcgagt

SEQ ID NO: 8387 - DNA, 25 bp, Homo sapien
gcctaacatggtaaagaaacacgct

SEQ ID NO: 8388 - DNA, 25 bp, Homo sapien
cattgggagtggagattttcacaca

SEQ ID NO: 8389 - DNA, 25 bp, Homo sapien
cactgagggtcaaagctcaacatga

SEQ ID NO: 8390 - DNA, 25 bp, Homo sapien
attttcacacaggagggcataagtt

SEQ ID NO: 8391 - DNA, 25 bp, Homo sapien
gctcaacatgagacttgatgagggc

SEQ ID NO: 8392 - DNA, 25 bp, Homo sapien
gggacggcttggctttatcacaacc

SEQ ID NO: 8393 - DNA, 25 bp, Homo sapien
tatccaactattcaggagggtgccc

SEQ ID NO: 8394 - DNA, 25 bp, Homo sapien
tgatgagggcaaaccaatcacatcc

SEQ ID NO: 8395 - DNA, 25 bp, Homo sapien
accctcagacattgggagtggagat

SEQ ID NO: 8396 - DNA, 25 bp, Homo sapien
acagcaagaatgaatggtatccaac

SEQ ID NO: 8397 - DNA, 25 bp, Homo sapien
accaatccaggcttgacacagcaag

SEQ ID NO: 8398 - DNA, 25 bp, Homo sapien
tgacacagcaagaatgaatggtatc

SEQ ID NO: 8399 - DNA, 25 bp, Homo sapien
ctccaagctatgtgaggaagtcatc

SEQ ID NO: 8400 - DNA, 25 bp, Homo sapien
atacaaagcacagcgcactaaaatg

SEQ ID NO: 8401 - DNA, 25 bp, Homo sapien
caaaaaggctttcagggagcatggt

SEQ ID NO: 8402 - DNA, 25 bp, Homo sapien
actgcccatagaaagaccacttata

SEQ ID NO: 8403 - DNA, 25 bp, Homo sapien
atctaataaatccagcacccacttc

SEQ ID NO: 8404 - DNA, 25 bp, Homo sapien
atggataagaagacaaacttggatc

SEQ ID NO: 8405 - DNA, 25 bp, Homo sapien
agaccacttatacaaagcacagcgc

SEQ ID NO: 8406 - DNA, 25 bp, Homo sapien
gaagtcatcttaatccaggaaccca

SEQ ID NO: 8407 - DNA, 25 bp, Homo sapien
gaaactgcagactccaagctatgtg

SEQ ID NO: 8408 - DNA, 25 bp, Homo sapien
agcatggtgatggataagaagacaa

SEQ ID NO: 8409 - DNA, 25 bp, Homo sapien
tccaggaacccaatatctaataaat

SEQ ID NO: 8410 - DNA, 25 bp, Homo sapien
tcactgggccaactgactcggcctg

SEQ ID NO: 8411 - DNA, 25 bp, Homo sapien
gaaaagatgaaccactcagtatgca

SEQ ID NO: 8412 - DNA, 25 bp, Homo sapien
ggatgagaaggctccactctgcttc

SEQ ID NO: 8413 - DNA, 25 bp, Homo sapien
cagactcagcattaacggaataatc

SEQ ID NO: 8414 - DNA, 25 bp, Homo sapien
ccacagcaggcacttacagagggtg

SEQ ID NO: 8415 - DNA, 25 bp, Homo sapien
cttctgaccaagaaagggcagtttg

SEQ ID NO: 8416 - DNA, 25 bp, Homo sapien
tctgatcattagaaagggcaatgaa

SEQ ID NO: 8417 - DNA, 25 bp, Homo sapien
gtgtggtgagcagtcaccgataatc

SEQ ID NO: 8418 - DNA, 25 bp, Homo sapien
gggtgcaaatcagctcacactcatg

SEQ ID NO: 8419 - DNA, 25 bp, Homo sapien
agtatgcaaactcccatgtggccag

SEQ ID NO: 8420 - DNA, 25 bp, Homo sapien
tcgtttgtgaaacagactcagcatt

SEQ ID NO: 8421 - DNA, 25 bp, Homo sapien
tcactgctgtcaccgggcagtttcc

SEQ ID NO: 8422 - DNA, 25 bp, Homo sapien
ttcaggactgcaaactcacccagca

SEQ ID NO: 8423 - DNA, 25 bp, Homo sapien
ccagtgagaaccaattcagagccaa

SEQ ID NO: 8424 - DNA, 25 bp, Homo sapien
gctgctggagagaccgtctcacctc

SEQ ID NO: 8425 - DNA, 25 bp, Homo sapien
caggacagcaaactcactcactgct

SEQ ID NO: 8426 - DNA, 25 bp, Homo sapien
gctgagagcacctgtatcttggccc

SEQ ID NO: 8427 - DNA, 25 bp, Homo sapien
acacagagagtcatgcaccagccca

SEQ ID NO: 8428 - DNA, 25 bp, Homo sapien
caattcagagccaaatgccaaaccc

SEQ ID NO: 8429 - DNA, 25 bp, Homo sapien
atctgctatggctgctggagagacc

SEQ ID NO: 8430 - DNA, 25 bp, Homo sapien
atgcaccagcccagtgagaaccaat

SEQ ID NO: 8431 - DNA, 25 bp, Homo sapien
cctcgtaggccctgcacaggcaagt

SEQ ID NO: 8432 - DNA, 25 bp, Homo sapien
agagagtgactccaaagttaagaat

SEQ ID NO: 8433 - DNA, 25 bp, Homo sapien
ggggtccagccaaatcatcaaattt

SEQ ID NO: 8434 - DNA, 25 bp, Homo sapien
taagaatgaatgagggcatgctata

SEQ ID NO: 8435 - DNA, 25 bp, Homo sapien
tacagctgtaagaatgaatgagggc

SEQ ID NO: 8436 - DNA, 25 bp, Homo sapien
tactcaaacataagagagtgactcc

SEQ ID NO: 8437 - DNA, 25 bp, Homo sapien
atagtttcatgcctacggttggtgg

SEQ ID NO: 8438 - DNA, 25 bp, Homo sapien
agtatctcagtccttcctgggcctt

SEQ ID NO: 8439 - DNA, 25 bp, Homo sapien
tgacagaagatagtgttacattaga

SEQ ID NO: 8440 - DNA, 25 bp, Homo sapien
aagcaaacagacatgattcttgcta

SEQ ID NO: 8441 - DNA, 25 bp, Homo sapien
cggttggtgggaaagtactcctcta

SEQ ID NO: 8442 - DNA, 25 bp, Homo sapien
gaatgagggcatgctataaagtatt

SEQ ID NO: 8443 - DNA, 25 bp, Homo sapien
gttatcaaaaggacagagggctgtc

SEQ ID NO: 8444 - DNA, 25 bp, Homo sapien
aaactccgccttggcctgccgctac

SEQ ID NO: 8445 - DNA, 25 bp, Homo sapien
ttggagaatcagtgcgaagtgttat

SEQ ID NO: 8446 - DNA, 25 bp, Homo sapien
gagaatcagtgcgaagtgttattga

SEQ ID NO: 8447 - DNA, 25 bp, Homo sapien
aggtcaatgagaccctctagttatc

SEQ ID NO: 8448 - DNA, 25 bp, Homo sapien
tggcttgattcttcagtgccctgct

SEQ ID NO: 8449 - DNA, 25 bp, Homo sapien
aatcagtgcgaagtgttattgagtg

SEQ ID NO: 8450 - DNA, 25 bp, Homo sapien
agacaggcaggctccaaccccatag

SEQ ID NO: 8451 - DNA, 25 bp, Homo sapien
ctagttatcaaaaggacagagggct

SEQ ID NO: 8452 - DNA, 25 bp, Homo sapien
tctagttatcaaaaggacagagggc

SEQ ID NO: 8453 - DNA, 25 bp, Homo sapien
gcttggagaatcagtgcgaagtgtt

SEQ ID NO: 8454 - DNA, 25 bp, Homo sapien
tggcttgattcttcagtgccctgct

SEQ ID NO: 8455 - DNA, 25 bp, Homo sapien
ttctcctggagttgagctgcttagt

SEQ ID NO: 8456 - DNA, 25 bp, Homo sapien
tgggtgtgctcttccgccggcatgc

SEQ ID NO: 8457 - DNA, 25 bp, Homo sapien
tagtggcctagctctcctccgactg

SEQ ID NO: 8458 - DNA, 25 bp, Homo sapien
aggtcaatgagaccctctagttatc

SEQ ID NO: 8459 - DNA, 25 bp, Homo sapien
aggcagcttgtgttaaccaggtcaa

SEQ ID NO: 8460 - DNA, 25 bp, Homo sapien
aatcagtgcgaagtgttattgagtg

SEQ ID NO: 8461 - DNA, 25 bp, Homo sapien
ttcttgcctgggtgtaccagaagaa

SEQ ID NO: 8462 - DNA, 25 bp, Homo sapien
cttggagaatcagtgcgaagtgtta

SEQ ID NO: 8463 - DNA, 25 bp, Homo sapien
tttgccgtctgtaggcagcttgtgt

SEQ ID NO: 8464 - DNA, 25 bp, Homo sapien
ctagttatcaaaaggacagagggct

SEQ ID NO: 8465 - DNA, 25 bp, Homo sapien
ggaggcttcctcacttacatgtcta

SEQ ID NO: 8466 - DNA, 25 bp, Homo sapien
gctgggttccaagggtgagcctcac

SEQ ID NO: 8467 - DNA, 25 bp, Homo sapien
cacttacatgtctagtggttgatgc

SEQ ID NO: 8468 - DNA, 25 bp, Homo sapien
ggtgagcctcacaagacagagaacc

SEQ ID NO: 8469 - DNA, 25 bp, Homo sapien
gtggtacatggctttgtcacagcat

SEQ ID NO: 8470 - DNA, 25 bp, Homo sapien
cctgcatgtggtacatggctttgtc

SEQ ID NO: 8471 - DNA, 25 bp, Homo sapien
gttgatgctgactgatgttggctgt

SEQ ID NO: 8472 - DNA, 25 bp, Homo sapien
ccgaaacacctgcatgtggtacatg

SEQ ID NO: 8473 - DNA, 25 bp, Homo sapien
ttccaagggtgagcctcacaagaca

SEQ ID NO: 8474 - DNA, 25 bp, Homo sapien
catggctttgtcacagcatgatggc

SEQ ID NO: 8475 - DNA, 25 bp, Homo sapien
agcctcacaagacagagaaccaggt

SEQ ID NO: 8476 - DNA, 25 bp, Homo sapien
gtggggacagcatgtctctgctcca

SEQ ID NO: 8477 - DNA, 25 bp, Homo sapien
tgagcatctcctacgtgccaggcac

SEQ ID NO: 8478 - DNA, 25 bp, Homo sapien
cttaaaacaatgacagaaattacat

SEQ ID NO: 8479 - DNA, 25 bp, Homo sapien
aatgtgacaagaggattcatttcct

SEQ ID NO: 8480 - DNA, 25 bp, Homo sapien
tgctccacctaacatcagctgaagg

SEQ ID NO: 8481 - DNA, 25 bp, Homo sapien
caccaggctggactttaggatcaat

SEQ ID NO: 8482 - DNA, 25 bp, Homo sapien
caggttatggataatgccaatgggc

SEQ ID NO: 8483 - DNA, 25 bp, Homo sapien
tgccaatgggcacttaggatgatca

SEQ ID NO: 8484 - DNA, 25 bp, Homo sapien
tctattgctgtgtgacaaactgccc

SEQ ID NO: 8485 - DNA, 25 bp, Homo sapien
ctaacatcagctgaaggtgggaact

SEQ ID NO: 8486 - DNA, 25 bp, Homo sapien
aggggcatatgagctgtgttccagt

SEQ ID NO: 8487 - DNA, 25 bp, Homo sapien
gactcagtgtagatctctatgtgta

SEQ ID NO: 8488 - DNA, 25 bp, Homo sapien
agacactgtgtgtatctctagataa

SEQ ID NO: 8489 - DNA, 25 bp, Homo sapien
atgcaccacgttgaaaagactcagt

SEQ ID NO: 8490 - DNA, 25 bp, Homo sapien
ttgaaaagactcagtgtagatctct

SEQ ID NO: 8491 - DNA, 25 bp, Homo sapien
tagataagaagatatgcaccacgtt

SEQ ID NO: 8492 - DNA, 25 bp, Homo sapien
cacgcgtccggtggagacactgtgt

SEQ ID NO: 8493 - DNA, 25 bp, Homo sapien
aagatatgcaccacgttgaaaagac

SEQ ID NO: 8494 - DNA, 25 bp, Homo sapien
gatatgcaccacgttgaaaagactc

SEQ ID NO: 8495 - DNA, 25 bp, Homo sapien
tccggtggagacactgtgtgtatct

SEQ ID NO: 8496 - DNA, 25 bp, Homo sapien
taagaagatatgcaccacgttgaaa

SEQ ID NO: 8497 - DNA, 25 bp, Homo sapien
acgttgaaaagactcagtgtagatc

SEQ ID NO: 8498 - DNA, 25 bp, Homo sapien
cttctgagagtttctttaggcaatt

SEQ ID NO: 8499 - DNA, 25 bp, Homo sapien
gtacatagtgacattgcaatacaca

SEQ ID NO: 8500 - DNA, 25 bp, Homo sapien
atgatatgaaaaggtctacagtgct

SEQ ID NO: 8501 - DNA, 25 bp, Homo sapien
accaaaatgatatgaaaaggtctac

SEQ ID NO: 8502 - DNA, 25 bp, Homo sapien
aaggtctacagtgcttctactcctg

SEQ ID NO: 8503 - DNA, 25 bp, Homo sapien
tcttttgaatccttctgagagtttc

SEQ ID NO: 8504 - DNA, 25 bp, Homo sapien
atacagtgatcagattagggtaatt

SEQ ID NO: 8505 - DNA, 25 bp, Homo sapien
cttgtttggtatggatcttttgaat

SEQ ID NO: 8506 - DNA, 25 bp, Homo sapien
agagctatagaacactacaacttaa

SEQ ID NO: 8507 - DNA, 25 bp, Homo sapien
attaggtaacctactcatgtaattt

SEQ ID NO: 8508 - DNA, 25 bp, Homo sapien
tacacatatgcaaaaggaatcatac

SEQ ID NO: 8509 - DNA, 25 bp, Homo sapien
tatgcctctcaacgcttaagtacaa

SEQ ID NO: 8510 - DNA, 25 bp, Homo sapien
ttaggaattaccactgtccatacaa

SEQ ID NO: 8511 - DNA, 25 bp, Homo sapien
taaatatatgcctctcaacgcttaa

SEQ ID NO: 8512 - DNA, 25 bp, Homo sapien
tcttaggaattaccactgtccatac

SEQ ID NO: 8513 - DNA, 25 bp, Homo sapien
tgcctctcaacgcttaagtacaatt

SEQ ID NO: 8514 - DNA, 25 bp, Homo sapien
atacaaagtgtacttgacttgcatt

SEQ ID NO: 8515 - DNA, 25 bp, Homo sapien
ttccttcttaggaattaccactgtc

SEQ ID NO: 8516 - DNA, 25 bp, Homo sapien
tatatgcctctcaacgcttaagtac

SEQ ID NO: 8517 - DNA, 25 bp, Homo sapien
cttcttaggaattaccactgtccat

SEQ ID NO: 8518 - DNA, 25 bp, Homo sapien
ggaattaccactgtccatacaaagt

SEQ ID NO: 8519 - DNA, 25 bp, Homo sapien
ttaccactgtccatacaaagtgtac

SEQ ID NO: 8520 - DNA, 25 bp, Homo sapien
gggacctcccagatacaccaatata

SEQ ID NO: 8521 - DNA, 25 bp, Homo sapien
gagacacatggacattcacagacac

SEQ ID NO: 8522 - DNA, 25 bp, Homo sapien
gtcccagaggtagtaacagactatc

SEQ ID NO: 8523 - DNA, 25 bp, Homo sapien
cccacagaattacccagactttgtc

SEQ ID NO: 8524 - DNA, 25 bp, Homo sapien
aacagggaccaccactgagacacat

SEQ ID NO: 8525 - DNA, 25 bp, Homo sapien
attaataactctgagcctgctaggc

SEQ ID NO: 8526 - DNA, 25 bp, Homo sapien
agcacactcacgagatgagagtccc

SEQ ID NO: 8527 - DNA, 25 bp, Homo sapien
ctgtgcagtgagacacatggacatt

SEQ ID NO: 8528 - DNA, 25 bp, Homo sapien
tatcccacagacacacatagtccag

SEQ ID NO: 8529 - DNA, 25 bp, Homo sapien
tgagacacatgggacctcccagata

SEQ ID NO: 8530 - DNA, 25 bp, Homo sapien
tcactaggaaaaacggttggacaca

SEQ ID NO: 8531 - DNA, 25 bp, Homo sapien
gccagtacctccctcatttgtgttt

SEQ ID NO: 8532 - DNA, 25 bp, Homo sapien
agaagccagtacctccctcatttgt

SEQ ID NO: 8533 - DNA, 25 bp, Homo sapien
acaacttaagaaccgtgaagatgtg

SEQ ID NO: 8534 - DNA, 25 bp, Homo sapien
gaagccagtacctccctcatttgtg

SEQ ID NO: 8535 - DNA, 25 bp, Homo sapien
gcagaagccagtacctccctcattt

SEQ ID NO: 8536 - DNA, 25 bp, Homo sapien
gtgctgtttttaagtagagtggtta

SEQ ID NO: 8537 - DNA, 25 bp, Homo sapien
cttaagaaccgtgaagatgtgggca

SEQ ID NO: 8538 - DNA, 25 bp, Homo sapien
cagaagccagtacctccctcatttg

SEQ ID NO: 8539 - DNA, 25 bp, Homo sapien
ttagagcaacaacttaagaaccgtg

SEQ ID NO: 8540 - DNA, 25 bp, Homo sapien
tggcgttagagcaacaacttaagaa

SEQ ID NO: 8541 - DNA, 25 bp, Homo sapien
aagccagtacctccctcatttgtgt

SEQ ID NO: 8542 - DNA, 25 bp, Homo sapien
ttgatactgccatgtgtaaacattc

SEQ ID NO: 8543 - DNA, 25 bp, Homo sapien
caagtaggaactaaactgccaaaag

SEQ ID NO: 8544 - DNA, 25 bp, Homo sapien
attgagaaatcaaatgtagtacctc

SEQ ID NO: 8545 - DNA, 25 bp, Homo sapien
aaagggtctattacatgtgaatctc

SEQ ID NO: 8546 - DNA, 25 bp, Homo sapien
ttgttaacaatgtgtactgccatcc

SEQ ID NO: 8547 - DNA, 25 bp, Homo sapien
aaagaggaattgttaacaagtagga

SEQ ID NO: 8548 - DNA, 25 bp, Homo sapien
aaacaaactgagaaattgagaaatc

SEQ ID NO: 8549 - DNA, 25 bp, Homo sapien
tgtgtactgccatccaaaaatgaac

SEQ ID NO: 8550 - DNA, 25 bp, Homo sapien
cagtggttgctgtttgtattgaaaa

SEQ ID NO: 8551 - DNA, 25 bp, Homo sapien
ctagagtcagtcatcacatacacaa

SEQ ID NO: 8552 - DNA, 25 bp, Homo sapien
ttttccataatgactagagtcagtc

SEQ ID NO: 8553 - DNA, 25 bp, Homo sapien
aggggataaataggattaagtgctc

SEQ ID NO: 8554 - DNA, 25 bp, Homo sapien
gtgctctaaagaggattcccagccc

SEQ ID NO: 8555 - DNA, 25 bp, Homo sapien
atccaagtccgtgagagtaggttca

SEQ ID NO: 8556 - DNA, 25 bp, Homo sapien
tcatagtacacgctgtggttacgtc

SEQ ID NO: 8557 - DNA, 25 bp, Homo sapien
ctgcaaaggaggttcaaacactctg

SEQ ID NO: 8558 - DNA, 25 bp, Homo sapien
gtgagagtaggttcaacccaccctc

SEQ ID NO: 8559 - DNA, 25 bp, Homo sapien
aagtgtgcgcactggatccaagtcc

SEQ ID NO: 8560 - DNA, 25 bp, Homo sapien
taacccagtctcagagctgattggc

SEQ ID NO: 8561 - DNA, 25 bp, Homo sapien
ctctgtgggccagtaatgccacatt

SEQ ID NO: 8562 - DNA, 25 bp, Homo sapien
ccagcacgcacattccaggggataa

SEQ ID NO: 8563 - DNA, 25 bp, Homo sapien
ggagagcccttttccgcaggcaagt

SEQ ID NO: 8564 - DNA, 25 bp, Homo sapien
gttccccaagcaactcttacgtgag

SEQ ID NO: 8565 - DNA, 25 bp, Homo sapien
gcaactcttacgtgaggccagattt

SEQ ID NO: 8566 - DNA, 25 bp, Homo sapien
agcaactcttacgtgaggccagatt

SEQ ID NO: 8567 - DNA, 25 bp, Homo sapien
aagcaactcttacgtgaggccagat

SEQ ID NO: 8568 - DNA, 25 bp, Homo sapien
ctgtattttagagaagttccccaag

SEQ ID NO: 8569 - DNA, 25 bp, Homo sapien
gtggctgaaatctactgaatcaaaa

SEQ ID NO: 8570 - DNA, 25 bp, Homo sapien
aagtggctgaaatctactgaatcaa

SEQ ID NO: 8571 - DNA, 25 bp, Homo sapien
ccaagcaactcttacgtgaggccag

SEQ ID NO: 8572 - DNA, 25 bp, Homo sapien
agtggctgaaatctactgaatcaaa

SEQ ID NO: 8573 - DNA, 25 bp, Homo sapien
caagcaactcttacgtgaggccaga

SEQ ID NO: 8574 - DNA, 25 bp, Homo sapien
cccaagcaactcttacgtgaggcca

SEQ ID NO: 8575 - DNA, 25 bp, Homo sapien
gattgtcatcaacaagcagagagaa

SEQ ID NO: 8576 - DNA, 25 bp, Homo sapien
aaggatcttgtttagggctttgacc

SEQ ID NO: 8577 - DNA, 25 bp, Homo sapien
gaaggacagtgttcagattgtcatc

SEQ ID NO: 8578 - DNA, 25 bp, Homo sapien
tagggaagttgccttgagtacaaaa

SEQ ID NO: 8579 - DNA, 25 bp, Homo sapien
aagcagagagaacaaagaggtacca

SEQ ID NO: 8580 - DNA, 25 bp, Homo sapien
gcgagataaatagcagaaattgtgc

SEQ ID NO: 8581 - DNA, 25 bp, Homo sapien
tgtggcagacagcacagtctgaatt

SEQ ID NO: 8582 - DNA, 25 bp, Homo sapien
ttgacctccattgaaggacagtgtt

SEQ ID NO: 8583 - DNA, 25 bp, Homo sapien
gattgcaaaggttgtggctgataca

SEQ ID NO: 8584 - DNA, 25 bp, Homo sapien
acctgatggagaatctatggattgc

SEQ ID NO: 8585 - DNA, 25 bp, Homo sapien
aagagaagagggctaaccaatagca

SEQ ID NO: 8586 - DNA, 25 bp, Homo sapien
tctgtcaggaggtacttcatctttc

SEQ ID NO: 8587 - DNA, 25 bp, Homo sapien
tcagttcagactgagtcctagtctc

SEQ ID NO: 8588 - DNA, 25 bp, Homo sapien
aggttacaacaggtagttttagcaa

SEQ ID NO: 8589 - DNA, 25 bp, Homo sapien
cattttgttcaataggccataatct

SEQ ID NO: 8590 - DNA, 25 bp, Homo sapien
tatgtctttgtggactcccagtttc

SEQ ID NO: 8591 - DNA, 25 bp, Homo sapien
ctgtgtgccctgagtgcctttttcc

SEQ ID NO: 8592 - DNA, 25 bp, Homo sapien
tagcaaacacatacggtgtgtgatc

SEQ ID NO: 8593 - DNA, 25 bp, Homo sapien
ttagcaactaggtttgtagagaatt

SEQ ID NO: 8594 - DNA, 25 bp, Homo sapien
gtcttgaataaaatagccattgtcc

SEQ ID NO: 8595 - DNA, 25 bp, Homo sapien
ttcttgctctgtcaggaggtacttc

SEQ ID NO: 8596 - DNA, 25 bp, Homo sapien
tttgggtaaagccagttagcaaaca

SEQ ID NO: 8597 - DNA, 25 bp, Homo sapien
actgaaatatcactttgtatcccac

SEQ ID NO: 8598 - DNA, 25 bp, Homo sapien
ggtgatggatatgctgattactgtg

SEQ ID NO: 8599 - DNA, 25 bp, Homo sapien
ggagaggttgatacaaaattgcagc

SEQ ID NO: 8600 - DNA, 25 bp, Homo sapien
ttttaagttgtccatggttgcatac

SEQ ID NO: 8601 - DNA, 25 bp, Homo sapien
tgcagctcaataagttctagtgctc

SEQ ID NO: 8602 - DNA, 25 bp, Homo sapien
agtgctctgtagtatttcaaggtaa

SEQ ID NO: 8603 - DNA, 25 bp, Homo sapien
atggttgcatacaaatgagtggtac

SEQ ID NO: 8604 - DNA, 25 bp, Homo sapien
acacgttgtatacatgtactgaaat

SEQ ID NO: 8605 - DNA, 25 bp, Homo sapien
tgcatacaaatgagtggtacacata

SEQ ID NO: 8606 - DNA, 25 bp, Homo sapien
tgataaacatctgaggtgatggata

SEQ ID NO: 8607 - DNA, 25 bp, Homo sapien
gattactgtgctttgatcattacac

SEQ ID NO: 8608 - DNA, 25 bp, Homo sapien
gtctggtctctttcacttagtgtaa

SEQ ID NO: 8609 - DNA, 25 bp, Homo sapien
caccttatctctaatgtcacagaag

SEQ ID NO: 8610 - DNA, 25 bp, Homo sapien
tctgttcctgtggtttcaccttatc

SEQ ID NO: 8611 - DNA, 25 bp, Homo sapien
tgagattgatccaagttattgcatg

SEQ ID NO: 8612 - DNA, 25 bp, Homo sapien
agtgtaatgcatttgagattgatcc

SEQ ID NO: 8613 - DNA, 25 bp, Homo sapien
gaaggtaggctttaagtctggtctc

SEQ ID NO: 8614 - DNA, 25 bp, Homo sapien
gtcacagaaggtaggctttaagtct

SEQ ID NO: 8615 - DNA, 25 bp, Homo sapien
tttcaatgatggtcaggattctgtt

SEQ ID NO: 8616 - DNA, 25 bp, Homo sapien
attgcatgtattaatagtccactcc

SEQ ID NO: 8617 - DNA, 25 bp, Homo sapien
ccttttcaatgatggtcaggattct

SEQ ID NO: 8618 - DNA, 25 bp, Homo sapien
ggcaacactaatatgttttctgttc

SEQ ID NO: 8619 - DNA, 25 bp, Homo sapien
gaaatgcatacagtcatgtgggcac

SEQ ID NO: 8620 - DNA, 25 bp, Homo sapien
tatgtgcagtgaagtgcacccttat

SEQ ID NO: 8621 - DNA, 25 bp, Homo sapien
atgtgggcactaacacaatcaagat

SEQ ID NO: 8622 - DNA, 25 bp, Homo sapien
ttttgctcctggcaacactaatatg

SEQ ID NO: 8623 - DNA, 25 bp, Homo sapien
catgattcctgtcccgagatttctt

SEQ ID NO: 8624 - DNA, 25 bp, Homo sapien
tctgtgaattatgagaaatgcatac

SEQ ID NO: 8625 - DNA, 25 bp, Homo sapien
tacaaggataatacaaaaatccatg

SEQ ID NO: 8626 - DNA, 25 bp, Homo sapien
acatagtaggcactcgacacatact

SEQ ID NO: 8627 - DNA, 25 bp, Homo sapien
tggaaacaaccatcaaatacaagga

SEQ ID NO: 8628 - DNA, 25 bp, Homo sapien
ttaccattgaacctacagtgcccag

SEQ ID NO: 8629 - DNA, 25 bp, Homo sapien
ctcgacacatacttgttaaaggaat

SEQ ID NO: 8630 - DNA, 25 bp, Homo sapien
agtaactcgaggagcagtttcgacc

SEQ ID NO: 8631 - DNA, 25 bp, Homo sapien
ggtcgaaactgctcctcgagttact

SEQ ID NO: 8632 - DNA, 25 bp, Homo sapien
atttaaataatgtgtgccctgtgag

SEQ ID NO: 8633 - DNA, 25 bp, Homo sapien
ttagtcaattatgtacaagtaaaat

SEQ ID NO: 8634 - DNA, 25 bp, Homo sapien
gtaagactatgacgacaatggtcgg

SEQ ID NO: 8635 - DNA, 25 bp, Homo sapien
tttgagattctcagtgttgcacatg

SEQ ID NO: 8636 - DNA, 25 bp, Homo sapien
tgtgccctgtgaggatttatcccac

SEQ ID NO: 8637 - DNA, 25 bp, Homo sapien
ttaaataatgtgtgccctgtgagga

SEQ ID NO: 8638 - DNA, 25 bp, Homo sapien
tcataaatgtttgaatgtacaaccc

SEQ ID NO: 8639 - DNA, 25 bp, Homo sapien
tcagtgttgcacatggtcataaatg

SEQ ID NO: 8640 - DNA, 25 bp, Homo sapien
tatgacgacaatggtcggcagaaca

SEQ ID NO: 8641 - DNA, 25 bp, Homo sapien
actgtcggtttgagattctcagtgt

SEQ ID NO: 8642 - DNA, 25 bp, Homo sapien
aatgtgtgccctgtgaggatttatc

SEQ ID NO: 8643 - DNA, 25 bp, Homo sapien
aaccacaaggttacagaagaaattg

SEQ ID NO: 8644 - DNA, 25 bp, Homo sapien
tcggcagaacaaaaggttgacaatt

SEQ ID NO: 8645 - DNA, 25 bp, Homo sapien
aatggcatgcatatacaagacctca

SEQ ID NO: 8646 - DNA, 25 bp, Homo sapien
tatgccctctgcaagtaagactatg

SEQ ID NO: 8647 - DNA, 25 bp, Homo sapien
gggtctgaaagagccagacaataaa

SEQ ID NO: 8648 - DNA, 25 bp, Homo sapien
gtcagaattgcagttgctggggtct

SEQ ID NO: 8649 - DNA, 25 bp, Homo sapien
actgtagccaacacctaaaggaaag

SEQ ID NO: 8650 - DNA, 25 bp, Homo sapien
tccaagtttgggataactgtagcca

SEQ ID NO: 8651 - DNA, 25 bp, Homo sapien
tttagtttacatggggctcataccc

SEQ ID NO: 8652 - DNA, 25 bp, Homo sapien
cttgccttgggtcacagagcacact

SEQ ID NO: 8653 - DNA, 25 bp, Homo sapien
tgatggtatgtgaccaatggcatgc

SEQ ID NO: 8654 - DNA, 25 bp, Homo sapien
catgaggtgagtacaattttgtccc

SEQ ID NO: 8655 - DNA, 25 bp, Homo sapien
aatcttgtatagacatgtaacgtca

SEQ ID NO: 8656 - DNA, 25 bp, Homo sapien
ctccagggtgagataaatacggctc

SEQ ID NO: 8657 - DNA, 25 bp, Homo sapien
tcagtaagagttcatgaggtgagta

SEQ ID NO: 8658 - DNA, 25 bp, Homo sapien
cctgccgaaggacagtgacagctct

SEQ ID NO: 8659 - DNA, 25 bp, Homo sapien
ttgcagatttaagcagctccagggt

SEQ ID NO: 8660 - DNA, 25 bp, Homo sapien
acagtgacagctctactagtctcgt

SEQ ID NO: 8661 - DNA, 25 bp, Homo sapien
actagtctcgtctggagctttctaa

SEQ ID NO: 8662 - DNA, 25 bp, Homo sapien
tacacacctgccgaaggacagtgac

SEQ ID NO: 8663 - DNA, 25 bp, Homo sapien
acagacaggctacacacctgccgaa

SEQ ID NO: 8664 - DNA, 25 bp, Homo sapien
gtgagataaatacggctctcgtgcc

SEQ ID NO: 8665 - DNA, 25 bp, Homo sapien
tgtaagtcacacacgcccacgaagc

SEQ ID NO: 8666 - DNA, 25 bp, Homo sapien
agttgcctgtttggtcgagtgtctc

SEQ ID NO: 8667 - DNA, 25 bp, Homo sapien
gagtgcacagccctgtgtaagtcac

SEQ ID NO: 8668 - DNA, 25 bp, Homo sapien
tgtagcattttaatcagagccggtc

SEQ ID NO: 8669 - DNA, 25 bp, Homo sapien
cgggattcttctgagtgcacagccc

SEQ ID NO: 8670 - DNA, 25 bp, Homo sapien
cgagtgtctcttccttgagggcaag

SEQ ID NO: 8671 - DNA, 25 bp, Homo sapien
tctctgtggagtttcttcagccttc

SEQ ID NO: 8672 - DNA, 25 bp, Homo sapien
ccacgaagccatcctgtttccagtt

SEQ ID NO: 8673 - DNA, 25 bp, Homo sapien
gatggcagctgcagagcctaagtca

SEQ ID NO: 8674 - DNA, 25 bp, Homo sapien
atcagagccggtcacataatttgta

SEQ ID NO: 8675 - DNA, 25 bp, Homo sapien
gagcctaagtcagtcacgggattct

SEQ ID NO: 8676 - DNA, 25 bp, Homo sapien
tgtcacagagtcaggatatgagcat

SEQ ID NO: 8677 - DNA, 25 bp, Homo sapien
agtcaggatatgagcatggccttta

SEQ ID NO: 8678 - DNA, 25 bp, Homo sapien
agcatggcctttaaaaaagggtgga

SEQ ID NO: 8679 - DNA, 25 bp, Homo sapien
tgaaagtgtcacagagtcaggatat

SEQ ID NO: 8680 - DNA, 25 bp, Homo sapien
ggacatgtacaagtgccaaggaaca

SEQ ID NO: 8681 - DNA, 25 bp, Homo sapien
aaagtaggacatgtacaagtgccaa

SEQ ID NO: 8682 - DNA, 25 bp, Homo sapien
gtacaagtgccaaggaacagtttga

SEQ ID NO: 8683 - DNA, 25 bp, Homo sapien
caggggactgaaagtgtcacagagt

SEQ ID NO: 8684 - DNA, 25 bp, Homo sapien
gtggatagggtttctggaatacaac

SEQ ID NO: 8685 - DNA, 25 bp, Homo sapien
atacaacgaagaaagtaggacatgt

SEQ ID NO: 8686 - DNA, 25 bp, Homo sapien
tctggaatacaacgaagaaagtagg

SEQ ID NO: 8687 - DNA, 25 bp, Homo sapien
tcaaatgatataagctatttctacc

SEQ ID NO: 8688 - DNA, 25 bp, Homo sapien
aggaaattacaaaactaagagagat

SEQ ID NO: 8689 - DNA, 25 bp, Homo sapien
aaactaagagagataaaatttcaaa

SEQ ID NO: 8690 - DNA, 25 bp, Homo sapien
tatatacaattggttctattcttgc

SEQ ID NO: 8691 - DNA, 25 bp, Homo sapien
atggagtgttataatctcacaacag

SEQ ID NO: 8692 - DNA, 25 bp, Homo sapien
gaaagtaagacttctgattgcaggc

SEQ ID NO: 8693 - DNA, 25 bp, Homo sapien
aaatgacctaagtaaggtaatagga

SEQ ID NO: 8694 - DNA, 25 bp, Homo sapien
ctaagtaaggtaataggaaattaca

SEQ ID NO: 8695 - DNA, 25 bp, Homo sapien
ctcacaacagaacctatatatacaa

SEQ ID NO: 8696 - DNA, 25 bp, Homo sapien
gattgcaggcaatttggttatggag

SEQ ID NO: 8697 - DNA, 25 bp, Homo sapien
tatttctacctgtaatgaaagtaag

SEQ ID NO: 8698 - DNA, 25 bp, Homo sapien
tccaaaaagacataaggctacaaat

SEQ ID NO: 8699 - DNA, 25 bp, Homo sapien
atctggaaagtattgagaaatgatt

SEQ ID NO: 8700 - DNA, 25 bp, Homo sapien
ctacaaaaattctatctggaaagta

SEQ ID NO: 8701 - DNA, 25 bp, Homo sapien
tcccaggcgacatgaaaccctctta

SEQ ID NO: 8702 - DNA, 25 bp, Homo sapien
agaaacttaagctaaaagttctaca

SEQ ID NO: 8703 - DNA, 25 bp, Homo sapien
ctttcacattcgatagtaccctttg

SEQ ID NO: 8704 - DNA, 25 bp, Homo sapien
atattcccaggcgacatgaaaccct

SEQ ID NO: 8705 - DNA, 25 bp, Homo sapien
cttgaactatattcccaggcgacat

SEQ ID NO: 8706 - DNA, 25 bp, Homo sapien
tagtgagcagtcattcaaaactttt

SEQ ID NO: 8707 - DNA, 25 bp, Homo sapien
aaagacataaggctacaaatacatt

SEQ ID NO: 8708 - DNA, 25 bp, Homo sapien
aaaattttagtgagcagtcattcaa

SEQ ID NO: 8709 - DNA, 25 bp, Homo sapien
tcagcgttgagagggcagtgccacc

SEQ ID NO: 8710 - DNA, 25 bp, Homo sapien
tgatagagtctgtgctggcctcaga

SEQ ID NO: 8711 - DNA, 25 bp, Homo sapien
ctgtggccctcaggaacatctgtca

SEQ ID NO: 8712 - DNA, 25 bp, Homo sapien
agaaaggccttcctgaaccagctga

SEQ ID NO: 8713 - DNA, 25 bp, Homo sapien
agatccacacataggtctgtctcgt

SEQ ID NO: 8714 - DNA, 25 bp, Homo sapien
atcccttgaaggtccatggtgtgat

SEQ ID NO: 8715 - DNA, 25 bp, Homo sapien
acgaggccctcggttattcccagtc

SEQ ID NO: 8716 - DNA, 25 bp, Homo sapien
tccatggtgtgatagagtctgtgct

SEQ ID NO: 8717 - DNA, 25 bp, Homo sapien
ttcctgaaccagctgacaggtcagc

SEQ ID NO: 8718 - DNA, 25 bp, Homo sapien
aaatgccaccaaccttccgtcaggt

SEQ ID NO: 8719 - DNA, 25 bp, Homo sapien
tgttttgccaagagagctatccctt

SEQ ID NO: 8720 - DNA, 25 bp, Homo sapien
gatacacttgtggttggcagggcat

SEQ ID NO: 8721 - DNA, 25 bp, Homo sapien
ctctaggtgggaagcataattttaa

SEQ ID NO: 8722 - DNA, 25 bp, Homo sapien
caaagtattctctaggtgggaagca

SEQ ID NO: 8723 - DNA, 25 bp, Homo sapien
gaaaggtttcctcagatttgaacta

SEQ ID NO: 8724 - DNA, 25 bp, Homo sapien
atattagcccagtgtggtggggcac

SEQ ID NO: 8725 - DNA, 25 bp, Homo sapien
gtggggtatgatggattaagataca

SEQ ID NO: 8726 - DNA, 25 bp, Homo sapien
aagcgttccgtgtgtcaaagtattc

SEQ ID NO: 8727 - DNA, 25 bp, Homo sapien
aatgtacaagaagaaaggtttcctc

SEQ ID NO: 8728 - DNA, 25 bp, Homo sapien
tatttttaaataaggagtgatctcc

SEQ ID NO: 8729 - DNA, 25 bp, Homo sapien
aaataaggagtgatctccaacagag

SEQ ID NO: 8730 - DNA, 25 bp, Homo sapien
ctccaacagagaaagtcaggcagtg

SEQ ID NO: 8731 - DNA, 25 bp, Homo sapien
caaaaaggataagcatgccatgatc

SEQ ID NO: 8732 - DNA, 25 bp, Homo sapien
aacttggattcgtacctgggattta

SEQ ID NO: 8733 - DNA, 25 bp, Homo sapien
tttgccatggcgtttagctgccctt

SEQ ID NO: 8734 - DNA, 25 bp, Homo sapien
ataaataacagtcatggaaattgca

SEQ ID NO: 8735 - DNA, 25 bp, Homo sapien
cagcagctataggagccattgcagt

SEQ ID NO: 8736 - DNA, 25 bp, Homo sapien
tggaatgtagactacctctcagggt

SEQ ID NO: 8737 - DNA, 25 bp, Homo sapien
atggaaattgcaatgaaaagctctg

SEQ ID NO: 8738 - DNA, 25 bp, Homo sapien
actgtggctcagagtgatccttaga

SEQ ID NO: 8739 - DNA, 25 bp, Homo sapien
ctctcagggttggtgaaaacaaaaa

SEQ ID NO: 8740 - DNA, 25 bp, Homo sapien
ttaagatagtaaggctgacttgatt

SEQ ID NO: 8741 - DNA, 25 bp, Homo sapien
tgcctcatagaatgcagcccttcta

SEQ ID NO: 8742 - DNA, 25 bp, Homo sapien
gtagtgaccctaagtgatgagattc

SEQ ID NO: 8743 - DNA, 25 bp, Homo sapien
atttccggtagtgaccctaagtgat

SEQ ID NO: 8744 - DNA, 25 bp, Homo sapien
ttatgatgtttacatgggcggaggg

SEQ ID NO: 8745 - DNA, 25 bp, Homo sapien
aacctagggacggagaggactctcc

SEQ ID NO: 8746 - DNA, 25 bp, Homo sapien
ttgccggcgtcttgaggggaaccta

SEQ ID NO: 8747 - DNA, 25 bp, Homo sapien
gattctatcgctcccagatcaggcc

SEQ ID NO: 8748 - DNA, 25 bp, Homo sapien
cagacccggtgtgacgttaagggac

SEQ ID NO: 8749 - DNA, 25 bp, Homo sapien
taagtgatgagattctatcgctccc

SEQ ID NO: 8750 - DNA, 25 bp, Homo sapien
aggccgcagctgtttggctcccagc

SEQ ID NO: 8751 - DNA, 25 bp, Homo sapien
ttggctcccagcagacccggtgtga

SEQ ID NO: 8752 - DNA, 25 bp, Homo sapien
ctgtttggctcccagcagacccggt

SEQ ID NO: 8753 - DNA, 25 bp, Homo sapien
tgtaagtataggtacgggagaagat

SEQ ID NO: 8754 - DNA, 25 bp, Homo sapien
atcttctcccgtacctatacttaca

SEQ ID NO: 8755 - DNA, 25 bp, Homo sapien
gggcaacggccatattaagacacag

SEQ ID NO: 8756 - DNA, 25 bp, Homo sapien
atcatggaaccttacctgtgtgaga

SEQ ID NO: 8757 - DNA, 25 bp, Homo sapien
taagacacagtgacaaagcagccat

SEQ ID NO: 8758 - DNA, 25 bp, Homo sapien
cctgacttgactataggaagtttta

SEQ ID NO: 8759 - DNA, 25 bp, Homo sapien
gtatttggagataggacctctgaaa

SEQ ID NO: 8760 - DNA, 25 bp, Homo sapien
taattgactcctgacttgactatag

SEQ ID NO: 8761 - DNA, 25 bp, Homo sapien
gagataggacctctgaaaagttacc

SEQ ID NO: 8762 - DNA, 25 bp, Homo sapien
ataggaagttttatgtcacacagaa

SEQ ID NO: 8763 - DNA, 25 bp, Homo sapien
ccttacctgtgtgagatgtagataa

SEQ ID NO: 8764 - DNA, 25 bp, Homo sapien
gacacagaaaacacagggcaacggc

SEQ ID NO: 8765 - DNA, 25 bp, Homo sapien
acagtgacaaagcagccatctacaa

SEQ ID NO: 8766 - DNA, 25 bp, Homo sapien
cagaagccacaaaagtgacatccca

SEQ ID NO: 8767 - DNA, 25 bp, Homo sapien
atggatgttggcagcgtcagaagat

SEQ ID NO: 8768 - DNA, 25 bp, Homo sapien
ttggcagcgtcagaagatccatttc

SEQ ID NO: 8769 - DNA, 25 bp, Homo sapien
ttctgttcattagaaaagcctcaat

SEQ ID NO: 8770 - DNA, 25 bp, Homo sapien
tggagctgaggcaccttcaagtttc

SEQ ID NO: 8771 - DNA, 25 bp, Homo sapien
caagggcttgggataccaggatgca

SEQ ID NO: 8772 - DNA, 25 bp, Homo sapien
ggtcagaaatccagagtggcttagc

SEQ ID NO: 8773 - DNA, 25 bp, Homo sapien
tgagggtctctcatgagctgccatc

SEQ ID NO: 8774 - DNA, 25 bp, Homo sapien
agcccgccctcaagcggagtagatc

SEQ ID NO: 8775 - DNA, 25 bp, Homo sapien
gagagagcgagcacccaagacagaa

SEQ ID NO: 8776 - DNA, 25 bp, Homo sapien
agcggagtagatcacacaagggctt

SEQ ID NO: 8777 - DNA, 25 bp, Homo sapien
attctgctgccgattcagcgtcgtt

SEQ ID NO: 8778 - DNA, 25 bp, Homo sapien
gaagactcgtgctgcaccttcctga

SEQ ID NO: 8779 - DNA, 25 bp, Homo sapien
tcgtttgggcattatgggaaaggaa

SEQ ID NO: 8780 - DNA, 25 bp, Homo sapien
ctggtgctgtcagaatcagtctcga

SEQ ID NO: 8781 - DNA, 25 bp, Homo sapien
agagcccattccgtacctgagaatt

SEQ ID NO: 8782 - DNA, 25 bp, Homo sapien
ttggttctaggtaaatggccgagca

SEQ ID NO: 8783 - DNA, 25 bp, Homo sapien
tataggccaaagtcctgcattctgc

SEQ ID NO: 8784 - DNA, 25 bp, Homo sapien
tgtcagaatcagtctcgaggttggc

SEQ ID NO: 8785 - DNA, 25 bp, Homo sapien
ctcgaggttggctgctgtttggttc

SEQ ID NO: 8786 - DNA, 25 bp, Homo sapien
ttgcattgattataggccaaagtcc

SEQ ID NO: 8787 - DNA, 25 bp, Homo sapien
ccgattcagcgtcgtttgggcatta

SEQ ID NO: 8788 - DNA, 25 bp, Homo sapien
attataaatgggaacactttgcaag

SEQ ID NO: 8789 - DNA, 25 bp, Homo sapien
atagcacattagtcaaaaaacaaat

SEQ ID NO: 8790 - DNA, 25 bp, Homo sapien
attggcgatcagtatcttttctcac

SEQ ID NO: 8791 - DNA, 25 bp, Homo sapien
atttgaaatattggcgatcagtatc

SEQ ID NO: 8792 - DNA, 25 bp, Homo sapien
taaaaactatacattgcaagacggt

SEQ ID NO: 8793 - DNA, 25 bp, Homo sapien
aattacagctttatactacaatgtc

SEQ ID NO: 8794 - DNA, 25 bp, Homo sapien
cattgcaagacggtatttgaaatat

SEQ ID NO: 8795 - DNA, 25 bp, Homo sapien
gcaagatatcattgacatagctaat

SEQ ID NO: 8796 - DNA, 25 bp, Homo sapien
ttatgcacattaacttcgaatttac

SEQ ID NO: 8797 - DNA, 25 bp, Homo sapien
aaatgggaacactttgcaagatatc

SEQ ID NO: 8798 - DNA, 25 bp, Homo sapien
ttcgaatttacttcagaaagctatt

SEQ ID NO: 8799 - DNA, 25 bp, Homo sapien
taagcagcatggtttcagaaaaatc

SEQ ID NO: 8800 - DNA, 25 bp, Homo sapien
cataatactactgaggggaattgtt

SEQ ID NO: 8801 - DNA, 25 bp, Homo sapien
tgtaaatgctggcttaattagaaaa

SEQ ID NO: 8802 - DNA, 25 bp, Homo sapien
aaaattctagtaatatgggaaatcc

SEQ ID NO: 8803 - DNA, 25 bp, Homo sapien
tagatgtattatgtaaggcattctt

SEQ ID NO: 8804 - DNA, 25 bp, Homo sapien
taaaccttttgtaaatgctggctta

SEQ ID NO: 8805 - DNA, 25 bp, Homo sapien
ctgaggggaattgttagatgtatta

SEQ ID NO: 8806 - DNA, 25 bp, Homo sapien
ttttcataatactactgaggggaat

SEQ ID NO: 8807 - DNA, 25 bp, Homo sapien
tatgggaaatccttgtaagcagcat

SEQ ID NO: 8808 - DNA, 25 bp, Homo sapien
ccaaaaacacagacttgaataatat

SEQ ID NO: 8809 - DNA, 25 bp, Homo sapien
atccttgtaagcagcatggtttcag

SEQ ID NO: 8810 - DNA, 25 bp, Homo sapien
tctatcaaaggccaaaagctaatta

SEQ ID NO: 8811 - DNA, 25 bp, Homo sapien
aattttagcaatagtttagtagtca

SEQ ID NO: 8812 - DNA, 25 bp, Homo sapien
agtagtcaagaccaattctaaaatt

SEQ ID NO: 8813 - DNA, 25 bp, Homo sapien
taattaaagctactagtaaactgaa

SEQ ID NO: 8814 - DNA, 25 bp, Homo sapien
tttgtttaattaccaagtagctgta

SEQ ID NO: 8815 - DNA, 25 bp, Homo sapien
gcagatgagacaaaaacttttagcc

SEQ ID NO: 8816 - DNA, 25 bp, Homo sapien
attaccaagtagctgtaaaaggctc

SEQ ID NO: 8817 - DNA, 25 bp, Homo sapien
taccaagtagctgtaaaaggctcag

SEQ ID NO: 8818 - DNA, 25 bp, Homo sapien
aaggccaaaagctaattagttaaca

SEQ ID NO: 8819 - DNA, 25 bp, Homo sapien
tagcaatagtttagtagtcaagacc

SEQ ID NO: 8820 - DNA, 25 bp, Homo sapien
agtagctgtaaaaggctcagcttta

SEQ ID NO: 8821 - DNA, 25 bp, Homo sapien
ttcatccaaacagatagggaaagtg

SEQ ID NO: 8822 - DNA, 25 bp, Homo sapien
atgcatgcaggattgtcactggcac

SEQ ID NO: 8823 - DNA, 25 bp, Homo sapien
aaggaataaagatgctcaaggtcat

SEQ ID NO: 8824 - DNA, 25 bp, Homo sapien
attggcttgagttgtcctgaaaatc

SEQ ID NO: 8825 - DNA, 25 bp, Homo sapien
atcgcttctgcaaggaaagagtcca

SEQ ID NO: 8826 - DNA, 25 bp, Homo sapien
cccatcccaacattaaggggcagag

SEQ ID NO: 8827 - DNA, 25 bp, Homo sapien
aagagtccaggaaaaaactggcaat

SEQ ID NO: 8828 - DNA, 25 bp, Homo sapien
tcactggcacatgaattagaatccc

SEQ ID NO: 8829 - DNA, 25 bp, Homo sapien
aacaccaagagcagctatcatttag

SEQ ID NO: 8830 - DNA, 25 bp, Homo sapien
acttagtgactagctagttaacttc

SEQ ID NO: 8831 - DNA, 25 bp, Homo sapien
tgcataggataaatgaaaatgaacc

SEQ ID NO: 8832 - DNA, 25 bp, Homo sapien
caggcccaaggttgcatcacatcac

SEQ ID NO: 8833 - DNA, 25 bp, Homo sapien
aagaaatacaaattgccactacgca

SEQ ID NO: 8834 - DNA, 25 bp, Homo sapien
gttgaatcatgaagacagcccagat

SEQ ID NO: 8835 - DNA, 25 bp, Homo sapien
agtcagaaatgagccttatacgtac

SEQ ID NO: 8836 - DNA, 25 bp, Homo sapien
cagatttgactgacatggcacagca

SEQ ID NO: 8837 - DNA, 25 bp, Homo sapien
acagcccatgcaccagttactattt

SEQ ID NO: 8838 - DNA, 25 bp, Homo sapien
tttaaggtgtgctcagtgtagattc

SEQ ID NO: 8839 - DNA, 25 bp, Homo sapien
tcaggaaagacattgactgttaagt

SEQ ID NO: 8840 - DNA, 25 bp, Homo sapien
gaaccaggatatagtcaaacaaaca

SEQ ID NO: 8841 - DNA, 25 bp, Homo sapien
gacaaacaaacatgaaccaggatat

SEQ ID NO: 8842 - DNA, 25 bp, Homo sapien
agggttgtgatgaaaaactcagccc

SEQ ID NO: 8843 - DNA, 25 bp, Homo sapien
tagaatccatcctccctgtttcgtt

SEQ ID NO: 8844 - DNA, 25 bp, Homo sapien
agactctcttgcagctagagatggt

SEQ ID NO: 8845 - DNA, 25 bp, Homo sapien
ataagcagaagtgctctgtaccatc

SEQ ID NO: 8846 - DNA, 25 bp, Homo sapien
agtatgagcactgcacatggccacc

SEQ ID NO: 8847 - DNA, 25 bp, Homo sapien
aagaatcctgattgtggcagaggct

SEQ ID NO: 8848 - DNA, 25 bp, Homo sapien
cagcaccacgcctgggtagtttatg

SEQ ID NO: 8849 - DNA, 25 bp, Homo sapien
ttgcagctagagatggttatgtgac

SEQ ID NO: 8850 - DNA, 25 bp, Homo sapien
tggcagaggctgttacttctccctt

SEQ ID NO: 8851 - DNA, 25 bp, Homo sapien
atgggatataagcagaagtgctctg

SEQ ID NO: 8852 - DNA, 25 bp, Homo sapien
ccctaagagtatgagcactgcacat

SEQ ID NO: 8853 - DNA, 25 bp, Homo sapien
tccaatttctatcctcccagggact

SEQ ID NO: 8854 - DNA, 25 bp, Homo sapien
ttattgcctgcaatactctggcggc

SEQ ID NO: 8855 - DNA, 25 bp, Homo sapien
atacagaatgctataatctaaaacc

SEQ ID NO: 8856 - DNA, 25 bp, Homo sapien
gctataatctaaaacctatgccaag

SEQ ID NO: 8857 - DNA, 25 bp, Homo sapien
ttagaattttagtcgtattattgcc

SEQ ID NO: 8858 - DNA, 25 bp, Homo sapien
ttttagtcgtattattgcctgcaat

SEQ ID NO: 8859 - DNA, 25 bp, Homo sapien
tgaagaaaagaatactctactgaac

SEQ ID NO: 8860 - DNA, 25 bp, Homo sapien
tggcggcacccatctacctgcattc

SEQ ID NO: 8861 - DNA, 25 bp, Homo sapien
ttgcctgcaatactctggcggcacc

SEQ ID NO: 8862 - DNA, 25 bp, Homo sapien
gaaaagaatactctactgaacagtt

SEQ ID NO: 8863 - DNA, 25 bp, Homo sapien
gatttgaagaaaagaatactctact

SEQ ID NO: 8864 - DNA, 25 bp, Homo sapien
taaaacctatgccaagatttgaaga

SEQ ID NO: 8865 - DNA, 25 bp, Homo sapien
aaatgtgtttagagctgaaattccc

SEQ ID NO: 8866 - DNA, 25 bp, Homo sapien
tttgaatgatgaatgcaagattttt

SEQ ID NO: 8867 - DNA, 25 bp, Homo sapien
acatctggagagtaaaacttcaaac

SEQ ID NO: 8868 - DNA, 25 bp, Homo sapien
acagtgattagaaatacacgcatgc

SEQ ID NO: 8869 - DNA, 25 bp, Homo sapien
tcagctctagcatgtatgaatgtat

SEQ ID NO: 8870 - DNA, 25 bp, Homo sapien
ttatgcaactcaaaaacatctggag

SEQ ID NO: 8871 - DNA, 25 bp, Homo sapien
atgaatgtattggaagtctgagttc

SEQ ID NO: 8872 - DNA, 25 bp, Homo sapien
cagataactgtctcaaaaatgtgtt

SEQ ID NO: 8873 - DNA, 25 bp, Homo sapien
tacacgcatgcacactaaaagtatt

SEQ ID NO: 8874 - DNA, 25 bp, Homo sapien
ttcaaactaagcatgtgacaacttt

SEQ ID NO: 8875 - DNA, 25 bp, Homo sapien
tattatagcattcacagtaacaaac

SEQ ID NO: 8876 - DNA, 25 bp, Homo sapien
acatggcttaagatccctttgggga

SEQ ID NO: 8877 - DNA, 25 bp, Homo sapien
tggaagggacacaattcgacccata

SEQ ID NO: 8878 - DNA, 25 bp, Homo sapien
catatgatttttggtggaagggaca

SEQ ID NO: 8879 - DNA, 25 bp, Homo sapien
cttagggccagtttccaagtaatcc

SEQ ID NO: 8880 - DNA, 25 bp, Homo sapien
ggggaaaacgagaagatttatgata

SEQ ID NO: 8881 - DNA, 25 bp, Homo sapien
ggggccaccctatgccaataagacc

SEQ ID NO: 8882 - DNA, 25 bp, Homo sapien
cctagattttggcagaattggttcc

SEQ ID NO: 8883 - DNA, 25 bp, Homo sapien
tcgacccataacaccatggaagcct

SEQ ID NO: 8884 - DNA, 25 bp, Homo sapien
actagtggaccacaaaggcttttta

SEQ ID NO: 8885 - DNA, 25 bp, Homo sapien
gcacattttgaggtactaggggcta

SEQ ID NO: 8886 - DNA, 25 bp, Homo sapien
atggtacttagcctatgtgcatgtc

SEQ ID NO: 8887 - DNA, 25 bp, Homo sapien
tagctaattacatctacaatgaccc

SEQ ID NO: 8888 - DNA, 25 bp, Homo sapien
actgattatattcgcttagggaccc

SEQ ID NO: 8889 - DNA, 25 bp, Homo sapien
ttatggcagtggaaatcaaatcttc

SEQ ID NO: 8890 - DNA, 25 bp, Homo sapien
attatattcgcttagggacccactc

SEQ ID NO: 8891 - DNA, 25 bp, Homo sapien
ttcgcttagggacccactctaatcc

SEQ ID NO: 8892 - DNA, 25 bp, Homo sapien
caattccctggcttatggcagtgga

SEQ ID NO: 8893 - DNA, 25 bp, Homo sapien
aatcccatataacctcatcttagct

SEQ ID NO: 8894 - DNA, 25 bp, Homo sapien
tcatatggcgattctccatgtgtgc

SEQ ID NO: 8895 - DNA, 25 bp, Homo sapien
tggcttatggcagtggaaatcaaat

SEQ ID NO: 8896 - DNA, 25 bp, Homo sapien
gttccaggactctctcctagcttct

SEQ ID NO: 8897 - DNA, 25 bp, Homo sapien
tccctggcttatggcagtggaaatc

SEQ ID NO: 8898 - DNA, 25 bp, Homo sapien
ggctagggctgtcacaacaaactga

SEQ ID NO: 8899 - DNA, 25 bp, Homo sapien
atgctaagcagagtttcaagtgccc

SEQ ID NO: 8900 - DNA, 25 bp, Homo sapien
aacaaactgagtgacttaaacaaca

SEQ ID NO: 8901 - DNA, 25 bp, Homo sapien
tcccaattctacagggctagggctg

SEQ ID NO: 8902 - DNA, 25 bp, Homo sapien
tcaagtgccctcagtgttttaaatc

SEQ ID NO: 8903 - DNA, 25 bp, Homo sapien
tgtatcaaatactgaaggacctgga

SEQ ID NO: 8904 - DNA, 25 bp, Homo sapien
tcacagatctggagactagaaatca

SEQ ID NO: 8905 - DNA, 25 bp, Homo sapien
acagacaagtattgtttcacagatc

SEQ ID NO: 8906 - DNA, 25 bp, Homo sapien
gagaagaagtaacggtaaatcagat

SEQ ID NO: 8907 - DNA, 25 bp, Homo sapien
ttgtacggtgaacaaatgatgacag

SEQ ID NO: 8908 - DNA, 25 bp, Homo sapien
catccctttgaattgtacggtgaac

SEQ ID NO: 8909 - DNA, 25 bp, Homo sapien
aacagcaagtagctaagaagacatg

SEQ ID NO: 8910 - DNA, 25 bp, Homo sapien
aagacatgaaagaaagacagttacg

SEQ ID NO: 8911 - DNA, 25 bp, Homo sapien
agacagttacgaaggctggaaagct

SEQ ID NO: 8912 - DNA, 25 bp, Homo sapien
cagttacgaaggctggaaagctttt

SEQ ID NO: 8913 - DNA, 25 bp, Homo sapien
tgaaagaaagacagttacgaaggct

SEQ ID NO: 8914 - DNA, 25 bp, Homo sapien
aaagttgactgtgaccatatgattc

SEQ ID NO: 8915 - DNA, 25 bp, Homo sapien
gcaagtagctaagaagacatgaaag

SEQ ID NO: 8916 - DNA, 25 bp, Homo sapien
cagcaagtagctaagaagacatgaa

SEQ ID NO: 8917 - DNA, 25 bp, Homo sapien
catgaaagaaagacagttacgaagg

SEQ ID NO: 8918 - DNA, 25 bp, Homo sapien
ttaaaaagttgactgtgaccatatg

SEQ ID NO: 8919 - DNA, 25 bp, Homo sapien
tgactgtgaccatatgattctctat

SEQ ID NO: 8920 - DNA, 25 bp, Homo sapien
gtgttcccaagactccaagtatagt

SEQ ID NO: 8921 - DNA, 25 bp, Homo sapien
gcagtgtcgtgatctgatctcggct

SEQ ID NO: 8922 - DNA, 25 bp, Homo sapien
caaagtgctgggactcacatttttc

SEQ ID NO: 8923 - DNA, 25 bp, Homo sapien
taggaataaacaaagcctcacctta

SEQ ID NO: 8924 - DNA, 25 bp, Homo sapien
aagatgtgttcccaagactccaagt

SEQ ID NO: 8925 - DNA, 25 bp, Homo sapien
tatctcacagtgtgaggaaacactg

SEQ ID NO: 8926 - DNA, 25 bp, Homo sapien
ccaagtatagtcaggtttcaaaaac

SEQ ID NO: 8927 - DNA, 25 bp, Homo sapien
aagactccaagtatagtcaggtttc

SEQ ID NO: 8928 - DNA, 25 bp, Homo sapien
actgtaagatgtgttcccaagactc

SEQ ID NO: 8929 - DNA, 25 bp, Homo sapien
agtgtgaggaaacactgtaagatgt

SEQ ID NO: 8930 - DNA, 25 bp, Homo sapien
aaagtagccattttatctcacagtg

SEQ ID NO: 8931 - DNA, 25 bp, Homo sapien
ttctgagcattttatacatactgac

SEQ ID NO: 8932 - DNA, 25 bp, Homo sapien
atactgactcacttatcctcgcaac

SEQ ID NO: 8933 - DNA, 25 bp, Homo sapien
aggaagcagccgttcagggattcga

SEQ ID NO: 8934 - DNA, 25 bp, Homo sapien
gaacccacaccgtcggccgggcgca

SEQ ID NO: 8935 - DNA, 25 bp, Homo sapien
agcagccgttcagggattcgaaccc

SEQ ID NO: 8936 - DNA, 25 bp, Homo sapien
aacagcactgtgagagtgcaggtga

SEQ ID NO: 8937 - DNA, 25 bp, Homo sapien
acttatcctcgcaacagcactgtga

SEQ ID NO: 8938 - DNA, 25 bp, Homo sapien
aggaactcgttccaaaccacacagc

SEQ ID NO: 8939 - DNA, 25 bp, Homo sapien
tcctcgcaacagcactgtgagagtg

SEQ ID NO: 8940 - DNA, 25 bp, Homo sapien
cccagagattaaggaactcgttcca

SEQ ID NO: 8941 - DNA, 25 bp, Homo sapien
acaatcatgtagcttgtacaggcac

SEQ ID NO: 8942 - DNA, 25 bp, Homo sapien
tttagtaaaggctgataaaatgacc

SEQ ID NO: 8943 - DNA, 25 bp, Homo sapien
tcctagaagtagaatggcttaacat

SEQ ID NO: 8944 - DNA, 25 bp, Homo sapien
caaatgaatacccatgtaagagatt

SEQ ID NO: 8945 - DNA, 25 bp, Homo sapien
gcaagagttgaatagactccagagt

SEQ ID NO: 8946 - DNA, 25 bp, Homo sapien
gtagggcagattcctagaagtagaa

SEQ ID NO: 8947 - DNA, 25 bp, Homo sapien
agaagctgcaagagttgaatagact

SEQ ID NO: 8948 - DNA, 25 bp, Homo sapien
ccagaatcctctaatatattgtgat

SEQ ID NO: 8949 - DNA, 25 bp, Homo sapien
aaatgacctacataaagagtctatc

SEQ ID NO: 8950 - DNA, 25 bp, Homo sapien
ccctactgtagaagctgcaagagtt

SEQ ID NO: 8951 - DNA, 25 bp, Homo sapien
ccaatgcaattgttgttgaggtagg

SEQ ID NO: 8952 - DNA, 25 bp, Homo sapien
acaaacattttcgtagggcagattc

SEQ ID NO: 8953 - DNA, 25 bp, Homo sapien
accctaaggctcaagtgaaaccaaa

SEQ ID NO: 8954 - DNA, 25 bp, Homo sapien
tgttgattggtatcaccctatgatc

SEQ ID NO: 8955 - DNA, 25 bp, Homo sapien
tatctggcatcacctcaaatctgga

SEQ ID NO: 8956 - DNA, 25 bp, Homo sapien
agttcctggcacgataagaattttc

SEQ ID NO: 8957 - DNA, 25 bp, Homo sapien
tgacgaccatcattctcagaaaata

SEQ ID NO: 8958 - DNA, 25 bp, Homo sapien
accatctagtgtagtgctaatccta

SEQ ID NO: 8959 - DNA, 25 bp, Homo sapien
ttaagagacttgaaaatcctacacc

SEQ ID NO: 8960 - DNA, 25 bp, Homo sapien
taccttgaaacttacttagcacttg

SEQ ID NO: 8961 - DNA, 25 bp, Homo sapien
caagtgaaaccaaacggttggtcac

SEQ ID NO: 8962 - DNA, 25 bp, Homo sapien
atgaggagcagtaccactggactga

SEQ ID NO: 8963 - DNA, 25 bp, Homo sapien
tttcgaacattacagagggatgaat

SEQ ID NO: 8964 - DNA, 25 bp, Homo sapien
tggttgcactgaaagaccatgcatt

SEQ ID NO: 8965 - DNA, 25 bp, Homo sapien
aaattgtatggttgcactgaaagac

SEQ ID NO: 8966 - DNA, 25 bp, Homo sapien
gattaaaactccatacatacgggct

SEQ ID NO: 8967 - DNA, 25 bp, Homo sapien
aaaggaccaatacgtaatcttaata

SEQ ID NO: 8968 - DNA, 25 bp, Homo sapien
tatatgtatggctttgagcaaagac

SEQ ID NO: 8969 - DNA, 25 bp, Homo sapien
actccatacatacgggcttcactat

SEQ ID NO: 8970 - DNA, 25 bp, Homo sapien
aagaggtcacttttcaactagcaat

SEQ ID NO: 8971 - DNA, 25 bp, Homo sapien
cagttgttgtaagaatcagctattc

SEQ ID NO: 8972 - DNA, 25 bp, Homo sapien
aactagcaatggacctttatattac

SEQ ID NO: 8973 - DNA, 25 bp, Homo sapien
tggctttgagcaaagacaaaagaaa

SEQ ID NO: 8974 - DNA, 25 bp, Homo sapien
ttatgtttcccaatagtgctcaaaa

SEQ ID NO: 8975 - DNA, 25 bp, Homo sapien
tgcctacaagagagactaggatatg

SEQ ID NO: 8976 - DNA, 25 bp, Homo sapien
atcacgtcaaaaggccatgggagtc

SEQ ID NO: 8977 - DNA, 25 bp, Homo sapien
gactacaatgggctcaaatgcaaac

SEQ ID NO: 8978 - DNA, 25 bp, Homo sapien
aatgacttaaaatgggagatagggt

SEQ ID NO: 8979 - DNA, 25 bp, Homo sapien
actacagtggaggttactagtcact

SEQ ID NO: 8980 - DNA, 25 bp, Homo sapien
attaacctgagacaatatgagcatc

SEQ ID NO: 8981 - DNA, 25 bp, Homo sapien
attagtcctgatgggccaaaccaac

SEQ ID NO: 8982 - DNA, 25 bp, Homo sapien
aatgtttagggagattgaagtagat

SEQ ID NO: 8983 - DNA, 25 bp, Homo sapien
catgggagtcaacttgaagagatac

SEQ ID NO: 8984 - DNA, 25 bp, Homo sapien
tagggtggagaattaggtatttatc

SEQ ID NO: 8985 - DNA, 25 bp, Homo sapien
ggatatgaggggtaatattagtcct

SEQ ID NO: 8986 - DNA, 25 bp, Homo sapien
gtgtctaggtaggactaggcccata

SEQ ID NO: 8987 - DNA, 25 bp, Homo sapien
caagtagtaaatctgaaaagagtac

SEQ ID NO: 8988 - DNA, 25 bp, Homo sapien
gataaaagtcaggatttcgagtacc

SEQ ID NO: 8989 - DNA, 25 bp, Homo sapien
tctgatgcgagatggaaacggagaa

SEQ ID NO: 8990 - DNA, 25 bp, Homo sapien
catatatcagtgagcagaagaggct

SEQ ID NO: 8991 - DNA, 25 bp, Homo sapien
agagtacagtcataacaaccaagtg

SEQ ID NO: 8992 - DNA, 25 bp, Homo sapien
acctgtggcacagaaaaatcagtag

SEQ ID NO: 8993 - DNA, 25 bp, Homo sapien
gaagaggctgagaaatttagcctac

SEQ ID NO: 8994 - DNA, 25 bp, Homo sapien
aaatcagtagaaaggcaagtagtaa

SEQ ID NO: 8995 - DNA, 25 bp, Homo sapien
atttagcctacaggagtcaagacct

SEQ ID NO: 8996 - DNA, 25 bp, Homo sapien
taggcccatagagggaagaaccgtc

SEQ ID NO: 8997 - DNA, 25 bp, Homo sapien
gtagtggcagagcagaaaaaagaat

SEQ ID NO: 8998 - DNA, 25 bp, Homo sapien
agccctgtcatgataggtaacggcc

SEQ ID NO: 8999 - DNA, 25 bp, Homo sapien
tcacagccctgtcatgataggtaac

SEQ ID NO: 9000 - DNA, 25 bp, Homo sapien
ggacgtccattccatgcaccagctg

SEQ ID NO: 9001 - DNA, 25 bp, Homo sapien
cttttactataacaggaagtacctg

SEQ ID NO: 9002 - DNA, 25 bp, Homo sapien
ttactataacaggaagtacctggac

SEQ ID NO: 9003 - DNA, 25 bp, Homo sapien
ccctgtcatgataggtaacggccac

SEQ ID NO: 9004 - DNA, 25 bp, Homo sapien
caggaagtacctggacgtccattcc

SEQ ID NO: 9005 - DNA, 25 bp, Homo sapien
taacaggaagtacctggacgtccat

SEQ ID NO: 9006 - DNA, 25 bp, Homo sapien
agtacctggacgtccattccatgca

SEQ ID NO: 9007 - DNA, 25 bp, Homo sapien
ctataacaggaagtacctggacgtc

SEQ ID NO: 9008 - DNA, 25 bp, Homo sapien
gcccagagagttaacgatttgcata

SEQ ID NO: 9009 - DNA, 25 bp, Homo sapien
agcctctccagtccaaagaggaggc

SEQ ID NO: 9010 - DNA, 25 bp, Homo sapien
ataagagttcatttaggcccagaga

SEQ ID NO: 9011 - DNA, 25 bp, Homo sapien
gaggcctggagatgcaattactcca

SEQ ID NO: 9012 - DNA, 25 bp, Homo sapien
tccaggtgactggaagttggctttc

SEQ ID NO: 9013 - DNA, 25 bp, Homo sapien
agtctcacgcactagctgtcacagc

SEQ ID NO: 9014 - DNA, 25 bp, Homo sapien
acactgagggccacagggagtactt

SEQ ID NO: 9015 - DNA, 25 bp, Homo sapien
accaaggtcatacaaggtagtggca

SEQ ID NO: 9016 - DNA, 25 bp, Homo sapien
tcatggccgctaaggagtattgtac

SEQ ID NO: 9017 - DNA, 25 bp, Homo sapien
ttaacgatttgcatagtcacacagc

SEQ ID NO: 9018 - DNA, 25 bp, Homo sapien
acagggagtacttgaccaaggtcat

SEQ ID NO: 9019 - DNA, 25 bp, Homo sapien
agagacattcagagacttggcttcc

SEQ ID NO: 9020 - DNA, 25 bp, Homo sapien
ttacaagggtgtttcaaatctgatt

SEQ ID NO: 9021 - DNA, 25 bp, Homo sapien
cacagaggatcatggaagaagtttc

SEQ ID NO: 9022 - DNA, 25 bp, Homo sapien
agtacttttatggaagaagagaggc

SEQ ID NO: 9023 - DNA, 25 bp, Homo sapien
acagtgtctgtcctaagtgcagctc

SEQ ID NO: 9024 - DNA, 25 bp, Homo sapien
tgagtctgaactacccttacaaggg

SEQ ID NO: 9025 - DNA, 25 bp, Homo sapien
aagaagagaggcacaccaatattaa

SEQ ID NO: 9026 - DNA, 25 bp, Homo sapien
aagtttcagaaaccaggcctagaag

SEQ ID NO: 9027 - DNA, 25 bp, Homo sapien
ctgcaaaggctgagatatgtagttt

SEQ ID NO: 9028 - DNA, 25 bp, Homo sapien
aaaccaggcctagaagtgcatatat

SEQ ID NO: 9029 - DNA, 25 bp, Homo sapien
ccaatattaatggacactggcagtc

SEQ ID NO: 9030 - DNA, 25 bp, Homo sapien
atcccacagacttggagggatcact

SEQ ID NO: 9031 - DNA, 25 bp, Homo sapien
gaagctcgtggccacactctttctt

SEQ ID NO: 9032 - DNA, 25 bp, Homo sapien
tggagggatcactgggaaattagaa

SEQ ID NO: 9033 - DNA, 25 bp, Homo sapien
agcatactggaagctcgtggccaca

SEQ ID NO: 9034 - DNA, 25 bp, Homo sapien
agtgtttttacattccaggccatcc

SEQ ID NO: 9035 - DNA, 25 bp, Homo sapien
attcttaaagcttccgccattgttt

SEQ ID NO: 9036 - DNA, 25 bp, Homo sapien
ttggcagtgagcatactggaagctc

SEQ ID NO: 9037 - DNA, 25 bp, Homo sapien
tcaggattccttggcagtgagcata

SEQ ID NO: 9038 - DNA, 25 bp, Homo sapien
attccaggccatcccacagacttgg

SEQ ID NO: 9039 - DNA, 25 bp, Homo sapien
tctttctttccgtaccacagctttc

SEQ ID NO: 9040 - DNA, 25 bp, Homo sapien
aacgtgtcaggattccttggcagtg

SEQ ID NO: 9041 - DNA, 25 bp, Homo sapien
ctccagcatgcagacagagaagact

SEQ ID NO: 9042 - DNA, 25 bp, Homo sapien
agatggaacccagcatccctattct

SEQ ID NO: 9043 - DNA, 25 bp, Homo sapien
gaaatggactaggaagcagcttcaa

SEQ ID NO: 9044 - DNA, 25 bp, Homo sapien
tgatcgctctcctaacaagctgccg

SEQ ID NO: 9045 - DNA, 25 bp, Homo sapien
agaaaacacttgtagtcccggtctc

SEQ ID NO: 9046 - DNA, 25 bp, Homo sapien
caggacactcctcagaccaatgaca

SEQ ID NO: 9047 - DNA, 25 bp, Homo sapien
catctgaagagcaagaaatggacta

SEQ ID NO: 9048 - DNA, 25 bp, Homo sapien
acacagaatttcaggagatggaacc

SEQ ID NO: 9049 - DNA, 25 bp, Homo sapien
gaaccagctccataaggagtgttcc

SEQ ID NO: 9050 - DNA, 25 bp, Homo sapien
agagaagactggatgccatcccgac

SEQ ID NO: 9051 - DNA, 25 bp, Homo sapien
agctttcccgtgtccagatgcccag

SEQ ID NO: 9052 - DNA, 25 bp, Homo sapien
tagcaacaattatctcccagcaaga

SEQ ID NO: 9053 - DNA, 25 bp, Homo sapien
ttgctacagtagtgaaatcaaccaa

SEQ ID NO: 9054 - DNA, 25 bp, Homo sapien
cccaaacgacatgaaatagactgtt

SEQ ID NO: 9055 - DNA, 25 bp, Homo sapien
tcttgctgaaagtatggttatatct

SEQ ID NO: 9056 - DNA, 25 bp, Homo sapien
tggtatagaaagtctcctggaaagc

SEQ ID NO: 9057 - DNA, 25 bp, Homo sapien
tcccttggacttagattagcaacaa

SEQ ID NO: 9058 - DNA, 25 bp, Homo sapien
gctagctactcagatttaatggaac

SEQ ID NO: 9059 - DNA, 25 bp, Homo sapien
cccagcaagactggtatagaaagtc

SEQ ID NO: 9060 - DNA, 25 bp, Homo sapien
cctggaaagctcagttttggctagc

SEQ ID NO: 9061 - DNA, 25 bp, Homo sapien
ttcacaaggaaaattcttagaatcc

SEQ ID NO: 9062 - DNA, 25 bp, Homo sapien
aggaaaatgtaatcttgctgaaagt

SEQ ID NO: 9063 - DNA, 25 bp, Homo sapien
caagtcattttttatgatgggtctc

SEQ ID NO: 9064 - DNA, 25 bp, Homo sapien
agaatggaggtatctgaaaataagt

SEQ ID NO: 9065 - DNA, 25 bp, Homo sapien
atagaggaaccaagtatcattttag

SEQ ID NO: 9066 - DNA, 25 bp, Homo sapien
atggaggtatctgaaaataagtaag

SEQ ID NO: 9067 - DNA, 25 bp, Homo sapien
taacgatagaggaaccaagtatcat

SEQ ID NO: 9068 - DNA, 25 bp, Homo sapien
ctttaacgatagaggaaccaagtat

SEQ ID NO: 9069 - DNA, 25 bp, Homo sapien
tttttatgatgggtctctgagatag

SEQ ID NO: 9070 - DNA, 25 bp, Homo sapien
atttttctaacacgagtcagtatgc

SEQ ID NO: 9071 - DNA, 25 bp, Homo sapien
gtctctgagatagggcagtttgtta

SEQ ID NO: 9072 - DNA, 25 bp, Homo sapien
acgagtcagtatgcttgaagttttc

SEQ ID NO: 9073 - DNA, 25 bp, Homo sapien
taacacgagtcagtatgcttgaagt

SEQ ID NO: 9074 - DNA, 25 bp, Homo sapien
ttatgtgtgggatttcggagcctta

SEQ ID NO: 9075 - DNA, 25 bp, Homo sapien
ggggaattctttagcagatcttatt

SEQ ID NO: 9076 - DNA, 25 bp, Homo sapien
gatattcaggcccaaccagctcact

SEQ ID NO: 9077 - DNA, 25 bp, Homo sapien
tgcagatgatattcaggcccaacca

SEQ ID NO: 9078 - DNA, 25 bp, Homo sapien
atgttctcggtgcatatgttgactt

SEQ ID NO: 9079 - DNA, 25 bp, Homo sapien
tctctggggtggctactgactaaag

SEQ ID NO: 9080 - DNA, 25 bp, Homo sapien
tctaatacaggccaagtcatttttt

SEQ ID NO: 9081 - DNA, 25 bp, Homo sapien
tcggagccttactttaacgatagag

SEQ ID NO: 9082 - DNA, 25 bp, Homo sapien
gaaggaggttaactctgcagatgat

SEQ ID NO: 9083 - DNA, 25 bp, Homo sapien
aaggcagagaatgtccatccaacat

SEQ ID NO: 9084 - DNA, 25 bp, Homo sapien
ttctgcagaagctatcattcctacc

SEQ ID NO: 9085 - DNA, 25 bp, Homo sapien
ttcagccatgatttgacagagttgc

SEQ ID NO: 9086 - DNA, 25 bp, Homo sapien
ttctgaacttgttaatgacatgaac

SEQ ID NO: 9087 - DNA, 25 bp, Homo sapien
atgatttgacagagttgcatcttac

SEQ ID NO: 9088 - DNA, 25 bp, Homo sapien
gtaagtgaacagctggtaaaccatt

SEQ ID NO: 9089 - DNA, 25 bp, Homo sapien
atggaatggctacaggtacaatgca

SEQ ID NO: 9090 - DNA, 25 bp, Homo sapien
ttttggctttggcagcatgtatttc

SEQ ID NO: 9091 - DNA, 25 bp, Homo sapien
cttaaatccagtaagtgaacagctg

SEQ ID NO: 9092 - DNA, 25 bp, Homo sapien
gtgttattcacaatggaatggctac

SEQ ID NO: 9093 - DNA, 25 bp, Homo sapien
atgacatgaacaacttctttgctga

SEQ ID NO: 9094 - DNA, 25 bp, Homo sapien
ttcacaatggaatggctacaggtac

SEQ ID NO: 9095 - DNA, 25 bp, Homo sapien
ttccaaatgcgagaaaaatatttcc

SEQ ID NO: 9096 - DNA, 25 bp, Homo sapien
ggctatagatatcctgccaggaggc

SEQ ID NO: 9097 - DNA, 25 bp, Homo sapien
ctagtgactcttgggctatagatat

SEQ ID NO: 9098 - DNA, 25 bp, Homo sapien
tagatatcctgccaggaggccacac

SEQ ID NO: 9099 - DNA, 25 bp, Homo sapien
ctctgaagcaggcagcgtctctgca

SEQ ID NO: 9100 - DNA, 25 bp, Homo sapien
gcagcgtctctgcagggactgtttc

SEQ ID NO: 9101 - DNA, 25 bp, Homo sapien
gcagggtgatggaagcaaatctagt

SEQ ID NO: 9102 - DNA, 25 bp, Homo sapien
gtgatggaagcaaatctagtgactc

SEQ ID NO: 9103 - DNA, 25 bp, Homo sapien
gccacaccagggctctgaagcaggc

SEQ ID NO: 9104 - DNA, 25 bp, Homo sapien
caaatctagtgactcttgggctata

SEQ ID NO: 9105 - DNA, 25 bp, Homo sapien
agcgtctctgcagggactgtttccc

SEQ ID NO: 9106 - DNA, 25 bp, Homo sapien
actcttgggctatagatatcctgcc

SEQ ID NO: 9107 - DNA, 25 bp, Homo sapien
ttctgaaggattctgggctggaact

SEQ ID NO: 9108 - DNA, 25 bp, Homo sapien
tgaactaaaaaacacccatggggca

SEQ ID NO: 9109 - DNA, 25 bp, Homo sapien
atgccatgtattagggagaaggaat

SEQ ID NO: 9110 - DNA, 25 bp, Homo sapien
acaccactgtgatctccatgtgctt

SEQ ID NO: 9111 - DNA, 25 bp, Homo sapien
atttgaatgaatatctggctccagc

SEQ ID NO: 9112 - DNA, 25 bp, Homo sapien
cccaaacagagattcacacacagac

SEQ ID NO: 9113 - DNA, 25 bp, Homo sapien
ttaaggcacaggatttgaatgaata

SEQ ID NO: 9114 - DNA, 25 bp, Homo sapien
atcagcatggacttctgaaggattc

SEQ ID NO: 9115 - DNA, 25 bp, Homo sapien
ggctggaactgtgatgccatgtatt

SEQ ID NO: 9116 - DNA, 25 bp, Homo sapien
ctaagaaaccattaaggcacaggat

SEQ ID NO: 9117 - DNA, 25 bp, Homo sapien
tacactgcctgtctagaaactaaag

SEQ ID NO: 9118 - DNA, 25 bp, Homo sapien
tgttgcatgaccaaatgaccttagt

SEQ ID NO: 9119 - DNA, 25 bp, Homo sapien
taggaaagggtgactgtagctttta

SEQ ID NO: 9120 - DNA, 25 bp, Homo sapien
gtcaggtgaaataacaggcactctc

SEQ ID NO: 9121 - DNA, 25 bp, Homo sapien
agaaacaagaaatgaggggtttgct

SEQ ID NO: 9122 - DNA, 25 bp, Homo sapien
ctaagggatgagctaagttaaaaga

SEQ ID NO: 9123 - DNA, 25 bp, Homo sapien
attatttctgaggatgcaaggagga

SEQ ID NO: 9124 - DNA, 25 bp, Homo sapien
tagcagctcacaaacaaccagagtc

SEQ ID NO: 9125 - DNA, 25 bp, Homo sapien
attagagcaaagatcacacattcag

SEQ ID NO: 9126 - DNA, 25 bp, Homo sapien
agggaccttggagagccctattcat

SEQ ID NO: 9127 - DNA, 25 bp, Homo sapien
atgtaaggtatctaagggatgagct

SEQ ID NO: 9128 - DNA, 25 bp, Homo sapien
tgacttctattttgaggcctgggct

SEQ ID NO: 9129 - DNA, 25 bp, Homo sapien
acaggctcagacacgtatgcaaatc

SEQ ID NO: 9130 - DNA, 25 bp, Homo sapien
gctaaattggaggatgagcatctaa

SEQ ID NO: 9131 - DNA, 25 bp, Homo sapien
actgtgtgctgtccaacctcccgat

SEQ ID NO: 9132 - DNA, 25 bp, Homo sapien
gtaagactggaggaagcaactgaat

SEQ ID NO: 9133 - DNA, 25 bp, Homo sapien
atgctggcctgtaaagatgctcctt

SEQ ID NO: 9134 - DNA, 25 bp, Homo sapien
acctcccgatagagcaatgctaaat

SEQ ID NO: 9135 - DNA, 25 bp, Homo sapien
caatgagcttacagaagaagggcca

SEQ ID NO: 9136 - DNA, 25 bp, Homo sapien
taatgcatattgagagtgactgtgt

SEQ ID NO: 9137 - DNA, 25 bp, Homo sapien
agtctacctgacatgctggcctgta

SEQ ID NO: 9138 - DNA, 25 bp, Homo sapien
tagttctggagttggcattaatatc

SEQ ID NO: 9139 - DNA, 25 bp, Homo sapien
actgaattaactgtgtcctggtgtc

SEQ ID NO: 9140 - DNA, 25 bp, Homo sapien
acaacaggatctacactagctagtt

SEQ ID NO: 9141 - DNA, 25 bp, Homo sapien
tgctgccttgaaaaccacatcactg

SEQ ID NO: 9142 - DNA, 25 bp, Homo sapien
gggaaaaactgctaagcaaagcctc

SEQ ID NO: 9143 - DNA, 25 bp, Homo sapien
tcacaagtcacaggcgtggaggtca

SEQ ID NO: 9144 - DNA, 25 bp, Homo sapien
acaccttgcaccattacatgggacc

SEQ ID NO: 9145 - DNA, 25 bp, Homo sapien
ataaaatggctcacaagtcacaggc

SEQ ID NO: 9146 - DNA, 25 bp, Homo sapien
acagtggttacaattaaatagtggc

SEQ ID NO: 9147 - DNA, 25 bp, Homo sapien
attacatgggacctctgccactgct

SEQ ID NO: 9148 - DNA, 25 bp, Homo sapien
tggttacaaacaacaggatctacac

SEQ ID NO: 9149 - DNA, 25 bp, Homo sapien
actgctccgttcaacaaaatgtatc

SEQ ID NO: 9150 - DNA, 25 bp, Homo sapien
aaatagtggctgtatgtcaacactc

SEQ ID NO: 9151 - DNA, 25 bp, Homo sapien
gaagagggaactgctggtctcacat

SEQ ID NO: 9152 - DNA, 25 bp, Homo sapien
cctatccaccttagcgtagagattt

SEQ ID NO: 9153 - DNA, 25 bp, Homo sapien
ctgccgcctaggtgcgatcacagct

SEQ ID NO: 9154 - DNA, 25 bp, Homo sapien
agggaactgctggtctcacatgcat

SEQ ID NO: 9155 - DNA, 25 bp, Homo sapien
tccagggctcatgcactctgctgtg

SEQ ID NO: 9156 - DNA, 25 bp, Homo sapien
ggagtcctatccaccttagcgtaga

SEQ ID NO: 9157 - DNA, 25 bp, Homo sapien
tctcactgccgcctaggtgcgatca

SEQ ID NO: 9158 - DNA, 25 bp, Homo sapien
agagatttatcttccagagaatcac

SEQ ID NO: 9159 - DNA, 25 bp, Homo sapien
aactgctggtctcacatgcatgggt

SEQ ID NO: 9160 - DNA, 25 bp, Homo sapien
tccaccttagcgtagagatttatct

SEQ ID NO: 9161 - DNA, 25 bp, Homo sapien
actatggagtcctatccaccttagc

SEQ ID NO: 9162 - DNA, 25 bp, Homo sapien
cagagatcacctggtacagatacat

SEQ ID NO: 9163 - DNA, 25 bp, Homo sapien
cgagggtctgtgaagtctcgctcta

SEQ ID NO: 9164 - DNA, 25 bp, Homo sapien
ccagtgctatgtccttgcattgcag

SEQ ID NO: 9165 - DNA, 25 bp, Homo sapien
agaactcctatatcccagtgctatg

SEQ ID NO: 9166 - DNA, 25 bp, Homo sapien
tcacctggtacagatacattgccat

SEQ ID NO: 9167 - DNA, 25 bp, Homo sapien
tccgagggtctgtgaagtctcgctc

SEQ ID NO: 9168 - DNA, 25 bp, Homo sapien
atacattgccatcataagcagagac

SEQ ID NO: 9169 - DNA, 25 bp, Homo sapien
gccatcataagcagagacagataaa

SEQ ID NO: 9170 - DNA, 25 bp, Homo sapien
gatctccaataggtatatatcaatt

SEQ ID NO: 9171 - DNA, 25 bp, Homo sapien
ctatatcccagtgctatgtccttgc

SEQ ID NO: 9172 - DNA, 25 bp, Homo sapien
attgccatcataagcagagacagat

SEQ ID NO: 9173 - DNA, 25 bp, Homo sapien
ggttgcagcccatgacctgactccg

SEQ ID NO: 9174 - DNA, 25 bp, Homo sapien
tcgcaaatggaaatgatgtaaaagc

SEQ ID NO: 9175 - DNA, 25 bp, Homo sapien
agtggacccatgcagttcaagctca

SEQ ID NO: 9176 - DNA, 25 bp, Homo sapien
ggcagcaagggttatctccattgga

SEQ ID NO: 9177 - DNA, 25 bp, Homo sapien
cagcattcacagcaaaacagtgacc

SEQ ID NO: 9178 - DNA, 25 bp, Homo sapien
tttcgctcaaatactggcagcattc

SEQ ID NO: 9179 - DNA, 25 bp, Homo sapien
atgtaaaagctaccatgagtctatc

SEQ ID NO: 9180 - DNA, 25 bp, Homo sapien
ttcaagggtcaactgagtttcattc

SEQ ID NO: 9181 - DNA, 25 bp, Homo sapien
gttgttgaaaatctccgaaatatat

SEQ ID NO: 9182 - DNA, 25 bp, Homo sapien
acaggggcttctgtttgccataaac

SEQ ID NO: 9183 - DNA, 25 bp, Homo sapien
aacagtgaccaaaacacagatactt

SEQ ID NO: 9184 - DNA, 25 bp, Homo sapien
caggaagtgttttatgccactgagt

SEQ ID NO: 9185 - DNA, 25 bp, Homo sapien
ggactttgggcatcaggaagtgttt

SEQ ID NO: 9186 - DNA, 25 bp, Homo sapien
gtgaagacatcttctcccattggat

SEQ ID NO: 9187 - DNA, 25 bp, Homo sapien
aaagccaggctagtgcagctctaaa

SEQ ID NO: 9188 - DNA, 25 bp, Homo sapien
tcccattggatgtgcttatgccttg

SEQ ID NO: 9189 - DNA, 25 bp, Homo sapien
tatgccttggtaaaataagaaagcc

SEQ ID NO: 9190 - DNA, 25 bp, Homo sapien
aagacgctaacttcatccacctggc

SEQ ID NO: 9191 - DNA, 25 bp, Homo sapien
ccttggtaaaataagaaagccaggc

SEQ ID NO: 9192 - DNA, 25 bp, Homo sapien
ggccactttgcccaggtggactttg

SEQ ID NO: 9193 - DNA, 25 bp, Homo sapien
gctagtgcagctctaaagttccctt

SEQ ID NO: 9194 - DNA, 25 bp, Homo sapien
ttttatgccactgagtgaagacatc

SEQ ID NO: 9195 - DNA, 25 bp, Homo sapien
cttgttgaagtaaatgatctggaaa

SEQ ID NO: 9196 - DNA, 25 bp, Homo sapien
gcttctgggggacaaaaactatgcc

SEQ ID NO: 9197 - DNA, 25 bp, Homo sapien
gtatctccctcatatggcacaattc

SEQ ID NO: 9198 - DNA, 25 bp, Homo sapien
atgcgccattcactgttgagttaaa

SEQ ID NO: 9199 - DNA, 25 bp, Homo sapien
caggttttaagcttctgggggacaa

SEQ ID NO: 9200 - DNA, 25 bp, Homo sapien
catatggcacaattcttaacactga

SEQ ID NO: 9201 - DNA, 25 bp, Homo sapien
tatattgtacattgactagtggtgg

SEQ ID NO: 9202 - DNA, 25 bp, Homo sapien
aatgatctggaaatggaagtgaaaa

SEQ ID NO: 9203 - DNA, 25 bp, Homo sapien
acaattcttaacactgaacatgcgc

SEQ ID NO: 9204 - DNA, 25 bp, Homo sapien
ctgaacatgcgccattcactgttga

SEQ ID NO: 9205 - DNA, 25 bp, Homo sapien
tcaataaatttgcttcctcaggttt

SEQ ID NO: 9206 - DNA, 25 bp, Homo sapien
agttaggtgactgatttgagatctt

SEQ ID NO: 9207 - DNA, 25 bp, Homo sapien
tctaggtagaggtggggcctcacta

SEQ ID NO: 9208 - DNA, 25 bp, Homo sapien
tattctaggtagaggtggggcctca

SEQ ID NO: 9209 - DNA, 25 bp, Homo sapien
agggtaacaccacaaccagctgatt

SEQ ID NO: 9210 - DNA, 25 bp, Homo sapien
ttctaggtagaggtggggcctcact

SEQ ID NO: 9211 - DNA, 25 bp, Homo sapien
gattacccgcctgagccactgcggc

SEQ ID NO: 9212 - DNA, 25 bp, Homo sapien
accacaggagggtaacaccacaacc

SEQ ID NO: 9213 - DNA, 25 bp, Homo sapien
attctaggtagaggtggggcctcac

SEQ ID NO: 9214 - DNA, 25 bp, Homo sapien
tattctgctagcttgggtttagttc

SEQ ID NO: 9215 - DNA, 25 bp, Homo sapien
atttttgtattctaggtagaggtgg

SEQ ID NO: 9216 - DNA, 25 bp, Homo sapien
gccactgcggccagccagttgggca

SEQ ID NO: 9217 - DNA, 25 bp, Homo sapien
aggagcagactccagggtctatatc

SEQ ID NO: 9218 - DNA, 25 bp, Homo sapien
gtggtgcggctggaatttcctcctt

SEQ ID NO: 9219 - DNA, 25 bp, Homo sapien
atgaggcaacagtgccaagtgcttc

SEQ ID NO: 9220 - DNA, 25 bp, Homo sapien
gtaggggcatgatccaaatcactgc

SEQ ID NO: 9221 - DNA, 25 bp, Homo sapien
ttggaggcaccttcctgcacattcc

SEQ ID NO: 9222 - DNA, 25 bp, Homo sapien
tgtcgtttgcaaatgtggtgcggct

SEQ ID NO: 9223 - DNA, 25 bp, Homo sapien
acagagcagtaagcgaccagccaca

SEQ ID NO: 9224 - DNA, 25 bp, Homo sapien
cttcaggaagatgcacagagcagta

SEQ ID NO: 9225 - DNA, 25 bp, Homo sapien
ttgtgtcccagaagaataaaggccc

SEQ ID NO: 9226 - DNA, 25 bp, Homo sapien
agcagtcccgtgtttgtgtcccaga

SEQ ID NO: 9227 - DNA, 25 bp, Homo sapien
atatcagagaccaatcagcagtccc

SEQ ID NO: 9228 - DNA, 25 bp, Homo sapien
ctgtgggctatggttcgcctacctc

SEQ ID NO: 9229 - DNA, 25 bp, Homo sapien
agctaatgctaactgatgaaaatgg

SEQ ID NO: 9230 - DNA, 25 bp, Homo sapien
gcacgacacgtgtgggaaacattta

SEQ ID NO: 9231 - DNA, 25 bp, Homo sapien
tgcagaagcagccatagacgatatg

SEQ ID NO: 9232 - DNA, 25 bp, Homo sapien
gtggaacagagatgagtcatcccag

SEQ ID NO: 9233 - DNA, 25 bp, Homo sapien
atgagagaacatgtggaacagagat

SEQ ID NO: 9234 - DNA, 25 bp, Homo sapien
ccagtcgagccagtccaaactagaa

SEQ ID NO: 9235 - DNA, 25 bp, Homo sapien
atccacctgtggaagcacgacacgt

SEQ ID NO: 9236 - DNA, 25 bp, Homo sapien
caaactagaagaactgcccagccaa

SEQ ID NO: 9237 - DNA, 25 bp, Homo sapien
atttaaataaccatagaaggcagta

SEQ ID NO: 9238 - DNA, 25 bp, Homo sapien
tcttaaaggaccagcaggaaatact

SEQ ID NO: 9239 - DNA, 25 bp, Homo sapien
tctcttccaaggatggtgtccggga

SEQ ID NO: 9240 - DNA, 25 bp, Homo sapien
catattttgggcaattggaaggctg

SEQ ID NO: 9241 - DNA, 25 bp, Homo sapien
gggtctgggatgaccagcaagctct

SEQ ID NO: 9242 - DNA, 25 bp, Homo sapien
caccaaggctggaattggtctgggt

SEQ ID NO: 9243 - DNA, 25 bp, Homo sapien
ttggtcagagggaaacgcctcacca

SEQ ID NO: 9244 - DNA, 25 bp, Homo sapien
ctgcacaagccgactgctggacgct

SEQ ID NO: 9245 - DNA, 25 bp, Homo sapien
aggatcggtaaggaactaggttctc

SEQ ID NO: 9246 - DNA, 25 bp, Homo sapien
ccttgcccaagggtctgggatgacc

SEQ ID NO: 9247 - DNA, 25 bp, Homo sapien
gactgaggcacgaaaggatcggtaa

SEQ ID NO: 9248 - DNA, 25 bp, Homo sapien
aaggctgccctgcacaagccgactg

SEQ ID NO: 9249 - DNA, 25 bp, Homo sapien
actgctggacgctgctgtcttgccc

SEQ ID NO: 9250 - DNA, 25 bp, Homo sapien
cagactgggaaaacctcccaaaaga

SEQ ID NO: 9251 - DNA, 25 bp, Homo sapien
cctacagtgaccagaaacagcaaaa

SEQ ID NO: 9252 - DNA, 25 bp, Homo sapien
ccactgcccttcagactgggaaaac

SEQ ID NO: 9253 - DNA, 25 bp, Homo sapien
cagccaagagctaaccctacagtga

SEQ ID NO: 9254 - DNA, 25 bp, Homo sapien
tcatccactgcatagggaatcagca

SEQ ID NO: 9255 - DNA, 25 bp, Homo sapien
tatgccacatacaccaacttgctat

SEQ ID NO: 9256 - DNA, 25 bp, Homo sapien
ctttagccaaaaattcatccactgc

SEQ ID NO: 9257 - DNA, 25 bp, Homo sapien
gcctgggtctgctaactctagagtt

SEQ ID NO: 9258 - DNA, 25 bp, Homo sapien
agaaccagagcctgggtctgctaac

SEQ ID NO: 9259 - DNA, 25 bp, Homo sapien
cttgctataccagtaaataaggcag

SEQ ID NO: 9260 - DNA, 25 bp, Homo sapien
ggaatcagcagaggtttccactgcc

SEQ ID NO: 9261 - DNA, 25 bp, Homo sapien
gacttcaaagacaacaggcgcagga

SEQ ID NO: 9262 - DNA, 25 bp, Homo sapien
gacaacaggcgcaggagcccacact

SEQ ID NO: 9263 - DNA, 25 bp, Homo sapien
ccctgggatctcagagagcagagag

SEQ ID NO: 9264 - DNA, 25 bp, Homo sapien
agctgatctggttgcagggacttca

SEQ ID NO: 9265 - DNA, 25 bp, Homo sapien
ctggatggcacaatgcgaggccttc

SEQ ID NO: 9266 - DNA, 25 bp, Homo sapien
tggcacaatgcgaggccttccctga

SEQ ID NO: 9267 - DNA, 25 bp, Homo sapien
cagggacttcaaagacaacaggcgc

SEQ ID NO: 9268 - DNA, 25 bp, Homo sapien
agagctgatctggttgcagggactt

SEQ ID NO: 9269 - DNA, 25 bp, Homo sapien
actgcctcagactggccgtggccaa

SEQ ID NO: 9270 - DNA, 25 bp, Homo sapien
aggagcccacactgcctcagactgg

SEQ ID NO: 9271 - DNA, 25 bp, Homo sapien
ctgatctggttgcagggacttcaaa

SEQ ID NO: 9272 - DNA, 25 bp, Homo sapien
tgttttgcagcacagaacagaagct

SEQ ID NO: 9273 - DNA, 25 bp, Homo sapien
tggatttctcattggcggagaggac

SEQ ID NO: 9274 - DNA, 25 bp, Homo sapien
ggagaggacgcccaaaccctcagac

SEQ ID NO: 9275 - DNA, 25 bp, Homo sapien
taggtgcaaattaaggtaagaagac

SEQ ID NO: 9276 - DNA, 25 bp, Homo sapien
atctgaaatcgaagcttaaatgact

SEQ ID NO: 9277 - DNA, 25 bp, Homo sapien
gaggaaggccagtgctgtcccattt

SEQ ID NO: 9278 - DNA, 25 bp, Homo sapien
agaagctgcactgttatgctggagc

SEQ ID NO: 9279 - DNA, 25 bp, Homo sapien
cccgtccagtggctgaatgaaaagg

SEQ ID NO: 9280 - DNA, 25 bp, Homo sapien
gaggccgccaggtggatttctcatt

SEQ ID NO: 9281 - DNA, 25 bp, Homo sapien
tgcaggcttcaatgagctcgacagc

SEQ ID NO: 9282 - DNA, 25 bp, Homo sapien
caacattaaggccaagtaggtgcaa

SEQ ID NO: 9283 - DNA, 25 bp, Homo sapien
atgaatgaagcccagtatatttcct

SEQ ID NO: 9284 - DNA, 25 bp, Homo sapien
aattactaatgggaactggtcacct

SEQ ID NO: 9285 - DNA, 25 bp, Homo sapien
gcacaagagtgatatccaattaaaa

SEQ ID NO: 9286 - DNA, 25 bp, Homo sapien
gattttggtcgttcatggttcctct

SEQ ID NO: 9287 - DNA, 25 bp, Homo sapien
ccaagcgctgagattagaggtgtgt

SEQ ID NO: 9288 - DNA, 25 bp, Homo sapien
atgggaactggtcacctactcactt

SEQ ID NO: 9289 - DNA, 25 bp, Homo sapien
ttttgcctggtggtaagtcatctcc

SEQ ID NO: 9290 - DNA, 25 bp, Homo sapien
ccctggactcccaagcgctgagatt

SEQ ID NO: 9291 - DNA, 25 bp, Homo sapien
cttgatacttggtattagcatactt

SEQ ID NO: 9292 - DNA, 25 bp, Homo sapien
ccttcaaaagcatatttgagctatc

SEQ ID NO: 9293 - DNA, 25 bp, Homo sapien
tacaagtgataaaagtattgggtta

SEQ ID NO: 9294 - DNA, 25 bp, Homo sapien
acagcatatagtcgagtgatacctt

SEQ ID NO: 9295 - DNA, 25 bp, Homo sapien
agaacagtctattatatttgcccac

SEQ ID NO: 9296 - DNA, 25 bp, Homo sapien
tctcagcatgctttgaatcaatatt

SEQ ID NO: 9297 - DNA, 25 bp, Homo sapien
caccttaaaaggagaagaacagtct

SEQ ID NO: 9298 - DNA, 25 bp, Homo sapien
ttaaatgtgatgtagaaattcttcc

SEQ ID NO: 9299 - DNA, 25 bp, Homo sapien
tatgtgtgtggtgatgactgttaca

SEQ ID NO: 9300 - DNA, 25 bp, Homo sapien
gatatgtttgggtttagggctacta

SEQ ID NO: 9301 - DNA, 25 bp, Homo sapien
agtatgtttctggtagacagcatat

SEQ ID NO: 9302 - DNA, 25 bp, Homo sapien
cttttgggttacttgagcatttgtt

SEQ ID NO: 9303 - DNA, 25 bp, Homo sapien
ttctatatgcattgaaaacccatca

SEQ ID NO: 9304 - DNA, 25 bp, Homo sapien
ctattttaactagtgtgcttacacc

SEQ ID NO: 9305 - DNA, 25 bp, Homo sapien
tggctagccatcacagtgaggataa

SEQ ID NO: 9306 - DNA, 25 bp, Homo sapien
ttggcctctgtaataccacgttatt

SEQ ID NO: 9307 - DNA, 25 bp, Homo sapien
taataatgatttgggtcaggtggct

SEQ ID NO: 9308 - DNA, 25 bp, Homo sapien
ttcagtgctactacccatcaattgg

SEQ ID NO: 9309 - DNA, 25 bp, Homo sapien
agcactctgtgtagtgtacctgacc

SEQ ID NO: 9310 - DNA, 25 bp, Homo sapien
tgttccagttccaaagtattgagtc

SEQ ID NO: 9311 - DNA, 25 bp, Homo sapien
aacctagagtagatcatatgaagaa

SEQ ID NO: 9312 - DNA, 25 bp, Homo sapien
ataaggtggtcctcagtacataacc

SEQ ID NO: 9313 - DNA, 25 bp, Homo sapien
tcaattggtaggatatgtctatagc

SEQ ID NO: 9314 - DNA, 25 bp, Homo sapien
gtacctgacccagataaggtggtcc

SEQ ID NO: 9315 - DNA, 25 bp, Homo sapien
cttttttaggttgtatcagcagctt

SEQ ID NO: 9316 - DNA, 25 bp, Homo sapien
ctgcctatccatatgtagctgatta

SEQ ID NO: 9317 - DNA, 25 bp, Homo sapien
ctctcatgtaggttttagcattttc

SEQ ID NO: 9318 - DNA, 25 bp, Homo sapien
aatatgcacaatgccactggatgtg

SEQ ID NO: 9319 - DNA, 25 bp, Homo sapien
caggacatgcttccactagcacaga

SEQ ID NO: 9320 - DNA, 25 bp, Homo sapien
cagaaaggtgttacacttgagagcc

SEQ ID NO: 9321 - DNA, 25 bp, Homo sapien
ctagcacagagctacagctggacaa

SEQ ID NO: 9322 - DNA, 25 bp, Homo sapien
tggggcagatctggtaaacaaaaat

SEQ ID NO: 9323 - DNA, 25 bp, Homo sapien
atctttgaaacatcagacagtggca

SEQ ID NO: 9324 - DNA, 25 bp, Homo sapien
tggatgtgctagatcagatggtcat

SEQ ID NO: 9325 - DNA, 25 bp, Homo sapien
ttcatgggccctgctgaatagcttg

SEQ ID NO: 9326 - DNA, 25 bp, Homo sapien
agatggtcatcacacacccagatta

SEQ ID NO: 9327 - DNA, 25 bp, Homo sapien
agatcaagttttggtgcgccagtgc

SEQ ID NO: 9328 - DNA, 25 bp, Homo sapien
tttctctgtgagctgactgtcttat

SEQ ID NO: 9329 - DNA, 25 bp, Homo sapien
tattagtcacaaggcagtaatccaa

SEQ ID NO: 9330 - DNA, 25 bp, Homo sapien
gtgcgccagtgcttccgttgtttgc

SEQ ID NO: 9331 - DNA, 25 bp, Homo sapien
tggggatgaaagtgtctagtcctat

SEQ ID NO: 9332 - DNA, 25 bp, Homo sapien
cagagggtgggaatatgttttctta

SEQ ID NO: 9333 - DNA, 25 bp, Homo sapien
cctgggaaaagtaaaactcttcatg

SEQ ID NO: 9334 - DNA, 25 bp, Homo sapien
aaagaaagcaaatcaagcagagggt

SEQ ID NO: 9335 - DNA, 25 bp, Homo sapien
gactgtcttatatgtggggatgaaa

SEQ ID NO: 9336 - DNA, 25 bp, Homo sapien
aaaggcccttgaaagaaagcaaatc

SEQ ID NO: 9337 - DNA, 25 bp, Homo sapien
tccgttgtttgcagacccaccttgt

SEQ ID NO: 9338 - DNA, 25 bp, Homo sapien
ttctgatgtacccaggtagactttt

SEQ ID NO: 9339 - DNA, 25 bp, Homo sapien
gttcacagcagtcacaaagtttaaa

SEQ ID NO: 9340 - DNA, 25 bp, Homo sapien
gctaattacagtgccaaatcaaaac

SEQ ID NO: 9341 - DNA, 25 bp, Homo sapien
aattgttccaatggatctgtttcca

SEQ ID NO: 9342 - DNA, 25 bp, Homo sapien
tagaaaatgtttggatatctaggga

SEQ ID NO: 9343 - DNA, 25 bp, Homo sapien
atccaagtgtattccatagagttaa

SEQ ID NO: 9344 - DNA, 25 bp, Homo sapien
tttattctgatgtacccaggtagac

SEQ ID NO: 9345 - DNA, 25 bp, Homo sapien
ttagacaccaatatttgataaaagc

SEQ ID NO: 9346 - DNA, 25 bp, Homo sapien
gataaaagcaacaagcaccaaatta

SEQ ID NO: 9347 - DNA, 25 bp, Homo sapien
gttgtgcttagccataattgttcca

SEQ ID NO: 9348 - DNA, 25 bp, Homo sapien
acctgaataggttgtgcttagccat

SEQ ID NO: 9349 - DNA, 25 bp, Homo sapien
attgtgcaaactcgatcactagctc

SEQ ID NO: 9350 - DNA, 25 bp, Homo sapien
agcgaagggaaccaggtttgcaaaa

SEQ ID NO: 9351 - DNA, 25 bp, Homo sapien
gatggaaatgtgttagcctcagaca

SEQ ID NO: 9352 - DNA, 25 bp, Homo sapien
cataaagtgatgtgatggcccacaa

SEQ ID NO: 9353 - DNA, 25 bp, Homo sapien
tacagtctaagtactggttactgca

SEQ ID NO: 9354 - DNA, 25 bp, Homo sapien
ttattggctgacaagttgctttttg

SEQ ID NO: 9355 - DNA, 25 bp, Homo sapien
cagacactactgaggtggttctttc

SEQ ID NO: 9356 - DNA, 25 bp, Homo sapien
ctctgcgtgatgtggcagaagcgaa

SEQ ID NO: 9357 - DNA, 25 bp, Homo sapien
agactgttggtgtaattgtgcaaac

SEQ ID NO: 9358 - DNA, 25 bp, Homo sapien
gtgatggcccacaaatacaatgtat

SEQ ID NO: 9359 - DNA, 25 bp, Homo sapien
atcactagctctgcgtgatgtggca

SEQ ID NO: 9360 - DNA, 25 bp, Homo sapien
actaagtttgagagatgaatgcaaa

SEQ ID NO: 9361 - DNA, 25 bp, Homo sapien
aaaaactaagtttgagagatgaatg

SEQ ID NO: 9362 - DNA, 25 bp, Homo sapien
ttttccaaagtccatgtgaaattgt

SEQ ID NO: 9363 - DNA, 25 bp, Homo sapien
agtttgagagatgaatgcaaaggaa

SEQ ID NO: 9364 - DNA, 25 bp, Homo sapien
tcatgttcggttggtcaaagataaa

SEQ ID NO: 9365 - DNA, 25 bp, Homo sapien
aagtttgagagatgaatgcaaagga

SEQ ID NO: 9366 - DNA, 25 bp, Homo sapien
aaactaagtttgagagatgaatgca

SEQ ID NO: 9367 - DNA, 25 bp, Homo sapien
tccaaagtccatgtgaaattgtctc

SEQ ID NO: 9368 - DNA, 25 bp, Homo sapien
aagataaaaactaagtttgagagat

SEQ ID NO: 9369 - DNA, 25 bp, Homo sapien
aaagtccatgtgaaattgtctccca

SEQ ID NO: 9370 - DNA, 25 bp, Homo sapien
atgttcggttggtcaaagataaaaa

SEQ ID NO: 9371 - DNA, 25 bp, Homo sapien
taccttaacttattgagggtcttaa

SEQ ID NO: 9372 - DNA, 25 bp, Homo sapien
ttaagaccctcaataagttaaggta

SEQ ID NO: 9373 - DNA, 25 bp, Homo sapien
ccagaccctggcacaggggtcagat

SEQ ID NO: 9374 - DNA, 25 bp, Homo sapien
ttgtaggaggctgcatgataaggat

SEQ ID NO: 9375 - DNA, 25 bp, Homo sapien
tgcatgataaggatgagataggcta

SEQ ID NO: 9376 - DNA, 25 bp, Homo sapien
cccacgaggccaggctgatgccatc

SEQ ID NO: 9377 - DNA, 25 bp, Homo sapien
ccacagaggtgctcccagccagctc

SEQ ID NO: 9378 - DNA, 25 bp, Homo sapien
cccaggcagttgtctgggtcctgct

SEQ ID NO: 9379 - DNA, 25 bp, Homo sapien
cccaggagtgcctgcccttgtagga

SEQ ID NO: 9380 - DNA, 25 bp, Homo sapien
tcagtcctgggcctagcaagaccaa

SEQ ID NO: 9381 - DNA, 25 bp, Homo sapien
atcagacacaatcagtcctgggcct

SEQ ID NO: 9382 - DNA, 25 bp, Homo sapien
tgtgtctctgtcaaaatgaagaaaa

SEQ ID NO: 9383 - DNA, 25 bp, Homo sapien
aggggctggcccagaccctggcaca

SEQ ID NO: 9384 - DNA, 25 bp, Homo sapien
gtcataaaaggctgtttgatacatt

SEQ ID NO: 9385 - DNA, 25 bp, Homo sapien
attttttaggctagtcatggtggct

SEQ ID NO: 9386 - DNA, 25 bp, Homo sapien
ttattttttaggctagtcatggtgg

SEQ ID NO: 9387 - DNA, 25 bp, Homo sapien
tcagataaaccattactagaaagtc

SEQ ID NO: 9388 - DNA, 25 bp, Homo sapien
ccattactagaaagtcataaaaggc

SEQ ID NO: 9389 - DNA, 25 bp, Homo sapien
accattactagaaagtcataaaagg

SEQ ID NO: 9390 - DNA, 25 bp, Homo sapien
acattattattttttaggctagtca

SEQ ID NO: 9391 - DNA, 25 bp, Homo sapien
cagataaaccattactagaaagtca

SEQ ID NO: 9392 - DNA, 25 bp, Homo sapien
tattttttaggctagtcatggtggc

SEQ ID NO: 9393 - DNA, 25 bp, Homo sapien
agtcataaaaggctgtttgatacat

SEQ ID NO: 9394 - DNA, 25 bp, Homo sapien
ttttttaggctagtcatggtggctc

SEQ ID NO: 9395 - DNA, 25 bp, Homo sapien
tcctgcctgcctgggataggaatgt

SEQ ID NO: 9396 - DNA, 25 bp, Homo sapien
gtagctaaggaaagtcatgtgacac

SEQ ID NO: 9397 - DNA, 25 bp, Homo sapien
ttcctggactcctgtgtagctaagg

SEQ ID NO: 9398 - DNA, 25 bp, Homo sapien
aaggtcagcaaccatttgtgagtgc

SEQ ID NO: 9399 - DNA, 25 bp, Homo sapien
gaaatcccacataacaggtactgct

SEQ ID NO: 9400 - DNA, 25 bp, Homo sapien
tcctcagtaacagaagtgtaatttt

SEQ ID NO: 9401 - DNA, 25 bp, Homo sapien
aggaggagtgtttagaaaagccaaa

SEQ ID NO: 9402 - DNA, 25 bp, Homo sapien
ttcccaggaaggtaaaaggtcagca

SEQ ID NO: 9403 - DNA, 25 bp, Homo sapien
taattttgttcagaggaggagtgtt

SEQ ID NO: 9404 - DNA, 25 bp, Homo sapien
catttgtgagtgctggaaatcccac

SEQ ID NO: 9405 - DNA, 25 bp, Homo sapien
taacaggtactgctagttgcttctc

SEQ ID NO: 9406 - DNA, 25 bp, Homo sapien
atatagaagtaataacctggtagat

SEQ ID NO: 9407 - DNA, 25 bp, Homo sapien
tcctaatgtctcctcaaagtgcagc

SEQ ID NO: 9408 - DNA, 25 bp, Homo sapien
gtaaactcagtaaatatcagaagat

SEQ ID NO: 9409 - DNA, 25 bp, Homo sapien
acgccacggatttactcctaatgtc

SEQ ID NO: 9410 - DNA, 25 bp, Homo sapien
ataagcctaccacgccacggattta

SEQ ID NO: 9411 - DNA, 25 bp, Homo sapien
agatagcattacctatgaaaggtcc

SEQ ID NO: 9412 - DNA, 25 bp, Homo sapien
agaagataaagcataagcctaccac

SEQ ID NO: 9413 - DNA, 25 bp, Homo sapien
gtgcagcccgatgcaacgattacaa

SEQ ID NO: 9414 - DNA, 25 bp, Homo sapien
cccgatgcaacgattacaaatgatt

SEQ ID NO: 9415 - DNA, 25 bp, Homo sapien
tgtctcctcaaagtgcagcccgatg

SEQ ID NO: 9416 - DNA, 25 bp, Homo sapien
taataacctggtagatagcattacc

SEQ ID NO: 9417 - DNA, 25 bp, Homo sapien
ctggagcatagagtagaagtcacta

SEQ ID NO: 9418 - DNA, 25 bp, Homo sapien
ctgcagttatcttgttggagggtat

SEQ ID NO: 9419 - DNA, 25 bp, Homo sapien
tcttggtggattgcagagtatgtta

SEQ ID NO: 9420 - DNA, 25 bp, Homo sapien
gtcactagggagtgtatgaccctct

SEQ ID NO: 9421 - DNA, 25 bp, Homo sapien
cctttgcagcaatgatggatgagac

SEQ ID NO: 9422 - DNA, 25 bp, Homo sapien
gtacatgtaaagactggtgatattt

SEQ ID NO: 9423 - DNA, 25 bp, Homo sapien
cacatggcattagcagacgaaatag

SEQ ID NO: 9424 - DNA, 25 bp, Homo sapien
atggtcaatacattggccctgtgac

SEQ ID NO: 9425 - DNA, 25 bp, Homo sapien
ttggagggtattatctgagaagtca

SEQ ID NO: 9426 - DNA, 25 bp, Homo sapien
tatttgtgtgtaaccaaggggatgg

SEQ ID NO: 9427 - DNA, 25 bp, Homo sapien
atttctcaggtcatggtggcaagtc

SEQ ID NO: 9428 - DNA, 25 bp, Homo sapien
aaagcctagagtttgaataaactgc

SEQ ID NO: 9429 - DNA, 25 bp, Homo sapien
aaaagatcaaaacatcccagcagtg

SEQ ID NO: 9430 - DNA, 25 bp, Homo sapien
ttctgagtcataggcctaaagtatt

SEQ ID NO: 9431 - DNA, 25 bp, Homo sapien
agtttcacatctatggagggctgac

SEQ ID NO: 9432 - DNA, 25 bp, Homo sapien
gagcttaccaaaatcaatgacttag

SEQ ID NO: 9433 - DNA, 25 bp, Homo sapien
ttggtttccattctgagtcataggc

SEQ ID NO: 9434 - DNA, 25 bp, Homo sapien
cccagcagtgttgatcagtgacaat

SEQ ID NO: 9435 - DNA, 25 bp, Homo sapien
actggtgaatcagaaaaagtatctc

SEQ ID NO: 9436 - DNA, 25 bp, Homo sapien
taaactgcactatcatgagcttacc

SEQ ID NO: 9437 - DNA, 25 bp, Homo sapien
gctttaccaagttaaatgtggaatg

SEQ ID NO: 9438 - DNA, 25 bp, Homo sapien
ctatggagggctgactagcattcaa

SEQ ID NO: 9439 - DNA, 25 bp, Homo sapien
tatagaaatgccaactgtcactgga

SEQ ID NO: 9440 - DNA, 25 bp, Homo sapien
aattctggtttatagaaatgccaac

SEQ ID NO: 9441 - DNA, 25 bp, Homo sapien
tttgagcttcacaacatatctgggc

SEQ ID NO: 9442 - DNA, 25 bp, Homo sapien
tcctttagtatatcagcctcgaatt

SEQ ID NO: 9443 - DNA, 25 bp, Homo sapien
tgtaaaaacaattcatttgagcttc

SEQ ID NO: 9444 - DNA, 25 bp, Homo sapien
actctcaccaacttgaaactgttcc

SEQ ID NO: 9445 - DNA, 25 bp, Homo sapien
tccacagagctgtaagcagaggtac

SEQ ID NO: 9446 - DNA, 25 bp, Homo sapien
gagttttaaatacaaccatcagcac

SEQ ID NO: 9447 - DNA, 25 bp, Homo sapien
gagctgtaagcagaggtacaattct

SEQ ID NO: 9448 - DNA, 25 bp, Homo sapien
tatcagcctcgaatttaagaaataa

SEQ ID NO: 9449 - DNA, 25 bp, Homo sapien
tgatcttcatccacagagctgtaag

SEQ ID NO: 9450 - DNA, 25 bp, Homo sapien
cagattggggttggctgccctacct

SEQ ID NO: 9451 - DNA, 25 bp, Homo sapien
ttattgggcttaaagatggggctct

SEQ ID NO: 9452 - DNA, 25 bp, Homo sapien
aaaccgaggacacttttaagctgac

SEQ ID NO: 9453 - DNA, 25 bp, Homo sapien
ttgtccctgcagtgactgccgcgag

SEQ ID NO: 9454 - DNA, 25 bp, Homo sapien
ctggagcaaaaattctgtgggccta

SEQ ID NO: 9455 - DNA, 25 bp, Homo sapien
ggggagttaccctcagctctgaaga

SEQ ID NO: 9456 - DNA, 25 bp, Homo sapien
tgaagtgtttataagccgagaactc

SEQ ID NO: 9457 - DNA, 25 bp, Homo sapien
taaatgtgctagagcaacagagcga

SEQ ID NO: 9458 - DNA, 25 bp, Homo sapien
atggggctcttcgaccgtttggcta

SEQ ID NO: 9459 - DNA, 25 bp, Homo sapien
tccaagtctgcgcaggccgcctttg

SEQ ID NO: 9460 - DNA, 25 bp, Homo sapien
gctcgcaggccaatctgccagtgtt

SEQ ID NO: 9461 - DNA, 25 bp, Homo sapien
ctcacaatgcagtgcaaaggcaagt

SEQ ID NO: 9462 - DNA, 25 bp, Homo sapien
aaacagatcaacatagctgaatctc

SEQ ID NO: 9463 - DNA, 25 bp, Homo sapien
aacgacagaataatcatcagggatc

SEQ ID NO: 9464 - DNA, 25 bp, Homo sapien
aaatgctcattatcagagacctgaa

SEQ ID NO: 9465 - DNA, 25 bp, Homo sapien
atgtgtgcctagcaatgaaattgcc

SEQ ID NO: 9466 - DNA, 25 bp, Homo sapien
tttgaaggtggcatatacaggaata

SEQ ID NO: 9467 - DNA, 25 bp, Homo sapien
gtgtagtaggctatgcatctagatt

SEQ ID NO: 9468 - DNA, 25 bp, Homo sapien
actacgccatgtggtctaggtgtgt

SEQ ID NO: 9469 - DNA, 25 bp, Homo sapien
acaggaatattcgtagcaccatagt

SEQ ID NO: 9470 - DNA, 25 bp, Homo sapien
tttggtatagtcaaacgacagaata

SEQ ID NO: 9471 - DNA, 25 bp, Homo sapien
ttacatacatcagctggagttaaac

SEQ ID NO: 9472 - DNA, 25 bp, Homo sapien
acttacctaagatcacaaagctttt

SEQ ID NO: 9473 - DNA, 25 bp, Homo sapien
caaagcttttaagggatggaggcca

SEQ ID NO: 9474 - DNA, 25 bp, Homo sapien
ggccaggattccaaagctagcattg

SEQ ID NO: 9475 - DNA, 25 bp, Homo sapien
cacaaagcttttaagggatggaggc

SEQ ID NO: 9476 - DNA, 25 bp, Homo sapien
agaggatggccctaaccttcccgac

SEQ ID NO: 9477 - DNA, 25 bp, Homo sapien
gaggccaggattccaaagctagcat

SEQ ID NO: 9478 - DNA, 25 bp, Homo sapien
gtcagaggatggccctaaccttccc

SEQ ID NO: 9479 - DNA, 25 bp, Homo sapien
ccaagggggactttctatcgggagc

SEQ ID NO: 9480 - DNA, 25 bp, Homo sapien
agggggactttctatcgggagcaca

SEQ ID NO: 9481 - DNA, 25 bp, Homo sapien
tccaaagctagcattggaacgaaag

SEQ ID NO: 9482 - DNA, 25 bp, Homo sapien
cagaggatggccctaaccttcccga

SEQ ID NO: 9483 - DNA, 25 bp, Homo sapien
caaagcttttaagggatggaggcca

SEQ ID NO: 9484 - DNA, 25 bp, Homo sapien
tgagtcagaggatggccctaacctt

SEQ ID NO: 9485 - DNA, 25 bp, Homo sapien
tctacagtaggaaatggctcaaagt

SEQ ID NO: 9486 - DNA, 25 bp, Homo sapien
ggccaggattccaaagctagcattg

SEQ ID NO: 9487 - DNA, 25 bp, Homo sapien
atgagctaggaggacctactgcctc

SEQ ID NO: 9488 - DNA, 25 bp, Homo sapien
cacaaagcttttaagggatggaggc

SEQ ID NO: 9489 - DNA, 25 bp, Homo sapien
agggggactttctatcgggagcaca

SEQ ID NO: 9490 - DNA, 25 bp, Homo sapien
tccaaagctagcattggaacgaaag

SEQ ID NO: 9491 - DNA, 25 bp, Homo sapien
acttacctaagatcacaaagctttt

SEQ ID NO: 9492 - DNA, 25 bp, Homo sapien
agaggatggccctaaccttcccgac

SEQ ID NO: 9493 - DNA, 25 bp, Homo sapien
gaggccaggattccaaagctagcat

SEQ ID NO: 9494 - DNA, 25 bp, Homo sapien
aacaagagtgctggctttagagcca

SEQ ID NO: 9495 - DNA, 25 bp, Homo sapien
gtgctggctttagagccagagaaaa

SEQ ID NO: 9496 - DNA, 25 bp, Homo sapien
gattaaaagaccctgtccagagaac

SEQ ID NO: 9497 - DNA, 25 bp, Homo sapien
aaaagaccctgtccagagaacaaga

SEQ ID NO: 9498 - DNA, 25 bp, Homo sapien
tgcaaagcaacaaaggatgggagta

SEQ ID NO: 9499 - DNA, 25 bp, Homo sapien
caaagcaacaaaggatgggagtaca

SEQ ID NO: 9500 - DNA, 25 bp, Homo sapien
tccagagaacaagagtgctggcttt

SEQ ID NO: 9501 - DNA, 25 bp, Homo sapien
acaaaccagtcatcaccacatattc

SEQ ID NO: 9502 - DNA, 25 bp, Homo sapien
ctgctgcaaagcaacaaaggatggg

SEQ ID NO: 9503 - DNA, 25 bp, Homo sapien
agagaacaagagtgctggctttaga

SEQ ID NO: 9504 - DNA, 25 bp, Homo sapien
accctgtccagagaacaagagtgct

SEQ ID NO: 9505 - DNA, 25 bp, Homo sapien
actgattactttctaaggccaattc

SEQ ID NO: 9506 - DNA, 25 bp, Homo sapien
aaaactgaacatacactaggtgatt

SEQ ID NO: 9507 - DNA, 25 bp, Homo sapien
gtgggcaggaaatgtatgtctcatt

SEQ ID NO: 9508 - DNA, 25 bp, Homo sapien
accgcacctagcatcactgattact

SEQ ID NO: 9509 - DNA, 25 bp, Homo sapien
attccttttggcctagctggactgt

SEQ ID NO: 9510 - DNA, 25 bp, Homo sapien
attaaaactgaacatacactaggtg

SEQ ID NO: 9511 - DNA, 25 bp, Homo sapien
tttggcctagctggactgtaaattc

SEQ ID NO: 9512 - DNA, 25 bp, Homo sapien
tacactaggtgattaaaagaccctg

SEQ ID NO: 9513 - DNA, 25 bp, Homo sapien
ccttttggcctagctggactgtaaa

SEQ ID NO: 9514 - DNA, 25 bp, Homo sapien
ctgtaaattccttgtgggcaggaaa

SEQ ID NO: 9515 - DNA, 25 bp, Homo sapien
tccttgtgggcaggaaatgtatgtc

SEQ ID NO: 9516 - DNA, 25 bp, Homo sapien
ttttgagtgctacaatccaatcgac

SEQ ID NO: 9517 - DNA, 25 bp, Homo sapien
atcttaactggggtggtggatccat

SEQ ID NO: 9518 - DNA, 25 bp, Homo sapien
ctgaacctggccctggaatgttcta

SEQ ID NO: 9519 - DNA, 25 bp, Homo sapien
ctacggttacaggtatatgtcacaa

SEQ ID NO: 9520 - DNA, 25 bp, Homo sapien
aatccaatcgacaaaaatgcttgaa

SEQ ID NO: 9521 - DNA, 25 bp, Homo sapien
gccaccagagtagctacggttacag

SEQ ID NO: 9522 - DNA, 25 bp, Homo sapien
cacacacacttctgtgaagagaatt

SEQ ID NO: 9523 - DNA, 25 bp, Homo sapien
tggtggatccatgattatgtacacg

SEQ ID NO: 9524 - DNA, 25 bp, Homo sapien
acctggccctggaatgttctatatc

SEQ ID NO: 9525 - DNA, 25 bp, Homo sapien
aagagaattattccacaggcccaat

SEQ ID NO: 9526 - DNA, 25 bp, Homo sapien
gcgattacaagcatgatccactgaa

SEQ ID NO: 9527 - DNA, 25 bp, Homo sapien
agaccaatgacagcaaatgacctac

SEQ ID NO: 9528 - DNA, 25 bp, Homo sapien
gccagacaaccacacagagaataat

SEQ ID NO: 9529 - DNA, 25 bp, Homo sapien
tccgctgtcaggagcaacatttcca

SEQ ID NO: 9530 - DNA, 25 bp, Homo sapien
gggtgactgcagctttcagaccaat

SEQ ID NO: 9531 - DNA, 25 bp, Homo sapien
acaaaaatttggactctgctagaga

SEQ ID NO: 9532 - DNA, 25 bp, Homo sapien
ggggcttcagtacaaagaaactcat

SEQ ID NO: 9533 - DNA, 25 bp, Homo sapien
actttaactggtagacacaggtcct

SEQ ID NO: 9534 - DNA, 25 bp, Homo sapien
attctcacagatagggccaaagagt

SEQ ID NO: 9535 - DNA, 25 bp, Homo sapien
ccaaagagtgcagtagaatatgttt

SEQ ID NO: 9536 - DNA, 25 bp, Homo sapien
ttttggctgccaggactgaattttt

SEQ ID NO: 9537 - DNA, 25 bp, Homo sapien
gtgctaagagtgtgtgaatcccgaa

SEQ ID NO: 9538 - DNA, 25 bp, Homo sapien
gcccagagggatcaactgcattgtt

SEQ ID NO: 9539 - DNA, 25 bp, Homo sapien
ggagtgaggagaataaatatctggt

SEQ ID NO: 9540 - DNA, 25 bp, Homo sapien
actgcattgttggtgtcctcgtatc

SEQ ID NO: 9541 - DNA, 25 bp, Homo sapien
ttctgacaccagagttgctgtgggt

SEQ ID NO: 9542 - DNA, 25 bp, Homo sapien
catgtttcagatgggagactcaggc

SEQ ID NO: 9543 - DNA, 25 bp, Homo sapien
ccttgcagctcaggatttcagaaaa

SEQ ID NO: 9544 - DNA, 25 bp, Homo sapien
gtttggccagaccatttatagcttc

SEQ ID NO: 9545 - DNA, 25 bp, Homo sapien
tgctgtgggtctgttgaatgttaat

SEQ ID NO: 9546 - DNA, 25 bp, Homo sapien
tgatttcgtgatgtcagagtggaga

SEQ ID NO: 9547 - DNA, 25 bp, Homo sapien
tgtcctcgtatctgctgggagtgag

SEQ ID NO: 9548 - DNA, 25 bp, Homo sapien
acaggtgaggcagaaccttgcagct

SEQ ID NO: 9549 - DNA, 25 bp, Homo sapien
gattcacagtgggaataaagtcagc

SEQ ID NO: 9550 - DNA, 25 bp, Homo sapien
ttaggaaaaactgcttctggacttc

SEQ ID NO: 9551 - DNA, 25 bp, Homo sapien
actgggagccagattatagtgccac

SEQ ID NO: 9552 - DNA, 25 bp, Homo sapien
ataaagtcagccagcatgcctacag

SEQ ID NO: 9553 - DNA, 25 bp, Homo sapien
gatacacagctgagaccaaagtctt

SEQ ID NO: 9554 - DNA, 25 bp, Homo sapien
ctgagaggagcaacatctaaagtcc

SEQ ID NO: 9555 - DNA, 25 bp, Homo sapien
gctaattcggagatcactgagagga

SEQ ID NO: 9556 - DNA, 25 bp, Homo sapien
gtggaactgattcatagggctgctt

SEQ ID NO: 9557 - DNA, 25 bp, Homo sapien
cctacaggggcacatatagtgtgtt

SEQ ID NO: 9558 - DNA, 25 bp, Homo sapien
atagtgccacgtcaagatccaccat

SEQ ID NO: 9559 - DNA, 25 bp, Homo sapien
ttggcaagcctacatccaggggcac

SEQ ID NO: 9560 - DNA, 25 bp, Homo sapien
atacgatgaagggtacacagcccaa

SEQ ID NO: 9561 - DNA, 25 bp, Homo sapien
tatagttcatctaggcagacagttc

SEQ ID NO: 9562 - DNA, 25 bp, Homo sapien
attcaggtggctattcaaatctggc

SEQ ID NO: 9563 - DNA, 25 bp, Homo sapien
gaagagggtctagtagccacaaaat

SEQ ID NO: 9564 - DNA, 25 bp, Homo sapien
tgaagagccagtgcacatcccagct

SEQ ID NO: 9565 - DNA, 25 bp, Homo sapien
gccctagggacatggtatagttcat

SEQ ID NO: 9566 - DNA, 25 bp, Homo sapien
tttaaggaacctggaagatacgatg

SEQ ID NO: 9567 - DNA, 25 bp, Homo sapien
gcccaagagagctggtaaaacttca

SEQ ID NO: 9568 - DNA, 25 bp, Homo sapien
tagtaaccctgcgtcctgtctgtgc

SEQ ID NO: 9569 - DNA, 25 bp, Homo sapien
aaatgcacatgggacttggccctag

SEQ ID NO: 9570 - DNA, 25 bp, Homo sapien
atgctggatctagctgtgaagagcc

SEQ ID NO: 9571 - DNA, 25 bp, Homo sapien
tatatgaagaaaaccacactggaga

SEQ ID NO: 9572 - DNA, 25 bp, Homo sapien
gactgaaaatactaaatgttgataa

SEQ ID NO: 9573 - DNA, 25 bp, Homo sapien
taggaactttcaaaaagaagtgatg

SEQ ID NO: 9574 - DNA, 25 bp, Homo sapien
ctggagagatgtatgagaatgtcta

SEQ ID NO: 9575 - DNA, 25 bp, Homo sapien
agaaaaccacactggagagatgtat

SEQ ID NO: 9576 - DNA, 25 bp, Homo sapien
tattggtcatcaaagaaggacaaat

SEQ ID NO: 9577 - DNA, 25 bp, Homo sapien
ataaacccgacattaagatacgatt

SEQ ID NO: 9578 - DNA, 25 bp, Homo sapien
aatgaacaatcactgagaaaagaaa

SEQ ID NO: 9579 - DNA, 25 bp, Homo sapien
aaagaaaaggcctaaatggtcaaca

SEQ ID NO: 9580 - DNA, 25 bp, Homo sapien
aaaaggcctaaatggtcaacaaatg

SEQ ID NO: 9581 - DNA, 25 bp, Homo sapien
aaatgggtatgatctaaactcagta

SEQ ID NO: 9582 - DNA, 25 bp, Homo sapien
tcttttaagtgcagactcaaatgtc

SEQ ID NO: 9583 - DNA, 25 bp, Homo sapien
cttcctctaggaagagcagaggttt

SEQ ID NO: 9584 - DNA, 25 bp, Homo sapien
tagaactctttgcaaaccaggactt

SEQ ID NO: 9585 - DNA, 25 bp, Homo sapien
gaacaactgaagaacgtcaagcatt

SEQ ID NO: 9586 - DNA, 25 bp, Homo sapien
tcagaaggcactattggcatcaaag

SEQ ID NO: 9587 - DNA, 25 bp, Homo sapien
agagcagaggtttcagataccacgt

SEQ ID NO: 9588 - DNA, 25 bp, Homo sapien
tagagcatgtcaaagggacgatatt

SEQ ID NO: 9589 - DNA, 25 bp, Homo sapien
cagataccacgtgcatgactagagc

SEQ ID NO: 9590 - DNA, 25 bp, Homo sapien
ctctcacaatagttccaccaggata

SEQ ID NO: 9591 - DNA, 25 bp, Homo sapien
ctctgctttgcagtcaggatgcatt

SEQ ID NO: 9592 - DNA, 25 bp, Homo sapien
acagttccctgttgataatgaagtc

SEQ ID NO: 9593 - DNA, 25 bp, Homo sapien
agacacttcttgcttcgtagtaaag

SEQ ID NO: 9594 - DNA, 25 bp, Homo sapien
tcttgcttcgtagtaaagttctttc

SEQ ID NO: 9595 - DNA, 25 bp, Homo sapien
tgctctatttggtgctaaccaatgg

SEQ ID NO: 9596 - DNA, 25 bp, Homo sapien
agagtagacacttcttgcttcgtag

SEQ ID NO: 9597 - DNA, 25 bp, Homo sapien
tttctgataaagcagtaaattggga

SEQ ID NO: 9598 - DNA, 25 bp, Homo sapien
tcacagaagagtagacacttcttgc

SEQ ID NO: 9599 - DNA, 25 bp, Homo sapien
ctatttggtgctaaccaatggaagt

SEQ ID NO: 9600 - DNA, 25 bp, Homo sapien
gaaaacttactccttcacagaagag

SEQ ID NO: 9601 - DNA, 25 bp, Homo sapien
aagttctttctgataaagcagtaaa

SEQ ID NO: 9602 - DNA, 25 bp, Homo sapien
ctgataaagcagtaaattgggaata

SEQ ID NO: 9603 - DNA, 25 bp, Homo sapien
cagaagagtagacacttcttgcttc

SEQ ID NO: 9604 - DNA, 25 bp, Homo sapien
ggctctccagtgtggaaatttgcat

SEQ ID NO: 9605 - DNA, 25 bp, Homo sapien
gtaaattgggaataatcatgaaagt

SEQ ID NO: 9606 - DNA, 25 bp, Homo sapien
ataagcagcttactcaggcttgctc

SEQ ID NO: 9607 - DNA, 25 bp, Homo sapien
atgaaagtattgatctcggtcggct

SEQ ID NO: 9608 - DNA, 25 bp, Homo sapien
aaagatgtttgtgtgatcccttcag

SEQ ID NO: 9609 - DNA, 25 bp, Homo sapien
tgttttctgattaacaaagaagtct

SEQ ID NO: 9610 - DNA, 25 bp, Homo sapien
tttgtgtgatcccttcagaagtcat

SEQ ID NO: 9611 - DNA, 25 bp, Homo sapien
gctgctttctaacttgccttatttg

SEQ ID NO: 9612 - DNA, 25 bp, Homo sapien
aatcatgaaagtattgatctcggtc

SEQ ID NO: 9613 - DNA, 25 bp, Homo sapien
caaagaagtctttaaagatgtttgt

SEQ ID NO: 9614 - DNA, 25 bp, Homo sapien
ctccagtgtggaaatttgcatgtaa

SEQ ID NO: 9615 - DNA, 25 bp, Homo sapien
tgcgagacacattcgggagcttgat

SEQ ID NO: 9616 - DNA, 25 bp, Homo sapien
tgagttacagaggaagcgcttacaa

SEQ ID NO: 9617 - DNA, 25 bp, Homo sapien
tcagagcgtttcaagttggcggcta

SEQ ID NO: 9618 - DNA, 25 bp, Homo sapien
ttacaagcagcaggtagttaaagca

SEQ ID NO: 9619 - DNA, 25 bp, Homo sapien
gaattggccacgtcagagctgactt

SEQ ID NO: 9620 - DNA, 25 bp, Homo sapien
aaatacacagaagtctcagagcgtt

SEQ ID NO: 9621 - DNA, 25 bp, Homo sapien
ccaaaaagtgtccaatagtgcgaga

SEQ ID NO: 9622 - DNA, 25 bp, Homo sapien
cagagctgacttgaagaagcatcaa

SEQ ID NO: 9623 - DNA, 25 bp, Homo sapien
gttactaggaagaaggaatgatcta

SEQ ID NO: 9624 - DNA, 25 bp, Homo sapien
ttgatgagaagaacatcagcctgag

SEQ ID NO: 9625 - DNA, 25 bp, Homo sapien
caaacacagaagcaacaaagttgca

SEQ ID NO: 9626 - DNA, 25 bp, Homo sapien
tggaaattgcaagggtgatagttaa

SEQ ID NO: 9627 - DNA, 25 bp, Homo sapien
agacagagagaaataatgggacaga

SEQ ID NO: 9628 - DNA, 25 bp, Homo sapien
gtttctctatgaaggtgaaagtcac

SEQ ID NO: 9629 - DNA, 25 bp, Homo sapien
ctgatgttccaggatccgcaggtag

SEQ ID NO: 9630 - DNA, 25 bp, Homo sapien
acagttcctgaatgtgcagagagca

SEQ ID NO: 9631 - DNA, 25 bp, Homo sapien
aatgttgcacaatgaggttgcagcc

SEQ ID NO: 9632 - DNA, 25 bp, Homo sapien
acaagaagcattgaccctgatgttc

SEQ ID NO: 9633 - DNA, 25 bp, Homo sapien
gtctcagtgagccagaaacagttcc

SEQ ID NO: 9634 - DNA, 25 bp, Homo sapien
acccggttgatccaggctgggctca

SEQ ID NO: 9635 - DNA, 25 bp, Homo sapien
aagtcccttaaaggcggttcatcgc

SEQ ID NO: 9636 - DNA, 25 bp, Homo sapien
cttctagaggaaattgggtcaggtc

SEQ ID NO: 9637 - DNA, 25 bp, Homo sapien
gtgacttaaacaggcgaacctgatt

SEQ ID NO: 9638 - DNA, 25 bp, Homo sapien
ttgctacacagagaacacagggcct

SEQ ID NO: 9639 - DNA, 25 bp, Homo sapien
agtccctgctatctggcaacctttg

SEQ ID NO: 9640 - DNA, 25 bp, Homo sapien
accatcaaggctttacaacagcaac

SEQ ID NO: 9641 - DNA, 25 bp, Homo sapien
agttatgaccaaagctcagcaaaga

SEQ ID NO: 9642 - DNA, 25 bp, Homo sapien
aacgaaataccaaagactgggtgac

SEQ ID NO: 9643 - DNA, 25 bp, Homo sapien
aacacagggcctgtcttagctcagg

SEQ ID NO: 9644 - DNA, 25 bp, Homo sapien
taaatgttcctgtttggtagtccaa

SEQ ID NO: 9645 - DNA, 25 bp, Homo sapien
aaagtctaggggtcctctacaaata

SEQ ID NO: 9646 - DNA, 25 bp, Homo sapien
aagacagtatgttttggatcacttt

SEQ ID NO: 9647 - DNA, 25 bp, Homo sapien
caatgctcaaaaactgaagacagta

SEQ ID NO: 9648 - DNA, 25 bp, Homo sapien
gctgggaatccaggcgccaccacca

SEQ ID NO: 9649 - DNA, 25 bp, Homo sapien
aggggccctaactcatttctgtact

SEQ ID NO: 9650 - DNA, 25 bp, Homo sapien
tcttccctggtataaagaactgctg

SEQ ID NO: 9651 - DNA, 25 bp, Homo sapien
tcctcttccctggtataaagaactg

SEQ ID NO: 9652 - DNA, 25 bp, Homo sapien
tcttcactgaataaactatcacatc

SEQ ID NO: 9653 - DNA, 25 bp, Homo sapien
cggcccaggcctaccttgtaaggtc

SEQ ID NO: 9654 - DNA, 25 bp, Homo sapien
agaactgctgtttactaagcttttc

SEQ ID NO: 9655 - DNA, 25 bp, Homo sapien
ctccgccttcccaggtccagcgatt

SEQ ID NO: 9656 - DNA, 25 bp, Homo sapien
agagcaggggccctaactcatttct

SEQ ID NO: 9657 - DNA, 25 bp, Homo sapien
cttttcagaggaatagggccgggta

SEQ ID NO: 9658 - DNA, 25 bp, Homo sapien
gtaaggtctgtaattcttagagagc

SEQ ID NO: 9659 - DNA, 25 bp, Homo sapien
cagcagattgctagctatggtccat

SEQ ID NO: 9660 - DNA, 25 bp, Homo sapien
gtaatgagatgaagcgtagtgttta

SEQ ID NO: 9661 - DNA, 25 bp, Homo sapien
gcaagagctaggttgaagacttcaa

SEQ ID NO: 9662 - DNA, 25 bp, Homo sapien
agactaagaaaaagttgagagcaag

SEQ ID NO: 9663 - DNA, 25 bp, Homo sapien
tgtttagaaatctgaagtggggact

SEQ ID NO: 9664 - DNA, 25 bp, Homo sapien
tctcggggctcaaaaatatacactg

SEQ ID NO: 9665 - DNA, 25 bp, Homo sapien
ggtatttctggtggcgcagcttcaa

SEQ ID NO: 9666 - DNA, 25 bp, Homo sapien
gcagagccagagtatagccacattt

SEQ ID NO: 9667 - DNA, 25 bp, Homo sapien
tttctgtttggtagtctcggggctc

SEQ ID NO: 9668 - DNA, 25 bp, Homo sapien
actgccacacaactaagaaaacatc

SEQ ID NO: 9669 - DNA, 25 bp, Homo sapien
ataagagttttatgagccagcagat

SEQ ID NO: 9670 - DNA, 25 bp, Homo sapien
ttccagtttcttgtgatccctccat

SEQ ID NO: 9671 - DNA, 25 bp, Homo sapien
ttaagtaaatggtagctgtgaacac

SEQ ID NO: 9672 - DNA, 25 bp, Homo sapien
tctatgaatatatgagcatacatgt

SEQ ID NO: 9673 - DNA, 25 bp, Homo sapien
aaaggtataaaagaggacacagtaa

SEQ ID NO: 9674 - DNA, 25 bp, Homo sapien
atcaaaaggtataaaagaggacaca

SEQ ID NO: 9675 - DNA, 25 bp, Homo sapien
cccatgacccatgaccttataattt

SEQ ID NO: 9676 - DNA, 25 bp, Homo sapien
tcagtaagctggtttttaggcaata

SEQ ID NO: 9677 - DNA, 25 bp, Homo sapien
atggtagctgtgaacacacggttct

SEQ ID NO: 9678 - DNA, 25 bp, Homo sapien
ataattttaaccagaagcagccact

SEQ ID NO: 9679 - DNA, 25 bp, Homo sapien
taaataggtgcacatcaaaaggtat

SEQ ID NO: 9680 - DNA, 25 bp, Homo sapien
gaacacacggttctgtaccttgcat

SEQ ID NO: 9681 - DNA, 25 bp, Homo sapien
ttaagatggccatgtaaatgttaac

SEQ ID NO: 9682 - DNA, 25 bp, Homo sapien
cttggttaaggctacgacacgtttc

SEQ ID NO: 9683 - DNA, 25 bp, Homo sapien
aagatcaaccaacatggaggtgact

SEQ ID NO: 9684 - DNA, 25 bp, Homo sapien
tttcccgagtatgagactgggagtc

SEQ ID NO: 9685 - DNA, 25 bp, Homo sapien
tatggagtacaagaggcctagatcc

SEQ ID NO: 9686 - DNA, 25 bp, Homo sapien
ctataggtctgatctggctggtgct

SEQ ID NO: 9687 - DNA, 25 bp, Homo sapien
catggaggtgactgatcttggttaa

SEQ ID NO: 9688 - DNA, 25 bp, Homo sapien
agtgatttcgggcagattactgtcc

SEQ ID NO: 9689 - DNA, 25 bp, Homo sapien
tctgcttactggctggcagatccag

SEQ ID NO: 9690 - DNA, 25 bp, Homo sapien
ttcctacagggctgaggtctgctta

SEQ ID NO: 9691 - DNA, 25 bp, Homo sapien
aagcctgttgtagccttaaccaaga

SEQ ID NO: 9692 - DNA, 25 bp, Homo sapien
attaacttccacttccagcaggttc

SEQ ID NO: 9693 - DNA, 25 bp, Homo sapien
gcttcagagccaccttttgtttgcc

SEQ ID NO: 9694 - DNA, 25 bp, Homo sapien
tcttgaggaatctaagaagatcctt

SEQ ID NO: 9695 - DNA, 25 bp, Homo sapien
tattaaagactgagaggacattgct

SEQ ID NO: 9696 - DNA, 25 bp, Homo sapien
ctttggcttcaaggcagatggaacc

SEQ ID NO: 9697 - DNA, 25 bp, Homo sapien
tcggctcatctcctcagcttgggac

SEQ ID NO: 9698 - DNA, 25 bp, Homo sapien
ctggtagtccaagacggtctggaat

SEQ ID NO: 9699 - DNA, 25 bp, Homo sapien
ggggccacctattaaagactgagag

SEQ ID NO: 9700 - DNA, 25 bp, Homo sapien
ccacccactccttcggggagaggag

SEQ ID NO: 9701 - DNA, 25 bp, Homo sapien
aactcggggcctgaatttttcttga

SEQ ID NO: 9702 - DNA, 25 bp, Homo sapien
acaggctggtagtccaagacggtct

SEQ ID NO: 9703 - DNA, 25 bp, Homo sapien
ttactaaaagtctgagcagcgcctt

SEQ ID NO: 9704 - DNA, 25 bp, Homo sapien
gcaaccgccgtctgaaatagcaatc

SEQ ID NO: 9705 - DNA, 25 bp, Homo sapien
tctgatgtcaggcaatcccgtgtcc

SEQ ID NO: 9706 - DNA, 25 bp, Homo sapien
agacaggtcggctgctgcaaccgcc

SEQ ID NO: 9707 - DNA, 25 bp, Homo sapien
atcccgtgtccaggtcaggtcactt

SEQ ID NO: 9708 - DNA, 25 bp, Homo sapien
agagtagacgccctgcggctctgat

SEQ ID NO: 9709 - DNA, 25 bp, Homo sapien
atagcaatccggaaaagtcaggttg

SEQ ID NO: 9710 - DNA, 25 bp, Homo sapien
caaaaaagtcatcgtggcacatcaa

SEQ ID NO: 9711 - DNA, 25 bp, Homo sapien
taacaggaacttaagaatccagctc

SEQ ID NO: 9712 - DNA, 25 bp, Homo sapien
ttggcagtagatggcgctcaccttt

SEQ ID NO: 9713 - DNA, 25 bp, Homo sapien
tctctgactacagtggtggagttga

SEQ ID NO: 9714 - DNA, 25 bp, Homo sapien
tggggtggaaaattatgacaactga

SEQ ID NO: 9715 - DNA, 25 bp, Homo sapien
ccagacacagtaactagagtagctt

SEQ ID NO: 9716 - DNA, 25 bp, Homo sapien
gaactaaatagaatctggggtggaa

SEQ ID NO: 9717 - DNA, 25 bp, Homo sapien
ggaaagtaggagaatgatgtctcat

SEQ ID NO: 9718 - DNA, 25 bp, Homo sapien
attctaaggaagtccagacacagta

SEQ ID NO: 9719 - DNA, 25 bp, Homo sapien
caccagatgaactcaaaagtagatt

SEQ ID NO: 9720 - DNA, 25 bp, Homo sapien
gcctaattaggaagtcatgtgtgaa

SEQ ID NO: 9721 - DNA, 25 bp, Homo sapien
tgtgaagaaataaaggaaagtagga

SEQ ID NO: 9722 - DNA, 25 bp, Homo sapien
agcctatacgcaagaaaaagcacag

SEQ ID NO: 9723 - DNA, 25 bp, Homo sapien
atggaacgccatgaagtaagcatac

SEQ ID NO: 9724 - DNA, 25 bp, Homo sapien
aaaagcacagccaacagaaattcat

SEQ ID NO: 9725 - DNA, 25 bp, Homo sapien
gccaagctagcaatggtgcagattt

SEQ ID NO: 9726 - DNA, 25 bp, Homo sapien
ttaaagcacaagaaatattgaactg

SEQ ID NO: 9727 - DNA, 25 bp, Homo sapien
aggttgaacaccctgatgaaaaaga

SEQ ID NO: 9728 - DNA, 25 bp, Homo sapien
ttaagtgcaggaatcatcttatccc

SEQ ID NO: 9729 - DNA, 25 bp, Homo sapien
tccatggtgagccttgcattccctt

SEQ ID NO: 9730 - DNA, 25 bp, Homo sapien
agggagtgccactgctcaaacagaa

SEQ ID NO: 9731 - DNA, 25 bp, Homo sapien
gaacaagtagtgtatgacagtggat

SEQ ID NO: 9732 - DNA, 25 bp, Homo sapien
tgctcaaacagaaacagagggatcc

SEQ ID NO: 9733 - DNA, 25 bp, Homo sapien
gtgcagatttaccattccagaggcc

SEQ ID NO: 9734 - DNA, 25 bp, Homo sapien
tatgacagtggattctagtcagccc

SEQ ID NO: 9735 - DNA, 25 bp, Homo sapien
agagggatcctgcacccactccttg

SEQ ID NO: 9736 - DNA, 25 bp, Homo sapien
aaacataggttaccacgttctctcc

SEQ ID NO: 9737 - DNA, 25 bp, Homo sapien
tctgtaaacacccaaaatgttccag

SEQ ID NO: 9738 - DNA, 25 bp, Homo sapien
acataggttaccacgttctctccca

SEQ ID NO: 9739 - DNA, 25 bp, Homo sapien
ctcccatggaatacccatttctgta

SEQ ID NO: 9740 - DNA, 25 bp, Homo sapien
tggggttttcctgctttataaagca

SEQ ID NO: 9741 - DNA, 25 bp, Homo sapien
ttttcagtgattaaacaaatgatga

SEQ ID NO: 9742 - DNA, 25 bp, Homo sapien
tgtaaacacccaaaatgttccagtg

SEQ ID NO: 9743 - DNA, 25 bp, Homo sapien
ataggttaccacgttctctcccatg

SEQ ID NO: 9744 - DNA, 25 bp, Homo sapien
gttaccacgttctctcccatggaat

SEQ ID NO: 9745 - DNA, 25 bp, Homo sapien
acgttctctcccatggaatacccat

SEQ ID NO: 9746 - DNA, 25 bp, Homo sapien
atggaatacccatttctgtaaacac

SEQ ID NO: 9747 - DNA, 25 bp, Homo sapien
gtatttcctctatatgaccaacctg

SEQ ID NO: 9748 - DNA, 25 bp, Homo sapien
tggtgcgatcacagttcacggcggc

SEQ ID NO: 9749 - DNA, 25 bp, Homo sapien
attccctgttactttgttaatctat

SEQ ID NO: 9750 - DNA, 25 bp, Homo sapien
tagtatttcctctatatgaccaacc

SEQ ID NO: 9751 - DNA, 25 bp, Homo sapien
ttttatacaagagtcttgatctgtt

SEQ ID NO: 9752 - DNA, 25 bp, Homo sapien
tgtaaacacccaaaatgttccagtg

SEQ ID NO: 9753 - DNA, 25 bp, Homo sapien
atctctggggctcgagctatcctcc

SEQ ID NO: 9754 - DNA, 25 bp, Homo sapien
gcgatcacagttcacggcggccttg

SEQ ID NO: 9755 - DNA, 25 bp, Homo sapien
gatcacagttcacggcggccttgat

SEQ ID NO: 9756 - DNA, 25 bp, Homo sapien
ataggttaccacgttctctcccatg

SEQ ID NO: 9757 - DNA, 25 bp, Homo sapien
tgaccaacctgaaaatattatattc

SEQ ID NO: 9758 - DNA, 25 bp, Homo sapien
ctgaaccctgcttacagggaagatt

SEQ ID NO: 9759 - DNA, 25 bp, Homo sapien
taacgtattcctggctgagtaccca

SEQ ID NO: 9760 - DNA, 25 bp, Homo sapien
ttgctgggcttattactgaggtgag

SEQ ID NO: 9761 - DNA, 25 bp, Homo sapien
gtgtctctcgtaattgggccttgcc

SEQ ID NO: 9762 - DNA, 25 bp, Homo sapien
gggccttgcccacagaaagcatttt

SEQ ID NO: 9763 - DNA, 25 bp, Homo sapien
aggtgaggtgactctgcagcctgca

SEQ ID NO: 9764 - DNA, 25 bp, Homo sapien
tccacagtggatctggtgacatatc

SEQ ID NO: 9765 - DNA, 25 bp, Homo sapien
tggcatcagcaaacagacgatgtgt

SEQ ID NO: 9766 - DNA, 25 bp, Homo sapien
atcacctaagagatgtggctgtctt

SEQ ID NO: 9767 - DNA, 25 bp, Homo sapien
caatacctagaaaatggaaggctcc

SEQ ID NO: 9768 - DNA, 25 bp, Homo sapien
ccctgcaggggttgtaacgtattcc

SEQ ID NO: 9769 - DNA, 25 bp, Homo sapien
ggtggtggtgccttgctttctgtac

SEQ ID NO: 9770 - DNA, 25 bp, Homo sapien
gcaggtgagacacagttcttgctcc

SEQ ID NO: 9771 - DNA, 25 bp, Homo sapien
gccattggacactcggggcaatttc

SEQ ID NO: 9772 - DNA, 25 bp, Homo sapien
gacctcatagcaacagccattggac

SEQ ID NO: 9773 - DNA, 25 bp, Homo sapien
ctgtgacccaggctccattcagggg

SEQ ID NO: 9774 - DNA, 25 bp, Homo sapien
actgctcctgaagtgttaatcaaat

SEQ ID NO: 9775 - DNA, 25 bp, Homo sapien
gggcaatttcatgggagatatttgt

SEQ ID NO: 9776 - DNA, 25 bp, Homo sapien
gctgggagaattccacatcacctcc

SEQ ID NO: 9777 - DNA, 25 bp, Homo sapien
atgctcagatctgttttggaggccc

SEQ ID NO: 9778 - DNA, 25 bp, Homo sapien
agtcgtttgctctcggaacagctgg

SEQ ID NO: 9779 - DNA, 25 bp, Homo sapien
agggtcctccaagtccaaatctgct

SEQ ID NO: 9780 - DNA, 25 bp, Homo sapien
tcaagcagatgatcctcttaccttg

SEQ ID NO: 9781 - DNA, 25 bp, Homo sapien
gtgctgggacttacaggtttgttcc

SEQ ID NO: 9782 - DNA, 25 bp, Homo sapien
gcgagatcatgcgtcactgcagact

SEQ ID NO: 9783 - DNA, 25 bp, Homo sapien
aggtggatggcacctatacacctac

SEQ ID NO: 9784 - DNA, 25 bp, Homo sapien
tttttaggactagaagacacttctc

SEQ ID NO: 9785 - DNA, 25 bp, Homo sapien
attcctgcgctacagctctctcttt

SEQ ID NO: 9786 - DNA, 25 bp, Homo sapien
atgcgtcactgcagacttgacctcc

SEQ ID NO: 9787 - DNA, 25 bp, Homo sapien
aggtttgttccaccatgccagccca

SEQ ID NO: 9788 - DNA, 25 bp, Homo sapien
acagctctctctttaccaggtggat

SEQ ID NO: 9789 - DNA, 25 bp, Homo sapien
atgtgcaacctcattcctgcgctac

SEQ ID NO: 9790 - DNA, 25 bp, Homo sapien
ctctctttaccaggtggatggcacc

SEQ ID NO: 9791 - DNA, 25 bp, Homo sapien
tctaatagtaataggagtgatcttc

SEQ ID NO: 9792 - DNA, 25 bp, Homo sapien
gtcggaagccagtggagttctccct

SEQ ID NO: 9793 - DNA, 25 bp, Homo sapien
atctctcccaggctgtgtgaggcat

SEQ ID NO: 9794 - DNA, 25 bp, Homo sapien
tttgtaggaactagacagcccagtt

SEQ ID NO: 9795 - DNA, 25 bp, Homo sapien
gaatttaaaaggaggctatctggag

SEQ ID NO: 9796 - DNA, 25 bp, Homo sapien
gggttcagataactaggaaagcacc

SEQ ID NO: 9797 - DNA, 25 bp, Homo sapien
aggcaaacttgtagcccaggcctct

SEQ ID NO: 9798 - DNA, 25 bp, Homo sapien
ttctccaccaacaggcctggaagtc

SEQ ID NO: 9799 - DNA, 25 bp, Homo sapien
agccacagcagtgacaggcaaactt

SEQ ID NO: 9800 - DNA, 25 bp, Homo sapien
cagcccgcagcgtttctccaggttt

SEQ ID NO: 9801 - DNA, 25 bp, Homo sapien
ccaaaaacatctgggtgacttttct

SEQ ID NO: 9802 - DNA, 25 bp, Homo sapien
atagcaatgcagtaatggcctaatg

SEQ ID NO: 9803 - DNA, 25 bp, Homo sapien
tggcctaatgcagtatatgtatata

SEQ ID NO: 9804 - DNA, 25 bp, Homo sapien
tagaaatataggataaaaaggtgta

SEQ ID NO: 9805 - DNA, 25 bp, Homo sapien
tagaaaaatcaacctgagatccctg

SEQ ID NO: 9806 - DNA, 25 bp, Homo sapien
tgtatggaggtgtgtgtctatctgt

SEQ ID NO: 9807 - DNA, 25 bp, Homo sapien
ttttttgtatgtgtatggaggtgtg

SEQ ID NO: 9808 - DNA, 25 bp, Homo sapien
cagtaatggcctaatgcagtatatg

SEQ ID NO: 9809 - DNA, 25 bp, Homo sapien
tagcaatgcagtaatggcctaatgc

SEQ ID NO: 9810 - DNA, 25 bp, Homo sapien
aatttcagttgtagaaaaatcaacc

SEQ ID NO: 9811 - DNA, 25 bp, Homo sapien
tatggaggtgtgtgtctatctgtat

SEQ ID NO: 9812 - DNA, 25 bp, Homo sapien
ttgtagaaaaatcaacctgagatcc

SEQ ID NO: 9813 - DNA, 25 bp, Homo sapien
gatatttgccaaaacgcatgcaggc

SEQ ID NO: 9814 - DNA, 25 bp, Homo sapien
tgaggccaaccgagggcccaaagcg

SEQ ID NO: 9815 - DNA, 25 bp, Homo sapien
tggaggacgcgcttgctgcctgaca

SEQ ID NO: 9816 - DNA, 25 bp, Homo sapien
tttgccaaaacgcatgcaggcgagc

SEQ ID NO: 9817 - DNA, 25 bp, Homo sapien
cgggtttagatatttgccaaaacgc

SEQ ID NO: 9818 - DNA, 25 bp, Homo sapien
gacgcgcttgctgcctgacagggtt

SEQ ID NO: 9819 - DNA, 25 bp, Homo sapien
tatttgccaaaacgcatgcaggcga

SEQ ID NO: 9820 - DNA, 25 bp, Homo sapien
cgcgcttgctgcctgacagggttcc

SEQ ID NO: 9821 - DNA, 25 bp, Homo sapien
caaaacgcatgcaggcgagcgccgt

SEQ ID NO: 9822 - DNA, 25 bp, Homo sapien
tagatatttgccaaaacgcatgcag

SEQ ID NO: 9823 - DNA, 25 bp, Homo sapien
ccaaagcgcccgtggcttcggctgg

SEQ ID NO: 9824 - DNA, 25 bp, Homo sapien
atcttgggaaaccagagctagtgat

SEQ ID NO: 9825 - DNA, 25 bp, Homo sapien
gttagaaaatccaaactaatctgta

SEQ ID NO: 9826 - DNA, 25 bp, Homo sapien
ttcaaggatcttgggaaaccagagc

SEQ ID NO: 9827 - DNA, 25 bp, Homo sapien
ttatgctgagtaaaataaaccagat

SEQ ID NO: 9828 - DNA, 25 bp, Homo sapien
agctagtgatggttttgcgggttta

SEQ ID NO: 9829 - DNA, 25 bp, Homo sapien
tgtatatataacagaaagcagattg

SEQ ID NO: 9830 - DNA, 25 bp, Homo sapien
aggggcttcaaggatcttgggaaac

SEQ ID NO: 9831 - DNA, 25 bp, Homo sapien
tatacaactgttagaaaatccaaac

SEQ ID NO: 9832 - DNA, 25 bp, Homo sapien
accagatcacaaaagagtacactca

SEQ ID NO: 9833 - DNA, 25 bp, Homo sapien
acaaaagagtacactcaaatgtgtc

SEQ ID NO: 9834 - DNA, 25 bp, Homo sapien
agtgatggttttgcgggtttagata

SEQ ID NO: 9835 - DNA, 25 bp, Homo sapien
cctcaaacggtactgcaaactttta

SEQ ID NO: 9836 - DNA, 25 bp, Homo sapien
gcacaaaaccgaagacaattaggaa

SEQ ID NO: 9837 - DNA, 25 bp, Homo sapien
aaagcaggggactgactataagacc

SEQ ID NO: 9838 - DNA, 25 bp, Homo sapien
gcaagaactgaaagctagaagcaaa

SEQ ID NO: 9839 - DNA, 25 bp, Homo sapien
ctttcattacaacctcaaacggtac

SEQ ID NO: 9840 - DNA, 25 bp, Homo sapien
taacagttcctatgggtatctcaaa

SEQ ID NO: 9841 - DNA, 25 bp, Homo sapien
ggaacgcagaatagttgaacctttc

SEQ ID NO: 9842 - DNA, 25 bp, Homo sapien
attaggaacgcagaatagttgaacc

SEQ ID NO: 9843 - DNA, 25 bp, Homo sapien
actataagaccagccggtggaaata

SEQ ID NO: 9844 - DNA, 25 bp, Homo sapien
cgaagacaattaggaacgcagaata

SEQ ID NO: 9845 - DNA, 25 bp, Homo sapien
tggaaataggcagcaagaactgaaa

SEQ ID NO: 9846 - DNA, 25 bp, Homo sapien
aatgagagctcctccttagtctcct

SEQ ID NO: 9847 - DNA, 25 bp, Homo sapien
ttccgtgaaagagttgtttacatgc

SEQ ID NO: 9848 - DNA, 25 bp, Homo sapien
attggctttcacatggcccatcacc

SEQ ID NO: 9849 - DNA, 25 bp, Homo sapien
tttcctaactcaatgagagctcctc

SEQ ID NO: 9850 - DNA, 25 bp, Homo sapien
caacacagctcttatgagggtcacc

SEQ ID NO: 9851 - DNA, 25 bp, Homo sapien
agcagcatgtgacctattggctttc

SEQ ID NO: 9852 - DNA, 25 bp, Homo sapien
atttgaatgcacttcctcagctatc

SEQ ID NO: 9853 - DNA, 25 bp, Homo sapien
tgagggtcaccaatgagctccacat

SEQ ID NO: 9854 - DNA, 25 bp, Homo sapien
agttgacccattagcagcatgtgac

SEQ ID NO: 9855 - DNA, 25 bp, Homo sapien
tattttataatatagacggggtctc

SEQ ID NO: 9856 - DNA, 25 bp, Homo sapien
atacaaagttccgtgaaagagttgt

SEQ ID NO: 9857 - DNA, 25 bp, Homo sapien
agccaacgaacttgccaaagtctca

SEQ ID NO: 9858 - DNA, 25 bp, Homo sapien
aacgaacttgccaaagtctcacagc

SEQ ID NO: 9859 - DNA, 25 bp, Homo sapien
gaggctcagacaagccaacgaactt

SEQ ID NO: 9860 - DNA, 25 bp, Homo sapien
acaagccaacgaacttgccaaagtc

SEQ ID NO: 9861 - DNA, 25 bp, Homo sapien
tgaggctcagacaagccaacgaact

SEQ ID NO: 9862 - DNA, 25 bp, Homo sapien
aggctcagacaagccaacgaacttg

SEQ ID NO: 9863 - DNA, 25 bp, Homo sapien
actgaggctcagacaagccaacgaa

SEQ ID NO: 9864 - DNA, 25 bp, Homo sapien
tcagacaagccaacgaacttgccaa

SEQ ID NO: 9865 - DNA, 25 bp, Homo sapien
aagccaacgaacttgccaaagtctc

SEQ ID NO: 9866 - DNA, 25 bp, Homo sapien
agacaagccaacgaacttgccaaag

SEQ ID NO: 9867 - DNA, 25 bp, Homo sapien
gctcagacaagccaacgaacttgcc

SEQ ID NO: 9868 - DNA, 25 bp, Homo sapien
gcaggcactaggcatgctgtataaa

SEQ ID NO: 9869 - DNA, 25 bp, Homo sapien
ttaatactgctgcaactcagtggtg

SEQ ID NO: 9870 - DNA, 25 bp, Homo sapien
aacgtgtcctcaacaatgcaggagg

SEQ ID NO: 9871 - DNA, 25 bp, Homo sapien
caaaatgaaacaacgacaagagaga

SEQ ID NO: 9872 - DNA, 25 bp, Homo sapien
tcgtctgcttccttggggccaaaag

SEQ ID NO: 9873 - DNA, 25 bp, Homo sapien
aatttgtatcaagaaacgtgtcctc

SEQ ID NO: 9874 - DNA, 25 bp, Homo sapien
gacaggagcaagcactaatcacaaa

SEQ ID NO: 9875 - DNA, 25 bp, Homo sapien
aggagtgctcctaagtaaggacgat

SEQ ID NO: 9876 - DNA, 25 bp, Homo sapien
agcatctgcactggggcaggcacta

SEQ ID NO: 9877 - DNA, 25 bp, Homo sapien
gatcatgagaaggaaacgatttccc

SEQ ID NO: 9878 - DNA, 25 bp, Homo sapien
aaggaagcctcgcagatcatgagaa

SEQ ID NO: 9879 - DNA, 25 bp, Homo sapien
agtcttgcccaagctcttcttgaag

SEQ ID NO: 9880 - DNA, 25 bp, Homo sapien
tggctacagtcttgcccaagctctt

SEQ ID NO: 9881 - DNA, 25 bp, Homo sapien
tcttgctatggctatggctacagtc

SEQ ID NO: 9882 - DNA, 25 bp, Homo sapien
ttgacagcacctttatatgtgattc

SEQ ID NO: 9883 - DNA, 25 bp, Homo sapien
ttgctatggctatggctacagtctt

SEQ ID NO: 9884 - DNA, 25 bp, Homo sapien
agacagattcttgctatggctatgg

SEQ ID NO: 9885 - DNA, 25 bp, Homo sapien
ccagatttcttgacagcacctttat

SEQ ID NO: 9886 - DNA, 25 bp, Homo sapien
tgtccagccttcaaccagatttctt

SEQ ID NO: 9887 - DNA, 25 bp, Homo sapien
agattcttgctatggctatggctac

SEQ ID NO: 9888 - DNA, 25 bp, Homo sapien
tatggctatggctacagtcttgccc

SEQ ID NO: 9889 - DNA, 25 bp, Homo sapien
tatggctacagtcttgcccaagctc

SEQ ID NO: 9890 - DNA, 25 bp, Homo sapien
agtcacagtctgtctgagagccctc

SEQ ID NO: 9891 - DNA, 25 bp, Homo sapien
tctgagagccctcggattagctgga

SEQ ID NO: 9892 - DNA, 25 bp, Homo sapien
agcaacagatgtggaattcaaaccc

SEQ ID NO: 9893 - DNA, 25 bp, Homo sapien
gccttcgaacgttctgccctcagat

SEQ ID NO: 9894 - DNA, 25 bp, Homo sapien
tctcagagccaaaaagcaacagatg

SEQ ID NO: 9895 - DNA, 25 bp, Homo sapien
tgagcaagcccaacctgaagccttc

SEQ ID NO: 9896 - DNA, 25 bp, Homo sapien
atgtggaattcaaacccgggcattc

SEQ ID NO: 9897 - DNA, 25 bp, Homo sapien
gagtccaaagtccagccaggaatgt

SEQ ID NO: 9898 - DNA, 25 bp, Homo sapien
gccctccagatgtgtgtgctcacac

SEQ ID NO: 9899 - DNA, 25 bp, Homo sapien
gtgctcacactttgtctggacttgt

SEQ ID NO: 9900 - DNA, 25 bp, Homo sapien
cattcagatgcccaagttccctgca

SEQ ID NO: 9901 - DNA, 25 bp, Homo sapien
caagaagcaaaacctgcagagctga

SEQ ID NO: 9902 - DNA, 25 bp, Homo sapien
agtgacaagtgaaagatgtaactga

SEQ ID NO: 9903 - DNA, 25 bp, Homo sapien
catacacaaaggttgaaagtgaaaa

SEQ ID NO: 9904 - DNA, 25 bp, Homo sapien
aacttggcaaacacaccacgcaaac

SEQ ID NO: 9905 - DNA, 25 bp, Homo sapien
tacctgaaagaaatgcactttacac

SEQ ID NO: 9906 - DNA, 25 bp, Homo sapien
acgcaaacaccaaatcagaagaaag

SEQ ID NO: 9907 - DNA, 25 bp, Homo sapien
atccataattagcatgagagatttc

SEQ ID NO: 9908 - DNA, 25 bp, Homo sapien
tgtaactgaaaacgccagagatgat

SEQ ID NO: 9909 - DNA, 25 bp, Homo sapien
agagtagtcagaccaaggtgacttc

SEQ ID NO: 9910 - DNA, 25 bp, Homo sapien
aacaaagaatgtcactggagataaa

SEQ ID NO: 9911 - DNA, 25 bp, Homo sapien
aggtgacttcacaacaaagaatgtc

SEQ ID NO: 9912 - DNA, 25 bp, Homo sapien
tgcttctgtctagatagtgtcaatt

SEQ ID NO: 9913 - DNA, 25 bp, Homo sapien
atgtcagaaatgtttgtcaggtcac

SEQ ID NO: 9914 - DNA, 25 bp, Homo sapien
aggtaaagtgaataatgtcagaaat

SEQ ID NO: 9915 - DNA, 25 bp, Homo sapien
tcacagctggaatttgaagagaacc

SEQ ID NO: 9916 - DNA, 25 bp, Homo sapien
tctccgttgtatgcctttaatgaag

SEQ ID NO: 9917 - DNA, 25 bp, Homo sapien
catgcctggcctacagtagattatt

SEQ ID NO: 9918 - DNA, 25 bp, Homo sapien
agagatcttgaatgaactgccttat

SEQ ID NO: 9919 - DNA, 25 bp, Homo sapien
ttttggggaatgaccttcagattgg

SEQ ID NO: 9920 - DNA, 25 bp, Homo sapien
gaagagaaccatttcagagatcttg

SEQ ID NO: 9921 - DNA, 25 bp, Homo sapien
agattgggctctgtttatggacttg

SEQ ID NO: 9922 - DNA, 25 bp, Homo sapien
tgaagtcaaggatctaggtaaagtg

SEQ ID NO: 9923 - DNA, 25 bp, Homo sapien
ggtatgagacagtacatttagagct

SEQ ID NO: 9924 - DNA, 25 bp, Homo sapien
tttaagccatggtatgagacagtac

SEQ ID NO: 9925 - DNA, 25 bp, Homo sapien
ctagaaacggaagacccagacatta

SEQ ID NO: 9926 - DNA, 25 bp, Homo sapien
cagcctagggcgtgaggtcatgcaa

SEQ ID NO: 9927 - DNA, 25 bp, Homo sapien
cgtgaggtcatgcaaagctcctagc

SEQ ID NO: 9928 - DNA, 25 bp, Homo sapien
aaagctcctagcaaaacagtgattt

SEQ ID NO: 9929 - DNA, 25 bp, Homo sapien
ggaagacccagacattaaccttggc

SEQ ID NO: 9930 - DNA, 25 bp, Homo sapien
aaccttggctaggtgatgaaaccac

SEQ ID NO: 9931 - DNA, 25 bp, Homo sapien
ctaggtgatgaaaccacgaacactt

SEQ ID NO: 9932 - DNA, 25 bp, Homo sapien
acgaacacttttaactcatcctgga

SEQ ID NO: 9933 - DNA, 25 bp, Homo sapien
gttctctggctagaaacggaagacc

SEQ ID NO: 9934 - DNA, 25 bp, Homo sapien
aaagtgacagtctatgattccattc

SEQ ID NO: 9935 - DNA, 25 bp, Homo sapien
ttcttgagaatatcacgttaactga

SEQ ID NO: 9936 - DNA, 25 bp, Homo sapien
ctgtcccttgaccaatgaagagatt

SEQ ID NO: 9937 - DNA, 25 bp, Homo sapien
tcaggtatcttaagtagacaaactc

SEQ ID NO: 9938 - DNA, 25 bp, Homo sapien
cagaaacaacccagctgtcccttga

SEQ ID NO: 9939 - DNA, 25 bp, Homo sapien
aagagattaataacaagtggcacat

SEQ ID NO: 9940 - DNA, 25 bp, Homo sapien
tcataatcaggtatcttaagtagac

SEQ ID NO: 9941 - DNA, 25 bp, Homo sapien
aagtggcacatacacaaagtcgaat

SEQ ID NO: 9942 - DNA, 25 bp, Homo sapien
taagccaggaacaaagtgacagtct

SEQ ID NO: 9943 - DNA, 25 bp, Homo sapien
aagtagacaaactcataggaaaaaa

SEQ ID NO: 9944 - DNA, 25 bp, Homo sapien
aatatcacgttaactgaaataagcc

SEQ ID NO: 9945 - DNA, 25 bp, Homo sapien
tacagcacaccagtgggtcttgact

SEQ ID NO: 9946 - DNA, 25 bp, Homo sapien
tgcctggcgaataaaaggtgttcaa

SEQ ID NO: 9947 - DNA, 25 bp, Homo sapien
ggtgttcaaggttttatgctgagtc

SEQ ID NO: 9948 - DNA, 25 bp, Homo sapien
caattgatcaaaaagtacagagttc

SEQ ID NO: 9949 - DNA, 25 bp, Homo sapien
atgctgagtcagtatagtcttgacc

SEQ ID NO: 9950 - DNA, 25 bp, Homo sapien
ttgaccaagaaatctgcccaggtga

SEQ ID NO: 9951 - DNA, 25 bp, Homo sapien
tggagctgctctaacacctgaggtc

SEQ ID NO: 9952 - DNA, 25 bp, Homo sapien
ctttacccaatttgccaggctgaga

SEQ ID NO: 9953 - DNA, 25 bp, Homo sapien
atggggagcctccttgttagataaa

SEQ ID NO: 9954 - DNA, 25 bp, Homo sapien
agttgagtgcttcaaactcctactc

SEQ ID NO: 9955 - DNA, 25 bp, Homo sapien
ccagatgcctacaagtggagctgct

SEQ ID NO: 9956 - DNA, 25 bp, Homo sapien
tctattggtaggcatttgggacgtt

SEQ ID NO: 9957 - DNA, 25 bp, Homo sapien
atgcgtttacacttttcttcggatt

SEQ ID NO: 9958 - DNA, 25 bp, Homo sapien
attggtaggcatttgggacgtttcc

SEQ ID NO: 9959 - DNA, 25 bp, Homo sapien
aatcaatcttctattggtaggcatt

SEQ ID NO: 9960 - DNA, 25 bp, Homo sapien
gctcttccatactaaacaatgcata

SEQ ID NO: 9961 - DNA, 25 bp, Homo sapien
tcttctattggtaggcatttgggac

SEQ ID NO: 9962 - DNA, 25 bp, Homo sapien
aacaatgcatagaattttggactac

SEQ ID NO: 9963 - DNA, 25 bp, Homo sapien
ctgggtatttactcctacatcttcc

SEQ ID NO: 9964 - DNA, 25 bp, Homo sapien
ttcaacactcttccattacacgcat

SEQ ID NO: 9965 - DNA, 25 bp, Homo sapien
taggcatttgggacgtttcctgctc

SEQ ID NO: 9966 - DNA, 25 bp, Homo sapien
tcttccatctagtgcttttgagaat

SEQ ID NO: 9967 - DNA, 25 bp, Homo sapien
catattaaatttctccatgcgctgg

SEQ ID NO: 9968 - DNA, 25 bp, Homo sapien
caatgttatgaatatctgcacttac

SEQ ID NO: 9969 - DNA, 25 bp, Homo sapien
tctccatgcgctgggtatttactcc

SEQ ID NO: 9970 - DNA, 25 bp, Homo sapien
ttatttactggacaggccatccttc

SEQ ID NO: 9971 - DNA, 25 bp, Homo sapien
tccgtggaatcataaaatcgtgttt

SEQ ID NO: 9972 - DNA, 25 bp, Homo sapien
atgatttgactgttgccgtcttgaa

SEQ ID NO: 9973 - DNA, 25 bp, Homo sapien
actgttgccgtcttgaaagtcttca

SEQ ID NO: 9974 - DNA, 25 bp, Homo sapien
aatccacaaaagattcacttacatg

SEQ ID NO: 9975 - DNA, 25 bp, Homo sapien
cctactaacgtaaatgtcatctttt

SEQ ID NO: 9976 - DNA, 25 bp, Homo sapien
ttttccgtggaatcataaaatcgtg

SEQ ID NO: 9977 - DNA, 25 bp, Homo sapien
atcctttatgatttgactgttgccg

SEQ ID NO: 9978 - DNA, 25 bp, Homo sapien
gaaagtggcctcagacaatacataa

SEQ ID NO: 9979 - DNA, 25 bp, Homo sapien
tgtaaagaggcaactagtaaatatt

SEQ ID NO: 9980 - DNA, 25 bp, Homo sapien
tgggccatcggatcaccacagctct

SEQ ID NO: 9981 - DNA, 25 bp, Homo sapien
gtatggagtctgagtttctagaggt

SEQ ID NO: 9982 - DNA, 25 bp, Homo sapien
aatattttagggttgtgggccatcg

SEQ ID NO: 9983 - DNA, 25 bp, Homo sapien
atttgccttgtgagccatgttttgc

SEQ ID NO: 9984 - DNA, 25 bp, Homo sapien
cataaaatgtgggtatggccatgcc

SEQ ID NO: 9985 - DNA, 25 bp, Homo sapien
tatttatcaagtaggcagggtaggc

SEQ ID NO: 9986 - DNA, 25 bp, Homo sapien
attgtctcatgaaagtggcctcaga

SEQ ID NO: 9987 - DNA, 25 bp, Homo sapien
tccttgatccagtcagcagttgtgc

SEQ ID NO: 9988 - DNA, 25 bp, Homo sapien
atctagtcaaaagatcgggataatt

SEQ ID NO: 9989 - DNA, 25 bp, Homo sapien
tctcaactggtggaatgctgccaga

SEQ ID NO: 9990 - DNA, 25 bp, Homo sapien
tttgaaggcaacataaccaaaaggc

SEQ ID NO: 9991 - DNA, 25 bp, Homo sapien
gctgccagaggatttcaacagagtt

SEQ ID NO: 9992 - DNA, 25 bp, Homo sapien
cttctcaactggtggaatgctgcca

SEQ ID NO: 9993 - DNA, 25 bp, Homo sapien
ggcaacataaccaaaaggcatagtt

SEQ ID NO: 9994 - DNA, 25 bp, Homo sapien
caacagagtttgaaggcaacataac

SEQ ID NO: 9995 - DNA, 25 bp, Homo sapien
acagagtttgaaggcaacataacca

SEQ ID NO: 9996 - DNA, 25 bp, Homo sapien
tgaaggcaacataaccaaaaggcat

SEQ ID NO: 9997 - DNA, 25 bp, Homo sapien
gtggaatgctgccagaggatttcaa

SEQ ID NO: 9998 - DNA, 25 bp, Homo sapien
tttcaacagagtttgaaggcaacat

SEQ ID NO: 9999 - DNA, 25 bp, Homo sapien
gaatgctgccagaggatttcaacag

SEQ ID NO: 10000 - DNA, 25 bp, Homo sapien
ctttttagcctcaaagacgttcttc

SEQ ID NO: 10001 - DNA, 25 bp, Homo sapien
ttcgtggacctctaacagacaaata

SEQ ID NO: 10002 - DNA, 25 bp, Homo sapien
atcctagaggtcagttgggttccaa

SEQ ID NO: 10003 - DNA, 25 bp, Homo sapien
ctttcagaagtttgtggtaatattc

SEQ ID NO: 10004 - DNA, 25 bp, Homo sapien
tgggattctatctacagtgcctctg

SEQ ID NO: 10005 - DNA, 25 bp, Homo sapien
tctgcttcatagatcctagaggtca

SEQ ID NO: 10006 - DNA, 25 bp, Homo sapien
ttgggttccaaattgggcagcacct

SEQ ID NO: 10007 - DNA, 25 bp, Homo sapien
aaattgggcagcaccttactccttt

SEQ ID NO: 10008 - DNA, 25 bp, Homo sapien
atctaaaacaatgaagcttctcaac

SEQ ID NO: 10009 - DNA, 25 bp, Homo sapien
taaattaagaaacgaggtcaacagc

SEQ ID NO: 10010 - DNA, 25 bp, Homo sapien
agaaacgaggtcaacagcttctttc

SEQ ID NO: 10011 - DNA, 25 bp, Homo sapien
aggaaatctaaactgagcactgaat

SEQ ID NO: 10012 - DNA, 25 bp, Homo sapien
atggactaaaattcaggaactccta

SEQ ID NO: 10013 - DNA, 25 bp, Homo sapien
atgaaggctgagactagttaagaaa

SEQ ID NO: 10014 - DNA, 25 bp, Homo sapien
tttacaaatctagacatgaaggctg

SEQ ID NO: 10015 - DNA, 25 bp, Homo sapien
ggaggctcaggctgcccagacactc

SEQ ID NO: 10016 - DNA, 25 bp, Homo sapien
tatagagctaagaataaccagaagt

SEQ ID NO: 10017 - DNA, 25 bp, Homo sapien
ttgaaatccttgactaagcccattt

SEQ ID NO: 10018 - DNA, 25 bp, Homo sapien
tgtgtcatggactctaagtattttc

SEQ ID NO: 10019 - DNA, 25 bp, Homo sapien
tcttcaattagcagccacggaggct

SEQ ID NO: 10020 - DNA, 25 bp, Homo sapien
ctccctgccagtaacaggaaatcta

SEQ ID NO: 10021 - DNA, 25 bp, Homo sapien
aactcccagaatactttgtgtcatg

SEQ ID NO: 10022 - DNA, 25 bp, Homo sapien
cccagatagttgtgacaaagaaagc

SEQ ID NO: 10023 - DNA, 25 bp, Homo sapien
attgcttatgaatgaaaatgggttc

SEQ ID NO: 10024 - DNA, 25 bp, Homo sapien
tttctgagaggcttttggcaaattt

SEQ ID NO: 10025 - DNA, 25 bp, Homo sapien
tataaggaacccagataacagtgat

SEQ ID NO: 10026 - DNA, 25 bp, Homo sapien
gaaaatgctacttgaacaacaatgc

SEQ ID NO: 10027 - DNA, 25 bp, Homo sapien
taaggcacttttgctacatggtctg

SEQ ID NO: 10028 - DNA, 25 bp, Homo sapien
ttgccctagggtcgtttccattctc

SEQ ID NO: 10029 - DNA, 25 bp, Homo sapien
ctttcaggctgagacaatgtttccc

SEQ ID NO: 10030 - DNA, 25 bp, Homo sapien
gacaaagaaagcagacatggctctt

SEQ ID NO: 10031 - DNA, 25 bp, Homo sapien
gtccctaagacatagcagagacaat

SEQ ID NO: 10032 - DNA, 25 bp, Homo sapien
aacacacaaaggcacttacacacac

SEQ ID NO: 10033 - DNA, 25 bp, Homo sapien
aaggatcgcatcacttagcatggta

SEQ ID NO: 10034 - DNA, 25 bp, Homo sapien
ctgaggtctgcagtaaggatcgcat

SEQ ID NO: 10035 - DNA, 25 bp, Homo sapien
gactctctccctctgagaatctgca

SEQ ID NO: 10036 - DNA, 25 bp, Homo sapien
ggtctgcagtaaggatcgcatcact

SEQ ID NO: 10037 - DNA, 25 bp, Homo sapien
gcacccgcacagtgaggtcagcgtt

SEQ ID NO: 10038 - DNA, 25 bp, Homo sapien
agcatggtatccagtaggtagtttt

SEQ ID NO: 10039 - DNA, 25 bp, Homo sapien
cacagtgaggtcagcgttggctctt

SEQ ID NO: 10040 - DNA, 25 bp, Homo sapien
tcaggatccctaggtttgaaggaat

SEQ ID NO: 10041 - DNA, 25 bp, Homo sapien
tatatcgcgtgatgctgaggtctgc

SEQ ID NO: 10042 - DNA, 25 bp, Homo sapien
aggatccctaggtttgaaggaatct

SEQ ID NO: 10043 - DNA, 25 bp, Homo sapien
cacttagcatggtatccagtaggta

SEQ ID NO: 10044 - DNA, 25 bp, Homo sapien
tggcgcacgagataaaatgttgtca

SEQ ID NO: 10045 - DNA, 25 bp, Homo sapien
atgttgtcaggctgaggtaattctc

SEQ ID NO: 10046 - DNA, 25 bp, Homo sapien
aggtaattctctgttagtcccggta

SEQ ID NO: 10047 - DNA, 25 bp, Homo sapien
agttttaaagggcacgatctcattt

SEQ ID NO: 10048 - DNA, 25 bp, Homo sapien
cccggtaaaaattcgtcagtctgga

SEQ ID NO: 10049 - DNA, 25 bp, Homo sapien
attaaattctgtcactccggatgga

SEQ ID NO: 10050 - DNA, 25 bp, Homo sapien
aactgcgctctatctcgactttcgg

SEQ ID NO: 10051 - DNA, 25 bp, Homo sapien
actcggatcccgaagtggcgcacga

SEQ ID NO: 10052 - DNA, 25 bp, Homo sapien
aagctctcggtttggaattaaattc

SEQ ID NO: 10053 - DNA, 25 bp, Homo sapien
actccggatggaaataagtccgctt

SEQ ID NO: 10054 - DNA, 25 bp, Homo sapien
tcgtcagtctggaaagctctcggtt

SEQ ID NO: 10055 - DNA, 25 bp, Homo sapien
aacattaatcattagccaggcacag

SEQ ID NO: 10056 - DNA, 25 bp, Homo sapien
cttgagacatggacttcaccattta

SEQ ID NO: 10057 - DNA, 25 bp, Homo sapien
attgatcttggggattttattaatc

SEQ ID NO: 10058 - DNA, 25 bp, Homo sapien
taatcctgccaaatccttatattgg

SEQ ID NO: 10059 - DNA, 25 bp, Homo sapien
tctggacatccttgagacatggact

SEQ ID NO: 10060 - DNA, 25 bp, Homo sapien
taataacattaatcattagccaggc

SEQ ID NO: 10061 - DNA, 25 bp, Homo sapien
tggacatccttgagacatggacttc

SEQ ID NO: 10062 - DNA, 25 bp, Homo sapien
ctcttttggatgtttagtctggaca

SEQ ID NO: 10063 - DNA, 25 bp, Homo sapien
cttgagtgactttattgatcttggg

SEQ ID NO: 10064 - DNA, 25 bp, Homo sapien
aaagtttgttacattcttgagtgac

SEQ ID NO: 10065 - DNA, 25 bp, Homo sapien
atgttattatggcaaatatagtccc

SEQ ID NO: 10066 - DNA, 25 bp, Homo sapien
atttggctatgtcatgattactacc

SEQ ID NO: 10067 - DNA, 25 bp, Homo sapien
caaggatttacaaggaactacatgc

SEQ ID NO: 10068 - DNA, 25 bp, Homo sapien
tacaaggaactacatgctttgtggc

SEQ ID NO: 10069 - DNA, 25 bp, Homo sapien
taatgctaactcataaaacacacac

SEQ ID NO: 10070 - DNA, 25 bp, Homo sapien
cacagaagactgtcagaataatcta

SEQ ID NO: 10071 - DNA, 25 bp, Homo sapien
ctaggagttaagaagttaaaagcat

SEQ ID NO: 10072 - DNA, 25 bp, Homo sapien
agattaatctgaacacggaaatgga

SEQ ID NO: 10073 - DNA, 25 bp, Homo sapien
agagagagataatttacctttctca

SEQ ID NO: 10074 - DNA, 25 bp, Homo sapien
tctgaggacacagaagactgtcaga

SEQ ID NO: 10075 - DNA, 25 bp, Homo sapien
tcatgtactaggagttaagaagtta

SEQ ID NO: 10076 - DNA, 25 bp, Homo sapien
tctgaacacggaaatggaaaaattc

SEQ ID NO: 10077 - DNA, 25 bp, Homo sapien
tgaacagtaattgtcacagacagtc

SEQ ID NO: 10078 - DNA, 25 bp, Homo sapien
gctagctctagcagtcctaccgaac

SEQ ID NO: 10079 - DNA, 25 bp, Homo sapien
tataaggtggggttatcatctttac

SEQ ID NO: 10080 - DNA, 25 bp, Homo sapien
tcttcaaggttatatggctagtatc

SEQ ID NO: 10081 - DNA, 25 bp, Homo sapien
gtacctgtctcacgtgcagtgacac

SEQ ID NO: 10082 - DNA, 25 bp, Homo sapien
aacacaccaagtcattactgggaac

SEQ ID NO: 10083 - DNA, 25 bp, Homo sapien
tccataatggtgaacgtaacatcgt

SEQ ID NO: 10084 - DNA, 25 bp, Homo sapien
gaattgcacaaaaacaccactggat

SEQ ID NO: 10085 - DNA, 25 bp, Homo sapien
attaagaaccagaagacttgctgcc

SEQ ID NO: 10086 - DNA, 25 bp, Homo sapien
gaactacctcagcaaacacaccaag

SEQ ID NO: 10087 - DNA, 25 bp, Homo sapien
ttactgggaacaacatacatgtctt

SEQ ID NO: 10088 - DNA, 25 bp, Homo sapien
acacgcgcctgccacgtttgtattt

SEQ ID NO: 10089 - DNA, 25 bp, Homo sapien
acgcgcctgccacgtttgtattttt

SEQ ID NO: 10090 - DNA, 25 bp, Homo sapien
atgggattacacgcgcctgccacgt

SEQ ID NO: 10091 - DNA, 25 bp, Homo sapien
tacatcataaatgggtcaaattctg

SEQ ID NO: 10092 - DNA, 25 bp, Homo sapien
ttgcttacatcataaatgggtcaaa

SEQ ID NO: 10093 - DNA, 25 bp, Homo sapien
tttttgcttacatcataaatgggtc

SEQ ID NO: 10094 - DNA, 25 bp, Homo sapien
ttacacgcgcctgccacgtttgtat

SEQ ID NO: 10095 - DNA, 25 bp, Homo sapien
ctgtctttctgaatgaaactactat

SEQ ID NO: 10096 - DNA, 25 bp, Homo sapien
cttacatcataaatgggtcaaattc

SEQ ID NO: 10097 - DNA, 25 bp, Homo sapien
gattacacgcgcctgccacgtttgt

SEQ ID NO: 10098 - DNA, 25 bp, Homo sapien
tttctgaatgaaactactattgctc

SEQ ID NO: 10099 - DNA, 25 bp, Homo sapien
tgtgagacaaatggattaagacata

SEQ ID NO: 10100 - DNA, 25 bp, Homo sapien
tacatcataaatgggtcaaattctg

SEQ ID NO: 10101 - DNA, 25 bp, Homo sapien
gattacacgcgcctgccacgtttgt

SEQ ID NO: 10102 - DNA, 25 bp, Homo sapien
gcacctggccttaaacctgtctttc

SEQ ID NO: 10103 - DNA, 25 bp, Homo sapien
tttctgaatgaaactactattgctc

SEQ ID NO: 10104 - DNA, 25 bp, Homo sapien
gtgagacaaatggattaagacatat

SEQ ID NO: 10105 - DNA, 25 bp, Homo sapien
gtgtgagacaaatggattaagacat

SEQ ID NO: 10106 - DNA, 25 bp, Homo sapien
agacaaatggattaagacatatcat

SEQ ID NO: 10107 - DNA, 25 bp, Homo sapien
tgagacaaatggattaagacatatc

SEQ ID NO: 10108 - DNA, 25 bp, Homo sapien
gagacaaatggattaagacatatca

SEQ ID NO: 10109 - DNA, 25 bp, Homo sapien
aattagtgtgtgagacaaatggatt

SEQ ID NO: 10110 - DNA, 25 bp, Homo sapien
agccgagagtcgacgcgtcgcccaa

SEQ ID NO: 10111 - DNA, 25 bp, Homo sapien
ttgaccttttctaaccgggcgcaca

SEQ ID NO: 10112 - DNA, 25 bp, Homo sapien
tctaaccgggcgcacagcatccggt

SEQ ID NO: 10113 - DNA, 25 bp, Homo sapien
ctgtgtccacgatctctagggtctt

SEQ ID NO: 10114 - DNA, 25 bp, Homo sapien
tccggttgcaggcataagcagtaat

SEQ ID NO: 10115 - DNA, 25 bp, Homo sapien
tgatacggcccagacgctgtgtcca

SEQ ID NO: 10116 - DNA, 25 bp, Homo sapien
ccgcggagcgtgttactgggctctc

SEQ ID NO: 10117 - DNA, 25 bp, Homo sapien
cccaagcgaaccctgcgtcgaggag

SEQ ID NO: 10118 - DNA, 25 bp, Homo sapien
ctgggctctctggtatgcgaggaaa

SEQ ID NO: 10119 - DNA, 25 bp, Homo sapien
aaacggggcaaagtgactctcctga

SEQ ID NO: 10120 - DNA, 25 bp, Homo sapien
aagcagtaataatctcgagtgggcg

SEQ ID NO: 10121 - DNA, 25 bp, Homo sapien
ggagggcatgacacacatatagctt

SEQ ID NO: 10122 - DNA, 25 bp, Homo sapien
gcaatcaccgcttcccaggcccaag

SEQ ID NO: 10123 - DNA, 25 bp, Homo sapien
tccaggatctgggaatatgtatttt

SEQ ID NO: 10124 - DNA, 25 bp, Homo sapien
agggcatgacacacatatagcttcc

SEQ ID NO: 10125 - DNA, 25 bp, Homo sapien
gacacacatatagcttcccaggaca

SEQ ID NO: 10126 - DNA, 25 bp, Homo sapien
gagggcatgacacacatatagcttc

SEQ ID NO: 10127 - DNA, 25 bp, Homo sapien
cattccaggatctgggaatatgtat

SEQ ID NO: 10128 - DNA, 25 bp, Homo sapien
atgacacacatatagcttcccagga

SEQ ID NO: 10129 - DNA, 25 bp, Homo sapien
tgggagggcatgacacacatatagc

SEQ ID NO: 10130 - DNA, 25 bp, Homo sapien
ggacattccaggatctgggaatatg

SEQ ID NO: 10131 - DNA, 25 bp, Homo sapien
atagcttcccaggacattccaggat

SEQ ID NO: 10132 - DNA, 25 bp, Homo sapien
tatctttcccaagggcggagtctga

SEQ ID NO: 10133 - DNA, 25 bp, Homo sapien
aggcggcagtacgtctacatgatta

SEQ ID NO: 10134 - DNA, 25 bp, Homo sapien
agagtatctccttctgatcctaccc

SEQ ID NO: 10135 - DNA, 25 bp, Homo sapien
gcagcacacaaaccccagagtatct

SEQ ID NO: 10136 - DNA, 25 bp, Homo sapien
cagatggtggttatctttcccaagg

SEQ ID NO: 10137 - DNA, 25 bp, Homo sapien
taccctgcacgtctgactcatgtga

SEQ ID NO: 10138 - DNA, 25 bp, Homo sapien
atggtggttatctttcccaagggcg

SEQ ID NO: 10139 - DNA, 25 bp, Homo sapien
gtacgtctacatgattagagcagat

SEQ ID NO: 10140 - DNA, 25 bp, Homo sapien
tctgactcatgtgaagagacaggct

SEQ ID NO: 10141 - DNA, 25 bp, Homo sapien
tgcacgtctgactcatgtgaagaga

SEQ ID NO: 10142 - DNA, 25 bp, Homo sapien
aaccaggcggcagtacgtctacatg

SEQ ID NO: 10143 - DNA, 25 bp, Homo sapien
tgcctgtcagagtgaagactatcac

SEQ ID NO: 10144 - DNA, 25 bp, Homo sapien
gtctctcctagcaccattttcctgg

SEQ ID NO: 10145 - DNA, 25 bp, Homo sapien
aggagccacagtggtttgcttctct

SEQ ID NO: 10146 - DNA, 25 bp, Homo sapien
caccattgcctgtcagagtgaagac

SEQ ID NO: 10147 - DNA, 25 bp, Homo sapien
gactatcacagaggtgacagggctc

SEQ ID NO: 10148 - DNA, 25 bp, Homo sapien
cagtgaggagccacagtggtttgct

SEQ ID NO: 10149 - DNA, 25 bp, Homo sapien
acagtggtttgcttctctggcctct

SEQ ID NO: 10150 - DNA, 25 bp, Homo sapien
acacagtcaccattgcctgtcagag

SEQ ID NO: 10151 - DNA, 25 bp, Homo sapien
gaggtgacagggctcagtccaaccc

SEQ ID NO: 10152 - DNA, 25 bp, Homo sapien
attgcctgtcagagtgaagactatc

SEQ ID NO: 10153 - DNA, 25 bp, Homo sapien
agtgaagactatcacagaggtgaca

SEQ ID NO: 10154 - DNA, 25 bp, Homo sapien
ctgcttaaagatccctctcagtggc

SEQ ID NO: 10155 - DNA, 25 bp, Homo sapien
aacaaggctcctgaaatgtggagaa

SEQ ID NO: 10156 - DNA, 25 bp, Homo sapien
ccaggctgtcttaaaacaaggctcc

SEQ ID NO: 10157 - DNA, 25 bp, Homo sapien
tcatcgagtgccaaatgtcggcata

SEQ ID NO: 10158 - DNA, 25 bp, Homo sapien
gtagctcccagaccctgcatggcag

SEQ ID NO: 10159 - DNA, 25 bp, Homo sapien
tgcatggcagccacacccgtgggtc

SEQ ID NO: 10160 - DNA, 25 bp, Homo sapien
cttggttcccgactctctgtagctc

SEQ ID NO: 10161 - DNA, 25 bp, Homo sapien
aatgtggagaaatggctcatcgagt

SEQ ID NO: 10162 - DNA, 25 bp, Homo sapien
gtggctctcagacagccaggctgtc

SEQ ID NO: 10163 - DNA, 25 bp, Homo sapien
tgtggggccctctgcttaaagatcc

SEQ ID NO: 10164 - DNA, 25 bp, Homo sapien
atccagtctcgactccggtggctct

SEQ ID NO: 10165 - DNA, 25 bp, Homo sapien
agttgctggagaggaacaaacagaa

SEQ ID NO: 10166 - DNA, 25 bp, Homo sapien
aaagaaaaagacacaattgataaaa

SEQ ID NO: 10167 - DNA, 25 bp, Homo sapien
agtagtgaaaagtccacacaaagcc

SEQ ID NO: 10168 - DNA, 25 bp, Homo sapien
tctacctgctaagccagactgtgtt

SEQ ID NO: 10169 - DNA, 25 bp, Homo sapien
ttccactggacaaagaagttgctgg

SEQ ID NO: 10170 - DNA, 25 bp, Homo sapien
cactaagttctacctgctaagccag

SEQ ID NO: 10171 - DNA, 25 bp, Homo sapien
taagccagactgtgttggtagtcct

SEQ ID NO: 10172 - DNA, 25 bp, Homo sapien
atacattaagagctgatatgaagac

SEQ ID NO: 10173 - DNA, 25 bp, Homo sapien
tggccacatcagtagtgaaaagtcc

SEQ ID NO: 10174 - DNA, 25 bp, Homo sapien
gttggtagtcctggccacatcagta

SEQ ID NO: 10175 - DNA, 25 bp, Homo sapien
agagacaggaatgctcactaagttc

SEQ ID NO: 10176 - DNA, 25 bp, Homo sapien
tcacccaccagattggttaaaatgt

SEQ ID NO: 10177 - DNA, 25 bp, Homo sapien
ttgaagaacattttagcagttacta

SEQ ID NO: 10178 - DNA, 25 bp, Homo sapien
ctggtaattcagaaaaatgcaaact

SEQ ID NO: 10179 - DNA, 25 bp, Homo sapien
tggacacacatactgctggcatgaa

SEQ ID NO: 10180 - DNA, 25 bp, Homo sapien
tggagaaatggacacacatactgct

SEQ ID NO: 10181 - DNA, 25 bp, Homo sapien
tcagccatcctggtaattcagaaaa

SEQ ID NO: 10182 - DNA, 25 bp, Homo sapien
aatcagaaaggtactttgaagaaca

SEQ ID NO: 10183 - DNA, 25 bp, Homo sapien
atgaaattaaatcagaaaggtactt

SEQ ID NO: 10184 - DNA, 25 bp, Homo sapien
agacacagacttcagccatcctggt

SEQ ID NO: 10185 - DNA, 25 bp, Homo sapien
atggtctggagaaatggacacacat

SEQ ID NO: 10186 - DNA, 25 bp, Homo sapien
atgtaaaacttggagatggtctgga

SEQ ID NO: 10187 - DNA, 25 bp, Homo sapien
cctgtattcaggctgtttgtttaga

SEQ ID NO: 10188 - DNA, 25 bp, Homo sapien
tgtttgtttagaattgcagtggcta

SEQ ID NO: 10189 - DNA, 25 bp, Homo sapien
agtctcagctgatactgaaattcat

SEQ ID NO: 10190 - DNA, 25 bp, Homo sapien
attgcagtggctagaggccttagaa

SEQ ID NO: 10191 - DNA, 25 bp, Homo sapien
tagctgttacgtgccgcagcagagc

SEQ ID NO: 10192 - DNA, 25 bp, Homo sapien
cgctgttagctgttacgtgccgcag

SEQ ID NO: 10193 - DNA, 25 bp, Homo sapien
cccatagtctcagctgatactgaaa

SEQ ID NO: 10194 - DNA, 25 bp, Homo sapien
tagaggccttagaagcatcactgct

SEQ ID NO: 10195 - DNA, 25 bp, Homo sapien
tttagaattgcagtggctagaggcc

SEQ ID NO: 10196 - DNA, 25 bp, Homo sapien
tggctagaggccttagaagcatcac

SEQ ID NO: 10197 - DNA, 25 bp, Homo sapien
gctagaggccttagaagcatcactg

SEQ ID NO: 10198 - DNA, 25 bp, Homo sapien
acagaaggaaggtctataaatgatc

SEQ ID NO: 10199 - DNA, 25 bp, Homo sapien
acattaagtgcctagatatctgaac

SEQ ID NO: 10200 - DNA, 25 bp, Homo sapien
gaaacagaccctcaaatgccaactc

SEQ ID NO: 10201 - DNA, 25 bp, Homo sapien
gcaaacggaattgccaaaggccaca

SEQ ID NO: 10202 - DNA, 25 bp, Homo sapien
aagaagaaagtgtgttagatgtgac

SEQ ID NO: 10203 - DNA, 25 bp, Homo sapien
cgtattctaactgggacagaaggaa

SEQ ID NO: 10204 - DNA, 25 bp, Homo sapien
aaaggccacacagacattaaatgaa

SEQ ID NO: 10205 - DNA, 25 bp, Homo sapien
tgatcttgccataaaggtcaggcct

SEQ ID NO: 10206 - DNA, 25 bp, Homo sapien
acagttaagtgaaacttaggcaaac

SEQ ID NO: 10207 - DNA, 25 bp, Homo sapien
gacattaaatgaagagcagaatctg

SEQ ID NO: 10208 - DNA, 25 bp, Homo sapien
atcctgccacaaccgctgttagctg

SEQ ID NO: 10209 - DNA, 25 bp, Homo sapien
tcacactcccataaagagctgagac

SEQ ID NO: 10210 - DNA, 25 bp, Homo sapien
tccatttactgttctctgtgtgatc

SEQ ID NO: 10211 - DNA, 25 bp, Homo sapien
gtgatcaaatgaggtttccaatatt

SEQ ID NO: 10212 - DNA, 25 bp, Homo sapien
tctcacactcccataaagagctgag

SEQ ID NO: 10213 - DNA, 25 bp, Homo sapien
tccaaaaacataattctagagatat

SEQ ID NO: 10214 - DNA, 25 bp, Homo sapien
tatctccaaaaacataattctagag

SEQ ID NO: 10215 - DNA, 25 bp, Homo sapien
tactgttctctgtgtgatcaaatga

SEQ ID NO: 10216 - DNA, 25 bp, Homo sapien
tctgtgtgatcaaatgaggtttcca

SEQ ID NO: 10217 - DNA, 25 bp, Homo sapien
gttctctgtgtgatcaaatgaggtt

SEQ ID NO: 10218 - DNA, 25 bp, Homo sapien
tgtgtgatcaaatgaggtttccaat

SEQ ID NO: 10219 - DNA, 25 bp, Homo sapien
tctctgtgtgatcaaatgaggtttc

SEQ ID NO: 10220 - DNA, 25 bp, Homo sapien
tagtgctactagtgattatcatggt

SEQ ID NO: 10221 - DNA, 25 bp, Homo sapien
aaatgaacgcttcgaagcttttcca

SEQ ID NO: 10222 - DNA, 25 bp, Homo sapien
gaagcttttccaacaatattaggta

SEQ ID NO: 10223 - DNA, 25 bp, Homo sapien
ggtgaataatccctgcataagcatg

SEQ ID NO: 10224 - DNA, 25 bp, Homo sapien
ttaaaatggcatagtgctactagtg

SEQ ID NO: 10225 - DNA, 25 bp, Homo sapien
gtaatgtttaacctctatgctcaac

SEQ ID NO: 10226 - DNA, 25 bp, Homo sapien
cttctgtgttacatgagatagcagg

SEQ ID NO: 10227 - DNA, 25 bp, Homo sapien
attggatgtcttatttcaggatatc

SEQ ID NO: 10228 - DNA, 25 bp, Homo sapien
tagcaggtaccttaattggatgtct

SEQ ID NO: 10229 - DNA, 25 bp, Homo sapien
ttcaggatatctgggtgaataatcc

SEQ ID NO: 10230 - DNA, 25 bp, Homo sapien
tgtctaacactgtttaggcaaataa

SEQ ID NO: 10231 - DNA, 25 bp, Homo sapien
tctataatcagagcaagcattaccc

SEQ ID NO: 10232 - DNA, 25 bp, Homo sapien
cttccagagtactattaaaaccagt

SEQ ID NO: 10233 - DNA, 25 bp, Homo sapien
gagcaagcattacccatcagaagtt

SEQ ID NO: 10234 - DNA, 25 bp, Homo sapien
tgggggaggagccaaacacttataa

SEQ ID NO: 10235 - DNA, 25 bp, Homo sapien
agttgcacagtgaaatgaattttaa

SEQ ID NO: 10236 - DNA, 25 bp, Homo sapien
aatcagagcaagcattacccatcag

SEQ ID NO: 10237 - DNA, 25 bp, Homo sapien
tacccatcagaagttgcacagtgaa

SEQ ID NO: 10238 - DNA, 25 bp, Homo sapien
gccaccttccagagtactattaaaa

SEQ ID NO: 10239 - DNA, 25 bp, Homo sapien
atctgaactttaaccctagtaggtg

SEQ ID NO: 10240 - DNA, 25 bp, Homo sapien
gcagaagacgaagggaaagcaagca

SEQ ID NO: 10241 - DNA, 25 bp, Homo sapien
gagggttgccctacttctataatca

SEQ ID NO: 10242 - DNA, 25 bp, Homo sapien
taagaagctgagcaacacagtcaat

SEQ ID NO: 10243 - DNA, 25 bp, Homo sapien
ctaaaattgtctcaggggcattgtt

SEQ ID NO: 10244 - DNA, 25 bp, Homo sapien
ttcaagctttatccagtgagtattt

SEQ ID NO: 10245 - DNA, 25 bp, Homo sapien
atatgaaagaacacttggatatata

SEQ ID NO: 10246 - DNA, 25 bp, Homo sapien
tgcttggctgacatggtagttttta

SEQ ID NO: 10247 - DNA, 25 bp, Homo sapien
tctcaggggcattgttgtaaaattt

SEQ ID NO: 10248 - DNA, 25 bp, Homo sapien
tccttgagataagaagctgagcaac

SEQ ID NO: 10249 - DNA, 25 bp, Homo sapien
aagttagaataatcaaaggacttcc

SEQ ID NO: 10250 - DNA, 25 bp, Homo sapien
ccatgacactgaagttaagttagaa

SEQ ID NO: 10251 - DNA, 25 bp, Homo sapien
tatcaagaaaaagagttactgactc

SEQ ID NO: 10252 - DNA, 25 bp, Homo sapien
cttcttggaagagtactggatgttc

SEQ ID NO: 10253 - DNA, 25 bp, Homo sapien
aatattgaatgcctgttgttagcca

SEQ ID NO: 10254 - DNA, 25 bp, Homo sapien
gagatgtgaccctaataccaatgac

SEQ ID NO: 10255 - DNA, 25 bp, Homo sapien
gtgaccctaataccaatgactactt

SEQ ID NO: 10256 - DNA, 25 bp, Homo sapien
aatgcctgttgttagccaggtacta

SEQ ID NO: 10257 - DNA, 25 bp, Homo sapien
gaaaggagatgtgaccctaatacca

SEQ ID NO: 10258 - DNA, 25 bp, Homo sapien
tataaacacagctatgatctccatt

SEQ ID NO: 10259 - DNA, 25 bp, Homo sapien
agcaaatattgaatgcctgttgtta

SEQ ID NO: 10260 - DNA, 25 bp, Homo sapien
aaggagatgtgaccctaataccaat

SEQ ID NO: 10261 - DNA, 25 bp, Homo sapien
acagctatgatctccattcagcaaa

SEQ ID NO: 10262 - DNA, 25 bp, Homo sapien
attgtctgtcttacatataaacaca

SEQ ID NO: 10263 - DNA, 25 bp, Homo sapien
agccaggtactattttggttttaga

SEQ ID NO: 10264 - DNA, 25 bp, Homo sapien
gaataacaatagctaacatgggata

SEQ ID NO: 10265 - DNA, 25 bp, Homo sapien
cacaatgaaatgaggtaaatcagtg

SEQ ID NO: 10266 - DNA, 25 bp, Homo sapien
ttacaaaatggtgtgagataaacac

SEQ ID NO: 10267 - DNA, 25 bp, Homo sapien
ttaaagggttgcgagatgaaaatga

SEQ ID NO: 10268 - DNA, 25 bp, Homo sapien
cgacaaaacttgtatgtgaccagca

SEQ ID NO: 10269 - DNA, 25 bp, Homo sapien
atgtgaccagcaaagttaaacattc

SEQ ID NO: 10270 - DNA, 25 bp, Homo sapien
tcttcatatgcgtggaatttgagaa

SEQ ID NO: 10271 - DNA, 25 bp, Homo sapien
aggaagaagaatatgcgacaaaact

SEQ ID NO: 10272 - DNA, 25 bp, Homo sapien
tgatacacctgctggatagtaaccc

SEQ ID NO: 10273 - DNA, 25 bp, Homo sapien
attttggctaaggacagatggaata

SEQ ID NO: 10274 - DNA, 25 bp, Homo sapien
attatgggaaaaatgtgatacacct

SEQ ID NO: 10275 - DNA, 25 bp, Homo sapien
cgacacgaggccaagacctttggag

SEQ ID NO: 10276 - DNA, 25 bp, Homo sapien
ctccaaaggtcttggcctcgtgtcg

SEQ ID NO: 10277 - DNA, 25 bp, Homo sapien
agatgaaggaaaggaatccaggaaa

SEQ ID NO: 10278 - DNA, 25 bp, Homo sapien
ggcagaataaaaggcagttcaggca

SEQ ID NO: 10279 - DNA, 25 bp, Homo sapien
ccaggaaacagtactaaccagaaac

SEQ ID NO: 10280 - DNA, 25 bp, Homo sapien
accaaactaacaatcgaggagggca

SEQ ID NO: 10281 - DNA, 25 bp, Homo sapien
tatatgttaaggcaggaattatctc

SEQ ID NO: 10282 - DNA, 25 bp, Homo sapien
atcgcatacttcttaggaggttact

SEQ ID NO: 10283 - DNA, 25 bp, Homo sapien
tgctcagaagcaacactggatacta

SEQ ID NO: 10284 - DNA, 25 bp, Homo sapien
gagagatggagacttatcgcatact

SEQ ID NO: 10285 - DNA, 25 bp, Homo sapien
aagtaaacagtgaggagtaaaaatc

SEQ ID NO: 10286 - DNA, 25 bp, Homo sapien
tttagagaaagcctagtcctgattg

SEQ ID NO: 10287 - DNA, 25 bp, Homo sapien
taagggtgtagttaagaaagatgaa

SEQ ID NO: 10288 - DNA, 25 bp, Homo sapien
atgattaggaagcaatgttactacc

SEQ ID NO: 10289 - DNA, 25 bp, Homo sapien
cttggctgtgctgtgtcatagattt

SEQ ID NO: 10290 - DNA, 25 bp, Homo sapien
cagggcagaatcatacatcgctaaa

SEQ ID NO: 10291 - DNA, 25 bp, Homo sapien
catgaactaaaggacagaagggata

SEQ ID NO: 10292 - DNA, 25 bp, Homo sapien
gagtaaatacatattccagggcaga

SEQ ID NO: 10293 - DNA, 25 bp, Homo sapien
atcgctaaaggtcttcagggtttac

SEQ ID NO: 10294 - DNA, 25 bp, Homo sapien
ctaacctgtgcaatgagcagagcat

SEQ ID NO: 10295 - DNA, 25 bp, Homo sapien
aatgtgggcatgtaaaaatttatcc

SEQ ID NO: 10296 - DNA, 25 bp, Homo sapien
ttatagcgctgttaacaagagctcc

SEQ ID NO: 10297 - DNA, 25 bp, Homo sapien
agaatccacagtagttggccttggc

SEQ ID NO: 10298 - DNA, 25 bp, Homo sapien
tgttaacaagagctccaaggaagaa

SEQ ID NO: 10299 - DNA, 25 bp, Homo sapien
aaagcaccatgaaatcctacggaaa

SEQ ID NO: 10300 - DNA, 25 bp, Homo sapien
gcatgtgaggtggtttgcatatcac

SEQ ID NO: 10301 - DNA, 25 bp, Homo sapien
taatgcacagggaactatttcagat

SEQ ID NO: 10302 - DNA, 25 bp, Homo sapien
aaaagagagcttccgcagttacctt

SEQ ID NO: 10303 - DNA, 25 bp, Homo sapien
ataggtctgctgaatcgacggagca

SEQ ID NO: 10304 - DNA, 25 bp, Homo sapien
caggcacctgtgaaaatgataataa

SEQ ID NO: 10305 - DNA, 25 bp, Homo sapien
agataccaaatctcaggcacctgtg

SEQ ID NO: 10306 - DNA, 25 bp, Homo sapien
gagcaggagtcctctcaaaataatt

SEQ ID NO: 10307 - DNA, 25 bp, Homo sapien
ctttcagtaaaatcagagacacctc

SEQ ID NO: 10308 - DNA, 25 bp, Homo sapien
gaatcaagaacacaaagtagatacc

SEQ ID NO: 10309 - DNA, 25 bp, Homo sapien
agccctgacagcaaaagagagcttc

SEQ ID NO: 10310 - DNA, 25 bp, Homo sapien
atgagggcagcttcctgaccagctt

SEQ ID NO: 10311 - DNA, 25 bp, Homo sapien
cagcttctaggcatggaggtgtcca

SEQ ID NO: 10312 - DNA, 25 bp, Homo sapien
tgcaaaactgctcatctggatgttg

SEQ ID NO: 10313 - DNA, 25 bp, Homo sapien
cagcattccagcaggccaccatgtg

SEQ ID NO: 10314 - DNA, 25 bp, Homo sapien
gagtcacacgagagtttgagtcctc

SEQ ID NO: 10315 - DNA, 25 bp, Homo sapien
tagatttatctaaggcaagcagggg

SEQ ID NO: 10316 - DNA, 25 bp, Homo sapien
ctgctgcttcatcagaagacggttc

SEQ ID NO: 10317 - DNA, 25 bp, Homo sapien
tcagaagacggttcctttgaggatc

SEQ ID NO: 10318 - DNA, 25 bp, Homo sapien
acaatggtgtgggatctggagtcac

SEQ ID NO: 10319 - DNA, 25 bp, Homo sapien
caggccaccatgtgctgcatcctat

SEQ ID NO: 10320 - DNA, 25 bp, Homo sapien
tgctgcatcctatgaccagggcctc

SEQ ID NO: 10321 - DNA, 25 bp, Homo sapien
agacatttggagagacaatggggaa

SEQ ID NO: 10322 - DNA, 25 bp, Homo sapien
ggaaggagacatttggagagacaat

SEQ ID NO: 10323 - DNA, 25 bp, Homo sapien
atcaagtataaagctggggacttac

SEQ ID NO: 10324 - DNA, 25 bp, Homo sapien
ataaagctggggacttacttcagta

SEQ ID NO: 10325 - DNA, 25 bp, Homo sapien
agacaatggggaagaatgaatattt

SEQ ID NO: 10326 - DNA, 25 bp, Homo sapien
ggatacctctccataaagtagaata

SEQ ID NO: 10327 - DNA, 25 bp, Homo sapien
taaagtagaatacaccactgatatc

SEQ ID NO: 10328 - DNA, 25 bp, Homo sapien
ttaaatcaagtataaagctggggac

SEQ ID NO: 10329 - DNA, 25 bp, Homo sapien
agagacaatggggaagaatgaatat

SEQ ID NO: 10330 - DNA, 25 bp, Homo sapien
agctggggacttacttcagtatttc

SEQ ID NO: 10331 - DNA, 25 bp, Homo sapien
cacagaatttggatacctctccata

SEQ ID NO: 10332 - DNA, 25 bp, Homo sapien
aggctcaacacaaaggccacctttt

SEQ ID NO: 10333 - DNA, 25 bp, Homo sapien
gaagtcattctactaggctcaacac

SEQ ID NO: 10334 - DNA, 25 bp, Homo sapien
aactgttgaaacaaagaagaaagga

SEQ ID NO: 10335 - DNA, 25 bp, Homo sapien
gttcctgtcaaaattagcctcctgt

SEQ ID NO: 10336 - DNA, 25 bp, Homo sapien
cagtacggtgggtatcaggttttaa

SEQ ID NO: 10337 - DNA, 25 bp, Homo sapien
ccttacacataggaggcagagagct

SEQ ID NO: 10338 - DNA, 25 bp, Homo sapien
aagagaaatgtccaaggccttacac

SEQ ID NO: 10339 - DNA, 25 bp, Homo sapien
acagtgcctgactcataataagatc

SEQ ID NO: 10340 - DNA, 25 bp, Homo sapien
tttctaagcaaacactcagtacggt

SEQ ID NO: 10341 - DNA, 25 bp, Homo sapien
ctcctggaaggtaaatgagtccatt

SEQ ID NO: 10342 - DNA, 25 bp, Homo sapien
ccacagaggtgctcctggaaggtaa

SEQ ID NO: 10343 - DNA, 25 bp, Homo sapien
taggatgagagattttttcagttac

SEQ ID NO: 10344 - DNA, 25 bp, Homo sapien
caactatgtatgcttgtgaaagcac

SEQ ID NO: 10345 - DNA, 25 bp, Homo sapien
gtaatatgctcaaggcttccagtct

SEQ ID NO: 10346 - DNA, 25 bp, Homo sapien
gggaatcaaacctatgaattaatga

SEQ ID NO: 10347 - DNA, 25 bp, Homo sapien
tgctagatagtaatatgctcaaggc

SEQ ID NO: 10348 - DNA, 25 bp, Homo sapien
tgtgaaagcactaaattaaggtccc

SEQ ID NO: 10349 - DNA, 25 bp, Homo sapien
agtcttcaagacaactatgtatgct

SEQ ID NO: 10350 - DNA, 25 bp, Homo sapien
aatgtggaacatataggatgagaga

SEQ ID NO: 10351 - DNA, 25 bp, Homo sapien
gtggaacatataggatgagagattt

SEQ ID NO: 10352 - DNA, 25 bp, Homo sapien
tatgtatacgaactttaggtgtttc

SEQ ID NO: 10353 - DNA, 25 bp, Homo sapien
tcttatgctttagggaatcaaacct

SEQ ID NO: 10354 - DNA, 25 bp, Homo sapien
ctaagcaagataataagaggaacac

SEQ ID NO: 10355 - DNA, 25 bp, Homo sapien
attcatgactttgaggagaaagcgc

SEQ ID NO: 10356 - DNA, 25 bp, Homo sapien
actgcgagactggtttaatgaactt

SEQ ID NO: 10357 - DNA, 25 bp, Homo sapien
agaggaacacttggttttgtgattc

SEQ ID NO: 10358 - DNA, 25 bp, Homo sapien
atgaaaacaagaacctggtgcacct

SEQ ID NO: 10359 - DNA, 25 bp, Homo sapien
ggtgcacctggtttttcaatactct

SEQ ID NO: 10360 - DNA, 25 bp, Homo sapien
ctctgagtaactgcgagactggttt

SEQ ID NO: 10361 - DNA, 25 bp, Homo sapien
tttctagataaacatgagcttgtgt

SEQ ID NO: 10362 - DNA, 25 bp, Homo sapien
accaacgtagtttagataatctcag

SEQ ID NO: 10363 - DNA, 25 bp, Homo sapien
gactttgaggagaaagcgcattttc

SEQ ID NO: 10364 - DNA, 25 bp, Homo sapien
aaaacagatccaacacgtagctttc

SEQ ID NO: 10365 - DNA, 25 bp, Homo sapien
tggccttctcttgttaatatatctt

SEQ ID NO: 10366 - DNA, 25 bp, Homo sapien
agtggcatgatgctagcccacggca

SEQ ID NO: 10367 - DNA, 25 bp, Homo sapien
gtggcatgatgctagcccacggcag

SEQ ID NO: 10368 - DNA, 25 bp, Homo sapien
ttcgtctgtttaattcacaggtccc

SEQ ID NO: 10369 - DNA, 25 bp, Homo sapien
tttcgtctgtttaattcacaggtcc

SEQ ID NO: 10370 - DNA, 25 bp, Homo sapien
ttaattcacaggtccccaaagacta

SEQ ID NO: 10371 - DNA, 25 bp, Homo sapien
ctttcgtctgtttaattcacaggtc

SEQ ID NO: 10372 - DNA, 25 bp, Homo sapien
atgatgctagcccacggcagcctcg

SEQ ID NO: 10373 - DNA, 25 bp, Homo sapien
agactaaacctgagggtagataaaa

SEQ ID NO: 10374 - DNA, 25 bp, Homo sapien
tgatgctagcccacggcagcctcga

SEQ ID NO: 10375 - DNA, 25 bp, Homo sapien
tggcatgatgctagcccacggcagc

SEQ ID NO: 10376 - DNA, 25 bp, Homo sapien
tcaatgcgttcatcattccagactt

SEQ ID NO: 10377 - DNA, 25 bp, Homo sapien
taggatcaaccaaatggaagcgatg

SEQ ID NO: 10378 - DNA, 25 bp, Homo sapien
gcacatcaatgcgttcatcattcca

SEQ ID NO: 10379 - DNA, 25 bp, Homo sapien
gaaggagctgaaagtttccatctct

SEQ ID NO: 10380 - DNA, 25 bp, Homo sapien
attccagactttcggaacctcctgt

SEQ ID NO: 10381 - DNA, 25 bp, Homo sapien
gaacctcctgttcaagagtgtttgg

SEQ ID NO: 10382 - DNA, 25 bp, Homo sapien
atcattccagactttcggaacctcc

SEQ ID NO: 10383 - DNA, 25 bp, Homo sapien
tcaaccaaatggaagcgatgcatag

SEQ ID NO: 10384 - DNA, 25 bp, Homo sapien
ttcggaacctcctgttcaagagtgt

SEQ ID NO: 10385 - DNA, 25 bp, Homo sapien
gatcaaccaaatggaagcgatgcat

SEQ ID NO: 10386 - DNA, 25 bp, Homo sapien
ggaaggagctgaaagtttccatctc

SEQ ID NO: 10387 - DNA, 25 bp, Homo sapien
catctaaaacaaacattggtggctc

SEQ ID NO: 10388 - DNA, 25 bp, Homo sapien
atgttaacagctccatgaggtaagc

SEQ ID NO: 10389 - DNA, 25 bp, Homo sapien
aacagctccatgaggtaagctttat

SEQ ID NO: 10390 - DNA, 25 bp, Homo sapien
taaaacaaacattggtggctctcat

SEQ ID NO: 10391 - DNA, 25 bp, Homo sapien
ttgctatgttaacagctccatgagg

SEQ ID NO: 10392 - DNA, 25 bp, Homo sapien
agcatctaaaacaaacattggtggc

SEQ ID NO: 10393 - DNA, 25 bp, Homo sapien
aacaaacattggtggctctcatttc

SEQ ID NO: 10394 - DNA, 25 bp, Homo sapien
tctaaaacaaacattggtggctctc

SEQ ID NO: 10395 - DNA, 25 bp, Homo sapien
ctccatgaggtaagctttataagca

SEQ ID NO: 10396 - DNA, 25 bp, Homo sapien
aaacattggtggctctcatttcaag

SEQ ID NO: 10397 - DNA, 25 bp, Homo sapien
agagcctttgtgtcttcccaaaatg

SEQ ID NO: 10398 - DNA, 25 bp, Homo sapien
aaaaaaccctgaagatgtgtattct

SEQ ID NO: 10399 - DNA, 25 bp, Homo sapien
ccaaatcagagaaactatgcatata

SEQ ID NO: 10400 - DNA, 25 bp, Homo sapien
tgctgacaggcaacacttggatcat

SEQ ID NO: 10401 - DNA, 25 bp, Homo sapien
cacttgtgtgtttgccactggaacc

SEQ ID NO: 10402 - DNA, 25 bp, Homo sapien
ttaaagtaatgtctagtgataatac

SEQ ID NO: 10403 - DNA, 25 bp, Homo sapien
ttcactcctatctctgctgacaggc

SEQ ID NO: 10404 - DNA, 25 bp, Homo sapien
ttaacaactgccacatgaacacttt

SEQ ID NO: 10405 - DNA, 25 bp, Homo sapien
cttgtgaggccatctaaccatcatc

SEQ ID NO: 10406 - DNA, 25 bp, Homo sapien
acaatgacatcactgggaaattttg

SEQ ID NO: 10407 - DNA, 25 bp, Homo sapien
actggaacctttactatcactagag

SEQ ID NO: 10408 - DNA, 25 bp, Homo sapien
actagagtcccttgtgaggccatct

SEQ ID NO: 10409 - DNA, 25 bp, Homo sapien
tctctggctgccttaaagattctct

SEQ ID NO: 10410 - DNA, 25 bp, Homo sapien
atcctggttgggctttctggagctt

SEQ ID NO: 10411 - DNA, 25 bp, Homo sapien
ccatggtttctgacagggcggctgt

SEQ ID NO: 10412 - DNA, 25 bp, Homo sapien
atgacaagcctagacagggatttct

SEQ ID NO: 10413 - DNA, 25 bp, Homo sapien
atcttcgaagatgtgatccactgtg

SEQ ID NO: 10414 - DNA, 25 bp, Homo sapien
tggacacacatcctggttgggcttt

SEQ ID NO: 10415 - DNA, 25 bp, Homo sapien
gctcttggattctgtctgaactctc

SEQ ID NO: 10416 - DNA, 25 bp, Homo sapien
ttcagcagtttgacaatgacaagcc

SEQ ID NO: 10417 - DNA, 25 bp, Homo sapien
aagtttagaaaacatcccgttcatc

SEQ ID NO: 10418 - DNA, 25 bp, Homo sapien
cttgaagaatatttctgctgcacac

SEQ ID NO: 10419 - DNA, 25 bp, Homo sapien
gctgtggtgattcccatgagtgtcc

SEQ ID NO: 10420 - DNA, 25 bp, Homo sapien
cttgtcgaggctggctggttacatt

SEQ ID NO: 10421 - DNA, 25 bp, Homo sapien
cacaagctacttgtcgaggctggct

SEQ ID NO: 10422 - DNA, 25 bp, Homo sapien
ggctggctggttacattcctcctat

SEQ ID NO: 10423 - DNA, 25 bp, Homo sapien
aatcatggaagtggtggcataagaa

SEQ ID NO: 10424 - DNA, 25 bp, Homo sapien
gaaagcctgaaaatcatggaagtgg

SEQ ID NO: 10425 - DNA, 25 bp, Homo sapien
gtccaccagctagagaaaggatccc

SEQ ID NO: 10426 - DNA, 25 bp, Homo sapien
ctgtgcatgcaagcaacagacacaa

SEQ ID NO: 10427 - DNA, 25 bp, Homo sapien
tcctatcctggaagcaagtgtgaac

SEQ ID NO: 10428 - DNA, 25 bp, Homo sapien
gaagcaagtgtgaactgtgaagaaa

SEQ ID NO: 10429 - DNA, 25 bp, Homo sapien
ggcataagaacgtccaccagctaga

SEQ ID NO: 10430 - DNA, 25 bp, Homo sapien
acagacacaagctacttgtcgaggc

SEQ ID NO: 10431 - DNA, 25 bp, Homo sapien
ctggaatgcaagtagtgcaatcata

SEQ ID NO: 10432 - DNA, 25 bp, Homo sapien
ttttggagggcagttcccatcctaa

SEQ ID NO: 10433 - DNA, 25 bp, Homo sapien
catgagcagagtttttattggagtt

SEQ ID NO: 10434 - DNA, 25 bp, Homo sapien
tgaagctatttttagggaaccacag

SEQ ID NO: 10435 - DNA, 25 bp, Homo sapien
tgaacttgtaggctcaacttaatac

SEQ ID NO: 10436 - DNA, 25 bp, Homo sapien
aatacagtcaggctatgacacgctc

SEQ ID NO: 10437 - DNA, 25 bp, Homo sapien
gtcacagtgaaacatcagagtatcc

SEQ ID NO: 10438 - DNA, 25 bp, Homo sapien
acattgatgtattctccggccagga

SEQ ID NO: 10439 - DNA, 25 bp, Homo sapien
tatctaatggcccacagtgagtcat

SEQ ID NO: 10440 - DNA, 25 bp, Homo sapien
aatggaaaggtcacagtgaaacatc

SEQ ID NO: 10441 - DNA, 25 bp, Homo sapien
gtccaggacaagagcttctcccaat

SEQ ID NO: 10442 - DNA, 25 bp, Homo sapien
ggatttgtaaattcagaaatggcac

SEQ ID NO: 10443 - DNA, 25 bp, Homo sapien
agaaagggagcatgaaacagaaaaa

SEQ ID NO: 10444 - DNA, 25 bp, Homo sapien
aaatgtgtgcaaggtacatcagtcg

SEQ ID NO: 10445 - DNA, 25 bp, Homo sapien
tccataactggcaacaaagatctag

SEQ ID NO: 10446 - DNA, 25 bp, Homo sapien
aaagagagtccatgatgagtgcctt

SEQ ID NO: 10447 - DNA, 25 bp, Homo sapien
agaaatggcacaaaggctcacacat

SEQ ID NO: 10448 - DNA, 25 bp, Homo sapien
atggcacaaaggctcacacattcag

SEQ ID NO: 10449 - DNA, 25 bp, Homo sapien
gtgtgaaatgtgtgcaaggtacatc

SEQ ID NO: 10450 - DNA, 25 bp, Homo sapien
caaagatctagaaagagagtccatg

SEQ ID NO: 10451 - DNA, 25 bp, Homo sapien
aacagaaaaaggagggtgtgaaatg

SEQ ID NO: 10452 - DNA, 25 bp, Homo sapien
acacattcagagctggcttgaggga

SEQ ID NO: 10453 - DNA, 25 bp, Homo sapien
tcatcaccctagaagaaagcaggtc

SEQ ID NO: 10454 - DNA, 25 bp, Homo sapien
atacatgatccttcctgtccggctc

SEQ ID NO: 10455 - DNA, 25 bp, Homo sapien
ccattgtagggatacttaatctgta

SEQ ID NO: 10456 - DNA, 25 bp, Homo sapien
atgtaagcagatcatacaatatgtg

SEQ ID NO: 10457 - DNA, 25 bp, Homo sapien
tggcaaccaccgacctatttcctga

SEQ ID NO: 10458 - DNA, 25 bp, Homo sapien
accctagaagaaagcaggtccctgt

SEQ ID NO: 10459 - DNA, 25 bp, Homo sapien
ttccatgcatgggtccatacttcat

SEQ ID NO: 10460 - DNA, 25 bp, Homo sapien
gatcatacatgagcagaccacacaa

SEQ ID NO: 10461 - DNA, 25 bp, Homo sapien
atctagagagagctcatgacgtttc

SEQ ID NO: 10462 - DNA, 25 bp, Homo sapien
aacatttggtttctgccgatctgat

SEQ ID NO: 10463 - DNA, 25 bp, Homo sapien
tgagcagaccacacaatacatgatc

SEQ ID NO: 10464 - DNA, 25 bp, Homo sapien
cctacattagataagagactggccc

SEQ ID NO: 10465 - DNA, 25 bp, Homo sapien
aattctgtggctagtccacacgacc

SEQ ID NO: 10466 - DNA, 25 bp, Homo sapien
ttctggacctcttggacacagaccc

SEQ ID NO: 10467 - DNA, 25 bp, Homo sapien
agataaatgaatgaacctacattag

SEQ ID NO: 10468 - DNA, 25 bp, Homo sapien
tgaacctacattagataagagactg

SEQ ID NO: 10469 - DNA, 25 bp, Homo sapien
atgagaccattgctgaattctgtgg

SEQ ID NO: 10470 - DNA, 25 bp, Homo sapien
gtggctagtccacacgacccttctg

SEQ ID NO: 10471 - DNA, 25 bp, Homo sapien
acacgacccttctggacctcttgga

SEQ ID NO: 10472 - DNA, 25 bp, Homo sapien
aacgtatgagaccattgctgaattc

SEQ ID NO: 10473 - DNA, 25 bp, Homo sapien
ccctgacaacgtatgagaccattgc

SEQ ID NO: 10474 - DNA, 25 bp, Homo sapien
cctttcctgtactgcactttaaaaa

SEQ ID NO: 10475 - DNA, 25 bp, Homo sapien
cccactatggtaatatgagacaata

SEQ ID NO: 10476 - DNA, 25 bp, Homo sapien
tccctagcatagtgaccatatgtcc

SEQ ID NO: 10477 - DNA, 25 bp, Homo sapien
ctagatcatgcaggaagttgtgagt

SEQ ID NO: 10478 - DNA, 25 bp, Homo sapien
ttcttgacggaatataatactcttc

SEQ ID NO: 10479 - DNA, 25 bp, Homo sapien
catcatagactgacactctggaata

SEQ ID NO: 10480 - DNA, 25 bp, Homo sapien
tttacttcagtacaatgccttctcc

SEQ ID NO: 10481 - DNA, 25 bp, Homo sapien
atatgtcctgatttcgcctgttgtc

SEQ ID NO: 10482 - DNA, 25 bp, Homo sapien
ctgtacttcccagggtaactagatc

SEQ ID NO: 10483 - DNA, 25 bp, Homo sapien
ttcgcctgttgtcccttagtaattc

SEQ ID NO: 10484 - DNA, 25 bp, Homo sapien
gtctgacaaaattaacccactatgg

SEQ ID NO: 10485 - DNA, 25 bp, Homo sapien
attggtcctaattcttgacggaata

SEQ ID NO: 10486 - DNA, 25 bp, Homo sapien
actgatgcttcagactcggccaggc

SEQ ID NO: 10487 - DNA, 25 bp, Homo sapien
accggccgtcatctgtgaatcatcc

SEQ ID NO: 10488 - DNA, 25 bp, Homo sapien
gatgcttcagactcggccaggccgt

SEQ ID NO: 10489 - DNA, 25 bp, Homo sapien
gtcatctgtgaatcatcccgcccat

SEQ ID NO: 10490 - DNA, 25 bp, Homo sapien
aaatactgatgcttcagactcggcc

SEQ ID NO: 10491 - DNA, 25 bp, Homo sapien
ttccctgctgcctttgggatgcggc

SEQ ID NO: 10492 - DNA, 25 bp, Homo sapien
gccaccggccgtcatctgtgaatca

SEQ ID NO: 10493 - DNA, 25 bp, Homo sapien
ctgcctttgggatgcggcctccagc

SEQ ID NO: 10494 - DNA, 25 bp, Homo sapien
tctgtgaatcatcccgcccatttcg

SEQ ID NO: 10495 - DNA, 25 bp, Homo sapien
tgctgcctttgggatgcggcctcca

SEQ ID NO: 10496 - DNA, 25 bp, Homo sapien
agggacaaaatactgatgcttcaga

SEQ ID NO: 10497 - DNA, 25 bp, Homo sapien
agggagaagccctcatcgccaggcg

SEQ ID NO: 10498 - DNA, 25 bp, Homo sapien
gccgggaatcgctggccttgcctct

SEQ ID NO: 10499 - DNA, 25 bp, Homo sapien
caaatggaagaagacgcccgtgctc

SEQ ID NO: 10500 - DNA, 25 bp, Homo sapien
tgcatcatctgggtaaaacagagaa

SEQ ID NO: 10501 - DNA, 25 bp, Homo sapien
tggagaagtccacagttgcatcatc

SEQ ID NO: 10502 - DNA, 25 bp, Homo sapien
taaaacagagaagacagagctggaa

SEQ ID NO: 10503 - DNA, 25 bp, Homo sapien
agcgcgccggctcagggacaaaata

SEQ ID NO: 10504 - DNA, 25 bp, Homo sapien
tgctccctagcgcaggaggtcctaa

SEQ ID NO: 10505 - DNA, 25 bp, Homo sapien
agcttgtgccaacacgctcggggaa

SEQ ID NO: 10506 - DNA, 25 bp, Homo sapien
aaaccgcgggcagcttgtgccaaca

SEQ ID NO: 10507 - DNA, 25 bp, Homo sapien
aacctataaacagatggagaagtcc

SEQ ID NO: 10508 - DNA, 25 bp, Homo sapien
cttcagggagctttcgtcaaatgcc

SEQ ID NO: 10509 - DNA, 25 bp, Homo sapien
ctttcgtcaaatgccgacgggagga

SEQ ID NO: 10510 - DNA, 25 bp, Homo sapien
gtgctgtgtggcctcctgtttccga

SEQ ID NO: 10511 - DNA, 25 bp, Homo sapien
tcacagtgatgcatctgctcaagac

SEQ ID NO: 10512 - DNA, 25 bp, Homo sapien
gccagaagaacatggagcctgctgt

SEQ ID NO: 10513 - DNA, 25 bp, Homo sapien
taggctcttgtcagagaaaacctct

SEQ ID NO: 10514 - DNA, 25 bp, Homo sapien
ttccttacacagtacagtgaggcca

SEQ ID NO: 10515 - DNA, 25 bp, Homo sapien
atctgctcaagactcctgactcctg

SEQ ID NO: 10516 - DNA, 25 bp, Homo sapien
ctgtttccgacacgttgagggagta

SEQ ID NO: 10517 - DNA, 25 bp, Homo sapien
ttcatcagctcaacggagcacttgg

SEQ ID NO: 10518 - DNA, 25 bp, Homo sapien
gccagatgaggagagaaataagaat

SEQ ID NO: 10519 - DNA, 25 bp, Homo sapien
gccaaacctggttcaaatacttgct

SEQ ID NO: 10520 - DNA, 25 bp, Homo sapien
ctcggggatgtaaaatagaatgcta

SEQ ID NO: 10521 - DNA, 25 bp, Homo sapien
ttgtggatatactggctgtgtgatc

SEQ ID NO: 10522 - DNA, 25 bp, Homo sapien
agaatgctagcatctaccctgagag

SEQ ID NO: 10523 - DNA, 25 bp, Homo sapien
aaagtggcatattaagaacatcgtc

SEQ ID NO: 10524 - DNA, 25 bp, Homo sapien
tcgtctctagactcagccaaacctg

SEQ ID NO: 10525 - DNA, 25 bp, Homo sapien
tatttttaaagagactggcacatgg

SEQ ID NO: 10526 - DNA, 25 bp, Homo sapien
actggcacatggtacagcaccaaat

SEQ ID NO: 10527 - DNA, 25 bp, Homo sapien
ttgctgctaatactaggagcggaat

SEQ ID NO: 10528 - DNA, 25 bp, Homo sapien
aaaggccactctagcaaagtggcat

SEQ ID NO: 10529 - DNA, 25 bp, Homo sapien
ttcaaagagcacttcaaaggccact

SEQ ID NO: 10530 - DNA, 25 bp, Homo sapien
gatcatgtgacgtggctgctgcata

SEQ ID NO: 10531 - DNA, 25 bp, Homo sapien
ttataggccatccaaggaacgggga

SEQ ID NO: 10532 - DNA, 25 bp, Homo sapien
cagctactagaggaagaccacctta

SEQ ID NO: 10533 - DNA, 25 bp, Homo sapien
actccaacttgggaaagacacacac

SEQ ID NO: 10534 - DNA, 25 bp, Homo sapien
tgtggtaagcactagatgatggaat

SEQ ID NO: 10535 - DNA, 25 bp, Homo sapien
atgtgcaggctcttaaatgggatga

SEQ ID NO: 10536 - DNA, 25 bp, Homo sapien
agggaaagacacagtcccatgtcaa

SEQ ID NO: 10537 - DNA, 25 bp, Homo sapien
catggggaagtcactgtagcatagt

SEQ ID NO: 10538 - DNA, 25 bp, Homo sapien
atgatggaatgcacagagcacattt

SEQ ID NO: 10539 - DNA, 25 bp, Homo sapien
tagcatagtggtatatgtgcaggct

SEQ ID NO: 10540 - DNA, 25 bp, Homo sapien
cacatttaaactgggccacgtgggc

SEQ ID NO: 10541 - DNA, 25 bp, Homo sapien
tattccacgaatgatcggctgttgc

SEQ ID NO: 10542 - DNA, 25 bp, Homo sapien
aaatattccacgaatgatcggctgt

SEQ ID NO: 10543 - DNA, 25 bp, Homo sapien
atgatcggctgttgctttaagaaag

SEQ ID NO: 10544 - DNA, 25 bp, Homo sapien
gaaagaactatccattaaaagaata

SEQ ID NO: 10545 - DNA, 25 bp, Homo sapien
agaaaggagtgagcaaacaaattta

SEQ ID NO: 10546 - DNA, 25 bp, Homo sapien
tccacgaatgatcggctgttgcttt

SEQ ID NO: 10547 - DNA, 25 bp, Homo sapien
tgctttaagaaaggagtgagcaaac

SEQ ID NO: 10548 - DNA, 25 bp, Homo sapien
taagaaaggagtgagcaaacaaatt

SEQ ID NO: 10549 - DNA, 25 bp, Homo sapien
ctttaagaaaggagtgagcaaacaa

SEQ ID NO: 10550 - DNA, 25 bp, Homo sapien
ctgttgctttaagaaaggagtgagc

SEQ ID NO: 10551 - DNA, 25 bp, Homo sapien
ataatgagattccaaatattccacg

SEQ ID NO: 10552 - DNA, 25 bp, Homo sapien
atgcctgttagacagcagtagcagc

SEQ ID NO: 10553 - DNA, 25 bp, Homo sapien
attgcccaggctgtcaacaggattt

SEQ ID NO: 10554 - DNA, 25 bp, Homo sapien
ttgcctgtgccacatcagtgtgcta

SEQ ID NO: 10555 - DNA, 25 bp, Homo sapien
gcagtagcagcaaattggtgcctca

SEQ ID NO: 10556 - DNA, 25 bp, Homo sapien
ggtgcctcagccatattccttgcct

SEQ ID NO: 10557 - DNA, 25 bp, Homo sapien
cttctcgagtaaccggggaccacag

SEQ ID NO: 10558 - DNA, 25 bp, Homo sapien
tctcagtaaccggacaaatagagct

SEQ ID NO: 10559 - DNA, 25 bp, Homo sapien
tattttgtgagatggattcttgcca

SEQ ID NO: 10560 - DNA, 25 bp, Homo sapien
gagaggaaattaaggaggactctaa

SEQ ID NO: 10561 - DNA, 25 bp, Homo sapien
aaatagagctgccacctactgagac

SEQ ID NO: 10562 - DNA, 25 bp, Homo sapien
taatatttggtctcagtaaccggac

SEQ ID NO: 10563 - DNA, 25 bp, Homo sapien
tatccttggtaaaaaaatgaactgc

SEQ ID NO: 10564 - DNA, 25 bp, Homo sapien
agaaactcttgtctactccatccct

SEQ ID NO: 10565 - DNA, 25 bp, Homo sapien
tgaactgcattcgtcatctgagaaa

SEQ ID NO: 10566 - DNA, 25 bp, Homo sapien
ctcggcatactcatagaatggctaa

SEQ ID NO: 10567 - DNA, 25 bp, Homo sapien
ggggatggaagtgagttctacaatt

SEQ ID NO: 10568 - DNA, 25 bp, Homo sapien
caacccacgtgattctggggcaggt

SEQ ID NO: 10569 - DNA, 25 bp, Homo sapien
cacggtgtgatacctcggcatactc

SEQ ID NO: 10570 - DNA, 25 bp, Homo sapien
tgggagattcaaacccgcccagaag

SEQ ID NO: 10571 - DNA, 25 bp, Homo sapien
acgtttccacaatgtggggatggaa

SEQ ID NO: 10572 - DNA, 25 bp, Homo sapien
tgaccagcaacccacgtgattctgg

SEQ ID NO: 10573 - DNA, 25 bp, Homo sapien
attaaaaccacggtgtgatacctcg

SEQ ID NO: 10574 - DNA, 25 bp, Homo sapien
aggccctcaataggcatgaaatctg

SEQ ID NO: 10575 - DNA, 25 bp, Homo sapien
gcaggccctcaataggcatgaaatc

SEQ ID NO: 10576 - DNA, 25 bp, Homo sapien
aagcaggccctcaataggcatgaaa

SEQ ID NO: 10577 - DNA, 25 bp, Homo sapien
cagcaagaagtcaccttctataatc

SEQ ID NO: 10578 - DNA, 25 bp, Homo sapien
agaaagcaggccctcaataggcatg

SEQ ID NO: 10579 - DNA, 25 bp, Homo sapien
taatcagaaagcaggccctcaatag

SEQ ID NO: 10580 - DNA, 25 bp, Homo sapien
tataatcagaaagcaggccctcaat

SEQ ID NO: 10581 - DNA, 25 bp, Homo sapien
ttctataatcagaaagcaggccctc

SEQ ID NO: 10582 - DNA, 25 bp, Homo sapien
tctataatcagaaagcaggccctca

SEQ ID NO: 10583 - DNA, 25 bp, Homo sapien
cttctataatcagaaagcaggccct

SEQ ID NO: 10584 - DNA, 25 bp, Homo sapien
aaagcaggccctcaataggcatgaa

SEQ ID NO: 10585 - DNA, 25 bp, Homo sapien
caaaaaagggtcaatagaagaagga

SEQ ID NO: 10586 - DNA, 25 bp, Homo sapien
agaaagagaaggcaaaaaagggtca

SEQ ID NO: 10587 - DNA, 25 bp, Homo sapien
ctggctgtaacttgaggcagtgaag

SEQ ID NO: 10588 - DNA, 25 bp, Homo sapien
gaagtaggaaagaagacatgtgcag

SEQ ID NO: 10589 - DNA, 25 bp, Homo sapien
tcataattggaattagtgccctcat

SEQ ID NO: 10590 - DNA, 25 bp, Homo sapien
tagaagaaggagcaactggacagaa

SEQ ID NO: 10591 - DNA, 25 bp, Homo sapien
aaagagactccagagagttggtagt

SEQ ID NO: 10592 - DNA, 25 bp, Homo sapien
gatggcattagaacatggggccttt

SEQ ID NO: 10593 - DNA, 25 bp, Homo sapien
aacatggggcctttgggcagtgatt

SEQ ID NO: 10594 - DNA, 25 bp, Homo sapien
actccagagagttggtagtcccttt

SEQ ID NO: 10595 - DNA, 25 bp, Homo sapien
ggacagaaagaaccttgaggaagta

SEQ ID NO: 10596 - DNA, 25 bp, Homo sapien
tagaaagatcctgggctttgaagtc

SEQ ID NO: 10597 - DNA, 25 bp, Homo sapien
tcagagcctcaagtaggcctcataa

SEQ ID NO: 10598 - DNA, 25 bp, Homo sapien
acttccatggcagacattagtagtc

SEQ ID NO: 10599 - DNA, 25 bp, Homo sapien
cagaactggcaaaaatatgacactc

SEQ ID NO: 10600 - DNA, 25 bp, Homo sapien
ccaatttcactagggcaatgagcta

SEQ ID NO: 10601 - DNA, 25 bp, Homo sapien
aatgagctagaaagtcagtgacact

SEQ ID NO: 10602 - DNA, 25 bp, Homo sapien
atgacactcgtaccataactgctcc

SEQ ID NO: 10603 - DNA, 25 bp, Homo sapien
acactgggtagaggctagaaagatc

SEQ ID NO: 10604 - DNA, 25 bp, Homo sapien
ccctttgataggatttggcattgta

SEQ ID NO: 10605 - DNA, 25 bp, Homo sapien
ctaaagcactacaggcagccaatac

SEQ ID NO: 10606 - DNA, 25 bp, Homo sapien
agtcagagccttcagtcagaactgg

SEQ ID NO: 10607 - DNA, 25 bp, Homo sapien
catttgtaaggctggcttgatgaga

SEQ ID NO: 10608 - DNA, 25 bp, Homo sapien
gagacttcagcaagccctgaggggc

SEQ ID NO: 10609 - DNA, 25 bp, Homo sapien
cccttcaatgatgaggctcgaggaa

SEQ ID NO: 10610 - DNA, 25 bp, Homo sapien
tcaatgatgaggctcgaggaatcaa

SEQ ID NO: 10611 - DNA, 25 bp, Homo sapien
ttgatgagagacttcagcaagccct

SEQ ID NO: 10612 - DNA, 25 bp, Homo sapien
tctggctgccgattaccctccctac

SEQ ID NO: 10613 - DNA, 25 bp, Homo sapien
tcgaggaatcaaggaggcatttgta

SEQ ID NO: 10614 - DNA, 25 bp, Homo sapien
caatcccttcaatgatgaggctcga

SEQ ID NO: 10615 - DNA, 25 bp, Homo sapien
aaggctggcttgatgagagacttca

SEQ ID NO: 10616 - DNA, 25 bp, Homo sapien
aatcaaggaggcatttgtaaggctg

SEQ ID NO: 10617 - DNA, 25 bp, Homo sapien
ctggcttgatgagagacttcagcaa

SEQ ID NO: 10618 - DNA, 25 bp, Homo sapien
ttcactataaaacctcatgaagggc

SEQ ID NO: 10619 - DNA, 25 bp, Homo sapien
ttttcagcagctttccaaaataaat

SEQ ID NO: 10620 - DNA, 25 bp, Homo sapien
taaaacctcatgaagggctacgcgc

SEQ ID NO: 10621 - DNA, 25 bp, Homo sapien
ggctacgcgcggcagctctcacacc

SEQ ID NO: 10622 - DNA, 25 bp, Homo sapien
acattttcagcagctttccaaaata

SEQ ID NO: 10623 - DNA, 25 bp, Homo sapien
ataaaacctcatgaagggctacgcg

SEQ ID NO: 10624 - DNA, 25 bp, Homo sapien
ttcagcagctttccaaaataaatat

SEQ ID NO: 10625 - DNA, 25 bp, Homo sapien
actataaaacctcatgaagggctac

SEQ ID NO: 10626 - DNA, 25 bp, Homo sapien
attcactataaaacctcatgaaggg

SEQ ID NO: 10627 - DNA, 25 bp, Homo sapien
tacgcgcggcagctctcacacctgt

SEQ ID NO: 10628 - DNA, 25 bp, Homo sapien
tataaaacctcatgaagggctacgc

SEQ ID NO: 10629 - DNA, 25 bp, Homo sapien
aaagagaaagtattaaccacatgcc

SEQ ID NO: 10630 - DNA, 25 bp, Homo sapien
agtacactgctttctctgtgacttt

SEQ ID NO: 10631 - DNA, 25 bp, Homo sapien
gaagtagacaaatttcatagaacag

SEQ ID NO: 10632 - DNA, 25 bp, Homo sapien
atatactgtcataaagtacactgct

SEQ ID NO: 10633 - DNA, 25 bp, Homo sapien
atgataaaaagataaatatactgtc

SEQ ID NO: 10634 - DNA, 25 bp, Homo sapien
caaattcagtctcagttccaggttt

SEQ ID NO: 10635 - DNA, 25 bp, Homo sapien
tttaatgccatacatcttaagcata

SEQ ID NO: 10636 - DNA, 25 bp, Homo sapien
cagttagtgatgcatatcttggcac

SEQ ID NO: 10637 - DNA, 25 bp, Homo sapien
ttgtgactaaagagaaagtattaac

SEQ ID NO: 10638 - DNA, 25 bp, Homo sapien
tcatagaacagttagtgatgcatat

SEQ ID NO: 10639 - DNA, 25 bp, Homo sapien
taaccacatgccaaacacttaatga

SEQ ID NO: 10640 - DNA, 25 bp, Homo sapien
atttccttgaataaagccattgaac

SEQ ID NO: 10641 - DNA, 25 bp, Homo sapien
aaaatttccttgaataaagccattg

SEQ ID NO: 10642 - DNA, 25 bp, Homo sapien
aaagccattgaacaatttggcaaac

SEQ ID NO: 10643 - DNA, 25 bp, Homo sapien
tattcctctagttgctgccttatat

SEQ ID NO: 10644 - DNA, 25 bp, Homo sapien
gttgctgccttatatctaactcttc

SEQ ID NO: 10645 - DNA, 25 bp, Homo sapien
tcctattcctctagttgctgcctta

SEQ ID NO: 10646 - DNA, 25 bp, Homo sapien
tccttgaataaagccattgaacaat

SEQ ID NO: 10647 - DNA, 25 bp, Homo sapien
tttggcaaacttaagcaatatcctc

SEQ ID NO: 10648 - DNA, 25 bp, Homo sapien
attgaacaatttggcaaacttaagc

SEQ ID NO: 10649 - DNA, 25 bp, Homo sapien
ttgaataaagccattgaacaatttg

SEQ ID NO: 10650 - DNA, 25 bp, Homo sapien
caatttggcaaacttaagcaatatc

SEQ ID NO: 10651 - DNA, 25 bp, Homo sapien
gtagaccacctgcacaatgacattc

SEQ ID NO: 10652 - DNA, 25 bp, Homo sapien
ttcttccagtagaccacctgcacaa

SEQ ID NO: 10653 - DNA, 25 bp, Homo sapien
gacattcatctaattaaagagattc

SEQ ID NO: 10654 - DNA, 25 bp, Homo sapien
caaagaacagtcagtgttcctcaca

SEQ ID NO: 10655 - DNA, 25 bp, Homo sapien
actccctcaaagaacagtcagtgtt

SEQ ID NO: 10656 - DNA, 25 bp, Homo sapien
tctaaatatccactgaaacattcag

SEQ ID NO: 10657 - DNA, 25 bp, Homo sapien
ttccaggttactccctcaaagaaca

SEQ ID NO: 10658 - DNA, 25 bp, Homo sapien
tccagtagaccacctgcacaatgac

SEQ ID NO: 10659 - DNA, 25 bp, Homo sapien
tcctcacagatgtctgtattaacaa

SEQ ID NO: 10660 - DNA, 25 bp, Homo sapien
ttaaagagattctaaatatccactg

SEQ ID NO: 10661 - DNA, 25 bp, Homo sapien
aggttactccctcaaagaacagtca

SEQ ID NO: 10662 - DNA, 25 bp, Homo sapien
gcattgaggttacggctaagttgcc

SEQ ID NO: 10663 - DNA, 25 bp, Homo sapien
aatgtcagacataaaggggaagctt

SEQ ID NO: 10664 - DNA, 25 bp, Homo sapien
ctactgggaggggtttcattttcaa

SEQ ID NO: 10665 - DNA, 25 bp, Homo sapien
cagaggtccactgtacatgttggta

SEQ ID NO: 10666 - DNA, 25 bp, Homo sapien
aagttgcctgaaacagtcaatgcta

SEQ ID NO: 10667 - DNA, 25 bp, Homo sapien
atattggtaacgctcctctatgtgt

SEQ ID NO: 10668 - DNA, 25 bp, Homo sapien
aaggggaagcttgataaatattggt

SEQ ID NO: 10669 - DNA, 25 bp, Homo sapien
acattaagggctctgaaatggctgc

SEQ ID NO: 10670 - DNA, 25 bp, Homo sapien
ttcatagagccgagaccaggctact

SEQ ID NO: 10671 - DNA, 25 bp, Homo sapien
tatctaagctgccagccagtgcttt

SEQ ID NO: 10672 - DNA, 25 bp, Homo sapien
ttggtaaatcagtcttcatagagcc

SEQ ID NO: 10673 - DNA, 25 bp, Homo sapien
aaattcctaaggatgcctggggttc

SEQ ID NO: 10674 - DNA, 25 bp, Homo sapien
ggttcaggaagcaaagaagaatctt

SEQ ID NO: 10675 - DNA, 25 bp, Homo sapien
taaagctatgcagatagcctggtcc

SEQ ID NO: 10676 - DNA, 25 bp, Homo sapien
cagttggctcagtttggaatggttt

SEQ ID NO: 10677 - DNA, 25 bp, Homo sapien
tctaaactgggcattagtgaggggc

SEQ ID NO: 10678 - DNA, 25 bp, Homo sapien
aagtgaggacatgaagcaaattcct

SEQ ID NO: 10679 - DNA, 25 bp, Homo sapien
cagatagcctggtcctaacatgttc

SEQ ID NO: 10680 - DNA, 25 bp, Homo sapien
atatcagcaacaatagcattgggtt

SEQ ID NO: 10681 - DNA, 25 bp, Homo sapien
agttcatcctgaaaaacaagccttc

SEQ ID NO: 10682 - DNA, 25 bp, Homo sapien
ctgcctgctggcttgtttaggggcc

SEQ ID NO: 10683 - DNA, 25 bp, Homo sapien
agccttcaaggacaagtgaggacat

SEQ ID NO: 10684 - DNA, 25 bp, Homo sapien
ttggcttactgtaatcttctgcctc

SEQ ID NO: 10685 - DNA, 25 bp, Homo sapien
cctttatgtggatagggatccctgt

SEQ ID NO: 10686 - DNA, 25 bp, Homo sapien
tacctaagaactataggaattctcc

SEQ ID NO: 10687 - DNA, 25 bp, Homo sapien
ggatccctgtgccatgtcttgcact

SEQ ID NO: 10688 - DNA, 25 bp, Homo sapien
tctagcagtgttggacaatggattc

SEQ ID NO: 10689 - DNA, 25 bp, Homo sapien
gctgctctagaaaactaaaggacga

SEQ ID NO: 10690 - DNA, 25 bp, Homo sapien
attgaggtgtgcagcatccagattc

SEQ ID NO: 10691 - DNA, 25 bp, Homo sapien
tttctcataattccagagggaaggc

SEQ ID NO: 10692 - DNA, 25 bp, Homo sapien
tctcagaattgaggtgtgcagcatc

SEQ ID NO: 10693 - DNA, 25 bp, Homo sapien
gttcagtcagggatttctcagaatt

SEQ ID NO: 10694 - DNA, 25 bp, Homo sapien
aatggattctaaaggttcctgagac

SEQ ID NO: 10695 - DNA, 25 bp, Homo sapien
ctcattttacggaagagatctatca

SEQ ID NO: 10696 - DNA, 25 bp, Homo sapien
tttaggtagtgaagaggaaagaata

SEQ ID NO: 10697 - DNA, 25 bp, Homo sapien
ttacggaagagatctatcaatttac

SEQ ID NO: 10698 - DNA, 25 bp, Homo sapien
aataataataggttgttcacagctt

SEQ ID NO: 10699 - DNA, 25 bp, Homo sapien
gtgaagaggaaagaatataacctac

SEQ ID NO: 10700 - DNA, 25 bp, Homo sapien
aaaatgtttaggtagtgaagaggaa

SEQ ID NO: 10701 - DNA, 25 bp, Homo sapien
tacaacatggttgcactccttaatc

SEQ ID NO: 10702 - DNA, 25 bp, Homo sapien
tttacgtactcaataatagaactac

SEQ ID NO: 10703 - DNA, 25 bp, Homo sapien
tcacagcttaaaatgtttaggtagt

SEQ ID NO: 10704 - DNA, 25 bp, Homo sapien
gtagtgaagaggaaagaatataacc

SEQ ID NO: 10705 - DNA, 25 bp, Homo sapien
aataatagaactacaacatggttgc

SEQ ID NO: 10706 - DNA, 25 bp, Homo sapien
cgtgatagagaaatccaaaggtcat

SEQ ID NO: 10707 - DNA, 25 bp, Homo sapien
tcagcgaatacgtcatcaaaattgc

SEQ ID NO: 10708 - DNA, 25 bp, Homo sapien
atgtctgtgcatcagcgaatacgtc

SEQ ID NO: 10709 - DNA, 25 bp, Homo sapien
gaggctgacaaagtactgcccagct

SEQ ID NO: 10710 - DNA, 25 bp, Homo sapien
ataagcgccgtgatagagaaatcca

SEQ ID NO: 10711 - DNA, 25 bp, Homo sapien
atagagaatcaagggcagttccagt

SEQ ID NO: 10712 - DNA, 25 bp, Homo sapien
tgaggttttgtgatgagctatagag

SEQ ID NO: 10713 - DNA, 25 bp, Homo sapien
atgtaatgaattccaatgtctgtgc

SEQ ID NO: 10714 - DNA, 25 bp, Homo sapien
ttgcttttgtatggcctgggagctc

SEQ ID NO: 10715 - DNA, 25 bp, Homo sapien
gtattacgatggctagataatgtaa

SEQ ID NO: 10716 - DNA, 25 bp, Homo sapien
tccttaataggaggataagcgccgt

SEQ ID NO: 10717 - DNA, 25 bp, Homo sapien
tttcccggcgcaaagcccagtactg

SEQ ID NO: 10718 - DNA, 25 bp, Homo sapien
tactctacacagaccaggaatctcc

SEQ ID NO: 10719 - DNA, 25 bp, Homo sapien
tcacaagactagaaagatttcgtgc

SEQ ID NO: 10720 - DNA, 25 bp, Homo sapien
gaagaatgtggtggttcgaaatatt

SEQ ID NO: 10721 - DNA, 25 bp, Homo sapien
aaagggcaagtggtatagaagaata

SEQ ID NO: 10722 - DNA, 25 bp, Homo sapien
ctccaatcttggatgctgggagatt

SEQ ID NO: 10723 - DNA, 25 bp, Homo sapien
gtggctggccactcaatgactatgt

SEQ ID NO: 10724 - DNA, 25 bp, Homo sapien
attcagatttttcccggcgcaaagc

SEQ ID NO: 10725 - DNA, 25 bp, Homo sapien
agatttcgtgcaaaaccatatactc

SEQ ID NO: 10726 - DNA, 25 bp, Homo sapien
ctcaagttgagggtttcaaagggca

SEQ ID NO: 10727 - DNA, 25 bp, Homo sapien
ccagtactgggaacaaaaacaccaa

SEQ ID NO: 10728 - DNA, 25 bp, Homo sapien
acacaccagagtccaggccaggctg

SEQ ID NO: 10729 - DNA, 25 bp, Homo sapien
ccagaaacacagcagttggcctgac

SEQ ID NO: 10730 - DNA, 25 bp, Homo sapien
tgtgtgttgccacctccgtttgcac

SEQ ID NO: 10731 - DNA, 25 bp, Homo sapien
ctaaacttgaactttcacagggcgg

SEQ ID NO: 10732 - DNA, 25 bp, Homo sapien
ttcttcaaacgggacacaccagagt

SEQ ID NO: 10733 - DNA, 25 bp, Homo sapien
tcagcaaacctcttaaatgggtcat

SEQ ID NO: 10734 - DNA, 25 bp, Homo sapien
gaccgtggcagacatcattaatcaa

SEQ ID NO: 10735 - DNA, 25 bp, Homo sapien
tatttatggatagcaaagttgactt

SEQ ID NO: 10736 - DNA, 25 bp, Homo sapien
gtgctcaaggctcgctctgtgtgtt

SEQ ID NO: 10737 - DNA, 25 bp, Homo sapien
tccaaccatttttagcttgtgggcc

SEQ ID NO: 10738 - DNA, 25 bp, Homo sapien
aaatgggtcattggatgctaaactt

SEQ ID NO: 10739 - DNA, 25 bp, Homo sapien
cacaaacatgattctgagaccgttc

SEQ ID NO: 10740 - DNA, 25 bp, Homo sapien
ggtttaaatggccagattagaacac

SEQ ID NO: 10741 - DNA, 25 bp, Homo sapien
acagaaaactaacaagtggtccaca

SEQ ID NO: 10742 - DNA, 25 bp, Homo sapien
tcttccagccactagattaaggagt

SEQ ID NO: 10743 - DNA, 25 bp, Homo sapien
taacaagtggtccacaaatacattc

SEQ ID NO: 10744 - DNA, 25 bp, Homo sapien
gagaccgttcttccagccactagat

SEQ ID NO: 10745 - DNA, 25 bp, Homo sapien
atggccagattagaacacaaacatg

SEQ ID NO: 10746 - DNA, 25 bp, Homo sapien
agcaaacttgcatgcgagtagtgag

SEQ ID NO: 10747 - DNA, 25 bp, Homo sapien
tgccacacgccacacagaaaactaa

SEQ ID NO: 10748 - DNA, 25 bp, Homo sapien
aacttgcatgcgagtagtgagccgt

SEQ ID NO: 10749 - DNA, 25 bp, Homo sapien
ccgtgtggcaagtccaatacaaggg

SEQ ID NO: 10750 - DNA, 25 bp, Homo sapien
agtcttctagtgtatattgtgtaac

SEQ ID NO: 10751 - DNA, 25 bp, Homo sapien
aggaacaatactacctaaggacaaa

SEQ ID NO: 10752 - DNA, 25 bp, Homo sapien
gaaaactgagatttaagttgcaaac

SEQ ID NO: 10753 - DNA, 25 bp, Homo sapien
ctttggttgaaaggaacaatactac

SEQ ID NO: 10754 - DNA, 25 bp, Homo sapien
taaacctttggtgtgaagcagcgtc

SEQ ID NO: 10755 - DNA, 25 bp, Homo sapien
atgttcctagtgcatttggaaaata

SEQ ID NO: 10756 - DNA, 25 bp, Homo sapien
catttctggagctggtaggaataac

SEQ ID NO: 10757 - DNA, 25 bp, Homo sapien
tctggagtctttggttgaaaggaac

SEQ ID NO: 10758 - DNA, 25 bp, Homo sapien
ttcccaattgccatttcaaaggcta

SEQ ID NO: 10759 - DNA, 25 bp, Homo sapien
ctggagctggtaggaataaccattt

SEQ ID NO: 10760 - DNA, 25 bp, Homo sapien
agcattctgttcactcctttctggt

SEQ ID NO: 10761 - DNA, 25 bp, Homo sapien
aatagactgaaactgctgcctactc

SEQ ID NO: 10762 - DNA, 25 bp, Homo sapien
gtgttaacaagtctgggccactgca

SEQ ID NO: 10763 - DNA, 25 bp, Homo sapien
gcaggaggtacattgcccaatttct

SEQ ID NO: 10764 - DNA, 25 bp, Homo sapien
taaccagaagccaatggtttcctcc

SEQ ID NO: 10765 - DNA, 25 bp, Homo sapien
cccgaggccctccaaagtctaggag

SEQ ID NO: 10766 - DNA, 25 bp, Homo sapien
ctgtgggttcgtctttcagccagtc

SEQ ID NO: 10767 - DNA, 25 bp, Homo sapien
caaagtctaggagaagctcctggga

SEQ ID NO: 10768 - DNA, 25 bp, Homo sapien
gtgagagcccaagagctacagcagg

SEQ ID NO: 10769 - DNA, 25 bp, Homo sapien
tgccagcttttctgcccgagccggg

SEQ ID NO: 10770 - DNA, 25 bp, Homo sapien
agcagactgggtgtgttaacaagtc

SEQ ID NO: 10771 - DNA, 25 bp, Homo sapien
aagaccaaagcctctatcaactctc

SEQ ID NO: 10772 - DNA, 25 bp, Homo sapien
ccttttgaagatagcatatacattg

SEQ ID NO: 10773 - DNA, 25 bp, Homo sapien
aagcgcaagccgtccatccacttca

SEQ ID NO: 10774 - DNA, 25 bp, Homo sapien
tctgccaaatgtttcacacatagct

SEQ ID NO: 10775 - DNA, 25 bp, Homo sapien
cccatgggtctgattctgttgtctg

SEQ ID NO: 10776 - DNA, 25 bp, Homo sapien
ttatggcaatctcgcctctctgggg

SEQ ID NO: 10777 - DNA, 25 bp, Homo sapien
ttatacagtctatgcccaataaccc

SEQ ID NO: 10778 - DNA, 25 bp, Homo sapien
tctgcttcccaagcgcaagccgtcc

SEQ ID NO: 10779 - DNA, 25 bp, Homo sapien
atacattgttatacagtctatgccc

SEQ ID NO: 10780 - DNA, 25 bp, Homo sapien
aaaaaatctgctatgtcacttgcta

SEQ ID NO: 10781 - DNA, 25 bp, Homo sapien
tataatttctagctctctgccaaat

SEQ ID NO: 10782 - DNA, 25 bp, Homo sapien
catcactgtctcaatctagatttcc

SEQ ID NO: 10783 - DNA, 25 bp, Homo sapien
attaatggcgtttcatttcctcgag

SEQ ID NO: 10784 - DNA, 25 bp, Homo sapien
agaagcggcaaacaggagcaaattt

SEQ ID NO: 10785 - DNA, 25 bp, Homo sapien
atggcgtttcatttcctcgagtagc

SEQ ID NO: 10786 - DNA, 25 bp, Homo sapien
tccctgacctgaatccggggcctgg

SEQ ID NO: 10787 - DNA, 25 bp, Homo sapien
atttctcaggagctgagattctccc

SEQ ID NO: 10788 - DNA, 25 bp, Homo sapien
tcatttcctcgagtagcagaagcgg

SEQ ID NO: 10789 - DNA, 25 bp, Homo sapien
aacaggaaaataattgccttttcaa

SEQ ID NO: 10790 - DNA, 25 bp, Homo sapien
cctgacctgaatccggggcctggct

SEQ ID NO: 10791 - DNA, 25 bp, Homo sapien
tttcctcgagtagcagaagcggcaa

SEQ ID NO: 10792 - DNA, 25 bp, Homo sapien
gcggcaaacaggagcaaatttctca

SEQ ID NO: 10793 - DNA, 25 bp, Homo sapien
caggagcaaatttctcaggagctga

SEQ ID NO: 10794 - DNA, 25 bp, Homo sapien
acggctggctcaggttttcgtgttt

SEQ ID NO: 10795 - DNA, 25 bp, Homo sapien
aaacacgaccaacaacgaactacag

SEQ ID NO: 10796 - DNA, 25 bp, Homo sapien
tttctcaaatggcaatagacctcac

SEQ ID NO: 10797 - DNA, 25 bp, Homo sapien
acgaactacagagtctggcctgctc

SEQ ID NO: 10798 - DNA, 25 bp, Homo sapien
tttcaggacagaattttgtgcgttc

SEQ ID NO: 10799 - DNA, 25 bp, Homo sapien
tttcggttcgcggtcctgattcatt

SEQ ID NO: 10800 - DNA, 25 bp, Homo sapien
ggcctgctcgggcatttccctcaaa

SEQ ID NO: 10801 - DNA, 25 bp, Homo sapien
tattcatgaagacagttctcgattc

SEQ ID NO: 10802 - DNA, 25 bp, Homo sapien
ttagcacagtcgacctacagcagag

SEQ ID NO: 10803 - DNA, 25 bp, Homo sapien
ttgccggcccactgtttgaattctg

SEQ ID NO: 10804 - DNA, 25 bp, Homo sapien
aacttttacagctctttgccggccc

SEQ ID NO: 10805 - DNA, 25 bp, Homo sapien
ctcctgaaaatctaaagtgatcgtt

SEQ ID NO: 10806 - DNA, 25 bp, Homo sapien
agaggtccatgtgtcaaggaagcaa

SEQ ID NO: 10807 - DNA, 25 bp, Homo sapien
agaaaggaagcagaataacttaatc

SEQ ID NO: 10808 - DNA, 25 bp, Homo sapien
tttactagtgctgtctcttgccctc

SEQ ID NO: 10809 - DNA, 25 bp, Homo sapien
ttgcttctaatgagaagaatgtgac

SEQ ID NO: 10810 - DNA, 25 bp, Homo sapien
gtgaagggatgtctcttgtgttatt

SEQ ID NO: 10811 - DNA, 25 bp, Homo sapien
taatggaggtaatatgaagaagaaa

SEQ ID NO: 10812 - DNA, 25 bp, Homo sapien
atctaaggaaagctaaagaccctgt

SEQ ID NO: 10813 - DNA, 25 bp, Homo sapien
ttcccttgagttctggctggactta

SEQ ID NO: 10814 - DNA, 25 bp, Homo sapien
taatcacaaactaggcacacactcc

SEQ ID NO: 10815 - DNA, 25 bp, Homo sapien
taaactcaattataagaaaggaagc

SEQ ID NO: 10816 - DNA, 25 bp, Homo sapien
gttaataaagaatatcacatgactg

SEQ ID NO: 10817 - DNA, 25 bp, Homo sapien
actagaataagactttgggagaaac

SEQ ID NO: 10818 - DNA, 25 bp, Homo sapien
tacgtcaagttaaagaaatacacac

SEQ ID NO: 10819 - DNA, 25 bp, Homo sapien
ggaataccaagcctcaaaattaatc

SEQ ID NO: 10820 - DNA, 25 bp, Homo sapien
tatctgaaaggcagatatatctgcc

SEQ ID NO: 10821 - DNA, 25 bp, Homo sapien
ttcagaaaggagtaagtacaacgac

SEQ ID NO: 10822 - DNA, 25 bp, Homo sapien
tcacattacggcatatctgaaaggc

SEQ ID NO: 10823 - DNA, 25 bp, Homo sapien
agtacaacgacataagcatttcagt

SEQ ID NO: 10824 - DNA, 25 bp, Homo sapien
aaatcttttaggaataccaagcctc

SEQ ID NO: 10825 - DNA, 25 bp, Homo sapien
atctgccactcattacctaggtctc

SEQ ID NO: 10826 - DNA, 25 bp, Homo sapien
atactggatagttccctaccaatga

SEQ ID NO: 10827 - DNA, 25 bp, Homo sapien
cccagtgactaagtataggacgtct

SEQ ID NO: 10828 - DNA, 25 bp, Homo sapien
tttttatcacacattgtcacctcag

SEQ ID NO: 10829 - DNA, 25 bp, Homo sapien
agtgactaagtataggacgtctagc

SEQ ID NO: 10830 - DNA, 25 bp, Homo sapien
ccagtgactaagtataggacgtcta

SEQ ID NO: 10831 - DNA, 25 bp, Homo sapien
aagtataggacgtctagctccaaga

SEQ ID NO: 10832 - DNA, 25 bp, Homo sapien
catccccagtgactaagtataggac

SEQ ID NO: 10833 - DNA, 25 bp, Homo sapien
tataggacgtctagctccaagaagt

SEQ ID NO: 10834 - DNA, 25 bp, Homo sapien
taggacgtctagctccaagaagtgg

SEQ ID NO: 10835 - DNA, 25 bp, Homo sapien
ataggacgtctagctccaagaagtg

SEQ ID NO: 10836 - DNA, 25 bp, Homo sapien
gtataggacgtctagctccaagaag

SEQ ID NO: 10837 - DNA, 25 bp, Homo sapien
agtataggacgtctagctccaagaa

SEQ ID NO: 10838 - DNA, 25 bp, Homo sapien
cccagtgactaagtataggacgtct

SEQ ID NO: 10839 - DNA, 25 bp, Homo sapien
taggacgtctagctccaagaagtgg

SEQ ID NO: 10840 - DNA, 25 bp, Homo sapien
tttttatcacacattgtcacctcag

SEQ ID NO: 10841 - DNA, 25 bp, Homo sapien
gcgcctggcccactagctctagttt

SEQ ID NO: 10842 - DNA, 25 bp, Homo sapien
agtgactaagtataggacgtctagc

SEQ ID NO: 10843 - DNA, 25 bp, Homo sapien
caagaagtggactaataaaggtcac

SEQ ID NO: 10844 - DNA, 25 bp, Homo sapien
aataaaggtcactcccagaagacag

SEQ ID NO: 10845 - DNA, 25 bp, Homo sapien
ccagtgactaagtataggacgtcta

SEQ ID NO: 10846 - DNA, 25 bp, Homo sapien
tataggacgtctagctccaagaagt

SEQ ID NO: 10847 - DNA, 25 bp, Homo sapien
agtataggacgtctagctccaagaa

SEQ ID NO: 10848 - DNA, 25 bp, Homo sapien
aagtataggacgtctagctccaaga

SEQ ID NO: 10849 - DNA, 25 bp, Homo sapien
gagttacaatcacaagttccaacaa

SEQ ID NO: 10850 - DNA, 25 bp, Homo sapien
ataagtaggcctttcagattcaaat

SEQ ID NO: 10851 - DNA, 25 bp, Homo sapien
aatggcccaaataagtaggcctttc

SEQ ID NO: 10852 - DNA, 25 bp, Homo sapien
cccaaataagtaggcctttcagatt

SEQ ID NO: 10853 - DNA, 25 bp, Homo sapien
aataagtaggcctttcagattcaaa

SEQ ID NO: 10854 - DNA, 25 bp, Homo sapien
gattgggcaatttattctaatatga

SEQ ID NO: 10855 - DNA, 25 bp, Homo sapien
ttatagattgggcaatttattctaa

SEQ ID NO: 10856 - DNA, 25 bp, Homo sapien
tgagttacaatcacaagttccaaca

SEQ ID NO: 10857 - DNA, 25 bp, Homo sapien
atggcccaaataagtaggcctttca

SEQ ID NO: 10858 - DNA, 25 bp, Homo sapien
gcccaaataagtaggcctttcagat

SEQ ID NO: 10859 - DNA, 25 bp, Homo sapien
taagtaggcctttcagattcaaatt

SEQ ID NO: 10860 - DNA, 25 bp, Homo sapien
attgtcactgttgttgctgttcatc

SEQ ID NO: 10861 - DNA, 25 bp, Homo sapien
atactcaagttcaaaagtcagtttt

SEQ ID NO: 10862 - DNA, 25 bp, Homo sapien
tcagctaagcattcatacatgacac

SEQ ID NO: 10863 - DNA, 25 bp, Homo sapien
tctctctatagaaacaatcccttgt

SEQ ID NO: 10864 - DNA, 25 bp, Homo sapien
gatgtcaagccacattagctgtttc

SEQ ID NO: 10865 - DNA, 25 bp, Homo sapien
aggacctccttgataagtcattgtc

SEQ ID NO: 10866 - DNA, 25 bp, Homo sapien
atcacaactgtaagggaaatatccc

SEQ ID NO: 10867 - DNA, 25 bp, Homo sapien
gaaatatccctaccacaaatgggta

SEQ ID NO: 10868 - DNA, 25 bp, Homo sapien
accacaaatgggtaggacctccttg

SEQ ID NO: 10869 - DNA, 25 bp, Homo sapien
taagtattgatgtcaagccacatta

SEQ ID NO: 10870 - DNA, 25 bp, Homo sapien
ttaggttgaagacattaataagtat

SEQ ID NO: 10871 - DNA, 25 bp, Homo sapien
acccaggtgtcgtagtaactgtcat

SEQ ID NO: 10872 - DNA, 25 bp, Homo sapien
tgccttgaaggcagtcagagccttc

SEQ ID NO: 10873 - DNA, 25 bp, Homo sapien
caccctgctgcaccttcgtgagttt

SEQ ID NO: 10874 - DNA, 25 bp, Homo sapien
taactgtcatgcaggcctaggaacc

SEQ ID NO: 10875 - DNA, 25 bp, Homo sapien
ctttcttctgtggtggctggaggcc

SEQ ID NO: 10876 - DNA, 25 bp, Homo sapien
ttcgtgagtttgacaagaagaagct

SEQ ID NO: 10877 - DNA, 25 bp, Homo sapien
agtttgacaagaagaagctgatctc

SEQ ID NO: 10878 - DNA, 25 bp, Homo sapien
gccttccttagacccaggtgtcgta

SEQ ID NO: 10879 - DNA, 25 bp, Homo sapien
tttgagcagtttgatgagctcaccc

SEQ ID NO: 10880 - DNA, 25 bp, Homo sapien
tttatgcgtggagtgcttctgcctt

SEQ ID NO: 10881 - DNA, 25 bp, Homo sapien
agctgatctctgtggagacggacat

SEQ ID NO: 10882 - DNA, 25 bp, Homo sapien
tttatgcttaaggactagacgaccc

SEQ ID NO: 10883 - DNA, 25 bp, Homo sapien
catgggtaagtggtaaagctctaaa

SEQ ID NO: 10884 - DNA, 25 bp, Homo sapien
gctaaggccctccaaagatggaaat

SEQ ID NO: 10885 - DNA, 25 bp, Homo sapien
cataaagaactgtctggcaaagtgt

SEQ ID NO: 10886 - DNA, 25 bp, Homo sapien
tgggatgacctgactaagctgcctt

SEQ ID NO: 10887 - DNA, 25 bp, Homo sapien
tgttccttcaaagatggaggcagca

SEQ ID NO: 10888 - DNA, 25 bp, Homo sapien
gttattggacagcagacaaacacac

SEQ ID NO: 10889 - DNA, 25 bp, Homo sapien
gcagcagacaccaggcctacatgga

SEQ ID NO: 10890 - DNA, 25 bp, Homo sapien
gtaggagctactactgggatgacct

SEQ ID NO: 10891 - DNA, 25 bp, Homo sapien
aagataaaacccagacttagggctc

SEQ ID NO: 10892 - DNA, 25 bp, Homo sapien
gctcctacagagaaagggctcctcc

SEQ ID NO: 10893 - DNA, 25 bp, Homo sapien
ctcaataaagccgtttacatatata

SEQ ID NO: 10894 - DNA, 25 bp, Homo sapien
tttctaaagttgattgcagtgatgc

SEQ ID NO: 10895 - DNA, 25 bp, Homo sapien
ggtttctaaagttgattgcagtgat

SEQ ID NO: 10896 - DNA, 25 bp, Homo sapien
aagggtttctaaagttgattgcagt

SEQ ID NO: 10897 - DNA, 25 bp, Homo sapien
tctaaagttgattgcagtgatgctg

SEQ ID NO: 10898 - DNA, 25 bp, Homo sapien
aaagttgattgcagtgatgctggca

SEQ ID NO: 10899 - DNA, 25 bp, Homo sapien
ttctaaagttgattgcagtgatgct

SEQ ID NO: 10900 - DNA, 25 bp, Homo sapien
aagttgattgcagtgatgctggcac

SEQ ID NO: 10901 - DNA, 25 bp, Homo sapien
taaagttgattgcagtgatgctggc

SEQ ID NO: 10902 - DNA, 25 bp, Homo sapien
agttgattgcagtgatgctggcaca

SEQ ID NO: 10903 - DNA, 25 bp, Homo sapien
taaagggtttctaaagttgattgca

SEQ ID NO: 10904 - DNA, 25 bp, Homo sapien
aataagagatggagtcaacatcacc

SEQ ID NO: 10905 - DNA, 25 bp, Homo sapien
ataccctcatatagccaagacaatt

SEQ ID NO: 10906 - DNA, 25 bp, Homo sapien
ctgatttgggattaggtgagcaaat

SEQ ID NO: 10907 - DNA, 25 bp, Homo sapien
ctttcagggtttcttcataggatgt

SEQ ID NO: 10908 - DNA, 25 bp, Homo sapien
gcccagaaactaacccatgcatttg

SEQ ID NO: 10909 - DNA, 25 bp, Homo sapien
taattaaataagtgtggtgctgatt

SEQ ID NO: 10910 - DNA, 25 bp, Homo sapien
aatgagactgagacaatttgctatc

SEQ ID NO: 10911 - DNA, 25 bp, Homo sapien
atagggaaagaagactgactcctca

SEQ ID NO: 10912 - DNA, 25 bp, Homo sapien
gagcaaatcactagtgcccagaaac

SEQ ID NO: 10913 - DNA, 25 bp, Homo sapien
tttattatctggaacaggcaaatcc

SEQ ID NO: 10914 - DNA, 25 bp, Homo sapien
aggggagaatgagggatttctttca

SEQ ID NO: 10915 - DNA, 25 bp, Homo sapien
ctgttttgctgtaagtcaggttact

SEQ ID NO: 10916 - DNA, 25 bp, Homo sapien
agggaaggtctgatggtgattattt

SEQ ID NO: 10917 - DNA, 25 bp, Homo sapien
agcatttgtctgaggaagtctttat

SEQ ID NO: 10918 - DNA, 25 bp, Homo sapien
gatggtgattatttccctcagcatt

SEQ ID NO: 10919 - DNA, 25 bp, Homo sapien
gttaatttgggaaaatcctctgaca

SEQ ID NO: 10920 - DNA, 25 bp, Homo sapien
ttgggaaaatcctctgacagtgtta

SEQ ID NO: 10921 - DNA, 25 bp, Homo sapien
atcaccttccttttccgtgaggaac

SEQ ID NO: 10922 - DNA, 25 bp, Homo sapien
tctgtgtttctgatgggaagtctaa

SEQ ID NO: 10923 - DNA, 25 bp, Homo sapien
cctttgttacgcagatttgagtttc

SEQ ID NO: 10924 - DNA, 25 bp, Homo sapien
ctacttcttgacttgtgatttgctg

SEQ ID NO: 10925 - DNA, 25 bp, Homo sapien
cttctggtattccaaatagatgtat

SEQ ID NO: 10926 - DNA, 25 bp, Homo sapien
tggattggtccacttacagagagct

SEQ ID NO: 10927 - DNA, 25 bp, Homo sapien
gtactgattggtatatttacaaacc

SEQ ID NO: 10928 - DNA, 25 bp, Homo sapien
ctagatagagtagacagagagcact

SEQ ID NO: 10929 - DNA, 25 bp, Homo sapien
agcttcgcctagtggatcctatgcc

SEQ ID NO: 10930 - DNA, 25 bp, Homo sapien
attggtccacttacagagagctgat

SEQ ID NO: 10931 - DNA, 25 bp, Homo sapien
ttagctagatagagtagacagagag

SEQ ID NO: 10932 - DNA, 25 bp, Homo sapien
tgctaattggtgcatgcacgaaccc

SEQ ID NO: 10933 - DNA, 25 bp, Homo sapien
aggagcccagccagcttcgcctagt

SEQ ID NO: 10934 - DNA, 25 bp, Homo sapien
tgcacgaacccggagctagacacag

SEQ ID NO: 10935 - DNA, 25 bp, Homo sapien
attttacagacagtggattggtcca

SEQ ID NO: 10936 - DNA, 25 bp, Homo sapien
tagtggatcctatgccagggccaca

SEQ ID NO: 10937 - DNA, 25 bp, Homo sapien
atacatataaagacgtattaggcat

SEQ ID NO: 10938 - DNA, 25 bp, Homo sapien
caagtagagctcttttacatatttt

SEQ ID NO: 10939 - DNA, 25 bp, Homo sapien
tagcaaaatttacatgataaggtac

SEQ ID NO: 10940 - DNA, 25 bp, Homo sapien
agcactaaaacatcgtgtacacaac

SEQ ID NO: 10941 - DNA, 25 bp, Homo sapien
tttgagcgatattaaacataaaacg

SEQ ID NO: 10942 - DNA, 25 bp, Homo sapien
tttttagcactaaaacatcgtgtac

SEQ ID NO: 10943 - DNA, 25 bp, Homo sapien
acataaaacgaaactacattcttcc

SEQ ID NO: 10944 - DNA, 25 bp, Homo sapien
cctgttttacaaccctaggcagttg

SEQ ID NO: 10945 - DNA, 25 bp, Homo sapien
cagtcaactgagaagtaaaaggaaa

SEQ ID NO: 10946 - DNA, 25 bp, Homo sapien
cagctaaatagccttaaatttttgc

SEQ ID NO: 10947 - DNA, 25 bp, Homo sapien
acatgataaggtacagagaggaaaa

SEQ ID NO: 10948 - DNA, 25 bp, Homo sapien
acaaatctaattcaaaagtggtact

SEQ ID NO: 10949 - DNA, 25 bp, Homo sapien
gtgcacaagcagataaaattacaaa

SEQ ID NO: 10950 - DNA, 25 bp, Homo sapien
ccattacaagtatgtgcacaagcag

SEQ ID NO: 10951 - DNA, 25 bp, Homo sapien
tagagggagttaatttgataaaatg

SEQ ID NO: 10952 - DNA, 25 bp, Homo sapien
atgatactccattacaagtatgtgc

SEQ ID NO: 10953 - DNA, 25 bp, Homo sapien
ttcaaggtgctaggtaagatcacaa

SEQ ID NO: 10954 - DNA, 25 bp, Homo sapien
acaaattctaccattcctggggttg

SEQ ID NO: 10955 - DNA, 25 bp, Homo sapien
caaattcaaggtgctaggtaagatc

SEQ ID NO: 10956 - DNA, 25 bp, Homo sapien
tgaacaaatttgactacagagtttc

SEQ ID NO: 10957 - DNA, 25 bp, Homo sapien
ttcttacaaattcaaggtgctaggt

SEQ ID NO: 10958 - DNA, 25 bp, Homo sapien
caagtatgtgcacaagcagataaaa

SEQ ID NO: 10959 - DNA, 25 bp, Homo sapien
gaaaactcactatctcttcactgct

SEQ ID NO: 10960 - DNA, 25 bp, Homo sapien
gaggattttcctgaacctcagtgtc

SEQ ID NO: 10961 - DNA, 25 bp, Homo sapien
gaaacattaatcaaggatgccagtt

SEQ ID NO: 10962 - DNA, 25 bp, Homo sapien
agttaagacagagctattacataga

SEQ ID NO: 10963 - DNA, 25 bp, Homo sapien
ttaatcaaggatgccagttaagaca

SEQ ID NO: 10964 - DNA, 25 bp, Homo sapien
tgtgtggaaacattaatcaaggatg

SEQ ID NO: 10965 - DNA, 25 bp, Homo sapien
tcagtgtcatcattagaaaactcac

SEQ ID NO: 10966 - DNA, 25 bp, Homo sapien
tgtggaaacattaatcaaggatgcc

SEQ ID NO: 10967 - DNA, 25 bp, Homo sapien
cttcactgctatgtgtggaaacatt

SEQ ID NO: 10968 - DNA, 25 bp, Homo sapien
aacctcagtgtcatcattagaaaac

SEQ ID NO: 10969 - DNA, 25 bp, Homo sapien
aagacagagctattacatagagatt

SEQ ID NO: 10970 - DNA, 25 bp, Homo sapien
agctatactgaacataatttacggt

SEQ ID NO: 10971 - DNA, 25 bp, Homo sapien
tttcagagtctgagatatctagatg

SEQ ID NO: 10972 - DNA, 25 bp, Homo sapien
tttaaaatatgagtggtatgaacac

SEQ ID NO: 10973 - DNA, 25 bp, Homo sapien
atgcaggaaagagactaaagttgaa

SEQ ID NO: 10974 - DNA, 25 bp, Homo sapien
tctgagatatctagatgagtgatac

SEQ ID NO: 10975 - DNA, 25 bp, Homo sapien
catttaagaagtgaacaaaaagtac

SEQ ID NO: 10976 - DNA, 25 bp, Homo sapien
tggtatgaacacaatgcaggaaaga

SEQ ID NO: 10977 - DNA, 25 bp, Homo sapien
ttacggttaattgctcaagtggtac

SEQ ID NO: 10978 - DNA, 25 bp, Homo sapien
atcaggccacccaagtattgcaaac

SEQ ID NO: 10979 - DNA, 25 bp, Homo sapien
tataaactgttgcaatccttacatc

SEQ ID NO: 10980 - DNA, 25 bp, Homo sapien
cccaagtattgcaaaccagaaaaaa

SEQ ID NO: 10981 - DNA, 25 bp, Homo sapien
caaaaagtaggacaatcagaatgct

SEQ ID NO: 10982 - DNA, 25 bp, Homo sapien
gactgtactgcttgtgagtgagtgt

SEQ ID NO: 10983 - DNA, 25 bp, Homo sapien
acctagccaacttagtgactgtact

SEQ ID NO: 10984 - DNA, 25 bp, Homo sapien
tacaatatatacaggggtcgggcta

SEQ ID NO: 10985 - DNA, 25 bp, Homo sapien
ttgacctcttgtacaaaagggcatt

SEQ ID NO: 10986 - DNA, 25 bp, Homo sapien
tcacgtgacagagttgggctttgaa

SEQ ID NO: 10987 - DNA, 25 bp, Homo sapien
gcagagagagaggtacaatatatac

SEQ ID NO: 10988 - DNA, 25 bp, Homo sapien
atgtggcctcctgtgagaatggtat

SEQ ID NO: 10989 - DNA, 25 bp, Homo sapien
tgtgcaaggcttcatatactatttc

SEQ ID NO: 10990 - DNA, 25 bp, Homo sapien
tgaggaaactcaagcctactgtcac

SEQ ID NO: 10991 - DNA, 25 bp, Homo sapien
tcaaaggaagacgtgactcatctct

SEQ ID NO: 10992 - DNA, 25 bp, Homo sapien
ggagggagatggacctagctctcct

SEQ ID NO: 10993 - DNA, 25 bp, Homo sapien
atggacctagctctcctgacacagg

SEQ ID NO: 10994 - DNA, 25 bp, Homo sapien
ctgctaaagatcataagcctagtga

SEQ ID NO: 10995 - DNA, 25 bp, Homo sapien
aagcccttacctccacggtgtctac

SEQ ID NO: 10996 - DNA, 25 bp, Homo sapien
gagatggacctagctctcctgacac

SEQ ID NO: 10997 - DNA, 25 bp, Homo sapien
tcataagcctagtgagagactggga

SEQ ID NO: 10998 - DNA, 25 bp, Homo sapien
tagctctcctgacacaggtcccaag

SEQ ID NO: 10999 - DNA, 25 bp, Homo sapien
aagatcataagcctagtgagagact

SEQ ID NO: 11000 - DNA, 25 bp, Homo sapien
tttcactgctaaagatcataagcct

SEQ ID NO: 11001 - DNA, 25 bp, Homo sapien
ccttagagagattattttcactgct

SEQ ID NO: 11002 - DNA, 25 bp, Homo sapien
cccaccttagagagattattttcac

SEQ ID NO: 11003 - DNA, 25 bp, Homo sapien
cagtgtggtggaaaagttggttata

SEQ ID NO: 11004 - DNA, 25 bp, Homo sapien
atttgcacaacatcactggaataac

SEQ ID NO: 11005 - DNA, 25 bp, Homo sapien
attaggtaatgcatcagttcttccc

SEQ ID NO: 11006 - DNA, 25 bp, Homo sapien
agtacacttgagtttgtggggtttc

SEQ ID NO: 11007 - DNA, 25 bp, Homo sapien
aatgactgcaaaagttaaagaaacc

SEQ ID NO: 11008 - DNA, 25 bp, Homo sapien
aagcaaagtgtaaatggttgaggct

SEQ ID NO: 11009 - DNA, 25 bp, Homo sapien
aaagaaaccaaagagggactccaca

SEQ ID NO: 11010 - DNA, 25 bp, Homo sapien
agagggactccacagacttaaacaa

SEQ ID NO: 11011 - DNA, 25 bp, Homo sapien
acagctagcaacaaatattcacaac

SEQ ID NO: 11012 - DNA, 25 bp, Homo sapien
ttaagggctggctatatttagtcaa

SEQ ID NO: 11013 - DNA, 25 bp, Homo sapien
aagactttgcttggagaaatgtaaa

SEQ ID NO: 11014 - DNA, 25 bp, Homo sapien
acatgacagacagtgataggcattg

SEQ ID NO: 11015 - DNA, 25 bp, Homo sapien
atcgcctccttacacatgacagaca

SEQ ID NO: 11016 - DNA, 25 bp, Homo sapien
ttatctgtaaggagatcatcgcctc

SEQ ID NO: 11017 - DNA, 25 bp, Homo sapien
cctgctctaattcagaatgtgtgaa

SEQ ID NO: 11018 - DNA, 25 bp, Homo sapien
ttacacatgacagacagtgataggc

SEQ ID NO: 11019 - DNA, 25 bp, Homo sapien
attaaatcagcctgctctaattcag

SEQ ID NO: 11020 - DNA, 25 bp, Homo sapien
gtgtgaatgttgttgtctagcccaa

SEQ ID NO: 11021 - DNA, 25 bp, Homo sapien
ttggaacacacagataagcagtagc

SEQ ID NO: 11022 - DNA, 25 bp, Homo sapien
tcacgttatctgtaaggagatcatc

SEQ ID NO: 11023 - DNA, 25 bp, Homo sapien
acagtgataggcattggaacacaca

SEQ ID NO: 11024 - DNA, 25 bp, Homo sapien
acacagataagcagtagcttcctgt

SEQ ID NO: 11025 - DNA, 25 bp, Homo sapien
tacagcctgtttgacacacacagac

SEQ ID NO: 11026 - DNA, 25 bp, Homo sapien
tctcaaccaagccatgatctctgat

SEQ ID NO: 11027 - DNA, 25 bp, Homo sapien
gatctctgatctcttaccagggtta

SEQ ID NO: 11028 - DNA, 25 bp, Homo sapien
tatgggccacatgaagacctttgtt

SEQ ID NO: 11029 - DNA, 25 bp, Homo sapien
tgtgttctggcatatgcaattcaat

SEQ ID NO: 11030 - DNA, 25 bp, Homo sapien
atgaaataggctgtacttggtttcc

SEQ ID NO: 11031 - DNA, 25 bp, Homo sapien
atgcaattcaattgctcagcagttc

SEQ ID NO: 11032 - DNA, 25 bp, Homo sapien
tgaaactaaaaatggagaatagtcc

SEQ ID NO: 11033 - DNA, 25 bp, Homo sapien
tattttaagctttatgggccacatg

SEQ ID NO: 11034 - DNA, 25 bp, Homo sapien
tgctcagcagttcttattgacacca

SEQ ID NO: 11035 - DNA, 25 bp, Homo sapien
cttaccagggttaatgaaataggct

SEQ ID NO: 11036 - DNA, 25 bp, Homo sapien
tactgttgagcaataaaaaggcata

SEQ ID NO: 11037 - DNA, 25 bp, Homo sapien
caacgtgatttctccaaggggtgat

SEQ ID NO: 11038 - DNA, 25 bp, Homo sapien
tagtggtgatggtttctcgagtaca

SEQ ID NO: 11039 - DNA, 25 bp, Homo sapien
aacatgcaaaaaatggataaatctc

SEQ ID NO: 11040 - DNA, 25 bp, Homo sapien
caaggggtgatggatgtttattatc

SEQ ID NO: 11041 - DNA, 25 bp, Homo sapien
taattatgttgatggaaagaatcca

SEQ ID NO: 11042 - DNA, 25 bp, Homo sapien
agagggattgcaacgtgatttctcc

SEQ ID NO: 11043 - DNA, 25 bp, Homo sapien
gcagttccttagaacggagaatgta

SEQ ID NO: 11044 - DNA, 25 bp, Homo sapien
aatcagaatgctgttaggatggtgc

SEQ ID NO: 11045 - DNA, 25 bp, Homo sapien
acagaaagaagatcagcagttcctt

SEQ ID NO: 11046 - DNA, 25 bp, Homo sapien
ttaggatggtgctgttagacaaatc

SEQ ID NO: 11047 - DNA, 25 bp, Homo sapien
tagagtacagagaagccggtgctaa

SEQ ID NO: 11048 - DNA, 25 bp, Homo sapien
cctggtttcccaagtatgacataag

SEQ ID NO: 11049 - DNA, 25 bp, Homo sapien
cagtttgcttgggacactcctgatc

SEQ ID NO: 11050 - DNA, 25 bp, Homo sapien
agccggtgctaaaatgcagggctac

SEQ ID NO: 11051 - DNA, 25 bp, Homo sapien
ccacttaggagctagaaagcttagg

SEQ ID NO: 11052 - DNA, 25 bp, Homo sapien
ttgttgcgtgaattttggtcagctc

SEQ ID NO: 11053 - DNA, 25 bp, Homo sapien
ccctggttgacttgtgaactatttc

SEQ ID NO: 11054 - DNA, 25 bp, Homo sapien
tttcaacacacgagagatctgctgt

SEQ ID NO: 11055 - DNA, 25 bp, Homo sapien
ttcctctgaaggtaacatgcaattc

SEQ ID NO: 11056 - DNA, 25 bp, Homo sapien
tatgacataagtatccctggttgac

SEQ ID NO: 11057 - DNA, 25 bp, Homo sapien
ctagaaagcttaggggtagagtaca

SEQ ID NO: 11058 - DNA, 25 bp, Homo sapien
aattggcctaatgaacatccactga

SEQ ID NO: 11059 - DNA, 25 bp, Homo sapien
cacagggatcagtgaagaacttact

SEQ ID NO: 11060 - DNA, 25 bp, Homo sapien
ccctccaatgtagggaaattatgaa

SEQ ID NO: 11061 - DNA, 25 bp, Homo sapien
tagtgtgacgatacagttctgtgac

SEQ ID NO: 11062 - DNA, 25 bp, Homo sapien
gtgggatgcggcttacactgtaatt

SEQ ID NO: 11063 - DNA, 25 bp, Homo sapien
gaacatccactgagcaatggatttc

SEQ ID NO: 11064 - DNA, 25 bp, Homo sapien
actagagtacatatgattcgcaagc

SEQ ID NO: 11065 - DNA, 25 bp, Homo sapien
atttctaaattacacagggatcagt

SEQ ID NO: 11066 - DNA, 25 bp, Homo sapien
aagagctcaatacagctagaaatta

SEQ ID NO: 11067 - DNA, 25 bp, Homo sapien
tgattcgcaagcttactggcaacat

SEQ ID NO: 11068 - DNA, 25 bp, Homo sapien
aaacttgtgggatgcggcttacact

SEQ ID NO: 11069 - DNA, 25 bp, Homo sapien
aaacacagaggattattgggacagt

SEQ ID NO: 11070 - DNA, 25 bp, Homo sapien
aaagagctagcaagctacgaaaaga

SEQ ID NO: 11071 - DNA, 25 bp, Homo sapien
tgggacagtgaaacggctctttatc

SEQ ID NO: 11072 - DNA, 25 bp, Homo sapien
aaaatagccaggagtttagaggagt

SEQ ID NO: 11073 - DNA, 25 bp, Homo sapien
gcatactttatggttcagaggcaaa

SEQ ID NO: 11074 - DNA, 25 bp, Homo sapien
cagaggcaaaattatggagacaaaa

SEQ ID NO: 11075 - DNA, 25 bp, Homo sapien
ggaagcaattaaggtgtccttcagt

SEQ ID NO: 11076 - DNA, 25 bp, Homo sapien
gtgaaacaaatcaatctgaaaaggc

SEQ ID NO: 11077 - DNA, 25 bp, Homo sapien
agtaggcgaaacacagaggattatt

SEQ ID NO: 11078 - DNA, 25 bp, Homo sapien
tggccgatagtgtcaatgtagtttc

SEQ ID NO: 11079 - DNA, 25 bp, Homo sapien
tggtacttccagacaatagcatatt

SEQ ID NO: 11080 - DNA, 25 bp, Homo sapien
taagctactgctaccacaatgtttt

SEQ ID NO: 11081 - DNA, 25 bp, Homo sapien
acggcaatgaaaacaaataagctac

SEQ ID NO: 11082 - DNA, 25 bp, Homo sapien
acctgtagtgttagataaacgttac

SEQ ID NO: 11083 - DNA, 25 bp, Homo sapien
ttttatacacaggtagctgagctgt

SEQ ID NO: 11084 - DNA, 25 bp, Homo sapien
cgttctagatctggatggtggtcat

SEQ ID NO: 11085 - DNA, 25 bp, Homo sapien
tagaaaggaaataggagagagatca

SEQ ID NO: 11086 - DNA, 25 bp, Homo sapien
tctgggatgccaataatgatctcgt

SEQ ID NO: 11087 - DNA, 25 bp, Homo sapien
gcatagtcaccaggagcggatagaa

SEQ ID NO: 11088 - DNA, 25 bp, Homo sapien
tgttgaatagaacagggcagaagtt

SEQ ID NO: 11089 - DNA, 25 bp, Homo sapien
aacatagtattgagtgagagaagcc

SEQ ID NO: 11090 - DNA, 25 bp, Homo sapien
tggcataccgtacggcaatgaaaac

SEQ ID NO: 11091 - DNA, 25 bp, Homo sapien
aaaaggtttatcactcacacgaggc

SEQ ID NO: 11092 - DNA, 25 bp, Homo sapien
taaggctcagtgaacgcagtacaaa

SEQ ID NO: 11093 - DNA, 25 bp, Homo sapien
ctataacagaagcttggtaaggctc

SEQ ID NO: 11094 - DNA, 25 bp, Homo sapien
aaagcatgagcttgccagcagtgac

SEQ ID NO: 11095 - DNA, 25 bp, Homo sapien
caaaggtggaagcatttgagctttc

SEQ ID NO: 11096 - DNA, 25 bp, Homo sapien
ccctgcagtggtagtggtcatctcc

SEQ ID NO: 11097 - DNA, 25 bp, Homo sapien
ttctagccagcaagagtcagttagc

SEQ ID NO: 11098 - DNA, 25 bp, Homo sapien
acacgaggcttttacagagagcagc

SEQ ID NO: 11099 - DNA, 25 bp, Homo sapien
ttgaacttccaccaggcacaaaggt

SEQ ID NO: 11100 - DNA, 25 bp, Homo sapien
agcagcgagttctcaagcaggtcca

SEQ ID NO: 11101 - DNA, 25 bp, Homo sapien
tagcaaactaaagcaagaggagagc

SEQ ID NO: 11102 - DNA, 25 bp, Homo sapien
ttgaaatagagggtcacggtctaaa

SEQ ID NO: 11103 - DNA, 25 bp, Homo sapien
cactaacaggtgtctaaggagagaa

SEQ ID NO: 11104 - DNA, 25 bp, Homo sapien
taaaatgagcaaagtctgaatggag

SEQ ID NO: 11105 - DNA, 25 bp, Homo sapien
ttaaactaagaaggcaggatgagtt

SEQ ID NO: 11106 - DNA, 25 bp, Homo sapien
gccatggccagttaaaatgagcaaa

SEQ ID NO: 11107 - DNA, 25 bp, Homo sapien
aggcagcagccatcgggttgaaata

SEQ ID NO: 11108 - DNA, 25 bp, Homo sapien
gaggcgacatcactaacaggtgtct

SEQ ID NO: 11109 - DNA, 25 bp, Homo sapien
aagagggaaaagacacaggtttcca

SEQ ID NO: 11110 - DNA, 25 bp, Homo sapien
atgagtttaagcaggaggcgacatc

SEQ ID NO: 11111 - DNA, 25 bp, Homo sapien
acggtctaaaggatacagcaagtaa

SEQ ID NO: 11112 - DNA, 25 bp, Homo sapien
cagcaagtaaaaaggagagggcctt

SEQ ID NO: 11113 - DNA, 25 bp, Homo sapien
ctctgcagagtcttgaggtagcaca

SEQ ID NO: 11114 - DNA, 25 bp, Homo sapien
gctgagatatccaaaatcaagggcc

SEQ ID NO: 11115 - DNA, 25 bp, Homo sapien
ggccaattttcgcattcccagcaga

SEQ ID NO: 11116 - DNA, 25 bp, Homo sapien
gactctgcagagtcttgaggtagca

SEQ ID NO: 11117 - DNA, 25 bp, Homo sapien
tggctagcaggctgtgtgcaagctc

SEQ ID NO: 11118 - DNA, 25 bp, Homo sapien
agggcatcacatggctagcaggctg

SEQ ID NO: 11119 - DNA, 25 bp, Homo sapien
actgagcccggcctttcttcctctt

SEQ ID NO: 11120 - DNA, 25 bp, Homo sapien
gatatccaaaatcaagggccttctt

SEQ ID NO: 11121 - DNA, 25 bp, Homo sapien
gctgtgtgcaagctcaggtctctct

SEQ ID NO: 11122 - DNA, 25 bp, Homo sapien
caggctgtgtgcaagctcaggtctc

SEQ ID NO: 11123 - DNA, 25 bp, Homo sapien
caattttcgcattcccagcagagat

SEQ ID NO: 11124 - DNA, 25 bp, Homo sapien
tatacacgtgttgactacctttttc

SEQ ID NO: 11125 - DNA, 25 bp, Homo sapien
tcaaggattacagatattgcagcat

SEQ ID NO: 11126 - DNA, 25 bp, Homo sapien
gcaaaattatgccttgctgaaacca

SEQ ID NO: 11127 - DNA, 25 bp, Homo sapien
ctcagaaggaattaagaaatatgtt

SEQ ID NO: 11128 - DNA, 25 bp, Homo sapien
agaaatctaaaatgataacaacaac

SEQ ID NO: 11129 - DNA, 25 bp, Homo sapien
agatccaaaatgtcccaagccgcca

SEQ ID NO: 11130 - DNA, 25 bp, Homo sapien
aagccgccacattataaccaatgat

SEQ ID NO: 11131 - DNA, 25 bp, Homo sapien
ctccaaaaatactcagaaggaatta

SEQ ID NO: 11132 - DNA, 25 bp, Homo sapien
ttttagaaagatccaaaatgtccca

SEQ ID NO: 11133 - DNA, 25 bp, Homo sapien
tatgttctaagcaaaattatgcctt

SEQ ID NO: 11134 - DNA, 25 bp, Homo sapien
actctaaagagaaatagaaatctaa

SEQ ID NO: 11135 - DNA, 25 bp, Homo sapien
gaggaaaaatacctgctgggataac

SEQ ID NO: 11136 - DNA, 25 bp, Homo sapien
cacatgaatggctgccaggtccgac

SEQ ID NO: 11137 - DNA, 25 bp, Homo sapien
gctgaagaggagattaaaccaactc

SEQ ID NO: 11138 - DNA, 25 bp, Homo sapien
cttccttggtagctgaagaggagat

SEQ ID NO: 11139 - DNA, 25 bp, Homo sapien
gtcagagactatgcaatgggctttc

SEQ ID NO: 11140 - DNA, 25 bp, Homo sapien
tgtggggaaagcacctgtcttcctt

SEQ ID NO: 11141 - DNA, 25 bp, Homo sapien
aataagccacaaagctaagtcaggg

SEQ ID NO: 11142 - DNA, 25 bp, Homo sapien
actgtcggtggctatcagcagcgct

SEQ ID NO: 11143 - DNA, 25 bp, Homo sapien
tttaagccggaactcaacctctatc

SEQ ID NO: 11144 - DNA, 25 bp, Homo sapien
atgaacactaacgtctaagaatatc

SEQ ID NO: 11145 - DNA, 25 bp, Homo sapien
ccaggtgactggtcagacctcaatc

SEQ ID NO: 11146 - DNA, 25 bp, Homo sapien
aggcaggatttgaaatcggttttta

SEQ ID NO: 11147 - DNA, 25 bp, Homo sapien
ttccaggacctcctgagcaggttcc

SEQ ID NO: 11148 - DNA, 25 bp, Homo sapien
ttcttgaggagtcaggcatccctta

SEQ ID NO: 11149 - DNA, 25 bp, Homo sapien
aaatggtacagacttcttgaggagt

SEQ ID NO: 11150 - DNA, 25 bp, Homo sapien
ttaaaaagtttcgagcaccacagtc

SEQ ID NO: 11151 - DNA, 25 bp, Homo sapien
acagtctagggctttagggctttat

SEQ ID NO: 11152 - DNA, 25 bp, Homo sapien
atttaataaagacaggcgatgagag

SEQ ID NO: 11153 - DNA, 25 bp, Homo sapien
tcaggcctctcaacttctgggaagt

SEQ ID NO: 11154 - DNA, 25 bp, Homo sapien
ttcaactagagctcattcaaatggt

SEQ ID NO: 11155 - DNA, 25 bp, Homo sapien
caaggtaggtgggtgcttgaatcca

SEQ ID NO: 11156 - DNA, 25 bp, Homo sapien
tttcgagcaccacagtctagggctt

SEQ ID NO: 11157 - DNA, 25 bp, Homo sapien
tctggtcatctgcacgagctctcat

SEQ ID NO: 11158 - DNA, 25 bp, Homo sapien
ttatgaagtctcattatgagcaccc

SEQ ID NO: 11159 - DNA, 25 bp, Homo sapien
atttgctttaggttacttgatttcc

SEQ ID NO: 11160 - DNA, 25 bp, Homo sapien
aaatgagctgcccaaacagcttccc

SEQ ID NO: 11161 - DNA, 25 bp, Homo sapien
atgagcaccctacatttatacttgt

SEQ ID NO: 11162 - DNA, 25 bp, Homo sapien
tgttattcttgagccagttatttct

SEQ ID NO: 11163 - DNA, 25 bp, Homo sapien
tcatgccgccgttcagacctccctg

SEQ ID NO: 11164 - DNA, 25 bp, Homo sapien
aaaggcacccttctatcacgttatg

SEQ ID NO: 11165 - DNA, 25 bp, Homo sapien
ggaaaacagaaatgagctgcccaaa

SEQ ID NO: 11166 - DNA, 25 bp, Homo sapien
ctgctccatgtagaaatcagaagaa

SEQ ID NO: 11167 - DNA, 25 bp, Homo sapien
ccattttaagtcagcagcctggagg

SEQ ID NO: 11168 - DNA, 25 bp, Homo sapien
gccacacctggacgtaaaacaagtc

SEQ ID NO: 11169 - DNA, 25 bp, Homo sapien
ataaaaattataaagccagtgccta

SEQ ID NO: 11170 - DNA, 25 bp, Homo sapien
gagagagaccctgacactaaacaaa

SEQ ID NO: 11171 - DNA, 25 bp, Homo sapien
aagtccaaaatgagtgttactacac

SEQ ID NO: 11172 - DNA, 25 bp, Homo sapien
agggaggatcacttgtaagagccca

SEQ ID NO: 11173 - DNA, 25 bp, Homo sapien
tagctaggtgtgatgactcatgcct

SEQ ID NO: 11174 - DNA, 25 bp, Homo sapien
gtgttactacaccaaaatcaaattg

SEQ ID NO: 11175 - DNA, 25 bp, Homo sapien
gtctcaaaaattttctagctaggtg

SEQ ID NO: 11176 - DNA, 25 bp, Homo sapien
tataaagccagtgcctatagtccta

SEQ ID NO: 11177 - DNA, 25 bp, Homo sapien
acctggacgtaaaacaagtctcaaa

SEQ ID NO: 11178 - DNA, 25 bp, Homo sapien
ggtgtgatgactcatgcctagaatc

SEQ ID NO: 11179 - DNA, 25 bp, Homo sapien
cccgctgtgtcagggagcaggatct

SEQ ID NO: 11180 - DNA, 25 bp, Homo sapien
tgctgaagctccttaggttccaatc

SEQ ID NO: 11181 - DNA, 25 bp, Homo sapien
tgcccaacaagacgctgaggccaca

SEQ ID NO: 11182 - DNA, 25 bp, Homo sapien
tttcgtcacaaacgtgtagcccttc

SEQ ID NO: 11183 - DNA, 25 bp, Homo sapien
atttgagtagaagatgaggtctcac

SEQ ID NO: 11184 - DNA, 25 bp, Homo sapien
tgtgacacaggctggctcttagccc

SEQ ID NO: 11185 - DNA, 25 bp, Homo sapien
tgacagcttggatttggtctacaat

SEQ ID NO: 11186 - DNA, 25 bp, Homo sapien
agtgcttcatgagcatatctgggct

SEQ ID NO: 11187 - DNA, 25 bp, Homo sapien
tctccagtgagggtcagccaggcat

SEQ ID NO: 11188 - DNA, 25 bp, Homo sapien
gccaggcatgttaattcacaggtgt

SEQ ID NO: 11189 - DNA, 25 bp, Homo sapien
gcaggagaaacccacagtgcttcat

SEQ ID NO: 11190 - DNA, 25 bp, Homo sapien
agatgagcagacgagtatgggccct

SEQ ID NO: 11191 - DNA, 25 bp, Homo sapien
taatgtccatgagcagggacaaatc

SEQ ID NO: 11192 - DNA, 25 bp, Homo sapien
agctggacctgcagtccaagactcc

SEQ ID NO: 11193 - DNA, 25 bp, Homo sapien
tggtgttccataaacacagagactg

SEQ ID NO: 11194 - DNA, 25 bp, Homo sapien
cagtccaagactccttggggatgag

SEQ ID NO: 11195 - DNA, 25 bp, Homo sapien
tgatttgggaagcaggcctcactca

SEQ ID NO: 11196 - DNA, 25 bp, Homo sapien
tgtgattccgcttaatcctgctgtc

SEQ ID NO: 11197 - DNA, 25 bp, Homo sapien
cctctgcagagctggacctgcagtc

SEQ ID NO: 11198 - DNA, 25 bp, Homo sapien
taagaatgtgcctgatttgggaagc

SEQ ID NO: 11199 - DNA, 25 bp, Homo sapien
atgagcagggacaaatcttagtctc

SEQ ID NO: 11200 - DNA, 25 bp, Homo sapien
ttagtctcataagaatgtgcctgat

SEQ ID NO: 11201 - DNA, 25 bp, Homo sapien
agagcgacggaaaaaaggcaagcct

SEQ ID NO: 11202 - DNA, 25 bp, Homo sapien
aaactcattctggaaaatacctttc

SEQ ID NO: 11203 - DNA, 25 bp, Homo sapien
tacagtcccaaatgagtcaaatgcc

SEQ ID NO: 11204 - DNA, 25 bp, Homo sapien
aaacaatggacttgtcatgtgatat

SEQ ID NO: 11205 - DNA, 25 bp, Homo sapien
agttactataaaaagtggtggtctg

SEQ ID NO: 11206 - DNA, 25 bp, Homo sapien
gtattacagaaaacatcactatcca

SEQ ID NO: 11207 - DNA, 25 bp, Homo sapien
taatcctgctcagagcgacggaaaa

SEQ ID NO: 11208 - DNA, 25 bp, Homo sapien
aggcaagccttttcaaacataactc

SEQ ID NO: 11209 - DNA, 25 bp, Homo sapien
aactctctctacaagccagctatta

SEQ ID NO: 11210 - DNA, 25 bp, Homo sapien
agccagctattatggcaagggaaaa

SEQ ID NO: 11211 - DNA, 25 bp, Homo sapien
ttgggccctaacataatcctgctca

SEQ ID NO: 11212 - DNA, 25 bp, Homo sapien
gacagaggtaatcaacaagttcaac

SEQ ID NO: 11213 - DNA, 25 bp, Homo sapien
aattctagctggagcaattaggcaa

SEQ ID NO: 11214 - DNA, 25 bp, Homo sapien
ggtgacagactgaaagctctcctcc

SEQ ID NO: 11215 - DNA, 25 bp, Homo sapien
aaactaccagaacataataaaagcc

SEQ ID NO: 11216 - DNA, 25 bp, Homo sapien
caagttcaacaaagtagcatgatac

SEQ ID NO: 11217 - DNA, 25 bp, Homo sapien
atatgaaacatgtaccgctgacatc

SEQ ID NO: 11218 - DNA, 25 bp, Homo sapien
ctccaagatcaggaacgagatcaga

SEQ ID NO: 11219 - DNA, 25 bp, Homo sapien
ttcacattggaaaggacaaagtatc

SEQ ID NO: 11220 - DNA, 25 bp, Homo sapien
ctcaatggtgacagactgaaagctc

SEQ ID NO: 11221 - DNA, 25 bp, Homo sapien
aaaattagcaacagtaggaaactac

SEQ ID NO: 11222 - DNA, 25 bp, Homo sapien
acgagatcagaatgcaggtttttgc

SEQ ID NO: 11223 - DNA, 25 bp, Homo sapien
catttttgcaaggatggcagcatca

SEQ ID NO: 11224 - DNA, 25 bp, Homo sapien
acagcagagaacatgttaaatttcc

SEQ ID NO: 11225 - DNA, 25 bp, Homo sapien
agttcaattgcttctccaggccttc

SEQ ID NO: 11226 - DNA, 25 bp, Homo sapien
tagattctggcaccggctctgtcat

SEQ ID NO: 11227 - DNA, 25 bp, Homo sapien
gaacacttttgtactcaccagctgg

SEQ ID NO: 11228 - DNA, 25 bp, Homo sapien
ttaccatgctgtctaagataaaaca

SEQ ID NO: 11229 - DNA, 25 bp, Homo sapien
ttatacagcaaccagagtcccaagg

SEQ ID NO: 11230 - DNA, 25 bp, Homo sapien
gaagacaggaaatataggagcttac

SEQ ID NO: 11231 - DNA, 25 bp, Homo sapien
agagtcccaaggtttagattctggc

SEQ ID NO: 11232 - DNA, 25 bp, Homo sapien
atataggagcttacatttagagagt

SEQ ID NO: 11233 - DNA, 25 bp, Homo sapien
atcatctctgtgtaggggagaagaa

SEQ ID NO: 11234 - DNA, 25 bp, Homo sapien
ctttttgtggcttaaggagtctttc

SEQ ID NO: 11235 - DNA, 25 bp, Homo sapien
cctattaggttgttttctcattgat

SEQ ID NO: 11236 - DNA, 25 bp, Homo sapien
atttatcagagttcttcatgtagtc

SEQ ID NO: 11237 - DNA, 25 bp, Homo sapien
catgaaatgcctatgcatgtttttt

SEQ ID NO: 11238 - DNA, 25 bp, Homo sapien
cttctcccagtttgtagtttagatt

SEQ ID NO: 11239 - DNA, 25 bp, Homo sapien
tgtggcttaaggagtctttcactac

SEQ ID NO: 11240 - DNA, 25 bp, Homo sapien
tcccagtttgtagtttagatttcac

SEQ ID NO: 11241 - DNA, 25 bp, Homo sapien
tggcttaaggagtctttcactaccc

SEQ ID NO: 11242 - DNA, 25 bp, Homo sapien
agagttcttcatgtagtcttgagac

SEQ ID NO: 11243 - DNA, 25 bp, Homo sapien
cactttcttaaggtttatggattta

SEQ ID NO: 11244 - DNA, 25 bp, Homo sapien
ggtcaagtatgttcatcatttcttt

SEQ ID NO: 11245 - DNA, 25 bp, Homo sapien
aatttagtcctgaccaaacaaacat

SEQ ID NO: 11246 - DNA, 25 bp, Homo sapien
cctgagagtgaccaaccattataat

SEQ ID NO: 11247 - DNA, 25 bp, Homo sapien
tgtgattagcattgcactaagtacc

SEQ ID NO: 11248 - DNA, 25 bp, Homo sapien
aatccctgagttaggatgatcagag

SEQ ID NO: 11249 - DNA, 25 bp, Homo sapien
tacgtacagatagcattagactttc

SEQ ID NO: 11250 - DNA, 25 bp, Homo sapien
tcttccctgagagtgaccaaccatt

SEQ ID NO: 11251 - DNA, 25 bp, Homo sapien
atagcctaaatcgttaatccctgag

SEQ ID NO: 11252 - DNA, 25 bp, Homo sapien
gatcagagctgataacatcttccct

SEQ ID NO: 11253 - DNA, 25 bp, Homo sapien
gcactaagtaccaattaggtggcat

SEQ ID NO: 11254 - DNA, 25 bp, Homo sapien
aaattacgtacagatagcattagac

SEQ ID NO: 11255 - DNA, 25 bp, Homo sapien
atatagatttgttccaggtggctgc

SEQ ID NO: 11256 - DNA, 25 bp, Homo sapien
ttaaccacttaactcaaggctagaa

SEQ ID NO: 11257 - DNA, 25 bp, Homo sapien
caattagtgattgcaagagaaatcc

SEQ ID NO: 11258 - DNA, 25 bp, Homo sapien
tgattgcaagagaaatccaccggca

SEQ ID NO: 11259 - DNA, 25 bp, Homo sapien
agcacattgtcctcgtaatccagaa

SEQ ID NO: 11260 - DNA, 25 bp, Homo sapien
actcaaggctagaaataaaagcaat

SEQ ID NO: 11261 - DNA, 25 bp, Homo sapien
tgacggttcctaaccagtcgctgtt

SEQ ID NO: 11262 - DNA, 25 bp, Homo sapien
agtcgctgttatcactgagcacatt

SEQ ID NO: 11263 - DNA, 25 bp, Homo sapien
cagcactttgtgacggttcctaacc

SEQ ID NO: 11264 - DNA, 25 bp, Homo sapien
cgtaatccagaattcatactgccat

SEQ ID NO: 11265 - DNA, 25 bp, Homo sapien
aagagaaatccaccggcagaaggca

SEQ ID NO: 11266 - DNA, 25 bp, Homo sapien
gaggcagtagacagcactttgtgac

SEQ ID NO: 11267 - DNA, 25 bp, Homo sapien
caacaagcttgacacgtgcaaattc

SEQ ID NO: 11268 - DNA, 25 bp, Homo sapien
tccctatcatgaatggtcccgtgac

SEQ ID NO: 11269 - DNA, 25 bp, Homo sapien
taagtgactcaaaagcacaacaagc

SEQ ID NO: 11270 - DNA, 25 bp, Homo sapien
gataggtccgcaaacaaatgtctct

SEQ ID NO: 11271 - DNA, 25 bp, Homo sapien
actcaaagtctgagaatgactgtcc

SEQ ID NO: 11272 - DNA, 25 bp, Homo sapien
agtgtaatgacatgactcaggtctc

SEQ ID NO: 11273 - DNA, 25 bp, Homo sapien
tgcaagtggacatctagaggttatt

SEQ ID NO: 11274 - DNA, 25 bp, Homo sapien
gtcccgtgacctaccagctatgcaa

SEQ ID NO: 11275 - DNA, 25 bp, Homo sapien
agtgtaaaggggtcttgaaactcaa

SEQ ID NO: 11276 - DNA, 25 bp, Homo sapien
agtctagacttgtagataggtccgc

SEQ ID NO: 11277 - DNA, 25 bp, Homo sapien
taaacagaagctctttgaggtcctt

SEQ ID NO: 11278 - DNA, 25 bp, Homo sapien
tgatgacatgactacgattggtgag

SEQ ID NO: 11279 - DNA, 25 bp, Homo sapien
acccaaccaatgaggtacagggttg

SEQ ID NO: 11280 - DNA, 25 bp, Homo sapien
gaagatacttgctacctaaaatggg

SEQ ID NO: 11281 - DNA, 25 bp, Homo sapien
agccacgtggaacagtcacatcatc

SEQ ID NO: 11282 - DNA, 25 bp, Homo sapien
ctaaaatgggtaaatcaaagacatc

SEQ ID NO: 11283 - DNA, 25 bp, Homo sapien
accaggagctgaggaaattggccaa

SEQ ID NO: 11284 - DNA, 25 bp, Homo sapien
catgaccacagaacaccaggagctg

SEQ ID NO: 11285 - DNA, 25 bp, Homo sapien
aattggccaagctgagccacgtgga

SEQ ID NO: 11286 - DNA, 25 bp, Homo sapien
gactatggagctttactgctgcttt

SEQ ID NO: 11287 - DNA, 25 bp, Homo sapien
aggagtatggcaggctttcactatc

SEQ ID NO: 11288 - DNA, 25 bp, Homo sapien
cagggttggggattcttcttagtta

SEQ ID NO: 11289 - DNA, 25 bp, Homo sapien
gtgtccgagccattggtgatacgaa

SEQ ID NO: 11290 - DNA, 25 bp, Homo sapien
tcgcctcacaaaaatgtgactctgc

SEQ ID NO: 11291 - DNA, 25 bp, Homo sapien
gtgactctgcacttcaaatagatga

SEQ ID NO: 11292 - DNA, 25 bp, Homo sapien
ccctgaagctgcgagttcagagtca

SEQ ID NO: 11293 - DNA, 25 bp, Homo sapien
gtggcgcccgcgtgtccgagccatt

SEQ ID NO: 11294 - DNA, 25 bp, Homo sapien
ccattagttcattcgcctcacaaaa

SEQ ID NO: 11295 - DNA, 25 bp, Homo sapien
gtttccctgaagctgcgagttcaga

SEQ ID NO: 11296 - DNA, 25 bp, Homo sapien
aaaggaagaacaacgacaagggcaa

SEQ ID NO: 11297 - DNA, 25 bp, Homo sapien
gtgtcctcgcacctcagcgagggtc

SEQ ID NO: 11298 - DNA, 25 bp, Homo sapien
acactgggttcgagttccctctctg

SEQ ID NO: 11299 - DNA, 25 bp, Homo sapien
tcacgggcgtctgacacactgggtt

SEQ ID NO: 11300 - DNA, 25 bp, Homo sapien
tgagtgcctggtcaacacgtcaatc

SEQ ID NO: 11301 - DNA, 25 bp, Homo sapien
aggcacgcaccaccttgtatggctc

SEQ ID NO: 11302 - DNA, 25 bp, Homo sapien
tgcggttggggctccacttgccaca

SEQ ID NO: 11303 - DNA, 25 bp, Homo sapien
gtctatggtccctggcagacgccaa

SEQ ID NO: 11304 - DNA, 25 bp, Homo sapien
gtcacaagcgtagatgagtatctgt

SEQ ID NO: 11305 - DNA, 25 bp, Homo sapien
ggactataggcaccagcctgtgata

SEQ ID NO: 11306 - DNA, 25 bp, Homo sapien
taactcttggaatagcccaggaatc

SEQ ID NO: 11307 - DNA, 25 bp, Homo sapien
atgagtatctgtggtctatggtccc

SEQ ID NO: 11308 - DNA, 25 bp, Homo sapien
ccagggtggggattcagtaactctt

SEQ ID NO: 11309 - DNA, 25 bp, Homo sapien
acgtcaatcacagtcatcatggctc

SEQ ID NO: 11310 - DNA, 25 bp, Homo sapien
agagtctcgttatactgcccaggct

SEQ ID NO: 11311 - DNA, 25 bp, Homo sapien
ttgttaggtaaaacgatattcatcc

SEQ ID NO: 11312 - DNA, 25 bp, Homo sapien
cattaataagggaattgttaggtaa

SEQ ID NO: 11313 - DNA, 25 bp, Homo sapien
cacactcagttacaggcacaaaaat

SEQ ID NO: 11314 - DNA, 25 bp, Homo sapien
cagttacaggcacaaaaatattcac

SEQ ID NO: 11315 - DNA, 25 bp, Homo sapien
aatactcattaataagggaattgtt

SEQ ID NO: 11316 - DNA, 25 bp, Homo sapien
aatgcacactcagttacaggcacaa

SEQ ID NO: 11317 - DNA, 25 bp, Homo sapien
attcatccacaaggtagaacaccat

SEQ ID NO: 11318 - DNA, 25 bp, Homo sapien
atatataataaacaaaacgcctagg

SEQ ID NO: 11319 - DNA, 25 bp, Homo sapien
caccatgcagctaacaaaaatgttt

SEQ ID NO: 11320 - DNA, 25 bp, Homo sapien
aacgcctaggttataatattaagta

SEQ ID NO: 11321 - DNA, 25 bp, Homo sapien
gtgctttcatctatggaaaaaatgc

SEQ ID NO: 11322 - DNA, 25 bp, Homo sapien
cccgaagtggaaagaattcaaattc

SEQ ID NO: 11323 - DNA, 25 bp, Homo sapien
aacatggatggatctaacaggtatg

SEQ ID NO: 11324 - DNA, 25 bp, Homo sapien
aagcagtaaggtaacggtaccttga

SEQ ID NO: 11325 - DNA, 25 bp, Homo sapien
tattaacaaaacagctacagacatt

SEQ ID NO: 11326 - DNA, 25 bp, Homo sapien
ttgctgggtcatagtgtatacactt

SEQ ID NO: 11327 - DNA, 25 bp, Homo sapien
agaatccaaattgctcaccagagtt

SEQ ID NO: 11328 - DNA, 25 bp, Homo sapien
ataggagaatgcagaaataaattat

SEQ ID NO: 11329 - DNA, 25 bp, Homo sapien
agcaatacaaaggaacaaactactc

SEQ ID NO: 11330 - DNA, 25 bp, Homo sapien
cctccatgcgggtggtggttacctc

SEQ ID NO: 11331 - DNA, 25 bp, Homo sapien
aagtctagaacaggttaaacgaatc

SEQ ID NO: 11332 - DNA, 25 bp, Homo sapien
gggttctggagagattctatgcctc

SEQ ID NO: 11333 - DNA, 25 bp, Homo sapien
ttaaacaagcaaaagtaagccactc

SEQ ID NO: 11334 - DNA, 25 bp, Homo sapien
ggcattgcactgaaatgtgtgggtt

SEQ ID NO: 11335 - DNA, 25 bp, Homo sapien
aagccaaatggtgggagcattgaat

SEQ ID NO: 11336 - DNA, 25 bp, Homo sapien
ataagatatgaagagcatgtctggg

SEQ ID NO: 11337 - DNA, 25 bp, Homo sapien
ataatgccagtattagtgcaggaac

SEQ ID NO: 11338 - DNA, 25 bp, Homo sapien
ggtggctatagcatagagtaaggaa

SEQ ID NO: 11339 - DNA, 25 bp, Homo sapien
atgtaatcagcttggcttggcacat

SEQ ID NO: 11340 - DNA, 25 bp, Homo sapien
aggatttatctggaacaggggcaca

SEQ ID NO: 11341 - DNA, 25 bp, Homo sapien
cttggcacatggtagaagtaatctg

SEQ ID NO: 11342 - DNA, 25 bp, Homo sapien
ttgaatgacagagcagagtttagat

SEQ ID NO: 11343 - DNA, 25 bp, Homo sapien
caggggcacagtgataagatatgaa

SEQ ID NO: 11344 - DNA, 25 bp, Homo sapien
tcctgtgttgcacaaagcaggtggt

SEQ ID NO: 11345 - DNA, 25 bp, Homo sapien
ctgtattgctgaggatggtcttgaa

SEQ ID NO: 11346 - DNA, 25 bp, Homo sapien
agagttgtctctggcctgcagttct

SEQ ID NO: 11347 - DNA, 25 bp, Homo sapien
gcgcctggaagcacacacctgtttc

SEQ ID NO: 11348 - DNA, 25 bp, Homo sapien
atgcaactgactgtttctgccacac

SEQ ID NO: 11349 - DNA, 25 bp, Homo sapien
aatagtgagtttgtgagtagaaggt

SEQ ID NO: 11350 - DNA, 25 bp, Homo sapien
ccacctgttggtgagagatgcaact

SEQ ID NO: 11351 - DNA, 25 bp, Homo sapien
agaggctaggggttccaaacacaaa

SEQ ID NO: 11352 - DNA, 25 bp, Homo sapien
ggtggtgcactgtcaatagtgagtt

SEQ ID NO: 11353 - DNA, 25 bp, Homo sapien
ctttaggtagcttggtactttgccc

SEQ ID NO: 11354 - DNA, 25 bp, Homo sapien
tcacacagttggtgtctgtgcgcct

SEQ ID NO: 11355 - DNA, 25 bp, Homo sapien
catgcattttggcaggatggtcaga

SEQ ID NO: 11356 - DNA, 25 bp, Homo sapien
tctaagaggtcagatccatggatta

SEQ ID NO: 11357 - DNA, 25 bp, Homo sapien
tcagctgtatcccaggatggcatca

SEQ ID NO: 11358 - DNA, 25 bp, Homo sapien
atggtcagaggcaggaatgactcat

SEQ ID NO: 11359 - DNA, 25 bp, Homo sapien
aagaatgcaggcttactcagctgta

SEQ ID NO: 11360 - DNA, 25 bp, Homo sapien
ctggatttgaaaacaggtggcctca

SEQ ID NO: 11361 - DNA, 25 bp, Homo sapien
tgtggggagcttaagcaattagccc

SEQ ID NO: 11362 - DNA, 25 bp, Homo sapien
ccatggattatgtgtaggaggatat

SEQ ID NO: 11363 - DNA, 25 bp, Homo sapien
gtgtaggaggatatatcaagaagtc

SEQ ID NO: 11364 - DNA, 25 bp, Homo sapien
aatgtgagatcaagagcacttacct

SEQ ID NO: 11365 - DNA, 25 bp, Homo sapien
ctcatggtctgagaaatgtgctttt

SEQ ID NO: 11366 - DNA, 25 bp, Homo sapien
tgccataaacatatcatgcccaaaa

SEQ ID NO: 11367 - DNA, 25 bp, Homo sapien
catggtaagctctcagtaagttttg

SEQ ID NO: 11368 - DNA, 25 bp, Homo sapien
atgaacccatcacaatgccataaac

SEQ ID NO: 11369 - DNA, 25 bp, Homo sapien
atcatgcccaaaatttcctctcagc

SEQ ID NO: 11370 - DNA, 25 bp, Homo sapien
aagcactatgttgtatggtagcatc

SEQ ID NO: 11371 - DNA, 25 bp, Homo sapien
tgtatggtagcatcaatcacagtgc

SEQ ID NO: 11372 - DNA, 25 bp, Homo sapien
gagataagtatccacccatgaaccc

SEQ ID NO: 11373 - DNA, 25 bp, Homo sapien
cagcctctattgttttgtgatttaa

SEQ ID NO: 11374 - DNA, 25 bp, Homo sapien
tataagcactatgttgtatggtagc

SEQ ID NO: 11375 - DNA, 25 bp, Homo sapien
acagtgcctgatacatggtaagctc

SEQ ID NO: 11376 - DNA, 25 bp, Homo sapien
caatcacagtgcctgatacatggta

SEQ ID NO: 11377 - DNA, 25 bp, Homo sapien
aaacacaagttatgattgagtaatg

SEQ ID NO: 11378 - DNA, 25 bp, Homo sapien
atagagtatttcacactaataagaa

SEQ ID NO: 11379 - DNA, 25 bp, Homo sapien
agaaaatcaagacctaggttttaca

SEQ ID NO: 11380 - DNA, 25 bp, Homo sapien
cacacactatatggcagtatactgc

SEQ ID NO: 11381 - DNA, 25 bp, Homo sapien
aacaagattttgcagtagaaaatag

SEQ ID NO: 11382 - DNA, 25 bp, Homo sapien
cattagaaaatagctggccaggcag

SEQ ID NO: 11383 - DNA, 25 bp, Homo sapien
tttcattagaaaatagctggccagg

SEQ ID NO: 11384 - DNA, 25 bp, Homo sapien
aaaattcagaatagccttaggcatt

SEQ ID NO: 11385 - DNA, 25 bp, Homo sapien
acaaaaattcagaatagccttaggc

SEQ ID NO: 11386 - DNA, 25 bp, Homo sapien
aatcaagacctaggttttacacaca

SEQ ID NO: 11387 - DNA, 25 bp, Homo sapien
cttaggcattataggttaaacacaa

SEQ ID NO: 11388 - DNA, 25 bp, Homo sapien
acgtggcccatttttcatccagtca

SEQ ID NO: 11389 - DNA, 25 bp, Homo sapien
gatttcctcacatccgcaggggcgg

SEQ ID NO: 11390 - DNA, 25 bp, Homo sapien
cttcaaagcgattttaacgagagga

SEQ ID NO: 11391 - DNA, 25 bp, Homo sapien
cccagggcccatttcaagaatttct

SEQ ID NO: 11392 - DNA, 25 bp, Homo sapien
aaagcgattttaacgagaggaggta

SEQ ID NO: 11393 - DNA, 25 bp, Homo sapien
aacttgacttctgccttcaaagcga

SEQ ID NO: 11394 - DNA, 25 bp, Homo sapien
attttaacgagaggaggtagactgt

SEQ ID NO: 11395 - DNA, 25 bp, Homo sapien
cttgaacacttttgctgatgaactt

SEQ ID NO: 11396 - DNA, 25 bp, Homo sapien
ccctggatatgctccagctgcccag

SEQ ID NO: 11397 - DNA, 25 bp, Homo sapien
ggaggtagactgtgagcctttgtct

SEQ ID NO: 11398 - DNA, 25 bp, Homo sapien
tttgctgatgaacttgacttctgcc

SEQ ID NO: 11399 - DNA, 25 bp, Homo sapien
taacgcatagctcctcatgaatact

SEQ ID NO: 11400 - DNA, 25 bp, Homo sapien
atggttaggcagatcgctgtctcat

SEQ ID NO: 11401 - DNA, 25 bp, Homo sapien
ataaaggacactgatccactgatcc

SEQ ID NO: 11402 - DNA, 25 bp, Homo sapien
ttggtgaaacggctgctatgtatcc

SEQ ID NO: 11403 - DNA, 25 bp, Homo sapien
acctccaggaatagagaagggatgt

SEQ ID NO: 11404 - DNA, 25 bp, Homo sapien
tgcttctaggaggagtgaatggtta

SEQ ID NO: 11405 - DNA, 25 bp, Homo sapien
ttttctgcacaataaaggacactga

SEQ ID NO: 11406 - DNA, 25 bp, Homo sapien
aagaccggctgtgcctcaatgatca

SEQ ID NO: 11407 - DNA, 25 bp, Homo sapien
caatgatcacggtagcttttgcttc

SEQ ID NO: 11408 - DNA, 25 bp, Homo sapien
ctttgaggatatatgaagaccggct

SEQ ID NO: 11409 - DNA, 25 bp, Homo sapien
ttctggacctggacaaatggactga

SEQ ID NO: 11410 - DNA, 25 bp, Homo sapien
tttgtcaagtggaccagcctccatg

SEQ ID NO: 11411 - DNA, 25 bp, Homo sapien
aaagaaactcaaagccacaagacct

SEQ ID NO: 11412 - DNA, 25 bp, Homo sapien
aagccacaagaccttggaagctttg

SEQ ID NO: 11413 - DNA, 25 bp, Homo sapien
cagctgggctagcagctttacggaa

SEQ ID NO: 11414 - DNA, 25 bp, Homo sapien
aagagtccaagaagtgtttcaccag

SEQ ID NO: 11415 - DNA, 25 bp, Homo sapien
tggaagctttgtcaagtggaccagc

SEQ ID NO: 11416 - DNA, 25 bp, Homo sapien
gaaactcagctggtcaaagaaactc

SEQ ID NO: 11417 - DNA, 25 bp, Homo sapien
cagctttacggaagccttggatggt

SEQ ID NO: 11418 - DNA, 25 bp, Homo sapien
tgcagtctggacaccgagatggtag

SEQ ID NO: 11419 - DNA, 25 bp, Homo sapien
caccaggttgtgcagtctggacacc

SEQ ID NO: 11420 - DNA, 25 bp, Homo sapien
agcctccatggaccacggaatacct

SEQ ID NO: 11421 - DNA, 25 bp, Homo sapien
caaagggaattccttacacaacgaa

SEQ ID NO: 11422 - DNA, 25 bp, Homo sapien
aagggaattccttacacaacgaaca

SEQ ID NO: 11423 - DNA, 25 bp, Homo sapien
ggaattccttacacaacgaacagtg

SEQ ID NO: 11424 - DNA, 25 bp, Homo sapien
gcaaagggaattccttacacaacga

SEQ ID NO: 11425 - DNA, 25 bp, Homo sapien
tacaaaagcaggaccatcactaggc

SEQ ID NO: 11426 - DNA, 25 bp, Homo sapien
ttttcaccataatttgcatgatcag

SEQ ID NO: 11427 - DNA, 25 bp, Homo sapien
tgcaaagggaattccttacacaacg

SEQ ID NO: 11428 - DNA, 25 bp, Homo sapien
attccttacacaacgaacagtgtag

SEQ ID NO: 11429 - DNA, 25 bp, Homo sapien
agggaattccttacacaacgaacag

SEQ ID NO: 11430 - DNA, 25 bp, Homo sapien
tttcaccataatttgcatgatcagc

SEQ ID NO: 11431 - DNA, 25 bp, Homo sapien
ttccttacacaacgaacagtgtaga

SEQ ID NO: 11432 - DNA, 25 bp, Homo sapien
gactttgccatacaaaagcaggacc

SEQ ID NO: 11433 - DNA, 25 bp, Homo sapien
ggcccttccatcaacaaatctgtag

SEQ ID NO: 11434 - DNA, 25 bp, Homo sapien
acatggtctttgcaaagggaattcc

SEQ ID NO: 11435 - DNA, 25 bp, Homo sapien
gaacagtgtagaaaagaatacttgc

SEQ ID NO: 11436 - DNA, 25 bp, Homo sapien
atctaggcaagaattgggatacatg

SEQ ID NO: 11437 - DNA, 25 bp, Homo sapien
tgggatacatggtctttgcaaaggg

SEQ ID NO: 11438 - DNA, 25 bp, Homo sapien
tcatcgcatcttggctttggcattt

SEQ ID NO: 11439 - DNA, 25 bp, Homo sapien
ttttgcaggaatagtactagctttc

SEQ ID NO: 11440 - DNA, 25 bp, Homo sapien
gtctacaataaaaataggtcctggc

SEQ ID NO: 11441 - DNA, 25 bp, Homo sapien
gctcataatctaggcaagaattggg

SEQ ID NO: 11442 - DNA, 25 bp, Homo sapien
cagggcaactggctatatttactat

SEQ ID NO: 11443 - DNA, 25 bp, Homo sapien
ttggaaaattcacacgagcacgtga

SEQ ID NO: 11444 - DNA, 25 bp, Homo sapien
aggccaaacaaatatcaccctggga

SEQ ID NO: 11445 - DNA, 25 bp, Homo sapien
tcaccctgggaattcattctagaat

SEQ ID NO: 11446 - DNA, 25 bp, Homo sapien
acgtgactgcatgcttgccaggagt

SEQ ID NO: 11447 - DNA, 25 bp, Homo sapien
ctagaaagaccagtaatatgtgtgt

SEQ ID NO: 11448 - DNA, 25 bp, Homo sapien
tgaaagaacaataagtatgaatggt

SEQ ID NO: 11449 - DNA, 25 bp, Homo sapien
atcaagtttctagaaagaccagtaa

SEQ ID NO: 11450 - DNA, 25 bp, Homo sapien
tggaggtagacaaaggaacttttga

SEQ ID NO: 11451 - DNA, 25 bp, Homo sapien
gggactggagagctttcagtacatt

SEQ ID NO: 11452 - DNA, 25 bp, Homo sapien
aaatgctcatgattttggaaaattc

SEQ ID NO: 11453 - DNA, 25 bp, Homo sapien
cttaaagtcaaatgtagttaagggc

SEQ ID NO: 11454 - DNA, 25 bp, Homo sapien
agcatagcccagagataaatagatc

SEQ ID NO: 11455 - DNA, 25 bp, Homo sapien
aaataaattcacatggttgagccat

SEQ ID NO: 11456 - DNA, 25 bp, Homo sapien
taaattagaagtcacagcatagccc

SEQ ID NO: 11457 - DNA, 25 bp, Homo sapien
ttgagatactcagaacatactacac

SEQ ID NO: 11458 - DNA, 25 bp, Homo sapien
agatgaaaccatacttgagatactc

SEQ ID NO: 11459 - DNA, 25 bp, Homo sapien
gcgcctggccgatcttttgagtttc

SEQ ID NO: 11460 - DNA, 25 bp, Homo sapien
aacagattatagactggagctaagc

SEQ ID NO: 11461 - DNA, 25 bp, Homo sapien
atcaggtacccagataacaggcaac

SEQ ID NO: 11462 - DNA, 25 bp, Homo sapien
ccagagataaatagatcaggtaccc

SEQ ID NO: 11463 - DNA, 25 bp, Homo sapien
aacaggcaaccaaaataaattcaca

SEQ ID NO: 11464 - DNA, 25 bp, Homo sapien
aacaccatagtgttagggcattctt

SEQ ID NO: 11465 - DNA, 25 bp, Homo sapien
catgattcatgtggtagagcaagct

SEQ ID NO: 11466 - DNA, 25 bp, Homo sapien
ggcataacagatagtaagcctaaaa

SEQ ID NO: 11467 - DNA, 25 bp, Homo sapien
gtagagcaagctcgcctgacacctt

SEQ ID NO: 11468 - DNA, 25 bp, Homo sapien
ccagagatactcagagttcaagagc

SEQ ID NO: 11469 - DNA, 25 bp, Homo sapien
gacccaagaccggacgtagtctgtg

SEQ ID NO: 11470 - DNA, 25 bp, Homo sapien
catggtgcagagtggcttgtcagac

SEQ ID NO: 11471 - DNA, 25 bp, Homo sapien
tagagacaggcttcaaagactattt

SEQ ID NO: 11472 - DNA, 25 bp, Homo sapien
aagagcaatgcagcctccctgtttt

SEQ ID NO: 11473 - DNA, 25 bp, Homo sapien
atgatttgtaagctgggaaaggaaa

SEQ ID NO: 11474 - DNA, 25 bp, Homo sapien
gggcctgtagatggaatgatttgta

SEQ ID NO: 11475 - DNA, 25 bp, Homo sapien
gaccctccatagaatagagacaggc

SEQ ID NO: 11476 - DNA, 25 bp, Homo sapien
atactggagtaggacagacccttaa

SEQ ID NO: 11477 - DNA, 25 bp, Homo sapien
aacctaataggaggtcatactggag

SEQ ID NO: 11478 - DNA, 25 bp, Homo sapien
agaaatcaaaagaaccctagtgcag

SEQ ID NO: 11479 - DNA, 25 bp, Homo sapien
ccctagtgcagtgttatggtttgaa

SEQ ID NO: 11480 - DNA, 25 bp, Homo sapien
tgttaaagatctaatgcccagtacc

SEQ ID NO: 11481 - DNA, 25 bp, Homo sapien
atgtattacatctgtgactgggcaa

SEQ ID NO: 11482 - DNA, 25 bp, Homo sapien
taatgcccagtaccacagaatgtga

SEQ ID NO: 11483 - DNA, 25 bp, Homo sapien
aacagggtcattgtggaaataataa

SEQ ID NO: 11484 - DNA, 25 bp, Homo sapien
ttgcactagtttctctggcagaggc

SEQ ID NO: 11485 - DNA, 25 bp, Homo sapien
agtgaaccgtggctatacagtcaac

SEQ ID NO: 11486 - DNA, 25 bp, Homo sapien
gactgggcaaggtacttacctgtcc

SEQ ID NO: 11487 - DNA, 25 bp, Homo sapien
aaagtgggtacatttgagagagaat

SEQ ID NO: 11488 - DNA, 25 bp, Homo sapien
tagagggaaagtatttcaggcaatg

SEQ ID NO: 11489 - DNA, 25 bp, Homo sapien
tatttcaggcaatgggaacagcaca

SEQ ID NO: 11490 - DNA, 25 bp, Homo sapien
cagcacgtgtgaggaactgaaaaaa

SEQ ID NO: 11491 - DNA, 25 bp, Homo sapien
gcagtgtagataataaatggagaga

SEQ ID NO: 11492 - DNA, 25 bp, Homo sapien
tacgtatggccctacctgcagtgta

SEQ ID NO: 11493 - DNA, 25 bp, Homo sapien
aaggaagatgatatggtaaggttta

SEQ ID NO: 11494 - DNA, 25 bp, Homo sapien
gtctaggtctgagcacagccagtca

SEQ ID NO: 11495 - DNA, 25 bp, Homo sapien
ttggatgagcttgtgaggcagtcta

SEQ ID NO: 11496 - DNA, 25 bp, Homo sapien
tcaaaaggatgcagatggctagtaa

SEQ ID NO: 11497 - DNA, 25 bp, Homo sapien
cagccagtcatgtaaaggattaaat

SEQ ID NO: 11498 - DNA, 25 bp, Homo sapien
taggtatgagtatagtaaaagtgtc

SEQ ID NO: 11499 - DNA, 25 bp, Homo sapien
atgaaaacacaaatgtgcatgttcc

SEQ ID NO: 11500 - DNA, 25 bp, Homo sapien
gattggtcaaatatgatggatctcc

SEQ ID NO: 11501 - DNA, 25 bp, Homo sapien
aaagttactactgcagcctcagagg

SEQ ID NO: 11502 - DNA, 25 bp, Homo sapien
acaattcccatgaaaggtggctaga

SEQ ID NO: 11503 - DNA, 25 bp, Homo sapien
gcctcagaggatgaaccaacaattc

SEQ ID NO: 11504 - DNA, 25 bp, Homo sapien
taaaacagaaaagtgattggtcaaa

SEQ ID NO: 11505 - DNA, 25 bp, Homo sapien
ggcactccatgaggggatttatgta

SEQ ID NO: 11506 - DNA, 25 bp, Homo sapien
tgatggatctccatagctactatgc

SEQ ID NO: 11507 - DNA, 25 bp, Homo sapien
ggaactctagctgagggcactccat

SEQ ID NO: 11508 - DNA, 25 bp, Homo sapien
gcaataataacctcgtatggcacag

SEQ ID NO: 11509 - DNA, 25 bp, Homo sapien
accatgtccacagatgggaagaact

SEQ ID NO: 11510 - DNA, 25 bp, Homo sapien
tatattctaaagatgttaatttccc

SEQ ID NO: 11511 - DNA, 25 bp, Homo sapien
gttcacagaactttgacaagctgat

SEQ ID NO: 11512 - DNA, 25 bp, Homo sapien
ccatgtccacagatgggaagaactt

SEQ ID NO: 11513 - DNA, 25 bp, Homo sapien
agaactttgacaagctgattataaa

SEQ ID NO: 11514 - DNA, 25 bp, Homo sapien
atgtccacagatgggaagaacttat

SEQ ID NO: 11515 - DNA, 25 bp, Homo sapien
acaccatgtccacagatgggaagaa

SEQ ID NO: 11516 - DNA, 25 bp, Homo sapien
catgtccacagatgggaagaactta

SEQ ID NO: 11517 - DNA, 25 bp, Homo sapien
ttcacagaactttgacaagctgatt

SEQ ID NO: 11518 - DNA, 25 bp, Homo sapien
caacagacattttgttcacagaact

SEQ ID NO: 11519 - DNA, 25 bp, Homo sapien
caccatgtccacagatgggaagaac

SEQ ID NO: 11520 - DNA, 25 bp, Homo sapien
acagacaccatgtccacagatggga

SEQ ID NO: 11521 - DNA, 25 bp, Homo sapien
ttcacagaactttgacaagctgatt

SEQ ID NO: 11522 - DNA, 25 bp, Homo sapien
aaccctatctgcaccaaaaaataca

SEQ ID NO: 11523 - DNA, 25 bp, Homo sapien
tgagcggagactgcaccactgaacc

SEQ ID NO: 11524 - DNA, 25 bp, Homo sapien
gtaaatgtgcaatatgaccaagaca

SEQ ID NO: 11525 - DNA, 25 bp, Homo sapien
atgtccacagatgggaagaacttat

SEQ ID NO: 11526 - DNA, 25 bp, Homo sapien
gaaaaagtaaatgtgcaatatgacc

SEQ ID NO: 11527 - DNA, 25 bp, Homo sapien
taaaaaagaataaggggctgcgcac

SEQ ID NO: 11528 - DNA, 25 bp, Homo sapien
caacagacattttgttcacagaact

SEQ ID NO: 11529 - DNA, 25 bp, Homo sapien
aaatgtgcaatatgaccaagacaat

SEQ ID NO: 11530 - DNA, 25 bp, Homo sapien
taaatgtgcaatatgaccaagacaa

SEQ ID NO: 11531 - DNA, 25 bp, Homo sapien
ataatgccagcttagtttcctgccc

SEQ ID NO: 11532 - DNA, 25 bp, Homo sapien
ttgctaacagccaaggctagctgga

SEQ ID NO: 11533 - DNA, 25 bp, Homo sapien
ttcctgtgaccataatgccagctta

SEQ ID NO: 11534 - DNA, 25 bp, Homo sapien
ggtcagtaacaaaggtctgcagttt

SEQ ID NO: 11535 - DNA, 25 bp, Homo sapien
ggctagctggaaccagtgaaagttc

SEQ ID NO: 11536 - DNA, 25 bp, Homo sapien
aaaaaagtctcatgtgggttgcgtc

SEQ ID NO: 11537 - DNA, 25 bp, Homo sapien
taagcatcggtcagtaacaaaggtc

SEQ ID NO: 11538 - DNA, 25 bp, Homo sapien
aaaataattgctaacagccaaggct

SEQ ID NO: 11539 - DNA, 25 bp, Homo sapien
aaacccagaaaccaaattaagcatc

SEQ ID NO: 11540 - DNA, 25 bp, Homo sapien
tggcagcctgccctagctgagctct

SEQ ID NO: 11541 - DNA, 25 bp, Homo sapien
tctgcagtttgaaaggctccaaatc

SEQ ID NO: 11542 - DNA, 25 bp, Homo sapien
tagcatttgctctacgcgcgcagga

SEQ ID NO: 11543 - DNA, 25 bp, Homo sapien
cagctgaaatcgctctagcatttgc

SEQ ID NO: 11544 - DNA, 25 bp, Homo sapien
taattaaataagaacccacgatatc

SEQ ID NO: 11545 - DNA, 25 bp, Homo sapien
attaggcgtaaagagttaagaatac

SEQ ID NO: 11546 - DNA, 25 bp, Homo sapien
gttaagaatacttgcacggaggctg

SEQ ID NO: 11547 - DNA, 25 bp, Homo sapien
tacgcgcgcaggagatgaaacacaa

SEQ ID NO: 11548 - DNA, 25 bp, Homo sapien
ttctatcagctgaaatcgctctagc

SEQ ID NO: 11549 - DNA, 25 bp, Homo sapien
tttcttcaccattgaaaaactgtgc

SEQ ID NO: 11550 - DNA, 25 bp, Homo sapien
acggaggctgggaacatttgcagaa

SEQ ID NO: 11551 - DNA, 25 bp, Homo sapien
gggcctgacagacgttgctacagcc

SEQ ID NO: 11552 - DNA, 25 bp, Homo sapien
actgtgcttgttcattaggcgtaaa

SEQ ID NO: 11553 - DNA, 25 bp, Homo sapien
gtttccataatgacaaaatccctgt

SEQ ID NO: 11554 - DNA, 25 bp, Homo sapien
acaagtgtgggaccatacaattgta

SEQ ID NO: 11555 - DNA, 25 bp, Homo sapien
actgcatatacaagtgtgggaccat

SEQ ID NO: 11556 - DNA, 25 bp, Homo sapien
tatttagcttaggtgtatagtaggc

SEQ ID NO: 11557 - DNA, 25 bp, Homo sapien
tatagtaggctattgcagctaggtt

SEQ ID NO: 11558 - DNA, 25 bp, Homo sapien
ttggatagtaaaagtcataagggct

SEQ ID NO: 11559 - DNA, 25 bp, Homo sapien
ttgcagctaggtttgatagatgtac

SEQ ID NO: 11560 - DNA, 25 bp, Homo sapien
cagaagactgtcaaaatggcaaata

SEQ ID NO: 11561 - DNA, 25 bp, Homo sapien
ccctgtcattcagtgaaacgtaact

SEQ ID NO: 11562 - DNA, 25 bp, Homo sapien
aagggctatacagaaatcagaagac

SEQ ID NO: 11563 - DNA, 25 bp, Homo sapien
ggtcaaagatgaactgcatatacaa

SEQ ID NO: 11564 - DNA, 25 bp, Homo sapien
atccctcagtgctctgctcagatgt

SEQ ID NO: 11565 - DNA, 25 bp, Homo sapien
acagattctgaaaccagactgcttg

SEQ ID NO: 11566 - DNA, 25 bp, Homo sapien
cttttgtaacaagcacagattctga

SEQ ID NO: 11567 - DNA, 25 bp, Homo sapien
acctaactggcttctttgcatccct

SEQ ID NO: 11568 - DNA, 25 bp, Homo sapien
gcacccggcctgcttgcaatatttt

SEQ ID NO: 11569 - DNA, 25 bp, Homo sapien
tgttgcctttaaagtagtatccctc

SEQ ID NO: 11570 - DNA, 25 bp, Homo sapien
agtactctctgtcacagcactgttc

SEQ ID NO: 11571 - DNA, 25 bp, Homo sapien
gtagtatccctcaacacagaaaatt

SEQ ID NO: 11572 - DNA, 25 bp, Homo sapien
tagctgtgtgacaaattacttaatc

SEQ ID NO: 11573 - DNA, 25 bp, Homo sapien
gaaaccagactgcttgaatgtgaat

SEQ ID NO: 11574 - DNA, 25 bp, Homo sapien
tgaatgtgaatttctgctctgccat

SEQ ID NO: 11575 - DNA, 25 bp, Homo sapien
ggagtacagtgttagtcacaggcat

SEQ ID NO: 11576 - DNA, 25 bp, Homo sapien
cctggctcttgtggggtcaccatat

SEQ ID NO: 11577 - DNA, 25 bp, Homo sapien
agctaggacaataggcctgcaccac

SEQ ID NO: 11578 - DNA, 25 bp, Homo sapien
attgatgccaaactgaggacaccca

SEQ ID NO: 11579 - DNA, 25 bp, Homo sapien
cattactggtgagcatgggagtttt

SEQ ID NO: 11580 - DNA, 25 bp, Homo sapien
gttgcgtgctacagccaagaactcc

SEQ ID NO: 11581 - DNA, 25 bp, Homo sapien
ttttacacaggtacagagaggttag

SEQ ID NO: 11582 - DNA, 25 bp, Homo sapien
actctgtgaagtggatactactgtt

SEQ ID NO: 11583 - DNA, 25 bp, Homo sapien
tccttaggtaacatggtggtccctg

SEQ ID NO: 11584 - DNA, 25 bp, Homo sapien
gttaaaaatggcagtcgggatttga

SEQ ID NO: 11585 - DNA, 25 bp, Homo sapien
actgaggacacccaacgctcgttgc

SEQ ID NO: 11586 - DNA, 25 bp, Homo sapien
tggaccatccgtctgcagacacaga

SEQ ID NO: 11587 - DNA, 25 bp, Homo sapien
cgttcttctggacacggggtccttg

SEQ ID NO: 11588 - DNA, 25 bp, Homo sapien
ttacctgcagactgctggtagaact

SEQ ID NO: 11589 - DNA, 25 bp, Homo sapien
agacacagacatgcaagatggacct

SEQ ID NO: 11590 - DNA, 25 bp, Homo sapien
ttctgtcacctctggaggcccacat

SEQ ID NO: 11591 - DNA, 25 bp, Homo sapien
aagagcttgaaggtttgaactgtgc

SEQ ID NO: 11592 - DNA, 25 bp, Homo sapien
attctcattacagggatggggttac

SEQ ID NO: 11593 - DNA, 25 bp, Homo sapien
ctgctggtagaactggcttccctgc

SEQ ID NO: 11594 - DNA, 25 bp, Homo sapien
tctggaggcccacatgtcaccaggc

SEQ ID NO: 11595 - DNA, 25 bp, Homo sapien
tggggccttggaagtttgaatatcc

SEQ ID NO: 11596 - DNA, 25 bp, Homo sapien
gcaagatggacctgctgtttcactc

SEQ ID NO: 11597 - DNA, 25 bp, Homo sapien
aagggacattagagacagatcctga

SEQ ID NO: 11598 - DNA, 25 bp, Homo sapien
tgaagggcctccagtgccacctaga

SEQ ID NO: 11599 - DNA, 25 bp, Homo sapien
gggaagaatgaccagatgtgaattt

SEQ ID NO: 11600 - DNA, 25 bp, Homo sapien
cggtagaatgaggagaacagtactt

SEQ ID NO: 11601 - DNA, 25 bp, Homo sapien
ctgttgaggaagatccaaaaaagtc

SEQ ID NO: 11602 - DNA, 25 bp, Homo sapien
gaaagacagcaactagaagacaatt

SEQ ID NO: 11603 - DNA, 25 bp, Homo sapien
tttcagaataacaggatggcttgga

SEQ ID NO: 11604 - DNA, 25 bp, Homo sapien
aaaaaagtcaatgcagccaggttgt

SEQ ID NO: 11605 - DNA, 25 bp, Homo sapien
gaagggcattccagctaaagagatc

SEQ ID NO: 11606 - DNA, 25 bp, Homo sapien
aggcgtgaaaagtacaaagactgtt

SEQ ID NO: 11607 - DNA, 25 bp, Homo sapien
acaattgtaatgatccaggccagga

SEQ ID NO: 11608 - DNA, 25 bp, Homo sapien
aggtcccattcacatggaagaggaa

SEQ ID NO: 11609 - DNA, 25 bp, Homo sapien
tacagaacaagagaaagaccataaa

SEQ ID NO: 11610 - DNA, 25 bp, Homo sapien
tcaatggactcagataaatcacatc

SEQ ID NO: 11611 - DNA, 25 bp, Homo sapien
aagggaagtcgtaatcaatgtcatc

SEQ ID NO: 11612 - DNA, 25 bp, Homo sapien
tttagttgccaaccgctcaggctac

SEQ ID NO: 11613 - DNA, 25 bp, Homo sapien
acgcagtcctaaataatgtggtgaa

SEQ ID NO: 11614 - DNA, 25 bp, Homo sapien
gggatttcacaaaagcatggacacc

SEQ ID NO: 11615 - DNA, 25 bp, Homo sapien
gttctctgggttagaagaaagtcac

SEQ ID NO: 11616 - DNA, 25 bp, Homo sapien
agaggaagggatttcacaaaagcat

SEQ ID NO: 11617 - DNA, 25 bp, Homo sapien
ctaaataatgtggtgaagggaagtc

SEQ ID NO: 11618 - DNA, 25 bp, Homo sapien
ttagaagaaagtcacaggtcccatt

SEQ ID NO: 11619 - DNA, 25 bp, Homo sapien
attaaagaatgagttaaatagccat

SEQ ID NO: 11620 - DNA, 25 bp, Homo sapien
taactgtaagcaaatgccacggcat

SEQ ID NO: 11621 - DNA, 25 bp, Homo sapien
tgtatgacaaaaggttgaatccaac

SEQ ID NO: 11622 - DNA, 25 bp, Homo sapien
aatgccacggcatgccatggtaata

SEQ ID NO: 11623 - DNA, 25 bp, Homo sapien
aagagaaaacttatggagcacaaat

SEQ ID NO: 11624 - DNA, 25 bp, Homo sapien
tatacaacaaaagccagatgacact

SEQ ID NO: 11625 - DNA, 25 bp, Homo sapien
tgtttcacatccagcatacgcgtac

SEQ ID NO: 11626 - DNA, 25 bp, Homo sapien
catactcaaggggaaatattatttc

SEQ ID NO: 11627 - DNA, 25 bp, Homo sapien
tgagatgaagttctaacaaaatttc

SEQ ID NO: 11628 - DNA, 25 bp, Homo sapien
cgtgtatacatactcaaggggaaat

SEQ ID NO: 11629 - DNA, 25 bp, Homo sapien
atacgcgtactttccattcattcag

SEQ ID NO: 11630 - DNA, 25 bp, Homo sapien
tttagagactaggaaactgtgacac

SEQ ID NO: 11631 - DNA, 25 bp, Homo sapien
cataacagtctataaggtaggtcac

SEQ ID NO: 11632 - DNA, 25 bp, Homo sapien
taggagcaataacaatggctaacat

SEQ ID NO: 11633 - DNA, 25 bp, Homo sapien
tatacttcaggtcaataggagcaat

SEQ ID NO: 11634 - DNA, 25 bp, Homo sapien
ttgaaagaatgctggtggattcatc

SEQ ID NO: 11635 - DNA, 25 bp, Homo sapien
gaatgagaattccaacccagacact

SEQ ID NO: 11636 - DNA, 25 bp, Homo sapien
atctggtgatgccacccaaggtcaa

SEQ ID NO: 11637 - DNA, 25 bp, Homo sapien
ctcactatcgcacagcatgaagctg

SEQ ID NO: 11638 - DNA, 25 bp, Homo sapien
cctcagcaatagcataggcatgtca

SEQ ID NO: 11639 - DNA, 25 bp, Homo sapien
ggtcaaggaccagggtcacatttct

SEQ ID NO: 11640 - DNA, 25 bp, Homo sapien
catgaagctgtggaatgagaattcc

SEQ ID NO: 11641 - DNA, 25 bp, Homo sapien
agactgaagaaactgtcatctcctt

SEQ ID NO: 11642 - DNA, 25 bp, Homo sapien
ccgcctgttagaccagtgaagggaa

SEQ ID NO: 11643 - DNA, 25 bp, Homo sapien
cctcatggtcatggtagactgatat

SEQ ID NO: 11644 - DNA, 25 bp, Homo sapien
agaagtaaacacagccatataggca

SEQ ID NO: 11645 - DNA, 25 bp, Homo sapien
catggcttcttgcagggacaacttt

SEQ ID NO: 11646 - DNA, 25 bp, Homo sapien
gacaactttgtgaatcggctcagac

SEQ ID NO: 11647 - DNA, 25 bp, Homo sapien
atgatggaattctcagtgatactgc

SEQ ID NO: 11648 - DNA, 25 bp, Homo sapien
tgaaataatgatctgaccgcctgtt

SEQ ID NO: 11649 - DNA, 25 bp, Homo sapien
aggagctcctggaattggatgtaat

SEQ ID NO: 11650 - DNA, 25 bp, Homo sapien
ttaagaagagaatcctcatggtcat

SEQ ID NO: 11651 - DNA, 25 bp, Homo sapien
atacaggtaaagaagtaaacacagc

SEQ ID NO: 11652 - DNA, 25 bp, Homo sapien
cacctacttcaaagggcagttatga

SEQ ID NO: 11653 - DNA, 25 bp, Homo sapien
aatatcacctacttcaaagggcagt

SEQ ID NO: 11654 - DNA, 25 bp, Homo sapien
atcacctacttcaaagggcagttat

SEQ ID NO: 11655 - DNA, 25 bp, Homo sapien
ttcaaagggcagttatgaggcttaa

SEQ ID NO: 11656 - DNA, 25 bp, Homo sapien
aaagggcagttatgaggcttaaatg

SEQ ID NO: 11657 - DNA, 25 bp, Homo sapien
cttcaaagggcagttatgaggctta

SEQ ID NO: 11658 - DNA, 25 bp, Homo sapien
aaagcatggattcgaatcctagctt

SEQ ID NO: 11659 - DNA, 25 bp, Homo sapien
gggttaaaagcatggattcgaatcc

SEQ ID NO: 11660 - DNA, 25 bp, Homo sapien
caaagggcagttatgaggcttaaat

SEQ ID NO: 11661 - DNA, 25 bp, Homo sapien
aaatattgtgaataatatcacctac

SEQ ID NO: 11662 - DNA, 25 bp, Homo sapien
tacttcaaagggcagttatgaggct

SEQ ID NO: 11663 - DNA, 25 bp, Homo sapien
tcacattgcctataaagagaaaaca

SEQ ID NO: 11664 - DNA, 25 bp, Homo sapien
tcctcagtataagggaaagggtaca

SEQ ID NO: 11665 - DNA, 25 bp, Homo sapien
gaaagggtacatagtatgaagcctg

SEQ ID NO: 11666 - DNA, 25 bp, Homo sapien
ttcatgacttgtggctcagagagaa

SEQ ID NO: 11667 - DNA, 25 bp, Homo sapien
aggaacacagagtgatatcacacac

SEQ ID NO: 11668 - DNA, 25 bp, Homo sapien
aacacatcagttactcaagggtagc

SEQ ID NO: 11669 - DNA, 25 bp, Homo sapien
aatttcaaagcaacagaatacagat

SEQ ID NO: 11670 - DNA, 25 bp, Homo sapien
attcacccacttacaaacgctgagc

SEQ ID NO: 11671 - DNA, 25 bp, Homo sapien
gcttcttggcaaagtgaaaagtgaa

SEQ ID NO: 11672 - DNA, 25 bp, Homo sapien
aaacgctgagccaacaaatttactc

SEQ ID NO: 11673 - DNA, 25 bp, Homo sapien
ttactcaagggtagccaaatatttc

SEQ ID NO: 11674 - DNA, 25 bp, Homo sapien
attcttacagcagcgctctaggata

SEQ ID NO: 11675 - DNA, 25 bp, Homo sapien
ctgcaatattgtttgtgtcacccta

SEQ ID NO: 11676 - DNA, 25 bp, Homo sapien
aggacagactcgagactgcaatatt

SEQ ID NO: 11677 - DNA, 25 bp, Homo sapien
attttattcttacagcagcgctcta

SEQ ID NO: 11678 - DNA, 25 bp, Homo sapien
gttcaaggacagactcgagactgca

SEQ ID NO: 11679 - DNA, 25 bp, Homo sapien
atgtgccaggtattacactaagtgc

SEQ ID NO: 11680 - DNA, 25 bp, Homo sapien
aaacaaggttcaaggacagactcga

SEQ ID NO: 11681 - DNA, 25 bp, Homo sapien
ttgtgtcaccctaaacaattcaccc

SEQ ID NO: 11682 - DNA, 25 bp, Homo sapien
cagcagcgctctaggatattggccc

SEQ ID NO: 11683 - DNA, 25 bp, Homo sapien
ttggccccattataggattaagaaa

SEQ ID NO: 11684 - DNA, 25 bp, Homo sapien
tacagcagcgctctaggatattggc

SEQ ID NO: 11685 - DNA, 25 bp, Homo sapien
ctgtgggcctaaaaactgatcaatt

SEQ ID NO: 11686 - DNA, 25 bp, Homo sapien
caagtatataactgtgggcctaaaa

SEQ ID NO: 11687 - DNA, 25 bp, Homo sapien
ctgagcagggaatttatgatttgct

SEQ ID NO: 11688 - DNA, 25 bp, Homo sapien
ccaaacttcagacccagtaagggga

SEQ ID NO: 11689 - DNA, 25 bp, Homo sapien
agaatttttaggctcctgggattca

SEQ ID NO: 11690 - DNA, 25 bp, Homo sapien
ttgacctggaggatgtttacgttcc

SEQ ID NO: 11691 - DNA, 25 bp, Homo sapien
acctaggatgcacactgattcagcc

SEQ ID NO: 11692 - DNA, 25 bp, Homo sapien
aatttgatctgccaccctgttagga

SEQ ID NO: 11693 - DNA, 25 bp, Homo sapien
ggggagcatccacaaaaccaatagc

SEQ ID NO: 11694 - DNA, 25 bp, Homo sapien
ttttatcccactgcgggtcctgagc

SEQ ID NO: 11695 - DNA, 25 bp, Homo sapien
tattatttcggtgggcagcattatt

SEQ ID NO: 11696 - DNA, 25 bp, Homo sapien
ctatcaaaggttatgtacaacgcac

SEQ ID NO: 11697 - DNA, 25 bp, Homo sapien
gtacaacgcacaactctacccagat

SEQ ID NO: 11698 - DNA, 25 bp, Homo sapien
ttgcactgttctaaataaaggaaac

SEQ ID NO: 11699 - DNA, 25 bp, Homo sapien
caatcggataatgtattagccagcc

SEQ ID NO: 11700 - DNA, 25 bp, Homo sapien
taaaggaaacaagactcttcagtac

SEQ ID NO: 11701 - DNA, 25 bp, Homo sapien
gtatgctgtcaggataaatcaagtc

SEQ ID NO: 11702 - DNA, 25 bp, Homo sapien
gtattagccagccaaaaattatgta

SEQ ID NO: 11703 - DNA, 25 bp, Homo sapien
aaatagaatagagaggcaagtatca

SEQ ID NO: 11704 - DNA, 25 bp, Homo sapien
agagaggcaagtatcaacatgcatc

SEQ ID NO: 11705 - DNA, 25 bp, Homo sapien
gatctgttagtgagttgtaaaatca

SEQ ID NO: 11706 - DNA, 25 bp, Homo sapien
tttcaaactgtaggtcaagatctgt

SEQ ID NO: 11707 - DNA, 25 bp, Homo sapien
acaggctaatgggatacatgattgc

SEQ ID NO: 11708 - DNA, 25 bp, Homo sapien
atacatgattgctgaaaaggggaag

SEQ ID NO: 11709 - DNA, 25 bp, Homo sapien
aggcaaggcaaagtgatcataaaca

SEQ ID NO: 11710 - DNA, 25 bp, Homo sapien
tgaattatggctcccagagaggcaa

SEQ ID NO: 11711 - DNA, 25 bp, Homo sapien
ttgcataaatgagtagtgcggctct

SEQ ID NO: 11712 - DNA, 25 bp, Homo sapien
tacagaaaaggacacccgattgtga

SEQ ID NO: 11713 - DNA, 25 bp, Homo sapien
agcagcggcaatcaaacaggctaat

SEQ ID NO: 11714 - DNA, 25 bp, Homo sapien
gcggccagagtaatggttttgcata

SEQ ID NO: 11715 - DNA, 25 bp, Homo sapien
actgaggctgtgtcggattcataca

SEQ ID NO: 11716 - DNA, 25 bp, Homo sapien
aagaaggggctagcacatttgtgta

SEQ ID NO: 11717 - DNA, 25 bp, Homo sapien
aattagccggcttctctcaggggag

SEQ ID NO: 11718 - DNA, 25 bp, Homo sapien
atccaggccacaagggaagccctca

SEQ ID NO: 11719 - DNA, 25 bp, Homo sapien
gatatgcactcctactggggaacct

SEQ ID NO: 11720 - DNA, 25 bp, Homo sapien
agggaagccactgctgatcctacct

SEQ ID NO: 11721 - DNA, 25 bp, Homo sapien
tggaagtcagccagctaactcagac

SEQ ID NO: 11722 - DNA, 25 bp, Homo sapien
tgagattcacgatatgagtgggaac

SEQ ID NO: 11723 - DNA, 25 bp, Homo sapien
tgtgagaggaggataaactacctct

SEQ ID NO: 11724 - DNA, 25 bp, Homo sapien
tgagagaagctcaactgagattcac

SEQ ID NO: 11725 - DNA, 25 bp, Homo sapien
gcctgaaggccatgcaaaggctaat

SEQ ID NO: 11726 - DNA, 25 bp, Homo sapien
gaggcagatggaaaactctaagtcc

SEQ ID NO: 11727 - DNA, 25 bp, Homo sapien
cccagaaacttactacgaggcagat

SEQ ID NO: 11728 - DNA, 25 bp, Homo sapien
atcctacctcacaggggaccttgtg

SEQ ID NO: 11729 - DNA, 25 bp, Homo sapien
acggcagggataccttctgagaaat

SEQ ID NO: 11730 - DNA, 25 bp, Homo sapien
taggctacaaaactgtatggccctc

SEQ ID NO: 11731 - DNA, 25 bp, Homo sapien
acagaaaggaatgaagtagtgactc

SEQ ID NO: 11732 - DNA, 25 bp, Homo sapien
gtagctggttgtaacatggtgagta

SEQ ID NO: 11733 - DNA, 25 bp, Homo sapien
ctggctaaatggtataacgtgttgc

SEQ ID NO: 11734 - DNA, 25 bp, Homo sapien
ccaagcatcacttaacggcagggat

SEQ ID NO: 11735 - DNA, 25 bp, Homo sapien
aatggaatgttactcagacacagaa

SEQ ID NO: 11736 - DNA, 25 bp, Homo sapien
ctatgctaggtctaagagcccaggc

SEQ ID NO: 11737 - DNA, 25 bp, Homo sapien
ttcacacaaaccaagaaggtacagc

SEQ ID NO: 11738 - DNA, 25 bp, Homo sapien
agagcccaggcacacaataccatat

SEQ ID NO: 11739 - DNA, 25 bp, Homo sapien
tggcgcctgaccattgctgacactt

SEQ ID NO: 11740 - DNA, 25 bp, Homo sapien
tgggcaaggctgctttgagtttcct

SEQ ID NO: 11741 - DNA, 25 bp, Homo sapien
agagggtcaccattcaacgcactgt

SEQ ID NO: 11742 - DNA, 25 bp, Homo sapien
atcggaaggctcctggtcgctctca

SEQ ID NO: 11743 - DNA, 25 bp, Homo sapien
cttctcacagcaggtaccggtacgt

SEQ ID NO: 11744 - DNA, 25 bp, Homo sapien
aggacacatctttagagggtcacca

SEQ ID NO: 11745 - DNA, 25 bp, Homo sapien
tcgtatgggaatcgaggtgttcaat

SEQ ID NO: 11746 - DNA, 25 bp, Homo sapien
ccattcaacgcactgtggtgggcaa

SEQ ID NO: 11747 - DNA, 25 bp, Homo sapien
ttaggatacaaccagcgctgtgtgt

SEQ ID NO: 11748 - DNA, 25 bp, Homo sapien
gtacgtgtgcacagaggagaaccca

SEQ ID NO: 11749 - DNA, 25 bp, Homo sapien
cagagaaatgaagggaaatgtccct

SEQ ID NO: 11750 - DNA, 25 bp, Homo sapien
cgggagactgagtaaaatgtgaact

SEQ ID NO: 11751 - DNA, 25 bp, Homo sapien
tgctgtggtcattcattctgctgtc

SEQ ID NO: 11752 - DNA, 25 bp, Homo sapien
ctagcactgtgctcaatgatgagtc

SEQ ID NO: 11753 - DNA, 25 bp, Homo sapien
aatgcaggttgcatgtgctatacat

SEQ ID NO: 11754 - DNA, 25 bp, Homo sapien
actgcacctagcctggtaggcattt

SEQ ID NO: 11755 - DNA, 25 bp, Homo sapien
acaggcccaaatgtccagagttctc

SEQ ID NO: 11756 - DNA, 25 bp, Homo sapien
ttttccctgcaaggaaggcctgtct

SEQ ID NO: 11757 - DNA, 25 bp, Homo sapien
ttctgctgtcacacagacgagtcat

SEQ ID NO: 11758 - DNA, 25 bp, Homo sapien
tataacaatcaaaacgtcaaggaaa

SEQ ID NO: 11759 - DNA, 25 bp, Homo sapien
ggggctgctgcccaatacccacagg

SEQ ID NO: 11760 - DNA, 25 bp, Homo sapien
caatgatgagtcttcagggctagat

SEQ ID NO: 11761 - DNA, 25 bp, Homo sapien
cagacgagtcatcatgtcaggggct

SEQ ID NO: 11762 - DNA, 25 bp, Homo sapien
tttaggtcaccagaaataacttgga

SEQ ID NO: 11763 - DNA, 25 bp, Homo sapien
gaagccagcaatgtttcagagaaac

SEQ ID NO: 11764 - DNA, 25 bp, Homo sapien
acaactctgtctggacgcaggcctt

SEQ ID NO: 11765 - DNA, 25 bp, Homo sapien
ggaccacttaggcagagagaactcc

SEQ ID NO: 11766 - DNA, 25 bp, Homo sapien
gagaactccaaggttgggttccatc

SEQ ID NO: 11767 - DNA, 25 bp, Homo sapien
ccaggcccacagtaggagttcaatt

SEQ ID NO: 11768 - DNA, 25 bp, Homo sapien
atcagagaacagctgaatcaaactc

SEQ ID NO: 11769 - DNA, 25 bp, Homo sapien
tctggccactaagacaggagaagaa

SEQ ID NO: 11770 - DNA, 25 bp, Homo sapien
aaggttgactctggcagaatctgca

SEQ ID NO: 11771 - DNA, 25 bp, Homo sapien
tgttgaccaactaaagctgaagatt

SEQ ID NO: 11772 - DNA, 25 bp, Homo sapien
ataacttggaaatgcatgagcgtgt

SEQ ID NO: 11773 - DNA, 25 bp, Homo sapien
tcttctttgcctgtataatatctat

SEQ ID NO: 11774 - DNA, 25 bp, Homo sapien
cagggacaactgaatatatggcatt

SEQ ID NO: 11775 - DNA, 25 bp, Homo sapien
cagggatagagccttaataacacat

SEQ ID NO: 11776 - DNA, 25 bp, Homo sapien
taacacatatatactaggtcctagg

SEQ ID NO: 11777 - DNA, 25 bp, Homo sapien
aagaatccatgaaaaatagataact

SEQ ID NO: 11778 - DNA, 25 bp, Homo sapien
aaatctgtaccttcacactctatcc

SEQ ID NO: 11779 - DNA, 25 bp, Homo sapien
gggatagagccttaataacacatat

SEQ ID NO: 11780 - DNA, 25 bp, Homo sapien
tccaaatcactttgccttcccgatt

SEQ ID NO: 11781 - DNA, 25 bp, Homo sapien
atatggcattatcatccaaatcact

SEQ ID NO: 11782 - DNA, 25 bp, Homo sapien
ccagggacaactgaatatatggcat

SEQ ID NO: 11783 - DNA, 25 bp, Homo sapien
gaataaacaaagaatccatgaaaaa

SEQ ID NO: 11784 - DNA, 25 bp, Homo sapien
tcttctttgcctgtataatatctat

SEQ ID NO: 11785 - DNA, 25 bp, Homo sapien
aagaatccatgaaaaatagataact

SEQ ID NO: 11786 - DNA, 25 bp, Homo sapien
gaataaacaaagaatccatgaaaaa

SEQ ID NO: 11787 - DNA, 25 bp, Homo sapien
cagggatagagccttaataacacat

SEQ ID NO: 11788 - DNA, 25 bp, Homo sapien
taacacatatatactaggtcctagg

SEQ ID NO: 11789 - DNA, 25 bp, Homo sapien
cattaaaaattcagggatagagcct

SEQ ID NO: 11790 - DNA, 25 bp, Homo sapien
cttatggggaataaacaaagaatcc

SEQ ID NO: 11791 - DNA, 25 bp, Homo sapien
atatggcattatcatccaaatcact

SEQ ID NO: 11792 - DNA, 25 bp, Homo sapien
gggatagagccttaataacacatat

SEQ ID NO: 11793 - DNA, 25 bp, Homo sapien
cagggacaactgaatatatggcatt

SEQ ID NO: 11794 - DNA, 25 bp, Homo sapien
tccaaatcactttgccttcccgatt

SEQ ID NO: 11795 - DNA, 25 bp, Homo sapien
cttttcatctacaggaataaagaca

SEQ ID NO: 11796 - DNA, 25 bp, Homo sapien
tgtctttattcctgtagatgaaaag

SEQ ID NO: 11797 - DNA, 25 bp, Homo sapien
gttgtttatacattagtctgatgac

SEQ ID NO: 11798 - DNA, 25 bp, Homo sapien
tcacatcttagttcaggcaataaat

SEQ ID NO: 11799 - DNA, 25 bp, Homo sapien
gtgagccttcacatcttagttcagg

SEQ ID NO: 11800 - DNA, 25 bp, Homo sapien
tatcaaagtcctagtgagccttcac

SEQ ID NO: 11801 - DNA, 25 bp, Homo sapien
ccactgtacagtcatattaagataa

SEQ ID NO: 11802 - DNA, 25 bp, Homo sapien
atgctcccacagaaccactgtacag

SEQ ID NO: 11803 - DNA, 25 bp, Homo sapien
aaagtcctagtgagccttcacatct

SEQ ID NO: 11804 - DNA, 25 bp, Homo sapien
atgactaaacagtgagttgtggagg

SEQ ID NO: 11805 - DNA, 25 bp, Homo sapien
gatgactaaacagtgagttgtggag

SEQ ID NO: 11806 - DNA, 25 bp, Homo sapien
cataatatcatgactttgcagtttc

SEQ ID NO: 11807 - DNA, 25 bp, Homo sapien
aatttccaagattaagcacccctcc

SEQ ID NO: 11808 - DNA, 25 bp, Homo sapien
aaagtcttttatgtcgggctctaac

SEQ ID NO: 11809 - DNA, 25 bp, Homo sapien
tgtcgggctctaacttaccattcaa

SEQ ID NO: 11810 - DNA, 25 bp, Homo sapien
caaatcatgaattcctaaaacaaac

SEQ ID NO: 11811 - DNA, 25 bp, Homo sapien
tctagtacagtacagaaagtctttt

SEQ ID NO: 11812 - DNA, 25 bp, Homo sapien
tgtttcagctacaggaacaaatcat

SEQ ID NO: 11813 - DNA, 25 bp, Homo sapien
cagaaagtcttttatgtcgggctct

SEQ ID NO: 11814 - DNA, 25 bp, Homo sapien
agctagtagtagcagtgcgcaccac

SEQ ID NO: 11815 - DNA, 25 bp, Homo sapien
tagtagtagcagtgcgcaccactac

SEQ ID NO: 11816 - DNA, 25 bp, Homo sapien
caatgtatgtttcagctacaggaac

SEQ ID NO: 11817 - DNA, 25 bp, Homo sapien
caccaccatgcccatagagatgggg

SEQ ID NO: 11818 - DNA, 25 bp, Homo sapien
accacacccagacactaattttcta

SEQ ID NO: 11819 - DNA, 25 bp, Homo sapien
gcctggccaaggatacttctcattt

SEQ ID NO: 11820 - DNA, 25 bp, Homo sapien
tctgactttatttggctacgtgcct

SEQ ID NO: 11821 - DNA, 25 bp, Homo sapien
tacgtgcctgttactgggtatagcc

SEQ ID NO: 11822 - DNA, 25 bp, Homo sapien
tgtatctccgtctggaatgaggttc

SEQ ID NO: 11823 - DNA, 25 bp, Homo sapien
taagccagtgatagaggggaaaaat

SEQ ID NO: 11824 - DNA, 25 bp, Homo sapien
gggaaaaatccagtacaataagcag

SEQ ID NO: 11825 - DNA, 25 bp, Homo sapien
taaaataatagaataagccagtgat

SEQ ID NO: 11826 - DNA, 25 bp, Homo sapien
tggtaagaccaacgagtatcatcat

SEQ ID NO: 11827 - DNA, 25 bp, Homo sapien
cttggcagtattgtgcagtgatctt

SEQ ID NO: 11828 - DNA, 25 bp, Homo sapien
tctttagcaaagttggtaagaccaa

SEQ ID NO: 11829 - DNA, 25 bp, Homo sapien
agtgatcttttagctgcctctgtat

SEQ ID NO: 11830 - DNA, 25 bp, Homo sapien
tcctgtcctcgagggattccttctt

SEQ ID NO: 11831 - DNA, 25 bp, Homo sapien
acaaagagctacaagtgtcatccca

SEQ ID NO: 11832 - DNA, 25 bp, Homo sapien
acacactaggatacggactctgctt

SEQ ID NO: 11833 - DNA, 25 bp, Homo sapien
ttactgaggtatacttcacaagaaa

SEQ ID NO: 11834 - DNA, 25 bp, Homo sapien
ctgagtcattttagcacaaagagct

SEQ ID NO: 11835 - DNA, 25 bp, Homo sapien
gtgaagcactcaccacaattgagtt

SEQ ID NO: 11836 - DNA, 25 bp, Homo sapien
caaaatgaatgcaggagctgcctga

SEQ ID NO: 11837 - DNA, 25 bp, Homo sapien
tataggtatacattgtgaagcactc

SEQ ID NO: 11838 - DNA, 25 bp, Homo sapien
tcatcaagaggcacagcttctagag

SEQ ID NO: 11839 - DNA, 25 bp, Homo sapien
ctgggagaagtctaagaaagaccca

SEQ ID NO: 11840 - DNA, 25 bp, Homo sapien
gtttgggttaacatcgactcatctc

SEQ ID NO: 11841 - DNA, 25 bp, Homo sapien
atcatggaaagatccactaatggga

SEQ ID NO: 11842 - DNA, 25 bp, Homo sapien
ttacaggtgtgcctagaaggccact

SEQ ID NO: 11843 - DNA, 25 bp, Homo sapien
ctccagctgtttttacaggtgtgcc

SEQ ID NO: 11844 - DNA, 25 bp, Homo sapien
tatgactctgttagtgctatcttcc

SEQ ID NO: 11845 - DNA, 25 bp, Homo sapien
gatgtgcacctgttctgtatgactc

SEQ ID NO: 11846 - DNA, 25 bp, Homo sapien
atccactaatgggaggcatagctta

SEQ ID NO: 11847 - DNA, 25 bp, Homo sapien
gtcatgatccaatgtgcatatgttt

SEQ ID NO: 11848 - DNA, 25 bp, Homo sapien
gtgtgcctagaaggccacttgcctt

SEQ ID NO: 11849 - DNA, 25 bp, Homo sapien
gaaagatccactaatgggaggcata

SEQ ID NO: 11850 - DNA, 25 bp, Homo sapien
tttccagaacaatgttgacccttat

SEQ ID NO: 11851 - DNA, 25 bp, Homo sapien
tgccttcatacagctgatgtgcacc

SEQ ID NO: 11852 - DNA, 25 bp, Homo sapien
ctgatgtaatgaggcctcccctcta

SEQ ID NO: 11853 - DNA, 25 bp, Homo sapien
taaatataaagtcatataggccggg

SEQ ID NO: 11854 - DNA, 25 bp, Homo sapien
actgatgtaatgaggcctcccctct

SEQ ID NO: 11855 - DNA, 25 bp, Homo sapien
aaatataaagtcatataggccgggc

SEQ ID NO: 11856 - DNA, 25 bp, Homo sapien
caacactgatgtaatgaggcctccc

SEQ ID NO: 11857 - DNA, 25 bp, Homo sapien
cactgatgtaatgaggcctcccctc

SEQ ID NO: 11858 - DNA, 25 bp, Homo sapien
acaacactgatgtaatgaggcctcc

SEQ ID NO: 11859 - DNA, 25 bp, Homo sapien
acactgatgtaatgaggcctcccct

SEQ ID NO: 11860 - DNA, 25 bp, Homo sapien
ttaagaaaacccagcatcacagccc

SEQ ID NO: 11861 - DNA, 25 bp, Homo sapien
gtaaatataaagtcatataggccgg

SEQ ID NO: 11862 - DNA, 25 bp, Homo sapien
aatataaagtcatataggccgggcg

SEQ ID NO: 11863 - DNA, 25 bp, Homo sapien
ctattctctttgatagggcaagggg

SEQ ID NO: 11864 - DNA, 25 bp, Homo sapien
gtaaatataaagtcatataggccgg

SEQ ID NO: 11865 - DNA, 25 bp, Homo sapien
aaatataaagtcatataggccgggc

SEQ ID NO: 11866 - DNA, 25 bp, Homo sapien
atctcctggtgaagggagcaggtaa

SEQ ID NO: 11867 - DNA, 25 bp, Homo sapien
ttaagaaaacccagcatcacagccc

SEQ ID NO: 11868 - DNA, 25 bp, Homo sapien
caacactgatgtaatgaggcctccc

SEQ ID NO: 11869 - DNA, 25 bp, Homo sapien
gaaaacccagcatcacagcccatga

SEQ ID NO: 11870 - DNA, 25 bp, Homo sapien
atccttatctgtctggtcaagtcat

SEQ ID NO: 11871 - DNA, 25 bp, Homo sapien
acaacactgatgtaatgaggcctcc

SEQ ID NO: 11872 - DNA, 25 bp, Homo sapien
aaaacaacactgatgtaatgaggcc

SEQ ID NO: 11873 - DNA, 25 bp, Homo sapien
aatataaagtcatataggccgggcg

SEQ ID NO: 11874 - DNA, 25 bp, Homo sapien
cttccagaaaagactggtcagaggt

SEQ ID NO: 11875 - DNA, 25 bp, Homo sapien
atggcaggacccaccgaatgccttc

SEQ ID NO: 11876 - DNA, 25 bp, Homo sapien
ctgagccctgtgaacagttgaaatc

SEQ ID NO: 11877 - DNA, 25 bp, Homo sapien
aaataaggtgtattggaagaaagag

SEQ ID NO: 11878 - DNA, 25 bp, Homo sapien
atgccttcaaaagccagtggtccat

SEQ ID NO: 11879 - DNA, 25 bp, Homo sapien
ggggacatttatagcagaggaaaat

SEQ ID NO: 11880 - DNA, 25 bp, Homo sapien
tgatctaatgctacacaaaaagggc

SEQ ID NO: 11881 - DNA, 25 bp, Homo sapien
ctagggagtcacaagaaacaacata

SEQ ID NO: 11882 - DNA, 25 bp, Homo sapien
actggactaagtgacctggatcaga

SEQ ID NO: 11883 - DNA, 25 bp, Homo sapien
ttcctgtatagggacgctggccttg

SEQ ID NO: 11884 - DNA, 25 bp, Homo sapien
tcagaggtgcagcacagataaacct

SEQ ID NO: 11885 - DNA, 25 bp, Homo sapien
ctgagagatggcttactagatagaa

SEQ ID NO: 11886 - DNA, 25 bp, Homo sapien
atgcattaccagaaagattaaggtc

SEQ ID NO: 11887 - DNA, 25 bp, Homo sapien
tctcaagaatgagacctgagagatg

SEQ ID NO: 11888 - DNA, 25 bp, Homo sapien
tgtgagttccagctttaaaaagacc

SEQ ID NO: 11889 - DNA, 25 bp, Homo sapien
catttgaagtgcacagtttaggagt

SEQ ID NO: 11890 - DNA, 25 bp, Homo sapien
ctagatagaataaaggatgtgagtt

SEQ ID NO: 11891 - DNA, 25 bp, Homo sapien
aagcaagaaaggtatgtcatatcta

SEQ ID NO: 11892 - DNA, 25 bp, Homo sapien
cataaagaaatgtatccaggacgta

SEQ ID NO: 11893 - DNA, 25 bp, Homo sapien
atgatgaaaaacatggcttccattt

SEQ ID NO: 11894 - DNA, 25 bp, Homo sapien
aaaagaccacactcttggaggcttc

SEQ ID NO: 11895 - DNA, 25 bp, Homo sapien
caggacgtataattttggagaaaaa

SEQ ID NO: 11896 - DNA, 25 bp, Homo sapien
gaacacgatttctataaccagcaaa

SEQ ID NO: 11897 - DNA, 25 bp, Homo sapien
gtggtagacctgagagacattatct

SEQ ID NO: 11898 - DNA, 25 bp, Homo sapien
tagtgactctgatatgcagatgtcc

SEQ ID NO: 11899 - DNA, 25 bp, Homo sapien
aatgattaaaatctgagctggtatt

SEQ ID NO: 11900 - DNA, 25 bp, Homo sapien
ctcagctcagggcaatttttgaatt

SEQ ID NO: 11901 - DNA, 25 bp, Homo sapien
aagggacacataccattataaggat

SEQ ID NO: 11902 - DNA, 25 bp, Homo sapien
gtggtattgtagctgcatgcctttt

SEQ ID NO: 11903 - DNA, 25 bp, Homo sapien
aattttcaagcccatacgttttcca

SEQ ID NO: 11904 - DNA, 25 bp, Homo sapien
aaagcttcattttggtaagggacac

SEQ ID NO: 11905 - DNA, 25 bp, Homo sapien
agacattatctcagctcagggcaat

SEQ ID NO: 11906 - DNA, 25 bp, Homo sapien
gacctgggaattggttcaccttcta

SEQ ID NO: 11907 - DNA, 25 bp, Homo sapien
aataggacaatgctagaatccgtct

SEQ ID NO: 11908 - DNA, 25 bp, Homo sapien
gggagtgagtatgtcacataaacct

SEQ ID NO: 11909 - DNA, 25 bp, Homo sapien
aggggatggcttcattaaccgagta

SEQ ID NO: 11910 - DNA, 25 bp, Homo sapien
gtagatagcaacagcattctgcttc

SEQ ID NO: 11911 - DNA, 25 bp, Homo sapien
tgagctcctagatccaaccatacct

SEQ ID NO: 11912 - DNA, 25 bp, Homo sapien
tacccaatgcatgaagagaatgagg

SEQ ID NO: 11913 - DNA, 25 bp, Homo sapien
ggccagacccaaagcaaggcagtga

SEQ ID NO: 11914 - DNA, 25 bp, Homo sapien
ttgtcactaaagctggcctatgaac

SEQ ID NO: 11915 - DNA, 25 bp, Homo sapien
aaagggaaaaagaaccttcatgatc

SEQ ID NO: 11916 - DNA, 25 bp, Homo sapien
ttagctgtgaaagttgaaattggtc

SEQ ID NO: 11917 - DNA, 25 bp, Homo sapien
tctcaatttgtaggtaaggggatgg

SEQ ID NO: 11918 - DNA, 25 bp, Homo sapien
aattaagcaaattctaaatcagctg

SEQ ID NO: 11919 - DNA, 25 bp, Homo sapien
tgacaggattacatcttattcagac

SEQ ID NO: 11920 - DNA, 25 bp, Homo sapien
attttagttcctagacaggaatatc

SEQ ID NO: 11921 - DNA, 25 bp, Homo sapien
ctcaaacccatatatctaagaatgt

SEQ ID NO: 11922 - DNA, 25 bp, Homo sapien
gttcctagacaggaatatctaaaat

SEQ ID NO: 11923 - DNA, 25 bp, Homo sapien
tcatacagggtgtattttttcctta

SEQ ID NO: 11924 - DNA, 25 bp, Homo sapien
agcaaattctaaatcagctgtaatt

SEQ ID NO: 11925 - DNA, 25 bp, Homo sapien
aaaatggggtctaactaagataatc

SEQ ID NO: 11926 - DNA, 25 bp, Homo sapien
aagagagaactcatgacaggattac

SEQ ID NO: 11927 - DNA, 25 bp, Homo sapien
tctaagaatgtatcatacagggtgt

SEQ ID NO: 11928 - DNA, 25 bp, Homo sapien
ggaagagagaactcatgacaggatt

SEQ ID NO: 11929 - DNA, 25 bp, Homo sapien
ttacgggtgcataccaacatgccct

SEQ ID NO: 11930 - DNA, 25 bp, Homo sapien
tttcatatgttgaacgtgcatgcaa

SEQ ID NO: 11931 - DNA, 25 bp, Homo sapien
catatgttgaacgtgcatgcaagtg

SEQ ID NO: 11932 - DNA, 25 bp, Homo sapien
ttcttgaagtatttccatttccctc

SEQ ID NO: 11933 - DNA, 25 bp, Homo sapien
gatgcaatacctttacttctgaaga

SEQ ID NO: 11934 - DNA, 25 bp, Homo sapien
acgggtgcataccaacatgccctgc

SEQ ID NO: 11935 - DNA, 25 bp, Homo sapien
tttcaaagatgcaatacctttactt

SEQ ID NO: 11936 - DNA, 25 bp, Homo sapien
ctggagcacagtagcgccacctcgg

SEQ ID NO: 11937 - DNA, 25 bp, Homo sapien
tctagaagctcttgttttctgggca

SEQ ID NO: 11938 - DNA, 25 bp, Homo sapien
cttccaaccctctaagaatttaata

SEQ ID NO: 11939 - DNA, 25 bp, Homo sapien
tcaagcgatttgctgggattacggg

SEQ ID NO: 11940 - DNA, 25 bp, Homo sapien
tcaaagttagaagaggttcaagtcc

SEQ ID NO: 11941 - DNA, 25 bp, Homo sapien
ttgtcagcactgaagcaattaaaac

SEQ ID NO: 11942 - DNA, 25 bp, Homo sapien
aaatcgggatagtcatcagagaatg

SEQ ID NO: 11943 - DNA, 25 bp, Homo sapien
aagaacaacaggctagaaaatattt

SEQ ID NO: 11944 - DNA, 25 bp, Homo sapien
gcagaaaaaagactatcagatgggc

SEQ ID NO: 11945 - DNA, 25 bp, Homo sapien
gtcacctaagaaatgctaagtaacc

SEQ ID NO: 11946 - DNA, 25 bp, Homo sapien
ttcatagccttctacctgggagcct

SEQ ID NO: 11947 - DNA, 25 bp, Homo sapien
tcaatgacgacaaagaagtaatatc

SEQ ID NO: 11948 - DNA, 25 bp, Homo sapien
aggagagggaatgcatatagtaaat

SEQ ID NO: 11949 - DNA, 25 bp, Homo sapien
cttgttccttggaggcggtagaata

SEQ ID NO: 11950 - DNA, 25 bp, Homo sapien
tatgacgctgtaagccaagaccact

SEQ ID NO: 11951 - DNA, 25 bp, Homo sapien
gtcagtcacctgtcccatgcatttc

SEQ ID NO: 11952 - DNA, 25 bp, Homo sapien
atctaaaccacgatgcagtcatgtc

SEQ ID NO: 11953 - DNA, 25 bp, Homo sapien
tccaaaagaatgattcagagaaacc

SEQ ID NO: 11954 - DNA, 25 bp, Homo sapien
acaaagtcttaaaatgtaaagcacc

SEQ ID NO: 11955 - DNA, 25 bp, Homo sapien
cacgatgcagtcatgtcagtcacct

SEQ ID NO: 11956 - DNA, 25 bp, Homo sapien
agtcttaaaatgtaaagcacctccc

SEQ ID NO: 11957 - DNA, 25 bp, Homo sapien
atgcagtcatgtcagtcacctgtcc

SEQ ID NO: 11958 - DNA, 25 bp, Homo sapien
aaaccacgatgcagtcatgtcagtc

SEQ ID NO: 11959 - DNA, 25 bp, Homo sapien
tatacatctaaaccacgatgcagtc

SEQ ID NO: 11960 - DNA, 25 bp, Homo sapien
aatgttccaaaagaatgattcagag

SEQ ID NO: 11961 - DNA, 25 bp, Homo sapien
tcctctggctcttttagaatgttcc

SEQ ID NO: 11962 - DNA, 25 bp, Homo sapien
tatagagaatgggaataaattaacc

SEQ ID NO: 11963 - DNA, 25 bp, Homo sapien
tacattatagttatgtggcccatat

SEQ ID NO: 11964 - DNA, 25 bp, Homo sapien
ctccaaacagaaaactaggacctaa

SEQ ID NO: 11965 - DNA, 25 bp, Homo sapien
tcagaaatatagagaatgggaataa

SEQ ID NO: 11966 - DNA, 25 bp, Homo sapien
taagtataaaagcatttcaaaagga

SEQ ID NO: 11967 - DNA, 25 bp, Homo sapien
agctatccactaagtcaagtccctt

SEQ ID NO: 11968 - DNA, 25 bp, Homo sapien
tgaaactggacatttagctatccac

SEQ ID NO: 11969 - DNA, 25 bp, Homo sapien
taaaccttagtgaaacaacagctgc

SEQ ID NO: 11970 - DNA, 25 bp, Homo sapien
aaccaaggaactcattaatacacct

SEQ ID NO: 11971 - DNA, 25 bp, Homo sapien
ttcctatcacgtcaaaacaatgaat

SEQ ID NO: 11972 - DNA, 25 bp, Homo sapien
caacagctgctcttatgaaaatcca

SEQ ID NO: 11973 - DNA, 25 bp, Homo sapien
atgcttgttgtcatctggcttccaa

SEQ ID NO: 11974 - DNA, 25 bp, Homo sapien
aatgttttgaagatgcttgttgtca

SEQ ID NO: 11975 - DNA, 25 bp, Homo sapien
ttagatacaaaattctaggctgcag

SEQ ID NO: 11976 - DNA, 25 bp, Homo sapien
tccataaatggccttagtcctatct

SEQ ID NO: 11977 - DNA, 25 bp, Homo sapien
actgtcagactgatgattattcctt

SEQ ID NO: 11978 - DNA, 25 bp, Homo sapien
agtagtattttgtgaactgtgactt

SEQ ID NO: 11979 - DNA, 25 bp, Homo sapien
tctggaactccagttacatatattt

SEQ ID NO: 11980 - DNA, 25 bp, Homo sapien
attgtgaaattaactgtcagactga

SEQ ID NO: 11981 - DNA, 25 bp, Homo sapien
ttagacctttcagaccatattccat

SEQ ID NO: 11982 - DNA, 25 bp, Homo sapien
actaccagcaaatttcttgaccata

SEQ ID NO: 11983 - DNA, 25 bp, Homo sapien
atttttcccagttgggcacagtagt

SEQ ID NO: 11984 - DNA, 25 bp, Homo sapien
ataaggtgtatagcagaatgcagga

SEQ ID NO: 11985 - DNA, 25 bp, Homo sapien
ctttttgcaaactcagccagggata

SEQ ID NO: 11986 - DNA, 25 bp, Homo sapien
tctgaataaagggaagcttgccttt

SEQ ID NO: 11987 - DNA, 25 bp, Homo sapien
tagcagaatgcaggagctcattttc

SEQ ID NO: 11988 - DNA, 25 bp, Homo sapien
aactcagccagggataaggtgtata

SEQ ID NO: 11989 - DNA, 25 bp, Homo sapien
gccctgggcaggaagaactttcttc

SEQ ID NO: 11990 - DNA, 25 bp, Homo sapien
caccacattaattgccctgggcagg

SEQ ID NO: 11991 - DNA, 25 bp, Homo sapien
atagctctccagtactcagttcctt

SEQ ID NO: 11992 - DNA, 25 bp, Homo sapien
ttacaaataccacctcatgatcatc

SEQ ID NO: 11993 - DNA, 25 bp, Homo sapien
tcccattaaagcatgaaaatagttc

SEQ ID NO: 11994 - DNA, 25 bp, Homo sapien
tgatggaaaaacaactaacagggta

SEQ ID NO: 11995 - DNA, 25 bp, Homo sapien
aggtgatagcagataccctggaaat

SEQ ID NO: 11996 - DNA, 25 bp, Homo sapien
caagaaatttatggagagtgtgagt

SEQ ID NO: 11997 - DNA, 25 bp, Homo sapien
gttgggacccttgctatagaaaatc

SEQ ID NO: 11998 - DNA, 25 bp, Homo sapien
gatattggatcaggtgatagcagat

SEQ ID NO: 11999 - DNA, 25 bp, Homo sapien
aattacttaagctatggtgggacat

SEQ ID NO: 12000 - DNA, 25 bp, Homo sapien
gtgggacataggctagattttagcc

SEQ ID NO: 12001 - DNA, 25 bp, Homo sapien
attgtaacataaagtgttgagtccc

SEQ ID NO: 12002 - DNA, 25 bp, Homo sapien
gaaaatcaaggaatcatgtgtctaa

SEQ ID NO: 12003 - DNA, 25 bp, Homo sapien
tggagagtgtgagtaatcattgtac

SEQ ID NO: 12004 - DNA, 25 bp, Homo sapien
aagtagaataagtctgttgggaccc

SEQ ID NO: 12005 - DNA, 25 bp, Homo sapien
ctaaaattttaagagccctgaagta

SEQ ID NO: 12006 - DNA, 25 bp, Homo sapien
ttactggttgtattaatcaatgctc

SEQ ID NO: 12007 - DNA, 25 bp, Homo sapien
atacagcatgattaacttacgttcc

SEQ ID NO: 12008 - DNA, 25 bp, Homo sapien
taatcaatgctcaaaccaggaaagt

SEQ ID NO: 12009 - DNA, 25 bp, Homo sapien
atatgcatatcaatctagcaccttg

SEQ ID NO: 12010 - DNA, 25 bp, Homo sapien
agtataggactaattgttggtttac

SEQ ID NO: 12011 - DNA, 25 bp, Homo sapien
atgctcaaaccaggaaagtatagga

SEQ ID NO: 12012 - DNA, 25 bp, Homo sapien
attgtgaacatatttgtgcaaaaat

SEQ ID NO: 12013 - DNA, 25 bp, Homo sapien
taacactacgtaatatggatacagc

SEQ ID NO: 12014 - DNA, 25 bp, Homo sapien
attgtacatactattcggaaattat

SEQ ID NO: 12015 - DNA, 25 bp, Homo sapien
tgctgttataaacaaattgtgaaca

SEQ ID NO: 12016 - DNA, 25 bp, Homo sapien
tacgtaatatggatacagcatgatt

SEQ ID NO: 12017 - DNA, 25 bp, Homo sapien
ttgtgaatacactgctaactactat

SEQ ID NO: 12018 - DNA, 25 bp, Homo sapien
gaaatagaaccaagggcaagaacac

SEQ ID NO: 12019 - DNA, 25 bp, Homo sapien
ataccactaccgaagaaatagaacc

SEQ ID NO: 12020 - DNA, 25 bp, Homo sapien
acaaaggacactacatgatacgttc

SEQ ID NO: 12021 - DNA, 25 bp, Homo sapien
aaggataagctttaaactcagatgg

SEQ ID NO: 12022 - DNA, 25 bp, Homo sapien
cagctggaaagtagtaaaaggataa

SEQ ID NO: 12023 - DNA, 25 bp, Homo sapien
aagggcaagaacacctattgagtgc

SEQ ID NO: 12024 - DNA, 25 bp, Homo sapien
ttgagtgcctgtcctcagagacaca

SEQ ID NO: 12025 - DNA, 25 bp, Homo sapien
attaaatgatgtgaaggccatcact

SEQ ID NO: 12026 - DNA, 25 bp, Homo sapien
aagaaaataagagataccactaccg

SEQ ID NO: 12027 - DNA, 25 bp, Homo sapien
caaattaaacagctggaaagttaac

SEQ ID NO: 12028 - DNA, 25 bp, Homo sapien
gtcccaagccgacgatggagccgct

SEQ ID NO: 12029 - DNA, 25 bp, Homo sapien
ctcctggcgatgtccgcagagaagg

SEQ ID NO: 12030 - DNA, 25 bp, Homo sapien
cccggtggtgacctctaaggccatc

SEQ ID NO: 12031 - DNA, 25 bp, Homo sapien
ctaaaaatcacaatggccgcaggaa

SEQ ID NO: 12032 - DNA, 25 bp, Homo sapien
aaggacctggacactcagtggaccc

SEQ ID NO: 12033 - DNA, 25 bp, Homo sapien
aacactcaagaaaaaatgtatagaa

SEQ ID NO: 12034 - DNA, 25 bp, Homo sapien
aacgcttgtggggaagacaactgga

SEQ ID NO: 12035 - DNA, 25 bp, Homo sapien
tgaccctaaaaatcacaatggccgc

SEQ ID NO: 12036 - DNA, 25 bp, Homo sapien
cccaaggacctggacactcagtgga

SEQ ID NO: 12037 - DNA, 25 bp, Homo sapien
catcggaggccctgggaaaacgctt

SEQ ID NO: 12038 - DNA, 25 bp, Homo sapien
atctgcgtcccaagccgacgatgga

SEQ ID NO: 12039 - DNA, 25 bp, Homo sapien
tgtgactaagtgtaccggagatgaa

SEQ ID NO: 12040 - DNA, 25 bp, Homo sapien
ttcatctccggtacacttagtcaca

SEQ ID NO: 12041 - DNA, 25 bp, Homo sapien
ctgtgcagaggatcaacccaagatg

SEQ ID NO: 12042 - DNA, 25 bp, Homo sapien
cttgttttgattgttgcaggctgtt

SEQ ID NO: 12043 - DNA, 25 bp, Homo sapien
tctcagcatctttaaggcagatgtt

SEQ ID NO: 12044 - DNA, 25 bp, Homo sapien
agatcttttttgagctgtacctttc

SEQ ID NO: 12045 - DNA, 25 bp, Homo sapien
gcaattggtgctggccctttaaata

SEQ ID NO: 12046 - DNA, 25 bp, Homo sapien
cttgaagatacttcagctggagggg

SEQ ID NO: 12047 - DNA, 25 bp, Homo sapien
gaggatcaacccaagatggaaattt

SEQ ID NO: 12048 - DNA, 25 bp, Homo sapien
tgtacctttccctgagcatgcagtc

SEQ ID NO: 12049 - DNA, 25 bp, Homo sapien
gagcatgcagtcactgtctaatttt

SEQ ID NO: 12050 - DNA, 25 bp, Homo sapien
gcaggctgtttctgtgcagaggatc

SEQ ID NO: 12051 - DNA, 25 bp, Homo sapien
ttagggatagtttctgctgattttg

SEQ ID NO: 12052 - DNA, 25 bp, Homo sapien
agggaggggaatgttcttctctaat

SEQ ID NO: 12053 - DNA, 25 bp, Homo sapien
tgtcctggtagaccatggtggcaaa

SEQ ID NO: 12054 - DNA, 25 bp, Homo sapien
gaatatacactggacaaaaagactc

SEQ ID NO: 12055 - DNA, 25 bp, Homo sapien
tgaacagaatgcaacttaggaactc

SEQ ID NO: 12056 - DNA, 25 bp, Homo sapien
aggatcagctctcgaagcaccacca

SEQ ID NO: 12057 - DNA, 25 bp, Homo sapien
tctaatcagaggagcaatagtacca

SEQ ID NO: 12058 - DNA, 25 bp, Homo sapien
tagggtgtgatttcaacagtgagtg

SEQ ID NO: 12059 - DNA, 25 bp, Homo sapien
gactaaactgtacatagggtgtgat

SEQ ID NO: 12060 - DNA, 25 bp, Homo sapien
atagtaccaaaaggtggggcaaatc

SEQ ID NO: 12061 - DNA, 25 bp, Homo sapien
ctagggaaaatgacataagcaagac

SEQ ID NO: 12062 - DNA, 25 bp, Homo sapien
caaaccagtggagagcttaccattt

SEQ ID NO: 12063 - DNA, 25 bp, Homo sapien
acaagacatttctgggaaaagcctc

SEQ ID NO: 12064 - DNA, 25 bp, Homo sapien
gaaaagcctctcatgaggcaggtcc

SEQ ID NO: 12065 - DNA, 25 bp, Homo sapien
taaacactgattcctttacaaaggc

SEQ ID NO: 12066 - DNA, 25 bp, Homo sapien
tcatgaggcaggtccgggccaattt

SEQ ID NO: 12067 - DNA, 25 bp, Homo sapien
ctcccggcgcaagtaaacactgatt

SEQ ID NO: 12068 - DNA, 25 bp, Homo sapien
gctctcccggcgcaagtaaacactg

SEQ ID NO: 12069 - DNA, 25 bp, Homo sapien
caatttcacgcgtgtcgcaggagct

SEQ ID NO: 12070 - DNA, 25 bp, Homo sapien
tccgggccaatttcacgcgtgtcgc

SEQ ID NO: 12071 - DNA, 25 bp, Homo sapien
gcaggtccgggccaatttcacgcgt

SEQ ID NO: 12072 - DNA, 25 bp, Homo sapien
tacaaaggctttaacaagacatttc

SEQ ID NO: 12073 - DNA, 25 bp, Homo sapien
taacaagacatttctgggaaaagcc

SEQ ID NO: 12074 - DNA, 25 bp, Homo sapien
tgtaggacccagttcaaaatgaaga

SEQ ID NO: 12075 - DNA, 25 bp, Homo sapien
gaaactgaaatgtaggaagactgaa

SEQ ID NO: 12076 - DNA, 25 bp, Homo sapien
tagaccaagtttgtcagcctggggt

SEQ ID NO: 12077 - DNA, 25 bp, Homo sapien
ggagaactcaccgtaaatgtgggat

SEQ ID NO: 12078 - DNA, 25 bp, Homo sapien
aaatgtgggattgctgttcaaacac

SEQ ID NO: 12079 - DNA, 25 bp, Homo sapien
ttcaggtttgtactggagaactcac

SEQ ID NO: 12080 - DNA, 25 bp, Homo sapien
attattaagccagcagacggtgata

SEQ ID NO: 12081 - DNA, 25 bp, Homo sapien
agacggtgatagcagaacattacca

SEQ ID NO: 12082 - DNA, 25 bp, Homo sapien
ctggggtcaggatataatttgtagg

SEQ ID NO: 12083 - DNA, 25 bp, Homo sapien
gaatgacatgtccaagagcacctaa

SEQ ID NO: 12084 - DNA, 25 bp, Homo sapien
aacattaccaaacgcagggcccttc

SEQ ID NO: 12085 - DNA, 25 bp, Homo sapien
cccttaataaaaatccagcattcac

SEQ ID NO: 12086 - DNA, 25 bp, Homo sapien
cagcattcacttaagaatagctacc

SEQ ID NO: 12087 - DNA, 25 bp, Homo sapien
tcaacttagaaaacattgagacaat

SEQ ID NO: 12088 - DNA, 25 bp, Homo sapien
ttccagaaacctctacctgcctgtt

SEQ ID NO: 12089 - DNA, 25 bp, Homo sapien
ccttgcactatgcttccatggattg

SEQ ID NO: 12090 - DNA, 25 bp, Homo sapien
ttttacagttagactcttccctcac

SEQ ID NO: 12091 - DNA, 25 bp, Homo sapien
ttactacggagtcttcttgctgttt

SEQ ID NO: 12092 - DNA, 25 bp, Homo sapien
tacctgcctctgtcctataaagttt

SEQ ID NO: 12093 - DNA, 25 bp, Homo sapien
atggagggtgcttttaaatatctgt

SEQ ID NO: 12094 - DNA, 25 bp, Homo sapien
tgtgcttttatatatggagggtgct

SEQ ID NO: 12095 - DNA, 25 bp, Homo sapien
cttcttaaattactacggagtcttc

SEQ ID NO: 12096 - DNA, 25 bp, Homo sapien
actttggcagtgtagactggccttt

SEQ ID NO: 12097 - DNA, 25 bp, Homo sapien
ctggaagctaggaaatattaacaat

SEQ ID NO: 12098 - DNA, 25 bp, Homo sapien
cactgaagcaatttgaagttggact

SEQ ID NO: 12099 - DNA, 25 bp, Homo sapien
aaagaagcattcagttcagaaagga

SEQ ID NO: 12100 - DNA, 25 bp, Homo sapien
gtcagaagtgggttactatgtagtc

SEQ ID NO: 12101 - DNA, 25 bp, Homo sapien
tcatgagattcaattctggaagcta

SEQ ID NO: 12102 - DNA, 25 bp, Homo sapien
tcagtaacttgaatgaatcagcaac

SEQ ID NO: 12103 - DNA, 25 bp, Homo sapien
ctggcctttgtcagaagtgggttac

SEQ ID NO: 12104 - DNA, 25 bp, Homo sapien
agggaatggatcaccacagtaccca

SEQ ID NO: 12105 - DNA, 25 bp, Homo sapien
gtgggttctcagtggcaaattacaa

SEQ ID NO: 12106 - DNA, 25 bp, Homo sapien
tctgcttccactgggaggcatgcta

SEQ ID NO: 12107 - DNA, 25 bp, Homo sapien
ctacccaatgagagacaggaactaa

SEQ ID NO: 12108 - DNA, 25 bp, Homo sapien
aactattagagcatctgtatactac

SEQ ID NO: 12109 - DNA, 25 bp, Homo sapien
cgcttaacctaatagggaacttgga

SEQ ID NO: 12110 - DNA, 25 bp, Homo sapien
tactgaaggccaaagtaggatatgt

SEQ ID NO: 12111 - DNA, 25 bp, Homo sapien
gtatactactacagacttcataggt

SEQ ID NO: 12112 - DNA, 25 bp, Homo sapien
tgtgaagcaacgtcagagatagttt

SEQ ID NO: 12113 - DNA, 25 bp, Homo sapien
atctgtctacctacccaatgagaga

SEQ ID NO: 12114 - DNA, 25 bp, Homo sapien
cgtcagagatagtttattcgcttaa

SEQ ID NO: 12115 - DNA, 25 bp, Homo sapien
tttatacaatactgaaggccaaagt

SEQ ID NO: 12116 - DNA, 25 bp, Homo sapien
ttgcagtttcatgtaggttaatctc

SEQ ID NO: 12117 - DNA, 25 bp, Homo sapien
gtaggatatgtgaagcaacgtcaga

SEQ ID NO: 12118 - DNA, 25 bp, Homo sapien
cccacaataatcctagaaagcactt

SEQ ID NO: 12119 - DNA, 25 bp, Homo sapien
acagtattttgtagaccttacccta

SEQ ID NO: 12120 - DNA, 25 bp, Homo sapien
aatagatgagaagtctgatgcctac

SEQ ID NO: 12121 - DNA, 25 bp, Homo sapien
tttgactaggttttagacaagccca

SEQ ID NO: 12122 - DNA, 25 bp, Homo sapien
acagttgctttgtagttaacctctt

SEQ ID NO: 12123 - DNA, 25 bp, Homo sapien
cagctttcttagcttgagcctccaa

SEQ ID NO: 12124 - DNA, 25 bp, Homo sapien
taggttttagacaagcccattggct

SEQ ID NO: 12125 - DNA, 25 bp, Homo sapien
tgatgcctacttacagttgctttgt

SEQ ID NO: 12126 - DNA, 25 bp, Homo sapien
aagcacttgatagaacccttctact

SEQ ID NO: 12127 - DNA, 25 bp, Homo sapien
gtttaccaacctcaccatgatatgt

SEQ ID NO: 12128 - DNA, 25 bp, Homo sapien
tatgagcgagccatagcttagctct

SEQ ID NO: 12129 - DNA, 25 bp, Homo sapien
aagttgtccactttcggcagagaaa

SEQ ID NO: 12130 - DNA, 25 bp, Homo sapien
cagtccctctagcagtgatgtggaa

SEQ ID NO: 12131 - DNA, 25 bp, Homo sapien
atgcagcaaagtacggggagtaata

SEQ ID NO: 12132 - DNA, 25 bp, Homo sapien
gagtaatactgggatagccaggcca

SEQ ID NO: 12133 - DNA, 25 bp, Homo sapien
ttaggaggctggtgcaattgtttca

SEQ ID NO: 12134 - DNA, 25 bp, Homo sapien
tgctccaggaaagtcacgtgaaaat

SEQ ID NO: 12135 - DNA, 25 bp, Homo sapien
caagatagggaatgaaatgcagcat

SEQ ID NO: 12136 - DNA, 25 bp, Homo sapien
attccctgaggttgtacaatggggc

SEQ ID NO: 12137 - DNA, 25 bp, Homo sapien
tcggcagagaaaactaaccagactt

SEQ ID NO: 12138 - DNA, 25 bp, Homo sapien
gatgggaccattaaccaagataggg

SEQ ID NO: 12139 - DNA, 25 bp, Homo sapien
ggaagacgatagctaagagatcaat

SEQ ID NO: 12140 - DNA, 25 bp, Homo sapien
cagttaagtgttaaacaagtgaaga

SEQ ID NO: 12141 - DNA, 25 bp, Homo sapien
gtatatccctaaactgctgagcctc

SEQ ID NO: 12142 - DNA, 25 bp, Homo sapien
tgtgaccattaccattaaaacgttc

SEQ ID NO: 12143 - DNA, 25 bp, Homo sapien
ctcacaggatgcctaccaacagcat

SEQ ID NO: 12144 - DNA, 25 bp, Homo sapien
aaacgttcacgtcctggcctataca

SEQ ID NO: 12145 - DNA, 25 bp, Homo sapien
ggttcttcaagttagctggacgttc

SEQ ID NO: 12146 - DNA, 25 bp, Homo sapien
gctgagcctcaacactcacaggatg

SEQ ID NO: 12147 - DNA, 25 bp, Homo sapien
taaggctctaaatgaccagagagaa

SEQ ID NO: 12148 - DNA, 25 bp, Homo sapien
tgaagaatctcaacaaaatacatat

SEQ ID NO: 12149 - DNA, 25 bp, Homo sapien
ttagctggacgttctatgaggtcag

SEQ ID NO: 12150 - DNA, 25 bp, Homo sapien
ggtcagggagcaagtgtatatccct

SEQ ID NO: 12151 - DNA, 25 bp, Homo sapien
catctgtagagttcccataagtgct

SEQ ID NO: 12152 - DNA, 25 bp, Homo sapien
aaggggcatgtgtagagtatcttta

SEQ ID NO: 12153 - DNA, 25 bp, Homo sapien
agatgtgagcctggcccaagtattc

SEQ ID NO: 12154 - DNA, 25 bp, Homo sapien
aatagatgtaaagtatggataattc

SEQ ID NO: 12155 - DNA, 25 bp, Homo sapien
ttaaacaagtcctgtagggatggac

SEQ ID NO: 12156 - DNA, 25 bp, Homo sapien
cacttcagatgtgtagaaatccatc

SEQ ID NO: 12157 - DNA, 25 bp, Homo sapien
gtgtggccaatgcatcacttcagat

SEQ ID NO: 12158 - DNA, 25 bp, Homo sapien
ccagtttgctgtagcaggcagctct

SEQ ID NO: 12159 - DNA, 25 bp, Homo sapien
tagagtatctttagcgacgggaaat

SEQ ID NO: 12160 - DNA, 25 bp, Homo sapien
acgggaaatttcacgaaggcatcac

SEQ ID NO: 12161 - DNA, 25 bp, Homo sapien
ctgcttctgaaattgtagtaggtac

SEQ ID NO: 12162 - DNA, 25 bp, Homo sapien
gagcaggagcaaatgaagaaaagtc

SEQ ID NO: 12163 - DNA, 25 bp, Homo sapien
atacaagctctgcagacagctacta

SEQ ID NO: 12164 - DNA, 25 bp, Homo sapien
tgaagaaaagtcgagctcctgatat

SEQ ID NO: 12165 - DNA, 25 bp, Homo sapien
gaattgcgaactcaaatttcctgcc

SEQ ID NO: 12166 - DNA, 25 bp, Homo sapien
ggctacaagatcaagttccagacac

SEQ ID NO: 12167 - DNA, 25 bp, Homo sapien
attgtgttatagtcatggttgccat

SEQ ID NO: 12168 - DNA, 25 bp, Homo sapien
ctgatatttggagcttgatgggaac

SEQ ID NO: 12169 - DNA, 25 bp, Homo sapien
ctgtgacattggctctacttactag

SEQ ID NO: 12170 - DNA, 25 bp, Homo sapien
agacagctactactcttctggctac

SEQ ID NO: 12171 - DNA, 25 bp, Homo sapien
agaattgacactgatcctgggagca

SEQ ID NO: 12172 - DNA, 25 bp, Homo sapien
agttccagacacagaattgacactg

SEQ ID NO: 12173 - DNA, 25 bp, Homo sapien
agggaatatgccactgagtaaagcc

SEQ ID NO: 12174 - DNA, 25 bp, Homo sapien
gtatacaggaaaacccaagcagcta

SEQ ID NO: 12175 - DNA, 25 bp, Homo sapien
tggtatacaggaaaacccaagcagc

SEQ ID NO: 12176 - DNA, 25 bp, Homo sapien
tacaggaaaacccaagcagctagat

SEQ ID NO: 12177 - DNA, 25 bp, Homo sapien
ccatggtatacaggaaaacccaagc

SEQ ID NO: 12178 - DNA, 25 bp, Homo sapien
cagaagccccatggtatacaggaaa

SEQ ID NO: 12179 - DNA, 25 bp, Homo sapien
ggtatacaggaaaacccaagcagct

SEQ ID NO: 12180 - DNA, 25 bp, Homo sapien
tatacaggaaaacccaagcagctag

SEQ ID NO: 12181 - DNA, 25 bp, Homo sapien
caggaaaacccaagcagctagatac

SEQ ID NO: 12182 - DNA, 25 bp, Homo sapien
cccatggtatacaggaaaacccaag

SEQ ID NO: 12183 - DNA, 25 bp, Homo sapien
atggtatacaggaaaacccaagcag

SEQ ID NO: 12184 - DNA, 25 bp, Homo sapien
agcaaactattgtaatttaaccaac

SEQ ID NO: 12185 - DNA, 25 bp, Homo sapien
gagggaggaaatagcaaactattgt

SEQ ID NO: 12186 - DNA, 25 bp, Homo sapien
gggcaccaagacaccagagtacaaa

SEQ ID NO: 12187 - DNA, 25 bp, Homo sapien
agggcaaaagggcaccaagacacca

SEQ ID NO: 12188 - DNA, 25 bp, Homo sapien
atgtatgcaaaggtcttcatgtgca

SEQ ID NO: 12189 - DNA, 25 bp, Homo sapien
aagacaccagagtacaaacctgatg

SEQ ID NO: 12190 - DNA, 25 bp, Homo sapien
aaaagggcaccaagacaccagagta

SEQ ID NO: 12191 - DNA, 25 bp, Homo sapien
cagctagatactgtagaacataaaa

SEQ ID NO: 12192 - DNA, 25 bp, Homo sapien
tatgcaaaggtcttcatgtgcaggt

SEQ ID NO: 12193 - DNA, 25 bp, Homo sapien
accagagtacaaacctgatgatgtc

SEQ ID NO: 12194 - DNA, 25 bp, Homo sapien
tgtgagggaggaaatagcaaactat

SEQ ID NO: 12195 - DNA, 25 bp, Homo sapien
atgacatgctgcctaccctcaggga

SEQ ID NO: 12196 - DNA, 25 bp, Homo sapien
ctgctcaggtgagaggacttcctca

SEQ ID NO: 12197 - DNA, 25 bp, Homo sapien
tgggaacatccgctctacaagccac

SEQ ID NO: 12198 - DNA, 25 bp, Homo sapien
tggcagcccaactcagggaacactt

SEQ ID NO: 12199 - DNA, 25 bp, Homo sapien
ttctgccagactgggaacatccgct

SEQ ID NO: 12200 - DNA, 25 bp, Homo sapien
ccctcagggaagaggctaagttcac

SEQ ID NO: 12201 - DNA, 25 bp, Homo sapien
tcagggaacacttgacagaagattc

SEQ ID NO: 12202 - DNA, 25 bp, Homo sapien
cacccacaggcataggattccaggc

SEQ ID NO: 12203 - DNA, 25 bp, Homo sapien
taggattccaggcactcacgacacc

SEQ ID NO: 12204 - DNA, 25 bp, Homo sapien
cagccagaagtggttatgacatgct

SEQ ID NO: 12205 - DNA, 25 bp, Homo sapien
gaggacttcctcactgttcaacacc

SEQ ID NO: 12206 - DNA, 25 bp, Homo sapien
ttcctaagtcccaggctgcgagcac

SEQ ID NO: 12207 - DNA, 25 bp, Homo sapien
ctgtgttcctaagtcccaggctgcg

SEQ ID NO: 12208 - DNA, 25 bp, Homo sapien
gtgttcctaagtcccaggctgcgag

SEQ ID NO: 12209 - DNA, 25 bp, Homo sapien
tgtttccctgtgttcctaagtccca

SEQ ID NO: 12210 - DNA, 25 bp, Homo sapien
taagtcccaggctgcgagcaccact

SEQ ID NO: 12211 - DNA, 25 bp, Homo sapien
agcaccactcgcctccctcgcggtg

SEQ ID NO: 12212 - DNA, 25 bp, Homo sapien
gttcctaagtcccaggctgcgagca

SEQ ID NO: 12213 - DNA, 25 bp, Homo sapien
ttggctgcctggactattttggccc

SEQ ID NO: 12214 - DNA, 25 bp, Homo sapien
atgtggaagctgtttccctgtgttc

SEQ ID NO: 12215 - DNA, 25 bp, Homo sapien
aagctgtttccctgtgttcctaagt

SEQ ID NO: 12216 - DNA, 25 bp, Homo sapien
ggtgtctggacagcgggatgtcttc

SEQ ID NO: 12217 - DNA, 25 bp, Homo sapien
ggtgcagccacagtggggatccttt

SEQ ID NO: 12218 - DNA, 25 bp, Homo sapien
gcagccttagtggagagaaaacaac

SEQ ID NO: 12219 - DNA, 25 bp, Homo sapien
ttcctaagtcccaggctgcgagcac

SEQ ID NO: 12220 - DNA, 25 bp, Homo sapien
cgggatgtcttccaggttcgtctcc

SEQ ID NO: 12221 - DNA, 25 bp, Homo sapien
agtggagagaaaacaacgcacctgc

SEQ ID NO: 12222 - DNA, 25 bp, Homo sapien
ttagtggagagaaaacaacgcacct

SEQ ID NO: 12223 - DNA, 25 bp, Homo sapien
cccagcagccttagtggagagaaaa

SEQ ID NO: 12224 - DNA, 25 bp, Homo sapien
gtctcctcactgttggcgccgggtc

SEQ ID NO: 12225 - DNA, 25 bp, Homo sapien
tagtggagagaaaacaacgcacctg

SEQ ID NO: 12226 - DNA, 25 bp, Homo sapien
gtggagagaaaacaacgcacctgcg

SEQ ID NO: 12227 - DNA, 25 bp, Homo sapien
tggagagaaaacaacgcacctgcgt

SEQ ID NO: 12228 - DNA, 25 bp, Homo sapien
gtagaaaaccattccattaagacag

SEQ ID NO: 12229 - DNA, 25 bp, Homo sapien
attaagacagcaacaagtgatctgg

SEQ ID NO: 12230 - DNA, 25 bp, Homo sapien
tacagctcctgtagaaaaccattcc

SEQ ID NO: 12231 - DNA, 25 bp, Homo sapien
agctcctgtagaaaaccattccatt

SEQ ID NO: 12232 - DNA, 25 bp, Homo sapien
tatgttacagctcctgtagaaaacc

SEQ ID NO: 12233 - DNA, 25 bp, Homo sapien
tccattaagacagcaacaagtgatc

SEQ ID NO: 12234 - DNA, 25 bp, Homo sapien
accattccattaagacagcaacaag

SEQ ID NO: 12235 - DNA, 25 bp, Homo sapien
aagtatgttacagctcctgtagaaa

SEQ ID NO: 12236 - DNA, 25 bp, Homo sapien
attccattaagacagcaacaagtga

SEQ ID NO: 12237 - DNA, 25 bp, Homo sapien
agacagcaacaagtgatctggattc

SEQ ID NO: 12238 - DNA, 25 bp, Homo sapien
taagacagcaacaagtgatctggat

SEQ ID NO: 12239 - DNA, 25 bp, Homo sapien
catggaagggtttagacttttaatg

SEQ ID NO: 12240 - DNA, 25 bp, Homo sapien
agacttttaatggtgccctggttta

SEQ ID NO: 12241 - DNA, 25 bp, Homo sapien
aaatgctggggccattcactgttaa

SEQ ID NO: 12242 - DNA, 25 bp, Homo sapien
ttttgcaggaccttaaggaagacac

SEQ ID NO: 12243 - DNA, 25 bp, Homo sapien
gccctggtttatctctggcatgata

SEQ ID NO: 12244 - DNA, 25 bp, Homo sapien
tgtggagaaacattttgcaggacct

SEQ ID NO: 12245 - DNA, 25 bp, Homo sapien
ctggggccattcactgttaaagaac

SEQ ID NO: 12246 - DNA, 25 bp, Homo sapien
agatgatgtagaagtccatggaagg

SEQ ID NO: 12247 - DNA, 25 bp, Homo sapien
ggcatgataaacaaaatgctggggc

SEQ ID NO: 12248 - DNA, 25 bp, Homo sapien
caggaccttaaggaagacacgtatt

SEQ ID NO: 12249 - DNA, 25 bp, Homo sapien
gagaaggcatgtggagaaacatttt

SEQ ID NO: 12250 - DNA, 25 bp, Homo sapien
aaacaagatgcaatctatctgctgc

SEQ ID NO: 12251 - DNA, 25 bp, Homo sapien
gaaacatagcaaaagttgaagcatt

SEQ ID NO: 12252 - DNA, 25 bp, Homo sapien
caactgcatataaaagggaaaacaa

SEQ ID NO: 12253 - DNA, 25 bp, Homo sapien
gcagatatgcccaaaacaagatgac

SEQ ID NO: 12254 - DNA, 25 bp, Homo sapien
aggaagcagacacaactgcatataa

SEQ ID NO: 12255 - DNA, 25 bp, Homo sapien
ataggactaaacatctaagttgacc

SEQ ID NO: 12256 - DNA, 25 bp, Homo sapien
ttctgggccactttggcacctgaac

SEQ ID NO: 12257 - DNA, 25 bp, Homo sapien
atataaatggatagggtgaggttta

SEQ ID NO: 12258 - DNA, 25 bp, Homo sapien
gaaaactcaggcttattgacgttaa

SEQ ID NO: 12259 - DNA, 25 bp, Homo sapien
acaagatgacacaggttaaatataa

SEQ ID NO: 12260 - DNA, 25 bp, Homo sapien
tatcaaagtaggtttcaagacaaaa

SEQ ID NO: 12261 - DNA, 25 bp, Homo sapien
taccagatgtagaaagaatgttctc

SEQ ID NO: 12262 - DNA, 25 bp, Homo sapien
aaactggggctctcttcaacatctg

SEQ ID NO: 12263 - DNA, 25 bp, Homo sapien
agaacaggaaagcatatcctttttc

SEQ ID NO: 12264 - DNA, 25 bp, Homo sapien
ctgctaagacgacaatcatctgaaa

SEQ ID NO: 12265 - DNA, 25 bp, Homo sapien
aagtcataatagcaaactggggctc

SEQ ID NO: 12266 - DNA, 25 bp, Homo sapien
tgtgtttaacagcagtcatgtcttt

SEQ ID NO: 12267 - DNA, 25 bp, Homo sapien
agagcactggcaatctgtgtttaac

SEQ ID NO: 12268 - DNA, 25 bp, Homo sapien
tcatttggaaattggaagaacagga

SEQ ID NO: 12269 - DNA, 25 bp, Homo sapien
ctggattcatctcagagcactggca

SEQ ID NO: 12270 - DNA, 25 bp, Homo sapien
acagcagtcatgtctttaccagatg

SEQ ID NO: 12271 - DNA, 25 bp, Homo sapien
aaatttcactgctaagacgacaatc

SEQ ID NO: 12272 - DNA, 25 bp, Homo sapien
accaaagcctcacacatagtgcgct

SEQ ID NO: 12273 - DNA, 25 bp, Homo sapien
tgtagatagtgctcctccagtcttc

SEQ ID NO: 12274 - DNA, 25 bp, Homo sapien
cagtttcacaaaggatccaagttct

SEQ ID NO: 12275 - DNA, 25 bp, Homo sapien
attggccaccgcaggcgctgctctg

SEQ ID NO: 12276 - DNA, 25 bp, Homo sapien
actggtttgcctaatactgactctc

SEQ ID NO: 12277 - DNA, 25 bp, Homo sapien
tatggcaggctccatctcaatggtc

SEQ ID NO: 12278 - DNA, 25 bp, Homo sapien
ttaagctccgtgtaagtgaatttat

SEQ ID NO: 12279 - DNA, 25 bp, Homo sapien
aggcgctgctctgtagatagtgctc

SEQ ID NO: 12280 - DNA, 25 bp, Homo sapien
ttaacaagaatgagcatgacctatt

SEQ ID NO: 12281 - DNA, 25 bp, Homo sapien
ttaccgtttcactcctatggcaggc

SEQ ID NO: 12282 - DNA, 25 bp, Homo sapien
ttctagaaacgactactggtttgcc

SEQ ID NO: 12283 - DNA, 25 bp, Homo sapien
tcttctttgtaatacgcgaacttaa

SEQ ID NO: 12284 - DNA, 25 bp, Homo sapien
ttaagttcgcgtattacaaagaaga

SEQ ID NO: 12285 - DNA, 25 bp, Homo sapien
ttagtacctgctaggtgtcagaccc

SEQ ID NO: 12286 - DNA, 25 bp, Homo sapien
ttatgaggtcagtatggtcaacagc

SEQ ID NO: 12287 - DNA, 25 bp, Homo sapien
cagcagtggcagctaacacttgctt

SEQ ID NO: 12288 - DNA, 25 bp, Homo sapien
cacacagttatcaacccgggcagtt

SEQ ID NO: 12289 - DNA, 25 bp, Homo sapien
accatggtgggtatagtttcgcttt

SEQ ID NO: 12290 - DNA, 25 bp, Homo sapien
agatgaaggtaacagtaatgagatc

SEQ ID NO: 12291 - DNA, 25 bp, Homo sapien
tccctcaggaaacttggtgctccat

SEQ ID NO: 12292 - DNA, 25 bp, Homo sapien
agaaagactgtgtacccagcacaac

SEQ ID NO: 12293 - DNA, 25 bp, Homo sapien
ggtgctccataaggacaggaaccat

SEQ ID NO: 12294 - DNA, 25 bp, Homo sapien
taatgagatcaacagcagagcagca

SEQ ID NO: 12295 - DNA, 25 bp, Homo sapien
ttgcgactgtgatgctacactgccc

SEQ ID NO: 12296 - DNA, 25 bp, Homo sapien
gcatgctgcttaatactagatcaat

SEQ ID NO: 12297 - DNA, 25 bp, Homo sapien
aagtccctgcaaagtttatagtcat

SEQ ID NO: 12298 - DNA, 25 bp, Homo sapien
tttattggaggccttaggaaccaca

SEQ ID NO: 12299 - DNA, 25 bp, Homo sapien
gctctctgggaagaccagacaggca

SEQ ID NO: 12300 - DNA, 25 bp, Homo sapien
ttttgcaaattgtatgactgtttat

SEQ ID NO: 12301 - DNA, 25 bp, Homo sapien
actagatcaatatgtgaaataaatt

SEQ ID NO: 12302 - DNA, 25 bp, Homo sapien
ggcaacagcaagtccctgcaaagtt

SEQ ID NO: 12303 - DNA, 25 bp, Homo sapien
aaatatgaaatgctagggaataatt

SEQ ID NO: 12304 - DNA, 25 bp, Homo sapien
ccagacaggcagatggcctgaaccc

SEQ ID NO: 12305 - DNA, 25 bp, Homo sapien
cttaggaaccacacaaggaactaaa

SEQ ID NO: 12306 - DNA, 25 bp, Homo sapien
gagataggagaatcattgcttgggc

SEQ ID NO: 12307 - DNA, 25 bp, Homo sapien
gaaggaccctaagagagactctagc

SEQ ID NO: 12308 - DNA, 25 bp, Homo sapien
gctagagtctctcttagggtccttc

SEQ ID NO: 12309 - DNA, 25 bp, Homo sapien
agtatggggaaagtcttgtgtaagt

SEQ ID NO: 12310 - DNA, 25 bp, Homo sapien
cggtcctggcggcttcagctttgaa

SEQ ID NO: 12311 - DNA, 25 bp, Homo sapien
ggaacatgtcctaggagtgggatca

SEQ ID NO: 12312 - DNA, 25 bp, Homo sapien
ggcctgctgttcttgggagttccca

SEQ ID NO: 12313 - DNA, 25 bp, Homo sapien
aagctgaagcagagaaagcttcctt

SEQ ID NO: 12314 - DNA, 25 bp, Homo sapien
tggggcaggtttgctcacttgcagt

SEQ ID NO: 12315 - DNA, 25 bp, Homo sapien
tgggatcaggtagcatgttttgcac

SEQ ID NO: 12316 - DNA, 25 bp, Homo sapien
aaagcttcctttggggcagcagttg

SEQ ID NO: 12317 - DNA, 25 bp, Homo sapien
agtgagactctccaggaaagctttg

SEQ ID NO: 12318 - DNA, 25 bp, Homo sapien
caaggcattctttggcggtcctggc

SEQ ID NO: 12319 - DNA, 25 bp, Homo sapien
acttgcagtctgaagtgttgggaaa

SEQ ID NO: 12320 - DNA, 25 bp, Homo sapien
gtttaacacaatatttctaacaaag

SEQ ID NO: 12321 - DNA, 25 bp, Homo sapien
ctttgttagaaatattgtgttaaac

SEQ ID NO: 12322 - DNA, 25 bp, Homo sapien
acgagccccatgtcgacatgtagga

SEQ ID NO: 12323 - DNA, 25 bp, Homo sapien
tcctacatgtcgacatggggctcgt

SEQ ID NO: 12324 - DNA, 25 bp, Homo sapien
aggcagcagctcaggctgatgtgtc

SEQ ID NO: 12325 - DNA, 25 bp, Homo sapien
taaccttctactggaagaatacctc

SEQ ID NO: 12326 - DNA, 25 bp, Homo sapien
ctaaagtggggcttttgaaaatcac

SEQ ID NO: 12327 - DNA, 25 bp, Homo sapien
agcagctcaggctgatgtgtcctgt

SEQ ID NO: 12328 - DNA, 25 bp, Homo sapien
tgtggcctgatctctaaagtggggc

SEQ ID NO: 12329 - DNA, 25 bp, Homo sapien
gcctggctagtttaacctagactgc

SEQ ID NO: 12330 - DNA, 25 bp, Homo sapien
atagtgaggactgagaaagtagcaa

SEQ ID NO: 12331 - DNA, 25 bp, Homo sapien
agaaagtagcaaggggcactgatgt

SEQ ID NO: 12332 - DNA, 25 bp, Homo sapien
tgatgtgtcctgtgcgatataaaaa

SEQ ID NO: 12333 - DNA, 25 bp, Homo sapien
tgtcctgtgcgatataaaaagctgt

SEQ ID NO: 12334 - DNA, 25 bp, Homo sapien
ggataatggactggagaaaaagctg

SEQ ID NO: 12335 - DNA, 25 bp, Homo sapien
ccgtgcccggccaactacataaatt

SEQ ID NO: 12336 - DNA, 25 bp, Homo sapien
aggaagatcgattgaactcaggagc

SEQ ID NO: 12337 - DNA, 25 bp, Homo sapien
ctgtaattaagtgctccgggaggcc

SEQ ID NO: 12338 - DNA, 25 bp, Homo sapien
acgtatctccagaaagtataggcac

SEQ ID NO: 12339 - DNA, 25 bp, Homo sapien
aggcacaacagcacatgcagtcatt

SEQ ID NO: 12340 - DNA, 25 bp, Homo sapien
tatctccagaaagtataggcacaac

SEQ ID NO: 12341 - DNA, 25 bp, Homo sapien
aaattcctaacaacgtatctccaga

SEQ ID NO: 12342 - DNA, 25 bp, Homo sapien
gtgcccggccaactacataaattcc

SEQ ID NO: 12343 - DNA, 25 bp, Homo sapien
agtcattcctgtaattaagtgctcc

SEQ ID NO: 12344 - DNA, 25 bp, Homo sapien
tcctaacaacgtatctccagaaagt

SEQ ID NO: 12345 - DNA, 25 bp, Homo sapien
ctccagaaagtataggcacaacagc

SEQ ID NO: 12346 - DNA, 25 bp, Homo sapien
taggaagcatgtctcagctagatac

SEQ ID NO: 12347 - DNA, 25 bp, Homo sapien
aaagaaccgaagaaagtactctctc

SEQ ID NO: 12348 - DNA, 25 bp, Homo sapien
gattccggttgtagcaccaggagaa

SEQ ID NO: 12349 - DNA, 25 bp, Homo sapien
accatgtgtgcctttcctgagagaa

SEQ ID NO: 12350 - DNA, 25 bp, Homo sapien
acacacttaggaaaatggtgaacaa

SEQ ID NO: 12351 - DNA, 25 bp, Homo sapien
tgtagcatcacatagactctgggaa

SEQ ID NO: 12352 - DNA, 25 bp, Homo sapien
ctatagataagtcccatgagacact

SEQ ID NO: 12353 - DNA, 25 bp, Homo sapien
aacaccaccaagaaccagattaacg

SEQ ID NO: 12354 - DNA, 25 bp, Homo sapien
tgagagaatcagtccctaacaccac

SEQ ID NO: 12355 - DNA, 25 bp, Homo sapien
atgcagtggtggttttgatctatca

SEQ ID NO: 12356 - DNA, 25 bp, Homo sapien
gggaagagccatcataccatgtgtg

SEQ ID NO: 12357 - DNA, 25 bp, Homo sapien
aaacatataacatccaggtctataa

SEQ ID NO: 12358 - DNA, 25 bp, Homo sapien
tttctgaagaatagttacaaaccta

SEQ ID NO: 12359 - DNA, 25 bp, Homo sapien
aaatatatctgctggcaacaagatc

SEQ ID NO: 12360 - DNA, 25 bp, Homo sapien
tatctgctggcaacaagatcaagtt

SEQ ID NO: 12361 - DNA, 25 bp, Homo sapien
catccaggtctataaatacattttc

SEQ ID NO: 12362 - DNA, 25 bp, Homo sapien
gatcaagttagattcacagtttgcc

SEQ ID NO: 12363 - DNA, 25 bp, Homo sapien
ctggcaacaagatcaagttagattc

SEQ ID NO: 12364 - DNA, 25 bp, Homo sapien
agttagattcacagtttgccagctc

SEQ ID NO: 12365 - DNA, 25 bp, Homo sapien
ctgctggcaacaagatcaagttaga

SEQ ID NO: 12366 - DNA, 25 bp, Homo sapien
agatactaaatagattaattcagtc

SEQ ID NO: 12367 - DNA, 25 bp, Homo sapien
agattcacagtttgccagctctttc

SEQ ID NO: 12368 - DNA, 25 bp, Homo sapien
aacacagactcttaccaggaagcca

SEQ ID NO: 12369 - DNA, 25 bp, Homo sapien
ttgcatcactaaagactgggttctt

SEQ ID NO: 12370 - DNA, 25 bp, Homo sapien
tcctcaccagctaagggatttaagc

SEQ ID NO: 12371 - DNA, 25 bp, Homo sapien
taccaggaagccaaaatatatctgc

SEQ ID NO: 12372 - DNA, 25 bp, Homo sapien
ggtagctctaaattgctgaagaaac

SEQ ID NO: 12373 - DNA, 25 bp, Homo sapien
aatagcaaacaagctaggggatttg

SEQ ID NO: 12374 - DNA, 25 bp, Homo sapien
aggaatttgtggatttagggtgcaa

SEQ ID NO: 12375 - DNA, 25 bp, Homo sapien
atagtcaagaaacaattggtagctc

SEQ ID NO: 12376 - DNA, 25 bp, Homo sapien
tttagggtgcaatactgatcagagg

SEQ ID NO: 12377 - DNA, 25 bp, Homo sapien
ctgatcagagggcaatatattgtcc

SEQ ID NO: 12378 - DNA, 25 bp, Homo sapien
atattgtccctggtaacacagactc

SEQ ID NO: 12379 - DNA, 25 bp, Homo sapien
cacgcctggccctgaaagctatttt

SEQ ID NO: 12380 - DNA, 25 bp, Homo sapien
acccatgttggtatctatgtttact

SEQ ID NO: 12381 - DNA, 25 bp, Homo sapien
cttggagtagaagtctgagctacca

SEQ ID NO: 12382 - DNA, 25 bp, Homo sapien
agtagaagtctgagctaccacgcct

SEQ ID NO: 12383 - DNA, 25 bp, Homo sapien
ctgaaagctattttatggaagaatt

SEQ ID NO: 12384 - DNA, 25 bp, Homo sapien
tacatgtgcgaccatgcccgctaat

SEQ ID NO: 12385 - DNA, 25 bp, Homo sapien
ttaaactaaagatctccaaatatta

SEQ ID NO: 12386 - DNA, 25 bp, Homo sapien
cgcctggccctgaaagctattttat

SEQ ID NO: 12387 - DNA, 25 bp, Homo sapien
agtagctacatgtgcgaccatgccc

SEQ ID NO: 12388 - DNA, 25 bp, Homo sapien
gaccatgcccgctaatttatcttaa

SEQ ID NO: 12389 - DNA, 25 bp, Homo sapien
tcataattacatacccatgttggta

SEQ ID NO: 12390 - DNA, 25 bp, Homo sapien
ggaaatggactgacaatggaatgtt

SEQ ID NO: 12391 - DNA, 25 bp, Homo sapien
gcattgaagaagcttaaaacaggaa

SEQ ID NO: 12392 - DNA, 25 bp, Homo sapien
tatcagactaaaaagggaaatggac

SEQ ID NO: 12393 - DNA, 25 bp, Homo sapien
atggaatgttctgagtgtttgagcc

SEQ ID NO: 12394 - DNA, 25 bp, Homo sapien
attcaggctgttaaaatgcttgctc

SEQ ID NO: 12395 - DNA, 25 bp, Homo sapien
agtggattacagttaaccagagctc

SEQ ID NO: 12396 - DNA, 25 bp, Homo sapien
ctgggtgtctaaaagtctggtgttt

SEQ ID NO: 12397 - DNA, 25 bp, Homo sapien
ttaaacggttgctggattgtactgc

SEQ ID NO: 12398 - DNA, 25 bp, Homo sapien
cagagctctgccgaaattaacattc

SEQ ID NO: 12399 - DNA, 25 bp, Homo sapien
tgatgtgaacaataccaggtccctg

SEQ ID NO: 12400 - DNA, 25 bp, Homo sapien
atggtggagttctgcaagccatctt

SEQ ID NO: 12401 - DNA, 25 bp, Homo sapien
atttcagcagcatacatggaatatt

SEQ ID NO: 12402 - DNA, 25 bp, Homo sapien
ataatgcaggaatacactgtacatc

SEQ ID NO: 12403 - DNA, 25 bp, Homo sapien
tgtgattggcacttaaggagagaca

SEQ ID NO: 12404 - DNA, 25 bp, Homo sapien
taaggagagacaaatgcttagatcc

SEQ ID NO: 12405 - DNA, 25 bp, Homo sapien
aaacccagtctagaggtatcacttc

SEQ ID NO: 12406 - DNA, 25 bp, Homo sapien
actgggctttaaggggaatcacaat

SEQ ID NO: 12407 - DNA, 25 bp, Homo sapien
attccatgggtaactggagtcagca

SEQ ID NO: 12408 - DNA, 25 bp, Homo sapien
agttgaggtcaaaattattaaagcc

SEQ ID NO: 12409 - DNA, 25 bp, Homo sapien
ctagaacgtgagaatgtagaaatct

SEQ ID NO: 12410 - DNA, 25 bp, Homo sapien
cagacccattagatctacaagatac

SEQ ID NO: 12411 - DNA, 25 bp, Homo sapien
agatccaaagagttttgaaagaccc

SEQ ID NO: 12412 - DNA, 25 bp, Homo sapien
tcgctcctaagcatcaagttttaac

SEQ ID NO: 12413 - DNA, 25 bp, Homo sapien
cttttaaacacctagaaagactaga

SEQ ID NO: 12414 - DNA, 25 bp, Homo sapien
aaagactagatgtttcaaactggac

SEQ ID NO: 12415 - DNA, 25 bp, Homo sapien
aagactagatgtttcaaactggact

SEQ ID NO: 12416 - DNA, 25 bp, Homo sapien
gaaagactagatgtttcaaactgga

SEQ ID NO: 12417 - DNA, 25 bp, Homo sapien
actagatgtttcaaactggacttaa

SEQ ID NO: 12418 - DNA, 25 bp, Homo sapien
cccaatgcaaccactcctaggaagt

SEQ ID NO: 12419 - DNA, 25 bp, Homo sapien
agactagatgtttcaaactggactt

SEQ ID NO: 12420 - DNA, 25 bp, Homo sapien
tgcttagaggggtgttacttaagcc

SEQ ID NO: 12421 - DNA, 25 bp, Homo sapien
caatgcaaccactcctaggaagtac

SEQ ID NO: 12422 - DNA, 25 bp, Homo sapien
atgaatagtctgcattcgctcctaa

SEQ ID NO: 12423 - DNA, 25 bp, Homo sapien
aagattccacctgtgattaaatttc

SEQ ID NO: 12424 - DNA, 25 bp, Homo sapien
atgcaggctcaggttaccattatac

SEQ ID NO: 12425 - DNA, 25 bp, Homo sapien
aacatgcaggctcaggttaccatta

SEQ ID NO: 12426 - DNA, 25 bp, Homo sapien
ataaaagaaatgctagaatcagaaa

SEQ ID NO: 12427 - DNA, 25 bp, Homo sapien
gaaatgctagaatcagaaaaccatc

SEQ ID NO: 12428 - DNA, 25 bp, Homo sapien
ataacatgcaggctcaggttaccat

SEQ ID NO: 12429 - DNA, 25 bp, Homo sapien
aaagaaatgctagaatcagaaaacc

SEQ ID NO: 12430 - DNA, 25 bp, Homo sapien
aaaaccatcattttaggctgggtgc

SEQ ID NO: 12431 - DNA, 25 bp, Homo sapien
tgaataacatgcaggctcaggttac

SEQ ID NO: 12432 - DNA, 25 bp, Homo sapien
ttgtcattccattgaaagaatattt

SEQ ID NO: 12433 - DNA, 25 bp, Homo sapien
aaaagctgtgctttacatagcaatc

SEQ ID NO: 12434 - DNA, 25 bp, Homo sapien
agttcctttcagttgtataagataa

SEQ ID NO: 12435 - DNA, 25 bp, Homo sapien
ttatcttatacaactgaaaggaact

SEQ ID NO: 12436 - DNA, 25 bp, Homo sapien
gattccatgcccactaagtaacatt

SEQ ID NO: 12437 - DNA, 25 bp, Homo sapien
taactaggggatgtaaacaagctcc

SEQ ID NO: 12438 - DNA, 25 bp, Homo sapien
ttcactttcaaaaggatgtgctgta

SEQ ID NO: 12439 - DNA, 25 bp, Homo sapien
tcaaaaggatgtgctgtaactaggg

SEQ ID NO: 12440 - DNA, 25 bp, Homo sapien
gttgcttcgattccatgcccactaa

SEQ ID NO: 12441 - DNA, 25 bp, Homo sapien
ctaggggatgtaaacaagctccatg

SEQ ID NO: 12442 - DNA, 25 bp, Homo sapien
atgtgctgtaactaggggatgtaaa

SEQ ID NO: 12443 - DNA, 25 bp, Homo sapien
atgcccactaagtaacattccagtt

SEQ ID NO: 12444 - DNA, 25 bp, Homo sapien
ttaagacaaggtatcaccctcggtc

SEQ ID NO: 12445 - DNA, 25 bp, Homo sapien
actttcaaaaggatgtgctgtaact

SEQ ID NO: 12446 - DNA, 25 bp, Homo sapien
ctgtaactaggggatgtaaacaagc

SEQ ID NO: 12447 - DNA, 25 bp, Homo sapien
aaaaaatgcagaaagggatacatga

SEQ ID NO: 12448 - DNA, 25 bp, Homo sapien
cagaaagggatacatgaaatgagaa

SEQ ID NO: 12449 - DNA, 25 bp, Homo sapien
ttgaagttggatgatgagtacagcc

SEQ ID NO: 12450 - DNA, 25 bp, Homo sapien
catgaaatgagaaaggcagcaaact

SEQ ID NO: 12451 - DNA, 25 bp, Homo sapien
gaaaggcagcaaactgttgttgaag

SEQ ID NO: 12452 - DNA, 25 bp, Homo sapien
ccaggtatgctcaagttctttatga

SEQ ID NO: 12453 - DNA, 25 bp, Homo sapien
tgacatgatgtccaggatttgcttt

SEQ ID NO: 12454 - DNA, 25 bp, Homo sapien
atccaagggggataattcctggacc

SEQ ID NO: 12455 - DNA, 25 bp, Homo sapien
gtacagccctccgttattatccaag

SEQ ID NO: 12456 - DNA, 25 bp, Homo sapien
cgcccgcctggccttgataaaaaca

SEQ ID NO: 12457 - DNA, 25 bp, Homo sapien
tggatgatgagtacagccctccgtt

SEQ ID NO: 12458 - DNA, 25 bp, Homo sapien
tgcccagccaagatctacactatta

SEQ ID NO: 12459 - DNA, 25 bp, Homo sapien
ctgcaactaagttacaaaagtatta

SEQ ID NO: 12460 - DNA, 25 bp, Homo sapien
tgcatgccatgccataggtactctt

SEQ ID NO: 12461 - DNA, 25 bp, Homo sapien
tcttatcataggttagcttgcttat

SEQ ID NO: 12462 - DNA, 25 bp, Homo sapien
cccaggacagttttgaatgcagttc

SEQ ID NO: 12463 - DNA, 25 bp, Homo sapien
atgcgtgtaatcccaaagcgttggg

SEQ ID NO: 12464 - DNA, 25 bp, Homo sapien
gcttattctggaatttcgcgtatac

SEQ ID NO: 12465 - DNA, 25 bp, Homo sapien
tggaatttcgcgtatacagatgcat

SEQ ID NO: 12466 - DNA, 25 bp, Homo sapien
atttcgcgtatacagatgcatgcca

SEQ ID NO: 12467 - DNA, 25 bp, Homo sapien
gtcttacccatgagtgacgggctgc

SEQ ID NO: 12468 - DNA, 25 bp, Homo sapien
cttgtcttacccatgagtgacgggc

SEQ ID NO: 12469 - DNA, 25 bp, Homo sapien
ttacaccggcttgaattgaaacatt

SEQ ID NO: 12470 - DNA, 25 bp, Homo sapien
caaaaggaaccagattgaaaaagat

SEQ ID NO: 12471 - DNA, 25 bp, Homo sapien
tgaaaaagatattgctgacatagcc

SEQ ID NO: 12472 - DNA, 25 bp, Homo sapien
ttattggtaagaaatagactcctaa

SEQ ID NO: 12473 - DNA, 25 bp, Homo sapien
tttcaaagtaggtaaaagccatcac

SEQ ID NO: 12474 - DNA, 25 bp, Homo sapien
ctgacatagccagtagtgagattac

SEQ ID NO: 12475 - DNA, 25 bp, Homo sapien
agttttccaaatgcgttgtcaagtt

SEQ ID NO: 12476 - DNA, 25 bp, Homo sapien
tcgtgctctccaagtggaaaggcaa

SEQ ID NO: 12477 - DNA, 25 bp, Homo sapien
tcctaaatagatgcagaaagcactt

SEQ ID NO: 12478 - DNA, 25 bp, Homo sapien
gttgttggcaactgtcgtgctctcc

SEQ ID NO: 12479 - DNA, 25 bp, Homo sapien
tgaaagctgtaaggtgttcactagt

SEQ ID NO: 12480 - DNA, 25 bp, Homo sapien
ccatgaaggtgctctggttagatta

SEQ ID NO: 12481 - DNA, 25 bp, Homo sapien
tggttcagacacattttgggaaagt

SEQ ID NO: 12482 - DNA, 25 bp, Homo sapien
tctgaatcaaataggcgaatgcatc

SEQ ID NO: 12483 - DNA, 25 bp, Homo sapien
cccaaaaaggctaacttacagacta

SEQ ID NO: 12484 - DNA, 25 bp, Homo sapien
ggaaaaatggcccaatacattggac

SEQ ID NO: 12485 - DNA, 25 bp, Homo sapien
ctaatctgggaaaggtaactctttg

SEQ ID NO: 12486 - DNA, 25 bp, Homo sapien
ctgcagagatacaaaagttcacatt

SEQ ID NO: 12487 - DNA, 25 bp, Homo sapien
ctgttctcacgaccagctgtgggtg

SEQ ID NO: 12488 - DNA, 25 bp, Homo sapien
ttgtccttgaaaccactgcagagat

SEQ ID NO: 12489 - DNA, 25 bp, Homo sapien
taccaggcacacagatgaggtccca

SEQ ID NO: 12490 - DNA, 25 bp, Homo sapien
cacattgtatgacctggtgggtgtc

SEQ ID NO: 12491 - DNA, 25 bp, Homo sapien
tggcgagtgctaggccattcacaac

SEQ ID NO: 12492 - DNA, 25 bp, Homo sapien
agcaaaagtaggaaattcagcggca

SEQ ID NO: 12493 - DNA, 25 bp, Homo sapien
caggctttccaaggctaggaaggtt

SEQ ID NO: 12494 - DNA, 25 bp, Homo sapien
tgaaaccacattctggataagaact

SEQ ID NO: 12495 - DNA, 25 bp, Homo sapien
cctggggtttgctactgtaattcct

SEQ ID NO: 12496 - DNA, 25 bp, Homo sapien
agcagggacaggctttccaaggcta

SEQ ID NO: 12497 - DNA, 25 bp, Homo sapien
tagctcagagtgacttccctattcc

SEQ ID NO: 12498 - DNA, 25 bp, Homo sapien
ctatcctagagaatgagcaaaagta

SEQ ID NO: 12499 - DNA, 25 bp, Homo sapien
accagactggcgagtgctaggccat

SEQ ID NO: 12500 - DNA, 25 bp, Homo sapien
tgctccagcaactaagaccaccaat

SEQ ID NO: 12501 - DNA, 25 bp, Homo sapien
tcgacaatttctagctcagagtgac

SEQ ID NO: 12502 - DNA, 25 bp, Homo sapien
agatccctccgtagtctcaggacca

SEQ ID NO: 12503 - DNA, 25 bp, Homo sapien
tctcaggaccataaattgtgaagaa

SEQ ID NO: 12504 - DNA, 25 bp, Homo sapien
tagtctcaggaccataaattgtgaa

SEQ ID NO: 12505 - DNA, 25 bp, Homo sapien
gtagatccctccgtagtctcaggac

SEQ ID NO: 12506 - DNA, 25 bp, Homo sapien
tggtagatccctccgtagtctcagg

SEQ ID NO: 12507 - DNA, 25 bp, Homo sapien
tcaggaccataaattgtgaagaata

SEQ ID NO: 12508 - DNA, 25 bp, Homo sapien
cctccgtagtctcaggaccataaat

SEQ ID NO: 12509 - DNA, 25 bp, Homo sapien
tctggtagatccctccgtagtctca

SEQ ID NO: 12510 - DNA, 25 bp, Homo sapien
tccgtagtctcaggaccataaattg

SEQ ID NO: 12511 - DNA, 25 bp, Homo sapien
atccctccgtagtctcaggaccata

SEQ ID NO: 12512 - DNA, 25 bp, Homo sapien
cgtagtctcaggaccataaattgtg

SEQ ID NO: 12513 - DNA, 25 bp, Homo sapien
gaggagcaaaacaaaattggataca

SEQ ID NO: 12514 - DNA, 25 bp, Homo sapien
ttcagatggtaacccatggcagtgg

SEQ ID NO: 12515 - DNA, 25 bp, Homo sapien
agttggccattgtgagtatctttga

SEQ ID NO: 12516 - DNA, 25 bp, Homo sapien
cttggtgaccacatgaaaaggagga

SEQ ID NO: 12517 - DNA, 25 bp, Homo sapien
cagtattcacacacagttggccatt

SEQ ID NO: 12518 - DNA, 25 bp, Homo sapien
atgaatcagggttcagatggtaacc

SEQ ID NO: 12519 - DNA, 25 bp, Homo sapien
aacaaccaccaccaggcaacaagtt

SEQ ID NO: 12520 - DNA, 25 bp, Homo sapien
tccactttagggtaattgagattta

SEQ ID NO: 12521 - DNA, 25 bp, Homo sapien
ggaaaaaagcttggtgaccacatga

SEQ ID NO: 12522 - DNA, 25 bp, Homo sapien
ggcaacaagttcctaggttagatac

SEQ ID NO: 12523 - DNA, 25 bp, Homo sapien
aaatgaaatgactttgccaactatt

SEQ ID NO: 12524 - DNA, 25 bp, Homo sapien
gcatctgaagaatcactcatgaaac

SEQ ID NO: 12525 - DNA, 25 bp, Homo sapien
tatacccacgggaggcatactttct

SEQ ID NO: 12526 - DNA, 25 bp, Homo sapien
cttgataaccagatacatacagtac

SEQ ID NO: 12527 - DNA, 25 bp, Homo sapien
acagacatttggctcagttgataag

SEQ ID NO: 12528 - DNA, 25 bp, Homo sapien
ctgcagtaagtttccaaaaagggga

SEQ ID NO: 12529 - DNA, 25 bp, Homo sapien
aaggaaacacaattgcacacagaca

SEQ ID NO: 12530 - DNA, 25 bp, Homo sapien
aactaaccagttgggaagggcatct

SEQ ID NO: 12531 - DNA, 25 bp, Homo sapien
acctcacatagggagaggttgtcaa

SEQ ID NO: 12532 - DNA, 25 bp, Homo sapien
atatacattaagaaggggaaacggc

SEQ ID NO: 12533 - DNA, 25 bp, Homo sapien
gaaacggcagacaattgtattccac

SEQ ID NO: 12534 - DNA, 25 bp, Homo sapien
gttgtcaaggcacaaaacctgcagt

SEQ ID NO: 12535 - DNA, 25 bp, Homo sapien
ccgggaccagtctcttcagaaagcc

SEQ ID NO: 12536 - DNA, 25 bp, Homo sapien
tacatcccaaggacatccgggacca

SEQ ID NO: 12537 - DNA, 25 bp, Homo sapien
taggtcaaagtgttcacccatcatt

SEQ ID NO: 12538 - DNA, 25 bp, Homo sapien
ctcctaaacacgacttgctctgggg

SEQ ID NO: 12539 - DNA, 25 bp, Homo sapien
gctgcctggctggttccttgaatgc

SEQ ID NO: 12540 - DNA, 25 bp, Homo sapien
tacaaaggccaattcaataagctcc

SEQ ID NO: 12541 - DNA, 25 bp, Homo sapien
tccttgaatgcctccagtgagctat

SEQ ID NO: 12542 - DNA, 25 bp, Homo sapien
aaggacatccgggaccagtctcttc

SEQ ID NO: 12543 - DNA, 25 bp, Homo sapien
cttcagaaagccatgacccaaaggt

SEQ ID NO: 12544 - DNA, 25 bp, Homo sapien
tccagtgagctatgggctccctaca

SEQ ID NO: 12545 - DNA, 25 bp, Homo sapien
tgttaacaaacataggtcaaagtgt

SEQ ID NO: 12546 - DNA, 25 bp, Homo sapien
ggtaaaattcgcaatgcctcaggca

SEQ ID NO: 12547 - DNA, 25 bp, Homo sapien
tgcctcaggcatcaacccgagagta

SEQ ID NO: 12548 - DNA, 25 bp, Homo sapien
cccaagcaagcctctagagaattat

SEQ ID NO: 12549 - DNA, 25 bp, Homo sapien
tctgcaaaagtttagtagagacatg

SEQ ID NO: 12550 - DNA, 25 bp, Homo sapien
gcagaaactcgtaaagacgacagcc

SEQ ID NO: 12551 - DNA, 25 bp, Homo sapien
aaaacacccagcacgcaacatggta

SEQ ID NO: 12552 - DNA, 25 bp, Homo sapien
acaggaaggcagcataataggaccc

SEQ ID NO: 12553 - DNA, 25 bp, Homo sapien
tccagaaaagtgagcagctaaaact

SEQ ID NO: 12554 - DNA, 25 bp, Homo sapien
agcctcctgaaaccgaccctgatat

SEQ ID NO: 12555 - DNA, 25 bp, Homo sapien
aattgaattacaacacgaggtgaca

SEQ ID NO: 12556 - DNA, 25 bp, Homo sapien
cccgagagtaccaggcccacaggaa

SEQ ID NO: 12557 - DNA, 25 bp, Homo sapien
ccaggtgttctttgccagatcccca

SEQ ID NO: 12558 - DNA, 25 bp, Homo sapien
gactccaaatggacaccttcccgat

SEQ ID NO: 12559 - DNA, 25 bp, Homo sapien
aatcattgagcagccttcacacatc

SEQ ID NO: 12560 - DNA, 25 bp, Homo sapien
ggatgactccaaatggacaccttcc

SEQ ID NO: 12561 - DNA, 25 bp, Homo sapien
gctgacgctgcctctttgaagtgct

SEQ ID NO: 12562 - DNA, 25 bp, Homo sapien
gggtgcccgggctcagctgtcccat

SEQ ID NO: 12563 - DNA, 25 bp, Homo sapien
taaacctcaaaatcattgagcagcc

SEQ ID NO: 12564 - DNA, 25 bp, Homo sapien
aaacttcatgcctccaaggcttgag

SEQ ID NO: 12565 - DNA, 25 bp, Homo sapien
ttgaagtgcttgtcttccctgctac

SEQ ID NO: 12566 - DNA, 25 bp, Homo sapien
ttctgtcttccttaccacctgggca

SEQ ID NO: 12567 - DNA, 25 bp, Homo sapien
tcatgcctccaaggcttgagggtgc

SEQ ID NO: 12568 - DNA, 25 bp, Homo sapien
ttttcgcattctaactaacctggta

SEQ ID NO: 12569 - DNA, 25 bp, Homo sapien
aactaacctggtagtcttcccatgg

SEQ ID NO: 12570 - DNA, 25 bp, Homo sapien
gtgcttgcatttactgttgaagatc

SEQ ID NO: 12571 - DNA, 25 bp, Homo sapien
aacctggtagtcttcccatggaagc

SEQ ID NO: 12572 - DNA, 25 bp, Homo sapien
tggtagtcttcccatggaagcactt

SEQ ID NO: 12573 - DNA, 25 bp, Homo sapien
ttcccatggaagcactttcttttgc

SEQ ID NO: 12574 - DNA, 25 bp, Homo sapien
ctggagccttcttgtgcttgcattt

SEQ ID NO: 12575 - DNA, 25 bp, Homo sapien
ttgaagggccagaatgcccctttat

SEQ ID NO: 12576 - DNA, 25 bp, Homo sapien
ttgcatttactgttgaagatcattg

SEQ ID NO: 12577 - DNA, 25 bp, Homo sapien
gaagatcattgttttgaagggccag

SEQ ID NO: 12578 - DNA, 25 bp, Homo sapien
ttgaagatcattgttttgaagggcc

SEQ ID NO: 12579 - DNA, 25 bp, Homo sapien
tagtgcagctcacagcgtagccctt

SEQ ID NO: 12580 - DNA, 25 bp, Homo sapien
agctcacagcgtagcccttgggctt

SEQ ID NO: 12581 - DNA, 25 bp, Homo sapien
cagcagctcggacttggtgcttctt

SEQ ID NO: 12582 - DNA, 25 bp, Homo sapien
tagcccttgggcttggacgcctccg

SEQ ID NO: 12583 - DNA, 25 bp, Homo sapien
caggaggtgcgggtaaattctctaa

SEQ ID NO: 12584 - DNA, 25 bp, Homo sapien
ttggtgcttcttccacggcagcatc

SEQ ID NO: 12585 - DNA, 25 bp, Homo sapien
cctcgccagcagctcggacttggtg

SEQ ID NO: 12586 - DNA, 25 bp, Homo sapien
cagccagcgagctgagcgccgagta

SEQ ID NO: 12587 - DNA, 25 bp, Homo sapien
gcgcgcgtgcaaataaagagagccc

SEQ ID NO: 12588 - DNA, 25 bp, Homo sapien
ttccacggcagcatctccggagggc

SEQ ID NO: 12589 - DNA, 25 bp, Homo sapien
ctagaagcgcgcgtgcaaataaaga

SEQ ID NO: 12590 - DNA, 25 bp, Homo sapien
ttctagcacaaacagtggagtggat

SEQ ID NO: 12591 - DNA, 25 bp, Homo sapien
ctgactattagaagtacagggacca

SEQ ID NO: 12592 - DNA, 25 bp, Homo sapien
caggaacagatcaaggctcagcttc

SEQ ID NO: 12593 - DNA, 25 bp, Homo sapien
ggcagcaagttcaggaacagatcaa

SEQ ID NO: 12594 - DNA, 25 bp, Homo sapien
gctcagcttcggacacagtgtgaaa

SEQ ID NO: 12595 - DNA, 25 bp, Homo sapien
gtgtggactgtcagcccactgacta

SEQ ID NO: 12596 - DNA, 25 bp, Homo sapien
tgtgaaaagtctgcggcatgaccga

SEQ ID NO: 12597 - DNA, 25 bp, Homo sapien
gagggaaggtgccaacaatatctcc

SEQ ID NO: 12598 - DNA, 25 bp, Homo sapien
ttcggacacagtgtgaaaagtctgc

SEQ ID NO: 12599 - DNA, 25 bp, Homo sapien
actattagaagtacagggaccaata

SEQ ID NO: 12600 - DNA, 25 bp, Homo sapien
aagttcaggaacagatcaaggctca

SEQ ID NO: 12601 - DNA, 25 bp, Homo sapien
cctctgtgaaggacagattattccc

SEQ ID NO: 12602 - DNA, 25 bp, Homo sapien
agccctgtaacctggcatcaggatc

SEQ ID NO: 12603 - DNA, 25 bp, Homo sapien
gcagagccttggagccaccatctct

SEQ ID NO: 12604 - DNA, 25 bp, Homo sapien
aggaagctgagactgagtttaagta

SEQ ID NO: 12605 - DNA, 25 bp, Homo sapien
tcagttccaggataggtgatgagaa

SEQ ID NO: 12606 - DNA, 25 bp, Homo sapien
ggccgctggcctgctgactgattct

SEQ ID NO: 12607 - DNA, 25 bp, Homo sapien
aaatgaccataatcctctgtgaagg

SEQ ID NO: 12608 - DNA, 25 bp, Homo sapien
ctctgagccggccaaccagcaggag

SEQ ID NO: 12609 - DNA, 25 bp, Homo sapien
ctgcaagccattcacgttggcaggc

SEQ ID NO: 12610 - DNA, 25 bp, Homo sapien
aagtaattgcattcagttccaggat

SEQ ID NO: 12611 - DNA, 25 bp, Homo sapien
ctgcgaggacagtggctctttccca

SEQ ID NO: 12612 - DNA, 25 bp, Homo sapien
agggtttatgctgtcactaggatac

SEQ ID NO: 12613 - DNA, 25 bp, Homo sapien
aaagagaagcgaaaagcaataatac

SEQ ID NO: 12614 - DNA, 25 bp, Homo sapien
tttggaccctatggcagatatggct

SEQ ID NO: 12615 - DNA, 25 bp, Homo sapien
aactggctcccaacagaagcagaaa

SEQ ID NO: 12616 - DNA, 25 bp, Homo sapien
gcgtaagaagaaaactggctcccaa

SEQ ID NO: 12617 - DNA, 25 bp, Homo sapien
tcaatcagtgctcccggcttagcct

SEQ ID NO: 12618 - DNA, 25 bp, Homo sapien
atggataaccatttcacgcagtatt

SEQ ID NO: 12619 - DNA, 25 bp, Homo sapien
tatggctgctaaatttgacgttctc

SEQ ID NO: 12620 - DNA, 25 bp, Homo sapien
tagaaacggtctctctgtgtcatcc

SEQ ID NO: 12621 - DNA, 25 bp, Homo sapien
tcacgcagtattccatccaaaaaag

SEQ ID NO: 12622 - DNA, 25 bp, Homo sapien
tctctctgtaatgcggcgtaagaag

SEQ ID NO: 12623 - DNA, 25 bp, Homo sapien
tggagaagggatcgtcccatatttc

SEQ ID NO: 12624 - DNA, 25 bp, Homo sapien
atttagtaagagtgggttatctcac

SEQ ID NO: 12625 - DNA, 25 bp, Homo sapien
actgcccagggtgcatgtttgtatt

SEQ ID NO: 12626 - DNA, 25 bp, Homo sapien
aaagaaaagaccttcgagcggctat

SEQ ID NO: 12627 - DNA, 25 bp, Homo sapien
gggcttggaaacattgctggtaacc

SEQ ID NO: 12628 - DNA, 25 bp, Homo sapien
cccagtacaagtatggcaagaaccg

SEQ ID NO: 12629 - DNA, 25 bp, Homo sapien
ccttcgagcggctattgaagtgaac

SEQ ID NO: 12630 - DNA, 25 bp, Homo sapien
ggcccagctccgcaaggaaagaaaa

SEQ ID NO: 12631 - DNA, 25 bp, Homo sapien
ctcacagtgtttcttggggcttgga

SEQ ID NO: 12632 - DNA, 25 bp, Homo sapien
ttctcaagatgctgcccagtacaag

SEQ ID NO: 12633 - DNA, 25 bp, Homo sapien
atgccaagcggctacagaccaaaga

SEQ ID NO: 12634 - DNA, 25 bp, Homo sapien
attaatttggaagttggaggtcttc

SEQ ID NO: 12635 - DNA, 25 bp, Homo sapien
ggagagaattaatttggaagttgga

SEQ ID NO: 12636 - DNA, 25 bp, Homo sapien
tcaaattaggaaagtctgacaaata

SEQ ID NO: 12637 - DNA, 25 bp, Homo sapien
ggtcttcaaattaggaaagtctgac

SEQ ID NO: 12638 - DNA, 25 bp, Homo sapien
ttaatttggaagttggaggtcttca

SEQ ID NO: 12639 - DNA, 25 bp, Homo sapien
agaattaatttggaagttggaggtc

SEQ ID NO: 12640 - DNA, 25 bp, Homo sapien
aaatgatagattcaaaattctaaac

SEQ ID NO: 12641 - DNA, 25 bp, Homo sapien
gaggtcttcaaattaggaaagtctg

SEQ ID NO: 12642 - DNA, 25 bp, Homo sapien
agagaattaatttggaagttggagg

SEQ ID NO: 12643 - DNA, 25 bp, Homo sapien
cttcaaattaggaaagtctgacaaa

SEQ ID NO: 12644 - DNA, 25 bp, Homo sapien
gtcttcaaattaggaaagtctgaca

SEQ ID NO: 12645 - DNA, 25 bp, Homo sapien
ccatatgtttaagtgtttgtaaggc

SEQ ID NO: 12646 - DNA, 25 bp, Homo sapien
gttgagtaatcctgaaatgaatttc

SEQ ID NO: 12647 - DNA, 25 bp, Homo sapien
tgcatgttttaaaacgtagtacaaa

SEQ ID NO: 12648 - DNA, 25 bp, Homo sapien
ttgtgttttcagaataaacgaacta

SEQ ID NO: 12649 - DNA, 25 bp, Homo sapien
cttccaaataaagggatgtagcttt

SEQ ID NO: 12650 - DNA, 25 bp, Homo sapien
agggatgtagctttgtattaaattt

SEQ ID NO: 12651 - DNA, 25 bp, Homo sapien
ttaagtgtttgtaaggcatgttgtc

SEQ ID NO: 12652 - DNA, 25 bp, Homo sapien
ttataaaaagatatgcctgaaatct

SEQ ID NO: 12653 - DNA, 25 bp, Homo sapien
ttgattgttgagtaatcctgaaatg

SEQ ID NO: 12654 - DNA, 25 bp, Homo sapien
gtgtttgtaaggcatgttgtcatct

SEQ ID NO: 12655 - DNA, 25 bp, Homo sapien
tttcttccaaataaagggatgtagc

SEQ ID NO: 12656 - DNA, 25 bp, Homo sapien
aacccactagcactacaactgctgt

SEQ ID NO: 12657 - DNA, 25 bp, Homo sapien
tgctgtcactcactgattcgccaaa

SEQ ID NO: 12658 - DNA, 25 bp, Homo sapien
tgtcactcactgattcgccaaatat

SEQ ID NO: 12659 - DNA, 25 bp, Homo sapien
ttcacttcccaacagttattccttg

SEQ ID NO: 12660 - DNA, 25 bp, Homo sapien
actgctgtcactcactgattcgcca

SEQ ID NO: 12661 - DNA, 25 bp, Homo sapien
acttcccaacagttattccttgatt

SEQ ID NO: 12662 - DNA, 25 bp, Homo sapien
actagcactacaactgctgtcactc

SEQ ID NO: 12663 - DNA, 25 bp, Homo sapien
cttgatttaacccactagcactaca

SEQ ID NO: 12664 - DNA, 25 bp, Homo sapien
tgatttaacccactagcactacaac

SEQ ID NO: 12665 - DNA, 25 bp, Homo sapien
gctgtcactcactgattcgccaaat

SEQ ID NO: 12666 - DNA, 25 bp, Homo sapien
acggctcaccgcagcaccgactgtg

SEQ ID NO: 12667 - DNA, 25 bp, Homo sapien
ttggggctggataatatatatatat

SEQ ID NO: 12668 - DNA, 25 bp, Homo sapien
tcgacttcccagtgttgagattaca

SEQ ID NO: 12669 - DNA, 25 bp, Homo sapien
ctcaccgcagcaccgactgtgggat

SEQ ID NO: 12670 - DNA, 25 bp, Homo sapien
cagcaccgactgtgggattgtttaa

SEQ ID NO: 12671 - DNA, 25 bp, Homo sapien
tgtcactcactgattcgccaaatat

SEQ ID NO: 12672 - DNA, 25 bp, Homo sapien
actgctgtcactcactgattcgcca

SEQ ID NO: 12673 - DNA, 25 bp, Homo sapien
actagcactacaactgctgtcactc

SEQ ID NO: 12674 - DNA, 25 bp, Homo sapien
cttgatttaacccactagcactaca

SEQ ID NO: 12675 - DNA, 25 bp, Homo sapien
acttcccaacagttattccttgatt

SEQ ID NO: 12676 - DNA, 25 bp, Homo sapien
acggctcaccgcagcaccgactgtg

SEQ ID NO: 12677 - DNA, 25 bp, Homo sapien
taacccactagcactacaactgctg

SEQ ID NO: 12678 - DNA, 25 bp, Homo sapien
agatagtctgagaatggaaatttac

SEQ ID NO: 12679 - DNA, 25 bp, Homo sapien
tctcataaagtaagaaacaggtggg

SEQ ID NO: 12680 - DNA, 25 bp, Homo sapien
gttgaggacttgtgattaaagaggt

SEQ ID NO: 12681 - DNA, 25 bp, Homo sapien
ttaggaatgaatacatgggtggtaa

SEQ ID NO: 12682 - DNA, 25 bp, Homo sapien
cagtattgagtaaaacaaggaagac

SEQ ID NO: 12683 - DNA, 25 bp, Homo sapien
taaagaggtgttcatgaaggatttc

SEQ ID NO: 12684 - DNA, 25 bp, Homo sapien
acacacactgaaatagagatgcaaa

SEQ ID NO: 12685 - DNA, 25 bp, Homo sapien
tgggtggtaaagctatcaagaaaag

SEQ ID NO: 12686 - DNA, 25 bp, Homo sapien
aggatttcttggttgcaaagcagtc

SEQ ID NO: 12687 - DNA, 25 bp, Homo sapien
ataaagctaaccttggagttgagga

SEQ ID NO: 12688 - DNA, 25 bp, Homo sapien
ccaaattcaggccaaaagatagtct

SEQ ID NO: 12689 - DNA, 25 bp, Homo sapien
aaggcacagtgctgagtaacagtgt

SEQ ID NO: 12690 - DNA, 25 bp, Homo sapien
gaagaagggaactgcctcctcttct

SEQ ID NO: 12691 - DNA, 25 bp, Homo sapien
catggccaacgtcacagagctagta

SEQ ID NO: 12692 - DNA, 25 bp, Homo sapien
cattagctgggcatttaggcattct

SEQ ID NO: 12693 - DNA, 25 bp, Homo sapien
ccagtttgtaaggagaaccaggaac

SEQ ID NO: 12694 - DNA, 25 bp, Homo sapien
gatgagaaaataggattagagagat

SEQ ID NO: 12695 - DNA, 25 bp, Homo sapien
tttctgcaagcccaaagccctcggg

SEQ ID NO: 12696 - DNA, 25 bp, Homo sapien
acaagataatgggaagtgtcactga

SEQ ID NO: 12697 - DNA, 25 bp, Homo sapien
ctaagataaagaactgagatcctgg

SEQ ID NO: 12698 - DNA, 25 bp, Homo sapien
gagagattaagtaacatggccaacg

SEQ ID NO: 12699 - DNA, 25 bp, Homo sapien
cctaggctgagctctcttgggaatc

SEQ ID NO: 12700 - DNA, 25 bp, Homo sapien
tttggaagcagagtctaactctgtc

SEQ ID NO: 12701 - DNA, 25 bp, Homo sapien
ctttccttaacaggcgggatgtgat

SEQ ID NO: 12702 - DNA, 25 bp, Homo sapien
acctcaccagttcaaacgatcctcc

SEQ ID NO: 12703 - DNA, 25 bp, Homo sapien
tggaaatttcataacttctggaggc

SEQ ID NO: 12704 - DNA, 25 bp, Homo sapien
ttacaggtgaacacaaccaagccta

SEQ ID NO: 12705 - DNA, 25 bp, Homo sapien
ctctttccttaacaggcgggatgtg

SEQ ID NO: 12706 - DNA, 25 bp, Homo sapien
aaacacaagtgggttaggatttcac

SEQ ID NO: 12707 - DNA, 25 bp, Homo sapien
atttcataacttctggaggctgagc

SEQ ID NO: 12708 - DNA, 25 bp, Homo sapien
gtagctggagctacttgtactcagc

SEQ ID NO: 12709 - DNA, 25 bp, Homo sapien
gctacttgtactcagcctccgagga

SEQ ID NO: 12710 - DNA, 25 bp, Homo sapien
gtgaacacaaccaagcctagctaat

SEQ ID NO: 12711 - DNA, 25 bp, Homo sapien
agcagccacttaaaaactgaaattc

SEQ ID NO: 12712 - DNA, 25 bp, Homo sapien
atttaaactgaatgataattaaacg

SEQ ID NO: 12713 - DNA, 25 bp, Homo sapien
tcacaaaatgagctgttcttggcta

SEQ ID NO: 12714 - DNA, 25 bp, Homo sapien
aaagcagccacttaaaaactgaaat

SEQ ID NO: 12715 - DNA, 25 bp, Homo sapien
aaactgaaattcacaaaatgagctg

SEQ ID NO: 12716 - DNA, 25 bp, Homo sapien
ctgaaattcacaaaatgagctgttc

SEQ ID NO: 12717 - DNA, 25 bp, Homo sapien
attcacaaaatgagctgttcttggc

SEQ ID NO: 12718 - DNA, 25 bp, Homo sapien
acaaaatgagctgttcttggctaca

SEQ ID NO: 12719 - DNA, 25 bp, Homo sapien
ctacatacagaaggccaacatttaa

SEQ ID NO: 12720 - DNA, 25 bp, Homo sapien
agccacttaaaaactgaaattcaca

SEQ ID NO: 12721 - DNA, 25 bp, Homo sapien
catacagaaggccaacatttaaact

SEQ ID NO: 12722 - DNA, 25 bp, Homo sapien
gggcgtttgacctacttactcctta

SEQ ID NO: 12723 - DNA, 25 bp, Homo sapien
taaggagtaagtaggtcaaacgccc

SEQ ID NO: 12724 - DNA, 25 bp, Homo sapien
tcagactctgcggtggttgacattc

SEQ ID NO: 12725 - DNA, 25 bp, Homo sapien
ggaaatgagcctcagactctgcggt

SEQ ID NO: 12726 - DNA, 25 bp, Homo sapien
ggccatctcggctaaaagcttataa

SEQ ID NO: 12727 - DNA, 25 bp, Homo sapien
taatgacaggtcttgcgcttaataa

SEQ ID NO: 12728 - DNA, 25 bp, Homo sapien
tagacatgagtctggctaatgccct

SEQ ID NO: 12729 - DNA, 25 bp, Homo sapien
aaataaagccacagggaagagatta

SEQ ID NO: 12730 - DNA, 25 bp, Homo sapien
actgacttcagggaagtcgcaacaa

SEQ ID NO: 12731 - DNA, 25 bp, Homo sapien
aagtcgcaacaaggccatctcggct

SEQ ID NO: 12732 - DNA, 25 bp, Homo sapien
attgacaatggaaagggtttctgtt

SEQ ID NO: 12733 - DNA, 25 bp, Homo sapien
agatatttgaatgaacatgtggttc

SEQ ID NO: 12734 - DNA, 25 bp, Homo sapien
tcactgtccagtactggctggcatt

SEQ ID NO: 12735 - DNA, 25 bp, Homo sapien
aaaaaatatctggtaggtctcacag

SEQ ID NO: 12736 - DNA, 25 bp, Homo sapien
tccaacccagatagaaaaaaatatc

SEQ ID NO: 12737 - DNA, 25 bp, Homo sapien
tctgcaggtacaattttcccaaaat

SEQ ID NO: 12738 - DNA, 25 bp, Homo sapien
accaaggttagtgctcatattccaa

SEQ ID NO: 12739 - DNA, 25 bp, Homo sapien
ccatcatattctgcaggtacaattt

SEQ ID NO: 12740 - DNA, 25 bp, Homo sapien
tggtaggtctcacagaacaaaattc

SEQ ID NO: 12741 - DNA, 25 bp, Homo sapien
ggtctcacagaacaaaattcatcag

SEQ ID NO: 12742 - DNA, 25 bp, Homo sapien
tttaacttaccaaggttagtgctca

SEQ ID NO: 12743 - DNA, 25 bp, Homo sapien
ggctgttgttttcatccatcatatt

SEQ ID NO: 12744 - DNA, 25 bp, Homo sapien
cttaccaaggttagtgctcatattc

SEQ ID NO: 12745 - DNA, 25 bp, Homo sapien
tatctggtaggtctcacagaacaaa

SEQ ID NO: 12746 - DNA, 25 bp, Homo sapien
ggtaagctgccgaaagcccgcctca

SEQ ID NO: 12747 - DNA, 25 bp, Homo sapien
cctaagctgtcaggagaaaataaag

SEQ ID NO: 12748 - DNA, 25 bp, Homo sapien
cggctaacatctccaggaaggcgac

SEQ ID NO: 12749 - DNA, 25 bp, Homo sapien
tctcctgcagaagaggttgcatttc

SEQ ID NO: 12750 - DNA, 25 bp, Homo sapien
ttgcatttcagatccgtgagcttcc

SEQ ID NO: 12751 - DNA, 25 bp, Homo sapien
ataaagaaaccatagcgaccgattc

SEQ ID NO: 12752 - DNA, 25 bp, Homo sapien
agctgtggcctgaccgaatagaaga

SEQ ID NO: 12753 - DNA, 25 bp, Homo sapien
taaatcagccaaatgagaagtagat

SEQ ID NO: 12754 - DNA, 25 bp, Homo sapien
caggaaggcgacaaccatagattgt

SEQ ID NO: 12755 - DNA, 25 bp, Homo sapien
ccctgggaataattggaaaaatgat

SEQ ID NO: 12756 - DNA, 25 bp, Homo sapien
gagaagtagatttggaaccacctct

SEQ ID NO: 12757 - DNA, 25 bp, Homo sapien
gtccagttcaagtgtatgcaatgca

SEQ ID NO: 12758 - DNA, 25 bp, Homo sapien
aatctggggtctatacaaaccactc

SEQ ID NO: 12759 - DNA, 25 bp, Homo sapien
ctgaaacagaagttcccaaggattc

SEQ ID NO: 12760 - DNA, 25 bp, Homo sapien
tgacaaagaaaattcagtgcgtacc

SEQ ID NO: 12761 - DNA, 25 bp, Homo sapien
aaccagagtccctaaggtagaattc

SEQ ID NO: 12762 - DNA, 25 bp, Homo sapien
tgcaatgcagaaggctgtgaaattc

SEQ ID NO: 12763 - DNA, 25 bp, Homo sapien
agtgcgtaccacaggctttgataaa

SEQ ID NO: 12764 - DNA, 25 bp, Homo sapien
atgcattttctagcaggttaagccc

SEQ ID NO: 12765 - DNA, 25 bp, Homo sapien
tttaagaaagtaattgagaactctc

SEQ ID NO: 12766 - DNA, 25 bp, Homo sapien
tgacacacgccttcagaaaacactg

SEQ ID NO: 12767 - DNA, 25 bp, Homo sapien
aagccctgggtttgcgtctttgtgc

SEQ ID NO: 12768 - DNA, 25 bp, Homo sapien
atcaaggtccctaagttggagggta

SEQ ID NO: 12769 - DNA, 25 bp, Homo sapien
gatggcagagattgtgcatacaaag

SEQ ID NO: 12770 - DNA, 25 bp, Homo sapien
tttaccagagagtagatcaaggtcc

SEQ ID NO: 12771 - DNA, 25 bp, Homo sapien
ttagaaacagtattaagcaccttgt

SEQ ID NO: 12772 - DNA, 25 bp, Homo sapien
tccctgaaggatttatgactctgta

SEQ ID NO: 12773 - DNA, 25 bp, Homo sapien
ctcggagctgattccctgaaggatt

SEQ ID NO: 12774 - DNA, 25 bp, Homo sapien
atacaacacttaggggatgtccatt

SEQ ID NO: 12775 - DNA, 25 bp, Homo sapien
gtggcttgcacagattcagggccca

SEQ ID NO: 12776 - DNA, 25 bp, Homo sapien
gtaacatagaatgccagggtggctt

SEQ ID NO: 12777 - DNA, 25 bp, Homo sapien
aatgactttatgtggctcggagctg

SEQ ID NO: 12778 - DNA, 25 bp, Homo sapien
aaagctaagcagtctgtatggaaat

SEQ ID NO: 12779 - DNA, 25 bp, Homo sapien
cagacaggactcactgggctaaata

SEQ ID NO: 12780 - DNA, 25 bp, Homo sapien
aataagcttggagtcacttagtcac

SEQ ID NO: 12781 - DNA, 25 bp, Homo sapien
atctccaatgtacctgtgaagaaac

SEQ ID NO: 12782 - DNA, 25 bp, Homo sapien
ctgggctaaataaaactcaagcgtc

SEQ ID NO: 12783 - DNA, 25 bp, Homo sapien
atcaggtttgtaggtattatctcca

SEQ ID NO: 12784 - DNA, 25 bp, Homo sapien
actcaagcgtcaagagggctgtgtt

SEQ ID NO: 12785 - DNA, 25 bp, Homo sapien
ttttgcggggcctgaagtatgcaca

SEQ ID NO: 12786 - DNA, 25 bp, Homo sapien
aacacagcaagtaagttacgagacc

SEQ ID NO: 12787 - DNA, 25 bp, Homo sapien
caggcatgtcccagagaatcggctc

SEQ ID NO: 12788 - DNA, 25 bp, Homo sapien
cctgtcagcggaagataaaagtttt

SEQ ID NO: 12789 - DNA, 25 bp, Homo sapien
tggaagagttcagcgatttgcctac

SEQ ID NO: 12790 - DNA, 25 bp, Homo sapien
tacagcacaagcattcatgttacac

SEQ ID NO: 12791 - DNA, 25 bp, Homo sapien
agtgaaaggagaccagtatagtcat

SEQ ID NO: 12792 - DNA, 25 bp, Homo sapien
atccaaagtttattccagagctatt

SEQ ID NO: 12793 - DNA, 25 bp, Homo sapien
aatagcacaaatcagcagatcattc

SEQ ID NO: 12794 - DNA, 25 bp, Homo sapien
aattttgtgagctagtgaaaggaga

SEQ ID NO: 12795 - DNA, 25 bp, Homo sapien
ttccagtatgttttacagcacaagc

SEQ ID NO: 12796 - DNA, 25 bp, Homo sapien
aggagactgacaagtgatgtagtta

SEQ ID NO: 12797 - DNA, 25 bp, Homo sapien
tacactgcatttttaggagactgac

SEQ ID NO: 12798 - DNA, 25 bp, Homo sapien
ccagagctattgattttccagtatg

SEQ ID NO: 12799 - DNA, 25 bp, Homo sapien
ttttgaaaatctgtgagtcgagggc

SEQ ID NO: 12800 - DNA, 25 bp, Homo sapien
tatagtcataataaacactgtcctc

SEQ ID NO: 12801 - DNA, 25 bp, Homo sapien
gagtaattaactaattgccagaatt

SEQ ID NO: 12802 - DNA, 25 bp, Homo sapien
aaagtcagatttcaaacatcatgcc

SEQ ID NO: 12803 - DNA, 25 bp, Homo sapien
aacatcatgccagatctatggagtc

SEQ ID NO: 12804 - DNA, 25 bp, Homo sapien
ctagaaatgaatgcctcagatgagt

SEQ ID NO: 12805 - DNA, 25 bp, Homo sapien
taagaccactagaaatgaatgcctc

SEQ ID NO: 12806 - DNA, 25 bp, Homo sapien
tggagtcagggaattaagaccacta

SEQ ID NO: 12807 - DNA, 25 bp, Homo sapien
tcagggaattaagaccactagaaat

SEQ ID NO: 12808 - DNA, 25 bp, Homo sapien
atgccagatctatggagtcagggaa

SEQ ID NO: 12809 - DNA, 25 bp, Homo sapien
agtaaaaactctctctgcgtgtata

SEQ ID NO: 12810 - DNA, 25 bp, Homo sapien
tgtgtgtgtttgagaaatacatatt

SEQ ID NO: 12811 - DNA, 25 bp, Homo sapien
cagatctatggagtcagggaattaa

SEQ ID NO: 12812 - DNA, 25 bp, Homo sapien
cttggagaccagatctggggtccca

SEQ ID NO: 12813 - DNA, 25 bp, Homo sapien
ctagggcaaagagactgaatctaaa

SEQ ID NO: 12814 - DNA, 25 bp, Homo sapien
cacactgaatgatagaggcaattta

SEQ ID NO: 12815 - DNA, 25 bp, Homo sapien
gtaatacatccctccttaagacaga

SEQ ID NO: 12816 - DNA, 25 bp, Homo sapien
aactgtggtgaaggctgagatttta

SEQ ID NO: 12817 - DNA, 25 bp, Homo sapien
cttttaaagactagggcaaagagac

SEQ ID NO: 12818 - DNA, 25 bp, Homo sapien
ttagtgcatctatcactggagtagt

SEQ ID NO: 12819 - DNA, 25 bp, Homo sapien
attaaaactaagagacagtctgtct

SEQ ID NO: 12820 - DNA, 25 bp, Homo sapien
tttggttacatgcatgaactgtggt

SEQ ID NO: 12821 - DNA, 25 bp, Homo sapien
tcactggagtagtatacactgtaca

SEQ ID NO: 12822 - DNA, 25 bp, Homo sapien
tagaagagaaacagtacttggagac

SEQ ID NO: 12823 - DNA, 25 bp, Homo sapien
acaggaatcttggtgcttcagtgac

SEQ ID NO: 12824 - DNA, 25 bp, Homo sapien
tagtaattaaggatgggcagacctg

SEQ ID NO: 12825 - DNA, 25 bp, Homo sapien
atattggccatgtacctccctgctc

SEQ ID NO: 12826 - DNA, 25 bp, Homo sapien
taagacagatgaaatcatattggcc

SEQ ID NO: 12827 - DNA, 25 bp, Homo sapien
aaccagtcagtaactccagccaata

SEQ ID NO: 12828 - DNA, 25 bp, Homo sapien
tttgctcagtagctctgtacaggaa

SEQ ID NO: 12829 - DNA, 25 bp, Homo sapien
ttcagtgacctaaaaaccagtcagt

SEQ ID NO: 12830 - DNA, 25 bp, Homo sapien
tctatgctaaagacttagagttctc

SEQ ID NO: 12831 - DNA, 25 bp, Homo sapien
gttagactgaaaattgtgaacaagt

SEQ ID NO: 12832 - DNA, 25 bp, Homo sapien
gtcccacagtggctactggatatta

SEQ ID NO: 12833 - DNA, 25 bp, Homo sapien
actctggaatcttgtgatgctcatc

SEQ ID NO: 12834 - DNA, 25 bp, Homo sapien
atttacttagaatcaaagggtccag

SEQ ID NO: 12835 - DNA, 25 bp, Homo sapien
tgctggcaagcaatctaagaattat

SEQ ID NO: 12836 - DNA, 25 bp, Homo sapien
gaattatttgaagattgagagattt

SEQ ID NO: 12837 - DNA, 25 bp, Homo sapien
tagtaattgtgaaagcaagtcttgt

SEQ ID NO: 12838 - DNA, 25 bp, Homo sapien
aaatgtaaatagtaattgtgaaagc

SEQ ID NO: 12839 - DNA, 25 bp, Homo sapien
atctttgctggcaagcaatctaaga

SEQ ID NO: 12840 - DNA, 25 bp, Homo sapien
aatatgagtataatatacaggcatt

SEQ ID NO: 12841 - DNA, 25 bp, Homo sapien
tctgatcactttcaaatatgagtat

SEQ ID NO: 12842 - DNA, 25 bp, Homo sapien
aagcaagtcttgttatcagtttgta

SEQ ID NO: 12843 - DNA, 25 bp, Homo sapien
tgttaaataacactttctgatcact

SEQ ID NO: 12844 - DNA, 25 bp, Homo sapien
cagtacaaaatatcattcaagattt

SEQ ID NO: 12845 - DNA, 25 bp, Homo sapien
ttcatagttgaaaagaatagtctat

SEQ ID NO: 12846 - DNA, 25 bp, Homo sapien
tagaaaagaagttaatatacagtga

SEQ ID NO: 12847 - DNA, 25 bp, Homo sapien
actacacagtgttatgggacagtag

SEQ ID NO: 12848 - DNA, 25 bp, Homo sapien
agatagctcctgataggctttgact

SEQ ID NO: 12849 - DNA, 25 bp, Homo sapien
aaagaagttaatatacagtgaagtc

SEQ ID NO: 12850 - DNA, 25 bp, Homo sapien
ttttcacaggctaccaacatcatat

SEQ ID NO: 12851 - DNA, 25 bp, Homo sapien
acacagtgttatgggacagtagaaa

SEQ ID NO: 12852 - DNA, 25 bp, Homo sapien
caacatcatataagatagctcctga

SEQ ID NO: 12853 - DNA, 25 bp, Homo sapien
cagtgttatgggacagtagaaattc

SEQ ID NO: 12854 - DNA, 25 bp, Homo sapien
tgggacagtagaaattcatatcagt

SEQ ID NO: 12855 - DNA, 25 bp, Homo sapien
ttcatctcataagtcaaacatctgt

SEQ ID NO: 12856 - DNA, 25 bp, Homo sapien
catgcagtcacgttggaaaccagtt

SEQ ID NO: 12857 - DNA, 25 bp, Homo sapien
aagtgaaataatgacgtggaaaaac

SEQ ID NO: 12858 - DNA, 25 bp, Homo sapien
catttcatcaaaaaggtgtaggaat

SEQ ID NO: 12859 - DNA, 25 bp, Homo sapien
tatccagaatatgaaatacacttac

SEQ ID NO: 12860 - DNA, 25 bp, Homo sapien
ggtgtaggaatagacaataaaatac

SEQ ID NO: 12861 - DNA, 25 bp, Homo sapien
tttaatacaggactcatatccagaa

SEQ ID NO: 12862 - DNA, 25 bp, Homo sapien
atttaccatatgacctagcactatc

SEQ ID NO: 12863 - DNA, 25 bp, Homo sapien
gaatgctataataaaaaaggacagt

SEQ ID NO: 12864 - DNA, 25 bp, Homo sapien
atgaataaactaatgggagctatcc

SEQ ID NO: 12865 - DNA, 25 bp, Homo sapien
ttacaactacgcaacaaaaagataa

SEQ ID NO: 12866 - DNA, 25 bp, Homo sapien
gaaaaactaaaacactcacgcattg

SEQ ID NO: 12867 - DNA, 25 bp, Homo sapien
aaggcagtgttctctcatgtatccc

SEQ ID NO: 12868 - DNA, 25 bp, Homo sapien
cctcatgcgggcaaggcagtgttct

SEQ ID NO: 12869 - DNA, 25 bp, Homo sapien
cacccggccaggacaggcaaattta

SEQ ID NO: 12870 - DNA, 25 bp, Homo sapien
ttaatggtagacttaagccaagctg

SEQ ID NO: 12871 - DNA, 25 bp, Homo sapien
gtgcacagtaccaggccacaagcct

SEQ ID NO: 12872 - DNA, 25 bp, Homo sapien
gattcgagtctcagtgctgcacctt

SEQ ID NO: 12873 - DNA, 25 bp, Homo sapien
ccaagctgtgtggattcgagtctca

SEQ ID NO: 12874 - DNA, 25 bp, Homo sapien
ttttttgagcagaagccagcagcta

SEQ ID NO: 12875 - DNA, 25 bp, Homo sapien
ccggcacaggataggcacatttatt

SEQ ID NO: 12876 - DNA, 25 bp, Homo sapien
aggccctgtgctggcaactgtgctc

SEQ ID NO: 12877 - DNA, 25 bp, Homo sapien
actggcaagaacagcacccggcaca

SEQ ID NO: 12878 - DNA, 25 bp, Homo sapien
cagagtgctaagattacgggcgcga

SEQ ID NO: 12879 - DNA, 25 bp, Homo sapien
cccagagtgctaagattacgggcgc

SEQ ID NO: 12880 - DNA, 25 bp, Homo sapien
ctaagattacgggcgcgagccattg

SEQ ID NO: 12881 - DNA, 25 bp, Homo sapien
atttttgctagagatggtttcacca

SEQ ID NO: 12882 - DNA, 25 bp, Homo sapien
ccgaggctggtcttaaagtcctgat

SEQ ID NO: 12883 - DNA, 25 bp, Homo sapien
tatttttgctagagatggtttcacc

SEQ ID NO: 12884 - DNA, 25 bp, Homo sapien
tgctaagattacgggcgcgagccat

SEQ ID NO: 12885 - DNA, 25 bp, Homo sapien
gctaagattacgggcgcgagccatt

SEQ ID NO: 12886 - DNA, 25 bp, Homo sapien
aagattacgggcgcgagccattgca

SEQ ID NO: 12887 - DNA, 25 bp, Homo sapien
tttcaccatgttgttgccgaggctg

SEQ ID NO: 12888 - DNA, 25 bp, Homo sapien
ccagagtgctaagattacgggcgcg

SEQ ID NO: 12889 - DNA, 25 bp, Homo sapien
aataaaacagagtggaaataaatga

SEQ ID NO: 12890 - DNA, 25 bp, Homo sapien
aataaatgagcaaagaacaacagaa

SEQ ID NO: 12891 - DNA, 25 bp, Homo sapien
tacaaaaggaaataatagatagaat

SEQ ID NO: 12892 - DNA, 25 bp, Homo sapien
caggatataacaagaaagataaagg

SEQ ID NO: 12893 - DNA, 25 bp, Homo sapien
aatgtggagagagactatttgaaga

SEQ ID NO: 12894 - DNA, 25 bp, Homo sapien
actgactaagattacaaaaggaaat

SEQ ID NO: 12895 - DNA, 25 bp, Homo sapien
aataatagatagaatgtggagagag

SEQ ID NO: 12896 - DNA, 25 bp, Homo sapien
tatgtaaataaaacagagtggaaat

SEQ ID NO: 12897 - DNA, 25 bp, Homo sapien
gtggagagagactatttgaagaaaa

SEQ ID NO: 12898 - DNA, 25 bp, Homo sapien
agacacattatagtggaatattcta

SEQ ID NO: 12899 - DNA, 25 bp, Homo sapien
cttaagaaattaagatactggaatt

SEQ ID NO: 12900 - DNA, 25 bp, Homo sapien
gtaacatccgagagccactcgttcc

SEQ ID NO: 12901 - DNA, 25 bp, Homo sapien
agatggtaacatccgagagccactc

SEQ ID NO: 12902 - DNA, 25 bp, Homo sapien
ttcctggaatgtttcttcttcacag

SEQ ID NO: 12903 - DNA, 25 bp, Homo sapien
atccgagagccactcgttcctggaa

SEQ ID NO: 12904 - DNA, 25 bp, Homo sapien
ctagatggtaacatccgagagccac

SEQ ID NO: 12905 - DNA, 25 bp, Homo sapien
cgagagccactcgttcctggaatgt

SEQ ID NO: 12906 - DNA, 25 bp, Homo sapien
tggtaacatccgagagccactcgtt

SEQ ID NO: 12907 - DNA, 25 bp, Homo sapien
ttctctagatggtaacatccgagag

SEQ ID NO: 12908 - DNA, 25 bp, Homo sapien
gagagccactcgttcctggaatgtt

SEQ ID NO: 12909 - DNA, 25 bp, Homo sapien
ctctagatggtaacatccgagagcc

SEQ ID NO: 12910 - DNA, 25 bp, Homo sapien
ctcttctctagatggtaacatccga

SEQ ID NO: 12911 - DNA, 25 bp, Homo sapien
atgtgatctgtttgctctggaagct

SEQ ID NO: 12912 - DNA, 25 bp, Homo sapien
ctctggaagctttcagggcctttgt

SEQ ID NO: 12913 - DNA, 25 bp, Homo sapien
tgaaactcctatcaggggctagatt

SEQ ID NO: 12914 - DNA, 25 bp, Homo sapien
agtctggtgagctgtttatgtgatc

SEQ ID NO: 12915 - DNA, 25 bp, Homo sapien
ttaacctggaaatgcaaagcctttg

SEQ ID NO: 12916 - DNA, 25 bp, Homo sapien
gtgaaatttcacagcgatgcattgt

SEQ ID NO: 12917 - DNA, 25 bp, Homo sapien
tcaggggctagatttcctagactac

SEQ ID NO: 12918 - DNA, 25 bp, Homo sapien
atgcattgtggtttgggtaatttcc

SEQ ID NO: 12919 - DNA, 25 bp, Homo sapien
aggggattcttcaagggcctcccaa

SEQ ID NO: 12920 - DNA, 25 bp, Homo sapien
cttgggcggactttctggtggactt

SEQ ID NO: 12921 - DNA, 25 bp, Homo sapien
agactacgcctctgacttcctgatc

SEQ ID NO: 12922 - DNA, 25 bp, Homo sapien
ctggtacatatttgtcctggccttt

SEQ ID NO: 12923 - DNA, 25 bp, Homo sapien
tctttcagttttagatggtagcctc

SEQ ID NO: 12924 - DNA, 25 bp, Homo sapien
tttggaaagtcttcgtcacgcttac

SEQ ID NO: 12925 - DNA, 25 bp, Homo sapien
aaaagaacagttctagacagggtct

SEQ ID NO: 12926 - DNA, 25 bp, Homo sapien
ggggtttctatttgcctggtacata

SEQ ID NO: 12927 - DNA, 25 bp, Homo sapien
agttaggcaaacacagctctctgca

SEQ ID NO: 12928 - DNA, 25 bp, Homo sapien
tattaatagcttttacagtacactg

SEQ ID NO: 12929 - DNA, 25 bp, Homo sapien
gtcctggcctttatgtttgctctca

SEQ ID NO: 12930 - DNA, 25 bp, Homo sapien
ttagatggtagcctctgactccctc

SEQ ID NO: 12931 - DNA, 25 bp, Homo sapien
cattagggtatgcattatgtactgt

SEQ ID NO: 12932 - DNA, 25 bp, Homo sapien
gtgcagttaggcaaacacagctctc

SEQ ID NO: 12933 - DNA, 25 bp, Homo sapien
tttctagtaacggaccagctccttc

SEQ ID NO: 12934 - DNA, 25 bp, Homo sapien
ccgcaagctcggagacgcgcgtgtc

SEQ ID NO: 12935 - DNA, 25 bp, Homo sapien
cgctggttgaaaggatccgagccac

SEQ ID NO: 12936 - DNA, 25 bp, Homo sapien
cccgactttgcatctggacttttct

SEQ ID NO: 12937 - DNA, 25 bp, Homo sapien
ctccttctgccgaccgggccgggga

SEQ ID NO: 12938 - DNA, 25 bp, Homo sapien
ggttgaaaggatccgagccaccctc

SEQ ID NO: 12939 - DNA, 25 bp, Homo sapien
cgttggctgcctgacccggaatggc

SEQ ID NO: 12940 - DNA, 25 bp, Homo sapien
gacttttctagtaacggaccagctc

SEQ ID NO: 12941 - DNA, 25 bp, Homo sapien
tagtaacggaccagctccttctgcc

SEQ ID NO: 12942 - DNA, 25 bp, Homo sapien
gtgtcccgcgttggctgcctgaccc

SEQ ID NO: 12943 - DNA, 25 bp, Homo sapien
ctccagcgcgctggttgaaaggatc

SEQ ID NO: 12944 - DNA, 25 bp, Homo sapien
ataaccaaaatcttaaatatagcct

SEQ ID NO: 12945 - DNA, 25 bp, Homo sapien
tagaatcactcaggtaaattgctcc

SEQ ID NO: 12946 - DNA, 25 bp, Homo sapien
tccagtgaagccttcggatcactgc

SEQ ID NO: 12947 - DNA, 25 bp, Homo sapien
aatctaagatagaatcactcaggta

SEQ ID NO: 12948 - DNA, 25 bp, Homo sapien
agatagaatcactcaggtaaattgc

SEQ ID NO: 12949 - DNA, 25 bp, Homo sapien
tcggatcactgcaactataaccaaa

SEQ ID NO: 12950 - DNA, 25 bp, Homo sapien
actcaggtaaattgctcctaaattc

SEQ ID NO: 12951 - DNA, 25 bp, Homo sapien
aagtgagtcatcttagaagcttgtc

SEQ ID NO: 12952 - DNA, 25 bp, Homo sapien
aaatatagccttataagagaatcta

SEQ ID NO: 12953 - DNA, 25 bp, Homo sapien
cttagaagcttgtcctcctgctcca

SEQ ID NO: 12954 - DNA, 25 bp, Homo sapien
tgctcctaaattcttgaacctcaga

SEQ ID NO: 12955 - DNA, 25 bp, Homo sapien
attcttaacgtggtagctagtctcc

SEQ ID NO: 12956 - DNA, 25 bp, Homo sapien
gctactgagtaaagcctaaatgcat

SEQ ID NO: 12957 - DNA, 25 bp, Homo sapien
ggcaatggaatgaagcactctgcta

SEQ ID NO: 12958 - DNA, 25 bp, Homo sapien
ttgtgagggcacttaagtaacacca

SEQ ID NO: 12959 - DNA, 25 bp, Homo sapien
acaaacagaaaacactgtgtgtaac

SEQ ID NO: 12960 - DNA, 25 bp, Homo sapien
gtgaaacactgaggactcctgcagt

SEQ ID NO: 12961 - DNA, 25 bp, Homo sapien
ataaatgacattgtggctcagtctt

SEQ ID NO: 12962 - DNA, 25 bp, Homo sapien
tctgctaaaagccagtgaaacactg

SEQ ID NO: 12963 - DNA, 25 bp, Homo sapien
cagtggcatgtaagtgagtcatctt

SEQ ID NO: 12964 - DNA, 25 bp, Homo sapien
gtctatgtggcaatggaatgaagca

SEQ ID NO: 12965 - DNA, 25 bp, Homo sapien
aagctgccacgttgtgagggcactt

SEQ ID NO: 12966 - DNA, 25 bp, Homo sapien
taggagttaaaaagaatatagtatc

SEQ ID NO: 12967 - DNA, 25 bp, Homo sapien
taaagatcagtgagcttgaatacac

SEQ ID NO: 12968 - DNA, 25 bp, Homo sapien
aaccaaaaatacagcctcagtgacc

SEQ ID NO: 12969 - DNA, 25 bp, Homo sapien
tgaatacacacaatagaagctagtc

SEQ ID NO: 12970 - DNA, 25 bp, Homo sapien
gcctcagtgacctatgggaaatatt

SEQ ID NO: 12971 - DNA, 25 bp, Homo sapien
ttaggggtagattagacactccaga

SEQ ID NO: 12972 - DNA, 25 bp, Homo sapien
aatagaagtgaaatacaggaacagc

SEQ ID NO: 12973 - DNA, 25 bp, Homo sapien
gtctaaacaaagcacagagagaaaa

SEQ ID NO: 12974 - DNA, 25 bp, Homo sapien
aacatggtttgaacatttgacatcc

SEQ ID NO: 12975 - DNA, 25 bp, Homo sapien
aaattttgctggataggattagggg

SEQ ID NO: 12976 - DNA, 25 bp, Homo sapien
ttggccaaaacacagttgttggtac

SEQ ID NO: 12977 - DNA, 25 bp, Homo sapien
ggtcccactagttgtctgggctggt

SEQ ID NO: 12978 - DNA, 25 bp, Homo sapien
ttttctagttgcttgaatcaggaac

SEQ ID NO: 12979 - DNA, 25 bp, Homo sapien
aagccattgcgtccagtcctttggt

SEQ ID NO: 12980 - DNA, 25 bp, Homo sapien
atagggtcccactagttgtctgggc

SEQ ID NO: 12981 - DNA, 25 bp, Homo sapien
ataagccattgcgtccagtcctttg

SEQ ID NO: 12982 - DNA, 25 bp, Homo sapien
agttgcttgaatcaggaacttagat

SEQ ID NO: 12983 - DNA, 25 bp, Homo sapien
ggcataagccattgcgtccagtcct

SEQ ID NO: 12984 - DNA, 25 bp, Homo sapien
accacgctcggcctcagtgatttct

SEQ ID NO: 12985 - DNA, 25 bp, Homo sapien
acgctcggcctcagtgatttctctt

SEQ ID NO: 12986 - DNA, 25 bp, Homo sapien
gcttgaatcaggaacttagattatt

SEQ ID NO: 12987 - DNA, 25 bp, Homo sapien
cattgcgtccagtcctttggtttca

SEQ ID NO: 12988 - DNA, 25 bp, Homo sapien
tttggtaatatcaatgcagaatatt

SEQ ID NO: 12989 - DNA, 25 bp, Homo sapien
tatcagaaatcaaatgttatcacca

SEQ ID NO: 12990 - DNA, 25 bp, Homo sapien
gagctagtctcagcagtataaaaat

SEQ ID NO: 12991 - DNA, 25 bp, Homo sapien
gttatcaccaaaaatctactctact

SEQ ID NO: 12992 - DNA, 25 bp, Homo sapien
tctcagatctgaaggctgtcagccc

SEQ ID NO: 12993 - DNA, 25 bp, Homo sapien
ctctcagatctgaaggctgtcagcc

SEQ ID NO: 12994 - DNA, 25 bp, Homo sapien
ttaatttggcaacatttggtaatat

SEQ ID NO: 12995 - DNA, 25 bp, Homo sapien
tatcaatgcagaatatttatcagaa

SEQ ID NO: 12996 - DNA, 25 bp, Homo sapien
catccttttgttttggcccatccct

SEQ ID NO: 12997 - DNA, 25 bp, Homo sapien
acgactgagctagtctcagcagtat

SEQ ID NO: 12998 - DNA, 25 bp, Homo sapien
agggtctccacgactgagctagtct

SEQ ID NO: 12999 - DNA, 25 bp, Homo sapien
ttacctgatgcgaggcatatagtgc

SEQ ID NO: 13000 - DNA, 25 bp, Homo sapien
gcgaggcatatagtgcagatgatta

SEQ ID NO: 13001 - DNA, 25 bp, Homo sapien
tgcagatgattatggttagagttgt

SEQ ID NO: 13002 - DNA, 25 bp, Homo sapien
tagacacattacctgatgcgaggca

SEQ ID NO: 13003 - DNA, 25 bp, Homo sapien
tactttgggataaggtcagaaatgc

SEQ ID NO: 13004 - DNA, 25 bp, Homo sapien
taaggtcagaaatgctaaatgttac

SEQ ID NO: 13005 - DNA, 25 bp, Homo sapien
ctactttgttatccaggagatgcaa

SEQ ID NO: 13006 - DNA, 25 bp, Homo sapien
aaatactttgggataaggtcagaaa

SEQ ID NO: 13007 - DNA, 25 bp, Homo sapien
tgggataaggtcagaaatgctaaat

SEQ ID NO: 13008 - DNA, 25 bp, Homo sapien
gttatccaggagatgcaatacaaaa

SEQ ID NO: 13009 - DNA, 25 bp, Homo sapien
gattatggttagagttgtgattttc

SEQ ID NO: 13010 - DNA, 25 bp, Homo sapien
catggcagttatcttggtttatccc

SEQ ID NO: 13011 - DNA, 25 bp, Homo sapien
atctctgtgcctagacaagatgaaa

SEQ ID NO: 13012 - DNA, 25 bp, Homo sapien
gatccaatggacactctagctaaca

SEQ ID NO: 13013 - DNA, 25 bp, Homo sapien
tcaaaataagagtacaccggaagat

SEQ ID NO: 13014 - DNA, 25 bp, Homo sapien
cagaatatccacttgctcccttgag

SEQ ID NO: 13015 - DNA, 25 bp, Homo sapien
tctagctaacataaccatggcagtt

SEQ ID NO: 13016 - DNA, 25 bp, Homo sapien
accagaagctgagatccaatggaca

SEQ ID NO: 13017 - DNA, 25 bp, Homo sapien
ccaagaaatggaagcctggttgagg

SEQ ID NO: 13018 - DNA, 25 bp, Homo sapien
ggatacactccatacctcaggtcat

SEQ ID NO: 13019 - DNA, 25 bp, Homo sapien
aataagagtacaccggaagattccc

SEQ ID NO: 13020 - DNA, 25 bp, Homo sapien
tctgtgcctagacaagatgaaagca

SEQ ID NO: 13021 - DNA, 25 bp, Homo sapien
ttatcagatatatgacttgcagatc

SEQ ID NO: 13022 - DNA, 25 bp, Homo sapien
gggtcgtaatagactggtcttgaat

SEQ ID NO: 13023 - DNA, 25 bp, Homo sapien
agaaaccgttgcctagcccaaggta

SEQ ID NO: 13024 - DNA, 25 bp, Homo sapien
ctctcccatcgtttaattaggttat

SEQ ID NO: 13025 - DNA, 25 bp, Homo sapien
ggtgtgaggtaccatgcctgtactc

SEQ ID NO: 13026 - DNA, 25 bp, Homo sapien
tatatagttgagatgcctgaccttt

SEQ ID NO: 13027 - DNA, 25 bp, Homo sapien
gcaatcatagctcgagtagctggga

SEQ ID NO: 13028 - DNA, 25 bp, Homo sapien
aatggttaagaaaccgttgcctagc

SEQ ID NO: 13029 - DNA, 25 bp, Homo sapien
cccaaggtaatgaatatttactcct

SEQ ID NO: 13030 - DNA, 25 bp, Homo sapien
ctttcttgatggtgcactttgatgc

SEQ ID NO: 13031 - DNA, 25 bp, Homo sapien
gctcttacagctatgactttgatct

SEQ ID NO: 13032 - DNA, 25 bp, Homo sapien
ggtgagcttgggcaaatcgctcatt

SEQ ID NO: 13033 - DNA, 25 bp, Homo sapien
cagaccagactaacatttgactcag

SEQ ID NO: 13034 - DNA, 25 bp, Homo sapien
tcagtcttaatattcaggtgagctt

SEQ ID NO: 13035 - DNA, 25 bp, Homo sapien
taactgcataggagaggcaatgcat

SEQ ID NO: 13036 - DNA, 25 bp, Homo sapien
gatactatctgacaagggcagtgat

SEQ ID NO: 13037 - DNA, 25 bp, Homo sapien
atggggataactgtggcacccacct

SEQ ID NO: 13038 - DNA, 25 bp, Homo sapien
tattgtgatcatgatactatctgac

SEQ ID NO: 13039 - DNA, 25 bp, Homo sapien
ctgcttaactgcataggagaggcaa

SEQ ID NO: 13040 - DNA, 25 bp, Homo sapien
attttgtgcatataatggggataac

SEQ ID NO: 13041 - DNA, 25 bp, Homo sapien
catataatggggataactgtggcac

SEQ ID NO: 13042 - DNA, 25 bp, Homo sapien
tggcacccacctgtttttgtgagaa

SEQ ID NO: 13043 - DNA, 25 bp, Homo sapien
agtatacctcagtgatatataaaca

SEQ ID NO: 13044 - DNA, 25 bp, Homo sapien
taaacaaggccataataaagcacag

SEQ ID NO: 13045 - DNA, 25 bp, Homo sapien
aatagtctatttacatggcatagta

SEQ ID NO: 13046 - DNA, 25 bp, Homo sapien
caaaataggtcactgagaacttttt

SEQ ID NO: 13047 - DNA, 25 bp, Homo sapien
ttccttctgaatttaaaccagcatg

SEQ ID NO: 13048 - DNA, 25 bp, Homo sapien
atttacatggcatagtatacctcag

SEQ ID NO: 13049 - DNA, 25 bp, Homo sapien
tttcataatgggcagaaacatacta

SEQ ID NO: 13050 - DNA, 25 bp, Homo sapien
cacaaaataggtcactgagaacttt

SEQ ID NO: 13051 - DNA, 25 bp, Homo sapien
tataaacaaggccataataaagcac

SEQ ID NO: 13052 - DNA, 25 bp, Homo sapien
ataataaagcacagacacatccgac

SEQ ID NO: 13053 - DNA, 25 bp, Homo sapien
tctgaatttaaaccagcatgtaaag

SEQ ID NO: 13054 - DNA, 25 bp, Homo sapien
atagcatactgtaagaatttggact

SEQ ID NO: 13055 - DNA, 25 bp, Homo sapien
aataagagatttcactgtatcaaga

SEQ ID NO: 13056 - DNA, 25 bp, Homo sapien
caaggaagatttttgtctaagaccc

SEQ ID NO: 13057 - DNA, 25 bp, Homo sapien
taagaccctctccacaaagacaact

SEQ ID NO: 13058 - DNA, 25 bp, Homo sapien
aacagatgggaaatacaatggcagg

SEQ ID NO: 13059 - DNA, 25 bp, Homo sapien
agaaatcctgaaatagcatactgta

SEQ ID NO: 13060 - DNA, 25 bp, Homo sapien
aataacagcacaacccttcttgggg

SEQ ID NO: 13061 - DNA, 25 bp, Homo sapien
aacccaacacataatgagaaaatgc

SEQ ID NO: 13062 - DNA, 25 bp, Homo sapien
caataatttctgaggtgtggtcttc

SEQ ID NO: 13063 - DNA, 25 bp, Homo sapien
tgcatacgatgcaatgtaaattgtt

SEQ ID NO: 13064 - DNA, 25 bp, Homo sapien
ggggaagtgttaataagagatataa

SEQ ID NO: 13065 - DNA, 25 bp, Homo sapien
catgttgctttgagaagccaagaat

SEQ ID NO: 13066 - DNA, 25 bp, Homo sapien
agaaacgtgaatttgtgttctggcc

SEQ ID NO: 13067 - DNA, 25 bp, Homo sapien
tctattgtaccaagatgattgaaat

SEQ ID NO: 13068 - DNA, 25 bp, Homo sapien
agctgtttaaagaggctccatgctg

SEQ ID NO: 13069 - DNA, 25 bp, Homo sapien
agccaagaatttggtgtaaacacat

SEQ ID NO: 13070 - DNA, 25 bp, Homo sapien
aaacattgtcatagggcatcacctt

SEQ ID NO: 13071 - DNA, 25 bp, Homo sapien
atagggcatcaccttgatactgtgc

SEQ ID NO: 13072 - DNA, 25 bp, Homo sapien
ttcctgagtgaagaactgaaatttc

SEQ ID NO: 13073 - DNA, 25 bp, Homo sapien
tatcacataaggctaatatacatga

SEQ ID NO: 13074 - DNA, 25 bp, Homo sapien
agagaatacagcacatttcctgagt

SEQ ID NO: 13075 - DNA, 25 bp, Homo sapien
tgctgcagcatgaaagtacattaga

SEQ ID NO: 13076 - DNA, 25 bp, Homo sapien
ctgaatgccctatttgaagcaagtt

SEQ ID NO: 13077 - DNA, 25 bp, Homo sapien
tggtagattgcaaacataagtggcc

SEQ ID NO: 13078 - DNA, 25 bp, Homo sapien
gtcatgccaataagggtcttctcct

SEQ ID NO: 13079 - DNA, 25 bp, Homo sapien
ataagtggccacataatgctctcac

SEQ ID NO: 13080 - DNA, 25 bp, Homo sapien
tgggcttggccgtgtgacttgcact

SEQ ID NO: 13081 - DNA, 25 bp, Homo sapien
tcctctcccaggaggagatagcgtc

SEQ ID NO: 13082 - DNA, 25 bp, Homo sapien
tgcacagaggctgtagaatgtgcac

SEQ ID NO: 13083 - DNA, 25 bp, Homo sapien
atattaacaagtctgatgtgcacag

SEQ ID NO: 13084 - DNA, 25 bp, Homo sapien
ctcaaagggctaagtatggtagatt

SEQ ID NO: 13085 - DNA, 25 bp, Homo sapien
caggaggagatagcgtccatctttc

SEQ ID NO: 13086 - DNA, 25 bp, Homo sapien
actccttaatctgggcttggccgtg

SEQ ID NO: 13087 - DNA, 25 bp, Homo sapien
agtagctaagactatgggtacggca

SEQ ID NO: 13088 - DNA, 25 bp, Homo sapien
agactatgggtacggcaccatgcct

SEQ ID NO: 13089 - DNA, 25 bp, Homo sapien
agcctcaaccgccagggctcagata

SEQ ID NO: 13090 - DNA, 25 bp, Homo sapien
gctcattatagcctcaaccgccagg

SEQ ID NO: 13091 - DNA, 25 bp, Homo sapien
ctcaggtccagtaatttcttggttc

SEQ ID NO: 13092 - DNA, 25 bp, Homo sapien
cagctaaaggccaggcctcaggtcc

SEQ ID NO: 13093 - DNA, 25 bp, Homo sapien
ggcctcaggtccagtaatttcttgg

SEQ ID NO: 13094 - DNA, 25 bp, Homo sapien
ttcaggcaatcctccggcgtagcca

SEQ ID NO: 13095 - DNA, 25 bp, Homo sapien
tagctaagactatgggtacggcacc

SEQ ID NO: 13096 - DNA, 25 bp, Homo sapien
ctaagactatgggtacggcaccatg

SEQ ID NO: 13097 - DNA, 25 bp, Homo sapien
attatagcctcaaccgccagggctc

SEQ ID NO: 13098 - DNA, 25 bp, Homo sapien
aagtcccaaccacatggaacgtgtc

SEQ ID NO: 13099 - DNA, 25 bp, Homo sapien
cagagaaaggatgcttcctgagttt

SEQ ID NO: 13100 - DNA, 25 bp, Homo sapien
atgatggatggaggaatgttaaaac

SEQ ID NO: 13101 - DNA, 25 bp, Homo sapien
aggactctgagccagctatctgccc

SEQ ID NO: 13102 - DNA, 25 bp, Homo sapien
taataaagacccttggggcagcgtg

SEQ ID NO: 13103 - DNA, 25 bp, Homo sapien
tcaggaaggaacataccagtgtttc

SEQ ID NO: 13104 - DNA, 25 bp, Homo sapien
gagagaaatagatgaaaggtagatg

SEQ ID NO: 13105 - DNA, 25 bp, Homo sapien
tctccagaggaaaatgctagaagac

SEQ ID NO: 13106 - DNA, 25 bp, Homo sapien
tctaagtctccgcagaggggccttg

SEQ ID NO: 13107 - DNA, 25 bp, Homo sapien
ggaacgtgtcctagaggctcctcaa

SEQ ID NO: 13108 - DNA, 25 bp, Homo sapien
atcaacaagaccatgaggactctga

SEQ ID NO: 13109 - DNA, 25 bp, Homo sapien
aactctgctgtggaaatgggattat

SEQ ID NO: 13110 - DNA, 25 bp, Homo sapien
atgggattatcaatggatgcatctc

SEQ ID NO: 13111 - DNA, 25 bp, Homo sapien
atcagcttttccacagggacccagc

SEQ ID NO: 13112 - DNA, 25 bp, Homo sapien
gtgtcatgaaataccattggatata

SEQ ID NO: 13113 - DNA, 25 bp, Homo sapien
tttatggcaattggcacatacaact

SEQ ID NO: 13114 - DNA, 25 bp, Homo sapien
gagagagcgtccaagaaatcactaa

SEQ ID NO: 13115 - DNA, 25 bp, Homo sapien
tctcagtacagtatgttccacatcc

SEQ ID NO: 13116 - DNA, 25 bp, Homo sapien
accattggatatagaggatgcttcc

SEQ ID NO: 13117 - DNA, 25 bp, Homo sapien
aaaattgactggattcttagcaccc

SEQ ID NO: 13118 - DNA, 25 bp, Homo sapien
gtccacactgaaactgttgtatacc

SEQ ID NO: 13119 - DNA, 25 bp, Homo sapien
agggacccagcttcctatttagtgc

SEQ ID NO: 13120 - DNA, 25 bp, Homo sapien
gagagggcaaccatcccagcatcac

SEQ ID NO: 13121 - DNA, 25 bp, Homo sapien
ctcaggagacactcaaacgagagca

SEQ ID NO: 13122 - DNA, 25 bp, Homo sapien
ccaagtcacagaacaacgagtggtt

SEQ ID NO: 13123 - DNA, 25 bp, Homo sapien
tgtggccaccttacccaccaggaga

SEQ ID NO: 13124 - DNA, 25 bp, Homo sapien
atggcaactgcttacctgtcagctc

SEQ ID NO: 13125 - DNA, 25 bp, Homo sapien
taaagccactcagcaacagaggact

SEQ ID NO: 13126 - DNA, 25 bp, Homo sapien
cagttgtgacaacctaagcggtctc

SEQ ID NO: 13127 - DNA, 25 bp, Homo sapien
ggcagctacagaaaactagtacaca

SEQ ID NO: 13128 - DNA, 25 bp, Homo sapien
tgccctgtttacacctggggatgcc

SEQ ID NO: 13129 - DNA, 25 bp, Homo sapien
aacctaagcggtctccaggcactgc

SEQ ID NO: 13130 - DNA, 25 bp, Homo sapien
aggaggccagggttttgtctctgct

SEQ ID NO: 13131 - DNA, 25 bp, Homo sapien
tcttgtccatgagagcagctcctgt

SEQ ID NO: 13132 - DNA, 25 bp, Homo sapien
caacaccaagttcaaagtcctctct

SEQ ID NO: 13133 - DNA, 25 bp, Homo sapien
atgagagcagctcctgtgacaacac

SEQ ID NO: 13134 - DNA, 25 bp, Homo sapien
tgtgacaacaccaagttcaaagtcc

SEQ ID NO: 13135 - DNA, 25 bp, Homo sapien
gcagctcctgtgacaacaccaagtt

SEQ ID NO: 13136 - DNA, 25 bp, Homo sapien
cctagaagtaaactaatcacctcat

SEQ ID NO: 13137 - DNA, 25 bp, Homo sapien
tcacctcatgaaagggtaactaact

SEQ ID NO: 13138 - DNA, 25 bp, Homo sapien
actaatcacctcatgaaagggtaac

SEQ ID NO: 13139 - DNA, 25 bp, Homo sapien
agacatatccatccttcctatctga

SEQ ID NO: 13140 - DNA, 25 bp, Homo sapien
tgaaagggtaactaacttctgctgt

SEQ ID NO: 13141 - DNA, 25 bp, Homo sapien
cttctgctgtagataaagacatatc

SEQ ID NO: 13142 - DNA, 25 bp, Homo sapien
aacaagtgttgacaaggatgcagat

SEQ ID NO: 13143 - DNA, 25 bp, Homo sapien
taaaatggccaacaagtatcaagtc

SEQ ID NO: 13144 - DNA, 25 bp, Homo sapien
caaaccctcggaactgtatttcatc

SEQ ID NO: 13145 - DNA, 25 bp, Homo sapien
tgacaggtgcaaagtcttctgattt

SEQ ID NO: 13146 - DNA, 25 bp, Homo sapien
tcaaatggttaaatacagagtcacc

SEQ ID NO: 13147 - DNA, 25 bp, Homo sapien
atttcatccactaaaacactggttt

SEQ ID NO: 13148 - DNA, 25 bp, Homo sapien
tggccaacaagtatcaagtcaggtc

SEQ ID NO: 13149 - DNA, 25 bp, Homo sapien
aagtcaggtctacctcccatggtct

SEQ ID NO: 13150 - DNA, 25 bp, Homo sapien
atacagagtcaccatcaactgctcc

SEQ ID NO: 13151 - DNA, 25 bp, Homo sapien
aaggatgcagatactggaactctta

SEQ ID NO: 13152 - DNA, 25 bp, Homo sapien
taaggcttcacacatacctggttct

SEQ ID NO: 13153 - DNA, 25 bp, Homo sapien
aatatattgcacagtcaggagaaat

SEQ ID NO: 13154 - DNA, 25 bp, Homo sapien
catttgaggaaggtgttattatccc

SEQ ID NO: 13155 - DNA, 25 bp, Homo sapien
attgctactgtgacagccaagtctt

SEQ ID NO: 13156 - DNA, 25 bp, Homo sapien
gacagagagccaaaatatattgcac

SEQ ID NO: 13157 - DNA, 25 bp, Homo sapien
aagactgagtggcaacgtaaaacaa

SEQ ID NO: 13158 - DNA, 25 bp, Homo sapien
attgataggctgcttctggcacagt

SEQ ID NO: 13159 - DNA, 25 bp, Homo sapien
cagtcaggagaaatataaaggcctc

SEQ ID NO: 13160 - DNA, 25 bp, Homo sapien
agccaagtcttagacagagagccaa

SEQ ID NO: 13161 - DNA, 25 bp, Homo sapien
attcaaagttgatctgtctgattcc

SEQ ID NO: 13162 - DNA, 25 bp, Homo sapien
tctggcacagtagctaatattacca

SEQ ID NO: 13163 - DNA, 25 bp, Homo sapien
gcctcaaaagcctgccatggtctta

SEQ ID NO: 13164 - DNA, 25 bp, Homo sapien
ctccgtatccaagggagaccggttc

SEQ ID NO: 13165 - DNA, 25 bp, Homo sapien
ttggcaaatatatggcaaccttgtc

SEQ ID NO: 13166 - DNA, 25 bp, Homo sapien
accggttccaggacctctgcagata

SEQ ID NO: 13167 - DNA, 25 bp, Homo sapien
aaagacagagaactacagttgtccc

SEQ ID NO: 13168 - DNA, 25 bp, Homo sapien
ccagggagacctttacacatgctta

SEQ ID NO: 13169 - DNA, 25 bp, Homo sapien
cacatgcttaagattgggtaccatt

SEQ ID NO: 13170 - DNA, 25 bp, Homo sapien
aaaatccacagacgcttaagtcctt

SEQ ID NO: 13171 - DNA, 25 bp, Homo sapien
attcactggccacttgtatcgatta

SEQ ID NO: 13172 - DNA, 25 bp, Homo sapien
ctttaaacaaacacagcctctggct

SEQ ID NO: 13173 - DNA, 25 bp, Homo sapien
cacacacaggtacacgcaacatatt

SEQ ID NO: 13174 - DNA, 25 bp, Homo sapien
aatgtgaatcacagtgggagtgttt

SEQ ID NO: 13175 - DNA, 25 bp, Homo sapien
catacgattgctttatccagaacac

SEQ ID NO: 13176 - DNA, 25 bp, Homo sapien
agacaccacagtatcgtaggagatc

SEQ ID NO: 13177 - DNA, 25 bp, Homo sapien
accacagtatcgtaggagatcttta

SEQ ID NO: 13178 - DNA, 25 bp, Homo sapien
acaccacagtatcgtaggagatctt

SEQ ID NO: 13179 - DNA, 25 bp, Homo sapien
atctagaagacaccacagtatcgta

SEQ ID NO: 13180 - DNA, 25 bp, Homo sapien
cagtatcgtaggagatctttataat

SEQ ID NO: 13181 - DNA, 25 bp, Homo sapien
aagacaccacagtatcgtaggagat

SEQ ID NO: 13182 - DNA, 25 bp, Homo sapien
tagaagacaccacagtatcgtagga

SEQ ID NO: 13183 - DNA, 25 bp, Homo sapien
tacatacgattgctttatccagaac

SEQ ID NO: 13184 - DNA, 25 bp, Homo sapien
gaagacaccacagtatcgtaggaga

SEQ ID NO: 13185 - DNA, 25 bp, Homo sapien
ctagaagacaccacagtatcgtagg

SEQ ID NO: 13186 - DNA, 25 bp, Homo sapien
caaccggaccttaactgtggcctgg

SEQ ID NO: 13187 - DNA, 25 bp, Homo sapien
taagcaagtttatctatgggctaaa

SEQ ID NO: 13188 - DNA, 25 bp, Homo sapien
aaagtcaaacctactgcattgcttg

SEQ ID NO: 13189 - DNA, 25 bp, Homo sapien
aactatgtatagactgagatttcag

SEQ ID NO: 13190 - DNA, 25 bp, Homo sapien
aattgacactacactagaattaggc

SEQ ID NO: 13191 - DNA, 25 bp, Homo sapien
gactaaactgcgtatcaagaaaatt

SEQ ID NO: 13192 - DNA, 25 bp, Homo sapien
ctcaacaagtgttttccaaccggac

SEQ ID NO: 13193 - DNA, 25 bp, Homo sapien
ttgtccaagaacagactaaactgcg

SEQ ID NO: 13194 - DNA, 25 bp, Homo sapien
cccaataaacactgatgaaactatg

SEQ ID NO: 13195 - DNA, 25 bp, Homo sapien
tcatccagtaaaaaggttacaattc

SEQ ID NO: 13196 - DNA, 25 bp, Homo sapien
cctggccagaaagtgttagtaataa

SEQ ID NO: 13197 - DNA, 25 bp, Homo sapien
aacatggaatttactctcctggttc

SEQ ID NO: 13198 - DNA, 25 bp, Homo sapien
gcagagagaatgacaacatggaatt

SEQ ID NO: 13199 - DNA, 25 bp, Homo sapien
aggcagagagaatgacaacatggaa

SEQ ID NO: 13200 - DNA, 25 bp, Homo sapien
tttgtgacttcagttggatccacca

SEQ ID NO: 13201 - DNA, 25 bp, Homo sapien
tcctggttcccttctggtcaggtgg

SEQ ID NO: 13202 - DNA, 25 bp, Homo sapien
gcctggctgcttcccttgctgagag

SEQ ID NO: 13203 - DNA, 25 bp, Homo sapien
ctctgtgtccttgggaggctggcta

SEQ ID NO: 13204 - DNA, 25 bp, Homo sapien
gctgtagcctggctgcttcccttgc

SEQ ID NO: 13205 - DNA, 25 bp, Homo sapien
gctatctatggattgcatcaacagg

SEQ ID NO: 13206 - DNA, 25 bp, Homo sapien
tatggattgcatcaacaggttcctt

SEQ ID NO: 13207 - DNA, 25 bp, Homo sapien
gtgacttcagttggatccaccaaat

SEQ ID NO: 13208 - DNA, 25 bp, Homo sapien
tgcttgctaatgcaggtccactccc

SEQ ID NO: 13209 - DNA, 25 bp, Homo sapien
aacattaaagttttccgtgagataa

SEQ ID NO: 13210 - DNA, 25 bp, Homo sapien
aggaaggaacagaggattaagccta

SEQ ID NO: 13211 - DNA, 25 bp, Homo sapien
ctaccctctgcatgggctggctgtc

SEQ ID NO: 13212 - DNA, 25 bp, Homo sapien
ctctggacattctctgcttgctaat

SEQ ID NO: 13213 - DNA, 25 bp, Homo sapien
tttctctgctcatggtctggatctc

SEQ ID NO: 13214 - DNA, 25 bp, Homo sapien
cctctgcatgggctggctgtctcta

SEQ ID NO: 13215 - DNA, 25 bp, Homo sapien
ttccgtgagataaactgaacttttc

SEQ ID NO: 13216 - DNA, 25 bp, Homo sapien
tggctgtctctaggctctggacatt

SEQ ID NO: 13217 - DNA, 25 bp, Homo sapien
aggaacagaggattaagcctaacat

SEQ ID NO: 13218 - DNA, 25 bp, Homo sapien
aacttttctctgctcatggtctgga

SEQ ID NO: 13219 - DNA, 25 bp, Homo sapien
ttgcataacacttcaaagaatggct

SEQ ID NO: 13220 - DNA, 25 bp, Homo sapien
tgaacgtcagcatcctaacaataat

SEQ ID NO: 13221 - DNA, 25 bp, Homo sapien
aacagataatcacatgccctgcaac

SEQ ID NO: 13222 - DNA, 25 bp, Homo sapien
tagggcattttcatgtgcactgagc

SEQ ID NO: 13223 - DNA, 25 bp, Homo sapien
agtatgcaatgcttcccaaatgatt

SEQ ID NO: 13224 - DNA, 25 bp, Homo sapien
atgtgcactgagctcgttcaaccct

SEQ ID NO: 13225 - DNA, 25 bp, Homo sapien
tgactaaatgaacaaacagataatc

SEQ ID NO: 13226 - DNA, 25 bp, Homo sapien
tccatgtgggaatggagtatgcaat

SEQ ID NO: 13227 - DNA, 25 bp, Homo sapien
aagaatggctgctcctggttgattt

SEQ ID NO: 13228 - DNA, 25 bp, Homo sapien
aatatttatagctggtttcgagtgt

SEQ ID NO: 13229 - DNA, 25 bp, Homo sapien
ggtttcgagtgtatagggcattttc

SEQ ID NO: 13230 - DNA, 25 bp, Homo sapien
tattgagtgtctagtattgcctgga

SEQ ID NO: 13231 - DNA, 25 bp, Homo sapien
ttcaactgctaggtagtaaatatac

SEQ ID NO: 13232 - DNA, 25 bp, Homo sapien
tcttagggagcatggtctgacttct

SEQ ID NO: 13233 - DNA, 25 bp, Homo sapien
cagcttgtgtgtgtcagaggtttat

SEQ ID NO: 13234 - DNA, 25 bp, Homo sapien
tctcaccatttccaggcaatcactt

SEQ ID NO: 13235 - DNA, 25 bp, Homo sapien
ttgtaatcctggctgattctggccc

SEQ ID NO: 13236 - DNA, 25 bp, Homo sapien
ttgatagcttctaacataggcatac

SEQ ID NO: 13237 - DNA, 25 bp, Homo sapien
catgaagtatatactcttagggagc

SEQ ID NO: 13238 - DNA, 25 bp, Homo sapien
ataggcatacaactgtaaaactatc

SEQ ID NO: 13239 - DNA, 25 bp, Homo sapien
tcttttgttgctggacatttgggct

SEQ ID NO: 13240 - DNA, 25 bp, Homo sapien
attgtacagaaattgaatcatgaag

SEQ ID NO: 13241 - DNA, 25 bp, Homo sapien
ttgaaggctagacgaaaattttaga

SEQ ID NO: 13242 - DNA, 25 bp, Homo sapien
gaggaacactgacaagtaaggtgtc

SEQ ID NO: 13243 - DNA, 25 bp, Homo sapien
agacacatgtgcctcgtctgcgctc

SEQ ID NO: 13244 - DNA, 25 bp, Homo sapien
acataacaaaagatacgggagctgc

SEQ ID NO: 13245 - DNA, 25 bp, Homo sapien
tcgtcccgcttaccacgggtgctag

SEQ ID NO: 13246 - DNA, 25 bp, Homo sapien
tcgtctgcgctccagagagcatcta

SEQ ID NO: 13247 - DNA, 25 bp, Homo sapien
acgggtgctagcttatgacagtcca

SEQ ID NO: 13248 - DNA, 25 bp, Homo sapien
tctctcgatccgcagggtgactggc

SEQ ID NO: 13249 - DNA, 25 bp, Homo sapien
cagcccaggctatgaagacacatgt

SEQ ID NO: 13250 - DNA, 25 bp, Homo sapien
cagagagcatctactgtcaccaaga

SEQ ID NO: 13251 - DNA, 25 bp, Homo sapien
cgggcttcgggagcttgtctcgtcc

SEQ ID NO: 13252 - DNA, 25 bp, Homo sapien
tggagcaaaagcaatccatgttgaa

SEQ ID NO: 13253 - DNA, 25 bp, Homo sapien
ctcagtgattggcagagattgatga

SEQ ID NO: 13254 - DNA, 25 bp, Homo sapien
gaagtgggagtgctgttattataaa

SEQ ID NO: 13255 - DNA, 25 bp, Homo sapien
atatgttattggaaaatggagcaaa

SEQ ID NO: 13256 - DNA, 25 bp, Homo sapien
actgctgaagatggaaattgatcat

SEQ ID NO: 13257 - DNA, 25 bp, Homo sapien
taaaagccaattctcgtgagggctc

SEQ ID NO: 13258 - DNA, 25 bp, Homo sapien
gggctcggaaagaaatatagaagaa

SEQ ID NO: 13259 - DNA, 25 bp, Homo sapien
atatggacagtaaaggtcattctgt

SEQ ID NO: 13260 - DNA, 25 bp, Homo sapien
tctgttggagtctcaaatggaaatg

SEQ ID NO: 13261 - DNA, 25 bp, Homo sapien
tgctagattactgtggaaaaaattt

SEQ ID NO: 13262 - DNA, 25 bp, Homo sapien
gaaattgatcatgagaagtgggagt

SEQ ID NO: 13263 - DNA, 25 bp, Homo sapien
ggcaggagttggcactttcttccca

SEQ ID NO: 13264 - DNA, 25 bp, Homo sapien
ttcatcactgcctgactgtctgagg

SEQ ID NO: 13265 - DNA, 25 bp, Homo sapien
tggaggtcaccttgagtctgttctc

SEQ ID NO: 13266 - DNA, 25 bp, Homo sapien
aggggccctcttcccggaatctcag

SEQ ID NO: 13267 - DNA, 25 bp, Homo sapien
ttccctgaggaaacagtaggctttg

SEQ ID NO: 13268 - DNA, 25 bp, Homo sapien
aggaagtgaacgtggagtaatttct

SEQ ID NO: 13269 - DNA, 25 bp, Homo sapien
ttcttgggcagtcctgaggtttcta

SEQ ID NO: 13270 - DNA, 25 bp, Homo sapien
ttgggagctacagaaggtttccctg

SEQ ID NO: 13271 - DNA, 25 bp, Homo sapien
aggtttggttactgggatgcttccc

SEQ ID NO: 13272 - DNA, 25 bp, Homo sapien
ctgttagcagctggtttgggagcta

SEQ ID NO: 13273 - DNA, 25 bp, Homo sapien
acacttcgtataaggccagggtttg

SEQ ID NO: 13274 - DNA, 25 bp, Homo sapien
atttgccggccaatgctcatcttgc

SEQ ID NO: 13275 - DNA, 25 bp, Homo sapien
ggcaggtgaagcacacagcccatac

SEQ ID NO: 13276 - DNA, 25 bp, Homo sapien
aatgctcatcttgctggccgctgtc

SEQ ID NO: 13277 - DNA, 25 bp, Homo sapien
ggccatggctggtcgtgctctattt

SEQ ID NO: 13278 - DNA, 25 bp, Homo sapien
ccagtggcagatgggagccacccaa

SEQ ID NO: 13279 - DNA, 25 bp, Homo sapien
atgggagccacccaagcagagagct

SEQ ID NO: 13280 - DNA, 25 bp, Homo sapien
aagtgtcagctcactgactggtcct

SEQ ID NO: 13281 - DNA, 25 bp, Homo sapien
ttcattcaagtgtcagctcactgac

SEQ ID NO: 13282 - DNA, 25 bp, Homo sapien
tgcccggccgagaactccatttcat

SEQ ID NO: 13283 - DNA, 25 bp, Homo sapien
aagcacacagcccatacggccagtg

SEQ ID NO: 13284 - DNA, 25 bp, Homo sapien
tttctgactcataccctgacacggc

SEQ ID NO: 13285 - DNA, 25 bp, Homo sapien
ccaggctggttatgactcagaagat

SEQ ID NO: 13286 - DNA, 25 bp, Homo sapien
cccaatggaggtatgacatataatc

SEQ ID NO: 13287 - DNA, 25 bp, Homo sapien
taggccatcatactgccaggctggt

SEQ ID NO: 13288 - DNA, 25 bp, Homo sapien
cgtaactttaaattggtagctttca

SEQ ID NO: 13289 - DNA, 25 bp, Homo sapien
tgttttctctgcatctaggccatca

SEQ ID NO: 13290 - DNA, 25 bp, Homo sapien
tcatcagtagtaagaatctcagggt

SEQ ID NO: 13291 - DNA, 25 bp, Homo sapien
tagtaagaatctcagggttatgctt

SEQ ID NO: 13292 - DNA, 25 bp, Homo sapien
attttgagatggacattgcctcttc

SEQ ID NO: 13293 - DNA, 25 bp, Homo sapien
ttgtggttatagcttgacaagcaat

SEQ ID NO: 13294 - DNA, 25 bp, Homo sapien
tttggcatatgcagataatgttctc

SEQ ID NO: 13295 - DNA, 25 bp, Homo sapien
atcaattcaccaaggagctgttttc

SEQ ID NO: 13296 - DNA, 25 bp, Homo sapien
gtccatctgcaggaaaaagacacca

SEQ ID NO: 13297 - DNA, 25 bp, Homo sapien
gggtccatctgcaggaaaaagacac

SEQ ID NO: 13298 - DNA, 25 bp, Homo sapien
gagggtccatctgcaggaaaaagac

SEQ ID NO: 13299 - DNA, 25 bp, Homo sapien
tgcaggaaaaagacaccacttttgc

SEQ ID NO: 13300 - DNA, 25 bp, Homo sapien
ctgtatcagggagggtccatctgca

SEQ ID NO: 13301 - DNA, 25 bp, Homo sapien
tcctcctgtatcagggagggtccat

SEQ ID NO: 13302 - DNA, 25 bp, Homo sapien
tcctgtatcagggagggtccatctg

SEQ ID NO: 13303 - DNA, 25 bp, Homo sapien
attaaaacagggattggccgggtgc

SEQ ID NO: 13304 - DNA, 25 bp, Homo sapien
ccatctgcaggaaaaagacaccact

SEQ ID NO: 13305 - DNA, 25 bp, Homo sapien
agggagggtccatctgcaggaaaaa

SEQ ID NO: 13306 - DNA, 25 bp, Homo sapien
atctgcaggaaaaagacaccacttt

SEQ ID NO: 13307 - DNA, 25 bp, Homo sapien
acaatgacaagccatcgcgggatct

SEQ ID NO: 13308 - DNA, 25 bp, Homo sapien
tggggccaacctgtggaagttcttg

SEQ ID NO: 13309 - DNA, 25 bp, Homo sapien
catcgcgggatctgcttatgcctcc

SEQ ID NO: 13310 - DNA, 25 bp, Homo sapien
ataaccgcatcctaagtcgaggaac

SEQ ID NO: 13311 - DNA, 25 bp, Homo sapien
aaacccatcgtgagtgggaaacatc

SEQ ID NO: 13312 - DNA, 25 bp, Homo sapien
tggaagtaactaacaggtgctcctc

SEQ ID NO: 13313 - DNA, 25 bp, Homo sapien
ctaagtcgaggaacatactgaatgt

SEQ ID NO: 13314 - DNA, 25 bp, Homo sapien
ttgcctgagacagttggaagtaact

SEQ ID NO: 13315 - DNA, 25 bp, Homo sapien
tgctttgcatgggtgcttccctgtc

SEQ ID NO: 13316 - DNA, 25 bp, Homo sapien
ggctacatccggagaaacccatcgt

SEQ ID NO: 13317 - DNA, 25 bp, Homo sapien
tgggaaacatcgtaagtcgaaagtg

SEQ ID NO: 13318 - DNA, 25 bp, Homo sapien
gagtaaacaagtatgttggtgggaa

SEQ ID NO: 13319 - DNA, 25 bp, Homo sapien
cttcttgagcaagtgagtatgagca

SEQ ID NO: 13320 - DNA, 25 bp, Homo sapien
cacactgaagtccatattctacaga

SEQ ID NO: 13321 - DNA, 25 bp, Homo sapien
gctcatttggtatactaacatcact

SEQ ID NO: 13322 - DNA, 25 bp, Homo sapien
tacagacttgtaaaatattagagat

SEQ ID NO: 13323 - DNA, 25 bp, Homo sapien
cagagatatgaacccacgtgtaatt

SEQ ID NO: 13324 - DNA, 25 bp, Homo sapien
atgatacagccttttgagaagataa

SEQ ID NO: 13325 - DNA, 25 bp, Homo sapien
tttggaatagcatgatactggggct

SEQ ID NO: 13326 - DNA, 25 bp, Homo sapien
atatccaatgttggcaagaaagagt

SEQ ID NO: 13327 - DNA, 25 bp, Homo sapien
ttgaggtagcattgtttggaatagc

SEQ ID NO: 13328 - DNA, 25 bp, Homo sapien
gagtatgagcaagattggataagct

SEQ ID NO: 13329 - DNA, 25 bp, Homo sapien
tttgaaagcacagacatgaagacac

SEQ ID NO: 13330 - DNA, 25 bp, Homo sapien
tgaaagcacagacatgaagacactt

SEQ ID NO: 13331 - DNA, 25 bp, Homo sapien
agcacagacatgaagacacttgacc

SEQ ID NO: 13332 - DNA, 25 bp, Homo sapien
catttgaaagcacagacatgaagac

SEQ ID NO: 13333 - DNA, 25 bp, Homo sapien
gcacagacatgaagacacttgaccc

SEQ ID NO: 13334 - DNA, 25 bp, Homo sapien
ttgaaagcacagacatgaagacact

SEQ ID NO: 13335 - DNA, 25 bp, Homo sapien
aagcacagacatgaagacacttgac

SEQ ID NO: 13336 - DNA, 25 bp, Homo sapien
atttgaaagcacagacatgaagaca

SEQ ID NO: 13337 - DNA, 25 bp, Homo sapien
aaagcacagacatgaagacacttga

SEQ ID NO: 13338 - DNA, 25 bp, Homo sapien
ccatttgaaagcacagacatgaaga

SEQ ID NO: 13339 - DNA, 25 bp, Homo sapien
gaaagcacagacatgaagacacttg

SEQ ID NO: 13340 - DNA, 25 bp, Homo sapien
caggttggagactgctatccttttg

SEQ ID NO: 13341 - DNA, 25 bp, Homo sapien
aaggttcacccttgctggagtgtgg

SEQ ID NO: 13342 - DNA, 25 bp, Homo sapien
ttgggaggcttactactgctccacc

SEQ ID NO: 13343 - DNA, 25 bp, Homo sapien
agcattttagtaccacttaagtcac

SEQ ID NO: 13344 - DNA, 25 bp, Homo sapien
cttagattttgggaggcttactact

SEQ ID NO: 13345 - DNA, 25 bp, Homo sapien
taagtcactgtataaaacagcaggt

SEQ ID NO: 13346 - DNA, 25 bp, Homo sapien
gctaggactaaatgcatgtaccact

SEQ ID NO: 13347 - DNA, 25 bp, Homo sapien
cttttgagtttgcaaggttcaccct

SEQ ID NO: 13348 - DNA, 25 bp, Homo sapien
tgtataaaacagcaggttggagact

SEQ ID NO: 13349 - DNA, 25 bp, Homo sapien
tgagccacctgaatttattacaatc

SEQ ID NO: 13350 - DNA, 25 bp, Homo sapien
gctggagtgtgggaccttagatttt

SEQ ID NO: 13351 - DNA, 25 bp, Homo sapien
atttatttaaactacctgagcctcg

SEQ ID NO: 13352 - DNA, 25 bp, Homo sapien
tcaacctctgggccgtcaaatgatc

SEQ ID NO: 13353 - DNA, 25 bp, Homo sapien
catagtgaacacaaagtactggcaa

SEQ ID NO: 13354 - DNA, 25 bp, Homo sapien
cttcactgaattgttctgaggatgt

SEQ ID NO: 13355 - DNA, 25 bp, Homo sapien
atgtcaccatgctcagctgatttta

SEQ ID NO: 13356 - DNA, 25 bp, Homo sapien
ctgaggatgtagtaaattaataaac

SEQ ID NO: 13357 - DNA, 25 bp, Homo sapien
cagaggcaagatctcaacatgtttt

SEQ ID NO: 13358 - DNA, 25 bp, Homo sapien
agcctcggtttcataatctcaaagt

SEQ ID NO: 13359 - DNA, 25 bp, Homo sapien
tcagtgccagacacatagtgaacac

SEQ ID NO: 13360 - DNA, 25 bp, Homo sapien
ccactgcgtgtgacatggcaaattt

SEQ ID NO: 13361 - DNA, 25 bp, Homo sapien
ataaacataaatcagtgccagacac

SEQ ID NO: 13362 - DNA, 25 bp, Homo sapien
ggaaagtcaagaaaaccaaatgaca

SEQ ID NO: 13363 - DNA, 25 bp, Homo sapien
tttaaacaatgggttccactagcca

SEQ ID NO: 13364 - DNA, 25 bp, Homo sapien
aaaaccacattcaaaccaagcaaag

SEQ ID NO: 13365 - DNA, 25 bp, Homo sapien
aaccaaccagggcaagattgagaga

SEQ ID NO: 13366 - DNA, 25 bp, Homo sapien
aaagggaggaatatgaaaccaacca

SEQ ID NO: 13367 - DNA, 25 bp, Homo sapien
tgcaagttacaaatgagtagtcact

SEQ ID NO: 13368 - DNA, 25 bp, Homo sapien
aatgggttccactagccaagctttc

SEQ ID NO: 13369 - DNA, 25 bp, Homo sapien
ctcatttgaagaaagtgcaagttac

SEQ ID NO: 13370 - DNA, 25 bp, Homo sapien
accaggaaacatagctttgtagctc

SEQ ID NO: 13371 - DNA, 25 bp, Homo sapien
gagtagtcactaaaataaagaaaga

SEQ ID NO: 13372 - DNA, 25 bp, Homo sapien
atgacaaaccaggaaacatagcttt

SEQ ID NO: 13373 - DNA, 25 bp, Homo sapien
tagcatgtcatttgaagatgtaccc

SEQ ID NO: 13374 - DNA, 25 bp, Homo sapien
ttcttgatctggaaactgaaggtaa

SEQ ID NO: 13375 - DNA, 25 bp, Homo sapien
tggttagtgatagcatgtcatttga

SEQ ID NO: 13376 - DNA, 25 bp, Homo sapien
atctggaaactgaaggtaatatacc

SEQ ID NO: 13377 - DNA, 25 bp, Homo sapien
gatagcatgtcatttgaagatgtac

SEQ ID NO: 13378 - DNA, 25 bp, Homo sapien
tcttgatctggaaactgaaggtaat

SEQ ID NO: 13379 - DNA, 25 bp, Homo sapien
tagtgatagcatgtcatttgaagat

SEQ ID NO: 13380 - DNA, 25 bp, Homo sapien
gatctggaaactgaaggtaatatac

SEQ ID NO: 13381 - DNA, 25 bp, Homo sapien
cccttaatgacttacaggctcatag

SEQ ID NO: 13382 - DNA, 25 bp, Homo sapien
catggttagtgatagcatgtcattt

SEQ ID NO: 13383 - DNA, 25 bp, Homo sapien
ttgatctggaaactgaaggtaatat

SEQ ID NO: 13384 - DNA, 25 bp, Homo sapien
ccttacagggatattgtgaggatta

SEQ ID NO: 13385 - DNA, 25 bp, Homo sapien
tttgagtcctgcctaccctggttat

SEQ ID NO: 13386 - DNA, 25 bp, Homo sapien
ttggaaggactcaggtttatgtgga

SEQ ID NO: 13387 - DNA, 25 bp, Homo sapien
tgcccgtttgtgctatgggatactc

SEQ ID NO: 13388 - DNA, 25 bp, Homo sapien
gctatgggatactcatgaggtgccc

SEQ ID NO: 13389 - DNA, 25 bp, Homo sapien
ttagattagatttgggtaagtctcc

SEQ ID NO: 13390 - DNA, 25 bp, Homo sapien
caaactcgtgactgcatggacacaa

SEQ ID NO: 13391 - DNA, 25 bp, Homo sapien
gggaggtgattaggaccatgtattt

SEQ ID NO: 13392 - DNA, 25 bp, Homo sapien
aacccagctggctacatatacagcc

SEQ ID NO: 13393 - DNA, 25 bp, Homo sapien
atggacacaacatagggaggtgatt

SEQ ID NO: 13394 - DNA, 25 bp, Homo sapien
cttacaggctcatagtgattttttc

SEQ ID NO: 13395 - DNA, 25 bp, Homo sapien
tgaacgtgcccgcgtcggcggcgag

SEQ ID NO: 13396 - DNA, 25 bp, Homo sapien
ctcgccgccgacgcgggcacgttca

SEQ ID NO: 13397 - DNA, 25 bp, Homo sapien
agctgatgtttgaattgtgaagtta

SEQ ID NO: 13398 - DNA, 25 bp, Homo sapien
agtatacatacaatgggccagctga

SEQ ID NO: 13399 - DNA, 25 bp, Homo sapien
tccagttccgtaagatgggcagcca

SEQ ID NO: 13400 - DNA, 25 bp, Homo sapien
aagatgagtatacatacaatgggcc

SEQ ID NO: 13401 - DNA, 25 bp, Homo sapien
tttaagctcccacatgagtgagacc

SEQ ID NO: 13402 - DNA, 25 bp, Homo sapien
cacatgagtgagaccatgggatatt

SEQ ID NO: 13403 - DNA, 25 bp, Homo sapien
aatcagggtgtttaggatatctatc

SEQ ID NO: 13404 - DNA, 25 bp, Homo sapien
gccaggaaaggccttacttagctga

SEQ ID NO: 13405 - DNA, 25 bp, Homo sapien
cagctgagtgcacagcaagattcaa

SEQ ID NO: 13406 - DNA, 25 bp, Homo sapien
gcatgcaggaaattgcaattttatt

SEQ ID NO: 13407 - DNA, 25 bp, Homo sapien
catatttatggggtgtggtagtttg

SEQ ID NO: 13408 - DNA, 25 bp, Homo sapien
agaaggcatagctctacagtctctt

SEQ ID NO: 13409 - DNA, 25 bp, Homo sapien
cttctaagggcagggcatcttctat

SEQ ID NO: 13410 - DNA, 25 bp, Homo sapien
agggatccattatctgaagagtggc

SEQ ID NO: 13411 - DNA, 25 bp, Homo sapien
ggctgaccatgaagggatccattat

SEQ ID NO: 13412 - DNA, 25 bp, Homo sapien
cttaagatttagaaggcatagctct

SEQ ID NO: 13413 - DNA, 25 bp, Homo sapien
ctttgtcttctaagggcagggcatc

SEQ ID NO: 13414 - DNA, 25 bp, Homo sapien
atgtttgggctgaccatgaagggat

SEQ ID NO: 13415 - DNA, 25 bp, Homo sapien
tatcttctaggacagggtacagtaa

SEQ ID NO: 13416 - DNA, 25 bp, Homo sapien
ttgtgagaagatgtagatattggct

SEQ ID NO: 13417 - DNA, 25 bp, Homo sapien
gaagagtggcttaagatttagaagg

SEQ ID NO: 13418 - DNA, 25 bp, Homo sapien
taagacatgttatttggggatattc

SEQ ID NO: 13419 - DNA, 25 bp, Homo sapien
ccttcttgcagttgccctaggaata

SEQ ID NO: 13420 - DNA, 25 bp, Homo sapien
gcagttgccctaggaatacatgcca

SEQ ID NO: 13421 - DNA, 25 bp, Homo sapien
aaggactcacgttcttacaacctat

SEQ ID NO: 13422 - DNA, 25 bp, Homo sapien
ttctgtccttcttgcagttgcccta

SEQ ID NO: 13423 - DNA, 25 bp, Homo sapien
attgtgtttttgagttcagaatccc

SEQ ID NO: 13424 - DNA, 25 bp, Homo sapien
attagaatttgacgcacgatctttc

SEQ ID NO: 13425 - DNA, 25 bp, Homo sapien
aacctatattagaatttgacgcacg

SEQ ID NO: 13426 - DNA, 25 bp, Homo sapien
cttgcagttgccctaggaatacatg

SEQ ID NO: 13427 - DNA, 25 bp, Homo sapien
catactggaaggctaatatggggta

SEQ ID NO: 13428 - DNA, 25 bp, Homo sapien
gctaatatggggtatgtgcatacaa

SEQ ID NO: 13429 - DNA, 25 bp, Homo sapien
atttgacgcacgatctttcttctgt

SEQ ID NO: 13430 - DNA, 25 bp, Homo sapien
atgaatgctgctatagggaaagaac

SEQ ID NO: 13431 - DNA, 25 bp, Homo sapien
aaggaggttacacaacagcttggat

SEQ ID NO: 13432 - DNA, 25 bp, Homo sapien
cagcttggatcaggaagtgaaacaa

SEQ ID NO: 13433 - DNA, 25 bp, Homo sapien
ggcggtgatcccactgaagctacag

SEQ ID NO: 13434 - DNA, 25 bp, Homo sapien
actggcaatgggtcctaagcgtcct

SEQ ID NO: 13435 - DNA, 25 bp, Homo sapien
ttattaaagcagtgccaaggaggtt

SEQ ID NO: 13436 - DNA, 25 bp, Homo sapien
tcggtcgcaaaagctcactggcaat

SEQ ID NO: 13437 - DNA, 25 bp, Homo sapien
attacccaagatggaatgtgggcta

SEQ ID NO: 13438 - DNA, 25 bp, Homo sapien
tcctggagatcatttcggtcgcaaa

SEQ ID NO: 13439 - DNA, 25 bp, Homo sapien
ctgaaaggctctaagtgttgagcat

SEQ ID NO: 13440 - DNA, 25 bp, Homo sapien
ggctagagtccagcgttgtgctcct

SEQ ID NO: 13441 - DNA, 25 bp, Homo sapien
tgcctcgcctggattgactgccaga

SEQ ID NO: 13442 - DNA, 25 bp, Homo sapien
aagaggtatcatcccataaatgcaa

SEQ ID NO: 13443 - DNA, 25 bp, Homo sapien
cctggattgactgccagacagctct

SEQ ID NO: 13444 - DNA, 25 bp, Homo sapien
tgccaggcggacaagcccattctca

SEQ ID NO: 13445 - DNA, 25 bp, Homo sapien
cataaatgcaagatttggcaaagac

SEQ ID NO: 13446 - DNA, 25 bp, Homo sapien
accctgaacgatatatgggatggag

SEQ ID NO: 13447 - DNA, 25 bp, Homo sapien
cctaaggccaagagtgccctttatt

SEQ ID NO: 13448 - DNA, 25 bp, Homo sapien
ttctattcaattctgtgctgggagg

SEQ ID NO: 13449 - DNA, 25 bp, Homo sapien
tttggcaaagacaagaacagattcc

SEQ ID NO: 13450 - DNA, 25 bp, Homo sapien
aagctaagccctccaagccttaaaa

SEQ ID NO: 13451 - DNA, 25 bp, Homo sapien
ctgggaggaccctgaacgatatatg

SEQ ID NO: 13452 - DNA, 25 bp, Homo sapien
tgtaatgtaagtcaggagtaaatac

SEQ ID NO: 13453 - DNA, 25 bp, Homo sapien
atttgtaatgtaagtcaggagtaaa

SEQ ID NO: 13454 - DNA, 25 bp, Homo sapien
ttaatctgatgaaaagtaaatcttt

SEQ ID NO: 13455 - DNA, 25 bp, Homo sapien
gtaagtcaggagtaaatacagattt

SEQ ID NO: 13456 - DNA, 25 bp, Homo sapien
caactcctgacattggcttatgttc

SEQ ID NO: 13457 - DNA, 25 bp, Homo sapien
aaaaagtttgatggtgagtagattt

SEQ ID NO: 13458 - DNA, 25 bp, Homo sapien
cagtatttagaaagaaaatccttcc

SEQ ID NO: 13459 - DNA, 25 bp, Homo sapien
acagattttggataaatgtctacac

SEQ ID NO: 13460 - DNA, 25 bp, Homo sapien
ctggggtatccaacttgggaaattc

SEQ ID NO: 13461 - DNA, 25 bp, Homo sapien
aagtttgatggtgagtagattttaa

SEQ ID NO: 13462 - DNA, 25 bp, Homo sapien
aaactctgtatttgtaatgtaagtc

SEQ ID NO: 13463 - DNA, 25 bp, Homo sapien
tcatgttcgagacgggagactccct

SEQ ID NO: 13464 - DNA, 25 bp, Homo sapien
ccctcgtattgcaccaggcttggaa

SEQ ID NO: 13465 - DNA, 25 bp, Homo sapien
acgggagactccctcgtattgcacc

SEQ ID NO: 13466 - DNA, 25 bp, Homo sapien
atgtcatcatgttcatttcgatgtc

SEQ ID NO: 13467 - DNA, 25 bp, Homo sapien
tattgcaccaggcttggaagtgcga

SEQ ID NO: 13468 - DNA, 25 bp, Homo sapien
tttcgatgtcatgttcgagacggga

SEQ ID NO: 13469 - DNA, 25 bp, Homo sapien
accaggcttggaagtgcgagccact

SEQ ID NO: 13470 - DNA, 25 bp, Homo sapien
gactccctcgtattgcaccaggctt

SEQ ID NO: 13471 - DNA, 25 bp, Homo sapien
ttcgagacgggagactccctcgtat

SEQ ID NO: 13472 - DNA, 25 bp, Homo sapien
atgtcatgttcgagacgggagactc

SEQ ID NO: 13473 - DNA, 25 bp, Homo sapien
ctcgtattgcaccaggcttggaagt

SEQ ID NO: 13474 - DNA, 25 bp, Homo sapien
tgtgggtacttctttacagatgtct

SEQ ID NO: 13475 - DNA, 25 bp, Homo sapien
agtaagacaagctctgtcaatcatc

SEQ ID NO: 13476 - DNA, 25 bp, Homo sapien
ttgctgaactgctgaacttgcttcc

SEQ ID NO: 13477 - DNA, 25 bp, Homo sapien
aaaaaggcagtaagacaagctctgt

SEQ ID NO: 13478 - DNA, 25 bp, Homo sapien
tctgtgtatgtagtctgcaaagaca

SEQ ID NO: 13479 - DNA, 25 bp, Homo sapien
tctgcaaagacacatgccattgctg

SEQ ID NO: 13480 - DNA, 25 bp, Homo sapien
gcttccctgtgggtacttctttaca

SEQ ID NO: 13481 - DNA, 25 bp, Homo sapien
aaaggcagtaagacaagctctgtca

SEQ ID NO: 13482 - DNA, 25 bp, Homo sapien
gtttctgtgtatgtagtctgcaaag

SEQ ID NO: 13483 - DNA, 25 bp, Homo sapien
atgccattgctgaactgctgaactt

SEQ ID NO: 13484 - DNA, 25 bp, Homo sapien
aagacacatgccattgctgaactgc

SEQ ID NO: 13485 - DNA, 25 bp, Homo sapien
atggaatgacaaatcctacagttag

SEQ ID NO: 13486 - DNA, 25 bp, Homo sapien
cacacagctaacacaatggaatgac

SEQ ID NO: 13487 - DNA, 25 bp, Homo sapien
gagcatcagactatgttgtgaagac

SEQ ID NO: 13488 - DNA, 25 bp, Homo sapien
atgactgcagtgtgtgtatagagat

SEQ ID NO: 13489 - DNA, 25 bp, Homo sapien
ttggttaatcatggtactaatgtac

SEQ ID NO: 13490 - DNA, 25 bp, Homo sapien
atagagatgatcactgtggcgagta

SEQ ID NO: 13491 - DNA, 25 bp, Homo sapien
acccaataccaagtctgtttctgtg

SEQ ID NO: 13492 - DNA, 25 bp, Homo sapien
ttgaaactagatacaggcagtggtt

SEQ ID NO: 13493 - DNA, 25 bp, Homo sapien
aagaggatcttgtaggataaaattc

SEQ ID NO: 13494 - DNA, 25 bp, Homo sapien
ggcagtggttctatagcatggtgaa

SEQ ID NO: 13495 - DNA, 25 bp, Homo sapien
ctacagttagacatggaaggagcat

SEQ ID NO: 13496 - DNA, 25 bp, Homo sapien
tccaggggccctatttggacttcca

SEQ ID NO: 13497 - DNA, 25 bp, Homo sapien
aatgcccaaaagttagcttgaggtc

SEQ ID NO: 13498 - DNA, 25 bp, Homo sapien
ttactctttgacagaggggagattc

SEQ ID NO: 13499 - DNA, 25 bp, Homo sapien
tgggatgcatattaataacagattt

SEQ ID NO: 13500 - DNA, 25 bp, Homo sapien
ttggacttccaagggctttaatgcc

SEQ ID NO: 13501 - DNA, 25 bp, Homo sapien
gatcaaaataagattacaggtcact

SEQ ID NO: 13502 - DNA, 25 bp, Homo sapien
ttagcttgaggtcgaaaacatttaa

SEQ ID NO: 13503 - DNA, 25 bp, Homo sapien
caatatgatacaattttgggatgca

SEQ ID NO: 13504 - DNA, 25 bp, Homo sapien
ttactgatgcaattgacaaagaaat

SEQ ID NO: 13505 - DNA, 25 bp, Homo sapien
atcatctgtgaatgacaaaagactt

SEQ ID NO: 13506 - DNA, 25 bp, Homo sapien
caggtcactgtaagataatagttat

SEQ ID NO: 13507 - DNA, 25 bp, Homo sapien
cacccggaggtcagagcggccagaa

SEQ ID NO: 13508 - DNA, 25 bp, Homo sapien
cagcgaaattcgtggagtctgaaga

SEQ ID NO: 13509 - DNA, 25 bp, Homo sapien
tggttgacagcgaaattcgtggagt

SEQ ID NO: 13510 - DNA, 25 bp, Homo sapien
gcgaaattcgtggagtctgaagaaa

SEQ ID NO: 13511 - DNA, 25 bp, Homo sapien
gagtctgaagaaacttccaaggtgg

SEQ ID NO: 13512 - DNA, 25 bp, Homo sapien
ttgacagcgaaattcgtggagtctg

SEQ ID NO: 13513 - DNA, 25 bp, Homo sapien
gttgacagcgaaattcgtggagtct

SEQ ID NO: 13514 - DNA, 25 bp, Homo sapien
gacagcgaaattcgtggagtctgaa

SEQ ID NO: 13515 - DNA, 25 bp, Homo sapien
ctcgtggttgacagcgaaattcgtg

SEQ ID NO: 13516 - DNA, 25 bp, Homo sapien
ctccaaagggtagggactctgggcg

SEQ ID NO: 13517 - DNA, 25 bp, Homo sapien
cctcgtggttgacagcgaaattcgt

SEQ ID NO: 13518 - DNA, 25 bp, Homo sapien
catcatggcggtaattgtgggaaat

SEQ ID NO: 13519 - DNA, 25 bp, Homo sapien
ttccgcaaccgcctcagtctcggcc

SEQ ID NO: 13520 - DNA, 25 bp, Homo sapien
ggggctagcagtcctattccgcaac

SEQ ID NO: 13521 - DNA, 25 bp, Homo sapien
gaaagagaagcgcagttctccaaag

SEQ ID NO: 13522 - DNA, 25 bp, Homo sapien
cccaccaatgggcatcatggcggta

SEQ ID NO: 13523 - DNA, 25 bp, Homo sapien
ctcgggcgcgctcgccgaccacgat

SEQ ID NO: 13524 - DNA, 25 bp, Homo sapien
tgacggcctccggttcccatggctt

SEQ ID NO: 13525 - DNA, 25 bp, Homo sapien
accaatgggcatcatggcggtaatt

SEQ ID NO: 13526 - DNA, 25 bp, Homo sapien
aatgtagtcccgggcgggctccgct

SEQ ID NO: 13527 - DNA, 25 bp, Homo sapien
agtgaccgggtaggcgcgtcccaac

SEQ ID NO: 13528 - DNA, 25 bp, Homo sapien
agagaagcgcagttctccaaagggt

SEQ ID NO: 13529 - DNA, 25 bp, Homo sapien
taacgaaatgaatgttgctggggac

SEQ ID NO: 13530 - DNA, 25 bp, Homo sapien
catcatgtgatttggtggtacacac

SEQ ID NO: 13531 - DNA, 25 bp, Homo sapien
aagtgagggagcctagattagatca

SEQ ID NO: 13532 - DNA, 25 bp, Homo sapien
atggttggagctttcagtgccaccc

SEQ ID NO: 13533 - DNA, 25 bp, Homo sapien
ttgctagcactgtgcagggtccttc

SEQ ID NO: 13534 - DNA, 25 bp, Homo sapien
gatttgactgggatacacatcatgt

SEQ ID NO: 13535 - DNA, 25 bp, Homo sapien
tccagaaaagatgaacaacttgttc

SEQ ID NO: 13536 - DNA, 25 bp, Homo sapien
aacctccagggacacgacagggctt

SEQ ID NO: 13537 - DNA, 25 bp, Homo sapien
ctggtcatcggaaagatcaaagcat

SEQ ID NO: 13538 - DNA, 25 bp, Homo sapien
tggtacacactgagggagctcacat

SEQ ID NO: 13539 - DNA, 25 bp, Homo sapien
atcaaagcatgatgagatggttgga

SEQ ID NO: 13540 - DNA, 25 bp, Homo sapien
cctggcactaccaactgtgggaaac

SEQ ID NO: 13541 - DNA, 25 bp, Homo sapien
tggcactaccaactgtgggaaaccc

SEQ ID NO: 13542 - DNA, 25 bp, Homo sapien
ttcctgcctggcactaccaactgtg

SEQ ID NO: 13543 - DNA, 25 bp, Homo sapien
caaaaggcaaagccttggttgggta

SEQ ID NO: 13544 - DNA, 25 bp, Homo sapien
tgcctggcactaccaactgtgggaa

SEQ ID NO: 13545 - DNA, 25 bp, Homo sapien
tttgtttaatggcctgggagcttga

SEQ ID NO: 13546 - DNA, 25 bp, Homo sapien
cactaccaactgtgggaaacccaag

SEQ ID NO: 13547 - DNA, 25 bp, Homo sapien
ggaaacccaagtaggtggcaccata

SEQ ID NO: 13548 - DNA, 25 bp, Homo sapien
gtttaatggcctgggagcttgagcc

SEQ ID NO: 13549 - DNA, 25 bp, Homo sapien
tgggaaacccaagtaggtggcacca

SEQ ID NO: 13550 - DNA, 25 bp, Homo sapien
aaacccaagtaggtggcaccatagt

SEQ ID NO: 13551 - DNA, 25 bp, Homo sapien
tgtgaattaacagcctggaggtggt

SEQ ID NO: 13552 - DNA, 25 bp, Homo sapien
ctttgtcagggacccttggatctgc

SEQ ID NO: 13553 - DNA, 25 bp, Homo sapien
aaaacaaagcagatagaaggacagg

SEQ ID NO: 13554 - DNA, 25 bp, Homo sapien
cggaggtgaggtgttctctttgtca

SEQ ID NO: 13555 - DNA, 25 bp, Homo sapien
acaggcctaggtcaggcaaccgtct

SEQ ID NO: 13556 - DNA, 25 bp, Homo sapien
tgctggggacagagcctgcccaact

SEQ ID NO: 13557 - DNA, 25 bp, Homo sapien
tcaggcaaccgtctggggtaatgca

SEQ ID NO: 13558 - DNA, 25 bp, Homo sapien
gtgcttcacctagtaatcaacataa

SEQ ID NO: 13559 - DNA, 25 bp, Homo sapien
gacccttggatctgctggggacaga

SEQ ID NO: 13560 - DNA, 25 bp, Homo sapien
ccaggcttgactggcacaggtctgg

SEQ ID NO: 13561 - DNA, 25 bp, Homo sapien
ggggtaatgcaggtgtcacagccac

SEQ ID NO: 13562 - DNA, 25 bp, Homo sapien
tgctccttgtggttaaaacaggatg

SEQ ID NO: 13563 - DNA, 25 bp, Homo sapien
ctgcactggttaaggtggacacaat

SEQ ID NO: 13564 - DNA, 25 bp, Homo sapien
tggacacaatccaggaggaatggta

SEQ ID NO: 13565 - DNA, 25 bp, Homo sapien
ttctctaatgtgtgccctggaggtc

SEQ ID NO: 13566 - DNA, 25 bp, Homo sapien
caacacagacagatttagtggtaat

SEQ ID NO: 13567 - DNA, 25 bp, Homo sapien
caggataacactgcactggttaagg

SEQ ID NO: 13568 - DNA, 25 bp, Homo sapien
tgcaaaaggtttactgtgaacacat

SEQ ID NO: 13569 - DNA, 25 bp, Homo sapien
cctggaggtctgtggtttcctctgt

SEQ ID NO: 13570 - DNA, 25 bp, Homo sapien
tagtggtaatatgtttcagaataac

SEQ ID NO: 13571 - DNA, 25 bp, Homo sapien
ggtagagaaaccacagggtacttca

SEQ ID NO: 13572 - DNA, 25 bp, Homo sapien
tgagtttggaagatgaaattctgtt

SEQ ID NO: 13573 - DNA, 25 bp, Homo sapien
acttcggatagaatggaagaaggca

SEQ ID NO: 13574 - DNA, 25 bp, Homo sapien
aagagacttcggatagaatggaaga

SEQ ID NO: 13575 - DNA, 25 bp, Homo sapien
gcctaatgattccttactacattgt

SEQ ID NO: 13576 - DNA, 25 bp, Homo sapien
agctcccagcttgaattaacactga

SEQ ID NO: 13577 - DNA, 25 bp, Homo sapien
ataaccctttctggtacatttggta

SEQ ID NO: 13578 - DNA, 25 bp, Homo sapien
aatgtttaattagccaaacgtctcc

SEQ ID NO: 13579 - DNA, 25 bp, Homo sapien
attagccaaacgtctccaattcttt

SEQ ID NO: 13580 - DNA, 25 bp, Homo sapien
aaaaatcctgaactaatggatatgg

SEQ ID NO: 13581 - DNA, 25 bp, Homo sapien
ccagcttgaattaacactgacattt

SEQ ID NO: 13582 - DNA, 25 bp, Homo sapien
tacatgttaaatagaaacctgaaac

SEQ ID NO: 13583 - DNA, 25 bp, Homo sapien
tgaaccaacttttagataactattg

SEQ ID NO: 13584 - DNA, 25 bp, Homo sapien
caggtgcagcctgacttctgagcag

SEQ ID NO: 13585 - DNA, 25 bp, Homo sapien
gctcgggtacatgatcctgggtctt

SEQ ID NO: 13586 - DNA, 25 bp, Homo sapien
gagtcacaagatttgccctcagtgc

SEQ ID NO: 13587 - DNA, 25 bp, Homo sapien
catcgcccgaaatgagaccagtgct

SEQ ID NO: 13588 - DNA, 25 bp, Homo sapien
aggcccacgagtctacaggaatctt

SEQ ID NO: 13589 - DNA, 25 bp, Homo sapien
cgagccagtgccgagttctatgtcc

SEQ ID NO: 13590 - DNA, 25 bp, Homo sapien
gtgttggctgggtcacaattccctc

SEQ ID NO: 13591 - DNA, 25 bp, Homo sapien
gaggcctggcaatgcatatcttgta

SEQ ID NO: 13592 - DNA, 25 bp, Homo sapien
caggtgcagagtgacaaaccatctt

SEQ ID NO: 13593 - DNA, 25 bp, Homo sapien
aaaggtccagggacatgttcagccc

SEQ ID NO: 13594 - DNA, 25 bp, Homo sapien
cctgctgttgggcatcgcccgaaat

SEQ ID NO: 13595 - DNA, 25 bp, Homo sapien
aatacaaagtggtatgggttcacag

SEQ ID NO: 13596 - DNA, 25 bp, Homo sapien
tacttaagagataccggccatcaac

SEQ ID NO: 13597 - DNA, 25 bp, Homo sapien
ctaagtgctgtaagctgaaaaagaa

SEQ ID NO: 13598 - DNA, 25 bp, Homo sapien
cacagagtaggaagttaaagaaatg

SEQ ID NO: 13599 - DNA, 25 bp, Homo sapien
gaggttagcctcaaaataaatcaga

SEQ ID NO: 13600 - DNA, 25 bp, Homo sapien
ttagtcaagtgaattacaatgtcct

SEQ ID NO: 13601 - DNA, 25 bp, Homo sapien
attagttaacacagatgaggcagga

SEQ ID NO: 13602 - DNA, 25 bp, Homo sapien
ttcacaggatgttatagcatttatc

SEQ ID NO: 13603 - DNA, 25 bp, Homo sapien
tggtatccaaaatttccctaggcta

SEQ ID NO: 13604 - DNA, 25 bp, Homo sapien
ttatctaggaggagactatcaaacc

SEQ ID NO: 13605 - DNA, 25 bp, Homo sapien
agacagtctttagggtgtgactatt

SEQ ID NO: 13606 - DNA, 25 bp, Homo sapien
gtcaacagacagaaaccatgccagt

SEQ ID NO: 13607 - DNA, 25 bp, Homo sapien
attgccagcagctcacagggacctc

SEQ ID NO: 13608 - DNA, 25 bp, Homo sapien
ggtataaagttgatgaggtgccaaa

SEQ ID NO: 13609 - DNA, 25 bp, Homo sapien
gacgcacatcctgtgagggagctct

SEQ ID NO: 13610 - DNA, 25 bp, Homo sapien
actcccagggccaagcaattgccag

SEQ ID NO: 13611 - DNA, 25 bp, Homo sapien
tgtgagccacagttactaccctagg

SEQ ID NO: 13612 - DNA, 25 bp, Homo sapien
tgccaaagggtaaaaagaactgtga

SEQ ID NO: 13613 - DNA, 25 bp, Homo sapien
agaggatgtaatagcaaggattgtt

SEQ ID NO: 13614 - DNA, 25 bp, Homo sapien
ctaaagtcatgtctggatagcccag

SEQ ID NO: 13615 - DNA, 25 bp, Homo sapien
tttgacagcttggtcaaaggcccac

SEQ ID NO: 13616 - DNA, 25 bp, Homo sapien
ccagttatttgagcagaggatgtaa

SEQ ID NO: 13617 - DNA, 25 bp, Homo sapien
ttgtagcaggttatcatggagttta

SEQ ID NO: 13618 - DNA, 25 bp, Homo sapien
atgtgcctcaaaactgtatgggaaa

SEQ ID NO: 13619 - DNA, 25 bp, Homo sapien
cagatgcatgtaacaaggcacagtt

SEQ ID NO: 13620 - DNA, 25 bp, Homo sapien
tggttaagactcaaagttctggctc

SEQ ID NO: 13621 - DNA, 25 bp, Homo sapien
gatttaagggaatccatgtgcctca

SEQ ID NO: 13622 - DNA, 25 bp, Homo sapien
ttggacaactatatgatacagatgc

SEQ ID NO: 13623 - DNA, 25 bp, Homo sapien
ggctctagagcaaccctgcttggat

SEQ ID NO: 13624 - DNA, 25 bp, Homo sapien
agtcacttgctacctggataatcct

SEQ ID NO: 13625 - DNA, 25 bp, Homo sapien
caactctgaaggtttgtcttgaaaa

SEQ ID NO: 13626 - DNA, 25 bp, Homo sapien
ttggattaagtcgtagctcagtcac

SEQ ID NO: 13627 - DNA, 25 bp, Homo sapien
aaactgtatgggaaattggacaact

SEQ ID NO: 13628 - DNA, 25 bp, Homo sapien
agctctacactgatggcacccaagt

SEQ ID NO: 13629 - DNA, 25 bp, Homo sapien
gagaagggacaagtcattgccatcc

SEQ ID NO: 13630 - DNA, 25 bp, Homo sapien
caaggtcattcgtaagtgagagccc

SEQ ID NO: 13631 - DNA, 25 bp, Homo sapien
tttcacgactggtgtggacacacat

SEQ ID NO: 13632 - DNA, 25 bp, Homo sapien
agagcccggaagttatgcaacactt

SEQ ID NO: 13633 - DNA, 25 bp, Homo sapien
ggactcgtgtggcagtttgcatttc

SEQ ID NO: 13634 - DNA, 25 bp, Homo sapien
ctgctcagggccacgtagatcatct

SEQ ID NO: 13635 - DNA, 25 bp, Homo sapien
agcagcagcttcaaggtcattcgta

SEQ ID NO: 13636 - DNA, 25 bp, Homo sapien
cagccagatggtaaattcacgtttg

SEQ ID NO: 13637 - DNA, 25 bp, Homo sapien
cccaagtcacagcagggactcgtgt

SEQ ID NO: 13638 - DNA, 25 bp, Homo sapien
tcttacagtggagaactatttgact

SEQ ID NO: 13639 - DNA, 25 bp, Homo sapien
tttggtttttggatagagcgtcttc

SEQ ID NO: 13640 - DNA, 25 bp, Homo sapien
tgctgctctgtagatatgagctcgg

SEQ ID NO: 13641 - DNA, 25 bp, Homo sapien
aattcagtacagaaatggggaggat

SEQ ID NO: 13642 - DNA, 25 bp, Homo sapien
cagtgggttctctcctagcacagca

SEQ ID NO: 13643 - DNA, 25 bp, Homo sapien
acagccacccagtgtctcagcagga

SEQ ID NO: 13644 - DNA, 25 bp, Homo sapien
ctttttcagggataggctggtggtt

SEQ ID NO: 13645 - DNA, 25 bp, Homo sapien
agcgtcttcttgaaatctctgagtc

SEQ ID NO: 13646 - DNA, 25 bp, Homo sapien
tgtagaagaatgaggaagacccagg

SEQ ID NO: 13647 - DNA, 25 bp, Homo sapien
tctcctagcacagcaagggagagct

SEQ ID NO: 13648 - DNA, 25 bp, Homo sapien
agggagagggaattcacaattcact

SEQ ID NO: 13649 - DNA, 25 bp, Homo sapien
ttggagatgccaagaccctcccagt

SEQ ID NO: 13650 - DNA, 25 bp, Homo sapien
ggcataggaattggaaaggaagaaa

SEQ ID NO: 13651 - DNA, 25 bp, Homo sapien
agtgctagaacacagtaactgtatg

SEQ ID NO: 13652 - DNA, 25 bp, Homo sapien
catatatagccaggagaagaagtgc

SEQ ID NO: 13653 - DNA, 25 bp, Homo sapien
aagagggtttgctaagtctctggac

SEQ ID NO: 13654 - DNA, 25 bp, Homo sapien
attttgaggaaatgacaagcttttc

SEQ ID NO: 13655 - DNA, 25 bp, Homo sapien
tctttcgcatatatagccaggagaa

SEQ ID NO: 13656 - DNA, 25 bp, Homo sapien
aagcttttccaaagtggctacacca

SEQ ID NO: 13657 - DNA, 25 bp, Homo sapien
ttcacattcctaccagcagcatttg

SEQ ID NO: 13658 - DNA, 25 bp, Homo sapien
gtctctggacataaatcaatagatg

SEQ ID NO: 13659 - DNA, 25 bp, Homo sapien
aataaacggcataggaattggaaag

SEQ ID NO: 13660 - DNA, 25 bp, Homo sapien
aggaagaaatgatgtatcacgtaaa

SEQ ID NO: 13661 - DNA, 25 bp, Homo sapien
aggtgtttggggacatccagatcaa

SEQ ID NO: 13662 - DNA, 25 bp, Homo sapien
tggaattctgatgagaggacaaatc

SEQ ID NO: 13663 - DNA, 25 bp, Homo sapien
ctggaaattaggatttgaagctgtc

SEQ ID NO: 13664 - DNA, 25 bp, Homo sapien
atgaaaatttgaccaagacaccctc

SEQ ID NO: 13665 - DNA, 25 bp, Homo sapien
agcatatgaagaagagtggaattct

SEQ ID NO: 13666 - DNA, 25 bp, Homo sapien
aaagaatacatatgcgagacggtgt

SEQ ID NO: 13667 - DNA, 25 bp, Homo sapien
acaaggccctccatgatccaacagt

SEQ ID NO: 13668 - DNA, 25 bp, Homo sapien
tccagatcaagatgactataagcat

SEQ ID NO: 13669 - DNA, 25 bp, Homo sapien
acatttagaatgatgcttggcacat

SEQ ID NO: 13670 - DNA, 25 bp, Homo sapien
aagccctagcgaagagcagctgtct

SEQ ID NO: 13671 - DNA, 25 bp, Homo sapien
agccttgacatagcacctgtggtac

SEQ ID NO: 13672 - DNA, 25 bp, Homo sapien
tttaactatgctgcttgggagctgc

SEQ ID NO: 13673 - DNA, 25 bp, Homo sapien
ttgggagctgctggttcctgaacct

SEQ ID NO: 13674 - DNA, 25 bp, Homo sapien
aaagacggattttctgggtacacaa

SEQ ID NO: 13675 - DNA, 25 bp, Homo sapien
cttgaaagacggattttctgggtac

SEQ ID NO: 13676 - DNA, 25 bp, Homo sapien
gtactttcaccaagacgtgactgtt

SEQ ID NO: 13677 - DNA, 25 bp, Homo sapien
ttcctgaacctaaggagcaggggct

SEQ ID NO: 13678 - DNA, 25 bp, Homo sapien
tttctcccaggactttgaagatatt

SEQ ID NO: 13679 - DNA, 25 bp, Homo sapien
acgtgactgtttgggtagagctttt

SEQ ID NO: 13680 - DNA, 25 bp, Homo sapien
tgggtacacaattctaggctatcac

SEQ ID NO: 13681 - DNA, 25 bp, Homo sapien
tgggaaagttctcagccgtatttct

SEQ ID NO: 13682 - DNA, 25 bp, Homo sapien
aggctatcactattttctcccagga

SEQ ID NO: 13683 - DNA, 25 bp, Homo sapien
agatgctaagtggaaaaaagtttgt

SEQ ID NO: 13684 - DNA, 25 bp, Homo sapien
gtatatattaagatgctaagtggaa

SEQ ID NO: 13685 - DNA, 25 bp, Homo sapien
tccattcttaaatcccaaggtgcac

SEQ ID NO: 13686 - DNA, 25 bp, Homo sapien
ataaagtcaaatacaggctatgtat

SEQ ID NO: 13687 - DNA, 25 bp, Homo sapien
aacaaatttgtgcaatgaaatgtcc

SEQ ID NO: 13688 - DNA, 25 bp, Homo sapien
tacagttcatatgaagagaaacaaa

SEQ ID NO: 13689 - DNA, 25 bp, Homo sapien
attaagatgctaagtggaaaaaagt

SEQ ID NO: 13690 - DNA, 25 bp, Homo sapien
tacactaaatgcagtatgctatagt

SEQ ID NO: 13691 - DNA, 25 bp, Homo sapien
aatttgtgcaatgaaatgtccatga

SEQ ID NO: 13692 - DNA, 25 bp, Homo sapien
cttaaatcccaaggtgcactgaatt

SEQ ID NO: 13693 - DNA, 25 bp, Homo sapien
aactgataacctctctgtctcctga

SEQ ID NO: 13694 - DNA, 25 bp, Homo sapien
tctatagtcatcacctctgactacc

SEQ ID NO: 13695 - DNA, 25 bp, Homo sapien
ggtagtcagaggtgatgactataga

SEQ ID NO: 13696 - DNA, 25 bp, Homo sapien
agatataggaatagccaataagctc

SEQ ID NO: 13697 - DNA, 25 bp, Homo sapien
gcggagcaactagaaccgtcatcta

SEQ ID NO: 13698 - DNA, 25 bp, Homo sapien
aagactgacagacccaaatgttgac

SEQ ID NO: 13699 - DNA, 25 bp, Homo sapien
ataagctcatgaaaatgtgctaaac

SEQ ID NO: 13700 - DNA, 25 bp, Homo sapien
gaacatgggcaaatggctttaattg

SEQ ID NO: 13701 - DNA, 25 bp, Homo sapien
ttctcaacagaagatataggaatag

SEQ ID NO: 13702 - DNA, 25 bp, Homo sapien
tgtcagtaaagtcaaggtgtataaa

SEQ ID NO: 13703 - DNA, 25 bp, Homo sapien
gcacttctcagcaataaagacagat

SEQ ID NO: 13704 - DNA, 25 bp, Homo sapien
tatgaccaatggaagcgtaaaatgc

SEQ ID NO: 13705 - DNA, 25 bp, Homo sapien
aagacagataaaacacgaattcata

SEQ ID NO: 13706 - DNA, 25 bp, Homo sapien
aaatgttgacaaaggtgcggagcaa

SEQ ID NO: 13707 - DNA, 25 bp, Homo sapien
gtttaatgaaaatcacactcaacac

SEQ ID NO: 13708 - DNA, 25 bp, Homo sapien
gagtgcagggaaaactgccactttt

SEQ ID NO: 13709 - DNA, 25 bp, Homo sapien
cttacaatcatgacgaacctcgggg

SEQ ID NO: 13710 - DNA, 25 bp, Homo sapien
tcatgacgaacctcggggaacttac

SEQ ID NO: 13711 - DNA, 25 bp, Homo sapien
cggggaacttacaattgtgacgaaa

SEQ ID NO: 13712 - DNA, 25 bp, Homo sapien
aacctcgcgtctttccacaggtctg

SEQ ID NO: 13713 - DNA, 25 bp, Homo sapien
ttacaattgtgacgaaaggcaaagg

SEQ ID NO: 13714 - DNA, 25 bp, Homo sapien
tccacaggtctggaatgcactgtcc

SEQ ID NO: 13715 - DNA, 25 bp, Homo sapien
ttttaggtccctgactgtattagtc

SEQ ID NO: 13716 - DNA, 25 bp, Homo sapien
gtgatgttctttccaacctcgcgtc

SEQ ID NO: 13717 - DNA, 25 bp, Homo sapien
tgcatttcgtgcttaacaacataat

SEQ ID NO: 13718 - DNA, 25 bp, Homo sapien
gttcatgcaactcagactactatag

SEQ ID NO: 13719 - DNA, 25 bp, Homo sapien
agccaccatgctcaacccaatggtg

SEQ ID NO: 13720 - DNA, 25 bp, Homo sapien
ataaagttcatgcaactcagactac

SEQ ID NO: 13721 - DNA, 25 bp, Homo sapien
acccaatggtgcttttgtattgttt

SEQ ID NO: 13722 - DNA, 25 bp, Homo sapien
aatcttaaacaatctaacaagcttg

SEQ ID NO: 13723 - DNA, 25 bp, Homo sapien
ctcagactactatagaagaaaatct

SEQ ID NO: 13724 - DNA, 25 bp, Homo sapien
aatcatctgaaaaggtcgtgagccc

SEQ ID NO: 13725 - DNA, 25 bp, Homo sapien
gcaactcagactactatagaagaaa

SEQ ID NO: 13726 - DNA, 25 bp, Homo sapien
ttaatcatctgaaaaggtcgtgagc

SEQ ID NO: 13727 - DNA, 25 bp, Homo sapien
gggaacattaatcatctgaaaaggt

SEQ ID NO: 13728 - DNA, 25 bp, Homo sapien
cattaatcatctgaaaaggtcgtga

SEQ ID NO: 13729 - DNA, 25 bp, Homo sapien
gctctcggagggggtcccgggacag

SEQ ID NO: 13730 - DNA, 25 bp, Homo sapien
ctgtcccgggaccccctccgagagc

SEQ ID NO: 13731 - DNA, 25 bp, Homo sapien
gtaagacgtggcctacacccctgtc

SEQ ID NO: 13732 - DNA, 25 bp, Homo sapien
gacaggggtgtaggccacgtcttac

SEQ ID NO: 13733 - DNA, 25 bp, Homo sapien
tttcaaaatcaccaagcagtcttta

SEQ ID NO: 13734 - DNA, 25 bp, Homo sapien
tattggatattttgagcataacgac

SEQ ID NO: 13735 - DNA, 25 bp, Homo sapien
tgaagatgatctctcccaaaatgat

SEQ ID NO: 13736 - DNA, 25 bp, Homo sapien
gcataacgactcagacaactataga

SEQ ID NO: 13737 - DNA, 25 bp, Homo sapien
ttggctgccatgttaaattcttgtt

SEQ ID NO: 13738 - DNA, 25 bp, Homo sapien
taaagccatgtttctgttacaattc

SEQ ID NO: 13739 - DNA, 25 bp, Homo sapien
attttgtcttgagggtcatactggt

SEQ ID NO: 13740 - DNA, 25 bp, Homo sapien
ttgagggtcatactggtaaagccat

SEQ ID NO: 13741 - DNA, 25 bp, Homo sapien
atgacgactgtgcttttctttctgc

SEQ ID NO: 13742 - DNA, 25 bp, Homo sapien
ttgacatttccatcgaaagctctgc

SEQ ID NO: 13743 - DNA, 25 bp, Homo sapien
agtagtgactattttgcatgacgac

SEQ ID NO: 13744 - DNA, 25 bp, Homo sapien
cccaagaaggtaaatgagtagtcaa

SEQ ID NO: 13745 - DNA, 25 bp, Homo sapien
tcattgcaacaagtcagtagagaaa

SEQ ID NO: 13746 - DNA, 25 bp, Homo sapien
acagtgtggagttatctaagcaagc

SEQ ID NO: 13747 - DNA, 25 bp, Homo sapien
ctgcaaagacctcaacaaagatatc

SEQ ID NO: 13748 - DNA, 25 bp, Homo sapien
acttcgaggatgaagagtcactcat

SEQ ID NO: 13749 - DNA, 25 bp, Homo sapien
ctaagcaagcaccaaggtaggatat

SEQ ID NO: 13750 - DNA, 25 bp, Homo sapien
aaatagttggttgaaggcagaatgc

SEQ ID NO: 13751 - DNA, 25 bp, Homo sapien
taggtcattaggcatcacagtgtgg

SEQ ID NO: 13752 - DNA, 25 bp, Homo sapien
gctagaaagccctgtgtaggtcatt

SEQ ID NO: 13753 - DNA, 25 bp, Homo sapien
tattacacgtagcagaaagaaagtc

SEQ ID NO: 13754 - DNA, 25 bp, Homo sapien
tcaagaaaccgtctgctggaaatat

SEQ ID NO: 13755 - DNA, 25 bp, Homo sapien
aaagaacagagaaatcccaaccagc

SEQ ID NO: 13756 - DNA, 25 bp, Homo sapien
tcatatacatggagcaattagaggt

SEQ ID NO: 13757 - DNA, 25 bp, Homo sapien
ctaccgtaacagctatatagtctga

SEQ ID NO: 13758 - DNA, 25 bp, Homo sapien
ctgttttgtaatttgcgtttctccc

SEQ ID NO: 13759 - DNA, 25 bp, Homo sapien
attacagacactgtcctatgattac

SEQ ID NO: 13760 - DNA, 25 bp, Homo sapien
acagagaaatcccaaccagcaactt

SEQ ID NO: 13761 - DNA, 25 bp, Homo sapien
atagtctgaatatgaatgtactcta

SEQ ID NO: 13762 - DNA, 25 bp, Homo sapien
catggagcaattagaggtactgttt

SEQ ID NO: 13763 - DNA, 25 bp, Homo sapien
accactctcggccaacagactgatc

SEQ ID NO: 13764 - DNA, 25 bp, Homo sapien
acaccaagatctaccgtaacagcta

SEQ ID NO: 13765 - DNA, 25 bp, Homo sapien
gatcttgctttaactgaggtgtccc

SEQ ID NO: 13766 - DNA, 25 bp, Homo sapien
tttaggggaagagcttcttatggat

SEQ ID NO: 13767 - DNA, 25 bp, Homo sapien
taaagcaaacctgctgggacagttt

SEQ ID NO: 13768 - DNA, 25 bp, Homo sapien
aatagctccgagttgccatttgtgt

SEQ ID NO: 13769 - DNA, 25 bp, Homo sapien
agagtagagttagctgtgctgcctt

SEQ ID NO: 13770 - DNA, 25 bp, Homo sapien
gaatggaagtggtttgttgatctaa

SEQ ID NO: 13771 - DNA, 25 bp, Homo sapien
tcgaggcttacccagatggctacag

SEQ ID NO: 13772 - DNA, 25 bp, Homo sapien
agaaggaaaatgacccattaacctg

SEQ ID NO: 13773 - DNA, 25 bp, Homo sapien
tccctgaaagaagcatcgaggctta

SEQ ID NO: 13774 - DNA, 25 bp, Homo sapien
tgacagacaagcagtaacaaatagc

SEQ ID NO: 13775 - DNA, 25 bp, Homo sapien
ataaaagtgcactcagaatggaagt

SEQ ID NO: 13776 - DNA, 25 bp, Homo sapien
catctcccggacatgctaaagcata

SEQ ID NO: 13777 - DNA, 25 bp, Homo sapien
gtcgtacccctggtgccggtaagac

SEQ ID NO: 13778 - DNA, 25 bp, Homo sapien
gtcttaccggcaccaggggtacgac

SEQ ID NO: 13779 - DNA, 25 bp, Homo sapien
atccttatcactggggctgggcgca

SEQ ID NO: 13780 - DNA, 25 bp, Homo sapien
aacatagagctacaacccatactta

SEQ ID NO: 13781 - DNA, 25 bp, Homo sapien
aaaaatccttatcactggggctggg

SEQ ID NO: 13782 - DNA, 25 bp, Homo sapien
ataaaaatccttatcactggggctg

SEQ ID NO: 13783 - DNA, 25 bp, Homo sapien
caacccatacttatggtttggaaaa

SEQ ID NO: 13784 - DNA, 25 bp, Homo sapien
agaaacatagagctacaacccatac

SEQ ID NO: 13785 - DNA, 25 bp, Homo sapien
ccataaaaatccttatcactggggc

SEQ ID NO: 13786 - DNA, 25 bp, Homo sapien
atagagctacaacccatacttatgg

SEQ ID NO: 13787 - DNA, 25 bp, Homo sapien
atgattagaaacatagagctacaac

SEQ ID NO: 13788 - DNA, 25 bp, Homo sapien
aaaatccttatcactggggctgggc

SEQ ID NO: 13789 - DNA, 25 bp, Homo sapien
aaatgattagaaacatagagctaca

SEQ ID NO: 13790 - DNA, 25 bp, Homo sapien
atgattagaaacatagagctacaac

SEQ ID NO: 13791 - DNA, 25 bp, Homo sapien
aaatgattagaaacatagagctaca

SEQ ID NO: 13792 - DNA, 25 bp, Homo sapien
agaaacatagagctacaacccatac

SEQ ID NO: 13793 - DNA, 25 bp, Homo sapien
ccataaaaatccttatcactggggc

SEQ ID NO: 13794 - DNA, 25 bp, Homo sapien
tttagattcaacacggtacccataa

SEQ ID NO: 13795 - DNA, 25 bp, Homo sapien
taaaaatccttatcactggggctgg

SEQ ID NO: 13796 - DNA, 25 bp, Homo sapien
aacatagagctacaacccatactta

SEQ ID NO: 13797 - DNA, 25 bp, Homo sapien
atccttatcactggggctgggcgca

SEQ ID NO: 13798 - DNA, 25 bp, Homo sapien
aaaatccttatcactggggctgggc

SEQ ID NO: 13799 - DNA, 25 bp, Homo sapien
atagagctacaacccatacttatgg

SEQ ID NO: 13800 - DNA, 25 bp, Homo sapien
taagtaacatattcagtggatttgc

SEQ ID NO: 13801 - DNA, 25 bp, Homo sapien
ggccttcggtcggacatcggggtcc

SEQ ID NO: 13802 - DNA, 25 bp, Homo sapien
ggaccccgatgtccgaccgaaggcc

SEQ ID NO: 13803 - DNA, 25 bp, Homo sapien
tcactcaaaggcagtacttacaacc

SEQ ID NO: 13804 - DNA, 25 bp, Homo sapien
catgctgccctggttgccttgagag

SEQ ID NO: 13805 - DNA, 25 bp, Homo sapien
tgccctggttgccttgagaggtcac

SEQ ID NO: 13806 - DNA, 25 bp, Homo sapien
gtttccatctgtattctacccatgc

SEQ ID NO: 13807 - DNA, 25 bp, Homo sapien
gtttggaagcgccttcctagtaggc

SEQ ID NO: 13808 - DNA, 25 bp, Homo sapien
ttcctagtaggcattgaaggttcac

SEQ ID NO: 13809 - DNA, 25 bp, Homo sapien
ctggttgccttgagaggtcacttct

SEQ ID NO: 13810 - DNA, 25 bp, Homo sapien
tgtggttcttgtgggattcccgttg

SEQ ID NO: 13811 - DNA, 25 bp, Homo sapien
aggcattgaaggttcactcaaaggc

SEQ ID NO: 13812 - DNA, 25 bp, Homo sapien
tgggattcccgttggtttccatctg

SEQ ID NO: 13813 - DNA, 25 bp, Homo sapien
tggaagcgccttcctagtaggcatt

SEQ ID NO: 13814 - DNA, 25 bp, Homo sapien
tcagaaaagattgcagaggtaaaat

SEQ ID NO: 13815 - DNA, 25 bp, Homo sapien
ggatgatgaaatggcatgatgctca

SEQ ID NO: 13816 - DNA, 25 bp, Homo sapien
tgtaattgctcaactgtctcagaca

SEQ ID NO: 13817 - DNA, 25 bp, Homo sapien
ctaccaatgaacttggggatgatga

SEQ ID NO: 13818 - DNA, 25 bp, Homo sapien
aggaaaagctgctcaactgctgcac

SEQ ID NO: 13819 - DNA, 25 bp, Homo sapien
tgtgctgggaatggatatcatcatc

SEQ ID NO: 13820 - DNA, 25 bp, Homo sapien
ctcctttgtgctgggaatggatatc

SEQ ID NO: 13821 - DNA, 25 bp, Homo sapien
aaaaccacactgtaaggtatagttc

SEQ ID NO: 13822 - DNA, 25 bp, Homo sapien
aggtatagttcaggaagaaaggaaa

SEQ ID NO: 13823 - DNA, 25 bp, Homo sapien
tcagagatggatattcaaaatgttc

SEQ ID NO: 13824 - DNA, 25 bp, Homo sapien
atcatcttgccatagaggtgtcttc

SEQ ID NO: 13825 - DNA, 25 bp, Homo sapien
tttaaagccaatctgaccatatcac

SEQ ID NO: 13826 - DNA, 25 bp, Homo sapien
agtctcaagccttgctcagatctgc

SEQ ID NO: 13827 - DNA, 25 bp, Homo sapien
tgactaagctgcagccagtccagcc

SEQ ID NO: 13828 - DNA, 25 bp, Homo sapien
agcttcgcattttccttagggccaa

SEQ ID NO: 13829 - DNA, 25 bp, Homo sapien
cagttgactaagctgcagccagtcc

SEQ ID NO: 13830 - DNA, 25 bp, Homo sapien
gcctcatctgcagttgactaagctg

SEQ ID NO: 13831 - DNA, 25 bp, Homo sapien
tcatcgacccggataactcagcctc

SEQ ID NO: 13832 - DNA, 25 bp, Homo sapien
gctagcccagcccttcagtctcaag

SEQ ID NO: 13833 - DNA, 25 bp, Homo sapien
atctaacctcagaaagcttcgcatt

SEQ ID NO: 13834 - DNA, 25 bp, Homo sapien
cttagggccaacacggaactccttc

SEQ ID NO: 13835 - DNA, 25 bp, Homo sapien
cgctcggcccagacagctcatttta

SEQ ID NO: 13836 - DNA, 25 bp, Homo sapien
gactcccgtttgtgatagtcagcgg

SEQ ID NO: 13837 - DNA, 25 bp, Homo sapien
ccgctgactatcacaaacgggagtc

SEQ ID NO: 13838 - DNA, 25 bp, Homo sapien
atataacaatataggaaacacatac

SEQ ID NO: 13839 - DNA, 25 bp, Homo sapien
acagtacaacttgtaagtacactgc

SEQ ID NO: 13840 - DNA, 25 bp, Homo sapien
ggaaacacatacacagtacaacttg

SEQ ID NO: 13841 - DNA, 25 bp, Homo sapien
tacacagtacaacttgtaagtacac

SEQ ID NO: 13842 - DNA, 25 bp, Homo sapien
aacaatataggaaacacatacacag

SEQ ID NO: 13843 - DNA, 25 bp, Homo sapien
ttgtaagtacactgctcaatcagat

SEQ ID NO: 13844 - DNA, 25 bp, Homo sapien
atcagatttcatctggatcaagaac

SEQ ID NO: 13845 - DNA, 25 bp, Homo sapien
caacttgtaagtacactgctcaatc

SEQ ID NO: 13846 - DNA, 25 bp, Homo sapien
taagtacactgctcaatcagatttc

SEQ ID NO: 13847 - DNA, 25 bp, Homo sapien
acttgtaagtacactgctcaatcag

SEQ ID NO: 13848 - DNA, 25 bp, Homo sapien
agtacaacttgtaagtacactgctc

SEQ ID NO: 13849 - DNA, 25 bp, Homo sapien
tggtcaggttcagaagaaatatgcc

SEQ ID NO: 13850 - DNA, 25 bp, Homo sapien
aaaatccagaagcaaaacatatacc

SEQ ID NO: 13851 - DNA, 25 bp, Homo sapien
tatgctcagtaccagtatgatatac

SEQ ID NO: 13852 - DNA, 25 bp, Homo sapien
ctcataggactatggctaagattac

SEQ ID NO: 13853 - DNA, 25 bp, Homo sapien
tcagaagaaatatgcctacacaggc

SEQ ID NO: 13854 - DNA, 25 bp, Homo sapien
ttggcagggaaaactgtaccaatct

SEQ ID NO: 13855 - DNA, 25 bp, Homo sapien
tggtgatgactcctctatgaatagt

SEQ ID NO: 13856 - DNA, 25 bp, Homo sapien
atatgaccatcttggcagggaaaac

SEQ ID NO: 13857 - DNA, 25 bp, Homo sapien
atgttgtacttgtgtggtcaggttc

SEQ ID NO: 13858 - DNA, 25 bp, Homo sapien
atatgcctacacaggcaaggaggtt

SEQ ID NO: 13859 - DNA, 25 bp, Homo sapien
taggtacacataatgcaagtaatac

SEQ ID NO: 13860 - DNA, 25 bp, Homo sapien
tcagggatccaaactcgtagaagag

SEQ ID NO: 13861 - DNA, 25 bp, Homo sapien
tccaaactcgtagaagagagggaaa

SEQ ID NO: 13862 - DNA, 25 bp, Homo sapien
cttgaaaaatggaaataggcggtaa

SEQ ID NO: 13863 - DNA, 25 bp, Homo sapien
tgtgtctgtctactgatcagggatc

SEQ ID NO: 13864 - DNA, 25 bp, Homo sapien
aaaatggaaataggcggtaatggaa

SEQ ID NO: 13865 - DNA, 25 bp, Homo sapien
tctgtctactgatcagggatccaaa

SEQ ID NO: 13866 - DNA, 25 bp, Homo sapien
ttaatttgcacagtagaaagttgtc

SEQ ID NO: 13867 - DNA, 25 bp, Homo sapien
aggaaggcctgctggcagaatcctt

SEQ ID NO: 13868 - DNA, 25 bp, Homo sapien
tttgcacagtagaaagttgtcttat

SEQ ID NO: 13869 - DNA, 25 bp, Homo sapien
aagagagggaaacaatccacttctc

SEQ ID NO: 13870 - DNA, 25 bp, Homo sapien
tagaaagttgtcttatgtgtctgtc

SEQ ID NO: 13871 - DNA, 25 bp, Homo sapien
ttcatcacacattgatccagtactt

SEQ ID NO: 13872 - DNA, 25 bp, Homo sapien
caggaaatgcactaccttaccattc

SEQ ID NO: 13873 - DNA, 25 bp, Homo sapien
attgatccagtactttttccactac

SEQ ID NO: 13874 - DNA, 25 bp, Homo sapien
tcacacattgatccagtactttttc

SEQ ID NO: 13875 - DNA, 25 bp, Homo sapien
tccacatcaggaaatgcactacctt

SEQ ID NO: 13876 - DNA, 25 bp, Homo sapien
atcccttccacatcaggaaatgcac

SEQ ID NO: 13877 - DNA, 25 bp, Homo sapien
gtactttcagcatctataaatccct

SEQ ID NO: 13878 - DNA, 25 bp, Homo sapien
taccattcatcacacattgatccag

SEQ ID NO: 13879 - DNA, 25 bp, Homo sapien
acatcaggaaatgcactaccttacc

SEQ ID NO: 13880 - DNA, 25 bp, Homo sapien
gttcccaagtactttcagcatctat

SEQ ID NO: 13881 - DNA, 25 bp, Homo sapien
ttccacatcaggaaatgcactacct

SEQ ID NO: 13882 - DNA, 25 bp, Homo sapien
ctgctgtctgcatagccaattattt

SEQ ID NO: 13883 - DNA, 25 bp, Homo sapien
ttggtttgtctgcagtatctctttc

SEQ ID NO: 13884 - DNA, 25 bp, Homo sapien
ttgctaacaccaagtctgctttatc

SEQ ID NO: 13885 - DNA, 25 bp, Homo sapien
attttatgttatccaactgtcaggt

SEQ ID NO: 13886 - DNA, 25 bp, Homo sapien
ggtctcttggtttgtctgcagtatc

SEQ ID NO: 13887 - DNA, 25 bp, Homo sapien
gtaactcttgacaagcttaagtttc

SEQ ID NO: 13888 - DNA, 25 bp, Homo sapien
ttttttcaggatcaaggtctcttgg

SEQ ID NO: 13889 - DNA, 25 bp, Homo sapien
ctccactgctgtctgcatagccaat

SEQ ID NO: 13890 - DNA, 25 bp, Homo sapien
aattaaatgttccaagtaactcttg

SEQ ID NO: 13891 - DNA, 25 bp, Homo sapien
caggatcaaggtctcttggtttgtc

SEQ ID NO: 13892 - DNA, 25 bp, Homo sapien
tagtaaagcaaaaagcaagagcccg

SEQ ID NO: 13893 - DNA, 25 bp, Homo sapien
gacttctgagcacttgacactgagc

SEQ ID NO: 13894 - DNA, 25 bp, Homo sapien
ggatgctacggtggttctagttttc

SEQ ID NO: 13895 - DNA, 25 bp, Homo sapien
acactgagctagtccaactgaggaa

SEQ ID NO: 13896 - DNA, 25 bp, Homo sapien
tccattcatttgaccgcgggcattc

SEQ ID NO: 13897 - DNA, 25 bp, Homo sapien
ctactgtgaacagagccgctatgaa

SEQ ID NO: 13898 - DNA, 25 bp, Homo sapien
accgcgggcattcgggttgtttcta

SEQ ID NO: 13899 - DNA, 25 bp, Homo sapien
cagaagtggaattatgggatgctac

SEQ ID NO: 13900 - DNA, 25 bp, Homo sapien
agtccaactgaggaacggaatttct

SEQ ID NO: 13901 - DNA, 25 bp, Homo sapien
agccgctatgaatgtgggtgtacaa

SEQ ID NO: 13902 - DNA, 25 bp, Homo sapien
tgaggaattgccacagtgtgttcac

SEQ ID NO: 13903 - DNA, 25 bp, Homo sapien
tttctacccgctggctactgtgaac

SEQ ID NO: 13904 - DNA, 25 bp, Homo sapien
gatatgtaatacctggcaattctct

SEQ ID NO: 13905 - DNA, 25 bp, Homo sapien
ggataaacaatggtgattctaccca

SEQ ID NO: 13906 - DNA, 25 bp, Homo sapien
ctgttcctgtggtagcttgctaagg

SEQ ID NO: 13907 - DNA, 25 bp, Homo sapien
tcttaaattctcttggcagtaacac

SEQ ID NO: 13908 - DNA, 25 bp, Homo sapien
ttggcagtaacactatatatccgtc

SEQ ID NO: 13909 - DNA, 25 bp, Homo sapien
tatctgcttctagggaagattatcc

SEQ ID NO: 13910 - DNA, 25 bp, Homo sapien
tttaaccacaagcaggctctcaggt

SEQ ID NO: 13911 - DNA, 25 bp, Homo sapien
acaagcaggctctcaggtttttgac

SEQ ID NO: 13912 - DNA, 25 bp, Homo sapien
tctacccataagaacttgaatagtt

SEQ ID NO: 13913 - DNA, 25 bp, Homo sapien
ctagggaagattatccattgatcac

SEQ ID NO: 13914 - DNA, 25 bp, Homo sapien
tatccgtcattgcactgattcatcc

SEQ ID NO: 13915 - DNA, 25 bp, Homo sapien
cgcacccaggtgcattggttttata

SEQ ID NO: 13916 - DNA, 25 bp, Homo sapien
caggtgcattggttttatatctctc

SEQ ID NO: 13917 - DNA, 25 bp, Homo sapien
agtcgccgacataatgctctttatc

SEQ ID NO: 13918 - DNA, 25 bp, Homo sapien
taaccacagtacaatcctcaagacc

SEQ ID NO: 13919 - DNA, 25 bp, Homo sapien
gtacaatcctcaagaccaggaaatt

SEQ ID NO: 13920 - DNA, 25 bp, Homo sapien
tttaccaactgtcccaatgatgctc

SEQ ID NO: 13921 - DNA, 25 bp, Homo sapien
attttaccaactgtcccaatgatgc

SEQ ID NO: 13922 - DNA, 25 bp, Homo sapien
ataagtcgccgacataatgctcttt

SEQ ID NO: 13923 - DNA, 25 bp, Homo sapien
tatactcttcagacaatattcacat

SEQ ID NO: 13924 - DNA, 25 bp, Homo sapien
atttgataataagtcgccgacataa

SEQ ID NO: 13925 - DNA, 25 bp, Homo sapien
caccgcacccaggtgcattggtttt

SEQ ID NO: 13926 - DNA, 25 bp, Homo sapien
ctgtggcctgcggactgaagccatc

SEQ ID NO: 13927 - DNA, 25 bp, Homo sapien
gcagccaaaccagccatgtggaagt

SEQ ID NO: 13928 - DNA, 25 bp, Homo sapien
gcctgcggactgaagccatccagga

SEQ ID NO: 13929 - DNA, 25 bp, Homo sapien
aaggcagccaaaccagccatgtgga

SEQ ID NO: 13930 - DNA, 25 bp, Homo sapien
cagctgtggcctgcggactgaagcc

SEQ ID NO: 13931 - DNA, 25 bp, Homo sapien
aaaatgggaagcaaggcagccaaac

SEQ ID NO: 13932 - DNA, 25 bp, Homo sapien
ccaaaccagccatgtggaagtccgc

SEQ ID NO: 13933 - DNA, 25 bp, Homo sapien
agccatccaggaaaatgggaagcaa

SEQ ID NO: 13934 - DNA, 25 bp, Homo sapien
aaccagccatgtggaagtccgcaca

SEQ ID NO: 13935 - DNA, 25 bp, Homo sapien
gaagccatccaggaaaatgggaagc

SEQ ID NO: 13936 - DNA, 25 bp, Homo sapien
atccaggaaaatgggaagcaaggca

SEQ ID NO: 13937 - DNA, 25 bp, Homo sapien
cttttggtgacaaggttactggaac

SEQ ID NO: 13938 - DNA, 25 bp, Homo sapien
tgcggcccgagtctaaagctcccag

SEQ ID NO: 13939 - DNA, 25 bp, Homo sapien
tttcctttccaaggggcagtcagca

SEQ ID NO: 13940 - DNA, 25 bp, Homo sapien
aaggttactggaacagcactttacc

SEQ ID NO: 13941 - DNA, 25 bp, Homo sapien
agatttcacagctttgcctccggac

SEQ ID NO: 13942 - DNA, 25 bp, Homo sapien
cgatggttggattctactcccagac

SEQ ID NO: 13943 - DNA, 25 bp, Homo sapien
actgacattctgaaagtgttgggtg

SEQ ID NO: 13944 - DNA, 25 bp, Homo sapien
agcaggaacagcctcagtccagccg

SEQ ID NO: 13945 - DNA, 25 bp, Homo sapien
ctttaccataaaacctgcggcccga

SEQ ID NO: 13946 - DNA, 25 bp, Homo sapien
tactcccagacaggcgggaagaatc

SEQ ID NO: 13947 - DNA, 25 bp, Homo sapien
cagcccagcaaaaagaggcagcctc

SEQ ID NO: 13948 - DNA, 25 bp, Homo sapien
tgccaatctcagagcagttttctcc

SEQ ID NO: 13949 - DNA, 25 bp, Homo sapien
gtaattttccatagcactgccaatc

SEQ ID NO: 13950 - DNA, 25 bp, Homo sapien
atggtgcattgtaaataatgtgtaa

SEQ ID NO: 13951 - DNA, 25 bp, Homo sapien
ttaaccacttctaccacaaaacaca

SEQ ID NO: 13952 - DNA, 25 bp, Homo sapien
ccatagcactgccaatctcagagca

SEQ ID NO: 13953 - DNA, 25 bp, Homo sapien
aatgtgtttgatactggtaactttc

SEQ ID NO: 13954 - DNA, 25 bp, Homo sapien
aattgcagatgttgtaattttccat

SEQ ID NO: 13955 - DNA, 25 bp, Homo sapien
caccaccaatggtgcattgtaaata

SEQ ID NO: 13956 - DNA, 25 bp, Homo sapien
acggggaattctactcaccaccaat

SEQ ID NO: 13957 - DNA, 25 bp, Homo sapien
acctaacacggggaattctactcac

SEQ ID NO: 13958 - DNA, 25 bp, Homo sapien
taacacggggaattctactcaccac

SEQ ID NO: 13959 - DNA, 25 bp, Homo sapien
attattagtctagatgggcggacca

SEQ ID NO: 13960 - DNA, 25 bp, Homo sapien
aatgattcaaaacaccactggcagt

SEQ ID NO: 13961 - DNA, 25 bp, Homo sapien
accagcgatcgttagagtattttat

SEQ ID NO: 13962 - DNA, 25 bp, Homo sapien
tgggaggtcttcaagctgtgtcacc

SEQ ID NO: 13963 - DNA, 25 bp, Homo sapien
cacactgtttggaagaagtaagatt

SEQ ID NO: 13964 - DNA, 25 bp, Homo sapien
ttcagctctggcgtgggaggtcttc

SEQ ID NO: 13965 - DNA, 25 bp, Homo sapien
cactggcagttgactcaggctttca

SEQ ID NO: 13966 - DNA, 25 bp, Homo sapien
atgaaagtagcaatatcacactgtt

SEQ ID NO: 13967 - DNA, 25 bp, Homo sapien
cttgtctcacacatcacagcatttt

SEQ ID NO: 13968 - DNA, 25 bp, Homo sapien
tgtcacacaccagatgcttcttgtc

SEQ ID NO: 13969 - DNA, 25 bp, Homo sapien
agctcaccagcgatcgttagagtat

SEQ ID NO: 13970 - DNA, 25 bp, Homo sapien
gttgtgaacacatagctattgacct

SEQ ID NO: 13971 - DNA, 25 bp, Homo sapien
gtgagagcctgtctctactgacaat

SEQ ID NO: 13972 - DNA, 25 bp, Homo sapien
acatagctattgaccttggaaacag

SEQ ID NO: 13973 - DNA, 25 bp, Homo sapien
ggaaagaaggtcaggtgtacaacta

SEQ ID NO: 13974 - DNA, 25 bp, Homo sapien
gccagcctggaccaacccggagaaa

SEQ ID NO: 13975 - DNA, 25 bp, Homo sapien
caagaatacatgagtggtcaggcac

SEQ ID NO: 13976 - DNA, 25 bp, Homo sapien
agacataagcaaattgtttcaatca

SEQ ID NO: 13977 - DNA, 25 bp, Homo sapien
tgaggccattgactcctgacagttt

SEQ ID NO: 13978 - DNA, 25 bp, Homo sapien
tctctataaagatacgaaattagct

SEQ ID NO: 13979 - DNA, 25 bp, Homo sapien
aatcaagaatacatgagtggtcagg

SEQ ID NO: 13980 - DNA, 25 bp, Homo sapien
tgcagagttgtgaacacatagctat

SEQ ID NO: 13981 - DNA, 25 bp, Homo sapien
ctaatttatgtagtagttcggtggg

SEQ ID NO: 13982 - DNA, 25 bp, Homo sapien
gggtgcaagaggtcatccaaatttc

SEQ ID NO: 13983 - DNA, 25 bp, Homo sapien
agattcccagaacttgtcttaaaac

SEQ ID NO: 13984 - DNA, 25 bp, Homo sapien
caacttcacatagtcagaacatgac

SEQ ID NO: 13985 - DNA, 25 bp, Homo sapien
agaactgaagcgtggcaagattaag

SEQ ID NO: 13986 - DNA, 25 bp, Homo sapien
aaaacttgtaccatttgagagagaa

SEQ ID NO: 13987 - DNA, 25 bp, Homo sapien
tcagaacatgactctagggagtaga

SEQ ID NO: 13988 - DNA, 25 bp, Homo sapien
ggcaagattaaggaagttgctcaac

SEQ ID NO: 13989 - DNA, 25 bp, Homo sapien
ttgtcttagcaaacttcaagtaaac

SEQ ID NO: 13990 - DNA, 25 bp, Homo sapien
tgtacaatgtgatgactggatataa

SEQ ID NO: 13991 - DNA, 25 bp, Homo sapien
ggggcacttaagcaaatttgtctta

SEQ ID NO: 13992 - DNA, 25 bp, Homo sapien
aaaggtgaagttaggtatgagttta

SEQ ID NO: 13993 - DNA, 25 bp, Homo sapien
gacaaggcagagacaatatattttc

SEQ ID NO: 13994 - DNA, 25 bp, Homo sapien
tgaccaaggatagctatgacaactc

SEQ ID NO: 13995 - DNA, 25 bp, Homo sapien
atttagagaattggcaatggcatgg

SEQ ID NO: 13996 - DNA, 25 bp, Homo sapien
ctccacttggttaatgctttagata

SEQ ID NO: 13997 - DNA, 25 bp, Homo sapien
aaactgagagtccagacaaggcaga

SEQ ID NO: 13998 - DNA, 25 bp, Homo sapien
gagaactagagccaccagcctgttt

SEQ ID NO: 13999 - DNA, 25 bp, Homo sapien
catcaagatcaaaaggtgaagttag

SEQ ID NO: 14000 - DNA, 25 bp, Homo sapien
tggcactacacacccaggggcatca

SEQ ID NO: 14001 - DNA, 25 bp, Homo sapien
aagtgatgagctcagatcctagtcc

SEQ ID NO: 14002 - DNA, 25 bp, Homo sapien
agatcctagtcctgaaacacaccac

SEQ ID NO: 14003 - DNA, 25 bp, Homo sapien
ccgatgagtgacgacattctggctc

SEQ ID NO: 14004 - DNA, 25 bp, Homo sapien
ttggctttgtgcctctgcggcgccc

SEQ ID NO: 14005 - DNA, 25 bp, Homo sapien
ctaattctaaggatcatggacttta

SEQ ID NO: 14006 - DNA, 25 bp, Homo sapien
atgatgatgcaaatgcgtcgggcgc

SEQ ID NO: 14007 - DNA, 25 bp, Homo sapien
aagccgcgttccgttgttgaactac

SEQ ID NO: 14008 - DNA, 25 bp, Homo sapien
tcagctcgtcgcagcatgatgatgc

SEQ ID NO: 14009 - DNA, 25 bp, Homo sapien
gcagccgccttagcaggggtaatag

SEQ ID NO: 14010 - DNA, 25 bp, Homo sapien
agagcgtggactcgaccagcccttc

SEQ ID NO: 14011 - DNA, 25 bp, Homo sapien
tcttcctttccgagaagccgcgttc

SEQ ID NO: 14012 - DNA, 25 bp, Homo sapien
atgggaagaggttactgtttttatg

SEQ ID NO: 14013 - DNA, 25 bp, Homo sapien
agtctaatttacagccaagaacagc

SEQ ID NO: 14014 - DNA, 25 bp, Homo sapien
caagggtggaccaagggcaactgca

SEQ ID NO: 14015 - DNA, 25 bp, Homo sapien
ggaccaagggcaactgcagataggc

SEQ ID NO: 14016 - DNA, 25 bp, Homo sapien
taaataaattaagcctgtggtgatt

SEQ ID NO: 14017 - DNA, 25 bp, Homo sapien
aataaataaattaagcctgtggtga

SEQ ID NO: 14018 - DNA, 25 bp, Homo sapien
aataaattaagcctgtggtgattca

SEQ ID NO: 14019 - DNA, 25 bp, Homo sapien
gctcaagggtggaccaagggcaact

SEQ ID NO: 14020 - DNA, 25 bp, Homo sapien
taaattaagcctgtggtgattcagc

SEQ ID NO: 14021 - DNA, 25 bp, Homo sapien
aaattaagcctgtggtgattcagca

SEQ ID NO: 14022 - DNA, 25 bp, Homo sapien
tggaccaagggcaactgcagatagg

SEQ ID NO: 14023 - DNA, 25 bp, Homo sapien
attaagcctgtggtgattcagcaag

SEQ ID NO: 14024 - DNA, 25 bp, Homo sapien
aattaagcctgtggtgattcagcaa

SEQ ID NO: 14025 - DNA, 25 bp, Homo sapien
gtagtaagcctattcactctctgtt

SEQ ID NO: 14026 - DNA, 25 bp, Homo sapien
tacaggtctgacatccagagaaaaa

SEQ ID NO: 14027 - DNA, 25 bp, Homo sapien
ccaataatgcaggacaaagtataca

SEQ ID NO: 14028 - DNA, 25 bp, Homo sapien
attctcagcaggaagtacttgtact

SEQ ID NO: 14029 - DNA, 25 bp, Homo sapien
gcaggacaaagtatacaggtctgac

SEQ ID NO: 14030 - DNA, 25 bp, Homo sapien
atactccaataatgcaggacaaagt

SEQ ID NO: 14031 - DNA, 25 bp, Homo sapien
tattctcagcaggaagtacttgtac

SEQ ID NO: 14032 - DNA, 25 bp, Homo sapien
ataatgcaggacaaagtatacaggt

SEQ ID NO: 14033 - DNA, 25 bp, Homo sapien
aattatactccaataatgcaggaca

SEQ ID NO: 14034 - DNA, 25 bp, Homo sapien
ggtctgacatccagagaaaaatatc

SEQ ID NO: 14035 - DNA, 25 bp, Homo sapien
acaggcttaaagagtgggctcaagg

SEQ ID NO: 14036 - DNA, 25 bp, Homo sapien
cgtaagacaacatgataagcacatc

SEQ ID NO: 14037 - DNA, 25 bp, Homo sapien
tatgctactatccaaagaataatgg

SEQ ID NO: 14038 - DNA, 25 bp, Homo sapien
actcagacaagggaaggaacactca

SEQ ID NO: 14039 - DNA, 25 bp, Homo sapien
tttggagctcacagtatggtgaagg

SEQ ID NO: 14040 - DNA, 25 bp, Homo sapien
tatatgtctagttgtgtactaagca

SEQ ID NO: 14041 - DNA, 25 bp, Homo sapien
tgatacgtaagacaacatgataagc

SEQ ID NO: 14042 - DNA, 25 bp, Homo sapien
tgaaggggacagatatgacaacaaa

SEQ ID NO: 14043 - DNA, 25 bp, Homo sapien
taagcataagaagtataaagatcac

SEQ ID NO: 14044 - DNA, 25 bp, Homo sapien
ccaaagaataatggatgagtatttt

SEQ ID NO: 14045 - DNA, 25 bp, Homo sapien
acaagggaaggaacactcactctgc

SEQ ID NO: 14046 - DNA, 25 bp, Homo sapien
ttgtgtactaagcataagaagtata

SEQ ID NO: 14047 - DNA, 25 bp, Homo sapien
tctaaaagcagctggaatgcaaaac

SEQ ID NO: 14048 - DNA, 25 bp, Homo sapien
tccgtagcacctccatagatagtag

SEQ ID NO: 14049 - DNA, 25 bp, Homo sapien
ccatagatagtagatcctgcagtac

SEQ ID NO: 14050 - DNA, 25 bp, Homo sapien
ccactgggctttctggatagatctt

SEQ ID NO: 14051 - DNA, 25 bp, Homo sapien
cttaaagtggtattagtcagtggct

SEQ ID NO: 14052 - DNA, 25 bp, Homo sapien
cttggaaatggactttcaaaggctt

SEQ ID NO: 14053 - DNA, 25 bp, Homo sapien
agtcagtggcttgccaaacaaatat

SEQ ID NO: 14054 - DNA, 25 bp, Homo sapien
ttttacctgacaaccacggattatc

SEQ ID NO: 14055 - DNA, 25 bp, Homo sapien
ctttaagcattagagttacacatca

SEQ ID NO: 14056 - DNA, 25 bp, Homo sapien
tgtcagatagacatgagtgcatttt

SEQ ID NO: 14057 - DNA, 25 bp, Homo sapien
gctgagatttaagtcttgggtaccc

SEQ ID NO: 14058 - DNA, 25 bp, Homo sapien
accaaaggactgtaaagagcaaacg

SEQ ID NO: 14059 - DNA, 25 bp, Homo sapien
gtaaagagcaaacggagtaattctc

SEQ ID NO: 14060 - DNA, 25 bp, Homo sapien
caaaagacaaggaaacgtttaagca

SEQ ID NO: 14061 - DNA, 25 bp, Homo sapien
aaggactgtaaagagcaaacggagt

SEQ ID NO: 14062 - DNA, 25 bp, Homo sapien
gcaacacctccaagtggcaaaagac

SEQ ID NO: 14063 - DNA, 25 bp, Homo sapien
agagcaaacggagtaattctcacct

SEQ ID NO: 14064 - DNA, 25 bp, Homo sapien
aaaaccaaaggactgtaaagagcaa

SEQ ID NO: 14065 - DNA, 25 bp, Homo sapien
aaagagcaaacggagtaattctcac

SEQ ID NO: 14066 - DNA, 25 bp, Homo sapien
gactgtaaagagcaaacggagtaat

SEQ ID NO: 14067 - DNA, 25 bp, Homo sapien
ctgtaaagagcaaacggagtaattc

SEQ ID NO: 14068 - DNA, 25 bp, Homo sapien
caaaaaccaaaggactgtaaagagc

SEQ ID NO: 14069 - DNA, 25 bp, Homo sapien
gctgaatgaaaggtaaagaaattca

SEQ ID NO: 14070 - DNA, 25 bp, Homo sapien
acttttcccaaatagccaggacttc

SEQ ID NO: 14071 - DNA, 25 bp, Homo sapien
ctagccctgaaatagctgcgagtga

SEQ ID NO: 14072 - DNA, 25 bp, Homo sapien
taacttaaaacaagctagccctgaa

SEQ ID NO: 14073 - DNA, 25 bp, Homo sapien
aggatgagagcatttcaagcaacac

SEQ ID NO: 14074 - DNA, 25 bp, Homo sapien
cagcagtgcccaaataagactaaac

SEQ ID NO: 14075 - DNA, 25 bp, Homo sapien
aatagccaggacttccagttgccaa

SEQ ID NO: 14076 - DNA, 25 bp, Homo sapien
gaaatggggcacattaaaaggaaca

SEQ ID NO: 14077 - DNA, 25 bp, Homo sapien
tgacggatgcgttcatgcagcttcc

SEQ ID NO: 14078 - DNA, 25 bp, Homo sapien
cagcttcctttgacgaaaggtaacc

SEQ ID NO: 14079 - DNA, 25 bp, Homo sapien
cttgtccaagtttaacaaaggacta

SEQ ID NO: 14080 - DNA, 25 bp, Homo sapien
tacaggagtgtatttgcaccggcac

SEQ ID NO: 14081 - DNA, 25 bp, Homo sapien
ttgcaccggcacacgccaagggact

SEQ ID NO: 14082 - DNA, 25 bp, Homo sapien
caggagtgtatttgcaccggcacac

SEQ ID NO: 14083 - DNA, 25 bp, Homo sapien
cagatggcccgggaccttcttcctt

SEQ ID NO: 14084 - DNA, 25 bp, Homo sapien
gttacaggagtgtatttgcaccggc

SEQ ID NO: 14085 - DNA, 25 bp, Homo sapien
ccatgacgcagatggcccgggacct

SEQ ID NO: 14086 - DNA, 25 bp, Homo sapien
catgacgcagatggcccgggacctt

SEQ ID NO: 14087 - DNA, 25 bp, Homo sapien
agtgtatttgcaccggcacacgcca

SEQ ID NO: 14088 - DNA, 25 bp, Homo sapien
gtcccttcctcttgggtccctgaga

SEQ ID NO: 14089 - DNA, 25 bp, Homo sapien
tatttgcaccggcacacgccaaggg

SEQ ID NO: 14090 - DNA, 25 bp, Homo sapien
cccgttacaggagtgtatttgcacc

SEQ ID NO: 14091 - DNA, 25 bp, Homo sapien
cctggggtaggcaaaaagcctgaaa

SEQ ID NO: 14092 - DNA, 25 bp, Homo sapien
acagaaggttgagtccttggtacca

SEQ ID NO: 14093 - DNA, 25 bp, Homo sapien
acatttgcggtctcctcattccgag

SEQ ID NO: 14094 - DNA, 25 bp, Homo sapien
aggcaaaaagcctgaaaacaaagct

SEQ ID NO: 14095 - DNA, 25 bp, Homo sapien
accacagcaatgaagtggacaatga

SEQ ID NO: 14096 - DNA, 25 bp, Homo sapien
gcaatgaagtggacaatgaagattc

SEQ ID NO: 14097 - DNA, 25 bp, Homo sapien
gggcaaatgcccagtagattttacc

SEQ ID NO: 14098 - DNA, 25 bp, Homo sapien
tgagaaaacagaaggttgagtcctt

SEQ ID NO: 14099 - DNA, 25 bp, Homo sapien
tttccctgtctctgggcaaatgccc

SEQ ID NO: 14100 - DNA, 25 bp, Homo sapien
gagggacagagacctgcccaacacc

SEQ ID NO: 14101 - DNA, 25 bp, Homo sapien
gagtccttggtaccaagatggagcc

SEQ ID NO: 14102 - DNA, 25 bp, Homo sapien
agcacggcggattagtaaccgtata

SEQ ID NO: 14103 - DNA, 25 bp, Homo sapien
gtcctgcactagactttggcttgtc

SEQ ID NO: 14104 - DNA, 25 bp, Homo sapien
taaataatctgagtggctgcctggc

SEQ ID NO: 14105 - DNA, 25 bp, Homo sapien
aatttgtctgtgtgtgaaaagtgcc

SEQ ID NO: 14106 - DNA, 25 bp, Homo sapien
ctccagttagccttggaggactcgg

SEQ ID NO: 14107 - DNA, 25 bp, Homo sapien
ctttaggcccttgacaagcacggcg

SEQ ID NO: 14108 - DNA, 25 bp, Homo sapien
ttgatgaaggattcgaggcctaaac

SEQ ID NO: 14109 - DNA, 25 bp, Homo sapien
acttccgcccgaactctaataaagc

SEQ ID NO: 14110 - DNA, 25 bp, Homo sapien
tttttgagtggtcctgaacagttct

SEQ ID NO: 14111 - DNA, 25 bp, Homo sapien
ttccctctgggtaaccaagcaggct

SEQ ID NO: 14112 - DNA, 25 bp, Homo sapien
ttcgaggcctaaacaatagagcttt

SEQ ID NO: 14113 - DNA, 25 bp, Homo sapien
ctgttagcttaccaggaaaagaaac

SEQ ID NO: 14114 - DNA, 25 bp, Homo sapien
attggcaaacactgtaagcacacac

SEQ ID NO: 14115 - DNA, 25 bp, Homo sapien
gaggcaaggttatctacagactcct

SEQ ID NO: 14116 - DNA, 25 bp, Homo sapien
acaccaagaagaagcacagtggtac

SEQ ID NO: 14117 - DNA, 25 bp, Homo sapien
ggtggatggtggtaccaacaattaa

SEQ ID NO: 14118 - DNA, 25 bp, Homo sapien
ccaggtgctgttaggtaaagaaaaa

SEQ ID NO: 14119 - DNA, 25 bp, Homo sapien
attaagatagagaatccaggaaacc

SEQ ID NO: 14120 - DNA, 25 bp, Homo sapien
atcagggagggattcatgtaaacaa

SEQ ID NO: 14121 - DNA, 25 bp, Homo sapien
tggtgacagaattgaagagactgtt

SEQ ID NO: 14122 - DNA, 25 bp, Homo sapien
agcttgatggcattagaaagatttc

SEQ ID NO: 14123 - DNA, 25 bp, Homo sapien
attggcctgggcttagacatattaa

SEQ ID NO: 14124 - DNA, 25 bp, Homo sapien
ctgataacatgactttgcggtagaa

SEQ ID NO: 14125 - DNA, 25 bp, Homo sapien
ttacaaagaataaggcaagagctat

SEQ ID NO: 14126 - DNA, 25 bp, Homo sapien
cagttgagtatgagtggctgcgtac

SEQ ID NO: 14127 - DNA, 25 bp, Homo sapien
attgcagagagtgaagtgaaatatt

SEQ ID NO: 14128 - DNA, 25 bp, Homo sapien
ttgtgatatacttgttgaggttgcc

SEQ ID NO: 14129 - DNA, 25 bp, Homo sapien
tgggaggaccatcaaaattggctgt

SEQ ID NO: 14130 - DNA, 25 bp, Homo sapien
tgaggttgcctatctgctgatgtcc

SEQ ID NO: 14131 - DNA, 25 bp, Homo sapien
tgcggtagaatatggggattttaaa

SEQ ID NO: 14132 - DNA, 25 bp, Homo sapien
tattagcaagctaggctcaggattt

SEQ ID NO: 14133 - DNA, 25 bp, Homo sapien
tgtgtttctcgccataagctgcatt

SEQ ID NO: 14134 - DNA, 25 bp, Homo sapien
tgcgtactgagtagagatgtaaaat

SEQ ID NO: 14135 - DNA, 25 bp, Homo sapien
tctgaatgagacttccttagtaaag

SEQ ID NO: 14136 - DNA, 25 bp, Homo sapien
aaatattagatattctgaatgagac

SEQ ID NO: 14137 - DNA, 25 bp, Homo sapien
gtgagcagcagagcaatatacaatt

SEQ ID NO: 14138 - DNA, 25 bp, Homo sapien
ttgcagaggaatatgtgagcagcag

SEQ ID NO: 14139 - DNA, 25 bp, Homo sapien
attagatattctgaatgagacttcc

SEQ ID NO: 14140 - DNA, 25 bp, Homo sapien
agtaaagtttatcatgcactagata

SEQ ID NO: 14141 - DNA, 25 bp, Homo sapien
cagaggaatatgtgagcagcagagc

SEQ ID NO: 14142 - DNA, 25 bp, Homo sapien
tgagcagcagagcaatatacaattc

SEQ ID NO: 14143 - DNA, 25 bp, Homo sapien
gagcagcagagcaatatacaattca

SEQ ID NO: 14144 - DNA, 25 bp, Homo sapien
agatattctgaatgagacttcctta

SEQ ID NO: 14145 - DNA, 25 bp, Homo sapien
ttccttagtaaagtttatcatgcac

SEQ ID NO: 14146 - DNA, 25 bp, Homo sapien
tccagtgtgggctcacatccaaaat

SEQ ID NO: 14147 - DNA, 25 bp, Homo sapien
ttctcaggagtctaagagaacaatt

SEQ ID NO: 14148 - DNA, 25 bp, Homo sapien
tatggcatttccagtgtgggctcac

SEQ ID NO: 14149 - DNA, 25 bp, Homo sapien
atgatgtatgagcaattgtacttcc

SEQ ID NO: 14150 - DNA, 25 bp, Homo sapien
tttcccagcatagctaagcatctgc

SEQ ID NO: 14151 - DNA, 25 bp, Homo sapien
aagcatctgccattagatctgaata

SEQ ID NO: 14152 - DNA, 25 bp, Homo sapien
agtagggtatacagaacccatggtt

SEQ ID NO: 14153 - DNA, 25 bp, Homo sapien
ataaaaactaaactgggccagcaat

SEQ ID NO: 14154 - DNA, 25 bp, Homo sapien
tttggaaatatctagtagggtatac

SEQ ID NO: 14155 - DNA, 25 bp, Homo sapien
tatttgaaatagtgaaaacctgtta

SEQ ID NO: 14156 - DNA, 25 bp, Homo sapien
ctgaaagagtgtatgatgtatgagc

SEQ ID NO: 14157 - DNA, 25 bp, Homo sapien
tcttctaccgaactgcaggcggtga

SEQ ID NO: 14158 - DNA, 25 bp, Homo sapien
aactgcaggcggtgatttcacccaa

SEQ ID NO: 14159 - DNA, 25 bp, Homo sapien
tccttctaacagagcaactcggctc

SEQ ID NO: 14160 - DNA, 25 bp, Homo sapien
gtagagacatgatttttccgtgttg

SEQ ID NO: 14161 - DNA, 25 bp, Homo sapien
agagtaagttaagctgaaaggactg

SEQ ID NO: 14162 - DNA, 25 bp, Homo sapien
ctagatcgggaagagatttttgcac

SEQ ID NO: 14163 - DNA, 25 bp, Homo sapien
ctaggacagagtttggcacggaaca

SEQ ID NO: 14164 - DNA, 25 bp, Homo sapien
tacgctccctgcctaggacagagtt

SEQ ID NO: 14165 - DNA, 25 bp, Homo sapien
atttcacccaagaacgtgagagttc

SEQ ID NO: 14166 - DNA, 25 bp, Homo sapien
acatcggatgaaagagtaagttaag

SEQ ID NO: 14167 - DNA, 25 bp, Homo sapien
cgtgagagttctcctagatcgggaa

SEQ ID NO: 14168 - DNA, 25 bp, Homo sapien
agtgtcgtcacaagcgtctcggtcg

SEQ ID NO: 14169 - DNA, 25 bp, Homo sapien
cgaccgagacgcttgtgacgacact

SEQ ID NO: 14170 - DNA, 25 bp, Homo sapien
gtccacttcgggcaaaaacagacaa

SEQ ID NO: 14171 - DNA, 25 bp, Homo sapien
caatgctcagtacaaagtggcttaa

SEQ ID NO: 14172 - DNA, 25 bp, Homo sapien
ttagatctaggattcccagcaagaa

SEQ ID NO: 14173 - DNA, 25 bp, Homo sapien
gcctagaggcagagccctttagatc

SEQ ID NO: 14174 - DNA, 25 bp, Homo sapien
ttctgctggaagtaaccaatgctca

SEQ ID NO: 14175 - DNA, 25 bp, Homo sapien
ctgggtctcatatatgcctagaggc

SEQ ID NO: 14176 - DNA, 25 bp, Homo sapien
acagacaagatcttctaaaaggaga

SEQ ID NO: 14177 - DNA, 25 bp, Homo sapien
aatggtttagaagtgattatgaatc

SEQ ID NO: 14178 - DNA, 25 bp, Homo sapien
gtagagttgtgaaacgtcatggttc

SEQ ID NO: 14179 - DNA, 25 bp, Homo sapien
aatggttacaacaattctgggtctc

SEQ ID NO: 14180 - DNA, 25 bp, Homo sapien
taggatggtttctgctggaagtaac

SEQ ID NO: 14181 - DNA, 25 bp, Homo sapien
ttatctcattcctgtgctgctgttc

SEQ ID NO: 14182 - DNA, 25 bp, Homo sapien
aagtacggagtcctcggtctctctc

SEQ ID NO: 14183 - DNA, 25 bp, Homo sapien
tccaaccattgcttggcaaacactg

SEQ ID NO: 14184 - DNA, 25 bp, Homo sapien
gacaccctgctctaaatcaaggctc

SEQ ID NO: 14185 - DNA, 25 bp, Homo sapien
aatcctgaccctcactggatcggtc

SEQ ID NO: 14186 - DNA, 25 bp, Homo sapien
catccatggcaagtacggagtcctc

SEQ ID NO: 14187 - DNA, 25 bp, Homo sapien
cccaaaatccaaaggccttagaggc

SEQ ID NO: 14188 - DNA, 25 bp, Homo sapien
tctgaagtatgacagcatccatggc

SEQ ID NO: 14189 - DNA, 25 bp, Homo sapien
ataggctagaataaatgccagagtc

SEQ ID NO: 14190 - DNA, 25 bp, Homo sapien
tatgtggtataaaaagacctcttcc

SEQ ID NO: 14191 - DNA, 25 bp, Homo sapien
aaacactgtggctgtcaagctccca

SEQ ID NO: 14192 - DNA, 25 bp, Homo sapien
ataagcctcagattagatttttgcc

SEQ ID NO: 14193 - DNA, 25 bp, Homo sapien
caaacataatgaggaaagagctttc

SEQ ID NO: 14194 - DNA, 25 bp, Homo sapien
tcttaagacacaggcttatttgggt

SEQ ID NO: 14195 - DNA, 25 bp, Homo sapien
acaaaggatgtacaatacgacaaat

SEQ ID NO: 14196 - DNA, 25 bp, Homo sapien
tatggtgctttagtagccaagatac

SEQ ID NO: 14197 - DNA, 25 bp, Homo sapien
ggcacaccataggaatgaattggta

SEQ ID NO: 14198 - DNA, 25 bp, Homo sapien
tttacgttcagattaggagtcttat

SEQ ID NO: 14199 - DNA, 25 bp, Homo sapien
ttgccattttgatgcacaggagttt

SEQ ID NO: 14200 - DNA, 25 bp, Homo sapien
ttacagttcaaaaggcacaccatag

SEQ ID NO: 14201 - DNA, 25 bp, Homo sapien
ataggaatgaattggtatggtgctt

SEQ ID NO: 14202 - DNA, 25 bp, Homo sapien
tactaaaacctctgcagtaagaaaa

SEQ ID NO: 14203 - DNA, 25 bp, Homo sapien
ttccatgacttatagaagaattact

SEQ ID NO: 14204 - DNA, 25 bp, Homo sapien
tcactttcagtgtcagagtttctgt

SEQ ID NO: 14205 - DNA, 25 bp, Homo sapien
aattattatttctcaggcatgcacc

SEQ ID NO: 14206 - DNA, 25 bp, Homo sapien
aggactaaattagcggcaagaatta

SEQ ID NO: 14207 - DNA, 25 bp, Homo sapien
cattccagcagttaccaacagtagc

SEQ ID NO: 14208 - DNA, 25 bp, Homo sapien
attactaaaggaacagactaaatac

SEQ ID NO: 14209 - DNA, 25 bp, Homo sapien
aacatttgcctatgtgaccaatcac

SEQ ID NO: 14210 - DNA, 25 bp, Homo sapien
cggccactgcttcaggttaactcta

SEQ ID NO: 14211 - DNA, 25 bp, Homo sapien
tgtgcatggcactcggccactgctt

SEQ ID NO: 14212 - DNA, 25 bp, Homo sapien
accaacagtagctgtcttccatgac

SEQ ID NO: 14213 - DNA, 25 bp, Homo sapien
taacatacagaaggactaaattagc

SEQ ID NO: 14214 - DNA, 25 bp, Homo sapien
tgatagccagaaactgtaaacaacc

SEQ ID NO: 14215 - DNA, 25 bp, Homo sapien
accaaaatgagttatcgctacatac

SEQ ID NO: 14216 - DNA, 25 bp, Homo sapien
aacaaatatgctggcaaagacagag

SEQ ID NO: 14217 - DNA, 25 bp, Homo sapien
aaaactggacctctcatacaatacc

SEQ ID NO: 14218 - DNA, 25 bp, Homo sapien
ataagtatgtcgacagatggcaaat

SEQ ID NO: 14219 - DNA, 25 bp, Homo sapien
aagaaacagaaagtggtacagccac

SEQ ID NO: 14220 - DNA, 25 bp, Homo sapien
atgcaaaggaactctcaaaagtcaa

SEQ ID NO: 14221 - DNA, 25 bp, Homo sapien
agatggcaaataagtatgtggaaag

SEQ ID NO: 14222 - DNA, 25 bp, Homo sapien
atgtccatacaagcacctgtacatg

SEQ ID NO: 14223 - DNA, 25 bp, Homo sapien
ttcctgggcatgtatttggagaaaa

SEQ ID NO: 14224 - DNA, 25 bp, Homo sapien
gtatctacaatatgcaaaggaactc

SEQ ID NO: 14225 - DNA, 25 bp, Homo sapien
aaagacttggaatttggctgctgta

SEQ ID NO: 14226 - DNA, 25 bp, Homo sapien
caccagagcacaagaaatcctgatc

SEQ ID NO: 14227 - DNA, 25 bp, Homo sapien
cagaaattattgttataggtgctcc

SEQ ID NO: 14228 - DNA, 25 bp, Homo sapien
agtcatacagcataagatgatattc

SEQ ID NO: 14229 - DNA, 25 bp, Homo sapien
taagattctatagcttggaaaggtc

SEQ ID NO: 14230 - DNA, 25 bp, Homo sapien
aattgaatgccgtgagctccactaa

SEQ ID NO: 14231 - DNA, 25 bp, Homo sapien
agcttggaaaggtcgtaattatcac

SEQ ID NO: 14232 - DNA, 25 bp, Homo sapien
gtgagctccactaagccctaagatt

SEQ ID NO: 14233 - DNA, 25 bp, Homo sapien
ttggctgctgtagaaagtactacac

SEQ ID NO: 14234 - DNA, 25 bp, Homo sapien
gtaattatcaccatcaccagagcac

SEQ ID NO: 14235 - DNA, 25 bp, Homo sapien
tcagaagtaacttttagacctcagt

SEQ ID NO: 14236 - DNA, 25 bp, Homo sapien
taaggaggccatagtaaaggtaaca

SEQ ID NO: 14237 - DNA, 25 bp, Homo sapien
tggctgcatccaacaccagaagctt

SEQ ID NO: 14238 - DNA, 25 bp, Homo sapien
ggctcaagcgaattaatcccggatc

SEQ ID NO: 14239 - DNA, 25 bp, Homo sapien
gagtaatgaattccgggttgccctc

SEQ ID NO: 14240 - DNA, 25 bp, Homo sapien
tcattgtatcaactgggagatccag

SEQ ID NO: 14241 - DNA, 25 bp, Homo sapien
tttgagccactcagagtagcgtgta

SEQ ID NO: 14242 - DNA, 25 bp, Homo sapien
aggtaacagaatgactctggaaccc

SEQ ID NO: 14243 - DNA, 25 bp, Homo sapien
tagagtggtcattcaggactgtgct

SEQ ID NO: 14244 - DNA, 25 bp, Homo sapien
ttaatcccggatctagctgtgctat

SEQ ID NO: 14245 - DNA, 25 bp, Homo sapien
ttagaagagaacctacctggctgca

SEQ ID NO: 14246 - DNA, 25 bp, Homo sapien
ttttagatgctaagtaaggaggcca

SEQ ID NO: 14247 - DNA, 25 bp, Homo sapien
caaaggaaggccaacttcagcattc

SEQ ID NO: 14248 - DNA, 25 bp, Homo sapien
atggctgaaaaaggccaagaaacta

SEQ ID NO: 14249 - DNA, 25 bp, Homo sapien
tcaggtacctgtggccaaattaggc

SEQ ID NO: 14250 - DNA, 25 bp, Homo sapien
tgcgaccgcactgcacagatgagca

SEQ ID NO: 14251 - DNA, 25 bp, Homo sapien
tgttaatgctctcatccatggctga

SEQ ID NO: 14252 - DNA, 25 bp, Homo sapien
accgagagggcactgcgaccgcact

SEQ ID NO: 14253 - DNA, 25 bp, Homo sapien
agggctgcatcaacacacctggcta

SEQ ID NO: 14254 - DNA, 25 bp, Homo sapien
caagaaactaagaagagctgtggac

SEQ ID NO: 14255 - DNA, 25 bp, Homo sapien
aaattaggcccagatgttaatgctc

SEQ ID NO: 14256 - DNA, 25 bp, Homo sapien
tggccttggccatgtagatttcttt

SEQ ID NO: 14257 - DNA, 25 bp, Homo sapien
aagctggtagccaggggtcttttca

SEQ ID NO: 14258 - DNA, 25 bp, Homo sapien
aatgatgcagaaagacatgaaactt

SEQ ID NO: 14259 - DNA, 25 bp, Homo sapien
tggcttcatagatacatggagaatg

SEQ ID NO: 14260 - DNA, 25 bp, Homo sapien
tcagtgaaataatattcttgagcac

SEQ ID NO: 14261 - DNA, 25 bp, Homo sapien
gatatgttctaaaaatgcagtcttc

SEQ ID NO: 14262 - DNA, 25 bp, Homo sapien
aatagaagttaacaagtgcagattt

SEQ ID NO: 14263 - DNA, 25 bp, Homo sapien
gcagagaaaggctagaatcgcctat

SEQ ID NO: 14264 - DNA, 25 bp, Homo sapien
ccattagagacatctagtagacttt

SEQ ID NO: 14265 - DNA, 25 bp, Homo sapien
tagtaaggaatagttgaaatgatgc

SEQ ID NO: 14266 - DNA, 25 bp, Homo sapien
gagcacaaattaaagctggttttat

SEQ ID NO: 14267 - DNA, 25 bp, Homo sapien
ttatctgcacggtaaagagtgtgag

SEQ ID NO: 14268 - DNA, 25 bp, Homo sapien
aagcaggcagatgccacaatcaatt

SEQ ID NO: 14269 - DNA, 25 bp, Homo sapien
acttaatgtctgaaaggttcatcca

SEQ ID NO: 14270 - DNA, 25 bp, Homo sapien
tgtatatacccagaaatgcaattgc

SEQ ID NO: 14271 - DNA, 25 bp, Homo sapien
atttacttaatgtctgaaaggttca

SEQ ID NO: 14272 - DNA, 25 bp, Homo sapien
attgctgaatcaaatgacaattcta

SEQ ID NO: 14273 - DNA, 25 bp, Homo sapien
catccatgatgtagtatgtagaagg

SEQ ID NO: 14274 - DNA, 25 bp, Homo sapien
cagtgaacactggtatacaaatata

SEQ ID NO: 14275 - DNA, 25 bp, Homo sapien
tgtttctaccttttgactactgtga

SEQ ID NO: 14276 - DNA, 25 bp, Homo sapien
atgatgtagtatgtagaaggatttc

SEQ ID NO: 14277 - DNA, 25 bp, Homo sapien
gatgtagtatgtagaaggatttcct

SEQ ID NO: 14278 - DNA, 25 bp, Homo sapien
atcagtggattcatatagtattgtc

SEQ ID NO: 14279 - DNA, 25 bp, Homo sapien
acctcacatcagtggattcatatag

SEQ ID NO: 14280 - DNA, 25 bp, Homo sapien
gcaggttttaacaagaggagcatga

SEQ ID NO: 14281 - DNA, 25 bp, Homo sapien
tttgacacaaagacagcttaaaaaa

SEQ ID NO: 14282 - DNA, 25 bp, Homo sapien
aaaataataaagctggctggacgcg

SEQ ID NO: 14283 - DNA, 25 bp, Homo sapien
gtgctcggcctgcaggttttaacaa

SEQ ID NO: 14284 - DNA, 25 bp, Homo sapien
cctgcaggttttaacaagaggagca

SEQ ID NO: 14285 - DNA, 25 bp, Homo sapien
tttaacaagaggagcatgaactatc

SEQ ID NO: 14286 - DNA, 25 bp, Homo sapien
cggcctgcaggttttaacaagagga

SEQ ID NO: 14287 - DNA, 25 bp, Homo sapien
gctcggcctgcaggttttaacaaga

SEQ ID NO: 14288 - DNA, 25 bp, Homo sapien
aggttttaacaagaggagcatgaac

SEQ ID NO: 14289 - DNA, 25 bp, Homo sapien
ttttaacaagaggagcatgaactat

SEQ ID NO: 14290 - DNA, 25 bp, Homo sapien
aataataaagctggctggacgcggt

SEQ ID NO: 14291 - DNA, 25 bp, Homo sapien
atagcctgttatgccaacaaccata

SEQ ID NO: 14292 - DNA, 25 bp, Homo sapien
attatcacaaatcagaccaatgttg

SEQ ID NO: 14293 - DNA, 25 bp, Homo sapien
ccaatagttcagagaggccaggaaa

SEQ ID NO: 14294 - DNA, 25 bp, Homo sapien
aaaaagccaatagttcagagaggcc

SEQ ID NO: 14295 - DNA, 25 bp, Homo sapien
atgatagccagtagtcttattagac

SEQ ID NO: 14296 - DNA, 25 bp, Homo sapien
ttgatgctagagacatccatagcct

SEQ ID NO: 14297 - DNA, 25 bp, Homo sapien
ataaaaagaaggaagtagtgacaat

SEQ ID NO: 14298 - DNA, 25 bp, Homo sapien
cacggtacccagacaaggatatttc

SEQ ID NO: 14299 - DNA, 25 bp, Homo sapien
aaagggtttccatctctcgcacatg

SEQ ID NO: 14300 - DNA, 25 bp, Homo sapien
agaccaatgttgatagatgatagcc

SEQ ID NO: 14301 - DNA, 25 bp, Homo sapien
acaatgggtcagtcacaaagcccta

SEQ ID NO: 14302 - DNA, 25 bp, Homo sapien
tgctcaccaggtactgggcacctct

SEQ ID NO: 14303 - DNA, 25 bp, Homo sapien
gtgttggccacttctcagggcaccc

SEQ ID NO: 14304 - DNA, 25 bp, Homo sapien
catgactgagctttccgtcggccgt

SEQ ID NO: 14305 - DNA, 25 bp, Homo sapien
ggctggagcctcattcactgtgaag

SEQ ID NO: 14306 - DNA, 25 bp, Homo sapien
tcagtcagcagacacttggcggcca

SEQ ID NO: 14307 - DNA, 25 bp, Homo sapien
tctccggagctggagctctcagtca

SEQ ID NO: 14308 - DNA, 25 bp, Homo sapien
ctaagcaatgcagagaggccgctgt

SEQ ID NO: 14309 - DNA, 25 bp, Homo sapien
tccaggcagttcagcggcatccggt

SEQ ID NO: 14310 - DNA, 25 bp, Homo sapien
cactgtgaagtgactgcagatgtct

SEQ ID NO: 14311 - DNA, 25 bp, Homo sapien
cagagcagagctcggaatttacctc

SEQ ID NO: 14312 - DNA, 25 bp, Homo sapien
agccctgagttagagctccacgttg

SEQ ID NO: 14313 - DNA, 25 bp, Homo sapien
tgtgctaaaagccttgtgtagattt

SEQ ID NO: 14314 - DNA, 25 bp, Homo sapien
agcatgtacttgtcatgggctgctt

SEQ ID NO: 14315 - DNA, 25 bp, Homo sapien
accaacttaaggaacaaggagtcta

SEQ ID NO: 14316 - DNA, 25 bp, Homo sapien
tagctagcatttagaaaacactttc

SEQ ID NO: 14317 - DNA, 25 bp, Homo sapien
tattggtgagaaaatggaaacttgg

SEQ ID NO: 14318 - DNA, 25 bp, Homo sapien
tcattgcaattctcaagctgtgttg

SEQ ID NO: 14319 - DNA, 25 bp, Homo sapien
aaaattagggaactagcaaggtcac

SEQ ID NO: 14320 - DNA, 25 bp, Homo sapien
tttggatctatgacagaattatgcc

SEQ ID NO: 14321 - DNA, 25 bp, Homo sapien
agcaaggtcacctaacacataacca

SEQ ID NO: 14322 - DNA, 25 bp, Homo sapien
agctgtgttgagaggattgacttca

SEQ ID NO: 14323 - DNA, 25 bp, Homo sapien
ctatgtgtcaggcagtgtgctaaaa

SEQ ID NO: 14324 - DNA, 25 bp, Homo sapien
aaagaacatttgttagtgttggatt

SEQ ID NO: 14325 - DNA, 25 bp, Homo sapien
cataggttttgagaaggtacacagg

SEQ ID NO: 14326 - DNA, 25 bp, Homo sapien
ttttgagaaggtacacaggttactg

SEQ ID NO: 14327 - DNA, 25 bp, Homo sapien
agaaggtacacaggttactgacgat

SEQ ID NO: 14328 - DNA, 25 bp, Homo sapien
acagacataggttttgagaaggtac

SEQ ID NO: 14329 - DNA, 25 bp, Homo sapien
agacataggttttgagaaggtacac

SEQ ID NO: 14330 - DNA, 25 bp, Homo sapien
agtgcaacagacataggttttgaga

SEQ ID NO: 14331 - DNA, 25 bp, Homo sapien
caacagacataggttttgagaaggt

SEQ ID NO: 14332 - DNA, 25 bp, Homo sapien
ttgagaaggtacacaggttactgac

SEQ ID NO: 14333 - DNA, 25 bp, Homo sapien
ctcagtgcaacagacataggttttg

SEQ ID NO: 14334 - DNA, 25 bp, Homo sapien
aggttttgagaaggtacacaggtta

SEQ ID NO: 14335 - DNA, 25 bp, Homo sapien
tcagacagtctaaggcaacactcaa

SEQ ID NO: 14336 - DNA, 25 bp, Homo sapien
ctggcataggagagcattaacaata

SEQ ID NO: 14337 - DNA, 25 bp, Homo sapien
agaccgcggcagttaaattaagtac

SEQ ID NO: 14338 - DNA, 25 bp, Homo sapien
gaacccagacaacgaatgcatcctt

SEQ ID NO: 14339 - DNA, 25 bp, Homo sapien
caatggaattagagagatttagtcc

SEQ ID NO: 14340 - DNA, 25 bp, Homo sapien
aagcaggttccaatcaagtcagaaa

SEQ ID NO: 14341 - DNA, 25 bp, Homo sapien
tttagtccaagtgacgcatggagac

SEQ ID NO: 14342 - DNA, 25 bp, Homo sapien
atggagacattacagtagcacaacc

SEQ ID NO: 14343 - DNA, 25 bp, Homo sapien
acactcaaataaggctgcagagacc

SEQ ID NO: 14344 - DNA, 25 bp, Homo sapien
acaaccctgtggcaggttcaaccct

SEQ ID NO: 14345 - DNA, 25 bp, Homo sapien
aatagcctcacagagaagcaggttc

SEQ ID NO: 14346 - DNA, 25 bp, Homo sapien
ttactaagtctgaaatatactgaga

SEQ ID NO: 14347 - DNA, 25 bp, Homo sapien
aggctgcactgccattgtgtgatca

SEQ ID NO: 14348 - DNA, 25 bp, Homo sapien
gatctcactatggtcaggaactcct

SEQ ID NO: 14349 - DNA, 25 bp, Homo sapien
gctagactctctattctggttccac

SEQ ID NO: 14350 - DNA, 25 bp, Homo sapien
cttcccatgctagcctcttgagtag

SEQ ID NO: 14351 - DNA, 25 bp, Homo sapien
aggcttctggccctaaggtttcaga

SEQ ID NO: 14352 - DNA, 25 bp, Homo sapien
tggccctaaggtttcagataaaata

SEQ ID NO: 14353 - DNA, 25 bp, Homo sapien
atactgagatcttttgctagactct

SEQ ID NO: 14354 - DNA, 25 bp, Homo sapien
aaaaattaattctgaggcttctggc

SEQ ID NO: 14355 - DNA, 25 bp, Homo sapien
cgagatctcactatggtcaggaact

SEQ ID NO: 14356 - DNA, 25 bp, Homo sapien
gcactgccattgtgtgatcacggct

SEQ ID NO: 14357 - DNA, 25 bp, Homo sapien
agacaatccgcaacccttaataaac

SEQ ID NO: 14358 - DNA, 25 bp, Homo sapien
ccacagacctgaataaacataagat

SEQ ID NO: 14359 - DNA, 25 bp, Homo sapien
gcaaagcctttttatgttccagagc

SEQ ID NO: 14360 - DNA, 25 bp, Homo sapien
gcaaagcctttagacaatccgcaac

SEQ ID NO: 14361 - DNA, 25 bp, Homo sapien
tgttccagagccctgaataaacata

SEQ ID NO: 14362 - DNA, 25 bp, Homo sapien
tagtcggttcacaacccttaatgaa

SEQ ID NO: 14363 - DNA, 25 bp, Homo sapien
cacaacccttaatgaacataagaga

SEQ ID NO: 14364 - DNA, 25 bp, Homo sapien
gcaaagcctttagtaggtcctcagt

SEQ ID NO: 14365 - DNA, 25 bp, Homo sapien
agtaggtcctcagttctgaatgaac

SEQ ID NO: 14366 - DNA, 25 bp, Homo sapien
tggaaaagcctttagtcggttcaca

SEQ ID NO: 14367 - DNA, 25 bp, Homo sapien
ctcagttctgaatgaacataagaga

SEQ ID NO: 14368 - DNA, 25 bp, Homo sapien
tgttccagagccctgaataaacata

SEQ ID NO: 14369 - DNA, 25 bp, Homo sapien
gcaaagcctttttatgttccagagc

SEQ ID NO: 14370 - DNA, 25 bp, Homo sapien
ccacagacctgaataaacataagat

SEQ ID NO: 14371 - DNA, 25 bp, Homo sapien
ggtctgcatacctgagtaaacataa

SEQ ID NO: 14372 - DNA, 25 bp, Homo sapien
accttacgaatgtgaagagtgtggc

SEQ ID NO: 14373 - DNA, 25 bp, Homo sapien
gcaaagcctttagacaatccgcaac

SEQ ID NO: 14374 - DNA, 25 bp, Homo sapien
tggaaaagcctttagtcggttcaca

SEQ ID NO: 14375 - DNA, 25 bp, Homo sapien
caaagcctttggatggtctgcatac

SEQ ID NO: 14376 - DNA, 25 bp, Homo sapien
agtaggtcctcagttctgaatgaac

SEQ ID NO: 14377 - DNA, 25 bp, Homo sapien
gcaaagcctttagtaggtcctcagt

SEQ ID NO: 14378 - DNA, 25 bp, Homo sapien
aaagcctttggatggtccacagacc

SEQ ID NO: 14379 - DNA, 25 bp, Homo sapien
acattggaacaatcagaaagcattc

SEQ ID NO: 14380 - DNA, 25 bp, Homo sapien
ctagatggtggatatacattggaac

SEQ ID NO: 14381 - DNA, 25 bp, Homo sapien
ttaaggtcagacaagaacctctgtc

SEQ ID NO: 14382 - DNA, 25 bp, Homo sapien
cctgctgaccatgggtgaacctcat

SEQ ID NO: 14383 - DNA, 25 bp, Homo sapien
ttcaaagtcgagcaaatgaaggcaa

SEQ ID NO: 14384 - DNA, 25 bp, Homo sapien
ttggctgtgcctagaaggacatcat

SEQ ID NO: 14385 - DNA, 25 bp, Homo sapien
actgctgtggagattggaaaattta

SEQ ID NO: 14386 - DNA, 25 bp, Homo sapien
tcccagacagcttattacgatgcat

SEQ ID NO: 14387 - DNA, 25 bp, Homo sapien
aacctcatggtgagctgttgaccac

SEQ ID NO: 14388 - DNA, 25 bp, Homo sapien
agttttgcaactacaaagggcccag

SEQ ID NO: 14389 - DNA, 25 bp, Homo sapien
tagggcgaagcatgtctgccacact

SEQ ID NO: 14390 - DNA, 25 bp, Homo sapien
agccatggacatgtaactcttagga

SEQ ID NO: 14391 - DNA, 25 bp, Homo sapien
tggccagaatattcttaaagagaac

SEQ ID NO: 14392 - DNA, 25 bp, Homo sapien
aagtgactcaatttgtctgctaccc

SEQ ID NO: 14393 - DNA, 25 bp, Homo sapien
ttctgaacaaagtatgcaagtattt

SEQ ID NO: 14394 - DNA, 25 bp, Homo sapien
tgaacatcagcccactgccttgctt

SEQ ID NO: 14395 - DNA, 25 bp, Homo sapien
caaaaagttcaagccatggacatgt

SEQ ID NO: 14396 - DNA, 25 bp, Homo sapien
tgtactctggaaattcaagtgactc

SEQ ID NO: 14397 - DNA, 25 bp, Homo sapien
taataggaccctgaacatcagccca

SEQ ID NO: 14398 - DNA, 25 bp, Homo sapien
agtccatccttaacctcagaaaagt

SEQ ID NO: 14399 - DNA, 25 bp, Homo sapien
ttctgttgtttgagacaaaaagttc

SEQ ID NO: 14400 - DNA, 25 bp, Homo sapien
tcttaggagcctcttaaaaagtcca

SEQ ID NO: 14401 - DNA, 25 bp, Homo sapien
tctatctggacctgtacagaagaat

SEQ ID NO: 14402 - DNA, 25 bp, Homo sapien
aaggaaacatagctcatctatctgg

SEQ ID NO: 14403 - DNA, 25 bp, Homo sapien
actgggagtcagtgcaccttagttt

SEQ ID NO: 14404 - DNA, 25 bp, Homo sapien
aaatgaaggacttgaaccagaaatg

SEQ ID NO: 14405 - DNA, 25 bp, Homo sapien
taaagataccaaaaaggcgatggac

SEQ ID NO: 14406 - DNA, 25 bp, Homo sapien
gtcccattgttctacagcaaaaggc

SEQ ID NO: 14407 - DNA, 25 bp, Homo sapien
atggactgggagtcagtgcacctta

SEQ ID NO: 14408 - DNA, 25 bp, Homo sapien
tgaaggacttgaaccagaaatggaa

SEQ ID NO: 14409 - DNA, 25 bp, Homo sapien
ataaaattatttagagcagtacttc

SEQ ID NO: 14410 - DNA, 25 bp, Homo sapien
atgttcccttattttgtgagctacc

SEQ ID NO: 14411 - DNA, 25 bp, Homo sapien
tgttctacagcaaaaggcttgtata

SEQ ID NO: 14412 - DNA, 25 bp, Homo sapien
gtttttctgcttaggaaagacagaa

SEQ ID NO: 14413 - DNA, 25 bp, Homo sapien
gaagtactacctgtttttctgctta

SEQ ID NO: 14414 - DNA, 25 bp, Homo sapien
tgtttgggggtggacattcaaacaa

SEQ ID NO: 14415 - DNA, 25 bp, Homo sapien
agaactgaaaatagctagttaaagg

SEQ ID NO: 14416 - DNA, 25 bp, Homo sapien
ataaagtggattggcagggttgtgt

SEQ ID NO: 14417 - DNA, 25 bp, Homo sapien
ctgaaaatagctagttaaaggggaa

SEQ ID NO: 14418 - DNA, 25 bp, Homo sapien
atagctagttaaaggggaagtacta

SEQ ID NO: 14419 - DNA, 25 bp, Homo sapien
actgaaaatagctagttaaagggga

SEQ ID NO: 14420 - DNA, 25 bp, Homo sapien
gacattcaaacaaacagtcctctgt

SEQ ID NO: 14421 - DNA, 25 bp, Homo sapien
ctgtttttctgcttaggaaagacag

SEQ ID NO: 14422 - DNA, 25 bp, Homo sapien
aacagtcctctgttacaagaactga

SEQ ID NO: 14423 - DNA, 25 bp, Homo sapien
agaatcagtatcatgtgaaaaaccc

SEQ ID NO: 14424 - DNA, 25 bp, Homo sapien
aataagttatttcagccaagaagtc

SEQ ID NO: 14425 - DNA, 25 bp, Homo sapien
gattgacagtttagtgctatcacca

SEQ ID NO: 14426 - DNA, 25 bp, Homo sapien
tcagctcacagacatggccaccttt

SEQ ID NO: 14427 - DNA, 25 bp, Homo sapien
tttagggcaaaatatgtatgaaaaa

SEQ ID NO: 14428 - DNA, 25 bp, Homo sapien
tgcccacatgagagatcaaatgttt

SEQ ID NO: 14429 - DNA, 25 bp, Homo sapien
catattcaaaataagtggctcagct

SEQ ID NO: 14430 - DNA, 25 bp, Homo sapien
ttatttagctcacatgggcatattc

SEQ ID NO: 14431 - DNA, 25 bp, Homo sapien
ttacagtaaggcattaataagttat

SEQ ID NO: 14432 - DNA, 25 bp, Homo sapien
gccaagaagtcagatacctttacat

SEQ ID NO: 14433 - DNA, 25 bp, Homo sapien
aaatcagttgcccacatgagagatc

SEQ ID NO: 14434 - DNA, 25 bp, Homo sapien
tggtgcccaccgtggcctatagcat

SEQ ID NO: 14435 - DNA, 25 bp, Homo sapien
gagactaaaggtgtggttctgccct

SEQ ID NO: 14436 - DNA, 25 bp, Homo sapien
gctaccagaatttaggaggcctcat

SEQ ID NO: 14437 - DNA, 25 bp, Homo sapien
ggctgtgacgttagcactgacacct

SEQ ID NO: 14438 - DNA, 25 bp, Homo sapien
atactggacaggtaactgcagtcag

SEQ ID NO: 14439 - DNA, 25 bp, Homo sapien
ttttgggttatgttcactgggctac

SEQ ID NO: 14440 - DNA, 25 bp, Homo sapien
aggggacatactgtgcattgactga

SEQ ID NO: 14441 - DNA, 25 bp, Homo sapien
ggagatggcagatagtactgttcca

SEQ ID NO: 14442 - DNA, 25 bp, Homo sapien
tcggcccgggatccagtcttgactc

SEQ ID NO: 14443 - DNA, 25 bp, Homo sapien
ctgttttgaagggtattggaagtcc

SEQ ID NO: 14444 - DNA, 25 bp, Homo sapien
acattttacgtgtggggcaccctgc

SEQ ID NO: 14445 - DNA, 25 bp, Homo sapien
ttgcatccagaagcataaagtggcc

SEQ ID NO: 14446 - DNA, 25 bp, Homo sapien
tacagacaatagatgatggactggg

SEQ ID NO: 14447 - DNA, 25 bp, Homo sapien
ctcccaacgttttgcatccagaagc

SEQ ID NO: 14448 - DNA, 25 bp, Homo sapien
aaactcagttatgcttgctttcacc

SEQ ID NO: 14449 - DNA, 25 bp, Homo sapien
taaagtggccattattgtgaagtcc

SEQ ID NO: 14450 - DNA, 25 bp, Homo sapien
cctgtgattagaaaaagatgcttat

SEQ ID NO: 14451 - DNA, 25 bp, Homo sapien
ttgtgaagtccactgagtgaccatt

SEQ ID NO: 14452 - DNA, 25 bp, Homo sapien
ttaagcttggtgttatgccacacac

SEQ ID NO: 14453 - DNA, 25 bp, Homo sapien
tgaatttcataatcctggtgccaga

SEQ ID NO: 14454 - DNA, 25 bp, Homo sapien
tttcctacaagaaaacgcattctca

SEQ ID NO: 14455 - DNA, 25 bp, Homo sapien
tgccacacactgtatagtgaatttc

SEQ ID NO: 14456 - DNA, 25 bp, Homo sapien
aaagggacatatttctcaagtgtgc

SEQ ID NO: 14457 - DNA, 25 bp, Homo sapien
tggcacagaattgcgataagacttt

SEQ ID NO: 14458 - DNA, 25 bp, Homo sapien
tccaaatgacgaagagtttttgttc

SEQ ID NO: 14459 - DNA, 25 bp, Homo sapien
attaaaatgtgtcgtaggtgagcca

SEQ ID NO: 14460 - DNA, 25 bp, Homo sapien
atcctaagatgttgcagggcactga

SEQ ID NO: 14461 - DNA, 25 bp, Homo sapien
catactcggtgaaaataacaaacaa

SEQ ID NO: 14462 - DNA, 25 bp, Homo sapien
tacagagttaagaaagttgaataac

SEQ ID NO: 14463 - DNA, 25 bp, Homo sapien
acaaaaggcttcagtgttagtggaa

SEQ ID NO: 14464 - DNA, 25 bp, Homo sapien
aagtctggcccaggattttgtttgt

SEQ ID NO: 14465 - DNA, 25 bp, Homo sapien
aaaatttgatccctaaagccctctc

SEQ ID NO: 14466 - DNA, 25 bp, Homo sapien
agtgttagtggaaaactgagttctt

SEQ ID NO: 14467 - DNA, 25 bp, Homo sapien
attgcctcagttgtggttcccataa

SEQ ID NO: 14468 - DNA, 25 bp, Homo sapien
cactgctttgctggtatcgaacacc

SEQ ID NO: 14469 - DNA, 25 bp, Homo sapien
gattacagagataacaggctgcacc

SEQ ID NO: 14470 - DNA, 25 bp, Homo sapien
aggctgcacccaagtgaagattctt

SEQ ID NO: 14471 - DNA, 25 bp, Homo sapien
atacatagtacttgcccagggctgg

SEQ ID NO: 14472 - DNA, 25 bp, Homo sapien
tcaatcagaagaaacagtggatacc

SEQ ID NO: 14473 - DNA, 25 bp, Homo sapien
tttctcctagatatgggtcacctcc

SEQ ID NO: 14474 - DNA, 25 bp, Homo sapien
accaggctatagtatgaatcaaata

SEQ ID NO: 14475 - DNA, 25 bp, Homo sapien
atcgaacaccaactaaggtactgtc

SEQ ID NO: 14476 - DNA, 25 bp, Homo sapien
tcacctccaggtagattacagagat

SEQ ID NO: 14477 - DNA, 25 bp, Homo sapien
gaatgatgaatctaggaaaacttac

SEQ ID NO: 14478 - DNA, 25 bp, Homo sapien
tgttggtgaaagacaagaagaccta

SEQ ID NO: 14479 - DNA, 25 bp, Homo sapien
tgtggtattgatagcaagatagaca

SEQ ID NO: 14480 - DNA, 25 bp, Homo sapien
caaagctaagtggtataaaacagag

SEQ ID NO: 14481 - DNA, 25 bp, Homo sapien
aggtatttcacagaagtatgtactt

SEQ ID NO: 14482 - DNA, 25 bp, Homo sapien
ttagagcaattgaacaaccataggc

SEQ ID NO: 14483 - DNA, 25 bp, Homo sapien
ttggcagaagtacaaataaatcatt

SEQ ID NO: 14484 - DNA, 25 bp, Homo sapien
cctatcagaagcttagtaaggtatt

SEQ ID NO: 14485 - DNA, 25 bp, Homo sapien
agcggaagtatgaccacatgagtat

SEQ ID NO: 14486 - DNA, 25 bp, Homo sapien
atttagtaaagataccagtcctccc

SEQ ID NO: 14487 - DNA, 25 bp, Homo sapien
tataaaacagagaaagcggaagtat

SEQ ID NO: 14488 - DNA, 25 bp, Homo sapien
gcaagatagacaaagctaagtggta

SEQ ID NO: 14489 - DNA, 25 bp, Homo sapien
tagaacctactataaacatttggat

SEQ ID NO: 14490 - DNA, 25 bp, Homo sapien
tttggtatgattactgaggaattgt

SEQ ID NO: 14491 - DNA, 25 bp, Homo sapien
tagctccttgtgaatgcctagttgc

SEQ ID NO: 14492 - DNA, 25 bp, Homo sapien
aacaggagctaagtaagctagaatc

SEQ ID NO: 14493 - DNA, 25 bp, Homo sapien
gggatgacagaacttaaatgttagt

SEQ ID NO: 14494 - DNA, 25 bp, Homo sapien
atacattttcataaacaggagctaa

SEQ ID NO: 14495 - DNA, 25 bp, Homo sapien
cagcagggatcacttttgaagggca

SEQ ID NO: 14496 - DNA, 25 bp, Homo sapien
agcagcaggaactttggtatgatta

SEQ ID NO: 14497 - DNA, 25 bp, Homo sapien
tgcctagttgctttgagtcttgaac

SEQ ID NO: 14498 - DNA, 25 bp, Homo sapien
atttggatagctccttgtgaatgcc

SEQ ID NO: 14499 - DNA, 25 bp, Homo sapien
gtaagctagaatcatggatacacat

SEQ ID NO: 14500 - DNA, 25 bp, Homo sapien
agtggtcccatggttatagagagca

SEQ ID NO: 14501 - DNA, 25 bp, Homo sapien
catggttatagagagcagtgattca

SEQ ID NO: 14502 - DNA, 25 bp, Homo sapien
cagtgattcacaggccacagaagat

SEQ ID NO: 14503 - DNA, 25 bp, Homo sapien
gttggttgttacacagggagaatct

SEQ ID NO: 14504 - DNA, 25 bp, Homo sapien
ctgatgggactagatttgcaaagaa

SEQ ID NO: 14505 - DNA, 25 bp, Homo sapien
aacatgacattttgactatgcaata

SEQ ID NO: 14506 - DNA, 25 bp, Homo sapien
aagaaagcttagaaaagatgggtag

SEQ ID NO: 14507 - DNA, 25 bp, Homo sapien
gcacccagcctgcttccagattttt

SEQ ID NO: 14508 - DNA, 25 bp, Homo sapien
aatctaaagaagttggttgttacac

SEQ ID NO: 14509 - DNA, 25 bp, Homo sapien
aaagatgggtagaggtatataacct

SEQ ID NO: 14510 - DNA, 25 bp, Homo sapien
gggagaatctgatgggactagattt

SEQ ID NO: 14511 - DNA, 25 bp, Homo sapien
cgcctaaacctttacagcagggaag

SEQ ID NO: 14512 - DNA, 25 bp, Homo sapien
gaattccacaagcacccagaacttc

SEQ ID NO: 14513 - DNA, 25 bp, Homo sapien
gagcagtaacctcagaaacaacttc

SEQ ID NO: 14514 - DNA, 25 bp, Homo sapien
cctgtgcaggtagataaagtgtcca

SEQ ID NO: 14515 - DNA, 25 bp, Homo sapien
tcacttctggatatgcgacacggcc

SEQ ID NO: 14516 - DNA, 25 bp, Homo sapien
gttctccggctttgtgatactcatt

SEQ ID NO: 14517 - DNA, 25 bp, Homo sapien
caaagagcctttcaaagtaggaacc

SEQ ID NO: 14518 - DNA, 25 bp, Homo sapien
ggtctggctgtgacatcacttctgg

SEQ ID NO: 14519 - DNA, 25 bp, Homo sapien
ggtcagcctggatcgtgtccaaatt

SEQ ID NO: 14520 - DNA, 25 bp, Homo sapien
agaaaatggaaaatgctgagcagta

SEQ ID NO: 14521 - DNA, 25 bp, Homo sapien
gtgtaaggcgcaccaaagagccttt

SEQ ID NO: 14522 - DNA, 25 bp, Homo sapien
gtctctcgtgaaacagcccttatgc

SEQ ID NO: 14523 - DNA, 25 bp, Homo sapien
ttacgtggcaaccatgcctggcctt

SEQ ID NO: 14524 - DNA, 25 bp, Homo sapien
ctgttctaacaggagaagttgggtt

SEQ ID NO: 14525 - DNA, 25 bp, Homo sapien
cacaggggtgttaataatatcagcc

SEQ ID NO: 14526 - DNA, 25 bp, Homo sapien
atggctaagggaggacctaattatt

SEQ ID NO: 14527 - DNA, 25 bp, Homo sapien
tttgctagagatgggctcctgtttt

SEQ ID NO: 14528 - DNA, 25 bp, Homo sapien
ccagtgatagtgtctctcgtgaaac

SEQ ID NO: 14529 - DNA, 25 bp, Homo sapien
gtgcccagccgagcaagacctttta

SEQ ID NO: 14530 - DNA, 25 bp, Homo sapien
gctgtagaccaagaatgtgtgtatc

SEQ ID NO: 14531 - DNA, 25 bp, Homo sapien
atcagcctagagctaaggattgctt

SEQ ID NO: 14532 - DNA, 25 bp, Homo sapien
atgagctcagccaattacgtggcaa

SEQ ID NO: 14533 - DNA, 25 bp, Homo sapien
tggacccagacctatgatattgcat

SEQ ID NO: 14534 - DNA, 25 bp, Homo sapien
atgggatggatgttcatactatttc

SEQ ID NO: 14535 - DNA, 25 bp, Homo sapien
ctgatataattagggtatgggatgg

SEQ ID NO: 14536 - DNA, 25 bp, Homo sapien
atccaaatatttgagagattctctt

SEQ ID NO: 14537 - DNA, 25 bp, Homo sapien
ttctgcgtcctgctgggaggtttta

SEQ ID NO: 14538 - DNA, 25 bp, Homo sapien
gctggaagtagtggagtaatatata

SEQ ID NO: 14539 - DNA, 25 bp, Homo sapien
ttttagtggcttctgcgtcctgctg

SEQ ID NO: 14540 - DNA, 25 bp, Homo sapien
agcctgcctgcttattcttatccaa

SEQ ID NO: 14541 - DNA, 25 bp, Homo sapien
cccagtaaaccacgctggaagtagt

SEQ ID NO: 14542 - DNA, 25 bp, Homo sapien
ttggttttatgactggacccagacc

SEQ ID NO: 14543 - DNA, 25 bp, Homo sapien
ctgctgggaggttttattctgctgc

SEQ ID NO: 14544 - DNA, 25 bp, Homo sapien
tgtaaacaggatctgtaagaatctg

SEQ ID NO: 14545 - DNA, 25 bp, Homo sapien
taggaataatagctaaaaactcttc

SEQ ID NO: 14546 - DNA, 25 bp, Homo sapien
atctgtcctccttcctaacaggata

SEQ ID NO: 14547 - DNA, 25 bp, Homo sapien
tacaaaactactaggaataatagct

SEQ ID NO: 14548 - DNA, 25 bp, Homo sapien
acaggatctgtaagaatctgtcctc

SEQ ID NO: 14549 - DNA, 25 bp, Homo sapien
gtaattggccttatctacaaaacta

SEQ ID NO: 14550 - DNA, 25 bp, Homo sapien
aagtacctttgctgagacccttttc

SEQ ID NO: 14551 - DNA, 25 bp, Homo sapien
acgatcattagttctgtaaacagga

SEQ ID NO: 14552 - DNA, 25 bp, Homo sapien
ataaaaacctaacatagatatgaaa

SEQ ID NO: 14553 - DNA, 25 bp, Homo sapien
tcaaagtacctttgctgagaccctt

SEQ ID NO: 14554 - DNA, 25 bp, Homo sapien
tcctaacaggatataattgggtaaa

SEQ ID NO: 14555 - DNA, 25 bp, Homo sapien
atcaaggaaatgttcaaataatcat

SEQ ID NO: 14556 - DNA, 25 bp, Homo sapien
aagcaggctaactaacccaggatca

SEQ ID NO: 14557 - DNA, 25 bp, Homo sapien
taactaacccaggatcagaggaaca

SEQ ID NO: 14558 - DNA, 25 bp, Homo sapien
aggactggatgaaactgatttcacc

SEQ ID NO: 14559 - DNA, 25 bp, Homo sapien
ttgaaagcaggctaactaacccagg

SEQ ID NO: 14560 - DNA, 25 bp, Homo sapien
atacaggctgccacgttgacatcct

SEQ ID NO: 14561 - DNA, 25 bp, Homo sapien
caatttaggaggctgtattcaataa

SEQ ID NO: 14562 - DNA, 25 bp, Homo sapien
gtcgctaatcctcaatttaggaggc

SEQ ID NO: 14563 - DNA, 25 bp, Homo sapien
gatcagaggaacaggaatttttccc

SEQ ID NO: 14564 - DNA, 25 bp, Homo sapien
tagataactttgaaagcaggctaac

SEQ ID NO: 14565 - DNA, 25 bp, Homo sapien
taggaggctgtattcaataaactgg

SEQ ID NO: 14566 - DNA, 25 bp, Homo sapien
gtattgataacaagaccatgccaaa

SEQ ID NO: 14567 - DNA, 25 bp, Homo sapien
ggctaaaagccatcaaaagagaaaa

SEQ ID NO: 14568 - DNA, 25 bp, Homo sapien
cttcccaagagtatagttgactatg

SEQ ID NO: 14569 - DNA, 25 bp, Homo sapien
actatggtgatgtcaaagtgtgtaa

SEQ ID NO: 14570 - DNA, 25 bp, Homo sapien
ttcagagaacagaggatgaaggtaa

SEQ ID NO: 14571 - DNA, 25 bp, Homo sapien
atgaaggtaaaccaataggtatgtc

SEQ ID NO: 14572 - DNA, 25 bp, Homo sapien
gtcaatgaaaaatctagagctaagt

SEQ ID NO: 14573 - DNA, 25 bp, Homo sapien
ttccataggtctacaggcccagaga

SEQ ID NO: 14574 - DNA, 25 bp, Homo sapien
cgctaaaatagggagacccttccta

SEQ ID NO: 14575 - DNA, 25 bp, Homo sapien
attacaaaggaagaacgctaaaata

SEQ ID NO: 14576 - DNA, 25 bp, Homo sapien
ctacaggcccagagacaataaaatg

SEQ ID NO: 14577 - DNA, 25 bp, Homo sapien
aaaataataacatgacagtctctgt

SEQ ID NO: 14578 - DNA, 25 bp, Homo sapien
ctctagccagtaaaacaagatattt

SEQ ID NO: 14579 - DNA, 25 bp, Homo sapien
cagggcagactgaaatcaaaacctt

SEQ ID NO: 14580 - DNA, 25 bp, Homo sapien
aacttcaacattcagcagggcagac

SEQ ID NO: 14581 - DNA, 25 bp, Homo sapien
ttaaagtagcataggtcaaagggat

SEQ ID NO: 14582 - DNA, 25 bp, Homo sapien
tagcataggtcaaagggataggttt

SEQ ID NO: 14583 - DNA, 25 bp, Homo sapien
actacttctaagtcccaagagctac

SEQ ID NO: 14584 - DNA, 25 bp, Homo sapien
tgtccttaaggaactatactctagc

SEQ ID NO: 14585 - DNA, 25 bp, Homo sapien
atcaaaacctttgggctcagtattg

SEQ ID NO: 14586 - DNA, 25 bp, Homo sapien
aatcagatttaaagtagcataggtc

SEQ ID NO: 14587 - DNA, 25 bp, Homo sapien
agtcccaagagctactagtaacttc

SEQ ID NO: 14588 - DNA, 25 bp, Homo sapien
ctactatgtgccagagaccaaggtg

SEQ ID NO: 14589 - DNA, 25 bp, Homo sapien
aaagtgaacaccaagagaagttaac

SEQ ID NO: 14590 - DNA, 25 bp, Homo sapien
atcaccaaaagttaaagtgaacacc

SEQ ID NO: 14591 - DNA, 25 bp, Homo sapien
taacttgtatatgcctgaatctccc

SEQ ID NO: 14592 - DNA, 25 bp, Homo sapien
attcacggctacttatggcttttag

SEQ ID NO: 14593 - DNA, 25 bp, Homo sapien
accaaggtggatgcactacatgaat

SEQ ID NO: 14594 - DNA, 25 bp, Homo sapien
aacacttgtgagctggtcaataaac

SEQ ID NO: 14595 - DNA, 25 bp, Homo sapien
cctaacaagcatttgagatggctac

SEQ ID NO: 14596 - DNA, 25 bp, Homo sapien
ataatagatatcaccagttcagctt

SEQ ID NO: 14597 - DNA, 25 bp, Homo sapien
ctaaagatctaagagacatgtgctt

SEQ ID NO: 14598 - DNA, 25 bp, Homo sapien
tttcacaaaaatccagtaagactta

SEQ ID NO: 14599 - DNA, 25 bp, Homo sapien
caaggcacttgggtctcttatggct

SEQ ID NO: 14600 - DNA, 25 bp, Homo sapien
tatggcttagaagtcctctgaatac

SEQ ID NO: 14601 - DNA, 25 bp, Homo sapien
tgtggctcctcaaggcacttgggtc

SEQ ID NO: 14602 - DNA, 25 bp, Homo sapien
gctcctcaaggcacttgggtctctt

SEQ ID NO: 14603 - DNA, 25 bp, Homo sapien
tgtcaacgaaaacccacataactat

SEQ ID NO: 14604 - DNA, 25 bp, Homo sapien
tcttatggcttagaagtcctctgaa

SEQ ID NO: 14605 - DNA, 25 bp, Homo sapien
atacatacatcaaggtttcccaaaa

SEQ ID NO: 14606 - DNA, 25 bp, Homo sapien
aggcacttgggtctcttatggctta

SEQ ID NO: 14607 - DNA, 25 bp, Homo sapien
tgggtctcttatggcttagaagtcc

SEQ ID NO: 14608 - DNA, 25 bp, Homo sapien
ctctgaatacatacatcaaggtttc

SEQ ID NO: 14609 - DNA, 25 bp, Homo sapien
caaaaatatgtcaacgaaaacccac

SEQ ID NO: 14610 - DNA, 25 bp, Homo sapien
ttacagcacacaataaagaagactt

SEQ ID NO: 14611 - DNA, 25 bp, Homo sapien
atgggaaggagtcttgaaaaatcaa

SEQ ID NO: 14612 - DNA, 25 bp, Homo sapien
agcacacaataaagaagacttgatc

SEQ ID NO: 14613 - DNA, 25 bp, Homo sapien
gaaaaatcaatcttcccagagtcga

SEQ ID NO: 14614 - DNA, 25 bp, Homo sapien
tgctcagcagtcagatgccctgtat

SEQ ID NO: 14615 - DNA, 25 bp, Homo sapien
gacttgatcatacttaatttgccta

SEQ ID NO: 14616 - DNA, 25 bp, Homo sapien
tcccagagtcgatattattaaccac

SEQ ID NO: 14617 - DNA, 25 bp, Homo sapien
tcagcagtcagatgccctgtattac

SEQ ID NO: 14618 - DNA, 25 bp, Homo sapien
tgtattacattcttgccgccactcc

SEQ ID NO: 14619 - DNA, 25 bp, Homo sapien
aaatgggaaggagtcttgaaaaatc

SEQ ID NO: 14620 - DNA, 25 bp, Homo sapien
ttttacagcacacaataaagaagac

SEQ ID NO: 14621 - DNA, 25 bp, Homo sapien
tgcttgtggtggttttgtagtcatg

SEQ ID NO: 14622 - DNA, 25 bp, Homo sapien
attaggcctaggtttgcttgtggtg

SEQ ID NO: 14623 - DNA, 25 bp, Homo sapien
attacggttcactgggtaattaggc

SEQ ID NO: 14624 - DNA, 25 bp, Homo sapien
aggcgtgtttgaccatgccctaata

SEQ ID NO: 14625 - DNA, 25 bp, Homo sapien
tacaggcgtgtttgaccatgcccta

SEQ ID NO: 14626 - DNA, 25 bp, Homo sapien
taggtttgcttgtggtggttttgta

SEQ ID NO: 14627 - DNA, 25 bp, Homo sapien
gtagtcatgtgagaatggtattttt

SEQ ID NO: 14628 - DNA, 25 bp, Homo sapien
acggttcactgggtaattaggccta

SEQ ID NO: 14629 - DNA, 25 bp, Homo sapien
tgagaaattacggttcactgggtaa

SEQ ID NO: 14630 - DNA, 25 bp, Homo sapien
actgggtaattaggcctaggtttgc

SEQ ID NO: 14631 - DNA, 25 bp, Homo sapien
ccctgcttttgagaaattacggttc

SEQ ID NO: 14632 - DNA, 25 bp, Homo sapien
tagagtgagattggcctggattcct

SEQ ID NO: 14633 - DNA, 25 bp, Homo sapien
atttgaaagacactggctctgccac

SEQ ID NO: 14634 - DNA, 25 bp, Homo sapien
tgccacttaacagccatgtaacctt

SEQ ID NO: 14635 - DNA, 25 bp, Homo sapien
atatactttcgttcttggccacagc

SEQ ID NO: 14636 - DNA, 25 bp, Homo sapien
acgtaatagggttgcatgaacattc

SEQ ID NO: 14637 - DNA, 25 bp, Homo sapien
acatgtttgatagagcctagctgta

SEQ ID NO: 14638 - DNA, 25 bp, Homo sapien
ttgaagattgatccaagggactgta

SEQ ID NO: 14639 - DNA, 25 bp, Homo sapien
caagtcggcttgttagataaattat

SEQ ID NO: 14640 - DNA, 25 bp, Homo sapien
ataagcctgtataacacccacctag

SEQ ID NO: 14641 - DNA, 25 bp, Homo sapien
acctagcctgtcctaaagagttatg

SEQ ID NO: 14642 - DNA, 25 bp, Homo sapien
aagagttatgaggatcagataccac

SEQ ID NO: 14643 - DNA, 25 bp, Homo sapien
tagcaaagtctgacttttaaggctc

SEQ ID NO: 14644 - DNA, 25 bp, Homo sapien
ttatctagacctaaccaaatcctat

SEQ ID NO: 14645 - DNA, 25 bp, Homo sapien
agtccatggtcacatcaaaaattac

SEQ ID NO: 14646 - DNA, 25 bp, Homo sapien
ttcatgacaagtccatggtcacatc

SEQ ID NO: 14647 - DNA, 25 bp, Homo sapien
gtaagacatctgaacaacatgaaac

SEQ ID NO: 14648 - DNA, 25 bp, Homo sapien
cttaatgttatattcaggacagtga

SEQ ID NO: 14649 - DNA, 25 bp, Homo sapien
atgaattagcctaaacctgtgctta

SEQ ID NO: 14650 - DNA, 25 bp, Homo sapien
gaaaaacactcatttagatacctgg

SEQ ID NO: 14651 - DNA, 25 bp, Homo sapien
tagatacctggtttagtaagacatc

SEQ ID NO: 14652 - DNA, 25 bp, Homo sapien
tctgaacaacatgaaacccaactat

SEQ ID NO: 14653 - DNA, 25 bp, Homo sapien
atgaaacccaactatgtaaaagctt

SEQ ID NO: 14654 - DNA, 25 bp, Homo sapien
gtaaatgctttaacatggcctggcc

SEQ ID NO: 14655 - DNA, 25 bp, Homo sapien
atggggccgccacatctgtcttgtt

SEQ ID NO: 14656 - DNA, 25 bp, Homo sapien
cactggaaggtgtattagaaaatac

SEQ ID NO: 14657 - DNA, 25 bp, Homo sapien
tagaaaatactcaggcacatgtgta

SEQ ID NO: 14658 - DNA, 25 bp, Homo sapien
ttaactccgccaaatggggccgcca

SEQ ID NO: 14659 - DNA, 25 bp, Homo sapien
gctctaatattccagtgtcaccgtc

SEQ ID NO: 14660 - DNA, 25 bp, Homo sapien
ccaaagccagattgtttaactccgc

SEQ ID NO: 14661 - DNA, 25 bp, Homo sapien
gggctgtctgtcaaggctttcctga

SEQ ID NO: 14662 - DNA, 25 bp, Homo sapien
aaatgcaacaactccaaatcactgg

SEQ ID NO: 14663 - DNA, 25 bp, Homo sapien
tccagagttgtaaagggctgtctgt

SEQ ID NO: 14664 - DNA, 25 bp, Homo sapien
cctgatgatggtgttgctctaatat

SEQ ID NO: 14665 - DNA, 25 bp, Homo sapien
cctccacacacacgtggcaggtgat

SEQ ID NO: 14666 - DNA, 25 bp, Homo sapien
cagcttgagaaggaaggaattcctt

SEQ ID NO: 14667 - DNA, 25 bp, Homo sapien
cctgacccaggatcacatcttaatt

SEQ ID NO: 14668 - DNA, 25 bp, Homo sapien
tgatggggtttccagaaagtttgct

SEQ ID NO: 14669 - DNA, 25 bp, Homo sapien
ctcagcatatctcttgtacaggtcc

SEQ ID NO: 14670 - DNA, 25 bp, Homo sapien
ctgaaggagtagaaaatccactgtc

SEQ ID NO: 14671 - DNA, 25 bp, Homo sapien
tgtacaggtccaagtgttcctatta

SEQ ID NO: 14672 - DNA, 25 bp, Homo sapien
attcgcctttgtatacccacacagc

SEQ ID NO: 14673 - DNA, 25 bp, Homo sapien
aaagtttgctgaaggagtagaaaat

SEQ ID NO: 14674 - DNA, 25 bp, Homo sapien
gttcctattaatgctttgtggctta

SEQ ID NO: 14675 - DNA, 25 bp, Homo sapien
aaagcctgacacctacagcttgaga

SEQ ID NO: 14676 - DNA, 25 bp, Homo sapien
ctcctcaaggtgtgtgctccactct

SEQ ID NO: 14677 - DNA, 25 bp, Homo sapien
aactcctcctggttggcaattaatt

SEQ ID NO: 14678 - DNA, 25 bp, Homo sapien
aaaaagctcctcttaagactgatcc

SEQ ID NO: 14679 - DNA, 25 bp, Homo sapien
tttgaaaaatacagcccaactcctc

SEQ ID NO: 14680 - DNA, 25 bp, Homo sapien
cctttgaaaaatacagcccaactcc

SEQ ID NO: 14681 - DNA, 25 bp, Homo sapien
cccacctttgaaaaatacagcccaa

SEQ ID NO: 14682 - DNA, 25 bp, Homo sapien
gctttcctcctcaaggtgtgtgctc

SEQ ID NO: 14683 - DNA, 25 bp, Homo sapien
cctcctggttggcaattaatttctc

SEQ ID NO: 14684 - DNA, 25 bp, Homo sapien
tcctcctcaaggtgtgtgctccact

SEQ ID NO: 14685 - DNA, 25 bp, Homo sapien
aaatacagcccaactcctcctggtt

SEQ ID NO: 14686 - DNA, 25 bp, Homo sapien
tttcctcctcaaggtgtgtgctcca

SEQ ID NO: 14687 - DNA, 25 bp, Homo sapien
gcacagtctactttgaaggcaccca

SEQ ID NO: 14688 - DNA, 25 bp, Homo sapien
tacagtgaatttaagtgaacagaac

SEQ ID NO: 14689 - DNA, 25 bp, Homo sapien
taggagataaatcaacttctgcttc

SEQ ID NO: 14690 - DNA, 25 bp, Homo sapien
ttgaaggcacccaaaataaatgata

SEQ ID NO: 14691 - DNA, 25 bp, Homo sapien
ttgaagtcacatagatttaggagat

SEQ ID NO: 14692 - DNA, 25 bp, Homo sapien
ttggcactatgccaaactgagaaat

SEQ ID NO: 14693 - DNA, 25 bp, Homo sapien
tgtgggtgtcacattagtgccttca

SEQ ID NO: 14694 - DNA, 25 bp, Homo sapien
gtaggatgaccagctttgaagtcac

SEQ ID NO: 14695 - DNA, 25 bp, Homo sapien
actaataaattgagcccggtgtggg

SEQ ID NO: 14696 - DNA, 25 bp, Homo sapien
ttgacaatcattttggggccaacat

SEQ ID NO: 14697 - DNA, 25 bp, Homo sapien
caaccaggcatagtggtaggatgac

SEQ ID NO: 14698 - DNA, 25 bp, Homo sapien
aggccacaccaaagcaggtcaggta

SEQ ID NO: 14699 - DNA, 25 bp, Homo sapien
cacatggcctcactgcatgtttttc

SEQ ID NO: 14700 - DNA, 25 bp, Homo sapien
tggtccacaggccatagatagccaa

SEQ ID NO: 14701 - DNA, 25 bp, Homo sapien
acctgatgcgattctgctggctgat

SEQ ID NO: 14702 - DNA, 25 bp, Homo sapien
gagaggtggctcttaggatcaagat

SEQ ID NO: 14703 - DNA, 25 bp, Homo sapien
ctggctgatggctgtggtcatcctg

SEQ ID NO: 14704 - DNA, 25 bp, Homo sapien
gaggctcatacaaaactagggaccg

SEQ ID NO: 14705 - DNA, 25 bp, Homo sapien
cctgctccttctagatgatttttgg

SEQ ID NO: 14706 - DNA, 25 bp, Homo sapien
ctcatacaaaactagggaccgtaaa

SEQ ID NO: 14707 - DNA, 25 bp, Homo sapien
tagatagccaatccctgtcccagag

SEQ ID NO: 14708 - DNA, 25 bp, Homo sapien
agacttgtcggggtgagacctgtta

SEQ ID NO: 14709 - DNA, 25 bp, Homo sapien
tggtttccatgagataaacaacttt

SEQ ID NO: 14710 - DNA, 25 bp, Homo sapien
tcgtggtttccatgagataaacaac

SEQ ID NO: 14711 - DNA, 25 bp, Homo sapien
ttgtgtattttcctcgtggtttcca

SEQ ID NO: 14712 - DNA, 25 bp, Homo sapien
ttttcctcgtggtttccatgagata

SEQ ID NO: 14713 - DNA, 25 bp, Homo sapien
gtgcaagggtgtagtaatcatagct

SEQ ID NO: 14714 - DNA, 25 bp, Homo sapien
tcctcgtggtttccatgagataaac

SEQ ID NO: 14715 - DNA, 25 bp, Homo sapien
agtgcaagggtgtagtaatcatagc

SEQ ID NO: 14716 - DNA, 25 bp, Homo sapien
tggagtgcaagggtgtagtaatcat

SEQ ID NO: 14717 - DNA, 25 bp, Homo sapien
gcaagggtgtagtaatcatagctca

SEQ ID NO: 14718 - DNA, 25 bp, Homo sapien
tgcaagggtgtagtaatcatagctc

SEQ ID NO: 14719 - DNA, 25 bp, Homo sapien
gagtgcaagggtgtagtaatcatag

SEQ ID NO: 14720 - DNA, 25 bp, Homo sapien
ggtgtgaactgctgcacccagccta

SEQ ID NO: 14721 - DNA, 25 bp, Homo sapien
tggtttccatgagataaacaacttt

SEQ ID NO: 14722 - DNA, 25 bp, Homo sapien
tcgtggtttccatgagataaacaac

SEQ ID NO: 14723 - DNA, 25 bp, Homo sapien
tcctcgtggtttccatgagataaac

SEQ ID NO: 14724 - DNA, 25 bp, Homo sapien
agtgcaagggtgtagtaatcatagc

SEQ ID NO: 14725 - DNA, 25 bp, Homo sapien
ttgtgtattttcctcgtggtttcca

SEQ ID NO: 14726 - DNA, 25 bp, Homo sapien
ttagtagaaacagggcctcattatg

SEQ ID NO: 14727 - DNA, 25 bp, Homo sapien
gcaagggtgtagtaatcatagctca

SEQ ID NO: 14728 - DNA, 25 bp, Homo sapien
ttttcctcgtggtttccatgagata

SEQ ID NO: 14729 - DNA, 25 bp, Homo sapien
tggagtgcaagggtgtagtaatcat

SEQ ID NO: 14730 - DNA, 25 bp, Homo sapien
tgcaagggtgtagtaatcatagctc

SEQ ID NO: 14731 - DNA, 25 bp, Homo sapien
gatactccttgcacatatcacttta

SEQ ID NO: 14732 - DNA, 25 bp, Homo sapien
ttctcccgtgtaggcctcttgaagt

SEQ ID NO: 14733 - DNA, 25 bp, Homo sapien
tcccgtgtaggcctcttgaagtgtt

SEQ ID NO: 14734 - DNA, 25 bp, Homo sapien
tcacatatatatagttgggaccaca

SEQ ID NO: 14735 - DNA, 25 bp, Homo sapien
tatgcttagctcacataagccatac

SEQ ID NO: 14736 - DNA, 25 bp, Homo sapien
attctgcatacctcaaatcccactt

SEQ ID NO: 14737 - DNA, 25 bp, Homo sapien
tcaagttattctcccgtgtaggcct

SEQ ID NO: 14738 - DNA, 25 bp, Homo sapien
tagtctcaagttattctcccgtgta

SEQ ID NO: 14739 - DNA, 25 bp, Homo sapien
tattctcccgtgtaggcctcttgaa

SEQ ID NO: 14740 - DNA, 25 bp, Homo sapien
gcttcacatatatatagttgggacc

SEQ ID NO: 14741 - DNA, 25 bp, Homo sapien
ctaatgtgattaatgatactttgat

SEQ ID NO: 14742 - DNA, 25 bp, Homo sapien
ggccatggttccgttcggccggctt

SEQ ID NO: 14743 - DNA, 25 bp, Homo sapien
aagccggccgaacggaaccatggcc

SEQ ID NO: 14744 - DNA, 25 bp, Homo sapien
aatacttttcgctacttctacaaac

SEQ ID NO: 14745 - DNA, 25 bp, Homo sapien
gtttgtagaagtagcgaaaagtatt

SEQ ID NO: 14746 - DNA, 25 bp, Homo sapien
tcatttatgtaaagactcccagtca

SEQ ID NO: 14747 - DNA, 25 bp, Homo sapien
atagattgccctcacaccctagagc

SEQ ID NO: 14748 - DNA, 25 bp, Homo sapien
ttgaggccaatacttgccatgacat

SEQ ID NO: 14749 - DNA, 25 bp, Homo sapien
ctaggattagcggtgtgagcatcta

SEQ ID NO: 14750 - DNA, 25 bp, Homo sapien
tgagttgttcagcagtcaaataatc

SEQ ID NO: 14751 - DNA, 25 bp, Homo sapien
aagtataatctcttgaggccaatac

SEQ ID NO: 14752 - DNA, 25 bp, Homo sapien
aaagcagactctcactgtcctggca

SEQ ID NO: 14753 - DNA, 25 bp, Homo sapien
tagcggtgtgagcatctatcatgaa

SEQ ID NO: 14754 - DNA, 25 bp, Homo sapien
ctgtcctggcagcttaatgagttgt

SEQ ID NO: 14755 - DNA, 25 bp, Homo sapien
ttacacacgtatagattgccctcac

SEQ ID NO: 14756 - DNA, 25 bp, Homo sapien
actgttcaagacacatgtgtatttc

SEQ ID NO: 14757 - DNA, 25 bp, Homo sapien
agatgaaacaatggtgacagcacac

SEQ ID NO: 14758 - DNA, 25 bp, Homo sapien
ttactttctacaggctgatgagtgc

SEQ ID NO: 14759 - DNA, 25 bp, Homo sapien
aggctgatgagtgcagctaatcctc

SEQ ID NO: 14760 - DNA, 25 bp, Homo sapien
gagtgcagctaatcctcattattat

SEQ ID NO: 14761 - DNA, 25 bp, Homo sapien
tgctcctcacagatgaaacaatggt

SEQ ID NO: 14762 - DNA, 25 bp, Homo sapien
tttctacaggctgatgagtgcagct

SEQ ID NO: 14763 - DNA, 25 bp, Homo sapien
cacagatgaaacaatggtgacagca

SEQ ID NO: 14764 - DNA, 25 bp, Homo sapien
tatgcagcttgtgtcctgtctccat

SEQ ID NO: 14765 - DNA, 25 bp, Homo sapien
ctacaggctgatgagtgcagctaat

SEQ ID NO: 14766 - DNA, 25 bp, Homo sapien
atcccttatgcagcttgtgtcctgt

SEQ ID NO: 14767 - DNA, 25 bp, Homo sapien
tggtgacagcacacccgaacaaagg

SEQ ID NO: 14768 - DNA, 25 bp, Homo sapien
atttggaaattgagttgtggatgta

SEQ ID NO: 14769 - DNA, 25 bp, Homo sapien
aggcctgggataagccctttccttg

SEQ ID NO: 14770 - DNA, 25 bp, Homo sapien
atcatactggagtatggcaggtctc

SEQ ID NO: 14771 - DNA, 25 bp, Homo sapien
ttccttgcacctgcagagagaggat

SEQ ID NO: 14772 - DNA, 25 bp, Homo sapien
ttgattattgagcttgggcagactc

SEQ ID NO: 14773 - DNA, 25 bp, Homo sapien
ttatgccaccacaggcgaaggaact

SEQ ID NO: 14774 - DNA, 25 bp, Homo sapien
tgaagattagagttatgccaccaca

SEQ ID NO: 14775 - DNA, 25 bp, Homo sapien
taatccagcatgagtggtgtccttt

SEQ ID NO: 14776 - DNA, 25 bp, Homo sapien
agtgttatgagttgaatggtgtccc

SEQ ID NO: 14777 - DNA, 25 bp, Homo sapien
agtatggcaggtctctaatccagca

SEQ ID NO: 14778 - DNA, 25 bp, Homo sapien
caaagtcatgcagccatcgccataa

SEQ ID NO: 14779 - DNA, 25 bp, Homo sapien
ctgcacctcgatgggaaaaagaaaa

SEQ ID NO: 14780 - DNA, 25 bp, Homo sapien
attgaaagagacgtgcagatgaaac

SEQ ID NO: 14781 - DNA, 25 bp, Homo sapien
ttggccctggcgagaatccattcac

SEQ ID NO: 14782 - DNA, 25 bp, Homo sapien
actcggctctacctggaagttcgca

SEQ ID NO: 14783 - DNA, 25 bp, Homo sapien
ttacatctgcagacatgtgtgctcc

SEQ ID NO: 14784 - DNA, 25 bp, Homo sapien
atgtgtgctccaactccagcgagta

SEQ ID NO: 14785 - DNA, 25 bp, Homo sapien
ctccctaagggctggtgtctgcttc

SEQ ID NO: 14786 - DNA, 25 bp, Homo sapien
agggcactgtgaaacctgctccatc

SEQ ID NO: 14787 - DNA, 25 bp, Homo sapien
ttcgcacgcccgcattgaaagagac

SEQ ID NO: 14788 - DNA, 25 bp, Homo sapien
aaaagggcagtgaagttctaatttc

SEQ ID NO: 14789 - DNA, 25 bp, Homo sapien
ccctgcggataagtattggccctgg

SEQ ID NO: 14790 - DNA, 25 bp, Homo sapien
ctagcaatggcaaatctgggtgtta

SEQ ID NO: 14791 - DNA, 25 bp, Homo sapien
acacaagtggataggagaaagaata

SEQ ID NO: 14792 - DNA, 25 bp, Homo sapien
ctgaaagggcagcaaaatttggaac

SEQ ID NO: 14793 - DNA, 25 bp, Homo sapien
aaggaaacttaaggatgctggcaag

SEQ ID NO: 14794 - DNA, 25 bp, Homo sapien
ttaagttgagagagttcacacaaac

SEQ ID NO: 14795 - DNA, 25 bp, Homo sapien
ggaataaagagaaggctaacaatgt

SEQ ID NO: 14796 - DNA, 25 bp, Homo sapien
tgctggcaagagaactgttgaaaca

SEQ ID NO: 14797 - DNA, 25 bp, Homo sapien
tttaagatacaggaaagaaaggaga

SEQ ID NO: 14798 - DNA, 25 bp, Homo sapien
agaaaggagataactgattaaccag

SEQ ID NO: 14799 - DNA, 25 bp, Homo sapien
gaagatgcagataggagtatgaata

SEQ ID NO: 14800 - DNA, 25 bp, Homo sapien
aagacttagagttgaaggcctgaaa

SEQ ID NO: 14801 - DNA, 25 bp, Homo sapien
tatatatgccataaataggtaaaca

SEQ ID NO: 14802 - DNA, 25 bp, Homo sapien
aaatgcattaggtaatgaatacctc

SEQ ID NO: 14803 - DNA, 25 bp, Homo sapien
gtacattttacccattgaaacaata

SEQ ID NO: 14804 - DNA, 25 bp, Homo sapien
acccattgaaacaatactgttaaac

SEQ ID NO: 14805 - DNA, 25 bp, Homo sapien
aagttggtgacataacactttacta

SEQ ID NO: 14806 - DNA, 25 bp, Homo sapien
taatccacaggcaaaagagattgct

SEQ ID NO: 14807 - DNA, 25 bp, Homo sapien
atccacaggcaaaagagattgctag

SEQ ID NO: 14808 - DNA, 25 bp, Homo sapien
gcatcacatgaacaatgttaaaagt

SEQ ID NO: 14809 - DNA, 25 bp, Homo sapien
tgatgtgattacaaattgtatgcct

SEQ ID NO: 14810 - DNA, 25 bp, Homo sapien
aaacacataactcatgcatcacatg

SEQ ID NO: 14811 - DNA, 25 bp, Homo sapien
aaagtcagccataaagagcctctcc

SEQ ID NO: 14812 - DNA, 25 bp, Homo sapien
aaaatagaacagtcacctctggtga

SEQ ID NO: 14813 - DNA, 25 bp, Homo sapien
taaaccttctgtgggatgagatggc

SEQ ID NO: 14814 - DNA, 25 bp, Homo sapien
gagatggctgtcagacgtcttcaac

SEQ ID NO: 14815 - DNA, 25 bp, Homo sapien
cctctggtgacacgcatctgtagtc

SEQ ID NO: 14816 - DNA, 25 bp, Homo sapien
aaagctttgtgctcaccacgtgtgc

SEQ ID NO: 14817 - DNA, 25 bp, Homo sapien
attcagcccaacaatggagagggct

SEQ ID NO: 14818 - DNA, 25 bp, Homo sapien
tgccctagggatcacgacagattca

SEQ ID NO: 14819 - DNA, 25 bp, Homo sapien
tgatactaaaggcttggtggtctca

SEQ ID NO: 14820 - DNA, 25 bp, Homo sapien
ctcagagagctgttgcataataact

SEQ ID NO: 14821 - DNA, 25 bp, Homo sapien
aactgtggactaaaggattgcattt

SEQ ID NO: 14822 - DNA, 25 bp, Homo sapien
atttcgtgatcagtgtaaagactca

SEQ ID NO: 14823 - DNA, 25 bp, Homo sapien
ccgaaccatttaagactaagttgta

SEQ ID NO: 14824 - DNA, 25 bp, Homo sapien
tgcaaggataataatacaaagggcc

SEQ ID NO: 14825 - DNA, 25 bp, Homo sapien
aagcatcagctggactgattgtttc

SEQ ID NO: 14826 - DNA, 25 bp, Homo sapien
agactaagttgtatacatcaccacc

SEQ ID NO: 14827 - DNA, 25 bp, Homo sapien
ttctgaagtcaatgtattatagtcc

SEQ ID NO: 14828 - DNA, 25 bp, Homo sapien
ttgtccaaaatttgcccagtagaat

SEQ ID NO: 14829 - DNA, 25 bp, Homo sapien
cagctggactgattgtttcttattc

SEQ ID NO: 14830 - DNA, 25 bp, Homo sapien
gataataatacaaagggccactcat

SEQ ID NO: 14831 - DNA, 25 bp, Homo sapien
ttatagtccattccagtcatgattc

SEQ ID NO: 14832 - DNA, 25 bp, Homo sapien
tggcttttggaaagaagagcttttc

SEQ ID NO: 14833 - DNA, 25 bp, Homo sapien
atacaaagggccactcatatatcct

SEQ ID NO: 14834 - DNA, 25 bp, Homo sapien
caaaatatctcacacaagagtaggc

SEQ ID NO: 14835 - DNA, 25 bp, Homo sapien
gtaggagaaatatcacctcaaacac

SEQ ID NO: 14836 - DNA, 25 bp, Homo sapien
gttactagttactggtataagcatt

SEQ ID NO: 14837 - DNA, 25 bp, Homo sapien
gtgtgatctctgcatcatgttgacc

SEQ ID NO: 14838 - DNA, 25 bp, Homo sapien
tggatgatggtagaagttaactgtt

SEQ ID NO: 14839 - DNA, 25 bp, Homo sapien
gattggatgatggtagaagttaact

SEQ ID NO: 14840 - DNA, 25 bp, Homo sapien
ttgtgttcctctatagtacttggta

SEQ ID NO: 14841 - DNA, 25 bp, Homo sapien
ctggtataagcattgatttaaactt

SEQ ID NO: 14842 - DNA, 25 bp, Homo sapien
cacacaagagtaggcattttcagtt

SEQ ID NO: 14843 - DNA, 25 bp, Homo sapien
tagtacttggtatttcagtaggaga

SEQ ID NO: 14844 - DNA, 25 bp, Homo sapien
ccctgctgtaataaatagtgaaagt

SEQ ID NO: 14845 - DNA, 25 bp, Homo sapien
aagagcaactgaatcctgccagctg

SEQ ID NO: 14846 - DNA, 25 bp, Homo sapien
aagttgactttcagatgagacctcg

SEQ ID NO: 14847 - DNA, 25 bp, Homo sapien
tgaatgaacacaaacgtctatgccc

SEQ ID NO: 14848 - DNA, 25 bp, Homo sapien
ctgagggtgaaatctagctaatagc

SEQ ID NO: 14849 - DNA, 25 bp, Homo sapien
tgagacctcggtcctgactgcttcc

SEQ ID NO: 14850 - DNA, 25 bp, Homo sapien
gaagcagacccatcccaagttgact

SEQ ID NO: 14851 - DNA, 25 bp, Homo sapien
gctgttatgttaagtgaggctggaa

SEQ ID NO: 14852 - DNA, 25 bp, Homo sapien
ccagttgggtggattcagacattct

SEQ ID NO: 14853 - DNA, 25 bp, Homo sapien
ccacacggcaacaaactgagggtga

SEQ ID NO: 14854 - DNA, 25 bp, Homo sapien
tactcactgtggtaggcagcttcta

SEQ ID NO: 14855 - DNA, 25 bp, Homo sapien
taaattgccaccttagggaggccca

SEQ ID NO: 14856 - DNA, 25 bp, Homo sapien
agcctgacggtaacatgacacctag

SEQ ID NO: 14857 - DNA, 25 bp, Homo sapien
aacatgacacctagaattataattc

SEQ ID NO: 14858 - DNA, 25 bp, Homo sapien
tcagcgctttgaaaagccaaggcag

SEQ ID NO: 14859 - DNA, 25 bp, Homo sapien
ctgtattagggaaaagcctgacggt

SEQ ID NO: 14860 - DNA, 25 bp, Homo sapien
aaaaaatcacgactaaaaccctgca

SEQ ID NO: 14861 - DNA, 25 bp, Homo sapien
tgtatatacattcacgcacaaaaat

SEQ ID NO: 14862 - DNA, 25 bp, Homo sapien
agcaagaccgtgtcgctaaaaaaag

SEQ ID NO: 14863 - DNA, 25 bp, Homo sapien
ggaaaagcctgacggtaacatgaca

SEQ ID NO: 14864 - DNA, 25 bp, Homo sapien
tagccaaaagcctaccatttattag

SEQ ID NO: 14865 - DNA, 25 bp, Homo sapien
aatcacgactaaaaccctgcaaggc

SEQ ID NO: 14866 - DNA, 25 bp, Homo sapien
ctccaagctaggcaaaagagcaaga

SEQ ID NO: 14867 - DNA, 25 bp, Homo sapien
atgtagatgactgcatgcggcatct

SEQ ID NO: 14868 - DNA, 25 bp, Homo sapien
ggacagcagtcacatggaccatgtt

SEQ ID NO: 14869 - DNA, 25 bp, Homo sapien
agcagagaagatatgaacaacgtat

SEQ ID NO: 14870 - DNA, 25 bp, Homo sapien
taaggttaaacacatgctgggccat

SEQ ID NO: 14871 - DNA, 25 bp, Homo sapien
acaattcaaaggacagcagtcacat

SEQ ID NO: 14872 - DNA, 25 bp, Homo sapien
aagtagagataactcaacaattgtc

SEQ ID NO: 14873 - DNA, 25 bp, Homo sapien
ttctaaataagccatggaatctgtt

SEQ ID NO: 14874 - DNA, 25 bp, Homo sapien
tatataaagcaaagttcacagaact

SEQ ID NO: 14875 - DNA, 25 bp, Homo sapien
tgcggcatctgcagaacatgcattc

SEQ ID NO: 14876 - DNA, 25 bp, Homo sapien
tcaatcacatcagaggtttaccaat

SEQ ID NO: 14877 - DNA, 25 bp, Homo sapien
ttcattaagagcagagaagatatga

SEQ ID NO: 14878 - DNA, 25 bp, Homo sapien
atcctagctccacttccagaactgc

SEQ ID NO: 14879 - DNA, 25 bp, Homo sapien
tgcagtggcgggattactgctcact

SEQ ID NO: 14880 - DNA, 25 bp, Homo sapien
ctgagtttggtttctgcttatggtg

SEQ ID NO: 14881 - DNA, 25 bp, Homo sapien
atggtggggagcttgttcccgttct

SEQ ID NO: 14882 - DNA, 25 bp, Homo sapien
ctgcctttctgagtttggtttctgc

SEQ ID NO: 14883 - DNA, 25 bp, Homo sapien
tcttcccacaagaacccaggatgtg

SEQ ID NO: 14884 - DNA, 25 bp, Homo sapien
gttcttcccacaagaacccaggatg

SEQ ID NO: 14885 - DNA, 25 bp, Homo sapien
ttgaagaggggagaaggtctcacta

SEQ ID NO: 14886 - DNA, 25 bp, Homo sapien
gtggcacagcttccctgccgtcttc

SEQ ID NO: 14887 - DNA, 25 bp, Homo sapien
ttcccacaagaacccaggatgtggc

SEQ ID NO: 14888 - DNA, 25 bp, Homo sapien
accacgtccagctgcccggttaatt

SEQ ID NO: 14889 - DNA, 25 bp, Homo sapien
aaattctgcacccagaggaagttcc

SEQ ID NO: 14890 - DNA, 25 bp, Homo sapien
acccaaagtcaggatcacggagcct

SEQ ID NO: 14891 - DNA, 25 bp, Homo sapien
cactgggtggcccttggctgaacat

SEQ ID NO: 14892 - DNA, 25 bp, Homo sapien
ttgccctgggccctgatacatacgg

SEQ ID NO: 14893 - DNA, 25 bp, Homo sapien
atacggcttgtcaccacacagctac

SEQ ID NO: 14894 - DNA, 25 bp, Homo sapien
gcccttggctgaacattggagtcct

SEQ ID NO: 14895 - DNA, 25 bp, Homo sapien
atcacggagcctgatcctgtgtctg

SEQ ID NO: 14896 - DNA, 25 bp, Homo sapien
acaggcagtccctggtgaagaaaat

SEQ ID NO: 14897 - DNA, 25 bp, Homo sapien
agcctgatcctgtgtctggggaacc

SEQ ID NO: 14898 - DNA, 25 bp, Homo sapien
aatgaatacaggcagtccctggtga

SEQ ID NO: 14899 - DNA, 25 bp, Homo sapien
gggaagaacactggacccaaagtca

SEQ ID NO: 14900 - DNA, 25 bp, Homo sapien
tcctagtgctacagattactcagta

SEQ ID NO: 14901 - DNA, 25 bp, Homo sapien
tttcctagtgctacagattactcag

SEQ ID NO: 14902 - DNA, 25 bp, Homo sapien
atatacagaaaagtagaacaatttt

SEQ ID NO: 14903 - DNA, 25 bp, Homo sapien
ttactcagtattttggtgtttattc

SEQ ID NO: 14904 - DNA, 25 bp, Homo sapien
ctagtgctacagattactcagtatt

SEQ ID NO: 14905 - DNA, 25 bp, Homo sapien
gaacaatttttcctagtgctacaga

SEQ ID NO: 14906 - DNA, 25 bp, Homo sapien
taccggttcattgccaaaaggagaa

SEQ ID NO: 14907 - DNA, 25 bp, Homo sapien
aatttttcctagtgctacagattac

SEQ ID NO: 14908 - DNA, 25 bp, Homo sapien
cctagtgctacagattactcagtat

SEQ ID NO: 14909 - DNA, 25 bp, Homo sapien
aaagtagaacaatttttcctagtgc

SEQ ID NO: 14910 - DNA, 25 bp, Homo sapien
tttttcctagtgctacagattactc

SEQ ID NO: 14911 - DNA, 25 bp, Homo sapien
taagcttgtgaatacaccaaagaaa

SEQ ID NO: 14912 - DNA, 25 bp, Homo sapien
acaaccagaacagtaacattaaata

SEQ ID NO: 14913 - DNA, 25 bp, Homo sapien
tggaagtataagcttgtgaatacac

SEQ ID NO: 14914 - DNA, 25 bp, Homo sapien
cgtgatacaatgtacgaaaatgtac

SEQ ID NO: 14915 - DNA, 25 bp, Homo sapien
gtctttacagaggtaagataaatgt

SEQ ID NO: 14916 - DNA, 25 bp, Homo sapien
ggaaagaggaatctggcctattcac

SEQ ID NO: 14917 - DNA, 25 bp, Homo sapien
ggcctattcacgtgatacaatgtac

SEQ ID NO: 14918 - DNA, 25 bp, Homo sapien
ttaatatatggaagtataagcttgt

SEQ ID NO: 14919 - DNA, 25 bp, Homo sapien
gaataggaaagaggaatctggccta

SEQ ID NO: 14920 - DNA, 25 bp, Homo sapien
aaactgcttaccaagtaatataagt

SEQ ID NO: 14921 - DNA, 25 bp, Homo sapien
tataagttgcatcaaaccactcatc

SEQ ID NO: 14922 - DNA, 25 bp, Homo sapien
tcggccggtgctcatgtgccttctt

SEQ ID NO: 14923 - DNA, 25 bp, Homo sapien
tgcttcgtttgctgtcggatctgac

SEQ ID NO: 14924 - DNA, 25 bp, Homo sapien
tccttttgcaaagagggtgtgcaga

SEQ ID NO: 14925 - DNA, 25 bp, Homo sapien
ttctcacagcaagggtctgtgcgcc

SEQ ID NO: 14926 - DNA, 25 bp, Homo sapien
gaagatcccacatgtccctgatgcc

SEQ ID NO: 14927 - DNA, 25 bp, Homo sapien
tgaagatgggtgcttatctggtatc

SEQ ID NO: 14928 - DNA, 25 bp, Homo sapien
aggcagactcaactcaggtgtgtcc

SEQ ID NO: 14929 - DNA, 25 bp, Homo sapien
cacaaagctcatgccaatgagaggc

SEQ ID NO: 14930 - DNA, 25 bp, Homo sapien
agactggggttcctgttctcacagc

SEQ ID NO: 14931 - DNA, 25 bp, Homo sapien
aggggattcacgcatctgcttcgtt

SEQ ID NO: 14932 - DNA, 25 bp, Homo sapien
atagtggttctgtactgggattagc

SEQ ID NO: 14933 - DNA, 25 bp, Homo sapien
agttgggttatgcattcaagcaatt

SEQ ID NO: 14934 - DNA, 25 bp, Homo sapien
agaatcttattaaaggacgcaggaa

SEQ ID NO: 14935 - DNA, 25 bp, Homo sapien
aggttgccaagtatgtatttgccac

SEQ ID NO: 14936 - DNA, 25 bp, Homo sapien
atctcagctgccgactcacctctgg

SEQ ID NO: 14937 - DNA, 25 bp, Homo sapien
tcactctgatagatgtcacaggagc

SEQ ID NO: 14938 - DNA, 25 bp, Homo sapien
ccttgagagcccaacacacaggtgt

SEQ ID NO: 14939 - DNA, 25 bp, Homo sapien
aacccaggtctcagagtgctaatga

SEQ ID NO: 14940 - DNA, 25 bp, Homo sapien
cctcaaagttgggttatgcattcaa

SEQ ID NO: 14941 - DNA, 25 bp, Homo sapien
tgccaagtatgtatttgccaccaac

SEQ ID NO: 14942 - DNA, 25 bp, Homo sapien
gtgctaatgatctatttggacaaat

SEQ ID NO: 14943 - DNA, 25 bp, Homo sapien
acacacaggtgtgcctcagcagctc

SEQ ID NO: 14944 - DNA, 25 bp, Homo sapien
tttttaggagagacaattcttgttc

SEQ ID NO: 14945 - DNA, 25 bp, Homo sapien
catagaagggatagaagagctgata

SEQ ID NO: 14946 - DNA, 25 bp, Homo sapien
agccggtacagtcacatgatccaga

SEQ ID NO: 14947 - DNA, 25 bp, Homo sapien
aataagcgttatgaaggaagagtac

SEQ ID NO: 14948 - DNA, 25 bp, Homo sapien
cacatgatccagagactggtgagaa

SEQ ID NO: 14949 - DNA, 25 bp, Homo sapien
aggaagagtacaaggacacatgaga

SEQ ID NO: 14950 - DNA, 25 bp, Homo sapien
tttaaaacgaagagcgcatagaagg

SEQ ID NO: 14951 - DNA, 25 bp, Homo sapien
ccagatcatccaggtggcagggctt

SEQ ID NO: 14952 - DNA, 25 bp, Homo sapien
gatagaagtgatgatcccaagccaa

SEQ ID NO: 14953 - DNA, 25 bp, Homo sapien
aaggaagcagcatatgcaaagacta

SEQ ID NO: 14954 - DNA, 25 bp, Homo sapien
ttgcagatcctgtgactagcgtggt

SEQ ID NO: 14955 - DNA, 25 bp, Homo sapien
aatcaactagtaaactgcagggtct

SEQ ID NO: 14956 - DNA, 25 bp, Homo sapien
gaaacaagagcccatctgatggcac

SEQ ID NO: 14957 - DNA, 25 bp, Homo sapien
gatggcacccatatggcccactatg

SEQ ID NO: 14958 - DNA, 25 bp, Homo sapien
aaagcaggaaagaggtctaacagaa

SEQ ID NO: 14959 - DNA, 25 bp, Homo sapien
aaaccagctggttcactagaggaca

SEQ ID NO: 14960 - DNA, 25 bp, Homo sapien
agcaagacactctcagaaaagcacc

SEQ ID NO: 14961 - DNA, 25 bp, Homo sapien
tctaacagaacaggtcacagagaaa

SEQ ID NO: 14962 - DNA, 25 bp, Homo sapien
ttcaaggctttggattcacagactt

SEQ ID NO: 14963 - DNA, 25 bp, Homo sapien
cttcggtagtctggctcctaggtcc

SEQ ID NO: 14964 - DNA, 25 bp, Homo sapien
acagaaccagctggcatatgacatc

SEQ ID NO: 14965 - DNA, 25 bp, Homo sapien
ttcactagaggacagataaacaacc

SEQ ID NO: 14966 - DNA, 25 bp, Homo sapien
gaacagcctaacacagattgataaa

SEQ ID NO: 14967 - DNA, 25 bp, Homo sapien
atggactcctggtatattggtgaaa

SEQ ID NO: 14968 - DNA, 25 bp, Homo sapien
gttacagaaatcctcatggactcct

SEQ ID NO: 14969 - DNA, 25 bp, Homo sapien
tcaaaaggctgattataccaagtgt

SEQ ID NO: 14970 - DNA, 25 bp, Homo sapien
atccaaatggtagaactttccctgt

SEQ ID NO: 14971 - DNA, 25 bp, Homo sapien
cagaaaatacaattgaacaggaaat

SEQ ID NO: 14972 - DNA, 25 bp, Homo sapien
gattgataaagtggactacattaca

SEQ ID NO: 14973 - DNA, 25 bp, Homo sapien
acatctgtcagaacggctaaaattc

SEQ ID NO: 14974 - DNA, 25 bp, Homo sapien
aaaacatatgaagttgtgctccacc

SEQ ID NO: 14975 - DNA, 25 bp, Homo sapien
tagggtcacaaacatgagctgctgt

SEQ ID NO: 14976 - DNA, 25 bp, Homo sapien
ttggtgagaatttgagttacagaaa

SEQ ID NO: 14977 - DNA, 25 bp, Homo sapien
ttgaagagagcaagaacgcatccag

SEQ ID NO: 14978 - DNA, 25 bp, Homo sapien
actgggcaggagagcgttctaccca

SEQ ID NO: 14979 - DNA, 25 bp, Homo sapien
ctgcaacatggtagagaaagacact

SEQ ID NO: 14980 - DNA, 25 bp, Homo sapien
aaagacactgttcttgaagagagca

SEQ ID NO: 14981 - DNA, 25 bp, Homo sapien
gcatgcctacaaggtagcaggcact

SEQ ID NO: 14982 - DNA, 25 bp, Homo sapien
tccgtacatgcaaagcagctgtgct

SEQ ID NO: 14983 - DNA, 25 bp, Homo sapien
tcagaaaccaaaagaggaatgacaa

SEQ ID NO: 14984 - DNA, 25 bp, Homo sapien
ggagtgcaatgaagccttgtattat

SEQ ID NO: 14985 - DNA, 25 bp, Homo sapien
aggaatgacaaattgctgagggcaa

SEQ ID NO: 14986 - DNA, 25 bp, Homo sapien
taagatgtatttgttgcatgcctac

SEQ ID NO: 14987 - DNA, 25 bp, Homo sapien
gagattacagacaagaacatgccac

SEQ ID NO: 14988 - DNA, 25 bp, Homo sapien
tcctcagagatggataggagttcct

SEQ ID NO: 14989 - DNA, 25 bp, Homo sapien
cgaacatagtatgtggagcagcttc

SEQ ID NO: 14990 - DNA, 25 bp, Homo sapien
acattcgggaaacaggtaaaaatga

SEQ ID NO: 14991 - DNA, 25 bp, Homo sapien
attgcgatgccacgcgaacatagta

SEQ ID NO: 14992 - DNA, 25 bp, Homo sapien
ctgccttcaagaagcgggcaggttt

SEQ ID NO: 14993 - DNA, 25 bp, Homo sapien
ttttgtaatgcagcgtcatcagcgc

SEQ ID NO: 14994 - DNA, 25 bp, Homo sapien
acaccaaagaaaatagtgcgcagag

SEQ ID NO: 14995 - DNA, 25 bp, Homo sapien
catcagcgctgtcgggcattgcgat

SEQ ID NO: 14996 - DNA, 25 bp, Homo sapien
agagacacagacagtcctgggtagt

SEQ ID NO: 14997 - DNA, 25 bp, Homo sapien
gaggaaaggacattccttggagatc

SEQ ID NO: 14998 - DNA, 25 bp, Homo sapien
tcgtgtgcaagggaatggaacattc

SEQ ID NO: 14999 - DNA, 25 bp, Homo sapien
ttgagtaggctacactgagtgacat

SEQ ID NO: 15000 - DNA, 25 bp, Homo sapien
cacacagctagtaaacaaccaggat

SEQ ID NO: 15001 - DNA, 25 bp, Homo sapien
tccatgtaggttcttttgagtaggc

SEQ ID NO: 15002 - DNA, 25 bp, Homo sapien
tcctactttataggtggggacatag

SEQ ID NO: 15003 - DNA, 25 bp, Homo sapien
aaaagagtgtgttgctttctcctcc

SEQ ID NO: 15004 - DNA, 25 bp, Homo sapien
gagtgacatctgagaacaattttct

SEQ ID NO: 15005 - DNA, 25 bp, Homo sapien
ttaggaaaaagagaccttgagtcgc

SEQ ID NO: 15006 - DNA, 25 bp, Homo sapien
cttgagtcgctgtctcgtgagtttc

SEQ ID NO: 15007 - DNA, 25 bp, Homo sapien
acgatgtcctcggatccaagattca

SEQ ID NO: 15008 - DNA, 25 bp, Homo sapien
agattcaaatcctcccagtccatgg

SEQ ID NO: 15009 - DNA, 25 bp, Homo sapien
aacaaccaggatttctacgatgtcc

SEQ ID NO: 15010 - DNA, 25 bp, Homo sapien
catggatgaacctcacagtcgtggc

SEQ ID NO: 15011 - DNA, 25 bp, Homo sapien
gtacagactgcatgactccatttac

SEQ ID NO: 15012 - DNA, 25 bp, Homo sapien
ctagaataggcaaaacggactgagg

SEQ ID NO: 15013 - DNA, 25 bp, Homo sapien
aacctcacagtcgtggcactgagtg

SEQ ID NO: 15014 - DNA, 25 bp, Homo sapien
ctgacaggcctatccaggacggggc

SEQ ID NO: 15015 - DNA, 25 bp, Homo sapien
gcagaaatgatgcagagacatggat

SEQ ID NO: 15016 - DNA, 25 bp, Homo sapien
tgagggtaaaaaccagagcagaaca

SEQ ID NO: 15017 - DNA, 25 bp, Homo sapien
gcactgagtggaagaagacttttgc

SEQ ID NO: 15018 - DNA, 25 bp, Homo sapien
agacttttgcgagagtacagactgc

SEQ ID NO: 15019 - DNA, 25 bp, Homo sapien
ataggcaaaacggactgagggtaaa

SEQ ID NO: 15020 - DNA, 25 bp, Homo sapien
atgatgcagagacatggatgaacct

SEQ ID NO: 15021 - DNA, 25 bp, Homo sapien
acaaggaaactgagtacaaagtgat

SEQ ID NO: 15022 - DNA, 25 bp, Homo sapien
atatgtgctggaccctcttgtaaga

SEQ ID NO: 15023 - DNA, 25 bp, Homo sapien
aagagcttcatacaaattaggcaga

SEQ ID NO: 15024 - DNA, 25 bp, Homo sapien
ctgtgtacaagttaaacccgtggtc

SEQ ID NO: 15025 - DNA, 25 bp, Homo sapien
tagcaagactattaaacaggaatac

SEQ ID NO: 15026 - DNA, 25 bp, Homo sapien
tgttggtgtcacttgttggaattcc

SEQ ID NO: 15027 - DNA, 25 bp, Homo sapien
tgtttatgacaagaggtggtccctt

SEQ ID NO: 15028 - DNA, 25 bp, Homo sapien
aggctctgggaacagtcccgttcat

SEQ ID NO: 15029 - DNA, 25 bp, Homo sapien
tgccagcatcggtcagcctaccttt

SEQ ID NO: 15030 - DNA, 25 bp, Homo sapien
ccaaagtttgggaacaatgcctttc

SEQ ID NO: 15031 - DNA, 25 bp, Homo sapien
agcttgtgcacaggggccaaagttt

SEQ ID NO: 15032 - DNA, 25 bp, Homo sapien
ttgtcttgtgatcacaatagataac

SEQ ID NO: 15033 - DNA, 25 bp, Homo sapien
tatctgttatatattagctgtttcc

SEQ ID NO: 15034 - DNA, 25 bp, Homo sapien
attttgaaagctacgtcttctacgt

SEQ ID NO: 15035 - DNA, 25 bp, Homo sapien
catctattataaataacacaggttc

SEQ ID NO: 15036 - DNA, 25 bp, Homo sapien
cgtcttctacgttctggatgtttaa

SEQ ID NO: 15037 - DNA, 25 bp, Homo sapien
ttgttgccttttgttaaattggtca

SEQ ID NO: 15038 - DNA, 25 bp, Homo sapien
ctacgttctggatgtttaaaataaa

SEQ ID NO: 15039 - DNA, 25 bp, Homo sapien
cttgtgatcacaatagataacttta

SEQ ID NO: 15040 - DNA, 25 bp, Homo sapien
aagctacgtcttctacgttctggat

SEQ ID NO: 15041 - DNA, 25 bp, Homo sapien
taaataacacaggttcttgtcttgt

SEQ ID NO: 15042 - DNA, 25 bp, Homo sapien
gtattttgaaagctacgtcttctac

SEQ ID NO: 15043 - DNA, 25 bp, Homo sapien
gcccgacgtcgcctaccaaagtgct

SEQ ID NO: 15044 - DNA, 25 bp, Homo sapien
ggtgtaagccactgtccctggcttt

SEQ ID NO: 15045 - DNA, 25 bp, Homo sapien
ttgttgttttagtagagagtttcac

SEQ ID NO: 15046 - DNA, 25 bp, Homo sapien
ctcatgatctgcccgacgtcgccta

SEQ ID NO: 15047 - DNA, 25 bp, Homo sapien
ctaggaatacgggtgcaccaccatg

SEQ ID NO: 15048 - DNA, 25 bp, Homo sapien
agtagctaggaatacgggtgcacca

SEQ ID NO: 15049 - DNA, 25 bp, Homo sapien
cactgtccctggcttttttctttct

SEQ ID NO: 15050 - DNA, 25 bp, Homo sapien
atctgcccgacgtcgcctaccaaag

SEQ ID NO: 15051 - DNA, 25 bp, Homo sapien
gatctgcccgacgtcgcctaccaaa

SEQ ID NO: 15052 - DNA, 25 bp, Homo sapien
atgatctgcccgacgtcgcctacca

SEQ ID NO: 15053 - DNA, 25 bp, Homo sapien
ctgcgtccagcccatattctattta

SEQ ID NO: 15054 - DNA, 25 bp, Homo sapien
catctcttgtaaggggtggtctgta

SEQ ID NO: 15055 - DNA, 25 bp, Homo sapien
ttcaaccactaatgagctgggcgac

SEQ ID NO: 15056 - DNA, 25 bp, Homo sapien
actgctgcagtgacaaccttgaaca

SEQ ID NO: 15057 - DNA, 25 bp, Homo sapien
attatatgtgtcaagggccaagcac

SEQ ID NO: 15058 - DNA, 25 bp, Homo sapien
cctaggaaaaggtatcctgactctc

SEQ ID NO: 15059 - DNA, 25 bp, Homo sapien
ctggccctcaaaagagctttggctt

SEQ ID NO: 15060 - DNA, 25 bp, Homo sapien
taaaagcacagccatcggtatcatc

SEQ ID NO: 15061 - DNA, 25 bp, Homo sapien
ctgtgcaatcctggccgagtaattt

SEQ ID NO: 15062 - DNA, 25 bp, Homo sapien
cacttatagtcgttgggaggactga

SEQ ID NO: 15063 - DNA, 25 bp, Homo sapien
gaggaaaccacaaaactgctgcagt

SEQ ID NO: 15064 - DNA, 25 bp, Homo sapien
aatctgctgtgaggattccgtgaaa

SEQ ID NO: 15065 - DNA, 25 bp, Homo sapien
ctctaggggagggtcagtcccatgc

SEQ ID NO: 15066 - DNA, 25 bp, Homo sapien
tcttccttgcttctcataaggacac

SEQ ID NO: 15067 - DNA, 25 bp, Homo sapien
gggagggtcagtcccatgcctttct

SEQ ID NO: 15068 - DNA, 25 bp, Homo sapien
atgttctccttatgtctcttccttg

SEQ ID NO: 15069 - DNA, 25 bp, Homo sapien
aggctctttctgatggctctagggg

SEQ ID NO: 15070 - DNA, 25 bp, Homo sapien
caatctctgtctcaattgtcacacc

SEQ ID NO: 15071 - DNA, 25 bp, Homo sapien
ccgccagggtcaggctctttctgat

SEQ ID NO: 15072 - DNA, 25 bp, Homo sapien
gggtcagtcccatgcctttctctta

SEQ ID NO: 15073 - DNA, 25 bp, Homo sapien
tgccgccagggtcaggctctttctg

SEQ ID NO: 15074 - DNA, 25 bp, Homo sapien
attgtcacaccatgttctccttatg

SEQ ID NO: 15075 - DNA, 25 bp, Homo sapien
ggctcacggcccttgacatttcttg

SEQ ID NO: 15076 - DNA, 25 bp, Homo sapien
tgctcctagtctggtaggcacgtct

SEQ ID NO: 15077 - DNA, 25 bp, Homo sapien
tcctttgtagatgacggcacagttc

SEQ ID NO: 15078 - DNA, 25 bp, Homo sapien
tttctgattttcaggcacggaggga

SEQ ID NO: 15079 - DNA, 25 bp, Homo sapien
tgccacgtctccagaatctatcttg

SEQ ID NO: 15080 - DNA, 25 bp, Homo sapien
taggcacgtctgtcctgccacgtct

SEQ ID NO: 15081 - DNA, 25 bp, Homo sapien
ctctttagcagggtggattagtttc

SEQ ID NO: 15082 - DNA, 25 bp, Homo sapien
aacaaggcatgacgctgtcctgaaa

SEQ ID NO: 15083 - DNA, 25 bp, Homo sapien
gactcttcggaatatctcagccttt

SEQ ID NO: 15084 - DNA, 25 bp, Homo sapien
tgacggcacagttcattatgactct

SEQ ID NO: 15085 - DNA, 25 bp, Homo sapien
tcttgagttgttgcagtgctgcact

SEQ ID NO: 15086 - DNA, 25 bp, Homo sapien
atgacgctgtcctgaaagtgctcct

SEQ ID NO: 15087 - DNA, 25 bp, Homo sapien
ccgcacctggctagaacttgtggtt

SEQ ID NO: 15088 - DNA, 25 bp, Homo sapien
tagacttgaactgtagtatgcatgc

SEQ ID NO: 15089 - DNA, 25 bp, Homo sapien
attctcatcccataatgtagtggaa

SEQ ID NO: 15090 - DNA, 25 bp, Homo sapien
agtatagccttgatctcgtgggctc

SEQ ID NO: 15091 - DNA, 25 bp, Homo sapien
atcacagcttagtatagccttgatc

SEQ ID NO: 15092 - DNA, 25 bp, Homo sapien
ttaatcagaaaaacaggcatgttat

SEQ ID NO: 15093 - DNA, 25 bp, Homo sapien
ttgaagtaagaccaaaacagagctt

SEQ ID NO: 15094 - DNA, 25 bp, Homo sapien
tatgcatgcttttggtaattctaac

SEQ ID NO: 15095 - DNA, 25 bp, Homo sapien
taattgaaaaatacgctcattgttt

SEQ ID NO: 15096 - DNA, 25 bp, Homo sapien
attctaactgaaatctcctgcatac

SEQ ID NO: 15097 - DNA, 25 bp, Homo sapien
aaacaggcatgttatagaaaactta

SEQ ID NO: 15098 - DNA, 25 bp, Homo sapien
ttatttttgtagagtaagcatctca

SEQ ID NO: 15099 - DNA, 25 bp, Homo sapien
aaagactaaagcaaacctgtatttc

SEQ ID NO: 15100 - DNA, 25 bp, Homo sapien
tgcactcagcctaactttaaaaatc

SEQ ID NO: 15101 - DNA, 25 bp, Homo sapien
tatgtgtcaatagcctcagagttgc

SEQ ID NO: 15102 - DNA, 25 bp, Homo sapien
cagagttgcatatcaaatgaagcat

SEQ ID NO: 15103 - DNA, 25 bp, Homo sapien
aacaaaaaccctagccttgcaggaa

SEQ ID NO: 15104 - DNA, 25 bp, Homo sapien
gagaaaaggatattgccaagttaac

SEQ ID NO: 15105 - DNA, 25 bp, Homo sapien
atccagatcctataagctccagctc

SEQ ID NO: 15106 - DNA, 25 bp, Homo sapien
aaaaatcagagaaaaggatattgcc

SEQ ID NO: 15107 - DNA, 25 bp, Homo sapien
ttggaaaatatgtgtcaatagcctc

SEQ ID NO: 15108 - DNA, 25 bp, Homo sapien
tcactatcttaaccaggctggtatt

SEQ ID NO: 15109 - DNA, 25 bp, Homo sapien
agtgtggtggctgaatcctatattc

SEQ ID NO: 15110 - DNA, 25 bp, Homo sapien
ttacttcagtttatggccgagaccc

SEQ ID NO: 15111 - DNA, 25 bp, Homo sapien
gctgagccaaatgccttaattcact

SEQ ID NO: 15112 - DNA, 25 bp, Homo sapien
taattcactacaggtctcttagctt

SEQ ID NO: 15113 - DNA, 25 bp, Homo sapien
tcgatcgtttcgtgattggaatgtt

SEQ ID NO: 15114 - DNA, 25 bp, Homo sapien
ttccctgattaaaaatgtggtgtac

SEQ ID NO: 15115 - DNA, 25 bp, Homo sapien
ttctaagtgtggtggctgaatccta

SEQ ID NO: 15116 - DNA, 25 bp, Homo sapien
atggccgagacccacagttatcctt

SEQ ID NO: 15117 - DNA, 25 bp, Homo sapien
gttacaaattgcaccacagtttcac

SEQ ID NO: 15118 - DNA, 25 bp, Homo sapien
tgattggaatgtttggctgagccaa

SEQ ID NO: 15119 - DNA, 25 bp, Homo sapien
aaaaatgtggtgtacatcctgttac

SEQ ID NO: 15120 - DNA, 25 bp, Homo sapien
actcatagaggaaaagtgctcgtag

SEQ ID NO: 15121 - DNA, 25 bp, Homo sapien
gagaggcttcaaaaggaaccaacac

SEQ ID NO: 15122 - DNA, 25 bp, Homo sapien
ccagaacggtgagacaatatatttt

SEQ ID NO: 15123 - DNA, 25 bp, Homo sapien
ggttccacaggttgtacaggacgca

SEQ ID NO: 15124 - DNA, 25 bp, Homo sapien
aattggctcctggttccacaggttg

SEQ ID NO: 15125 - DNA, 25 bp, Homo sapien
caggcacgtgctacatggctggagc

SEQ ID NO: 15126 - DNA, 25 bp, Homo sapien
catctacacaccaaggagaggcttc

SEQ ID NO: 15127 - DNA, 25 bp, Homo sapien
tgatgtgaagatatagagagaagat

SEQ ID NO: 15128 - DNA, 25 bp, Homo sapien
agatatagagagaagatggccatct

SEQ ID NO: 15129 - DNA, 25 bp, Homo sapien
gaagacgacatttggacacagacat

SEQ ID NO: 15130 - DNA, 25 bp, Homo sapien
caaaccctatcacaagaagacgaca

SEQ ID NO: 15131 - DNA, 25 bp, Homo sapien
aaagatgtccaaagcattcagcctt

SEQ ID NO: 15132 - DNA, 25 bp, Homo sapien
ctggggtcagcaaattactgcacat

SEQ ID NO: 15133 - DNA, 25 bp, Homo sapien
acctggccttggtgaaatgctttac

SEQ ID NO: 15134 - DNA, 25 bp, Homo sapien
ggtgtgtgaggtttataggtattta

SEQ ID NO: 15135 - DNA, 25 bp, Homo sapien
tgtattgggtaacatcctggggtca

SEQ ID NO: 15136 - DNA, 25 bp, Homo sapien
caagacacgtaagaaacgatgggct

SEQ ID NO: 15137 - DNA, 25 bp, Homo sapien
caagaactcgatacacaagacacgt

SEQ ID NO: 15138 - DNA, 25 bp, Homo sapien
aaaaacaaaagtatgcaacaaggcc

SEQ ID NO: 15139 - DNA, 25 bp, Homo sapien
caacaaggccctacatggtttgcaa

SEQ ID NO: 15140 - DNA, 25 bp, Homo sapien
ttcagccttatgcacaagaagttac

SEQ ID NO: 15141 - DNA, 25 bp, Homo sapien
ttggcagctgaaatagtctcagtgc

SEQ ID NO: 15142 - DNA, 25 bp, Homo sapien
ttggtagagtaattttgggttgtga

SEQ ID NO: 15143 - DNA, 25 bp, Homo sapien
aattttgggttgtgaggtcctgttc

SEQ ID NO: 15144 - DNA, 25 bp, Homo sapien
tgtgaggtcctgttctggcacattt

SEQ ID NO: 15145 - DNA, 25 bp, Homo sapien
cccaatctggtttttgaaggcaaca

SEQ ID NO: 15146 - DNA, 25 bp, Homo sapien
tttgcttaaggtacatctctcattt

SEQ ID NO: 15147 - DNA, 25 bp, Homo sapien
tggataatacgggaaattagctggg

SEQ ID NO: 15148 - DNA, 25 bp, Homo sapien
aaagtctttctacagaacccaggca

SEQ ID NO: 15149 - DNA, 25 bp, Homo sapien
acaagagcaaaacctcgactccaaa

SEQ ID NO: 15150 - DNA, 25 bp, Homo sapien
acagaacccaggcatctttcccttt

SEQ ID NO: 15151 - DNA, 25 bp, Homo sapien
catgatcctgcaggtatgggacatt

SEQ ID NO: 15152 - DNA, 25 bp, Homo sapien
aatgatgggccttatgtttttaata

SEQ ID NO: 15153 - DNA, 25 bp, Homo sapien
cagctaagcttgagcacctgaggac

SEQ ID NO: 15154 - DNA, 25 bp, Homo sapien
ctgggtactcactattccattgcac

SEQ ID NO: 15155 - DNA, 25 bp, Homo sapien
ttccagctaagcttgagcacctgag

SEQ ID NO: 15156 - DNA, 25 bp, Homo sapien
tgggtactcactattccattgcaca

SEQ ID NO: 15157 - DNA, 25 bp, Homo sapien
tcctctgggtactcactattccatt

SEQ ID NO: 15158 - DNA, 25 bp, Homo sapien
gggtactcactattccattgcacag

SEQ ID NO: 15159 - DNA, 25 bp, Homo sapien
ccagctaagcttgagcacctgagga

SEQ ID NO: 15160 - DNA, 25 bp, Homo sapien
tccagctaagcttgagcacctgagg

SEQ ID NO: 15161 - DNA, 25 bp, Homo sapien
cacacgcacatatcctctgggtact

SEQ ID NO: 15162 - DNA, 25 bp, Homo sapien
attccattgcacagcaacctgaagg

SEQ ID NO: 15163 - DNA, 25 bp, Homo sapien
ctctgggtactcactattccattgc

SEQ ID NO: 15164 - DNA, 25 bp, Homo sapien
cagttctgcatcatcgcccaaggtt

SEQ ID NO: 15165 - DNA, 25 bp, Homo sapien
attttcctgacaacctgaaggtgat

SEQ ID NO: 15166 - DNA, 25 bp, Homo sapien
aaacacgattgacctaacctgagcc

SEQ ID NO: 15167 - DNA, 25 bp, Homo sapien
tgagggtagcaaatgaagacattca

SEQ ID NO: 15168 - DNA, 25 bp, Homo sapien
gtgtgggcatgattcataggcattt

SEQ ID NO: 15169 - DNA, 25 bp, Homo sapien
agttagtgataaacagttctgcatc

SEQ ID NO: 15170 - DNA, 25 bp, Homo sapien
tagagtaggctgtaaagtgctatcc

SEQ ID NO: 15171 - DNA, 25 bp, Homo sapien
caagccaaaaaccttgcactggaat

SEQ ID NO: 15172 - DNA, 25 bp, Homo sapien
cagctgtccatagtgttatgtgctc

SEQ ID NO: 15173 - DNA, 25 bp, Homo sapien
gaaggtgattcttgggatctcattc

SEQ ID NO: 15174 - DNA, 25 bp, Homo sapien
cccagaaggccaccgtggtgctaga

SEQ ID NO: 15175 - DNA, 25 bp, Homo sapien
gaaaatatgttcatgggaagatcac

SEQ ID NO: 15176 - DNA, 25 bp, Homo sapien
cattttggcattgatgtgtgtagtt

SEQ ID NO: 15177 - DNA, 25 bp, Homo sapien
aaatatgttcatgggaagatcactt

SEQ ID NO: 15178 - DNA, 25 bp, Homo sapien
ctgaaaatatgttcatgggaagatc

SEQ ID NO: 15179 - DNA, 25 bp, Homo sapien
tatgttcatgggaagatcacttttc

SEQ ID NO: 15180 - DNA, 25 bp, Homo sapien
ttttggcattgatgtgtgtagttcc

SEQ ID NO: 15181 - DNA, 25 bp, Homo sapien
ttgatgtgtgtagttcctaatactt

SEQ ID NO: 15182 - DNA, 25 bp, Homo sapien
ttggcattgatgtgtgtagttccta

SEQ ID NO: 15183 - DNA, 25 bp, Homo sapien
catacccaactttaaactgaaactc

SEQ ID NO: 15184 - DNA, 25 bp, Homo sapien
ccaccatacccaactttaaactgaa

SEQ ID NO: 15185 - DNA, 25 bp, Homo sapien
gttcatgggaagatcacttttcaaa

SEQ ID NO: 15186 - DNA, 25 bp, Homo sapien
tctaatagcaaagtggaaaggtagg

SEQ ID NO: 15187 - DNA, 25 bp, Homo sapien
tttacagaggctgacctgataactc

SEQ ID NO: 15188 - DNA, 25 bp, Homo sapien
tggagtcagggtataatcagaaact

SEQ ID NO: 15189 - DNA, 25 bp, Homo sapien
agccaccgtgcatgaccaaaagtcc

SEQ ID NO: 15190 - DNA, 25 bp, Homo sapien
atattacatagctcgtcagtggtgg

SEQ ID NO: 15191 - DNA, 25 bp, Homo sapien
tctcataggcagtgaagagccatca

SEQ ID NO: 15192 - DNA, 25 bp, Homo sapien
cacaacacattaggaaggaagggaa

SEQ ID NO: 15193 - DNA, 25 bp, Homo sapien
aaaggtaggctgtgaacaatcttga

SEQ ID NO: 15194 - DNA, 25 bp, Homo sapien
ttgaatgccatactaagatttgtac

SEQ ID NO: 15195 - DNA, 25 bp, Homo sapien
actctggcggttcaatgtgcatgct

SEQ ID NO: 15196 - DNA, 25 bp, Homo sapien
cagcgctcagagaaatcaaatcact

SEQ ID NO: 15197 - DNA, 25 bp, Homo sapien
ttcctatggcctcaggtcaaataat

SEQ ID NO: 15198 - DNA, 25 bp, Homo sapien
atttgccttggggaatattgctcac

SEQ ID NO: 15199 - DNA, 25 bp, Homo sapien
taattccaagagaatcaacctctga

SEQ ID NO: 15200 - DNA, 25 bp, Homo sapien
cacctaccagaaagctaacagcaat

SEQ ID NO: 15201 - DNA, 25 bp, Homo sapien
gaatattgctcactggggtcctcat

SEQ ID NO: 15202 - DNA, 25 bp, Homo sapien
aggctggcatgtcaaacgtgacttt

SEQ ID NO: 15203 - DNA, 25 bp, Homo sapien
ttgattatggtgttccacgaggctc

SEQ ID NO: 15204 - DNA, 25 bp, Homo sapien
tggggtcctcatgcatcagtttaga

SEQ ID NO: 15205 - DNA, 25 bp, Homo sapien
ttccacgaggctcacacgggtatcc

SEQ ID NO: 15206 - DNA, 25 bp, Homo sapien
atggctgttcccttgaaatgctggt

SEQ ID NO: 15207 - DNA, 25 bp, Homo sapien
acacgggtatccaatgtccagctcc

SEQ ID NO: 15208 - DNA, 25 bp, Homo sapien
attcttagttctggggccatacgaa

SEQ ID NO: 15209 - DNA, 25 bp, Homo sapien
atacatttgcaagacacgtaattct

SEQ ID NO: 15210 - DNA, 25 bp, Homo sapien
tctggggccatacgaaacaagctgt

SEQ ID NO: 15211 - DNA, 25 bp, Homo sapien
aaagcattcttagttctggggccat

SEQ ID NO: 15212 - DNA, 25 bp, Homo sapien
tagttctggggccatacgaaacaag

SEQ ID NO: 15213 - DNA, 25 bp, Homo sapien
gacacgtaattcttcaaacacatat

SEQ ID NO: 15214 - DNA, 25 bp, Homo sapien
aagcgaaaagcattcttagttctgg

SEQ ID NO: 15215 - DNA, 25 bp, Homo sapien
gttctggggccatacgaaacaagct

SEQ ID NO: 15216 - DNA, 25 bp, Homo sapien
agcattcttagttctggggccatac

SEQ ID NO: 15217 - DNA, 25 bp, Homo sapien
gaaaagcattcttagttctggggcc

SEQ ID NO: 15218 - DNA, 25 bp, Homo sapien
acatttgcaagacacgtaattcttc

SEQ ID NO: 15219 - DNA, 25 bp, Homo sapien
aacaggtaatgatctttaaggagac

SEQ ID NO: 15220 - DNA, 25 bp, Homo sapien
ctgcaggaaagagacctttagaagg

SEQ ID NO: 15221 - DNA, 25 bp, Homo sapien
ctgtaccagctgaagaacaggtaat

SEQ ID NO: 15222 - DNA, 25 bp, Homo sapien
ctttagaaaatatagctgtaccagc

SEQ ID NO: 15223 - DNA, 25 bp, Homo sapien
taaggagacagaacactcctacaag

SEQ ID NO: 15224 - DNA, 25 bp, Homo sapien
cgctttaaaaaagcgaaaagcattc

SEQ ID NO: 15225 - DNA, 25 bp, Homo sapien
aaggaacctgtatcgctgcaggaaa

SEQ ID NO: 15226 - DNA, 25 bp, Homo sapien
tgttatggtagcatttctgacaagt

SEQ ID NO: 15227 - DNA, 25 bp, Homo sapien
attggacccgtagtaggggacagca

SEQ ID NO: 15228 - DNA, 25 bp, Homo sapien
gtgagcaggtaagtctctgagattt

SEQ ID NO: 15229 - DNA, 25 bp, Homo sapien
ggaaagagaccaaggaacctgtatc

SEQ ID NO: 15230 - DNA, 25 bp, Homo sapien
aagctgtgcatgtagctgtggattc

SEQ ID NO: 15231 - DNA, 25 bp, Homo sapien
tgatacctaactgtaaaaagtgacc

SEQ ID NO: 15232 - DNA, 25 bp, Homo sapien
ctatcatgggaaaatagaaatgaga

SEQ ID NO: 15233 - DNA, 25 bp, Homo sapien
aatgtttcctgttgggtatttagtc

SEQ ID NO: 15234 - DNA, 25 bp, Homo sapien
tagtctctctagtgatacctaactg

SEQ ID NO: 15235 - DNA, 25 bp, Homo sapien
ctgtggattcagagggacttgaact

SEQ ID NO: 15236 - DNA, 25 bp, Homo sapien
ctaactgtaaaaagtgaccaggggc

SEQ ID NO: 15237 - DNA, 25 bp, Homo sapien
attgctctgaagctgtgcatgtagc

SEQ ID NO: 15238 - DNA, 25 bp, Homo sapien
ttcagagggacttgaactgttgcct

SEQ ID NO: 15239 - DNA, 25 bp, Homo sapien
tgtattgctctgaagctgtgcatgt

SEQ ID NO: 15240 - DNA, 25 bp, Homo sapien
tcggtatctatcatgggaaaataga

SEQ ID NO: 15241 - DNA, 25 bp, Homo sapien
tgactagactgtgcaggggccatca

SEQ ID NO: 15242 - DNA, 25 bp, Homo sapien
agatgggcagttagtcattactttc

SEQ ID NO: 15243 - DNA, 25 bp, Homo sapien
tcaatgccttgtgactagactgtgc

SEQ ID NO: 15244 - DNA, 25 bp, Homo sapien
tgttcccaaagctgcgggtctgtgt

SEQ ID NO: 15245 - DNA, 25 bp, Homo sapien
aggcagaggctacagcgaaccaaca

SEQ ID NO: 15246 - DNA, 25 bp, Homo sapien
gcagaggctacagcgaaccaacatc

SEQ ID NO: 15247 - DNA, 25 bp, Homo sapien
aatcatgcacagtctcagatgggca

SEQ ID NO: 15248 - DNA, 25 bp, Homo sapien
tcagatgggcagttagtcattactt

SEQ ID NO: 15249 - DNA, 25 bp, Homo sapien
ggggccatcagcctgttcccaaagc

SEQ ID NO: 15250 - DNA, 25 bp, Homo sapien
attcttgtgaatcatgcacagtctc

SEQ ID NO: 15251 - DNA, 25 bp, Homo sapien
agcctgttcccaaagctgcgggtct

SEQ ID NO: 15252 - DNA, 25 bp, Homo sapien
ttattaaaagtgagtgtgaaaataa

SEQ ID NO: 15253 - DNA, 25 bp, Homo sapien
aatattggctgtgtttctttctctg

SEQ ID NO: 15254 - DNA, 25 bp, Homo sapien
ctcagtacaaattaacgattaatat

SEQ ID NO: 15255 - DNA, 25 bp, Homo sapien
acgggaatgcccttttataacacat

SEQ ID NO: 15256 - DNA, 25 bp, Homo sapien
tgtgctttaagacgggaatgccctt

SEQ ID NO: 15257 - DNA, 25 bp, Homo sapien
tattgttatactaaggagtgttatc

SEQ ID NO: 15258 - DNA, 25 bp, Homo sapien
cactagtatgtgctttaagacggga

SEQ ID NO: 15259 - DNA, 25 bp, Homo sapien
agtatgtgctttaagacgggaatgc

SEQ ID NO: 15260 - DNA, 25 bp, Homo sapien
aacgattaatatgatatgtatatgc

SEQ ID NO: 15261 - DNA, 25 bp, Homo sapien
taaggagtgttatctctggagacac

SEQ ID NO: 15262 - DNA, 25 bp, Homo sapien
actaaggagtgttatctctggagac

SEQ ID NO: 15263 - DNA, 25 bp, Homo sapien
acatagggaaagaaagctcagctca

SEQ ID NO: 15264 - DNA, 25 bp, Homo sapien
gtcttgagacaagaagatagggctg

SEQ ID NO: 15265 - DNA, 25 bp, Homo sapien
gagcctaaagccacatctgatgacc

SEQ ID NO: 15266 - DNA, 25 bp, Homo sapien
ctggcacaagcagccaccaggtgaa

SEQ ID NO: 15267 - DNA, 25 bp, Homo sapien
ggaatgctctggtccaatgctccca

SEQ ID NO: 15268 - DNA, 25 bp, Homo sapien
cctgcggacaccaaccgagggcaga

SEQ ID NO: 15269 - DNA, 25 bp, Homo sapien
catgggcctcggaatgctctggtcc

SEQ ID NO: 15270 - DNA, 25 bp, Homo sapien
gtcactcagggctggcatgggcctc

SEQ ID NO: 15271 - DNA, 25 bp, Homo sapien
caaactccatggaactgagaaaagg

SEQ ID NO: 15272 - DNA, 25 bp, Homo sapien
gggctggcttcccttggttcccgca

SEQ ID NO: 15273 - DNA, 25 bp, Homo sapien
ctgccagacaataagtaagggaatg

SEQ ID NO: 15274 - DNA, 25 bp, Homo sapien
ccttaaagtgtatgtgactagcaac

SEQ ID NO: 15275 - DNA, 25 bp, Homo sapien
agttatcagggataggccggccaca

SEQ ID NO: 15276 - DNA, 25 bp, Homo sapien
ttggagatttcaacatattgctatc

SEQ ID NO: 15277 - DNA, 25 bp, Homo sapien
atcaaaatatgtgaggtaaaaactg

SEQ ID NO: 15278 - DNA, 25 bp, Homo sapien
cagggataaagagaagcattatgta

SEQ ID NO: 15279 - DNA, 25 bp, Homo sapien
ttctccaagaagacataacagtcct

SEQ ID NO: 15280 - DNA, 25 bp, Homo sapien
ttcaatgaaggaaaagttatcaggg

SEQ ID NO: 15281 - DNA, 25 bp, Homo sapien
tatcagaaataaacagatccagcac

SEQ ID NO: 15282 - DNA, 25 bp, Homo sapien
tgaggtaaaaactgatagaactgca

SEQ ID NO: 15283 - DNA, 25 bp, Homo sapien
gaagacaaggcaggtgagtcacttg

SEQ ID NO: 15284 - DNA, 25 bp, Homo sapien
gtaatgagccatgagctgtgattgc

SEQ ID NO: 15285 - DNA, 25 bp, Homo sapien
ctacctaagaggtctaggaagtcat

SEQ ID NO: 15286 - DNA, 25 bp, Homo sapien
tggagcattttggatctcagaactt

SEQ ID NO: 15287 - DNA, 25 bp, Homo sapien
ataagagacaatttacaacttgctc

SEQ ID NO: 15288 - DNA, 25 bp, Homo sapien
tttgaccctatatgttgtgatttac

SEQ ID NO: 15289 - DNA, 25 bp, Homo sapien
gcattaggaattgaggactaagtct

SEQ ID NO: 15290 - DNA, 25 bp, Homo sapien
ttaagtccgataagagacaatttac

SEQ ID NO: 15291 - DNA, 25 bp, Homo sapien
tccacttgtggcattatgtcggtgc

SEQ ID NO: 15292 - DNA, 25 bp, Homo sapien
tgaggactaagtctgatattctgtc

SEQ ID NO: 15293 - DNA, 25 bp, Homo sapien
aggtctaggaagtcatgccctacaa

SEQ ID NO: 15294 - DNA, 25 bp, Homo sapien
tacccagattcctacctaagaggtc

SEQ ID NO: 15295 - DNA, 25 bp, Homo sapien
attatgtcggtgctaaaaaatgttt

SEQ ID NO: 15296 - DNA, 25 bp, Homo sapien
ccgggacgtgcgagggaccagcacg

SEQ ID NO: 15297 - DNA, 25 bp, Homo sapien
cgtgctggtccctcgcacgtcccgg

SEQ ID NO: 15298 - DNA, 25 bp, Homo sapien
acagatcatgcttcggcatggccag

SEQ ID NO: 15299 - DNA, 25 bp, Homo sapien
ttctcatctgagaaaagcaacagct

SEQ ID NO: 15300 - DNA, 25 bp, Homo sapien
ttttgtgcaatatggccctgagtac

SEQ ID NO: 15301 - DNA, 25 bp, Homo sapien
tggatgttaggtgcgcttcttagcc

SEQ ID NO: 15302 - DNA, 25 bp, Homo sapien
tctgtgttaggtaatgcccaggtcc

SEQ ID NO: 15303 - DNA, 25 bp, Homo sapien
tttgtaatgaaaggaagtattcttc

SEQ ID NO: 15304 - DNA, 25 bp, Homo sapien
atggccctgagtacagaccagtttc

SEQ ID NO: 15305 - DNA, 25 bp, Homo sapien
tgtagaaacggagctcacagatcat

SEQ ID NO: 15306 - DNA, 25 bp, Homo sapien
ttgttgtgaccatacagtgcctctc

SEQ ID NO: 15307 - DNA, 25 bp, Homo sapien
gccgtgagacgtagccttcctaaga

SEQ ID NO: 15308 - DNA, 25 bp, Homo sapien
ttcctaagaggccatcccagcttgt

SEQ ID NO: 15309 - DNA, 25 bp, Homo sapien
gaaaggtaaacacctcgctccaggc

SEQ ID NO: 15310 - DNA, 25 bp, Homo sapien
ccaaaaacgaacaatgggtgtgtgt

SEQ ID NO: 15311 - DNA, 25 bp, Homo sapien
gtgagaaggctcacctgcgcctttc

SEQ ID NO: 15312 - DNA, 25 bp, Homo sapien
tttttctgtattggtgagcttggac

SEQ ID NO: 15313 - DNA, 25 bp, Homo sapien
ggtgtgtgtgagttaaagcgtttaa

SEQ ID NO: 15314 - DNA, 25 bp, Homo sapien
tcgctccaggcagataaacctgcag

SEQ ID NO: 15315 - DNA, 25 bp, Homo sapien
tgccagactgataaatgaaaaatgt

SEQ ID NO: 15316 - DNA, 25 bp, Homo sapien
agataaacctgcagagaccttccca

SEQ ID NO: 15317 - DNA, 25 bp, Homo sapien
aataaccctgtgatgagcctcttga

SEQ ID NO: 15318 - DNA, 25 bp, Homo sapien
taaccagcatcctattgttggactg

SEQ ID NO: 15319 - DNA, 25 bp, Homo sapien
aattgctgtctttgcatggatccac

SEQ ID NO: 15320 - DNA, 25 bp, Homo sapien
aagggggctgttacatttgagaaac

SEQ ID NO: 15321 - DNA, 25 bp, Homo sapien
aggctagaaagatggttcagggccc

SEQ ID NO: 15322 - DNA, 25 bp, Homo sapien
ataagaactagaaggtaaagtatgt

SEQ ID NO: 15323 - DNA, 25 bp, Homo sapien
gggtttttctatatattggccaagc

SEQ ID NO: 15324 - DNA, 25 bp, Homo sapien
aagtaagatttaggctgcgaccaga

SEQ ID NO: 15325 - DNA, 25 bp, Homo sapien
ctagggtggctaatgtacagaaaat

SEQ ID NO: 15326 - DNA, 25 bp, Homo sapien
ctagaaggtaaagtatgtatgtggg

SEQ ID NO: 15327 - DNA, 25 bp, Homo sapien
caaagaaggctagggtggctaatgt

SEQ ID NO: 15328 - DNA, 25 bp, Homo sapien
tatactgccaccacaaagtaagatt

SEQ ID NO: 15329 - DNA, 25 bp, Homo sapien
tgcgaccagaggaatgcataagaac

SEQ ID NO: 15330 - DNA, 25 bp, Homo sapien
caccacaaagtaagatttaggctgc

SEQ ID NO: 15331 - DNA, 25 bp, Homo sapien
ttgcgccagtgccatcagtgtgtct

SEQ ID NO: 15332 - DNA, 25 bp, Homo sapien
gtgcctggcctgagataccttcttt

SEQ ID NO: 15333 - DNA, 25 bp, Homo sapien
ctgcaccacggaagcccacggaggt

SEQ ID NO: 15334 - DNA, 25 bp, Homo sapien
gaatggtcagtgaggtgtcatctgt

SEQ ID NO: 15335 - DNA, 25 bp, Homo sapien
tgcctggttcatgtcaattgcgcca

SEQ ID NO: 15336 - DNA, 25 bp, Homo sapien
tggggagcctgcactctacagacaa

SEQ ID NO: 15337 - DNA, 25 bp, Homo sapien
gattacgggcatgctccctgctaat

SEQ ID NO: 15338 - DNA, 25 bp, Homo sapien
gttcatgtcaattgcgccagtgcca

SEQ ID NO: 15339 - DNA, 25 bp, Homo sapien
agggacagagttgcaggcccatcct

SEQ ID NO: 15340 - DNA, 25 bp, Homo sapien
gtgccatcagtgtgtctgggccctc

SEQ ID NO: 15341 - DNA, 25 bp, Homo sapien
cagtgaggtgtcatctgtgcttctc

SEQ ID NO: 15342 - DNA, 25 bp, Homo sapien
tagtcagtggtgaggctaaggctta

SEQ ID NO: 15343 - DNA, 25 bp, Homo sapien
agtggtgaggctaaggcttacctct

SEQ ID NO: 15344 - DNA, 25 bp, Homo sapien
ctctctgagggtgggagtatgcctc

SEQ ID NO: 15345 - DNA, 25 bp, Homo sapien
atccctccttagtgagtcagtagtc

SEQ ID NO: 15346 - DNA, 25 bp, Homo sapien
aagcacctactaatggatagggctc

SEQ ID NO: 15347 - DNA, 25 bp, Homo sapien
taaccactcatgctgcctacatcta

SEQ ID NO: 15348 - DNA, 25 bp, Homo sapien
atggatagggctcattgtagacttg

SEQ ID NO: 15349 - DNA, 25 bp, Homo sapien
ctttttgtagcaagggaggtaaagc

SEQ ID NO: 15350 - DNA, 25 bp, Homo sapien
gtagacttggaagctctctgagggt

SEQ ID NO: 15351 - DNA, 25 bp, Homo sapien
tgggagtatgcctcgtccatctgtc

SEQ ID NO: 15352 - DNA, 25 bp, Homo sapien
cttgctgctttgttttggttattcc

SEQ ID NO: 15353 - DNA, 25 bp, Homo sapien
gtaacagatactatttcggaagatt

SEQ ID NO: 15354 - DNA, 25 bp, Homo sapien
tattgtactagagccatatccattc

SEQ ID NO: 15355 - DNA, 25 bp, Homo sapien
cctctattttggacgtaacagatac

SEQ ID NO: 15356 - DNA, 25 bp, Homo sapien
ctacacagaatacagggcatctatc

SEQ ID NO: 15357 - DNA, 25 bp, Homo sapien
aaaacaggatttttgtaatggctgc

SEQ ID NO: 15358 - DNA, 25 bp, Homo sapien
ataaaggcagagagtttgtcttact

SEQ ID NO: 15359 - DNA, 25 bp, Homo sapien
atgcttgctacacagaatacagggc

SEQ ID NO: 15360 - DNA, 25 bp, Homo sapien
agtttgagcactaacattgattctc

SEQ ID NO: 15361 - DNA, 25 bp, Homo sapien
cacatagttggagctcaacagggat

SEQ ID NO: 15362 - DNA, 25 bp, Homo sapien
tatctgacacatctgaaattagttg

SEQ ID NO: 15363 - DNA, 25 bp, Homo sapien
tttgtaatggctgcgtgttagtcca

SEQ ID NO: 15364 - DNA, 25 bp, Homo sapien
attatttgggtcaggcttaaataac

SEQ ID NO: 15365 - DNA, 25 bp, Homo sapien
ttagatctggcttaacctgtgctta

SEQ ID NO: 15366 - DNA, 25 bp, Homo sapien
cacgaaagcagaaatggttaatata

SEQ ID NO: 15367 - DNA, 25 bp, Homo sapien
aataatggtcatgtggctttcttgg

SEQ ID NO: 15368 - DNA, 25 bp, Homo sapien
tatatgaagctgtctataggcatga

SEQ ID NO: 15369 - DNA, 25 bp, Homo sapien
cattctcaaaggaccacgaaagcag

SEQ ID NO: 15370 - DNA, 25 bp, Homo sapien
ttggccttgataaatgtgaacactg

SEQ ID NO: 15371 - DNA, 25 bp, Homo sapien
actggcccagcaactaagattgtat

SEQ ID NO: 15372 - DNA, 25 bp, Homo sapien
aatgtgtgtgtaagagttggaatta

SEQ ID NO: 15373 - DNA, 25 bp, Homo sapien
attgattcagaagaactggcccagc

SEQ ID NO: 15374 - DNA, 25 bp, Homo sapien
ataggcatgatagaataaaaagttt

SEQ ID NO: 15375 - DNA, 25 bp, Homo sapien
tacttaacaccagttaatgatgtac

SEQ ID NO: 15376 - DNA, 25 bp, Homo sapien
aataaaggagtggatagatgaatag

SEQ ID NO: 15377 - DNA, 25 bp, Homo sapien
aaataagaggtggatagataaataa

SEQ ID NO: 15378 - DNA, 25 bp, Homo sapien
tttaaagataagtatacagatgtct

SEQ ID NO: 15379 - DNA, 25 bp, Homo sapien
gtggatagataaataaaggagtgga

SEQ ID NO: 15380 - DNA, 25 bp, Homo sapien
tccaccaagaggaaaagctataaag

SEQ ID NO: 15381 - DNA, 25 bp, Homo sapien
acgcccgggcacattctctatcttg

SEQ ID NO: 15382 - DNA, 25 bp, Homo sapien
gtatgtaaactttccaccaagagga

SEQ ID NO: 15383 - DNA, 25 bp, Homo sapien
gctgatgcatgtacttgtcaaaacc

SEQ ID NO: 15384 - DNA, 25 bp, Homo sapien
gagtggatagatgaatagatttgtg

SEQ ID NO: 15385 - DNA, 25 bp, Homo sapien
ttgtcaaaacccagtgaacatgtac

SEQ ID NO: 15386 - DNA, 25 bp, Homo sapien
actgagattgcacatttctgacaac

SEQ ID NO: 15387 - DNA, 25 bp, Homo sapien
aatcggtatctcacaatgcagttag

SEQ ID NO: 15388 - DNA, 25 bp, Homo sapien
aattagtatctcgtgaagggatctt

SEQ ID NO: 15389 - DNA, 25 bp, Homo sapien
aaccatgcaaaatcgtgtttcccat

SEQ ID NO: 15390 - DNA, 25 bp, Homo sapien
gagtgtctctcagtttgggcttgtc

SEQ ID NO: 15391 - DNA, 25 bp, Homo sapien
tcgtgaagggatcttaaaaccatgc

SEQ ID NO: 15392 - DNA, 25 bp, Homo sapien
ctgacaacaccacagaagtgacaat

SEQ ID NO: 15393 - DNA, 25 bp, Homo sapien
ttggaaggtacatggtatcagtatg

SEQ ID NO: 15394 - DNA, 25 bp, Homo sapien
ctcagtgcatcatattggaaggtac

SEQ ID NO: 15395 - DNA, 25 bp, Homo sapien
tccttattgttcacggccttggcac

SEQ ID NO: 15396 - DNA, 25 bp, Homo sapien
ctttcaaaacgtactggccagttat

SEQ ID NO: 15397 - DNA, 25 bp, Homo sapien
gatgcagtgcctctccgaccaagta

SEQ ID NO: 15398 - DNA, 25 bp, Homo sapien
tacgtaatggactatgatcattttc

SEQ ID NO: 15399 - DNA, 25 bp, Homo sapien
cgcgcccggctcaggcagggttctt

SEQ ID NO: 15400 - DNA, 25 bp, Homo sapien
ttgcaactgacttgcgattagccac

SEQ ID NO: 15401 - DNA, 25 bp, Homo sapien
ttttagatgcagtgcctctccgacc

SEQ ID NO: 15402 - DNA, 25 bp, Homo sapien
cttgcgattagccaccaaaacaggc

SEQ ID NO: 15403 - DNA, 25 bp, Homo sapien
tctccgaccaagtattggatgattc

SEQ ID NO: 15404 - DNA, 25 bp, Homo sapien
ccggctcaggcagggttctttataa

SEQ ID NO: 15405 - DNA, 25 bp, Homo sapien
ttctttataaaaacagcctgatgcc

SEQ ID NO: 15406 - DNA, 25 bp, Homo sapien
tggatgattcatacgtaatggacta

SEQ ID NO: 15407 - DNA, 25 bp, Homo sapien
cctgaaggacactctctggttgtaa

SEQ ID NO: 15408 - DNA, 25 bp, Homo sapien
aaaagactaggtaagccgatagtta

SEQ ID NO: 15409 - DNA, 25 bp, Homo sapien
aaagattgggattgcaagtatgagc

SEQ ID NO: 15410 - DNA, 25 bp, Homo sapien
cttgcatgtattttctcccggttta

SEQ ID NO: 15411 - DNA, 25 bp, Homo sapien
gaaattacgagcacacgccacaatg

SEQ ID NO: 15412 - DNA, 25 bp, Homo sapien
agagtcctcggtagaacttcccttc

SEQ ID NO: 15413 - DNA, 25 bp, Homo sapien
taagccgatagttagacagagtcct

SEQ ID NO: 15414 - DNA, 25 bp, Homo sapien
tgaggtttgagagttcttcatgttt

SEQ ID NO: 15415 - DNA, 25 bp, Homo sapien
ttagacagagtcctcggtagaactt

SEQ ID NO: 15416 - DNA, 25 bp, Homo sapien
agtagctgaaattacgagcacacgc

SEQ ID NO: 15417 - DNA, 25 bp, Homo sapien
tatcagataggtaacttgcatgtat

SEQ ID NO: 15418 - DNA, 25 bp, Homo sapien
cttcatgtttgctgggtacaatatc

SEQ ID NO: 15419 - DNA, 25 bp, Homo sapien
tgaggcagaaggacggcccgaacca

SEQ ID NO: 15420 - DNA, 25 bp, Homo sapien
ggattaaaacgcataaaatggaatg

SEQ ID NO: 15421 - DNA, 25 bp, Homo sapien
actaaaaaactatcctgacacggtg

SEQ ID NO: 15422 - DNA, 25 bp, Homo sapien
atcccgggaattcaggaccagtccg

SEQ ID NO: 15423 - DNA, 25 bp, Homo sapien
aaaggattaaaacgcataaaatgga

SEQ ID NO: 15424 - DNA, 25 bp, Homo sapien
ggaatgttataagattggccaggcg

SEQ ID NO: 15425 - DNA, 25 bp, Homo sapien
actatcctgacacggtggcctgggc

SEQ ID NO: 15426 - DNA, 25 bp, Homo sapien
aaaaaactatcctgacacggtggcc

SEQ ID NO: 15427 - DNA, 25 bp, Homo sapien
aaaactatcctgacacggtggcctg

SEQ ID NO: 15428 - DNA, 25 bp, Homo sapien
aatgttataagattggccaggcgtg

SEQ ID NO: 15429 - DNA, 25 bp, Homo sapien
tgatcccgggaattcaggaccagtc

SEQ ID NO: 15430 - DNA, 25 bp, Homo sapien
aataggagtttgaaagatgattcca

SEQ ID NO: 15431 - DNA, 25 bp, Homo sapien
ttccagccctcacagatgactttga

SEQ ID NO: 15432 - DNA, 25 bp, Homo sapien
aataactgccgatgtggtggaaaca

SEQ ID NO: 15433 - DNA, 25 bp, Homo sapien
cttcaatggaggaaataactgccga

SEQ ID NO: 15434 - DNA, 25 bp, Homo sapien
agaagttgtttcttatggacgggaa

SEQ ID NO: 15435 - DNA, 25 bp, Homo sapien
cacagatgactttgagggattccag

SEQ ID NO: 15436 - DNA, 25 bp, Homo sapien
attcatgggagatcaaagtatcaac

SEQ ID NO: 15437 - DNA, 25 bp, Homo sapien
ggggagtctgaagatgtgactcaat

SEQ ID NO: 15438 - DNA, 25 bp, Homo sapien
tcataaggctatagctaccatagac

SEQ ID NO: 15439 - DNA, 25 bp, Homo sapien
ttgagggattccagacttcaatgga

SEQ ID NO: 15440 - DNA, 25 bp, Homo sapien
cagcccactgatcaaggagtaactt

SEQ ID NO: 15441 - DNA, 25 bp, Homo sapien
ccaggattcctgtgctagttctttt

SEQ ID NO: 15442 - DNA, 25 bp, Homo sapien
tttccatctgttaggctgatgttcc

SEQ ID NO: 15443 - DNA, 25 bp, Homo sapien
gttgggttccatcaactggcttcat

SEQ ID NO: 15444 - DNA, 25 bp, Homo sapien
cagtagattcctgggattgggtttc

SEQ ID NO: 15445 - DNA, 25 bp, Homo sapien
gaagaggacactggcttttagagtt

SEQ ID NO: 15446 - DNA, 25 bp, Homo sapien
attatgaaccattgctggggagcta

SEQ ID NO: 15447 - DNA, 25 bp, Homo sapien
ggccaaggctcagtttagcactctt

SEQ ID NO: 15448 - DNA, 25 bp, Homo sapien
tctgctctgctgtgaatacttcgaa

SEQ ID NO: 15449 - DNA, 25 bp, Homo sapien
ttgactatggtataagttgggttcc

SEQ ID NO: 15450 - DNA, 25 bp, Homo sapien
gtctgcatgctctaaccctaggtgc

SEQ ID NO: 15451 - DNA, 25 bp, Homo sapien
gcttttagagttgccaggattcctg

SEQ ID NO: 15452 - DNA, 25 bp, Homo sapien
ctaggagggcaatcattcagtgctt

SEQ ID NO: 15453 - DNA, 25 bp, Homo sapien
agtgcttgccaaagcccagcagaat

SEQ ID NO: 15454 - DNA, 25 bp, Homo sapien
cttttcaatgcttaaccagggctgc

SEQ ID NO: 15455 - DNA, 25 bp, Homo sapien
aagacagggctaactaacacatgct

SEQ ID NO: 15456 - DNA, 25 bp, Homo sapien
ctaataagaatgcaactatagcttt

SEQ ID NO: 15457 - DNA, 25 bp, Homo sapien
tctgcaaatgacaattggtggtggt

SEQ ID NO: 15458 - DNA, 25 bp, Homo sapien
ttaaccagggctgcagtacctctgc

SEQ ID NO: 15459 - DNA, 25 bp, Homo sapien
tgctggaagaaaaagactctactct

SEQ ID NO: 15460 - DNA, 25 bp, Homo sapien
ttatgatgagttgaagatacttctg

SEQ ID NO: 15461 - DNA, 25 bp, Homo sapien
tgatgtgataaagacagggctaact

SEQ ID NO: 15462 - DNA, 25 bp, Homo sapien
acagttctatagacatgagttagct

SEQ ID NO: 15463 - DNA, 25 bp, Homo sapien
ccacagtcttacagtgtacacagtt

SEQ ID NO: 15464 - DNA, 25 bp, Homo sapien
tgaatacatccttgtctgagatctc

SEQ ID NO: 15465 - DNA, 25 bp, Homo sapien
tttcctgtttagtatgatataagtc

SEQ ID NO: 15466 - DNA, 25 bp, Homo sapien
gatctcagataaaaagtgctctgct

SEQ ID NO: 15467 - DNA, 25 bp, Homo sapien
aagtcattgatttgtcatacatggc

SEQ ID NO: 15468 - DNA, 25 bp, Homo sapien
tgctccacagtcttacagtgtacac

SEQ ID NO: 15469 - DNA, 25 bp, Homo sapien
aaatgaatacatccttgtctgagat

SEQ ID NO: 15470 - DNA, 25 bp, Homo sapien
gatataagtcattgatttgtcatac

SEQ ID NO: 15471 - DNA, 25 bp, Homo sapien
ctcagataaaaagtgctctgctctt

SEQ ID NO: 15472 - DNA, 25 bp, Homo sapien
cggccttgctccacagtcttacagt

SEQ ID NO: 15473 - DNA, 25 bp, Homo sapien
agtcttacagtgtacacagttgaat

SEQ ID NO: 15474 - DNA, 25 bp, Homo sapien
ccttcaggtcctagggtatattcac

SEQ ID NO: 15475 - DNA, 25 bp, Homo sapien
tagctgcttggccaacctgcctgtt

SEQ ID NO: 15476 - DNA, 25 bp, Homo sapien
tcaggtcctagggtatattcacgtt

SEQ ID NO: 15477 - DNA, 25 bp, Homo sapien
ggattacaggctgggataatgagcc

SEQ ID NO: 15478 - DNA, 25 bp, Homo sapien
accatccttcaggtcctagggtata

SEQ ID NO: 15479 - DNA, 25 bp, Homo sapien
ttttctcttgagcatattgcagggg

SEQ ID NO: 15480 - DNA, 25 bp, Homo sapien
tacaggctgggataatgagccacca

SEQ ID NO: 15481 - DNA, 25 bp, Homo sapien
ttacaccatccttcaggtcctaggg

SEQ ID NO: 15482 - DNA, 25 bp, Homo sapien
agataatctcatcttggcgtagccc

SEQ ID NO: 15483 - DNA, 25 bp, Homo sapien
ggtcctagggtatattcacgtttga

SEQ ID NO: 15484 - DNA, 25 bp, Homo sapien
ctctagataatctcatcttggcgta

SEQ ID NO: 15485 - DNA, 25 bp, Homo sapien
ttcccataccctacaactaacattg

SEQ ID NO: 15486 - DNA, 25 bp, Homo sapien
ttgagctctccttaattgttaaagc

SEQ ID NO: 15487 - DNA, 25 bp, Homo sapien
tgaggattgaatcaagaaactgaac

SEQ ID NO: 15488 - DNA, 25 bp, Homo sapien
taaagcataattcagcatttgattc

SEQ ID NO: 15489 - DNA, 25 bp, Homo sapien
atacatgaggattgaatcaagaaac

SEQ ID NO: 15490 - DNA, 25 bp, Homo sapien
accctacaactaacattgagctctc

SEQ ID NO: 15491 - DNA, 25 bp, Homo sapien
ggattgaatcaagaaactgaacttc

SEQ ID NO: 15492 - DNA, 25 bp, Homo sapien
acatgaggattgaatcaagaaactg

SEQ ID NO: 15493 - DNA, 25 bp, Homo sapien
atcagtctttcaaaaatcaattccc

SEQ ID NO: 15494 - DNA, 25 bp, Homo sapien
tcatatacatgaggattgaatcaag

SEQ ID NO: 15495 - DNA, 25 bp, Homo sapien
tgttaaagcataattcagcatttga

SEQ ID NO: 15496 - DNA, 25 bp, Homo sapien
cagtattattgagatgtatcatgat

SEQ ID NO: 15497 - DNA, 25 bp, Homo sapien
agatatatgtagattttggtagacc

SEQ ID NO: 15498 - DNA, 25 bp, Homo sapien
tatatggtatattgtgatagaatcc

SEQ ID NO: 15499 - DNA, 25 bp, Homo sapien
tatatgtagattttggtagaccact

SEQ ID NO: 15500 - DNA, 25 bp, Homo sapien
caagtaatcctctggcctcggtctc

SEQ ID NO: 15501 - DNA, 25 bp, Homo sapien
gatatcatcgctctgacagctaata

SEQ ID NO: 15502 - DNA, 25 bp, Homo sapien
aagaactgctgattttaagatactg

SEQ ID NO: 15503 - DNA, 25 bp, Homo sapien
tcgtaagtatacaatagagtttccc

SEQ ID NO: 15504 - DNA, 25 bp, Homo sapien
tacaatagagtttcccagcacatga

SEQ ID NO: 15505 - DNA, 25 bp, Homo sapien
attttaagagtataaagagatcttc

SEQ ID NO: 15506 - DNA, 25 bp, Homo sapien
tattgtgatagaatcctggataagg

SEQ ID NO: 15507 - DNA, 25 bp, Homo sapien
catcgggtcgcttagaacgacgacg

SEQ ID NO: 15508 - DNA, 25 bp, Homo sapien
cgtcgtcgttctaagcgacccgatg

SEQ ID NO: 15509 - DNA, 25 bp, Homo sapien
atcccaggaaatcctcaagaaatat

SEQ ID NO: 15510 - DNA, 25 bp, Homo sapien
tattaaaagaactagctggaaatgt

SEQ ID NO: 15511 - DNA, 25 bp, Homo sapien
atgtattagttaggcctctccagag

SEQ ID NO: 15512 - DNA, 25 bp, Homo sapien
tagcatgtctagaattagttccttc

SEQ ID NO: 15513 - DNA, 25 bp, Homo sapien
tctgggaactagcatgtctagaatt

SEQ ID NO: 15514 - DNA, 25 bp, Homo sapien
aagtcatttggctttgtctatgtat

SEQ ID NO: 15515 - DNA, 25 bp, Homo sapien
gaatatcaaagttcagagaggggaa

SEQ ID NO: 15516 - DNA, 25 bp, Homo sapien
ggcctctccagagaaacaggatctg

SEQ ID NO: 15517 - DNA, 25 bp, Homo sapien
tagctggaaatgtttaaagaatatc

SEQ ID NO: 15518 - DNA, 25 bp, Homo sapien
tgtctatgtattagttaggcctctc

SEQ ID NO: 15519 - DNA, 25 bp, Homo sapien
ggatctgggaactagcatgtctaga

SEQ ID NO: 15520 - DNA, 25 bp, Homo sapien
tactcacacatccatctataggctt

SEQ ID NO: 15521 - DNA, 25 bp, Homo sapien
attttagaaggagagtagatgtacg

SEQ ID NO: 15522 - DNA, 25 bp, Homo sapien
catcttaacaggaaagagagtttga

SEQ ID NO: 15523 - DNA, 25 bp, Homo sapien
cttcaaagggcaataaaagatcaca

SEQ ID NO: 15524 - DNA, 25 bp, Homo sapien
taggaccgtgatggcgaccctgagc

SEQ ID NO: 15525 - DNA, 25 bp, Homo sapien
tgcttcaaagggcaataaaagatca

SEQ ID NO: 15526 - DNA, 25 bp, Homo sapien
taacaggaaagagagtttgagagca

SEQ ID NO: 15527 - DNA, 25 bp, Homo sapien
accgtgatggcgaccctgagctgca

SEQ ID NO: 15528 - DNA, 25 bp, Homo sapien
ccatctataggctttctgcgagaag

SEQ ID NO: 15529 - DNA, 25 bp, Homo sapien
tagaaggagagtagatgtacgaaca

SEQ ID NO: 15530 - DNA, 25 bp, Homo sapien
gcagtcaggccttatgattatctct

SEQ ID NO: 15531 - DNA, 25 bp, Homo sapien
agagaccctggttgctgctgttttt

SEQ ID NO: 15532 - DNA, 25 bp, Homo sapien
gtacatagtcattgcactgctccac

SEQ ID NO: 15533 - DNA, 25 bp, Homo sapien
tacatatgaacttagagaccctggt

SEQ ID NO: 15534 - DNA, 25 bp, Homo sapien
ttggcctataagacaatgtagaagt

SEQ ID NO: 15535 - DNA, 25 bp, Homo sapien
ttaaggccaagtgtcgtacatagtc

SEQ ID NO: 15536 - DNA, 25 bp, Homo sapien
ggggacaaaagtgattagtatgcct

SEQ ID NO: 15537 - DNA, 25 bp, Homo sapien
tgtctcccggggacaaaagtgatta

SEQ ID NO: 15538 - DNA, 25 bp, Homo sapien
ttctcaaaagagtcatgtaacatgc

SEQ ID NO: 15539 - DNA, 25 bp, Homo sapien
tatcacactttgaagatgccagtag

SEQ ID NO: 15540 - DNA, 25 bp, Homo sapien
ctaggacattcttttcagtggttgc

SEQ ID NO: 15541 - DNA, 25 bp, Homo sapien
gctccggtgatgacaagtaactctt

SEQ ID NO: 15542 - DNA, 25 bp, Homo sapien
catggtggcatggaccaatagtccc

SEQ ID NO: 15543 - DNA, 25 bp, Homo sapien
aataatccaaatatccagagactaa

SEQ ID NO: 15544 - DNA, 25 bp, Homo sapien
ataaggctttcactatactaaataa

SEQ ID NO: 15545 - DNA, 25 bp, Homo sapien
cccacactctaaaaaagtactacta

SEQ ID NO: 15546 - DNA, 25 bp, Homo sapien
tatactaaataaatgcataagacgt

SEQ ID NO: 15547 - DNA, 25 bp, Homo sapien
tccagctcgggtgatggagcaaggc

SEQ ID NO: 15548 - DNA, 25 bp, Homo sapien
cccaggatttcaaggttgcagcgag

SEQ ID NO: 15549 - DNA, 25 bp, Homo sapien
atgctacctacactccagctcgggt

SEQ ID NO: 15550 - DNA, 25 bp, Homo sapien
taaatgtgtatataaggctttcact

SEQ ID NO: 15551 - DNA, 25 bp, Homo sapien
atccaaatatccagagactaattat

SEQ ID NO: 15552 - DNA, 25 bp, Homo sapien
gagctatgatcatgctacctacact

SEQ ID NO: 15553 - DNA, 25 bp, Homo sapien
acatgaatactggagtgatgatgcc

SEQ ID NO: 15554 - DNA, 25 bp, Homo sapien
atcttggtgactggtagatacccaa

SEQ ID NO: 15555 - DNA, 25 bp, Homo sapien
gcaaaatagctaccaccaggaccag

SEQ ID NO: 15556 - DNA, 25 bp, Homo sapien
ttataaacaggggaaatcttgacat

SEQ ID NO: 15557 - DNA, 25 bp, Homo sapien
gcagccctaggaacaaatacattaa

SEQ ID NO: 15558 - DNA, 25 bp, Homo sapien
tggtcaagtagggataaatatcttg

SEQ ID NO: 15559 - DNA, 25 bp, Homo sapien
aggacaaattaaccctgccagcatc

SEQ ID NO: 15560 - DNA, 25 bp, Homo sapien
aaggtgggctcaaccactaacccaa

SEQ ID NO: 15561 - DNA, 25 bp, Homo sapien
cagtaccagtaccacccggtttgtg

SEQ ID NO: 15562 - DNA, 25 bp, Homo sapien
aggggaaatcttgacatagagacac

SEQ ID NO: 15563 - DNA, 25 bp, Homo sapien
atttggtcagtaaggtgggctcaac

SEQ ID NO: 15564 - DNA, 25 bp, Homo sapien
aatcagccctgcagagtgctacatc

SEQ ID NO: 15565 - DNA, 25 bp, Homo sapien
actcacagagatgctaagtcccaca

SEQ ID NO: 15566 - DNA, 25 bp, Homo sapien
tagctcctaatgacaatggtggcct

SEQ ID NO: 15567 - DNA, 25 bp, Homo sapien
atctgatgtatctgtcctgtggtag

SEQ ID NO: 15568 - DNA, 25 bp, Homo sapien
atctaaagtagaaagtgaaagggtc

SEQ ID NO: 15569 - DNA, 25 bp, Homo sapien
aaaaggcagcacatatgaaactgaa

SEQ ID NO: 15570 - DNA, 25 bp, Homo sapien
gtcacaactgtgaaaattgcatctg

SEQ ID NO: 15571 - DNA, 25 bp, Homo sapien
atcctgaactgggatggtttgaaga

SEQ ID NO: 15572 - DNA, 25 bp, Homo sapien
tggggaagctgaaataagtattaga

SEQ ID NO: 15573 - DNA, 25 bp, Homo sapien
atagagaagcaataaggatgacaca

SEQ ID NO: 15574 - DNA, 25 bp, Homo sapien
gcagaggcaaagtaattagctccta

SEQ ID NO: 15575 - DNA, 25 bp, Homo sapien
cagtgtgcatcataaggcaaaggca

SEQ ID NO: 15576 - DNA, 25 bp, Homo sapien
agttaggtatgaaactcccaggatt

SEQ ID NO: 15577 - DNA, 25 bp, Homo sapien
acaagcttgtagaggaaatagtatc

SEQ ID NO: 15578 - DNA, 25 bp, Homo sapien
atcagttcagcaatccagtgtttca

SEQ ID NO: 15579 - DNA, 25 bp, Homo sapien
tgcgtgcttagacatgtagaactcc

SEQ ID NO: 15580 - DNA, 25 bp, Homo sapien
gaaggtataaggaccaatgagacct

SEQ ID NO: 15581 - DNA, 25 bp, Homo sapien
tgtgaggtcaaaacagtgagattta

SEQ ID NO: 15582 - DNA, 25 bp, Homo sapien
aatgagacctaaaacagcatagttc

SEQ ID NO: 15583 - DNA, 25 bp, Homo sapien
aatcttagactcttgaagggccctt

SEQ ID NO: 15584 - DNA, 25 bp, Homo sapien
ctaggggtttacttctgtgaggtca

SEQ ID NO: 15585 - DNA, 25 bp, Homo sapien
tttagctcagatggctgaggactct

SEQ ID NO: 15586 - DNA, 25 bp, Homo sapien
ttaggtcttttctcttgggctactc

SEQ ID NO: 15587 - DNA, 25 bp, Homo sapien
tcctcctgtctacagggaaaagccc

SEQ ID NO: 15588 - DNA, 25 bp, Homo sapien
gagccaaagggtccctgttcgcttc

SEQ ID NO: 15589 - DNA, 25 bp, Homo sapien
tactttctgagggagttcctcaact

SEQ ID NO: 15590 - DNA, 25 bp, Homo sapien
agctggtcatgttctgggagccaaa

SEQ ID NO: 15591 - DNA, 25 bp, Homo sapien
ctgatgtcattaattttaggtcttt

SEQ ID NO: 15592 - DNA, 25 bp, Homo sapien
tttctcttgggctactcagattccc

SEQ ID NO: 15593 - DNA, 25 bp, Homo sapien
aaagacacatccatcctcctgtcta

SEQ ID NO: 15594 - DNA, 25 bp, Homo sapien
tcatgttctgggagccaaagggtcc

SEQ ID NO: 15595 - DNA, 25 bp, Homo sapien
tctgggagccaaagggtccctgttc

SEQ ID NO: 15596 - DNA, 25 bp, Homo sapien
tctgagggagttcctcaactttatc

SEQ ID NO: 15597 - DNA, 25 bp, Homo sapien
ggtctgctgactggggacctcctga

SEQ ID NO: 15598 - DNA, 25 bp, Homo sapien
tagcagaggttttcttcagatgccc

SEQ ID NO: 15599 - DNA, 25 bp, Homo sapien
cttcgttagcaagggatccagctgg

SEQ ID NO: 15600 - DNA, 25 bp, Homo sapien
tcaatctcctgtagcagaggttttc

SEQ ID NO: 15601 - DNA, 25 bp, Homo sapien
agtgtgtattctggtctcaatctcc

SEQ ID NO: 15602 - DNA, 25 bp, Homo sapien
gatgcccttggttatctgctcatat

SEQ ID NO: 15603 - DNA, 25 bp, Homo sapien
cgcgtggacattaatgacagcctgc

SEQ ID NO: 15604 - DNA, 25 bp, Homo sapien
ctgctcatatttaagggatggggat

SEQ ID NO: 15605 - DNA, 25 bp, Homo sapien
attaatgacgggcttcgttagcaag

SEQ ID NO: 15606 - DNA, 25 bp, Homo sapien
ttaaagcttgatgccttgaacactg

SEQ ID NO: 15607 - DNA, 25 bp, Homo sapien
tttcgctcacctccgcgtggacatt

SEQ ID NO: 15608 - DNA, 25 bp, Homo sapien
tttcctgaggagatatcaggccagc

SEQ ID NO: 15609 - DNA, 25 bp, Homo sapien
ggatgtcctgggagagcagcccttt

SEQ ID NO: 15610 - DNA, 25 bp, Homo sapien
agaacgccaaggcaaatgtcacttg

SEQ ID NO: 15611 - DNA, 25 bp, Homo sapien
tgacccttctgctctgtgagtgttt

SEQ ID NO: 15612 - DNA, 25 bp, Homo sapien
tttctcaacggtgacttgtgggcag

SEQ ID NO: 15613 - DNA, 25 bp, Homo sapien
agaactaactgtgcctgcagtcttc

SEQ ID NO: 15614 - DNA, 25 bp, Homo sapien
tcatggcccgaaggcagaactaact

SEQ ID NO: 15615 - DNA, 25 bp, Homo sapien
tggcttggagtcctgctgacccttc

SEQ ID NO: 15616 - DNA, 25 bp, Homo sapien
ctgcttttcacagggcgggtttctc

SEQ ID NO: 15617 - DNA, 25 bp, Homo sapien
cttctgctgagcgagtcatggcccg

SEQ ID NO: 15618 - DNA, 25 bp, Homo sapien
cctcacagtgccatgagaagggccc

SEQ ID NO: 15619 - DNA, 25 bp, Homo sapien
attggatcttgggaaatagggttga

SEQ ID NO: 15620 - DNA, 25 bp, Homo sapien
tcacaggtgctctgtccgccacagt

SEQ ID NO: 15621 - DNA, 25 bp, Homo sapien
taatcaagagatagaaggcctccag

SEQ ID NO: 15622 - DNA, 25 bp, Homo sapien
tacaaaaagaaggatggctcagcca

SEQ ID NO: 15623 - DNA, 25 bp, Homo sapien
aacgactgaaggagccaaacgaggt

SEQ ID NO: 15624 - DNA, 25 bp, Homo sapien
tcagccaaggctaaatttaggttac

SEQ ID NO: 15625 - DNA, 25 bp, Homo sapien
cagtctaaaggctgtggtgacctca

SEQ ID NO: 15626 - DNA, 25 bp, Homo sapien
cgcactatggaaaggaaagttgtac

SEQ ID NO: 15627 - DNA, 25 bp, Homo sapien
tgaggaccggatcaatacaagaatc

SEQ ID NO: 15628 - DNA, 25 bp, Homo sapien
gtccgccacagtaacgcactatgga

SEQ ID NO: 15629 - DNA, 25 bp, Homo sapien
taatacaatgaagatgtctacacat

SEQ ID NO: 15630 - DNA, 25 bp, Homo sapien
cccagttacactgtagtagtcccac

SEQ ID NO: 15631 - DNA, 25 bp, Homo sapien
tggggtggagctataacacccgcgc

SEQ ID NO: 15632 - DNA, 25 bp, Homo sapien
tcctttgcagatggggtggagctat

SEQ ID NO: 15633 - DNA, 25 bp, Homo sapien
ggagctataacacccgcgcgcggca

SEQ ID NO: 15634 - DNA, 25 bp, Homo sapien
tttatcccacgctagatcccgctct

SEQ ID NO: 15635 - DNA, 25 bp, Homo sapien
tgcagatggggtggagctataacac

SEQ ID NO: 15636 - DNA, 25 bp, Homo sapien
tggagctataacacccgcgcgcggc

SEQ ID NO: 15637 - DNA, 25 bp, Homo sapien
ggtggagctataacacccgcgcgcg

SEQ ID NO: 15638 - DNA, 25 bp, Homo sapien
cagatggggtggagctataacaccc

SEQ ID NO: 15639 - DNA, 25 bp, Homo sapien
tttgcagatggggtggagctataac

SEQ ID NO: 15640 - DNA, 25 bp, Homo sapien
tatcccacgctagatcccgctcttt

SEQ ID NO: 15641 - DNA, 25 bp, Homo sapien
tggcaccgaggatccctcgagtcct

SEQ ID NO: 15642 - DNA, 25 bp, Homo sapien
tagaatagtgccagttttcatgaac

SEQ ID NO: 15643 - DNA, 25 bp, Homo sapien
actgctcagttaaagcttgcgcata

SEQ ID NO: 15644 - DNA, 25 bp, Homo sapien
ctggtatgagtcctctgtcccggcg

SEQ ID NO: 15645 - DNA, 25 bp, Homo sapien
cccagcttgggtcgtagtttatcac

SEQ ID NO: 15646 - DNA, 25 bp, Homo sapien
ctggagcagtcaagggcttttgcat

SEQ ID NO: 15647 - DNA, 25 bp, Homo sapien
aggctgggctccatttccctggtat

SEQ ID NO: 15648 - DNA, 25 bp, Homo sapien
atccctcgagtcctggagcagtcaa

SEQ ID NO: 15649 - DNA, 25 bp, Homo sapien
ttgacccagcatcctggcaccgagg

SEQ ID NO: 15650 - DNA, 25 bp, Homo sapien
gactggaaggatgctgccgcgactt

SEQ ID NO: 15651 - DNA, 25 bp, Homo sapien
tagtttatcacgaggctgggctcca

SEQ ID NO: 15652 - DNA, 25 bp, Homo sapien
aaccagatcagcctgcccagagtac

SEQ ID NO: 15653 - DNA, 25 bp, Homo sapien
aaaggttggccacatacccacatgg

SEQ ID NO: 15654 - DNA, 25 bp, Homo sapien
agagatgggttcaataacaacagtc

SEQ ID NO: 15655 - DNA, 25 bp, Homo sapien
ggaggtggctatatattggcatatg

SEQ ID NO: 15656 - DNA, 25 bp, Homo sapien
aggaaccatgaatctgctaacaagc

SEQ ID NO: 15657 - DNA, 25 bp, Homo sapien
gaatctgaggagcttaagttggttt

SEQ ID NO: 15658 - DNA, 25 bp, Homo sapien
tttcactgtgagaatcaagcatcct

SEQ ID NO: 15659 - DNA, 25 bp, Homo sapien
ccacacacaacaaagcgtgatcttt

SEQ ID NO: 15660 - DNA, 25 bp, Homo sapien
cccagagtacaaaagacagggtagt

SEQ ID NO: 15661 - DNA, 25 bp, Homo sapien
tgagggctcctaaggaaccatgaat

SEQ ID NO: 15662 - DNA, 25 bp, Homo sapien
tctactgaaggagacctgaatctga

SEQ ID NO: 15663 - DNA, 25 bp, Homo sapien
tgagtttaaccattcggggaactgc

SEQ ID NO: 15664 - DNA, 25 bp, Homo sapien
ggtttctgtgtggacatagtttttc

SEQ ID NO: 15665 - DNA, 25 bp, Homo sapien
cctgtggtgactgagtttaaccatt

SEQ ID NO: 15666 - DNA, 25 bp, Homo sapien
ctagagaggaattgctaggtcctgt

SEQ ID NO: 15667 - DNA, 25 bp, Homo sapien
tataaatggcgtcatcggacaagtg

SEQ ID NO: 15668 - DNA, 25 bp, Homo sapien
aagtggccttctgtgtctaggtgat

SEQ ID NO: 15669 - DNA, 25 bp, Homo sapien
tttgctgggtttgtccatgtggtgt

SEQ ID NO: 15670 - DNA, 25 bp, Homo sapien
tccatgtggtgtgtgtccctgcttt

SEQ ID NO: 15671 - DNA, 25 bp, Homo sapien
ccgcagctggtggacattttgccta

SEQ ID NO: 15672 - DNA, 25 bp, Homo sapien
cctgggtctttacctagagaggaat

SEQ ID NO: 15673 - DNA, 25 bp, Homo sapien
tgtctaggtgatttccctcgcggta

SEQ ID NO: 15674 - DNA, 25 bp, Homo sapien
tacgacattttgtgactgaagagac

SEQ ID NO: 15675 - DNA, 25 bp, Homo sapien
ttgtgactgaagagacttgtttcct

SEQ ID NO: 15676 - DNA, 25 bp, Homo sapien
agaatatttttgaggcgaaggcgtc

SEQ ID NO: 15677 - DNA, 25 bp, Homo sapien
ttggtccatttctctgctgcagccc

SEQ ID NO: 15678 - DNA, 25 bp, Homo sapien
ttaattgaatctagtatatgcggga

SEQ ID NO: 15679 - DNA, 25 bp, Homo sapien
cgaaggcgtctgtctcttggctatt

SEQ ID NO: 15680 - DNA, 25 bp, Homo sapien
aacggtggcccatcttcagcggaga

SEQ ID NO: 15681 - DNA, 25 bp, Homo sapien
cggagagcgagaaccattttggaaa

SEQ ID NO: 15682 - DNA, 25 bp, Homo sapien
agtatatgcgggatgtacgacattt

SEQ ID NO: 15683 - DNA, 25 bp, Homo sapien
catccatcctgcctggagcagcagt

SEQ ID NO: 15684 - DNA, 25 bp, Homo sapien
cacaaggccgttactgcttctccgg

SEQ ID NO: 15685 - DNA, 25 bp, Homo sapien
acccacaggagctaagtagaaattt

SEQ ID NO: 15686 - DNA, 25 bp, Homo sapien
ataatgaacatatatcttgatagga

SEQ ID NO: 15687 - DNA, 25 bp, Homo sapien
agtaatgacatatgatctctgaagg

SEQ ID NO: 15688 - DNA, 25 bp, Homo sapien
tgtttctccacttaatccctagcct

SEQ ID NO: 15689 - DNA, 25 bp, Homo sapien
ttgataggaaagataatgccaagaa

SEQ ID NO: 15690 - DNA, 25 bp, Homo sapien
tatatgagtaatgacatatgatctc

SEQ ID NO: 15691 - DNA, 25 bp, Homo sapien
taggaaagataatgccaagaaatcc

SEQ ID NO: 15692 - DNA, 25 bp, Homo sapien
tttcatcatgatcacccatacttca

SEQ ID NO: 15693 - DNA, 25 bp, Homo sapien
atcttgataggaaagataatgccaa

SEQ ID NO: 15694 - DNA, 25 bp, Homo sapien
gaaacccacaggagctaagtagaaa

SEQ ID NO: 15695 - DNA, 25 bp, Homo sapien
gtgtgtccagaagtaaatacattaa

SEQ ID NO: 15696 - DNA, 25 bp, Homo sapien
gtaggtggggttaaatatgtctatg

SEQ ID NO: 15697 - DNA, 25 bp, Homo sapien
agaagggagctgatgttatatacca

SEQ ID NO: 15698 - DNA, 25 bp, Homo sapien
aggggaagaacaagtctagtccata

SEQ ID NO: 15699 - DNA, 25 bp, Homo sapien
cactggacctccaaaactaagggga

SEQ ID NO: 15700 - DNA, 25 bp, Homo sapien
tcaagcaagcttccgcagatgctgc

SEQ ID NO: 15701 - DNA, 25 bp, Homo sapien
gcccggccaggatctgaacacattt

SEQ ID NO: 15702 - DNA, 25 bp, Homo sapien
ttctggctctgaaaagtgagaggta

SEQ ID NO: 15703 - DNA, 25 bp, Homo sapien
gaccagcatgatcgtcgggacaaat

SEQ ID NO: 15704 - DNA, 25 bp, Homo sapien
gcggatgtttaggatgtatggaaat

SEQ ID NO: 15705 - DNA, 25 bp, Homo sapien
tgccctgggctccaaatgggtcttc

SEQ ID NO: 15706 - DNA, 25 bp, Homo sapien
gacctgcccaaggataggaaatttc

SEQ ID NO: 15707 - DNA, 25 bp, Homo sapien
ctctagctagcttgcagacagccac

SEQ ID NO: 15708 - DNA, 25 bp, Homo sapien
caccctgggagcaggaacaagatca

SEQ ID NO: 15709 - DNA, 25 bp, Homo sapien
gaagaggataaccaagttctggcct

SEQ ID NO: 15710 - DNA, 25 bp, Homo sapien
cctgggctcaaaccctgtgctgtgt

SEQ ID NO: 15711 - DNA, 25 bp, Homo sapien
atcagtgtcaaaccatctaaggcaa

SEQ ID NO: 15712 - DNA, 25 bp, Homo sapien
ttaccatcacatggagacgagggct

SEQ ID NO: 15713 - DNA, 25 bp, Homo sapien
tatattccagaagacctgggctcaa

SEQ ID NO: 15714 - DNA, 25 bp, Homo sapien
agacgagggcttcaacacatgaatt

SEQ ID NO: 15715 - DNA, 25 bp, Homo sapien
ctcacattggaagaggataaccaag

SEQ ID NO: 15716 - DNA, 25 bp, Homo sapien
ttgtttacagtctggaggctagatg

SEQ ID NO: 15717 - DNA, 25 bp, Homo sapien
atcatggtgggtcaaccctcatgac

SEQ ID NO: 15718 - DNA, 25 bp, Homo sapien
atagaccatagatcccagcaattgc

SEQ ID NO: 15719 - DNA, 25 bp, Homo sapien
taaaaaccagatatgcatagaccat

SEQ ID NO: 15720 - DNA, 25 bp, Homo sapien
tactcagtcatcaaaggaacaaaat

SEQ ID NO: 15721 - DNA, 25 bp, Homo sapien
agcttctgtgggcactcagtgtaca

SEQ ID NO: 15722 - DNA, 25 bp, Homo sapien
ttgtgggtgtttaatttggagtgat

SEQ ID NO: 15723 - DNA, 25 bp, Homo sapien
ggccttgagacctacgggatcattc

SEQ ID NO: 15724 - DNA, 25 bp, Homo sapien
gaggatcatagagccactcgtggaa

SEQ ID NO: 15725 - DNA, 25 bp, Homo sapien
ctcgtggaaaatagttgacagttgt

SEQ ID NO: 15726 - DNA, 25 bp, Homo sapien
ttggagtgatgaaacttgtggtccc

SEQ ID NO: 15727 - DNA, 25 bp, Homo sapien
caataagcccaggtgaatgtttaat

SEQ ID NO: 15728 - DNA, 25 bp, Homo sapien
tacagttgaaaaggtcaataagccc

SEQ ID NO: 15729 - DNA, 25 bp, Homo sapien
ataagggccaaacattcaaagagaa

SEQ ID NO: 15730 - DNA, 25 bp, Homo sapien
tatttatcatgatccagtggtacac

SEQ ID NO: 15731 - DNA, 25 bp, Homo sapien
tgtctcctctaactttcagaagaaa

SEQ ID NO: 15732 - DNA, 25 bp, Homo sapien
aaaatctgaaaaatatgcctgctaa

SEQ ID NO: 15733 - DNA, 25 bp, Homo sapien
cttcttcactgacgaaagggaagac

SEQ ID NO: 15734 - DNA, 25 bp, Homo sapien
attcaaagagaataggacccaaact

SEQ ID NO: 15735 - DNA, 25 bp, Homo sapien
atataaatataagggccaaacattc

SEQ ID NO: 15736 - DNA, 25 bp, Homo sapien
ttcactgacgaaagggaagacaaaa

SEQ ID NO: 15737 - DNA, 25 bp, Homo sapien
tgtcacttcaaatcacaacgtttgg

SEQ ID NO: 15738 - DNA, 25 bp, Homo sapien
agggaagacaaaaactaatactcta

SEQ ID NO: 15739 - DNA, 25 bp, Homo sapien
caaatcacaacgtttggacaaaaaa

SEQ ID NO: 15740 - DNA, 25 bp, Homo sapien
ccacatgaggcaatttaaattctca

SEQ ID NO: 15741 - DNA, 25 bp, Homo sapien
tatagacacctatagacatttacag

SEQ ID NO: 15742 - DNA, 25 bp, Homo sapien
aatgagatacatctgtgctgtccaa

SEQ ID NO: 15743 - DNA, 25 bp, Homo sapien
tttgagtagcaatgagatacatctg

SEQ ID NO: 15744 - DNA, 25 bp, Homo sapien
gcccggctgagagtcctcatttcta

SEQ ID NO: 15745 - DNA, 25 bp, Homo sapien
agacacatttcaagtactccacaac

SEQ ID NO: 15746 - DNA, 25 bp, Homo sapien
tggccaatatagaacacgtatagat

SEQ ID NO: 15747 - DNA, 25 bp, Homo sapien
caggtgatagcaatgctcctggtct

SEQ ID NO: 15748 - DNA, 25 bp, Homo sapien
aaatagaaaattcagctcttcagtc

SEQ ID NO: 15749 - DNA, 25 bp, Homo sapien
actgtggctagtggccaatatagaa

SEQ ID NO: 15750 - DNA, 25 bp, Homo sapien
cacaactaactgtggctagtggcca

SEQ ID NO: 15751 - DNA, 25 bp, Homo sapien
atcctcaaaccatcagggtctctct

SEQ ID NO: 15752 - DNA, 25 bp, Homo sapien
gggatagtaatcattggccattcaa

SEQ ID NO: 15753 - DNA, 25 bp, Homo sapien
ggagaaaagagattactcaccctgt

SEQ ID NO: 15754 - DNA, 25 bp, Homo sapien
atcctcaaactatcagggtctcgtt

SEQ ID NO: 15755 - DNA, 25 bp, Homo sapien
ctcaaactatcagggtctcgttctg

SEQ ID NO: 15756 - DNA, 25 bp, Homo sapien
aagagattactcaccctgtgggata

SEQ ID NO: 15757 - DNA, 25 bp, Homo sapien
agggagaaaagagattactcaccct

SEQ ID NO: 15758 - DNA, 25 bp, Homo sapien
atttttatgatctgccaaccagctc

SEQ ID NO: 15759 - DNA, 25 bp, Homo sapien
ggccattcaacaaccctgggcatgt

SEQ ID NO: 15760 - DNA, 25 bp, Homo sapien
attggccattcaacaaccctgggca

SEQ ID NO: 15761 - DNA, 25 bp, Homo sapien
tactcaccctgtgggatagtaatca

SEQ ID NO: 15762 - DNA, 25 bp, Homo sapien
aatcaaaaccctccaagtgtgccaa

SEQ ID NO: 15763 - DNA, 25 bp, Homo sapien
aagtcacagaggaaactcttagaac

SEQ ID NO: 15764 - DNA, 25 bp, Homo sapien
accatgggccaaaggaaaagtcaca

SEQ ID NO: 15765 - DNA, 25 bp, Homo sapien
aagataagatctacaggccactgag

SEQ ID NO: 15766 - DNA, 25 bp, Homo sapien
acaaaaaacagaagataagatctac

SEQ ID NO: 15767 - DNA, 25 bp, Homo sapien
gactctgactggtgtgttgaagaaa

SEQ ID NO: 15768 - DNA, 25 bp, Homo sapien
tgaagaaaatggaagatggtgaaaa

SEQ ID NO: 15769 - DNA, 25 bp, Homo sapien
ataatttggaagtaaaagaacacaa

SEQ ID NO: 15770 - DNA, 25 bp, Homo sapien
ttcagtagacaacagcataaaacat

SEQ ID NO: 15771 - DNA, 25 bp, Homo sapien
aagtgtgccaaaaaactaagattaa

SEQ ID NO: 15772 - DNA, 25 bp, Homo sapien
aatcaagaacagaaagatatctaga

SEQ ID NO: 15773 - DNA, 25 bp, Homo sapien
ccaacaactgatctgctttctagca

SEQ ID NO: 15774 - DNA, 25 bp, Homo sapien
ttctagcactatgaattagcttgta

SEQ ID NO: 15775 - DNA, 25 bp, Homo sapien
gcccagcccaattgcacattcttaa

SEQ ID NO: 15776 - DNA, 25 bp, Homo sapien
tgaacatgtccacattcccagaagt

SEQ ID NO: 15777 - DNA, 25 bp, Homo sapien
tattctgtcgtatggctacacatca

SEQ ID NO: 15778 - DNA, 25 bp, Homo sapien
tatccatttacctgctggtgaacat

SEQ ID NO: 15779 - DNA, 25 bp, Homo sapien
aacatatgtatatacccatgaatcc

SEQ ID NO: 15780 - DNA, 25 bp, Homo sapien
actacacgcagccaacaactgatct

SEQ ID NO: 15781 - DNA, 25 bp, Homo sapien
gaatgttattctgtcgtatggctac

SEQ ID NO: 15782 - DNA, 25 bp, Homo sapien
atttacctgctggtgaacatttggg

SEQ ID NO: 15783 - DNA, 25 bp, Homo sapien
gctatgaatattaatttgcaagtct

SEQ ID NO: 15784 - DNA, 25 bp, Homo sapien
ttttcgacataaaatgattagacgc

SEQ ID NO: 15785 - DNA, 25 bp, Homo sapien
acttgaggcttaacttaggaagttg

SEQ ID NO: 15786 - DNA, 25 bp, Homo sapien
gcaaacagggcatctaaactagcac

SEQ ID NO: 15787 - DNA, 25 bp, Homo sapien
taaaagtcaatttgctgagattctc

SEQ ID NO: 15788 - DNA, 25 bp, Homo sapien
atgattagacgcaaacagggcatct

SEQ ID NO: 15789 - DNA, 25 bp, Homo sapien
ctgagattctcacttgaggcttaac

SEQ ID NO: 15790 - DNA, 25 bp, Homo sapien
actataggattcaccacactggacc

SEQ ID NO: 15791 - DNA, 25 bp, Homo sapien
tcagaggtcccggttcacattgttt

SEQ ID NO: 15792 - DNA, 25 bp, Homo sapien
taaaatgattagacgcaaacagggc

SEQ ID NO: 15793 - DNA, 25 bp, Homo sapien
aatgaagatcagaggtcccggttca

SEQ ID NO: 15794 - DNA, 25 bp, Homo sapien
aaaaagggaacaggaatgaagatca

SEQ ID NO: 15795 - DNA, 25 bp, Homo sapien
tttcttaaggcagctttaacaggcc

SEQ ID NO: 15796 - DNA, 25 bp, Homo sapien
cccaggcaacatattttcttaaggc

SEQ ID NO: 15797 - DNA, 25 bp, Homo sapien
tttcttcaaactcagctcacgtgtc

SEQ ID NO: 15798 - DNA, 25 bp, Homo sapien
atcccagactgggtaaggtactcct

SEQ ID NO: 15799 - DNA, 25 bp, Homo sapien
ttaaggcagctttaacaggccatgc

SEQ ID NO: 15800 - DNA, 25 bp, Homo sapien
ctcacgtgtcttgcttagggagggc

SEQ ID NO: 15801 - DNA, 25 bp, Homo sapien
aaggtactcctggtctagcagcatc

SEQ ID NO: 15802 - DNA, 25 bp, Homo sapien
catatgctgttcactctgctccaaa

SEQ ID NO: 15803 - DNA, 25 bp, Homo sapien
tcctgtaaataacataggtgcattt

SEQ ID NO: 15804 - DNA, 25 bp, Homo sapien
gtgtcttgcttagggagggcttccc

SEQ ID NO: 15805 - DNA, 25 bp, Homo sapien
gtagctctagcaccactaaaacgtt

SEQ ID NO: 15806 - DNA, 25 bp, Homo sapien
tgagaatttcagtaaaagtcccagg

SEQ ID NO: 15807 - DNA, 25 bp, Homo sapien
agttggtctaactccttcactcatt

SEQ ID NO: 15808 - DNA, 25 bp, Homo sapien
gtgcctctttctgagaatttcagta

SEQ ID NO: 15809 - DNA, 25 bp, Homo sapien
ctcattctgtgttagtgtcactctc

SEQ ID NO: 15810 - DNA, 25 bp, Homo sapien
atagctgcaggtatctcctaccacc

SEQ ID NO: 15811 - DNA, 25 bp, Homo sapien
atttcagtaaaagtcccaggattga

SEQ ID NO: 15812 - DNA, 25 bp, Homo sapien
cctcatgggcataaaaggatccccc

SEQ ID NO: 15813 - DNA, 25 bp, Homo sapien
agggtgttgcaactatgtttatttc

SEQ ID NO: 15814 - DNA, 25 bp, Homo sapien
tctgtgttagtgtcactctcagcca

SEQ ID NO: 15815 - DNA, 25 bp, Homo sapien
caggattgattctcgtgggcttagc

SEQ ID NO: 15816 - DNA, 25 bp, Homo sapien
cattcattcactgagttggtctaac

SEQ ID NO: 15817 - DNA, 25 bp, Homo sapien
ttccctttccaatatgtatgccttt

SEQ ID NO: 15818 - DNA, 25 bp, Homo sapien
gttagtagtgaaagtgggtattcat

SEQ ID NO: 15819 - DNA, 25 bp, Homo sapien
ttttggagactatcataaataaaaa

SEQ ID NO: 15820 - DNA, 25 bp, Homo sapien
accttggtaaactcacatattgttc

SEQ ID NO: 15821 - DNA, 25 bp, Homo sapien
tgaaagtgggtattcatgccgtcct

SEQ ID NO: 15822 - DNA, 25 bp, Homo sapien
ttaggaggaaagaattcatttcttc

SEQ ID NO: 15823 - DNA, 25 bp, Homo sapien
ttcagtgttagtagtgaaagtgggt

SEQ ID NO: 15824 - DNA, 25 bp, Homo sapien
tgggaccttcgtacaaaattcagtg

SEQ ID NO: 15825 - DNA, 25 bp, Homo sapien
aactgactgggaccttcgtacaaaa

SEQ ID NO: 15826 - DNA, 25 bp, Homo sapien
tgactttggcatattgaccttgtat

SEQ ID NO: 15827 - DNA, 25 bp, Homo sapien
atgccgtccttgtttctaatcttag

SEQ ID NO: 15828 - DNA, 25 bp, Homo sapien
atttgatagtacagaaagcttacca

SEQ ID NO: 15829 - DNA, 25 bp, Homo sapien
atagaacctggttaggaccagccat

SEQ ID NO: 15830 - DNA, 25 bp, Homo sapien
cacatatttgggaaaagaaacttgt

SEQ ID NO: 15831 - DNA, 25 bp, Homo sapien
aagaaacttgtgtgggtaaggaatg

SEQ ID NO: 15832 - DNA, 25 bp, Homo sapien
ataagttacataggaacactgttgt

SEQ ID NO: 15833 - DNA, 25 bp, Homo sapien
acaagtgactaggatgtacatctct

SEQ ID NO: 15834 - DNA, 25 bp, Homo sapien
tggagccagctgagttaaagacaac

SEQ ID NO: 15835 - DNA, 25 bp, Homo sapien
taaggagattaaatgaaagctggag

SEQ ID NO: 15836 - DNA, 25 bp, Homo sapien
catcatcaagattgtaaggacatca

SEQ ID NO: 15837 - DNA, 25 bp, Homo sapien
ataaatgtgaagtgggaaatgtaaa

SEQ ID NO: 15838 - DNA, 25 bp, Homo sapien
gacaatatacagacaccaagtgata

SEQ ID NO: 15839 - DNA, 25 bp, Homo sapien
atgaagctggttatatccttagatc

SEQ ID NO: 15840 - DNA, 25 bp, Homo sapien
gagaaaataagaggcgggctgcctt

SEQ ID NO: 15841 - DNA, 25 bp, Homo sapien
ttatcaggaagtattgtctgactcg

SEQ ID NO: 15842 - DNA, 25 bp, Homo sapien
tatatccttagatcttcagggaaag

SEQ ID NO: 15843 - DNA, 25 bp, Homo sapien
tgatgaaaactaaagctactaatcc

SEQ ID NO: 15844 - DNA, 25 bp, Homo sapien
ccacttgaatctggcagagacttga

SEQ ID NO: 15845 - DNA, 25 bp, Homo sapien
attgtctgactcgatatatagcttc

SEQ ID NO: 15846 - DNA, 25 bp, Homo sapien
ttcactgtggctgcttgtgagctgt

SEQ ID NO: 15847 - DNA, 25 bp, Homo sapien
ttgaaaaggcactgtgtttatatgt

SEQ ID NO: 15848 - DNA, 25 bp, Homo sapien
tgtgagctgtgtggccacttgaatc

SEQ ID NO: 15849 - DNA, 25 bp, Homo sapien
ctgggaagctctaggcaactaaaat

SEQ ID NO: 15850 - DNA, 25 bp, Homo sapien
tcagtccatcacagtgtgggcacat

SEQ ID NO: 15851 - DNA, 25 bp, Homo sapien
aaagacggggatggagaattgaaaa

SEQ ID NO: 15852 - DNA, 25 bp, Homo sapien
gtgggcacattatatttttgaaagc

SEQ ID NO: 15853 - DNA, 25 bp, Homo sapien
agtcagtccatcacagtgtgggcac

SEQ ID NO: 15854 - DNA, 25 bp, Homo sapien
agtccatcacagtgtgggcacatta

SEQ ID NO: 15855 - DNA, 25 bp, Homo sapien
tcatggagtatctgacgcatccata

SEQ ID NO: 15856 - DNA, 25 bp, Homo sapien
aaaagctggatgacagatgttaacc

SEQ ID NO: 15857 - DNA, 25 bp, Homo sapien
agctggatgacagatgttaaccatt

SEQ ID NO: 15858 - DNA, 25 bp, Homo sapien
atgttaaccattttcagctctgccc

SEQ ID NO: 15859 - DNA, 25 bp, Homo sapien
gagtatctgacgcatccatattcca

SEQ ID NO: 15860 - DNA, 25 bp, Homo sapien
ccagtcagtccatcacagtgtgggc

SEQ ID NO: 15861 - DNA, 25 bp, Homo sapien
agcgggaggtgagagtcaaaacatt

SEQ ID NO: 15862 - DNA, 25 bp, Homo sapien
taccctatagttccacaaaagccgc

SEQ ID NO: 15863 - DNA, 25 bp, Homo sapien
tagttccacaaaagccgcaggagga

SEQ ID NO: 15864 - DNA, 25 bp, Homo sapien
tattcctcctaccagcgggaggtga

SEQ ID NO: 15865 - DNA, 25 bp, Homo sapien
aaaacatttggcaaaggagagggaa

SEQ ID NO: 15866 - DNA, 25 bp, Homo sapien
ggaagcttgactttgtgtgactaac

SEQ ID NO: 15867 - DNA, 25 bp, Homo sapien
agtcaccgcacccacgctgtttctc

SEQ ID NO: 15868 - DNA, 25 bp, Homo sapien
tctcctttctcgtaccagtgaccta

SEQ ID NO: 15869 - DNA, 25 bp, Homo sapien
tcgtaccagtgacctaccctatagt

SEQ ID NO: 15870 - DNA, 25 bp, Homo sapien
gtgactaacttacattggcctgaaa

SEQ ID NO: 15871 - DNA, 25 bp, Homo sapien
agagtcaaaacatttggcaaaggag

SEQ ID NO: 15872 - DNA, 25 bp, Homo sapien
taagactatgtgatgtagaagctgc

SEQ ID NO: 15873 - DNA, 25 bp, Homo sapien
tttagacagcaacgtgaagtcatat

SEQ ID NO: 15874 - DNA, 25 bp, Homo sapien
ctgcaggagttcattgccattagaa

SEQ ID NO: 15875 - DNA, 25 bp, Homo sapien
aagacctctcgtaaaggtaggtgta

SEQ ID NO: 15876 - DNA, 25 bp, Homo sapien
tagtgacatcaataatgtgaagcag

SEQ ID NO: 15877 - DNA, 25 bp, Homo sapien
aggtaggtgtatgaaaaacgtggaa

SEQ ID NO: 15878 - DNA, 25 bp, Homo sapien
gaagtcatatagaggtataaagacc

SEQ ID NO: 15879 - DNA, 25 bp, Homo sapien
cttaagagagtcattcactttgaaa

SEQ ID NO: 15880 - DNA, 25 bp, Homo sapien
aaagaagtttagacagcaacgtgaa

SEQ ID NO: 15881 - DNA, 25 bp, Homo sapien
attagaactgctctacaagaaatgc

SEQ ID NO: 15882 - DNA, 25 bp, Homo sapien
tcactttgaaatgaaagaagtttag

SEQ ID NO: 15883 - DNA, 25 bp, Homo sapien
ttcctgggctaattaaatgacttcc

SEQ ID NO: 15884 - DNA, 25 bp, Homo sapien
aatgacttcctgagcttgttttaga

SEQ ID NO: 15885 - DNA, 25 bp, Homo sapien
atgtgttaggaaaactccaattttc

SEQ ID NO: 15886 - DNA, 25 bp, Homo sapien
gtttgtagggaaagacgcaagaaca

SEQ ID NO: 15887 - DNA, 25 bp, Homo sapien
gctccgacactgctacagaattcta

SEQ ID NO: 15888 - DNA, 25 bp, Homo sapien
agacaaatgggaggcagcaaaagaa

SEQ ID NO: 15889 - DNA, 25 bp, Homo sapien
cccttcctgggctaattaaatgact

SEQ ID NO: 15890 - DNA, 25 bp, Homo sapien
gcagtgaggcaggacatttactctt

SEQ ID NO: 15891 - DNA, 25 bp, Homo sapien
tagaaaagcatttccgctccgacac

SEQ ID NO: 15892 - DNA, 25 bp, Homo sapien
tagggaaagacgcaagaacagaaac

SEQ ID NO: 15893 - DNA, 25 bp, Homo sapien
actcttaatgtgttaggaaaactcc

SEQ ID NO: 15894 - DNA, 25 bp, Homo sapien
ctagtaagactttgttatgagtttc

SEQ ID NO: 15895 - DNA, 25 bp, Homo sapien
tccatcaagcacacaaagaggaaga

SEQ ID NO: 15896 - DNA, 25 bp, Homo sapien
attaagacattatatacaccacagc

SEQ ID NO: 15897 - DNA, 25 bp, Homo sapien
cattcatgacaagtaaataggattt

SEQ ID NO: 15898 - DNA, 25 bp, Homo sapien
tttgaaaaattttagctcagttgtc

SEQ ID NO: 15899 - DNA, 25 bp, Homo sapien
cagggataacctggtcagtaatcaa

SEQ ID NO: 15900 - DNA, 25 bp, Homo sapien
tttttagtccatcaacaagcaataa

SEQ ID NO: 15901 - DNA, 25 bp, Homo sapien
gaagggtggatggtccattacacca

SEQ ID NO: 15902 - DNA, 25 bp, Homo sapien
tttgtaaaagatgcactggaattat

SEQ ID NO: 15903 - DNA, 25 bp, Homo sapien
taacaggcagaatatttaatgtatt

SEQ ID NO: 15904 - DNA, 25 bp, Homo sapien
ccattacaccagcagggataacctg

SEQ ID NO: 15905 - DNA, 25 bp, Homo sapien
ttcacagattgtgtacagtgagcac

SEQ ID NO: 15906 - DNA, 25 bp, Homo sapien
agataatgctgctttgaacatgtgt

SEQ ID NO: 15907 - DNA, 25 bp, Homo sapien
tgtttgcaagtttcatccgtgttat

SEQ ID NO: 15908 - DNA, 25 bp, Homo sapien
acagattgtgtacagtgagcaccac

SEQ ID NO: 15909 - DNA, 25 bp, Homo sapien
ttgctattacagataatgctgcttt

SEQ ID NO: 15910 - DNA, 25 bp, Homo sapien
tccgtgttatggcatatatcagtac

SEQ ID NO: 15911 - DNA, 25 bp, Homo sapien
agtcagttgttggatatttgggttg

SEQ ID NO: 15912 - DNA, 25 bp, Homo sapien
gtgtacagtgagcaccacaatttta

SEQ ID NO: 15913 - DNA, 25 bp, Homo sapien
tcccgctagtgaaccactaatctat

SEQ ID NO: 15914 - DNA, 25 bp, Homo sapien
caatatgtagtcctttgtgactgac

SEQ ID NO: 15915 - DNA, 25 bp, Homo sapien
tccaaaaatgctatatacccttagt

SEQ ID NO: 15916 - DNA, 25 bp, Homo sapien
acatgggccctctttaggagactac

SEQ ID NO: 15917 - DNA, 25 bp, Homo sapien
actgctgtgatacatttttcttgcc

SEQ ID NO: 15918 - DNA, 25 bp, Homo sapien
gccgcacccacaactggactgtgta

SEQ ID NO: 15919 - DNA, 25 bp, Homo sapien
tgggccctctttaggagactactgt

SEQ ID NO: 15920 - DNA, 25 bp, Homo sapien
ttgccgcacccacaactggactgtg

SEQ ID NO: 15921 - DNA, 25 bp, Homo sapien
acccacaactggactgtgtacatgg

SEQ ID NO: 15922 - DNA, 25 bp, Homo sapien
gatacatttttcttgccgcacccac

SEQ ID NO: 15923 - DNA, 25 bp, Homo sapien
agagtaaatgacaaaattaaagtcc

SEQ ID NO: 15924 - DNA, 25 bp, Homo sapien
caactggactgtgtacatgggccct

SEQ ID NO: 15925 - DNA, 25 bp, Homo sapien
ttttcttgccgcacccacaactgga

SEQ ID NO: 15926 - DNA, 25 bp, Homo sapien
cacaactggactgtgtacatgggcc

SEQ ID NO: 15927 - DNA, 25 bp, Homo sapien
gtttctctcaaaggcaggttctcag

SEQ ID NO: 15928 - DNA, 25 bp, Homo sapien
atcagaccacaatccacaaagcgct

SEQ ID NO: 15929 - DNA, 25 bp, Homo sapien
tcactgggaccagaatgtgcctaga

SEQ ID NO: 15930 - DNA, 25 bp, Homo sapien
gcaggaaatctcaacacgactgtga

SEQ ID NO: 15931 - DNA, 25 bp, Homo sapien
acatgaacgagcctgttaaagcaac

SEQ ID NO: 15932 - DNA, 25 bp, Homo sapien
tctgcccacgctcttgatgcttagt

SEQ ID NO: 15933 - DNA, 25 bp, Homo sapien
gttaaagcaacatgcaggagatgga

SEQ ID NO: 15934 - DNA, 25 bp, Homo sapien
aggagagtcttctgtcactgggacc

SEQ ID NO: 15935 - DNA, 25 bp, Homo sapien
gagaagttcggccacatgcccattg

SEQ ID NO: 15936 - DNA, 25 bp, Homo sapien
tcaacacgactgtgagatcagacca

SEQ ID NO: 15937 - DNA, 25 bp, Homo sapien
atgcttagtaaaacatgaacgagcc

SEQ ID NO: 15938 - DNA, 25 bp, Homo sapien
cggtagcctactaaattctccagtt

SEQ ID NO: 15939 - DNA, 25 bp, Homo sapien
tagaactatattaccggtagcctac

SEQ ID NO: 15940 - DNA, 25 bp, Homo sapien
gcttgtctagaaatgatagactcta

SEQ ID NO: 15941 - DNA, 25 bp, Homo sapien
taactgtatgctaatgactcccttg

SEQ ID NO: 15942 - DNA, 25 bp, Homo sapien
actcttgtcagagtagtctttcctc

SEQ ID NO: 15943 - DNA, 25 bp, Homo sapien
tataggatgttcttggctctagttc

SEQ ID NO: 15944 - DNA, 25 bp, Homo sapien
actgccatgcgtcatctctctatag

SEQ ID NO: 15945 - DNA, 25 bp, Homo sapien
ccttgtgtctttgtgggactctaga

SEQ ID NO: 15946 - DNA, 25 bp, Homo sapien
gtcactaggtcctatcagtcctttc

SEQ ID NO: 15947 - DNA, 25 bp, Homo sapien
taacatgcagtttgtcactaggtcc

SEQ ID NO: 15948 - DNA, 25 bp, Homo sapien
ctttgtgggactctagaactatatt

SEQ ID NO: 15949 - DNA, 25 bp, Homo sapien
aataaattaacataggacaggaagt

SEQ ID NO: 15950 - DNA, 25 bp, Homo sapien
ataggacaggaagttaaaatgcagc

SEQ ID NO: 15951 - DNA, 25 bp, Homo sapien
gcagccactcaaacaatagcaaatg

SEQ ID NO: 15952 - DNA, 25 bp, Homo sapien
aggacaggaagttaaaatgcagcca

SEQ ID NO: 15953 - DNA, 25 bp, Homo sapien
gccactcaaacaatagcaaatgctc

SEQ ID NO: 15954 - DNA, 25 bp, Homo sapien
gagtcctaactcagtaataaattaa

SEQ ID NO: 15955 - DNA, 25 bp, Homo sapien
cataggacaggaagttaaaatgcag

SEQ ID NO: 15956 - DNA, 25 bp, Homo sapien
atgcagccactcaaacaatagcaaa

SEQ ID NO: 15957 - DNA, 25 bp, Homo sapien
agcaaatgctcaatttggtacattc

SEQ ID NO: 15958 - DNA, 25 bp, Homo sapien
atgctcaatttggtacattcctaat

SEQ ID NO: 15959 - DNA, 25 bp, Homo sapien
ttagatgtgatgcatcatttctgag

SEQ ID NO: 15960 - DNA, 25 bp, Homo sapien
accttgactggcctataattacttt

SEQ ID NO: 15961 - DNA, 25 bp, Homo sapien
ctcagtgcaatctcggtgtagtctc

SEQ ID NO: 15962 - DNA, 25 bp, Homo sapien
gtgattatctttggatggtgggatt

SEQ ID NO: 15963 - DNA, 25 bp, Homo sapien
aggatttcgccatgctgtccatgct

SEQ ID NO: 15964 - DNA, 25 bp, Homo sapien
tcggtgtagtctcgacctcacaggc

SEQ ID NO: 15965 - DNA, 25 bp, Homo sapien
gtgagccaccttgactggcctataa

SEQ ID NO: 15966 - DNA, 25 bp, Homo sapien
tttttgtggaatacagatggaggga

SEQ ID NO: 15967 - DNA, 25 bp, Homo sapien
atggagggaatacatcacaatacta

SEQ ID NO: 15968 - DNA, 25 bp, Homo sapien
aagggagatgtgaaactatacacaa

SEQ ID NO: 15969 - DNA, 25 bp, Homo sapien
tccctccttctcataaagcacaatt

SEQ ID NO: 15970 - DNA, 25 bp, Homo sapien
tcaccctgttgaccaaggccggagc

SEQ ID NO: 15971 - DNA, 25 bp, Homo sapien
aagtatttggtatgattcctggcac

SEQ ID NO: 15972 - DNA, 25 bp, Homo sapien
taaaggtgctagaaatttggctatc

SEQ ID NO: 15973 - DNA, 25 bp, Homo sapien
aagctcctatttgccttgtgtaaat

SEQ ID NO: 15974 - DNA, 25 bp, Homo sapien
tatctaaagaatcatgaataaagtt

SEQ ID NO: 15975 - DNA, 25 bp, Homo sapien
gaaaggcatctactaaaggtgctag

SEQ ID NO: 15976 - DNA, 25 bp, Homo sapien
agccagacacgtttttaataacaat

SEQ ID NO: 15977 - DNA, 25 bp, Homo sapien
ctaatactttactgagagcttactc

SEQ ID NO: 15978 - DNA, 25 bp, Homo sapien
ttggtatgattcctggcacatgcta

SEQ ID NO: 15979 - DNA, 25 bp, Homo sapien
ttaataacaataaagcaactaatac

SEQ ID NO: 15980 - DNA, 25 bp, Homo sapien
atggtttaatacagatacttgagac

SEQ ID NO: 15981 - DNA, 25 bp, Homo sapien
gttagctagacttgaataaccatcc

SEQ ID NO: 15982 - DNA, 25 bp, Homo sapien
ccacagggctgcagcatgcgtcctg

SEQ ID NO: 15983 - DNA, 25 bp, Homo sapien
tttgtctgtcctgagctgctatcac

SEQ ID NO: 15984 - DNA, 25 bp, Homo sapien
ctgctatcacaaacatgaaatgggg

SEQ ID NO: 15985 - DNA, 25 bp, Homo sapien
agccctcaatgtgcgaagcttaacc

SEQ ID NO: 15986 - DNA, 25 bp, Homo sapien
atgcgtcctgcctgcctgtggacac

SEQ ID NO: 15987 - DNA, 25 bp, Homo sapien
agagatctgagacacattttctgcc

SEQ ID NO: 15988 - DNA, 25 bp, Homo sapien
cagttcccagagatctgagacacat

SEQ ID NO: 15989 - DNA, 25 bp, Homo sapien
tgcccaaggccaccctcttggtgtt

SEQ ID NO: 15990 - DNA, 25 bp, Homo sapien
gtgcccagccctcaatgtgcgaagc

SEQ ID NO: 15991 - DNA, 25 bp, Homo sapien
accctcttggtgtttgtctgtcctg

SEQ ID NO: 15992 - DNA, 25 bp, Homo sapien
agaggaaggcttccaccgtgcccac

SEQ ID NO: 15993 - DNA, 25 bp, Homo sapien
tgctacctggtgcactttggaaagt

SEQ ID NO: 15994 - DNA, 25 bp, Homo sapien
cagacccttgcaaagggcaatggta

SEQ ID NO: 15995 - DNA, 25 bp, Homo sapien
tgagcagttgtcacctgattgggca

SEQ ID NO: 15996 - DNA, 25 bp, Homo sapien
ttgtcacctgattgggcagaccctt

SEQ ID NO: 15997 - DNA, 25 bp, Homo sapien
gggcaatggtaaaagccaatgttta

SEQ ID NO: 15998 - DNA, 25 bp, Homo sapien
ttgctatacatcagggccgggtgga

SEQ ID NO: 15999 - DNA, 25 bp, Homo sapien
ctcgacattgggtctttcttggcca

SEQ ID NO: 16000 - DNA, 25 bp, Homo sapien
ttatgttcactcgacattgggtctt

SEQ ID NO: 16001 - DNA, 25 bp, Homo sapien
ggtgcactttggaaagtgagcagtt

SEQ ID NO: 16002 - DNA, 25 bp, Homo sapien
ccgggtggagcactttgatccgttt

SEQ ID NO: 16003 - DNA, 25 bp, Homo sapien
ttggccaggttgctacctggtgcac

SEQ ID NO: 16004 - DNA, 25 bp, Homo sapien
aagacatggaatcaatgtagatgcc

SEQ ID NO: 16005 - DNA, 25 bp, Homo sapien
attggatattatgctcactacctga

SEQ ID NO: 16006 - DNA, 25 bp, Homo sapien
tcattggtattgtaagatcagcgtc

SEQ ID NO: 16007 - DNA, 25 bp, Homo sapien
atgctggaaacatgtggacataaag

SEQ ID NO: 16008 - DNA, 25 bp, Homo sapien
cctgagtgatgggatcattggtatt

SEQ ID NO: 16009 - DNA, 25 bp, Homo sapien
aagatcagcgtcatgcaatacaccc

SEQ ID NO: 16010 - DNA, 25 bp, Homo sapien
cataaagataggaaaaataggcttc

SEQ ID NO: 16011 - DNA, 25 bp, Homo sapien
acatactctcacgtataagtgggag

SEQ ID NO: 16012 - DNA, 25 bp, Homo sapien
ataggcttcgaattaagagagcagg

SEQ ID NO: 16013 - DNA, 25 bp, Homo sapien
aaaatatggctcatggtagtggaag

SEQ ID NO: 16014 - DNA, 25 bp, Homo sapien
atgtagatgcctatcaacagtgttc

SEQ ID NO: 16015 - DNA, 25 bp, Homo sapien
taggtcaagagcgaccacgtagttt

SEQ ID NO: 16016 - DNA, 25 bp, Homo sapien
aagagcgaccacgtagtttactgcc

SEQ ID NO: 16017 - DNA, 25 bp, Homo sapien
ctggttatcccgtaggtcaagagcg

SEQ ID NO: 16018 - DNA, 25 bp, Homo sapien
atgagcatggaaaactggttatccc

SEQ ID NO: 16019 - DNA, 25 bp, Homo sapien
gggcatgagcatggaaaactggtta

SEQ ID NO: 16020 - DNA, 25 bp, Homo sapien
actttagtgaaagcgcgggctagct

SEQ ID NO: 16021 - DNA, 25 bp, Homo sapien
taaactttagtgaaagcgcgggcta

SEQ ID NO: 16022 - DNA, 25 bp, Homo sapien
gcatgagcatggaaaactggttatc

SEQ ID NO: 16023 - DNA, 25 bp, Homo sapien
gtcaagagcgaccacgtagtttact

SEQ ID NO: 16024 - DNA, 25 bp, Homo sapien
ttatcccgtaggtcaagagcgacca

SEQ ID NO: 16025 - DNA, 25 bp, Homo sapien
ccacgtagtttactgcccaaagcag

SEQ ID NO: 16026 - DNA, 25 bp, Homo sapien
cctagggtaggctgaataactctcc

SEQ ID NO: 16027 - DNA, 25 bp, Homo sapien
atcacaagcgtcctttaagagggag

SEQ ID NO: 16028 - DNA, 25 bp, Homo sapien
ctcagtgttactaatggcaaatttt

SEQ ID NO: 16029 - DNA, 25 bp, Homo sapien
acagggactctgtagatgtaactga

SEQ ID NO: 16030 - DNA, 25 bp, Homo sapien
gcgctagacagtgctgatggttgca

SEQ ID NO: 16031 - DNA, 25 bp, Homo sapien
cagaaagcattctggtggctgccaa

SEQ ID NO: 16032 - DNA, 25 bp, Homo sapien
agtccttcatggatacggggtttcc

SEQ ID NO: 16033 - DNA, 25 bp, Homo sapien
gatgttgagatgaagagattaccca

SEQ ID NO: 16034 - DNA, 25 bp, Homo sapien
tcagaagggccctgagatacaccac

SEQ ID NO: 16035 - DNA, 25 bp, Homo sapien
taaagcaacagaattcaacgtgtcc

SEQ ID NO: 16036 - DNA, 25 bp, Homo sapien
atgaaaaagttctggcgctagacag

SEQ ID NO: 16037 - DNA, 25 bp, Homo sapien
caatgacagaggtacaaatgatgct

SEQ ID NO: 16038 - DNA, 25 bp, Homo sapien
ttatcaggtgcatatgtgtttactc

SEQ ID NO: 16039 - DNA, 25 bp, Homo sapien
gaggcagattcatacaaagctagac

SEQ ID NO: 16040 - DNA, 25 bp, Homo sapien
aatgtaaaagcatgccagaaagtca

SEQ ID NO: 16041 - DNA, 25 bp, Homo sapien
tatgaccctgaacataggatctttt

SEQ ID NO: 16042 - DNA, 25 bp, Homo sapien
catgccagaaagtcattaagtgcta

SEQ ID NO: 16043 - DNA, 25 bp, Homo sapien
tcttgcaagggtattaccaaaaaca

SEQ ID NO: 16044 - DNA, 25 bp, Homo sapien
aaatgatgctcacttagaatgaggc

SEQ ID NO: 16045 - DNA, 25 bp, Homo sapien
tttagcctcgaaatgtagaagtcat

SEQ ID NO: 16046 - DNA, 25 bp, Homo sapien
gtgaaggatccaaccaatggagaat

SEQ ID NO: 16047 - DNA, 25 bp, Homo sapien
caatgtaagcaaacagtgaaggatc

SEQ ID NO: 16048 - DNA, 25 bp, Homo sapien
acctaggggttgtggaaatgttcta

SEQ ID NO: 16049 - DNA, 25 bp, Homo sapien
gtgctccctctgaaaaccaggtctc

SEQ ID NO: 16050 - DNA, 25 bp, Homo sapien
tggggtattggggattagtacttca

SEQ ID NO: 16051 - DNA, 25 bp, Homo sapien
ttaggggcctactctactccagtgt

SEQ ID NO: 16052 - DNA, 25 bp, Homo sapien
aaactcttgagaagacaaaacccaa

SEQ ID NO: 16053 - DNA, 25 bp, Homo sapien
acagaaccaggcagacatataacta

SEQ ID NO: 16054 - DNA, 25 bp, Homo sapien
agtggcctgccgtccttgatgtcct

SEQ ID NO: 16055 - DNA, 25 bp, Homo sapien
gcctccgtggtcacatggcattctc

SEQ ID NO: 16056 - DNA, 25 bp, Homo sapien
accagtgatattgcattaggggcct

SEQ ID NO: 16057 - DNA, 25 bp, Homo sapien
ggtggctggccctaacagctctctg

SEQ ID NO: 16058 - DNA, 25 bp, Homo sapien
tccctggcttttggcagtggcctgc

SEQ ID NO: 16059 - DNA, 25 bp, Homo sapien
tgcaagaatggcctacctaccacag

SEQ ID NO: 16060 - DNA, 25 bp, Homo sapien
tgctgttggtctctggctgctctga

SEQ ID NO: 16061 - DNA, 25 bp, Homo sapien
gtagcctacagaacctgagccaatc

SEQ ID NO: 16062 - DNA, 25 bp, Homo sapien
tgccttccgacatgattgaaagctt

SEQ ID NO: 16063 - DNA, 25 bp, Homo sapien
tccctgttgaagagggcaatatagc

SEQ ID NO: 16064 - DNA, 25 bp, Homo sapien
gtgccatgcttcctgtgtagcctac

SEQ ID NO: 16065 - DNA, 25 bp, Homo sapien
ctgggaaacagtctgtggcatcttc

SEQ ID NO: 16066 - DNA, 25 bp, Homo sapien
atagcttggatgtcccgctctggtc

SEQ ID NO: 16067 - DNA, 25 bp, Homo sapien
ttgctgtgcgacacatgggctcctc

SEQ ID NO: 16068 - DNA, 25 bp, Homo sapien
cgctctggtctcatgtggggatgta

SEQ ID NO: 16069 - DNA, 25 bp, Homo sapien
tccttgtgatagtcagtgagctctc

SEQ ID NO: 16070 - DNA, 25 bp, Homo sapien
atatcttgacaattgtgaatcttgc

SEQ ID NO: 16071 - DNA, 25 bp, Homo sapien
gtcttccagttctatccatgttgca

SEQ ID NO: 16072 - DNA, 25 bp, Homo sapien
ttcacagtgctgtactaacatacat

SEQ ID NO: 16073 - DNA, 25 bp, Homo sapien
ggtatttactcaggagtgggattgc

SEQ ID NO: 16074 - DNA, 25 bp, Homo sapien
aagccatttcaactgggatgagatt

SEQ ID NO: 16075 - DNA, 25 bp, Homo sapien
agagggcagataccactctgatgta

SEQ ID NO: 16076 - DNA, 25 bp, Homo sapien
tgctggctcatatggtggctctata

SEQ ID NO: 16077 - DNA, 25 bp, Homo sapien
ccaacagtgtacgagtgtttctctt

SEQ ID NO: 16078 - DNA, 25 bp, Homo sapien
tgttgcagcaaatgaaaggactttt

SEQ ID NO: 16079 - DNA, 25 bp, Homo sapien
ttcaactgggatgagattatacctc

SEQ ID NO: 16080 - DNA, 25 bp, Homo sapien
actgatggacacttacgttgatacc

SEQ ID NO: 16081 - DNA, 25 bp, Homo sapien
ttacccagacttactggtagattat

SEQ ID NO: 16082 - DNA, 25 bp, Homo sapien
tgtgggacctcttttcctatgatca

SEQ ID NO: 16083 - DNA, 25 bp, Homo sapien
ttgccacttggttatgttcactttg

SEQ ID NO: 16084 - DNA, 25 bp, Homo sapien
ttgaccttttatgaagtactagcat

SEQ ID NO: 16085 - DNA, 25 bp, Homo sapien
gtatgtggtcctcttaaattagttc

SEQ ID NO: 16086 - DNA, 25 bp, Homo sapien
atagtagttactaaatcagtacgaa

SEQ ID NO: 16087 - DNA, 25 bp, Homo sapien
catagttttgggcaggttatgtttt

SEQ ID NO: 16088 - DNA, 25 bp, Homo sapien
ttatgtttttcctcgtatgtggtcc

SEQ ID NO: 16089 - DNA, 25 bp, Homo sapien
caaagcgccggtattaaagaagtga

SEQ ID NO: 16090 - DNA, 25 bp, Homo sapien
aatcagtacgaaatatttttgccac

SEQ ID NO: 16091 - DNA, 25 bp, Homo sapien
gctatgccatagttttgggcaggtt

SEQ ID NO: 16092 - DNA, 25 bp, Homo sapien
ttgccagaagttggctcagaataac

SEQ ID NO: 16093 - DNA, 25 bp, Homo sapien
ttggctcagaataacaggcagctct

SEQ ID NO: 16094 - DNA, 25 bp, Homo sapien
attcacccagcatcttgccagaagt

SEQ ID NO: 16095 - DNA, 25 bp, Homo sapien
ctcagaataacaggcagctctccat

SEQ ID NO: 16096 - DNA, 25 bp, Homo sapien
acgaatgtcccactcatgggtggcc

SEQ ID NO: 16097 - DNA, 25 bp, Homo sapien
aatcttatgttgttcgtatcctcac

SEQ ID NO: 16098 - DNA, 25 bp, Homo sapien
tcatgggtggccctgagtcatcgta

SEQ ID NO: 16099 - DNA, 25 bp, Homo sapien
ggactggttttgacaacgatcatta

SEQ ID NO: 16100 - DNA, 25 bp, Homo sapien
cgtggctggccattacaactgctgc

SEQ ID NO: 16101 - DNA, 25 bp, Homo sapien
aaaggccaggcacggaactggtccc

SEQ ID NO: 16102 - DNA, 25 bp, Homo sapien
tgtgtggtttgtttgctggcattct

SEQ ID NO: 16103 - DNA, 25 bp, Homo sapien
ttttatgggtgaacaatggccaagt

SEQ ID NO: 16104 - DNA, 25 bp, Homo sapien
ggcccacacagaaaaggaccctgca

SEQ ID NO: 16105 - DNA, 25 bp, Homo sapien
gccagcttcaagtagggcccacaca

SEQ ID NO: 16106 - DNA, 25 bp, Homo sapien
aagcaactatgtggttcgagtgcct

SEQ ID NO: 16107 - DNA, 25 bp, Homo sapien
ccctccaaggtaacagacaaactgt

SEQ ID NO: 16108 - DNA, 25 bp, Homo sapien
atctaggtatgttgctttggcccac

SEQ ID NO: 16109 - DNA, 25 bp, Homo sapien
aaggaagcacactgcctgatgagcc

SEQ ID NO: 16110 - DNA, 25 bp, Homo sapien
aggtcatgtcattcacagcagagac

SEQ ID NO: 16111 - DNA, 25 bp, Homo sapien
gtgcgagcagccaccatctctcaga

SEQ ID NO: 16112 - DNA, 25 bp, Homo sapien
tgaccacgggacaccaagcaactat

SEQ ID NO: 16113 - DNA, 25 bp, Homo sapien
catcctcaccagaaagaaggaagca

SEQ ID NO: 16114 - DNA, 25 bp, Homo sapien
catgcccggccctcgataaaattct

SEQ ID NO: 16115 - DNA, 25 bp, Homo sapien
atcttgaggtaggtggcccggcaca

SEQ ID NO: 16116 - DNA, 25 bp, Homo sapien
ccatgagatgggctattagaatctt

SEQ ID NO: 16117 - DNA, 25 bp, Homo sapien
ttacagcaaaggacaagagcccatg

SEQ ID NO: 16118 - DNA, 25 bp, Homo sapien
tattagaatcttgaggtaggtggcc

SEQ ID NO: 16119 - DNA, 25 bp, Homo sapien
acaagagcccatgagatgggctatt

SEQ ID NO: 16120 - DNA, 25 bp, Homo sapien
ttcttacagcaaaggacaagagccc

SEQ ID NO: 16121 - DNA, 25 bp, Homo sapien
taaaattcttacagcaaaggacaag

SEQ ID NO: 16122 - DNA, 25 bp, Homo sapien
agcaaaggacaagagcccatgagat

SEQ ID NO: 16123 - DNA, 25 bp, Homo sapien
atgggctattagaatcttgaggtag

SEQ ID NO: 16124 - DNA, 25 bp, Homo sapien
aattcttacagcaaaggacaagagc

SEQ ID NO: 16125 - DNA, 25 bp, Homo sapien
aaccacgcggacatttgcaggcaca

SEQ ID NO: 16126 - DNA, 25 bp, Homo sapien
aagcaagtaaacatcctagcacagt

SEQ ID NO: 16127 - DNA, 25 bp, Homo sapien
ccggttcaggacagtacacagtaca

SEQ ID NO: 16128 - DNA, 25 bp, Homo sapien
aagcatggctgtatttaaaggacac

SEQ ID NO: 16129 - DNA, 25 bp, Homo sapien
ttaaaggacacatggtctgttcagg

SEQ ID NO: 16130 - DNA, 25 bp, Homo sapien
ttgagtccacataaagtgacagtcc

SEQ ID NO: 16131 - DNA, 25 bp, Homo sapien
aaaacagaaggagctcaaacaattg

SEQ ID NO: 16132 - DNA, 25 bp, Homo sapien
ttgagtgacacattagtaaaattcc

SEQ ID NO: 16133 - DNA, 25 bp, Homo sapien
acagtccgtttctaaaagcatggct

SEQ ID NO: 16134 - DNA, 25 bp, Homo sapien
tacacttgaaggaattgcagcactc

SEQ ID NO: 16135 - DNA, 25 bp, Homo sapien
aaagttaggaatgaaagccggttca

SEQ ID NO: 16136 - DNA, 25 bp, Homo sapien
tagctaggtgtgatgctacacactt

SEQ ID NO: 16137 - DNA, 25 bp, Homo sapien
atgatcacaacactgcaaaccagcc

SEQ ID NO: 16138 - DNA, 25 bp, Homo sapien
ttaagatgggctgatcactggatct

SEQ ID NO: 16139 - DNA, 25 bp, Homo sapien
tataaaaaataccactgaggaacac

SEQ ID NO: 16140 - DNA, 25 bp, Homo sapien
tggcaacgcggcaaaactgtctcaa

SEQ ID NO: 16141 - DNA, 25 bp, Homo sapien
agagaatcttctgagtttgagaaac

SEQ ID NO: 16142 - DNA, 25 bp, Homo sapien
tcaggactttgagaggttaagatgg

SEQ ID NO: 16143 - DNA, 25 bp, Homo sapien
taccactgaggaacacataaaacaa

SEQ ID NO: 16144 - DNA, 25 bp, Homo sapien
tgaaatttaaggcaataaaccaaca

SEQ ID NO: 16145 - DNA, 25 bp, Homo sapien
tgagaggctgaaatgagagaatctt

SEQ ID NO: 16146 - DNA, 25 bp, Homo sapien
ttatagaaactatgcaaaacaagat

SEQ ID NO: 16147 - DNA, 25 bp, Homo sapien
tgactcacaacagggctaaagtgat

SEQ ID NO: 16148 - DNA, 25 bp, Homo sapien
gctggcaggttggtaacaatagcta

SEQ ID NO: 16149 - DNA, 25 bp, Homo sapien
taaactctcaagaaatgggacaaac

SEQ ID NO: 16150 - DNA, 25 bp, Homo sapien
gaaggtgtaaggtgaaatctgtcta

SEQ ID NO: 16151 - DNA, 25 bp, Homo sapien
atagcccggcagttaacttccatgc

SEQ ID NO: 16152 - DNA, 25 bp, Homo sapien
ttgctcaaggacgtaagatgaagaa

SEQ ID NO: 16153 - DNA, 25 bp, Homo sapien
ctgggaagtgaagaaacttgctcaa

SEQ ID NO: 16154 - DNA, 25 bp, Homo sapien
tgagcagcagcctttatattagttt

SEQ ID NO: 16155 - DNA, 25 bp, Homo sapien
gtcctgcagaatgcttgcagacatc

SEQ ID NO: 16156 - DNA, 25 bp, Homo sapien
gatccttgaggacacaatgacattt

SEQ ID NO: 16157 - DNA, 25 bp, Homo sapien
caaacataagttgtgctggcaggtt

SEQ ID NO: 16158 - DNA, 25 bp, Homo sapien
gcctgagctagtaggaatactgaat

SEQ ID NO: 16159 - DNA, 25 bp, Homo sapien
cataaaaaatagaacgcagtacact

SEQ ID NO: 16160 - DNA, 25 bp, Homo sapien
ctacaggctgttcttaggtgcacac

SEQ ID NO: 16161 - DNA, 25 bp, Homo sapien
aacaccatgaagacactgcctggga

SEQ ID NO: 16162 - DNA, 25 bp, Homo sapien
ccagagcttcttgggtgattgtttc

SEQ ID NO: 16163 - DNA, 25 bp, Homo sapien
tactgcacgaacaaaccagagcttc

SEQ ID NO: 16164 - DNA, 25 bp, Homo sapien
aaaaaagtaaagacaagctatctgt

SEQ ID NO: 16165 - DNA, 25 bp, Homo sapien
ttgagaatcaaaatcagcgttctgc

SEQ ID NO: 16166 - DNA, 25 bp, Homo sapien
gtgtgacctaagctactgcacgaac

SEQ ID NO: 16167 - DNA, 25 bp, Homo sapien
acgcagtacacttatgagagacaca

SEQ ID NO: 16168 - DNA, 25 bp, Homo sapien
acacagtatataggtctacaggctg

SEQ ID NO: 16169 - DNA, 25 bp, Homo sapien
aggcactgtgtaaagttatttgcac

SEQ ID NO: 16170 - DNA, 25 bp, Homo sapien
catttctgtgtgaacttggtaaaaa

SEQ ID NO: 16171 - DNA, 25 bp, Homo sapien
gaaagggattattatcattatgtcc

SEQ ID NO: 16172 - DNA, 25 bp, Homo sapien
ctcaaagagtacagtgcatactttc

SEQ ID NO: 16173 - DNA, 25 bp, Homo sapien
acaacagccttaaatgaaagggatt

SEQ ID NO: 16174 - DNA, 25 bp, Homo sapien
aacatgtccactatactcctgatct

SEQ ID NO: 16175 - DNA, 25 bp, Homo sapien
attagccttagaaacaaatactagt

SEQ ID NO: 16176 - DNA, 25 bp, Homo sapien
actagttaataggtagcaagcattt

SEQ ID NO: 16177 - DNA, 25 bp, Homo sapien
aacttcctcaaagagtacagtgcat

SEQ ID NO: 16178 - DNA, 25 bp, Homo sapien
acaatggtcctaaaaagcatctcta

SEQ ID NO: 16179 - DNA, 25 bp, Homo sapien
cttgcaatcaattctaggacttaaa

SEQ ID NO: 16180 - DNA, 25 bp, Homo sapien
ttccacctcaagattggggtccttg

SEQ ID NO: 16181 - DNA, 25 bp, Homo sapien
tggtcctggcaactcctccagactt

SEQ ID NO: 16182 - DNA, 25 bp, Homo sapien
ttctctctggtcctggcaactcctc

SEQ ID NO: 16183 - DNA, 25 bp, Homo sapien
actttccacctcaagattggggtcc

SEQ ID NO: 16184 - DNA, 25 bp, Homo sapien
gacttttggcaacaacatagatgtc

SEQ ID NO: 16185 - DNA, 25 bp, Homo sapien
tccaggccggcctcaccacctcctt

SEQ ID NO: 16186 - DNA, 25 bp, Homo sapien
ccacctcaagattggggtccttgac

SEQ ID NO: 16187 - DNA, 25 bp, Homo sapien
tttggcaacaacatagatgtcacat

SEQ ID NO: 16188 - DNA, 25 bp, Homo sapien
cttttggcaacaacatagatgtcac

SEQ ID NO: 16189 - DNA, 25 bp, Homo sapien
ctttccacctcaagattggggtcct

SEQ ID NO: 16190 - DNA, 25 bp, Homo sapien
tggcaacaacatagatgtcacattc

SEQ ID NO: 16191 - DNA, 25 bp, Homo sapien
catactggtgttgagagaagccaca

SEQ ID NO: 16192 - DNA, 25 bp, Homo sapien
agcagacacctcactggtacctggt

SEQ ID NO: 16193 - DNA, 25 bp, Homo sapien
tgatgacatgcagaattccttagct

SEQ ID NO: 16194 - DNA, 25 bp, Homo sapien
cactctggcgatcacattttattgc

SEQ ID NO: 16195 - DNA, 25 bp, Homo sapien
ttcccatctatgtcaatgcccagca

SEQ ID NO: 16196 - DNA, 25 bp, Homo sapien
tccttagctgacaggtgatggggac

SEQ ID NO: 16197 - DNA, 25 bp, Homo sapien
atcctccttggacatactggtgttg

SEQ ID NO: 16198 - DNA, 25 bp, Homo sapien
gacaaagagcagacacctcactggt

SEQ ID NO: 16199 - DNA, 25 bp, Homo sapien
ttacaaggttttcactctggcgatc

SEQ ID NO: 16200 - DNA, 25 bp, Homo sapien
aagcaataaaaatgcatcctccttg

SEQ ID NO: 16201 - DNA, 25 bp, Homo sapien
attgcactgatgacatgcagaattc

SEQ ID NO: 16202 - DNA, 25 bp, Homo sapien
aagtttccatattaatctacattat

SEQ ID NO: 16203 - DNA, 25 bp, Homo sapien
ataatgtagattaatatggaaactt

SEQ ID NO: 16204 - DNA, 25 bp, Homo sapien
attaagtttccatattaatctacat

SEQ ID NO: 16205 - DNA, 25 bp, Homo sapien
atgtagattaatatggaaacttaat

SEQ ID NO: 16206 - DNA, 25 bp, Homo sapien
aaaataatacacactaagcactggg

SEQ ID NO: 16207 - DNA, 25 bp, Homo sapien
atcccaaaagggctgtaaagaaaca

SEQ ID NO: 16208 - DNA, 25 bp, Homo sapien
tccgcccaggtccagtgagcagtaa

SEQ ID NO: 16209 - DNA, 25 bp, Homo sapien
tagtcccgatttcacaccatcaggc

SEQ ID NO: 16210 - DNA, 25 bp, Homo sapien
cccagagacaaagggctgaacttga

SEQ ID NO: 16211 - DNA, 25 bp, Homo sapien
ccagtgagcagtaattgtcagctac

SEQ ID NO: 16212 - DNA, 25 bp, Homo sapien
gcccggctaatgaagcatagctgac

SEQ ID NO: 16213 - DNA, 25 bp, Homo sapien
ttgaagccagagaataaacagttaa

SEQ ID NO: 16214 - DNA, 25 bp, Homo sapien
accatcaggctgaactgaaaacaaa

SEQ ID NO: 16215 - DNA, 25 bp, Homo sapien
ttgcctgctgtgtggtcttctacaa

SEQ ID NO: 16216 - DNA, 25 bp, Homo sapien
ctggaaaatgggaattataatagtc

SEQ ID NO: 16217 - DNA, 25 bp, Homo sapien
accagacttttagacacccagggca

SEQ ID NO: 16218 - DNA, 25 bp, Homo sapien
gggcagtacaatccagcaaccgttt

SEQ ID NO: 16219 - DNA, 25 bp, Homo sapien
aaggcacaggcagcgtaattcacat

SEQ ID NO: 16220 - DNA, 25 bp, Homo sapien
tccgcggcttcctctaaggcacagg

SEQ ID NO: 16221 - DNA, 25 bp, Homo sapien
tggtcctccttaggaaggcttattc

SEQ ID NO: 16222 - DNA, 25 bp, Homo sapien
ttcagaactactcaaaggaagaaag

SEQ ID NO: 16223 - DNA, 25 bp, Homo sapien
ttcctctaaggcacaggcagcgtaa

SEQ ID NO: 16224 - DNA, 25 bp, Homo sapien
aaacagaaagcatggtgtactacta

SEQ ID NO: 16225 - DNA, 25 bp, Homo sapien
tttagacacccagggcagtacaatc

SEQ ID NO: 16226 - DNA, 25 bp, Homo sapien
ttccaaagattcttatctggtcctc

SEQ ID NO: 16227 - DNA, 25 bp, Homo sapien
tttaaagtaaacagaaagcatggtg

SEQ ID NO: 16228 - DNA, 25 bp, Homo sapien
acgtgctctgtaagtccctctaatt

SEQ ID NO: 16229 - DNA, 25 bp, Homo sapien
agagactggttgtcaccattttccc

SEQ ID NO: 16230 - DNA, 25 bp, Homo sapien
ttctttcacatggagtcaggtccct

SEQ ID NO: 16231 - DNA, 25 bp, Homo sapien
ttgctacgtgctctgtaagtccctc

SEQ ID NO: 16232 - DNA, 25 bp, Homo sapien
caggctggtgcacttgagttctttc

SEQ ID NO: 16233 - DNA, 25 bp, Homo sapien
tttgtagagactggttgtcaccatt

SEQ ID NO: 16234 - DNA, 25 bp, Homo sapien
cacatggagtcaggtcccttgctac

SEQ ID NO: 16235 - DNA, 25 bp, Homo sapien
tctcgcctcagtcctacaagttgct

SEQ ID NO: 16236 - DNA, 25 bp, Homo sapien
tggccaggctggtgcacttgagttc

SEQ ID NO: 16237 - DNA, 25 bp, Homo sapien
gagtcaggtcccttgctacgtgctc

SEQ ID NO: 16238 - DNA, 25 bp, Homo sapien
ctcagtcctacaagttgctgggcct

SEQ ID NO: 16239 - DNA, 25 bp, Homo sapien
gaagctggacgtgaacactctgctt

SEQ ID NO: 16240 - DNA, 25 bp, Homo sapien
caccaggagttttaccttgttaaca

SEQ ID NO: 16241 - DNA, 25 bp, Homo sapien
cttttcctgttaaggctgagaagga

SEQ ID NO: 16242 - DNA, 25 bp, Homo sapien
accttaatcatgtaagttatctgac

SEQ ID NO: 16243 - DNA, 25 bp, Homo sapien
gaaggaagctggacgtgaacactct

SEQ ID NO: 16244 - DNA, 25 bp, Homo sapien
aatcatgtaagttatctgacaggag

SEQ ID NO: 16245 - DNA, 25 bp, Homo sapien
ggaagctggacgtgaacactctgct

SEQ ID NO: 16246 - DNA, 25 bp, Homo sapien
catgtaagttatctgacaggaggag

SEQ ID NO: 16247 - DNA, 25 bp, Homo sapien
ggacgtgaacactctgctttactct

SEQ ID NO: 16248 - DNA, 25 bp, Homo sapien
agctggacgtgaacactctgcttta

SEQ ID NO: 16249 - DNA, 25 bp, Homo sapien
tgagaaggaagctggacgtgaacac

SEQ ID NO: 16250 - DNA, 25 bp, Homo sapien
taatcatgtaagttatctgacagga

SEQ ID NO: 16251 - DNA, 25 bp, Homo sapien
gaagctggacgtgaacactctgctt

SEQ ID NO: 16252 - DNA, 25 bp, Homo sapien
caccaggagttttaccttgttaaca

SEQ ID NO: 16253 - DNA, 25 bp, Homo sapien
tcatgtaagttatctgacaggagga

SEQ ID NO: 16254 - DNA, 25 bp, Homo sapien
tcaaaatgaacatgcatggtgtccc

SEQ ID NO: 16255 - DNA, 25 bp, Homo sapien
cttttcctgttaaggctgagaagga

SEQ ID NO: 16256 - DNA, 25 bp, Homo sapien
tgagaaggaagctggacgtgaacac

SEQ ID NO: 16257 - DNA, 25 bp, Homo sapien
agctggacgtgaacactctgcttta

SEQ ID NO: 16258 - DNA, 25 bp, Homo sapien
ggacgtgaacactctgctttactct

SEQ ID NO: 16259 - DNA, 25 bp, Homo sapien
gaaggaagctggacgtgaacactct

SEQ ID NO: 16260 - DNA, 25 bp, Homo sapien
catggtgtcccagtcttctagatct

SEQ ID NO: 16261 - DNA, 25 bp, Homo sapien
gatgtgagtacatttttcttggccc

SEQ ID NO: 16262 - DNA, 25 bp, Homo sapien
atcccttggtgtataagagagcaac

SEQ ID NO: 16263 - DNA, 25 bp, Homo sapien
ctcaaaatgtagtctggggactcct

SEQ ID NO: 16264 - DNA, 25 bp, Homo sapien
atttgcaaggctactctctccatta

SEQ ID NO: 16265 - DNA, 25 bp, Homo sapien
cccatgtctgtgcacttgagctttc

SEQ ID NO: 16266 - DNA, 25 bp, Homo sapien
ttctgggaggtctgtgagatcaaaa

SEQ ID NO: 16267 - DNA, 25 bp, Homo sapien
acttgttgatcatagatgtgagtac

SEQ ID NO: 16268 - DNA, 25 bp, Homo sapien
cacaacagattgaatgagaaatgga

SEQ ID NO: 16269 - DNA, 25 bp, Homo sapien
cagacattaaggagatttgcaaggc

SEQ ID NO: 16270 - DNA, 25 bp, Homo sapien
tggtgtataagagagcaacagttct

SEQ ID NO: 16271 - DNA, 25 bp, Homo sapien
agattgaatgagaaatggagaatcc

SEQ ID NO: 16272 - DNA, 25 bp, Homo sapien
acgctgtaggatgtatgagaatttc

SEQ ID NO: 16273 - DNA, 25 bp, Homo sapien
tcatccactgatgggcattagggtt

SEQ ID NO: 16274 - DNA, 25 bp, Homo sapien
tggccaccgtgactcatgctgctat

SEQ ID NO: 16275 - DNA, 25 bp, Homo sapien
ctaagtacttcatacaagtaggatc

SEQ ID NO: 16276 - DNA, 25 bp, Homo sapien
caagtaggatcatacagtgtctgtc

SEQ ID NO: 16277 - DNA, 25 bp, Homo sapien
acacgggtgttcaggtatctatgca

SEQ ID NO: 16278 - DNA, 25 bp, Homo sapien
agacacaggccaccatcattgacta

SEQ ID NO: 16279 - DNA, 25 bp, Homo sapien
atctatgcaactcctggctgcggtt

SEQ ID NO: 16280 - DNA, 25 bp, Homo sapien
ttctaagtccatccacgctgtagga

SEQ ID NO: 16281 - DNA, 25 bp, Homo sapien
atgggcattagggttgcttccacct

SEQ ID NO: 16282 - DNA, 25 bp, Homo sapien
accaaacccagctgaattagaatat

SEQ ID NO: 16283 - DNA, 25 bp, Homo sapien
agaggatgtcctcacaaagacttgt

SEQ ID NO: 16284 - DNA, 25 bp, Homo sapien
gctgacatgagattactgctaattt

SEQ ID NO: 16285 - DNA, 25 bp, Homo sapien
tatggactataaagtagctgacatg

SEQ ID NO: 16286 - DNA, 25 bp, Homo sapien
gtgaaatactcagaaaaggcaaatc

SEQ ID NO: 16287 - DNA, 25 bp, Homo sapien
actacagatacatgcgacaacacag

SEQ ID NO: 16288 - DNA, 25 bp, Homo sapien
ggtgaagagtaaataggtgtttgct

SEQ ID NO: 16289 - DNA, 25 bp, Homo sapien
aatagtcaatctaggtgaagagtaa

SEQ ID NO: 16290 - DNA, 25 bp, Homo sapien
accacaaaaacacgttcagtgagag

SEQ ID NO: 16291 - DNA, 25 bp, Homo sapien
gaacagcaggcaaatgttaatagtc

SEQ ID NO: 16292 - DNA, 25 bp, Homo sapien
aaaaactagaaatgatccaaatccc

SEQ ID NO: 16293 - DNA, 25 bp, Homo sapien
tgagagaagctagtcacaaaagact

SEQ ID NO: 16294 - DNA, 25 bp, Homo sapien
atgccagtacatacagatacacgta

SEQ ID NO: 16295 - DNA, 25 bp, Homo sapien
attcagaaagtacaccacctcggct

SEQ ID NO: 16296 - DNA, 25 bp, Homo sapien
ccaggtacgtacacttttgccatca

SEQ ID NO: 16297 - DNA, 25 bp, Homo sapien
ctgtgaaaaggtgatctgaaagatt

SEQ ID NO: 16298 - DNA, 25 bp, Homo sapien
acctcggctatggagaataaaccac

SEQ ID NO: 16299 - DNA, 25 bp, Homo sapien
ttctagttaccagatgtacattcag

SEQ ID NO: 16300 - DNA, 25 bp, Homo sapien
actctgacactgtgaaaaggtgatc

SEQ ID NO: 16301 - DNA, 25 bp, Homo sapien
ccttcaatagcactgttgcattggc

SEQ ID NO: 16302 - DNA, 25 bp, Homo sapien
tcagatcaaaatgccttggtgaaaa

SEQ ID NO: 16303 - DNA, 25 bp, Homo sapien
ctgaaagatttcaaaatggggaatt

SEQ ID NO: 16304 - DNA, 25 bp, Homo sapien
atgccttggtgaaaacaacattcaa

SEQ ID NO: 16305 - DNA, 25 bp, Homo sapien
ggatgcttccatacccaaggttatc

SEQ ID NO: 16306 - DNA, 25 bp, Homo sapien
cattgtctggttgtaccaagtttac

SEQ ID NO: 16307 - DNA, 25 bp, Homo sapien
ttctaagtaacataatgcggcaaat

SEQ ID NO: 16308 - DNA, 25 bp, Homo sapien
gtatgctatagaaagaaaatcagac

SEQ ID NO: 16309 - DNA, 25 bp, Homo sapien
tcctctggaagacatcttggatgct

SEQ ID NO: 16310 - DNA, 25 bp, Homo sapien
ttcaaagataaccaaagataacagg

SEQ ID NO: 16311 - DNA, 25 bp, Homo sapien
cataatgcggcaaataaaacatata

SEQ ID NO: 16312 - DNA, 25 bp, Homo sapien
ctgggtccagccgaatcatttcttt

SEQ ID NO: 16313 - DNA, 25 bp, Homo sapien
tataaaagagtgttcaaagataacc

SEQ ID NO: 16314 - DNA, 25 bp, Homo sapien
atagaaagaaaatcagacaagtaat

SEQ ID NO: 16315 - DNA, 25 bp, Homo sapien
taacaggtgggcacaaataatgtat

SEQ ID NO: 16316 - DNA, 25 bp, Homo sapien
ttatggaaaactggatgtttttgat

SEQ ID NO: 16317 - DNA, 25 bp, Homo sapien
tctgcttcttagtgtgtcttataat

SEQ ID NO: 16318 - DNA, 25 bp, Homo sapien
ttgagtatggttcacacttttctgc

SEQ ID NO: 16319 - DNA, 25 bp, Homo sapien
ctcccttgagtatggttcacacttt

SEQ ID NO: 16320 - DNA, 25 bp, Homo sapien
gtttttgataatacagcaattccga

SEQ ID NO: 16321 - DNA, 25 bp, Homo sapien
gataatacagcaattccgattctaa

SEQ ID NO: 16322 - DNA, 25 bp, Homo sapien
cccttgagtatggttcacacttttc

SEQ ID NO: 16323 - DNA, 25 bp, Homo sapien
cttttctgcttcttagtgtgtctta

SEQ ID NO: 16324 - DNA, 25 bp, Homo sapien
tttgataatacagcaattccgattc

SEQ ID NO: 16325 - DNA, 25 bp, Homo sapien
ttctcccttgagtatggttcacact

SEQ ID NO: 16326 - DNA, 25 bp, Homo sapien
actggatgtttttgataatacagca

SEQ ID NO: 16327 - DNA, 25 bp, Homo sapien
tgtggagagcaaaatatagtaaata

SEQ ID NO: 16328 - DNA, 25 bp, Homo sapien
ttggttctttaatacagtggctgtc

SEQ ID NO: 16329 - DNA, 25 bp, Homo sapien
aagtgagctcatgtggagagcaaaa

SEQ ID NO: 16330 - DNA, 25 bp, Homo sapien
ctgcatgacatcatctgatagatac

SEQ ID NO: 16331 - DNA, 25 bp, Homo sapien
atacagtggctgtctgctaaatcta

SEQ ID NO: 16332 - DNA, 25 bp, Homo sapien
aaagtgtgtgttagcaattctgcat

SEQ ID NO: 16333 - DNA, 25 bp, Homo sapien
atctgatagatacaagaaagattgt

SEQ ID NO: 16334 - DNA, 25 bp, Homo sapien
atagggcctctcagagtttatttcc

SEQ ID NO: 16335 - DNA, 25 bp, Homo sapien
ttgcaattatccagaaagtgagctc

SEQ ID NO: 16336 - DNA, 25 bp, Homo sapien
gttgtgtcaagtaagttaagcctcc

SEQ ID NO: 16337 - DNA, 25 bp, Homo sapien
tgagaaagtcttacatcaaaaagtg

SEQ ID NO: 16338 - DNA, 25 bp, Homo sapien
attactgttgctttagaataactcc

SEQ ID NO: 16339 - DNA, 25 bp, Homo sapien
gaagttgtttggctactctaggtcc

SEQ ID NO: 16340 - DNA, 25 bp, Homo sapien
ttactgccagtaatatacgggagat

SEQ ID NO: 16341 - DNA, 25 bp, Homo sapien
tttacattctggacacaaatcctat

SEQ ID NO: 16342 - DNA, 25 bp, Homo sapien
gtaaaatgtctgttgatgtctttcc

SEQ ID NO: 16343 - DNA, 25 bp, Homo sapien
ttcagcatagttgtcagaatttgat

SEQ ID NO: 16344 - DNA, 25 bp, Homo sapien
ctctaggtcctttgaagttctacaa

SEQ ID NO: 16345 - DNA, 25 bp, Homo sapien
cctaatggttaatgatgttagaaca

SEQ ID NO: 16346 - DNA, 25 bp, Homo sapien
tacgggagataaagtttttcagcat

SEQ ID NO: 16347 - DNA, 25 bp, Homo sapien
attagtcgtctaacttggttcttct

SEQ ID NO: 16348 - DNA, 25 bp, Homo sapien
taagtggactctttggtaaaatgtc

SEQ ID NO: 16349 - DNA, 25 bp, Homo sapien
caataagggaatagcccaataaaaa

SEQ ID NO: 16350 - DNA, 25 bp, Homo sapien
atacagttaacaaaatactcctgac

SEQ ID NO: 16351 - DNA, 25 bp, Homo sapien
agccacagacaaaacacttgcaaaa

SEQ ID NO: 16352 - DNA, 25 bp, Homo sapien
tactcctgactagaatacaaagagc

SEQ ID NO: 16353 - DNA, 25 bp, Homo sapien
ccaataaaaactgggcaaaattggc

SEQ ID NO: 16354 - DNA, 25 bp, Homo sapien
ttagatctcaataagggaatagccc

SEQ ID NO: 16355 - DNA, 25 bp, Homo sapien
aaaaattaaacaggaagccacagac

SEQ ID NO: 16356 - DNA, 25 bp, Homo sapien
aaatcttaagtgacctttgcatgac

SEQ ID NO: 16357 - DNA, 25 bp, Homo sapien
atacaaagagcccttagatctcaat

SEQ ID NO: 16358 - DNA, 25 bp, Homo sapien
tcttgaatacaacacaaaaaacatc

SEQ ID NO: 16359 - DNA, 25 bp, Homo sapien
agtgacctttgcatgacaaagattt

SEQ ID NO: 16360 - DNA, 25 bp, Homo sapien
aagaggcaggaaatgttttaagtct

SEQ ID NO: 16361 - DNA, 25 bp, Homo sapien
gaggcagtctcattccgtggcccag

SEQ ID NO: 16362 - DNA, 25 bp, Homo sapien
ttgaggcagtctcattccgtggccc

SEQ ID NO: 16363 - DNA, 25 bp, Homo sapien
ttcaaaaaagttggaatgtacagta

SEQ ID NO: 16364 - DNA, 25 bp, Homo sapien
gcactggccgacttctacttaatta

SEQ ID NO: 16365 - DNA, 25 bp, Homo sapien
tcaccatccagaaacaaatattgat

SEQ ID NO: 16366 - DNA, 25 bp, Homo sapien
ccgcactggccgacttctacttaat

SEQ ID NO: 16367 - DNA, 25 bp, Homo sapien
catccagaaacaaatattgataatt

SEQ ID NO: 16368 - DNA, 25 bp, Homo sapien
agaggcaggaaatgttttaagtctc

SEQ ID NO: 16369 - DNA, 25 bp, Homo sapien
caaaaaagttggaatgtacagtaaa

SEQ ID NO: 16370 - DNA, 25 bp, Homo sapien
tttgaggcagtctcattccgtggcc

SEQ ID NO: 16371 - DNA, 25 bp, Homo sapien
actgtagctcaaactgtgtattaac

SEQ ID NO: 16372 - DNA, 25 bp, Homo sapien
ttaactattaacagcgaaattcatt

SEQ ID NO: 16373 - DNA, 25 bp, Homo sapien
gttgaccatactaatttaccgcact

SEQ ID NO: 16374 - DNA, 25 bp, Homo sapien
cacaagctagtttacacaaaaagaa

SEQ ID NO: 16375 - DNA, 25 bp, Homo sapien
atttaccgcactgcaagtgttactg

SEQ ID NO: 16376 - DNA, 25 bp, Homo sapien
atgattccaggaatagggtgagttt

SEQ ID NO: 16377 - DNA, 25 bp, Homo sapien
cttctcctctggagttcaagtgatt

SEQ ID NO: 16378 - DNA, 25 bp, Homo sapien
aagggtggactaatggttgaccata

SEQ ID NO: 16379 - DNA, 25 bp, Homo sapien
tgcaagtgttactgtagctcaaact

SEQ ID NO: 16380 - DNA, 25 bp, Homo sapien
acttctagtagaatgtctgatatgt

SEQ ID NO: 16381 - DNA, 25 bp, Homo sapien
tagcgggatctcgagtcactgcaac

SEQ ID NO: 16382 - DNA, 25 bp, Homo sapien
ctagcaccgttaggccaaaacattc

SEQ ID NO: 16383 - DNA, 25 bp, Homo sapien
ctttccataggccaacgaggtaggc

SEQ ID NO: 16384 - DNA, 25 bp, Homo sapien
acgaggtaggcactgctatccctat

SEQ ID NO: 16385 - DNA, 25 bp, Homo sapien
tgcagcagagttacagaatgatgcc

SEQ ID NO: 16386 - DNA, 25 bp, Homo sapien
aaacctattggaaatgagaaccgtc

SEQ ID NO: 16387 - DNA, 25 bp, Homo sapien
gaaatgtaagaaagagctcccttcc

SEQ ID NO: 16388 - DNA, 25 bp, Homo sapien
cccagagggctactcggctcttata

SEQ ID NO: 16389 - DNA, 25 bp, Homo sapien
caccaagccaagatgaggaataata

SEQ ID NO: 16390 - DNA, 25 bp, Homo sapien
caggcactggttgaagcacttaccc

SEQ ID NO: 16391 - DNA, 25 bp, Homo sapien
ttggaggtgctttggccctgtttac

SEQ ID NO: 16392 - DNA, 25 bp, Homo sapien
gtggtcccattacagggcccagtaa

SEQ ID NO: 16393 - DNA, 25 bp, Homo sapien
gtggaaagcgatgcaacatacatct

SEQ ID NO: 16394 - DNA, 25 bp, Homo sapien
tgatccagactaagccaatcaggct

SEQ ID NO: 16395 - DNA, 25 bp, Homo sapien
tatttactcagctagcaatggctcc

SEQ ID NO: 16396 - DNA, 25 bp, Homo sapien
acatacatcttaggggctagaaggt

SEQ ID NO: 16397 - DNA, 25 bp, Homo sapien
tggcccagagtgaacaactgatcca

SEQ ID NO: 16398 - DNA, 25 bp, Homo sapien
tccctataccggtggaaagcgatgc

SEQ ID NO: 16399 - DNA, 25 bp, Homo sapien
tggacagatccaactggcccagagt

SEQ ID NO: 16400 - DNA, 25 bp, Homo sapien
ggatgcactgatggttagtccctat

SEQ ID NO: 16401 - DNA, 25 bp, Homo sapien
agtcttccctcaagagttggccctg

SEQ ID NO: 16402 - DNA, 25 bp, Homo sapien
cataaaggtagagggagtctttatc

SEQ ID NO: 16403 - DNA, 25 bp, Homo sapien
caggaatttgtaacgaggatgcact

SEQ ID NO: 16404 - DNA, 25 bp, Homo sapien
tttctgaggctcttagttgtttact

SEQ ID NO: 16405 - DNA, 25 bp, Homo sapien
taacatgccctaataggtgaatttt

SEQ ID NO: 16406 - DNA, 25 bp, Homo sapien
atccagtactgaaatgttaaattaa

SEQ ID NO: 16407 - DNA, 25 bp, Homo sapien
ccctggtactatttcttggatactc

SEQ ID NO: 16408 - DNA, 25 bp, Homo sapien
ctagtaagtgggaagagccagaatt

SEQ ID NO: 16409 - DNA, 25 bp, Homo sapien
ttttccagatagtgaatccagtact

SEQ ID NO: 16410 - DNA, 25 bp, Homo sapien
ttttggctttccagatggcttttat

SEQ ID NO: 16411 - DNA, 25 bp, Homo sapien
ttagaccatgggtggcttaacatgc

SEQ ID NO: 16412 - DNA, 25 bp, Homo sapien
tccttagctagtaagtgggaagagc

SEQ ID NO: 16413 - DNA, 25 bp, Homo sapien
cttggatactcacagaaaccctaca

SEQ ID NO: 16414 - DNA, 25 bp, Homo sapien
tattaagaaggaagtttagaccatg

SEQ ID NO: 16415 - DNA, 25 bp, Homo sapien
ctgagccatgaacaaagagtcaagc

SEQ ID NO: 16416 - DNA, 25 bp, Homo sapien
ctttctcagggagaattgggttttc

SEQ ID NO: 16417 - DNA, 25 bp, Homo sapien
gccatgaacaaagagtcaagctacc

SEQ ID NO: 16418 - DNA, 25 bp, Homo sapien
ccatgaacaaagagtcaagctacct

SEQ ID NO: 16419 - DNA, 25 bp, Homo sapien
gagccatgaacaaagagtcaagcta

SEQ ID NO: 16420 - DNA, 25 bp, Homo sapien
agccatgaacaaagagtcaagctac

SEQ ID NO: 16421 - DNA, 25 bp, Homo sapien
ctcagggagaattgggttttcttac

SEQ ID NO: 16422 - DNA, 25 bp, Homo sapien
tgagccatgaacaaagagtcaagct

SEQ ID NO: 16423 - DNA, 25 bp, Homo sapien
gccatgaacaaagagtcaagctacc

SEQ ID NO: 16424 - DNA, 25 bp, Homo sapien
agccatgaacaaagagtcaagctac

SEQ ID NO: 16425 - DNA, 25 bp, Homo sapien
ctttctcagggagaattgggttttc

SEQ ID NO: 16426 - DNA, 25 bp, Homo sapien
ctgagccatgaacaaagagtcaagc

SEQ ID NO: 16427 - DNA, 25 bp, Homo sapien
ctcagggagaattgggttttcttac

SEQ ID NO: 16428 - DNA, 25 bp, Homo sapien
gttttacgacttgagattatctgcc

SEQ ID NO: 16429 - DNA, 25 bp, Homo sapien
ccatgaacaaagagtcaagctacct

SEQ ID NO: 16430 - DNA, 25 bp, Homo sapien
acacagctagagaaacagagtcttc

SEQ ID NO: 16431 - DNA, 25 bp, Homo sapien
gagccatgaacaaagagtcaagcta

SEQ ID NO: 16432 - DNA, 25 bp, Homo sapien
cagtcaatttttaaaggacttcagc

SEQ ID NO: 16433 - DNA, 25 bp, Homo sapien
tgagccatgaacaaagagtcaagct

SEQ ID NO: 16434 - DNA, 25 bp, Homo sapien
tagccattgccctagtgagggtgct

SEQ ID NO: 16435 - DNA, 25 bp, Homo sapien
cactcttacagtaggagaaggtagc

SEQ ID NO: 16436 - DNA, 25 bp, Homo sapien
atctgggcctatttgagccacagct

SEQ ID NO: 16437 - DNA, 25 bp, Homo sapien
ctacttcctggatacactggggcag

SEQ ID NO: 16438 - DNA, 25 bp, Homo sapien
tgggcttagcccatacagctctcac

SEQ ID NO: 16439 - DNA, 25 bp, Homo sapien
tgagggtgctctgtagtgcttctgc

SEQ ID NO: 16440 - DNA, 25 bp, Homo sapien
cagctctcactggttggaatcttgt

SEQ ID NO: 16441 - DNA, 25 bp, Homo sapien
tgtagtctgcaagcctgtagagtta

SEQ ID NO: 16442 - DNA, 25 bp, Homo sapien
ccttctagagtagcagcctgagcca

SEQ ID NO: 16443 - DNA, 25 bp, Homo sapien
gtcttaaagctggtgaataatctcc

SEQ ID NO: 16444 - DNA, 25 bp, Homo sapien
tctgacaggctgacgttgcacacta

SEQ ID NO: 16445 - DNA, 25 bp, Homo sapien
acagttcacacggtaaatgggtgcc

SEQ ID NO: 16446 - DNA, 25 bp, Homo sapien
tcacacggtaaatgggtgccaggtt

SEQ ID NO: 16447 - DNA, 25 bp, Homo sapien
cagttcacacggtaaatgggtgcca

SEQ ID NO: 16448 - DNA, 25 bp, Homo sapien
taaatgggtgccaggttctattcta

SEQ ID NO: 16449 - DNA, 25 bp, Homo sapien
acttgcccacagtcaagacacagag

SEQ ID NO: 16450 - DNA, 25 bp, Homo sapien
atattaccacatcactcctcccagc

SEQ ID NO: 16451 - DNA, 25 bp, Homo sapien
ttgcccacagtcaagacacagagga

SEQ ID NO: 16452 - DNA, 25 bp, Homo sapien
cggtaaatgggtgccaggttctatt

SEQ ID NO: 16453 - DNA, 25 bp, Homo sapien
aggaggggccaccatctctcgggcc

SEQ ID NO: 16454 - DNA, 25 bp, Homo sapien
cacccggtagcggtggtcattaccc

SEQ ID NO: 16455 - DNA, 25 bp, Homo sapien
cacggtaaatgggtgccaggttcta

SEQ ID NO: 16456 - DNA, 25 bp, Homo sapien
attttaccaagaagctgtagttttc

SEQ ID NO: 16457 - DNA, 25 bp, Homo sapien
ataaattggtgcactacaatcctcc

SEQ ID NO: 16458 - DNA, 25 bp, Homo sapien
attacctgccagtttgcaaaataat

SEQ ID NO: 16459 - DNA, 25 bp, Homo sapien
ttttcaaaccacaacgtgagcattc

SEQ ID NO: 16460 - DNA, 25 bp, Homo sapien
tgttatgacaagacgttccagactc

SEQ ID NO: 16461 - DNA, 25 bp, Homo sapien
aacaatgcaagctggtttttgattc

SEQ ID NO: 16462 - DNA, 25 bp, Homo sapien
aagtacaaagagttggggagaaatg

SEQ ID NO: 16463 - DNA, 25 bp, Homo sapien
gaaacatatttgatgagtctcagta

SEQ ID NO: 16464 - DNA, 25 bp, Homo sapien
tggggagaaatgcttccaacaaaaa

SEQ ID NO: 16465 - DNA, 25 bp, Homo sapien
cgtgagcattcattgtggattggtc

SEQ ID NO: 16466 - DNA, 25 bp, Homo sapien
tcaatcatagtggtctgtgacaatt

SEQ ID NO: 16467 - DNA, 25 bp, Homo sapien
agtgattatctagacagtgacttgc

SEQ ID NO: 16468 - DNA, 25 bp, Homo sapien
gcaagtcactgtctagataatcact

SEQ ID NO: 16469 - DNA, 25 bp, Homo sapien
catcagaaaacacagtgctgggctt

SEQ ID NO: 16470 - DNA, 25 bp, Homo sapien
ttactggacatcaaggagttcacat

SEQ ID NO: 16471 - DNA, 25 bp, Homo sapien
acaactcactggagacatgaaaacc

SEQ ID NO: 16472 - DNA, 25 bp, Homo sapien
gtacagctctcacagggacactcct

SEQ ID NO: 16473 - DNA, 25 bp, Homo sapien
ctgctgcgtgtggatcagtaatatc

SEQ ID NO: 16474 - DNA, 25 bp, Homo sapien
agttgagagatacactgagctcctc

SEQ ID NO: 16475 - DNA, 25 bp, Homo sapien
ttaactcaggacacagtacagctct

SEQ ID NO: 16476 - DNA, 25 bp, Homo sapien
ggtagctccatacaggaagctgcct

SEQ ID NO: 16477 - DNA, 25 bp, Homo sapien
tcccttgcagagttccagacactac

SEQ ID NO: 16478 - DNA, 25 bp, Homo sapien
caggcagctgcttcagttgagagat

SEQ ID NO: 16479 - DNA, 25 bp, Homo sapien
ttaaggtacaaagaatcgagtggat

SEQ ID NO: 16480 - DNA, 25 bp, Homo sapien
tcataaataggcacagggtcttaca

SEQ ID NO: 16481 - DNA, 25 bp, Homo sapien
cattacagccagaaaacgctaatat

SEQ ID NO: 16482 - DNA, 25 bp, Homo sapien
tttttataggcaagacagagagatc

SEQ ID NO: 16483 - DNA, 25 bp, Homo sapien
acagacacaagaaccctatagaaac

SEQ ID NO: 16484 - DNA, 25 bp, Homo sapien
attggtggtgtaatactagtaggta

SEQ ID NO: 16485 - DNA, 25 bp, Homo sapien
tattttaaaagcgaatgaaccaagc

SEQ ID NO: 16486 - DNA, 25 bp, Homo sapien
aaagggaatttagcatgtcaaagat

SEQ ID NO: 16487 - DNA, 25 bp, Homo sapien
ctgtataaagtaggagggaaattgg

SEQ ID NO: 16488 - DNA, 25 bp, Homo sapien
aattagaaattgaatgactgtactt

SEQ ID NO: 16489 - DNA, 25 bp, Homo sapien
aggcaagacagagagatccatatta

SEQ ID NO: 16490 - DNA, 25 bp, Homo sapien
ataggcacagggtcttacagaatta

SEQ ID NO: 16491 - DNA, 25 bp, Homo sapien
attgccacaaccagcttcaggtcac

SEQ ID NO: 16492 - DNA, 25 bp, Homo sapien
tatctccacactaggaacaccaggc

SEQ ID NO: 16493 - DNA, 25 bp, Homo sapien
agggagtaggctgaaatgtaccttt

SEQ ID NO: 16494 - DNA, 25 bp, Homo sapien
acactgaataaggaaggcctccata

SEQ ID NO: 16495 - DNA, 25 bp, Homo sapien
tgggccatacagtaagacctcatct

SEQ ID NO: 16496 - DNA, 25 bp, Homo sapien
ttcaatagtgaaaaactggaaacaa

SEQ ID NO: 16497 - DNA, 25 bp, Homo sapien
aggaacaccaggcaccagtcacact

SEQ ID NO: 16498 - DNA, 25 bp, Homo sapien
cagtcacactgaataaggaaggcct

SEQ ID NO: 16499 - DNA, 25 bp, Homo sapien
aggcctccatactcttgtgaacagc

SEQ ID NO: 16500 - DNA, 25 bp, Homo sapien
gctctccaggaaagacacaaagtat

SEQ ID NO: 16501 - DNA, 25 bp, Homo sapien
gcttcaggtcacaactttcaatagt

SEQ ID NO: 16502 - DNA, 25 bp, Homo sapien
attgcatctgtaaaaaccaccttaa

SEQ ID NO: 16503 - DNA, 25 bp, Homo sapien
acctaatgtgtttctggcatacaga

SEQ ID NO: 16504 - DNA, 25 bp, Homo sapien
tgaagacacaggtcatgtctgtctg

SEQ ID NO: 16505 - DNA, 25 bp, Homo sapien
ctgctggaaagctcaagacatattc

SEQ ID NO: 16506 - DNA, 25 bp, Homo sapien
aagctatcccatttccaggaacaga

SEQ ID NO: 16507 - DNA, 25 bp, Homo sapien
aaccactaacatcaatggctgcttc

SEQ ID NO: 16508 - DNA, 25 bp, Homo sapien
caagagaatctctagaagctatccc

SEQ ID NO: 16509 - DNA, 25 bp, Homo sapien
tggcatacagaatatactcagtaaa

SEQ ID NO: 16510 - DNA, 25 bp, Homo sapien
tctatgtgcatctctgtgctgactg

SEQ ID NO: 16511 - DNA, 25 bp, Homo sapien
atcaaatgaggtatatctatgtgca

SEQ ID NO: 16512 - DNA, 25 bp, Homo sapien
caggaacagataattcttctgagca

SEQ ID NO: 16513 - DNA, 25 bp, Homo sapien
atgagttttaaggagtgtgtggaaa

SEQ ID NO: 16514 - DNA, 25 bp, Homo sapien
aaagaagacataccaatgacctaag

SEQ ID NO: 16515 - DNA, 25 bp, Homo sapien
tggaaaaactgaaatgctcatagac

SEQ ID NO: 16516 - DNA, 25 bp, Homo sapien
gctcatagactgatagtgggatgta

SEQ ID NO: 16517 - DNA, 25 bp, Homo sapien
aagtaaaagacaagccaaatatttg

SEQ ID NO: 16518 - DNA, 25 bp, Homo sapien
tgggatgtataatggtgcagccact

SEQ ID NO: 16519 - DNA, 25 bp, Homo sapien
taaacacggagtagtaaccatatgc

SEQ ID NO: 16520 - DNA, 25 bp, Homo sapien
cagccactttggaaaccagtaggga

SEQ ID NO: 16521 - DNA, 25 bp, Homo sapien
ttaggcaaatgtaaatcgaaatcac

SEQ ID NO: 16522 - DNA, 25 bp, Homo sapien
tgacctaagaagaacatggaatgtt

SEQ ID NO: 16523 - DNA, 25 bp, Homo sapien
gatggctaaatacaaaaagtcagat

SEQ ID NO: 16524 - DNA, 25 bp, Homo sapien
catttacagaggcagtacgaacaca

SEQ ID NO: 16525 - DNA, 25 bp, Homo sapien
tctgcggctataggttccacaagac

SEQ ID NO: 16526 - DNA, 25 bp, Homo sapien
tctgggacctgtggccagaacttaa

SEQ ID NO: 16527 - DNA, 25 bp, Homo sapien
atccttaactctgggacctgtggcc

SEQ ID NO: 16528 - DNA, 25 bp, Homo sapien
aaagcagcagcatccattaaagtta

SEQ ID NO: 16529 - DNA, 25 bp, Homo sapien
tcaaatgagtagcagagttgacaac

SEQ ID NO: 16530 - DNA, 25 bp, Homo sapien
gaggcagtacgaacacacagtttcc

SEQ ID NO: 16531 - DNA, 25 bp, Homo sapien
aaactgtactaagtgacaagctccc

SEQ ID NO: 16532 - DNA, 25 bp, Homo sapien
ttagagttcaggctactttcacata

SEQ ID NO: 16533 - DNA, 25 bp, Homo sapien
attttagataagaggacccaaaaca

SEQ ID NO: 16534 - DNA, 25 bp, Homo sapien
taggagaggcttgtgttccatttac

SEQ ID NO: 16535 - DNA, 25 bp, Homo sapien
atgaagagatgaattgtgtaatgcc

SEQ ID NO: 16536 - DNA, 25 bp, Homo sapien
ctagatgtcaatagcagagaaggta

SEQ ID NO: 16537 - DNA, 25 bp, Homo sapien
gaggaggtagaagcattctcagctt

SEQ ID NO: 16538 - DNA, 25 bp, Homo sapien
tctgtggaaagagctattctggcca

SEQ ID NO: 16539 - DNA, 25 bp, Homo sapien
gcagagaaggtatctgagcaaattc

SEQ ID NO: 16540 - DNA, 25 bp, Homo sapien
caaaggttaagtatgaagagatgaa

SEQ ID NO: 16541 - DNA, 25 bp, Homo sapien
aagaagaaaatataaggcaactaga

SEQ ID NO: 16542 - DNA, 25 bp, Homo sapien
tctgttgttttgagaggaggtagaa

SEQ ID NO: 16543 - DNA, 25 bp, Homo sapien
aatgaggtgttagaaaaggcctaaa

SEQ ID NO: 16544 - DNA, 25 bp, Homo sapien
ttactgccaagaaatgaggtgttag

SEQ ID NO: 16545 - DNA, 25 bp, Homo sapien
aaaggcctaaagttaagtgcagaac

SEQ ID NO: 16546 - DNA, 25 bp, Homo sapien
gttgacacacatgactgaggattaa

SEQ ID NO: 16547 - DNA, 25 bp, Homo sapien
ttgcttccgcactaactctggaatt

SEQ ID NO: 16548 - DNA, 25 bp, Homo sapien
tagaaggctcaactgccatgaatat

SEQ ID NO: 16549 - DNA, 25 bp, Homo sapien
taggaatcactcacagaaagcacac

SEQ ID NO: 16550 - DNA, 25 bp, Homo sapien
atatcagactaaatgtgtttgtttc

SEQ ID NO: 16551 - DNA, 25 bp, Homo sapien
tctggaattcaatattagaaggctc

SEQ ID NO: 16552 - DNA, 25 bp, Homo sapien
tggaagaggatgttatatattgaac

SEQ ID NO: 16553 - DNA, 25 bp, Homo sapien
tcaaaactgagatatggaagaggat

SEQ ID NO: 16554 - DNA, 25 bp, Homo sapien
tgataggggagaggataatataaaa

SEQ ID NO: 16555 - DNA, 25 bp, Homo sapien
atttaaaacacggacatggtgtccc

SEQ ID NO: 16556 - DNA, 25 bp, Homo sapien
taacaatttgttgataggggagagg

SEQ ID NO: 16557 - DNA, 25 bp, Homo sapien
ctggacgcaattttgaaaagcaacc

SEQ ID NO: 16558 - DNA, 25 bp, Homo sapien
tgtagatggcaaaaactgagagaaa

SEQ ID NO: 16559 - DNA, 25 bp, Homo sapien
ccctagcttcgtgaatggggtcctg

SEQ ID NO: 16560 - DNA, 25 bp, Homo sapien
agaggggcaccctagcttcgtgaat

SEQ ID NO: 16561 - DNA, 25 bp, Homo sapien
ctcatgggtttaacctgagggtgta

SEQ ID NO: 16562 - DNA, 25 bp, Homo sapien
cctctgagaatagacaagagctgtc

SEQ ID NO: 16563 - DNA, 25 bp, Homo sapien
tttgaaaagcaacctgcagcctctg

SEQ ID NO: 16564 - DNA, 25 bp, Homo sapien
caagagctgtcagaatacagcagtc

SEQ ID NO: 16565 - DNA, 25 bp, Homo sapien
tttaacctgagggtgtagatggcaa

SEQ ID NO: 16566 - DNA, 25 bp, Homo sapien
ctatgcctggcctctggacgcaatt

SEQ ID NO: 16567 - DNA, 25 bp, Homo sapien
tacagcagtcaacactgatctgggg

SEQ ID NO: 16568 - DNA, 25 bp, Homo sapien
catgtcatgcagagatgcagtggta

SEQ ID NO: 16569 - DNA, 25 bp, Homo sapien
aggcagaaatgccaaggatttgact

SEQ ID NO: 16570 - DNA, 25 bp, Homo sapien
gctaaataccagataagtaagctgc

SEQ ID NO: 16571 - DNA, 25 bp, Homo sapien
ccttctagaagtccgcttagcattc

SEQ ID NO: 16572 - DNA, 25 bp, Homo sapien
ggggtcttcatagggcagatctcca

SEQ ID NO: 16573 - DNA, 25 bp, Homo sapien
aacttggaagtctccaggacaactc

SEQ ID NO: 16574 - DNA, 25 bp, Homo sapien
aaatgtaggtcagtggagctaactt

SEQ ID NO: 16575 - DNA, 25 bp, Homo sapien
aagcaagtcgtttactggaagaaat

SEQ ID NO: 16576 - DNA, 25 bp, Homo sapien
tgttaaatggagtgaaaatgtaggt

SEQ ID NO: 16577 - DNA, 25 bp, Homo sapien
aaacagtcctcaagacagatgggct

SEQ ID NO: 16578 - DNA, 25 bp, Homo sapien
tccattggaaaacatgaagcaacag

SEQ ID NO: 16579 - DNA, 25 bp, Homo sapien
atcagtgcccaaaatctggagaggg

SEQ ID NO: 16580 - DNA, 25 bp, Homo sapien
agcactgccctgagtgtgtgcacac

SEQ ID NO: 16581 - DNA, 25 bp, Homo sapien
gggaagttcatgctgactggtccat

SEQ ID NO: 16582 - DNA, 25 bp, Homo sapien
agaaaaggcaacacaagttcgcact

SEQ ID NO: 16583 - DNA, 25 bp, Homo sapien
tattgagtgacaatagctcagagga

SEQ ID NO: 16584 - DNA, 25 bp, Homo sapien
aggcaacacaagttcgcactccagt

SEQ ID NO: 16585 - DNA, 25 bp, Homo sapien
ctataggtaccaaggggcgtctgca

SEQ ID NO: 16586 - DNA, 25 bp, Homo sapien
ccctggagagggcagttcctcacta

SEQ ID NO: 16587 - DNA, 25 bp, Homo sapien
ttcatggcgcccaggctataggtac

SEQ ID NO: 16588 - DNA, 25 bp, Homo sapien
agttcctcactacagctggtcatcc

SEQ ID NO: 16589 - DNA, 25 bp, Homo sapien
ctggtcatccgacgtctgctcagct

SEQ ID NO: 16590 - DNA, 25 bp, Homo sapien
gtgcgcatatttgaagagatgttac

SEQ ID NO: 16591 - DNA, 25 bp, Homo sapien
ctattgtgaatagaagtgcgcatat

SEQ ID NO: 16592 - DNA, 25 bp, Homo sapien
agaatttcaaagagagaatgactgc

SEQ ID NO: 16593 - DNA, 25 bp, Homo sapien
cttgacaattaaggacaggtttatt

SEQ ID NO: 16594 - DNA, 25 bp, Homo sapien
aggaaagaaacatgaacggtgtctt

SEQ ID NO: 16595 - DNA, 25 bp, Homo sapien
cccagtaacaaaaatgaggagggtg

SEQ ID NO: 16596 - DNA, 25 bp, Homo sapien
agagaatgactgcagcatactcctc

SEQ ID NO: 16597 - DNA, 25 bp, Homo sapien
atactcctctgtggcttggcgtctg

SEQ ID NO: 16598 - DNA, 25 bp, Homo sapien
cgtctggggtcagtgtcagatccaa

SEQ ID NO: 16599 - DNA, 25 bp, Homo sapien
agatccaagggagtccgggttctta

SEQ ID NO: 16600 - DNA, 25 bp, Homo sapien
ggttatgagaagaacgaatgtgata

SEQ ID NO: 16601 - DNA, 25 bp, Homo sapien
tcaaatagataatgacgaacgtacc

SEQ ID NO: 16602 - DNA, 25 bp, Homo sapien
gagagaagtgccctaaaatgaaact

SEQ ID NO: 16603 - DNA, 25 bp, Homo sapien
tgacgaacgtaccacaagctgtatc

SEQ ID NO: 16604 - DNA, 25 bp, Homo sapien
atatgtcacacgcattaagccctgt

SEQ ID NO: 16605 - DNA, 25 bp, Homo sapien
ttgtgtgggtaaaatttggatgcat

SEQ ID NO: 16606 - DNA, 25 bp, Homo sapien
ttaagccctgtagagtcatggaata

SEQ ID NO: 16607 - DNA, 25 bp, Homo sapien
ccttgagacagattttagtggattt

SEQ ID NO: 16608 - DNA, 25 bp, Homo sapien
tatgggaccctcttggatagaattt

SEQ ID NO: 16609 - DNA, 25 bp, Homo sapien
gagatgtacatgtgaccaatcaaac

SEQ ID NO: 16610 - DNA, 25 bp, Homo sapien
cagaaaaggttttagctatgggacc

SEQ ID NO: 16611 - DNA, 25 bp, Homo sapien
atagtgagaggtttagagatgtaca

SEQ ID NO: 16612 - DNA, 25 bp, Homo sapien
tcctggaaaccactattctactgtc

SEQ ID NO: 16613 - DNA, 25 bp, Homo sapien
gtagcatccatcagaatttcactcc

SEQ ID NO: 16614 - DNA, 25 bp, Homo sapien
atatgagaattccaggtatttcaga

SEQ ID NO: 16615 - DNA, 25 bp, Homo sapien
gaacattggtatacaagacctcttt

SEQ ID NO: 16616 - DNA, 25 bp, Homo sapien
tcatcccaagcgaaactccatatct

SEQ ID NO: 16617 - DNA, 25 bp, Homo sapien
tggcatatttcatctagcataaggc

SEQ ID NO: 16618 - DNA, 25 bp, Homo sapien
actgggtatgtttcattgtgtagat

SEQ ID NO: 16619 - DNA, 25 bp, Homo sapien
caggtatttcagataggtggaatca

SEQ ID NO: 16620 - DNA, 25 bp, Homo sapien
catctagcataaggcctcaaggttc

SEQ ID NO: 16621 - DNA, 25 bp, Homo sapien
atccactgatagtcattagagattt

SEQ ID NO: 16622 - DNA, 25 bp, Homo sapien
ttgtgtagatagaccatactttgtt

SEQ ID NO: 16623 - DNA, 25 bp, Homo sapien
ataagtgtattcaagagtaagcatt

SEQ ID NO: 16624 - DNA, 25 bp, Homo sapien
tgcagtggcctttgtacaaggttgt

SEQ ID NO: 16625 - DNA, 25 bp, Homo sapien
gccgagtaaactatgggcacattca

SEQ ID NO: 16626 - DNA, 25 bp, Homo sapien
tgcttacagggatcaataataaggg

SEQ ID NO: 16627 - DNA, 25 bp, Homo sapien
aactatgggcacattcaaagaggca

SEQ ID NO: 16628 - DNA, 25 bp, Homo sapien
gtaagcattgtagtgtggaacacac

SEQ ID NO: 16629 - DNA, 25 bp, Homo sapien
acaaggttgtggttttggtatagtc

SEQ ID NO: 16630 - DNA, 25 bp, Homo sapien
tcaggcgattgagcattaagaaccc

SEQ ID NO: 16631 - DNA, 25 bp, Homo sapien
aggcaagggaagacagcaattttta

SEQ ID NO: 16632 - DNA, 25 bp, Homo sapien
acagttcttgttttcaggcgattga

SEQ ID NO: 16633 - DNA, 25 bp, Homo sapien
catcagtccaaggttaggcaggcaa

SEQ ID NO: 16634 - DNA, 25 bp, Homo sapien
gcaaggtaacgttaatgttgagacc

SEQ ID NO: 16635 - DNA, 25 bp, Homo sapien
tgtcgttgcacaaagccacggccac

SEQ ID NO: 16636 - DNA, 25 bp, Homo sapien
acgtcgaccttcacagtaattgctt

SEQ ID NO: 16637 - DNA, 25 bp, Homo sapien
gcctgcacgtcgctgggtcacacaa

SEQ ID NO: 16638 - DNA, 25 bp, Homo sapien
tgggtcacacaacactggctgtcgt

SEQ ID NO: 16639 - DNA, 25 bp, Homo sapien
ggatctgatggtgctctgtgagttc

SEQ ID NO: 16640 - DNA, 25 bp, Homo sapien
atgtgtgtgcctgtcgagcacctct

SEQ ID NO: 16641 - DNA, 25 bp, Homo sapien
ttgtttagtcatgggatgtgtgtgc

SEQ ID NO: 16642 - DNA, 25 bp, Homo sapien
tgcctccgtgcaggttggaaaccac

SEQ ID NO: 16643 - DNA, 25 bp, Homo sapien
ctcttgatcagtagaagggtaccct

SEQ ID NO: 16644 - DNA, 25 bp, Homo sapien
tcaacttggaatctggtagaacacc

SEQ ID NO: 16645 - DNA, 25 bp, Homo sapien
atgatgcttattaagtgtcttcatc

SEQ ID NO: 16646 - DNA, 25 bp, Homo sapien
agtgtcttcatcattggcttgttaa

SEQ ID NO: 16647 - DNA, 25 bp, Homo sapien
taagtgtcttcatcattggcttgtt

SEQ ID NO: 16648 - DNA, 25 bp, Homo sapien
attaagtgtcttcatcattggcttg

SEQ ID NO: 16649 - DNA, 25 bp, Homo sapien
gtggtgctgcaatcttggctccctg

SEQ ID NO: 16650 - DNA, 25 bp, Homo sapien
aatcatgatgcttattaagtgtctt

SEQ ID NO: 16651 - DNA, 25 bp, Homo sapien
gcctggcctaagtttcttaattcta

SEQ ID NO: 16652 - DNA, 25 bp, Homo sapien
aggcgcgtgccaccgtgcctaccta

SEQ ID NO: 16653 - DNA, 25 bp, Homo sapien
tcatcattggcttgttaaatgagaa

SEQ ID NO: 16654 - DNA, 25 bp, Homo sapien
ttattaagtgtcttcatcattggct

SEQ ID NO: 16655 - DNA, 25 bp, Homo sapien
atcatgatgcttattaagtgtcttc

SEQ ID NO: 16656 - DNA, 25 bp, Homo sapien
aaaggtcgcacctctcagtactacc

SEQ ID NO: 16657 - DNA, 25 bp, Homo sapien
atggtcaaaccatagcaagcagttt

SEQ ID NO: 16658 - DNA, 25 bp, Homo sapien
tctcccaggataacccattagtcta

SEQ ID NO: 16659 - DNA, 25 bp, Homo sapien
ataaaaccaccagttctcccaggat

SEQ ID NO: 16660 - DNA, 25 bp, Homo sapien
gtacagaaacagtgattgtattaat

SEQ ID NO: 16661 - DNA, 25 bp, Homo sapien
acactgtaggttaagcttcaatgtg

SEQ ID NO: 16662 - DNA, 25 bp, Homo sapien
tgggaaccatagtctgtacagaaac

SEQ ID NO: 16663 - DNA, 25 bp, Homo sapien
agtactaccacactgtaggttaagc

SEQ ID NO: 16664 - DNA, 25 bp, Homo sapien
ttttggaggagatggtcaaaccata

SEQ ID NO: 16665 - DNA, 25 bp, Homo sapien
tagcaagcagtttgggaaccatagt

SEQ ID NO: 16666 - DNA, 25 bp, Homo sapien
tcaatgtgacttttggaggagatgg

SEQ ID NO: 16667 - DNA, 25 bp, Homo sapien
tcaaaataccatggttcagagacag

SEQ ID NO: 16668 - DNA, 25 bp, Homo sapien
attttgattgagactgctacgtgac

SEQ ID NO: 16669 - DNA, 25 bp, Homo sapien
cagatccatgtaaggtgacagaagt

SEQ ID NO: 16670 - DNA, 25 bp, Homo sapien
ctgtgcctagcacgtagtaagtata

SEQ ID NO: 16671 - DNA, 25 bp, Homo sapien
atatagacatcatgaactggctatc

SEQ ID NO: 16672 - DNA, 25 bp, Homo sapien
tacgtgacaagttgtctgggcttcc

SEQ ID NO: 16673 - DNA, 25 bp, Homo sapien
cttttggagttagaatgacattaat

SEQ ID NO: 16674 - DNA, 25 bp, Homo sapien
taaatgaagaacctgacacatgggg

SEQ ID NO: 16675 - DNA, 25 bp, Homo sapien
ttaccatgtcctaagagattactat

SEQ ID NO: 16676 - DNA, 25 bp, Homo sapien
ggggcaaaactaatgatgatcataa

SEQ ID NO: 16677 - DNA, 25 bp, Homo sapien
tggttcagagacagtagcaaataaa

SEQ ID NO: 16678 - DNA, 25 bp, Homo sapien
tttatcgttgaatcaggaatgctga

SEQ ID NO: 16679 - DNA, 25 bp, Homo sapien
tatccatgggacaataatcaattgc

SEQ ID NO: 16680 - DNA, 25 bp, Homo sapien
cttaattaactcataagggaaccag

SEQ ID NO: 16681 - DNA, 25 bp, Homo sapien
aaattggttaatatccatgggacaa

SEQ ID NO: 16682 - DNA, 25 bp, Homo sapien
caggaatgctgaaatgaatgtaaaa

SEQ ID NO: 16683 - DNA, 25 bp, Homo sapien
aatcaattgctattcactgaacaca

SEQ ID NO: 16684 - DNA, 25 bp, Homo sapien
tataggagaattcaatgtactacac

SEQ ID NO: 16685 - DNA, 25 bp, Homo sapien
taggagctcaaagataatgaaaggc

SEQ ID NO: 16686 - DNA, 25 bp, Homo sapien
gtttggcttgcaaaatccaggtcca

SEQ ID NO: 16687 - DNA, 25 bp, Homo sapien
accagtaagatgctatataggagaa

SEQ ID NO: 16688 - DNA, 25 bp, Homo sapien
tataagtgttctatataggagctca

SEQ ID NO: 16689 - DNA, 25 bp, Homo sapien
ctgagagcttgttatgtgccagcat

SEQ ID NO: 16690 - DNA, 25 bp, Homo sapien
agactagagacattcaggactggtt

SEQ ID NO: 16691 - DNA, 25 bp, Homo sapien
cgtcggtgatgataacaatagcaat

SEQ ID NO: 16692 - DNA, 25 bp, Homo sapien
ttcaggactggttaaagaaagcagc

SEQ ID NO: 16693 - DNA, 25 bp, Homo sapien
attgtagatcacatgctgaggtttc

SEQ ID NO: 16694 - DNA, 25 bp, Homo sapien
atactaccgacttactgagagcttg

SEQ ID NO: 16695 - DNA, 25 bp, Homo sapien
gtttgttggtcggtactgtactcac

SEQ ID NO: 16696 - DNA, 25 bp, Homo sapien
ggcagaggagttacagcctctcaac

SEQ ID NO: 16697 - DNA, 25 bp, Homo sapien
tctcaacagcaacgttggggcctgc

SEQ ID NO: 16698 - DNA, 25 bp, Homo sapien
catgttaaacaggtagcaactgaaa

SEQ ID NO: 16699 - DNA, 25 bp, Homo sapien
tcagctacaagttcagactagagac

SEQ ID NO: 16700 - DNA, 25 bp, Homo sapien
cttccctcagatccattattgccgg

SEQ ID NO: 16701 - DNA, 25 bp, Homo sapien
ctacatcctgagtctcctgggctca

SEQ ID NO: 16702 - DNA, 25 bp, Homo sapien
tcattctgcaaagtaggccaaattt

SEQ ID NO: 16703 - DNA, 25 bp, Homo sapien
caaagtaggccaaatttaggtagct

SEQ ID NO: 16704 - DNA, 25 bp, Homo sapien
gtatctcacactacaggtgcaccct

SEQ ID NO: 16705 - DNA, 25 bp, Homo sapien
ctgagtatctcacactacaggtgca

SEQ ID NO: 16706 - DNA, 25 bp, Homo sapien
ctgcacctagcccttatagcctttt

SEQ ID NO: 16707 - DNA, 25 bp, Homo sapien
ctcagatccattattgccgggcatg

SEQ ID NO: 16708 - DNA, 25 bp, Homo sapien
ttaatcattctgcaaagtaggccaa

SEQ ID NO: 16709 - DNA, 25 bp, Homo sapien
tttagtagaaacaagtgaggtcttg

SEQ ID NO: 16710 - DNA, 25 bp, Homo sapien
aaatttaggtagcttgatgatcttt

SEQ ID NO: 16711 - DNA, 25 bp, Homo sapien
gtagactgcagtcctgattccagct

SEQ ID NO: 16712 - DNA, 25 bp, Homo sapien
agtctagcctctccagttgggatcc

SEQ ID NO: 16713 - DNA, 25 bp, Homo sapien
acacaccaatgacccttggccaatt

SEQ ID NO: 16714 - DNA, 25 bp, Homo sapien
actggaattgagaatgtatgaacgg

SEQ ID NO: 16715 - DNA, 25 bp, Homo sapien
ttgggatccagttcttgtctatcgt

SEQ ID NO: 16716 - DNA, 25 bp, Homo sapien
ttccggcaaccaagagacttaagct

SEQ ID NO: 16717 - DNA, 25 bp, Homo sapien
tatgaacgggcacagccagccacca

SEQ ID NO: 16718 - DNA, 25 bp, Homo sapien
aattggctgaaacagaacaacaatc

SEQ ID NO: 16719 - DNA, 25 bp, Homo sapien
gcctactttgcatagagacacacct

SEQ ID NO: 16720 - DNA, 25 bp, Homo sapien
acttaagctacaaaggtccgcctct

SEQ ID NO: 16721 - DNA, 25 bp, Homo sapien
cagaacagtgaggaaattggctgaa

SEQ ID NO: 16722 - DNA, 25 bp, Homo sapien
gtacaaggaccatcgttgctctgtg

SEQ ID NO: 16723 - DNA, 25 bp, Homo sapien
ataatgctccaggtaggccgggcat

SEQ ID NO: 16724 - DNA, 25 bp, Homo sapien
cttcaacctgggcacacctgagcat

SEQ ID NO: 16725 - DNA, 25 bp, Homo sapien
attgctaggccggagcacagctgtc

SEQ ID NO: 16726 - DNA, 25 bp, Homo sapien
tcatgtacaaggaccatcgttgctc

SEQ ID NO: 16727 - DNA, 25 bp, Homo sapien
ttatcttcatgtacaaggaccatcg

SEQ ID NO: 16728 - DNA, 25 bp, Homo sapien
gagctcccttgtcctccgccggctt

SEQ ID NO: 16729 - DNA, 25 bp, Homo sapien
aacctgggcacacctgagcattttt

SEQ ID NO: 16730 - DNA, 25 bp, Homo sapien
ttcatcttcttcaacctgggcacac

SEQ ID NO: 16731 - DNA, 25 bp, Homo sapien
gagcacagctgtcctcccaggagct

SEQ ID NO: 16732 - DNA, 25 bp, Homo sapien
ttttaataatgctccaggtaggccg

SEQ ID NO: 16733 - DNA, 25 bp, Homo sapien
tggagatgggatacctacagccatt

SEQ ID NO: 16734 - DNA, 25 bp, Homo sapien
ttggtttcaaaagctggtaagtctc

SEQ ID NO: 16735 - DNA, 25 bp, Homo sapien
tcgaagtattcagccaatggagatg

SEQ ID NO: 16736 - DNA, 25 bp, Homo sapien
aagatagatcgcagtgagaagccaa

SEQ ID NO: 16737 - DNA, 25 bp, Homo sapien
atcatagaagaatcctgcagtaatc

SEQ ID NO: 16738 - DNA, 25 bp, Homo sapien
gaagccaaagaagaaccaagtgaat

SEQ ID NO: 16739 - DNA, 25 bp, Homo sapien
acatggtcttcaatgccaaagcttg

SEQ ID NO: 16740 - DNA, 25 bp, Homo sapien
tcaggcagattaagtaaaaagtgtt

SEQ ID NO: 16741 - DNA, 25 bp, Homo sapien
ccaagtgaatcaaactgtagaatga

SEQ ID NO: 16742 - DNA, 25 bp, Homo sapien
cccagggttggagatgaattcacat

SEQ ID NO: 16743 - DNA, 25 bp, Homo sapien
cagcaggctgaagcctcgaagtatt

SEQ ID NO: 16744 - DNA, 25 bp, Homo sapien
aagaactggctacaaaaacacttta

SEQ ID NO: 16745 - DNA, 25 bp, Homo sapien
ttaggaccaaatatatcaagttatc

SEQ ID NO: 16746 - DNA, 25 bp, Homo sapien
atatgaagtgatacctctgctgtac

SEQ ID NO: 16747 - DNA, 25 bp, Homo sapien
tccaaacgaaaactcttctgatatg

SEQ ID NO: 16748 - DNA, 25 bp, Homo sapien
tccttggaaaaacatgcttcacgac

SEQ ID NO: 16749 - DNA, 25 bp, Homo sapien
aagatgaattatatgtaccacaaaa

SEQ ID NO: 16750 - DNA, 25 bp, Homo sapien
atcaattcaatatactggtgcattt

SEQ ID NO: 16751 - DNA, 25 bp, Homo sapien
atttagattagaactccttggaaaa

SEQ ID NO: 16752 - DNA, 25 bp, Homo sapien
ttctgatatgaagtgatacctctgc

SEQ ID NO: 16753 - DNA, 25 bp, Homo sapien
atgcttcacgacacagaacacattt

SEQ ID NO: 16754 - DNA, 25 bp, Homo sapien
tctgctgtacaatagaagcattctt

SEQ ID NO: 16755 - DNA, 25 bp, Homo sapien
ggcagagggctgttttatgctcaat

SEQ ID NO: 16756 - DNA, 25 bp, Homo sapien
tggaccatatgtagtggaactgagc

SEQ ID NO: 16757 - DNA, 25 bp, Homo sapien
ttgtcttaagttcctggaccatatg

SEQ ID NO: 16758 - DNA, 25 bp, Homo sapien
tcaacttaacttcaaggcgcttggt

SEQ ID NO: 16759 - DNA, 25 bp, Homo sapien
caatatggaaccttggatggccaac

SEQ ID NO: 16760 - DNA, 25 bp, Homo sapien
gtccaggggcatttgatgacctcca

SEQ ID NO: 16761 - DNA, 25 bp, Homo sapien
actcctttagggcagagggctgttt

SEQ ID NO: 16762 - DNA, 25 bp, Homo sapien
ggcgcttggtagtcagaatcctttg

SEQ ID NO: 16763 - DNA, 25 bp, Homo sapien
atggccaacacagcgtgtggcacgt

SEQ ID NO: 16764 - DNA, 25 bp, Homo sapien
gccaccgcgtcaggccatgagtagg

SEQ ID NO: 16765 - DNA, 25 bp, Homo sapien
gtggaactgagctttgtagccaggc

SEQ ID NO: 16766 - DNA, 25 bp, Homo sapien
atgggttctcccatcaggacctccc

SEQ ID NO: 16767 - DNA, 25 bp, Homo sapien
aacttcccgaggtcactgaactggt

SEQ ID NO: 16768 - DNA, 25 bp, Homo sapien
ttggggaacttcccgaggtcactga

SEQ ID NO: 16769 - DNA, 25 bp, Homo sapien
cttcccgaggtcactgaactggtgt

SEQ ID NO: 16770 - DNA, 25 bp, Homo sapien
ggaacttcccgaggtcactgaactg

SEQ ID NO: 16771 - DNA, 25 bp, Homo sapien
cgatgagcctacgaggtcggttcta

SEQ ID NO: 16772 - DNA, 25 bp, Homo sapien
caggacctcccgatgagcctacgag

SEQ ID NO: 16773 - DNA, 25 bp, Homo sapien
tcccgatgagcctacgaggtcggtt

SEQ ID NO: 16774 - DNA, 25 bp, Homo sapien
gcgtcttcccgggtgccagcggcac

SEQ ID NO: 16775 - DNA, 25 bp, Homo sapien
tcccgaggtcactgaactggtgtca

SEQ ID NO: 16776 - DNA, 25 bp, Homo sapien
gattggaatccaaacacatcccagc

SEQ ID NO: 16777 - DNA, 25 bp, Homo sapien
ctatgtaatgttgaagggtagaggt

SEQ ID NO: 16778 - DNA, 25 bp, Homo sapien
tgcaaaggaaaggtagtctgctttt

SEQ ID NO: 16779 - DNA, 25 bp, Homo sapien
cattactgcaaaggaaaggtagtct

SEQ ID NO: 16780 - DNA, 25 bp, Homo sapien
ttatatggtcctaaacagaaagtct

SEQ ID NO: 16781 - DNA, 25 bp, Homo sapien
gtgggcacattactgcaaaggaaag

SEQ ID NO: 16782 - DNA, 25 bp, Homo sapien
cacattactgcaaaggaaaggtagt

SEQ ID NO: 16783 - DNA, 25 bp, Homo sapien
taatgttgaagggtagaggtctaaa

SEQ ID NO: 16784 - DNA, 25 bp, Homo sapien
gaaagtctatgtaatgttgaagggt

SEQ ID NO: 16785 - DNA, 25 bp, Homo sapien
gcaattttacttggtgggcacatta

SEQ ID NO: 16786 - DNA, 25 bp, Homo sapien
tatggtcctaaacagaaagtctatg

SEQ ID NO: 16787 - DNA, 25 bp, Homo sapien
caaaattatatggtcctaaacagaa

SEQ ID NO: 16788 - DNA, 25 bp, Homo sapien
taatcattcttaccaccatcaaact

SEQ ID NO: 16789 - DNA, 25 bp, Homo sapien
agtttgatggtggtaagaatgatta

SEQ ID NO: 16790 - DNA, 25 bp, Homo sapien
ggtggaagttcctttagaaagcatc

SEQ ID NO: 16791 - DNA, 25 bp, Homo sapien
cacagattttaaaggtggaagttcc

SEQ ID NO: 16792 - DNA, 25 bp, Homo sapien
caagcacccttagactccaatggtg

SEQ ID NO: 16793 - DNA, 25 bp, Homo sapien
gagtagaactgggaaatatgcttta

SEQ ID NO: 16794 - DNA, 25 bp, Homo sapien
ctgggaaatatgctttataggcaac

SEQ ID NO: 16795 - DNA, 25 bp, Homo sapien
ccaatggtgccactttataatagaa

SEQ ID NO: 16796 - DNA, 25 bp, Homo sapien
tagaaagcatctactccaggccggg

SEQ ID NO: 16797 - DNA, 25 bp, Homo sapien
aaagcatctactccaggccgggcgt

SEQ ID NO: 16798 - DNA, 25 bp, Homo sapien
ccttagactccaatggtgccacttt

SEQ ID NO: 16799 - DNA, 25 bp, Homo sapien
agagagtagaactgggaaatatgct

SEQ ID NO: 16800 - DNA, 25 bp, Homo sapien
tttagaaagcatctactccaggccg

SEQ ID NO: 16801 - DNA, 25 bp, Homo sapien
cggactgtgaccaggagtatatcca

SEQ ID NO: 16802 - DNA, 25 bp, Homo sapien
ctatactataggaaagatcactctc

SEQ ID NO: 16803 - DNA, 25 bp, Homo sapien
atattgacaatggtatcggggacaa

SEQ ID NO: 16804 - DNA, 25 bp, Homo sapien
tcgctcagactaggtataaaatgct

SEQ ID NO: 16805 - DNA, 25 bp, Homo sapien
taaaatgctgtgtgtagaataaggc

SEQ ID NO: 16806 - DNA, 25 bp, Homo sapien
acggcagtgtcagaaccacataaac

SEQ ID NO: 16807 - DNA, 25 bp, Homo sapien
aaatgcctccgagcagcagcttatt

SEQ ID NO: 16808 - DNA, 25 bp, Homo sapien
ttgtgaaaagatccatgtaccctac

SEQ ID NO: 16809 - DNA, 25 bp, Homo sapien
ccacataaacacttgggaccattta

SEQ ID NO: 16810 - DNA, 25 bp, Homo sapien
caaactcagaagtgacaaatgcctc

SEQ ID NO: 16811 - DNA, 25 bp, Homo sapien
gggacaactcacactggacggcagt

SEQ ID NO: 16812 - DNA, 25 bp, Homo sapien
tcaggaccagagtgtgccagtgcct

SEQ ID NO: 16813 - DNA, 25 bp, Homo sapien
agctgaaacccgtgtcgttcagggt

SEQ ID NO: 16814 - DNA, 25 bp, Homo sapien
cgcgcctcactcaggaccagagtgt

SEQ ID NO: 16815 - DNA, 25 bp, Homo sapien
ttacattaagtagaagcaggtcatc

SEQ ID NO: 16816 - DNA, 25 bp, Homo sapien
ctacaataaagggaactagagagaa

SEQ ID NO: 16817 - DNA, 25 bp, Homo sapien
gaaaatctgcatagaagtggatccc

SEQ ID NO: 16818 - DNA, 25 bp, Homo sapien
aggtcatcataaaggccttgccgtc

SEQ ID NO: 16819 - DNA, 25 bp, Homo sapien
ccctgtgcagagagtttgctgctcc

SEQ ID NO: 16820 - DNA, 25 bp, Homo sapien
tgccgtcttcctgtgagtaggagaa

SEQ ID NO: 16821 - DNA, 25 bp, Homo sapien
tgccttcccactgcaagggcagagg

SEQ ID NO: 16822 - DNA, 25 bp, Homo sapien
ccgtgtcgttcagggtcagccgaat

SEQ ID NO: 16823 - DNA, 25 bp, Homo sapien
tggtccagatgctccaaaggaactg

SEQ ID NO: 16824 - DNA, 25 bp, Homo sapien
ttctccaaggcactggctttcggac

SEQ ID NO: 16825 - DNA, 25 bp, Homo sapien
gctttcggactggtgatccaagccc

SEQ ID NO: 16826 - DNA, 25 bp, Homo sapien
ccagatggtagtcatggcaacagct

SEQ ID NO: 16827 - DNA, 25 bp, Homo sapien
ggcacgggtcatacagcagtcccta

SEQ ID NO: 16828 - DNA, 25 bp, Homo sapien
gcaagagcattatggggaaactttc

SEQ ID NO: 16829 - DNA, 25 bp, Homo sapien
ctcatggggtaacaataacaattgc

SEQ ID NO: 16830 - DNA, 25 bp, Homo sapien
atctactgcatgctaggcacgggtc

SEQ ID NO: 16831 - DNA, 25 bp, Homo sapien
ccaggtttaggctcagcaggtacca

SEQ ID NO: 16832 - DNA, 25 bp, Homo sapien
aaaggaactgctctgcatccctgag

SEQ ID NO: 16833 - DNA, 25 bp, Homo sapien
agtccagagcctgtggttatcagtc

SEQ ID NO: 16834 - DNA, 25 bp, Homo sapien
tagccacaaccctctgatgggtggt

SEQ ID NO: 16835 - DNA, 25 bp, Homo sapien
tcagctcagcactcctggtggactc

SEQ ID NO: 16836 - DNA, 25 bp, Homo sapien
ttcattgcggtataaggtaggttca

SEQ ID NO: 16837 - DNA, 25 bp, Homo sapien
tacacttgcaccagtggtggcagtg

SEQ ID NO: 16838 - DNA, 25 bp, Homo sapien
gactctaagtctggggagttggtac

SEQ ID NO: 16839 - DNA, 25 bp, Homo sapien
ggtaggttcagttgactgggttcat

SEQ ID NO: 16840 - DNA, 25 bp, Homo sapien
attttaggggccacggctcagctca

SEQ ID NO: 16841 - DNA, 25 bp, Homo sapien
gtggtgccagacaaagtgcttcttt

SEQ ID NO: 16842 - DNA, 25 bp, Homo sapien
gtgagattgggaacctgctgcatca

SEQ ID NO: 16843 - DNA, 25 bp, Homo sapien
agaagtcgagctgctgcattcctgt

SEQ ID NO: 16844 - DNA, 25 bp, Homo sapien
aaggtgttcctggtccattagccac

SEQ ID NO: 16845 - DNA, 25 bp, Homo sapien
gcaccagcatacaatccaataaacc

SEQ ID NO: 16846 - DNA, 25 bp, Homo sapien
caagatcaaagaactgcaccagcat

SEQ ID NO: 16847 - DNA, 25 bp, Homo sapien
aatccattagtgaattaaataagtc

SEQ ID NO: 16848 - DNA, 25 bp, Homo sapien
aaagagaaagctaggctcaagatca

SEQ ID NO: 16849 - DNA, 25 bp, Homo sapien
ggttctgctgaaactagcttctagc

SEQ ID NO: 16850 - DNA, 25 bp, Homo sapien
taattctggttctgctgaaactagc

SEQ ID NO: 16851 - DNA, 25 bp, Homo sapien
aaaacttagtaaggcacagaagtcc

SEQ ID NO: 16852 - DNA, 25 bp, Homo sapien
ggctcaagatcaaagaactgcacca

SEQ ID NO: 16853 - DNA, 25 bp, Homo sapien
agcttctagctctgtgatattaaac

SEQ ID NO: 16854 - DNA, 25 bp, Homo sapien
gtaaggcacagaagtccagattcta

SEQ ID NO: 16855 - DNA, 25 bp, Homo sapien
atgctaataaaacttagtaaggcac

SEQ ID NO: 16856 - DNA, 25 bp, Homo sapien
aataagttgttctgggctcagcagc

SEQ ID NO: 16857 - DNA, 25 bp, Homo sapien
acatttctgcttctcataggggctg

SEQ ID NO: 16858 - DNA, 25 bp, Homo sapien
atcatgccatgaaaccatgttggcc

SEQ ID NO: 16859 - DNA, 25 bp, Homo sapien
gctcagcagcctttgtctgtggatt

SEQ ID NO: 16860 - DNA, 25 bp, Homo sapien
caatctttccttgggttcagtttgc

SEQ ID NO: 16861 - DNA, 25 bp, Homo sapien
aggggctggtccaataagttgttct

SEQ ID NO: 16862 - DNA, 25 bp, Homo sapien
gtctgtggattgagccatatcatgc

SEQ ID NO: 16863 - DNA, 25 bp, Homo sapien
agcctttgtctgtggattgagccat

SEQ ID NO: 16864 - DNA, 25 bp, Homo sapien
ctcataggggctggtccaataagtt

SEQ ID NO: 16865 - DNA, 25 bp, Homo sapien
ctgcttctcataggggctggtccaa

SEQ ID NO: 16866 - DNA, 25 bp, Homo sapien
ccttgggttcagtttgcttctatac

SEQ ID NO: 16867 - DNA, 25 bp, Homo sapien
gatggcgaacagtcagtcgttcctt

SEQ ID NO: 16868 - DNA, 25 bp, Homo sapien
acaagtgcggctcaggccacgagtc

SEQ ID NO: 16869 - DNA, 25 bp, Homo sapien
agctaaaccttgtagtcccagaccc

SEQ ID NO: 16870 - DNA, 25 bp, Homo sapien
tgtgaaccacctgggccaatactta

SEQ ID NO: 16871 - DNA, 25 bp, Homo sapien
cgtgcagagaggttagaattacacc

SEQ ID NO: 16872 - DNA, 25 bp, Homo sapien
gaattacacccagatggcgaacagt

SEQ ID NO: 16873 - DNA, 25 bp, Homo sapien
ctagggagatgcaccgggcccactt

SEQ ID NO: 16874 - DNA, 25 bp, Homo sapien
gctgcagagcctgaactagggagat

SEQ ID NO: 16875 - DNA, 25 bp, Homo sapien
ctctggctgggagctaaaccttgta

SEQ ID NO: 16876 - DNA, 25 bp, Homo sapien
aagtcttttgtgaaccacctgggcc

SEQ ID NO: 16877 - DNA, 25 bp, Homo sapien
tcccgacctggcagcctgttgctag

SEQ ID NO: 16878 - DNA, 25 bp, Homo sapien
actgatgccaccaagaagcaaggga

SEQ ID NO: 16879 - DNA, 25 bp, Homo sapien
gatttactcatgacgggaccagcac

SEQ ID NO: 16880 - DNA, 25 bp, Homo sapien
tctccaggcacatgctctctgtcta

SEQ ID NO: 16881 - DNA, 25 bp, Homo sapien
ggatgaagccctcagaccctccttt

SEQ ID NO: 16882 - DNA, 25 bp, Homo sapien
ctgggcttgggccactgatgccacc

SEQ ID NO: 16883 - DNA, 25 bp, Homo sapien
ccagctcaagcaggcaagatttact

SEQ ID NO: 16884 - DNA, 25 bp, Homo sapien
tctgtgggcaggactttcttgggct

SEQ ID NO: 16885 - DNA, 25 bp, Homo sapien
tgtgtggtcaccttgagatgaaacc

SEQ ID NO: 16886 - DNA, 25 bp, Homo sapien
tcttgggctgtaaacctggatgaag

SEQ ID NO: 16887 - DNA, 25 bp, Homo sapien
ccattcaggtcaatcaagtgcccac

SEQ ID NO: 16888 - DNA, 25 bp, Homo sapien
ctctgtctatctagggctgggcttg

SEQ ID NO: 16889 - DNA, 25 bp, Homo sapien
gccctcggcaagttgtttccaggtg

SEQ ID NO: 16890 - DNA, 25 bp, Homo sapien
gtctgcatgcttccaaatctggccc

SEQ ID NO: 16891 - DNA, 25 bp, Homo sapien
ctcggcaagttgtttccaggtggtg

SEQ ID NO: 16892 - DNA, 25 bp, Homo sapien
cctcggcaagttgtttccaggtggt

SEQ ID NO: 16893 - DNA, 25 bp, Homo sapien
cttggccctcggcaagttgtttcca

SEQ ID NO: 16894 - DNA, 25 bp, Homo sapien
tgcatgcttccaaatctggcccttc

SEQ ID NO: 16895 - DNA, 25 bp, Homo sapien
tggccctcggcaagttgtttccagg

SEQ ID NO: 16896 - DNA, 25 bp, Homo sapien
ttggccctcggcaagttgtttccag

SEQ ID NO: 16897 - DNA, 25 bp, Homo sapien
agggctttccagcactagagctgca

SEQ ID NO: 16898 - DNA, 25 bp, Homo sapien
tggagagtctcattcttgggggaaa

SEQ ID NO: 16899 - DNA, 25 bp, Homo sapien
cagggctttccagcactagagctgc

SEQ ID NO: 16900 - DNA, 25 bp, Homo sapien
caggtggtggagagtctcattcttg

SEQ ID NO: 16901 - DNA, 25 bp, Homo sapien
ctcggcaagttgtttccaggtggtg

SEQ ID NO: 16902 - DNA, 25 bp, Homo sapien
gtctgcatgcttccaaatctggccc

SEQ ID NO: 16903 - DNA, 25 bp, Homo sapien
ccctcggcaagttgtttccaggtgg

SEQ ID NO: 16904 - DNA, 25 bp, Homo sapien
tgcatgcttccaaatctggcccttc

SEQ ID NO: 16905 - DNA, 25 bp, Homo sapien
cttggccctcggcaagttgtttcca

SEQ ID NO: 16906 - DNA, 25 bp, Homo sapien
ttggccctcggcaagttgtttccag

SEQ ID NO: 16907 - DNA, 25 bp, Homo sapien
cagggctttccagcactagagctgc

SEQ ID NO: 16908 - DNA, 25 bp, Homo sapien
gaaaggctgtctgcatgcttccaaa

SEQ ID NO: 16909 - DNA, 25 bp, Homo sapien
tggagagtctcattcttgggggaaa

SEQ ID NO: 16910 - DNA, 25 bp, Homo sapien
agggctttccagcactagagctgca

SEQ ID NO: 16911 - DNA, 25 bp, Homo sapien
acatctgagggagatgaaagtccct

SEQ ID NO: 16912 - DNA, 25 bp, Homo sapien
tttgctgcctcagatcggcacttac

SEQ ID NO: 16913 - DNA, 25 bp, Homo sapien
tgccacccgcccttccggcaggctc

SEQ ID NO: 16914 - DNA, 25 bp, Homo sapien
ccagcctggacccattgcttcagaa

SEQ ID NO: 16915 - DNA, 25 bp, Homo sapien
tcggtgtggaggatctactgtgcct

SEQ ID NO: 16916 - DNA, 25 bp, Homo sapien
cctctcggtgtggaggatctactgt

SEQ ID NO: 16917 - DNA, 25 bp, Homo sapien
cacttactgggcctctcggtgtgga

SEQ ID NO: 16918 - DNA, 25 bp, Homo sapien
ttcagaagggacaattagacaggga

SEQ ID NO: 16919 - DNA, 25 bp, Homo sapien
aggctgacctctggccagggattcc

SEQ ID NO: 16920 - DNA, 25 bp, Homo sapien
ctggacccattgcttcagaagggac

SEQ ID NO: 16921 - DNA, 25 bp, Homo sapien
ctcagatcggcacttactgggcctc

SEQ ID NO: 16922 - DNA, 25 bp, Homo sapien
aagcagccactttccactaggcaga

SEQ ID NO: 16923 - DNA, 25 bp, Homo sapien
tcaaaatgttcagctaagtgccatt

SEQ ID NO: 16924 - DNA, 25 bp, Homo sapien
aaaaatcaaatagggctaaaaggca

SEQ ID NO: 16925 - DNA, 25 bp, Homo sapien
tttattaaggtgacccatacccata

SEQ ID NO: 16926 - DNA, 25 bp, Homo sapien
gttcagctaagtgccatttctcaat

SEQ ID NO: 16927 - DNA, 25 bp, Homo sapien
cctgctactctgaagcagccacttt

SEQ ID NO: 16928 - DNA, 25 bp, Homo sapien
aatcaaatagggctaaaaggcagag

SEQ ID NO: 16929 - DNA, 25 bp, Homo sapien
agctgacagccttgactctttccct

SEQ ID NO: 16930 - DNA, 25 bp, Homo sapien
aaggtgacccatacccatagttaaa

SEQ ID NO: 16931 - DNA, 25 bp, Homo sapien
tccactaggcagatgtctttttctg

SEQ ID NO: 16932 - DNA, 25 bp, Homo sapien
gcctggccctactttagatttcaaa

SEQ ID NO: 16933 - DNA, 25 bp, Homo sapien
tcctagcagcaacaacatgaaggct

SEQ ID NO: 16934 - DNA, 25 bp, Homo sapien
agcacagcactgcttgcaaccagaa

SEQ ID NO: 16935 - DNA, 25 bp, Homo sapien
agaagctgaggaacagctctaatcc

SEQ ID NO: 16936 - DNA, 25 bp, Homo sapien
ttaccaccaatcaggagcaatccca

SEQ ID NO: 16937 - DNA, 25 bp, Homo sapien
tagaggaaaatgtagtcctagcagc

SEQ ID NO: 16938 - DNA, 25 bp, Homo sapien
ttatctgctaccagaggaagaggaa

SEQ ID NO: 16939 - DNA, 25 bp, Homo sapien
caggtgagaaacataatagaggaaa

SEQ ID NO: 16940 - DNA, 25 bp, Homo sapien
atgaaggctgaatgagtggctccca

SEQ ID NO: 16941 - DNA, 25 bp, Homo sapien
tctaatccacggatcgccaggagac

SEQ ID NO: 16942 - DNA, 25 bp, Homo sapien
ccaagagaatacaggcccttgagga

SEQ ID NO: 16943 - DNA, 25 bp, Homo sapien
ccctttaagtgacggagaagctgag

SEQ ID NO: 16944 - DNA, 25 bp, Homo sapien
agggttctgactgttttgggttgca

SEQ ID NO: 16945 - DNA, 25 bp, Homo sapien
agggacaagctttactgtgaaattc

SEQ ID NO: 16946 - DNA, 25 bp, Homo sapien
cttgagagtctgatacactgagttc

SEQ ID NO: 16947 - DNA, 25 bp, Homo sapien
agctatatggaaggcttgagagtct

SEQ ID NO: 16948 - DNA, 25 bp, Homo sapien
ttaccacttcagagccaacaacagc

SEQ ID NO: 16949 - DNA, 25 bp, Homo sapien
ttggcacacaagatcactgaatact

SEQ ID NO: 16950 - DNA, 25 bp, Homo sapien
gaaggtcatatgttcagggacaagc

SEQ ID NO: 16951 - DNA, 25 bp, Homo sapien
aggtacttcagatagtgcttggcac

SEQ ID NO: 16952 - DNA, 25 bp, Homo sapien
cagcttgatgataggtgggtactta

SEQ ID NO: 16953 - DNA, 25 bp, Homo sapien
ctgtgaaattctgtgccttgcctgg

SEQ ID NO: 16954 - DNA, 25 bp, Homo sapien
actgtgctacttaaactgtgtgacc

SEQ ID NO: 16955 - DNA, 25 bp, Homo sapien
ttttttctagagataagacactcac

SEQ ID NO: 16956 - DNA, 25 bp, Homo sapien
agataagacactcactttgttgccc

SEQ ID NO: 16957 - DNA, 25 bp, Homo sapien
tttatgattattattgtgccactaa

SEQ ID NO: 16958 - DNA, 25 bp, Homo sapien
attcgtatttggatcttactctaaa

SEQ ID NO: 16959 - DNA, 25 bp, Homo sapien
ttacaacattactgagatttaactc

SEQ ID NO: 16960 - DNA, 25 bp, Homo sapien
tccaaaaggtttgctcattgttcta

SEQ ID NO: 16961 - DNA, 25 bp, Homo sapien
attcctaaggttttgtttcattcat

SEQ ID NO: 16962 - DNA, 25 bp, Homo sapien
ttctagagataagacactcactttg

SEQ ID NO: 16963 - DNA, 25 bp, Homo sapien
taagaacattactcatttcatgccc

SEQ ID NO: 16964 - DNA, 25 bp, Homo sapien
agggaagcagcctttattccaaaag

SEQ ID NO: 16965 - DNA, 25 bp, Homo sapien
cattgttctaagaacattgctcatt

SEQ ID NO: 16966 - DNA, 25 bp, Homo sapien
atgctcccagatgttcaggaggcaa

SEQ ID NO: 16967 - DNA, 25 bp, Homo sapien
aagaacaaaactagaaaagaagata

SEQ ID NO: 16968 - DNA, 25 bp, Homo sapien
taatataaggtgatttcagttaacc

SEQ ID NO: 16969 - DNA, 25 bp, Homo sapien
aagacctgggatacataatgaaacc

SEQ ID NO: 16970 - DNA, 25 bp, Homo sapien
gaggtcaagccaggcggatcattta

SEQ ID NO: 16971 - DNA, 25 bp, Homo sapien
taaggaatatctgggcctatgctcc

SEQ ID NO: 16972 - DNA, 25 bp, Homo sapien
tctaaaatgtttaagaggagaaaga

SEQ ID NO: 16973 - DNA, 25 bp, Homo sapien
aaaaagagggctggataatgaaatt

SEQ ID NO: 16974 - DNA, 25 bp, Homo sapien
ataggactagtaaggaatatctggg

SEQ ID NO: 16975 - DNA, 25 bp, Homo sapien
gataatgaaattggggaaatctcaa

SEQ ID NO: 16976 - DNA, 25 bp, Homo sapien
attggggaaatctcaaaagaacaaa

SEQ ID NO: 16977 - DNA, 25 bp, Homo sapien
tgaaactaagttaactaccatcctc

SEQ ID NO: 16978 - DNA, 25 bp, Homo sapien
aatatgtgaaactaagttaactacc

SEQ ID NO: 16979 - DNA, 25 bp, Homo sapien
tccacacagagagtaatgtaaggga

SEQ ID NO: 16980 - DNA, 25 bp, Homo sapien
cccttaggaatttccacacagagag

SEQ ID NO: 16981 - DNA, 25 bp, Homo sapien
ttaggaatttccacacagagagtaa

SEQ ID NO: 16982 - DNA, 25 bp, Homo sapien
atttccacacagagagtaatgtaag

SEQ ID NO: 16983 - DNA, 25 bp, Homo sapien
tgtaagggaagtcttaaatatgtga

SEQ ID NO: 16984 - DNA, 25 bp, Homo sapien
gagagtaatgtaagggaagtcttaa

SEQ ID NO: 16985 - DNA, 25 bp, Homo sapien
acagagagtaatgtaagggaagtct

SEQ ID NO: 16986 - DNA, 25 bp, Homo sapien
taaacagccttaataagatataact

SEQ ID NO: 16987 - DNA, 25 bp, Homo sapien
tgtgggagaaaggtttaaaatcaca

SEQ ID NO: 16988 - DNA, 25 bp, Homo sapien
ttcctctgcaggatcactcttgaag

SEQ ID NO: 16989 - DNA, 25 bp, Homo sapien
agtgaccagtgacatgaggtaattc

SEQ ID NO: 16990 - DNA, 25 bp, Homo sapien
tgacacttacttagatccgagcaat

SEQ ID NO: 16991 - DNA, 25 bp, Homo sapien
catcagatatgttttggaagttagt

SEQ ID NO: 16992 - DNA, 25 bp, Homo sapien
aagatgtaatgttcaggtgccacac

SEQ ID NO: 16993 - DNA, 25 bp, Homo sapien
tagatccgagcaatggttagcacat

SEQ ID NO: 16994 - DNA, 25 bp, Homo sapien
aggtgccacactatcagctgctgta

SEQ ID NO: 16995 - DNA, 25 bp, Homo sapien
tcagctgctgtactatgacacttac

SEQ ID NO: 16996 - DNA, 25 bp, Homo sapien
ctgtaatcagatggtcatcagatat

SEQ ID NO: 16997 - DNA, 25 bp, Homo sapien
ttttaattgagaagtgaccagtgac

SEQ ID NO: 16998 - DNA, 25 bp, Homo sapien
tagcacaaagtttaactctgtaatc

SEQ ID NO: 16999 - DNA, 25 bp, Homo sapien
cggccaaaagggagttcttatattg

SEQ ID NO: 17000 - DNA, 25 bp, Homo sapien
taagaaatttgcatcacacgtctac

SEQ ID NO: 17001 - DNA, 25 bp, Homo sapien
atcatgattaaagttatcctccctc

SEQ ID NO: 17002 - DNA, 25 bp, Homo sapien
catcatatgttgcataacgtttgac

SEQ ID NO: 17003 - DNA, 25 bp, Homo sapien
cgtgtcagtatatgtatatgtgatt

SEQ ID NO: 17004 - DNA, 25 bp, Homo sapien
atattggcagtgtatcatgattaaa

SEQ ID NO: 17005 - DNA, 25 bp, Homo sapien
aggtaaatgaaagtggcatcaagag

SEQ ID NO: 17006 - DNA, 25 bp, Homo sapien
agggagttcttatattggcagtgta

SEQ ID NO: 17007 - DNA, 25 bp, Homo sapien
aacgtttgactattaagaaatttgc

SEQ ID NO: 17008 - DNA, 25 bp, Homo sapien
tgagatagtacaattcttatgcatc

SEQ ID NO: 17009 - DNA, 25 bp, Homo sapien
tgtgtaggtaaatgaaagtggcatc

SEQ ID NO: 17010 - DNA, 25 bp, Homo sapien
aatgtaaggaagttaggttggctaa

SEQ ID NO: 17011 - DNA, 25 bp, Homo sapien
taagagaatccaactaaagaaatgt

SEQ ID NO: 17012 - DNA, 25 bp, Homo sapien
atgattaacgagttaggccttgtta

SEQ ID NO: 17013 - DNA, 25 bp, Homo sapien
cggcaaatgtgacaaaggcgttttt

SEQ ID NO: 17014 - DNA, 25 bp, Homo sapien
cctctgtgtctgtgggttcctcacc

SEQ ID NO: 17015 - DNA, 25 bp, Homo sapien
aaaaggacacacagccctctgtgtc

SEQ ID NO: 17016 - DNA, 25 bp, Homo sapien
gcatgagctgccataagaggcctac

SEQ ID NO: 17017 - DNA, 25 bp, Homo sapien
atttcaaacgggacccttagtatga

SEQ ID NO: 17018 - DNA, 25 bp, Homo sapien
gtgaaacagcactatgattaacgag

SEQ ID NO: 17019 - DNA, 25 bp, Homo sapien
aaaactactcttcggcaaatgtgac

SEQ ID NO: 17020 - DNA, 25 bp, Homo sapien
cataagaggcctacgcaaaatttta

SEQ ID NO: 17021 - DNA, 25 bp, Homo sapien
cctaagctagtctgagtggggttct

SEQ ID NO: 17022 - DNA, 25 bp, Homo sapien
cgactaatccttggtagtctggtcc

SEQ ID NO: 17023 - DNA, 25 bp, Homo sapien
atgcccggtcgatcctttcttgaga

SEQ ID NO: 17024 - DNA, 25 bp, Homo sapien
tggggttctcatttccagccaaaat

SEQ ID NO: 17025 - DNA, 25 bp, Homo sapien
aattctgtgagcaatctgaggctcc

SEQ ID NO: 17026 - DNA, 25 bp, Homo sapien
actcagtcacatacctgacatggca

SEQ ID NO: 17027 - DNA, 25 bp, Homo sapien
ttcataccgacttaagagtgtagac

SEQ ID NO: 17028 - DNA, 25 bp, Homo sapien
aactctgagaactaggagaaacaga

SEQ ID NO: 17029 - DNA, 25 bp, Homo sapien
ttctgggacgttgtcaggatcagcc

SEQ ID NO: 17030 - DNA, 25 bp, Homo sapien
taagagtgtagacttactcagtcac

SEQ ID NO: 17031 - DNA, 25 bp, Homo sapien
ttccagccaaaatgtcccgactaat

SEQ ID NO: 17032 - DNA, 25 bp, Homo sapien
aaacttgccaatcgtgtactctaac

SEQ ID NO: 17033 - DNA, 25 bp, Homo sapien
attcagaacaaggatcactgggcta

SEQ ID NO: 17034 - DNA, 25 bp, Homo sapien
acactgagcactaattcagagcttt

SEQ ID NO: 17035 - DNA, 25 bp, Homo sapien
gaattcgagttcagcccagccaaca

SEQ ID NO: 17036 - DNA, 25 bp, Homo sapien
gctgaagcacgacaatcgccagaac

SEQ ID NO: 17037 - DNA, 25 bp, Homo sapien
aaaaaggtagcacatgtgtcatagc

SEQ ID NO: 17038 - DNA, 25 bp, Homo sapien
acagtagtaattcagaacaaggatc

SEQ ID NO: 17039 - DNA, 25 bp, Homo sapien
gtactctaacacacaacagcctgac

SEQ ID NO: 17040 - DNA, 25 bp, Homo sapien
attaagacacattaccaaacttgcc

SEQ ID NO: 17041 - DNA, 25 bp, Homo sapien
gccaggaattcgagttcagcccagc

SEQ ID NO: 17042 - DNA, 25 bp, Homo sapien
gcatattataatacacagcaaagca

SEQ ID NO: 17043 - DNA, 25 bp, Homo sapien
gggctagagatgaaggatttctatc

SEQ ID NO: 17044 - DNA, 25 bp, Homo sapien
ccacctactatgtcaggatggggcg

SEQ ID NO: 17045 - DNA, 25 bp, Homo sapien
attgccgagccacctactatgtcag

SEQ ID NO: 17046 - DNA, 25 bp, Homo sapien
aaaaaagttgctctgaatacatgtg

SEQ ID NO: 17047 - DNA, 25 bp, Homo sapien
aggggctagagatgaaggatttcta

SEQ ID NO: 17048 - DNA, 25 bp, Homo sapien
ttgctctgaatacatgtgtttccac

SEQ ID NO: 17049 - DNA, 25 bp, Homo sapien
tgtttccacagatgggttttactgc

SEQ ID NO: 17050 - DNA, 25 bp, Homo sapien
tgcgtggtccctccagctatcattg

SEQ ID NO: 17051 - DNA, 25 bp, Homo sapien
tatcattgccgagccacctactatg

SEQ ID NO: 17052 - DNA, 25 bp, Homo sapien
acagatgggttttactgcgtggtcc

SEQ ID NO: 17053 - DNA, 25 bp, Homo sapien
ttcaggccaaaaaaagttgctctga

SEQ ID NO: 17054 - DNA, 25 bp, Homo sapien
tttgtcacgcctccctgttaataaa

SEQ ID NO: 17055 - DNA, 25 bp, Homo sapien
tccctagaggagtgaaaagatgtct

SEQ ID NO: 17056 - DNA, 25 bp, Homo sapien
catacgttcgtcagttgatggccat

SEQ ID NO: 17057 - DNA, 25 bp, Homo sapien
cctggggaaacttgctcccaaatgt

SEQ ID NO: 17058 - DNA, 25 bp, Homo sapien
gaattgcacccttccctagaggagt

SEQ ID NO: 17059 - DNA, 25 bp, Homo sapien
tttctagcagcacatgtattgccta

SEQ ID NO: 17060 - DNA, 25 bp, Homo sapien
attgtgttcctaaaaagtccctata

SEQ ID NO: 17061 - DNA, 25 bp, Homo sapien
gtcattaaagcccagaattgcaccc

SEQ ID NO: 17062 - DNA, 25 bp, Homo sapien
agatgtctgagatgagtcttcaatc

SEQ ID NO: 17063 - DNA, 25 bp, Homo sapien
tgatggccatttgagttgttttcgc

SEQ ID NO: 17064 - DNA, 25 bp, Homo sapien
aaatgcgcaacacctctactgcctg

SEQ ID NO: 17065 - DNA, 25 bp, Homo sapien
tcacggcaagagttcatcatgactt

SEQ ID NO: 17066 - DNA, 25 bp, Homo sapien
cttttaaattggtgcagtgaattac

SEQ ID NO: 17067 - DNA, 25 bp, Homo sapien
attaataatgttgttgaggtcttct

SEQ ID NO: 17068 - DNA, 25 bp, Homo sapien
ttgaagctctgttgttttgtgcata

SEQ ID NO: 17069 - DNA, 25 bp, Homo sapien
aattacatggcccagagtatgatcc

SEQ ID NO: 17070 - DNA, 25 bp, Homo sapien
tttccatcacggcaagagttcatca

SEQ ID NO: 17071 - DNA, 25 bp, Homo sapien
ccagagtatgatccatcttggtgta

SEQ ID NO: 17072 - DNA, 25 bp, Homo sapien
tttgttgtgatatgagaatatactt

SEQ ID NO: 17073 - DNA, 25 bp, Homo sapien
aatgttgttgaggtcttctatatcc

SEQ ID NO: 17074 - DNA, 25 bp, Homo sapien
attggtgcagtgaattacatggccc

SEQ ID NO: 17075 - DNA, 25 bp, Homo sapien
ctccagctgttaattgtgggttgtt

SEQ ID NO: 17076 - DNA, 25 bp, Homo sapien
ctggaatgacttcggtttggaaagc

SEQ ID NO: 17077 - DNA, 25 bp, Homo sapien
ctcgtgtgtgttagccagcctgtgc

SEQ ID NO: 17078 - DNA, 25 bp, Homo sapien
gtgtgtgttagccagcctgtgcact

SEQ ID NO: 17079 - DNA, 25 bp, Homo sapien
gtgtgttagccagcctgtgcactga

SEQ ID NO: 17080 - DNA, 25 bp, Homo sapien
gaaagcggctcgtgtgtgttagcca

SEQ ID NO: 17081 - DNA, 25 bp, Homo sapien
catggggctggaatgacttcggttt

SEQ ID NO: 17082 - DNA, 25 bp, Homo sapien
aatgacttcggtttggaaagcggct

SEQ ID NO: 17083 - DNA, 25 bp, Homo sapien
ggctggaatgacttcggtttggaaa

SEQ ID NO: 17084 - DNA, 25 bp, Homo sapien
gcggctcgtgtgtgttagccagcct

SEQ ID NO: 17085 - DNA, 25 bp, Homo sapien
cttcggtttggaaagcggctcgtgt

SEQ ID NO: 17086 - DNA, 25 bp, Homo sapien
atgacttcggtttggaaagcggctc

SEQ ID NO: 17087 - DNA, 25 bp, Homo sapien
gtgtgttagccagcctgtgcactga

SEQ ID NO: 17088 - DNA, 25 bp, Homo sapien
cacacacatgcgtgggtgtgcgtgt

SEQ ID NO: 17089 - DNA, 25 bp, Homo sapien
gtgtgtgttagccagcctgtgcact

SEQ ID NO: 17090 - DNA, 25 bp, Homo sapien
ctcgtgtgtgttagccagcctgtgc

SEQ ID NO: 17091 - DNA, 25 bp, Homo sapien
atgacttcggtttggaaagcggctc

SEQ ID NO: 17092 - DNA, 25 bp, Homo sapien
ctggaatgacttcggtttggaaagc

SEQ ID NO: 17093 - DNA, 25 bp, Homo sapien
ttaacacaagtgatgccagctttcc

SEQ ID NO: 17094 - DNA, 25 bp, Homo sapien
gaaagcggctcgtgtgtgttagcca

SEQ ID NO: 17095 - DNA, 25 bp, Homo sapien
catggggctggaatgacttcggttt

SEQ ID NO: 17096 - DNA, 25 bp, Homo sapien
ggctggaatgacttcggtttggaaa

SEQ ID NO: 17097 - DNA, 25 bp, Homo sapien
gtgtgtgtggtttttgaacgctcct

SEQ ID NO: 17098 - DNA, 25 bp, Homo sapien
gcagagccaagatagaaaaacccaa

SEQ ID NO: 17099 - DNA, 25 bp, Homo sapien
tgagacagatccaatcatcccaatt

SEQ ID NO: 17100 - DNA, 25 bp, Homo sapien
aaataaaggaagacaccaagcagcc

SEQ ID NO: 17101 - DNA, 25 bp, Homo sapien
aaaaacccaagcaggccaggttgtg

SEQ ID NO: 17102 - DNA, 25 bp, Homo sapien
acctggtcaacatagctcactttat

SEQ ID NO: 17103 - DNA, 25 bp, Homo sapien
actgcttctgcaacaaaaaagagaa

SEQ ID NO: 17104 - DNA, 25 bp, Homo sapien
tttcacaaccctatgagacagatcc

SEQ ID NO: 17105 - DNA, 25 bp, Homo sapien
cagggcccatgctctaactactata

SEQ ID NO: 17106 - DNA, 25 bp, Homo sapien
tgcgtgcttattacatatgaggtac

SEQ ID NO: 17107 - DNA, 25 bp, Homo sapien
gaagacaccaagcagcctggctcca

SEQ ID NO: 17108 - DNA, 25 bp, Homo sapien
taacaataattaacagttgcgtgct

SEQ ID NO: 17109 - DNA, 25 bp, Homo sapien
atgagctgtgataatctcctgatta

SEQ ID NO: 17110 - DNA, 25 bp, Homo sapien
tgaaaatgcaaaactcccactccca

SEQ ID NO: 17111 - DNA, 25 bp, Homo sapien
tatctcatgagctgtgataatctcc

SEQ ID NO: 17112 - DNA, 25 bp, Homo sapien
aagttgttcaaaagagagctcccca

SEQ ID NO: 17113 - DNA, 25 bp, Homo sapien
tttctggatagacataagtgctagt

SEQ ID NO: 17114 - DNA, 25 bp, Homo sapien
cataagtgctagtgttgatttactc

SEQ ID NO: 17115 - DNA, 25 bp, Homo sapien
atttgtttaaaagctataacgtatc

SEQ ID NO: 17116 - DNA, 25 bp, Homo sapien
aaaagctataacgtatctactgtgc

SEQ ID NO: 17117 - DNA, 25 bp, Homo sapien
ctactgtgcttatctcatgagctgt

SEQ ID NO: 17118 - DNA, 25 bp, Homo sapien
tgtaagatgtgaaaatgcaaaactc

SEQ ID NO: 17119 - DNA, 25 bp, Homo sapien
actgttctatccatggttcaatgtt

SEQ ID NO: 17120 - DNA, 25 bp, Homo sapien
aaaactcccaattgatggctaacat

SEQ ID NO: 17121 - DNA, 25 bp, Homo sapien
gagtgaaacatgctgatctagagtc

SEQ ID NO: 17122 - DNA, 25 bp, Homo sapien
atctagagtccaagtggggtttgcc

SEQ ID NO: 17123 - DNA, 25 bp, Homo sapien
gccttatgtgtgcatattgagcttc

SEQ ID NO: 17124 - DNA, 25 bp, Homo sapien
ctgaaaaaagctagcccacttaagg

SEQ ID NO: 17125 - DNA, 25 bp, Homo sapien
aagatgcatggaataatgaatgtga

SEQ ID NO: 17126 - DNA, 25 bp, Homo sapien
acagagtgattaagaagaagatatt

SEQ ID NO: 17127 - DNA, 25 bp, Homo sapien
tccctaggttgttaataagatgcat

SEQ ID NO: 17128 - DNA, 25 bp, Homo sapien
ggtaaaacttaggaatatgcttctg

SEQ ID NO: 17129 - DNA, 25 bp, Homo sapien
tctctagtgttgatgttagtgccat

SEQ ID NO: 17130 - DNA, 25 bp, Homo sapien
cttcctgaaaacaaagcacaatcat

SEQ ID NO: 17131 - DNA, 25 bp, Homo sapien
gagtcttcgggcacccaagggtcgc

SEQ ID NO: 17132 - DNA, 25 bp, Homo sapien
gcgacccttgggtgcccgaagactc

SEQ ID NO: 17133 - DNA, 25 bp, Homo sapien
cgcggagacgcggtagagaggagtc

SEQ ID NO: 17134 - DNA, 25 bp, Homo sapien
gactcctctctaccgcgtctccgcg

SEQ ID NO: 17135 - DNA, 25 bp, Homo sapien
tatatttgcggagtagatgagatga

SEQ ID NO: 17136 - DNA, 25 bp, Homo sapien
aggtgagactggagacaatctatat

SEQ ID NO: 17137 - DNA, 25 bp, Homo sapien
atgagatgagcacccaagatgtctt

SEQ ID NO: 17138 - DNA, 25 bp, Homo sapien
agcctgataggcctgttctgaatta

SEQ ID NO: 17139 - DNA, 25 bp, Homo sapien
gtctgaactattaggaaggagtgtg

SEQ ID NO: 17140 - DNA, 25 bp, Homo sapien
aagcagctggctaacttcaacaaat

SEQ ID NO: 17141 - DNA, 25 bp, Homo sapien
taatgctgtcgttgagtgataaaaa

SEQ ID NO: 17142 - DNA, 25 bp, Homo sapien
cagttgcggacaggaaaattctatc

SEQ ID NO: 17143 - DNA, 25 bp, Homo sapien
tttgacatagtcacgggcagcatct

SEQ ID NO: 17144 - DNA, 25 bp, Homo sapien
agaattgtctccactactgcgcgtt

SEQ ID NO: 17145 - DNA, 25 bp, Homo sapien
tggggagaggtatcgtgtattttat

SEQ ID NO: 17146 - DNA, 25 bp, Homo sapien
tccatttattttgagcccaggggtc

SEQ ID NO: 17147 - DNA, 25 bp, Homo sapien
tatttacaaggctgtcttaattgac

SEQ ID NO: 17148 - DNA, 25 bp, Homo sapien
aaataaatcattggaactgcatcaa

SEQ ID NO: 17149 - DNA, 25 bp, Homo sapien
caattatgtgagtttcagaaagcat

SEQ ID NO: 17150 - DNA, 25 bp, Homo sapien
ttattttgagcccaggggtctctgg

SEQ ID NO: 17151 - DNA, 25 bp, Homo sapien
cagaaagcatttggtggtcaaaaac

SEQ ID NO: 17152 - DNA, 25 bp, Homo sapien
cccataataatgatgtcggttccat

SEQ ID NO: 17153 - DNA, 25 bp, Homo sapien
aaccaccaggattttgaccaccatt

SEQ ID NO: 17154 - DNA, 25 bp, Homo sapien
aattagttaaccaccaggattttga

SEQ ID NO: 17155 - DNA, 25 bp, Homo sapien
ctaattcagatttgcaaaaagctcc

SEQ ID NO: 17156 - DNA, 25 bp, Homo sapien
attggaactgcatcaattatgtgag

SEQ ID NO: 17157 - DNA, 25 bp, Homo sapien
ctcacgtgggctgatatgaaagatt

SEQ ID NO: 17158 - DNA, 25 bp, Homo sapien
aaaccctggctatctcacgtgggct

SEQ ID NO: 17159 - DNA, 25 bp, Homo sapien
tatgaaagattgacaggtgcctaac

SEQ ID NO: 17160 - DNA, 25 bp, Homo sapien
gggatgtatccagctgaaagactgt

SEQ ID NO: 17161 - DNA, 25 bp, Homo sapien
aatatatagaatgattgggaagtcc

SEQ ID NO: 17162 - DNA, 25 bp, Homo sapien
ttttgaggagaaacagcattttatt

SEQ ID NO: 17163 - DNA, 25 bp, Homo sapien
attgggaagtcctattgctgtcttt

SEQ ID NO: 17164 - DNA, 25 bp, Homo sapien
tgttggccctgtcatgagaaagaat

SEQ ID NO: 17165 - DNA, 25 bp, Homo sapien
atcaggaagagagaagtgttttgag

SEQ ID NO: 17166 - DNA, 25 bp, Homo sapien
ttgtgctttgtaagagaacccagct

SEQ ID NO: 17167 - DNA, 25 bp, Homo sapien
gcttaacaagaaacttcatggcaaa

SEQ ID NO: 17168 - DNA, 25 bp, Homo sapien
ccatggttgtttggggcctattacc

SEQ ID NO: 17169 - DNA, 25 bp, Homo sapien
acctcagaatcacccagaccctgtt

SEQ ID NO: 17170 - DNA, 25 bp, Homo sapien
aaactgctgatatcagctgctctgt

SEQ ID NO: 17171 - DNA, 25 bp, Homo sapien
aaacactaggccagcttgccctctg

SEQ ID NO: 17172 - DNA, 25 bp, Homo sapien
tttcaggtcctgcatactagtaaaa

SEQ ID NO: 17173 - DNA, 25 bp, Homo sapien
aatgttaaacactaggccagcttgc

SEQ ID NO: 17174 - DNA, 25 bp, Homo sapien
tactagtaaaactgctgatatcagc

SEQ ID NO: 17175 - DNA, 25 bp, Homo sapien
aggtcctgcatactagtaaaactgc

SEQ ID NO: 17176 - DNA, 25 bp, Homo sapien
ttggggcctattacctcagaatcac

SEQ ID NO: 17177 - DNA, 25 bp, Homo sapien
tgtttggggcctattacctcagaat

SEQ ID NO: 17178 - DNA, 25 bp, Homo sapien
atgttaaacactaggccagcttgcc

SEQ ID NO: 17179 - DNA, 25 bp, Homo sapien
aaatgctgtgcttaatgttagtgac

SEQ ID NO: 17180 - DNA, 25 bp, Homo sapien
acagacatgcaaacaacgagataaa

SEQ ID NO: 17181 - DNA, 25 bp, Homo sapien
gcaaacaacgagataaaacacaatt

SEQ ID NO: 17182 - DNA, 25 bp, Homo sapien
taatgttagtgacagacagataaat

SEQ ID NO: 17183 - DNA, 25 bp, Homo sapien
gataaataggatgcgtctgtttgcc

SEQ ID NO: 17184 - DNA, 25 bp, Homo sapien
tagatgagtgctacaataataatct

SEQ ID NO: 17185 - DNA, 25 bp, Homo sapien
caatttacaactcactggggaagaa

SEQ ID NO: 17186 - DNA, 25 bp, Homo sapien
tgcccttaagcaatttacaactcac

SEQ ID NO: 17187 - DNA, 25 bp, Homo sapien
gtaatatttcaggaacagatagaat

SEQ ID NO: 17188 - DNA, 25 bp, Homo sapien
tggggaagaaacagacatgcaaaca

SEQ ID NO: 17189 - DNA, 25 bp, Homo sapien
caggaacagatagaatggaggtcct

SEQ ID NO: 17190 - DNA, 25 bp, Homo sapien
agaataaaagcgacacatccaaaga

SEQ ID NO: 17191 - DNA, 25 bp, Homo sapien
aatcagagaagcacatataatttcc

SEQ ID NO: 17192 - DNA, 25 bp, Homo sapien
ccagcagttagaataaaagcgacac

SEQ ID NO: 17193 - DNA, 25 bp, Homo sapien
gtgaaatggatgaactcaggtagca

SEQ ID NO: 17194 - DNA, 25 bp, Homo sapien
caagtgctcagcctacagcagtcag

SEQ ID NO: 17195 - DNA, 25 bp, Homo sapien
tgggctgatgctctaccaagtgctc

SEQ ID NO: 17196 - DNA, 25 bp, Homo sapien
actgatctttgaagcagagaaatga

SEQ ID NO: 17197 - DNA, 25 bp, Homo sapien
ttcactgggctgctatctgtgggct

SEQ ID NO: 17198 - DNA, 25 bp, Homo sapien
tcccatgcagatcaactgtgaaatg

SEQ ID NO: 17199 - DNA, 25 bp, Homo sapien
gctgatggagcttgtaatttagccc

SEQ ID NO: 17200 - DNA, 25 bp, Homo sapien
tcagaaagaggtacaacaaatagtt

SEQ ID NO: 17201 - DNA, 25 bp, Homo sapien
ctttccctcagcacagaagagggga

SEQ ID NO: 17202 - DNA, 25 bp, Homo sapien
atcttgatcactcctgaggggtaat

SEQ ID NO: 17203 - DNA, 25 bp, Homo sapien
tgctacaaaaccaagaaaggagagg

SEQ ID NO: 17204 - DNA, 25 bp, Homo sapien
gtactggaagccatgctacaaaacc

SEQ ID NO: 17205 - DNA, 25 bp, Homo sapien
actcacctcgagatggtaaaaccac

SEQ ID NO: 17206 - DNA, 25 bp, Homo sapien
aataaaaaaggagcaaggagatgac

SEQ ID NO: 17207 - DNA, 25 bp, Homo sapien
cagtctggaatgcagcctggcaaca

SEQ ID NO: 17208 - DNA, 25 bp, Homo sapien
agcaaggagatgactaacaggtact

SEQ ID NO: 17209 - DNA, 25 bp, Homo sapien
actttctctgaatggttgcctgcca

SEQ ID NO: 17210 - DNA, 25 bp, Homo sapien
aaaggagaggcagcttttctttccc

SEQ ID NO: 17211 - DNA, 25 bp, Homo sapien
atgactaacaggtactggaagccat

SEQ ID NO: 17212 - DNA, 25 bp, Homo sapien
acaagtatatgaccagagttagagc

SEQ ID NO: 17213 - DNA, 25 bp, Homo sapien
aaaaacaagtatatgaccagagtta

SEQ ID NO: 17214 - DNA, 25 bp, Homo sapien
taaagcctagtgaatatttaaattc

SEQ ID NO: 17215 - DNA, 25 bp, Homo sapien
ctgaaataatagcttgttgaagaag

SEQ ID NO: 17216 - DNA, 25 bp, Homo sapien
atcaaacttgctttcaaaacctgtt

SEQ ID NO: 17217 - DNA, 25 bp, Homo sapien
atatgaccagagttagagctgaaat

SEQ ID NO: 17218 - DNA, 25 bp, Homo sapien
gtatatgaccagagttagagctgaa

SEQ ID NO: 17219 - DNA, 25 bp, Homo sapien
ccataaagcctagtgaatatttaaa

SEQ ID NO: 17220 - DNA, 25 bp, Homo sapien
ccagagttagagctgaaataatagc

SEQ ID NO: 17221 - DNA, 25 bp, Homo sapien
tgaatatgttgccagaaaaagaagc

SEQ ID NO: 17222 - DNA, 25 bp, Homo sapien
tgaccagagttagagctgaaataat

SEQ ID NO: 17223 - DNA, 25 bp, Homo sapien
atccatgcaagatgcagcaggctta

SEQ ID NO: 17224 - DNA, 25 bp, Homo sapien
aaatgacaagatggcactgtagttc

SEQ ID NO: 17225 - DNA, 25 bp, Homo sapien
ctggaaagtaccaggcactgtcctg

SEQ ID NO: 17226 - DNA, 25 bp, Homo sapien
cactgtagttcaggagtagagatga

SEQ ID NO: 17227 - DNA, 25 bp, Homo sapien
ggagaaacagacattgaaacagaca

SEQ ID NO: 17228 - DNA, 25 bp, Homo sapien
ttatcactagatgcatgctggaaac

SEQ ID NO: 17229 - DNA, 25 bp, Homo sapien
gttgggagaccctgcaattcatcca

SEQ ID NO: 17230 - DNA, 25 bp, Homo sapien
ttaatgaagtgagggaaggatcata

SEQ ID NO: 17231 - DNA, 25 bp, Homo sapien
caggagtactgaggaaagctttcat

SEQ ID NO: 17232 - DNA, 25 bp, Homo sapien
aatctgttatgtgtgaagctgggag

SEQ ID NO: 17233 - DNA, 25 bp, Homo sapien
tctcatgtgaaagccaagactgtcc

SEQ ID NO: 17234 - DNA, 25 bp, Homo sapien
gagccactaacgtgtggaccctgca

SEQ ID NO: 17235 - DNA, 25 bp, Homo sapien
taaaagtagcgtacagagccactaa

SEQ ID NO: 17236 - DNA, 25 bp, Homo sapien
attcagcaaagcaaagaagaggatg

SEQ ID NO: 17237 - DNA, 25 bp, Homo sapien
agataagaatcatttggctgcctcc

SEQ ID NO: 17238 - DNA, 25 bp, Homo sapien
gatcaatgggtacaaacagacagaa

SEQ ID NO: 17239 - DNA, 25 bp, Homo sapien
accctgcaggagattcgctacagca

SEQ ID NO: 17240 - DNA, 25 bp, Homo sapien
attcgctacagcagaaggcattcag

SEQ ID NO: 17241 - DNA, 25 bp, Homo sapien
tttggctgcctccagaaaaagaaaa

SEQ ID NO: 17242 - DNA, 25 bp, Homo sapien
ttcaggaagcatgctgaggaattcc

SEQ ID NO: 17243 - DNA, 25 bp, Homo sapien
acagaagaaatgagacctaggcttt

SEQ ID NO: 17244 - DNA, 25 bp, Homo sapien
gagagaagttgatcaatgggtacaa

SEQ ID NO: 17245 - DNA, 25 bp, Homo sapien
ctgtgatgacatactcctaactctg

SEQ ID NO: 17246 - DNA, 25 bp, Homo sapien
taactctgtgacaggctgatagcca

SEQ ID NO: 17247 - DNA, 25 bp, Homo sapien
cagctagtgctgaaatgagaaatct

SEQ ID NO: 17248 - DNA, 25 bp, Homo sapien
ggttaggaatacctctccatctttg

SEQ ID NO: 17249 - DNA, 25 bp, Homo sapien
gaaatctgtgagaaattaggaaccc

SEQ ID NO: 17250 - DNA, 25 bp, Homo sapien
tgtgacaggctgatagccagacctc

SEQ ID NO: 17251 - DNA, 25 bp, Homo sapien
tctgtgagaaattaggaacccaggg

SEQ ID NO: 17252 - DNA, 25 bp, Homo sapien
aaatcactgtgatgacatactccta

SEQ ID NO: 17253 - DNA, 25 bp, Homo sapien
tgatagccagacctcagctagtgct

SEQ ID NO: 17254 - DNA, 25 bp, Homo sapien
ccagggggttaggaatacctctcca

SEQ ID NO: 17255 - DNA, 25 bp, Homo sapien
atactcctaactctgtgacaggctg

SEQ ID NO: 17256 - DNA, 25 bp, Homo sapien
aggaggaatccaaggtagctgaccc

SEQ ID NO: 17257 - DNA, 25 bp, Homo sapien
tatttttctgtaagggtgaggttgc

SEQ ID NO: 17258 - DNA, 25 bp, Homo sapien
atctgtccctgacttagaaggagga

SEQ ID NO: 17259 - DNA, 25 bp, Homo sapien
ctgtcccgtaagacatgcctgcagc

SEQ ID NO: 17260 - DNA, 25 bp, Homo sapien
ggggctgtctctgtcccgtaagaca

SEQ ID NO: 17261 - DNA, 25 bp, Homo sapien
ttccctgaatccctgagagtgacct

SEQ ID NO: 17262 - DNA, 25 bp, Homo sapien
cagagttatcgggaggccagtcctc

SEQ ID NO: 17263 - DNA, 25 bp, Homo sapien
gcacaaggacactccaggcagaaca

SEQ ID NO: 17264 - DNA, 25 bp, Homo sapien
cacatgcccagaacttggcctttct

SEQ ID NO: 17265 - DNA, 25 bp, Homo sapien
tggaggaagtccagcacaaggacac

SEQ ID NO: 17266 - DNA, 25 bp, Homo sapien
agtgacaagaaacagatcagtatac

SEQ ID NO: 17267 - DNA, 25 bp, Homo sapien
gcaaagcacagtattataccttgaa

SEQ ID NO: 17268 - DNA, 25 bp, Homo sapien
aagcacagtattataccttgaacac

SEQ ID NO: 17269 - DNA, 25 bp, Homo sapien
ctacttcgttgaaggcccttcccag

SEQ ID NO: 17270 - DNA, 25 bp, Homo sapien
acttcgagtctccattttacaactg

SEQ ID NO: 17271 - DNA, 25 bp, Homo sapien
cttagaccttatataatgtaatgtc

SEQ ID NO: 17272 - DNA, 25 bp, Homo sapien
tcgagtctccattttacaactgttc

SEQ ID NO: 17273 - DNA, 25 bp, Homo sapien
agtattataccttgaacacacctta

SEQ ID NO: 17274 - DNA, 25 bp, Homo sapien
tgttcttcctacttcgttgaaggcc

SEQ ID NO: 17275 - DNA, 25 bp, Homo sapien
tgccaaaggtccttgctcccaacct

SEQ ID NO: 17276 - DNA, 25 bp, Homo sapien
acagtattataccttgaacacacct

SEQ ID NO: 17277 - DNA, 25 bp, Homo sapien
cttcctacttcgttgaaggcccttc

SEQ ID NO: 17278 - DNA, 25 bp, Homo sapien
cttcctacttcgttgaaggcccttc

SEQ ID NO: 17279 - DNA, 25 bp, Homo sapien
ttcgagtctccattttacaactgtt

SEQ ID NO: 17280 - DNA, 25 bp, Homo sapien
gcaaagcacagtattataccttgaa

SEQ ID NO: 17281 - DNA, 25 bp, Homo sapien
tattatagcacttgccaaaggtcct

SEQ ID NO: 17282 - DNA, 25 bp, Homo sapien
catcttttgatgttaaagaggccca

SEQ ID NO: 17283 - DNA, 25 bp, Homo sapien
aacctttttcacttcgagtctccat

SEQ ID NO: 17284 - DNA, 25 bp, Homo sapien
tgttcttcctacttcgttgaaggcc

SEQ ID NO: 17285 - DNA, 25 bp, Homo sapien
cttagaccttatataatgtaatgtc

SEQ ID NO: 17286 - DNA, 25 bp, Homo sapien
agtattataccttgaacacacctta

SEQ ID NO: 17287 - DNA, 25 bp, Homo sapien
tgccaaaggtccttgctcccaacct

SEQ ID NO: 17288 - DNA, 25 bp, Homo sapien
ctacttcgttgaaggcccttcccag

SEQ ID NO: 17289 - DNA, 25 bp, Homo sapien
accttctgaattagatgggactaca

SEQ ID NO: 17290 - DNA, 25 bp, Homo sapien
caggtgccaatcaccatgcaaggtt

SEQ ID NO: 17291 - DNA, 25 bp, Homo sapien
gatcaccttctgaattagatgggac

SEQ ID NO: 17292 - DNA, 25 bp, Homo sapien
gtgccaatcaccatgcaaggttgat

SEQ ID NO: 17293 - DNA, 25 bp, Homo sapien
tacaggtgccaatcaccatgcaagg

SEQ ID NO: 17294 - DNA, 25 bp, Homo sapien
aaatccccagtcagaagacagcagg

SEQ ID NO: 17295 - DNA, 25 bp, Homo sapien
tccagatcaccttctgaattagatg

SEQ ID NO: 17296 - DNA, 25 bp, Homo sapien
cattttcctgcattccgtaaatccc

SEQ ID NO: 17297 - DNA, 25 bp, Homo sapien
cagggacttgctctgtctcttaagc

SEQ ID NO: 17298 - DNA, 25 bp, Homo sapien
caccatgcaaggttgattttgtaca

SEQ ID NO: 17299 - DNA, 25 bp, Homo sapien
tcaccttctgaattagatgggacta

SEQ ID NO: 17300 - DNA, 25 bp, Homo sapien
atgctaggtgtatagtcactctttc

SEQ ID NO: 17301 - DNA, 25 bp, Homo sapien
gcatgctaggtgtatagtcactctt

SEQ ID NO: 17302 - DNA, 25 bp, Homo sapien
gtatagtcactctttctacctctgc

SEQ ID NO: 17303 - DNA, 25 bp, Homo sapien
gtgccaatcaccatgcaaggttgat

SEQ ID NO: 17304 - DNA, 25 bp, Homo sapien
gacatcaatagtcctccaacctcag

SEQ ID NO: 17305 - DNA, 25 bp, Homo sapien
ttcctgacatcaatagtcctccaac

SEQ ID NO: 17306 - DNA, 25 bp, Homo sapien
tggggacgtctcactgcattgctca

SEQ ID NO: 17307 - DNA, 25 bp, Homo sapien
accttctgaattagatgggactaca

SEQ ID NO: 17308 - DNA, 25 bp, Homo sapien
tcttatatacatggggacgtctcac

SEQ ID NO: 17309 - DNA, 25 bp, Homo sapien
agcatgctaggtgtatagtcactct

SEQ ID NO: 17310 - DNA, 25 bp, Homo sapien
agccagcatgctaggtgtatagtca

SEQ ID NO: 17311 - DNA, 25 bp, Homo sapien
gggccctttcagctctaagactgtt

SEQ ID NO: 17312 - DNA, 25 bp, Homo sapien
tccaacaggattagaccagatgaat

SEQ ID NO: 17313 - DNA, 25 bp, Homo sapien
ttagaccagatgaatagatgatctc

SEQ ID NO: 17314 - DNA, 25 bp, Homo sapien
tcttctgaacagtgacgcccaccat

SEQ ID NO: 17315 - DNA, 25 bp, Homo sapien
tatcaagcctgtccaaatgactaac

SEQ ID NO: 17316 - DNA, 25 bp, Homo sapien
tacccgcagttctaatatgagattc

SEQ ID NO: 17317 - DNA, 25 bp, Homo sapien
actctgcttttaatggcaggttgac

SEQ ID NO: 17318 - DNA, 25 bp, Homo sapien
tgagattcaccattccaacaggatt

SEQ ID NO: 17319 - DNA, 25 bp, Homo sapien
gcacgcacattaggtaaagatgccc

SEQ ID NO: 17320 - DNA, 25 bp, Homo sapien
taagactgttgagatttgcacgcac

SEQ ID NO: 17321 - DNA, 25 bp, Homo sapien
agtgacgcccaccatcaatgtttaa

SEQ ID NO: 17322 - DNA, 25 bp, Homo sapien
tctttcagcagacctgtcgaggtgc

SEQ ID NO: 17323 - DNA, 25 bp, Homo sapien
aaagcctgtggatttatgacctggt

SEQ ID NO: 17324 - DNA, 25 bp, Homo sapien
ccaacgtggcgtcaaatatcttaac

SEQ ID NO: 17325 - DNA, 25 bp, Homo sapien
gtaaactcaagattgtagaggtggg

SEQ ID NO: 17326 - DNA, 25 bp, Homo sapien
gcagcatttgcattaggataccacc

SEQ ID NO: 17327 - DNA, 25 bp, Homo sapien
agactggggcacatttctttcagca

SEQ ID NO: 17328 - DNA, 25 bp, Homo sapien
gagctactgccaatgtctgcggacc

SEQ ID NO: 17329 - DNA, 25 bp, Homo sapien
tgaatattataaggccaacgtggcg

SEQ ID NO: 17330 - DNA, 25 bp, Homo sapien
tagtgagagaaatctgagctactgc

SEQ ID NO: 17331 - DNA, 25 bp, Homo sapien
gtgcgagtttgcctttggttgtaaa

SEQ ID NO: 17332 - DNA, 25 bp, Homo sapien
tggtgcgcttgccagcaaaaagact

SEQ ID NO: 17333 - DNA, 25 bp, Homo sapien
agaaatgtctttctggcactgtggt

SEQ ID NO: 17334 - DNA, 25 bp, Homo sapien
tggaagtttctaagcatctcgacgc

SEQ ID NO: 17335 - DNA, 25 bp, Homo sapien
gagaagactctcagggagtcgtgct

SEQ ID NO: 17336 - DNA, 25 bp, Homo sapien
ttccctgacaagagacacttggggt

SEQ ID NO: 17337 - DNA, 25 bp, Homo sapien
acaagagacacttggggtcttccca

SEQ ID NO: 17338 - DNA, 25 bp, Homo sapien
agggaacaaaactggtgatccagga

SEQ ID NO: 17339 - DNA, 25 bp, Homo sapien
atggttaggctggagagaagactct

SEQ ID NO: 17340 - DNA, 25 bp, Homo sapien
tgatccaggaagtgaaatcagcttc

SEQ ID NO: 17341 - DNA, 25 bp, Homo sapien
caagcccttgcagggtggtctagca

SEQ ID NO: 17342 - DNA, 25 bp, Homo sapien
ggctcccaggagctaagtctataaa

SEQ ID NO: 17343 - DNA, 25 bp, Homo sapien
catctcgacgcttggaaaagtgcat

SEQ ID NO: 17344 - DNA, 25 bp, Homo sapien
tcttgcctgagcagaggctgtagca

SEQ ID NO: 17345 - DNA, 25 bp, Homo sapien
cagcagctggacttcttgcctgagc

SEQ ID NO: 17346 - DNA, 25 bp, Homo sapien
tgtgggttgtctcttcccagacagt

SEQ ID NO: 17347 - DNA, 25 bp, Homo sapien
agcactcagcagctggacttcttgc

SEQ ID NO: 17348 - DNA, 25 bp, Homo sapien
ttgtcacattgggtataagcaacac

SEQ ID NO: 17349 - DNA, 25 bp, Homo sapien
caggagacaaggattgagcactcag

SEQ ID NO: 17350 - DNA, 25 bp, Homo sapien
ataagcaacacatttggagaagggg

SEQ ID NO: 17351 - DNA, 25 bp, Homo sapien
acacagtcagcaggagacaaggatt

SEQ ID NO: 17352 - DNA, 25 bp, Homo sapien
agcaaagacacagtcagcaggagac

SEQ ID NO: 17353 - DNA, 25 bp, Homo sapien
ctgagggatttgtgggttgtctctt

SEQ ID NO: 17354 - DNA, 25 bp, Homo sapien
gaaagccacagtccacctgctgagg

SEQ ID NO: 17355 - DNA, 25 bp, Homo sapien
agatgatcctcaatgttggtatggc

SEQ ID NO: 17356 - DNA, 25 bp, Homo sapien
agcaagatgatcctcaatgttggta

SEQ ID NO: 17357 - DNA, 25 bp, Homo sapien
ctagagagggcattacagatgaggt

SEQ ID NO: 17358 - DNA, 25 bp, Homo sapien
tgatcctcaatgttggtatggcaaa

SEQ ID NO: 17359 - DNA, 25 bp, Homo sapien
gatgatcctcaatgttggtatggca

SEQ ID NO: 17360 - DNA, 25 bp, Homo sapien
atgatcctcaatgttggtatggcaa

SEQ ID NO: 17361 - DNA, 25 bp, Homo sapien
gcaagatgatcctcaatgttggtat

SEQ ID NO: 17362 - DNA, 25 bp, Homo sapien
tagagagggcattacagatgaggtc

SEQ ID NO: 17363 - DNA, 25 bp, Homo sapien
gagcaagatgatcctcaatgttggt

SEQ ID NO: 17364 - DNA, 25 bp, Homo sapien
atcctcaatgttggtatggcaaacc

SEQ ID NO: 17365 - DNA, 25 bp, Homo sapien
gatcctcaatgttggtatggcaaac

SEQ ID NO: 17366 - DNA, 25 bp, Homo sapien
ttctgaagatctggcccaaaacact

SEQ ID NO: 17367 - DNA, 25 bp, Homo sapien
ataaaacccacatggaagtcaccac

SEQ ID NO: 17368 - DNA, 25 bp, Homo sapien
actaaagcaatatcacctggatgac

SEQ ID NO: 17369 - DNA, 25 bp, Homo sapien
tcagtcaggcataactaaagcaagt

SEQ ID NO: 17370 - DNA, 25 bp, Homo sapien
agtcaccacctcaggggaactttta

SEQ ID NO: 17371 - DNA, 25 bp, Homo sapien
agtgttagcatgataaataagtgcc

SEQ ID NO: 17372 - DNA, 25 bp, Homo sapien
tgaggtccagataagtgattgacta

SEQ ID NO: 17373 - DNA, 25 bp, Homo sapien
tctatgactttgtagagagaagggg

SEQ ID NO: 17374 - DNA, 25 bp, Homo sapien
tgcctgttaaatgggaggctgcctt

SEQ ID NO: 17375 - DNA, 25 bp, Homo sapien
aacagcaaacaccttgagtgcttac

SEQ ID NO: 17376 - DNA, 25 bp, Homo sapien
ggcaaagaacctactcatgagaatt

SEQ ID NO: 17377 - DNA, 25 bp, Homo sapien
acttccaagataggcatgtgagcaa

SEQ ID NO: 17378 - DNA, 25 bp, Homo sapien
ataggtcagacccaaagagaatatt

SEQ ID NO: 17379 - DNA, 25 bp, Homo sapien
atatggcgtaagtcacaacaacttc

SEQ ID NO: 17380 - DNA, 25 bp, Homo sapien
aaaggctaaacagtagtcaagtgac

SEQ ID NO: 17381 - DNA, 25 bp, Homo sapien
tggagaaagtagagatttgttgaca

SEQ ID NO: 17382 - DNA, 25 bp, Homo sapien
atggagaaatggagcaattgcttat

SEQ ID NO: 17383 - DNA, 25 bp, Homo sapien
agtcaagtgacatgtggagaaagta

SEQ ID NO: 17384 - DNA, 25 bp, Homo sapien
tgctgtgatcaaaatggcagggttt

SEQ ID NO: 17385 - DNA, 25 bp, Homo sapien
acttcatgcagataaaacagggagc

SEQ ID NO: 17386 - DNA, 25 bp, Homo sapien
gaagaatggattgtgttgatgttag

SEQ ID NO: 17387 - DNA, 25 bp, Homo sapien
ttatcgtgctgtggtgactcacttc

SEQ ID NO: 17388 - DNA, 25 bp, Homo sapien
tagactatgctgatacaattgattt

SEQ ID NO: 17389 - DNA, 25 bp, Homo sapien
gtagaaagggcaattagactatgct

SEQ ID NO: 17390 - DNA, 25 bp, Homo sapien
aaactatatttgtattgcccttttc

SEQ ID NO: 17391 - DNA, 25 bp, Homo sapien
gtcaagtttgagaatgcactggggt

SEQ ID NO: 17392 - DNA, 25 bp, Homo sapien
atagaatagcagtatgacaaaacta

SEQ ID NO: 17393 - DNA, 25 bp, Homo sapien
tatcagtagaaagggcaattagact

SEQ ID NO: 17394 - DNA, 25 bp, Homo sapien
gaggaggagtatctatcagtagaaa

SEQ ID NO: 17395 - DNA, 25 bp, Homo sapien
ctaagatgcaggaggaggagtatct

SEQ ID NO: 17396 - DNA, 25 bp, Homo sapien
aatgcactggggttagaagctgcta

SEQ ID NO: 17397 - DNA, 25 bp, Homo sapien
ttattttgtcatagaatagcagtat

SEQ ID NO: 17398 - DNA, 25 bp, Homo sapien
caagtttgagaatgcactggggtta

SEQ ID NO: 17399 - DNA, 25 bp, Homo sapien
tataaataccagcatacgacagagg

SEQ ID NO: 17400 - DNA, 25 bp, Homo sapien
cttagaatgtcacacaaagcttgtt

SEQ ID NO: 17401 - DNA, 25 bp, Homo sapien
aaaattcagggaactccaagatgag

SEQ ID NO: 17402 - DNA, 25 bp, Homo sapien
acgacagaggaactatttacaggta

SEQ ID NO: 17403 - DNA, 25 bp, Homo sapien
ccagcatacgacagaggaactattt

SEQ ID NO: 17404 - DNA, 25 bp, Homo sapien
tatgttaaaaggacctgcagaataa

SEQ ID NO: 17405 - DNA, 25 bp, Homo sapien
cactgttgagatgctagaatataaa

SEQ ID NO: 17406 - DNA, 25 bp, Homo sapien
gatgagtgaccatcagcactgttga

SEQ ID NO: 17407 - DNA, 25 bp, Homo sapien
tttacaggtagatcttcacatcatt

SEQ ID NO: 17408 - DNA, 25 bp, Homo sapien
gggaactccaagatgagtgaccatc

SEQ ID NO: 17409 - DNA, 25 bp, Homo sapien
tgcagaataaaatccgcttagaatg

SEQ ID NO: 17410 - DNA, 25 bp, Homo sapien
agaccacaggtgtgacccacacata

SEQ ID NO: 17411 - DNA, 25 bp, Homo sapien
tccctctttgtcaggcaggctggag

SEQ ID NO: 17412 - DNA, 25 bp, Homo sapien
acatatatatgtagaccacttttat

SEQ ID NO: 17413 - DNA, 25 bp, Homo sapien
gtccctctttgtcaggcaggctgga

SEQ ID NO: 17414 - DNA, 25 bp, Homo sapien
ccacaggtgtgacccacacatatat

SEQ ID NO: 17415 - DNA, 25 bp, Homo sapien
atttctctaagtgaagttaaacatt

SEQ ID NO: 17416 - DNA, 25 bp, Homo sapien
gcatttctctaagtgaagttaaaca

SEQ ID NO: 17417 - DNA, 25 bp, Homo sapien
acacatatatatgtagaccactttt

SEQ ID NO: 17418 - DNA, 25 bp, Homo sapien
ctctaagtgaagttaaacatttatg

SEQ ID NO: 17419 - DNA, 25 bp, Homo sapien
gaccacaggtgtgacccacacatat

SEQ ID NO: 17420 - DNA, 25 bp, Homo sapien
ggtccctctttgtcaggcaggctgg

SEQ ID NO: 17421 - DNA, 25 bp, Homo sapien
cactgcagccttaacattaacatct

SEQ ID NO: 17422 - DNA, 25 bp, Homo sapien
agaccacaggtgtgacccacacata

SEQ ID NO: 17423 - DNA, 25 bp, Homo sapien
ggtccctctttgtcaggcaggctgg

SEQ ID NO: 17424 - DNA, 25 bp, Homo sapien
ccacaggtgtgacccacacatatat

SEQ ID NO: 17425 - DNA, 25 bp, Homo sapien
tccctctttgtcaggcaggctggag

SEQ ID NO: 17426 - DNA, 25 bp, Homo sapien
tgcctggcccagtgtaattttaatc

SEQ ID NO: 17427 - DNA, 25 bp, Homo sapien
acacatatatatgtagaccactttt

SEQ ID NO: 17428 - DNA, 25 bp, Homo sapien
taacattaacatcttgggttcaagc

SEQ ID NO: 17429 - DNA, 25 bp, Homo sapien
gaccacaggtgtgacccacacatat

SEQ ID NO: 17430 - DNA, 25 bp, Homo sapien
ctctaagtgaagttaaacatttatg

SEQ ID NO: 17431 - DNA, 25 bp, Homo sapien
gcatttctctaagtgaagttaaaca

SEQ ID NO: 17432 - DNA, 25 bp, Homo sapien
tttaaatgcacgtgtcaggacaggt

SEQ ID NO: 17433 - DNA, 25 bp, Homo sapien
gtgtgtttcttgctttaaatgcacg

SEQ ID NO: 17434 - DNA, 25 bp, Homo sapien
atacaaagatgacagttattgctga

SEQ ID NO: 17435 - DNA, 25 bp, Homo sapien
ctatgtcctggaagtgtgtgtttct

SEQ ID NO: 17436 - DNA, 25 bp, Homo sapien
atgacagttattgctgacagagccc

SEQ ID NO: 17437 - DNA, 25 bp, Homo sapien
cagggtttcgctccattgcctaggc

SEQ ID NO: 17438 - DNA, 25 bp, Homo sapien
acagagccctatgtcctggaagtgt

SEQ ID NO: 17439 - DNA, 25 bp, Homo sapien
tattgctgacagagccctatgtcct

SEQ ID NO: 17440 - DNA, 25 bp, Homo sapien
cgtggcggtgcgtgccataattcca

SEQ ID NO: 17441 - DNA, 25 bp, Homo sapien
ggcggtgcgtgccataattccagct

SEQ ID NO: 17442 - DNA, 25 bp, Homo sapien
cgtgcccagccggtttcttatatat

SEQ ID NO: 17443 - DNA, 25 bp, Homo sapien
cctgtccttggaatgctcttcttca

SEQ ID NO: 17444 - DNA, 25 bp, Homo sapien
caagaacactctggcttactggtct

SEQ ID NO: 17445 - DNA, 25 bp, Homo sapien
ttcaagataaccctgtggctcacaa

SEQ ID NO: 17446 - DNA, 25 bp, Homo sapien
ctttagctctctgatcaaatacggt

SEQ ID NO: 17447 - DNA, 25 bp, Homo sapien
cttactggtctttgaggaagtttcc

SEQ ID NO: 17448 - DNA, 25 bp, Homo sapien
tcaaatacggtttctctgagagcca

SEQ ID NO: 17449 - DNA, 25 bp, Homo sapien
tagctctctgatcaaatacggtttc

SEQ ID NO: 17450 - DNA, 25 bp, Homo sapien
aagataaccctgtggctcacaacct

SEQ ID NO: 17451 - DNA, 25 bp, Homo sapien
ctggcttactggtctttgaggaagt

SEQ ID NO: 17452 - DNA, 25 bp, Homo sapien
tggaatgctcttcttcaagataacc

SEQ ID NO: 17453 - DNA, 25 bp, Homo sapien
gcaccaagaacactctggcttactg

SEQ ID NO: 17454 - DNA, 25 bp, Homo sapien
atgcagcagatgtcctccaccacgt

SEQ ID NO: 17455 - DNA, 25 bp, Homo sapien
ggctcacgagatgtgtggcttcatt

SEQ ID NO: 17456 - DNA, 25 bp, Homo sapien
tcatggcctctgcagagacctgttc

SEQ ID NO: 17457 - DNA, 25 bp, Homo sapien
ggcagctgggccttcaacaattagc

SEQ ID NO: 17458 - DNA, 25 bp, Homo sapien
tttcatgctcagacaggccggtcag

SEQ ID NO: 17459 - DNA, 25 bp, Homo sapien
ttcattgcaaatggggtgtagatcc

SEQ ID NO: 17460 - DNA, 25 bp, Homo sapien
agttctcgggccaatgtcctccact

SEQ ID NO: 17461 - DNA, 25 bp, Homo sapien
tcagagctatcctgcgttagggccc

SEQ ID NO: 17462 - DNA, 25 bp, Homo sapien
tttgatcaggtcgatgaagagttct

SEQ ID NO: 17463 - DNA, 25 bp, Homo sapien
taaactgggagaagagtctcagact

SEQ ID NO: 17464 - DNA, 25 bp, Homo sapien
taatagggagataataaactgggag

SEQ ID NO: 17465 - DNA, 25 bp, Homo sapien
tcctcggggatcacatgtatctctc

SEQ ID NO: 17466 - DNA, 25 bp, Homo sapien
gggaggtggaaatcactgttgtaaa

SEQ ID NO: 17467 - DNA, 25 bp, Homo sapien
ctgttgtaaaatgctctgagtgtgt

SEQ ID NO: 17468 - DNA, 25 bp, Homo sapien
agtctaatagttctcctcggggatc

SEQ ID NO: 17469 - DNA, 25 bp, Homo sapien
ttcacgactgagacaacctttgcat

SEQ ID NO: 17470 - DNA, 25 bp, Homo sapien
atggcgaactctccatccagatcct

SEQ ID NO: 17471 - DNA, 25 bp, Homo sapien
aatttttgggaggtggaaatcactg

SEQ ID NO: 17472 - DNA, 25 bp, Homo sapien
tggaggggacctgacaactctaact

SEQ ID NO: 17473 - DNA, 25 bp, Homo sapien
ttgcatctaagggaagtctaatagt

SEQ ID NO: 17474 - DNA, 25 bp, Homo sapien
ttacgtgaatcaagatggcgaactc

SEQ ID NO: 17475 - DNA, 25 bp, Homo sapien
taagtttccactggaggggacctga

SEQ ID NO: 17476 - DNA, 25 bp, Homo sapien
gcacagtgaaaataggtctccttcc

SEQ ID NO: 17477 - DNA, 25 bp, Homo sapien
actataactgatgaacctcaaagac

SEQ ID NO: 17478 - DNA, 25 bp, Homo sapien
acctcaaagacaaaagctatgattt

SEQ ID NO: 17479 - DNA, 25 bp, Homo sapien
actgatgaacctcaaagacaaaagc

SEQ ID NO: 17480 - DNA, 25 bp, Homo sapien
taatttcaacagtccaacagggtgc

SEQ ID NO: 17481 - DNA, 25 bp, Homo sapien
caaggcctaagggtttgacatttca

SEQ ID NO: 17482 - DNA, 25 bp, Homo sapien
ccaagtcaaggcctaagggtttgac

SEQ ID NO: 17483 - DNA, 25 bp, Homo sapien
gatgaacctcaaagacaaaagctat

SEQ ID NO: 17484 - DNA, 25 bp, Homo sapien
tccaacagggtgcacagtgaaaata

SEQ ID NO: 17485 - DNA, 25 bp, Homo sapien
ggtgcacagtgaaaataggtctcct

SEQ ID NO: 17486 - DNA, 25 bp, Homo sapien
tttcaacagtccaacagggtgcaca

SEQ ID NO: 17487 - DNA, 25 bp, Homo sapien
agagctacgaagtgatgtgtctcct

SEQ ID NO: 17488 - DNA, 25 bp, Homo sapien
tcagaaggcatatatgtgtgttccc

SEQ ID NO: 17489 - DNA, 25 bp, Homo sapien
actttgatcacgtggttgaagcagt

SEQ ID NO: 17490 - DNA, 25 bp, Homo sapien
agtgatgtgtctcctcaatggatcc

SEQ ID NO: 17491 - DNA, 25 bp, Homo sapien
tgtgttcccttactgggtggtgcta

SEQ ID NO: 17492 - DNA, 25 bp, Homo sapien
ttgttaagagctacgaagtgatgtg

SEQ ID NO: 17493 - DNA, 25 bp, Homo sapien
tactgggtggtgctaactttgatca

SEQ ID NO: 17494 - DNA, 25 bp, Homo sapien
cagacttgttaagagctacgaagtg

SEQ ID NO: 17495 - DNA, 25 bp, Homo sapien
cccttactgggtggtgctaactttg

SEQ ID NO: 17496 - DNA, 25 bp, Homo sapien
ctcaatggatcctatcagaaggcat

SEQ ID NO: 17497 - DNA, 25 bp, Homo sapien
gttgaagcagtaactgtcatgtttc

SEQ ID NO: 17498 - DNA, 25 bp, Homo sapien
gaactcgttacggtactcctgaagg

SEQ ID NO: 17499 - DNA, 25 bp, Homo sapien
ccttcaggagtaccgtaacgagttc

SEQ ID NO: 17500 - DNA, 25 bp, Homo sapien
attccctgcacttgaggcacaggtc

SEQ ID NO: 17501 - DNA, 25 bp, Homo sapien
cacaggtcactagttaacaggttac

SEQ ID NO: 17502 - DNA, 25 bp, Homo sapien
aacaggttactagttagtgcctagc

SEQ ID NO: 17503 - DNA, 25 bp, Homo sapien
ctcctgtcctgagcaggacagatgg

SEQ ID NO: 17504 - DNA, 25 bp, Homo sapien
atctctgcagatgtcactcatgggt

SEQ ID NO: 17505 - DNA, 25 bp, Homo sapien
tagtgcctagccgaggacatctctg

SEQ ID NO: 17506 - DNA, 25 bp, Homo sapien
ctgcagatgtcactcatgggtggcc

SEQ ID NO: 17507 - DNA, 25 bp, Homo sapien
ttgaggcacaggtcactagttaaca

SEQ ID NO: 17508 - DNA, 25 bp, Homo sapien
cctagccgaggacatctctgcagat

SEQ ID NO: 17509 - DNA, 25 bp, Homo sapien
tagttagtgcctagccgaggacatc

SEQ ID NO: 17510 - DNA, 25 bp, Homo sapien
ttactagttagtgcctagccgagga

SEQ ID NO: 17511 - DNA, 25 bp, Homo sapien
ttctccatggagagtcactttgatg

SEQ ID NO: 17512 - DNA, 25 bp, Homo sapien
ggcacaattgtatcaagtcgtcatt

SEQ ID NO: 17513 - DNA, 25 bp, Homo sapien
tcacatgtggtgattaagtttccaa

SEQ ID NO: 17514 - DNA, 25 bp, Homo sapien
gctcaggggacacagtgcaaatgcc

SEQ ID NO: 17515 - DNA, 25 bp, Homo sapien
gggctcgcggtttcttggcatcaga

SEQ ID NO: 17516 - DNA, 25 bp, Homo sapien
ccaaagctaaatagtgacagaaatg

SEQ ID NO: 17517 - DNA, 25 bp, Homo sapien
gtgatccaagatccctagccaccgg

SEQ ID NO: 17518 - DNA, 25 bp, Homo sapien
acagataagacatttggatcacatg

SEQ ID NO: 17519 - DNA, 25 bp, Homo sapien
gaaatgagactcaaatccacccatc

SEQ ID NO: 17520 - DNA, 25 bp, Homo sapien
cagcgtccatagaggtggtgatcca

SEQ ID NO: 17521 - DNA, 25 bp, Homo sapien
gtaggccatcatgccatgactctgt

SEQ ID NO: 17522 - DNA, 25 bp, Homo sapien
cgtacaggctaaagagtagtctctc

SEQ ID NO: 17523 - DNA, 25 bp, Homo sapien
atttgtgagactatctgaaacgtgt

SEQ ID NO: 17524 - DNA, 25 bp, Homo sapien
tgagactatctgaaacgtgtttgcc

SEQ ID NO: 17525 - DNA, 25 bp, Homo sapien
tccgggcccttaagacacttccatg

SEQ ID NO: 17526 - DNA, 25 bp, Homo sapien
caccgtacaggctaaagagtagtct

SEQ ID NO: 17527 - DNA, 25 bp, Homo sapien
acttccatgccctagacatcaggcc

SEQ ID NO: 17528 - DNA, 25 bp, Homo sapien
tctacacaccgtacaggctaaagag

SEQ ID NO: 17529 - DNA, 25 bp, Homo sapien
cctttgaggctgcactgccctcagg

SEQ ID NO: 17530 - DNA, 25 bp, Homo sapien
agccaaatggaggaaacagccctgg

SEQ ID NO: 17531 - DNA, 25 bp, Homo sapien
ttccaggctctcatgtatcacagtt

SEQ ID NO: 17532 - DNA, 25 bp, Homo sapien
gtagtctctccctttgaggctgcac

SEQ ID NO: 17533 - DNA, 25 bp, Homo sapien
atctcaaggctaccagattttgttc

SEQ ID NO: 17534 - DNA, 25 bp, Homo sapien
tgttcatggaatttgagaacatgag

SEQ ID NO: 17535 - DNA, 25 bp, Homo sapien
taaatagattgcagggtctttgccc

SEQ ID NO: 17536 - DNA, 25 bp, Homo sapien
atgatgcttggcaggggctttttta

SEQ ID NO: 17537 - DNA, 25 bp, Homo sapien
ttctgccaagcctgaaagtgttcaa

SEQ ID NO: 17538 - DNA, 25 bp, Homo sapien
gtttattaaccagctctcattgtgt

SEQ ID NO: 17539 - DNA, 25 bp, Homo sapien
gtttctagtcttaaatggcatgttt

SEQ ID NO: 17540 - DNA, 25 bp, Homo sapien
caataattaggagagatgatgcttg

SEQ ID NO: 17541 - DNA, 25 bp, Homo sapien
aatagctacatgcattatatagtac

SEQ ID NO: 17542 - DNA, 25 bp, Homo sapien
ttatatagtacaggtcatcagtttc

SEQ ID NO: 17543 - DNA, 25 bp, Homo sapien
tttcttccagtttctgccaagcctg

SEQ ID NO: 17544 - DNA, 25 bp, Homo sapien
agtgaccaaagactagaaacttaac

SEQ ID NO: 17545 - DNA, 25 bp, Homo sapien
tactgctcttgctgtgtgagtacac

SEQ ID NO: 17546 - DNA, 25 bp, Homo sapien
acacatttgtgttccagggttccga

SEQ ID NO: 17547 - DNA, 25 bp, Homo sapien
atagacatgaattacctgggcagac

SEQ ID NO: 17548 - DNA, 25 bp, Homo sapien
cagggttccgataattcagtgggcc

SEQ ID NO: 17549 - DNA, 25 bp, Homo sapien
cccagtgaagagctaagctatctcc

SEQ ID NO: 17550 - DNA, 25 bp, Homo sapien
attcaggctccaaaaatgctaaact

SEQ ID NO: 17551 - DNA, 25 bp, Homo sapien
tgataggcctcagtgaccaaagact

SEQ ID NO: 17552 - DNA, 25 bp, Homo sapien
gtaaagtcaacacattcaggctcca

SEQ ID NO: 17553 - DNA, 25 bp, Homo sapien
ctgggcagactgcaacttgggattt

SEQ ID NO: 17554 - DNA, 25 bp, Homo sapien
gtagaaattggtattgtagacactt

SEQ ID NO: 17555 - DNA, 25 bp, Homo sapien
ataagcagctactttggcctggttc

SEQ ID NO: 17556 - DNA, 25 bp, Homo sapien
agagcatggcccagatattcaagtt

SEQ ID NO: 17557 - DNA, 25 bp, Homo sapien
ccgggatcctggtgcgaaagacact

SEQ ID NO: 17558 - DNA, 25 bp, Homo sapien
gtgtatcctagaccataagcagcta

SEQ ID NO: 17559 - DNA, 25 bp, Homo sapien
ttggcctggttctcagagagactcc

SEQ ID NO: 17560 - DNA, 25 bp, Homo sapien
tttaggtgtatcctagaccataagc

SEQ ID NO: 17561 - DNA, 25 bp, Homo sapien
tcctggagagcatggcccagatatt

SEQ ID NO: 17562 - DNA, 25 bp, Homo sapien
ctgcatgctcctgcataggggaggt

SEQ ID NO: 17563 - DNA, 25 bp, Homo sapien
tccggtccatgtgtaaatggggcat

SEQ ID NO: 17564 - DNA, 25 bp, Homo sapien
agagactcctggagagcatggccca

SEQ ID NO: 17565 - DNA, 25 bp, Homo sapien
taaatggggcatttcctgtgctcca

SEQ ID NO: 17566 - DNA, 25 bp, Homo sapien
gacttggggtctatactcataatct

SEQ ID NO: 17567 - DNA, 25 bp, Homo sapien
cactcatgacgtggctaacggaagt

SEQ ID NO: 17568 - DNA, 25 bp, Homo sapien
aggaacctggaacaaaatgaccaca

SEQ ID NO: 17569 - DNA, 25 bp, Homo sapien
gcacaaacacagttagtgaggatgt

SEQ ID NO: 17570 - DNA, 25 bp, Homo sapien
tcactcgaagagctcaaatgacaga

SEQ ID NO: 17571 - DNA, 25 bp, Homo sapien
ccctaagggtcatcagtggtgtttc

SEQ ID NO: 17572 - DNA, 25 bp, Homo sapien
gaagacaaacatgacttggggtcta

SEQ ID NO: 17573 - DNA, 25 bp, Homo sapien
agctgtgtcccgacccgaggaacct

SEQ ID NO: 17574 - DNA, 25 bp, Homo sapien
cggtgaggagcaggtgtctcatcct

SEQ ID NO: 17575 - DNA, 25 bp, Homo sapien
gcgccgggtggttaatcacagacat

SEQ ID NO: 17576 - DNA, 25 bp, Homo sapien
ctaacggaagtactgctgccagtgt

SEQ ID NO: 17577 - DNA, 25 bp, Homo sapien
cctaatgttaagcaggacgcagaag

SEQ ID NO: 17578 - DNA, 25 bp, Homo sapien
ggtaggctataaatatctgatgatt

SEQ ID NO: 17579 - DNA, 25 bp, Homo sapien
ccaggagtcaatggtggcatgtacc

SEQ ID NO: 17580 - DNA, 25 bp, Homo sapien
ctgatgattgacaaaggtagccatt

SEQ ID NO: 17581 - DNA, 25 bp, Homo sapien
cttgtatggtataccgcaaatagga

SEQ ID NO: 17582 - DNA, 25 bp, Homo sapien
ttaaactcctgtgctatcctaatgt

SEQ ID NO: 17583 - DNA, 25 bp, Homo sapien
ataccgcaaataggaggtaggctat

SEQ ID NO: 17584 - DNA, 25 bp, Homo sapien
acacagcctgtgagaaagcatggca

SEQ ID NO: 17585 - DNA, 25 bp, Homo sapien
tggtggcatgtacctcattcatcct

SEQ ID NO: 17586 - DNA, 25 bp, Homo sapien
cagaggggtggctgtttatttaaac

SEQ ID NO: 17587 - DNA, 25 bp, Homo sapien
acaaatcaacacaccaaatggacac

SEQ ID NO: 17588 - DNA, 25 bp, Homo sapien
aaatctaagtcatcatctgagggcc

SEQ ID NO: 17589 - DNA, 25 bp, Homo sapien
atggagaactagcaactacaacatt

SEQ ID NO: 17590 - DNA, 25 bp, Homo sapien
aactacaacattagctgtgggcggg

SEQ ID NO: 17591 - DNA, 25 bp, Homo sapien
tgctttaatcaatatggagaactag

SEQ ID NO: 17592 - DNA, 25 bp, Homo sapien
tttaatcaatatggagaactagcaa

SEQ ID NO: 17593 - DNA, 25 bp, Homo sapien
aagtcatcatctgagggcctgaaat

SEQ ID NO: 17594 - DNA, 25 bp, Homo sapien
aaggtggacagatggctcgagctta

SEQ ID NO: 17595 - DNA, 25 bp, Homo sapien
ggtagaggttactgttattgttgct

SEQ ID NO: 17596 - DNA, 25 bp, Homo sapien
atatggagaactagcaactacaaca

SEQ ID NO: 17597 - DNA, 25 bp, Homo sapien
cagcccgggtaacatgaagagaccc

SEQ ID NO: 17598 - DNA, 25 bp, Homo sapien
tctaagtcatcatctgagggcctga

SEQ ID NO: 17599 - DNA, 25 bp, Homo sapien
atggaaagctataccgatcttcggc

SEQ ID NO: 17600 - DNA, 25 bp, Homo sapien
aaattgttgatcatttgggttattc

SEQ ID NO: 17601 - DNA, 25 bp, Homo sapien
ttgaatgcagcaaccaatagctttg

SEQ ID NO: 17602 - DNA, 25 bp, Homo sapien
ttctttctatcagctgaacaccatc

SEQ ID NO: 17603 - DNA, 25 bp, Homo sapien
atttctttgagtggatgttataata

SEQ ID NO: 17604 - DNA, 25 bp, Homo sapien
agctgaacaccatctgtcaatggca

SEQ ID NO: 17605 - DNA, 25 bp, Homo sapien
agtgggatttttacgtaaatgtata

SEQ ID NO: 17606 - DNA, 25 bp, Homo sapien
ctactctagattgaatgcagcaacc

SEQ ID NO: 17607 - DNA, 25 bp, Homo sapien
aatagctttgcgctgcaagttttta

SEQ ID NO: 17608 - DNA, 25 bp, Homo sapien
ataaatggctttgatttgatacatc

SEQ ID NO: 17609 - DNA, 25 bp, Homo sapien
cttctgctataccaaatggaaagct

SEQ ID NO: 17610 - DNA, 25 bp, Homo sapien
accttcaacagtctataagctgatg

SEQ ID NO: 17611 - DNA, 25 bp, Homo sapien
ctgagtcagctttactgaacagagc

SEQ ID NO: 17612 - DNA, 25 bp, Homo sapien
taaaaatcacagaagagaacggtgt

SEQ ID NO: 17613 - DNA, 25 bp, Homo sapien
actggcttggtctttatctcgtgtt

SEQ ID NO: 17614 - DNA, 25 bp, Homo sapien
tgactcggtcaagggcttcagcatc

SEQ ID NO: 17615 - DNA, 25 bp, Homo sapien
ggttaaaggggaatgtcatggttca

SEQ ID NO: 17616 - DNA, 25 bp, Homo sapien
gggaatgtcatggttcagggtcaca

SEQ ID NO: 17617 - DNA, 25 bp, Homo sapien
tcgtgttgcaccagcacacctggga

SEQ ID NO: 17618 - DNA, 25 bp, Homo sapien
agaagagaacggtgtcaccttcaac

SEQ ID NO: 17619 - DNA, 25 bp, Homo sapien
ctgaacagagctctgcaaataaccc

SEQ ID NO: 17620 - DNA, 25 bp, Homo sapien
tcatttactgacacgtgactcggtc

SEQ ID NO: 17621 - DNA, 25 bp, Homo sapien
agtagatcctcttggctcagaccca

SEQ ID NO: 17622 - DNA, 25 bp, Homo sapien
ggcctgacttcctgaaggggacatt

SEQ ID NO: 17623 - DNA, 25 bp, Homo sapien
gatcacttcagaggtggtcccagag

SEQ ID NO: 17624 - DNA, 25 bp, Homo sapien
ttggctcagacccattgactttttt

SEQ ID NO: 17625 - DNA, 25 bp, Homo sapien
gtcccagagcgtgctggttttccca

SEQ ID NO: 17626 - DNA, 25 bp, Homo sapien
tctggtcatccaggctacaagggta

SEQ ID NO: 17627 - DNA, 25 bp, Homo sapien
acagtgagtttagagtgtgtggtca

SEQ ID NO: 17628 - DNA, 25 bp, Homo sapien
aaggacagaacatggcctgacttcc

SEQ ID NO: 17629 - DNA, 25 bp, Homo sapien
gtggtcagggtgtgagatcacttca

SEQ ID NO: 17630 - DNA, 25 bp, Homo sapien
aaggaaaacggaaggacagaacatg

SEQ ID NO: 17631 - DNA, 25 bp, Homo sapien
gggaaggattatgacagtgagttta

SEQ ID NO: 17632 - DNA, 25 bp, Homo sapien
agtaataggatccttgactgttaac

SEQ ID NO: 17633 - DNA, 25 bp, Homo sapien
tgcatctcatgtgattaaactagcc

SEQ ID NO: 17634 - DNA, 25 bp, Homo sapien
tcaccctcgattagtaataggatcc

SEQ ID NO: 17635 - DNA, 25 bp, Homo sapien
agggaagagaggaccaacatttatt

SEQ ID NO: 17636 - DNA, 25 bp, Homo sapien
tctttcatgcatacagcagagatct

SEQ ID NO: 17637 - DNA, 25 bp, Homo sapien
attgccacccactttgaggggtctc

SEQ ID NO: 17638 - DNA, 25 bp, Homo sapien
ctcactttgtggcagagacttctga

SEQ ID NO: 17639 - DNA, 25 bp, Homo sapien
aacagatgttggctctaccagcagt

SEQ ID NO: 17640 - DNA, 25 bp, Homo sapien
tgcagccaccctctggttttgcctt

SEQ ID NO: 17641 - DNA, 25 bp, Homo sapien
ttgtggcagagacttctgattgtcc

SEQ ID NO: 17642 - DNA, 25 bp, Homo sapien
gaggtcttaaccaagtacatgcatc

SEQ ID NO: 17643 - DNA, 25 bp, Homo sapien
ttcgagctgtactcatgtaacagtc

SEQ ID NO: 17644 - DNA, 25 bp, Homo sapien
ctaaaataaaggttgctaagcgata

SEQ ID NO: 17645 - DNA, 25 bp, Homo sapien
cccaaaacctgatctagctgttgta

SEQ ID NO: 17646 - DNA, 25 bp, Homo sapien
tccttctaaggatggtataaaacag

SEQ ID NO: 17647 - DNA, 25 bp, Homo sapien
tgtaacagtctaaaataaaggttgc

SEQ ID NO: 17648 - DNA, 25 bp, Homo sapien
aaagcctctcagaaaagttttgtga

SEQ ID NO: 17649 - DNA, 25 bp, Homo sapien
cctcttcatcgtagtaaaatatgtt

SEQ ID NO: 17650 - DNA, 25 bp, Homo sapien
tctaaggatggtataaaacagtgtc

SEQ ID NO: 17651 - DNA, 25 bp, Homo sapien
ccctggctattgttacagttctcca

SEQ ID NO: 17652 - DNA, 25 bp, Homo sapien
tagctgttgtatgtgactggctttc

SEQ ID NO: 17653 - DNA, 25 bp, Homo sapien
cctgatctagctgttgtatgtgact

SEQ ID NO: 17654 - DNA, 25 bp, Homo sapien
tcttctttgaaggtagctctgagat

SEQ ID NO: 17655 - DNA, 25 bp, Homo sapien
tgtaattcccaataaggattgcttc

SEQ ID NO: 17656 - DNA, 25 bp, Homo sapien
ttcaccatgctcataggaaaatgtc

SEQ ID NO: 17657 - DNA, 25 bp, Homo sapien
ttcctgtgactaaaattccaccttg

SEQ ID NO: 17658 - DNA, 25 bp, Homo sapien
tttgtaatggagacaaagacttatt

SEQ ID NO: 17659 - DNA, 25 bp, Homo sapien
gtatcttcattcaccaactgagggc

SEQ ID NO: 17660 - DNA, 25 bp, Homo sapien
ccaataaggattgcttcaagctatt

SEQ ID NO: 17661 - DNA, 25 bp, Homo sapien
aacctgtttcaccatgctcatagga

SEQ ID NO: 17662 - DNA, 25 bp, Homo sapien
tctttgaaggtagctctgagatttg

SEQ ID NO: 17663 - DNA, 25 bp, Homo sapien
tgctcataggaaaatgtcaaagtat

SEQ ID NO: 17664 - DNA, 25 bp, Homo sapien
ctgagatttgttttgtaatggagac

SEQ ID NO: 17665 - DNA, 25 bp, Homo sapien
cccagaggagacgatgttaccgact

SEQ ID NO: 17666 - DNA, 25 bp, Homo sapien
tcagagacataactgtgactgtact

SEQ ID NO: 17667 - DNA, 25 bp, Homo sapien
gtagagataagatgtagattagtgg

SEQ ID NO: 17668 - DNA, 25 bp, Homo sapien
ctcagagctgggaacctggaaccca

SEQ ID NO: 17669 - DNA, 25 bp, Homo sapien
ggtgagctcagagacataactgtga

SEQ ID NO: 17670 - DNA, 25 bp, Homo sapien
ggagtcagtcttatgcccagagcta

SEQ ID NO: 17671 - DNA, 25 bp, Homo sapien
aggtcatctgtagagataagatgta

SEQ ID NO: 17672 - DNA, 25 bp, Homo sapien
ttatgcccagagctaagcagaagca

SEQ ID NO: 17673 - DNA, 25 bp, Homo sapien
gccagcccagaggagacgatgttac

SEQ ID NO: 17674 - DNA, 25 bp, Homo sapien
aagcagatcacctgaccaagacatc

SEQ ID NO: 17675 - DNA, 25 bp, Homo sapien
aggagacgatgttaccgactcccac

SEQ ID NO: 17676 - DNA, 25 bp, Homo sapien
tccatgtatcagaagtgaggtagga

SEQ ID NO: 17677 - DNA, 25 bp, Homo sapien
tcatgaaagagaaaacatctgggct

SEQ ID NO: 17678 - DNA, 25 bp, Homo sapien
agtaaaggcaaaaggcaacaaagta

SEQ ID NO: 17679 - DNA, 25 bp, Homo sapien
tgccttcaaagacaaacacagtagt

SEQ ID NO: 17680 - DNA, 25 bp, Homo sapien
ttagagtaagtaaaggcaaaaggca

SEQ ID NO: 17681 - DNA, 25 bp, Homo sapien
aaacagagaaaagtagtggggtcac

SEQ ID NO: 17682 - DNA, 25 bp, Homo sapien
tggattcaaagacagttgtccttgc

SEQ ID NO: 17683 - DNA, 25 bp, Homo sapien
ccagagattagaaaatgacatacta

SEQ ID NO: 17684 - DNA, 25 bp, Homo sapien
agtagtggggtcacattacatgccc

SEQ ID NO: 17685 - DNA, 25 bp, Homo sapien
gctgggtgggattatataagatttc

SEQ ID NO: 17686 - DNA, 25 bp, Homo sapien
aagggattgtagagatgttacatgg

SEQ ID NO: 17687 - DNA, 25 bp, Homo sapien
agggttagtacattcaaaatccagg

SEQ ID NO: 17688 - DNA, 25 bp, Homo sapien
acttttcagcaagtgaccttgggcc

SEQ ID NO: 17689 - DNA, 25 bp, Homo sapien
ttgcctctcatttatcggaccaatg

SEQ ID NO: 17690 - DNA, 25 bp, Homo sapien
cagtgaaccagaggcagtgaatcct

SEQ ID NO: 17691 - DNA, 25 bp, Homo sapien
acttaaccagatcaccatggctctc

SEQ ID NO: 17692 - DNA, 25 bp, Homo sapien
atggctctccatgcttgcctaagtt

SEQ ID NO: 17693 - DNA, 25 bp, Homo sapien
atcggaccaatgatactgtggagaa

SEQ ID NO: 17694 - DNA, 25 bp, Homo sapien
gcttgcctaagtttatacatacatc

SEQ ID NO: 17695 - DNA, 25 bp, Homo sapien
caaaatccaggacactaaccagtgc

SEQ ID NO: 17696 - DNA, 25 bp, Homo sapien
tgatactgtggagaaagttaaagaa

SEQ ID NO: 17697 - DNA, 25 bp, Homo sapien
ctaaccagtgcaattcagctcaaga

SEQ ID NO: 17698 - DNA, 25 bp, Homo sapien
catcagcgaatggacagagaagcaa

SEQ ID NO: 17699 - DNA, 25 bp, Homo sapien
cgaatggacagagaagcaaaatgta

SEQ ID NO: 17700 - DNA, 25 bp, Homo sapien
cgaagggaaatcacctaacatattt

SEQ ID NO: 17701 - DNA, 25 bp, Homo sapien
gtttgggaaattttgagtcacaata

SEQ ID NO: 17702 - DNA, 25 bp, Homo sapien
aagtgcccatcagcgaatggacaga

SEQ ID NO: 17703 - DNA, 25 bp, Homo sapien
aaaggagagagatctcaatgtgaac

SEQ ID NO: 17704 - DNA, 25 bp, Homo sapien
tatattcttacgaagggaaatcacc

SEQ ID NO: 17705 - DNA, 25 bp, Homo sapien
ttttgagtcacaataaatcaggaaa

SEQ ID NO: 17706 - DNA, 25 bp, Homo sapien
gagagatctcaatgtgaacagatat

SEQ ID NO: 17707 - DNA, 25 bp, Homo sapien
gtggaaggagcccaagtgcccatca

SEQ ID NO: 17708 - DNA, 25 bp, Homo sapien
gaagcaaaatgtagtctatgcatgc

SEQ ID NO: 17709 - DNA, 25 bp, Homo sapien
ttagtctcttactctgtcggtgatg

SEQ ID NO: 17710 - DNA, 25 bp, Homo sapien
ggtgatggacatcatcgagattttc

SEQ ID NO: 17711 - DNA, 25 bp, Homo sapien
ctctgtcggtgatggacatcatcga

SEQ ID NO: 17712 - DNA, 25 bp, Homo sapien
ctttaggggaattcaattaacagta

SEQ ID NO: 17713 - DNA, 25 bp, Homo sapien
gatggacatcatcgagattttcctc

SEQ ID NO: 17714 - DNA, 25 bp, Homo sapien
gtattagtctcttactctgtcggtg

SEQ ID NO: 17715 - DNA, 25 bp, Homo sapien
gtcggtgatggacatcatcgagatt

SEQ ID NO: 17716 - DNA, 25 bp, Homo sapien
gggaattcaattaacagtattagtc

SEQ ID NO: 17717 - DNA, 25 bp, Homo sapien
ctgtcggtgatggacatcatcgaga

SEQ ID NO: 17718 - DNA, 25 bp, Homo sapien
cacccaaagacatgtaagatgggct

SEQ ID NO: 17719 - DNA, 25 bp, Homo sapien
gagattttcctcaccacccaaagac

SEQ ID NO: 17720 - DNA, 25 bp, Homo sapien
ttggagacttgtatggatttgcttc

SEQ ID NO: 17721 - DNA, 25 bp, Homo sapien
cccacacgatggtatagttttgttc

SEQ ID NO: 17722 - DNA, 25 bp, Homo sapien
aaagtcttaagtggaaataagctgc

SEQ ID NO: 17723 - DNA, 25 bp, Homo sapien
tcagcatctatcctaggccattagc

SEQ ID NO: 17724 - DNA, 25 bp, Homo sapien
tgaggaaaatcaatgcaaccaattc

SEQ ID NO: 17725 - DNA, 25 bp, Homo sapien
ttaagtggaaataagctgctctaat

SEQ ID NO: 17726 - DNA, 25 bp, Homo sapien
tattttctgaggacaattcagcatc

SEQ ID NO: 17727 - DNA, 25 bp, Homo sapien
tctgaggacaattcagcatctatcc

SEQ ID NO: 17728 - DNA, 25 bp, Homo sapien
ctaggccattagctgaggaaaatca

SEQ ID NO: 17729 - DNA, 25 bp, Homo sapien
caaacatattggagacttgtatgga

SEQ ID NO: 17730 - DNA, 25 bp, Homo sapien
ttagctgaggaaaatcaatgcaacc

SEQ ID NO: 17731 - DNA, 25 bp, Homo sapien
aacaattttgaatcggatgaattac

SEQ ID NO: 17732 - DNA, 25 bp, Homo sapien
tcagatttcaaaaactacgaaacac

SEQ ID NO: 17733 - DNA, 25 bp, Homo sapien
caaaaactacgaaacactggtgtac

SEQ ID NO: 17734 - DNA, 25 bp, Homo sapien
gagtgaaactccgtcgtcttctaac

SEQ ID NO: 17735 - DNA, 25 bp, Homo sapien
acaattttgaatcggatgaattacc

SEQ ID NO: 17736 - DNA, 25 bp, Homo sapien
aaactccgtcgtcttctaactgtcc

SEQ ID NO: 17737 - DNA, 25 bp, Homo sapien
agattctcatgtctatagagtgaca

SEQ ID NO: 17738 - DNA, 25 bp, Homo sapien
gattctcatgtctatagagtgacaa

SEQ ID NO: 17739 - DNA, 25 bp, Homo sapien
aaaacaattttgaatcggatgaatt

SEQ ID NO: 17740 - DNA, 25 bp, Homo sapien
gtgaaactccgtcgtcttctaactg

SEQ ID NO: 17741 - DNA, 25 bp, Homo sapien
gaaactccgtcgtcttctaactgtc

SEQ ID NO: 17742 - DNA, 25 bp, Homo sapien
taactgtcctttggcccaggtttgc

SEQ ID NO: 17743 - DNA, 25 bp, Homo sapien
ttgaaatcaacaaagaaagaaatga

SEQ ID NO: 17744 - DNA, 25 bp, Homo sapien
caaaaactacgaaacactggtgtac

SEQ ID NO: 17745 - DNA, 25 bp, Homo sapien
acaattttgaatcggatgaattacc

SEQ ID NO: 17746 - DNA, 25 bp, Homo sapien
aaactccgtcgtcttctaactgtcc

SEQ ID NO: 17747 - DNA, 25 bp, Homo sapien
gtcctttggcccaggtttgcataaa

SEQ ID NO: 17748 - DNA, 25 bp, Homo sapien
gagtgaaactccgtcgtcttctaac

SEQ ID NO: 17749 - DNA, 25 bp, Homo sapien
gattctcatgtctatagagtgacaa

SEQ ID NO: 17750 - DNA, 25 bp, Homo sapien
tcagatttcaaaaactacgaaacac

SEQ ID NO: 17751 - DNA, 25 bp, Homo sapien
aaaacaattttgaatcggatgaatt

SEQ ID NO: 17752 - DNA, 25 bp, Homo sapien
acattagctggtatcagagattctc

SEQ ID NO: 17753 - DNA, 25 bp, Homo sapien
ctcagttatctgtaacaagaggatt

SEQ ID NO: 17754 - DNA, 25 bp, Homo sapien
agggaagtactcagcttagatagcc

SEQ ID NO: 17755 - DNA, 25 bp, Homo sapien
aatgtatgtagggaagtactcagct

SEQ ID NO: 17756 - DNA, 25 bp, Homo sapien
ttcacagggaaaaccagtagccttg

SEQ ID NO: 17757 - DNA, 25 bp, Homo sapien
tctgtaacaagaggattataaaact

SEQ ID NO: 17758 - DNA, 25 bp, Homo sapien
gcttagatagccatattgcagcttc

SEQ ID NO: 17759 - DNA, 25 bp, Homo sapien
ggaaaaccagtagccttggagtcca

SEQ ID NO: 17760 - DNA, 25 bp, Homo sapien
gagtccaagacatgtagaatcagcc

SEQ ID NO: 17761 - DNA, 25 bp, Homo sapien
aaatgggataatgtatgtagggaag

SEQ ID NO: 17762 - DNA, 25 bp, Homo sapien
attataaaacttagctcaacagggg

SEQ ID NO: 17763 - DNA, 25 bp, Homo sapien
taatctcaaggtggttcacagggaa

SEQ ID NO: 17764 - DNA, 25 bp, Homo sapien
cggtattgaaaaatatctgagtcat

SEQ ID NO: 17765 - DNA, 25 bp, Homo sapien
tctatgccgatatatgtataaacac

SEQ ID NO: 17766 - DNA, 25 bp, Homo sapien
tatctatgccgatatatgtataaac

SEQ ID NO: 17767 - DNA, 25 bp, Homo sapien
ctatgccgatatatgtataaacaca

SEQ ID NO: 17768 - DNA, 25 bp, Homo sapien
tctgagtcatagaaataatactttg

SEQ ID NO: 17769 - DNA, 25 bp, Homo sapien
taaaacggtattgaaaaatatctga

SEQ ID NO: 17770 - DNA, 25 bp, Homo sapien
aacggtattgaaaaatatctgagtc

SEQ ID NO: 17771 - DNA, 25 bp, Homo sapien
ttcaattacatacccataccaccag

SEQ ID NO: 17772 - DNA, 25 bp, Homo sapien
aattacatacccataccaccagaca

SEQ ID NO: 17773 - DNA, 25 bp, Homo sapien
ttcagaaattgtcttcactcatata

SEQ ID NO: 17774 - DNA, 25 bp, Homo sapien
tatgaaactatataaatactatgta

SEQ ID NO: 17775 - DNA, 25 bp, Homo sapien
catagacaaaaagactaaacataat

SEQ ID NO: 17776 - DNA, 25 bp, Homo sapien
tctatgccgatatatgtataaacac

SEQ ID NO: 17777 - DNA, 25 bp, Homo sapien
ttcagaaattgtcttcactcatata

SEQ ID NO: 17778 - DNA, 25 bp, Homo sapien
ttcaattacatacccataccaccag

SEQ ID NO: 17779 - DNA, 25 bp, Homo sapien
acagaaacagaaatacatagacaaa

SEQ ID NO: 17780 - DNA, 25 bp, Homo sapien
aattacatacccataccaccagaca

SEQ ID NO: 17781 - DNA, 25 bp, Homo sapien
tctgagtcatagaaataatactttg

SEQ ID NO: 17782 - DNA, 25 bp, Homo sapien
aacggtattgaaaaatatctgagtc

SEQ ID NO: 17783 - DNA, 25 bp, Homo sapien
atagcatgaaatagaaattaaacaa

SEQ ID NO: 17784 - DNA, 25 bp, Homo sapien
cggtattgaaaaatatctgagtcat

SEQ ID NO: 17785 - DNA, 25 bp, Homo sapien
taaaacggtattgaaaaatatctga

SEQ ID NO: 17786 - DNA, 25 bp, Homo sapien
ttaatatgccacatacccagcgcag

SEQ ID NO: 17787 - DNA, 25 bp, Homo sapien
tcctagacttatcatggtatagtac

SEQ ID NO: 17788 - DNA, 25 bp, Homo sapien
tagtacaattatttggtgtgtgatc

SEQ ID NO: 17789 - DNA, 25 bp, Homo sapien
tgtacttaaagggaagtcctatctc

SEQ ID NO: 17790 - DNA, 25 bp, Homo sapien
ctcctaataattgttaagtaatgaa

SEQ ID NO: 17791 - DNA, 25 bp, Homo sapien
ataaatgacaaaccttgtgttcatc

SEQ ID NO: 17792 - DNA, 25 bp, Homo sapien
tgtgttcatctccattcctagactt

SEQ ID NO: 17793 - DNA, 25 bp, Homo sapien
caatgatgtacttaaagggaagtcc

SEQ ID NO: 17794 - DNA, 25 bp, Homo sapien
tagacaatgatgtacttaaagggaa

SEQ ID NO: 17795 - DNA, 25 bp, Homo sapien
tttggtgtgtgatcattagacaatg

SEQ ID NO: 17796 - DNA, 25 bp, Homo sapien
catatagaaaaacactttttggtct

SEQ ID NO: 17797 - DNA, 25 bp, Homo sapien
gggcatcttggcacaggtcagatta

SEQ ID NO: 17798 - DNA, 25 bp, Homo sapien
ggtgagggtgtatatcagtttaaac

SEQ ID NO: 17799 - DNA, 25 bp, Homo sapien
ctaagggaatgcatgtgaaagttct

SEQ ID NO: 17800 - DNA, 25 bp, Homo sapien
ccagtcacagaatgtcttaagcagt

SEQ ID NO: 17801 - DNA, 25 bp, Homo sapien
agttctgtgaggtttgaccagtcac

SEQ ID NO: 17802 - DNA, 25 bp, Homo sapien
gtatcgttgaagaggcatcaggttg

SEQ ID NO: 17803 - DNA, 25 bp, Homo sapien
agttctttgtagaagagctgtgcaa

SEQ ID NO: 17804 - DNA, 25 bp, Homo sapien
gtatgattttgaggcctaagggaat

SEQ ID NO: 17805 - DNA, 25 bp, Homo sapien
aagtggaaagagtggtatcgttgaa

SEQ ID NO: 17806 - DNA, 25 bp, Homo sapien
cttaggatactcagagcgaaagcca

SEQ ID NO: 17807 - DNA, 25 bp, Homo sapien
catcaggttgggcttaggatactca

SEQ ID NO: 17808 - DNA, 25 bp, Homo sapien
atgtaaatatatacgcggagggagc

SEQ ID NO: 17809 - DNA, 25 bp, Homo sapien
aatctggtcaattccgctgttgctg

SEQ ID NO: 17810 - DNA, 25 bp, Homo sapien
tcatctgccagtgggaaatatgaat

SEQ ID NO: 17811 - DNA, 25 bp, Homo sapien
tatccctgcaatgggtatgtccatc

SEQ ID NO: 17812 - DNA, 25 bp, Homo sapien
aatgccacaccagtccttgggacaa

SEQ ID NO: 17813 - DNA, 25 bp, Homo sapien
cagtgacaggtcatgcccaattgcc

SEQ ID NO: 17814 - DNA, 25 bp, Homo sapien
aaaacagggataatttcaggatggt

SEQ ID NO: 17815 - DNA, 25 bp, Homo sapien
ttcaggatggtaaagtgccttcatc

SEQ ID NO: 17816 - DNA, 25 bp, Homo sapien
ctaggatgtcagaattggagtaatt

SEQ ID NO: 17817 - DNA, 25 bp, Homo sapien
tccacagaaggtatcaatgccacac

SEQ ID NO: 17818 - DNA, 25 bp, Homo sapien
ggccagggctcatcttacttttaaa

SEQ ID NO: 17819 - DNA, 25 bp, Homo sapien
tagaaggcaccttagagaccatcat

SEQ ID NO: 17820 - DNA, 25 bp, Homo sapien
tggctctgaggacataaatcaattc

SEQ ID NO: 17821 - DNA, 25 bp, Homo sapien
agaaaactggaccttggtctgaatc

SEQ ID NO: 17822 - DNA, 25 bp, Homo sapien
agactgagcgatttatgtagcattc

SEQ ID NO: 17823 - DNA, 25 bp, Homo sapien
tgcaatgagacagaggatatttctt

SEQ ID NO: 17824 - DNA, 25 bp, Homo sapien
agctcctttggaactgataaatgga

SEQ ID NO: 17825 - DNA, 25 bp, Homo sapien
tggtctgaatcttcccacaagggat

SEQ ID NO: 17826 - DNA, 25 bp, Homo sapien
aggtgggccgtaaatcagctccttt

SEQ ID NO: 17827 - DNA, 25 bp, Homo sapien
agaatacaaactagaagaggtgggc

SEQ ID NO: 17828 - DNA, 25 bp, Homo sapien
acagagaatcaagttgtgctcattt

SEQ ID NO: 17829 - DNA, 25 bp, Homo sapien
ccctttgaagtcagactgagcgatt

SEQ ID NO: 17830 - DNA, 25 bp, Homo sapien
tggacaccacacagaaagtaatgat

SEQ ID NO: 17831 - DNA, 25 bp, Homo sapien
tgaatggtcgaagtgatgatgtaac

SEQ ID NO: 17832 - DNA, 25 bp, Homo sapien
attttcagcgttttcctggtaccac

SEQ ID NO: 17833 - DNA, 25 bp, Homo sapien
aacaaagcacgtctaagtgactcac

SEQ ID NO: 17834 - DNA, 25 bp, Homo sapien
ctggtaccaccagtatatgcttttt

SEQ ID NO: 17835 - DNA, 25 bp, Homo sapien
atgtaaccaaaagagctggacacca

SEQ ID NO: 17836 - DNA, 25 bp, Homo sapien
taagtgactcacacaacaggtgcac

SEQ ID NO: 17837 - DNA, 25 bp, Homo sapien
gccacattaggccactgtgctaagc

SEQ ID NO: 17838 - DNA, 25 bp, Homo sapien
tttaaaagtgaatggtcgaagtgat

SEQ ID NO: 17839 - DNA, 25 bp, Homo sapien
cacaacaggtgcacatggtcagcca

SEQ ID NO: 17840 - DNA, 25 bp, Homo sapien
accaagaaacaaagcacgtctaagt

SEQ ID NO: 17841 - DNA, 25 bp, Homo sapien
acagtggtcacccttgagggaaaaa

SEQ ID NO: 17842 - DNA, 25 bp, Homo sapien
agttactacacacaggtaagcaccc

SEQ ID NO: 17843 - DNA, 25 bp, Homo sapien
atgaagttactacacacaggtaagc

SEQ ID NO: 17844 - DNA, 25 bp, Homo sapien
acaacagtggtcacccttgagggaa

SEQ ID NO: 17845 - DNA, 25 bp, Homo sapien
aggcatatgtataacatgaagttac

SEQ ID NO: 17846 - DNA, 25 bp, Homo sapien
ctggaggaacggatatagctcattt

SEQ ID NO: 17847 - DNA, 25 bp, Homo sapien
ggaaaaaggcatatgtataacatga

SEQ ID NO: 17848 - DNA, 25 bp, Homo sapien
tgggcaacaacagtggtcacccttg

SEQ ID NO: 17849 - DNA, 25 bp, Homo sapien
taacatgaagttactacacacaggt

SEQ ID NO: 17850 - DNA, 25 bp, Homo sapien
atggctggaggaacggatatagctc

SEQ ID NO: 17851 - DNA, 25 bp, Homo sapien
cacacatacatcctgaaaggatgtg

SEQ ID NO: 17852 - DNA, 25 bp, Homo sapien
caaatagttgttattgccagagtac

SEQ ID NO: 17853 - DNA, 25 bp, Homo sapien
aactgcatgctctgcgggtaagagt

SEQ ID NO: 17854 - DNA, 25 bp, Homo sapien
ttatattttgttctggggctgcctt

SEQ ID NO: 17855 - DNA, 25 bp, Homo sapien
tgtcagttctgtagggtgcagttgt

SEQ ID NO: 17856 - DNA, 25 bp, Homo sapien
ttttctaaggaagcagaaaacagtg

SEQ ID NO: 17857 - DNA, 25 bp, Homo sapien
ggaagcagaaaacagtgtcagttct

SEQ ID NO: 17858 - DNA, 25 bp, Homo sapien
tgtggaagatttactgaaacctttc

SEQ ID NO: 17859 - DNA, 25 bp, Homo sapien
agaattcctgtgttagtatgctaca

SEQ ID NO: 17860 - DNA, 25 bp, Homo sapien
ctattctttaagctgttgaggtaca

SEQ ID NO: 17861 - DNA, 25 bp, Homo sapien
gaacactgctctgtgggaactgcat

SEQ ID NO: 17862 - DNA, 25 bp, Homo sapien
ttggggatgtttgtgaataattgtt

SEQ ID NO: 17863 - DNA, 25 bp, Homo sapien
tcaagataggcaaaagatatgccag

SEQ ID NO: 17864 - DNA, 25 bp, Homo sapien
agaactgatgtcaacccttgggata

SEQ ID NO: 17865 - DNA, 25 bp, Homo sapien
atgtccaagcatgcacaaggtactc

SEQ ID NO: 17866 - DNA, 25 bp, Homo sapien
gccaagaggttttgagaagactcct

SEQ ID NO: 17867 - DNA, 25 bp, Homo sapien
cagatactggcatttggggctaaca

SEQ ID NO: 17868 - DNA, 25 bp, Homo sapien
attttagttacccaggaatggcatt

SEQ ID NO: 17869 - DNA, 25 bp, Homo sapien
aaagagagagatttcaggcaaatac

SEQ ID NO: 17870 - DNA, 25 bp, Homo sapien
aggggttaacctggcaaagaatctc

SEQ ID NO: 17871 - DNA, 25 bp, Homo sapien
ctaacagctgagattgtggggccaa

SEQ ID NO: 17872 - DNA, 25 bp, Homo sapien
gggagaaaccatagtgagacacatt

SEQ ID NO: 17873 - DNA, 25 bp, Homo sapien
ttcaggaaatcacagtagtcttaac

SEQ ID NO: 17874 - DNA, 25 bp, Homo sapien
aacaagcgattgtttctgctgtgct

SEQ ID NO: 17875 - DNA, 25 bp, Homo sapien
ttgattaagagggaaatgacatgtc

SEQ ID NO: 17876 - DNA, 25 bp, Homo sapien
cagggtgacaccaagcctcaaagca

SEQ ID NO: 17877 - DNA, 25 bp, Homo sapien
aacctatagcaaaagcacaaacaag

SEQ ID NO: 17878 - DNA, 25 bp, Homo sapien
gtgccttaatgtttacaacgttgac

SEQ ID NO: 17879 - DNA, 25 bp, Homo sapien
aacgttgacttgaatagcgaaagac

SEQ ID NO: 17880 - DNA, 25 bp, Homo sapien
gcacaaggctagtggagaacagtat

SEQ ID NO: 17881 - DNA, 25 bp, Homo sapien
tgacaccaagcctcaaagcacaagg

SEQ ID NO: 17882 - DNA, 25 bp, Homo sapien
acttgaatagcgaaagacttttacc

SEQ ID NO: 17883 - DNA, 25 bp, Homo sapien
ggagaacagtatgagggcttatatt

SEQ ID NO: 17884 - DNA, 25 bp, Homo sapien
aaaaacagaagctcggggagctgct

SEQ ID NO: 17885 - DNA, 25 bp, Homo sapien
caagtccaattcagagagaatgaaa

SEQ ID NO: 17886 - DNA, 25 bp, Homo sapien
aagtttgcatcccttaggcaataca

SEQ ID NO: 17887 - DNA, 25 bp, Homo sapien
attccatgaaaaggactgaatgtaa

SEQ ID NO: 17888 - DNA, 25 bp, Homo sapien
tccagaaagcaacagctaaaggttt

SEQ ID NO: 17889 - DNA, 25 bp, Homo sapien
aagcaacagctaaaggtttaaagac

SEQ ID NO: 17890 - DNA, 25 bp, Homo sapien
aagacaaagtttgcctctcaagtcc

SEQ ID NO: 17891 - DNA, 25 bp, Homo sapien
tattgtctgtaagccacagagtgag

SEQ ID NO: 17892 - DNA, 25 bp, Homo sapien
cccttaggcaatacaaaggtccaga

SEQ ID NO: 17893 - DNA, 25 bp, Homo sapien
tagtaaatttcatgagagtggatac

SEQ ID NO: 17894 - DNA, 25 bp, Homo sapien
atcaaccattgtttaggctacccta

SEQ ID NO: 17895 - DNA, 25 bp, Homo sapien
tcatgagagtggatactgtaattgt

SEQ ID NO: 17896 - DNA, 25 bp, Homo sapien
ccctgggctaaagaagcaagttaat

SEQ ID NO: 17897 - DNA, 25 bp, Homo sapien
gtgcattgccaagggaataatttcc

SEQ ID NO: 17898 - DNA, 25 bp, Homo sapien
gcaaaaacaggcacaaagctaaaaa

SEQ ID NO: 17899 - DNA, 25 bp, Homo sapien
agggaaatgcaaagtacatagaatc

SEQ ID NO: 17900 - DNA, 25 bp, Homo sapien
tagcaaaatgcatagctctggtagc

SEQ ID NO: 17901 - DNA, 25 bp, Homo sapien
aatgaatcaagacatagcaaaatgc

SEQ ID NO: 17902 - DNA, 25 bp, Homo sapien
tcaggttactaaaatacagagggaa

SEQ ID NO: 17903 - DNA, 25 bp, Homo sapien
gactaggagaaatcattacaaagct

SEQ ID NO: 17904 - DNA, 25 bp, Homo sapien
acacacgtatatagagatgagtata

SEQ ID NO: 17905 - DNA, 25 bp, Homo sapien
tataaaagttcagttgtgcattgcc

SEQ ID NO: 17906 - DNA, 25 bp, Homo sapien
aaatacagagggaaatgttggaaat

SEQ ID NO: 17907 - DNA, 25 bp, Homo sapien
caatcaattgtgagaaccaaggccc

SEQ ID NO: 17908 - DNA, 25 bp, Homo sapien
tagaatgtaacagaagtgacagtgt

SEQ ID NO: 17909 - DNA, 25 bp, Homo sapien
tcttgggaactctgagcttgcatgt

SEQ ID NO: 17910 - DNA, 25 bp, Homo sapien
agttggttacatcaattggtggccc

SEQ ID NO: 17911 - DNA, 25 bp, Homo sapien
tctgtagaggctacatggattggcc

SEQ ID NO: 17912 - DNA, 25 bp, Homo sapien
catgtggaacagaagtcctagaact

SEQ ID NO: 17913 - DNA, 25 bp, Homo sapien
gtgagtgaagaagctatctagaaca

SEQ ID NO: 17914 - DNA, 25 bp, Homo sapien
gcttgcatgtaagaagtcggctatc

SEQ ID NO: 17915 - DNA, 25 bp, Homo sapien
ttgcccagtgacaatctgtggtagt

SEQ ID NO: 17916 - DNA, 25 bp, Homo sapien
cattggagccatcctagctaggtgc

SEQ ID NO: 17917 - DNA, 25 bp, Homo sapien
cccttgtaaagagcgtgtggttatt

SEQ ID NO: 17918 - DNA, 25 bp, Homo sapien
acactaacattatgaacaaggcagg

SEQ ID NO: 17919 - DNA, 25 bp, Homo sapien
cttcttcaggtacagagagcccgga

SEQ ID NO: 17920 - DNA, 25 bp, Homo sapien
ctcaggtgaggctcttaggcacgca

SEQ ID NO: 17921 - DNA, 25 bp, Homo sapien
ccagatgccgtattgagacagggct

SEQ ID NO: 17922 - DNA, 25 bp, Homo sapien
atctcttcttcaggtacagagagcc

SEQ ID NO: 17923 - DNA, 25 bp, Homo sapien
atgaacaaggcaggagttcctgcta

SEQ ID NO: 17924 - DNA, 25 bp, Homo sapien
taggcacgcagctgaagggagttca

SEQ ID NO: 17925 - DNA, 25 bp, Homo sapien
agatgccgtattgagacagggctca

SEQ ID NO: 17926 - DNA, 25 bp, Homo sapien
aaggcaggagttcctgctaacacac

SEQ ID NO: 17927 - DNA, 25 bp, Homo sapien
ccagagggttgaagaccaacactaa

SEQ ID NO: 17928 - DNA, 25 bp, Homo sapien
gagggttgaagaccaacactaacat

SEQ ID NO: 17929 - DNA, 25 bp, Homo sapien
tctcatgtaaaactactgagtgtct

SEQ ID NO: 17930 - DNA, 25 bp, Homo sapien
gtgtctgaatctggcgctcaaaagc

SEQ ID NO: 17931 - DNA, 25 bp, Homo sapien
tgatgaacccaaatactacttagtg

SEQ ID NO: 17932 - DNA, 25 bp, Homo sapien
aggatgttgtagcactctcatgtaa

SEQ ID NO: 17933 - DNA, 25 bp, Homo sapien
aatctggcgctcaaaagccttaaaa

SEQ ID NO: 17934 - DNA, 25 bp, Homo sapien
ctactgagtgtctgaatctggcgct

SEQ ID NO: 17935 - DNA, 25 bp, Homo sapien
ataccacttctaggtctctgtttcc

SEQ ID NO: 17936 - DNA, 25 bp, Homo sapien
aaactactgagtgtctgaatctggc

SEQ ID NO: 17937 - DNA, 25 bp, Homo sapien
tcaaaacctttgctgtaataccact

SEQ ID NO: 17938 - DNA, 25 bp, Homo sapien
tgtaaaactactgagtgtctgaatc

SEQ ID NO: 17939 - DNA, 25 bp, Homo sapien
ttagtgaggatgttgtagcactctc

SEQ ID NO: 17940 - DNA, 25 bp, Homo sapien
tcagaggtagcctttatctgcattt

SEQ ID NO: 17941 - DNA, 25 bp, Homo sapien
aacatgatgaatctattgagaattc

SEQ ID NO: 17942 - DNA, 25 bp, Homo sapien
attgagaattcagaggtagccttta

SEQ ID NO: 17943 - DNA, 25 bp, Homo sapien
tctattgagaattcagaggtagcct

SEQ ID NO: 17944 - DNA, 25 bp, Homo sapien
tggacagctacacttaagagcaaac

SEQ ID NO: 17945 - DNA, 25 bp, Homo sapien
cagtgtggacagctacacttaagag

SEQ ID NO: 17946 - DNA, 25 bp, Homo sapien
gtgtggacagctacacttaagagca

SEQ ID NO: 17947 - DNA, 25 bp, Homo sapien
ctacacttaagagcaaacatgatga

SEQ ID NO: 17948 - DNA, 25 bp, Homo sapien
cacttaagagcaaacatgatgaatc

SEQ ID NO: 17949 - DNA, 25 bp, Homo sapien
taagagcaaacatgatgaatctatt

SEQ ID NO: 17950 - DNA, 25 bp, Homo sapien
tattgagaattcagaggtagccttt

SEQ ID NO: 17951 - DNA, 25 bp, Homo sapien
aagaatattgcaccctgatcacagg

SEQ ID NO: 17952 - DNA, 25 bp, Homo sapien
aatgctgatccatatgggctgcaaa

SEQ ID NO: 17953 - DNA, 25 bp, Homo sapien
ccctggtctccctggaatgctgatc

SEQ ID NO: 17954 - DNA, 25 bp, Homo sapien
tatgggctgcaaaaagacagtcctt

SEQ ID NO: 17955 - DNA, 25 bp, Homo sapien
aaagcaaggctttgacctaaactcc

SEQ ID NO: 17956 - DNA, 25 bp, Homo sapien
aagaatttaacgctatggacccaga

SEQ ID NO: 17957 - DNA, 25 bp, Homo sapien
tcggctgtaatccaaataagaattt

SEQ ID NO: 17958 - DNA, 25 bp, Homo sapien
tgtatataccaaaaaagcaaggctt

SEQ ID NO: 17959 - DNA, 25 bp, Homo sapien
gatcacaggccagaactgctgattc

SEQ ID NO: 17960 - DNA, 25 bp, Homo sapien
atggacccagaatgccagaatcttc

SEQ ID NO: 17961 - DNA, 25 bp, Homo sapien
tatgggagaaagaacaataagaata

SEQ ID NO: 17962 - DNA, 25 bp, Homo sapien
ttcagagctcagaaccaacattctt

SEQ ID NO: 17963 - DNA, 25 bp, Homo sapien
aaggacagaaagcatgcctgttact

SEQ ID NO: 17964 - DNA, 25 bp, Homo sapien
catgctgttccaagaaatgggccag

SEQ ID NO: 17965 - DNA, 25 bp, Homo sapien
aaagcacccagttaatatagcaatc

SEQ ID NO: 17966 - DNA, 25 bp, Homo sapien
gatgaatggggtaaccactatggtt

SEQ ID NO: 17967 - DNA, 25 bp, Homo sapien
tccatagataaggagtaaacctctg

SEQ ID NO: 17968 - DNA, 25 bp, Homo sapien
aaaaaacccatggagatggactttg

SEQ ID NO: 17969 - DNA, 25 bp, Homo sapien
tcaggcacacctgtcatatggtagt

SEQ ID NO: 17970 - DNA, 25 bp, Homo sapien
ggccaggggttcacctatgctccat

SEQ ID NO: 17971 - DNA, 25 bp, Homo sapien
tcccagattccttagttcagagctc

SEQ ID NO: 17972 - DNA, 25 bp, Homo sapien
gatggactttgggtagcttacaatc

SEQ ID NO: 17973 - DNA, 25 bp, Homo sapien
tttttagatggtagcaggagtcaat

SEQ ID NO: 17974 - DNA, 25 bp, Homo sapien
aatgatgcttcctatacgttggtct

SEQ ID NO: 17975 - DNA, 25 bp, Homo sapien
ccatgtggcatggaagaagcttcct

SEQ ID NO: 17976 - DNA, 25 bp, Homo sapien
ctgaagcccgtttgtctccatgtgg

SEQ ID NO: 17977 - DNA, 25 bp, Homo sapien
ggtagcaggagtcaatagatgaata

SEQ ID NO: 17978 - DNA, 25 bp, Homo sapien
ataagcgtggacaaagcatgtttct

SEQ ID NO: 17979 - DNA, 25 bp, Homo sapien
ctctccagggatggatagaaagaaa

SEQ ID NO: 17980 - DNA, 25 bp, Homo sapien
tcactagaagatgtctgaagcccgt

SEQ ID NO: 17981 - DNA, 25 bp, Homo sapien
attgattgcactgggtcaggctcct

SEQ ID NO: 17982 - DNA, 25 bp, Homo sapien
actagacaacatcagctacttgggg

SEQ ID NO: 17983 - DNA, 25 bp, Homo sapien
aagaatttgactgataagcgtggac

SEQ ID NO: 17984 - DNA, 25 bp, Homo sapien
atatgataacctctcaggagtgggg

SEQ ID NO: 17985 - DNA, 25 bp, Homo sapien
tctctacagagctaatcaagctaaa

SEQ ID NO: 17986 - DNA, 25 bp, Homo sapien
gtgtccaaaccagcatcaatatgat

SEQ ID NO: 17987 - DNA, 25 bp, Homo sapien
ttctgggcagtagtgtgctatgcca

SEQ ID NO: 17988 - DNA, 25 bp, Homo sapien
caagctaaaatgaggtcagtagagt

SEQ ID NO: 17989 - DNA, 25 bp, Homo sapien
agtgtgctatgccaattgggtgtcc

SEQ ID NO: 17990 - DNA, 25 bp, Homo sapien
tgggatagcacctatgaatagccac

SEQ ID NO: 17991 - DNA, 25 bp, Homo sapien
atgccaattgggtgtccaaaccagc

SEQ ID NO: 17992 - DNA, 25 bp, Homo sapien
tgcctaaggagggatgaagtgaccc

SEQ ID NO: 17993 - DNA, 25 bp, Homo sapien
gatgaagtgacccaggtcagaaatg

SEQ ID NO: 17994 - DNA, 25 bp, Homo sapien
atcagtagtgggatagcacctatga

SEQ ID NO: 17995 - DNA, 25 bp, Homo sapien
tactagcatgcatcaatatcctccc

SEQ ID NO: 17996 - DNA, 25 bp, Homo sapien
ggcagatggttagccaagttctatt

SEQ ID NO: 17997 - DNA, 25 bp, Homo sapien
tgcctacagtatttcagatcaaaat

SEQ ID NO: 17998 - DNA, 25 bp, Homo sapien
ttccataggcatcatacaaatactg

SEQ ID NO: 17999 - DNA, 25 bp, Homo sapien
aaagtatcaacaaattagcactgaa

SEQ ID NO: 18000 - DNA, 25 bp, Homo sapien
caaaatagcttttactgaaatagac

SEQ ID NO: 18001 - DNA, 25 bp, Homo sapien
atactctgtaagactgcctacagta

SEQ ID NO: 18002 - DNA, 25 bp, Homo sapien
aaccatatcagcaaatacacttctt

SEQ ID NO: 18003 - DNA, 25 bp, Homo sapien
ttctcttattggcagatggttagcc

SEQ ID NO: 18004 - DNA, 25 bp, Homo sapien
gactttcctgcctctctgatttagc

SEQ ID NO: 18005 - DNA, 25 bp, Homo sapien
aatccatatgtcttccataggcatc

SEQ ID NO: 18006 - DNA, 25 bp, Homo sapien
tcagcaacatctcctacaacgatgg

SEQ ID NO: 18007 - DNA, 25 bp, Homo sapien
cgatggaaaggcatagaaaagaaga

SEQ ID NO: 18008 - DNA, 25 bp, Homo sapien
acagtccagagattgagtgtaggaa

SEQ ID NO: 18009 - DNA, 25 bp, Homo sapien
ctgttctttgtgatgattacaggct

SEQ ID NO: 18010 - DNA, 25 bp, Homo sapien
gagattgagtgtaggaagtcttagt

SEQ ID NO: 18011 - DNA, 25 bp, Homo sapien
attattagctaagtacaaatgggtt

SEQ ID NO: 18012 - DNA, 25 bp, Homo sapien
cccagcatttacagtccagagattg

SEQ ID NO: 18013 - DNA, 25 bp, Homo sapien
tctcctacaacgatggaaaggcata

SEQ ID NO: 18014 - DNA, 25 bp, Homo sapien
cttgtaattgaagtcttagagttga

SEQ ID NO: 18015 - DNA, 25 bp, Homo sapien
tatttgcaagggaacattattagct

SEQ ID NO: 18016 - DNA, 25 bp, Homo sapien
aagggaacattattaatcttgtggg

SEQ ID NO: 18017 - DNA, 25 bp, Homo sapien
ttagagcccaaacatacggcctaat

SEQ ID NO: 18018 - DNA, 25 bp, Homo sapien
accataatgagtcaactgccagttt

SEQ ID NO: 18019 - DNA, 25 bp, Homo sapien
caagagggtagtttacgtaaatgag

SEQ ID NO: 18020 - DNA, 25 bp, Homo sapien
ttctggaggccatatatctgacaag

SEQ ID NO: 18021 - DNA, 25 bp, Homo sapien
aaacacacagaaagaggccaggcac

SEQ ID NO: 18022 - DNA, 25 bp, Homo sapien
actgccctggcaatatgtgcacgga

SEQ ID NO: 18023 - DNA, 25 bp, Homo sapien
tgcacggaggaacatacatgtacca

SEQ ID NO: 18024 - DNA, 25 bp, Homo sapien
tatctgacaagatggtattggcagg

SEQ ID NO: 18025 - DNA, 25 bp, Homo sapien
agggccggtttcttcaggagcctct

SEQ ID NO: 18026 - DNA, 25 bp, Homo sapien
aagaactaggagacttcagcatatg

SEQ ID NO: 18027 - DNA, 25 bp, Homo sapien
taagggtacgaatgcatacactgcc

SEQ ID NO: 18028 - DNA, 25 bp, Homo sapien
gtgtcgcctcgggaccccgcgaggg

SEQ ID NO: 18029 - DNA, 25 bp, Homo sapien
ccctcgcggggtcccgaggcgacac

SEQ ID NO: 18030 - DNA, 25 bp, Homo sapien
tagcgaagcctgtgttctccagcgc

SEQ ID NO: 18031 - DNA, 25 bp, Homo sapien
gatgcggggatatctgactacacca

SEQ ID NO: 18032 - DNA, 25 bp, Homo sapien
cttctgggaaaacccattgccgggc

SEQ ID NO: 18033 - DNA, 25 bp, Homo sapien
gtggtaaaactaagactcggatgcg

SEQ ID NO: 18034 - DNA, 25 bp, Homo sapien
gtgccacatggcctctgcagtgctc

SEQ ID NO: 18035 - DNA, 25 bp, Homo sapien
ttgttcataaagagcccgttacacg

SEQ ID NO: 18036 - DNA, 25 bp, Homo sapien
gttagaggtcagctgctgcaacttc

SEQ ID NO: 18037 - DNA, 25 bp, Homo sapien
tgcagtgctccatctgtcaagagtt

SEQ ID NO: 18038 - DNA, 25 bp, Homo sapien
tgacaccaccacaaattaggatttt

SEQ ID NO: 18039 - DNA, 25 bp, Homo sapien
tggaaattcccgtgccacatggcct

SEQ ID NO: 18040 - DNA, 25 bp, Homo sapien
cagatgaggaaaaaagcttgaagtt

SEQ ID NO: 18041 - DNA, 25 bp, Homo sapien
caggactaactgtgaaaccatatca

SEQ ID NO: 18042 - DNA, 25 bp, Homo sapien
ggaaggtgaccagccaagccactac

SEQ ID NO: 18043 - DNA, 25 bp, Homo sapien
gttactgaagctaaacaaggtcttc

SEQ ID NO: 18044 - DNA, 25 bp, Homo sapien
tcccgggcagatcacaggactaact

SEQ ID NO: 18045 - DNA, 25 bp, Homo sapien
ctcttgagaattagtcccgggcaga

SEQ ID NO: 18046 - DNA, 25 bp, Homo sapien
actgtgctcggcctaaaaagccttt

SEQ ID NO: 18047 - DNA, 25 bp, Homo sapien
ggggaaacagcctcaacactcacct

SEQ ID NO: 18048 - DNA, 25 bp, Homo sapien
caacagatgctgctgagacaagtga

SEQ ID NO: 18049 - DNA, 25 bp, Homo sapien
tcaacaaacacttcggaaggtgacc

SEQ ID NO: 18050 - DNA, 25 bp, Homo sapien
gctgctgagacaagtgagtatctac

SEQ ID NO: 18051 - DNA, 25 bp, Homo sapien
ctgtatcacagaccgcaataatcac

SEQ ID NO: 18052 - DNA, 25 bp, Homo sapien
gtctcagggaagatatgctggcata

SEQ ID NO: 18053 - DNA, 25 bp, Homo sapien
taactgctgagcagagaacagatta

SEQ ID NO: 18054 - DNA, 25 bp, Homo sapien
ttaaagacagaatttaggaggctgc

SEQ ID NO: 18055 - DNA, 25 bp, Homo sapien
ttagaggaaaggcttgaaatacatc

SEQ ID NO: 18056 - DNA, 25 bp, Homo sapien
aatacatctgggaactgtcatggca

SEQ ID NO: 18057 - DNA, 25 bp, Homo sapien
ctgtcatggcaaagatcatcacctt

SEQ ID NO: 18058 - DNA, 25 bp, Homo sapien
ttcaaggctgtagcaggctacaatc

SEQ ID NO: 18059 - DNA, 25 bp, Homo sapien
tattatgaaaagcaatcgaactgtt

SEQ ID NO: 18060 - DNA, 25 bp, Homo sapien
atcaagtgataaaaggtaacacctc

SEQ ID NO: 18061 - DNA, 25 bp, Homo sapien
cctctctgcactggcctgggtaaaa

SEQ ID NO: 18062 - DNA, 25 bp, Homo sapien
atgctggcatagagcttagaggaaa

SEQ ID NO: 18063 - DNA, 25 bp, Homo sapien
ctcctgggaacgtctgggaaaatca

SEQ ID NO: 18064 - DNA, 25 bp, Homo sapien
attcctcgggcttgtatataactcc

SEQ ID NO: 18065 - DNA, 25 bp, Homo sapien
gctaaagtgcagcagtgggatcata

SEQ ID NO: 18066 - DNA, 25 bp, Homo sapien
caggcagacattgcactcagtgagc

SEQ ID NO: 18067 - DNA, 25 bp, Homo sapien
tctcatctttaggaagggagtggtc

SEQ ID NO: 18068 - DNA, 25 bp, Homo sapien
aagggagtggtcattcccacctgca

SEQ ID NO: 18069 - DNA, 25 bp, Homo sapien
aaaatcagacagtgaggctccatct

SEQ ID NO: 18070 - DNA, 25 bp, Homo sapien
ctgtgagggcaaaaatccagactgc

SEQ ID NO: 18071 - DNA, 25 bp, Homo sapien
ggcttgtgtcctgactgggagacca

SEQ ID NO: 18072 - DNA, 25 bp, Homo sapien
tttggagctagaagtgctgtgacca

SEQ ID NO: 18073 - DNA, 25 bp, Homo sapien
caggctgctggagtctgcatctcat

SEQ ID NO: 18074 - DNA, 25 bp, Homo sapien
gtgagcaagaaaatagtgagatgat

SEQ ID NO: 18075 - DNA, 25 bp, Homo sapien
cctccaggtggaagtctctggtcat

SEQ ID NO: 18076 - DNA, 25 bp, Homo sapien
acaactaggtaatcgtggtattttc

SEQ ID NO: 18077 - DNA, 25 bp, Homo sapien
atttatcataactagcttggccatc

SEQ ID NO: 18078 - DNA, 25 bp, Homo sapien
aagcattaagtgactgttgaaaagc

SEQ ID NO: 18079 - DNA, 25 bp, Homo sapien
gcttggccatccttacatacgtaac

SEQ ID NO: 18080 - DNA, 25 bp, Homo sapien
ttgcatgtgccgtgattcatttatc

SEQ ID NO: 18081 - DNA, 25 bp, Homo sapien
aaaagcacttgggtgttgactggct

SEQ ID NO: 18082 - DNA, 25 bp, Homo sapien
aaaagagccataagggtgagcaaga

SEQ ID NO: 18083 - DNA, 25 bp, Homo sapien
gtgattgaacaggtcagacagcaat

SEQ ID NO: 18084 - DNA, 25 bp, Homo sapien
tatcacgctgtgtgacctccaggtg

SEQ ID NO: 18085 - DNA, 25 bp, Homo sapien
tcttaaaacagcacattccatgggt

SEQ ID NO: 18086 - DNA, 25 bp, Homo sapien
attccatgggtgtaaatgttttttc

SEQ ID NO: 18087 - DNA, 25 bp, Homo sapien
ataggccaaagttatcttagacacc

SEQ ID NO: 18088 - DNA, 25 bp, Homo sapien
acagccagaaacacttaatgtaaag

SEQ ID NO: 18089 - DNA, 25 bp, Homo sapien
tgagccatcacgcacagccagaaac

SEQ ID NO: 18090 - DNA, 25 bp, Homo sapien
caggtggaaccacagatgcacacca

SEQ ID NO: 18091 - DNA, 25 bp, Homo sapien
cttagacaccctctatggcatagac

SEQ ID NO: 18092 - DNA, 25 bp, Homo sapien
acagttaaggtagactattgattac

SEQ ID NO: 18093 - DNA, 25 bp, Homo sapien
ctacaactacagttaaggtagacta

SEQ ID NO: 18094 - DNA, 25 bp, Homo sapien
acatcatctgtaactctgtaaagca

SEQ ID NO: 18095 - DNA, 25 bp, Homo sapien
atttagaagagttgaggtcttgcca

SEQ ID NO: 18096 - DNA, 25 bp, Homo sapien
acaggtgaatgaaccgattccttat

SEQ ID NO: 18097 - DNA, 25 bp, Homo sapien
aaatgagatctcacgtggggatcaa

SEQ ID NO: 18098 - DNA, 25 bp, Homo sapien
ccatttgagactgcctgtgcgactg

SEQ ID NO: 18099 - DNA, 25 bp, Homo sapien
gcccaggtgcaaagaatatgtaaac

SEQ ID NO: 18100 - DNA, 25 bp, Homo sapien
ttcctcctaggagctgcaaggctta

SEQ ID NO: 18101 - DNA, 25 bp, Homo sapien
tttacaatagagatgctgcaaggag

SEQ ID NO: 18102 - DNA, 25 bp, Homo sapien
tcaggccacagctagactggaagca

SEQ ID NO: 18103 - DNA, 25 bp, Homo sapien
agcaaacgtggacctgacaggctct

SEQ ID NO: 18104 - DNA, 25 bp, Homo sapien
acccagctggaggaaatgagatctc

SEQ ID NO: 18105 - DNA, 25 bp, Homo sapien
actcatgcagataggtggagtccta

SEQ ID NO: 18106 - DNA, 25 bp, Homo sapien
ggagggcagaagctctaatcactct

SEQ ID NO: 18107 - DNA, 25 bp, Homo sapien
tattcctttactacagatctgttag

SEQ ID NO: 18108 - DNA, 25 bp, Homo sapien
ctgttagtttgaggagaaagcttct

SEQ ID NO: 18109 - DNA, 25 bp, Homo sapien
ttgaggagaaagcttcttgactaga

SEQ ID NO: 18110 - DNA, 25 bp, Homo sapien
ttagttgtagtggtcatactttccc

SEQ ID NO: 18111 - DNA, 25 bp, Homo sapien
cttgactagaaggattattacaatt

SEQ ID NO: 18112 - DNA, 25 bp, Homo sapien
tcttgctattcagctgtgttctgca

SEQ ID NO: 18113 - DNA, 25 bp, Homo sapien
gatctgttagtttgaggagaaagct

SEQ ID NO: 18114 - DNA, 25 bp, Homo sapien
tgtagtggtcatactttccctgatg

SEQ ID NO: 18115 - DNA, 25 bp, Homo sapien
ttcctagagacatccaggtattttt

SEQ ID NO: 18116 - DNA, 25 bp, Homo sapien
ctagggctttttagttgtagtggtc

SEQ ID NO: 18117 - DNA, 25 bp, Homo sapien
tttctttcctagagacatccaggta

SEQ ID NO: 18118 - DNA, 25 bp, Homo sapien
tattttatgccaggagataagatcc

SEQ ID NO: 18119 - DNA, 25 bp, Homo sapien
tctgggtgtgtctctaaataagcaa

SEQ ID NO: 18120 - DNA, 25 bp, Homo sapien
tctggcccagctaagcctgtgcgtt

SEQ ID NO: 18121 - DNA, 25 bp, Homo sapien
aggccctcgggttatctggacctca

SEQ ID NO: 18122 - DNA, 25 bp, Homo sapien
caggaagcatgaatctgaagcattc

SEQ ID NO: 18123 - DNA, 25 bp, Homo sapien
agaacaaaaccaaagctcaacagct

SEQ ID NO: 18124 - DNA, 25 bp, Homo sapien
tcatgacgtccaagcagtcacagag

SEQ ID NO: 18125 - DNA, 25 bp, Homo sapien
ggacctcaatgacacacaagaagcc

SEQ ID NO: 18126 - DNA, 25 bp, Homo sapien
acactgccagttttcaggaaggaca

SEQ ID NO: 18127 - DNA, 25 bp, Homo sapien
gggaagctaataaatgtctgggtgt

SEQ ID NO: 18128 - DNA, 25 bp, Homo sapien
ggtttagatagacaaaggacacttc

SEQ ID NO: 18129 - DNA, 25 bp, Homo sapien
aaaagagactcaacagagcttgctc

SEQ ID NO: 18130 - DNA, 25 bp, Homo sapien
tttaggaaagggtgatattcaagga

SEQ ID NO: 18131 - DNA, 25 bp, Homo sapien
aagagaagaaacctgaatgaaacct

SEQ ID NO: 18132 - DNA, 25 bp, Homo sapien
tgaactcatgaaacactactggact

SEQ ID NO: 18133 - DNA, 25 bp, Homo sapien
accaaaccttggtgtgtgatgggaa

SEQ ID NO: 18134 - DNA, 25 bp, Homo sapien
gtgtgatgggaaatgaactcatgaa

SEQ ID NO: 18135 - DNA, 25 bp, Homo sapien
gctgttgtcctcaccaaggaagagc

SEQ ID NO: 18136 - DNA, 25 bp, Homo sapien
tggacttatgtatcagcacaacacc

SEQ ID NO: 18137 - DNA, 25 bp, Homo sapien
atttgtgtggatgattgatgtggca

SEQ ID NO: 18138 - DNA, 25 bp, Homo sapien
atattcaaggacgtggctgttgtcc

SEQ ID NO: 18139 - DNA, 25 bp, Homo sapien
cagctgtctacaagccaagagaaga

SEQ ID NO: 18140 - DNA, 25 bp, Homo sapien
gatgagaagaatccctggcaacact

SEQ ID NO: 18141 - DNA, 25 bp, Homo sapien
actgaagaaaagctacctgctgtcc

SEQ ID NO: 18142 - DNA, 25 bp, Homo sapien
gaagcaatgcccagagatgagaaga

SEQ ID NO: 18143 - DNA, 25 bp, Homo sapien
gcgcctggccgagaatgcatacttt

SEQ ID NO: 18144 - DNA, 25 bp, Homo sapien
cagtgtgagctttgggacgtttgct

SEQ ID NO: 18145 - DNA, 25 bp, Homo sapien
ggccgagaatgcatactttagtatc

SEQ ID NO: 18146 - DNA, 25 bp, Homo sapien
agagataagcacgtgaccctcactg

SEQ ID NO: 18147 - DNA, 25 bp, Homo sapien
ctgctgtcctctggggttgttaaac

SEQ ID NO: 18148 - DNA, 25 bp, Homo sapien
cactggtccagtgtgagctttggga

SEQ ID NO: 18149 - DNA, 25 bp, Homo sapien
gaggggactgcctgagatgaactca

SEQ ID NO: 18150 - DNA, 25 bp, Homo sapien
tttgctggaactactgaagaaaagc

SEQ ID NO: 18151 - DNA, 25 bp, Homo sapien
agcatcagagtccactagccaagtt

SEQ ID NO: 18152 - DNA, 25 bp, Homo sapien
ttataaaggtagtagttgaaagatc

SEQ ID NO: 18153 - DNA, 25 bp, Homo sapien
ttgaaagatcagagaggttatggtt

SEQ ID NO: 18154 - DNA, 25 bp, Homo sapien
ttggtgagtagctgaactcagattc

SEQ ID NO: 18155 - DNA, 25 bp, Homo sapien
acatcacagtgtgcacagtgctcga

SEQ ID NO: 18156 - DNA, 25 bp, Homo sapien
cctcacgggataattagtacctgcc

SEQ ID NO: 18157 - DNA, 25 bp, Homo sapien
cagttagtatcatgcctcacgggat

SEQ ID NO: 18158 - DNA, 25 bp, Homo sapien
tagtcatattgagaaagccagtttg

SEQ ID NO: 18159 - DNA, 25 bp, Homo sapien
tagccaagttgatctctgcagtatc

SEQ ID NO: 18160 - DNA, 25 bp, Homo sapien
atgtaaagtttgagctcagcagaat

SEQ ID NO: 18161 - DNA, 25 bp, Homo sapien
agtgctcgagatggtaaaatcattc

SEQ ID NO: 18162 - DNA, 25 bp, Homo sapien
ttgaggtaccacatcagtgtcatcc

SEQ ID NO: 18163 - DNA, 25 bp, Homo sapien
agatcatggctgttggcccaatctc

SEQ ID NO: 18164 - DNA, 25 bp, Homo sapien
aagtgtgcatggtgctgaccttgat

SEQ ID NO: 18165 - DNA, 25 bp, Homo sapien
aaaggctgagaaagggctttattac

SEQ ID NO: 18166 - DNA, 25 bp, Homo sapien
ttacagtaaaatcttgaggtaccac

SEQ ID NO: 18167 - DNA, 25 bp, Homo sapien
cctctatataggtcagccatgtatt

SEQ ID NO: 18168 - DNA, 25 bp, Homo sapien
ttactgtgaaagagaagtctgccct

SEQ ID NO: 18169 - DNA, 25 bp, Homo sapien
tatcatgaggaaactaagtgtgcat

SEQ ID NO: 18170 - DNA, 25 bp, Homo sapien
ctttgtgtagcagttggtaagtcac

SEQ ID NO: 18171 - DNA, 25 bp, Homo sapien
aatctcacctgaaagcacatgaaag

SEQ ID NO: 18172 - DNA, 25 bp, Homo sapien
agagattaggctgtgccctccacaa

SEQ ID NO: 18173 - DNA, 25 bp, Homo sapien
actggcctgccactagtgtaccata

SEQ ID NO: 18174 - DNA, 25 bp, Homo sapien
tgggatatgtgaatatgcacagatc

SEQ ID NO: 18175 - DNA, 25 bp, Homo sapien
agtgtaccatatctccaagcaaggg

SEQ ID NO: 18176 - DNA, 25 bp, Homo sapien
cccaggactacaagttgctctcagc

SEQ ID NO: 18177 - DNA, 25 bp, Homo sapien
ctactgcacagtggatgtgagatga

SEQ ID NO: 18178 - DNA, 25 bp, Homo sapien
tatagctaaatatgggtgggatatg

SEQ ID NO: 18179 - DNA, 25 bp, Homo sapien
tatgcacagatctcaactaaatgtc

SEQ ID NO: 18180 - DNA, 25 bp, Homo sapien
agcaagggaaagcaatgaatgattc

SEQ ID NO: 18181 - DNA, 25 bp, Homo sapien
tttgaagattcaacccaggactaca

SEQ ID NO: 18182 - DNA, 25 bp, Homo sapien
tctcagcctcattcacctggcagaa

SEQ ID NO: 18183 - DNA, 25 bp, Homo sapien
ctcaccacaaactcaggcagaaagc

SEQ ID NO: 18184 - DNA, 25 bp, Homo sapien
ttggggaagagtatcccaagtaaca

SEQ ID NO: 18185 - DNA, 25 bp, Homo sapien
atggcaggcttgtgcttgaatagct

SEQ ID NO: 18186 - DNA, 25 bp, Homo sapien
aagaggtagcaaggccaggtcacgt

SEQ ID NO: 18187 - DNA, 25 bp, Homo sapien
acttagcttgagatgagaaaagtca

SEQ ID NO: 18188 - DNA, 25 bp, Homo sapien
aggtaggatatttagagaagccctc

SEQ ID NO: 18189 - DNA, 25 bp, Homo sapien
aaacataagcagagtaagaggaaca

SEQ ID NO: 18190 - DNA, 25 bp, Homo sapien
agtgagtttgagttccctagatgtc

SEQ ID NO: 18191 - DNA, 25 bp, Homo sapien
acagaaataagtgtaatggcaggct

SEQ ID NO: 18192 - DNA, 25 bp, Homo sapien
ccctagatgtcttggggaagagtat

SEQ ID NO: 18193 - DNA, 25 bp, Homo sapien
gccggggtagcactctggattttac

SEQ ID NO: 18194 - DNA, 25 bp, Homo sapien
atatttgaacaagggcctaaaggag

SEQ ID NO: 18195 - DNA, 25 bp, Homo sapien
ttattctggagaaagctacgtggca

SEQ ID NO: 18196 - DNA, 25 bp, Homo sapien
tgctgccacaaagggatatgcgtat

SEQ ID NO: 18197 - DNA, 25 bp, Homo sapien
ctctgggctctcaaatgccaaaacc

SEQ ID NO: 18198 - DNA, 25 bp, Homo sapien
aaaagactgagattgaatttccctc

SEQ ID NO: 18199 - DNA, 25 bp, Homo sapien
gaataattagtacaggccagttgct

SEQ ID NO: 18200 - DNA, 25 bp, Homo sapien
ctccttcacggtagcaccctgaggg

SEQ ID NO: 18201 - DNA, 25 bp, Homo sapien
actctccagagaccagatcttcatg

SEQ ID NO: 18202 - DNA, 25 bp, Homo sapien
cctatgtacaactctgggatctttg

SEQ ID NO: 18203 - DNA, 25 bp, Homo sapien
tacgtggcaagttgaaggagactga

SEQ ID NO: 18204 - DNA, 25 bp, Homo sapien
tgacaggagcagaaattaacatttt

SEQ ID NO: 18205 - DNA, 25 bp, Homo sapien
ctttggagagcagcaaaaagactga

SEQ ID NO: 18206 - DNA, 25 bp, Homo sapien
agtaagcatcaagttagagacaggg

SEQ ID NO: 18207 - DNA, 25 bp, Homo sapien
taagaagagtagaactggccacttt

SEQ ID NO: 18208 - DNA, 25 bp, Homo sapien
caacactgcaatgggaaaggtgaca

SEQ ID NO: 18209 - DNA, 25 bp, Homo sapien
tgttaaaaagccaagagtaagcatc

SEQ ID NO: 18210 - DNA, 25 bp, Homo sapien
agaagattaaaggtaaacaggcgta

SEQ ID NO: 18211 - DNA, 25 bp, Homo sapien
atcatgtaaacagtcgtactagctg

SEQ ID NO: 18212 - DNA, 25 bp, Homo sapien
gaaaaagtacagagtgaaaagcaat

SEQ ID NO: 18213 - DNA, 25 bp, Homo sapien
gagtctatgcctagaaggggtttac

SEQ ID NO: 18214 - DNA, 25 bp, Homo sapien
ggaaaggtgacaactgctcagtaga

SEQ ID NO: 18215 - DNA, 25 bp, Homo sapien
ggtcatgcaaccatccctaggaagt

SEQ ID NO: 18216 - DNA, 25 bp, Homo sapien
tcagtagaaggcagacatcatgtaa

SEQ ID NO: 18217 - DNA, 25 bp, Homo sapien
atcattttggaatcgaactgttctg

SEQ ID NO: 18218 - DNA, 25 bp, Homo sapien
tttggaatcgaactgttctgtgggt

SEQ ID NO: 18219 - DNA, 25 bp, Homo sapien
tcatattttgagagttgttggtcaa

SEQ ID NO: 18220 - DNA, 25 bp, Homo sapien
aatcattttggaatcgaactgttct

SEQ ID NO: 18221 - DNA, 25 bp, Homo sapien
taaaatttatgagggaatgtgtcag

SEQ ID NO: 18222 - DNA, 25 bp, Homo sapien
agtaaaatttatgagggaatgtgtc

SEQ ID NO: 18223 - DNA, 25 bp, Homo sapien
aatgtaagtccaaataagtaagacg

SEQ ID NO: 18224 - DNA, 25 bp, Homo sapien
cattttggaatcgaactgttctgtg

SEQ ID NO: 18225 - DNA, 25 bp, Homo sapien
atgtaagtccaaataagtaagacgt

SEQ ID NO: 18226 - DNA, 25 bp, Homo sapien
ctagtaaaatttatgagggaatgtg

SEQ ID NO: 18227 - DNA, 25 bp, Homo sapien
catattttgagagttgttggtcaac

SEQ ID NO: 18228 - DNA, 25 bp, Homo sapien
ctcctataaagcgaaatttcaatgt

SEQ ID NO: 18229 - DNA, 25 bp, Homo sapien
tgtgaataaagttaacaacatatgc

SEQ ID NO: 18230 - DNA, 25 bp, Homo sapien
tctgttttaagattgacacattttc

SEQ ID NO: 18231 - DNA, 25 bp, Homo sapien
ttcttaggcatttgaaacaagcaat

SEQ ID NO: 18232 - DNA, 25 bp, Homo sapien
aacatatctgcttcagggaaacgat

SEQ ID NO: 18233 - DNA, 25 bp, Homo sapien
tctgcttcagggaaacgatggacaa

SEQ ID NO: 18234 - DNA, 25 bp, Homo sapien
aaagttaacaacatatgctcttctg

SEQ ID NO: 18235 - DNA, 25 bp, Homo sapien
aatattaacatatctgcttcaggga

SEQ ID NO: 18236 - DNA, 25 bp, Homo sapien
agcaatgggatagtttaaaatggaa

SEQ ID NO: 18237 - DNA, 25 bp, Homo sapien
aggcatttgaaacaagcaatgggat

SEQ ID NO: 18238 - DNA, 25 bp, Homo sapien
atttgaaacaagcaatgggatagtt

SEQ ID NO: 18239 - DNA, 25 bp, Homo sapien
taggagtcttaaaacagattatgtt

SEQ ID NO: 18240 - DNA, 25 bp, Homo sapien
aggctaaagtgaagtgatccgatct

SEQ ID NO: 18241 - DNA, 25 bp, Homo sapien
gcaggatgaaaactaaatagccgat

SEQ ID NO: 18242 - DNA, 25 bp, Homo sapien
aactaaatagccgatataaatagct

SEQ ID NO: 18243 - DNA, 25 bp, Homo sapien
aatatcatagctttctaggagtctt

SEQ ID NO: 18244 - DNA, 25 bp, Homo sapien
ttacagaagcgagcaacctgtaacc

SEQ ID NO: 18245 - DNA, 25 bp, Homo sapien
aacctatgatagtattaacgaaata

SEQ ID NO: 18246 - DNA, 25 bp, Homo sapien
tgagattacagaagcgagcaacctg

SEQ ID NO: 18247 - DNA, 25 bp, Homo sapien
tcatattcctgaccaaatgttaaat

SEQ ID NO: 18248 - DNA, 25 bp, Homo sapien
caccaaggctaaagtgaagtgatcc

SEQ ID NO: 18249 - DNA, 25 bp, Homo sapien
aaagtgaagtgatccgatcttggct

SEQ ID NO: 18250 - DNA, 25 bp, Homo sapien
tatgaggaggatttgtaagatgaca

SEQ ID NO: 18251 - DNA, 25 bp, Homo sapien
gtgtgactttgaattacctagcctc

SEQ ID NO: 18252 - DNA, 25 bp, Homo sapien
agagtgtaagctctgaagccacaga

SEQ ID NO: 18253 - DNA, 25 bp, Homo sapien
atacaaagtaggtattcttctcctg

SEQ ID NO: 18254 - DNA, 25 bp, Homo sapien
taccaggctgtgctaaatattttta

SEQ ID NO: 18255 - DNA, 25 bp, Homo sapien
tctcctgatattacagataaggttt

SEQ ID NO: 18256 - DNA, 25 bp, Homo sapien
agggtggatagctttagccctcctt

SEQ ID NO: 18257 - DNA, 25 bp, Homo sapien
cagataaggtttatgaggaggattt

SEQ ID NO: 18258 - DNA, 25 bp, Homo sapien
tagtgtactccataaaagtaggaga

SEQ ID NO: 18259 - DNA, 25 bp, Homo sapien
aatcatggtgggagcccttctctac

SEQ ID NO: 18260 - DNA, 25 bp, Homo sapien
ccataaaagtaggagagtgtaagct

SEQ ID NO: 18261 - DNA, 25 bp, Homo sapien
tgtaagcaatgatggttctaacacc

SEQ ID NO: 18262 - DNA, 25 bp, Homo sapien
tcagaaggtatcaagaaccatgtcc

SEQ ID NO: 18263 - DNA, 25 bp, Homo sapien
gacatataagcaagatggattacat

SEQ ID NO: 18264 - DNA, 25 bp, Homo sapien
ggccaagcttgtgagttcccattgc

SEQ ID NO: 18265 - DNA, 25 bp, Homo sapien
aaccaggtattatgcaacagtctcc

SEQ ID NO: 18266 - DNA, 25 bp, Homo sapien
atgatggaaggagattgtaagcaat

SEQ ID NO: 18267 - DNA, 25 bp, Homo sapien
cacttggcagatataggagaataaa

SEQ ID NO: 18268 - DNA, 25 bp, Homo sapien
caggggctaatgtcaaccaggtatt

SEQ ID NO: 18269 - DNA, 25 bp, Homo sapien
attgcaatcacaggggctaatgtca

SEQ ID NO: 18270 - DNA, 25 bp, Homo sapien
aggcactgtggtctcacttggcaga

SEQ ID NO: 18271 - DNA, 25 bp, Homo sapien
tttctacaattaaagaggctgctgt

SEQ ID NO: 18272 - DNA, 25 bp, Homo sapien
aagaatacatgtttgactgcttgtc

SEQ ID NO: 18273 - DNA, 25 bp, Homo sapien
tgagacacatagttaagtgaaaaaa

SEQ ID NO: 18274 - DNA, 25 bp, Homo sapien
aaacaagatggtagatcagtgggca

SEQ ID NO: 18275 - DNA, 25 bp, Homo sapien
aaaaaacaagatggtagatcagtgg

SEQ ID NO: 18276 - DNA, 25 bp, Homo sapien
gactgcttgtctacatgttatcttc

SEQ ID NO: 18277 - DNA, 25 bp, Homo sapien
gggcagagaattctatcagtcatat

SEQ ID NO: 18278 - DNA, 25 bp, Homo sapien
ataaattaaccaggctactcaggag

SEQ ID NO: 18279 - DNA, 25 bp, Homo sapien
aggctaatgtgggagatcgcttgag

SEQ ID NO: 18280 - DNA, 25 bp, Homo sapien
cccaggctggcaaaggccaggcctg

SEQ ID NO: 18281 - DNA, 25 bp, Homo sapien
cagtgggcagagaattctatcagtc

SEQ ID NO: 18282 - DNA, 25 bp, Homo sapien
acatgttatcttcttgccacgttgc

SEQ ID NO: 18283 - DNA, 25 bp, Homo sapien
gaggcttcaggttggaaatagtact

SEQ ID NO: 18284 - DNA, 25 bp, Homo sapien
aaggtaacaggatcatagctgccca

SEQ ID NO: 18285 - DNA, 25 bp, Homo sapien
aggacgccataagtctaggacagaa

SEQ ID NO: 18286 - DNA, 25 bp, Homo sapien
tcaaagctcaaaatagaaaagatat

SEQ ID NO: 18287 - DNA, 25 bp, Homo sapien
aagaacaaactcagtcacatgcaag

SEQ ID NO: 18288 - DNA, 25 bp, Homo sapien
atactgcctgacaaagtttccttac

SEQ ID NO: 18289 - DNA, 25 bp, Homo sapien
tcagtcacatgcaagcttgtccaac

SEQ ID NO: 18290 - DNA, 25 bp, Homo sapien
tcgtaggaaaacaccacttatggaa

SEQ ID NO: 18291 - DNA, 25 bp, Homo sapien
caccatgtgctgattcgtaggaaaa

SEQ ID NO: 18292 - DNA, 25 bp, Homo sapien
cttatggaaataaatactgcctgac

SEQ ID NO: 18293 - DNA, 25 bp, Homo sapien
catagtggccactagaggacgccat

SEQ ID NO: 18294 - DNA, 25 bp, Homo sapien
gtaagatgcataggcaatggaaatc

SEQ ID NO: 18295 - DNA, 25 bp, Homo sapien
caatggaaatcaataggcaaaagga

SEQ ID NO: 18296 - DNA, 25 bp, Homo sapien
tgggctcagcggaaaatagtgattt

SEQ ID NO: 18297 - DNA, 25 bp, Homo sapien
tcttgagccacaggtaagatgcata

SEQ ID NO: 18298 - DNA, 25 bp, Homo sapien
gtaggaagaaaaccaagaggatata

SEQ ID NO: 18299 - DNA, 25 bp, Homo sapien
ttgcccaaaagcaaaccaagagaca

SEQ ID NO: 18300 - DNA, 25 bp, Homo sapien
tggcagcctcccatgctggaatgta

SEQ ID NO: 18301 - DNA, 25 bp, Homo sapien
caagagacaaagaagttgccaattg

SEQ ID NO: 18302 - DNA, 25 bp, Homo sapien
ttgccaattggtaagggctgccaaa

SEQ ID NO: 18303 - DNA, 25 bp, Homo sapien
gttgatggtgattcagaagctgtat

SEQ ID NO: 18304 - DNA, 25 bp, Homo sapien
tcttcgaagaagtaaccagctggac

SEQ ID NO: 18305 - DNA, 25 bp, Homo sapien
tgcacttggccggaagcctatctat

SEQ ID NO: 18306 - DNA, 25 bp, Homo sapien
aaacatttctagctaaaactcagga

SEQ ID NO: 18307 - DNA, 25 bp, Homo sapien
tggccggaagcctatctatttcaat

SEQ ID NO: 18308 - DNA, 25 bp, Homo sapien
ctgctgcacttggccggaagcctat

SEQ ID NO: 18309 - DNA, 25 bp, Homo sapien
tgtcaccaagagtatgaactgaatt

SEQ ID NO: 18310 - DNA, 25 bp, Homo sapien
agtatcctaaatagtccacaaaaac

SEQ ID NO: 18311 - DNA, 25 bp, Homo sapien
tgagattgtgggcatgagctgctgc

SEQ ID NO: 18312 - DNA, 25 bp, Homo sapien
actgaacgttgaacataaaacattt

SEQ ID NO: 18313 - DNA, 25 bp, Homo sapien
ctcctttaagtactgaacgttgaac

SEQ ID NO: 18314 - DNA, 25 bp, Homo sapien
caaactgtcaccaagagtatgaact

SEQ ID NO: 18315 - DNA, 25 bp, Homo sapien
cactgaacccagctagatttatttt

SEQ ID NO: 18316 - DNA, 25 bp, Homo sapien
gtggaattcttcaaggagaaggaag

SEQ ID NO: 18317 - DNA, 25 bp, Homo sapien
taagatcaacagcaaagctagttta

SEQ ID NO: 18318 - DNA, 25 bp, Homo sapien
ttatcaaacatgacgttgatcaacc

SEQ ID NO: 18319 - DNA, 25 bp, Homo sapien
atgacgttgatcaaccaaaatttac

SEQ ID NO: 18320 - DNA, 25 bp, Homo sapien
atttaagatcaacagcaaagctagt

SEQ ID NO: 18321 - DNA, 25 bp, Homo sapien
taactatatatttaagatcaacagc

SEQ ID NO: 18322 - DNA, 25 bp, Homo sapien
atatttaagatcaacagcaaagcta

SEQ ID NO: 18323 - DNA, 25 bp, Homo sapien
aaatatataaagtttggtggaattc

SEQ ID NO: 18324 - DNA, 25 bp, Homo sapien
ttggtggaattcttcaaggagaagg

SEQ ID NO: 18325 - DNA, 25 bp, Homo sapien
attgacaatcaattatacttccaga

SEQ ID NO: 18326 - DNA, 25 bp, Homo sapien
aatatgtgctcttaaagttgttttt

SEQ ID NO: 18327 - DNA, 25 bp, Homo sapien
atccagggccaattatgaggccaac

SEQ ID NO: 18328 - DNA, 25 bp, Homo sapien
agaaggttaagacacactaccgaaa

SEQ ID NO: 18329 - DNA, 25 bp, Homo sapien
ctgccaatgtactagttcctgaaga

SEQ ID NO: 18330 - DNA, 25 bp, Homo sapien
tttttcgtatggcagtgacagagag

SEQ ID NO: 18331 - DNA, 25 bp, Homo sapien
agctttctagcttcgtcacagcagc

SEQ ID NO: 18332 - DNA, 25 bp, Homo sapien
tagttcctgaagatctaggcagaga

SEQ ID NO: 18333 - DNA, 25 bp, Homo sapien
acagcagctgtcagaaggttaagac

SEQ ID NO: 18334 - DNA, 25 bp, Homo sapien
agagaggagtcttactgaaaactgc

SEQ ID NO: 18335 - DNA, 25 bp, Homo sapien
gtgacagagaggagtcttactgaaa

SEQ ID NO: 18336 - DNA, 25 bp, Homo sapien
cacctgcatatttactaagggtact

SEQ ID NO: 18337 - DNA, 25 bp, Homo sapien
tgaggccaacttttcccactacaaa

SEQ ID NO: 18338 - DNA, 25 bp, Homo sapien
aagcagtccctattggagccagcct

SEQ ID NO: 18339 - DNA, 25 bp, Homo sapien
gtacaagcattgtcgtctgcaaaac

SEQ ID NO: 18340 - DNA, 25 bp, Homo sapien
tgtgtaaacaggtctaagcagtccc

SEQ ID NO: 18341 - DNA, 25 bp, Homo sapien
tagccaaaagtgtaactgtgtaaac

SEQ ID NO: 18342 - DNA, 25 bp, Homo sapien
tcaccagcactaagaggccacgcag

SEQ ID NO: 18343 - DNA, 25 bp, Homo sapien
tgtgtccatcatggtagcaagtccc

SEQ ID NO: 18344 - DNA, 25 bp, Homo sapien
tagactccaaagatatgccagggtg

SEQ ID NO: 18345 - DNA, 25 bp, Homo sapien
gggtgtagagaccaccatctcattt

SEQ ID NO: 18346 - DNA, 25 bp, Homo sapien
tttgcacagacctgctcaccaagga

SEQ ID NO: 18347 - DNA, 25 bp, Homo sapien
agaaactggcgctctcagctccctt

SEQ ID NO: 18348 - DNA, 25 bp, Homo sapien
gctcaccaaggaacatgtgtccatc

SEQ ID NO: 18349 - DNA, 25 bp, Homo sapien
cgccagtaaatgacaacaggaatat

SEQ ID NO: 18350 - DNA, 25 bp, Homo sapien
tcccgcctaggcctctctcaaagtg

SEQ ID NO: 18351 - DNA, 25 bp, Homo sapien
ccaaaggattttcccagttatgaat

SEQ ID NO: 18352 - DNA, 25 bp, Homo sapien
gttatgaattgtctactacgccagt

SEQ ID NO: 18353 - DNA, 25 bp, Homo sapien
actacgccagtaaatgacaacagga

SEQ ID NO: 18354 - DNA, 25 bp, Homo sapien
aaatgacaacaggaatatgaggcca

SEQ ID NO: 18355 - DNA, 25 bp, Homo sapien
cagttaaacacaattttggaacctc

SEQ ID NO: 18356 - DNA, 25 bp, Homo sapien
tgattttatggcacaaaggtttttg

SEQ ID NO: 18357 - DNA, 25 bp, Homo sapien
ttggaacctctgattctataaaacc

SEQ ID NO: 18358 - DNA, 25 bp, Homo sapien
cttctatagaatcagttaaacacaa

SEQ ID NO: 18359 - DNA, 25 bp, Homo sapien
acacctggcctaaatagtgatttta

SEQ ID NO: 18360 - DNA, 25 bp, Homo sapien
atttaaagatgcctgatgacagtgt

SEQ ID NO: 18361 - DNA, 25 bp, Homo sapien
ggtaactgagtcacagaaaccaagc

SEQ ID NO: 18362 - DNA, 25 bp, Homo sapien
agaggtaactgagtcacagaaacca

SEQ ID NO: 18363 - DNA, 25 bp, Homo sapien
accaagcttaaccactggagtgtac

SEQ ID NO: 18364 - DNA, 25 bp, Homo sapien
ttttcaaaagaggtaactgagtcac

SEQ ID NO: 18365 - DNA, 25 bp, Homo sapien
gaataaacatggaactagctgccct

SEQ ID NO: 18366 - DNA, 25 bp, Homo sapien
accactggagtgtactgctatttaa

SEQ ID NO: 18367 - DNA, 25 bp, Homo sapien
ctgagtcacagaaaccaagcttaac

SEQ ID NO: 18368 - DNA, 25 bp, Homo sapien
aacccagaataaacatggaactagc

SEQ ID NO: 18369 - DNA, 25 bp, Homo sapien
agtgtactgctatttaaagatgcct

SEQ ID NO: 18370 - DNA, 25 bp, Homo sapien
tcaaaagaggtaactgagtcacaga

SEQ ID NO: 18371 - DNA, 25 bp, Homo sapien
aatgatgtaattgtgagtcgttatt

SEQ ID NO: 18372 - DNA, 25 bp, Homo sapien
tggctccagtgactttttctaatca

SEQ ID NO: 18373 - DNA, 25 bp, Homo sapien
tgtcttaatgttagcagtcaatgat

SEQ ID NO: 18374 - DNA, 25 bp, Homo sapien
tctaatcatctgtctatgagaggaa

SEQ ID NO: 18375 - DNA, 25 bp, Homo sapien
aatgttagcagtcaatgatgtaatt

SEQ ID NO: 18376 - DNA, 25 bp, Homo sapien
cttaatgttagcagtcaatgatgta

SEQ ID NO: 18377 - DNA, 25 bp, Homo sapien
ctcctgagtagataaaaatacagat

SEQ ID NO: 18378 - DNA, 25 bp, Homo sapien
gcagtcaatgatgtaattgtgagtc

SEQ ID NO: 18379 - DNA, 25 bp, Homo sapien
ttgtgagtcgttattattttcttcc

SEQ ID NO: 18380 - DNA, 25 bp, Homo sapien
atgtgtcttaatgttagcagtcaat

SEQ ID NO: 18381 - DNA, 25 bp, Homo sapien
taatcatctgtctatgagaggaaat

SEQ ID NO: 18382 - DNA, 25 bp, Homo sapien
caaaaagaggcccaatacctattag

SEQ ID NO: 18383 - DNA, 25 bp, Homo sapien
ttgatgatgaagctttttagttttg

SEQ ID NO: 18384 - DNA, 25 bp, Homo sapien
ttttcatcactcctccaaaaagagg

SEQ ID NO: 18385 - DNA, 25 bp, Homo sapien
agaggcccaatacctattagcagcc

SEQ ID NO: 18386 - DNA, 25 bp, Homo sapien
tatatagttcaatgggttttagtac

SEQ ID NO: 18387 - DNA, 25 bp, Homo sapien
actctgtgaacatacaaagtgtgca

SEQ ID NO: 18388 - DNA, 25 bp, Homo sapien
gctggactctggaaaccacaaatct

SEQ ID NO: 18389 - DNA, 25 bp, Homo sapien
cacttcaagctggactctggaaacc

SEQ ID NO: 18390 - DNA, 25 bp, Homo sapien
actttctgcttacatggatttggct

SEQ ID NO: 18391 - DNA, 25 bp, Homo sapien
tgaacatacaaagtgtgcaaacatc

SEQ ID NO: 18392 - DNA, 25 bp, Homo sapien
caatgggttttagtactctgtgaac

SEQ ID NO: 18393 - DNA, 25 bp, Homo sapien
attgtttggcaaagatgatgtcatt

SEQ ID NO: 18394 - DNA, 25 bp, Homo sapien
tcactgcacattgtttggcaaagat

SEQ ID NO: 18395 - DNA, 25 bp, Homo sapien
ttcaagagtcctttgagtgtgaatc

SEQ ID NO: 18396 - DNA, 25 bp, Homo sapien
tttcacatagatagctggaagattc

SEQ ID NO: 18397 - DNA, 25 bp, Homo sapien
tttgccagactaaacaacaaagttc

SEQ ID NO: 18398 - DNA, 25 bp, Homo sapien
gagtgtgaatcatgccttgatcgac

SEQ ID NO: 18399 - DNA, 25 bp, Homo sapien
agattcagggagcatggttttcatt

SEQ ID NO: 18400 - DNA, 25 bp, Homo sapien
tactgagtctccgaacgatggtgca

SEQ ID NO: 18401 - DNA, 25 bp, Homo sapien
gtctccgaacgatggtgcacctaat

SEQ ID NO: 18402 - DNA, 25 bp, Homo sapien
accaaccacctatgaaattaagagc

SEQ ID NO: 18403 - DNA, 25 bp, Homo sapien
aaacatgccataaggaaggtggtct

SEQ ID NO: 18404 - DNA, 25 bp, Homo sapien
tcagtcctttttgggtgtagtgctc

SEQ ID NO: 18405 - DNA, 25 bp, Homo sapien
tttgggtgtagtgctctcaattctt

SEQ ID NO: 18406 - DNA, 25 bp, Homo sapien
gtgctctcaattcttggttgatgcc

SEQ ID NO: 18407 - DNA, 25 bp, Homo sapien
cccgacaggagccatttggacgttc

SEQ ID NO: 18408 - DNA, 25 bp, Homo sapien
acctccagaaaacaacaggcttcag

SEQ ID NO: 18409 - DNA, 25 bp, Homo sapien
gagccatttggacgttcacagatct

SEQ ID NO: 18410 - DNA, 25 bp, Homo sapien
caataaaaatccctgtgagaaaaat

SEQ ID NO: 18411 - DNA, 25 bp, Homo sapien
gacaggagccatttggacgttcaca

SEQ ID NO: 18412 - DNA, 25 bp, Homo sapien
aacatctcccaacatggatttctgt

SEQ ID NO: 18413 - DNA, 25 bp, Homo sapien
tccagaaaacaacaggcttcagtcc

SEQ ID NO: 18414 - DNA, 25 bp, Homo sapien
ttggacgttcacagatctccttgaa

SEQ ID NO: 18415 - DNA, 25 bp, Homo sapien
gattcagaaaggatatctgtctaga

SEQ ID NO: 18416 - DNA, 25 bp, Homo sapien
acatacaactatgacttgtaagtcc

SEQ ID NO: 18417 - DNA, 25 bp, Homo sapien
gtctagagaaaaatctcattcagtg

SEQ ID NO: 18418 - DNA, 25 bp, Homo sapien
ttagggtaagaagcatgtaaccatt

SEQ ID NO: 18419 - DNA, 25 bp, Homo sapien
actatgacttgtaagtccagagttt

SEQ ID NO: 18420 - DNA, 25 bp, Homo sapien
gaagcatgtaaccattgtacccaat

SEQ ID NO: 18421 - DNA, 25 bp, Homo sapien
ggatatctgtctagagaaaaatctc

SEQ ID NO: 18422 - DNA, 25 bp, Homo sapien
cttgtaagtccagagttttagggta

SEQ ID NO: 18423 - DNA, 25 bp, Homo sapien
ttcagtgaatttaatacttacatac

SEQ ID NO: 18424 - DNA, 25 bp, Homo sapien
agaaaggatatctgtctagagaaaa

SEQ ID NO: 18425 - DNA, 25 bp, Homo sapien
ttttagggtaagaagcatgtaacca

SEQ ID NO: 18426 - DNA, 25 bp, Homo sapien
atctttgattagtcagctatcactt

SEQ ID NO: 18427 - DNA, 25 bp, Homo sapien
gtagtaggtagttcataaagtcata

SEQ ID NO: 18428 - DNA, 25 bp, Homo sapien
gcaggctgcgtagttaggcaattca

SEQ ID NO: 18429 - DNA, 25 bp, Homo sapien
gctggactataagttgtgctttttc

SEQ ID NO: 18430 - DNA, 25 bp, Homo sapien
taatcaaatacatgctagaagagaa

SEQ ID NO: 18431 - DNA, 25 bp, Homo sapien
cctgtgttaagccatgcatgtagta

SEQ ID NO: 18432 - DNA, 25 bp, Homo sapien
aagccatgcatgtagtaggtagttc

SEQ ID NO: 18433 - DNA, 25 bp, Homo sapien
ttacttaattggtttcagcaggccc

SEQ ID NO: 18434 - DNA, 25 bp, Homo sapien
caaatacatgctagaagagaagaag

SEQ ID NO: 18435 - DNA, 25 bp, Homo sapien
aagtctgtctctatagctggactat

SEQ ID NO: 18436 - DNA, 25 bp, Homo sapien
gcgtagttaggcaattcattatcac

SEQ ID NO: 18437 - DNA, 25 bp, Homo sapien
tgaaagggcaaaggccctctgtctc

SEQ ID NO: 18438 - DNA, 25 bp, Homo sapien
ttcgcaactcttagtggcaccatgt

SEQ ID NO: 18439 - DNA, 25 bp, Homo sapien
tgaaatagtgtgagttgaaccatcc

SEQ ID NO: 18440 - DNA, 25 bp, Homo sapien
catgtctctccggtgaaagggcaaa

SEQ ID NO: 18441 - DNA, 25 bp, Homo sapien
cattccttgtgaggggaaatggccc

SEQ ID NO: 18442 - DNA, 25 bp, Homo sapien
ggtaaaggcacgatgctttgcaaat

SEQ ID NO: 18443 - DNA, 25 bp, Homo sapien
atcacctctgacttgggtcaagcaa

SEQ ID NO: 18444 - DNA, 25 bp, Homo sapien
aataccctaaagcttgactgcaaga

SEQ ID NO: 18445 - DNA, 25 bp, Homo sapien
cctgagttagaggaaaaactgtccc

SEQ ID NO: 18446 - DNA, 25 bp, Homo sapien
taggcaagtaatattagagacaggt

SEQ ID NO: 18447 - DNA, 25 bp, Homo sapien
tacttggaaggcttgaaatagtgtg

SEQ ID NO: 18448 - DNA, 25 bp, Homo sapien
aaaacagtaatagattaatttgcgc

SEQ ID NO: 18449 - DNA, 25 bp, Homo sapien
gaattttatgcaaatggaataacat

SEQ ID NO: 18450 - DNA, 25 bp, Homo sapien
gagattcacacgtattgtatgtatc

SEQ ID NO: 18451 - DNA, 25 bp, Homo sapien
ttatcttgagattcacacgtattgt

SEQ ID NO: 18452 - DNA, 25 bp, Homo sapien
ttgtgtgcattctttcagcataatt

SEQ ID NO: 18453 - DNA, 25 bp, Homo sapien
atcaccatttattaacagcattgct

SEQ ID NO: 18454 - DNA, 25 bp, Homo sapien
tttgcgcattctagaattttatgca

SEQ ID NO: 18455 - DNA, 25 bp, Homo sapien
ggattaatatcctgcatcaccattt

SEQ ID NO: 18456 - DNA, 25 bp, Homo sapien
ttaggatgtagcagaactggattaa

SEQ ID NO: 18457 - DNA, 25 bp, Homo sapien
cagtaatagattaatttgcgcattc

SEQ ID NO: 18458 - DNA, 25 bp, Homo sapien
atgtagcagaactggattaatatcc

SEQ ID NO: 18459 - DNA, 25 bp, Homo sapien
ggatgagggccaataacattgatag

SEQ ID NO: 18460 - DNA, 25 bp, Homo sapien
ggaaccctggcacaaacatcaaact

SEQ ID NO: 18461 - DNA, 25 bp, Homo sapien
attagtggcctcatagagctgggaa

SEQ ID NO: 18462 - DNA, 25 bp, Homo sapien
tcgtagattacaagcagaggtgaac

SEQ ID NO: 18463 - DNA, 25 bp, Homo sapien
ttcagtgtgctgaggaaacaaagat

SEQ ID NO: 18464 - DNA, 25 bp, Homo sapien
gcagaagaaagagtggatactctct

SEQ ID NO: 18465 - DNA, 25 bp, Homo sapien
gctcaccagaaagcctgaaaagcag

SEQ ID NO: 18466 - DNA, 25 bp, Homo sapien
aagcagccctgaatctgtctggcag

SEQ ID NO: 18467 - DNA, 25 bp, Homo sapien
cagaggtgaaccaaagataaattta

SEQ ID NO: 18468 - DNA, 25 bp, Homo sapien
ggagggtgtatacagaaaactgaat

SEQ ID NO: 18469 - DNA, 25 bp, Homo sapien
tcagctttagaaggtcgtagattac

SEQ ID NO: 18470 - DNA, 25 bp, Homo sapien
gagtacaggattgtgcacgatgcct

SEQ ID NO: 18471 - DNA, 25 bp, Homo sapien
taccagcactatctactgagcactt

SEQ ID NO: 18472 - DNA, 25 bp, Homo sapien
ctcactccaaaccagcttgctatat

SEQ ID NO: 18473 - DNA, 25 bp, Homo sapien
ccgggagtacaggattgtgcacgat

SEQ ID NO: 18474 - DNA, 25 bp, Homo sapien
taaatgctttatacctagtacctaa

SEQ ID NO: 18475 - DNA, 25 bp, Homo sapien
tgtgcctgacacagtttaaatgctt

SEQ ID NO: 18476 - DNA, 25 bp, Homo sapien
gattgtgcacgatgcctgatgccca

SEQ ID NO: 18477 - DNA, 25 bp, Homo sapien
attagaggcgtgagctactatagcc

SEQ ID NO: 18478 - DNA, 25 bp, Homo sapien
tatagccagcctaccagcactatct

SEQ ID NO: 18479 - DNA, 25 bp, Homo sapien
gcacgatgcctgatgcccagctaat

SEQ ID NO: 18480 - DNA, 25 bp, Homo sapien
gcgtgagctactatagccagcctac

SEQ ID NO: 18481 - DNA, 25 bp, Homo sapien
tggcaatcctcagaacccagacagg

SEQ ID NO: 18482 - DNA, 25 bp, Homo sapien
aattctggggtttgtgttgtcatct

SEQ ID NO: 18483 - DNA, 25 bp, Homo sapien
ttatctaacaacaagcaaagcgacc

SEQ ID NO: 18484 - DNA, 25 bp, Homo sapien
aaaatcctgagacattagatgccac

SEQ ID NO: 18485 - DNA, 25 bp, Homo sapien
atcaagtaaatagagtcagtacatc

SEQ ID NO: 18486 - DNA, 25 bp, Homo sapien
gataaaagaagtaaagttgcaacca

SEQ ID NO: 18487 - DNA, 25 bp, Homo sapien
catcatggacagtgaaaacattaac

SEQ ID NO: 18488 - DNA, 25 bp, Homo sapien
ccatcagtgcatgctgaagggcgaa

SEQ ID NO: 18489 - DNA, 25 bp, Homo sapien
tcaaagaggctatattacatccaat

SEQ ID NO: 18490 - DNA, 25 bp, Homo sapien
cgaagggctggtaccgagaattatc

SEQ ID NO: 18491 - DNA, 25 bp, Homo sapien
gataagtgaagtgaatcctcaacat

SEQ ID NO: 18492 - DNA, 25 bp, Homo sapien
tctggagtcataccacctgggtttg

SEQ ID NO: 18493 - DNA, 25 bp, Homo sapien
cactgatgggtggtaccacagaaat

SEQ ID NO: 18494 - DNA, 25 bp, Homo sapien
acttaaccacttacatagatgccta

SEQ ID NO: 18495 - DNA, 25 bp, Homo sapien
ttacatagatgcctacatgcacatg

SEQ ID NO: 18496 - DNA, 25 bp, Homo sapien
ctacatgcacatggaaagttactgt

SEQ ID NO: 18497 - DNA, 25 bp, Homo sapien
tgatgggtggtaccacagaaatcac

SEQ ID NO: 18498 - DNA, 25 bp, Homo sapien
ctctgcaggcaccctgaagtgacta

SEQ ID NO: 18499 - DNA, 25 bp, Homo sapien
tgggtttgaattctcacttaaccac

SEQ ID NO: 18500 - DNA, 25 bp, Homo sapien
tttgcatttagaacaactggtgatt

SEQ ID NO: 18501 - DNA, 25 bp, Homo sapien
cctgaagtgactatcccaattactc

SEQ ID NO: 18502 - DNA, 25 bp, Homo sapien
aaccatggtccatcaggtccactga

SEQ ID NO: 18503 - DNA, 25 bp, Homo sapien
taaagtgatggagagagccaaaaaa

SEQ ID NO: 18504 - DNA, 25 bp, Homo sapien
gctgacagttttaatggagacctaa

SEQ ID NO: 18505 - DNA, 25 bp, Homo sapien
ttaatggagacctaaagtgatggag

SEQ ID NO: 18506 - DNA, 25 bp, Homo sapien
aagaccctgagagcagaactcattt

SEQ ID NO: 18507 - DNA, 25 bp, Homo sapien
gtaagcccaatgagggcatgatcta

SEQ ID NO: 18508 - DNA, 25 bp, Homo sapien
ataagagactagagagttaccaaac

SEQ ID NO: 18509 - DNA, 25 bp, Homo sapien
ttcaacagcatgtaagcccaatgag

SEQ ID NO: 18510 - DNA, 25 bp, Homo sapien
cggggaaggattggtatttgaatta

SEQ ID NO: 18511 - DNA, 25 bp, Homo sapien
ggcaagtatgaagaccctgagagca

SEQ ID NO: 18512 - DNA, 25 bp, Homo sapien
ccagcttggctagaatagacaaaat

SEQ ID NO: 18513 - DNA, 25 bp, Homo sapien
gtataactgagaaacagccaggcat

SEQ ID NO: 18514 - DNA, 25 bp, Homo sapien
accaagcttaggtgtagaaaataca

SEQ ID NO: 18515 - DNA, 25 bp, Homo sapien
tgagtcaatgagatacagttcgttc

SEQ ID NO: 18516 - DNA, 25 bp, Homo sapien
gagaggatggttctaggatacaaat

SEQ ID NO: 18517 - DNA, 25 bp, Homo sapien
attttagagtgctgggttacaccca

SEQ ID NO: 18518 - DNA, 25 bp, Homo sapien
gacagaaaggcagatgcaatgtttt

SEQ ID NO: 18519 - DNA, 25 bp, Homo sapien
tagaaaatacaacggtgtggaactc

SEQ ID NO: 18520 - DNA, 25 bp, Homo sapien
taagctgtgaaatgcgtaattatgc

SEQ ID NO: 18521 - DNA, 25 bp, Homo sapien
aggcaaagagtgtgggtaatctctt

SEQ ID NO: 18522 - DNA, 25 bp, Homo sapien
tttcaaatcacaaagcgaagccttc

SEQ ID NO: 18523 - DNA, 25 bp, Homo sapien
tcttacatggacagaacatcattct

SEQ ID NO: 18524 - DNA, 25 bp, Homo sapien
ctgcatcacgtgtaatggctgaatt

SEQ ID NO: 18525 - DNA, 25 bp, Homo sapien
ccgacgagactcgttcgagtccgtg

SEQ ID NO: 18526 - DNA, 25 bp, Homo sapien
cacggactcgaacgagtctcgtcgg

SEQ ID NO: 18527 - DNA, 25 bp, Homo sapien
tcaactggtacagccaaagcaaatg

SEQ ID NO: 18528 - DNA, 25 bp, Homo sapien
ttgtagtggtgatcctaatcagtgc

SEQ ID NO: 18529 - DNA, 25 bp, Homo sapien
tggtagaagagtgaacgcttttccc

SEQ ID NO: 18530 - DNA, 25 bp, Homo sapien
ttaaatgactcaactggtacagcca

SEQ ID NO: 18531 - DNA, 25 bp, Homo sapien
gaggcagggatgttcgctttcattt

SEQ ID NO: 18532 - DNA, 25 bp, Homo sapien
atagacgaacagtcctcatgaacac

SEQ ID NO: 18533 - DNA, 25 bp, Homo sapien
ttaaactggtaaggtgcatctggaa

SEQ ID NO: 18534 - DNA, 25 bp, Homo sapien
aaactgccactatttgtagacgatg

SEQ ID NO: 18535 - DNA, 25 bp, Homo sapien
cagaaaaagagaattatagacgaac

SEQ ID NO: 18536 - DNA, 25 bp, Homo sapien
ccagtaatgtatggttgggccaaca

SEQ ID NO: 18537 - DNA, 25 bp, Homo sapien
tatttaatggtagaagagtgaacgc

SEQ ID NO: 18538 - DNA, 25 bp, Homo sapien
gtgaaggtgtttaggataagccact

SEQ ID NO: 18539 - DNA, 25 bp, Homo sapien
ccaaaactggacataagagggtaga

SEQ ID NO: 18540 - DNA, 25 bp, Homo sapien
aaagcatttgagttcctgagatccc

SEQ ID NO: 18541 - DNA, 25 bp, Homo sapien
aagcaggacttttgaatagacctca

SEQ ID NO: 18542 - DNA, 25 bp, Homo sapien
agtaggcaccacaccaacagtcatt

SEQ ID NO: 18543 - DNA, 25 bp, Homo sapien
ttgtcacaaacgtattatagctccc

SEQ ID NO: 18544 - DNA, 25 bp, Homo sapien
aaatcagacaatgagaagtaggcac

SEQ ID NO: 18545 - DNA, 25 bp, Homo sapien
catcagagacaatgagaaatcagac

SEQ ID NO: 18546 - DNA, 25 bp, Homo sapien
cctccttggaggaaatagactgtga

SEQ ID NO: 18547 - DNA, 25 bp, Homo sapien
aatcaaccagggaagaatgactttt

SEQ ID NO: 18548 - DNA, 25 bp, Homo sapien
tagactgtgagttcagtgcgaggta

SEQ ID NO: 18549 - DNA, 25 bp, Homo sapien
gatggaagtaaagcacattggcact

SEQ ID NO: 18550 - DNA, 25 bp, Homo sapien
acgtagagttatgtagaatgtgcac

SEQ ID NO: 18551 - DNA, 25 bp, Homo sapien
actgtttcaaagtggactggtgtcc

SEQ ID NO: 18552 - DNA, 25 bp, Homo sapien
atctctggcaatgatggagaaggtc

SEQ ID NO: 18553 - DNA, 25 bp, Homo sapien
gcctacagggttgctacgtagagtt

SEQ ID NO: 18554 - DNA, 25 bp, Homo sapien
caggtattaaaatatggttggttcc

SEQ ID NO: 18555 - DNA, 25 bp, Homo sapien
agatgggtcagaaaagacttgaact

SEQ ID NO: 18556 - DNA, 25 bp, Homo sapien
aggatgagcacatctaacatgtcca

SEQ ID NO: 18557 - DNA, 25 bp, Homo sapien
gtgcactgaataagagtatcacatc

SEQ ID NO: 18558 - DNA, 25 bp, Homo sapien
ctctgtggcagaaatatgagagatg

SEQ ID NO: 18559 - DNA, 25 bp, Homo sapien
tattgcagacacagtccattggtat

SEQ ID NO: 18560 - DNA, 25 bp, Homo sapien
caaatgtctctaaatgagaagaatc

SEQ ID NO: 18561 - DNA, 25 bp, Homo sapien
cttagatagtgtatagttggcaaaa

SEQ ID NO: 18562 - DNA, 25 bp, Homo sapien
ggcaaagacagcgtatctctgatat

SEQ ID NO: 18563 - DNA, 25 bp, Homo sapien
tttgagaaaagagcacatagtgttg

SEQ ID NO: 18564 - DNA, 25 bp, Homo sapien
attgtatgcgaatcccaaatgtctc

SEQ ID NO: 18565 - DNA, 25 bp, Homo sapien
tgtaaatggcaaagacagcgtatct

SEQ ID NO: 18566 - DNA, 25 bp, Homo sapien
cttgtaccaattgtatgcgaatccc

SEQ ID NO: 18567 - DNA, 25 bp, Homo sapien
aaaagagcacatagtgttgcctagg

SEQ ID NO: 18568 - DNA, 25 bp, Homo sapien
cctcagaatgccgagtagctgagac

SEQ ID NO: 18569 - DNA, 25 bp, Homo sapien
ttggcaaaataacagtgacacctat

SEQ ID NO: 18570 - DNA, 25 bp, Homo sapien
gatatacttttaactgaacctgctc

SEQ ID NO: 18571 - DNA, 25 bp, Homo sapien
acttacatctggaagtttttggtac

SEQ ID NO: 18572 - DNA, 25 bp, Homo sapien
actcctagagtgttcaaatgtataa

SEQ ID NO: 18573 - DNA, 25 bp, Homo sapien
caaatacaagtaacagttatagtac

SEQ ID NO: 18574 - DNA, 25 bp, Homo sapien
acctgctagaaatgggaatcattct

SEQ ID NO: 18575 - DNA, 25 bp, Homo sapien
ggtactgagtgggaagatatcttct

SEQ ID NO: 18576 - DNA, 25 bp, Homo sapien
aatcagagtattaggcatttgtcat

SEQ ID NO: 18577 - DNA, 25 bp, Homo sapien
tttttggtactgagtgggaagatat

SEQ ID NO: 18578 - DNA, 25 bp, Homo sapien
tcatcatataatcagagtattaggc

SEQ ID NO: 18579 - DNA, 25 bp, Homo sapien
ggtacctgctagaaatgggaatcat

SEQ ID NO: 18580 - DNA, 25 bp, Homo sapien
aaacagttgtatctcattatttgag

SEQ ID NO: 18581 - DNA, 25 bp, Homo sapien
aaaatgacaactcctagagtgttca

SEQ ID NO: 18582 - DNA, 25 bp, Homo sapien
aaatagaagggttgttatgaggatt

SEQ ID NO: 18583 - DNA, 25 bp, Homo sapien
tataggcaatgtaaacgcaagagag

SEQ ID NO: 18584 - DNA, 25 bp, Homo sapien
gtaagtgggacattcagcaagttat

SEQ ID NO: 18585 - DNA, 25 bp, Homo sapien
tcagaaactaggtgtttagctttcc

SEQ ID NO: 18586 - DNA, 25 bp, Homo sapien
tagtacagcatagtagttaagaatg

SEQ ID NO: 18587 - DNA, 25 bp, Homo sapien
ccacctatatgaacagagcagaatt

SEQ ID NO: 18588 - DNA, 25 bp, Homo sapien
ttaagaatgcaaacaggagatacac

SEQ ID NO: 18589 - DNA, 25 bp, Homo sapien
aatgtaaacgcaagagaggatagca

SEQ ID NO: 18590 - DNA, 25 bp, Homo sapien
acatgctaggcaatgctataggcaa

SEQ ID NO: 18591 - DNA, 25 bp, Homo sapien
agttccaatacctctagcacatagt

SEQ ID NO: 18592 - DNA, 25 bp, Homo sapien
gcctggccttaaatctgggatcctt

SEQ ID NO: 18593 - DNA, 25 bp, Homo sapien
gcagaggctgtggtttggcttccca

SEQ ID NO: 18594 - DNA, 25 bp, Homo sapien
aatagggaacctggcaatcattaac

SEQ ID NO: 18595 - DNA, 25 bp, Homo sapien
cccaggctggttgctacaaagatgt

SEQ ID NO: 18596 - DNA, 25 bp, Homo sapien
acaaagatgtgggtcagaactctat

SEQ ID NO: 18597 - DNA, 25 bp, Homo sapien
ggctgaggtataggaaagttttgta

SEQ ID NO: 18598 - DNA, 25 bp, Homo sapien
tataacaagaaagtcagctgtcatc

SEQ ID NO: 18599 - DNA, 25 bp, Homo sapien
tctgccttaaggttgtatggggaag

SEQ ID NO: 18600 - DNA, 25 bp, Homo sapien
gggaagctgaagatggactaaataa

SEQ ID NO: 18601 - DNA, 25 bp, Homo sapien
gaagaacagtagtgagatgaacatt

SEQ ID NO: 18602 - DNA, 25 bp, Homo sapien
taaggggaaatggagcatcttatgt

SEQ ID NO: 18603 - DNA, 25 bp, Homo sapien
aaatcctgttcatttggggctggtt

SEQ ID NO: 18604 - DNA, 25 bp, Homo sapien
atagcaggcaattatccaacatagc

SEQ ID NO: 18605 - DNA, 25 bp, Homo sapien
tttctaagctagtggcctgtctttc

SEQ ID NO: 18606 - DNA, 25 bp, Homo sapien
agttgggacaaactggcacccagtt

SEQ ID NO: 18607 - DNA, 25 bp, Homo sapien
ctattctttaaagccgcagtggggt

SEQ ID NO: 18608 - DNA, 25 bp, Homo sapien
taatctcagggaatatatgcagcat

SEQ ID NO: 18609 - DNA, 25 bp, Homo sapien
tgtctttctggtgaagcaaagctat

SEQ ID NO: 18610 - DNA, 25 bp, Homo sapien
gtttggtacagatcctataacacaa

SEQ ID NO: 18611 - DNA, 25 bp, Homo sapien
tagcacagaattagttgggacaaac

SEQ ID NO: 18612 - DNA, 25 bp, Homo sapien
aatgatgaggcaagaaggtctgtgt

SEQ ID NO: 18613 - DNA, 25 bp, Homo sapien
caactcttggggtgatcaagtgcat

SEQ ID NO: 18614 - DNA, 25 bp, Homo sapien
atcaagtgcatgtagaggttctagc

SEQ ID NO: 18615 - DNA, 25 bp, Homo sapien
actgtcttaaaatgctgtgggaaac

SEQ ID NO: 18616 - DNA, 25 bp, Homo sapien
tctggggcccgttcctcagaaccag

SEQ ID NO: 18617 - DNA, 25 bp, Homo sapien
tcagcagcaagggtcacaaattcaa

SEQ ID NO: 18618 - DNA, 25 bp, Homo sapien
caggagacataaaatggcccaagct

SEQ ID NO: 18619 - DNA, 25 bp, Homo sapien
agctcatccagcatgtggcttccca

SEQ ID NO: 18620 - DNA, 25 bp, Homo sapien
aggggctggcatattttgtggctta

SEQ ID NO: 18621 - DNA, 25 bp, Homo sapien
tctgggctctccaccgagaaagttc

SEQ ID NO: 18622 - DNA, 25 bp, Homo sapien
tggcttcccagctaccaagggtgtt

SEQ ID NO: 18623 - DNA, 25 bp, Homo sapien
tctcttggggaggatctcagcagca

SEQ ID NO: 18624 - DNA, 25 bp, Homo sapien
attttgtggcttagcacaagggccc

SEQ ID NO: 18625 - DNA, 25 bp, Homo sapien
agcctctctaaggaaaagaggacac

SEQ ID NO: 18626 - DNA, 25 bp, Homo sapien
ttccagtgtcataattctgattacc

SEQ ID NO: 18627 - DNA, 25 bp, Homo sapien
agtttccatttgagatcatagaata

SEQ ID NO: 18628 - DNA, 25 bp, Homo sapien
tgcttacatgtaactagtcattatg

SEQ ID NO: 18629 - DNA, 25 bp, Homo sapien
ctgattacctcaacacatttgccaa

SEQ ID NO: 18630 - DNA, 25 bp, Homo sapien
tgcaaagtgaaagcaatacaggttt

SEQ ID NO: 18631 - DNA, 25 bp, Homo sapien
ttttgtcacaaaggccaagtttgtc

SEQ ID NO: 18632 - DNA, 25 bp, Homo sapien
catttgccaaacatcaaacgtgatg

SEQ ID NO: 18633 - DNA, 25 bp, Homo sapien
taccttggtacaaatagtatctgtg

SEQ ID NO: 18634 - DNA, 25 bp, Homo sapien
tttgctgcaattttccagtgctttt

SEQ ID NO: 18635 - DNA, 25 bp, Homo sapien
tttctgagctagtattatttccctt

SEQ ID NO: 18636 - DNA, 25 bp, Homo sapien
aaacgtgatgtttcaaaactgcaca

SEQ ID NO: 18637 - DNA, 25 bp, Homo sapien
ttaagagcaacgttttgccggcagg

SEQ ID NO: 18638 - DNA, 25 bp, Homo sapien
atttatatattctgaataccagccc

SEQ ID NO: 18639 - DNA, 25 bp, Homo sapien
atttccctagtgacttatgacgttg

SEQ ID NO: 18640 - DNA, 25 bp, Homo sapien
ctagtgacttatgacgttgaacgtc

SEQ ID NO: 18641 - DNA, 25 bp, Homo sapien
aaggctttgcccacttttgattgag

SEQ ID NO: 18642 - DNA, 25 bp, Homo sapien
cagaggcctgacagcaatcattgta

SEQ ID NO: 18643 - DNA, 25 bp, Homo sapien
aagttaagagcaacgttttgccggc

SEQ ID NO: 18644 - DNA, 25 bp, Homo sapien
gaagtgtctattcaaaggctttgcc

SEQ ID NO: 18645 - DNA, 25 bp, Homo sapien
tgaagttaagagcaacgttttgccg

SEQ ID NO: 18646 - DNA, 25 bp, Homo sapien
tccctagtgacttatgacgttgaac

SEQ ID NO: 18647 - DNA, 25 bp, Homo sapien
tggagaagtgtctattcaaaggctt

SEQ ID NO: 18648 - DNA, 25 bp, Homo sapien
gcaaagcagtctgtgaagttaataa

SEQ ID NO: 18649 - DNA, 25 bp, Homo sapien
agtaaaatagattgggagtgtagat

SEQ ID NO: 18650 - DNA, 25 bp, Homo sapien
tagatgcaagctcactcagtaagaa

SEQ ID NO: 18651 - DNA, 25 bp, Homo sapien
ctcagtaagaacgtttctgtgtccc

SEQ ID NO: 18652 - DNA, 25 bp, Homo sapien
acacgatcacttagagcaggctttt

SEQ ID NO: 18653 - DNA, 25 bp, Homo sapien
agctaataacctatactgggcacta

SEQ ID NO: 18654 - DNA, 25 bp, Homo sapien
tctttccaggccattagctaataac

SEQ ID NO: 18655 - DNA, 25 bp, Homo sapien
tgtgaaaaagattagaaaagcatat

SEQ ID NO: 18656 - DNA, 25 bp, Homo sapien
aatgaacatagaggtgaaaatgaac

SEQ ID NO: 18657 - DNA, 25 bp, Homo sapien
tgaaaatgaacaggagggatgacta

SEQ ID NO: 18658 - DNA, 25 bp, Homo sapien
ccttttcctaagatagagagctttc

SEQ ID NO: 18659 - DNA, 25 bp, Homo sapien
tacacttagtagaatggatatttgc

SEQ ID NO: 18660 - DNA, 25 bp, Homo sapien
ttcaaaagaccagactgccagtcaa

SEQ ID NO: 18661 - DNA, 25 bp, Homo sapien
ttatggtacaagagaacacggaaat

SEQ ID NO: 18662 - DNA, 25 bp, Homo sapien
agtcaagctggtaataagtaaattt

SEQ ID NO: 18663 - DNA, 25 bp, Homo sapien
gactgccagtcaagctgtcaggact

SEQ ID NO: 18664 - DNA, 25 bp, Homo sapien
aaggaccatgtcaaatctgaacaaa

SEQ ID NO: 18665 - DNA, 25 bp, Homo sapien
tcactatacatgtggtcaaaggacc

SEQ ID NO: 18666 - DNA, 25 bp, Homo sapien
tcctcacaacacagtaagtacagta

SEQ ID NO: 18667 - DNA, 25 bp, Homo sapien
taggaggaactaccatgtgatacat

SEQ ID NO: 18668 - DNA, 25 bp, Homo sapien
tcaaaggaccattcaaaggaccatg

SEQ ID NO: 18669 - DNA, 25 bp, Homo sapien
cattagcaatggaataggaggaact

SEQ ID NO: 18670 - DNA, 25 bp, Homo sapien
attagaccagtgaaatttgggaaaa

SEQ ID NO: 18671 - DNA, 25 bp, Homo sapien
agtgccgaatcaacatagtagtagc

SEQ ID NO: 18672 - DNA, 25 bp, Homo sapien
tcaccacaactcagagagacaatca

SEQ ID NO: 18673 - DNA, 25 bp, Homo sapien
cttgagggaacattgatttggctag

SEQ ID NO: 18674 - DNA, 25 bp, Homo sapien
actccggccttttattgcaagattt

SEQ ID NO: 18675 - DNA, 25 bp, Homo sapien
acattgatttggctagggattttta

SEQ ID NO: 18676 - DNA, 25 bp, Homo sapien
taagtaaccacaaagtgccgaatca

SEQ ID NO: 18677 - DNA, 25 bp, Homo sapien
caactataacttgaactccggcctt

SEQ ID NO: 18678 - DNA, 25 bp, Homo sapien
tatcacagagttggcttcttgaggg

SEQ ID NO: 18679 - DNA, 25 bp, Homo sapien
agagagacaatcactcataaagaat

SEQ ID NO: 18680 - DNA, 25 bp, Homo sapien
atgagaatgatgagttgagaaatat

SEQ ID NO: 18681 - DNA, 25 bp, Homo sapien
agtgacacgggcttgtagttccagc

SEQ ID NO: 18682 - DNA, 25 bp, Homo sapien
ctcaggagagcataattaatgattc

SEQ ID NO: 18683 - DNA, 25 bp, Homo sapien
acactgaagtataattcaatgtact

SEQ ID NO: 18684 - DNA, 25 bp, Homo sapien
cagtgacacgggcttgtagttccag

SEQ ID NO: 18685 - DNA, 25 bp, Homo sapien
catgaatttatgtctttaatgctca

SEQ ID NO: 18686 - DNA, 25 bp, Homo sapien
tttttaacacagagttttgatgaag

SEQ ID NO: 18687 - DNA, 25 bp, Homo sapien
tatatcatcaataaaccacacatta

SEQ ID NO: 18688 - DNA, 25 bp, Homo sapien
gctcaggagagcataattaatgatt

SEQ ID NO: 18689 - DNA, 25 bp, Homo sapien
ttcttgtacactgaagtataattca

SEQ ID NO: 18690 - DNA, 25 bp, Homo sapien
acagagttttgatgaagatatttac

SEQ ID NO: 18691 - DNA, 25 bp, Homo sapien
taacacagagttttgatgaagatat

SEQ ID NO: 18692 - DNA, 25 bp, Homo sapien
tttcgaacttctaaaccagcatagg

SEQ ID NO: 18693 - DNA, 25 bp, Homo sapien
atatgtcaagccaaaaaagttagaa

SEQ ID NO: 18694 - DNA, 25 bp, Homo sapien
agtcttgaaaagatatacccaaacc

SEQ ID NO: 18695 - DNA, 25 bp, Homo sapien
caaagataaagtagaggtagcatag

SEQ ID NO: 18696 - DNA, 25 bp, Homo sapien
agaaataggagactgtaataaaacc

SEQ ID NO: 18697 - DNA, 25 bp, Homo sapien
catagaagagtcaaaacaaaaatca

SEQ ID NO: 18698 - DNA, 25 bp, Homo sapien
aaaaactcatcacatgcagtcttga

SEQ ID NO: 18699 - DNA, 25 bp, Homo sapien
agtaggcaaatggtaacaaagataa

SEQ ID NO: 18700 - DNA, 25 bp, Homo sapien
ctggtatgaatatagtaggcaaatg

SEQ ID NO: 18701 - DNA, 25 bp, Homo sapien
tgtgaaatattaaggcagacattgc

SEQ ID NO: 18702 - DNA, 25 bp, Homo sapien
gcagacattgcgagatcgagtaaaa

SEQ ID NO: 18703 - DNA, 25 bp, Homo sapien
tgcattgcttcagtatagtaacata

SEQ ID NO: 18704 - DNA, 25 bp, Homo sapien
gttcccacggaacttcatactcagc

SEQ ID NO: 18705 - DNA, 25 bp, Homo sapien
ctctctgttgcaattaaggtttttc

SEQ ID NO: 18706 - DNA, 25 bp, Homo sapien
agaagaaaaggaacaatatatacca

SEQ ID NO: 18707 - DNA, 25 bp, Homo sapien
atactcagccctagcacttatgata

SEQ ID NO: 18708 - DNA, 25 bp, Homo sapien
agttaggcaacaatgctagacgctt

SEQ ID NO: 18709 - DNA, 25 bp, Homo sapien
tgttgaggtacattgcactgcattg

SEQ ID NO: 18710 - DNA, 25 bp, Homo sapien
gaattctgagcaatgttgaggtaca

SEQ ID NO: 18711 - DNA, 25 bp, Homo sapien
acctagcaatctcctccaaagtaat

SEQ ID NO: 18712 - DNA, 25 bp, Homo sapien
tggaactatatgatgaccctctgaa

SEQ ID NO: 18713 - DNA, 25 bp, Homo sapien
ataccaagtactttagttaggcaac

SEQ ID NO: 18714 - DNA, 25 bp, Homo sapien
ggaagatctggtgggataaattccc

SEQ ID NO: 18715 - DNA, 25 bp, Homo sapien
gccactgaatttggaagtttgaagc

SEQ ID NO: 18716 - DNA, 25 bp, Homo sapien
tttgctgagatgattgtacctatac

SEQ ID NO: 18717 - DNA, 25 bp, Homo sapien
tgtgtgccttgtaactgatcggttt

SEQ ID NO: 18718 - DNA, 25 bp, Homo sapien
ggagaagccctagtaatgtgatcaa

SEQ ID NO: 18719 - DNA, 25 bp, Homo sapien
aggacatggaatctgggttgttatt

SEQ ID NO: 18720 - DNA, 25 bp, Homo sapien
ccctaggcagtctgtaggtgaaaat

SEQ ID NO: 18721 - DNA, 25 bp, Homo sapien
aaagatagttttgcaggacatggaa

SEQ ID NO: 18722 - DNA, 25 bp, Homo sapien
tggctgctttcacggttgtatcttt

SEQ ID NO: 18723 - DNA, 25 bp, Homo sapien
ttagcatttcctatggggaagatct

SEQ ID NO: 18724 - DNA, 25 bp, Homo sapien
cagtctgtaggtgaaaatgtgtccc

SEQ ID NO: 18725 - DNA, 25 bp, Homo sapien
aatgaggaaaataagtaggcatcct

SEQ ID NO: 18726 - DNA, 25 bp, Homo sapien
gacaatgcaatcatgaaaggaatgc

SEQ ID NO: 18727 - DNA, 25 bp, Homo sapien
atggcagattattgaaatgagaaat

SEQ ID NO: 18728 - DNA, 25 bp, Homo sapien
gtgaaacacctgactagatgacatt

SEQ ID NO: 18729 - DNA, 25 bp, Homo sapien
agatctagttagttagggctgaatc

SEQ ID NO: 18730 - DNA, 25 bp, Homo sapien
atgaaaggaatgctagtgaaacacc

SEQ ID NO: 18731 - DNA, 25 bp, Homo sapien
gttagggctgaatcgattggtttac

SEQ ID NO: 18732 - DNA, 25 bp, Homo sapien
ataaaatttaccagtgaaagcagaa

SEQ ID NO: 18733 - DNA, 25 bp, Homo sapien
taccagtgaaagcagaaataaatga

SEQ ID NO: 18734 - DNA, 25 bp, Homo sapien
tatatatttagcacctagagcagtg

SEQ ID NO: 18735 - DNA, 25 bp, Homo sapien
agtgcctgacacattgtatgtacaa

SEQ ID NO: 18736 - DNA, 25 bp, Homo sapien
aatgtttgctgaccctggctccgta

SEQ ID NO: 18737 - DNA, 25 bp, Homo sapien
gtcaagctggttgctgggccaataa

SEQ ID NO: 18738 - DNA, 25 bp, Homo sapien
ctggctccgtagtatcctgtctgtt

SEQ ID NO: 18739 - DNA, 25 bp, Homo sapien
tgctgggccaataagacaagcaaaa

SEQ ID NO: 18740 - DNA, 25 bp, Homo sapien
attggttattatttggagcctgata

SEQ ID NO: 18741 - DNA, 25 bp, Homo sapien
ttggagcctgatagtccccagtgtc

SEQ ID NO: 18742 - DNA, 25 bp, Homo sapien
ctgtttggagtgagacattggttat

SEQ ID NO: 18743 - DNA, 25 bp, Homo sapien
tgctgaccctggctccgtagtatcc

SEQ ID NO: 18744 - DNA, 25 bp, Homo sapien
atcctgtctgtttggagtgagacat

SEQ ID NO: 18745 - DNA, 25 bp, Homo sapien
aacagcagagttgaatcgttgtgac

SEQ ID NO: 18746 - DNA, 25 bp, Homo sapien
ccagtgtcaagctggttgctgggcc

SEQ ID NO: 18747 - DNA, 25 bp, Homo sapien
cctctgctctattgtaagtggtgtt

SEQ ID NO: 18748 - DNA, 25 bp, Homo sapien
tttctataaggaactaggcaaagcc

SEQ ID NO: 18749 - DNA, 25 bp, Homo sapien
caggcagattctggtaccatgcttc

SEQ ID NO: 18750 - DNA, 25 bp, Homo sapien
tgaagccctcattagaagtcaggca

SEQ ID NO: 18751 - DNA, 25 bp, Homo sapien
tagaagtcctgtgttttacggtatc

SEQ ID NO: 18752 - DNA, 25 bp, Homo sapien
ctagcttttagcaagaagagatgtt

SEQ ID NO: 18753 - DNA, 25 bp, Homo sapien
ctaggcaaagccaagtaaattcttt

SEQ ID NO: 18754 - DNA, 25 bp, Homo sapien
tggcagctgctgagtttgtaaaaga

SEQ ID NO: 18755 - DNA, 25 bp, Homo sapien
actccaccatgttgagatgcctgct

SEQ ID NO: 18756 - DNA, 25 bp, Homo sapien
tttcttcagtggcagctgctgagtt

SEQ ID NO: 18757 - DNA, 25 bp, Homo sapien
gagatgttttcaggataaggctttc

SEQ ID NO: 18758 - DNA, 25 bp, Homo sapien
tgcctccggaatcaacagtactgtc

SEQ ID NO: 18759 - DNA, 25 bp, Homo sapien
gagccactgactcaggtgtatgccc

SEQ ID NO: 18760 - DNA, 25 bp, Homo sapien
cccacaacagattatgagagattag

SEQ ID NO: 18761 - DNA, 25 bp, Homo sapien
tatcccttgggaaagcgccattcac

SEQ ID NO: 18762 - DNA, 25 bp, Homo sapien
aggctagactgatgcatgatctctt

SEQ ID NO: 18763 - DNA, 25 bp, Homo sapien
gaacaggaaaatgacttcagaagct

SEQ ID NO: 18764 - DNA, 25 bp, Homo sapien
ctttacctggatggctgaagtgtcc

SEQ ID NO: 18765 - DNA, 25 bp, Homo sapien
gaaggagagatttgagctgaatatt

SEQ ID NO: 18766 - DNA, 25 bp, Homo sapien
ctgataaactgggagtctaggttct

SEQ ID NO: 18767 - DNA, 25 bp, Homo sapien
gaggaaacagtaccaagaacaggaa

SEQ ID NO: 18768 - DNA, 25 bp, Homo sapien
agtactgtcagaagcatggtctttc

SEQ ID NO: 18769 - DNA, 25 bp, Homo sapien
catggctgataaaggaaaaggtgca

SEQ ID NO: 18770 - DNA, 25 bp, Homo sapien
cttattactaggaggcatggccttt

SEQ ID NO: 18771 - DNA, 25 bp, Homo sapien
ggtgcacaagccaagagtttgctcc

SEQ ID NO: 18772 - DNA, 25 bp, Homo sapien
cgaaaatggtgctaacatggctgat

SEQ ID NO: 18773 - DNA, 25 bp, Homo sapien
tatgttgggaatgttcgatgttttc

SEQ ID NO: 18774 - DNA, 25 bp, Homo sapien
tccatgacattattgggaatagtac

SEQ ID NO: 18775 - DNA, 25 bp, Homo sapien
tcaatgacaagcctccgaaaatggt

SEQ ID NO: 18776 - DNA, 25 bp, Homo sapien
cctggggtatgtagtgatgtttcaa

SEQ ID NO: 18777 - DNA, 25 bp, Homo sapien
agtgatcagaacagggtaattaatt

SEQ ID NO: 18778 - DNA, 25 bp, Homo sapien
tacatgtaatgcagagtgatcagaa

SEQ ID NO: 18779 - DNA, 25 bp, Homo sapien
aaaccttacagcatctcttggacac

SEQ ID NO: 18780 - DNA, 25 bp, Homo sapien
tgcaatggtgcaactgatggctgta

SEQ ID NO: 18781 - DNA, 25 bp, Homo sapien
aagtcccacaggagtctctggtcaa

SEQ ID NO: 18782 - DNA, 25 bp, Homo sapien
ctttggagctcccagaaggaaagta

SEQ ID NO: 18783 - DNA, 25 bp, Homo sapien
catggcttggcacgtattagtactc

SEQ ID NO: 18784 - DNA, 25 bp, Homo sapien
ttctggcgctgttatgcatggagtc

SEQ ID NO: 18785 - DNA, 25 bp, Homo sapien
tccagtaggaagtgtgcaattgcaa

SEQ ID NO: 18786 - DNA, 25 bp, Homo sapien
gggaagtgaatttgaaactccgtgc

SEQ ID NO: 18787 - DNA, 25 bp, Homo sapien
tccatagaagaggtaaaaacattcc

SEQ ID NO: 18788 - DNA, 25 bp, Homo sapien
tacttctagagggtgattaacattt

SEQ ID NO: 18789 - DNA, 25 bp, Homo sapien
catggagtcggccaagtttgtcctt

SEQ ID NO: 18790 - DNA, 25 bp, Homo sapien
atagtcccgctagaaaagtcccaca

SEQ ID NO: 18791 - DNA, 25 bp, Homo sapien
ttacaaaagtatcaggccatgggga

SEQ ID NO: 18792 - DNA, 25 bp, Homo sapien
ttaaaatgctggaatcaggtggtcc

SEQ ID NO: 18793 - DNA, 25 bp, Homo sapien
ccatggggaattggatattagcaac

SEQ ID NO: 18794 - DNA, 25 bp, Homo sapien
gtgtgatcaagaaaaggtaggaaaa

SEQ ID NO: 18795 - DNA, 25 bp, Homo sapien
atttccatatagagggtgactcttt

SEQ ID NO: 18796 - DNA, 25 bp, Homo sapien
acaaagaaacaaagataacccagtc

SEQ ID NO: 18797 - DNA, 25 bp, Homo sapien
cttaactcagcggatggtgtgatca

SEQ ID NO: 18798 - DNA, 25 bp, Homo sapien
tgcctatgaaaagctggatgcagtt

SEQ ID NO: 18799 - DNA, 25 bp, Homo sapien
atcaatgaagacgttcaagtttacc

SEQ ID NO: 18800 - DNA, 25 bp, Homo sapien
tttggaagttagatcattttggctc

SEQ ID NO: 18801 - DNA, 25 bp, Homo sapien
cttgaaatgcagatatgtgggaaaa

SEQ ID NO: 18802 - DNA, 25 bp, Homo sapien
ctctggaggctaactgaaccaaatc

SEQ ID NO: 18803 - DNA, 25 bp, Homo sapien
tgttttcagggcagacacgtttttc

SEQ ID NO: 18804 - DNA, 25 bp, Homo sapien
agggtgcagccacgcctttgttcct

SEQ ID NO: 18805 - DNA, 25 bp, Homo sapien
agagcagacataagaagggtccctc

SEQ ID NO: 18806 - DNA, 25 bp, Homo sapien
caccacgggtgcatcacaggtacac

SEQ ID NO: 18807 - DNA, 25 bp, Homo sapien
atttccctgaagcacgaaagggtgt

SEQ ID NO: 18808 - DNA, 25 bp, Homo sapien
atgagaaggacgtagatttccctga

SEQ ID NO: 18809 - DNA, 25 bp, Homo sapien
tttctaccagagcaagaaggtagga

SEQ ID NO: 18810 - DNA, 25 bp, Homo sapien
aaggtaggagattgccctgctatct

SEQ ID NO: 18811 - DNA, 25 bp, Homo sapien
tggtcaggggagacttcatttctac

SEQ ID NO: 18812 - DNA, 25 bp, Homo sapien
tgttacagttgaccttgatgcattc

SEQ ID NO: 18813 - DNA, 25 bp, Homo sapien
caggtcacaggtggcttcaaagttt

SEQ ID NO: 18814 - DNA, 25 bp, Homo sapien
gattagtaagcataggagattctct

SEQ ID NO: 18815 - DNA, 25 bp, Homo sapien
atgcttgagtttagataacggggtg

SEQ ID NO: 18816 - DNA, 25 bp, Homo sapien
tatttcagagaaataggttgggtgc

SEQ ID NO: 18817 - DNA, 25 bp, Homo sapien
aatttctcccacaacgcgcagcttt

SEQ ID NO: 18818 - DNA, 25 bp, Homo sapien
cattttagggagacacggaaattac

SEQ ID NO: 18819 - DNA, 25 bp, Homo sapien
gtagatgaatcctatgggtagcaga

SEQ ID NO: 18820 - DNA, 25 bp, Homo sapien
tttgtactggaaaggtgggatatct

SEQ ID NO: 18821 - DNA, 25 bp, Homo sapien
tgagtttagataagccaaggttctt

SEQ ID NO: 18822 - DNA, 25 bp, Homo sapien
ggtagcagaaaaagtagacgttgct

SEQ ID NO: 18823 - DNA, 25 bp, Homo sapien
gacacggaaattacaggcaaagaca

SEQ ID NO: 18824 - DNA, 25 bp, Homo sapien
tagaactggaaaccgaacacaggtg

SEQ ID NO: 18825 - DNA, 25 bp, Homo sapien
tgtcccaaggctttgttgcgtgttc

SEQ ID NO: 18826 - DNA, 25 bp, Homo sapien
aagtgagttacttaagaacacacag

SEQ ID NO: 18827 - DNA, 25 bp, Homo sapien
cccaaagctgcagggatgccagtct

SEQ ID NO: 18828 - DNA, 25 bp, Homo sapien
atgagactcagaaaggtttaagtga

SEQ ID NO: 18829 - DNA, 25 bp, Homo sapien
tcatgcaggctgtcgggatttaaca

SEQ ID NO: 18830 - DNA, 25 bp, Homo sapien
gctgaagtacaggaaacctggggct

SEQ ID NO: 18831 - DNA, 25 bp, Homo sapien
tcgacacctggatcacaagaacact

SEQ ID NO: 18832 - DNA, 25 bp, Homo sapien
tctcgccgctgatgaagaaaatgaa

SEQ ID NO: 18833 - DNA, 25 bp, Homo sapien
gaaaatgaagggcatttgcttctca

SEQ ID NO: 18834 - DNA, 25 bp, Homo sapien
ctggcgtgagctggcatctacacta

SEQ ID NO: 18835 - DNA, 25 bp, Homo sapien
gaaaataatgaaacatcagactgac

SEQ ID NO: 18836 - DNA, 25 bp, Homo sapien
acattaaactaaaagtgcagctcat

SEQ ID NO: 18837 - DNA, 25 bp, Homo sapien
tctggaaggtggaaatacaataaaa

SEQ ID NO: 18838 - DNA, 25 bp, Homo sapien
aacatcagactgactagatataatt

SEQ ID NO: 18839 - DNA, 25 bp, Homo sapien
tcatccttcatggtgggccacaaga

SEQ ID NO: 18840 - DNA, 25 bp, Homo sapien
actggttatcattgttctggaaggt

SEQ ID NO: 18841 - DNA, 25 bp, Homo sapien
acaagaagcacccattgcaatgaaa

SEQ ID NO: 18842 - DNA, 25 bp, Homo sapien
aataatcaggattaactaaactgtt

SEQ ID NO: 18843 - DNA, 25 bp, Homo sapien
ccattgcaatgaaaaatgtgctgat

SEQ ID NO: 18844 - DNA, 25 bp, Homo sapien
tgatagatgcatacttaaaggtagt

SEQ ID NO: 18845 - DNA, 25 bp, Homo sapien
tatatacaaattgaccatgagcctt

SEQ ID NO: 18846 - DNA, 25 bp, Homo sapien
aacttagtgggccagtccggcattt

SEQ ID NO: 18847 - DNA, 25 bp, Homo sapien
tcagtcggagtccaaccaggaaaac

SEQ ID NO: 18848 - DNA, 25 bp, Homo sapien
ttgctagagtcacagaggagactta

SEQ ID NO: 18849 - DNA, 25 bp, Homo sapien
atcacacgattgacctcatggcatt

SEQ ID NO: 18850 - DNA, 25 bp, Homo sapien
agttaattcagggagtgttagcaac

SEQ ID NO: 18851 - DNA, 25 bp, Homo sapien
tgttagcaacacaggtgagggacaa

SEQ ID NO: 18852 - DNA, 25 bp, Homo sapien
aggaaaacaggagccatattgagtc

SEQ ID NO: 18853 - DNA, 25 bp, Homo sapien
atggcattatcatcagtcggagtcc

SEQ ID NO: 18854 - DNA, 25 bp, Homo sapien
tggagacatcacctgagacaaagaa

SEQ ID NO: 18855 - DNA, 25 bp, Homo sapien
cagaggctcctgttcggcatcacac

SEQ ID NO: 18856 - DNA, 25 bp, Homo sapien
tcccagtgtgagcatcagttcagcc

SEQ ID NO: 18857 - DNA, 25 bp, Homo sapien
tgtttaggctcaacggtcactttgc

SEQ ID NO: 18858 - DNA, 25 bp, Homo sapien
atcaataccagcagtgaaagtgagg

SEQ ID NO: 18859 - DNA, 25 bp, Homo sapien
tgctagacaataataatagtcaggc

SEQ ID NO: 18860 - DNA, 25 bp, Homo sapien
cactctgcaggagatgtttaggctc

SEQ ID NO: 18861 - DNA, 25 bp, Homo sapien
tgaaaccacatggaagccactctgc

SEQ ID NO: 18862 - DNA, 25 bp, Homo sapien
attaagcctctaggatgggctttta

SEQ ID NO: 18863 - DNA, 25 bp, Homo sapien
ctaacacaaacattagtggaaggta

SEQ ID NO: 18864 - DNA, 25 bp, Homo sapien
gtgagggtgacaattgccaataact

SEQ ID NO: 18865 - DNA, 25 bp, Homo sapien
tgagagaatcaataccagcagtgaa

SEQ ID NO: 18866 - DNA, 25 bp, Homo sapien
gtgccatgctggaatgaaaccacat

SEQ ID NO: 18867 - DNA, 25 bp, Homo sapien
ttaccagaatgagaatgaataatat

SEQ ID NO: 18868 - DNA, 25 bp, Homo sapien
ggaagattctagctcctggccctgc

SEQ ID NO: 18869 - DNA, 25 bp, Homo sapien
tcatttgacctgaacttgtggcaag

SEQ ID NO: 18870 - DNA, 25 bp, Homo sapien
atatagtaggtacaactcagcctac

SEQ ID NO: 18871 - DNA, 25 bp, Homo sapien
ccacaaagcctatttggggacctgt

SEQ ID NO: 18872 - DNA, 25 bp, Homo sapien
tgtaagactctgttcctcggctatc

SEQ ID NO: 18873 - DNA, 25 bp, Homo sapien
ctctaatctgcaagaagcataactt

SEQ ID NO: 18874 - DNA, 25 bp, Homo sapien
ctgaccttttcctggggttaagctc

SEQ ID NO: 18875 - DNA, 25 bp, Homo sapien
ggtcatcagttggtcatgcaaggtc

SEQ ID NO: 18876 - DNA, 25 bp, Homo sapien
cttggagcatgtggaagattctagc

SEQ ID NO: 18877 - DNA, 25 bp, Homo sapien
aatggataaaaatcacaagtgccgt

SEQ ID NO: 18878 - DNA, 25 bp, Homo sapien
tcatgcaaggtctgccaggggctcc

SEQ ID NO: 18879 - DNA, 25 bp, Homo sapien
aaataagggcttctggttcaagatg

SEQ ID NO: 18880 - DNA, 25 bp, Homo sapien
taaaataagggcttctggttcaaga

SEQ ID NO: 18881 - DNA, 25 bp, Homo sapien
agctagtgggttcctcttccatgga

SEQ ID NO: 18882 - DNA, 25 bp, Homo sapien
ataagggcttctggttcaagatggc

SEQ ID NO: 18883 - DNA, 25 bp, Homo sapien
agaagcagctagtgggttcctcttc

SEQ ID NO: 18884 - DNA, 25 bp, Homo sapien
taagggcttctggttcaagatggct

SEQ ID NO: 18885 - DNA, 25 bp, Homo sapien
gaagcagctagtgggttcctcttcc

SEQ ID NO: 18886 - DNA, 25 bp, Homo sapien
agcagctagtgggttcctcttccat

SEQ ID NO: 18887 - DNA, 25 bp, Homo sapien
tagaagcagctagtgggttcctctt

SEQ ID NO: 18888 - DNA, 25 bp, Homo sapien
aataagggcttctggttcaagatgg

SEQ ID NO: 18889 - DNA, 25 bp, Homo sapien
aaaataagggcttctggttcaagat

SEQ ID NO: 18890 - DNA, 25 bp, Homo sapien
acagccaacatattcagtcaagaac

SEQ ID NO: 18891 - DNA, 25 bp, Homo sapien
gtcactagaaatccacttaagagct

SEQ ID NO: 18892 - DNA, 25 bp, Homo sapien
attttcatgcctcaaagtaatgtct

SEQ ID NO: 18893 - DNA, 25 bp, Homo sapien
acatatattgcagaaacagacacag

SEQ ID NO: 18894 - DNA, 25 bp, Homo sapien
ctttggctagttgctattgagtact

SEQ ID NO: 18895 - DNA, 25 bp, Homo sapien
agtgatagattccaatccctgaact

SEQ ID NO: 18896 - DNA, 25 bp, Homo sapien
tgagtactttcatgatgtgaatatc

SEQ ID NO: 18897 - DNA, 25 bp, Homo sapien
agtaaggagctgtttctaatgtcaa

SEQ ID NO: 18898 - DNA, 25 bp, Homo sapien
cacttaagagctgagatccattggt

SEQ ID NO: 18899 - DNA, 25 bp, Homo sapien
atccctgaacttcatgcaagtatca

SEQ ID NO: 18900 - DNA, 25 bp, Homo sapien
catgcaagtatcatagtcactagaa

SEQ ID NO: 18901 - DNA, 25 bp, Homo sapien
aagtggccttggagtttattttaca

SEQ ID NO: 18902 - DNA, 25 bp, Homo sapien
cagcaacaaagataaacttgggttc

SEQ ID NO: 18903 - DNA, 25 bp, Homo sapien
ttggtcggctgcagcctagatttct

SEQ ID NO: 18904 - DNA, 25 bp, Homo sapien
ttaaggatagtcagaataacatgtg

SEQ ID NO: 18905 - DNA, 25 bp, Homo sapien
aataatttagctgtcacctggagaa

SEQ ID NO: 18906 - DNA, 25 bp, Homo sapien
taaagtcaaattgttggtcggctgc

SEQ ID NO: 18907 - DNA, 25 bp, Homo sapien
tgcaggcatgtatcctcaatccaaa

SEQ ID NO: 18908 - DNA, 25 bp, Homo sapien
ctctttaggtccagactgaaaatgc

SEQ ID NO: 18909 - DNA, 25 bp, Homo sapien
acagttagggagttgttttacacaa

SEQ ID NO: 18910 - DNA, 25 bp, Homo sapien
gtccagactgaaaatgcaggcatgt

SEQ ID NO: 18911 - DNA, 25 bp, Homo sapien
cctggagaattaagtgtcctgaatt

SEQ ID NO: 18912 - DNA, 25 bp, Homo sapien
tgtaaacaaacatggaaccacagtc

SEQ ID NO: 18913 - DNA, 25 bp, Homo sapien
gataaagatggtacctcaagtgatc

SEQ ID NO: 18914 - DNA, 25 bp, Homo sapien
ggaaccacagtctcacgtcagcaat

SEQ ID NO: 18915 - DNA, 25 bp, Homo sapien
tgtttccagagcaaagcacggcact

SEQ ID NO: 18916 - DNA, 25 bp, Homo sapien
aattatgtaagcagcctatcagccc

SEQ ID NO: 18917 - DNA, 25 bp, Homo sapien
atctgtagagcaaacctgtccctgt

SEQ ID NO: 18918 - DNA, 25 bp, Homo sapien
gtatagaatactgagacatgactta

SEQ ID NO: 18919 - DNA, 25 bp, Homo sapien
cgtcagcaattgcacattggatgat

SEQ ID NO: 18920 - DNA, 25 bp, Homo sapien
ctaagaatcttaggtggcacatgga

SEQ ID NO: 18921 - DNA, 25 bp, Homo sapien
catgtagtgagtcctgagtgatatc

SEQ ID NO: 18922 - DNA, 25 bp, Homo sapien
caggaggttctcagatttgacaaaa

SEQ ID NO: 18923 - DNA, 25 bp, Homo sapien
tttccttgtagccaaattattccgc

SEQ ID NO: 18924 - DNA, 25 bp, Homo sapien
agccaaattattccgctaaattgtt

SEQ ID NO: 18925 - DNA, 25 bp, Homo sapien
tgtccagacattaaacttataagag

SEQ ID NO: 18926 - DNA, 25 bp, Homo sapien
gatactctacctggagaaaaacata

SEQ ID NO: 18927 - DNA, 25 bp, Homo sapien
aatcattattttccttgtagccaaa

SEQ ID NO: 18928 - DNA, 25 bp, Homo sapien
caggatactctacctggagaaaaac

SEQ ID NO: 18929 - DNA, 25 bp, Homo sapien
aaacttataagagaaaatcattatt

SEQ ID NO: 18930 - DNA, 25 bp, Homo sapien
tcaaaaaaaactgcacgtccaggat

SEQ ID NO: 18931 - DNA, 25 bp, Homo sapien
aaaaaactgcacgtccaggatactc

SEQ ID NO: 18932 - DNA, 25 bp, Homo sapien
tagctctcattaaccttgtccagac

SEQ ID NO: 18933 - DNA, 25 bp, Homo sapien
aaactgcacgtccaggatactctac

SEQ ID NO: 18934 - DNA, 25 bp, Homo sapien
aaccatgccttcaagtgacagactc

SEQ ID NO: 18935 - DNA, 25 bp, Homo sapien
tcattgtcaatgtgactgtgtcatc

SEQ ID NO: 18936 - DNA, 25 bp, Homo sapien
ttgtagcccaagattaagtttattc

SEQ ID NO: 18937 - DNA, 25 bp, Homo sapien
tgacagactctcaaaaatgtgatgc

SEQ ID NO: 18938 - DNA, 25 bp, Homo sapien
tgggataagaaacttgctgtctgtc

SEQ ID NO: 18939 - DNA, 25 bp, Homo sapien
gagataaaccaagattagactaaac

SEQ ID NO: 18940 - DNA, 25 bp, Homo sapien
ctaggaggtttgcacaatagagtac

SEQ ID NO: 18941 - DNA, 25 bp, Homo sapien
cacagatggtctatctacagggttc

SEQ ID NO: 18942 - DNA, 25 bp, Homo sapien
actgggaatactttgtacctacttg

SEQ ID NO: 18943 - DNA, 25 bp, Homo sapien
ctacagggttctgggataagaaact

SEQ ID NO: 18944 - DNA, 25 bp, Homo sapien
ctgtatgactaaaagcctcattgtc

SEQ ID NO: 18945 - DNA, 25 bp, Homo sapien
ttcaaaaagccaactcctgaatttg

SEQ ID NO: 18946 - DNA, 25 bp, Homo sapien
ctagtttgtgtgcatagagttgttc

SEQ ID NO: 18947 - DNA, 25 bp, Homo sapien
tcgtcggcatctctgaaggtttttg

SEQ ID NO: 18948 - DNA, 25 bp, Homo sapien
tttgggaatagtttcaataggaatg

SEQ ID NO: 18949 - DNA, 25 bp, Homo sapien
tatggtttttcgcatctcagtttcc

SEQ ID NO: 18950 - DNA, 25 bp, Homo sapien
tttatacgtctgctagaatccagct

SEQ ID NO: 18951 - DNA, 25 bp, Homo sapien
tcaataggaatggtaccagatcttc

SEQ ID NO: 18952 - DNA, 25 bp, Homo sapien
gctagaatccagctatgaatccatc

SEQ ID NO: 18953 - DNA, 25 bp, Homo sapien
gtatgcatccacgaatttatcagtt

SEQ ID NO: 18954 - DNA, 25 bp, Homo sapien
ctgccttgggaggttgtatgcatcc

SEQ ID NO: 18955 - DNA, 25 bp, Homo sapien
gcatagagttgttcgtcggcatctc

SEQ ID NO: 18956 - DNA, 25 bp, Homo sapien
gctctgctcctgaggttctgcttca

SEQ ID NO: 18957 - DNA, 25 bp, Homo sapien
cgaggcatggtagaaagtgcatttc

SEQ ID NO: 18958 - DNA, 25 bp, Homo sapien
aactccaggtgcatcagaagcatct

SEQ ID NO: 18959 - DNA, 25 bp, Homo sapien
gaggcatggtagaaagtgcatttct

SEQ ID NO: 18960 - DNA, 25 bp, Homo sapien
gcatctggagagctggttaaaacac

SEQ ID NO: 18961 - DNA, 25 bp, Homo sapien
caactccaggtgcatcagaagcatc

SEQ ID NO: 18962 - DNA, 25 bp, Homo sapien
aagcatctggagagctggttaaaac

SEQ ID NO: 18963 - DNA, 25 bp, Homo sapien
actccaggtgcatcagaagcatctg

SEQ ID NO: 18964 - DNA, 25 bp, Homo sapien
gcgaggcatggtagaaagtgcattt

SEQ ID NO: 18965 - DNA, 25 bp, Homo sapien
cagaagcatctggagagctggttaa

SEQ ID NO: 18966 - DNA, 25 bp, Homo sapien
ttcctctggggcgaggcatggtaga

SEQ ID NO: 18967 - DNA, 25 bp, Homo sapien
gattctgcctaagggcaacactggc

SEQ ID NO: 18968 - DNA, 25 bp, Homo sapien
ctggaatccaagacaaggaagcact

SEQ ID NO: 18969 - DNA, 25 bp, Homo sapien
agggtccattttcctggaatccaag

SEQ ID NO: 18970 - DNA, 25 bp, Homo sapien
gggtctgtgccgacaggtctttcca

SEQ ID NO: 18971 - DNA, 25 bp, Homo sapien
cagaggttcctggatcagcaccaaa

SEQ ID NO: 18972 - DNA, 25 bp, Homo sapien
cccagcagaggttcctggatcagca

SEQ ID NO: 18973 - DNA, 25 bp, Homo sapien
cctggatcagcaccaaacacactga

SEQ ID NO: 18974 - DNA, 25 bp, Homo sapien
gccgacaggtctttccacaatgaga

SEQ ID NO: 18975 - DNA, 25 bp, Homo sapien
taaatcctcatctcagggtccattt

SEQ ID NO: 18976 - DNA, 25 bp, Homo sapien
cacaccatttattgtgccctggttc

SEQ ID NO: 18977 - DNA, 25 bp, Homo sapien
gacaaggaagcactcccgaatctcc

SEQ ID NO: 18978 - DNA, 25 bp, Homo sapien
tgtgagggtattattctaacactcc

SEQ ID NO: 18979 - DNA, 25 bp, Homo sapien
attatgggctattgtctgatgatga

SEQ ID NO: 18980 - DNA, 25 bp, Homo sapien
ctctatgggttgaaatcccagagcc

SEQ ID NO: 18981 - DNA, 25 bp, Homo sapien
gtctgatgatgaaaatagtgtacac

SEQ ID NO: 18982 - DNA, 25 bp, Homo sapien
tcaacattgaatttgtgagggtatt

SEQ ID NO: 18983 - DNA, 25 bp, Homo sapien
gcgcccggacttcattagcactttc

SEQ ID NO: 18984 - DNA, 25 bp, Homo sapien
cacaatgcctttcagagtgcctggc

SEQ ID NO: 18985 - DNA, 25 bp, Homo sapien
agagtgcctggcataaagcaggaat

SEQ ID NO: 18986 - DNA, 25 bp, Homo sapien
agatgtcagacaaagtattatgggc

SEQ ID NO: 18987 - DNA, 25 bp, Homo sapien
aaaatgaggctgatcgttctttgtc

SEQ ID NO: 18988 - DNA, 25 bp, Homo sapien
cagagccactttgtgctgtatgaac

SEQ ID NO: 18989 - DNA, 25 bp, Homo sapien
ggatacggccctgagtgcattactt

SEQ ID NO: 18990 - DNA, 25 bp, Homo sapien
ctaattaggaggctgaaatcaaaca

SEQ ID NO: 18991 - DNA, 25 bp, Homo sapien
atcaaggacgaggtttcaggttcct

SEQ ID NO: 18992 - DNA, 25 bp, Homo sapien
aagcctggcacctcctgacagctga

SEQ ID NO: 18993 - DNA, 25 bp, Homo sapien
agaagggcgttctcatgcctgctta

SEQ ID NO: 18994 - DNA, 25 bp, Homo sapien
aatggaaaggaagcctcccatgtcc

SEQ ID NO: 18995 - DNA, 25 bp, Homo sapien
cgagaatttagacccggaatgccat

SEQ ID NO: 18996 - DNA, 25 bp, Homo sapien
gttacaatgacagaaaaccacggtc

SEQ ID NO: 18997 - DNA, 25 bp, Homo sapien
agggccttcaacaccacgagtcgat

SEQ ID NO: 18998 - DNA, 25 bp, Homo sapien
gctggggacctcaggactctttctc

SEQ ID NO: 18999 - DNA, 25 bp, Homo sapien
tgtcatagacaggacttagccattc

SEQ ID NO: 19000 - DNA, 25 bp, Homo sapien
tccacgtaagtactgctacatgtgc

SEQ ID NO: 19001 - DNA, 25 bp, Homo sapien
taaccaacatgctgtgataaacttc

SEQ ID NO: 19002 - DNA, 25 bp, Homo sapien
tattatttatgaggaggaaaggtgg

SEQ ID NO: 19003 - DNA, 25 bp, Homo sapien
cttcatgccatgaccaaggcctgga

SEQ ID NO: 19004 - DNA, 25 bp, Homo sapien
tgatggatgttgaggttgtttctga

SEQ ID NO: 19005 - DNA, 25 bp, Homo sapien
ttcaaacgccaacagtcttctcgac

SEQ ID NO: 19006 - DNA, 25 bp, Homo sapien
tgttggccagtcctgtgaaacacac

SEQ ID NO: 19007 - DNA, 25 bp, Homo sapien
aaggcctggactactattcaaacgc

SEQ ID NO: 19008 - DNA, 25 bp, Homo sapien
gaatgagattgctaggacatggtat

SEQ ID NO: 19009 - DNA, 25 bp, Homo sapien
aggcagtgtgtgagagctcattctc

SEQ ID NO: 19010 - DNA, 25 bp, Homo sapien
gacaagtttctaatgggttgctacc

SEQ ID NO: 19011 - DNA, 25 bp, Homo sapien
gctgagaggaccgtctcattgtact

SEQ ID NO: 19012 - DNA, 25 bp, Homo sapien
acttctggagtggattcatgagtgt

SEQ ID NO: 19013 - DNA, 25 bp, Homo sapien
tgaatggggtgtagcccgccaacat

SEQ ID NO: 19014 - DNA, 25 bp, Homo sapien
aggaacatcaggcagagtttgtcct

SEQ ID NO: 19015 - DNA, 25 bp, Homo sapien
cctgcaggagtaggtctggcctgat

SEQ ID NO: 19016 - DNA, 25 bp, Homo sapien
agatgtcctggggaaaaagtcttca

SEQ ID NO: 19017 - DNA, 25 bp, Homo sapien
tgctagatgtcctggggaaaaagtc

SEQ ID NO: 19018 - DNA, 25 bp, Homo sapien
aagtcttcagacttctggagtggat

SEQ ID NO: 19019 - DNA, 25 bp, Homo sapien
ggtgtagcccgccaacatcattttt

SEQ ID NO: 19020 - DNA, 25 bp, Homo sapien
tatcatgttgatggggttgcaaccc

SEQ ID NO: 19021 - DNA, 25 bp, Homo sapien
ctcgggctccctatatcatgttgat

SEQ ID NO: 19022 - DNA, 25 bp, Homo sapien
ttgactccaaggaggaatcactggt

SEQ ID NO: 19023 - DNA, 25 bp, Homo sapien
gtgggcagcctctcatctggcactt

SEQ ID NO: 19024 - DNA, 25 bp, Homo sapien
cctccttgaagggtctcagagagtg

SEQ ID NO: 19025 - DNA, 25 bp, Homo sapien
agtaagcctgttcctgcaagggctt

SEQ ID NO: 19026 - DNA, 25 bp, Homo sapien
ctctgggctcacaaggctgttcctc

SEQ ID NO: 19027 - DNA, 25 bp, Homo sapien
tgatagcagtggagtgccttaatct

SEQ ID NO: 19028 - DNA, 25 bp, Homo sapien
aatgagtatactgcgtcactggtgt

SEQ ID NO: 19029 - DNA, 25 bp, Homo sapien
tggtggccattcaggtctggctcct

SEQ ID NO: 19030 - DNA, 25 bp, Homo sapien
ttcagggaaaatgtacgtatcaggc

SEQ ID NO: 19031 - DNA, 25 bp, Homo sapien
ttatgaaaaatgtctgatagcagtg

SEQ ID NO: 19032 - DNA, 25 bp, Homo sapien
tggcagagctctcagcagccatcct

SEQ ID NO: 19033 - DNA, 25 bp, Homo sapien
caaccactgattgtttgcccattac

SEQ ID NO: 19034 - DNA, 25 bp, Homo sapien
taattacgatgcatctgggcacggt

SEQ ID NO: 19035 - DNA, 25 bp, Homo sapien
ctttgttctgcatcttaggaggaaa

SEQ ID NO: 19036 - DNA, 25 bp, Homo sapien
tattgaattccagattgacagtttt

SEQ ID NO: 19037 - DNA, 25 bp, Homo sapien
catctgggcacggtttcctttgggt

SEQ ID NO: 19038 - DNA, 25 bp, Homo sapien
tcctttgccagaacatctttgcttt

SEQ ID NO: 19039 - DNA, 25 bp, Homo sapien
tttagtattgattttggaacatgtc

SEQ ID NO: 19040 - DNA, 25 bp, Homo sapien
tgaggaatccacagttatttaagtc

SEQ ID NO: 19041 - DNA, 25 bp, Homo sapien
atcttcgttcctgaaggatgttttc

SEQ ID NO: 19042 - DNA, 25 bp, Homo sapien
accacaataggatacagacagttca

SEQ ID NO: 19043 - DNA, 25 bp, Homo sapien
ttctctggctgctttcaagatgttt

SEQ ID NO: 19044 - DNA, 25 bp, Homo sapien
gcaggcagtgaagagacacttatta

SEQ ID NO: 19045 - DNA, 25 bp, Homo sapien
ttaaagtttacccagctgctcacag

SEQ ID NO: 19046 - DNA, 25 bp, Homo sapien
tagaggtcagaaatccaaaaatcaa

SEQ ID NO: 19047 - DNA, 25 bp, Homo sapien
ccttgtgattgaggcccacccagat

SEQ ID NO: 19048 - DNA, 25 bp, Homo sapien
ttatcaaagccaaaagtgtagcagc

SEQ ID NO: 19049 - DNA, 25 bp, Homo sapien
gtgaaagcgtgaatgaaccaaaaat

SEQ ID NO: 19050 - DNA, 25 bp, Homo sapien
aaaccagcttgagtgaagttaggca

SEQ ID NO: 19051 - DNA, 25 bp, Homo sapien
gacacacagtgggacttcagtaaat

SEQ ID NO: 19052 - DNA, 25 bp, Homo sapien
tccaccttctagaggccgcctgagt

SEQ ID NO: 19053 - DNA, 25 bp, Homo sapien
tgagttccgtggcttctggtccctt

SEQ ID NO: 19054 - DNA, 25 bp, Homo sapien
ttcagacatggacatcttaggggtt

SEQ ID NO: 19055 - DNA, 25 bp, Homo sapien
agagtgggaaaacttctgagtcagc

SEQ ID NO: 19056 - DNA, 25 bp, Homo sapien
aagcctggacataggttccctcgca

SEQ ID NO: 19057 - DNA, 25 bp, Homo sapien
aaggctcctgaagttgtacggacct

SEQ ID NO: 19058 - DNA, 25 bp, Homo sapien
gtctcactgcagaaaagcttccaac

SEQ ID NO: 19059 - DNA, 25 bp, Homo sapien
tgtgcacgactcagctgtgaggcct

SEQ ID NO: 19060 - DNA, 25 bp, Homo sapien
cctgagtctgtgtctgcaactgtct

SEQ ID NO: 19061 - DNA, 25 bp, Homo sapien
tgggctgaaaaatcacacataggtt

SEQ ID NO: 19062 - DNA, 25 bp, Homo sapien
ttaaagactgcaacgcatcagctgt

SEQ ID NO: 19063 - DNA, 25 bp, Homo sapien
ggaggaaagtgtcttcaaggattct

SEQ ID NO: 19064 - DNA, 25 bp, Homo sapien
ctcatagaatgatgccaactggggt

SEQ ID NO: 19065 - DNA, 25 bp, Homo sapien
ccactgcaatgaagacgtgtctgaa

SEQ ID NO: 19066 - DNA, 25 bp, Homo sapien
ctctcgtggtagctctgccgtctca

SEQ ID NO: 19067 - DNA, 25 bp, Homo sapien
gctttacgctttaccagaaataatc

SEQ ID NO: 19068 - DNA, 25 bp, Homo sapien
aaagaccttggctggtcacattttc

SEQ ID NO: 19069 - DNA, 25 bp, Homo sapien
acatactcagacacagtgcctgcca

SEQ ID NO: 19070 - DNA, 25 bp, Homo sapien
actgcggagttatctttgggactta

SEQ ID NO: 19071 - DNA, 25 bp, Homo sapien
gtctcacggggttctttggagagca

SEQ ID NO: 19072 - DNA, 25 bp, Homo sapien
atgcttttgatggtgtttagggccc

SEQ ID NO: 19073 - DNA, 25 bp, Homo sapien
caggttctggtatctgccagcattc

SEQ ID NO: 19074 - DNA, 25 bp, Homo sapien
agatgtctgaactgcatgtgttgtc

SEQ ID NO: 19075 - DNA, 25 bp, Homo sapien
gccacttgagagcacttgatcagct

SEQ ID NO: 19076 - DNA, 25 bp, Homo sapien
tctctctgtgtgtctagcctatctt

SEQ ID NO: 19077 - DNA, 25 bp, Homo sapien
aagagaagatgagagcttagaatat

SEQ ID NO: 19078 - DNA, 25 bp, Homo sapien
agtccatgaagtaggaagagaagat

SEQ ID NO: 19079 - DNA, 25 bp, Homo sapien
gagaagaagctagcatgtgactaat

SEQ ID NO: 19080 - DNA, 25 bp, Homo sapien
ttggagtcattagataacatggttc

SEQ ID NO: 19081 - DNA, 25 bp, Homo sapien
tatttaaaggttgggctgagaagaa

SEQ ID NO: 19082 - DNA, 25 bp, Homo sapien
tgactaataggaggacacataagtt

SEQ ID NO: 19083 - DNA, 25 bp, Homo sapien
ctatagatatggatgagcttactca

SEQ ID NO: 19084 - DNA, 25 bp, Homo sapien
gtagagatatctggaaagcaatggt

SEQ ID NO: 19085 - DNA, 25 bp, Homo sapien
gagcttactcaaataggaagtccat

SEQ ID NO: 19086 - DNA, 25 bp, Homo sapien
tgctaaagacacagattttggagtc

SEQ ID NO: 19087 - DNA, 25 bp, Homo sapien
tagaagacctatgtgtagagatatc

SEQ ID NO: 19088 - DNA, 25 bp, Homo sapien
tctggacagagatgataaaatggtg

SEQ ID NO: 19089 - DNA, 25 bp, Homo sapien
gagatggtaacaagaagattctatt

SEQ ID NO: 19090 - DNA, 25 bp, Homo sapien
ccatgtgtctggtgctgttctggac

SEQ ID NO: 19091 - DNA, 25 bp, Homo sapien
tttctgatctagagccacacctttc

SEQ ID NO: 19092 - DNA, 25 bp, Homo sapien
aaaatggtgaatggatattggcata

SEQ ID NO: 19093 - DNA, 25 bp, Homo sapien
aacaagtatttgtggagtcctttcc

SEQ ID NO: 19094 - DNA, 25 bp, Homo sapien
tctccatgtgagatgagaaataaat

SEQ ID NO: 19095 - DNA, 25 bp, Homo sapien
taaaatcatagggtctagtggagga

SEQ ID NO: 19096 - DNA, 25 bp, Homo sapien
tttcgagccaggtgaatcagaattc

SEQ ID NO: 19097 - DNA, 25 bp, Homo sapien
atttccagatattgtggccacactc

SEQ ID NO: 19098 - DNA, 25 bp, Homo sapien
cttaagaaatttcgagccaggtgaa

SEQ ID NO: 19099 - DNA, 25 bp, Homo sapien
tctgtggtctcttgttcatgaaggc

SEQ ID NO: 19100 - DNA, 25 bp, Homo sapien
tctacaaacgccttgcaacctcagg

SEQ ID NO: 19101 - DNA, 25 bp, Homo sapien
tttaaaataaactcatacatgtcct

SEQ ID NO: 19102 - DNA, 25 bp, Homo sapien
tctcttgttcatgaaggcagtattt

SEQ ID NO: 19103 - DNA, 25 bp, Homo sapien
ctcaggataatcttttctgtggtct

SEQ ID NO: 19104 - DNA, 25 bp, Homo sapien
caaacgccttgcaacctcaggataa

SEQ ID NO: 19105 - DNA, 25 bp, Homo sapien
ggtgtcctctggctctacaaacgcc

SEQ ID NO: 19106 - DNA, 25 bp, Homo sapien
aacgccttgcaacctcaggataatc

SEQ ID NO: 19107 - DNA, 25 bp, Homo sapien
tggtctcttgttcatgaaggcagta

SEQ ID NO: 19108 - DNA, 25 bp, Homo sapien
tctggctctacaaacgccttgcaac

SEQ ID NO: 19109 - DNA, 25 bp, Homo sapien
tacaaacgccttgcaacctcaggat

SEQ ID NO: 19110 - DNA, 25 bp, Homo sapien
aactccaaatgtccggctgatgtgc

SEQ ID NO: 19111 - DNA, 25 bp, Homo sapien
gagctggagggtattccattgacaa

SEQ ID NO: 19112 - DNA, 25 bp, Homo sapien
aggagcccagcaatgcaccgtttat

SEQ ID NO: 19113 - DNA, 25 bp, Homo sapien
aatctaggctattgggaactctgtc

SEQ ID NO: 19114 - DNA, 25 bp, Homo sapien
attgacaatcaaatgcttcggctta

SEQ ID NO: 19115 - DNA, 25 bp, Homo sapien
tcggcttagaagtgaaacatagtaa

SEQ ID NO: 19116 - DNA, 25 bp, Homo sapien
gacctatccaactgcaaaggagccc

SEQ ID NO: 19117 - DNA, 25 bp, Homo sapien
ggatgatcgagtttgaaatgaagac

SEQ ID NO: 19118 - DNA, 25 bp, Homo sapien
tccaacatggacctgtggaggactc

SEQ ID NO: 19119 - DNA, 25 bp, Homo sapien
agggtgctggactctttgtgacact

SEQ ID NO: 19120 - DNA, 25 bp, Homo sapien
tagaagtggctgacctgtgatttgc

SEQ ID NO: 19121 - DNA, 25 bp, Homo sapien
ttaggaggctaatataatagtcaac

SEQ ID NO: 19122 - DNA, 25 bp, Homo sapien
gtcctcatgacaaatggagacagcc

SEQ ID NO: 19123 - DNA, 25 bp, Homo sapien
tacactgctccaatacaaattctac

SEQ ID NO: 19124 - DNA, 25 bp, Homo sapien
aaaggtccgtcctcatgacaaatgg

SEQ ID NO: 19125 - DNA, 25 bp, Homo sapien
tatgactagttacaattaagccctt

SEQ ID NO: 19126 - DNA, 25 bp, Homo sapien
tttagaaagtattaggaggctaata

SEQ ID NO: 19127 - DNA, 25 bp, Homo sapien
catatgaacctataaaggtccgtcc

SEQ ID NO: 19128 - DNA, 25 bp, Homo sapien
agatcaagagagaatcatatgaacc

SEQ ID NO: 19129 - DNA, 25 bp, Homo sapien
tgaatattaccctcaaaaggagatg

SEQ ID NO: 19130 - DNA, 25 bp, Homo sapien
aatggagacagccaaactaattttc

SEQ ID NO: 19131 - DNA, 25 bp, Homo sapien
tttcagccttttttgtgtgtccttc

SEQ ID NO: 19132 - DNA, 25 bp, Homo sapien
gaaacagtatagcttgggagaaagt

SEQ ID NO: 19133 - DNA, 25 bp, Homo sapien
atctaggccattgagcatggcttta

SEQ ID NO: 19134 - DNA, 25 bp, Homo sapien
tcaatatgtgaagtggaattaatgt

SEQ ID NO: 19135 - DNA, 25 bp, Homo sapien
ttgcaataagcatagatcttgtcca

SEQ ID NO: 19136 - DNA, 25 bp, Homo sapien
atagcttgggagaaagtatcatatc

SEQ ID NO: 19137 - DNA, 25 bp, Homo sapien
aggaagtgcagactgactttctact

SEQ ID NO: 19138 - DNA, 25 bp, Homo sapien
atcctacatggtacaagaaaccaat

SEQ ID NO: 19139 - DNA, 25 bp, Homo sapien
aaagcataaaagatttggcagtaaa

SEQ ID NO: 19140 - DNA, 25 bp, Homo sapien
atttggcagtaaatatatctaggcc

SEQ ID NO: 19141 - DNA, 25 bp, Homo sapien
tataggattaacatacaagtgtcac

SEQ ID NO: 19142 - DNA, 25 bp, Homo sapien
atctcaaatactttatgggaaacag

SEQ ID NO: 19143 - DNA, 25 bp, Homo sapien
actgttaagcacaactttggggctc

SEQ ID NO: 19144 - DNA, 25 bp, Homo sapien
atatagcagaggtcctagccctgtt

SEQ ID NO: 19145 - DNA, 25 bp, Homo sapien
tcacagttcagagtggagatgcctt

SEQ ID NO: 19146 - DNA, 25 bp, Homo sapien
cagcacaaaatggaccaagtcatac

SEQ ID NO: 19147 - DNA, 25 bp, Homo sapien
tacacaagtgcatatgagcaggtac

SEQ ID NO: 19148 - DNA, 25 bp, Homo sapien
ctgcagttagcaatcaggtgttgcc

SEQ ID NO: 19149 - DNA, 25 bp, Homo sapien
tagccctgttggagctcacagttca

SEQ ID NO: 19150 - DNA, 25 bp, Homo sapien
aggtgttgcctagtgtactacagac

SEQ ID NO: 19151 - DNA, 25 bp, Homo sapien
ataaggatatgaacacagtaggtgc

SEQ ID NO: 19152 - DNA, 25 bp, Homo sapien
ttgttctggcccacagcccaggtag

SEQ ID NO: 19153 - DNA, 25 bp, Homo sapien
atgagcaggtacatctgtaggatac

SEQ ID NO: 19154 - DNA, 25 bp, Homo sapien
gcggtccctgaatcacatggtgaga

SEQ ID NO: 19155 - DNA, 25 bp, Homo sapien
tgtgtgaactcataactgagaattc

SEQ ID NO: 19156 - DNA, 25 bp, Homo sapien
atctggtgtaataagaatagtgttc

SEQ ID NO: 19157 - DNA, 25 bp, Homo sapien
tcagaaggtttttaactgcatattc

SEQ ID NO: 19158 - DNA, 25 bp, Homo sapien
ggatggcaccaagacattcatgaag

SEQ ID NO: 19159 - DNA, 25 bp, Homo sapien
catgaaggatccatgatccaaaccc

SEQ ID NO: 19160 - DNA, 25 bp, Homo sapien
agatgaagcggtccctgaatcacat

SEQ ID NO: 19161 - DNA, 25 bp, Homo sapien
tagatgtaggcctattttggttatc

SEQ ID NO: 19162 - DNA, 25 bp, Homo sapien
aattcactcattactggggaggatg

SEQ ID NO: 19163 - DNA, 25 bp, Homo sapien
tagggactacatttcaacacgagat

SEQ ID NO: 19164 - DNA, 25 bp, Homo sapien
catggcagaagatgaagcggtccct

SEQ ID NO: 19165 - DNA, 25 bp, Homo sapien
acggtggtcccaggtgaataaggat

SEQ ID NO: 19166 - DNA, 25 bp, Homo sapien
tggagcacatgtggtaggatttttt

SEQ ID NO: 19167 - DNA, 25 bp, Homo sapien
caaggccaccttggagacagagctt

SEQ ID NO: 19168 - DNA, 25 bp, Homo sapien
gttcacggtggtcccaggtgaataa

SEQ ID NO: 19169 - DNA, 25 bp, Homo sapien
tctgctcaggctcctagagtctctg

SEQ ID NO: 19170 - DNA, 25 bp, Homo sapien
ccatgtggcttccaaggccaccttg

SEQ ID NO: 19171 - DNA, 25 bp, Homo sapien
taatcatctggatttctgctcaggc

SEQ ID NO: 19172 - DNA, 25 bp, Homo sapien
gacagagcttggtggagcacatgtg

SEQ ID NO: 19173 - DNA, 25 bp, Homo sapien
aggctcctagagtctctgccacctt

SEQ ID NO: 19174 - DNA, 25 bp, Homo sapien
atagttcacggtggtcccaggtgaa

SEQ ID NO: 19175 - DNA, 25 bp, Homo sapien
atcatctggatttctgctcaggctc

SEQ ID NO: 19176 - DNA, 25 bp, Homo sapien
gggagcatcagccttagactgcttc

SEQ ID NO: 19177 - DNA, 25 bp, Homo sapien
gtttccggtagcacccagaggccat

SEQ ID NO: 19178 - DNA, 25 bp, Homo sapien
taaagtcagcttcacagtaatcctc

SEQ ID NO: 19179 - DNA, 25 bp, Homo sapien
gtacccaccaggacacggatggata

SEQ ID NO: 19180 - DNA, 25 bp, Homo sapien
ataacgggccatcctgaaagccctg

SEQ ID NO: 19181 - DNA, 25 bp, Homo sapien
aggctgatgtaggatgtacccacca

SEQ ID NO: 19182 - DNA, 25 bp, Homo sapien
agaagccactaacccagaactctgg

SEQ ID NO: 19183 - DNA, 25 bp, Homo sapien
ttttggaaatgtaactggctcccac

SEQ ID NO: 19184 - DNA, 25 bp, Homo sapien
ctgacctggagtaaaagcattgcta

SEQ ID NO: 19185 - DNA, 25 bp, Homo sapien
atgagctctcatgccattcagggag

SEQ ID NO: 19186 - DNA, 25 bp, Homo sapien
tgctaggaccagagtcagaagccac

SEQ ID NO: 19187 - DNA, 25 bp, Homo sapien
ggatactgagccctcgctgtggccc

SEQ ID NO: 19188 - DNA, 25 bp, Homo sapien
accccaaagaggtggtgtctctgca

SEQ ID NO: 19189 - DNA, 25 bp, Homo sapien
tgcatggtgggtcctcgctgtggcc

SEQ ID NO: 19190 - DNA, 25 bp, Homo sapien
ttcaccccaaagaggtggtgtctct

SEQ ID NO: 19191 - DNA, 25 bp, Homo sapien
catttccacgtttcacctccaagag

SEQ ID NO: 19192 - DNA, 25 bp, Homo sapien
acgtttcacctccaagaggtggtgt

SEQ ID NO: 19193 - DNA, 25 bp, Homo sapien
cccaggatactgagccctcgctgtg

SEQ ID NO: 19194 - DNA, 25 bp, Homo sapien
tgtggcccgctccatttccacgttt

SEQ ID NO: 19195 - DNA, 25 bp, Homo sapien
cgctgtggcccgctccatttccacg

SEQ ID NO: 19196 - DNA, 25 bp, Homo sapien
gatactgagccctcgctgtggccca

SEQ ID NO: 19197 - DNA, 25 bp, Homo sapien
atttccacgtttcacctccaagagg

SEQ ID NO: 19198 - DNA, 25 bp, Homo sapien
tgtctcttaaaaatgcagttcccag

SEQ ID NO: 19199 - DNA, 25 bp, Homo sapien
ctgtgagtgagcctcttagccattc

SEQ ID NO: 19200 - DNA, 25 bp, Homo sapien
atatctgtaacctgtagtcctatct

SEQ ID NO: 19201 - DNA, 25 bp, Homo sapien
tctcttaaaaatgcagttcccaggc

SEQ ID NO: 19202 - DNA, 25 bp, Homo sapien
gcatatatctgtaacctgtagtcct

SEQ ID NO: 19203 - DNA, 25 bp, Homo sapien
tgagtgagcctcttagccattcctg

SEQ ID NO: 19204 - DNA, 25 bp, Homo sapien
tgtgagtgagcctcttagccattcc

SEQ ID NO: 19205 - DNA, 25 bp, Homo sapien
tcttaaaaatgcagttcccaggcct

SEQ ID NO: 19206 - DNA, 25 bp, Homo sapien
ttagccattcctggcccagttgagc

SEQ ID NO: 19207 - DNA, 25 bp, Homo sapien
tcttagccattcctggcccagttga

SEQ ID NO: 19208 - DNA, 25 bp, Homo sapien
aaatgcagttcccaggcctggaagt

SEQ ID NO: 19209 - DNA, 25 bp, Homo sapien
catggtgggtcctcgctgtggcccg

SEQ ID NO: 19210 - DNA, 25 bp, Homo sapien
ttcaccccaaagaggtggtgtctct

SEQ ID NO: 19211 - DNA, 25 bp, Homo sapien
cacactaaagatgccagctctgggg

SEQ ID NO: 19212 - DNA, 25 bp, Homo sapien
tcttaaaaatgcagttcccaggcct

SEQ ID NO: 19213 - DNA, 25 bp, Homo sapien
tggtgtctctgcatggtgggtcctc

SEQ ID NO: 19214 - DNA, 25 bp, Homo sapien
acgtttcacctccaagaggtggtgt

SEQ ID NO: 19215 - DNA, 25 bp, Homo sapien
cccaggatactgagccctcgctgtg

SEQ ID NO: 19216 - DNA, 25 bp, Homo sapien
atttccacgtttcacctccaagagg

SEQ ID NO: 19217 - DNA, 25 bp, Homo sapien
tgtggcccgctccatttccacgttt

SEQ ID NO: 19218 - DNA, 25 bp, Homo sapien
gatactgagccctcgctgtggccca

SEQ ID NO: 19219 - DNA, 25 bp, Homo sapien
ctgtgagtgagcctcttagccattc

SEQ ID NO: 19220 - DNA, 25 bp, Homo sapien
acaagaagcaatagtaaaccagccc

SEQ ID NO: 19221 - DNA, 25 bp, Homo sapien
gacccattttgaggatgtgagaccc

SEQ ID NO: 19222 - DNA, 25 bp, Homo sapien
gtagcttctgttagggcccaaataa

SEQ ID NO: 19223 - DNA, 25 bp, Homo sapien
ttgatatggctctgtacaagaagca

SEQ ID NO: 19224 - DNA, 25 bp, Homo sapien
ggagaaaccaccactaggctatgcc

SEQ ID NO: 19225 - DNA, 25 bp, Homo sapien
tcccatctgaggtaaagactgaggc

SEQ ID NO: 19226 - DNA, 25 bp, Homo sapien
accctcaggtcttgagcatggggca

SEQ ID NO: 19227 - DNA, 25 bp, Homo sapien
cacatggagctcacagaggaagtcc

SEQ ID NO: 19228 - DNA, 25 bp, Homo sapien
ggcagagatggttcaaatttgggta

SEQ ID NO: 19229 - DNA, 25 bp, Homo sapien
ggatctggaatctggggacccattt

SEQ ID NO: 19230 - DNA, 25 bp, Homo sapien
aggtaggccctgtgattcctgagaa

SEQ ID NO: 19231 - DNA, 25 bp, Homo sapien
ttgatatctaccacagattgagatc

SEQ ID NO: 19232 - DNA, 25 bp, Homo sapien
caaatgctgggccactagtgatgcc

SEQ ID NO: 19233 - DNA, 25 bp, Homo sapien
cggttactgccgcttgagacagaca

SEQ ID NO: 19234 - DNA, 25 bp, Homo sapien
accacagattgagatctgcagccgc

SEQ ID NO: 19235 - DNA, 25 bp, Homo sapien
ctgccgcttgagacagacaacttct

SEQ ID NO: 19236 - DNA, 25 bp, Homo sapien
ggccactagtgatgccagagctgct

SEQ ID NO: 19237 - DNA, 25 bp, Homo sapien
tataaaaaagggttgaactgcttga

SEQ ID NO: 19238 - DNA, 25 bp, Homo sapien
tacagcacagtgctgtgaaggtatt

SEQ ID NO: 19239 - DNA, 25 bp, Homo sapien
aagggttgaactgcttgatatctac

SEQ ID NO: 19240 - DNA, 25 bp, Homo sapien
attgataaatacagcacagtgctgt

SEQ ID NO: 19241 - DNA, 25 bp, Homo sapien
attgagatctgcagccgcggttact

SEQ ID NO: 19242 - DNA, 25 bp, Homo sapien
ctgagtaatcaacacggatgtggaa

SEQ ID NO: 19243 - DNA, 25 bp, Homo sapien
tgcacctgcagagaaagagaagaat

SEQ ID NO: 19244 - DNA, 25 bp, Homo sapien
agtgggaagagccaagtattttgaa

SEQ ID NO: 19245 - DNA, 25 bp, Homo sapien
atgaatcagatagcaccaacagggc

SEQ ID NO: 19246 - DNA, 25 bp, Homo sapien
ttagacctcacaggacaaagtcaac

SEQ ID NO: 19247 - DNA, 25 bp, Homo sapien
tgaggtcatcaataagaaagcagct

SEQ ID NO: 19248 - DNA, 25 bp, Homo sapien
gcagggtcactaaggcatgaaaata

SEQ ID NO: 19249 - DNA, 25 bp, Homo sapien
ggcatgaaaatagaggttcctcctt

SEQ ID NO: 19250 - DNA, 25 bp, Homo sapien
gaaagagaagaatcagacctacaat

SEQ ID NO: 19251 - DNA, 25 bp, Homo sapien
ggcaatcacccagacagagactttt

SEQ ID NO: 19252 - DNA, 25 bp, Homo sapien
taaaagtccaagtaactgagtaatc

SEQ ID NO: 19253 - DNA, 25 bp, Homo sapien
acaacctggttttggtagatcgcaa

SEQ ID NO: 19254 - DNA, 25 bp, Homo sapien
aatgagcaataaaagcagtctgtcc

SEQ ID NO: 19255 - DNA, 25 bp, Homo sapien
ctaagcagattaattggaaccagac

SEQ ID NO: 19256 - DNA, 25 bp, Homo sapien
tataggcaaaaatgttatgatactc

SEQ ID NO: 19257 - DNA, 25 bp, Homo sapien
actaaaagaatgtgacaacctggtt

SEQ ID NO: 19258 - DNA, 25 bp, Homo sapien
agaatgacgatacatccctaagtag

SEQ ID NO: 19259 - DNA, 25 bp, Homo sapien
ccacagcatctgattaatgagcaat

SEQ ID NO: 19260 - DNA, 25 bp, Homo sapien
agtctgtccaggtaacaactaaaag

SEQ ID NO: 19261 - DNA, 25 bp, Homo sapien
aattggaaccagacatgtgaagatc

SEQ ID NO: 19262 - DNA, 25 bp, Homo sapien
atctaggaataagtggcagaagctt

SEQ ID NO: 19263 - DNA, 25 bp, Homo sapien
ttggtagatcgcaaagaaaacttat

SEQ ID NO: 19264 - DNA, 25 bp, Homo sapien
ttggtccgaccttatgaatagcaca

SEQ ID NO: 19265 - DNA, 25 bp, Homo sapien
attatcttagggaatacagtggctc

SEQ ID NO: 19266 - DNA, 25 bp, Homo sapien
acagtggctcaagcttgtggttgaa

SEQ ID NO: 19267 - DNA, 25 bp, Homo sapien
tgaagcaatcttaggaacaatagtc

SEQ ID NO: 19268 - DNA, 25 bp, Homo sapien
tcataacttcagtgtgggtaggcag

SEQ ID NO: 19269 - DNA, 25 bp, Homo sapien
ttatgaatagcacagatacgtcctc

SEQ ID NO: 19270 - DNA, 25 bp, Homo sapien
tagatgacccaagtaacagacagtg

SEQ ID NO: 19271 - DNA, 25 bp, Homo sapien
aagggatacccatgtctgctcagaa

SEQ ID NO: 19272 - DNA, 25 bp, Homo sapien
acagacagtgttgacgtctagtcat

SEQ ID NO: 19273 - DNA, 25 bp, Homo sapien
gagtaaatgaataaagggataccca

SEQ ID NO: 19274 - DNA, 25 bp, Homo sapien
gtggttgaagttgatcaagccctgc

SEQ ID NO: 19275 - DNA, 25 bp, Homo sapien
ctttgacctaagaaatagttgatgg

SEQ ID NO: 19276 - DNA, 25 bp, Homo sapien
tgatgctcctcaaagtccatgatga

SEQ ID NO: 19277 - DNA, 25 bp, Homo sapien
gactaatgggattattacaaaggaa

SEQ ID NO: 19278 - DNA, 25 bp, Homo sapien
agagaaatggaaataaatgtccgtt

SEQ ID NO: 19279 - DNA, 25 bp, Homo sapien
cgaaggaaacaggattgaagatttt

SEQ ID NO: 19280 - DNA, 25 bp, Homo sapien
ttagaacactaatagaaaccactag

SEQ ID NO: 19281 - DNA, 25 bp, Homo sapien
tatactggccagatctttgctaaag

SEQ ID NO: 19282 - DNA, 25 bp, Homo sapien
agaacaattaagatggattaaaatc

SEQ ID NO: 19283 - DNA, 25 bp, Homo sapien
tctatgaattgtgactaatgggatt

SEQ ID NO: 19284 - DNA, 25 bp, Homo sapien
agtccatgatgatttggggaaaagg

SEQ ID NO: 19285 - DNA, 25 bp, Homo sapien
aaggcataaaacatgtatcccatat

SEQ ID NO: 19286 - DNA, 25 bp, Homo sapien
aattggatgggatgtatgcacagct

SEQ ID NO: 19287 - DNA, 25 bp, Homo sapien
aactggggatgctattcaatacctt

SEQ ID NO: 19288 - DNA, 25 bp, Homo sapien
ttaggtagatgtggctcaaaaactg

SEQ ID NO: 19289 - DNA, 25 bp, Homo sapien
gaagacccatctctaggaaaacggc

SEQ ID NO: 19290 - DNA, 25 bp, Homo sapien
gaggtcctccagcagatggttcagt

SEQ ID NO: 19291 - DNA, 25 bp, Homo sapien
atgcacagctcataaatgggtcctc

SEQ ID NO: 19292 - DNA, 25 bp, Homo sapien
aacagaaggactgtgttggacacaa

SEQ ID NO: 19293 - DNA, 25 bp, Homo sapien
ggattggactgaattggatggaatt

SEQ ID NO: 19294 - DNA, 25 bp, Homo sapien
tagtgctgaggctaccaaacctgac

SEQ ID NO: 19295 - DNA, 25 bp, Homo sapien
aggtgctccgagaaagaaccctccc

SEQ ID NO: 19296 - DNA, 25 bp, Homo sapien
aaaacggctggtgcattgctcttgc

SEQ ID NO: 19297 - DNA, 25 bp, Homo sapien
tacctgaggctcagggtagttctgt

SEQ ID NO: 19298 - DNA, 25 bp, Homo sapien
acaggcctgaggtggccttttctga

SEQ ID NO: 19299 - DNA, 25 bp, Homo sapien
ttgaggttggcacttctgttgaaca

SEQ ID NO: 19300 - DNA, 25 bp, Homo sapien
acactggaagtcatgggcctgttat

SEQ ID NO: 19301 - DNA, 25 bp, Homo sapien
tcaccacaagcccagagagggtctc

SEQ ID NO: 19302 - DNA, 25 bp, Homo sapien
cttctaggaagcgaatgttgaggtt

SEQ ID NO: 19303 - DNA, 25 bp, Homo sapien
cttggcactgatgtgctaggccttt

SEQ ID NO: 19304 - DNA, 25 bp, Homo sapien
tgcttacaaagtgatgaggtcaccc

SEQ ID NO: 19305 - DNA, 25 bp, Homo sapien
gagggtctccctgttaagaatcttc

SEQ ID NO: 19306 - DNA, 25 bp, Homo sapien
caccgggagggtgaatctgatttct

SEQ ID NO: 19307 - DNA, 25 bp, Homo sapien
tcctccaggtcacgaagccggcagg

SEQ ID NO: 19308 - DNA, 25 bp, Homo sapien
ctctcggtgggtgccggtctctgca

SEQ ID NO: 19309 - DNA, 25 bp, Homo sapien
ttgaaatgcgcacggtcccgccggc

SEQ ID NO: 19310 - DNA, 25 bp, Homo sapien
ttctctttgagaaaacgtggtgggc

SEQ ID NO: 19311 - DNA, 25 bp, Homo sapien
ctttttcttgattggacttgatccc

SEQ ID NO: 19312 - DNA, 25 bp, Homo sapien
tgacaccggagctcgccgtgcgctc

SEQ ID NO: 19313 - DNA, 25 bp, Homo sapien
caggactgggactgcttacgttttg

SEQ ID NO: 19314 - DNA, 25 bp, Homo sapien
cgagacgctcgcaccgtgcttgggc

SEQ ID NO: 19315 - DNA, 25 bp, Homo sapien
atcggaggagctgacgagtagatct

SEQ ID NO: 19316 - DNA, 25 bp, Homo sapien
acctgatgcgttcgggatgcctttc

SEQ ID NO: 19317 - DNA, 25 bp, Homo sapien
tgccggtctctgcacctgatgcgtt

SEQ ID NO: 19318 - DNA, 25 bp, Homo sapien
cacgcgcttgaaatgcgcacggtcc

SEQ ID NO: 19319 - DNA, 25 bp, Homo sapien
gaatgaagtgctaaaacagaggttt

SEQ ID NO: 19320 - DNA, 25 bp, Homo sapien
agtttagaaagggtgaccaacatac

SEQ ID NO: 19321 - DNA, 25 bp, Homo sapien
gatgcttcaaatagggaaacaaacc

SEQ ID NO: 19322 - DNA, 25 bp, Homo sapien
agctgagagcaaagaatgactaatt

SEQ ID NO: 19323 - DNA, 25 bp, Homo sapien
tggcaggggcaaatgtaaataagtt

SEQ ID NO: 19324 - DNA, 25 bp, Homo sapien
ttccagcctagagagagataacttt

SEQ ID NO: 19325 - DNA, 25 bp, Homo sapien
attctactggaggatgcttcaaata

SEQ ID NO: 19326 - DNA, 25 bp, Homo sapien
agaaacaatgctgagccttagggat

SEQ ID NO: 19327 - DNA, 25 bp, Homo sapien
aaagagaaaactgagaggtgctgca

SEQ ID NO: 19328 - DNA, 25 bp, Homo sapien
taagaacacaatggaatttaagctg

SEQ ID NO: 19329 - DNA, 25 bp, Homo sapien
gttgaacacctagtatggacaaaac

SEQ ID NO: 19330 - DNA, 25 bp, Homo sapien
gaccacaccactgcagggcagccta

SEQ ID NO: 19331 - DNA, 25 bp, Homo sapien
ggcctcctgctcttcatttgtttca

SEQ ID NO: 19332 - DNA, 25 bp, Homo sapien
cactgcagggcagcctaggcgacaa

SEQ ID NO: 19333 - DNA, 25 bp, Homo sapien
aaaaagattcacaggtgatggtgat

SEQ ID NO: 19334 - DNA, 25 bp, Homo sapien
atgttggggcctcctgctcttcatt

SEQ ID NO: 19335 - DNA, 25 bp, Homo sapien
acaagagcgaaacgcttacaaaaaa

SEQ ID NO: 19336 - DNA, 25 bp, Homo sapien
acaccactgcagggcagcctaggcg

SEQ ID NO: 19337 - DNA, 25 bp, Homo sapien
aaaaaagattcacaggtgatggtga

SEQ ID NO: 19338 - DNA, 25 bp, Homo sapien
cgacaagagcgaaacgcttacaaaa

SEQ ID NO: 19339 - DNA, 25 bp, Homo sapien
gacaagagcgaaacgcttacaaaaa

SEQ ID NO: 19340 - DNA, 25 bp, Homo sapien
aaaaaaagattcacaggtgatggtg

SEQ ID NO: 19341 - DNA, 25 bp, Homo sapien
aaatgcaggaatagttagtgtgaag

SEQ ID NO: 19342 - DNA, 25 bp, Homo sapien
tactataagtagagtttctggtatc

SEQ ID NO: 19343 - DNA, 25 bp, Homo sapien
gtttctggtatcttgactcaattcc

SEQ ID NO: 19344 - DNA, 25 bp, Homo sapien
ataaacataactagccaaacccttg

SEQ ID NO: 19345 - DNA, 25 bp, Homo sapien
ttagtgtgaaggaagtcaggttcta

SEQ ID NO: 19346 - DNA, 25 bp, Homo sapien
tcattgagcaaatcttagttaagac

SEQ ID NO: 19347 - DNA, 25 bp, Homo sapien
gttttcaatagatctcggcctccca

SEQ ID NO: 19348 - DNA, 25 bp, Homo sapien
tacagttctgtacgcttccattctc

SEQ ID NO: 19349 - DNA, 25 bp, Homo sapien
tccactcaatcatgctatcgggctt

SEQ ID NO: 19350 - DNA, 25 bp, Homo sapien
ggtgcccagctgttttcaatagatc

SEQ ID NO: 19351 - DNA, 25 bp, Homo sapien
ttgcaaagtgggatcttactataag

SEQ ID NO: 19352 - DNA, 25 bp, Homo sapien
aatatatttacgacttgagctttgt

SEQ ID NO: 19353 - DNA, 25 bp, Homo sapien
tagtataatatgattacacttccct

SEQ ID NO: 19354 - DNA, 25 bp, Homo sapien
tataactgtcattgggttctctcca

SEQ ID NO: 19355 - DNA, 25 bp, Homo sapien
atatgctgtttacattatgccaatg

SEQ ID NO: 19356 - DNA, 25 bp, Homo sapien
aatgaaaatgatcatgtagctttct

SEQ ID NO: 19357 - DNA, 25 bp, Homo sapien
ccaaattctcaaagaactgtaaatc

SEQ ID NO: 19358 - DNA, 25 bp, Homo sapien
gtcattgggttctctccaaattctc

SEQ ID NO: 19359 - DNA, 25 bp, Homo sapien
ctgtctctggagttaattgctttaa

SEQ ID NO: 19360 - DNA, 25 bp, Homo sapien
acgacttgagctttgtagtataata

SEQ ID NO: 19361 - DNA, 25 bp, Homo sapien
ttctgttttggatatcttgacttcc

SEQ ID NO: 19362 - DNA, 25 bp, Homo sapien
tatacacctttttgctgtctctgga

SEQ ID NO: 19363 - DNA, 25 bp, Homo sapien
aaatgtggaggctctgctaagcact

SEQ ID NO: 19364 - DNA, 25 bp, Homo sapien
ggaaagttgcccatatcagatatct

SEQ ID NO: 19365 - DNA, 25 bp, Homo sapien
ttctggccacttgatctgggcagga

SEQ ID NO: 19366 - DNA, 25 bp, Homo sapien
tgctcagagtgcagtgctcaatctt

SEQ ID NO: 19367 - DNA, 25 bp, Homo sapien
tgagcgccaggattccaacttccct

SEQ ID NO: 19368 - DNA, 25 bp, Homo sapien
tctggcaacttgtaaatgtggaggc

SEQ ID NO: 19369 - DNA, 25 bp, Homo sapien
tgtgcccgttgaaggatgccacctc

SEQ ID NO: 19370 - DNA, 25 bp, Homo sapien
gaagcaaaatggcatgaagctctgc

SEQ ID NO: 19371 - DNA, 25 bp, Homo sapien
gaagctctgctgacctgtgataact

SEQ ID NO: 19372 - DNA, 25 bp, Homo sapien
tggctcgcctgaactgtgaaaggtc

SEQ ID NO: 19373 - DNA, 25 bp, Homo sapien
actggcagccatccacttcaggtgt

SEQ ID NO: 19374 - DNA, 25 bp, Homo sapien
accacggcaatcagcacagaatatt

SEQ ID NO: 19375 - DNA, 25 bp, Homo sapien
attacttgaaaacgactatgccctt

SEQ ID NO: 19376 - DNA, 25 bp, Homo sapien
ttttgcattgctcttacaccacggc

SEQ ID NO: 19377 - DNA, 25 bp, Homo sapien
ttataattgcatagcttcaagcttc

SEQ ID NO: 19378 - DNA, 25 bp, Homo sapien
tatgaaccgatttgaaaaactcaat

SEQ ID NO: 19379 - DNA, 25 bp, Homo sapien
ccatgtccagatgtgtggagttttc

SEQ ID NO: 19380 - DNA, 25 bp, Homo sapien
tattgcctaggatttcatatgaacc

SEQ ID NO: 19381 - DNA, 25 bp, Homo sapien
acactaagtgagcaatcagttctgc

SEQ ID NO: 19382 - DNA, 25 bp, Homo sapien
tggagttttcccacacactaagtga

SEQ ID NO: 19383 - DNA, 25 bp, Homo sapien
agtggaaaaagttgacaggtctgta

SEQ ID NO: 19384 - DNA, 25 bp, Homo sapien
ttacaccacggcaatcagcacagaa

SEQ ID NO: 19385 - DNA, 25 bp, Homo sapien
atctgggcttgacttcctgcgtcac

SEQ ID NO: 19386 - DNA, 25 bp, Homo sapien
ctctcatcggcgaggtcgccactgt

SEQ ID NO: 19387 - DNA, 25 bp, Homo sapien
gacgcctcaccgcatctgggcttga

SEQ ID NO: 19388 - DNA, 25 bp, Homo sapien
gacttcctgcgtcactggggcgacc

SEQ ID NO: 19389 - DNA, 25 bp, Homo sapien
agcgcccactgctgggtccaaggct

SEQ ID NO: 19390 - DNA, 25 bp, Homo sapien
caccacctcagcaaagggcttgtgt

SEQ ID NO: 19391 - DNA, 25 bp, Homo sapien
cacgccttcgtggatcaggacgact

SEQ ID NO: 19392 - DNA, 25 bp, Homo sapien
tacctgcccttagcaagcgtggaga

SEQ ID NO: 19393 - DNA, 25 bp, Homo sapien
taatgctagggagggcgaacctctc

SEQ ID NO: 19394 - DNA, 25 bp, Homo sapien
aaagtcagccaactacctgccctta

SEQ ID NO: 19395 - DNA, 25 bp, Homo sapien
ccaaagtgacaactaatgctaggga

SEQ ID NO: 19396 - DNA, 25 bp, Homo sapien
taaataaaatagcttgtgcctgtgc

SEQ ID NO: 19397 - DNA, 25 bp, Homo sapien
tgtgcctgtgctgataagaattact

SEQ ID NO: 19398 - DNA, 25 bp, Homo sapien
agaaaggaatcttaccagcagacaa

SEQ ID NO: 19399 - DNA, 25 bp, Homo sapien
tttatgtccaagaattggtgggttc

SEQ ID NO: 19400 - DNA, 25 bp, Homo sapien
tcgctaaattccaacaaagacagta

SEQ ID NO: 19401 - DNA, 25 bp, Homo sapien
cagcagacaagtatggaatgttcat

SEQ ID NO: 19402 - DNA, 25 bp, Homo sapien
taaattggtgtgcataaaaacatac

SEQ ID NO: 19403 - DNA, 25 bp, Homo sapien
gggaaaggggatgttatcatcctct

SEQ ID NO: 19404 - DNA, 25 bp, Homo sapien
gtatatatgccctaagaaaggaatc

SEQ ID NO: 19405 - DNA, 25 bp, Homo sapien
tggccacgattaagagtttttaagc

SEQ ID NO: 19406 - DNA, 25 bp, Homo sapien
actaagggatatattctcgtgaatt

SEQ ID NO: 19407 - DNA, 25 bp, Homo sapien
acaggcgtgaacctttcaactttta

SEQ ID NO: 19408 - DNA, 25 bp, Homo sapien
gtattttcccatcccttgattgaac

SEQ ID NO: 19409 - DNA, 25 bp, Homo sapien
caggcgtgaacctttcaacttttaa

SEQ ID NO: 19410 - DNA, 25 bp, Homo sapien
aagtgcgtgctacgatgtctggcta

SEQ ID NO: 19411 - DNA, 25 bp, Homo sapien
tataagtgcgtgctacgatgtctgg

SEQ ID NO: 19412 - DNA, 25 bp, Homo sapien
ttataagtgcgtgctacgatgtctg

SEQ ID NO: 19413 - DNA, 25 bp, Homo sapien
ttcccatcccttgattgaacatttg

SEQ ID NO: 19414 - DNA, 25 bp, Homo sapien
taagtgcgtgctacgatgtctggct

SEQ ID NO: 19415 - DNA, 25 bp, Homo sapien
ataagtgcgtgctacgatgtctggc

SEQ ID NO: 19416 - DNA, 25 bp, Homo sapien
atcccttgattgaacatttgggttt

SEQ ID NO: 19417 - DNA, 25 bp, Homo sapien
ccatcccttgattgaacatttgggt

SEQ ID NO: 19418 - DNA, 25 bp, Homo sapien
acaggcgtgaacctttcaactttta

SEQ ID NO: 19419 - DNA, 25 bp, Homo sapien
ttataagtgcgtgctacgatgtctg

SEQ ID NO: 19420 - DNA, 25 bp, Homo sapien
aagtgcgtgctacgatgtctggcta

SEQ ID NO: 19421 - DNA, 25 bp, Homo sapien
ataagtgcgtgctacgatgtctggc

SEQ ID NO: 19422 - DNA, 25 bp, Homo sapien
tataagtgcgtgctacgatgtctgg

SEQ ID NO: 19423 - DNA, 25 bp, Homo sapien
taagtgcgtgctacgatgtctggct

SEQ ID NO: 19424 - DNA, 25 bp, Homo sapien
ttcccatcccttgattgaacatttg

SEQ ID NO: 19425 - DNA, 25 bp, Homo sapien
aggcgcctgccatgatgcccaacta

SEQ ID NO: 19426 - DNA, 25 bp, Homo sapien
atcccttgattgaacatttgggttt

SEQ ID NO: 19427 - DNA, 25 bp, Homo sapien
gtattttcccatcccttgattgaac

SEQ ID NO: 19428 - DNA, 25 bp, Homo sapien
gcgcctgccatgatgcccaactaat

SEQ ID NO: 19429 - DNA, 25 bp, Homo sapien
tggaggccaagctagacaaaacttt

SEQ ID NO: 19430 - DNA, 25 bp, Homo sapien
ggcagaggcttcaaacgccagcctt

SEQ ID NO: 19431 - DNA, 25 bp, Homo sapien
actcctggagccctctgagcttttg

SEQ ID NO: 19432 - DNA, 25 bp, Homo sapien
gtccacttgggacaacagtcactct

SEQ ID NO: 19433 - DNA, 25 bp, Homo sapien
cttctgttagccaggtgaaggctgc

SEQ ID NO: 19434 - DNA, 25 bp, Homo sapien
aagcgatctagtagaggacaaactt

SEQ ID NO: 19435 - DNA, 25 bp, Homo sapien
tcccagtgcattgcctggagggcct

SEQ ID NO: 19436 - DNA, 25 bp, Homo sapien
tatattttccactggaggaggggac

SEQ ID NO: 19437 - DNA, 25 bp, Homo sapien
aacgccagccttgatctaagatatc

SEQ ID NO: 19438 - DNA, 25 bp, Homo sapien
atcctggtgaatgagaagcgatcta

SEQ ID NO: 19439 - DNA, 25 bp, Homo sapien
acttccttgggagattccagtccgc

SEQ ID NO: 19440 - DNA, 25 bp, Homo sapien
cctggctctttggatgagagaacct

SEQ ID NO: 19441 - DNA, 25 bp, Homo sapien
ttcccactgaatccggctggcctta

SEQ ID NO: 19442 - DNA, 25 bp, Homo sapien
actggcttgtaaaggatagactgtc

SEQ ID NO: 19443 - DNA, 25 bp, Homo sapien
tgtgcccagcgtcatgtaccttttc

SEQ ID NO: 19444 - DNA, 25 bp, Homo sapien
attgtgtctagtgggtcagctccca

SEQ ID NO: 19445 - DNA, 25 bp, Homo sapien
taatactgttggaaccctggctctt

SEQ ID NO: 19446 - DNA, 25 bp, Homo sapien
caggtggggatacacagtatttaaa

SEQ ID NO: 19447 - DNA, 25 bp, Homo sapien
aacgtggaccctccaggcattaatc

SEQ ID NO: 19448 - DNA, 25 bp, Homo sapien
atagactgtcctggggtgacaccat

SEQ ID NO: 19449 - DNA, 25 bp, Homo sapien
cccttcaagagatggagtttaaccc

SEQ ID NO: 19450 - DNA, 25 bp, Homo sapien
taaatgctggcatacttgtagacct

SEQ ID NO: 19451 - DNA, 25 bp, Homo sapien
gtttataaggctgcagcatctggcc

SEQ ID NO: 19452 - DNA, 25 bp, Homo sapien
ggttgacttcaactcatcattagag

SEQ ID NO: 19453 - DNA, 25 bp, Homo sapien
catctggccttttgctgactttatc

SEQ ID NO: 19454 - DNA, 25 bp, Homo sapien
ttgaccatgaaccttaacatcactt

SEQ ID NO: 19455 - DNA, 25 bp, Homo sapien
ttgttccagccttactgaccttctg

SEQ ID NO: 19456 - DNA, 25 bp, Homo sapien
agagtacaactcaaaataccatttc

SEQ ID NO: 19457 - DNA, 25 bp, Homo sapien
gacctggtgacccttccgcctcggc

SEQ ID NO: 19458 - DNA, 25 bp, Homo sapien
agaaagctttcccttgaccatgaac

SEQ ID NO: 19459 - DNA, 25 bp, Homo sapien
gatctgtaagtttttaattcgtgtc

SEQ ID NO: 19460 - DNA, 25 bp, Homo sapien
ttgacttagtttataaggctgcagc

SEQ ID NO: 19461 - DNA, 25 bp, Homo sapien
gctgactttatcagcaccagcttga

SEQ ID NO: 19462 - DNA, 25 bp, Homo sapien
ctgtgcctggccaaagccatgggtt

SEQ ID NO: 19463 - DNA, 25 bp, Homo sapien
tggtgagacggagatttgttgccca

SEQ ID NO: 19464 - DNA, 25 bp, Homo sapien
aaaaaataccacctgcgtcataaac

SEQ ID NO: 19465 - DNA, 25 bp, Homo sapien
caaaagaaggcaatatattaatagc

SEQ ID NO: 19466 - DNA, 25 bp, Homo sapien
ttgtaaggaatcataaaaggatgca

SEQ ID NO: 19467 - DNA, 25 bp, Homo sapien
attccacttcaaaagaaggcaatat

SEQ ID NO: 19468 - DNA, 25 bp, Homo sapien
ttcatggataaaagccacggttttc

SEQ ID NO: 19469 - DNA, 25 bp, Homo sapien
gcaaaaacgccacacaactggaaaa

SEQ ID NO: 19470 - DNA, 25 bp, Homo sapien
ctgcgtcataaacttgtaaggaatc

SEQ ID NO: 19471 - DNA, 25 bp, Homo sapien
taatagcttcatggataaaagccac

SEQ ID NO: 19472 - DNA, 25 bp, Homo sapien
gttgagtcctaatgggcaaaaacgc

SEQ ID NO: 19473 - DNA, 25 bp, Homo sapien
cctatctcagagaccaagattttaa

SEQ ID NO: 19474 - DNA, 25 bp, Homo sapien
gctgccaaggctcatatagatccaa

SEQ ID NO: 19475 - DNA, 25 bp, Homo sapien
taccttgcctccatggaagggaact

SEQ ID NO: 19476 - DNA, 25 bp, Homo sapien
gtaatgtgagaacttaatacaccat

SEQ ID NO: 19477 - DNA, 25 bp, Homo sapien
tcagcaacatagtaatgtgagaact

SEQ ID NO: 19478 - DNA, 25 bp, Homo sapien
aatagctctggaaggtgacacaaaa

SEQ ID NO: 19479 - DNA, 25 bp, Homo sapien
tgtttatagaatagctctggaaggt

SEQ ID NO: 19480 - DNA, 25 bp, Homo sapien
gatccaatttgtcagatacagagat

SEQ ID NO: 19481 - DNA, 25 bp, Homo sapien
aatagttattaagctgccaaggctc

SEQ ID NO: 19482 - DNA, 25 bp, Homo sapien
gtgacacaaaagactaccttgcctc

SEQ ID NO: 19483 - DNA, 25 bp, Homo sapien
tcacatgaaataaactgcgtcagtc

SEQ ID NO: 19484 - DNA, 25 bp, Homo sapien
tgtacacacaggcagagagatccaa

SEQ ID NO: 19485 - DNA, 25 bp, Homo sapien
tccacaaccaagtcgagatgaagag

SEQ ID NO: 19486 - DNA, 25 bp, Homo sapien
taacaggacagagtagtaaagtgga

SEQ ID NO: 19487 - DNA, 25 bp, Homo sapien
gatgaagagggagcatgtacacaca

SEQ ID NO: 19488 - DNA, 25 bp, Homo sapien
aaaagtagtggcttctgttccttgc

SEQ ID NO: 19489 - DNA, 25 bp, Homo sapien
tgaatttggtcaagtcacctgaatt

SEQ ID NO: 19490 - DNA, 25 bp, Homo sapien
tgccagcatataaaaactcacggaa

SEQ ID NO: 19491 - DNA, 25 bp, Homo sapien
gagacaagacttcggttccacacct

SEQ ID NO: 19492 - DNA, 25 bp, Homo sapien
atacacacagacatggggaggaaga

SEQ ID NO: 19493 - DNA, 25 bp, Homo sapien
gagatccaaataaaagagaggagac

SEQ ID NO: 19494 - DNA, 25 bp, Homo sapien
actgagggaattagatgattgatgt

SEQ ID NO: 19495 - DNA, 25 bp, Homo sapien
acaccaagagtagggctgcaatttc

SEQ ID NO: 19496 - DNA, 25 bp, Homo sapien
tgaaaccagatacagcttgatcagg

SEQ ID NO: 19497 - DNA, 25 bp, Homo sapien
ctcttgaaataaaactggctcctgc

SEQ ID NO: 19498 - DNA, 25 bp, Homo sapien
tttcaaactgggtcatgaggcttca

SEQ ID NO: 19499 - DNA, 25 bp, Homo sapien
gtctctacattgaacacccaccagt

SEQ ID NO: 19500 - DNA, 25 bp, Homo sapien
aattataactccaagggaaagagga

SEQ ID NO: 19501 - DNA, 25 bp, Homo sapien
acccgagagggaaattataactcca

SEQ ID NO: 19502 - DNA, 25 bp, Homo sapien
cttaaaacatgtgaagtctggcatt

SEQ ID NO: 19503 - DNA, 25 bp, Homo sapien
accagtcaagacaaacccgagaggg

SEQ ID NO: 19504 - DNA, 25 bp, Homo sapien
gttccagaaaataccaatcacccat

SEQ ID NO: 19505 - DNA, 25 bp, Homo sapien
gacctgtaggtggtgaagctcagct

SEQ ID NO: 19506 - DNA, 25 bp, Homo sapien
accgtgcggcggagagtcgttcgct

SEQ ID NO: 19507 - DNA, 25 bp, Homo sapien
agcgaacgactctccgccgcacggt

SEQ ID NO: 19508 - DNA, 25 bp, Homo sapien
atgatccagtacattcaccagtttc

SEQ ID NO: 19509 - DNA, 25 bp, Homo sapien
gtaactaacagatgaaatcccattg

SEQ ID NO: 19510 - DNA, 25 bp, Homo sapien
ttctgtctcagcaattacatggtcc

SEQ ID NO: 19511 - DNA, 25 bp, Homo sapien
tggtccacatgggaaaataagagac

SEQ ID NO: 19512 - DNA, 25 bp, Homo sapien
aatcccattgaaaaggtgggtgaaa

SEQ ID NO: 19513 - DNA, 25 bp, Homo sapien
tgggtgaaagacttaatcgccgcat

SEQ ID NO: 19514 - DNA, 25 bp, Homo sapien
tccacatgggaaaataagagactca

SEQ ID NO: 19515 - DNA, 25 bp, Homo sapien
gtctcagcaattacatggtccacat

SEQ ID NO: 19516 - DNA, 25 bp, Homo sapien
aaaggtgggtgaaagacttaatcgc

SEQ ID NO: 19517 - DNA, 25 bp, Homo sapien
gtgaaagacttaatcgccgcatgtt

SEQ ID NO: 19518 - DNA, 25 bp, Homo sapien
aagagactcacagtaactaacagat

SEQ ID NO: 19519 - DNA, 25 bp, Homo sapien
catttatgagaagacacaaatagtt

SEQ ID NO: 19520 - DNA, 25 bp, Homo sapien
ggcataaccgcatcacactaactaa

SEQ ID NO: 19521 - DNA, 25 bp, Homo sapien
aaaggaacaataaaggcaagagtta

SEQ ID NO: 19522 - DNA, 25 bp, Homo sapien
ttcaagaagcatctagtgtagggaa

SEQ ID NO: 19523 - DNA, 25 bp, Homo sapien
tgaaattttaaggaggcataaccgc

SEQ ID NO: 19524 - DNA, 25 bp, Homo sapien
tgctgcattgcccatccagtgcttg

SEQ ID NO: 19525 - DNA, 25 bp, Homo sapien
aagtatagaacattttggccaaaag

SEQ ID NO: 19526 - DNA, 25 bp, Homo sapien
aaggcaagagttatagacacagatt

SEQ ID NO: 19527 - DNA, 25 bp, Homo sapien
gtgcttgctccactacaccttgtag

SEQ ID NO: 19528 - DNA, 25 bp, Homo sapien
agcatctagtgtagggaagtgactt

SEQ ID NO: 19529 - DNA, 25 bp, Homo sapien
ttggccaaaaggaatttcaagaagc

SEQ ID NO: 19530 - DNA, 25 bp, Homo sapien
aaatgcacaaaactcgacatcacta

SEQ ID NO: 19531 - DNA, 25 bp, Homo sapien
ataaaaataatatcgcagtcttgac

SEQ ID NO: 19532 - DNA, 25 bp, Homo sapien
taaatggtcttttatggcccctgcc

SEQ ID NO: 19533 - DNA, 25 bp, Homo sapien
attttctgtaggattgtttcttacc

SEQ ID NO: 19534 - DNA, 25 bp, Homo sapien
ctcgacatcactaggattccagtct

SEQ ID NO: 19535 - DNA, 25 bp, Homo sapien
gcacaaaactcgacatcactaggat

SEQ ID NO: 19536 - DNA, 25 bp, Homo sapien
gttcttggttattggcctctccctg

SEQ ID NO: 19537 - DNA, 25 bp, Homo sapien
aaactcgacatcactaggattccag

SEQ ID NO: 19538 - DNA, 25 bp, Homo sapien
aaataatatcgcagtcttgacagaa

SEQ ID NO: 19539 - DNA, 25 bp, Homo sapien
tgtaggattgtttcttaccagcttt

SEQ ID NO: 19540 - DNA, 25 bp, Homo sapien
tggttattggcctctccctgcattc

SEQ ID NO: 19541 - DNA, 25 bp, Homo sapien
ttcagttcggcacggtcacgacagg

SEQ ID NO: 19542 - DNA, 25 bp, Homo sapien
cctgtcgtgaccgtgccgaactgaa

SEQ ID NO: 19543 - DNA, 25 bp, Homo sapien
tgctatggtccaccatccgctttgc

SEQ ID NO: 19544 - DNA, 25 bp, Homo sapien
ggagcaatatccagcccagagaaag

SEQ ID NO: 19545 - DNA, 25 bp, Homo sapien
aatcccataaatttcgtctgttttg

SEQ ID NO: 19546 - DNA, 25 bp, Homo sapien
actatgctatggtccaccatccgct

SEQ ID NO: 19547 - DNA, 25 bp, Homo sapien
cttctgggtataaaatcccataaat

SEQ ID NO: 19548 - DNA, 25 bp, Homo sapien
tctggagcaatatccagcccagaga

SEQ ID NO: 19549 - DNA, 25 bp, Homo sapien
aaggcagaagctctttttgaccaga

SEQ ID NO: 19550 - DNA, 25 bp, Homo sapien
ttgaccagagttgtattctcagctc

SEQ ID NO: 19551 - DNA, 25 bp, Homo sapien
tcagctctggagcaatatccagccc

SEQ ID NO: 19552 - DNA, 25 bp, Homo sapien
actggaaggcagaagctctttttga

SEQ ID NO: 19553 - DNA, 25 bp, Homo sapien
ttttgaccagagttgtattctcagc

SEQ ID NO: 19554 - DNA, 25 bp, Homo sapien
gaaacatgttttgcaagctttggta

SEQ ID NO: 19555 - DNA, 25 bp, Homo sapien
tatagccctttgttagaaatgatat

SEQ ID NO: 19556 - DNA, 25 bp, Homo sapien
ggcgactagaatggggctaatcttt

SEQ ID NO: 19557 - DNA, 25 bp, Homo sapien
atgatatttctaggagaccaaacag

SEQ ID NO: 19558 - DNA, 25 bp, Homo sapien
agctggttaagtgttcagtgtgcct

SEQ ID NO: 19559 - DNA, 25 bp, Homo sapien
atttagaactttgaccagctggtta

SEQ ID NO: 19560 - DNA, 25 bp, Homo sapien
aacatctgaacatcttggaaagttt

SEQ ID NO: 19561 - DNA, 25 bp, Homo sapien
taatgattataggagacagagaatg

SEQ ID NO: 19562 - DNA, 25 bp, Homo sapien
agcttcccaatgaagtcgtggctac

SEQ ID NO: 19563 - DNA, 25 bp, Homo sapien
tcagtgtgcctgaggcgactagaat

SEQ ID NO: 19564 - DNA, 25 bp, Homo sapien
caatgaagtcgtggctactcccata

SEQ ID NO: 19565 - DNA, 25 bp, Homo sapien
gagtgacgtggctagagctatattt

SEQ ID NO: 19566 - DNA, 25 bp, Homo sapien
tcatattagaaagcaaaacgagggg

SEQ ID NO: 19567 - DNA, 25 bp, Homo sapien
gaacagctggaaagatagtgaaata

SEQ ID NO: 19568 - DNA, 25 bp, Homo sapien
ataggtgagaaatgatgaagaccca

SEQ ID NO: 19569 - DNA, 25 bp, Homo sapien
aatcctatagcaatgagaagtcact

SEQ ID NO: 19570 - DNA, 25 bp, Homo sapien
tccttccgatggcacagtgggtttt

SEQ ID NO: 19571 - DNA, 25 bp, Homo sapien
gttgaggtgactgcgaatttaatcc

SEQ ID NO: 19572 - DNA, 25 bp, Homo sapien
gctgaaaacataggttgaggtgact

SEQ ID NO: 19573 - DNA, 25 bp, Homo sapien
gatagtgaaatagcataggtgagaa

SEQ ID NO: 19574 - DNA, 25 bp, Homo sapien
cttaagagtgggagacaaaaataaa

SEQ ID NO: 19575 - DNA, 25 bp, Homo sapien
tgggttttgtatggagggtattata

SEQ ID NO: 19576 - DNA, 25 bp, Homo sapien
tctatcatgccatagtgttgctatt

SEQ ID NO: 19577 - DNA, 25 bp, Homo sapien
tggaacagagtcacttgaaagtagc

SEQ ID NO: 19578 - DNA, 25 bp, Homo sapien
cagttaccacatgattgcaactttt

SEQ ID NO: 19579 - DNA, 25 bp, Homo sapien
cccggcctagcccatgttttttcta

SEQ ID NO: 19580 - DNA, 25 bp, Homo sapien
ctagggacatggaacagagtcactt

SEQ ID NO: 19581 - DNA, 25 bp, Homo sapien
ttccagtatgttgtcacgatgtaac

SEQ ID NO: 19582 - DNA, 25 bp, Homo sapien
gtaattcaaaatggcagttaccaca

SEQ ID NO: 19583 - DNA, 25 bp, Homo sapien
aagtagctgaattgtcatgtggggc

SEQ ID NO: 19584 - DNA, 25 bp, Homo sapien
ctgaattgtcatgtggggctttccc

SEQ ID NO: 19585 - DNA, 25 bp, Homo sapien
cacacaggcctagggacatggaaca

SEQ ID NO: 19586 - DNA, 25 bp, Homo sapien
tggggctttcccaagttccagtatg

SEQ ID NO: 19587 - DNA, 25 bp, Homo sapien
gtggggtgccataaagtgcatttct

SEQ ID NO: 19588 - DNA, 25 bp, Homo sapien
tatgtgtgttatgtggggtgccata

SEQ ID NO: 19589 - DNA, 25 bp, Homo sapien
ttaggtaggtcataattcgcatttt

SEQ ID NO: 19590 - DNA, 25 bp, Homo sapien
ttgcaccttaagtgtattttggaga

SEQ ID NO: 19591 - DNA, 25 bp, Homo sapien
aggtggagtcttgcttcttcaccca

SEQ ID NO: 19592 - DNA, 25 bp, Homo sapien
tcaaattgtaggttgtaaagtcatt

SEQ ID NO: 19593 - DNA, 25 bp, Homo sapien
ggatgggataggataacatagaaaa

SEQ ID NO: 19594 - DNA, 25 bp, Homo sapien
tctcacagtgagttccagccattct

SEQ ID NO: 19595 - DNA, 25 bp, Homo sapien
cccgagaaatccaccaattaagtaa

SEQ ID NO: 19596 - DNA, 25 bp, Homo sapien
gtaaagtcatttaggtaggtcataa

SEQ ID NO: 19597 - DNA, 25 bp, Homo sapien
gaaaacatcagggtaatttgcacct

SEQ ID NO: 19598 - DNA, 25 bp, Homo sapien
tgtcttaatatgtgttaaagcctga

SEQ ID NO: 19599 - DNA, 25 bp, Homo sapien
ctgtcttaatatgtgttaaagcctg

SEQ ID NO: 19600 - DNA, 25 bp, Homo sapien
atctgtcttaatatgtgttaaagcc

SEQ ID NO: 19601 - DNA, 25 bp, Homo sapien
aatctgtcttaatatgtgttaaagc

SEQ ID NO: 19602 - DNA, 25 bp, Homo sapien
aggtatgataatcccaaatctgtct

SEQ ID NO: 19603 - DNA, 25 bp, Homo sapien
ctggaattacagctgtgaccactgc

SEQ ID NO: 19604 - DNA, 25 bp, Homo sapien
gctaatcaattatcaatgaactctt

SEQ ID NO: 19605 - DNA, 25 bp, Homo sapien
acatgctaatcaattatcaatgaac

SEQ ID NO: 19606 - DNA, 25 bp, Homo sapien
tgttaaagcctgaaattatatccat

SEQ ID NO: 19607 - DNA, 25 bp, Homo sapien
gttaaagcctgaaattatatccatt

SEQ ID NO: 19608 - DNA, 25 bp, Homo sapien
gtgttaaagcctgaaattatatcca

SEQ ID NO: 19609 - DNA, 25 bp, Homo sapien
gaagaggatgcacacccgggtcttt

SEQ ID NO: 19610 - DNA, 25 bp, Homo sapien
agaggatgcacacccgggtctttgc

SEQ ID NO: 19611 - DNA, 25 bp, Homo sapien
ccctttttcgctgagaggcctgcag

SEQ ID NO: 19612 - DNA, 25 bp, Homo sapien
ataggatctccactccgccggaaag

SEQ ID NO: 19613 - DNA, 25 bp, Homo sapien
tggggcatatttagagagaccggcc

SEQ ID NO: 19614 - DNA, 25 bp, Homo sapien
tctgaataggatctccactccgccg

SEQ ID NO: 19615 - DNA, 25 bp, Homo sapien
gagaccggcccctctgaataggatc

SEQ ID NO: 19616 - DNA, 25 bp, Homo sapien
tgaataggatctccactccgccgga

SEQ ID NO: 19617 - DNA, 25 bp, Homo sapien
ctggggcatatttagagagaccggc

SEQ ID NO: 19618 - DNA, 25 bp, Homo sapien
aagccgaggaagaggatgcacaccc

SEQ ID NO: 19619 - DNA, 25 bp, Homo sapien
ctgcagttacgctgcggtgtggtcc

SEQ ID NO: 19620 - DNA, 25 bp, Homo sapien
ttaatgacctccactaaacctgaca

SEQ ID NO: 19621 - DNA, 25 bp, Homo sapien
tacaaggaaaaagccagatcagact

SEQ ID NO: 19622 - DNA, 25 bp, Homo sapien
acactctatgtatggttaaatttgc

SEQ ID NO: 19623 - DNA, 25 bp, Homo sapien
cttgcttaaaggcttctctggctcc

SEQ ID NO: 19624 - DNA, 25 bp, Homo sapien
ttctcaacacttagcagtcaggggc

SEQ ID NO: 19625 - DNA, 25 bp, Homo sapien
aaatctcacagcatctattgacttc

SEQ ID NO: 19626 - DNA, 25 bp, Homo sapien
ggcgctggccagaattaatgacctc

SEQ ID NO: 19627 - DNA, 25 bp, Homo sapien
tcaacacttagcagtcaggggcaga

SEQ ID NO: 19628 - DNA, 25 bp, Homo sapien
cagaggacagaatgccctaaatcat

SEQ ID NO: 19629 - DNA, 25 bp, Homo sapien
ttgagattactcatatgtgaccaaa

SEQ ID NO: 19630 - DNA, 25 bp, Homo sapien
taaatcatagtacaaggaaaaagcc

SEQ ID NO: 19631 - DNA, 25 bp, Homo sapien
ggcctagattcctaataagttgtgt

SEQ ID NO: 19632 - DNA, 25 bp, Homo sapien
tgtcccaaatggttgatagtgtttt

SEQ ID NO: 19633 - DNA, 25 bp, Homo sapien
cagcgtggctctttgtttgtaagac

SEQ ID NO: 19634 - DNA, 25 bp, Homo sapien
tctaaaagagttggtgtcccaaatg

SEQ ID NO: 19635 - DNA, 25 bp, Homo sapien
ttcgacctccttggcctaagtgatc

SEQ ID NO: 19636 - DNA, 25 bp, Homo sapien
gctcacaccacaatgtgtggctaat

SEQ ID NO: 19637 - DNA, 25 bp, Homo sapien
ctaatgtagtcagtctaaaagagtt

SEQ ID NO: 19638 - DNA, 25 bp, Homo sapien
ttaggagactaaaagttcagattac

SEQ ID NO: 19639 - DNA, 25 bp, Homo sapien
aagttcagattactaggcctagatt

SEQ ID NO: 19640 - DNA, 25 bp, Homo sapien
tgtagtcttcctaatgtagtcagtc

SEQ ID NO: 19641 - DNA, 25 bp, Homo sapien
tttcaacacttgttaggagactaaa

SEQ ID NO: 19642 - DNA, 25 bp, Homo sapien
ttcagccctggcagacatttgcctc

SEQ ID NO: 19643 - DNA, 25 bp, Homo sapien
aggtaggtagtaagtttgtatctcc

SEQ ID NO: 19644 - DNA, 25 bp, Homo sapien
cggaatctcactctactggagggca

SEQ ID NO: 19645 - DNA, 25 bp, Homo sapien
acagtaatactgtgagggtaggttg

SEQ ID NO: 19646 - DNA, 25 bp, Homo sapien
gcgacaatcaccaattcacacatat

SEQ ID NO: 19647 - DNA, 25 bp, Homo sapien
atagtgttcccagtgctacacacac

SEQ ID NO: 19648 - DNA, 25 bp, Homo sapien
tctttagatatgtgcgacaatcacc

SEQ ID NO: 19649 - DNA, 25 bp, Homo sapien
atgagtgctctgtgaatagtgttcc

SEQ ID NO: 19650 - DNA, 25 bp, Homo sapien
cacacatattattcagccctggcag

SEQ ID NO: 19651 - DNA, 25 bp, Homo sapien
ctagtaactaataacaaagaacaaa

SEQ ID NO: 19652 - DNA, 25 bp, Homo sapien
aaagaacaaacattcatgagtgctc

SEQ ID NO: 19653 - DNA, 25 bp, Homo sapien
attcctaatcaaacataggtggttt

SEQ ID NO: 19654 - DNA, 25 bp, Homo sapien
gctattttaaaagaatgtcctccta

SEQ ID NO: 19655 - DNA, 25 bp, Homo sapien
cataggtggtttaaagctacttctt

SEQ ID NO: 19656 - DNA, 25 bp, Homo sapien
aatgagggagaaatgtactgtttat

SEQ ID NO: 19657 - DNA, 25 bp, Homo sapien
cttttcaggttttcggcaaggctat

SEQ ID NO: 19658 - DNA, 25 bp, Homo sapien
tgtagtgacttagatacacaaacac

SEQ ID NO: 19659 - DNA, 25 bp, Homo sapien
tatatttgtagtgacttagatacac

SEQ ID NO: 19660 - DNA, 25 bp, Homo sapien
ctgtttattgaatgctagagtcctt

SEQ ID NO: 19661 - DNA, 25 bp, Homo sapien
cccaatgagggagaaatgtactgtt

SEQ ID NO: 19662 - DNA, 25 bp, Homo sapien
tgaatgctagagtccttttcaggtt

SEQ ID NO: 19663 - DNA, 25 bp, Homo sapien
aaccgacaaagttcccaattctatg

SEQ ID NO: 19664 - DNA, 25 bp, Homo sapien
aaaggccctacactagtcagtgtca

SEQ ID NO: 19665 - DNA, 25 bp, Homo sapien
tgacctagagtgttgagaaacttcc

SEQ ID NO: 19666 - DNA, 25 bp, Homo sapien
tgagaaacttcccaaaggccctaca

SEQ ID NO: 19667 - DNA, 25 bp, Homo sapien
catcattgttttcaggttgtagttg

SEQ ID NO: 19668 - DNA, 25 bp, Homo sapien
tcagtgtcagacctaggattcaatt

SEQ ID NO: 19669 - DNA, 25 bp, Homo sapien
agaaaaagtttagcagtctgcaccc

SEQ ID NO: 19670 - DNA, 25 bp, Homo sapien
ctagtcagtgtcagacctaggattc

SEQ ID NO: 19671 - DNA, 25 bp, Homo sapien
ctaagggctccattaacagaaaaag

SEQ ID NO: 19672 - DNA, 25 bp, Homo sapien
accctgtaaggctcacatcattgtt

SEQ ID NO: 19673 - DNA, 25 bp, Homo sapien
ttagcagtctgcaccctgtaaggct

SEQ ID NO: 19674 - DNA, 25 bp, Homo sapien
gaagaaggtgatgacctagagtgtt

SEQ ID NO: 19675 - DNA, 25 bp, Homo sapien
catattccaatgagttgagcagaag

SEQ ID NO: 19676 - DNA, 25 bp, Homo sapien
gattagttcatatcaggatccttca

SEQ ID NO: 19677 - DNA, 25 bp, Homo sapien
tgcagcgagccatgctcgcgctact

SEQ ID NO: 19678 - DNA, 25 bp, Homo sapien
ctggttagtcacttttcgaagttgc

SEQ ID NO: 19679 - DNA, 25 bp, Homo sapien
aatcaggcaacactccattccataa

SEQ ID NO: 19680 - DNA, 25 bp, Homo sapien
agggagacggaacaatagaaaaata

SEQ ID NO: 19681 - DNA, 25 bp, Homo sapien
ttgttttgtgtaaagattaaagcag

SEQ ID NO: 19682 - DNA, 25 bp, Homo sapien
aagaggttggctttacagacaggga

SEQ ID NO: 19683 - DNA, 25 bp, Homo sapien
gaagttgcttttcttggccgggcac

SEQ ID NO: 19684 - DNA, 25 bp, Homo sapien
caggatccttcaggctgccttgttt

SEQ ID NO: 19685 - DNA, 25 bp, Homo sapien
gctgaagaaagctggttagtcactt

SEQ ID NO: 19686 - DNA, 25 bp, Homo sapien
tattctaagtgggattatgcagtac

SEQ ID NO: 19687 - DNA, 25 bp, Homo sapien
cagctcgatttagtttgaataattc

SEQ ID NO: 19688 - DNA, 25 bp, Homo sapien
tttggtcatgcaacagctcgattta

SEQ ID NO: 19689 - DNA, 25 bp, Homo sapien
aagtgggattatgcagtactgtatt

SEQ ID NO: 19690 - DNA, 25 bp, Homo sapien
agacattgtcataccaaagatgaac

SEQ ID NO: 19691 - DNA, 25 bp, Homo sapien
aaagatgaacttccatcaccatccc

SEQ ID NO: 19692 - DNA, 25 bp, Homo sapien
accaattttggtcatgcaacagctc

SEQ ID NO: 19693 - DNA, 25 bp, Homo sapien
atcaaaaatacttagctaaacccaa

SEQ ID NO: 19694 - DNA, 25 bp, Homo sapien
gaatttattctaagtgggattatgc

SEQ ID NO: 19695 - DNA, 25 bp, Homo sapien
ttaaaatgtattagttgcacttgtt

SEQ ID NO: 19696 - DNA, 25 bp, Homo sapien
agtttggagaagtatagacattgtc

SEQ ID NO: 19697 - DNA, 25 bp, Homo sapien
caagaactatcctcggtagggttac

SEQ ID NO: 19698 - DNA, 25 bp, Homo sapien
acacgtgtaacaaaagccaaatgtg

SEQ ID NO: 19699 - DNA, 25 bp, Homo sapien
ttatccggtgaaaaatgaatatgag

SEQ ID NO: 19700 - DNA, 25 bp, Homo sapien
cctaggaggtttgaacagaaaaaga

SEQ ID NO: 19701 - DNA, 25 bp, Homo sapien
tagggttacaccgagctccagtgga

SEQ ID NO: 19702 - DNA, 25 bp, Homo sapien
gggattccctggactgcccatgata

SEQ ID NO: 19703 - DNA, 25 bp, Homo sapien
ctccagtggataaacaaaggggcaa

SEQ ID NO: 19704 - DNA, 25 bp, Homo sapien
catgataggcttgaactgaggcttt

SEQ ID NO: 19705 - DNA, 25 bp, Homo sapien
aggaccaagagccacactgttatcc

SEQ ID NO: 19706 - DNA, 25 bp, Homo sapien
agtcggcaccactgacaagaactat

SEQ ID NO: 19707 - DNA, 25 bp, Homo sapien
atttattgctgccaggggattccct

SEQ ID NO: 19708 - DNA, 25 bp, Homo sapien
gatggcatatctaaaaagggttcac

SEQ ID NO: 19709 - DNA, 25 bp, Homo sapien
tgagttcaggagacatagatggcat

SEQ ID NO: 19710 - DNA, 25 bp, Homo sapien
tttacagtgtgaggttttgccagtc

SEQ ID NO: 19711 - DNA, 25 bp, Homo sapien
gtggggtaaacctgcaaatatatta

SEQ ID NO: 19712 - DNA, 25 bp, Homo sapien
ttatagaaagtttacagtgtgaggt

SEQ ID NO: 19713 - DNA, 25 bp, Homo sapien
gttttgccagtcatcacagagcttt

SEQ ID NO: 19714 - DNA, 25 bp, Homo sapien
tcccatgataatttcgctaactgca

SEQ ID NO: 19715 - DNA, 25 bp, Homo sapien
caaatgcattctcaaagtaaactcc

SEQ ID NO: 19716 - DNA, 25 bp, Homo sapien
ttgcctcagtactatgaagagtcat

SEQ ID NO: 19717 - DNA, 25 bp, Homo sapien
aaagaggaaaactatgttacagaac

SEQ ID NO: 19718 - DNA, 25 bp, Homo sapien
attttcatatgtggggtaaacctgc

SEQ ID NO: 19719 - DNA, 25 bp, Homo sapien
agtctggtgttaggaccaaagtttc

SEQ ID NO: 19720 - DNA, 25 bp, Homo sapien
tctctgatgacgcagactgagtctt

SEQ ID NO: 19721 - DNA, 25 bp, Homo sapien
gacactgcctctgcgtgggtgacaa

SEQ ID NO: 19722 - DNA, 25 bp, Homo sapien
actgagtcttgaatggtcagaccac

SEQ ID NO: 19723 - DNA, 25 bp, Homo sapien
cctgcattgcggctttggtgaacaa

SEQ ID NO: 19724 - DNA, 25 bp, Homo sapien
cttgggcaggcctcatgaccgctct

SEQ ID NO: 19725 - DNA, 25 bp, Homo sapien
acatcaggatggagttggtttctaa

SEQ ID NO: 19726 - DNA, 25 bp, Homo sapien
aacaagcctagagaaggtgtgcctc

SEQ ID NO: 19727 - DNA, 25 bp, Homo sapien
tcacacagcaagacagggcttagtc

SEQ ID NO: 19728 - DNA, 25 bp, Homo sapien
tgtgtcaggcccttcccagagactc

SEQ ID NO: 19729 - DNA, 25 bp, Homo sapien
ccttgggaggctgttatgcacatca

SEQ ID NO: 19730 - DNA, 25 bp, Homo sapien
attgcagaagtgagcaagctatagc

SEQ ID NO: 19731 - DNA, 25 bp, Homo sapien
aggatgggtgatatggttactactc

SEQ ID NO: 19732 - DNA, 25 bp, Homo sapien
caaaaagtgaaggtacgaactacca

SEQ ID NO: 19733 - DNA, 25 bp, Homo sapien
atcaaacagattctgccagcaaatc

SEQ ID NO: 19734 - DNA, 25 bp, Homo sapien
actcccacaatgtgtatgggctgga

SEQ ID NO: 19735 - DNA, 25 bp, Homo sapien
aagctatagcccaagggccaaatct

SEQ ID NO: 19736 - DNA, 25 bp, Homo sapien
ctacttgaataggagaacttatact

SEQ ID NO: 19737 - DNA, 25 bp, Homo sapien
ctgctaagagctaaaactgattgac

SEQ ID NO: 19738 - DNA, 25 bp, Homo sapien
taagcctgcaatagatttcagagtt

SEQ ID NO: 19739 - DNA, 25 bp, Homo sapien
gtaagaccagtgaactaagaatgac

SEQ ID NO: 19740 - DNA, 25 bp, Homo sapien
gctgcctcctgtttttgtaagacca

SEQ ID NO: 19741 - DNA, 25 bp, Homo sapien
gacatggaaccaaactagaggaagc

SEQ ID NO: 19742 - DNA, 25 bp, Homo sapien
attgtttagaactgctgggaagccc

SEQ ID NO: 19743 - DNA, 25 bp, Homo sapien
aatatttaccaggtcatcagggtgt

SEQ ID NO: 19744 - DNA, 25 bp, Homo sapien
ctgatgcagatgaggttctagtttc

SEQ ID NO: 19745 - DNA, 25 bp, Homo sapien
aatagcagaaatggaattcaatccc

SEQ ID NO: 19746 - DNA, 25 bp, Homo sapien
ccatacgatgtaagagaaaagtgag

SEQ ID NO: 19747 - DNA, 25 bp, Homo sapien
tctgtgatctaatgaacaccaggac

SEQ ID NO: 19748 - DNA, 25 bp, Homo sapien
agctgtgatgtgtggccctgatgca

SEQ ID NO: 19749 - DNA, 25 bp, Homo sapien
gaagggtgcaacattgagaaatctt

SEQ ID NO: 19750 - DNA, 25 bp, Homo sapien
ctgcaagtagacatgctgaccagac

SEQ ID NO: 19751 - DNA, 25 bp, Homo sapien
tatagagttcagaatagcagaaatg

SEQ ID NO: 19752 - DNA, 25 bp, Homo sapien
tcacaactgtgcaattaaaacctcc

SEQ ID NO: 19753 - DNA, 25 bp, Homo sapien
agggctctgctttggggtcaatttc

SEQ ID NO: 19754 - DNA, 25 bp, Homo sapien
ttggtgctttcacagctgaggacct

SEQ ID NO: 19755 - DNA, 25 bp, Homo sapien
cttgacgctcagaggatactgcaaa

SEQ ID NO: 19756 - DNA, 25 bp, Homo sapien
ttggagactcgctacctggtgatct

SEQ ID NO: 19757 - DNA, 25 bp, Homo sapien
gaaagcaacacgtgtcttgacgctc

SEQ ID NO: 19758 - DNA, 25 bp, Homo sapien
actgcaaagacttatgagtggaggt

SEQ ID NO: 19759 - DNA, 25 bp, Homo sapien
tcctttagtgaaagcaacacgtgtc

SEQ ID NO: 19760 - DNA, 25 bp, Homo sapien
aatttctcaaaagagggtgcctcca

SEQ ID NO: 19761 - DNA, 25 bp, Homo sapien
cactcacaggtgaaggagagaccgt

SEQ ID NO: 19762 - DNA, 25 bp, Homo sapien
actggaaccaggtcacaggcatcct

SEQ ID NO: 19763 - DNA, 25 bp, Homo sapien
ttatagagttaccatgatatctttc

SEQ ID NO: 19764 - DNA, 25 bp, Homo sapien
ctaagaaagcatgagtcaatatgtt

SEQ ID NO: 19765 - DNA, 25 bp, Homo sapien
ctctggaactttttgaacttatatc

SEQ ID NO: 19766 - DNA, 25 bp, Homo sapien
tttcaagaacagagaaatatactcc

SEQ ID NO: 19767 - DNA, 25 bp, Homo sapien
ctgttggtctctggtagggaaaaaa

SEQ ID NO: 19768 - DNA, 25 bp, Homo sapien
tttgtgtggtcatcttctctggaac

SEQ ID NO: 19769 - DNA, 25 bp, Homo sapien
tctaccctctaagaaagcatgagtc

SEQ ID NO: 19770 - DNA, 25 bp, Homo sapien
gaaagtttcaaagcaacaggcatta

SEQ ID NO: 19771 - DNA, 25 bp, Homo sapien
tttcaaagcaacaggcattaaatac

SEQ ID NO: 19772 - DNA, 25 bp, Homo sapien
atcactgttggtctctggtagggaa

SEQ ID NO: 19773 - DNA, 25 bp, Homo sapien
tcaaatcaattaaagtatggaacaa

SEQ ID NO: 19774 - DNA, 25 bp, Homo sapien
agcatcacatataatagagaagtcc

SEQ ID NO: 19775 - DNA, 25 bp, Homo sapien
tgaagtataggtacagaaaacatac

SEQ ID NO: 19776 - DNA, 25 bp, Homo sapien
tcaggatgagtgtttctcaggacgc

SEQ ID NO: 19777 - DNA, 25 bp, Homo sapien
tttaaccaatgagctaaactccctc

SEQ ID NO: 19778 - DNA, 25 bp, Homo sapien
tagagaagtcctgaataaagcaatg

SEQ ID NO: 19779 - DNA, 25 bp, Homo sapien
tcaggacgctgaaatataaacccac

SEQ ID NO: 19780 - DNA, 25 bp, Homo sapien
ggcggatgtggccaatgttcccatt

SEQ ID NO: 19781 - DNA, 25 bp, Homo sapien
acatacggggtaaataaacaggcca

SEQ ID NO: 19782 - DNA, 25 bp, Homo sapien
caggctatagccagtgcattaaaac

SEQ ID NO: 19783 - DNA, 25 bp, Homo sapien
atggagaactcactgtgtatcagtc

SEQ ID NO: 19784 - DNA, 25 bp, Homo sapien
aagcaatgatgtctgtctcaaaacc

SEQ ID NO: 19785 - DNA, 25 bp, Homo sapien
attctgccctgctgtggactccttt

SEQ ID NO: 19786 - DNA, 25 bp, Homo sapien
aaaaaatgagtaagagatctgtggc

SEQ ID NO: 19787 - DNA, 25 bp, Homo sapien
gatttgaaagcttccagtgtcaccc

SEQ ID NO: 19788 - DNA, 25 bp, Homo sapien
gcatagttgtatgagaaccgtttcc

SEQ ID NO: 19789 - DNA, 25 bp, Homo sapien
gatatggattggaaagcaatgctac

SEQ ID NO: 19790 - DNA, 25 bp, Homo sapien
tagacagccctagacattgaacaga

SEQ ID NO: 19791 - DNA, 25 bp, Homo sapien
ttcaagggaacagctaggtcatcat

SEQ ID NO: 19792 - DNA, 25 bp, Homo sapien
attgaacagagaagctaggtgctct

SEQ ID NO: 19793 - DNA, 25 bp, Homo sapien
cccaagcagggcatataatgataac

SEQ ID NO: 19794 - DNA, 25 bp, Homo sapien
taggtgctctgccagttgaagattt

SEQ ID NO: 19795 - DNA, 25 bp, Homo sapien
cagtgcaaatcagggtggcctactt

SEQ ID NO: 19796 - DNA, 25 bp, Homo sapien
tgacaaggtcagactgaaactgttc

SEQ ID NO: 19797 - DNA, 25 bp, Homo sapien
gccaggctaagatgtggattttgtc

SEQ ID NO: 19798 - DNA, 25 bp, Homo sapien
gagaggcccatccagtagaaaatct

SEQ ID NO: 19799 - DNA, 25 bp, Homo sapien
agcaactgggaacttaagacctaca

SEQ ID NO: 19800 - DNA, 25 bp, Homo sapien
ggcacacttagaggcagataaccca

SEQ ID NO: 19801 - DNA, 25 bp, Homo sapien
agccaggctagtggagtagctattt

SEQ ID NO: 19802 - DNA, 25 bp, Homo sapien
taggacaccactcaaggcctgaatg

SEQ ID NO: 19803 - DNA, 25 bp, Homo sapien
agaatgtacaggacttgaagattgg

SEQ ID NO: 19804 - DNA, 25 bp, Homo sapien
tcctggaggataaatacctagagac

SEQ ID NO: 19805 - DNA, 25 bp, Homo sapien
ttctgcctagccctggtgctgagcc

SEQ ID NO: 19806 - DNA, 25 bp, Homo sapien
accatgtgaaaaatagtgggagaag

SEQ ID NO: 19807 - DNA, 25 bp, Homo sapien
agaggaacaaaacaactgtgaaaga

SEQ ID NO: 19808 - DNA, 25 bp, Homo sapien
gaagacctgcgaaaataaattcaac

SEQ ID NO: 19809 - DNA, 25 bp, Homo sapien
aaacatatgggtaaacaagacaaat

SEQ ID NO: 19810 - DNA, 25 bp, Homo sapien
tagaccaaatagacttaacagacgt

SEQ ID NO: 19811 - DNA, 25 bp, Homo sapien
aaacaagtacctgtgatatacggcc

SEQ ID NO: 19812 - DNA, 25 bp, Homo sapien
aaaatagcaatagtaagtcatcacc

SEQ ID NO: 19813 - DNA, 25 bp, Homo sapien
aacagcatgaaggaagtaagaacac

SEQ ID NO: 19814 - DNA, 25 bp, Homo sapien
atagaacttctcacccaggaaagga

SEQ ID NO: 19815 - DNA, 25 bp, Homo sapien
agacaaaatgcatagagtagctgaa

SEQ ID NO: 19816 - DNA, 25 bp, Homo sapien
gatatacggccttcacttgctgtgc

SEQ ID NO: 19817 - DNA, 25 bp, Homo sapien
ataccaagtagaaataaataacagc

SEQ ID NO: 19818 - DNA, 25 bp, Homo sapien
attggcattgcactgggcaacataa

SEQ ID NO: 19819 - DNA, 25 bp, Homo sapien
caggcagttacaaatacagggtatc

SEQ ID NO: 19820 - DNA, 25 bp, Homo sapien
attgtcatggtgactgccaactgtc

SEQ ID NO: 19821 - DNA, 25 bp, Homo sapien
tttctaagaaggaactcctgaccac

SEQ ID NO: 19822 - DNA, 25 bp, Homo sapien
ggttgagtaagctgcagttttggat

SEQ ID NO: 19823 - DNA, 25 bp, Homo sapien
gtgggctaggagtccaactaataca

SEQ ID NO: 19824 - DNA, 25 bp, Homo sapien
gcagagttaaagctgaataggaatc

SEQ ID NO: 19825 - DNA, 25 bp, Homo sapien
agaagtgggaacatagctcataaat

SEQ ID NO: 19826 - DNA, 25 bp, Homo sapien
agggagtgagactttcctggaatca

SEQ ID NO: 19827 - DNA, 25 bp, Homo sapien
aactaatacatgtaggcactgcagt

SEQ ID NO: 19828 - DNA, 25 bp, Homo sapien
tgggtaacagtgagtgactaattcc

SEQ ID NO: 19829 - DNA, 25 bp, Homo sapien
tttttcttggctctcatctgactag

SEQ ID NO: 19830 - DNA, 25 bp, Homo sapien
gttgtcatttctacctgctgttgtc

SEQ ID NO: 19831 - DNA, 25 bp, Homo sapien
ctgactagagaaaagctactgatct

SEQ ID NO: 19832 - DNA, 25 bp, Homo sapien
gtgtttctaggcacaatgtgttgtc

SEQ ID NO: 19833 - DNA, 25 bp, Homo sapien
tctaggcacaatgtgttgtcatttc

SEQ ID NO: 19834 - DNA, 25 bp, Homo sapien
gccagattttcttatgattgagtag

SEQ ID NO: 19835 - DNA, 25 bp, Homo sapien
ggctctcatctgactagagaaaagc

SEQ ID NO: 19836 - DNA, 25 bp, Homo sapien
tattcaaccagtttgccagattttc

SEQ ID NO: 19837 - DNA, 25 bp, Homo sapien
attgagtagatttctagtagggttt

SEQ ID NO: 19838 - DNA, 25 bp, Homo sapien
atccttgcgaatttatgtatattta

SEQ ID NO: 19839 - DNA, 25 bp, Homo sapien
tcatctgactagagaaaagctactg

SEQ ID NO: 19840 - DNA, 25 bp, Homo sapien
tggagttcaggcaggtttaaacatt

SEQ ID NO: 19841 - DNA, 25 bp, Homo sapien
tgaacggaatcctctggctagcttc

SEQ ID NO: 19842 - DNA, 25 bp, Homo sapien
accctgtggacaaaggttccgtctg

SEQ ID NO: 19843 - DNA, 25 bp, Homo sapien
ttccgtctggtatggccgcatcctt

SEQ ID NO: 19844 - DNA, 25 bp, Homo sapien
gcatacaaacaacaaagagggagag

SEQ ID NO: 19845 - DNA, 25 bp, Homo sapien
gtcaggctagtcacgaattcctggc

SEQ ID NO: 19846 - DNA, 25 bp, Homo sapien
tagcttctgagcacggcatacaaac

SEQ ID NO: 19847 - DNA, 25 bp, Homo sapien
catgcccggccaaattctaagaaac

SEQ ID NO: 19848 - DNA, 25 bp, Homo sapien
caacagctctggttacagggaccct

SEQ ID NO: 19849 - DNA, 25 bp, Homo sapien
atggcatacacaaaacgcaattatc

SEQ ID NO: 19850 - DNA, 25 bp, Homo sapien
attggcccagaaatttcgcctgctc

SEQ ID NO: 19851 - DNA, 25 bp, Homo sapien
tctgtcatatggaaatactacattt

SEQ ID NO: 19852 - DNA, 25 bp, Homo sapien
cacatagcatacaactgacccattt

SEQ ID NO: 19853 - DNA, 25 bp, Homo sapien
aaaaacggattcataaattgtggtc

SEQ ID NO: 19854 - DNA, 25 bp, Homo sapien
aggttcatccatgttcagttcagca

SEQ ID NO: 19855 - DNA, 25 bp, Homo sapien
ggtcttgggcaaccacgaatctgct

SEQ ID NO: 19856 - DNA, 25 bp, Homo sapien
cacagagatgtgtaatcgtcaccac

SEQ ID NO: 19857 - DNA, 25 bp, Homo sapien
tcgtcaccacaataagttccagaat

SEQ ID NO: 19858 - DNA, 25 bp, Homo sapien
acagtgtctgggcatcatttctttt

SEQ ID NO: 19859 - DNA, 25 bp, Homo sapien
tcagttcagcatgtgttagtatttc

SEQ ID NO: 19860 - DNA, 25 bp, Homo sapien
agaacctttgcaccctttagccatc

SEQ ID NO: 19861 - DNA, 25 bp, Homo sapien
agaaaagatagaaatgaaatcttgc

SEQ ID NO: 19862 - DNA, 25 bp, Homo sapien
agacacatagagagagagtaagcaa

SEQ ID NO: 19863 - DNA, 25 bp, Homo sapien
ggggaagaatccactcctcaaactc

SEQ ID NO: 19864 - DNA, 25 bp, Homo sapien
ttaggtaaggtttagctgtgtcttc

SEQ ID NO: 19865 - DNA, 25 bp, Homo sapien
tgtttgccatgtgagatttctgcca

SEQ ID NO: 19866 - DNA, 25 bp, Homo sapien
gagtaagcaagcgatagagcacatg

SEQ ID NO: 19867 - DNA, 25 bp, Homo sapien
ctgggctttagacatctcaaggctt

SEQ ID NO: 19868 - DNA, 25 bp, Homo sapien
tggtggtttctcacaggctgcaatc

SEQ ID NO: 19869 - DNA, 25 bp, Homo sapien
tatggctgtcgactaaaggtcatcc

SEQ ID NO: 19870 - DNA, 25 bp, Homo sapien
tctcatggtcattggcaggattcat

SEQ ID NO: 19871 - DNA, 25 bp, Homo sapien
acatgggctagcaagatggaaattt

SEQ ID NO: 19872 - DNA, 25 bp, Homo sapien
gaaatatgctcccaaagtagtgact

SEQ ID NO: 19873 - DNA, 25 bp, Homo sapien
atgtcaggaaatatatcagcacttt

SEQ ID NO: 19874 - DNA, 25 bp, Homo sapien
aaaggcccagaaacaatgaccaatc

SEQ ID NO: 19875 - DNA, 25 bp, Homo sapien
ctataaaagtgttgaagtgggtgat

SEQ ID NO: 19876 - DNA, 25 bp, Homo sapien
tggttcaaaggaagagtgatcactt

SEQ ID NO: 19877 - DNA, 25 bp, Homo sapien
aggaatacaaagagaaagtggtatt

SEQ ID NO: 19878 - DNA, 25 bp, Homo sapien
agtgaagttaagtaaattctgggct

SEQ ID NO: 19879 - DNA, 25 bp, Homo sapien
aaatgggagatttcacctatggggc

SEQ ID NO: 19880 - DNA, 25 bp, Homo sapien
tgaccaatccagtaatgcccagaat

SEQ ID NO: 19881 - DNA, 25 bp, Homo sapien
ccatttggtagagaatatcagacat

SEQ ID NO: 19882 - DNA, 25 bp, Homo sapien
atccaagaaggcagtatacatgtaa

SEQ ID NO: 19883 - DNA, 25 bp, Homo sapien
acaaagggtaacaaaggatggattc

SEQ ID NO: 19884 - DNA, 25 bp, Homo sapien
aaggtacacttcacagggtgggagt

SEQ ID NO: 19885 - DNA, 25 bp, Homo sapien
aggggacctatcagaggctgaagca

SEQ ID NO: 19886 - DNA, 25 bp, Homo sapien
gttacaccctatgcaaatctctgat

SEQ ID NO: 19887 - DNA, 25 bp, Homo sapien
agtagtgcccacaatcagtctgatt

SEQ ID NO: 19888 - DNA, 25 bp, Homo sapien
ctctgattgattgggaaaaggctga

SEQ ID NO: 19889 - DNA, 25 bp, Homo sapien
ggttgcaaaggaagtagccaaacaa

SEQ ID NO: 19890 - DNA, 25 bp, Homo sapien
cagcctcattggttgtggaaaggga

SEQ ID NO: 19891 - DNA, 25 bp, Homo sapien
aggaagtagccaaacaaactctgac

SEQ ID NO: 19892 - DNA, 25 bp, Homo sapien
gtaaatgaagtagtgcccacaatca

SEQ ID NO: 19893 - DNA, 25 bp, Homo sapien
tgactacaaacagaggtcccagtgg

SEQ ID NO: 19894 - DNA, 25 bp, Homo sapien
tctaccatgcagaaaaaggttgggg

SEQ ID NO: 19895 - DNA, 25 bp, Homo sapien
aggtctcctggcaacaagtttcttg

SEQ ID NO: 19896 - DNA, 25 bp, Homo sapien
actggaagttctcagacatggttgt

SEQ ID NO: 19897 - DNA, 25 bp, Homo sapien
tcagtgggtacagaaacttaggttg

SEQ ID NO: 19898 - DNA, 25 bp, Homo sapien
tcacagtttctgcaatgttgaatgc

SEQ ID NO: 19899 - DNA, 25 bp, Homo sapien
tgtgtctctgtaggtaaggtgtttt

SEQ ID NO: 19900 - DNA, 25 bp, Homo sapien
caagacaggtctcctggcaacaagt

SEQ ID NO: 19901 - DNA, 25 bp, Homo sapien
ccaagtgtaggttgttggcatttat

SEQ ID NO: 19902 - DNA, 25 bp, Homo sapien
tgtctgacattaatactggaagttc

SEQ ID NO: 19903 - DNA, 25 bp, Homo sapien
tctgtaggtaaggtgttttctgccc

SEQ ID NO: 19904 - DNA, 25 bp, Homo sapien
gaaaattatatgtccaagtgtaggt

SEQ ID NO: 19905 - DNA, 25 bp, Homo sapien
aatgcagttcttatctttgtgtctc

SEQ ID NO: 19906 - DNA, 25 bp, Homo sapien
gcaggcccagtaactgacatgagtt

SEQ ID NO: 19907 - DNA, 25 bp, Homo sapien
acccggcaggcccagtaactgacat

SEQ ID NO: 19908 - DNA, 25 bp, Homo sapien
aagtggaaaggttgctaggactaca

SEQ ID NO: 19909 - DNA, 25 bp, Homo sapien
caaaacagagtcatgtcgtgcagga

SEQ ID NO: 19910 - DNA, 25 bp, Homo sapien
accttgcgggaactagttagctttc

SEQ ID NO: 19911 - DNA, 25 bp, Homo sapien
acttgtgtgaccttgcgggaactag

SEQ ID NO: 19912 - DNA, 25 bp, Homo sapien
tttaactcggtctctacttgtgtga

SEQ ID NO: 19913 - DNA, 25 bp, Homo sapien
tcatgtcgtgcaggagggaaaaaat

SEQ ID NO: 19914 - DNA, 25 bp, Homo sapien
tgagtttgagaatcaaaacagagtc

SEQ ID NO: 19915 - DNA, 25 bp, Homo sapien
cagcctcccaagtggaaaggttgct

SEQ ID NO: 19916 - DNA, 25 bp, Homo sapien
ttaaatttgtaatgaggctggggtg

SEQ ID NO: 19917 - DNA, 25 bp, Homo sapien
taaagggccatacaatacatatttc

SEQ ID NO: 19918 - DNA, 25 bp, Homo sapien
aatgtcataaagtagaggtcagcaa

SEQ ID NO: 19919 - DNA, 25 bp, Homo sapien
aaaaccattcttaggtgacaggctg

SEQ ID NO: 19920 - DNA, 25 bp, Homo sapien
atacatatttcagtctctgcagacc

SEQ ID NO: 19921 - DNA, 25 bp, Homo sapien
ctgctaacataacacaaaagctgcc

SEQ ID NO: 19922 - DNA, 25 bp, Homo sapien
ttgagaatgtcataaagtagaggtc

SEQ ID NO: 19923 - DNA, 25 bp, Homo sapien
ggtctttgctgaaactactcaactc

SEQ ID NO: 19924 - DNA, 25 bp, Homo sapien
taaagctgaatttaagccattcttt

SEQ ID NO: 19925 - DNA, 25 bp, Homo sapien
caaatgagggtgactgtaataaaat

SEQ ID NO: 19926 - DNA, 25 bp, Homo sapien
ttaggtgacaggctgtagaaaaact

SEQ ID NO: 19927 - DNA, 25 bp, Homo sapien
ctgtagaaaaactagtcataggctt

SEQ ID NO: 19928 - DNA, 25 bp, Homo sapien
aatacaaatttattgggactttgaa

SEQ ID NO: 19929 - DNA, 25 bp, Homo sapien
taaattcaattttccagaaccatgg

SEQ ID NO: 19930 - DNA, 25 bp, Homo sapien
gaaccatggaaggtagtaatcaaac

SEQ ID NO: 19931 - DNA, 25 bp, Homo sapien
ctgttaaacagaagacaatacaaat

SEQ ID NO: 19932 - DNA, 25 bp, Homo sapien
caaactgttaaacagaagacaatac

SEQ ID NO: 19933 - DNA, 25 bp, Homo sapien
cataatttcccaactcacaaaaggc

SEQ ID NO: 19934 - DNA, 25 bp, Homo sapien
tccagaaccatggaaggtagtaatc

SEQ ID NO: 19935 - DNA, 25 bp, Homo sapien
ttcagtccactgagttttgacataa

SEQ ID NO: 19936 - DNA, 25 bp, Homo sapien
aaaactaagaatgatgtaaagctca

SEQ ID NO: 19937 - DNA, 25 bp, Homo sapien
catggaaggtagtaatcaaactgtt

SEQ ID NO: 19938 - DNA, 25 bp, Homo sapien
attttccagaaccatggaaggtagt

SEQ ID NO: 19939 - DNA, 25 bp, Homo sapien
cttttcaatagaatatagtgattac

SEQ ID NO: 19940 - DNA, 25 bp, Homo sapien
tttgcatgtattctctatatagatc

SEQ ID NO: 19941 - DNA, 25 bp, Homo sapien
cagaagttttagtttagatgtaata

SEQ ID NO: 19942 - DNA, 25 bp, Homo sapien
ttaccaaaaaggaattcatcaactg

SEQ ID NO: 19943 - DNA, 25 bp, Homo sapien
tgtggattccattatggctgaattt

SEQ ID NO: 19944 - DNA, 25 bp, Homo sapien
caatagaatatagtgattacagaag

SEQ ID NO: 19945 - DNA, 25 bp, Homo sapien
gtttagatgtaataagttgaatatc

SEQ ID NO: 19946 - DNA, 25 bp, Homo sapien
gatgtaataagttgaatatctgtca

SEQ ID NO: 19947 - DNA, 25 bp, Homo sapien
agaatatagtgattacagaagtttt

SEQ ID NO: 19948 - DNA, 25 bp, Homo sapien
aataagttgaatatctgtcagttta

SEQ ID NO: 19949 - DNA, 25 bp, Homo sapien
accaaaaaggaattcatcaactgat

SEQ ID NO: 19950 - DNA, 25 bp, Homo sapien
tgacatcatgccaagacagcaactc

SEQ ID NO: 19951 - DNA, 25 bp, Homo sapien
tcggggtttcatatacatcatggca

SEQ ID NO: 19952 - DNA, 25 bp, Homo sapien
ccaatgctaagagaagatggctttc

SEQ ID NO: 19953 - DNA, 25 bp, Homo sapien
atcatgccaagacagcaactcagtc

SEQ ID NO: 19954 - DNA, 25 bp, Homo sapien
tagctctctgacatcatgccaagac

SEQ ID NO: 19955 - DNA, 25 bp, Homo sapien
gagagtctaagtaccatcaccatgg

SEQ ID NO: 19956 - DNA, 25 bp, Homo sapien
acagcaactcagtcggggtttcata

SEQ ID NO: 19957 - DNA, 25 bp, Homo sapien
agagttctagacaactaaacaattc

SEQ ID NO: 19958 - DNA, 25 bp, Homo sapien
gtgtgagcattgagagtctaagtac

SEQ ID NO: 19959 - DNA, 25 bp, Homo sapien
actgtgtgagcattgagagtctaag

SEQ ID NO: 19960 - DNA, 25 bp, Homo sapien
atcaccatggctcctttagctctct

SEQ ID NO: 19961 - DNA, 25 bp, Homo sapien
cttagggtttttagagcctgtgtta

SEQ ID NO: 19962 - DNA, 25 bp, Homo sapien
cttggtctgttctagctcacgctga

SEQ ID NO: 19963 - DNA, 25 bp, Homo sapien
tgttattttcaaaacccagcccatc

SEQ ID NO: 19964 - DNA, 25 bp, Homo sapien
agcgttcacttagccgcagtgagcc

SEQ ID NO: 19965 - DNA, 25 bp, Homo sapien
cgcagtgagcccttgaggtcccgct

SEQ ID NO: 19966 - DNA, 25 bp, Homo sapien
attttcaaaacccagcccatctttc

SEQ ID NO: 19967 - DNA, 25 bp, Homo sapien
tctagctcacgctgagaccagtcag

SEQ ID NO: 19968 - DNA, 25 bp, Homo sapien
tgagaccagtcagcgttcacttagc

SEQ ID NO: 19969 - DNA, 25 bp, Homo sapien
ccaaaagttgcaccgcttcttaggg

SEQ ID NO: 19970 - DNA, 25 bp, Homo sapien
attcctgccaaaagttgcaccgctt

SEQ ID NO: 19971 - DNA, 25 bp, Homo sapien
agtgagcccttgaggtcccgctaac

SEQ ID NO: 19972 - DNA, 25 bp, Homo sapien
ctgaactctctgaaaagataaatgc

SEQ ID NO: 19973 - DNA, 25 bp, Homo sapien
tcagaggtgcctcagacacgagaaa

SEQ ID NO: 19974 - DNA, 25 bp, Homo sapien
aactttgccactacaggttggttta

SEQ ID NO: 19975 - DNA, 25 bp, Homo sapien
taccactaaactttgccactacagg

SEQ ID NO: 19976 - DNA, 25 bp, Homo sapien
gtgcctcagacacgagaaacacaat

SEQ ID NO: 19977 - DNA, 25 bp, Homo sapien
agatgaagtgctgaactctctgaaa

SEQ ID NO: 19978 - DNA, 25 bp, Homo sapien
aattaacccgtgagatgaagtgctg

SEQ ID NO: 19979 - DNA, 25 bp, Homo sapien
ttggtttaattaacccgtgagatga

SEQ ID NO: 19980 - DNA, 25 bp, Homo sapien
ttaattaacccgtgagatgaagtgc

SEQ ID NO: 19981 - DNA, 25 bp, Homo sapien
agataaatgctttcagaggtgcctc

SEQ ID NO: 19982 - DNA, 25 bp, Homo sapien
aggaaggtcactgtggtgacagttt

SEQ ID NO: 19983 - DNA, 25 bp, Homo sapien
gaacaagctagatttaggtaggagc

SEQ ID NO: 19984 - DNA, 25 bp, Homo sapien
gcattgaaatttacagaccagtcta

SEQ ID NO: 19985 - DNA, 25 bp, Homo sapien
acaagctagatttaggtaggagcca

SEQ ID NO: 19986 - DNA, 25 bp, Homo sapien
ggtaggagccaaagcccaaaataga

SEQ ID NO: 19987 - DNA, 25 bp, Homo sapien
gagccaaagcccaaaatagactgtt

SEQ ID NO: 19988 - DNA, 25 bp, Homo sapien
ttttaggcattgaaatttacagacc

SEQ ID NO: 19989 - DNA, 25 bp, Homo sapien
atcttgggaagatctacagcttggt

SEQ ID NO: 19990 - DNA, 25 bp, Homo sapien
atgtaagtttacatgcttcgttacc

SEQ ID NO: 19991 - DNA, 25 bp, Homo sapien
acagcttggtggatatttttaggca

SEQ ID NO: 19992 - DNA, 25 bp, Homo sapien
catgcttcgttacctgaaaaatatc

SEQ ID NO: 19993 - DNA, 25 bp, Homo sapien
acctgaaaaatatcttgggaagatc

SEQ ID NO: 19994 - DNA, 25 bp, Homo sapien
actgggtttcataactttgtgtcat

SEQ ID NO: 19995 - DNA, 25 bp, Homo sapien
tgtctgtggatcctgacacacacca

SEQ ID NO: 19996 - DNA, 25 bp, Homo sapien
tcctgcctcgtgaactcctagttgt

SEQ ID NO: 19997 - DNA, 25 bp, Homo sapien
cgtgaactcctagttgttaaaacgc

SEQ ID NO: 19998 - DNA, 25 bp, Homo sapien
acacaccactgggtttcataacttt

SEQ ID NO: 19999 - DNA, 25 bp, Homo sapien
ttctttcctgcctcgtgaactccta

SEQ ID NO: 20000 - DNA, 25 bp, Homo sapien
gtggatcctgacacacaccactggg

SEQ ID NO: 20001 - DNA, 25 bp, Homo sapien
attccataggctggactccatttct

SEQ ID NO: 20002 - DNA, 25 bp, Homo sapien
gtcacatgaacctgtctgtggatcc

SEQ ID NO: 20003 - DNA, 25 bp, Homo sapien
attttagtcacatgaacctgtctgt

SEQ ID NO: 20004 - DNA, 25 bp, Homo sapien
ttgtgtcattccataggctggactc

SEQ ID NO: 20005 - DNA, 25 bp, Homo sapien
acagtcctaggttgtgactagacta

SEQ ID NO: 20006 - DNA, 25 bp, Homo sapien
gaaagtgtgatcaaaagaagccaac

SEQ ID NO: 20007 - DNA, 25 bp, Homo sapien
cgttcatcacacactcccagaaagt

SEQ ID NO: 20008 - DNA, 25 bp, Homo sapien
cccagaaagtgtgatcaaaagaagc

SEQ ID NO: 20009 - DNA, 25 bp, Homo sapien
actcccagaaagtgtgatcaaaaga

SEQ ID NO: 20010 - DNA, 25 bp, Homo sapien
taaacagaggttgtgacacgtgcca

SEQ ID NO: 20011 - DNA, 25 bp, Homo sapien
tgtgactagactaaacagaggttgt

SEQ ID NO: 20012 - DNA, 25 bp, Homo sapien
ctagactaaacagaggttgtgacac

SEQ ID NO: 20013 - DNA, 25 bp, Homo sapien
ctggcttacagtcctaggttgtgac

SEQ ID NO: 20014 - DNA, 25 bp, Homo sapien
caacactggcttacagtcctaggtt

SEQ ID NO: 20015 - DNA, 25 bp, Homo sapien
aagaagccaacactggcttacagtc

SEQ ID NO: 20016 - DNA, 25 bp, Homo sapien
aggaaccttttctacagtggagcaa

SEQ ID NO: 20017 - DNA, 25 bp, Homo sapien
ataacccaaacagcagtaaggggaa

SEQ ID NO: 20018 - DNA, 25 bp, Homo sapien
cagaaagactgattttaatgaccta

SEQ ID NO: 20019 - DNA, 25 bp, Homo sapien
ttacccagcaatagataacccaaac

SEQ ID NO: 20020 - DNA, 25 bp, Homo sapien
taaccaaaatatcaggattccaggc

SEQ ID NO: 20021 - DNA, 25 bp, Homo sapien
agtggagcaaagagtagaattgtct

SEQ ID NO: 20022 - DNA, 25 bp, Homo sapien
ttggaaatggcaaatgttgatctaa

SEQ ID NO: 20023 - DNA, 25 bp, Homo sapien
catcttgctttaagcccaaggaacc

SEQ ID NO: 20024 - DNA, 25 bp, Homo sapien
tggccaaaatggtactgttttaagc

SEQ ID NO: 20025 - DNA, 25 bp, Homo sapien
gcgcaagattcgaggtacaaaccaa

SEQ ID NO: 20026 - DNA, 25 bp, Homo sapien
agaattgtcttttggctgcaatccc

SEQ ID NO: 20027 - DNA, 25 bp, Homo sapien
atgtaaaacagaagatatgccagtt

SEQ ID NO: 20028 - DNA, 25 bp, Homo sapien
attgttacagacattattcgacctt

SEQ ID NO: 20029 - DNA, 25 bp, Homo sapien
aggttattattttaggtaggctgga

SEQ ID NO: 20030 - DNA, 25 bp, Homo sapien
gttacagacattattcgacctttcg

SEQ ID NO: 20031 - DNA, 25 bp, Homo sapien
tcctttgcaataaatcatcacttat

SEQ ID NO: 20032 - DNA, 25 bp, Homo sapien
attattttaggtaggctggaaaatg

SEQ ID NO: 20033 - DNA, 25 bp, Homo sapien
tatgccagttttatgaaagtccagg

SEQ ID NO: 20034 - DNA, 25 bp, Homo sapien
agatatgccagttttatgaaagtcc

SEQ ID NO: 20035 - DNA, 25 bp, Homo sapien
acctttcgaaacatatttcctttgc

SEQ ID NO: 20036 - DNA, 25 bp, Homo sapien
atcaactaaatggaaacttaagata

SEQ ID NO: 20037 - DNA, 25 bp, Homo sapien
ctaaatggaaacttaagataaaata

SEQ ID NO: 20038 - DNA, 25 bp, Homo sapien
tgatggaaggggtccaacgtaatta

SEQ ID NO: 20039 - DNA, 25 bp, Homo sapien
caccaagtggctggcttgtaacctc

SEQ ID NO: 20040 - DNA, 25 bp, Homo sapien
aatccagatatccagaatgcatgtc

SEQ ID NO: 20041 - DNA, 25 bp, Homo sapien
cctttgatgatggaaggggtccaac

SEQ ID NO: 20042 - DNA, 25 bp, Homo sapien
ttacacggaataccatgaataaagg

SEQ ID NO: 20043 - DNA, 25 bp, Homo sapien
gcttggaacattatttatctgactc

SEQ ID NO: 20044 - DNA, 25 bp, Homo sapien
atgccagaagcaatgttacacggaa

SEQ ID NO: 20045 - DNA, 25 bp, Homo sapien
ataaaggtttctgggttcacggatg

SEQ ID NO: 20046 - DNA, 25 bp, Homo sapien
ctcaggctgatagtgtatgccagaa

SEQ ID NO: 20047 - DNA, 25 bp, Homo sapien
acggatgattgtgttagcaaaagca

SEQ ID NO: 20048 - DNA, 25 bp, Homo sapien
aggaaaaactggcatccctttgatg

SEQ ID NO: 20049 - DNA, 25 bp, Homo sapien
aaacaggagttgttttgaagcttcc

SEQ ID NO: 20050 - DNA, 25 bp, Homo sapien
gcttccagaaagatttgcaaagaat

SEQ ID NO: 20051 - DNA, 25 bp, Homo sapien
tcaagtaaagttttgagtgcaagct

SEQ ID NO: 20052 - DNA, 25 bp, Homo sapien
tgttaaacagaatgatccctgctct

SEQ ID NO: 20053 - DNA, 25 bp, Homo sapien
aacaatctgaatggtcacgaaacac

SEQ ID NO: 20054 - DNA, 25 bp, Homo sapien
gagtgcaagctcaatatgattatac

SEQ ID NO: 20055 - DNA, 25 bp, Homo sapien
catctaaaagaagagtgaaatttcc

SEQ ID NO: 20056 - DNA, 25 bp, Homo sapien
acagaattaaccgactcaagggtct

SEQ ID NO: 20057 - DNA, 25 bp, Homo sapien
ttgccgataagtttcaacctaagta

SEQ ID NO: 20058 - DNA, 25 bp, Homo sapien
cacgaaacacatggaaatgggttct

SEQ ID NO: 20059 - DNA, 25 bp, Homo sapien
ttttaaaggcagtgagtgtgatatc

SEQ ID NO: 20060 - DNA, 25 bp, Homo sapien
tttccactggagaaagtcctggcag

SEQ ID NO: 20061 - DNA, 25 bp, Homo sapien
agagggaatcccttttccactggag

SEQ ID NO: 20062 - DNA, 25 bp, Homo sapien
ctgaatggtaaagaattccaggaga

SEQ ID NO: 20063 - DNA, 25 bp, Homo sapien
gaggctggtttctgaatggtaaaga

SEQ ID NO: 20064 - DNA, 25 bp, Homo sapien
tggagaaagtcctggcagccacacc

SEQ ID NO: 20065 - DNA, 25 bp, Homo sapien
caacagcgtgccatgcagattcttc

SEQ ID NO: 20066 - DNA, 25 bp, Homo sapien
caggaagcagccttacctgccagga

SEQ ID NO: 20067 - DNA, 25 bp, Homo sapien
cagctgggtggtgcggctgccatct

SEQ ID NO: 20068 - DNA, 25 bp, Homo sapien
ccactggagaaagtcctggcagcca

SEQ ID NO: 20069 - DNA, 25 bp, Homo sapien
agacaacagcgtgccatgcagattc

SEQ ID NO: 20070 - DNA, 25 bp, Homo sapien
cttttccactggagaaagtcctggc

SEQ ID NO: 20071 - DNA, 25 bp, Homo sapien
ttctgatagcatttaccgcaaacgc

SEQ ID NO: 20072 - DNA, 25 bp, Homo sapien
tgatacaagtgagaaatagacctgg

SEQ ID NO: 20073 - DNA, 25 bp, Homo sapien
gagtaagtatgaaaacactggcctc

SEQ ID NO: 20074 - DNA, 25 bp, Homo sapien
agaaccgtcagagttgaggatttca

SEQ ID NO: 20075 - DNA, 25 bp, Homo sapien
acaaatgtgttccagggagacagat

SEQ ID NO: 20076 - DNA, 25 bp, Homo sapien
atccagtggctcagcggaattgatt

SEQ ID NO: 20077 - DNA, 25 bp, Homo sapien
gacagataatagtgaatgagggaaa

SEQ ID NO: 20078 - DNA, 25 bp, Homo sapien
catggctccataaaggcaatgggca

SEQ ID NO: 20079 - DNA, 25 bp, Homo sapien
aatggtcaggctggaaattgatgaa

SEQ ID NO: 20080 - DNA, 25 bp, Homo sapien
gactgcccaggcttttgacacaaat

SEQ ID NO: 20081 - DNA, 25 bp, Homo sapien
ttgaattcatgtgactgcccaggct

SEQ ID NO: 20082 - DNA, 25 bp, Homo sapien
ttctagcatatactaagtactcaag

SEQ ID NO: 20083 - DNA, 25 bp, Homo sapien
tctcacagaattaccatatgtaatg

SEQ ID NO: 20084 - DNA, 25 bp, Homo sapien
tctagtcccttcaccatcttgtttc

SEQ ID NO: 20085 - DNA, 25 bp, Homo sapien
ttcctcgtgtctctcatgtggtttc

SEQ ID NO: 20086 - DNA, 25 bp, Homo sapien
gtactcaagaggtgttacttatcat

SEQ ID NO: 20087 - DNA, 25 bp, Homo sapien
gtgcccggcctcatatgataaactt

SEQ ID NO: 20088 - DNA, 25 bp, Homo sapien
ctctcatgtggtttctagtcccttc

SEQ ID NO: 20089 - DNA, 25 bp, Homo sapien
gatttcagtaagtattaattcccac

SEQ ID NO: 20090 - DNA, 25 bp, Homo sapien
catatactaagtactcaagaggtgt

SEQ ID NO: 20091 - DNA, 25 bp, Homo sapien
ttacctccagcctaaatctacacta

SEQ ID NO: 20092 - DNA, 25 bp, Homo sapien
atactaagtactcaagaggtgttac

SEQ ID NO: 20093 - DNA, 25 bp, Homo sapien
tctcacagaattaccatatgtaatg

SEQ ID NO: 20094 - DNA, 25 bp, Homo sapien
attaaatatcataaaatggcacctg

SEQ ID NO: 20095 - DNA, 25 bp, Homo sapien
gtgcccggcctcatatgataaactt

SEQ ID NO: 20096 - DNA, 25 bp, Homo sapien
ttacctccagcctaaatctacacta

SEQ ID NO: 20097 - DNA, 25 bp, Homo sapien
ggcacctgacatatagaaagatttc

SEQ ID NO: 20098 - DNA, 25 bp, Homo sapien
gtactcaagaggtgttacttatcat

SEQ ID NO: 20099 - DNA, 25 bp, Homo sapien
ttcctcgtgtctctcatgtggtttc

SEQ ID NO: 20100 - DNA, 25 bp, Homo sapien
ctctcatgtggtttctagtcccttc

SEQ ID NO: 20101 - DNA, 25 bp, Homo sapien
gtaatcccatatatgagccaccgtg

SEQ ID NO: 20102 - DNA, 25 bp, Homo sapien
gatttcagtaagtattaattcccac

SEQ ID NO: 20103 - DNA, 25 bp, Homo sapien
catatactaagtactcaagaggtgt

SEQ ID NO: 20104 - DNA, 25 bp, Homo sapien
tctggagatttatactgagggaagt

SEQ ID NO: 20105 - DNA, 25 bp, Homo sapien
ttgcataaattgagaggataatgtt

SEQ ID NO: 20106 - DNA, 25 bp, Homo sapien
tctctgggtcatgatatataaattg

SEQ ID NO: 20107 - DNA, 25 bp, Homo sapien
ctttttggaaggagtcataatgttt

SEQ ID NO: 20108 - DNA, 25 bp, Homo sapien
ctgtatttcatgagggatgttggcc

SEQ ID NO: 20109 - DNA, 25 bp, Homo sapien
tttacaatgaaaccatctggagatt

SEQ ID NO: 20110 - DNA, 25 bp, Homo sapien
attaggtttagggtgttctcctcta

SEQ ID NO: 20111 - DNA, 25 bp, Homo sapien
gtaagagatagtgtaaaatgagcgt

SEQ ID NO: 20112 - DNA, 25 bp, Homo sapien
taaacccgtcttccatcactagaat

SEQ ID NO: 20113 - DNA, 25 bp, Homo sapien
ttcttgagcctgttaatgtgttagc

SEQ ID NO: 20114 - DNA, 25 bp, Homo sapien
cctgttaatgtgttagcttgcaagt

SEQ ID NO: 20115 - DNA, 25 bp, Homo sapien
accgcacctggctttactgcttaca

SEQ ID NO: 20116 - DNA, 25 bp, Homo sapien
taatattgaaacagccagctcattc

SEQ ID NO: 20117 - DNA, 25 bp, Homo sapien
atatagtgagcctttgaattgcatg

SEQ ID NO: 20118 - DNA, 25 bp, Homo sapien
tggtgaacaaagatgaatttcagac

SEQ ID NO: 20119 - DNA, 25 bp, Homo sapien
agtccacaatggattggtgaacaaa

SEQ ID NO: 20120 - DNA, 25 bp, Homo sapien
atctgagtttctatagtccacaatg

SEQ ID NO: 20121 - DNA, 25 bp, Homo sapien
atgagccctttcaaaggtaccagca

SEQ ID NO: 20122 - DNA, 25 bp, Homo sapien
gtgggagtcaaacagaagctaatat

SEQ ID NO: 20123 - DNA, 25 bp, Homo sapien
agccagctcattccatgcatagtga

SEQ ID NO: 20124 - DNA, 25 bp, Homo sapien
gaggcagttgatggatctccctttt

SEQ ID NO: 20125 - DNA, 25 bp, Homo sapien
ttgaattgcatgtgggagtcaaaca

SEQ ID NO: 20126 - DNA, 25 bp, Homo sapien
cagaggaaatcttggtggtacacta

SEQ ID NO: 20127 - DNA, 25 bp, Homo sapien
ctactgcagcaactgggaatgtgcc

SEQ ID NO: 20128 - DNA, 25 bp, Homo sapien
gtggtacactataaggatgacatcc

SEQ ID NO: 20129 - DNA, 25 bp, Homo sapien
ggtgagccataaatcccattaagat

SEQ ID NO: 20130 - DNA, 25 bp, Homo sapien
tccacagagcctttgctgcttgctt

SEQ ID NO: 20131 - DNA, 25 bp, Homo sapien
tagaaagcttgtatggcaatggtga

SEQ ID NO: 20132 - DNA, 25 bp, Homo sapien
ctcatcgctgagagtaatattaatc

SEQ ID NO: 20133 - DNA, 25 bp, Homo sapien
ttgaccaggaagtgacaagttctat

SEQ ID NO: 20134 - DNA, 25 bp, Homo sapien
aatcatgttgatatcccagaggaaa

SEQ ID NO: 20135 - DNA, 25 bp, Homo sapien
gttgatatgttgaccaggaagtgac

SEQ ID NO: 20136 - DNA, 25 bp, Homo sapien
ttggccaggcctctactgcagcaac

SEQ ID NO: 20137 - DNA, 25 bp, Homo sapien
ctcctgtgaatgtgatttaagctgt

SEQ ID NO: 20138 - DNA, 25 bp, Homo sapien
tcaatgcagatagctcggccttgtc

SEQ ID NO: 20139 - DNA, 25 bp, Homo sapien
ggttttagcctgagcatgtgatgca

SEQ ID NO: 20140 - DNA, 25 bp, Homo sapien
ctctgggtctgttgccaggaaaaat

SEQ ID NO: 20141 - DNA, 25 bp, Homo sapien
gcaaaagtgggaagaagtttactca

SEQ ID NO: 20142 - DNA, 25 bp, Homo sapien
agtttactcagatgaggcatcaccc

SEQ ID NO: 20143 - DNA, 25 bp, Homo sapien
aaggagaacatggactatgactcac

SEQ ID NO: 20144 - DNA, 25 bp, Homo sapien
tacctacaactgaggtaagtcacct

SEQ ID NO: 20145 - DNA, 25 bp, Homo sapien
gtctacacaagtggctgtcactggc

SEQ ID NO: 20146 - DNA, 25 bp, Homo sapien
aactagggctccttctcacgaagac

SEQ ID NO: 20147 - DNA, 25 bp, Homo sapien
tgactcacgcagttattccacagtt

SEQ ID NO: 20148 - DNA, 25 bp, Homo sapien
tatataggtgcaaaccaagggctat

SEQ ID NO: 20149 - DNA, 25 bp, Homo sapien
gggttgcccagcatactctactgcc

SEQ ID NO: 20150 - DNA, 25 bp, Homo sapien
tactgcctccattgcactggtattt

SEQ ID NO: 20151 - DNA, 25 bp, Homo sapien
caaaccaagggctatcagagcatgg

SEQ ID NO: 20152 - DNA, 25 bp, Homo sapien
cagaataattctggttaagacaaac

SEQ ID NO: 20153 - DNA, 25 bp, Homo sapien
agtagcacttatactaggcaaattt

SEQ ID NO: 20154 - DNA, 25 bp, Homo sapien
acttgtctttgaagctaaaagaggc

SEQ ID NO: 20155 - DNA, 25 bp, Homo sapien
ccagagtggttaagttctcataact

SEQ ID NO: 20156 - DNA, 25 bp, Homo sapien
aggccttctgtagaaagtagcactt

SEQ ID NO: 20157 - DNA, 25 bp, Homo sapien
ctaaaagaggcaggatacaaagcca

SEQ ID NO: 20158 - DNA, 25 bp, Homo sapien
tatttaggtgcttttatataggtgc

SEQ ID NO: 20159 - DNA, 25 bp, Homo sapien
ttgtacctagctggccaaagtggga

SEQ ID NO: 20160 - DNA, 25 bp, Homo sapien
tgttacctgctcatagaaagttcca

SEQ ID NO: 20161 - DNA, 25 bp, Homo sapien
taatagaggcatcccagaatctcag

SEQ ID NO: 20162 - DNA, 25 bp, Homo sapien
tcagtgacttaacataaaggatgtt

SEQ ID NO: 20163 - DNA, 25 bp, Homo sapien
ctttaatagaggcatcccagaatct

SEQ ID NO: 20164 - DNA, 25 bp, Homo sapien
tccatgtatttgtacctagctggcc

SEQ ID NO: 20165 - DNA, 25 bp, Homo sapien
tgggtccatggagtcattcagggat

SEQ ID NO: 20166 - DNA, 25 bp, Homo sapien
cataaaggatgtttgttacctgctc

SEQ ID NO: 20167 - DNA, 25 bp, Homo sapien
catgtatttgtacctagctggccaa

SEQ ID NO: 20168 - DNA, 25 bp, Homo sapien
tttgttacctgctcatagaaagttc

SEQ ID NO: 20169 - DNA, 25 bp, Homo sapien
atttgtacctagctggccaaagtgg

SEQ ID NO: 20170 - DNA, 25 bp, Homo sapien
tagtaatactatccttttgagaagc

SEQ ID NO: 20171 - DNA, 25 bp, Homo sapien
agtgaagtacctttctcgcctagta

SEQ ID NO: 20172 - DNA, 25 bp, Homo sapien
aaacagcactaatacccaatctaaa

SEQ ID NO: 20173 - DNA, 25 bp, Homo sapien
atacccaatctaaaagaatacagtg

SEQ ID NO: 20174 - DNA, 25 bp, Homo sapien
acataaagaaatgcactctaaaacc

SEQ ID NO: 20175 - DNA, 25 bp, Homo sapien
tacagtgaaacagtactagtaatac

SEQ ID NO: 20176 - DNA, 25 bp, Homo sapien
tctaaaaccacaacagtgaagtacc

SEQ ID NO: 20177 - DNA, 25 bp, Homo sapien
tttgagaagcaatttaaccacattt

SEQ ID NO: 20178 - DNA, 25 bp, Homo sapien
ctaaaagaatacagtgaaacagtac

SEQ ID NO: 20179 - DNA, 25 bp, Homo sapien
actcaaaaatcatacctgggaacct

SEQ ID NO: 20180 - DNA, 25 bp, Homo sapien
catacctgggaacctaccttaagga

SEQ ID NO: 20181 - DNA, 25 bp, Homo sapien
tgcaggcgccagagtcctccctaaa

SEQ ID NO: 20182 - DNA, 25 bp, Homo sapien
atctttgctgtcgatcaaggttgca

SEQ ID NO: 20183 - DNA, 25 bp, Homo sapien
aaaggcagatgcaggatacacactg

SEQ ID NO: 20184 - DNA, 25 bp, Homo sapien
atcaggtgtagggacctcgaggtct

SEQ ID NO: 20185 - DNA, 25 bp, Homo sapien
atctatcccacggagaatggggcac

SEQ ID NO: 20186 - DNA, 25 bp, Homo sapien
tcaggaaaggcagatgcaggataca

SEQ ID NO: 20187 - DNA, 25 bp, Homo sapien
ctgtcgatcaaggttgcaggcgcca

SEQ ID NO: 20188 - DNA, 25 bp, Homo sapien
gaccttccttctcagtgtggctcag

SEQ ID NO: 20189 - DNA, 25 bp, Homo sapien
atgcaggatacacactggacatctt

SEQ ID NO: 20190 - DNA, 25 bp, Homo sapien
ccatgagaatctatcccacggagaa

SEQ ID NO: 20191 - DNA, 25 bp, Homo sapien
gacctcgaggtctcatttggtttga

SEQ ID NO: 20192 - DNA, 25 bp, Homo sapien
cgctgactggggaggccgacttcaa

SEQ ID NO: 20193 - DNA, 25 bp, Homo sapien
tgtccagagccagaaggtaacaggc

SEQ ID NO: 20194 - DNA, 25 bp, Homo sapien
atggggccaatgcacatgagccaca

SEQ ID NO: 20195 - DNA, 25 bp, Homo sapien
cggagcgcacgtgtgtccagagcca

SEQ ID NO: 20196 - DNA, 25 bp, Homo sapien
cactcgctgactggggaggccgact

SEQ ID NO: 20197 - DNA, 25 bp, Homo sapien
gacctggtggatgacaatttaagta

SEQ ID NO: 20198 - DNA, 25 bp, Homo sapien
gagaaggacatgcagaagacagaca

SEQ ID NO: 20199 - DNA, 25 bp, Homo sapien
aaggacatgcagaagacagacatcc

SEQ ID NO: 20200 - DNA, 25 bp, Homo sapien
tccagagccagaaggtaacaggcct

SEQ ID NO: 20201 - DNA, 25 bp, Homo sapien
acaatttaagtagagagaagacgag

SEQ ID NO: 20202 - DNA, 25 bp, Homo sapien
atgacaatttaagtagagagaagac

SEQ ID NO: 20203 - DNA, 25 bp, Homo sapien
cacaaaaagggaagctcccttggca

SEQ ID NO: 20204 - DNA, 25 bp, Homo sapien
gctagagcaggaattttgagattga

SEQ ID NO: 20205 - DNA, 25 bp, Homo sapien
ccaatgggagatctgcctggcttga

SEQ ID NO: 20206 - DNA, 25 bp, Homo sapien
tgttgtgctgcacatggacaactgt

SEQ ID NO: 20207 - DNA, 25 bp, Homo sapien
agacgtctcagcatgtgacttacgc

SEQ ID NO: 20208 - DNA, 25 bp, Homo sapien
acttcaagaagtccatggcacagac

SEQ ID NO: 20209 - DNA, 25 bp, Homo sapien
gatgggtttctctaggaagttggta

SEQ ID NO: 20210 - DNA, 25 bp, Homo sapien
taaaaaacatcacagtgagaagggg

SEQ ID NO: 20211 - DNA, 25 bp, Homo sapien
cctggcttgatttgttgtgctgcac

SEQ ID NO: 20212 - DNA, 25 bp, Homo sapien
ttggtaactagtgccaatgggagat

SEQ ID NO: 20213 - DNA, 25 bp, Homo sapien
agtttgttgttgcagacgtctcagc

SEQ ID NO: 20214 - DNA, 25 bp, Homo sapien
aatcagcctaaaaacacgaacctaa

SEQ ID NO: 20215 - DNA, 25 bp, Homo sapien
aattactaaacatgggtgcttcagc

SEQ ID NO: 20216 - DNA, 25 bp, Homo sapien
gctcccggccatggtatatggtttt

SEQ ID NO: 20217 - DNA, 25 bp, Homo sapien
taagagccagagaattacaagtttt

SEQ ID NO: 20218 - DNA, 25 bp, Homo sapien
gccagcatttaagagccagagaatt

SEQ ID NO: 20219 - DNA, 25 bp, Homo sapien
atcagactaaatggagatctgggct

SEQ ID NO: 20220 - DNA, 25 bp, Homo sapien
ggaactaataaaattgccagcattt

SEQ ID NO: 20221 - DNA, 25 bp, Homo sapien
atgtcggccaggctgccatccaact

SEQ ID NO: 20222 - DNA, 25 bp, Homo sapien
gtgcttcagcataagttaacagtga

SEQ ID NO: 20223 - DNA, 25 bp, Homo sapien
gattgtattatgacaaatcagccta

SEQ ID NO: 20224 - DNA, 25 bp, Homo sapien
tgtgagacactgctcccggccatgg

SEQ ID NO: 20225 - DNA, 25 bp, Homo sapien
atgtccgtctttatatcagtaccac

SEQ ID NO: 20226 - DNA, 25 bp, Homo sapien
ggtcttagcacccttctcaaaaatc

SEQ ID NO: 20227 - DNA, 25 bp, Homo sapien
tatatgttgttaggtaagggtctgg

SEQ ID NO: 20228 - DNA, 25 bp, Homo sapien
catttgaccatatgtgcatggcttt

SEQ ID NO: 20229 - DNA, 25 bp, Homo sapien
attctaagaaaacaagagctcttat

SEQ ID NO: 20230 - DNA, 25 bp, Homo sapien
aagggtctggcttaccttatttcac

SEQ ID NO: 20231 - DNA, 25 bp, Homo sapien
ttccctactgaatggtcttagcacc

SEQ ID NO: 20232 - DNA, 25 bp, Homo sapien
taagttttgagatctggaagcgtga

SEQ ID NO: 20233 - DNA, 25 bp, Homo sapien
taggtatttgatgcattttgggtta

SEQ ID NO: 20234 - DNA, 25 bp, Homo sapien
gctaagtgaaataaggtaactaaga

SEQ ID NO: 20235 - DNA, 25 bp, Homo sapien
gatctggaagcgtgagtcctccagc

SEQ ID NO: 20236 - DNA, 25 bp, Homo sapien
atgttgcatgccacagaaaggtcaa

SEQ ID NO: 20237 - DNA, 25 bp, Homo sapien
caagagacaaaggtattccagaact

SEQ ID NO: 20238 - DNA, 25 bp, Homo sapien
atgttgtaccagaggagtcaagtta

SEQ ID NO: 20239 - DNA, 25 bp, Homo sapien
aaacggaaatatggagtaggcgatt

SEQ ID NO: 20240 - DNA, 25 bp, Homo sapien
agagccaagtaagagctcagctctc

SEQ ID NO: 20241 - DNA, 25 bp, Homo sapien
tcccatacaggtggatagagagcca

SEQ ID NO: 20242 - DNA, 25 bp, Homo sapien
tcagctctctgagggagtgtgtaca

SEQ ID NO: 20243 - DNA, 25 bp, Homo sapien
atctcaagatcatgggcgaccctga

SEQ ID NO: 20244 - DNA, 25 bp, Homo sapien
atgggaagagatgaaatgaataaca

SEQ ID NO: 20245 - DNA, 25 bp, Homo sapien
ggacaagagataggaaaatgtagta

SEQ ID NO: 20246 - DNA, 25 bp, Homo sapien
aaccactggatttggtgaccacatc

SEQ ID NO: 20247 - DNA, 25 bp, Homo sapien
atatacagccattccataataatta

SEQ ID NO: 20248 - DNA, 25 bp, Homo sapien
cttaaaaaccgctgaatggtaggta

SEQ ID NO: 20249 - DNA, 25 bp, Homo sapien
gtctcttatctatatacagccattc

SEQ ID NO: 20250 - DNA, 25 bp, Homo sapien
taattaataaagaccatagataaat

SEQ ID NO: 20251 - DNA, 25 bp, Homo sapien
taaaaaccgctgaatggtaggtaca

SEQ ID NO: 20252 - DNA, 25 bp, Homo sapien
agtatgatgtatgattatgcgtaat

SEQ ID NO: 20253 - DNA, 25 bp, Homo sapien
accgctgaatggtaggtacacctta

SEQ ID NO: 20254 - DNA, 25 bp, Homo sapien
aaaccgctgaatggtaggtacacct

SEQ ID NO: 20255 - DNA, 25 bp, Homo sapien
ttaatgacatatgctaacaaaaaca

SEQ ID NO: 20256 - DNA, 25 bp, Homo sapien
aggtacaccttaaacagacgaactc

SEQ ID NO: 20257 - DNA, 25 bp, Homo sapien
ttttaggggtagtatgatgtatgat

SEQ ID NO: 20258 - DNA, 25 bp, Homo sapien
gtggcgaggcaacattaaacatttc

SEQ ID NO: 20259 - DNA, 25 bp, Homo sapien
ccataaagtggcgaggcaacattaa

SEQ ID NO: 20260 - DNA, 25 bp, Homo sapien
aaactaagcgagtccataaagtggc

SEQ ID NO: 20261 - DNA, 25 bp, Homo sapien
acagggtaaactaagcgagtccata

SEQ ID NO: 20262 - DNA, 25 bp, Homo sapien
atggccaagtgtgatggttgtaaac

SEQ ID NO: 20263 - DNA, 25 bp, Homo sapien
atatatcctgttttcgtagtccctc

SEQ ID NO: 20264 - DNA, 25 bp, Homo sapien
aggcgtgatcccacaattaccgtgc

SEQ ID NO: 20265 - DNA, 25 bp, Homo sapien
ttgatttagggcatctatataaaac

SEQ ID NO: 20266 - DNA, 25 bp, Homo sapien
tgatggttgtaaacgacagggtaaa

SEQ ID NO: 20267 - DNA, 25 bp, Homo sapien
tctttttcagatggccaagtgtgat

SEQ ID NO: 20268 - DNA, 25 bp, Homo sapien
gtctcaactgactcatatatcctgt

SEQ ID NO: 20269 - DNA, 25 bp, Homo sapien
ttacaagctttgtgactgtgagcaa

SEQ ID NO: 20270 - DNA, 25 bp, Homo sapien
ttcttaacaaccacagacaagttga

SEQ ID NO: 20271 - DNA, 25 bp, Homo sapien
agccactcgaacaaaactaaacaag

SEQ ID NO: 20272 - DNA, 25 bp, Homo sapien
gacaagttgatttagccactcgaac

SEQ ID NO: 20273 - DNA, 25 bp, Homo sapien
tacaggctgagcaccgtgaccagct

SEQ ID NO: 20274 - DNA, 25 bp, Homo sapien
tgagcaccgtgaccagctgggacta

SEQ ID NO: 20275 - DNA, 25 bp, Homo sapien
aaacaaggaaagctcacactcaatt

SEQ ID NO: 20276 - DNA, 25 bp, Homo sapien
acaaaactaaacaaggaaagctcac

SEQ ID NO: 20277 - DNA, 25 bp, Homo sapien
accacagacaagttgatttagccac

SEQ ID NO: 20278 - DNA, 25 bp, Homo sapien
aaatggagacaaaatttgctttgcc

SEQ ID NO: 20279 - DNA, 25 bp, Homo sapien
agctgggactactgtttttcttaac

SEQ ID NO: 20280 - DNA, 25 bp, Homo sapien
tgtgcagaaactaacaaaccaaatc

SEQ ID NO: 20281 - DNA, 25 bp, Homo sapien
actctggtcatggatcagaagattt

SEQ ID NO: 20282 - DNA, 25 bp, Homo sapien
ttgagactgtgtggtactggcctaa

SEQ ID NO: 20283 - DNA, 25 bp, Homo sapien
aagaacaatgtttaaggattcctga

SEQ ID NO: 20284 - DNA, 25 bp, Homo sapien
aataaatggcaagataactctggtc

SEQ ID NO: 20285 - DNA, 25 bp, Homo sapien
ctggcctaagggtaaacatatagat

SEQ ID NO: 20286 - DNA, 25 bp, Homo sapien
ttatatggaaatacaagggacccag

SEQ ID NO: 20287 - DNA, 25 bp, Homo sapien
agggacccagaataaccaaagcaat

SEQ ID NO: 20288 - DNA, 25 bp, Homo sapien
tgctagatggcaatactcctcaaat

SEQ ID NO: 20289 - DNA, 25 bp, Homo sapien
aaatgtcagctaccttttgtgcaga

SEQ ID NO: 20290 - DNA, 25 bp, Homo sapien
cagttgaactgtattaaagaagctt

SEQ ID NO: 20291 - DNA, 25 bp, Homo sapien
atttgatttgcccaggaggtcctct

SEQ ID NO: 20292 - DNA, 25 bp, Homo sapien
ttatgagactagacaaaaatggatc

SEQ ID NO: 20293 - DNA, 25 bp, Homo sapien
agtgagaaactagatgctgaagatc

SEQ ID NO: 20294 - DNA, 25 bp, Homo sapien
tatttcagtgagaaactagatgctg

SEQ ID NO: 20295 - DNA, 25 bp, Homo sapien
ctagacaaaaatggatcagacaaga

SEQ ID NO: 20296 - DNA, 25 bp, Homo sapien
tagatgctgaagatcaacacgttgc

SEQ ID NO: 20297 - DNA, 25 bp, Homo sapien
tagtaaatttatccgaacatccagg

SEQ ID NO: 20298 - DNA, 25 bp, Homo sapien
ctatgtgatcacaacttgaatctat

SEQ ID NO: 20299 - DNA, 25 bp, Homo sapien
atccaggatactcttgagttgtttc

SEQ ID NO: 20300 - DNA, 25 bp, Homo sapien
tcagacaagaaatttgatttgccca

SEQ ID NO: 20301 - DNA, 25 bp, Homo sapien
acaatcagcagcttaagcatccctt

SEQ ID NO: 20302 - DNA, 25 bp, Homo sapien
atgggaaaggtagtttctgactgca

SEQ ID NO: 20303 - DNA, 25 bp, Homo sapien
agaggcagggatgtctgtcttatcc

SEQ ID NO: 20304 - DNA, 25 bp, Homo sapien
tgggaacatttgagactataaagca

SEQ ID NO: 20305 - DNA, 25 bp, Homo sapien
tccttaaggaagagcatgttgggaa

SEQ ID NO: 20306 - DNA, 25 bp, Homo sapien
tgaggaaaaagtttgagtctaatcc

SEQ ID NO: 20307 - DNA, 25 bp, Homo sapien
agcctctcgagtagagtacctagga

SEQ ID NO: 20308 - DNA, 25 bp, Homo sapien
aagacaggggcaggataagcttttt

SEQ ID NO: 20309 - DNA, 25 bp, Homo sapien
gggaagatgtgaactgtagtatgta

SEQ ID NO: 20310 - DNA, 25 bp, Homo sapien
ctataaagcagtcacaggcagcatg

SEQ ID NO: 20311 - DNA, 25 bp, Homo sapien
tgagctctgtaacaaggtgtacact

SEQ ID NO: 20312 - DNA, 25 bp, Homo sapien
atgcccggcccaggaagattttcaa

SEQ ID NO: 20313 - DNA, 25 bp, Homo sapien
ttgtgatgcaaatgaggcacacttc

SEQ ID NO: 20314 - DNA, 25 bp, Homo sapien
aagtgaactccaaccatttcaggcc

SEQ ID NO: 20315 - DNA, 25 bp, Homo sapien
catttcttggtaagatgacagtccc

SEQ ID NO: 20316 - DNA, 25 bp, Homo sapien
ccagatttcaattttgagtgcatac

SEQ ID NO: 20317 - DNA, 25 bp, Homo sapien
cttcaaaaagtagaatgattagcat

SEQ ID NO: 20318 - DNA, 25 bp, Homo sapien
ctctgtggcttccttagaagcattt

SEQ ID NO: 20319 - DNA, 25 bp, Homo sapien
tgaggcacacttcaaaaagtagaat

SEQ ID NO: 20320 - DNA, 25 bp, Homo sapien
tagggaatatcatccttatgcaaga

SEQ ID NO: 20321 - DNA, 25 bp, Homo sapien
aaggttgcaggattaatgagctcca

SEQ ID NO: 20322 - DNA, 25 bp, Homo sapien
agctcacagaaggttgcaggattaa

SEQ ID NO: 20323 - DNA, 25 bp, Homo sapien
cacagaagcataatgttgaattttc

SEQ ID NO: 20324 - DNA, 25 bp, Homo sapien
attgggtgtctgctcctaatgaaat

SEQ ID NO: 20325 - DNA, 25 bp, Homo sapien
agcaaccaggcatagttacatgctt

SEQ ID NO: 20326 - DNA, 25 bp, Homo sapien
tcctaatgaaataaggggcagtggt

SEQ ID NO: 20327 - DNA, 25 bp, Homo sapien
ctaatgtcacagaagcaaccaggca

SEQ ID NO: 20328 - DNA, 25 bp, Homo sapien
aatgtgtggttcgtaattgggtgtc

SEQ ID NO: 20329 - DNA, 25 bp, Homo sapien
ataccaccgaggaagtattcgtacc

SEQ ID NO: 20330 - DNA, 25 bp, Homo sapien
ttccagatagaagtgtgaaatacca

SEQ ID NO: 20331 - DNA, 25 bp, Homo sapien
gtgtgaaataccaccgaggaagtat

SEQ ID NO: 20332 - DNA, 25 bp, Homo sapien
taggttaaatgacacatggtgacac

SEQ ID NO: 20333 - DNA, 25 bp, Homo sapien
acgaagtcatataatatcagcgatt

SEQ ID NO: 20334 - DNA, 25 bp, Homo sapien
tatacagaaacagaggaataggtta

SEQ ID NO: 20335 - DNA, 25 bp, Homo sapien
aggaagccagccacaaagactacat

SEQ ID NO: 20336 - DNA, 25 bp, Homo sapien
accaaatactttgactataagccca

SEQ ID NO: 20337 - DNA, 25 bp, Homo sapien
tggtaccaccagtctgaagataatg

SEQ ID NO: 20338 - DNA, 25 bp, Homo sapien
aagcccattgttgatgagtttttgc

SEQ ID NO: 20339 - DNA, 25 bp, Homo sapien
atctctcaatggtaccaccagtctg

SEQ ID NO: 20340 - DNA, 25 bp, Homo sapien
acatactgtaggatggttgcacaac

SEQ ID NO: 20341 - DNA, 25 bp, Homo sapien
gatgagtttttgcactaaaaaatgc

SEQ ID NO: 20342 - DNA, 25 bp, Homo sapien
gtgaaggaagccagccacaaagact

SEQ ID NO: 20343 - DNA, 25 bp, Homo sapien
gcgcccggcccacatggataaactt

SEQ ID NO: 20344 - DNA, 25 bp, Homo sapien
agactacatactgtaggatggttgc

SEQ ID NO: 20345 - DNA, 25 bp, Homo sapien
tgactataagcccattgttgatgag

SEQ ID NO: 20346 - DNA, 25 bp, Homo sapien
attttgcaggatggccctgtgtcct

SEQ ID NO: 20347 - DNA, 25 bp, Homo sapien
cccaggtcacatgtgtgagatgcct

SEQ ID NO: 20348 - DNA, 25 bp, Homo sapien
cagacagttctgctttgacacacca

SEQ ID NO: 20349 - DNA, 25 bp, Homo sapien
ttgaagtgtatgtagattgttgccc

SEQ ID NO: 20350 - DNA, 25 bp, Homo sapien
tgacacaccaaagaatcctgtaggc

SEQ ID NO: 20351 - DNA, 25 bp, Homo sapien
agatgcctgggtgctgcttcagaaa

SEQ ID NO: 20352 - DNA, 25 bp, Homo sapien
tgcttcagaaatcaagatgatctcc

SEQ ID NO: 20353 - DNA, 25 bp, Homo sapien
cttctagagtcagaatggtagggtc

SEQ ID NO: 20354 - DNA, 25 bp, Homo sapien
tggtagggtccgttgacttcagctt

SEQ ID NO: 20355 - DNA, 25 bp, Homo sapien
tagcagagccgccagcacaaaccaa

SEQ ID NO: 20356 - DNA, 25 bp, Homo sapien
aagaatcctgtaggctagcagagcc

SEQ ID NO: 20357 - DNA, 25 bp, Homo sapien
ttgctggctctgacgaagcctccca

SEQ ID NO: 20358 - DNA, 25 bp, Homo sapien
tgaggaacagaatcctgccagcatt

SEQ ID NO: 20359 - DNA, 25 bp, Homo sapien
agcccaacaggccatgaggaacaga

SEQ ID NO: 20360 - DNA, 25 bp, Homo sapien
tgccagcattcaggtgagtgagctt

SEQ ID NO: 20361 - DNA, 25 bp, Homo sapien
aggaacatgagagatgccttggcca

SEQ ID NO: 20362 - DNA, 25 bp, Homo sapien
ttggccaacagctgtcgaggagcta

SEQ ID NO: 20363 - DNA, 25 bp, Homo sapien
cttctgagagtaggttacgaaagga

SEQ ID NO: 20364 - DNA, 25 bp, Homo sapien
gtatgagctgccctatgaagacacc

SEQ ID NO: 20365 - DNA, 25 bp, Homo sapien
aagacacccacatggccaggaacat

SEQ ID NO: 20366 - DNA, 25 bp, Homo sapien
gactcagccgggatgtcacttctga

SEQ ID NO: 20367 - DNA, 25 bp, Homo sapien
gacgaagcctcccaccactgtatga

SEQ ID NO: 20368 - DNA, 25 bp, Homo sapien
ttcatgcagcaatagtaactagaac

SEQ ID NO: 20369 - DNA, 25 bp, Homo sapien
gaaaccatcccagctgacttctgtt

SEQ ID NO: 20370 - DNA, 25 bp, Homo sapien
aatgcgtgttttggatagtttttca

SEQ ID NO: 20371 - DNA, 25 bp, Homo sapien
acctacaggatccaagggtataata

SEQ ID NO: 20372 - DNA, 25 bp, Homo sapien
ctactgcaatgaagcctgggaaaac

SEQ ID NO: 20373 - DNA, 25 bp, Homo sapien
tgataggaaaagcatagcaccctca

SEQ ID NO: 20374 - DNA, 25 bp, Homo sapien
agtgccacctctactgcaatgaagc

SEQ ID NO: 20375 - DNA, 25 bp, Homo sapien
ctagaacaaacctctctgataggaa

SEQ ID NO: 20376 - DNA, 25 bp, Homo sapien
tttgtgccacagtaaatgcgtgttt

SEQ ID NO: 20377 - DNA, 25 bp, Homo sapien
tctgcagaacagtgtcacagtgcca

SEQ ID NO: 20378 - DNA, 25 bp, Homo sapien
ttctagcctctttagtcaggaagaa

SEQ ID NO: 20379 - DNA, 25 bp, Homo sapien
tagattcacagatacatagatgtag

SEQ ID NO: 20380 - DNA, 25 bp, Homo sapien
agaatggtattataaaccacggttc

SEQ ID NO: 20381 - DNA, 25 bp, Homo sapien
acatatgtaagtaccttagccagtg

SEQ ID NO: 20382 - DNA, 25 bp, Homo sapien
ataaaccacggttcaggtgctgaat

SEQ ID NO: 20383 - DNA, 25 bp, Homo sapien
cccttacagtggtataattgcttcc

SEQ ID NO: 20384 - DNA, 25 bp, Homo sapien
ttgttcagtgccaggattgatgggc

SEQ ID NO: 20385 - DNA, 25 bp, Homo sapien
ttcaggtgctgaatgtgcttttact

SEQ ID NO: 20386 - DNA, 25 bp, Homo sapien
tacatagatgtagatatatactctg

SEQ ID NO: 20387 - DNA, 25 bp, Homo sapien
gtaccttagccagtgtatacacaga

SEQ ID NO: 20388 - DNA, 25 bp, Homo sapien
gagaaacctggttctcaccattctt

SEQ ID NO: 20389 - DNA, 25 bp, Homo sapien
tgcttccacaccctcagtgaacaga

SEQ ID NO: 20390 - DNA, 25 bp, Homo sapien
ctagttgtagaaacctgggtacaag

SEQ ID NO: 20391 - DNA, 25 bp, Homo sapien
taactggaagctgaactaataattt

SEQ ID NO: 20392 - DNA, 25 bp, Homo sapien
tcatgttaacagagcaggataagac

SEQ ID NO: 20393 - DNA, 25 bp, Homo sapien
agcaggataagacgggcttatttgt

SEQ ID NO: 20394 - DNA, 25 bp, Homo sapien
gatggtttccagcttgaggtctttt

SEQ ID NO: 20395 - DNA, 25 bp, Homo sapien
aaggaggtggcctagttgtagaaac

SEQ ID NO: 20396 - DNA, 25 bp, Homo sapien
taaagcaagaccaataataaggaat

SEQ ID NO: 20397 - DNA, 25 bp, Homo sapien
ttccagcttgaggtcttttgcccat

SEQ ID NO: 20398 - DNA, 25 bp, Homo sapien
cctgggtacaaggttaaagcaagac

SEQ ID NO: 20399 - DNA, 25 bp, Homo sapien
atatgtgcaggtctattctataggt

SEQ ID NO: 20400 - DNA, 25 bp, Homo sapien
caataataaggaataactggaagct

SEQ ID NO: 20401 - DNA, 25 bp, Homo sapien
tattttcagaccaccaagccatgag

SEQ ID NO: 20402 - DNA, 25 bp, Homo sapien
tgctgaggcataggaaactcttttc

SEQ ID NO: 20403 - DNA, 25 bp, Homo sapien
taatctggtatttcacaagttgctg

SEQ ID NO: 20404 - DNA, 25 bp, Homo sapien
actttttatcctggagacagtgtcc

SEQ ID NO: 20405 - DNA, 25 bp, Homo sapien
ttcagaccaccaagccatgagaggt

SEQ ID NO: 20406 - DNA, 25 bp, Homo sapien
atgagaggtgacagcagtagcaaat

SEQ ID NO: 20407 - DNA, 25 bp, Homo sapien
tcacaagttgctgaggcataggaaa

SEQ ID NO: 20408 - DNA, 25 bp, Homo sapien
cagtgtccacaaacttaatctggta

SEQ ID NO: 20409 - DNA, 25 bp, Homo sapien
aggtgacagcagtagcaaatctcat

SEQ ID NO: 20410 - DNA, 25 bp, Homo sapien
tatcctggagacagtgtccacaaac

SEQ ID NO: 20411 - DNA, 25 bp, Homo sapien
ggtatttcacaagttgctgaggcat

SEQ ID NO: 20412 - DNA, 25 bp, Homo sapien
cttataggagccatgcgctgcacct

SEQ ID NO: 20413 - DNA, 25 bp, Homo sapien
tagacttagctactcctcgcaccag

SEQ ID NO: 20414 - DNA, 25 bp, Homo sapien
tggggataaactagactgagcatct

SEQ ID NO: 20415 - DNA, 25 bp, Homo sapien
tagtgtcctagactgaccttcagac

SEQ ID NO: 20416 - DNA, 25 bp, Homo sapien
tgcgtgagatgtgcctagtgtccta

SEQ ID NO: 20417 - DNA, 25 bp, Homo sapien
taggaactgcaagagctctagactt

SEQ ID NO: 20418 - DNA, 25 bp, Homo sapien
aagagaatctggatcccatggggat

SEQ ID NO: 20419 - DNA, 25 bp, Homo sapien
ttacacctcaatgaggcaggtgcct

SEQ ID NO: 20420 - DNA, 25 bp, Homo sapien
aaattgtgagcatgggaaaaggtct

SEQ ID NO: 20421 - DNA, 25 bp, Homo sapien
gaaaaggtctatgaaggagtctaac

SEQ ID NO: 20422 - DNA, 25 bp, Homo sapien
cagaaaagctagagtgaacatgggc

SEQ ID NO: 20423 - DNA, 25 bp, Homo sapien
agacgaggctccaccagccaggctg

SEQ ID NO: 20424 - DNA, 25 bp, Homo sapien
gcactgggccaaggccttgtaatat

SEQ ID NO: 20425 - DNA, 25 bp, Homo sapien
tgttcaaccacgtttcctctcaggc

SEQ ID NO: 20426 - DNA, 25 bp, Homo sapien
tatccaccctgaggcctaatacagt

SEQ ID NO: 20427 - DNA, 25 bp, Homo sapien
ctgcattcccagtagagacgaggct

SEQ ID NO: 20428 - DNA, 25 bp, Homo sapien
tttcttcaataacctcgatggcctt

SEQ ID NO: 20429 - DNA, 25 bp, Homo sapien
accctgcagcttatgctggagtgca

SEQ ID NO: 20430 - DNA, 25 bp, Homo sapien
agagtctcaccctgcagcttatgct

SEQ ID NO: 20431 - DNA, 25 bp, Homo sapien
tttcctcatggagcaaccttcagct

SEQ ID NO: 20432 - DNA, 25 bp, Homo sapien
agtgctgagctgagcatactctggt

SEQ ID NO: 20433 - DNA, 25 bp, Homo sapien
aaaatcaatagggaaggcattagtt

SEQ ID NO: 20434 - DNA, 25 bp, Homo sapien
ctcttaaacagtatgctacacagtt

SEQ ID NO: 20435 - DNA, 25 bp, Homo sapien
aagtagtattttagcttattgccta

SEQ ID NO: 20436 - DNA, 25 bp, Homo sapien
ccgcgcccggctataacaggttatt

SEQ ID NO: 20437 - DNA, 25 bp, Homo sapien
acatatgccatgtgagaggttttat

SEQ ID NO: 20438 - DNA, 25 bp, Homo sapien
atatgccatgtgagaggttttatct

SEQ ID NO: 20439 - DNA, 25 bp, Homo sapien
aacagtatgctacacagtttattac

SEQ ID NO: 20440 - DNA, 25 bp, Homo sapien
aaatacatatgccatgtgagaggtt

SEQ ID NO: 20441 - DNA, 25 bp, Homo sapien
cacctccctcctgaccaagcgattc

SEQ ID NO: 20442 - DNA, 25 bp, Homo sapien
cgcgcccggctataacaggttattt

SEQ ID NO: 20443 - DNA, 25 bp, Homo sapien
acacagtttattacaaagtagtatt

SEQ ID NO: 20444 - DNA, 25 bp, Homo sapien
atgtgtagtataaatacatatgcca

SEQ ID NO: 20445 - DNA, 25 bp, Homo sapien
ggctttaaactgataacaatttgcc

SEQ ID NO: 20446 - DNA, 25 bp, Homo sapien
ctcctagtagtaataagattgcttc

SEQ ID NO: 20447 - DNA, 25 bp, Homo sapien
ttctgaaggacagctttgccaggta

SEQ ID NO: 20448 - DNA, 25 bp, Homo sapien
taaaacaggctttaaactgataaca

SEQ ID NO: 20449 - DNA, 25 bp, Homo sapien
gtaaagcattcttggttagcaggtt

SEQ ID NO: 20450 - DNA, 25 bp, Homo sapien
ctttaacaatatactgtagctgcag

SEQ ID NO: 20451 - DNA, 25 bp, Homo sapien
gacagctttgccaggtaaagcattc

SEQ ID NO: 20452 - DNA, 25 bp, Homo sapien
tctcttaaccctcctagtagtaata

SEQ ID NO: 20453 - DNA, 25 bp, Homo sapien
ccaccttaacagtattagagaattc

SEQ ID NO: 20454 - DNA, 25 bp, Homo sapien
ccatgaggcttacataaaatatttt

SEQ ID NO: 20455 - DNA, 25 bp, Homo sapien
agattgcttcacacaccaccttaac

SEQ ID NO: 20456 - DNA, 25 bp, Homo sapien
tgtggaccattttttactgagcaaa

SEQ ID NO: 20457 - DNA, 25 bp, Homo sapien
taaatcctcattgggactgaaattt

SEQ ID NO: 20458 - DNA, 25 bp, Homo sapien
tgcattccaggcacagcacactgta

SEQ ID NO: 20459 - DNA, 25 bp, Homo sapien
aactgtggaccattttttactgagc

SEQ ID NO: 20460 - DNA, 25 bp, Homo sapien
tttaatataaatcctcattgggact

SEQ ID NO: 20461 - DNA, 25 bp, Homo sapien
cattgggactgaaatttttggaaaa

SEQ ID NO: 20462 - DNA, 25 bp, Homo sapien
tgcatttttgcattccaggcacagc

SEQ ID NO: 20463 - DNA, 25 bp, Homo sapien
attccaggcacagcacactgtagtt

SEQ ID NO: 20464 - DNA, 25 bp, Homo sapien
gataggggtgaacaccgactgcctc

SEQ ID NO: 20465 - DNA, 25 bp, Homo sapien
tttttgcattccaggcacagcacac

SEQ ID NO: 20466 - DNA, 25 bp, Homo sapien
agaaactgtggaccattttttactg

SEQ ID NO: 20467 - DNA, 25 bp, Homo sapien
gcagcaatgtacagggctacccttt

SEQ ID NO: 20468 - DNA, 25 bp, Homo sapien
gtagttgacaaaggccttcagaatc

SEQ ID NO: 20469 - DNA, 25 bp, Homo sapien
gtgtttgaacacaatggtcagggga

SEQ ID NO: 20470 - DNA, 25 bp, Homo sapien
agttggcctgcttctgcggctgcat

SEQ ID NO: 20471 - DNA, 25 bp, Homo sapien
ctgcggctgcatgaatggggcattt

SEQ ID NO: 20472 - DNA, 25 bp, Homo sapien
acacaatggtcaggggagtttgtcc

SEQ ID NO: 20473 - DNA, 25 bp, Homo sapien
gaatcaacagttggcctgcttctgc

SEQ ID NO: 20474 - DNA, 25 bp, Homo sapien
acaaaggccttcagaatcaacagtt

SEQ ID NO: 20475 - DNA, 25 bp, Homo sapien
tgaagggcttcatggcaccatgctc

SEQ ID NO: 20476 - DNA, 25 bp, Homo sapien
cagtgagttcaatgtacccacaaaa

SEQ ID NO: 20477 - DNA, 25 bp, Homo sapien
caatgtacccacaaaaagcagcaat

SEQ ID NO: 20478 - DNA, 25 bp, Homo sapien
aaggagaacccagctcagtccaaac

SEQ ID NO: 20479 - DNA, 25 bp, Homo sapien
aatattcctacaaggagaacccagc

SEQ ID NO: 20480 - DNA, 25 bp, Homo sapien
cctacaaggagaacccagctcagtc

SEQ ID NO: 20481 - DNA, 25 bp, Homo sapien
ttcctacaaggagaacccagctcag

SEQ ID NO: 20482 - DNA, 25 bp, Homo sapien
ccaaactccatggtgagttctctgt

SEQ ID NO: 20483 - DNA, 25 bp, Homo sapien
tattcctacaaggagaacccagctc

SEQ ID NO: 20484 - DNA, 25 bp, Homo sapien
atattcctacaaggagaacccagct

SEQ ID NO: 20485 - DNA, 25 bp, Homo sapien
tcctacaaggagaacccagctcagt

SEQ ID NO: 20486 - DNA, 25 bp, Homo sapien
attcctacaaggagaacccagctca

SEQ ID NO: 20487 - DNA, 25 bp, Homo sapien
ctacaaggagaacccagctcagtcc

SEQ ID NO: 20488 - DNA, 25 bp, Homo sapien
ttaatattcctacaaggagaaccca

SEQ ID NO: 20489 - DNA, 25 bp, Homo sapien
actgaaagtcagagccctgtgcaat

SEQ ID NO: 20490 - DNA, 25 bp, Homo sapien
tgaacaaaaatgtagcgtaatgtac

SEQ ID NO: 20491 - DNA, 25 bp, Homo sapien
ccaaaacttggccaaaatgtgtgag

SEQ ID NO: 20492 - DNA, 25 bp, Homo sapien
ccctagattacataaggggtggggc

SEQ ID NO: 20493 - DNA, 25 bp, Homo sapien
acaagtaaaagaatcagctggaatc

SEQ ID NO: 20494 - DNA, 25 bp, Homo sapien
cccaacaagttagtagagtgagttg

SEQ ID NO: 20495 - DNA, 25 bp, Homo sapien
aagtgagtcacagaaaggatgtaaa

SEQ ID NO: 20496 - DNA, 25 bp, Homo sapien
aatgtgtgagaaagtactgaaagtc

SEQ ID NO: 20497 - DNA, 25 bp, Homo sapien
ctttaaggtgcataggatgttctac

SEQ ID NO: 20498 - DNA, 25 bp, Homo sapien
cattttacaggttggagaagtgagt

SEQ ID NO: 20499 - DNA, 25 bp, Homo sapien
aggatgtaaaaacgtccctagatta

SEQ ID NO: 20500 - DNA, 25 bp, Homo sapien
ggggtcatacatgctgggccttcaa

SEQ ID NO: 20501 - DNA, 25 bp, Homo sapien
cttcaagggccatgatatggttatc

SEQ ID NO: 20502 - DNA, 25 bp, Homo sapien
atttcaagcccaggggacggctcat

SEQ ID NO: 20503 - DNA, 25 bp, Homo sapien
cctttccgatagtgacaggtgctgg

SEQ ID NO: 20504 - DNA, 25 bp, Homo sapien
atcagaccttcaccgttcagtagcc

SEQ ID NO: 20505 - DNA, 25 bp, Homo sapien
gagacaaacggtaaacagatgtttc

SEQ ID NO: 20506 - DNA, 25 bp, Homo sapien
gggacggctcatcagctcatcagac

SEQ ID NO: 20507 - DNA, 25 bp, Homo sapien
tgccctggggccaaacatttcagac

SEQ ID NO: 20508 - DNA, 25 bp, Homo sapien
gtcagtgatcagtagatgctgccct

SEQ ID NO: 20509 - DNA, 25 bp, Homo sapien
tgccgcgggaaagatttcaagccca

SEQ ID NO: 20510 - DNA, 25 bp, Homo sapien
gtttgtgagaattagctggttcggt

SEQ ID NO: 20511 - DNA, 25 bp, Homo sapien
ttcctactaacgatgtgcaagggtt

SEQ ID NO: 20512 - DNA, 25 bp, Homo sapien
caaatgtagtctcataagtattaac

SEQ ID NO: 20513 - DNA, 25 bp, Homo sapien
atggcggctctaatttctattccta

SEQ ID NO: 20514 - DNA, 25 bp, Homo sapien
aggttttaataatggcggctctaat

SEQ ID NO: 20515 - DNA, 25 bp, Homo sapien
ctgcacccagctagttctatcttta

SEQ ID NO: 20516 - DNA, 25 bp, Homo sapien
atataggttttaataatggcggctc

SEQ ID NO: 20517 - DNA, 25 bp, Homo sapien
ttttacaaatgtagtctcataagta

SEQ ID NO: 20518 - DNA, 25 bp, Homo sapien
cctactaacgatgtgcaagggtttc

SEQ ID NO: 20519 - DNA, 25 bp, Homo sapien
ataatggcggctctaatttctattc

SEQ ID NO: 20520 - DNA, 25 bp, Homo sapien
cttttgagaaactgtcatataggtt

SEQ ID NO: 20521 - DNA, 25 bp, Homo sapien
tctattcctactaacgatgtgcaag

SEQ ID NO: 20522 - DNA, 25 bp, Homo sapien
ctctggcagaatatatgggctgcct

SEQ ID NO: 20523 - DNA, 25 bp, Homo sapien
gagacatagactgcaatcctggcta

SEQ ID NO: 20524 - DNA, 25 bp, Homo sapien
aggttgagagttccgcacagtttgc

SEQ ID NO: 20525 - DNA, 25 bp, Homo sapien
tgggatctggaattcaggagacata

SEQ ID NO: 20526 - DNA, 25 bp, Homo sapien
cccatagagttgaataagaaatgaa

SEQ ID NO: 20527 - DNA, 25 bp, Homo sapien
tgggctgcctatttacaacagatgt

SEQ ID NO: 20528 - DNA, 25 bp, Homo sapien
atatggtgtactggataggaatgtg

SEQ ID NO: 20529 - DNA, 25 bp, Homo sapien
atgcatatatgtaaccactggactt

SEQ ID NO: 20530 - DNA, 25 bp, Homo sapien
cttaagtaatcaggaggttgagagt

SEQ ID NO: 20531 - DNA, 25 bp, Homo sapien
tataaagtggctataacacctaccc

SEQ ID NO: 20532 - DNA, 25 bp, Homo sapien
cttgaacccagcttcaggcaatcct

SEQ ID NO: 20533 - DNA, 25 bp, Homo sapien
gacattggaaatgatatttaacctc

SEQ ID NO: 20534 - DNA, 25 bp, Homo sapien
ttcttgtcaaaaggtacataagacc

SEQ ID NO: 20535 - DNA, 25 bp, Homo sapien
ctttcatctgttgcatgagataatt

SEQ ID NO: 20536 - DNA, 25 bp, Homo sapien
cttctttcatctgttgcatgagata

SEQ ID NO: 20537 - DNA, 25 bp, Homo sapien
tctctgagcttggtttctttcaact

SEQ ID NO: 20538 - DNA, 25 bp, Homo sapien
tcatctgttgcatgagataatttta

SEQ ID NO: 20539 - DNA, 25 bp, Homo sapien
caaagtgcagataaagaaatatata

SEQ ID NO: 20540 - DNA, 25 bp, Homo sapien
ttggtttctttcaactacaaagtgc

SEQ ID NO: 20541 - DNA, 25 bp, Homo sapien
aaagtgcagataaagaaatatatac

SEQ ID NO: 20542 - DNA, 25 bp, Homo sapien
tgcatttcagcctgatcacgccact

SEQ ID NO: 20543 - DNA, 25 bp, Homo sapien
tttctttcaactacaaagtgcagat

SEQ ID NO: 20544 - DNA, 25 bp, Homo sapien
ctgtaactattgaactattggtgta

SEQ ID NO: 20545 - DNA, 25 bp, Homo sapien
caaataccaggatatgaacagcttt

SEQ ID NO: 20546 - DNA, 25 bp, Homo sapien
attccatgctcagaataggggattc

SEQ ID NO: 20547 - DNA, 25 bp, Homo sapien
gaataggggattcttattgattgct

SEQ ID NO: 20548 - DNA, 25 bp, Homo sapien
ttccttaatgctacccaaataccag

SEQ ID NO: 20549 - DNA, 25 bp, Homo sapien
atcattactgtagcctccattccat

SEQ ID NO: 20550 - DNA, 25 bp, Homo sapien
acttgccacaaggtactgtaactat

SEQ ID NO: 20551 - DNA, 25 bp, Homo sapien
tttgctgtaacacttgccacaaggt

SEQ ID NO: 20552 - DNA, 25 bp, Homo sapien
ctctctttgactagggactttatct

SEQ ID NO: 20553 - DNA, 25 bp, Homo sapien
ttcctgctatcttgtggacctctct

SEQ ID NO: 20554 - DNA, 25 bp, Homo sapien
ttactgattcaattggttgctttac

SEQ ID NO: 20555 - DNA, 25 bp, Homo sapien
gtccctggagactgcaaactgcctc

SEQ ID NO: 20556 - DNA, 25 bp, Homo sapien
cagctgggccctctgtggaatgtcc

SEQ ID NO: 20557 - DNA, 25 bp, Homo sapien
tcaatatgagacaatcagctgggcc

SEQ ID NO: 20558 - DNA, 25 bp, Homo sapien
tgtcacgaggtcaaagtataaactc

SEQ ID NO: 20559 - DNA, 25 bp, Homo sapien
gttgtaaggacttgactggagatca

SEQ ID NO: 20560 - DNA, 25 bp, Homo sapien
gaggatcccagcgttgtaaggactt

SEQ ID NO: 20561 - DNA, 25 bp, Homo sapien
gaagcaaaaacatcagggccacagt

SEQ ID NO: 20562 - DNA, 25 bp, Homo sapien
cttctagctggaatgctgggacatg

SEQ ID NO: 20563 - DNA, 25 bp, Homo sapien
tttatatctggtggaggagccctgt

SEQ ID NO: 20564 - DNA, 25 bp, Homo sapien
tgccgaaagctgtgagcctcccaaa

SEQ ID NO: 20565 - DNA, 25 bp, Homo sapien
tggagatcagaaacaaattgcagtg

SEQ ID NO: 20566 - DNA, 25 bp, Homo sapien
acatagcagtcttctggaatcgtac

SEQ ID NO: 20567 - DNA, 25 bp, Homo sapien
aaaaaatctcagaacccagcagcag

SEQ ID NO: 20568 - DNA, 25 bp, Homo sapien
ttctggatccctaggtgcgggacaa

SEQ ID NO: 20569 - DNA, 25 bp, Homo sapien
ccacagtagaagtattctggaatcc

SEQ ID NO: 20570 - DNA, 25 bp, Homo sapien
aaacattccgaacccaacaacagtg

SEQ ID NO: 20571 - DNA, 25 bp, Homo sapien
atattcagaagacagcaggagtgtt

SEQ ID NO: 20572 - DNA, 25 bp, Homo sapien
cacagtaggagtgtcctggagtcct

SEQ ID NO: 20573 - DNA, 25 bp, Homo sapien
atcattcagaacacagctgggatgt

SEQ ID NO: 20574 - DNA, 25 bp, Homo sapien
aagaatattcagaagacagcaggag

SEQ ID NO: 20575 - DNA, 25 bp, Homo sapien
gtcttctggaatcgtacgtgaggaa

SEQ ID NO: 20576 - DNA, 25 bp, Homo sapien
ctggaatcctacataaggggaaaaa

SEQ ID NO: 20577 - DNA, 25 bp, Homo sapien
acccactgtagaacaaaggttagtc

SEQ ID NO: 20578 - DNA, 25 bp, Homo sapien
cgcttacagactccacacagagtgc

SEQ ID NO: 20579 - DNA, 25 bp, Homo sapien
aagctgttagaagtagccattgcac

SEQ ID NO: 20580 - DNA, 25 bp, Homo sapien
tgctgtaaacagttgtgacagggcc

SEQ ID NO: 20581 - DNA, 25 bp, Homo sapien
ttccacaaagccctagggcatggac

SEQ ID NO: 20582 - DNA, 25 bp, Homo sapien
ttgacaaaggcttgagccaacaccg

SEQ ID NO: 20583 - DNA, 25 bp, Homo sapien
tgacagggccctgaccagccagtga

SEQ ID NO: 20584 - DNA, 25 bp, Homo sapien
tgtagaacctgacccaacgatggat

SEQ ID NO: 20585 - DNA, 25 bp, Homo sapien
attgacattatagacttcccgagta

SEQ ID NO: 20586 - DNA, 25 bp, Homo sapien
catggacacaatggagctaagttct

SEQ ID NO: 20587 - DNA, 25 bp, Homo sapien
ttgctacagcataacaagggtgacc

SEQ ID NO: 20588 - DNA, 25 bp, Homo sapien
aaacttaagttcatgctgctgctaa

SEQ ID NO: 20589 - DNA, 25 bp, Homo sapien
cacaaggtatctcagtgccacatac

SEQ ID NO: 20590 - DNA, 25 bp, Homo sapien
accctggtgtccacacaaggtatct

SEQ ID NO: 20591 - DNA, 25 bp, Homo sapien
tggtgtccacacaaggtatctcagt

SEQ ID NO: 20592 - DNA, 25 bp, Homo sapien
aatacctgttctagctcatttaatc

SEQ ID NO: 20593 - DNA, 25 bp, Homo sapien
ccgacagtcaggttccagagctctt

SEQ ID NO: 20594 - DNA, 25 bp, Homo sapien
gaagaaactaaagcacagagaaatt

SEQ ID NO: 20595 - DNA, 25 bp, Homo sapien
tccctgcattttctgtgatgtctac

SEQ ID NO: 20596 - DNA, 25 bp, Homo sapien
acaatagcccttgaagtttggccca

SEQ ID NO: 20597 - DNA, 25 bp, Homo sapien
gatgtctactgatcacccaatctca

SEQ ID NO: 20598 - DNA, 25 bp, Homo sapien
ctcattttatagtggaagaaactaa

SEQ ID NO: 20599 - DNA, 25 bp, Homo sapien
actaagctgagcaaacaacagagaa

SEQ ID NO: 20600 - DNA, 25 bp, Homo sapien
caacagagaagatgggagtccttca

SEQ ID NO: 20601 - DNA, 25 bp, Homo sapien
cagcaatacctgtgaggcgtgatca

SEQ ID NO: 20602 - DNA, 25 bp, Homo sapien
tggagaaagacatacccggctcaat

SEQ ID NO: 20603 - DNA, 25 bp, Homo sapien
gggagtgttgagataacgctctatc

SEQ ID NO: 20604 - DNA, 25 bp, Homo sapien
ggatgcagggaacccacctcacctt

SEQ ID NO: 20605 - DNA, 25 bp, Homo sapien
ttctgctgaaacagggtttgcacca

SEQ ID NO: 20606 - DNA, 25 bp, Homo sapien
tgcagacatgtgagtctctagggtt

SEQ ID NO: 20607 - DNA, 25 bp, Homo sapien
tttagaaatctggtgcaaatactcc

SEQ ID NO: 20608 - DNA, 25 bp, Homo sapien
cttgtggtggacaacactaagctga

SEQ ID NO: 20609 - DNA, 25 bp, Homo sapien
tttgcaccaaagtaacagatgttca

SEQ ID NO: 20610 - DNA, 25 bp, Homo sapien
actacggctttggtcgcacagtgta

SEQ ID NO: 20611 - DNA, 25 bp, Homo sapien
tccagccggctgtcgtcgcggtcta

SEQ ID NO: 20612 - DNA, 25 bp, Homo sapien
attcccgcgtctcgagccggttttc

SEQ ID NO: 20613 - DNA, 25 bp, Homo sapien
agcaagtccaggtcccgttcccgaa

SEQ ID NO: 20614 - DNA, 25 bp, Homo sapien
tgaagatgtccaactacgcgaacga

SEQ ID NO: 20615 - DNA, 25 bp, Homo sapien
aggagaaggattcgccctcgacctc

SEQ ID NO: 20616 - DNA, 25 bp, Homo sapien
tcctttccggagaaagcgcaggcta

SEQ ID NO: 20617 - DNA, 25 bp, Homo sapien
tacaggcgctactcgcggtcatact

SEQ ID NO: 20618 - DNA, 25 bp, Homo sapien
tttccagaagctctcggtcccattc

SEQ ID NO: 20619 - DNA, 25 bp, Homo sapien
tcgagccggttttcgtccaggagtc

SEQ ID NO: 20620 - DNA, 25 bp, Homo sapien
ctacgggttcaccaggagatactac

SEQ ID NO: 20621 - DNA, 25 bp, Homo sapien
tactgctgcacaaagccttcctctt

SEQ ID NO: 20622 - DNA, 25 bp, Homo sapien
gcctctctgcggtgactgggcacct

SEQ ID NO: 20623 - DNA, 25 bp, Homo sapien
cttctattgacggacatggtgctcc

SEQ ID NO: 20624 - DNA, 25 bp, Homo sapien
acagcatccactcgcggtgtggccg

SEQ ID NO: 20625 - DNA, 25 bp, Homo sapien
atggtgacagcctcctacatcatca

SEQ ID NO: 20626 - DNA, 25 bp, Homo sapien
ctggagtcacagtgctctccgttcc

SEQ ID NO: 20627 - DNA, 25 bp, Homo sapien
gatttaaatcaattgcccggcaggc

SEQ ID NO: 20628 - DNA, 25 bp, Homo sapien
aatcagggatagacgggtcccagct

SEQ ID NO: 20629 - DNA, 25 bp, Homo sapien
gaatgggcgcttctgcggacatcac

SEQ ID NO: 20630 - DNA, 25 bp, Homo sapien
ggtcaagttgaggatctagacctct

SEQ ID NO: 20631 - DNA, 25 bp, Homo sapien
tccttctggctacgatgccctgggc

SEQ ID NO: 20632 - DNA, 25 bp, Homo sapien
ccaggcttctttaccgcccggagtc

SEQ ID NO: 20633 - DNA, 25 bp, Homo sapien
gccctctctagaatgtggaaagacc

SEQ ID NO: 20634 - DNA, 25 bp, Homo sapien
ccgagccctctctagaatgtggaaa

SEQ ID NO: 20635 - DNA, 25 bp, Homo sapien
aatgtggaaagaccactcatcgctc

SEQ ID NO: 20636 - DNA, 25 bp, Homo sapien
aaaataaaggcctccgagccctctc

SEQ ID NO: 20637 - DNA, 25 bp, Homo sapien
gtggaaagaccactcatcgctcagt

SEQ ID NO: 20638 - DNA, 25 bp, Homo sapien
accactcatcgctcagtggagcaaa

SEQ ID NO: 20639 - DNA, 25 bp, Homo sapien
acagcgcccggcagtgccttcattc

SEQ ID NO: 20640 - DNA, 25 bp, Homo sapien
gaacccccagaatgcagagggctct

SEQ ID NO: 20641 - DNA, 25 bp, Homo sapien
tcagtggagcaaagtgagcctacaa

SEQ ID NO: 20642 - DNA, 25 bp, Homo sapien
tggagcaaagtgagcctacaagctc

SEQ ID NO: 20643 - DNA, 25 bp, Homo sapien
tagacactgctctgaactcttaaag

SEQ ID NO: 20644 - DNA, 25 bp, Homo sapien
cgtaggggagtgcagttttaaataa

SEQ ID NO: 20645 - DNA, 25 bp, Homo sapien
cattacagatgtgggtcatcacacc

SEQ ID NO: 20646 - DNA, 25 bp, Homo sapien
ctataaagaaaacggagcaaggtac

SEQ ID NO: 20647 - DNA, 25 bp, Homo sapien
gtacaagaatcagacgtaggggagt

SEQ ID NO: 20648 - DNA, 25 bp, Homo sapien
agggttatgtggaagagacaataaa

SEQ ID NO: 20649 - DNA, 25 bp, Homo sapien
caaccaggaaattatatagtatgac

SEQ ID NO: 20650 - DNA, 25 bp, Homo sapien
aagagacaataaacacaaccaggaa

SEQ ID NO: 20651 - DNA, 25 bp, Homo sapien
caacaaattcttattgaggacctgc

SEQ ID NO: 20652 - DNA, 25 bp, Homo sapien
aaacagacaaaaagcctaccctcat

SEQ ID NO: 20653 - DNA, 25 bp, Homo sapien
catagaagctatgtaatactgtgtt

SEQ ID NO: 20654 - DNA, 25 bp, Homo sapien
ttagaaattacatcctcagagcttt

SEQ ID NO: 20655 - DNA, 25 bp, Homo sapien
aggccttcaatgacgtccaatgtct

SEQ ID NO: 20656 - DNA, 25 bp, Homo sapien
agtatttgtagttcttacaggccac

SEQ ID NO: 20657 - DNA, 25 bp, Homo sapien
gtagttcttacaggccacatttatt

SEQ ID NO: 20658 - DNA, 25 bp, Homo sapien
tcttggcacatggactaaaaccaca

SEQ ID NO: 20659 - DNA, 25 bp, Homo sapien
gactaaaaccacatcaccaggcctt

SEQ ID NO: 20660 - DNA, 25 bp, Homo sapien
atcaccaggccttcaatgacgtcca

SEQ ID NO: 20661 - DNA, 25 bp, Homo sapien
cttgaactccggacgtcatatgatc

SEQ ID NO: 20662 - DNA, 25 bp, Homo sapien
atcctcagagctttccagtatttgt

SEQ ID NO: 20663 - DNA, 25 bp, Homo sapien
ctgcacccggccctaactaatatat

SEQ ID NO: 20664 - DNA, 25 bp, Homo sapien
attgaagccttctccttgccaagtt

SEQ ID NO: 20665 - DNA, 25 bp, Homo sapien
attggtacatacaagtaatctttac

SEQ ID NO: 20666 - DNA, 25 bp, Homo sapien
aaagtcaagttacattggtacatac

SEQ ID NO: 20667 - DNA, 25 bp, Homo sapien
tgtttttaagagacacccagcctgg

SEQ ID NO: 20668 - DNA, 25 bp, Homo sapien
ttcaatatcaaaagtcaagttacat

SEQ ID NO: 20669 - DNA, 25 bp, Homo sapien
ttttaagagacacccagcctggagt

SEQ ID NO: 20670 - DNA, 25 bp, Homo sapien
agagggggtctatacattattacac

SEQ ID NO: 20671 - DNA, 25 bp, Homo sapien
taggtgcaagccactttgactggtc

SEQ ID NO: 20672 - DNA, 25 bp, Homo sapien
gtgcagctgatgctatcatggctca

SEQ ID NO: 20673 - DNA, 25 bp, Homo sapien
ctcgtctttcagagggggtctatac

SEQ ID NO: 20674 - DNA, 25 bp, Homo sapien
gattataggtgcaagccactttgac

SEQ ID NO: 20675 - DNA, 25 bp, Homo sapien
gagtgcaccagtgccatcatagcgc

SEQ ID NO: 20676 - DNA, 25 bp, Homo sapien
ggccataacgccctgctctgcttag

SEQ ID NO: 20677 - DNA, 25 bp, Homo sapien
tggcttaggaaagaacccacctgga

SEQ ID NO: 20678 - DNA, 25 bp, Homo sapien
agctagagcaggcattgagacaatt

SEQ ID NO: 20679 - DNA, 25 bp, Homo sapien
ataatagcacccactggtcgggcgc

SEQ ID NO: 20680 - DNA, 25 bp, Homo sapien
cctgggcatttgtgggtgtttatct

SEQ ID NO: 20681 - DNA, 25 bp, Homo sapien
aacgtgattctgtactggatccttc

SEQ ID NO: 20682 - DNA, 25 bp, Homo sapien
caaagtggagataaataatagcacc

SEQ ID NO: 20683 - DNA, 25 bp, Homo sapien
gacatgacaaccaaacaacgtgatt

SEQ ID NO: 20684 - DNA, 25 bp, Homo sapien
aaaaggacaccgagccataattcat

SEQ ID NO: 20685 - DNA, 25 bp, Homo sapien
attaggaattgagttctcgaccacc

SEQ ID NO: 20686 - DNA, 25 bp, Homo sapien
tcaaaagaagaatgaggaactgttc

SEQ ID NO: 20687 - DNA, 25 bp, Homo sapien
agctaggcacttggcccagtgatat

SEQ ID NO: 20688 - DNA, 25 bp, Homo sapien
tcgggtgttagaccaagcaacatgt

SEQ ID NO: 20689 - DNA, 25 bp, Homo sapien
taaagcagaagaatagggtaatatc

SEQ ID NO: 20690 - DNA, 25 bp, Homo sapien
gccagggcacaagagttatataact

SEQ ID NO: 20691 - DNA, 25 bp, Homo sapien
taatatcacctaggggctgagtcca

SEQ ID NO: 20692 - DNA, 25 bp, Homo sapien
tcacaatggctgatatgggccagac

SEQ ID NO: 20693 - DNA, 25 bp, Homo sapien
acacagacaagggagtcacatattt

SEQ ID NO: 20694 - DNA, 25 bp, Homo sapien
acaatgctctctgtaggcagggcca

SEQ ID NO: 20695 - DNA, 25 bp, Homo sapien
aggaaaagtcacataagctaggcac

SEQ ID NO: 20696 - DNA, 25 bp, Homo sapien
aaggcccggtgatacgttacaattc

SEQ ID NO: 20697 - DNA, 25 bp, Homo sapien
gtcacccatttgagaagggaacagc

SEQ ID NO: 20698 - DNA, 25 bp, Homo sapien
gggctgaatacaatgggagtactta

SEQ ID NO: 20699 - DNA, 25 bp, Homo sapien
aagggaataccataaagttgctacc

SEQ ID NO: 20700 - DNA, 25 bp, Homo sapien
ctgctggagagtcccaccgccttga

SEQ ID NO: 20701 - DNA, 25 bp, Homo sapien
tctcctgtcctgagtgagtgcaagg

SEQ ID NO: 20702 - DNA, 25 bp, Homo sapien
accgccttgagtgagtcaacaaacc

SEQ ID NO: 20703 - DNA, 25 bp, Homo sapien
gaagcagatgctgtgcctgatacct

SEQ ID NO: 20704 - DNA, 25 bp, Homo sapien
ccgaacgaatgagtacgtacgtaac

SEQ ID NO: 20705 - DNA, 25 bp, Homo sapien
ggtggagatactaagctgtctgttg

SEQ ID NO: 20706 - DNA, 25 bp, Homo sapien
ctaccatacggttagggctgaatac

SEQ ID NO: 20707 - DNA, 25 bp, Homo sapien
taattgatgacacaagcgggatctc

SEQ ID NO: 20708 - DNA, 25 bp, Homo sapien
tgatgatatctagaactccaggttt

SEQ ID NO: 20709 - DNA, 25 bp, Homo sapien
taggacactctacgatgatggaaat

SEQ ID NO: 20710 - DNA, 25 bp, Homo sapien
caaaacaggtaaggtgatgaataac

SEQ ID NO: 20711 - DNA, 25 bp, Homo sapien
ataactaaagattgggctctagccc

SEQ ID NO: 20712 - DNA, 25 bp, Homo sapien
ctagaccagcattggccaataggac

SEQ ID NO: 20713 - DNA, 25 bp, Homo sapien
gtgtagggtagcacaaagagtctca

SEQ ID NO: 20714 - DNA, 25 bp, Homo sapien
tctctagtatggtagccactggcta

SEQ ID NO: 20715 - DNA, 25 bp, Homo sapien
cacttgtggctggttgcgtctgtac

SEQ ID NO: 20716 - DNA, 25 bp, Homo sapien
aagagtctcagagtacgagtccagt

SEQ ID NO: 20717 - DNA, 25 bp, Homo sapien
acatagatcatgtgagtgctgaaat

SEQ ID NO: 20718 - DNA, 25 bp, Homo sapien
tgccctgaacagttgctcgcaagat

SEQ ID NO: 20719 - DNA, 25 bp, Homo sapien
cgagtccagttgtgggcaagtattt

SEQ ID NO: 20720 - DNA, 25 bp, Homo sapien
tatattccaattcgtcagtgggact

SEQ ID NO: 20721 - DNA, 25 bp, Homo sapien
agagtagaaaaaatctgcccttcca

SEQ ID NO: 20722 - DNA, 25 bp, Homo sapien
ataaacctgtattccggctgacagc

SEQ ID NO: 20723 - DNA, 25 bp, Homo sapien
gagcacagcgtggaccacctcattt

SEQ ID NO: 20724 - DNA, 25 bp, Homo sapien
atcacccgttcagttcctcaggata

SEQ ID NO: 20725 - DNA, 25 bp, Homo sapien
ttacttttggcctctggagcaacat

SEQ ID NO: 20726 - DNA, 25 bp, Homo sapien
ttccggctgacagcgttgtcagttc

SEQ ID NO: 20727 - DNA, 25 bp, Homo sapien
tggcttgcccttgaaaactctgggg

SEQ ID NO: 20728 - DNA, 25 bp, Homo sapien
ctggagcaacatagaataaacctgt

SEQ ID NO: 20729 - DNA, 25 bp, Homo sapien
cgtcctaactggacacgaggccact

SEQ ID NO: 20730 - DNA, 25 bp, Homo sapien
tctaatttctttggggcatgatttt

SEQ ID NO: 20731 - DNA, 25 bp, Homo sapien
gaggagagtaaacccagccaatgac

SEQ ID NO: 20732 - DNA, 25 bp, Homo sapien
tcttaaaggtataaaatggtgcttg

SEQ ID NO: 20733 - DNA, 25 bp, Homo sapien
ataaaatggtgcttggatagagttg

SEQ ID NO: 20734 - DNA, 25 bp, Homo sapien
aatgactggcagctgaaccttgctt

SEQ ID NO: 20735 - DNA, 25 bp, Homo sapien
acgtccggcccacacattcttaaag

SEQ ID NO: 20736 - DNA, 25 bp, Homo sapien
tagagttgggagataacagactgga

SEQ ID NO: 20737 - DNA, 25 bp, Homo sapien
ttcttaggccatcttcatgaagttt

SEQ ID NO: 20738 - DNA, 25 bp, Homo sapien
tgtattgaacaactaactgggctgc

SEQ ID NO: 20739 - DNA, 25 bp, Homo sapien
atgtaccttagccatagcaagtctc

SEQ ID NO: 20740 - DNA, 25 bp, Homo sapien
ttagccatagcaagtctctccattt

SEQ ID NO: 20741 - DNA, 25 bp, Homo sapien
ctaactgggctgcttaggaacttaa

SEQ ID NO: 20742 - DNA, 25 bp, Homo sapien
tgtactactggaagctctgatgagc

SEQ ID NO: 20743 - DNA, 25 bp, Homo sapien
gttggaatgaagactagattgcctg

SEQ ID NO: 20744 - DNA, 25 bp, Homo sapien
cagacaggtgacaacaatcagtgaa

SEQ ID NO: 20745 - DNA, 25 bp, Homo sapien
tatgcaggcctgtaccgtgcctttc

SEQ ID NO: 20746 - DNA, 25 bp, Homo sapien
tatggtttggcatggtagcaccttt

SEQ ID NO: 20747 - DNA, 25 bp, Homo sapien
atgcaggccctactgaataggacaa

SEQ ID NO: 20748 - DNA, 25 bp, Homo sapien
catagcaggacattaagccaccagt

SEQ ID NO: 20749 - DNA, 25 bp, Homo sapien
atcagtgaagggagcctgtactact

SEQ ID NO: 20750 - DNA, 25 bp, Homo sapien
ataaaggataatgtctccaggggcc

SEQ ID NO: 20751 - DNA, 25 bp, Homo sapien
tcatgcctgcctggcaaaagaaagt

SEQ ID NO: 20752 - DNA, 25 bp, Homo sapien
aacccataataaggaagagaaatat

SEQ ID NO: 20753 - DNA, 25 bp, Homo sapien
ttactgcatcctatatgtttgggta

SEQ ID NO: 20754 - DNA, 25 bp, Homo sapien
ctgcatcctatatgtttgggtatac

SEQ ID NO: 20755 - DNA, 25 bp, Homo sapien
ccctcgtgatcagacaaaatgttta

SEQ ID NO: 20756 - DNA, 25 bp, Homo sapien
aagtaggtgggactagagccacgca

SEQ ID NO: 20757 - DNA, 25 bp, Homo sapien
tatgtttgggtatactgtgttttta

SEQ ID NO: 20758 - DNA, 25 bp, Homo sapien
ttgatttattctttgacccagtatt

SEQ ID NO: 20759 - DNA, 25 bp, Homo sapien
tagtttcattccctcgtgatcagac

SEQ ID NO: 20760 - DNA, 25 bp, Homo sapien
cgtgatcagacaaaatgtttagaat

SEQ ID NO: 20761 - DNA, 25 bp, Homo sapien
attccctcgtgatcagacaaaatgt

SEQ ID NO: 20762 - DNA, 25 bp, Homo sapien
cccgagtaggtgggagtcccaagta

SEQ ID NO: 20763 - DNA, 25 bp, Homo sapien
gatttctagtttcattccctcgtga

SEQ ID NO: 20764 - DNA, 25 bp, Homo sapien
aagagtttcgtttttcacagtggta

SEQ ID NO: 20765 - DNA, 25 bp, Homo sapien
aaagtctgctttaaagtggctttta

SEQ ID NO: 20766 - DNA, 25 bp, Homo sapien
cctaaaaggcttacagtcaccattc

SEQ ID NO: 20767 - DNA, 25 bp, Homo sapien
ttaggtagtcttgaccagattggtt

SEQ ID NO: 20768 - DNA, 25 bp, Homo sapien
agcaatatggggaaatcttgtgcag

SEQ ID NO: 20769 - DNA, 25 bp, Homo sapien
aagcatattttgaggaaagtggtat

SEQ ID NO: 20770 - DNA, 25 bp, Homo sapien
catataattgacgatgaggaaaaat

SEQ ID NO: 20771 - DNA, 25 bp, Homo sapien
ttctaggtagcaatatggggaaatc

SEQ ID NO: 20772 - DNA, 25 bp, Homo sapien
cagtggtaactctaaaggatgtgtc

SEQ ID NO: 20773 - DNA, 25 bp, Homo sapien
aaaattatggagttccttatgcttc

SEQ ID NO: 20774 - DNA, 25 bp, Homo sapien
aggtacatgtaacctaaaaggctta

SEQ ID NO: 20775 - DNA, 25 bp, Homo sapien
ggatacattgtaccaaaataggaac

SEQ ID NO: 20776 - DNA, 25 bp, Homo sapien
ctcttggaagactcgggattctgtc

SEQ ID NO: 20777 - DNA, 25 bp, Homo sapien
tgctgtctgatgaaactgttggggt

SEQ ID NO: 20778 - DNA, 25 bp, Homo sapien
tcctgatttgcacattaaggagctc

SEQ ID NO: 20779 - DNA, 25 bp, Homo sapien
ccgcaggatctgtgcattatttaca

SEQ ID NO: 20780 - DNA, 25 bp, Homo sapien
tctcagttgtaagggcaattgcagt

SEQ ID NO: 20781 - DNA, 25 bp, Homo sapien
tgcaagatgcaagtttctcagttgt

SEQ ID NO: 20782 - DNA, 25 bp, Homo sapien
gtgtttggcatgttcccgcaggatc

SEQ ID NO: 20783 - DNA, 25 bp, Homo sapien
tttacatggtgaaagtgcaagatgc

SEQ ID NO: 20784 - DNA, 25 bp, Homo sapien
taaggagctccattaattaagaatc

SEQ ID NO: 20785 - DNA, 25 bp, Homo sapien
gtttactagtgagaacactcagttt

SEQ ID NO: 20786 - DNA, 25 bp, Homo sapien
tttgctttatgactgagcatgggtc

SEQ ID NO: 20787 - DNA, 25 bp, Homo sapien
ttttgatgtaggtatttagtgctct

SEQ ID NO: 20788 - DNA, 25 bp, Homo sapien
tgctttatgactgagcatgggtcaa

SEQ ID NO: 20789 - DNA, 25 bp, Homo sapien
caaaagtcattcagggacaagtttt

SEQ ID NO: 20790 - DNA, 25 bp, Homo sapien
ttatccaaaagtcattcagggacaa

SEQ ID NO: 20791 - DNA, 25 bp, Homo sapien
actgtggtccaagttggtgcttgat

SEQ ID NO: 20792 - DNA, 25 bp, Homo sapien
ccaagttggtgcttgatgtgatttc

SEQ ID NO: 20793 - DNA, 25 bp, Homo sapien
tttgctgtttatccaaaagtcattc

SEQ ID NO: 20794 - DNA, 25 bp, Homo sapien
attccactgtggtccaagttggtgc

SEQ ID NO: 20795 - DNA, 25 bp, Homo sapien
ttggtatgttgggtctctattttaa

SEQ ID NO: 20796 - DNA, 25 bp, Homo sapien
tccaaaagtcattcagggacaagtt

SEQ ID NO: 20797 - DNA, 25 bp, Homo sapien
ttagagtgtactgcttctacatata

SEQ ID NO: 20798 - DNA, 25 bp, Homo sapien
gagccaccacaacagccaagataat

SEQ ID NO: 20799 - DNA, 25 bp, Homo sapien
aaatgataataactgtgttactggt

SEQ ID NO: 20800 - DNA, 25 bp, Homo sapien
aggcaggttcctcaacagatatcca

SEQ ID NO: 20801 - DNA, 25 bp, Homo sapien
tctccctatgttgccatgctcattt

SEQ ID NO: 20802 - DNA, 25 bp, Homo sapien
aagatagcactgttatcataggaga

SEQ ID NO: 20803 - DNA, 25 bp, Homo sapien
gtcagtgcaacatattactcacgtg

SEQ ID NO: 20804 - DNA, 25 bp, Homo sapien
acaaacctactgtgataccagtcat

SEQ ID NO: 20805 - DNA, 25 bp, Homo sapien
tactacctagtgatgtcatacccat

SEQ ID NO: 20806 - DNA, 25 bp, Homo sapien
gatatccagaagatagcactgttat

SEQ ID NO: 20807 - DNA, 25 bp, Homo sapien
acccattataatgtgtcagtgcaac

SEQ ID NO: 20808 - DNA, 25 bp, Homo sapien
ttccaatgaagtttctgtcatgcca

SEQ ID NO: 20809 - DNA, 25 bp, Homo sapien
cagaatgggatcacgagtctctttc

SEQ ID NO: 20810 - DNA, 25 bp, Homo sapien
ttgggtttgaccatattcaggaact

SEQ ID NO: 20811 - DNA, 25 bp, Homo sapien
tgccagaatgggatcacgagtctct

SEQ ID NO: 20812 - DNA, 25 bp, Homo sapien
actgctaaaacgctcacacttattg

SEQ ID NO: 20813 - DNA, 25 bp, Homo sapien
tatatatcctttgcactatgtcttg

SEQ ID NO: 20814 - DNA, 25 bp, Homo sapien
tcactgacgttttgggtttgaccat

SEQ ID NO: 20815 - DNA, 25 bp, Homo sapien
ctgtcatgccagaatgggatcacga

SEQ ID NO: 20816 - DNA, 25 bp, Homo sapien
aaattcactgacgttttgggtttga

SEQ ID NO: 20817 - DNA, 25 bp, Homo sapien
tatttccttgactatttacttggct

SEQ ID NO: 20818 - DNA, 25 bp, Homo sapien
atacattcactgctaaaacgctcac

SEQ ID NO: 20819 - DNA, 25 bp, Homo sapien
taggacgtaagataatggatgcaaa

SEQ ID NO: 20820 - DNA, 25 bp, Homo sapien
ttagaaaaccctggcaggagcaaac

SEQ ID NO: 20821 - DNA, 25 bp, Homo sapien
ttttgaagtaatgcagactgaattt

SEQ ID NO: 20822 - DNA, 25 bp, Homo sapien
tggcaggagcaaaccagagttttta

SEQ ID NO: 20823 - DNA, 25 bp, Homo sapien
gtaaatgcacaaaggccaacaaact

SEQ ID NO: 20824 - DNA, 25 bp, Homo sapien
gtgagcagggaatctatgttagaaa

SEQ ID NO: 20825 - DNA, 25 bp, Homo sapien
agactgaatttgaatgccatcgcca

SEQ ID NO: 20826 - DNA, 25 bp, Homo sapien
atatgagtgttatttcctggtgcac

SEQ ID NO: 20827 - DNA, 25 bp, Homo sapien
tctccttcaaagtgagcagggaatc

SEQ ID NO: 20828 - DNA, 25 bp, Homo sapien
ctgaaactgtcaccttaactggaaa

SEQ ID NO: 20829 - DNA, 25 bp, Homo sapien
aaaaattgccaagtagccttatgtc

SEQ ID NO: 20830 - DNA, 25 bp, Homo sapien
atgcacacaaacacctacacagaca

SEQ ID NO: 20831 - DNA, 25 bp, Homo sapien
ttgtgttgcagttaaggttgacgac

SEQ ID NO: 20832 - DNA, 25 bp, Homo sapien
tttgagtctgtcctttcagagggac

SEQ ID NO: 20833 - DNA, 25 bp, Homo sapien
tttggcttgcagtcttagagatttc

SEQ ID NO: 20834 - DNA, 25 bp, Homo sapien
gaagtaaagcaaacgtggactctac

SEQ ID NO: 20835 - DNA, 25 bp, Homo sapien
gttgacgactaggaagtaaagcaaa

SEQ ID NO: 20836 - DNA, 25 bp, Homo sapien
catacaggcagcattgtgttgcagt

SEQ ID NO: 20837 - DNA, 25 bp, Homo sapien
acacctggcccgtaatcattattct

SEQ ID NO: 20838 - DNA, 25 bp, Homo sapien
ttaatatagaatttggcttgcagtc

SEQ ID NO: 20839 - DNA, 25 bp, Homo sapien
tcagagggacactttaatatagaat

SEQ ID NO: 20840 - DNA, 25 bp, Homo sapien
cagacacacatacaggcagcattgt

SEQ ID NO: 20841 - DNA, 25 bp, Homo sapien
agccacagtacccagtctatcaatg

SEQ ID NO: 20842 - DNA, 25 bp, Homo sapien
cctgtgtggccttaagtacgtgact

SEQ ID NO: 20843 - DNA, 25 bp, Homo sapien
ccacatggtaaatcaaggagttgat

SEQ ID NO: 20844 - DNA, 25 bp, Homo sapien
ctgtgagaaacatgctagattccac

SEQ ID NO: 20845 - DNA, 25 bp, Homo sapien
aagcaacagtgcagtgattagactc

SEQ ID NO: 20846 - DNA, 25 bp, Homo sapien
tagattccacaagcaacagtgcagt

SEQ ID NO: 20847 - DNA, 25 bp, Homo sapien
aatagggcccaaactgtgagaaaca

SEQ ID NO: 20848 - DNA, 25 bp, Homo sapien
atacacaaagacacaaatagggccc

SEQ ID NO: 20849 - DNA, 25 bp, Homo sapien
ttggcaaaattgcatacacaaagac

SEQ ID NO: 20850 - DNA, 25 bp, Homo sapien
ccctgtgtttcaagtaggatcctta

SEQ ID NO: 20851 - DNA, 25 bp, Homo sapien
tcatatgtttgaacaggtgcaattt

SEQ ID NO: 20852 - DNA, 25 bp, Homo sapien
cacgcctggccgacataactcttaa

SEQ ID NO: 20853 - DNA, 25 bp, Homo sapien
gaaactgggttgtatgtcctgtaga

SEQ ID NO: 20854 - DNA, 25 bp, Homo sapien
atcatttagaatatgtgcctagttc

SEQ ID NO: 20855 - DNA, 25 bp, Homo sapien
actgggttgtatgtcctgtagaatc

SEQ ID NO: 20856 - DNA, 25 bp, Homo sapien
gaagattcatacaaggttcatacat

SEQ ID NO: 20857 - DNA, 25 bp, Homo sapien
acgcctggccgacataactcttaaa

SEQ ID NO: 20858 - DNA, 25 bp, Homo sapien
catgatggccaagctaggttcgaac

SEQ ID NO: 20859 - DNA, 25 bp, Homo sapien
tgaatgaagattcatacaaggttca

SEQ ID NO: 20860 - DNA, 25 bp, Homo sapien
tgtttgaatgaagattcatacaagg

SEQ ID NO: 20861 - DNA, 25 bp, Homo sapien
gtagaatcttccacattctggattt

SEQ ID NO: 20862 - DNA, 25 bp, Homo sapien
ttgtatgtcctgtagaatcttccac

SEQ ID NO: 20863 - DNA, 25 bp, Homo sapien
ccagtccttagggtgattaatcttt

SEQ ID NO: 20864 - DNA, 25 bp, Homo sapien
tggaagaaatctaaacaggacatgc

SEQ ID NO: 20865 - DNA, 25 bp, Homo sapien
tactggcagcacaataggttaacac

SEQ ID NO: 20866 - DNA, 25 bp, Homo sapien
taccctctggtagacagatccctag

SEQ ID NO: 20867 - DNA, 25 bp, Homo sapien
ttcctccagagcaggaatggaagtt

SEQ ID NO: 20868 - DNA, 25 bp, Homo sapien
aggatgtcactatgcgataggaatt

SEQ ID NO: 20869 - DNA, 25 bp, Homo sapien
ttggtaattggcagactgaattccc

SEQ ID NO: 20870 - DNA, 25 bp, Homo sapien
tctgtggccacgtactcggaagaat

SEQ ID NO: 20871 - DNA, 25 bp, Homo sapien
taactgggttctttcctctgtggcc

SEQ ID NO: 20872 - DNA, 25 bp, Homo sapien
gatgttaagatagctaggatgtcac

SEQ ID NO: 20873 - DNA, 25 bp, Homo sapien
tcggaagaatcagtactccagtcct

SEQ ID NO: 20874 - DNA, 25 bp, Homo sapien
tatcccacagtttcagtgagtcaga

SEQ ID NO: 20875 - DNA, 25 bp, Homo sapien
caaggataaggtactgaaagataat

SEQ ID NO: 20876 - DNA, 25 bp, Homo sapien
ttggccggtggctttcctcagttca

SEQ ID NO: 20877 - DNA, 25 bp, Homo sapien
ttccagcaagacaggtactacagtt

SEQ ID NO: 20878 - DNA, 25 bp, Homo sapien
taacatggcttctacaggggacagc

SEQ ID NO: 20879 - DNA, 25 bp, Homo sapien
ttggccaagaccgtgttcttttctg

SEQ ID NO: 20880 - DNA, 25 bp, Homo sapien
tacagaacaaacatcaatcaaggat

SEQ ID NO: 20881 - DNA, 25 bp, Homo sapien
ttcagtttcttgaggaatgcggact

SEQ ID NO: 20882 - DNA, 25 bp, Homo sapien
tgagtcagaaatccaggcacagctt

SEQ ID NO: 20883 - DNA, 25 bp, Homo sapien
caaggttaccatcaaggttttggcc

SEQ ID NO: 20884 - DNA, 25 bp, Homo sapien
aggggacagctgttcacaatttgta

SEQ ID NO: 20885 - DNA, 25 bp, Homo sapien
ccatggctggaaagcttcaagactt

SEQ ID NO: 20886 - DNA, 25 bp, Homo sapien
ggaaggtggaaatgacaacttattg

SEQ ID NO: 20887 - DNA, 25 bp, Homo sapien
cagcatgctgaaaccctgggtgaat

SEQ ID NO: 20888 - DNA, 25 bp, Homo sapien
ccacttgatccaggaaggtggaaat

SEQ ID NO: 20889 - DNA, 25 bp, Homo sapien
agcctggtaggtcttctgaagaaga

SEQ ID NO: 20890 - DNA, 25 bp, Homo sapien
attatgagagatagatcccagggaa

SEQ ID NO: 20891 - DNA, 25 bp, Homo sapien
agacatagaggtgtaaagagtcaca

SEQ ID NO: 20892 - DNA, 25 bp, Homo sapien
aaacagtgtggtaggaacaatattc

SEQ ID NO: 20893 - DNA, 25 bp, Homo sapien
tcccagggaattacaaatagtctac

SEQ ID NO: 20894 - DNA, 25 bp, Homo sapien
gataagaaagtttgggcattgtctc

SEQ ID NO: 20895 - DNA, 25 bp, Homo sapien
tatacctaggaaagacctgagaatt

SEQ ID NO: 20896 - DNA, 25 bp, Homo sapien
gaagagaggccagataattgctcat

SEQ ID NO: 20897 - DNA, 25 bp, Homo sapien
cttgtggaagttaataagatgattc

SEQ ID NO: 20898 - DNA, 25 bp, Homo sapien
cagataattgctcatggacatttca

SEQ ID NO: 20899 - DNA, 25 bp, Homo sapien
ttgtaccatactggaagtgaaactt

SEQ ID NO: 20900 - DNA, 25 bp, Homo sapien
acaatgtcaacaagagactaaacat

SEQ ID NO: 20901 - DNA, 25 bp, Homo sapien
taagttaactgaagatggaagagag

SEQ ID NO: 20902 - DNA, 25 bp, Homo sapien
cacattgatctggaggcttattaca

SEQ ID NO: 20903 - DNA, 25 bp, Homo sapien
taagtgggaaattcatattatgatc

SEQ ID NO: 20904 - DNA, 25 bp, Homo sapien
ataacacattagtcaagaatagcta

SEQ ID NO: 20905 - DNA, 25 bp, Homo sapien
tcaagttatgtgagcaaatatgaac

SEQ ID NO: 20906 - DNA, 25 bp, Homo sapien
tctggaggcttattacaatgtcaac

SEQ ID NO: 20907 - DNA, 25 bp, Homo sapien
actcccatggacagtactggtgttc

SEQ ID NO: 20908 - DNA, 25 bp, Homo sapien
tttgccaggcacacccactggaatt

SEQ ID NO: 20909 - DNA, 25 bp, Homo sapien
ttggaaaaccctgtgctggaggatt

SEQ ID NO: 20910 - DNA, 25 bp, Homo sapien
tgatgatgcatctgggaactgtgtc

SEQ ID NO: 20911 - DNA, 25 bp, Homo sapien
tcaaaatgttgaaccggtccctctc

SEQ ID NO: 20912 - DNA, 25 bp, Homo sapien
ttctagtagcctgaggtgatgatgc

SEQ ID NO: 20913 - DNA, 25 bp, Homo sapien
agaaatatccgtgcagagacccttt

SEQ ID NO: 20914 - DNA, 25 bp, Homo sapien
taagaccagcatcctgaacagaaac

SEQ ID NO: 20915 - DNA, 25 bp, Homo sapien
atgaacgccttcacaggtaagacca

SEQ ID NO: 20916 - DNA, 25 bp, Homo sapien
ttccctagcgtgcagttccgtacca

SEQ ID NO: 20917 - DNA, 25 bp, Homo sapien
gaactgtgtccgcagcactaagctg

SEQ ID NO: 20918 - DNA, 25 bp, Homo sapien
attgcctcaatttgtgtggtactgt

SEQ ID NO: 20919 - DNA, 25 bp, Homo sapien
tccttttgtccggatggtggtccat

SEQ ID NO: 20920 - DNA, 25 bp, Homo sapien
cattgtacctcagtagtttgaagaa

SEQ ID NO: 20921 - DNA, 25 bp, Homo sapien
tgaaaaggcattataggacaatcgc

SEQ ID NO: 20922 - DNA, 25 bp, Homo sapien
gaattttatgggtgctgaataagcc

SEQ ID NO: 20923 - DNA, 25 bp, Homo sapien
tacatgaagttggtattccactttc

SEQ ID NO: 20924 - DNA, 25 bp, Homo sapien
gtccggatggtggtccattgaattt

SEQ ID NO: 20925 - DNA, 25 bp, Homo sapien
ctttgtccagcaccgataattccag

SEQ ID NO: 20926 - DNA, 25 bp, Homo sapien
tgtgtggtactgtaatgaaaaggca

SEQ ID NO: 20927 - DNA, 25 bp, Homo sapien
gggtgctgaataagccaagtgtaca

SEQ ID NO: 20928 - DNA, 25 bp, Homo sapien
tatcttttaggtacagcatatgcta

SEQ ID NO: 20929 - DNA, 25 bp, Homo sapien
ctaggtttgcagttagtagattcta

SEQ ID NO: 20930 - DNA, 25 bp, Homo sapien
tcattcctggaaagtatttttgcta

SEQ ID NO: 20931 - DNA, 25 bp, Homo sapien
ttccttcagctggtacactgttaat

SEQ ID NO: 20932 - DNA, 25 bp, Homo sapien
ttgaagcttcattccagatctctcc

SEQ ID NO: 20933 - DNA, 25 bp, Homo sapien
ttcccttgtggctgcttttagactt

SEQ ID NO: 20934 - DNA, 25 bp, Homo sapien
tatgatgtagttaggtgtagatttc

SEQ ID NO: 20935 - DNA, 25 bp, Homo sapien
tgtaatactgtatcttgaagcttca

SEQ ID NO: 20936 - DNA, 25 bp, Homo sapien
tctgttgtgaagtcagctgttagtc

SEQ ID NO: 20937 - DNA, 25 bp, Homo sapien
tgtgaagtcagctgttagtctaatc

SEQ ID NO: 20938 - DNA, 25 bp, Homo sapien
ttcgagaatctatggtttaggtatc

SEQ ID NO: 20939 - DNA, 25 bp, Homo sapien
gcaatgtgtacaacttcgagaatct

SEQ ID NO: 20940 - DNA, 25 bp, Homo sapien
gctagagcctccagtataatgttga

SEQ ID NO: 20941 - DNA, 25 bp, Homo sapien
atctgagatgatgatagtggctagg

SEQ ID NO: 20942 - DNA, 25 bp, Homo sapien
atagcagcaaaagtgataaaatttc

SEQ ID NO: 20943 - DNA, 25 bp, Homo sapien
gaggaggtggttgtactacttttga

SEQ ID NO: 20944 - DNA, 25 bp, Homo sapien
gcagccattcttctatagcagcaaa

SEQ ID NO: 20945 - DNA, 25 bp, Homo sapien
tgaatagaatcaaccagaatggata

SEQ ID NO: 20946 - DNA, 25 bp, Homo sapien
tgagttaatgccttatagttagcac

SEQ ID NO: 20947 - DNA, 25 bp, Homo sapien
attactagcagtgttcctttgtgaa

SEQ ID NO: 20948 - DNA, 25 bp, Homo sapien
aagggacaatagatcctagattggc

SEQ ID NO: 20949 - DNA, 25 bp, Homo sapien
ttagaatgtcaagggacaatagatc

SEQ ID NO: 20950 - DNA, 25 bp, Homo sapien
ttgaaagaatgagtaatcaggacat

SEQ ID NO: 20951 - DNA, 25 bp, Homo sapien
aaagatgaaatctagccttgagccc

SEQ ID NO: 20952 - DNA, 25 bp, Homo sapien
ttcaagcctgcactctcaattactg

SEQ ID NO: 20953 - DNA, 25 bp, Homo sapien
aagaaagtagatggatacagtgtac

SEQ ID NO: 20954 - DNA, 25 bp, Homo sapien
atacagtgtacatactaggcccaac

SEQ ID NO: 20955 - DNA, 25 bp, Homo sapien
acttgggtcttattaacactgtgcc

SEQ ID NO: 20956 - DNA, 25 bp, Homo sapien
aacactgtgccaggttctcatatac

SEQ ID NO: 20957 - DNA, 25 bp, Homo sapien
ggagagatggtgctattcctgccac

SEQ ID NO: 20958 - DNA, 25 bp, Homo sapien
agagagagatgcacatttgcatgac

SEQ ID NO: 20959 - DNA, 25 bp, Homo sapien
tagatctccatgtcaccgcagtcac

SEQ ID NO: 20960 - DNA, 25 bp, Homo sapien
taccaactggctgcattagatcatt

SEQ ID NO: 20961 - DNA, 25 bp, Homo sapien
tagccttgagcccttaccaactggc

SEQ ID NO: 20962 - DNA, 25 bp, Homo sapien
tggacttgaggagattaaccgatta

SEQ ID NO: 20963 - DNA, 25 bp, Homo sapien
cccatggacttgaggagattaaccg

SEQ ID NO: 20964 - DNA, 25 bp, Homo sapien
gaaagaaatcagagtaagaaaacga

SEQ ID NO: 20965 - DNA, 25 bp, Homo sapien
gactcagagttcactcagtgtgaat

SEQ ID NO: 20966 - DNA, 25 bp, Homo sapien
accttgaaatcacgctgtaaaaatt

SEQ ID NO: 20967 - DNA, 25 bp, Homo sapien
gagtaagaaaacgatgagcagtttc

SEQ ID NO: 20968 - DNA, 25 bp, Homo sapien
atctttgcaacaacagagggagaaa

SEQ ID NO: 20969 - DNA, 25 bp, Homo sapien
tgtttaaattgaagagggctgagaa

SEQ ID NO: 20970 - DNA, 25 bp, Homo sapien
gtgaataatcttttcctgaggcatt

SEQ ID NO: 20971 - DNA, 25 bp, Homo sapien
taaccgattaatcttctgtggaaat

SEQ ID NO: 20972 - DNA, 25 bp, Homo sapien
ctgtcagttacctggaaaggacttt

SEQ ID NO: 20973 - DNA, 25 bp, Homo sapien
tgttgccaggacacctcacggggaa

SEQ ID NO: 20974 - DNA, 25 bp, Homo sapien
ctcacggggaaacatgcctgccttt

SEQ ID NO: 20975 - DNA, 25 bp, Homo sapien
taggataaacccaaccatctgagag

SEQ ID NO: 20976 - DNA, 25 bp, Homo sapien
attcataaataggataaacccaacc

SEQ ID NO: 20977 - DNA, 25 bp, Homo sapien
agcgcccagtgaaagcaggaaagaa

SEQ ID NO: 20978 - DNA, 25 bp, Homo sapien
acctttgggcctgtggattcataaa

SEQ ID NO: 20979 - DNA, 25 bp, Homo sapien
acccaaccatctgagagtaacatct

SEQ ID NO: 20980 - DNA, 25 bp, Homo sapien
ttgcagattcatattacccaagccc

SEQ ID NO: 20981 - DNA, 25 bp, Homo sapien
acagagaaagggagcgcccagtgaa

SEQ ID NO: 20982 - DNA, 25 bp, Homo sapien
ctgcctttggtaaatttaattggtc

SEQ ID NO: 20983 - DNA, 25 bp, Homo sapien
cccggtcagttgcagattcatatta

SEQ ID NO: 20984 - DNA, 25 bp, Homo sapien
gctgtgattataagcctaagccacc

SEQ ID NO: 20985 - DNA, 25 bp, Homo sapien
agtaggtgggacttaaaatctcaaa

SEQ ID NO: 20986 - DNA, 25 bp, Homo sapien
aagcctaagccaccacaaatggcca

SEQ ID NO: 20987 - DNA, 25 bp, Homo sapien
attagctcaggttcaagttcttaag

SEQ ID NO: 20988 - DNA, 25 bp, Homo sapien
ttgctttacttacccatcggaaatc

SEQ ID NO: 20989 - DNA, 25 bp, Homo sapien
aaatctcaaagactatgtaagccag

SEQ ID NO: 20990 - DNA, 25 bp, Homo sapien
ctcaaggctcgagtacagtggtgca

SEQ ID NO: 20991 - DNA, 25 bp, Homo sapien
atgtaagccagttatctatagtata

SEQ ID NO: 20992 - DNA, 25 bp, Homo sapien
gtcctcaaggctcgagtacagtggt

SEQ ID NO: 20993 - DNA, 25 bp, Homo sapien
gatgaaactgtattagctcaggttc

SEQ ID NO: 20994 - DNA, 25 bp, Homo sapien
caagttcttaagtaggtgggactta

SEQ ID NO: 20995 - DNA, 25 bp, Homo sapien
ttagccaggcagaatgcccgccttc

SEQ ID NO: 20996 - DNA, 25 bp, Homo sapien
cacaaaaggttatccaatttaaaca

SEQ ID NO: 20997 - DNA, 25 bp, Homo sapien
agaatgcccgccttcactgagctta

SEQ ID NO: 20998 - DNA, 25 bp, Homo sapien
gcacggcaaggagcgacctgcgtta

SEQ ID NO: 20999 - DNA, 25 bp, Homo sapien
tctcgcccagaaaatggcgtgatct

SEQ ID NO: 21000 - DNA, 25 bp, Homo sapien
ctccaaagacttggaacacaaaagg

SEQ ID NO: 21001 - DNA, 25 bp, Homo sapien
acctgcgttagccaggcagaatgcc

SEQ ID NO: 21002 - DNA, 25 bp, Homo sapien
taaacaaaagcaaccttgcagattt

SEQ ID NO: 21003 - DNA, 25 bp, Homo sapien
aaggacacaattattccaaagactt

SEQ ID NO: 21004 - DNA, 25 bp, Homo sapien
ttaaagtagtttgctgagcacttac

SEQ ID NO: 21005 - DNA, 25 bp, Homo sapien
tacagtaatgttccaggcacggcaa

SEQ ID NO: 21006 - DNA, 25 bp, Homo sapien
cttccagggtccattgcaggctgcc

SEQ ID NO: 21007 - DNA, 25 bp, Homo sapien
actgctctaggcctttgaggcaggt

SEQ ID NO: 21008 - DNA, 25 bp, Homo sapien
tccatgtcatctggctgtggatagt

SEQ ID NO: 21009 - DNA, 25 bp, Homo sapien
agctggtcttcagaaggtaaccacc

SEQ ID NO: 21010 - DNA, 25 bp, Homo sapien
gatagtggaactgctggtctccttc

SEQ ID NO: 21011 - DNA, 25 bp, Homo sapien
ctttccttctagttggtagcctggc

SEQ ID NO: 21012 - DNA, 25 bp, Homo sapien
acaacacgttggctgtgaaattcag

SEQ ID NO: 21013 - DNA, 25 bp, Homo sapien
aggtgctgctgagctgtgcaaagcc

SEQ ID NO: 21014 - DNA, 25 bp, Homo sapien
agctctatgggctaaaagactaacc

SEQ ID NO: 21015 - DNA, 25 bp, Homo sapien
taaccctacatagccaaggatggcc

SEQ ID NO: 21016 - DNA, 25 bp, Homo sapien
atggccaatcagagagctgctttcc

SEQ ID NO: 21017 - DNA, 25 bp, Homo sapien
ccaaggccaggaaacacagggtgta

SEQ ID NO: 21018 - DNA, 25 bp, Homo sapien
ggaacatactagtgctcaaaaatat

SEQ ID NO: 21019 - DNA, 25 bp, Homo sapien
tttgagtgactgaaaagctgcatgc

SEQ ID NO: 21020 - DNA, 25 bp, Homo sapien
gtacagaatcatgttgacctccaag

SEQ ID NO: 21021 - DNA, 25 bp, Homo sapien
catgctttatgagaacaggacttac

SEQ ID NO: 21022 - DNA, 25 bp, Homo sapien
aacacagggtgtaatgaaagcacaa

SEQ ID NO: 21023 - DNA, 25 bp, Homo sapien
tgtcaggtgttccaggtacagaatc

SEQ ID NO: 21024 - DNA, 25 bp, Homo sapien
aagataagcactaccaatagcatag

SEQ ID NO: 21025 - DNA, 25 bp, Homo sapien
tgaaaagctgcatgccataactact

SEQ ID NO: 21026 - DNA, 25 bp, Homo sapien
taagtgtccactacctgtcaggtgt

SEQ ID NO: 21027 - DNA, 25 bp, Homo sapien
tttagtgggtaaacaagataagcac

SEQ ID NO: 21028 - DNA, 25 bp, Homo sapien
ttgttagacacaagccttcaggaat

SEQ ID NO: 21029 - DNA, 25 bp, Homo sapien
tggggtctgtcccactgccagcctt

SEQ ID NO: 21030 - DNA, 25 bp, Homo sapien
taggtttgcagggaactgaaagaag

SEQ ID NO: 21031 - DNA, 25 bp, Homo sapien
ctgagggaccataaccagacggctc

SEQ ID NO: 21032 - DNA, 25 bp, Homo sapien
aagccttcaggaatgtttgatgcac

SEQ ID NO: 21033 - DNA, 25 bp, Homo sapien
ttgatgcactcatagagcctagagc

SEQ ID NO: 21034 - DNA, 25 bp, Homo sapien
ggaagggtggagcaactccctctct

SEQ ID NO: 21035 - DNA, 25 bp, Homo sapien
tcatagagcctagagcagtaggttt

SEQ ID NO: 21036 - DNA, 25 bp, Homo sapien
gagagtcaggcttatttagaacaac

SEQ ID NO: 21037 - DNA, 25 bp, Homo sapien
atgagtgtctaagaagtacgggaaa

SEQ ID NO: 21038 - DNA, 25 bp, Homo sapien
aaaatatcaggtgtaaatgagtgtc

SEQ ID NO: 21039 - DNA, 25 bp, Homo sapien
ccaatgtatctgtaaaacaaggcag

SEQ ID NO: 21040 - DNA, 25 bp, Homo sapien
ttggctataaaaccagaaggtgaaa

SEQ ID NO: 21041 - DNA, 25 bp, Homo sapien
atttacaagcaagtgggtttccaag

SEQ ID NO: 21042 - DNA, 25 bp, Homo sapien
ggcagaggaatgttctgtcagtgtt

SEQ ID NO: 21043 - DNA, 25 bp, Homo sapien
caggggcttctgcttagactttggc

SEQ ID NO: 21044 - DNA, 25 bp, Homo sapien
ctaaagttctcatccttaagtttcc

SEQ ID NO: 21045 - DNA, 25 bp, Homo sapien
ataaaaccagaaggtgaaagtttca

SEQ ID NO: 21046 - DNA, 25 bp, Homo sapien
ttagactttggctataaaaccagaa

SEQ ID NO: 21047 - DNA, 25 bp, Homo sapien
tgatttacaagcaagtgggtttcca

SEQ ID NO: 21048 - DNA, 25 bp, Homo sapien
ttctgtcagtgttggaatggtcgca

SEQ ID NO: 21049 - DNA, 25 bp, Homo sapien
gtcgcaggggcttctgcttagactt

SEQ ID NO: 21050 - DNA, 25 bp, Homo sapien
tgtcctctcacccatctggcaattt

SEQ ID NO: 21051 - DNA, 25 bp, Homo sapien
aaattaaagagatgcagtaaacgtc

SEQ ID NO: 21052 - DNA, 25 bp, Homo sapien
gagggagagaagtgtcattattcaa

SEQ ID NO: 21053 - DNA, 25 bp, Homo sapien
taaagagatgcagtaaacgtctcgt

SEQ ID NO: 21054 - DNA, 25 bp, Homo sapien
tagggtctggactttatgctgtttc

SEQ ID NO: 21055 - DNA, 25 bp, Homo sapien
ccaactcctgctggtcaagggactg

SEQ ID NO: 21056 - DNA, 25 bp, Homo sapien
ttaaaatagggtctggactttatgc

SEQ ID NO: 21057 - DNA, 25 bp, Homo sapien
tttcattaaataagtgagcaatagt

SEQ ID NO: 21058 - DNA, 25 bp, Homo sapien
attattcaacagttaccaactcctg

SEQ ID NO: 21059 - DNA, 25 bp, Homo sapien
ttaaaattaaagagatgcagtaaac

SEQ ID NO: 21060 - DNA, 25 bp, Homo sapien
aagaaagtgactcaggtgtcctctc

SEQ ID NO: 21061 - DNA, 25 bp, Homo sapien
tggcctggctggactctgtaacctc

SEQ ID NO: 21062 - DNA, 25 bp, Homo sapien
ctgtggccaaacagagtggaaacct

SEQ ID NO: 21063 - DNA, 25 bp, Homo sapien
cttggcaagatatttggaagcagga

SEQ ID NO: 21064 - DNA, 25 bp, Homo sapien
gccacagcctcagaaaatgcgaaat

SEQ ID NO: 21065 - DNA, 25 bp, Homo sapien
ctagattattgagagctggttccag

SEQ ID NO: 21066 - DNA, 25 bp, Homo sapien
actccatggtatgcaggagtggtat

SEQ ID NO: 21067 - DNA, 25 bp, Homo sapien
aatgtggccaaatttgcatggggaa

SEQ ID NO: 21068 - DNA, 25 bp, Homo sapien
ttctgtatatgggactgagatggtc

SEQ ID NO: 21069 - DNA, 25 bp, Homo sapien
tctaccagtgaactagtcagctttc

SEQ ID NO: 21070 - DNA, 25 bp, Homo sapien
ttccagcagagtgcatggcttactc

SEQ ID NO: 21071 - DNA, 25 bp, Homo sapien
atttgcatggggaactagaagcttt

SEQ ID NO: 21072 - DNA, 25 bp, Homo sapien
gattgcacaactccatgaatgtact

SEQ ID NO: 21073 - DNA, 25 bp, Homo sapien
cagcgtgcctcttgccacagctata

SEQ ID NO: 21074 - DNA, 25 bp, Homo sapien
atgatggtaatgattgcacaactcc

SEQ ID NO: 21075 - DNA, 25 bp, Homo sapien
aaaaggtatcttgctgagtttgcta

SEQ ID NO: 21076 - DNA, 25 bp, Homo sapien
agccgttatcaaaacataaaaggta

SEQ ID NO: 21077 - DNA, 25 bp, Homo sapien
aagtctcatgtattcctgggcaggg

SEQ ID NO: 21078 - DNA, 25 bp, Homo sapien
caggggtgaattgaatggtatgcaa

SEQ ID NO: 21079 - DNA, 25 bp, Homo sapien
aggccacgactacattctgaaactc

SEQ ID NO: 21080 - DNA, 25 bp, Homo sapien
acagctatatctagacctcgaagag

SEQ ID NO: 21081 - DNA, 25 bp, Homo sapien
caagccaaggccacgactacattct

SEQ ID NO: 21082 - DNA, 25 bp, Homo sapien
atttatacactttacaggggtgaat

SEQ ID NO: 21083 - DNA, 25 bp, Homo sapien
cttcataatgatggtataaggatta

SEQ ID NO: 21084 - DNA, 25 bp, Homo sapien
agccctcagaagacatgaaaaagac

SEQ ID NO: 21085 - DNA, 25 bp, Homo sapien
tttggagaagaagccgtcttcatga

SEQ ID NO: 21086 - DNA, 25 bp, Homo sapien
taaatgcccttttaggcttgatcga

SEQ ID NO: 21087 - DNA, 25 bp, Homo sapien
agaaaatgcctccaataagaaacgc

SEQ ID NO: 21088 - DNA, 25 bp, Homo sapien
cttgatcgattgtttgtagctataa

SEQ ID NO: 21089 - DNA, 25 bp, Homo sapien
cttgaaacggctttttaaatccatc

SEQ ID NO: 21090 - DNA, 25 bp, Homo sapien
cctccaataagaaacgctgatgcag

SEQ ID NO: 21091 - DNA, 25 bp, Homo sapien
ttcaaagttatatctcagccctcag

SEQ ID NO: 21092 - DNA, 25 bp, Homo sapien
aacatcatttggagaagaagccgtc

SEQ ID NO: 21093 - DNA, 25 bp, Homo sapien
tgcagcctcctgagcttgtggtgtc

SEQ ID NO: 21094 - DNA, 25 bp, Homo sapien
agcttgcagatgcaagatgctgccc

SEQ ID NO: 21095 - DNA, 25 bp, Homo sapien
gaggaaaatggtgagagatttcacc

SEQ ID NO: 21096 - DNA, 25 bp, Homo sapien
tgtcctctggaggtaaatggattca

SEQ ID NO: 21097 - DNA, 25 bp, Homo sapien
tcacagctggagaaggcaacaaaga

SEQ ID NO: 21098 - DNA, 25 bp, Homo sapien
taatcaaggccatctgccacataat

SEQ ID NO: 21099 - DNA, 25 bp, Homo sapien
tgaatgtctcacagctggagaaggc

SEQ ID NO: 21100 - DNA, 25 bp, Homo sapien
acagtctctagtgtcctctggaggt

SEQ ID NO: 21101 - DNA, 25 bp, Homo sapien
cccaggacagctgttcagagctgtt

SEQ ID NO: 21102 - DNA, 25 bp, Homo sapien
ccacacaaataatcaaggccatctg

SEQ ID NO: 21103 - DNA, 25 bp, Homo sapien
aaaattccagtgaatgtctcacagc

SEQ ID NO: 21104 - DNA, 25 bp, Homo sapien
aaaaggcagctctggtcccacagat

SEQ ID NO: 21105 - DNA, 25 bp, Homo sapien
tacatggtacaatatggacaccata

SEQ ID NO: 21106 - DNA, 25 bp, Homo sapien
ttgtcatgtaatgaggaagccaacc

SEQ ID NO: 21107 - DNA, 25 bp, Homo sapien
ccctttgtcaggtaggcattattaa

SEQ ID NO: 21108 - DNA, 25 bp, Homo sapien
ctagtggggcttgtcatgtaatgag

SEQ ID NO: 21109 - DNA, 25 bp, Homo sapien
atggacaccatattaaaacttgaac

SEQ ID NO: 21110 - DNA, 25 bp, Homo sapien
aacagaagaataagaggctgtccct

SEQ ID NO: 21111 - DNA, 25 bp, Homo sapien
ttactcatgatttgtgtggcaggca

SEQ ID NO: 21112 - DNA, 25 bp, Homo sapien
tgtgtctcccatttccagccatttg

SEQ ID NO: 21113 - DNA, 25 bp, Homo sapien
tttgtgaaacctgcaatagttactc

SEQ ID NO: 21114 - DNA, 25 bp, Homo sapien
tgtaatgaggaagccaaccacacgt

SEQ ID NO: 21115 - DNA, 25 bp, Homo sapien
aggtctgggcctatatctaattcat

SEQ ID NO: 21116 - DNA, 25 bp, Homo sapien
gagatggaagagagctaccttattc

SEQ ID NO: 21117 - DNA, 25 bp, Homo sapien
ctacatgattcaccatggaggtcat

SEQ ID NO: 21118 - DNA, 25 bp, Homo sapien
ttctcttggaggctacatgattcac

SEQ ID NO: 21119 - DNA, 25 bp, Homo sapien
atagcatagtctgtcctatcgcaac

SEQ ID NO: 21120 - DNA, 25 bp, Homo sapien
ttctgagatggaagagagctacctt

SEQ ID NO: 21121 - DNA, 25 bp, Homo sapien
tttgtgtgattgtgaaataaagctt

SEQ ID NO: 21122 - DNA, 25 bp, Homo sapien
tccactaagcatttgggatgtattt

SEQ ID NO: 21123 - DNA, 25 bp, Homo sapien
tcctatcgcaactcacacaaacaat

SEQ ID NO: 21124 - DNA, 25 bp, Homo sapien
ttgtgtaaatccactaagcatttgg

SEQ ID NO: 21125 - DNA, 25 bp, Homo sapien
attcaccatggaggtcatgggttct

SEQ ID NO: 21126 - DNA, 25 bp, Homo sapien
catatgaaactttgtgtgattgtga

SEQ ID NO: 21127 - DNA, 25 bp, Homo sapien
tgtcttacagttctagaagctcgaa

SEQ ID NO: 21128 - DNA, 25 bp, Homo sapien
tagaaacaagtgtcttgtgggaacc

SEQ ID NO: 21129 - DNA, 25 bp, Homo sapien
tcaagattatacacagttaagcagt

SEQ ID NO: 21130 - DNA, 25 bp, Homo sapien
acaagtgtcttgtgggaacccagct

SEQ ID NO: 21131 - DNA, 25 bp, Homo sapien
tgggaacccagctcttgagcggtct

SEQ ID NO: 21132 - DNA, 25 bp, Homo sapien
gcggtctgcccatctgtagcttcat

SEQ ID NO: 21133 - DNA, 25 bp, Homo sapien
tagcttcatcctaacagtggcttgc

SEQ ID NO: 21134 - DNA, 25 bp, Homo sapien
agctcttgagcggtctgcccatctg

SEQ ID NO: 21135 - DNA, 25 bp, Homo sapien
gttctagaagctcgaagtctgaaat

SEQ ID NO: 21136 - DNA, 25 bp, Homo sapien
ttctttggaggctctagaagagaat

SEQ ID NO: 21137 - DNA, 25 bp, Homo sapien
agtggcttgctgtatcctggacctg

SEQ ID NO: 21138 - DNA, 25 bp, Homo sapien
tcagatggaatgtgctatccaatac

SEQ ID NO: 21139 - DNA, 25 bp, Homo sapien
ataactttattacttggggatgcaa

SEQ ID NO: 21140 - DNA, 25 bp, Homo sapien
tttgaaatattcagatggaatgtgc

SEQ ID NO: 21141 - DNA, 25 bp, Homo sapien
tacgtattacaaggcaaagacaaac

SEQ ID NO: 21142 - DNA, 25 bp, Homo sapien
gaattaatgccagttagaagggacc

SEQ ID NO: 21143 - DNA, 25 bp, Homo sapien
ggaggcctagtgacaaatacgtatt

SEQ ID NO: 21144 - DNA, 25 bp, Homo sapien
tagaagggaccatgccaatttgaaa

SEQ ID NO: 21145 - DNA, 25 bp, Homo sapien
aagacaaactcaaacagagattttc

SEQ ID NO: 21146 - DNA, 25 bp, Homo sapien
aataatggaggcctagtgacaaata

SEQ ID NO: 21147 - DNA, 25 bp, Homo sapien
ttggggatgcaagatgaatgaatta

SEQ ID NO: 21148 - DNA, 25 bp, Homo sapien
cttatttaataatggaggcctagtg

SEQ ID NO: 21149 - DNA, 25 bp, Homo sapien
ctgggctcaagccataccaagcaca

SEQ ID NO: 21150 - DNA, 25 bp, Homo sapien
attgagatattttaagtcacgtatc

SEQ ID NO: 21151 - DNA, 25 bp, Homo sapien
tattgagatattttaagtcacgtat

SEQ ID NO: 21152 - DNA, 25 bp, Homo sapien
tttggagaaaactgtattgagatat

SEQ ID NO: 21153 - DNA, 25 bp, Homo sapien
agtcattgctcggtgcagcctcaaa

SEQ ID NO: 21154 - DNA, 25 bp, Homo sapien
cgtatctaatataaaaccagtttgc

SEQ ID NO: 21155 - DNA, 25 bp, Homo sapien
acacccccatactcggctaactatt

SEQ ID NO: 21156 - DNA, 25 bp, Homo sapien
tggagaaaactgtattgagatattt

SEQ ID NO: 21157 - DNA, 25 bp, Homo sapien
aaccagtttgcattgtttcagcttg

SEQ ID NO: 21158 - DNA, 25 bp, Homo sapien
gggctcaagccataccaagcacacc

SEQ ID NO: 21159 - DNA, 25 bp, Homo sapien
gtcacgtatctaatataaaaccagt

SEQ ID NO: 21160 - DNA, 25 bp, Homo sapien
tagggaaacaaagatgtactgctgt

SEQ ID NO: 21161 - DNA, 25 bp, Homo sapien
agtcaatggagcatccgagtaagta

SEQ ID NO: 21162 - DNA, 25 bp, Homo sapien
tagggcgtaaggcaaacaaacagaa

SEQ ID NO: 21163 - DNA, 25 bp, Homo sapien
aaagctgtgggttcaatgtgctagt

SEQ ID NO: 21164 - DNA, 25 bp, Homo sapien
gagaaagaacccaagaaacatgtct

SEQ ID NO: 21165 - DNA, 25 bp, Homo sapien
ctttgaagaataccgtagggcgtaa

SEQ ID NO: 21166 - DNA, 25 bp, Homo sapien
tattatgctgtcaagggactagcct

SEQ ID NO: 21167 - DNA, 25 bp, Homo sapien
gttacatcttaaaaggaaggccagc

SEQ ID NO: 21168 - DNA, 25 bp, Homo sapien
atcactgcttagagagaaagaaccc

SEQ ID NO: 21169 - DNA, 25 bp, Homo sapien
tgtggaggaaagtatactctgcttc

SEQ ID NO: 21170 - DNA, 25 bp, Homo sapien
aggggaacaactagtagaagcctta

SEQ ID NO: 21171 - DNA, 25 bp, Homo sapien
tgttataggacttttggggtgtcga

SEQ ID NO: 21172 - DNA, 25 bp, Homo sapien
tttgctcgagttcttgcttgcgtcc

SEQ ID NO: 21173 - DNA, 25 bp, Homo sapien
aatgtaccagcacttgctaagtacc

SEQ ID NO: 21174 - DNA, 25 bp, Homo sapien
cttgagagatacaaaataacactgt

SEQ ID NO: 21175 - DNA, 25 bp, Homo sapien
ctaacaaaagcccttgagagataca

SEQ ID NO: 21176 - DNA, 25 bp, Homo sapien
tacattgaaaagatgatgttgcttt

SEQ ID NO: 21177 - DNA, 25 bp, Homo sapien
tctgtggctggttgtgcctttgctc

SEQ ID NO: 21178 - DNA, 25 bp, Homo sapien
cttcagaggggatcctgaaattaaa

SEQ ID NO: 21179 - DNA, 25 bp, Homo sapien
tcttgcttgcgtccgggtagaatga

SEQ ID NO: 21180 - DNA, 25 bp, Homo sapien
cataactgagataaggagtcagtaa

SEQ ID NO: 21181 - DNA, 25 bp, Homo sapien
aagacctgccatcctttgtaagttg

SEQ ID NO: 21182 - DNA, 25 bp, Homo sapien
gctcccaacttgagagaactaggat

SEQ ID NO: 21183 - DNA, 25 bp, Homo sapien
attccctggggaaactactcaaaca

SEQ ID NO: 21184 - DNA, 25 bp, Homo sapien
aagctgaccctgagagaacctttta

SEQ ID NO: 21185 - DNA, 25 bp, Homo sapien
attaagctgcttggatttaccagtt

SEQ ID NO: 21186 - DNA, 25 bp, Homo sapien
taaagaagcaaatcagaaattaagc

SEQ ID NO: 21187 - DNA, 25 bp, Homo sapien
atttaatatgcgaattgctcccaac

SEQ ID NO: 21188 - DNA, 25 bp, Homo sapien
caaacagtgaatagataaagaagct

SEQ ID NO: 21189 - DNA, 25 bp, Homo sapien
catgttacattcacctaagggattt

SEQ ID NO: 21190 - DNA, 25 bp, Homo sapien
tagagaaaagctaataatgcttccc

SEQ ID NO: 21191 - DNA, 25 bp, Homo sapien
taaagaagctatttggaggaaatcc

SEQ ID NO: 21192 - DNA, 25 bp, Homo sapien
cacccacgggtaaagctgaccctga

SEQ ID NO: 21193 - DNA, 25 bp, Homo sapien
tacaaaagcagagataaaaatcacc

SEQ ID NO: 21194 - DNA, 25 bp, Homo sapien
aggccatgaccttgaactcatggac

SEQ ID NO: 21195 - DNA, 25 bp, Homo sapien
acctactgtaggacagaaaggtaat

SEQ ID NO: 21196 - DNA, 25 bp, Homo sapien
gagaagcctatatgtatattgggta

SEQ ID NO: 21197 - DNA, 25 bp, Homo sapien
gatacccatcataggcaatctgctg

SEQ ID NO: 21198 - DNA, 25 bp, Homo sapien
ttacaacagccaagtctaaggccat

SEQ ID NO: 21199 - DNA, 25 bp, Homo sapien
attaaccgggtaattgagaagccta

SEQ ID NO: 21200 - DNA, 25 bp, Homo sapien
agttaaaaaggctgacaaagtccta

SEQ ID NO: 21201 - DNA, 25 bp, Homo sapien
gtacatacatttaatagagacacaa

SEQ ID NO: 21202 - DNA, 25 bp, Homo sapien
tgtaggacagaaaggtaatccattt

SEQ ID NO: 21203 - DNA, 25 bp, Homo sapien
gtatttgcccttacaacagccaagt

SEQ ID NO: 21204 - DNA, 25 bp, Homo sapien
agacactgtggccagccagcttctt

SEQ ID NO: 21205 - DNA, 25 bp, Homo sapien
aaccaggccactttggagaaaggaa

SEQ ID NO: 21206 - DNA, 25 bp, Homo sapien
ttttgaacaggatataaactccatg

SEQ ID NO: 21207 - DNA, 25 bp, Homo sapien
agaaaggaagagaatgctattaatc

SEQ ID NO: 21208 - DNA, 25 bp, Homo sapien
atagggactacctggggtagaccaa

SEQ ID NO: 21209 - DNA, 25 bp, Homo sapien
attagagccgtgagacactgtggcc

SEQ ID NO: 21210 - DNA, 25 bp, Homo sapien
acaacttgtttcattaggggcacta

SEQ ID NO: 21211 - DNA, 25 bp, Homo sapien
ttagtcagatcccttgttaagcatt

SEQ ID NO: 21212 - DNA, 25 bp, Homo sapien
aagatgggcagtcaccatacaccat

SEQ ID NO: 21213 - DNA, 25 bp, Homo sapien
caataagccaagacaatagggacta

SEQ ID NO: 21214 - DNA, 25 bp, Homo sapien
tcctgccacagaacctttgcacatg

SEQ ID NO: 21215 - DNA, 25 bp, Homo sapien
tcagggcagtgctaaagcagtcaca

SEQ ID NO: 21216 - DNA, 25 bp, Homo sapien
aaagtcctgtttgtggacttcttgc

SEQ ID NO: 21217 - DNA, 25 bp, Homo sapien
ttcttgctgcaaggggtgactcaca

SEQ ID NO: 21218 - DNA, 25 bp, Homo sapien
gaccatggttctcagggcagtgcta

SEQ ID NO: 21219 - DNA, 25 bp, Homo sapien
tgtgcagccagtcttgggcagctcc

SEQ ID NO: 21220 - DNA, 25 bp, Homo sapien
cttactattgccaggaaaaagtcct

SEQ ID NO: 21221 - DNA, 25 bp, Homo sapien
gacttcttgctgcaaggggtgactc

SEQ ID NO: 21222 - DNA, 25 bp, Homo sapien
gggcactaaaactcccatccctgga

SEQ ID NO: 21223 - DNA, 25 bp, Homo sapien
cgccatgtggaccatggttctcagg

SEQ ID NO: 21224 - DNA, 25 bp, Homo sapien
cagctgacctcacttactattgcca

SEQ ID NO: 21225 - DNA, 25 bp, Homo sapien
catgtggaccatggttctcagggca

SEQ ID NO: 21226 - DNA, 25 bp, Homo sapien
cagacatgtttatagattcagaata

SEQ ID NO: 21227 - DNA, 25 bp, Homo sapien
ttgtcttaaagcaatggtaatatta

SEQ ID NO: 21228 - DNA, 25 bp, Homo sapien
gtaaactgtccaggaaagtaatgag

SEQ ID NO: 21229 - DNA, 25 bp, Homo sapien
ctggcttaacgaatagggtttctta

SEQ ID NO: 21230 - DNA, 25 bp, Homo sapien
agaatatatgagttacctggcttaa

SEQ ID NO: 21231 - DNA, 25 bp, Homo sapien
tgaaggtaattgtcttaaagcaatg

SEQ ID NO: 21232 - DNA, 25 bp, Homo sapien
gaatcctctaagatctagtggctga

SEQ ID NO: 21233 - DNA, 25 bp, Homo sapien
gaccactctggcctgtaaactgtcc

SEQ ID NO: 21234 - DNA, 25 bp, Homo sapien
tctagtggctgagtggagaccactc

SEQ ID NO: 21235 - DNA, 25 bp, Homo sapien
acgaatagggtttcttagaatcctc

SEQ ID NO: 21236 - DNA, 25 bp, Homo sapien
accgtacccggcacaatgtatgtat

SEQ ID NO: 21237 - DNA, 25 bp, Homo sapien
tacgttgatatctgcacatttggtg

SEQ ID NO: 21238 - DNA, 25 bp, Homo sapien
catgtgtctttacgttgatatctgc

SEQ ID NO: 21239 - DNA, 25 bp, Homo sapien
ccgtgcctggccagtgagcttcttt

SEQ ID NO: 21240 - DNA, 25 bp, Homo sapien
ttggtgcaaaagtcacttctaactt

SEQ ID NO: 21241 - DNA, 25 bp, Homo sapien
tatggtgttagttggtcagaaaacc

SEQ ID NO: 21242 - DNA, 25 bp, Homo sapien
tcctgatgatgtatgtatggtgtta

SEQ ID NO: 21243 - DNA, 25 bp, Homo sapien
gtactcccttagaggtgtcatattt

SEQ ID NO: 21244 - DNA, 25 bp, Homo sapien
gcacatttggtgcaaaagtcacttc

SEQ ID NO: 21245 - DNA, 25 bp, Homo sapien
tgcatgcaggagtgtagtttctgta

SEQ ID NO: 21246 - DNA, 25 bp, Homo sapien
ctggccagtgagcttctttactatc

SEQ ID NO: 21247 - DNA, 25 bp, Homo sapien
tggattgactttcataagggaagac

SEQ ID NO: 21248 - DNA, 25 bp, Homo sapien
ttgcaggctactcgcactgtgagct

SEQ ID NO: 21249 - DNA, 25 bp, Homo sapien
aatgtatctcagaaggaattcactc

SEQ ID NO: 21250 - DNA, 25 bp, Homo sapien
aactggggcctacttcctctgggga

SEQ ID NO: 21251 - DNA, 25 bp, Homo sapien
tcccaggaacttcacggaatggagt

SEQ ID NO: 21252 - DNA, 25 bp, Homo sapien
agaagcagagagttatggcactcgt

SEQ ID NO: 21253 - DNA, 25 bp, Homo sapien
tatagacatgtttgcaagctgccgg

SEQ ID NO: 21254 - DNA, 25 bp, Homo sapien
atttttcctaagcaactggggccta

SEQ ID NO: 21255 - DNA, 25 bp, Homo sapien
ttcagagttgtagctggctgcaatc

SEQ ID NO: 21256 - DNA, 25 bp, Homo sapien
acatgggcagtgtatcattagtgac

SEQ ID NO: 21257 - DNA, 25 bp, Homo sapien
ctgagaaaccagaaagaatgtatct

SEQ ID NO: 21258 - DNA, 25 bp, Homo sapien
agttgaccttggaggcattatgccc

SEQ ID NO: 21259 - DNA, 25 bp, Homo sapien
aagacataattggaattgagagtcc

SEQ ID NO: 21260 - DNA, 25 bp, Homo sapien
tttacatagaacacgaagcatcctt

SEQ ID NO: 21261 - DNA, 25 bp, Homo sapien
ttgagagtccagattgctaaattag

SEQ ID NO: 21262 - DNA, 25 bp, Homo sapien
agagaagacagcaattgtgtggtaa

SEQ ID NO: 21263 - DNA, 25 bp, Homo sapien
ttagatatctaaatggccagtttgc

SEQ ID NO: 21264 - DNA, 25 bp, Homo sapien
atgttcggttacctgcagcagtttc

SEQ ID NO: 21265 - DNA, 25 bp, Homo sapien
ttgtttttgtcccagagcagccagg

SEQ ID NO: 21266 - DNA, 25 bp, Homo sapien
tataaaagaatgttcggttacctgc

SEQ ID NO: 21267 - DNA, 25 bp, Homo sapien
aatgcaaaaggaatatgagagacta

SEQ ID NO: 21268 - DNA, 25 bp, Homo sapien
acatactagaagtcaggtttcaaga

SEQ ID NO: 21269 - DNA, 25 bp, Homo sapien
aatggccagtttgctgatctgttga

SEQ ID NO: 21270 - DNA, 25 bp, Homo sapien
gagaggaaaggacttaacatctgtt

SEQ ID NO: 21271 - DNA, 25 bp, Homo sapien
agaaatccctagtcacaagatgtgt

SEQ ID NO: 21272 - DNA, 25 bp, Homo sapien
acgagacactatttaggagaggaaa

SEQ ID NO: 21273 - DNA, 25 bp, Homo sapien
ctgttacggattgaactgtgtcttc

SEQ ID NO: 21274 - DNA, 25 bp, Homo sapien
gaagttcagacataaagccagatct

SEQ ID NO: 21275 - DNA, 25 bp, Homo sapien
caaaaagatgttaaagtctacaccc

SEQ ID NO: 21276 - DNA, 25 bp, Homo sapien
ccagacataagccagtattagaaaa

SEQ ID NO: 21277 - DNA, 25 bp, Homo sapien
ttcaagatcttatagaggagtccac

SEQ ID NO: 21278 - DNA, 25 bp, Homo sapien
tagaggagtccacattttacaagtc

SEQ ID NO: 21279 - DNA, 25 bp, Homo sapien
agatctaagcactgggttttgaata

SEQ ID NO: 21280 - DNA, 25 bp, Homo sapien
tagtggcactacaatgtgctatgtc

SEQ ID NO: 21281 - DNA, 25 bp, Homo sapien
agaaactggcctgtactgctatgac

SEQ ID NO: 21282 - DNA, 25 bp, Homo sapien
cctgaatcaatgaatctcactgaat

SEQ ID NO: 21283 - DNA, 25 bp, Homo sapien
attgggataattgaggaaaagaatc

SEQ ID NO: 21284 - DNA, 25 bp, Homo sapien
ttcagcatctcagtaatgtctcctt

SEQ ID NO: 21285 - DNA, 25 bp, Homo sapien
ttgaggaaaagaatcacaatctact

SEQ ID NO: 21286 - DNA, 25 bp, Homo sapien
cttgagggaatcattgggataattg

SEQ ID NO: 21287 - DNA, 25 bp, Homo sapien
attgcctccctcaggcaacagaaac

SEQ ID NO: 21288 - DNA, 25 bp, Homo sapien
caagtcatctgagtaaccattttcc

SEQ ID NO: 21289 - DNA, 25 bp, Homo sapien
atacaacagagaacttgagggaatc

SEQ ID NO: 21290 - DNA, 25 bp, Homo sapien
cccggccggtttccagctctttaga

SEQ ID NO: 21291 - DNA, 25 bp, Homo sapien
ctttcagtcaataaaaccaagtctt

SEQ ID NO: 21292 - DNA, 25 bp, Homo sapien
tgaatggcctacaggcattacaaac

SEQ ID NO: 21293 - DNA, 25 bp, Homo sapien
atctgtgctcatccactcaagattt

SEQ ID NO: 21294 - DNA, 25 bp, Homo sapien
ctacaggcattacaaacttaagttc

SEQ ID NO: 21295 - DNA, 25 bp, Homo sapien
aatttcacctaaccaatgacccaga

SEQ ID NO: 21296 - DNA, 25 bp, Homo sapien
ttggataatggcaccaccatctccc

SEQ ID NO: 21297 - DNA, 25 bp, Homo sapien
tttaagatggtttctggatatagcc

SEQ ID NO: 21298 - DNA, 25 bp, Homo sapien
atgacccagataagaatctgtgctc

SEQ ID NO: 21299 - DNA, 25 bp, Homo sapien
tttctggatatagcctgaatggcct

SEQ ID NO: 21300 - DNA, 25 bp, Homo sapien
ccgcgcctggccatgattgcaattt

SEQ ID NO: 21301 - DNA, 25 bp, Homo sapien
ggctcccaacctagaggcctcagaa

SEQ ID NO: 21302 - DNA, 25 bp, Homo sapien
cctttacttggataatggcaccacc

SEQ ID NO: 21303 - DNA, 25 bp, Homo sapien
aaacaagtaaaacagaggtctgagg

SEQ ID NO: 21304 - DNA, 25 bp, Homo sapien
tttgttccggtggaaataccatgaa

SEQ ID NO: 21305 - DNA, 25 bp, Homo sapien
aaacatgcatgctgtatttggtgtc

SEQ ID NO: 21306 - DNA, 25 bp, Homo sapien
gaaccctggctttatggaatagtaa

SEQ ID NO: 21307 - DNA, 25 bp, Homo sapien
atgtgtggaagatatagattgattt

SEQ ID NO: 21308 - DNA, 25 bp, Homo sapien
tgctttggggatttgtgataatgtc

SEQ ID NO: 21309 - DNA, 25 bp, Homo sapien
gtgtctagtagaccctgaaatacca

SEQ ID NO: 21310 - DNA, 25 bp, Homo sapien
cctggttatacctatgtgtggaaga

SEQ ID NO: 21311 - DNA, 25 bp, Homo sapien
ctgaggtagaccttcccttgggaat

SEQ ID NO: 21312 - DNA, 25 bp, Homo sapien
caaatgctaagaaccctggctttat

SEQ ID NO: 21313 - DNA, 25 bp, Homo sapien
agcagctaggtggaattagacaatt

SEQ ID NO: 21314 - DNA, 25 bp, Homo sapien
aatagaattcattgatgcatcgcac

SEQ ID NO: 21315 - DNA, 25 bp, Homo sapien
aaagtacattaaaccagatttggct

SEQ ID NO: 21316 - DNA, 25 bp, Homo sapien
ttatggcaataccactagggcggca

SEQ ID NO: 21317 - DNA, 25 bp, Homo sapien
tatcaagtgtttatgccatccaacc

SEQ ID NO: 21318 - DNA, 25 bp, Homo sapien
taggggagaatgataaatgccctcc

SEQ ID NO: 21319 - DNA, 25 bp, Homo sapien
tgatgcatcgcacttgtttaccaat

SEQ ID NO: 21320 - DNA, 25 bp, Homo sapien
ttggcttcagtaaatgaatgtaaac

SEQ ID NO: 21321 - DNA, 25 bp, Homo sapien
attgggaatgtgctttaatacagaa

SEQ ID NO: 21322 - DNA, 25 bp, Homo sapien
cagatagacatcttatggcaatacc

SEQ ID NO: 21323 - DNA, 25 bp, Homo sapien
gaaaatggaatacaatcaactgtca

SEQ ID NO: 21324 - DNA, 25 bp, Homo sapien
aatgttgaagtgagtaaagaaagca

SEQ ID NO: 21325 - DNA, 25 bp, Homo sapien
tcagacaaggattagaagtgaaatc

SEQ ID NO: 21326 - DNA, 25 bp, Homo sapien
ccatcagacaaggattagaagtgaa

SEQ ID NO: 21327 - DNA, 25 bp, Homo sapien
acctggcctcttacttgtgtacttc

SEQ ID NO: 21328 - DNA, 25 bp, Homo sapien
tgtgtacttccatcagacaaggatt

SEQ ID NO: 21329 - DNA, 25 bp, Homo sapien
tttagtccttgcctatacgatagat

SEQ ID NO: 21330 - DNA, 25 bp, Homo sapien
aacagtatcttaacttggagttttc

SEQ ID NO: 21331 - DNA, 25 bp, Homo sapien
gcctatacgatagataaaaaacagt

SEQ ID NO: 21332 - DNA, 25 bp, Homo sapien
aaatccatagccatgtttctgagag

SEQ ID NO: 21333 - DNA, 25 bp, Homo sapien
ccatagccatgtttctgagagttct

SEQ ID NO: 21334 - DNA, 25 bp, Homo sapien
tttatgtaaaccatctcctcatcac

SEQ ID NO: 21335 - DNA, 25 bp, Homo sapien
caccatcatggtaatatcagctatt

SEQ ID NO: 21336 - DNA, 25 bp, Homo sapien
caccgtgacaaagctttctaagggc

SEQ ID NO: 21337 - DNA, 25 bp, Homo sapien
caatttgcattggagatgtgaatct

SEQ ID NO: 21338 - DNA, 25 bp, Homo sapien
ctgttcgctataaatgagctgcgtt

SEQ ID NO: 21339 - DNA, 25 bp, Homo sapien
accaggaataacacacttgcagcac

SEQ ID NO: 21340 - DNA, 25 bp, Homo sapien
ttgcagcacattcacaaggtacaga

SEQ ID NO: 21341 - DNA, 25 bp, Homo sapien
ttcacaaggtacagaagaagacaca

SEQ ID NO: 21342 - DNA, 25 bp, Homo sapien
gttcctccagtgagatggttttatt

SEQ ID NO: 21343 - DNA, 25 bp, Homo sapien
tttgcctaccaatgtgaaagagcca

SEQ ID NO: 21344 - DNA, 25 bp, Homo sapien
aagtcacaataaacgcaccaggaat

SEQ ID NO: 21345 - DNA, 25 bp, Homo sapien
gaagacacactgaagtctgcgtttc

SEQ ID NO: 21346 - DNA, 25 bp, Homo sapien
aatcatatagcgctgacaccgtgac

SEQ ID NO: 21347 - DNA, 25 bp, Homo sapien
atatgtggtattagaagatcaaggt

SEQ ID NO: 21348 - DNA, 25 bp, Homo sapien
taactacaattctactctccacctt

SEQ ID NO: 21349 - DNA, 25 bp, Homo sapien
ctttgtgaatattcagaatcctgtc

SEQ ID NO: 21350 - DNA, 25 bp, Homo sapien
ttactgttaaccatattcaccctac

SEQ ID NO: 21351 - DNA, 25 bp, Homo sapien
aatataggcgcgagcaaccacgccc

SEQ ID NO: 21352 - DNA, 25 bp, Homo sapien
cttcgcatcctctaataactacaat

SEQ ID NO: 21353 - DNA, 25 bp, Homo sapien
tgtggtattagaagatcaaggtttt

SEQ ID NO: 21354 - DNA, 25 bp, Homo sapien
agaatatgtggtattagaagatcaa

SEQ ID NO: 21355 - DNA, 25 bp, Homo sapien
acaaaacactagaacttactcctct

SEQ ID NO: 21356 - DNA, 25 bp, Homo sapien
ccacgcccagctgaatatttatcat

SEQ ID NO: 21357 - DNA, 25 bp, Homo sapien
aagatcaaggttttgatacttaccc

SEQ ID NO: 21358 - DNA, 25 bp, Homo sapien
tcatcagctcaacactaaaggcctc

SEQ ID NO: 21359 - DNA, 25 bp, Homo sapien
gtcaaatgcattagttatcgttcct

SEQ ID NO: 21360 - DNA, 25 bp, Homo sapien
gaattggcccggacttttcatcctc

SEQ ID NO: 21361 - DNA, 25 bp, Homo sapien
taaataccagactttagtcaaatgc

SEQ ID NO: 21362 - DNA, 25 bp, Homo sapien
acgcctggccagaaactcttataat

SEQ ID NO: 21363 - DNA, 25 bp, Homo sapien
cttcatagtgtacctcaagcaatac

SEQ ID NO: 21364 - DNA, 25 bp, Homo sapien
ttctgtccatccttcatagtgtacc

SEQ ID NO: 21365 - DNA, 25 bp, Homo sapien
tatcgttcctgaagatgactcccta

SEQ ID NO: 21366 - DNA, 25 bp, Homo sapien
cttatggataagcaactctaaacca

SEQ ID NO: 21367 - DNA, 25 bp, Homo sapien
acactaaaggcctcccatgaattgg

SEQ ID NO: 21368 - DNA, 25 bp, Homo sapien
aaaccaagtacaaattcatcagctc

SEQ ID NO: 21369 - DNA, 25 bp, Homo sapien
tggaaggagtcaatccctcacacct

SEQ ID NO: 21370 - DNA, 25 bp, Homo sapien
tgtcactagggtcatataaatatac

SEQ ID NO: 21371 - DNA, 25 bp, Homo sapien
actgacatgctaccatgaaaggtaa

SEQ ID NO: 21372 - DNA, 25 bp, Homo sapien
aacaacatggataatggcaataccc

SEQ ID NO: 21373 - DNA, 25 bp, Homo sapien
ataatggcaataccctaggagtggc

SEQ ID NO: 21374 - DNA, 25 bp, Homo sapien
caaaaagatggaaggagtcaatccc

SEQ ID NO: 21375 - DNA, 25 bp, Homo sapien
tgttagacataacctactgacatgc

SEQ ID NO: 21376 - DNA, 25 bp, Homo sapien
atatactttataagggagccgatgt

SEQ ID NO: 21377 - DNA, 25 bp, Homo sapien
taccctaggagtggcagagccaaaa

SEQ ID NO: 21378 - DNA, 25 bp, Homo sapien
agtaacgtgctaatttgctataacc

SEQ ID NO: 21379 - DNA, 25 bp, Homo sapien
ggagccgatgtgtgtgttataactt

SEQ ID NO: 21380 - DNA, 25 bp, Homo sapien
ggaggagaacatatgattggcacaa

SEQ ID NO: 21381 - DNA, 25 bp, Homo sapien
tgattggcacaagtcgctgttactc

SEQ ID NO: 21382 - DNA, 25 bp, Homo sapien
gtggaggtagtctgagtcctctccc

SEQ ID NO: 21383 - DNA, 25 bp, Homo sapien
aatcatggacaatatgagaaactac

SEQ ID NO: 21384 - DNA, 25 bp, Homo sapien
aaatggcctaaaaatagtgaattac

SEQ ID NO: 21385 - DNA, 25 bp, Homo sapien
tctgggaaggaaaaagctctaaatg

SEQ ID NO: 21386 - DNA, 25 bp, Homo sapien
atacaaaaatgtagtggaggtagtc

SEQ ID NO: 21387 - DNA, 25 bp, Homo sapien
tgagaaactacaactaaaacatgtc

SEQ ID NO: 21388 - DNA, 25 bp, Homo sapien
ttgaaagacaaagccacttgtaagt

SEQ ID NO: 21389 - DNA, 25 bp, Homo sapien
catttggaaatgtctgggaaggaaa

SEQ ID NO: 21390 - DNA, 25 bp, Homo sapien
atgctttgtcatggagtgggcagaa

SEQ ID NO: 21391 - DNA, 25 bp, Homo sapien
atttcagtaaaataggacctgttta

SEQ ID NO: 21392 - DNA, 25 bp, Homo sapien
gtgaatgtattcctacacaacacat

SEQ ID NO: 21393 - DNA, 25 bp, Homo sapien
tcctaagttatttgtcctgtggccc

SEQ ID NO: 21394 - DNA, 25 bp, Homo sapien
tttaaagcatagagtacaaatgagc

SEQ ID NO: 21395 - DNA, 25 bp, Homo sapien
atacatgtatgtaaaggcttttcta

SEQ ID NO: 21396 - DNA, 25 bp, Homo sapien
aaggcttttctaccaaatgtacgac

SEQ ID NO: 21397 - DNA, 25 bp, Homo sapien
taaccatatagccttgcataattat

SEQ ID NO: 21398 - DNA, 25 bp, Homo sapien
tgtacgacaattatttaaagcatag

SEQ ID NO: 21399 - DNA, 25 bp, Homo sapien
acagagaatttaaagtacattatca

SEQ ID NO: 21400 - DNA, 25 bp, Homo sapien
gtggccctacatcctacaggtgtat

SEQ ID NO: 21401 - DNA, 25 bp, Homo sapien
caggtgtatatgttatgtttgcgtg

SEQ ID NO: 21402 - DNA, 25 bp, Homo sapien
gaaggagggcaaggaataaacagaa

SEQ ID NO: 21403 - DNA, 25 bp, Homo sapien
taagtacatactttgtcaggcagcc

SEQ ID NO: 21404 - DNA, 25 bp, Homo sapien
ccagagctgacattctaaagaggtt

SEQ ID NO: 21405 - DNA, 25 bp, Homo sapien
tgcgcctggccagagctgacattct

SEQ ID NO: 21406 - DNA, 25 bp, Homo sapien
ccctgagaaaggaagctatgtggag

SEQ ID NO: 21407 - DNA, 25 bp, Homo sapien
aatgaggtcctcagaggcactcagt

SEQ ID NO: 21408 - DNA, 25 bp, Homo sapien
agcctgtaggagtaccaggagctct

SEQ ID NO: 21409 - DNA, 25 bp, Homo sapien
ggcaaggaataaacagaagagttaa

SEQ ID NO: 21410 - DNA, 25 bp, Homo sapien
ttggggtgccctagacaccagggtc

SEQ ID NO: 21411 - DNA, 25 bp, Homo sapien
attctaaagaggttatggacggaag

SEQ ID NO: 21412 - DNA, 25 bp, Homo sapien
gcgcaaggagcctgtaggagtacca

SEQ ID NO: 21413 - DNA, 25 bp, Homo sapien
tgagcccgctgcacctagctgagca

SEQ ID NO: 21414 - DNA, 25 bp, Homo sapien
ttcatgtgtcatattaggttctcct

SEQ ID NO: 21415 - DNA, 25 bp, Homo sapien
gagccgaatctgtggatacggtgta

SEQ ID NO: 21416 - DNA, 25 bp, Homo sapien
ctgaactatcaggtagtaagatgaa

SEQ ID NO: 21417 - DNA, 25 bp, Homo sapien
ctctcaaggttacctgccaagggaa

SEQ ID NO: 21418 - DNA, 25 bp, Homo sapien
actcacctaaggaaacttcaggggc

SEQ ID NO: 21419 - DNA, 25 bp, Homo sapien
cctagctgagcacaccaagatttct

SEQ ID NO: 21420 - DNA, 25 bp, Homo sapien
atacggtgtagtgtgtaacacttcc

SEQ ID NO: 21421 - DNA, 25 bp, Homo sapien
aatttgaacacttgagattatccaa

SEQ ID NO: 21422 - DNA, 25 bp, Homo sapien
atttagctaagttgtattggatccc

SEQ ID NO: 21423 - DNA, 25 bp, Homo sapien
aaagatgtcactcacctaaggaaac

SEQ ID NO: 21424 - DNA, 25 bp, Homo sapien
tgaatgacccaaacaggctgaaatg

SEQ ID NO: 21425 - DNA, 25 bp, Homo sapien
tggaaatatattggtacagtgccac

SEQ ID NO: 21426 - DNA, 25 bp, Homo sapien
ggaaactctgcctaagacaccacac

SEQ ID NO: 21427 - DNA, 25 bp, Homo sapien
ttactctgggatgaatgacccaaac

SEQ ID NO: 21428 - DNA, 25 bp, Homo sapien
gttgggtagatatacatggtcctgc

SEQ ID NO: 21429 - DNA, 25 bp, Homo sapien
gtcctcaccaaacactgataaaatg

SEQ ID NO: 21430 - DNA, 25 bp, Homo sapien
atgcgttaaagaaaggtaaatgtac

SEQ ID NO: 21431 - DNA, 25 bp, Homo sapien
aatgcctggctcgttttttgtggtt

SEQ ID NO: 21432 - DNA, 25 bp, Homo sapien
aaatggcctggatgcatgcgttaaa

SEQ ID NO: 21433 - DNA, 25 bp, Homo sapien
ctgataaaatgccaagcctagggaa

SEQ ID NO: 21434 - DNA, 25 bp, Homo sapien
agcctagggaaaaaacagtgagttg

SEQ ID NO: 21435 - DNA, 25 bp, Homo sapien
tttggcctggcctgatgcctctgtc

SEQ ID NO: 21436 - DNA, 25 bp, Homo sapien
ctaccaaatatcagccaggtgcggc

SEQ ID NO: 21437 - DNA, 25 bp, Homo sapien
agcctgaagcctgactgtctgcgat

SEQ ID NO: 21438 - DNA, 25 bp, Homo sapien
ttgagtgctacaactgtccaaggag

SEQ ID NO: 21439 - DNA, 25 bp, Homo sapien
ccataacagacctggggcaccgaag

SEQ ID NO: 21440 - DNA, 25 bp, Homo sapien
gcagacggcccgtgtcagacagcct

SEQ ID NO: 21441 - DNA, 25 bp, Homo sapien
agcccgtgcccataacagacctggg

SEQ ID NO: 21442 - DNA, 25 bp, Homo sapien
agcctgactgtctgcgatcaacggc

SEQ ID NO: 21443 - DNA, 25 bp, Homo sapien
ctcagtattttagaaggccaaggtg

SEQ ID NO: 21444 - DNA, 25 bp, Homo sapien
acctgccctgggtctgaagatctcc

SEQ ID NO: 21445 - DNA, 25 bp, Homo sapien
gcccgtgtcagacagcctgaagcct

SEQ ID NO: 21446 - DNA, 25 bp, Homo sapien
caactgctgcagaccaaagattaaa

SEQ ID NO: 21447 - DNA, 25 bp, Homo sapien
ttcatgcagtgaggaacaatgattt

SEQ ID NO: 21448 - DNA, 25 bp, Homo sapien
ataatgtgtcatagtgcaggtctgc

SEQ ID NO: 21449 - DNA, 25 bp, Homo sapien
tccaagccagatgaatatgatgaaa

SEQ ID NO: 21450 - DNA, 25 bp, Homo sapien
agggctcaaggaagataaacttgtc

SEQ ID NO: 21451 - DNA, 25 bp, Homo sapien
gccagaagagagtggaacaatattt

SEQ ID NO: 21452 - DNA, 25 bp, Homo sapien
aaaaatgatggccagatgttccctc

SEQ ID NO: 21453 - DNA, 25 bp, Homo sapien
taatatatgtgtaggagagatggaa

SEQ ID NO: 21454 - DNA, 25 bp, Homo sapien
cctcagtttggcagaagacataaat

SEQ ID NO: 21455 - DNA, 25 bp, Homo sapien
atttccaggctcaagaagttcagca

SEQ ID NO: 21456 - DNA, 25 bp, Homo sapien
gtccaggtaaaagaacactaagata

SEQ ID NO: 21457 - DNA, 25 bp, Homo sapien
gtgaaatggctgataaattgcccta

SEQ ID NO: 21458 - DNA, 25 bp, Homo sapien
ttaccatagcaaatacacaagcact

SEQ ID NO: 21459 - DNA, 25 bp, Homo sapien
actgaaaagcctaaatgctgggtat

SEQ ID NO: 21460 - DNA, 25 bp, Homo sapien
tctaaaacactgaacagcaggctgc

SEQ ID NO: 21461 - DNA, 25 bp, Homo sapien
tcagggcactgtaaatctaagtacc

SEQ ID NO: 21462 - DNA, 25 bp, Homo sapien
attgtagtagaagttgtgaaatggc

SEQ ID NO: 21463 - DNA, 25 bp, Homo sapien
tagactccagtgtttgttaaagatg

SEQ ID NO: 21464 - DNA, 25 bp, Homo sapien
ttaagagatctatgatgactcagtc

SEQ ID NO: 21465 - DNA, 25 bp, Homo sapien
ttgtatcctgataatcgcctgcctc

SEQ ID NO: 21466 - DNA, 25 bp, Homo sapien
agcaggctgccaatataaatagctc

SEQ ID NO: 21467 - DNA, 25 bp, Homo sapien
aatcacagtaattgggaattagcac

SEQ ID NO: 21468 - DNA, 25 bp, Homo sapien
gatgcaccaatgacagcctcaggga

SEQ ID NO: 21469 - DNA, 25 bp, Homo sapien
acatttagggagacatcatgagaca

SEQ ID NO: 21470 - DNA, 25 bp, Homo sapien
caaaatatgtccaaggttgtcaggc

SEQ ID NO: 21471 - DNA, 25 bp, Homo sapien
ggatgcaccaatgacagcctcaggg

SEQ ID NO: 21472 - DNA, 25 bp, Homo sapien
gagacatcatgagacatcagtcaat

SEQ ID NO: 21473 - DNA, 25 bp, Homo sapien
atgcaccaatgacagcctcagggaa

SEQ ID NO: 21474 - DNA, 25 bp, Homo sapien
aaatatgtccaaggttgtcaggcac

SEQ ID NO: 21475 - DNA, 25 bp, Homo sapien
aatatgtccaaggttgtcaggcaca

SEQ ID NO: 21476 - DNA, 25 bp, Homo sapien
gagacatcagtcaatatatgttaag

SEQ ID NO: 21477 - DNA, 25 bp, Homo sapien
cagggaagtcttgacaaaatatgtc

SEQ ID NO: 21478 - DNA, 25 bp, Homo sapien
tatatgttaagaagtacattgcttc

SEQ ID NO: 21479 - DNA, 25 bp, Homo sapien
ttcatctggaaagacaggacaactt

SEQ ID NO: 21480 - DNA, 25 bp, Homo sapien
ttgggcaaaggagtgactttgaata

SEQ ID NO: 21481 - DNA, 25 bp, Homo sapien
agcagttcccggcttgagttttcct

SEQ ID NO: 21482 - DNA, 25 bp, Homo sapien
gaggcaaatcagataagcatctatc

SEQ ID NO: 21483 - DNA, 25 bp, Homo sapien
gactgaagtgggaaggaagcttcca

SEQ ID NO: 21484 - DNA, 25 bp, Homo sapien
tttaaaaatctgttggagaaagcat

SEQ ID NO: 21485 - DNA, 25 bp, Homo sapien
catttgatctctcatggcgaggaca

SEQ ID NO: 21486 - DNA, 25 bp, Homo sapien
cttcgtgattttggggaccacagat

SEQ ID NO: 21487 - DNA, 25 bp, Homo sapien
atctatctgattgggcaaaggagtg

SEQ ID NO: 21488 - DNA, 25 bp, Homo sapien
ggtcacagatggctgttacacaaat

SEQ ID NO: 21489 - DNA, 25 bp, Homo sapien
tcatggcgaggacagtttattcctt

SEQ ID NO: 21490 - DNA, 25 bp, Homo sapien
aacttggcagttatttgaaggaagc

SEQ ID NO: 21491 - DNA, 25 bp, Homo sapien
aaggtttgtggatattgctaattac

SEQ ID NO: 21492 - DNA, 25 bp, Homo sapien
tttctgtcatgaacaaggtttgtgg

SEQ ID NO: 21493 - DNA, 25 bp, Homo sapien
ggtgaagccaagagcccttgccatc

SEQ ID NO: 21494 - DNA, 25 bp, Homo sapien
ttaaatagctcagatcagattgctt

SEQ ID NO: 21495 - DNA, 25 bp, Homo sapien
actttgaggagcagttgcgtcattt

SEQ ID NO: 21496 - DNA, 25 bp, Homo sapien
ttttctgctgggctgcgactttgag

SEQ ID NO: 21497 - DNA, 25 bp, Homo sapien
ccaggcctggccagatttagttaat

SEQ ID NO: 21498 - DNA, 25 bp, Homo sapien
tgaaggaagcggctcttttctgctg

SEQ ID NO: 21499 - DNA, 25 bp, Homo sapien
aggcaaaggtaatattttctgtcat

SEQ ID NO: 21500 - DNA, 25 bp, Homo sapien
cagttgcgtcatttccgggtgaagc

SEQ ID NO: 21501 - DNA, 25 bp, Homo sapien
aatgcttgccgacaactttgatgac

SEQ ID NO: 21502 - DNA, 25 bp, Homo sapien
acacaaaacacattctggctagatt

SEQ ID NO: 21503 - DNA, 25 bp, Homo sapien
tttgatgactgtaatgaatgcccac

SEQ ID NO: 21504 - DNA, 25 bp, Homo sapien
atgtctctataaaaaggcactttgc

SEQ ID NO: 21505 - DNA, 25 bp, Homo sapien
ttcagcctttgtcttgagatgcctt

SEQ ID NO: 21506 - DNA, 25 bp, Homo sapien
aacacccaagatcagtattcagcct

SEQ ID NO: 21507 - DNA, 25 bp, Homo sapien
accgtagttaccaaagagacaccaa

SEQ ID NO: 21508 - DNA, 25 bp, Homo sapien
aaacttgggtttccgtcaatgtctc

SEQ ID NO: 21509 - DNA, 25 bp, Homo sapien
ttcaccaaaggcaagggattcatca

SEQ ID NO: 21510 - DNA, 25 bp, Homo sapien
atgccttggcatatctgaacttgtc

SEQ ID NO: 21511 - DNA, 25 bp, Homo sapien
atgtatgcaaaggacccactgtgct

SEQ ID NO: 21512 - DNA, 25 bp, Homo sapien
agcttccgcctgctggcaatgcatg

SEQ ID NO: 21513 - DNA, 25 bp, Homo sapien
ctgctggcaatgcatggcgtcctgc

SEQ ID NO: 21514 - DNA, 25 bp, Homo sapien
tccgcctgctggcaatgcatggcgt

SEQ ID NO: 21515 - DNA, 25 bp, Homo sapien
caggacaccactcccgttggattta

SEQ ID NO: 21516 - DNA, 25 bp, Homo sapien
cctgctggcaatgcatggcgtcctg

SEQ ID NO: 21517 - DNA, 25 bp, Homo sapien
gctggcaatgcatggcgtcctgcgc

SEQ ID NO: 21518 - DNA, 25 bp, Homo sapien
gcctgctggcaatgcatggcgtcct

SEQ ID NO: 21519 - DNA, 25 bp, Homo sapien
ctcaggacaccactcccgttggatt

SEQ ID NO: 21520 - DNA, 25 bp, Homo sapien
tctgcctcggtgtcacagggcacac

SEQ ID NO: 21521 - DNA, 25 bp, Homo sapien
ttctcctcaggacaccactcccgtt

SEQ ID NO: 21522 - DNA, 25 bp, Homo sapien
tcaggacaccactcccgttggattt

SEQ ID NO: 21523 - DNA, 25 bp, Homo sapien
tagcatggacacaggtgcctgtccc

SEQ ID NO: 21524 - DNA, 25 bp, Homo sapien
tgggctgcagcgcatcctaacaatg

SEQ ID NO: 21525 - DNA, 25 bp, Homo sapien
aagtgcctttacaaggtggtgcaac

SEQ ID NO: 21526 - DNA, 25 bp, Homo sapien
tcactttggcaaagggacgaaatga

SEQ ID NO: 21527 - DNA, 25 bp, Homo sapien
atcctaacaatgctccaggggctgg

SEQ ID NO: 21528 - DNA, 25 bp, Homo sapien
tttgagtctctgctggtgatgtcac

SEQ ID NO: 21529 - DNA, 25 bp, Homo sapien
tcaaaacgagtgctgctctgagctt

SEQ ID NO: 21530 - DNA, 25 bp, Homo sapien
aatgagccaccagtgcgtcaggcct

SEQ ID NO: 21531 - DNA, 25 bp, Homo sapien
aggtggtgcaactgctttgagtctc

SEQ ID NO: 21532 - DNA, 25 bp, Homo sapien
tagctataccacaatattggccaac

SEQ ID NO: 21533 - DNA, 25 bp, Homo sapien
agttgtttggaggtagcatggacac

SEQ ID NO: 21534 - DNA, 25 bp, Homo sapien
caattcacataataacctccagttc

SEQ ID NO: 21535 - DNA, 25 bp, Homo sapien
gtttgtactcagtaatcaatctctc

SEQ ID NO: 21536 - DNA, 25 bp, Homo sapien
tgtactcagtaatcaatctctcttc

SEQ ID NO: 21537 - DNA, 25 bp, Homo sapien
agcctctggtaacttatctctctac

SEQ ID NO: 21538 - DNA, 25 bp, Homo sapien
attatactcaccctactatgctatc

SEQ ID NO: 21539 - DNA, 25 bp, Homo sapien
aattgtatgtttgtactcagtaatc

SEQ ID NO: 21540 - DNA, 25 bp, Homo sapien
atggtgcctggccatcttctagcta

SEQ ID NO: 21541 - DNA, 25 bp, Homo sapien
tttaaaactcccacatatgaatgaa

SEQ ID NO: 21542 - DNA, 25 bp, Homo sapien
ggtgcctggccatcttctagctatt

SEQ ID NO: 21543 - DNA, 25 bp, Homo sapien
tatctctatgagatccacttttaaa

SEQ ID NO: 21544 - DNA, 25 bp, Homo sapien
tgaatgaaaacatgcaatatttgtc

SEQ ID NO: 21545 - DNA, 25 bp, Homo sapien
gtcaatgctacaacctgcctgaagc

SEQ ID NO: 21546 - DNA, 25 bp, Homo sapien
cttgagcaggctagtataaccagct

SEQ ID NO: 21547 - DNA, 25 bp, Homo sapien
catcatttgttggaggagttagccc

SEQ ID NO: 21548 - DNA, 25 bp, Homo sapien
aatatattcaagatccgactgcctc

SEQ ID NO: 21549 - DNA, 25 bp, Homo sapien
atccaaaacgagatgtctgattttt

SEQ ID NO: 21550 - DNA, 25 bp, Homo sapien
tctaagtcgctgaacatttggcatc

SEQ ID NO: 21551 - DNA, 25 bp, Homo sapien
ttggaaacacagatctccagcccac

SEQ ID NO: 21552 - DNA, 25 bp, Homo sapien
actccgcctggtagttctccctgta

SEQ ID NO: 21553 - DNA, 25 bp, Homo sapien
tccctgtatcggttggagcaactcc

SEQ ID NO: 21554 - DNA, 25 bp, Homo sapien
atccagagtttttgtcggctctccc

SEQ ID NO: 21555 - DNA, 25 bp, Homo sapien
gagttagcccttcctgatgcataca

SEQ ID NO: 21556 - DNA, 25 bp, Homo sapien
gtcagagccattgggatccacagca

SEQ ID NO: 21557 - DNA, 25 bp, Homo sapien
accgcggggtgtccctgcagcttct

SEQ ID NO: 21558 - DNA, 25 bp, Homo sapien
ttgctgtgggccaaccgtctatgac

SEQ ID NO: 21559 - DNA, 25 bp, Homo sapien
aaccacactgtgatgtttgttgctg

SEQ ID NO: 21560 - DNA, 25 bp, Homo sapien
tatgacgcatctcacatggggcacg

SEQ ID NO: 21561 - DNA, 25 bp, Homo sapien
tctgcagttgcacgcagaagtcaga

SEQ ID NO: 21562 - DNA, 25 bp, Homo sapien
gaggtgccgtacatctcactgggct

SEQ ID NO: 21563 - DNA, 25 bp, Homo sapien
gaaaaaggtgacgtggtattgctgt

SEQ ID NO: 21564 - DNA, 25 bp, Homo sapien
tgggctcccactgagactgtgactt

SEQ ID NO: 21565 - DNA, 25 bp, Homo sapien
ttcatacctcaagatgggaaaaagg

SEQ ID NO: 21566 - DNA, 25 bp, Homo sapien
cctaacaaaggaagtgttcatacct

SEQ ID NO: 21567 - DNA, 25 bp, Homo sapien
tgacagtcactgatacacaggattt

SEQ ID NO: 21568 - DNA, 25 bp, Homo sapien
agaaagccatctattgacagtcact

SEQ ID NO: 21569 - DNA, 25 bp, Homo sapien
tgtagaatacagtcactaggagtgg

SEQ ID NO: 21570 - DNA, 25 bp, Homo sapien
tgccacctggcagaattggtcatct

SEQ ID NO: 21571 - DNA, 25 bp, Homo sapien
aattcagctgaagcacacagaaaga

SEQ ID NO: 21572 - DNA, 25 bp, Homo sapien
gacatggctctggtttgactgactt

SEQ ID NO: 21573 - DNA, 25 bp, Homo sapien
acaagtacactatgcatgaagataa

SEQ ID NO: 21574 - DNA, 25 bp, Homo sapien
aggcacacaacgcaaaccaaactga

SEQ ID NO: 21575 - DNA, 25 bp, Homo sapien
catctaccagtggatgtggcctctg

SEQ ID NO: 21576 - DNA, 25 bp, Homo sapien
caaaattgcaagatcaggctgccac

SEQ ID NO: 21577 - DNA, 25 bp, Homo sapien
aactgaccggttttgccatctgaag

SEQ ID NO: 21578 - DNA, 25 bp, Homo sapien
gccttcaagcgatccttgaggcctc

SEQ ID NO: 21579 - DNA, 25 bp, Homo sapien
atataggcctgaacaactgtgccca

SEQ ID NO: 21580 - DNA, 25 bp, Homo sapien
cctgacaatataggcctgaacaact

SEQ ID NO: 21581 - DNA, 25 bp, Homo sapien
cctcccaaagccctgacaatatagg

SEQ ID NO: 21582 - DNA, 25 bp, Homo sapien
actcctagactcaagaaattctctt

SEQ ID NO: 21583 - DNA, 25 bp, Homo sapien
tttaagaggcaaggtttcgttctgc

SEQ ID NO: 21584 - DNA, 25 bp, Homo sapien
actcctgccttcaagcgatccttga

SEQ ID NO: 21585 - DNA, 25 bp, Homo sapien
cctgaacaactgtgcccagctatct

SEQ ID NO: 21586 - DNA, 25 bp, Homo sapien
acaatataggcctgaacaactgtgc

SEQ ID NO: 21587 - DNA, 25 bp, Homo sapien
aaggtttcgttctgccacccaagct

SEQ ID NO: 21588 - DNA, 25 bp, Homo sapien
caaagccctgacaatataggcctga

SEQ ID NO: 21589 - DNA, 25 bp, Homo sapien
caggatgagagttgttaagtgctat

SEQ ID NO: 21590 - DNA, 25 bp, Homo sapien
ccattccaagagtaagagttcggta

SEQ ID NO: 21591 - DNA, 25 bp, Homo sapien
tagaagagaggagcttccacctctc

SEQ ID NO: 21592 - DNA, 25 bp, Homo sapien
agtaaggacaatggcaagcttctct

SEQ ID NO: 21593 - DNA, 25 bp, Homo sapien
tccctgactttggagctggagagta

SEQ ID NO: 21594 - DNA, 25 bp, Homo sapien
gagtagctgcagtctggccctctca

SEQ ID NO: 21595 - DNA, 25 bp, Homo sapien
taggaacactggataatgaataccc

SEQ ID NO: 21596 - DNA, 25 bp, Homo sapien
acagtggtactggtagggctccttt

SEQ ID NO: 21597 - DNA, 25 bp, Homo sapien
ctcttcaggatggtacagctttggg

SEQ ID NO: 21598 - DNA, 25 bp, Homo sapien
cagctttgggtatgcctacagtcac

SEQ ID NO: 21599 - DNA, 25 bp, Homo sapien
tttaacctcagcaacaggcaagaag

SEQ ID NO: 21600 - DNA, 25 bp, Homo sapien
cagaagaatagagagtgataagatt

SEQ ID NO: 21601 - DNA, 25 bp, Homo sapien
agatacagaataaccacacagaaag

SEQ ID NO: 21602 - DNA, 25 bp, Homo sapien
tgtcttaaaagagccaaatgttgcc

SEQ ID NO: 21603 - DNA, 25 bp, Homo sapien
ttcaataaatataggaagcatccgt

SEQ ID NO: 21604 - DNA, 25 bp, Homo sapien
cttaagacatcatgtaggccaggca

SEQ ID NO: 21605 - DNA, 25 bp, Homo sapien
aagatttcgatggaacaaggtgaag

SEQ ID NO: 21606 - DNA, 25 bp, Homo sapien
tacttagggcacagaaaaatgcact

SEQ ID NO: 21607 - DNA, 25 bp, Homo sapien
tctgagatagtaatacttagggcac

SEQ ID NO: 21608 - DNA, 25 bp, Homo sapien
gttgccattaagatagtcaggatat

SEQ ID NO: 21609 - DNA, 25 bp, Homo sapien
acttaaaagggtggtaagagtctga

SEQ ID NO: 21610 - DNA, 25 bp, Homo sapien
aaagatactaccagcaaatctgcac

SEQ ID NO: 21611 - DNA, 25 bp, Homo sapien
atagactggtatgctaatttatccc

SEQ ID NO: 21612 - DNA, 25 bp, Homo sapien
tcagatgcatgaacgctctacccag

SEQ ID NO: 21613 - DNA, 25 bp, Homo sapien
atgaacgctctacccagtgctttga

SEQ ID NO: 21614 - DNA, 25 bp, Homo sapien
gataggaccctgtttgttcgccata

SEQ ID NO: 21615 - DNA, 25 bp, Homo sapien
cttgggttgccttgctgtctatgta

SEQ ID NO: 21616 - DNA, 25 bp, Homo sapien
ttctgtgttgtgtaaatgccactta

SEQ ID NO: 21617 - DNA, 25 bp, Homo sapien
ctcatcctggagtggttgtactgat

SEQ ID NO: 21618 - DNA, 25 bp, Homo sapien
aaactacggcattgaaggcatttta

SEQ ID NO: 21619 - DNA, 25 bp, Homo sapien
tctccgagatctagctttcagatgc

SEQ ID NO: 21620 - DNA, 25 bp, Homo sapien
tgttacagtctgcaatgccttgtgc

SEQ ID NO: 21621 - DNA, 25 bp, Homo sapien
atacaccactaaaaactacggcatt

SEQ ID NO: 21622 - DNA, 25 bp, Homo sapien
ctgaggccttggattggcttcaaga

SEQ ID NO: 21623 - DNA, 25 bp, Homo sapien
tctcaaggcagaggacaaaatctca

SEQ ID NO: 21624 - DNA, 25 bp, Homo sapien
cactggacttggtatgttaaaacat

SEQ ID NO: 21625 - DNA, 25 bp, Homo sapien
attctttctgcatctgaggccttgg

SEQ ID NO: 21626 - DNA, 25 bp, Homo sapien
aagaggtaaggtaggcattctttct

SEQ ID NO: 21627 - DNA, 25 bp, Homo sapien
aataaaagagtagatgaatgcatga

SEQ ID NO: 21628 - DNA, 25 bp, Homo sapien
acgcgcccagccatataaaaaatat

SEQ ID NO: 21629 - DNA, 25 bp, Homo sapien
tgacgtgtccagtagctagcacagt

SEQ ID NO: 21630 - DNA, 25 bp, Homo sapien
tagcacagtgcttgacaccaggtat

SEQ ID NO: 21631 - DNA, 25 bp, Homo sapien
acagattcgcattatgtagagcacc

SEQ ID NO: 21632 - DNA, 25 bp, Homo sapien
ataaatggttgaggaattgaatgca

SEQ ID NO: 21633 - DNA, 25 bp, Homo sapien
gggaaatagccctaacatagaagta

SEQ ID NO: 21634 - DNA, 25 bp, Homo sapien
aattggcaaatagaatgagatcatt

SEQ ID NO: 21635 - DNA, 25 bp, Homo sapien
taatgccaccttacgtatgttcagc

SEQ ID NO: 21636 - DNA, 25 bp, Homo sapien
tacccagagaagttataacaccagt

SEQ ID NO: 21637 - DNA, 25 bp, Homo sapien
catacagaaaagagtaaaagagtaa

SEQ ID NO: 21638 - DNA, 25 bp, Homo sapien
ttttaagtgactgctactgacaact

SEQ ID NO: 21639 - DNA, 25 bp, Homo sapien
gctcaatattatagggaaatagccc

SEQ ID NO: 21640 - DNA, 25 bp, Homo sapien
ataacaccagtaagcggcaattcac

SEQ ID NO: 21641 - DNA, 25 bp, Homo sapien
tgggcggggaagatataattattct

SEQ ID NO: 21642 - DNA, 25 bp, Homo sapien
gatttctgaaacaagcctgtgaggt

SEQ ID NO: 21643 - DNA, 25 bp, Homo sapien
tgaaaaccgaataacagaaaatgtg

SEQ ID NO: 21644 - DNA, 25 bp, Homo sapien
aataaacgcaggcttaaagagaatt

SEQ ID NO: 21645 - DNA, 25 bp, Homo sapien
catgtgaaatgaccaagttgtgcta

SEQ ID NO: 21646 - DNA, 25 bp, Homo sapien
ttgatcaatgatagaggaaccattc

SEQ ID NO: 21647 - DNA, 25 bp, Homo sapien
atgaaacatgaatgtgcccaatatt

SEQ ID NO: 21648 - DNA, 25 bp, Homo sapien
tgtgctatgtgaactctaaagacct

SEQ ID NO: 21649 - DNA, 25 bp, Homo sapien
attcccgcacatggaggaaaaagat

SEQ ID NO: 21650 - DNA, 25 bp, Homo sapien
gcacagggcatcttgattatcatca

SEQ ID NO: 21651 - DNA, 25 bp, Homo sapien
gtgagcagtagatggacattgatca

SEQ ID NO: 21652 - DNA, 25 bp, Homo sapien
cctaaagggttatataagagactgt

SEQ ID NO: 21653 - DNA, 25 bp, Homo sapien
atggcaggtagtactaaataaacgc

SEQ ID NO: 21654 - DNA, 25 bp, Homo sapien
aatctgagccatcaagacctagccc

SEQ ID NO: 21655 - DNA, 25 bp, Homo sapien
acaggtgaatgcctctgcacccaga

SEQ ID NO: 21656 - DNA, 25 bp, Homo sapien
gaggaagagtaagttatagaagcta

SEQ ID NO: 21657 - DNA, 25 bp, Homo sapien
cttttatgataataagggaggaaac

SEQ ID NO: 21658 - DNA, 25 bp, Homo sapien
ggaggatgcttaggagaccttttat

SEQ ID NO: 21659 - DNA, 25 bp, Homo sapien
attgcgtgagctccattagaaattt

SEQ ID NO: 21660 - DNA, 25 bp, Homo sapien
gaattagggctgtttaaaatgtcac

SEQ ID NO: 21661 - DNA, 25 bp, Homo sapien
aagctatagctattgcgtgagctcc

SEQ ID NO: 21662 - DNA, 25 bp, Homo sapien
tttgatagctaaagggaattagggc

SEQ ID NO: 21663 - DNA, 25 bp, Homo sapien
taatcattaggaagaaagagctgag

SEQ ID NO: 21664 - DNA, 25 bp, Homo sapien
atagcatgctgacactccaaagttg

SEQ ID NO: 21665 - DNA, 25 bp, Homo sapien
aggaaacattgagaagaggaagagt

SEQ ID NO: 21666 - DNA, 25 bp, Homo sapien
tatgatgcatattggtgtggttttc

SEQ ID NO: 21667 - DNA, 25 bp, Homo sapien
cacttgagtataaagtgtgactttt

SEQ ID NO: 21668 - DNA, 25 bp, Homo sapien
gttaaaccatttgatattgctcctc

SEQ ID NO: 21669 - DNA, 25 bp, Homo sapien
tctccactgtttctgatgaatagtc

SEQ ID NO: 21670 - DNA, 25 bp, Homo sapien
cagccttcgtcgtctgacaatttct

SEQ ID NO: 21671 - DNA, 25 bp, Homo sapien
tttattggcatgtctttaagttcac

SEQ ID NO: 21672 - DNA, 25 bp, Homo sapien
cttggaaccgcagataaatgtgttt

SEQ ID NO: 21673 - DNA, 25 bp, Homo sapien
attgctcctcagatttttagatgct

SEQ ID NO: 21674 - DNA, 25 bp, Homo sapien
cttttagcactttgactatgatgca

SEQ ID NO: 21675 - DNA, 25 bp, Homo sapien
tagtatctaggttgacagttttttc

SEQ ID NO: 21676 - DNA, 25 bp, Homo sapien
taatgagcttcttggaaccgcagat

SEQ ID NO: 21677 - DNA, 25 bp, Homo sapien
acagactgaatacaaaaacagatac

SEQ ID NO: 21678 - DNA, 25 bp, Homo sapien
ttccaactccaaatctgtatgtagc

SEQ ID NO: 21679 - DNA, 25 bp, Homo sapien
gatgacataacaaagaagagtatcc

SEQ ID NO: 21680 - DNA, 25 bp, Homo sapien
aatatagaaaagtatgagttcactg

SEQ ID NO: 21681 - DNA, 25 bp, Homo sapien
atctgtatgtagctggatttccttc

SEQ ID NO: 21682 - DNA, 25 bp, Homo sapien
ttgttttagagaagacagctgtttt

SEQ ID NO: 21683 - DNA, 25 bp, Homo sapien
gagttcactgatatggattcaacta

SEQ ID NO: 21684 - DNA, 25 bp, Homo sapien
taaaaagtatgttggcctggtgcag

SEQ ID NO: 21685 - DNA, 25 bp, Homo sapien
acaaagaagagtatccaccatgatc

SEQ ID NO: 21686 - DNA, 25 bp, Homo sapien
aaacagatacgagaatccaactatc

SEQ ID NO: 21687 - DNA, 25 bp, Homo sapien
cattaaagagagttgcaaaactata

SEQ ID NO: 21688 - DNA, 25 bp, Homo sapien
ttcatctgcatgtggcgttctccct

SEQ ID NO: 21689 - DNA, 25 bp, Homo sapien
ttgtagatgcaaccaccctgcgtct

SEQ ID NO: 21690 - DNA, 25 bp, Homo sapien
ctgcaacatggcttcagggtttcag

SEQ ID NO: 21691 - DNA, 25 bp, Homo sapien
gtcataatggattagaggttcaccc

SEQ ID NO: 21692 - DNA, 25 bp, Homo sapien
ataatgaaggacaatgatgccactg

SEQ ID NO: 21693 - DNA, 25 bp, Homo sapien
cttctggtgttttgccggtggtctt

SEQ ID NO: 21694 - DNA, 25 bp, Homo sapien
ttctccctggagcatgtcagcctct

SEQ ID NO: 21695 - DNA, 25 bp, Homo sapien
gggctccaaggaggtatctattcca

SEQ ID NO: 21696 - DNA, 25 bp, Homo sapien
ctgagtggtggaactacaaaaaaca

SEQ ID NO: 21697 - DNA, 25 bp, Homo sapien
atgccactgggtcataggtgaatga

SEQ ID NO: 21698 - DNA, 25 bp, Homo sapien
agtctgagatcaagctgtctgtgcc

SEQ ID NO: 21699 - DNA, 25 bp, Homo sapien
aagtaaccacttctacgataaatat

SEQ ID NO: 21700 - DNA, 25 bp, Homo sapien
atatttatcgtagaagtggttactt

SEQ ID NO: 21701 - DNA, 25 bp, Homo sapien
ataaggattgagtgcttttacgcct

SEQ ID NO: 21702 - DNA, 25 bp, Homo sapien
ttgaacattatctgtgggactttcc

SEQ ID NO: 21703 - DNA, 25 bp, Homo sapien
ttatctgcaaggaagagactctcaa

SEQ ID NO: 21704 - DNA, 25 bp, Homo sapien
tctccttgggtgtgctgatctactc

SEQ ID NO: 21705 - DNA, 25 bp, Homo sapien
acaggtggtttctggttccacggat

SEQ ID NO: 21706 - DNA, 25 bp, Homo sapien
cccatacaggggaactgtaattgca

SEQ ID NO: 21707 - DNA, 25 bp, Homo sapien
tttccactgtggcagataaggattg

SEQ ID NO: 21708 - DNA, 25 bp, Homo sapien
tgtaattgcagtgtgagcccgccca

SEQ ID NO: 21709 - DNA, 25 bp, Homo sapien
tttacgccttgacccagagtgcgcg

SEQ ID NO: 21710 - DNA, 25 bp, Homo sapien
tttccatgggttcgccgcaactgtt

SEQ ID NO: 21711 - DNA, 25 bp, Homo sapien
atttcagtgtctttggggtacaggt

SEQ ID NO: 21712 - DNA, 25 bp, Homo sapien
aaacatcaattaagagccacacaat

SEQ ID NO: 21713 - DNA, 25 bp, Homo sapien
attctctagtacagccaagaactca

SEQ ID NO: 21714 - DNA, 25 bp, Homo sapien
tggtcctcccaatgtggaatgccgt

SEQ ID NO: 21715 - DNA, 25 bp, Homo sapien
tccactaaggagacctaaaatatgc

SEQ ID NO: 21716 - DNA, 25 bp, Homo sapien
tggaatgccgttcaccctggaattt

SEQ ID NO: 21717 - DNA, 25 bp, Homo sapien
tttgtgaagcttggttgaaagcatc

SEQ ID NO: 21718 - DNA, 25 bp, Homo sapien
tagcagttaaggacaactacaagcc

SEQ ID NO: 21719 - DNA, 25 bp, Homo sapien
tacatgccactcacagacttcagat

SEQ ID NO: 21720 - DNA, 25 bp, Homo sapien
aagaaacacacgaagaaggaaacaa

SEQ ID NO: 21721 - DNA, 25 bp, Homo sapien
ccaccatgaggctgttagcagttaa

SEQ ID NO: 21722 - DNA, 25 bp, Homo sapien
aatatgctaggtttatgacaggtta

SEQ ID NO: 21723 - DNA, 25 bp, Homo sapien
acctaggtaataaacaccctgaaga

SEQ ID NO: 21724 - DNA, 25 bp, Homo sapien
cttgatgcttgtcctacccaaagac

SEQ ID NO: 21725 - DNA, 25 bp, Homo sapien
ccctgaagacatactgtgactgtaa

SEQ ID NO: 21726 - DNA, 25 bp, Homo sapien
accagcaccaaatgtcttccctagg

SEQ ID NO: 21727 - DNA, 25 bp, Homo sapien
cacaagaattataatacctaggtaa

SEQ ID NO: 21728 - DNA, 25 bp, Homo sapien
caagaaaccagcaccaaatgtcttc

SEQ ID NO: 21729 - DNA, 25 bp, Homo sapien
gttcttcaggctaaggggccctgca

SEQ ID NO: 21730 - DNA, 25 bp, Homo sapien
tgtaatatttgggttcttcaggcta

SEQ ID NO: 21731 - DNA, 25 bp, Homo sapien
actgtgactgtaatatttgggttct

SEQ ID NO: 21732 - DNA, 25 bp, Homo sapien
gcagtggcaggcttttgtgttcagc

SEQ ID NO: 21733 - DNA, 25 bp, Homo sapien
ctctgactgccatcacacaagaatt

SEQ ID NO: 21734 - DNA, 25 bp, Homo sapien
caaactataagatggctgaaaagat

SEQ ID NO: 21735 - DNA, 25 bp, Homo sapien
gatggaaaatgactctatggttagt

SEQ ID NO: 21736 - DNA, 25 bp, Homo sapien
tggactcttaactgcagagaaaggc

SEQ ID NO: 21737 - DNA, 25 bp, Homo sapien
ccctaaaatcaagatggactcttaa

SEQ ID NO: 21738 - DNA, 25 bp, Homo sapien
atatgaaatactcctcgggtgctcc

SEQ ID NO: 21739 - DNA, 25 bp, Homo sapien
ctttaacagcatatgaaagagaagt

SEQ ID NO: 21740 - DNA, 25 bp, Homo sapien
ctgaaaagatggaactgacaatgtc

SEQ ID NO: 21741 - DNA, 25 bp, Homo sapien
cgggtgctccaaatgataaaaaggt

SEQ ID NO: 21742 - DNA, 25 bp, Homo sapien
gattgcggtggaaagaatctatcat

SEQ ID NO: 21743 - DNA, 25 bp, Homo sapien
agaagtttagtaatagtgtgatatc

SEQ ID NO: 21744 - DNA, 25 bp, Homo sapien
aagtgaatcattccctagcagtgtt

SEQ ID NO: 21745 - DNA, 25 bp, Homo sapien
tatgacttactgagggaaagggtct

SEQ ID NO: 21746 - DNA, 25 bp, Homo sapien
tcaagtggacgaatgttatcaggag

SEQ ID NO: 21747 - DNA, 25 bp, Homo sapien
tatctcaagtgtgccagaaagtcag

SEQ ID NO: 21748 - DNA, 25 bp, Homo sapien
gcatgctgctgcaaagagatgtcag

SEQ ID NO: 21749 - DNA, 25 bp, Homo sapien
tatgctgcgtccctgaagctcaatc

SEQ ID NO: 21750 - DNA, 25 bp, Homo sapien
aacagtaggcaagactgcagattct

SEQ ID NO: 21751 - DNA, 25 bp, Homo sapien
gtgaaagctcctagacatgaagact

SEQ ID NO: 21752 - DNA, 25 bp, Homo sapien
cccacttatacaaggaagaggcaca

SEQ ID NO: 21753 - DNA, 25 bp, Homo sapien
ccatgtaaggcccagtaagtcagca

SEQ ID NO: 21754 - DNA, 25 bp, Homo sapien
gggtctgaacaaagcttaaagccga

SEQ ID NO: 21755 - DNA, 25 bp, Homo sapien
cttaaagccgagacagcatgctgct

SEQ ID NO: 21756 - DNA, 25 bp, Homo sapien
tagaaggtggcttattttcttacca

SEQ ID NO: 21757 - DNA, 25 bp, Homo sapien
ccatagcacaattcaaactgcaatt

SEQ ID NO: 21758 - DNA, 25 bp, Homo sapien
actgcaatttgcctggatataaagc

SEQ ID NO: 21759 - DNA, 25 bp, Homo sapien
atgtgttggcataaatatttctgac

SEQ ID NO: 21760 - DNA, 25 bp, Homo sapien
tgcctggatataaagcaaactttct

SEQ ID NO: 21761 - DNA, 25 bp, Homo sapien
ttggaatttcaagggcatacctgac

SEQ ID NO: 21762 - DNA, 25 bp, Homo sapien
gttgccacacataattaaacgccaa

SEQ ID NO: 21763 - DNA, 25 bp, Homo sapien
acaaagcaagatttaagtagaattc

SEQ ID NO: 21764 - DNA, 25 bp, Homo sapien
tcttgttaatgtagcttggaatttc

SEQ ID NO: 21765 - DNA, 25 bp, Homo sapien
ttataagagaaagatgtgtagaagg

SEQ ID NO: 21766 - DNA, 25 bp, Homo sapien
agggcatacctgacataacaatgtg

SEQ ID NO: 21767 - DNA, 25 bp, Homo sapien
ttggaatactatctggagcatgatc

SEQ ID NO: 21768 - DNA, 25 bp, Homo sapien
tttctatgcagagttccacggggct

SEQ ID NO: 21769 - DNA, 25 bp, Homo sapien
atacatggctaggaatgataaggtc

SEQ ID NO: 21770 - DNA, 25 bp, Homo sapien
ataaggtcagtcatggttggaatac

SEQ ID NO: 21771 - DNA, 25 bp, Homo sapien
gatgtcagtgcttcctagttagaga

SEQ ID NO: 21772 - DNA, 25 bp, Homo sapien
ctttggagaatgctgtaatactaac

SEQ ID NO: 21773 - DNA, 25 bp, Homo sapien
tggacagaggctccaatcaggaaat

SEQ ID NO: 21774 - DNA, 25 bp, Homo sapien
aagtcagacaagaccatacatggct

SEQ ID NO: 21775 - DNA, 25 bp, Homo sapien
tctgaagttgaatatgacgatgttc

SEQ ID NO: 21776 - DNA, 25 bp, Homo sapien
atcaggaaatagagtggtccacgtt

SEQ ID NO: 21777 - DNA, 25 bp, Homo sapien
ctttttggcgcaggaggctttaaga

SEQ ID NO: 21778 - DNA, 25 bp, Homo sapien
ttgcagtaccaacgtgctcggtgag

SEQ ID NO: 21779 - DNA, 25 bp, Homo sapien
caggtgggtaaatgcaacactcaat

SEQ ID NO: 21780 - DNA, 25 bp, Homo sapien
tcttatcagagggaatggccataac

SEQ ID NO: 21781 - DNA, 25 bp, Homo sapien
agagagtctttgtatgatggcttcc

SEQ ID NO: 21782 - DNA, 25 bp, Homo sapien
agtgaaacacactgaggtcttatca

SEQ ID NO: 21783 - DNA, 25 bp, Homo sapien
tagtttgggtagacagtttctcctg

SEQ ID NO: 21784 - DNA, 25 bp, Homo sapien
tcggtgagtgagcaagttcactgtc

SEQ ID NO: 21785 - DNA, 25 bp, Homo sapien
caataggaaaggtgtccacagatta

SEQ ID NO: 21786 - DNA, 25 bp, Homo sapien
aaaccagctgtagctaaagcaggtg

SEQ ID NO: 21787 - DNA, 25 bp, Homo sapien
ttcctcagatgctggttgcagtacc

SEQ ID NO: 21788 - DNA, 25 bp, Homo sapien
tggaatgacagaggtatcttgaagt

SEQ ID NO: 21789 - DNA, 25 bp, Homo sapien
acatggcttcagtcattaataatac

SEQ ID NO: 21790 - DNA, 25 bp, Homo sapien
atctatgtccataaagaaagcacaa

SEQ ID NO: 21791 - DNA, 25 bp, Homo sapien
tgtcaatatagtaagtcagataatt

SEQ ID NO: 21792 - DNA, 25 bp, Homo sapien
tgacagataatagcatatgaggagc

SEQ ID NO: 21793 - DNA, 25 bp, Homo sapien
tagcatatgaggagcttttgaggca

SEQ ID NO: 21794 - DNA, 25 bp, Homo sapien
ttagggtacataggaatgtagtaat

SEQ ID NO: 21795 - DNA, 25 bp, Homo sapien
taagttactaggacttggtactgtc

SEQ ID NO: 21796 - DNA, 25 bp, Homo sapien
gattctccattgtgtgtgcttgcat

SEQ ID NO: 21797 - DNA, 25 bp, Homo sapien
aggagcttttgaggcagtgattctc

SEQ ID NO: 21798 - DNA, 25 bp, Homo sapien
ttggtactgtctgaaatcattgttc

SEQ ID NO: 21799 - DNA, 25 bp, Homo sapien
aaactgatttaagaaacaaagcaat

SEQ ID NO: 21800 - DNA, 25 bp, Homo sapien
aggagtaagcctctgtgctcagcct

SEQ ID NO: 21801 - DNA, 25 bp, Homo sapien
tggctttatcccagcaaggagagtg

SEQ ID NO: 21802 - DNA, 25 bp, Homo sapien
agctgacgtacacaggatgagctca

SEQ ID NO: 21803 - DNA, 25 bp, Homo sapien
gttgagaaaattagatgcgagcatg

SEQ ID NO: 21804 - DNA, 25 bp, Homo sapien
ggctccaaagccagatgtctccatg

SEQ ID NO: 21805 - DNA, 25 bp, Homo sapien
tagtactggctaggttgttgagaaa

SEQ ID NO: 21806 - DNA, 25 bp, Homo sapien
tggggcatggagtttaccttcagct

SEQ ID NO: 21807 - DNA, 25 bp, Homo sapien
atgagctcaggttgtgtgcacactc

SEQ ID NO: 21808 - DNA, 25 bp, Homo sapien
acatgcgggcttagagcatagtttc

SEQ ID NO: 21809 - DNA, 25 bp, Homo sapien
gtggttcaaatgtctgggtacaaac

SEQ ID NO: 21810 - DNA, 25 bp, Homo sapien
tgctcagcctgggaatcacagtttc

SEQ ID NO: 21811 - DNA, 25 bp, Homo sapien
ataagcatccacttttgaagactgt

SEQ ID NO: 21812 - DNA, 25 bp, Homo sapien
tgtaataagaagcaattagtgtgtc

SEQ ID NO: 21813 - DNA, 25 bp, Homo sapien
taaagtctcaggtatgttggaaaat

SEQ ID NO: 21814 - DNA, 25 bp, Homo sapien
agtctcaggtatgttggaaaattcc

SEQ ID NO: 21815 - DNA, 25 bp, Homo sapien
aagcaattagtgtgtctaagtagat

SEQ ID NO: 21816 - DNA, 25 bp, Homo sapien
aaattagaaagtaaagtctcaggta

SEQ ID NO: 21817 - DNA, 25 bp, Homo sapien
tagaaagtaaagtctcaggtatgtt

SEQ ID NO: 21818 - DNA, 25 bp, Homo sapien
tatgttggaaaattccagaggcatc

SEQ ID NO: 21819 - DNA, 25 bp, Homo sapien
ccctgataccataagcatccacttt

SEQ ID NO: 21820 - DNA, 25 bp, Homo sapien
taaatggatcattgtgtaggttatt

SEQ ID NO: 21821 - DNA, 25 bp, Homo sapien
tctaagtagatttatagatagactt

SEQ ID NO: 21822 - DNA, 25 bp, Homo sapien
attcttgctggaaatgaagcttctc

SEQ ID NO: 21823 - DNA, 25 bp, Homo sapien
tatccagcagactaaaggcaaggca

SEQ ID NO: 21824 - DNA, 25 bp, Homo sapien
acatacatggccaaagagatcttac

SEQ ID NO: 21825 - DNA, 25 bp, Homo sapien
tatacactggtccagccagggaaat

SEQ ID NO: 21826 - DNA, 25 bp, Homo sapien
aggcaaggcaccagccctctttgaa

SEQ ID NO: 21827 - DNA, 25 bp, Homo sapien
gtagagatttgcacaggtccacgga

SEQ ID NO: 21828 - DNA, 25 bp, Homo sapien
agagatcttacgtctgggagcacaa

SEQ ID NO: 21829 - DNA, 25 bp, Homo sapien
atcaagagtggaagtaggttgtcta

SEQ ID NO: 21830 - DNA, 25 bp, Homo sapien
gtccaacaaagctgggtagagattt

SEQ ID NO: 21831 - DNA, 25 bp, Homo sapien
aagtctaggtggaagccagattctt

SEQ ID NO: 21832 - DNA, 25 bp, Homo sapien
cacaaactgggtatgttaaagggct

SEQ ID NO: 21833 - DNA, 25 bp, Homo sapien
ttgtcacaagagtagttcacagtct

SEQ ID NO: 21834 - DNA, 25 bp, Homo sapien
tcctcagccagagtaggttcagaga

SEQ ID NO: 21835 - DNA, 25 bp, Homo sapien
ttacacatctgggtaggctacaatt

SEQ ID NO: 21836 - DNA, 25 bp, Homo sapien
gaaaagtggcgtacagaaaacagaa

SEQ ID NO: 21837 - DNA, 25 bp, Homo sapien
tttgaaagcagtgtcaagagttgac

SEQ ID NO: 21838 - DNA, 25 bp, Homo sapien
aagaatgggatcattgcaggacttt

SEQ ID NO: 21839 - DNA, 25 bp, Homo sapien
agagttgacctcctttgattggcca

SEQ ID NO: 21840 - DNA, 25 bp, Homo sapien
gcttaaactatataaggaggcagct

SEQ ID NO: 21841 - DNA, 25 bp, Homo sapien
caattcactaagtacagagaaacct

SEQ ID NO: 21842 - DNA, 25 bp, Homo sapien
aattgaacggtttgagaattgggca

SEQ ID NO: 21843 - DNA, 25 bp, Homo sapien
ttcagctaaagagaaggttcttgtc

SEQ ID NO: 21844 - DNA, 25 bp, Homo sapien
ttgatgggtactaaatttcctggga

SEQ ID NO: 21845 - DNA, 25 bp, Homo sapien
actcatctgtgatagccctgctaag

SEQ ID NO: 21846 - DNA, 25 bp, Homo sapien
atgaaacttgtggtaactgctagac

SEQ ID NO: 21847 - DNA, 25 bp, Homo sapien
gttgaatttatatgcaggtgacttt

SEQ ID NO: 21848 - DNA, 25 bp, Homo sapien
cctctaaatcctaggcctgcctgaa

SEQ ID NO: 21849 - DNA, 25 bp, Homo sapien
attctgcagggtcagtcctactgtc

SEQ ID NO: 21850 - DNA, 25 bp, Homo sapien
aaattacttgcctctgtgtagctcc

SEQ ID NO: 21851 - DNA, 25 bp, Homo sapien
cttggtgttcaatgtgtaagaatgc

SEQ ID NO: 21852 - DNA, 25 bp, Homo sapien
ttgaggctcaagcattttgaagtat

SEQ ID NO: 21853 - DNA, 25 bp, Homo sapien
aggaagaaggtatagagtgttaatc

SEQ ID NO: 21854 - DNA, 25 bp, Homo sapien
tagccctgctaaggcagataccact

SEQ ID NO: 21855 - DNA, 25 bp, Homo sapien
gtttgctgaaggcagtcaggctcac

SEQ ID NO: 21856 - DNA, 25 bp, Homo sapien
tcactggatggaccttcaccagggc

SEQ ID NO: 21857 - DNA, 25 bp, Homo sapien
cttcaccagggcaggggatatgtct

SEQ ID NO: 21858 - DNA, 25 bp, Homo sapien
ctcactgagcttggtccaggacggt

SEQ ID NO: 21859 - DNA, 25 bp, Homo sapien
agtcaggctcaccttggtactgcca

SEQ ID NO: 21860 - DNA, 25 bp, Homo sapien
cacagtaggtgcacagtaaaggttt

SEQ ID NO: 21861 - DNA, 25 bp, Homo sapien
aagaggccctccctgaccaaagtgc

SEQ ID NO: 21862 - DNA, 25 bp, Homo sapien
ggatatgtctccagggccacagcag

SEQ ID NO: 21863 - DNA, 25 bp, Homo sapien
aaccatgaggactgcctacctgctg

SEQ ID NO: 21864 - DNA, 25 bp, Homo sapien
cagaggcaccatcgaggcttccctt

SEQ ID NO: 21865 - DNA, 25 bp, Homo sapien
aaagtgccaatcagggctagtatcc

SEQ ID NO: 21866 - DNA, 25 bp, Homo sapien
aaaaaacgtacacagagtaattaca

SEQ ID NO: 21867 - DNA, 25 bp, Homo sapien
caaacaaacaaaattctgcgtttta

SEQ ID NO: 21868 - DNA, 25 bp, Homo sapien
tgcgttttacagtgtgtataaagtc

SEQ ID NO: 21869 - DNA, 25 bp, Homo sapien
caacaacaaaaaaacgtacacagag

SEQ ID NO: 21870 - DNA, 25 bp, Homo sapien
gtgaagaaagcctatgtttggggaa

SEQ ID NO: 21871 - DNA, 25 bp, Homo sapien
cagagtaattacaataatgggaatt

SEQ ID NO: 21872 - DNA, 25 bp, Homo sapien
tttacttggaggaagtgaagaaagc

SEQ ID NO: 21873 - DNA, 25 bp, Homo sapien
gtgtgtataaagtcagtgtaacatt

SEQ ID NO: 21874 - DNA, 25 bp, Homo sapien
gaataaaggaaatatatatagattt

SEQ ID NO: 21875 - DNA, 25 bp, Homo sapien
aggctagagtgcaattccatatcaa

SEQ ID NO: 21876 - DNA, 25 bp, Homo sapien
caaaattctgcgttttacagtgtgt

SEQ ID NO: 21877 - DNA, 25 bp, Homo sapien
attgtcattaagataagtggacggc

SEQ ID NO: 21878 - DNA, 25 bp, Homo sapien
agtggtaaagaaacacttcaaagaa

SEQ ID NO: 21879 - DNA, 25 bp, Homo sapien
attctactcagtgtctaattcacaa

SEQ ID NO: 21880 - DNA, 25 bp, Homo sapien
tgagtagctcctgttgtgtatgcac

SEQ ID NO: 21881 - DNA, 25 bp, Homo sapien
ataagtggacggctgatattctatt

SEQ ID NO: 21882 - DNA, 25 bp, Homo sapien
aaggcatatttctgagtagctcctg

SEQ ID NO: 21883 - DNA, 25 bp, Homo sapien
cattaagataagtggacggctgata

SEQ ID NO: 21884 - DNA, 25 bp, Homo sapien
gcaaaagcctacaattctttgtcac

SEQ ID NO: 21885 - DNA, 25 bp, Homo sapien
atgcacagctgctataaggggtatc

SEQ ID NO: 21886 - DNA, 25 bp, Homo sapien
cagctgctataaggggtatcaagtt

SEQ ID NO: 21887 - DNA, 25 bp, Homo sapien
cctgttgtgtatgcacagctgctat

SEQ ID NO: 21888 - DNA, 25 bp, Homo sapien
gtcattcatagatggacatttgggt

SEQ ID NO: 21889 - DNA, 25 bp, Homo sapien
tataaatagtactgctgccaagaat

SEQ ID NO: 21890 - DNA, 25 bp, Homo sapien
tctagtcattcatagatggacattt

SEQ ID NO: 21891 - DNA, 25 bp, Homo sapien
ttgcctggacctatctaactcatat

SEQ ID NO: 21892 - DNA, 25 bp, Homo sapien
accttgcctggacctatctaactca

SEQ ID NO: 21893 - DNA, 25 bp, Homo sapien
aatagtactgctgccaagaatacac

SEQ ID NO: 21894 - DNA, 25 bp, Homo sapien
ttgggttgtttctacaacatcttgg

SEQ ID NO: 21895 - DNA, 25 bp, Homo sapien
tggcataatgtcctcaatgttcatt

SEQ ID NO: 21896 - DNA, 25 bp, Homo sapien
gacctatctaactcatataagtgga

SEQ ID NO: 21897 - DNA, 25 bp, Homo sapien
cattggatttatatgccacattgtc

SEQ ID NO: 21898 - DNA, 25 bp, Homo sapien
atacacactggggagaagacattct

SEQ ID NO: 21899 - DNA, 25 bp, Homo sapien
ctgaacgtaattagagagaactacc

SEQ ID NO: 21900 - DNA, 25 bp, Homo sapien
gagaactacctaattataacagcga

SEQ ID NO: 21901 - DNA, 25 bp, Homo sapien
attagccaaactttaggacctactc

SEQ ID NO: 21902 - DNA, 25 bp, Homo sapien
tctagaaagagcttcactgggattt

SEQ ID NO: 21903 - DNA, 25 bp, Homo sapien
atgttccatcagaaatgtgacaagt

SEQ ID NO: 21904 - DNA, 25 bp, Homo sapien
gtgatacattggaaggcaactgatt

SEQ ID NO: 21905 - DNA, 25 bp, Homo sapien
ttataacagcgagatgttccatcag

SEQ ID NO: 21906 - DNA, 25 bp, Homo sapien
tacaggaattatactgaacgtaatt

SEQ ID NO: 21907 - DNA, 25 bp, Homo sapien
ggtgtttccaaactagctagatcta

SEQ ID NO: 21908 - DNA, 25 bp, Homo sapien
taaaaacctggcacattacttgtta

SEQ ID NO: 21909 - DNA, 25 bp, Homo sapien
tttaactggttgttggtgatacatt

SEQ ID NO: 21910 - DNA, 25 bp, Homo sapien
agtgtcttaagtttacaggttcaga

SEQ ID NO: 21911 - DNA, 25 bp, Homo sapien
tattatctgtagagaagttagaccc

SEQ ID NO: 21912 - DNA, 25 bp, Homo sapien
tcagatttcctgctattggttccct

SEQ ID NO: 21913 - DNA, 25 bp, Homo sapien
atggacatgtctttccgatgtgctt

SEQ ID NO: 21914 - DNA, 25 bp, Homo sapien
tggtcacctattttatggacatgtc

SEQ ID NO: 21915 - DNA, 25 bp, Homo sapien
tgtagagaagttagaccctgtgttc

SEQ ID NO: 21916 - DNA, 25 bp, Homo sapien
cttaactttatatgggatttgactt

SEQ ID NO: 21917 - DNA, 25 bp, Homo sapien
tcacaccataggactcgtctatcat

SEQ ID NO: 21918 - DNA, 25 bp, Homo sapien
atatggcttgtcttatcagatttcc

SEQ ID NO: 21919 - DNA, 25 bp, Homo sapien
ttatgtgaaattagtgtcttaagtt

SEQ ID NO: 21920 - DNA, 25 bp, Homo sapien
atagcttttctcacaccataggact

SEQ ID NO: 21921 - DNA, 25 bp, Homo sapien
atcattacaggcctctttgcttctt

SEQ ID NO: 21922 - DNA, 25 bp, Homo sapien
ttggtagggtacattctcccaaggc

SEQ ID NO: 21923 - DNA, 25 bp, Homo sapien
tctgttttggagatcactgactctt

SEQ ID NO: 21924 - DNA, 25 bp, Homo sapien
ctttcctgaagttaataattgtcct

SEQ ID NO: 21925 - DNA, 25 bp, Homo sapien
cccaaggctttctgaagaacagtgc

SEQ ID NO: 21926 - DNA, 25 bp, Homo sapien
cttcccaatatagttagagcataat

SEQ ID NO: 21927 - DNA, 25 bp, Homo sapien
ctgtaggagtaaatatttagcgctc

SEQ ID NO: 21928 - DNA, 25 bp, Homo sapien
atggagctgtcatcctagaaaaccc

SEQ ID NO: 21929 - DNA, 25 bp, Homo sapien
agttagagcataattgtggttcaat

SEQ ID NO: 21930 - DNA, 25 bp, Homo sapien
cccattccagctatggagctgtcat

SEQ ID NO: 21931 - DNA, 25 bp, Homo sapien
agaacagtgcatgggagatatatat

SEQ ID NO: 21932 - DNA, 25 bp, Homo sapien
ttcctgcaagcacacatcgggtatt

SEQ ID NO: 21933 - DNA, 25 bp, Homo sapien
cccaacgaattattggctgatcgaa

SEQ ID NO: 21934 - DNA, 25 bp, Homo sapien
atgaaggttgctaacagaacaccct

SEQ ID NO: 21935 - DNA, 25 bp, Homo sapien
tcttttccaatagactgtgagcttc

SEQ ID NO: 21936 - DNA, 25 bp, Homo sapien
attcagccacaataattggattttc

SEQ ID NO: 21937 - DNA, 25 bp, Homo sapien
ctgagtgaatagatgaaggttgcta

SEQ ID NO: 21938 - DNA, 25 bp, Homo sapien
ttgtagaaaatattgctcaaacacc

SEQ ID NO: 21939 - DNA, 25 bp, Homo sapien
agcttcttgaagacaaagtctgtgc

SEQ ID NO: 21940 - DNA, 25 bp, Homo sapien
tggctgatcgaatgtctgagtgaat

SEQ ID NO: 21941 - DNA, 25 bp, Homo sapien
tgaatgttgctgtcatgtgtttgtc

SEQ ID NO: 21942 - DNA, 25 bp, Homo sapien
atatttagtatcttgcacagtgcct

SEQ ID NO: 21943 - DNA, 25 bp, Homo sapien
gggctacagagctttatctaatgat

SEQ ID NO: 21944 - DNA, 25 bp, Homo sapien
gtatgcctcatacaagagaacatta

SEQ ID NO: 21945 - DNA, 25 bp, Homo sapien
tacatggtcagttaaaatcacagaa

SEQ ID NO: 21946 - DNA, 25 bp, Homo sapien
taccagttaaagatagaaattgttg

SEQ ID NO: 21947 - DNA, 25 bp, Homo sapien
tgttgaagaggataacaaaaccaaa

SEQ ID NO: 21948 - DNA, 25 bp, Homo sapien
aagataaacacacaaagtgctaatc

SEQ ID NO: 21949 - DNA, 25 bp, Homo sapien
atagagattattagggctacagagc

SEQ ID NO: 21950 - DNA, 25 bp, Homo sapien
cgaggtaaagacagattaacttaca

SEQ ID NO: 21951 - DNA, 25 bp, Homo sapien
tatgtcacttacaagaaacccattt

SEQ ID NO: 21952 - DNA, 25 bp, Homo sapien
aaagatacatctgggttaaaagtaa

SEQ ID NO: 21953 - DNA, 25 bp, Homo sapien
aagaaagcaaaggagctacattaat

SEQ ID NO: 21954 - DNA, 25 bp, Homo sapien
cctcagtggaggaagccgccagtga

SEQ ID NO: 21955 - DNA, 25 bp, Homo sapien
gcggatataaacagccgcgtccctg

SEQ ID NO: 21956 - DNA, 25 bp, Homo sapien
gtgacctctcagctagacctctgct

SEQ ID NO: 21957 - DNA, 25 bp, Homo sapien
cgcccggcccactgatgggttttaa

SEQ ID NO: 21958 - DNA, 25 bp, Homo sapien
aggacaagctctgtcctggtgccca

SEQ ID NO: 21959 - DNA, 25 bp, Homo sapien
aagggaatgccagccatgcctcagt

SEQ ID NO: 21960 - DNA, 25 bp, Homo sapien
cacccggcgcggatataaacagccg

SEQ ID NO: 21961 - DNA, 25 bp, Homo sapien
cgcaccactgtcaggacaagctctg

SEQ ID NO: 21962 - DNA, 25 bp, Homo sapien
ttttaatgaaccgaagggaatgcca

SEQ ID NO: 21963 - DNA, 25 bp, Homo sapien
caggagactcccacacagccgtgcc

SEQ ID NO: 21964 - DNA, 25 bp, Homo sapien
aagccgccagtgacctctcagctag

SEQ ID NO: 21965 - DNA, 25 bp, Homo sapien
cacaatggagtcaagaggaacatct

SEQ ID NO: 21966 - DNA, 25 bp, Homo sapien
tttgaaaaagggactgctgaatcca

SEQ ID NO: 21967 - DNA, 25 bp, Homo sapien
gtccaggcaaagctgcacagaccag

SEQ ID NO: 21968 - DNA, 25 bp, Homo sapien
agcaaaggcatgcagcaccgtgcct

SEQ ID NO: 21969 - DNA, 25 bp, Homo sapien
tcaagaccagataacaagcacgtgt

SEQ ID NO: 21970 - DNA, 25 bp, Homo sapien
agctgcagcactcaaatgtgcaccc

SEQ ID NO: 21971 - DNA, 25 bp, Homo sapien
caccttacaggcagctgcaggaaac

SEQ ID NO: 21972 - DNA, 25 bp, Homo sapien
ctaaaaggctacacacaatggagtc

SEQ ID NO: 21973 - DNA, 25 bp, Homo sapien
gaaaaagagtatgtggagcttctca

SEQ ID NO: 21974 - DNA, 25 bp, Homo sapien
tcgagcggtggctgcacaaaatcat

SEQ ID NO: 21975 - DNA, 25 bp, Homo sapien
gttctggccaggtgacggtcatcac

SEQ ID NO: 21976 - DNA, 25 bp, Homo sapien
ggaggtcactcgtcctcttgtgaac

SEQ ID NO: 21977 - DNA, 25 bp, Homo sapien
gttcacaagaggacgagtgacctcc

SEQ ID NO: 21978 - DNA, 25 bp, Homo sapien
ggtgagatgtcacagccaatgtcat

SEQ ID NO: 21979 - DNA, 25 bp, Homo sapien
aatcaaaggaagaatccagacttaa

SEQ ID NO: 21980 - DNA, 25 bp, Homo sapien
aatgaggaatgggttcccaaacttc

SEQ ID NO: 21981 - DNA, 25 bp, Homo sapien
aagaaaaggagcacaggcatctgat

SEQ ID NO: 21982 - DNA, 25 bp, Homo sapien
aaacagtgacacttccattatgtgc

SEQ ID NO: 21983 - DNA, 25 bp, Homo sapien
tacatagatgtacataggtgtttct

SEQ ID NO: 21984 - DNA, 25 bp, Homo sapien
ttttgcacacatggtgagatgtcac

SEQ ID NO: 21985 - DNA, 25 bp, Homo sapien
aatttgaatgaggaaatgaggaatg

SEQ ID NO: 21986 - DNA, 25 bp, Homo sapien
attatgtgctaatgataacacctcc

SEQ ID NO: 21987 - DNA, 25 bp, Homo sapien
cacaggcatctgataacaagaagct

SEQ ID NO: 21988 - DNA, 25 bp, Homo sapien
taacaagaagctttgctgtagctgc

SEQ ID NO: 21989 - DNA, 25 bp, Homo sapien
gttgtgccatgagttttctgaggtc

SEQ ID NO: 21990 - DNA, 25 bp, Homo sapien
agagatggggtcactttaacaacta

SEQ ID NO: 21991 - DNA, 25 bp, Homo sapien
ctagaactcaagctatgtgacatgt

SEQ ID NO: 21992 - DNA, 25 bp, Homo sapien
aaatgacccactccgaggaactttc

SEQ ID NO: 21993 - DNA, 25 bp, Homo sapien
gttagttgctgatatgaagcacacc

SEQ ID NO: 21994 - DNA, 25 bp, Homo sapien
tgaagcacacctgacatactcctat

SEQ ID NO: 21995 - DNA, 25 bp, Homo sapien
caccacccgtggataacttttgtag

SEQ ID NO: 21996 - DNA, 25 bp, Homo sapien
ctgaggtcaggtacaaccatgtatc

SEQ ID NO: 21997 - DNA, 25 bp, Homo sapien
tatgtctctgccttcttagttgtgc

SEQ ID NO: 21998 - DNA, 25 bp, Homo sapien
gatgacacccatcattagtgagatt

SEQ ID NO: 21999 - DNA, 25 bp, Homo sapien
accacaggggtgtgtcaccacccgt

SEQ ID NO: 22000 - DNA, 25 bp, Homo sapien
ccctcgaaccctcagatggatacta

SEQ ID NO: 22001 - DNA, 25 bp, Homo sapien
tagccgctcccatgttgcagatgtg

SEQ ID NO: 22002 - DNA, 25 bp, Homo sapien
agagtttaacatccagaccggtagc

SEQ ID NO: 22003 - DNA, 25 bp, Homo sapien
tgtgagtgtggctccacgccattta

SEQ ID NO: 22004 - DNA, 25 bp, Homo sapien
aagagtggtctcagatgccctttac

SEQ ID NO: 22005 - DNA, 25 bp, Homo sapien
ccttgaaccctgtgagctgagtact

SEQ ID NO: 22006 - DNA, 25 bp, Homo sapien
ttgtgagaatgaaaggagatactat

SEQ ID NO: 22007 - DNA, 25 bp, Homo sapien
aaagcaagacattgggtcaccctaa

SEQ ID NO: 22008 - DNA, 25 bp, Homo sapien
accaccgcagtcaatagttcgcatt

SEQ ID NO: 22009 - DNA, 25 bp, Homo sapien
aattgtagatccataagaagctgca

SEQ ID NO: 22010 - DNA, 25 bp, Homo sapien
acagaggcaaacagtgtgtccaata

SEQ ID NO: 22011 - DNA, 25 bp, Homo sapien
agtcaagcaacaacaaaactagtga

SEQ ID NO: 22012 - DNA, 25 bp, Homo sapien
ttggcaggataagcagtaaaacagt

SEQ ID NO: 22013 - DNA, 25 bp, Homo sapien
tatagaagtattggacgacataatt

SEQ ID NO: 22014 - DNA, 25 bp, Homo sapien
agttttcaagacatatgggactttc

SEQ ID NO: 22015 - DNA, 25 bp, Homo sapien
cagtgcataagtcacaaagttagtc

SEQ ID NO: 22016 - DNA, 25 bp, Homo sapien
aaggaaatataccaagtttacatgc

SEQ ID NO: 22017 - DNA, 25 bp, Homo sapien
tttaaacatgcatggtggaatcttt

SEQ ID NO: 22018 - DNA, 25 bp, Homo sapien
aacacacaaaatcagtggagatact

SEQ ID NO: 22019 - DNA, 25 bp, Homo sapien
aaaatctgaccagtgcataagtcac

SEQ ID NO: 22020 - DNA, 25 bp, Homo sapien
ctctctcagaagcttgacaagtcaa

SEQ ID NO: 22021 - DNA, 25 bp, Homo sapien
atatgggactttcacaaaatctgac

SEQ ID NO: 22022 - DNA, 25 bp, Homo sapien
ttgccgcaaagtaaaacatacatgt

SEQ ID NO: 22023 - DNA, 25 bp, Homo sapien
gagaaataaggctaagagaagatca

SEQ ID NO: 22024 - DNA, 25 bp, Homo sapien
attggtgtagatatggagatagata

SEQ ID NO: 22025 - DNA, 25 bp, Homo sapien
aaaaggcaaggaaattccacatttc

SEQ ID NO: 22026 - DNA, 25 bp, Homo sapien
cactaagattgcagtaggaagcatt

SEQ ID NO: 22027 - DNA, 25 bp, Homo sapien
gtgatgcagtacacagattggtatc

SEQ ID NO: 22028 - DNA, 25 bp, Homo sapien
ctttataagagtagtgggtaagagt

SEQ ID NO: 22029 - DNA, 25 bp, Homo sapien
ttgatctgatgacccatgaatgtgt

SEQ ID NO: 22030 - DNA, 25 bp, Homo sapien
taagagtatatcctggtcatgaccc

SEQ ID NO: 22031 - DNA, 25 bp, Homo sapien
tagtagcctcttaaatggtggtttc

SEQ ID NO: 22032 - DNA, 25 bp, Homo sapien
gagttgtggttgatggtaagcttct

SEQ ID NO: 22033 - DNA, 25 bp, Homo sapien
aaatcaccacagtgcctcatacaca

SEQ ID NO: 22034 - DNA, 25 bp, Homo sapien
caggctggagtactggaatatgaaa

SEQ ID NO: 22035 - DNA, 25 bp, Homo sapien
aaagttaggcattgttttgtgaaac

SEQ ID NO: 22036 - DNA, 25 bp, Homo sapien
ctttcgtatgtatgtgtagagatat

SEQ ID NO: 22037 - DNA, 25 bp, Homo sapien
tacatcttaggttgaaatataaatt

SEQ ID NO: 22038 - DNA, 25 bp, Homo sapien
tgactcatatgctgcaaagttaggc

SEQ ID NO: 22039 - DNA, 25 bp, Homo sapien
caatagaaaaagcatgactcatatg

SEQ ID NO: 22040 - DNA, 25 bp, Homo sapien
gcctcatacacattaagcatcaaat

SEQ ID NO: 22041 - DNA, 25 bp, Homo sapien
atgagtagatcttgattagcatttt

SEQ ID NO: 22042 - DNA, 25 bp, Homo sapien
aaaaacaatagaaaaagcatgactc

SEQ ID NO: 22043 - DNA, 25 bp, Homo sapien
ctggaatatgaaaaatcaccacagt

SEQ ID NO: 22044 - DNA, 25 bp, Homo sapien
gccagtacactgataggggaataat

SEQ ID NO: 22045 - DNA, 25 bp, Homo sapien
cagaattcttccagacaaggggata

SEQ ID NO: 22046 - DNA, 25 bp, Homo sapien
aagctttgggaaatggtgtaaaaca

SEQ ID NO: 22047 - DNA, 25 bp, Homo sapien
acagtggaacttggattctcaggca

SEQ ID NO: 22048 - DNA, 25 bp, Homo sapien
gagcagccctccaaaaatgtttcag

SEQ ID NO: 22049 - DNA, 25 bp, Homo sapien
attccagtagactgagagcagccct

SEQ ID NO: 22050 - DNA, 25 bp, Homo sapien
ctcatgataaggactaaatgcacat

SEQ ID NO: 22051 - DNA, 25 bp, Homo sapien
agggaaatgaagcaacaccaacatt

SEQ ID NO: 22052 - DNA, 25 bp, Homo sapien
taatctcacagggaagctttgggaa

SEQ ID NO: 22053 - DNA, 25 bp, Homo sapien
tgatggcttacagagaaatggtcag

SEQ ID NO: 22054 - DNA, 25 bp, Homo sapien
tggttagagctatccacagtggaac

SEQ ID NO: 22055 - DNA, 25 bp, Homo sapien
aaatgaaaacatggcaaaagtaagt

SEQ ID NO: 22056 - DNA, 25 bp, Homo sapien
tgaaaacatggcaaaagtaagtgat

SEQ ID NO: 22057 - DNA, 25 bp, Homo sapien
gttaccagttttcatagcagacaac

SEQ ID NO: 22058 - DNA, 25 bp, Homo sapien
tgatggattcagtgtttattctctc

SEQ ID NO: 22059 - DNA, 25 bp, Homo sapien
aaaactgttttgagaatttctgcta

SEQ ID NO: 22060 - DNA, 25 bp, Homo sapien
ctgctacttactaagatgttgggaa

SEQ ID NO: 22061 - DNA, 25 bp, Homo sapien
gcagacaacatgatggattcagtgt

SEQ ID NO: 22062 - DNA, 25 bp, Homo sapien
aaagtaagtgatgggccataaagag

SEQ ID NO: 22063 - DNA, 25 bp, Homo sapien
agatgttgggaatcagagatggaaa

SEQ ID NO: 22064 - DNA, 25 bp, Homo sapien
tcaagagtacgggtgggaaaatgta

SEQ ID NO: 22065 - DNA, 25 bp, Homo sapien
tttcatagcagacaacatgatggat

SEQ ID NO: 22066 - DNA, 25 bp, Homo sapien
taagtcaaggaaatgaaaacatggc

SEQ ID NO: 22067 - DNA, 25 bp, Homo sapien
gttaccagttttcatagcagacaac

SEQ ID NO: 22068 - DNA, 25 bp, Homo sapien
aaaactgttttgagaatttctgcta

SEQ ID NO: 22069 - DNA, 25 bp, Homo sapien
tgaaaacatggcaaaagtaagtgat

SEQ ID NO: 22070 - DNA, 25 bp, Homo sapien
agatgttgggaatcagagatggaaa

SEQ ID NO: 22071 - DNA, 25 bp, Homo sapien
tcaagagtacgggtgggaaaatgta

SEQ ID NO: 22072 - DNA, 25 bp, Homo sapien
ctgctacttactaagatgttgggaa

SEQ ID NO: 22073 - DNA, 25 bp, Homo sapien
gcagacaacatgatggattcagtgt

SEQ ID NO: 22074 - DNA, 25 bp, Homo sapien
ccataaagagtggaggaaatggttt

SEQ ID NO: 22075 - DNA, 25 bp, Homo sapien
aaagtaagtgatgggccataaagag

SEQ ID NO: 22076 - DNA, 25 bp, Homo sapien
tttcatagcagacaacatgatggat

SEQ ID NO: 22077 - DNA, 25 bp, Homo sapien
gaagccgtgttcagatacaaatctg

SEQ ID NO: 22078 - DNA, 25 bp, Homo sapien
gatttgccatgggaatcctcacaaa

SEQ ID NO: 22079 - DNA, 25 bp, Homo sapien
acgaagttcattggccagtaaaaaa

SEQ ID NO: 22080 - DNA, 25 bp, Homo sapien
gggaatcctcacaaaatccaggctc

SEQ ID NO: 22081 - DNA, 25 bp, Homo sapien
caacatgtttttggctacgaagttc

SEQ ID NO: 22082 - DNA, 25 bp, Homo sapien
tgccatacagaaagaagactgtttc

SEQ ID NO: 22083 - DNA, 25 bp, Homo sapien
tttactgtttgccatcagccaggcc

SEQ ID NO: 22084 - DNA, 25 bp, Homo sapien
ggaatgccacagtcaagtgagcttt

SEQ ID NO: 22085 - DNA, 25 bp, Homo sapien
aaagttggggtgaaaatgtttctga

SEQ ID NO: 22086 - DNA, 25 bp, Homo sapien
tcaaaatcctgagtgtgggaatgcc

SEQ ID NO: 22087 - DNA, 25 bp, Homo sapien
tttccagggcactagtgaaaccatt

SEQ ID NO: 22088 - DNA, 25 bp, Homo sapien
gtgcttgaataataagtgcatctac

SEQ ID NO: 22089 - DNA, 25 bp, Homo sapien
caaagtcagacacatgggttgagtc

SEQ ID NO: 22090 - DNA, 25 bp, Homo sapien
agaagctcaaaggtaatgcaaagtc

SEQ ID NO: 22091 - DNA, 25 bp, Homo sapien
aatggaattgagagctacctgactc

SEQ ID NO: 22092 - DNA, 25 bp, Homo sapien
attcacagtttatgggtctatagtt

SEQ ID NO: 22093 - DNA, 25 bp, Homo sapien
gggttgagtcccaaatatgccttct

SEQ ID NO: 22094 - DNA, 25 bp, Homo sapien
ccaaacctgttgttacgtgggtcac

SEQ ID NO: 22095 - DNA, 25 bp, Homo sapien
cgtgggtcacggtaaagcaattaat

SEQ ID NO: 22096 - DNA, 25 bp, Homo sapien
ctttcagagaatggaattgagagct

SEQ ID NO: 22097 - DNA, 25 bp, Homo sapien
actgataaataataagtgcatctgc

SEQ ID NO: 22098 - DNA, 25 bp, Homo sapien
ttacaatcaatgacaccaaacctgt

SEQ ID NO: 22099 - DNA, 25 bp, Homo sapien
agactgccagatactgaagggtttg

SEQ ID NO: 22100 - DNA, 25 bp, Homo sapien
tgagtgcatgtacagaatagaagac

SEQ ID NO: 22101 - DNA, 25 bp, Homo sapien
cttgggattaagtgttatgcttgtc

SEQ ID NO: 22102 - DNA, 25 bp, Homo sapien
gggctaatatggctagtgctgctat

SEQ ID NO: 22103 - DNA, 25 bp, Homo sapien
ctgcttcagggtaaccatgattctc

SEQ ID NO: 22104 - DNA, 25 bp, Homo sapien
acctcacagactaagaaacagacat

SEQ ID NO: 22105 - DNA, 25 bp, Homo sapien
acataaaaccatagagtatgttctc

SEQ ID NO: 22106 - DNA, 25 bp, Homo sapien
aaacagacattttgggaccctagaa

SEQ ID NO: 22107 - DNA, 25 bp, Homo sapien
tacagaatagaagactgccagatac

SEQ ID NO: 22108 - DNA, 25 bp, Homo sapien
tattttggtgagtgcatgtacagaa

SEQ ID NO: 22109 - DNA, 25 bp, Homo sapien
gtaaatgctccctgtaaccacctca

SEQ ID NO: 22110 - DNA, 25 bp, Homo sapien
aagagaggaatcaaaaatagtagaa

SEQ ID NO: 22111 - DNA, 25 bp, Homo sapien
gatctctggagctgtgttgatgccc

SEQ ID NO: 22112 - DNA, 25 bp, Homo sapien
gtacccgctctgtgggatctctgga

SEQ ID NO: 22113 - DNA, 25 bp, Homo sapien
ttaagtcacaaacacagcccaatac

SEQ ID NO: 22114 - DNA, 25 bp, Homo sapien
gagggtccacccacacacactatga

SEQ ID NO: 22115 - DNA, 25 bp, Homo sapien
acattagaatactgagccgtggaaa

SEQ ID NO: 22116 - DNA, 25 bp, Homo sapien
tgccttggatgaatacagttcaccc

SEQ ID NO: 22117 - DNA, 25 bp, Homo sapien
ctgagtgtggctgacgtttaaagct

SEQ ID NO: 22118 - DNA, 25 bp, Homo sapien
atagtagaagggaattttcttactc

SEQ ID NO: 22119 - DNA, 25 bp, Homo sapien
ccctaggtttgggacataaagagag

SEQ ID NO: 22120 - DNA, 25 bp, Homo sapien
ctgagccgtggaaaaatctaaaacc

SEQ ID NO: 22121 - DNA, 25 bp, Homo sapien
accagcctgatgaaaataggtatga

SEQ ID NO: 22122 - DNA, 25 bp, Homo sapien
ctctgtgccacgtttagagaggcag

SEQ ID NO: 22123 - DNA, 25 bp, Homo sapien
tgtctgcctatgtttagaaccttgc

SEQ ID NO: 22124 - DNA, 25 bp, Homo sapien
cagtgcacttaaaagatgagatgtc

SEQ ID NO: 22125 - DNA, 25 bp, Homo sapien
tactgaatgcctctctgtgccacgt

SEQ ID NO: 22126 - DNA, 25 bp, Homo sapien
atctgtgaagtaccagcctgatgaa

SEQ ID NO: 22127 - DNA, 25 bp, Homo sapien
ggaaaagttgacagcatagaaaccc

SEQ ID NO: 22128 - DNA, 25 bp, Homo sapien
gatattgaatagtacgtgcacacac

SEQ ID NO: 22129 - DNA, 25 bp, Homo sapien
agaaatggaagagaaactacctatt

SEQ ID NO: 22130 - DNA, 25 bp, Homo sapien
tctggaattgtgtatctatggactt

SEQ ID NO: 22131 - DNA, 25 bp, Homo sapien
aataggtatgaaaacaatagctctt

SEQ ID NO: 22132 - DNA, 25 bp, Homo sapien
cagcatcctgcaactggctcggtga

SEQ ID NO: 22133 - DNA, 25 bp, Homo sapien
tcctcgtggtcagtgcagggcacat

SEQ ID NO: 22134 - DNA, 25 bp, Homo sapien
aggtgtcctgtctgtgcactggcac

SEQ ID NO: 22135 - DNA, 25 bp, Homo sapien
ccacctggcattagccagcaggact

SEQ ID NO: 22136 - DNA, 25 bp, Homo sapien
gctcggtgaccaagggttcgtccca

SEQ ID NO: 22137 - DNA, 25 bp, Homo sapien
tcgccttagacagggctcgagtcct

SEQ ID NO: 22138 - DNA, 25 bp, Homo sapien
accggctctctgctcaggtgcgtca

SEQ ID NO: 22139 - DNA, 25 bp, Homo sapien
aggtgcagtcgctgacctcccagca

SEQ ID NO: 22140 - DNA, 25 bp, Homo sapien
tcctgctgtcccatggagtggtgac

SEQ ID NO: 22141 - DNA, 25 bp, Homo sapien
atcacatgggatggatcactgctct

SEQ ID NO: 22142 - DNA, 25 bp, Homo sapien
ttaagggataagtatctccaacctc

SEQ ID NO: 22143 - DNA, 25 bp, Homo sapien
agcacactggaaaatgataactggc

SEQ ID NO: 22144 - DNA, 25 bp, Homo sapien
ataaaaataacagggtaagcacact

SEQ ID NO: 22145 - DNA, 25 bp, Homo sapien
taccttgtttaaaatgggcagccat

SEQ ID NO: 22146 - DNA, 25 bp, Homo sapien
ataactggcactcagcttctgtgtc

SEQ ID NO: 22147 - DNA, 25 bp, Homo sapien
actggtggattaatgctgtacagca

SEQ ID NO: 22148 - DNA, 25 bp, Homo sapien
cagccagttcactatgaagacccaa

SEQ ID NO: 22149 - DNA, 25 bp, Homo sapien
aagaaaagttacacactggtggatt

SEQ ID NO: 22150 - DNA, 25 bp, Homo sapien
tgtcaagaagacactaggaattagt

SEQ ID NO: 22151 - DNA, 25 bp, Homo sapien
tgtgcatgcatataagtaatctcct

SEQ ID NO: 22152 - DNA, 25 bp, Homo sapien
tatgaagacccaatactgccaaatc

SEQ ID NO: 22153 - DNA, 25 bp, Homo sapien
aatgggcagccattactcagcttca

SEQ ID NO: 22154 - DNA, 25 bp, Homo sapien
tgggtggctccaaaaatagccaggg

SEQ ID NO: 22155 - DNA, 25 bp, Homo sapien
ctaccttaagacagctgagtgggtg

SEQ ID NO: 22156 - DNA, 25 bp, Homo sapien
tgctaccttaagacagctgagtggg

SEQ ID NO: 22157 - DNA, 25 bp, Homo sapien
tccaaaaatagccagggggacggca

SEQ ID NO: 22158 - DNA, 25 bp, Homo sapien
actgctaccttaagacagctgagtg

SEQ ID NO: 22159 - DNA, 25 bp, Homo sapien
gcctctgtgggcctggtgacactgg

SEQ ID NO: 22160 - DNA, 25 bp, Homo sapien
gctaccttaagacagctgagtgggt

SEQ ID NO: 22161 - DNA, 25 bp, Homo sapien
ctgagtgggtggctccaaaaatagc

SEQ ID NO: 22162 - DNA, 25 bp, Homo sapien
gcggggagtcacatggagaagctca

SEQ ID NO: 22163 - DNA, 25 bp, Homo sapien
gagtgggtggctccaaaaatagcca

SEQ ID NO: 22164 - DNA, 25 bp, Homo sapien
ggcactgctaccttaagacagctga

SEQ ID NO: 22165 - DNA, 25 bp, Homo sapien
cacactgaaatattgatggatgaaa

SEQ ID NO: 22166 - DNA, 25 bp, Homo sapien
ctaggcccaatagacagaaggtgct

SEQ ID NO: 22167 - DNA, 25 bp, Homo sapien
agcaggttgcaatccagacagctct

SEQ ID NO: 22168 - DNA, 25 bp, Homo sapien
agaagtttaaagaccctgtgacctc

SEQ ID NO: 22169 - DNA, 25 bp, Homo sapien
ctgtgtgttacaagcagcaggttgc

SEQ ID NO: 22170 - DNA, 25 bp, Homo sapien
ctgagaagggtttctggggactttc

SEQ ID NO: 22171 - DNA, 25 bp, Homo sapien
atgatgttaatagctgaacgtgtta

SEQ ID NO: 22172 - DNA, 25 bp, Homo sapien
ctttctggcttgtgggacagtccct

SEQ ID NO: 22173 - DNA, 25 bp, Homo sapien
ggggcttattatagtatgctgcaaa

SEQ ID NO: 22174 - DNA, 25 bp, Homo sapien
agatgaaactagactggccatgagt

SEQ ID NO: 22175 - DNA, 25 bp, Homo sapien
gaaattaatcaggaggggtacagat

SEQ ID NO: 22176 - DNA, 25 bp, Homo sapien
gttcaggaaaccacctccatgattc

SEQ ID NO: 22177 - DNA, 25 bp, Homo sapien
gcagcgttcaggaaaccacctccat

SEQ ID NO: 22178 - DNA, 25 bp, Homo sapien
aaggcacctttctcacagggtggtg

SEQ ID NO: 22179 - DNA, 25 bp, Homo sapien
ttggctcacagttccttatagctgg

SEQ ID NO: 22180 - DNA, 25 bp, Homo sapien
ctcactgtcacgagagcagcgttca

SEQ ID NO: 22181 - DNA, 25 bp, Homo sapien
aaaatcttgtgaactcactgtcacg

SEQ ID NO: 22182 - DNA, 25 bp, Homo sapien
ttacaatcatggaggcagttcacgt

SEQ ID NO: 22183 - DNA, 25 bp, Homo sapien
acgagagcagcgttcaggaaaccac

SEQ ID NO: 22184 - DNA, 25 bp, Homo sapien
caatcatggaggcagttcacgtgaa

SEQ ID NO: 22185 - DNA, 25 bp, Homo sapien
agagcagcgttcaggaaaccacctc

SEQ ID NO: 22186 - DNA, 25 bp, Homo sapien
tgtcacgagagcagcgttcaggaaa

SEQ ID NO: 22187 - DNA, 25 bp, Homo sapien
gcttaggcacatggactacaggtta

SEQ ID NO: 22188 - DNA, 25 bp, Homo sapien
ttaaaaagtagctgtggcaatagcc

SEQ ID NO: 22189 - DNA, 25 bp, Homo sapien
agaagaaatcaaagcctcggagtta

SEQ ID NO: 22190 - DNA, 25 bp, Homo sapien
tagcatatgccagttggagtgacac

SEQ ID NO: 22191 - DNA, 25 bp, Homo sapien
aggttgggctacgttcagaagaaat

SEQ ID NO: 22192 - DNA, 25 bp, Homo sapien
ctacaggttattaaagaaggtgact

SEQ ID NO: 22193 - DNA, 25 bp, Homo sapien
tgctgaaggcctgcgttctaccaat

SEQ ID NO: 22194 - DNA, 25 bp, Homo sapien
ctcaacgaggccgagaatagcatat

SEQ ID NO: 22195 - DNA, 25 bp, Homo sapien
agaaggtgacttgcggtttttatcc

SEQ ID NO: 22196 - DNA, 25 bp, Homo sapien
agtgtctaggaaattgctgaaggcc

SEQ ID NO: 22197 - DNA, 25 bp, Homo sapien
tggaaagtagctggaaaagaaataa

SEQ ID NO: 22198 - DNA, 25 bp, Homo sapien
cgagcccttgctcagtgagagtcct

SEQ ID NO: 22199 - DNA, 25 bp, Homo sapien
cagactacagaacaccaagtgcctg

SEQ ID NO: 22200 - DNA, 25 bp, Homo sapien
tctggctcagacaactaaagtcttc

SEQ ID NO: 22201 - DNA, 25 bp, Homo sapien
tggagctgccagttactagtagtgc

SEQ ID NO: 22202 - DNA, 25 bp, Homo sapien
gagggtgtcccacacaccaggttct

SEQ ID NO: 22203 - DNA, 25 bp, Homo sapien
ttcatcgcttcaggtgaaaggtgag

SEQ ID NO: 22204 - DNA, 25 bp, Homo sapien
catggtctgcagtgtctttggtcct

SEQ ID NO: 22205 - DNA, 25 bp, Homo sapien
ctagtagtgcagttttgaacaagcc

SEQ ID NO: 22206 - DNA, 25 bp, Homo sapien
tgaagcaatttgtaagcagcacagt

SEQ ID NO: 22207 - DNA, 25 bp, Homo sapien
gaggagattgtgtatgtgaagcaat

SEQ ID NO: 22208 - DNA, 25 bp, Homo sapien
agttatctgagaagtgttctggctc

SEQ ID NO: 22209 - DNA, 25 bp, Homo sapien
catgagaaccctccacgtgaggata

SEQ ID NO: 22210 - DNA, 25 bp, Homo sapien
ccacgtgaggatagccctagatctt

SEQ ID NO: 22211 - DNA, 25 bp, Homo sapien
ctagaatacaacataaaggaaagat

SEQ ID NO: 22212 - DNA, 25 bp, Homo sapien
gttgatgccaagctgatccaaaggc

SEQ ID NO: 22213 - DNA, 25 bp, Homo sapien
ccactgtgtgaagacatacttgctc

SEQ ID NO: 22214 - DNA, 25 bp, Homo sapien
gatgtttcagagtcagttgatgcca

SEQ ID NO: 22215 - DNA, 25 bp, Homo sapien
tttatgcagggataacatgagaacc

SEQ ID NO: 22216 - DNA, 25 bp, Homo sapien
ggctgtagtgtttatgcagggataa

SEQ ID NO: 22217 - DNA, 25 bp, Homo sapien
gtctggaggctcaaggtaaaactta

SEQ ID NO: 22218 - DNA, 25 bp, Homo sapien
tgctagtaacgatactacctgagac

SEQ ID NO: 22219 - DNA, 25 bp, Homo sapien
atccaaaggcaagaatcatgttaac

SEQ ID NO: 22220 - DNA, 25 bp, Homo sapien
ttattaggacaaaatgtggcagacg

SEQ ID NO: 22221 - DNA, 25 bp, Homo sapien
agacggctccttagagcagctgtaa

SEQ ID NO: 22222 - DNA, 25 bp, Homo sapien
tggctgtgctagaggcttgataaat

SEQ ID NO: 22223 - DNA, 25 bp, Homo sapien
gtaaggcggcagtaataacaatcaa

SEQ ID NO: 22224 - DNA, 25 bp, Homo sapien
atcataagggaatttgaggatcttc

SEQ ID NO: 22225 - DNA, 25 bp, Homo sapien
aaagacccgggaattcatccagtac

SEQ ID NO: 22226 - DNA, 25 bp, Homo sapien
aaaagcagccttcattgtgggagaa

SEQ ID NO: 22227 - DNA, 25 bp, Homo sapien
tgtgggagaactttcaacctggtct

SEQ ID NO: 22228 - DNA, 25 bp, Homo sapien
tctttcagggtttgtggagcgcact

SEQ ID NO: 22229 - DNA, 25 bp, Homo sapien
ttggagggatccgtcctattgacac

SEQ ID NO: 22230 - DNA, 25 bp, Homo sapien
agagagctggaactaaaaaagaccc

SEQ ID NO: 22231 - DNA, 25 bp, Homo sapien
aagtgctgaggttatgcccaacttt

SEQ ID NO: 22232 - DNA, 25 bp, Homo sapien
tctggttgggaaggcaaatttctaa

SEQ ID NO: 22233 - DNA, 25 bp, Homo sapien
ccacctcccaggtgaaggaattttc

SEQ ID NO: 22234 - DNA, 25 bp, Homo sapien
atctgtgggtgaagcattcagtctc

SEQ ID NO: 22235 - DNA, 25 bp, Homo sapien
ctgacagatcgaagaaaaatgccct

SEQ ID NO: 22236 - DNA, 25 bp, Homo sapien
tcagattttgaacccagaccactac

SEQ ID NO: 22237 - DNA, 25 bp, Homo sapien
atagcagcaatcaggcaaattatac

SEQ ID NO: 22238 - DNA, 25 bp, Homo sapien
ccaagcactggccattgtttcaatg

SEQ ID NO: 22239 - DNA, 25 bp, Homo sapien
tatggcccaactccctatgatagca

SEQ ID NO: 22240 - DNA, 25 bp, Homo sapien
tttaagtttcagtactgccaagcac

SEQ ID NO: 22241 - DNA, 25 bp, Homo sapien
agcccagctaaatttcggtgtgtat

SEQ ID NO: 22242 - DNA, 25 bp, Homo sapien
cagggaacaatggacaagagcaaaa

SEQ ID NO: 22243 - DNA, 25 bp, Homo sapien
tgcttccggctttcaaaactaggta

SEQ ID NO: 22244 - DNA, 25 bp, Homo sapien
cagcaaggtttctctcgtggtcatt

SEQ ID NO: 22245 - DNA, 25 bp, Homo sapien
gggcaaagggcttaaccctcactca

SEQ ID NO: 22246 - DNA, 25 bp, Homo sapien
tgctgtgacactagttgtgatgctc

SEQ ID NO: 22247 - DNA, 25 bp, Homo sapien
tgcctttgaagaagggcacccatct

SEQ ID NO: 22248 - DNA, 25 bp, Homo sapien
ttctcttccaaatgggcgacaggga

SEQ ID NO: 22249 - DNA, 25 bp, Homo sapien
aatcgacacatcaacccagcaaggt

SEQ ID NO: 22250 - DNA, 25 bp, Homo sapien
gtcaaacactgaactaagggcttta

SEQ ID NO: 22251 - DNA, 25 bp, Homo sapien
gggagctagcactgacctgtcaaac

SEQ ID NO: 22252 - DNA, 25 bp, Homo sapien
ctcccaagttgaagcaaagactatc

SEQ ID NO: 22253 - DNA, 25 bp, Homo sapien
aagaaagtagaaccaccatatgatc

SEQ ID NO: 22254 - DNA, 25 bp, Homo sapien
ttgcctcaagcccattagaatagtc

SEQ ID NO: 22255 - DNA, 25 bp, Homo sapien
acaagaaagcctgtcaatatgcaac

SEQ ID NO: 22256 - DNA, 25 bp, Homo sapien
tgaacctagaggacattaatgctaa

SEQ ID NO: 22257 - DNA, 25 bp, Homo sapien
gctaagtaaagtaaatcagtcacag

SEQ ID NO: 22258 - DNA, 25 bp, Homo sapien
cgagtgttaacaatggggagaaatt

SEQ ID NO: 22259 - DNA, 25 bp, Homo sapien
ctgggaaagtaaaactgtgcagcct

SEQ ID NO: 22260 - DNA, 25 bp, Homo sapien
caaaaccacaaagagatattgcctc

SEQ ID NO: 22261 - DNA, 25 bp, Homo sapien
cactaatcagggatatgcaaatcaa

SEQ ID NO: 22262 - DNA, 25 bp, Homo sapien
ctgaaagaattgagattgggatgat

SEQ ID NO: 22263 - DNA, 25 bp, Homo sapien
aaactgtgcagcctctatggaaaac

SEQ ID NO: 22264 - DNA, 25 bp, Homo sapien
tttaagcagaggtcagtacacacat

SEQ ID NO: 22265 - DNA, 25 bp, Homo sapien
agactctaggttctcagcaactgct

SEQ ID NO: 22266 - DNA, 25 bp, Homo sapien
aatatccagacagcatgtcagggcc

SEQ ID NO: 22267 - DNA, 25 bp, Homo sapien
ttaaagctctttcaggtggtggaag

SEQ ID NO: 22268 - DNA, 25 bp, Homo sapien
atttgcgttggaatgtgctgtgttt

SEQ ID NO: 22269 - DNA, 25 bp, Homo sapien
taacacctgaagaggacattctatt

SEQ ID NO: 22270 - DNA, 25 bp, Homo sapien
tttgtggaggatcagctgttcccat

SEQ ID NO: 22271 - DNA, 25 bp, Homo sapien
ggaaggtctgaggatcatttgcact

SEQ ID NO: 22272 - DNA, 25 bp, Homo sapien
aaggaatattcaagcctaggcatcc

SEQ ID NO: 22273 - DNA, 25 bp, Homo sapien
ttgaattcacagctgggatttatgc

SEQ ID NO: 22274 - DNA, 25 bp, Homo sapien
tcgagtctctgcacctactgagtct

SEQ ID NO: 22275 - DNA, 25 bp, Homo sapien
attgcaggatgcttagtagcaatcc

SEQ ID NO: 22276 - DNA, 25 bp, Homo sapien
ggtaaaacatccagcaacaaaatta

SEQ ID NO: 22277 - DNA, 25 bp, Homo sapien
aaacatctgagctagaggtcaaatc

SEQ ID NO: 22278 - DNA, 25 bp, Homo sapien
ccctgggaggtaacatcacttctag

SEQ ID NO: 22279 - DNA, 25 bp, Homo sapien
ctttataggcacttaggacatcttc

SEQ ID NO: 22280 - DNA, 25 bp, Homo sapien
cacttaagcacttaaagaaagggta

SEQ ID NO: 22281 - DNA, 25 bp, Homo sapien
caggcagcatggtctattgagaaac

SEQ ID NO: 22282 - DNA, 25 bp, Homo sapien
agaaactctcatggggatgtctacc

SEQ ID NO: 22283 - DNA, 25 bp, Homo sapien
atcagtagccaactccaatattgac

SEQ ID NO: 22284 - DNA, 25 bp, Homo sapien
aaatggagcatagtatgacatgccc

SEQ ID NO: 22285 - DNA, 25 bp, Homo sapien
aatcagatagttaaatggagcatag

SEQ ID NO: 22286 - DNA, 25 bp, Homo sapien
tacacaaggcagacattcaacagct

SEQ ID NO: 22287 - DNA, 25 bp, Homo sapien
ctgggagtacacatgcctgccaaca

SEQ ID NO: 22288 - DNA, 25 bp, Homo sapien
ttacctatgcttcaaagctcagccc

SEQ ID NO: 22289 - DNA, 25 bp, Homo sapien
ctccatgaaggcaggcatccgtctg

SEQ ID NO: 22290 - DNA, 25 bp, Homo sapien
gaaggcaggcatccgtctgtatctt

SEQ ID NO: 22291 - DNA, 25 bp, Homo sapien
cacggagcataggataatacacaag

SEQ ID NO: 22292 - DNA, 25 bp, Homo sapien
tttggggtaccgtatgctctctagc

SEQ ID NO: 22293 - DNA, 25 bp, Homo sapien
tcaccactgtaataatgaattgtgt

SEQ ID NO: 22294 - DNA, 25 bp, Homo sapien
ttcaacagctatttcatggtgtatc

SEQ ID NO: 22295 - DNA, 25 bp, Homo sapien
gatctcatgatctgctacaccaagt

SEQ ID NO: 22296 - DNA, 25 bp, Homo sapien
tatttgagcacggagcataggataa

SEQ ID NO: 22297 - DNA, 25 bp, Homo sapien
catagtttttgatagctgctgtctc

SEQ ID NO: 22298 - DNA, 25 bp, Homo sapien
aaataggttaaaactgctcacagtc

SEQ ID NO: 22299 - DNA, 25 bp, Homo sapien
tgctcacagtcatggaaacacttgg

SEQ ID NO: 22300 - DNA, 25 bp, Homo sapien
atggaaacacttggatgaaacctaa

SEQ ID NO: 22301 - DNA, 25 bp, Homo sapien
gaaaagatttgggattctaacaaca

SEQ ID NO: 22302 - DNA, 25 bp, Homo sapien
ctcattttggagctgttcacctttc

SEQ ID NO: 22303 - DNA, 25 bp, Homo sapien
gggatctggctgatgaattgcatag

SEQ ID NO: 22304 - DNA, 25 bp, Homo sapien
agacagaaaggttatagcccatagt

SEQ ID NO: 22305 - DNA, 25 bp, Homo sapien
tggatgaaacctaacagtggaaatc

SEQ ID NO: 22306 - DNA, 25 bp, Homo sapien
acaaggagtaaagattaattgtctc

SEQ ID NO: 22307 - DNA, 25 bp, Homo sapien
ttaccagaagtaatatctacatgac

SEQ ID NO: 22308 - DNA, 25 bp, Homo sapien
ggcatgctattctgttcccaaaatt

SEQ ID NO: 22309 - DNA, 25 bp, Homo sapien
agggattgacaaacatataaccacc

SEQ ID NO: 22310 - DNA, 25 bp, Homo sapien
ttaatgaaagcttggcatgctattc

SEQ ID NO: 22311 - DNA, 25 bp, Homo sapien
ttgcgcttgccttctcaatttttac

SEQ ID NO: 22312 - DNA, 25 bp, Homo sapien
actctagagaaaattagaacaatcc

SEQ ID NO: 22313 - DNA, 25 bp, Homo sapien
atgcctagagtgtgtcccacactca

SEQ ID NO: 22314 - DNA, 25 bp, Homo sapien
tcatgtattgaaggagaatgttaaa

SEQ ID NO: 22315 - DNA, 25 bp, Homo sapien
cacctggcccaaagtagtaataaat

SEQ ID NO: 22316 - DNA, 25 bp, Homo sapien
agaacaatccagaaaagggattgac

SEQ ID NO: 22317 - DNA, 25 bp, Homo sapien
taaccacctttatctttgcgcttgc

SEQ ID NO: 22318 - DNA, 25 bp, Homo sapien
acactcaaattaatgaaagcttggc

SEQ ID NO: 22319 - DNA, 25 bp, Homo sapien
gagtgcagaatatgctgactggctt

SEQ ID NO: 22320 - DNA, 25 bp, Homo sapien
tttagccaagaaagccatgtgtttc

SEQ ID NO: 22321 - DNA, 25 bp, Homo sapien
tgccaaggtggctgtcatgcttcta

SEQ ID NO: 22322 - DNA, 25 bp, Homo sapien
tggaaaagagggagcttctcttatc

SEQ ID NO: 22323 - DNA, 25 bp, Homo sapien
acatgatgtcagtgggaatctctgc

SEQ ID NO: 22324 - DNA, 25 bp, Homo sapien
tctcttgcaatggaagctctagggg

SEQ ID NO: 22325 - DNA, 25 bp, Homo sapien
gggcaggactcacattggctcacat

SEQ ID NO: 22326 - DNA, 25 bp, Homo sapien
atgtaggcactcacaaacatgtggc

SEQ ID NO: 22327 - DNA, 25 bp, Homo sapien
ctattgattgcatgacagaaaaccc

SEQ ID NO: 22328 - DNA, 25 bp, Homo sapien
ttcattgggacccagcacagcggat

SEQ ID NO: 22329 - DNA, 25 bp, Homo sapien
aactgcttcagaactggtttggtcc

SEQ ID NO: 22330 - DNA, 25 bp, Homo sapien
atattagggtctcagcaatggcctc

SEQ ID NO: 22331 - DNA, 25 bp, Homo sapien
tcaggttggtatgggaagtcaatat

SEQ ID NO: 22332 - DNA, 25 bp, Homo sapien
gttggcaggtttcatactcagctat

SEQ ID NO: 22333 - DNA, 25 bp, Homo sapien
ttctgtggccactttgtacaagggc

SEQ ID NO: 22334 - DNA, 25 bp, Homo sapien
attgagcaaacattgggatagcagt

SEQ ID NO: 22335 - DNA, 25 bp, Homo sapien
atggggaggctgaatgatatctaca

SEQ ID NO: 22336 - DNA, 25 bp, Homo sapien
tcagctatgagagtagtcagatcag

SEQ ID NO: 22337 - DNA, 25 bp, Homo sapien
atagttgcctctgcagtggatgccc

SEQ ID NO: 22338 - DNA, 25 bp, Homo sapien
tagggcacaaagtaatgtaatcgac

SEQ ID NO: 22339 - DNA, 25 bp, Homo sapien
cactttgtacaagggcccattgagc

SEQ ID NO: 22340 - DNA, 25 bp, Homo sapien
atctacagagatggtcattttttcc

SEQ ID NO: 22341 - DNA, 25 bp, Homo sapien
cccatgggatcgtatgtggagacag

SEQ ID NO: 22342 - DNA, 25 bp, Homo sapien
cccagaactctttaaggaagtatta

SEQ ID NO: 22343 - DNA, 25 bp, Homo sapien
aaggagggacttcactgaatccttc

SEQ ID NO: 22344 - DNA, 25 bp, Homo sapien
ctgagaagttgtgttgctgcccgtt

SEQ ID NO: 22345 - DNA, 25 bp, Homo sapien
tcgtatgtggagacaggaactgcaa

SEQ ID NO: 22346 - DNA, 25 bp, Homo sapien
ctaaggctctgagaagttgtgttgc

SEQ ID NO: 22347 - DNA, 25 bp, Homo sapien
atgatgacaataatggtaaaaattt

SEQ ID NO: 22348 - DNA, 25 bp, Homo sapien
tgctgcccgttgtggactgaatttc

SEQ ID NO: 22349 - DNA, 25 bp, Homo sapien
gggatcaagcagttatcttgcttca

SEQ ID NO: 22350 - DNA, 25 bp, Homo sapien
cattcacatgaaggagggacttcac

SEQ ID NO: 22351 - DNA, 25 bp, Homo sapien
ttcattttacaagaaaagctaaggc

SEQ ID NO: 22352 - DNA, 25 bp, Homo sapien
caggtgtgagccagctcttatatat

SEQ ID NO: 22353 - DNA, 25 bp, Homo sapien
gatttaacagcaactgaagaactgc

SEQ ID NO: 22354 - DNA, 25 bp, Homo sapien
aggctttgcaggacctcagcatcct

SEQ ID NO: 22355 - DNA, 25 bp, Homo sapien
ctcagtgagtcaggatgtcatttcc

SEQ ID NO: 22356 - DNA, 25 bp, Homo sapien
aactgcagtgacacaggcagtatac

SEQ ID NO: 22357 - DNA, 25 bp, Homo sapien
cagcaactgaagaactgcagtgaca

SEQ ID NO: 22358 - DNA, 25 bp, Homo sapien
aaaaacaaacctgagtctaaatcca

SEQ ID NO: 22359 - DNA, 25 bp, Homo sapien
accagtcctgtaaaactgagaagcc

SEQ ID NO: 22360 - DNA, 25 bp, Homo sapien
aggagagatgctaccttcagaatcc

SEQ ID NO: 22361 - DNA, 25 bp, Homo sapien
tgaggcttgctcagtgagtcaggat

SEQ ID NO: 22362 - DNA, 25 bp, Homo sapien
gtgacacaggcagtatactaagttc

SEQ ID NO: 22363 - DNA, 25 bp, Homo sapien
gtgcagccagggttctgactcctgg

SEQ ID NO: 22364 - DNA, 25 bp, Homo sapien
accgatcctggacagctttttaagc

SEQ ID NO: 22365 - DNA, 25 bp, Homo sapien
cactctgcactgaaataattgttat

SEQ ID NO: 22366 - DNA, 25 bp, Homo sapien
ccgaagaggcacacgtcgggcctct

SEQ ID NO: 22367 - DNA, 25 bp, Homo sapien
caggtgtaaaccaccgatcctggac

SEQ ID NO: 22368 - DNA, 25 bp, Homo sapien
cactgaaataattgttatggaggcc

SEQ ID NO: 22369 - DNA, 25 bp, Homo sapien
agggcatcatgtctctacccaagtc

SEQ ID NO: 22370 - DNA, 25 bp, Homo sapien
ccacactctcacatctgtggggcgg

SEQ ID NO: 22371 - DNA, 25 bp, Homo sapien
atattgaactaaccactctgcactg

SEQ ID NO: 22372 - DNA, 25 bp, Homo sapien
aagggagactcccagggcatcatgt

SEQ ID NO: 22373 - DNA, 25 bp, Homo sapien
gtaaaccaccgatcctggacagctt

SEQ ID NO: 22374 - DNA, 25 bp, Homo sapien
gtagtatgaatgcatggaaaaaatg

SEQ ID NO: 22375 - DNA, 25 bp, Homo sapien
ttagcagacacatgtaaacaacacc

SEQ ID NO: 22376 - DNA, 25 bp, Homo sapien
agaaaacgtaatattgctcatcctc

SEQ ID NO: 22377 - DNA, 25 bp, Homo sapien
tgactacatagctcaatacaaagtt

SEQ ID NO: 22378 - DNA, 25 bp, Homo sapien
agtcactaacctacctcagatcatc

SEQ ID NO: 22379 - DNA, 25 bp, Homo sapien
atattaagtattgcagtggtttatc

SEQ ID NO: 22380 - DNA, 25 bp, Homo sapien
ggatcaagtccaaatgaagtaactt

SEQ ID NO: 22381 - DNA, 25 bp, Homo sapien
gtttctggcacttagacatcttcct

SEQ ID NO: 22382 - DNA, 25 bp, Homo sapien
cccaaatcagcagtaaagccagttt

SEQ ID NO: 22383 - DNA, 25 bp, Homo sapien
cactgtcctatcaccatgaagttat

SEQ ID NO: 22384 - DNA, 25 bp, Homo sapien
atgtactttttgtgcagaattggtc

SEQ ID NO: 22385 - DNA, 25 bp, Homo sapien
ataggagtggcatcccatcacctct

SEQ ID NO: 22386 - DNA, 25 bp, Homo sapien
agggcgtgacccattgaaggtaact

SEQ ID NO: 22387 - DNA, 25 bp, Homo sapien
cttccaagtctgctgagagtctcca

SEQ ID NO: 22388 - DNA, 25 bp, Homo sapien
gtcctgcaggccacttaaacttctc

SEQ ID NO: 22389 - DNA, 25 bp, Homo sapien
tggtcttaactagagaagatccctc

SEQ ID NO: 22390 - DNA, 25 bp, Homo sapien
ggttgccagccaagccgtgtccatc

SEQ ID NO: 22391 - DNA, 25 bp, Homo sapien
tttcccgatggctgtagtactaagg

SEQ ID NO: 22392 - DNA, 25 bp, Homo sapien
ttagctgaagtttgccctgaggtcc

SEQ ID NO: 22393 - DNA, 25 bp, Homo sapien
ttcagatggtggcacaatgcatttc

SEQ ID NO: 22394 - DNA, 25 bp, Homo sapien
tattcccacaaagggagaggttaca

SEQ ID NO: 22395 - DNA, 25 bp, Homo sapien
gcaaacttagcaggttgaaaaacac

SEQ ID NO: 22396 - DNA, 25 bp, Homo sapien
cccgttgttacgtagagagcttttg

SEQ ID NO: 22397 - DNA, 25 bp, Homo sapien
ttgaagagcaaacaaactgtgcagc

SEQ ID NO: 22398 - DNA, 25 bp, Homo sapien
ctcagctcttactcaggcgtgttat

SEQ ID NO: 22399 - DNA, 25 bp, Homo sapien
acacaaatttgcaagtctgtctgtc

SEQ ID NO: 22400 - DNA, 25 bp, Homo sapien
ccaatgctaagactgggtaaattag

SEQ ID NO: 22401 - DNA, 25 bp, Homo sapien
agagagaaggcctagagatattcta

SEQ ID NO: 22402 - DNA, 25 bp, Homo sapien
cccggcctcaggttgactttttgaa

SEQ ID NO: 22403 - DNA, 25 bp, Homo sapien
gtttctgcaagtacacacgtgtgct

SEQ ID NO: 22404 - DNA, 25 bp, Homo sapien
gtacacacgtgtgctatttcccgtt

SEQ ID NO: 22405 - DNA, 25 bp, Homo sapien
caggcgtgttatgcatatgtattcc

SEQ ID NO: 22406 - DNA, 25 bp, Homo sapien
atgtattcctgcctccaatgctaag

SEQ ID NO: 22407 - DNA, 25 bp, Homo sapien
tcaaagacacattccctaacctacg

SEQ ID NO: 22408 - DNA, 25 bp, Homo sapien
tggaagactcaaaaaagtgctattt

SEQ ID NO: 22409 - DNA, 25 bp, Homo sapien
caaggttagtataggtcataaagac

SEQ ID NO: 22410 - DNA, 25 bp, Homo sapien
taatatgctctaataggccttgtcc

SEQ ID NO: 22411 - DNA, 25 bp, Homo sapien
tatgatgatattatatggaagactc

SEQ ID NO: 22412 - DNA, 25 bp, Homo sapien
ttctgcaccaaggttagtataggtc

SEQ ID NO: 22413 - DNA, 25 bp, Homo sapien
ctaaagagcaaacacttggcgagtt

SEQ ID NO: 22414 - DNA, 25 bp, Homo sapien
cagccttttctgaagttaatgaatt

SEQ ID NO: 22415 - DNA, 25 bp, Homo sapien
gccttgtcctgattgctaaagagca

SEQ ID NO: 22416 - DNA, 25 bp, Homo sapien
tgggattacagtcgtttgctatgta

SEQ ID NO: 22417 - DNA, 25 bp, Homo sapien
cttggcgagttcacaatataaagtg

SEQ ID NO: 22418 - DNA, 25 bp, Homo sapien
aatatgagtgcaatgacctagtttc

SEQ ID NO: 22419 - DNA, 25 bp, Homo sapien
tccaaacaaaagacgaatgataatc

SEQ ID NO: 22420 - DNA, 25 bp, Homo sapien
ataccgcaaagtagttttcagcctt

SEQ ID NO: 22421 - DNA, 25 bp, Homo sapien
ttaaccatgcaaagaatgaaagggc

SEQ ID NO: 22422 - DNA, 25 bp, Homo sapien
gaaagggcaagttatttagcaagtc

SEQ ID NO: 22423 - DNA, 25 bp, Homo sapien
cattaaggaggtaaactatggttgc

SEQ ID NO: 22424 - DNA, 25 bp, Homo sapien
gtgttgtccaaaagcctgcagcagc

SEQ ID NO: 22425 - DNA, 25 bp, Homo sapien
taacagaaatcaagaataatgcagg

SEQ ID NO: 22426 - DNA, 25 bp, Homo sapien
gggctcaggtgatttgcacacacat

SEQ ID NO: 22427 - DNA, 25 bp, Homo sapien
ccagattttaacaaggggctcaggt

SEQ ID NO: 22428 - DNA, 25 bp, Homo sapien
acatcagagcagaatacaagtctcc

SEQ ID NO: 22429 - DNA, 25 bp, Homo sapien
gaggaatgtggagaaaatataaaag

SEQ ID NO: 22430 - DNA, 25 bp, Homo sapien
aaggagccagagtaggattcagaat

SEQ ID NO: 22431 - DNA, 25 bp, Homo sapien
tgcaaaccctcgtgtgaaggcctct

SEQ ID NO: 22432 - DNA, 25 bp, Homo sapien
agaatgaatactagctaggcagagc

SEQ ID NO: 22433 - DNA, 25 bp, Homo sapien
ccaccaatataaggaggggaacata

SEQ ID NO: 22434 - DNA, 25 bp, Homo sapien
ttcatgtccttgtaggggagtgcaa

SEQ ID NO: 22435 - DNA, 25 bp, Homo sapien
taagttgcggctttggtgccttgaa

SEQ ID NO: 22436 - DNA, 25 bp, Homo sapien
acaccaagtgtgagaagccattgat

SEQ ID NO: 22437 - DNA, 25 bp, Homo sapien
agatatttgaggaatgtggagaaaa

SEQ ID NO: 22438 - DNA, 25 bp, Homo sapien
aggcggctctggaaaatgattactt

SEQ ID NO: 22439 - DNA, 25 bp, Homo sapien
ttgttttttacagcgcagagcaagg

SEQ ID NO: 22440 - DNA, 25 bp, Homo sapien
ctggcaaaagaaaaagctaggtgta

SEQ ID NO: 22441 - DNA, 25 bp, Homo sapien
gtttgaaggcattggagaactatca

SEQ ID NO: 22442 - DNA, 25 bp, Homo sapien
cactatgaaaaagattgggcaattt

SEQ ID NO: 22443 - DNA, 25 bp, Homo sapien
atgaaataagtgtgttggctggttt

SEQ ID NO: 22444 - DNA, 25 bp, Homo sapien
ccagaaaggggactataacataact

SEQ ID NO: 22445 - DNA, 25 bp, Homo sapien
gacttcaagttgactgggagcctaa

SEQ ID NO: 22446 - DNA, 25 bp, Homo sapien
ctgagaacagctataaaagctagac

SEQ ID NO: 22447 - DNA, 25 bp, Homo sapien
taggatttatagaacaaaagaccca

SEQ ID NO: 22448 - DNA, 25 bp, Homo sapien
tatagttctggctactcaggacgct

SEQ ID NO: 22449 - DNA, 25 bp, Homo sapien
aggggtgcagtaaactgtgattgca

SEQ ID NO: 22450 - DNA, 25 bp, Homo sapien
actgggagcctaaaaatcggagtta

SEQ ID NO: 22451 - DNA, 25 bp, Homo sapien
tacagttgtgtaatgggctatggac

SEQ ID NO: 22452 - DNA, 25 bp, Homo sapien
ttggttcaaacgacaactcagcaca

SEQ ID NO: 22453 - DNA, 25 bp, Homo sapien
tctttcacagaagtaagagagaggg

SEQ ID NO: 22454 - DNA, 25 bp, Homo sapien
cagcacaaagccttgagtataaatt

SEQ ID NO: 22455 - DNA, 25 bp, Homo sapien
atttggatgagaactaccctctatt

SEQ ID NO: 22456 - DNA, 25 bp, Homo sapien
attctgatggggataaatactgttt

SEQ ID NO: 22457 - DNA, 25 bp, Homo sapien
taaattgtttgaagttggtcccagc

SEQ ID NO: 22458 - DNA, 25 bp, Homo sapien
atgggctatggactgttacacacct

SEQ ID NO: 22459 - DNA, 25 bp, Homo sapien
tgcctctcccataggaatggaatac

SEQ ID NO: 22460 - DNA, 25 bp, Homo sapien
agggtgggcttggttatcagtattt

SEQ ID NO: 22461 - DNA, 25 bp, Homo sapien
ttgttttcagaatgagatgggagca

SEQ ID NO: 22462 - DNA, 25 bp, Homo sapien
aaatagcagaatgggtaaatatatc

SEQ ID NO: 22463 - DNA, 25 bp, Homo sapien
tggagggtattacaaagaggtccta

SEQ ID NO: 22464 - DNA, 25 bp, Homo sapien
tccagtatgtacaaatagcagaatg

SEQ ID NO: 22465 - DNA, 25 bp, Homo sapien
aagtattgctgacatgacaacatgg

SEQ ID NO: 22466 - DNA, 25 bp, Homo sapien
atgttgcaaaatagcgattaccttt

SEQ ID NO: 22467 - DNA, 25 bp, Homo sapien
ttttgtgatttaagtgctggctatc

SEQ ID NO: 22468 - DNA, 25 bp, Homo sapien
ataagattacgcagtgtacgatctc

SEQ ID NO: 22469 - DNA, 25 bp, Homo sapien
tatatggcaatgagaataaagtatt

SEQ ID NO: 22470 - DNA, 25 bp, Homo sapien
aagtagtgacttggagggtattaca

SEQ ID NO: 22471 - DNA, 25 bp, Homo sapien
attacctttgggcagaagtagtgac

SEQ ID NO: 22472 - DNA, 25 bp, Homo sapien
aaagaggtcctagcggtgttctatt

SEQ ID NO: 22473 - DNA, 25 bp, Homo sapien
ctcaccagtgtcatcttgatggtac

SEQ ID NO: 22474 - DNA, 25 bp, Homo sapien
tttttgccaaaactcatgtgacatt

SEQ ID NO: 22475 - DNA, 25 bp, Homo sapien
tgtcagtcactgcaagtgttcttat

SEQ ID NO: 22476 - DNA, 25 bp, Homo sapien
ttggaatgctcctgtgtttagggtt

SEQ ID NO: 22477 - DNA, 25 bp, Homo sapien
caggttttcgctttagacccagtcc

SEQ ID NO: 22478 - DNA, 25 bp, Homo sapien
ttcttgatatggcagagacagtgtg

SEQ ID NO: 22479 - DNA, 25 bp, Homo sapien
ttgatggtacttgtggtaattaatc

SEQ ID NO: 22480 - DNA, 25 bp, Homo sapien
atggcagagacagtgtgcattctca

SEQ ID NO: 22481 - DNA, 25 bp, Homo sapien
agccctgcagtcacaattatcttaa

SEQ ID NO: 22482 - DNA, 25 bp, Homo sapien
ctgataagatcccaaacactagcat

SEQ ID NO: 22483 - DNA, 25 bp, Homo sapien
aattccactgcaactcacctgtttt

SEQ ID NO: 22484 - DNA, 25 bp, Homo sapien
agacactgcagccagtggcatgttg

SEQ ID NO: 22485 - DNA, 25 bp, Homo sapien
tgtggtggcgtgcaacttcaatccc

SEQ ID NO: 22486 - DNA, 25 bp, Homo sapien
gacactgcagccagtggcatgttga

SEQ ID NO: 22487 - DNA, 25 bp, Homo sapien
taggacccgaggtgggcaggttgct

SEQ ID NO: 22488 - DNA, 25 bp, Homo sapien
acactgcagccagtggcatgttgaa

SEQ ID NO: 22489 - DNA, 25 bp, Homo sapien
ttaggacccgaggtgggcaggttgc

SEQ ID NO: 22490 - DNA, 25 bp, Homo sapien
gtgtggtggcgtgcaacttcaatcc

SEQ ID NO: 22491 - DNA, 25 bp, Homo sapien
cactgcagccagtggcatgttgaat

SEQ ID NO: 22492 - DNA, 25 bp, Homo sapien
aggacccgaggtgggcaggttgctt

SEQ ID NO: 22493 - DNA, 25 bp, Homo sapien
tgcagccagtggcatgttgaatttc

SEQ ID NO: 22494 - DNA, 25 bp, Homo sapien
actgcagccagtggcatgttgaatt

SEQ ID NO: 22495 - DNA, 25 bp, Homo sapien
tgtggtggcgtgcaacttcaatccc

SEQ ID NO: 22496 - DNA, 25 bp, Homo sapien
acactgcagccagtggcatgttgaa

SEQ ID NO: 22497 - DNA, 25 bp, Homo sapien
aggacccgaggtgggcaggttgctt

SEQ ID NO: 22498 - DNA, 25 bp, Homo sapien
catgagacactgcagccagtggcat

SEQ ID NO: 22499 - DNA, 25 bp, Homo sapien
agacactgcagccagtggcatgttg

SEQ ID NO: 22500 - DNA, 25 bp, Homo sapien
aaaactagaagacaagccaagcgtg

SEQ ID NO: 22501 - DNA, 25 bp, Homo sapien
gcgtgcaacttcaatcccagctact

SEQ ID NO: 22502 - DNA, 25 bp, Homo sapien
gtgtggtggcgtgcaacttcaatcc

SEQ ID NO: 22503 - DNA, 25 bp, Homo sapien
caatgagccaagatcgagattgcac

SEQ ID NO: 22504 - DNA, 25 bp, Homo sapien
tgcagccagtggcatgttgaatttc

SEQ ID NO: 22505 - DNA, 25 bp, Homo sapien
actgcagccagtggcatgttgaatt

SEQ ID NO: 22506 - DNA, 25 bp, Homo sapien
gatccaggacacagttagagggact

SEQ ID NO: 22507 - DNA, 25 bp, Homo sapien
aacaatgaaaaagcaagtaaagtct

SEQ ID NO: 22508 - DNA, 25 bp, Homo sapien
cacatcatgtagcttctggaaaatc

SEQ ID NO: 22509 - DNA, 25 bp, Homo sapien
aatgccaaagtgattgtgaaggagt

SEQ ID NO: 22510 - DNA, 25 bp, Homo sapien
ggactggcctctgtaagagaccctc

SEQ ID NO: 22511 - DNA, 25 bp, Homo sapien
attgtgaaggagtgcattccattct

SEQ ID NO: 22512 - DNA, 25 bp, Homo sapien
cagtctgaaagggtctcaggatccc

SEQ ID NO: 22513 - DNA, 25 bp, Homo sapien
gaaaagaggcgatgaatgccaaagt

SEQ ID NO: 22514 - DNA, 25 bp, Homo sapien
cttagtacaagaccgctggatctct

SEQ ID NO: 22515 - DNA, 25 bp, Homo sapien
agaccacacttagagcactgcctat

SEQ ID NO: 22516 - DNA, 25 bp, Homo sapien
aacatctggcttagtacaagaccgc

SEQ ID NO: 22517 - DNA, 25 bp, Homo sapien
acataccggaccacttcgtgggttc

SEQ ID NO: 22518 - DNA, 25 bp, Homo sapien
cagactatctctatgtggccacatc

SEQ ID NO: 22519 - DNA, 25 bp, Homo sapien
tcgtgggttcttatttaacagcctg

SEQ ID NO: 22520 - DNA, 25 bp, Homo sapien
taaagagaggaacttcaaattaaca

SEQ ID NO: 22521 - DNA, 25 bp, Homo sapien
aaataagaccaaagcccattaatcc

SEQ ID NO: 22522 - DNA, 25 bp, Homo sapien
caactgaggagttgttctcaaactc

SEQ ID NO: 22523 - DNA, 25 bp, Homo sapien
attggtgctaggctcattttttaaa

SEQ ID NO: 22524 - DNA, 25 bp, Homo sapien
ttgtactcttagcagagaggggttt

SEQ ID NO: 22525 - DNA, 25 bp, Homo sapien
ggccacatctcccagtaggtgtatt

SEQ ID NO: 22526 - DNA, 25 bp, Homo sapien
tgacatgttgaccaactgaggagtt

SEQ ID NO: 22527 - DNA, 25 bp, Homo sapien
taggtgtattcaatacccagctttc

SEQ ID NO: 22528 - DNA, 25 bp, Homo sapien
aaactggaaatcacagtcctagccc

SEQ ID NO: 22529 - DNA, 25 bp, Homo sapien
tacaagagatgtcacatggaccctc

SEQ ID NO: 22530 - DNA, 25 bp, Homo sapien
cttcttagttgaaacaggctgggtg

SEQ ID NO: 22531 - DNA, 25 bp, Homo sapien
catcagggcggtcagctgatttgat

SEQ ID NO: 22532 - DNA, 25 bp, Homo sapien
gtactggagtaatgttgatgctgga

SEQ ID NO: 22533 - DNA, 25 bp, Homo sapien
gagacaagaatgtgctggaagtctt

SEQ ID NO: 22534 - DNA, 25 bp, Homo sapien
ttgatgctggagaaatgttggcttc

SEQ ID NO: 22535 - DNA, 25 bp, Homo sapien
agtttggagaacaagactctttctg

SEQ ID NO: 22536 - DNA, 25 bp, Homo sapien
gctgtgcaatgaagacaagtccaag

SEQ ID NO: 22537 - DNA, 25 bp, Homo sapien
tccgggctcctcagctgtgcaatga

SEQ ID NO: 22538 - DNA, 25 bp, Homo sapien
acatgtgttaggtaggtcagattct

SEQ ID NO: 22539 - DNA, 25 bp, Homo sapien
tcaggcagggaatcacccataagta

SEQ ID NO: 22540 - DNA, 25 bp, Homo sapien
acttctagcaagtggaaaggaaaca

SEQ ID NO: 22541 - DNA, 25 bp, Homo sapien
tgactttagaggacacttcagattc

SEQ ID NO: 22542 - DNA, 25 bp, Homo sapien
ttctaggcactgaagacacggaggt

SEQ ID NO: 22543 - DNA, 25 bp, Homo sapien
ttgagtcactgtgtatgacagtcct

SEQ ID NO: 22544 - DNA, 25 bp, Homo sapien
tatgtgagatctaattctgaagtcc

SEQ ID NO: 22545 - DNA, 25 bp, Homo sapien
tgaagtccttgcatagttaagaaac

SEQ ID NO: 22546 - DNA, 25 bp, Homo sapien
tcttcctgtaacagtcaggcaggga

SEQ ID NO: 22547 - DNA, 25 bp, Homo sapien
catgcactgatggtaattaaaaaat

SEQ ID NO: 22548 - DNA, 25 bp, Homo sapien
gtgattggcaaaataacttctagca

SEQ ID NO: 22549 - DNA, 25 bp, Homo sapien
gaggtaaagcaagggacagtagatt

SEQ ID NO: 22550 - DNA, 25 bp, Homo sapien
ttctgacctttaaacaaagtatatc

SEQ ID NO: 22551 - DNA, 25 bp, Homo sapien
tttgtcagatttacccataagtatt

SEQ ID NO: 22552 - DNA, 25 bp, Homo sapien
aaaaagcctgctagaaatttgatta

SEQ ID NO: 22553 - DNA, 25 bp, Homo sapien
gtacaggtcttacacttattttgtc

SEQ ID NO: 22554 - DNA, 25 bp, Homo sapien
tcattttagcaatactgagacttct

SEQ ID NO: 22555 - DNA, 25 bp, Homo sapien
tagaaatttgattagcactgcattg

SEQ ID NO: 22556 - DNA, 25 bp, Homo sapien
ggaagagttctcattttagcaatac

SEQ ID NO: 22557 - DNA, 25 bp, Homo sapien
cttccatatgaatttcaaatctgct

SEQ ID NO: 22558 - DNA, 25 bp, Homo sapien
cactgcattgggaagagttctcatt

SEQ ID NO: 22559 - DNA, 25 bp, Homo sapien
ttaaacaaagtatatctctccgatt

SEQ ID NO: 22560 - DNA, 25 bp, Homo sapien
tctacaaaaagcctgctagaaattt

SEQ ID NO: 22561 - DNA, 25 bp, Homo sapien
tctcggaagtctcgggctttagctt

SEQ ID NO: 22562 - DNA, 25 bp, Homo sapien
tagcttcctcatccacagtgaaaat

SEQ ID NO: 22563 - DNA, 25 bp, Homo sapien
caatcaacaaacaatgtggcactac

SEQ ID NO: 22564 - DNA, 25 bp, Homo sapien
gtttgggtccttgtctggcatctta

SEQ ID NO: 22565 - DNA, 25 bp, Homo sapien
tggcatcttaagtagttgtgtgatc

SEQ ID NO: 22566 - DNA, 25 bp, Homo sapien
tgggcatgctttcaagccaaagggc

SEQ ID NO: 22567 - DNA, 25 bp, Homo sapien
aaacatacgaataaaatataggcac

SEQ ID NO: 22568 - DNA, 25 bp, Homo sapien
ataggcacaaaaatagaggatattg

SEQ ID NO: 22569 - DNA, 25 bp, Homo sapien
agccaaagggctatcataaatgaaa

SEQ ID NO: 22570 - DNA, 25 bp, Homo sapien
gaatgatgagacttttgggcatgct

SEQ ID NO: 22571 - DNA, 25 bp, Homo sapien
gtagttgtgtgatctcggaagtctc

SEQ ID NO: 22572 - DNA, 25 bp, Homo sapien
gatttgttcaaaattgacatgctaa

SEQ ID NO: 22573 - DNA, 25 bp, Homo sapien
aatataagtatactggggacggtca

SEQ ID NO: 22574 - DNA, 25 bp, Homo sapien
tatactaaagagagtctagacgctt

SEQ ID NO: 22575 - DNA, 25 bp, Homo sapien
tgtagcttatcattatgagccgctg

SEQ ID NO: 22576 - DNA, 25 bp, Homo sapien
agtctagacgcttgtattttaccag

SEQ ID NO: 22577 - DNA, 25 bp, Homo sapien
gttttatactaaagagagtctagac

SEQ ID NO: 22578 - DNA, 25 bp, Homo sapien
tggggacggtcaaatctgaagtctt

SEQ ID NO: 22579 - DNA, 25 bp, Homo sapien
ttatgagccgctgttttactgagtt

SEQ ID NO: 22580 - DNA, 25 bp, Homo sapien
acattctgaagtttgctgattgcat

SEQ ID NO: 22581 - DNA, 25 bp, Homo sapien
caagtcctttgctttgtaaagtatc

SEQ ID NO: 22582 - DNA, 25 bp, Homo sapien
ttacttaagagtccaagtcctttgc

SEQ ID NO: 22583 - DNA, 25 bp, Homo sapien
gagatgattacaaaccaaggtgaga

SEQ ID NO: 22584 - DNA, 25 bp, Homo sapien
gagaaaatgtcagagaagctcagca

SEQ ID NO: 22585 - DNA, 25 bp, Homo sapien
agtcaggtgacgtcagcgtcatctt

SEQ ID NO: 22586 - DNA, 25 bp, Homo sapien
cagagaagctcagcagcaggagtca

SEQ ID NO: 22587 - DNA, 25 bp, Homo sapien
cctatctggagataacccatttctt

SEQ ID NO: 22588 - DNA, 25 bp, Homo sapien
ttagcaacatctcaaggatttccct

SEQ ID NO: 22589 - DNA, 25 bp, Homo sapien
agccttgagcccttgagaaaatgtc

SEQ ID NO: 22590 - DNA, 25 bp, Homo sapien
ccattcttgacacatggagatgatt

SEQ ID NO: 22591 - DNA, 25 bp, Homo sapien
caaaaagagcctgtgcaggggaact

SEQ ID NO: 22592 - DNA, 25 bp, Homo sapien
gcactcacaattccacatagctagg

SEQ ID NO: 22593 - DNA, 25 bp, Homo sapien
catatcagagggtatccaagccttg

SEQ ID NO: 22594 - DNA, 25 bp, Homo sapien
tcattatgcatatatggtttacctt

SEQ ID NO: 22595 - DNA, 25 bp, Homo sapien
agatggagttttcactctggctgcc

SEQ ID NO: 22596 - DNA, 25 bp, Homo sapien
tgccattaattttggaaatagccac

SEQ ID NO: 22597 - DNA, 25 bp, Homo sapien
tgcctggcctgcttcacctattgta

SEQ ID NO: 22598 - DNA, 25 bp, Homo sapien
aatagccacttttactggagatatt

SEQ ID NO: 22599 - DNA, 25 bp, Homo sapien
cttcctggatctgtagtttggcatc

SEQ ID NO: 22600 - DNA, 25 bp, Homo sapien
tggaaagtttctatggacatgtctc

SEQ ID NO: 22601 - DNA, 25 bp, Homo sapien
gtcacgggtcctttgcacaccacgt

SEQ ID NO: 22602 - DNA, 25 bp, Homo sapien
tgtctcaaggtcacgggtcctttgc

SEQ ID NO: 22603 - DNA, 25 bp, Homo sapien
ggatctgtagtttggcatctgccat

SEQ ID NO: 22604 - DNA, 25 bp, Homo sapien
tcaaggtcacgggtcctttgcacac

SEQ ID NO: 22605 - DNA, 25 bp, Homo sapien
agactgataattaaggtaaggcacc

SEQ ID NO: 22606 - DNA, 25 bp, Homo sapien
ctactcattaagcatggggacaact

SEQ ID NO: 22607 - DNA, 25 bp, Homo sapien
ggggacaactggttatccaagagaa

SEQ ID NO: 22608 - DNA, 25 bp, Homo sapien
gcattacaagtcagtggggaaaaat

SEQ ID NO: 22609 - DNA, 25 bp, Homo sapien
taaattcatgtgaagggacaaaggg

SEQ ID NO: 22610 - DNA, 25 bp, Homo sapien
tggatacacacaaacgtggcattac

SEQ ID NO: 22611 - DNA, 25 bp, Homo sapien
agctgagattgcaaacaaaataacc

SEQ ID NO: 22612 - DNA, 25 bp, Homo sapien
ggcacagaaataggaccacacacac

SEQ ID NO: 22613 - DNA, 25 bp, Homo sapien
aaagggacaagaatagtcaagacaa

SEQ ID NO: 22614 - DNA, 25 bp, Homo sapien
cacacacagagaaactggatacaca

SEQ ID NO: 22615 - DNA, 25 bp, Homo sapien
gtaaggcaccaaaatagaaggcaca

SEQ ID NO: 22616 - DNA, 25 bp, Homo sapien
tatgtgattggcctgtggttttccc

SEQ ID NO: 22617 - DNA, 25 bp, Homo sapien
taatttggaatagtcatgatctttc

SEQ ID NO: 22618 - DNA, 25 bp, Homo sapien
tacatccaggagcatgcaaacattt

SEQ ID NO: 22619 - DNA, 25 bp, Homo sapien
ccttactgagtttgggtatcttttc

SEQ ID NO: 22620 - DNA, 25 bp, Homo sapien
ttcctgatccaggattacatccagg

SEQ ID NO: 22621 - DNA, 25 bp, Homo sapien
tgcccatgcttgagagcagtggtac

SEQ ID NO: 22622 - DNA, 25 bp, Homo sapien
tgttaggaataccaaaatgtcatat

SEQ ID NO: 22623 - DNA, 25 bp, Homo sapien
gaagtctgtgcctcgtttgggttta

SEQ ID NO: 22624 - DNA, 25 bp, Homo sapien
ctgggattactggtatgagccggat

SEQ ID NO: 22625 - DNA, 25 bp, Homo sapien
tctttcatttgaagtctgtgcctcg

SEQ ID NO: 22626 - DNA, 25 bp, Homo sapien
tggtatgagccggatttgatttctt

SEQ ID NO: 22627 - DNA, 25 bp, Homo sapien
catctccagatgaaagtccgggctc

SEQ ID NO: 22628 - DNA, 25 bp, Homo sapien
gagtgtgtaattagcaaaggcgcca

SEQ ID NO: 22629 - DNA, 25 bp, Homo sapien
tccaccgggctatgcgaacagaatc

SEQ ID NO: 22630 - DNA, 25 bp, Homo sapien
cagcgcaggaatgtggtatttccct

SEQ ID NO: 22631 - DNA, 25 bp, Homo sapien
tctgggtaaatttcaggagggccta

SEQ ID NO: 22632 - DNA, 25 bp, Homo sapien
tccgggctctaggacttctgtagac

SEQ ID NO: 22633 - DNA, 25 bp, Homo sapien
ttctgtagactgtgaaagcagccca

SEQ ID NO: 22634 - DNA, 25 bp, Homo sapien
ggtcggcattaaaggaatacgcaaa

SEQ ID NO: 22635 - DNA, 25 bp, Homo sapien
aagccggatggaaccctgttgtctt

SEQ ID NO: 22636 - DNA, 25 bp, Homo sapien
ccagaggccataagacggtagaata

SEQ ID NO: 22637 - DNA, 25 bp, Homo sapien
acagaatcctgcgaaggtcggcatt

SEQ ID NO: 22638 - DNA, 25 bp, Homo sapien
gtaaacatgcgtggtgaggagttca

SEQ ID NO: 22639 - DNA, 25 bp, Homo sapien
ttactgtgaagagattgttaactcc

SEQ ID NO: 22640 - DNA, 25 bp, Homo sapien
attttcaaaagtttacagaccagga

SEQ ID NO: 22641 - DNA, 25 bp, Homo sapien
aattgcagggtagtgtcttgtttgt

SEQ ID NO: 22642 - DNA, 25 bp, Homo sapien
cttggaataagagaaatactgtccc

SEQ ID NO: 22643 - DNA, 25 bp, Homo sapien
ggggcaccaaatattctgtcctctt

SEQ ID NO: 22644 - DNA, 25 bp, Homo sapien
ccatgagaaagaaggcttggtatca

SEQ ID NO: 22645 - DNA, 25 bp, Homo sapien
ggtgagtatctttggagaggtatct

SEQ ID NO: 22646 - DNA, 25 bp, Homo sapien
agaaaggcagaaatgcaaatattat

SEQ ID NO: 22647 - DNA, 25 bp, Homo sapien
tggtatcagggcatatggtaaacat

SEQ ID NO: 22648 - DNA, 25 bp, Homo sapien
gagctgctagacactgagaataaaa

SEQ ID NO: 22649 - DNA, 25 bp, Homo sapien
aagccacccaatgagtcagggaatt

SEQ ID NO: 22650 - DNA, 25 bp, Homo sapien
acccaagtgccaagtacagtgttat

SEQ ID NO: 22651 - DNA, 25 bp, Homo sapien
tgcgcccggccctacaattttctta

SEQ ID NO: 22652 - DNA, 25 bp, Homo sapien
agaatggtacatgcttcccagagga

SEQ ID NO: 22653 - DNA, 25 bp, Homo sapien
tgtgaaataagagcaagaatggtac

SEQ ID NO: 22654 - DNA, 25 bp, Homo sapien
gaacagagccaaaattttgaagtct

SEQ ID NO: 22655 - DNA, 25 bp, Homo sapien
aagtgcttggcatatgatttgacac

SEQ ID NO: 22656 - DNA, 25 bp, Homo sapien
agtcagggaattttgaacagagcca

SEQ ID NO: 22657 - DNA, 25 bp, Homo sapien
gaggatgcagagttacagcttgtaa

SEQ ID NO: 22658 - DNA, 25 bp, Homo sapien
gcttcccagaggatgcagagttaca

SEQ ID NO: 22659 - DNA, 25 bp, Homo sapien
tcttgcaggatagtggatttaaatc

SEQ ID NO: 22660 - DNA, 25 bp, Homo sapien
aacagtaccaacatcccagagtttc

SEQ ID NO: 22661 - DNA, 25 bp, Homo sapien
tagttgggaacacagacttcacagg

SEQ ID NO: 22662 - DNA, 25 bp, Homo sapien
atggagatatgtaggagacacaaat

SEQ ID NO: 22663 - DNA, 25 bp, Homo sapien
catataaaacacagcattgcagcac

SEQ ID NO: 22664 - DNA, 25 bp, Homo sapien
gcattgcagcacgtgcctggcactt

SEQ ID NO: 22665 - DNA, 25 bp, Homo sapien
aaaagatgaccaggtgccttgtctt

SEQ ID NO: 22666 - DNA, 25 bp, Homo sapien
ttagtcaatgctcgtcgtaaccttg

SEQ ID NO: 22667 - DNA, 25 bp, Homo sapien
tttgtagctgtaagagggaaaagat

SEQ ID NO: 22668 - DNA, 25 bp, Homo sapien
gagggcgcctcagttcaatcctagc

SEQ ID NO: 22669 - DNA, 25 bp, Homo sapien
gccttgtcttaaagaggacagtcct

SEQ ID NO: 22670 - DNA, 25 bp, Homo sapien
cccagagtttctgtgaagttgagcc

SEQ ID NO: 22671 - DNA, 25 bp, Homo sapien
tatcctctaggtcagtggttttccc

SEQ ID NO: 22672 - DNA, 25 bp, Homo sapien
ttagcgaagccaaaactccctctct

SEQ ID NO: 22673 - DNA, 25 bp, Homo sapien
gagtgagtcactttccaggagtccc

SEQ ID NO: 22674 - DNA, 25 bp, Homo sapien
tgacatcaagcttcaagagacaatt

SEQ ID NO: 22675 - DNA, 25 bp, Homo sapien
tccctaggagacatctggtaatgcc

SEQ ID NO: 22676 - DNA, 25 bp, Homo sapien
gtccatggataaatgtgtgtaaccc

SEQ ID NO: 22677 - DNA, 25 bp, Homo sapien
ttccacaaagcagttgagtgagtca

SEQ ID NO: 22678 - DNA, 25 bp, Homo sapien
ggaaagacaaggctatccttccaca

SEQ ID NO: 22679 - DNA, 25 bp, Homo sapien
tacaggttttgaagattgcaacaac

SEQ ID NO: 22680 - DNA, 25 bp, Homo sapien
ttgtcactacttgtcggaagagggt

SEQ ID NO: 22681 - DNA, 25 bp, Homo sapien
cctctctcggctgcactgggaatgt

SEQ ID NO: 22682 - DNA, 25 bp, Homo sapien
gagcatgacaagtcccatcagcatt

SEQ ID NO: 22683 - DNA, 25 bp, Homo sapien
catctagcatatggcaggtcctgtc

SEQ ID NO: 22684 - DNA, 25 bp, Homo sapien
actgctacattgaccaagtagttcc

SEQ ID NO: 22685 - DNA, 25 bp, Homo sapien
ctttgtactaagctggaggaaccag

SEQ ID NO: 22686 - DNA, 25 bp, Homo sapien
cccaggtatgtagagcatgacaagt

SEQ ID NO: 22687 - DNA, 25 bp, Homo sapien
ttatgtgccagatcaaaatgccatc

SEQ ID NO: 22688 - DNA, 25 bp, Homo sapien
ctgtcaacactctgagaaagggaag

SEQ ID NO: 22689 - DNA, 25 bp, Homo sapien
aggaagaagttggaatctgagatat

SEQ ID NO: 22690 - DNA, 25 bp, Homo sapien
acactgaagccattccttgggcatc

SEQ ID NO: 22691 - DNA, 25 bp, Homo sapien
gattatcaaaggctctgtccaatta

SEQ ID NO: 22692 - DNA, 25 bp, Homo sapien
ccctggaaaagttggattatcaaag

SEQ ID NO: 22693 - DNA, 25 bp, Homo sapien
cggttccatcataccggccaggctg

SEQ ID NO: 22694 - DNA, 25 bp, Homo sapien
acggttccatcataccggccaggct

SEQ ID NO: 22695 - DNA, 25 bp, Homo sapien
ccagcctccactaaacttctgttgt

SEQ ID NO: 22696 - DNA, 25 bp, Homo sapien
cagcctcctgtacaactgagaccac

SEQ ID NO: 22697 - DNA, 25 bp, Homo sapien
acacggttccatcataccggccagg

SEQ ID NO: 22698 - DNA, 25 bp, Homo sapien
cttctgttgtttaactgaaaatcaa

SEQ ID NO: 22699 - DNA, 25 bp, Homo sapien
atgtgatcacatcttactgcaatca

SEQ ID NO: 22700 - DNA, 25 bp, Homo sapien
gagaccacagatgcgtggtgccaca

SEQ ID NO: 22701 - DNA, 25 bp, Homo sapien
tgtaactggatgtgatcacatctta

SEQ ID NO: 22702 - DNA, 25 bp, Homo sapien
tcgccatgttagcccagccggtctc

SEQ ID NO: 22703 - DNA, 25 bp, Homo sapien
tgagaccacagatgcgtggtgccac

SEQ ID NO: 22704 - DNA, 25 bp, Homo sapien
tagagacacggttccatcataccgg

SEQ ID NO: 22705 - DNA, 25 bp, Homo sapien
atgtgatcacatcttactgcaatca

SEQ ID NO: 22706 - DNA, 25 bp, Homo sapien
gtctcgccatgttagcccagccggt

SEQ ID NO: 22707 - DNA, 25 bp, Homo sapien
cttctgttgtttaactgaaaatcaa

SEQ ID NO: 22708 - DNA, 25 bp, Homo sapien
cggttccatcataccggccaggctg

SEQ ID NO: 22709 - DNA, 25 bp, Homo sapien
cagcctcctgtacaactgagaccac

SEQ ID NO: 22710 - DNA, 25 bp, Homo sapien
aaatgtaactggatgtgatcacatc

SEQ ID NO: 22711 - DNA, 25 bp, Homo sapien
ccagcctccactaaacttctgttgt

SEQ ID NO: 22712 - DNA, 25 bp, Homo sapien
acacggttccatcataccggccagg

SEQ ID NO: 22713 - DNA, 25 bp, Homo sapien
tgagaccacagatgcgtggtgccac

SEQ ID NO: 22714 - DNA, 25 bp, Homo sapien
atcaaatgtaactggatgtgatcac

SEQ ID NO: 22715 - DNA, 25 bp, Homo sapien
aatgtaataatgcacaagaaagaaa

SEQ ID NO: 22716 - DNA, 25 bp, Homo sapien
caacattgtcctggaggtatgagta

SEQ ID NO: 22717 - DNA, 25 bp, Homo sapien
cctatctgcaaaagacaggactttc

SEQ ID NO: 22718 - DNA, 25 bp, Homo sapien
agtcctatggactctacaaagtaac

SEQ ID NO: 22719 - DNA, 25 bp, Homo sapien
catgctaggctaatacaggcagttc

SEQ ID NO: 22720 - DNA, 25 bp, Homo sapien
gtcctggaggtatgagtaaatgtaa

SEQ ID NO: 22721 - DNA, 25 bp, Homo sapien
tacaaagtaactataggcatacctc

SEQ ID NO: 22722 - DNA, 25 bp, Homo sapien
aaatggtagtgggtaatcagaagtt

SEQ ID NO: 22723 - DNA, 25 bp, Homo sapien
cccactgctaaatttgactggttta

SEQ ID NO: 22724 - DNA, 25 bp, Homo sapien
aaagaaagtaaaacggcctatctgc

SEQ ID NO: 22725 - DNA, 25 bp, Homo sapien
aatcagaagttactaacatagtgtc

SEQ ID NO: 22726 - DNA, 25 bp, Homo sapien
cactatggaggcaaaatgaccttta

SEQ ID NO: 22727 - DNA, 25 bp, Homo sapien
ggggcaatactcttttgaagattct

SEQ ID NO: 22728 - DNA, 25 bp, Homo sapien
tttcccactatggaggcaaaatgac

SEQ ID NO: 22729 - DNA, 25 bp, Homo sapien
ttttaggcaggataagagcagctat

SEQ ID NO: 22730 - DNA, 25 bp, Homo sapien
aacatctctctccagaatggcacat

SEQ ID NO: 22731 - DNA, 25 bp, Homo sapien
attctaagccagtgatctcccacag

SEQ ID NO: 22732 - DNA, 25 bp, Homo sapien
agaatggcacatttgttacagttga

SEQ ID NO: 22733 - DNA, 25 bp, Homo sapien
ctcccacagatttggcaccagggac

SEQ ID NO: 22734 - DNA, 25 bp, Homo sapien
ataagagcagctattagtcaactgc

SEQ ID NO: 22735 - DNA, 25 bp, Homo sapien
ttttgaagattctaagccagtgatc

SEQ ID NO: 22736 - DNA, 25 bp, Homo sapien
gttgatgaacttacattgacatgtc

SEQ ID NO: 22737 - DNA, 25 bp, Homo sapien
acaccacttgggtcctctagggaca

SEQ ID NO: 22738 - DNA, 25 bp, Homo sapien
aaaccaacagggaaaggacgcagta

SEQ ID NO: 22739 - DNA, 25 bp, Homo sapien
acgcagtagaaattaggtaagagtc

SEQ ID NO: 22740 - DNA, 25 bp, Homo sapien
agagacagtttattccagcacaagg

SEQ ID NO: 22741 - DNA, 25 bp, Homo sapien
ctagggacatgtgttaatcactgac

SEQ ID NO: 22742 - DNA, 25 bp, Homo sapien
tgaaagtgggaagaatgataataaa

SEQ ID NO: 22743 - DNA, 25 bp, Homo sapien
ttcctaaaggcttcagaggagaaag

SEQ ID NO: 22744 - DNA, 25 bp, Homo sapien
tatcatgtaggttggaaaatcactt

SEQ ID NO: 22745 - DNA, 25 bp, Homo sapien
gtttcttagacaatcacaggttccc

SEQ ID NO: 22746 - DNA, 25 bp, Homo sapien
ttaggaagatcatggtgaaaaaccc

SEQ ID NO: 22747 - DNA, 25 bp, Homo sapien
aactaccaagcacatacaagaccgc

SEQ ID NO: 22748 - DNA, 25 bp, Homo sapien
gactacaggcatgactacaggcatt

SEQ ID NO: 22749 - DNA, 25 bp, Homo sapien
atagtgcactgcagtgttgatctcc

SEQ ID NO: 22750 - DNA, 25 bp, Homo sapien
ggcatgactacaggcattcctggct

SEQ ID NO: 22751 - DNA, 25 bp, Homo sapien
tctctatgttgctctagcctgtgca

SEQ ID NO: 22752 - DNA, 25 bp, Homo sapien
aatctcagctctaaaattcacaggc

SEQ ID NO: 22753 - DNA, 25 bp, Homo sapien
ctacaggcatgactacaggcattcc

SEQ ID NO: 22754 - DNA, 25 bp, Homo sapien
ctgtgcaacagggaaatctcagctc

SEQ ID NO: 22755 - DNA, 25 bp, Homo sapien
gtgcaacagggaaatctcagctcta

SEQ ID NO: 22756 - DNA, 25 bp, Homo sapien
tatcagccctgtattctgcaacctt

SEQ ID NO: 22757 - DNA, 25 bp, Homo sapien
gtgaattttcctatatcagccctgt

SEQ ID NO: 22758 - DNA, 25 bp, Homo sapien
tagcctgtgcaacagggaaatctca

SEQ ID NO: 22759 - DNA, 25 bp, Homo sapien
ctgtccctctggaattacgagattt

SEQ ID NO: 22760 - DNA, 25 bp, Homo sapien
ctttgctttgggatacatgttgtca

SEQ ID NO: 22761 - DNA, 25 bp, Homo sapien
tggtacactgagtctgcagaccatc

SEQ ID NO: 22762 - DNA, 25 bp, Homo sapien
tacgagatttatatgcacagtttgc

SEQ ID NO: 22763 - DNA, 25 bp, Homo sapien
tctaatgacgagctctgaggaatcc

SEQ ID NO: 22764 - DNA, 25 bp, Homo sapien
tcacaggctgaccatcaggataact

SEQ ID NO: 22765 - DNA, 25 bp, Homo sapien
gaggttgacctaaattcgctgaaga

SEQ ID NO: 22766 - DNA, 25 bp, Homo sapien
atcaggataactcccaggaacatga

SEQ ID NO: 22767 - DNA, 25 bp, Homo sapien
tcgaatctgaaaagctcacaggctg

SEQ ID NO: 22768 - DNA, 25 bp, Homo sapien
ccatttgatggagagaatctgtccc

SEQ ID NO: 22769 - DNA, 25 bp, Homo sapien
tctgcagaccatccagaaggatcct

SEQ ID NO: 22770 - DNA, 25 bp, Homo sapien
cctggagaagcactgcagcagagca

SEQ ID NO: 22771 - DNA, 25 bp, Homo sapien
caaagggaaagacatctccagtctc

SEQ ID NO: 22772 - DNA, 25 bp, Homo sapien
agtagctaggctacaggtgtccacc

SEQ ID NO: 22773 - DNA, 25 bp, Homo sapien
aattagggattacctgggtgttgta

SEQ ID NO: 22774 - DNA, 25 bp, Homo sapien
aaaagacaatgggtgtacaacctat

SEQ ID NO: 22775 - DNA, 25 bp, Homo sapien
cctgggtgttgtagaaaacaagaga

SEQ ID NO: 22776 - DNA, 25 bp, Homo sapien
caggcaaatgtgaagggcttggaaa

SEQ ID NO: 22777 - DNA, 25 bp, Homo sapien
gtctctctaggaattagggattacc

SEQ ID NO: 22778 - DNA, 25 bp, Homo sapien
gcccagagtgtgcatgtctaacaag

SEQ ID NO: 22779 - DNA, 25 bp, Homo sapien
gaagggcttggaaaatgatccatca

SEQ ID NO: 22780 - DNA, 25 bp, Homo sapien
atgatccatcaactttggggacctc

SEQ ID NO: 22781 - DNA, 25 bp, Homo sapien
agttaggcacttaggtctccttatg

SEQ ID NO: 22782 - DNA, 25 bp, Homo sapien
ataatgagccgtgaggacaatcaga

SEQ ID NO: 22783 - DNA, 25 bp, Homo sapien
aaaagggggggctctgatccagacc

SEQ ID NO: 22784 - DNA, 25 bp, Homo sapien
attggcatataatgagccgtgagga

SEQ ID NO: 22785 - DNA, 25 bp, Homo sapien
atataatgagccgtgaggacaatca

SEQ ID NO: 22786 - DNA, 25 bp, Homo sapien
cttaggtctccttatgttggccagg

SEQ ID NO: 22787 - DNA, 25 bp, Homo sapien
taggcacttaggtctccttatgttg

SEQ ID NO: 22788 - DNA, 25 bp, Homo sapien
ccgcctctgtctttcccacaaagtg

SEQ ID NO: 22789 - DNA, 25 bp, Homo sapien
attctaattggcatataatgagccg

SEQ ID NO: 22790 - DNA, 25 bp, Homo sapien
aagtgctggtgttactggaaaaggg

SEQ ID NO: 22791 - DNA, 25 bp, Homo sapien
ctaattggcatataatgagccgtga

SEQ ID NO: 22792 - DNA, 25 bp, Homo sapien
ctctatgtttgcctctctctctatt

SEQ ID NO: 22793 - DNA, 25 bp, Homo sapien
ccaccgggcactgtgatcatgatgc

SEQ ID NO: 22794 - DNA, 25 bp, Homo sapien
atcatgatgccggtaagaaggagat

SEQ ID NO: 22795 - DNA, 25 bp, Homo sapien
atccgaggcccaccgggcactgtga

SEQ ID NO: 22796 - DNA, 25 bp, Homo sapien
catctctgtctgtctttcactggct

SEQ ID NO: 22797 - DNA, 25 bp, Homo sapien
gcccaccgggcactgtgatcatgat

SEQ ID NO: 22798 - DNA, 25 bp, Homo sapien
tctgtttgtctctgttccatctctg

SEQ ID NO: 22799 - DNA, 25 bp, Homo sapien
tttctcctgttgtgactctgtctct

SEQ ID NO: 22800 - DNA, 25 bp, Homo sapien
actgtgatcatgatgccggtaagaa

SEQ ID NO: 22801 - DNA, 25 bp, Homo sapien
tgatccctctttgattctgtgtctc

SEQ ID NO: 22802 - DNA, 25 bp, Homo sapien
ttctgactcatccttctgtgcctcc

SEQ ID NO: 22803 - DNA, 25 bp, Homo sapien
tgtttatggtgtaagacaagggtct

SEQ ID NO: 22804 - DNA, 25 bp, Homo sapien
gcctatgacagggtaataagacagt

SEQ ID NO: 22805 - DNA, 25 bp, Homo sapien
aacatcctgaggaagaatgggactt

SEQ ID NO: 22806 - DNA, 25 bp, Homo sapien
cttaagggacatgataagggagcca

SEQ ID NO: 22807 - DNA, 25 bp, Homo sapien
cttccatttggggtgggcctatgac

SEQ ID NO: 22808 - DNA, 25 bp, Homo sapien
ttaaggtggttgatggtaacactat

SEQ ID NO: 22809 - DNA, 25 bp, Homo sapien
ataagacagtagtgaatatcaagct

SEQ ID NO: 22810 - DNA, 25 bp, Homo sapien
gagccagaagcaccttaagggacat

SEQ ID NO: 22811 - DNA, 25 bp, Homo sapien
taagcccagtccttccaaagcagac

SEQ ID NO: 22812 - DNA, 25 bp, Homo sapien
ctatgctaataactgcagagccaga

SEQ ID NO: 22813 - DNA, 25 bp, Homo sapien
gggagccagcagacctctgatctct

SEQ ID NO: 22814 - DNA, 25 bp, Homo sapien
tgataagcaaaagtccacatgtagg

SEQ ID NO: 22815 - DNA, 25 bp, Homo sapien
ttcagtgtcagctggtatggaccat

SEQ ID NO: 22816 - DNA, 25 bp, Homo sapien
atctgaggaagaagtctgcagtttt

SEQ ID NO: 22817 - DNA, 25 bp, Homo sapien
tatggaccatagttggctcagattt

SEQ ID NO: 22818 - DNA, 25 bp, Homo sapien
ttacttcattgagaggaacttcttc

SEQ ID NO: 22819 - DNA, 25 bp, Homo sapien
ggcaacactccacaaagctacaaat

SEQ ID NO: 22820 - DNA, 25 bp, Homo sapien
ctgctctagagcgtatgcctaagtt

SEQ ID NO: 22821 - DNA, 25 bp, Homo sapien
tggtggtggcctatcagtttcattc

SEQ ID NO: 22822 - DNA, 25 bp, Homo sapien
attcaggtagaatattggtggtggc

SEQ ID NO: 22823 - DNA, 25 bp, Homo sapien
aactccaggttagctcatcaaactc

SEQ ID NO: 22824 - DNA, 25 bp, Homo sapien
gaaagtaacatctctggcaacactc

SEQ ID NO: 22825 - DNA, 25 bp, Homo sapien
agacaattagaatgaatgtggatac

SEQ ID NO: 22826 - DNA, 25 bp, Homo sapien
ccctgggaactctaaatcaatgaca

SEQ ID NO: 22827 - DNA, 25 bp, Homo sapien
ttgctagttacaaagatatgttact

SEQ ID NO: 22828 - DNA, 25 bp, Homo sapien
acaggatggcacaacttgagaaaat

SEQ ID NO: 22829 - DNA, 25 bp, Homo sapien
acatgtgtatattaaaatctgagtc

SEQ ID NO: 22830 - DNA, 25 bp, Homo sapien
actctgacttaaaatacaggatggc

SEQ ID NO: 22831 - DNA, 25 bp, Homo sapien
ttatccttaaatgaaacagctgttt

SEQ ID NO: 22832 - DNA, 25 bp, Homo sapien
tcaatgacagatgactttgtccttc

SEQ ID NO: 22833 - DNA, 25 bp, Homo sapien
actttgtccttcataaggagcagat

SEQ ID NO: 22834 - DNA, 25 bp, Homo sapien
catattgagagctaagtgacatttt

SEQ ID NO: 22835 - DNA, 25 bp, Homo sapien
ccaatcttaagaaaggaagacaatt

SEQ ID NO: 22836 - DNA, 25 bp, Homo sapien
tctaaatccattaggcaacatgatc

SEQ ID NO: 22837 - DNA, 25 bp, Homo sapien
aaattaaagtagttcctaaagatgc

SEQ ID NO: 22838 - DNA, 25 bp, Homo sapien
cattgagatgtaaatagattgcttc

SEQ ID NO: 22839 - DNA, 25 bp, Homo sapien
agatgcttctttgggttttctgctt

SEQ ID NO: 22840 - DNA, 25 bp, Homo sapien
atttgctatcctaagtgactggaag

SEQ ID NO: 22841 - DNA, 25 bp, Homo sapien
ctaaattaatgagacttacagtatc

SEQ ID NO: 22842 - DNA, 25 bp, Homo sapien
ttaaagtagttcctaaagatgcttc

SEQ ID NO: 22843 - DNA, 25 bp, Homo sapien
agtgactggaagaaaactaagtaaa

SEQ ID NO: 22844 - DNA, 25 bp, Homo sapien
tttcattgagatgtaaatagattgc

SEQ ID NO: 22845 - DNA, 25 bp, Homo sapien
atccattaggcaacatgatctgatt

SEQ ID NO: 22846 - DNA, 25 bp, Homo sapien
taagtaaattagtagtaggttcata

SEQ ID NO: 22847 - DNA, 25 bp, Homo sapien
tatatttagcctgagagtctgcgcc

SEQ ID NO: 22848 - DNA, 25 bp, Homo sapien
atttagtcctcaaacaactccatgt

SEQ ID NO: 22849 - DNA, 25 bp, Homo sapien
cagctaccaaggagccctcactaag

SEQ ID NO: 22850 - DNA, 25 bp, Homo sapien
aaggagccctcactaagtattagaa

SEQ ID NO: 22851 - DNA, 25 bp, Homo sapien
agtattagaaaccaagcctgaacta

SEQ ID NO: 22852 - DNA, 25 bp, Homo sapien
gagagtctgcgcctgtgtttattca

SEQ ID NO: 22853 - DNA, 25 bp, Homo sapien
aacctctgccctctacaaactgtag

SEQ ID NO: 22854 - DNA, 25 bp, Homo sapien
tcacacttgccaggctatatttagc

SEQ ID NO: 22855 - DNA, 25 bp, Homo sapien
gaaaccaagcctgaactatcacatt

SEQ ID NO: 22856 - DNA, 25 bp, Homo sapien
gcaccagcagaggtgactcagggaa

SEQ ID NO: 22857 - DNA, 25 bp, Homo sapien
agccaaggatttgaactctctgttc

SEQ ID NO: 22858 - DNA, 25 bp, Homo sapien
taataagagctatatctgttaagta

SEQ ID NO: 22859 - DNA, 25 bp, Homo sapien
gcgcccagcccgaagtataatgttt

SEQ ID NO: 22860 - DNA, 25 bp, Homo sapien
gcccagcccgaagtataatgtttaa

SEQ ID NO: 22861 - DNA, 25 bp, Homo sapien
tccactgatgtaataataagagcta

SEQ ID NO: 22862 - DNA, 25 bp, Homo sapien
taactagattctccactgatgtaat

SEQ ID NO: 22863 - DNA, 25 bp, Homo sapien
attctggataataactagattctcc

SEQ ID NO: 22864 - DNA, 25 bp, Homo sapien
aagaaatgagtactatccatgaatg

SEQ ID NO: 22865 - DNA, 25 bp, Homo sapien
atgagtactatccatgaatgctatt

SEQ ID NO: 22866 - DNA, 25 bp, Homo sapien
aaccagatgctttttccatgccaat

SEQ ID NO: 22867 - DNA, 25 bp, Homo sapien
tcaataaccagatgctttttccatg

SEQ ID NO: 22868 - DNA, 25 bp, Homo sapien
tctccactgatgtaataataagagc

SEQ ID NO: 22869 - DNA, 25 bp, Homo sapien
aaccagatgctttttccatgccaat

SEQ ID NO: 22870 - DNA, 25 bp, Homo sapien
taataagagctatatctgttaagta

SEQ ID NO: 22871 - DNA, 25 bp, Homo sapien
ataaaaatgaaggactcccaggctg

SEQ ID NO: 22872 - DNA, 25 bp, Homo sapien
tattcctcagggagtatgtcaaaca

SEQ ID NO: 22873 - DNA, 25 bp, Homo sapien
tccactgatgtaataataagagcta

SEQ ID NO: 22874 - DNA, 25 bp, Homo sapien
gcccagcccgaagtataatgtttaa

SEQ ID NO: 22875 - DNA, 25 bp, Homo sapien
aagaaatgagtactatccatgaatg

SEQ ID NO: 22876 - DNA, 25 bp, Homo sapien
atgagtactatccatgaatgctatt

SEQ ID NO: 22877 - DNA, 25 bp, Homo sapien
attctggataataactagattctcc

SEQ ID NO: 22878 - DNA, 25 bp, Homo sapien
gcgcccagcccgaagtataatgttt

SEQ ID NO: 22879 - DNA, 25 bp, Homo sapien
taactagattctccactgatgtaat

SEQ ID NO: 22880 - DNA, 25 bp, Homo sapien
tgagaaaactgatagcacaagtagc

SEQ ID NO: 22881 - DNA, 25 bp, Homo sapien
gaagaaaggcgcctgaatctcttta

SEQ ID NO: 22882 - DNA, 25 bp, Homo sapien
atgtaacaggactgtaaacgctggt

SEQ ID NO: 22883 - DNA, 25 bp, Homo sapien
gcagtgggtgattatgcaattggta

SEQ ID NO: 22884 - DNA, 25 bp, Homo sapien
acatagcttccaagggcacagtgct

SEQ ID NO: 22885 - DNA, 25 bp, Homo sapien
ggcacagtgctgaacatataataac

SEQ ID NO: 22886 - DNA, 25 bp, Homo sapien
ttgcacccaagaaagtagaagaaag

SEQ ID NO: 22887 - DNA, 25 bp, Homo sapien
cacaagtagcttgccaaagatcaca

SEQ ID NO: 22888 - DNA, 25 bp, Homo sapien
tcatgagagatggagagtattcaat

SEQ ID NO: 22889 - DNA, 25 bp, Homo sapien
aacgaaggaagttctaggatcatga

SEQ ID NO: 22890 - DNA, 25 bp, Homo sapien
agggaatgaaaaggcctttgcaccc

SEQ ID NO: 22891 - DNA, 25 bp, Homo sapien
ttcttgaattgattttgaattatac

SEQ ID NO: 22892 - DNA, 25 bp, Homo sapien
gtagagtcagggcttcaccatttga

SEQ ID NO: 22893 - DNA, 25 bp, Homo sapien
ttactagtttgaatgaggtaccatt

SEQ ID NO: 22894 - DNA, 25 bp, Homo sapien
actagtttgaatgaggtaccattcc

SEQ ID NO: 22895 - DNA, 25 bp, Homo sapien
gagtcagggcttcaccatttgacca

SEQ ID NO: 22896 - DNA, 25 bp, Homo sapien
agagtcagggcttcaccatttgacc

SEQ ID NO: 22897 - DNA, 25 bp, Homo sapien
cgagtcgctggcatcacaggcacgt

SEQ ID NO: 22898 - DNA, 25 bp, Homo sapien
ctagtttgaatgaggtaccattcct

SEQ ID NO: 22899 - DNA, 25 bp, Homo sapien
tagagtcagggcttcaccatttgac

SEQ ID NO: 22900 - DNA, 25 bp, Homo sapien
tactagtttgaatgaggtaccattc

SEQ ID NO: 22901 - DNA, 25 bp, Homo sapien
tagtttgaatgaggtaccattcctg

SEQ ID NO: 22902 - DNA, 25 bp, Homo sapien
agagtgcgatttccgcctcctgggt

SEQ ID NO: 22903 - DNA, 25 bp, Homo sapien
gagaaacattatagaagagggccca

SEQ ID NO: 22904 - DNA, 25 bp, Homo sapien
aaacattatagaagagggcccacag

SEQ ID NO: 22905 - DNA, 25 bp, Homo sapien
gaagatatagccagctgcagtgtct

SEQ ID NO: 22906 - DNA, 25 bp, Homo sapien
aagtggagaaacattatagaagagg

SEQ ID NO: 22907 - DNA, 25 bp, Homo sapien
cctgagcccatgagatttaggctgc

SEQ ID NO: 22908 - DNA, 25 bp, Homo sapien
cccgggctagagtgcgatttccgcc

SEQ ID NO: 22909 - DNA, 25 bp, Homo sapien
gcgcctggctgcaaatcatgtttaa

SEQ ID NO: 22910 - DNA, 25 bp, Homo sapien
taaatttgaagatatagccagctgc

SEQ ID NO: 22911 - DNA, 25 bp, Homo sapien
accgcgcctggctgcaaatcatgtt

SEQ ID NO: 22912 - DNA, 25 bp, Homo sapien
tcacctgagcccatgagatttaggc

SEQ ID NO: 22913 - DNA, 25 bp, Homo sapien
aactgttaccaaagtggtatatacc

SEQ ID NO: 22914 - DNA, 25 bp, Homo sapien
tttcactgctgcatagtaatccatg

SEQ ID NO: 22915 - DNA, 25 bp, Homo sapien
cctagtaaacatgtgtaatagtttc

SEQ ID NO: 22916 - DNA, 25 bp, Homo sapien
tgaacagtgctgtcacaaatactcc

SEQ ID NO: 22917 - DNA, 25 bp, Homo sapien
ctgcatagtaatccatggtaggaat

SEQ ID NO: 22918 - DNA, 25 bp, Homo sapien
ctcctgtatatgtatcctagtaaac

SEQ ID NO: 22919 - DNA, 25 bp, Homo sapien
ccatggtaggaatataccagacttc

SEQ ID NO: 22920 - DNA, 25 bp, Homo sapien
tcagtgtatgccttggtgcatccat

SEQ ID NO: 22921 - DNA, 25 bp, Homo sapien
ataccagacttcaatgatccactct

SEQ ID NO: 22922 - DNA, 25 bp, Homo sapien
ttattaggtactgaccaactgttac

SEQ ID NO: 22923 - DNA, 25 bp, Homo sapien
atccttttgttcagtgtatgccttg

SEQ ID NO: 22924 - DNA, 25 bp, Homo sapien
ttcagaagaagattcaggctcagaa

SEQ ID NO: 22925 - DNA, 25 bp, Homo sapien
cctgaaactttctactggacaaatt

SEQ ID NO: 22926 - DNA, 25 bp, Homo sapien
ctgtactgcaggtagagttatcttc

SEQ ID NO: 22927 - DNA, 25 bp, Homo sapien
ccacattagatgattcataggatgc

SEQ ID NO: 22928 - DNA, 25 bp, Homo sapien
agagctggtaagttatctgtactgc

SEQ ID NO: 22929 - DNA, 25 bp, Homo sapien
tatcttctgtgctgttaaagctttc

SEQ ID NO: 22930 - DNA, 25 bp, Homo sapien
tctagaacatcttgtgcactaaaaa

SEQ ID NO: 22931 - DNA, 25 bp, Homo sapien
ttctagcatccatttctccaggcac

SEQ ID NO: 22932 - DNA, 25 bp, Homo sapien
gattcaggcaaagttttggagacat

SEQ ID NO: 22933 - DNA, 25 bp, Homo sapien
atgtcttgtcttagtagagctggta

SEQ ID NO: 22934 - DNA, 25 bp, Homo sapien
attcataggatgcagaatttgtgtc

SEQ ID NO: 22935 - DNA, 25 bp, Homo sapien
ttataaagtggaccagtacagaggg

SEQ ID NO: 22936 - DNA, 25 bp, Homo sapien
agaatatttgctgaccaggttgtcc

SEQ ID NO: 22937 - DNA, 25 bp, Homo sapien
aggttgtcctggtgtctgatactcc

SEQ ID NO: 22938 - DNA, 25 bp, Homo sapien
ttcagaaatacaagtggagaaactt

SEQ ID NO: 22939 - DNA, 25 bp, Homo sapien
tgtggtatggaagccatggcataaa

SEQ ID NO: 22940 - DNA, 25 bp, Homo sapien
taggtgcatgctaagtatgtgttac

SEQ ID NO: 22941 - DNA, 25 bp, Homo sapien
tggagaaacttggaaaacagcatct

SEQ ID NO: 22942 - DNA, 25 bp, Homo sapien
ttctccatcctaaggccgtggcact

SEQ ID NO: 22943 - DNA, 25 bp, Homo sapien
gccatggcataaataagaaaagttg

SEQ ID NO: 22944 - DNA, 25 bp, Homo sapien
tctagtaataactgctgaggacttc

SEQ ID NO: 22945 - DNA, 25 bp, Homo sapien
cttcaagcatagaatgagttccctc

SEQ ID NO: 22946 - DNA, 25 bp, Homo sapien
ttgagcttctggcttcgagtgatct

SEQ ID NO: 22947 - DNA, 25 bp, Homo sapien
ccctaataaagtgaaaactgttggc

SEQ ID NO: 22948 - DNA, 25 bp, Homo sapien
accacatctggcctggaactccaaa

SEQ ID NO: 22949 - DNA, 25 bp, Homo sapien
aatctgaatgacttaggtgtctttt

SEQ ID NO: 22950 - DNA, 25 bp, Homo sapien
tctggcctggaactccaaaatctga

SEQ ID NO: 22951 - DNA, 25 bp, Homo sapien
actactttgggtttgatttgccatc

SEQ ID NO: 22952 - DNA, 25 bp, Homo sapien
tcttgattatttctgctaagggtta

SEQ ID NO: 22953 - DNA, 25 bp, Homo sapien
aactgttggcagtcaatctcaattc

SEQ ID NO: 22954 - DNA, 25 bp, Homo sapien
gtaagcatcataactatctaatttc

SEQ ID NO: 22955 - DNA, 25 bp, Homo sapien
tattctcaaacagccagcttttggc

SEQ ID NO: 22956 - DNA, 25 bp, Homo sapien
atttcagaatgttttcactacccta

SEQ ID NO: 22957 - DNA, 25 bp, Homo sapien
aagcatttatgctgctggagcccat

SEQ ID NO: 22958 - DNA, 25 bp, Homo sapien
ctgctggagcccatggttgcctcta

SEQ ID NO: 22959 - DNA, 25 bp, Homo sapien
gacggtttatctggtgaagaagccc

SEQ ID NO: 22960 - DNA, 25 bp, Homo sapien
cctttgttgcccagggtcatctcca

SEQ ID NO: 22961 - DNA, 25 bp, Homo sapien
atttatgctgctggagcccatggtt

SEQ ID NO: 22962 - DNA, 25 bp, Homo sapien
tgtagatacggggtggctccctttg

SEQ ID NO: 22963 - DNA, 25 bp, Homo sapien
tctagtttctcacctaggcaggagg

SEQ ID NO: 22964 - DNA, 25 bp, Homo sapien
ctgtgcccggctccttatatttttt

SEQ ID NO: 22965 - DNA, 25 bp, Homo sapien
gtttctcacctaggcaggagggccc

SEQ ID NO: 22966 - DNA, 25 bp, Homo sapien
atacggggtggctccctttgttgcc

SEQ ID NO: 22967 - DNA, 25 bp, Homo sapien
agacggtttatctggtgaagaagcc

SEQ ID NO: 22968 - DNA, 25 bp, Homo sapien
ctatgtcttttttgtgcgtgtctat

SEQ ID NO: 22969 - DNA, 25 bp, Homo sapien
agaagccaagctttcaaccactgtt

SEQ ID NO: 22970 - DNA, 25 bp, Homo sapien
ctgcctttaaatgcactgaagatga

SEQ ID NO: 22971 - DNA, 25 bp, Homo sapien
aaccactgttccgtactatgtcttt

SEQ ID NO: 22972 - DNA, 25 bp, Homo sapien
tgactcagaagccaagctttcaacc

SEQ ID NO: 22973 - DNA, 25 bp, Homo sapien
gttctgcctttaaatgcactgaaga

SEQ ID NO: 22974 - DNA, 25 bp, Homo sapien
gttttgttctgcctttaaatgcact

SEQ ID NO: 22975 - DNA, 25 bp, Homo sapien
cagagaattgcttaaacatgggaga

SEQ ID NO: 22976 - DNA, 25 bp, Homo sapien
gtgcgtgtctatgcttatgtttata

SEQ ID NO: 22977 - DNA, 25 bp, Homo sapien
ttttgtgcgtgtctatgcttatgtt

SEQ ID NO: 22978 - DNA, 25 bp, Homo sapien
tctgactcagaagccaagctttcaa

SEQ ID NO: 22979 - DNA, 25 bp, Homo sapien
ctatgtcttttttgtgcgtgtctat

SEQ ID NO: 22980 - DNA, 25 bp, Homo sapien
agaagccaagctttcaaccactgtt

SEQ ID NO: 22981 - DNA, 25 bp, Homo sapien
ctgcctttaaatgcactgaagatga

SEQ ID NO: 22982 - DNA, 25 bp, Homo sapien
tgactcagaagccaagctttcaacc

SEQ ID NO: 22983 - DNA, 25 bp, Homo sapien
gttttgttctgcctttaaatgcact

SEQ ID NO: 22984 - DNA, 25 bp, Homo sapien
cagagaattgcttaaacatgggaga

SEQ ID NO: 22985 - DNA, 25 bp, Homo sapien
gtgcgtgtctatgcttatgtttata

SEQ ID NO: 22986 - DNA, 25 bp, Homo sapien
agtgaagaaaattgtcacagaatgc

SEQ ID NO: 22987 - DNA, 25 bp, Homo sapien
aagaaaattgtcacagaatgcagtc

SEQ ID NO: 22988 - DNA, 25 bp, Homo sapien
aaccactgttccgtactatgtcttt

SEQ ID NO: 22989 - DNA, 25 bp, Homo sapien
tctgactcagaagccaagctttcaa

SEQ ID NO: 22990 - DNA, 25 bp, Homo sapien
agctctgctctgatcagcccaatca

SEQ ID NO: 22991 - DNA, 25 bp, Homo sapien
agcacagctctgctctgatcagccc

SEQ ID NO: 22992 - DNA, 25 bp, Homo sapien
gtcttcttctaggagtctttctcag

SEQ ID NO: 22993 - DNA, 25 bp, Homo sapien
ctaggagtctttctcagaccagcac

SEQ ID NO: 22994 - DNA, 25 bp, Homo sapien
acagctctgctctgatcagcccaat

SEQ ID NO: 22995 - DNA, 25 bp, Homo sapien
ttctaggagtctttctcagaccagc

SEQ ID NO: 22996 - DNA, 25 bp, Homo sapien
gagtctttctcagaccagcacagct

SEQ ID NO: 22997 - DNA, 25 bp, Homo sapien
acacccagccttgagcaacccactt

SEQ ID NO: 22998 - DNA, 25 bp, Homo sapien
ctcagtgtcaccaactgtaaaatgg

SEQ ID NO: 22999 - DNA, 25 bp, Homo sapien
cagccttgagcaacccacttaacct

SEQ ID NO: 23000 - DNA, 25 bp, Homo sapien
aggagtctttctcagaccagcacag

SEQ ID NO: 23001 - DNA, 25 bp, Homo sapien
gtcttcttctaggagtctttctcag

SEQ ID NO: 23002 - DNA, 25 bp, Homo sapien
taggagtctttctcagaccagcaca

SEQ ID NO: 23003 - DNA, 25 bp, Homo sapien
gtcaccaactgtaaaatggggccaa

SEQ ID NO: 23004 - DNA, 25 bp, Homo sapien
agctctgctctgatcagcccaatca

SEQ ID NO: 23005 - DNA, 25 bp, Homo sapien
ccaactgtaaaatggggccaatata

SEQ ID NO: 23006 - DNA, 25 bp, Homo sapien
gagtctttctcagaccagcacagct

SEQ ID NO: 23007 - DNA, 25 bp, Homo sapien
acagctctgctctgatcagcccaat

SEQ ID NO: 23008 - DNA, 25 bp, Homo sapien
ttctaggagtctttctcagaccagc

SEQ ID NO: 23009 - DNA, 25 bp, Homo sapien
acacccagccttgagcaacccactt

SEQ ID NO: 23010 - DNA, 25 bp, Homo sapien
cagccttgagcaacccacttaacct

SEQ ID NO: 23011 - DNA, 25 bp, Homo sapien
cctcagtgtcaccaactgtaaaatg

SEQ ID NO: 23012 - DNA, 25 bp, Homo sapien
ttcttgtgcctaggctgtggagcct

SEQ ID NO: 23013 - DNA, 25 bp, Homo sapien
ataaagggctctggtgtgaagttcc

SEQ ID NO: 23014 - DNA, 25 bp, Homo sapien
ttgccttgggctggccgatgaccat

SEQ ID NO: 23015 - DNA, 25 bp, Homo sapien
tcttgctggtttccttcaaatcatg

SEQ ID NO: 23016 - DNA, 25 bp, Homo sapien
tcgctgacaggccatgataaagggc

SEQ ID NO: 23017 - DNA, 25 bp, Homo sapien
ttttgtagagtctgtgtctcattat

SEQ ID NO: 23018 - DNA, 25 bp, Homo sapien
ctgacaggccatgataaagggctct

SEQ ID NO: 23019 - DNA, 25 bp, Homo sapien
tttgacttcgttcttgtgcctaggc

SEQ ID NO: 23020 - DNA, 25 bp, Homo sapien
tggtgagcagcccttcttgccttgg

SEQ ID NO: 23021 - DNA, 25 bp, Homo sapien
tggagcctggctgatcatgccttga

SEQ ID NO: 23022 - DNA, 25 bp, Homo sapien
ctctggtgtgaagttcctatgtctt

SEQ ID NO: 23023 - DNA, 25 bp, Homo sapien
gcaattagggtcatgatcagggtta

SEQ ID NO: 23024 - DNA, 25 bp, Homo sapien
cttatggtaggttgtcactcaggca

SEQ ID NO: 23025 - DNA, 25 bp, Homo sapien
tcagtccagctcaccttgaaaacct

SEQ ID NO: 23026 - DNA, 25 bp, Homo sapien
gactgcatcaggatctgtgtgctcc

SEQ ID NO: 23027 - DNA, 25 bp, Homo sapien
tttgtcaagtggctcagatctcagg

SEQ ID NO: 23028 - DNA, 25 bp, Homo sapien
ttgacaacctccaccatgagaactg

SEQ ID NO: 23029 - DNA, 25 bp, Homo sapien
tctcagggagcaaaaccatgtgatt

SEQ ID NO: 23030 - DNA, 25 bp, Homo sapien
actgcaccagccaggtccctagagg

SEQ ID NO: 23031 - DNA, 25 bp, Homo sapien
aaacaggcaggtccacattgcattc

SEQ ID NO: 23032 - DNA, 25 bp, Homo sapien
tcactcaggcaagaatgcaggtgtt

SEQ ID NO: 23033 - DNA, 25 bp, Homo sapien
tgttcattccggtgggctcgcttta

SEQ ID NO: 23034 - DNA, 25 bp, Homo sapien
aattgaccacatatataatcgtctg

SEQ ID NO: 23035 - DNA, 25 bp, Homo sapien
ccaaactgatttggttacagtagct

SEQ ID NO: 23036 - DNA, 25 bp, Homo sapien
acttatagagaattgatatcttaac

SEQ ID NO: 23037 - DNA, 25 bp, Homo sapien
gggtcttctgatgcatgaacatgac

SEQ ID NO: 23038 - DNA, 25 bp, Homo sapien
acactgtttgttaagagcactatcc

SEQ ID NO: 23039 - DNA, 25 bp, Homo sapien
acgtagtcaaatgcttgagctttgc

SEQ ID NO: 23040 - DNA, 25 bp, Homo sapien
tggggttacattgagtctatagatc

SEQ ID NO: 23041 - DNA, 25 bp, Homo sapien
atataatcgtctgtatctgggtttc

SEQ ID NO: 23042 - DNA, 25 bp, Homo sapien
tatttgattggggttacattgagtc

SEQ ID NO: 23043 - DNA, 25 bp, Homo sapien
atctgggtttctattgtgtttgact

SEQ ID NO: 23044 - DNA, 25 bp, Homo sapien
gatatcttaacaacattgggtcttc

SEQ ID NO: 23045 - DNA, 25 bp, Homo sapien
atcagacactgaattttgacagttc

SEQ ID NO: 23046 - DNA, 25 bp, Homo sapien
tcgtttatggaaaaatgatacatta

SEQ ID NO: 23047 - DNA, 25 bp, Homo sapien
ctgaagcaaatcctaaccctccatt

SEQ ID NO: 23048 - DNA, 25 bp, Homo sapien
cagtagagctgagtaatttatatcc

SEQ ID NO: 23049 - DNA, 25 bp, Homo sapien
ccttgttaaaactaacgttgctgaa

SEQ ID NO: 23050 - DNA, 25 bp, Homo sapien
ctcctgacctcatggcagtagagct

SEQ ID NO: 23051 - DNA, 25 bp, Homo sapien
cgttgctgaaaatttagtgaagaat

SEQ ID NO: 23052 - DNA, 25 bp, Homo sapien
ttgtagcaaagccaagcctaaattt

SEQ ID NO: 23053 - DNA, 25 bp, Homo sapien
ttatttgtagcaaagccaagcctaa

SEQ ID NO: 23054 - DNA, 25 bp, Homo sapien
aaagataattgtctctaagcccatg

SEQ ID NO: 23055 - DNA, 25 bp, Homo sapien
tcatggcagtagagctgagtaattt

SEQ ID NO: 23056 - DNA, 25 bp, Homo sapien
aggtgaataacccatttgaattgac

SEQ ID NO: 23057 - DNA, 25 bp, Homo sapien
caatctagctgtactttctatggcc

SEQ ID NO: 23058 - DNA, 25 bp, Homo sapien
atatccatcatgttaaatgtttgtc

SEQ ID NO: 23059 - DNA, 25 bp, Homo sapien
gatacattcatgtgatttgtaaaga

SEQ ID NO: 23060 - DNA, 25 bp, Homo sapien
aatgaatactatcttgttagtgctc

SEQ ID NO: 23061 - DNA, 25 bp, Homo sapien
tagctgtactttctatggcctgatt

SEQ ID NO: 23062 - DNA, 25 bp, Homo sapien
ctcttttcaaaggtgaataacccat

SEQ ID NO: 23063 - DNA, 25 bp, Homo sapien
tggcctgatttttagacactttgtc

SEQ ID NO: 23064 - DNA, 25 bp, Homo sapien
aaactatagtcacctcttttcaaag

SEQ ID NO: 23065 - DNA, 25 bp, Homo sapien
caaaggtgaataacccatttgaatt

SEQ ID NO: 23066 - DNA, 25 bp, Homo sapien
tgatattttgacacaggtatacaat

SEQ ID NO: 23067 - DNA, 25 bp, Homo sapien
ctcctccgcttacagatggggttac

SEQ ID NO: 23068 - DNA, 25 bp, Homo sapien
ttggctttgccatggtacaaacgcc

SEQ ID NO: 23069 - DNA, 25 bp, Homo sapien
ttaacctatgatgggatgatgggga

SEQ ID NO: 23070 - DNA, 25 bp, Homo sapien
cacggtgaggaccttgacttaaacc

SEQ ID NO: 23071 - DNA, 25 bp, Homo sapien
gacccagctgagacgctactacagt

SEQ ID NO: 23072 - DNA, 25 bp, Homo sapien
acggttttcaataggtggtcgcctc

SEQ ID NO: 23073 - DNA, 25 bp, Homo sapien
atgacaggagcatctgtataggaag

SEQ ID NO: 23074 - DNA, 25 bp, Homo sapien
gtcgcctcactaagtgggagtcaca

SEQ ID NO: 23075 - DNA, 25 bp, Homo sapien
ctactacagtcatctcggcgggaaa

SEQ ID NO: 23076 - DNA, 25 bp, Homo sapien
tttccgagatcgctctggctcctgt

SEQ ID NO: 23077 - DNA, 25 bp, Homo sapien
acactggggcatgacctcttgtact

SEQ ID NO: 23078 - DNA, 25 bp, Homo sapien
ccaaggacagtcttaacagaacgat

SEQ ID NO: 23079 - DNA, 25 bp, Homo sapien
atacagctcctgagaaccgccagat

SEQ ID NO: 23080 - DNA, 25 bp, Homo sapien
gactccgtggagattaaatgacaga

SEQ ID NO: 23081 - DNA, 25 bp, Homo sapien
aaaagctgctaccaaccagtgagac

SEQ ID NO: 23082 - DNA, 25 bp, Homo sapien
cagtgagaccatcccgaggtaatac

SEQ ID NO: 23083 - DNA, 25 bp, Homo sapien
tggtctgtagaaaacccagccctaa

SEQ ID NO: 23084 - DNA, 25 bp, Homo sapien
ggacaaacctgggaagcaccttcag

SEQ ID NO: 23085 - DNA, 25 bp, Homo sapien
ttgctgacataatgacccaaggaca

SEQ ID NO: 23086 - DNA, 25 bp, Homo sapien
gtaatggcagcaccgatttcattgc

SEQ ID NO: 23087 - DNA, 25 bp, Homo sapien
cctaacgcaggcacaattaatggtt

SEQ ID NO: 23088 - DNA, 25 bp, Homo sapien
atgacagagggcactcacaacactt

SEQ ID NO: 23089 - DNA, 25 bp, Homo sapien
gaggtaatccacatacaaaacggta

SEQ ID NO: 23090 - DNA, 25 bp, Homo sapien
gatcgttaccatgctatatatatta

SEQ ID NO: 23091 - DNA, 25 bp, Homo sapien
atttgttgagaacccttaagattta

SEQ ID NO: 23092 - DNA, 25 bp, Homo sapien
cacgtataagcgagattatatagta

SEQ ID NO: 23093 - DNA, 25 bp, Homo sapien
tttcctccagattcatccatgacat

SEQ ID NO: 23094 - DNA, 25 bp, Homo sapien
ttcagattccacgtataagcgagat

SEQ ID NO: 23095 - DNA, 25 bp, Homo sapien
tggctgaacaatgttccattgtaat

SEQ ID NO: 23096 - DNA, 25 bp, Homo sapien
tattgaggtaatccacatacaaaac

SEQ ID NO: 23097 - DNA, 25 bp, Homo sapien
gtataattaatgatcgttaccatgc

SEQ ID NO: 23098 - DNA, 25 bp, Homo sapien
ttcatagtaatgtaaggtgatcttt

SEQ ID NO: 23099 - DNA, 25 bp, Homo sapien
taactgaatgtttgtctctttgacc

SEQ ID NO: 23100 - DNA, 25 bp, Homo sapien
attagttaaaaatggacaataaaca

SEQ ID NO: 23101 - DNA, 25 bp, Homo sapien
ttaagctaagtgtgaagtgcagttt

SEQ ID NO: 23102 - DNA, 25 bp, Homo sapien
cattaagctaagtgtgaagtgcagt

SEQ ID NO: 23103 - DNA, 25 bp, Homo sapien
cctcaaacattaagctaagtgtgaa

SEQ ID NO: 23104 - DNA, 25 bp, Homo sapien
atgaagttaattccctcaaacatta

SEQ ID NO: 23105 - DNA, 25 bp, Homo sapien
aaacattaagctaagtgtgaagtgc

SEQ ID NO: 23106 - DNA, 25 bp, Homo sapien
aagctaagtgtgaagtgcagttttt

SEQ ID NO: 23107 - DNA, 25 bp, Homo sapien
gaagtgcagtttttagtaagcttgc

SEQ ID NO: 23108 - DNA, 25 bp, Homo sapien
attccctcaaacattaagctaagtg

SEQ ID NO: 23109 - DNA, 25 bp, Homo sapien
catatgtgtacctgcgccatgttgg

SEQ ID NO: 23110 - DNA, 25 bp, Homo sapien
gttacatatgtgtacctgcgccatg

SEQ ID NO: 23111 - DNA, 25 bp, Homo sapien
ttttaagagttgcatgcaggccagg

SEQ ID NO: 23112 - DNA, 25 bp, Homo sapien
ttgtttttaagagttgcatgcaggc

SEQ ID NO: 23113 - DNA, 25 bp, Homo sapien
tgtttttaagagttgcatgcaggcc

SEQ ID NO: 23114 - DNA, 25 bp, Homo sapien
atatgtgtacctgcgccatgttggg

SEQ ID NO: 23115 - DNA, 25 bp, Homo sapien
attaagctaagtgtgaagtgcagtt

SEQ ID NO: 23116 - DNA, 25 bp, Homo sapien
gtttttaagagttgcatgcaggcca

SEQ ID NO: 23117 - DNA, 25 bp, Homo sapien
attccctcaaacattaagctaagtg

SEQ ID NO: 23118 - DNA, 25 bp, Homo sapien
tttttaagagttgcatgcaggccag

SEQ ID NO: 23119 - DNA, 25 bp, Homo sapien
gaagtgcagtttttagtaagcttgc

SEQ ID NO: 23120 - DNA, 25 bp, Homo sapien
aacttgtcacgtagcattaggtata

SEQ ID NO: 23121 - DNA, 25 bp, Homo sapien
cctgcgccatgttgggtgtgctgca

SEQ ID NO: 23122 - DNA, 25 bp, Homo sapien
aaatggcatatcacacatattcttc

SEQ ID NO: 23123 - DNA, 25 bp, Homo sapien
tttgagagataatcactgtgactag

SEQ ID NO: 23124 - DNA, 25 bp, Homo sapien
aatttatcaaatccactgtgaggct

SEQ ID NO: 23125 - DNA, 25 bp, Homo sapien
gatccgttttttccatgtctatacc

SEQ ID NO: 23126 - DNA, 25 bp, Homo sapien
tgctatataatagaccacaatgtgg

SEQ ID NO: 23127 - DNA, 25 bp, Homo sapien
tttcatgtagactgtcttgggatcc

SEQ ID NO: 23128 - DNA, 25 bp, Homo sapien
tctgtgtatctaagaggtttgtttg

SEQ ID NO: 23129 - DNA, 25 bp, Homo sapien
aggctaaaaactccaaacattacaa

SEQ ID NO: 23130 - DNA, 25 bp, Homo sapien
tgtagactgtcttgggatccgtttt

SEQ ID NO: 23131 - DNA, 25 bp, Homo sapien
aaatccactgtgaggctaaaaactc

SEQ ID NO: 23132 - DNA, 25 bp, Homo sapien
actgtgactagttttctgtgtatct

SEQ ID NO: 23133 - DNA, 25 bp, Homo sapien
ggtcatccgggactaccattagagt

SEQ ID NO: 23134 - DNA, 25 bp, Homo sapien
actctaatggtagtcccggatgacc

SEQ ID NO: 23135 - DNA, 25 bp, Homo sapien
aaatcctcgccaaaacactggaaaa

SEQ ID NO: 23136 - DNA, 25 bp, Homo sapien
gaaagcacaagggatttaaatttga

SEQ ID NO: 23137 - DNA, 25 bp, Homo sapien
aaaagcagaaaaaaccacttaatca

SEQ ID NO: 23138 - DNA, 25 bp, Homo sapien
gccaaaacactggaaaaatgagtct

SEQ ID NO: 23139 - DNA, 25 bp, Homo sapien
taaataggacaaaacattgttcaat

SEQ ID NO: 23140 - DNA, 25 bp, Homo sapien
gattatccatcatcaaccagtggga

SEQ ID NO: 23141 - DNA, 25 bp, Homo sapien
atcatcaaccagtgggattattccc

SEQ ID NO: 23142 - DNA, 25 bp, Homo sapien
gttcaattatgtacaagctgactgc

SEQ ID NO: 23143 - DNA, 25 bp, Homo sapien
gggattattcccagaaatgcaaagt

SEQ ID NO: 23144 - DNA, 25 bp, Homo sapien
aatgtaacccaccatatcaatagtt

SEQ ID NO: 23145 - DNA, 25 bp, Homo sapien
tatgtacaagctgactgcaatactt

SEQ ID NO: 23146 - DNA, 25 bp, Homo sapien
ttggagtcccgcctacccactggga

SEQ ID NO: 23147 - DNA, 25 bp, Homo sapien
actgggacaagccaagggctcaaac

SEQ ID NO: 23148 - DNA, 25 bp, Homo sapien
tgggtccctggacctctgaggaccc

SEQ ID NO: 23149 - DNA, 25 bp, Homo sapien
cttcccacttggagtgccacaggaa

SEQ ID NO: 23150 - DNA, 25 bp, Homo sapien
aggaggaacccgtgcgcctgattcc

SEQ ID NO: 23151 - DNA, 25 bp, Homo sapien
gtgcttctgaagatggctcagcgtc

SEQ ID NO: 23152 - DNA, 25 bp, Homo sapien
cctgcctggtggtcccaatttgaaa

SEQ ID NO: 23153 - DNA, 25 bp, Homo sapien
caggtggacgtgagagctttaccct

SEQ ID NO: 23154 - DNA, 25 bp, Homo sapien
cgcccgcttaggactgagtccgcag

SEQ ID NO: 23155 - DNA, 25 bp, Homo sapien
tgcgcctgattcctgcctggtggtc

SEQ ID NO: 23156 - DNA, 25 bp, Homo sapien
agatctcctcgaagcacccggttct

SEQ ID NO: 23157 - DNA, 25 bp, Homo sapien
tttgtccagagcatcaggaaagcag

SEQ ID NO: 23158 - DNA, 25 bp, Homo sapien
caggaaagcagccagaggaagtccc

SEQ ID NO: 23159 - DNA, 25 bp, Homo sapien
caccctggaacaaaggggaagtggc

SEQ ID NO: 23160 - DNA, 25 bp, Homo sapien
tttcaaaaacttccacccatgtctc

SEQ ID NO: 23161 - DNA, 25 bp, Homo sapien
gaggcaggaaccaaggtgtagccaa

SEQ ID NO: 23162 - DNA, 25 bp, Homo sapien
gagaaaggaatttgtccagagcatc

SEQ ID NO: 23163 - DNA, 25 bp, Homo sapien
ctgtggccaaggagtgaaccttgca

SEQ ID NO: 23164 - DNA, 25 bp, Homo sapien
cccatgtctccgctgaactaaagag

SEQ ID NO: 23165 - DNA, 25 bp, Homo sapien
gaaccttgcatgatttcagccaccc

SEQ ID NO: 23166 - DNA, 25 bp, Homo sapien
ggggccctaagccacactgcagctg

SEQ ID NO: 23167 - DNA, 25 bp, Homo sapien
ccgctgaactaaagagaaaggaatt

SEQ ID NO: 23168 - DNA, 25 bp, Homo sapien
tggtaaatttaccagcaaggccatt

SEQ ID NO: 23169 - DNA, 25 bp, Homo sapien
catccatcagttaggttaaggttta

SEQ ID NO: 23170 - DNA, 25 bp, Homo sapien
aaatgtaaaatgagttgagaggtgt

SEQ ID NO: 23171 - DNA, 25 bp, Homo sapien
taacgggttacaggacgcactgcca

SEQ ID NO: 23172 - DNA, 25 bp, Homo sapien
tatgttcatgagatctgtcgttttc

SEQ ID NO: 23173 - DNA, 25 bp, Homo sapien
agggaagtgctgatgtaaaatgtaa

SEQ ID NO: 23174 - DNA, 25 bp, Homo sapien
gacgcactgccacacgtgactgtct

SEQ ID NO: 23175 - DNA, 25 bp, Homo sapien
tgtagaagctctttaggtggagtac

SEQ ID NO: 23176 - DNA, 25 bp, Homo sapien
ggccatttgatcctagatgtgggaa

SEQ ID NO: 23177 - DNA, 25 bp, Homo sapien
ttaggtggagtacttctacactgat

SEQ ID NO: 23178 - DNA, 25 bp, Homo sapien
atactaatcagtggttgttgcaaac

SEQ ID NO: 23179 - DNA, 25 bp, Homo sapien
aatatgcccaaactggaaaggatcc

SEQ ID NO: 23180 - DNA, 25 bp, Homo sapien
catgggggttaattgactaggaaaa

SEQ ID NO: 23181 - DNA, 25 bp, Homo sapien
aaggaagctttctagagtgatggaa

SEQ ID NO: 23182 - DNA, 25 bp, Homo sapien
actgatacaatcacctggataaatc

SEQ ID NO: 23183 - DNA, 25 bp, Homo sapien
aacctagtttatgggagtagaagtc

SEQ ID NO: 23184 - DNA, 25 bp, Homo sapien
atggataatgatagttgttgcaggg

SEQ ID NO: 23185 - DNA, 25 bp, Homo sapien
gagtgatggaaagacatagatgttt

SEQ ID NO: 23186 - DNA, 25 bp, Homo sapien
gggcttacagcaagtatgggattac

SEQ ID NO: 23187 - DNA, 25 bp, Homo sapien
gatgtttgtgtggtcagtggtttcc

SEQ ID NO: 23188 - DNA, 25 bp, Homo sapien
gaagttcacaaacaagcaaacctag

SEQ ID NO: 23189 - DNA, 25 bp, Homo sapien
ttgttgcagggcttacagcaagtat

SEQ ID NO: 23190 - DNA, 25 bp, Homo sapien
tacagtggagttagggctcaaatcc

SEQ ID NO: 23191 - DNA, 25 bp, Homo sapien
acccggcctgaaactcttgaaagag

SEQ ID NO: 23192 - DNA, 25 bp, Homo sapien
ttgaatcctataacctgctcagttt

SEQ ID NO: 23193 - DNA, 25 bp, Homo sapien
atcagtgattctcaagagtgtggtc

SEQ ID NO: 23194 - DNA, 25 bp, Homo sapien
tctcaagagtgtggtctggtaatgc

SEQ ID NO: 23195 - DNA, 25 bp, Homo sapien
tttgccgcttacagttggcaggctc

SEQ ID NO: 23196 - DNA, 25 bp, Homo sapien
gcttacagttggcaggctcctcttc

SEQ ID NO: 23197 - DNA, 25 bp, Homo sapien
aaataaatggatatcagtgattctc

SEQ ID NO: 23198 - DNA, 25 bp, Homo sapien
tggtctggtaatgccaggggtccct

SEQ ID NO: 23199 - DNA, 25 bp, Homo sapien
aatagccagaaaagtgtacagtgga

SEQ ID NO: 23200 - DNA, 25 bp, Homo sapien
cttagttcaaatagccagaaaagtg

SEQ ID NO: 23201 - DNA, 25 bp, Homo sapien
ttcagaaaatgagagacgagacctg

SEQ ID NO: 23202 - DNA, 25 bp, Homo sapien
cagaacctggacgtgaggctccaca

SEQ ID NO: 23203 - DNA, 25 bp, Homo sapien
tttcatgtacggagacgacatgctt

SEQ ID NO: 23204 - DNA, 25 bp, Homo sapien
cagaggcgaccatggccatcttgga

SEQ ID NO: 23205 - DNA, 25 bp, Homo sapien
gcccggcccgcttcatagagtctta

SEQ ID NO: 23206 - DNA, 25 bp, Homo sapien
ggctccacaggacttgctagttgta

SEQ ID NO: 23207 - DNA, 25 bp, Homo sapien
atggccatcttggagctagttctca

SEQ ID NO: 23208 - DNA, 25 bp, Homo sapien
ggagacgacatgcttgcactcaact

SEQ ID NO: 23209 - DNA, 25 bp, Homo sapien
caggcttactttcatgtacggagac

SEQ ID NO: 23210 - DNA, 25 bp, Homo sapien
acgagacctgagtcttcaggcttac

SEQ ID NO: 23211 - DNA, 25 bp, Homo sapien
gtacttagctacatcctagtccctt

SEQ ID NO: 23212 - DNA, 25 bp, Homo sapien
tggccagaagggactccggatctca

SEQ ID NO: 23213 - DNA, 25 bp, Homo sapien
tcagagagggcacatgcccatttca

SEQ ID NO: 23214 - DNA, 25 bp, Homo sapien
tcccaaaaggagtgccctcagcgct

SEQ ID NO: 23215 - DNA, 25 bp, Homo sapien
ttttctccagacacttccgggccta

SEQ ID NO: 23216 - DNA, 25 bp, Homo sapien
caaacaaagacctaggcctgagcgt

SEQ ID NO: 23217 - DNA, 25 bp, Homo sapien
tcactgggcacaaattgggtgaaag

SEQ ID NO: 23218 - DNA, 25 bp, Homo sapien
ggaaaagctacagaggctcccaaaa

SEQ ID NO: 23219 - DNA, 25 bp, Homo sapien
gaaaatagagacttgggaagccaaa

SEQ ID NO: 23220 - DNA, 25 bp, Homo sapien
atctcagcggaggaaactgtggcca

SEQ ID NO: 23221 - DNA, 25 bp, Homo sapien
cgcctcagaggtatcggtgaccctt

SEQ ID NO: 23222 - DNA, 25 bp, Homo sapien
tgggtgaaagccattattggtcctc

SEQ ID NO: 23223 - DNA, 25 bp, Homo sapien
gttcaggtgggtatcagcctatcca

SEQ ID NO: 23224 - DNA, 25 bp, Homo sapien
ctcttcaggtgtgcacggagcccat

SEQ ID NO: 23225 - DNA, 25 bp, Homo sapien
ctcgtaaaaggagaggaacaagtta

SEQ ID NO: 23226 - DNA, 25 bp, Homo sapien
gtccaggtgtgcattgagcccattc

SEQ ID NO: 23227 - DNA, 25 bp, Homo sapien
ttcgggtctgcatggagcctgttca

SEQ ID NO: 23228 - DNA, 25 bp, Homo sapien
tatccaggtgtacatggagcccgtt

SEQ ID NO: 23229 - DNA, 25 bp, Homo sapien
tccaggtgtgcatggatcctgtcca

SEQ ID NO: 23230 - DNA, 25 bp, Homo sapien
ctccctagggaaagctcagtaaatg

SEQ ID NO: 23231 - DNA, 25 bp, Homo sapien
aggtgtgcatagagcctgttcaagt

SEQ ID NO: 23232 - DNA, 25 bp, Homo sapien
ttcacgccagtgcagagtccttcca

SEQ ID NO: 23233 - DNA, 25 bp, Homo sapien
ccatccaggtgagcatagaccctat

SEQ ID NO: 23234 - DNA, 25 bp, Homo sapien
ttgggaatcaggcaggtgctttttc

SEQ ID NO: 23235 - DNA, 25 bp, Homo sapien
tgtgcagctgtgattcagaatcctg

SEQ ID NO: 23236 - DNA, 25 bp, Homo sapien
cccagagtgtgcagctgtgattcag

SEQ ID NO: 23237 - DNA, 25 bp, Homo sapien
cagtcgtctttactgtgctgcccag

SEQ ID NO: 23238 - DNA, 25 bp, Homo sapien
tcccaagctgggagtcaagtcacct

SEQ ID NO: 23239 - DNA, 25 bp, Homo sapien
cctttccgaagctgtggtcccttgg

SEQ ID NO: 23240 - DNA, 25 bp, Homo sapien
gggtcacacagcagcttagcctcaa

SEQ ID NO: 23241 - DNA, 25 bp, Homo sapien
ttcttcctagaaagccacatggcag

SEQ ID NO: 23242 - DNA, 25 bp, Homo sapien
catcgggcaatgtctccttccactt

SEQ ID NO: 23243 - DNA, 25 bp, Homo sapien
aaactgataccgaaaccagtcgtct

SEQ ID NO: 23244 - DNA, 25 bp, Homo sapien
agatttagcattagacatcgggcaa

SEQ ID NO: 23245 - DNA, 25 bp, Homo sapien
acattgttgtgatagagctgtcacc

SEQ ID NO: 23246 - DNA, 25 bp, Homo sapien
cttcaggatggccacatgacccaag

SEQ ID NO: 23247 - DNA, 25 bp, Homo sapien
ttcaccctcggggatgggcatatga

SEQ ID NO: 23248 - DNA, 25 bp, Homo sapien
tgatagagctgtcaccacagtaccc

SEQ ID NO: 23249 - DNA, 25 bp, Homo sapien
attataggcattatccagcatgttt

SEQ ID NO: 23250 - DNA, 25 bp, Homo sapien
ttttcttcaggatggccacatgacc

SEQ ID NO: 23251 - DNA, 25 bp, Homo sapien
tttggaaacctgtatttcacatctc

SEQ ID NO: 23252 - DNA, 25 bp, Homo sapien
cggggatgggcatatgatcataata

SEQ ID NO: 23253 - DNA, 25 bp, Homo sapien
gcatatgatcataatagcccatttc

SEQ ID NO: 23254 - DNA, 25 bp, Homo sapien
cactgtccattcaccctcggggatg

SEQ ID NO: 23255 - DNA, 25 bp, Homo sapien
tatccagcatgttttttacctaccc

SEQ ID NO: 23256 - DNA, 25 bp, Homo sapien
tctccagtgatctgaacaatggtac

SEQ ID NO: 23257 - DNA, 25 bp, Homo sapien
ttggcacgtactctaaaaacatttg

SEQ ID NO: 23258 - DNA, 25 bp, Homo sapien
tctgaaatgaagttttagttggcct

SEQ ID NO: 23259 - DNA, 25 bp, Homo sapien
atgaatgtactaaacccaatgaacc

SEQ ID NO: 23260 - DNA, 25 bp, Homo sapien
tctctcccactagatagaaagctct

SEQ ID NO: 23261 - DNA, 25 bp, Homo sapien
gctgtaagcctttgcaactactact

SEQ ID NO: 23262 - DNA, 25 bp, Homo sapien
ctggaagcaagatctcatattataa

SEQ ID NO: 23263 - DNA, 25 bp, Homo sapien
caatgaacctcaaagagtctggaag

SEQ ID NO: 23264 - DNA, 25 bp, Homo sapien
aatgtgacctttgccactgaggaca

SEQ ID NO: 23265 - DNA, 25 bp, Homo sapien
cttgtcacaggtctctgctcaatgt

SEQ ID NO: 23266 - DNA, 25 bp, Homo sapien
tctgaacaatggtacttggcacgta

SEQ ID NO: 23267 - DNA, 25 bp, Homo sapien
accatgcctggcagcaatctttatt

SEQ ID NO: 23268 - DNA, 25 bp, Homo sapien
ataatacattcgtgggtaggaacag

SEQ ID NO: 23269 - DNA, 25 bp, Homo sapien
cagggaggactgtttttactccaag

SEQ ID NO: 23270 - DNA, 25 bp, Homo sapien
agcagaaggtcctgaaagaaaatga

SEQ ID NO: 23271 - DNA, 25 bp, Homo sapien
tgagacctggcctgtatgtctactc

SEQ ID NO: 23272 - DNA, 25 bp, Homo sapien
atggcttactgttgcctggacttcc

SEQ ID NO: 23273 - DNA, 25 bp, Homo sapien
ttctaaaggtgttctgatgctttac

SEQ ID NO: 23274 - DNA, 25 bp, Homo sapien
caagaaacagagaggtgctgcttgc

SEQ ID NO: 23275 - DNA, 25 bp, Homo sapien
tggtgggagatgcatacttgtctcc

SEQ ID NO: 23276 - DNA, 25 bp, Homo sapien
gtcttctgattgcataccacctttg

SEQ ID NO: 23277 - DNA, 25 bp, Homo sapien
atgctttacatgtgagacctggcct

SEQ ID NO: 23278 - DNA, 25 bp, Homo sapien
ccacggtgtcaaatgtatatgactc

SEQ ID NO: 23279 - DNA, 25 bp, Homo sapien
tcgctgataggttcatggctggata

SEQ ID NO: 23280 - DNA, 25 bp, Homo sapien
atgtcctttagatgaataggcttcc

SEQ ID NO: 23281 - DNA, 25 bp, Homo sapien
atctaaaatagctcagcagtgactc

SEQ ID NO: 23282 - DNA, 25 bp, Homo sapien
ttaggttgtctaatggggtatgcaa

SEQ ID NO: 23283 - DNA, 25 bp, Homo sapien
taatggggtatgcaatagttaggca

SEQ ID NO: 23284 - DNA, 25 bp, Homo sapien
ggatagagggtgtagaatctaaaat

SEQ ID NO: 23285 - DNA, 25 bp, Homo sapien
gactcatggtagatcttaataggct

SEQ ID NO: 23286 - DNA, 25 bp, Homo sapien
tagttaggcatgatcgctgataggt

SEQ ID NO: 23287 - DNA, 25 bp, Homo sapien
aggtcaatagtgaagtatcagttac

SEQ ID NO: 23288 - DNA, 25 bp, Homo sapien
attatgaaatgaaaaccacggtgtc

SEQ ID NO: 23289 - DNA, 25 bp, Homo sapien
cacatgactgtgtactatggatcac

SEQ ID NO: 23290 - DNA, 25 bp, Homo sapien
ccacaatacagttcaaagagagatt

SEQ ID NO: 23291 - DNA, 25 bp, Homo sapien
gaatgagaatttagggagcacctct

SEQ ID NO: 23292 - DNA, 25 bp, Homo sapien
tttgcctaaggctcagaaagtcgtg

SEQ ID NO: 23293 - DNA, 25 bp, Homo sapien
taatttcccggcactggaatgtggg

SEQ ID NO: 23294 - DNA, 25 bp, Homo sapien
cataagagacacacataatagaaat

SEQ ID NO: 23295 - DNA, 25 bp, Homo sapien
ctggaaggaattggttggcttcctc

SEQ ID NO: 23296 - DNA, 25 bp, Homo sapien
aagacaagcaataccaccagacaat

SEQ ID NO: 23297 - DNA, 25 bp, Homo sapien
tcaggtggacaagatatggcatttt

SEQ ID NO: 23298 - DNA, 25 bp, Homo sapien
caccaggaaggagctttctcttgag

SEQ ID NO: 23299 - DNA, 25 bp, Homo sapien
atggatcacattggaagaacttctc

SEQ ID NO: 23300 - DNA, 25 bp, Homo sapien
acatccactaccaaaagtggtacat

SEQ ID NO: 23301 - DNA, 25 bp, Homo sapien
tatcacccaacgtctacagtttacc

SEQ ID NO: 23302 - DNA, 25 bp, Homo sapien
tttatctttaaatctctggaacaca

SEQ ID NO: 23303 - DNA, 25 bp, Homo sapien
cattctacgggtctgaacaaattta

SEQ ID NO: 23304 - DNA, 25 bp, Homo sapien
atcactatcacccaacgtctacagt

SEQ ID NO: 23305 - DNA, 25 bp, Homo sapien
atcctacatatgcatagcctcccac

SEQ ID NO: 23306 - DNA, 25 bp, Homo sapien
aaggtacagccatattccccatcct

SEQ ID NO: 23307 - DNA, 25 bp, Homo sapien
attacaattgatgaatctacactga

SEQ ID NO: 23308 - DNA, 25 bp, Homo sapien
tacattctacgggtctgaacaaatt

SEQ ID NO: 23309 - DNA, 25 bp, Homo sapien
cgtctacagtttaccttagggttca

SEQ ID NO: 23310 - DNA, 25 bp, Homo sapien
cactaccaaaagtggtacatttatt

SEQ ID NO: 23311 - DNA, 25 bp, Homo sapien
tgctcctaacaaccaggacaactag

SEQ ID NO: 23312 - DNA, 25 bp, Homo sapien
aatttctgtataagaggtgttaatc

SEQ ID NO: 23313 - DNA, 25 bp, Homo sapien
ttctgtataagaggtgttaatctca

SEQ ID NO: 23314 - DNA, 25 bp, Homo sapien
actaagcacttacgatgtgccagtt

SEQ ID NO: 23315 - DNA, 25 bp, Homo sapien
aagtcaacatgctcctaacaaccag

SEQ ID NO: 23316 - DNA, 25 bp, Homo sapien
agcactaagcacttacgatgtgcca

SEQ ID NO: 23317 - DNA, 25 bp, Homo sapien
aaaagtcaacatgctcctaacaacc

SEQ ID NO: 23318 - DNA, 25 bp, Homo sapien
aataaaaatatagcactaagcactt

SEQ ID NO: 23319 - DNA, 25 bp, Homo sapien
ctaacaaccaggacaactaggcaac

SEQ ID NO: 23320 - DNA, 25 bp, Homo sapien
caaccaggacaactaggcaacagga

SEQ ID NO: 23321 - DNA, 25 bp, Homo sapien
agaggtgttaatctcaaaagtcaac

SEQ ID NO: 23322 - DNA, 25 bp, Homo sapien
gaagccaagcatatcttagtgagat

SEQ ID NO: 23323 - DNA, 25 bp, Homo sapien
attggctcataacctgacttcaaac

SEQ ID NO: 23324 - DNA, 25 bp, Homo sapien
ctattatcacatagccaggaactac

SEQ ID NO: 23325 - DNA, 25 bp, Homo sapien
ttagtgagatttttctcagggcctc

SEQ ID NO: 23326 - DNA, 25 bp, Homo sapien
tcggagtcaaaattatggggaaatg

SEQ ID NO: 23327 - DNA, 25 bp, Homo sapien
aatgttacagcagattggattttta

SEQ ID NO: 23328 - DNA, 25 bp, Homo sapien
ggaaaacagctttctgagccactcc

SEQ ID NO: 23329 - DNA, 25 bp, Homo sapien
ttgaagtgccaaaggttatgctctc

SEQ ID NO: 23330 - DNA, 25 bp, Homo sapien
gctacaaagtgccatacaaacattt

SEQ ID NO: 23331 - DNA, 25 bp, Homo sapien
gttgagtcatcttttgaagccaagc

SEQ ID NO: 23332 - DNA, 25 bp, Homo sapien
agccaggaactacaatataatctat

SEQ ID NO: 23333 - DNA, 25 bp, Homo sapien
atagtgaagaacagtgtcagctttt

SEQ ID NO: 23334 - DNA, 25 bp, Homo sapien
ataaggcaagttcatagtgaagaac

SEQ ID NO: 23335 - DNA, 25 bp, Homo sapien
aaaatgtcagcactttgagtatgtc

SEQ ID NO: 23336 - DNA, 25 bp, Homo sapien
atttgggatcttttgggcttcttga

SEQ ID NO: 23337 - DNA, 25 bp, Homo sapien
ccagatctgaggagttttcaaccgt

SEQ ID NO: 23338 - DNA, 25 bp, Homo sapien
ctctggtttgcaagatttctgaaaa

SEQ ID NO: 23339 - DNA, 25 bp, Homo sapien
ctgggactcccttaatgcatctatt

SEQ ID NO: 23340 - DNA, 25 bp, Homo sapien
tcttgaatctgggtgtccattttct

SEQ ID NO: 23341 - DNA, 25 bp, Homo sapien
ttgtctggaaagtatgtcgctcatc

SEQ ID NO: 23342 - DNA, 25 bp, Homo sapien
aaagacagttttttcccaggcacag

SEQ ID NO: 23343 - DNA, 25 bp, Homo sapien
taatgtcccttgctgtaaatgtctt

SEQ ID NO: 23344 - DNA, 25 bp, Homo sapien
aagggagaaggcattctacatatat

SEQ ID NO: 23345 - DNA, 25 bp, Homo sapien
ggttgactagttcgctgatggattc

SEQ ID NO: 23346 - DNA, 25 bp, Homo sapien
gacagaaagattcctgcagacagct

SEQ ID NO: 23347 - DNA, 25 bp, Homo sapien
cattcggggagctgttaatgttgtt

SEQ ID NO: 23348 - DNA, 25 bp, Homo sapien
aagtgtgatcttccaaccagtagca

SEQ ID NO: 23349 - DNA, 25 bp, Homo sapien
gaaggaaacagctctgactggagct

SEQ ID NO: 23350 - DNA, 25 bp, Homo sapien
ttagaaatgcggaatctaaggtttc

SEQ ID NO: 23351 - DNA, 25 bp, Homo sapien
caccagacaagttatttagaaatgc

SEQ ID NO: 23352 - DNA, 25 bp, Homo sapien
aaggaggtgtgatttgtatgtctga

SEQ ID NO: 23353 - DNA, 25 bp, Homo sapien
atgttgttggaattgtgctaaagac

SEQ ID NO: 23354 - DNA, 25 bp, Homo sapien
gtctgaccttaaataagaggtagga

SEQ ID NO: 23355 - DNA, 25 bp, Homo sapien
caaatggcttgctcagacaccagga

SEQ ID NO: 23356 - DNA, 25 bp, Homo sapien
ggtatgtcaggtaggccaatcttta

SEQ ID NO: 23357 - DNA, 25 bp, Homo sapien
gcaggttgagaaagcccaaactcag

SEQ ID NO: 23358 - DNA, 25 bp, Homo sapien
agcaatgggctgaacatgtctgtct

SEQ ID NO: 23359 - DNA, 25 bp, Homo sapien
gcagttattagtggaggcaagttct

SEQ ID NO: 23360 - DNA, 25 bp, Homo sapien
ctcaggtgtcaaaagcagtggacta

SEQ ID NO: 23361 - DNA, 25 bp, Homo sapien
cccttgggccgaagaggtctgctct

SEQ ID NO: 23362 - DNA, 25 bp, Homo sapien
ctgtgacaggctgggcatatcagtc

SEQ ID NO: 23363 - DNA, 25 bp, Homo sapien
tattgggcctccaaatggcttgctc

SEQ ID NO: 23364 - DNA, 25 bp, Homo sapien
tttcagggtggtgtatactggcact

SEQ ID NO: 23365 - DNA, 25 bp, Homo sapien
atatcagtagcagtggtgaggcaac

SEQ ID NO: 23366 - DNA, 25 bp, Homo sapien
aattttcagtggaacccggagcatt

SEQ ID NO: 23367 - DNA, 25 bp, Homo sapien
atccaaaaatgtactagatgggtat

SEQ ID NO: 23368 - DNA, 25 bp, Homo sapien
cgcccggctggctgtgcttttttat

SEQ ID NO: 23369 - DNA, 25 bp, Homo sapien
atgtatccacctctcatggccatgc

SEQ ID NO: 23370 - DNA, 25 bp, Homo sapien
attgagcagagagtttatgttaaac

SEQ ID NO: 23371 - DNA, 25 bp, Homo sapien
gaatagccacttgactgttgtttac

SEQ ID NO: 23372 - DNA, 25 bp, Homo sapien
aaagatgctgccactatgtatccac

SEQ ID NO: 23373 - DNA, 25 bp, Homo sapien
tgactaaaaaattgagcagagagtt

SEQ ID NO: 23374 - DNA, 25 bp, Homo sapien
ggaacccggagcattcttgaatagc

SEQ ID NO: 23375 - DNA, 25 bp, Homo sapien
cttgcttagactagacagtaatacc

SEQ ID NO: 23376 - DNA, 25 bp, Homo sapien
cagtaatacctagccaaggaccctt

SEQ ID NO: 23377 - DNA, 25 bp, Homo sapien
gggttgactgttgtagcctgaaatg

SEQ ID NO: 23378 - DNA, 25 bp, Homo sapien
ggtcattggtagacaggcaaattta

SEQ ID NO: 23379 - DNA, 25 bp, Homo sapien
tgcaagttgcccagaatacaagcac

SEQ ID NO: 23380 - DNA, 25 bp, Homo sapien
cagatagtttgcaagattagagtcc

SEQ ID NO: 23381 - DNA, 25 bp, Homo sapien
caaatagaagtcttgggaagtttgc

SEQ ID NO: 23382 - DNA, 25 bp, Homo sapien
acaagcactaggcaaattcagatag

SEQ ID NO: 23383 - DNA, 25 bp, Homo sapien
aggcttgagatggtagacattgttt

SEQ ID NO: 23384 - DNA, 25 bp, Homo sapien
catgcaaagggagattatggataaa

SEQ ID NO: 23385 - DNA, 25 bp, Homo sapien
tgtaaaggttagctgcccaagtttg

SEQ ID NO: 23386 - DNA, 25 bp, Homo sapien
ttgtgctcaagtgagctccagaatc

SEQ ID NO: 23387 - DNA, 25 bp, Homo sapien
tcaaagtgtgacaactgtatcctgt

SEQ ID NO: 23388 - DNA, 25 bp, Homo sapien
tggagtgcagtaacgagatgtcgac

SEQ ID NO: 23389 - DNA, 25 bp, Homo sapien
taacgagatgtcgactcccgggttc

SEQ ID NO: 23390 - DNA, 25 bp, Homo sapien
gtgcagtaacgagatgtcgactccc

SEQ ID NO: 23391 - DNA, 25 bp, Homo sapien
ttatagaaaggaagctattattaga

SEQ ID NO: 23392 - DNA, 25 bp, Homo sapien
tgatacagatggaatagtagggaga

SEQ ID NO: 23393 - DNA, 25 bp, Homo sapien
agtgctgggactgtatttcaaatag

SEQ ID NO: 23394 - DNA, 25 bp, Homo sapien
tatcagccactacgacataattgtg

SEQ ID NO: 23395 - DNA, 25 bp, Homo sapien
atttcaaatagtgaatatcagccac

SEQ ID NO: 23396 - DNA, 25 bp, Homo sapien
gaatagtagggagagattatagaaa

SEQ ID NO: 23397 - DNA, 25 bp, Homo sapien
ttattagaataaatcagtgcttttc

SEQ ID NO: 23398 - DNA, 25 bp, Homo sapien
tacgacataattgtgatacagatgg

SEQ ID NO: 23399 - DNA, 25 bp, Homo sapien
ttagtccctgaaaaatggcacttgc

SEQ ID NO: 23400 - DNA, 25 bp, Homo sapien
gaagtcttttatgagctggggaatt

SEQ ID NO: 23401 - DNA, 25 bp, Homo sapien
tggtctgcctcttaaggaggaaaac

SEQ ID NO: 23402 - DNA, 25 bp, Homo sapien
tttgtagcacgatatgtttagtccc

SEQ ID NO: 23403 - DNA, 25 bp, Homo sapien
tgcagagcatctcaggaggttgcaa

SEQ ID NO: 23404 - DNA, 25 bp, Homo sapien
ccacgtggtgtgagtgaagtctttt

SEQ ID NO: 23405 - DNA, 25 bp, Homo sapien
ttcaccaggttcagcttgaagaact

SEQ ID NO: 23406 - DNA, 25 bp, Homo sapien
aggacaggtagtcaccacataaagt

SEQ ID NO: 23407 - DNA, 25 bp, Homo sapien
ggcgtagctggatttgtaagattga

SEQ ID NO: 23408 - DNA, 25 bp, Homo sapien
taaaaggaatatagcctacccatgt

SEQ ID NO: 23409 - DNA, 25 bp, Homo sapien
cacttgcaaagccattcaccaggtt

SEQ ID NO: 23410 - DNA, 25 bp, Homo sapien
tcttcccaagctactactgatcagt

SEQ ID NO: 23411 - DNA, 25 bp, Homo sapien
atccaaacttcttaccaggttagag

SEQ ID NO: 23412 - DNA, 25 bp, Homo sapien
caggttagagaagttccttttacca

SEQ ID NO: 23413 - DNA, 25 bp, Homo sapien
cagtaaggctcatcttaaatgccac

SEQ ID NO: 23414 - DNA, 25 bp, Homo sapien
actactgatcagtaaggctcatctt

SEQ ID NO: 23415 - DNA, 25 bp, Homo sapien
accacctagtgttaggaaatctttc

SEQ ID NO: 23416 - DNA, 25 bp, Homo sapien
agtcaaattgaactgctcatgaatc

SEQ ID NO: 23417 - DNA, 25 bp, Homo sapien
ctccaagaaaaaagttagatactcc

SEQ ID NO: 23418 - DNA, 25 bp, Homo sapien
tgaatcctcaaatataccatgcttt

SEQ ID NO: 23419 - DNA, 25 bp, Homo sapien
tttaagcctttgcacaagccatatc

SEQ ID NO: 23420 - DNA, 25 bp, Homo sapien
ctatgaagctttgcctgtgctccaa

SEQ ID NO: 23421 - DNA, 25 bp, Homo sapien
agctcaccatggcttccctggcagg

SEQ ID NO: 23422 - DNA, 25 bp, Homo sapien
ccttgcaggccatcagggccaattc

SEQ ID NO: 23423 - DNA, 25 bp, Homo sapien
cagttcacaggcttcctgggcactg

SEQ ID NO: 23424 - DNA, 25 bp, Homo sapien
tctgcgtgtgcttgttcatctggcc

SEQ ID NO: 23425 - DNA, 25 bp, Homo sapien
ttaattcaaacatcggccatgcaga

SEQ ID NO: 23426 - DNA, 25 bp, Homo sapien
ggggcttccatccaccaatggtcgg

SEQ ID NO: 23427 - DNA, 25 bp, Homo sapien
aatgcccttagaagcccagcagtga

SEQ ID NO: 23428 - DNA, 25 bp, Homo sapien
gctgttccaaagcaggccagtccca

SEQ ID NO: 23429 - DNA, 25 bp, Homo sapien
tgggaagctgcctagacccgcacct

SEQ ID NO: 23430 - DNA, 25 bp, Homo sapien
tgggcactgccgctgttccaaagca

SEQ ID NO: 23431 - DNA, 25 bp, Homo sapien
gggccaattcagttctgcgtgtgct

SEQ ID NO: 23432 - DNA, 25 bp, Homo sapien
tgacaagaaaaatggagatggtaaa

SEQ ID NO: 23433 - DNA, 25 bp, Homo sapien
taaatattacacaatgggactccat

SEQ ID NO: 23434 - DNA, 25 bp, Homo sapien
cttcagagtgaaagttgaaccaata

SEQ ID NO: 23435 - DNA, 25 bp, Homo sapien
cagttaggagtcatagttaaacaac

SEQ ID NO: 23436 - DNA, 25 bp, Homo sapien
ataagctacaaaacataatgacaag

SEQ ID NO: 23437 - DNA, 25 bp, Homo sapien
tttagacaccctcaaataagctaca

SEQ ID NO: 23438 - DNA, 25 bp, Homo sapien
ctgttaagagtaaaggaaatattac

SEQ ID NO: 23439 - DNA, 25 bp, Homo sapien
ctaacatacggatttcttcagagtg

SEQ ID NO: 23440 - DNA, 25 bp, Homo sapien
tttgaggcacgtacaaccatagtaa

SEQ ID NO: 23441 - DNA, 25 bp, Homo sapien
cctatttttgtaagtgagcatgttc

SEQ ID NO: 23442 - DNA, 25 bp, Homo sapien
ataagtatatacaagaagcctgcct

SEQ ID NO: 23443 - DNA, 25 bp, Homo sapien
cacctggataatcaaggatatctgg

SEQ ID NO: 23444 - DNA, 25 bp, Homo sapien
tgtgatcatgttgggcccacctgga

SEQ ID NO: 23445 - DNA, 25 bp, Homo sapien
ataatcaaggatatctggaactctc

SEQ ID NO: 23446 - DNA, 25 bp, Homo sapien
caaagtcagttgattagaaattttc

SEQ ID NO: 23447 - DNA, 25 bp, Homo sapien
gtccttcctggatttcatgattctg

SEQ ID NO: 23448 - DNA, 25 bp, Homo sapien
agaacccttgtgatcatgttgggcc

SEQ ID NO: 23449 - DNA, 25 bp, Homo sapien
cctgcaatggcttgttgagtccttc

SEQ ID NO: 23450 - DNA, 25 bp, Homo sapien
cttcagttggtaaggcctgcaatgg

SEQ ID NO: 23451 - DNA, 25 bp, Homo sapien
tacaactctttaggtcagaagtctg

SEQ ID NO: 23452 - DNA, 25 bp, Homo sapien
tcaacatttcagcacggttgcattc

SEQ ID NO: 23453 - DNA, 25 bp, Homo sapien
tcctctctggaagatctagggaaaa

SEQ ID NO: 23454 - DNA, 25 bp, Homo sapien
gtacattgccaattgaagggatatc

SEQ ID NO: 23455 - DNA, 25 bp, Homo sapien
atcagcccagacagaaactccacag

SEQ ID NO: 23456 - DNA, 25 bp, Homo sapien
tttaacctaatctagtctgctgctg

SEQ ID NO: 23457 - DNA, 25 bp, Homo sapien
catgaactagtcttttacaggagaa

SEQ ID NO: 23458 - DNA, 25 bp, Homo sapien
ggagttgtgcatgtacattgccaat

SEQ ID NO: 23459 - DNA, 25 bp, Homo sapien
ctttgggccataatttacctgtttc

SEQ ID NO: 23460 - DNA, 25 bp, Homo sapien
tagtgttagtttttggagatgtatc

SEQ ID NO: 23461 - DNA, 25 bp, Homo sapien
atgctgaccttggtatcctgttgac

SEQ ID NO: 23462 - DNA, 25 bp, Homo sapien
tcctgttgaccttgttgagcatctt

SEQ ID NO: 23463 - DNA, 25 bp, Homo sapien
aagggatatccagtaacagatgaat

SEQ ID NO: 23464 - DNA, 25 bp, Homo sapien
tttatctgccataaagatgctattt

SEQ ID NO: 23465 - DNA, 25 bp, Homo sapien
cttgtgagatcctaagaaacatctt

SEQ ID NO: 23466 - DNA, 25 bp, Homo sapien
tagtggtaactatgtctctgtccgt

SEQ ID NO: 23467 - DNA, 25 bp, Homo sapien
atagggaattgaggactgctttctt

SEQ ID NO: 23468 - DNA, 25 bp, Homo sapien
ttcgtttgggtgttggcaactccta

SEQ ID NO: 23469 - DNA, 25 bp, Homo sapien
ctgacagcggtcttattttgggaaa

SEQ ID NO: 23470 - DNA, 25 bp, Homo sapien
gggaagtaagtagagtgtatcttgt

SEQ ID NO: 23471 - DNA, 25 bp, Homo sapien
gagaatgtagatgacttcccactac

SEQ ID NO: 23472 - DNA, 25 bp, Homo sapien
gtttcaagctgcaggacccaacaaa

SEQ ID NO: 23473 - DNA, 25 bp, Homo sapien
ttttgggaaatatcttggcagatgt

SEQ ID NO: 23474 - DNA, 25 bp, Homo sapien
gacaaggctttggaaaagctacatt

SEQ ID NO: 23475 - DNA, 25 bp, Homo sapien
agtaagagaacatagtgctgagaat

SEQ ID NO: 23476 - DNA, 25 bp, Homo sapien
atccattattgagagtggaccactg

SEQ ID NO: 23477 - DNA, 25 bp, Homo sapien
tgtctaagtttagccacttctgctc

SEQ ID NO: 23478 - DNA, 25 bp, Homo sapien
ttaggcacatttagtgtatactgtt

SEQ ID NO: 23479 - DNA, 25 bp, Homo sapien
cctactgttattgtattgctgccaa

SEQ ID NO: 23480 - DNA, 25 bp, Homo sapien
ttcctctctagggacacttcttgtc

SEQ ID NO: 23481 - DNA, 25 bp, Homo sapien
ttgggggtagaaaatcctgtacata

SEQ ID NO: 23482 - DNA, 25 bp, Homo sapien
aagtctgttttgtctaagtttagcc

SEQ ID NO: 23483 - DNA, 25 bp, Homo sapien
agtggaccactgaagtctcctactg

SEQ ID NO: 23484 - DNA, 25 bp, Homo sapien
gtttcatgcgcacttgagaaggatg

SEQ ID NO: 23485 - DNA, 25 bp, Homo sapien
ttgctgggtgcaaatatatttaaat

SEQ ID NO: 23486 - DNA, 25 bp, Homo sapien
ctgaagaacgtttcatgcgcacttg

SEQ ID NO: 23487 - DNA, 25 bp, Homo sapien
tttgagagataattcaggcactgca

SEQ ID NO: 23488 - DNA, 25 bp, Homo sapien
caaactcgggcctcaaaagatcctc

SEQ ID NO: 23489 - DNA, 25 bp, Homo sapien
agagataattcaggcactgcaggca

SEQ ID NO: 23490 - DNA, 25 bp, Homo sapien
agctctgggatcagaggtgtgaacc

SEQ ID NO: 23491 - DNA, 25 bp, Homo sapien
tctgggatcagaggtgtgaaccacc

SEQ ID NO: 23492 - DNA, 25 bp, Homo sapien
aatttgcctttacatcccttggtta

SEQ ID NO: 23493 - DNA, 25 bp, Homo sapien
taatttatttgcagagacggaatct

SEQ ID NO: 23494 - DNA, 25 bp, Homo sapien
cctctgagaaatttgcctttacatc

SEQ ID NO: 23495 - DNA, 25 bp, Homo sapien
ataattcaggcactgcaggcatttc

SEQ ID NO: 23496 - DNA, 25 bp, Homo sapien
aaaaaactatcttggagatagaatc

SEQ ID NO: 23497 - DNA, 25 bp, Homo sapien
ctttgatcctaaagcttagtcctat

SEQ ID NO: 23498 - DNA, 25 bp, Homo sapien
ggcttcatgggcagtcttgactgag

SEQ ID NO: 23499 - DNA, 25 bp, Homo sapien
ggcagtcttgactgagaaaggattt

SEQ ID NO: 23500 - DNA, 25 bp, Homo sapien
aatatgggagaatgactttatcttt

SEQ ID NO: 23501 - DNA, 25 bp, Homo sapien
tagtgtgcatatctgctactctagc

SEQ ID NO: 23502 - DNA, 25 bp, Homo sapien
gattttcagtgaagcttataggatc

SEQ ID NO: 23503 - DNA, 25 bp, Homo sapien
ttgagaccagttaatcatgcccatc

SEQ ID NO: 23504 - DNA, 25 bp, Homo sapien
ctaaagattgctgtaaaagttaagc

SEQ ID NO: 23505 - DNA, 25 bp, Homo sapien
tcaagaaagaccatatagcaaaatt

SEQ ID NO: 23506 - DNA, 25 bp, Homo sapien
gcttataggatcaaataaggcactt

SEQ ID NO: 23507 - DNA, 25 bp, Homo sapien
atacaacacatagcatctgaacatt

SEQ ID NO: 23508 - DNA, 25 bp, Homo sapien
ctgaacattaaggaaatatgggaga

SEQ ID NO: 23509 - DNA, 25 bp, Homo sapien
atgtcagcttggtctgtaggcatct

SEQ ID NO: 23510 - DNA, 25 bp, Homo sapien
gcctccaggcagatatgttaaattg

SEQ ID NO: 23511 - DNA, 25 bp, Homo sapien
ctctcctgaggataagtagatgtca

SEQ ID NO: 23512 - DNA, 25 bp, Homo sapien
aggatccactttcaagatggcccac

SEQ ID NO: 23513 - DNA, 25 bp, Homo sapien
caagatggcccactcacatggactc

SEQ ID NO: 23514 - DNA, 25 bp, Homo sapien
atttgtgggaatttgaagctggcaa

SEQ ID NO: 23515 - DNA, 25 bp, Homo sapien
ctagctagaagaacaggtgttagaa

SEQ ID NO: 23516 - DNA, 25 bp, Homo sapien
tgtctcagtcgggttgtgcatgtcg

SEQ ID NO: 23517 - DNA, 25 bp, Homo sapien
tattctatagccactctaccgagcc

SEQ ID NO: 23518 - DNA, 25 bp, Homo sapien
gcatgtcggagttcaggagcagttt

SEQ ID NO: 23519 - DNA, 25 bp, Homo sapien
aagctggcaagcaattgttaatatt

SEQ ID NO: 23520 - DNA, 25 bp, Homo sapien
ctggtcagcgttatcctcgaggatc

SEQ ID NO: 23521 - DNA, 25 bp, Homo sapien
ccctgttagggtgttcataaagtaa

SEQ ID NO: 23522 - DNA, 25 bp, Homo sapien
aacaatccgtacagaatgtgcggga

SEQ ID NO: 23523 - DNA, 25 bp, Homo sapien
taggaactcctacggtggcgacaga

SEQ ID NO: 23524 - DNA, 25 bp, Homo sapien
caaatacgtgtatgcatgtagaatt

SEQ ID NO: 23525 - DNA, 25 bp, Homo sapien
tctcgcacagaacgtcttgactaaa

SEQ ID NO: 23526 - DNA, 25 bp, Homo sapien
tttttaaaaggactgagtggagagc

SEQ ID NO: 23527 - DNA, 25 bp, Homo sapien
aacaggcttgttggaagaagcgcct

SEQ ID NO: 23528 - DNA, 25 bp, Homo sapien
tattaaaaatcgtctagagagagca

SEQ ID NO: 23529 - DNA, 25 bp, Homo sapien
tccaaattgcaggtgggatcatttt

SEQ ID NO: 23530 - DNA, 25 bp, Homo sapien
ttcagtgattcgtagtatggatgta

SEQ ID NO: 23531 - DNA, 25 bp, Homo sapien
agcttggcagagtcgctcctcacat

SEQ ID NO: 23532 - DNA, 25 bp, Homo sapien
aggtgctcctcacttgccacacagg

SEQ ID NO: 23533 - DNA, 25 bp, Homo sapien
gttttccaccaatgaaccttgacat

SEQ ID NO: 23534 - DNA, 25 bp, Homo sapien
cggcagcttggcagagtcgctcctc

SEQ ID NO: 23535 - DNA, 25 bp, Homo sapien
cacttgccacacagggcggcagctt

SEQ ID NO: 23536 - DNA, 25 bp, Homo sapien
ccgacgggccttctcacataatttt

SEQ ID NO: 23537 - DNA, 25 bp, Homo sapien
tcacatcccagtcagttggacggcc

SEQ ID NO: 23538 - DNA, 25 bp, Homo sapien
ttggcagagtcgctcctcacattcc

SEQ ID NO: 23539 - DNA, 25 bp, Homo sapien
tcctaacatcccagacggtgagggg

SEQ ID NO: 23540 - DNA, 25 bp, Homo sapien
tgcccgacgggccttctcacataat

SEQ ID NO: 23541 - DNA, 25 bp, Homo sapien
aggtgctcctaacatcccagacggt

SEQ ID NO: 23542 - DNA, 25 bp, Homo sapien
cccaataaggtttccattcattact

SEQ ID NO: 23543 - DNA, 25 bp, Homo sapien
aaacttctggctggtcttcctctat

SEQ ID NO: 23544 - DNA, 25 bp, Homo sapien
aatgcagatttacgtatgtgtacac

SEQ ID NO: 23545 - DNA, 25 bp, Homo sapien
tttgctctgtagcttggagactgct

SEQ ID NO: 23546 - DNA, 25 bp, Homo sapien
ttcagggagtttataagtttgtctc

SEQ ID NO: 23547 - DNA, 25 bp, Homo sapien
ttctgagagaatgcagatttacgta

SEQ ID NO: 23548 - DNA, 25 bp, Homo sapien
tgctttcacacttcagggagtttat

SEQ ID NO: 23549 - DNA, 25 bp, Homo sapien
agtatgaccgtgattttagcaaggc

SEQ ID NO: 23550 - DNA, 25 bp, Homo sapien
ttccatatcaccaagtatgaccgtg

SEQ ID NO: 23551 - DNA, 25 bp, Homo sapien
tgtagcttggagactgctttcacac

SEQ ID NO: 23552 - DNA, 25 bp, Homo sapien
tgaccgtgattttagcaaggcctcc

SEQ ID NO: 23553 - DNA, 25 bp, Homo sapien
gcaggtcctctcaaggagacaggct

SEQ ID NO: 23554 - DNA, 25 bp, Homo sapien
gaactctgagcatagcacctggcct

SEQ ID NO: 23555 - DNA, 25 bp, Homo sapien
ttggggccatgcagcccacactaac

SEQ ID NO: 23556 - DNA, 25 bp, Homo sapien
gtttagaatctgtagcccaatcctc

SEQ ID NO: 23557 - DNA, 25 bp, Homo sapien
ttgctgctgaacaccaacggcctaa

SEQ ID NO: 23558 - DNA, 25 bp, Homo sapien
tcatccaagaagagaatgacgtgct

SEQ ID NO: 23559 - DNA, 25 bp, Homo sapien
acagtatcaggcaggtgtgaactct

SEQ ID NO: 23560 - DNA, 25 bp, Homo sapien
cactgagctcagatcctataaggag

SEQ ID NO: 23561 - DNA, 25 bp, Homo sapien
cctctatggagagtgtggtttagaa

SEQ ID NO: 23562 - DNA, 25 bp, Homo sapien
atggaatagtgaggttgtcagataa

SEQ ID NO: 23563 - DNA, 25 bp, Homo sapien
ctataaggagataaggagttttcat

SEQ ID NO: 23564 - DNA, 25 bp, Homo sapien
atggtctctgtgcaggtctcgtaac

SEQ ID NO: 23565 - DNA, 25 bp, Homo sapien
tttttaagagaccagagaagatggt

SEQ ID NO: 23566 - DNA, 25 bp, Homo sapien
agaagatggtctctgtgcaggtctc

SEQ ID NO: 23567 - DNA, 25 bp, Homo sapien
accgcacctggctcaagttgccaga

SEQ ID NO: 23568 - DNA, 25 bp, Homo sapien
gcacctggctcaagttgccagattt

SEQ ID NO: 23569 - DNA, 25 bp, Homo sapien
tgcaggtctcgtaactgtgcaggtc

SEQ ID NO: 23570 - DNA, 25 bp, Homo sapien
tctctgtgcaggtctcgtaactgtg

SEQ ID NO: 23571 - DNA, 25 bp, Homo sapien
tctgtgcaggtctcgtaactgtgca

SEQ ID NO: 23572 - DNA, 25 bp, Homo sapien
caggtctcgtaactgtgcaggtctt

SEQ ID NO: 23573 - DNA, 25 bp, Homo sapien
agatggtctctgtgcaggtctcgta

SEQ ID NO: 23574 - DNA, 25 bp, Homo sapien
cagggcagccctcccgccttaccgt

SEQ ID NO: 23575 - DNA, 25 bp, Homo sapien
atggtctctgtgcaggtctcgtaac

SEQ ID NO: 23576 - DNA, 25 bp, Homo sapien
cttaccgttggggataaggatgcca

SEQ ID NO: 23577 - DNA, 25 bp, Homo sapien
tttttaagagaccagagaagatggt

SEQ ID NO: 23578 - DNA, 25 bp, Homo sapien
gataaggatgccaccaaccatggtt

SEQ ID NO: 23579 - DNA, 25 bp, Homo sapien
caggtctcgtaactgtgcaggtctt

SEQ ID NO: 23580 - DNA, 25 bp, Homo sapien
gcacctggctcaagttgccagattt

SEQ ID NO: 23581 - DNA, 25 bp, Homo sapien
ctctgtgcaggtctcgtaactgtgc

SEQ ID NO: 23582 - DNA, 25 bp, Homo sapien
tgcaggtctcgtaactgtgcaggtc

SEQ ID NO: 23583 - DNA, 25 bp, Homo sapien
cagggcagccctcccgccttaccgt

SEQ ID NO: 23584 - DNA, 25 bp, Homo sapien
accgcacctggctcaagttgccaga

SEQ ID NO: 23585 - DNA, 25 bp, Homo sapien
agaagatggtctctgtgcaggtctc

SEQ ID NO: 23586 - DNA, 25 bp, Homo sapien
attcttataacttatgaaataacgt

SEQ ID NO: 23587 - DNA, 25 bp, Homo sapien
acgttatttcataagttataagaat

SEQ ID NO: 23588 - DNA, 25 bp, Homo sapien
ttcttgtaaggtgggtctggtagca

SEQ ID NO: 23589 - DNA, 25 bp, Homo sapien
ggggcactttgaatatgtcattcca

SEQ ID NO: 23590 - DNA, 25 bp, Homo sapien
tgaattattgtctgtggtcacttac

SEQ ID NO: 23591 - DNA, 25 bp, Homo sapien
gatcactttgctagatatagggtcc

SEQ ID NO: 23592 - DNA, 25 bp, Homo sapien
ctagatatagggtccttggttaacc

SEQ ID NO: 23593 - DNA, 25 bp, Homo sapien
tgatgtatttgcctgcggatctctt

SEQ ID NO: 23594 - DNA, 25 bp, Homo sapien
gtcattccatgcttctggcctccat

SEQ ID NO: 23595 - DNA, 25 bp, Homo sapien
tggcctccattgcttctgatgacaa

SEQ ID NO: 23596 - DNA, 25 bp, Homo sapien
tgggtctggtagcaacaaattctgt

SEQ ID NO: 23597 - DNA, 25 bp, Homo sapien
ttcccggatgtgtggattaatgttt

SEQ ID NO: 23598 - DNA, 25 bp, Homo sapien
aaagttcactgaagttcccggatgt

SEQ ID NO: 23599 - DNA, 25 bp, Homo sapien
catgggagtggaaaactgtagtcaa

SEQ ID NO: 23600 - DNA, 25 bp, Homo sapien
tgacggatacaggtaagttgccaac

SEQ ID NO: 23601 - DNA, 25 bp, Homo sapien
agctgaaaacggtagtgtgtacact

SEQ ID NO: 23602 - DNA, 25 bp, Homo sapien
aatcgtaatagaatagcagacatcc

SEQ ID NO: 23603 - DNA, 25 bp, Homo sapien
ctgaaatggtaaaagtgacggatac

SEQ ID NO: 23604 - DNA, 25 bp, Homo sapien
ctctgggagccagtgtaaactacat

SEQ ID NO: 23605 - DNA, 25 bp, Homo sapien
agcagacccggagacaaggatctgt

SEQ ID NO: 23606 - DNA, 25 bp, Homo sapien
gtagtcaagcagcaaagaaagccct

SEQ ID NO: 23607 - DNA, 25 bp, Homo sapien
ccctcaggcaagaagtgcagatgct

SEQ ID NO: 23608 - DNA, 25 bp, Homo sapien
aatagaggcatgtgttatcaggctt

SEQ ID NO: 23609 - DNA, 25 bp, Homo sapien
gtacaggaatttactgggaggtgaa

SEQ ID NO: 23610 - DNA, 25 bp, Homo sapien
agcttaaatgggtgcgaaggatccc

SEQ ID NO: 23611 - DNA, 25 bp, Homo sapien
attattgtaggattatagagcttaa

SEQ ID NO: 23612 - DNA, 25 bp, Homo sapien
atcatgattatgaagggatcttcta

SEQ ID NO: 23613 - DNA, 25 bp, Homo sapien
agctgatgatatttgcctggactac

SEQ ID NO: 23614 - DNA, 25 bp, Homo sapien
ggattatagagcttaaatgggtgcg

SEQ ID NO: 23615 - DNA, 25 bp, Homo sapien
ccaggtcaaggctcactggagcctt

SEQ ID NO: 23616 - DNA, 25 bp, Homo sapien
ttatagagcttaaatgggtgcgaag

SEQ ID NO: 23617 - DNA, 25 bp, Homo sapien
tgttgcccaggtcaaggctcactgg

SEQ ID NO: 23618 - DNA, 25 bp, Homo sapien
aagagatcatgattatgaagggatc

SEQ ID NO: 23619 - DNA, 25 bp, Homo sapien
taaaatggagctgatgatatttgcc

SEQ ID NO: 23620 - DNA, 25 bp, Homo sapien
cctctaaaatggagctgatgatatt

SEQ ID NO: 23621 - DNA, 25 bp, Homo sapien
gggagtggagacagttcaatccata

SEQ ID NO: 23622 - DNA, 25 bp, Homo sapien
ctggaaaatcaaggcacacacaagt

SEQ ID NO: 23623 - DNA, 25 bp, Homo sapien
ttctggcaagaccaccacctgatct

SEQ ID NO: 23624 - DNA, 25 bp, Homo sapien
ctctctccaagtaaggtgaaaaaac

SEQ ID NO: 23625 - DNA, 25 bp, Homo sapien
attatcaggggccaaaagagatcct

SEQ ID NO: 23626 - DNA, 25 bp, Homo sapien
gtgcacaataccgatacagagattt

SEQ ID NO: 23627 - DNA, 25 bp, Homo sapien
ggcacacacaagtaggtaacaattc

SEQ ID NO: 23628 - DNA, 25 bp, Homo sapien
atagtcatgtagagcaagaaagtac

SEQ ID NO: 23629 - DNA, 25 bp, Homo sapien
tgtgggaaaccttctgctgtgcctt

SEQ ID NO: 23630 - DNA, 25 bp, Homo sapien
acaatgatacagtgataggagacct

SEQ ID NO: 23631 - DNA, 25 bp, Homo sapien
actgaggattgaggcatatgaattt

SEQ ID NO: 23632 - DNA, 25 bp, Homo sapien
aaatagtcatctagcaggggttgtg

SEQ ID NO: 23633 - DNA, 25 bp, Homo sapien
actcctcaggcaaggacataaggct

SEQ ID NO: 23634 - DNA, 25 bp, Homo sapien
aatgtggctgagttgtaagactctg

SEQ ID NO: 23635 - DNA, 25 bp, Homo sapien
tggtgactctaatgtgccctgggca

SEQ ID NO: 23636 - DNA, 25 bp, Homo sapien
gctggccagtgatggtcctaaattt

SEQ ID NO: 23637 - DNA, 25 bp, Homo sapien
tttgttcccactggctggctcagca

SEQ ID NO: 23638 - DNA, 25 bp, Homo sapien
taacgtcacagtgttgagagactgc

SEQ ID NO: 23639 - DNA, 25 bp, Homo sapien
tgcacgtttccaagtcaggtgaact

SEQ ID NO: 23640 - DNA, 25 bp, Homo sapien
ggccatccgaatgaaacgcaactct

SEQ ID NO: 23641 - DNA, 25 bp, Homo sapien
cttagtcagtaaacaggaagcgcat

SEQ ID NO: 23642 - DNA, 25 bp, Homo sapien
tagtagatacaggttcatcaggtct

SEQ ID NO: 23643 - DNA, 25 bp, Homo sapien
agcgcatactccaggccaggcggct

SEQ ID NO: 23644 - DNA, 25 bp, Homo sapien
ttgcctaggtgacgctcagcgcata

SEQ ID NO: 23645 - DNA, 25 bp, Homo sapien
taactggttagtggctagtgaatta

SEQ ID NO: 23646 - DNA, 25 bp, Homo sapien
cgagacaggcgcaagctaacttccc

SEQ ID NO: 23647 - DNA, 25 bp, Homo sapien
gcgatgcggccggagttcaacagca

SEQ ID NO: 23648 - DNA, 25 bp, Homo sapien
atagatgtccctgtactcggtaact

SEQ ID NO: 23649 - DNA, 25 bp, Homo sapien
aggatgtcaagtctgtagtgagcta

SEQ ID NO: 23650 - DNA, 25 bp, Homo sapien
caaattatttgtcgcgcgccagtgg

SEQ ID NO: 23651 - DNA, 25 bp, Homo sapien
tatgatcccgacactgcattctacc

SEQ ID NO: 23652 - DNA, 25 bp, Homo sapien
ttcaacagcaggtgacggcgggaaa

SEQ ID NO: 23653 - DNA, 25 bp, Homo sapien
aagcagagcggccacatagatgtcc

SEQ ID NO: 23654 - DNA, 25 bp, Homo sapien
attggtagagtgaagtttagagttt

SEQ ID NO: 23655 - DNA, 25 bp, Homo sapien
ccaatcaaagggttcgtttctgccc

SEQ ID NO: 23656 - DNA, 25 bp, Homo sapien
aagaccaccatatgtaagacccagc

SEQ ID NO: 23657 - DNA, 25 bp, Homo sapien
aatgggttttctgagagtaggtttg

SEQ ID NO: 23658 - DNA, 25 bp, Homo sapien
agaaagagtgatgtctgagagtgaa

SEQ ID NO: 23659 - DNA, 25 bp, Homo sapien
tggagaggcatttccacacgcccat

SEQ ID NO: 23660 - DNA, 25 bp, Homo sapien
tgaagaggctatgcaaattacaact

SEQ ID NO: 23661 - DNA, 25 bp, Homo sapien
accagacggagttccgtatgcttgc

SEQ ID NO: 23662 - DNA, 25 bp, Homo sapien
tttccaggaagaaataccagacgga

SEQ ID NO: 23663 - DNA, 25 bp, Homo sapien
tagttgtaaaacagggacttcaatg

SEQ ID NO: 23664 - DNA, 25 bp, Homo sapien
aaagctacacaaaacagtaagcatt

SEQ ID NO: 23665 - DNA, 25 bp, Homo sapien
aaacaagctgagcaaatatatgcaa

SEQ ID NO: 23666 - DNA, 25 bp, Homo sapien
gtagctgcaaccacacgtgcgccat

SEQ ID NO: 23667 - DNA, 25 bp, Homo sapien
actttaatataaatgggctgtgcgc

SEQ ID NO: 23668 - DNA, 25 bp, Homo sapien
tgcaaaacacttcacagataatgac

SEQ ID NO: 23669 - DNA, 25 bp, Homo sapien
aaaggcttgtgtggcaaaaaagaat

SEQ ID NO: 23670 - DNA, 25 bp, Homo sapien
tgagaaataagcaaaatatgaataa

SEQ ID NO: 23671 - DNA, 25 bp, Homo sapien
ctccagagtagctgcaaccacacgt

SEQ ID NO: 23672 - DNA, 25 bp, Homo sapien
attatccctaatacttgaagaactt

SEQ ID NO: 23673 - DNA, 25 bp, Homo sapien
tttaatataaatgggctgtgcgcag

SEQ ID NO: 23674 - DNA, 25 bp, Homo sapien
agcaaagtcaaaaaacaagctgagc

SEQ ID NO: 23675 - DNA, 25 bp, Homo sapien
ggtccttaagacatatgaaactata

SEQ ID NO: 23676 - DNA, 25 bp, Homo sapien
aataaactgcagatatcatggccgt

SEQ ID NO: 23677 - DNA, 25 bp, Homo sapien
ttaattctaaataggtctggatctg

SEQ ID NO: 23678 - DNA, 25 bp, Homo sapien
gagaacagcaactctgaacagctgc

SEQ ID NO: 23679 - DNA, 25 bp, Homo sapien
ttcttctgatctctgcacgtaggtt

SEQ ID NO: 23680 - DNA, 25 bp, Homo sapien
gaaaacatgccagattcatgaacta

SEQ ID NO: 23681 - DNA, 25 bp, Homo sapien
catgccaagctaatactggggccac

SEQ ID NO: 23682 - DNA, 25 bp, Homo sapien
ctggccctcagcacgtttactgtat

SEQ ID NO: 23683 - DNA, 25 bp, Homo sapien
agtggagtgcaggatcatacttcac

SEQ ID NO: 23684 - DNA, 25 bp, Homo sapien
ccttctggaacaccaaagcagacag

SEQ ID NO: 23685 - DNA, 25 bp, Homo sapien
tcatgggctcaaactatcttcctgc

SEQ ID NO: 23686 - DNA, 25 bp, Homo sapien
gcacgtaggtttggtggctacctca

SEQ ID NO: 23687 - DNA, 25 bp, Homo sapien
caacatggagaaatttatagctata

SEQ ID NO: 23688 - DNA, 25 bp, Homo sapien
actaaaaactgaggactgtaagtaa

SEQ ID NO: 23689 - DNA, 25 bp, Homo sapien
tagagtcatttaagaaaggtgtagc

SEQ ID NO: 23690 - DNA, 25 bp, Homo sapien
gtgcatgtgtataaatgagtaattc

SEQ ID NO: 23691 - DNA, 25 bp, Homo sapien
aagttactaaaaactgaggactgta

SEQ ID NO: 23692 - DNA, 25 bp, Homo sapien
aaatgaatgaacagtgcatgtgtat

SEQ ID NO: 23693 - DNA, 25 bp, Homo sapien
ctgtaagtaaacagtcttagagtca

SEQ ID NO: 23694 - DNA, 25 bp, Homo sapien
gttgtataaatgaatgaacagtgca

SEQ ID NO: 23695 - DNA, 25 bp, Homo sapien
aaaaactgaggactgtaagtaaaca

SEQ ID NO: 23696 - DNA, 25 bp, Homo sapien
gtcatttaagaaaggtgtagcggct

SEQ ID NO: 23697 - DNA, 25 bp, Homo sapien
atgtgtggttgtataaatgaatgaa

SEQ ID NO: 23698 - DNA, 25 bp, Homo sapien
tctttgttgaaagtcttgagccttc

SEQ ID NO: 23699 - DNA, 25 bp, Homo sapien
tcttgtagtagaatagcacgtcatt

SEQ ID NO: 23700 - DNA, 25 bp, Homo sapien
ttttctgtagactgaagtgacagga

SEQ ID NO: 23701 - DNA, 25 bp, Homo sapien
ttcaactctgggtactgactttatt

SEQ ID NO: 23702 - DNA, 25 bp, Homo sapien
atcactctgtgtggtccattgtctt

SEQ ID NO: 23703 - DNA, 25 bp, Homo sapien
gcaaagtaactttgtggcacatgtc

SEQ ID NO: 23704 - DNA, 25 bp, Homo sapien
cacagacagggttctttggttcaaa

SEQ ID NO: 23705 - DNA, 25 bp, Homo sapien
ggttcaaagacaccaatcactctgt

SEQ ID NO: 23706 - DNA, 25 bp, Homo sapien
tcagcccaggctccctctttgttga

SEQ ID NO: 23707 - DNA, 25 bp, Homo sapien
ttgtggcacatgtcctgctcctgct

SEQ ID NO: 23708 - DNA, 25 bp, Homo sapien
ttttagctccacagacagggttctt

SEQ ID NO: 23709 - DNA, 25 bp, Homo sapien
gggccatgctccatggatcccatgc

SEQ ID NO: 23710 - DNA, 25 bp, Homo sapien
cctagttacctaggctgatttcaaa

SEQ ID NO: 23711 - DNA, 25 bp, Homo sapien
gagatgctgctgttttagatgggcc

SEQ ID NO: 23712 - DNA, 25 bp, Homo sapien
agaaggtgtttgagagtatgaatat

SEQ ID NO: 23713 - DNA, 25 bp, Homo sapien
cagtcaacttgagctgagatgctgc

SEQ ID NO: 23714 - DNA, 25 bp, Homo sapien
acctggccttgtcaacacattcaac

SEQ ID NO: 23715 - DNA, 25 bp, Homo sapien
agacatgaggtcttgcctagttacc

SEQ ID NO: 23716 - DNA, 25 bp, Homo sapien
ttactgccttgaattcatgaccctt

SEQ ID NO: 23717 - DNA, 25 bp, Homo sapien
tgacccttagtctacagaaggtgtt

SEQ ID NO: 23718 - DNA, 25 bp, Homo sapien
cacattcaacatgatgacagtcaac

SEQ ID NO: 23719 - DNA, 25 bp, Homo sapien
ctgctgttttagatgggccatgctc

SEQ ID NO: 23720 - DNA, 25 bp, Homo sapien
cctaggattataagagctgactgct

SEQ ID NO: 23721 - DNA, 25 bp, Homo sapien
tttccgatggccatacaagagtctc

SEQ ID NO: 23722 - DNA, 25 bp, Homo sapien
cttctggaattcacatggtaaaaaa

SEQ ID NO: 23723 - DNA, 25 bp, Homo sapien
gtctccggtaagttgagagagaaga

SEQ ID NO: 23724 - DNA, 25 bp, Homo sapien
gaaatgtgcacaggcaagcactgac

SEQ ID NO: 23725 - DNA, 25 bp, Homo sapien
cactgacagatttgagggcagaaat

SEQ ID NO: 23726 - DNA, 25 bp, Homo sapien
cagagggactcagccttgttgcaaa

SEQ ID NO: 23727 - DNA, 25 bp, Homo sapien
gatggccatacaagagtctccggta

SEQ ID NO: 23728 - DNA, 25 bp, Homo sapien
tggggagctcctaggattataagag

SEQ ID NO: 23729 - DNA, 25 bp, Homo sapien
tgcaaatcaagttaagtaggttaat

SEQ ID NO: 23730 - DNA, 25 bp, Homo sapien
gagctgactgcttctggaattcaca

SEQ ID NO: 23731 - DNA, 25 bp, Homo sapien
atgtgtcctgatgcctatttagcca

SEQ ID NO: 23732 - DNA, 25 bp, Homo sapien
gtactgccttacattgctatttaac

SEQ ID NO: 23733 - DNA, 25 bp, Homo sapien
atactataatactgtactgccttac

SEQ ID NO: 23734 - DNA, 25 bp, Homo sapien
ctgatttgtcaagcctctgagccat

SEQ ID NO: 23735 - DNA, 25 bp, Homo sapien
cttgttaaatggaaactgagcagtt

SEQ ID NO: 23736 - DNA, 25 bp, Homo sapien
gtgcgggagccatgtttgctcagaa

SEQ ID NO: 23737 - DNA, 25 bp, Homo sapien
ttgctcagaacatacttgttaaatg

SEQ ID NO: 23738 - DNA, 25 bp, Homo sapien
aactgagcagttggtgattttgccc

SEQ ID NO: 23739 - DNA, 25 bp, Homo sapien
tcttaaagtccttgtgtgcgggagc

SEQ ID NO: 23740 - DNA, 25 bp, Homo sapien
aagcctctgagccatgtgtcctgat

SEQ ID NO: 23741 - DNA, 25 bp, Homo sapien
tagccactaagcaaaagtgtcatcc

SEQ ID NO: 23742 - DNA, 25 bp, Homo sapien
tgggtggagcttggattcgaactca

SEQ ID NO: 23743 - DNA, 25 bp, Homo sapien
cctctggactgaccggctaagttct

SEQ ID NO: 23744 - DNA, 25 bp, Homo sapien
agaactcagcattcggacccggctc

SEQ ID NO: 23745 - DNA, 25 bp, Homo sapien
acctgtgctcaaaataaacctctgg

SEQ ID NO: 23746 - DNA, 25 bp, Homo sapien
ttcgaactcaggcagtgggtcaccc

SEQ ID NO: 23747 - DNA, 25 bp, Homo sapien
tgcagtcagtgagcgcgcaacgtgc

SEQ ID NO: 23748 - DNA, 25 bp, Homo sapien
agcttggattcgaactcaggcagtg

SEQ ID NO: 23749 - DNA, 25 bp, Homo sapien
atgcagaccgatggaagaggctagt

SEQ ID NO: 23750 - DNA, 25 bp, Homo sapien
aaataaacctctggactgaccggct

SEQ ID NO: 23751 - DNA, 25 bp, Homo sapien
ccggctaagttctggtgcagtcagt

SEQ ID NO: 23752 - DNA, 25 bp, Homo sapien
cgaggagaactcagcattcggaccc

SEQ ID NO: 23753 - DNA, 25 bp, Homo sapien
atcgggattaataaggggaacttgc

SEQ ID NO: 23754 - DNA, 25 bp, Homo sapien
accgtggtgcatggaaggatttttt

SEQ ID NO: 23755 - DNA, 25 bp, Homo sapien
tgcacgaagcacacgcccgaaaatc

SEQ ID NO: 23756 - DNA, 25 bp, Homo sapien
ttttcccgctggagcgattacaccc

SEQ ID NO: 23757 - DNA, 25 bp, Homo sapien
aggaaccaggtttctgcagcgtctg

SEQ ID NO: 23758 - DNA, 25 bp, Homo sapien
tgcgtttaatgaccctcagaaaagc

SEQ ID NO: 23759 - DNA, 25 bp, Homo sapien
ttttttgcagatgagagggaatcgg

SEQ ID NO: 23760 - DNA, 25 bp, Homo sapien
tggattctagcctcccagaacagac

SEQ ID NO: 23761 - DNA, 25 bp, Homo sapien
cttcacgggagggatttttgtacaa

SEQ ID NO: 23762 - DNA, 25 bp, Homo sapien
ggctttggagcagctcggtctccca

SEQ ID NO: 23763 - DNA, 25 bp, Homo sapien
aaaatcctgagcacgtggctctacc

SEQ ID NO: 23764 - DNA, 25 bp, Homo sapien
gcagggagaaagtacatgttaaaaa

SEQ ID NO: 23765 - DNA, 25 bp, Homo sapien
gaaacaaggttctcggtatgttgcc

SEQ ID NO: 23766 - DNA, 25 bp, Homo sapien
tgcctggccgagtttcccatttaat

SEQ ID NO: 23767 - DNA, 25 bp, Homo sapien
gaaaagtgaaatcacagacaagggg

SEQ ID NO: 23768 - DNA, 25 bp, Homo sapien
aactgaaaccgtgaaaagtgaaatc

SEQ ID NO: 23769 - DNA, 25 bp, Homo sapien
gtttagagtgcagggagaaagtaca

SEQ ID NO: 23770 - DNA, 25 bp, Homo sapien
tgcagataactgaaaccgtgaaaag

SEQ ID NO: 23771 - DNA, 25 bp, Homo sapien
ttactgggacagcaggtgcgtccca

SEQ ID NO: 23772 - DNA, 25 bp, Homo sapien
accatggttgaatgcagataactga

SEQ ID NO: 23773 - DNA, 25 bp, Homo sapien
aaggggggactgctctgtaaataaa

SEQ ID NO: 23774 - DNA, 25 bp, Homo sapien
ttgtagaaacaaggttctcggtatg

SEQ ID NO: 23775 - DNA, 25 bp, Homo sapien
cctggggcttccgaattgagatatt

SEQ ID NO: 23776 - DNA, 25 bp, Homo sapien
atggagggtctcctcaaatagtttt

SEQ ID NO: 23777 - DNA, 25 bp, Homo sapien
ttctgagaaaatatacgtgatacat

SEQ ID NO: 23778 - DNA, 25 bp, Homo sapien
ctggggttgaaaaggttgtacagta

SEQ ID NO: 23779 - DNA, 25 bp, Homo sapien
agtgatgatggccttcaacatgccc

SEQ ID NO: 23780 - DNA, 25 bp, Homo sapien
gatcaaaaagtacaacattgaggac

SEQ ID NO: 23781 - DNA, 25 bp, Homo sapien
aacatgccctctacctgggacgtag

SEQ ID NO: 23782 - DNA, 25 bp, Homo sapien
tcggaattttgaaagcattgcatat

SEQ ID NO: 23783 - DNA, 25 bp, Homo sapien
atacgtgatacattttctgaggctt

SEQ ID NO: 23784 - DNA, 25 bp, Homo sapien
cagtagaacagaacatccagtgatg

SEQ ID NO: 23785 - DNA, 25 bp, Homo sapien
aggttgtacagtagaacagaacatc

SEQ ID NO: 23786 - DNA, 25 bp, Homo sapien
aatacagtcactccactgcacgttc

SEQ ID NO: 23787 - DNA, 25 bp, Homo sapien
ttcagttggaccttgtgcaacctgc

SEQ ID NO: 23788 - DNA, 25 bp, Homo sapien
ttcatcttcagttggaccttgtgca

SEQ ID NO: 23789 - DNA, 25 bp, Homo sapien
tgaatttaagtgcttagggttattc

SEQ ID NO: 23790 - DNA, 25 bp, Homo sapien
cttgtgcaacctgcatctggtaatt

SEQ ID NO: 23791 - DNA, 25 bp, Homo sapien
tactgaatttaagtgcttagggtta

SEQ ID NO: 23792 - DNA, 25 bp, Homo sapien
tttccttataatacagtcactccac

SEQ ID NO: 23793 - DNA, 25 bp, Homo sapien
agttggaccttgtgcaacctgcatc

SEQ ID NO: 23794 - DNA, 25 bp, Homo sapien
tttgactcatgacattctttcatct

SEQ ID NO: 23795 - DNA, 25 bp, Homo sapien
gtgcaacctgcatctggtaatttgt

SEQ ID NO: 23796 - DNA, 25 bp, Homo sapien
atcttcagttggaccttgtgcaacc

SEQ ID NO: 23797 - DNA, 25 bp, Homo sapien
taatataggagtctatgagattttc

SEQ ID NO: 23798 - DNA, 25 bp, Homo sapien
gaaaatctcatagactcctatatta

SEQ ID NO: 23799 - DNA, 25 bp, Homo sapien
ttcctcatctatgaattgtcattca

SEQ ID NO: 23800 - DNA, 25 bp, Homo sapien
tcttttattagtggtgaaagtgttc

SEQ ID NO: 23801 - DNA, 25 bp, Homo sapien
gcccagccctagttcagtatctttt

SEQ ID NO: 23802 - DNA, 25 bp, Homo sapien
tagtggtgaaagtgttctatgcatt

SEQ ID NO: 23803 - DNA, 25 bp, Homo sapien
tattagtggtgaaagtgttctatgc

SEQ ID NO: 23804 - DNA, 25 bp, Homo sapien
gtggtgaaagtgttctatgcattta

SEQ ID NO: 23805 - DNA, 25 bp, Homo sapien
catatgcagatacttattgcatttc

SEQ ID NO: 23806 - DNA, 25 bp, Homo sapien
catttattggctcttgaatttcctc

SEQ ID NO: 23807 - DNA, 25 bp, Homo sapien
attagtggtgaaagtgttctatgca

SEQ ID NO: 23808 - DNA, 25 bp, Homo sapien
tttattagtggtgaaagtgttctat

SEQ ID NO: 23809 - DNA, 25 bp, Homo sapien
ttttattagtggtgaaagtgttcta

SEQ ID NO: 23810 - DNA, 25 bp, Homo sapien
catactggacttggctatgttgcct

SEQ ID NO: 23811 - DNA, 25 bp, Homo sapien
aaggtgactgccacattaagcatta

SEQ ID NO: 23812 - DNA, 25 bp, Homo sapien
ccacagagacataaaacggtggtag

SEQ ID NO: 23813 - DNA, 25 bp, Homo sapien
gggcagacagaagctggaaagacca

SEQ ID NO: 23814 - DNA, 25 bp, Homo sapien
attattgaaggccagcaaaatgttt

SEQ ID NO: 23815 - DNA, 25 bp, Homo sapien
attaagcattaaagaggtatttcgc

SEQ ID NO: 23816 - DNA, 25 bp, Homo sapien
gccagcaaaatgttttaggagaaac

SEQ ID NO: 23817 - DNA, 25 bp, Homo sapien
aactgggcttttgaggcaacctact

SEQ ID NO: 23818 - DNA, 25 bp, Homo sapien
caagaaaattgtaacccacagagac

SEQ ID NO: 23819 - DNA, 25 bp, Homo sapien
agaaggcaggtttctcatactggac

SEQ ID NO: 23820 - DNA, 25 bp, Homo sapien
gaatgatcaaaggaaaactgggctt

SEQ ID NO: 23821 - DNA, 25 bp, Homo sapien
atatgctaacatacgttgtatctat

SEQ ID NO: 23822 - DNA, 25 bp, Homo sapien
agtgggttgaagagctatcccatac

SEQ ID NO: 23823 - DNA, 25 bp, Homo sapien
gcccggcctgatcacgaaccttaat

SEQ ID NO: 23824 - DNA, 25 bp, Homo sapien
attttcatggatcatcttgagaaac

SEQ ID NO: 23825 - DNA, 25 bp, Homo sapien
cgttgtatctatttgagagtgggtt

SEQ ID NO: 23826 - DNA, 25 bp, Homo sapien
atctatttgagagtgggttgaagag

SEQ ID NO: 23827 - DNA, 25 bp, Homo sapien
tgatcacgaaccttaatatgctaac

SEQ ID NO: 23828 - DNA, 25 bp, Homo sapien
agagtgggttgaagagctatcccat

SEQ ID NO: 23829 - DNA, 25 bp, Homo sapien
tcatggatcatcttgagaaactatt

SEQ ID NO: 23830 - DNA, 25 bp, Homo sapien
ggttgaagagctatcccatacatca

SEQ ID NO: 23831 - DNA, 25 bp, Homo sapien
gagcccggcctgatcacgaacctta

SEQ ID NO: 23832 - DNA, 25 bp, Homo sapien
tctgtgggggtaataagcttaatat

SEQ ID NO: 23833 - DNA, 25 bp, Homo sapien
gagaaaatggctcctgaacatacag

SEQ ID NO: 23834 - DNA, 25 bp, Homo sapien
aaagtaaaagaacgcccatcttcag

SEQ ID NO: 23835 - DNA, 25 bp, Homo sapien
cctcaattcttggtatctggcacaa

SEQ ID NO: 23836 - DNA, 25 bp, Homo sapien
caagtctgaggggatatcccttttc

SEQ ID NO: 23837 - DNA, 25 bp, Homo sapien
gcatgcagggcataatcgcctcaat

SEQ ID NO: 23838 - DNA, 25 bp, Homo sapien
caatccctgggttgtttgtctacag

SEQ ID NO: 23839 - DNA, 25 bp, Homo sapien
ggaatctctggagaaaatggctcct

SEQ ID NO: 23840 - DNA, 25 bp, Homo sapien
atctggcacaatgttcagttggcag

SEQ ID NO: 23841 - DNA, 25 bp, Homo sapien
tttagcctgcattactggggcagtg

SEQ ID NO: 23842 - DNA, 25 bp, Homo sapien
ttcagtataccaagcagcatgcagg

SEQ ID NO: 23843 - DNA, 25 bp, Homo sapien
caggtaataaatcgtgatgaatttc

SEQ ID NO: 23844 - DNA, 25 bp, Homo sapien
tacaagtaattaggtggcttcaatt

SEQ ID NO: 23845 - DNA, 25 bp, Homo sapien
ggcagatagagatagctaataacac

SEQ ID NO: 23846 - DNA, 25 bp, Homo sapien
taattcccaagaggaagcaaaccag

SEQ ID NO: 23847 - DNA, 25 bp, Homo sapien
taataacacaagtatggcatccagt

SEQ ID NO: 23848 - DNA, 25 bp, Homo sapien
tagaaaaggttgttctgtcgacgcg

SEQ ID NO: 23849 - DNA, 25 bp, Homo sapien
tggtcaaagctgaaagaatgatgat

SEQ ID NO: 23850 - DNA, 25 bp, Homo sapien
catccagtggttgggcaccctttga

SEQ ID NO: 23851 - DNA, 25 bp, Homo sapien
caaaccagaggcttaggcagataga

SEQ ID NO: 23852 - DNA, 25 bp, Homo sapien
tgggcaccctttgaaagcaaaatgt

SEQ ID NO: 23853 - DNA, 25 bp, Homo sapien
taggtatcaccagaagaaacaaaag

SEQ ID NO: 23854 - DNA, 25 bp, Homo sapien
tttcagaatcagatggacatttttt

SEQ ID NO: 23855 - DNA, 25 bp, Homo sapien
tgagaggcagtgtcatgtcatgaaa

SEQ ID NO: 23856 - DNA, 25 bp, Homo sapien
aaccaggagagcttcacagctattc

SEQ ID NO: 23857 - DNA, 25 bp, Homo sapien
gtgtggtttgaaggcctgaaagcca

SEQ ID NO: 23858 - DNA, 25 bp, Homo sapien
ctgaaagccagagacctggtggtgt

SEQ ID NO: 23859 - DNA, 25 bp, Homo sapien
cccaggaaagccagttgtgtggttt

SEQ ID NO: 23860 - DNA, 25 bp, Homo sapien
ttccaattctaaaagcctgagaacc

SEQ ID NO: 23861 - DNA, 25 bp, Homo sapien
tttcgagatttgacttaaatgtcac

SEQ ID NO: 23862 - DNA, 25 bp, Homo sapien
tgtcatgaaatgaacctcagcttgc

SEQ ID NO: 23863 - DNA, 25 bp, Homo sapien
agacctggtggtgtagattccattc

SEQ ID NO: 23864 - DNA, 25 bp, Homo sapien
cttctcacttgagaggcagtgtcat

SEQ ID NO: 23865 - DNA, 25 bp, Homo sapien
ctaaagcttgagtcaaacatgaatt

SEQ ID NO: 23866 - DNA, 25 bp, Homo sapien
catgacagagatgacttactacctc

SEQ ID NO: 23867 - DNA, 25 bp, Homo sapien
ccagggcagtgtcagtatttgaaca

SEQ ID NO: 23868 - DNA, 25 bp, Homo sapien
ggtggatgtctttaggaccaatctt

SEQ ID NO: 23869 - DNA, 25 bp, Homo sapien
catcatgcttcccaggagcaagaca

SEQ ID NO: 23870 - DNA, 25 bp, Homo sapien
actcgcaatacacgtggtggatgtc

SEQ ID NO: 23871 - DNA, 25 bp, Homo sapien
taaatgctcacagaattacaaaatc

SEQ ID NO: 23872 - DNA, 25 bp, Homo sapien
actctaggcactgggtcttgcccat

SEQ ID NO: 23873 - DNA, 25 bp, Homo sapien
tagctgctaagcctttccatcatgc

SEQ ID NO: 23874 - DNA, 25 bp, Homo sapien
atttgaacagcctgagaagcttcct

SEQ ID NO: 23875 - DNA, 25 bp, Homo sapien
gcccatgtttcaatggcctgtgaaa

SEQ ID NO: 23876 - DNA, 25 bp, Homo sapien
atgcacccggcctttgaaagttata

SEQ ID NO: 23877 - DNA, 25 bp, Homo sapien
aatttttatgctttgtaggaatctg

SEQ ID NO: 23878 - DNA, 25 bp, Homo sapien
tttttatgctttgtaggaatctgaa

SEQ ID NO: 23879 - DNA, 25 bp, Homo sapien
tatgctttgtaggaatctgaaaaac

SEQ ID NO: 23880 - DNA, 25 bp, Homo sapien
tgtattatatactgaagcaaatttt

SEQ ID NO: 23881 - DNA, 25 bp, Homo sapien
tgcacccggcctttgaaagttataa

SEQ ID NO: 23882 - DNA, 25 bp, Homo sapien
aatgcacccggcctttgaaagttat

SEQ ID NO: 23883 - DNA, 25 bp, Homo sapien
gaatctgaaaaacatatgtattata

SEQ ID NO: 23884 - DNA, 25 bp, Homo sapien
ccaatgcacccggcctttgaaagtt

SEQ ID NO: 23885 - DNA, 25 bp, Homo sapien
tgagccaatgcacccggcctttgaa

SEQ ID NO: 23886 - DNA, 25 bp, Homo sapien
tttatgctttgtaggaatctgaaaa

SEQ ID NO: 23887 - DNA, 25 bp, Homo sapien
tcctcaggtgggttgtttgtggtca

SEQ ID NO: 23888 - DNA, 25 bp, Homo sapien
cagggcctcctcaggtgggttgttt

SEQ ID NO: 23889 - DNA, 25 bp, Homo sapien
tatccgcgaactgcctgagatgttt

SEQ ID NO: 23890 - DNA, 25 bp, Homo sapien
cttctatccgcgaactgcctgagat

SEQ ID NO: 23891 - DNA, 25 bp, Homo sapien
tgctgagacatagtaaacattcaac

SEQ ID NO: 23892 - DNA, 25 bp, Homo sapien
ggctccttgcaaggaactaggagaa

SEQ ID NO: 23893 - DNA, 25 bp, Homo sapien
ccttgcaaggaactaggagaactct

SEQ ID NO: 23894 - DNA, 25 bp, Homo sapien
aacattcaacatatggcaggctctt

SEQ ID NO: 23895 - DNA, 25 bp, Homo sapien
atggcaggctcttaatattatttcc

SEQ ID NO: 23896 - DNA, 25 bp, Homo sapien
tagctgggcattggtttaaaagtcc

SEQ ID NO: 23897 - DNA, 25 bp, Homo sapien
tgtttgtggtcagacaggtcctccc

SEQ ID NO: 23898 - DNA, 25 bp, Homo sapien
gcgtaagggcaagcaacaccagcaa

SEQ ID NO: 23899 - DNA, 25 bp, Homo sapien
tcggtaacatcatgcagaggacagt

SEQ ID NO: 23900 - DNA, 25 bp, Homo sapien
atgacaggccctctattgataattt

SEQ ID NO: 23901 - DNA, 25 bp, Homo sapien
ctttccatttggaagtgcagtcttc

SEQ ID NO: 23902 - DNA, 25 bp, Homo sapien
ttccatttgaatgacaggccctcta

SEQ ID NO: 23903 - DNA, 25 bp, Homo sapien
ttgataatttagaaagcttacatct

SEQ ID NO: 23904 - DNA, 25 bp, Homo sapien
agtccagctgactaagttgtccagt

SEQ ID NO: 23905 - DNA, 25 bp, Homo sapien
ctgcctgagatttgacagagcgtaa

SEQ ID NO: 23906 - DNA, 25 bp, Homo sapien
ggggaccagtgagttgaatccattt

SEQ ID NO: 23907 - DNA, 25 bp, Homo sapien
tggttgtctccatttcggtaacatc

SEQ ID NO: 23908 - DNA, 25 bp, Homo sapien
ttgaagccacatttccaaaggagcc

SEQ ID NO: 23909 - DNA, 25 bp, Homo sapien
gttccatccgccaggagcgccgttt

SEQ ID NO: 23910 - DNA, 25 bp, Homo sapien
ctgggcctcagtcttgcgctctgca

SEQ ID NO: 23911 - DNA, 25 bp, Homo sapien
gtgctgttccatccgccaggagcgc

SEQ ID NO: 23912 - DNA, 25 bp, Homo sapien
tttgcccgtgctgttccatccgcca

SEQ ID NO: 23913 - DNA, 25 bp, Homo sapien
gcgctctgcaaaccggggtctcgaa

SEQ ID NO: 23914 - DNA, 25 bp, Homo sapien
cacgagttcaagtctgcagtcagcc

SEQ ID NO: 23915 - DNA, 25 bp, Homo sapien
tcttgcgctctgcaaaccggggtct

SEQ ID NO: 23916 - DNA, 25 bp, Homo sapien
catccacgagttcaagtctgcagtc

SEQ ID NO: 23917 - DNA, 25 bp, Homo sapien
aatggcttgcatccacgagttcaag

SEQ ID NO: 23918 - DNA, 25 bp, Homo sapien
ggagcgccgtttcctgcctgactgc

SEQ ID NO: 23919 - DNA, 25 bp, Homo sapien
agccctcctgtctcggcgctgggga

SEQ ID NO: 23920 - DNA, 25 bp, Homo sapien
ccaccggcgttctgcagctggggct

SEQ ID NO: 23921 - DNA, 25 bp, Homo sapien
ttggggccagtctgtggacgccctc

SEQ ID NO: 23922 - DNA, 25 bp, Homo sapien
actcagccttcaggatgctctgggg

SEQ ID NO: 23923 - DNA, 25 bp, Homo sapien
gttctcagacatacggctgacattt

SEQ ID NO: 23924 - DNA, 25 bp, Homo sapien
tacggctgacatttggggccagtct

SEQ ID NO: 23925 - DNA, 25 bp, Homo sapien
gatgctctggggaccctcgctttcc

SEQ ID NO: 23926 - DNA, 25 bp, Homo sapien
ccttcaggatgctctggggaccctc

SEQ ID NO: 23927 - DNA, 25 bp, Homo sapien
ctccaggtcaactcagccttcagga

SEQ ID NO: 23928 - DNA, 25 bp, Homo sapien
gacatacggctgacatttggggcca

SEQ ID NO: 23929 - DNA, 25 bp, Homo sapien
aatgctgttctcagacatacggctg

SEQ ID NO: 23930 - DNA, 25 bp, Homo sapien
ggtcaactcagccttcaggatgctc

SEQ ID NO: 23931 - DNA, 25 bp, Homo sapien
agcagtaacgctggaactcctccat

SEQ ID NO: 23932 - DNA, 25 bp, Homo sapien
cccgtgtccgggttccagcagtaac

SEQ ID NO: 23933 - DNA, 25 bp, Homo sapien
aactcagccttcaggatgctctggg

SEQ ID NO: 23934 - DNA, 25 bp, Homo sapien
gttctcagacatacggctgacattt

SEQ ID NO: 23935 - DNA, 25 bp, Homo sapien
ccttcaggatgctctggggaccctc

SEQ ID NO: 23936 - DNA, 25 bp, Homo sapien
ccaccggcgttctgcagctggggct

SEQ ID NO: 23937 - DNA, 25 bp, Homo sapien
gatgctctggggaccctcgctttcc

SEQ ID NO: 23938 - DNA, 25 bp, Homo sapien
aatgctgttctcagacatacggctg

SEQ ID NO: 23939 - DNA, 25 bp, Homo sapien
ttggggccagtctgtggacgccctc

SEQ ID NO: 23940 - DNA, 25 bp, Homo sapien
tccaggtcaactcagccttcaggat

SEQ ID NO: 23941 - DNA, 25 bp, Homo sapien
tacggctgacatttggggccagtct

SEQ ID NO: 23942 - DNA, 25 bp, Homo sapien
tgagatctgcagataaaaatgctgt

SEQ ID NO: 23943 - DNA, 25 bp, Homo sapien
attcacacatgctttgagatctgca

SEQ ID NO: 23944 - DNA, 25 bp, Homo sapien
acacatgctttgagatctgcagata

SEQ ID NO: 23945 - DNA, 25 bp, Homo sapien
gtctgcttatatctaattaacgttc

SEQ ID NO: 23946 - DNA, 25 bp, Homo sapien
atctaattaacgttcagtgagtctc

SEQ ID NO: 23947 - DNA, 25 bp, Homo sapien
ctctggctacttaaaatagggaaat

SEQ ID NO: 23948 - DNA, 25 bp, Homo sapien
aattatcaattaccagctaccacct

SEQ ID NO: 23949 - DNA, 25 bp, Homo sapien
aaaatgctgtattactaccaaccac

SEQ ID NO: 23950 - DNA, 25 bp, Homo sapien
taacgttcagtgagtctctggctac

SEQ ID NO: 23951 - DNA, 25 bp, Homo sapien
taccaaccacaatgaatacacatac

SEQ ID NO: 23952 - DNA, 25 bp, Homo sapien
cttaaaatagggaaataatgcatat

SEQ ID NO: 23953 - DNA, 25 bp, Homo sapien
gaagtgcactgttttgtgctgaaat

SEQ ID NO: 23954 - DNA, 25 bp, Homo sapien
tcctgaagcaattatatcacacctc

SEQ ID NO: 23955 - DNA, 25 bp, Homo sapien
tttccatggacacgggagcaaaaga

SEQ ID NO: 23956 - DNA, 25 bp, Homo sapien
agcagatacacaagggaagccagtt

SEQ ID NO: 23957 - DNA, 25 bp, Homo sapien
aatgaagacatggtcttttgtgccc

SEQ ID NO: 23958 - DNA, 25 bp, Homo sapien
aactctctcctgaagcaattatatc

SEQ ID NO: 23959 - DNA, 25 bp, Homo sapien
agaaaggggagctttccatggacac

SEQ ID NO: 23960 - DNA, 25 bp, Homo sapien
aaccatgcaaggagaaaggggagct

SEQ ID NO: 23961 - DNA, 25 bp, Homo sapien
tcacacctcaatgaagtgcactgtt

SEQ ID NO: 23962 - DNA, 25 bp, Homo sapien
acagggccattcgtgagattagcat

SEQ ID NO: 23963 - DNA, 25 bp, Homo sapien
tcccactggcggaacagggccattc

SEQ ID NO: 23964 - DNA, 25 bp, Homo sapien
tttgctccatctacgcatgcgcact

SEQ ID NO: 23965 - DNA, 25 bp, Homo sapien
tggagaggcggttttgctccatcta

SEQ ID NO: 23966 - DNA, 25 bp, Homo sapien
taccatgggaacaaaggttgacgtc

SEQ ID NO: 23967 - DNA, 25 bp, Homo sapien
ttccttgctggacccaagggtcgat

SEQ ID NO: 23968 - DNA, 25 bp, Homo sapien
ccaaggttctgcgttaccatgggaa

SEQ ID NO: 23969 - DNA, 25 bp, Homo sapien
ttagggcttccttgctggacccaag

SEQ ID NO: 23970 - DNA, 25 bp, Homo sapien
aaggttgacgtcacttagggcttcc

SEQ ID NO: 23971 - DNA, 25 bp, Homo sapien
tttacctgcagcgtcaactgagccg

SEQ ID NO: 23972 - DNA, 25 bp, Homo sapien
cgtaaatctcgttccggctgggcct

SEQ ID NO: 23973 - DNA, 25 bp, Homo sapien
cagcgtcaactgagccggttttccg

SEQ ID NO: 23974 - DNA, 25 bp, Homo sapien
aagtctttttacctgcagcgtcaac

SEQ ID NO: 23975 - DNA, 25 bp, Homo sapien
aaaccgggcaatattgtgttcagtt

SEQ ID NO: 23976 - DNA, 25 bp, Homo sapien
aatattgtgttcagttcaagctgtg

SEQ ID NO: 23977 - DNA, 25 bp, Homo sapien
gagacccagccaagagctgagggta

SEQ ID NO: 23978 - DNA, 25 bp, Homo sapien
atattgtgttcagttcaagctgtga

SEQ ID NO: 23979 - DNA, 25 bp, Homo sapien
accgggcaatattgtgttcagttca

SEQ ID NO: 23980 - DNA, 25 bp, Homo sapien
aggctgtggacattttcggaatgtt

SEQ ID NO: 23981 - DNA, 25 bp, Homo sapien
tgttcagttcaagctgtgaagaaaa

SEQ ID NO: 23982 - DNA, 25 bp, Homo sapien
gatggggcatagtgggagacccagc

SEQ ID NO: 23983 - DNA, 25 bp, Homo sapien
gctgtggacattttcggaatgtttt

SEQ ID NO: 23984 - DNA, 25 bp, Homo sapien
agacccagccaagagctgagggtaa

SEQ ID NO: 23985 - DNA, 25 bp, Homo sapien
cagttcaagctgtgaagaaaaatat

SEQ ID NO: 23986 - DNA, 25 bp, Homo sapien
cttcccaaagcctgcaaagctgtgc

SEQ ID NO: 23987 - DNA, 25 bp, Homo sapien
cccgttgggcaattacactggctct

SEQ ID NO: 23988 - DNA, 25 bp, Homo sapien
tgaagattacagagccttgttatcc

SEQ ID NO: 23989 - DNA, 25 bp, Homo sapien
caccgtgcctggacctaaactcttt

SEQ ID NO: 23990 - DNA, 25 bp, Homo sapien
tacgcctggccaatatcagcatctt

SEQ ID NO: 23991 - DNA, 25 bp, Homo sapien
ctggtgtaaaactttgaggaaatga

SEQ ID NO: 23992 - DNA, 25 bp, Homo sapien
cctgcaatttgggaactataaactt

SEQ ID NO: 23993 - DNA, 25 bp, Homo sapien
acttggccatagaatcctggtgtaa

SEQ ID NO: 23994 - DNA, 25 bp, Homo sapien
tatgccagggcttcatccaaatacc

SEQ ID NO: 23995 - DNA, 25 bp, Homo sapien
tttcatagggttagtatgccagggc

SEQ ID NO: 23996 - DNA, 25 bp, Homo sapien
gataaatcggctttgcttaggcagc

SEQ ID NO: 23997 - DNA, 25 bp, Homo sapien
atatgataaatgaaccaagagatta

SEQ ID NO: 23998 - DNA, 25 bp, Homo sapien
agtgctgtggaccaacctctgcctc

SEQ ID NO: 23999 - DNA, 25 bp, Homo sapien
aatcaccaatagcagaatcagatcc

SEQ ID NO: 24000 - DNA, 25 bp, Homo sapien
tgaacatgtgttagaaccaagcttc

SEQ ID NO: 24001 - DNA, 25 bp, Homo sapien
caaaactgttctgtggctaaggccc

SEQ ID NO: 24002 - DNA, 25 bp, Homo sapien
caaggagtaagtagttatgaagaaa

SEQ ID NO: 24003 - DNA, 25 bp, Homo sapien
ccacgctgggccaaaagttagtagt

SEQ ID NO: 24004 - DNA, 25 bp, Homo sapien
atcatgagtaaaaggcagcagaaat

SEQ ID NO: 24005 - DNA, 25 bp, Homo sapien
atacatctggtaaaaggaaattcat

SEQ ID NO: 24006 - DNA, 25 bp, Homo sapien
ataaaacacgctagaaatgtgccat

SEQ ID NO: 24007 - DNA, 25 bp, Homo sapien
aagagattataaacaaggagtaagt

SEQ ID NO: 24008 - DNA, 25 bp, Homo sapien
agtaagaaataagggtacagagtta

SEQ ID NO: 24009 - DNA, 25 bp, Homo sapien
aatgtgacaggccttaaaagctaaa

SEQ ID NO: 24010 - DNA, 25 bp, Homo sapien
aagataacgcctaacagtgatgaac

SEQ ID NO: 24011 - DNA, 25 bp, Homo sapien
aatcgtggaatgttttgtggaaatc

SEQ ID NO: 24012 - DNA, 25 bp, Homo sapien
atcagtggcaagtgtttgacaacaa

SEQ ID NO: 24013 - DNA, 25 bp, Homo sapien
gagtggaaggccttactttggagta

SEQ ID NO: 24014 - DNA, 25 bp, Homo sapien
ctcaaccaccattaagggaaatcgt

SEQ ID NO: 24015 - DNA, 25 bp, Homo sapien
aaataacgtctatcagtggcaagtg

SEQ ID NO: 24016 - DNA, 25 bp, Homo sapien
atctagctcaggaatagtggctata

SEQ ID NO: 24017 - DNA, 25 bp, Homo sapien
tgacaacaaagtatcgcaggaattt

SEQ ID NO: 24018 - DNA, 25 bp, Homo sapien
actattggaagaaaaacacaccttc

SEQ ID NO: 24019 - DNA, 25 bp, Homo sapien
gctttgaagaacagggcacggtctc

SEQ ID NO: 24020 - DNA, 25 bp, Homo sapien
acaagcaaggcagaagctaaaagga

SEQ ID NO: 24021 - DNA, 25 bp, Homo sapien
gaagtttttacagtacaagaggaca

SEQ ID NO: 24022 - DNA, 25 bp, Homo sapien
atagtgatttccgtttggtgcaatt

SEQ ID NO: 24023 - DNA, 25 bp, Homo sapien
tcctgtcatggtacaacacaattac

SEQ ID NO: 24024 - DNA, 25 bp, Homo sapien
cagctaagctttgaagaacagggca

SEQ ID NO: 24025 - DNA, 25 bp, Homo sapien
cagaagctaaaaggaagcaagtaga

SEQ ID NO: 24026 - DNA, 25 bp, Homo sapien
ggcacggtctcgcacggcacacaat

SEQ ID NO: 24027 - DNA, 25 bp, Homo sapien
agtagaaatatgaccagctaagctt

SEQ ID NO: 24028 - DNA, 25 bp, Homo sapien
aaggaagcaagtagaaatatgacca

SEQ ID NO: 24029 - DNA, 25 bp, Homo sapien
atcgctgcttcatatagtgatttcc

SEQ ID NO: 24030 - DNA, 25 bp, Homo sapien
ctgagggcaaaagctggtttcattt

SEQ ID NO: 24031 - DNA, 25 bp, Homo sapien
gcctaaggccaggtacaatgtagtt

SEQ ID NO: 24032 - DNA, 25 bp, Homo sapien
ttgaggaaacagaaattggttcagc

SEQ ID NO: 24033 - DNA, 25 bp, Homo sapien
tgtaggcataatccaaagggtcata

SEQ ID NO: 24034 - DNA, 25 bp, Homo sapien
acagttgaaactgccaggaattttc

SEQ ID NO: 24035 - DNA, 25 bp, Homo sapien
tagcacaatgtgaaccatacagttt

SEQ ID NO: 24036 - DNA, 25 bp, Homo sapien
tctgccaactccaggagatgggatc

SEQ ID NO: 24037 - DNA, 25 bp, Homo sapien
ctgtagaaccttatgcagaaatgtt

SEQ ID NO: 24038 - DNA, 25 bp, Homo sapien
agatgggatcaacctgagggcaaaa

SEQ ID NO: 24039 - DNA, 25 bp, Homo sapien
ccctgggacataatgcatacggtat

SEQ ID NO: 24040 - DNA, 25 bp, Homo sapien
ttggagaacaggttagcaatgtcta

SEQ ID NO: 24041 - DNA, 25 bp, Homo sapien
cagggaacacataacgaagcaagat

SEQ ID NO: 24042 - DNA, 25 bp, Homo sapien
ctctggggagctgctgttgttttga

SEQ ID NO: 24043 - DNA, 25 bp, Homo sapien
cacagcgggcagtggattttgtctc

SEQ ID NO: 24044 - DNA, 25 bp, Homo sapien
ctgctgggtcaggacatttgttgaa

SEQ ID NO: 24045 - DNA, 25 bp, Homo sapien
aagcaagatggttttagagtcgttc

SEQ ID NO: 24046 - DNA, 25 bp, Homo sapien
gaggatgttaaaccagggaacacat

SEQ ID NO: 24047 - DNA, 25 bp, Homo sapien
ttgttttgagtgaggaggatgttaa

SEQ ID NO: 24048 - DNA, 25 bp, Homo sapien
acagcacaggcaaaggccctggtgt

SEQ ID NO: 24049 - DNA, 25 bp, Homo sapien
cagtggattttgtctcaggtgtggc

SEQ ID NO: 24050 - DNA, 25 bp, Homo sapien
catccaccatgagaaacaaaacggg

SEQ ID NO: 24051 - DNA, 25 bp, Homo sapien
tgagaaacaaaacgggttgagtgaa

SEQ ID NO: 24052 - DNA, 25 bp, Homo sapien
aaaagagaggtgacaacaatgcttc

SEQ ID NO: 24053 - DNA, 25 bp, Homo sapien
tctgtcaaaatgaggattagtatac

SEQ ID NO: 24054 - DNA, 25 bp, Homo sapien
tgtgtgccacgctgtaaacaacttc

SEQ ID NO: 24055 - DNA, 25 bp, Homo sapien
agacagttagtgtatgttatggacc

SEQ ID NO: 24056 - DNA, 25 bp, Homo sapien
gttatggaccgaactgtatccctcc

SEQ ID NO: 24057 - DNA, 25 bp, Homo sapien
atggtggggcatactaaaattctca

SEQ ID NO: 24058 - DNA, 25 bp, Homo sapien
tttcaagtgacttaggtatggtttc

SEQ ID NO: 24059 - DNA, 25 bp, Homo sapien
caatgcttccaattgggtccaagtc

SEQ ID NO: 24060 - DNA, 25 bp, Homo sapien
gagaatatggagacagatacctgtc

SEQ ID NO: 24061 - DNA, 25 bp, Homo sapien
ttccattagagatagtgtgtgccac

SEQ ID NO: 24062 - DNA, 25 bp, Homo sapien
ttgggtccaagtcaatgattctact

SEQ ID NO: 24063 - DNA, 25 bp, Homo sapien
ctgagcggcgctttaattttactgt

SEQ ID NO: 24064 - DNA, 25 bp, Homo sapien
gatgcttctgtcactctgggctttc

SEQ ID NO: 24065 - DNA, 25 bp, Homo sapien
tagaagcaaaggttagcaataagtc

SEQ ID NO: 24066 - DNA, 25 bp, Homo sapien
ttgataactcaaaacgcctgccttt

SEQ ID NO: 24067 - DNA, 25 bp, Homo sapien
tggtaggagacctggactccagccc

SEQ ID NO: 24068 - DNA, 25 bp, Homo sapien
tttgaagacctaaggcaaaagtcat

SEQ ID NO: 24069 - DNA, 25 bp, Homo sapien
ttgtcaaggacagataagtagcttc

SEQ ID NO: 24070 - DNA, 25 bp, Homo sapien
gtaaataagcgggaactgctttgtc

SEQ ID NO: 24071 - DNA, 25 bp, Homo sapien
tcttgatcacggcactcagctgagc

SEQ ID NO: 24072 - DNA, 25 bp, Homo sapien
caataagtcttcgatggtgcaaaac

SEQ ID NO: 24073 - DNA, 25 bp, Homo sapien
agttaacatacaagccagtcctgat

SEQ ID NO: 24074 - DNA, 25 bp, Homo sapien
tcatgctatctgtattggtcttaac

SEQ ID NO: 24075 - DNA, 25 bp, Homo sapien
tggctgcagtcaataaatgtgttat

SEQ ID NO: 24076 - DNA, 25 bp, Homo sapien
gctaaataaatgacttacaatgacc

SEQ ID NO: 24077 - DNA, 25 bp, Homo sapien
gtgatatcaagtgttaaacgttaga

SEQ ID NO: 24078 - DNA, 25 bp, Homo sapien
gagagaaaagacagtttcagttggc

SEQ ID NO: 24079 - DNA, 25 bp, Homo sapien
tgtcatttaaatacaggggagagag

SEQ ID NO: 24080 - DNA, 25 bp, Homo sapien
gacagtttcagttggcttcatgcta

SEQ ID NO: 24081 - DNA, 25 bp, Homo sapien
tccaaaatcgaattctgacttaagt

SEQ ID NO: 24082 - DNA, 25 bp, Homo sapien
tggtcttaacaagttgagactcctc

SEQ ID NO: 24083 - DNA, 25 bp, Homo sapien
cctgaagtccaaaagagacgtattt

SEQ ID NO: 24084 - DNA, 25 bp, Homo sapien
acgttagatatttgacaaacattcc

SEQ ID NO: 24085 - DNA, 25 bp, Homo sapien
tttccagctcaaggtgcaatgtaaa

SEQ ID NO: 24086 - DNA, 25 bp, Homo sapien
aggacggagactgccaatattttac

SEQ ID NO: 24087 - DNA, 25 bp, Homo sapien
ggagcctgagttacaaaatacctgc

SEQ ID NO: 24088 - DNA, 25 bp, Homo sapien
acacacatgcctttgataagtggtc

SEQ ID NO: 24089 - DNA, 25 bp, Homo sapien
ggcgaagcctgtcctgcacacacat

SEQ ID NO: 24090 - DNA, 25 bp, Homo sapien
aatacctgctgtttttgaaggacgg

SEQ ID NO: 24091 - DNA, 25 bp, Homo sapien
ctgctgtttttgaaggacggagact

SEQ ID NO: 24092 - DNA, 25 bp, Homo sapien
aggcaggagcctgagttacaaaata

SEQ ID NO: 24093 - DNA, 25 bp, Homo sapien
ttcggcgaagcctgtcctgcacaca

SEQ ID NO: 24094 - DNA, 25 bp, Homo sapien
tttgaaggacggagactgccaatat

SEQ ID NO: 24095 - DNA, 25 bp, Homo sapien
ttacttttccagctcaaggtgcaat

SEQ ID NO: 24096 - DNA, 25 bp, Homo sapien
atgtcattcaaccacagccattttc

SEQ ID NO: 24097 - DNA, 25 bp, Homo sapien
attcttaccatcaggggatattttg

SEQ ID NO: 24098 - DNA, 25 bp, Homo sapien
ctcaaaaattcttaccatcagggga

SEQ ID NO: 24099 - DNA, 25 bp, Homo sapien
ctaatcctggtcaatcatgtcattc

SEQ ID NO: 24100 - DNA, 25 bp, Homo sapien
aaagcctctcttgttactgtaccca

SEQ ID NO: 24101 - DNA, 25 bp, Homo sapien
aaattgagcatacaaaaaagtaagc

SEQ ID NO: 24102 - DNA, 25 bp, Homo sapien
aattattgtagtaatggctgggcac

SEQ ID NO: 24103 - DNA, 25 bp, Homo sapien
aatgaccttcatgtacccagtactc

SEQ ID NO: 24104 - DNA, 25 bp, Homo sapien
ccagtactctgatccaacaattgtc

SEQ ID NO: 24105 - DNA, 25 bp, Homo sapien
caaaaaagtaagcagaatataataa

SEQ ID NO: 24106 - DNA, 25 bp, Homo sapien
tttggtggcatttctacattaaagc

SEQ ID NO: 24107 - DNA, 25 bp, Homo sapien
gggcttagagcaaagatccttcatg

SEQ ID NO: 24108 - DNA, 25 bp, Homo sapien
aagtattaaagtagggcttagagca

SEQ ID NO: 24109 - DNA, 25 bp, Homo sapien
atcttgggatgtacagtgaagtatt

SEQ ID NO: 24110 - DNA, 25 bp, Homo sapien
aagaggtgaggctgagatcaattat

SEQ ID NO: 24111 - DNA, 25 bp, Homo sapien
ctcagttaaatggaagaaaagtgat

SEQ ID NO: 24112 - DNA, 25 bp, Homo sapien
cagctgtttgagagaggcttacaaa

SEQ ID NO: 24113 - DNA, 25 bp, Homo sapien
aacagagcattaggtcaagagtttc

SEQ ID NO: 24114 - DNA, 25 bp, Homo sapien
tcatgaaaatgctccaagaagaaac

SEQ ID NO: 24115 - DNA, 25 bp, Homo sapien
ttaggcagtagtgcacctgaaccac

SEQ ID NO: 24116 - DNA, 25 bp, Homo sapien
gctcagtggcccaaaggcagctgtt

SEQ ID NO: 24117 - DNA, 25 bp, Homo sapien
tgtttgaacctaaatgccatggctt

SEQ ID NO: 24118 - DNA, 25 bp, Homo sapien
agtcctggctatgtagacagatgtc

SEQ ID NO: 24119 - DNA, 25 bp, Homo sapien
agaggcaccttagcaagacagaaaa

SEQ ID NO: 24120 - DNA, 25 bp, Homo sapien
aaaagaccaggaaagaggcacctta

SEQ ID NO: 24121 - DNA, 25 bp, Homo sapien
aagaagctggcaactagaaatgcca

SEQ ID NO: 24122 - DNA, 25 bp, Homo sapien
aatgccacagtggtaggttctctga

SEQ ID NO: 24123 - DNA, 25 bp, Homo sapien
aactgtggaggaaaagcagacaaat

SEQ ID NO: 24124 - DNA, 25 bp, Homo sapien
ttagatgtgatatgaagtcctggct

SEQ ID NO: 24125 - DNA, 25 bp, Homo sapien
ccaaggcatgcatatcaaaacaaac

SEQ ID NO: 24126 - DNA, 25 bp, Homo sapien
agaagactctgaactgtggaggaaa

SEQ ID NO: 24127 - DNA, 25 bp, Homo sapien
cttgagatccaagaatgccacagtg

SEQ ID NO: 24128 - DNA, 25 bp, Homo sapien
aacaacggctcagggacttctgttt

SEQ ID NO: 24129 - DNA, 25 bp, Homo sapien
cacctcaaggcatttggaagaaagc

SEQ ID NO: 24130 - DNA, 25 bp, Homo sapien
tgattcttgagtatccgggccctcc

SEQ ID NO: 24131 - DNA, 25 bp, Homo sapien
gtggaaatgagatcgagaacaaaat

SEQ ID NO: 24132 - DNA, 25 bp, Homo sapien
tccaaaatctgagaggcacctcaag

SEQ ID NO: 24133 - DNA, 25 bp, Homo sapien
cttaaacattctggtgaaaggacat

SEQ ID NO: 24134 - DNA, 25 bp, Homo sapien
cttaaggttcaggagatcacagatt

SEQ ID NO: 24135 - DNA, 25 bp, Homo sapien
ccaggaattacagggaaagtaacaa

SEQ ID NO: 24136 - DNA, 25 bp, Homo sapien
catgaaacaataaggagacgagaag

SEQ ID NO: 24137 - DNA, 25 bp, Homo sapien
ctaaagtcatggcactggccgccct

SEQ ID NO: 24138 - DNA, 25 bp, Homo sapien
cgctttggaggcctagaaagttaaa

SEQ ID NO: 24139 - DNA, 25 bp, Homo sapien
acatcttgagaaaatcagacgcttc

SEQ ID NO: 24140 - DNA, 25 bp, Homo sapien
tgctcgggactctcaacttggaatt

SEQ ID NO: 24141 - DNA, 25 bp, Homo sapien
ccacccaaaagtaattgcacaatgt

SEQ ID NO: 24142 - DNA, 25 bp, Homo sapien
ataggtaggagcatgtgtatattct

SEQ ID NO: 24143 - DNA, 25 bp, Homo sapien
gcaggcttatcctagggcttctttt

SEQ ID NO: 24144 - DNA, 25 bp, Homo sapien
tttaataataggtaggagcatgtgt

SEQ ID NO: 24145 - DNA, 25 bp, Homo sapien
tacatggtgagctcataagattata

SEQ ID NO: 24146 - DNA, 25 bp, Homo sapien
atgaaaccaacagaaagtaccaccg

SEQ ID NO: 24147 - DNA, 25 bp, Homo sapien
cttggtctagaaaaagcaggcttat

SEQ ID NO: 24148 - DNA, 25 bp, Homo sapien
taccaccgtgtcattgctcgggact

SEQ ID NO: 24149 - DNA, 25 bp, Homo sapien
gaaaaactgctatcacctggtgaca

SEQ ID NO: 24150 - DNA, 25 bp, Homo sapien
gaagcctggctacgttttgaaaaca

SEQ ID NO: 24151 - DNA, 25 bp, Homo sapien
ttttaagaatgcatactgtaatcgc

SEQ ID NO: 24152 - DNA, 25 bp, Homo sapien
ttaatgaaattatgcagtgataaat

SEQ ID NO: 24153 - DNA, 25 bp, Homo sapien
acaacacaaattatttccagactgt

SEQ ID NO: 24154 - DNA, 25 bp, Homo sapien
ataatccttctggagtttataacac

SEQ ID NO: 24155 - DNA, 25 bp, Homo sapien
tcttacactttacctgaagtactac

SEQ ID NO: 24156 - DNA, 25 bp, Homo sapien
agagaactgaccttcttaagcaaaa

SEQ ID NO: 24157 - DNA, 25 bp, Homo sapien
ttacctgaagtactacaacacaaat

SEQ ID NO: 24158 - DNA, 25 bp, Homo sapien
ggagtttataacacataccgaaata

SEQ ID NO: 24159 - DNA, 25 bp, Homo sapien
taatagagaactgaccttcttaagc

SEQ ID NO: 24160 - DNA, 25 bp, Homo sapien
actgtaatcgcaaaatcaagtactt

SEQ ID NO: 24161 - DNA, 25 bp, Homo sapien
atttccagactgtgacattttaaga

SEQ ID NO: 24162 - DNA, 25 bp, Homo sapien
ccattgatgcataagaggagagtat

SEQ ID NO: 24163 - DNA, 25 bp, Homo sapien
tgacagtctggagtccacagcattt

SEQ ID NO: 24164 - DNA, 25 bp, Homo sapien
cccaagaatagaagccttaataggc

SEQ ID NO: 24165 - DNA, 25 bp, Homo sapien
tgttttatgagaggctggaatccaa

SEQ ID NO: 24166 - DNA, 25 bp, Homo sapien
gttgaacaacagagtgctttctgcc

SEQ ID NO: 24167 - DNA, 25 bp, Homo sapien
aagcaggatgcacccttttggcctc

SEQ ID NO: 24168 - DNA, 25 bp, Homo sapien
ctttcaagtaggtgacagtctggag

SEQ ID NO: 24169 - DNA, 25 bp, Homo sapien
ccttaataggcagataattgctctc

SEQ ID NO: 24170 - DNA, 25 bp, Homo sapien
tagagcctatgctcaagcaggatgc

SEQ ID NO: 24171 - DNA, 25 bp, Homo sapien
ttgctctcaagagggaaagattttt

SEQ ID NO: 24172 - DNA, 25 bp, Homo sapien
agggaaagatttttgtgtggtcaga

SEQ ID NO: 24173 - DNA, 25 bp, Homo sapien
ctcaagagcacttccaaacaaacgc

SEQ ID NO: 24174 - DNA, 25 bp, Homo sapien
ataaactctttggaacagggattgc

SEQ ID NO: 24175 - DNA, 25 bp, Homo sapien
aaacaaacgctctgcatgctccatc

SEQ ID NO: 24176 - DNA, 25 bp, Homo sapien
agcatcaagactccaaagtgtgtag

SEQ ID NO: 24177 - DNA, 25 bp, Homo sapien
aagggaacctaaattgtaacacagc

SEQ ID NO: 24178 - DNA, 25 bp, Homo sapien
aaaattagcgcctctgtggtcctgc

SEQ ID NO: 24179 - DNA, 25 bp, Homo sapien
cccagcacacgcagaggtgttattc

SEQ ID NO: 24180 - DNA, 25 bp, Homo sapien
gtggtcctgcaaggtctttacacat

SEQ ID NO: 24181 - DNA, 25 bp, Homo sapien
ctgtgctagctgcactaggaaggat

SEQ ID NO: 24182 - DNA, 25 bp, Homo sapien
ttagttacaagtaaggcactgtgct

SEQ ID NO: 24183 - DNA, 25 bp, Homo sapien
tccatcttagagacagcctccaagg

SEQ ID NO: 24184 - DNA, 25 bp, Homo sapien
tccagatgtggatgtgagcctgccc

SEQ ID NO: 24185 - DNA, 25 bp, Homo sapien
atattgacttaaacctgaaaggacc

SEQ ID NO: 24186 - DNA, 25 bp, Homo sapien
agggtgatgtggatgttacccttcc

SEQ ID NO: 24187 - DNA, 25 bp, Homo sapien
tgaatatcgaaggtccagatgcgaa

SEQ ID NO: 24188 - DNA, 25 bp, Homo sapien
tgatgtctcaggacccaaagtggac

SEQ ID NO: 24189 - DNA, 25 bp, Homo sapien
aaggacccaaagtgaagggtgatgt

SEQ ID NO: 24190 - DNA, 25 bp, Homo sapien
aagtggacgttgatgttcctgatgt

SEQ ID NO: 24191 - DNA, 25 bp, Homo sapien
tccagatgtggatgtgaacctgccc

SEQ ID NO: 24192 - DNA, 25 bp, Homo sapien
gtccagatgcgaaactaaagggccc

SEQ ID NO: 24193 - DNA, 25 bp, Homo sapien
gcccaaggccgacatcgatgtctcg

SEQ ID NO: 24194 - DNA, 25 bp, Homo sapien
atgcctgagatgagcatcaaagccc

SEQ ID NO: 24195 - DNA, 25 bp, Homo sapien
gcccggcccttaactcagcatttat

SEQ ID NO: 24196 - DNA, 25 bp, Homo sapien
atggtttcatatgtcagttatccta

SEQ ID NO: 24197 - DNA, 25 bp, Homo sapien
tttcaaggaatgtgtacactgcttc

SEQ ID NO: 24198 - DNA, 25 bp, Homo sapien
acttcctgtggtctatttgtgtttc

SEQ ID NO: 24199 - DNA, 25 bp, Homo sapien
tttcggaaataaaacatgagctatt

SEQ ID NO: 24200 - DNA, 25 bp, Homo sapien
ttttgctttcaaggaatgtgtacac

SEQ ID NO: 24201 - DNA, 25 bp, Homo sapien
tgtctgctggtgcatgctcagtttt

SEQ ID NO: 24202 - DNA, 25 bp, Homo sapien
atgttttgatggacaaacttcctgt

SEQ ID NO: 24203 - DNA, 25 bp, Homo sapien
attgtttgtgactatctgccatgtt

SEQ ID NO: 24204 - DNA, 25 bp, Homo sapien
gtgcaccaccagagccggataattt

SEQ ID NO: 24205 - DNA, 25 bp, Homo sapien
acagttctggtgtgcggtggaaaaa

SEQ ID NO: 24206 - DNA, 25 bp, Homo sapien
tgagaattctgtgggtaggagctat

SEQ ID NO: 24207 - DNA, 25 bp, Homo sapien
tgggcgaagagctttataaggattt

SEQ ID NO: 24208 - DNA, 25 bp, Homo sapien
agccaaggtttaaggagcacaaata

SEQ ID NO: 24209 - DNA, 25 bp, Homo sapien
aggagctatgctttacagggaactt

SEQ ID NO: 24210 - DNA, 25 bp, Homo sapien
gggttcacgccatggacaattcttt

SEQ ID NO: 24211 - DNA, 25 bp, Homo sapien
atggggaaataacctcgtaatacag

SEQ ID NO: 24212 - DNA, 25 bp, Homo sapien
gggaacttacaatctgtgcaggtgc

SEQ ID NO: 24213 - DNA, 25 bp, Homo sapien
acctcgtaatacagcagtgagaatt

SEQ ID NO: 24214 - DNA, 25 bp, Homo sapien
ttataagtgagcaagccaaggttta

SEQ ID NO: 24215 - DNA, 25 bp, Homo sapien
acaaaatggttgagaatgagccata

SEQ ID NO: 24216 - DNA, 25 bp, Homo sapien
ggggcacttgacagcttgctttgta

SEQ ID NO: 24217 - DNA, 25 bp, Homo sapien
agctccatggcgttcgccttccgaa

SEQ ID NO: 24218 - DNA, 25 bp, Homo sapien
agcaacagaatgcaattccagctcc

SEQ ID NO: 24219 - DNA, 25 bp, Homo sapien
cgccttccgaatttagtgttgcact

SEQ ID NO: 24220 - DNA, 25 bp, Homo sapien
tgaaagaaatggagcaacagaatgc

SEQ ID NO: 24221 - DNA, 25 bp, Homo sapien
agcaacagcactgtatggagtgaat

SEQ ID NO: 24222 - DNA, 25 bp, Homo sapien
ggattataaacctgagctgtcacac

SEQ ID NO: 24223 - DNA, 25 bp, Homo sapien
gagtgaatggaggattccctttgtc

SEQ ID NO: 24224 - DNA, 25 bp, Homo sapien
atcctcatgacgaccctgcaaaggc

SEQ ID NO: 24225 - DNA, 25 bp, Homo sapien
tgcaaaggcaccaggatgtcttcac

SEQ ID NO: 24226 - DNA, 25 bp, Homo sapien
ctttgtcactccaggcttgcccttt

SEQ ID NO: 24227 - DNA, 25 bp, Homo sapien
atgtccagtaaaaagagacggtgaa

SEQ ID NO: 24228 - DNA, 25 bp, Homo sapien
ggtatgtgaaactggtatgtaagga

SEQ ID NO: 24229 - DNA, 25 bp, Homo sapien
cctaagacaacacccagtacataag

SEQ ID NO: 24230 - DNA, 25 bp, Homo sapien
actaattgaacagtttgaggaggga

SEQ ID NO: 24231 - DNA, 25 bp, Homo sapien
gtgaaactggtatgtaaggaagaat

SEQ ID NO: 24232 - DNA, 25 bp, Homo sapien
acccagcctcttgaggttagtggtc

SEQ ID NO: 24233 - DNA, 25 bp, Homo sapien
acacccagtacataaggtatgtgaa

SEQ ID NO: 24234 - DNA, 25 bp, Homo sapien
taaggaagaatgaacccactaattg

SEQ ID NO: 24235 - DNA, 25 bp, Homo sapien
aggttagtggtcctcctaagacaac

SEQ ID NO: 24236 - DNA, 25 bp, Homo sapien
gtatgtaaggaagaatgaacccact

SEQ ID NO: 24237 - DNA, 25 bp, Homo sapien
catcatttgagagagctatggtggg

SEQ ID NO: 24238 - DNA, 25 bp, Homo sapien
gccaggccaggtgcaaattgcttct

SEQ ID NO: 24239 - DNA, 25 bp, Homo sapien
gcttgacatgtcagggccgattttc

SEQ ID NO: 24240 - DNA, 25 bp, Homo sapien
tagggcccatctggtatgaagatcc

SEQ ID NO: 24241 - DNA, 25 bp, Homo sapien
ttagctaggtaaaacatgaacttat

SEQ ID NO: 24242 - DNA, 25 bp, Homo sapien
gatcacctaagaagcatcagagcac

SEQ ID NO: 24243 - DNA, 25 bp, Homo sapien
ctacaaggctaccatggcatagtgc

SEQ ID NO: 24244 - DNA, 25 bp, Homo sapien
tttggctaaaaatggaatcaggtgg

SEQ ID NO: 24245 - DNA, 25 bp, Homo sapien
caatccaggattcaagaagacctct

SEQ ID NO: 24246 - DNA, 25 bp, Homo sapien
tcagagcacctaaggaacatcagat

SEQ ID NO: 24247 - DNA, 25 bp, Homo sapien
aatcaggtggtctttagggcccatc

SEQ ID NO: 24248 - DNA, 25 bp, Homo sapien
aagaagacctctatgatgctagctc

SEQ ID NO: 24249 - DNA, 25 bp, Homo sapien
gcaaaaacagcaccaatccaggatt

SEQ ID NO: 24250 - DNA, 25 bp, Homo sapien
cccggcctcccaagcgtggggatta

SEQ ID NO: 24251 - DNA, 25 bp, Homo sapien
ttttttgcagatatggtggtctccc

SEQ ID NO: 24252 - DNA, 25 bp, Homo sapien
ggtctctctccgtcctgcagtctag

SEQ ID NO: 24253 - DNA, 25 bp, Homo sapien
caccgcactcggctgatttgttatt

SEQ ID NO: 24254 - DNA, 25 bp, Homo sapien
tttttcagattatgagcctctcacc

SEQ ID NO: 24255 - DNA, 25 bp, Homo sapien
catatggttgatggaagttatatac

SEQ ID NO: 24256 - DNA, 25 bp, Homo sapien
cacattaagggcattccatatggtt

SEQ ID NO: 24257 - DNA, 25 bp, Homo sapien
gtcctgcagtctagagtgcaatggc

SEQ ID NO: 24258 - DNA, 25 bp, Homo sapien
atctatggatgtcgttttcaccttt

SEQ ID NO: 24259 - DNA, 25 bp, Homo sapien
ttgctaacttagaggtttctactgt

SEQ ID NO: 24260 - DNA, 25 bp, Homo sapien
ttgtattgtgtgaaatgccttacac

SEQ ID NO: 24261 - DNA, 25 bp, Homo sapien
ctggaccaatcttgatgcacaaaat

SEQ ID NO: 24262 - DNA, 25 bp, Homo sapien
acttgcctggcacactggaagctca

SEQ ID NO: 24263 - DNA, 25 bp, Homo sapien
catgcagaccatcttgtaaagcttc

SEQ ID NO: 24264 - DNA, 25 bp, Homo sapien
tacaaaatcatcagcagactcgggg

SEQ ID NO: 24265 - DNA, 25 bp, Homo sapien
ggaggaaactcagcgaatttggctc

SEQ ID NO: 24266 - DNA, 25 bp, Homo sapien
tggagatcactgagtaccaggcaca

SEQ ID NO: 24267 - DNA, 25 bp, Homo sapien
tacgcctggcctcaactggaccaat

SEQ ID NO: 24268 - DNA, 25 bp, Homo sapien
gtcactcaaaatgtaactggctatc

SEQ ID NO: 24269 - DNA, 25 bp, Homo sapien
atagcactatgccaggtaatatatc

SEQ ID NO: 24270 - DNA, 25 bp, Homo sapien
actggctatcaagctcatgatgact

SEQ ID NO: 24271 - DNA, 25 bp, Homo sapien
gggcagcagctaactcttggagatc

SEQ ID NO: 24272 - DNA, 25 bp, Homo sapien
atcactggttgatacatgtcatgct

SEQ ID NO: 24273 - DNA, 25 bp, Homo sapien
tgtatttaaatcatgccaaggtagg

SEQ ID NO: 24274 - DNA, 25 bp, Homo sapien
gagaccagtttgaacaacagtgaga

SEQ ID NO: 24275 - DNA, 25 bp, Homo sapien
ttaaatcatgccaaggtaggacttg

SEQ ID NO: 24276 - DNA, 25 bp, Homo sapien
tatcaagattataagtgggccgggt

SEQ ID NO: 24277 - DNA, 25 bp, Homo sapien
tacatgtcatgctgaaaaagaatat

SEQ ID NO: 24278 - DNA, 25 bp, Homo sapien
atcaagttatatcactggttgatac

SEQ ID NO: 24279 - DNA, 25 bp, Homo sapien
ctgaaaaagaatatatcaagtgtat

SEQ ID NO: 24280 - DNA, 25 bp, Homo sapien
tggctgaaagcatatgtatttaaat

SEQ ID NO: 24281 - DNA, 25 bp, Homo sapien
tttgagaccagtttgaacaacagtg

SEQ ID NO: 24282 - DNA, 25 bp, Homo sapien
taggacttggtgagcccttgttgtt

SEQ ID NO: 24283 - DNA, 25 bp, Homo sapien
tgtggcaattccttgtatgtgatga

SEQ ID NO: 24284 - DNA, 25 bp, Homo sapien
tgtgatgagtaattcctcttgttgc

SEQ ID NO: 24285 - DNA, 25 bp, Homo sapien
ttgttgagcttagatgtttatatac

SEQ ID NO: 24286 - DNA, 25 bp, Homo sapien
tctgctgataatcttgtggcaattc

SEQ ID NO: 24287 - DNA, 25 bp, Homo sapien
gaaggacagttttgctagatataga

SEQ ID NO: 24288 - DNA, 25 bp, Homo sapien
tgctagatatagagtccttagtttt

SEQ ID NO: 24289 - DNA, 25 bp, Homo sapien
atcttggtgtgggttctttgagttc

SEQ ID NO: 24290 - DNA, 25 bp, Homo sapien
tatatatcagcccactgctttctgg

SEQ ID NO: 24291 - DNA, 25 bp, Homo sapien
gaacactcagaatatatatcagccc

SEQ ID NO: 24292 - DNA, 25 bp, Homo sapien
ttgagttcatcttacctggagtttg

SEQ ID NO: 24293 - DNA, 25 bp, Homo sapien
gtttgatgtatcttggtgtgggttc

SEQ ID NO: 24294 - DNA, 25 bp, Homo sapien
gagacgccagctgagcgctgtccat

SEQ ID NO: 24295 - DNA, 25 bp, Homo sapien
aaattctgaaggaaccgaggattgt

SEQ ID NO: 24296 - DNA, 25 bp, Homo sapien
cctggctcaaaattctgaaggaacc

SEQ ID NO: 24297 - DNA, 25 bp, Homo sapien
ccacggtgagcgctgtacacgcaca

SEQ ID NO: 24298 - DNA, 25 bp, Homo sapien
ttacattgcaaatggcgatgctttg

SEQ ID NO: 24299 - DNA, 25 bp, Homo sapien
ctgtccatgcaccagcaacgggcag

SEQ ID NO: 24300 - DNA, 25 bp, Homo sapien
gttgggtagccaccatgacttcgcc

SEQ ID NO: 24301 - DNA, 25 bp, Homo sapien
gcctctacacggaggacacgcctgt

SEQ ID NO: 24302 - DNA, 25 bp, Homo sapien
ctgggattatagctaccgcccagcc

SEQ ID NO: 24303 - DNA, 25 bp, Homo sapien
tacacgcacagcacctagagctgct

SEQ ID NO: 24304 - DNA, 25 bp, Homo sapien
taccgcccagccctaatttacattg

SEQ ID NO: 24305 - DNA, 25 bp, Homo sapien
ggtggaattcctgggtgaaatcttc

SEQ ID NO: 24306 - DNA, 25 bp, Homo sapien
cgcatgttcacagcacagattccat

SEQ ID NO: 24307 - DNA, 25 bp, Homo sapien
catttttagatctgtgaggagggcc

SEQ ID NO: 24308 - DNA, 25 bp, Homo sapien
aagagaatgtgaagagtaaatttaa

SEQ ID NO: 24309 - DNA, 25 bp, Homo sapien
atttaagacaaaagtgatcatattc

SEQ ID NO: 24310 - DNA, 25 bp, Homo sapien
ttgcagtgtggtacttgttataacc

SEQ ID NO: 24311 - DNA, 25 bp, Homo sapien
ctggtagggatcacacgcatgttca

SEQ ID NO: 24312 - DNA, 25 bp, Homo sapien
ttgccaccacaaagaatgtcactaa

SEQ ID NO: 24313 - DNA, 25 bp, Homo sapien
tttatagcccagagctgagaatggt

SEQ ID NO: 24314 - DNA, 25 bp, Homo sapien
tgtacagtgattttagggtaagttc

SEQ ID NO: 24315 - DNA, 25 bp, Homo sapien
aggagggccataaagtctccacact

SEQ ID NO: 24316 - DNA, 25 bp, Homo sapien
tacccatgtatacgaaccctcttat

SEQ ID NO: 24317 - DNA, 25 bp, Homo sapien
ataagagggttcgtatacatgggta

SEQ ID NO: 24318 - DNA, 25 bp, Homo sapien
ttttaattgtgcattcagtggtgaa

SEQ ID NO: 24319 - DNA, 25 bp, Homo sapien
cttccacaacattttaggtcattgt

SEQ ID NO: 24320 - DNA, 25 bp, Homo sapien
tatcttgaatgcctacagaaacttc

SEQ ID NO: 24321 - DNA, 25 bp, Homo sapien
ccctttgtggtgatatgctttgatt

SEQ ID NO: 24322 - DNA, 25 bp, Homo sapien
gtgcattcagtggtgaattattatc

SEQ ID NO: 24323 - DNA, 25 bp, Homo sapien
gaatgcctacagaaacttcatacct

SEQ ID NO: 24324 - DNA, 25 bp, Homo sapien
tatgtctagtagtgataagctctcc

SEQ ID NO: 24325 - DNA, 25 bp, Homo sapien
ctattttaggctgataacaacttat

SEQ ID NO: 24326 - DNA, 25 bp, Homo sapien
ttgtgaattgataaccctttgtggt

SEQ ID NO: 24327 - DNA, 25 bp, Homo sapien
ttctgtatctgctaaaggtttttac

SEQ ID NO: 24328 - DNA, 25 bp, Homo sapien
atttgaaagtgatttatgtagtacc

SEQ ID NO: 24329 - DNA, 25 bp, Homo sapien
taacccatcgggctcagttggtccg

SEQ ID NO: 24330 - DNA, 25 bp, Homo sapien
tagctgggatggcacattcactcct

SEQ ID NO: 24331 - DNA, 25 bp, Homo sapien
gcaactcaggcttccggagacactt

SEQ ID NO: 24332 - DNA, 25 bp, Homo sapien
tgtggtcaccgctgagagcaactca

SEQ ID NO: 24333 - DNA, 25 bp, Homo sapien
agtgtcattcgcagtcaacccaacc

SEQ ID NO: 24334 - DNA, 25 bp, Homo sapien
ttggttctgagaaacaggcccaaca

SEQ ID NO: 24335 - DNA, 25 bp, Homo sapien
ttggtccgccgagtctagatgcaga

SEQ ID NO: 24336 - DNA, 25 bp, Homo sapien
catgtatagcatgagtgatggagcc

SEQ ID NO: 24337 - DNA, 25 bp, Homo sapien
ttctcctgccaggtcacgggaagtt

SEQ ID NO: 24338 - DNA, 25 bp, Homo sapien
agtgatggagccaaacacaagtttt

SEQ ID NO: 24339 - DNA, 25 bp, Homo sapien
tccctagatgggaaaccagctctgg

SEQ ID NO: 24340 - DNA, 25 bp, Homo sapien
tattacctggcttgtggaatgtgcc

SEQ ID NO: 24341 - DNA, 25 bp, Homo sapien
agttaacgagttcctagccggagta

SEQ ID NO: 24342 - DNA, 25 bp, Homo sapien
atatgtacttgctgtgggtgataga

SEQ ID NO: 24343 - DNA, 25 bp, Homo sapien
gatgtgatgatgctttggatccttt

SEQ ID NO: 24344 - DNA, 25 bp, Homo sapien
tggtgttgaacccaggactgcattt

SEQ ID NO: 24345 - DNA, 25 bp, Homo sapien
ttgctgtgggtgatagaattcttcc

SEQ ID NO: 24346 - DNA, 25 bp, Homo sapien
aaatggctatatgtccctttggaaa

SEQ ID NO: 24347 - DNA, 25 bp, Homo sapien
gagtcgaggactccctacgttgccc

SEQ ID NO: 24348 - DNA, 25 bp, Homo sapien
aattcttcctgggacctggtctatc

SEQ ID NO: 24349 - DNA, 25 bp, Homo sapien
cactctaactatggcaaatggggat

SEQ ID NO: 24350 - DNA, 25 bp, Homo sapien
agtagtggctcggatccagaaatga

SEQ ID NO: 24351 - DNA, 25 bp, Homo sapien
tgatcacggctcactacagacttag

SEQ ID NO: 24352 - DNA, 25 bp, Homo sapien
tctgggcttcctttagaaaagcttc

SEQ ID NO: 24353 - DNA, 25 bp, Homo sapien
aagcagcttttcagtctctgggacc

SEQ ID NO: 24354 - DNA, 25 bp, Homo sapien
aatccatctagctcaggccagtatt

SEQ ID NO: 24355 - DNA, 25 bp, Homo sapien
cttcggcatttgaaagtagattatt

SEQ ID NO: 24356 - DNA, 25 bp, Homo sapien
tcttcctaggttcgccaagcagctt

SEQ ID NO: 24357 - DNA, 25 bp, Homo sapien
cataatgtgtgcgtatataattctt

SEQ ID NO: 24358 - DNA, 25 bp, Homo sapien
tctctgggacctttcatatctactt

SEQ ID NO: 24359 - DNA, 25 bp, Homo sapien
tatcctaaacatacttcggcatttg

SEQ ID NO: 24360 - DNA, 25 bp, Homo sapien
gcctcatgggttcacgcgcttcttc

SEQ ID NO: 24361 - DNA, 25 bp, Homo sapien
actacagacttagcctcatgggttc

SEQ ID NO: 24362 - DNA, 25 bp, Homo sapien
cccgctctgctgagaagtgtctttt

SEQ ID NO: 24363 - DNA, 25 bp, Homo sapien
tttgaaccaagatgctgatgagcgg

SEQ ID NO: 24364 - DNA, 25 bp, Homo sapien
ccacactgtgcctgaaatctgctga

SEQ ID NO: 24365 - DNA, 25 bp, Homo sapien
actcttggacaaggcagctcctagc

SEQ ID NO: 24366 - DNA, 25 bp, Homo sapien
catttgaaaccagcagacaagcaag

SEQ ID NO: 24367 - DNA, 25 bp, Homo sapien
agctgttcaagctgaggaaggcctt

SEQ ID NO: 24368 - DNA, 25 bp, Homo sapien
caagggtgcagaacacttcccagcc

SEQ ID NO: 24369 - DNA, 25 bp, Homo sapien
ttctagggattgtcatgtacatacc

SEQ ID NO: 24370 - DNA, 25 bp, Homo sapien
cgatagagacatcactgaaaatgcc

SEQ ID NO: 24371 - DNA, 25 bp, Homo sapien
actggcctccagttacgagaacctc

SEQ ID NO: 24372 - DNA, 25 bp, Homo sapien
gaaaacacaactcacctcatggatc

SEQ ID NO: 24373 - DNA, 25 bp, Homo sapien
acaagattgccaacagtgcacaggt

SEQ ID NO: 24374 - DNA, 25 bp, Homo sapien
attataagtggtgctgtaatgaaca

SEQ ID NO: 24375 - DNA, 25 bp, Homo sapien
atacctcatgtaagtagaaccacgc

SEQ ID NO: 24376 - DNA, 25 bp, Homo sapien
atatacacagaagtgggatggctga

SEQ ID NO: 24377 - DNA, 25 bp, Homo sapien
aagccaagctgctcagttacatgac

SEQ ID NO: 24378 - DNA, 25 bp, Homo sapien
taaaacacggtttgaagccaagctg

SEQ ID NO: 24379 - DNA, 25 bp, Homo sapien
aatgaaaggaaacacataggcagtt

SEQ ID NO: 24380 - DNA, 25 bp, Homo sapien
taagtagaaccacgcattagttgtt

SEQ ID NO: 24381 - DNA, 25 bp, Homo sapien
acagtgcacaggtgttccaatctcc

SEQ ID NO: 24382 - DNA, 25 bp, Homo sapien
gggatggctgaaacatataattcta

SEQ ID NO: 24383 - DNA, 25 bp, Homo sapien
atccacagacatggaggctgcttct

SEQ ID NO: 24384 - DNA, 25 bp, Homo sapien
aatggagtctcacacctattatgac

SEQ ID NO: 24385 - DNA, 25 bp, Homo sapien
catggtgcccaatccagaagggatt

SEQ ID NO: 24386 - DNA, 25 bp, Homo sapien
tcctgaactacgtctctgccacttt

SEQ ID NO: 24387 - DNA, 25 bp, Homo sapien
acagacataagccatggtgcccaat

SEQ ID NO: 24388 - DNA, 25 bp, Homo sapien
gaagtgcagtgtcgttaacacagct

SEQ ID NO: 24389 - DNA, 25 bp, Homo sapien
tttcctgcacgtaatcctcttcttg

SEQ ID NO: 24390 - DNA, 25 bp, Homo sapien
tccagaagggatttcatacatgctt

SEQ ID NO: 24391 - DNA, 25 bp, Homo sapien
agcacctgcaggtttctgctcttgg

SEQ ID NO: 24392 - DNA, 25 bp, Homo sapien
ctggtaggctttcctgaactacgtc

SEQ ID NO: 24393 - DNA, 25 bp, Homo sapien
tctaaacgcctcctctcctggtagg

SEQ ID NO: 24394 - DNA, 25 bp, Homo sapien
ttatgacgatagtgagattattttc

SEQ ID NO: 24395 - DNA, 25 bp, Homo sapien
ttctcaaaaccataagggagcagga

SEQ ID NO: 24396 - DNA, 25 bp, Homo sapien
ggcagtgattcccaagaggtaaaac

SEQ ID NO: 24397 - DNA, 25 bp, Homo sapien
gaggtaaaacattgctaagagtccc

SEQ ID NO: 24398 - DNA, 25 bp, Homo sapien
gaaacactggtgtaatggacatatt

SEQ ID NO: 24399 - DNA, 25 bp, Homo sapien
agaccacaaatgtaggcagtgattc

SEQ ID NO: 24400 - DNA, 25 bp, Homo sapien
ctttcacggagccaaaaatcaatcc

SEQ ID NO: 24401 - DNA, 25 bp, Homo sapien
aggaagcaaatgactaattagacac

SEQ ID NO: 24402 - DNA, 25 bp, Homo sapien
ttgaaaatgcaagtgtttgggatac

SEQ ID NO: 24403 - DNA, 25 bp, Homo sapien
ttcatcgatgcaatagaggtaaaat

SEQ ID NO: 24404 - DNA, 25 bp, Homo sapien
ggctacagcagtgagaaaagctcct

SEQ ID NO: 24405 - DNA, 25 bp, Homo sapien
gagcaggagtacctactgagtaata

SEQ ID NO: 24406 - DNA, 25 bp, Homo sapien
caactgacaaagcacacctaggcat

SEQ ID NO: 24407 - DNA, 25 bp, Homo sapien
cttttaaaccttgtagctgagctcc

SEQ ID NO: 24408 - DNA, 25 bp, Homo sapien
tgaaaaaacaactgacaaagcacac

SEQ ID NO: 24409 - DNA, 25 bp, Homo sapien
ctgagcccggcctatatgtaataat

SEQ ID NO: 24410 - DNA, 25 bp, Homo sapien
acctgcttggtaaaagcctgttaac

SEQ ID NO: 24411 - DNA, 25 bp, Homo sapien
gagctcccagcgtaatattgcaatt

SEQ ID NO: 24412 - DNA, 25 bp, Homo sapien
tgcaattatcagaaacacaaaagaa

SEQ ID NO: 24413 - DNA, 25 bp, Homo sapien
cctaggcattctgggtttaatataa

SEQ ID NO: 24414 - DNA, 25 bp, Homo sapien
tcaatgtcagaaaacagactcctgt

SEQ ID NO: 24415 - DNA, 25 bp, Homo sapien
agcaccatgcctgactttcgtttgt

SEQ ID NO: 24416 - DNA, 25 bp, Homo sapien
agactcctgtttctggcagtaatgt

SEQ ID NO: 24417 - DNA, 25 bp, Homo sapien
ataatgttctgcaaatgaaatcaac

SEQ ID NO: 24418 - DNA, 25 bp, Homo sapien
ttggaagtacatgtaaaaattcagc

SEQ ID NO: 24419 - DNA, 25 bp, Homo sapien
aacatggaaaacaatgtttagcgct

SEQ ID NO: 24420 - DNA, 25 bp, Homo sapien
aacctgtgacaaaaataattctgcc

SEQ ID NO: 24421 - DNA, 25 bp, Homo sapien
ttcagcaaaactgggctaaaataat

SEQ ID NO: 24422 - DNA, 25 bp, Homo sapien
attctgcctggaaaatgcttatttg

SEQ ID NO: 24423 - DNA, 25 bp, Homo sapien
cacgcccggccagtactggaaaatt

SEQ ID NO: 24424 - DNA, 25 bp, Homo sapien
aaacaccaaggaaaaatgcagataa

SEQ ID NO: 24425 - DNA, 25 bp, Homo sapien
ttttctaagagttggaagtacatgt

SEQ ID NO: 24426 - DNA, 25 bp, Homo sapien
aaagtatcctataatgttctgcaaa

SEQ ID NO: 24427 - DNA, 25 bp, Homo sapien
gtttagcgcttatttgcccacaaat

SEQ ID NO: 24428 - DNA, 25 bp, Homo sapien
taagtatagtattaagtctgcagtc

SEQ ID NO: 24429 - DNA, 25 bp, Homo sapien
accttttcccaaagtgcacatgcac

SEQ ID NO: 24430 - DNA, 25 bp, Homo sapien
agactaagtacacaatgacctaagg

SEQ ID NO: 24431 - DNA, 25 bp, Homo sapien
aatcccacaaggaactctagtccta

SEQ ID NO: 24432 - DNA, 25 bp, Homo sapien
ttggagagctccctctaatgaaact

SEQ ID NO: 24433 - DNA, 25 bp, Homo sapien
gggagaaaaccaaaggatgcgccta

SEQ ID NO: 24434 - DNA, 25 bp, Homo sapien
atgacctaaggtttgaaaatatttc

SEQ ID NO: 24435 - DNA, 25 bp, Homo sapien
atcagtagtgatagtccaataatta

SEQ ID NO: 24436 - DNA, 25 bp, Homo sapien
tgatctcagccgacagaacgagact

SEQ ID NO: 24437 - DNA, 25 bp, Homo sapien
aaaggatgcgcctagcaaattacca

SEQ ID NO: 24438 - DNA, 25 bp, Homo sapien
ttgaggaatgctggtccaatcccac

SEQ ID NO: 24439 - DNA, 25 bp, Homo sapien
atgagcaaaacaatcttcgcctgcc

SEQ ID NO: 24440 - DNA, 25 bp, Homo sapien
tggattaacagtacatgagcaaaac

SEQ ID NO: 24441 - DNA, 25 bp, Homo sapien
caggcacactgctaagtagaagact

SEQ ID NO: 24442 - DNA, 25 bp, Homo sapien
tgttgtgttcaaaacatagccctcc

SEQ ID NO: 24443 - DNA, 25 bp, Homo sapien
aattgtgaaagaaaagcactgtgtt

SEQ ID NO: 24444 - DNA, 25 bp, Homo sapien
gccagaaactcctaggtggaaagtc

SEQ ID NO: 24445 - DNA, 25 bp, Homo sapien
aaaaaagactgaggtatacaattca

SEQ ID NO: 24446 - DNA, 25 bp, Homo sapien
atccagttctggtccctaagtcact

SEQ ID NO: 24447 - DNA, 25 bp, Homo sapien
gtaagactgaaaatagaggctgtag

SEQ ID NO: 24448 - DNA, 25 bp, Homo sapien
aggtggaaagtctgtttggaagtaa

SEQ ID NO: 24449 - DNA, 25 bp, Homo sapien
agtaggtgacctgttatggaataac

SEQ ID NO: 24450 - DNA, 25 bp, Homo sapien
gtacaaaatgtctacgatcacacta

SEQ ID NO: 24451 - DNA, 25 bp, Homo sapien
tagtgtgatcgtagacattttgtac

SEQ ID NO: 24452 - DNA, 25 bp, Homo sapien
aggagtgaacatggtgcagattaaa

SEQ ID NO: 24453 - DNA, 25 bp, Homo sapien
gaatgtgtcatacgagcctctaaat

SEQ ID NO: 24454 - DNA, 25 bp, Homo sapien
cttaaagagtacatgttcaagcctt

SEQ ID NO: 24455 - DNA, 25 bp, Homo sapien
acatggtgcagattaaataggattt

SEQ ID NO: 24456 - DNA, 25 bp, Homo sapien
taaaaattgggtgcatcacaacact

SEQ ID NO: 24457 - DNA, 25 bp, Homo sapien
tggatataggacatttcaggctgaa

SEQ ID NO: 24458 - DNA, 25 bp, Homo sapien
aattaggaaacagtgtggatatagg

SEQ ID NO: 24459 - DNA, 25 bp, Homo sapien
attaccagagtgtatgttctttgca

SEQ ID NO: 24460 - DNA, 25 bp, Homo sapien
aaaaatcagacattcccgcagctgg

SEQ ID NO: 24461 - DNA, 25 bp, Homo sapien
tcagcaagtgaaaaatcagacattc

SEQ ID NO: 24462 - DNA, 25 bp, Homo sapien
aaaggttgaatgtgtcatacgagcc

SEQ ID NO: 24463 - DNA, 25 bp, Homo sapien
ggaagcctcatgagagcagagacca

SEQ ID NO: 24464 - DNA, 25 bp, Homo sapien
gagaccatgtctgccttattcacga

SEQ ID NO: 24465 - DNA, 25 bp, Homo sapien
ccacaccgcggaagcctcatgagag

SEQ ID NO: 24466 - DNA, 25 bp, Homo sapien
aagcctaagtctcagtctggggcct

SEQ ID NO: 24467 - DNA, 25 bp, Homo sapien
gggcctggtacatggtagatgctca

SEQ ID NO: 24468 - DNA, 25 bp, Homo sapien
cccgaggcctagcatgggctacttt

SEQ ID NO: 24469 - DNA, 25 bp, Homo sapien
cacgattgtgacttagactgaagcc

SEQ ID NO: 24470 - DNA, 25 bp, Homo sapien
aggcataggtcactatgtccggccc

SEQ ID NO: 24471 - DNA, 25 bp, Homo sapien
catgtcacagcggtaggatattttt

SEQ ID NO: 24472 - DNA, 25 bp, Homo sapien
atgtagaatacatgtcacagcggta

SEQ ID NO: 24473 - DNA, 25 bp, Homo sapien
ctggaccgcaggcataggtcactat

SEQ ID NO: 24474 - DNA, 25 bp, Homo sapien
ctacagtactgttgagtatatctcc

SEQ ID NO: 24475 - DNA, 25 bp, Homo sapien
aacagtactattattgcttcaacac

SEQ ID NO: 24476 - DNA, 25 bp, Homo sapien
ttgactgaagtagataaaccttatc

SEQ ID NO: 24477 - DNA, 25 bp, Homo sapien
gtttagagaacatccattggccatt

SEQ ID NO: 24478 - DNA, 25 bp, Homo sapien
ttatagtctactggcattatcattt

SEQ ID NO: 24479 - DNA, 25 bp, Homo sapien
tttaccgctttgactgaagtagata

SEQ ID NO: 24480 - DNA, 25 bp, Homo sapien
cacatttagaaacattaaacagtac

SEQ ID NO: 24481 - DNA, 25 bp, Homo sapien
gtggctgctttaggtactacattac

SEQ ID NO: 24482 - DNA, 25 bp, Homo sapien
ccattggccatttattgagagtagg

SEQ ID NO: 24483 - DNA, 25 bp, Homo sapien
gcttttaagtggctgctttaggtac

SEQ ID NO: 24484 - DNA, 25 bp, Homo sapien
ggaaaatttaaagagatgccaatta

SEQ ID NO: 24485 - DNA, 25 bp, Homo sapien
gtaattgtgccttacttgaagtaaa

SEQ ID NO: 24486 - DNA, 25 bp, Homo sapien
cttcttcagggggaattgagttttc

SEQ ID NO: 24487 - DNA, 25 bp, Homo sapien
cccgccaacgtgtttctatgttctt

SEQ ID NO: 24488 - DNA, 25 bp, Homo sapien
ctttgaaagccaatgtaattgtgcc

SEQ ID NO: 24489 - DNA, 25 bp, Homo sapien
tcagtttgactgaaattagaggagc

SEQ ID NO: 24490 - DNA, 25 bp, Homo sapien
ttgactgaaattagaggagctacct

SEQ ID NO: 24491 - DNA, 25 bp, Homo sapien
acctggctgcatacattactgattc

SEQ ID NO: 24492 - DNA, 25 bp, Homo sapien
gaggagctacctggctgcatacatt

SEQ ID NO: 24493 - DNA, 25 bp, Homo sapien
cctcgaacagagagtcaagctacct

SEQ ID NO: 24494 - DNA, 25 bp, Homo sapien
cttgaagtaaattgatgtgatctcc

SEQ ID NO: 24495 - DNA, 25 bp, Homo sapien
atcaaaaggactgagcctcgaacag

SEQ ID NO: 24496 - DNA, 25 bp, Homo sapien
attcagctaatggtgtctgccacac

SEQ ID NO: 24497 - DNA, 25 bp, Homo sapien
tgaccaaaagtgtttgccaaagccc

SEQ ID NO: 24498 - DNA, 25 bp, Homo sapien
tttctatgagaaagccaagttgagg

SEQ ID NO: 24499 - DNA, 25 bp, Homo sapien
ggacgagtggtttctgcctcagcat

SEQ ID NO: 24500 - DNA, 25 bp, Homo sapien
ctgtgggcgcttgcattgatataga

SEQ ID NO: 24501 - DNA, 25 bp, Homo sapien
aagcccagaggccaacatcagcatt

SEQ ID NO: 24502 - DNA, 25 bp, Homo sapien
tgcctcagcatgtgaacagttcatt

SEQ ID NO: 24503 - DNA, 25 bp, Homo sapien
gccaggccacacaaagaaaccgctg

SEQ ID NO: 24504 - DNA, 25 bp, Homo sapien
aaaccgctggttatgcttcaagtgc

SEQ ID NO: 24505 - DNA, 25 bp, Homo sapien
gcttgtgatcaaccactgtgggcgc

SEQ ID NO: 24506 - DNA, 25 bp, Homo sapien
ttcattatggttgccgagtcgattc

SEQ ID NO: 24507 - DNA, 25 bp, Homo sapien
tgacctacccaccactgggtgtcac

SEQ ID NO: 24508 - DNA, 25 bp, Homo sapien
atgcagactgaaccacctgcagtgc

SEQ ID NO: 24509 - DNA, 25 bp, Homo sapien
aacttctgatgggtggccatgccca

SEQ ID NO: 24510 - DNA, 25 bp, Homo sapien
tgatgggtggccatgcccatcttcc

SEQ ID NO: 24511 - DNA, 25 bp, Homo sapien
actgagacactcacacacgtccacc

SEQ ID NO: 24512 - DNA, 25 bp, Homo sapien
caggctgtccagcactaacttctga

SEQ ID NO: 24513 - DNA, 25 bp, Homo sapien
ttcctcggatcctctcacctgacct

SEQ ID NO: 24514 - DNA, 25 bp, Homo sapien
cagcactaacttctgatgggtggcc

SEQ ID NO: 24515 - DNA, 25 bp, Homo sapien
accctcaaccggctgtgctcgggcc

SEQ ID NO: 24516 - DNA, 25 bp, Homo sapien
actaacttctgatgggtggccatgc

SEQ ID NO: 24517 - DNA, 25 bp, Homo sapien
ccatgcagactgaaccacctgcagt

SEQ ID NO: 24518 - DNA, 25 bp, Homo sapien
ctaacttctgatgggtggccatgcc

SEQ ID NO: 24519 - DNA, 25 bp, Homo sapien
atgaagttcctggactgagacactc

SEQ ID NO: 24520 - DNA, 25 bp, Homo sapien
agcccttggcatgaagttcctggac

SEQ ID NO: 24521 - DNA, 25 bp, Homo sapien
atgcagactgaaccacctgcagtgc

SEQ ID NO: 24522 - DNA, 25 bp, Homo sapien
actgagacactcacacacgtccacc

SEQ ID NO: 24523 - DNA, 25 bp, Homo sapien
aggctgtccagcactaacttctgat

SEQ ID NO: 24524 - DNA, 25 bp, Homo sapien
tggccaggctgtccagcactaactt

SEQ ID NO: 24525 - DNA, 25 bp, Homo sapien
tgacctacccaccactgggtgtcac

SEQ ID NO: 24526 - DNA, 25 bp, Homo sapien
tgatgggtggccatgcccatcttcc

SEQ ID NO: 24527 - DNA, 25 bp, Homo sapien
accctcaaccggctgtgctcgggcc

SEQ ID NO: 24528 - DNA, 25 bp, Homo sapien
cagcactaacttctgatgggtggcc

SEQ ID NO: 24529 - DNA, 25 bp, Homo sapien
atgagaaaaacatcccatgctcatg

SEQ ID NO: 24530 - DNA, 25 bp, Homo sapien
gacagatccctacaaggaaaactac

SEQ ID NO: 24531 - DNA, 25 bp, Homo sapien
ctagaaggctttagtaaccaaaaca

SEQ ID NO: 24532 - DNA, 25 bp, Homo sapien
aagcaaatctaagcaaagagagcaa

SEQ ID NO: 24533 - DNA, 25 bp, Homo sapien
attagtcaaagagatgacagatccc

SEQ ID NO: 24534 - DNA, 25 bp, Homo sapien
agagcaaagctggagatattacatt

SEQ ID NO: 24535 - DNA, 25 bp, Homo sapien
aaattcacatggaaccacaaaaaga

SEQ ID NO: 24536 - DNA, 25 bp, Homo sapien
aaaatgactctactacccaaagcaa

SEQ ID NO: 24537 - DNA, 25 bp, Homo sapien
gcatggtactgatataaatcgacac

SEQ ID NO: 24538 - DNA, 25 bp, Homo sapien
aagctgagaaccgaattaaaatgtc

SEQ ID NO: 24539 - DNA, 25 bp, Homo sapien
acactaatggtgatcaagctgagaa

SEQ ID NO: 24540 - DNA, 25 bp, Homo sapien
ctggcttaaggtctagatctcatca

SEQ ID NO: 24541 - DNA, 25 bp, Homo sapien
tcatgatttggggtgtcaggaattt

SEQ ID NO: 24542 - DNA, 25 bp, Homo sapien
aggttttgttaagccaggatcccac

SEQ ID NO: 24543 - DNA, 25 bp, Homo sapien
tcaccactacatagcgaggtgccct

SEQ ID NO: 24544 - DNA, 25 bp, Homo sapien
gtccaagtgtggacaaggctcagca

SEQ ID NO: 24545 - DNA, 25 bp, Homo sapien
cagcctcctcaaaactcacggggtt

SEQ ID NO: 24546 - DNA, 25 bp, Homo sapien
ggctcagcagggttagctactttcc

SEQ ID NO: 24547 - DNA, 25 bp, Homo sapien
actcacggggtttctgaacaccacc

SEQ ID NO: 24548 - DNA, 25 bp, Homo sapien
acagcaacagtgacgccagactttt

SEQ ID NO: 24549 - DNA, 25 bp, Homo sapien
atcacctaagtcaggtccaagtgtg

SEQ ID NO: 24550 - DNA, 25 bp, Homo sapien
ttgggatctctcatacagtcaggtg

SEQ ID NO: 24551 - DNA, 25 bp, Homo sapien
actcgttggggcttactatagtgcc

SEQ ID NO: 24552 - DNA, 25 bp, Homo sapien
ttccaccaggttacatcagtctgca

SEQ ID NO: 24553 - DNA, 25 bp, Homo sapien
ccagaagggtaataggtcattgttt

SEQ ID NO: 24554 - DNA, 25 bp, Homo sapien
catagtgggtacttcattgaatgac

SEQ ID NO: 24555 - DNA, 25 bp, Homo sapien
actgctctcttagggcaggctgaca

SEQ ID NO: 24556 - DNA, 25 bp, Homo sapien
tcctaagaagacctcaaatgcatgc

SEQ ID NO: 24557 - DNA, 25 bp, Homo sapien
atcattaccagaaagctgcattccc

SEQ ID NO: 24558 - DNA, 25 bp, Homo sapien
gcaaggaggatgaatccacacacct

SEQ ID NO: 24559 - DNA, 25 bp, Homo sapien
aaacagaaacctagaatgactcctc

SEQ ID NO: 24560 - DNA, 25 bp, Homo sapien
caagttctgcaagtgcaaggaggat

SEQ ID NO: 24561 - DNA, 25 bp, Homo sapien
ctggagctgacactatgtctggcac

SEQ ID NO: 24562 - DNA, 25 bp, Homo sapien
ggcaggaacatcatctgttagatat

SEQ ID NO: 24563 - DNA, 25 bp, Homo sapien
ccagcacttgttatcaggggaaaaa

SEQ ID NO: 24564 - DNA, 25 bp, Homo sapien
tgttctggtcccaaataaacatgtt

SEQ ID NO: 24565 - DNA, 25 bp, Homo sapien
ttggcttgaaaacagtaaatactgt

SEQ ID NO: 24566 - DNA, 25 bp, Homo sapien
atcttgaaatactagcagctgagtt

SEQ ID NO: 24567 - DNA, 25 bp, Homo sapien
aaatgtgagacatgaaagactggat

SEQ ID NO: 24568 - DNA, 25 bp, Homo sapien
tgagttagttagttatagcagatct

SEQ ID NO: 24569 - DNA, 25 bp, Homo sapien
agaataaaatatggatctagggcat

SEQ ID NO: 24570 - DNA, 25 bp, Homo sapien
aattttgcgactagatggcaggaac

SEQ ID NO: 24571 - DNA, 25 bp, Homo sapien
atctagggcataagaaatgtgagac

SEQ ID NO: 24572 - DNA, 25 bp, Homo sapien
cttaagaactcaaactggaccatgt

SEQ ID NO: 24573 - DNA, 25 bp, Homo sapien
cagaggctatcggtacttaagtttt

SEQ ID NO: 24574 - DNA, 25 bp, Homo sapien
tgggcaccatcatacacagagagaa

SEQ ID NO: 24575 - DNA, 25 bp, Homo sapien
actccaaggacttcagaatgtgatc

SEQ ID NO: 24576 - DNA, 25 bp, Homo sapien
gccatggagtgttgaagtcttgact

SEQ ID NO: 24577 - DNA, 25 bp, Homo sapien
tccctttgtgccagacaggggatat

SEQ ID NO: 24578 - DNA, 25 bp, Homo sapien
tggaaacaagccaagggacctctgt

SEQ ID NO: 24579 - DNA, 25 bp, Homo sapien
tgacttcgttaggatgccatggagt

SEQ ID NO: 24580 - DNA, 25 bp, Homo sapien
aggggatatgctgaaagtaacaaca

SEQ ID NO: 24581 - DNA, 25 bp, Homo sapien
agaaggtcccaacagagataatcaa

SEQ ID NO: 24582 - DNA, 25 bp, Homo sapien
tactgcaaggtaggtctgagtccct

SEQ ID NO: 24583 - DNA, 25 bp, Homo sapien
caaggtaaaatcaggcctaatggcc

SEQ ID NO: 24584 - DNA, 25 bp, Homo sapien
ttaaacagcaatagtatgcagcttc

SEQ ID NO: 24585 - DNA, 25 bp, Homo sapien
gcacgctaaacaccacaataaggat

SEQ ID NO: 24586 - DNA, 25 bp, Homo sapien
ttcacaagacatatggaaggcagag

SEQ ID NO: 24587 - DNA, 25 bp, Homo sapien
ggaagcccagtacagaaacaatcaa

SEQ ID NO: 24588 - DNA, 25 bp, Homo sapien
ctatggccctatcaataaaagtatc

SEQ ID NO: 24589 - DNA, 25 bp, Homo sapien
cagagcacagttgaactatggccct

SEQ ID NO: 24590 - DNA, 25 bp, Homo sapien
tctaagtaaagatcatgaatggcct

SEQ ID NO: 24591 - DNA, 25 bp, Homo sapien
aggggcaatcaaatgctgtgtgctt

SEQ ID NO: 24592 - DNA, 25 bp, Homo sapien
aaatctgattgaagtaggaaagccc

SEQ ID NO: 24593 - DNA, 25 bp, Homo sapien
ctttaacttcgcagaggggcaatca

SEQ ID NO: 24594 - DNA, 25 bp, Homo sapien
ataaaagtatcaacagcaatggatt

SEQ ID NO: 24595 - DNA, 25 bp, Homo sapien
tcctggtagtgaatactgtcttttc

SEQ ID NO: 24596 - DNA, 25 bp, Homo sapien
actgtagtgctaagatttgattccc

SEQ ID NO: 24597 - DNA, 25 bp, Homo sapien
aaccactgggctacctggatctgtt

SEQ ID NO: 24598 - DNA, 25 bp, Homo sapien
tatatctccgtagacttgggaagtt

SEQ ID NO: 24599 - DNA, 25 bp, Homo sapien
aaggtttggcggtttactgtagtgc

SEQ ID NO: 24600 - DNA, 25 bp, Homo sapien
atgtgacttgatgctgttctcttgc

SEQ ID NO: 24601 - DNA, 25 bp, Homo sapien
ttgtctaggaaagactatttcaccc

SEQ ID NO: 24602 - DNA, 25 bp, Homo sapien
tttgactgtaatgtgacacggggag

SEQ ID NO: 24603 - DNA, 25 bp, Homo sapien
tttgatggacacagtattctttctt

SEQ ID NO: 24604 - DNA, 25 bp, Homo sapien
cggggaggatgttttcagatttact

SEQ ID NO: 24605 - DNA, 25 bp, Homo sapien
ttctctcctaggctgtaagatttct

SEQ ID NO: 24606 - DNA, 25 bp, Homo sapien
agtgttgccttatgaaatgtgtttc

SEQ ID NO: 24607 - DNA, 25 bp, Homo sapien
atcactatttatggcagtgttgcct

SEQ ID NO: 24608 - DNA, 25 bp, Homo sapien
ttaggtaataacacttgaaagtctg

SEQ ID NO: 24609 - DNA, 25 bp, Homo sapien
taatgggatcatgggatctagaatg

SEQ ID NO: 24610 - DNA, 25 bp, Homo sapien
tgttcttaatgggatcatgggatct

SEQ ID NO: 24611 - DNA, 25 bp, Homo sapien
tgcgtccggctcaagtgaatgttct

SEQ ID NO: 24612 - DNA, 25 bp, Homo sapien
gaaagtctgaattactcctggatac

SEQ ID NO: 24613 - DNA, 25 bp, Homo sapien
tggatacatggactgcagaatggat

SEQ ID NO: 24614 - DNA, 25 bp, Homo sapien
tactcctggatacatggactgcaga

SEQ ID NO: 24615 - DNA, 25 bp, Homo sapien
atgactaggtgccttgtcaatgagc

SEQ ID NO: 24616 - DNA, 25 bp, Homo sapien
cagagcttttggatgactaggtgcc

SEQ ID NO: 24617 - DNA, 25 bp, Homo sapien
aagacaacggctgccggtgtggatc

SEQ ID NO: 24618 - DNA, 25 bp, Homo sapien
gatccacaccggcagccgttgtctt

SEQ ID NO: 24619 - DNA, 25 bp, Homo sapien
cccttctttggaactgctagatatt

SEQ ID NO: 24620 - DNA, 25 bp, Homo sapien
tcatgagcttcacaaagagtgagtc

SEQ ID NO: 24621 - DNA, 25 bp, Homo sapien
ccgagcagctgggataccgatgtgt

SEQ ID NO: 24622 - DNA, 25 bp, Homo sapien
acaaggcacatctgaggggccattg

SEQ ID NO: 24623 - DNA, 25 bp, Homo sapien
agcattcctgtagctcttgccactt

SEQ ID NO: 24624 - DNA, 25 bp, Homo sapien
tcagtgtcattaagtacagttacat

SEQ ID NO: 24625 - DNA, 25 bp, Homo sapien
tacgtttgattgagatgtgtttccc

SEQ ID NO: 24626 - DNA, 25 bp, Homo sapien
ggggccattggatacgtttgattga

SEQ ID NO: 24627 - DNA, 25 bp, Homo sapien
aaagagtgacattagctttgcattc

SEQ ID NO: 24628 - DNA, 25 bp, Homo sapien
tcacaaagagtgagtcccatggccc

SEQ ID NO: 24629 - DNA, 25 bp, Homo sapien
attgcctgcctacctagcattcctg

SEQ ID NO: 24630 - DNA, 25 bp, Homo sapien
atgcctggccttgagattgttttaa

SEQ ID NO: 24631 - DNA, 25 bp, Homo sapien
gtgggtcatgaaaacgaaatgctga

SEQ ID NO: 24632 - DNA, 25 bp, Homo sapien
aattgtttaacatgggatgtgggga

SEQ ID NO: 24633 - DNA, 25 bp, Homo sapien
tgcctggaagactgtgtgtggtcat

SEQ ID NO: 24634 - DNA, 25 bp, Homo sapien
taagaagggctattcgtcaactttc

SEQ ID NO: 24635 - DNA, 25 bp, Homo sapien
tcctgaaactcttgcctggaagact

SEQ ID NO: 24636 - DNA, 25 bp, Homo sapien
taaagatcttagtagtagcaaaaac

SEQ ID NO: 24637 - DNA, 25 bp, Homo sapien
gtgtggtcatctaagaagggctatt

SEQ ID NO: 24638 - DNA, 25 bp, Homo sapien
ttccaatgcaatcatggtgggtcat

SEQ ID NO: 24639 - DNA, 25 bp, Homo sapien
aattactctttgaatggcctcctga

SEQ ID NO: 24640 - DNA, 25 bp, Homo sapien
gagcctgaactcctgaaacccacta

SEQ ID NO: 24641 - DNA, 25 bp, Homo sapien
ttcccaatccagtggcggctgacat

SEQ ID NO: 24642 - DNA, 25 bp, Homo sapien
gggtgagaggtctttacagcttcaa

SEQ ID NO: 24643 - DNA, 25 bp, Homo sapien
ataactctcataaaaagggccagcc

SEQ ID NO: 24644 - DNA, 25 bp, Homo sapien
tttacagcttcaaggctgggcctgg

SEQ ID NO: 24645 - DNA, 25 bp, Homo sapien
ttggagccaggatctctctcagtca

SEQ ID NO: 24646 - DNA, 25 bp, Homo sapien
tggcctcagagtgtacagccagcct

SEQ ID NO: 24647 - DNA, 25 bp, Homo sapien
cttagaaagcccagcggaatcggga

SEQ ID NO: 24648 - DNA, 25 bp, Homo sapien
tgggagacgtgagcaaatgtgctcc

SEQ ID NO: 24649 - DNA, 25 bp, Homo sapien
gaccagtctcatttggatggggtga

SEQ ID NO: 24650 - DNA, 25 bp, Homo sapien
catgcgggagatatctgaccagtct

SEQ ID NO: 24651 - DNA, 25 bp, Homo sapien
aaagggccagccttgcacctactgc

SEQ ID NO: 24652 - DNA, 25 bp, Homo sapien
tggtaattgcagatttcctcctctc

SEQ ID NO: 24653 - DNA, 25 bp, Homo sapien
atgagtagggtacatttgccacact

SEQ ID NO: 24654 - DNA, 25 bp, Homo sapien
ctccagccacggtttctgcttctta

SEQ ID NO: 24655 - DNA, 25 bp, Homo sapien
cactgagtgactcaaatgttgtttc

SEQ ID NO: 24656 - DNA, 25 bp, Homo sapien
tgtctgtgacaatctcagtactttc

SEQ ID NO: 24657 - DNA, 25 bp, Homo sapien
tggtgtacagatagatacttttgtc

SEQ ID NO: 24658 - DNA, 25 bp, Homo sapien
catctaggaacccacgtgacgttta

SEQ ID NO: 24659 - DNA, 25 bp, Homo sapien
gttctgggatcccatctaggaaccc

SEQ ID NO: 24660 - DNA, 25 bp, Homo sapien
tcttaaccgtcacgttcatgccctt

SEQ ID NO: 24661 - DNA, 25 bp, Homo sapien
tgcaaagatgttatactgaggtccc

SEQ ID NO: 24662 - DNA, 25 bp, Homo sapien
ctcctacccgggaatcaatattgat

SEQ ID NO: 24663 - DNA, 25 bp, Homo sapien
gtgaagtcaagcaatgtgatacctc

SEQ ID NO: 24664 - DNA, 25 bp, Homo sapien
tgttgggccacttatttgtgtcttc

SEQ ID NO: 24665 - DNA, 25 bp, Homo sapien
ttaacaacataaattcttccagttc

SEQ ID NO: 24666 - DNA, 25 bp, Homo sapien
cttccagttcattaacaagggattt

SEQ ID NO: 24667 - DNA, 25 bp, Homo sapien
tttatgatatattgtgaagtcaagc

SEQ ID NO: 24668 - DNA, 25 bp, Homo sapien
ttgtgaagtcaagcaatgtgatacc

SEQ ID NO: 24669 - DNA, 25 bp, Homo sapien
tgtgatacctctagctttgttgttt

SEQ ID NO: 24670 - DNA, 25 bp, Homo sapien
gtattcttaccctctgtggaaaatc

SEQ ID NO: 24671 - DNA, 25 bp, Homo sapien
cagattgctttgagtaatatggaca

SEQ ID NO: 24672 - DNA, 25 bp, Homo sapien
caattgaccataaatgtgtggattt

SEQ ID NO: 24673 - DNA, 25 bp, Homo sapien
gaatctgcagattgctttgagtaat

SEQ ID NO: 24674 - DNA, 25 bp, Homo sapien
ttgacccacaaaagtggtcatttta

SEQ ID NO: 24675 - DNA, 25 bp, Homo sapien
tctgagtcaaattgagctcaggtcc

SEQ ID NO: 24676 - DNA, 25 bp, Homo sapien
taatattctgagtcaaattgagctc

SEQ ID NO: 24677 - DNA, 25 bp, Homo sapien
ccacaaaagtggtcattttaaccta

SEQ ID NO: 24678 - DNA, 25 bp, Homo sapien
ttctgagtcaaattgagctcaggtc

SEQ ID NO: 24679 - DNA, 25 bp, Homo sapien
gagtcaaattgagctcaggtccaaa

SEQ ID NO: 24680 - DNA, 25 bp, Homo sapien
cacaaaagtggtcattttaacctac

SEQ ID NO: 24681 - DNA, 25 bp, Homo sapien
gatattcatccactttttgacccac

SEQ ID NO: 24682 - DNA, 25 bp, Homo sapien
tgagtcaaattgagctcaggtccaa

SEQ ID NO: 24683 - DNA, 25 bp, Homo sapien
actttttgacccacaaaagtggtca

SEQ ID NO: 24684 - DNA, 25 bp, Homo sapien
tttaatattctgagtcaaattgagc

SEQ ID NO: 24685 - DNA, 25 bp, Homo sapien
tttatctttgttctgctgctgcgtg

SEQ ID NO: 24686 - DNA, 25 bp, Homo sapien
ttgagcccatctctctagccctctg

SEQ ID NO: 24687 - DNA, 25 bp, Homo sapien
gtgatgttcaagagcaaaggacaac

SEQ ID NO: 24688 - DNA, 25 bp, Homo sapien
atgttcaagagcaaaggacaacaca

SEQ ID NO: 24689 - DNA, 25 bp, Homo sapien
gcaccacagccttgagcccatctct

SEQ ID NO: 24690 - DNA, 25 bp, Homo sapien
ggaagccagtgtcactggcaccaca

SEQ ID NO: 24691 - DNA, 25 bp, Homo sapien
ttcaagagcaaaggacaacacaggg

SEQ ID NO: 24692 - DNA, 25 bp, Homo sapien
tctttgttctgctgctgcgtggcgt

SEQ ID NO: 24693 - DNA, 25 bp, Homo sapien
tctgctgctgcgtggcgtgatgttc

SEQ ID NO: 24694 - DNA, 25 bp, Homo sapien
aaaggacaacacaggggaagccagt

SEQ ID NO: 24695 - DNA, 25 bp, Homo sapien
gcgtgatgttcaagagcaaaggaca

SEQ ID NO: 24696 - DNA, 25 bp, Homo sapien
ataaaacatcctggctcggtggctc

SEQ ID NO: 24697 - DNA, 25 bp, Homo sapien
cctgggccatatagcaagattctgt

SEQ ID NO: 24698 - DNA, 25 bp, Homo sapien
ccagttggggggattacttgagtcc

SEQ ID NO: 24699 - DNA, 25 bp, Homo sapien
actttttgacccacaaaagtggtca

SEQ ID NO: 24700 - DNA, 25 bp, Homo sapien
tctgagtcaaattgagctcaggtcc

SEQ ID NO: 24701 - DNA, 25 bp, Homo sapien
aaattagccatgcttgtgggcaagc

SEQ ID NO: 24702 - DNA, 25 bp, Homo sapien
tcaggtccaaatgccaaatattgct

SEQ ID NO: 24703 - DNA, 25 bp, Homo sapien
aacatcctggctcggtggctcatac

SEQ ID NO: 24704 - DNA, 25 bp, Homo sapien
gagtcaaattgagctcaggtccaaa

SEQ ID NO: 24705 - DNA, 25 bp, Homo sapien
taatattctgagtcaaattgagctc

SEQ ID NO: 24706 - DNA, 25 bp, Homo sapien
cacaaaagtggtcattttaacctac

SEQ ID NO: 24707 - DNA, 25 bp, Homo sapien
ttagtaagaaagagaggtcatttcc

SEQ ID NO: 24708 - DNA, 25 bp, Homo sapien
gaattctaggcagaacaacccaagg

SEQ ID NO: 24709 - DNA, 25 bp, Homo sapien
tcttcattaggcagatggagccacc

SEQ ID NO: 24710 - DNA, 25 bp, Homo sapien
aaaagggcaaaaaccatcgcatatc

SEQ ID NO: 24711 - DNA, 25 bp, Homo sapien
tgaatggaatccaggcaacagaatc

SEQ ID NO: 24712 - DNA, 25 bp, Homo sapien
tgggtagcaccatccagagctcaaa

SEQ ID NO: 24713 - DNA, 25 bp, Homo sapien
agtctagacaaggtgattgttcacc

SEQ ID NO: 24714 - DNA, 25 bp, Homo sapien
gaactaataattgtggccaagcact

SEQ ID NO: 24715 - DNA, 25 bp, Homo sapien
actggcagtgccttaggcctgtctc

SEQ ID NO: 24716 - DNA, 25 bp, Homo sapien
aactcaaagattccggtgtaagcac

SEQ ID NO: 24717 - DNA, 25 bp, Homo sapien
actggggatatgacaatgaggacat

SEQ ID NO: 24718 - DNA, 25 bp, Homo sapien
atagtggtggtcatcgcaaagtttg

SEQ ID NO: 24719 - DNA, 25 bp, Homo sapien
aaacaatgggaagctctgacaaagt

SEQ ID NO: 24720 - DNA, 25 bp, Homo sapien
accagtcatttgaatgggcagttcc

SEQ ID NO: 24721 - DNA, 25 bp, Homo sapien
gctgaggcactcctgggattgtctt

SEQ ID NO: 24722 - DNA, 25 bp, Homo sapien
ggctttgagcagagcaaactgttcc

SEQ ID NO: 24723 - DNA, 25 bp, Homo sapien
tatacggccatggaatctgatagtg

SEQ ID NO: 24724 - DNA, 25 bp, Homo sapien
ctgtcagaagcaaagtgaagggctc

SEQ ID NO: 24725 - DNA, 25 bp, Homo sapien
gacaaagtggagtccatgttcccac

SEQ ID NO: 24726 - DNA, 25 bp, Homo sapien
aattggcagccttgtggactgtgtt

SEQ ID NO: 24727 - DNA, 25 bp, Homo sapien
tgggaggatttcgaacctgtcagaa

SEQ ID NO: 24728 - DNA, 25 bp, Homo sapien
tcagggtcctgccacaggttcaatc

SEQ ID NO: 24729 - DNA, 25 bp, Homo sapien
caaaaatttggcagagctagatgac

SEQ ID NO: 24730 - DNA, 25 bp, Homo sapien
ataaagactatctaagcagaatttt

SEQ ID NO: 24731 - DNA, 25 bp, Homo sapien
tttgcctgtgaatcatagaattgta

SEQ ID NO: 24732 - DNA, 25 bp, Homo sapien
atatacagttatttaggtcaccaag

SEQ ID NO: 24733 - DNA, 25 bp, Homo sapien
tttcctggttctagataaagactat

SEQ ID NO: 24734 - DNA, 25 bp, Homo sapien
tctttacaacctgaatcactgctgt

SEQ ID NO: 24735 - DNA, 25 bp, Homo sapien
aagttttcggttacatgtttccata

SEQ ID NO: 24736 - DNA, 25 bp, Homo sapien
agtgcagcagtgagaaaaatattcc

SEQ ID NO: 24737 - DNA, 25 bp, Homo sapien
ctttgggtttctttgcctgtgaatc

SEQ ID NO: 24738 - DNA, 25 bp, Homo sapien
cagagctagatgacaagagagtgca

SEQ ID NO: 24739 - DNA, 25 bp, Homo sapien
aaaaatccacaaaaaaccacagcat

SEQ ID NO: 24740 - DNA, 25 bp, Homo sapien
tcatccgagacagagagatttcatt

SEQ ID NO: 24741 - DNA, 25 bp, Homo sapien
ggacagctctagagacctgctttgc

SEQ ID NO: 24742 - DNA, 25 bp, Homo sapien
cactacaatcagcaaggcctgggtt

SEQ ID NO: 24743 - DNA, 25 bp, Homo sapien
gactaactgcctggccttgagggtt

SEQ ID NO: 24744 - DNA, 25 bp, Homo sapien
ggggacccatcacactacaatcagc

SEQ ID NO: 24745 - DNA, 25 bp, Homo sapien
acctactgtgtatgtgccatgggac

SEQ ID NO: 24746 - DNA, 25 bp, Homo sapien
agcattgcttctggtcaagacctca

SEQ ID NO: 24747 - DNA, 25 bp, Homo sapien
ttcaaagggtaaagcattcgatgga

SEQ ID NO: 24748 - DNA, 25 bp, Homo sapien
agtacaaatcctagcatgaagaatg

SEQ ID NO: 24749 - DNA, 25 bp, Homo sapien
ttgagggttcagacagtgaacatac

SEQ ID NO: 24750 - DNA, 25 bp, Homo sapien
aggactgggcatttcatccgagaca

SEQ ID NO: 24751 - DNA, 25 bp, Homo sapien
aacctgtatagtagaaggagactct

SEQ ID NO: 24752 - DNA, 25 bp, Homo sapien
actcaactgacaaggttattgggaa

SEQ ID NO: 24753 - DNA, 25 bp, Homo sapien
acaaagcatttagtcagtgcccggc

SEQ ID NO: 24754 - DNA, 25 bp, Homo sapien
acaggcacgcgtaaaagtggctttt

SEQ ID NO: 24755 - DNA, 25 bp, Homo sapien
gccgcgacagctggtactcaaaaca

SEQ ID NO: 24756 - DNA, 25 bp, Homo sapien
agtgcccggcatacagcatgtactc

SEQ ID NO: 24757 - DNA, 25 bp, Homo sapien
tggtactcaaaacagctggcagcta

SEQ ID NO: 24758 - DNA, 25 bp, Homo sapien
ctggtatcatagtctggttgggttc

SEQ ID NO: 24759 - DNA, 25 bp, Homo sapien
aaaaaacatgaaggccgcgacagct

SEQ ID NO: 24760 - DNA, 25 bp, Homo sapien
tccggccacttgcaagtagcacttc

SEQ ID NO: 24761 - DNA, 25 bp, Homo sapien
ctgcctcttagtagccctgtgagcc

SEQ ID NO: 24762 - DNA, 25 bp, Homo sapien
atgccaggtctgaacccaagctgtt

SEQ ID NO: 24763 - DNA, 25 bp, Homo sapien
aggctttttagcagaatgacaaaca

SEQ ID NO: 24764 - DNA, 25 bp, Homo sapien
tctcttctgagacaggaccctggga

SEQ ID NO: 24765 - DNA, 25 bp, Homo sapien
aagagaaagcatcgagctgttaagt

SEQ ID NO: 24766 - DNA, 25 bp, Homo sapien
ttttgaggactgtggatgtagatct

SEQ ID NO: 24767 - DNA, 25 bp, Homo sapien
ccatggtctcatggctagagggata

SEQ ID NO: 24768 - DNA, 25 bp, Homo sapien
taggctgggaagacaatctaaacaa

SEQ ID NO: 24769 - DNA, 25 bp, Homo sapien
agttaatgattgaaggttcaggcct

SEQ ID NO: 24770 - DNA, 25 bp, Homo sapien
agctgtacatgacactgttcagagc

SEQ ID NO: 24771 - DNA, 25 bp, Homo sapien
ttccaaaggcttaaatgccaggtct

SEQ ID NO: 24772 - DNA, 25 bp, Homo sapien
agaggagaagatttaaggaatgttt

SEQ ID NO: 24773 - DNA, 25 bp, Homo sapien
ttcttaattgaaatgctacctggca

SEQ ID NO: 24774 - DNA, 25 bp, Homo sapien
acaatccattccatgttggtggcca

SEQ ID NO: 24775 - DNA, 25 bp, Homo sapien
tagcacagagagataaatcacttta

SEQ ID NO: 24776 - DNA, 25 bp, Homo sapien
cagattatggtctgacggggagtaa

SEQ ID NO: 24777 - DNA, 25 bp, Homo sapien
ggtggccaggttatgaggtttctct

SEQ ID NO: 24778 - DNA, 25 bp, Homo sapien
ctgggtgtaatttatagcacagaga

SEQ ID NO: 24779 - DNA, 25 bp, Homo sapien
atacagttagaaggtaaagacttac

SEQ ID NO: 24780 - DNA, 25 bp, Homo sapien
tatatggtaagaagaaaaatgtaga

SEQ ID NO: 24781 - DNA, 25 bp, Homo sapien
atacacataaaatcagctgtcatcc

SEQ ID NO: 24782 - DNA, 25 bp, Homo sapien
ggagtaaggaatcagaatacagagt

SEQ ID NO: 24783 - DNA, 25 bp, Homo sapien
tgactaccactacctctgggtgtaa

SEQ ID NO: 24784 - DNA, 25 bp, Homo sapien
aaggcagcgacttgcttctgggtcc

SEQ ID NO: 24785 - DNA, 25 bp, Homo sapien
ccaggcccaaggcagcgacttgctt

SEQ ID NO: 24786 - DNA, 25 bp, Homo sapien
aagagacagccacacgaggtcctca

SEQ ID NO: 24787 - DNA, 25 bp, Homo sapien
agaatgactctaaagtgcctagaac

SEQ ID NO: 24788 - DNA, 25 bp, Homo sapien
ttctgggtcctggtgctgttattcc

SEQ ID NO: 24789 - DNA, 25 bp, Homo sapien
atgtatccatttcgtagaatgactc

SEQ ID NO: 24790 - DNA, 25 bp, Homo sapien
ttgtgactatgtaatgaaccacttc

SEQ ID NO: 24791 - DNA, 25 bp, Homo sapien
taaagtgcctagaacaagagacagc

SEQ ID NO: 24792 - DNA, 25 bp, Homo sapien
atgttgtggggctgtgaaagtttca

SEQ ID NO: 24793 - DNA, 25 bp, Homo sapien
ttttgaacagacatgttgtggggct

SEQ ID NO: 24794 - DNA, 25 bp, Homo sapien
cacgaggtcctcaataagtattagc

SEQ ID NO: 24795 - DNA, 25 bp, Homo sapien
tccgatggaaagaaaagcctgggct

SEQ ID NO: 24796 - DNA, 25 bp, Homo sapien
cttcgatgattatgttgtggttttt

SEQ ID NO: 24797 - DNA, 25 bp, Homo sapien
gcctcaactccatccgtgagggatt

SEQ ID NO: 24798 - DNA, 25 bp, Homo sapien
gtggtttttcttactgaagtgctta

SEQ ID NO: 24799 - DNA, 25 bp, Homo sapien
tactgtctcaaaaaagcctggcggg

SEQ ID NO: 24800 - DNA, 25 bp, Homo sapien
attttccgatggaaagaaaagcctg

SEQ ID NO: 24801 - DNA, 25 bp, Homo sapien
aactccatccgtgagggattgcttc

SEQ ID NO: 24802 - DNA, 25 bp, Homo sapien
actgaagtgcttattgagatgataa

SEQ ID NO: 24803 - DNA, 25 bp, Homo sapien
atccgtgagggattgcttcgatgat

SEQ ID NO: 24804 - DNA, 25 bp, Homo sapien
tgagatgataattttccgatggaaa

SEQ ID NO: 24805 - DNA, 25 bp, Homo sapien
cgtgagggattgcttcgatgattat

SEQ ID NO: 24806 - DNA, 25 bp, Homo sapien
tttaagacatatggccagctgtacc

SEQ ID NO: 24807 - DNA, 25 bp, Homo sapien
tgtttaccggctcacagctgatgcc

SEQ ID NO: 24808 - DNA, 25 bp, Homo sapien
ctgatgccaaggtcacgctatgacc

SEQ ID NO: 24809 - DNA, 25 bp, Homo sapien
tgggaggggcctacatttccatgtt

SEQ ID NO: 24810 - DNA, 25 bp, Homo sapien
tcgaggcgctcaaacttgaacatgt

SEQ ID NO: 24811 - DNA, 25 bp, Homo sapien
tcacggctgctcacaaaaacatgac

SEQ ID NO: 24812 - DNA, 25 bp, Homo sapien
ataccaggcatggttcatgaagtct

SEQ ID NO: 24813 - DNA, 25 bp, Homo sapien
ccaggctaagggtctgactcaggtt

SEQ ID NO: 24814 - DNA, 25 bp, Homo sapien
atgcaaccattcacaggccctcgag

SEQ ID NO: 24815 - DNA, 25 bp, Homo sapien
acgctatgaccaacagtgcccgggc

SEQ ID NO: 24816 - DNA, 25 bp, Homo sapien
ccatcaggaaaacgcaaaaggacat

SEQ ID NO: 24817 - DNA, 25 bp, Homo sapien
gacataagaaagagcagatggacat

SEQ ID NO: 24818 - DNA, 25 bp, Homo sapien
atcaagaacaggagctcgtgtggaa

SEQ ID NO: 24819 - DNA, 25 bp, Homo sapien
accctaggctcgcacggaaatttga

SEQ ID NO: 24820 - DNA, 25 bp, Homo sapien
gatggacatggaggtttgacctatt

SEQ ID NO: 24821 - DNA, 25 bp, Homo sapien
catgttcaactagcaaagcgggatc

SEQ ID NO: 24822 - DNA, 25 bp, Homo sapien
gagtcagatagcaaagtccctagcc

SEQ ID NO: 24823 - DNA, 25 bp, Homo sapien
tgtaggcaagccaaaccctaggctc

SEQ ID NO: 24824 - DNA, 25 bp, Homo sapien
tctgtggatccgtagccaagcatct

SEQ ID NO: 24825 - DNA, 25 bp, Homo sapien
gctattggatatcagggcaagacat

SEQ ID NO: 24826 - DNA, 25 bp, Homo sapien
aaggctatgcatgggaagctattac

SEQ ID NO: 24827 - DNA, 25 bp, Homo sapien
gtgaaagaagcagaatcatgataag

SEQ ID NO: 24828 - DNA, 25 bp, Homo sapien
atgcaggggaaatacatcattatcc

SEQ ID NO: 24829 - DNA, 25 bp, Homo sapien
atatgtgagaaagtcagtgattttc

SEQ ID NO: 24830 - DNA, 25 bp, Homo sapien
cctctgtctgtggttgcctgtgaac

SEQ ID NO: 24831 - DNA, 25 bp, Homo sapien
ctttgggaataaaagtgccattatt

SEQ ID NO: 24832 - DNA, 25 bp, Homo sapien
tgttaaggaagcagatgtagcctaa

SEQ ID NO: 24833 - DNA, 25 bp, Homo sapien
agcctaagggttgggtacccatata

SEQ ID NO: 24834 - DNA, 25 bp, Homo sapien
ttattagacattgacagctgctgaa

SEQ ID NO: 24835 - DNA, 25 bp, Homo sapien
tgccctaatgcaaacgtgatgacca

SEQ ID NO: 24836 - DNA, 25 bp, Homo sapien
aataatgtgatatgcaggggaaata

SEQ ID NO: 24837 - DNA, 25 bp, Homo sapien
aatgctagaacaactggcatgaacg

SEQ ID NO: 24838 - DNA, 25 bp, Homo sapien
accagggaatttgtgatgaaagttt

SEQ ID NO: 24839 - DNA, 25 bp, Homo sapien
cactgtgttaggatcaaaacctttc

SEQ ID NO: 24840 - DNA, 25 bp, Homo sapien
acttcagcttccttggtaagacagg

SEQ ID NO: 24841 - DNA, 25 bp, Homo sapien
tatttttaagtgagtcccaggtcca

SEQ ID NO: 24842 - DNA, 25 bp, Homo sapien
gcttggccaaatctcaggatctgtc

SEQ ID NO: 24843 - DNA, 25 bp, Homo sapien
cagttcataatgcagcaaggatctc

SEQ ID NO: 24844 - DNA, 25 bp, Homo sapien
tcccaggtccagagggcatcccatt

SEQ ID NO: 24845 - DNA, 25 bp, Homo sapien
ccttagctgcagttgaattcacttc

SEQ ID NO: 24846 - DNA, 25 bp, Homo sapien
actgggacatgagctgtaccaaccc

SEQ ID NO: 24847 - DNA, 25 bp, Homo sapien
caattagatcacgaggcttggccaa

SEQ ID NO: 24848 - DNA, 25 bp, Homo sapien
cgcctggccagctgtattcttatct

SEQ ID NO: 24849 - DNA, 25 bp, Homo sapien
ggatctctgttgaaacactgacttc

SEQ ID NO: 24850 - DNA, 25 bp, Homo sapien
caccaatttgtgaatcaggcaatac

SEQ ID NO: 24851 - DNA, 25 bp, Homo sapien
tttcagaggattagcaggtaaaaat

SEQ ID NO: 24852 - DNA, 25 bp, Homo sapien
tcttgttaagtagcagattccagtc

SEQ ID NO: 24853 - DNA, 25 bp, Homo sapien
gtggcagccacctgtaaaaccagtt

SEQ ID NO: 24854 - DNA, 25 bp, Homo sapien
cttttgcagaaaaagaaggaattta

SEQ ID NO: 24855 - DNA, 25 bp, Homo sapien
ctttccggtatacattacatttatc

SEQ ID NO: 24856 - DNA, 25 bp, Homo sapien
gatagactttaggtgttaaacacac

SEQ ID NO: 24857 - DNA, 25 bp, Homo sapien
tcagaggattagcaggtaaaaataa

SEQ ID NO: 24858 - DNA, 25 bp, Homo sapien
aagtagcagattccagtcttttgca

SEQ ID NO: 24859 - DNA, 25 bp, Homo sapien
cttaaatcacaggttttcagaggat

SEQ ID NO: 24860 - DNA, 25 bp, Homo sapien
tagtacaatgtacaagaaataatat

SEQ ID NO: 24861 - DNA, 25 bp, Homo sapien
ttaatgcaatgaagagtatgttttt

SEQ ID NO: 24862 - DNA, 25 bp, Homo sapien
agaaggaaaagcagattcaaagtag

SEQ ID NO: 24863 - DNA, 25 bp, Homo sapien
gctaagactggagaccctttcaatt

SEQ ID NO: 24864 - DNA, 25 bp, Homo sapien
agctagaaaacaagacaaaagtaac

SEQ ID NO: 24865 - DNA, 25 bp, Homo sapien
ggatgatataaccattcacaaagga

SEQ ID NO: 24866 - DNA, 25 bp, Homo sapien
aaggaaaccaagcaaatcaatggaa

SEQ ID NO: 24867 - DNA, 25 bp, Homo sapien
atcagagcatgtaacagaaggaaaa

SEQ ID NO: 24868 - DNA, 25 bp, Homo sapien
aaaggagctcagtaagatggccaaa

SEQ ID NO: 24869 - DNA, 25 bp, Homo sapien
aatacactaaaattgatagcttccc

SEQ ID NO: 24870 - DNA, 25 bp, Homo sapien
aattaatggtgctaagactggagac

SEQ ID NO: 24871 - DNA, 25 bp, Homo sapien
taacaattaaaaggagctcagtaag

SEQ ID NO: 24872 - DNA, 25 bp, Homo sapien
attgtccatagtattgagctgcttc

SEQ ID NO: 24873 - DNA, 25 bp, Homo sapien
acaggagtaagccatcgcgcgcagc

SEQ ID NO: 24874 - DNA, 25 bp, Homo sapien
gctgcgactggttcatttgacttga

SEQ ID NO: 24875 - DNA, 25 bp, Homo sapien
atctttgttgtacgagcagtatgct

SEQ ID NO: 24876 - DNA, 25 bp, Homo sapien
gccatcgcgcgcagccaatgttttt

SEQ ID NO: 24877 - DNA, 25 bp, Homo sapien
aaattcgtcctgaagaggcagcacc

SEQ ID NO: 24878 - DNA, 25 bp, Homo sapien
gagcagtatgctaatattgtccact

SEQ ID NO: 24879 - DNA, 25 bp, Homo sapien
gacttgaaacgtgattagaactggt

SEQ ID NO: 24880 - DNA, 25 bp, Homo sapien
gcagcaccagagactacggtatctt

SEQ ID NO: 24881 - DNA, 25 bp, Homo sapien
gaattaactccttatgtcagccatt

SEQ ID NO: 24882 - DNA, 25 bp, Homo sapien
gagagaggaggaatgataaatctca

SEQ ID NO: 24883 - DNA, 25 bp, Homo sapien
gagactgggtagtttcttgatggcc

SEQ ID NO: 24884 - DNA, 25 bp, Homo sapien
accctgacttgaggtgcagtcccta

SEQ ID NO: 24885 - DNA, 25 bp, Homo sapien
agggagtagcctctgatatccagtc

SEQ ID NO: 24886 - DNA, 25 bp, Homo sapien
gagacagagtgactgatggtctttc

SEQ ID NO: 24887 - DNA, 25 bp, Homo sapien
tatgcacataaagtagtggcccgca

SEQ ID NO: 24888 - DNA, 25 bp, Homo sapien
tcatttggaacaggctggaaacctt

SEQ ID NO: 24889 - DNA, 25 bp, Homo sapien
ctgggctacaggattttctggggtt

SEQ ID NO: 24890 - DNA, 25 bp, Homo sapien
caggggtgctgccttcatttggaac

SEQ ID NO: 24891 - DNA, 25 bp, Homo sapien
cagaaatctttatgggagacagagt

SEQ ID NO: 24892 - DNA, 25 bp, Homo sapien
tttatctatcgagtggagactgggt

SEQ ID NO: 24893 - DNA, 25 bp, Homo sapien
gtcagcatgcatcgaacttaggttc

SEQ ID NO: 24894 - DNA, 25 bp, Homo sapien
gatagggcagaataagataaccaat

SEQ ID NO: 24895 - DNA, 25 bp, Homo sapien
agcagcagtggtacaaggtgattct

SEQ ID NO: 24896 - DNA, 25 bp, Homo sapien
aattagtgctgagagtagatagggc

SEQ ID NO: 24897 - DNA, 25 bp, Homo sapien
attgaaggctaatctcatgctggaa

SEQ ID NO: 24898 - DNA, 25 bp, Homo sapien
catcatgaagttaagagattagctc

SEQ ID NO: 24899 - DNA, 25 bp, Homo sapien
tacaaggtgattctagggaaactat

SEQ ID NO: 24900 - DNA, 25 bp, Homo sapien
ctagggaaactatataaaggaacaa

SEQ ID NO: 24901 - DNA, 25 bp, Homo sapien
attctgaggaaaaggcttaaatttc

SEQ ID NO: 24902 - DNA, 25 bp, Homo sapien
tcaagtccagtaatctatcagtaag

SEQ ID NO: 24903 - DNA, 25 bp, Homo sapien
aaatggaatctaggtcacatacgac

SEQ ID NO: 24904 - DNA, 25 bp, Homo sapien
tacgactaacgaatgattgcaactc

SEQ ID NO: 24905 - DNA, 25 bp, Homo sapien
gcttttaggttccagcagcaatttt

SEQ ID NO: 24906 - DNA, 25 bp, Homo sapien
attataaataagtgtgggagcttac

SEQ ID NO: 24907 - DNA, 25 bp, Homo sapien
agtcattggactttttgagtgcttt

SEQ ID NO: 24908 - DNA, 25 bp, Homo sapien
ttggataatagatgtgatagcaggc

SEQ ID NO: 24909 - DNA, 25 bp, Homo sapien
gtgggagcttactaatgattgattc

SEQ ID NO: 24910 - DNA, 25 bp, Homo sapien
agatgtgatagcaggcattcttacc

SEQ ID NO: 24911 - DNA, 25 bp, Homo sapien
aatatgacgtttgcttttaggttcc

SEQ ID NO: 24912 - DNA, 25 bp, Homo sapien
ctagtttgataagaggtgtttggtt

SEQ ID NO: 24913 - DNA, 25 bp, Homo sapien
agaccacattgtgagactggctaat

SEQ ID NO: 24914 - DNA, 25 bp, Homo sapien
ctgtacctactgaactaatgatatt

SEQ ID NO: 24915 - DNA, 25 bp, Homo sapien
tttactggaaagacttgcctatttc

SEQ ID NO: 24916 - DNA, 25 bp, Homo sapien
tcagtcagcagcaatagaatattaa

SEQ ID NO: 24917 - DNA, 25 bp, Homo sapien
ttagtcctaagcacagagcaatttt

SEQ ID NO: 24918 - DNA, 25 bp, Homo sapien
taatgttggcattttggggtcagaa

SEQ ID NO: 24919 - DNA, 25 bp, Homo sapien
ttgaaagaccaccaagagtaatgtt

SEQ ID NO: 24920 - DNA, 25 bp, Homo sapien
attgaaagacacaaccagcgtatcc

SEQ ID NO: 24921 - DNA, 25 bp, Homo sapien
attaataacctggagtggaatcagt

SEQ ID NO: 24922 - DNA, 25 bp, Homo sapien
ttcaggagatcataagccaacttta

SEQ ID NO: 24923 - DNA, 25 bp, Homo sapien
tcagtgccgctagttggaatattcc

SEQ ID NO: 24924 - DNA, 25 bp, Homo sapien
tacaaaatgtctgatgtctgggcat

SEQ ID NO: 24925 - DNA, 25 bp, Homo sapien
atagaaactgtgaaaacactagcac

SEQ ID NO: 24926 - DNA, 25 bp, Homo sapien
tcagatgggctgattgctactgttt

SEQ ID NO: 24927 - DNA, 25 bp, Homo sapien
agtaaggggtcctccaggtgagttc

SEQ ID NO: 24928 - DNA, 25 bp, Homo sapien
agggaaagcactttgaagggaagta

SEQ ID NO: 24929 - DNA, 25 bp, Homo sapien
acaagcaggtgccttagagccacca

SEQ ID NO: 24930 - DNA, 25 bp, Homo sapien
ggaaagcactttctaaggtgacctg

SEQ ID NO: 24931 - DNA, 25 bp, Homo sapien
tgagttctgtgacttcaggattccc

SEQ ID NO: 24932 - DNA, 25 bp, Homo sapien
gcctgaaatcccactgaaatgtggt

SEQ ID NO: 24933 - DNA, 25 bp, Homo sapien
atgatcaagggtgtcacaccactca

SEQ ID NO: 24934 - DNA, 25 bp, Homo sapien
tgtgcccggcctgggaaagcacttt

SEQ ID NO: 24935 - DNA, 25 bp, Homo sapien
gtgacctgtacaggtgccagctgct

SEQ ID NO: 24936 - DNA, 25 bp, Homo sapien
tcctccaggtgagttctgtgacttc

SEQ ID NO: 24937 - DNA, 25 bp, Homo sapien
tttctaaggtgacctgtacaggtgc

SEQ ID NO: 24938 - DNA, 25 bp, Homo sapien
atttccttctggtagtagacctggc

SEQ ID NO: 24939 - DNA, 25 bp, Homo sapien
ttcctgtcacagaggtgtgaaggta

SEQ ID NO: 24940 - DNA, 25 bp, Homo sapien
atactggggccagagtcctcttttg

SEQ ID NO: 24941 - DNA, 25 bp, Homo sapien
cttaaaaaactgattggacaggact

SEQ ID NO: 24942 - DNA, 25 bp, Homo sapien
atggaaagggcagaaaccctgattt

SEQ ID NO: 24943 - DNA, 25 bp, Homo sapien
ttcaaagaaaagaatgaccttagtc

SEQ ID NO: 24944 - DNA, 25 bp, Homo sapien
tggtctcttacatggaaagggcaga

SEQ ID NO: 24945 - DNA, 25 bp, Homo sapien
attggacaggactgagtatagaaca

SEQ ID NO: 24946 - DNA, 25 bp, Homo sapien
cataacctgatgcatactggggcca

SEQ ID NO: 24947 - DNA, 25 bp, Homo sapien
tgtgaaggtagaccctagactgtat

SEQ ID NO: 24948 - DNA, 25 bp, Homo sapien
tagacctggcattctgacagtatcc

SEQ ID NO: 24949 - DNA, 25 bp, Homo sapien
atcgagttccttcctgcaccgaatt

SEQ ID NO: 24950 - DNA, 25 bp, Homo sapien
cacttcagtcacatggtcaggctcc

SEQ ID NO: 24951 - DNA, 25 bp, Homo sapien
atggaggcacttcagtcacatggtc

SEQ ID NO: 24952 - DNA, 25 bp, Homo sapien
gcctttcaaaccatgccgctgcttt

SEQ ID NO: 24953 - DNA, 25 bp, Homo sapien
ttgctatatccactacatcgagttc

SEQ ID NO: 24954 - DNA, 25 bp, Homo sapien
catataggatagtaaattctttccc

SEQ ID NO: 24955 - DNA, 25 bp, Homo sapien
tcaaaattggagtcaggcctttcaa

SEQ ID NO: 24956 - DNA, 25 bp, Homo sapien
ttgctcatccaaaaggagcaccttc

SEQ ID NO: 24957 - DNA, 25 bp, Homo sapien
cgaagtcatccacgagagttgaaat

SEQ ID NO: 24958 - DNA, 25 bp, Homo sapien
gttgatactttgacctcctcctgtt

SEQ ID NO: 24959 - DNA, 25 bp, Homo sapien
ctttatcatgtgatggaggcacttc

SEQ ID NO: 24960 - DNA, 25 bp, Homo sapien
ctattagaactatcagaatcacctg

SEQ ID NO: 24961 - DNA, 25 bp, Homo sapien
tgtcaatctaactatataggctcac

SEQ ID NO: 24962 - DNA, 25 bp, Homo sapien
gcatttccaacaagtttccagagat

SEQ ID NO: 24963 - DNA, 25 bp, Homo sapien
ttcactggacgaattaataattttc

SEQ ID NO: 24964 - DNA, 25 bp, Homo sapien
tttctaaagactgaacagggttctc

SEQ ID NO: 24965 - DNA, 25 bp, Homo sapien
agtaaatattgagtggggcccaaga

SEQ ID NO: 24966 - DNA, 25 bp, Homo sapien
cctgcaggatttgttataaggtatc

SEQ ID NO: 24967 - DNA, 25 bp, Homo sapien
tgcagccatcactacagcatggttg

SEQ ID NO: 24968 - DNA, 25 bp, Homo sapien
agtttccagagatgctgatactgct

SEQ ID NO: 24969 - DNA, 25 bp, Homo sapien
atcataagatcagagtttattcctc

SEQ ID NO: 24970 - DNA, 25 bp, Homo sapien
ttcctctctgtgaatgttgccaatc

SEQ ID NO: 24971 - DNA, 25 bp, Homo sapien
tcgaggtgggtcaaagatggtgggt

SEQ ID NO: 24972 - DNA, 25 bp, Homo sapien
acccaccatctttgacccacctcga

SEQ ID NO: 24973 - DNA, 25 bp, Homo sapien
attggcgtgggcacagtttctccca

SEQ ID NO: 24974 - DNA, 25 bp, Homo sapien
atgtcgaactgtaatctccatgtgt

SEQ ID NO: 24975 - DNA, 25 bp, Homo sapien
ggagcagtcagaagatacgacattt

SEQ ID NO: 24976 - DNA, 25 bp, Homo sapien
acttaaatacataaaggccactgca

SEQ ID NO: 24977 - DNA, 25 bp, Homo sapien
tacgacatttaccaattaacctggc

SEQ ID NO: 24978 - DNA, 25 bp, Homo sapien
ctaaaagtggctgtttctcctggac

SEQ ID NO: 24979 - DNA, 25 bp, Homo sapien
cagtcagtcagtggagcagtcagaa

SEQ ID NO: 24980 - DNA, 25 bp, Homo sapien
tgagaggcgtgcaactctgtctttc

SEQ ID NO: 24981 - DNA, 25 bp, Homo sapien
gtgagccacctagcttctgactgaa

SEQ ID NO: 24982 - DNA, 25 bp, Homo sapien
actgcagggttgtgaattcgcctaa

SEQ ID NO: 24983 - DNA, 25 bp, Homo sapien
ggagacataggagaacagtcagtca

SEQ ID NO: 24984 - DNA, 25 bp, Homo sapien
ttgcccatgatcacacagttaattc

SEQ ID NO: 24985 - DNA, 25 bp, Homo sapien
gatggagaacctgagccatgatcat

SEQ ID NO: 24986 - DNA, 25 bp, Homo sapien
tagggatgaaaggaggcttaaatat

SEQ ID NO: 24987 - DNA, 25 bp, Homo sapien
atgagggttaacttggcaacttgcc

SEQ ID NO: 24988 - DNA, 25 bp, Homo sapien
tgggcacattgcttctgggaatttc

SEQ ID NO: 24989 - DNA, 25 bp, Homo sapien
tacaatgtggtcatagggatgaaag

SEQ ID NO: 24990 - DNA, 25 bp, Homo sapien
ccaaattgtgtaccaagggaataaa

SEQ ID NO: 24991 - DNA, 25 bp, Homo sapien
acatggcggatcatcagtatctgtc

SEQ ID NO: 24992 - DNA, 25 bp, Homo sapien
gcttggcagacagtgaacactcaaa

SEQ ID NO: 24993 - DNA, 25 bp, Homo sapien
atggttatagtaaacatggcggatc

SEQ ID NO: 24994 - DNA, 25 bp, Homo sapien
aaatgtgtgctggtactatcaaatc

SEQ ID NO: 24995 - DNA, 25 bp, Homo sapien
aattgggtcaattgtttcgagctct

SEQ ID NO: 24996 - DNA, 25 bp, Homo sapien
taaataaagcctacactagcgcatg

SEQ ID NO: 24997 - DNA, 25 bp, Homo sapien
tacacaatcacagtgccattagcac

SEQ ID NO: 24998 - DNA, 25 bp, Homo sapien
tcctcaccagctcatggacgtcttt

SEQ ID NO: 24999 - DNA, 25 bp, Homo sapien
ttcttggcatctaatgcgatctatc

SEQ ID NO: 25000 - DNA, 25 bp, Homo sapien
tattttaaggtgaatcccagacatc

SEQ ID NO: 25001 - DNA, 25 bp, Homo sapien
aaggtgaatcccagacatcaagtca

SEQ ID NO: 25002 - DNA, 25 bp, Homo sapien
cactgacttattgtagaaattgggt

SEQ ID NO: 25003 - DNA, 25 bp, Homo sapien
ttatggttcaaatcagctcttaaat

SEQ ID NO: 25004 - DNA, 25 bp, Homo sapien
acactagcgcatgatacttgtatct

SEQ ID NO: 25005 - DNA, 25 bp, Homo sapien
atcaaacagacaataatttcttggc

SEQ ID NO: 25006 - DNA, 25 bp, Homo sapien
tcctctcaaaaatgtgttatacttc

SEQ ID NO: 25007 - DNA, 25 bp, Homo sapien
tacacgtgttgtaatctgtcatcct

SEQ ID NO: 25008 - DNA, 25 bp, Homo sapien
aagcgtacattacctttaaagccag

SEQ ID NO: 25009 - DNA, 25 bp, Homo sapien
tacctttaaagccagagtacagcag

SEQ ID NO: 25010 - DNA, 25 bp, Homo sapien
ccctgtattcactaagcgtacatta

SEQ ID NO: 25011 - DNA, 25 bp, Homo sapien
tttaaagccagagtacagcagggcc

SEQ ID NO: 25012 - DNA, 25 bp, Homo sapien
tggcagaatgattacagaccatcac

SEQ ID NO: 25013 - DNA, 25 bp, Homo sapien
agaccatcacttccataatgaaatg

SEQ ID NO: 25014 - DNA, 25 bp, Homo sapien
atacttcctgacagagatggcagaa

SEQ ID NO: 25015 - DNA, 25 bp, Homo sapien
aaaaaagccagagtacacgtgttgt

SEQ ID NO: 25016 - DNA, 25 bp, Homo sapien
cagcagccaccaaactggaaaggga

SEQ ID NO: 25017 - DNA, 25 bp, Homo sapien
gaaactctgatgtctgggcacctgt

SEQ ID NO: 25018 - DNA, 25 bp, Homo sapien
cactgggtcagaaagacagggttac

SEQ ID NO: 25019 - DNA, 25 bp, Homo sapien
gttcatgctgacaggttagggcact

SEQ ID NO: 25020 - DNA, 25 bp, Homo sapien
gctttgagatgctgtcaacctgtaa

SEQ ID NO: 25021 - DNA, 25 bp, Homo sapien
cagggttacggtctgcactcctcct

SEQ ID NO: 25022 - DNA, 25 bp, Homo sapien
aaactctggggaaactatttctgtc

SEQ ID NO: 25023 - DNA, 25 bp, Homo sapien
tgtctaccaggtggccatgaacaga

SEQ ID NO: 25024 - DNA, 25 bp, Homo sapien
taataatgcatgatagttgagccta

SEQ ID NO: 25025 - DNA, 25 bp, Homo sapien
ggtttaataggttcagggctgtgca

SEQ ID NO: 25026 - DNA, 25 bp, Homo sapien
gtgagagagacccatctcctgccct

SEQ ID NO: 25027 - DNA, 25 bp, Homo sapien
cacctgtggtgtggttcatgctgac

SEQ ID NO: 25028 - DNA, 25 bp, Homo sapien
actgacactgagttctgatgctgac

SEQ ID NO: 25029 - DNA, 25 bp, Homo sapien
agaggggctgtaacaaaatataagc

SEQ ID NO: 25030 - DNA, 25 bp, Homo sapien
ctaactctgataggcctctgctggc

SEQ ID NO: 25031 - DNA, 25 bp, Homo sapien
ttgtaagggaacctagtatgctgag

SEQ ID NO: 25032 - DNA, 25 bp, Homo sapien
tacagacacacgatgttacaaacac

SEQ ID NO: 25033 - DNA, 25 bp, Homo sapien
gcagagcctggttagataccaccac

SEQ ID NO: 25034 - DNA, 25 bp, Homo sapien
gtacaagcactgattggcagagcct

SEQ ID NO: 25035 - DNA, 25 bp, Homo sapien
tatgtcacatggttgcaggtagaga

SEQ ID NO: 25036 - DNA, 25 bp, Homo sapien
ttgtagagagttagtttagtggtcc

SEQ ID NO: 25037 - DNA, 25 bp, Homo sapien
gaggttctacaaagaaaggtgatac

SEQ ID NO: 25038 - DNA, 25 bp, Homo sapien
aagtgaagtaaccaggaacaatgtc

SEQ ID NO: 25039 - DNA, 25 bp, Homo sapien
tacagtcaggacctcttatagaaat

SEQ ID NO: 25040 - DNA, 25 bp, Homo sapien
gagatacaaacagccttttacccac

SEQ ID NO: 25041 - DNA, 25 bp, Homo sapien
aacgtaaggccaattcagagagata

SEQ ID NO: 25042 - DNA, 25 bp, Homo sapien
agtcagtgtctgtagcagaaacagc

SEQ ID NO: 25043 - DNA, 25 bp, Homo sapien
gtgtgtggcacgaagacacacagca

SEQ ID NO: 25044 - DNA, 25 bp, Homo sapien
gcagaaacagcaagtgtcccgtctc

SEQ ID NO: 25045 - DNA, 25 bp, Homo sapien
ttctcagggatcagagcctcccagt

SEQ ID NO: 25046 - DNA, 25 bp, Homo sapien
gaagtcagggaactggatcaaatcc

SEQ ID NO: 25047 - DNA, 25 bp, Homo sapien
ctgtgagtcaatactgtaaagaacc

SEQ ID NO: 25048 - DNA, 25 bp, Homo sapien
taggtcatttaagtagctgtgagtc

SEQ ID NO: 25049 - DNA, 25 bp, Homo sapien
gtcccgtctccaccacatgtttagg

SEQ ID NO: 25050 - DNA, 25 bp, Homo sapien
atccttcaaggctctctgggaagtc

SEQ ID NO: 25051 - DNA, 25 bp, Homo sapien
ttgcaaaagccactttgagaggtac

SEQ ID NO: 25052 - DNA, 25 bp, Homo sapien
tgagtcactgaacccagcccaagaa

SEQ ID NO: 25053 - DNA, 25 bp, Homo sapien
ccgccacaacaatgctggatggctt

SEQ ID NO: 25054 - DNA, 25 bp, Homo sapien
tggctaagactacagttatgagcca

SEQ ID NO: 25055 - DNA, 25 bp, Homo sapien
tgagaggtactaatccaaatctttc

SEQ ID NO: 25056 - DNA, 25 bp, Homo sapien
tgctggatggctttgggtaagtcac

SEQ ID NO: 25057 - DNA, 25 bp, Homo sapien
cagcagtcccttcagagcagctatg

SEQ ID NO: 25058 - DNA, 25 bp, Homo sapien
tcaagagatccttgggtgctgggat

SEQ ID NO: 25059 - DNA, 25 bp, Homo sapien
ttctggattgttccagcccatgcca

SEQ ID NO: 25060 - DNA, 25 bp, Homo sapien
actatgctgtttaagctggtcttga

SEQ ID NO: 25061 - DNA, 25 bp, Homo sapien
ctggggctgtgcactcctcagagct

SEQ ID NO: 25062 - DNA, 25 bp, Homo sapien
ccctgtcccgcaggctcagttgtac

SEQ ID NO: 25063 - DNA, 25 bp, Homo sapien
aaggacccatttatgatggcagcag

SEQ ID NO: 25064 - DNA, 25 bp, Homo sapien
atactgtggtgagcagtgttgctaa

SEQ ID NO: 25065 - DNA, 25 bp, Homo sapien
gtggcccacgtggagcagttgctat

SEQ ID NO: 25066 - DNA, 25 bp, Homo sapien
cccagagtgctgaggtacaaggaag

SEQ ID NO: 25067 - DNA, 25 bp, Homo sapien
cctgaaaggacccatttatgatggc

SEQ ID NO: 25068 - DNA, 25 bp, Homo sapien
atcttccaccatgtgtctgtgctgg

SEQ ID NO: 25069 - DNA, 25 bp, Homo sapien
ctgctagggcctctggagctatact

SEQ ID NO: 25070 - DNA, 25 bp, Homo sapien
gtgttgctaaggcttctaatgaccc

SEQ ID NO: 25071 - DNA, 25 bp, Homo sapien
tgaggtacaaggaaggaacctgaaa

SEQ ID NO: 25072 - DNA, 25 bp, Homo sapien
tttaaggtggtttgtcatgcagcga

SEQ ID NO: 25073 - DNA, 25 bp, Homo sapien
gctttcccagggaggctgtctttat

SEQ ID NO: 25074 - DNA, 25 bp, Homo sapien
catgcagcgatagcagatggaaaat

SEQ ID NO: 25075 - DNA, 25 bp, Homo sapien
tgtaccagcttagcaatgcccactg

SEQ ID NO: 25076 - DNA, 25 bp, Homo sapien
tgcacctggccaagccaaagcattt

SEQ ID NO: 25077 - DNA, 25 bp, Homo sapien
ttctgacaaaagtctggggatgact

SEQ ID NO: 25078 - DNA, 25 bp, Homo sapien
ggaaaatgctggatctagtgctcta

SEQ ID NO: 25079 - DNA, 25 bp, Homo sapien
aagggcataggctttcccagcagtt

SEQ ID NO: 25080 - DNA, 25 bp, Homo sapien
gcatcaggcttgcattgtaccagct

SEQ ID NO: 25081 - DNA, 25 bp, Homo sapien
tggaaggatgtccactacagcatca

SEQ ID NO: 25082 - DNA, 25 bp, Homo sapien
gctctgattagctcatgtgcccatc

SEQ ID NO: 25083 - DNA, 25 bp, Homo sapien
catttattgaatagggtttcctttc

SEQ ID NO: 25084 - DNA, 25 bp, Homo sapien
cttctggaatctttatggtttcagg

SEQ ID NO: 25085 - DNA, 25 bp, Homo sapien
gttcttggtcatgaaggctttgcct

SEQ ID NO: 25086 - DNA, 25 bp, Homo sapien
gcgcccagcctgattatttcttttg

SEQ ID NO: 25087 - DNA, 25 bp, Homo sapien
ttcttggtcatgaaggctttgccta

SEQ ID NO: 25088 - DNA, 25 bp, Homo sapien
tttccgatgttatcttctggaatct

SEQ ID NO: 25089 - DNA, 25 bp, Homo sapien
ccaatgtctagaagggtttttccga

SEQ ID NO: 25090 - DNA, 25 bp, Homo sapien
tcatgaaggctttgcctaagccaat

SEQ ID NO: 25091 - DNA, 25 bp, Homo sapien
tggtcatgaaggctttgcctaagcc

SEQ ID NO: 25092 - DNA, 25 bp, Homo sapien
ctagaagggtttttccgatgttatc

SEQ ID NO: 25093 - DNA, 25 bp, Homo sapien
agtatttgagccatcttgagttgat

SEQ ID NO: 25094 - DNA, 25 bp, Homo sapien
attcacggtccgtccaaccagggaa

SEQ ID NO: 25095 - DNA, 25 bp, Homo sapien
ttagatgatagagctagacaattac

SEQ ID NO: 25096 - DNA, 25 bp, Homo sapien
gtttttcacggaactgaccaggcaa

SEQ ID NO: 25097 - DNA, 25 bp, Homo sapien
tgaccaggcaattcagtcagtagct

SEQ ID NO: 25098 - DNA, 25 bp, Homo sapien
aatgaaacagaactggcagcattca

SEQ ID NO: 25099 - DNA, 25 bp, Homo sapien
agctggccgggtgcatttctatttc

SEQ ID NO: 25100 - DNA, 25 bp, Homo sapien
gggtagagagcagacagtttcttat

SEQ ID NO: 25101 - DNA, 25 bp, Homo sapien
atgggctggcccaaagttaattaaa

SEQ ID NO: 25102 - DNA, 25 bp, Homo sapien
aaacgtgttgagataattagatgat

SEQ ID NO: 25103 - DNA, 25 bp, Homo sapien
atctgggccttaatatctcgctcac

SEQ ID NO: 25104 - DNA, 25 bp, Homo sapien
cctgtgcgtgctccatggtgacact

SEQ ID NO: 25105 - DNA, 25 bp, Homo sapien
ccatctctatggatctacctactct

SEQ ID NO: 25106 - DNA, 25 bp, Homo sapien
gatggggataagatttgcatgacat

SEQ ID NO: 25107 - DNA, 25 bp, Homo sapien
tcacaatgatgtacaaccaccactg

SEQ ID NO: 25108 - DNA, 25 bp, Homo sapien
ttgatggggataagatttgcatgac

SEQ ID NO: 25109 - DNA, 25 bp, Homo sapien
atgatgtacaaccaccactgagttc

SEQ ID NO: 25110 - DNA, 25 bp, Homo sapien
gtactcgagaggctaaagtggagga

SEQ ID NO: 25111 - DNA, 25 bp, Homo sapien
cagaaggaagcctgtacccactcac

SEQ ID NO: 25112 - DNA, 25 bp, Homo sapien
tgagcaattcagtggcacttagtac

SEQ ID NO: 25113 - DNA, 25 bp, Homo sapien
gatttgcatgacataaaattagcca

SEQ ID NO: 25114 - DNA, 25 bp, Homo sapien
tgtacaaccaccactgagttccaga

SEQ ID NO: 25115 - DNA, 25 bp, Homo sapien
aggaagcctgtacccactcacagtc

SEQ ID NO: 25116 - DNA, 25 bp, Homo sapien
agagaattgcgcagagtatcttaac

SEQ ID NO: 25117 - DNA, 25 bp, Homo sapien
ttcgtgtatgagatttgttccgcca

SEQ ID NO: 25118 - DNA, 25 bp, Homo sapien
ataatggggattatctggagattag

SEQ ID NO: 25119 - DNA, 25 bp, Homo sapien
aaatttgtgcagagaattgcgcaga

SEQ ID NO: 25120 - DNA, 25 bp, Homo sapien
ttaatgattgatattcaggtccaac

SEQ ID NO: 25121 - DNA, 25 bp, Homo sapien
atctggagattagttaaagtttcac

SEQ ID NO: 25122 - DNA, 25 bp, Homo sapien
ttacctcgactggactgcctaaata

SEQ ID NO: 25123 - DNA, 25 bp, Homo sapien
gttccgccattacttcaggtagatt

SEQ ID NO: 25124 - DNA, 25 bp, Homo sapien
ataaccagttattcaggcaatttgc

SEQ ID NO: 25125 - DNA, 25 bp, Homo sapien
ttgactccggccctttcgtgtatga

SEQ ID NO: 25126 - DNA, 25 bp, Homo sapien
ggtgaaagctgtatataatggggat

SEQ ID NO: 25127 - DNA, 25 bp, Homo sapien
tttctatctgcattcacgaaggtgc

SEQ ID NO: 25128 - DNA, 25 bp, Homo sapien
gtagacaaaaatatgcagattgccc

SEQ ID NO: 25129 - DNA, 25 bp, Homo sapien
cccagcccacagcagatatttctat

SEQ ID NO: 25130 - DNA, 25 bp, Homo sapien
ttttcagaaatcttgtagacaaaaa

SEQ ID NO: 25131 - DNA, 25 bp, Homo sapien
atgcagattgcccaaaactgtggcc

SEQ ID NO: 25132 - DNA, 25 bp, Homo sapien
agcaactcgacagactcagcctccc

SEQ ID NO: 25133 - DNA, 25 bp, Homo sapien
tcacgaaggtgcatagaaagcttat

SEQ ID NO: 25134 - DNA, 25 bp, Homo sapien
tgcttttcccaggacagcacgctga

SEQ ID NO: 25135 - DNA, 25 bp, Homo sapien
gcacgctgagcaggccaccttcctt

SEQ ID NO: 25136 - DNA, 25 bp, Homo sapien
ttactcctagtccatggcttgtctt

SEQ ID NO: 25137 - DNA, 25 bp, Homo sapien
aaaactgtggcctctacacgctcca

SEQ ID NO: 25138 - DNA, 25 bp, Homo sapien
atgagactcccatgaaacatatgtt

SEQ ID NO: 25139 - DNA, 25 bp, Homo sapien
ttcaattgcttatgagactcccatg

SEQ ID NO: 25140 - DNA, 25 bp, Homo sapien
tgcgaagtccaaatctgtacccgtc

SEQ ID NO: 25141 - DNA, 25 bp, Homo sapien
tcttccaattggataagtcctattt

SEQ ID NO: 25142 - DNA, 25 bp, Homo sapien
gaagtctttttctgcgaagtccaaa

SEQ ID NO: 25143 - DNA, 25 bp, Homo sapien
tgtacccgtcaaatatagtatgttt

SEQ ID NO: 25144 - DNA, 25 bp, Homo sapien
tttctcctgacatcttgaatctgct

SEQ ID NO: 25145 - DNA, 25 bp, Homo sapien
ctgagtatgggtcatattttcctgc

SEQ ID NO: 25146 - DNA, 25 bp, Homo sapien
aacatatgttgctgtgcttaatggt

SEQ ID NO: 25147 - DNA, 25 bp, Homo sapien
tgcttaatggtgtcctataggtctc

SEQ ID NO: 25148 - DNA, 25 bp, Homo sapien
gtctctgaggccctgttcatctttc

SEQ ID NO: 25149 - DNA, 25 bp, Homo sapien
gctgccgcctctctgggtacagaaa

SEQ ID NO: 25150 - DNA, 25 bp, Homo sapien
acgtgatggtttagggatttgcttt

SEQ ID NO: 25151 - DNA, 25 bp, Homo sapien
atcacggtgggttttctggccatca

SEQ ID NO: 25152 - DNA, 25 bp, Homo sapien
aggtggagaagctcccgtgctctct

SEQ ID NO: 25153 - DNA, 25 bp, Homo sapien
tgtggtcacctccaaggccagtgct

SEQ ID NO: 25154 - DNA, 25 bp, Homo sapien
cagttggtaaatatcacggtgggtt

SEQ ID NO: 25155 - DNA, 25 bp, Homo sapien
catttattaggcacacgtgatggtt

SEQ ID NO: 25156 - DNA, 25 bp, Homo sapien
tgttcctaaacaatggctgggtttc

SEQ ID NO: 25157 - DNA, 25 bp, Homo sapien
tgcagcccaagatgtgcgcccttca

SEQ ID NO: 25158 - DNA, 25 bp, Homo sapien
ctgggtacagaaagcctgctgctct

SEQ ID NO: 25159 - DNA, 25 bp, Homo sapien
gagcgtttggcctgcaccacacagc

SEQ ID NO: 25160 - DNA, 25 bp, Homo sapien
ggaatgagacaaagccctgccgtca

SEQ ID NO: 25161 - DNA, 25 bp, Homo sapien
gttggagatcaagaatagaaaagcc

SEQ ID NO: 25162 - DNA, 25 bp, Homo sapien
attctaatcccaagtgtccagcagg

SEQ ID NO: 25163 - DNA, 25 bp, Homo sapien
tacactggctggtgccctcagcttc

SEQ ID NO: 25164 - DNA, 25 bp, Homo sapien
gtaagagagaactgacaggcctgct

SEQ ID NO: 25165 - DNA, 25 bp, Homo sapien
ttccaacacgtgctagtgaccgtcc

SEQ ID NO: 25166 - DNA, 25 bp, Homo sapien
tgcttgttccaaaaaggaatgagac

SEQ ID NO: 25167 - DNA, 25 bp, Homo sapien
tctacttaggtaaaagagaacagaa

SEQ ID NO: 25168 - DNA, 25 bp, Homo sapien
gaccgtccaggtccagcattactgt

SEQ ID NO: 25169 - DNA, 25 bp, Homo sapien
tgccgtcagagaatcctcagtctgt

SEQ ID NO: 25170 - DNA, 25 bp, Homo sapien
gggcgattggaacagaaaatgacca

SEQ ID NO: 25171 - DNA, 25 bp, Homo sapien
ttgaaagtattaatatgttcctgcc

SEQ ID NO: 25172 - DNA, 25 bp, Homo sapien
gtaaaaatacagtttgacgattgta

SEQ ID NO: 25173 - DNA, 25 bp, Homo sapien
tatcatattataagcaaactcagtt

SEQ ID NO: 25174 - DNA, 25 bp, Homo sapien
caaattttcagaggtgttctctatc

SEQ ID NO: 25175 - DNA, 25 bp, Homo sapien
cttcagatctgtacaaagtatcttg

SEQ ID NO: 25176 - DNA, 25 bp, Homo sapien
cccatacatatgctggtaaaaatac

SEQ ID NO: 25177 - DNA, 25 bp, Homo sapien
ttgacgattgtaaaatagttgtaaa

SEQ ID NO: 25178 - DNA, 25 bp, Homo sapien
aaactcagttttacatgatacattt

SEQ ID NO: 25179 - DNA, 25 bp, Homo sapien
attttggagttaaatcacatttact

SEQ ID NO: 25180 - DNA, 25 bp, Homo sapien
aatgaaaggtcacccagggtttcaa

SEQ ID NO: 25181 - DNA, 25 bp, Homo sapien
tacaagtatcaaaactaaatgcatt

SEQ ID NO: 25182 - DNA, 25 bp, Homo sapien
agctgtgtgatctttggggactcat

SEQ ID NO: 25183 - DNA, 25 bp, Homo sapien
cttcaaaagggatgacttagccatt

SEQ ID NO: 25184 - DNA, 25 bp, Homo sapien
gaggaaatataagaactggaagaag

SEQ ID NO: 25185 - DNA, 25 bp, Homo sapien
tagaagatgtaaaaaggactctgtc

SEQ ID NO: 25186 - DNA, 25 bp, Homo sapien
gtgacctgtgtagaaaagctttgaa

SEQ ID NO: 25187 - DNA, 25 bp, Homo sapien
tgtggagacagactgccctgacctt

SEQ ID NO: 25188 - DNA, 25 bp, Homo sapien
gagaggtctgctccaatggtgaaaa

SEQ ID NO: 25189 - DNA, 25 bp, Homo sapien
cttggtaagctggtgataattatcc

SEQ ID NO: 25190 - DNA, 25 bp, Homo sapien
ctacacctaggagatatcacttaac

SEQ ID NO: 25191 - DNA, 25 bp, Homo sapien
gcagagccaggattgctgtgtctat

SEQ ID NO: 25192 - DNA, 25 bp, Homo sapien
cattgacttctcagacagggttgga

SEQ ID NO: 25193 - DNA, 25 bp, Homo sapien
accaaagaaatgaatcgtcatccat

SEQ ID NO: 25194 - DNA, 25 bp, Homo sapien
atggatgacgattcatttctttggt

SEQ ID NO: 25195 - DNA, 25 bp, Homo sapien
tgggactacagtctcctgccgccat

SEQ ID NO: 25196 - DNA, 25 bp, Homo sapien
gagggttgcctagtgttggaatttc

SEQ ID NO: 25197 - DNA, 25 bp, Homo sapien
accgtgcccggactcaatacatttt

SEQ ID NO: 25198 - DNA, 25 bp, Homo sapien
ttgccacattttggagggttgccta

SEQ ID NO: 25199 - DNA, 25 bp, Homo sapien
tccgggttcaatctcccaaatagct

SEQ ID NO: 25200 - DNA, 25 bp, Homo sapien
tttttaatatacacagagctttgcc

SEQ ID NO: 25201 - DNA, 25 bp, Homo sapien
acgtaggacactggctggattcaga

SEQ ID NO: 25202 - DNA, 25 bp, Homo sapien
gcctagtgttggaatttctggattt

SEQ ID NO: 25203 - DNA, 25 bp, Homo sapien
ctctccattgcataggctgaagcag

SEQ ID NO: 25204 - DNA, 25 bp, Homo sapien
aatatacacagagctttgccacatt

SEQ ID NO: 25205 - DNA, 25 bp, Homo sapien
ctgaagcaggtatgacgtaggacac

SEQ ID NO: 25206 - DNA, 25 bp, Homo sapien
ttccatgggtcaaagaaaaaatcat

SEQ ID NO: 25207 - DNA, 25 bp, Homo sapien
gagcaggaataacttgacatgggcc

SEQ ID NO: 25208 - DNA, 25 bp, Homo sapien
caagatagactgtatgctggaccat

SEQ ID NO: 25209 - DNA, 25 bp, Homo sapien
ctgttcaagtgcatatggaatattc

SEQ ID NO: 25210 - DNA, 25 bp, Homo sapien
tatttggacacgaagcaacacactt

SEQ ID NO: 25211 - DNA, 25 bp, Homo sapien
ccatttccaattgtggagcaggaat

SEQ ID NO: 25212 - DNA, 25 bp, Homo sapien
tctggtgaaatgcaagggtccattt

SEQ ID NO: 25213 - DNA, 25 bp, Homo sapien
gtaagaaaggttggaactcagacag

SEQ ID NO: 25214 - DNA, 25 bp, Homo sapien
gttaaacataagacagtgaaatcac

SEQ ID NO: 25215 - DNA, 25 bp, Homo sapien
caagagaaaaatggtctggtgaaat

SEQ ID NO: 25216 - DNA, 25 bp, Homo sapien
aatagaaagatagctggaaagttac

SEQ ID NO: 25217 - DNA, 25 bp, Homo sapien
cagtttgttgagagctgttatcaca

SEQ ID NO: 25218 - DNA, 25 bp, Homo sapien
atttaaacatccttgcatacctggg

SEQ ID NO: 25219 - DNA, 25 bp, Homo sapien
ttgatgtgtcacagttattgactgc

SEQ ID NO: 25220 - DNA, 25 bp, Homo sapien
tttaatgtgcctttgaattcaattc

SEQ ID NO: 25221 - DNA, 25 bp, Homo sapien
atattaacagtggtgaaagtgggca

SEQ ID NO: 25222 - DNA, 25 bp, Homo sapien
tctggcaaggatttccagtactata

SEQ ID NO: 25223 - DNA, 25 bp, Homo sapien
gttgagagctgttatcacaaagaga

SEQ ID NO: 25224 - DNA, 25 bp, Homo sapien
tttgctgtcagtatatagaaatgtg

SEQ ID NO: 25225 - DNA, 25 bp, Homo sapien
tctgttgtctaattgctctggcaag

SEQ ID NO: 25226 - DNA, 25 bp, Homo sapien
tagaaatgtgactgattgtatgttg

SEQ ID NO: 25227 - DNA, 25 bp, Homo sapien
ccagtactatattaacagtggtgaa

SEQ ID NO: 25228 - DNA, 25 bp, Homo sapien
ttgggaaacgtgcactcctgtgtac

SEQ ID NO: 25229 - DNA, 25 bp, Homo sapien
tactttccggcacagcaagatgctc

SEQ ID NO: 25230 - DNA, 25 bp, Homo sapien
gtggatgatagttgtgctcactgtt

SEQ ID NO: 25231 - DNA, 25 bp, Homo sapien
tctcagcagacagaattgggaaacg

SEQ ID NO: 25232 - DNA, 25 bp, Homo sapien
agggttgacttttggcattctactt

SEQ ID NO: 25233 - DNA, 25 bp, Homo sapien
atcgcagtccaacacactgagggtt

SEQ ID NO: 25234 - DNA, 25 bp, Homo sapien
ttctctctccaaagggatgaaactt

SEQ ID NO: 25235 - DNA, 25 bp, Homo sapien
gcaaagattgctaaacagtgtatag

SEQ ID NO: 25236 - DNA, 25 bp, Homo sapien
gcacagcaagatgctctaggctcat

SEQ ID NO: 25237 - DNA, 25 bp, Homo sapien
attagtgagaatgatatttagaaac

SEQ ID NO: 25238 - DNA, 25 bp, Homo sapien
ttgctggggtctcactgcttctaga

SEQ ID NO: 25239 - DNA, 25 bp, Homo sapien
attttatgaagattgcctccgcatg

SEQ ID NO: 25240 - DNA, 25 bp, Homo sapien
tagatacaggtaacccaaaccatat

SEQ ID NO: 25241 - DNA, 25 bp, Homo sapien
taagaatctagcaagcctgcttgct

SEQ ID NO: 25242 - DNA, 25 bp, Homo sapien
tgcttgcttctaggaaatgctctac

SEQ ID NO: 25243 - DNA, 25 bp, Homo sapien
ataatgtctattccagagaactctt

SEQ ID NO: 25244 - DNA, 25 bp, Homo sapien
tgcttaaagcatttcacacgagaga

SEQ ID NO: 25245 - DNA, 25 bp, Homo sapien
gcctccgcatgattcagcaacctga

SEQ ID NO: 25246 - DNA, 25 bp, Homo sapien
ttcacacgagagaataactgatttt

SEQ ID NO: 25247 - DNA, 25 bp, Homo sapien
tttttagcaatcaccttcaggcatt

SEQ ID NO: 25248 - DNA, 25 bp, Homo sapien
tccagagaactcttaagatgattaa

SEQ ID NO: 25249 - DNA, 25 bp, Homo sapien
aaaaatgaatagatacaggtaaccc

SEQ ID NO: 25250 - DNA, 25 bp, Homo sapien
tgttataggagtctcagctatgaac

SEQ ID NO: 25251 - DNA, 25 bp, Homo sapien
atgagagtaaatcccaccttaaaac

SEQ ID NO: 25252 - DNA, 25 bp, Homo sapien
ccttgttgaggcgttttcttgtctt

SEQ ID NO: 25253 - DNA, 25 bp, Homo sapien
ttctacaataggcttggaaatttct

SEQ ID NO: 25254 - DNA, 25 bp, Homo sapien
cagctatgaacttagtggtgggtaa

SEQ ID NO: 25255 - DNA, 25 bp, Homo sapien
atttaaagagaaagggatgagagta

SEQ ID NO: 25256 - DNA, 25 bp, Homo sapien
ctagaatttgtggaaaggaaatggt

SEQ ID NO: 25257 - DNA, 25 bp, Homo sapien
cattttaagagaatcgtggtgaaga

SEQ ID NO: 25258 - DNA, 25 bp, Homo sapien
aggggcttcttcattcttaaggctc

SEQ ID NO: 25259 - DNA, 25 bp, Homo sapien
ataacatgtaaagagtgtcttgctc

SEQ ID NO: 25260 - DNA, 25 bp, Homo sapien
tgcaagcccaataaagcaaaagaac

SEQ ID NO: 25261 - DNA, 25 bp, Homo sapien
atcttgttcactgcagccgcgactg

SEQ ID NO: 25262 - DNA, 25 bp, Homo sapien
gcacagatggaggtctcaacatgtt

SEQ ID NO: 25263 - DNA, 25 bp, Homo sapien
gccgcgactgcttaggctcaagtga

SEQ ID NO: 25264 - DNA, 25 bp, Homo sapien
ctgtgtctgtccttggagtggattt

SEQ ID NO: 25265 - DNA, 25 bp, Homo sapien
gaaaaagtggaaaccatgcagggct

SEQ ID NO: 25266 - DNA, 25 bp, Homo sapien
tggggtgtactattcaggcaagaaa

SEQ ID NO: 25267 - DNA, 25 bp, Homo sapien
atccctctaggcctctgcttgtgaa

SEQ ID NO: 25268 - DNA, 25 bp, Homo sapien
ttctcctgtcttccaggggagcaag

SEQ ID NO: 25269 - DNA, 25 bp, Homo sapien
ggcaggtggcctcagaatccctcta

SEQ ID NO: 25270 - DNA, 25 bp, Homo sapien
actattcaggcaagaaaagagggta

SEQ ID NO: 25271 - DNA, 25 bp, Homo sapien
taggcctctgcttgtgaataaatcc

SEQ ID NO: 25272 - DNA, 25 bp, Homo sapien
atgctgtcatttcacagagatcttc

SEQ ID NO: 25273 - DNA, 25 bp, Homo sapien
taccctctttggtcatccacaaaag

SEQ ID NO: 25274 - DNA, 25 bp, Homo sapien
ggttatttaggtagttggcagtatc

SEQ ID NO: 25275 - DNA, 25 bp, Homo sapien
cgttaggttatttaggtagttggca

SEQ ID NO: 25276 - DNA, 25 bp, Homo sapien
agttggcagtatctagcaattatac

SEQ ID NO: 25277 - DNA, 25 bp, Homo sapien
taggtagttggcagtatctagcaat

SEQ ID NO: 25278 - DNA, 25 bp, Homo sapien
tcacttagtgtatcctggaaatagc

SEQ ID NO: 25279 - DNA, 25 bp, Homo sapien
tccacaaaagataatatagcataca

SEQ ID NO: 25280 - DNA, 25 bp, Homo sapien
agctatgctgtcatttcacagagat

SEQ ID NO: 25281 - DNA, 25 bp, Homo sapien
actctgttatttggatgtatcatag

SEQ ID NO: 25282 - DNA, 25 bp, Homo sapien
agcatacatgtattctgtaccttgc

SEQ ID NO: 25283 - DNA, 25 bp, Homo sapien
ttgccaaggttgaagatgcgtgccc

SEQ ID NO: 25284 - DNA, 25 bp, Homo sapien
actttgatgatgagagactgggcat

SEQ ID NO: 25285 - DNA, 25 bp, Homo sapien
ttaaatgactttgatgatgagagac

SEQ ID NO: 25286 - DNA, 25 bp, Homo sapien
attttgtttctgacaagcctctcca

SEQ ID NO: 25287 - DNA, 25 bp, Homo sapien
catggagagctagaggccctcatct

SEQ ID NO: 25288 - DNA, 25 bp, Homo sapien
ggtatgtgtctatctcagcgagcag

SEQ ID NO: 25289 - DNA, 25 bp, Homo sapien
tgtgtctatctcagcgagcagagga

SEQ ID NO: 25290 - DNA, 25 bp, Homo sapien
tcgctggggccttaaatgactttga

SEQ ID NO: 25291 - DNA, 25 bp, Homo sapien
atgtctcaggttgcggtgtgcagct

SEQ ID NO: 25292 - DNA, 25 bp, Homo sapien
gtcgcaggtagctgagagacaaatg

SEQ ID NO: 25293 - DNA, 25 bp, Homo sapien
gttgaagatgcgtgcccgtgacaca

SEQ ID NO: 25294 - DNA, 25 bp, Homo sapien
ttagtggcagaacttgaattcagtg

SEQ ID NO: 25295 - DNA, 25 bp, Homo sapien
attagccatgaatagtgaactagat

SEQ ID NO: 25296 - DNA, 25 bp, Homo sapien
ttataccaactgagactacaaaagt

SEQ ID NO: 25297 - DNA, 25 bp, Homo sapien
tagaatacattgatgttgaagagca

SEQ ID NO: 25298 - DNA, 25 bp, Homo sapien
gtggcagaacttgaattcagtgctc

SEQ ID NO: 25299 - DNA, 25 bp, Homo sapien
cacaaaagcatgagattggcctata

SEQ ID NO: 25300 - DNA, 25 bp, Homo sapien
gcctatattagccatgaatagtgaa

SEQ ID NO: 25301 - DNA, 25 bp, Homo sapien
ctgagactacaaaagtatagaatac

SEQ ID NO: 25302 - DNA, 25 bp, Homo sapien
tgtgtgttaataccaaaggacacgt

SEQ ID NO: 25303 - DNA, 25 bp, Homo sapien
aagcatgagattggcctatattagc

SEQ ID NO: 25304 - DNA, 25 bp, Homo sapien
tgaatagtgaactagatagtgtgtg

SEQ ID NO: 25305 - DNA, 25 bp, Homo sapien
tcatagattcgtaccaaatgtcatt

SEQ ID NO: 25306 - DNA, 25 bp, Homo sapien
gcaggaaactacatggcataaagta

SEQ ID NO: 25307 - DNA, 25 bp, Homo sapien
taagagaagctgtgcaaatgtagct

SEQ ID NO: 25308 - DNA, 25 bp, Homo sapien
attgaaattgggtttagataggtac

SEQ ID NO: 25309 - DNA, 25 bp, Homo sapien
actgatggactcacaggttatctcc

SEQ ID NO: 25310 - DNA, 25 bp, Homo sapien
ttgaggctctgttcttgcaggaaac

SEQ ID NO: 25311 - DNA, 25 bp, Homo sapien
attagagttaagtatgtctcagtct

SEQ ID NO: 25312 - DNA, 25 bp, Homo sapien
taaaactatctaagagaagctgtgc

SEQ ID NO: 25313 - DNA, 25 bp, Homo sapien
actcaaccatgtgtcgcagctacga

SEQ ID NO: 25314 - DNA, 25 bp, Homo sapien
atagatccttgagatgtaaactctc

SEQ ID NO: 25315 - DNA, 25 bp, Homo sapien
aacacatacagagttgcttatcctc

SEQ ID NO: 25316 - DNA, 25 bp, Homo sapien
taatgagagctctgttctaggcatc

SEQ ID NO: 25317 - DNA, 25 bp, Homo sapien
gaacacagataccaaaagctcccta

SEQ ID NO: 25318 - DNA, 25 bp, Homo sapien
tgagtagggaaatgtctggaacaca

SEQ ID NO: 25319 - DNA, 25 bp, Homo sapien
aaaagatacagactcggagaggttt

SEQ ID NO: 25320 - DNA, 25 bp, Homo sapien
agtaaacaaggggaactagattaga

SEQ ID NO: 25321 - DNA, 25 bp, Homo sapien
gggatttggacctaggatgaattcc

SEQ ID NO: 25322 - DNA, 25 bp, Homo sapien
gtcatgagattaagcaggaagaaaa

SEQ ID NO: 25323 - DNA, 25 bp, Homo sapien
accagttggataaatgtgggcacat

SEQ ID NO: 25324 - DNA, 25 bp, Homo sapien
tcggagaggtttagtgacttgtcta

SEQ ID NO: 25325 - DNA, 25 bp, Homo sapien
ggggcagcagcttctagttccagaa

SEQ ID NO: 25326 - DNA, 25 bp, Homo sapien
tccaagtgaggacacaattgtggtc

SEQ ID NO: 25327 - DNA, 25 bp, Homo sapien
cgtcgacgagcgaggtctcggcacc

SEQ ID NO: 25328 - DNA, 25 bp, Homo sapien
ggtgccgagacctcgctcgtcgacg

SEQ ID NO: 25329 - DNA, 25 bp, Homo sapien
acgagacaactgtttcaaaggctgt

SEQ ID NO: 25330 - DNA, 25 bp, Homo sapien
ggtggcacattaaagcttgagaagc

SEQ ID NO: 25331 - DNA, 25 bp, Homo sapien
agaatgaccagaaatccgtgcaaca

SEQ ID NO: 25332 - DNA, 25 bp, Homo sapien
attttgacaagagtcccaggtattt

SEQ ID NO: 25333 - DNA, 25 bp, Homo sapien
cttgttagaaaatgcagggcccttg

SEQ ID NO: 25334 - DNA, 25 bp, Homo sapien
cttgcctagactacaaaaaggtcct

SEQ ID NO: 25335 - DNA, 25 bp, Homo sapien
ataatcaagttgtcgacggtgcttt

SEQ ID NO: 25336 - DNA, 25 bp, Homo sapien
tctatggaacggcagcattggcatc

SEQ ID NO: 25337 - DNA, 25 bp, Homo sapien
ttcaaaagcctagacagacaacaat

SEQ ID NO: 25338 - DNA, 25 bp, Homo sapien
agacaccctcagcatactaacgcgt

SEQ ID NO: 25339 - DNA, 25 bp, Homo sapien
ttgccagagctacagatccagaatc

SEQ ID NO: 25340 - DNA, 25 bp, Homo sapien
agggcattaatcctatcctgagggc

SEQ ID NO: 25341 - DNA, 25 bp, Homo sapien
agagagacagcctgcgtctcctcct

SEQ ID NO: 25342 - DNA, 25 bp, Homo sapien
ggcacagaaaggctagattccaact

SEQ ID NO: 25343 - DNA, 25 bp, Homo sapien
gtatcctcacatggcgtggagcaca

SEQ ID NO: 25344 - DNA, 25 bp, Homo sapien
ttcccagctaacagatgaaaaatgg

SEQ ID NO: 25345 - DNA, 25 bp, Homo sapien
ttcactttaggtctgttgaggctcc

SEQ ID NO: 25346 - DNA, 25 bp, Homo sapien
aggctcctggctctacggcattcta

SEQ ID NO: 25347 - DNA, 25 bp, Homo sapien
agcccataactgaggaagataatat

SEQ ID NO: 25348 - DNA, 25 bp, Homo sapien
tagaatctgggctcataaccactac

SEQ ID NO: 25349 - DNA, 25 bp, Homo sapien
tccaggcggtcaggctctagaatct

SEQ ID NO: 25350 - DNA, 25 bp, Homo sapien
taagtagtagcactgggcctgaaat

SEQ ID NO: 25351 - DNA, 25 bp, Homo sapien
ttagggagataccattctgcaggtc

SEQ ID NO: 25352 - DNA, 25 bp, Homo sapien
taagagaaccgcctgatacacttgg

SEQ ID NO: 25353 - DNA, 25 bp, Homo sapien
taacactgatgtaggtctaattcac

SEQ ID NO: 25354 - DNA, 25 bp, Homo sapien
ttcagaaaccgtatcaattgacctt

SEQ ID NO: 25355 - DNA, 25 bp, Homo sapien
gttgcccaggcttctctctctaaat

SEQ ID NO: 25356 - DNA, 25 bp, Homo sapien
tctcctcaatcctgaagctttggct

SEQ ID NO: 25357 - DNA, 25 bp, Homo sapien
atacacttggctaaatctaacactg

SEQ ID NO: 25358 - DNA, 25 bp, Homo sapien
gctcaagggaatagcccgcttggcc

SEQ ID NO: 25359 - DNA, 25 bp, Homo sapien
ctacctaatgtaaggcagggtctcc

SEQ ID NO: 25360 - DNA, 25 bp, Homo sapien
tactcagttgccactcagcacctgg

SEQ ID NO: 25361 - DNA, 25 bp, Homo sapien
cagcacctggctttaagagaaccgc

SEQ ID NO: 25362 - DNA, 25 bp, Homo sapien
gtgacctaagcttcactgggacagt

SEQ ID NO: 25363 - DNA, 25 bp, Homo sapien
aagcacaatttagaatggaaactac

SEQ ID NO: 25364 - DNA, 25 bp, Homo sapien
actgtttttgaccaagtggggaaca

SEQ ID NO: 25365 - DNA, 25 bp, Homo sapien
atgaggaagactttgcagtgcatat

SEQ ID NO: 25366 - DNA, 25 bp, Homo sapien
aggtcccacaccagtaagataactt

SEQ ID NO: 25367 - DNA, 25 bp, Homo sapien
acagttggagtcatgccttgtgtga

SEQ ID NO: 25368 - DNA, 25 bp, Homo sapien
tttgcaggactatctgatgatactc

SEQ ID NO: 25369 - DNA, 25 bp, Homo sapien
ctgcacgttcgcaaagccaggtaca

SEQ ID NO: 25370 - DNA, 25 bp, Homo sapien
tcccgtgtctgacgtatgaggaaga

SEQ ID NO: 25371 - DNA, 25 bp, Homo sapien
taggggtttctgaaaacacacaatc

SEQ ID NO: 25372 - DNA, 25 bp, Homo sapien
aaacaagcttaaaaatgaacctgcc

SEQ ID NO: 25373 - DNA, 25 bp, Homo sapien
ggatgaaatcaagatgagagcagaa

SEQ ID NO: 25374 - DNA, 25 bp, Homo sapien
agagcagaactggattctcactagc

SEQ ID NO: 25375 - DNA, 25 bp, Homo sapien
ataagctactatgcctggaccagga

SEQ ID NO: 25376 - DNA, 25 bp, Homo sapien
ttctctagaagagatgagggatgaa

SEQ ID NO: 25377 - DNA, 25 bp, Homo sapien
tgagggcattactgtctttccaaaa

SEQ ID NO: 25378 - DNA, 25 bp, Homo sapien
tttgaaatcatctgttgagggcatt

SEQ ID NO: 25379 - DNA, 25 bp, Homo sapien
tcaattcatattgggagactcatgc

SEQ ID NO: 25380 - DNA, 25 bp, Homo sapien
ctgaagtgaaagaattaaacagtgg

SEQ ID NO: 25381 - DNA, 25 bp, Homo sapien
ccaaattgcggagattacaagcata

SEQ ID NO: 25382 - DNA, 25 bp, Homo sapien
cagtggcatggagttttcacctccc

SEQ ID NO: 25383 - DNA, 25 bp, Homo sapien
cactagctgattgccagtaattgat

SEQ ID NO: 25384 - DNA, 25 bp, Homo sapien
gtgcacactgtgcaggtagttacat

SEQ ID NO: 25385 - DNA, 25 bp, Homo sapien
ttttgaggcagcagtcaacatcaag

SEQ ID NO: 25386 - DNA, 25 bp, Homo sapien
tctatggcggataataaaaattacc

SEQ ID NO: 25387 - DNA, 25 bp, Homo sapien
ggaggctagagtgtcagcaatttct

SEQ ID NO: 25388 - DNA, 25 bp, Homo sapien
cagccagatctgtgggtatatgcta

SEQ ID NO: 25389 - DNA, 25 bp, Homo sapien
tgagggaacacttattttagggatc

SEQ ID NO: 25390 - DNA, 25 bp, Homo sapien
tccagaggtagagcagagaaaaata

SEQ ID NO: 25391 - DNA, 25 bp, Homo sapien
gacagtgagctgagcactaacatct

SEQ ID NO: 25392 - DNA, 25 bp, Homo sapien
tttagggatcagtgaaagacagtga

SEQ ID NO: 25393 - DNA, 25 bp, Homo sapien
ttagttctgacagtgcagccagatc

SEQ ID NO: 25394 - DNA, 25 bp, Homo sapien
caacatcaagaaggtatccagaggt

SEQ ID NO: 25395 - DNA, 25 bp, Homo sapien
aaactgctctcaagcacagcactgt

SEQ ID NO: 25396 - DNA, 25 bp, Homo sapien
aaagagcgtttatttcagtctggtc

SEQ ID NO: 25397 - DNA, 25 bp, Homo sapien
gtgacaggaaatggcaaatatgatt

SEQ ID NO: 25398 - DNA, 25 bp, Homo sapien
taaatgaggtagttggcttcacatc

SEQ ID NO: 25399 - DNA, 25 bp, Homo sapien
aaactgtgagccaaagtcactaagt

SEQ ID NO: 25400 - DNA, 25 bp, Homo sapien
atctggagaccgtgatgtttgaaaa

SEQ ID NO: 25401 - DNA, 25 bp, Homo sapien
tttatggatgatgaaactgtgagcc

SEQ ID NO: 25402 - DNA, 25 bp, Homo sapien
ccagaactggagattcaagccaagc

SEQ ID NO: 25403 - DNA, 25 bp, Homo sapien
ctaagtcagacattaagtacatggt

SEQ ID NO: 25404 - DNA, 25 bp, Homo sapien
actgttggataacttctagccctcc

SEQ ID NO: 25405 - DNA, 25 bp, Homo sapien
tcaagccaagcaaggttacccattc

SEQ ID NO: 25406 - DNA, 25 bp, Homo sapien
aagagaggtgctatggttttgattt

SEQ ID NO: 25407 - DNA, 25 bp, Homo sapien
tgatcctgataaacactaggcttcc

SEQ ID NO: 25408 - DNA, 25 bp, Homo sapien
gatttggttattaagtcaacacatc

SEQ ID NO: 25409 - DNA, 25 bp, Homo sapien
gtacagttgcattaaggattgagat

SEQ ID NO: 25410 - DNA, 25 bp, Homo sapien
tacatctgttaaaatcctagtccca

SEQ ID NO: 25411 - DNA, 25 bp, Homo sapien
atatgtaaatgaacgtgatcctgat

SEQ ID NO: 25412 - DNA, 25 bp, Homo sapien
ctattttaaaggtgttaagcaggaa

SEQ ID NO: 25413 - DNA, 25 bp, Homo sapien
aaagaagactaatttgtgcttgtac

SEQ ID NO: 25414 - DNA, 25 bp, Homo sapien
tagtcccagatccttggataagaga

SEQ ID NO: 25415 - DNA, 25 bp, Homo sapien
tttaggggttccacagtgttagcca

SEQ ID NO: 25416 - DNA, 25 bp, Homo sapien
actaggcttccagtaagtggttaac

SEQ ID NO: 25417 - DNA, 25 bp, Homo sapien
cttagtccattgaggttgctataac

SEQ ID NO: 25418 - DNA, 25 bp, Homo sapien
caaaaggaactattacggtacattg

SEQ ID NO: 25419 - DNA, 25 bp, Homo sapien
gaacattcccatagcaatacccttg

SEQ ID NO: 25420 - DNA, 25 bp, Homo sapien
cctagaattagaattgctggattaa

SEQ ID NO: 25421 - DNA, 25 bp, Homo sapien
aattgtccctctcagttctggagtc

SEQ ID NO: 25422 - DNA, 25 bp, Homo sapien
actattcaggtgtgaaaaggccaac

SEQ ID NO: 25423 - DNA, 25 bp, Homo sapien
agattcggtgtatcatgaaggccta

SEQ ID NO: 25424 - DNA, 25 bp, Homo sapien
aaaggccaacagttcaagagacagt

SEQ ID NO: 25425 - DNA, 25 bp, Homo sapien
tgctggattaagagtattcatgtgc

SEQ ID NO: 25426 - DNA, 25 bp, Homo sapien
gccaagtttggtactagcatgatgc

SEQ ID NO: 25427 - DNA, 25 bp, Homo sapien
caatttcctattgttgggccaagtt

SEQ ID NO: 25428 - DNA, 25 bp, Homo sapien
cactgcatctggactaaaccttttt

SEQ ID NO: 25429 - DNA, 25 bp, Homo sapien
actcactgcaatctcgatctccctg

SEQ ID NO: 25430 - DNA, 25 bp, Homo sapien
tgcaatctcgatctccctggctcaa

SEQ ID NO: 25431 - DNA, 25 bp, Homo sapien
tttttgcatagacagggtcctgcta

SEQ ID NO: 25432 - DNA, 25 bp, Homo sapien
actgcatctggactaaacctttttt

SEQ ID NO: 25433 - DNA, 25 bp, Homo sapien
actgcaatctcgatctccctggctc

SEQ ID NO: 25434 - DNA, 25 bp, Homo sapien
ccactgcatctggactaaacctttt

SEQ ID NO: 25435 - DNA, 25 bp, Homo sapien
aagtgggtggatcatttcagatcag

SEQ ID NO: 25436 - DNA, 25 bp, Homo sapien
gccactgcatctggactaaaccttt

SEQ ID NO: 25437 - DNA, 25 bp, Homo sapien
agccactgcatctggactaaacctt

SEQ ID NO: 25438 - DNA, 25 bp, Homo sapien
gcaatctcgatctccctggctcaag

SEQ ID NO: 25439 - DNA, 25 bp, Homo sapien
taagcactctctaaattggcatagc

SEQ ID NO: 25440 - DNA, 25 bp, Homo sapien
ctgcattagtgattttgaggtcaaa

SEQ ID NO: 25441 - DNA, 25 bp, Homo sapien
ttgaggtcaaaggaaacctattcag

SEQ ID NO: 25442 - DNA, 25 bp, Homo sapien
ctgaaacaaggcacaggtaaaaatc

SEQ ID NO: 25443 - DNA, 25 bp, Homo sapien
tattgtgaaaagatagtggctataa

SEQ ID NO: 25444 - DNA, 25 bp, Homo sapien
ttcagatctgaaacaaggcacaggt

SEQ ID NO: 25445 - DNA, 25 bp, Homo sapien
ggttgttcatggtttgcccaaatct

SEQ ID NO: 25446 - DNA, 25 bp, Homo sapien
agaaaatcagtttgagtagcatgat

SEQ ID NO: 25447 - DNA, 25 bp, Homo sapien
cccaaatctggcatgaaatgaagca

SEQ ID NO: 25448 - DNA, 25 bp, Homo sapien
ctggcatgaaatgaagcagatctat

SEQ ID NO: 25449 - DNA, 25 bp, Homo sapien
aagcaaatccagatagagcccaact

SEQ ID NO: 25450 - DNA, 25 bp, Homo sapien
ttctccaggtgtcggaggaactcac

SEQ ID NO: 25451 - DNA, 25 bp, Homo sapien
ccaggatggctattatttggggcct

SEQ ID NO: 25452 - DNA, 25 bp, Homo sapien
attcaacaacctagataaggccctc

SEQ ID NO: 25453 - DNA, 25 bp, Homo sapien
gcatggctgatttgaggcagctctt

SEQ ID NO: 25454 - DNA, 25 bp, Homo sapien
tcacagtctaggcaggtggagactc

SEQ ID NO: 25455 - DNA, 25 bp, Homo sapien
aggcatccatgcgtgttaggggtca

SEQ ID NO: 25456 - DNA, 25 bp, Homo sapien
ttttttgcaagaaaaccaggatggc

SEQ ID NO: 25457 - DNA, 25 bp, Homo sapien
acagccaagagatctttcgagggtc

SEQ ID NO: 25458 - DNA, 25 bp, Homo sapien
tctataggaccttccagaagagctc

SEQ ID NO: 25459 - DNA, 25 bp, Homo sapien
tccagaagagctcaaatcaaatcac

SEQ ID NO: 25460 - DNA, 25 bp, Homo sapien
ggtgatccagcccttaggaagctca

SEQ ID NO: 25461 - DNA, 25 bp, Homo sapien
ttactcccaacaatacagtggcaat

SEQ ID NO: 25462 - DNA, 25 bp, Homo sapien
ggagacataaaatggattcgcaatc

SEQ ID NO: 25463 - DNA, 25 bp, Homo sapien
ctcaccagtgtgagggctctttgca

SEQ ID NO: 25464 - DNA, 25 bp, Homo sapien
tttgtgttttggaagcagcagtaac

SEQ ID NO: 25465 - DNA, 25 bp, Homo sapien
gagtattgtgggttttagagttgct

SEQ ID NO: 25466 - DNA, 25 bp, Homo sapien
ctttgcagccgccaatggagtgatc

SEQ ID NO: 25467 - DNA, 25 bp, Homo sapien
ccttctcggaaaaagtgaactctcc

SEQ ID NO: 25468 - DNA, 25 bp, Homo sapien
cctgggcagacttcaaaaggatgaa

SEQ ID NO: 25469 - DNA, 25 bp, Homo sapien
tgctatcctgatgagaccagcagct

SEQ ID NO: 25470 - DNA, 25 bp, Homo sapien
gcctggtctagcagttagggctcct

SEQ ID NO: 25471 - DNA, 25 bp, Homo sapien
cccaccgcagtggttgagtattgtg

SEQ ID NO: 25472 - DNA, 25 bp, Homo sapien
agcctatgtataaatggctataccc

SEQ ID NO: 25473 - DNA, 25 bp, Homo sapien
attaactgctgctaggatgtctcct

SEQ ID NO: 25474 - DNA, 25 bp, Homo sapien
ctcatacccacagatgaaaaatttc

SEQ ID NO: 25475 - DNA, 25 bp, Homo sapien
tgacagttccctgccagaaatagtc

SEQ ID NO: 25476 - DNA, 25 bp, Homo sapien
actgattcttaatggttgcctagcc

SEQ ID NO: 25477 - DNA, 25 bp, Homo sapien
ccgaggaatgtggaaaccttgtctt

SEQ ID NO: 25478 - DNA, 25 bp, Homo sapien
tatacccaaaaagttgctccaggca

SEQ ID NO: 25479 - DNA, 25 bp, Homo sapien
ttttcagctgatcccaggacattcc

SEQ ID NO: 25480 - DNA, 25 bp, Homo sapien
ttgaacagggcaggctgacagttcc

SEQ ID NO: 25481 - DNA, 25 bp, Homo sapien
agtacagtggcgtcttcgtggctca

SEQ ID NO: 25482 - DNA, 25 bp, Homo sapien
acacctggctgatccactgattctt

SEQ ID NO: 25483 - DNA, 25 bp, Homo sapien
actgatttatattgtgtgggttgtc

SEQ ID NO: 25484 - DNA, 25 bp, Homo sapien
ccgtgcccggccctgttgtcttatt

SEQ ID NO: 25485 - DNA, 25 bp, Homo sapien
tcagtaatttgttcagtagtcatcc

SEQ ID NO: 25486 - DNA, 25 bp, Homo sapien
ttatttttaatgaggttggacagtc

SEQ ID NO: 25487 - DNA, 25 bp, Homo sapien
aacggtatttgtttcaagatgcagt

SEQ ID NO: 25488 - DNA, 25 bp, Homo sapien
caagatgcagttgatatgttaaaaa

SEQ ID NO: 25489 - DNA, 25 bp, Homo sapien
tgtgtgggttgtcttggtataaact

SEQ ID NO: 25490 - DNA, 25 bp, Homo sapien
aagaacttcagaagccatgcatggt

SEQ ID NO: 25491 - DNA, 25 bp, Homo sapien
ttttgacctgcaagtattatatctt

SEQ ID NO: 25492 - DNA, 25 bp, Homo sapien
aatgaggttggacagtcagtaattt

SEQ ID NO: 25493 - DNA, 25 bp, Homo sapien
tctcaaagcagttcccatacaatat

SEQ ID NO: 25494 - DNA, 25 bp, Homo sapien
tcagaaagagacaggtatcttactc

SEQ ID NO: 25495 - DNA, 25 bp, Homo sapien
ttcaataaagatggctagagaacat

SEQ ID NO: 25496 - DNA, 25 bp, Homo sapien
aaacaggtagaaagtggcagaattt

SEQ ID NO: 25497 - DNA, 25 bp, Homo sapien
tggaggaggcaataactgtatcctg

SEQ ID NO: 25498 - DNA, 25 bp, Homo sapien
gcaaaatgaatctctggccaaaggc

SEQ ID NO: 25499 - DNA, 25 bp, Homo sapien
atcctgtccaagaatagtagcaacc

SEQ ID NO: 25500 - DNA, 25 bp, Homo sapien
acatcagaggcacacttcagaaaga

SEQ ID NO: 25501 - DNA, 25 bp, Homo sapien
agtagcaaccaccacaccaaggctt

SEQ ID NO: 25502 - DNA, 25 bp, Homo sapien
cccgaaatgatgaaattgtaaggct

SEQ ID NO: 25503 - DNA, 25 bp, Homo sapien
ttgtcgataccaggagacagtaccc

SEQ ID NO: 25504 - DNA, 25 bp, Homo sapien
agagaaggttaagccaactgaatac

SEQ ID NO: 25505 - DNA, 25 bp, Homo sapien
acactttgtcgttggctccagagtc

SEQ ID NO: 25506 - DNA, 25 bp, Homo sapien
aaagaatcggtgtgattgtgcaaca

SEQ ID NO: 25507 - DNA, 25 bp, Homo sapien
tgcccttgcttggaccctgcttgct

SEQ ID NO: 25508 - DNA, 25 bp, Homo sapien
gatgtcacctgggaaactcggttcc

SEQ ID NO: 25509 - DNA, 25 bp, Homo sapien
tcagtagtgacaaagaatcggtgtg

SEQ ID NO: 25510 - DNA, 25 bp, Homo sapien
gaaactcggttcctgcccacttcat

SEQ ID NO: 25511 - DNA, 25 bp, Homo sapien
taagaacactgcactcagtagtgac

SEQ ID NO: 25512 - DNA, 25 bp, Homo sapien
gtagtgacaaagaatcggtgtgatt

SEQ ID NO: 25513 - DNA, 25 bp, Homo sapien
tgctcaaacactttgtcgttggctc

SEQ ID NO: 25514 - DNA, 25 bp, Homo sapien
tgagcacaggcaggatgtcacctgg

SEQ ID NO: 25515 - DNA, 25 bp, Homo sapien
cattcttaagaacactgcactcagt

SEQ ID NO: 25516 - DNA, 25 bp, Homo sapien
agcgatccatcgattcagtgtaatg

SEQ ID NO: 25517 - DNA, 25 bp, Homo sapien
ttttcacaaagaggcaaatagatca

SEQ ID NO: 25518 - DNA, 25 bp, Homo sapien
atacactgaaaacgcaaaacactgc

SEQ ID NO: 25519 - DNA, 25 bp, Homo sapien
gtgtaatgtccatcaaaatcccaga

SEQ ID NO: 25520 - DNA, 25 bp, Homo sapien
caaaaacattgaatatttagggatc

SEQ ID NO: 25521 - DNA, 25 bp, Homo sapien
gcaaatagatcagtggaatgtgtac

SEQ ID NO: 25522 - DNA, 25 bp, Homo sapien
atttctaaaagcaagagtaaggtta

SEQ ID NO: 25523 - DNA, 25 bp, Homo sapien
tccatgatcatatgttagatgactc

SEQ ID NO: 25524 - DNA, 25 bp, Homo sapien
agcaagagtaaggttaaataacttc

SEQ ID NO: 25525 - DNA, 25 bp, Homo sapien
aacactgcttcaagatgtgaaagaa

SEQ ID NO: 25526 - DNA, 25 bp, Homo sapien
cagtggaatgtgtacatgtgtgaac

SEQ ID NO: 25527 - DNA, 25 bp, Homo sapien
ttgaacattcactgagggatcactt

SEQ ID NO: 25528 - DNA, 25 bp, Homo sapien
atgtctgatgtaaaagctgaggttc

SEQ ID NO: 25529 - DNA, 25 bp, Homo sapien
gctgtggttcagctgacccataatt

SEQ ID NO: 25530 - DNA, 25 bp, Homo sapien
gggctgacttcaaaacctgtagtat

SEQ ID NO: 25531 - DNA, 25 bp, Homo sapien
acccattgctttacctgtgtgactt

SEQ ID NO: 25532 - DNA, 25 bp, Homo sapien
ttcaagggatacacattagcgccag

SEQ ID NO: 25533 - DNA, 25 bp, Homo sapien
agtatttatcctaagctgtggttca

SEQ ID NO: 25534 - DNA, 25 bp, Homo sapien
gctgaggttcaagggatacacatta

SEQ ID NO: 25535 - DNA, 25 bp, Homo sapien
tgcgcctggcctatcttttcaaaag

SEQ ID NO: 25536 - DNA, 25 bp, Homo sapien
tagcgccagcattgagattttatac

SEQ ID NO: 25537 - DNA, 25 bp, Homo sapien
aactctataagaacatgttgtcatg

SEQ ID NO: 25538 - DNA, 25 bp, Homo sapien
cacacacagcccacgagggacagtt

SEQ ID NO: 25539 - DNA, 25 bp, Homo sapien
gtcaacagataatgaagacataatg

SEQ ID NO: 25540 - DNA, 25 bp, Homo sapien
gcccacgagggacagttctttacat

SEQ ID NO: 25541 - DNA, 25 bp, Homo sapien
caagaagtaacagctgacagaacta

SEQ ID NO: 25542 - DNA, 25 bp, Homo sapien
ttcaaaatacaagaagtaacagctg

SEQ ID NO: 25543 - DNA, 25 bp, Homo sapien
cagaactaatcagcaaagcgaacaa

SEQ ID NO: 25544 - DNA, 25 bp, Homo sapien
ctcagttatcgacagaactggacaa

SEQ ID NO: 25545 - DNA, 25 bp, Homo sapien
actggacaaaaaactaataaggata

SEQ ID NO: 25546 - DNA, 25 bp, Homo sapien
aagcgaacaatacatcgttgttgtt

SEQ ID NO: 25547 - DNA, 25 bp, Homo sapien
taccacgctgggttaatttctgtgt

SEQ ID NO: 25548 - DNA, 25 bp, Homo sapien
cccaagcaggtctcaattgctgggc

SEQ ID NO: 25549 - DNA, 25 bp, Homo sapien
caccaaattggagggccagttttta

SEQ ID NO: 25550 - DNA, 25 bp, Homo sapien
gagcccaaagcaattaccaccaaag

SEQ ID NO: 25551 - DNA, 25 bp, Homo sapien
tgtgtctgacagaagagtggtcttc

SEQ ID NO: 25552 - DNA, 25 bp, Homo sapien
gaaggcatagccaagtctctgtccc

SEQ ID NO: 25553 - DNA, 25 bp, Homo sapien
ttcagtgatatcaagaagcctgcac

SEQ ID NO: 25554 - DNA, 25 bp, Homo sapien
tgcagagaattgcagctaggactga

SEQ ID NO: 25555 - DNA, 25 bp, Homo sapien
agcctgcactggaaacctgcgtgtg

SEQ ID NO: 25556 - DNA, 25 bp, Homo sapien
tttatagtggaaagtcatagggaag

SEQ ID NO: 25557 - DNA, 25 bp, Homo sapien
cctggcgtagcaattttgaatgagc

SEQ ID NO: 25558 - DNA, 25 bp, Homo sapien
agtcatagggaagaatgaaaacatt

SEQ ID NO: 25559 - DNA, 25 bp, Homo sapien
ggcatatctgtgaggataaggcaat

SEQ ID NO: 25560 - DNA, 25 bp, Homo sapien
tcaaatgcaaccaccttcaagggag

SEQ ID NO: 25561 - DNA, 25 bp, Homo sapien
cctgctggcctataacagaaaattc

SEQ ID NO: 25562 - DNA, 25 bp, Homo sapien
atccggcgtgggtttacacccagat

SEQ ID NO: 25563 - DNA, 25 bp, Homo sapien
acctctagctttggatccggcgtgg

SEQ ID NO: 25564 - DNA, 25 bp, Homo sapien
caatttggacagatggctaagattc

SEQ ID NO: 25565 - DNA, 25 bp, Homo sapien
taccctagactagatgcatactctc

SEQ ID NO: 25566 - DNA, 25 bp, Homo sapien
atgtaaaagaggaatcaatcagggt

SEQ ID NO: 25567 - DNA, 25 bp, Homo sapien
tattagttgtctgctggagagaaca

SEQ ID NO: 25568 - DNA, 25 bp, Homo sapien
gtcacaccaggcctatctcaaatgc

SEQ ID NO: 25569 - DNA, 25 bp, Homo sapien
tgtacctgctgaaatccagtcacac

SEQ ID NO: 25570 - DNA, 25 bp, Homo sapien
gaggcttctgggatgtgattctata

SEQ ID NO: 25571 - DNA, 25 bp, Homo sapien
caggcagcagtatccacaaagtgtt

SEQ ID NO: 25572 - DNA, 25 bp, Homo sapien
tgatgagtcccagcttttaaagaca

SEQ ID NO: 25573 - DNA, 25 bp, Homo sapien
taaaaaagaagagaggccgtgcacg

SEQ ID NO: 25574 - DNA, 25 bp, Homo sapien
cgcattccgaatgaggaagatacat

SEQ ID NO: 25575 - DNA, 25 bp, Homo sapien
ccctgggcattcagatttcagcatt

SEQ ID NO: 25576 - DNA, 25 bp, Homo sapien
agcctggtatttgcctccagattat

SEQ ID NO: 25577 - DNA, 25 bp, Homo sapien
tttacccaaatcacgtgggagattc

SEQ ID NO: 25578 - DNA, 25 bp, Homo sapien
ttttaaagacaacaggcagcagtat

SEQ ID NO: 25579 - DNA, 25 bp, Homo sapien
aagatacatatgcaagatagctgac

SEQ ID NO: 25580 - DNA, 25 bp, Homo sapien
gtgttaagacacttcctggcaaggg

SEQ ID NO: 25581 - DNA, 25 bp, Homo sapien
acttatctaacacgcattccgaatg

SEQ ID NO: 25582 - DNA, 25 bp, Homo sapien
acaagcctccgttgagaaacctggc

SEQ ID NO: 25583 - DNA, 25 bp, Homo sapien
tttagaagagcttacacaagcctcc

SEQ ID NO: 25584 - DNA, 25 bp, Homo sapien
tctcatgaagcagaattgcaagatc

SEQ ID NO: 25585 - DNA, 25 bp, Homo sapien
tgagaaacctggcattcaaagatgt

SEQ ID NO: 25586 - DNA, 25 bp, Homo sapien
aagtaaggtatgaaacaaatcagta

SEQ ID NO: 25587 - DNA, 25 bp, Homo sapien
gatgggctctctgtaagaattatac

SEQ ID NO: 25588 - DNA, 25 bp, Homo sapien
tccagagcttcaagaatcacacagt

SEQ ID NO: 25589 - DNA, 25 bp, Homo sapien
aagagctgaatttgtgataagatcc

SEQ ID NO: 25590 - DNA, 25 bp, Homo sapien
acgttgactactatgtgatgggctc

SEQ ID NO: 25591 - DNA, 25 bp, Homo sapien
gaatcacacagtgatgatggctgct

SEQ ID NO: 25592 - DNA, 25 bp, Homo sapien
tgaggactgaatgaactaatatgca

SEQ ID NO: 25593 - DNA, 25 bp, Homo sapien
tttgtatgcaacagccacgaccttt

SEQ ID NO: 25594 - DNA, 25 bp, Homo sapien
ttgactatccttaagagggactatc

SEQ ID NO: 25595 - DNA, 25 bp, Homo sapien
gttgtcattgaccaagagaccgttc

SEQ ID NO: 25596 - DNA, 25 bp, Homo sapien
ataagttaactgaatatgctgtccc

SEQ ID NO: 25597 - DNA, 25 bp, Homo sapien
tttccaagtgatgtctctgccagat

SEQ ID NO: 25598 - DNA, 25 bp, Homo sapien
tgccagatagggaatgcatgtaatt

SEQ ID NO: 25599 - DNA, 25 bp, Homo sapien
tgaggttcaaaagagcaacaaaatc

SEQ ID NO: 25600 - DNA, 25 bp, Homo sapien
atgatgagagggcaccaatttattg

SEQ ID NO: 25601 - DNA, 25 bp, Homo sapien
caagagaccgttcaagggtgattat

SEQ ID NO: 25602 - DNA, 25 bp, Homo sapien
agtgtctctggtagcaagatgatga

SEQ ID NO: 25603 - DNA, 25 bp, Homo sapien
ttttcaaaagacacccagctgctct

SEQ ID NO: 25604 - DNA, 25 bp, Homo sapien
gtgaagtatagttttaaaggtcacc

SEQ ID NO: 25605 - DNA, 25 bp, Homo sapien
ggtgacctttaaaactatacttcac

SEQ ID NO: 25606 - DNA, 25 bp, Homo sapien
atgtcaaaaagcatgtgaggtccga

SEQ ID NO: 25607 - DNA, 25 bp, Homo sapien
tccgaatcaggaaaaacagaagcag

SEQ ID NO: 25608 - DNA, 25 bp, Homo sapien
ttagagtaataccagatttctcatc

SEQ ID NO: 25609 - DNA, 25 bp, Homo sapien
tgtgaggtccgaatcaggaaaaaca

SEQ ID NO: 25610 - DNA, 25 bp, Homo sapien
accacggaatgacaattagagtaat

SEQ ID NO: 25611 - DNA, 25 bp, Homo sapien
gcaccagaatggtttcagatcctga

SEQ ID NO: 25612 - DNA, 25 bp, Homo sapien
catcgacaatacaggctgagtatcc

SEQ ID NO: 25613 - DNA, 25 bp, Homo sapien
tacccacaatgcttggcaccagaat

SEQ ID NO: 25614 - DNA, 25 bp, Homo sapien
gatttctcatcgacaatacaggctg

SEQ ID NO: 25615 - DNA, 25 bp, Homo sapien
aacagaagcagcctcacacttagac

SEQ ID NO: 25616 - DNA, 25 bp, Homo sapien
acatctcttaccacggaatgacaat

SEQ ID NO: 25617 - DNA, 25 bp, Homo sapien
ctgcacagtgaaaacctgacagctg

SEQ ID NO: 25618 - DNA, 25 bp, Homo sapien
gcactgacactggaactgtagttat

SEQ ID NO: 25619 - DNA, 25 bp, Homo sapien
taatgactcaggcttgaaaccatct

SEQ ID NO: 25620 - DNA, 25 bp, Homo sapien
aagtgctagcaggtactgcaccatc

SEQ ID NO: 25621 - DNA, 25 bp, Homo sapien
atgcagactgcaccattagagtgtc

SEQ ID NO: 25622 - DNA, 25 bp, Homo sapien
ttggtaagacctggccgattctaga

SEQ ID NO: 25623 - DNA, 25 bp, Homo sapien
ctagagtgaatttggtttacatgac

SEQ ID NO: 25624 - DNA, 25 bp, Homo sapien
gaggcattctgcagcaaagtgctag

SEQ ID NO: 25625 - DNA, 25 bp, Homo sapien
ttgtccctcgagagaactcagcttg

SEQ ID NO: 25626 - DNA, 25 bp, Homo sapien
tagacagatgagttttgaagtagct

SEQ ID NO: 25627 - DNA, 25 bp, Homo sapien
ttgaaaccatctagcccaagcccag

SEQ ID NO: 25628 - DNA, 25 bp, Homo sapien
aagcaggctggacagataacattct

SEQ ID NO: 25629 - DNA, 25 bp, Homo sapien
ctctagtgtgcaagtggaaagacca

SEQ ID NO: 25630 - DNA, 25 bp, Homo sapien
tggaaatcctgtaatataatggggt

SEQ ID NO: 25631 - DNA, 25 bp, Homo sapien
gggtaactctctggaggcaagtaat

SEQ ID NO: 25632 - DNA, 25 bp, Homo sapien
tctgtaagtgagtatttggaaatcc

SEQ ID NO: 25633 - DNA, 25 bp, Homo sapien
taattctgaacaggtgaaaggagat

SEQ ID NO: 25634 - DNA, 25 bp, Homo sapien
ctctgggaacgggtaactctctgga

SEQ ID NO: 25635 - DNA, 25 bp, Homo sapien
attaccagggaattttgagtgtcaa

SEQ ID NO: 25636 - DNA, 25 bp, Homo sapien
ataacattctgaaggcgggtaaccc

SEQ ID NO: 25637 - DNA, 25 bp, Homo sapien
acagtaactctctaggaacaggtaa

SEQ ID NO: 25638 - DNA, 25 bp, Homo sapien
tgaaggcaagtaactctccagacac

SEQ ID NO: 25639 - DNA, 25 bp, Homo sapien
agcaggtggctgagcgtccctctgc

SEQ ID NO: 25640 - DNA, 25 bp, Homo sapien
actgagaaccacgtgtgtgtcccag

SEQ ID NO: 25641 - DNA, 25 bp, Homo sapien
cttcagggcttctactaggaaaata

SEQ ID NO: 25642 - DNA, 25 bp, Homo sapien
accacgtgtgtgtcccagaagtggt

SEQ ID NO: 25643 - DNA, 25 bp, Homo sapien
ttatcaactacgttttgagctgccc

SEQ ID NO: 25644 - DNA, 25 bp, Homo sapien
tcatttcaacaaacagcaaacaacc

SEQ ID NO: 25645 - DNA, 25 bp, Homo sapien
cagtccgctttatgttacgtggatt

SEQ ID NO: 25646 - DNA, 25 bp, Homo sapien
aggctgcagtttcccgagtcctctg

SEQ ID NO: 25647 - DNA, 25 bp, Homo sapien
tgctgcactcgggaaggacaggcct

SEQ ID NO: 25648 - DNA, 25 bp, Homo sapien
tctcgcacagcccatcagccgccca

SEQ ID NO: 25649 - DNA, 25 bp, Homo sapien
cccaatggacatgaataaagctgca

SEQ ID NO: 25650 - DNA, 25 bp, Homo sapien
cctctgtttcagactagggtgggga

SEQ ID NO: 25651 - DNA, 25 bp, Homo sapien
aatacacaacttctgatagggattg

SEQ ID NO: 25652 - DNA, 25 bp, Homo sapien
tagggattgagcataaaaaagataa

SEQ ID NO: 25653 - DNA, 25 bp, Homo sapien
agtccaagcacatgttcgctgagtc

SEQ ID NO: 25654 - DNA, 25 bp, Homo sapien
tcgctgagtcctctgcttaaggttt

SEQ ID NO: 25655 - DNA, 25 bp, Homo sapien
aaggttttgccaagttgaaatcaag

SEQ ID NO: 25656 - DNA, 25 bp, Homo sapien
gtagttcagaagtccaagcacatgt

SEQ ID NO: 25657 - DNA, 25 bp, Homo sapien
cttattaatgtgctaaatgattgca

SEQ ID NO: 25658 - DNA, 25 bp, Homo sapien
cttctgatagggattgagcataaaa

SEQ ID NO: 25659 - DNA, 25 bp, Homo sapien
caaggtgtgggttgacctctgtttc

SEQ ID NO: 25660 - DNA, 25 bp, Homo sapien
taagacatagttcccatgctcaaaa

SEQ ID NO: 25661 - DNA, 25 bp, Homo sapien
aaggatgtggccatccctggcattc

SEQ ID NO: 25662 - DNA, 25 bp, Homo sapien
agtggaatcccgttccctccagctt

SEQ ID NO: 25663 - DNA, 25 bp, Homo sapien
ttccagaagccttccggagagggtc

SEQ ID NO: 25664 - DNA, 25 bp, Homo sapien
atgtcctcagctagccagggctctc

SEQ ID NO: 25665 - DNA, 25 bp, Homo sapien
aagaagtatttctggcctctgtgtc

SEQ ID NO: 25666 - DNA, 25 bp, Homo sapien
gtctctgaggtctaactgggacaga

SEQ ID NO: 25667 - DNA, 25 bp, Homo sapien
ctccagctttgactcaggcgacatt

SEQ ID NO: 25668 - DNA, 25 bp, Homo sapien
gaatgcaggccatggctcaaatgtt

SEQ ID NO: 25669 - DNA, 25 bp, Homo sapien
tttgactcaggcgacatttctcttc

SEQ ID NO: 25670 - DNA, 25 bp, Homo sapien
cttggcctcctgagtggaatcccgt

SEQ ID NO: 25671 - DNA, 25 bp, Homo sapien
tcctgagaggaccttgcagtagcca

SEQ ID NO: 25672 - DNA, 25 bp, Homo sapien
aaacaaggtttctgaggaagcctga

SEQ ID NO: 25673 - DNA, 25 bp, Homo sapien
atagaactactcaagaaagaaactg

SEQ ID NO: 25674 - DNA, 25 bp, Homo sapien
agagccgtgaacacacttgtagtgc

SEQ ID NO: 25675 - DNA, 25 bp, Homo sapien
gaataaagatcagagaaagtcattt

SEQ ID NO: 25676 - DNA, 25 bp, Homo sapien
cgggagttaagaagaataaagatca

SEQ ID NO: 25677 - DNA, 25 bp, Homo sapien
ccagcaagagacagcttgaaactgt

SEQ ID NO: 25678 - DNA, 25 bp, Homo sapien
ttcactggatccatgtggtaattcc

SEQ ID NO: 25679 - DNA, 25 bp, Homo sapien
tgaggcaaggctgaccttgaaagca

SEQ ID NO: 25680 - DNA, 25 bp, Homo sapien
caggatatagaaaaacaagttagtt

SEQ ID NO: 25681 - DNA, 25 bp, Homo sapien
atccttatggtataacgggagttaa

SEQ ID NO: 25682 - DNA, 25 bp, Homo sapien
attttctaaggtagcagagccgtga

SEQ ID NO: 25683 - DNA, 25 bp, Homo sapien
ttctccttgagaataatagcacaat

SEQ ID NO: 25684 - DNA, 25 bp, Homo sapien
ttagcttagcttaaagacaccagtc

SEQ ID NO: 25685 - DNA, 25 bp, Homo sapien
agcacaatggctaagaaggggaaat

SEQ ID NO: 25686 - DNA, 25 bp, Homo sapien
atggaagtagagacggtccttcttt

SEQ ID NO: 25687 - DNA, 25 bp, Homo sapien
ttccagcgtctatcagtgaatgccc

SEQ ID NO: 25688 - DNA, 25 bp, Homo sapien
agttcagaagagctcagacagcaaa

SEQ ID NO: 25689 - DNA, 25 bp, Homo sapien
aaaggtatagttcaaagcaaaaata

SEQ ID NO: 25690 - DNA, 25 bp, Homo sapien
acagatgcacatcaagatcagtgat

SEQ ID NO: 25691 - DNA, 25 bp, Homo sapien
caaataatatagctgtgtcacctcc

SEQ ID NO: 25692 - DNA, 25 bp, Homo sapien
tgaggtctatgttgcagaaatagta

SEQ ID NO: 25693 - DNA, 25 bp, Homo sapien
aagacaccagtctctcaacaacatg

SEQ ID NO: 25694 - DNA, 25 bp, Homo sapien
gagactatggagttctggagatttt

SEQ ID NO: 25695 - DNA, 25 bp, Homo sapien
gtggacaatcatttcaagagactat

SEQ ID NO: 25696 - DNA, 25 bp, Homo sapien
atatgaccaggctttgaatccaaac

SEQ ID NO: 25697 - DNA, 25 bp, Homo sapien
atgcttgtcagcaagttgtgggagc

SEQ ID NO: 25698 - DNA, 25 bp, Homo sapien
aagtcttgtcagtcacctgtggttt

SEQ ID NO: 25699 - DNA, 25 bp, Homo sapien
ttgtgggagcactttatgaatacgt

SEQ ID NO: 25700 - DNA, 25 bp, Homo sapien
gtggaacttcagtggacaatcattt

SEQ ID NO: 25701 - DNA, 25 bp, Homo sapien
aaactcatggcaggatgtaaaatac

SEQ ID NO: 25702 - DNA, 25 bp, Homo sapien
catcggggtgagataaacctgaaaa

SEQ ID NO: 25703 - DNA, 25 bp, Homo sapien
ttgatagctaaaggagttaatgtct

SEQ ID NO: 25704 - DNA, 25 bp, Homo sapien
tgtctgcacttgtgaaagtcttgtc

SEQ ID NO: 25705 - DNA, 25 bp, Homo sapien
gtgggtagaggaataatagtcactc

SEQ ID NO: 25706 - DNA, 25 bp, Homo sapien
tgtgggtagataaaagacaaattgt

SEQ ID NO: 25707 - DNA, 25 bp, Homo sapien
tacaccaagcaaacatgtctgtgcc

SEQ ID NO: 25708 - DNA, 25 bp, Homo sapien
atcaggtgaagcattcagatgtgca

SEQ ID NO: 25709 - DNA, 25 bp, Homo sapien
tttgccaaggttaaatatgtacacc

SEQ ID NO: 25710 - DNA, 25 bp, Homo sapien
gaggaaggtatgtagcttgcttgct

SEQ ID NO: 25711 - DNA, 25 bp, Homo sapien
agagggatgactttcggttttgtcc

SEQ ID NO: 25712 - DNA, 25 bp, Homo sapien
ttcatgtagctcagtgaatcacact

SEQ ID NO: 25713 - DNA, 25 bp, Homo sapien
aagctatcaatttacactgtcagga

SEQ ID NO: 25714 - DNA, 25 bp, Homo sapien
agatgtgcatttgtcttaagtgagc

SEQ ID NO: 25715 - DNA, 25 bp, Homo sapien
acacaatttacatgttggcagggag

SEQ ID NO: 25716 - DNA, 25 bp, Homo sapien
accgcgtccagcctacgttaaagat

SEQ ID NO: 25717 - DNA, 25 bp, Homo sapien
cgcgtccagcctacgttaaagatta

SEQ ID NO: 25718 - DNA, 25 bp, Homo sapien
ggatccagaatgtgatcatatagac

SEQ ID NO: 25719 - DNA, 25 bp, Homo sapien
tagactacatgatttcccaaaaatg

SEQ ID NO: 25720 - DNA, 25 bp, Homo sapien
ctaaaggatccagaatgtgatcata

SEQ ID NO: 25721 - DNA, 25 bp, Homo sapien
atatagactacatgatttcccaaaa

SEQ ID NO: 25722 - DNA, 25 bp, Homo sapien
tccagaatgtgatcatatagactac

SEQ ID NO: 25723 - DNA, 25 bp, Homo sapien
catactaaaggatccagaatgtgat

SEQ ID NO: 25724 - DNA, 25 bp, Homo sapien
ttcatactaaaggatccagaatgtg

SEQ ID NO: 25725 - DNA, 25 bp, Homo sapien
ccagcctacgttaaagattagttat

SEQ ID NO: 25726 - DNA, 25 bp, Homo sapien
tttattcatactaaaggatccagaa

SEQ ID NO: 25727 - DNA, 25 bp, Homo sapien
tcaccctgactcttgaatgacactt

SEQ ID NO: 25728 - DNA, 25 bp, Homo sapien
ctacctaaacaaagtaagggcatta

SEQ ID NO: 25729 - DNA, 25 bp, Homo sapien
gatcttgagaagtctgtagtcattc

SEQ ID NO: 25730 - DNA, 25 bp, Homo sapien
ttcctggagtatatccttcagtagt

SEQ ID NO: 25731 - DNA, 25 bp, Homo sapien
acaataacccgctctagacattttg

SEQ ID NO: 25732 - DNA, 25 bp, Homo sapien
gtcctcccaagctagaaaggcattt

SEQ ID NO: 25733 - DNA, 25 bp, Homo sapien
gaatgacactttagctgcatacagt

SEQ ID NO: 25734 - DNA, 25 bp, Homo sapien
tatctctgctagcttggatactata

SEQ ID NO: 25735 - DNA, 25 bp, Homo sapien
cttcagtagttcttcaagacagggt

SEQ ID NO: 25736 - DNA, 25 bp, Homo sapien
cagcctccactgttgatcttgagaa

SEQ ID NO: 25737 - DNA, 25 bp, Homo sapien
ttagctgcatacagtgctctacatc

SEQ ID NO: 25738 - DNA, 25 bp, Homo sapien
ctctgcatggcaacactttacgcgc

SEQ ID NO: 25739 - DNA, 25 bp, Homo sapien
tgcacaaggttagtgcgaaagtaac

SEQ ID NO: 25740 - DNA, 25 bp, Homo sapien
gttgataacagaaatgtggtgggtt

SEQ ID NO: 25741 - DNA, 25 bp, Homo sapien
accaataaaggtcaagtttgcatta

SEQ ID NO: 25742 - DNA, 25 bp, Homo sapien
tatgctttgccctgaatgtagtttt

SEQ ID NO: 25743 - DNA, 25 bp, Homo sapien
tcaacacaaacacaactctggaagt

SEQ ID NO: 25744 - DNA, 25 bp, Homo sapien
atgaatcacagctcagtgaaacctt

SEQ ID NO: 25745 - DNA, 25 bp, Homo sapien
actctggaagtactgtgttgataac

SEQ ID NO: 25746 - DNA, 25 bp, Homo sapien
gcgaaagtaacgattgcaggattta

SEQ ID NO: 25747 - DNA, 25 bp, Homo sapien
ctttggcctatgtagtaaacgcttc

SEQ ID NO: 25748 - DNA, 25 bp, Homo sapien
ttttgacagacgagaaacatgattt

SEQ ID NO: 25749 - DNA, 25 bp, Homo sapien
taagcagctctcaccagcgttcaca

SEQ ID NO: 25750 - DNA, 25 bp, Homo sapien
aatttgaaaactgaacgtgcacaag

SEQ ID NO: 25751 - DNA, 25 bp, Homo sapien
tcaccagcgttcacacctgaaaatt

SEQ ID NO: 25752 - DNA, 25 bp, Homo sapien
cgcgcccggcccatagctttgtttt

SEQ ID NO: 25753 - DNA, 25 bp, Homo sapien
atgtttcctggagaaaatctgtgaa

SEQ ID NO: 25754 - DNA, 25 bp, Homo sapien
tttgaaaactgaacgtgcacaagta

SEQ ID NO: 25755 - DNA, 25 bp, Homo sapien
tttaagcagctctcaccagcgttca

SEQ ID NO: 25756 - DNA, 25 bp, Homo sapien
acctctcattaaggctgcaccctga

SEQ ID NO: 25757 - DNA, 25 bp, Homo sapien
gaaaactgaacgtgcacaagtaaaa

SEQ ID NO: 25758 - DNA, 25 bp, Homo sapien
cgctctgtcaccagtgcagtgagaa

SEQ ID NO: 25759 - DNA, 25 bp, Homo sapien
actgaacgtgcacaagtaaaacatg

SEQ ID NO: 25760 - DNA, 25 bp, Homo sapien
cgcgcccggcccatagctttgtttt

SEQ ID NO: 25761 - DNA, 25 bp, Homo sapien
tttaagcagctctcaccagcgttca

SEQ ID NO: 25762 - DNA, 25 bp, Homo sapien
ttgaaaactgaacgtgcacaagtaa

SEQ ID NO: 25763 - DNA, 25 bp, Homo sapien
acctctcattaaggctgcaccctga

SEQ ID NO: 25764 - DNA, 25 bp, Homo sapien
atgtttcctggagaaaatctgtgaa

SEQ ID NO: 25765 - DNA, 25 bp, Homo sapien
aatttgaaaactgaacgtgcacaag

SEQ ID NO: 25766 - DNA, 25 bp, Homo sapien
tcaccagcgttcacacctgaaaatt

SEQ ID NO: 25767 - DNA, 25 bp, Homo sapien
tttgacaacctcaggttcccagcag

SEQ ID NO: 25768 - DNA, 25 bp, Homo sapien
aatctgtgaaatgggctagtggttt

SEQ ID NO: 25769 - DNA, 25 bp, Homo sapien
actgaacgtgcacaagtaaaacatg

SEQ ID NO: 25770 - DNA, 25 bp, Homo sapien
cgctctgtcaccagtgcagtgagaa

SEQ ID NO: 25771 - DNA, 25 bp, Homo sapien
tttcacaaggaagtcagcacagtgc

SEQ ID NO: 25772 - DNA, 25 bp, Homo sapien
agccctcccgagtgcccagtaatgt

SEQ ID NO: 25773 - DNA, 25 bp, Homo sapien
attttttaagagaagaagaacctca

SEQ ID NO: 25774 - DNA, 25 bp, Homo sapien
aggggtacagaagccaggacaaacc

SEQ ID NO: 25775 - DNA, 25 bp, Homo sapien
ccagtaatgtgggtcaccgcaaaag

SEQ ID NO: 25776 - DNA, 25 bp, Homo sapien
aggggtacagaagccaggacaaccc

SEQ ID NO: 25777 - DNA, 25 bp, Homo sapien
ctgcggcatctgtccttagggctcc

SEQ ID NO: 25778 - DNA, 25 bp, Homo sapien
ctgcacactcagaaacaacccgttt

SEQ ID NO: 25779 - DNA, 25 bp, Homo sapien
aggctacggggtacaactccaagcc

SEQ ID NO: 25780 - DNA, 25 bp, Homo sapien
ggtacaactccaagccctgcggcat

SEQ ID NO: 25781 - DNA, 25 bp, Homo sapien
cagcacagtgcgttgtgaaattttt

SEQ ID NO: 25782 - DNA, 25 bp, Homo sapien
tgaggccgaatctgatgcagactct

SEQ ID NO: 25783 - DNA, 25 bp, Homo sapien
atggggctccaaattagtattttta

SEQ ID NO: 25784 - DNA, 25 bp, Homo sapien
ccgttgtaggtctcaaatggggctc

SEQ ID NO: 25785 - DNA, 25 bp, Homo sapien
atgctgtagaatctgaggccgaatc

SEQ ID NO: 25786 - DNA, 25 bp, Homo sapien
ccactggtgtcgtttgccaaggtgt

SEQ ID NO: 25787 - DNA, 25 bp, Homo sapien
ctgtcacaacctactgggaatgtag

SEQ ID NO: 25788 - DNA, 25 bp, Homo sapien
taaaacaccagttgctatcggccac

SEQ ID NO: 25789 - DNA, 25 bp, Homo sapien
tgtaggtctcaaatggggctccaaa

SEQ ID NO: 25790 - DNA, 25 bp, Homo sapien
actgggaatgtagtcagatgctgta

SEQ ID NO: 25791 - DNA, 25 bp, Homo sapien
tctgatgcagactctcccgttgtag

SEQ ID NO: 25792 - DNA, 25 bp, Homo sapien
ttgctatcggccactggtgtcgttt

SEQ ID NO: 25793 - DNA, 25 bp, Homo sapien
acacccaggtacacaaacgtggtca

SEQ ID NO: 25794 - DNA, 25 bp, Homo sapien
tgccgcaccgcgatggacattccaa

SEQ ID NO: 25795 - DNA, 25 bp, Homo sapien
tcatttactgaggaagacacacacg

SEQ ID NO: 25796 - DNA, 25 bp, Homo sapien
aaagcggcccagaagcttactctct

SEQ ID NO: 25797 - DNA, 25 bp, Homo sapien
acacgcacagtgttcacgcacaatg

SEQ ID NO: 25798 - DNA, 25 bp, Homo sapien
tatcactgtgatgggcaactgtgca

SEQ ID NO: 25799 - DNA, 25 bp, Homo sapien
agataggcagcaacagcattcatat

SEQ ID NO: 25800 - DNA, 25 bp, Homo sapien
gcacaatgaaaacatggcgagaatg

SEQ ID NO: 25801 - DNA, 25 bp, Homo sapien
atgagacggatcaaaaaccacgtgt

SEQ ID NO: 25802 - DNA, 25 bp, Homo sapien
tgccgcgcctaaagagccacaatct

SEQ ID NO: 25803 - DNA, 25 bp, Homo sapien
cgggcatgccagttacaagcaaaac

SEQ ID NO: 25804 - DNA, 25 bp, Homo sapien
caggggtagggcatggaccccgcgt

SEQ ID NO: 25805 - DNA, 25 bp, Homo sapien
acgcggggtccatgccctacccctg

SEQ ID NO: 25806 - DNA, 25 bp, Homo sapien
attattgtgtccagaggatacaagc

SEQ ID NO: 25807 - DNA, 25 bp, Homo sapien
ccaggtgcttgaatagcagaaagtg

SEQ ID NO: 25808 - DNA, 25 bp, Homo sapien
ttgccaggtgcttgaatagcagaaa

SEQ ID NO: 25809 - DNA, 25 bp, Homo sapien
tggttggttccactttgccaggtgc

SEQ ID NO: 25810 - DNA, 25 bp, Homo sapien
ttggattattgtgtccagaggatac

SEQ ID NO: 25811 - DNA, 25 bp, Homo sapien
gaggatacaagctgagagtccttat

SEQ ID NO: 25812 - DNA, 25 bp, Homo sapien
attgtgtccagaggatacaagctga

SEQ ID NO: 25813 - DNA, 25 bp, Homo sapien
tccagaggatacaagctgagagtcc

SEQ ID NO: 25814 - DNA, 25 bp, Homo sapien
aaatttggttggttccactttgcca

SEQ ID NO: 25815 - DNA, 25 bp, Homo sapien
cactttgccaggtgcttgaatagca

SEQ ID NO: 25816 - DNA, 25 bp, Homo sapien
gcttgaatagcagaaagtggtggaa

SEQ ID NO: 25817 - DNA, 25 bp, Homo sapien
tttgcttgcatgtacagtcagttcc

SEQ ID NO: 25818 - DNA, 25 bp, Homo sapien
tctttcaactgagggtcttggccag

SEQ ID NO: 25819 - DNA, 25 bp, Homo sapien
ttctctctgcgcagatgggagcagc

SEQ ID NO: 25820 - DNA, 25 bp, Homo sapien
gcagctgtgcacatcaggtgccaac

SEQ ID NO: 25821 - DNA, 25 bp, Homo sapien
aggtgccaacagtcatagcgtcctg

SEQ ID NO: 25822 - DNA, 25 bp, Homo sapien
tttcctgcagagacacctgggagac

SEQ ID NO: 25823 - DNA, 25 bp, Homo sapien
atagcgtcctgaactccattaggtc

SEQ ID NO: 25824 - DNA, 25 bp, Homo sapien
aagcagcagatgtttcagcgccact

SEQ ID NO: 25825 - DNA, 25 bp, Homo sapien
tgtcaaggagaaacaacttatcttc

SEQ ID NO: 25826 - DNA, 25 bp, Homo sapien
tccatcttgatggtgagtgaaagca

SEQ ID NO: 25827 - DNA, 25 bp, Homo sapien
gtcttggccaggtgcattcctaggt

SEQ ID NO: 25828 - DNA, 25 bp, Homo sapien
actgtatggttcaaggcgctgtgta

SEQ ID NO: 25829 - DNA, 25 bp, Homo sapien
aactgtatggttcaaggcgctgtgt

SEQ ID NO: 25830 - DNA, 25 bp, Homo sapien
ccctcaactgtatggttcaaggcgc

SEQ ID NO: 25831 - DNA, 25 bp, Homo sapien
ggtacctccctcaactgtatggttc

SEQ ID NO: 25832 - DNA, 25 bp, Homo sapien
ctcaactgtatggttcaaggcgctg

SEQ ID NO: 25833 - DNA, 25 bp, Homo sapien
ttgcaatggggtacctccctcaact

SEQ ID NO: 25834 - DNA, 25 bp, Homo sapien
gttcaaggcgctgtgtagttgatac

SEQ ID NO: 25835 - DNA, 25 bp, Homo sapien
aatggggtacctccctcaactgtat

SEQ ID NO: 25836 - DNA, 25 bp, Homo sapien
tcaaggcgctgtgtagttgatacaa

SEQ ID NO: 25837 - DNA, 25 bp, Homo sapien
tcaactgtatggttcaaggcgctgt

SEQ ID NO: 25838 - DNA, 25 bp, Homo sapien
ctccctcaactgtatggttcaaggc

SEQ ID NO: 25839 - DNA, 25 bp, Homo sapien
ggtacctccctcaactgtatggttc

SEQ ID NO: 25840 - DNA, 25 bp, Homo sapien
ttgcaatggggtacctccctcaact

SEQ ID NO: 25841 - DNA, 25 bp, Homo sapien
actgtatggttcaaggcgctgtgta

SEQ ID NO: 25842 - DNA, 25 bp, Homo sapien
aatggggtacctccctcaactgtat

SEQ ID NO: 25843 - DNA, 25 bp, Homo sapien
gttcaaggcgctgtgtagttgatac

SEQ ID NO: 25844 - DNA, 25 bp, Homo sapien
gaactgcttagggaaaacagcctcc

SEQ ID NO: 25845 - DNA, 25 bp, Homo sapien
cctcaactgtatggttcaaggcgct

SEQ ID NO: 25846 - DNA, 25 bp, Homo sapien
tgtagataagagtgtgagcacaaac

SEQ ID NO: 25847 - DNA, 25 bp, Homo sapien
tcaaggcgctgtgtagttgatacaa

SEQ ID NO: 25848 - DNA, 25 bp, Homo sapien
tcaactgtatggttcaaggcgctgt

SEQ ID NO: 25849 - DNA, 25 bp, Homo sapien
atcctcagctaaagggaaagtcaag

SEQ ID NO: 25850 - DNA, 25 bp, Homo sapien
ttgaaggttgatcatgtaggcaccc

SEQ ID NO: 25851 - DNA, 25 bp, Homo sapien
ttagtttgaactcacccattatggc

SEQ ID NO: 25852 - DNA, 25 bp, Homo sapien
cctttaattattgctgaaaaatgct

SEQ ID NO: 25853 - DNA, 25 bp, Homo sapien
tattgaaggttgatcatgtaggcac

SEQ ID NO: 25854 - DNA, 25 bp, Homo sapien
tatattgaaggttgatcatgtaggc

SEQ ID NO: 25855 - DNA, 25 bp, Homo sapien
acacatttcgctagggggaggtgtt

SEQ ID NO: 25856 - DNA, 25 bp, Homo sapien
ccttgcctaacacataccaaaattc

SEQ ID NO: 25857 - DNA, 25 bp, Homo sapien
aggtgttttatattgaaggttgatc

SEQ ID NO: 25858 - DNA, 25 bp, Homo sapien
tgcttttagtttgaactcacccatt

SEQ ID NO: 25859 - DNA, 25 bp, Homo sapien
aatactttacacatttcgctagggg

SEQ ID NO: 25860 - DNA, 25 bp, Homo sapien
agtttgaactcacccattatggcaa

SEQ ID NO: 25861 - DNA, 25 bp, Homo sapien
ttgaaggttgatcatgtaggcaccc

SEQ ID NO: 25862 - DNA, 25 bp, Homo sapien
atggcctgagaagataaaacagatc

SEQ ID NO: 25863 - DNA, 25 bp, Homo sapien
aatactttacacatttcgctagggg

SEQ ID NO: 25864 - DNA, 25 bp, Homo sapien
attatggcaaacagctcaacaattt

SEQ ID NO: 25865 - DNA, 25 bp, Homo sapien
tattgaaggttgatcatgtaggcac

SEQ ID NO: 25866 - DNA, 25 bp, Homo sapien
cctttaattattgctgaaaaatgct

SEQ ID NO: 25867 - DNA, 25 bp, Homo sapien
aggtgttttatattgaaggttgatc

SEQ ID NO: 25868 - DNA, 25 bp, Homo sapien
cagcattctttatggcctgagaaga

SEQ ID NO: 25869 - DNA, 25 bp, Homo sapien
agtttgaactcacccattatggcaa

SEQ ID NO: 25870 - DNA, 25 bp, Homo sapien
ccttgcctaacacataccaaaattc

SEQ ID NO: 25871 - DNA, 25 bp, Homo sapien
ttaggaaaatggttctcccatcagc

SEQ ID NO: 25872 - DNA, 25 bp, Homo sapien
agtatcagaacttaaccatggtttg

SEQ ID NO: 25873 - DNA, 25 bp, Homo sapien
gtagaaatcacacaacctggcaaag

SEQ ID NO: 25874 - DNA, 25 bp, Homo sapien
ggggcggcaggaataaatccacaac

SEQ ID NO: 25875 - DNA, 25 bp, Homo sapien
ttgctgtctttccagtagaaatcac

SEQ ID NO: 25876 - DNA, 25 bp, Homo sapien
tttgaaataatctagacctcgttgc

SEQ ID NO: 25877 - DNA, 25 bp, Homo sapien
ataaagggctgtttagtatcagaac

SEQ ID NO: 25878 - DNA, 25 bp, Homo sapien
catgtcaggagtctgaatgactgga

SEQ ID NO: 25879 - DNA, 25 bp, Homo sapien
tagacctcgttgcatgtcaggagtc

SEQ ID NO: 25880 - DNA, 25 bp, Homo sapien
ctggcaaagaaaaggacacactatt

SEQ ID NO: 25881 - DNA, 25 bp, Homo sapien
tggtcctaccagaataaagggctgt

SEQ ID NO: 25882 - DNA, 25 bp, Homo sapien
ccattaaatcaattaggggcggcag

SEQ ID NO: 25883 - DNA, 25 bp, Homo sapien
ttggcttatcactttggacgcaaaa

SEQ ID NO: 25884 - DNA, 25 bp, Homo sapien
ggtcatccgaactcccttcagagag

SEQ ID NO: 25885 - DNA, 25 bp, Homo sapien
gtgtgatactggagcttatgcatgc

SEQ ID NO: 25886 - DNA, 25 bp, Homo sapien
taaacatcagtcctacggagaaact

SEQ ID NO: 25887 - DNA, 25 bp, Homo sapien
cagggaaggctttcctctaaacatc

SEQ ID NO: 25888 - DNA, 25 bp, Homo sapien
ttctgatagaatggtaaactgtttt

SEQ ID NO: 25889 - DNA, 25 bp, Homo sapien
gaaacatatttgagtcagggaaggc

SEQ ID NO: 25890 - DNA, 25 bp, Homo sapien
cggagaaactgggaaaatcctgata

SEQ ID NO: 25891 - DNA, 25 bp, Homo sapien
ttcagagagcaagcaagcaaaatta

SEQ ID NO: 25892 - DNA, 25 bp, Homo sapien
cactttgctgtaacggtcatccgaa

SEQ ID NO: 25893 - DNA, 25 bp, Homo sapien
ccaaaaatatgagggtggtcaacat

SEQ ID NO: 25894 - DNA, 25 bp, Homo sapien
gcgcccagcaggagattcaatcaca

SEQ ID NO: 25895 - DNA, 25 bp, Homo sapien
aatgatgagattcctgcttggcgcc

SEQ ID NO: 25896 - DNA, 25 bp, Homo sapien
ttgctttggcagtgtggcctcattc

SEQ ID NO: 25897 - DNA, 25 bp, Homo sapien
aaactaacaagtaccacagatggaa

SEQ ID NO: 25898 - DNA, 25 bp, Homo sapien
tcattcttcatcctgggagacactg

SEQ ID NO: 25899 - DNA, 25 bp, Homo sapien
taccacagatggaagtggccatgca

SEQ ID NO: 25900 - DNA, 25 bp, Homo sapien
aatcacacatagcacgagatcttgc

SEQ ID NO: 25901 - DNA, 25 bp, Homo sapien
tcattggctctgcagtgagtgcact

SEQ ID NO: 25902 - DNA, 25 bp, Homo sapien
gcagaccctgagctcaggcctcatt

SEQ ID NO: 25903 - DNA, 25 bp, Homo sapien
ctctcagggcctgtggggaaatgat

SEQ ID NO: 25904 - DNA, 25 bp, Homo sapien
gaaaatgcaaccaaacaaatcgcac

SEQ ID NO: 25905 - DNA, 25 bp, Homo sapien
gtccggaactacatgggcggcgtgg

SEQ ID NO: 25906 - DNA, 25 bp, Homo sapien
ccacgccgcccatgtagttccggac

SEQ ID NO: 25907 - DNA, 25 bp, Homo sapien
gatactaacctgaaatccaagatgc

SEQ ID NO: 25908 - DNA, 25 bp, Homo sapien
agaaaggtggacatagactcaaata

SEQ ID NO: 25909 - DNA, 25 bp, Homo sapien
tgcgaacaccacatatttgacagaa

SEQ ID NO: 25910 - DNA, 25 bp, Homo sapien
gaagatagccttggtttgtatgggc

SEQ ID NO: 25911 - DNA, 25 bp, Homo sapien
ttctctgcctcaggagaaaggtgga

SEQ ID NO: 25912 - DNA, 25 bp, Homo sapien
cttggtttgtatgggctgctgtcac

SEQ ID NO: 25913 - DNA, 25 bp, Homo sapien
attacacaaatttacacatgagagt

SEQ ID NO: 25914 - DNA, 25 bp, Homo sapien
gattttgagacctgtggcagaggca

SEQ ID NO: 25915 - DNA, 25 bp, Homo sapien
aaaatatgtactagggatactaacc

SEQ ID NO: 25916 - DNA, 25 bp, Homo sapien
tttgtgttaaccagaggattttgag

SEQ ID NO: 25917 - DNA, 25 bp, Homo sapien
agatgctttcaatttgcgaacacca

SEQ ID NO: 25918 - DNA, 25 bp, Homo sapien
atgctggctctggaaaagccacttt

SEQ ID NO: 25919 - DNA, 25 bp, Homo sapien
gatgacatgcggtctgtgatcccgc

SEQ ID NO: 25920 - DNA, 25 bp, Homo sapien
ttccagggatgcgtatcctctagtc

SEQ ID NO: 25921 - DNA, 25 bp, Homo sapien
tgttgactcacattccagggatgcg

SEQ ID NO: 25922 - DNA, 25 bp, Homo sapien
catgagacatcgttgctagacacag

SEQ ID NO: 25923 - DNA, 25 bp, Homo sapien
cacctcagagccagctatgtcttca

SEQ ID NO: 25924 - DNA, 25 bp, Homo sapien
agtgcttgattctttgatgctggct

SEQ ID NO: 25925 - DNA, 25 bp, Homo sapien
gtctgtcacgccatgagacatcgtt

SEQ ID NO: 25926 - DNA, 25 bp, Homo sapien
atcgttgctagacacagatataccc

SEQ ID NO: 25927 - DNA, 25 bp, Homo sapien
cagctatgtcttcagtgcttgattc

SEQ ID NO: 25928 - DNA, 25 bp, Homo sapien
gtatcctctagtctgtcacgccatg

SEQ ID NO: 25929 - DNA, 25 bp, Homo sapien
caagctttggctgctcagtccgcat

SEQ ID NO: 25930 - DNA, 25 bp, Homo sapien
tccgcatgggctggatgtgaaaaaa

SEQ ID NO: 25931 - DNA, 25 bp, Homo sapien
ctcagtccgcatgggctggatgtga

SEQ ID NO: 25932 - DNA, 25 bp, Homo sapien
ctgtcaagctttggctgctcagtcc

SEQ ID NO: 25933 - DNA, 25 bp, Homo sapien
tttggctgctcagtccgcatgggct

SEQ ID NO: 25934 - DNA, 25 bp, Homo sapien
aagctttggctgctcagtccgcatg

SEQ ID NO: 25935 - DNA, 25 bp, Homo sapien
ctttggctgctcagtccgcatgggc

SEQ ID NO: 25936 - DNA, 25 bp, Homo sapien
tctgtcaagctttggctgctcagtc

SEQ ID NO: 25937 - DNA, 25 bp, Homo sapien
catgggctggatgtgaaaaaagatc

SEQ ID NO: 25938 - DNA, 25 bp, Homo sapien
gtcaagctttggctgctcagtccgc

SEQ ID NO: 25939 - DNA, 25 bp, Homo sapien
atgggctggatgtgaaaaaagatcc

SEQ ID NO: 25940 - DNA, 25 bp, Homo sapien
ttacaagtttttcgtaccataaaca

SEQ ID NO: 25941 - DNA, 25 bp, Homo sapien
tgtttatggtacgaaaaacttgtaa

SEQ ID NO: 25942 - DNA, 25 bp, Homo sapien
cttagctgtaatgggatgatctcct

SEQ ID NO: 25943 - DNA, 25 bp, Homo sapien
ttggcaatggccttagctgtaatgg

SEQ ID NO: 25944 - DNA, 25 bp, Homo sapien
cttgctgatagggatcttaagccgg

SEQ ID NO: 25945 - DNA, 25 bp, Homo sapien
taattcctgcactgcgacacttgct

SEQ ID NO: 25946 - DNA, 25 bp, Homo sapien
tgggatgatctcctgttaccatgat

SEQ ID NO: 25947 - DNA, 25 bp, Homo sapien
cttaagccgggcagcgacttcctct

SEQ ID NO: 25948 - DNA, 25 bp, Homo sapien
atgatcaccttaattcctgcactgc

SEQ ID NO: 25949 - DNA, 25 bp, Homo sapien
ggccttagctgtaatgggatgatct

SEQ ID NO: 25950 - DNA, 25 bp, Homo sapien
tgcaccatgcaccacaatggctttg

SEQ ID NO: 25951 - DNA, 25 bp, Homo sapien
gcaatggccttagctgtaatgggat

SEQ ID NO: 25952 - DNA, 25 bp, Homo sapien
gcaccacaatggctttggcagcact

SEQ ID NO: 25953 - DNA, 25 bp, Homo sapien
acatcaagcagattccctgacacag

SEQ ID NO: 25954 - DNA, 25 bp, Homo sapien
tgactactgtacacatcaagcagat

SEQ ID NO: 25955 - DNA, 25 bp, Homo sapien
actactgtacacatcaagcagattc

SEQ ID NO: 25956 - DNA, 25 bp, Homo sapien
gtacacatcaagcagattccctgac

SEQ ID NO: 25957 - DNA, 25 bp, Homo sapien
gctggtgtggccacgccttgactac

SEQ ID NO: 25958 - DNA, 25 bp, Homo sapien
tgctgacagtgatggctggtgtggc

SEQ ID NO: 25959 - DNA, 25 bp, Homo sapien
atcaagcagattccctgacacaggc

SEQ ID NO: 25960 - DNA, 25 bp, Homo sapien
ctggtgtggccacgccttgactact

SEQ ID NO: 25961 - DNA, 25 bp, Homo sapien
aagcagattccctgacacaggcagc

SEQ ID NO: 25962 - DNA, 25 bp, Homo sapien
gtggccacgccttgactactgtaca

SEQ ID NO: 25963 - DNA, 25 bp, Homo sapien
gtgtggccacgccttgactactgta

SEQ ID NO: 25964 - DNA, 25 bp, Homo sapien
tttgagccattccaaagcggagtcc

SEQ ID NO: 25965 - DNA, 25 bp, Homo sapien
caatggagtggtttgagccattcca

SEQ ID NO: 25966 - DNA, 25 bp, Homo sapien
atggagtggtttgagccattccaaa

SEQ ID NO: 25967 - DNA, 25 bp, Homo sapien
gtttgagccattccaaagcggagtc

SEQ ID NO: 25968 - DNA, 25 bp, Homo sapien
ggtttgagccattccaaagcggagt

SEQ ID NO: 25969 - DNA, 25 bp, Homo sapien
ttgagccattccaaagcggagtccg

SEQ ID NO: 25970 - DNA, 25 bp, Homo sapien
agccattccaaagcggagtccggag

SEQ ID NO: 25971 - DNA, 25 bp, Homo sapien
ctcaatggagtggtttgagccattc

SEQ ID NO: 25972 - DNA, 25 bp, Homo sapien
ggtctcaatggagtggtttgagcca

SEQ ID NO: 25973 - DNA, 25 bp, Homo sapien
ggagtggtttgagccattccaaagc

SEQ ID NO: 25974 - DNA, 25 bp, Homo sapien
gtggtttgagccattccaaagcgga

SEQ ID NO: 25975 - DNA, 25 bp, Homo sapien
tcgaggactagttttaactgaagga

SEQ ID NO: 25976 - DNA, 25 bp, Homo sapien
ctagttttaactgaaggagaccttg

SEQ ID NO: 25977 - DNA, 25 bp, Homo sapien
tttaactgaaggagaccttgtggga

SEQ ID NO: 25978 - DNA, 25 bp, Homo sapien
tctaggtctcccacgaggttttcga

SEQ ID NO: 25979 - DNA, 25 bp, Homo sapien
tctcccacgaggttttcgaggacta

SEQ ID NO: 25980 - DNA, 25 bp, Homo sapien
actgaaggagaccttgtgggacttc

SEQ ID NO: 25981 - DNA, 25 bp, Homo sapien
agagccacttctaggtctcccacga

SEQ ID NO: 25982 - DNA, 25 bp, Homo sapien
tgggacttcgcactctgacttcttc

SEQ ID NO: 25983 - DNA, 25 bp, Homo sapien
tgacttcttcatctgagccaaaacc

SEQ ID NO: 25984 - DNA, 25 bp, Homo sapien
gagaccttgtgggacttcgcactct

SEQ ID NO: 25985 - DNA, 25 bp, Homo sapien
cttgtgggacttcgcactctgactt

SEQ ID NO: 25986 - DNA, 25 bp, Homo sapien
catttatccttaaaaagaagcaatc

SEQ ID NO: 25987 - DNA, 25 bp, Homo sapien
taaaaagaagcaatcacttaatccc

SEQ ID NO: 25988 - DNA, 25 bp, Homo sapien
attacttttcgaagataaaatgaca

SEQ ID NO: 25989 - DNA, 25 bp, Homo sapien
tgagctttattaacacatgacaaaa

SEQ ID NO: 25990 - DNA, 25 bp, Homo sapien
taagtcttatatgagattacattac

SEQ ID NO: 25991 - DNA, 25 bp, Homo sapien
atgacagttgaaaacatttatcctt

SEQ ID NO: 25992 - DNA, 25 bp, Homo sapien
atccttaaaaagaagcaatcactta

SEQ ID NO: 25993 - DNA, 25 bp, Homo sapien
atttaaaaggattatatcttaagtc

SEQ ID NO: 25994 - DNA, 25 bp, Homo sapien
aaatgacagttgaaaacatttatcc

SEQ ID NO: 25995 - DNA, 25 bp, Homo sapien
tatgagctttattaacacatgacaa

SEQ ID NO: 25996 - DNA, 25 bp, Homo sapien
tttatccttaaaaagaagcaatcac

SEQ ID NO: 25997 - DNA, 25 bp, Homo sapien
tagtgggagactaaagtcagacagt

SEQ ID NO: 25998 - DNA, 25 bp, Homo sapien
ttttagtgggagactaaagtcagac

SEQ ID NO: 25999 - DNA, 25 bp, Homo sapien
ggaaatgcagttttagtgggagact

SEQ ID NO: 26000 - DNA, 25 bp, Homo sapien
gatttattaggacccgtaggtgcag

SEQ ID NO: 26001 - DNA, 25 bp, Homo sapien
gaaatgcagttttagtgggagacta

SEQ ID NO: 26002 - DNA, 25 bp, Homo sapien
tttagtgggagactaaagtcagaca

SEQ ID NO: 26003 - DNA, 25 bp, Homo sapien
cagttttagtgggagactaaagtca

SEQ ID NO: 26004 - DNA, 25 bp, Homo sapien
gtgggagactaaagtcagacagtga

SEQ ID NO: 26005 - DNA, 25 bp, Homo sapien
tgggagactaaagtcagacagtgaa

SEQ ID NO: 26006 - DNA, 25 bp, Homo sapien
ttagtgggagactaaagtcagacag

SEQ ID NO: 26007 - DNA, 25 bp, Homo sapien
gttttagtgggagactaaagtcaga

SEQ ID NO: 26008 - DNA, 25 bp, Homo sapien
aaagggagaaattgaaattgtagaa

SEQ ID NO: 26009 - DNA, 25 bp, Homo sapien
tagtgggagactaaagtcagacagt

SEQ ID NO: 26010 - DNA, 25 bp, Homo sapien
aaaggaaatgcagttttagtgggag

SEQ ID NO: 26011 - DNA, 25 bp, Homo sapien
ggaaatgcagttttagtgggagact

SEQ ID NO: 26012 - DNA, 25 bp, Homo sapien
gatttattaggacccgtaggtgcag

SEQ ID NO: 26013 - DNA, 25 bp, Homo sapien
attgtagaaaggaaatgcagtttta

SEQ ID NO: 26014 - DNA, 25 bp, Homo sapien
gaaatgcagttttagtgggagacta

SEQ ID NO: 26015 - DNA, 25 bp, Homo sapien
tgggagactaaagtcagacagtgaa

SEQ ID NO: 26016 - DNA, 25 bp, Homo sapien
cagtgaagatttattaggacccgta

SEQ ID NO: 26017 - DNA, 25 bp, Homo sapien
cagttttagtgggagactaaagtca

SEQ ID NO: 26018 - DNA, 25 bp, Homo sapien
ttttagtgggagactaaagtcagac

SEQ ID NO: 26019 - DNA, 25 bp, Homo sapien
aaccttgggactgcagtatatttat

SEQ ID NO: 26020 - DNA, 25 bp, Homo sapien
ccgattctgatgagggatgaacctt

SEQ ID NO: 26021 - DNA, 25 bp, Homo sapien
gaccgattctgatgagggatgaacc

SEQ ID NO: 26022 - DNA, 25 bp, Homo sapien
gagagtgctcaagaccgattctgat

SEQ ID NO: 26023 - DNA, 25 bp, Homo sapien
aggctggagagtgctcaagaccgat

SEQ ID NO: 26024 - DNA, 25 bp, Homo sapien
gggatgaaccttgggactgcagtat

SEQ ID NO: 26025 - DNA, 25 bp, Homo sapien
caagaccgattctgatgagggatga

SEQ ID NO: 26026 - DNA, 25 bp, Homo sapien
ctcaagaccgattctgatgagggat

SEQ ID NO: 26027 - DNA, 25 bp, Homo sapien
atgagaatatttattcgcagggttt

SEQ ID NO: 26028 - DNA, 25 bp, Homo sapien
ctggagagtgctcaagaccgattct

SEQ ID NO: 26029 - DNA, 25 bp, Homo sapien
atgaaccttgggactgcagtatatt

SEQ ID NO: 26030 - DNA, 25 bp, Homo sapien
attcctacaaggagaatccacctca

SEQ ID NO: 26031 - DNA, 25 bp, Homo sapien
ccaaactccatggtgcagttcctct

SEQ ID NO: 26032 - DNA, 25 bp, Homo sapien
tcagtccaaactccatggtgcagtt

SEQ ID NO: 26033 - DNA, 25 bp, Homo sapien
agtccaaactccatggtgcagttcc

SEQ ID NO: 26034 - DNA, 25 bp, Homo sapien
ctacaaggagaatccacctcagtcc

SEQ ID NO: 26035 - DNA, 25 bp, Homo sapien
aaactccatggtgcagttcctctgc

SEQ ID NO: 26036 - DNA, 25 bp, Homo sapien
tcctacaaggagaatccacctcagt

SEQ ID NO: 26037 - DNA, 25 bp, Homo sapien
caaactccatggtgcagttcctctg

SEQ ID NO: 26038 - DNA, 25 bp, Homo sapien
aatattcctacaaggagaatccacc

SEQ ID NO: 26039 - DNA, 25 bp, Homo sapien
aaggagaatccacctcagtccaaac

SEQ ID NO: 26040 - DNA, 25 bp, Homo sapien
acaaggagaatccacctcagtccaa

SEQ ID NO: 26041 - DNA, 25 bp, Homo sapien
aggcgctcgcacaccgacaggtagc

SEQ ID NO: 26042 - DNA, 25 bp, Homo sapien
aggttgaggcgctcgcacaccgaca

SEQ ID NO: 26043 - DNA, 25 bp, Homo sapien
ttgaggcgctcgcacaccgacaggt

SEQ ID NO: 26044 - DNA, 25 bp, Homo sapien
acggccaggttgaggcgctcgcaca

SEQ ID NO: 26045 - DNA, 25 bp, Homo sapien
tgaggcgctcgcacaccgacaggta

SEQ ID NO: 26046 - DNA, 25 bp, Homo sapien
acaccgacaggtagcgcgtggcctt

SEQ ID NO: 26047 - DNA, 25 bp, Homo sapien
cacaccgacaggtagcgcgtggcct

SEQ ID NO: 26048 - DNA, 25 bp, Homo sapien
acacggccaggttgaggcgctcgca

SEQ ID NO: 26049 - DNA, 25 bp, Homo sapien
acaggtagcgcgtggccttgaactt

SEQ ID NO: 26050 - DNA, 25 bp, Homo sapien
gctcgcacaccgacaggtagcgcgt

SEQ ID NO: 26051 - DNA, 25 bp, Homo sapien
caggttgaggcgctcgcacaccgac

SEQ ID NO: 26052 - DNA, 25 bp, Homo sapien
tggatgccagactttgtggcagact

SEQ ID NO: 26053 - DNA, 25 bp, Homo sapien
tttgtatgtctggtagttctcaact

SEQ ID NO: 26054 - DNA, 25 bp, Homo sapien
atcaagaccctttagagaactctac

SEQ ID NO: 26055 - DNA, 25 bp, Homo sapien
cttgccattaattctatccagtgta

SEQ ID NO: 26056 - DNA, 25 bp, Homo sapien
tgtggcagactttgtgaattttacc

SEQ ID NO: 26057 - DNA, 25 bp, Homo sapien
ctgtgttagttctgggtggttatga

SEQ ID NO: 26058 - DNA, 25 bp, Homo sapien
ttttctggactatagttaagtgact

SEQ ID NO: 26059 - DNA, 25 bp, Homo sapien
tagttctcaactggatgccagactt

SEQ ID NO: 26060 - DNA, 25 bp, Homo sapien
agtttagaactaattatgtcccact

SEQ ID NO: 26061 - DNA, 25 bp, Homo sapien
atgtcccactaatatcaagaccctt

SEQ ID NO: 26062 - DNA, 25 bp, Homo sapien
ctgggtggttatgattgatttttct

SEQ ID NO: 26063 - DNA, 25 bp, Homo sapien
aggaataacttcttggcagtggcag

SEQ ID NO: 26064 - DNA, 25 bp, Homo sapien
agactagtatgtatcagcacctgtt

SEQ ID NO: 26065 - DNA, 25 bp, Homo sapien
tcccaagaggaaattccctcgcatc

SEQ ID NO: 26066 - DNA, 25 bp, Homo sapien
cctgcagaaggacatttagtttttt

SEQ ID NO: 26067 - DNA, 25 bp, Homo sapien
gctaccaacaatgcagcaattcgca

SEQ ID NO: 26068 - DNA, 25 bp, Homo sapien
tggaagccattactctaggaataac

SEQ ID NO: 26069 - DNA, 25 bp, Homo sapien
atagtgaaaaataaatccctccctc

SEQ ID NO: 26070 - DNA, 25 bp, Homo sapien
cctcgcatcaatggaagatttggtc

SEQ ID NO: 26071 - DNA, 25 bp, Homo sapien
agagatagactaagctggattaagc

SEQ ID NO: 26072 - DNA, 25 bp, Homo sapien
ctggattaagcttatgtgtacacac

SEQ ID NO: 26073 - DNA, 25 bp, Homo sapien
tggtcaaagtgtcaagtataaatgc

SEQ ID NO: 26074 - DNA, 25 bp, Homo sapien
attcactgctggtctgactgtctcc

SEQ ID NO: 26075 - DNA, 25 bp, Homo sapien
tctgactgtctcctgccatgttagc

SEQ ID NO: 26076 - DNA, 25 bp, Homo sapien
cacacgcctgccttgtgtatgaagt

SEQ ID NO: 26077 - DNA, 25 bp, Homo sapien
atgaagtcttacgaagcatagctat

SEQ ID NO: 26078 - DNA, 25 bp, Homo sapien
acgcctgccttgtgtatgaagtctt

SEQ ID NO: 26079 - DNA, 25 bp, Homo sapien
acgaagcatagctattcactgctgg

SEQ ID NO: 26080 - DNA, 25 bp, Homo sapien
acaggtggggattctcttgatggac

SEQ ID NO: 26081 - DNA, 25 bp, Homo sapien
gtggcaggtccagtttctaatcatt

SEQ ID NO: 26082 - DNA, 25 bp, Homo sapien
ccatgttagcagctgctttgaggca

SEQ ID NO: 26083 - DNA, 25 bp, Homo sapien
gcagagtggcaggtccagtttctaa

SEQ ID NO: 26084 - DNA, 25 bp, Homo sapien
ttgatggacagtgactgccaccttt

SEQ ID NO: 26085 - DNA, 25 bp, Homo sapien
gcaggggacataatccatactggcc

SEQ ID NO: 26086 - DNA, 25 bp, Homo sapien
tttatgattctgacccaatggggat

SEQ ID NO: 26087 - DNA, 25 bp, Homo sapien
tgaatggcaacgtcctcccacagag

SEQ ID NO: 26088 - DNA, 25 bp, Homo sapien
aataccagcctgtgagccaatgctt

SEQ ID NO: 26089 - DNA, 25 bp, Homo sapien
caggcacatcacagtggcagaatta

SEQ ID NO: 26090 - DNA, 25 bp, Homo sapien
gtgtgaccttgagccagttgatgaa

SEQ ID NO: 26091 - DNA, 25 bp, Homo sapien
gcactccgcctggatgggaatataa

SEQ ID NO: 26092 - DNA, 25 bp, Homo sapien
gcgaaaatgtttcggaggacaccta

SEQ ID NO: 26093 - DNA, 25 bp, Homo sapien
agttgatgaacctgtctgggcctct

SEQ ID NO: 26094 - DNA, 25 bp, Homo sapien
aacaagtagcatttatggagcggca

SEQ ID NO: 26095 - DNA, 25 bp, Homo sapien
ttggctgcagccaactggttgtcta

SEQ ID NO: 26096 - DNA, 25 bp, Homo sapien
tgtgtagggaagagccacttttttc

SEQ ID NO: 26097 - DNA, 25 bp, Homo sapien
cttgatgctccacggctgagagtga

SEQ ID NO: 26098 - DNA, 25 bp, Homo sapien
gctgaagccaggtcctcccgaagct

SEQ ID NO: 26099 - DNA, 25 bp, Homo sapien
cagaatagcttatggatgggtcagt

SEQ ID NO: 26100 - DNA, 25 bp, Homo sapien
gaagtctcaactacggaaccatgtt

SEQ ID NO: 26101 - DNA, 25 bp, Homo sapien
catgttacattcgagcagctgagac

SEQ ID NO: 26102 - DNA, 25 bp, Homo sapien
tcttatgggccatgaccaaggctgc

SEQ ID NO: 26103 - DNA, 25 bp, Homo sapien
tattgctcaggatgactgaagtctc

SEQ ID NO: 26104 - DNA, 25 bp, Homo sapien
atggatgggtcagttctcgtctcac

SEQ ID NO: 26105 - DNA, 25 bp, Homo sapien
ctgagagtgacagagaatccagaat

SEQ ID NO: 26106 - DNA, 25 bp, Homo sapien
ctgcttcctcaaaaggcacgaaggg

SEQ ID NO: 26107 - DNA, 25 bp, Homo sapien
tggagattgtgggaaatgatttctg

SEQ ID NO: 26108 - DNA, 25 bp, Homo sapien
atggccagatcgcagcccagatcct

SEQ ID NO: 26109 - DNA, 25 bp, Homo sapien
aagggtcttagttctcagaggcgaa

SEQ ID NO: 26110 - DNA, 25 bp, Homo sapien
caagtgtttggaaggaagggtctta

SEQ ID NO: 26111 - DNA, 25 bp, Homo sapien
agatttctctaagggtcagggtctc

SEQ ID NO: 26112 - DNA, 25 bp, Homo sapien
agggtctcatctcccgcagcctttg

SEQ ID NO: 26113 - DNA, 25 bp, Homo sapien
gaaatgatttctgaggggcatgttc

SEQ ID NO: 26114 - DNA, 25 bp, Homo sapien
tagatgagcggggtttgatttcctt

SEQ ID NO: 26115 - DNA, 25 bp, Homo sapien
atcctcagccaaaggcctggatttc

SEQ ID NO: 26116 - DNA, 25 bp, Homo sapien
tccgtagtcccgtcatggccagatc

SEQ ID NO: 26117 - DNA, 25 bp, Homo sapien
ggtctaggataaaagcaagtgtttg

SEQ ID NO: 26118 - DNA, 25 bp, Homo sapien
caatgcaatcatgtttataggaaat

SEQ ID NO: 26119 - DNA, 25 bp, Homo sapien
tcatgtttataggaaatgtatattc

SEQ ID NO: 26120 - DNA, 25 bp, Homo sapien
ttttcactacaatgaaatcagtatg

SEQ ID NO: 26121 - DNA, 25 bp, Homo sapien
agcattaaacacacataatggtgac

SEQ ID NO: 26122 - DNA, 25 bp, Homo sapien
atattcaattcatgtaaaaaagtac

SEQ ID NO: 26123 - DNA, 25 bp, Homo sapien
tatcataacatcacagtataccctg

SEQ ID NO: 26124 - DNA, 25 bp, Homo sapien
ttctttgttagttgaaaagcattaa

SEQ ID NO: 26125 - DNA, 25 bp, Homo sapien
ttgaaataacgcaatgcaatcatgt

SEQ ID NO: 26126 - DNA, 25 bp, Homo sapien
taatcatcccactatgaatacatgt

SEQ ID NO: 26127 - DNA, 25 bp, Homo sapien
acacacataatggtgactaaaatta

SEQ ID NO: 26128 - DNA, 25 bp, Homo sapien
tattttgaaataacgcaatgcaatc

SEQ ID NO: 26129 - DNA, 25 bp, Homo sapien
tgtaaagagtagttggctggaagat

SEQ ID NO: 26130 - DNA, 25 bp, Homo sapien
cctataaacatgattgcattgcgtt

SEQ ID NO: 26131 - DNA, 25 bp, Homo sapien
cagttttataagttggtggggagtg

SEQ ID NO: 26132 - DNA, 25 bp, Homo sapien
aagagttagtaatatggaaaatgat

SEQ ID NO: 26133 - DNA, 25 bp, Homo sapien
tggaagataagtgacccgcacattc

SEQ ID NO: 26134 - DNA, 25 bp, Homo sapien
ttagtcaccattatgtgtgtttaat

SEQ ID NO: 26135 - DNA, 25 bp, Homo sapien
cagggtatactgtgatgttatgata

SEQ ID NO: 26136 - DNA, 25 bp, Homo sapien
gtgacccgcacattcattttggttc

SEQ ID NO: 26137 - DNA, 25 bp, Homo sapien
tggctggaagataagtgacccgcac

SEQ ID NO: 26138 - DNA, 25 bp, Homo sapien
atgtttacagggtatactgtgatgt

SEQ ID NO: 26139 - DNA, 25 bp, Homo sapien
catagtgggatgattaaattaagct

SEQ ID NO: 26140 - DNA, 25 bp, Homo sapien
agatagggtatttggtaaatagaga

SEQ ID NO: 26141 - DNA, 25 bp, Homo sapien
gtgaccagaccatatttaaaatgag

SEQ ID NO: 26142 - DNA, 25 bp, Homo sapien
taagatagctagataaaatatggat

SEQ ID NO: 26143 - DNA, 25 bp, Homo sapien
tttgtcagtcaaatacagatcccta

SEQ ID NO: 26144 - DNA, 25 bp, Homo sapien
aaatatggatatgtagtcagcactc

SEQ ID NO: 26145 - DNA, 25 bp, Homo sapien
gaccctaagtgtgaccagaccatat

SEQ ID NO: 26146 - DNA, 25 bp, Homo sapien
ttaaaggaccctaagtgtgaccaga

SEQ ID NO: 26147 - DNA, 25 bp, Homo sapien
accatgtccagcctaaggtcttctt

SEQ ID NO: 26148 - DNA, 25 bp, Homo sapien
tatgatttccagagatttacaaaaa

SEQ ID NO: 26149 - DNA, 25 bp, Homo sapien
aaaaatgcattaaagatagggtatt

SEQ ID NO: 26150 - DNA, 25 bp, Homo sapien
gttgccggcactggtcttcaattct

SEQ ID NO: 26151 - DNA, 25 bp, Homo sapien
taatctatggatacagagtgctgac

SEQ ID NO: 26152 - DNA, 25 bp, Homo sapien
ttggttgaatctggggatatataat

SEQ ID NO: 26153 - DNA, 25 bp, Homo sapien
gaattgaagaccagtgccggcaaca

SEQ ID NO: 26154 - DNA, 25 bp, Homo sapien
aaaaagaagaccttaggctggacat

SEQ ID NO: 26155 - DNA, 25 bp, Homo sapien
atagggatctgtatttgactgacaa

SEQ ID NO: 26156 - DNA, 25 bp, Homo sapien
acagagtgctgactacatatccata

SEQ ID NO: 26157 - DNA, 25 bp, Homo sapien
tatggtctggtcacacttagggtcc

SEQ ID NO: 26158 - DNA, 25 bp, Homo sapien
actgacaaagggtaattaaaatcta

SEQ ID NO: 26159 - DNA, 25 bp, Homo sapien
tgtctgagcccagaattgaagacca

SEQ ID NO: 26160 - DNA, 25 bp, Homo sapien
ttttaaatatggtctggtcacactt

SEQ ID NO: 26161 - DNA, 25 bp, Homo sapien
aatatgcttaagaatagggatctgt

SEQ ID NO: 26162 - DNA, 25 bp, Homo sapien
ttccagatgggctttcacagttctc

SEQ ID NO: 26163 - DNA, 25 bp, Homo sapien
tggatggcaaatccctggagaacac

SEQ ID NO: 26164 - DNA, 25 bp, Homo sapien
cctttatttgacagggaggatgccc

SEQ ID NO: 26165 - DNA, 25 bp, Homo sapien
aaggatggtgttctccacagggttt

SEQ ID NO: 26166 - DNA, 25 bp, Homo sapien
cacggtgctagaaagagttccattt

SEQ ID NO: 26167 - DNA, 25 bp, Homo sapien
agtccagtataaatacggcggggaa

SEQ ID NO: 26168 - DNA, 25 bp, Homo sapien
agctcagcccgaactggtagaatct

SEQ ID NO: 26169 - DNA, 25 bp, Homo sapien
catttctaggaaataggggtgtgtc

SEQ ID NO: 26170 - DNA, 25 bp, Homo sapien
cacaccgtgggttgagcaaacgttt

SEQ ID NO: 26171 - DNA, 25 bp, Homo sapien
acatcagaccagcacccaggtggat

SEQ ID NO: 26172 - DNA, 25 bp, Homo sapien
gcctctgcagtggagctcagtaatt

SEQ ID NO: 26173 - DNA, 25 bp, Homo sapien
tatatttcaagatgtactcattggt

SEQ ID NO: 26174 - DNA, 25 bp, Homo sapien
accaatgagtacatcttgaaatata

SEQ ID NO: 26175 - DNA, 25 bp, Homo sapien
ccaggagatctgatctgagagtaac

SEQ ID NO: 26176 - DNA, 25 bp, Homo sapien
agtccaggagcttcaaaattggccc

SEQ ID NO: 26177 - DNA, 25 bp, Homo sapien
tgagaaacagctaggcagacacagc

SEQ ID NO: 26178 - DNA, 25 bp, Homo sapien
taacaagttacaggagcgcggaaaa

SEQ ID NO: 26179 - DNA, 25 bp, Homo sapien
ggcccacgaacacctgagatcaaaa

SEQ ID NO: 26180 - DNA, 25 bp, Homo sapien
gggcacgtgagaagatcccaattcc

SEQ ID NO: 26181 - DNA, 25 bp, Homo sapien
actcttgatgcagacgctgacccga

SEQ ID NO: 26182 - DNA, 25 bp, Homo sapien
gacattgcagcaatagacctgtgcc

SEQ ID NO: 26183 - DNA, 25 bp, Homo sapien
aattggcccgcatcatgaaaacatc

SEQ ID NO: 26184 - DNA, 25 bp, Homo sapien
taacctgttgggcattaaggacatt

SEQ ID NO: 26185 - DNA, 25 bp, Homo sapien
cggcagacgattgaagactcactct

SEQ ID NO: 26186 - DNA, 25 bp, Homo sapien
gagatgagggcgactcgcagattcc

SEQ ID NO: 26187 - DNA, 25 bp, Homo sapien
cctgtgacttcatagctgcccacgg

SEQ ID NO: 26188 - DNA, 25 bp, Homo sapien
atgggcttcgagtctccatggtaac

SEQ ID NO: 26189 - DNA, 25 bp, Homo sapien
tctctgaatgggcttcgagtctcca

SEQ ID NO: 26190 - DNA, 25 bp, Homo sapien
ggcgactcgcagattccaccctatt

SEQ ID NO: 26191 - DNA, 25 bp, Homo sapien
gctccaaagtggtgccctgggagat

SEQ ID NO: 26192 - DNA, 25 bp, Homo sapien
tgacttcatagctgcccacgggagg

SEQ ID NO: 26193 - DNA, 25 bp, Homo sapien
aagctctgtctttgaggccacctac

SEQ ID NO: 26194 - DNA, 25 bp, Homo sapien
gccaagctctgtctttgaggccacc

SEQ ID NO: 26195 - DNA, 25 bp, Homo sapien
cttcgagtctccatggtaacggccc

SEQ ID NO: 26196 - DNA, 25 bp, Homo sapien
atgagggcgactcgcagattccacc

SEQ ID NO: 26197 - DNA, 25 bp, Homo sapien
acctgattgtggaaagcacatctga

SEQ ID NO: 26198 - DNA, 25 bp, Homo sapien
ctgaccgggattttagcaccgaaat

SEQ ID NO: 26199 - DNA, 25 bp, Homo sapien
gctgagaagaggaattgtaatgatc

SEQ ID NO: 26200 - DNA, 25 bp, Homo sapien
aaagattctggctggctcaaaggta

SEQ ID NO: 26201 - DNA, 25 bp, Homo sapien
ttgattgggatgtggagcacaataa

SEQ ID NO: 26202 - DNA, 25 bp, Homo sapien
agaaaatttacagaggcaaaacctg

SEQ ID NO: 26203 - DNA, 25 bp, Homo sapien
tctgtgaagatgacggaactactga

SEQ ID NO: 26204 - DNA, 25 bp, Homo sapien
agaggcaaaacctgaatatccagtg

SEQ ID NO: 26205 - DNA, 25 bp, Homo sapien
taacctcaaagctcaattgcgcacc

SEQ ID NO: 26206 - DNA, 25 bp, Homo sapien
atgttgttacagatggtgcaatgct

SEQ ID NO: 26207 - DNA, 25 bp, Homo sapien
aatgatcattagtggcagagaattt

SEQ ID NO: 26208 - DNA, 25 bp, Homo sapien
taagtgacatgcaggcgtctctctt

SEQ ID NO: 26209 - DNA, 25 bp, Homo sapien
tgaatcttgcggttcccagtgacgt

SEQ ID NO: 26210 - DNA, 25 bp, Homo sapien
actctccagcagagtgccggcttgt

SEQ ID NO: 26211 - DNA, 25 bp, Homo sapien
ttctagttgcccagagggttggcct

SEQ ID NO: 26212 - DNA, 25 bp, Homo sapien
tgtccatgcaggttcacacaaaggc

SEQ ID NO: 26213 - DNA, 25 bp, Homo sapien
aagagtcttccatgaggactgtcac

SEQ ID NO: 26214 - DNA, 25 bp, Homo sapien
atatcccagggagaagcatttgcct

SEQ ID NO: 26215 - DNA, 25 bp, Homo sapien
cttcactgcagaccaggatttgttc

SEQ ID NO: 26216 - DNA, 25 bp, Homo sapien
tcacatcccgcctgtggaagctgag

SEQ ID NO: 26217 - DNA, 25 bp, Homo sapien
ttaagggatcttccacctgccatgc

SEQ ID NO: 26218 - DNA, 25 bp, Homo sapien
ttctagatgagaaacctggatgagt

SEQ ID NO: 26219 - DNA, 25 bp, Homo sapien
caagtgttgtgcaaaaagtagaaca

SEQ ID NO: 26220 - DNA, 25 bp, Homo sapien
cattacgccactttgaaaaccagac

SEQ ID NO: 26221 - DNA, 25 bp, Homo sapien
ggagggcaatgcattacgccacttt

SEQ ID NO: 26222 - DNA, 25 bp, Homo sapien
atatgataaaattgaaggggagcac

SEQ ID NO: 26223 - DNA, 25 bp, Homo sapien
cacacatccctgatgggagggcaat

SEQ ID NO: 26224 - DNA, 25 bp, Homo sapien
aaatggaagtctcacacatccctga

SEQ ID NO: 26225 - DNA, 25 bp, Homo sapien
aggtaatagctcataataaaaggtt

SEQ ID NO: 26226 - DNA, 25 bp, Homo sapien
aattgaaggggagcacaccctactc

SEQ ID NO: 26227 - DNA, 25 bp, Homo sapien
actatatgctgtcaagaactcttgc

SEQ ID NO: 26228 - DNA, 25 bp, Homo sapien
tgctcccggccttgttttatgcatt

SEQ ID NO: 26229 - DNA, 25 bp, Homo sapien
agtagaacaaatggaagtctcacac

SEQ ID NO: 26230 - DNA, 25 bp, Homo sapien
tccttggaaaaatggagaagtagaa

SEQ ID NO: 26231 - DNA, 25 bp, Homo sapien
actgttaactcctgaattggggatt

SEQ ID NO: 26232 - DNA, 25 bp, Homo sapien
aattggggatttctgtcaatctagc

SEQ ID NO: 26233 - DNA, 25 bp, Homo sapien
tcccagatacacaacaaaataccat

SEQ ID NO: 26234 - DNA, 25 bp, Homo sapien
tagaaccttgattgtctgatcaccc

SEQ ID NO: 26235 - DNA, 25 bp, Homo sapien
tccaagaccataccacacagagact

SEQ ID NO: 26236 - DNA, 25 bp, Homo sapien
tgaaggcttctctaatcccagatac

SEQ ID NO: 26237 - DNA, 25 bp, Homo sapien
tcaatctagcagaaactccaaaagg

SEQ ID NO: 26238 - DNA, 25 bp, Homo sapien
acacagagacttccaaggccatcct

SEQ ID NO: 26239 - DNA, 25 bp, Homo sapien
actccaaaaggattctctgtactag

SEQ ID NO: 26240 - DNA, 25 bp, Homo sapien
aaaaattgcaaacattgaaggcttc

SEQ ID NO: 26241 - DNA, 25 bp, Homo sapien
tgcttgacaaagcattgaggtgtca

SEQ ID NO: 26242 - DNA, 25 bp, Homo sapien
tggaatcctggaacaaacatggtag

SEQ ID NO: 26243 - DNA, 25 bp, Homo sapien
ttccagagttgttcaccaaacaggt

SEQ ID NO: 26244 - DNA, 25 bp, Homo sapien
acaaacatggtaggagaacagaaga

SEQ ID NO: 26245 - DNA, 25 bp, Homo sapien
gaagagggtcccatctgcatattct

SEQ ID NO: 26246 - DNA, 25 bp, Homo sapien
acacttggggactggtaattttagc

SEQ ID NO: 26247 - DNA, 25 bp, Homo sapien
aatttcacctgacacttggggactg

SEQ ID NO: 26248 - DNA, 25 bp, Homo sapien
tagataaagcagctgtcgacttggc

SEQ ID NO: 26249 - DNA, 25 bp, Homo sapien
ccaaacaggtaacaagattgagctt

SEQ ID NO: 26250 - DNA, 25 bp, Homo sapien
aaacatactgtgataagctgctcca

SEQ ID NO: 26251 - DNA, 25 bp, Homo sapien
gccagagaaatgaggtgcttgacaa

SEQ ID NO: 26252 - DNA, 25 bp, Homo sapien
ctcaggaaaaactcaccaagacggt

SEQ ID NO: 26253 - DNA, 25 bp, Homo sapien
aagtgagatacttagtgcccgtgaa

SEQ ID NO: 26254 - DNA, 25 bp, Homo sapien
acacacacagatggaagttaacatt

SEQ ID NO: 26255 - DNA, 25 bp, Homo sapien
aaccacggagcaactttggctagta

SEQ ID NO: 26256 - DNA, 25 bp, Homo sapien
aagcacctagcagaatactgtgaac

SEQ ID NO: 26257 - DNA, 25 bp, Homo sapien
gcccaactgttgaaaccacggagca

SEQ ID NO: 26258 - DNA, 25 bp, Homo sapien
tgtgcagcacttcatgtgtaaaagc

SEQ ID NO: 26259 - DNA, 25 bp, Homo sapien
ttggctagtaagagattcccaaagc

SEQ ID NO: 26260 - DNA, 25 bp, Homo sapien
aaagccgggtgtgttcagtattccc

SEQ ID NO: 26261 - DNA, 25 bp, Homo sapien
cagtgtccgtcatggaaaatgactt

SEQ ID NO: 26262 - DNA, 25 bp, Homo sapien
accaagacggtcatcaaaagttgat

SEQ ID NO: 26263 - DNA, 25 bp, Homo sapien
cccacagctacaaaattattcagtt

SEQ ID NO: 26264 - DNA, 25 bp, Homo sapien
atctatttagaaacatgcatataag

SEQ ID NO: 26265 - DNA, 25 bp, Homo sapien
tgccagctaagatcagtataggccc

SEQ ID NO: 26266 - DNA, 25 bp, Homo sapien
aacttatctgcaatgcactgggaga

SEQ ID NO: 26267 - DNA, 25 bp, Homo sapien
gcacaaatttgccagctaagatcag

SEQ ID NO: 26268 - DNA, 25 bp, Homo sapien
ctaagatcagtataggccctcctcc

SEQ ID NO: 26269 - DNA, 25 bp, Homo sapien
ctgcaatgcactgggagaatatatc

SEQ ID NO: 26270 - DNA, 25 bp, Homo sapien
tacgggctgcttaatatcttccttg

SEQ ID NO: 26271 - DNA, 25 bp, Homo sapien
aatataccatattacgggctgctta

SEQ ID NO: 26272 - DNA, 25 bp, Homo sapien
actttaacagtatcagccgggcgtg

SEQ ID NO: 26273 - DNA, 25 bp, Homo sapien
ttaagactttaacagtatcagccgg

SEQ ID NO: 26274 - DNA, 25 bp, Homo sapien
aaggaagatattaagcagcccgtaa

SEQ ID NO: 26275 - DNA, 25 bp, Homo sapien
gatgaaagtggaaaacctactctag

SEQ ID NO: 26276 - DNA, 25 bp, Homo sapien
cccagtgcattgcagataagttgga

SEQ ID NO: 26277 - DNA, 25 bp, Homo sapien
taaacaaggaagatattaagcagcc

SEQ ID NO: 26278 - DNA, 25 bp, Homo sapien
aaagtcttaaacaaggaagatatta

SEQ ID NO: 26279 - DNA, 25 bp, Homo sapien
actgaataattttgtagctgtgggt

SEQ ID NO: 26280 - DNA, 25 bp, Homo sapien
ctgatcttagctggcaaatttgtgc

SEQ ID NO: 26281 - DNA, 25 bp, Homo sapien
atgaagatatattctcccagtgcat

SEQ ID NO: 26282 - DNA, 25 bp, Homo sapien
gcccggctgatactgttaaagtctt

SEQ ID NO: 26283 - DNA, 25 bp, Homo sapien
gaggagggcctatactgatcttagc

SEQ ID NO: 26284 - DNA, 25 bp, Homo sapien
taagcagcccgtaatatggtatatt

SEQ ID NO: 26285 - DNA, 25 bp, Homo sapien
tctgtattcgtgtctattgtgtgcc

SEQ ID NO: 26286 - DNA, 25 bp, Homo sapien
tgtcactgccgtggaggagtttaca

SEQ ID NO: 26287 - DNA, 25 bp, Homo sapien
ctagggaatagagagtagaaaatga

SEQ ID NO: 26288 - DNA, 25 bp, Homo sapien
taaactctcaaggtggaattgctgg

SEQ ID NO: 26289 - DNA, 25 bp, Homo sapien
atccatatgtggaaatgaacatcct

SEQ ID NO: 26290 - DNA, 25 bp, Homo sapien
tatgtggaaatgaacatccttgcac

SEQ ID NO: 26291 - DNA, 25 bp, Homo sapien
tattataaactctcaaggtggaatt

SEQ ID NO: 26292 - DNA, 25 bp, Homo sapien
aaatgagacattcagtgtcactgcc

SEQ ID NO: 26293 - DNA, 25 bp, Homo sapien
attcgtgtctattgtgtgccagtca

SEQ ID NO: 26294 - DNA, 25 bp, Homo sapien
tgccgtggaggagtttacaatccat

SEQ ID NO: 26295 - DNA, 25 bp, Homo sapien
gaatagagagtagaaaatgagacat

SEQ ID NO: 26296 - DNA, 25 bp, Homo sapien
ttcctaaaagaaatgctccgagcag

SEQ ID NO: 26297 - DNA, 25 bp, Homo sapien
tccgagcagaattcagtaaggagct

SEQ ID NO: 26298 - DNA, 25 bp, Homo sapien
agccatgcaaggatctcagacagtt

SEQ ID NO: 26299 - DNA, 25 bp, Homo sapien
tttcctagaagcaggcccagaaaca

SEQ ID NO: 26300 - DNA, 25 bp, Homo sapien
agtctttctataggtgggcacaaaa

SEQ ID NO: 26301 - DNA, 25 bp, Homo sapien
tggctaagagccaccctcgttgata

SEQ ID NO: 26302 - DNA, 25 bp, Homo sapien
ttcctagaagtctcacagggcactt

SEQ ID NO: 26303 - DNA, 25 bp, Homo sapien
caggagccttaggtcagaagcaaaa

SEQ ID NO: 26304 - DNA, 25 bp, Homo sapien
actgaggaagaagattgtgtcttac

SEQ ID NO: 26305 - DNA, 25 bp, Homo sapien
ggcagggtatctgggcttccattct

SEQ ID NO: 26306 - DNA, 25 bp, Homo sapien
aggggagctctcaactgtaaacaat

SEQ ID NO: 26307 - DNA, 25 bp, Homo sapien
aatcttaagggcaccaggaagcagt

SEQ ID NO: 26308 - DNA, 25 bp, Homo sapien
tgcccacttgtaaaggccaggcctg

SEQ ID NO: 26309 - DNA, 25 bp, Homo sapien
acagacacgtgagcatcatgtgtgt

SEQ ID NO: 26310 - DNA, 25 bp, Homo sapien
gaaggaattgggttgttgcctcact

SEQ ID NO: 26311 - DNA, 25 bp, Homo sapien
agccagcttttcctgccgcacggga

SEQ ID NO: 26312 - DNA, 25 bp, Homo sapien
tggtgtctccagaggatccaagcag

SEQ ID NO: 26313 - DNA, 25 bp, Homo sapien
gagtcctggcacagtggtgtctcca

SEQ ID NO: 26314 - DNA, 25 bp, Homo sapien
gtaggaacagacctcatggcacatt

SEQ ID NO: 26315 - DNA, 25 bp, Homo sapien
tctggggctgtctgcaaaagcttcc

SEQ ID NO: 26316 - DNA, 25 bp, Homo sapien
cggaaagccacgtttggaagaatat

SEQ ID NO: 26317 - DNA, 25 bp, Homo sapien
acactggagctgaatcttaagggca

SEQ ID NO: 26318 - DNA, 25 bp, Homo sapien
tacaccttgagcaaagagttcggcc

SEQ ID NO: 26319 - DNA, 25 bp, Homo sapien
tttatctatggggaaggaagcccaa

SEQ ID NO: 26320 - DNA, 25 bp, Homo sapien
tatgttggcaacatagcctgggccc

SEQ ID NO: 26321 - DNA, 25 bp, Homo sapien
gtgtccgaggacagttctactatat

SEQ ID NO: 26322 - DNA, 25 bp, Homo sapien
tccctgacgtactggattggcttcc

SEQ ID NO: 26323 - DNA, 25 bp, Homo sapien
tgaggccctaaacaaccatggaatc

SEQ ID NO: 26324 - DNA, 25 bp, Homo sapien
ttctgccggtataaatgaggcccta

SEQ ID NO: 26325 - DNA, 25 bp, Homo sapien
gactctgaaaaacggtggcaccttg

SEQ ID NO: 26326 - DNA, 25 bp, Homo sapien
aagtttcagcaagttctccagagtc

SEQ ID NO: 26327 - DNA, 25 bp, Homo sapien
cctgccgaggccagtttacacctgt

SEQ ID NO: 26328 - DNA, 25 bp, Homo sapien
agcctctggaaaacacatggtacgc

SEQ ID NO: 26329 - DNA, 25 bp, Homo sapien
ctgaagttcctaaactgtgtgttac

SEQ ID NO: 26330 - DNA, 25 bp, Homo sapien
ttttaactgtttgctgctaggttac

SEQ ID NO: 26331 - DNA, 25 bp, Homo sapien
tgctaggttacagaaatacaagtgc

SEQ ID NO: 26332 - DNA, 25 bp, Homo sapien
accttaacaggttagctagttattc

SEQ ID NO: 26333 - DNA, 25 bp, Homo sapien
taggttacagaaatacaagtgcttt

SEQ ID NO: 26334 - DNA, 25 bp, Homo sapien
gcattaagatagtaatgtaggtttt

SEQ ID NO: 26335 - DNA, 25 bp, Homo sapien
ccctgaataggtgtgaaatgttatc

SEQ ID NO: 26336 - DNA, 25 bp, Homo sapien
aaactgtgtgttactagtatctagt

SEQ ID NO: 26337 - DNA, 25 bp, Homo sapien
ctaggataatgctaaataagagtga

SEQ ID NO: 26338 - DNA, 25 bp, Homo sapien
ttcatgtcccatctcgacggtcttt

SEQ ID NO: 26339 - DNA, 25 bp, Homo sapien
accattaaatatgatgattgcagcc

SEQ ID NO: 26340 - DNA, 25 bp, Homo sapien
gagggttaaatgagcatagcacagt

SEQ ID NO: 26341 - DNA, 25 bp, Homo sapien
atacatgtttgacagttgctccttc

SEQ ID NO: 26342 - DNA, 25 bp, Homo sapien
tctctgtgcggccaccatgtaagtc

SEQ ID NO: 26343 - DNA, 25 bp, Homo sapien
acccttagcagtcatgtgaccttgg

SEQ ID NO: 26344 - DNA, 25 bp, Homo sapien
acatgagattgtttctgagggttaa

SEQ ID NO: 26345 - DNA, 25 bp, Homo sapien
tgcggccaccatgtaagtcggacct

SEQ ID NO: 26346 - DNA, 25 bp, Homo sapien
ttaaatgagcatagcacagtgggga

SEQ ID NO: 26347 - DNA, 25 bp, Homo sapien
gtgtgaaaacagactgctatacttt

SEQ ID NO: 26348 - DNA, 25 bp, Homo sapien
tcatgcttaagcaattggggaattc

SEQ ID NO: 26349 - DNA, 25 bp, Homo sapien
ttgacagttgctccttcacatgttc

SEQ ID NO: 26350 - DNA, 25 bp, Homo sapien
gtcggacctgcccttctgccatgat

SEQ ID NO: 26351 - DNA, 25 bp, Homo sapien
atcacatcacagttagaaatcatac

SEQ ID NO: 26352 - DNA, 25 bp, Homo sapien
tgagggtctgtgcttcctgtctacc

SEQ ID NO: 26353 - DNA, 25 bp, Homo sapien
tgcaggcaccaaaattcaccctctc

SEQ ID NO: 26354 - DNA, 25 bp, Homo sapien
ggctgagggtctgtgcttcctgtct

SEQ ID NO: 26355 - DNA, 25 bp, Homo sapien
agatgcaagccagattccatctgcc

SEQ ID NO: 26356 - DNA, 25 bp, Homo sapien
tcacgcgaggccaggctgctttgca

SEQ ID NO: 26357 - DNA, 25 bp, Homo sapien
cagcagggtctcaggagtcccactc

SEQ ID NO: 26358 - DNA, 25 bp, Homo sapien
atcatacaggcctaaagtcccagct

SEQ ID NO: 26359 - DNA, 25 bp, Homo sapien
tcacagttagaaatcatacaggcct

SEQ ID NO: 26360 - DNA, 25 bp, Homo sapien
ttgctttggcatcacgcgaggccag

SEQ ID NO: 26361 - DNA, 25 bp, Homo sapien
ctcatcccacagcagggtctcagga

SEQ ID NO: 26362 - DNA, 25 bp, Homo sapien
agagggtgaattttggtgcctgcaa

SEQ ID NO: 26363 - DNA, 25 bp, Homo sapien
tggagtcaagttcattagtcatttc

SEQ ID NO: 26364 - DNA, 25 bp, Homo sapien
ctcgcgtgatgccaaagcaaaagct

SEQ ID NO: 26365 - DNA, 25 bp, Homo sapien
gcaaagcagcctggcctcgcgtgat

SEQ ID NO: 26366 - DNA, 25 bp, Homo sapien
agtgggactcctgagaccctgctgt

SEQ ID NO: 26367 - DNA, 25 bp, Homo sapien
aggcctgtatgatttctaactgtga

SEQ ID NO: 26368 - DNA, 25 bp, Homo sapien
tggcctcgcgtgatgccaaagcaaa

SEQ ID NO: 26369 - DNA, 25 bp, Homo sapien
gtttcaatttcatggagtcaagttc

SEQ ID NO: 26370 - DNA, 25 bp, Homo sapien
agctgggactttaggcctgtatgat

SEQ ID NO: 26371 - DNA, 25 bp, Homo sapien
gaattttggtgcctgcaaagcagcc

SEQ ID NO: 26372 - DNA, 25 bp, Homo sapien
ggcagatggaatctggcttgcatct

SEQ ID NO: 26373 - DNA, 25 bp, Homo sapien
aggtcaccatatccgtatttctgtc

SEQ ID NO: 26374 - DNA, 25 bp, Homo sapien
taggcattagaggttattaaagcac

SEQ ID NO: 26375 - DNA, 25 bp, Homo sapien
cattagaggttattaaagcacatcc

SEQ ID NO: 26376 - DNA, 25 bp, Homo sapien
cactttacctagttgactttggagt

SEQ ID NO: 26377 - DNA, 25 bp, Homo sapien
ttataggtcaccatatccgtatttc

SEQ ID NO: 26378 - DNA, 25 bp, Homo sapien
tgcatatacgaaagtaaaaggatat

SEQ ID NO: 26379 - DNA, 25 bp, Homo sapien
tcctgagccactttacctagttgac

SEQ ID NO: 26380 - DNA, 25 bp, Homo sapien
tgtttgtttaggcattagaggttat

SEQ ID NO: 26381 - DNA, 25 bp, Homo sapien
gttattaaagcacatcctgagccac

SEQ ID NO: 26382 - DNA, 25 bp, Homo sapien
tgatgttccatgcatatacgaaagt

SEQ ID NO: 26383 - DNA, 25 bp, Homo sapien
caactatttagtgatttgatgttcc

SEQ ID NO: 26384 - DNA, 25 bp, Homo sapien
atggtgacctataaaggggtcctca

SEQ ID NO: 26385 - DNA, 25 bp, Homo sapien
agggaaagtaacagtgtgtgattca

SEQ ID NO: 26386 - DNA, 25 bp, Homo sapien
tcaactaggtaaagtggctcaggat

SEQ ID NO: 26387 - DNA, 25 bp, Homo sapien
acagaccagctaaaccagaaatctt

SEQ ID NO: 26388 - DNA, 25 bp, Homo sapien
acagaaatacggatatggtgaccta

SEQ ID NO: 26389 - DNA, 25 bp, Homo sapien
ctctcactgagggacagaccagcta

SEQ ID NO: 26390 - DNA, 25 bp, Homo sapien
tgtgtgattcaagacataggtattc

SEQ ID NO: 26391 - DNA, 25 bp, Homo sapien
tcgtatatgcatggaacatcaaatc

SEQ ID NO: 26392 - DNA, 25 bp, Homo sapien
agagaacgagacagagactctcact

SEQ ID NO: 26393 - DNA, 25 bp, Homo sapien
tggctcaggatgtgctttaataacc

SEQ ID NO: 26394 - DNA, 25 bp, Homo sapien
aatcttaagagggaaagtaacagtg

SEQ ID NO: 26395 - DNA, 25 bp, Homo sapien
agctcagtaactgccatatgtaatg

SEQ ID NO: 26396 - DNA, 25 bp, Homo sapien
acctaagatgtttccaaggcacaga

SEQ ID NO: 26397 - DNA, 25 bp, Homo sapien
gtgcaaattaggttaactgttccta

SEQ ID NO: 26398 - DNA, 25 bp, Homo sapien
tgttcctagattttcacctaagatg

SEQ ID NO: 26399 - DNA, 25 bp, Homo sapien
agtaactgagtaagataaacttgtt

SEQ ID NO: 26400 - DNA, 25 bp, Homo sapien
gtaatggcttcaaaagcataccttc

SEQ ID NO: 26401 - DNA, 25 bp, Homo sapien
cacccagtactcacagctctgaaat

SEQ ID NO: 26402 - DNA, 25 bp, Homo sapien
acttgttttgagttgtaagcagctc

SEQ ID NO: 26403 - DNA, 25 bp, Homo sapien
ataccttcaatgcttcacccagtac

SEQ ID NO: 26404 - DNA, 25 bp, Homo sapien
tgtttccaaggcacagactggagat

SEQ ID NO: 26405 - DNA, 25 bp, Homo sapien
atctggatggtttataattagtaac

SEQ ID NO: 26406 - DNA, 25 bp, Homo sapien
atccgctgcaaactcatgtcatttc

SEQ ID NO: 26407 - DNA, 25 bp, Homo sapien
agcggtgtgtgatcgccaaccacca

SEQ ID NO: 26408 - DNA, 25 bp, Homo sapien
ttcagttcaccatccgctgcaaact

SEQ ID NO: 26409 - DNA, 25 bp, Homo sapien
acgggatgaaggcttacacttcctt

SEQ ID NO: 26410 - DNA, 25 bp, Homo sapien
atcgccaaccaccagacgggatgaa

SEQ ID NO: 26411 - DNA, 25 bp, Homo sapien
acctgagttccacactgtagaggga

SEQ ID NO: 26412 - DNA, 25 bp, Homo sapien
cattagcctcagcacagagcggtgt

SEQ ID NO: 26413 - DNA, 25 bp, Homo sapien
gttccacactgtagagggaagccca

SEQ ID NO: 26414 - DNA, 25 bp, Homo sapien
ggaagcccagggtaaaaatctgcat

SEQ ID NO: 26415 - DNA, 25 bp, Homo sapien
cactgctctcatggaggaagggcaa

SEQ ID NO: 26416 - DNA, 25 bp, Homo sapien
ctccaagcttccaactgaaattcag

SEQ ID NO: 26417 - DNA, 25 bp, Homo sapien
ctagaagaaattatcaatgccagtc

SEQ ID NO: 26418 - DNA, 25 bp, Homo sapien
tggggtgactcgctctctgagacct

SEQ ID NO: 26419 - DNA, 25 bp, Homo sapien
cacaggtgaatagggtggcttcaaa

SEQ ID NO: 26420 - DNA, 25 bp, Homo sapien
tcttcaaggcagttcagcaagtctg

SEQ ID NO: 26421 - DNA, 25 bp, Homo sapien
aggcttcttgagttacgattgcacc

SEQ ID NO: 26422 - DNA, 25 bp, Homo sapien
ccagtcttgggcaggcagacaagct

SEQ ID NO: 26423 - DNA, 25 bp, Homo sapien
gtggcaaagaaagaccgtgtctctt

SEQ ID NO: 26424 - DNA, 25 bp, Homo sapien
agttcagcaagtctgcacccaccta

SEQ ID NO: 26425 - DNA, 25 bp, Homo sapien
ttaattaactaggagtggtggagtg

SEQ ID NO: 26426 - DNA, 25 bp, Homo sapien
ggtcaggagaggtgctgcctcactc

SEQ ID NO: 26427 - DNA, 25 bp, Homo sapien
catactttgtgggagcacaggtgaa

SEQ ID NO: 26428 - DNA, 25 bp, Homo sapien
ttggggaggctaagttatctggaat

SEQ ID NO: 26429 - DNA, 25 bp, Homo sapien
tgtgtgtgtgtgctattaaaactgc

SEQ ID NO: 26430 - DNA, 25 bp, Homo sapien
tgagtctcaactacatactaggcac

SEQ ID NO: 26431 - DNA, 25 bp, Homo sapien
aaagccaccattgtacacagttcac

SEQ ID NO: 26432 - DNA, 25 bp, Homo sapien
cagtaaggatttgatggtgaacaac

SEQ ID NO: 26433 - DNA, 25 bp, Homo sapien
tttgatggtgaacaacatagagaac

SEQ ID NO: 26434 - DNA, 25 bp, Homo sapien
atagagaactcatgaatcttacctc

SEQ ID NO: 26435 - DNA, 25 bp, Homo sapien
atctggaatgccctgttccctcagc

SEQ ID NO: 26436 - DNA, 25 bp, Homo sapien
ttcttgggcaaagagaattagaaac

SEQ ID NO: 26437 - DNA, 25 bp, Homo sapien
gtttctggaaaacataaagccacca

SEQ ID NO: 26438 - DNA, 25 bp, Homo sapien
actcccttgttcttgagcccaggac

SEQ ID NO: 26439 - DNA, 25 bp, Homo sapien
acggggctgtagatgctgttaacta

SEQ ID NO: 26440 - DNA, 25 bp, Homo sapien
tgtgactagccctaccctgaagttt

SEQ ID NO: 26441 - DNA, 25 bp, Homo sapien
aagtgtggttcagtctgaacattcc

SEQ ID NO: 26442 - DNA, 25 bp, Homo sapien
ttgtacaaatgtggaaacacggggc

SEQ ID NO: 26443 - DNA, 25 bp, Homo sapien
cttcatggtataggtgtgattgatt

SEQ ID NO: 26444 - DNA, 25 bp, Homo sapien
caactcattagggtacaaaaagaca

SEQ ID NO: 26445 - DNA, 25 bp, Homo sapien
tactgaaggcaaaagtgtgacttca

SEQ ID NO: 26446 - DNA, 25 bp, Homo sapien
attattggctattggtgaccagctc

SEQ ID NO: 26447 - DNA, 25 bp, Homo sapien
cctgaagtttcgtaggggctgccca

SEQ ID NO: 26448 - DNA, 25 bp, Homo sapien
taggggctgcccatcactggtcaac

SEQ ID NO: 26449 - DNA, 25 bp, Homo sapien
actggtcaactcattagggtacaaa

SEQ ID NO: 26450 - DNA, 25 bp, Homo sapien
ggtgactccaagtactcacacagtc

SEQ ID NO: 26451 - DNA, 25 bp, Homo sapien
tccacacaccatcctgaagtcaccc

SEQ ID NO: 26452 - DNA, 25 bp, Homo sapien
cccaccagtataggaagcagcacac

SEQ ID NO: 26453 - DNA, 25 bp, Homo sapien
acagccaaaacctctacatccctac

SEQ ID NO: 26454 - DNA, 25 bp, Homo sapien
cccatcacaccctcagaccacactt

SEQ ID NO: 26455 - DNA, 25 bp, Homo sapien
caccagtataggaagcagcacaccc

SEQ ID NO: 26456 - DNA, 25 bp, Homo sapien
actccaagtactcacacagtcatca

SEQ ID NO: 26457 - DNA, 25 bp, Homo sapien
agccacaccagtacaggcaccagaa

SEQ ID NO: 26458 - DNA, 25 bp, Homo sapien
cccagccacaccagtacaggcacca

SEQ ID NO: 26459 - DNA, 25 bp, Homo sapien
ttggtgactccaagtactcacacag

SEQ ID NO: 26460 - DNA, 25 bp, Homo sapien
tcagaccacacttcccactcacgtt

SEQ ID NO: 26461 - DNA, 25 bp, Homo sapien
gggaggcacacacacattacagcgc

SEQ ID NO: 26462 - DNA, 25 bp, Homo sapien
ttaaccaggaaccaggcctaggcca

SEQ ID NO: 26463 - DNA, 25 bp, Homo sapien
cgccaaccgggcaggtgagcacaag

SEQ ID NO: 26464 - DNA, 25 bp, Homo sapien
gaaccttcttactgagagcttatta

SEQ ID NO: 26465 - DNA, 25 bp, Homo sapien
gtgcctgggccatcagaaccttctt

SEQ ID NO: 26466 - DNA, 25 bp, Homo sapien
caagcagggctttgtaaaacgagta

SEQ ID NO: 26467 - DNA, 25 bp, Homo sapien
gtgagcacaagcagggctttgtaaa

SEQ ID NO: 26468 - DNA, 25 bp, Homo sapien
agtgctggcctgagccatagtgcct

SEQ ID NO: 26469 - DNA, 25 bp, Homo sapien
acacacattacagcgccggatgcag

SEQ ID NO: 26470 - DNA, 25 bp, Homo sapien
tgagagcttattaaccaggaaccag

SEQ ID NO: 26471 - DNA, 25 bp, Homo sapien
ctttgtaaaacgagtaggaagctac

SEQ ID NO: 26472 - DNA, 25 bp, Homo sapien
aaaatggagactgggcctgaaaact

SEQ ID NO: 26473 - DNA, 25 bp, Homo sapien
agccaatcgtaagcagccttcagat

SEQ ID NO: 26474 - DNA, 25 bp, Homo sapien
agccacccaggccttagaaatagcc

SEQ ID NO: 26475 - DNA, 25 bp, Homo sapien
gacagaaataagatttaaccctagc

SEQ ID NO: 26476 - DNA, 25 bp, Homo sapien
agtgaaactcaagttggattgtaac

SEQ ID NO: 26477 - DNA, 25 bp, Homo sapien
ttaaccctagccaatcgtaagcagc

SEQ ID NO: 26478 - DNA, 25 bp, Homo sapien
tgaaggctgcccaatttgagatgag

SEQ ID NO: 26479 - DNA, 25 bp, Homo sapien
taaactgcaaacataagtgaaactc

SEQ ID NO: 26480 - DNA, 25 bp, Homo sapien
agaacacttcaataaggtacctcac

SEQ ID NO: 26481 - DNA, 25 bp, Homo sapien
aataggtaatacttaacttggatca

SEQ ID NO: 26482 - DNA, 25 bp, Homo sapien
atttgagatgagtaatcccagccat

SEQ ID NO: 26483 - DNA, 25 bp, Homo sapien
cacatctgcgttcaaggggctggct

SEQ ID NO: 26484 - DNA, 25 bp, Homo sapien
tgtcctgctgaaagatgactcgatc

SEQ ID NO: 26485 - DNA, 25 bp, Homo sapien
tgcacatgggttagccatggctgta

SEQ ID NO: 26486 - DNA, 25 bp, Homo sapien
ctcagctggggcaagcagcttagct

SEQ ID NO: 26487 - DNA, 25 bp, Homo sapien
tgaccgggttccatgctgagcccaa

SEQ ID NO: 26488 - DNA, 25 bp, Homo sapien
tgccagttgggcagacttaatcctc

SEQ ID NO: 26489 - DNA, 25 bp, Homo sapien
tgactcgatcccagataaaacattt

SEQ ID NO: 26490 - DNA, 25 bp, Homo sapien
tccttgcaatggcacaggcacgcca

SEQ ID NO: 26491 - DNA, 25 bp, Homo sapien
aaagcaccgggtttttgcttctgcc

SEQ ID NO: 26492 - DNA, 25 bp, Homo sapien
tcagtgctttagagagagttgttac

SEQ ID NO: 26493 - DNA, 25 bp, Homo sapien
ctaacacaggctgaccgggttccat

SEQ ID NO: 26494 - DNA, 25 bp, Homo sapien
ggtgtagtcgtggtgatgaaaacct

SEQ ID NO: 26495 - DNA, 25 bp, Homo sapien
aggttttcatcaccacgactacacc

SEQ ID NO: 26496 - DNA, 25 bp, Homo sapien
tcccgcatttgcaggggacgtgaaa

SEQ ID NO: 26497 - DNA, 25 bp, Homo sapien
cttcgcacaacggaaaagagatcaa

SEQ ID NO: 26498 - DNA, 25 bp, Homo sapien
gaaagtgcaatactgtgaggaacaa

SEQ ID NO: 26499 - DNA, 25 bp, Homo sapien
tgcagggaggacaatgacccaccat

SEQ ID NO: 26500 - DNA, 25 bp, Homo sapien
tgacccaccatgaaaagagttaaaa

SEQ ID NO: 26501 - DNA, 25 bp, Homo sapien
acacggtggcaattcaagatctttt

SEQ ID NO: 26502 - DNA, 25 bp, Homo sapien
aagagatcaactcccgcatttgcag

SEQ ID NO: 26503 - DNA, 25 bp, Homo sapien
aagatcttttggatgccgtgagcgt

SEQ ID NO: 26504 - DNA, 25 bp, Homo sapien
gaagcctcatctctggaagccggga

SEQ ID NO: 26505 - DNA, 25 bp, Homo sapien
agctcatcctgcagaaacgcacctg

SEQ ID NO: 26506 - DNA, 25 bp, Homo sapien
tgccgtgagcgtgttctttaattaa

SEQ ID NO: 26507 - DNA, 25 bp, Homo sapien
ctacagagaaaattctgctaggacc

SEQ ID NO: 26508 - DNA, 25 bp, Homo sapien
agcatgtctaaaacagaactttttt

SEQ ID NO: 26509 - DNA, 25 bp, Homo sapien
atctccaatgtagcatgtctaaaac

SEQ ID NO: 26510 - DNA, 25 bp, Homo sapien
attaggaagtgaatagacatctcca

SEQ ID NO: 26511 - DNA, 25 bp, Homo sapien
tctgactcttacatccaactgctaa

SEQ ID NO: 26512 - DNA, 25 bp, Homo sapien
aaatcggttgtgtgtctgtgcattg

SEQ ID NO: 26513 - DNA, 25 bp, Homo sapien
agagaaaattctgctaggaccctac

SEQ ID NO: 26514 - DNA, 25 bp, Homo sapien
ttttgagattgagtgcttttcctac

SEQ ID NO: 26515 - DNA, 25 bp, Homo sapien
tgctaggaccctacaaaatcggttg

SEQ ID NO: 26516 - DNA, 25 bp, Homo sapien
atgtgtgtccctacgaaatgggttc

SEQ ID NO: 26517 - DNA, 25 bp, Homo sapien
tgtgcacgtgtgtccctatgaaatg

SEQ ID NO: 26518 - DNA, 25 bp, Homo sapien
aatacgccatcaaggaagtagaaaa

SEQ ID NO: 26519 - DNA, 25 bp, Homo sapien
gtacttcaaaatacgccatcaagga

SEQ ID NO: 26520 - DNA, 25 bp, Homo sapien
ggagccttacacagtatgcaaaaac

SEQ ID NO: 26521 - DNA, 25 bp, Homo sapien
gaagtagaaaagtggccaggcatag

SEQ ID NO: 26522 - DNA, 25 bp, Homo sapien
atacaagagaatactggagccttac

SEQ ID NO: 26523 - DNA, 25 bp, Homo sapien
tcaacaaatggaacaaatgactatc

SEQ ID NO: 26524 - DNA, 25 bp, Homo sapien
gactatccacatacaagagaatact

SEQ ID NO: 26525 - DNA, 25 bp, Homo sapien
aagtgacaagaggaaatataggtaa

SEQ ID NO: 26526 - DNA, 25 bp, Homo sapien
cagcctaaacagtgtagtgagacct

SEQ ID NO: 26527 - DNA, 25 bp, Homo sapien
caaaacagtattacaaggaaggaat

SEQ ID NO: 26528 - DNA, 25 bp, Homo sapien
tcaattgattttcagcaagggtggc

SEQ ID NO: 26529 - DNA, 25 bp, Homo sapien
aggtaccaagatgtgagactgttta

SEQ ID NO: 26530 - DNA, 25 bp, Homo sapien
gcctgctggccaggagcaaacagtc

SEQ ID NO: 26531 - DNA, 25 bp, Homo sapien
cacgaggtccttggcagtgtctttt

SEQ ID NO: 26532 - DNA, 25 bp, Homo sapien
ctagggaaaaattctgccaagaaag

SEQ ID NO: 26533 - DNA, 25 bp, Homo sapien
gggacatttggtgaggtaccaagat

SEQ ID NO: 26534 - DNA, 25 bp, Homo sapien
ccaacagttaaagcttagtgtagtc

SEQ ID NO: 26535 - DNA, 25 bp, Homo sapien
caaacgtgtcggtttctccagtgtc

SEQ ID NO: 26536 - DNA, 25 bp, Homo sapien
tccggacacaggcacgaggtccttg

SEQ ID NO: 26537 - DNA, 25 bp, Homo sapien
tgccaagaaagaacccaacagttaa

SEQ ID NO: 26538 - DNA, 25 bp, Homo sapien
cacagagcagctgggtccggacaca

SEQ ID NO: 26539 - DNA, 25 bp, Homo sapien
gcctagaacgcctgcagcacagagc

SEQ ID NO: 26540 - DNA, 25 bp, Homo sapien
gaatttagtcatgggtaggtgacac

SEQ ID NO: 26541 - DNA, 25 bp, Homo sapien
aaccagcctcccttttgtcagctta

SEQ ID NO: 26542 - DNA, 25 bp, Homo sapien
agtctgacccatagtgttcaacagc

SEQ ID NO: 26543 - DNA, 25 bp, Homo sapien
aacagctgctgttagttactctcct

SEQ ID NO: 26544 - DNA, 25 bp, Homo sapien
acacaaagctagtgtggtgtaggag

SEQ ID NO: 26545 - DNA, 25 bp, Homo sapien
ctcaaccatgggagggtctcagatt

SEQ ID NO: 26546 - DNA, 25 bp, Homo sapien
ggaggtcagagcttcagcatatgaa

SEQ ID NO: 26547 - DNA, 25 bp, Homo sapien
ggaaggcatttgtgtgtaagtgact

SEQ ID NO: 26548 - DNA, 25 bp, Homo sapien
gtaagtgactggtggcctcaaccat

SEQ ID NO: 26549 - DNA, 25 bp, Homo sapien
gtccctgttggaggtcagagcttca

SEQ ID NO: 26550 - DNA, 25 bp, Homo sapien
atgggagggtctcagatttcaacat

SEQ ID NO: 26551 - DNA, 25 bp, Homo sapien
tgtcaggagactaacatctttcaca

SEQ ID NO: 26552 - DNA, 25 bp, Homo sapien
cagccgctaaagtgttggctttact

SEQ ID NO: 26553 - DNA, 25 bp, Homo sapien
tgtcccagaagaggttcaaacaatt

SEQ ID NO: 26554 - DNA, 25 bp, Homo sapien
caattggtagagagattgctgcaat

SEQ ID NO: 26555 - DNA, 25 bp, Homo sapien
attttaccaagtaggcaaatttgga

SEQ ID NO: 26556 - DNA, 25 bp, Homo sapien
acgaagacagtattcaaggtaagat

SEQ ID NO: 26557 - DNA, 25 bp, Homo sapien
acaagtattgatttggggattaaca

SEQ ID NO: 26558 - DNA, 25 bp, Homo sapien
tggtggattccatcagccgctaaag

SEQ ID NO: 26559 - DNA, 25 bp, Homo sapien
ttaccagattgtcccagaagaggtt

SEQ ID NO: 26560 - DNA, 25 bp, Homo sapien
gtggcttaggatgtagtttaatatc

SEQ ID NO: 26561 - DNA, 25 bp, Homo sapien
taacaaagtgttcctggtggattcc

SEQ ID NO: 26562 - DNA, 25 bp, Homo sapien
tgctttaagaagagaacctactgtt

SEQ ID NO: 26563 - DNA, 25 bp, Homo sapien
ataaaggattggttgctaaaggtaa

SEQ ID NO: 26564 - DNA, 25 bp, Homo sapien
ctggagtagtgttagtttagaagca

SEQ ID NO: 26565 - DNA, 25 bp, Homo sapien
tcaaaggttgacatagggaaagata

SEQ ID NO: 26566 - DNA, 25 bp, Homo sapien
cacataggtgaaagatgttgattac

SEQ ID NO: 26567 - DNA, 25 bp, Homo sapien
gataagggaaatgatatgctggttc

SEQ ID NO: 26568 - DNA, 25 bp, Homo sapien
gctttgcttatgaaggtgtaatcac

SEQ ID NO: 26569 - DNA, 25 bp, Homo sapien
ttgtcatacagcagagctaactatt

SEQ ID NO: 26570 - DNA, 25 bp, Homo sapien
taatggaaagatgttatgctgtatc

SEQ ID NO: 26571 - DNA, 25 bp, Homo sapien
ggttctgggcagagaattaacattg

SEQ ID NO: 26572 - DNA, 25 bp, Homo sapien
ctataggggacattacattcagtac

SEQ ID NO: 26573 - DNA, 25 bp, Homo sapien
caaggactcccgctatgtaatatac

SEQ ID NO: 26574 - DNA, 25 bp, Homo sapien
tttagggaccactggcccagaacac

SEQ ID NO: 26575 - DNA, 25 bp, Homo sapien
gccctggaatataggcctgattcag

SEQ ID NO: 26576 - DNA, 25 bp, Homo sapien
gatggcactgcctcagaatcacaga

SEQ ID NO: 26577 - DNA, 25 bp, Homo sapien
atgattatcaaggaagcaaagcttc

SEQ ID NO: 26578 - DNA, 25 bp, Homo sapien
tcacagaataactgctggtggggat

SEQ ID NO: 26579 - DNA, 25 bp, Homo sapien
aatttactaaacacagcagcctgat

SEQ ID NO: 26580 - DNA, 25 bp, Homo sapien
atcccaggtaaaagagtcttggcta

SEQ ID NO: 26581 - DNA, 25 bp, Homo sapien
gcaattatagcaatggccctggaat

SEQ ID NO: 26582 - DNA, 25 bp, Homo sapien
ttagataccggcctgacataggaaa

SEQ ID NO: 26583 - DNA, 25 bp, Homo sapien
ttgcaaaggttgctcagtcaaaacc

SEQ ID NO: 26584 - DNA, 25 bp, Homo sapien
aacatgcagcgcttcctagcaggtc

SEQ ID NO: 26585 - DNA, 25 bp, Homo sapien
ttggacactcccagcctagaacttg

SEQ ID NO: 26586 - DNA, 25 bp, Homo sapien
tgacctcaccagtaaggcagctaag

SEQ ID NO: 26587 - DNA, 25 bp, Homo sapien
ctagcaggtccttggtctatgcagc

SEQ ID NO: 26588 - DNA, 25 bp, Homo sapien
tgaaggtgatgacttggacactccc

SEQ ID NO: 26589 - DNA, 25 bp, Homo sapien
gggagtggaaatgctctcaacgttt

SEQ ID NO: 26590 - DNA, 25 bp, Homo sapien
ttggcccacagaaaggtttacatca

SEQ ID NO: 26591 - DNA, 25 bp, Homo sapien
cattgaagccacacggggctgagtc

SEQ ID NO: 26592 - DNA, 25 bp, Homo sapien
tattgcaaggattgagtgagaacat

SEQ ID NO: 26593 - DNA, 25 bp, Homo sapien
ctgtctttaaggtgctagctgttca

SEQ ID NO: 26594 - DNA, 25 bp, Homo sapien
ctatgcagctttacggtgaaggtga

SEQ ID NO: 26595 - DNA, 25 bp, Homo sapien
atagaccaaggacctgctaggaagc

SEQ ID NO: 26596 - DNA, 25 bp, Homo sapien
gtctggaaaatgaacagctagcacc

SEQ ID NO: 26597 - DNA, 25 bp, Homo sapien
agctagcaccttaaagacagaatgt

SEQ ID NO: 26598 - DNA, 25 bp, Homo sapien
atttccactcccagacaacgagggc

SEQ ID NO: 26599 - DNA, 25 bp, Homo sapien
aatggggctcagacaaggcacaaaa

SEQ ID NO: 26600 - DNA, 25 bp, Homo sapien
caacgagggctgatgtaaacctttc

SEQ ID NO: 26601 - DNA, 25 bp, Homo sapien
ttcaccgtaaagctgcatagaccaa

SEQ ID NO: 26602 - DNA, 25 bp, Homo sapien
tttggttgaaacgttgagagcattt

SEQ ID NO: 26603 - DNA, 25 bp, Homo sapien
ttagctgccttactggtgaggtcaa

SEQ ID NO: 26604 - DNA, 25 bp, Homo sapien
aggcacaaaacctagggtcagactc

SEQ ID NO: 26605 - DNA, 25 bp, Homo sapien
ccaagttctaggctgggagtgtcca

SEQ ID NO: 26606 - DNA, 25 bp, Homo sapien
tcagccctacggacagcagagttac

SEQ ID NO: 26607 - DNA, 25 bp, Homo sapien
tggttatagccagtccacggacact

SEQ ID NO: 26608 - DNA, 25 bp, Homo sapien
agttacagtggttatagccagtcca

SEQ ID NO: 26609 - DNA, 25 bp, Homo sapien
tacggacagcagagttacagtggtt

SEQ ID NO: 26610 - DNA, 25 bp, Homo sapien
cagtccacggacacttcaggctatg

SEQ ID NO: 26611 - DNA, 25 bp, Homo sapien
gggtggtcacgccatgttttctgat

SEQ ID NO: 26612 - DNA, 25 bp, Homo sapien
tcttcttatggccagagccagaaca

SEQ ID NO: 26613 - DNA, 25 bp, Homo sapien
tgttttctgatcacgctggttttcc

SEQ ID NO: 26614 - DNA, 25 bp, Homo sapien
cagagcagctattcttcttatggcc

SEQ ID NO: 26615 - DNA, 25 bp, Homo sapien
acttcaggctatggccagagcagct

SEQ ID NO: 26616 - DNA, 25 bp, Homo sapien
agcagtcagccctacggacagcaga

SEQ ID NO: 26617 - DNA, 25 bp, Homo sapien
gaaaacatggcgtgaccacccttgc

SEQ ID NO: 26618 - DNA, 25 bp, Homo sapien
aggaaaaccagcgtgatcagaaaac

SEQ ID NO: 26619 - DNA, 25 bp, Homo sapien
gaaaaccagcgtgatcagaaaacat

SEQ ID NO: 26620 - DNA, 25 bp, Homo sapien
taaaaggaaaaccagcgtgatcaga

SEQ ID NO: 26621 - DNA, 25 bp, Homo sapien
aaaggaaaaccagcgtgatcagaaa

SEQ ID NO: 26622 - DNA, 25 bp, Homo sapien
tgatcagaaaacatggcgtgaccac

SEQ ID NO: 26623 - DNA, 25 bp, Homo sapien
atcagaaaacatggcgtgaccaccc

SEQ ID NO: 26624 - DNA, 25 bp, Homo sapien
cgtgatcagaaaacatggcgtgacc

SEQ ID NO: 26625 - DNA, 25 bp, Homo sapien
agcgtgatcagaaaacatggcgtga

SEQ ID NO: 26626 - DNA, 25 bp, Homo sapien
ccagcgtgatcagaaaacatggcgt

SEQ ID NO: 26627 - DNA, 25 bp, Homo sapien
aaaaccagcgtgatcagaaaacatg

SEQ ID NO: 26628 - DNA, 25 bp, Homo sapien
accactgtaactctgctgtccgtag

SEQ ID NO: 26629 - DNA, 25 bp, Homo sapien
actgtaactctgctgtccgtagggc

SEQ ID NO: 26630 - DNA, 25 bp, Homo sapien
ctgaagtgtccgtggactggctata

SEQ ID NO: 26631 - DNA, 25 bp, Homo sapien
agtgtccgtggactggctataacca

SEQ ID NO: 26632 - DNA, 25 bp, Homo sapien
gtaactctgctgtccgtagggctga

SEQ ID NO: 26633 - DNA, 25 bp, Homo sapien
ctgctgtccgtagggctgactgctc

SEQ ID NO: 26634 - DNA, 25 bp, Homo sapien
gccatagcctgaagtgtccgtggac

SEQ ID NO: 26635 - DNA, 25 bp, Homo sapien
actctgctgtccgtagggctgactg

SEQ ID NO: 26636 - DNA, 25 bp, Homo sapien
cgtggactggctataaccactgtaa

SEQ ID NO: 26637 - DNA, 25 bp, Homo sapien
catagcctgaagtgtccgtggactg

SEQ ID NO: 26638 - DNA, 25 bp, Homo sapien
ctgtccgtagggctgactgctctgc

SEQ ID NO: 26639 - DNA, 25 bp, Homo sapien
agaattgcacacttttcccagctga

SEQ ID NO: 26640 - DNA, 25 bp, Homo sapien
ttcaccatctagcactccagtctgt

SEQ ID NO: 26641 - DNA, 25 bp, Homo sapien
ttggctggccagctagaagtatctt

SEQ ID NO: 26642 - DNA, 25 bp, Homo sapien
caccgcactcgactgagcatcattt

SEQ ID NO: 26643 - DNA, 25 bp, Homo sapien
ttcacttgctcttgggccctttcac

SEQ ID NO: 26644 - DNA, 25 bp, Homo sapien
tcccagctgattaactatcctttag

SEQ ID NO: 26645 - DNA, 25 bp, Homo sapien
ctccagtctgtaaaggaaaatattt

SEQ ID NO: 26646 - DNA, 25 bp, Homo sapien
atttcagactgaatgagatataatt

SEQ ID NO: 26647 - DNA, 25 bp, Homo sapien
gggaaatgctaacccacactggctt

SEQ ID NO: 26648 - DNA, 25 bp, Homo sapien
aatttgtcatgggaaatgctaaccc

SEQ ID NO: 26649 - DNA, 25 bp, Homo sapien
cccagttgttccagcagaattgcac

SEQ ID NO: 26650 - DNA, 25 bp, Homo sapien
atgaaatgaagagagaattgcagga

SEQ ID NO: 26651 - DNA, 25 bp, Homo sapien
cttttatagtgtacaactcagagtt

SEQ ID NO: 26652 - DNA, 25 bp, Homo sapien
cctaatgcagtagtccaggtgagat

SEQ ID NO: 26653 - DNA, 25 bp, Homo sapien
acttgataatttgggtaggggtcta

SEQ ID NO: 26654 - DNA, 25 bp, Homo sapien
tccaggtgagatccaaaggcagcca

SEQ ID NO: 26655 - DNA, 25 bp, Homo sapien
attgcaggacttgataatttgggta

SEQ ID NO: 26656 - DNA, 25 bp, Homo sapien
ctggcccagagttaagggttttata

SEQ ID NO: 26657 - DNA, 25 bp, Homo sapien
atagagagaatcacatgatcagatt

SEQ ID NO: 26658 - DNA, 25 bp, Homo sapien
agggttttatagagagaatcacatg

SEQ ID NO: 26659 - DNA, 25 bp, Homo sapien
cagccagaactaggttagtggcagt

SEQ ID NO: 26660 - DNA, 25 bp, Homo sapien
tggagacagagagacctgccctaat

SEQ ID NO: 26661 - DNA, 25 bp, Homo sapien
gaccagccagcaagttgggaattgt

SEQ ID NO: 26662 - DNA, 25 bp, Homo sapien
cattaagatagatttcaggcagctt

SEQ ID NO: 26663 - DNA, 25 bp, Homo sapien
ttgtggaccaagaactctgcggctc

SEQ ID NO: 26664 - DNA, 25 bp, Homo sapien
atggtggatggtgtctcaatgatga

SEQ ID NO: 26665 - DNA, 25 bp, Homo sapien
attaggtactcacatgggctttcca

SEQ ID NO: 26666 - DNA, 25 bp, Homo sapien
gagagagaggtacattaagatagat

SEQ ID NO: 26667 - DNA, 25 bp, Homo sapien
agagggtgggaattccatcagccaa

SEQ ID NO: 26668 - DNA, 25 bp, Homo sapien
acagagatggtgcagttgtgtcctc

SEQ ID NO: 26669 - DNA, 25 bp, Homo sapien
atgcaaagatgcctcataaacttag

SEQ ID NO: 26670 - DNA, 25 bp, Homo sapien
aatgatgagaatagcgacagagatg

SEQ ID NO: 26671 - DNA, 25 bp, Homo sapien
cctgctagcctgttgtggaccaaga

SEQ ID NO: 26672 - DNA, 25 bp, Homo sapien
aaattcgttctgtgccctgaccttc

SEQ ID NO: 26673 - DNA, 25 bp, Homo sapien
tgctgccgtcctgtttctgagtctc

SEQ ID NO: 26674 - DNA, 25 bp, Homo sapien
gcccatggggtaccttgtctgcact

SEQ ID NO: 26675 - DNA, 25 bp, Homo sapien
gtccagagactataacaagatccca

SEQ ID NO: 26676 - DNA, 25 bp, Homo sapien
tcacctctagaggagaccatgactc

SEQ ID NO: 26677 - DNA, 25 bp, Homo sapien
acaggctccttgtgaaagaactcga

SEQ ID NO: 26678 - DNA, 25 bp, Homo sapien
ccaccagggtcaagaatgttaactc

SEQ ID NO: 26679 - DNA, 25 bp, Homo sapien
attggggaccttgaatcctctgtgc

SEQ ID NO: 26680 - DNA, 25 bp, Homo sapien
ctgcagtctcgggagctccaggatc

SEQ ID NO: 26681 - DNA, 25 bp, Homo sapien
cttaatatgactgggatctggggat

SEQ ID NO: 26682 - DNA, 25 bp, Homo sapien
ttaatctggaacagccatggtgatg

SEQ ID NO: 26683 - DNA, 25 bp, Homo sapien
atagccagcttacaacaagatgcat

SEQ ID NO: 26684 - DNA, 25 bp, Homo sapien
tgaataaaaagactgcgttcctgtc

SEQ ID NO: 26685 - DNA, 25 bp, Homo sapien
cccaggctgcttgtgtgaacaatgc

SEQ ID NO: 26686 - DNA, 25 bp, Homo sapien
caggagtcctagacagccactaatc

SEQ ID NO: 26687 - DNA, 25 bp, Homo sapien
gagatgctaccatgtgggcaacttc

SEQ ID NO: 26688 - DNA, 25 bp, Homo sapien
tcttttggcaagcattcccaggccc

SEQ ID NO: 26689 - DNA, 25 bp, Homo sapien
tgagttgatagcatgcatagccagc

SEQ ID NO: 26690 - DNA, 25 bp, Homo sapien
atgcataagcaagttgcagagaagc

SEQ ID NO: 26691 - DNA, 25 bp, Homo sapien
cctaatgttgttggcactgggcact

SEQ ID NO: 26692 - DNA, 25 bp, Homo sapien
tgaattggcagataactaggcacat

SEQ ID NO: 26693 - DNA, 25 bp, Homo sapien
aggctgggtgattccactgatccct

SEQ ID NO: 26694 - DNA, 25 bp, Homo sapien
gtttcagagcaaaccttgaaaagct

SEQ ID NO: 26695 - DNA, 25 bp, Homo sapien
tgcaaagcagtatttagattgattc

SEQ ID NO: 26696 - DNA, 25 bp, Homo sapien
tagactacattgagtggtgtaattt

SEQ ID NO: 26697 - DNA, 25 bp, Homo sapien
aattgccaaatatgttaagcctaag

SEQ ID NO: 26698 - DNA, 25 bp, Homo sapien
tggcaactaagttcagaaaacatgt

SEQ ID NO: 26699 - DNA, 25 bp, Homo sapien
ttgcatggtttgtaagtttcagagc

SEQ ID NO: 26700 - DNA, 25 bp, Homo sapien
tacacagtccttaggctggtaagaa

SEQ ID NO: 26701 - DNA, 25 bp, Homo sapien
cagaaaacatgtaaaagaatggcta

SEQ ID NO: 26702 - DNA, 25 bp, Homo sapien
aggctggtaagaagtagtagtaaat

SEQ ID NO: 26703 - DNA, 25 bp, Homo sapien
aaaaatatagggattagtgattgtc

SEQ ID NO: 26704 - DNA, 25 bp, Homo sapien
agtaatttggaagatctcctacaga

SEQ ID NO: 26705 - DNA, 25 bp, Homo sapien
ggccgccagctgttgtgtctcacct

SEQ ID NO: 26706 - DNA, 25 bp, Homo sapien
cagccctcagggaaaaaatttacat

SEQ ID NO: 26707 - DNA, 25 bp, Homo sapien
ataccagtcaatagaagagatagtg

SEQ ID NO: 26708 - DNA, 25 bp, Homo sapien
atttacatatcagtggcccagcatc

SEQ ID NO: 26709 - DNA, 25 bp, Homo sapien
tgcatgaaggttatagcgaatcacc

SEQ ID NO: 26710 - DNA, 25 bp, Homo sapien
atcccagctcacaggtttgatgatg

SEQ ID NO: 26711 - DNA, 25 bp, Homo sapien
tgtgacatttcactgggccaaacac

SEQ ID NO: 26712 - DNA, 25 bp, Homo sapien
caaacacctaaaaaatgggaggctc

SEQ ID NO: 26713 - DNA, 25 bp, Homo sapien
cctgggtgctttctgccaacaagtt

SEQ ID NO: 26714 - DNA, 25 bp, Homo sapien
cagctaggcttagaaaaaggagtaa

SEQ ID NO: 26715 - DNA, 25 bp, Homo sapien
tcaggagaaagttgtaacatgtcac

SEQ ID NO: 26716 - DNA, 25 bp, Homo sapien
ggcctcttaaggctaaggcagagaa

SEQ ID NO: 26717 - DNA, 25 bp, Homo sapien
atgaggtctccctatcagagctgcc

SEQ ID NO: 26718 - DNA, 25 bp, Homo sapien
ttcccagcgggatctctcaagtagc

SEQ ID NO: 26719 - DNA, 25 bp, Homo sapien
ctcccaagacagcacaggtggaagc

SEQ ID NO: 26720 - DNA, 25 bp, Homo sapien
agctcagctcgcaagtctggcatct

SEQ ID NO: 26721 - DNA, 25 bp, Homo sapien
ctccacgtggcctgtccatgaggtc

SEQ ID NO: 26722 - DNA, 25 bp, Homo sapien
gcagagaactggcacagccttactc

SEQ ID NO: 26723 - DNA, 25 bp, Homo sapien
gtagtgattcacagctcccaagaca

SEQ ID NO: 26724 - DNA, 25 bp, Homo sapien
gttggcggacgcagtttagttccca

SEQ ID NO: 26725 - DNA, 25 bp, Homo sapien
tggaatgcccaagacagctcagctc

SEQ ID NO: 26726 - DNA, 25 bp, Homo sapien
agggctgggctctttctccgtgtat

SEQ ID NO: 26727 - DNA, 25 bp, Homo sapien
cctaccagccgacttgacgggaagt

SEQ ID NO: 26728 - DNA, 25 bp, Homo sapien
aggggaagggcctttcctgctgcct

SEQ ID NO: 26729 - DNA, 25 bp, Homo sapien
ttgagcctaggctcgaatccctctc

SEQ ID NO: 26730 - DNA, 25 bp, Homo sapien
tggattccaacctggctgaagactg

SEQ ID NO: 26731 - DNA, 25 bp, Homo sapien
ttgctgtttttactgtgggacaaaa

SEQ ID NO: 26732 - DNA, 25 bp, Homo sapien
ccgcacctggagtaggtaatgccat

SEQ ID NO: 26733 - DNA, 25 bp, Homo sapien
tgagccgagctgcaccactgtgctc

SEQ ID NO: 26734 - DNA, 25 bp, Homo sapien
tctcacgtgagagggcctgaagatt

SEQ ID NO: 26735 - DNA, 25 bp, Homo sapien
atttctggtggattccaacctggct

SEQ ID NO: 26736 - DNA, 25 bp, Homo sapien
gtaatgccatgtggtgacgtgaatg

SEQ ID NO: 26737 - DNA, 25 bp, Homo sapien
ctgcccacaccgcactaggggaagg

SEQ ID NO: 26738 - DNA, 25 bp, Homo sapien
gcttgatctgccttaatatgccata

SEQ ID NO: 26739 - DNA, 25 bp, Homo sapien
aacagtcacaatatctgagaagata

SEQ ID NO: 26740 - DNA, 25 bp, Homo sapien
aaaaaagcataacaagggaatcttg

SEQ ID NO: 26741 - DNA, 25 bp, Homo sapien
caaaagtagataagatcatcatgtc

SEQ ID NO: 26742 - DNA, 25 bp, Homo sapien
aagatataaaataactgccaaagac

SEQ ID NO: 26743 - DNA, 25 bp, Homo sapien
ctccagtgcctgctacaccaagtgt

SEQ ID NO: 26744 - DNA, 25 bp, Homo sapien
ctaatatttggatatacagcactac

SEQ ID NO: 26745 - DNA, 25 bp, Homo sapien
atcagcagcacctaggagtttatca

SEQ ID NO: 26746 - DNA, 25 bp, Homo sapien
gtgtgaaccaccattcctggcttga

SEQ ID NO: 26747 - DNA, 25 bp, Homo sapien
tgccaaagacagtccaaccaatcat

SEQ ID NO: 26748 - DNA, 25 bp, Homo sapien
ctctgtagactacagcatcagcagc

SEQ ID NO: 26749 - DNA, 25 bp, Homo sapien
aagtgcgaaacctgagggccttaat

SEQ ID NO: 26750 - DNA, 25 bp, Homo sapien
tgccagccctctccagtgaggagac

SEQ ID NO: 26751 - DNA, 25 bp, Homo sapien
taagttctggggaaataagtgcgaa

SEQ ID NO: 26752 - DNA, 25 bp, Homo sapien
ggcaagcatggtctagagtttgact

SEQ ID NO: 26753 - DNA, 25 bp, Homo sapien
gtaaacaaataaaccgcagctgaga

SEQ ID NO: 26754 - DNA, 25 bp, Homo sapien
aaaggagggcacttcaggcctgatt

SEQ ID NO: 26755 - DNA, 25 bp, Homo sapien
atatttgtgctgagagagccaagtg

SEQ ID NO: 26756 - DNA, 25 bp, Homo sapien
caagctcttcttggcagaccggcag

SEQ ID NO: 26757 - DNA, 25 bp, Homo sapien
gaagcatgcaaaagctcaaagtttc

SEQ ID NO: 26758 - DNA, 25 bp, Homo sapien
gcctggagtgcaaagacctgttata

SEQ ID NO: 26759 - DNA, 25 bp, Homo sapien
gtcagactggcacctgagcagccac

SEQ ID NO: 26760 - DNA, 25 bp, Homo sapien
agcagagcagatccctattaaatct

SEQ ID NO: 26761 - DNA, 25 bp, Homo sapien
aaatatgagcactttcggttttcac

SEQ ID NO: 26762 - DNA, 25 bp, Homo sapien
ttctggtgctggtaacacacccatc

SEQ ID NO: 26763 - DNA, 25 bp, Homo sapien
taatggcaaaaacaggattatactt

SEQ ID NO: 26764 - DNA, 25 bp, Homo sapien
atcagggaataccaaacccagtaac

SEQ ID NO: 26765 - DNA, 25 bp, Homo sapien
tgtgccctagaatcagatttgctcc

SEQ ID NO: 26766 - DNA, 25 bp, Homo sapien
ccactggggcattatcttccgttaa

SEQ ID NO: 26767 - DNA, 25 bp, Homo sapien
acctcaaggtagagttcaaagaatt

SEQ ID NO: 26768 - DNA, 25 bp, Homo sapien
aaaataggccagtgaataattactc

SEQ ID NO: 26769 - DNA, 25 bp, Homo sapien
tagttcatggatactgaagccatcc

SEQ ID NO: 26770 - DNA, 25 bp, Homo sapien
ttgagaaggagtgatattattaaat

SEQ ID NO: 26771 - DNA, 25 bp, Homo sapien
caggttcctcgagggggctcacgaa

SEQ ID NO: 26772 - DNA, 25 bp, Homo sapien
gcaacgcgaaataaatgggcccaga

SEQ ID NO: 26773 - DNA, 25 bp, Homo sapien
tcctcccggcggtgggtgccgccta

SEQ ID NO: 26774 - DNA, 25 bp, Homo sapien
gcgagtgtgcgcgagctaccgcttc

SEQ ID NO: 26775 - DNA, 25 bp, Homo sapien
gtactgggcggtaggcccgctctca

SEQ ID NO: 26776 - DNA, 25 bp, Homo sapien
cccgcaacgcgaaataaatgggccc

SEQ ID NO: 26777 - DNA, 25 bp, Homo sapien
actggatgcggagaccaggttcctc

SEQ ID NO: 26778 - DNA, 25 bp, Homo sapien
taactggatgcggagaccaggttcc

SEQ ID NO: 26779 - DNA, 25 bp, Homo sapien
tgtgcgcgagctaccgcttcacttt

SEQ ID NO: 26780 - DNA, 25 bp, Homo sapien
agtgtgcgcgagctaccgcttcact

SEQ ID NO: 26781 - DNA, 25 bp, Homo sapien
acgcgaaataaatgggcccagaccc

SEQ ID NO: 26782 - DNA, 25 bp, Homo sapien
tccatggactgacaatagaaacacc

SEQ ID NO: 26783 - DNA, 25 bp, Homo sapien
acaggagtttgctgacttgaggctc

SEQ ID NO: 26784 - DNA, 25 bp, Homo sapien
tgagtgagttcgcaaacaggagttt

SEQ ID NO: 26785 - DNA, 25 bp, Homo sapien
tgagccatgaggattcagcatctcc

SEQ ID NO: 26786 - DNA, 25 bp, Homo sapien
ttcctgggactcaaggcacatcctc

SEQ ID NO: 26787 - DNA, 25 bp, Homo sapien
tcagaaccatctgcacaggctaaac

SEQ ID NO: 26788 - DNA, 25 bp, Homo sapien
cttgaggctcggtgccagcccatct

SEQ ID NO: 26789 - DNA, 25 bp, Homo sapien
acaggctaaacagagatcggttctt

SEQ ID NO: 26790 - DNA, 25 bp, Homo sapien
ccaagatgttcagcctgagtgagtt

SEQ ID NO: 26791 - DNA, 25 bp, Homo sapien
gtgctacagcgcctttgcatggcca

SEQ ID NO: 26792 - DNA, 25 bp, Homo sapien
atcttagatatggagagatgtagcg

SEQ ID NO: 26793 - DNA, 25 bp, Homo sapien
ttaatgacctgatgtgatttgggga

SEQ ID NO: 26794 - DNA, 25 bp, Homo sapien
gatcaagctgcagtcacccatgtaa

SEQ ID NO: 26795 - DNA, 25 bp, Homo sapien
gtcgattgcagagaagaaaattcac

SEQ ID NO: 26796 - DNA, 25 bp, Homo sapien
tgcgcccggcgttttgtgactcttt

SEQ ID NO: 26797 - DNA, 25 bp, Homo sapien
atagaaattccttgagggccagggt

SEQ ID NO: 26798 - DNA, 25 bp, Homo sapien
gaggcactcagtaaattggatgaat

SEQ ID NO: 26799 - DNA, 25 bp, Homo sapien
ccatgtaaatatcctgctcccagaa

SEQ ID NO: 26800 - DNA, 25 bp, Homo sapien
gtgactcttttgtgcccaacatcct

SEQ ID NO: 26801 - DNA, 25 bp, Homo sapien
cactagtaccacacagatcaagctg

SEQ ID NO: 26802 - DNA, 25 bp, Homo sapien
gatttggggaattgtcgattgcaga

SEQ ID NO: 26803 - DNA, 25 bp, Homo sapien
gtttcccactagtaccacacagatc

SEQ ID NO: 26804 - DNA, 25 bp, Homo sapien
accgagggagactgctctgccacta

SEQ ID NO: 26805 - DNA, 25 bp, Homo sapien
cacgctggttggtcctgctcctagg

SEQ ID NO: 26806 - DNA, 25 bp, Homo sapien
cttcaggaagcatcaggactaacta

SEQ ID NO: 26807 - DNA, 25 bp, Homo sapien
ctagtgtaggattatctggagcttt

SEQ ID NO: 26808 - DNA, 25 bp, Homo sapien
ctatgctgggatgtgtccgtgacac

SEQ ID NO: 26809 - DNA, 25 bp, Homo sapien
aaacaactgatttagagcaaacttc

SEQ ID NO: 26810 - DNA, 25 bp, Homo sapien
aagctagaggtcaaagcgcctccac

SEQ ID NO: 26811 - DNA, 25 bp, Homo sapien
ggtccctgccatgcggttgagaact

SEQ ID NO: 26812 - DNA, 25 bp, Homo sapien
aaagagtgaggtctcctgctccctt

SEQ ID NO: 26813 - DNA, 25 bp, Homo sapien
aggcacaaaaaagcaacgccaaatc

SEQ ID NO: 26814 - DNA, 25 bp, Homo sapien
ttggtcaatagatgcaaacaactga

SEQ ID NO: 26815 - DNA, 25 bp, Homo sapien
ctccatgtaaagaccaacataacag

SEQ ID NO: 26816 - DNA, 25 bp, Homo sapien
aaagaccaacataacagagcctgag

SEQ ID NO: 26817 - DNA, 25 bp, Homo sapien
caccgcaccctgtcaagatttttct

SEQ ID NO: 26818 - DNA, 25 bp, Homo sapien
agccacactaaaccctgccaatttt

SEQ ID NO: 26819 - DNA, 25 bp, Homo sapien
cagccacactaaaccctgccaattt

SEQ ID NO: 26820 - DNA, 25 bp, Homo sapien
atattgtccaggctgccttcaaacc

SEQ ID NO: 26821 - DNA, 25 bp, Homo sapien
tgtaaagaccaacataacagagcct

SEQ ID NO: 26822 - DNA, 25 bp, Homo sapien
gtttttcctgtttgcgccctcaatc

SEQ ID NO: 26823 - DNA, 25 bp, Homo sapien
gtgatctcggcccgctggaaccttc

SEQ ID NO: 26824 - DNA, 25 bp, Homo sapien
ttgcgccctcaatctttctctgtct

SEQ ID NO: 26825 - DNA, 25 bp, Homo sapien
gaaagtcaggctctccagccacact

SEQ ID NO: 26826 - DNA, 25 bp, Homo sapien
ccaaggcagcaaattagaatcatgt

SEQ ID NO: 26827 - DNA, 25 bp, Homo sapien
accaacctgggaatactgtctcatg

SEQ ID NO: 26828 - DNA, 25 bp, Homo sapien
ccctaggaccttacatgttcaaatg

SEQ ID NO: 26829 - DNA, 25 bp, Homo sapien
caatataaaacacgaagacacaaac

SEQ ID NO: 26830 - DNA, 25 bp, Homo sapien
ttcttagctccaaggcagtacaaaa

SEQ ID NO: 26831 - DNA, 25 bp, Homo sapien
atttgcaatttgaagggactgagcc

SEQ ID NO: 26832 - DNA, 25 bp, Homo sapien
aggagattggttggatttggcctat

SEQ ID NO: 26833 - DNA, 25 bp, Homo sapien
aatgattactgaattaggcctagca

SEQ ID NO: 26834 - DNA, 25 bp, Homo sapien
tcatcgaaagaacaaacagaaaggg

SEQ ID NO: 26835 - DNA, 25 bp, Homo sapien
caaggcagtacaaaaacaggagatt

SEQ ID NO: 26836 - DNA, 25 bp, Homo sapien
caaaggctttggttgcaacgaaact

SEQ ID NO: 26837 - DNA, 25 bp, Homo sapien
tttggcatctttcaattagaagttt

SEQ ID NO: 26838 - DNA, 25 bp, Homo sapien
tggttctatgtggtggaataagttc

SEQ ID NO: 26839 - DNA, 25 bp, Homo sapien
aatcatttgaatctctccagggttc

SEQ ID NO: 26840 - DNA, 25 bp, Homo sapien
tggaattgcactagttacgtatatt

SEQ ID NO: 26841 - DNA, 25 bp, Homo sapien
tagttacgtatattaatttggcatc

SEQ ID NO: 26842 - DNA, 25 bp, Homo sapien
ctcactaggacacccgggctggatt

SEQ ID NO: 26843 - DNA, 25 bp, Homo sapien
ctatgtggtggaataagttctcttt

SEQ ID NO: 26844 - DNA, 25 bp, Homo sapien
actttatggttctatgtggtggaat

SEQ ID NO: 26845 - DNA, 25 bp, Homo sapien
gcaatcatttgaatctctccagggt

SEQ ID NO: 26846 - DNA, 25 bp, Homo sapien
tttgagacagcctcactaggacacc

SEQ ID NO: 26847 - DNA, 25 bp, Homo sapien
gaagtttaagacattagaatgaatt

SEQ ID NO: 26848 - DNA, 25 bp, Homo sapien
ttatgactactttaaacatgaggaa

SEQ ID NO: 26849 - DNA, 25 bp, Homo sapien
ttctgaataacaccatgatgcaagt

SEQ ID NO: 26850 - DNA, 25 bp, Homo sapien
tacatacatctctcagttgatcttc

SEQ ID NO: 26851 - DNA, 25 bp, Homo sapien
cagttgatcttctgaataacaccat

SEQ ID NO: 26852 - DNA, 25 bp, Homo sapien
ggttctaagtcctatgctaaatact

SEQ ID NO: 26853 - DNA, 25 bp, Homo sapien
atgatgcaagtatgattatgactac

SEQ ID NO: 26854 - DNA, 25 bp, Homo sapien
tgagcattaactaggttctaagtcc

SEQ ID NO: 26855 - DNA, 25 bp, Homo sapien
attatacctcaataagaagcatgtt

SEQ ID NO: 26856 - DNA, 25 bp, Homo sapien
acctcaataagaagcatgttaatat

SEQ ID NO: 26857 - DNA, 25 bp, Homo sapien
attaattgagcattaactaggttct

SEQ ID NO: 26858 - DNA, 25 bp, Homo sapien
ttcagtccataacagtatgtaaatt

SEQ ID NO: 26859 - DNA, 25 bp, Homo sapien
ttctgaataacaccatgatgcaagt

SEQ ID NO: 26860 - DNA, 25 bp, Homo sapien
tgagcattaactaggttctaagtcc

SEQ ID NO: 26861 - DNA, 25 bp, Homo sapien
ggttctaagtcctatgctaaatact

SEQ ID NO: 26862 - DNA, 25 bp, Homo sapien
tacatacatctctcagttgatcttc

SEQ ID NO: 26863 - DNA, 25 bp, Homo sapien
ttcagtccataacagtatgtaaatt

SEQ ID NO: 26864 - DNA, 25 bp, Homo sapien
cacctggccaaaaataacatattaa

SEQ ID NO: 26865 - DNA, 25 bp, Homo sapien
ctgtgatcacaaagccagtgtgcaa

SEQ ID NO: 26866 - DNA, 25 bp, Homo sapien
atgatgcaagtatgattatgactac

SEQ ID NO: 26867 - DNA, 25 bp, Homo sapien
attatacctcaataagaagcatgtt

SEQ ID NO: 26868 - DNA, 25 bp, Homo sapien
ttatgactactttaaacatgaggaa

SEQ ID NO: 26869 - DNA, 25 bp, Homo sapien
acctcaataagaagcatgttaatat

SEQ ID NO: 26870 - DNA, 25 bp, Homo sapien
gagtgtcttatgtggagaggatctt

SEQ ID NO: 26871 - DNA, 25 bp, Homo sapien
ggctgaatcggaagagaactatcaa

SEQ ID NO: 26872 - DNA, 25 bp, Homo sapien
caagatcatcggagtcatcaaggat

SEQ ID NO: 26873 - DNA, 25 bp, Homo sapien
aggatccttcgaacttactagtgac

SEQ ID NO: 26874 - DNA, 25 bp, Homo sapien
ttgaaaagttgagactaaggagagt

SEQ ID NO: 26875 - DNA, 25 bp, Homo sapien
tactgttgggcattacaagatcatc

SEQ ID NO: 26876 - DNA, 25 bp, Homo sapien
taaggagagtgttgatctagtgcta

SEQ ID NO: 26877 - DNA, 25 bp, Homo sapien
tactcctgggagatactgttgggca

SEQ ID NO: 26878 - DNA, 25 bp, Homo sapien
ctagtgacccttgaaaagttgagac

SEQ ID NO: 26879 - DNA, 25 bp, Homo sapien
attgttatgttaaccactggggtgg

SEQ ID NO: 26880 - DNA, 25 bp, Homo sapien
cggaagagaactatcaagagtgtct

SEQ ID NO: 26881 - DNA, 25 bp, Homo sapien
tcgcagtgaatttcagtggcaccat

SEQ ID NO: 26882 - DNA, 25 bp, Homo sapien
agcatggcttcccagcaaattctct

SEQ ID NO: 26883 - DNA, 25 bp, Homo sapien
tgtctagtgatttccaccagcaccc

SEQ ID NO: 26884 - DNA, 25 bp, Homo sapien
attccagtgagttttagtgacaccc

SEQ ID NO: 26885 - DNA, 25 bp, Homo sapien
aagaaaattgcagaaggaggtttcg

SEQ ID NO: 26886 - DNA, 25 bp, Homo sapien
ccagaaagtgttgcaggcacccaca

SEQ ID NO: 26887 - DNA, 25 bp, Homo sapien
aaggaggtttcgcagtgaatttcag

SEQ ID NO: 26888 - DNA, 25 bp, Homo sapien
ttataacgcccagaaagtgttgcag

SEQ ID NO: 26889 - DNA, 25 bp, Homo sapien
agtggcaccatacccacaggcagtt

SEQ ID NO: 26890 - DNA, 25 bp, Homo sapien
caggcagtttcctagggagttccac

SEQ ID NO: 26891 - DNA, 25 bp, Homo sapien
ttagcccagcagtcacagatgctct

SEQ ID NO: 26892 - DNA, 25 bp, Homo sapien
acatgagagggctctgctgttgtca

SEQ ID NO: 26893 - DNA, 25 bp, Homo sapien
caaaccttggatgtacgcagtactc

SEQ ID NO: 26894 - DNA, 25 bp, Homo sapien
acgggtggaacaaactgaattagaa

SEQ ID NO: 26895 - DNA, 25 bp, Homo sapien
tctcagcaaacaccacaaaccttgg

SEQ ID NO: 26896 - DNA, 25 bp, Homo sapien
gttgtaaagactgccaagaaagaac

SEQ ID NO: 26897 - DNA, 25 bp, Homo sapien
aggcgggctgctctctgataccgta

SEQ ID NO: 26898 - DNA, 25 bp, Homo sapien
aaacctggtatgcttggatttaatc

SEQ ID NO: 26899 - DNA, 25 bp, Homo sapien
atgtgcattccgactgtgctgagga

SEQ ID NO: 26900 - DNA, 25 bp, Homo sapien
aattagaagtccatggcagacatcc

SEQ ID NO: 26901 - DNA, 25 bp, Homo sapien
gctgaggaaggtcatagaaacatga

SEQ ID NO: 26902 - DNA, 25 bp, Homo sapien
tctgataccgtacatgtgcattccg

SEQ ID NO: 26903 - DNA, 25 bp, Homo sapien
cattcgatccacataaaaaccgcag

SEQ ID NO: 26904 - DNA, 25 bp, Homo sapien
aacccaagtctgtggattcctagct

SEQ ID NO: 26905 - DNA, 25 bp, Homo sapien
aaaaccgcagcaggtattaccacct

SEQ ID NO: 26906 - DNA, 25 bp, Homo sapien
cctagctggaggcaaattctaccac

SEQ ID NO: 26907 - DNA, 25 bp, Homo sapien
gccactcaggcaaaatcacaataag

SEQ ID NO: 26908 - DNA, 25 bp, Homo sapien
aagactcagaatccgtaagcgacta

SEQ ID NO: 26909 - DNA, 25 bp, Homo sapien
ggacgtggagctcaaacccaagtct

SEQ ID NO: 26910 - DNA, 25 bp, Homo sapien
ggcacaggcagttcagtgattcttt

SEQ ID NO: 26911 - DNA, 25 bp, Homo sapien
agtacacgtgcctgaaaagcttgcc

SEQ ID NO: 26912 - DNA, 25 bp, Homo sapien
ctatgagttttaggcccattcgatc

SEQ ID NO: 26913 - DNA, 25 bp, Homo sapien
cttttctgaagatcacgtggtgact

SEQ ID NO: 26914 - DNA, 25 bp, Homo sapien
gtgtcatctcaaactgtcaaacgca

SEQ ID NO: 26915 - DNA, 25 bp, Homo sapien
ggaaacgatgccagcgctttgagta

SEQ ID NO: 26916 - DNA, 25 bp, Homo sapien
agccatctcgagactgggcgctcct

SEQ ID NO: 26917 - DNA, 25 bp, Homo sapien
ttctcacaggttcccaggaaacgat

SEQ ID NO: 26918 - DNA, 25 bp, Homo sapien
tgaacctggggcctcgtaacgccta

SEQ ID NO: 26919 - DNA, 25 bp, Homo sapien
tgcaagctttgaaggtccaggctct

SEQ ID NO: 26920 - DNA, 25 bp, Homo sapien
cgttacgtgaattagtgagaggttc

SEQ ID NO: 26921 - DNA, 25 bp, Homo sapien
actggaaaggcgagccagccatctc

SEQ ID NO: 26922 - DNA, 25 bp, Homo sapien
atagcccgggccgtttgcaagcttt

SEQ ID NO: 26923 - DNA, 25 bp, Homo sapien
ctgccggcggctcccgttacgtgaa

SEQ ID NO: 26924 - DNA, 25 bp, Homo sapien
atgggtccgagactcggcatttctc

SEQ ID NO: 26925 - DNA, 25 bp, Homo sapien
tttgacactaatccatgttgttgca

SEQ ID NO: 26926 - DNA, 25 bp, Homo sapien
actgcagagcagtatagtccattat

SEQ ID NO: 26927 - DNA, 25 bp, Homo sapien
acagtaggtactcgcgtctatcttc

SEQ ID NO: 26928 - DNA, 25 bp, Homo sapien
aagccaactttgaggaataactacc

SEQ ID NO: 26929 - DNA, 25 bp, Homo sapien
tgagcccttttgcagtcaatcaccc

SEQ ID NO: 26930 - DNA, 25 bp, Homo sapien
atatacctatggaagcatcactacc

SEQ ID NO: 26931 - DNA, 25 bp, Homo sapien
gtctacaggatcatacagtaggtac

SEQ ID NO: 26932 - DNA, 25 bp, Homo sapien
tgtgaggcacaacgcctggcctaaa

SEQ ID NO: 26933 - DNA, 25 bp, Homo sapien
gttgcatgtgtcagtttgttccttt

SEQ ID NO: 26934 - DNA, 25 bp, Homo sapien
ttgttcctttatactgcagagcagt

SEQ ID NO: 26935 - DNA, 25 bp, Homo sapien
caacgcctggcctaaaaatgctaaa

SEQ ID NO: 26936 - DNA, 25 bp, Homo sapien
ttaaaaggcatataacgtaggtcat

SEQ ID NO: 26937 - DNA, 25 bp, Homo sapien
taaaacaatggaacatctagaagaa

SEQ ID NO: 26938 - DNA, 25 bp, Homo sapien
cccagcaattccaggaaaacgtttg

SEQ ID NO: 26939 - DNA, 25 bp, Homo sapien
ctgatgggagagtaaaatggtacat

SEQ ID NO: 26940 - DNA, 25 bp, Homo sapien
ttcatgatcaaggatgggtaaagac

SEQ ID NO: 26941 - DNA, 25 bp, Homo sapien
acctaacaaaggacttggatcagta

SEQ ID NO: 26942 - DNA, 25 bp, Homo sapien
aagggagccttttcaacaaaacagc

SEQ ID NO: 26943 - DNA, 25 bp, Homo sapien
atgggtaaagacttttagtacacac

SEQ ID NO: 26944 - DNA, 25 bp, Homo sapien
tacacctatgaaaaggcaagctcac

SEQ ID NO: 26945 - DNA, 25 bp, Homo sapien
cttggatcagtatatagagaatttc

SEQ ID NO: 26946 - DNA, 25 bp, Homo sapien
ttagcaaggatgtggagctactgaa

SEQ ID NO: 26947 - DNA, 25 bp, Homo sapien
ttggatttcaggaaggctgacttga

SEQ ID NO: 26948 - DNA, 25 bp, Homo sapien
ggatatggagatacaacagacctta

SEQ ID NO: 26949 - DNA, 25 bp, Homo sapien
tttccagatcttcgcgccgagagcc

SEQ ID NO: 26950 - DNA, 25 bp, Homo sapien
cccggctccgcctggtgagggtttc

SEQ ID NO: 26951 - DNA, 25 bp, Homo sapien
cggacccgctttgtgtgcgcgtttg

SEQ ID NO: 26952 - DNA, 25 bp, Homo sapien
aacctgccggcatgcgataaaggcc

SEQ ID NO: 26953 - DNA, 25 bp, Homo sapien
tttgttccgttagatcgcgcagccc

SEQ ID NO: 26954 - DNA, 25 bp, Homo sapien
ctgacttgagatgcgccgttgccat

SEQ ID NO: 26955 - DNA, 25 bp, Homo sapien
gtgagatggggcttttttccagatc

SEQ ID NO: 26956 - DNA, 25 bp, Homo sapien
ctcgcacctccagacagtgagatgg

SEQ ID NO: 26957 - DNA, 25 bp, Homo sapien
ttctcatctccgaagcgcggggctt

SEQ ID NO: 26958 - DNA, 25 bp, Homo sapien
cggaggatttacgaatgcttgatgc

SEQ ID NO: 26959 - DNA, 25 bp, Homo sapien
tgtaagcgatactccagatgagggc

SEQ ID NO: 26960 - DNA, 25 bp, Homo sapien
agagactcagagtgatgaagagaat

SEQ ID NO: 26961 - DNA, 25 bp, Homo sapien
ttgataacctgaggaccatggatgc

SEQ ID NO: 26962 - DNA, 25 bp, Homo sapien
tgcttgatgcctcgggagagaaaat

SEQ ID NO: 26963 - DNA, 25 bp, Homo sapien
cagagtcgtggccagtaatgttaaa

SEQ ID NO: 26964 - DNA, 25 bp, Homo sapien
gcaaagctccaagagtgacagagtc

SEQ ID NO: 26965 - DNA, 25 bp, Homo sapien
ctgtgggatcatttgcatcgggcca

SEQ ID NO: 26966 - DNA, 25 bp, Homo sapien
aaacggaaaactaaagtgtgatatc

SEQ ID NO: 26967 - DNA, 25 bp, Homo sapien
cgaggcctcggttggttgataacct

SEQ ID NO: 26968 - DNA, 25 bp, Homo sapien
gagagaaaatgaatggctcccacag

SEQ ID NO: 26969 - DNA, 25 bp, Homo sapien
aaatgatctggttatgatggtgcat

SEQ ID NO: 26970 - DNA, 25 bp, Homo sapien
atgatctggttatgatggtgcatgc

SEQ ID NO: 26971 - DNA, 25 bp, Homo sapien
acaaaaaatgatctggttatgatgg

SEQ ID NO: 26972 - DNA, 25 bp, Homo sapien
aaaaatgatctggttatgatggtgc

SEQ ID NO: 26973 - DNA, 25 bp, Homo sapien
ttcactgctcctaaaattcacattt

SEQ ID NO: 26974 - DNA, 25 bp, Homo sapien
tgttgtagatggaatagctaacagc

SEQ ID NO: 26975 - DNA, 25 bp, Homo sapien
tttgttgtagatggaatagctaaca

SEQ ID NO: 26976 - DNA, 25 bp, Homo sapien
atgccttcctcaaattaccaaatat

SEQ ID NO: 26977 - DNA, 25 bp, Homo sapien
ttgtagatggaatagctaacagcta

SEQ ID NO: 26978 - DNA, 25 bp, Homo sapien
taacagctatttttagagaatcagc

SEQ ID NO: 26979 - DNA, 25 bp, Homo sapien
acagctatttttagagaatcagcaa

SEQ ID NO: 26980 - DNA, 25 bp, Homo sapien
ttagagaatcagcaaaaatccaatc

SEQ ID NO: 26981 - DNA, 25 bp, Homo sapien
tgcagtgtttttctagaaagccttt

SEQ ID NO: 26982 - DNA, 25 bp, Homo sapien
taacagctatttttagagaatcagc

SEQ ID NO: 26983 - DNA, 25 bp, Homo sapien
aaaaatgatctggttatgatggtgc

SEQ ID NO: 26984 - DNA, 25 bp, Homo sapien
tgttgtagatggaatagctaacagc

SEQ ID NO: 26985 - DNA, 25 bp, Homo sapien
tttgttgtagatggaatagctaaca

SEQ ID NO: 26986 - DNA, 25 bp, Homo sapien
ttcactgctcctaaaattcacattt

SEQ ID NO: 26987 - DNA, 25 bp, Homo sapien
ttgtagatggaatagctaacagcta

SEQ ID NO: 26988 - DNA, 25 bp, Homo sapien
acaaaaaatgatctggttatgatgg

SEQ ID NO: 26989 - DNA, 25 bp, Homo sapien
atgccttcctcaaattaccaaatat

SEQ ID NO: 26990 - DNA, 25 bp, Homo sapien
atgatctggttatgatggtgcatgc

SEQ ID NO: 26991 - DNA, 25 bp, Homo sapien
cctgatgagaccacaaatgaatatt

SEQ ID NO: 26992 - DNA, 25 bp, Homo sapien
ttatatttggtaatttgaggaaggc

SEQ ID NO: 26993 - DNA, 25 bp, Homo sapien
ggcatgcaccatcataaccagatca

SEQ ID NO: 26994 - DNA, 25 bp, Homo sapien
attttaggagcagtgaaagagatat

SEQ ID NO: 26995 - DNA, 25 bp, Homo sapien
ttgctgattctctaaaaatagctgt

SEQ ID NO: 26996 - DNA, 25 bp, Homo sapien
gagatatttttggaaagattggatt

SEQ ID NO: 26997 - DNA, 25 bp, Homo sapien
tgaattttaggagcagtgaaagaga

SEQ ID NO: 26998 - DNA, 25 bp, Homo sapien
aaaaggctttctagaaaaacactgc

SEQ ID NO: 26999 - DNA, 25 bp, Homo sapien
tagctgttagctattccatctacaa

SEQ ID NO: 27000 - DNA, 25 bp, Homo sapien
taggagcagtgaaagagatattttt

SEQ ID NO: 27001 - DNA, 25 bp, Homo sapien
tatttggtaatttgaggaaggcata

SEQ ID NO: 27002 - DNA, 25 bp, Homo sapien
atgccttgaattgtctagggtgttc

SEQ ID NO: 27003 - DNA, 25 bp, Homo sapien
ttgaattgtctagggtgttctgtac

SEQ ID NO: 27004 - DNA, 25 bp, Homo sapien
ttagaaagtaagagctctaagtacc

SEQ ID NO: 27005 - DNA, 25 bp, Homo sapien
cttgatggagattaagatgccttga

SEQ ID NO: 27006 - DNA, 25 bp, Homo sapien
aagatgccttgaattgtctagggtg

SEQ ID NO: 27007 - DNA, 25 bp, Homo sapien
ggtttgattgtttacaggatattcc

SEQ ID NO: 27008 - DNA, 25 bp, Homo sapien
aagtaagagctctaagtacctttcc

SEQ ID NO: 27009 - DNA, 25 bp, Homo sapien
ttctgtacttagaaagtaagagctc

SEQ ID NO: 27010 - DNA, 25 bp, Homo sapien
aattgtctagggtgttctgtactta

SEQ ID NO: 27011 - DNA, 25 bp, Homo sapien
ctgtacttagaaagtaagagctcta

SEQ ID NO: 27012 - DNA, 25 bp, Homo sapien
agaaagtaagagctctaagtacctt

SEQ ID NO: 27013 - DNA, 25 bp, Homo sapien
ttttgcaaaccatatatcgccaggt

SEQ ID NO: 27014 - DNA, 25 bp, Homo sapien
tatcgccaggtttacatacgggtcc

SEQ ID NO: 27015 - DNA, 25 bp, Homo sapien
tgacgcacctgatccatatttgaat

SEQ ID NO: 27016 - DNA, 25 bp, Homo sapien
acatacgggtccaaggcaccttctc

SEQ ID NO: 27017 - DNA, 25 bp, Homo sapien
aaggaacagattttgacgcacctga

SEQ ID NO: 27018 - DNA, 25 bp, Homo sapien
tgaattccagctcagccagtagcct

SEQ ID NO: 27019 - DNA, 25 bp, Homo sapien
tcacatctgtgaaacagggcccaca

SEQ ID NO: 27020 - DNA, 25 bp, Homo sapien
tagcctgctgcatactcctgacttc

SEQ ID NO: 27021 - DNA, 25 bp, Homo sapien
taaacctcggctttcacatctgtga

SEQ ID NO: 27022 - DNA, 25 bp, Homo sapien
agggcccacactatcttagaaagat

SEQ ID NO: 27023 - DNA, 25 bp, Homo sapien
ctcccaacagaaagtatatagcttc

SEQ ID NO: 27024 - DNA, 25 bp, Homo sapien
ttgaacagcttcagccagaatattc

SEQ ID NO: 27025 - DNA, 25 bp, Homo sapien
ggtgtgagctgtagtttgagaaatc

SEQ ID NO: 27026 - DNA, 25 bp, Homo sapien
aaactattagagactgtcagtatcc

SEQ ID NO: 27027 - DNA, 25 bp, Homo sapien
cttaatgcaggatctgaacaatgtt

SEQ ID NO: 27028 - DNA, 25 bp, Homo sapien
ccctctgaagaacatactgaaatat

SEQ ID NO: 27029 - DNA, 25 bp, Homo sapien
agaaaaaatacttggtgtgagctgt

SEQ ID NO: 27030 - DNA, 25 bp, Homo sapien
ttgagaaatcactgtgaccatcctt

SEQ ID NO: 27031 - DNA, 25 bp, Homo sapien
acttgcaattggatgataaactatt

SEQ ID NO: 27032 - DNA, 25 bp, Homo sapien
agccagcatgctgatctaccaagta

SEQ ID NO: 27033 - DNA, 25 bp, Homo sapien
tttagcattgaagcaagagattctt

SEQ ID NO: 27034 - DNA, 25 bp, Homo sapien
ttcttcccaaggcatgaaaaatcag

SEQ ID NO: 27035 - DNA, 25 bp, Homo sapien
ttcagaattcagaaaggcaagagac

SEQ ID NO: 27036 - DNA, 25 bp, Homo sapien
tctgtctgaagggagccaccttttc

SEQ ID NO: 27037 - DNA, 25 bp, Homo sapien
atgaattgggcttggtctgtctgaa

SEQ ID NO: 27038 - DNA, 25 bp, Homo sapien
tttgaacattaaggacgagatagga

SEQ ID NO: 27039 - DNA, 25 bp, Homo sapien
gttcacgagtgaggacgacctcttc

SEQ ID NO: 27040 - DNA, 25 bp, Homo sapien
ggcaagagaccaccttactgagctt

SEQ ID NO: 27041 - DNA, 25 bp, Homo sapien
taagaagaaccaaagcagaataaac

SEQ ID NO: 27042 - DNA, 25 bp, Homo sapien
ataaacgtagaacccgatgctgagt

SEQ ID NO: 27043 - DNA, 25 bp, Homo sapien
atcctgtcgtggcaacgttgacttc

SEQ ID NO: 27044 - DNA, 25 bp, Homo sapien
ttacaccttggatcgtggcgaagtc

SEQ ID NO: 27045 - DNA, 25 bp, Homo sapien
cctctcctgggttccggtaagaaga

SEQ ID NO: 27046 - DNA, 25 bp, Homo sapien
acatagctattaagtgaaagatcac

SEQ ID NO: 27047 - DNA, 25 bp, Homo sapien
ctacagactatttttggcaaggtga

SEQ ID NO: 27048 - DNA, 25 bp, Homo sapien
tactgcaacgtaagatagatgaggg

SEQ ID NO: 27049 - DNA, 25 bp, Homo sapien
gcaaggtgaagaacctaggaatcac

SEQ ID NO: 27050 - DNA, 25 bp, Homo sapien
taaaacagcactgaaggttgttatc

SEQ ID NO: 27051 - DNA, 25 bp, Homo sapien
ccagattatcgatgatgtgaaaagc

SEQ ID NO: 27052 - DNA, 25 bp, Homo sapien
agtgaaagatcacagatcaaactgc

SEQ ID NO: 27053 - DNA, 25 bp, Homo sapien
ttaataggagttaaagatccagatt

SEQ ID NO: 27054 - DNA, 25 bp, Homo sapien
aaccagtagtgttttaggcagcgca

SEQ ID NO: 27055 - DNA, 25 bp, Homo sapien
ttgagggtcattatgtaagctttgc

SEQ ID NO: 27056 - DNA, 25 bp, Homo sapien
ctcagagaggccatgtcatatgccc

SEQ ID NO: 27057 - DNA, 25 bp, Homo sapien
tgcatgcttggagcaggattccttc

SEQ ID NO: 27058 - DNA, 25 bp, Homo sapien
gctcaaaggtatctgcagacaccaa

SEQ ID NO: 27059 - DNA, 25 bp, Homo sapien
gtccaccatacggaagctgggctgt

SEQ ID NO: 27060 - DNA, 25 bp, Homo sapien
ttattggggcaaaggatgcaatcca

SEQ ID NO: 27061 - DNA, 25 bp, Homo sapien
tgcagacaccaaactgtgcccatct

SEQ ID NO: 27062 - DNA, 25 bp, Homo sapien
tggctggatgcctgagtccaccata

SEQ ID NO: 27063 - DNA, 25 bp, Homo sapien
tatgggacgccatagcactcctggt

SEQ ID NO: 27064 - DNA, 25 bp, Homo sapien
cttctcaatgtagcggtagtaggca

SEQ ID NO: 27065 - DNA, 25 bp, Homo sapien
gaaggaagtaccagatgcatgcttg

SEQ ID NO: 27066 - DNA, 25 bp, Homo sapien
attgtgacattcatcatccaggcac

SEQ ID NO: 27067 - DNA, 25 bp, Homo sapien
tggtctgtttgaaggcgccaccctt

SEQ ID NO: 27068 - DNA, 25 bp, Homo sapien
taacagaatgcattgagagtttacc

SEQ ID NO: 27069 - DNA, 25 bp, Homo sapien
ttggctgtacaaggatagactagat

SEQ ID NO: 27070 - DNA, 25 bp, Homo sapien
tctgcctggaaatgtactagttggt

SEQ ID NO: 27071 - DNA, 25 bp, Homo sapien
tatcctggatcaggggttcccaacc

SEQ ID NO: 27072 - DNA, 25 bp, Homo sapien
ccctgcaaccaaggcgatgaattgt

SEQ ID NO: 27073 - DNA, 25 bp, Homo sapien
ttctgggagagacttttgaggtaac

SEQ ID NO: 27074 - DNA, 25 bp, Homo sapien
gacaggccactataacttcagagat

SEQ ID NO: 27075 - DNA, 25 bp, Homo sapien
ttcggtcgaatgaaggtcctagaca

SEQ ID NO: 27076 - DNA, 25 bp, Homo sapien
gccgcagactgtggcctgttaagaa

SEQ ID NO: 27077 - DNA, 25 bp, Homo sapien
tatatagatggtagaccctgcaacc

SEQ ID NO: 27078 - DNA, 25 bp, Homo sapien
tgttaagaaccaggccatacagcaa

SEQ ID NO: 27079 - DNA, 25 bp, Homo sapien
tgagtggcagctcaacctctgctaa

SEQ ID NO: 27080 - DNA, 25 bp, Homo sapien
aactgaagcccaggtaggcaagcct

SEQ ID NO: 27081 - DNA, 25 bp, Homo sapien
gagagacctcgtgtttgcccaaaag

SEQ ID NO: 27082 - DNA, 25 bp, Homo sapien
cctctttggtgagtggcagctcaac

SEQ ID NO: 27083 - DNA, 25 bp, Homo sapien
cagggtcagaggagaactaaaagga

SEQ ID NO: 27084 - DNA, 25 bp, Homo sapien
acacaggaagttggcagctctgctc

SEQ ID NO: 27085 - DNA, 25 bp, Homo sapien
tccagggagagacctcgtgtttgcc

SEQ ID NO: 27086 - DNA, 25 bp, Homo sapien
gcaagccctacatgaagaggcctct

SEQ ID NO: 27087 - DNA, 25 bp, Homo sapien
tgctaaatgcctccagtgatgggga

SEQ ID NO: 27088 - DNA, 25 bp, Homo sapien
gtgatggggagttcactaccttcca

SEQ ID NO: 27089 - DNA, 25 bp, Homo sapien
acttgctggagtcacacaggaagtt

SEQ ID NO: 27090 - DNA, 25 bp, Homo sapien
tgtgtgtgtgcatctaactccctgc

SEQ ID NO: 27091 - DNA, 25 bp, Homo sapien
gcctcccaaatatcacaatctatgt

SEQ ID NO: 27092 - DNA, 25 bp, Homo sapien
gcagcttctcaatgtcagaggcagt

SEQ ID NO: 27093 - DNA, 25 bp, Homo sapien
tgagttcatcctggccttcagctat

SEQ ID NO: 27094 - DNA, 25 bp, Homo sapien
gggaatggagatagcatccgcattt

SEQ ID NO: 27095 - DNA, 25 bp, Homo sapien
aaactaccctccaattttcagcctg

SEQ ID NO: 27096 - DNA, 25 bp, Homo sapien
tggccttcagctatagtttgtgtcc

SEQ ID NO: 27097 - DNA, 25 bp, Homo sapien
ctgatctaaaaccaatgaggttttg

SEQ ID NO: 27098 - DNA, 25 bp, Homo sapien
cctggggaatggagatagcatccgc

SEQ ID NO: 27099 - DNA, 25 bp, Homo sapien
atggagatagcatccgcatttaatc

SEQ ID NO: 27100 - DNA, 25 bp, Homo sapien
caatgtcagaggcagtcatgaggct

SEQ ID NO: 27101 - DNA, 25 bp, Homo sapien
ttgggtaaacatgtgaaatgctgca

SEQ ID NO: 27102 - DNA, 25 bp, Homo sapien
aaatgctggggaacaaacaccttgt

SEQ ID NO: 27103 - DNA, 25 bp, Homo sapien
aagtcagctgactctgaagcatctc

SEQ ID NO: 27104 - DNA, 25 bp, Homo sapien
agccactgggatgactggacacttt

SEQ ID NO: 27105 - DNA, 25 bp, Homo sapien
acttccgcggtctcagttggtattc

SEQ ID NO: 27106 - DNA, 25 bp, Homo sapien
acaggcaaagttagtcacccagatt

SEQ ID NO: 27107 - DNA, 25 bp, Homo sapien
ccagatttactaggaagcagtccac

SEQ ID NO: 27108 - DNA, 25 bp, Homo sapien
cctatctgtgcagggaaatagctcc

SEQ ID NO: 27109 - DNA, 25 bp, Homo sapien
tacctcgagggttaacattgggcac

SEQ ID NO: 27110 - DNA, 25 bp, Homo sapien
tggtggaaccataggataattcagc

SEQ ID NO: 27111 - DNA, 25 bp, Homo sapien
gggagggacagactttcagattcca

SEQ ID NO: 27112 - DNA, 25 bp, Homo sapien
ccacggcagggagtctcttgagtcc

SEQ ID NO: 27113 - DNA, 25 bp, Homo sapien
acatttgctgtgatcctacctgcta

SEQ ID NO: 27114 - DNA, 25 bp, Homo sapien
agttcaatgcatagtcttccttttt

SEQ ID NO: 27115 - DNA, 25 bp, Homo sapien
gcacctgcataagcagggccatgat

SEQ ID NO: 27116 - DNA, 25 bp, Homo sapien
cataagcagggccatgatcatgcct

SEQ ID NO: 27117 - DNA, 25 bp, Homo sapien
taatacaaaattcagacatcatcaa

SEQ ID NO: 27118 - DNA, 25 bp, Homo sapien
tcctacctgcgtaagcagaggtctt

SEQ ID NO: 27119 - DNA, 25 bp, Homo sapien
aagcagaggtcttgcacctgcataa

SEQ ID NO: 27120 - DNA, 25 bp, Homo sapien
acatggagggctcctacctgcgtaa

SEQ ID NO: 27121 - DNA, 25 bp, Homo sapien
tttacaagaagaaggtcaggctggg

SEQ ID NO: 27122 - DNA, 25 bp, Homo sapien
cctacctgctaaagataaccatcat

SEQ ID NO: 27123 - DNA, 25 bp, Homo sapien
agcaaaatatgaggccacaggtgag

SEQ ID NO: 27124 - DNA, 25 bp, Homo sapien
tctgtgatagtgaatgagatctcat

SEQ ID NO: 27125 - DNA, 25 bp, Homo sapien
aatacgcccacccaggattcagtct

SEQ ID NO: 27126 - DNA, 25 bp, Homo sapien
gtcctgccatcatgcgaagagggat

SEQ ID NO: 27127 - DNA, 25 bp, Homo sapien
aggccacaggtgagctttctatttc

SEQ ID NO: 27128 - DNA, 25 bp, Homo sapien
atggcccattgatatttggctgtgt

SEQ ID NO: 27129 - DNA, 25 bp, Homo sapien
ctttgacggccagccactgggacta

SEQ ID NO: 27130 - DNA, 25 bp, Homo sapien
ttcactggagaatgtaagcaaaata

SEQ ID NO: 27131 - DNA, 25 bp, Homo sapien
ctgtactcctggcatctttgacggc

SEQ ID NO: 27132 - DNA, 25 bp, Homo sapien
aacagactaatacgcccacccagga

SEQ ID NO: 27133 - DNA, 25 bp, Homo sapien
tctcccacctgcagaagcagaggtc

SEQ ID NO: 27134 - DNA, 25 bp, Homo sapien
cctgaagggtttgtcgtaagaaaga

SEQ ID NO: 27135 - DNA, 25 bp, Homo sapien
tcgcagtggatagcacagtttcgaa

SEQ ID NO: 27136 - DNA, 25 bp, Homo sapien
cgtgtttggagggtccaccctatcc

SEQ ID NO: 27137 - DNA, 25 bp, Homo sapien
cccttgaggagtccggcgcttgctt

SEQ ID NO: 27138 - DNA, 25 bp, Homo sapien
agaaagagaaagtgctcattgctgc

SEQ ID NO: 27139 - DNA, 25 bp, Homo sapien
tgtgtgtatgtgtaacttggggaca

SEQ ID NO: 27140 - DNA, 25 bp, Homo sapien
cttggctgccacatgaaagtcagtg

SEQ ID NO: 27141 - DNA, 25 bp, Homo sapien
tggcatataaacatgagggagactt

SEQ ID NO: 27142 - DNA, 25 bp, Homo sapien
tttgcagaaaccaggctctgtgttc

SEQ ID NO: 27143 - DNA, 25 bp, Homo sapien
gacaggatagggtagcatctttaca

SEQ ID NO: 27144 - DNA, 25 bp, Homo sapien
tatcccatccgaaccctgaagcttt

SEQ ID NO: 27145 - DNA, 25 bp, Homo sapien
acggggacaacctctttcagcgttc

SEQ ID NO: 27146 - DNA, 25 bp, Homo sapien
tcgaaactgtgctatccactgcgac

SEQ ID NO: 27147 - DNA, 25 bp, Homo sapien
actgactttcatgtggcagccaagc

SEQ ID NO: 27148 - DNA, 25 bp, Homo sapien
caacaggagttgtgtgaaagcttca

SEQ ID NO: 27149 - DNA, 25 bp, Homo sapien
gcaagcgccggactcctcaagggct

SEQ ID NO: 27150 - DNA, 25 bp, Homo sapien
agaggtcaagctgagaaagacttaa

SEQ ID NO: 27151 - DNA, 25 bp, Homo sapien
tgagaaagacttaagcatgatgccc

SEQ ID NO: 27152 - DNA, 25 bp, Homo sapien
atgtaaagatgtaaagatgctaccc

SEQ ID NO: 27153 - DNA, 25 bp, Homo sapien
aaagcttcagggttcggatgggata

SEQ ID NO: 27154 - DNA, 25 bp, Homo sapien
cccttgcagcaatgagcactttctc

SEQ ID NO: 27155 - DNA, 25 bp, Homo sapien
cctggtttctgcaaagagaggtcaa

SEQ ID NO: 27156 - DNA, 25 bp, Homo sapien
tgcacccagctgcagatattttatt

SEQ ID NO: 27157 - DNA, 25 bp, Homo sapien
gtttggccctgatgagagttacaca

SEQ ID NO: 27158 - DNA, 25 bp, Homo sapien
aagtgttactcgagggttgcttctc

SEQ ID NO: 27159 - DNA, 25 bp, Homo sapien
catcaagcttgtgaaagaccaaatt

SEQ ID NO: 27160 - DNA, 25 bp, Homo sapien
ttccttgacattggagaattgcttg

SEQ ID NO: 27161 - DNA, 25 bp, Homo sapien
tttacaacggaatgatgagttgttt

SEQ ID NO: 27162 - DNA, 25 bp, Homo sapien
ttgctgaataagataggtttggccc

SEQ ID NO: 27163 - DNA, 25 bp, Homo sapien
ttcctcaagtatagcgcaagtgtta

SEQ ID NO: 27164 - DNA, 25 bp, Homo sapien
gactttcagtcattgcagaacatac

SEQ ID NO: 27165 - DNA, 25 bp, Homo sapien
tattgaagaactgagtgccatttcc

SEQ ID NO: 27166 - DNA, 25 bp, Homo sapien
tggcaggttgataacagggattttt

SEQ ID NO: 27167 - DNA, 25 bp, Homo sapien
ttggtctttcacaagcttgatgaac

SEQ ID NO: 27168 - DNA, 25 bp, Homo sapien
atgttctgcaatgactgaaagtctc

SEQ ID NO: 27169 - DNA, 25 bp, Homo sapien
ttgaggaaatggcactcagttcttc

SEQ ID NO: 27170 - DNA, 25 bp, Homo sapien
gcgctatacttgaggaaatggcact

SEQ ID NO: 27171 - DNA, 25 bp, Homo sapien
tatcaacctgccaaaaataagattc

SEQ ID NO: 27172 - DNA, 25 bp, Homo sapien
ctcatgagacatacacagtaaagat

SEQ ID NO: 27173 - DNA, 25 bp, Homo sapien
gtgtaactctcatcagggccaaacc

SEQ ID NO: 27174 - DNA, 25 bp, Homo sapien
tgatgaacaaagagaagcaaccctc

SEQ ID NO: 27175 - DNA, 25 bp, Homo sapien
tgtcaaggaaatcttagaaagtttc

SEQ ID NO: 27176 - DNA, 25 bp, Homo sapien
caataaaatatctgcagctgggtgc

SEQ ID NO: 27177 - DNA, 25 bp, Homo sapien
aaccctcgagtaacacttgcgctat

SEQ ID NO: 27178 - DNA, 25 bp, Homo sapien
tccatgatgtggtaataattagcta

SEQ ID NO: 27179 - DNA, 25 bp, Homo sapien
tgtctctctagagattgtgtcattg

SEQ ID NO: 27180 - DNA, 25 bp, Homo sapien
cctgtgagactataaggctagtgat

SEQ ID NO: 27181 - DNA, 25 bp, Homo sapien
agccaggccgaacacctatgtctct

SEQ ID NO: 27182 - DNA, 25 bp, Homo sapien
gctagtgattgagccaggccgaaca

SEQ ID NO: 27183 - DNA, 25 bp, Homo sapien
gtgattgagccaggccgaacaccta

SEQ ID NO: 27184 - DNA, 25 bp, Homo sapien
tataaggctagtgattgagccaggc

SEQ ID NO: 27185 - DNA, 25 bp, Homo sapien
taacacttgtaatcctcccactttg

SEQ ID NO: 27186 - DNA, 25 bp, Homo sapien
ggccgaacacctatgtctctctaga

SEQ ID NO: 27187 - DNA, 25 bp, Homo sapien
ttgagccaggccgaacacctatgtc

SEQ ID NO: 27188 - DNA, 25 bp, Homo sapien
gttctctactcaccatcaatacatg

SEQ ID NO: 27189 - DNA, 25 bp, Homo sapien
taggtgttcggcctggctcaatcac

SEQ ID NO: 27190 - DNA, 25 bp, Homo sapien
agtctcacaggaaaatatgaacttc

SEQ ID NO: 27191 - DNA, 25 bp, Homo sapien
tggtgagtagagaacaatgacacaa

SEQ ID NO: 27192 - DNA, 25 bp, Homo sapien
acaatgacacaatctctagagagac

SEQ ID NO: 27193 - DNA, 25 bp, Homo sapien
catgtattgatggtgagtagagaac

SEQ ID NO: 27194 - DNA, 25 bp, Homo sapien
aggattaactatttttcaaggagtc

SEQ ID NO: 27195 - DNA, 25 bp, Homo sapien
atctctagagagacataggtgttcg

SEQ ID NO: 27196 - DNA, 25 bp, Homo sapien
agtgggaggattacaagtgttatcc

SEQ ID NO: 27197 - DNA, 25 bp, Homo sapien
actagccttatagtctcacaggaaa

SEQ ID NO: 27198 - DNA, 25 bp, Homo sapien
ccacatcatggatctttatggtcat

SEQ ID NO: 27199 - DNA, 25 bp, Homo sapien
tcaaatagacaaaattacaaagttc

SEQ ID NO: 27200 - DNA, 25 bp, Homo sapien
gctgggatcctgagcagaatgaagt

SEQ ID NO: 27201 - DNA, 25 bp, Homo sapien
catgagcctggactttgacaatata

SEQ ID NO: 27202 - DNA, 25 bp, Homo sapien
tctggggaaacctgaaatcacacaa

SEQ ID NO: 27203 - DNA, 25 bp, Homo sapien
ccaaaacagatcatgagcctggact

SEQ ID NO: 27204 - DNA, 25 bp, Homo sapien
tatggccggctttgacccaggttgc

SEQ ID NO: 27205 - DNA, 25 bp, Homo sapien
ttgacccaggttgccatccagtatc

SEQ ID NO: 27206 - DNA, 25 bp, Homo sapien
ctacgttggttctgagctgggatcc

SEQ ID NO: 27207 - DNA, 25 bp, Homo sapien
gatttcatagctataactgtggcgc

SEQ ID NO: 27208 - DNA, 25 bp, Homo sapien
tgtagttggcaatctgaatgtatct

SEQ ID NO: 27209 - DNA, 25 bp, Homo sapien
atcacacaagggctgaaaattcctc

SEQ ID NO: 27210 - DNA, 25 bp, Homo sapien
ttataaacacatctggggaaacctg

SEQ ID NO: 27211 - DNA, 25 bp, Homo sapien
tcagattgccaactacacatggggc

SEQ ID NO: 27212 - DNA, 25 bp, Homo sapien
agctattaagatacagtaacacagc

SEQ ID NO: 27213 - DNA, 25 bp, Homo sapien
attgtcaaagtccaggctcatgatc

SEQ ID NO: 27214 - DNA, 25 bp, Homo sapien
ttcaatctaccaggaagaaagccta

SEQ ID NO: 27215 - DNA, 25 bp, Homo sapien
gcgccacagttatagctatgaaatc

SEQ ID NO: 27216 - DNA, 25 bp, Homo sapien
gtaaagatacattcagattgccaac

SEQ ID NO: 27217 - DNA, 25 bp, Homo sapien
agcccttgtgtgatttcaggtttcc

SEQ ID NO: 27218 - DNA, 25 bp, Homo sapien
atctgttttggatgaaagtggctat

SEQ ID NO: 27219 - DNA, 25 bp, Homo sapien
agctcagaaccaacgtagaataatc

SEQ ID NO: 27220 - DNA, 25 bp, Homo sapien
tgctcaggatcccagctcagaacca

SEQ ID NO: 27221 - DNA, 25 bp, Homo sapien
gtaacacagcaaaaagttgcccatt

SEQ ID NO: 27222 - DNA, 25 bp, Homo sapien
gaggttgcaggagcttttaaaagct

SEQ ID NO: 27223 - DNA, 25 bp, Homo sapien
taaaagctttgtttaggctgggctc

SEQ ID NO: 27224 - DNA, 25 bp, Homo sapien
cttaagaaatggcaataactggcac

SEQ ID NO: 27225 - DNA, 25 bp, Homo sapien
accatgagatgaccaggttaacaac

SEQ ID NO: 27226 - DNA, 25 bp, Homo sapien
ccaaatagaatagttcccaatcttt

SEQ ID NO: 27227 - DNA, 25 bp, Homo sapien
ccagaaaaacattttggacttaaga

SEQ ID NO: 27228 - DNA, 25 bp, Homo sapien
atcaagaaatctaaagcagccaatc

SEQ ID NO: 27229 - DNA, 25 bp, Homo sapien
ggcaataactggcacatatactaat

SEQ ID NO: 27230 - DNA, 25 bp, Homo sapien
gctatttatttgaccagaaaaacat

SEQ ID NO: 27231 - DNA, 25 bp, Homo sapien
ttaacaaccttgaggttgcaggagc

SEQ ID NO: 27232 - DNA, 25 bp, Homo sapien
tttggacttaagaaatggcaataac

SEQ ID NO: 27233 - DNA, 25 bp, Homo sapien
ctgcagtaagctaagatggtgtcac

SEQ ID NO: 27234 - DNA, 25 bp, Homo sapien
ctgagcccagcctaaacaaagcttt

SEQ ID NO: 27235 - DNA, 25 bp, Homo sapien
tcagtgaaaagattgggaactattc

SEQ ID NO: 27236 - DNA, 25 bp, Homo sapien
taaactgattaagttttaggcattc

SEQ ID NO: 27237 - DNA, 25 bp, Homo sapien
ttctggtcaaataaatagcagtttt

SEQ ID NO: 27238 - DNA, 25 bp, Homo sapien
agaaactctgattggctgctttaga

SEQ ID NO: 27239 - DNA, 25 bp, Homo sapien
tgggaactattctatttggtgcttt

SEQ ID NO: 27240 - DNA, 25 bp, Homo sapien
atggtaattagaaactctgattggc

SEQ ID NO: 27241 - DNA, 25 bp, Homo sapien
attagtatatgtgccagttattgcc

SEQ ID NO: 27242 - DNA, 25 bp, Homo sapien
taaaagctcctgcaacctcaaggtt

SEQ ID NO: 27243 - DNA, 25 bp, Homo sapien
tcaaggttgttaacctggtcatctc

SEQ ID NO: 27244 - DNA, 25 bp, Homo sapien
attttccctgaattactgtccatat

SEQ ID NO: 27245 - DNA, 25 bp, Homo sapien
ctgtccatattttttgagctgcaaa

SEQ ID NO: 27246 - DNA, 25 bp, Homo sapien
ctggcccagagtgaattttaaatgc

SEQ ID NO: 27247 - DNA, 25 bp, Homo sapien
ttactgtccatattttttgagctgc

SEQ ID NO: 27248 - DNA, 25 bp, Homo sapien
cctggcccagagtgaattttaaatg

SEQ ID NO: 27249 - DNA, 25 bp, Homo sapien
acctggcccagagtgaattttaaat

SEQ ID NO: 27250 - DNA, 25 bp, Homo sapien
gcatgaactaaaatgtacttttgtc

SEQ ID NO: 27251 - DNA, 25 bp, Homo sapien
cacctggcccagagtgaattttaaa

SEQ ID NO: 27252 - DNA, 25 bp, Homo sapien
tggcccagagtgaattttaaatgca

SEQ ID NO: 27253 - DNA, 25 bp, Homo sapien
ttgtcacattttccctgaattactg

SEQ ID NO: 27254 - DNA, 25 bp, Homo sapien
tttccctgaattactgtccatattt

SEQ ID NO: 27255 - DNA, 25 bp, Homo sapien
cctggcccagagtgaattttaaatg

SEQ ID NO: 27256 - DNA, 25 bp, Homo sapien
ttaaatgcatgaactaaaatgtact

SEQ ID NO: 27257 - DNA, 25 bp, Homo sapien
cagagctttcaatgggccgagattg

SEQ ID NO: 27258 - DNA, 25 bp, Homo sapien
gcatgaactaaaatgtacttttgtc

SEQ ID NO: 27259 - DNA, 25 bp, Homo sapien
tggcccagagtgaattttaaatgca

SEQ ID NO: 27260 - DNA, 25 bp, Homo sapien
ctgtccatattttttgagctgcaaa

SEQ ID NO: 27261 - DNA, 25 bp, Homo sapien
ttgtcacattttccctgaattactg

SEQ ID NO: 27262 - DNA, 25 bp, Homo sapien
tttccctgaattactgtccatattt

SEQ ID NO: 27263 - DNA, 25 bp, Homo sapien
cacctggcccagagtgaattttaaa

SEQ ID NO: 27264 - DNA, 25 bp, Homo sapien
acctggcccagagtgaattttaaat

SEQ ID NO: 27265 - DNA, 25 bp, Homo sapien
ctggcccagagtgaattttaaatgc

SEQ ID NO: 27266 - DNA, 25 bp, Homo sapien
tcagggaaaatgtgacaaaagtaca

SEQ ID NO: 27267 - DNA, 25 bp, Homo sapien
cagggaaaatgtgacaaaagtacat

SEQ ID NO: 27268 - DNA, 25 bp, Homo sapien
tatttgcagctcaaaaaatatggac

SEQ ID NO: 27269 - DNA, 25 bp, Homo sapien
tttgcagctcaaaaaatatggacag

SEQ ID NO: 27270 - DNA, 25 bp, Homo sapien
gcatttaaaattcactctgggccag

SEQ ID NO: 27271 - DNA, 25 bp, Homo sapien
tgcagctcaaaaaatatggacagta

SEQ ID NO: 27272 - DNA, 25 bp, Homo sapien
gacaaaagtacattttagttcatgc

SEQ ID NO: 27273 - DNA, 25 bp, Homo sapien
ttgcagctcaaaaaatatggacagt

SEQ ID NO: 27274 - DNA, 25 bp, Homo sapien
tgcatttaaaattcactctgggcca

SEQ ID NO: 27275 - DNA, 25 bp, Homo sapien
atttgcagctcaaaaaatatggaca

SEQ ID NO: 27276 - DNA, 25 bp, Homo sapien
caatctcggcccattgaaagctctg

SEQ ID NO: 27277 - DNA, 25 bp, Homo sapien
gaccttgagaaacaggactgatccg

SEQ ID NO: 27278 - DNA, 25 bp, Homo sapien
accaaggcagtgatgagagcaatgc

SEQ ID NO: 27279 - DNA, 25 bp, Homo sapien
atccgggctaacatcatgggcttta

SEQ ID NO: 27280 - DNA, 25 bp, Homo sapien
tcagagaatgaaacccaggtctcat

SEQ ID NO: 27281 - DNA, 25 bp, Homo sapien
ctttgagcggagagctaaggaccaa

SEQ ID NO: 27282 - DNA, 25 bp, Homo sapien
aacccaggtctcatccataggccag

SEQ ID NO: 27283 - DNA, 25 bp, Homo sapien
tgagagcaatgcacatgtactgccc

SEQ ID NO: 27284 - DNA, 25 bp, Homo sapien
aaacaggactgatccgggctaacat

SEQ ID NO: 27285 - DNA, 25 bp, Homo sapien
ataggccagccctcctttgagcgga

SEQ ID NO: 27286 - DNA, 25 bp, Homo sapien
ctcaggtaggagagaccttgagaaa

SEQ ID NO: 27287 - DNA, 25 bp, Homo sapien
ttagcacatctcaggtaggagagac

SEQ ID NO: 27288 - DNA, 25 bp, Homo sapien
tcttaatggggcagtacatgtgcat

SEQ ID NO: 27289 - DNA, 25 bp, Homo sapien
aaggtctctcctacctgagatgtgc

SEQ ID NO: 27290 - DNA, 25 bp, Homo sapien
tggatgagacctgggtttcattctc

SEQ ID NO: 27291 - DNA, 25 bp, Homo sapien
ttggtccttagctctccgctcaaag

SEQ ID NO: 27292 - DNA, 25 bp, Homo sapien
ggggtctctctcttaatggggcagt

SEQ ID NO: 27293 - DNA, 25 bp, Homo sapien
aggtctgttaaatttaaagcccatg

SEQ ID NO: 27294 - DNA, 25 bp, Homo sapien
cctacctgagatgtgctaaggagga

SEQ ID NO: 27295 - DNA, 25 bp, Homo sapien
tgttagcccggatcagtcctgtttc

SEQ ID NO: 27296 - DNA, 25 bp, Homo sapien
acatgtgcattgctctcatcactgc

SEQ ID NO: 27297 - DNA, 25 bp, Homo sapien
tccgctcaaaggagggctggcctat

SEQ ID NO: 27298 - DNA, 25 bp, Homo sapien
taaagcccatgatgttagcccggat

SEQ ID NO: 27299 - DNA, 25 bp, Homo sapien
caccttggggtatcattgcctgcac

SEQ ID NO: 27300 - DNA, 25 bp, Homo sapien
taggagactgtaatgtaaatggtgc

SEQ ID NO: 27301 - DNA, 25 bp, Homo sapien
attgcaggcatgagctcctaagccc

SEQ ID NO: 27302 - DNA, 25 bp, Homo sapien
acgtggttgtaggaagacaaacttc

SEQ ID NO: 27303 - DNA, 25 bp, Homo sapien
cccagagagaggatcacgtggttgt

SEQ ID NO: 27304 - DNA, 25 bp, Homo sapien
tgatggacacataatcaggtcaact

SEQ ID NO: 27305 - DNA, 25 bp, Homo sapien
ttatttgccttccaggggcacttcc

SEQ ID NO: 27306 - DNA, 25 bp, Homo sapien
ctctttgctggagggtctgcagagc

SEQ ID NO: 27307 - DNA, 25 bp, Homo sapien
gggcacttccttgatggacacataa

SEQ ID NO: 27308 - DNA, 25 bp, Homo sapien
atcattgcctgcacttaggagactg

SEQ ID NO: 27309 - DNA, 25 bp, Homo sapien
acctcttgtccctggttgagtgggg

SEQ ID NO: 27310 - DNA, 25 bp, Homo sapien
caaacagagaaatgtaagtaagctt

SEQ ID NO: 27311 - DNA, 25 bp, Homo sapien
ataggcaatctgacaggttattgtc

SEQ ID NO: 27312 - DNA, 25 bp, Homo sapien
ccaaaagtggaaactataggcaatc

SEQ ID NO: 27313 - DNA, 25 bp, Homo sapien
ttacaagatagaccatcaaacagag

SEQ ID NO: 27314 - DNA, 25 bp, Homo sapien
tagaaagcctgcatacaggaagatc

SEQ ID NO: 27315 - DNA, 25 bp, Homo sapien
gaaagctgatgtggtaatccaaaac

SEQ ID NO: 27316 - DNA, 25 bp, Homo sapien
caggaagatccactagaaagctgat

SEQ ID NO: 27317 - DNA, 25 bp, Homo sapien
tgttgagagacctagtttgagactt

SEQ ID NO: 27318 - DNA, 25 bp, Homo sapien
attagagcagtaatacacagtatgc

SEQ ID NO: 27319 - DNA, 25 bp, Homo sapien
acacagtatgcattagaaagcctgc

SEQ ID NO: 27320 - DNA, 25 bp, Homo sapien
gtaagcactttgatgattagagcag

SEQ ID NO: 27321 - DNA, 25 bp, Homo sapien
gggttgcgcaccagtagtccctgct

SEQ ID NO: 27322 - DNA, 25 bp, Homo sapien
agcatcatccagctattctgactgc

SEQ ID NO: 27323 - DNA, 25 bp, Homo sapien
atggcagtgtgataatgccagccaa

SEQ ID NO: 27324 - DNA, 25 bp, Homo sapien
atgccagccaattcacagaagagag

SEQ ID NO: 27325 - DNA, 25 bp, Homo sapien
attctgactgcattatcaacacttc

SEQ ID NO: 27326 - DNA, 25 bp, Homo sapien
attagccagttgtggggttgcgcac

SEQ ID NO: 27327 - DNA, 25 bp, Homo sapien
tttaagagtaattcatggcagtgtg

SEQ ID NO: 27328 - DNA, 25 bp, Homo sapien
ctttctgtggtaaaggtactgttta

SEQ ID NO: 27329 - DNA, 25 bp, Homo sapien
tcacagaagagagaaattgtaatta

SEQ ID NO: 27330 - DNA, 25 bp, Homo sapien
tgtatgtacttaggtaatatgattc

SEQ ID NO: 27331 - DNA, 25 bp, Homo sapien
gaaatgttcattgaggtcaaaaggt

SEQ ID NO: 27332 - DNA, 25 bp, Homo sapien
tgttgataatgcagtcagaatagct

SEQ ID NO: 27333 - DNA, 25 bp, Homo sapien
agcagggactactggtgcgcaaccc

SEQ ID NO: 27334 - DNA, 25 bp, Homo sapien
taagaatcatattacctaagtacat

SEQ ID NO: 27335 - DNA, 25 bp, Homo sapien
tgaattggctggcattatcacactg

SEQ ID NO: 27336 - DNA, 25 bp, Homo sapien
acactgccatgaattactcttaaac

SEQ ID NO: 27337 - DNA, 25 bp, Homo sapien
gcagtcagaatagctggatgatgct

SEQ ID NO: 27338 - DNA, 25 bp, Homo sapien
ctttaccacagaaagaagtgttgat

SEQ ID NO: 27339 - DNA, 25 bp, Homo sapien
agaaagaagtgttgataatgcagtc

SEQ ID NO: 27340 - DNA, 25 bp, Homo sapien
ctcttctgtgaattggctggcatta

SEQ ID NO: 27341 - DNA, 25 bp, Homo sapien
acagtacctttaccacagaaagaag

SEQ ID NO: 27342 - DNA, 25 bp, Homo sapien
tgcctggcccacattcttattacta

SEQ ID NO: 27343 - DNA, 25 bp, Homo sapien
caggccaccggacttttgaaaccaa

SEQ ID NO: 27344 - DNA, 25 bp, Homo sapien
ttgaaaccaaagatcagccagaata

SEQ ID NO: 27345 - DNA, 25 bp, Homo sapien
tgaagcagataaagatcagcatccg

SEQ ID NO: 27346 - DNA, 25 bp, Homo sapien
gtacctcagacgacagcaacttcct

SEQ ID NO: 27347 - DNA, 25 bp, Homo sapien
tcttgtggaccatccctggaggttt

SEQ ID NO: 27348 - DNA, 25 bp, Homo sapien
gaccaggactacaagtacgacagta

SEQ ID NO: 27349 - DNA, 25 bp, Homo sapien
catgtagcttggaggctgttgactc

SEQ ID NO: 27350 - DNA, 25 bp, Homo sapien
atggagccaagcaaaaccctgctta

SEQ ID NO: 27351 - DNA, 25 bp, Homo sapien
gatcagcatccggagaataagccca

SEQ ID NO: 27352 - DNA, 25 bp, Homo sapien
tcttcaggtcaccatagaggtggtc

SEQ ID NO: 27353 - DNA, 25 bp, Homo sapien
gaagaataaacgaggatgatgcctt

SEQ ID NO: 27354 - DNA, 25 bp, Homo sapien
ttagtaggctaaatccaactttgtg

SEQ ID NO: 27355 - DNA, 25 bp, Homo sapien
aggccacggccacaagttttcaaac

SEQ ID NO: 27356 - DNA, 25 bp, Homo sapien
ggaccttggcattcatctgatcaaa

SEQ ID NO: 27357 - DNA, 25 bp, Homo sapien
attattatgtggcttgttgaagggc

SEQ ID NO: 27358 - DNA, 25 bp, Homo sapien
gtcattaatggatagtaaagtcaat

SEQ ID NO: 27359 - DNA, 25 bp, Homo sapien
agatgaaaagtacccatttgatgcc

SEQ ID NO: 27360 - DNA, 25 bp, Homo sapien
caggctctatagagtgacagaggct

SEQ ID NO: 27361 - DNA, 25 bp, Homo sapien
aaccatggaaagcaagtcattaatg

SEQ ID NO: 27362 - DNA, 25 bp, Homo sapien
tggatctggaaaggaccttggcatt

SEQ ID NO: 27363 - DNA, 25 bp, Homo sapien
ttgcacaaacctaagagaaacccag

SEQ ID NO: 27364 - DNA, 25 bp, Homo sapien
gaggctgggatgtagttattacgtt

SEQ ID NO: 27365 - DNA, 25 bp, Homo sapien
ttggagccttagcttatctgccatc

SEQ ID NO: 27366 - DNA, 25 bp, Homo sapien
tactgcatcaaagcagagattgcca

SEQ ID NO: 27367 - DNA, 25 bp, Homo sapien
ttgccacgtgattgcccagtgtgat

SEQ ID NO: 27368 - DNA, 25 bp, Homo sapien
tgcatcaaagcagagattgccacgt

SEQ ID NO: 27369 - DNA, 25 bp, Homo sapien
ggagaacctcttcccagggtcacag

SEQ ID NO: 27370 - DNA, 25 bp, Homo sapien
agcttggacttggagccttagctta

SEQ ID NO: 27371 - DNA, 25 bp, Homo sapien
agagattgccacgtgattgcccagt

SEQ ID NO: 27372 - DNA, 25 bp, Homo sapien
tcaaagcagagattgccacgtgatt

SEQ ID NO: 27373 - DNA, 25 bp, Homo sapien
agaattcaaagggagaacctcttcc

SEQ ID NO: 27374 - DNA, 25 bp, Homo sapien
gggtcacagagtgatcagtgccaca

SEQ ID NO: 27375 - DNA, 25 bp, Homo sapien
cacagagtgatcagtgccacagctt

SEQ ID NO: 27376 - DNA, 25 bp, Homo sapien
gaaggacaggaaatgtctctaatgc

SEQ ID NO: 27377 - DNA, 25 bp, Homo sapien
cctatttggcctgtgtcatctgtaa

SEQ ID NO: 27378 - DNA, 25 bp, Homo sapien
taccaggaggtaatatgcatttaaa

SEQ ID NO: 27379 - DNA, 25 bp, Homo sapien
aacaaatatcatttaccaggaggta

SEQ ID NO: 27380 - DNA, 25 bp, Homo sapien
ctggcaagcaaaagaagtaaactgt

SEQ ID NO: 27381 - DNA, 25 bp, Homo sapien
agatggagaatttcccacttgaggc

SEQ ID NO: 27382 - DNA, 25 bp, Homo sapien
ctgttggtctgtataaactatttcc

SEQ ID NO: 27383 - DNA, 25 bp, Homo sapien
cgagtatacactgggaagaagatta

SEQ ID NO: 27384 - DNA, 25 bp, Homo sapien
tttcccacttgaggcgagtatacac

SEQ ID NO: 27385 - DNA, 25 bp, Homo sapien
ttttgtgcaaagtatcatgtcagat

SEQ ID NO: 27386 - DNA, 25 bp, Homo sapien
atcatgtcagatatggaaagaagga

SEQ ID NO: 27387 - DNA, 25 bp, Homo sapien
ttctctgtcctcacagtggtgtggc

SEQ ID NO: 27388 - DNA, 25 bp, Homo sapien
gctgggtgtgtaactctcgtcctgt

SEQ ID NO: 27389 - DNA, 25 bp, Homo sapien
atggtcgcagccctccaccaggtgg

SEQ ID NO: 27390 - DNA, 25 bp, Homo sapien
actctcgtcctgtgttccgtggaca

SEQ ID NO: 27391 - DNA, 25 bp, Homo sapien
caccagtggggtttgtcatgctgac

SEQ ID NO: 27392 - DNA, 25 bp, Homo sapien
atgctgacactgatgacagaggtga

SEQ ID NO: 27393 - DNA, 25 bp, Homo sapien
gcaggtcacgccatgccttctctgt

SEQ ID NO: 27394 - DNA, 25 bp, Homo sapien
tcatgctgacactgatgacagaggt

SEQ ID NO: 27395 - DNA, 25 bp, Homo sapien
atccagcaccctccatggtcgcagc

SEQ ID NO: 27396 - DNA, 25 bp, Homo sapien
acagaggtgaactcatggtcccccg

SEQ ID NO: 27397 - DNA, 25 bp, Homo sapien
tccaccaggtggcaggtcacgccat

SEQ ID NO: 27398 - DNA, 25 bp, Homo sapien
ctcagggcgcggttacacaatgtcc

SEQ ID NO: 27399 - DNA, 25 bp, Homo sapien
taagcacctccgctgtgtgtagcct

SEQ ID NO: 27400 - DNA, 25 bp, Homo sapien
ccaatgaaggcaactaccgcgagct

SEQ ID NO: 27401 - DNA, 25 bp, Homo sapien
tcctgatcatgggagtgttaccggt

SEQ ID NO: 27402 - DNA, 25 bp, Homo sapien
accaaaggagagagtgattgaaaat

SEQ ID NO: 27403 - DNA, 25 bp, Homo sapien
ctcgtcacttggtggcactgaccac

SEQ ID NO: 27404 - DNA, 25 bp, Homo sapien
gctcatcagacccaagatggccttg

SEQ ID NO: 27405 - DNA, 25 bp, Homo sapien
ctcaagctgactctgcatggcatca

SEQ ID NO: 27406 - DNA, 25 bp, Homo sapien
gtgtgtagccttgggtcctgatcat

SEQ ID NO: 27407 - DNA, 25 bp, Homo sapien
cactcctgggatgtgcgttaagcac

SEQ ID NO: 27408 - DNA, 25 bp, Homo sapien
ccagtggcacgttcatctcaggagc

SEQ ID NO: 27409 - DNA, 25 bp, Homo sapien
ggtagacgtctatgcgatattccca

SEQ ID NO: 27410 - DNA, 25 bp, Homo sapien
gcttgcgttgctggacaggattatt

SEQ ID NO: 27411 - DNA, 25 bp, Homo sapien
gtaagaactgcccttggtagacgtc

SEQ ID NO: 27412 - DNA, 25 bp, Homo sapien
atccgtgtctatccagagagccagg

SEQ ID NO: 27413 - DNA, 25 bp, Homo sapien
gaatcacttggctgaaaaacggcgt

SEQ ID NO: 27414 - DNA, 25 bp, Homo sapien
acggcgtggatgtctcaactcagat

SEQ ID NO: 27415 - DNA, 25 bp, Homo sapien
gagtgaacagatggctcccaaattt

SEQ ID NO: 27416 - DNA, 25 bp, Homo sapien
aggaatggaaatgagaggtataatt

SEQ ID NO: 27417 - DNA, 25 bp, Homo sapien
cagtgccgccagtcatccgtgtcta

SEQ ID NO: 27418 - DNA, 25 bp, Homo sapien
tgatgagaagctgtcactcaggtcc

SEQ ID NO: 27419 - DNA, 25 bp, Homo sapien
tataagtcagacaggttaggagtga

SEQ ID NO: 27420 - DNA, 25 bp, Homo sapien
aaacatgacacagggctgggacata

SEQ ID NO: 27421 - DNA, 25 bp, Homo sapien
tcagctatataatgaggactaagtc

SEQ ID NO: 27422 - DNA, 25 bp, Homo sapien
atatgatggtatatgaagatgaaac

SEQ ID NO: 27423 - DNA, 25 bp, Homo sapien
ttgagacaatatagggagggaatta

SEQ ID NO: 27424 - DNA, 25 bp, Homo sapien
ggactaagtcaacctctgcatataa

SEQ ID NO: 27425 - DNA, 25 bp, Homo sapien
acagggctgggacataactctcaaa

SEQ ID NO: 27426 - DNA, 25 bp, Homo sapien
ttagtgtagttaatgaactagaccc

SEQ ID NO: 27427 - DNA, 25 bp, Homo sapien
caaatcctagctctgtgacaactta

SEQ ID NO: 27428 - DNA, 25 bp, Homo sapien
atactgctgaataggtacaatgcta

SEQ ID NO: 27429 - DNA, 25 bp, Homo sapien
ttagatgagatcataaaggtggggt

SEQ ID NO: 27430 - DNA, 25 bp, Homo sapien
aaggtggggtctcataatagtttta

SEQ ID NO: 27431 - DNA, 25 bp, Homo sapien
tcattatatagctgagggaactggg

SEQ ID NO: 27432 - DNA, 25 bp, Homo sapien
agcattgtacctattcagcagtatc

SEQ ID NO: 27433 - DNA, 25 bp, Homo sapien
ccatgtactgggtgtcttaaacgac

SEQ ID NO: 27434 - DNA, 25 bp, Homo sapien
aaggttataatcagtaagttgtcac

SEQ ID NO: 27435 - DNA, 25 bp, Homo sapien
taagttgtcacagagctaggatttg

SEQ ID NO: 27436 - DNA, 25 bp, Homo sapien
gagagagaagcaagttctctggtgt

SEQ ID NO: 27437 - DNA, 25 bp, Homo sapien
gtcccagccctgtgtcatgttttta

SEQ ID NO: 27438 - DNA, 25 bp, Homo sapien
ttatatgcagaggttgacttagtcc

SEQ ID NO: 27439 - DNA, 25 bp, Homo sapien
tttgagagttatgtcccagccctgt

SEQ ID NO: 27440 - DNA, 25 bp, Homo sapien
aagggcactaaaactattatgagac

SEQ ID NO: 27441 - DNA, 25 bp, Homo sapien
tctctggtgtctcttaagggcacta

SEQ ID NO: 27442 - DNA, 25 bp, Homo sapien
tgtttgcagattgaatgttacattc

SEQ ID NO: 27443 - DNA, 25 bp, Homo sapien
catgtgtttgcagattgaatgttac

SEQ ID NO: 27444 - DNA, 25 bp, Homo sapien
ctttgtattaaaaacctcaggaggc

SEQ ID NO: 27445 - DNA, 25 bp, Homo sapien
gaacatccaacaaacctgtgtcaca

SEQ ID NO: 27446 - DNA, 25 bp, Homo sapien
gactaaatgtcccagcgagaacttt

SEQ ID NO: 27447 - DNA, 25 bp, Homo sapien
aatgtcccagcgagaactttgtatt

SEQ ID NO: 27448 - DNA, 25 bp, Homo sapien
tattagtatgagacagtaagagttc

SEQ ID NO: 27449 - DNA, 25 bp, Homo sapien
aacacagactaaatgtcccagcgag

SEQ ID NO: 27450 - DNA, 25 bp, Homo sapien
acagactaaatgtcccagcgagaac

SEQ ID NO: 27451 - DNA, 25 bp, Homo sapien
agtatgagacagtaagagttcattc

SEQ ID NO: 27452 - DNA, 25 bp, Homo sapien
aatgatgggtcttattagtatgaga

SEQ ID NO: 27453 - DNA, 25 bp, Homo sapien
ttgttggatgttcactgaagatgtg

SEQ ID NO: 27454 - DNA, 25 bp, Homo sapien
ttcaatctgcaaacacatgaatgtt

SEQ ID NO: 27455 - DNA, 25 bp, Homo sapien
aaagttctcgctgggacatttagtc

SEQ ID NO: 27456 - DNA, 25 bp, Homo sapien
tgtgacacaggtttgttggatgttc

SEQ ID NO: 27457 - DNA, 25 bp, Homo sapien
cggcctcctgaggtttttaatacaa

SEQ ID NO: 27458 - DNA, 25 bp, Homo sapien
agaatgtaacattcaatctgcaaac

SEQ ID NO: 27459 - DNA, 25 bp, Homo sapien
ctcgctgggacatttagtctgtgtt

SEQ ID NO: 27460 - DNA, 25 bp, Homo sapien
aatacaaagttctcgctgggacatt

SEQ ID NO: 27461 - DNA, 25 bp, Homo sapien
tctcatactaataagacccatcatt

SEQ ID NO: 27462 - DNA, 25 bp, Homo sapien
tttaatacaaagttctcgctgggac

SEQ ID NO: 27463 - DNA, 25 bp, Homo sapien
tggattcccatgaaaactgtggagt

SEQ ID NO: 27464 - DNA, 25 bp, Homo sapien
gaacaaatatgctgttaccggaatt

SEQ ID NO: 27465 - DNA, 25 bp, Homo sapien
cccatgcatgttgaaagtgggactt

SEQ ID NO: 27466 - DNA, 25 bp, Homo sapien
ctcccatgcatgttgaaagtgggac

SEQ ID NO: 27467 - DNA, 25 bp, Homo sapien
acaaatatgctgttaccggaattgc

SEQ ID NO: 27468 - DNA, 25 bp, Homo sapien
tggaaacttcatcctcccatgcatg

SEQ ID NO: 27469 - DNA, 25 bp, Homo sapien
caaatatgctgttaccggaattgca

SEQ ID NO: 27470 - DNA, 25 bp, Homo sapien
atcctcccatgcatgttgaaagtgg

SEQ ID NO: 27471 - DNA, 25 bp, Homo sapien
aatatgctgttaccggaattgcatt

SEQ ID NO: 27472 - DNA, 25 bp, Homo sapien
tgaacaaatatgctgttaccggaat

SEQ ID NO: 27473 - DNA, 25 bp, Homo sapien
tcatcctcccatgcatgttgaaagt

SEQ ID NO: 27474 - DNA, 25 bp, Homo sapien
ccatgcatgttgaaagtgggacttt

SEQ ID NO: 27475 - DNA, 25 bp, Homo sapien
aaggcagagattactggaaagagga

SEQ ID NO: 27476 - DNA, 25 bp, Homo sapien
cagagccttcttgacactgagtgtc

SEQ ID NO: 27477 - DNA, 25 bp, Homo sapien
tatgtatggcttgaatgtgtccctc

SEQ ID NO: 27478 - DNA, 25 bp, Homo sapien
taacttttaacagtctggagagacc

SEQ ID NO: 27479 - DNA, 25 bp, Homo sapien
ggagagagctatgtatggcttgaat

SEQ ID NO: 27480 - DNA, 25 bp, Homo sapien
aagatgtaataggattcagtttaac

SEQ ID NO: 27481 - DNA, 25 bp, Homo sapien
ttcttggcatcacccaataccaggc

SEQ ID NO: 27482 - DNA, 25 bp, Homo sapien
cagaagctaagatgtaataggattc

SEQ ID NO: 27483 - DNA, 25 bp, Homo sapien
atcacccaataccaggcatcagagc

SEQ ID NO: 27484 - DNA, 25 bp, Homo sapien
aaacagaggagagagctatgtatgg

SEQ ID NO: 27485 - DNA, 25 bp, Homo sapien
ggcatcagagccttcttgacactga

SEQ ID NO: 27486 - DNA, 25 bp, Homo sapien
caattccggtaacagcatatttgtt

SEQ ID NO: 27487 - DNA, 25 bp, Homo sapien
atgcaattccggtaacagcatattt

SEQ ID NO: 27488 - DNA, 25 bp, Homo sapien
acatgcatgggaggatgaagtttcc

SEQ ID NO: 27489 - DNA, 25 bp, Homo sapien
atgcatgggaggatgaagtttccaa

SEQ ID NO: 27490 - DNA, 25 bp, Homo sapien
aattccggtaacagcatatttgttc

SEQ ID NO: 27491 - DNA, 25 bp, Homo sapien
gtcccactttcaacatgcatgggag

SEQ ID NO: 27492 - DNA, 25 bp, Homo sapien
aacatgcatgggaggatgaagtttc

SEQ ID NO: 27493 - DNA, 25 bp, Homo sapien
aaagtcccactttcaacatgcatgg

SEQ ID NO: 27494 - DNA, 25 bp, Homo sapien
aatgcaattccggtaacagcatatt

SEQ ID NO: 27495 - DNA, 25 bp, Homo sapien
catgcatgggaggatgaagtttcca

SEQ ID NO: 27496 - DNA, 25 bp, Homo sapien
attccggtaacagcatatttgttca

SEQ ID NO: 27497 - DNA, 25 bp, Homo sapien
ggagggacacattcaagccatacat

SEQ ID NO: 27498 - DNA, 25 bp, Homo sapien
tggtctctccagactgttaaaagtt

SEQ ID NO: 27499 - DNA, 25 bp, Homo sapien
ctgatgcctggtattgggtgatgcc

SEQ ID NO: 27500 - DNA, 25 bp, Homo sapien
tgacactcagtgtcaagaaggctct

SEQ ID NO: 27501 - DNA, 25 bp, Homo sapien
aagttaaactgaatcctattacatc

SEQ ID NO: 27502 - DNA, 25 bp, Homo sapien
gcctggtattgggtgatgccaagaa

SEQ ID NO: 27503 - DNA, 25 bp, Homo sapien
agccatacatagctctctcctctgt

SEQ ID NO: 27504 - DNA, 25 bp, Homo sapien
tcagtgtcaagaaggctctgatgcc

SEQ ID NO: 27505 - DNA, 25 bp, Homo sapien
ctctccagactgttaaaagttaaac

SEQ ID NO: 27506 - DNA, 25 bp, Homo sapien
tactgatcttgccaaaagagcatgt

SEQ ID NO: 27507 - DNA, 25 bp, Homo sapien
tttccagtaatctctgccttccttc

SEQ ID NO: 27508 - DNA, 25 bp, Homo sapien
ctacaggatagtggatgaattcttc

SEQ ID NO: 27509 - DNA, 25 bp, Homo sapien
ctttcaggaaccaacaaaatggcat

SEQ ID NO: 27510 - DNA, 25 bp, Homo sapien
aatggcatcttcataccttgtgatc

SEQ ID NO: 27511 - DNA, 25 bp, Homo sapien
tcctttcaggaaccaacaaaatggc

SEQ ID NO: 27512 - DNA, 25 bp, Homo sapien
gaattcttcccgctgttgtcaaaca

SEQ ID NO: 27513 - DNA, 25 bp, Homo sapien
ctgtccattccaagagcatttgctc

SEQ ID NO: 27514 - DNA, 25 bp, Homo sapien
tcataccttgtgatcatacattacc

SEQ ID NO: 27515 - DNA, 25 bp, Homo sapien
agagcatttgctcctttcaggaacc

SEQ ID NO: 27516 - DNA, 25 bp, Homo sapien
tggatttctctacaggatagtggat

SEQ ID NO: 27517 - DNA, 25 bp, Homo sapien
tctctacaggatagtggatgaattc

SEQ ID NO: 27518 - DNA, 25 bp, Homo sapien
caggaaccaacaaaatggcatcttc

SEQ ID NO: 27519 - DNA, 25 bp, Homo sapien
ctgatcaaaattccaatgtagattt

SEQ ID NO: 27520 - DNA, 25 bp, Homo sapien
tgaaccaaaggtaagagctagaact

SEQ ID NO: 27521 - DNA, 25 bp, Homo sapien
tagcaagagcattactacacaaaat

SEQ ID NO: 27522 - DNA, 25 bp, Homo sapien
atgaaaccatgctgtccattccaag

SEQ ID NO: 27523 - DNA, 25 bp, Homo sapien
gtagattttcatgggtggtgcattg

SEQ ID NO: 27524 - DNA, 25 bp, Homo sapien
atcctacaaatgtggcaatccttct

SEQ ID NO: 27525 - DNA, 25 bp, Homo sapien
acatgggtaggtatctcttcttgac

SEQ ID NO: 27526 - DNA, 25 bp, Homo sapien
atgctctcagagttgaaccaaaggt

SEQ ID NO: 27527 - DNA, 25 bp, Homo sapien
ctggtacatgggtaggtatctcttc

SEQ ID NO: 27528 - DNA, 25 bp, Homo sapien
aagagctagaacttagcaagagcat

SEQ ID NO: 27529 - DNA, 25 bp, Homo sapien
gactagaagacaatcctacaaatgt

SEQ ID NO: 27530 - DNA, 25 bp, Homo sapien
ggttcctgaaaggagcaaatgctct

SEQ ID NO: 27531 - DNA, 25 bp, Homo sapien
tcatccactatcctgtagagaaatc

SEQ ID NO: 27532 - DNA, 25 bp, Homo sapien
tcacaaggtatgaagatgccatttt

SEQ ID NO: 27533 - DNA, 25 bp, Homo sapien
atccagaggtaatgtatgatcacaa

SEQ ID NO: 27534 - DNA, 25 bp, Homo sapien
tgtttgacaacagcgggaagaattc

SEQ ID NO: 27535 - DNA, 25 bp, Homo sapien
gagcaaatgctcttggaatggacag

SEQ ID NO: 27536 - DNA, 25 bp, Homo sapien
aacagcgggaagaattcatccacta

SEQ ID NO: 27537 - DNA, 25 bp, Homo sapien
atcctgtagagaaatccagaggtaa

SEQ ID NO: 27538 - DNA, 25 bp, Homo sapien
gtagagaaatccagaggtaatgtat

SEQ ID NO: 27539 - DNA, 25 bp, Homo sapien
cattttgttggttcctgaaaggagc

SEQ ID NO: 27540 - DNA, 25 bp, Homo sapien
atgatcacaaggtatgaagatgcca

SEQ ID NO: 27541 - DNA, 25 bp, Homo sapien
agtcccttactctaggagctccctg

SEQ ID NO: 27542 - DNA, 25 bp, Homo sapien
tcgtatgattttgaggtattcttcc

SEQ ID NO: 27543 - DNA, 25 bp, Homo sapien
cttgtgcaaacaaaacggtgaaaca

SEQ ID NO: 27544 - DNA, 25 bp, Homo sapien
tactgtcttagagtcttgtgcaaac

SEQ ID NO: 27545 - DNA, 25 bp, Homo sapien
ttcaccaggatgtcccaaagatatc

SEQ ID NO: 27546 - DNA, 25 bp, Homo sapien
cggtgaaacaggcacacttgtcaaa

SEQ ID NO: 27547 - DNA, 25 bp, Homo sapien
tttgagaccaaactacctgccatct

SEQ ID NO: 27548 - DNA, 25 bp, Homo sapien
cagatggcacctcccagtttgagac

SEQ ID NO: 27549 - DNA, 25 bp, Homo sapien
ctattccttgggacctatctcagtc

SEQ ID NO: 27550 - DNA, 25 bp, Homo sapien
gtgactatagttactgagtcctcag

SEQ ID NO: 27551 - DNA, 25 bp, Homo sapien
acttgtcaaagagtggcctcgtatg

SEQ ID NO: 27552 - DNA, 25 bp, Homo sapien
gacatagttataagctttgtttaag

SEQ ID NO: 27553 - DNA, 25 bp, Homo sapien
cttaaacaaagcttataactatgtc

SEQ ID NO: 27554 - DNA, 25 bp, Homo sapien
atatctaggcaaggtaggagaccag

SEQ ID NO: 27555 - DNA, 25 bp, Homo sapien
caactagacgatggtggtgccactt

SEQ ID NO: 27556 - DNA, 25 bp, Homo sapien
ttggctttggcaactagacgatggt

SEQ ID NO: 27557 - DNA, 25 bp, Homo sapien
gctttggcaactagacgatggtggt

SEQ ID NO: 27558 - DNA, 25 bp, Homo sapien
gtgtagatatctaggcaaggtagga

SEQ ID NO: 27559 - DNA, 25 bp, Homo sapien
atggtggtgccacttgtgtagatat

SEQ ID NO: 27560 - DNA, 25 bp, Homo sapien
cttgtgtagatatctaggcaaggta

SEQ ID NO: 27561 - DNA, 25 bp, Homo sapien
gtggtgccacttgtgtagatatcta

SEQ ID NO: 27562 - DNA, 25 bp, Homo sapien
gccacttgtgtagatatctaggcaa

SEQ ID NO: 27563 - DNA, 25 bp, Homo sapien
tagatatctaggcaaggtaggagac

SEQ ID NO: 27564 - DNA, 25 bp, Homo sapien
tttggcaactagacgatggtggtgc

SEQ ID NO: 27565 - DNA, 25 bp, Homo sapien
tgacaagtgtgcctgtttcaccgtt

SEQ ID NO: 27566 - DNA, 25 bp, Homo sapien
gatggcaggtagtttggtctcaaac

SEQ ID NO: 27567 - DNA, 25 bp, Homo sapien
gagataggtcccaaggaatagactt

SEQ ID NO: 27568 - DNA, 25 bp, Homo sapien
ctcaaaatcatacgaggccactctt

SEQ ID NO: 27569 - DNA, 25 bp, Homo sapien
ccaggtttgggataaagattgcttt

SEQ ID NO: 27570 - DNA, 25 bp, Homo sapien
ttgctcagggagctcctagagtaag

SEQ ID NO: 27571 - DNA, 25 bp, Homo sapien
gtggagatgaactgaggactcagta

SEQ ID NO: 27572 - DNA, 25 bp, Homo sapien
ctcctagagtaagggactgagatag

SEQ ID NO: 27573 - DNA, 25 bp, Homo sapien
gtttgcacaagactctaagacagta

SEQ ID NO: 27574 - DNA, 25 bp, Homo sapien
tatctttgggacatcctggtgaaga

SEQ ID NO: 27575 - DNA, 25 bp, Homo sapien
ctgaggactcagtaactatagtcac

SEQ ID NO: 27576 - DNA, 25 bp, Homo sapien
ttcctgtagttgtgctggatgagtg

SEQ ID NO: 27577 - DNA, 25 bp, Homo sapien
atccttcccattgcaaggtaaccta

SEQ ID NO: 27578 - DNA, 25 bp, Homo sapien
cttaaatttcctgtagttgtgctgg

SEQ ID NO: 27579 - DNA, 25 bp, Homo sapien
gtcagataactgaaccggcctctat

SEQ ID NO: 27580 - DNA, 25 bp, Homo sapien
gtagtcagataactgaaccggcctc

SEQ ID NO: 27581 - DNA, 25 bp, Homo sapien
cattgcaaggtaacctaaaagattc

SEQ ID NO: 27582 - DNA, 25 bp, Homo sapien
cccaggggtaatacctgtaatccta

SEQ ID NO: 27583 - DNA, 25 bp, Homo sapien
cagtgagcagggattgaacgactgc

SEQ ID NO: 27584 - DNA, 25 bp, Homo sapien
gcagggattgaacgactgcactcca

SEQ ID NO: 27585 - DNA, 25 bp, Homo sapien
agtgtagtcagataactgaaccggc

SEQ ID NO: 27586 - DNA, 25 bp, Homo sapien
ctggatgagtgtagtcagataactg

SEQ ID NO: 27587 - DNA, 25 bp, Homo sapien
aaagaatcttttaggttaccttgca

SEQ ID NO: 27588 - DNA, 25 bp, Homo sapien
gatagaggccggttcagttatctga

SEQ ID NO: 27589 - DNA, 25 bp, Homo sapien
atagaggccggttcagttatctgac

SEQ ID NO: 27590 - DNA, 25 bp, Homo sapien
atccagcacaactacaggaaattta

SEQ ID NO: 27591 - DNA, 25 bp, Homo sapien
tcatccagcacaactacaggaaatt

SEQ ID NO: 27592 - DNA, 25 bp, Homo sapien
ctggagtgcagtcgttcaatccctg

SEQ ID NO: 27593 - DNA, 25 bp, Homo sapien
cttttaggttaccttgcaatgggaa

SEQ ID NO: 27594 - DNA, 25 bp, Homo sapien
ggatagaggccggttcagttatctg

SEQ ID NO: 27595 - DNA, 25 bp, Homo sapien
actcatccagcacaactacaggaaa

SEQ ID NO: 27596 - DNA, 25 bp, Homo sapien
agtgcagtcgttcaatccctgctca

SEQ ID NO: 27597 - DNA, 25 bp, Homo sapien
agttatctgactacactcatccagc

SEQ ID NO: 27598 - DNA, 25 bp, Homo sapien
taaattttgccacttaagggcactc

SEQ ID NO: 27599 - DNA, 25 bp, Homo sapien
aataaatagcggtaaacgacctagc

SEQ ID NO: 27600 - DNA, 25 bp, Homo sapien
acttagctttagaaagtaaatgtcc

SEQ ID NO: 27601 - DNA, 25 bp, Homo sapien
atttggggtgctttgtctatgcttg

SEQ ID NO: 27602 - DNA, 25 bp, Homo sapien
gacctagcgcagagatcctaaacat

SEQ ID NO: 27603 - DNA, 25 bp, Homo sapien
tctatgcttgttatgacttagcttt

SEQ ID NO: 27604 - DNA, 25 bp, Homo sapien
acattcagagaaacatttggggtgc

SEQ ID NO: 27605 - DNA, 25 bp, Homo sapien
aagggcactcaaatagtgtaacacc

SEQ ID NO: 27606 - DNA, 25 bp, Homo sapien
gcgcagagatcctaaacattacatt

SEQ ID NO: 27607 - DNA, 25 bp, Homo sapien
gtaaacgacctagcgcagagatcct

SEQ ID NO: 27608 - DNA, 25 bp, Homo sapien
agaaagtaaatgtccttacacacct

SEQ ID NO: 27609 - DNA, 25 bp, Homo sapien
gctaagtcataacaagcatagacaa

SEQ ID NO: 27610 - DNA, 25 bp, Homo sapien
aggggtgttacactatttgagtgcc

SEQ ID NO: 27611 - DNA, 25 bp, Homo sapien
tatttgagtgcccttaagtggcaaa

SEQ ID NO: 27612 - DNA, 25 bp, Homo sapien
aggatctctgcgctaggtcgtttac

SEQ ID NO: 27613 - DNA, 25 bp, Homo sapien
tgagtgcccttaagtggcaaaattt

SEQ ID NO: 27614 - DNA, 25 bp, Homo sapien
aatgtaatgtttaggatctctgcgc

SEQ ID NO: 27615 - DNA, 25 bp, Homo sapien
ataaaaggggtgttacactatttga

SEQ ID NO: 27616 - DNA, 25 bp, Homo sapien
cataacaagcatagacaaagcaccc

SEQ ID NO: 27617 - DNA, 25 bp, Homo sapien
tctgcgctaggtcgtttaccgctat

SEQ ID NO: 27618 - DNA, 25 bp, Homo sapien
atgtttaggatctctgcgctaggtc

SEQ ID NO: 27619 - DNA, 25 bp, Homo sapien
ctctgaatgtaatgtttaggatctc

SEQ ID NO: 27620 - DNA, 25 bp, Homo sapien
tttgtgcatccaggaggccattgta

SEQ ID NO: 27621 - DNA, 25 bp, Homo sapien
cagcattgttggtatcaaggtggtc

SEQ ID NO: 27622 - DNA, 25 bp, Homo sapien
caataatatagtgcctaagtgccac

SEQ ID NO: 27623 - DNA, 25 bp, Homo sapien
atggctttataggaaagtaacattc

SEQ ID NO: 27624 - DNA, 25 bp, Homo sapien
ggaaaggacaacaacagacatgtct

SEQ ID NO: 27625 - DNA, 25 bp, Homo sapien
ttagtacttagggtatcatggcttt

SEQ ID NO: 27626 - DNA, 25 bp, Homo sapien
tctggttgagtaaacttgaccaaac

SEQ ID NO: 27627 - DNA, 25 bp, Homo sapien
aaatttgccaatccatgaaagtatc

SEQ ID NO: 27628 - DNA, 25 bp, Homo sapien
atgaaagtatcataggaagtctacc

SEQ ID NO: 27629 - DNA, 25 bp, Homo sapien
aaattacgggttatgagaaatgtta

SEQ ID NO: 27630 - DNA, 25 bp, Homo sapien
gcccttcagggtcttttgtgcatcc

SEQ ID NO: 27631 - DNA, 25 bp, Homo sapien
cagagtacgcgtaagcagtggtaac

SEQ ID NO: 27632 - DNA, 25 bp, Homo sapien
tggtaacaacgcagagtacgcgtaa

SEQ ID NO: 27633 - DNA, 25 bp, Homo sapien
taacaacgcagagtacgcgtaagca

SEQ ID NO: 27634 - DNA, 25 bp, Homo sapien
taagcagtggtaacaacgcagagta

SEQ ID NO: 27635 - DNA, 25 bp, Homo sapien
gagtacgcgtaagcagtggtaacaa

SEQ ID NO: 27636 - DNA, 25 bp, Homo sapien
agtacgcgtaagcagtggtaacaac

SEQ ID NO: 27637 - DNA, 25 bp, Homo sapien
cagtggtaacaacgcagagtacgcg

SEQ ID NO: 27638 - DNA, 25 bp, Homo sapien
aagcagtggtaacaacgcagagtac

SEQ ID NO: 27639 - DNA, 25 bp, Homo sapien
cgtaagcagtggtaacaacgcagag

SEQ ID NO: 27640 - DNA, 25 bp, Homo sapien
acaacgcagagtacgcgtaagcagt

SEQ ID NO: 27641 - DNA, 25 bp, Homo sapien
tacgcgtaagcagtggtaacaacgc

SEQ ID NO: 27642 - DNA, 25 bp, Homo sapien
taacaacgcagagcacgcggggtat

SEQ ID NO: 27643 - DNA, 25 bp, Homo sapien
agtacgcgtaagcagtggtaacaac

SEQ ID NO: 27644 - DNA, 25 bp, Homo sapien
ttaagagaactgtgtagaagactat

SEQ ID NO: 27645 - DNA, 25 bp, Homo sapien
tagccttttaagagaactgtgtaga

SEQ ID NO: 27646 - DNA, 25 bp, Homo sapien
ataactgatcttttgacatactcac

SEQ ID NO: 27647 - DNA, 25 bp, Homo sapien
ataaaaagggctttataactgatct

SEQ ID NO: 27648 - DNA, 25 bp, Homo sapien
taagcagtggtaacaacgcagagta

SEQ ID NO: 27649 - DNA, 25 bp, Homo sapien
taagcagtggtaacaacgcagagca

SEQ ID NO: 27650 - DNA, 25 bp, Homo sapien
aagcagtggtaacaacgcagagtac

SEQ ID NO: 27651 - DNA, 25 bp, Homo sapien
tggtaacaacgcagagtacgcgtaa

SEQ ID NO: 27652 - DNA, 25 bp, Homo sapien
cacgcggggtattagtagcctttta

SEQ ID NO: 27653 - DNA, 25 bp, Homo sapien
gtcaaaagatcagttataaagccct

SEQ ID NO: 27654 - DNA, 25 bp, Homo sapien
aagatcagttataaagcccttttta

SEQ ID NO: 27655 - DNA, 25 bp, Homo sapien
ttttcctgggcatatgccactcaaa

SEQ ID NO: 27656 - DNA, 25 bp, Homo sapien
actcaaagtgagtatgtcaaaagat

SEQ ID NO: 27657 - DNA, 25 bp, Homo sapien
caaagtgagtatgtcaaaagatcag

SEQ ID NO: 27658 - DNA, 25 bp, Homo sapien
ttcctgggcatatgccactcaaagt

SEQ ID NO: 27659 - DNA, 25 bp, Homo sapien
atagtcttctacacagttctcttaa

SEQ ID NO: 27660 - DNA, 25 bp, Homo sapien
tattttcctgggcatatgccactca

SEQ ID NO: 27661 - DNA, 25 bp, Homo sapien
ttttatagtcttctacacagttctc

SEQ ID NO: 27662 - DNA, 25 bp, Homo sapien
ctcaaagtgagtatgtcaaaagatc

SEQ ID NO: 27663 - DNA, 25 bp, Homo sapien
gccactcaaagtgagtatgtcaaaa

SEQ ID NO: 27664 - DNA, 25 bp, Homo sapien
cagatattcatgagagagctaggag

SEQ ID NO: 27665 - DNA, 25 bp, Homo sapien
taggaggtgcccacattgcgagtac

SEQ ID NO: 27666 - DNA, 25 bp, Homo sapien
atcttcattggcaggaccaccagtt

SEQ ID NO: 27667 - DNA, 25 bp, Homo sapien
agagaaggaaacctggagtccattt

SEQ ID NO: 27668 - DNA, 25 bp, Homo sapien
gcagtacagaccacacaggccacag

SEQ ID NO: 27669 - DNA, 25 bp, Homo sapien
atcaagtcacagtgctaccgtagcc

SEQ ID NO: 27670 - DNA, 25 bp, Homo sapien
ttgcgagtaccagaacataagtatc

SEQ ID NO: 27671 - DNA, 25 bp, Homo sapien
gatagccagggatttccaactgtgt

SEQ ID NO: 27672 - DNA, 25 bp, Homo sapien
tacaaatagccagcctagaggttgc

SEQ ID NO: 27673 - DNA, 25 bp, Homo sapien
aagagtcctggagtctttacagaaa

SEQ ID NO: 27674 - DNA, 25 bp, Homo sapien
cttctgtgtgtgagagcaccatgaa

SEQ ID NO: 27675 - DNA, 25 bp, Homo sapien
acagtgtagcagagaaacatgcttc

SEQ ID NO: 27676 - DNA, 25 bp, Homo sapien
tgcttcaaatgtatcctggagtgtc

SEQ ID NO: 27677 - DNA, 25 bp, Homo sapien
tgtcagtacagtgtagcagagaaac

SEQ ID NO: 27678 - DNA, 25 bp, Homo sapien
tctgcacacgtgattccgtccattc

SEQ ID NO: 27679 - DNA, 25 bp, Homo sapien
tatcctggagtgtctagcgcgactc

SEQ ID NO: 27680 - DNA, 25 bp, Homo sapien
tagcgcgactcagtgtctctgcaca

SEQ ID NO: 27681 - DNA, 25 bp, Homo sapien
tggcactgtgctggtcttgtttatc

SEQ ID NO: 27682 - DNA, 25 bp, Homo sapien
ctagagtaaaatgtgcagtacttat

SEQ ID NO: 27683 - DNA, 25 bp, Homo sapien
atcctgcatgcacttggcctaacat

SEQ ID NO: 27684 - DNA, 25 bp, Homo sapien
acgtgcgtggcctttgctttaaatt

SEQ ID NO: 27685 - DNA, 25 bp, Homo sapien
cgtgagtcacacgtgcgtggccttt

SEQ ID NO: 27686 - DNA, 25 bp, Homo sapien
tattagcaagtctagtcttgaactc

SEQ ID NO: 27687 - DNA, 25 bp, Homo sapien
taaaagtacgctaatcctaataatc

SEQ ID NO: 27688 - DNA, 25 bp, Homo sapien
tgttgttaagcgacacagggctaca

SEQ ID NO: 27689 - DNA, 25 bp, Homo sapien
gagacaggatttcaacatattagca

SEQ ID NO: 27690 - DNA, 25 bp, Homo sapien
tctgagggtactgcttaacaaatct

SEQ ID NO: 27691 - DNA, 25 bp, Homo sapien
tttccataaactagccatctcactg

SEQ ID NO: 27692 - DNA, 25 bp, Homo sapien
ctcagccactaaagatatataaaag

SEQ ID NO: 27693 - DNA, 25 bp, Homo sapien
agcgacacagggctacactatcttc

SEQ ID NO: 27694 - DNA, 25 bp, Homo sapien
ataatctttaatctgagggtactgc

SEQ ID NO: 27695 - DNA, 25 bp, Homo sapien
tgacaaaattgcctaacgacatttc

SEQ ID NO: 27696 - DNA, 25 bp, Homo sapien
ttcttaaagtgtatccctgttgtta

SEQ ID NO: 27697 - DNA, 25 bp, Homo sapien
agcagtaccctcagattaaagatta

SEQ ID NO: 27698 - DNA, 25 bp, Homo sapien
ctttagtggctgagaagatagtgta

SEQ ID NO: 27699 - DNA, 25 bp, Homo sapien
caacagggatacactttaagaaatg

SEQ ID NO: 27700 - DNA, 25 bp, Homo sapien
ctttaagaaatgtcgttaggcaatt

SEQ ID NO: 27701 - DNA, 25 bp, Homo sapien
tttgagatttgttaagcagtaccct

SEQ ID NO: 27702 - DNA, 25 bp, Homo sapien
gctgagaagatagtgtagccctgtg

SEQ ID NO: 27703 - DNA, 25 bp, Homo sapien
ttaaagcagtgagatggctagttta

SEQ ID NO: 27704 - DNA, 25 bp, Homo sapien
ttaacaacagggatacactttaaga

SEQ ID NO: 27705 - DNA, 25 bp, Homo sapien
taaagattattaggattagcgtact

SEQ ID NO: 27706 - DNA, 25 bp, Homo sapien
agtgagatggctagtttatggaaac

SEQ ID NO: 27707 - DNA, 25 bp, Homo sapien
tactttaaagcagtgagatggctag

SEQ ID NO: 27708 - DNA, 25 bp, Homo sapien
accctgagtacactgtaatgggcat

SEQ ID NO: 27709 - DNA, 25 bp, Homo sapien
tctctgatcaaaggaaagtgggata

SEQ ID NO: 27710 - DNA, 25 bp, Homo sapien
tcaggagacatcactgctttggagt

SEQ ID NO: 27711 - DNA, 25 bp, Homo sapien
atggcacctctggaaggtatgcagc

SEQ ID NO: 27712 - DNA, 25 bp, Homo sapien
aggaaagtgggatactctgtaatac

SEQ ID NO: 27713 - DNA, 25 bp, Homo sapien
ccaaccagaaatggccggggctttc

SEQ ID NO: 27714 - DNA, 25 bp, Homo sapien
gttaccacatgtaaagcaagcatac

SEQ ID NO: 27715 - DNA, 25 bp, Homo sapien
cagctcccaggcagcttatggtctt

SEQ ID NO: 27716 - DNA, 25 bp, Homo sapien
taatgggcattgtggatttaggtta

SEQ ID NO: 27717 - DNA, 25 bp, Homo sapien
tgaaatggaattacaccctgagtac

SEQ ID NO: 27718 - DNA, 25 bp, Homo sapien
tatggtcttgtgaagagccaacatt

SEQ ID NO: 27719 - DNA, 25 bp, Homo sapien
tttagcggacaggacgtcatccaca

SEQ ID NO: 27720 - DNA, 25 bp, Homo sapien
atcctaaaagcaacagctgaaaggg

SEQ ID NO: 27721 - DNA, 25 bp, Homo sapien
cacgagatgacaaaaaagcctgaat

SEQ ID NO: 27722 - DNA, 25 bp, Homo sapien
cggggaatgatgaacccaaaactga

SEQ ID NO: 27723 - DNA, 25 bp, Homo sapien
catccacacaaagaagagccggcag

SEQ ID NO: 27724 - DNA, 25 bp, Homo sapien
aaagcctgaatgctgcatgtgtgtc

SEQ ID NO: 27725 - DNA, 25 bp, Homo sapien
aaaactgaaccaagctccagcctgt

SEQ ID NO: 27726 - DNA, 25 bp, Homo sapien
tggtgctgtcgaacacacacacgtc

SEQ ID NO: 27727 - DNA, 25 bp, Homo sapien
aatcgacacggaatagaaaataagc

SEQ ID NO: 27728 - DNA, 25 bp, Homo sapien
tcacacaggtctggaatggtgccac

SEQ ID NO: 27729 - DNA, 25 bp, Homo sapien
aaatatttgcacctgagaagatggg

SEQ ID NO: 27730 - DNA, 25 bp, Homo sapien
tccagtgatcttctctctctcagtg

SEQ ID NO: 27731 - DNA, 25 bp, Homo sapien
gttggttaggctcctgcacctcacc

SEQ ID NO: 27732 - DNA, 25 bp, Homo sapien
ccttaccgttggttaggctcctgca

SEQ ID NO: 27733 - DNA, 25 bp, Homo sapien
acactcggggtttgatccagtgatc

SEQ ID NO: 27734 - DNA, 25 bp, Homo sapien
ctcggggtttgatccagtgatcttc

SEQ ID NO: 27735 - DNA, 25 bp, Homo sapien
acccacgccacactcggggtttgat

SEQ ID NO: 27736 - DNA, 25 bp, Homo sapien
agtgatcttctctctcggtgctctc

SEQ ID NO: 27737 - DNA, 25 bp, Homo sapien
ccacactcggggtttgatccagtga

SEQ ID NO: 27738 - DNA, 25 bp, Homo sapien
cgttggttaggctcctgcacctcac

SEQ ID NO: 27739 - DNA, 25 bp, Homo sapien
gccacactcggggtttgatccagtg

SEQ ID NO: 27740 - DNA, 25 bp, Homo sapien
cttaccgttggttaggctcctgcac

SEQ ID NO: 27741 - DNA, 25 bp, Homo sapien
ccacactcggggtttgatccagtga

SEQ ID NO: 27742 - DNA, 25 bp, Homo sapien
gttggttaggctcctgcacctcacc

SEQ ID NO: 27743 - DNA, 25 bp, Homo sapien
tgtgctccacgccacactcggtgtt

SEQ ID NO: 27744 - DNA, 25 bp, Homo sapien
actcggggtttgatccagtgatctt

SEQ ID NO: 27745 - DNA, 25 bp, Homo sapien
agtgatcttctctctcggtgctccc

SEQ ID NO: 27746 - DNA, 25 bp, Homo sapien
agtgatcttctctgtctgtgctcca

SEQ ID NO: 27747 - DNA, 25 bp, Homo sapien
agtgatcttctctctcggtgctctc

SEQ ID NO: 27748 - DNA, 25 bp, Homo sapien
tccagtgatcttctctctctcagtg

SEQ ID NO: 27749 - DNA, 25 bp, Homo sapien
cttaccgttggttaggctcctgcac

SEQ ID NO: 27750 - DNA, 25 bp, Homo sapien
acccacgccacactcggggtttgat

SEQ ID NO: 27751 - DNA, 25 bp, Homo sapien
ggtgctctccgccacactcggtgtt

SEQ ID NO: 27752 - DNA, 25 bp, Homo sapien
aaaacgaaggtgttcacatcggacc

SEQ ID NO: 27753 - DNA, 25 bp, Homo sapien
ggtccgatgtgaacaccttcgtttt

SEQ ID NO: 27754 - DNA, 25 bp, Homo sapien
ccaaagggtccctatgccgtcaggt

SEQ ID NO: 27755 - DNA, 25 bp, Homo sapien
agactgcccggtccatgctggactt

SEQ ID NO: 27756 - DNA, 25 bp, Homo sapien
ccaggaaccacaacaggcttctgtg

SEQ ID NO: 27757 - DNA, 25 bp, Homo sapien
cctggggtttttggcagtgcttcca

SEQ ID NO: 27758 - DNA, 25 bp, Homo sapien
tctctcgggaatggagcagtgttaa

SEQ ID NO: 27759 - DNA, 25 bp, Homo sapien
caggcttctgtgtgctccagtgaaa

SEQ ID NO: 27760 - DNA, 25 bp, Homo sapien
ttcacacacttggacagaagggagt

SEQ ID NO: 27761 - DNA, 25 bp, Homo sapien
attcagagcccgtcgtggtgtttta

SEQ ID NO: 27762 - DNA, 25 bp, Homo sapien
gtttttcactgaccgccaggaacca

SEQ ID NO: 27763 - DNA, 25 bp, Homo sapien
atccacttgtgcaggtgagactgcc

SEQ ID NO: 27764 - DNA, 25 bp, Homo sapien
agcacaatctgaagacactggggtc

SEQ ID NO: 27765 - DNA, 25 bp, Homo sapien
gaatcaaatagttgagtattagcac

SEQ ID NO: 27766 - DNA, 25 bp, Homo sapien
caccgcgcctgtcctactatgtatt

SEQ ID NO: 27767 - DNA, 25 bp, Homo sapien
tatttccaaagtctagagcagtacc

SEQ ID NO: 27768 - DNA, 25 bp, Homo sapien
caaagtctagagcagtacctggcca

SEQ ID NO: 27769 - DNA, 25 bp, Homo sapien
tacctggccagggtatgagttccat

SEQ ID NO: 27770 - DNA, 25 bp, Homo sapien
tacagtaaccttatgtgatggtact

SEQ ID NO: 27771 - DNA, 25 bp, Homo sapien
aactgagtcttaagaggttaggcga

SEQ ID NO: 27772 - DNA, 25 bp, Homo sapien
gagtattagcactattctgagaatt

SEQ ID NO: 27773 - DNA, 25 bp, Homo sapien
tgctttggttcactgctgtatttcc

SEQ ID NO: 27774 - DNA, 25 bp, Homo sapien
tggccagggtatgagttccataaat

SEQ ID NO: 27775 - DNA, 25 bp, Homo sapien
atgtgatggtacttttatgactccc

SEQ ID NO: 27776 - DNA, 25 bp, Homo sapien
ctgctggtgggcatccagacggacc

SEQ ID NO: 27777 - DNA, 25 bp, Homo sapien
ccgatgaagctcaagccagggtccc

SEQ ID NO: 27778 - DNA, 25 bp, Homo sapien
acctccaggcagagatcacaaaact

SEQ ID NO: 27779 - DNA, 25 bp, Homo sapien
ccgctaccgatgaagctcaagccag

SEQ ID NO: 27780 - DNA, 25 bp, Homo sapien
tctttctgcaaatctggactctctc

SEQ ID NO: 27781 - DNA, 25 bp, Homo sapien
cctgcaggaacaagccctaatctgg

SEQ ID NO: 27782 - DNA, 25 bp, Homo sapien
ggccatccctgcacttgagctcagg

SEQ ID NO: 27783 - DNA, 25 bp, Homo sapien
tttggaaccctctgccacaagtgcc

SEQ ID NO: 27784 - DNA, 25 bp, Homo sapien
tcagggttgtgctgacacgcctgcc

SEQ ID NO: 27785 - DNA, 25 bp, Homo sapien
cctaatctggactcattgcaatggc

SEQ ID NO: 27786 - DNA, 25 bp, Homo sapien
ggcagagatcacaaaactaacagct

SEQ ID NO: 27787 - DNA, 25 bp, Homo sapien
tcaagcagctgctgaggagaagact

SEQ ID NO: 27788 - DNA, 25 bp, Homo sapien
gctgtgtccgggtccaccgggatct

SEQ ID NO: 27789 - DNA, 25 bp, Homo sapien
gagaagactgggtccctctagtcat

SEQ ID NO: 27790 - DNA, 25 bp, Homo sapien
tccaggcagatctgggaagggacat

SEQ ID NO: 27791 - DNA, 25 bp, Homo sapien
gtcattaaaacactgccaacaagag

SEQ ID NO: 27792 - DNA, 25 bp, Homo sapien
gtgagaattgggcactctgtcaacc

SEQ ID NO: 27793 - DNA, 25 bp, Homo sapien
ggctagttagcactctgggtgccct

SEQ ID NO: 27794 - DNA, 25 bp, Homo sapien
ctgggtccctctagtcatgttcatc

SEQ ID NO: 27795 - DNA, 25 bp, Homo sapien
ctcagcaaattgtggagggtggcct

SEQ ID NO: 27796 - DNA, 25 bp, Homo sapien
tggcctggcatgaatccaggcagat

SEQ ID NO: 27797 - DNA, 25 bp, Homo sapien
ttgaggggaccgctaatactgtcct

SEQ ID NO: 27798 - DNA, 25 bp, Homo sapien
accctcagaggggtggtgccaaacg

SEQ ID NO: 27799 - DNA, 25 bp, Homo sapien
tccacagggcgctgtcaagggcgaa

SEQ ID NO: 27800 - DNA, 25 bp, Homo sapien
tcaccaagctaagcatacacagtgt

SEQ ID NO: 27801 - DNA, 25 bp, Homo sapien
cctaggccacgtctacaggggttcg

SEQ ID NO: 27802 - DNA, 25 bp, Homo sapien
ggaggtgcctaatgagagaactcat

SEQ ID NO: 27803 - DNA, 25 bp, Homo sapien
ttggtggagaatgtgagtgatttaa

SEQ ID NO: 27804 - DNA, 25 bp, Homo sapien
ttatatacattataggaggtgccta

SEQ ID NO: 27805 - DNA, 25 bp, Homo sapien
gatttaactcaccaagctaagcata

SEQ ID NO: 27806 - DNA, 25 bp, Homo sapien
ctatcaaaaaataccgtgagtcggc

SEQ ID NO: 27807 - DNA, 25 bp, Homo sapien
tcggggtaccgaatcggaagatcca

SEQ ID NO: 27808 - DNA, 25 bp, Homo sapien
taccgaatcggaagatccacagggc

SEQ ID NO: 27809 - DNA, 25 bp, Homo sapien
ttttgatagaggaatgagttctctc

SEQ ID NO: 27810 - DNA, 25 bp, Homo sapien
gagttctctcattaggcacctccta

SEQ ID NO: 27811 - DNA, 25 bp, Homo sapien
ccctgtagacgtggcctagggagcc

SEQ ID NO: 27812 - DNA, 25 bp, Homo sapien
atgcagagcagctgaggctccgttt

SEQ ID NO: 27813 - DNA, 25 bp, Homo sapien
ataacactgtgtatgcttagcttgg

SEQ ID NO: 27814 - DNA, 25 bp, Homo sapien
ttcgcccttgacagcgccctgtgga

SEQ ID NO: 27815 - DNA, 25 bp, Homo sapien
ccggccgactcacggtattttttga

SEQ ID NO: 27816 - DNA, 25 bp, Homo sapien
gcagctgaggctccgtttggcacca

SEQ ID NO: 27817 - DNA, 25 bp, Homo sapien
cctgtggatcttccgattcggtacc

SEQ ID NO: 27818 - DNA, 25 bp, Homo sapien
ccaagcgctccagctggggaattat

SEQ ID NO: 27819 - DNA, 25 bp, Homo sapien
atgcttagcttggtgagttaaatca

SEQ ID NO: 27820 - DNA, 25 bp, Homo sapien
ttgggccagaccactttcttgctac

SEQ ID NO: 27821 - DNA, 25 bp, Homo sapien
ggggttcaagctacatatggcatag

SEQ ID NO: 27822 - DNA, 25 bp, Homo sapien
gggccatccagcaggtttccaagac

SEQ ID NO: 27823 - DNA, 25 bp, Homo sapien
ctcagagcattatgactacaggtca

SEQ ID NO: 27824 - DNA, 25 bp, Homo sapien
cacacacacatcactcagagcatta

SEQ ID NO: 27825 - DNA, 25 bp, Homo sapien
ccctctatgtgaagtttattggcta

SEQ ID NO: 27826 - DNA, 25 bp, Homo sapien
gcaaataacatctggttggaacaac

SEQ ID NO: 27827 - DNA, 25 bp, Homo sapien
atatggcataggcaacgggtgcaca

SEQ ID NO: 27828 - DNA, 25 bp, Homo sapien
tgggaaggttaattcctgggccatc

SEQ ID NO: 27829 - DNA, 25 bp, Homo sapien
tacaggtcattatgagaactactac

SEQ ID NO: 27830 - DNA, 25 bp, Homo sapien
tgctacccacaatgggaaggttaat

SEQ ID NO: 27831 - DNA, 25 bp, Homo sapien
gctggatggcccaggaattaacctt

SEQ ID NO: 27832 - DNA, 25 bp, Homo sapien
accttcccattgtgggtagcaagaa

SEQ ID NO: 27833 - DNA, 25 bp, Homo sapien
ccaaccagatgttatttgcagaaaa

SEQ ID NO: 27834 - DNA, 25 bp, Homo sapien
ctgtagtcataatgctctgagtgat

SEQ ID NO: 27835 - DNA, 25 bp, Homo sapien
acaatagatactaaaggacaatccc

SEQ ID NO: 27836 - DNA, 25 bp, Homo sapien
aggacaatcccaaataatgaaacac

SEQ ID NO: 27837 - DNA, 25 bp, Homo sapien
aataaacttcacatagaggggccag

SEQ ID NO: 27838 - DNA, 25 bp, Homo sapien
cctatgccatatgtagcttgaaccc

SEQ ID NO: 27839 - DNA, 25 bp, Homo sapien
acatagaggggccagtaattttgtt

SEQ ID NO: 27840 - DNA, 25 bp, Homo sapien
ggtgtgcacccgttgcctatgccat

SEQ ID NO: 27841 - DNA, 25 bp, Homo sapien
ttgcagaaaagatctcatgaggaat

SEQ ID NO: 27842 - DNA, 25 bp, Homo sapien
tgctgcaaacccaactctctgtgaa

SEQ ID NO: 27843 - DNA, 25 bp, Homo sapien
tctctgtgaaaagcgctcgtctcta

SEQ ID NO: 27844 - DNA, 25 bp, Homo sapien
caactctctgtgaaaagcgctcgtc

SEQ ID NO: 27845 - DNA, 25 bp, Homo sapien
cgcctgcaaaagtcctaattttact

SEQ ID NO: 27846 - DNA, 25 bp, Homo sapien
aagcgctcgtctctaagctgccagc

SEQ ID NO: 27847 - DNA, 25 bp, Homo sapien
ggaagtgtgcacaatgcctgttgct

SEQ ID NO: 27848 - DNA, 25 bp, Homo sapien
tgctgacgtgggaagtgtgcacaat

SEQ ID NO: 27849 - DNA, 25 bp, Homo sapien
ttgaactcgtcctcaagtgaaccac

SEQ ID NO: 27850 - DNA, 25 bp, Homo sapien
gcacaatgcctgttgctgcaaaccc

SEQ ID NO: 27851 - DNA, 25 bp, Homo sapien
ccattctactcttctgtgtgctgac

SEQ ID NO: 27852 - DNA, 25 bp, Homo sapien
ctaaactcaagtacatgccattcta

SEQ ID NO: 27853 - DNA, 25 bp, Homo sapien
atggcatgtacttgagtttagattt

SEQ ID NO: 27854 - DNA, 25 bp, Homo sapien
ttcacagagagttgggtttgcagca

SEQ ID NO: 27855 - DNA, 25 bp, Homo sapien
acgtcagcacacagaagagtagaat

SEQ ID NO: 27856 - DNA, 25 bp, Homo sapien
gtttgcagcaacaggcattgtgcac

SEQ ID NO: 27857 - DNA, 25 bp, Homo sapien
gcagcaacaggcattgtgcacactt

SEQ ID NO: 27858 - DNA, 25 bp, Homo sapien
cagcttagagacgagcgcttttcac

SEQ ID NO: 27859 - DNA, 25 bp, Homo sapien
ctggcagcttagagacgagcgcttt

SEQ ID NO: 27860 - DNA, 25 bp, Homo sapien
agacgagcgcttttcacagagagtt

SEQ ID NO: 27861 - DNA, 25 bp, Homo sapien
agaagagtagaatggcatgtacttg

SEQ ID NO: 27862 - DNA, 25 bp, Homo sapien
attgtgcacacttcccacgtcagca

SEQ ID NO: 27863 - DNA, 25 bp, Homo sapien
ttcccacgtcagcacacagaagagt

SEQ ID NO: 27864 - DNA, 25 bp, Homo sapien
tgttataaatccaagagagagcact

SEQ ID NO: 27865 - DNA, 25 bp, Homo sapien
taaatccaagagagagcactaacat

SEQ ID NO: 27866 - DNA, 25 bp, Homo sapien
aaagtacaagagtaagttcagttac

SEQ ID NO: 27867 - DNA, 25 bp, Homo sapien
acgtatatactacacccaacttggt

SEQ ID NO: 27868 - DNA, 25 bp, Homo sapien
tacacccaacttggtaagttctgct

SEQ ID NO: 27869 - DNA, 25 bp, Homo sapien
aacttggtaagttctgctctctctc

SEQ ID NO: 27870 - DNA, 25 bp, Homo sapien
ttgaggaagagagagtaaaagaaag

SEQ ID NO: 27871 - DNA, 25 bp, Homo sapien
tggctccaagaaccatgatttttaa

SEQ ID NO: 27872 - DNA, 25 bp, Homo sapien
ttcctcccaagtcaaacgtatatac

SEQ ID NO: 27873 - DNA, 25 bp, Homo sapien
agagagagcactaacatacttcttc

SEQ ID NO: 27874 - DNA, 25 bp, Homo sapien
ctctctctcttatggcaaagggaaa

SEQ ID NO: 27875 - DNA, 25 bp, Homo sapien
gaaggaagaagtatgttagtgctct

SEQ ID NO: 27876 - DNA, 25 bp, Homo sapien
ttaccaagttgggtgtagtatatac

SEQ ID NO: 27877 - DNA, 25 bp, Homo sapien
ccaagttgggtgtagtatatacgtt

SEQ ID NO: 27878 - DNA, 25 bp, Homo sapien
cctttgccataagagagagagcaga

SEQ ID NO: 27879 - DNA, 25 bp, Homo sapien
tatatacgtttgacttgggaggaag

SEQ ID NO: 27880 - DNA, 25 bp, Homo sapien
aacaaaaagttggtagaatgccaaa

SEQ ID NO: 27881 - DNA, 25 bp, Homo sapien
ttccctttgccataagagagagagc

SEQ ID NO: 27882 - DNA, 25 bp, Homo sapien
gagagagagcagaacttaccaagtt

SEQ ID NO: 27883 - DNA, 25 bp, Homo sapien
tgaaaaacagtaactgaacttactc

SEQ ID NO: 27884 - DNA, 25 bp, Homo sapien
aaaagttggtagaatgccaaacatt

SEQ ID NO: 27885 - DNA, 25 bp, Homo sapien
tagtgctctctcttggatttataac

SEQ ID NO: 27886 - DNA, 25 bp, Homo sapien
ttgattatgtgactgggaccaagga

SEQ ID NO: 27887 - DNA, 25 bp, Homo sapien
agtggattccgggacagaaaatgtt

SEQ ID NO: 27888 - DNA, 25 bp, Homo sapien
ggctgcctgcggtgttagaattaca

SEQ ID NO: 27889 - DNA, 25 bp, Homo sapien
tgtcgtggacatgctcgctacacct

SEQ ID NO: 27890 - DNA, 25 bp, Homo sapien
tgcgtggtcgactttatggaaactc

SEQ ID NO: 27891 - DNA, 25 bp, Homo sapien
agctgggatagtcaagtaaacaaga

SEQ ID NO: 27892 - DNA, 25 bp, Homo sapien
atataggaactcagtgcatggtttc

SEQ ID NO: 27893 - DNA, 25 bp, Homo sapien
agtgaggtacatggtagaagacttt

SEQ ID NO: 27894 - DNA, 25 bp, Homo sapien
gaccaaggacaacaactcgagaatt

SEQ ID NO: 27895 - DNA, 25 bp, Homo sapien
atgtacacagtataacccaggctta

SEQ ID NO: 27896 - DNA, 25 bp, Homo sapien
aagaaatggtaaagagatgccaagt

SEQ ID NO: 27897 - DNA, 25 bp, Homo sapien
accgtgcccagtctcaaagcaagtt

SEQ ID NO: 27898 - DNA, 25 bp, Homo sapien
ttaaataagtaactggctgaataac

SEQ ID NO: 27899 - DNA, 25 bp, Homo sapien
taaaggcattcatgcatgcaacaac

SEQ ID NO: 27900 - DNA, 25 bp, Homo sapien
tgtcgtcaatctaaatgatgcctaa

SEQ ID NO: 27901 - DNA, 25 bp, Homo sapien
caacattaccaagagctgtctggaa

SEQ ID NO: 27902 - DNA, 25 bp, Homo sapien
ataatgagataatgccgtaacaggc

SEQ ID NO: 27903 - DNA, 25 bp, Homo sapien
gcaggcataaaggagctaaaaatac

SEQ ID NO: 27904 - DNA, 25 bp, Homo sapien
atgcatgcaacaactgtcgtcaatc

SEQ ID NO: 27905 - DNA, 25 bp, Homo sapien
tgatgcctaatcatgctactatttc

SEQ ID NO: 27906 - DNA, 25 bp, Homo sapien
taatgccgtaacaggcaggcataaa

SEQ ID NO: 27907 - DNA, 25 bp, Homo sapien
aaagacatagtaaaggcattcatgc

SEQ ID NO: 27908 - DNA, 25 bp, Homo sapien
cagcaccatgcacagtcaattttat

SEQ ID NO: 27909 - DNA, 25 bp, Homo sapien
atatgcatactgaagttaggtgccc

SEQ ID NO: 27910 - DNA, 25 bp, Homo sapien
attcagacaagtagacaagtctaga

SEQ ID NO: 27911 - DNA, 25 bp, Homo sapien
cagctttagaagatgagagacagct

SEQ ID NO: 27912 - DNA, 25 bp, Homo sapien
gggcagagcttcttgttataggcag

SEQ ID NO: 27913 - DNA, 25 bp, Homo sapien
accttgcatgtattctgggacagaa

SEQ ID NO: 27914 - DNA, 25 bp, Homo sapien
attctgggacagaaggaaacttaaa

SEQ ID NO: 27915 - DNA, 25 bp, Homo sapien
tgcaggggctgtatcttcatcacaa

SEQ ID NO: 27916 - DNA, 25 bp, Homo sapien
agacagctggacgtccttaagaaaa

SEQ ID NO: 27917 - DNA, 25 bp, Homo sapien
aattctacagcaaaaggagatgagg

SEQ ID NO: 27918 - DNA, 25 bp, Homo sapien
aagtctagagatgaaaggaagctca

SEQ ID NO: 27919 - DNA, 25 bp, Homo sapien
accgcacctggcttcttagccattt

SEQ ID NO: 27920 - DNA, 25 bp, Homo sapien
agtgcggtcagttggttatttattc

SEQ ID NO: 27921 - DNA, 25 bp, Homo sapien
cccagtgcggtcagttggttattta

SEQ ID NO: 27922 - DNA, 25 bp, Homo sapien
ctgcccagtgcggtcagttggttat

SEQ ID NO: 27923 - DNA, 25 bp, Homo sapien
tctattaaacgtgtatggatgcgtt

SEQ ID NO: 27924 - DNA, 25 bp, Homo sapien
tgtgaactagatttactttgtgcat

SEQ ID NO: 27925 - DNA, 25 bp, Homo sapien
atttctgcccagtgcggtcagttgg

SEQ ID NO: 27926 - DNA, 25 bp, Homo sapien
acgtgtatggatgcgttttctgatc

SEQ ID NO: 27927 - DNA, 25 bp, Homo sapien
ttactttgtgcatcttaaaaggaaa

SEQ ID NO: 27928 - DNA, 25 bp, Homo sapien
tacctgttagagtctattaaacgtg

SEQ ID NO: 27929 - DNA, 25 bp, Homo sapien
atggatgcgttttctgatctacaat

SEQ ID NO: 27930 - DNA, 25 bp, Homo sapien
accgcacctggcttcttagccattt

SEQ ID NO: 27931 - DNA, 25 bp, Homo sapien
ttactttgtgcatcttaaaaggaaa

SEQ ID NO: 27932 - DNA, 25 bp, Homo sapien
agtgcggtcagttggttatttattc

SEQ ID NO: 27933 - DNA, 25 bp, Homo sapien
ctgcccagtgcggtcagttggttat

SEQ ID NO: 27934 - DNA, 25 bp, Homo sapien
tacctgttagagtctattaaacgtg

SEQ ID NO: 27935 - DNA, 25 bp, Homo sapien
tctattaaacgtgtatggatgcgtt

SEQ ID NO: 27936 - DNA, 25 bp, Homo sapien
atttctgcccagtgcggtcagttgg

SEQ ID NO: 27937 - DNA, 25 bp, Homo sapien
tgtgaactagatttactttgtgcat

SEQ ID NO: 27938 - DNA, 25 bp, Homo sapien
gtataatggcgggatcatgactcac

SEQ ID NO: 27939 - DNA, 25 bp, Homo sapien
aggttgttgaaggaatgatttgcca

SEQ ID NO: 27940 - DNA, 25 bp, Homo sapien
atggatgcgttttctgatctacaat

SEQ ID NO: 27941 - DNA, 25 bp, Homo sapien
ccgtcgcgtcagtaacggtagcggt

SEQ ID NO: 27942 - DNA, 25 bp, Homo sapien
accgctaccgttactgacgcgacgg

SEQ ID NO: 27943 - DNA, 25 bp, Homo sapien
cagttggaggaacacatcctttctt

SEQ ID NO: 27944 - DNA, 25 bp, Homo sapien
ggctgagtgacacccactgtaactc

SEQ ID NO: 27945 - DNA, 25 bp, Homo sapien
aaagcaagcaagtttctcgtggcac

SEQ ID NO: 27946 - DNA, 25 bp, Homo sapien
ttaaagtgaatgtctcctggggata

SEQ ID NO: 27947 - DNA, 25 bp, Homo sapien
ctgatacacaagaaggcattaaagt

SEQ ID NO: 27948 - DNA, 25 bp, Homo sapien
ttagcaaatgaaccaatctagccag

SEQ ID NO: 27949 - DNA, 25 bp, Homo sapien
tttgtgatttgtagactgggcttat

SEQ ID NO: 27950 - DNA, 25 bp, Homo sapien
atctagccagtgagatgaattctga

SEQ ID NO: 27951 - DNA, 25 bp, Homo sapien
aagtttatgatgttccagtccgttc

SEQ ID NO: 27952 - DNA, 25 bp, Homo sapien
cagtccgttcaatatgtgtgcagtt

SEQ ID NO: 27953 - DNA, 25 bp, Homo sapien
cccagtgttgcagtgtaaaaatgcc

SEQ ID NO: 27954 - DNA, 25 bp, Homo sapien
tggacctggctcctaaccaatagtg

SEQ ID NO: 27955 - DNA, 25 bp, Homo sapien
ctaggactgcagatgcatgccactg

SEQ ID NO: 27956 - DNA, 25 bp, Homo sapien
cactggacctggctcctaaccaata

SEQ ID NO: 27957 - DNA, 25 bp, Homo sapien
atagtgtttttatgtggtcttgctc

SEQ ID NO: 27958 - DNA, 25 bp, Homo sapien
gtgccattgggtctggctaattact

SEQ ID NO: 27959 - DNA, 25 bp, Homo sapien
tgccactgtgtcatgctaattttgt

SEQ ID NO: 27960 - DNA, 25 bp, Homo sapien
gtgtgtgccattgggtctggctaat

SEQ ID NO: 27961 - DNA, 25 bp, Homo sapien
cctggctcctaaccaatagtgtttt

SEQ ID NO: 27962 - DNA, 25 bp, Homo sapien
attgggtctggctaattactgtatt

SEQ ID NO: 27963 - DNA, 25 bp, Homo sapien
taggactgcagatgcatgccactgt

SEQ ID NO: 27964 - DNA, 25 bp, Homo sapien
ggactgcagatgcatgccactgtgt

SEQ ID NO: 27965 - DNA, 25 bp, Homo sapien
acatgggtagagatttgtagatact

SEQ ID NO: 27966 - DNA, 25 bp, Homo sapien
tgtgtgtgtttccatcctcaaatac

SEQ ID NO: 27967 - DNA, 25 bp, Homo sapien
agagggaaagagatcatcttcccaa

SEQ ID NO: 27968 - DNA, 25 bp, Homo sapien
aatattgaacaaggtggcttaagtc

SEQ ID NO: 27969 - DNA, 25 bp, Homo sapien
cttatacttacaacagagagggaaa

SEQ ID NO: 27970 - DNA, 25 bp, Homo sapien
tgtcagctatgattaaaaccctttt

SEQ ID NO: 27971 - DNA, 25 bp, Homo sapien
tgccagagccagtgctagattaatc

SEQ ID NO: 27972 - DNA, 25 bp, Homo sapien
agagatcttagaggttcatgacact

SEQ ID NO: 27973 - DNA, 25 bp, Homo sapien
ttaagtcagccagtaatgccagagc

SEQ ID NO: 27974 - DNA, 25 bp, Homo sapien
cacatggtagatgcttagtaaacat

SEQ ID NO: 27975 - DNA, 25 bp, Homo sapien
cccaaagatgctgacttaccctaat

SEQ ID NO: 27976 - DNA, 25 bp, Homo sapien
gcagctgcgctcacgccgaggggca

SEQ ID NO: 27977 - DNA, 25 bp, Homo sapien
gcgcggtcctgtactggctgctgct

SEQ ID NO: 27978 - DNA, 25 bp, Homo sapien
tcggcgcggtcctgtactggctgct

SEQ ID NO: 27979 - DNA, 25 bp, Homo sapien
ccgcattcctgaagcatgagcgcgc

SEQ ID NO: 27980 - DNA, 25 bp, Homo sapien
cattcctgaagcatgagcgcgccag

SEQ ID NO: 27981 - DNA, 25 bp, Homo sapien
tgctcggcgcggtcctgtactggct

SEQ ID NO: 27982 - DNA, 25 bp, Homo sapien
agtgagccgagcagctgcgctcacg

SEQ ID NO: 27983 - DNA, 25 bp, Homo sapien
gcattcctgaagcatgagcgcgcca

SEQ ID NO: 27984 - DNA, 25 bp, Homo sapien
agcgggcgcggaaattcccagggac

SEQ ID NO: 27985 - DNA, 25 bp, Homo sapien
gcggaaattcccagggacgcgcgac

SEQ ID NO: 27986 - DNA, 25 bp, Homo sapien
ttcctgaagcatgagcgcgccaggc

SEQ ID NO: 27987 - DNA, 25 bp, Homo sapien
tgacaggcatcaacattccgtgacg

SEQ ID NO: 27988 - DNA, 25 bp, Homo sapien
tgtgggaaatctcatgacaggcatc

SEQ ID NO: 27989 - DNA, 25 bp, Homo sapien
ggagtccagttgcaaatgtgaaatc

SEQ ID NO: 27990 - DNA, 25 bp, Homo sapien
gaatcatctgggtgcttacaaacat

SEQ ID NO: 27991 - DNA, 25 bp, Homo sapien
ctggagattcggattctggaagtct

SEQ ID NO: 27992 - DNA, 25 bp, Homo sapien
ttccgtgacggttgacagccaccta

SEQ ID NO: 27993 - DNA, 25 bp, Homo sapien
atagactcctgcagagaacctggta

SEQ ID NO: 27994 - DNA, 25 bp, Homo sapien
aacatagattgctggactctggttc

SEQ ID NO: 27995 - DNA, 25 bp, Homo sapien
agtacctgcaagtccagtgtgggaa

SEQ ID NO: 27996 - DNA, 25 bp, Homo sapien
gtggggcttgggaatctccatttct

SEQ ID NO: 27997 - DNA, 25 bp, Homo sapien
aattggtactctgggaagatgccct

SEQ ID NO: 27998 - DNA, 25 bp, Homo sapien
tttgaaggcaactgcatgatgctag

SEQ ID NO: 27999 - DNA, 25 bp, Homo sapien
gtgggtactgcttcaaaaggcatgt

SEQ ID NO: 28000 - DNA, 25 bp, Homo sapien
tatctgaaacattaagaggtgctca

SEQ ID NO: 28001 - DNA, 25 bp, Homo sapien
caaaacacaagatagtcgcaattac

SEQ ID NO: 28002 - DNA, 25 bp, Homo sapien
tcgcaattactatgtgggtgggtac

SEQ ID NO: 28003 - DNA, 25 bp, Homo sapien
tgacagaagtaatcgcttccacatc

SEQ ID NO: 28004 - DNA, 25 bp, Homo sapien
cggactagatttctaaaaggccatc

SEQ ID NO: 28005 - DNA, 25 bp, Homo sapien
atgatgctagattgtgtccacggac

SEQ ID NO: 28006 - DNA, 25 bp, Homo sapien
tatttgaggaataactggattgttt

SEQ ID NO: 28007 - DNA, 25 bp, Homo sapien
aaggtagttccaaaatgacagaagt

SEQ ID NO: 28008 - DNA, 25 bp, Homo sapien
acttaatatgggaggaaggtagttc

SEQ ID NO: 28009 - DNA, 25 bp, Homo sapien
ttcacggagctacctgagtcagcgc

SEQ ID NO: 28010 - DNA, 25 bp, Homo sapien
gagccagaggtgcaaagtctgcaat

SEQ ID NO: 28011 - DNA, 25 bp, Homo sapien
ccagaggtgcaaagtctgcaatgac

SEQ ID NO: 28012 - DNA, 25 bp, Homo sapien
acctgagcttcacggagctacctga

SEQ ID NO: 28013 - DNA, 25 bp, Homo sapien
ctggagccagaggtgcaaagtctgc

SEQ ID NO: 28014 - DNA, 25 bp, Homo sapien
aggtgcaaagtctgcaatgacacaa

SEQ ID NO: 28015 - DNA, 25 bp, Homo sapien
ggatcacctgagcttcacggagcta

SEQ ID NO: 28016 - DNA, 25 bp, Homo sapien
tgagcttcacggagctacctgagtc

SEQ ID NO: 28017 - DNA, 25 bp, Homo sapien
tcttcatcgcctctgggctggacca

SEQ ID NO: 28018 - DNA, 25 bp, Homo sapien
agctacctgagtcagcgcctgcatc

SEQ ID NO: 28019 - DNA, 25 bp, Homo sapien
gcggccgtgcgcagtgacttacacc

SEQ ID NO: 28020 - DNA, 25 bp, Homo sapien
acaacaggatgatgggccagtattt

SEQ ID NO: 28021 - DNA, 25 bp, Homo sapien
acaccttaatgcttaggacatgggg

SEQ ID NO: 28022 - DNA, 25 bp, Homo sapien
cctgccctccaggaattaagaagat

SEQ ID NO: 28023 - DNA, 25 bp, Homo sapien
aaaggaatctttgtggacaccttaa

SEQ ID NO: 28024 - DNA, 25 bp, Homo sapien
ctccaggaattaagaagataaagtc

SEQ ID NO: 28025 - DNA, 25 bp, Homo sapien
ttgtggacaccttaatgcttaggac

SEQ ID NO: 28026 - DNA, 25 bp, Homo sapien
gctgtaaagaacaacaggatgatgg

SEQ ID NO: 28027 - DNA, 25 bp, Homo sapien
taaagaacaacaggatgatgggcca

SEQ ID NO: 28028 - DNA, 25 bp, Homo sapien
aaagtgctgtaaagaacaacaggat

SEQ ID NO: 28029 - DNA, 25 bp, Homo sapien
aagaagataaagtcaaaagtgctgt

SEQ ID NO: 28030 - DNA, 25 bp, Homo sapien
atgggccagtatttgaagaggtcgt

SEQ ID NO: 28031 - DNA, 25 bp, Homo sapien
tgcttttgcctttgggcgggagccc

SEQ ID NO: 28032 - DNA, 25 bp, Homo sapien
taggtggggaaatctctgccaaata

SEQ ID NO: 28033 - DNA, 25 bp, Homo sapien
tggcgccgcgcgattagccgcatct

SEQ ID NO: 28034 - DNA, 25 bp, Homo sapien
tctgccaaataggaggcctctcgga

SEQ ID NO: 28035 - DNA, 25 bp, Homo sapien
tggagaaaaacttcacccgcgccca

SEQ ID NO: 28036 - DNA, 25 bp, Homo sapien
tgccctaggcgctggagaaaaactt

SEQ ID NO: 28037 - DNA, 25 bp, Homo sapien
ccaggcagggccttgggtcttaata

SEQ ID NO: 28038 - DNA, 25 bp, Homo sapien
gtcttaataggtggggaaatctctg

SEQ ID NO: 28039 - DNA, 25 bp, Homo sapien
caggccggaagtgaaatgttctttt

SEQ ID NO: 28040 - DNA, 25 bp, Homo sapien
cacctgttctctgcgtgcaggggaa

SEQ ID NO: 28041 - DNA, 25 bp, Homo sapien
ttcaggtttgcaggccggaagtgaa

SEQ ID NO: 28042 - DNA, 25 bp, Homo sapien
tgctcccaatggcttgctggccttg

SEQ ID NO: 28043 - DNA, 25 bp, Homo sapien
gcagaggggccgtttccaatgcctt

SEQ ID NO: 28044 - DNA, 25 bp, Homo sapien
tccacgtatgtgataatgctgttgc

SEQ ID NO: 28045 - DNA, 25 bp, Homo sapien
tggggcccaagagtctgcgttttta

SEQ ID NO: 28046 - DNA, 25 bp, Homo sapien
agtggtactcggctccagtgccatt

SEQ ID NO: 28047 - DNA, 25 bp, Homo sapien
agttataggttgaaaggttagagct

SEQ ID NO: 28048 - DNA, 25 bp, Homo sapien
gttcaggttactatggccacaggag

SEQ ID NO: 28049 - DNA, 25 bp, Homo sapien
ggaagggttgagatgcaattcttat

SEQ ID NO: 28050 - DNA, 25 bp, Homo sapien
agtgtctactgtggaggagctccca

SEQ ID NO: 28051 - DNA, 25 bp, Homo sapien
attacagtagggagtagttataggt

SEQ ID NO: 28052 - DNA, 25 bp, Homo sapien
caggggtttgtcttcaggagctctt

SEQ ID NO: 28053 - DNA, 25 bp, Homo sapien
tcatctgttggaaaacggtagaggt

SEQ ID NO: 28054 - DNA, 25 bp, Homo sapien
ttgaaaccagcatttgtcagatgcc

SEQ ID NO: 28055 - DNA, 25 bp, Homo sapien
atggagaagtggcttgattttgaat

SEQ ID NO: 28056 - DNA, 25 bp, Homo sapien
gaccaaaatgctatcgttaccgtat

SEQ ID NO: 28057 - DNA, 25 bp, Homo sapien
cccaagcagaagctaggaaatgctg

SEQ ID NO: 28058 - DNA, 25 bp, Homo sapien
aatgagtttgtgcaggaactagacc

SEQ ID NO: 28059 - DNA, 25 bp, Homo sapien
ttttatgcagaggaatgagtttgtg

SEQ ID NO: 28060 - DNA, 25 bp, Homo sapien
gagaataggaatgacaagcttaccc

SEQ ID NO: 28061 - DNA, 25 bp, Homo sapien
gctgggtgtaagacatcagtccctt

SEQ ID NO: 28062 - DNA, 25 bp, Homo sapien
caagcaggtgagatgtttttcttac

SEQ ID NO: 28063 - DNA, 25 bp, Homo sapien
ttgtgcaggaactagaccaaaatgc

SEQ ID NO: 28064 - DNA, 25 bp, Homo sapien
cctcccagttctataaaagtctatg

SEQ ID NO: 28065 - DNA, 25 bp, Homo sapien
taatactgaatgtttaaagtacaca

SEQ ID NO: 28066 - DNA, 25 bp, Homo sapien
ttagattatctccagggaccctccc

SEQ ID NO: 28067 - DNA, 25 bp, Homo sapien
tgtggtggcacaagtctgtgttccc

SEQ ID NO: 28068 - DNA, 25 bp, Homo sapien
cccacaaccactaggttagattatc

SEQ ID NO: 28069 - DNA, 25 bp, Homo sapien
tatgttcagcatgttacataggctg

SEQ ID NO: 28070 - DNA, 25 bp, Homo sapien
ttatattgttggttaggcacagtgg

SEQ ID NO: 28071 - DNA, 25 bp, Homo sapien
aaagtattgtttgttgggagtaatc

SEQ ID NO: 28072 - DNA, 25 bp, Homo sapien
taggttagattatctccagggaccc

SEQ ID NO: 28073 - DNA, 25 bp, Homo sapien
agtacacaatttgataaatcttccc

SEQ ID NO: 28074 - DNA, 25 bp, Homo sapien
tgttgggagtaatcagctataatac

SEQ ID NO: 28075 - DNA, 25 bp, Homo sapien
caaaaaggtcgagacaggcatttct

SEQ ID NO: 28076 - DNA, 25 bp, Homo sapien
agggaaagcagcttatgtgtgcatt

SEQ ID NO: 28077 - DNA, 25 bp, Homo sapien
catgggccaatatttgcagggtaaa

SEQ ID NO: 28078 - DNA, 25 bp, Homo sapien
gggtgtacagcatagtcagaaaagt

SEQ ID NO: 28079 - DNA, 25 bp, Homo sapien
aggctggtgaccctctagaaagcaa

SEQ ID NO: 28080 - DNA, 25 bp, Homo sapien
gttgaaataacataccgcaggcctt

SEQ ID NO: 28081 - DNA, 25 bp, Homo sapien
agaaaagtagcatatgagacctaac

SEQ ID NO: 28082 - DNA, 25 bp, Homo sapien
cagcgtaatccaattgagaatgccc

SEQ ID NO: 28083 - DNA, 25 bp, Homo sapien
actcaggagtgaagagctttgctac

SEQ ID NO: 28084 - DNA, 25 bp, Homo sapien
attttggctcaggaatgtgccagcc

SEQ ID NO: 28085 - DNA, 25 bp, Homo sapien
gatacagaaatgttagaggggtaaa

SEQ ID NO: 28086 - DNA, 25 bp, Homo sapien
ccacaaagggctgaatcagtcaagg

SEQ ID NO: 28087 - DNA, 25 bp, Homo sapien
cacacgctgccacgtccagttaata

SEQ ID NO: 28088 - DNA, 25 bp, Homo sapien
atggaaagactgaagaggtccaagc

SEQ ID NO: 28089 - DNA, 25 bp, Homo sapien
gtagagaaacaggacggcaaaccac

SEQ ID NO: 28090 - DNA, 25 bp, Homo sapien
tagagaaacaggacggcaaaccaca

SEQ ID NO: 28091 - DNA, 25 bp, Homo sapien
acaggacggcaaaccacaaagggct

SEQ ID NO: 28092 - DNA, 25 bp, Homo sapien
acgctgccacgtccagttaatattt

SEQ ID NO: 28093 - DNA, 25 bp, Homo sapien
aggacggcaaaccacaaagggctga

SEQ ID NO: 28094 - DNA, 25 bp, Homo sapien
agactgaagaggtccaagctgtaga

SEQ ID NO: 28095 - DNA, 25 bp, Homo sapien
gaaagactgaagaggtccaagctgt

SEQ ID NO: 28096 - DNA, 25 bp, Homo sapien
aaagactgaagaggtccaagctgta

SEQ ID NO: 28097 - DNA, 25 bp, Homo sapien
tggctgcatggtagtaataccatac

SEQ ID NO: 28098 - DNA, 25 bp, Homo sapien
gatgagcctgaatctaagcaagaaa

SEQ ID NO: 28099 - DNA, 25 bp, Homo sapien
agaggaggatgtggctttcactttg

SEQ ID NO: 28100 - DNA, 25 bp, Homo sapien
cattttgggtcactggctgcatggt

SEQ ID NO: 28101 - DNA, 25 bp, Homo sapien
agagaggaggatgtggctttcactt

SEQ ID NO: 28102 - DNA, 25 bp, Homo sapien
ccagatgagcctgaatctaagcaag

SEQ ID NO: 28103 - DNA, 25 bp, Homo sapien
gcctgaatctaagcaagaaaagccc

SEQ ID NO: 28104 - DNA, 25 bp, Homo sapien
aggaaacaaaagtaacaaggcttga

SEQ ID NO: 28105 - DNA, 25 bp, Homo sapien
gaatctaagcaagaaaagcccagaa

SEQ ID NO: 28106 - DNA, 25 bp, Homo sapien
tcccattttgggtcactggctgcat

SEQ ID NO: 28107 - DNA, 25 bp, Homo sapien
agaagaaatcccattttgggtcact

SEQ ID NO: 28108 - DNA, 25 bp, Homo sapien
acaggacggcaaaccacaaagggct

SEQ ID NO: 28109 - DNA, 25 bp, Homo sapien
ccacaaagggctgaatcagtcaagg

SEQ ID NO: 28110 - DNA, 25 bp, Homo sapien
acaaagaagcattcaacagagagtt

SEQ ID NO: 28111 - DNA, 25 bp, Homo sapien
atggaaagactgaagaggtccaagc

SEQ ID NO: 28112 - DNA, 25 bp, Homo sapien
cacacgctgccacgtccagttaata

SEQ ID NO: 28113 - DNA, 25 bp, Homo sapien
aaagactgaagaggtccaagctgta

SEQ ID NO: 28114 - DNA, 25 bp, Homo sapien
acgctgccacgtccagttaatattt

SEQ ID NO: 28115 - DNA, 25 bp, Homo sapien
tttggataagctgttgagaagaaag

SEQ ID NO: 28116 - DNA, 25 bp, Homo sapien
gcttgacaccagatgagcctgaatc

SEQ ID NO: 28117 - DNA, 25 bp, Homo sapien
aaacaaaagtaacaaggcttgacac

SEQ ID NO: 28118 - DNA, 25 bp, Homo sapien
tagagaaacaggacggcaaaccaca

SEQ ID NO: 28119 - DNA, 25 bp, Homo sapien
aaggggtgcgtttcagccctgttta

SEQ ID NO: 28120 - DNA, 25 bp, Homo sapien
gaatgaggtatgtgggcaagtagaa

SEQ ID NO: 28121 - DNA, 25 bp, Homo sapien
ttcagccctgctagttggcaggtcc

SEQ ID NO: 28122 - DNA, 25 bp, Homo sapien
gcccactgggttcgttctgtccact

SEQ ID NO: 28123 - DNA, 25 bp, Homo sapien
tccactgtgggtatcagggaatgca

SEQ ID NO: 28124 - DNA, 25 bp, Homo sapien
aatttggcaagcaaggggtgcgttt

SEQ ID NO: 28125 - DNA, 25 bp, Homo sapien
aggccgactgcaaacagcttccact

SEQ ID NO: 28126 - DNA, 25 bp, Homo sapien
gttctgtccactcggctcatgctag

SEQ ID NO: 28127 - DNA, 25 bp, Homo sapien
gggttcgttctgtccactcggctca

SEQ ID NO: 28128 - DNA, 25 bp, Homo sapien
ctgctagttggcaggtcccgagttc

SEQ ID NO: 28129 - DNA, 25 bp, Homo sapien
agcttccactgtgggtatcagggaa

SEQ ID NO: 28130 - DNA, 25 bp, Homo sapien
tgggctggacgagaatctccctgtc

SEQ ID NO: 28131 - DNA, 25 bp, Homo sapien
atgtcctgtccgcacatgggaatat

SEQ ID NO: 28132 - DNA, 25 bp, Homo sapien
tctcagtgttccagccctcaatgtc

SEQ ID NO: 28133 - DNA, 25 bp, Homo sapien
ctgaaatcctaccagggaggcctga

SEQ ID NO: 28134 - DNA, 25 bp, Homo sapien
ggcctgagtgccttcattagggaat

SEQ ID NO: 28135 - DNA, 25 bp, Homo sapien
tctaaatggtacatggcgatctgcc

SEQ ID NO: 28136 - DNA, 25 bp, Homo sapien
ctctaaggacctacctgggtggtgt

SEQ ID NO: 28137 - DNA, 25 bp, Homo sapien
gctaaggggctattattgtccaggc

SEQ ID NO: 28138 - DNA, 25 bp, Homo sapien
tgctgtcatcagctaaggggctatt

SEQ ID NO: 28139 - DNA, 25 bp, Homo sapien
aaaggccgcgaatttgtctctaaat

SEQ ID NO: 28140 - DNA, 25 bp, Homo sapien
gagtgctcagcaacgtgaattgtca

SEQ ID NO: 28141 - DNA, 25 bp, Homo sapien
caatgtccagtgcagacccgtgcat

SEQ ID NO: 28142 - DNA, 25 bp, Homo sapien
tacatcccaggactgcaatgtccag

SEQ ID NO: 28143 - DNA, 25 bp, Homo sapien
tgagacaggccttctgggaaattac

SEQ ID NO: 28144 - DNA, 25 bp, Homo sapien
agagtgagggagcacacacacattt

SEQ ID NO: 28145 - DNA, 25 bp, Homo sapien
tctctattgggctgtaaacttcctg

SEQ ID NO: 28146 - DNA, 25 bp, Homo sapien
aattgtcatggatggcaaactgtgc

SEQ ID NO: 28147 - DNA, 25 bp, Homo sapien
tgtgacattttgcatgcaggaaccc

SEQ ID NO: 28148 - DNA, 25 bp, Homo sapien
ctcctgaaggagtaatagacccaat

SEQ ID NO: 28149 - DNA, 25 bp, Homo sapien
ctgaagcagggaaaagacagatgta

SEQ ID NO: 28150 - DNA, 25 bp, Homo sapien
atttcagcttggacaccagccctga

SEQ ID NO: 28151 - DNA, 25 bp, Homo sapien
gcttcatgaatggagacacctacgt

SEQ ID NO: 28152 - DNA, 25 bp, Homo sapien
tccttcccagccttggctcgtgagg

SEQ ID NO: 28153 - DNA, 25 bp, Homo sapien
acacgtgttcgtgtccaggtgcgct

SEQ ID NO: 28154 - DNA, 25 bp, Homo sapien
gctcgtgaggctcctccgaggacca

SEQ ID NO: 28155 - DNA, 25 bp, Homo sapien
cagtgacacaggtgagggaggtaat

SEQ ID NO: 28156 - DNA, 25 bp, Homo sapien
gccttccacggcgtagccctgccac

SEQ ID NO: 28157 - DNA, 25 bp, Homo sapien
tcctccgaggaccacgggccttcca

SEQ ID NO: 28158 - DNA, 25 bp, Homo sapien
tggcggtgctcctctcagcgcaggt

SEQ ID NO: 28159 - DNA, 25 bp, Homo sapien
tctcagcgcaggtcccgaggagcta

SEQ ID NO: 28160 - DNA, 25 bp, Homo sapien
ttgtcgcaggacacgtgttcgtgtc

SEQ ID NO: 28161 - DNA, 25 bp, Homo sapien
agccttggctcgtgaggctcctccg

SEQ ID NO: 28162 - DNA, 25 bp, Homo sapien
gcgtagccctgccacgaagcctccc

SEQ ID NO: 28163 - DNA, 25 bp, Homo sapien
tccttcccagccttggctcgtgagg

SEQ ID NO: 28164 - DNA, 25 bp, Homo sapien
tccagcatcacctggccgagacggg

SEQ ID NO: 28165 - DNA, 25 bp, Homo sapien
gctcgtgaggctcctccgaggacca

SEQ ID NO: 28166 - DNA, 25 bp, Homo sapien
tctcagcgcaggtcccgaggagcta

SEQ ID NO: 28167 - DNA, 25 bp, Homo sapien
ttgtcgcaggacacgtgttcgtgtc

SEQ ID NO: 28168 - DNA, 25 bp, Homo sapien
acacgtgttcgtgtccaggtgcgct

SEQ ID NO: 28169 - DNA, 25 bp, Homo sapien
ggacctagggcgtccttctccagca

SEQ ID NO: 28170 - DNA, 25 bp, Homo sapien
gggcctagggcgtccttctccagca

SEQ ID NO: 28171 - DNA, 25 bp, Homo sapien
tggcggtgctcctctcagcgcaggt

SEQ ID NO: 28172 - DNA, 25 bp, Homo sapien
atcacctggccgagacggacctagg

SEQ ID NO: 28173 - DNA, 25 bp, Homo sapien
tccagcatcacctggccgagacgga

SEQ ID NO: 28174 - DNA, 25 bp, Homo sapien
ttaaggacaagaaactagactgttc

SEQ ID NO: 28175 - DNA, 25 bp, Homo sapien
gcagccctagctaactaatatactc

SEQ ID NO: 28176 - DNA, 25 bp, Homo sapien
attaacttgtctcgttgccctcatc

SEQ ID NO: 28177 - DNA, 25 bp, Homo sapien
agagagccctcacccaacaataacc

SEQ ID NO: 28178 - DNA, 25 bp, Homo sapien
tattgttaagctaaaaactctgctc

SEQ ID NO: 28179 - DNA, 25 bp, Homo sapien
cttaccagtacctctggaattaagg

SEQ ID NO: 28180 - DNA, 25 bp, Homo sapien
tgctctgaactgaattaagtcctcc

SEQ ID NO: 28181 - DNA, 25 bp, Homo sapien
tcagaggaaatgttatgcagggaca

SEQ ID NO: 28182 - DNA, 25 bp, Homo sapien
tcactggctgtgttatgggggaaaa

SEQ ID NO: 28183 - DNA, 25 bp, Homo sapien
ctggaattaaggacaagaaactaga

SEQ ID NO: 28184 - DNA, 25 bp, Homo sapien
aagtcctcccaaattttgtgtgttg

SEQ ID NO: 28185 - DNA, 25 bp, Homo sapien
ttcagctaacaaaggtaaggcatta

SEQ ID NO: 28186 - DNA, 25 bp, Homo sapien
ttaaaacaaattggactagcaaatc

SEQ ID NO: 28187 - DNA, 25 bp, Homo sapien
tgccatggttggagtctcagaattc

SEQ ID NO: 28188 - DNA, 25 bp, Homo sapien
attttggggagtaattctggtgtct

SEQ ID NO: 28189 - DNA, 25 bp, Homo sapien
agggaagccagaaaatatttaggtg

SEQ ID NO: 28190 - DNA, 25 bp, Homo sapien
cagctagttaaagggtttgtattga

SEQ ID NO: 28191 - DNA, 25 bp, Homo sapien
tcataggattagacttggtagatac

SEQ ID NO: 28192 - DNA, 25 bp, Homo sapien
tcttgggcctatgctaccagctcag

SEQ ID NO: 28193 - DNA, 25 bp, Homo sapien
tattgaagataagtagagtgggaac

SEQ ID NO: 28194 - DNA, 25 bp, Homo sapien
acaaaggtaaggcattagtcaatac

SEQ ID NO: 28195 - DNA, 25 bp, Homo sapien
tttagtttgtttggggtcagcagat

SEQ ID NO: 28196 - DNA, 25 bp, Homo sapien
tggtgtacttacataactggcaaaa

SEQ ID NO: 28197 - DNA, 25 bp, Homo sapien
cagaagtagtaattcacagacagtt

SEQ ID NO: 28198 - DNA, 25 bp, Homo sapien
tgacctagggtcaggatcagggtta

SEQ ID NO: 28199 - DNA, 25 bp, Homo sapien
acagacagtttttcaagggtagtac

SEQ ID NO: 28200 - DNA, 25 bp, Homo sapien
tgagaaagagaatctggttgaccta

SEQ ID NO: 28201 - DNA, 25 bp, Homo sapien
caagggtagtactgttggactatac

SEQ ID NO: 28202 - DNA, 25 bp, Homo sapien
tcagggttaggaacacaagagtgga

SEQ ID NO: 28203 - DNA, 25 bp, Homo sapien
tttaccctgctaagtctcgctatac

SEQ ID NO: 28204 - DNA, 25 bp, Homo sapien
gacaaactctgggtgtgctcatcac

SEQ ID NO: 28205 - DNA, 25 bp, Homo sapien
aatacaggtcaaatggtggtgtact

SEQ ID NO: 28206 - DNA, 25 bp, Homo sapien
ctatggctcatatgaagacaaactc

SEQ ID NO: 28207 - DNA, 25 bp, Homo sapien
aatcgtttgtgttaagtccttgctc

SEQ ID NO: 28208 - DNA, 25 bp, Homo sapien
gcaccagtgagaccgacacggttgt

SEQ ID NO: 28209 - DNA, 25 bp, Homo sapien
tggatagagacgcataaatacatct

SEQ ID NO: 28210 - DNA, 25 bp, Homo sapien
tcagctgcactcacagcaccagtga

SEQ ID NO: 28211 - DNA, 25 bp, Homo sapien
ttaggagctcgcgtagggcctctcg

SEQ ID NO: 28212 - DNA, 25 bp, Homo sapien
aaggtcccggtgtgccgctgccgta

SEQ ID NO: 28213 - DNA, 25 bp, Homo sapien
tggactccttatcaggcagctgggt

SEQ ID NO: 28214 - DNA, 25 bp, Homo sapien
ctgggtgaccttgctgcaaagggca

SEQ ID NO: 28215 - DNA, 25 bp, Homo sapien
ttgctccattggctctcagctgcac

SEQ ID NO: 28216 - DNA, 25 bp, Homo sapien
ctggtgttcatacccagccaggaag

SEQ ID NO: 28217 - DNA, 25 bp, Homo sapien
ccaggcgacctgaacgagaggaagc

SEQ ID NO: 28218 - DNA, 25 bp, Homo sapien
gaagggctgcgttaaaagatctctc

SEQ ID NO: 28219 - DNA, 25 bp, Homo sapien
cttcagggccttgctatgggaacca

SEQ ID NO: 28220 - DNA, 25 bp, Homo sapien
gtggcagccagagataaatgtatct

SEQ ID NO: 28221 - DNA, 25 bp, Homo sapien
atatggggataacatacatgtgatc

SEQ ID NO: 28222 - DNA, 25 bp, Homo sapien
ctttggatctgcttcgggctaaata

SEQ ID NO: 28223 - DNA, 25 bp, Homo sapien
tactgaaaagaatgatctggactgt

SEQ ID NO: 28224 - DNA, 25 bp, Homo sapien
ttcccagagatcaggatgaagggct

SEQ ID NO: 28225 - DNA, 25 bp, Homo sapien
ttgtcggtgaccaacagatgtactt

SEQ ID NO: 28226 - DNA, 25 bp, Homo sapien
tcagtaagatgtgtgcctttggatc

SEQ ID NO: 28227 - DNA, 25 bp, Homo sapien
atggccagggccatccaattgtctc

SEQ ID NO: 28228 - DNA, 25 bp, Homo sapien
gtatctctgaggcatggtttcatct

SEQ ID NO: 28229 - DNA, 25 bp, Homo sapien
acgcatatagttaaggtactgccac

SEQ ID NO: 28230 - DNA, 25 bp, Homo sapien
gattgtatgaaaggagagaaggtta

SEQ ID NO: 28231 - DNA, 25 bp, Homo sapien
tcaaaataagagagctggattgtat

SEQ ID NO: 28232 - DNA, 25 bp, Homo sapien
ggatgggaatcccagacagtatccc

SEQ ID NO: 28233 - DNA, 25 bp, Homo sapien
ggcacatagttgttagaccacagaa

SEQ ID NO: 28234 - DNA, 25 bp, Homo sapien
tgctcctatggtaccgaggcaagct

SEQ ID NO: 28235 - DNA, 25 bp, Homo sapien
cccttgggcctgacgacacgcatat

SEQ ID NO: 28236 - DNA, 25 bp, Homo sapien
gttcccagtggattaagtaacttgc

SEQ ID NO: 28237 - DNA, 25 bp, Homo sapien
caaggccacatgctcccaagcgatg

SEQ ID NO: 28238 - DNA, 25 bp, Homo sapien
agcgatggagttagtcctcgaacct

SEQ ID NO: 28239 - DNA, 25 bp, Homo sapien
agcgagggaccgtgcccatcttact

SEQ ID NO: 28240 - DNA, 25 bp, Homo sapien
ggtggtaggctctagagatacaatc

SEQ ID NO: 28241 - DNA, 25 bp, Homo sapien
cttgagtaagataaacatggttccc

SEQ ID NO: 28242 - DNA, 25 bp, Homo sapien
gcagataagtagatgggcaattaca

SEQ ID NO: 28243 - DNA, 25 bp, Homo sapien
ggggcacaaaaggagacacatcctc

SEQ ID NO: 28244 - DNA, 25 bp, Homo sapien
ttctagaagagtggttcgctaatcc

SEQ ID NO: 28245 - DNA, 25 bp, Homo sapien
ccatggtttccagccaggggcactt

SEQ ID NO: 28246 - DNA, 25 bp, Homo sapien
cagtagttcaaaaccagaagctggt

SEQ ID NO: 28247 - DNA, 25 bp, Homo sapien
ctccagggcacgtttggcaatgtct

SEQ ID NO: 28248 - DNA, 25 bp, Homo sapien
agggctcagggtgattcatccattc

SEQ ID NO: 28249 - DNA, 25 bp, Homo sapien
tctctaggagttgctacatgggcat

SEQ ID NO: 28250 - DNA, 25 bp, Homo sapien
acaatacactggtggatgatgagca

SEQ ID NO: 28251 - DNA, 25 bp, Homo sapien
tttcaatgacgttggcctgctaggg

SEQ ID NO: 28252 - DNA, 25 bp, Homo sapien
cctgctaggggcctgatcataagtg

SEQ ID NO: 28253 - DNA, 25 bp, Homo sapien
gcgataggcctcaaggatgcctccc

SEQ ID NO: 28254 - DNA, 25 bp, Homo sapien
aggatgcctcccacaagtgcagctc

SEQ ID NO: 28255 - DNA, 25 bp, Homo sapien
gcagtagcatttgggtttcaatgac

SEQ ID NO: 28256 - DNA, 25 bp, Homo sapien
ggaatggccaaaggcagtagcattt

SEQ ID NO: 28257 - DNA, 25 bp, Homo sapien
taagcagtacactaaggcgcctgca

SEQ ID NO: 28258 - DNA, 25 bp, Homo sapien
gagggtttgagttcatagtgccagt

SEQ ID NO: 28259 - DNA, 25 bp, Homo sapien
atgggaaaagaagtagcttgactca

SEQ ID NO: 28260 - DNA, 25 bp, Homo sapien
tagagcaggagttttataatggggt

SEQ ID NO: 28261 - DNA, 25 bp, Homo sapien
tcatagtgccagtgcgtaagcagta

SEQ ID NO: 28262 - DNA, 25 bp, Homo sapien
aaaacacagtaaattacctggcctc

SEQ ID NO: 28263 - DNA, 25 bp, Homo sapien
tttgttaggtgtatagacacacttt

SEQ ID NO: 28264 - DNA, 25 bp, Homo sapien
agtggggcttctgagtgtaaattta

SEQ ID NO: 28265 - DNA, 25 bp, Homo sapien
gcatggagtcatgggcctgaataac

SEQ ID NO: 28266 - DNA, 25 bp, Homo sapien
tttaaagataggaaggcatacctgc

SEQ ID NO: 28267 - DNA, 25 bp, Homo sapien
tataggtagaacactaaaacacagt

SEQ ID NO: 28268 - DNA, 25 bp, Homo sapien
taggaaggcatacctgctgtcattt

SEQ ID NO: 28269 - DNA, 25 bp, Homo sapien
acctggcctccaacttggtagtctg

SEQ ID NO: 28270 - DNA, 25 bp, Homo sapien
atgggcctgaataacagttgagtac

SEQ ID NO: 28271 - DNA, 25 bp, Homo sapien
agtggcattttaatagcaagatacc

SEQ ID NO: 28272 - DNA, 25 bp, Homo sapien
atatttaacagggaaagcatggagt

SEQ ID NO: 28273 - DNA, 25 bp, Homo sapien
gtgccactggtgacactacaggtgt

SEQ ID NO: 28274 - DNA, 25 bp, Homo sapien
acctggcatgtttctaataatggtt

SEQ ID NO: 28275 - DNA, 25 bp, Homo sapien
atgatggataagctgataagtgatt

SEQ ID NO: 28276 - DNA, 25 bp, Homo sapien
cttactaaacgataccaagacaacc

SEQ ID NO: 28277 - DNA, 25 bp, Homo sapien
accaagacaaccaacctggcatgtt

SEQ ID NO: 28278 - DNA, 25 bp, Homo sapien
aaacgataccaagacaaccaacctg

SEQ ID NO: 28279 - DNA, 25 bp, Homo sapien
tacacagacttatgatggataagct

SEQ ID NO: 28280 - DNA, 25 bp, Homo sapien
ccactggtgacactacaggtgtgca

SEQ ID NO: 28281 - DNA, 25 bp, Homo sapien
cataataaaaagatatgccatatac

SEQ ID NO: 28282 - DNA, 25 bp, Homo sapien
tgccatatacacagacttatgatgg

SEQ ID NO: 28283 - DNA, 25 bp, Homo sapien
atggataagctgataagtgattttc

SEQ ID NO: 28284 - DNA, 25 bp, Homo sapien
taggatttagaaaatggagtagccc

SEQ ID NO: 28285 - DNA, 25 bp, Homo sapien
gttaagcgttttaaggcatgaagct

SEQ ID NO: 28286 - DNA, 25 bp, Homo sapien
atgtgaattcccaagtgacagtgta

SEQ ID NO: 28287 - DNA, 25 bp, Homo sapien
taattgtattagcaagggaagaccc

SEQ ID NO: 28288 - DNA, 25 bp, Homo sapien
ttctgagaacgtaggaaatactgta

SEQ ID NO: 28289 - DNA, 25 bp, Homo sapien
ttcctatagggttgcatgagcttta

SEQ ID NO: 28290 - DNA, 25 bp, Homo sapien
gtaagggcactaacaagtctgtcag

SEQ ID NO: 28291 - DNA, 25 bp, Homo sapien
agtctgtcagttgggagcatagttc

SEQ ID NO: 28292 - DNA, 25 bp, Homo sapien
gagcatagttcccagctgcaagttc

SEQ ID NO: 28293 - DNA, 25 bp, Homo sapien
tgacagtgtagggacccattaagtt

SEQ ID NO: 28294 - DNA, 25 bp, Homo sapien
gccagctttgaggtgtcagtgactt

SEQ ID NO: 28295 - DNA, 25 bp, Homo sapien
tagaatgcatgtgccttaatccatt

SEQ ID NO: 28296 - DNA, 25 bp, Homo sapien
tgggaagtccacagttaaggggcca

SEQ ID NO: 28297 - DNA, 25 bp, Homo sapien
gtgagggagctgagcatgcaaacat

SEQ ID NO: 28298 - DNA, 25 bp, Homo sapien
ggagctgagcatgcaaacatgctac

SEQ ID NO: 28299 - DNA, 25 bp, Homo sapien
gcaaacatgctactgcaggtctctt

SEQ ID NO: 28300 - DNA, 25 bp, Homo sapien
tcccaaagtgacatggtgagggagc

SEQ ID NO: 28301 - DNA, 25 bp, Homo sapien
aaggggccacacctggtgaaagcct

SEQ ID NO: 28302 - DNA, 25 bp, Homo sapien
acatgctactgcaggtctcttcctc

SEQ ID NO: 28303 - DNA, 25 bp, Homo sapien
aatatttagaatgcatgtgccttaa

SEQ ID NO: 28304 - DNA, 25 bp, Homo sapien
agtccacagttaaggggccacacct

SEQ ID NO: 28305 - DNA, 25 bp, Homo sapien
gcgcccagcccaagtatgcattttt

SEQ ID NO: 28306 - DNA, 25 bp, Homo sapien
atggacttgggatattagatctgct

SEQ ID NO: 28307 - DNA, 25 bp, Homo sapien
ttttggccaaggacatgctgcctac

SEQ ID NO: 28308 - DNA, 25 bp, Homo sapien
ttaatcagacaaatgaagatgttct

SEQ ID NO: 28309 - DNA, 25 bp, Homo sapien
tatgaagtcaaggtgttactggagt

SEQ ID NO: 28310 - DNA, 25 bp, Homo sapien
atccaaattggtaataaggggctag

SEQ ID NO: 28311 - DNA, 25 bp, Homo sapien
gggatagctatgtgaatactcgaga

SEQ ID NO: 28312 - DNA, 25 bp, Homo sapien
tactcgagaagcaaaacaagtcttg

SEQ ID NO: 28313 - DNA, 25 bp, Homo sapien
gttactggagttgcttagaataagc

SEQ ID NO: 28314 - DNA, 25 bp, Homo sapien
cgtactgcataacaaggttttggcc

SEQ ID NO: 28315 - DNA, 25 bp, Homo sapien
atgtatgtgagtgaaggtatccaaa

SEQ ID NO: 28316 - DNA, 25 bp, Homo sapien
tacatgatggtaggcccataagatt

SEQ ID NO: 28317 - DNA, 25 bp, Homo sapien
tgtctgcctgtgacaaaatgatcac

SEQ ID NO: 28318 - DNA, 25 bp, Homo sapien
ttaccaagtattgtaaagctctcac

SEQ ID NO: 28319 - DNA, 25 bp, Homo sapien
ttatggtatgctagtgtagacactg

SEQ ID NO: 28320 - DNA, 25 bp, Homo sapien
ttttttaacctcgatgtggactatc

SEQ ID NO: 28321 - DNA, 25 bp, Homo sapien
cagcctcggcctcacagagttctgg

SEQ ID NO: 28322 - DNA, 25 bp, Homo sapien
tcgatgtggactatcaaggtaaaat

SEQ ID NO: 28323 - DNA, 25 bp, Homo sapien
gtagacactggccttccctgttctt

SEQ ID NO: 28324 - DNA, 25 bp, Homo sapien
cttttggaaacaaatgacttttctc

SEQ ID NO: 28325 - DNA, 25 bp, Homo sapien
tatagccaagtcaaatgtctgcctg

SEQ ID NO: 28326 - DNA, 25 bp, Homo sapien
atagaatgtatatatagccaagtca

SEQ ID NO: 28327 - DNA, 25 bp, Homo sapien
taggcaactcctattatggtatgct

SEQ ID NO: 28328 - DNA, 25 bp, Homo sapien
taggtcattctgaaacttggcgggg

SEQ ID NO: 28329 - DNA, 25 bp, Homo sapien
ccaagtgaactttcagggtgttttc

SEQ ID NO: 28330 - DNA, 25 bp, Homo sapien
tcatatggaagcttcttgggtgccc

SEQ ID NO: 28331 - DNA, 25 bp, Homo sapien
aggacccactagtgctacatgagcc

SEQ ID NO: 28332 - DNA, 25 bp, Homo sapien
ccttgagggctgtaagaatctatga

SEQ ID NO: 28333 - DNA, 25 bp, Homo sapien
aaagctcttggatcctctaggccag

SEQ ID NO: 28334 - DNA, 25 bp, Homo sapien
tctctaggaagaatagaaaatggca

SEQ ID NO: 28335 - DNA, 25 bp, Homo sapien
ggctgcatcggcaccaaaagctctt

SEQ ID NO: 28336 - DNA, 25 bp, Homo sapien
ttccagttgcttccagtctaggttc

SEQ ID NO: 28337 - DNA, 25 bp, Homo sapien
aaaagcagtgctctagttggttcca

SEQ ID NO: 28338 - DNA, 25 bp, Homo sapien
aggccaggctgtactgaacaaggtt

SEQ ID NO: 28339 - DNA, 25 bp, Homo sapien
ggctcagaggcctggcaagtataat

SEQ ID NO: 28340 - DNA, 25 bp, Homo sapien
cctggcaagtataatgtggcatttc

SEQ ID NO: 28341 - DNA, 25 bp, Homo sapien
gccaaagactagacagaggtttcat

SEQ ID NO: 28342 - DNA, 25 bp, Homo sapien
gcttagccaaagactagacagaggt

SEQ ID NO: 28343 - DNA, 25 bp, Homo sapien
tgtgtcgtgactttactaattgtgt

SEQ ID NO: 28344 - DNA, 25 bp, Homo sapien
aagtgtctgcttggctagcttagcc

SEQ ID NO: 28345 - DNA, 25 bp, Homo sapien
tgcacccaatgagtctaccagtctt

SEQ ID NO: 28346 - DNA, 25 bp, Homo sapien
ccactgaagtgtctgcttggctagc

SEQ ID NO: 28347 - DNA, 25 bp, Homo sapien
ttgttgtttgcttgtgtcgtgactt

SEQ ID NO: 28348 - DNA, 25 bp, Homo sapien
gattgcacccaatgagtctaccagt

SEQ ID NO: 28349 - DNA, 25 bp, Homo sapien
gaggtttcattaagtgattgcaccc

SEQ ID NO: 28350 - DNA, 25 bp, Homo sapien
caaactcagacggttctcctgcctc

SEQ ID NO: 28351 - DNA, 25 bp, Homo sapien
aggaaccaagggaaattgcccatat

SEQ ID NO: 28352 - DNA, 25 bp, Homo sapien
tgtagccaaatgctccacaggaacc

SEQ ID NO: 28353 - DNA, 25 bp, Homo sapien
tataaaatcctgcttagctacaagc

SEQ ID NO: 28354 - DNA, 25 bp, Homo sapien
ctccacaggaaccaagggaaattgc

SEQ ID NO: 28355 - DNA, 25 bp, Homo sapien
tgcccatatgggctgagggaaactt

SEQ ID NO: 28356 - DNA, 25 bp, Homo sapien
tgcagtgaaacaaccatggctcacc

SEQ ID NO: 28357 - DNA, 25 bp, Homo sapien
ccatatgggctgagggaaacttttc

SEQ ID NO: 28358 - DNA, 25 bp, Homo sapien
cttctgtgtctgtagccaaatgctc

SEQ ID NO: 28359 - DNA, 25 bp, Homo sapien
actagtttcactactgctggtccca

SEQ ID NO: 28360 - DNA, 25 bp, Homo sapien
tagctacaagcaacttagatttaac

SEQ ID NO: 28361 - DNA, 25 bp, Homo sapien
cccagtgactacctaaaaggccgta

SEQ ID NO: 28362 - DNA, 25 bp, Homo sapien
ttttagaggctgcaaatctaaggtc

SEQ ID NO: 28363 - DNA, 25 bp, Homo sapien
ccgggcatggcgacgtgcacatgta

SEQ ID NO: 28364 - DNA, 25 bp, Homo sapien
aagtggggactctagctacagtagc

SEQ ID NO: 28365 - DNA, 25 bp, Homo sapien
aaaaggccgtattcaaatagtcgta

SEQ ID NO: 28366 - DNA, 25 bp, Homo sapien
acaacaattttactagattagggcc

SEQ ID NO: 28367 - DNA, 25 bp, Homo sapien
tttctctgtgagcaggaatccctgg

SEQ ID NO: 28368 - DNA, 25 bp, Homo sapien
ggtctgggtgacgtagatttacaaa

SEQ ID NO: 28369 - DNA, 25 bp, Homo sapien
gctgcaaatctaaggtctgggtgcc

SEQ ID NO: 28370 - DNA, 25 bp, Homo sapien
tcaaatagtcgtattaggccaggcg

SEQ ID NO: 28371 - DNA, 25 bp, Homo sapien
aaccagagtattagctcaggctgcc

SEQ ID NO: 28372 - DNA, 25 bp, Homo sapien
aggaattccacagctgttggtcagc

SEQ ID NO: 28373 - DNA, 25 bp, Homo sapien
tatctagtcacatcggaggtcccag

SEQ ID NO: 28374 - DNA, 25 bp, Homo sapien
attgagcccaagatgcttagccctc

SEQ ID NO: 28375 - DNA, 25 bp, Homo sapien
atggggtgcagagtttccagagcca

SEQ ID NO: 28376 - DNA, 25 bp, Homo sapien
gaaaatgatgtgactcaggaattcc

SEQ ID NO: 28377 - DNA, 25 bp, Homo sapien
tttcgtttgcctgctcaagagcgat

SEQ ID NO: 28378 - DNA, 25 bp, Homo sapien
ccagccagtagtggcgttcagatat

SEQ ID NO: 28379 - DNA, 25 bp, Homo sapien
aagtggtttattgagcccaagatgc

SEQ ID NO: 28380 - DNA, 25 bp, Homo sapien
ttagaggagaaaatgatgtgactca

SEQ ID NO: 28381 - DNA, 25 bp, Homo sapien
cagcctggcagttctgggcatatct

SEQ ID NO: 28382 - DNA, 25 bp, Homo sapien
tcccttcaagtttccagccagtagt

SEQ ID NO: 28383 - DNA, 25 bp, Homo sapien
cactgtgtataatgaggtcaaattc

SEQ ID NO: 28384 - DNA, 25 bp, Homo sapien
ctaagttgttccagtaagcagcctc

SEQ ID NO: 28385 - DNA, 25 bp, Homo sapien
aaggcccggaagtcttcaggattta

SEQ ID NO: 28386 - DNA, 25 bp, Homo sapien
agatggaccagtcaagcagttccct

SEQ ID NO: 28387 - DNA, 25 bp, Homo sapien
atgttcctttaactgggcacgttca

SEQ ID NO: 28388 - DNA, 25 bp, Homo sapien
tacagacttggcatgcaacctcctc

SEQ ID NO: 28389 - DNA, 25 bp, Homo sapien
agtaagcagcctctacattgggtct

SEQ ID NO: 28390 - DNA, 25 bp, Homo sapien
ttgcaaggcctgactctcttttcca

SEQ ID NO: 28391 - DNA, 25 bp, Homo sapien
ctgggcacgttcagtgttagcatct

SEQ ID NO: 28392 - DNA, 25 bp, Homo sapien
atgttgcaatattacagacttggca

SEQ ID NO: 28393 - DNA, 25 bp, Homo sapien
aggatttacagctatttgaaaaccc

SEQ ID NO: 28394 - DNA, 25 bp, Homo sapien
ggcaaggcagagctgtttgctcctt

SEQ ID NO: 28395 - DNA, 25 bp, Homo sapien
aagatgctggttaagtatcacctcc

SEQ ID NO: 28396 - DNA, 25 bp, Homo sapien
ttgcctgggcaaggcagagctgttt

SEQ ID NO: 28397 - DNA, 25 bp, Homo sapien
atattgctaataactctgccattgc

SEQ ID NO: 28398 - DNA, 25 bp, Homo sapien
tccagctctgttcatacaaaaccac

SEQ ID NO: 28399 - DNA, 25 bp, Homo sapien
acagcatctgtgatgattccaattc

SEQ ID NO: 28400 - DNA, 25 bp, Homo sapien
tttcctaggtaactgtaatattgct

SEQ ID NO: 28401 - DNA, 25 bp, Homo sapien
cccatagcaccgaatgaaaggattt

SEQ ID NO: 28402 - DNA, 25 bp, Homo sapien
ggtgtgagccacagacaattcttaa

SEQ ID NO: 28403 - DNA, 25 bp, Homo sapien
tcactcttcaagatgctggttaagt

SEQ ID NO: 28404 - DNA, 25 bp, Homo sapien
tcatgtcacttcctctgcctgtaac

SEQ ID NO: 28405 - DNA, 25 bp, Homo sapien
cctcagagctgagtacaccgttggc

SEQ ID NO: 28406 - DNA, 25 bp, Homo sapien
gccgctggttgaatgaagggccaca

SEQ ID NO: 28407 - DNA, 25 bp, Homo sapien
aagctggcgcaacgaccgcagaacc

SEQ ID NO: 28408 - DNA, 25 bp, Homo sapien
agcacaaacaaacgccttggcggga

SEQ ID NO: 28409 - DNA, 25 bp, Homo sapien
acaccgttggcgattaataagcgct

SEQ ID NO: 28410 - DNA, 25 bp, Homo sapien
cagaaccctcagtgggcaccaggac

SEQ ID NO: 28411 - DNA, 25 bp, Homo sapien
gaaaatgaagctggcgcaacgaccg

SEQ ID NO: 28412 - DNA, 25 bp, Homo sapien
gcgtcctggcgcagagctggcacac

SEQ ID NO: 28413 - DNA, 25 bp, Homo sapien
cacacagcacaaacaaacgccttgg

SEQ ID NO: 28414 - DNA, 25 bp, Homo sapien
ccacggagctcagggtgccaatggt

SEQ ID NO: 28415 - DNA, 25 bp, Homo sapien
ttaataagcgcttgcagctcccttc

SEQ ID NO: 28416 - DNA, 25 bp, Homo sapien
tctagaaccattgtgggaagctcgc

SEQ ID NO: 28417 - DNA, 25 bp, Homo sapien
catcttggttgagccagaggtgact

SEQ ID NO: 28418 - DNA, 25 bp, Homo sapien
ttcttggcctgagcgcatcttggtt

SEQ ID NO: 28419 - DNA, 25 bp, Homo sapien
tttcaggatttgtagctggaagtcc

SEQ ID NO: 28420 - DNA, 25 bp, Homo sapien
tgcgaaaagccttgcatggcccatc

SEQ ID NO: 28421 - DNA, 25 bp, Homo sapien
gatgtgctgagtcggcttgttaaaa

SEQ ID NO: 28422 - DNA, 25 bp, Homo sapien
tgtctgctcatgaagaggcaaagcc

SEQ ID NO: 28423 - DNA, 25 bp, Homo sapien
tcttagtctaagagggagtgtctgc

SEQ ID NO: 28424 - DNA, 25 bp, Homo sapien
gaatgaaggaaggttctagaaccat

SEQ ID NO: 28425 - DNA, 25 bp, Homo sapien
ggaagctcgctagtaaagatggttt

SEQ ID NO: 28426 - DNA, 25 bp, Homo sapien
caaaggctgtggtgtttatgagtct

SEQ ID NO: 28427 - DNA, 25 bp, Homo sapien
agaagcttttcagggtgcaggactc

SEQ ID NO: 28428 - DNA, 25 bp, Homo sapien
ttctcttcagggacagcatgaattc

SEQ ID NO: 28429 - DNA, 25 bp, Homo sapien
ctgtcctccagagatgcgtcagttc

SEQ ID NO: 28430 - DNA, 25 bp, Homo sapien
ctctgagggctaacaccaggatggt

SEQ ID NO: 28431 - DNA, 25 bp, Homo sapien
atgaattcaggctacccatggggtt

SEQ ID NO: 28432 - DNA, 25 bp, Homo sapien
atgaggtcaaaggttaggtacatct

SEQ ID NO: 28433 - DNA, 25 bp, Homo sapien
aaccagctctgcagggaattgttca

SEQ ID NO: 28434 - DNA, 25 bp, Homo sapien
aacatgaggcacactgtaagtagct

SEQ ID NO: 28435 - DNA, 25 bp, Homo sapien
ccagcaagccggaacagttgtcctt

SEQ ID NO: 28436 - DNA, 25 bp, Homo sapien
tagttgtccctataagagaagcttt

SEQ ID NO: 28437 - DNA, 25 bp, Homo sapien
ggagaaattaatagacggggcatta

SEQ ID NO: 28438 - DNA, 25 bp, Homo sapien
ttcttgcctcccacaggaagccttt

SEQ ID NO: 28439 - DNA, 25 bp, Homo sapien
agggcagtcattcaacaccgcgtgt

SEQ ID NO: 28440 - DNA, 25 bp, Homo sapien
ccagtgaggctggagcattttttat

SEQ ID NO: 28441 - DNA, 25 bp, Homo sapien
tctgaaggttgatgacgctaagcct

SEQ ID NO: 28442 - DNA, 25 bp, Homo sapien
tcatcctagctgacctctgaaggtt

SEQ ID NO: 28443 - DNA, 25 bp, Homo sapien
ttgaaatcctgtggctacactggcc

SEQ ID NO: 28444 - DNA, 25 bp, Homo sapien
gctaagccttgctaagggcagtcat

SEQ ID NO: 28445 - DNA, 25 bp, Homo sapien
cactgctctgggacgtccagctgga

SEQ ID NO: 28446 - DNA, 25 bp, Homo sapien
aggaagcctttctggcaccctagac

SEQ ID NO: 28447 - DNA, 25 bp, Homo sapien
agatcttaagagctgtggtctcaac

SEQ ID NO: 28448 - DNA, 25 bp, Homo sapien
cagctggagaggaagaagatcttaa

SEQ ID NO: 28449 - DNA, 25 bp, Homo sapien
gagagccgtggacaccaactttccc

SEQ ID NO: 28450 - DNA, 25 bp, Homo sapien
agggcagcacagtcacttggaataa

SEQ ID NO: 28451 - DNA, 25 bp, Homo sapien
ttggaataaacagtggagagaccca

SEQ ID NO: 28452 - DNA, 25 bp, Homo sapien
ttccacttaagcaagagccagcaga

SEQ ID NO: 28453 - DNA, 25 bp, Homo sapien
tcaacccaggtgtgctgactcttgc

SEQ ID NO: 28454 - DNA, 25 bp, Homo sapien
caaaatagccttgggagttgctgtt

SEQ ID NO: 28455 - DNA, 25 bp, Homo sapien
gcctaggcagaaagacaatgtccca

SEQ ID NO: 28456 - DNA, 25 bp, Homo sapien
ggagattaccctgaggtgccctaca

SEQ ID NO: 28457 - DNA, 25 bp, Homo sapien
gctgtaaacataaccctgggcctgg

SEQ ID NO: 28458 - DNA, 25 bp, Homo sapien
tgcacatgataaggaaaatctgggc

SEQ ID NO: 28459 - DNA, 25 bp, Homo sapien
acctgagtgcccaaagacctgctgc

SEQ ID NO: 28460 - DNA, 25 bp, Homo sapien
aggttgggaggcttataaaatcttc

SEQ ID NO: 28461 - DNA, 25 bp, Homo sapien
aactggcccttgatgcagctcagca

SEQ ID NO: 28462 - DNA, 25 bp, Homo sapien
gattcgggaactctgttagcggatt

SEQ ID NO: 28463 - DNA, 25 bp, Homo sapien
aatgtggcacaagaacccttatggt

SEQ ID NO: 28464 - DNA, 25 bp, Homo sapien
ttctgctgcaggataactggccctt

SEQ ID NO: 28465 - DNA, 25 bp, Homo sapien
catcatgagtggttctgggcttaaa

SEQ ID NO: 28466 - DNA, 25 bp, Homo sapien
ttcttaggtgcagcaataggactgt

SEQ ID NO: 28467 - DNA, 25 bp, Homo sapien
caattcaagaaatgagtggggactt

SEQ ID NO: 28468 - DNA, 25 bp, Homo sapien
tgtgtggttttaggagccagtatcc

SEQ ID NO: 28469 - DNA, 25 bp, Homo sapien
cagagtgaagacagtactgagtata

SEQ ID NO: 28470 - DNA, 25 bp, Homo sapien
attcctgtaccaaaagcaagctgca

SEQ ID NO: 28471 - DNA, 25 bp, Homo sapien
cagcggcagttctgtctccagggca

SEQ ID NO: 28472 - DNA, 25 bp, Homo sapien
tccagggcacatcatgacctggtgc

SEQ ID NO: 28473 - DNA, 25 bp, Homo sapien
tgcggaaacgagctcccaacttcaa

SEQ ID NO: 28474 - DNA, 25 bp, Homo sapien
gtaagcgtctatgtaccatggtatc

SEQ ID NO: 28475 - DNA, 25 bp, Homo sapien
acacatgggcatagtaagcgtctat

SEQ ID NO: 28476 - DNA, 25 bp, Homo sapien
ctgggctagacgtgctcttgctagc

SEQ ID NO: 28477 - DNA, 25 bp, Homo sapien
aacttcaaatgtgtgtgcagggtac

SEQ ID NO: 28478 - DNA, 25 bp, Homo sapien
ggtgctgtcaaacctgcagggtctt

SEQ ID NO: 28479 - DNA, 25 bp, Homo sapien
aacatcttaatgtgaggcccttcca

SEQ ID NO: 28480 - DNA, 25 bp, Homo sapien
tttcttagggaagggttcagaatga

SEQ ID NO: 28481 - DNA, 25 bp, Homo sapien
tgcagggtaccgacacatgggcata

SEQ ID NO: 28482 - DNA, 25 bp, Homo sapien
accatcatcccagcatgggtgcggt

SEQ ID NO: 28483 - DNA, 25 bp, Homo sapien
cacggctttggcttggcatggactt

SEQ ID NO: 28484 - DNA, 25 bp, Homo sapien
ttagaagctggcgtaaattgtgaat

SEQ ID NO: 28485 - DNA, 25 bp, Homo sapien
taatgaaaatccaggtcgtagcaac

SEQ ID NO: 28486 - DNA, 25 bp, Homo sapien
ttggcatggacttacagtgacatct

SEQ ID NO: 28487 - DNA, 25 bp, Homo sapien
aagagcattctgaaacaagccacta

SEQ ID NO: 28488 - DNA, 25 bp, Homo sapien
ttggcgggttccatacgttacagtg

SEQ ID NO: 28489 - DNA, 25 bp, Homo sapien
tgccaagccagatgtccctcaatac

SEQ ID NO: 28490 - DNA, 25 bp, Homo sapien
tctttgagatgcacttgtccggggt

SEQ ID NO: 28491 - DNA, 25 bp, Homo sapien
aaattgtgaatgaaattggcgggtt

SEQ ID NO: 28492 - DNA, 25 bp, Homo sapien
tcgtagcaacttgccgtgcacggct

SEQ ID NO: 28493 - DNA, 25 bp, Homo sapien
actcatctgagttgacagactcact

SEQ ID NO: 28494 - DNA, 25 bp, Homo sapien
aattgagctcgtttctatccacaga

SEQ ID NO: 28495 - DNA, 25 bp, Homo sapien
aacatgatagaacaactggcaagat

SEQ ID NO: 28496 - DNA, 25 bp, Homo sapien
acagaggaggtaagattcactcatc

SEQ ID NO: 28497 - DNA, 25 bp, Homo sapien
caactggcaagatgttcttaaacat

SEQ ID NO: 28498 - DNA, 25 bp, Homo sapien
ccacccagccagatttcagtaactt

SEQ ID NO: 28499 - DNA, 25 bp, Homo sapien
tgttttattggtgggatctaacgta

SEQ ID NO: 28500 - DNA, 25 bp, Homo sapien
agactcactgagatacacatacaca

SEQ ID NO: 28501 - DNA, 25 bp, Homo sapien
tcactgtaacgtatggaacccgcca

SEQ ID NO: 28502 - DNA, 25 bp, Homo sapien
atgcagtgtcacgatcatggctccc

SEQ ID NO: 28503 - DNA, 25 bp, Homo sapien
agtgaactgagttgaaattgagctc

SEQ ID NO: 28504 - DNA, 25 bp, Homo sapien
tgaactaggcaacaatcacaaaacc

SEQ ID NO: 28505 - DNA, 25 bp, Homo sapien
cctcaggagtgtaaaacaagtgttc

SEQ ID NO: 28506 - DNA, 25 bp, Homo sapien
cagatgaattgcacagttggccctc

SEQ ID NO: 28507 - DNA, 25 bp, Homo sapien
aaaactgcaggggaaccattatttc

SEQ ID NO: 28508 - DNA, 25 bp, Homo sapien
ctgagatggcattagcttacttagc

SEQ ID NO: 28509 - DNA, 25 bp, Homo sapien
tatcctctggacacactgcttctat

SEQ ID NO: 28510 - DNA, 25 bp, Homo sapien
ctgagatggctgaattggtggctct

SEQ ID NO: 28511 - DNA, 25 bp, Homo sapien
ttcctctaggtgtggtctaaccagt

SEQ ID NO: 28512 - DNA, 25 bp, Homo sapien
ctgctgtcacctatgagatgttgtt

SEQ ID NO: 28513 - DNA, 25 bp, Homo sapien
ttggcaatgccaggcatgtgctcat

SEQ ID NO: 28514 - DNA, 25 bp, Homo sapien
tgctgccaagtctcatccatcctgt

SEQ ID NO: 28515 - DNA, 25 bp, Homo sapien
tcaagcttaatgtgagaagagggcc

SEQ ID NO: 28516 - DNA, 25 bp, Homo sapien
ttgacacggttcaaggactaggcat

SEQ ID NO: 28517 - DNA, 25 bp, Homo sapien
tagaccacacctagaggaaggttgt

SEQ ID NO: 28518 - DNA, 25 bp, Homo sapien
actaatagaagcagtgtgtccagag

SEQ ID NO: 28519 - DNA, 25 bp, Homo sapien
tttttcacaggatggatgagacttg

SEQ ID NO: 28520 - DNA, 25 bp, Homo sapien
ctcataggtgacagcagaaggaatt

SEQ ID NO: 28521 - DNA, 25 bp, Homo sapien
gagggccaactgtgcaattcatctg

SEQ ID NO: 28522 - DNA, 25 bp, Homo sapien
ttctacaagaccaaggactatgttc

SEQ ID NO: 28523 - DNA, 25 bp, Homo sapien
cagaggataggaaataatggttccc

SEQ ID NO: 28524 - DNA, 25 bp, Homo sapien
gatgagacttggcagcagtatatat

SEQ ID NO: 28525 - DNA, 25 bp, Homo sapien
cacctaatagggacatgataaatat

SEQ ID NO: 28526 - DNA, 25 bp, Homo sapien
ctcatgtgtaatctttaaagcatat

SEQ ID NO: 28527 - DNA, 25 bp, Homo sapien
tcttgaccattagtggataggaaaa

SEQ ID NO: 28528 - DNA, 25 bp, Homo sapien
tcttcttgaccattagtggatagga

SEQ ID NO: 28529 - DNA, 25 bp, Homo sapien
aaggataatgtatatctcaggtcac

SEQ ID NO: 28530 - DNA, 25 bp, Homo sapien
aaatgctctgattttctgtaaccat

SEQ ID NO: 28531 - DNA, 25 bp, Homo sapien
tgggagcctgttgctggcacggtcc

SEQ ID NO: 28532 - DNA, 25 bp, Homo sapien
ttccttattggagttcattattgga

SEQ ID NO: 28533 - DNA, 25 bp, Homo sapien
agtatactttaaaacaatcctgcga

SEQ ID NO: 28534 - DNA, 25 bp, Homo sapien
ggtcacgcacctgggagcctgttgc

SEQ ID NO: 28535 - DNA, 25 bp, Homo sapien
agtggataggaaaaaaatgctctga

SEQ ID NO: 28536 - DNA, 25 bp, Homo sapien
actttaaaacaatcctgcgaacaga

SEQ ID NO: 28537 - DNA, 25 bp, Homo sapien
cagaagtatgtgtttctcaatcacc

SEQ ID NO: 28538 - DNA, 25 bp, Homo sapien
ccatagcaatttagggaaatttgac

SEQ ID NO: 28539 - DNA, 25 bp, Homo sapien
gtgatccaagaaactagtacgaaat

SEQ ID NO: 28540 - DNA, 25 bp, Homo sapien
tccaagaaactagtacgaaatgcct

SEQ ID NO: 28541 - DNA, 25 bp, Homo sapien
caggtggtagcatgacattgactcc

SEQ ID NO: 28542 - DNA, 25 bp, Homo sapien
taacgtgttgagtgttaaacccaca

SEQ ID NO: 28543 - DNA, 25 bp, Homo sapien
cccacaggtggtagcatgacattga

SEQ ID NO: 28544 - DNA, 25 bp, Homo sapien
ttgagtgttaaacccacaggtggta

SEQ ID NO: 28545 - DNA, 25 bp, Homo sapien
ctgtcggaaactaggttttcccata

SEQ ID NO: 28546 - DNA, 25 bp, Homo sapien
ttaagtaatcagaagtatgtgtttc

SEQ ID NO: 28547 - DNA, 25 bp, Homo sapien
attgactcctcagccaagcatatta

SEQ ID NO: 28548 - DNA, 25 bp, Homo sapien
accacctgtgggtttaacactcaac

SEQ ID NO: 28549 - DNA, 25 bp, Homo sapien
gggaacaaaattagaatgcagaaat

SEQ ID NO: 28550 - DNA, 25 bp, Homo sapien
gaggagtcaatgtcatgctaccacc

SEQ ID NO: 28551 - DNA, 25 bp, Homo sapien
aaaaaatcagaaaggcatttcgtac

SEQ ID NO: 28552 - DNA, 25 bp, Homo sapien
tccgacagttgataatatgcttggc

SEQ ID NO: 28553 - DNA, 25 bp, Homo sapien
taatatgcttggctgaggagtcaat

SEQ ID NO: 28554 - DNA, 25 bp, Homo sapien
tttaaaaggtgattgagaaacacat

SEQ ID NO: 28555 - DNA, 25 bp, Homo sapien
acaagagagccaaccagaaatttat

SEQ ID NO: 28556 - DNA, 25 bp, Homo sapien
agaattcagttaggtgactgggaac

SEQ ID NO: 28557 - DNA, 25 bp, Homo sapien
ctcaacacgttaagaaagtcaaatt

SEQ ID NO: 28558 - DNA, 25 bp, Homo sapien
tcttggatcactatgggaaaaccta

SEQ ID NO: 28559 - DNA, 25 bp, Homo sapien
tttcactgtgtaaaagggcaagcta

SEQ ID NO: 28560 - DNA, 25 bp, Homo sapien
tagcatgcacaagatcagacaagtt

SEQ ID NO: 28561 - DNA, 25 bp, Homo sapien
tattgaagtcttaacatccatatct

SEQ ID NO: 28562 - DNA, 25 bp, Homo sapien
tttctatgagaagtattttccctac

SEQ ID NO: 28563 - DNA, 25 bp, Homo sapien
tcagacaagttgttatgggttgaat

SEQ ID NO: 28564 - DNA, 25 bp, Homo sapien
ggaatacattccacttataatcagc

SEQ ID NO: 28565 - DNA, 25 bp, Homo sapien
gaggtttcactgtgtaaaagggcaa

SEQ ID NO: 28566 - DNA, 25 bp, Homo sapien
aacttttatagttggaatacattcc

SEQ ID NO: 28567 - DNA, 25 bp, Homo sapien
gtgggcttcctagggtagcatgcac

SEQ ID NO: 28568 - DNA, 25 bp, Homo sapien
taaaaacatagtagtgattatcttt

SEQ ID NO: 28569 - DNA, 25 bp, Homo sapien
ttcctagggtagcatgcacaagatc

SEQ ID NO: 28570 - DNA, 25 bp, Homo sapien
tctaagatatggatgttaagacttc

SEQ ID NO: 28571 - DNA, 25 bp, Homo sapien
aacaatttagaaacatgagtagaat

SEQ ID NO: 28572 - DNA, 25 bp, Homo sapien
attcaacccataacaacttgtctga

SEQ ID NO: 28573 - DNA, 25 bp, Homo sapien
agggtgtattctaagatatggatgt

SEQ ID NO: 28574 - DNA, 25 bp, Homo sapien
cacaaaacttagcttgcccttttac

SEQ ID NO: 28575 - DNA, 25 bp, Homo sapien
gagtagaatataaaacagaccagtt

SEQ ID NO: 28576 - DNA, 25 bp, Homo sapien
aaggaagtagggaaaatacttctca

SEQ ID NO: 28577 - DNA, 25 bp, Homo sapien
acttgtctgatcttgtgcatgctac

SEQ ID NO: 28578 - DNA, 25 bp, Homo sapien
gctgattataagtggaatgtattcc

SEQ ID NO: 28579 - DNA, 25 bp, Homo sapien
gtgcatgctaccctaggaagcccac

SEQ ID NO: 28580 - DNA, 25 bp, Homo sapien
aatattagccgggtatggcagtgtg

SEQ ID NO: 28581 - DNA, 25 bp, Homo sapien
ccaagaaatgattaaggatattaca

SEQ ID NO: 28582 - DNA, 25 bp, Homo sapien
tagctagacttttaaacccttgctc

SEQ ID NO: 28583 - DNA, 25 bp, Homo sapien
ggagtgattgcagactagtaaggtt

SEQ ID NO: 28584 - DNA, 25 bp, Homo sapien
taggtaagctgcctctcagactcct

SEQ ID NO: 28585 - DNA, 25 bp, Homo sapien
gctttacctgcttcctagacctgta

SEQ ID NO: 28586 - DNA, 25 bp, Homo sapien
gacacatttcccagagtgcccagtg

SEQ ID NO: 28587 - DNA, 25 bp, Homo sapien
catagatactaagctgtaaagggat

SEQ ID NO: 28588 - DNA, 25 bp, Homo sapien
tgcagactagtaaggttagctagac

SEQ ID NO: 28589 - DNA, 25 bp, Homo sapien
ctcagactcctcaaagcagctttac

SEQ ID NO: 28590 - DNA, 25 bp, Homo sapien
ttactgccctaggtaagctgcctct

SEQ ID NO: 28591 - DNA, 25 bp, Homo sapien
tagacctgtatcctaacactcatcc

SEQ ID NO: 28592 - DNA, 25 bp, Homo sapien
agaggcagcttacctagggcagtaa

SEQ ID NO: 28593 - DNA, 25 bp, Homo sapien
ggatgagtgttaggatacaggtcta

SEQ ID NO: 28594 - DNA, 25 bp, Homo sapien
tctgagaggcagcttacctagggca

SEQ ID NO: 28595 - DNA, 25 bp, Homo sapien
agagcaagggtttaaaagtctagct

SEQ ID NO: 28596 - DNA, 25 bp, Homo sapien
tagctaaccttactagtctgcaatc

SEQ ID NO: 28597 - DNA, 25 bp, Homo sapien
ttacagcttagtatctatggggatg

SEQ ID NO: 28598 - DNA, 25 bp, Homo sapien
ggatgaaattccacattagcattta

SEQ ID NO: 28599 - DNA, 25 bp, Homo sapien
tgttaggatacaggtctaggaagca

SEQ ID NO: 28600 - DNA, 25 bp, Homo sapien
actctgggaaatgtgtcattaaaaa

SEQ ID NO: 28601 - DNA, 25 bp, Homo sapien
cttagtatctatggggatgagtgtt

SEQ ID NO: 28602 - DNA, 25 bp, Homo sapien
acaggtctaggaagcaggtaaagct

SEQ ID NO: 28603 - DNA, 25 bp, Homo sapien
aagtgataatgtggagaatgctccc

SEQ ID NO: 28604 - DNA, 25 bp, Homo sapien
agttctacccagatggaatccaatc

SEQ ID NO: 28605 - DNA, 25 bp, Homo sapien
aaagctgaggaactggaagtgataa

SEQ ID NO: 28606 - DNA, 25 bp, Homo sapien
aactggaagtgataatgtggagaat

SEQ ID NO: 28607 - DNA, 25 bp, Homo sapien
acccagatggaatccaatcaaatcc

SEQ ID NO: 28608 - DNA, 25 bp, Homo sapien
tatggagaataactatatcaaatca

SEQ ID NO: 28609 - DNA, 25 bp, Homo sapien
aatatagttctacccagatggaatc

SEQ ID NO: 28610 - DNA, 25 bp, Homo sapien
ataatgtggagaatgctcccgtctc

SEQ ID NO: 28611 - DNA, 25 bp, Homo sapien
gttgagtaactacatattgagaatc

SEQ ID NO: 28612 - DNA, 25 bp, Homo sapien
gtggagaatgctcccgtctccgcaa

SEQ ID NO: 28613 - DNA, 25 bp, Homo sapien
caaattaagtagtgaccttaaggag

SEQ ID NO: 28614 - DNA, 25 bp, Homo sapien
aagtgataatgtggagaatgctccc

SEQ ID NO: 28615 - DNA, 25 bp, Homo sapien
tgactctgagcaacacaagcagcat

SEQ ID NO: 28616 - DNA, 25 bp, Homo sapien
taagtagtgaccttaaggagctatc

SEQ ID NO: 28617 - DNA, 25 bp, Homo sapien
aaagctgaggaactggaagtgataa

SEQ ID NO: 28618 - DNA, 25 bp, Homo sapien
aactggaagtgataatgtggagaat

SEQ ID NO: 28619 - DNA, 25 bp, Homo sapien
aaaaagactgattaatgtttccttc

SEQ ID NO: 28620 - DNA, 25 bp, Homo sapien
tatggagaataactatatcaaatca

SEQ ID NO: 28621 - DNA, 25 bp, Homo sapien
gttgagtaactacatattgagaatc

SEQ ID NO: 28622 - DNA, 25 bp, Homo sapien
tacccagatggaatccaatcaaatc

SEQ ID NO: 28623 - DNA, 25 bp, Homo sapien
aatatagttctacccagatggaatc

SEQ ID NO: 28624 - DNA, 25 bp, Homo sapien
gtggagaatgctcccgtctccgcaa

SEQ ID NO: 28625 - DNA, 25 bp, Homo sapien
ctgtactgaagatgccatcacaagc

SEQ ID NO: 28626 - DNA, 25 bp, Homo sapien
cttcagatagctccttaaggtcact

SEQ ID NO: 28627 - DNA, 25 bp, Homo sapien
ggagacgggagcattctccacatta

SEQ ID NO: 28628 - DNA, 25 bp, Homo sapien
aagatggatttgattgatttgatat

SEQ ID NO: 28629 - DNA, 25 bp, Homo sapien
catatgcaagaaggaaacattaatc

SEQ ID NO: 28630 - DNA, 25 bp, Homo sapien
tgctgcttgtgttgctcagagtcac

SEQ ID NO: 28631 - DNA, 25 bp, Homo sapien
ttgtgttgctcagagtcacggaatc

SEQ ID NO: 28632 - DNA, 25 bp, Homo sapien
atgcaaacatatgcaagaaggaaac

SEQ ID NO: 28633 - DNA, 25 bp, Homo sapien
tataaagatggatttgattggattc

SEQ ID NO: 28634 - DNA, 25 bp, Homo sapien
tcagagtcacggaatctgtactgaa

SEQ ID NO: 28635 - DNA, 25 bp, Homo sapien
tccatctgggtagaactatattgtg

SEQ ID NO: 28636 - DNA, 25 bp, Homo sapien
acagctattatgacgcagcgggtct

SEQ ID NO: 28637 - DNA, 25 bp, Homo sapien
gagttagtgataggggtctatacct

SEQ ID NO: 28638 - DNA, 25 bp, Homo sapien
agtaaatctcactgggtccctcctt

SEQ ID NO: 28639 - DNA, 25 bp, Homo sapien
gaaaagcagctcatgatcttctctg

SEQ ID NO: 28640 - DNA, 25 bp, Homo sapien
atgtacctgcagcaaccaaaagcgg

SEQ ID NO: 28641 - DNA, 25 bp, Homo sapien
ggggtctatacctatggcttccgaa

SEQ ID NO: 28642 - DNA, 25 bp, Homo sapien
tgtgatacagacagctctgacgttt

SEQ ID NO: 28643 - DNA, 25 bp, Homo sapien
atggcttccgaaactctgtgataca

SEQ ID NO: 28644 - DNA, 25 bp, Homo sapien
cagcaaccaaaagcggggaattcat

SEQ ID NO: 28645 - DNA, 25 bp, Homo sapien
tcatggaagccaaacaaagtagtct

SEQ ID NO: 28646 - DNA, 25 bp, Homo sapien
aaaatccagtcttccgagggcaagt

SEQ ID NO: 28647 - DNA, 25 bp, Homo sapien
gagggacccagtgagatttactgca

SEQ ID NO: 28648 - DNA, 25 bp, Homo sapien
acttgccctcggaagactggatttt

SEQ ID NO: 28649 - DNA, 25 bp, Homo sapien
ttgcagaaagacagctgaaacgtca

SEQ ID NO: 28650 - DNA, 25 bp, Homo sapien
tttactgcagagaagatcatgagct

SEQ ID NO: 28651 - DNA, 25 bp, Homo sapien
ggtacatgaaaaacagtgtgccata

SEQ ID NO: 28652 - DNA, 25 bp, Homo sapien
tttcggaagccataggtatagaccc

SEQ ID NO: 28653 - DNA, 25 bp, Homo sapien
aaaagaggatgcaaatgtaggagat

SEQ ID NO: 28654 - DNA, 25 bp, Homo sapien
tgtatcacagagtttcggaagccat

SEQ ID NO: 28655 - DNA, 25 bp, Homo sapien
ctgaaacgtcagagctgtctgtatc

SEQ ID NO: 28656 - DNA, 25 bp, Homo sapien
agacccgctgcgtcataatagctgt

SEQ ID NO: 28657 - DNA, 25 bp, Homo sapien
tgccataaaagatggtgacgacagt

SEQ ID NO: 28658 - DNA, 25 bp, Homo sapien
cgaatactctgggactgcaagtgta

SEQ ID NO: 28659 - DNA, 25 bp, Homo sapien
ctctgggactgcaagtgtacaccac

SEQ ID NO: 28660 - DNA, 25 bp, Homo sapien
atgccaagcctggtatgctctttaa

SEQ ID NO: 28661 - DNA, 25 bp, Homo sapien
acatatcaccttacgcaaggctgcc

SEQ ID NO: 28662 - DNA, 25 bp, Homo sapien
tacctattggattataaaccctgat

SEQ ID NO: 28663 - DNA, 25 bp, Homo sapien
tctttaaatgaaagccctcttctct

SEQ ID NO: 28664 - DNA, 25 bp, Homo sapien
gcctctcgaatactctgggactgca

SEQ ID NO: 28665 - DNA, 25 bp, Homo sapien
gtacaccaccatatacagcattatt

SEQ ID NO: 28666 - DNA, 25 bp, Homo sapien
ccttacgcaaggctgccaagaaggt

SEQ ID NO: 28667 - DNA, 25 bp, Homo sapien
ccaagaaggtgtgttggtttgtgtt

SEQ ID NO: 28668 - DNA, 25 bp, Homo sapien
ctccagggctcgtgtgatcctccaa

SEQ ID NO: 28669 - DNA, 25 bp, Homo sapien
acttgcagtcccagagtattcgaga

SEQ ID NO: 28670 - DNA, 25 bp, Homo sapien
gcagtcccagagtattcgagaggct

SEQ ID NO: 28671 - DNA, 25 bp, Homo sapien
ttggaggatcacacgagccctggag

SEQ ID NO: 28672 - DNA, 25 bp, Homo sapien
aagagaagagggctttcatttaaag

SEQ ID NO: 28673 - DNA, 25 bp, Homo sapien
cagccttgcgtaaggtgatatgtgt

SEQ ID NO: 28674 - DNA, 25 bp, Homo sapien
ttcttggcagccttgcgtaaggtga

SEQ ID NO: 28675 - DNA, 25 bp, Homo sapien
aataatgctgtatatggtggtgtac

SEQ ID NO: 28676 - DNA, 25 bp, Homo sapien
tatcagggtttataatccaataggt

SEQ ID NO: 28677 - DNA, 25 bp, Homo sapien
tgatatgtgtgaggatggatttaaa

SEQ ID NO: 28678 - DNA, 25 bp, Homo sapien
tataatccaataggtaggataggtt

SEQ ID NO: 28679 - DNA, 25 bp, Homo sapien
tatatggtggtgtacacttgcagtc

SEQ ID NO: 28680 - DNA, 25 bp, Homo sapien
aacctcatgttctgggcagtcgtgc

SEQ ID NO: 28681 - DNA, 25 bp, Homo sapien
gggaactggtacagaacagaagtta

SEQ ID NO: 28682 - DNA, 25 bp, Homo sapien
ttaattcactatgggaaaagcatcc

SEQ ID NO: 28683 - DNA, 25 bp, Homo sapien
aaatgactgaggtttactctcttac

SEQ ID NO: 28684 - DNA, 25 bp, Homo sapien
gaataagagtccacagaaattgctc

SEQ ID NO: 28685 - DNA, 25 bp, Homo sapien
agggcaggatgtaagaaaactagtt

SEQ ID NO: 28686 - DNA, 25 bp, Homo sapien
ccacgaatatgaggaagtatgagta

SEQ ID NO: 28687 - DNA, 25 bp, Homo sapien
gggaaaagcatccaatctgtgtttt

SEQ ID NO: 28688 - DNA, 25 bp, Homo sapien
atgtgtgtgagagaataagagtcca

SEQ ID NO: 28689 - DNA, 25 bp, Homo sapien
tttaatccagggctaaacctcatgt

SEQ ID NO: 28690 - DNA, 25 bp, Homo sapien
ttattttgggtaagatcaagggcag

SEQ ID NO: 28691 - DNA, 25 bp, Homo sapien
acgactgcccagaacatgaggttta

SEQ ID NO: 28692 - DNA, 25 bp, Homo sapien
aaagagcaatttctgtggactctta

SEQ ID NO: 28693 - DNA, 25 bp, Homo sapien
atagtgaattaaagcactacagggg

SEQ ID NO: 28694 - DNA, 25 bp, Homo sapien
aacatgaggtttagccctggattaa

SEQ ID NO: 28695 - DNA, 25 bp, Homo sapien
aaacacagattggatgcttttccca

SEQ ID NO: 28696 - DNA, 25 bp, Homo sapien
cacacatacagagtggtaagagagt

SEQ ID NO: 28697 - DNA, 25 bp, Homo sapien
atgattaaaagaggcttaaagtgtt

SEQ ID NO: 28698 - DNA, 25 bp, Homo sapien
atacttcctcatattcgtggagtac

SEQ ID NO: 28699 - DNA, 25 bp, Homo sapien
tgggagccatgattaaaagaggctt

SEQ ID NO: 28700 - DNA, 25 bp, Homo sapien
ttttgtaaaacacagattggatgct

SEQ ID NO: 28701 - DNA, 25 bp, Homo sapien
tggtaagagagtaaacctcagtcat

SEQ ID NO: 28702 - DNA, 25 bp, Homo sapien
gactctactacggtgctgctatgtt

SEQ ID NO: 28703 - DNA, 25 bp, Homo sapien
tgatgggatcatagtgcttgcagct

SEQ ID NO: 28704 - DNA, 25 bp, Homo sapien
ctaaacatacgccagaccaggacaa

SEQ ID NO: 28705 - DNA, 25 bp, Homo sapien
ttcatgtacatgagaccagcttcta

SEQ ID NO: 28706 - DNA, 25 bp, Homo sapien
gttgtgtggtaatgctaatctttcc

SEQ ID NO: 28707 - DNA, 25 bp, Homo sapien
accttggggtctcttgatgggatca

SEQ ID NO: 28708 - DNA, 25 bp, Homo sapien
tcatgactgttgcttcctggacctt

SEQ ID NO: 28709 - DNA, 25 bp, Homo sapien
gaatccggaactctgtgtcttcatg

SEQ ID NO: 28710 - DNA, 25 bp, Homo sapien
gaaagtcgtcgcaaggccttcacta

SEQ ID NO: 28711 - DNA, 25 bp, Homo sapien
tattcccatgtccttcgagccgtca

SEQ ID NO: 28712 - DNA, 25 bp, Homo sapien
acccgtctgtggtcggactctacta

SEQ ID NO: 28713 - DNA, 25 bp, Homo sapien
aggacagctgcaagcactatgatcc

SEQ ID NO: 28714 - DNA, 25 bp, Homo sapien
tcatgaagacacagagttccggatt

SEQ ID NO: 28715 - DNA, 25 bp, Homo sapien
cagcaccgtagtagagtccgaccac

SEQ ID NO: 28716 - DNA, 25 bp, Homo sapien
ctggcgtatgtttagaagctggtct

SEQ ID NO: 28717 - DNA, 25 bp, Homo sapien
atgggaataggaaagtatgataact

SEQ ID NO: 28718 - DNA, 25 bp, Homo sapien
accacacaacaaatgacaagtagtc

SEQ ID NO: 28719 - DNA, 25 bp, Homo sapien
gaaagattagcattaccacacaaca

SEQ ID NO: 28720 - DNA, 25 bp, Homo sapien
agtgaaggccttgcgacgactttcc

SEQ ID NO: 28721 - DNA, 25 bp, Homo sapien
tccaggaagcaacagtcatgaagac

SEQ ID NO: 28722 - DNA, 25 bp, Homo sapien
aaaaaatgatgaatttccagagagc

SEQ ID NO: 28723 - DNA, 25 bp, Homo sapien
tgtacatgaacatagcagcaccgta

SEQ ID NO: 28724 - DNA, 25 bp, Homo sapien
cacaccgataaaaaggcctgggtat

SEQ ID NO: 28725 - DNA, 25 bp, Homo sapien
ccaccgcgctggcaaatacgtacta

SEQ ID NO: 28726 - DNA, 25 bp, Homo sapien
ggcctgggtatacaatcacataatc

SEQ ID NO: 28727 - DNA, 25 bp, Homo sapien
cgcgctggcaaatacgtactacatt

SEQ ID NO: 28728 - DNA, 25 bp, Homo sapien
aatcacataatcatgggtgtggaac

SEQ ID NO: 28729 - DNA, 25 bp, Homo sapien
aaaggcctgggtatacaatcacata

SEQ ID NO: 28730 - DNA, 25 bp, Homo sapien
atgggtgtggaacatattttcttgc

SEQ ID NO: 28731 - DNA, 25 bp, Homo sapien
ttacacacaccgataaaaaggcctg

SEQ ID NO: 28732 - DNA, 25 bp, Homo sapien
acataatcatgggtgtggaacatat

SEQ ID NO: 28733 - DNA, 25 bp, Homo sapien
ttattacacacaccgataaaaaggc

SEQ ID NO: 28734 - DNA, 25 bp, Homo sapien
gataaaaaggcctgggtatacaatc

SEQ ID NO: 28735 - DNA, 25 bp, Homo sapien
ttatcggtgtgtgtaataataaaac

SEQ ID NO: 28736 - DNA, 25 bp, Homo sapien
atatgttccacacccatgattatgt

SEQ ID NO: 28737 - DNA, 25 bp, Homo sapien
agcaagaaaatatgttccacaccca

SEQ ID NO: 28738 - DNA, 25 bp, Homo sapien
acgtatttgccagcgcggtggctca

SEQ ID NO: 28739 - DNA, 25 bp, Homo sapien
gattatgtgattgtatacccaggcc

SEQ ID NO: 28740 - DNA, 25 bp, Homo sapien
aatgtagtacgtatttgccagcgcg

SEQ ID NO: 28741 - DNA, 25 bp, Homo sapien
caggcctttttatcggtgtgtgtaa

SEQ ID NO: 28742 - DNA, 25 bp, Homo sapien
ctggtgttaaaatgtagtacgtatt

SEQ ID NO: 28743 - DNA, 25 bp, Homo sapien
tatgtgattgtatacccaggccttt

SEQ ID NO: 28744 - DNA, 25 bp, Homo sapien
cccatgattatgtgattgtataccc

SEQ ID NO: 28745 - DNA, 25 bp, Homo sapien
gtgtgtaataataaaactggtgtta

SEQ ID NO: 28746 - DNA, 25 bp, Homo sapien
tgccaaactgcctgtcctgggatct

SEQ ID NO: 28747 - DNA, 25 bp, Homo sapien
taatcctggtttagagctatcccac

SEQ ID NO: 28748 - DNA, 25 bp, Homo sapien
gaaatggaatagaaataatcccttc

SEQ ID NO: 28749 - DNA, 25 bp, Homo sapien
tcttggccctgcactctcaacatga

SEQ ID NO: 28750 - DNA, 25 bp, Homo sapien
tagtcctgcctgtgagatatgagtc

SEQ ID NO: 28751 - DNA, 25 bp, Homo sapien
gccagggtcccagtcagattccagg

SEQ ID NO: 28752 - DNA, 25 bp, Homo sapien
tgtgagatatgagtctacaggagac

SEQ ID NO: 28753 - DNA, 25 bp, Homo sapien
gtcctgggatctagttatcttggcc

SEQ ID NO: 28754 - DNA, 25 bp, Homo sapien
caccctcaagaggagttagaaagag

SEQ ID NO: 28755 - DNA, 25 bp, Homo sapien
agattccaggaatttgcgccctaac

SEQ ID NO: 28756 - DNA, 25 bp, Homo sapien
gaaagaggtcctgtcattctcactc

SEQ ID NO: 28757 - DNA, 25 bp, Homo sapien
agagggtgggagctctgagtctcct

SEQ ID NO: 28758 - DNA, 25 bp, Homo sapien
ttccttagagtgagaatgacaggac

SEQ ID NO: 28759 - DNA, 25 bp, Homo sapien
tccttagagtgagaatgacaggacc

SEQ ID NO: 28760 - DNA, 25 bp, Homo sapien
tccatttccttagagtgagaatgac

SEQ ID NO: 28761 - DNA, 25 bp, Homo sapien
ggagctctgagtctcctgtagactc

SEQ ID NO: 28762 - DNA, 25 bp, Homo sapien
cttagagtgagaatgacaggacctc

SEQ ID NO: 28763 - DNA, 25 bp, Homo sapien
gagaatgacaggacctctttctaac

SEQ ID NO: 28764 - DNA, 25 bp, Homo sapien
ctattccatttccttagagtgagaa

SEQ ID NO: 28765 - DNA, 25 bp, Homo sapien
tgagaatgacaggacctctttctaa

SEQ ID NO: 28766 - DNA, 25 bp, Homo sapien
atttccttagagtgagaatgacagg

SEQ ID NO: 28767 - DNA, 25 bp, Homo sapien
aatgacaggacctctttctaactcc

SEQ ID NO: 28768 - DNA, 25 bp, Homo sapien
ttcctggaatctgactgggaccctg

SEQ ID NO: 28769 - DNA, 25 bp, Homo sapien
ttagcaagcaaagttagggcgcaaa

SEQ ID NO: 28770 - DNA, 25 bp, Homo sapien
agtgcagggccaagataactagatc

SEQ ID NO: 28771 - DNA, 25 bp, Homo sapien
agtgaaagctgggactgttgaaaac

SEQ ID NO: 28772 - DNA, 25 bp, Homo sapien
aggcagtttggcagtgagaacaaaa

SEQ ID NO: 28773 - DNA, 25 bp, Homo sapien
agttagggcgcaaattcctggaatc

SEQ ID NO: 28774 - DNA, 25 bp, Homo sapien
taactcctcttgagggtgtgagaag

SEQ ID NO: 28775 - DNA, 25 bp, Homo sapien
gcagggccaagataactagatccca

SEQ ID NO: 28776 - DNA, 25 bp, Homo sapien
agctgggactgttgaaaacccaatt

SEQ ID NO: 28777 - DNA, 25 bp, Homo sapien
taaaccaggattagcaagcaaagtt

SEQ ID NO: 28778 - DNA, 25 bp, Homo sapien
agtgggatagctctaaaccaggatt

SEQ ID NO: 28779 - DNA, 25 bp, Homo sapien
ggctgacttaaagatcccttggaaa

SEQ ID NO: 28780 - DNA, 25 bp, Homo sapien
ccaaaataggctgtgtatgggggct

SEQ ID NO: 28781 - DNA, 25 bp, Homo sapien
taggctgtgctttgatttactggta

SEQ ID NO: 28782 - DNA, 25 bp, Homo sapien
gatcccttggaaagactcaaaacta

SEQ ID NO: 28783 - DNA, 25 bp, Homo sapien
gtggaatataggctgtgctttgatt

SEQ ID NO: 28784 - DNA, 25 bp, Homo sapien
aaactaccttcactagtaggactcc

SEQ ID NO: 28785 - DNA, 25 bp, Homo sapien
tagtaggactcctaagcgctgacct

SEQ ID NO: 28786 - DNA, 25 bp, Homo sapien
tttcaccgtgaatattcagtggaga

SEQ ID NO: 28787 - DNA, 25 bp, Homo sapien
tgacacaaattcatgaaactaatgt

SEQ ID NO: 28788 - DNA, 25 bp, Homo sapien
ctaatgttacaaattcatgcagttt

SEQ ID NO: 28789 - DNA, 25 bp, Homo sapien
gactcctaagcgctgacctattttt

SEQ ID NO: 28790 - DNA, 25 bp, Homo sapien
aggtcagcgcttaggagtcctacta

SEQ ID NO: 28791 - DNA, 25 bp, Homo sapien
cttaggagtcctactagtgaaggta

SEQ ID NO: 28792 - DNA, 25 bp, Homo sapien
agtgaaggtagttttgagtctttcc

SEQ ID NO: 28793 - DNA, 25 bp, Homo sapien
gggtaaataccagtaaatcaaagca

SEQ ID NO: 28794 - DNA, 25 bp, Homo sapien
ttaaaaataggtcagcgcttaggag

SEQ ID NO: 28795 - DNA, 25 bp, Homo sapien
ctccactgaatattcacggtgaaat

SEQ ID NO: 28796 - DNA, 25 bp, Homo sapien
tcacggtgaaatatgatttgataac

SEQ ID NO: 28797 - DNA, 25 bp, Homo sapien
atttctggggatagcatgatctgaa

SEQ ID NO: 28798 - DNA, 25 bp, Homo sapien
ataccagtaaatcaaagcacagcct

SEQ ID NO: 28799 - DNA, 25 bp, Homo sapien
tttccaagggatctttaagtcagcc

SEQ ID NO: 28800 - DNA, 25 bp, Homo sapien
tagagaagttctccactgaatattc

SEQ ID NO: 28801 - DNA, 25 bp, Homo sapien
gaaacagttggcttaatgaatacct

SEQ ID NO: 28802 - DNA, 25 bp, Homo sapien
agaaatttctctttgacgatcacac

SEQ ID NO: 28803 - DNA, 25 bp, Homo sapien
tctctttgacgatcacaccctcagt

SEQ ID NO: 28804 - DNA, 25 bp, Homo sapien
ttgacgatcacaccctcagtttgcc

SEQ ID NO: 28805 - DNA, 25 bp, Homo sapien
cctagtgtaggaccctcaaaggaaa

SEQ ID NO: 28806 - DNA, 25 bp, Homo sapien
cctcagtttgcctagtgtaggaccc

SEQ ID NO: 28807 - DNA, 25 bp, Homo sapien
gtttgggtgccagtgagtttaacaa

SEQ ID NO: 28808 - DNA, 25 bp, Homo sapien
cattccatcatgactgagaaatttc

SEQ ID NO: 28809 - DNA, 25 bp, Homo sapien
acagttggcttaatgaatacctccc

SEQ ID NO: 28810 - DNA, 25 bp, Homo sapien
tgggtgccagtgagtttaacaaaac

SEQ ID NO: 28811 - DNA, 25 bp, Homo sapien
agtttgcctagtgtaggaccctcaa

SEQ ID NO: 28812 - DNA, 25 bp, Homo sapien
gggtgtgatcgtcaaagagaaattt

SEQ ID NO: 28813 - DNA, 25 bp, Homo sapien
tttgagggtcctacactaggcaaac

SEQ ID NO: 28814 - DNA, 25 bp, Homo sapien
ttgttaaactcactggcacccaaac

SEQ ID NO: 28815 - DNA, 25 bp, Homo sapien
ggggaggtattcattaagccaactg

SEQ ID NO: 28816 - DNA, 25 bp, Homo sapien
tcagatcttcatgtgagaagttttg

SEQ ID NO: 28817 - DNA, 25 bp, Homo sapien
agggtcctacactaggcaaactgag

SEQ ID NO: 28818 - DNA, 25 bp, Homo sapien
tgtgatcgtcaaagagaaatttctc

SEQ ID NO: 28819 - DNA, 25 bp, Homo sapien
gttttgttaaactcactggcaccca

SEQ ID NO: 28820 - DNA, 25 bp, Homo sapien
tcatgatggaatggggaggtattca

SEQ ID NO: 28821 - DNA, 25 bp, Homo sapien
caaactgagggtgtgatcgtcaaag

SEQ ID NO: 28822 - DNA, 25 bp, Homo sapien
ccaatttcctttgagggtcctacac

SEQ ID NO: 28823 - DNA, 25 bp, Homo sapien
ttctaagatgtgcatcaagcctggt

SEQ ID NO: 28824 - DNA, 25 bp, Homo sapien
ttcagtcataccctaatgatcccag

SEQ ID NO: 28825 - DNA, 25 bp, Homo sapien
tgaaaaccctataaggtcctggata

SEQ ID NO: 28826 - DNA, 25 bp, Homo sapien
taatgatcccagcaagataatgtcc

SEQ ID NO: 28827 - DNA, 25 bp, Homo sapien
ataccctaatgatcccagcaagata

SEQ ID NO: 28828 - DNA, 25 bp, Homo sapien
tacatactgaaaaccctataaggtc

SEQ ID NO: 28829 - DNA, 25 bp, Homo sapien
taagatgtgcatcaagcctggtaca

SEQ ID NO: 28830 - DNA, 25 bp, Homo sapien
agcctggtacatactgaaaacccta

SEQ ID NO: 28831 - DNA, 25 bp, Homo sapien
tgtgcatcaagcctggtacatactg

SEQ ID NO: 28832 - DNA, 25 bp, Homo sapien
tgatcccagcaagataatgtcctgt

SEQ ID NO: 28833 - DNA, 25 bp, Homo sapien
atcaagcctggtacatactgaaaac

SEQ ID NO: 28834 - DNA, 25 bp, Homo sapien
tcgggccgtccaagacaaggaggtc

SEQ ID NO: 28835 - DNA, 25 bp, Homo sapien
gacctccttgtcttggacggcccga

SEQ ID NO: 28836 - DNA, 25 bp, Homo sapien
aataggccatgttatgactgttgca

SEQ ID NO: 28837 - DNA, 25 bp, Homo sapien
ttcaagagaaatgatgttgtcactg

SEQ ID NO: 28838 - DNA, 25 bp, Homo sapien
tttgttcgcagtgtagctgaaatac

SEQ ID NO: 28839 - DNA, 25 bp, Homo sapien
gaaatgatgttgtcactggtggctc

SEQ ID NO: 28840 - DNA, 25 bp, Homo sapien
gctcattcagggaagctcatcaaag

SEQ ID NO: 28841 - DNA, 25 bp, Homo sapien
tgactgttgcatagaattcacaatg

SEQ ID NO: 28842 - DNA, 25 bp, Homo sapien
tgtcactggtggctcattcagggaa

SEQ ID NO: 28843 - DNA, 25 bp, Homo sapien
aaggttctaataggccatgttatga

SEQ ID NO: 28844 - DNA, 25 bp, Homo sapien
ctggtggctcattcagggaagctca

SEQ ID NO: 28845 - DNA, 25 bp, Homo sapien
gtggctcattcagggaagctcatca

SEQ ID NO: 28846 - DNA, 25 bp, Homo sapien
aaagcccactttgttcgcagtgtag

SEQ ID NO: 28847 - DNA, 25 bp, Homo sapien
tgaatgagccaccagtgacaacatc

SEQ ID NO: 28848 - DNA, 25 bp, Homo sapien
gtatttcagctacactgcgaacaaa

SEQ ID NO: 28849 - DNA, 25 bp, Homo sapien
ttcagctacactgcgaacaaagtgg

SEQ ID NO: 28850 - DNA, 25 bp, Homo sapien
ctgcgaacaaagtgggctttgatga

SEQ ID NO: 28851 - DNA, 25 bp, Homo sapien
gagccaccagtgacaacatcatttc

SEQ ID NO: 28852 - DNA, 25 bp, Homo sapien
ctcttgaaaaatgcattgtgaattc

SEQ ID NO: 28853 - DNA, 25 bp, Homo sapien
gctttgatgagcttccctgaatgag

SEQ ID NO: 28854 - DNA, 25 bp, Homo sapien
ttccctgaatgagccaccagtgaca

SEQ ID NO: 28855 - DNA, 25 bp, Homo sapien
gagcttccctgaatgagccaccagt

SEQ ID NO: 28856 - DNA, 25 bp, Homo sapien
tgatgagcttccctgaatgagccac

SEQ ID NO: 28857 - DNA, 25 bp, Homo sapien
ctacactgcgaacaaagtgggcttt

SEQ ID NO: 28858 - DNA, 25 bp, Homo sapien
gtgcaaacagcaagcggatcttgtc

SEQ ID NO: 28859 - DNA, 25 bp, Homo sapien
gaggtgcaaacagcaagcggatctt

SEQ ID NO: 28860 - DNA, 25 bp, Homo sapien
ttaaacagaggtgcaaacagcaagc

SEQ ID NO: 28861 - DNA, 25 bp, Homo sapien
tatagcggtggtttaaacagaggtg

SEQ ID NO: 28862 - DNA, 25 bp, Homo sapien
aaacagcaagcggatcttgtcgcct

SEQ ID NO: 28863 - DNA, 25 bp, Homo sapien
ggtggtttaaacagaggtgcaaaca

SEQ ID NO: 28864 - DNA, 25 bp, Homo sapien
tggtttaaacagaggtgcaaacagc

SEQ ID NO: 28865 - DNA, 25 bp, Homo sapien
gcggtggtttaaacagaggtgcaaa

SEQ ID NO: 28866 - DNA, 25 bp, Homo sapien
acagcaagcggatcttgtcgccttt

SEQ ID NO: 28867 - DNA, 25 bp, Homo sapien
gtttaaacagaggtgcaaacagcaa

SEQ ID NO: 28868 - DNA, 25 bp, Homo sapien
tagcggtggtttaaacagaggtgca

SEQ ID NO: 28869 - DNA, 25 bp, Homo sapien
tttgcacctctgtttaaaccaccgc

SEQ ID NO: 28870 - DNA, 25 bp, Homo sapien
gacaagatccgcttgctgtttgcac

SEQ ID NO: 28871 - DNA, 25 bp, Homo sapien
aaggcgacaagatccgcttgctgtt

SEQ ID NO: 28872 - DNA, 25 bp, Homo sapien
caaaggcgacaagatccgcttgctg

SEQ ID NO: 28873 - DNA, 25 bp, Homo sapien
caagatccgcttgctgtttgcacct

SEQ ID NO: 28874 - DNA, 25 bp, Homo sapien
ccaaaggcgacaagatccgcttgct

SEQ ID NO: 28875 - DNA, 25 bp, Homo sapien
gcacctctgtttaaaccaccgctat

SEQ ID NO: 28876 - DNA, 25 bp, Homo sapien
aggcgacaagatccgcttgctgttt

SEQ ID NO: 28877 - DNA, 25 bp, Homo sapien
cccaaaggcgacaagatccgcttgc

SEQ ID NO: 28878 - DNA, 25 bp, Homo sapien
aaaggcgacaagatccgcttgctgt

SEQ ID NO: 28879 - DNA, 25 bp, Homo sapien
tgtttgcacctctgtttaaaccacc

SEQ ID NO: 28880 - DNA, 25 bp, Homo sapien
atagagagaccagaaataaaccctt

SEQ ID NO: 28881 - DNA, 25 bp, Homo sapien
acccagttgggaagaatattgttaa

SEQ ID NO: 28882 - DNA, 25 bp, Homo sapien
aaaaggcagaacaaagttgcaggac

SEQ ID NO: 28883 - DNA, 25 bp, Homo sapien
aaacaaccttgaaaaggcagaacaa

SEQ ID NO: 28884 - DNA, 25 bp, Homo sapien
tgatccacagatccagtataatccc

SEQ ID NO: 28885 - DNA, 25 bp, Homo sapien
attcacctgagatctcaaatggccc

SEQ ID NO: 28886 - DNA, 25 bp, Homo sapien
caggtgtggctaattgcaattggct

SEQ ID NO: 28887 - DNA, 25 bp, Homo sapien
aaagttgcaggacacaaacttcctg

SEQ ID NO: 28888 - DNA, 25 bp, Homo sapien
tacccaaagtgatccacagatccag

SEQ ID NO: 28889 - DNA, 25 bp, Homo sapien
caatgacattctttggaaaaataga

SEQ ID NO: 28890 - DNA, 25 bp, Homo sapien
gaccacaggtgtggctaattgcaat

SEQ ID NO: 28891 - DNA, 25 bp, Homo sapien
gagccaaaccaagacagacaccatg

SEQ ID NO: 28892 - DNA, 25 bp, Homo sapien
cctgcagtggagctacagacacctc

SEQ ID NO: 28893 - DNA, 25 bp, Homo sapien
atggggctacagaaaaaccaacacc

SEQ ID NO: 28894 - DNA, 25 bp, Homo sapien
tgtggagctacagctataagcactc

SEQ ID NO: 28895 - DNA, 25 bp, Homo sapien
catgcacattggattggcagcaccc

SEQ ID NO: 28896 - DNA, 25 bp, Homo sapien
ataccctgccatggagctacagaca

SEQ ID NO: 28897 - DNA, 25 bp, Homo sapien
gggctacagacggatactccaccat

SEQ ID NO: 28898 - DNA, 25 bp, Homo sapien
ctactaattagggagagccaactga

SEQ ID NO: 28899 - DNA, 25 bp, Homo sapien
tgtgggcagtacctaggatactcac

SEQ ID NO: 28900 - DNA, 25 bp, Homo sapien
atgaccaggctacagacatataccc

SEQ ID NO: 28901 - DNA, 25 bp, Homo sapien
ctgccagtagagagattgccagaat

SEQ ID NO: 28902 - DNA, 25 bp, Homo sapien
ggtcacggtcctcaacagcacattt

SEQ ID NO: 28903 - DNA, 25 bp, Homo sapien
tcttatggatgagtatgacgcccac

SEQ ID NO: 28904 - DNA, 25 bp, Homo sapien
cctgacatttagagtggaaggaaat

SEQ ID NO: 28905 - DNA, 25 bp, Homo sapien
atgggaaatgcaatcagttgtgttc

SEQ ID NO: 28906 - DNA, 25 bp, Homo sapien
ctactgtgaccatgaggctcaagaa

SEQ ID NO: 28907 - DNA, 25 bp, Homo sapien
acgctttggggctttgagacctcct

SEQ ID NO: 28908 - DNA, 25 bp, Homo sapien
gtggaggagagtccagttccttaat

SEQ ID NO: 28909 - DNA, 25 bp, Homo sapien
tcacatgggttttcagtgggtagac

SEQ ID NO: 28910 - DNA, 25 bp, Homo sapien
atgacgcccacatgctaatcagtgc

SEQ ID NO: 28911 - DNA, 25 bp, Homo sapien
ttgatgctctgggaagatacgcttt

SEQ ID NO: 28912 - DNA, 25 bp, Homo sapien
tcctgatggtcaaagcaaaatggga

SEQ ID NO: 28913 - DNA, 25 bp, Homo sapien
cagggcaggaaatctggcaccttca

SEQ ID NO: 28914 - DNA, 25 bp, Homo sapien
tggcggtcctcccaggttccattgc

SEQ ID NO: 28915 - DNA, 25 bp, Homo sapien
atgtctgcagggtcttacgctatct

SEQ ID NO: 28916 - DNA, 25 bp, Homo sapien
tacgctatctaccatgggaccaggg

SEQ ID NO: 28917 - DNA, 25 bp, Homo sapien
agccatgcctaatgccctgcagggc

SEQ ID NO: 28918 - DNA, 25 bp, Homo sapien
cggctggaatcaggatagacaccaa

SEQ ID NO: 28919 - DNA, 25 bp, Homo sapien
gagagtcacacagcctccagctagt

SEQ ID NO: 28920 - DNA, 25 bp, Homo sapien
caggggtctctcagcttgagccaac

SEQ ID NO: 28921 - DNA, 25 bp, Homo sapien
gtcctgtagatgactcgctccgtcc

SEQ ID NO: 28922 - DNA, 25 bp, Homo sapien
tacagccctactctgcaggggtctc

SEQ ID NO: 28923 - DNA, 25 bp, Homo sapien
gaaagggctgctgtctgcctcccta

SEQ ID NO: 28924 - DNA, 25 bp, Homo sapien
ttcagtggaatattaagcagtcatc

SEQ ID NO: 28925 - DNA, 25 bp, Homo sapien
cttagccaaagaatgatctgaagta

SEQ ID NO: 28926 - DNA, 25 bp, Homo sapien
aaaaggcaacagtggctccctctag

SEQ ID NO: 28927 - DNA, 25 bp, Homo sapien
actatttacagcatgggaaaggact

SEQ ID NO: 28928 - DNA, 25 bp, Homo sapien
aggtagcagcctccaagcttcctct

SEQ ID NO: 28929 - DNA, 25 bp, Homo sapien
gtagtcaacattgaggcaacggctc

SEQ ID NO: 28930 - DNA, 25 bp, Homo sapien
caaggacgtaagcaaaagaatattt

SEQ ID NO: 28931 - DNA, 25 bp, Homo sapien
gtacacagaaggtattgtcaaaatt

SEQ ID NO: 28932 - DNA, 25 bp, Homo sapien
gcaacggctcagtgaatcatgacac

SEQ ID NO: 28933 - DNA, 25 bp, Homo sapien
tatatgatgacacttcagctcgcac

SEQ ID NO: 28934 - DNA, 25 bp, Homo sapien
aaaataggaaatggtggatgatctg

SEQ ID NO: 28935 - DNA, 25 bp, Homo sapien
tctgtatagaaaatatggtaggaat

SEQ ID NO: 28936 - DNA, 25 bp, Homo sapien
aggagggaagagtaacccttcatct

SEQ ID NO: 28937 - DNA, 25 bp, Homo sapien
cagcatctgaacattgaaattgtaa

SEQ ID NO: 28938 - DNA, 25 bp, Homo sapien
ccttcgatgcgcagttaaaggaata

SEQ ID NO: 28939 - DNA, 25 bp, Homo sapien
cttgtttgcctagactacagttttc

SEQ ID NO: 28940 - DNA, 25 bp, Homo sapien
caagtatttaaggaccatttatttc

SEQ ID NO: 28941 - DNA, 25 bp, Homo sapien
cttcatctttgggactagtcgtctt

SEQ ID NO: 28942 - DNA, 25 bp, Homo sapien
agtaagacttggtgtgtcatagata

SEQ ID NO: 28943 - DNA, 25 bp, Homo sapien
aaacagaaagtggttgtaagaattc

SEQ ID NO: 28944 - DNA, 25 bp, Homo sapien
tttgggactagtcgtcttgtttgcc

SEQ ID NO: 28945 - DNA, 25 bp, Homo sapien
atggtaggaatttatttctgacttc

SEQ ID NO: 28946 - DNA, 25 bp, Homo sapien
acacacccagagataaaataagttc

SEQ ID NO: 28947 - DNA, 25 bp, Homo sapien
ccagaaattggttcagaagagcatg

SEQ ID NO: 28948 - DNA, 25 bp, Homo sapien
agcacctcagggttacgtctgattc

SEQ ID NO: 28949 - DNA, 25 bp, Homo sapien
tacatgcccaaaagtaccagcatct

SEQ ID NO: 28950 - DNA, 25 bp, Homo sapien
aatggaatatgcatgacatctggtc

SEQ ID NO: 28951 - DNA, 25 bp, Homo sapien
tctacaaactaaagtcagggccagg

SEQ ID NO: 28952 - DNA, 25 bp, Homo sapien
acgataatgtgggtgcagttaatcc

SEQ ID NO: 28953 - DNA, 25 bp, Homo sapien
tttggaagaagtactccacgataat

SEQ ID NO: 28954 - DNA, 25 bp, Homo sapien
caaaataaacagagaggtcaggttt

SEQ ID NO: 28955 - DNA, 25 bp, Homo sapien
ccacctcggcaagtaaatttaatta

SEQ ID NO: 28956 - DNA, 25 bp, Homo sapien
ggcttgaaatgaactgaggcagata

SEQ ID NO: 28957 - DNA, 25 bp, Homo sapien
tcgctgtatctattctatgccgctc

SEQ ID NO: 28958 - DNA, 25 bp, Homo sapien
ctgagatgctcaaaggctaatgctt

SEQ ID NO: 28959 - DNA, 25 bp, Homo sapien
cactagcccatctggccaaaggcag

SEQ ID NO: 28960 - DNA, 25 bp, Homo sapien
gatgtcaatccagaccgccacaatt

SEQ ID NO: 28961 - DNA, 25 bp, Homo sapien
tgggctttcagtgcctcgctgtatc

SEQ ID NO: 28962 - DNA, 25 bp, Homo sapien
attaagtcagatgcgcataaagatc

SEQ ID NO: 28963 - DNA, 25 bp, Homo sapien
atcacaaaagtgcactagcccatct

SEQ ID NO: 28964 - DNA, 25 bp, Homo sapien
aaattgttaaatgttcagaaggcag

SEQ ID NO: 28965 - DNA, 25 bp, Homo sapien
catgcgtgtatgtctatgcgttctc

SEQ ID NO: 28966 - DNA, 25 bp, Homo sapien
cacagcacaacattctgaagcctgc

SEQ ID NO: 28967 - DNA, 25 bp, Homo sapien
cttaagacatgcatccatgcgtgta

SEQ ID NO: 28968 - DNA, 25 bp, Homo sapien
cttgagaaggaaacttgagaaatct

SEQ ID NO: 28969 - DNA, 25 bp, Homo sapien
tttaaaatttgtagtgttctctgtc

SEQ ID NO: 28970 - DNA, 25 bp, Homo sapien
acctttctacttatggagagtttaa

SEQ ID NO: 28971 - DNA, 25 bp, Homo sapien
aaactcagctctccacaaagacttg

SEQ ID NO: 28972 - DNA, 25 bp, Homo sapien
cttggggaagagctaatacttacac

SEQ ID NO: 28973 - DNA, 25 bp, Homo sapien
gtcttcctctcatgccaaaaacttg

SEQ ID NO: 28974 - DNA, 25 bp, Homo sapien
aataaacagtactccaacttgggga

SEQ ID NO: 28975 - DNA, 25 bp, Homo sapien
aaacaggcaaataaacagtactcca

SEQ ID NO: 28976 - DNA, 25 bp, Homo sapien
ctctcttgatggtggatttcagctc

SEQ ID NO: 28977 - DNA, 25 bp, Homo sapien
ccacaaagacttgagaaggaaactt

SEQ ID NO: 28978 - DNA, 25 bp, Homo sapien
aaaagcataaatcctgtatgaaaca

SEQ ID NO: 28979 - DNA, 25 bp, Homo sapien
ttgtccttacggtgcccaggcagac

SEQ ID NO: 28980 - DNA, 25 bp, Homo sapien
tgactgggattgactcaagagttga

SEQ ID NO: 28981 - DNA, 25 bp, Homo sapien
aagaagaacgaacactgccaaaata

SEQ ID NO: 28982 - DNA, 25 bp, Homo sapien
gcccaggcagacagtgctaattcat

SEQ ID NO: 28983 - DNA, 25 bp, Homo sapien
tagcaggccctagtaataatatcgg

SEQ ID NO: 28984 - DNA, 25 bp, Homo sapien
ccacaataggcaccagatcggcaat

SEQ ID NO: 28985 - DNA, 25 bp, Homo sapien
caggcctggtgatgatagtaaaaat

SEQ ID NO: 28986 - DNA, 25 bp, Homo sapien
tatggcataagaaggactgttgtcc

SEQ ID NO: 28987 - DNA, 25 bp, Homo sapien
caccaaacgtaatgactgaggccat

SEQ ID NO: 28988 - DNA, 25 bp, Homo sapien
atcggcaatggcacatatggcataa

SEQ ID NO: 28989 - DNA, 25 bp, Homo sapien
aataatatcggtgacagcttctgga

SEQ ID NO: 28990 - DNA, 25 bp, Homo sapien
tacggtggcaagagctatcccatct

SEQ ID NO: 28991 - DNA, 25 bp, Homo sapien
tctctgtagaaaccaggcccagctt

SEQ ID NO: 28992 - DNA, 25 bp, Homo sapien
tgaggtgcttgcaaagagctgctta

SEQ ID NO: 28993 - DNA, 25 bp, Homo sapien
gctcggcatcccagccagacaagat

SEQ ID NO: 28994 - DNA, 25 bp, Homo sapien
cccagctttggaggaaagccctttc

SEQ ID NO: 28995 - DNA, 25 bp, Homo sapien
ttagaagcttctccctcctggtgat

SEQ ID NO: 28996 - DNA, 25 bp, Homo sapien
ataggcttgttcacatgcacgcagc

SEQ ID NO: 28997 - DNA, 25 bp, Homo sapien
agacaagatggcaaagtgtgcagat

SEQ ID NO: 28998 - DNA, 25 bp, Homo sapien
agatgaaagggaagccctcatcctc

SEQ ID NO: 28999 - DNA, 25 bp, Homo sapien
tgcacgcagccagttgtcttggatc

SEQ ID NO: 29000 - DNA, 25 bp, Homo sapien
caggcaacagccacctctgaatgct

SEQ ID NO: 29001 - DNA, 25 bp, Homo sapien
taactgctggcactagaggcctcta

SEQ ID NO: 29002 - DNA, 25 bp, Homo sapien
ccaccttgggaccagctggtgccag

SEQ ID NO: 29003 - DNA, 25 bp, Homo sapien
ctttgaggactgatggcggccctct

SEQ ID NO: 29004 - DNA, 25 bp, Homo sapien
gcagacaccacggaggctttgctgg

SEQ ID NO: 29005 - DNA, 25 bp, Homo sapien
cgtgtgcacagcagatgtaccctca

SEQ ID NO: 29006 - DNA, 25 bp, Homo sapien
cctgtcttgtgtcccaggaggcaca

SEQ ID NO: 29007 - DNA, 25 bp, Homo sapien
cctgtggccactgattacagatttc

SEQ ID NO: 29008 - DNA, 25 bp, Homo sapien
ggaagggctgttgcatgagtttcct

SEQ ID NO: 29009 - DNA, 25 bp, Homo sapien
cctctagggttagcctgggcagagt

SEQ ID NO: 29010 - DNA, 25 bp, Homo sapien
attatcgtaggttctggaagtcaga

SEQ ID NO: 29011 - DNA, 25 bp, Homo sapien
gagccactgcatctgagcatgtctt

SEQ ID NO: 29012 - DNA, 25 bp, Homo sapien
gtgaaggcaaagaaggcctctttct

SEQ ID NO: 29013 - DNA, 25 bp, Homo sapien
acacatgcacaaagatgggagcagt

SEQ ID NO: 29014 - DNA, 25 bp, Homo sapien
tttccaagctcagaaagccattctt

SEQ ID NO: 29015 - DNA, 25 bp, Homo sapien
acaggaaggcacaaggaaagttctt

SEQ ID NO: 29016 - DNA, 25 bp, Homo sapien
tggggcaaacacaccctaccttaca

SEQ ID NO: 29017 - DNA, 25 bp, Homo sapien
agggagaaaggctcactttccaagc

SEQ ID NO: 29018 - DNA, 25 bp, Homo sapien
agtcctgggtcctggtcttagctct

SEQ ID NO: 29019 - DNA, 25 bp, Homo sapien
cacactggctctggcttcaagggca

SEQ ID NO: 29020 - DNA, 25 bp, Homo sapien
ctgcattgtcccagttcagggtgaa

SEQ ID NO: 29021 - DNA, 25 bp, Homo sapien
aagaaggcaggattatgcatcagtt

SEQ ID NO: 29022 - DNA, 25 bp, Homo sapien
taaagggctccaatcagggatttgc

SEQ ID NO: 29023 - DNA, 25 bp, Homo sapien
aagagcacaaaaaatgatctaaata

SEQ ID NO: 29024 - DNA, 25 bp, Homo sapien
cagggaagacagtcatactgatgac

SEQ ID NO: 29025 - DNA, 25 bp, Homo sapien
aaaactttattgaagagcacaaaaa

SEQ ID NO: 29026 - DNA, 25 bp, Homo sapien
aggtgggcgttatcccttgaggtca

SEQ ID NO: 29027 - DNA, 25 bp, Homo sapien
catgtttatatcagggaagacagtc

SEQ ID NO: 29028 - DNA, 25 bp, Homo sapien
tttatatcagggaagacagtcatac

SEQ ID NO: 29029 - DNA, 25 bp, Homo sapien
caaaacatatgtatctgttgacatc

SEQ ID NO: 29030 - DNA, 25 bp, Homo sapien
tacaatacaacaatacaaagcactt

SEQ ID NO: 29031 - DNA, 25 bp, Homo sapien
aaatcatgtttatatcagggaagac

SEQ ID NO: 29032 - DNA, 25 bp, Homo sapien
caatgtgatatctctaaaatgggct

SEQ ID NO: 29033 - DNA, 25 bp, Homo sapien
caaagcacttagacataaatcattc

SEQ ID NO: 29034 - DNA, 25 bp, Homo sapien
ttgttacagtgctctgactgatcac

SEQ ID NO: 29035 - DNA, 25 bp, Homo sapien
tcctgctcaatacatatggtgagtt

SEQ ID NO: 29036 - DNA, 25 bp, Homo sapien
cagttcctggaaaagcatgattctc

SEQ ID NO: 29037 - DNA, 25 bp, Homo sapien
tccaggctcttgcatgagctgctta

SEQ ID NO: 29038 - DNA, 25 bp, Homo sapien
cttatgaaaaccctccagtgtctcc

SEQ ID NO: 29039 - DNA, 25 bp, Homo sapien
agtactcccattagaccataagctt

SEQ ID NO: 29040 - DNA, 25 bp, Homo sapien
ggattaggtctccacttgtgttcat

SEQ ID NO: 29041 - DNA, 25 bp, Homo sapien
tgtcctcaggatgaaacccaaactc

SEQ ID NO: 29042 - DNA, 25 bp, Homo sapien
accataagcttcttggggcaagccc

SEQ ID NO: 29043 - DNA, 25 bp, Homo sapien
cttctgcggagtctgtgttgatctc

SEQ ID NO: 29044 - DNA, 25 bp, Homo sapien
catgagctgcttatcctgcctgaaa

SEQ ID NO: 29045 - DNA, 25 bp, Homo sapien
gcacagaatcacacttgcgaagtct

SEQ ID NO: 29046 - DNA, 25 bp, Homo sapien
gcaaaaccaggttgatgagactttc

SEQ ID NO: 29047 - DNA, 25 bp, Homo sapien
tggtcaagtgcactttcagagcagt

SEQ ID NO: 29048 - DNA, 25 bp, Homo sapien
aagagagaggtagatattagcattt

SEQ ID NO: 29049 - DNA, 25 bp, Homo sapien
tctacatgtgcgcaggtgattcttt

SEQ ID NO: 29050 - DNA, 25 bp, Homo sapien
tatttagaagccgtgaactcaagaa

SEQ ID NO: 29051 - DNA, 25 bp, Homo sapien
ctagggctcccaatattacaagtct

SEQ ID NO: 29052 - DNA, 25 bp, Homo sapien
ctgagggtccactctggtaaatgtc

SEQ ID NO: 29053 - DNA, 25 bp, Homo sapien
gaagttgggatgacagaactactgt

SEQ ID NO: 29054 - DNA, 25 bp, Homo sapien
tcatgcccaagtctggagatacaca

SEQ ID NO: 29055 - DNA, 25 bp, Homo sapien
tgagagcaccatagaaacttgatac

SEQ ID NO: 29056 - DNA, 25 bp, Homo sapien
agaaaggatggctgaacaatgaata

SEQ ID NO: 29057 - DNA, 25 bp, Homo sapien
acttattaccaagagttgggaagga

SEQ ID NO: 29058 - DNA, 25 bp, Homo sapien
aataatatttacaactggggagtaa

SEQ ID NO: 29059 - DNA, 25 bp, Homo sapien
acttagttcgctgcagcacacacaa

SEQ ID NO: 29060 - DNA, 25 bp, Homo sapien
attttcgagatttatgttcaaccca

SEQ ID NO: 29061 - DNA, 25 bp, Homo sapien
agaaaagagattaataatttgtgcc

SEQ ID NO: 29062 - DNA, 25 bp, Homo sapien
agaagagaagagatgtaactgtttt

SEQ ID NO: 29063 - DNA, 25 bp, Homo sapien
agttgggaaggaaattaacagaaga

SEQ ID NO: 29064 - DNA, 25 bp, Homo sapien
gttcaacccattacactgccagtta

SEQ ID NO: 29065 - DNA, 25 bp, Homo sapien
tcttgttactgaaaagcttaggtac

SEQ ID NO: 29066 - DNA, 25 bp, Homo sapien
taacagaagaaacaacttaaagatg

SEQ ID NO: 29067 - DNA, 25 bp, Homo sapien
aagggatacataagactcactgaat

SEQ ID NO: 29068 - DNA, 25 bp, Homo sapien
aggaagactcagaaaaaggatacat

SEQ ID NO: 29069 - DNA, 25 bp, Homo sapien
tgatgactttaccatgaagggatac

SEQ ID NO: 29070 - DNA, 25 bp, Homo sapien
tatcaaccaagctctgaactgcctg

SEQ ID NO: 29071 - DNA, 25 bp, Homo sapien
cctaaattgtgagtagtggttttcc

SEQ ID NO: 29072 - DNA, 25 bp, Homo sapien
gaagacagtgcctcaaggagattat

SEQ ID NO: 29073 - DNA, 25 bp, Homo sapien
tgctgcccatgccaaaggtcaatct

SEQ ID NO: 29074 - DNA, 25 bp, Homo sapien
caagaagtaaagtggtgaagacagt

SEQ ID NO: 29075 - DNA, 25 bp, Homo sapien
cacaggctagtgtggcttcctaaaa

SEQ ID NO: 29076 - DNA, 25 bp, Homo sapien
cccattatgcagaaaggaagactca

SEQ ID NO: 29077 - DNA, 25 bp, Homo sapien
acagttgcagagatgaacataatgc

SEQ ID NO: 29078 - DNA, 25 bp, Homo sapien
cctggaggctttggtgcgtttattc

SEQ ID NO: 29079 - DNA, 25 bp, Homo sapien
tacatccttgagtcctggccggaat

SEQ ID NO: 29080 - DNA, 25 bp, Homo sapien
actgggcactgaattcatgcaggtt

SEQ ID NO: 29081 - DNA, 25 bp, Homo sapien
atgaacctccagaatgtgcaggctg

SEQ ID NO: 29082 - DNA, 25 bp, Homo sapien
ttcctgagcaggagcggaaatttaa

SEQ ID NO: 29083 - DNA, 25 bp, Homo sapien
ccctgactgacaaggtgcactcctg

SEQ ID NO: 29084 - DNA, 25 bp, Homo sapien
cttctgggacttagcactgggcact

SEQ ID NO: 29085 - DNA, 25 bp, Homo sapien
tttgcaggaaacaaagtaacccagc

SEQ ID NO: 29086 - DNA, 25 bp, Homo sapien
gttgattgactgactggctgcattc

SEQ ID NO: 29087 - DNA, 25 bp, Homo sapien
tggccggaattaccacagtagattc

SEQ ID NO: 29088 - DNA, 25 bp, Homo sapien
tccaggactgagtttccaagcaacc

SEQ ID NO: 29089 - DNA, 25 bp, Homo sapien
agaaacatgtggctctaacagcatc

SEQ ID NO: 29090 - DNA, 25 bp, Homo sapien
tctaagtgaccaacctaggctatca

SEQ ID NO: 29091 - DNA, 25 bp, Homo sapien
tcagcatccctaggcctagaggagc

SEQ ID NO: 29092 - DNA, 25 bp, Homo sapien
atgactctcaggagccaggcattcc

SEQ ID NO: 29093 - DNA, 25 bp, Homo sapien
acttggccttacagccacagagaac

SEQ ID NO: 29094 - DNA, 25 bp, Homo sapien
tgtgagagtaccctacaaaggcctc

SEQ ID NO: 29095 - DNA, 25 bp, Homo sapien
ggatgccttgtgagagtaccctaca

SEQ ID NO: 29096 - DNA, 25 bp, Homo sapien
agctggctgtggctctaagtgacca

SEQ ID NO: 29097 - DNA, 25 bp, Homo sapien
tctggggaagacagaacacagcttt

SEQ ID NO: 29098 - DNA, 25 bp, Homo sapien
agaggaattgcctgtctcccatatc

SEQ ID NO: 29099 - DNA, 25 bp, Homo sapien
ctctgaggtcatttcaggaagccat

SEQ ID NO: 29100 - DNA, 25 bp, Homo sapien
cagaattggctttctgggaggaaac

SEQ ID NO: 29101 - DNA, 25 bp, Homo sapien
cttcagctacagtgaaagagagtgc

SEQ ID NO: 29102 - DNA, 25 bp, Homo sapien
gggcagtgctttcgaggtcacactc

SEQ ID NO: 29103 - DNA, 25 bp, Homo sapien
tggggccactgcacagctatactgt

SEQ ID NO: 29104 - DNA, 25 bp, Homo sapien
tggctgcaggcacttacatgcgctt

SEQ ID NO: 29105 - DNA, 25 bp, Homo sapien
atgaccctgtcccatgggtgtgacc

SEQ ID NO: 29106 - DNA, 25 bp, Homo sapien
gtctgacaagcacacatggcaataa

SEQ ID NO: 29107 - DNA, 25 bp, Homo sapien
tcacactcctagaccctgggctgga

SEQ ID NO: 29108 - DNA, 25 bp, Homo sapien
ctgtcatctggtgtctgagtgcctc

SEQ ID NO: 29109 - DNA, 25 bp, Homo sapien
agtggttaagggacctcacaaacaa

SEQ ID NO: 29110 - DNA, 25 bp, Homo sapien
aaccaaaccagactgcctgatgcag

SEQ ID NO: 29111 - DNA, 25 bp, Homo sapien
aggcactgtgccaaaagcttttcat

SEQ ID NO: 29112 - DNA, 25 bp, Homo sapien
gctcagcgtggatgccatcgcttcc

SEQ ID NO: 29113 - DNA, 25 bp, Homo sapien
tgtcaaagtaaaggttgcagaaaac

SEQ ID NO: 29114 - DNA, 25 bp, Homo sapien
cggtcgcgtgatctcacaagatgct

SEQ ID NO: 29115 - DNA, 25 bp, Homo sapien
tgacagcctggaataccctcgtcgt

SEQ ID NO: 29116 - DNA, 25 bp, Homo sapien
agagaggtgcagtaatttggccaaa

SEQ ID NO: 29117 - DNA, 25 bp, Homo sapien
acgcggctaataactacccaggact

SEQ ID NO: 29118 - DNA, 25 bp, Homo sapien
acgcgtgcacgggactattctttga

SEQ ID NO: 29119 - DNA, 25 bp, Homo sapien
tcattgattcaacgcgtgcacggga

SEQ ID NO: 29120 - DNA, 25 bp, Homo sapien
atgaagcgcgtcttcgcatacgtgc

SEQ ID NO: 29121 - DNA, 25 bp, Homo sapien
atttggccaaagtcacgcggctaat

SEQ ID NO: 29122 - DNA, 25 bp, Homo sapien
ccagttgatctacccgcgttggcct

SEQ ID NO: 29123 - DNA, 25 bp, Homo sapien
gattacatgcgcctaccaccatagc

SEQ ID NO: 29124 - DNA, 25 bp, Homo sapien
agccaccgcgcagggccattttttt

SEQ ID NO: 29125 - DNA, 25 bp, Homo sapien
atgcgcctaccaccatagctggcta

SEQ ID NO: 29126 - DNA, 25 bp, Homo sapien
attacatgcgcctaccaccatagct

SEQ ID NO: 29127 - DNA, 25 bp, Homo sapien
ccgcgcagggccatttttttgtatt

SEQ ID NO: 29128 - DNA, 25 bp, Homo sapien
cggggtttcacctattatccaggat

SEQ ID NO: 29129 - DNA, 25 bp, Homo sapien
accgcgcagggccatttttttgtat

SEQ ID NO: 29130 - DNA, 25 bp, Homo sapien
catgcgcctaccaccatagctggct

SEQ ID NO: 29131 - DNA, 25 bp, Homo sapien
tacatgcgcctaccaccatagctgg

SEQ ID NO: 29132 - DNA, 25 bp, Homo sapien
ttacatgcgcctaccaccatagctg

SEQ ID NO: 29133 - DNA, 25 bp, Homo sapien
agtgacccaagaaaccataaggatt

SEQ ID NO: 29134 - DNA, 25 bp, Homo sapien
atagtaacagaagacatgtcacggc

SEQ ID NO: 29135 - DNA, 25 bp, Homo sapien
tactcaaagttgagaccagaacttc

SEQ ID NO: 29136 - DNA, 25 bp, Homo sapien
acatgtcacggctataacagagacc

SEQ ID NO: 29137 - DNA, 25 bp, Homo sapien
aacagagacctgtaggtgtatactc

SEQ ID NO: 29138 - DNA, 25 bp, Homo sapien
cctgagagtatccataaagcaagaa

SEQ ID NO: 29139 - DNA, 25 bp, Homo sapien
agcaagaaatcaagtgtccatagac

SEQ ID NO: 29140 - DNA, 25 bp, Homo sapien
aaaatagcactgtagtcccaacaac

SEQ ID NO: 29141 - DNA, 25 bp, Homo sapien
ctaaagtaagaggacaatgagatac

SEQ ID NO: 29142 - DNA, 25 bp, Homo sapien
tctgagaaggtgtttccctgtcatt

SEQ ID NO: 29143 - DNA, 25 bp, Homo sapien
taccatgtagcacaggcttattttc

SEQ ID NO: 29144 - DNA, 25 bp, Homo sapien
catttccaggaagtgcttgggagtt

SEQ ID NO: 29145 - DNA, 25 bp, Homo sapien
ccaactgaataaatagggaccaatt

SEQ ID NO: 29146 - DNA, 25 bp, Homo sapien
tagtggaagactaagacactgatcc

SEQ ID NO: 29147 - DNA, 25 bp, Homo sapien
ctgtttagggaaacctgcctggccc

SEQ ID NO: 29148 - DNA, 25 bp, Homo sapien
gcacggagccagtctgaagacctaa

SEQ ID NO: 29149 - DNA, 25 bp, Homo sapien
ctcgccttgggtatgtgtgacttct

SEQ ID NO: 29150 - DNA, 25 bp, Homo sapien
tctgccctggatacagcatctgcat

SEQ ID NO: 29151 - DNA, 25 bp, Homo sapien
tactgtataggagagggccaatcta

SEQ ID NO: 29152 - DNA, 25 bp, Homo sapien
tgaggcaggatgttcaaatgattgc

SEQ ID NO: 29153 - DNA, 25 bp, Homo sapien
caatctagaatgaggatcgtagcct

SEQ ID NO: 29154 - DNA, 25 bp, Homo sapien
tcaggatgattcaattgaggcagga

SEQ ID NO: 29155 - DNA, 25 bp, Homo sapien
tctttggagtttgatgcagatgtca

SEQ ID NO: 29156 - DNA, 25 bp, Homo sapien
ttcagccaggctaagaaggtggagt

SEQ ID NO: 29157 - DNA, 25 bp, Homo sapien
agtagcagtagtttctagacatggc

SEQ ID NO: 29158 - DNA, 25 bp, Homo sapien
atatgccagacgtccttcagccagg

SEQ ID NO: 29159 - DNA, 25 bp, Homo sapien
aagctggtaattccaagctgaactc

SEQ ID NO: 29160 - DNA, 25 bp, Homo sapien
attaatgcttggtatttgggaaaca

SEQ ID NO: 29161 - DNA, 25 bp, Homo sapien
gtcggccaagctggtaattccaagc

SEQ ID NO: 29162 - DNA, 25 bp, Homo sapien
caggagtaggagacattggattgtt

SEQ ID NO: 29163 - DNA, 25 bp, Homo sapien
tctagacatggcaaataccaggatt

SEQ ID NO: 29164 - DNA, 25 bp, Homo sapien
tgcagcatgctctcatatgccagac

SEQ ID NO: 29165 - DNA, 25 bp, Homo sapien
ggagttacttaaatttgcagcatgc

SEQ ID NO: 29166 - DNA, 25 bp, Homo sapien
gagaattagaatcgcaaagcacttt

SEQ ID NO: 29167 - DNA, 25 bp, Homo sapien
ggtatctggggcctgattgaatatt

SEQ ID NO: 29168 - DNA, 25 bp, Homo sapien
attacaatccagcaggtgtataccc

SEQ ID NO: 29169 - DNA, 25 bp, Homo sapien
accttcagcaggtaaaatggtatct

SEQ ID NO: 29170 - DNA, 25 bp, Homo sapien
aagtgagagtttgggaaagttattc

SEQ ID NO: 29171 - DNA, 25 bp, Homo sapien
tgtattcacagccaagctgggatat

SEQ ID NO: 29172 - DNA, 25 bp, Homo sapien
gctgggatataggacaacaaagcct

SEQ ID NO: 29173 - DNA, 25 bp, Homo sapien
gtagagctgacttcagagaatttcc

SEQ ID NO: 29174 - DNA, 25 bp, Homo sapien
acacaccctgcaccttaagagaatt

SEQ ID NO: 29175 - DNA, 25 bp, Homo sapien
aatcctgtaaggtaggagcattagc

SEQ ID NO: 29176 - DNA, 25 bp, Homo sapien
ggtaatggtggaaagcaatcagata

SEQ ID NO: 29177 - DNA, 25 bp, Homo sapien
accaagagtgtataagtgttctcca

SEQ ID NO: 29178 - DNA, 25 bp, Homo sapien
gtccaatccattcttgatgggtacc

SEQ ID NO: 29179 - DNA, 25 bp, Homo sapien
ttagaccttcctcagattcatagtt

SEQ ID NO: 29180 - DNA, 25 bp, Homo sapien
attgaattaagttcctgatagattc

SEQ ID NO: 29181 - DNA, 25 bp, Homo sapien
gtgtgagatggtagcttattgtgat

SEQ ID NO: 29182 - DNA, 25 bp, Homo sapien
ttgatgggtacctatgttgattata

SEQ ID NO: 29183 - DNA, 25 bp, Homo sapien
gagaaattgccaaacagcattccac

SEQ ID NO: 29184 - DNA, 25 bp, Homo sapien
tttttctgacgattagtgatattga

SEQ ID NO: 29185 - DNA, 25 bp, Homo sapien
caccagcacctgttgtctttgactt

SEQ ID NO: 29186 - DNA, 25 bp, Homo sapien
agcattccactgtggctgaacaaat

SEQ ID NO: 29187 - DNA, 25 bp, Homo sapien
ctatacctagtaatgggattgttgg

SEQ ID NO: 29188 - DNA, 25 bp, Homo sapien
tcacaagggcaaagaatcgatattc

SEQ ID NO: 29189 - DNA, 25 bp, Homo sapien
agctcccagtgatcacaagggcaaa

SEQ ID NO: 29190 - DNA, 25 bp, Homo sapien
gagatttaggctgcacctgagtacc

SEQ ID NO: 29191 - DNA, 25 bp, Homo sapien
cacggtcaagtttgagatgtagcag

SEQ ID NO: 29192 - DNA, 25 bp, Homo sapien
ctaggggctacattcctccgggcaa

SEQ ID NO: 29193 - DNA, 25 bp, Homo sapien
tacacatccagtagaaaccgaactt

SEQ ID NO: 29194 - DNA, 25 bp, Homo sapien
gaatcagaaatacggtgtccctgcc

SEQ ID NO: 29195 - DNA, 25 bp, Homo sapien
tctcacaatgctaggccacagcagc

SEQ ID NO: 29196 - DNA, 25 bp, Homo sapien
gtaatacgtggtaggatactctctc

SEQ ID NO: 29197 - DNA, 25 bp, Homo sapien
gttacagtgatagcagctgagattt

SEQ ID NO: 29198 - DNA, 25 bp, Homo sapien
taccaggcagggtcctaagtgactt

SEQ ID NO: 29199 - DNA, 25 bp, Homo sapien
gcaaggggccaatgttgataacttt

SEQ ID NO: 29200 - DNA, 25 bp, Homo sapien
gagactagccaggacgcataatatt

SEQ ID NO: 29201 - DNA, 25 bp, Homo sapien
gagaaggcagtacatcctggttact

SEQ ID NO: 29202 - DNA, 25 bp, Homo sapien
tagaaatcaacttgggctgagagct

SEQ ID NO: 29203 - DNA, 25 bp, Homo sapien
atgactcacaaagtaggcatggagg

SEQ ID NO: 29204 - DNA, 25 bp, Homo sapien
tcattaagctgtagtgagactagcc

SEQ ID NO: 29205 - DNA, 25 bp, Homo sapien
tcagaaaacttgcaaggggccaatg

SEQ ID NO: 29206 - DNA, 25 bp, Homo sapien
ttaatgctgataatagagacacaca

SEQ ID NO: 29207 - DNA, 25 bp, Homo sapien
ctgttcccatgagatgcttattaga

SEQ ID NO: 29208 - DNA, 25 bp, Homo sapien
ctgagagctgggagaataatttttt

SEQ ID NO: 29209 - DNA, 25 bp, Homo sapien
tgcaattagggaaagatatggtaaa

SEQ ID NO: 29210 - DNA, 25 bp, Homo sapien
ttggtcaagttaacaagcctgtgct

SEQ ID NO: 29211 - DNA, 25 bp, Homo sapien
ggtgtgaggattaaacgagctaata

SEQ ID NO: 29212 - DNA, 25 bp, Homo sapien
gataatgagaaacaaaagcagacac

SEQ ID NO: 29213 - DNA, 25 bp, Homo sapien
gcagttgccgatacacacagtgaca

SEQ ID NO: 29214 - DNA, 25 bp, Homo sapien
gcactggcactgagaagtactccat

SEQ ID NO: 29215 - DNA, 25 bp, Homo sapien
atacatgtgaatgaatagaagagca

SEQ ID NO: 29216 - DNA, 25 bp, Homo sapien
cttgcaagacatgaggtctggagcc

SEQ ID NO: 29217 - DNA, 25 bp, Homo sapien
aaaagaagaatcatgagagtgccca

SEQ ID NO: 29218 - DNA, 25 bp, Homo sapien
ctcctgctaggatggctgccaatga

SEQ ID NO: 29219 - DNA, 25 bp, Homo sapien
tagcagtgcttcacagctggcatcc

SEQ ID NO: 29220 - DNA, 25 bp, Homo sapien
ccagtccacgccagttggtaaatat

SEQ ID NO: 29221 - DNA, 25 bp, Homo sapien
aaatgagatgtttctgcagcaggcc

SEQ ID NO: 29222 - DNA, 25 bp, Homo sapien
aaatgatccacctgaactctgcctc

SEQ ID NO: 29223 - DNA, 25 bp, Homo sapien
acaccactgaatggtccgtgtgtta

SEQ ID NO: 29224 - DNA, 25 bp, Homo sapien
gcagcaggccttaacacagccaaca

SEQ ID NO: 29225 - DNA, 25 bp, Homo sapien
ttatttgatattgaagacttgaccc

SEQ ID NO: 29226 - DNA, 25 bp, Homo sapien
acccacagtgaatcaagcccagaaa

SEQ ID NO: 29227 - DNA, 25 bp, Homo sapien
ccgtgtgttatggaacttgagatcc

SEQ ID NO: 29228 - DNA, 25 bp, Homo sapien
agcccagaaacaacaccactgaatg

SEQ ID NO: 29229 - DNA, 25 bp, Homo sapien
aacagctggccacaagccacagact

SEQ ID NO: 29230 - DNA, 25 bp, Homo sapien
cgacatcgttcaagtgacccacagt

SEQ ID NO: 29231 - DNA, 25 bp, Homo sapien
gcttgagaaaaacatgctagaaatg

SEQ ID NO: 29232 - DNA, 25 bp, Homo sapien
cagcatgagagctctgaagttgaat

SEQ ID NO: 29233 - DNA, 25 bp, Homo sapien
tttctctggggacatttgctaattc

SEQ ID NO: 29234 - DNA, 25 bp, Homo sapien
tctggcaagacgaacaggaacctaa

SEQ ID NO: 29235 - DNA, 25 bp, Homo sapien
cagggagacaatccagcttggctca

SEQ ID NO: 29236 - DNA, 25 bp, Homo sapien
ggcaccaacagaataggtgatggtt

SEQ ID NO: 29237 - DNA, 25 bp, Homo sapien
aacctaaaaagcgagggccagattc

SEQ ID NO: 29238 - DNA, 25 bp, Homo sapien
ttttaacaatggactagaagaacta

SEQ ID NO: 29239 - DNA, 25 bp, Homo sapien
gattcttaaggtaagaggaggcacc

SEQ ID NO: 29240 - DNA, 25 bp, Homo sapien
ttgctaattctaggcacagggagac

SEQ ID NO: 29241 - DNA, 25 bp, Homo sapien
ttttctgagaagtggaacagcatga

SEQ ID NO: 29242 - DNA, 25 bp, Homo sapien
tttcagaagggaaatggcctctcat

SEQ ID NO: 29243 - DNA, 25 bp, Homo sapien
tgggaaggaccaattcaaaggccat

SEQ ID NO: 29244 - DNA, 25 bp, Homo sapien
ttaacagttcaggtgggagtttatg

SEQ ID NO: 29245 - DNA, 25 bp, Homo sapien
aaagatacattttggaggttgagcc

SEQ ID NO: 29246 - DNA, 25 bp, Homo sapien
ataaattttaggttgggcatggtac

SEQ ID NO: 29247 - DNA, 25 bp, Homo sapien
tcaaaggccatttaacagttcaggt

SEQ ID NO: 29248 - DNA, 25 bp, Homo sapien
atctgctaagtctgagaacagaaaa

SEQ ID NO: 29249 - DNA, 25 bp, Homo sapien
ttttaggttgggcatggtacctcac

SEQ ID NO: 29250 - DNA, 25 bp, Homo sapien
gaaagtagacaaagtgaagataaat

SEQ ID NO: 29251 - DNA, 25 bp, Homo sapien
agtgttgggtatatgatgataaggt

SEQ ID NO: 29252 - DNA, 25 bp, Homo sapien
aatgaattgcaaaagaggaagtggg

SEQ ID NO: 29253 - DNA, 25 bp, Homo sapien
aggttgagccaacaagttatctgct

SEQ ID NO: 29254 - DNA, 25 bp, Homo sapien
gagagtacagctcatggtaaacgac

SEQ ID NO: 29255 - DNA, 25 bp, Homo sapien
gctaaaactactgtgcgtcgctgtc

SEQ ID NO: 29256 - DNA, 25 bp, Homo sapien
atgccagagctgatacattagttac

SEQ ID NO: 29257 - DNA, 25 bp, Homo sapien
ttacatggaagcaagctaaaactac

SEQ ID NO: 29258 - DNA, 25 bp, Homo sapien
aaagtttcctcagacatgggcaatt

SEQ ID NO: 29259 - DNA, 25 bp, Homo sapien
tttaactcacgtcaatgctgcggga

SEQ ID NO: 29260 - DNA, 25 bp, Homo sapien
cggttatgggctgttctgagaaact

SEQ ID NO: 29261 - DNA, 25 bp, Homo sapien
tggtaaacgacatgtgccttcctgt

SEQ ID NO: 29262 - DNA, 25 bp, Homo sapien
tatttgggccacttgtgaaacgggc

SEQ ID NO: 29263 - DNA, 25 bp, Homo sapien
tgctgcgggactccgaaacaagttc

SEQ ID NO: 29264 - DNA, 25 bp, Homo sapien
gggcaattactcacacaacgggcat

SEQ ID NO: 29265 - DNA, 25 bp, Homo sapien
ctgagtgcagtggtcgtttacatct

SEQ ID NO: 29266 - DNA, 25 bp, Homo sapien
aaagatcattaacaagggtaatgcc

SEQ ID NO: 29267 - DNA, 25 bp, Homo sapien
ggttaagcaaatattcaggaataaa

SEQ ID NO: 29268 - DNA, 25 bp, Homo sapien
tgcagggttgtgttttttgtagtct

SEQ ID NO: 29269 - DNA, 25 bp, Homo sapien
tactataaagaaggaattgggctgg

SEQ ID NO: 29270 - DNA, 25 bp, Homo sapien
aagaaagaaagaattggttaagcaa

SEQ ID NO: 29271 - DNA, 25 bp, Homo sapien
gtttaatggcctttgtgcagggttg

SEQ ID NO: 29272 - DNA, 25 bp, Homo sapien
ccagttcaagtttgcacaggcagtt

SEQ ID NO: 29273 - DNA, 25 bp, Homo sapien
gcctttcccagctctgtcaggattt

SEQ ID NO: 29274 - DNA, 25 bp, Homo sapien
acatgccatagtaaaccatgtgctt

SEQ ID NO: 29275 - DNA, 25 bp, Homo sapien
gttatcaggcatacaagcatgagaa

SEQ ID NO: 29276 - DNA, 25 bp, Homo sapien
actgtgaagcaaaagccacgcctca

SEQ ID NO: 29277 - DNA, 25 bp, Homo sapien
tctcatgggcaagaaacgtgagacc

SEQ ID NO: 29278 - DNA, 25 bp, Homo sapien
gcaggggccaatagaaagtttccta

SEQ ID NO: 29279 - DNA, 25 bp, Homo sapien
tacatgacaaagagccacagtcgca

SEQ ID NO: 29280 - DNA, 25 bp, Homo sapien
ctacactactgaggtttaggggcac

SEQ ID NO: 29281 - DNA, 25 bp, Homo sapien
tgccaggaacatgagactcgaacgt

SEQ ID NO: 29282 - DNA, 25 bp, Homo sapien
aacctaagtgccagatggatgagac

SEQ ID NO: 29283 - DNA, 25 bp, Homo sapien
ctacgcgtgagtaaatgccaggaac

SEQ ID NO: 29284 - DNA, 25 bp, Homo sapien
ctcgaacgtggcaggatatccttct

SEQ ID NO: 29285 - DNA, 25 bp, Homo sapien
tggcagaggaccatccactccctgg

SEQ ID NO: 29286 - DNA, 25 bp, Homo sapien
ttactcggtaatgggagaatggttc

SEQ ID NO: 29287 - DNA, 25 bp, Homo sapien
aaagaatggagaaagtaagcttctg

SEQ ID NO: 29288 - DNA, 25 bp, Homo sapien
cagttggagagcaacagagaattca

SEQ ID NO: 29289 - DNA, 25 bp, Homo sapien
tcaatatgtaagaagtgtggcaatg

SEQ ID NO: 29290 - DNA, 25 bp, Homo sapien
ccctgcggcttgtaaggactctgcc

SEQ ID NO: 29291 - DNA, 25 bp, Homo sapien
ggagactctaaagggaaaatgacat

SEQ ID NO: 29292 - DNA, 25 bp, Homo sapien
tgccagcatgtctcgcagcctcagt

SEQ ID NO: 29293 - DNA, 25 bp, Homo sapien
agcctgtcacaaaagatcgcgaaac

SEQ ID NO: 29294 - DNA, 25 bp, Homo sapien
tctatcactcggactgcacactttg

SEQ ID NO: 29295 - DNA, 25 bp, Homo sapien
cttcagatacatagaggtaacatac

SEQ ID NO: 29296 - DNA, 25 bp, Homo sapien
caacagagaattcagtgagggtttt

SEQ ID NO: 29297 - DNA, 25 bp, Homo sapien
tgtggcaatgaaagagaaaagttgc

SEQ ID NO: 29298 - DNA, 25 bp, Homo sapien
gtaaacctgtgtaggacagacgtct

SEQ ID NO: 29299 - DNA, 25 bp, Homo sapien
tcaacctaagatggccctaaggaat

SEQ ID NO: 29300 - DNA, 25 bp, Homo sapien
gaatgaatgaagttaggagttgaac

SEQ ID NO: 29301 - DNA, 25 bp, Homo sapien
agtagaaactgatgctgccatgcac

SEQ ID NO: 29302 - DNA, 25 bp, Homo sapien
tctgtgccaggcttagctgtgccct

SEQ ID NO: 29303 - DNA, 25 bp, Homo sapien
acctgccacatgcatgggtgccatc

SEQ ID NO: 29304 - DNA, 25 bp, Homo sapien
tgactccagcagatacatagcgttg

SEQ ID NO: 29305 - DNA, 25 bp, Homo sapien
atagggcacactttcaggagcagaa

SEQ ID NO: 29306 - DNA, 25 bp, Homo sapien
tttaccattagatccctgagggcat

SEQ ID NO: 29307 - DNA, 25 bp, Homo sapien
ttgccctgcaatgaagtagaaactg

SEQ ID NO: 29308 - DNA, 25 bp, Homo sapien
ttgatatgggctttggagtcttacc

SEQ ID NO: 29309 - DNA, 25 bp, Homo sapien
cctgcgtcagctgaactatttgaac

SEQ ID NO: 29310 - DNA, 25 bp, Homo sapien
aaagccactcactgtgtataagtaa

SEQ ID NO: 29311 - DNA, 25 bp, Homo sapien
tttcacagatggcagtgtggagaaa

SEQ ID NO: 29312 - DNA, 25 bp, Homo sapien
tctctgatagaggtgatgatttcac

SEQ ID NO: 29313 - DNA, 25 bp, Homo sapien
caaaggaagaaatcaaagaagagaa

SEQ ID NO: 29314 - DNA, 25 bp, Homo sapien
acacagaaagtgctcttacagagaa

SEQ ID NO: 29315 - DNA, 25 bp, Homo sapien
tggcagtgtggagaaacatttccta

SEQ ID NO: 29316 - DNA, 25 bp, Homo sapien
agaagagaaatcacaaacttactgc

SEQ ID NO: 29317 - DNA, 25 bp, Homo sapien
agagtgcagtgaggcaatcattgtt

SEQ ID NO: 29318 - DNA, 25 bp, Homo sapien
ttactaaaagcaaaggaagaaatca

SEQ ID NO: 29319 - DNA, 25 bp, Homo sapien
tgaactagttacgtttgctgatctc

SEQ ID NO: 29320 - DNA, 25 bp, Homo sapien
ttcatggcttccaggggttctcatc

SEQ ID NO: 29321 - DNA, 25 bp, Homo sapien
ctggtacatctgagcaagtctcggc

SEQ ID NO: 29322 - DNA, 25 bp, Homo sapien
ctgagtggtcaacaggagcccctcc

SEQ ID NO: 29323 - DNA, 25 bp, Homo sapien
taattatatcggcaaagacactttg

SEQ ID NO: 29324 - DNA, 25 bp, Homo sapien
attttttgtagtcccaaagtctcac

SEQ ID NO: 29325 - DNA, 25 bp, Homo sapien
gatccttaattatatcggcaaagac

SEQ ID NO: 29326 - DNA, 25 bp, Homo sapien
tggcttccaggggttctcatcgctc

SEQ ID NO: 29327 - DNA, 25 bp, Homo sapien
tgtgcccgacctcctttctcttata

SEQ ID NO: 29328 - DNA, 25 bp, Homo sapien
aagtctcggccctgcttcatggctt

SEQ ID NO: 29329 - DNA, 25 bp, Homo sapien
atctgagcaagtctcggccctgctt

SEQ ID NO: 29330 - DNA, 25 bp, Homo sapien
ttgtcattggattttggggccacct

SEQ ID NO: 29331 - DNA, 25 bp, Homo sapien
acaggcgtgacccaaggcaccggct

SEQ ID NO: 29332 - DNA, 25 bp, Homo sapien
ggtcttcaggggaaatctgattaac

SEQ ID NO: 29333 - DNA, 25 bp, Homo sapien
agttttcagcaaccactgcactggt

SEQ ID NO: 29334 - DNA, 25 bp, Homo sapien
atggatttacccaaaggtttgcaga

SEQ ID NO: 29335 - DNA, 25 bp, Homo sapien
attccagtggctccaagaccaccag

SEQ ID NO: 29336 - DNA, 25 bp, Homo sapien
tgtagagacgggattctccctgtgt

SEQ ID NO: 29337 - DNA, 25 bp, Homo sapien
accggctggggatctgtatttttaa

SEQ ID NO: 29338 - DNA, 25 bp, Homo sapien
gtgctggctagtggagtttatcata

SEQ ID NO: 29339 - DNA, 25 bp, Homo sapien
aaggtttgcagatgataggagtttt

SEQ ID NO: 29340 - DNA, 25 bp, Homo sapien
atccaatagtaggacagtggaggtc

SEQ ID NO: 29341 - DNA, 25 bp, Homo sapien
ctgcactggtttgctcatctgagcc

SEQ ID NO: 29342 - DNA, 25 bp, Homo sapien
tgcttggtgccactagattgtacac

SEQ ID NO: 29343 - DNA, 25 bp, Homo sapien
atgaggtatctagactagggaaatc

SEQ ID NO: 29344 - DNA, 25 bp, Homo sapien
ttttaaagagagcagttatttatta

SEQ ID NO: 29345 - DNA, 25 bp, Homo sapien
gtatctagactagggaaatccgtag

SEQ ID NO: 29346 - DNA, 25 bp, Homo sapien
actagattgtacacttaaagatggc

SEQ ID NO: 29347 - DNA, 25 bp, Homo sapien
tagactagggaaatccgtagagaca

SEQ ID NO: 29348 - DNA, 25 bp, Homo sapien
ttctggagatgaagagtgatgacat

SEQ ID NO: 29349 - DNA, 25 bp, Homo sapien
gatgacatttgcacagcttgtaggt

SEQ ID NO: 29350 - DNA, 25 bp, Homo sapien
cttgtaggtgtgcttggtgccacta

SEQ ID NO: 29351 - DNA, 25 bp, Homo sapien
ctagagagggtaatgggagttattt

SEQ ID NO: 29352 - DNA, 25 bp, Homo sapien
gagatgaagagtgatgacatttgca

SEQ ID NO: 29353 - DNA, 25 bp, Homo sapien
ttgctgagatttgcagagacatccc

SEQ ID NO: 29354 - DNA, 25 bp, Homo sapien
taggggcagcatttgtagaaaattc

SEQ ID NO: 29355 - DNA, 25 bp, Homo sapien
agcctaccagtgagagaataaaggt

SEQ ID NO: 29356 - DNA, 25 bp, Homo sapien
ccaaaacatagtgacttgaaacaat

SEQ ID NO: 29357 - DNA, 25 bp, Homo sapien
actgaggcatgagacttgtttcaac

SEQ ID NO: 29358 - DNA, 25 bp, Homo sapien
aataaaggtagagtgatggtcactt

SEQ ID NO: 29359 - DNA, 25 bp, Homo sapien
atcccaaagcatttaggggcagcat

SEQ ID NO: 29360 - DNA, 25 bp, Homo sapien
tagggtcaaaactgaacagtaagat

SEQ ID NO: 29361 - DNA, 25 bp, Homo sapien
cacaattttattatcgcgcatggct

SEQ ID NO: 29362 - DNA, 25 bp, Homo sapien
gctatgagcttcctgaatgaatatt

SEQ ID NO: 29363 - DNA, 25 bp, Homo sapien
tttaattggagagcctaccagtgag

SEQ ID NO: 29364 - DNA, 25 bp, Homo sapien
cagttcagcacttttcaaccatgcc

SEQ ID NO: 29365 - DNA, 25 bp, Homo sapien
ccctacgaggtagacaatgcagata

SEQ ID NO: 29366 - DNA, 25 bp, Homo sapien
accaatgtcttccagtgtccagttc

SEQ ID NO: 29367 - DNA, 25 bp, Homo sapien
gaagtttctagatttgagttaacac

SEQ ID NO: 29368 - DNA, 25 bp, Homo sapien
aatgcagatagatacagtgattctc

SEQ ID NO: 29369 - DNA, 25 bp, Homo sapien
ttgaagctcatataccctacgaggt

SEQ ID NO: 29370 - DNA, 25 bp, Homo sapien
attttcagagactaatttgcccaag

SEQ ID NO: 29371 - DNA, 25 bp, Homo sapien
atgcccttcttgactaaggagtccg

SEQ ID NO: 29372 - DNA, 25 bp, Homo sapien
tctcattccacacgtgaagaaactg

SEQ ID NO: 29373 - DNA, 25 bp, Homo sapien
tagaagcaaaacttgaaccaatgtc

SEQ ID NO: 29374 - DNA, 25 bp, Homo sapien
aacaaatcaaggtagaagcaaaact

SEQ ID NO: 29375 - DNA, 25 bp, Homo sapien
tcaggagatcctggtgtgtcagcct

SEQ ID NO: 29376 - DNA, 25 bp, Homo sapien
aatcaggactggaaatcaaagtacc

SEQ ID NO: 29377 - DNA, 25 bp, Homo sapien
ctccctttactgaagtgagctgggg

SEQ ID NO: 29378 - DNA, 25 bp, Homo sapien
taatatgaatcctgcagagaagctc

SEQ ID NO: 29379 - DNA, 25 bp, Homo sapien
atctcgctgtcactcatgcatacgt

SEQ ID NO: 29380 - DNA, 25 bp, Homo sapien
attcccggagtagcattttaaatcc

SEQ ID NO: 29381 - DNA, 25 bp, Homo sapien
atcaaagtaccctggagatgagcac

SEQ ID NO: 29382 - DNA, 25 bp, Homo sapien
ttggtatctgtaaggattcccggag

SEQ ID NO: 29383 - DNA, 25 bp, Homo sapien
aacttatgaaagaggaatcctccct

SEQ ID NO: 29384 - DNA, 25 bp, Homo sapien
tgaagacccattcagcatctcgctg

SEQ ID NO: 29385 - DNA, 25 bp, Homo sapien
gagatgagcacggtgtttgctttcc

SEQ ID NO: 29386 - DNA, 25 bp, Homo sapien
gtacctctagtagatacagggcttc

SEQ ID NO: 29387 - DNA, 25 bp, Homo sapien
tgatagtcaacaactcttcgggctc

SEQ ID NO: 29388 - DNA, 25 bp, Homo sapien
aaggagttgctggtaaggattttta

SEQ ID NO: 29389 - DNA, 25 bp, Homo sapien
tcagagaggactggaattctgtgaa

SEQ ID NO: 29390 - DNA, 25 bp, Homo sapien
tgtgcccgaccagttaaccattttc

SEQ ID NO: 29391 - DNA, 25 bp, Homo sapien
ccaatttagccagaagaggagtcgc

SEQ ID NO: 29392 - DNA, 25 bp, Homo sapien
atgtgaggcctaacacctgatgata

SEQ ID NO: 29393 - DNA, 25 bp, Homo sapien
cattagaaatgaatactccaccctt

SEQ ID NO: 29394 - DNA, 25 bp, Homo sapien
ttggtctagcaaaacactgtaaatc

SEQ ID NO: 29395 - DNA, 25 bp, Homo sapien
aagtggcgattggtctagcaaaaca

SEQ ID NO: 29396 - DNA, 25 bp, Homo sapien
gactttgataggaaaatgctactcc

SEQ ID NO: 29397 - DNA, 25 bp, Homo sapien
tattccagtgttccagccataggag

SEQ ID NO: 29398 - DNA, 25 bp, Homo sapien
atgctagggtttagaagctccgccc

SEQ ID NO: 29399 - DNA, 25 bp, Homo sapien
tgtgaaattaggaccatcccaggac

SEQ ID NO: 29400 - DNA, 25 bp, Homo sapien
gtgctataagcatcaattaggcgcc

SEQ ID NO: 29401 - DNA, 25 bp, Homo sapien
gcgacaaatgcagaagggctttctc

SEQ ID NO: 29402 - DNA, 25 bp, Homo sapien
aggttccgccctccgtggtcttgtc

SEQ ID NO: 29403 - DNA, 25 bp, Homo sapien
ttaaccgacggacgatggttcaatc

SEQ ID NO: 29404 - DNA, 25 bp, Homo sapien
gatccgctcagggtctgtgaaatta

SEQ ID NO: 29405 - DNA, 25 bp, Homo sapien
gtaagtctgaactctgtggccgcgt

SEQ ID NO: 29406 - DNA, 25 bp, Homo sapien
tcgccgttagagaagcaaatacgtc

SEQ ID NO: 29407 - DNA, 25 bp, Homo sapien
aggtgccacctaacgctcagaggtt

SEQ ID NO: 29408 - DNA, 25 bp, Homo sapien
gtgttctctggcctttctgtacctg

SEQ ID NO: 29409 - DNA, 25 bp, Homo sapien
gcttgacccactctgctgttgagaa

SEQ ID NO: 29410 - DNA, 25 bp, Homo sapien
atgccttggggtaatcaaatctatt

SEQ ID NO: 29411 - DNA, 25 bp, Homo sapien
agcccgtctccaagttcactgattg

SEQ ID NO: 29412 - DNA, 25 bp, Homo sapien
gttcttgacctttgagagtttgatt

SEQ ID NO: 29413 - DNA, 25 bp, Homo sapien
atatttcgtaggtgatttccattcc

SEQ ID NO: 29414 - DNA, 25 bp, Homo sapien
agctccctcttgaacaccaataatt

SEQ ID NO: 29415 - DNA, 25 bp, Homo sapien
ttattatatgccttggggtaatcaa

SEQ ID NO: 29416 - DNA, 25 bp, Homo sapien
ctggcctttctgtacctggatattt

SEQ ID NO: 29417 - DNA, 25 bp, Homo sapien
tgacccactctgctgttgagaacct

SEQ ID NO: 29418 - DNA, 25 bp, Homo sapien
cttctatatttcgtaggtgatttcc

SEQ ID NO: 29419 - DNA, 25 bp, Homo sapien
ttttagataaagaagaggaacaggc

SEQ ID NO: 29420 - DNA, 25 bp, Homo sapien
tttatcacttgatgcgtccgcccta

SEQ ID NO: 29421 - DNA, 25 bp, Homo sapien
gggacagggtcatttatcacttgat

SEQ ID NO: 29422 - DNA, 25 bp, Homo sapien
ctgctgtgtccagtttccagggctg

SEQ ID NO: 29423 - DNA, 25 bp, Homo sapien
atgccagggctgatacttaggttaa

SEQ ID NO: 29424 - DNA, 25 bp, Homo sapien
ccttggaactatttaaaagaggcaa

SEQ ID NO: 29425 - DNA, 25 bp, Homo sapien
acctcaggtctgtttgaaatgcttg

SEQ ID NO: 29426 - DNA, 25 bp, Homo sapien
ttctaaggcagcagacctgaggttt

SEQ ID NO: 29427 - DNA, 25 bp, Homo sapien
ttccagcagaaatcgggtaaacctc

SEQ ID NO: 29428 - DNA, 25 bp, Homo sapien
tttccagggctggaatgggacctca

SEQ ID NO: 29429 - DNA, 25 bp, Homo sapien
tttgtcccgattggccagcaccttg

SEQ ID NO: 29430 - DNA, 25 bp, Homo sapien
tttcactgatgaagctgcgaggagc

SEQ ID NO: 29431 - DNA, 25 bp, Homo sapien
ttgctccctaggaggggtatacatt

SEQ ID NO: 29432 - DNA, 25 bp, Homo sapien
tactctcctacggaggctgagacca

SEQ ID NO: 29433 - DNA, 25 bp, Homo sapien
ggaggctgagaccatctgcatgtct

SEQ ID NO: 29434 - DNA, 25 bp, Homo sapien
aagagaggtaatagccacgttcatt

SEQ ID NO: 29435 - DNA, 25 bp, Homo sapien
atgtctcagcatgaagaatggcctg

SEQ ID NO: 29436 - DNA, 25 bp, Homo sapien
agcttcctagaggtctgaagagcac

SEQ ID NO: 29437 - DNA, 25 bp, Homo sapien
cattgatcttgagacaactggggtg

SEQ ID NO: 29438 - DNA, 25 bp, Homo sapien
atgccctctgaaatactaagctact

SEQ ID NO: 29439 - DNA, 25 bp, Homo sapien
ggtctgaagagcacacatgccctct

SEQ ID NO: 29440 - DNA, 25 bp, Homo sapien
gtatacaggacaaatcaaacctctc

SEQ ID NO: 29441 - DNA, 25 bp, Homo sapien
aagcggtaggatttgtcccaacttc

SEQ ID NO: 29442 - DNA, 25 bp, Homo sapien
gaactgtcagttcatccaaccttct

SEQ ID NO: 29443 - DNA, 25 bp, Homo sapien
ttttcaatgaagagtcggcttggaa

SEQ ID NO: 29444 - DNA, 25 bp, Homo sapien
cgtagtggaaggtgaaataagacca

SEQ ID NO: 29445 - DNA, 25 bp, Homo sapien
gaaggtgaaataagaccacagattt

SEQ ID NO: 29446 - DNA, 25 bp, Homo sapien
atttttggtggatataggccgggta

SEQ ID NO: 29447 - DNA, 25 bp, Homo sapien
tcccaacttcccagggcgtagtgga

SEQ ID NO: 29448 - DNA, 25 bp, Homo sapien
cttttcagatgaggcctaaagagat

SEQ ID NO: 29449 - DNA, 25 bp, Homo sapien
cctaatccttagagacaacattcat

SEQ ID NO: 29450 - DNA, 25 bp, Homo sapien
cttggaaagcggtaggatttgtccc

SEQ ID NO: 29451 - DNA, 25 bp, Homo sapien
tgaggcctaaagagattaagtgact

SEQ ID NO: 29452 - DNA, 25 bp, Homo sapien
ttggaatcagaagtctactttctat

SEQ ID NO: 29453 - DNA, 25 bp, Homo sapien
aaaagttgcctgttttctgcatgac

SEQ ID NO: 29454 - DNA, 25 bp, Homo sapien
aaagcagtggttaggagaaagctaa

SEQ ID NO: 29455 - DNA, 25 bp, Homo sapien
atcaccttacacagactaaaacctt

SEQ ID NO: 29456 - DNA, 25 bp, Homo sapien
cagacccgtagaaggaatattcctc

SEQ ID NO: 29457 - DNA, 25 bp, Homo sapien
aaagctaagcagacccgtagaagga

SEQ ID NO: 29458 - DNA, 25 bp, Homo sapien
tctgcatgactttgctgataatttg

SEQ ID NO: 29459 - DNA, 25 bp, Homo sapien
tgggcttctgcaaatttcctatggc

SEQ ID NO: 29460 - DNA, 25 bp, Homo sapien
aaaaagatgatgaactggataaatc

SEQ ID NO: 29461 - DNA, 25 bp, Homo sapien
gataaatcaaaagcagtggttagga

SEQ ID NO: 29462 - DNA, 25 bp, Homo sapien
caagagacatttgcctgctgtgggc

SEQ ID NO: 29463 - DNA, 25 bp, Homo sapien
aagtgaagttagcatatggacctcc

SEQ ID NO: 29464 - DNA, 25 bp, Homo sapien
agagagatggtgaaatcagctctta

SEQ ID NO: 29465 - DNA, 25 bp, Homo sapien
cctcattaccttgggtggtggggtc

SEQ ID NO: 29466 - DNA, 25 bp, Homo sapien
tgctcacctatgctgccactcgttg

SEQ ID NO: 29467 - DNA, 25 bp, Homo sapien
cagatgtgccctggacagctagtcc

SEQ ID NO: 29468 - DNA, 25 bp, Homo sapien
cccggacacatgcagtcagtgagtg

SEQ ID NO: 29469 - DNA, 25 bp, Homo sapien
taaaggattcctagagagagatggt

SEQ ID NO: 29470 - DNA, 25 bp, Homo sapien
atttccgtgtgtgacgagctctccc

SEQ ID NO: 29471 - DNA, 25 bp, Homo sapien
tcagtgagtgctggttctctgctct

SEQ ID NO: 29472 - DNA, 25 bp, Homo sapien
tctcttgtgacttggcctagttatc

SEQ ID NO: 29473 - DNA, 25 bp, Homo sapien
aggccagctgtgcagtgatttccgt

SEQ ID NO: 29474 - DNA, 25 bp, Homo sapien
caaaagaagttgctttacctgcctc

SEQ ID NO: 29475 - DNA, 25 bp, Homo sapien
atcaaaagcagccttcctcctgtgc

SEQ ID NO: 29476 - DNA, 25 bp, Homo sapien
tgacacctccatcactgagacagac

SEQ ID NO: 29477 - DNA, 25 bp, Homo sapien
tgctcctgccggctgtctttcttac

SEQ ID NO: 29478 - DNA, 25 bp, Homo sapien
tgcctctgactttaagccaataatg

SEQ ID NO: 29479 - DNA, 25 bp, Homo sapien
tttcttacggacctgacacctccat

SEQ ID NO: 29480 - DNA, 25 bp, Homo sapien
gatttcaaaagggtacaaggcattc

SEQ ID NO: 29481 - DNA, 25 bp, Homo sapien
ggctctctctcccaaaagaagttgc

SEQ ID NO: 29482 - DNA, 25 bp, Homo sapien
cttcaaagaggcaccagatacttgt

SEQ ID NO: 29483 - DNA, 25 bp, Homo sapien
cctttatttctgagtcgtaagaccc

SEQ ID NO: 29484 - DNA, 25 bp, Homo sapien
gccaataatgcttctgcccaatcaa

SEQ ID NO: 29485 - DNA, 25 bp, Homo sapien
gactagaggcacatctgtccaggct

SEQ ID NO: 29486 - DNA, 25 bp, Homo sapien
tctggttcctcagaagtggaagcct

SEQ ID NO: 29487 - DNA, 25 bp, Homo sapien
gaaacctagggcacaaggcagacta

SEQ ID NO: 29488 - DNA, 25 bp, Homo sapien
gttccacagcacagcggcacttact

SEQ ID NO: 29489 - DNA, 25 bp, Homo sapien
ccttggctatatcagagggaggcca

SEQ ID NO: 29490 - DNA, 25 bp, Homo sapien
tcagtgtacctgaagtaagcagtcc

SEQ ID NO: 29491 - DNA, 25 bp, Homo sapien
agtagagctgaatgccacttgccac

SEQ ID NO: 29492 - DNA, 25 bp, Homo sapien
gaggaactgctcacccgaaacctag

SEQ ID NO: 29493 - DNA, 25 bp, Homo sapien
tgaaactgctggattgtgcacctcc

SEQ ID NO: 29494 - DNA, 25 bp, Homo sapien
atgaagaagtctgtgggctatattt

SEQ ID NO: 29495 - DNA, 25 bp, Homo sapien
aagcagtccagaggctttcacactc

SEQ ID NO: 29496 - DNA, 25 bp, Homo sapien
aaagtgcctcttctgcgtggtggct

SEQ ID NO: 29497 - DNA, 25 bp, Homo sapien
tcctgtagttcctggaatatgtgat

SEQ ID NO: 29498 - DNA, 25 bp, Homo sapien
ctaactagctgcctcacccattatt

SEQ ID NO: 29499 - DNA, 25 bp, Homo sapien
agtgcctcttctgcgtggtggctca

SEQ ID NO: 29500 - DNA, 25 bp, Homo sapien
acaatgtatagccaaacaatagctt

SEQ ID NO: 29501 - DNA, 25 bp, Homo sapien
aactagctgcctcacccattatttt

SEQ ID NO: 29502 - DNA, 25 bp, Homo sapien
tgcctcttctgcgtggtggctcagg

SEQ ID NO: 29503 - DNA, 25 bp, Homo sapien
ctgtagttcctggaatatgtgatac

SEQ ID NO: 29504 - DNA, 25 bp, Homo sapien
tagttcctggaatatgtgatacaaa

SEQ ID NO: 29505 - DNA, 25 bp, Homo sapien
gaaagtgcctcttctgcgtggtggc

SEQ ID NO: 29506 - DNA, 25 bp, Homo sapien
atgtatagccaaacaatagcttgtt

SEQ ID NO: 29507 - DNA, 25 bp, Homo sapien
tcctgtagttcctggaatatgtgat

SEQ ID NO: 29508 - DNA, 25 bp, Homo sapien
agtgcctcttctgcgtggtggctca

SEQ ID NO: 29509 - DNA, 25 bp, Homo sapien
taactagctgcctcacccattattt

SEQ ID NO: 29510 - DNA, 25 bp, Homo sapien
atgtatagccaaacaatagcttgtt

SEQ ID NO: 29511 - DNA, 25 bp, Homo sapien
tagttcctggaatatgtgatacaaa

SEQ ID NO: 29512 - DNA, 25 bp, Homo sapien
acaatgtatagccaaacaatagctt

SEQ ID NO: 29513 - DNA, 25 bp, Homo sapien
gggttcgagatcagtctagccaaca

SEQ ID NO: 29514 - DNA, 25 bp, Homo sapien
aaagtgcctcttctgcgtggtggct

SEQ ID NO: 29515 - DNA, 25 bp, Homo sapien
aacttggaaagtgcctcttctgcgt

SEQ ID NO: 29516 - DNA, 25 bp, Homo sapien
tggtaaacaacttggaaagtgcctc

SEQ ID NO: 29517 - DNA, 25 bp, Homo sapien
taaacaacttggaaagtgcctcttc

SEQ ID NO: 29518 - DNA, 25 bp, Homo sapien
ttgaactccattgaagggatcatcc

SEQ ID NO: 29519 - DNA, 25 bp, Homo sapien
tactagagaaagattgcccttgaac

SEQ ID NO: 29520 - DNA, 25 bp, Homo sapien
atagctactggaaggcctatcctcc

SEQ ID NO: 29521 - DNA, 25 bp, Homo sapien
ctacccttagtggaaaatacagatt

SEQ ID NO: 29522 - DNA, 25 bp, Homo sapien
catgcaggaaggctaatgctataac

SEQ ID NO: 29523 - DNA, 25 bp, Homo sapien
taatagaagctcacatgtctcctgc

SEQ ID NO: 29524 - DNA, 25 bp, Homo sapien
ttccagtcatagaggtactcatttc

SEQ ID NO: 29525 - DNA, 25 bp, Homo sapien
gacatgacacagtattgcaaggctt

SEQ ID NO: 29526 - DNA, 25 bp, Homo sapien
aaggtactactgactgatggcaatc

SEQ ID NO: 29527 - DNA, 25 bp, Homo sapien
tatgccaaagtactagagaaagatt

SEQ ID NO: 29528 - DNA, 25 bp, Homo sapien
tgatggcaatcagacctacccttag

SEQ ID NO: 29529 - DNA, 25 bp, Homo sapien
tgaattgggaagcacttagaacctc

SEQ ID NO: 29530 - DNA, 25 bp, Homo sapien
cctcctgagaggatatggcacatat

SEQ ID NO: 29531 - DNA, 25 bp, Homo sapien
agttaggttgcagttgttacataca

SEQ ID NO: 29532 - DNA, 25 bp, Homo sapien
ttgggcattgatgccaccctctgtc

SEQ ID NO: 29533 - DNA, 25 bp, Homo sapien
gatcagtcggcaacctttcattggc

SEQ ID NO: 29534 - DNA, 25 bp, Homo sapien
catttgacatacaacggatggctac

SEQ ID NO: 29535 - DNA, 25 bp, Homo sapien
ctaactgtagtgagaccatttgaca

SEQ ID NO: 29536 - DNA, 25 bp, Homo sapien
acaacggatggctacatatgaacat

SEQ ID NO: 29537 - DNA, 25 bp, Homo sapien
tctacccagcaatgtgggcaggcat

SEQ ID NO: 29538 - DNA, 25 bp, Homo sapien
ttatatggacgtggtctgatcagtc

SEQ ID NO: 29539 - DNA, 25 bp, Homo sapien
tgggcaggcatatttacagacagaa

SEQ ID NO: 29540 - DNA, 25 bp, Homo sapien
tcatctaatgggcaaaggctatgtc

SEQ ID NO: 29541 - DNA, 25 bp, Homo sapien
tacatataaatgtgggcacacggag

SEQ ID NO: 29542 - DNA, 25 bp, Homo sapien
tttcccaagtgaacagcaaatatat

SEQ ID NO: 29543 - DNA, 25 bp, Homo sapien
tgggcaaaggctatgtcagaaaaat

SEQ ID NO: 29544 - DNA, 25 bp, Homo sapien
tttgcaaagtatgatttggggtccc

SEQ ID NO: 29545 - DNA, 25 bp, Homo sapien
tattgcaacattagtactcgtggcc

SEQ ID NO: 29546 - DNA, 25 bp, Homo sapien
caagaaatgtgcaagtcaaaaagta

SEQ ID NO: 29547 - DNA, 25 bp, Homo sapien
aatatttctgggcacactacactgt

SEQ ID NO: 29548 - DNA, 25 bp, Homo sapien
tgggcacacggagagtaattattat

SEQ ID NO: 29549 - DNA, 25 bp, Homo sapien
tttgagtgaacacattagtgcagtt

SEQ ID NO: 29550 - DNA, 25 bp, Homo sapien
actcgtggccttcatggcaagattt

SEQ ID NO: 29551 - DNA, 25 bp, Homo sapien
agagaccacctattttttagggaca

SEQ ID NO: 29552 - DNA, 25 bp, Homo sapien
ttacacacttaactcaggaaaatcc

SEQ ID NO: 29553 - DNA, 25 bp, Homo sapien
caggaaaatccaatggccctaattt

SEQ ID NO: 29554 - DNA, 25 bp, Homo sapien
taaaaatatatggtacttcagtggt

SEQ ID NO: 29555 - DNA, 25 bp, Homo sapien
cagtggtaaaggaattgcaaatgaa

SEQ ID NO: 29556 - DNA, 25 bp, Homo sapien
aagggcatatctgagagaccaccta

SEQ ID NO: 29557 - DNA, 25 bp, Homo sapien
ttcaaagcccttaattcctctagtc

SEQ ID NO: 29558 - DNA, 25 bp, Homo sapien
acttcagtggtaaaggaattgcaaa

SEQ ID NO: 29559 - DNA, 25 bp, Homo sapien
tctagactgtaaaaacgtctccatt

SEQ ID NO: 29560 - DNA, 25 bp, Homo sapien
aggcccggattccagtggcgcaatc

SEQ ID NO: 29561 - DNA, 25 bp, Homo sapien
ttaactcaggaaaatccaatggccc

SEQ ID NO: 29562 - DNA, 25 bp, Homo sapien
gaactcacatgagaaaaacggtgct

SEQ ID NO: 29563 - DNA, 25 bp, Homo sapien
aagcaggggtctataggtacatttt

SEQ ID NO: 29564 - DNA, 25 bp, Homo sapien
atgaaccagatactcaagcagctgc

SEQ ID NO: 29565 - DNA, 25 bp, Homo sapien
gaaaaaggagctatgccctgtgaaa

SEQ ID NO: 29566 - DNA, 25 bp, Homo sapien
ttgggttcagataatggactggcat

SEQ ID NO: 29567 - DNA, 25 bp, Homo sapien
gaagttgcatccagtctaccagcct

SEQ ID NO: 29568 - DNA, 25 bp, Homo sapien
aaaaacggtgctagagacatgatta

SEQ ID NO: 29569 - DNA, 25 bp, Homo sapien
tttcaggatgggtcatggccttctc

SEQ ID NO: 29570 - DNA, 25 bp, Homo sapien
ctcagtaaagatggagcacatgaac

SEQ ID NO: 29571 - DNA, 25 bp, Homo sapien
atgagagttgatgaaggtattgtta

SEQ ID NO: 29572 - DNA, 25 bp, Homo sapien
tctatgtgcaatggctcaccgctat

SEQ ID NO: 29573 - DNA, 25 bp, Homo sapien
ccagcttttgccagtggtaggaaac

SEQ ID NO: 29574 - DNA, 25 bp, Homo sapien
attcatgctgggagtagttacataa

SEQ ID NO: 29575 - DNA, 25 bp, Homo sapien
aatagattagaatggagatgagcct

SEQ ID NO: 29576 - DNA, 25 bp, Homo sapien
caccttgagaggctaaaatcattca

SEQ ID NO: 29577 - DNA, 25 bp, Homo sapien
taggaaactgaggaactaacaatgc

SEQ ID NO: 29578 - DNA, 25 bp, Homo sapien
tcaggtatcagaacaagcatcactt

SEQ ID NO: 29579 - DNA, 25 bp, Homo sapien
aacggagcctgctagcctcaggatt

SEQ ID NO: 29580 - DNA, 25 bp, Homo sapien
gtatcttgtagaatggggctccttt

SEQ ID NO: 29581 - DNA, 25 bp, Homo sapien
tccagcccattcatggcaaaagtcc

SEQ ID NO: 29582 - DNA, 25 bp, Homo sapien
gcaaaagtccatgggccatgctcca

SEQ ID NO: 29583 - DNA, 25 bp, Homo sapien
tcaaagatgcctgttgtaaccatgt

SEQ ID NO: 29584 - DNA, 25 bp, Homo sapien
tgatacagaacattgcaaacataaa

SEQ ID NO: 29585 - DNA, 25 bp, Homo sapien
attcgtgtctaaaaactccattctc

SEQ ID NO: 29586 - DNA, 25 bp, Homo sapien
atccacccaccgagttcttaatttc

SEQ ID NO: 29587 - DNA, 25 bp, Homo sapien
aaattatcctccagaaagaagttac

SEQ ID NO: 29588 - DNA, 25 bp, Homo sapien
aagataatttgaaactggggcttcc

SEQ ID NO: 29589 - DNA, 25 bp, Homo sapien
tgaaagcttgttgttaccagagttc

SEQ ID NO: 29590 - DNA, 25 bp, Homo sapien
tctctggattccctctgatctagtt

SEQ ID NO: 29591 - DNA, 25 bp, Homo sapien
tattagaatgtttggtttatcctcc

SEQ ID NO: 29592 - DNA, 25 bp, Homo sapien
ctggggcttccatttctgcaagtca

SEQ ID NO: 29593 - DNA, 25 bp, Homo sapien
cagaattaggagtataaaattatcc

SEQ ID NO: 29594 - DNA, 25 bp, Homo sapien
ttccaataggagattaagataattt

SEQ ID NO: 29595 - DNA, 25 bp, Homo sapien
ggatctggatcaggtagatgttacc

SEQ ID NO: 29596 - DNA, 25 bp, Homo sapien
aggtagatgttacccgaaaacagcc

SEQ ID NO: 29597 - DNA, 25 bp, Homo sapien
gtcagcccagacattgtgaggcatt

SEQ ID NO: 29598 - DNA, 25 bp, Homo sapien
tcgcggggctgctgccaaaaaacct

SEQ ID NO: 29599 - DNA, 25 bp, Homo sapien
gcatttgtcagaggccgcaggattt

SEQ ID NO: 29600 - DNA, 25 bp, Homo sapien
caaaaaacctcagtcgggaggagct

SEQ ID NO: 29601 - DNA, 25 bp, Homo sapien
gcctcggtgccctccgctgtagaat

SEQ ID NO: 29602 - DNA, 25 bp, Homo sapien
acctcgggatggaatgactcccatt

SEQ ID NO: 29603 - DNA, 25 bp, Homo sapien
caccgaagcccggtgattaagtacc

SEQ ID NO: 29604 - DNA, 25 bp, Homo sapien
gaattttcgaggtcagcccagacat

SEQ ID NO: 29605 - DNA, 25 bp, Homo sapien
agaatgggaccggtcgtacctgaat

SEQ ID NO: 29606 - DNA, 25 bp, Homo sapien
atgatggattacagcaacagttgtc

SEQ ID NO: 29607 - DNA, 25 bp, Homo sapien
ttatgagacagcagcgaacaattaa

SEQ ID NO: 29608 - DNA, 25 bp, Homo sapien
agcaaacaaaaagtatgatggatta

SEQ ID NO: 29609 - DNA, 25 bp, Homo sapien
cagtagaaagggtaattatttggta

SEQ ID NO: 29610 - DNA, 25 bp, Homo sapien
aactataggaggatgaaattcagaa

SEQ ID NO: 29611 - DNA, 25 bp, Homo sapien
cagcgaacaattaatatgcaacagt

SEQ ID NO: 29612 - DNA, 25 bp, Homo sapien
ttaatgccacagatacaagaaaatt

SEQ ID NO: 29613 - DNA, 25 bp, Homo sapien
aacagtctcaagtagaaaaatacaa

SEQ ID NO: 29614 - DNA, 25 bp, Homo sapien
atatcaaagaacatatgaaacgtct

SEQ ID NO: 29615 - DNA, 25 bp, Homo sapien
acagttgtcttcagtagaaagggta

SEQ ID NO: 29616 - DNA, 25 bp, Homo sapien
gaagaagattttatgagacagcagc

SEQ ID NO: 29617 - DNA, 25 bp, Homo sapien
ccaatgcgattctatttatgtgaca

SEQ ID NO: 29618 - DNA, 25 bp, Homo sapien
tcatagaattgtacactaaaaagtg

SEQ ID NO: 29619 - DNA, 25 bp, Homo sapien
ctgagactttttcgccatcacaaga

SEQ ID NO: 29620 - DNA, 25 bp, Homo sapien
ttcaaaagtctatatccaatgcgat

SEQ ID NO: 29621 - DNA, 25 bp, Homo sapien
gctaattatacaagaccaaaatgtt

SEQ ID NO: 29622 - DNA, 25 bp, Homo sapien
acaaacgagaaatgtaagggtacta

SEQ ID NO: 29623 - DNA, 25 bp, Homo sapien
gatggaactgttctatgtctcaatt

SEQ ID NO: 29624 - DNA, 25 bp, Homo sapien
atatgaccatacaaacgagaaatgt

SEQ ID NO: 29625 - DNA, 25 bp, Homo sapien
tttaagaaccaaacacagatcagtg

SEQ ID NO: 29626 - DNA, 25 bp, Homo sapien
aaagcagggtttttaaatatgacca

SEQ ID NO: 29627 - DNA, 25 bp, Homo sapien
tttatgtgacatttgggaaaagtcc

SEQ ID NO: 29628 - DNA, 25 bp, Homo sapien
actaaatgcagttatgaagctcttg

SEQ ID NO: 29629 - DNA, 25 bp, Homo sapien
ggagcatggagaacagattattgat

SEQ ID NO: 29630 - DNA, 25 bp, Homo sapien
attgactttagaggaagcagtcccg

SEQ ID NO: 29631 - DNA, 25 bp, Homo sapien
aaaagttatggtcaaaggccctgaa

SEQ ID NO: 29632 - DNA, 25 bp, Homo sapien
ggtgtgaggaagtagtcaataacac

SEQ ID NO: 29633 - DNA, 25 bp, Homo sapien
aacatatagaatttgaaaggaacac

SEQ ID NO: 29634 - DNA, 25 bp, Homo sapien
tccatcaacataaagctcagagctg

SEQ ID NO: 29635 - DNA, 25 bp, Homo sapien
tcagttcctagaaaatgagagccta

SEQ ID NO: 29636 - DNA, 25 bp, Homo sapien
gaaagtaaaggaggtataaatcagc

SEQ ID NO: 29637 - DNA, 25 bp, Homo sapien
gttgagtatgagatgaacaatgtac

SEQ ID NO: 29638 - DNA, 25 bp, Homo sapien
caggaaccaagccatgtgcaaattc

SEQ ID NO: 29639 - DNA, 25 bp, Homo sapien
tgcctgccgggtccaggtttttgaa

SEQ ID NO: 29640 - DNA, 25 bp, Homo sapien
gcctgggccttcctagcatttttta

SEQ ID NO: 29641 - DNA, 25 bp, Homo sapien
ttttaaaagcgatgtaacttggcag

SEQ ID NO: 29642 - DNA, 25 bp, Homo sapien
aataaagctcgttacactgtttgtc

SEQ ID NO: 29643 - DNA, 25 bp, Homo sapien
cccagtgattttcaagtagctaaat

SEQ ID NO: 29644 - DNA, 25 bp, Homo sapien
cttggcaggtgttaagctggtttca

SEQ ID NO: 29645 - DNA, 25 bp, Homo sapien
tgttataaaataaagctcgttacac

SEQ ID NO: 29646 - DNA, 25 bp, Homo sapien
ctggtttcagtaatcttagcatcta

SEQ ID NO: 29647 - DNA, 25 bp, Homo sapien
gctaaattagctgcctgccgggtcc

SEQ ID NO: 29648 - DNA, 25 bp, Homo sapien
ggcggagactatactgcatggtatt

SEQ ID NO: 29649 - DNA, 25 bp, Homo sapien
ttagtaccacctcaacagataagtt

SEQ ID NO: 29650 - DNA, 25 bp, Homo sapien
ctacatatagggaagttgaaacaat

SEQ ID NO: 29651 - DNA, 25 bp, Homo sapien
aagttattttgcacaagggacccat

SEQ ID NO: 29652 - DNA, 25 bp, Homo sapien
tttggagagcaaactaagtcagatt

SEQ ID NO: 29653 - DNA, 25 bp, Homo sapien
tgacagaccacactgacaagtagtt

SEQ ID NO: 29654 - DNA, 25 bp, Homo sapien
tttaagcctcactatccagatcagc

SEQ ID NO: 29655 - DNA, 25 bp, Homo sapien
acagtgtaagatagatgacagacca

SEQ ID NO: 29656 - DNA, 25 bp, Homo sapien
acgccaggcatacgcatgtgcatgt

SEQ ID NO: 29657 - DNA, 25 bp, Homo sapien
taatggcaatgggacactttaagcc

SEQ ID NO: 29658 - DNA, 25 bp, Homo sapien
cttctgcagaggcaaccagtgttac

SEQ ID NO: 29659 - DNA, 25 bp, Homo sapien
atccttccagagatacgccaggcat

SEQ ID NO: 29660 - DNA, 25 bp, Homo sapien
agggacccatgagtctaatggcaat

SEQ ID NO: 29661 - DNA, 25 bp, Homo sapien
aaattgaactaatcatcatgctaac

SEQ ID NO: 29662 - DNA, 25 bp, Homo sapien
taagcatggtttatctaatttggtc

SEQ ID NO: 29663 - DNA, 25 bp, Homo sapien
ccctgtccaagtggagggttgtaaa

SEQ ID NO: 29664 - DNA, 25 bp, Homo sapien
tttggtcctcgtacaatgacccttg

SEQ ID NO: 29665 - DNA, 25 bp, Homo sapien
aactggcagctatacacttttaaac

SEQ ID NO: 29666 - DNA, 25 bp, Homo sapien
gtcttctgatatactaagcatggtt

SEQ ID NO: 29667 - DNA, 25 bp, Homo sapien
tgaaagtattttgtaaggcaaagtc

SEQ ID NO: 29668 - DNA, 25 bp, Homo sapien
tctaaaatgctgtagagttacaata

SEQ ID NO: 29669 - DNA, 25 bp, Homo sapien
aatgacccttgtgaagttggaccta

SEQ ID NO: 29670 - DNA, 25 bp, Homo sapien
agggttgtaaagttactgaacattc

SEQ ID NO: 29671 - DNA, 25 bp, Homo sapien
gaagttggacctattattctagtcg

SEQ ID NO: 29672 - DNA, 25 bp, Homo sapien
ctgggtagcccgtcttgccatcact

SEQ ID NO: 29673 - DNA, 25 bp, Homo sapien
tcctcccggaacagagctcatgctg

SEQ ID NO: 29674 - DNA, 25 bp, Homo sapien
ggggacccacgattgtcattcagag

SEQ ID NO: 29675 - DNA, 25 bp, Homo sapien
tttcatggtcctcccggaacagagc

SEQ ID NO: 29676 - DNA, 25 bp, Homo sapien
tcttggttctgacacgaaggcaccc

SEQ ID NO: 29677 - DNA, 25 bp, Homo sapien
gctgtggctggcacctttcatggtc

SEQ ID NO: 29678 - DNA, 25 bp, Homo sapien
tgcgccttgagcagctgtgtcttgt

SEQ ID NO: 29679 - DNA, 25 bp, Homo sapien
gctgagccctggaacatcctggctt

SEQ ID NO: 29680 - DNA, 25 bp, Homo sapien
ccgagtgcttgttttgtggggtccc

SEQ ID NO: 29681 - DNA, 25 bp, Homo sapien
tgtcttgtcccgtgaggaggtgccc

SEQ ID NO: 29682 - DNA, 25 bp, Homo sapien
ccctgctcggggatctccaaggggt

SEQ ID NO: 29683 - DNA, 25 bp, Homo sapien
aacgccttgaagttctcccatgcca

SEQ ID NO: 29684 - DNA, 25 bp, Homo sapien
gtaatcagcgtcacaatctagtttt

SEQ ID NO: 29685 - DNA, 25 bp, Homo sapien
attaaaaatttaacggctgggtgca

SEQ ID NO: 29686 - DNA, 25 bp, Homo sapien
ttagaacaacgccttgaagttctcc

SEQ ID NO: 29687 - DNA, 25 bp, Homo sapien
cccatgccacttagcagttgtagtc

SEQ ID NO: 29688 - DNA, 25 bp, Homo sapien
caagaaaacccaattacattcatcc

SEQ ID NO: 29689 - DNA, 25 bp, Homo sapien
ctgtatttgtgtaatcagcgtcaca

SEQ ID NO: 29690 - DNA, 25 bp, Homo sapien
gctatatcatgctttattggacatt

SEQ ID NO: 29691 - DNA, 25 bp, Homo sapien
atctagttttagaacaacgccttga

SEQ ID NO: 29692 - DNA, 25 bp, Homo sapien
atcacttaatgtccttctggtattg

SEQ ID NO: 29693 - DNA, 25 bp, Homo sapien
acttaataataacttggggacatta

SEQ ID NO: 29694 - DNA, 25 bp, Homo sapien
ctgtcaggatggcaaagtgttttat

SEQ ID NO: 29695 - DNA, 25 bp, Homo sapien
ggggacaatgcctcataatgtaaaa

SEQ ID NO: 29696 - DNA, 25 bp, Homo sapien
gtgggtgcaaaccagtccatcacac

SEQ ID NO: 29697 - DNA, 25 bp, Homo sapien
tttgtaaatgttgtccgagaggctg

SEQ ID NO: 29698 - DNA, 25 bp, Homo sapien
aaaaatgtaagggatgagatcaact

SEQ ID NO: 29699 - DNA, 25 bp, Homo sapien
actgtgcccagtcccattggggtat

SEQ ID NO: 29700 - DNA, 25 bp, Homo sapien
gcccacagagagacagaccactttt

SEQ ID NO: 29701 - DNA, 25 bp, Homo sapien
ctggatgtaccaagactaaatctat

SEQ ID NO: 29702 - DNA, 25 bp, Homo sapien
aaaaggaaaagatatgtccaatatt

SEQ ID NO: 29703 - DNA, 25 bp, Homo sapien
ttggactccggaaatctggatgtac

SEQ ID NO: 29704 - DNA, 25 bp, Homo sapien
tggttctcaagggttgcccacagag

SEQ ID NO: 29705 - DNA, 25 bp, Homo sapien
gctaaatgccgggaaacatggtcaa

SEQ ID NO: 29706 - DNA, 25 bp, Homo sapien
ggtctctggctggaacttcatgcta

SEQ ID NO: 29707 - DNA, 25 bp, Homo sapien
aatgcatgcctggtttgattatcct

SEQ ID NO: 29708 - DNA, 25 bp, Homo sapien
atggtcaaggataaaaatgcatgcc

SEQ ID NO: 29709 - DNA, 25 bp, Homo sapien
ctgaatgccaagctaatatgtacac

SEQ ID NO: 29710 - DNA, 25 bp, Homo sapien
cttgtagggtagcaacaatatttac

SEQ ID NO: 29711 - DNA, 25 bp, Homo sapien
tttaagagcccgttgtaataatatc

SEQ ID NO: 29712 - DNA, 25 bp, Homo sapien
cttcatgctaaatgccgggaaacat

SEQ ID NO: 29713 - DNA, 25 bp, Homo sapien
cctcttctcctagcagcatgtgaaa

SEQ ID NO: 29714 - DNA, 25 bp, Homo sapien
agtttggagaaacattgaaattact

SEQ ID NO: 29715 - DNA, 25 bp, Homo sapien
tatagtgtctctgaaattggcaaac

SEQ ID NO: 29716 - DNA, 25 bp, Homo sapien
gctataaatagattacgaggtcctc

SEQ ID NO: 29717 - DNA, 25 bp, Homo sapien
tatggtttaactaaagcgccctcac

SEQ ID NO: 29718 - DNA, 25 bp, Homo sapien
caatcttgtcaagcgagagtccatg

SEQ ID NO: 29719 - DNA, 25 bp, Homo sapien
aagtagaacctcaggactttccagt

SEQ ID NO: 29720 - DNA, 25 bp, Homo sapien
ctaacagaagtagactggagttggt

SEQ ID NO: 29721 - DNA, 25 bp, Homo sapien
ctgaaaattgaatgggtgtattacc

SEQ ID NO: 29722 - DNA, 25 bp, Homo sapien
caggccatgggaagttaacatacaa

SEQ ID NO: 29723 - DNA, 25 bp, Homo sapien
actgggaataaagtgaatgtgctct

SEQ ID NO: 29724 - DNA, 25 bp, Homo sapien
cgagagtccatgagtaagtagccat

SEQ ID NO: 29725 - DNA, 25 bp, Homo sapien
agttggtgccaactgcagacataat

SEQ ID NO: 29726 - DNA, 25 bp, Homo sapien
ttaggtagttgagccaactgctctc

SEQ ID NO: 29727 - DNA, 25 bp, Homo sapien
agtgaagctgtgacaccaacagaaa

SEQ ID NO: 29728 - DNA, 25 bp, Homo sapien
ttagaaccatgtgcgcttgaagatt

SEQ ID NO: 29729 - DNA, 25 bp, Homo sapien
atagctgtagaaatgaatggcaacc

SEQ ID NO: 29730 - DNA, 25 bp, Homo sapien
ttagcgtgcccagtgtgcatcgcag

SEQ ID NO: 29731 - DNA, 25 bp, Homo sapien
tgcatcgcagggtgtgtaactgcac

SEQ ID NO: 29732 - DNA, 25 bp, Homo sapien
tggcaacccttagaaccatgtgcgc

SEQ ID NO: 29733 - DNA, 25 bp, Homo sapien
agctcagcccgaaaaaggaggcgca

SEQ ID NO: 29734 - DNA, 25 bp, Homo sapien
ctgatggttgcatagctgtagaaat

SEQ ID NO: 29735 - DNA, 25 bp, Homo sapien
ctgtagaaatgaatggcaaccctta

SEQ ID NO: 29736 - DNA, 25 bp, Homo sapien
gcttgaagattagcgtgcccagtgt

SEQ ID NO: 29737 - DNA, 25 bp, Homo sapien
caacagaaaagctcagcccgaaaaa

SEQ ID NO: 29738 - DNA, 25 bp, Homo sapien
tgccagggagctgttctcacagacc

SEQ ID NO: 29739 - DNA, 25 bp, Homo sapien
tgggagaagccgttctacatcagta

SEQ ID NO: 29740 - DNA, 25 bp, Homo sapien
tagtcacttgttacgtctggggcag

SEQ ID NO: 29741 - DNA, 25 bp, Homo sapien
ccatgggacacgtgtttctgggaca

SEQ ID NO: 29742 - DNA, 25 bp, Homo sapien
ccaaagaggatctagcagctccgat

SEQ ID NO: 29743 - DNA, 25 bp, Homo sapien
cgggagatcagaaatcgcaatgttt

SEQ ID NO: 29744 - DNA, 25 bp, Homo sapien
cctgtcgaaatgaatggggttattt

SEQ ID NO: 29745 - DNA, 25 bp, Homo sapien
tacatccaccagtgcccaaagagga

SEQ ID NO: 29746 - DNA, 25 bp, Homo sapien
gcgcctggccctacgttagacttct

SEQ ID NO: 29747 - DNA, 25 bp, Homo sapien
tcacgggcagtctttccaaaagggc

SEQ ID NO: 29748 - DNA, 25 bp, Homo sapien
tgagaattgccgtatcctagcttgc

SEQ ID NO: 29749 - DNA, 25 bp, Homo sapien
ttcacctcttaaggggagctgtgtc

SEQ ID NO: 29750 - DNA, 25 bp, Homo sapien
gttagaatgtaagctcaacaaggac

SEQ ID NO: 29751 - DNA, 25 bp, Homo sapien
gaaaccaagaccaaatggacctgca

SEQ ID NO: 29752 - DNA, 25 bp, Homo sapien
taaagttgtaagctccatttgtccc

SEQ ID NO: 29753 - DNA, 25 bp, Homo sapien
atgagtcactaagtctgggtcacac

SEQ ID NO: 29754 - DNA, 25 bp, Homo sapien
tcacacttaagtggaaggtaattaa

SEQ ID NO: 29755 - DNA, 25 bp, Homo sapien
tttggagacatatctacatagacta

SEQ ID NO: 29756 - DNA, 25 bp, Homo sapien
tctacatggactacaacaatgtctt

SEQ ID NO: 29757 - DNA, 25 bp, Homo sapien
ttcccaatagagtttaccctgacta

SEQ ID NO: 29758 - DNA, 25 bp, Homo sapien
aagaaaatgagaaacgaaaccaaga

SEQ ID NO: 29759 - DNA, 25 bp, Homo sapien
gctcaacaaggacaaagatgtatgt

SEQ ID NO: 29760 - DNA, 25 bp, Homo sapien
tggttactacaggattcacagtgag

SEQ ID NO: 29761 - DNA, 25 bp, Homo sapien
agagaaggtgaaattcagaaaaaac

SEQ ID NO: 29762 - DNA, 25 bp, Homo sapien
gagattttcattccagagctcaaat

SEQ ID NO: 29763 - DNA, 25 bp, Homo sapien
gagcctaatattcctaaagatcacc

SEQ ID NO: 29764 - DNA, 25 bp, Homo sapien
taagcatatgaccaagagcctaata

SEQ ID NO: 29765 - DNA, 25 bp, Homo sapien
aagcccttataagcctttgcaaaag

SEQ ID NO: 29766 - DNA, 25 bp, Homo sapien
gttgagaaacatgcacagccatacc

SEQ ID NO: 29767 - DNA, 25 bp, Homo sapien
attaataagtgcaaggagaatgtgc

SEQ ID NO: 29768 - DNA, 25 bp, Homo sapien
agccataccttcctccctggagatt

SEQ ID NO: 29769 - DNA, 25 bp, Homo sapien
caaaatatagttgagaaacatgcac

SEQ ID NO: 29770 - DNA, 25 bp, Homo sapien
cttcctagtctatcaatggcatcac

SEQ ID NO: 29771 - DNA, 25 bp, Homo sapien
tctctggtgtatctctgtgctctgt

SEQ ID NO: 29772 - DNA, 25 bp, Homo sapien
catgatatgagctgcctggacattg

SEQ ID NO: 29773 - DNA, 25 bp, Homo sapien
tatgagctggttaccactgtgggcc

SEQ ID NO: 29774 - DNA, 25 bp, Homo sapien
acatggggctggtcctttattcacc

SEQ ID NO: 29775 - DNA, 25 bp, Homo sapien
gagatagaagggagaaaagtcaaaa

SEQ ID NO: 29776 - DNA, 25 bp, Homo sapien
cacattccagctagtttccgagggt

SEQ ID NO: 29777 - DNA, 25 bp, Homo sapien
ggggacaatgtagaacctcagaatc

SEQ ID NO: 29778 - DNA, 25 bp, Homo sapien
tcatcccactagaggacatggggct

SEQ ID NO: 29779 - DNA, 25 bp, Homo sapien
agatgatccgtggaagcgccaatga

SEQ ID NO: 29780 - DNA, 25 bp, Homo sapien
ttctttggttgaaggctgtggtctg

SEQ ID NO: 29781 - DNA, 25 bp, Homo sapien
ggggagtctgtgttcatgcatgtac

SEQ ID NO: 29782 - DNA, 25 bp, Homo sapien
gctggagattctacgggcctactta

SEQ ID NO: 29783 - DNA, 25 bp, Homo sapien
taagggtccgcacgctcttgctgcc

SEQ ID NO: 29784 - DNA, 25 bp, Homo sapien
cagcatggcgcctgacccagcagtt

SEQ ID NO: 29785 - DNA, 25 bp, Homo sapien
gggctaagaaagacttcatcctggt

SEQ ID NO: 29786 - DNA, 25 bp, Homo sapien
aacacgggctctagtcctgagctaa

SEQ ID NO: 29787 - DNA, 25 bp, Homo sapien
acccttctgatgagcatggaaacac

SEQ ID NO: 29788 - DNA, 25 bp, Homo sapien
tttcccaaagccactgagagggcta

SEQ ID NO: 29789 - DNA, 25 bp, Homo sapien
agatacatgcctggcccacggattc

SEQ ID NO: 29790 - DNA, 25 bp, Homo sapien
ttgcctcctgactgatggtcgggtc

SEQ ID NO: 29791 - DNA, 25 bp, Homo sapien
tgccagggcccaagtagcaaccttg

SEQ ID NO: 29792 - DNA, 25 bp, Homo sapien
attgggcctctggaagttgtacatc

SEQ ID NO: 29793 - DNA, 25 bp, Homo sapien
tcttcctgctgctgagacgagagaa

SEQ ID NO: 29794 - DNA, 25 bp, Homo sapien
ctccttcagtaagaggtggtggcac

SEQ ID NO: 29795 - DNA, 25 bp, Homo sapien
agacacacttgtcaaagggcgcctc

SEQ ID NO: 29796 - DNA, 25 bp, Homo sapien
caggtactcagcacgcaatggtcat

SEQ ID NO: 29797 - DNA, 25 bp, Homo sapien
ctttggaacagagttgtaagatgcc

SEQ ID NO: 29798 - DNA, 25 bp, Homo sapien
tgcaatgagactccatgaagccaca

SEQ ID NO: 29799 - DNA, 25 bp, Homo sapien
aaagaagtgagaacagtcctatgga

SEQ ID NO: 29800 - DNA, 25 bp, Homo sapien
gaagcagcacagactttggaacaga

SEQ ID NO: 29801 - DNA, 25 bp, Homo sapien
atgcagggaacaacgcagccatgca

SEQ ID NO: 29802 - DNA, 25 bp, Homo sapien
aaggaaagcctaaatgcagccatgc

SEQ ID NO: 29803 - DNA, 25 bp, Homo sapien
gaggcagagaaagaacttgttcttc

SEQ ID NO: 29804 - DNA, 25 bp, Homo sapien
agcaatctgaaaagacaaactattc

SEQ ID NO: 29805 - DNA, 25 bp, Homo sapien
ctcagtgatgccagaatgaaagctt

SEQ ID NO: 29806 - DNA, 25 bp, Homo sapien
gcccacagctaacatgatactcagt

SEQ ID NO: 29807 - DNA, 25 bp, Homo sapien
ccaagtcagaggtaagaagtaaaat

SEQ ID NO: 29808 - DNA, 25 bp, Homo sapien
atatggtcctgtatagaaaatgtaa

SEQ ID NO: 29809 - DNA, 25 bp, Homo sapien
acaagaaaaggatgctgctttcatc

SEQ ID NO: 29810 - DNA, 25 bp, Homo sapien
aacagaaggaaattacctcaacatc

SEQ ID NO: 29811 - DNA, 25 bp, Homo sapien
tgaacatagttctgggagtcctagc

SEQ ID NO: 29812 - DNA, 25 bp, Homo sapien
cataaaggcagtatatgaaaagccc

SEQ ID NO: 29813 - DNA, 25 bp, Homo sapien
ctgggagtcctagctggagcaatca

SEQ ID NO: 29814 - DNA, 25 bp, Homo sapien
aacactcaacaaaggaacagaagga

SEQ ID NO: 29815 - DNA, 25 bp, Homo sapien
tgccttcaaggcaaacagcacctac

SEQ ID NO: 29816 - DNA, 25 bp, Homo sapien
ggtgaaccacgaataacaagaagct

SEQ ID NO: 29817 - DNA, 25 bp, Homo sapien
ttgagatccaggaatcattgccttc

SEQ ID NO: 29818 - DNA, 25 bp, Homo sapien
gtgaacatcagtcaacaaggggaaa

SEQ ID NO: 29819 - DNA, 25 bp, Homo sapien
catagctgtaaaggcagagaaatca

SEQ ID NO: 29820 - DNA, 25 bp, Homo sapien
acaaagccaacagagagccttgtaa

SEQ ID NO: 29821 - DNA, 25 bp, Homo sapien
gtacaaacagtatccatgcatggcc

SEQ ID NO: 29822 - DNA, 25 bp, Homo sapien
acaggacgtcctcatgtgattctga

SEQ ID NO: 29823 - DNA, 25 bp, Homo sapien
acaaaggaactgcaggtgaacatca

SEQ ID NO: 29824 - DNA, 25 bp, Homo sapien
gaaaagtgtaatgcatcccgagtac

SEQ ID NO: 29825 - DNA, 25 bp, Homo sapien
gttcagcatcactgagcacagtcct

SEQ ID NO: 29826 - DNA, 25 bp, Homo sapien
agaatcttcaggtgctagatgcagc

SEQ ID NO: 29827 - DNA, 25 bp, Homo sapien
ataccagtcacttcagcatggggca

SEQ ID NO: 29828 - DNA, 25 bp, Homo sapien
tcagctgtgcatgacgcagtcacaa

SEQ ID NO: 29829 - DNA, 25 bp, Homo sapien
attgggtaagtaaacaagctatctc

SEQ ID NO: 29830 - DNA, 25 bp, Homo sapien
tgtgagccaagtattagagtttttt

SEQ ID NO: 29831 - DNA, 25 bp, Homo sapien
tagatgcagcactgaaaaacaactt

SEQ ID NO: 29832 - DNA, 25 bp, Homo sapien
acagtgctaaaggtatttgatgtgc

SEQ ID NO: 29833 - DNA, 25 bp, Homo sapien
ctgtggcatacacagtcagctgtgc

SEQ ID NO: 29834 - DNA, 25 bp, Homo sapien
tcgaacaagctaagagatttgggag

SEQ ID NO: 29835 - DNA, 25 bp, Homo sapien
acctggatcccgttgagacactctt

SEQ ID NO: 29836 - DNA, 25 bp, Homo sapien
taaacatgagaaaacctggatcccg

SEQ ID NO: 29837 - DNA, 25 bp, Homo sapien
ggatgggccacaaagccagactccc

SEQ ID NO: 29838 - DNA, 25 bp, Homo sapien
acgggtgttccacacaagctgcgtt

SEQ ID NO: 29839 - DNA, 25 bp, Homo sapien
gtgtgagactccacgcccagtcttt

SEQ ID NO: 29840 - DNA, 25 bp, Homo sapien
acaaagccagactcccggcagggac

SEQ ID NO: 29841 - DNA, 25 bp, Homo sapien
gcagggacacgggtgttccacacaa

SEQ ID NO: 29842 - DNA, 25 bp, Homo sapien
ctggcgtgaagtggcgcaaccagct

SEQ ID NO: 29843 - DNA, 25 bp, Homo sapien
cctcaccctcttaagtggctgggtc

SEQ ID NO: 29844 - DNA, 25 bp, Homo sapien
caagctgcgttgttggttccctgac

SEQ ID NO: 29845 - DNA, 25 bp, Homo sapien
gttgttggttccctgacgcccttca

SEQ ID NO: 29846 - DNA, 25 bp, Homo sapien
tatagttgtgcaccagcacgcccac

SEQ ID NO: 29847 - DNA, 25 bp, Homo sapien
ctcctgcccagggttgttactgggg

SEQ ID NO: 29848 - DNA, 25 bp, Homo sapien
tgccatgtcaggacacctagaagac

SEQ ID NO: 29849 - DNA, 25 bp, Homo sapien
cgtctttgggaggtgatcatgtcac

SEQ ID NO: 29850 - DNA, 25 bp, Homo sapien
aaagctgctatgataaaatttctcc

SEQ ID NO: 29851 - DNA, 25 bp, Homo sapien
gcctgaataggctaagacaatgata

SEQ ID NO: 29852 - DNA, 25 bp, Homo sapien
tgatagtgtatactttccagcctcc

SEQ ID NO: 29853 - DNA, 25 bp, Homo sapien
aggacacctagaagacaccatctgt

SEQ ID NO: 29854 - DNA, 25 bp, Homo sapien
ttttgtgatggcagcctgaataggc

SEQ ID NO: 29855 - DNA, 25 bp, Homo sapien
aatagaaagtctcaggagaaaaata

SEQ ID NO: 29856 - DNA, 25 bp, Homo sapien
caggctctcagcagataccaaatct

SEQ ID NO: 29857 - DNA, 25 bp, Homo sapien
gatcatgtcacgaggactctaccct

SEQ ID NO: 29858 - DNA, 25 bp, Homo sapien
tttataaacagaggcttcagagagc

SEQ ID NO: 29859 - DNA, 25 bp, Homo sapien
tagggattacatgtggcgttaaccc

SEQ ID NO: 29860 - DNA, 25 bp, Homo sapien
gcccagaaaacctggcgaaaatgga

SEQ ID NO: 29861 - DNA, 25 bp, Homo sapien
aatttgggaagggttattccctgca

SEQ ID NO: 29862 - DNA, 25 bp, Homo sapien
taagtaagagtttaagccattcacc

SEQ ID NO: 29863 - DNA, 25 bp, Homo sapien
cagaaagctttggtgatagttagat

SEQ ID NO: 29864 - DNA, 25 bp, Homo sapien
gttagatgtggaaacagctgtattt

SEQ ID NO: 29865 - DNA, 25 bp, Homo sapien
agaaacaaagagctagttaattccc

SEQ ID NO: 29866 - DNA, 25 bp, Homo sapien
tgtatcttgcgtttcccggtaggga

SEQ ID NO: 29867 - DNA, 25 bp, Homo sapien
gataattctgcagattgaaagccca

SEQ ID NO: 29868 - DNA, 25 bp, Homo sapien
ctgtaactgaaaactaagcaccaac

SEQ ID NO: 29869 - DNA, 25 bp, Homo sapien
aagcaccaaccatcttgacagagtg

SEQ ID NO: 29870 - DNA, 25 bp, Homo sapien
ataggcggccttgtgacgtatgtct

SEQ ID NO: 29871 - DNA, 25 bp, Homo sapien
tattgtgacatgtagctggaccgaa

SEQ ID NO: 29872 - DNA, 25 bp, Homo sapien
ttactggaccaagcacctaggtgat

SEQ ID NO: 29873 - DNA, 25 bp, Homo sapien
tggcttggtccaacgcctaggtgat

SEQ ID NO: 29874 - DNA, 25 bp, Homo sapien
cacagggaaaatagtgacacatctg

SEQ ID NO: 29875 - DNA, 25 bp, Homo sapien
accgaacacctacaggactggatca

SEQ ID NO: 29876 - DNA, 25 bp, Homo sapien
cctaggtgatgtggctctgacaaac

SEQ ID NO: 29877 - DNA, 25 bp, Homo sapien
atgccaaagaagaggattgtgacat

SEQ ID NO: 29878 - DNA, 25 bp, Homo sapien
gtacccaggagccattgtaatccat

SEQ ID NO: 29879 - DNA, 25 bp, Homo sapien
caaacgagaaattgtgatgtaccac

SEQ ID NO: 29880 - DNA, 25 bp, Homo sapien
cctctcgagggaattttgacatatt

SEQ ID NO: 29881 - DNA, 25 bp, Homo sapien
tacagaaaaccttgtaggcaggacc

SEQ ID NO: 29882 - DNA, 25 bp, Homo sapien
ccaaggcagaagaatatcacctgtc

SEQ ID NO: 29883 - DNA, 25 bp, Homo sapien
tttctgagcatagttggcaaggtcc

SEQ ID NO: 29884 - DNA, 25 bp, Homo sapien
ggcaaggtccagattacagagtccc

SEQ ID NO: 29885 - DNA, 25 bp, Homo sapien
tgctgggctctgttggaacactttc

SEQ ID NO: 29886 - DNA, 25 bp, Homo sapien
cagaaattggtagaagaggattatc

SEQ ID NO: 29887 - DNA, 25 bp, Homo sapien
agggtctagatcagagagtcttcac

SEQ ID NO: 29888 - DNA, 25 bp, Homo sapien
tcacccaggtatcagactcagcaac

SEQ ID NO: 29889 - DNA, 25 bp, Homo sapien
acaaagttgactggtgcatagatat

SEQ ID NO: 29890 - DNA, 25 bp, Homo sapien
tttgtagagtgtgcataaaagtcac

SEQ ID NO: 29891 - DNA, 25 bp, Homo sapien
gaccaggccagagagttacatcacc

SEQ ID NO: 29892 - DNA, 25 bp, Homo sapien
tttgccttgtgatgcagcctggagc

SEQ ID NO: 29893 - DNA, 25 bp, Homo sapien
tcgcagggcctcatgagcactaaac

SEQ ID NO: 29894 - DNA, 25 bp, Homo sapien
actgggcagctaggcttcccgcatt

SEQ ID NO: 29895 - DNA, 25 bp, Homo sapien
ggcaggcccagctcaacgtcaaaag

SEQ ID NO: 29896 - DNA, 25 bp, Homo sapien
ctgtctccatgggaacaaggctcct

SEQ ID NO: 29897 - DNA, 25 bp, Homo sapien
ctaaccatagcacggcaggtgttgc

SEQ ID NO: 29898 - DNA, 25 bp, Homo sapien
tcctgctcgggtgctttgcatgctc

SEQ ID NO: 29899 - DNA, 25 bp, Homo sapien
actaaacgagctttgccctgatcag

SEQ ID NO: 29900 - DNA, 25 bp, Homo sapien
acgtcaaaagcaccctggagccttt

SEQ ID NO: 29901 - DNA, 25 bp, Homo sapien
acttcagagtgagttggagtccttt

SEQ ID NO: 29902 - DNA, 25 bp, Homo sapien
tggctccctgcaggtacacttcaga

SEQ ID NO: 29903 - DNA, 25 bp, Homo sapien
tcaagaggtcaaaattagggcatca

SEQ ID NO: 29904 - DNA, 25 bp, Homo sapien
atgccgggcattctgctaaagcatc

SEQ ID NO: 29905 - DNA, 25 bp, Homo sapien
gagatccaggctgcactctggtgtt

SEQ ID NO: 29906 - DNA, 25 bp, Homo sapien
atagaatctacgtataaaggcatgt

SEQ ID NO: 29907 - DNA, 25 bp, Homo sapien
tctccatggagatgctaggattctc

SEQ ID NO: 29908 - DNA, 25 bp, Homo sapien
ggtgttacaatgatagtagagggtt

SEQ ID NO: 29909 - DNA, 25 bp, Homo sapien
tataccacgtctgcagcctagaaac

SEQ ID NO: 29910 - DNA, 25 bp, Homo sapien
cctagaaacccaggcgagagatcca

SEQ ID NO: 29911 - DNA, 25 bp, Homo sapien
caaaagggaagtatttcaagaggtc

SEQ ID NO: 29912 - DNA, 25 bp, Homo sapien
agtcctatttatggtgtgcccgcac

SEQ ID NO: 29913 - DNA, 25 bp, Homo sapien
cacgcgtggtaatgcttggctttta

SEQ ID NO: 29914 - DNA, 25 bp, Homo sapien
ggtgtctcagagattcgcccttcca

SEQ ID NO: 29915 - DNA, 25 bp, Homo sapien
agaggtctagtcagataaaaaggtc

SEQ ID NO: 29916 - DNA, 25 bp, Homo sapien
tcgataaaaacccttgcagagcaca

SEQ ID NO: 29917 - DNA, 25 bp, Homo sapien
agcacagggcagctctagtttccat

SEQ ID NO: 29918 - DNA, 25 bp, Homo sapien
ccattcctaaagaaggcagaaggct

SEQ ID NO: 29919 - DNA, 25 bp, Homo sapien
tgggatgtaatggaacgcagttaaa

SEQ ID NO: 29920 - DNA, 25 bp, Homo sapien
ctaagatacagtgtgtagaccaggc

SEQ ID NO: 29921 - DNA, 25 bp, Homo sapien
caggtaagtgcctcagaaaaaagac

SEQ ID NO: 29922 - DNA, 25 bp, Homo sapien
agtataatggattggcaaaaggctc

SEQ ID NO: 29923 - DNA, 25 bp, Homo sapien
catgcctgtggacatttaaaacacc

SEQ ID NO: 29924 - DNA, 25 bp, Homo sapien
taagggcctaggaaagaaactgatg

SEQ ID NO: 29925 - DNA, 25 bp, Homo sapien
ataacagagctgtgtcatagacaaa

SEQ ID NO: 29926 - DNA, 25 bp, Homo sapien
ttgacatgtatcttaagcaccatcc

SEQ ID NO: 29927 - DNA, 25 bp, Homo sapien
tgtcatagacaaatgcaataggcat

SEQ ID NO: 29928 - DNA, 25 bp, Homo sapien
gcgtccggcctggatgcctctttta

SEQ ID NO: 29929 - DNA, 25 bp, Homo sapien
ttattcttagctgtgcagataacac

SEQ ID NO: 29930 - DNA, 25 bp, Homo sapien
ttctggcctggaggtgttcataaca

SEQ ID NO: 29931 - DNA, 25 bp, Homo sapien
aagtttatggacactcttgtttctc

SEQ ID NO: 29932 - DNA, 25 bp, Homo sapien
ttactctccagtgacataactttta

SEQ ID NO: 29933 - DNA, 25 bp, Homo sapien
gataacacaagccttctggcctgga

SEQ ID NO: 29934 - DNA, 25 bp, Homo sapien
tagctgtgcagataacacaagcctt

SEQ ID NO: 29935 - DNA, 25 bp, Homo sapien
aagggaccaatgtcctgaatatacc

SEQ ID NO: 29936 - DNA, 25 bp, Homo sapien
attaggagtggttaacggttactga

SEQ ID NO: 29937 - DNA, 25 bp, Homo sapien
tgtttagcaaaaacgagtggatcgt

SEQ ID NO: 29938 - DNA, 25 bp, Homo sapien
aactgaggtttgtagaaaattgccc

SEQ ID NO: 29939 - DNA, 25 bp, Homo sapien
attatgaagaggagtaattaggagt

SEQ ID NO: 29940 - DNA, 25 bp, Homo sapien
caagttcacttaggcagagagcact

SEQ ID NO: 29941 - DNA, 25 bp, Homo sapien
tgagagccgcttcatgctaaggact

SEQ ID NO: 29942 - DNA, 25 bp, Homo sapien
gagagcactgccctgattccgaacc

SEQ ID NO: 29943 - DNA, 25 bp, Homo sapien
tggcgaggccatgagtaattctact

SEQ ID NO: 29944 - DNA, 25 bp, Homo sapien
ttccagataggtcgatatcgcccat

SEQ ID NO: 29945 - DNA, 25 bp, Homo sapien
gctactttacgggtgcagaaactga

SEQ ID NO: 29946 - DNA, 25 bp, Homo sapien
agctacctgggaacgtgaaattatt

SEQ ID NO: 29947 - DNA, 25 bp, Homo sapien
agagccgtctcaggcctgctgcatt

SEQ ID NO: 29948 - DNA, 25 bp, Homo sapien
atgatgaccctgaccttccgcgtgg

SEQ ID NO: 29949 - DNA, 25 bp, Homo sapien
acaagcagtttaggctcagcgagcc

SEQ ID NO: 29950 - DNA, 25 bp, Homo sapien
actcacttaggggattctgggagcc

SEQ ID NO: 29951 - DNA, 25 bp, Homo sapien
ttgaccttgttggaaccagggcacc

SEQ ID NO: 29952 - DNA, 25 bp, Homo sapien
gagagccaagagtgcgcttgacctt

SEQ ID NO: 29953 - DNA, 25 bp, Homo sapien
caggctatgacagtacatgggaact

SEQ ID NO: 29954 - DNA, 25 bp, Homo sapien
ccagaccttgccaggagagccgtct

SEQ ID NO: 29955 - DNA, 25 bp, Homo sapien
gaactgtccaccaggaggttcctca

SEQ ID NO: 29956 - DNA, 25 bp, Homo sapien
aaccacagtgattgcacaagcagtt

SEQ ID NO: 29957 - DNA, 25 bp, Homo sapien
ggtgttgcacagaaaccacagtgat

SEQ ID NO: 29958 - DNA, 25 bp, Homo sapien
tgcaaagcaccaagctttaggggtg

SEQ ID NO: 29959 - DNA, 25 bp, Homo sapien
atacacactataaatgcaaagcacc

SEQ ID NO: 29960 - DNA, 25 bp, Homo sapien
gagggcaggttgaacacataattct

SEQ ID NO: 29961 - DNA, 25 bp, Homo sapien
atgcacattgactgtagttccattc

SEQ ID NO: 29962 - DNA, 25 bp, Homo sapien
aaactgttgattgctggacagctcc

SEQ ID NO: 29963 - DNA, 25 bp, Homo sapien
cttgggacggacttctaaaacatct

SEQ ID NO: 29964 - DNA, 25 bp, Homo sapien
taggtcatgaagttctactggtaac

SEQ ID NO: 29965 - DNA, 25 bp, Homo sapien
gtaagactatccacttgggacggac

SEQ ID NO: 29966 - DNA, 25 bp, Homo sapien
cagttactgaggtggttatgaacaa

SEQ ID NO: 29967 - DNA, 25 bp, Homo sapien
tcttagctgcactggggccttttac

SEQ ID NO: 29968 - DNA, 25 bp, Homo sapien
tacagaatgagtgtaaaggcacggt

SEQ ID NO: 29969 - DNA, 25 bp, Homo sapien
tttctagagagaacatacagtttta

SEQ ID NO: 29970 - DNA, 25 bp, Homo sapien
aatggaagacataacaacatgtatt

SEQ ID NO: 29971 - DNA, 25 bp, Homo sapien
aaaggctttcatgtggaaagggaac

SEQ ID NO: 29972 - DNA, 25 bp, Homo sapien
atcaatgggcaaaaatggaagacat

SEQ ID NO: 29973 - DNA, 25 bp, Homo sapien
tcagttgagccctagaagtagaggc

SEQ ID NO: 29974 - DNA, 25 bp, Homo sapien
ggaaagggaactgtgcttgtttcat

SEQ ID NO: 29975 - DNA, 25 bp, Homo sapien
ctgggttctgagaattctctgaatt

SEQ ID NO: 29976 - DNA, 25 bp, Homo sapien
ttgtttcatgcacatcaatgggcaa

SEQ ID NO: 29977 - DNA, 25 bp, Homo sapien
tacagttttaggctgagtgcagttg

SEQ ID NO: 29978 - DNA, 25 bp, Homo sapien
tgcacagtatgtgatatggtacatc

SEQ ID NO: 29979 - DNA, 25 bp, Homo sapien
ctgaaattctgagtacaataagagt

SEQ ID NO: 29980 - DNA, 25 bp, Homo sapien
gtctgcagccagagttccaagcatc

SEQ ID NO: 29981 - DNA, 25 bp, Homo sapien
ctccatcagaatgcagtgagcagta

SEQ ID NO: 29982 - DNA, 25 bp, Homo sapien
gcccagagacaaaggaatagtggtt

SEQ ID NO: 29983 - DNA, 25 bp, Homo sapien
atgacccagtgcctaacccgttgat

SEQ ID NO: 29984 - DNA, 25 bp, Homo sapien
acttgattgagcaacagagaaacaa

SEQ ID NO: 29985 - DNA, 25 bp, Homo sapien
tatgacccaacatcagtctgcagcc

SEQ ID NO: 29986 - DNA, 25 bp, Homo sapien
ataatgggtaataaaggcaagctat

SEQ ID NO: 29987 - DNA, 25 bp, Homo sapien
tcagctcaagaaaatatgacccagt

SEQ ID NO: 29988 - DNA, 25 bp, Homo sapien
aaatggtctgaattaagcctggaaa

SEQ ID NO: 29989 - DNA, 25 bp, Homo sapien
ttgcctctaagagcagaagggtgca

SEQ ID NO: 29990 - DNA, 25 bp, Homo sapien
agagaaacaatgcatgaatccacac

SEQ ID NO: 29991 - DNA, 25 bp, Homo sapien
ctgacattgtaaggtccataaagac

SEQ ID NO: 29992 - DNA, 25 bp, Homo sapien
atcttgaaaatgactggactgggta

SEQ ID NO: 29993 - DNA, 25 bp, Homo sapien
aacaattgtggtagatgtgtggcaa

SEQ ID NO: 29994 - DNA, 25 bp, Homo sapien
atatgcagggacttgatgggattca

SEQ ID NO: 29995 - DNA, 25 bp, Homo sapien
ccataaagacaacaggtatagtaac

SEQ ID NO: 29996 - DNA, 25 bp, Homo sapien
caaaatgtcaggaaacgatagatgc

SEQ ID NO: 29997 - DNA, 25 bp, Homo sapien
atacctaaaggaatataagtttgcc

SEQ ID NO: 29998 - DNA, 25 bp, Homo sapien
gatgggattcatcacaaccttgcaa

SEQ ID NO: 29999 - DNA, 25 bp, Homo sapien
acaaaggttttcatatgcagggact

SEQ ID NO: 30000 - DNA, 25 bp, Homo sapien
gtgacagatcaacagataaatacat

SEQ ID NO: 30001 - DNA, 25 bp, Homo sapien
atttgtggaaagaatgtgacagatc

SEQ ID NO: 30002 - DNA, 25 bp, Homo sapien
catgagccactgtgaaattatgtac

SEQ ID NO: 30003 - DNA, 25 bp, Homo sapien
tatttgttcatttgtgttaagccac

SEQ ID NO: 30004 - DNA, 25 bp, Homo sapien
aactgcttgctgacaaaggatatac

SEQ ID NO: 30005 - DNA, 25 bp, Homo sapien
ccagacattctagagtaaccggaac

SEQ ID NO: 30006 - DNA, 25 bp, Homo sapien
ctagagtaaccggaactagtatttg

SEQ ID NO: 30007 - DNA, 25 bp, Homo sapien
gccttccaggctccagcaaattctc

SEQ ID NO: 30008 - DNA, 25 bp, Homo sapien
ttaggatccgttaaaaactgcttgc

SEQ ID NO: 30009 - DNA, 25 bp, Homo sapien
gttccatcatattacccaggcaggt

SEQ ID NO: 30010 - DNA, 25 bp, Homo sapien
attaacctcgtaaacattcttgaaa

SEQ ID NO: 30011 - DNA, 25 bp, Homo sapien
ctgacaaaggatataccagacattc

SEQ ID NO: 30012 - DNA, 25 bp, Homo sapien
caaacttccgcatattaacctcgta

SEQ ID NO: 30013 - DNA, 25 bp, Homo sapien
tgagccattgcgagcggcgagtcaa

SEQ ID NO: 30014 - DNA, 25 bp, Homo sapien
ctggtctggaactttggaaatcctg

SEQ ID NO: 30015 - DNA, 25 bp, Homo sapien
gcgagcggcgagtcaaccactattc

SEQ ID NO: 30016 - DNA, 25 bp, Homo sapien
tcttcacttatgtggggcttctctt

SEQ ID NO: 30017 - DNA, 25 bp, Homo sapien
atgtccgtgcatattatttggcaat

SEQ ID NO: 30018 - DNA, 25 bp, Homo sapien
accttacccagcaccgatgacttta

SEQ ID NO: 30019 - DNA, 25 bp, Homo sapien
tcaaagggccttgcaaacagaagta

SEQ ID NO: 30020 - DNA, 25 bp, Homo sapien
agacagctgttcaaagggccttgca

SEQ ID NO: 30021 - DNA, 25 bp, Homo sapien
tcaaccactattcgacgcggggctc

SEQ ID NO: 30022 - DNA, 25 bp, Homo sapien
ttatacacgttagtgaaagaaataa

SEQ ID NO: 30023 - DNA, 25 bp, Homo sapien
tgggagagatttgcatcagtggata

SEQ ID NO: 30024 - DNA, 25 bp, Homo sapien
tgactcccagctggaatcttttaac

SEQ ID NO: 30025 - DNA, 25 bp, Homo sapien
tacacggtgttcctgactcccagct

SEQ ID NO: 30026 - DNA, 25 bp, Homo sapien
cataaccgtaggcttacctacacgg

SEQ ID NO: 30027 - DNA, 25 bp, Homo sapien
cacttaaagccaggtggatcttatc

SEQ ID NO: 30028 - DNA, 25 bp, Homo sapien
accttttctttacacgtgcgctctc

SEQ ID NO: 30029 - DNA, 25 bp, Homo sapien
cccaggtagcaacttgtttcaaagc

SEQ ID NO: 30030 - DNA, 25 bp, Homo sapien
taggcttacctacacggtgttcctg

SEQ ID NO: 30031 - DNA, 25 bp, Homo sapien
caccctcatgcaaagtgcacctttt

SEQ ID NO: 30032 - DNA, 25 bp, Homo sapien
tcaaagcagatatatgccaggtacc

SEQ ID NO: 30033 - DNA, 25 bp, Homo sapien
ccctttggaggtcttgctttggaaa

SEQ ID NO: 30034 - DNA, 25 bp, Homo sapien
agctggaatcttttaaccaaaggcc

SEQ ID NO: 30035 - DNA, 25 bp, Homo sapien
cttctatgacccaaagatgagatgc

SEQ ID NO: 30036 - DNA, 25 bp, Homo sapien
tagcttctatgacccaaagatgaga

SEQ ID NO: 30037 - DNA, 25 bp, Homo sapien
ttctatgacccaaagatgagatgcc

SEQ ID NO: 30038 - DNA, 25 bp, Homo sapien
taaataaataaacctgccaatagct

SEQ ID NO: 30039 - DNA, 25 bp, Homo sapien
tgccaatagcttctatgacccaaag

SEQ ID NO: 30040 - DNA, 25 bp, Homo sapien
tctatgacccaaagatgagatgccc

SEQ ID NO: 30041 - DNA, 25 bp, Homo sapien
aatagcttctatgacccaaagatga

SEQ ID NO: 30042 - DNA, 25 bp, Homo sapien
gcttctatgacccaaagatgagatg

SEQ ID NO: 30043 - DNA, 25 bp, Homo sapien
aaacctgccaatagcttctatgacc

SEQ ID NO: 30044 - DNA, 25 bp, Homo sapien
aataaacctgccaatagcttctatg

SEQ ID NO: 30045 - DNA, 25 bp, Homo sapien
caaaagttagccaggggctgggcac

SEQ ID NO: 30046 - DNA, 25 bp, Homo sapien
ttaaagatggttgcaagggaaattc

SEQ ID NO: 30047 - DNA, 25 bp, Homo sapien
ataccaggaattccatggggaacaa

SEQ ID NO: 30048 - DNA, 25 bp, Homo sapien
acagcgaatgagagaatgagtgaat

SEQ ID NO: 30049 - DNA, 25 bp, Homo sapien
catatgctgaaataggccagctctt

SEQ ID NO: 30050 - DNA, 25 bp, Homo sapien
tcgacatgcagggtaaggattatat

SEQ ID NO: 30051 - DNA, 25 bp, Homo sapien
tggggaacaatacaagcaaagtcct

SEQ ID NO: 30052 - DNA, 25 bp, Homo sapien
atgagtgaatggcttagatcaggta

SEQ ID NO: 30053 - DNA, 25 bp, Homo sapien
accgactcaggagaaataaggtgat

SEQ ID NO: 30054 - DNA, 25 bp, Homo sapien
atatgactaatggaggtagagaatg

SEQ ID NO: 30055 - DNA, 25 bp, Homo sapien
gatcaggtaatagtgaacagagtga

SEQ ID NO: 30056 - DNA, 25 bp, Homo sapien
ctatgtgactagtgagactctgact

SEQ ID NO: 30057 - DNA, 25 bp, Homo sapien
tcaaagggaatttcatgcatgtcac

SEQ ID NO: 30058 - DNA, 25 bp, Homo sapien
acagagttgccttagaagcagtagc

SEQ ID NO: 30059 - DNA, 25 bp, Homo sapien
agtcacttgggtggccagatcatta

SEQ ID NO: 30060 - DNA, 25 bp, Homo sapien
gtccgactgtcccaagcatcaaact

SEQ ID NO: 30061 - DNA, 25 bp, Homo sapien
ttcctgacagagaatcttgtgagtt

SEQ ID NO: 30062 - DNA, 25 bp, Homo sapien
catgtcactggaactcagcagggat

SEQ ID NO: 30063 - DNA, 25 bp, Homo sapien
acctacctggcaataatggacaaat

SEQ ID NO: 30064 - DNA, 25 bp, Homo sapien
tagatttcagccactcaaggggatg

SEQ ID NO: 30065 - DNA, 25 bp, Homo sapien
caaggggatggcagcccaactattt

SEQ ID NO: 30066 - DNA, 25 bp, Homo sapien
gtagctactgtgaacaattgcctgc

SEQ ID NO: 30067 - DNA, 25 bp, Homo sapien
ttccaggatgtccaaggccctaatt

SEQ ID NO: 30068 - DNA, 25 bp, Homo sapien
tagactcaactacgatggcccaatg

SEQ ID NO: 30069 - DNA, 25 bp, Homo sapien
gcagaaagtgcaggattgcaaaact

SEQ ID NO: 30070 - DNA, 25 bp, Homo sapien
aacagctttcagtgtctgggcagca

SEQ ID NO: 30071 - DNA, 25 bp, Homo sapien
gtgctgaggaggtccatccacacca

SEQ ID NO: 30072 - DNA, 25 bp, Homo sapien
acaaagaactgtcatggccaatagc

SEQ ID NO: 30073 - DNA, 25 bp, Homo sapien
attaagcactgtactagggaccata

SEQ ID NO: 30074 - DNA, 25 bp, Homo sapien
tatgcaactggccaaaatagaagca

SEQ ID NO: 30075 - DNA, 25 bp, Homo sapien
ctagggaccataaaagtgcataatt

SEQ ID NO: 30076 - DNA, 25 bp, Homo sapien
gaaggggaacagaaatgtaagatta

SEQ ID NO: 30077 - DNA, 25 bp, Homo sapien
tggaatggacaaaatatatgcggat

SEQ ID NO: 30078 - DNA, 25 bp, Homo sapien
tacgatggcccaatgtctaacagac

SEQ ID NO: 30079 - DNA, 25 bp, Homo sapien
gtttatatccacaaacagttagctt

SEQ ID NO: 30080 - DNA, 25 bp, Homo sapien
accttgtaggtctttcttatcatat

SEQ ID NO: 30081 - DNA, 25 bp, Homo sapien
gtgagcttatttatgcaaacaattc

SEQ ID NO: 30082 - DNA, 25 bp, Homo sapien
ttgttttacttatcccagctgcttt

SEQ ID NO: 30083 - DNA, 25 bp, Homo sapien
tatatccacaaacagttagcttttt

SEQ ID NO: 30084 - DNA, 25 bp, Homo sapien
tttatcctgacatttatgcctttta

SEQ ID NO: 30085 - DNA, 25 bp, Homo sapien
atgcaaacaattcaccttgtaggtc

SEQ ID NO: 30086 - DNA, 25 bp, Homo sapien
cctctgtgagcttatttatgcaaac

SEQ ID NO: 30087 - DNA, 25 bp, Homo sapien
ccagcctctgtgagcttatttatgc

SEQ ID NO: 30088 - DNA, 25 bp, Homo sapien
taggtaattattgatgttgtttgtt

SEQ ID NO: 30089 - DNA, 25 bp, Homo sapien
tttaattggcatttagtctattgat

SEQ ID NO: 30090 - DNA, 25 bp, Homo sapien
ccctgagttaatggtgactgactta

SEQ ID NO: 30091 - DNA, 25 bp, Homo sapien
tgccctagttttaccagctggtggt

SEQ ID NO: 30092 - DNA, 25 bp, Homo sapien
tcttcagggcatgtattgctgggtc

SEQ ID NO: 30093 - DNA, 25 bp, Homo sapien
gaagggctccataccacagctctgc

SEQ ID NO: 30094 - DNA, 25 bp, Homo sapien
gatgatgggtttacagggatataac

SEQ ID NO: 30095 - DNA, 25 bp, Homo sapien
tcctttctgtggagaacggcgtctt

SEQ ID NO: 30096 - DNA, 25 bp, Homo sapien
aatcctcacaaaaggcttggaaggg

SEQ ID NO: 30097 - DNA, 25 bp, Homo sapien
gtggtaaaccctggtgtcagcacca

SEQ ID NO: 30098 - DNA, 25 bp, Homo sapien
gcaccagcattcctggggatccaga

SEQ ID NO: 30099 - DNA, 25 bp, Homo sapien
gacttgatactttacgaagggctcc

SEQ ID NO: 30100 - DNA, 25 bp, Homo sapien
atgtattgctgggtctgtcccgcag

SEQ ID NO: 30101 - DNA, 25 bp, Homo sapien
caaattgcaatcaggagatggtgcc

SEQ ID NO: 30102 - DNA, 25 bp, Homo sapien
tgaagggctgacatcaacctcccta

SEQ ID NO: 30103 - DNA, 25 bp, Homo sapien
agctccttaaaaggaaggcagtggt

SEQ ID NO: 30104 - DNA, 25 bp, Homo sapien
tgaacctgttgccatgcgctgcctc

SEQ ID NO: 30105 - DNA, 25 bp, Homo sapien
gtggaaggaattataatgaagggat

SEQ ID NO: 30106 - DNA, 25 bp, Homo sapien
ctgagaagattagggtgcttttcac

SEQ ID NO: 30107 - DNA, 25 bp, Homo sapien
catccagctgagagtgtgtctttag

SEQ ID NO: 30108 - DNA, 25 bp, Homo sapien
aaaactgagacctccctgaagggct

SEQ ID NO: 30109 - DNA, 25 bp, Homo sapien
tccctataggaaggacccaccttga

SEQ ID NO: 30110 - DNA, 25 bp, Homo sapien
ctaggtcaaaaggtaaatgtctatc

SEQ ID NO: 30111 - DNA, 25 bp, Homo sapien
ggatggattcgtagaagtgagattt

SEQ ID NO: 30112 - DNA, 25 bp, Homo sapien
aaatatcagttgcaaagaaagaaat

SEQ ID NO: 30113 - DNA, 25 bp, Homo sapien
agtaggtgtggccactaatctatca

SEQ ID NO: 30114 - DNA, 25 bp, Homo sapien
atgtataaagctaatccgtagagtt

SEQ ID NO: 30115 - DNA, 25 bp, Homo sapien
aatttgaaagtaaggagtatcttta

SEQ ID NO: 30116 - DNA, 25 bp, Homo sapien
taaaaataggttgtgagtaggtgtg

SEQ ID NO: 30117 - DNA, 25 bp, Homo sapien
cttaggaagttatgataattgatgc

SEQ ID NO: 30118 - DNA, 25 bp, Homo sapien
aatgagctagagttctgtgtgttac

SEQ ID NO: 30119 - DNA, 25 bp, Homo sapien
aaatgaagagatatttgcccttttc

SEQ ID NO: 30120 - DNA, 25 bp, Homo sapien
aaggctcagcaaatatggagaattt

SEQ ID NO: 30121 - DNA, 25 bp, Homo sapien
tccgtagagttgaatgagctagagt

SEQ ID NO: 30122 - DNA, 25 bp, Homo sapien
tttggcataaaagaattgttgaatt

SEQ ID NO: 30123 - DNA, 25 bp, Homo sapien
gtgctctatagggtttcagtgatcc

SEQ ID NO: 30124 - DNA, 25 bp, Homo sapien
ctcaggcaggtcttaaattcccggc

SEQ ID NO: 30125 - DNA, 25 bp, Homo sapien
tggatgtggctcattgcacctggcc

SEQ ID NO: 30126 - DNA, 25 bp, Homo sapien
tagatctaatgtgttggtcagagtt

SEQ ID NO: 30127 - DNA, 25 bp, Homo sapien
tcagtgatcccatgccacaaatcta

SEQ ID NO: 30128 - DNA, 25 bp, Homo sapien
ctcttgcttcgttgctcaggcaggt

SEQ ID NO: 30129 - DNA, 25 bp, Homo sapien
agtgcagttacaggatcattagctc

SEQ ID NO: 30130 - DNA, 25 bp, Homo sapien
tcttgtagagatgcgctcttgcttc

SEQ ID NO: 30131 - DNA, 25 bp, Homo sapien
cacaagatttggtaacctaatgggt

SEQ ID NO: 30132 - DNA, 25 bp, Homo sapien
aattcccggcctaatgttatccttc

SEQ ID NO: 30133 - DNA, 25 bp, Homo sapien
cactgggattatggatgtggctcat

SEQ ID NO: 30134 - DNA, 25 bp, Homo sapien
gcccagcttgaaacataataatttt

SEQ ID NO: 30135 - DNA, 25 bp, Homo sapien
atactaataaatggatacagcacat

SEQ ID NO: 30136 - DNA, 25 bp, Homo sapien
ccttccagaggaattttaagcccat

SEQ ID NO: 30137 - DNA, 25 bp, Homo sapien
tttaagcccatgtccaaacattctg

SEQ ID NO: 30138 - DNA, 25 bp, Homo sapien
gtaagtcaatgaaataataaggcac

SEQ ID NO: 30139 - DNA, 25 bp, Homo sapien
ttaggataagatttgaattaagtgc

SEQ ID NO: 30140 - DNA, 25 bp, Homo sapien
taatgatgcgtgacttaggataaga

SEQ ID NO: 30141 - DNA, 25 bp, Homo sapien
gtagaagcattcaatagtgtgtcat

SEQ ID NO: 30142 - DNA, 25 bp, Homo sapien
cctttaatatttggcagtaagtcaa

SEQ ID NO: 30143 - DNA, 25 bp, Homo sapien
atggttctttcagttcctcaggctt

SEQ ID NO: 30144 - DNA, 25 bp, Homo sapien
atgaaacaattaagtagaagcattc

SEQ ID NO: 30145 - DNA, 25 bp, Homo sapien
ccacagtctcatagggagtaaggga

SEQ ID NO: 30146 - DNA, 25 bp, Homo sapien
ggccaagtgacaggtccacagtctc

SEQ ID NO: 30147 - DNA, 25 bp, Homo sapien
accagtaaatacatatgcaagaaac

SEQ ID NO: 30148 - DNA, 25 bp, Homo sapien
ccaaggggaacactagaggtcattt

SEQ ID NO: 30149 - DNA, 25 bp, Homo sapien
cagtgaaatcttgatgctgaacatc

SEQ ID NO: 30150 - DNA, 25 bp, Homo sapien
ctttcctatgtatatgtggtcactt

SEQ ID NO: 30151 - DNA, 25 bp, Homo sapien
gtaagggagtaatggacaaagatta

SEQ ID NO: 30152 - DNA, 25 bp, Homo sapien
acaaagattagaaaccgcagctctc

SEQ ID NO: 30153 - DNA, 25 bp, Homo sapien
gtagaggaagcctttcatgctgtac

SEQ ID NO: 30154 - DNA, 25 bp, Homo sapien
ttttgtgctgtggaccagtaaatac

SEQ ID NO: 30155 - DNA, 25 bp, Homo sapien
agaaaactgaagaccagagaggcca

SEQ ID NO: 30156 - DNA, 25 bp, Homo sapien
atggctcaactggttctctgctcca

SEQ ID NO: 30157 - DNA, 25 bp, Homo sapien
cttggctaatgtaggcttatgaata

SEQ ID NO: 30158 - DNA, 25 bp, Homo sapien
aggccctagggatggattcacttcc

SEQ ID NO: 30159 - DNA, 25 bp, Homo sapien
atgctggatcttagtagggatgatt

SEQ ID NO: 30160 - DNA, 25 bp, Homo sapien
tgaggaaaaggatcatctactgttt

SEQ ID NO: 30161 - DNA, 25 bp, Homo sapien
ctgctccaggttccacaaggtcaaa

SEQ ID NO: 30162 - DNA, 25 bp, Homo sapien
cagcaactaggggtgcttgcatttc

SEQ ID NO: 30163 - DNA, 25 bp, Homo sapien
cagcctgagcaatacacatgtattc

SEQ ID NO: 30164 - DNA, 25 bp, Homo sapien
ttcctttccagaggccctagggatg

SEQ ID NO: 30165 - DNA, 25 bp, Homo sapien
agaagtctagacactgcatggctca

SEQ ID NO: 30166 - DNA, 25 bp, Homo sapien
agccaggagctgttctcagcaacta

SEQ ID NO: 30167 - DNA, 25 bp, Homo sapien
ttacagacatgctactatgctcagc

SEQ ID NO: 30168 - DNA, 25 bp, Homo sapien
tcacagggtttaaatgacatctatt

SEQ ID NO: 30169 - DNA, 25 bp, Homo sapien
cctgggctcaaaggacactcctatg

SEQ ID NO: 30170 - DNA, 25 bp, Homo sapien
tttgataaatgacatgcccaggtaa

SEQ ID NO: 30171 - DNA, 25 bp, Homo sapien
acatgcccaggtaatgatggcccta

SEQ ID NO: 30172 - DNA, 25 bp, Homo sapien
ttctaacagtgcagcataattgctt

SEQ ID NO: 30173 - DNA, 25 bp, Homo sapien
cacggtcagaaatcacagggtttaa

SEQ ID NO: 30174 - DNA, 25 bp, Homo sapien
tgagccaccacgcacggtcagaaat

SEQ ID NO: 30175 - DNA, 25 bp, Homo sapien
attcacagatcttaagtacacagtt

SEQ ID NO: 30176 - DNA, 25 bp, Homo sapien
tgttaacctcccaagcagttaggat

SEQ ID NO: 30177 - DNA, 25 bp, Homo sapien
gtaatgatggccctaatcaagacag

SEQ ID NO: 30178 - DNA, 25 bp, Homo sapien
ggagactcagtagttcaagttgcaa

SEQ ID NO: 30179 - DNA, 25 bp, Homo sapien
tccctttcgggtaatgatctgattc

SEQ ID NO: 30180 - DNA, 25 bp, Homo sapien
aattgtaatgaggtaaggactcagg

SEQ ID NO: 30181 - DNA, 25 bp, Homo sapien
aggactcaggagtaaactacctttc

SEQ ID NO: 30182 - DNA, 25 bp, Homo sapien
tttaggctaatatgctgtcggatac

SEQ ID NO: 30183 - DNA, 25 bp, Homo sapien
aagtagagatttattgccaacccag

SEQ ID NO: 30184 - DNA, 25 bp, Homo sapien
acacaggtctgaaacatctatggag

SEQ ID NO: 30185 - DNA, 25 bp, Homo sapien
tcatcctctgagaaaagacaaaaac

SEQ ID NO: 30186 - DNA, 25 bp, Homo sapien
ttatgagccagtcagacacaggtct

SEQ ID NO: 30187 - DNA, 25 bp, Homo sapien
aattaaatgagaagagcaattctgg

SEQ ID NO: 30188 - DNA, 25 bp, Homo sapien
aattctggggaatgttgtaaacttc

SEQ ID NO: 30189 - DNA, 25 bp, Homo sapien
atggacgccatgagccacatctgtc

SEQ ID NO: 30190 - DNA, 25 bp, Homo sapien
atctaagcaagtttatcagtgtctg

SEQ ID NO: 30191 - DNA, 25 bp, Homo sapien
ctcgagcctgcaggggaaacatgca

SEQ ID NO: 30192 - DNA, 25 bp, Homo sapien
atcagtgtctgggaatgttcagctt

SEQ ID NO: 30193 - DNA, 25 bp, Homo sapien
ctacaaccagatcaacacggccaag

SEQ ID NO: 30194 - DNA, 25 bp, Homo sapien
ggtggtcaaggcacctgtgcttctc

SEQ ID NO: 30195 - DNA, 25 bp, Homo sapien
aggagtacatagaggactacaacca

SEQ ID NO: 30196 - DNA, 25 bp, Homo sapien
atcctcgccttggtgcacagatgat

SEQ ID NO: 30197 - DNA, 25 bp, Homo sapien
atgatgcaggtgatagaggagtaca

SEQ ID NO: 30198 - DNA, 25 bp, Homo sapien
aagctggtcctcttcatggacgcca

SEQ ID NO: 30199 - DNA, 25 bp, Homo sapien
ttctcagtcaggacagagaagaaag

SEQ ID NO: 30200 - DNA, 25 bp, Homo sapien
tgtggagaaatcagaatccttttag

SEQ ID NO: 30201 - DNA, 25 bp, Homo sapien
gtcaggcatggtgttgtgaacctgt

SEQ ID NO: 30202 - DNA, 25 bp, Homo sapien
aaaagagtttggcaggtcctcaatc

SEQ ID NO: 30203 - DNA, 25 bp, Homo sapien
gtgcagctaccttggaaaagagttt

SEQ ID NO: 30204 - DNA, 25 bp, Homo sapien
atccttttagtactgctggtgggga

SEQ ID NO: 30205 - DNA, 25 bp, Homo sapien
acacacaatgaaggccgggtgtgat

SEQ ID NO: 30206 - DNA, 25 bp, Homo sapien
caaacgtagtatatccacaatggag

SEQ ID NO: 30207 - DNA, 25 bp, Homo sapien
tacccatcacctatataagaaacac

SEQ ID NO: 30208 - DNA, 25 bp, Homo sapien
gtaaaacagtgcagctaccttggaa

SEQ ID NO: 30209 - DNA, 25 bp, Homo sapien
catcaaaagtatatctgttagacaa

SEQ ID NO: 30210 - DNA, 25 bp, Homo sapien
agaaacacataaaccaaacgtagta

SEQ ID NO: 30211 - DNA, 25 bp, Homo sapien
cactggtgtgctgtcggctcatggc

SEQ ID NO: 30212 - DNA, 25 bp, Homo sapien
ttgctcagattccaggcatgcgcca

SEQ ID NO: 30213 - DNA, 25 bp, Homo sapien
catggtaccatgagcaaataaattt

SEQ ID NO: 30214 - DNA, 25 bp, Homo sapien
atctatgttaagttggtgtttgttt

SEQ ID NO: 30215 - DNA, 25 bp, Homo sapien
ctgagttgctcagattccaggcatg

SEQ ID NO: 30216 - DNA, 25 bp, Homo sapien
ttcagagttaaagacctagccacct

SEQ ID NO: 30217 - DNA, 25 bp, Homo sapien
cgtgagccagcgtgcccaactgcta

SEQ ID NO: 30218 - DNA, 25 bp, Homo sapien
gcgtgcccaactgctattaacaatt

SEQ ID NO: 30219 - DNA, 25 bp, Homo sapien
tttaaagcagatcgagttcagagtt

SEQ ID NO: 30220 - DNA, 25 bp, Homo sapien
cagatcgagttcagagttaaagacc

SEQ ID NO: 30221 - DNA, 25 bp, Homo sapien
agcctctgacttccatgctcaagtg

SEQ ID NO: 30222 - DNA, 25 bp, Homo sapien
atttgatcactggtaggaacagccc

SEQ ID NO: 30223 - DNA, 25 bp, Homo sapien
gcgtggcgttcgtgtgactttcctt

SEQ ID NO: 30224 - DNA, 25 bp, Homo sapien
aaaggctatgactgttttgtaggca

SEQ ID NO: 30225 - DNA, 25 bp, Homo sapien
tctctggtgcagagttgctagaaac

SEQ ID NO: 30226 - DNA, 25 bp, Homo sapien
ccaagagggatatgactggaaagta

SEQ ID NO: 30227 - DNA, 25 bp, Homo sapien
gagggtgtcccagcttcaagttcag

SEQ ID NO: 30228 - DNA, 25 bp, Homo sapien
tctgatccattgtgcccgtggacat

SEQ ID NO: 30229 - DNA, 25 bp, Homo sapien
aagtccgcacacagactgggcagga

SEQ ID NO: 30230 - DNA, 25 bp, Homo sapien
tgtgcgcgtttggactctggctcca

SEQ ID NO: 30231 - DNA, 25 bp, Homo sapien
ttcctggtccgctgaatttgatcac

SEQ ID NO: 30232 - DNA, 25 bp, Homo sapien
tgagggacgtcccaagctcatccct

SEQ ID NO: 30233 - DNA, 25 bp, Homo sapien
agaaaagggtgtgattaattcactc

SEQ ID NO: 30234 - DNA, 25 bp, Homo sapien
gaatcaggctaagtctagaaagatg

SEQ ID NO: 30235 - DNA, 25 bp, Homo sapien
aatttaacagaaaagggtgtgatta

SEQ ID NO: 30236 - DNA, 25 bp, Homo sapien
acccggcctatgaattaccatcttt

SEQ ID NO: 30237 - DNA, 25 bp, Homo sapien
tttattaggtgcttatcacatgcca

SEQ ID NO: 30238 - DNA, 25 bp, Homo sapien
cacaaaagactgaggttctagtagt

SEQ ID NO: 30239 - DNA, 25 bp, Homo sapien
ctaggtacaagggtaacacaaaaga

SEQ ID NO: 30240 - DNA, 25 bp, Homo sapien
agtaatggagaaataaggcaagtta

SEQ ID NO: 30241 - DNA, 25 bp, Homo sapien
agagaaaaggcatccctaacactcc

SEQ ID NO: 30242 - DNA, 25 bp, Homo sapien
acatgccaggcagctctaggtacaa

SEQ ID NO: 30243 - DNA, 25 bp, Homo sapien
ttcaagaagtgaatcaggctaagtc

SEQ ID NO: 30244 - DNA, 25 bp, Homo sapien
attggcacaatgaccatcgagattg

SEQ ID NO: 30245 - DNA, 25 bp, Homo sapien
aacttcaaggagtctgttcagaaaa

SEQ ID NO: 30246 - DNA, 25 bp, Homo sapien
gagggagatgtatttactgaacttc

SEQ ID NO: 30247 - DNA, 25 bp, Homo sapien
cagtgggacaacaggtagtttttaa

SEQ ID NO: 30248 - DNA, 25 bp, Homo sapien
aaccaggccttctcagtgggacaac

SEQ ID NO: 30249 - DNA, 25 bp, Homo sapien
tattcagcaattcaacaaccaggcc

SEQ ID NO: 30250 - DNA, 25 bp, Homo sapien
ttatgacaccgacaagatggcagca

SEQ ID NO: 30251 - DNA, 25 bp, Homo sapien
aggggctttgcgtatcaactcgtat

SEQ ID NO: 30252 - DNA, 25 bp, Homo sapien
taaacctgtacctgtgtgtccctcc

SEQ ID NO: 30253 - DNA, 25 bp, Homo sapien
tttgacaaagccaaacagtgtattg

SEQ ID NO: 30254 - DNA, 25 bp, Homo sapien
ctcgtatatccaaggtgagtgataa

SEQ ID NO: 30255 - DNA, 25 bp, Homo sapien
tgcttgtaagccattggggaggtca

SEQ ID NO: 30256 - DNA, 25 bp, Homo sapien
atagccactcatggaagtcagagcc

SEQ ID NO: 30257 - DNA, 25 bp, Homo sapien
atggaaagtgccaaccaccatcatc

SEQ ID NO: 30258 - DNA, 25 bp, Homo sapien
atatcctgccttttgggaccaaacc

SEQ ID NO: 30259 - DNA, 25 bp, Homo sapien
ttaaacaatcgcaaatcaaagaatc

SEQ ID NO: 30260 - DNA, 25 bp, Homo sapien
ttggtgccctgcaaacaaacaccct

SEQ ID NO: 30261 - DNA, 25 bp, Homo sapien
ggaggtcaggttttaagcaatagct

SEQ ID NO: 30262 - DNA, 25 bp, Homo sapien
tgatcccaagtttctagacaaagcc

SEQ ID NO: 30263 - DNA, 25 bp, Homo sapien
aagtcagagccacaagatgtgttgc

SEQ ID NO: 30264 - DNA, 25 bp, Homo sapien
aaagaatctctgaatcctgcaaccc

SEQ ID NO: 30265 - DNA, 25 bp, Homo sapien
aagatgtgttgctccctatagaaaa

SEQ ID NO: 30266 - DNA, 25 bp, Homo sapien
caacctcggctgatgtttgtagttt

SEQ ID NO: 30267 - DNA, 25 bp, Homo sapien
acctcggctgatgtttgtagtttta

SEQ ID NO: 30268 - DNA, 25 bp, Homo sapien
ctaaatttgtagctatgttggccca

SEQ ID NO: 30269 - DNA, 25 bp, Homo sapien
ggtgcataccaccaacctcggctga

SEQ ID NO: 30270 - DNA, 25 bp, Homo sapien
ataccaccaacctcggctgatgttt

SEQ ID NO: 30271 - DNA, 25 bp, Homo sapien
taccaccaacctcggctgatgtttg

SEQ ID NO: 30272 - DNA, 25 bp, Homo sapien
gtgcataccaccaacctcggctgat

SEQ ID NO: 30273 - DNA, 25 bp, Homo sapien
taaatttgtagctatgttggcccag

SEQ ID NO: 30274 - DNA, 25 bp, Homo sapien
accaacctcggctgatgtttgtagt

SEQ ID NO: 30275 - DNA, 25 bp, Homo sapien
ttctaaatttgtagctatgttggcc

SEQ ID NO: 30276 - DNA, 25 bp, Homo sapien
gcataccaccaacctcggctgatgt

SEQ ID NO: 30277 - DNA, 25 bp, Homo sapien
cagactcggccagcggcaaagtata

SEQ ID NO: 30278 - DNA, 25 bp, Homo sapien
ctggttgccctctagcgatggaact

SEQ ID NO: 30279 - DNA, 25 bp, Homo sapien
tttcaggatgctctgcagaatcttc

SEQ ID NO: 30280 - DNA, 25 bp, Homo sapien
ccaagtgggatacatgctgccctcc

SEQ ID NO: 30281 - DNA, 25 bp, Homo sapien
tagcccaggcacatagattccagat

SEQ ID NO: 30282 - DNA, 25 bp, Homo sapien
atcatcaagagcctgtgtgttttca

SEQ ID NO: 30283 - DNA, 25 bp, Homo sapien
agcgatggaacttagtaaggcctct

SEQ ID NO: 30284 - DNA, 25 bp, Homo sapien
gggtattcaggaggtgtctaacaca

SEQ ID NO: 30285 - DNA, 25 bp, Homo sapien
tcagaaccctgcagccaagtgggat

SEQ ID NO: 30286 - DNA, 25 bp, Homo sapien
agtatagatggagtgatattaaccc

SEQ ID NO: 30287 - DNA, 25 bp, Homo sapien
ctgcccgaggagttccttaaaaatc

SEQ ID NO: 30288 - DNA, 25 bp, Homo sapien
cttttgggtgcaagaaaattctcta

SEQ ID NO: 30289 - DNA, 25 bp, Homo sapien
ggcttgagttagacagtgatgcttg

SEQ ID NO: 30290 - DNA, 25 bp, Homo sapien
gctgggctgtgctacattaagaagt

SEQ ID NO: 30291 - DNA, 25 bp, Homo sapien
ctcaaaggataaatggcacaaagtg

SEQ ID NO: 30292 - DNA, 25 bp, Homo sapien
tataagcctgagactttggcaaagc

SEQ ID NO: 30293 - DNA, 25 bp, Homo sapien
tctgtaagaagaaagcaagagcaaa

SEQ ID NO: 30294 - DNA, 25 bp, Homo sapien
acataaacaaaacagggcttgagtt

SEQ ID NO: 30295 - DNA, 25 bp, Homo sapien
gaagaatcctgatgtagatgggaat

SEQ ID NO: 30296 - DNA, 25 bp, Homo sapien
ttagcagttacagtcaaaggaggaa

SEQ ID NO: 30297 - DNA, 25 bp, Homo sapien
gaatttcccaccagcctcaaaggat

SEQ ID NO: 30298 - DNA, 25 bp, Homo sapien
gtgagaggtttaggttctgtaagaa

SEQ ID NO: 30299 - DNA, 25 bp, Homo sapien
gtaggaaaagacatgtcagtgtccc

SEQ ID NO: 30300 - DNA, 25 bp, Homo sapien
ctaaaacgacatgcaggtgaaaaat

SEQ ID NO: 30301 - DNA, 25 bp, Homo sapien
tactgaatctaatgtaggaaaagac

SEQ ID NO: 30302 - DNA, 25 bp, Homo sapien
tgcattacaatatggaaacacttac

SEQ ID NO: 30303 - DNA, 25 bp, Homo sapien
gtgagtacaacgataagaattagaa

SEQ ID NO: 30304 - DNA, 25 bp, Homo sapien
actgggtcatgtaactaggcatgaa

SEQ ID NO: 30305 - DNA, 25 bp, Homo sapien
tcaggaatatgctcactccaaagtt

SEQ ID NO: 30306 - DNA, 25 bp, Homo sapien
atgaccttcaccagaaaaatactcc

SEQ ID NO: 30307 - DNA, 25 bp, Homo sapien
cccagaaagatgtgagtacaacgat

SEQ ID NO: 30308 - DNA, 25 bp, Homo sapien
ctaggcatgaaatccagatgaaatc

SEQ ID NO: 30309 - DNA, 25 bp, Homo sapien
caaggaattaagtcatgataaaagt

SEQ ID NO: 30310 - DNA, 25 bp, Homo sapien
ccctacagctgagaagcggagtcct

SEQ ID NO: 30311 - DNA, 25 bp, Homo sapien
actgctgcttgtgcggctcagctga

SEQ ID NO: 30312 - DNA, 25 bp, Homo sapien
gcgtgagcggaatgaatgctgaata

SEQ ID NO: 30313 - DNA, 25 bp, Homo sapien
gaggatgctcctctacgccgagttt

SEQ ID NO: 30314 - DNA, 25 bp, Homo sapien
agaaatagagaaatgttacagccct

SEQ ID NO: 30315 - DNA, 25 bp, Homo sapien
aagggaacaaatccatccgcgggca

SEQ ID NO: 30316 - DNA, 25 bp, Homo sapien
ttacagccctcaatggtgggaactg

SEQ ID NO: 30317 - DNA, 25 bp, Homo sapien
tctacgccgagtttaggagaagaga

SEQ ID NO: 30318 - DNA, 25 bp, Homo sapien
aaaactttgcagtgaactttgcctc

SEQ ID NO: 30319 - DNA, 25 bp, Homo sapien
atcctacaggcgttcaacccaaaaa

SEQ ID NO: 30320 - DNA, 25 bp, Homo sapien
cagcaccgcacgcagagcctggtgt

SEQ ID NO: 30321 - DNA, 25 bp, Homo sapien
gaaagatgagaaaagtagaaaacac

SEQ ID NO: 30322 - DNA, 25 bp, Homo sapien
agaggatagttgaacacagaaagat

SEQ ID NO: 30323 - DNA, 25 bp, Homo sapien
tctcctgggctaaaccacaaatggt

SEQ ID NO: 30324 - DNA, 25 bp, Homo sapien
ataggcatgatcacagtgcaccaca

SEQ ID NO: 30325 - DNA, 25 bp, Homo sapien
gtggggacattaggctttgataagt

SEQ ID NO: 30326 - DNA, 25 bp, Homo sapien
tgagtaaattgaacaggcttgaggc

SEQ ID NO: 30327 - DNA, 25 bp, Homo sapien
ctgagcacctggaatacaggcatgc

SEQ ID NO: 30328 - DNA, 25 bp, Homo sapien
aagagttttaaggtcctgggattgc

SEQ ID NO: 30329 - DNA, 25 bp, Homo sapien
gtccgagctctaagaaggcattata

SEQ ID NO: 30330 - DNA, 25 bp, Homo sapien
gactccaaggtcatgtcagcaggaa

SEQ ID NO: 30331 - DNA, 25 bp, Homo sapien
tgtcttctatggaaagtccgagctc

SEQ ID NO: 30332 - DNA, 25 bp, Homo sapien
gctacccgcacctggagggcgacgt

SEQ ID NO: 30333 - DNA, 25 bp, Homo sapien
agagaagcgtccgtgtggtacaacc

SEQ ID NO: 30334 - DNA, 25 bp, Homo sapien
tccgtgtggtacaaccctgtgggtg

SEQ ID NO: 30335 - DNA, 25 bp, Homo sapien
tcttcctgcgcgtggatcccggcgg

SEQ ID NO: 30336 - DNA, 25 bp, Homo sapien
aagcgtccgtgtggtacaaccctgt

SEQ ID NO: 30337 - DNA, 25 bp, Homo sapien
cggaggctcctctgtgcagcctcgg

SEQ ID NO: 30338 - DNA, 25 bp, Homo sapien
agggttgcactgttaaagcgaaggc

SEQ ID NO: 30339 - DNA, 25 bp, Homo sapien
gcggcggccgtcttcacggtgacct

SEQ ID NO: 30340 - DNA, 25 bp, Homo sapien
tctgtgagatgggtgcagcctgcct

SEQ ID NO: 30341 - DNA, 25 bp, Homo sapien
ttgcactgttaaagcgaaggctgca

SEQ ID NO: 30342 - DNA, 25 bp, Homo sapien
actcacttcttcctgcgcgtggatc

SEQ ID NO: 30343 - DNA, 25 bp, Homo sapien
tctgcctaggttccacgatgggttc

SEQ ID NO: 30344 - DNA, 25 bp, Homo sapien
gagggaatgacttggcacaccatct

SEQ ID NO: 30345 - DNA, 25 bp, Homo sapien
agggctaattctcccagtcaggaat

SEQ ID NO: 30346 - DNA, 25 bp, Homo sapien
tagatccaagttggggaatcatggc

SEQ ID NO: 30347 - DNA, 25 bp, Homo sapien
ggactggagccctgcgttctacctt

SEQ ID NO: 30348 - DNA, 25 bp, Homo sapien
tccattctgagccagagcctgcagg

SEQ ID NO: 30349 - DNA, 25 bp, Homo sapien
agctgagaaggctgtcgtctcatct

SEQ ID NO: 30350 - DNA, 25 bp, Homo sapien
aaccatctaataggccgaatgaggg

SEQ ID NO: 30351 - DNA, 25 bp, Homo sapien
ccttagcaagtcactggccaggtct

SEQ ID NO: 30352 - DNA, 25 bp, Homo sapien
actggccaggtctggatcacagttt

SEQ ID NO: 30353 - DNA, 25 bp, Homo sapien
cttggaacctgtgccagggctaatt

SEQ ID NO: 30354 - DNA, 25 bp, Homo sapien
aagaacactgaacaaggagttagga

SEQ ID NO: 30355 - DNA, 25 bp, Homo sapien
tacatctgcagctcagttggggctt

SEQ ID NO: 30356 - DNA, 25 bp, Homo sapien
ggggccaagcagtacccattcatct

SEQ ID NO: 30357 - DNA, 25 bp, Homo sapien
aaggaaaagggttatgaaaagatca

SEQ ID NO: 30358 - DNA, 25 bp, Homo sapien
gcacattttaggtctggagttggga

SEQ ID NO: 30359 - DNA, 25 bp, Homo sapien
ctctaaccaagtgggaaaagaacac

SEQ ID NO: 30360 - DNA, 25 bp, Homo sapien
taagtggagggtctgaactctaacc

SEQ ID NO: 30361 - DNA, 25 bp, Homo sapien
tggcagcacatgaaacaagcaagca

SEQ ID NO: 30362 - DNA, 25 bp, Homo sapien
tttcaaagacttgcagagacacgga

SEQ ID NO: 30363 - DNA, 25 bp, Homo sapien
gacacggagagcaatgttagctcat

SEQ ID NO: 30364 - DNA, 25 bp, Homo sapien
tcattaaaagaaacaggtgagagca

SEQ ID NO: 30365 - DNA, 25 bp, Homo sapien
catctgtgggtatctgtgtggatat

SEQ ID NO: 30366 - DNA, 25 bp, Homo sapien
ctccaccgtaggtatacaggtccta

SEQ ID NO: 30367 - DNA, 25 bp, Homo sapien
tcctggagactcagcgagctcgtcc

SEQ ID NO: 30368 - DNA, 25 bp, Homo sapien
ctctctgaggaggtagctatgactc

SEQ ID NO: 30369 - DNA, 25 bp, Homo sapien
caaacagttagtgttgggcgtaaat

SEQ ID NO: 30370 - DNA, 25 bp, Homo sapien
ctatgactcagtggcacgcggcatc

SEQ ID NO: 30371 - DNA, 25 bp, Homo sapien
gactcagtagtcttggcccagcagc

SEQ ID NO: 30372 - DNA, 25 bp, Homo sapien
agcctacaggccagctgtgacttta

SEQ ID NO: 30373 - DNA, 25 bp, Homo sapien
aataagtcctgagctagggacctcc

SEQ ID NO: 30374 - DNA, 25 bp, Homo sapien
ctatcagagtgtgcatggaataagt

SEQ ID NO: 30375 - DNA, 25 bp, Homo sapien
aagtggttgtgactcagctgcacat

SEQ ID NO: 30376 - DNA, 25 bp, Homo sapien
aatgctgtgattcattgccaagatc

SEQ ID NO: 30377 - DNA, 25 bp, Homo sapien
ctgcctgtctaggaaagacatgccc

SEQ ID NO: 30378 - DNA, 25 bp, Homo sapien
caggagttggacactcacctctgcc

SEQ ID NO: 30379 - DNA, 25 bp, Homo sapien
ctgactttgggcagagtggtacaag

SEQ ID NO: 30380 - DNA, 25 bp, Homo sapien
gacactgcaggccaggaaccatgct

SEQ ID NO: 30381 - DNA, 25 bp, Homo sapien
gctggggttcaaacctgtgcagtct

SEQ ID NO: 30382 - DNA, 25 bp, Homo sapien
ggtcataatggaccgaatggccatt

SEQ ID NO: 30383 - DNA, 25 bp, Homo sapien
ctgcgcagccatgtggtttggtaaa

SEQ ID NO: 30384 - DNA, 25 bp, Homo sapien
cttcgcttaacctggaggaaagctg

SEQ ID NO: 30385 - DNA, 25 bp, Homo sapien
aagctaaacagctggtgagtcactg

SEQ ID NO: 30386 - DNA, 25 bp, Homo sapien
ctccttgcctgggtagactctattc

SEQ ID NO: 30387 - DNA, 25 bp, Homo sapien
atgtcatggcactgcaactgtctgc

SEQ ID NO: 30388 - DNA, 25 bp, Homo sapien
cttttctggaggatgtgccatgagc

SEQ ID NO: 30389 - DNA, 25 bp, Homo sapien
gtatagctaaaagtgcagatagagg

SEQ ID NO: 30390 - DNA, 25 bp, Homo sapien
ccgaacttggtaacacctgcctgtc

SEQ ID NO: 30391 - DNA, 25 bp, Homo sapien
tctagctaagcactcagggtctctc

SEQ ID NO: 30392 - DNA, 25 bp, Homo sapien
catgagctctggcacgtccactttc

SEQ ID NO: 30393 - DNA, 25 bp, Homo sapien
cagatagaggtcattatagtatgca

SEQ ID NO: 30394 - DNA, 25 bp, Homo sapien
ctatccagtatcagcgcccagaagg

SEQ ID NO: 30395 - DNA, 25 bp, Homo sapien
attcctggcttcacttagggtctcc

SEQ ID NO: 30396 - DNA, 25 bp, Homo sapien
gccagatttggagcctgtatagcta

SEQ ID NO: 30397 - DNA, 25 bp, Homo sapien
ctgcctcgcatggagtggacaattc

SEQ ID NO: 30398 - DNA, 25 bp, Homo sapien
tagctggatgcagtgtcgcatgcct

SEQ ID NO: 30399 - DNA, 25 bp, Homo sapien
tgctgaggaatcatctaaagaaatt

SEQ ID NO: 30400 - DNA, 25 bp, Homo sapien
ccaccctgcatctgaaagagagaaa

SEQ ID NO: 30401 - DNA, 25 bp, Homo sapien
aatatttgcaggattagctggatgc

SEQ ID NO: 30402 - DNA, 25 bp, Homo sapien
ccaccaccctgcatctgaaagagag

SEQ ID NO: 30403 - DNA, 25 bp, Homo sapien
aagaaattctcaagcttgtccaagc

SEQ ID NO: 30404 - DNA, 25 bp, Homo sapien
ttctgtctccagtgatgaaaggaaa

SEQ ID NO: 30405 - DNA, 25 bp, Homo sapien
actaggaacctatgactatattctc

SEQ ID NO: 30406 - DNA, 25 bp, Homo sapien
taccagcccaatcacaaatagaaac

SEQ ID NO: 30407 - DNA, 25 bp, Homo sapien
atgcagtgtcgcatgcctgtagccc

SEQ ID NO: 30408 - DNA, 25 bp, Homo sapien
ttttctcaagaaattgtatgttccc

SEQ ID NO: 30409 - DNA, 25 bp, Homo sapien
agctcaagactgactcctggagaag

SEQ ID NO: 30410 - DNA, 25 bp, Homo sapien
aaggagcccgatacgctgatcctat

SEQ ID NO: 30411 - DNA, 25 bp, Homo sapien
tgttgcccaaggatagtgctggctt

SEQ ID NO: 30412 - DNA, 25 bp, Homo sapien
cccggccaggagactttgatcagta

SEQ ID NO: 30413 - DNA, 25 bp, Homo sapien
ctgagcagcctgcaccatggcgtac

SEQ ID NO: 30414 - DNA, 25 bp, Homo sapien
acagactagagtccagaagacctca

SEQ ID NO: 30415 - DNA, 25 bp, Homo sapien
tccaggccactgtcaagtctagggc

SEQ ID NO: 30416 - DNA, 25 bp, Homo sapien
atgtcacaagccctagcaatcatta

SEQ ID NO: 30417 - DNA, 25 bp, Homo sapien
tgctggcttgcaagtaaaccctcac

SEQ ID NO: 30418 - DNA, 25 bp, Homo sapien
tctagggcctcagcaagcaaaagga

SEQ ID NO: 30419 - DNA, 25 bp, Homo sapien
cctcaggaagagagaatgttgccca

SEQ ID NO: 30420 - DNA, 25 bp, Homo sapien
agatgctgggcaagtcctcaacacc

SEQ ID NO: 30421 - DNA, 25 bp, Homo sapien
cattctcgccaagaacaaggtgcta

SEQ ID NO: 30422 - DNA, 25 bp, Homo sapien
tttttgggctccacttgccaggcct

SEQ ID NO: 30423 - DNA, 25 bp, Homo sapien
gaatctggtccaaggtcaggctcca

SEQ ID NO: 30424 - DNA, 25 bp, Homo sapien
tagagagcctgagaatctggtccaa

SEQ ID NO: 30425 - DNA, 25 bp, Homo sapien
ttgggattccacctggcacctcgag

SEQ ID NO: 30426 - DNA, 25 bp, Homo sapien
agaacaaggtgctaggcatctgttt

SEQ ID NO: 30427 - DNA, 25 bp, Homo sapien
gctggagatggccaacacgccactt

SEQ ID NO: 30428 - DNA, 25 bp, Homo sapien
tgggcacaaaccttcacacaacttt

SEQ ID NO: 30429 - DNA, 25 bp, Homo sapien
gattgaatgagaaagtgtgtgcata

SEQ ID NO: 30430 - DNA, 25 bp, Homo sapien
cagtcctcttgagctgtgagatgct

SEQ ID NO: 30431 - DNA, 25 bp, Homo sapien
aaaaataagagatgtgttgtccagc

SEQ ID NO: 30432 - DNA, 25 bp, Homo sapien
tacccggctaagagttttgagagag

SEQ ID NO: 30433 - DNA, 25 bp, Homo sapien
aagagtacattcaagggtctgacac

SEQ ID NO: 30434 - DNA, 25 bp, Homo sapien
acggcagcctatgcgggccatttaa

SEQ ID NO: 30435 - DNA, 25 bp, Homo sapien
cttgacagttgtgagaatcagagtc

SEQ ID NO: 30436 - DNA, 25 bp, Homo sapien
atggcaccgtgaaattagcctggct

SEQ ID NO: 30437 - DNA, 25 bp, Homo sapien
tagcctggctcagcgtcatacaagc

SEQ ID NO: 30438 - DNA, 25 bp, Homo sapien
ctgtgatccagcaaagcactggttc

SEQ ID NO: 30439 - DNA, 25 bp, Homo sapien
tgtccctggaaccaatgctggcacc

SEQ ID NO: 30440 - DNA, 25 bp, Homo sapien
ggtctgacacctggtcggccttcta

SEQ ID NO: 30441 - DNA, 25 bp, Homo sapien
ttgagaaccgcatgaccttgacagt

SEQ ID NO: 30442 - DNA, 25 bp, Homo sapien
tgtctccggatgaaatcattgagtc

SEQ ID NO: 30443 - DNA, 25 bp, Homo sapien
aatgatgaacttggcagaaacacta

SEQ ID NO: 30444 - DNA, 25 bp, Homo sapien
acggggcatgtgctgactccacact

SEQ ID NO: 30445 - DNA, 25 bp, Homo sapien
atggcatggcttagcacacctgtgt

SEQ ID NO: 30446 - DNA, 25 bp, Homo sapien
cccggcgtaagaagcctatgcactt

SEQ ID NO: 30447 - DNA, 25 bp, Homo sapien
tgcaggacacggcaacatttcaccc

SEQ ID NO: 30448 - DNA, 25 bp, Homo sapien
gggagggatctgtaaccattagcaa

SEQ ID NO: 30449 - DNA, 25 bp, Homo sapien
tacattcacataggcctagcagggc

SEQ ID NO: 30450 - DNA, 25 bp, Homo sapien
aaacatgggaagaccttggtgaaaa

SEQ ID NO: 30451 - DNA, 25 bp, Homo sapien
ccttgtgagccttcgggatgatttt

SEQ ID NO: 30452 - DNA, 25 bp, Homo sapien
tgtgcctttgcctgacccggcgtaa

SEQ ID NO: 30453 - DNA, 25 bp, Homo sapien
tttttaaatcagctgggagagtgga

SEQ ID NO: 30454 - DNA, 25 bp, Homo sapien
tgagcgtccctcactggataggagt

SEQ ID NO: 30455 - DNA, 25 bp, Homo sapien
taaacaatgatcctggagacgctcc

SEQ ID NO: 30456 - DNA, 25 bp, Homo sapien
gcttccggcgtcgttcatgtgaacc

SEQ ID NO: 30457 - DNA, 25 bp, Homo sapien
gattcatgacattcggtgcccacag

SEQ ID NO: 30458 - DNA, 25 bp, Homo sapien
gagtgtgtgcaggattcaagcacat

SEQ ID NO: 30459 - DNA, 25 bp, Homo sapien
attctcaggacaatggctgttttgc

SEQ ID NO: 30460 - DNA, 25 bp, Homo sapien
agagtggaagctgttggcattttaa

SEQ ID NO: 30461 - DNA, 25 bp, Homo sapien
ctggcattgggcttctagaaccggc

SEQ ID NO: 30462 - DNA, 25 bp, Homo sapien
cagattcagaagtcgactgttggga

SEQ ID NO: 30463 - DNA, 25 bp, Homo sapien
ctgaaagttgagtctgagcacagtc

SEQ ID NO: 30464 - DNA, 25 bp, Homo sapien
aagtatcttcacagcatgcgtatgc

SEQ ID NO: 30465 - DNA, 25 bp, Homo sapien
tcataacccatggaggtaaagacac

SEQ ID NO: 30466 - DNA, 25 bp, Homo sapien
atgcttccaaaaacacagatactct

SEQ ID NO: 30467 - DNA, 25 bp, Homo sapien
ctgtgtggacagcacgcaagcaaac

SEQ ID NO: 30468 - DNA, 25 bp, Homo sapien
agaagagaaataatacagtagtccc

SEQ ID NO: 30469 - DNA, 25 bp, Homo sapien
gcatgcgtatgcttcagtgaaattc

SEQ ID NO: 30470 - DNA, 25 bp, Homo sapien
ttattgccgtctagagggttagtcc

SEQ ID NO: 30471 - DNA, 25 bp, Homo sapien
tcaacttgagttgctagacactgtt

SEQ ID NO: 30472 - DNA, 25 bp, Homo sapien
acgcaagcaaacagtgagattttcc

SEQ ID NO: 30473 - DNA, 25 bp, Homo sapien
ttccatcatggagacatagtaaacc

SEQ ID NO: 30474 - DNA, 25 bp, Homo sapien
ctggagcaactatacctgcaaaagt

SEQ ID NO: 30475 - DNA, 25 bp, Homo sapien
agtactgccgcaatgacaacaaatt

SEQ ID NO: 30476 - DNA, 25 bp, Homo sapien
atcgccaagttcaaagcaggtcctc

SEQ ID NO: 30477 - DNA, 25 bp, Homo sapien
tcaccaagcgctacatgcaggagca

SEQ ID NO: 30478 - DNA, 25 bp, Homo sapien
atgtggccatgcaagaccacgtctt

SEQ ID NO: 30479 - DNA, 25 bp, Homo sapien
agaactacctgcacgggcgtctcac

SEQ ID NO: 30480 - DNA, 25 bp, Homo sapien
acgtctttgtggacaccagcgccga

SEQ ID NO: 30481 - DNA, 25 bp, Homo sapien
ctgtgcaacgactgcctcaaggcct

SEQ ID NO: 30482 - DNA, 25 bp, Homo sapien
gcacggctacctcaagtggcgcttt

SEQ ID NO: 30483 - DNA, 25 bp, Homo sapien
gaacaggacgagaagatctgcatcc

SEQ ID NO: 30484 - DNA, 25 bp, Homo sapien
tgccctacagcaacaagatgcagct

SEQ ID NO: 30485 - DNA, 25 bp, Homo sapien
gtctgccgcaacaggcgcatcgctt

SEQ ID NO: 30486 - DNA, 25 bp, Homo sapien
ctgaatgcatgtggttaaaatttcc

SEQ ID NO: 30487 - DNA, 25 bp, Homo sapien
actgggtacactgccagctgacact

SEQ ID NO: 30488 - DNA, 25 bp, Homo sapien
ctgtccaggtagaagcatctagttc

SEQ ID NO: 30489 - DNA, 25 bp, Homo sapien
gccagattactgaggaattccaatt

SEQ ID NO: 30490 - DNA, 25 bp, Homo sapien
caaaggtcagtttcccagccagatt

SEQ ID NO: 30491 - DNA, 25 bp, Homo sapien
tcaaatgtgttgagtctgggaagag

SEQ ID NO: 30492 - DNA, 25 bp, Homo sapien
gacacagtggtacactgggtacact

SEQ ID NO: 30493 - DNA, 25 bp, Homo sapien
ttgggaggatgttttgagccaaata

SEQ ID NO: 30494 - DNA, 25 bp, Homo sapien
gagccaaataacttgggcccagctt

SEQ ID NO: 30495 - DNA, 25 bp, Homo sapien
aagagtagagaaaaggtggtacaat

SEQ ID NO: 30496 - DNA, 25 bp, Homo sapien
ctgaagaaaccttagggctggatat

SEQ ID NO: 30497 - DNA, 25 bp, Homo sapien
agtctaccatcagagtgggacacca

SEQ ID NO: 30498 - DNA, 25 bp, Homo sapien
tgtgtgagtccagcctacccgaaac

SEQ ID NO: 30499 - DNA, 25 bp, Homo sapien
ctgactacaaagcaactagaggctc

SEQ ID NO: 30500 - DNA, 25 bp, Homo sapien
gaggctcaggaaagcattaggtaat

SEQ ID NO: 30501 - DNA, 25 bp, Homo sapien
ccgcatctgtggaatgaagaactat

SEQ ID NO: 30502 - DNA, 25 bp, Homo sapien
tctataggtctcagtgggaatccat

SEQ ID NO: 30503 - DNA, 25 bp, Homo sapien
gttatgggactcaagagcatctctc

SEQ ID NO: 30504 - DNA, 25 bp, Homo sapien
tttttgcctgggctgggtaaactca

SEQ ID NO: 30505 - DNA, 25 bp, Homo sapien
ttcagaagtgaacatggcattgcac

SEQ ID NO: 30506 - DNA, 25 bp, Homo sapien
gttaagattatagtgccagccctgg

SEQ ID NO: 30507 - DNA, 25 bp, Homo sapien
acgttaagggtgaaagccatctcct

SEQ ID NO: 30508 - DNA, 25 bp, Homo sapien
tataagtgattcaggactggaactc

SEQ ID NO: 30509 - DNA, 25 bp, Homo sapien
ccatgtgctagggacagtaaattct

SEQ ID NO: 30510 - DNA, 25 bp, Homo sapien
tgcacccggcctcatacagctctaa

SEQ ID NO: 30511 - DNA, 25 bp, Homo sapien
tttgcagataagaagactgcaattc

SEQ ID NO: 30512 - DNA, 25 bp, Homo sapien
tcatacagctctaatgccacgcatc

SEQ ID NO: 30513 - DNA, 25 bp, Homo sapien
aagaagactgcaattcaggaagaca

SEQ ID NO: 30514 - DNA, 25 bp, Homo sapien
tagggacagtaaattctattgttct

SEQ ID NO: 30515 - DNA, 25 bp, Homo sapien
ggaagacatatagtagtctataagt

SEQ ID NO: 30516 - DNA, 25 bp, Homo sapien
tgccacgcatcaagttctgcatgta

SEQ ID NO: 30517 - DNA, 25 bp, Homo sapien
tagtagtctataagtgattcaggac

SEQ ID NO: 30518 - DNA, 25 bp, Homo sapien
tcaagttctgcatgtacaatctctc

SEQ ID NO: 30519 - DNA, 25 bp, Homo sapien
ataagggaggacgacagtttcgttc

SEQ ID NO: 30520 - DNA, 25 bp, Homo sapien
cttctgacgaagtgacaatggtcta

SEQ ID NO: 30521 - DNA, 25 bp, Homo sapien
tcatgaaaatcgacaagtgtgggtc

SEQ ID NO: 30522 - DNA, 25 bp, Homo sapien
actaagtctggaaattgggccattt

SEQ ID NO: 30523 - DNA, 25 bp, Homo sapien
ggaacacctggcatttcacatggtc

SEQ ID NO: 30524 - DNA, 25 bp, Homo sapien
atatgcaaagcgtgagtacagtgtt

SEQ ID NO: 30525 - DNA, 25 bp, Homo sapien
agattaggtggtttcttggtgcaac

SEQ ID NO: 30526 - DNA, 25 bp, Homo sapien
tcacatatgcgcactgaaccagtca

SEQ ID NO: 30527 - DNA, 25 bp, Homo sapien
ctggcttgagaaactccgtcatgaa

SEQ ID NO: 30528 - DNA, 25 bp, Homo sapien
ttctgttgcacgtccggacccggac

SEQ ID NO: 30529 - DNA, 25 bp, Homo sapien
ttggtgcaacatcgggtttgagact

SEQ ID NO: 30530 - DNA, 25 bp, Homo sapien
aaagagggataatcactactgagcc

SEQ ID NO: 30531 - DNA, 25 bp, Homo sapien
agtgatgaacttatagccaggctaa

SEQ ID NO: 30532 - DNA, 25 bp, Homo sapien
agccaggctaatcaagaacaaagga

SEQ ID NO: 30533 - DNA, 25 bp, Homo sapien
ctcacacgagcataaatagatagtc

SEQ ID NO: 30534 - DNA, 25 bp, Homo sapien
gagaaagaaaagcaatttaagcctg

SEQ ID NO: 30535 - DNA, 25 bp, Homo sapien
aaatgggacaaatttcttgaaagac

SEQ ID NO: 30536 - DNA, 25 bp, Homo sapien
gtggataggaggaaattattagcat

SEQ ID NO: 30537 - DNA, 25 bp, Homo sapien
agaacaaaggagagatgacatttat

SEQ ID NO: 30538 - DNA, 25 bp, Homo sapien
atttaagcctgaagtaaaaggaaga

SEQ ID NO: 30539 - DNA, 25 bp, Homo sapien
cactactgagcccaaagacatgaga

SEQ ID NO: 30540 - DNA, 25 bp, Homo sapien
tagatagtcagcaaaggtctatatc

SEQ ID NO: 30541 - DNA, 25 bp, Homo sapien
tcacttactagttcccagatggtta

SEQ ID NO: 30542 - DNA, 25 bp, Homo sapien
tgatctaacacaccagtaagtatgc

SEQ ID NO: 30543 - DNA, 25 bp, Homo sapien
tagaactagccttgcatagctggaa

SEQ ID NO: 30544 - DNA, 25 bp, Homo sapien
ttattgcattagatgggacgccagt

SEQ ID NO: 30545 - DNA, 25 bp, Homo sapien
caaattccaataggttaatgctgct

SEQ ID NO: 30546 - DNA, 25 bp, Homo sapien
aagtgtggtgagaggtaactttctt

SEQ ID NO: 30547 - DNA, 25 bp, Homo sapien
ttattaacaaggtaaggcagctatc

SEQ ID NO: 30548 - DNA, 25 bp, Homo sapien
ccagtatgatggtgaaaagaagtgt

SEQ ID NO: 30549 - DNA, 25 bp, Homo sapien
ttttgtcatgaatagatacggggtt

SEQ ID NO: 30550 - DNA, 25 bp, Homo sapien
tttgggattatccacatagactatc

SEQ ID NO: 30551 - DNA, 25 bp, Homo sapien
ctatacaggcaagcaattgactttt

SEQ ID NO: 30552 - DNA, 25 bp, Homo sapien
tgcatcacccatcagcaagagagga

SEQ ID NO: 30553 - DNA, 25 bp, Homo sapien
ccaaatgtcattgggataggccagc

SEQ ID NO: 30554 - DNA, 25 bp, Homo sapien
ttgtaatccagaagaccacatgctg

SEQ ID NO: 30555 - DNA, 25 bp, Homo sapien
tgcagaatggattttggccatgccc

SEQ ID NO: 30556 - DNA, 25 bp, Homo sapien
caaaacttcccaggggctgcaatac

SEQ ID NO: 30557 - DNA, 25 bp, Homo sapien
ttctttcactagaagggagaggtta

SEQ ID NO: 30558 - DNA, 25 bp, Homo sapien
tgaatgagtcatcagagtgcagaat

SEQ ID NO: 30559 - DNA, 25 bp, Homo sapien
aggcactgctctaaaggctgcacag

SEQ ID NO: 30560 - DNA, 25 bp, Homo sapien
tagcctgaagcacaatagaatgaga

SEQ ID NO: 30561 - DNA, 25 bp, Homo sapien
aatacagccgccaacccaaatgtca

SEQ ID NO: 30562 - DNA, 25 bp, Homo sapien
aaggctgcacagattgtaactcatt

SEQ ID NO: 30563 - DNA, 25 bp, Homo sapien
tgaatttgacaactatgggcacctc

SEQ ID NO: 30564 - DNA, 25 bp, Homo sapien
agcccttggtaacgaccatgccact

SEQ ID NO: 30565 - DNA, 25 bp, Homo sapien
cttgcctaggcttgcgtgcagggac

SEQ ID NO: 30566 - DNA, 25 bp, Homo sapien
acattcacagtgttgcacagccatt

SEQ ID NO: 30567 - DNA, 25 bp, Homo sapien
cacagtgttgcacagccattcccaa

SEQ ID NO: 30568 - DNA, 25 bp, Homo sapien
gtaccaattaaacactaactcacca

SEQ ID NO: 30569 - DNA, 25 bp, Homo sapien
ttggtaacgaccatgccactttttg

SEQ ID NO: 30570 - DNA, 25 bp, Homo sapien
atgggcacctcatataactggaatc

SEQ ID NO: 30571 - DNA, 25 bp, Homo sapien
tgttcttttgtgacaagctcatttc

SEQ ID NO: 30572 - DNA, 25 bp, Homo sapien
tgagtagttgagttttcaccacgtt

SEQ ID NO: 30573 - DNA, 25 bp, Homo sapien
tgtagcatgtatcagcatctctttt

SEQ ID NO: 30574 - DNA, 25 bp, Homo sapien
cacaggggacagaacctcacaacaa

SEQ ID NO: 30575 - DNA, 25 bp, Homo sapien
tctgagcagactcagaaaggttctg

SEQ ID NO: 30576 - DNA, 25 bp, Homo sapien
gctcaacgtcctacaacacagggga

SEQ ID NO: 30577 - DNA, 25 bp, Homo sapien
aagtagcccacttcagatgttgaaa

SEQ ID NO: 30578 - DNA, 25 bp, Homo sapien
agggaaccttcaaagccatattttg

SEQ ID NO: 30579 - DNA, 25 bp, Homo sapien
ttgccattaatgactgactagttgt

SEQ ID NO: 30580 - DNA, 25 bp, Homo sapien
tactgtaggcttccagcaagcagag

SEQ ID NO: 30581 - DNA, 25 bp, Homo sapien
agggacagtgctactgtaggcttcc

SEQ ID NO: 30582 - DNA, 25 bp, Homo sapien
gataatcgtgagacaagggaacctt

SEQ ID NO: 30583 - DNA, 25 bp, Homo sapien
tcacttctagtggtccttggatggg

SEQ ID NO: 30584 - DNA, 25 bp, Homo sapien
attgtgaaacaaaaggtacgtggcc

SEQ ID NO: 30585 - DNA, 25 bp, Homo sapien
cctacctctgttgagaaagagtctc

SEQ ID NO: 30586 - DNA, 25 bp, Homo sapien
tctaggacgagataaaatgtgtact

SEQ ID NO: 30587 - DNA, 25 bp, Homo sapien
taaaaaagaaggtgatctaggacga

SEQ ID NO: 30588 - DNA, 25 bp, Homo sapien
cttcactattgtttaattgggatta

SEQ ID NO: 30589 - DNA, 25 bp, Homo sapien
ggtgatctaggacgagataaaatgt

SEQ ID NO: 30590 - DNA, 25 bp, Homo sapien
cgagataaaatgtgtactgaacgtc

SEQ ID NO: 30591 - DNA, 25 bp, Homo sapien
ctacatactaaaaaagaaggtgatc

SEQ ID NO: 30592 - DNA, 25 bp, Homo sapien
gctgtgggaagatccaaataaagtt

SEQ ID NO: 30593 - DNA, 25 bp, Homo sapien
aatgtgtactgaacgtcttggggct

SEQ ID NO: 30594 - DNA, 25 bp, Homo sapien
attgggattaagataaatcttatcc

SEQ ID NO: 30595 - DNA, 25 bp, Homo sapien
tggggctgtgggaagatccaaataa

SEQ ID NO: 30596 - DNA, 25 bp, Homo sapien
cgtgggcaacatgggctacccagca

SEQ ID NO: 30597 - DNA, 25 bp, Homo sapien
tttaaagtcacttgggggctgggca

SEQ ID NO: 30598 - DNA, 25 bp, Homo sapien
atgcattgagatgtgttcaggattc

SEQ ID NO: 30599 - DNA, 25 bp, Homo sapien
tcacaaggttagaatttaaagtcac

SEQ ID NO: 30600 - DNA, 25 bp, Homo sapien
tgtaatcttagctacccggggcgct

SEQ ID NO: 30601 - DNA, 25 bp, Homo sapien
tgagatgtgttcaggattccatggg

SEQ ID NO: 30602 - DNA, 25 bp, Homo sapien
ataaataaaatcacctgggccgggc

SEQ ID NO: 30603 - DNA, 25 bp, Homo sapien
cccggttggtgcttaatgcattgag

SEQ ID NO: 30604 - DNA, 25 bp, Homo sapien
gcaacatgggctacccagcaacatt

SEQ ID NO: 30605 - DNA, 25 bp, Homo sapien
atgggctacccagcaacattttgcg

SEQ ID NO: 30606 - DNA, 25 bp, Homo sapien
tcaggggtgaaaaggcccaaggtca

SEQ ID NO: 30607 - DNA, 25 bp, Homo sapien
tctttgaacccgtggcaatgctggt

SEQ ID NO: 30608 - DNA, 25 bp, Homo sapien
ctcagagcagaaccagcccagatat

SEQ ID NO: 30609 - DNA, 25 bp, Homo sapien
ttggagataacccatcagcgagaat

SEQ ID NO: 30610 - DNA, 25 bp, Homo sapien
tttgtgttgtatgaagcagtgagct

SEQ ID NO: 30611 - DNA, 25 bp, Homo sapien
aagcagtgagcttaaacaaagggtt

SEQ ID NO: 30612 - DNA, 25 bp, Homo sapien
acttcccagtgttagagcagcctca

SEQ ID NO: 30613 - DNA, 25 bp, Homo sapien
cccaagaggtgtttgccacgttgta

SEQ ID NO: 30614 - DNA, 25 bp, Homo sapien
ggctgggagcaacagtatgatattc

SEQ ID NO: 30615 - DNA, 25 bp, Homo sapien
ataagctctgtgatgacaaggtcct

SEQ ID NO: 30616 - DNA, 25 bp, Homo sapien
ctagggttgattctatggccatgac

SEQ ID NO: 30617 - DNA, 25 bp, Homo sapien
tcagcgagaataaaggaatacttcc

SEQ ID NO: 30618 - DNA, 25 bp, Homo sapien
caaataatgaatcgagcaggtacac

SEQ ID NO: 30619 - DNA, 25 bp, Homo sapien
agaaggagtaggagcagaaaccctg

SEQ ID NO: 30620 - DNA, 25 bp, Homo sapien
ccctgtgtggcagtatcactttttt

SEQ ID NO: 30621 - DNA, 25 bp, Homo sapien
ctgcgcccagctaacacaactattt

SEQ ID NO: 30622 - DNA, 25 bp, Homo sapien
cgagcaggtacaccaaaatctgttg

SEQ ID NO: 30623 - DNA, 25 bp, Homo sapien
gtatcaaatagtgccgatggaagag

SEQ ID NO: 30624 - DNA, 25 bp, Homo sapien
gaaaccctgctgacctctgagggcc

SEQ ID NO: 30625 - DNA, 25 bp, Homo sapien
tattttagagtgactttatctgccc

SEQ ID NO: 30626 - DNA, 25 bp, Homo sapien
aagtgctgccaaataatgaatcgag

SEQ ID NO: 30627 - DNA, 25 bp, Homo sapien
ccagaccacagactctgttgtatca

SEQ ID NO: 30628 - DNA, 25 bp, Homo sapien
ttttcaaagtgctgccaaataatga

SEQ ID NO: 30629 - DNA, 25 bp, Homo sapien
tttggtcatcacgaggtcatagcac

SEQ ID NO: 30630 - DNA, 25 bp, Homo sapien
ttccagtcggataaaagcccagcac

SEQ ID NO: 30631 - DNA, 25 bp, Homo sapien
ccaatacagaacagttgagaatgac

SEQ ID NO: 30632 - DNA, 25 bp, Homo sapien
tagaaatagtcatgtgccgcataac

SEQ ID NO: 30633 - DNA, 25 bp, Homo sapien
ttgtgagaagttagactgaggctct

SEQ ID NO: 30634 - DNA, 25 bp, Homo sapien
atagcacagggcattgctcactgcc

SEQ ID NO: 30635 - DNA, 25 bp, Homo sapien
ttagtgtcggcaaacctactgtgct

SEQ ID NO: 30636 - DNA, 25 bp, Homo sapien
gaggttaacacagcgagtaagagac

SEQ ID NO: 30637 - DNA, 25 bp, Homo sapien
gggccctagtgagcttagaaatagt

SEQ ID NO: 30638 - DNA, 25 bp, Homo sapien
taccaagctggtccaatctgcgggc

SEQ ID NO: 30639 - DNA, 25 bp, Homo sapien
ttcattggtgagaagctgcagattg

SEQ ID NO: 30640 - DNA, 25 bp, Homo sapien
tcaaaaccactgagcttaaagaact

SEQ ID NO: 30641 - DNA, 25 bp, Homo sapien
aaatggttgttcaagccaggcctgc

SEQ ID NO: 30642 - DNA, 25 bp, Homo sapien
cctgcctcattgaaagggtgaaatc

SEQ ID NO: 30643 - DNA, 25 bp, Homo sapien
aaatgaaggaagcagcactcattac

SEQ ID NO: 30644 - DNA, 25 bp, Homo sapien
atatgtcatgaaccctccttgagga

SEQ ID NO: 30645 - DNA, 25 bp, Homo sapien
tcaagtgtcattagagatagattcc

SEQ ID NO: 30646 - DNA, 25 bp, Homo sapien
ttgtggaatccagaggaggcaaaat

SEQ ID NO: 30647 - DNA, 25 bp, Homo sapien
aaggtagaagagacagtttgcaata

SEQ ID NO: 30648 - DNA, 25 bp, Homo sapien
tccaagtaaagaatatacagcccat

SEQ ID NO: 30649 - DNA, 25 bp, Homo sapien
tgagggaattagtcaagcagctatc

SEQ ID NO: 30650 - DNA, 25 bp, Homo sapien
gcagctatctgaggaaagaacattc

SEQ ID NO: 30651 - DNA, 25 bp, Homo sapien
gtattatagttccatgaatgatgcc

SEQ ID NO: 30652 - DNA, 25 bp, Homo sapien
tcagacaaccctcccaactggaatg

SEQ ID NO: 30653 - DNA, 25 bp, Homo sapien
catgaatgatgccttaataattggc

SEQ ID NO: 30654 - DNA, 25 bp, Homo sapien
tcaacaattgcatcacagttttgct

SEQ ID NO: 30655 - DNA, 25 bp, Homo sapien
aaccctcccaactggaatggcagga

SEQ ID NO: 30656 - DNA, 25 bp, Homo sapien
ctgaggcaaagtataatggatatat

SEQ ID NO: 30657 - DNA, 25 bp, Homo sapien
ccaccttagaggcattttataaacc

SEQ ID NO: 30658 - DNA, 25 bp, Homo sapien
ttaagaaatgcagctctcagaaatt

SEQ ID NO: 30659 - DNA, 25 bp, Homo sapien
agttagacatatagaactgaggcaa

SEQ ID NO: 30660 - DNA, 25 bp, Homo sapien
tctcgatctccctgacctttaacat

SEQ ID NO: 30661 - DNA, 25 bp, Homo sapien
acttgatgagttagacatatagaac

SEQ ID NO: 30662 - DNA, 25 bp, Homo sapien
tgagattagcctggggagtttagct

SEQ ID NO: 30663 - DNA, 25 bp, Homo sapien
tttattgagagttagggtatgttta

SEQ ID NO: 30664 - DNA, 25 bp, Homo sapien
tgttacagactgtacagagcacatc

SEQ ID NO: 30665 - DNA, 25 bp, Homo sapien
cagagcacatctggattagctatta

SEQ ID NO: 30666 - DNA, 25 bp, Homo sapien
tcagactagaaattgtacccaggcc

SEQ ID NO: 30667 - DNA, 25 bp, Homo sapien
gccaaatagatgatctgttacagac

SEQ ID NO: 30668 - DNA, 25 bp, Homo sapien
tcacccgtctgaaaagattcctcat

SEQ ID NO: 30669 - DNA, 25 bp, Homo sapien
tacccaggcctatctggctgctcag

SEQ ID NO: 30670 - DNA, 25 bp, Homo sapien
tcctcatttggtaagtgcatctcct

SEQ ID NO: 30671 - DNA, 25 bp, Homo sapien
tggggagtttagctagaccttgtct

SEQ ID NO: 30672 - DNA, 25 bp, Homo sapien
agataagattgcaccagtctgggca

SEQ ID NO: 30673 - DNA, 25 bp, Homo sapien
gcccagcccctagctcccagctccg

SEQ ID NO: 30674 - DNA, 25 bp, Homo sapien
cggagctgggagctaggggctgggc

SEQ ID NO: 30675 - DNA, 25 bp, Homo sapien
gcctgaacgcactgtcagagatgct

SEQ ID NO: 30676 - DNA, 25 bp, Homo sapien
tgttacaacaatgcacaaggcatgc

SEQ ID NO: 30677 - DNA, 25 bp, Homo sapien
gtaatatcaaagagaatgttcacac

SEQ ID NO: 30678 - DNA, 25 bp, Homo sapien
aacagctgccttccggattatgtaa

SEQ ID NO: 30679 - DNA, 25 bp, Homo sapien
cagagatgctcattccattggtttc

SEQ ID NO: 30680 - DNA, 25 bp, Homo sapien
catcgagagttctgagtaacagatt

SEQ ID NO: 30681 - DNA, 25 bp, Homo sapien
tcttcccagttatgacaaatgtctc

SEQ ID NO: 30682 - DNA, 25 bp, Homo sapien
actggggctatgagctttatgttcc

SEQ ID NO: 30683 - DNA, 25 bp, Homo sapien
tgactatgtgttggacactggggct

SEQ ID NO: 30684 - DNA, 25 bp, Homo sapien
atttccagtgaaaacagctgccttc

SEQ ID NO: 30685 - DNA, 25 bp, Homo sapien
tttcatgatgaaacccagggaatat

SEQ ID NO: 30686 - DNA, 25 bp, Homo sapien
taggaggtagactgttgtaaacaca

SEQ ID NO: 30687 - DNA, 25 bp, Homo sapien
gtcacaaggctgcataactataatt

SEQ ID NO: 30688 - DNA, 25 bp, Homo sapien
caaggtaaacatctgggtgtatatc

SEQ ID NO: 30689 - DNA, 25 bp, Homo sapien
gacttgggatgcatggtctgttcat

SEQ ID NO: 30690 - DNA, 25 bp, Homo sapien
ttacattaaggagctgtatgtttcc

SEQ ID NO: 30691 - DNA, 25 bp, Homo sapien
agcaagatcagacgaataggaggta

SEQ ID NO: 30692 - DNA, 25 bp, Homo sapien
aatgaatgctcaaagaagaaaattt

SEQ ID NO: 30693 - DNA, 25 bp, Homo sapien
tgttttataaaagtcacaaggctgc

SEQ ID NO: 30694 - DNA, 25 bp, Homo sapien
tgcgtgtgcactgtagataacagac

SEQ ID NO: 30695 - DNA, 25 bp, Homo sapien
cttcagtaataagtagcaaacacct

SEQ ID NO: 30696 - DNA, 25 bp, Homo sapien
tttcagtcggtcataagcaagatca

SEQ ID NO: 30697 - DNA, 25 bp, Homo sapien
ataactcgtcctacttgaagaaaac

SEQ ID NO: 30698 - DNA, 25 bp, Homo sapien
aacattgtccaaaaaaggctattta

SEQ ID NO: 30699 - DNA, 25 bp, Homo sapien
ttataagtgcctctgggtttgtctt

SEQ ID NO: 30700 - DNA, 25 bp, Homo sapien
tgtaaaggcaagcacctaccaatgc

SEQ ID NO: 30701 - DNA, 25 bp, Homo sapien
taattgtagttagaccatggttcac

SEQ ID NO: 30702 - DNA, 25 bp, Homo sapien
ctttcttaggtaatgagggcagttc

SEQ ID NO: 30703 - DNA, 25 bp, Homo sapien
acttgatatgattgtgatgcccttc

SEQ ID NO: 30704 - DNA, 25 bp, Homo sapien
ggttcaccagaacaagtgtcactat

SEQ ID NO: 30705 - DNA, 25 bp, Homo sapien
atcaggttagtaagcctgcagagat

SEQ ID NO: 30706 - DNA, 25 bp, Homo sapien
actctaggaagacaacatcaggtta

SEQ ID NO: 30707 - DNA, 25 bp, Homo sapien
ctgcagagatgctgagttctttaat

SEQ ID NO: 30708 - DNA, 25 bp, Homo sapien
ggggagagcagatcagtttattgaa

SEQ ID NO: 30709 - DNA, 25 bp, Homo sapien
attgaaagtgagtacaatgaagcgg

SEQ ID NO: 30710 - DNA, 25 bp, Homo sapien
tacacacgctgcaatggacaaaatc

SEQ ID NO: 30711 - DNA, 25 bp, Homo sapien
ctccagaaaggagtgaaaaaatgaa

SEQ ID NO: 30712 - DNA, 25 bp, Homo sapien
acactgtgaattactggaggagaaa

SEQ ID NO: 30713 - DNA, 25 bp, Homo sapien
acatgctctgaaatcgggcagtgaa

SEQ ID NO: 30714 - DNA, 25 bp, Homo sapien
cggggactcactggttcaaggtaaa

SEQ ID NO: 30715 - DNA, 25 bp, Homo sapien
cttcaagtaggacgagttatggaat

SEQ ID NO: 30716 - DNA, 25 bp, Homo sapien
atttgcattctgatacctgaggaca

SEQ ID NO: 30717 - DNA, 25 bp, Homo sapien
ggcagtgaagagcacaaataaacaa

SEQ ID NO: 30718 - DNA, 25 bp, Homo sapien
acgtcatctaacaagttcaggcttc

SEQ ID NO: 30719 - DNA, 25 bp, Homo sapien
ggggtaagcttggtttgtgataata

SEQ ID NO: 30720 - DNA, 25 bp, Homo sapien
cttttgttcctggagaccgggtctg

SEQ ID NO: 30721 - DNA, 25 bp, Homo sapien
tggggtagccaaccataccttggat

SEQ ID NO: 30722 - DNA, 25 bp, Homo sapien
agctccattcctgagcccggggtaa

SEQ ID NO: 30723 - DNA, 25 bp, Homo sapien
ccgtcggctctggaaagactcctga

SEQ ID NO: 30724 - DNA, 25 bp, Homo sapien
agaaggatcgataaggaaaatccac

SEQ ID NO: 30725 - DNA, 25 bp, Homo sapien
tcctgaggaagtcgggccctcctta

SEQ ID NO: 30726 - DNA, 25 bp, Homo sapien
agagtgacgccaaaagatctcctaa

SEQ ID NO: 30727 - DNA, 25 bp, Homo sapien
taaaaacaatgagaaggatcgataa

SEQ ID NO: 30728 - DNA, 25 bp, Homo sapien
tttggtggcttgagtgttcaatgcc

SEQ ID NO: 30729 - DNA, 25 bp, Homo sapien
tgtgataatagtgtgtcctcccaga

SEQ ID NO: 30730 - DNA, 25 bp, Homo sapien
tgggaaaagtcgagatgcacaatta

SEQ ID NO: 30731 - DNA, 25 bp, Homo sapien
ttaactcaacaagtttcctgaccag

SEQ ID NO: 30732 - DNA, 25 bp, Homo sapien
agctcggtaacatcatgagacaggg

SEQ ID NO: 30733 - DNA, 25 bp, Homo sapien
caagtttcctgaccagaagttctcc

SEQ ID NO: 30734 - DNA, 25 bp, Homo sapien
gtgaagagactctagaaataagatt

SEQ ID NO: 30735 - DNA, 25 bp, Homo sapien
aaataagattgatgggaaaagtcga

SEQ ID NO: 30736 - DNA, 25 bp, Homo sapien
gagacaccggttgtgaagagactct

SEQ ID NO: 30737 - DNA, 25 bp, Homo sapien
cttttctgaatagctcggtaacatc

SEQ ID NO: 30738 - DNA, 25 bp, Homo sapien
atgcacaattaggaaaaagcaaatt

SEQ ID NO: 30739 - DNA, 25 bp, Homo sapien
acaccggttgtgaagagactctaga

SEQ ID NO: 30740 - DNA, 25 bp, Homo sapien
ccagacccggtctccaggaacaaaa

SEQ ID NO: 30741 - DNA, 25 bp, Homo sapien
tgtggctccttggtcctaacgttca

SEQ ID NO: 30742 - DNA, 25 bp, Homo sapien
tggtgcctggattagattagaagct

SEQ ID NO: 30743 - DNA, 25 bp, Homo sapien
ccctgtcgctgagagcattcaagag

SEQ ID NO: 30744 - DNA, 25 bp, Homo sapien
aaggaacgtgttcagcctccagcca

SEQ ID NO: 30745 - DNA, 25 bp, Homo sapien
aattgctttgctgaggttgccatgg

SEQ ID NO: 30746 - DNA, 25 bp, Homo sapien
tccagtctcttcagcggcagttttg

SEQ ID NO: 30747 - DNA, 25 bp, Homo sapien
ttcaacggaatgagcctaagtactt

SEQ ID NO: 30748 - DNA, 25 bp, Homo sapien
tctgttctgtgattcgaagactatc

SEQ ID NO: 30749 - DNA, 25 bp, Homo sapien
tcctgagacagggagattctgttct

SEQ ID NO: 30750 - DNA, 25 bp, Homo sapien
ttcaagagggcgaatggccatatgt

SEQ ID NO: 30751 - DNA, 25 bp, Homo sapien
taaaactggaaagattctgtggctc

SEQ ID NO: 30752 - DNA, 25 bp, Homo sapien
tcccagttggcctcaggttacagac

SEQ ID NO: 30753 - DNA, 25 bp, Homo sapien
agcccaaggcatctgtgctgttgtt

SEQ ID NO: 30754 - DNA, 25 bp, Homo sapien
cctgatcacagctgacctggaagtc

SEQ ID NO: 30755 - DNA, 25 bp, Homo sapien
ctttgtggttccagagcgaaagccc

SEQ ID NO: 30756 - DNA, 25 bp, Homo sapien
gacttcgaccaagagcaaaaggcct

SEQ ID NO: 30757 - DNA, 25 bp, Homo sapien
acacccagaccctgagggaactatt

SEQ ID NO: 30758 - DNA, 25 bp, Homo sapien
tgccgagcccgtccgtacgagagtc

SEQ ID NO: 30759 - DNA, 25 bp, Homo sapien
cccaaagatgaaggagatcccagtt

SEQ ID NO: 30760 - DNA, 25 bp, Homo sapien
aaaggcctctttgcaggcacctggc

SEQ ID NO: 30761 - DNA, 25 bp, Homo sapien
ttcacgcagaaagctgacttcgacc

SEQ ID NO: 30762 - DNA, 25 bp, Homo sapien
acaatatccttcctgggagccgcct

SEQ ID NO: 30763 - DNA, 25 bp, Homo sapien
aggccttttgctcttggtcgaagtc

SEQ ID NO: 30764 - DNA, 25 bp, Homo sapien
tctcttgccaggtgcctgcaaagag

SEQ ID NO: 30765 - DNA, 25 bp, Homo sapien
tgaaggggctttcgctctggaacca

SEQ ID NO: 30766 - DNA, 25 bp, Homo sapien
gccagggcatctcttgccaggtgcc

SEQ ID NO: 30767 - DNA, 25 bp, Homo sapien
aggcggctcccaggaaggatattgt

SEQ ID NO: 30768 - DNA, 25 bp, Homo sapien
tcccaggaaggatattgtaggtgtt

SEQ ID NO: 30769 - DNA, 25 bp, Homo sapien
tgctcttggtcgaagtcagctttct

SEQ ID NO: 30770 - DNA, 25 bp, Homo sapien
gtgcctgcaaagaggccttttgctc

SEQ ID NO: 30771 - DNA, 25 bp, Homo sapien
ggggctttcgctctggaaccacaaa

SEQ ID NO: 30772 - DNA, 25 bp, Homo sapien
tcagctttctgcgtgaaggggcttt

SEQ ID NO: 30773 - DNA, 25 bp, Homo sapien
ccaggtgcctgcaaagaggcctttt

SEQ ID NO: 30774 - DNA, 25 bp, Homo sapien
aaaggcgtattttggaattgtcacc

SEQ ID NO: 30775 - DNA, 25 bp, Homo sapien
gctgtaggacgttgtcagacaatga

SEQ ID NO: 30776 - DNA, 25 bp, Homo sapien
aggggaggactcttccattctgaga

SEQ ID NO: 30777 - DNA, 25 bp, Homo sapien
cccaggttctgctaaaggcgtattt

SEQ ID NO: 30778 - DNA, 25 bp, Homo sapien
agacaatgacgcattctgtgcccaa

SEQ ID NO: 30779 - DNA, 25 bp, Homo sapien
ttcttgtgaacagtcgtggtcttat

SEQ ID NO: 30780 - DNA, 25 bp, Homo sapien
aagtagctaccctatgcaaagccat

SEQ ID NO: 30781 - DNA, 25 bp, Homo sapien
agccaccactcttctcgggaggtta

SEQ ID NO: 30782 - DNA, 25 bp, Homo sapien
tcacctccaagttaggaaggcagtg

SEQ ID NO: 30783 - DNA, 25 bp, Homo sapien
tgccttgggtaaccaacagagctgt

SEQ ID NO: 30784 - DNA, 25 bp, Homo sapien
aaaaaaccctgatttggactccata

SEQ ID NO: 30785 - DNA, 25 bp, Homo sapien
tacgcctttagcagaacctggggaa

SEQ ID NO: 30786 - DNA, 25 bp, Homo sapien
gaggatagtgtggtgacaattccaa

SEQ ID NO: 30787 - DNA, 25 bp, Homo sapien
gagtcctaaggagagatatggcttt

SEQ ID NO: 30788 - DNA, 25 bp, Homo sapien
tcctaacttggaggtgaatcctggg

SEQ ID NO: 30789 - DNA, 25 bp, Homo sapien
ttaacctcccgagaagagtggtggc

SEQ ID NO: 30790 - DNA, 25 bp, Homo sapien
atatggctttgcatagggtagctac

SEQ ID NO: 30791 - DNA, 25 bp, Homo sapien
aatacttcttagagactcagggccc

SEQ ID NO: 30792 - DNA, 25 bp, Homo sapien
tccagcaacaagtcatgccatgtgt

SEQ ID NO: 30793 - DNA, 25 bp, Homo sapien
aagttcccagatgacggccatgcct

SEQ ID NO: 30794 - DNA, 25 bp, Homo sapien
ctgtttaggtactgtgagccacgct

SEQ ID NO: 30795 - DNA, 25 bp, Homo sapien
ttggcttcaagagctgtaccaggaa

SEQ ID NO: 30796 - DNA, 25 bp, Homo sapien
tttgctggttaaggaagaaggaagc

SEQ ID NO: 30797 - DNA, 25 bp, Homo sapien
gcagatattcaaggaaggggtttaa

SEQ ID NO: 30798 - DNA, 25 bp, Homo sapien
aactaagtgcttggacctggagact

SEQ ID NO: 30799 - DNA, 25 bp, Homo sapien
tgcatattaggacagagactattcc

SEQ ID NO: 30800 - DNA, 25 bp, Homo sapien
ttccagtgttagaatgtgagggaga

SEQ ID NO: 30801 - DNA, 25 bp, Homo sapien
tggagactcccagaaggactaactc

SEQ ID NO: 30802 - DNA, 25 bp, Homo sapien
acatttaggagacatagggcatgga

SEQ ID NO: 30803 - DNA, 25 bp, Homo sapien
acagaaacagtgaatccaagaaaac

SEQ ID NO: 30804 - DNA, 25 bp, Homo sapien
tggatttgaaggacatttaggagac

SEQ ID NO: 30805 - DNA, 25 bp, Homo sapien
caagaaaacaataacaaatggaggt

SEQ ID NO: 30806 - DNA, 25 bp, Homo sapien
aggagagggtagcaatttccagttt

SEQ ID NO: 30807 - DNA, 25 bp, Homo sapien
ctggaaattgctaccctctccttaa

SEQ ID NO: 30808 - DNA, 25 bp, Homo sapien
attagcatttccagccagccagatg

SEQ ID NO: 30809 - DNA, 25 bp, Homo sapien
tcttgacccttgacctttagcttcc

SEQ ID NO: 30810 - DNA, 25 bp, Homo sapien
agagacctagaaaaggttcttgacc

SEQ ID NO: 30811 - DNA, 25 bp, Homo sapien
tgcaaacggcccttagctctttatc

SEQ ID NO: 30812 - DNA, 25 bp, Homo sapien
gtctctgtcctaatatgcagcccac

SEQ ID NO: 30813 - DNA, 25 bp, Homo sapien
ttgagccactgcaaacggcccttag

SEQ ID NO: 30814 - DNA, 25 bp, Homo sapien
tctaacactggaatagtctctgtcc

SEQ ID NO: 30815 - DNA, 25 bp, Homo sapien
agccagatgcccaaatcagagagac

SEQ ID NO: 30816 - DNA, 25 bp, Homo sapien
actgcagccaggtgtctctaaaatg

SEQ ID NO: 30817 - DNA, 25 bp, Homo sapien
atgcccaaatcagagagacctagaa

SEQ ID NO: 30818 - DNA, 25 bp, Homo sapien
tcagcccaagtgttgagactcaggt

SEQ ID NO: 30819 - DNA, 25 bp, Homo sapien
aaatacacagcagaaattcgccttt

SEQ ID NO: 30820 - DNA, 25 bp, Homo sapien
catgtcctcggcactcaggtctgca

SEQ ID NO: 30821 - DNA, 25 bp, Homo sapien
attaaccctcccatgggcctgggca

SEQ ID NO: 30822 - DNA, 25 bp, Homo sapien
ttccgggaccaagcaggatgtcaca

SEQ ID NO: 30823 - DNA, 25 bp, Homo sapien
tcctgacgctgcagcctgacactgt

SEQ ID NO: 30824 - DNA, 25 bp, Homo sapien
gtatgcagctcagggcggccttaat

SEQ ID NO: 30825 - DNA, 25 bp, Homo sapien
cctctcatgggcttctgtgggtcat

SEQ ID NO: 30826 - DNA, 25 bp, Homo sapien
acatcacactgattccgggaccaag

SEQ ID NO: 30827 - DNA, 25 bp, Homo sapien
tccagccctggctaatgcagtcttc

SEQ ID NO: 30828 - DNA, 25 bp, Homo sapien
tcttctgtggaggaatggcatccca

SEQ ID NO: 30829 - DNA, 25 bp, Homo sapien
aaggtcaaggcttcctcgattcgga

SEQ ID NO: 30830 - DNA, 25 bp, Homo sapien
tggttcagggagagaaactaacaaa

SEQ ID NO: 30831 - DNA, 25 bp, Homo sapien
attaaggccgccctgagctgcatac

SEQ ID NO: 30832 - DNA, 25 bp, Homo sapien
aaaccagcagcccagagttgatgag

SEQ ID NO: 30833 - DNA, 25 bp, Homo sapien
tcggaggcagccttccatcgcaaac

SEQ ID NO: 30834 - DNA, 25 bp, Homo sapien
tgggatgccattcctccacagaaga

SEQ ID NO: 30835 - DNA, 25 bp, Homo sapien
ccaggcccatgggagggttaattaa

SEQ ID NO: 30836 - DNA, 25 bp, Homo sapien
gtgaggctgcccacgcggccatctt

SEQ ID NO: 30837 - DNA, 25 bp, Homo sapien
cacttgggctgaactgcagacctga

SEQ ID NO: 30838 - DNA, 25 bp, Homo sapien
ctcagctcaaaatgtggttcaggga

SEQ ID NO: 30839 - DNA, 25 bp, Homo sapien
ctgcaaacatagagaacgtgaagta

SEQ ID NO: 30840 - DNA, 25 bp, Homo sapien
gtctatattactgaaaagtctgcac

SEQ ID NO: 30841 - DNA, 25 bp, Homo sapien
atgtgaacctaaatggaattaagaa

SEQ ID NO: 30842 - DNA, 25 bp, Homo sapien
catctgaagttggatatgaacctaa

SEQ ID NO: 30843 - DNA, 25 bp, Homo sapien
gttctatcaagaaaattcatctgaa

SEQ ID NO: 30844 - DNA, 25 bp, Homo sapien
tggatatgaacctaaatggaattta

SEQ ID NO: 30845 - DNA, 25 bp, Homo sapien
tggaatttatgtgaacctaaatgga

SEQ ID NO: 30846 - DNA, 25 bp, Homo sapien
tgtcatgtagcgtcaatatagtttt

SEQ ID NO: 30847 - DNA, 25 bp, Homo sapien
taatgaaacattaaactgaccctaa

SEQ ID NO: 30848 - DNA, 25 bp, Homo sapien
tactgaaaagtctgcacatttgttc

SEQ ID NO: 30849 - DNA, 25 bp, Homo sapien
ttggtctctaaatacctaatgaaac

SEQ ID NO: 30850 - DNA, 25 bp, Homo sapien
tttagttctgtcatgtagcgtcaat

SEQ ID NO: 30851 - DNA, 25 bp, Homo sapien
cagggggttcttcacaggtacaata

SEQ ID NO: 30852 - DNA, 25 bp, Homo sapien
caatgcagggggttcttcacaggta

SEQ ID NO: 30853 - DNA, 25 bp, Homo sapien
aggctagacccatgggctcagttgt

SEQ ID NO: 30854 - DNA, 25 bp, Homo sapien
tagacccatgggctcagttgtcctc

SEQ ID NO: 30855 - DNA, 25 bp, Homo sapien
aggctgcaatgcagggggttcttca

SEQ ID NO: 30856 - DNA, 25 bp, Homo sapien
tgcagggggttcttcacaggtacaa

SEQ ID NO: 30857 - DNA, 25 bp, Homo sapien
acaataaataatagctccctgcagc

SEQ ID NO: 30858 - DNA, 25 bp, Homo sapien
ggctagacccatgggctcagttgtc

SEQ ID NO: 30859 - DNA, 25 bp, Homo sapien
ccaggctagacccatgggctcagtt

SEQ ID NO: 30860 - DNA, 25 bp, Homo sapien
agacccatgggctcagttgtcctcc

SEQ ID NO: 30861 - DNA, 25 bp, Homo sapien
caggctagacccatgggctcagttg

SEQ ID NO: 30862 - DNA, 25 bp, Homo sapien
cagggggttcttcacaggtacaata

SEQ ID NO: 30863 - DNA, 25 bp, Homo sapien
ccatgcccagctgttttataaaata

SEQ ID NO: 30864 - DNA, 25 bp, Homo sapien
gtgcacaccaccattcctggcaaga

SEQ ID NO: 30865 - DNA, 25 bp, Homo sapien
ggctagacccatgggctcagttgtc

SEQ ID NO: 30866 - DNA, 25 bp, Homo sapien
acaataaataatagctccctgcagc

SEQ ID NO: 30867 - DNA, 25 bp, Homo sapien
tagacccatgggctcagttgtcctc

SEQ ID NO: 30868 - DNA, 25 bp, Homo sapien
aggctgcaatgcagggggttcttca

SEQ ID NO: 30869 - DNA, 25 bp, Homo sapien
agacccatgggctcagttgtcctcc

SEQ ID NO: 30870 - DNA, 25 bp, Homo sapien
ccaggctagacccatgggctcagtt

SEQ ID NO: 30871 - DNA, 25 bp, Homo sapien
caccattcctggcaagaaaacattt

SEQ ID NO: 30872 - DNA, 25 bp, Homo sapien
caatgcagggggttcttcacaggta

SEQ ID NO: 30873 - DNA, 25 bp, Homo sapien
ttcatggtggacattgcctgcagca

SEQ ID NO: 30874 - DNA, 25 bp, Homo sapien
tgcccttcatgaagcatggggacct

SEQ ID NO: 30875 - DNA, 25 bp, Homo sapien
tgtgtggctgactttggactctcct

SEQ ID NO: 30876 - DNA, 25 bp, Homo sapien
ggaagatctacagcggggctactat

SEQ ID NO: 30877 - DNA, 25 bp, Homo sapien
agagcctggctgacaacctgtatac

SEQ ID NO: 30878 - DNA, 25 bp, Homo sapien
tgaaagtggctatgaagatgctgaa

SEQ ID NO: 30879 - DNA, 25 bp, Homo sapien
tgcagcatggagtacctgagctctc

SEQ ID NO: 30880 - DNA, 25 bp, Homo sapien
aaacttgttggggtaagcctctgag

SEQ ID NO: 30881 - DNA, 25 bp, Homo sapien
aattgcccgtcaagtggctggccct

SEQ ID NO: 30882 - DNA, 25 bp, Homo sapien
ttgaagagttcctcaggaaagcagc

SEQ ID NO: 30883 - DNA, 25 bp, Homo sapien
atggggacctgcacgccttcctgct

SEQ ID NO: 30884 - DNA, 25 bp, Homo sapien
gcaaactgcccgatgaaagcacctt

SEQ ID NO: 30885 - DNA, 25 bp, Homo sapien
gctataaggaaaagctaagccagct

SEQ ID NO: 30886 - DNA, 25 bp, Homo sapien
tcctggcttgtagacggttgctttc

SEQ ID NO: 30887 - DNA, 25 bp, Homo sapien
ctggaatggcagacatatcgcactt

SEQ ID NO: 30888 - DNA, 25 bp, Homo sapien
acctaagaatcatggtgagtggcca

SEQ ID NO: 30889 - DNA, 25 bp, Homo sapien
agcaccttgctaggcagatggcatt

SEQ ID NO: 30890 - DNA, 25 bp, Homo sapien
aaagcttggacgtttgatatggagt

SEQ ID NO: 30891 - DNA, 25 bp, Homo sapien
tttagttcctagtgagcagctctct

SEQ ID NO: 30892 - DNA, 25 bp, Homo sapien
atggcattattggaaggagctaact

SEQ ID NO: 30893 - DNA, 25 bp, Homo sapien
tccaaaagtgctacaagagtccaaa

SEQ ID NO: 30894 - DNA, 25 bp, Homo sapien
actgtggggactaaactgaaagctt

SEQ ID NO: 30895 - DNA, 25 bp, Homo sapien
cactaggaactaaactggctggcac

SEQ ID NO: 30896 - DNA, 25 bp, Homo sapien
aatgagctcataaaggtagacgttc

SEQ ID NO: 30897 - DNA, 25 bp, Homo sapien
tctggaacaagtgcgatatgtctgc

SEQ ID NO: 30898 - DNA, 25 bp, Homo sapien
acatggtgtaccaagtgtgactgtg

SEQ ID NO: 30899 - DNA, 25 bp, Homo sapien
ttgagaggccaaataagacgaaata

SEQ ID NO: 30900 - DNA, 25 bp, Homo sapien
tctctgcgcgcacacaggaaggaaa

SEQ ID NO: 30901 - DNA, 25 bp, Homo sapien
atacaggagaaagcaaccgtctaca

SEQ ID NO: 30902 - DNA, 25 bp, Homo sapien
atataaagataacagcaaagaagac

SEQ ID NO: 30903 - DNA, 25 bp, Homo sapien
taggtcctgagaagattgcactgat

SEQ ID NO: 30904 - DNA, 25 bp, Homo sapien
tgtgccatgggctattgtgtcaccc

SEQ ID NO: 30905 - DNA, 25 bp, Homo sapien
tagccagagcagaataagacagctt

SEQ ID NO: 30906 - DNA, 25 bp, Homo sapien
ttgacagtagaaagataacaggaag

SEQ ID NO: 30907 - DNA, 25 bp, Homo sapien
tccatggctaggagcagtcactcat

SEQ ID NO: 30908 - DNA, 25 bp, Homo sapien
caaccctctgaggtgcatgctattt

SEQ ID NO: 30909 - DNA, 25 bp, Homo sapien
cccatagaaagaagtaggaatagat

SEQ ID NO: 30910 - DNA, 25 bp, Homo sapien
taggaatagatgctgaagacccatt

SEQ ID NO: 30911 - DNA, 25 bp, Homo sapien
tgagaagatgaagtagcctgtccat

SEQ ID NO: 30912 - DNA, 25 bp, Homo sapien
ggataagcttggttgacagtagaaa

SEQ ID NO: 30913 - DNA, 25 bp, Homo sapien
tacttgaaatctagagagaagggga

SEQ ID NO: 30914 - DNA, 25 bp, Homo sapien
gaagacccattgacatacccagtac

SEQ ID NO: 30915 - DNA, 25 bp, Homo sapien
tagggcatctaaccgtggaaaccca

SEQ ID NO: 30916 - DNA, 25 bp, Homo sapien
cagcctctgtagtcaggaaatccca

SEQ ID NO: 30917 - DNA, 25 bp, Homo sapien
cagctagggttcacaatgcaaattg

SEQ ID NO: 30918 - DNA, 25 bp, Homo sapien
ggagtacagtgatgtaaacacagtt

SEQ ID NO: 30919 - DNA, 25 bp, Homo sapien
ggtaaagggcagtgaatgttcaata

SEQ ID NO: 30920 - DNA, 25 bp, Homo sapien
ctatggggattacacgaatgaaaac

SEQ ID NO: 30921 - DNA, 25 bp, Homo sapien
actgctcctagccatggacaggcta

SEQ ID NO: 30922 - DNA, 25 bp, Homo sapien
atcctcccaatgtggggagatcaca

SEQ ID NO: 30923 - DNA, 25 bp, Homo sapien
tgggatttcctgactacagaggctg

SEQ ID NO: 30924 - DNA, 25 bp, Homo sapien
acactacaatttcgacttcctgggt

SEQ ID NO: 30925 - DNA, 25 bp, Homo sapien
catggacaggctacttcatcttctc

SEQ ID NO: 30926 - DNA, 25 bp, Homo sapien
tactgggtatgtcaatgggtcttca

SEQ ID NO: 30927 - DNA, 25 bp, Homo sapien
aaatagcatgcacctcagagggttg

SEQ ID NO: 30928 - DNA, 25 bp, Homo sapien
acacatttaggacactgcacactgc

SEQ ID NO: 30929 - DNA, 25 bp, Homo sapien
ttaaagacaatgactcagggtggta

SEQ ID NO: 30930 - DNA, 25 bp, Homo sapien
acactgcaccacatgaagggaaaag

SEQ ID NO: 30931 - DNA, 25 bp, Homo sapien
cacatggaatacacggttttcctaa

SEQ ID NO: 30932 - DNA, 25 bp, Homo sapien
agcaggtttctgttcccacatggaa

SEQ ID NO: 30933 - DNA, 25 bp, Homo sapien
tattttctgttagcactggggctca

SEQ ID NO: 30934 - DNA, 25 bp, Homo sapien
atgagtgcagcagcattacacagta

SEQ ID NO: 30935 - DNA, 25 bp, Homo sapien
cttaaacagacaaacagaaaagtgt

SEQ ID NO: 30936 - DNA, 25 bp, Homo sapien
atctttgaagtcaattagacaagag

SEQ ID NO: 30937 - DNA, 25 bp, Homo sapien
tccactccagtctgcgtgagtgtgg

SEQ ID NO: 30938 - DNA, 25 bp, Homo sapien
tgggtgtatgagtgcagcagcatta

SEQ ID NO: 30939 - DNA, 25 bp, Homo sapien
acatgccaggtgcttcacaagcctt

SEQ ID NO: 30940 - DNA, 25 bp, Homo sapien
gtaatgctgctgcactcatacaccc

SEQ ID NO: 30941 - DNA, 25 bp, Homo sapien
tttcataagtgaggcgattgtgttt

SEQ ID NO: 30942 - DNA, 25 bp, Homo sapien
ctcctgaggtcatgtagctagtaaa

SEQ ID NO: 30943 - DNA, 25 bp, Homo sapien
cttcaaagatactgtgtaatgctgc

SEQ ID NO: 30944 - DNA, 25 bp, Homo sapien
tttctcaacaagcttgcaaggcaag

SEQ ID NO: 30945 - DNA, 25 bp, Homo sapien
ggagagcaatggcatatgtgtctac

SEQ ID NO: 30946 - DNA, 25 bp, Homo sapien
cgattgtgtttgaaagggttaatta

SEQ ID NO: 30947 - DNA, 25 bp, Homo sapien
tctaccaccctgagtcattgtcttt

SEQ ID NO: 30948 - DNA, 25 bp, Homo sapien
gggttaattaaatctcctgaggtca

SEQ ID NO: 30949 - DNA, 25 bp, Homo sapien
cttgcaaggcaagtattatcactcc

SEQ ID NO: 30950 - DNA, 25 bp, Homo sapien
tcaggagctggtgttagtgcagaaa

SEQ ID NO: 30951 - DNA, 25 bp, Homo sapien
agaaagtggtgttccgaccttcaga

SEQ ID NO: 30952 - DNA, 25 bp, Homo sapien
tccctagctttggaagacaaggaat

SEQ ID NO: 30953 - DNA, 25 bp, Homo sapien
ttcatggccctttgcagtccgtgct

SEQ ID NO: 30954 - DNA, 25 bp, Homo sapien
atcccactggctcaggaaatcccta

SEQ ID NO: 30955 - DNA, 25 bp, Homo sapien
acatagtcatcatctcaggagctgg

SEQ ID NO: 30956 - DNA, 25 bp, Homo sapien
ctggaggttattggagaaaatggca

SEQ ID NO: 30957 - DNA, 25 bp, Homo sapien
ttgcaaaagcaaagcacatagtcat

SEQ ID NO: 30958 - DNA, 25 bp, Homo sapien
ttagtgcagaaagtggtgttccgac

SEQ ID NO: 30959 - DNA, 25 bp, Homo sapien
gttattggagaaaatggcaagccca

SEQ ID NO: 30960 - DNA, 25 bp, Homo sapien
actggctcaggaaatccctagcttt

SEQ ID NO: 30961 - DNA, 25 bp, Homo sapien
cggccaagacttactgtaaaaactc

SEQ ID NO: 30962 - DNA, 25 bp, Homo sapien
cttccaaagctagggatttcctgag

SEQ ID NO: 30963 - DNA, 25 bp, Homo sapien
actccggccaagacttactgtaaaa

SEQ ID NO: 30964 - DNA, 25 bp, Homo sapien
gcactccggccaagacttactgtaa

SEQ ID NO: 30965 - DNA, 25 bp, Homo sapien
aattccttgtcttccaaagctaggg

SEQ ID NO: 30966 - DNA, 25 bp, Homo sapien
tgtaaaaactcaaagcacggtggct

SEQ ID NO: 30967 - DNA, 25 bp, Homo sapien
gtcttccaaagctagggatttcctg

SEQ ID NO: 30968 - DNA, 25 bp, Homo sapien
ccttgtcttccaaagctagggattt

SEQ ID NO: 30969 - DNA, 25 bp, Homo sapien
ttgtcttccaaagctagggatttcc

SEQ ID NO: 30970 - DNA, 25 bp, Homo sapien
taaaaactcaaagcacggtggctca

SEQ ID NO: 30971 - DNA, 25 bp, Homo sapien
ctgcactccggccaagacttactgt

SEQ ID NO: 30972 - DNA, 25 bp, Homo sapien
cggccaagacttactgtaaaaactc

SEQ ID NO: 30973 - DNA, 25 bp, Homo sapien
actccggccaagacttactgtaaaa

SEQ ID NO: 30974 - DNA, 25 bp, Homo sapien
ttgtcttccaaagctagggatttcc

SEQ ID NO: 30975 - DNA, 25 bp, Homo sapien
ctgcactccggccaagacttactgt

SEQ ID NO: 30976 - DNA, 25 bp, Homo sapien
gcactccggccaagacttactgtaa

SEQ ID NO: 30977 - DNA, 25 bp, Homo sapien
aaatacacaaattaggggctgggca

SEQ ID NO: 30978 - DNA, 25 bp, Homo sapien
ccttgtcttccaaagctagggattt

SEQ ID NO: 30979 - DNA, 25 bp, Homo sapien
tgtaaaaactcaaagcacggtggct

SEQ ID NO: 30980 - DNA, 25 bp, Homo sapien
aattccttgtcttccaaagctaggg

SEQ ID NO: 30981 - DNA, 25 bp, Homo sapien
cttccaaagctagggatttcctgag

SEQ ID NO: 30982 - DNA, 25 bp, Homo sapien
taaaaactcaaagcacggtggctca

SEQ ID NO: 30983 - DNA, 25 bp, Homo sapien
ggcatggtccatgtggctccaacaa

SEQ ID NO: 30984 - DNA, 25 bp, Homo sapien
atgccagggaatgagcgatccaaaa

SEQ ID NO: 30985 - DNA, 25 bp, Homo sapien
tcgaattcactagggcagagtgact

SEQ ID NO: 30986 - DNA, 25 bp, Homo sapien
gggaaggttcctagcacttagcagt

SEQ ID NO: 30987 - DNA, 25 bp, Homo sapien
gaaaagagttcaaattgctgggcgc

SEQ ID NO: 30988 - DNA, 25 bp, Homo sapien
ctggaagtcagcagagtcacagcaa

SEQ ID NO: 30989 - DNA, 25 bp, Homo sapien
ctagagaccctgacccagctgagaa

SEQ ID NO: 30990 - DNA, 25 bp, Homo sapien
tacaaaaggcaaaggtctggatgga

SEQ ID NO: 30991 - DNA, 25 bp, Homo sapien
gtcacagcaagtcagcagctatttt

SEQ ID NO: 30992 - DNA, 25 bp, Homo sapien
atagggacttgctatggagcctccc

SEQ ID NO: 30993 - DNA, 25 bp, Homo sapien
cgatccaaaagtggggactgaaacc

SEQ ID NO: 30994 - DNA, 25 bp, Homo sapien
agtctgtttaagatgtagctgcttc

SEQ ID NO: 30995 - DNA, 25 bp, Homo sapien
tcagggtctctaggcctttctggct

SEQ ID NO: 30996 - DNA, 25 bp, Homo sapien
ctgccctagtgaattcgagtggtga

SEQ ID NO: 30997 - DNA, 25 bp, Homo sapien
atgccagtcactctgccctagtgaa

SEQ ID NO: 30998 - DNA, 25 bp, Homo sapien
attgttggagccacatggaccatgc

SEQ ID NO: 30999 - DNA, 25 bp, Homo sapien
tgccttttgtaaggggaggctccat

SEQ ID NO: 31000 - DNA, 25 bp, Homo sapien
ttggatcgctcattccctggcatgc

SEQ ID NO: 31001 - DNA, 25 bp, Homo sapien
cgagtggtgaccaggggcccttctc

SEQ ID NO: 31002 - DNA, 25 bp, Homo sapien
gctccatccagacctttgccttttg

SEQ ID NO: 31003 - DNA, 25 bp, Homo sapien
attggcagaacttaaaccctatggc

SEQ ID NO: 31004 - DNA, 25 bp, Homo sapien
ttctcagctgggtcagggtctctag

SEQ ID NO: 31005 - DNA, 25 bp, Homo sapien
tgagtcccttcctctcggcgggtgc

SEQ ID NO: 31006 - DNA, 25 bp, Homo sapien
ggggctggctctcagttcccgcctt

SEQ ID NO: 31007 - DNA, 25 bp, Homo sapien
aagacgggctcgctctcagtcgccg

SEQ ID NO: 31008 - DNA, 25 bp, Homo sapien
taagagggcctagctctgagtccct

SEQ ID NO: 31009 - DNA, 25 bp, Homo sapien
aggggctggctctctgtactcgcct

SEQ ID NO: 31010 - DNA, 25 bp, Homo sapien
gaggctgtctcccaccactgcgatg

SEQ ID NO: 31011 - DNA, 25 bp, Homo sapien
aggggctggttctcagtccctgcct

SEQ ID NO: 31012 - DNA, 25 bp, Homo sapien
gtactcgcctctcgatgggtgcctc

SEQ ID NO: 31013 - DNA, 25 bp, Homo sapien
cccgcctgcgattggggtcctaaga

SEQ ID NO: 31014 - DNA, 25 bp, Homo sapien
tggctgtcactcctcggctcgtgga

SEQ ID NO: 31015 - DNA, 25 bp, Homo sapien
cctgcgatggcggtcccaagtgtca

SEQ ID NO: 31016 - DNA, 25 bp, Homo sapien
ttgactgaaaaggaaggaatgcatt

SEQ ID NO: 31017 - DNA, 25 bp, Homo sapien
actatgcaatacacagagacttacc

SEQ ID NO: 31018 - DNA, 25 bp, Homo sapien
agtaaaagaatcatggctcatagtc

SEQ ID NO: 31019 - DNA, 25 bp, Homo sapien
ttaggcattaaagtgtaagtatccc

SEQ ID NO: 31020 - DNA, 25 bp, Homo sapien
gttcttggagggtctattaggcatt

SEQ ID NO: 31021 - DNA, 25 bp, Homo sapien
tctaaagtcagacaaaggatagact

SEQ ID NO: 31022 - DNA, 25 bp, Homo sapien
attaaaattggaggaacaacatttg

SEQ ID NO: 31023 - DNA, 25 bp, Homo sapien
acccggctggaagactgtttctaaa

SEQ ID NO: 31024 - DNA, 25 bp, Homo sapien
attgctttccatgcgtggtgactta

SEQ ID NO: 31025 - DNA, 25 bp, Homo sapien
ctgagaaacgttagtctagggaatc

SEQ ID NO: 31026 - DNA, 25 bp, Homo sapien
attgtggctaagtctaaaaggtctc

SEQ ID NO: 31027 - DNA, 25 bp, Homo sapien
taaacgttcaaaagactgtcaaatg

SEQ ID NO: 31028 - DNA, 25 bp, Homo sapien
caagaacagcagttaggtaagtctc

SEQ ID NO: 31029 - DNA, 25 bp, Homo sapien
attctcaaagacctgaggtatgctt

SEQ ID NO: 31030 - DNA, 25 bp, Homo sapien
tatgagatgaaaactagagactatg

SEQ ID NO: 31031 - DNA, 25 bp, Homo sapien
taaaattaagtcaccacgcatggaa

SEQ ID NO: 31032 - DNA, 25 bp, Homo sapien
atgagaccttttagacttagccaca

SEQ ID NO: 31033 - DNA, 25 bp, Homo sapien
aactagagactatgagccatgattc

SEQ ID NO: 31034 - DNA, 25 bp, Homo sapien
acaaggaactcgattagaagtcaac

SEQ ID NO: 31035 - DNA, 25 bp, Homo sapien
tagaagtcaacagtatgagatgaaa

SEQ ID NO: 31036 - DNA, 25 bp, Homo sapien
accacgcatggaaagcaatgcattc

SEQ ID NO: 31037 - DNA, 25 bp, Homo sapien
ataacaatagggatacttacacttt

SEQ ID NO: 31038 - DNA, 25 bp, Homo sapien
tgttctcagatggactaagtgcctc

SEQ ID NO: 31039 - DNA, 25 bp, Homo sapien
actcaaagtgttcatgcagatggga

SEQ ID NO: 31040 - DNA, 25 bp, Homo sapien
agaagctggcggaccaaatccattt

SEQ ID NO: 31041 - DNA, 25 bp, Homo sapien
tctgtgctcaggttagttagaagcc

SEQ ID NO: 31042 - DNA, 25 bp, Homo sapien
gcaaaggaagctagcatgtactcat

SEQ ID NO: 31043 - DNA, 25 bp, Homo sapien
cataagatgcctcagctataagctc

SEQ ID NO: 31044 - DNA, 25 bp, Homo sapien
ctgatgaatcgggatggttccttaa

SEQ ID NO: 31045 - DNA, 25 bp, Homo sapien
cacccttgaggtctgcagtccattt

SEQ ID NO: 31046 - DNA, 25 bp, Homo sapien
cactaggaaggagaagctttgttct

SEQ ID NO: 31047 - DNA, 25 bp, Homo sapien
gtgcagtcccaccaggtacacacag

SEQ ID NO: 31048 - DNA, 25 bp, Homo sapien
gattattgagcgctgagcaaaggaa

SEQ ID NO: 31049 - DNA, 25 bp, Homo sapien
ctgagcacagaagcaaatatgtacc

SEQ ID NO: 31050 - DNA, 25 bp, Homo sapien
agaggcacttagtccatctgagaac

SEQ ID NO: 31051 - DNA, 25 bp, Homo sapien
atcgagcaaggcgacagttctccca

SEQ ID NO: 31052 - DNA, 25 bp, Homo sapien
ccctttggaaaggaagcagtgaaat

SEQ ID NO: 31053 - DNA, 25 bp, Homo sapien
atagctgaggcatcttatggaaagc

SEQ ID NO: 31054 - DNA, 25 bp, Homo sapien
ccatgacatgcaagtaaaagaaagc

SEQ ID NO: 31055 - DNA, 25 bp, Homo sapien
tccttggaaaatgatgagtacatgc

SEQ ID NO: 31056 - DNA, 25 bp, Homo sapien
gcctgatgtggaggcataaagcttt

SEQ ID NO: 31057 - DNA, 25 bp, Homo sapien
ctcccaggttgtgaaactgaaattc

SEQ ID NO: 31058 - DNA, 25 bp, Homo sapien
aaaagaaagctctgccactgggctc

SEQ ID NO: 31059 - DNA, 25 bp, Homo sapien
gaacccttgggaatacatcgagcaa

SEQ ID NO: 31060 - DNA, 25 bp, Homo sapien
gaataggccatgtgagatcagttca

SEQ ID NO: 31061 - DNA, 25 bp, Homo sapien
aagcctagcattaaaagagactgac

SEQ ID NO: 31062 - DNA, 25 bp, Homo sapien
agtcagaggtcacacgaagctttct

SEQ ID NO: 31063 - DNA, 25 bp, Homo sapien
tgaatctagcactcagcaaatgacc

SEQ ID NO: 31064 - DNA, 25 bp, Homo sapien
attttaagaatacagcaggaccggg

SEQ ID NO: 31065 - DNA, 25 bp, Homo sapien
agagactgactaagaaactattgga

SEQ ID NO: 31066 - DNA, 25 bp, Homo sapien
gaccaagatggaatatatgaggcaa

SEQ ID NO: 31067 - DNA, 25 bp, Homo sapien
taatttgagtgaggaagcctagcat

SEQ ID NO: 31068 - DNA, 25 bp, Homo sapien
atcaatgatcgtgacaaggaagacc

SEQ ID NO: 31069 - DNA, 25 bp, Homo sapien
agatcagttcaagggcctgaaacct

SEQ ID NO: 31070 - DNA, 25 bp, Homo sapien
ggaaaatgactgtgcttggtgacca

SEQ ID NO: 31071 - DNA, 25 bp, Homo sapien
ctgcagagactagaaagcttcgtgt

SEQ ID NO: 31072 - DNA, 25 bp, Homo sapien
ttccgcaggtttcaggcccttgaac

SEQ ID NO: 31073 - DNA, 25 bp, Homo sapien
aaaatggtcatttgctgagtgctag

SEQ ID NO: 31074 - DNA, 25 bp, Homo sapien
tgctgagtgctagattcaaattttc

SEQ ID NO: 31075 - DNA, 25 bp, Homo sapien
attccaatagtttcttagtcagtct

SEQ ID NO: 31076 - DNA, 25 bp, Homo sapien
cttgaactgatctcacatggcctat

SEQ ID NO: 31077 - DNA, 25 bp, Homo sapien
tatatagtaacacagctgcagagac

SEQ ID NO: 31078 - DNA, 25 bp, Homo sapien
ttggtcttccttgtcacgatcattg

SEQ ID NO: 31079 - DNA, 25 bp, Homo sapien
tagaaagcttcgtgtgacctctgac

SEQ ID NO: 31080 - DNA, 25 bp, Homo sapien
atttccgtggctcttccgcaggttt

SEQ ID NO: 31081 - DNA, 25 bp, Homo sapien
gttggtcaccaagcacagtcatttt

SEQ ID NO: 31082 - DNA, 25 bp, Homo sapien
agccaagtcatcgtgggccaagctc

SEQ ID NO: 31083 - DNA, 25 bp, Homo sapien
atcggggttataatagggaagatac

SEQ ID NO: 31084 - DNA, 25 bp, Homo sapien
ccatgaattggggaatctgctttct

SEQ ID NO: 31085 - DNA, 25 bp, Homo sapien
ttgacagctgcctcttggagggtta

SEQ ID NO: 31086 - DNA, 25 bp, Homo sapien
atcctggcttcctggtgggactttt

SEQ ID NO: 31087 - DNA, 25 bp, Homo sapien
ctgcaggcccagaatgttgacagct

SEQ ID NO: 31088 - DNA, 25 bp, Homo sapien
gctggtggttgaaaggaatcctact

SEQ ID NO: 31089 - DNA, 25 bp, Homo sapien
aggggttcttaaataggcagctcag

SEQ ID NO: 31090 - DNA, 25 bp, Homo sapien
aaggaatcctactacatcggggtta

SEQ ID NO: 31091 - DNA, 25 bp, Homo sapien
tgtcagccacataaattcagcagag

SEQ ID NO: 31092 - DNA, 25 bp, Homo sapien
aatatgcccagtggagccatcggat

SEQ ID NO: 31093 - DNA, 25 bp, Homo sapien
taagaaagtgaggtatgtcatgaat

SEQ ID NO: 31094 - DNA, 25 bp, Homo sapien
tcaagtccaatgttatgcagagttt

SEQ ID NO: 31095 - DNA, 25 bp, Homo sapien
gaacacagatctattacagaaagtt

SEQ ID NO: 31096 - DNA, 25 bp, Homo sapien
cggaaaatgcatagacgttgccaac

SEQ ID NO: 31097 - DNA, 25 bp, Homo sapien
gttgccaacatctcctacgtgcatt

SEQ ID NO: 31098 - DNA, 25 bp, Homo sapien
tcagagacttccttagcttgcacgg

SEQ ID NO: 31099 - DNA, 25 bp, Homo sapien
aaaataatacagttggccattgaac

SEQ ID NO: 31100 - DNA, 25 bp, Homo sapien
tagcttgcacggaaaatgcatagac

SEQ ID NO: 31101 - DNA, 25 bp, Homo sapien
acacaggtttgaacttctcaagtcc

SEQ ID NO: 31102 - DNA, 25 bp, Homo sapien
aaaaaacagatgaacctcatagcca

SEQ ID NO: 31103 - DNA, 25 bp, Homo sapien
taccataaaatgaacacagatctat

SEQ ID NO: 31104 - DNA, 25 bp, Homo sapien
gacgtcatgttgagaagatgcacct

SEQ ID NO: 31105 - DNA, 25 bp, Homo sapien
aggtgcatcttctcaacatgacgtc

SEQ ID NO: 31106 - DNA, 25 bp, Homo sapien
ctgcataacattggacttgagaagt

SEQ ID NO: 31107 - DNA, 25 bp, Homo sapien
aggagatgttggcaacgtctatgca

SEQ ID NO: 31108 - DNA, 25 bp, Homo sapien
aatggccaactgtattattttagaa

SEQ ID NO: 31109 - DNA, 25 bp, Homo sapien
ttatttcttggctatgaggttcatc

SEQ ID NO: 31110 - DNA, 25 bp, Homo sapien
tgataaaatagactaccaacatata

SEQ ID NO: 31111 - DNA, 25 bp, Homo sapien
ttctgtaatagatctgtgttcattt

SEQ ID NO: 31112 - DNA, 25 bp, Homo sapien
tttagaaatgcacgtaggagatgtt

SEQ ID NO: 31113 - DNA, 25 bp, Homo sapien
ttcaaattgtcacatacctccaaaa

SEQ ID NO: 31114 - DNA, 25 bp, Homo sapien
ttaaaactctgcataacattggact

SEQ ID NO: 31115 - DNA, 25 bp, Homo sapien
tattttagaaatgcacgtaggagat

SEQ ID NO: 31116 - DNA, 25 bp, Homo sapien
attggacttgagaagttcaaacctg

SEQ ID NO: 31117 - DNA, 25 bp, Homo sapien
attctgcccacaggagacggccaga

SEQ ID NO: 31118 - DNA, 25 bp, Homo sapien
cgagtctctgacaaagtaccgggca

SEQ ID NO: 31119 - DNA, 25 bp, Homo sapien
gggaaccaaggaacactatatgcat

SEQ ID NO: 31120 - DNA, 25 bp, Homo sapien
aagggtccacccttagcaaggcatt

SEQ ID NO: 31121 - DNA, 25 bp, Homo sapien
tcagaaatacactctcggcacggcg

SEQ ID NO: 31122 - DNA, 25 bp, Homo sapien
atatgcatggaagagctcagaaata

SEQ ID NO: 31123 - DNA, 25 bp, Homo sapien
tgtcagggccaagcgctcagtaaaa

SEQ ID NO: 31124 - DNA, 25 bp, Homo sapien
agaggggctactggacattctcagt

SEQ ID NO: 31125 - DNA, 25 bp, Homo sapien
gacggccagacagctattgtactgc

SEQ ID NO: 31126 - DNA, 25 bp, Homo sapien
ctcagtaaaaagcaggtccatctct

SEQ ID NO: 31127 - DNA, 25 bp, Homo sapien
agccactcctaggtgccaggtgctt

SEQ ID NO: 31128 - DNA, 25 bp, Homo sapien
acaaaatgagcaatggtaaattctc

SEQ ID NO: 31129 - DNA, 25 bp, Homo sapien
ctatacgtgtgaccattccagttcc

SEQ ID NO: 31130 - DNA, 25 bp, Homo sapien
aaacacatcaagataggagggaaga

SEQ ID NO: 31131 - DNA, 25 bp, Homo sapien
agacggcttgtcaggttcaaagaat

SEQ ID NO: 31132 - DNA, 25 bp, Homo sapien
agccaagattcagtggtccaaagtc

SEQ ID NO: 31133 - DNA, 25 bp, Homo sapien
ccagggacagctgaatctaagctat

SEQ ID NO: 31134 - DNA, 25 bp, Homo sapien
tcaggcgcagttaatggaataatag

SEQ ID NO: 31135 - DNA, 25 bp, Homo sapien
ctgtgctgagaatgaatggcaaaca

SEQ ID NO: 31136 - DNA, 25 bp, Homo sapien
atggcaaacaactccagggacagct

SEQ ID NO: 31137 - DNA, 25 bp, Homo sapien
aagtcacctaagcataaaagctgcc

SEQ ID NO: 31138 - DNA, 25 bp, Homo sapien
ggctcaggcatagcagagtcagttt

SEQ ID NO: 31139 - DNA, 25 bp, Homo sapien
tcagcacagtttagagaaagcagga

SEQ ID NO: 31140 - DNA, 25 bp, Homo sapien
tggaactggaatggtcacacgtata

SEQ ID NO: 31141 - DNA, 25 bp, Homo sapien
attccattaactgcgcctgaagtgg

SEQ ID NO: 31142 - DNA, 25 bp, Homo sapien
tcagctgtccctggagttgtttgcc

SEQ ID NO: 31143 - DNA, 25 bp, Homo sapien
tatgcttaggtgactttggaccact

SEQ ID NO: 31144 - DNA, 25 bp, Homo sapien
aaactgactctgctatgcctgagcc

SEQ ID NO: 31145 - DNA, 25 bp, Homo sapien
ccctcaataagtctaggaagctatt

SEQ ID NO: 31146 - DNA, 25 bp, Homo sapien
caggaaaaagggattcaaagctaat

SEQ ID NO: 31147 - DNA, 25 bp, Homo sapien
tttgaacctgacaagccgtctccct

SEQ ID NO: 31148 - DNA, 25 bp, Homo sapien
aaacaagaagtgagaatttaccatt

SEQ ID NO: 31149 - DNA, 25 bp, Homo sapien
atctgcagcccagtcgggtggaact

SEQ ID NO: 31150 - DNA, 25 bp, Homo sapien
atagcaggtcctcgaaagacgtttc

SEQ ID NO: 31151 - DNA, 25 bp, Homo sapien
ggactctgaattgccaagaaaggct

SEQ ID NO: 31152 - DNA, 25 bp, Homo sapien
tggatgtgtctacgcggcccagtct

SEQ ID NO: 31153 - DNA, 25 bp, Homo sapien
attgccaagaaaggctccagccatt

SEQ ID NO: 31154 - DNA, 25 bp, Homo sapien
cccaaagatgcacatgaatggatgt

SEQ ID NO: 31155 - DNA, 25 bp, Homo sapien
attttagtctatagcaggtcctcga

SEQ ID NO: 31156 - DNA, 25 bp, Homo sapien
ttcagggctggttcccaacttggac

SEQ ID NO: 31157 - DNA, 25 bp, Homo sapien
ttcgttcatatatgggacagggttt

SEQ ID NO: 31158 - DNA, 25 bp, Homo sapien
gtctgtgtgaagctggctcattctc

SEQ ID NO: 31159 - DNA, 25 bp, Homo sapien
cagccattgagaccctgaactggaa

SEQ ID NO: 31160 - DNA, 25 bp, Homo sapien
aaaagtctcagctgaggtcactgtc

SEQ ID NO: 31161 - DNA, 25 bp, Homo sapien
gaaccagccctgaactggacgccat

SEQ ID NO: 31162 - DNA, 25 bp, Homo sapien
gcaattcagagtccaagttgggaac

SEQ ID NO: 31163 - DNA, 25 bp, Homo sapien
agaatgagccagcttcacacagaca

SEQ ID NO: 31164 - DNA, 25 bp, Homo sapien
acccataaagatgggagaatgagcc

SEQ ID NO: 31165 - DNA, 25 bp, Homo sapien
aaacgtctttcgaggacctgctata

SEQ ID NO: 31166 - DNA, 25 bp, Homo sapien
tcgaggacctgctatagactaaaat

SEQ ID NO: 31167 - DNA, 25 bp, Homo sapien
gggccgcgtagacacatccattcat

SEQ ID NO: 31168 - DNA, 25 bp, Homo sapien
gtcccatatatgaacgaacaattag

SEQ ID NO: 31169 - DNA, 25 bp, Homo sapien
ttccagttcagggtctcaatggctg

SEQ ID NO: 31170 - DNA, 25 bp, Homo sapien
agacagtgacctcagctgagacttt

SEQ ID NO: 31171 - DNA, 25 bp, Homo sapien
tacttggagaagacccataaagatg

SEQ ID NO: 31172 - DNA, 25 bp, Homo sapien
cagaagtcgagtgagctccggaaag

SEQ ID NO: 31173 - DNA, 25 bp, Homo sapien
gagtgagctccggaaagaagttcca

SEQ ID NO: 31174 - DNA, 25 bp, Homo sapien
agtgagctccggaaagaagttccag

SEQ ID NO: 31175 - DNA, 25 bp, Homo sapien
agaagtcgagtgagctccggaaaga

SEQ ID NO: 31176 - DNA, 25 bp, Homo sapien
gaagtcgagtgagctccggaaagaa

SEQ ID NO: 31177 - DNA, 25 bp, Homo sapien
agtcgagtgagctccggaaagaagt

SEQ ID NO: 31178 - DNA, 25 bp, Homo sapien
gaccttaagacggactgctccagac

SEQ ID NO: 31179 - DNA, 25 bp, Homo sapien
ccttaagacggactgctccagacct

SEQ ID NO: 31180 - DNA, 25 bp, Homo sapien
ggaccttaagacggactgctccaga

SEQ ID NO: 31181 - DNA, 25 bp, Homo sapien
cttaagacggactgctccagaccta

SEQ ID NO: 31182 - DNA, 25 bp, Homo sapien
accttaagacggactgctccagacc

SEQ ID NO: 31183 - DNA, 25 bp, Homo sapien
aagaactatattaatgaaagcacag

SEQ ID NO: 31184 - DNA, 25 bp, Homo sapien
gaaattccgctaacccatcaactac

SEQ ID NO: 31185 - DNA, 25 bp, Homo sapien
aactacaatcatcttcctgaggcag

SEQ ID NO: 31186 - DNA, 25 bp, Homo sapien
tgaacagaaagagcagaagtcgagt

SEQ ID NO: 31187 - DNA, 25 bp, Homo sapien
cagaccagtggaaaactaagaacta

SEQ ID NO: 31188 - DNA, 25 bp, Homo sapien
agaatgggatacagaccagtggaaa

SEQ ID NO: 31189 - DNA, 25 bp, Homo sapien
ccaaggcagaatgggatacagacca

SEQ ID NO: 31190 - DNA, 25 bp, Homo sapien
cctgaggcagattcccactaggact

SEQ ID NO: 31191 - DNA, 25 bp, Homo sapien
taacccatcaactacagtccgtcat

SEQ ID NO: 31192 - DNA, 25 bp, Homo sapien
gaagtaaaggcgtccaaggcagaat

SEQ ID NO: 31193 - DNA, 25 bp, Homo sapien
attcccactaggactgcattcaact

SEQ ID NO: 31194 - DNA, 25 bp, Homo sapien
actacagcagcagctaaaccagttc

SEQ ID NO: 31195 - DNA, 25 bp, Homo sapien
accacgcactacagcagcagctaaa

SEQ ID NO: 31196 - DNA, 25 bp, Homo sapien
acaaactgaaaaccgttggcgaagc

SEQ ID NO: 31197 - DNA, 25 bp, Homo sapien
acagcagcagctaaaccagttccag

SEQ ID NO: 31198 - DNA, 25 bp, Homo sapien
cccgacatggagcagccgcaacatg

SEQ ID NO: 31199 - DNA, 25 bp, Homo sapien
ccgcaacatggaggcgccaaggaca

SEQ ID NO: 31200 - DNA, 25 bp, Homo sapien
cacaaactgaaaaccgttggcgaag

SEQ ID NO: 31201 - DNA, 25 bp, Homo sapien
cgggcccgccgctgctgagcaagcc

SEQ ID NO: 31202 - DNA, 25 bp, Homo sapien
cagcagctaaaccagttccagcagc

SEQ ID NO: 31203 - DNA, 25 bp, Homo sapien
gcactacagcagcagctaaaccagt

SEQ ID NO: 31204 - DNA, 25 bp, Homo sapien
agcagccgcaacatggaggcgccaa

SEQ ID NO: 31205 - DNA, 25 bp, Homo sapien
accacgcactacagcagcagctaaa

SEQ ID NO: 31206 - DNA, 25 bp, Homo sapien
cgggcccgccgctgctgagcaagcc

SEQ ID NO: 31207 - DNA, 25 bp, Homo sapien
acagcagcagctaaaccagttccag

SEQ ID NO: 31208 - DNA, 25 bp, Homo sapien
ccgcaacatggaggcgccaaggaca

SEQ ID NO: 31209 - DNA, 25 bp, Homo sapien
gcactacagcagcagctaaaccagt

SEQ ID NO: 31210 - DNA, 25 bp, Homo sapien
cagcagctaaaccagttccagcagc

SEQ ID NO: 31211 - DNA, 25 bp, Homo sapien
cacaaactgaaaaccgttggcgaag

SEQ ID NO: 31212 - DNA, 25 bp, Homo sapien
agcagcaacagcaaacatcccattt

SEQ ID NO: 31213 - DNA, 25 bp, Homo sapien
acaaactgaaaaccgttggcgaagc

SEQ ID NO: 31214 - DNA, 25 bp, Homo sapien
caacaacaacagcttgggcggcgcg

SEQ ID NO: 31215 - DNA, 25 bp, Homo sapien
cccgacatggagcagccgcaacatg

SEQ ID NO: 31216 - DNA, 25 bp, Homo sapien
tgctggaactggtttagctgctgct

SEQ ID NO: 31217 - DNA, 25 bp, Homo sapien
gcggcgcttccaccctccttgagag

SEQ ID NO: 31218 - DNA, 25 bp, Homo sapien
tctccatggccgagcccgggcccga

SEQ ID NO: 31219 - DNA, 25 bp, Homo sapien
ctcgtcgcccggcttgctcagcagc

SEQ ID NO: 31220 - DNA, 25 bp, Homo sapien
ccatgttgcggctgctccatgtcgg

SEQ ID NO: 31221 - DNA, 25 bp, Homo sapien
ttggcgcctccatgttgcggctgct

SEQ ID NO: 31222 - DNA, 25 bp, Homo sapien
tgttgttggaaatgggatgtttgct

SEQ ID NO: 31223 - DNA, 25 bp, Homo sapien
ctggccgcccgcagcactgtccttg

SEQ ID NO: 31224 - DNA, 25 bp, Homo sapien
cccgcgccgcccaagctgttgttgt

SEQ ID NO: 31225 - DNA, 25 bp, Homo sapien
tggaaatgggatgtttgctgttgct

SEQ ID NO: 31226 - DNA, 25 bp, Homo sapien
caccctccttgagagccgcctcgga

SEQ ID NO: 31227 - DNA, 25 bp, Homo sapien
tattattagtagtggggatagaggt

SEQ ID NO: 31228 - DNA, 25 bp, Homo sapien
gaaatacctcgtggaaactgggtca

SEQ ID NO: 31229 - DNA, 25 bp, Homo sapien
aaaaaagcctacaatgacacaaaga

SEQ ID NO: 31230 - DNA, 25 bp, Homo sapien
actggtagtaacgacagggaaatac

SEQ ID NO: 31231 - DNA, 25 bp, Homo sapien
tacccaaatcaagggcactggtagt

SEQ ID NO: 31232 - DNA, 25 bp, Homo sapien
ttgcaggcaaactaccttagacact

SEQ ID NO: 31233 - DNA, 25 bp, Homo sapien
caggtagagtggtcaagtcatttat

SEQ ID NO: 31234 - DNA, 25 bp, Homo sapien
ctgggtcatgggtcaaccaactcta

SEQ ID NO: 31235 - DNA, 25 bp, Homo sapien
tagacactcatgcttcacaggtaga

SEQ ID NO: 31236 - DNA, 25 bp, Homo sapien
agcatgggctaaaggaaaacacatt

SEQ ID NO: 31237 - DNA, 25 bp, Homo sapien
atcttgatttgggagaaggaaacaa

SEQ ID NO: 31238 - DNA, 25 bp, Homo sapien
tgtttacatgaagcctctgcaaacc

SEQ ID NO: 31239 - DNA, 25 bp, Homo sapien
ttgtaggctagtaatagaaaattcc

SEQ ID NO: 31240 - DNA, 25 bp, Homo sapien
gaagcatgagtgtctaaggtagttt

SEQ ID NO: 31241 - DNA, 25 bp, Homo sapien
tgggtaataaatgacttgaccactc

SEQ ID NO: 31242 - DNA, 25 bp, Homo sapien
aaattgcataacgatggtttgccaa

SEQ ID NO: 31243 - DNA, 25 bp, Homo sapien
tgcctgcaagtgataggaaataaac

SEQ ID NO: 31244 - DNA, 25 bp, Homo sapien
atgacccagtttccacgaggtattt

SEQ ID NO: 31245 - DNA, 25 bp, Homo sapien
ttgaccactctacctgtgaagcatg

SEQ ID NO: 31246 - DNA, 25 bp, Homo sapien
ctcccaaatcaagatggcctgaatt

SEQ ID NO: 31247 - DNA, 25 bp, Homo sapien
gtagagttggttgacccatgaccca

SEQ ID NO: 31248 - DNA, 25 bp, Homo sapien
tgtcgttactaccagtgcccttgat

SEQ ID NO: 31249 - DNA, 25 bp, Homo sapien
ctaccagaacagcttagaaatcatt

SEQ ID NO: 31250 - DNA, 25 bp, Homo sapien
aaattcctaaatcccagtgctactc

SEQ ID NO: 31251 - DNA, 25 bp, Homo sapien
aacagcttagaaatcattaggcggg

SEQ ID NO: 31252 - DNA, 25 bp, Homo sapien
tccaaaaccaaagctaccagaacag

SEQ ID NO: 31253 - DNA, 25 bp, Homo sapien
aacccaaactcttattcagcacatc

SEQ ID NO: 31254 - DNA, 25 bp, Homo sapien
ggttcttctcaataatgcaaaacat

SEQ ID NO: 31255 - DNA, 25 bp, Homo sapien
agcagcagactgcaaggttcttctc

SEQ ID NO: 31256 - DNA, 25 bp, Homo sapien
tcattaggcggggttgaaaaataga

SEQ ID NO: 31257 - DNA, 25 bp, Homo sapien
tgtcagtgacgaccacacacagcag

SEQ ID NO: 31258 - DNA, 25 bp, Homo sapien
tccagattagcaggatggagagttc

SEQ ID NO: 31259 - DNA, 25 bp, Homo sapien
aaatttaaatctgtcagtgacgacc

SEQ ID NO: 31260 - DNA, 25 bp, Homo sapien
ttcatagatgaaagatgttttgcat

SEQ ID NO: 31261 - DNA, 25 bp, Homo sapien
ctgctgtgtgtggtcgtcactgaca

SEQ ID NO: 31262 - DNA, 25 bp, Homo sapien
ctttggttttggaaatggtcctgga

SEQ ID NO: 31263 - DNA, 25 bp, Homo sapien
gagtagcactgggatttaggaattt

SEQ ID NO: 31264 - DNA, 25 bp, Homo sapien
gaataatagggaatagagtagcact

SEQ ID NO: 31265 - DNA, 25 bp, Homo sapien
cctgctaatctggaatattgaaaat

SEQ ID NO: 31266 - DNA, 25 bp, Homo sapien
gatgtgctgaataagagtttgggtt

SEQ ID NO: 31267 - DNA, 25 bp, Homo sapien
aatggtcctggaataatagggaata

SEQ ID NO: 31268 - DNA, 25 bp, Homo sapien
cccgcctaatgatttctaagctgtt

SEQ ID NO: 31269 - DNA, 25 bp, Homo sapien
atgaaaactgggaaaattcatagat

SEQ ID NO: 31270 - DNA, 25 bp, Homo sapien
tgagaagaaccttgcagtctgctgc

SEQ ID NO: 31271 - DNA, 25 bp, Homo sapien
atacatcaagcattggtgtacagca

SEQ ID NO: 31272 - DNA, 25 bp, Homo sapien
ttgaaagccgagaaataaaccacta

SEQ ID NO: 31273 - DNA, 25 bp, Homo sapien
ttggcctgcgttcccactagctgtt

SEQ ID NO: 31274 - DNA, 25 bp, Homo sapien
ccagttgattctgccaagggaattc

SEQ ID NO: 31275 - DNA, 25 bp, Homo sapien
aggaacaaaaatggagactgtacac

SEQ ID NO: 31276 - DNA, 25 bp, Homo sapien
caggctgatcctaaaacgtacatgg

SEQ ID NO: 31277 - DNA, 25 bp, Homo sapien
tataacctctaaagagcagtgagcc

SEQ ID NO: 31278 - DNA, 25 bp, Homo sapien
gagcagtgagcccatttcaggccct

SEQ ID NO: 31279 - DNA, 25 bp, Homo sapien
aaatgcaaaggacctaggatagtca

SEQ ID NO: 31280 - DNA, 25 bp, Homo sapien
aaacctggaagaacgctaatacatc

SEQ ID NO: 31281 - DNA, 25 bp, Homo sapien
attcaggaagaaaggatggtctttt

SEQ ID NO: 31282 - DNA, 25 bp, Homo sapien
atcaactggtcataaatgtagtggt

SEQ ID NO: 31283 - DNA, 25 bp, Homo sapien
tgaaattgggtagtgtacagtctcc

SEQ ID NO: 31284 - DNA, 25 bp, Homo sapien
cgaaggcctgctgtacaccaatgct

SEQ ID NO: 31285 - DNA, 25 bp, Homo sapien
ccatgtacgttttaggatcagcctg

SEQ ID NO: 31286 - DNA, 25 bp, Homo sapien
ttgtgacctctcacagagggcctga

SEQ ID NO: 31287 - DNA, 25 bp, Homo sapien
tagaggttataataagcgaaggcct

SEQ ID NO: 31288 - DNA, 25 bp, Homo sapien
gaattcccttggcagaatcaactgg

SEQ ID NO: 31289 - DNA, 25 bp, Homo sapien
ccaggtttggcatgttgggtttaac

SEQ ID NO: 31290 - DNA, 25 bp, Homo sapien
aaataatgttgggttttgactatcc

SEQ ID NO: 31291 - DNA, 25 bp, Homo sapien
cctgaaatgggctcactgctcttta

SEQ ID NO: 31292 - DNA, 25 bp, Homo sapien
caccaatgcttgatgtattagcgtt

SEQ ID NO: 31293 - DNA, 25 bp, Homo sapien
aattagcagtacctggcagctggct

SEQ ID NO: 31294 - DNA, 25 bp, Homo sapien
aatgccttgcaagcagagctgtcta

SEQ ID NO: 31295 - DNA, 25 bp, Homo sapien
tgaggagggagtccaactctctaca

SEQ ID NO: 31296 - DNA, 25 bp, Homo sapien
cttatcgaaaggacatcaaggagct

SEQ ID NO: 31297 - DNA, 25 bp, Homo sapien
ctccagctgttcaggcagtggaatt

SEQ ID NO: 31298 - DNA, 25 bp, Homo sapien
tgaggaatttggcaacgccctgtcc

SEQ ID NO: 31299 - DNA, 25 bp, Homo sapien
atcaaggagcttttggaggacttaa

SEQ ID NO: 31300 - DNA, 25 bp, Homo sapien
tcatctgtgcatcgccagagcccag

SEQ ID NO: 31301 - DNA, 25 bp, Homo sapien
aagacccagaatccacctgtgagga

SEQ ID NO: 31302 - DNA, 25 bp, Homo sapien
aactgtgaacaagacccagaatcca

SEQ ID NO: 31303 - DNA, 25 bp, Homo sapien
ttttggaggacttaaacagggatca

SEQ ID NO: 31304 - DNA, 25 bp, Homo sapien
atcatgatgagctgtggaccgtgtg

SEQ ID NO: 31305 - DNA, 25 bp, Homo sapien
catgatgagctgtggaccgtgtgtt

SEQ ID NO: 31306 - DNA, 25 bp, Homo sapien
ggcagctccaagtccatcatgatga

SEQ ID NO: 31307 - DNA, 25 bp, Homo sapien
gcggcagctccaagtccatcatgat

SEQ ID NO: 31308 - DNA, 25 bp, Homo sapien
gtggaccgtgtgttgacaataaata

SEQ ID NO: 31309 - DNA, 25 bp, Homo sapien
gagctgtggaccgtgtgttgacaat

SEQ ID NO: 31310 - DNA, 25 bp, Homo sapien
ggcggcagctccaagtccatcatga

SEQ ID NO: 31311 - DNA, 25 bp, Homo sapien
gaccgtgtgttgacaataaatatcc

SEQ ID NO: 31312 - DNA, 25 bp, Homo sapien
ctgtggaccgtgtgttgacaataaa

SEQ ID NO: 31313 - DNA, 25 bp, Homo sapien
cggcggcagctccaagtccatcatg

SEQ ID NO: 31314 - DNA, 25 bp, Homo sapien
agctgtggaccgtgtgttgacaata

SEQ ID NO: 31315 - DNA, 25 bp, Homo sapien
tatctatgatgcctaggcgagaaag

SEQ ID NO: 31316 - DNA, 25 bp, Homo sapien
taaaaggaggctttagcgtcctcta

SEQ ID NO: 31317 - DNA, 25 bp, Homo sapien
ctaaagccaagatgggttacaaagt

SEQ ID NO: 31318 - DNA, 25 bp, Homo sapien
cctagttcccacaagcagctactgt

SEQ ID NO: 31319 - DNA, 25 bp, Homo sapien
aaagccaccaccttgataaagttac

SEQ ID NO: 31320 - DNA, 25 bp, Homo sapien
aagaaaatcaccctgccacacagtc

SEQ ID NO: 31321 - DNA, 25 bp, Homo sapien
gcgagaaaggcctgtgaatctataa

SEQ ID NO: 31322 - DNA, 25 bp, Homo sapien
tgccacacagtcagaatgttttccc

SEQ ID NO: 31323 - DNA, 25 bp, Homo sapien
aggccttaaaatatgttggaagaat

SEQ ID NO: 31324 - DNA, 25 bp, Homo sapien
gtgaatctataaggtaggagaatgg

SEQ ID NO: 31325 - DNA, 25 bp, Homo sapien
cactgtaagtggtcataaggaagaa

SEQ ID NO: 31326 - DNA, 25 bp, Homo sapien
tatagattcacaggcctttctcgcc

SEQ ID NO: 31327 - DNA, 25 bp, Homo sapien
tcgcctaggcatcatagataaacgt

SEQ ID NO: 31328 - DNA, 25 bp, Homo sapien
agggaaaacattctgactgtgtggc

SEQ ID NO: 31329 - DNA, 25 bp, Homo sapien
tcatcatgatggacttggagctgcc

SEQ ID NO: 31330 - DNA, 25 bp, Homo sapien
ctgtgtggcagggtgattttcttcc

SEQ ID NO: 31331 - DNA, 25 bp, Homo sapien
caaggtggtggctttagtgaatata

SEQ ID NO: 31332 - DNA, 25 bp, Homo sapien
tcccgtcccagcaggacatggattt

SEQ ID NO: 31333 - DNA, 25 bp, Homo sapien
attgtcaacacacggtccacagctc

SEQ ID NO: 31334 - DNA, 25 bp, Homo sapien
ctgcttgtgggaactaggaaaaatt

SEQ ID NO: 31335 - DNA, 25 bp, Homo sapien
ttatagcgctcctcaacggtaggga

SEQ ID NO: 31336 - DNA, 25 bp, Homo sapien
aactttagaggacgctaaagcctcc

SEQ ID NO: 31337 - DNA, 25 bp, Homo sapien
atgtgcactgtgatggtggtcatca

SEQ ID NO: 31338 - DNA, 25 bp, Homo sapien
ctatgccatcgtattaatgagtctc

SEQ ID NO: 31339 - DNA, 25 bp, Homo sapien
tgaggatatcttctgctgcagggaa

SEQ ID NO: 31340 - DNA, 25 bp, Homo sapien
tgtgatgaacctccaattattgccc

SEQ ID NO: 31341 - DNA, 25 bp, Homo sapien
tatggggttctctcttacatgtatc

SEQ ID NO: 31342 - DNA, 25 bp, Homo sapien
ttcctgcatatatgtcctggttgcc

SEQ ID NO: 31343 - DNA, 25 bp, Homo sapien
ccagagactctgcattaagctatta

SEQ ID NO: 31344 - DNA, 25 bp, Homo sapien
tccaggggttatgtcccagagactc

SEQ ID NO: 31345 - DNA, 25 bp, Homo sapien
aaaagtctctctacatgtgcctccc

SEQ ID NO: 31346 - DNA, 25 bp, Homo sapien
tcctggttgccatcctgaggatatc

SEQ ID NO: 31347 - DNA, 25 bp, Homo sapien
atgtcatgggtttcctaaatgcctc

SEQ ID NO: 31348 - DNA, 25 bp, Homo sapien
tgcagcagaagatatcctcaggatg

SEQ ID NO: 31349 - DNA, 25 bp, Homo sapien
agggcaataattggaggttcatcac

SEQ ID NO: 31350 - DNA, 25 bp, Homo sapien
catagatacatgtaagagagaaccc

SEQ ID NO: 31351 - DNA, 25 bp, Homo sapien
tcaatattggagcatggtagggcaa

SEQ ID NO: 31352 - DNA, 25 bp, Homo sapien
gccataaaacacagaggccactttt

SEQ ID NO: 31353 - DNA, 25 bp, Homo sapien
taatagcttaatgcagagtctctgg

SEQ ID NO: 31354 - DNA, 25 bp, Homo sapien
ggaggcacatgtagagagacttttt

SEQ ID NO: 31355 - DNA, 25 bp, Homo sapien
ctcattaatacgatggcatagatac

SEQ ID NO: 31356 - DNA, 25 bp, Homo sapien
tagaggcatttaggaaacccatgac

SEQ ID NO: 31357 - DNA, 25 bp, Homo sapien
catagaaaatggtgactgctgtcag

SEQ ID NO: 31358 - DNA, 25 bp, Homo sapien
tggcaaccaggacatatatgcagga

SEQ ID NO: 31359 - DNA, 25 bp, Homo sapien
gcacctagaagcctgtcgctggcac

SEQ ID NO: 31360 - DNA, 25 bp, Homo sapien
tacccgcagtcggaggggctcctga

SEQ ID NO: 31361 - DNA, 25 bp, Homo sapien
tcgcgcacctagaagcctgtcgctg

SEQ ID NO: 31362 - DNA, 25 bp, Homo sapien
cacctagaagcctgtcgctggcacg

SEQ ID NO: 31363 - DNA, 25 bp, Homo sapien
cctagaagcctgtcgctggcacggt

SEQ ID NO: 31364 - DNA, 25 bp, Homo sapien
agggtcgcgcacctagaagcctgtc

SEQ ID NO: 31365 - DNA, 25 bp, Homo sapien
ctagaagcctgtcgctggcacggtc

SEQ ID NO: 31366 - DNA, 25 bp, Homo sapien
ccggctacccgcagtcggaggggct

SEQ ID NO: 31367 - DNA, 25 bp, Homo sapien
cagagggtcgcgcacctagaagcct

SEQ ID NO: 31368 - DNA, 25 bp, Homo sapien
ggtcgcgcacctagaagcctgtcgc

SEQ ID NO: 31369 - DNA, 25 bp, Homo sapien
tgtgcagagggtcgcgcacctagaa

SEQ ID NO: 31370 - DNA, 25 bp, Homo sapien
acttcaaagagatggagatgtcatc

SEQ ID NO: 31371 - DNA, 25 bp, Homo sapien
ctggcaaggaccatcaagtacctga

SEQ ID NO: 31372 - DNA, 25 bp, Homo sapien
cagcctcacaggctaagctgaccat

SEQ ID NO: 31373 - DNA, 25 bp, Homo sapien
agcctcacaggctaagctgaccatg

SEQ ID NO: 31374 - DNA, 25 bp, Homo sapien
tcaaagagatggagatgtcatcagc

SEQ ID NO: 31375 - DNA, 25 bp, Homo sapien
cctcacaggctaagctgaccatgct

SEQ ID NO: 31376 - DNA, 25 bp, Homo sapien
gacttcaaagagatggagatgtcat

SEQ ID NO: 31377 - DNA, 25 bp, Homo sapien
cttcaaagagatggagatgtcatca

SEQ ID NO: 31378 - DNA, 25 bp, Homo sapien
gcctcacaggctaagctgaccatgc

SEQ ID NO: 31379 - DNA, 25 bp, Homo sapien
ttcaaagagatggagatgtcatcag

SEQ ID NO: 31380 - DNA, 25 bp, Homo sapien
tgacttcaaagagatggagatgtca

SEQ ID NO: 31381 - DNA, 25 bp, Homo sapien
caggcttctaggtgcgcgaccctct

SEQ ID NO: 31382 - DNA, 25 bp, Homo sapien
atcactgaagttggactcgttgccc

SEQ ID NO: 31383 - DNA, 25 bp, Homo sapien
aacctcccgcccagaccgtgccagc

SEQ ID NO: 31384 - DNA, 25 bp, Homo sapien
actgaagttggactcgttgcccagc

SEQ ID NO: 31385 - DNA, 25 bp, Homo sapien
agtgcatcactgaagttggactcgt

SEQ ID NO: 31386 - DNA, 25 bp, Homo sapien
cgacaggcttctaggtgcgcgaccc

SEQ ID NO: 31387 - DNA, 25 bp, Homo sapien
gtgccagcgacaggcttctaggtgc

SEQ ID NO: 31388 - DNA, 25 bp, Homo sapien
gaccgtgccagcgacaggcttctag

SEQ ID NO: 31389 - DNA, 25 bp, Homo sapien
cgccgcagaacctcccgcccagacc

SEQ ID NO: 31390 - DNA, 25 bp, Homo sapien
ggcatccagcagtgcatcactgaag

SEQ ID NO: 31391 - DNA, 25 bp, Homo sapien
cagcagtgcatcactgaagttggac

SEQ ID NO: 31392 - DNA, 25 bp, Homo sapien
ccatagagtgccatccctgagagac

SEQ ID NO: 31393 - DNA, 25 bp, Homo sapien
catatggcaatccacactggagaaa

SEQ ID NO: 31394 - DNA, 25 bp, Homo sapien
atcaaaggactcacaccggagagaa

SEQ ID NO: 31395 - DNA, 25 bp, Homo sapien
aaagcctttagggtaagatcaagtc

SEQ ID NO: 31396 - DNA, 25 bp, Homo sapien
aaagccttcagtgttcgttcaagcc

SEQ ID NO: 31397 - DNA, 25 bp, Homo sapien
ggaaaagcctttagaggacattcaa

SEQ ID NO: 31398 - DNA, 25 bp, Homo sapien
gcaaggtcttcaggcagagttcaaa

SEQ ID NO: 31399 - DNA, 25 bp, Homo sapien
gagagaaaccttaccgatgcaatga

SEQ ID NO: 31400 - DNA, 25 bp, Homo sapien
tcacctggcaaatcaccgaagaatt

SEQ ID NO: 31401 - DNA, 25 bp, Homo sapien
tggagaaaagcgttacaaatgtaat

SEQ ID NO: 31402 - DNA, 25 bp, Homo sapien
tcatcacagaatgcataccggagag

SEQ ID NO: 31403 - DNA, 25 bp, Homo sapien
gcacacacaagccacacaggtgggg

SEQ ID NO: 31404 - DNA, 25 bp, Homo sapien
gaaggatagagagaaatgtcaggca

SEQ ID NO: 31405 - DNA, 25 bp, Homo sapien
cctcggctgggcagccaggatgcct

SEQ ID NO: 31406 - DNA, 25 bp, Homo sapien
tgagtcttcccggatgctgggaatc

SEQ ID NO: 31407 - DNA, 25 bp, Homo sapien
gctatatcatgatggcctggagctg

SEQ ID NO: 31408 - DNA, 25 bp, Homo sapien
ggacagattcagagccctcaggact

SEQ ID NO: 31409 - DNA, 25 bp, Homo sapien
tcttcccggatgctgggaatcacca

SEQ ID NO: 31410 - DNA, 25 bp, Homo sapien
atagagagaaatgtcaggcagggct

SEQ ID NO: 31411 - DNA, 25 bp, Homo sapien
cagttctagccaggacagattcaga

SEQ ID NO: 31412 - DNA, 25 bp, Homo sapien
ggacctggggaatcagccctcggct

SEQ ID NO: 31413 - DNA, 25 bp, Homo sapien
gagggctatatcatgatggcctgga

SEQ ID NO: 31414 - DNA, 25 bp, Homo sapien
gtcccatgccagtgccaaccagcct

SEQ ID NO: 31415 - DNA, 25 bp, Homo sapien
agctccaggccatcatgatatagcc

SEQ ID NO: 31416 - DNA, 25 bp, Homo sapien
ccacctgtgtggcttgtgtgtgccc

SEQ ID NO: 31417 - DNA, 25 bp, Homo sapien
ccctgagtcctgagggctctgaatc

SEQ ID NO: 31418 - DNA, 25 bp, Homo sapien
agccctgcctgacatttctctctat

SEQ ID NO: 31419 - DNA, 25 bp, Homo sapien
cctggtgattcccagcatccgggaa

SEQ ID NO: 31420 - DNA, 25 bp, Homo sapien
tatcccggggcctctggaagtggaa

SEQ ID NO: 31421 - DNA, 25 bp, Homo sapien
tcagcctggaacagccctcctgccc

SEQ ID NO: 31422 - DNA, 25 bp, Homo sapien
tctgaatctgtcctggctagaactg

SEQ ID NO: 31423 - DNA, 25 bp, Homo sapien
atccgggaagactcacctccagccc

SEQ ID NO: 31424 - DNA, 25 bp, Homo sapien
agggctctgaatctgtcctggctag

SEQ ID NO: 31425 - DNA, 25 bp, Homo sapien
caagccctcaatcatgctatgcgta

SEQ ID NO: 31426 - DNA, 25 bp, Homo sapien
atgctatgcgtatctttatgtgtgc

SEQ ID NO: 31427 - DNA, 25 bp, Homo sapien
ttaaacgctaaaatgcatagctata

SEQ ID NO: 31428 - DNA, 25 bp, Homo sapien
aaagctgttctttaccatggtttaa

SEQ ID NO: 31429 - DNA, 25 bp, Homo sapien
aatagcccttgaccctccagtcata

SEQ ID NO: 31430 - DNA, 25 bp, Homo sapien
ccagccctgctatacattctcatta

SEQ ID NO: 31431 - DNA, 25 bp, Homo sapien
atagtttcgtttcaaatccagtgtt

SEQ ID NO: 31432 - DNA, 25 bp, Homo sapien
tacagaaacaaaacaccaagccctc

SEQ ID NO: 31433 - DNA, 25 bp, Homo sapien
acactgagctaatctgattacatcc

SEQ ID NO: 31434 - DNA, 25 bp, Homo sapien
tccagtcataagcaagcctgtcatt

SEQ ID NO: 31435 - DNA, 25 bp, Homo sapien
taagcaagcctgtcattcgcccagc

SEQ ID NO: 31436 - DNA, 25 bp, Homo sapien
tcaagggctattgagtgcaaaagct

SEQ ID NO: 31437 - DNA, 25 bp, Homo sapien
cttgcttatgactggagggtcaagg

SEQ ID NO: 31438 - DNA, 25 bp, Homo sapien
agatacgcatagcatgattgagggc

SEQ ID NO: 31439 - DNA, 25 bp, Homo sapien
gattgagggcttggtgttttgtttc

SEQ ID NO: 31440 - DNA, 25 bp, Homo sapien
ctgggcgaatgacaggcttgcttat

SEQ ID NO: 31441 - DNA, 25 bp, Homo sapien
cgtttaaaccatggtaaagaacagc

SEQ ID NO: 31442 - DNA, 25 bp, Homo sapien
aagacatgcacacataaagatacgc

SEQ ID NO: 31443 - DNA, 25 bp, Homo sapien
ataatgagaatgtatagcagggctg

SEQ ID NO: 31444 - DNA, 25 bp, Homo sapien
tgtaacactggatttgaaacgaaac

SEQ ID NO: 31445 - DNA, 25 bp, Homo sapien
aaaagctggatgtaatcagattagc

SEQ ID NO: 31446 - DNA, 25 bp, Homo sapien
tgaatataaacagaaaccacagatg

SEQ ID NO: 31447 - DNA, 25 bp, Homo sapien
ttgctctgacgtctccttcaatgta

SEQ ID NO: 31448 - DNA, 25 bp, Homo sapien
ttacggcacagccatcgccgtctat

SEQ ID NO: 31449 - DNA, 25 bp, Homo sapien
tctccactgttctgaagatcacctc

SEQ ID NO: 31450 - DNA, 25 bp, Homo sapien
atactgtcctaatagcacagctgtc

SEQ ID NO: 31451 - DNA, 25 bp, Homo sapien
tgaagatcacctctactcagggcaa

SEQ ID NO: 31452 - DNA, 25 bp, Homo sapien
tggctggactgtggcttgttactta

SEQ ID NO: 31453 - DNA, 25 bp, Homo sapien
ctctactcagggcaagcagagagct

SEQ ID NO: 31454 - DNA, 25 bp, Homo sapien
ttgcagtaggcgatctattggctct

SEQ ID NO: 31455 - DNA, 25 bp, Homo sapien
tgtgcctttgtgtccagctagtggc

SEQ ID NO: 31456 - DNA, 25 bp, Homo sapien
ggtggtgttgttttacggcacagcc

SEQ ID NO: 31457 - DNA, 25 bp, Homo sapien
ttctgtgcctccaatatcatccatc

SEQ ID NO: 31458 - DNA, 25 bp, Homo sapien
ttcagaacagtggagaagataagtc

SEQ ID NO: 31459 - DNA, 25 bp, Homo sapien
cattacattgaaggagacgtcagag

SEQ ID NO: 31460 - DNA, 25 bp, Homo sapien
gatggctgtgccgtaaaacaacacc

SEQ ID NO: 31461 - DNA, 25 bp, Homo sapien
cataagatacgaggatacagacaag

SEQ ID NO: 31462 - DNA, 25 bp, Homo sapien
gaaggacagctgtgctattaggaca

SEQ ID NO: 31463 - DNA, 25 bp, Homo sapien
cgtgagagccaatagatcgcctact

SEQ ID NO: 31464 - DNA, 25 bp, Homo sapien
aatgatggatgatattggaggcaca

SEQ ID NO: 31465 - DNA, 25 bp, Homo sapien
ttgccctgagtagaggtgatcttca

SEQ ID NO: 31466 - DNA, 25 bp, Homo sapien
gaggtaagtaacaagccacagtcca

SEQ ID NO: 31467 - DNA, 25 bp, Homo sapien
caggtggaaacagctctctgcttgc

SEQ ID NO: 31468 - DNA, 25 bp, Homo sapien
gattgagatcacagaggaaatgatg

SEQ ID NO: 31469 - DNA, 25 bp, Homo sapien
gttgagactctttttgtgcaagact

SEQ ID NO: 31470 - DNA, 25 bp, Homo sapien
agtgggagtttacattttaggcatc

SEQ ID NO: 31471 - DNA, 25 bp, Homo sapien
tactggttctggtcttgagtgcatt

SEQ ID NO: 31472 - DNA, 25 bp, Homo sapien
catcaatgaattactggttctggtc

SEQ ID NO: 31473 - DNA, 25 bp, Homo sapien
tcacaccggctttatgttgagactc

SEQ ID NO: 31474 - DNA, 25 bp, Homo sapien
acatcttggctgttgctggtttctt

SEQ ID NO: 31475 - DNA, 25 bp, Homo sapien
atttaacatcctgacgcctgcctta

SEQ ID NO: 31476 - DNA, 25 bp, Homo sapien
ggctcacagtgggagtttacatttt

SEQ ID NO: 31477 - DNA, 25 bp, Homo sapien
tgcagccatcatctgtcagctccat

SEQ ID NO: 31478 - DNA, 25 bp, Homo sapien
ttgtgcaagactaatgtgattaacc

SEQ ID NO: 31479 - DNA, 25 bp, Homo sapien
ttggatctacaattcacaccggctt

SEQ ID NO: 31480 - DNA, 25 bp, Homo sapien
ctatgtgttggtgcatttaacatcc

SEQ ID NO: 31481 - DNA, 25 bp, Homo sapien
tataataggcctggtttgtgcatca

SEQ ID NO: 31482 - DNA, 25 bp, Homo sapien
cacatgttggcggttgtaatctttt

SEQ ID NO: 31483 - DNA, 25 bp, Homo sapien
acaggctgtatgtttagggttcaat

SEQ ID NO: 31484 - DNA, 25 bp, Homo sapien
catatccaataaggcttgcttttct

SEQ ID NO: 31485 - DNA, 25 bp, Homo sapien
ttgtagctcccacatgttggcggtt

SEQ ID NO: 31486 - DNA, 25 bp, Homo sapien
attcatgtacttgcagccatcttca

SEQ ID NO: 31487 - DNA, 25 bp, Homo sapien
tgctctagtatctatgtcaacaaac

SEQ ID NO: 31488 - DNA, 25 bp, Homo sapien
ttgtgcatcagttcatacaggctgt

SEQ ID NO: 31489 - DNA, 25 bp, Homo sapien
attttaggggtgtatataataggcc

SEQ ID NO: 31490 - DNA, 25 bp, Homo sapien
tttctctgattttaggggtgtatat

SEQ ID NO: 31491 - DNA, 25 bp, Homo sapien
tgtcaagatggtggtcatgtgccat

SEQ ID NO: 31492 - DNA, 25 bp, Homo sapien
acgctctgatgaagatctcctgcac

SEQ ID NO: 31493 - DNA, 25 bp, Homo sapien
atgctgcatacctttctcatgggcc

SEQ ID NO: 31494 - DNA, 25 bp, Homo sapien
tcacacagaaggtgctgttgtaatc

SEQ ID NO: 31495 - DNA, 25 bp, Homo sapien
tatgcctgcatcatcctggtggtcc

SEQ ID NO: 31496 - DNA, 25 bp, Homo sapien
tcatgggccaactaatcttctgtgc

SEQ ID NO: 31497 - DNA, 25 bp, Homo sapien
acctcactgtggtggccatattcta

SEQ ID NO: 31498 - DNA, 25 bp, Homo sapien
tctgtgacctctacgctctgatgaa

SEQ ID NO: 31499 - DNA, 25 bp, Homo sapien
gactagaatgctgtgtgtcaagatg

SEQ ID NO: 31500 - DNA, 25 bp, Homo sapien
ttgtaatcagtggagctctggcctt

SEQ ID NO: 31501 - DNA, 25 bp, Homo sapien
tatggcaccctcagttgggtctact

SEQ ID NO: 31502 - DNA, 25 bp, Homo sapien
ctgtgtgaatcataagggtgttgag

SEQ ID NO: 31503 - DNA, 25 bp, Homo sapien
cccaactgagggtgccatagaatat

SEQ ID NO: 31504 - DNA, 25 bp, Homo sapien
ctgcacagaagattagttggcccat

SEQ ID NO: 31505 - DNA, 25 bp, Homo sapien
gagagagcatggcacatgaccacca

SEQ ID NO: 31506 - DNA, 25 bp, Homo sapien
tgaccaccatcttgacacacagcat

SEQ ID NO: 31507 - DNA, 25 bp, Homo sapien
atcttcatcagagcgtagaggtcac

SEQ ID NO: 31508 - DNA, 25 bp, Homo sapien
gtgctggtgcaggagatcttcatca

SEQ ID NO: 31509 - DNA, 25 bp, Homo sapien
agaaaggtatgcagcatggcatgaa

SEQ ID NO: 31510 - DNA, 25 bp, Homo sapien
attagttggcccatgagaaaggtat

SEQ ID NO: 31511 - DNA, 25 bp, Homo sapien
ggcagtaatgaaggccagagctcca

SEQ ID NO: 31512 - DNA, 25 bp, Homo sapien
cttggtcactgaatagctggaaagg

SEQ ID NO: 31513 - DNA, 25 bp, Homo sapien
atactgtcatcctggtgatgctgag

SEQ ID NO: 31514 - DNA, 25 bp, Homo sapien
aagtactgagacttgcctgcactga

SEQ ID NO: 31515 - DNA, 25 bp, Homo sapien
agataacttctactgtgatgttccc

SEQ ID NO: 31516 - DNA, 25 bp, Homo sapien
tcatgatcttcaacagtgggctgct

SEQ ID NO: 31517 - DNA, 25 bp, Homo sapien
cactcaattgtgtgtgggcctggta

SEQ ID NO: 31518 - DNA, 25 bp, Homo sapien
tcatcgtggtgtccatgatcttcat

SEQ ID NO: 31519 - DNA, 25 bp, Homo sapien
aggaaggcagcttccacctgcacca

SEQ ID NO: 31520 - DNA, 25 bp, Homo sapien
tgatgctgaggtcccactcgggaaa

SEQ ID NO: 31521 - DNA, 25 bp, Homo sapien
atctatatctatacctggcccttca

SEQ ID NO: 31522 - DNA, 25 bp, Homo sapien
actccattgtccaactggctctgat

SEQ ID NO: 31523 - DNA, 25 bp, Homo sapien
aacagtgggctgctagttatcatct

SEQ ID NO: 31524 - DNA, 25 bp, Homo sapien
aggaggaaccagatgataactagca

SEQ ID NO: 31525 - DNA, 25 bp, Homo sapien
accagatgataactagcagcccact

SEQ ID NO: 31526 - DNA, 25 bp, Homo sapien
tagcagcccactgttgaagatcatg

SEQ ID NO: 31527 - DNA, 25 bp, Homo sapien
agggaatgaagatcatggacaccac

SEQ ID NO: 31528 - DNA, 25 bp, Homo sapien
atctatgatattggggtcacagaag

SEQ ID NO: 31529 - DNA, 25 bp, Homo sapien
caccaggatgacagtataagagatc

SEQ ID NO: 31530 - DNA, 25 bp, Homo sapien
gtatcagagccagttggacaatgga

SEQ ID NO: 31531 - DNA, 25 bp, Homo sapien
aggcccacacacaattgagtgttca

SEQ ID NO: 31532 - DNA, 25 bp, Homo sapien
tagatatagatacagggaatgaaga

SEQ ID NO: 31533 - DNA, 25 bp, Homo sapien
ttcccgagtgggacctcagcatcac

SEQ ID NO: 31534 - DNA, 25 bp, Homo sapien
ggcagtggaagtatcagagccagtt

SEQ ID NO: 31535 - DNA, 25 bp, Homo sapien
atgagtggtttgtcctgtaactgcc

SEQ ID NO: 31536 - DNA, 25 bp, Homo sapien
tttgggaaagatgagtggtttgtcc

SEQ ID NO: 31537 - DNA, 25 bp, Homo sapien
ttgggaaagatgagtggtttgtcct

SEQ ID NO: 31538 - DNA, 25 bp, Homo sapien
gcctgggggtattgtgaactcaaga

SEQ ID NO: 31539 - DNA, 25 bp, Homo sapien
ggaaagatgagtggtttgtcctgta

SEQ ID NO: 31540 - DNA, 25 bp, Homo sapien
ctgggggtattgtgaactcaagacc

SEQ ID NO: 31541 - DNA, 25 bp, Homo sapien
tggtttgtcctgtaactgcctttcc

SEQ ID NO: 31542 - DNA, 25 bp, Homo sapien
aagatgagtggtttgtcctgtaact

SEQ ID NO: 31543 - DNA, 25 bp, Homo sapien
gaaagatgagtggtttgtcctgtaa

SEQ ID NO: 31544 - DNA, 25 bp, Homo sapien
cttgggtcaagttttgggaaagatg

SEQ ID NO: 31545 - DNA, 25 bp, Homo sapien
gagtggtttgtcctgtaactgcctt

SEQ ID NO: 31546 - DNA, 25 bp, Homo sapien
atgagtggtttgtcctgtaactgcc

SEQ ID NO: 31547 - DNA, 25 bp, Homo sapien
tttgggaaagatgagtggtttgtcc

SEQ ID NO: 31548 - DNA, 25 bp, Homo sapien
tttctgggcctaatttgcactagat

SEQ ID NO: 31549 - DNA, 25 bp, Homo sapien
ctgggggtattgtgaactcaagacc

SEQ ID NO: 31550 - DNA, 25 bp, Homo sapien
gaaagatgagtggtttgtcctgtaa

SEQ ID NO: 31551 - DNA, 25 bp, Homo sapien
ctaatttgcactagatggggcctgt

SEQ ID NO: 31552 - DNA, 25 bp, Homo sapien
ttgccagggtaaggccatgaggttt

SEQ ID NO: 31553 - DNA, 25 bp, Homo sapien
cttgggtcaagttttgggaaagatg

SEQ ID NO: 31554 - DNA, 25 bp, Homo sapien
tggtttgtcctgtaactgcctttcc

SEQ ID NO: 31555 - DNA, 25 bp, Homo sapien
cctactgtggctgttgagcaaagca

SEQ ID NO: 31556 - DNA, 25 bp, Homo sapien
ataggttacgtaagcctactgtggc

SEQ ID NO: 31557 - DNA, 25 bp, Homo sapien
agggaaaggcagttacaggacaaac

SEQ ID NO: 31558 - DNA, 25 bp, Homo sapien
aaggcagttacaggacaaaccactc

SEQ ID NO: 31559 - DNA, 25 bp, Homo sapien
aaacctcatggccttaccctggcaa

SEQ ID NO: 31560 - DNA, 25 bp, Homo sapien
aaacttgacccaagggttttcagca

SEQ ID NO: 31561 - DNA, 25 bp, Homo sapien
ggaaaggcagttacaggacaaacca

SEQ ID NO: 31562 - DNA, 25 bp, Homo sapien
cccaaacctcatggccttaccctgg

SEQ ID NO: 31563 - DNA, 25 bp, Homo sapien
aaaggcagttacaggacaaaccact

SEQ ID NO: 31564 - DNA, 25 bp, Homo sapien
aacttgacccaagggttttcagcaa

SEQ ID NO: 31565 - DNA, 25 bp, Homo sapien
gaaaggcagttacaggacaaaccac

SEQ ID NO: 31566 - DNA, 25 bp, Homo sapien
tcttgagttcacaatacccccaggc

SEQ ID NO: 31567 - DNA, 25 bp, Homo sapien
gtcttgagttcacaatacccccagg

SEQ ID NO: 31568 - DNA, 25 bp, Homo sapien
cagactagccctgagtagggagtgt

SEQ ID NO: 31569 - DNA, 25 bp, Homo sapien
acgtaacctatgtaatgtagggtca

SEQ ID NO: 31570 - DNA, 25 bp, Homo sapien
atgtccgggaagaacagactagccc

SEQ ID NO: 31571 - DNA, 25 bp, Homo sapien
acctatgtaatgtagggtcagggtg

SEQ ID NO: 31572 - DNA, 25 bp, Homo sapien
gaagaacagactagccctgagtagg

SEQ ID NO: 31573 - DNA, 25 bp, Homo sapien
tccgggaagaacagactagccctga

SEQ ID NO: 31574 - DNA, 25 bp, Homo sapien
tctcctgcacggctaccagaagatg

SEQ ID NO: 31575 - DNA, 25 bp, Homo sapien
atgctttgctcaacagccacagtag

SEQ ID NO: 31576 - DNA, 25 bp, Homo sapien
gctttgctcaacagccacagtaggc

SEQ ID NO: 31577 - DNA, 25 bp, Homo sapien
gggaagaacagactagccctgagta

SEQ ID NO: 31578 - DNA, 25 bp, Homo sapien
aagatgtccgggaagaacagactag

SEQ ID NO: 31579 - DNA, 25 bp, Homo sapien
ggaaaggcagttacaggacaaacca

SEQ ID NO: 31580 - DNA, 25 bp, Homo sapien
tccgggaagaacagactagccctga

SEQ ID NO: 31581 - DNA, 25 bp, Homo sapien
agggaaaggcagttacaggacaaac

SEQ ID NO: 31582 - DNA, 25 bp, Homo sapien
tagtgcaaattaggcccagaaagga

SEQ ID NO: 31583 - DNA, 25 bp, Homo sapien
tcttgagttcacaatacccccaggc

SEQ ID NO: 31584 - DNA, 25 bp, Homo sapien
aaaggcagttacaggacaaaccact

SEQ ID NO: 31585 - DNA, 25 bp, Homo sapien
tctcctgcacggctaccagaagatg

SEQ ID NO: 31586 - DNA, 25 bp, Homo sapien
acagccacagtaggcttacgtaacc

SEQ ID NO: 31587 - DNA, 25 bp, Homo sapien
aaacttgacccaagggttttcagca

SEQ ID NO: 31588 - DNA, 25 bp, Homo sapien
aaggcagttacaggacaaaccactc

SEQ ID NO: 31589 - DNA, 25 bp, Homo sapien
aaacctcatggccttaccctggcaa

SEQ ID NO: 31590 - DNA, 25 bp, Homo sapien
ttactagaaatagcttgcttttgcc

SEQ ID NO: 31591 - DNA, 25 bp, Homo sapien
tgcacgtttagaccattgaattaat

SEQ ID NO: 31592 - DNA, 25 bp, Homo sapien
tgtgtgggattaggccttatctgca

SEQ ID NO: 31593 - DNA, 25 bp, Homo sapien
gcctgccctgctaggtcaacgtgga

SEQ ID NO: 31594 - DNA, 25 bp, Homo sapien
gcaaagcgacattagggaacatata

SEQ ID NO: 31595 - DNA, 25 bp, Homo sapien
atagtatcaggttccagcctgccct

SEQ ID NO: 31596 - DNA, 25 bp, Homo sapien
ttcagggaaagttcacttctattgt

SEQ ID NO: 31597 - DNA, 25 bp, Homo sapien
ctttgtggcaaagcgacattaggga

SEQ ID NO: 31598 - DNA, 25 bp, Homo sapien
gcagcccttgggttgatagtatcag

SEQ ID NO: 31599 - DNA, 25 bp, Homo sapien
ctaggtcaacgtggacccagggctt

SEQ ID NO: 31600 - DNA, 25 bp, Homo sapien
tgttgttgaacctgattgctttagc

SEQ ID NO: 31601 - DNA, 25 bp, Homo sapien
ttgccacaaagccaaggcaaaagca

SEQ ID NO: 31602 - DNA, 25 bp, Homo sapien
ccacgttgacctagcagggcaggct

SEQ ID NO: 31603 - DNA, 25 bp, Homo sapien
atatgttccctaatgtcgctttgcc

SEQ ID NO: 31604 - DNA, 25 bp, Homo sapien
tggtctaaacgtgcataaaacatgg

SEQ ID NO: 31605 - DNA, 25 bp, Homo sapien
aaacatggactaaatggtagactac

SEQ ID NO: 31606 - DNA, 25 bp, Homo sapien
ctgatactatcaacccaagggctgc

SEQ ID NO: 31607 - DNA, 25 bp, Homo sapien
gggcaggctggaacctgatactatc

SEQ ID NO: 31608 - DNA, 25 bp, Homo sapien
aaagccctgggtccacgttgaccta

SEQ ID NO: 31609 - DNA, 25 bp, Homo sapien
atttgcagataaggcctaatcccac

SEQ ID NO: 31610 - DNA, 25 bp, Homo sapien
aagggctgctaaagcaatcaggttc

SEQ ID NO: 31611 - DNA, 25 bp, Homo sapien
aaacaatagaagtgaactttccctg

SEQ ID NO: 31612 - DNA, 25 bp, Homo sapien
tgtctgacaaactgaaagaggctga

SEQ ID NO: 31613 - DNA, 25 bp, Homo sapien
cttgaaccgtaggatccagctggtt

SEQ ID NO: 31614 - DNA, 25 bp, Homo sapien
ctaacaatctgaaatctctggaggc

SEQ ID NO: 31615 - DNA, 25 bp, Homo sapien
ggaggctgcatctgaaaagtattct

SEQ ID NO: 31616 - DNA, 25 bp, Homo sapien
ctgaggtggcctccttgaaccgtag

SEQ ID NO: 31617 - DNA, 25 bp, Homo sapien
tgcggaggtgtctgaactaaaatgt

SEQ ID NO: 31618 - DNA, 25 bp, Homo sapien
actaaaatgtggtgacctggaagaa

SEQ ID NO: 31619 - DNA, 25 bp, Homo sapien
aggaggacaaatatgaagaagaaat

SEQ ID NO: 31620 - DNA, 25 bp, Homo sapien
ttgaagaagagctggaccgtgctca

SEQ ID NO: 31621 - DNA, 25 bp, Homo sapien
ggaagaagaactcaagaatgttact

SEQ ID NO: 31622 - DNA, 25 bp, Homo sapien
aagtattctgaaaaggaggacaaat

SEQ ID NO: 31623 - DNA, 25 bp, Homo sapien
tctttcagtttgtcagacagaagtt

SEQ ID NO: 31624 - DNA, 25 bp, Homo sapien
cagcctccagagatttcagattgtt

SEQ ID NO: 31625 - DNA, 25 bp, Homo sapien
tgttagtaacattcttgagttcttc

SEQ ID NO: 31626 - DNA, 25 bp, Homo sapien
agaatacttttcagatgcagcctcc

SEQ ID NO: 31627 - DNA, 25 bp, Homo sapien
tccaggtcaccacattttagttcag

SEQ ID NO: 31628 - DNA, 25 bp, Homo sapien
cagatgcagcctccagagatttcag

SEQ ID NO: 31629 - DNA, 25 bp, Homo sapien
gtttgtcagacagaagtttaatttc

SEQ ID NO: 31630 - DNA, 25 bp, Homo sapien
ttcagaatacttttcagatgcagcc

SEQ ID NO: 31631 - DNA, 25 bp, Homo sapien
attttagttcagacacctccgcacg

SEQ ID NO: 31632 - DNA, 25 bp, Homo sapien
ccagagatttcagattgttagtaac

SEQ ID NO: 31633 - DNA, 25 bp, Homo sapien
tttagttcagacacctccgcacgct

SEQ ID NO: 31634 - DNA, 25 bp, Homo sapien
gaggaaacccaagtaacgtctgtcc

SEQ ID NO: 31635 - DNA, 25 bp, Homo sapien
ggacagacgttacttgggtttcctc

SEQ ID NO: 31636 - DNA, 25 bp, Homo sapien
atgattctatcacccaaagacacct

SEQ ID NO: 31637 - DNA, 25 bp, Homo sapien
agaagagcagtttttcagaaccaac

SEQ ID NO: 31638 - DNA, 25 bp, Homo sapien
cccatgggacctgattattgcacac

SEQ ID NO: 31639 - DNA, 25 bp, Homo sapien
agagagaccctgtgaaacccaggta

SEQ ID NO: 31640 - DNA, 25 bp, Homo sapien
ctggggtctcaggtatgattctatc

SEQ ID NO: 31641 - DNA, 25 bp, Homo sapien
aagacacctaaacaaatcaccagac

SEQ ID NO: 31642 - DNA, 25 bp, Homo sapien
gtttgaggtgtgagagtacttctcc

SEQ ID NO: 31643 - DNA, 25 bp, Homo sapien
atctgcatgtgtgagaggccagttt

SEQ ID NO: 31644 - DNA, 25 bp, Homo sapien
tttcctgcctatgtgagagagaccc

SEQ ID NO: 31645 - DNA, 25 bp, Homo sapien
tttcagcaatgagtcagaagagcag

SEQ ID NO: 31646 - DNA, 25 bp, Homo sapien
ccaactcacagtctgaaaaagcaac

SEQ ID NO: 31647 - DNA, 25 bp, Homo sapien
ggtgatagaatcatacctgagaccc

SEQ ID NO: 31648 - DNA, 25 bp, Homo sapien
atggctgggccattaaccttactgc

SEQ ID NO: 31649 - DNA, 25 bp, Homo sapien
ctctcacataggcaggaaacatgac

SEQ ID NO: 31650 - DNA, 25 bp, Homo sapien
tacctgggtttcacagggtctctct

SEQ ID NO: 31651 - DNA, 25 bp, Homo sapien
tgcaataatcaggtcccatggggat

SEQ ID NO: 31652 - DNA, 25 bp, Homo sapien
tcagcaaaagatggctgggccatta

SEQ ID NO: 31653 - DNA, 25 bp, Homo sapien
agactgtgagttggttctgaaaaac

SEQ ID NO: 31654 - DNA, 25 bp, Homo sapien
ttaggtgtctttgggtgatagaatc

SEQ ID NO: 31655 - DNA, 25 bp, Homo sapien
ggattggaatgtagtctggtgattt

SEQ ID NO: 31656 - DNA, 25 bp, Homo sapien
gctgaaagaagctgtgtgcaataat

SEQ ID NO: 31657 - DNA, 25 bp, Homo sapien
aattggagaagtactctcacacctc

SEQ ID NO: 31658 - DNA, 25 bp, Homo sapien
cttatggggcccagacggagaaact

SEQ ID NO: 31659 - DNA, 25 bp, Homo sapien
gagatcaccaagctacaacagcgtt

SEQ ID NO: 31660 - DNA, 25 bp, Homo sapien
ctcccacatgcaggattatggaagc

SEQ ID NO: 31661 - DNA, 25 bp, Homo sapien
tcactcagctgcaggccgagatcac

SEQ ID NO: 31662 - DNA, 25 bp, Homo sapien
gattatggaagcaggcctcgtgaac

SEQ ID NO: 31663 - DNA, 25 bp, Homo sapien
gtccacccagagagcctgcgagctg

SEQ ID NO: 31664 - DNA, 25 bp, Homo sapien
agatggcagagctatccgaggtgtt

SEQ ID NO: 31665 - DNA, 25 bp, Homo sapien
aacagcgttgtcagtcttatggggc

SEQ ID NO: 31666 - DNA, 25 bp, Homo sapien
ctcgacactcttgaggatgaggaac

SEQ ID NO: 31667 - DNA, 25 bp, Homo sapien
ggcagcagaaggagatcactcagct

SEQ ID NO: 31668 - DNA, 25 bp, Homo sapien
aggatgaggaacagatgctcattct

SEQ ID NO: 31669 - DNA, 25 bp, Homo sapien
ccatctgctggctggcttcagaaaa

SEQ ID NO: 31670 - DNA, 25 bp, Homo sapien
cccataagactgacaacgctgttgt

SEQ ID NO: 31671 - DNA, 25 bp, Homo sapien
gctggctggcttcagaaaactgctc

SEQ ID NO: 31672 - DNA, 25 bp, Homo sapien
tgtagcttggtgatctcggcctgca

SEQ ID NO: 31673 - DNA, 25 bp, Homo sapien
tggcgttcacgaggcctgcttccat

SEQ ID NO: 31674 - DNA, 25 bp, Homo sapien
ataatcctgcatgtgggagccagct

SEQ ID NO: 31675 - DNA, 25 bp, Homo sapien
aggctctctgggtggactcccttct

SEQ ID NO: 31676 - DNA, 25 bp, Homo sapien
acaacgctgttgtagcttggtgatc

SEQ ID NO: 31677 - DNA, 25 bp, Homo sapien
tcggcctgcagctgagtgatctcct

SEQ ID NO: 31678 - DNA, 25 bp, Homo sapien
gggtggactcccttctctgaggcca

SEQ ID NO: 31679 - DNA, 25 bp, Homo sapien
agcaccaacacctcggatagctctg

SEQ ID NO: 31680 - DNA, 25 bp, Homo sapien
tcaagaatgttgaaagtcaaacagg

SEQ ID NO: 31681 - DNA, 25 bp, Homo sapien
cattcaagaatgttgaaagtcaaac

SEQ ID NO: 31682 - DNA, 25 bp, Homo sapien
tattcaaaagcttgaacaagtattc

SEQ ID NO: 31683 - DNA, 25 bp, Homo sapien
tttccggtgatttcgcaattcttct

SEQ ID NO: 31684 - DNA, 25 bp, Homo sapien
tgaacaagtattcaagattgagctc

SEQ ID NO: 31685 - DNA, 25 bp, Homo sapien
attcaagattgagctccttatcatc

SEQ ID NO: 31686 - DNA, 25 bp, Homo sapien
acaagtattcaagattgagctcctt

SEQ ID NO: 31687 - DNA, 25 bp, Homo sapien
tgagctccttatcatctctggcaag

SEQ ID NO: 31688 - DNA, 25 bp, Homo sapien
cggttatttccggtgatttcgcaat

SEQ ID NO: 31689 - DNA, 25 bp, Homo sapien
aagaatgttgaaagtcaaacagggg

SEQ ID NO: 31690 - DNA, 25 bp, Homo sapien
ttatttccggtgatttcgcaattct

SEQ ID NO: 31691 - DNA, 25 bp, Homo sapien
acaccatgcctgcatcaagaagcct

SEQ ID NO: 31692 - DNA, 25 bp, Homo sapien
aagaagcctaaatttgatccactgt

SEQ ID NO: 31693 - DNA, 25 bp, Homo sapien
ttgaaaaatatggaggcatttattc

SEQ ID NO: 31694 - DNA, 25 bp, Homo sapien
gctcctgggacaatacagaagtagt

SEQ ID NO: 31695 - DNA, 25 bp, Homo sapien
gtagtaatctacaccatgcctgcat

SEQ ID NO: 31696 - DNA, 25 bp, Homo sapien
cctgggacaatacagaagtagtaat

SEQ ID NO: 31697 - DNA, 25 bp, Homo sapien
accatgcctgcatcaagaagcctaa

SEQ ID NO: 31698 - DNA, 25 bp, Homo sapien
catgcctgcatcaagaagcctaaat

SEQ ID NO: 31699 - DNA, 25 bp, Homo sapien
gcctgcatcaagaagcctaaatttg

SEQ ID NO: 31700 - DNA, 25 bp, Homo sapien
aagaggctatcttggtgcattcaag

SEQ ID NO: 31701 - DNA, 25 bp, Homo sapien
tgggacaatacagaagtagtaatct

SEQ ID NO: 31702 - DNA, 25 bp, Homo sapien
ggtccgacagaaagaggtctatatc

SEQ ID NO: 31703 - DNA, 25 bp, Homo sapien
aaggataagaattcccggtccgaca

SEQ ID NO: 31704 - DNA, 25 bp, Homo sapien
tagagatacaaaaggatcaaaggat

SEQ ID NO: 31705 - DNA, 25 bp, Homo sapien
tcatacaggaaagacaaaaggcgtt

SEQ ID NO: 31706 - DNA, 25 bp, Homo sapien
cttcaggactagaaagaagtcacaa

SEQ ID NO: 31707 - DNA, 25 bp, Homo sapien
gagtagtcgatcaggcaaaagatct

SEQ ID NO: 31708 - DNA, 25 bp, Homo sapien
gccggggacataatagagatagaaa

SEQ ID NO: 31709 - DNA, 25 bp, Homo sapien
cttcaaaaggtggtagtagtagaga

SEQ ID NO: 31710 - DNA, 25 bp, Homo sapien
ggtctatatcagagagtagtcgatc

SEQ ID NO: 31711 - DNA, 25 bp, Homo sapien
caaaaggcgttaatggaagaagcca

SEQ ID NO: 31712 - DNA, 25 bp, Homo sapien
aagtgaaagagaccgaaaatcatac

SEQ ID NO: 31713 - DNA, 25 bp, Homo sapien
cttgaagatcttttgcctgatcgac

SEQ ID NO: 31714 - DNA, 25 bp, Homo sapien
ttttgcctgatcgactactctctga

SEQ ID NO: 31715 - DNA, 25 bp, Homo sapien
ctactactaccaccttttgaagatt

SEQ ID NO: 31716 - DNA, 25 bp, Homo sapien
gatcgactactctctgatatagacc

SEQ ID NO: 31717 - DNA, 25 bp, Homo sapien
gatccacgctccttctgtgctttct

SEQ ID NO: 31718 - DNA, 25 bp, Homo sapien
gatatagacctctttctgtcggacc

SEQ ID NO: 31719 - DNA, 25 bp, Homo sapien
agacctctttctgtcggaccgggaa

SEQ ID NO: 31720 - DNA, 25 bp, Homo sapien
ctttctagtcctgaagtatcccttc

SEQ ID NO: 31721 - DNA, 25 bp, Homo sapien
accaccttttgaagatttgtgactt

SEQ ID NO: 31722 - DNA, 25 bp, Homo sapien
ctgtcggaccgggaattcttatcct

SEQ ID NO: 31723 - DNA, 25 bp, Homo sapien
aagcctggcttcttccattaacgcc

SEQ ID NO: 31724 - DNA, 25 bp, Homo sapien
cccttttccaccagtgcgagagagg

SEQ ID NO: 31725 - DNA, 25 bp, Homo sapien
aaatatatatcctttgtcctcgaga

SEQ ID NO: 31726 - DNA, 25 bp, Homo sapien
gctaaatttgggttgattatggccc

SEQ ID NO: 31727 - DNA, 25 bp, Homo sapien
tgtagggtgagtagggccattttta

SEQ ID NO: 31728 - DNA, 25 bp, Homo sapien
ggctctacagcagtcgtgatgaaac

SEQ ID NO: 31729 - DNA, 25 bp, Homo sapien
cagcagtcgtgatgaaacttaaata

SEQ ID NO: 31730 - DNA, 25 bp, Homo sapien
tgttgcctattttcccgtttgcagg

SEQ ID NO: 31731 - DNA, 25 bp, Homo sapien
cctcgagattttaggaagggtgtag

SEQ ID NO: 31732 - DNA, 25 bp, Homo sapien
ttttccaccagtgcgagagagggat

SEQ ID NO: 31733 - DNA, 25 bp, Homo sapien
caggggctaaatttgggttgattat

SEQ ID NO: 31734 - DNA, 25 bp, Homo sapien
tgtcctcgagattttaggaagggtg

SEQ ID NO: 31735 - DNA, 25 bp, Homo sapien
caggaaattaaaaatggccctactc

SEQ ID NO: 31736 - DNA, 25 bp, Homo sapien
aacgggaaaataggcaacaccctga

SEQ ID NO: 31737 - DNA, 25 bp, Homo sapien
aaaataggcaacaccctgaaaagta

SEQ ID NO: 31738 - DNA, 25 bp, Homo sapien
tctcgaggacaaaggatatatattt

SEQ ID NO: 31739 - DNA, 25 bp, Homo sapien
ctgcaaacgggaaaataggcaacac

SEQ ID NO: 31740 - DNA, 25 bp, Homo sapien
cagggccataatcaacccaaattta

SEQ ID NO: 31741 - DNA, 25 bp, Homo sapien
tttcatcacgactgctgtagagccc

SEQ ID NO: 31742 - DNA, 25 bp, Homo sapien
ctaaaatctcgaggacaaaggatat

SEQ ID NO: 31743 - DNA, 25 bp, Homo sapien
cgggaaaataggcaacaccctgaaa

SEQ ID NO: 31744 - DNA, 25 bp, Homo sapien
ggccataatcaacccaaatttagcc

SEQ ID NO: 31745 - DNA, 25 bp, Homo sapien
tccctctctcgcactggtggaaaag

SEQ ID NO: 31746 - DNA, 25 bp, Homo sapien
atagaattccattagccagtcctgc

SEQ ID NO: 31747 - DNA, 25 bp, Homo sapien
tggtgtcatgtggtgttcatcagtt

SEQ ID NO: 31748 - DNA, 25 bp, Homo sapien
atacagagatgtgctgattctcaga

SEQ ID NO: 31749 - DNA, 25 bp, Homo sapien
gtgatggaaagtatttggagaaagt

SEQ ID NO: 31750 - DNA, 25 bp, Homo sapien
tggggctcaggctcaagaatacaat

SEQ ID NO: 31751 - DNA, 25 bp, Homo sapien
gaaaggagctcgtcacatacctagt

SEQ ID NO: 31752 - DNA, 25 bp, Homo sapien
agccagtcctgccaattgaaatttg

SEQ ID NO: 31753 - DNA, 25 bp, Homo sapien
tgcctcaggatgtacatacagagat

SEQ ID NO: 31754 - DNA, 25 bp, Homo sapien
agaaagttttagagagtggggctca

SEQ ID NO: 31755 - DNA, 25 bp, Homo sapien
aatagcagagatttggtgtcatgtg

SEQ ID NO: 31756 - DNA, 25 bp, Homo sapien
attcttgcctaggaaaggagctcgt

SEQ ID NO: 31757 - DNA, 25 bp, Homo sapien
tagaagttctgagaatcagcacatc

SEQ ID NO: 31758 - DNA, 25 bp, Homo sapien
tcagcacatctctgtatgtacatcc

SEQ ID NO: 31759 - DNA, 25 bp, Homo sapien
acgagctcctttcctaggcaagaat

SEQ ID NO: 31760 - DNA, 25 bp, Homo sapien
cttttcaaactgatgaacaccacat

SEQ ID NO: 31761 - DNA, 25 bp, Homo sapien
aaactaggtatgtgacgagctcctt

SEQ ID NO: 31762 - DNA, 25 bp, Homo sapien
gatgaacaccacatgacaccaaatc

SEQ ID NO: 31763 - DNA, 25 bp, Homo sapien
tttccatcactaaactaggtatgtg

SEQ ID NO: 31764 - DNA, 25 bp, Homo sapien
tgtacatcctgaggcaaacagcaga

SEQ ID NO: 31765 - DNA, 25 bp, Homo sapien
caaatttcaattggcaggactggct

SEQ ID NO: 31766 - DNA, 25 bp, Homo sapien
tcattgtattcttgagcctgagccc

SEQ ID NO: 31767 - DNA, 25 bp, Homo sapien
gcaggactggctaatggaattctat

SEQ ID NO: 31768 - DNA, 25 bp, Homo sapien
tagcctgcacagacacttgggtcta

SEQ ID NO: 31769 - DNA, 25 bp, Homo sapien
aagagtgtgtgtgatgatgataaca

SEQ ID NO: 31770 - DNA, 25 bp, Homo sapien
acacttgggtctatgagagcacagt

SEQ ID NO: 31771 - DNA, 25 bp, Homo sapien
ttgagcagcaccatctttcttgtgc

SEQ ID NO: 31772 - DNA, 25 bp, Homo sapien
ttgacgctagcctgcacagacactt

SEQ ID NO: 31773 - DNA, 25 bp, Homo sapien
cacagtgtttttgagcagcaccatc

SEQ ID NO: 31774 - DNA, 25 bp, Homo sapien
gtgtgtgtgatgatgataacaggat

SEQ ID NO: 31775 - DNA, 25 bp, Homo sapien
tatgttgacgctagcctgcacagac

SEQ ID NO: 31776 - DNA, 25 bp, Homo sapien
cctttcactggtattgcatgttcct

SEQ ID NO: 31777 - DNA, 25 bp, Homo sapien
acagacacttgggtctatgagagca

SEQ ID NO: 31778 - DNA, 25 bp, Homo sapien
gagagcacagtgtttttgagcagca

SEQ ID NO: 31779 - DNA, 25 bp, Homo sapien
gtgctctcatagacccaagtgtctg

SEQ ID NO: 31780 - DNA, 25 bp, Homo sapien
gaaaggaagcacaagaaagatggtg

SEQ ID NO: 31781 - DNA, 25 bp, Homo sapien
aaacactgtgctctcatagacccaa

SEQ ID NO: 31782 - DNA, 25 bp, Homo sapien
agtgtctgtgcaggctagcgtcaac

SEQ ID NO: 31783 - DNA, 25 bp, Homo sapien
tgtctgtgcaggctagcgtcaacat

SEQ ID NO: 31784 - DNA, 25 bp, Homo sapien
agatggtgctgctcaaaaacactgt

SEQ ID NO: 31785 - DNA, 25 bp, Homo sapien
acactgtgctctcatagacccaagt

SEQ ID NO: 31786 - DNA, 25 bp, Homo sapien
ctgtgctctcatagacccaagtgtc

SEQ ID NO: 31787 - DNA, 25 bp, Homo sapien
tctcatagacccaagtgtctgtgca

SEQ ID NO: 31788 - DNA, 25 bp, Homo sapien
actgtgctctcatagacccaagtgt

SEQ ID NO: 31789 - DNA, 25 bp, Homo sapien
gtctgtgcaggctagcgtcaacata

SEQ ID NO: 31790 - DNA, 25 bp, Homo sapien
gtctgtgcaggctagcgtcaacata

SEQ ID NO: 31791 - DNA, 25 bp, Homo sapien
aaacactgtgctctcatagacccaa

SEQ ID NO: 31792 - DNA, 25 bp, Homo sapien
tctcatagacccaagtgtctgtgca

SEQ ID NO: 31793 - DNA, 25 bp, Homo sapien
agatggtgctgctcaaaaacactgt

SEQ ID NO: 31794 - DNA, 25 bp, Homo sapien
ggaacatgcaataccagtgaaagga

SEQ ID NO: 31795 - DNA, 25 bp, Homo sapien
acactgtgctctcatagacccaagt

SEQ ID NO: 31796 - DNA, 25 bp, Homo sapien
gcacaagaaagatggtgctgctcaa

SEQ ID NO: 31797 - DNA, 25 bp, Homo sapien
gaaaggaagcacaagaaagatggtg

SEQ ID NO: 31798 - DNA, 25 bp, Homo sapien
agtgtctgtgcaggctagcgtcaac

SEQ ID NO: 31799 - DNA, 25 bp, Homo sapien
tgtctgtgcaggctagcgtcaacat

SEQ ID NO: 31800 - DNA, 25 bp, Homo sapien
ctgtgctctcatagacccaagtgtc

SEQ ID NO: 31801 - DNA, 25 bp, Homo sapien
agcctgcacggatacctgggtctat

SEQ ID NO: 31802 - DNA, 25 bp, Homo sapien
cctgggtctatgagtgcacggtgtt

SEQ ID NO: 31803 - DNA, 25 bp, Homo sapien
ttgaccctagcctgcacggatacct

SEQ ID NO: 31804 - DNA, 25 bp, Homo sapien
acggtgtttttgagcaccaccattt

SEQ ID NO: 31805 - DNA, 25 bp, Homo sapien
agtgcacggtgtttttgagcaccac

SEQ ID NO: 31806 - DNA, 25 bp, Homo sapien
gtgtgtgcactgatgataacaggat

SEQ ID NO: 31807 - DNA, 25 bp, Homo sapien
atgagtgcacggtgtttttgagcac

SEQ ID NO: 31808 - DNA, 25 bp, Homo sapien
gaaaaagagtgtgtgcactgatgat

SEQ ID NO: 31809 - DNA, 25 bp, Homo sapien
tatgttgaccctagcctgcacggat

SEQ ID NO: 31810 - DNA, 25 bp, Homo sapien
ctagcctgcacggatacctgggtct

SEQ ID NO: 31811 - DNA, 25 bp, Homo sapien
tatgagaaaaagagtgtgtgcactg

SEQ ID NO: 31812 - DNA, 25 bp, Homo sapien
acaaatgaagggaaacacaagaaaa

SEQ ID NO: 31813 - DNA, 25 bp, Homo sapien
tagacccaggtatccgtgcaggcta

SEQ ID NO: 31814 - DNA, 25 bp, Homo sapien
ccgtgcactcatagacccaggtatc

SEQ ID NO: 31815 - DNA, 25 bp, Homo sapien
aaacaccgtgcactcatagacccag

SEQ ID NO: 31816 - DNA, 25 bp, Homo sapien
tcatagacccaggtatccgtgcagg

SEQ ID NO: 31817 - DNA, 25 bp, Homo sapien
atcctgttatcatcagtgcacacac

SEQ ID NO: 31818 - DNA, 25 bp, Homo sapien
actcatagacccaggtatccgtgca

SEQ ID NO: 31819 - DNA, 25 bp, Homo sapien
tggtgctcaaaaacaccgtgcactc

SEQ ID NO: 31820 - DNA, 25 bp, Homo sapien
atccgtgcaggctagggtcaacata

SEQ ID NO: 31821 - DNA, 25 bp, Homo sapien
ggtggtgctcaaaaacaccgtgcac

SEQ ID NO: 31822 - DNA, 25 bp, Homo sapien
atgaagggaaacacaagaaaaatgg

SEQ ID NO: 31823 - DNA, 25 bp, Homo sapien
cactgctaaagctgtcatgttctga

SEQ ID NO: 31824 - DNA, 25 bp, Homo sapien
aggagactgtccttttgtaggctaa

SEQ ID NO: 31825 - DNA, 25 bp, Homo sapien
ttctccggagtcattgccatggcca

SEQ ID NO: 31826 - DNA, 25 bp, Homo sapien
tagaaagtgtgtggagcttgtcaca

SEQ ID NO: 31827 - DNA, 25 bp, Homo sapien
gttctgacacctccatgaatgagtt

SEQ ID NO: 31828 - DNA, 25 bp, Homo sapien
attgcttttgctagcctaaggatcc

SEQ ID NO: 31829 - DNA, 25 bp, Homo sapien
tcatggataggtggaatagttaaca

SEQ ID NO: 31830 - DNA, 25 bp, Homo sapien
acacaatcagcttgaggagactgtc

SEQ ID NO: 31831 - DNA, 25 bp, Homo sapien
tcacaggatcatggataggtggaat

SEQ ID NO: 31832 - DNA, 25 bp, Homo sapien
tgtaggctaaatgctgtcagccact

SEQ ID NO: 31833 - DNA, 25 bp, Homo sapien
catgaatgagttgttgctgttaacc

SEQ ID NO: 31834 - DNA, 25 bp, Homo sapien
gaagatgtaggaaatgatcacagtc

SEQ ID NO: 31835 - DNA, 25 bp, Homo sapien
cagctttagcagtgaaggaatgtca

SEQ ID NO: 31836 - DNA, 25 bp, Homo sapien
cctcaagctgattgtgtggattaat

SEQ ID NO: 31837 - DNA, 25 bp, Homo sapien
tggatccttaggctagcaaaagcaa

SEQ ID NO: 31838 - DNA, 25 bp, Homo sapien
tgatcacagtcaagaaggtggccat

SEQ ID NO: 31839 - DNA, 25 bp, Homo sapien
aagaagtggctgacagcatttagcc

SEQ ID NO: 31840 - DNA, 25 bp, Homo sapien
tatccatgatcctgtgacaagctcc

SEQ ID NO: 31841 - DNA, 25 bp, Homo sapien
tttagcctacaaaaggacagtctcc

SEQ ID NO: 31842 - DNA, 25 bp, Homo sapien
gcaatgactccggagaaggttaaca

SEQ ID NO: 31843 - DNA, 25 bp, Homo sapien
gaaggttaacagcaacaactcattc

SEQ ID NO: 31844 - DNA, 25 bp, Homo sapien
ctcattcatggaggtgtcagaacat

SEQ ID NO: 31845 - DNA, 25 bp, Homo sapien
tttctcaggttcaattcaggtattc

SEQ ID NO: 31846 - DNA, 25 bp, Homo sapien
tcagcattgtgactattcttgtatc

SEQ ID NO: 31847 - DNA, 25 bp, Homo sapien
atcttgtcatatgtaggtggtcttc

SEQ ID NO: 31848 - DNA, 25 bp, Homo sapien
atggactgtgcatccggctattaat

SEQ ID NO: 31849 - DNA, 25 bp, Homo sapien
aattcaggtattcagcattgtgact

SEQ ID NO: 31850 - DNA, 25 bp, Homo sapien
gtgcatccggctattaatcttgtca

SEQ ID NO: 31851 - DNA, 25 bp, Homo sapien
aggtggtcttcttcatgctttaatc

SEQ ID NO: 31852 - DNA, 25 bp, Homo sapien
atttactgtgacattatcccattgt

SEQ ID NO: 31853 - DNA, 25 bp, Homo sapien
tctcttcgcaatcttaaaaaggaaa

SEQ ID NO: 31854 - DNA, 25 bp, Homo sapien
ctgtaactccaacatagtacatcac

SEQ ID NO: 31855 - DNA, 25 bp, Homo sapien
agactaaccttctgtaactccaaca

SEQ ID NO: 31856 - DNA, 25 bp, Homo sapien
ctcaaggtatcctgtgaggacactc

SEQ ID NO: 31857 - DNA, 25 bp, Homo sapien
ttctgcaaatcaagtgtgttagatc

SEQ ID NO: 31858 - DNA, 25 bp, Homo sapien
ttgggtgataattgtgtcatgggtt

SEQ ID NO: 31859 - DNA, 25 bp, Homo sapien
atcatttttattgtgaccgaggaca

SEQ ID NO: 31860 - DNA, 25 bp, Homo sapien
accgaggacaattgctcaaggtatc

SEQ ID NO: 31861 - DNA, 25 bp, Homo sapien
ataattgtgtcatgggttttggggt

SEQ ID NO: 31862 - DNA, 25 bp, Homo sapien
tggccagtttatgccacttttcagc

SEQ ID NO: 31863 - DNA, 25 bp, Homo sapien
tggttctttgatccctacgattgtc

SEQ ID NO: 31864 - DNA, 25 bp, Homo sapien
ccttcatttgggtgataattgtgtc

SEQ ID NO: 31865 - DNA, 25 bp, Homo sapien
ctgtgaggacactcttttcagagag

SEQ ID NO: 31866 - DNA, 25 bp, Homo sapien
tacgattgtctcctacacctacatc

SEQ ID NO: 31867 - DNA, 25 bp, Homo sapien
gtcctcggtcacaataaaaatgatc

SEQ ID NO: 31868 - DNA, 25 bp, Homo sapien
cttgatttgcagaaagtaagctgaa

SEQ ID NO: 31869 - DNA, 25 bp, Homo sapien
gacacaattatcacccaaatgaagg

SEQ ID NO: 31870 - DNA, 25 bp, Homo sapien
taaactctctgaaaagagtgtcctc

SEQ ID NO: 31871 - DNA, 25 bp, Homo sapien
tgtaggagacaatcgtagggatcaa

SEQ ID NO: 31872 - DNA, 25 bp, Homo sapien
tgaaaagagtgtcctcacaggatac

SEQ ID NO: 31873 - DNA, 25 bp, Homo sapien
cacaggataccttgagcaattgtcc

SEQ ID NO: 31874 - DNA, 25 bp, Homo sapien
cttgagcaattgtcctcggtcacaa

SEQ ID NO: 31875 - DNA, 25 bp, Homo sapien
acccaaatgaaggtgctgctgttca

SEQ ID NO: 31876 - DNA, 25 bp, Homo sapien
atcgtagggatcaaagaaccaatga

SEQ ID NO: 31877 - DNA, 25 bp, Homo sapien
taagctgaaaagtggcataaactgg

SEQ ID NO: 31878 - DNA, 25 bp, Homo sapien
gatctcagggatcatggtggctact

SEQ ID NO: 31879 - DNA, 25 bp, Homo sapien
tctcatggatctcagggatcatggt

SEQ ID NO: 31880 - DNA, 25 bp, Homo sapien
tatggttcctttcttgttgatcctc

SEQ ID NO: 31881 - DNA, 25 bp, Homo sapien
tacattcgagttctgtttgccatcc

SEQ ID NO: 31882 - DNA, 25 bp, Homo sapien
atttgaaatctatgccttcacaggc

SEQ ID NO: 31883 - DNA, 25 bp, Homo sapien
atggtggctactgtgcagaccactt

SEQ ID NO: 31884 - DNA, 25 bp, Homo sapien
actgtgcagaccacttgggtattta

SEQ ID NO: 31885 - DNA, 25 bp, Homo sapien
aattagtaatattctcatggatctc

SEQ ID NO: 31886 - DNA, 25 bp, Homo sapien
cccggtactagagcttgtgtgtgca

SEQ ID NO: 31887 - DNA, 25 bp, Homo sapien
cagaggggtttttatgaaattagta

SEQ ID NO: 31888 - DNA, 25 bp, Homo sapien
ctagagcttgtgtgtgcagacacct

SEQ ID NO: 31889 - DNA, 25 bp, Homo sapien
gggagtctcacagaagagatgatta

SEQ ID NO: 31890 - DNA, 25 bp, Homo sapien
tccctgagatccatgagaatattac

SEQ ID NO: 31891 - DNA, 25 bp, Homo sapien
gaggatcaacaagaaaggaaccata

SEQ ID NO: 31892 - DNA, 25 bp, Homo sapien
tcgaatgtaagacaagaggatcaac

SEQ ID NO: 31893 - DNA, 25 bp, Homo sapien
actaaatacccaagtggtctgcaca

SEQ ID NO: 31894 - DNA, 25 bp, Homo sapien
gcacacacaagctctagtaccgggg

SEQ ID NO: 31895 - DNA, 25 bp, Homo sapien
tttcattggggccacaaaatggaaa

SEQ ID NO: 31896 - DNA, 25 bp, Homo sapien
agtagccaccatgatccctgagatc

SEQ ID NO: 31897 - DNA, 25 bp, Homo sapien
aatcaaaatggtgcctgtgaaggca

SEQ ID NO: 31898 - DNA, 25 bp, Homo sapien
gatggcaaacagaactcgaatgtaa

SEQ ID NO: 31899 - DNA, 25 bp, Homo sapien
gatttcaaataagaaggtgtctgca

SEQ ID NO: 31900 - DNA, 25 bp, Homo sapien
ttcaccttgccatactgtggtccca

SEQ ID NO: 31901 - DNA, 25 bp, Homo sapien
agcgttggcctcatatctcttgtct

SEQ ID NO: 31902 - DNA, 25 bp, Homo sapien
tgaacccaaggatctgtgtggccct

SEQ ID NO: 31903 - DNA, 25 bp, Homo sapien
tgacacatccttagcccagagggtg

SEQ ID NO: 31904 - DNA, 25 bp, Homo sapien
ggtgagcttcaccagcgttggcctc

SEQ ID NO: 31905 - DNA, 25 bp, Homo sapien
tgtgacattccagcactgttgccct

SEQ ID NO: 31906 - DNA, 25 bp, Homo sapien
gttagggtgcattcattccagtatc

SEQ ID NO: 31907 - DNA, 25 bp, Homo sapien
ttgcccttggcctgtgctgacacat

SEQ ID NO: 31908 - DNA, 25 bp, Homo sapien
ccagagggtgagcttcaccagcgtt

SEQ ID NO: 31909 - DNA, 25 bp, Homo sapien
tggtcccaatgaagtggatcacttc

SEQ ID NO: 31910 - DNA, 25 bp, Homo sapien
atcctacactagaatcacaatatct

SEQ ID NO: 31911 - DNA, 25 bp, Homo sapien
ggcaacagtgctggaatgtcacaga

SEQ ID NO: 31912 - DNA, 25 bp, Homo sapien
ttcattgggaccacagtatggcaag

SEQ ID NO: 31913 - DNA, 25 bp, Homo sapien
ggccaacgctggtgaagctcaccct

SEQ ID NO: 31914 - DNA, 25 bp, Homo sapien
tctagtgtaggataaaagaattagc

SEQ ID NO: 31915 - DNA, 25 bp, Homo sapien
ttagcagaaagcagacaagagatat

SEQ ID NO: 31916 - DNA, 25 bp, Homo sapien
tcaagatactggaatgaatgcaccc

SEQ ID NO: 31917 - DNA, 25 bp, Homo sapien
gccagggccacacagatccttgggt

SEQ ID NO: 31918 - DNA, 25 bp, Homo sapien
agacaagagatatgaggccaacgct

SEQ ID NO: 31919 - DNA, 25 bp, Homo sapien
atgaatgcaccctaacagccatgtg

SEQ ID NO: 31920 - DNA, 25 bp, Homo sapien
ataaaagaattagcagaaagcagac

SEQ ID NO: 31921 - DNA, 25 bp, Homo sapien
tcaccctctgggctaaggatgtgtc

SEQ ID NO: 31922 - DNA, 25 bp, Homo sapien
atgtatcatcctagccatggggacc

SEQ ID NO: 31923 - DNA, 25 bp, Homo sapien
atgagccacagagcatgtatcatcc

SEQ ID NO: 31924 - DNA, 25 bp, Homo sapien
ctacagtggcatcgtcttctccatc

SEQ ID NO: 31925 - DNA, 25 bp, Homo sapien
ttcggctgcattcaggccacctttc

SEQ ID NO: 31926 - DNA, 25 bp, Homo sapien
tggggacctcattcttcggctgcat

SEQ ID NO: 31927 - DNA, 25 bp, Homo sapien
tgtgcagatacctcagccctggaga

SEQ ID NO: 31928 - DNA, 25 bp, Homo sapien
ccaatgaggtggactattatttccg

SEQ ID NO: 31929 - DNA, 25 bp, Homo sapien
ctgaagctggcttgtgcagatacct

SEQ ID NO: 31930 - DNA, 25 bp, Homo sapien
tatttccgtgatatcccagtcatgc

SEQ ID NO: 31931 - DNA, 25 bp, Homo sapien
gttcatcagtgtgggcctcatgccc

SEQ ID NO: 31932 - DNA, 25 bp, Homo sapien
tgatatcccagtcatgctgaagctg

SEQ ID NO: 31933 - DNA, 25 bp, Homo sapien
aagccagcttcagcatgactgggat

SEQ ID NO: 31934 - DNA, 25 bp, Homo sapien
acacagtaaggcaattggaaggtga

SEQ ID NO: 31935 - DNA, 25 bp, Homo sapien
atctacaagatggagaagacgatgc

SEQ ID NO: 31936 - DNA, 25 bp, Homo sapien
aggatgatacatgctctgtggctca

SEQ ID NO: 31937 - DNA, 25 bp, Homo sapien
tggtcagaaaggtggcctgaatgca

SEQ ID NO: 31938 - DNA, 25 bp, Homo sapien
agtccacctcattggggacacagta

SEQ ID NO: 31939 - DNA, 25 bp, Homo sapien
cccatggctaggatgatacatgctc

SEQ ID NO: 31940 - DNA, 25 bp, Homo sapien
ctgaatgcagccgaagaatgaggtc

SEQ ID NO: 31941 - DNA, 25 bp, Homo sapien
gcatgaggcccacactgatgaaccc

SEQ ID NO: 31942 - DNA, 25 bp, Homo sapien
tatcacggaaataatagtccacctc

SEQ ID NO: 31943 - DNA, 25 bp, Homo sapien
ctgaggtatctgcacaagccagctt

SEQ ID NO: 31944 - DNA, 25 bp, Homo sapien
tcttctgtgaccttgctgccctgct

SEQ ID NO: 31945 - DNA, 25 bp, Homo sapien
ttggattctgtcttgtgccagctcc

SEQ ID NO: 31946 - DNA, 25 bp, Homo sapien
gagggaagagctctgtgtcttctta

SEQ ID NO: 31947 - DNA, 25 bp, Homo sapien
ggtggtggtcattaccctgccattc

SEQ ID NO: 31948 - DNA, 25 bp, Homo sapien
gtctttctgtgctgcgaacaccatc

SEQ ID NO: 31949 - DNA, 25 bp, Homo sapien
attggggccaccatcctgagggtcc

SEQ ID NO: 31950 - DNA, 25 bp, Homo sapien
aagctgtcctgctcagatatcttcc

SEQ ID NO: 31951 - DNA, 25 bp, Homo sapien
ttcttagtggctgtatcttggattc

SEQ ID NO: 31952 - DNA, 25 bp, Homo sapien
atatggctacattggggccaccatc

SEQ ID NO: 31953 - DNA, 25 bp, Homo sapien
ttgctgccctgctcaagctgtcctg

SEQ ID NO: 31954 - DNA, 25 bp, Homo sapien
gtgtatcctggtatcatatggctac

SEQ ID NO: 31955 - DNA, 25 bp, Homo sapien
tcattgaggaagatatctgagcagg

SEQ ID NO: 31956 - DNA, 25 bp, Homo sapien
ggagctggcacaagacagaatccaa

SEQ ID NO: 31957 - DNA, 25 bp, Homo sapien
agaagacacagagctcttccctcat

SEQ ID NO: 31958 - DNA, 25 bp, Homo sapien
atacacatgaatggcagggtaatga

SEQ ID NO: 31959 - DNA, 25 bp, Homo sapien
aagacagaatccaagatacagccac

SEQ ID NO: 31960 - DNA, 25 bp, Homo sapien
gatggtgttcgcagcacagaaagac

SEQ ID NO: 31961 - DNA, 25 bp, Homo sapien
aagatatctgagcaggacagcttga

SEQ ID NO: 31962 - DNA, 25 bp, Homo sapien
agatacagccactaagaagacacag

SEQ ID NO: 31963 - DNA, 25 bp, Homo sapien
atgtagccatatgataccaggatac

SEQ ID NO: 31964 - DNA, 25 bp, Homo sapien
taccaggatacacatgaatggcagg

SEQ ID NO: 31965 - DNA, 25 bp, Homo sapien
aatggcagggtaatgaccaccaccc

SEQ ID NO: 31966 - DNA, 25 bp, Homo sapien
ttgccaattccaatgcccttagttt

SEQ ID NO: 31967 - DNA, 25 bp, Homo sapien
tagcttgcacaagttcactgctcat

SEQ ID NO: 31968 - DNA, 25 bp, Homo sapien
tgaacaggtgcgtctgtgcacggat

SEQ ID NO: 31969 - DNA, 25 bp, Homo sapien
tggaaaccagttttgccctgcagat

SEQ ID NO: 31970 - DNA, 25 bp, Homo sapien
gaacaccatcatgctggtggtcagc

SEQ ID NO: 31971 - DNA, 25 bp, Homo sapien
tctgtgggaatctcatcgatcactt

SEQ ID NO: 31972 - DNA, 25 bp, Homo sapien
tgctaaagttagcttgcacaagttc

SEQ ID NO: 31973 - DNA, 25 bp, Homo sapien
atcatgctggtggtcagcattctcc

SEQ ID NO: 31974 - DNA, 25 bp, Homo sapien
tgacgggttgcctgaccgctctgct

SEQ ID NO: 31975 - DNA, 25 bp, Homo sapien
aaattctggcggtgctaaagttagc

SEQ ID NO: 31976 - DNA, 25 bp, Homo sapien
ttcacgtgtgaaattctggcggtgc

SEQ ID NO: 31977 - DNA, 25 bp, Homo sapien
gatgaagatgtaagagatgcaaact

SEQ ID NO: 31978 - DNA, 25 bp, Homo sapien
aaactaagggcattggaattggcaa

SEQ ID NO: 31979 - DNA, 25 bp, Homo sapien
gtgaagtgatcgatgagattcccac

SEQ ID NO: 31980 - DNA, 25 bp, Homo sapien
aaactggtttccagcagagcggtca

SEQ ID NO: 31981 - DNA, 25 bp, Homo sapien
gtatctgcagggcaaaactggtttc

SEQ ID NO: 31982 - DNA, 25 bp, Homo sapien
agaccgtggccatccgtgcacagac

SEQ ID NO: 31983 - DNA, 25 bp, Homo sapien
atccgtgcacagacgcacctgttca

SEQ ID NO: 31984 - DNA, 25 bp, Homo sapien
atgatggtgttcatgagcagtgaac

SEQ ID NO: 31985 - DNA, 25 bp, Homo sapien
gcagtgaacttgtgcaagctaactt

SEQ ID NO: 31986 - DNA, 25 bp, Homo sapien
ttagcaccgccagaatttcacacgt

SEQ ID NO: 31987 - DNA, 25 bp, Homo sapien
tcagaatagtggaaaggatgaagat

SEQ ID NO: 31988 - DNA, 25 bp, Homo sapien
gggagctacagggagctcgtattct

SEQ ID NO: 31989 - DNA, 25 bp, Homo sapien
aaattgtctgacacgcgggagctac

SEQ ID NO: 31990 - DNA, 25 bp, Homo sapien
ggagctacagggagctcgtattctc

SEQ ID NO: 31991 - DNA, 25 bp, Homo sapien
aattgtctgacacgcgggagctaca

SEQ ID NO: 31992 - DNA, 25 bp, Homo sapien
acaaattgtctgacacgcgggagct

SEQ ID NO: 31993 - DNA, 25 bp, Homo sapien
ggactggctcctgatggaagttacc

SEQ ID NO: 31994 - DNA, 25 bp, Homo sapien
gctacagggagctcgtattctcttg

SEQ ID NO: 31995 - DNA, 25 bp, Homo sapien
ggacaaattgtctgacacgcgggag

SEQ ID NO: 31996 - DNA, 25 bp, Homo sapien
agctacagggagctcgtattctctt

SEQ ID NO: 31997 - DNA, 25 bp, Homo sapien
tcgtgcccatcaagtagagtcggcc

SEQ ID NO: 31998 - DNA, 25 bp, Homo sapien
gactggctcctgatggaagttaccc

SEQ ID NO: 31999 - DNA, 25 bp, Homo sapien
ccacaggggcgacctgagacctcgt

SEQ ID NO: 32000 - DNA, 25 bp, Homo sapien
ggccgactctacttgatgggcacga

SEQ ID NO: 32001 - DNA, 25 bp, Homo sapien
gtagctcccgcgtgtcagacaattt

SEQ ID NO: 32002 - DNA, 25 bp, Homo sapien
gctcccgcgtgtcagacaatttgtc

SEQ ID NO: 32003 - DNA, 25 bp, Homo sapien
agctcccgcgtgtcagacaatttgt

SEQ ID NO: 32004 - DNA, 25 bp, Homo sapien
aggggccgactctacttgatgggca

SEQ ID NO: 32005 - DNA, 25 bp, Homo sapien
ctccctgtagctcccgcgtgtcaga

SEQ ID NO: 32006 - DNA, 25 bp, Homo sapien
ctgggaggggccgactctacttgat

SEQ ID NO: 32007 - DNA, 25 bp, Homo sapien
tgtagctcccgcgtgtcagacaatt

SEQ ID NO: 32008 - DNA, 25 bp, Homo sapien
ctcccgcgtgtcagacaatttgtcc

SEQ ID NO: 32009 - DNA, 25 bp, Homo sapien
ggggccgactctacttgatgggcac

SEQ ID NO: 32010 - DNA, 25 bp, Homo sapien
tgtttaaataattgcgatcacctcc

SEQ ID NO: 32011 - DNA, 25 bp, Homo sapien
ctgtcatcagtcagatttattttcc

SEQ ID NO: 32012 - DNA, 25 bp, Homo sapien
aggcaaactgttcattagccaaacc

SEQ ID NO: 32013 - DNA, 25 bp, Homo sapien
ataagacaccaggaatgaaagattt

SEQ ID NO: 32014 - DNA, 25 bp, Homo sapien
tacctacctagccttgtagccagca

SEQ ID NO: 32015 - DNA, 25 bp, Homo sapien
ataattgcgatcacctcctacctac

SEQ ID NO: 32016 - DNA, 25 bp, Homo sapien
gacaccaggaatgaaagatttaatc

SEQ ID NO: 32017 - DNA, 25 bp, Homo sapien
acctagccttgtagccagcagtctc

SEQ ID NO: 32018 - DNA, 25 bp, Homo sapien
aactgttacttgatattactacttc

SEQ ID NO: 32019 - DNA, 25 bp, Homo sapien
ttcaaaaccaaaggcaaactgttca

SEQ ID NO: 32020 - DNA, 25 bp, Homo sapien
taacatttctagttcaggatatgat

SEQ ID NO: 32021 - DNA, 25 bp, Homo sapien
atctgactgatgacagtagatgaat

SEQ ID NO: 32022 - DNA, 25 bp, Homo sapien
ggggtttggctaatgaacagtttgc

SEQ ID NO: 32023 - DNA, 25 bp, Homo sapien
tgaacagtttgcctttggttttgaa

SEQ ID NO: 32024 - DNA, 25 bp, Homo sapien
aatggtggggtttggctaatgaaca

SEQ ID NO: 32025 - DNA, 25 bp, Homo sapien
atcatatcctgaactagaaatgtta

SEQ ID NO: 32026 - DNA, 25 bp, Homo sapien
cagtagatgaatgggagagactgct

SEQ ID NO: 32027 - DNA, 25 bp, Homo sapien
ggtaggaggtgatcgcaattattta

SEQ ID NO: 32028 - DNA, 25 bp, Homo sapien
tgatgaagtagtaatatcaagtaac

SEQ ID NO: 32029 - DNA, 25 bp, Homo sapien
aagaaggttggattaaatctttcat

SEQ ID NO: 32030 - DNA, 25 bp, Homo sapien
agactgctggctacaaggctaggta

SEQ ID NO: 32031 - DNA, 25 bp, Homo sapien
atcaagtaacagttattgagtgctt

SEQ ID NO: 32032 - DNA, 25 bp, Homo sapien
ttgttgccctactcaagctctcatg

SEQ ID NO: 32033 - DNA, 25 bp, Homo sapien
catgctcagacatctccctcaatga

SEQ ID NO: 32034 - DNA, 25 bp, Homo sapien
cacattggggtcaccatcctcaagg

SEQ ID NO: 32035 - DNA, 25 bp, Homo sapien
gctggtcattttcacagtgggacag

SEQ ID NO: 32036 - DNA, 25 bp, Homo sapien
tctcctgtaccaatgccctgtctca

SEQ ID NO: 32037 - DNA, 25 bp, Homo sapien
gtccttttgtgctgacaacaccatc

SEQ ID NO: 32038 - DNA, 25 bp, Homo sapien
ggactgtgtaacttactagtcactg

SEQ ID NO: 32039 - DNA, 25 bp, Homo sapien
ttgatctcttatggccacattgggg

SEQ ID NO: 32040 - DNA, 25 bp, Homo sapien
acagtgggacaggcagtcattactc

SEQ ID NO: 32041 - DNA, 25 bp, Homo sapien
actcaagctctcatgctcagacatc

SEQ ID NO: 32042 - DNA, 25 bp, Homo sapien
actagtcactgtgtcctggatcctc

SEQ ID NO: 32043 - DNA, 25 bp, Homo sapien
aatgactgcctgtcccactgtgaaa

SEQ ID NO: 32044 - DNA, 25 bp, Homo sapien
tccaggacacagtgactagtaagtt

SEQ ID NO: 32045 - DNA, 25 bp, Homo sapien
gcttgagtagggcaacaagatcaca

SEQ ID NO: 32046 - DNA, 25 bp, Homo sapien
ctgtcccactgtgaaaatgaccagc

SEQ ID NO: 32047 - DNA, 25 bp, Homo sapien
atgtctgagcatgagagcttgagta

SEQ ID NO: 32048 - DNA, 25 bp, Homo sapien
caagatgcatattagtggtagagta

SEQ ID NO: 32049 - DNA, 25 bp, Homo sapien
cccaatgtggccataagagatcaag

SEQ ID NO: 32050 - DNA, 25 bp, Homo sapien
caacaagatcacagaagaaatgggg

SEQ ID NO: 32051 - DNA, 25 bp, Homo sapien
atattagtggtagagtaatgactgc

SEQ ID NO: 32052 - DNA, 25 bp, Homo sapien
agagatcaagatgcatattagtggt

SEQ ID NO: 32053 - DNA, 25 bp, Homo sapien
cagtgactagtaagttacacagtcc

SEQ ID NO: 32054 - DNA, 25 bp, Homo sapien
gaatgagacactgctgttcctggtg

SEQ ID NO: 32055 - DNA, 25 bp, Homo sapien
tgggacggtgtgttctctgattcac

SEQ ID NO: 32056 - DNA, 25 bp, Homo sapien
tgattcactcgtccttagctcttag

SEQ ID NO: 32057 - DNA, 25 bp, Homo sapien
cttgctgctacttctgtgggacggt

SEQ ID NO: 32058 - DNA, 25 bp, Homo sapien
tgtggagctgacctcttgctgctac

SEQ ID NO: 32059 - DNA, 25 bp, Homo sapien
tgagagtgttaccatcatgatcatc

SEQ ID NO: 32060 - DNA, 25 bp, Homo sapien
tctcctaagtcttgcttgctctgat

SEQ ID NO: 32061 - DNA, 25 bp, Homo sapien
aagctgcgtgtggagctgacctctt

SEQ ID NO: 32062 - DNA, 25 bp, Homo sapien
ctacttctgtgggacggtgtgttct

SEQ ID NO: 32063 - DNA, 25 bp, Homo sapien
catgtctcagaagctgcgtgtggag

SEQ ID NO: 32064 - DNA, 25 bp, Homo sapien
actttgaatgagagtgttaccatca

SEQ ID NO: 32065 - DNA, 25 bp, Homo sapien
tcaggatagtggtgagaattagcag

SEQ ID NO: 32066 - DNA, 25 bp, Homo sapien
gtgacatcagagcaagcaagactta

SEQ ID NO: 32067 - DNA, 25 bp, Homo sapien
tcctaagagctaaggacgagtgaat

SEQ ID NO: 32068 - DNA, 25 bp, Homo sapien
acacaccgtcccacagaagtagcag

SEQ ID NO: 32069 - DNA, 25 bp, Homo sapien
ctatagaagaggatcctaagagcta

SEQ ID NO: 32070 - DNA, 25 bp, Homo sapien
accaggaacagcagtgtctcattca

SEQ ID NO: 32071 - DNA, 25 bp, Homo sapien
ctcattcaaagtggccaccaggaac

SEQ ID NO: 32072 - DNA, 25 bp, Homo sapien
tagcagcaagaggtcagctccacac

SEQ ID NO: 32073 - DNA, 25 bp, Homo sapien
gacgagtgaatcagagaacacaccg

SEQ ID NO: 32074 - DNA, 25 bp, Homo sapien
tgaggatgatcatgatggtaacact

SEQ ID NO: 32075 - DNA, 25 bp, Homo sapien
attcacagtgacatcagagcaagca

SEQ ID NO: 32076 - DNA, 25 bp, Homo sapien
atgtagggcttgtatttaggttagt

SEQ ID NO: 32077 - DNA, 25 bp, Homo sapien
tctcaggttcagttcaagtctttac

SEQ ID NO: 32078 - DNA, 25 bp, Homo sapien
ggccttcatagctggaaacctgcat

SEQ ID NO: 32079 - DNA, 25 bp, Homo sapien
ggatcgaatcacatcaaccactttt

SEQ ID NO: 32080 - DNA, 25 bp, Homo sapien
gatgtccaagaaactctgcattcag

SEQ ID NO: 32081 - DNA, 25 bp, Homo sapien
gatccttatatcaatgaactggttc

SEQ ID NO: 32082 - DNA, 25 bp, Homo sapien
atagactctcttgtgttgatcctta

SEQ ID NO: 32083 - DNA, 25 bp, Homo sapien
ttaccataggtagtgtcttaatatc

SEQ ID NO: 32084 - DNA, 25 bp, Homo sapien
cagatgaccacaggggccttcatag

SEQ ID NO: 32085 - DNA, 25 bp, Homo sapien
aggttagttttctgtggatcgaatc

SEQ ID NO: 32086 - DNA, 25 bp, Homo sapien
tccatgattcatgtagggcttgtat

SEQ ID NO: 32087 - DNA, 25 bp, Homo sapien
aagagagtctatacaagggaagaat

SEQ ID NO: 32088 - DNA, 25 bp, Homo sapien
ctgagaagatgaatagaaccagttc

SEQ ID NO: 32089 - DNA, 25 bp, Homo sapien
aagggaagaatatcacagtaaaagt

SEQ ID NO: 32090 - DNA, 25 bp, Homo sapien
tataaggatcaacacaagagagtct

SEQ ID NO: 32091 - DNA, 25 bp, Homo sapien
aagacttgaactgaacctgagaaga

SEQ ID NO: 32092 - DNA, 25 bp, Homo sapien
agagataagatattaagacactacc

SEQ ID NO: 32093 - DNA, 25 bp, Homo sapien
acatgaatcatggaatgcaggtttc

SEQ ID NO: 32094 - DNA, 25 bp, Homo sapien
actacctatggtaaagacttgaact

SEQ ID NO: 32095 - DNA, 25 bp, Homo sapien
gtaaaagtggttgatgtgattcgat

SEQ ID NO: 32096 - DNA, 25 bp, Homo sapien
ctgaatgcagagtttcttggacatc

SEQ ID NO: 32097 - DNA, 25 bp, Homo sapien
tgattcgatccacagaaaactaacc

SEQ ID NO: 32098 - DNA, 25 bp, Homo sapien
aaaacctcagcttttctaacgagcc

SEQ ID NO: 32099 - DNA, 25 bp, Homo sapien
aacacacacttaaggctcttataat

SEQ ID NO: 32100 - DNA, 25 bp, Homo sapien
aaatggctaaaagaaactcctagtg

SEQ ID NO: 32101 - DNA, 25 bp, Homo sapien
caaaacaatgtgaatcaaaatggct

SEQ ID NO: 32102 - DNA, 25 bp, Homo sapien
cctagtgttccctattgacacaaac

SEQ ID NO: 32103 - DNA, 25 bp, Homo sapien
ttagctacctcctagcaacagctac

SEQ ID NO: 32104 - DNA, 25 bp, Homo sapien
tggctaaaagaaactcctagtgttc

SEQ ID NO: 32105 - DNA, 25 bp, Homo sapien
tagcaacagctactagatcacttct

SEQ ID NO: 32106 - DNA, 25 bp, Homo sapien
ccagatcccaagattttggagcttc

SEQ ID NO: 32107 - DNA, 25 bp, Homo sapien
ctaacgagcctctaaaatgactttc

SEQ ID NO: 32108 - DNA, 25 bp, Homo sapien
attctgcccagatcccaagattttg

SEQ ID NO: 32109 - DNA, 25 bp, Homo sapien
gaattgataaatgatggataacagc

SEQ ID NO: 32110 - DNA, 25 bp, Homo sapien
tttagaggctcgttagaaaagctga

SEQ ID NO: 32111 - DNA, 25 bp, Homo sapien
ggtagctaaaggaagctccaaaatc

SEQ ID NO: 32112 - DNA, 25 bp, Homo sapien
gctgaaagtcattttagaggctcgt

SEQ ID NO: 32113 - DNA, 25 bp, Homo sapien
tagctgttgctaggaggtagctaaa

SEQ ID NO: 32114 - DNA, 25 bp, Homo sapien
ttgggatctgggcagaatgtattat

SEQ ID NO: 32115 - DNA, 25 bp, Homo sapien
tcaatagggaacactaggagtttct

SEQ ID NO: 32116 - DNA, 25 bp, Homo sapien
aaggaagctccaaaatcttgggatc

SEQ ID NO: 32117 - DNA, 25 bp, Homo sapien
aaagaagtgatctagtagctgttgc

SEQ ID NO: 32118 - DNA, 25 bp, Homo sapien
tataagagccttaagtgtgtgtttg

SEQ ID NO: 32119 - DNA, 25 bp, Homo sapien
tgtgtgtttgtgtcaatagggaaca

SEQ ID NO: 32120 - DNA, 25 bp, Homo sapien
aaagacaaatgttctgcatatcaac

SEQ ID NO: 32121 - DNA, 25 bp, Homo sapien
gagcagcatgatgtagcctatgatt

SEQ ID NO: 32122 - DNA, 25 bp, Homo sapien
tgtagcctatgattcaaaggcccag

SEQ ID NO: 32123 - DNA, 25 bp, Homo sapien
agggcagaagggaaataattcccaa

SEQ ID NO: 32124 - DNA, 25 bp, Homo sapien
tccagagtcaacagctgagcagcat

SEQ ID NO: 32125 - DNA, 25 bp, Homo sapien
tagggaggtgcatctttctggcatc

SEQ ID NO: 32126 - DNA, 25 bp, Homo sapien
actctgtccagagtcaacagctgag

SEQ ID NO: 32127 - DNA, 25 bp, Homo sapien
aatcattctgctatcctctggagtt

SEQ ID NO: 32128 - DNA, 25 bp, Homo sapien
tacttcatttgctatagggaggtgc

SEQ ID NO: 32129 - DNA, 25 bp, Homo sapien
tctggcatcttccacagtactgtgc

SEQ ID NO: 32130 - DNA, 25 bp, Homo sapien
ctggagtttgtaaagaagataattc

SEQ ID NO: 32131 - DNA, 25 bp, Homo sapien
tttacaaactccagaggatagcaga

SEQ ID NO: 32132 - DNA, 25 bp, Homo sapien
ctgggcctttgaatcataggctaca

SEQ ID NO: 32133 - DNA, 25 bp, Homo sapien
cataggctacatcatgctgctcagc

SEQ ID NO: 32134 - DNA, 25 bp, Homo sapien
ttgcattgcagttgatatgcagaac

SEQ ID NO: 32135 - DNA, 25 bp, Homo sapien
acagtactgtggaagatgccagaaa

SEQ ID NO: 32136 - DNA, 25 bp, Homo sapien
agacaaagggcattgggaattattt

SEQ ID NO: 32137 - DNA, 25 bp, Homo sapien
actccagaggatagcagaatgattt

SEQ ID NO: 32138 - DNA, 25 bp, Homo sapien
tgctgctcagctgttgactctggac

SEQ ID NO: 32139 - DNA, 25 bp, Homo sapien
gatgccagaaagatgcacctcccta

SEQ ID NO: 32140 - DNA, 25 bp, Homo sapien
tccaggacagcacagtactgtggaa

SEQ ID NO: 32141 - DNA, 25 bp, Homo sapien
ccctatagcaaatgaagtaagaatt

SEQ ID NO: 32142 - DNA, 25 bp, Homo sapien
caggacatgttcgacaatggcagct

SEQ ID NO: 32143 - DNA, 25 bp, Homo sapien
tctgcgccttcattagtgaccgctt

SEQ ID NO: 32144 - DNA, 25 bp, Homo sapien
cgcctcccaggacatgttcgacaat

SEQ ID NO: 32145 - DNA, 25 bp, Homo sapien
aagcgcctcacgctcagcggcatct

SEQ ID NO: 32146 - DNA, 25 bp, Homo sapien
atggccatcctgcaaagcccgcaca

SEQ ID NO: 32147 - DNA, 25 bp, Homo sapien
gcagaacagcatccgccacaacctc

SEQ ID NO: 32148 - DNA, 25 bp, Homo sapien
aacctctcgctgaacgactgcttcg

SEQ ID NO: 32149 - DNA, 25 bp, Homo sapien
gacatgttcgacaatggcagctttc

SEQ ID NO: 32150 - DNA, 25 bp, Homo sapien
tacatcgcgctcatcaccatggcca

SEQ ID NO: 32151 - DNA, 25 bp, Homo sapien
gcaagggcaactactggagcctgga

SEQ ID NO: 32152 - DNA, 25 bp, Homo sapien
tgaacgactgcttcgtcaagatccc

SEQ ID NO: 32153 - DNA, 25 bp, Homo sapien
aactgcctccctttgctgtgttgca

SEQ ID NO: 32154 - DNA, 25 bp, Homo sapien
acggcaaacccagtaggtaggtata

SEQ ID NO: 32155 - DNA, 25 bp, Homo sapien
ggcacagagtgttttggtagctaaa

SEQ ID NO: 32156 - DNA, 25 bp, Homo sapien
acacttcatctgcaggctgttcgtc

SEQ ID NO: 32157 - DNA, 25 bp, Homo sapien
ttggtagctaaacaagctcaccagg

SEQ ID NO: 32158 - DNA, 25 bp, Homo sapien
catgcaagaatgtgactccaagttt

SEQ ID NO: 32159 - DNA, 25 bp, Homo sapien
gtgttgcatgcaagaatgtgactcc

SEQ ID NO: 32160 - DNA, 25 bp, Homo sapien
aggctgttcgtctttacggcaaacc

SEQ ID NO: 32161 - DNA, 25 bp, Homo sapien
ccactctgcagatgcagaaacggag

SEQ ID NO: 32162 - DNA, 25 bp, Homo sapien
aggctagaaggtggccacacctagc

SEQ ID NO: 32163 - DNA, 25 bp, Homo sapien
taaacaagctcaccaggaggctaga

SEQ ID NO: 32164 - DNA, 25 bp, Homo sapien
ccgtaaagacgaacagcctgcagat

SEQ ID NO: 32165 - DNA, 25 bp, Homo sapien
aaacttggagtcacattcttgcatg

SEQ ID NO: 32166 - DNA, 25 bp, Homo sapien
atacctacctactgggtttgccgta

SEQ ID NO: 32167 - DNA, 25 bp, Homo sapien
cctactgggtttgccgtaaagacga

SEQ ID NO: 32168 - DNA, 25 bp, Homo sapien
aggtgtggccaccttctagcctcct

SEQ ID NO: 32169 - DNA, 25 bp, Homo sapien
ctcctggtgagcttgtttagctacc

SEQ ID NO: 32170 - DNA, 25 bp, Homo sapien
cttgcatgcaacacagcaaagggag

SEQ ID NO: 32171 - DNA, 25 bp, Homo sapien
tctgcatctgcagagtggggatagt

SEQ ID NO: 32172 - DNA, 25 bp, Homo sapien
agagtggggatagttatacctacct

SEQ ID NO: 32173 - DNA, 25 bp, Homo sapien
gcctgcagatgaagtgtttagccca

SEQ ID NO: 32174 - DNA, 25 bp, Homo sapien
taccaaaacactctgtgcctccgtt

SEQ ID NO: 32175 - DNA, 25 bp, Homo sapien
tgaaggcaattaactcacatagtat

SEQ ID NO: 32176 - DNA, 25 bp, Homo sapien
ggcaaatgatgactttcttggttcc

SEQ ID NO: 32177 - DNA, 25 bp, Homo sapien
aaaagacactgaaacagatttccta

SEQ ID NO: 32178 - DNA, 25 bp, Homo sapien
ttaatgagatgaaggcaattaactc

SEQ ID NO: 32179 - DNA, 25 bp, Homo sapien
cttggccattaatgagatgaaggca

SEQ ID NO: 32180 - DNA, 25 bp, Homo sapien
tggtttgcaagtaaaagttacacac

SEQ ID NO: 32181 - DNA, 25 bp, Homo sapien
atgcttcattttctggatgcaccaa

SEQ ID NO: 32182 - DNA, 25 bp, Homo sapien
gcaccaatgttgacctactatacat

SEQ ID NO: 32183 - DNA, 25 bp, Homo sapien
tccctccttggccattaatgagatg

SEQ ID NO: 32184 - DNA, 25 bp, Homo sapien
tggttccattggtttgcaagtaaaa

SEQ ID NO: 32185 - DNA, 25 bp, Homo sapien
ttgacctactatacatgttaaatgg

SEQ ID NO: 32186 - DNA, 25 bp, Homo sapien
gtgcatccagaaaatgaagcattta

SEQ ID NO: 32187 - DNA, 25 bp, Homo sapien
atttgcctaaaatgcagtcatcacc

SEQ ID NO: 32188 - DNA, 25 bp, Homo sapien
atgaagcatttaggaaatctgtttc

SEQ ID NO: 32189 - DNA, 25 bp, Homo sapien
aaccaatggaaccaagaaagtcatc

SEQ ID NO: 32190 - DNA, 25 bp, Homo sapien
tgtgtgtaacttttacttgcaaacc

SEQ ID NO: 32191 - DNA, 25 bp, Homo sapien
tggaaccaagaaagtcatcatttgc

SEQ ID NO: 32192 - DNA, 25 bp, Homo sapien
ttggtgcatccagaaaatgaagcat

SEQ ID NO: 32193 - DNA, 25 bp, Homo sapien
atagtaggtcaacattggtgcatcc

SEQ ID NO: 32194 - DNA, 25 bp, Homo sapien
catttaacatgtatagtaggtcaac

SEQ ID NO: 32195 - DNA, 25 bp, Homo sapien
catctcattaatggccaaggaggga

SEQ ID NO: 32196 - DNA, 25 bp, Homo sapien
actatgtgagttaattgccttcatc

SEQ ID NO: 32197 - DNA, 25 bp, Homo sapien
acactctctggaacagttgcaggag

SEQ ID NO: 32198 - DNA, 25 bp, Homo sapien
ttatttgccaagcacttaacagtca

SEQ ID NO: 32199 - DNA, 25 bp, Homo sapien
agaatgtcccagtggtcccaggccc

SEQ ID NO: 32200 - DNA, 25 bp, Homo sapien
gttgcaggaggtgagaccaagaact

SEQ ID NO: 32201 - DNA, 25 bp, Homo sapien
gatgatgatgttaacagctacagtt

SEQ ID NO: 32202 - DNA, 25 bp, Homo sapien
acacacggctcacaagaatggatca

SEQ ID NO: 32203 - DNA, 25 bp, Homo sapien
agagcccacggtgaacccaattctg

SEQ ID NO: 32204 - DNA, 25 bp, Homo sapien
ccaattctggattcattaaaagcta

SEQ ID NO: 32205 - DNA, 25 bp, Homo sapien
aggccctctggaaaaacactctctg

SEQ ID NO: 32206 - DNA, 25 bp, Homo sapien
attgagtatattatttgccaagcac

SEQ ID NO: 32207 - DNA, 25 bp, Homo sapien
agaccaagaacttgcctctgaagcc

SEQ ID NO: 32208 - DNA, 25 bp, Homo sapien
caaggggcttcagaggcaagttctt

SEQ ID NO: 32209 - DNA, 25 bp, Homo sapien
aagtgcttggcaaataatatactca

SEQ ID NO: 32210 - DNA, 25 bp, Homo sapien
tccagagagtgtttttccagagggc

SEQ ID NO: 32211 - DNA, 25 bp, Homo sapien
tgtgtcctcctccaaccaaggggct

SEQ ID NO: 32212 - DNA, 25 bp, Homo sapien
gggcctgggaccactgggacattct

SEQ ID NO: 32213 - DNA, 25 bp, Homo sapien
ataaactgtagctgttaacatcatc

SEQ ID NO: 32214 - DNA, 25 bp, Homo sapien
taatgaatccagaattgggttcacc

SEQ ID NO: 32215 - DNA, 25 bp, Homo sapien
attgggttcaccgtgggctctccct

SEQ ID NO: 32216 - DNA, 25 bp, Homo sapien
tccattcttgtgagccgtgtgtcct

SEQ ID NO: 32217 - DNA, 25 bp, Homo sapien
ctgcaactgttccagagagtgtttt

SEQ ID NO: 32218 - DNA, 25 bp, Homo sapien
ttggtctcacctcctgcaactgttc

SEQ ID NO: 32219 - DNA, 25 bp, Homo sapien
tcacttattgttagctataagcctt

SEQ ID NO: 32220 - DNA, 25 bp, Homo sapien
atttggtgtagaacattcatctttt

SEQ ID NO: 32221 - DNA, 25 bp, Homo sapien
gttatattaacagccattgaagacc

SEQ ID NO: 32222 - DNA, 25 bp, Homo sapien
atgtggcgatgaatatttggtgtag

SEQ ID NO: 32223 - DNA, 25 bp, Homo sapien
gtggcgatgaatatttggtgtagaa

SEQ ID NO: 32224 - DNA, 25 bp, Homo sapien
gaagaccatttgttatacgtactac

SEQ ID NO: 32225 - DNA, 25 bp, Homo sapien
attaacagccattgaagaccatttg

SEQ ID NO: 32226 - DNA, 25 bp, Homo sapien
gatatttgcatatgtggcgatgaat

SEQ ID NO: 32227 - DNA, 25 bp, Homo sapien
ttttgatggatgtttttgctatatc

SEQ ID NO: 32228 - DNA, 25 bp, Homo sapien
atttgcatatgtggcgatgaatatt

SEQ ID NO: 32229 - DNA, 25 bp, Homo sapien
ttttcattgatcagctacatttttg

SEQ ID NO: 32230 - DNA, 25 bp, Homo sapien
gctgatcaatgaaaagtagtacgta

SEQ ID NO: 32231 - DNA, 25 bp, Homo sapien
gtagtacgtataacaaatggtcttc

SEQ ID NO: 32232 - DNA, 25 bp, Homo sapien
aaagatgaatgttctacaccaaata

SEQ ID NO: 32233 - DNA, 25 bp, Homo sapien
caataagtgataaagaatggaagcc

SEQ ID NO: 32234 - DNA, 25 bp, Homo sapien
catcaaaaatgtaggaaaagtaacc

SEQ ID NO: 32235 - DNA, 25 bp, Homo sapien
aaatgatatagcaaaaacatccatc

SEQ ID NO: 32236 - DNA, 25 bp, Homo sapien
tataacaaatggtcttcaatggctg

SEQ ID NO: 32237 - DNA, 25 bp, Homo sapien
caaaaatgtagctgatcaatgaaaa

SEQ ID NO: 32238 - DNA, 25 bp, Homo sapien
ctacaccaaatattcatcgccacat

SEQ ID NO: 32239 - DNA, 25 bp, Homo sapien
atcgccacatatgcaaatatcacca

SEQ ID NO: 32240 - DNA, 25 bp, Homo sapien
atgtaggaaaagtaaccatcaaaaa

SEQ ID NO: 32241 - DNA, 25 bp, Homo sapien
aagcagaaagcatgtgatacaggat

SEQ ID NO: 32242 - DNA, 25 bp, Homo sapien
aagccttgcctgaagctcgtcctac

SEQ ID NO: 32243 - DNA, 25 bp, Homo sapien
caacgtaagggtgaaattaacaaga

SEQ ID NO: 32244 - DNA, 25 bp, Homo sapien
attaacaagatttcaaagaaggcaa

SEQ ID NO: 32245 - DNA, 25 bp, Homo sapien
ccacaagctggatcaacgtaagggt

SEQ ID NO: 32246 - DNA, 25 bp, Homo sapien
actgagctgctgcaccaagccttgc

SEQ ID NO: 32247 - DNA, 25 bp, Homo sapien
gatacaggatactccagcagccatt

SEQ ID NO: 32248 - DNA, 25 bp, Homo sapien
tttgatggctggaggagagacttct

SEQ ID NO: 32249 - DNA, 25 bp, Homo sapien
aaagacagagaaataacttgggcct

SEQ ID NO: 32250 - DNA, 25 bp, Homo sapien
tatggttacatcactgagctgctgc

SEQ ID NO: 32251 - DNA, 25 bp, Homo sapien
aacttgggcctatggttacatcact

SEQ ID NO: 32252 - DNA, 25 bp, Homo sapien
tgaaatggctgctggagtatcctgt

SEQ ID NO: 32253 - DNA, 25 bp, Homo sapien
aggcaaggcttggtgcagcagctca

SEQ ID NO: 32254 - DNA, 25 bp, Homo sapien
acccttacgttgatccagcttgtgg

SEQ ID NO: 32255 - DNA, 25 bp, Homo sapien
ctggagtatcctgtatcacatgctt

SEQ ID NO: 32256 - DNA, 25 bp, Homo sapien
agcagctcagtgatgtaaccatagg

SEQ ID NO: 32257 - DNA, 25 bp, Homo sapien
tccagcttgtggtagtgaaatggct

SEQ ID NO: 32258 - DNA, 25 bp, Homo sapien
agaagagagaagtctctcctccagc

SEQ ID NO: 32259 - DNA, 25 bp, Homo sapien
agtgatgtaaccataggcccaagtt

SEQ ID NO: 32260 - DNA, 25 bp, Homo sapien
ataggcccaagttatttctctgtct

SEQ ID NO: 32261 - DNA, 25 bp, Homo sapien
ttataagtgaaagaagtaggacgag

SEQ ID NO: 32262 - DNA, 25 bp, Homo sapien
agaagtctctcctccagccatcaaa

SEQ ID NO: 32263 - DNA, 25 bp, Homo sapien
ccagcatgagcggacacacacagga

SEQ ID NO: 32264 - DNA, 25 bp, Homo sapien
ggccttccggcagagcacacacctc

SEQ ID NO: 32265 - DNA, 25 bp, Homo sapien
tgcggcaacccattcagtcacagct

SEQ ID NO: 32266 - DNA, 25 bp, Homo sapien
tggatgcaacgagtgtgggaaaacc

SEQ ID NO: 32267 - DNA, 25 bp, Homo sapien
ccagcgaattcacacaggggagaag

SEQ ID NO: 32268 - DNA, 25 bp, Homo sapien
tcagccagcatgagcggacacacac

SEQ ID NO: 32269 - DNA, 25 bp, Homo sapien
cctatggatgcaacgagtgtgggaa

SEQ ID NO: 32270 - DNA, 25 bp, Homo sapien
aatgcaatgactgcggcaacccatt

SEQ ID NO: 32271 - DNA, 25 bp, Homo sapien
acacctcacccaacaccagcgaatt

SEQ ID NO: 32272 - DNA, 25 bp, Homo sapien
tgaatgcaatgactgcggcaaccca

SEQ ID NO: 32273 - DNA, 25 bp, Homo sapien
caatgactgcggcaacccattcagt

SEQ ID NO: 32274 - DNA, 25 bp, Homo sapien
tttagaacatggcagagacattctc

SEQ ID NO: 32275 - DNA, 25 bp, Homo sapien
tttcagtttagaacatggcagagac

SEQ ID NO: 32276 - DNA, 25 bp, Homo sapien
taggaagaaagacctggtttagaga

SEQ ID NO: 32277 - DNA, 25 bp, Homo sapien
aggaagtggtttggaagtgtcactt

SEQ ID NO: 32278 - DNA, 25 bp, Homo sapien
aagtgccagcaggtgaaaatgccct

SEQ ID NO: 32279 - DNA, 25 bp, Homo sapien
gaagtgtcactttggaagtgccagc

SEQ ID NO: 32280 - DNA, 25 bp, Homo sapien
aaatgccctgtgaacaggactggag

SEQ ID NO: 32281 - DNA, 25 bp, Homo sapien
gaggttttcagtttagaacatggca

SEQ ID NO: 32282 - DNA, 25 bp, Homo sapien
agtttagaacatggcagagacattc

SEQ ID NO: 32283 - DNA, 25 bp, Homo sapien
aggactggagctgaaaacaggaatc

SEQ ID NO: 32284 - DNA, 25 bp, Homo sapien
ccagcaggtgaaaatgccctgtgaa

SEQ ID NO: 32285 - DNA, 25 bp, Homo sapien
aagtgacacttccaaaccacttcct

SEQ ID NO: 32286 - DNA, 25 bp, Homo sapien
tgccatgttctaaactgaaaacctc

SEQ ID NO: 32287 - DNA, 25 bp, Homo sapien
tcacagggcattttcacctgctggc

SEQ ID NO: 32288 - DNA, 25 bp, Homo sapien
gctggcacttccaaagtgacacttc

SEQ ID NO: 32289 - DNA, 25 bp, Homo sapien
cttatttctgagaatgtctctgcca

SEQ ID NO: 32290 - DNA, 25 bp, Homo sapien
tgattcctgttttcagctccagtcc

SEQ ID NO: 32291 - DNA, 25 bp, Homo sapien
tgttttcagctccagtcctgttcac

SEQ ID NO: 32292 - DNA, 25 bp, Homo sapien
ttctgagaatgtctctgccatgttc

SEQ ID NO: 32293 - DNA, 25 bp, Homo sapien
ttcacctgctggcacttccaaagtg

SEQ ID NO: 32294 - DNA, 25 bp, Homo sapien
caacatcaactggaaatctatggaa

SEQ ID NO: 32295 - DNA, 25 bp, Homo sapien
gtcctgttcacagggcattttcacc

SEQ ID NO: 32296 - DNA, 25 bp, Homo sapien
ttgttcagattaagagttgccaaaa

SEQ ID NO: 32297 - DNA, 25 bp, Homo sapien
tgagaaagaaatgagcttctagatc

SEQ ID NO: 32298 - DNA, 25 bp, Homo sapien
gtaagagttcagactcacattctat

SEQ ID NO: 32299 - DNA, 25 bp, Homo sapien
aatgtaagagttcagactcacattc

SEQ ID NO: 32300 - DNA, 25 bp, Homo sapien
tctaaatgtaagagttcagactcac

SEQ ID NO: 32301 - DNA, 25 bp, Homo sapien
aatttagccctaaaatgacaagcct

SEQ ID NO: 32302 - DNA, 25 bp, Homo sapien
aatgacaagccttcttaaagcctta

SEQ ID NO: 32303 - DNA, 25 bp, Homo sapien
gttcagattaagagttgccaaaaaa

SEQ ID NO: 32304 - DNA, 25 bp, Homo sapien
aaaatttagccctaaaatgacaagc

SEQ ID NO: 32305 - DNA, 25 bp, Homo sapien
aatgagcttctagatcaattagcag

SEQ ID NO: 32306 - DNA, 25 bp, Homo sapien
aaaatgacaagccttcttaaagcct

SEQ ID NO: 32307 - DNA, 25 bp, Homo sapien
atagaatgtgagtctgaactcttac

SEQ ID NO: 32308 - DNA, 25 bp, Homo sapien
gaaggcttgtcattttagggctaaa

SEQ ID NO: 32309 - DNA, 25 bp, Homo sapien
agaaggcttgtcattttagggctaa

SEQ ID NO: 32310 - DNA, 25 bp, Homo sapien
ttaatagaatgtgagtctgaactct

SEQ ID NO: 32311 - DNA, 25 bp, Homo sapien
aaataaggctttaagaaggcttgtc

SEQ ID NO: 32312 - DNA, 25 bp, Homo sapien
aataaggctttaagaaggcttgtca

SEQ ID NO: 32313 - DNA, 25 bp, Homo sapien
agaatgtgagtctgaactcttacat

SEQ ID NO: 32314 - DNA, 25 bp, Homo sapien
aagaaggcttgtcattttagggcta

SEQ ID NO: 32315 - DNA, 25 bp, Homo sapien
taatagaatgtgagtctgaactctt

SEQ ID NO: 32316 - DNA, 25 bp, Homo sapien
aggcttgtcattttagggctaaatt

SEQ ID NO: 32317 - DNA, 25 bp, Homo sapien
tttaatagaatgtgagtctgaactc

SEQ ID NO: 32318 - DNA, 25 bp, Homo sapien
ttcacaagaacagcatcacggacgc

SEQ ID NO: 32319 - DNA, 25 bp, Homo sapien
aaggactcacctccaacaaactgct

SEQ ID NO: 32320 - DNA, 25 bp, Homo sapien
acgtgatcaagaacccacagtttgt

SEQ ID NO: 32321 - DNA, 25 bp, Homo sapien
cccacagtttgtgttcgacattcac

SEQ ID NO: 32322 - DNA, 25 bp, Homo sapien
gtgaacgtgatcaagaacccacagt

SEQ ID NO: 32323 - DNA, 25 bp, Homo sapien
gcacaagctgggcaaggactcacct

SEQ ID NO: 32324 - DNA, 25 bp, Homo sapien
tggccagacttcatggactcctgct

SEQ ID NO: 32325 - DNA, 25 bp, Homo sapien
aacagcatcacggacgctgctagtg

SEQ ID NO: 32326 - DNA, 25 bp, Homo sapien
gtggtggccagacttcatggactcc

SEQ ID NO: 32327 - DNA, 25 bp, Homo sapien
ccctgcgcttctggggtgaacgtga

SEQ ID NO: 32328 - DNA, 25 bp, Homo sapien
cttctggggtgaacgtgatcaagaa

SEQ ID NO: 32329 - DNA, 25 bp, Homo sapien
cccggccacgctgttggttcttaat

SEQ ID NO: 32330 - DNA, 25 bp, Homo sapien
gaaaagattgcagcaacaaatgaga

SEQ ID NO: 32331 - DNA, 25 bp, Homo sapien
taatgacacagcttaactttattgt

SEQ ID NO: 32332 - DNA, 25 bp, Homo sapien
cgcccggccacgctgttggttctta

SEQ ID NO: 32333 - DNA, 25 bp, Homo sapien
ccacgctgttggttcttaatgacac

SEQ ID NO: 32334 - DNA, 25 bp, Homo sapien
atcacgcccggccacgctgttggtt

SEQ ID NO: 32335 - DNA, 25 bp, Homo sapien
aagattgcagcaacaaatgagattt

SEQ ID NO: 32336 - DNA, 25 bp, Homo sapien
ttattgtgaaaagattgcagcaaca

SEQ ID NO: 32337 - DNA, 25 bp, Homo sapien
attgtgaaaagattgcagcaacaaa

SEQ ID NO: 32338 - DNA, 25 bp, Homo sapien
tggttcttaatgacacagcttaact

SEQ ID NO: 32339 - DNA, 25 bp, Homo sapien
tgttggttcttaatgacacagctta

SEQ ID NO: 32340 - DNA, 25 bp, Homo sapien
ccaagccctggacagcagttcagaa

SEQ ID NO: 32341 - DNA, 25 bp, Homo sapien
agaagtctcattacacaatctggga

SEQ ID NO: 32342 - DNA, 25 bp, Homo sapien
acacaatctgggacaagcccaatgc

SEQ ID NO: 32343 - DNA, 25 bp, Homo sapien
agcagacatctccaagtcggtgtac

SEQ ID NO: 32344 - DNA, 25 bp, Homo sapien
caagagagggccctatcagcccaaa

SEQ ID NO: 32345 - DNA, 25 bp, Homo sapien
gagagggccctatcagcccaaatcc

SEQ ID NO: 32346 - DNA, 25 bp, Homo sapien
agctccaagccctggacagcagttc

SEQ ID NO: 32347 - DNA, 25 bp, Homo sapien
acatctccaagtcggtgtaccttac

SEQ ID NO: 32348 - DNA, 25 bp, Homo sapien
tgggacaagcccaatgctggcttct

SEQ ID NO: 32349 - DNA, 25 bp, Homo sapien
gtaccttacttgtcaccagctccaa

SEQ ID NO: 32350 - DNA, 25 bp, Homo sapien
atcctggtgtcagcagacatctcca

SEQ ID NO: 32351 - DNA, 25 bp, Homo sapien
tggtgacaagtaaggtacaccgact

SEQ ID NO: 32352 - DNA, 25 bp, Homo sapien
ccgacttggagatgtctgctgacac

SEQ ID NO: 32353 - DNA, 25 bp, Homo sapien
ggcttgtcccagattgtgtaatgag

SEQ ID NO: 32354 - DNA, 25 bp, Homo sapien
tcccagattgtgtaatgagacttct

SEQ ID NO: 32355 - DNA, 25 bp, Homo sapien
cttggagctggtgacaagtaaggta

SEQ ID NO: 32356 - DNA, 25 bp, Homo sapien
taaggtacaccgacttggagatgtc

SEQ ID NO: 32357 - DNA, 25 bp, Homo sapien
tgtaatgagacttctgaactgctgt

SEQ ID NO: 32358 - DNA, 25 bp, Homo sapien
aagtaaggtacaccgacttggagat

SEQ ID NO: 32359 - DNA, 25 bp, Homo sapien
tggagatgtctgctgacaccaggat

SEQ ID NO: 32360 - DNA, 25 bp, Homo sapien
gagctggtgacaagtaaggtacacc

SEQ ID NO: 32361 - DNA, 25 bp, Homo sapien
gtacaccgacttggagatgtctgct

SEQ ID NO: 32362 - DNA, 25 bp, Homo sapien
agctactaggttctgggagatttca

SEQ ID NO: 32363 - DNA, 25 bp, Homo sapien
caaaggaaccaagatgaaagcatgt

SEQ ID NO: 32364 - DNA, 25 bp, Homo sapien
ataacgttccttactctctaggctc

SEQ ID NO: 32365 - DNA, 25 bp, Homo sapien
atgaaaagttctttcaagtgaacct

SEQ ID NO: 32366 - DNA, 25 bp, Homo sapien
ccaagatgaaagcatgtttaagagc

SEQ ID NO: 32367 - DNA, 25 bp, Homo sapien
gtcagaccaaaggaaccaagatgaa

SEQ ID NO: 32368 - DNA, 25 bp, Homo sapien
atcaggacattactaccatgacaac

SEQ ID NO: 32369 - DNA, 25 bp, Homo sapien
agtttccgtcagaccaaaggaacca

SEQ ID NO: 32370 - DNA, 25 bp, Homo sapien
agcatgtttaagagctactaggttc

SEQ ID NO: 32371 - DNA, 25 bp, Homo sapien
ttaagagctactaggttctgggaga

SEQ ID NO: 32372 - DNA, 25 bp, Homo sapien
taccatgacaaccaatgaaaagttc

SEQ ID NO: 32373 - DNA, 25 bp, Homo sapien
gaaagaacttttcattggttgtcat

SEQ ID NO: 32374 - DNA, 25 bp, Homo sapien
tcccagaacctagtagctcttaaac

SEQ ID NO: 32375 - DNA, 25 bp, Homo sapien
gttgtcatggtagtaatgtcctgat

SEQ ID NO: 32376 - DNA, 25 bp, Homo sapien
ttgaaatctcccagaacctagtagc

SEQ ID NO: 32377 - DNA, 25 bp, Homo sapien
gcctagagagtaaggaacgttatat

SEQ ID NO: 32378 - DNA, 25 bp, Homo sapien
ttaaacatgctttcatcttggttcc

SEQ ID NO: 32379 - DNA, 25 bp, Homo sapien
attggttgtcatggtagtaatgtcc

SEQ ID NO: 32380 - DNA, 25 bp, Homo sapien
agagcctagagagtaaggaacgtta

SEQ ID NO: 32381 - DNA, 25 bp, Homo sapien
cagagagcctagagagtaaggaacg

SEQ ID NO: 32382 - DNA, 25 bp, Homo sapien
tcttggttcctttggtctgacggaa

SEQ ID NO: 32383 - DNA, 25 bp, Homo sapien
tagagagtaaggaacgttatatagt

SEQ ID NO: 32384 - DNA, 25 bp, Homo sapien
tgcacctcttcacagcataggcaag

SEQ ID NO: 32385 - DNA, 25 bp, Homo sapien
ctgtctgacctttctgccgggagga

SEQ ID NO: 32386 - DNA, 25 bp, Homo sapien
cataggcaagaaaattctgtctgac

SEQ ID NO: 32387 - DNA, 25 bp, Homo sapien
cctatgaaatcagccaccaacatgg

SEQ ID NO: 32388 - DNA, 25 bp, Homo sapien
atgagaaacctatgaaatcagccac

SEQ ID NO: 32389 - DNA, 25 bp, Homo sapien
aacatggctgtgtcactttggtgct

SEQ ID NO: 32390 - DNA, 25 bp, Homo sapien
gtgtcactttggtgctcccacaaca

SEQ ID NO: 32391 - DNA, 25 bp, Homo sapien
ccaccaacatggctgtgtcactttg

SEQ ID NO: 32392 - DNA, 25 bp, Homo sapien
atgtcccaaggcctaacctgcacct

SEQ ID NO: 32393 - DNA, 25 bp, Homo sapien
tggtgctcccacaacaacttgaagc

SEQ ID NO: 32394 - DNA, 25 bp, Homo sapien
cagcataggcaagaaaattctgtct

SEQ ID NO: 32395 - DNA, 25 bp, Homo sapien
catgttggtggctgatttcataggt

SEQ ID NO: 32396 - DNA, 25 bp, Homo sapien
ttgttgtgggagcaccaaagtgaca

SEQ ID NO: 32397 - DNA, 25 bp, Homo sapien
aggtgcaggttaggccttgggacat

SEQ ID NO: 32398 - DNA, 25 bp, Homo sapien
tggtggctgatttcataggtttctc

SEQ ID NO: 32399 - DNA, 25 bp, Homo sapien
aatgcttcaagttgttgtgggagca

SEQ ID NO: 32400 - DNA, 25 bp, Homo sapien
ctcctcccggcagaaaggtcagaca

SEQ ID NO: 32401 - DNA, 25 bp, Homo sapien
gtcagacagaattttcttgcctatg

SEQ ID NO: 32402 - DNA, 25 bp, Homo sapien
tcttgcctatgctgtgaagaggtgc

SEQ ID NO: 32403 - DNA, 25 bp, Homo sapien
gacacagccatgttggtggctgatt

SEQ ID NO: 32404 - DNA, 25 bp, Homo sapien
ctatgctgtgaagaggtgcaggtta

SEQ ID NO: 32405 - DNA, 25 bp, Homo sapien
gtgggagcaccaaagtgacacagcc

SEQ ID NO: 32406 - DNA, 25 bp, Homo sapien
atgtgtcctatcaaaaggaggaaac

SEQ ID NO: 32407 - DNA, 25 bp, Homo sapien
tgacagctgacctcaacgtggggaa

SEQ ID NO: 32408 - DNA, 25 bp, Homo sapien
atgcatggcagtgacagctgacctc

SEQ ID NO: 32409 - DNA, 25 bp, Homo sapien
ctatcaaaaggaggaaactactatt

SEQ ID NO: 32410 - DNA, 25 bp, Homo sapien
cagctacagtgctgctgactgaatg

SEQ ID NO: 32411 - DNA, 25 bp, Homo sapien
tggcagtgacagctgacctcaacgt

SEQ ID NO: 32412 - DNA, 25 bp, Homo sapien
ttgttgagggctcaagtaagctgga

SEQ ID NO: 32413 - DNA, 25 bp, Homo sapien
caagcatacaatgatgcatggcagt

SEQ ID NO: 32414 - DNA, 25 bp, Homo sapien
aaggaggaaactactattcagctac

SEQ ID NO: 32415 - DNA, 25 bp, Homo sapien
tacaatgatgcatggcagtgacagc

SEQ ID NO: 32416 - DNA, 25 bp, Homo sapien
ctgacctcaacgtggggaagacaca

SEQ ID NO: 32417 - DNA, 25 bp, Homo sapien
gcattcccattcagtcagcagcact

SEQ ID NO: 32418 - DNA, 25 bp, Homo sapien
cctccttttgataggacacatgctc

SEQ ID NO: 32419 - DNA, 25 bp, Homo sapien
actgccatgcatcattgtatgcttg

SEQ ID NO: 32420 - DNA, 25 bp, Homo sapien
ctccagcttacttgagccctcaaca

SEQ ID NO: 32421 - DNA, 25 bp, Homo sapien
cccacgttgaggtcagctgtcactg

SEQ ID NO: 32422 - DNA, 25 bp, Homo sapien
gcttgcattcccattcagtcagcag

SEQ ID NO: 32423 - DNA, 25 bp, Homo sapien
tcagctgtcactgccatgcatcatt

SEQ ID NO: 32424 - DNA, 25 bp, Homo sapien
gtagctgaatagtagtttcctcctt

SEQ ID NO: 32425 - DNA, 25 bp, Homo sapien
agcactgtagctgaatagtagtttc

SEQ ID NO: 32426 - DNA, 25 bp, Homo sapien
tgtcttccccacgttgaggtcagct

SEQ ID NO: 32427 - DNA, 25 bp, Homo sapien
gtcagcagcactgtagctgaatagt

SEQ ID NO: 32428 - DNA, 25 bp, Homo sapien
cttaaatgacttaagctgaaaccat

SEQ ID NO: 32429 - DNA, 25 bp, Homo sapien
atggtttcagcttaagtcatttaag

SEQ ID NO: 32430 - DNA, 25 bp, Homo sapien
ctgcttctgaatgcatccttttgtt

SEQ ID NO: 32431 - DNA, 25 bp, Homo sapien
tgataaatgcagtgaaggcaccacc

SEQ ID NO: 32432 - DNA, 25 bp, Homo sapien
cagtgaaggcaccaccaaggccctt

SEQ ID NO: 32433 - DNA, 25 bp, Homo sapien
tatctacagacagcatggtacggtt

SEQ ID NO: 32434 - DNA, 25 bp, Homo sapien
acagacagcatggtacggttggatt

SEQ ID NO: 32435 - DNA, 25 bp, Homo sapien
tgaaggcaccaccaaggcccttagc

SEQ ID NO: 32436 - DNA, 25 bp, Homo sapien
tttgttgtgttctgataaatgcagt

SEQ ID NO: 32437 - DNA, 25 bp, Homo sapien
ttctgataaatgcagtgaaggcacc

SEQ ID NO: 32438 - DNA, 25 bp, Homo sapien
ccctatctacagacagcatggtacg

SEQ ID NO: 32439 - DNA, 25 bp, Homo sapien
cagcatggtacggttggattcctcc

SEQ ID NO: 32440 - DNA, 25 bp, Homo sapien
acggttggattcctcccgctgctgt

SEQ ID NO: 32441 - DNA, 25 bp, Homo sapien
tatcagaacacaacaaaaggatgca

SEQ ID NO: 32442 - DNA, 25 bp, Homo sapien
attcagaagcagatgggtattgaca

SEQ ID NO: 32443 - DNA, 25 bp, Homo sapien
ggccttggtggtgccttcactgcat

SEQ ID NO: 32444 - DNA, 25 bp, Homo sapien
tcagaacacaacaaaaggatgcatt

SEQ ID NO: 32445 - DNA, 25 bp, Homo sapien
agcgggaggaatccaaccgtaccat

SEQ ID NO: 32446 - DNA, 25 bp, Homo sapien
gggaggaatccaaccgtaccatgct

SEQ ID NO: 32447 - DNA, 25 bp, Homo sapien
cgtaccatgctgtctgtagataggg

SEQ ID NO: 32448 - DNA, 25 bp, Homo sapien
tggtggtgccttcactgcatttatc

SEQ ID NO: 32449 - DNA, 25 bp, Homo sapien
acagcagcgggaggaatccaaccgt

SEQ ID NO: 32450 - DNA, 25 bp, Homo sapien
acaacaaaaggatgcattcagaagc

SEQ ID NO: 32451 - DNA, 25 bp, Homo sapien
gatgcattcagaagcagatgggtat

SEQ ID NO: 32452 - DNA, 25 bp, Homo sapien
tgtgagcctggtttcacccaagtct

SEQ ID NO: 32453 - DNA, 25 bp, Homo sapien
ctacaaaaaccgcatggagggcaag

SEQ ID NO: 32454 - DNA, 25 bp, Homo sapien
ggtcaacatcaccatggtggccctc

SEQ ID NO: 32455 - DNA, 25 bp, Homo sapien
gctacttgctgcaggacgacgccca

SEQ ID NO: 32456 - DNA, 25 bp, Homo sapien
gaagaagtgtgagcctggtttcacc

SEQ ID NO: 32457 - DNA, 25 bp, Homo sapien
gcaaggtttggtgcaaaatcaggaa

SEQ ID NO: 32458 - DNA, 25 bp, Homo sapien
caaggtggtcaacatcaccatggtg

SEQ ID NO: 32459 - DNA, 25 bp, Homo sapien
aagggctacaaaaaccgcatggagg

SEQ ID NO: 32460 - DNA, 25 bp, Homo sapien
tcacccaagtctgggtgaaagggcc

SEQ ID NO: 32461 - DNA, 25 bp, Homo sapien
ttggtgcaaaatcaggaagaagtgt

SEQ ID NO: 32462 - DNA, 25 bp, Homo sapien
gagggcaaggtttggtgcaaaatca

SEQ ID NO: 32463 - DNA, 25 bp, Homo sapien
gccactccagtgctatgggagcatc

SEQ ID NO: 32464 - DNA, 25 bp, Homo sapien
cacccgggttcattcaggcccaagt

SEQ ID NO: 32465 - DNA, 25 bp, Homo sapien
tgctatgggagcatcggctactgct

SEQ ID NO: 32466 - DNA, 25 bp, Homo sapien
ttcattcaggcccaagtgcgacgag

SEQ ID NO: 32467 - DNA, 25 bp, Homo sapien
aggtcagccacatccctgctgtcca

SEQ ID NO: 32468 - DNA, 25 bp, Homo sapien
tcggctactgctggtgtgtcttccc

SEQ ID NO: 32469 - DNA, 25 bp, Homo sapien
tctgccactccagtgctatgggagc

SEQ ID NO: 32470 - DNA, 25 bp, Homo sapien
agtgcgacgagaacggcaactatct

SEQ ID NO: 32471 - DNA, 25 bp, Homo sapien
tgtcttccccaacggcacggaggtc

SEQ ID NO: 32472 - DNA, 25 bp, Homo sapien
catcggctactgctggtgtgtcttc

SEQ ID NO: 32473 - DNA, 25 bp, Homo sapien
acgagaacggcaactatctgccact

SEQ ID NO: 32474 - DNA, 25 bp, Homo sapien
tggccacattaaagttgcaaataac

SEQ ID NO: 32475 - DNA, 25 bp, Homo sapien
attgttacaaccaaaatgcaggctc

SEQ ID NO: 32476 - DNA, 25 bp, Homo sapien
atacacagaatggattgttacaacc

SEQ ID NO: 32477 - DNA, 25 bp, Homo sapien
ttgttttcaatttagcagcctttca

SEQ ID NO: 32478 - DNA, 25 bp, Homo sapien
aaatgcaggctctattgttttcaat

SEQ ID NO: 32479 - DNA, 25 bp, Homo sapien
aatcacatgcaaatacacagaatgg

SEQ ID NO: 32480 - DNA, 25 bp, Homo sapien
caaatgtatatggttctggccacat

SEQ ID NO: 32481 - DNA, 25 bp, Homo sapien
ttacaaccaaaatgcaggctctatt

SEQ ID NO: 32482 - DNA, 25 bp, Homo sapien
gcagcctttcaaatgtatatggttc

SEQ ID NO: 32483 - DNA, 25 bp, Homo sapien
tggttctggccacattaaagttgca

SEQ ID NO: 32484 - DNA, 25 bp, Homo sapien
atgcaaatacacagaatggattgtt

SEQ ID NO: 32485 - DNA, 25 bp, Homo sapien
agagcctgcattttggttgtaacaa

SEQ ID NO: 32486 - DNA, 25 bp, Homo sapien
ctaaattgaaaacaatagagcctgc

SEQ ID NO: 32487 - DNA, 25 bp, Homo sapien
aatagagcctgcattttggttgtaa

SEQ ID NO: 32488 - DNA, 25 bp, Homo sapien
ttgcaactttaatgtggccagaacc

SEQ ID NO: 32489 - DNA, 25 bp, Homo sapien
tgaaaacaatagagcctgcattttg

SEQ ID NO: 32490 - DNA, 25 bp, Homo sapien
aaacaatagagcctgcattttggtt

SEQ ID NO: 32491 - DNA, 25 bp, Homo sapien
tttgaaaggctgctaaattgaaaac

SEQ ID NO: 32492 - DNA, 25 bp, Homo sapien
ccagaaccatatacatttgaaaggc

SEQ ID NO: 32493 - DNA, 25 bp, Homo sapien
atgtggccagaaccatatacatttg

SEQ ID NO: 32494 - DNA, 25 bp, Homo sapien
accatatacatttgaaaggctgcta

SEQ ID NO: 32495 - DNA, 25 bp, Homo sapien
ctttaatgtggccagaaccatatac

SEQ ID NO: 32496 - DNA, 25 bp, Homo sapien
cctcccagtggctactgtcagagtt

SEQ ID NO: 32497 - DNA, 25 bp, Homo sapien
tgagaagtagaaaacgaaacctagc

SEQ ID NO: 32498 - DNA, 25 bp, Homo sapien
cagtggctactgtcagagttgagaa

SEQ ID NO: 32499 - DNA, 25 bp, Homo sapien
aatctgaaagatttaacgtgcatgt

SEQ ID NO: 32500 - DNA, 25 bp, Homo sapien
agagttgagaagtagaaaacgaaac

SEQ ID NO: 32501 - DNA, 25 bp, Homo sapien
agaagtagaaaacgaaacctagcaa

SEQ ID NO: 32502 - DNA, 25 bp, Homo sapien
attacctcccagtggctactgtcag

SEQ ID NO: 32503 - DNA, 25 bp, Homo sapien
agtcaatattattacctcccagtgg

SEQ ID NO: 32504 - DNA, 25 bp, Homo sapien
aatattattacctcccagtggctac

SEQ ID NO: 32505 - DNA, 25 bp, Homo sapien
ctgtcagagttgagaagtagaaaac

SEQ ID NO: 32506 - DNA, 25 bp, Homo sapien
gaaagatttaacgtgcatgtacatt

SEQ ID NO: 32507 - DNA, 25 bp, Homo sapien
ctttcagattttttgctaggtttcg

SEQ ID NO: 32508 - DNA, 25 bp, Homo sapien
atgaaatgtacatgcacgttaaatc

SEQ ID NO: 32509 - DNA, 25 bp, Homo sapien
gtagccactgggaggtaataatatt

SEQ ID NO: 32510 - DNA, 25 bp, Homo sapien
acagtagccactgggaggtaataat

SEQ ID NO: 32511 - DNA, 25 bp, Homo sapien
tcaactctgacagtagccactggga

SEQ ID NO: 32512 - DNA, 25 bp, Homo sapien
aatgtacatgcacgttaaatctttc

SEQ ID NO: 32513 - DNA, 25 bp, Homo sapien
tggtaaagagagtaaaaacatgaat

SEQ ID NO: 32514 - DNA, 25 bp, Homo sapien
acttctcaactctgacagtagccac

SEQ ID NO: 32515 - DNA, 25 bp, Homo sapien
ccactgggaggtaataatattgact

SEQ ID NO: 32516 - DNA, 25 bp, Homo sapien
aggtaataatattgactgatgccaa

SEQ ID NO: 32517 - DNA, 25 bp, Homo sapien
tgctaggtttcgttttctacttctc

SEQ ID NO: 32518 - DNA, 25 bp, Homo sapien
tggctccaagcactgttttggtgtt

SEQ ID NO: 32519 - DNA, 25 bp, Homo sapien
actgttggaagagcaaacactgtct

SEQ ID NO: 32520 - DNA, 25 bp, Homo sapien
cacctctgagagtggaatgactcct

SEQ ID NO: 32521 - DNA, 25 bp, Homo sapien
ctgttggaagagcaaacactgtctt

SEQ ID NO: 32522 - DNA, 25 bp, Homo sapien
tgcacctctgagagtggaatgactc

SEQ ID NO: 32523 - DNA, 25 bp, Homo sapien
ttttggtgttgtagctgagtacctt

SEQ ID NO: 32524 - DNA, 25 bp, Homo sapien
gtgcctgtgatggtgttacactgtt

SEQ ID NO: 32525 - DNA, 25 bp, Homo sapien
tgatggtgttacactgttggaagag

SEQ ID NO: 32526 - DNA, 25 bp, Homo sapien
acactgtctttattgaggtttggct

SEQ ID NO: 32527 - DNA, 25 bp, Homo sapien
cctctgagagtggaatgactcctgt

SEQ ID NO: 32528 - DNA, 25 bp, Homo sapien
tgttgtagctgagtacctttgggca

SEQ ID NO: 32529 - DNA, 25 bp, Homo sapien
ccaaaacagtgcttggagccaaacc

SEQ ID NO: 32530 - DNA, 25 bp, Homo sapien
acactgcccaaaggtactcagctac

SEQ ID NO: 32531 - DNA, 25 bp, Homo sapien
agacagtgtttgctcttccaacagt

SEQ ID NO: 32532 - DNA, 25 bp, Homo sapien
actgcccaaaggtactcagctacaa

SEQ ID NO: 32533 - DNA, 25 bp, Homo sapien
aaaggtactcagctacaacaccaaa

SEQ ID NO: 32534 - DNA, 25 bp, Homo sapien
caccaaaacagtgcttggagccaaa

SEQ ID NO: 32535 - DNA, 25 bp, Homo sapien
tgcccaaaggtactcagctacaaca

SEQ ID NO: 32536 - DNA, 25 bp, Homo sapien
aaaacagtgcttggagccaaacctc

SEQ ID NO: 32537 - DNA, 25 bp, Homo sapien
aacagtgtaacaccatcacaggcac

SEQ ID NO: 32538 - DNA, 25 bp, Homo sapien
acagtgtaacaccatcacaggcacc

SEQ ID NO: 32539 - DNA, 25 bp, Homo sapien
ataaagacagtgtttgctcttccaa

SEQ ID NO: 32540 - DNA, 25 bp, Homo sapien
ataaagacagtgtttgctcttccaa

SEQ ID NO: 32541 - DNA, 25 bp, Homo sapien
gagtcattccactctcagaggtgca

SEQ ID NO: 32542 - DNA, 25 bp, Homo sapien
actgcccaaaggtactcagctacaa

SEQ ID NO: 32543 - DNA, 25 bp, Homo sapien
aaaggtactcagctacaacaccaaa

SEQ ID NO: 32544 - DNA, 25 bp, Homo sapien
agacagtgtttgctcttccaacagt

SEQ ID NO: 32545 - DNA, 25 bp, Homo sapien
tgcccaaaggtactcagctacaaca

SEQ ID NO: 32546 - DNA, 25 bp, Homo sapien
aacagtgtaacaccatcacaggcac

SEQ ID NO: 32547 - DNA, 25 bp, Homo sapien
gccaaacctcaataaagacagtgtt

SEQ ID NO: 32548 - DNA, 25 bp, Homo sapien
acagtgtaacaccatcacaggcacc

SEQ ID NO: 32549 - DNA, 25 bp, Homo sapien
aaaacagtgcttggagccaaacctc

SEQ ID NO: 32550 - DNA, 25 bp, Homo sapien
caccaaaacagtgcttggagccaaa

SEQ ID NO: 32551 - DNA, 25 bp, Homo sapien
aattccattggctgagcgcaacacc

SEQ ID NO: 32552 - DNA, 25 bp, Homo sapien
aagaacacagctggtttacctgcac

SEQ ID NO: 32553 - DNA, 25 bp, Homo sapien
gctggtttacctgcacaggagctaa

SEQ ID NO: 32554 - DNA, 25 bp, Homo sapien
acaggagctaaatactttgcaattc

SEQ ID NO: 32555 - DNA, 25 bp, Homo sapien
tacctgcacaggagctaaatacttt

SEQ ID NO: 32556 - DNA, 25 bp, Homo sapien
gcaacaccaagaggctgactaagag

SEQ ID NO: 32557 - DNA, 25 bp, Homo sapien
tttgcaattccattggctgagcgca

SEQ ID NO: 32558 - DNA, 25 bp, Homo sapien
agatcaacaacaagaaaggtggaag

SEQ ID NO: 32559 - DNA, 25 bp, Homo sapien
acaagaaaggtggaagaacacagct

SEQ ID NO: 32560 - DNA, 25 bp, Homo sapien
tgactaagaggagcacacatgcaca

SEQ ID NO: 32561 - DNA, 25 bp, Homo sapien
tgagcgcaacaccaagaggctgact

SEQ ID NO: 32562 - DNA, 25 bp, Homo sapien
agcctcttggtgttgcgctcagcca

SEQ ID NO: 32563 - DNA, 25 bp, Homo sapien
gcgctcagccaatggaattgcaaag

SEQ ID NO: 32564 - DNA, 25 bp, Homo sapien
atgtgtgctcctcttagtcagcctc

SEQ ID NO: 32565 - DNA, 25 bp, Homo sapien
tagtcagcctcttggtgttgcgctc

SEQ ID NO: 32566 - DNA, 25 bp, Homo sapien
ttagctcctgtgcaggtaaaccagc

SEQ ID NO: 32567 - DNA, 25 bp, Homo sapien
ctcttagtcagcctcttggtgttgc

SEQ ID NO: 32568 - DNA, 25 bp, Homo sapien
gctcctgtgcaggtaaaccagctgt

SEQ ID NO: 32569 - DNA, 25 bp, Homo sapien
caaagtatttagctcctgtgcaggt

SEQ ID NO: 32570 - DNA, 25 bp, Homo sapien
ctgtgcaggtaaaccagctgtgttc

SEQ ID NO: 32571 - DNA, 25 bp, Homo sapien
tgtgcatgtgtgctcctcttagtca

SEQ ID NO: 32572 - DNA, 25 bp, Homo sapien
atggaattgcaaagtatttagctcc

SEQ ID NO: 32573 - DNA, 25 bp, Homo sapien
agacagtgggtcttcattggttgct

SEQ ID NO: 32574 - DNA, 25 bp, Homo sapien
tttagaccagtatagctatcttgag

SEQ ID NO: 32575 - DNA, 25 bp, Homo sapien
ggtgctatttagaagacagtgggtc

SEQ ID NO: 32576 - DNA, 25 bp, Homo sapien
agtgggtcttcattggttgctggtt

SEQ ID NO: 32577 - DNA, 25 bp, Homo sapien
atctgttttaaactgggtgctattt

SEQ ID NO: 32578 - DNA, 25 bp, Homo sapien
gaccagtatagctatcttgagaaat

SEQ ID NO: 32579 - DNA, 25 bp, Homo sapien
ttaaactgggtgctatttagaagac

SEQ ID NO: 32580 - DNA, 25 bp, Homo sapien
tgctggttttagtatctaacgaaac

SEQ ID NO: 32581 - DNA, 25 bp, Homo sapien
tcttgagaaattaactttcggagtc

SEQ ID NO: 32582 - DNA, 25 bp, Homo sapien
agtttttagaccagtatagctatct

SEQ ID NO: 32583 - DNA, 25 bp, Homo sapien
cattggttgctggttttagtatcta

SEQ ID NO: 32584 - DNA, 25 bp, Homo sapien
tactaaaaccagcaaccaatgaaga

SEQ ID NO: 32585 - DNA, 25 bp, Homo sapien
ctaaaaccagcaaccaatgaagacc

SEQ ID NO: 32586 - DNA, 25 bp, Homo sapien
gactccgaaagttaatttctcaaga

SEQ ID NO: 32587 - DNA, 25 bp, Homo sapien
tagatactaaaaccagcaaccaatg

SEQ ID NO: 32588 - DNA, 25 bp, Homo sapien
atagcacccagtttaaaacagattc

SEQ ID NO: 32589 - DNA, 25 bp, Homo sapien
actaaaaccagcaaccaatgaagac

SEQ ID NO: 32590 - DNA, 25 bp, Homo sapien
aaatagcacccagtttaaaacagat

SEQ ID NO: 32591 - DNA, 25 bp, Homo sapien
ctaaatagcacccagtttaaaacag

SEQ ID NO: 32592 - DNA, 25 bp, Homo sapien
gatactaaaaccagcaaccaatgaa

SEQ ID NO: 32593 - DNA, 25 bp, Homo sapien
tgtcttctaaatagcacccagttta

SEQ ID NO: 32594 - DNA, 25 bp, Homo sapien
agacccactgtcttctaaatagcac

SEQ ID NO: 32595 - DNA, 25 bp, Homo sapien
ctaaaaccagcaaccaatgaagacc

SEQ ID NO: 32596 - DNA, 25 bp, Homo sapien
atactaaaaccagcaaccaatgaag

SEQ ID NO: 32597 - DNA, 25 bp, Homo sapien
tagatactaaaaccagcaaccaatg

SEQ ID NO: 32598 - DNA, 25 bp, Homo sapien
tgtcttctaaatagcacccagttta

SEQ ID NO: 32599 - DNA, 25 bp, Homo sapien
taaatagcacccagtttaaaacaga

SEQ ID NO: 32600 - DNA, 25 bp, Homo sapien
atagcacccagtttaaaacagattc

SEQ ID NO: 32601 - DNA, 25 bp, Homo sapien
agacccactgtcttctaaatagcac

SEQ ID NO: 32602 - DNA, 25 bp, Homo sapien
actaaaaccagcaaccaatgaagac

SEQ ID NO: 32603 - DNA, 25 bp, Homo sapien
gactccgaaagttaatttctcaaga

SEQ ID NO: 32604 - DNA, 25 bp, Homo sapien
ctaaaactggtttcgttagatacta

SEQ ID NO: 32605 - DNA, 25 bp, Homo sapien
tttctcaagatagctatactggtct

SEQ ID NO: 32606 - DNA, 25 bp, Homo sapien
gcctgtgtcagggaatctgcttgat

SEQ ID NO: 32607 - DNA, 25 bp, Homo sapien
tgtcagggaatctgcttgatgtgta

SEQ ID NO: 32608 - DNA, 25 bp, Homo sapien
ctgtgtcagggaatctgcttgatgt

SEQ ID NO: 32609 - DNA, 25 bp, Homo sapien
tcagggaatctgcttgatgtgtaca

SEQ ID NO: 32610 - DNA, 25 bp, Homo sapien
acaccagccatcactgtcagcaact

SEQ ID NO: 32611 - DNA, 25 bp, Homo sapien
tgtacagtagtcaaggcgtggccac

SEQ ID NO: 32612 - DNA, 25 bp, Homo sapien
tacagtagtcaaggcgtggccacac

SEQ ID NO: 32613 - DNA, 25 bp, Homo sapien
gtagtcaaggcgtggccacaccagc

SEQ ID NO: 32614 - DNA, 25 bp, Homo sapien
ttgatgtgtacagtagtcaaggcgt

SEQ ID NO: 32615 - DNA, 25 bp, Homo sapien
aatctgcttgatgtgtacagtagtc

SEQ ID NO: 32616 - DNA, 25 bp, Homo sapien
ctgcctgtgtcagggaatctgcttg

SEQ ID NO: 32617 - DNA, 25 bp, Homo sapien
aaaattcagttatgagaagacccac

SEQ ID NO: 32618 - DNA, 25 bp, Homo sapien
tatgagaagacccacttgactgcta

SEQ ID NO: 32619 - DNA, 25 bp, Homo sapien
atgacgaatctgcaagtgtttttac

SEQ ID NO: 32620 - DNA, 25 bp, Homo sapien
atttgatgacgaatctgcaagtgtt

SEQ ID NO: 32621 - DNA, 25 bp, Homo sapien
acaaaggacttttctagttgatgat

SEQ ID NO: 32622 - DNA, 25 bp, Homo sapien
ataggtctttataggtactaagggc

SEQ ID NO: 32623 - DNA, 25 bp, Homo sapien
tcagttatgagaagacccacttgac

SEQ ID NO: 32624 - DNA, 25 bp, Homo sapien
ctttataggtactaagggctttcaa

SEQ ID NO: 32625 - DNA, 25 bp, Homo sapien
ttgactgctaatttgatgacgaatc

SEQ ID NO: 32626 - DNA, 25 bp, Homo sapien
tgatgataagaacataggtctttat

SEQ ID NO: 32627 - DNA, 25 bp, Homo sapien
tggaaaattcagttatgagaagacc

SEQ ID NO: 32628 - DNA, 25 bp, Homo sapien
ttagcagtcaagtgggtcttctcat

SEQ ID NO: 32629 - DNA, 25 bp, Homo sapien
caagtgggtcttctcataactgaat

SEQ ID NO: 32630 - DNA, 25 bp, Homo sapien
atcatcaactagaaaagtcctttgt

SEQ ID NO: 32631 - DNA, 25 bp, Homo sapien
aattagcagtcaagtgggtcttctc

SEQ ID NO: 32632 - DNA, 25 bp, Homo sapien
ttcgtcatcaaattagcagtcaagt

SEQ ID NO: 32633 - DNA, 25 bp, Homo sapien
cttgcagattcgtcatcaaattagc

SEQ ID NO: 32634 - DNA, 25 bp, Homo sapien
catcaaattagcagtcaagtgggtc

SEQ ID NO: 32635 - DNA, 25 bp, Homo sapien
tcttatcatcaactagaaaagtcct

SEQ ID NO: 32636 - DNA, 25 bp, Homo sapien
ttagtacctataaagacctatgttc

SEQ ID NO: 32637 - DNA, 25 bp, Homo sapien
gcagtcaagtgggtcttctcataac

SEQ ID NO: 32638 - DNA, 25 bp, Homo sapien
caaattagcagtcaagtgggtcttc

SEQ ID NO: 32639 - DNA, 25 bp, Homo sapien
taatcagaagcgataccttgcatgc

SEQ ID NO: 32640 - DNA, 25 bp, Homo sapien
tgtgatgtatatggcaaggtattta

SEQ ID NO: 32641 - DNA, 25 bp, Homo sapien
ttaatcagaagcgataccttgcatg

SEQ ID NO: 32642 - DNA, 25 bp, Homo sapien
aaacatcagataacccacttagaag

SEQ ID NO: 32643 - DNA, 25 bp, Homo sapien
gatgtatatggcaaggtatttaatc

SEQ ID NO: 32644 - DNA, 25 bp, Homo sapien
gtatatggcaaggtatttaatcaga

SEQ ID NO: 32645 - DNA, 25 bp, Homo sapien
aatgtgatgtatatggcaaggtatt

SEQ ID NO: 32646 - DNA, 25 bp, Homo sapien
gaagagaaacaatgtaaatgtgatg

SEQ ID NO: 32647 - DNA, 25 bp, Homo sapien
catcagataacccacttagaagaga

SEQ ID NO: 32648 - DNA, 25 bp, Homo sapien
tcagataacccacttagaagagaaa

SEQ ID NO: 32649 - DNA, 25 bp, Homo sapien
aaaaaacatcagataacccacttag

SEQ ID NO: 32650 - DNA, 25 bp, Homo sapien
cacctgtaaagactgtaggaaagcc

SEQ ID NO: 32651 - DNA, 25 bp, Homo sapien
atataaaagtctacactggagagaa

SEQ ID NO: 32652 - DNA, 25 bp, Homo sapien
aaaccctacacctgtaaagactgta

SEQ ID NO: 32653 - DNA, 25 bp, Homo sapien
tataaaagtctacactggagagaaa

SEQ ID NO: 32654 - DNA, 25 bp, Homo sapien
acacctgtaaagactgtaggaaagc

SEQ ID NO: 32655 - DNA, 25 bp, Homo sapien
acctgtaaagactgtaggaaagcct

SEQ ID NO: 32656 - DNA, 25 bp, Homo sapien
acatataaaagtctacactggagag

SEQ ID NO: 32657 - DNA, 25 bp, Homo sapien
tacacctgtaaagactgtaggaaag

SEQ ID NO: 32658 - DNA, 25 bp, Homo sapien
ctacacctgtaaagactgtaggaaa

SEQ ID NO: 32659 - DNA, 25 bp, Homo sapien
ataaaagtctacactggagagaaac

SEQ ID NO: 32660 - DNA, 25 bp, Homo sapien
aaacatataaaagtctacactggag

SEQ ID NO: 32661 - DNA, 25 bp, Homo sapien
cacctgtaaagactgtaggaaagcc

SEQ ID NO: 32662 - DNA, 25 bp, Homo sapien
agtcagagctcaactcttacaaaac

SEQ ID NO: 32663 - DNA, 25 bp, Homo sapien
aaacatataaaagtctacactggag

SEQ ID NO: 32664 - DNA, 25 bp, Homo sapien
aaaccctacacctgtaaagactgta

SEQ ID NO: 32665 - DNA, 25 bp, Homo sapien
acacctgtaaagactgtaggaaagc

SEQ ID NO: 32666 - DNA, 25 bp, Homo sapien
ataaaagtctacactggagagaaac

SEQ ID NO: 32667 - DNA, 25 bp, Homo sapien
catataaaagtctacactggagaga

SEQ ID NO: 32668 - DNA, 25 bp, Homo sapien
tacacctgtaaagactgtaggaaag

SEQ ID NO: 32669 - DNA, 25 bp, Homo sapien
aagactgtaggaaagccttcagcca

SEQ ID NO: 32670 - DNA, 25 bp, Homo sapien
cagccagagttcatctcttacccag

SEQ ID NO: 32671 - DNA, 25 bp, Homo sapien
acctgtaaagactgtaggaaagcct

SEQ ID NO: 32672 - DNA, 25 bp, Homo sapien
ctgtggttattgtataggtttgtat

SEQ ID NO: 32673 - DNA, 25 bp, Homo sapien
acatgccaggcaacagtcttaatat

SEQ ID NO: 32674 - DNA, 25 bp, Homo sapien
catgccaggcaacagtcttaatata

SEQ ID NO: 32675 - DNA, 25 bp, Homo sapien
atgccaggcaacagtcttaatatac

SEQ ID NO: 32676 - DNA, 25 bp, Homo sapien
agtaatgtcacttattcagggacct

SEQ ID NO: 32677 - DNA, 25 bp, Homo sapien
tacatgccaggcaacagtcttaata

SEQ ID NO: 32678 - DNA, 25 bp, Homo sapien
tttgctgtggttattgtataggttt

SEQ ID NO: 32679 - DNA, 25 bp, Homo sapien
gccaggcaacagtcttaatatacaa

SEQ ID NO: 32680 - DNA, 25 bp, Homo sapien
agatagtttgctgtggttattgtat

SEQ ID NO: 32681 - DNA, 25 bp, Homo sapien
atatacaaaaaagtattaggagtaa

SEQ ID NO: 32682 - DNA, 25 bp, Homo sapien
cagggacctggagatagtttgctgt

SEQ ID NO: 32683 - DNA, 25 bp, Homo sapien
atctccaggtccctgaataagtgac

SEQ ID NO: 32684 - DNA, 25 bp, Homo sapien
tacaaacctatacaataaccacagc

SEQ ID NO: 32685 - DNA, 25 bp, Homo sapien
ttgtatattaagactgttgcctggc

SEQ ID NO: 32686 - DNA, 25 bp, Homo sapien
caggtccctgaataagtgacattac

SEQ ID NO: 32687 - DNA, 25 bp, Homo sapien
agcaaactatctccaggtccctgaa

SEQ ID NO: 32688 - DNA, 25 bp, Homo sapien
ataaccacagcaaactatctccagg

SEQ ID NO: 32689 - DNA, 25 bp, Homo sapien
atattaagactgttgcctggcatgt

SEQ ID NO: 32690 - DNA, 25 bp, Homo sapien
tatacaataaccacagcaaactatc

SEQ ID NO: 32691 - DNA, 25 bp, Homo sapien
ttttttgtatattaagactgttgcc

SEQ ID NO: 32692 - DNA, 25 bp, Homo sapien
tccctgaataagtgacattactcct

SEQ ID NO: 32693 - DNA, 25 bp, Homo sapien
ctccaggtccctgaataagtgacat

SEQ ID NO: 32694 - DNA, 25 bp, Homo sapien
aggcaaacattgtgtggtcttcaac

SEQ ID NO: 32695 - DNA, 25 bp, Homo sapien
aaaatccttaggcaaacattgtgtg

SEQ ID NO: 32696 - DNA, 25 bp, Homo sapien
cttaggcaaacattgtgtggtcttc

SEQ ID NO: 32697 - DNA, 25 bp, Homo sapien
tagcaaaatccttaggcaaacattg

SEQ ID NO: 32698 - DNA, 25 bp, Homo sapien
tggattataagatagtgagaaaatt

SEQ ID NO: 32699 - DNA, 25 bp, Homo sapien
gaggatttggattataagatagtga

SEQ ID NO: 32700 - DNA, 25 bp, Homo sapien
aaagatctagcaaaatccttaggca

SEQ ID NO: 32701 - DNA, 25 bp, Homo sapien
ccttaggcaaacattgtgtggtctt

SEQ ID NO: 32702 - DNA, 25 bp, Homo sapien
gatctagcaaaatccttaggcaaac

SEQ ID NO: 32703 - DNA, 25 bp, Homo sapien
tcaaagatctagcaaaatccttagg

SEQ ID NO: 32704 - DNA, 25 bp, Homo sapien
atccttaggcaaacattgtgtggtc

SEQ ID NO: 32705 - DNA, 25 bp, Homo sapien
tgactgaactagtccaaagaaaaat

SEQ ID NO: 32706 - DNA, 25 bp, Homo sapien
gaccacacaatgtttgcctaaggat

SEQ ID NO: 32707 - DNA, 25 bp, Homo sapien
taatccaaatcctcaaaacagttga

SEQ ID NO: 32708 - DNA, 25 bp, Homo sapien
gttgaagaccacacaatgtttgcct

SEQ ID NO: 32709 - DNA, 25 bp, Homo sapien
tgaagaccacacaatgtttgcctaa

SEQ ID NO: 32710 - DNA, 25 bp, Homo sapien
aagaccacacaatgtttgcctaagg

SEQ ID NO: 32711 - DNA, 25 bp, Homo sapien
caaatcctcaaaacagttgaagacc

SEQ ID NO: 32712 - DNA, 25 bp, Homo sapien
atcctcaaaacagttgaagaccaca

SEQ ID NO: 32713 - DNA, 25 bp, Homo sapien
ccacacaatgtttgcctaaggattt

SEQ ID NO: 32714 - DNA, 25 bp, Homo sapien
tgcctaaggattttgctagatcttt

SEQ ID NO: 32715 - DNA, 25 bp, Homo sapien
gtttgcctaaggattttgctagatc

SEQ ID NO: 32716 - DNA, 25 bp, Homo sapien
aagaagatgatatgttttgaaaaga

SEQ ID NO: 32717 - DNA, 25 bp, Homo sapien
ggaaaaatttgctgcactgagaaat

SEQ ID NO: 32718 - DNA, 25 bp, Homo sapien
ttccttaccaggaaaaatttgctgc

SEQ ID NO: 32719 - DNA, 25 bp, Homo sapien
aagcaaatagacatatgttccttac

SEQ ID NO: 32720 - DNA, 25 bp, Homo sapien
gtcttgagagtgaaaagcaaataga

SEQ ID NO: 32721 - DNA, 25 bp, Homo sapien
cttaccaggaaaaatttgctgcact

SEQ ID NO: 32722 - DNA, 25 bp, Homo sapien
aatagacatatgttccttaccagga

SEQ ID NO: 32723 - DNA, 25 bp, Homo sapien
accaggaaaaatttgctgcactgag

SEQ ID NO: 32724 - DNA, 25 bp, Homo sapien
gctgcactgagaaattgtatgaaga

SEQ ID NO: 32725 - DNA, 25 bp, Homo sapien
tttgctgcactgagaaattgtatga

SEQ ID NO: 32726 - DNA, 25 bp, Homo sapien
tcttgagagtgaaaagcaaatagac

SEQ ID NO: 32727 - DNA, 25 bp, Homo sapien
cagtcgcccgacatgcacaacgccg

SEQ ID NO: 32728 - DNA, 25 bp, Homo sapien
tcaaagacagcgacaagatcccttt

SEQ ID NO: 32729 - DNA, 25 bp, Homo sapien
cgacatgcacaacgccgagatctcc

SEQ ID NO: 32730 - DNA, 25 bp, Homo sapien
gatccctttcattcgagaggcggag

SEQ ID NO: 32731 - DNA, 25 bp, Homo sapien
atctccaagcggctgggcaaacgct

SEQ ID NO: 32732 - DNA, 25 bp, Homo sapien
ctgctcaaagacagcgacaagatcc

SEQ ID NO: 32733 - DNA, 25 bp, Homo sapien
aagctgctcaaagacagcgacaaga

SEQ ID NO: 32734 - DNA, 25 bp, Homo sapien
ctgggcaaacgctggaagctgctca

SEQ ID NO: 32735 - DNA, 25 bp, Homo sapien
cgagatctccaagcggctgggcaaa

SEQ ID NO: 32736 - DNA, 25 bp, Homo sapien
gggcaaacgctggaagctgctcaaa

SEQ ID NO: 32737 - DNA, 25 bp, Homo sapien
aagacagcgacaagatccctttcat

SEQ ID NO: 32738 - DNA, 25 bp, Homo sapien
tccttgatgatggattcaaaaaatc

SEQ ID NO: 32739 - DNA, 25 bp, Homo sapien
gcagtaggtccttgcactccttcaa

SEQ ID NO: 32740 - DNA, 25 bp, Homo sapien
gcttccttgatgatggattcaaaaa

SEQ ID NO: 32741 - DNA, 25 bp, Homo sapien
ccttgatgatggattcaaaaaatcg

SEQ ID NO: 32742 - DNA, 25 bp, Homo sapien
tgcagtaggtccttgcactccttca

SEQ ID NO: 32743 - DNA, 25 bp, Homo sapien
tcctgactgcagtaggtccttgcac

SEQ ID NO: 32744 - DNA, 25 bp, Homo sapien
gcactccttcaagcatttcgaagat

SEQ ID NO: 32745 - DNA, 25 bp, Homo sapien
ctgactgcagtaggtccttgcactc

SEQ ID NO: 32746 - DNA, 25 bp, Homo sapien
cctgactgcagtaggtccttgcact

SEQ ID NO: 32747 - DNA, 25 bp, Homo sapien
ttcctgactgcagtaggtccttgca

SEQ ID NO: 32748 - DNA, 25 bp, Homo sapien
gctgcttccttgatgatggattcaa

SEQ ID NO: 32749 - DNA, 25 bp, Homo sapien
atgcttgaaggagtgcaaggaccta

SEQ ID NO: 32750 - DNA, 25 bp, Homo sapien
cctactgcagtcaggaagcgatttt

SEQ ID NO: 32751 - DNA, 25 bp, Homo sapien
aaggacctactgcagtcaggaagcg

SEQ ID NO: 32752 - DNA, 25 bp, Homo sapien
ttgaaggagtgcaaggacctactgc

SEQ ID NO: 32753 - DNA, 25 bp, Homo sapien
atcttcgaaatgcttgaaggagtgc

SEQ ID NO: 32754 - DNA, 25 bp, Homo sapien
gaagcagcaaggtgggtagaaatag

SEQ ID NO: 32755 - DNA, 25 bp, Homo sapien
ttcgaaatgcttgaaggagtgcaag

SEQ ID NO: 32756 - DNA, 25 bp, Homo sapien
caggaagcgattttttgaatccatc

SEQ ID NO: 32757 - DNA, 25 bp, Homo sapien
tactgcagtcaggaagcgatttttt

SEQ ID NO: 32758 - DNA, 25 bp, Homo sapien
cagtcaggaagcgattttttgaatc

SEQ ID NO: 32759 - DNA, 25 bp, Homo sapien
gacctactgcagtcaggaagcgatt

SEQ ID NO: 32760 - DNA, 25 bp, Homo sapien
aatagcacgctgcacttgaaacagg

SEQ ID NO: 32761 - DNA, 25 bp, Homo sapien
tgaaacaggggaagacactgtataa

SEQ ID NO: 32762 - DNA, 25 bp, Homo sapien
ttttaaaaatagcacgctgcacttg

SEQ ID NO: 32763 - DNA, 25 bp, Homo sapien
caggggaagacactgtataacatcc

SEQ ID NO: 32764 - DNA, 25 bp, Homo sapien
cgctgcacttgaaacaggggaagac

SEQ ID NO: 32765 - DNA, 25 bp, Homo sapien
aaaaatagcacgctgcacttgaaac

SEQ ID NO: 32766 - DNA, 25 bp, Homo sapien
tgcacttgaaacaggggaagacact

SEQ ID NO: 32767 - DNA, 25 bp, Homo sapien
gaagacactgtataacatccaaatg

SEQ ID NO: 32768 - DNA, 25 bp, Homo sapien
gcacgctgcacttgaaacaggggaa

SEQ ID NO: 32769 - DNA, 25 bp, Homo sapien
aacaggggaagacactgtataacat

SEQ ID NO: 32770 - DNA, 25 bp, Homo sapien
cttgaaacaggggaagacactgtat

SEQ ID NO: 32771 - DNA, 25 bp, Homo sapien
cctgtttcaagtgcagcgtgctatt

SEQ ID NO: 32772 - DNA, 25 bp, Homo sapien
ctgtttcaagtgcagcgtgctattt

SEQ ID NO: 32773 - DNA, 25 bp, Homo sapien
gtttcaagtgcagcgtgctattttt

SEQ ID NO: 32774 - DNA, 25 bp, Homo sapien
tcaagtgcagcgtgctatttttaaa

SEQ ID NO: 32775 - DNA, 25 bp, Homo sapien
ccctgtttcaagtgcagcgtgctat

SEQ ID NO: 32776 - DNA, 25 bp, Homo sapien
gttggggaaagcagcatagtccagc

SEQ ID NO: 32777 - DNA, 25 bp, Homo sapien
caagtgcagcgtgctatttttaaaa

SEQ ID NO: 32778 - DNA, 25 bp, Homo sapien
ttcccctgtttcaagtgcagcgtgc

SEQ ID NO: 32779 - DNA, 25 bp, Homo sapien
catttggatgttatacagtgtcttc

SEQ ID NO: 32780 - DNA, 25 bp, Homo sapien
tgtttcaagtgcagcgtgctatttt

SEQ ID NO: 32781 - DNA, 25 bp, Homo sapien
tttggatgttatacagtgtcttccc

SEQ ID NO: 32782 - DNA, 25 bp, Homo sapien
ttctaagcagcataaatgaacccaa

SEQ ID NO: 32783 - DNA, 25 bp, Homo sapien
tctaagcagcataaatgaacccaag

SEQ ID NO: 32784 - DNA, 25 bp, Homo sapien
ctaagcagcataaatgaacccaaga

SEQ ID NO: 32785 - DNA, 25 bp, Homo sapien
aatgaacccaagacctcttcccaag

SEQ ID NO: 32786 - DNA, 25 bp, Homo sapien
gtttctaagcagcataaatgaaccc

SEQ ID NO: 32787 - DNA, 25 bp, Homo sapien
taagcagcataaatgaacccaagac

SEQ ID NO: 32788 - DNA, 25 bp, Homo sapien
ataaatgaacccaagacctcttccc

SEQ ID NO: 32789 - DNA, 25 bp, Homo sapien
agacctcttcccaagcagtgtgaca

SEQ ID NO: 32790 - DNA, 25 bp, Homo sapien
aagcagcataaatgaacccaagacc

SEQ ID NO: 32791 - DNA, 25 bp, Homo sapien
cataaatgaacccaagacctcttcc

SEQ ID NO: 32792 - DNA, 25 bp, Homo sapien
aggtttctaagcagcataaatgaac

SEQ ID NO: 32793 - DNA, 25 bp, Homo sapien
ccgggttgaagaagaatcaattacc

SEQ ID NO: 32794 - DNA, 25 bp, Homo sapien
tctgaagatcctgagaatgtggcta

SEQ ID NO: 32795 - DNA, 25 bp, Homo sapien
aagagccatatttctgaagatcctg

SEQ ID NO: 32796 - DNA, 25 bp, Homo sapien
aaaagagccatatttctgaagatcc

SEQ ID NO: 32797 - DNA, 25 bp, Homo sapien
tgaagatcctgagaatgtggctaca

SEQ ID NO: 32798 - DNA, 25 bp, Homo sapien
gaagaagaatcaattaccaaaggtg

SEQ ID NO: 32799 - DNA, 25 bp, Homo sapien
gagcaaaagagccatatttctgaag

SEQ ID NO: 32800 - DNA, 25 bp, Homo sapien
agttccgggttgaagaagaatcaat

SEQ ID NO: 32801 - DNA, 25 bp, Homo sapien
cttcagttccgggttgaagaagaat

SEQ ID NO: 32802 - DNA, 25 bp, Homo sapien
tcagttccgggttgaagaagaatca

SEQ ID NO: 32803 - DNA, 25 bp, Homo sapien
ttccgggttgaagaagaatcaatta

SEQ ID NO: 32804 - DNA, 25 bp, Homo sapien
cggatttcactctacccggagagtt

SEQ ID NO: 32805 - DNA, 25 bp, Homo sapien
ccaggttatcttgtagcatagcaac

SEQ ID NO: 32806 - DNA, 25 bp, Homo sapien
gcgcacggcccaggttatcttgtag

SEQ ID NO: 32807 - DNA, 25 bp, Homo sapien
gagtttcccgcttggttgaacacat

SEQ ID NO: 32808 - DNA, 25 bp, Homo sapien
ctctacccggagagtttcccgcttg

SEQ ID NO: 32809 - DNA, 25 bp, Homo sapien
cttgtagcatagcaacttcggattt

SEQ ID NO: 32810 - DNA, 25 bp, Homo sapien
gagagtttcccgcttggttgaacac

SEQ ID NO: 32811 - DNA, 25 bp, Homo sapien
cccggagagtttcccgcttggttga

SEQ ID NO: 32812 - DNA, 25 bp, Homo sapien
gtagcatagcaacttcggatttcac

SEQ ID NO: 32813 - DNA, 25 bp, Homo sapien
cggcgcacggcccaggttatcttgt

SEQ ID NO: 32814 - DNA, 25 bp, Homo sapien
acggcccaggttatcttgtagcata

SEQ ID NO: 32815 - DNA, 25 bp, Homo sapien
agattttacagagaatgaagaatga

SEQ ID NO: 32816 - DNA, 25 bp, Homo sapien
ttttacagagaatgaagaatgaaag

SEQ ID NO: 32817 - DNA, 25 bp, Homo sapien
cagagaatgaagaatgaaagatgaa

SEQ ID NO: 32818 - DNA, 25 bp, Homo sapien
tacagagaatgaagaatgaaagatg

SEQ ID NO: 32819 - DNA, 25 bp, Homo sapien
acagagaatgaagaatgaaagatga

SEQ ID NO: 32820 - DNA, 25 bp, Homo sapien
atttgaggaatcagagaagatttta

SEQ ID NO: 32821 - DNA, 25 bp, Homo sapien
gagaatgaagaatgaaagatgaata

SEQ ID NO: 32822 - DNA, 25 bp, Homo sapien
tttgaggaatcagagaagattttac

SEQ ID NO: 32823 - DNA, 25 bp, Homo sapien
ttgaggaatcagagaagattttaca

SEQ ID NO: 32824 - DNA, 25 bp, Homo sapien
ttacagagaatgaagaatgaaagat

SEQ ID NO: 32825 - DNA, 25 bp, Homo sapien
taatttgaggaatcagagaagattt

SEQ ID NO: 32826 - DNA, 25 bp, Homo sapien
tttcctctataagaagggcaagctg

SEQ ID NO: 32827 - DNA, 25 bp, Homo sapien
ttcctctataagaagggcaagctgc

SEQ ID NO: 32828 - DNA, 25 bp, Homo sapien
gtgctgggcgctgtcctctatttcc

SEQ ID NO: 32829 - DNA, 25 bp, Homo sapien
tctatttcctctataagaagggcaa

SEQ ID NO: 32830 - DNA, 25 bp, Homo sapien
tatttcctctataagaagggcaagc

SEQ ID NO: 32831 - DNA, 25 bp, Homo sapien
gctgggcgctgtcctctatttcctc

SEQ ID NO: 32832 - DNA, 25 bp, Homo sapien
atttcctctataagaagggcaagct

SEQ ID NO: 32833 - DNA, 25 bp, Homo sapien
cggtgctgggcgctgtcctctattt

SEQ ID NO: 32834 - DNA, 25 bp, Homo sapien
tcctctataagaagggcaagctgcc

SEQ ID NO: 32835 - DNA, 25 bp, Homo sapien
ggtgctgggcgctgtcctctatttc

SEQ ID NO: 32836 - DNA, 25 bp, Homo sapien
agctgccgtgcaggagctcagggaa

SEQ ID NO: 32837 - DNA, 25 bp, Homo sapien
attgatagtgcagggagaggaatca

SEQ ID NO: 32838 - DNA, 25 bp, Homo sapien
ctttgccctggtcattgatagtgca

SEQ ID NO: 32839 - DNA, 25 bp, Homo sapien
ccgtgtttgaagggtccactcctat

SEQ ID NO: 32840 - DNA, 25 bp, Homo sapien
cgtgtttgaagggtccactcctatc

SEQ ID NO: 32841 - DNA, 25 bp, Homo sapien
cctggtcattgatagtgcagggaga

SEQ ID NO: 32842 - DNA, 25 bp, Homo sapien
cccgtgtttgaagggtccactccta

SEQ ID NO: 32843 - DNA, 25 bp, Homo sapien
gagaggaatcaatgaaagcgcttcc

SEQ ID NO: 32844 - DNA, 25 bp, Homo sapien
tcaatgaaagcgcttccccgtgttt

SEQ ID NO: 32845 - DNA, 25 bp, Homo sapien
agaggaatcaatgaaagcgcttccc

SEQ ID NO: 32846 - DNA, 25 bp, Homo sapien
caatgaaagcgcttccccgtgtttg

SEQ ID NO: 32847 - DNA, 25 bp, Homo sapien
aatgaaagcgcttccccgtgtttga

SEQ ID NO: 32848 - DNA, 25 bp, Homo sapien
cacggggaagcgctttcattgattc

SEQ ID NO: 32849 - DNA, 25 bp, Homo sapien
tcaaacacggggaagcgctttcatt

SEQ ID NO: 32850 - DNA, 25 bp, Homo sapien
gctttcattgattcctctccctgca

SEQ ID NO: 32851 - DNA, 25 bp, Homo sapien
gaagcgctttcattgattcctctcc

SEQ ID NO: 32852 - DNA, 25 bp, Homo sapien
gataggagtggacccttcaaacacg

SEQ ID NO: 32853 - DNA, 25 bp, Homo sapien
cggggaagcgctttcattgattcct

SEQ ID NO: 32854 - DNA, 25 bp, Homo sapien
ggggaagcgctttcattgattcctc

SEQ ID NO: 32855 - DNA, 25 bp, Homo sapien
aaacacggggaagcgctttcattga

SEQ ID NO: 32856 - DNA, 25 bp, Homo sapien
gggaagcgctttcattgattcctct

SEQ ID NO: 32857 - DNA, 25 bp, Homo sapien
caaacacggggaagcgctttcattg

SEQ ID NO: 32858 - DNA, 25 bp, Homo sapien
acggggaagcgctttcattgattcc

SEQ ID NO: 32859 - DNA, 25 bp, Homo sapien
ggaatatatagtctgcaatcgtacc

SEQ ID NO: 32860 - DNA, 25 bp, Homo sapien
atatagtctgcaatcgtaccatgaa

SEQ ID NO: 32861 - DNA, 25 bp, Homo sapien
gttaggaatatatagtctgcaatcg

SEQ ID NO: 32862 - DNA, 25 bp, Homo sapien
agtctgcaatcgtaccatgaaaacc

SEQ ID NO: 32863 - DNA, 25 bp, Homo sapien
gtaaggtcttaagtgtacaaagcaa

SEQ ID NO: 32864 - DNA, 25 bp, Homo sapien
atatatagtctgcaatcgtaccatg

SEQ ID NO: 32865 - DNA, 25 bp, Homo sapien
ccaaaatgtaaggtcttaagtgtac

SEQ ID NO: 32866 - DNA, 25 bp, Homo sapien
ggtcttaagtgtacaaagcaaatat

SEQ ID NO: 32867 - DNA, 25 bp, Homo sapien
gcaatcgtaccatgaaaacctccca

SEQ ID NO: 32868 - DNA, 25 bp, Homo sapien
tctgcaatcgtaccatgaaaacctc

SEQ ID NO: 32869 - DNA, 25 bp, Homo sapien
ctcccaaaatgtaaggtcttaagtg

SEQ ID NO: 32870 - DNA, 25 bp, Homo sapien
ttcatggtacgattgcagactatat

SEQ ID NO: 32871 - DNA, 25 bp, Homo sapien
catggtacgattgcagactatatat

SEQ ID NO: 32872 - DNA, 25 bp, Homo sapien
tgtacacttaagaccttacattttg

SEQ ID NO: 32873 - DNA, 25 bp, Homo sapien
gggaggttttcatggtacgattgca

SEQ ID NO: 32874 - DNA, 25 bp, Homo sapien
gttttcatggtacgattgcagacta

SEQ ID NO: 32875 - DNA, 25 bp, Homo sapien
ggaggttttcatggtacgattgcag

SEQ ID NO: 32876 - DNA, 25 bp, Homo sapien
cacttaagaccttacattttgggag

SEQ ID NO: 32877 - DNA, 25 bp, Homo sapien
tggtacgattgcagactatatattc

SEQ ID NO: 32878 - DNA, 25 bp, Homo sapien
aggttttcatggtacgattgcagac

SEQ ID NO: 32879 - DNA, 25 bp, Homo sapien
cgattgcagactatatattcctaac

SEQ ID NO: 32880 - DNA, 25 bp, Homo sapien
tttcatggtacgattgcagactata

SEQ ID NO: 32881 - DNA, 25 bp, Homo sapien
gtatcgaccaagacaaaattacaat

SEQ ID NO: 32882 - DNA, 25 bp, Homo sapien
tacgcataacaaagacaaacaccag

SEQ ID NO: 32883 - DNA, 25 bp, Homo sapien
cgcataacaaagacaaacaccagtt

SEQ ID NO: 32884 - DNA, 25 bp, Homo sapien
acaaagacaaacaccagttacttgg

SEQ ID NO: 32885 - DNA, 25 bp, Homo sapien
gacaaaattacaatatacgcataac

SEQ ID NO: 32886 - DNA, 25 bp, Homo sapien
aagacaaacaccagttacttggctc

SEQ ID NO: 32887 - DNA, 25 bp, Homo sapien
caatatacgcataacaaagacaaac

SEQ ID NO: 32888 - DNA, 25 bp, Homo sapien
ttacaatatacgcataacaaagaca

SEQ ID NO: 32889 - DNA, 25 bp, Homo sapien
tcccgtatcgaccaagacaaaatta

SEQ ID NO: 32890 - DNA, 25 bp, Homo sapien
gacaaacaccagttacttggctcaa

SEQ ID NO: 32891 - DNA, 25 bp, Homo sapien
tatacgcataacaaagacaaacacc

SEQ ID NO: 32892 - DNA, 25 bp, Homo sapien
ttgagccaagtaactggtgtttgtc

SEQ ID NO: 32893 - DNA, 25 bp, Homo sapien
atattgtaattttgtcttggtcgat

SEQ ID NO: 32894 - DNA, 25 bp, Homo sapien
agccaagtaactggtgtttgtcttt

SEQ ID NO: 32895 - DNA, 25 bp, Homo sapien
attgagccaagtaactggtgtttgt

SEQ ID NO: 32896 - DNA, 25 bp, Homo sapien
taattttgtcttggtcgatacggga

SEQ ID NO: 32897 - DNA, 25 bp, Homo sapien
ttgtctttgttatgcgtatattgta

SEQ ID NO: 32898 - DNA, 25 bp, Homo sapien
aattttgtcttggtcgatacgggaa

SEQ ID NO: 32899 - DNA, 25 bp, Homo sapien
tgagccaagtaactggtgtttgtct

SEQ ID NO: 32900 - DNA, 25 bp, Homo sapien
attttgtcttggtcgatacgggaaa

SEQ ID NO: 32901 - DNA, 25 bp, Homo sapien
gttatgcgtatattgtaattttgtc

SEQ ID NO: 32902 - DNA, 25 bp, Homo sapien
attgtaattttgtcttggtcgatac

SEQ ID NO: 32903 - DNA, 25 bp, Homo sapien
ggcctgccaaacttactgcacaagg

SEQ ID NO: 32904 - DNA, 25 bp, Homo sapien
cttactgcacaaggcaagaaactta

SEQ ID NO: 32905 - DNA, 25 bp, Homo sapien
gccaaacttactgcacaaggcaaga

SEQ ID NO: 32906 - DNA, 25 bp, Homo sapien
gtgcccggatgcgtccctgtgctgt

SEQ ID NO: 32907 - DNA, 25 bp, Homo sapien
tacatgcacctgtgcccggatgcgt

SEQ ID NO: 32908 - DNA, 25 bp, Homo sapien
aggcaagaaacttacatgcacctgt

SEQ ID NO: 32909 - DNA, 25 bp, Homo sapien
acctgtgcccggatgcgtccctgtg

SEQ ID NO: 32910 - DNA, 25 bp, Homo sapien
tgcacaaggcaagaaacttacatgc

SEQ ID NO: 32911 - DNA, 25 bp, Homo sapien
tactgcacaaggcaagaaacttaca

SEQ ID NO: 32912 - DNA, 25 bp, Homo sapien
aaacttactgcacaaggcaagaaac

SEQ ID NO: 32913 - DNA, 25 bp, Homo sapien
agaaacttacatgcacctgtgcccg

SEQ ID NO: 32914 - DNA, 25 bp, Homo sapien
gggcacaggtgcatgtaagtttctt

SEQ ID NO: 32915 - DNA, 25 bp, Homo sapien
cacaggtgcatgtaagtttcttgcc

SEQ ID NO: 32916 - DNA, 25 bp, Homo sapien
cgggcacaggtgcatgtaagtttct

SEQ ID NO: 32917 - DNA, 25 bp, Homo sapien
atccgggcacaggtgcatgtaagtt

SEQ ID NO: 32918 - DNA, 25 bp, Homo sapien
catccgggcacaggtgcatgtaagt

SEQ ID NO: 32919 - DNA, 25 bp, Homo sapien
tccgggcacaggtgcatgtaagttt

SEQ ID NO: 32920 - DNA, 25 bp, Homo sapien
acagcacagggacgcatccgggcac

SEQ ID NO: 32921 - DNA, 25 bp, Homo sapien
acgcatccgggcacaggtgcatgta

SEQ ID NO: 32922 - DNA, 25 bp, Homo sapien
cgcatccgggcacaggtgcatgtaa

SEQ ID NO: 32923 - DNA, 25 bp, Homo sapien
agtttcttgccttgtgcagtaagtt

SEQ ID NO: 32924 - DNA, 25 bp, Homo sapien
ccttgtgcagtaagtttggcaggcc

SEQ ID NO: 32925 - DNA, 25 bp, Homo sapien
cgggtggtattgtattagtagcagt

SEQ ID NO: 32926 - DNA, 25 bp, Homo sapien
cttaccgggtggtattgtattagta

SEQ ID NO: 32927 - DNA, 25 bp, Homo sapien
taccgggtggtattgtattagtagc

SEQ ID NO: 32928 - DNA, 25 bp, Homo sapien
agttgggccccgtgctactactacg

SEQ ID NO: 32929 - DNA, 25 bp, Homo sapien
tattgtattagtagcagttgggccc

SEQ ID NO: 32930 - DNA, 25 bp, Homo sapien
accgggtggtattgtattagtagca

SEQ ID NO: 32931 - DNA, 25 bp, Homo sapien
gtattgtattagtagcagttgggcc

SEQ ID NO: 32932 - DNA, 25 bp, Homo sapien
atcttaccgggtggtattgtattag

SEQ ID NO: 32933 - DNA, 25 bp, Homo sapien
cccgtgctactactacggtatggac

SEQ ID NO: 32934 - DNA, 25 bp, Homo sapien
ccgggtggtattgtattagtagcag

SEQ ID NO: 32935 - DNA, 25 bp, Homo sapien
ggtattgtattagtagcagttgggc

SEQ ID NO: 32936 - DNA, 25 bp, Homo sapien
ccataccgtagtagtagcacggggc

SEQ ID NO: 32937 - DNA, 25 bp, Homo sapien
tccataccgtagtagtagcacgggg

SEQ ID NO: 32938 - DNA, 25 bp, Homo sapien
accgtagtagtagcacggggcccaa

SEQ ID NO: 32939 - DNA, 25 bp, Homo sapien
ataccgtagtagtagcacggggccc

SEQ ID NO: 32940 - DNA, 25 bp, Homo sapien
cataccgtagtagtagcacggggcc

SEQ ID NO: 32941 - DNA, 25 bp, Homo sapien
actgctactaatacaataccacccg

SEQ ID NO: 32942 - DNA, 25 bp, Homo sapien
tgctactaatacaataccacccggt

SEQ ID NO: 32943 - DNA, 25 bp, Homo sapien
taccgtagtagtagcacggggccca

SEQ ID NO: 32944 - DNA, 25 bp, Homo sapien
cacggggcccaactgctactaatac

SEQ ID NO: 32945 - DNA, 25 bp, Homo sapien
cgtagtagtagcacggggcccaact

SEQ ID NO: 32946 - DNA, 25 bp, Homo sapien
ctaatacaataccacccggtaagat

SEQ ID NO: 32947 - DNA, 25 bp, Homo sapien
cgtccgaaggtgtttgcgcttacga

SEQ ID NO: 32948 - DNA, 25 bp, Homo sapien
tcgtaagcgcaaacaccttcggacg

SEQ ID NO: 32949 - DNA, 25 bp, Homo sapien
catatttgaggtccacaagcacaag

SEQ ID NO: 32950 - DNA, 25 bp, Homo sapien
aggtccacaagcacaagtatagatc

SEQ ID NO: 32951 - DNA, 25 bp, Homo sapien
agtatagatctaatgcaaactgggc

SEQ ID NO: 32952 - DNA, 25 bp, Homo sapien
atagatctaatgcaaactgggctca

SEQ ID NO: 32953 - DNA, 25 bp, Homo sapien
cacatatttgaggtccacaagcaca

SEQ ID NO: 32954 - DNA, 25 bp, Homo sapien
tatttgaggtccacaagcacaagta

SEQ ID NO: 32955 - DNA, 25 bp, Homo sapien
tgaggtccacaagcacaagtataga

SEQ ID NO: 32956 - DNA, 25 bp, Homo sapien
tatagatctaatgcaaactgggctc

SEQ ID NO: 32957 - DNA, 25 bp, Homo sapien
ggtccacaagcacaagtatagatct

SEQ ID NO: 32958 - DNA, 25 bp, Homo sapien
ttgaggtccacaagcacaagtatag

SEQ ID NO: 32959 - DNA, 25 bp, Homo sapien
atttgaggtccacaagcacaagtat

SEQ ID NO: 32960 - DNA, 25 bp, Homo sapien
acttgtgcttgtggacctcaaatat

SEQ ID NO: 32961 - DNA, 25 bp, Homo sapien
attagatctatacttgtgcttgtgg

SEQ ID NO: 32962 - DNA, 25 bp, Homo sapien
tgagcccagtttgcattagatctat

SEQ ID NO: 32963 - DNA, 25 bp, Homo sapien
ttgtggacctcaaatatgtggtaat

SEQ ID NO: 32964 - DNA, 25 bp, Homo sapien
tctatacttgtgcttgtggacctca

SEQ ID NO: 32965 - DNA, 25 bp, Homo sapien
atctatacttgtgcttgtggacctc

SEQ ID NO: 32966 - DNA, 25 bp, Homo sapien
ttgtgcttgtggacctcaaatatgt

SEQ ID NO: 32967 - DNA, 25 bp, Homo sapien
tatacttgtgcttgtggacctcaaa

SEQ ID NO: 32968 - DNA, 25 bp, Homo sapien
tggacctcaaatatgtggtaatttc

SEQ ID NO: 32969 - DNA, 25 bp, Homo sapien
tgcttgtggacctcaaatatgtggt

SEQ ID NO: 32970 - DNA, 25 bp, Homo sapien
agatctatacttgtgcttgtggacc

SEQ ID NO: 32971 - DNA, 25 bp, Homo sapien
agcaggcggggtttctatgctacac

SEQ ID NO: 32972 - DNA, 25 bp, Homo sapien
ccagcaggcggggtttctatgctac

SEQ ID NO: 32973 - DNA, 25 bp, Homo sapien
ttccacagccagcaggcggggtttc

SEQ ID NO: 32974 - DNA, 25 bp, Homo sapien
ccacagccagcaggcggggtttcta

SEQ ID NO: 32975 - DNA, 25 bp, Homo sapien
cagcaggcggggtttctatgctaca

SEQ ID NO: 32976 - DNA, 25 bp, Homo sapien
tccacagccagcaggcggggtttct

SEQ ID NO: 32977 - DNA, 25 bp, Homo sapien
caggcggggtttctatgctacactt

SEQ ID NO: 32978 - DNA, 25 bp, Homo sapien
atttctgttccacagccagcaggcg

SEQ ID NO: 32979 - DNA, 25 bp, Homo sapien
aggcggggtttctatgctacacttc

SEQ ID NO: 32980 - DNA, 25 bp, Homo sapien
ttatttctgttccacagccagcagg

SEQ ID NO: 32981 - DNA, 25 bp, Homo sapien
gcaggcggggtttctatgctacact

SEQ ID NO: 32982 - DNA, 25 bp, Homo sapien
tcgtgtcggaccgtgacccgaccga

SEQ ID NO: 32983 - DNA, 25 bp, Homo sapien
tcggtcgggtcacggtccgacacga

SEQ ID NO: 32984 - DNA, 25 bp, Homo sapien
aacctggagtgtgagttctaggaag

SEQ ID NO: 32985 - DNA, 25 bp, Homo sapien
cttcctagaactcacactccaggtt

SEQ ID NO: 32986 - DNA, 25 bp, Homo sapien
tggacagatttatggctacaccttc

SEQ ID NO: 32987 - DNA, 25 bp, Homo sapien
gcagccttggacagatttatggcta

SEQ ID NO: 32988 - DNA, 25 bp, Homo sapien
cagcagccttggacagatttatggc

SEQ ID NO: 32989 - DNA, 25 bp, Homo sapien
tgtgccagcagccttggacagattt

SEQ ID NO: 32990 - DNA, 25 bp, Homo sapien
cagccttggacagatttatggctac

SEQ ID NO: 32991 - DNA, 25 bp, Homo sapien
gccagcagccttggacagatttatg

SEQ ID NO: 32992 - DNA, 25 bp, Homo sapien
cttggacagatttatggctacacct

SEQ ID NO: 32993 - DNA, 25 bp, Homo sapien
ccagcagccttggacagatttatgg

SEQ ID NO: 32994 - DNA, 25 bp, Homo sapien
gccttggacagatttatggctacac

SEQ ID NO: 32995 - DNA, 25 bp, Homo sapien
ccttggacagatttatggctacacc

SEQ ID NO: 32996 - DNA, 25 bp, Homo sapien
ttggacagatttatggctacacctt

SEQ ID NO: 32997 - DNA, 25 bp, Homo sapien
tatggactgaggtcaaaatctaaga

SEQ ID NO: 32998 - DNA, 25 bp, Homo sapien
atggactgaggtcaaaatctaagaa

SEQ ID NO: 32999 - DNA, 25 bp, Homo sapien
caaaatctaagaagtttcgcagacc

SEQ ID NO: 33000 - DNA, 25 bp, Homo sapien
ggactgaggtcaaaatctaagaagt

SEQ ID NO: 33001 - DNA, 25 bp, Homo sapien
gaggtcaaaatctaagaagtttcgc

SEQ ID NO: 33002 - DNA, 25 bp, Homo sapien
aatctaagaagtttcgcagacctga

SEQ ID NO: 33003 - DNA, 25 bp, Homo sapien
tggactgaggtcaaaatctaagaag

SEQ ID NO: 33004 - DNA, 25 bp, Homo sapien
gactgaggtcaaaatctaagaagtt

SEQ ID NO: 33005 - DNA, 25 bp, Homo sapien
aaatctaagaagtttcgcagacctg

SEQ ID NO: 33006 - DNA, 25 bp, Homo sapien
tcaaaatctaagaagtttcgcagac

SEQ ID NO: 33007 - DNA, 25 bp, Homo sapien
tgaggtcaaaatctaagaagtttcg

SEQ ID NO: 33008 - DNA, 25 bp, Homo sapien
tggggatcagtccttagaccatttt

SEQ ID NO: 33009 - DNA, 25 bp, Homo sapien
gcatgtcatggggatcagtccttag

SEQ ID NO: 33010 - DNA, 25 bp, Homo sapien
ttaaagttggcatgtcatggggatc

SEQ ID NO: 33011 - DNA, 25 bp, Homo sapien
tgtagtcctttaaggattcccatta

SEQ ID NO: 33012 - DNA, 25 bp, Homo sapien
aagttgttaaagttggcatgtcatg

SEQ ID NO: 33013 - DNA, 25 bp, Homo sapien
ttggcatgtcatggggatcagtcct

SEQ ID NO: 33014 - DNA, 25 bp, Homo sapien
gtcatggggatcagtccttagacca

SEQ ID NO: 33015 - DNA, 25 bp, Homo sapien
atgttccttgacttcttaaagttgt

SEQ ID NO: 33016 - DNA, 25 bp, Homo sapien
atgtcatggggatcagtccttagac

SEQ ID NO: 33017 - DNA, 25 bp, Homo sapien
ttaaagttgttaaagttggcatgtc

SEQ ID NO: 33018 - DNA, 25 bp, Homo sapien
aatttacatctccaacccagatctc

SEQ ID NO: 33019 - DNA, 25 bp, Homo sapien
ccaaagcacctttcatccagagatt

SEQ ID NO: 33020 - DNA, 25 bp, Homo sapien
cttagatttcagaaagagagggaaa

SEQ ID NO: 33021 - DNA, 25 bp, Homo sapien
tgcagcatgctttgaggtaagtaat

SEQ ID NO: 33022 - DNA, 25 bp, Homo sapien
tctgtaaaataacactgctggatgt

SEQ ID NO: 33023 - DNA, 25 bp, Homo sapien
ttcaaagcatgacaagtaactaact

SEQ ID NO: 33024 - DNA, 25 bp, Homo sapien
caagtgataatggtttgtgcttcca

SEQ ID NO: 33025 - DNA, 25 bp, Homo sapien
accgcatgccaaaccagtaaaatgg

SEQ ID NO: 33026 - DNA, 25 bp, Homo sapien
ggtcccagagtgtgctgctgttaat

SEQ ID NO: 33027 - DNA, 25 bp, Homo sapien
ctggatgttcaaggggacaatccct

SEQ ID NO: 33028 - DNA, 25 bp, Homo sapien
catccagagatttcaaagcatgaca

SEQ ID NO: 33029 - DNA, 25 bp, Homo sapien
aaaatagctggtggtcccagagtgt

SEQ ID NO: 33030 - DNA, 25 bp, Homo sapien
agggtccctctgttattggcgctgg

SEQ ID NO: 33031 - DNA, 25 bp, Homo sapien
ggatccatcccgataacaggaacat

SEQ ID NO: 33032 - DNA, 25 bp, Homo sapien
taagattagaaagggacaaacatcc

SEQ ID NO: 33033 - DNA, 25 bp, Homo sapien
ctctgccagacagttgagctgtttc

SEQ ID NO: 33034 - DNA, 25 bp, Homo sapien
gcaccaggctattcatgaaggatcc

SEQ ID NO: 33035 - DNA, 25 bp, Homo sapien
gtatggtgggaatcctccaggccct

SEQ ID NO: 33036 - DNA, 25 bp, Homo sapien
ctggccatgaggtgctccgtattta

SEQ ID NO: 33037 - DNA, 25 bp, Homo sapien
tgttaccacaaagatggcaccaggc

SEQ ID NO: 33038 - DNA, 25 bp, Homo sapien
tctcaactagtatgtgtgcaagcac

SEQ ID NO: 33039 - DNA, 25 bp, Homo sapien
acagaaactaatcaagtgagaactc

SEQ ID NO: 33040 - DNA, 25 bp, Homo sapien
gggcagcagcatcacatagcaagag

SEQ ID NO: 33041 - DNA, 25 bp, Homo sapien
tatagctttcagaagagaacacagg

SEQ ID NO: 33042 - DNA, 25 bp, Homo sapien
agcaattgccctagacccagtggtt

SEQ ID NO: 33043 - DNA, 25 bp, Homo sapien
atcttggggtatagaaggatttctc

SEQ ID NO: 33044 - DNA, 25 bp, Homo sapien
aaaccacctagtgtgccagtcacgt

SEQ ID NO: 33045 - DNA, 25 bp, Homo sapien
tggaagccactagagggagattaga

SEQ ID NO: 33046 - DNA, 25 bp, Homo sapien
agagaacacaggaaacatcctcatg

SEQ ID NO: 33047 - DNA, 25 bp, Homo sapien
actgtagctgccactctgtaaacta

SEQ ID NO: 33048 - DNA, 25 bp, Homo sapien
tactacagaaaaagcccatcctatc

SEQ ID NO: 33049 - DNA, 25 bp, Homo sapien
gattagacggcagtagatagcaatt

SEQ ID NO: 33050 - DNA, 25 bp, Homo sapien
gataaacctaaatgacaaagactat

SEQ ID NO: 33051 - DNA, 25 bp, Homo sapien
gttagggtctaccaatggaagccac

SEQ ID NO: 33052 - DNA, 25 bp, Homo sapien
actccatgcccttgtccgatggttt

SEQ ID NO: 33053 - DNA, 25 bp, Homo sapien
ctgcaaactgaggaacagcctggac

SEQ ID NO: 33054 - DNA, 25 bp, Homo sapien
agcgactccgactcggccctgtaag

SEQ ID NO: 33055 - DNA, 25 bp, Homo sapien
agcggggccgctttcctcgtccttg

SEQ ID NO: 33056 - DNA, 25 bp, Homo sapien
ccaagaagtcgttcctgcagagcct

SEQ ID NO: 33057 - DNA, 25 bp, Homo sapien
aaactgaggaacagcctggactcca

SEQ ID NO: 33058 - DNA, 25 bp, Homo sapien
atgcccttgtccgatggtttgcaac

SEQ ID NO: 33059 - DNA, 25 bp, Homo sapien
agaaggccaagaagtcgttcctgca

SEQ ID NO: 33060 - DNA, 25 bp, Homo sapien
tgcgaactctgctgtgagtgtgtgc

SEQ ID NO: 33061 - DNA, 25 bp, Homo sapien
ttcccagtgcgaactctgctgtgag

SEQ ID NO: 33062 - DNA, 25 bp, Homo sapien
ggaacagcctggactccagcgactc

SEQ ID NO: 33063 - DNA, 25 bp, Homo sapien
tgactgtatacatactcagggtgtt

SEQ ID NO: 33064 - DNA, 25 bp, Homo sapien
aactctgagagataaagatgacttc

SEQ ID NO: 33065 - DNA, 25 bp, Homo sapien
ccaggctcaaacaaatgtttggccc

SEQ ID NO: 33066 - DNA, 25 bp, Homo sapien
ctacgtaaggcagtggtcgcaaact

SEQ ID NO: 33067 - DNA, 25 bp, Homo sapien
tttttctgcatggctgagcaatggc

SEQ ID NO: 33068 - DNA, 25 bp, Homo sapien
cagggtgttaactacgtaaggcagt

SEQ ID NO: 33069 - DNA, 25 bp, Homo sapien
caataaagcttaactctgagagata

SEQ ID NO: 33070 - DNA, 25 bp, Homo sapien
tggatttctcttggttcactcgaat

SEQ ID NO: 33071 - DNA, 25 bp, Homo sapien
tctacaggctgctgagtttgcgacc

SEQ ID NO: 33072 - DNA, 25 bp, Homo sapien
aaaacctgatttccagcttgttgcc

SEQ ID NO: 33073 - DNA, 25 bp, Homo sapien
aaatgtttggcccacatggtgtttt

SEQ ID NO: 33074 - DNA, 25 bp, Homo sapien
agggttttgcagtcaaggaaaaaca

SEQ ID NO: 33075 - DNA, 25 bp, Homo sapien
ccagtacggggagctgtgattccta

SEQ ID NO: 33076 - DNA, 25 bp, Homo sapien
tcgcaacttggccactgcggcggca

SEQ ID NO: 33077 - DNA, 25 bp, Homo sapien
aaacccaacatgatcgaagagaagc

SEQ ID NO: 33078 - DNA, 25 bp, Homo sapien
aaaccagggctcttgtcccaaaaga

SEQ ID NO: 33079 - DNA, 25 bp, Homo sapien
ccgtgggcagtgtcgcaacttggcc

SEQ ID NO: 33080 - DNA, 25 bp, Homo sapien
ccctgaatctgcatcagagggaggg

SEQ ID NO: 33081 - DNA, 25 bp, Homo sapien
gttggggccagctcacaagtttatt

SEQ ID NO: 33082 - DNA, 25 bp, Homo sapien
atgatcgaagagaagccctgaatct

SEQ ID NO: 33083 - DNA, 25 bp, Homo sapien
cctcccagctcgtggggcaggcagt

SEQ ID NO: 33084 - DNA, 25 bp, Homo sapien
caacgtaccgtacaaaacctgcctc

SEQ ID NO: 33085 - DNA, 25 bp, Homo sapien
ggctggccagcaaaacttacaggtc

SEQ ID NO: 33086 - DNA, 25 bp, Homo sapien
taagtgtccagaactggggacacac

SEQ ID NO: 33087 - DNA, 25 bp, Homo sapien
tagcacaggttaggcctgccctgaa

SEQ ID NO: 33088 - DNA, 25 bp, Homo sapien
ttctgtaccaggcatcatgctgccc

SEQ ID NO: 33089 - DNA, 25 bp, Homo sapien
acaggtctgctgaataagtgtccag

SEQ ID NO: 33090 - DNA, 25 bp, Homo sapien
tggccagcaaaacttacaggtctgc

SEQ ID NO: 33091 - DNA, 25 bp, Homo sapien
tgctgccctagcacaggttaggcct

SEQ ID NO: 33092 - DNA, 25 bp, Homo sapien
tcagtctagccagggagataggctg

SEQ ID NO: 33093 - DNA, 25 bp, Homo sapien
ctgaataagtgtccagaactgggga

SEQ ID NO: 33094 - DNA, 25 bp, Homo sapien
catcatgctgccctagcacaggtta

SEQ ID NO: 33095 - DNA, 25 bp, Homo sapien
agataggctggccagcaaaacttac

SEQ ID NO: 33096 - DNA, 25 bp, Homo sapien
aggtgggatcagcagcacaatgtct

SEQ ID NO: 33097 - DNA, 25 bp, Homo sapien
gctaccttgacagatgggcggcacc

SEQ ID NO: 33098 - DNA, 25 bp, Homo sapien
tcctacgcctacagaaaggaggtgc

SEQ ID NO: 33099 - DNA, 25 bp, Homo sapien
caggaggtgggatcagcagcacaat

SEQ ID NO: 33100 - DNA, 25 bp, Homo sapien
caggccctgggctaccttgacagat

SEQ ID NO: 33101 - DNA, 25 bp, Homo sapien
tgggatcagcagcacaatgtctttc

SEQ ID NO: 33102 - DNA, 25 bp, Homo sapien
agctgggacaggtctcagggtccta

SEQ ID NO: 33103 - DNA, 25 bp, Homo sapien
cagatgggcggcaccgctctcattt

SEQ ID NO: 33104 - DNA, 25 bp, Homo sapien
ctcagggtcctacgcctacagaaag

SEQ ID NO: 33105 - DNA, 25 bp, Homo sapien
caggtctcagggtcctacgcctaca

SEQ ID NO: 33106 - DNA, 25 bp, Homo sapien
ccctgggctaccttgacagatgggc

SEQ ID NO: 33107 - DNA, 25 bp, Homo sapien
accagcatgggaacacagttaatca

SEQ ID NO: 33108 - DNA, 25 bp, Homo sapien
atggtgccctgctcacgaccagcat

SEQ ID NO: 33109 - DNA, 25 bp, Homo sapien
aattcagcagctgtaaagtcaggag

SEQ ID NO: 33110 - DNA, 25 bp, Homo sapien
agtataaagaaggacctaggatggt

SEQ ID NO: 33111 - DNA, 25 bp, Homo sapien
agaagaaattgagtttccaagggct

SEQ ID NO: 33112 - DNA, 25 bp, Homo sapien
attagcctgatgctggtaatggcag

SEQ ID NO: 33113 - DNA, 25 bp, Homo sapien
tccaagggcttgattagcctgatgc

SEQ ID NO: 33114 - DNA, 25 bp, Homo sapien
agttaatcaaggctgaatctcacgg

SEQ ID NO: 33115 - DNA, 25 bp, Homo sapien
ggatggagcctcctgttagctacca

SEQ ID NO: 33116 - DNA, 25 bp, Homo sapien
taatggcagagcagagacttgcact

SEQ ID NO: 33117 - DNA, 25 bp, Homo sapien
ctcggttcaacccattttggctgga

SEQ ID NO: 33118 - DNA, 25 bp, Homo sapien
atttgtaacttgtacgatgtggcac

SEQ ID NO: 33119 - DNA, 25 bp, Homo sapien
cagggtttataaatagtgagtcatc

SEQ ID NO: 33120 - DNA, 25 bp, Homo sapien
cttactgccatgaataccaaggcca

SEQ ID NO: 33121 - DNA, 25 bp, Homo sapien
tggagaataaaacctgctctcttca

SEQ ID NO: 33122 - DNA, 25 bp, Homo sapien
cttcatcagagggagaactgcattc

SEQ ID NO: 33123 - DNA, 25 bp, Homo sapien
tcagagggagaactgcattctaatt

SEQ ID NO: 33124 - DNA, 25 bp, Homo sapien
taacttgtacgatgtggcacttctc

SEQ ID NO: 33125 - DNA, 25 bp, Homo sapien
gtgagtcatcaaccactaccagttg

SEQ ID NO: 33126 - DNA, 25 bp, Homo sapien
tcctgctctgccttactgccatgaa

SEQ ID NO: 33127 - DNA, 25 bp, Homo sapien
accagttgtcttggtactagtgaca

SEQ ID NO: 33128 - DNA, 25 bp, Homo sapien
ccatgaataccaaggccattgtcta

SEQ ID NO: 33129 - DNA, 25 bp, Homo sapien
catgtgctaagccaagatggttttt

SEQ ID NO: 33130 - DNA, 25 bp, Homo sapien
ctgctttcatggagactacagtcta

SEQ ID NO: 33131 - DNA, 25 bp, Homo sapien
aaactgtgctaggtggggataccat

SEQ ID NO: 33132 - DNA, 25 bp, Homo sapien
ggataccatggtgaataagaaaaac

SEQ ID NO: 33133 - DNA, 25 bp, Homo sapien
gcagaaaagtcataaacagtaaacc

SEQ ID NO: 33134 - DNA, 25 bp, Homo sapien
ttttcagtcatgtgctaagccaaga

SEQ ID NO: 33135 - DNA, 25 bp, Homo sapien
actcaatgttgctggaaactgtgct

SEQ ID NO: 33136 - DNA, 25 bp, Homo sapien
taaatggatgtgtcaccaaagttta

SEQ ID NO: 33137 - DNA, 25 bp, Homo sapien
aagcatgacatgttgtggttgcctt

SEQ ID NO: 33138 - DNA, 25 bp, Homo sapien
ctacagtctagcagaaaagtcataa

SEQ ID NO: 33139 - DNA, 25 bp, Homo sapien
attaaacgatagtgtgtgaaggcca

SEQ ID NO: 33140 - DNA, 25 bp, Homo sapien
atgaggtttaaaatctagtaattcc

SEQ ID NO: 33141 - DNA, 25 bp, Homo sapien
taccttcggttgtgaattatgtctc

SEQ ID NO: 33142 - DNA, 25 bp, Homo sapien
attccaaatggagtattcatgtccc

SEQ ID NO: 33143 - DNA, 25 bp, Homo sapien
aaatctagtaattccaaatggagta

SEQ ID NO: 33144 - DNA, 25 bp, Homo sapien
aagcagctcattttgcagctttgcc

SEQ ID NO: 33145 - DNA, 25 bp, Homo sapien
tattcatgtcccaggacctgtgcct

SEQ ID NO: 33146 - DNA, 25 bp, Homo sapien
aatggagtattcatgtcccaggacc

SEQ ID NO: 33147 - DNA, 25 bp, Homo sapien
cttgttcagtgtaatgaggtttaaa

SEQ ID NO: 33148 - DNA, 25 bp, Homo sapien
tcagtgtaatgaggtttaaaatcta

SEQ ID NO: 33149 - DNA, 25 bp, Homo sapien
gccagctgcctggttaccttcggtt

SEQ ID NO: 33150 - DNA, 25 bp, Homo sapien
gggcacgtttgggatcttgttcagt

SEQ ID NO: 33151 - DNA, 25 bp, Homo sapien
ttttgaaagtgtggtctactgaggt

SEQ ID NO: 33152 - DNA, 25 bp, Homo sapien
aggaggactacattccatcttggga

SEQ ID NO: 33153 - DNA, 25 bp, Homo sapien
gcacataaccaggtaggcatctgag

SEQ ID NO: 33154 - DNA, 25 bp, Homo sapien
tttgaagggactcagctctttgtac

SEQ ID NO: 33155 - DNA, 25 bp, Homo sapien
ataggtgtcagttttctaggggaat

SEQ ID NO: 33156 - DNA, 25 bp, Homo sapien
ttgagattggataaaccaaggcctt

SEQ ID NO: 33157 - DNA, 25 bp, Homo sapien
tctaggggaattggaatctcttttc

SEQ ID NO: 33158 - DNA, 25 bp, Homo sapien
ttggcgaggacatcactcccatagt

SEQ ID NO: 33159 - DNA, 25 bp, Homo sapien
tactgaggtgtggttgtactaggtt

SEQ ID NO: 33160 - DNA, 25 bp, Homo sapien
aaccaaggccttggggtttcatcat

SEQ ID NO: 33161 - DNA, 25 bp, Homo sapien
ctgtaggcgttatcttataggtgtc

SEQ ID NO: 33162 - DNA, 25 bp, Homo sapien
tccagttgctgctggccgagagcat

SEQ ID NO: 33163 - DNA, 25 bp, Homo sapien
cttgatgatggaacatcagtatccc

SEQ ID NO: 33164 - DNA, 25 bp, Homo sapien
tgcgtgctcatctcgctgcttgcgc

SEQ ID NO: 33165 - DNA, 25 bp, Homo sapien
atgataggcaaaatctgtcgactgc

SEQ ID NO: 33166 - DNA, 25 bp, Homo sapien
tacgtgtgcaacctgctgctgccct

SEQ ID NO: 33167 - DNA, 25 bp, Homo sapien
acgacttggcccttgatgatggaac

SEQ ID NO: 33168 - DNA, 25 bp, Homo sapien
tggcgctcaccgtcttccagttgct

SEQ ID NO: 33169 - DNA, 25 bp, Homo sapien
cctgccgactcaggcgagaaggtgt

SEQ ID NO: 33170 - DNA, 25 bp, Homo sapien
tcattttaagactgaggggaaagga

SEQ ID NO: 33171 - DNA, 25 bp, Homo sapien
aaaggattagctccttccagggaga

SEQ ID NO: 33172 - DNA, 25 bp, Homo sapien
gcgtcctgggaacgtgccctcattt

SEQ ID NO: 33173 - DNA, 25 bp, Homo sapien
attcaggaggattaactggcatgcc

SEQ ID NO: 33174 - DNA, 25 bp, Homo sapien
aaatgtgccctatatgttcagctgc

SEQ ID NO: 33175 - DNA, 25 bp, Homo sapien
aaagcctcatctcagaagacaaagc

SEQ ID NO: 33176 - DNA, 25 bp, Homo sapien
aggtgaaaggggtctgtctttccca

SEQ ID NO: 33177 - DNA, 25 bp, Homo sapien
gcgtaagcagcagcagtattgaaga

SEQ ID NO: 33178 - DNA, 25 bp, Homo sapien
ggccagccagactcctggttcattt

SEQ ID NO: 33179 - DNA, 25 bp, Homo sapien
ccatctttctctagggataggtgaa

SEQ ID NO: 33180 - DNA, 25 bp, Homo sapien
tgggccaggaagctggttttaactc

SEQ ID NO: 33181 - DNA, 25 bp, Homo sapien
aagaagtttgcaaaactggccagcc

SEQ ID NO: 33182 - DNA, 25 bp, Homo sapien
aaatcagagaccttaccttgccttc

SEQ ID NO: 33183 - DNA, 25 bp, Homo sapien
ttcagctgcctctaaggggttcttc

SEQ ID NO: 33184 - DNA, 25 bp, Homo sapien
ccgtcttcctgatgaacgaggtcat

SEQ ID NO: 33185 - DNA, 25 bp, Homo sapien
ttcaccaaacaatcggggttgacat

SEQ ID NO: 33186 - DNA, 25 bp, Homo sapien
atcggggttgacataccatcaaatt

SEQ ID NO: 33187 - DNA, 25 bp, Homo sapien
tgaaggccaaggacctgcaacgctg

SEQ ID NO: 33188 - DNA, 25 bp, Homo sapien
aacgctgcgagctgctggccaggtt

SEQ ID NO: 33189 - DNA, 25 bp, Homo sapien
tggctcatcagctgcgactctctgg

SEQ ID NO: 33190 - DNA, 25 bp, Homo sapien
ttctgtccgtcttcctgatgaacga

SEQ ID NO: 33191 - DNA, 25 bp, Homo sapien
ccaaggacctgcaacgctgcgagct

SEQ ID NO: 33192 - DNA, 25 bp, Homo sapien
atcagctgcgactctctggcatcca

SEQ ID NO: 33193 - DNA, 25 bp, Homo sapien
ctgcaggcggcttcaccaaacaatc

SEQ ID NO: 33194 - DNA, 25 bp, Homo sapien
atgaacgaggtcatcaagctgcagc

SEQ ID NO: 33195 - DNA, 25 bp, Homo sapien
atacaccagatacatgtgtgcatgt

SEQ ID NO: 33196 - DNA, 25 bp, Homo sapien
tgtgcacatgtgctggctatgtgta

SEQ ID NO: 33197 - DNA, 25 bp, Homo sapien
catgtgtgctagaaaaacgtgggca

SEQ ID NO: 33198 - DNA, 25 bp, Homo sapien
acatacatgagagctgtgtgcacat

SEQ ID NO: 33199 - DNA, 25 bp, Homo sapien
agcctacatgtgtacgtgtatgcac

SEQ ID NO: 33200 - DNA, 25 bp, Homo sapien
atgcacacatactagagacacagat

SEQ ID NO: 33201 - DNA, 25 bp, Homo sapien
tgtgtacatatgctagagagatgtg

SEQ ID NO: 33202 - DNA, 25 bp, Homo sapien
tagagatacacgtgcacatacatga

SEQ ID NO: 33203 - DNA, 25 bp, Homo sapien
gtatgtgcacataagagatgcgtgt

SEQ ID NO: 33204 - DNA, 25 bp, Homo sapien
ataagagatgcgtgtgcacatgccc

SEQ ID NO: 33205 - DNA, 25 bp, Homo sapien
gtgtgcatgtatgctagagatacac

SEQ ID NO: 33206 - DNA, 25 bp, Homo sapien
acggggctttggacaagaaagtgca

SEQ ID NO: 33207 - DNA, 25 bp, Homo sapien
ctgcctctgaaatgaagtggtttat

SEQ ID NO: 33208 - DNA, 25 bp, Homo sapien
gtctcttggattcttgctatcaccc

SEQ ID NO: 33209 - DNA, 25 bp, Homo sapien
tattttcaggtgactgaaaaaacag

SEQ ID NO: 33210 - DNA, 25 bp, Homo sapien
tagcacttaccagtctcttggattc

SEQ ID NO: 33211 - DNA, 25 bp, Homo sapien
agtggatgaacagcctgagaaagaa

SEQ ID NO: 33212 - DNA, 25 bp, Homo sapien
tgcagagaaagaacacgaagtggat

SEQ ID NO: 33213 - DNA, 25 bp, Homo sapien
tgctatcacccatttctagaggttc

SEQ ID NO: 33214 - DNA, 25 bp, Homo sapien
acacgaagtggatgaacagcctgag

SEQ ID NO: 33215 - DNA, 25 bp, Homo sapien
cactgcctctgaaatgaagtggttt

SEQ ID NO: 33216 - DNA, 25 bp, Homo sapien
ctgcagaagttagcacttaccagtc

SEQ ID NO: 33217 - DNA, 25 bp, Homo sapien
aaatagaaagaatatatgttgatgc

SEQ ID NO: 33218 - DNA, 25 bp, Homo sapien
agaccaggttagtaccaaggttgta

SEQ ID NO: 33219 - DNA, 25 bp, Homo sapien
tagacagagatttgagaccaggtta

SEQ ID NO: 33220 - DNA, 25 bp, Homo sapien
aatttcacctccacggggctttgga

SEQ ID NO: 33221 - DNA, 25 bp, Homo sapien
tgtttatagacagagatttgagacc

SEQ ID NO: 33222 - DNA, 25 bp, Homo sapien
atcccagcagctttatactatcttg

SEQ ID NO: 33223 - DNA, 25 bp, Homo sapien
ttagttatcacaggtaagagaggga

SEQ ID NO: 33224 - DNA, 25 bp, Homo sapien
atgttgatgcaaatcctctatagat

SEQ ID NO: 33225 - DNA, 25 bp, Homo sapien
tgtgatcagcagtccatgaaatctc

SEQ ID NO: 33226 - DNA, 25 bp, Homo sapien
gtaagccttttggaatatgctgcat

SEQ ID NO: 33227 - DNA, 25 bp, Homo sapien
ctctagaaatgtgatcagcagtcca

SEQ ID NO: 33228 - DNA, 25 bp, Homo sapien
accgggattgaagaacatttaggac

SEQ ID NO: 33229 - DNA, 25 bp, Homo sapien
gtcctaaatgttcttcaatcccggt

SEQ ID NO: 33230 - DNA, 25 bp, Homo sapien
actttttcaaagactggggagcagc

SEQ ID NO: 33231 - DNA, 25 bp, Homo sapien
taaatagcgagatgtccacaagatc

SEQ ID NO: 33232 - DNA, 25 bp, Homo sapien
tcacatgcaaaagcagacggtcctt

SEQ ID NO: 33233 - DNA, 25 bp, Homo sapien
gtatgacagagtgggatgtatttta

SEQ ID NO: 33234 - DNA, 25 bp, Homo sapien
aatgtatcacagagtggtttgtacc

SEQ ID NO: 33235 - DNA, 25 bp, Homo sapien
aggtcctcagcgcatagtcaaatca

SEQ ID NO: 33236 - DNA, 25 bp, Homo sapien
gagatctgccagacggttttaaaat

SEQ ID NO: 33237 - DNA, 25 bp, Homo sapien
aataatgcaagagctgtggagttaa

SEQ ID NO: 33238 - DNA, 25 bp, Homo sapien
tgctgatataccacgctaggtcctc

SEQ ID NO: 33239 - DNA, 25 bp, Homo sapien
aaaacctgcagaacccatgagtaca

SEQ ID NO: 33240 - DNA, 25 bp, Homo sapien
ataacatcttagtgcagtggctccc

SEQ ID NO: 33241 - DNA, 25 bp, Homo sapien
ttcttcttcgtcagaaagccttggt

SEQ ID NO: 33242 - DNA, 25 bp, Homo sapien
tacaagttgcacagtcagcaggaat

SEQ ID NO: 33243 - DNA, 25 bp, Homo sapien
ctgttggtatttgtggcggtcatcc

SEQ ID NO: 33244 - DNA, 25 bp, Homo sapien
ttttggtaaacagatgggagagtct

SEQ ID NO: 33245 - DNA, 25 bp, Homo sapien
tggatcacatcccaggctgcctcaa

SEQ ID NO: 33246 - DNA, 25 bp, Homo sapien
aggctgcctcaaacctgttggtatt

SEQ ID NO: 33247 - DNA, 25 bp, Homo sapien
tcaaactgcagattacaagttgcac

SEQ ID NO: 33248 - DNA, 25 bp, Homo sapien
ttctccagcagtgcaaagttccttt

SEQ ID NO: 33249 - DNA, 25 bp, Homo sapien
tgagtttccagttagccatgcaggg

SEQ ID NO: 33250 - DNA, 25 bp, Homo sapien
ggaatgaaaaggatcaacagagtct

SEQ ID NO: 33251 - DNA, 25 bp, Homo sapien
ggcggtcatcccagagtccaaggtt

SEQ ID NO: 33252 - DNA, 25 bp, Homo sapien
tgtatagggtactgcttcatgaagt

SEQ ID NO: 33253 - DNA, 25 bp, Homo sapien
aagtttgggctgttattagtgctgt

SEQ ID NO: 33254 - DNA, 25 bp, Homo sapien
ttagtgctgtatagggtactgcttc

SEQ ID NO: 33255 - DNA, 25 bp, Homo sapien
gcgcccaggcgcctagtccttattt

SEQ ID NO: 33256 - DNA, 25 bp, Homo sapien
atactgcttaccatttcttgttgac

SEQ ID NO: 33257 - DNA, 25 bp, Homo sapien
atgtgttatgtagaaatgtcaagca

SEQ ID NO: 33258 - DNA, 25 bp, Homo sapien
ttgaatttggatgcctagaagggtg

SEQ ID NO: 33259 - DNA, 25 bp, Homo sapien
atgcttgaatttggatgcctagaag

SEQ ID NO: 33260 - DNA, 25 bp, Homo sapien
cctagaagggtgtggcacttctttt

SEQ ID NO: 33261 - DNA, 25 bp, Homo sapien
gtagaaatgtcaagcaagtttgggc

SEQ ID NO: 33262 - DNA, 25 bp, Homo sapien
cttcatgaagtacattgtaaatgct

SEQ ID NO: 33263 - DNA, 25 bp, Homo sapien
ttggacagagtattgcctacagcct

SEQ ID NO: 33264 - DNA, 25 bp, Homo sapien
tatacagatttgacgcggtagatca

SEQ ID NO: 33265 - DNA, 25 bp, Homo sapien
ttggacaatcataagtgcaaagttc

SEQ ID NO: 33266 - DNA, 25 bp, Homo sapien
cccagatgtgcttggacagagtatt

SEQ ID NO: 33267 - DNA, 25 bp, Homo sapien
atgcctcaggtgacccgagacagaa

SEQ ID NO: 33268 - DNA, 25 bp, Homo sapien
gcgatcaccaaggagtgacagtgaa

SEQ ID NO: 33269 - DNA, 25 bp, Homo sapien
aaacatcttcgtgctgagaaagctt

SEQ ID NO: 33270 - DNA, 25 bp, Homo sapien
aggatgcgtcccaggtcatcactga

SEQ ID NO: 33271 - DNA, 25 bp, Homo sapien
ggtcatcactgagagcagatcccac

SEQ ID NO: 33272 - DNA, 25 bp, Homo sapien
tgcttacccaagaacacgggcgatc

SEQ ID NO: 33273 - DNA, 25 bp, Homo sapien
ccagatgtaggggataaaatattct

SEQ ID NO: 33274 - DNA, 25 bp, Homo sapien
tttaaacagcaagactgggcaaaac

SEQ ID NO: 33275 - DNA, 25 bp, Homo sapien
ttgctaccacttgcaccatacgatt

SEQ ID NO: 33276 - DNA, 25 bp, Homo sapien
atagcgcatgaaaagcatctaacac

SEQ ID NO: 33277 - DNA, 25 bp, Homo sapien
aacagcaagactgggcaaaacctaa

SEQ ID NO: 33278 - DNA, 25 bp, Homo sapien
agtaaaatagcgcatgaaaagcatc

SEQ ID NO: 33279 - DNA, 25 bp, Homo sapien
ttacattcagtaaaatagcgcatga

SEQ ID NO: 33280 - DNA, 25 bp, Homo sapien
ggctttaaacagcaagactgggcaa

SEQ ID NO: 33281 - DNA, 25 bp, Homo sapien
agtgagtatatttaataaggtggtt

SEQ ID NO: 33282 - DNA, 25 bp, Homo sapien
ttaataaggtggttgtttacattca

SEQ ID NO: 33283 - DNA, 25 bp, Homo sapien
ttgcaccatacgattacccacattt

SEQ ID NO: 33284 - DNA, 25 bp, Homo sapien
acagggctttaaacagcaagactgg

SEQ ID NO: 33285 - DNA, 25 bp, Homo sapien
ttgtaaggctctgcgtaacacactc

SEQ ID NO: 33286 - DNA, 25 bp, Homo sapien
agcggctgctcattgctgatgcact

SEQ ID NO: 33287 - DNA, 25 bp, Homo sapien
tcctagcacacagggcttcaatgtc

SEQ ID NO: 33288 - DNA, 25 bp, Homo sapien
ctgtcctgaggacgcaagattttct

SEQ ID NO: 33289 - DNA, 25 bp, Homo sapien
tctttccgggaagctggacacacct

SEQ ID NO: 33290 - DNA, 25 bp, Homo sapien
caccactgtcggattcagggaattt

SEQ ID NO: 33291 - DNA, 25 bp, Homo sapien
accagctagacagctgaggtctttc

SEQ ID NO: 33292 - DNA, 25 bp, Homo sapien
ctgatgcactgctaagaactgggca

SEQ ID NO: 33293 - DNA, 25 bp, Homo sapien
aggtagccagtgtattccagacagc

SEQ ID NO: 33294 - DNA, 25 bp, Homo sapien
agacgcagtggctctgacgttctct

SEQ ID NO: 33295 - DNA, 25 bp, Homo sapien
tagctgcagactgagccacaaacct

SEQ ID NO: 33296 - DNA, 25 bp, Homo sapien
gttgggaagtactgtatcctgtgct

SEQ ID NO: 33297 - DNA, 25 bp, Homo sapien
tccagctcacatgacagcatggtgc

SEQ ID NO: 33298 - DNA, 25 bp, Homo sapien
gccaagggaagcctcctccatatgc

SEQ ID NO: 33299 - DNA, 25 bp, Homo sapien
gtagctgccttcaggcctgccacga

SEQ ID NO: 33300 - DNA, 25 bp, Homo sapien
tgtgctgtggtgcttttggacaccc

SEQ ID NO: 33301 - DNA, 25 bp, Homo sapien
aggaccctcacgtgccctctgttga

SEQ ID NO: 33302 - DNA, 25 bp, Homo sapien
tctgttgactgctaacgtggttctc

SEQ ID NO: 33303 - DNA, 25 bp, Homo sapien
atgcctttctaagtgacgcgtttgc

SEQ ID NO: 33304 - DNA, 25 bp, Homo sapien
ctccagacccgtatggtaggggcac

SEQ ID NO: 33305 - DNA, 25 bp, Homo sapien
tgtgtctcattctggccaggaccct

SEQ ID NO: 33306 - DNA, 25 bp, Homo sapien
tctctgtgaaagtgactcaaggtct

SEQ ID NO: 33307 - DNA, 25 bp, Homo sapien
ccagaaataactcgagagaaatgaa

SEQ ID NO: 33308 - DNA, 25 bp, Homo sapien
aaataactcgagagaaatgaacatt

SEQ ID NO: 33309 - DNA, 25 bp, Homo sapien
gaaatactaagtcattacccatcca

SEQ ID NO: 33310 - DNA, 25 bp, Homo sapien
atgacatgttaatttagctagagaa

SEQ ID NO: 33311 - DNA, 25 bp, Homo sapien
agtactttcattaggacaaaggtaa

SEQ ID NO: 33312 - DNA, 25 bp, Homo sapien
tttccaactgtgaatgatgacatgt

SEQ ID NO: 33313 - DNA, 25 bp, Homo sapien
aaggggactactagagctatcctct

SEQ ID NO: 33314 - DNA, 25 bp, Homo sapien
aaaagagaaggggactactagagct

SEQ ID NO: 33315 - DNA, 25 bp, Homo sapien
tctctaaaaatgaaaaagcacagcc

SEQ ID NO: 33316 - DNA, 25 bp, Homo sapien
ctgcccaaagagataactaagtact

SEQ ID NO: 33317 - DNA, 25 bp, Homo sapien
gcatctgcccaaagagataactaag

SEQ ID NO: 33318 - DNA, 25 bp, Homo sapien
gatttatgagttattgagtacttac

SEQ ID NO: 33319 - DNA, 25 bp, Homo sapien
ccttcaaatgagctttaaatttccc

SEQ ID NO: 33320 - DNA, 25 bp, Homo sapien
atatatacttgttaccatggagatg

SEQ ID NO: 33321 - DNA, 25 bp, Homo sapien
actatatatacttgttaccatggag

SEQ ID NO: 33322 - DNA, 25 bp, Homo sapien
aaccttcaaatgagctttaaatttc

SEQ ID NO: 33323 - DNA, 25 bp, Homo sapien
cgcacccggctatgttatccgtttt

SEQ ID NO: 33324 - DNA, 25 bp, Homo sapien
ccgcacccggctatgttatccgttt

SEQ ID NO: 33325 - DNA, 25 bp, Homo sapien
atatacttgttaccatggagatgga

SEQ ID NO: 33326 - DNA, 25 bp, Homo sapien
aatagatttatgagttattgagtac

SEQ ID NO: 33327 - DNA, 25 bp, Homo sapien
aatgagctttaaatttcccttgaat

SEQ ID NO: 33328 - DNA, 25 bp, Homo sapien
cttaaacctcttaactgggaccaca

SEQ ID NO: 33329 - DNA, 25 bp, Homo sapien
gatttatgagttattgagtacttac

SEQ ID NO: 33330 - DNA, 25 bp, Homo sapien
atatatacttgttaccatggagatg

SEQ ID NO: 33331 - DNA, 25 bp, Homo sapien
ccgcacccggctatgttatccgttt

SEQ ID NO: 33332 - DNA, 25 bp, Homo sapien
aggcatggactaccaagcccaacta

SEQ ID NO: 33333 - DNA, 25 bp, Homo sapien
aatagatttatgagttattgagtac

SEQ ID NO: 33334 - DNA, 25 bp, Homo sapien
actatatatacttgttaccatggag

SEQ ID NO: 33335 - DNA, 25 bp, Homo sapien
aaccttcaaatgagctttaaatttc

SEQ ID NO: 33336 - DNA, 25 bp, Homo sapien
ctcttttcaagaagctcaaagttta

SEQ ID NO: 33337 - DNA, 25 bp, Homo sapien
atatacttgttaccatggagatgga

SEQ ID NO: 33338 - DNA, 25 bp, Homo sapien
aatgagctttaaatttcccttgaat

SEQ ID NO: 33339 - DNA, 25 bp, Homo sapien
cttaaacctcttaactgggaccaca

SEQ ID NO: 33340 - DNA, 25 bp, Homo sapien
ttaaggaggttctttcaggacacaa

SEQ ID NO: 33341 - DNA, 25 bp, Homo sapien
gagaatgaacaaagatggtggtgtt

SEQ ID NO: 33342 - DNA, 25 bp, Homo sapien
aataaatagcgggataaatatcctc

SEQ ID NO: 33343 - DNA, 25 bp, Homo sapien
aactaagaatctcatgtcacagagc

SEQ ID NO: 33344 - DNA, 25 bp, Homo sapien
gtgcaggaggtcacagttattgaaa

SEQ ID NO: 33345 - DNA, 25 bp, Homo sapien
tggtaggttccctcagaaaccacac

SEQ ID NO: 33346 - DNA, 25 bp, Homo sapien
attacaatactgactgctagatttc

SEQ ID NO: 33347 - DNA, 25 bp, Homo sapien
tcatgccagtgttcagtaaccaata

SEQ ID NO: 33348 - DNA, 25 bp, Homo sapien
tgccagaacgatcttggggtgactt

SEQ ID NO: 33349 - DNA, 25 bp, Homo sapien
gacttgaacaatgtgtgaacagccc

SEQ ID NO: 33350 - DNA, 25 bp, Homo sapien
ttcagctcagcgtgccagaacgatc

SEQ ID NO: 33351 - DNA, 25 bp, Homo sapien
tgaaatggagacaaaccctaccttg

SEQ ID NO: 33352 - DNA, 25 bp, Homo sapien
tgacaaagtgttgatgctgccatgc

SEQ ID NO: 33353 - DNA, 25 bp, Homo sapien
taccctgcattgagcctggccaaaa

SEQ ID NO: 33354 - DNA, 25 bp, Homo sapien
aaggtgtcacatagagagcttgact

SEQ ID NO: 33355 - DNA, 25 bp, Homo sapien
ttatgaccaggaggtaatcagatgc

SEQ ID NO: 33356 - DNA, 25 bp, Homo sapien
gctcaataaatggaagcagttgtat

SEQ ID NO: 33357 - DNA, 25 bp, Homo sapien
attcactaaaggtttgatggacaaa

SEQ ID NO: 33358 - DNA, 25 bp, Homo sapien
attaatggagtcttcaaggtgtcac

SEQ ID NO: 33359 - DNA, 25 bp, Homo sapien
attacacggcaatagctaacttctg

SEQ ID NO: 33360 - DNA, 25 bp, Homo sapien
acaaatgaaaatggatggacaatgg

SEQ ID NO: 33361 - DNA, 25 bp, Homo sapien
atggatggacaatggaaaaatgaaa

SEQ ID NO: 33362 - DNA, 25 bp, Homo sapien
tagagcccagcctaaagcagatgat

SEQ ID NO: 33363 - DNA, 25 bp, Homo sapien
atgagaacacaggtactagaatgga

SEQ ID NO: 33364 - DNA, 25 bp, Homo sapien
aattctcatctgaaagtgaaaagac

SEQ ID NO: 33365 - DNA, 25 bp, Homo sapien
ggggaccaggattcaattctatgag

SEQ ID NO: 33366 - DNA, 25 bp, Homo sapien
tcataagactcaccaaaaagaaaac

SEQ ID NO: 33367 - DNA, 25 bp, Homo sapien
ctaagtcaaaaaggtacactctgtg

SEQ ID NO: 33368 - DNA, 25 bp, Homo sapien
aagcagatgatcaacaaacccttgc

SEQ ID NO: 33369 - DNA, 25 bp, Homo sapien
ctagaatggaatccacaggcaccta

SEQ ID NO: 33370 - DNA, 25 bp, Homo sapien
tgaacttctgaattaggataactac

SEQ ID NO: 33371 - DNA, 25 bp, Homo sapien
tctgtgacattcctacatgagggga

SEQ ID NO: 33372 - DNA, 25 bp, Homo sapien
acaggcacctaacatagagcccagc

SEQ ID NO: 33373 - DNA, 25 bp, Homo sapien
cagactgagtccgtaaaaggagtca

SEQ ID NO: 33374 - DNA, 25 bp, Homo sapien
cagctttgacaaacagaaactttat

SEQ ID NO: 33375 - DNA, 25 bp, Homo sapien
cagttttataggattcgggcaggtc

SEQ ID NO: 33376 - DNA, 25 bp, Homo sapien
gtctatcacatttcagccagctttg

SEQ ID NO: 33377 - DNA, 25 bp, Homo sapien
gcaggtcgtggaaaattacagtgaa

SEQ ID NO: 33378 - DNA, 25 bp, Homo sapien
atgcaggcagactgagtccgtaaaa

SEQ ID NO: 33379 - DNA, 25 bp, Homo sapien
aggcaggaactaataagtggctatt

SEQ ID NO: 33380 - DNA, 25 bp, Homo sapien
aagatgacctcaccttcagaagatg

SEQ ID NO: 33381 - DNA, 25 bp, Homo sapien
ctggcggagggcatctcgtccatct

SEQ ID NO: 33382 - DNA, 25 bp, Homo sapien
tccatctgcccgcaagattcctgat

SEQ ID NO: 33383 - DNA, 25 bp, Homo sapien
tggggagctcctgagattcattgtc

SEQ ID NO: 33384 - DNA, 25 bp, Homo sapien
cctagtctaggcaaagagattgaga

SEQ ID NO: 33385 - DNA, 25 bp, Homo sapien
aagcacaggatgtgcaagagtaccc

SEQ ID NO: 33386 - DNA, 25 bp, Homo sapien
taagcagacgatatacagtgtaggt

SEQ ID NO: 33387 - DNA, 25 bp, Homo sapien
ttcaggatgaccaatatactctgcc

SEQ ID NO: 33388 - DNA, 25 bp, Homo sapien
acagagagatgtaggttagacttga

SEQ ID NO: 33389 - DNA, 25 bp, Homo sapien
acacataggttggtgatagcccatc

SEQ ID NO: 33390 - DNA, 25 bp, Homo sapien
gtggcgtcagttactacagagagat

SEQ ID NO: 33391 - DNA, 25 bp, Homo sapien
agttctcttgctggaaggtaatttc

SEQ ID NO: 33392 - DNA, 25 bp, Homo sapien
cacagtgggaagtctaggaagctct

SEQ ID NO: 33393 - DNA, 25 bp, Homo sapien
ttgagactgtctgacaaaagcgggt

SEQ ID NO: 33394 - DNA, 25 bp, Homo sapien
aatccagaaattgcttggcatgcac

SEQ ID NO: 33395 - DNA, 25 bp, Homo sapien
ttatagaaggtcacaaataaggcag

SEQ ID NO: 33396 - DNA, 25 bp, Homo sapien
tcaatagtagagaagatgagcatga

SEQ ID NO: 33397 - DNA, 25 bp, Homo sapien
tcattcttaggagaaaatgctgaga

SEQ ID NO: 33398 - DNA, 25 bp, Homo sapien
tttgactagtgccaagccttgacag

SEQ ID NO: 33399 - DNA, 25 bp, Homo sapien
tgctgtccttagtcccagaagatac

SEQ ID NO: 33400 - DNA, 25 bp, Homo sapien
aaatgctgagaagcttctgcagttc

SEQ ID NO: 33401 - DNA, 25 bp, Homo sapien
gagcatgacagaacgacaagatctt

SEQ ID NO: 33402 - DNA, 25 bp, Homo sapien
aaagctctaagcagagtgaagtaca

SEQ ID NO: 33403 - DNA, 25 bp, Homo sapien
ggtagggcaattatagaaggtcaca

SEQ ID NO: 33404 - DNA, 25 bp, Homo sapien
gttatctgcatactaggaagagagt

SEQ ID NO: 33405 - DNA, 25 bp, Homo sapien
tcaagcgttggttctggtcaatagt

SEQ ID NO: 33406 - DNA, 25 bp, Homo sapien
atagacaagtcacaactgagtggaa

SEQ ID NO: 33407 - DNA, 25 bp, Homo sapien
cagtttacaaagaagcgaaacgtac

SEQ ID NO: 33408 - DNA, 25 bp, Homo sapien
acctggcgtggcactgatgctctgt

SEQ ID NO: 33409 - DNA, 25 bp, Homo sapien
tctgcaggtccggaagtcagcgtca

SEQ ID NO: 33410 - DNA, 25 bp, Homo sapien
gtgttcggtgagctacgccgccacc

SEQ ID NO: 33411 - DNA, 25 bp, Homo sapien
cacagttctgcaggtccggaagtca

SEQ ID NO: 33412 - DNA, 25 bp, Homo sapien
aaagaagcgaaacgtactttctcac

SEQ ID NO: 33413 - DNA, 25 bp, Homo sapien
agcgctgtcctcacctggcgtggca

SEQ ID NO: 33414 - DNA, 25 bp, Homo sapien
atctgtgctgccaccactgaccagg

SEQ ID NO: 33415 - DNA, 25 bp, Homo sapien
tcgaggtccacgtcggtccatctgt

SEQ ID NO: 33416 - DNA, 25 bp, Homo sapien
agagcccgccattcgcgtcgaggtc

SEQ ID NO: 33417 - DNA, 25 bp, Homo sapien
tctgaggagcggtcacctcagaccc

SEQ ID NO: 33418 - DNA, 25 bp, Homo sapien
caggccctgaccgtgaaagggctct

SEQ ID NO: 33419 - DNA, 25 bp, Homo sapien
tgcaaagcccatagaagcaagcctt

SEQ ID NO: 33420 - DNA, 25 bp, Homo sapien
ctcctcaggccaccgggcagagaaa

SEQ ID NO: 33421 - DNA, 25 bp, Homo sapien
gcaggcgggcactcgagctcctcag

SEQ ID NO: 33422 - DNA, 25 bp, Homo sapien
cttggtaccaggagccgctgccgct

SEQ ID NO: 33423 - DNA, 25 bp, Homo sapien
cctagagggtggtgcaaagcccata

SEQ ID NO: 33424 - DNA, 25 bp, Homo sapien
ctaatggcacccacagagctcaggc

SEQ ID NO: 33425 - DNA, 25 bp, Homo sapien
tgcaacatccatgggctcattttta

SEQ ID NO: 33426 - DNA, 25 bp, Homo sapien
ctgtgacgacgctgctgtgaggaca

SEQ ID NO: 33427 - DNA, 25 bp, Homo sapien
ttaaggtatgcttggtaccaggagc

SEQ ID NO: 33428 - DNA, 25 bp, Homo sapien
aatgtcaccaggaacacattgcagc

SEQ ID NO: 33429 - DNA, 25 bp, Homo sapien
ttgggtctgggtgttcgcagctccc

SEQ ID NO: 33430 - DNA, 25 bp, Homo sapien
ttaaaacgaatgcacaaaagtcacc

SEQ ID NO: 33431 - DNA, 25 bp, Homo sapien
atgcacaaaagtcacccgctcgatc

SEQ ID NO: 33432 - DNA, 25 bp, Homo sapien
ctttcagcagcatggtcctgccggc

SEQ ID NO: 33433 - DNA, 25 bp, Homo sapien
gtcctcccggaacgcggtgttgcaa

SEQ ID NO: 33434 - DNA, 25 bp, Homo sapien
cgggtctgcccgatgctaatgtcac

SEQ ID NO: 33435 - DNA, 25 bp, Homo sapien
agcggccgccagatcaggacatgcc

SEQ ID NO: 33436 - DNA, 25 bp, Homo sapien
ccagagcatgtcagggtttgggtct

SEQ ID NO: 33437 - DNA, 25 bp, Homo sapien
tccgcctccgaaagcagacgggaac

SEQ ID NO: 33438 - DNA, 25 bp, Homo sapien
tggggacgactctgctcggctgccc

SEQ ID NO: 33439 - DNA, 25 bp, Homo sapien
atagtgccaccgcatagccactgca

SEQ ID NO: 33440 - DNA, 25 bp, Homo sapien
caaactggcctcatgatctgactgc

SEQ ID NO: 33441 - DNA, 25 bp, Homo sapien
cctatagtgccaccgcatagccact

SEQ ID NO: 33442 - DNA, 25 bp, Homo sapien
tcctatagtgccaccgcatagccac

SEQ ID NO: 33443 - DNA, 25 bp, Homo sapien
aatcttccctgccttcgcctcttga

SEQ ID NO: 33444 - DNA, 25 bp, Homo sapien
accacgcctggccatgttctttctt

SEQ ID NO: 33445 - DNA, 25 bp, Homo sapien
cctcagcctcctatagtgccaccgc

SEQ ID NO: 33446 - DNA, 25 bp, Homo sapien
ctatagtgccaccgcatagccactg

SEQ ID NO: 33447 - DNA, 25 bp, Homo sapien
tcttccctgccttcgcctcttgagt

SEQ ID NO: 33448 - DNA, 25 bp, Homo sapien
actggcctcatgatctgactgcctc

SEQ ID NO: 33449 - DNA, 25 bp, Homo sapien
agcctcctatagtgccaccgcatag

SEQ ID NO: 33450 - DNA, 25 bp, Homo sapien
gcctggctaaggtttctgtcaaaag

SEQ ID NO: 33451 - DNA, 25 bp, Homo sapien
aaagtgacattgagatctgaagggt

SEQ ID NO: 33452 - DNA, 25 bp, Homo sapien
agatcatttctcctcagtcttcaga

SEQ ID NO: 33453 - DNA, 25 bp, Homo sapien
gtgcctgacacaaagggcttggatg

SEQ ID NO: 33454 - DNA, 25 bp, Homo sapien
atttatgaagatgagatggtgcctg

SEQ ID NO: 33455 - DNA, 25 bp, Homo sapien
tgacttcaagagatcatttctcctc

SEQ ID NO: 33456 - DNA, 25 bp, Homo sapien
gtgaaatgtcatttaggaacagggg

SEQ ID NO: 33457 - DNA, 25 bp, Homo sapien
ttggatgggtgcagattggaagcca

SEQ ID NO: 33458 - DNA, 25 bp, Homo sapien
caggatttatgaagatgagatggtg

SEQ ID NO: 33459 - DNA, 25 bp, Homo sapien
ccatgcctggctaaggtttctgtca

SEQ ID NO: 33460 - DNA, 25 bp, Homo sapien
ggctaaggtttctgtcaaaagtgac

SEQ ID NO: 33461 - DNA, 25 bp, Homo sapien
acccaggctggcaatatcatggctc

SEQ ID NO: 33462 - DNA, 25 bp, Homo sapien
ttctgactaaagagatgtcttcgta

SEQ ID NO: 33463 - DNA, 25 bp, Homo sapien
gtgtgagttaccatgtctggcttcc

SEQ ID NO: 33464 - DNA, 25 bp, Homo sapien
tgagagcattaaggacaagcaaaca

SEQ ID NO: 33465 - DNA, 25 bp, Homo sapien
catccaaatagctgggaaaaggtga

SEQ ID NO: 33466 - DNA, 25 bp, Homo sapien
aagttggtacactacaaagtaagca

SEQ ID NO: 33467 - DNA, 25 bp, Homo sapien
caaaatatgaagtttgggaggacat

SEQ ID NO: 33468 - DNA, 25 bp, Homo sapien
aacccataatgaggaaaacttagtc

SEQ ID NO: 33469 - DNA, 25 bp, Homo sapien
aacttagtcataaaggagaaaagca

SEQ ID NO: 33470 - DNA, 25 bp, Homo sapien
acaatgaagctagaactgaaccaag

SEQ ID NO: 33471 - DNA, 25 bp, Homo sapien
tcttcgtaagcagtaatgtggggta

SEQ ID NO: 33472 - DNA, 25 bp, Homo sapien
tttaatacaacagactatcccaatt

SEQ ID NO: 33473 - DNA, 25 bp, Homo sapien
ctgcttcctgagttctagtgagtct

SEQ ID NO: 33474 - DNA, 25 bp, Homo sapien
aactgcacaaaaaactacatgaccc

SEQ ID NO: 33475 - DNA, 25 bp, Homo sapien
ggccagaagaatcttaatgtacaaa

SEQ ID NO: 33476 - DNA, 25 bp, Homo sapien
aatacacccattaaaacagaaacta

SEQ ID NO: 33477 - DNA, 25 bp, Homo sapien
attaaaacagaaactatggtgccta

SEQ ID NO: 33478 - DNA, 25 bp, Homo sapien
cttaatgtacaaaaatgaataggtt

SEQ ID NO: 33479 - DNA, 25 bp, Homo sapien
ctgagttctagtgagtctcctcctc

SEQ ID NO: 33480 - DNA, 25 bp, Homo sapien
actatggtgcctagaattaaactgc

SEQ ID NO: 33481 - DNA, 25 bp, Homo sapien
ccgatcacctggaataagctattaa

SEQ ID NO: 33482 - DNA, 25 bp, Homo sapien
catgcaaaactagcaaagattcata

SEQ ID NO: 33483 - DNA, 25 bp, Homo sapien
gggttgaccgaagagccttgctctt

SEQ ID NO: 33484 - DNA, 25 bp, Homo sapien
ttacaatccaggtgtgctgagtgag

SEQ ID NO: 33485 - DNA, 25 bp, Homo sapien
tttggtgagcacgaagttcacatcc

SEQ ID NO: 33486 - DNA, 25 bp, Homo sapien
ttcacatccgctgggaaagtgggaa

SEQ ID NO: 33487 - DNA, 25 bp, Homo sapien
tactggtgtccctgtccaacatcag

SEQ ID NO: 33488 - DNA, 25 bp, Homo sapien
ctgcagtgacctttctactggtgtc

SEQ ID NO: 33489 - DNA, 25 bp, Homo sapien
cttgaaacctcttgctttggtgagc

SEQ ID NO: 33490 - DNA, 25 bp, Homo sapien
ttccagaagtttacccaattgtcac

SEQ ID NO: 33491 - DNA, 25 bp, Homo sapien
ccatgggctgctaccttgaaacctc

SEQ ID NO: 33492 - DNA, 25 bp, Homo sapien
tgagtgaggtatggagctctatttt

SEQ ID NO: 33493 - DNA, 25 bp, Homo sapien
ccaacatcagccacaaaagaaaaag

SEQ ID NO: 33494 - DNA, 25 bp, Homo sapien
aattctaatgcagaaaaagaagtac

SEQ ID NO: 33495 - DNA, 25 bp, Homo sapien
ctcaatgctgggaatacagtttatc

SEQ ID NO: 33496 - DNA, 25 bp, Homo sapien
aatacctactatccactaagcaatg

SEQ ID NO: 33497 - DNA, 25 bp, Homo sapien
caaagctgataaaagtccatttaat

SEQ ID NO: 33498 - DNA, 25 bp, Homo sapien
tgtgaatacctactatccactaagc

SEQ ID NO: 33499 - DNA, 25 bp, Homo sapien
atgacagaaataagagacaagggcc

SEQ ID NO: 33500 - DNA, 25 bp, Homo sapien
gctgggaatacagtttatcaaagct

SEQ ID NO: 33501 - DNA, 25 bp, Homo sapien
cagaaaaagaagtacaatgtttagt

SEQ ID NO: 33502 - DNA, 25 bp, Homo sapien
gtacaatgtttagtatgacagaaat

SEQ ID NO: 33503 - DNA, 25 bp, Homo sapien
ctactatccactaagcaatgttctc

SEQ ID NO: 33504 - DNA, 25 bp, Homo sapien
tatcaaagctgataaaagtccattt

SEQ ID NO: 33505 - DNA, 25 bp, Homo sapien
acacaaagcagtatcatagtcacca

SEQ ID NO: 33506 - DNA, 25 bp, Homo sapien
aacatgatgttttgagatacttatc

SEQ ID NO: 33507 - DNA, 25 bp, Homo sapien
agtggatctccagaattcattcatg

SEQ ID NO: 33508 - DNA, 25 bp, Homo sapien
cccagtcaagctagttaaacatatc

SEQ ID NO: 33509 - DNA, 25 bp, Homo sapien
ctgacgcatcgggtgtaacttttac

SEQ ID NO: 33510 - DNA, 25 bp, Homo sapien
gtctttaccctgagtaggctgagga

SEQ ID NO: 33511 - DNA, 25 bp, Homo sapien
tggacccacagagttcaaacctgta

SEQ ID NO: 33512 - DNA, 25 bp, Homo sapien
catgctgcacagtggatctccagaa

SEQ ID NO: 33513 - DNA, 25 bp, Homo sapien
ggaaagaacacaagatctactctct

SEQ ID NO: 33514 - DNA, 25 bp, Homo sapien
tcatgttgcatagctgaacctctgc

SEQ ID NO: 33515 - DNA, 25 bp, Homo sapien
atagtcaccatgctgcacagtggat

SEQ ID NO: 33516 - DNA, 25 bp, Homo sapien
caattaacaaatggacaacagaagt

SEQ ID NO: 33517 - DNA, 25 bp, Homo sapien
acttctgttgtccatttgttaattg

SEQ ID NO: 33518 - DNA, 25 bp, Homo sapien
gtgctaggcctaagcctcggactta

SEQ ID NO: 33519 - DNA, 25 bp, Homo sapien
caaggggagatctccaatatatctc

SEQ ID NO: 33520 - DNA, 25 bp, Homo sapien
gatcagaagggtcatatggctaaat

SEQ ID NO: 33521 - DNA, 25 bp, Homo sapien
atatctccaatagtgtggtggctgg

SEQ ID NO: 33522 - DNA, 25 bp, Homo sapien
ctcggacttaggcaaaggagatcag

SEQ ID NO: 33523 - DNA, 25 bp, Homo sapien
tttcaattagtgagtcaaggggaga

SEQ ID NO: 33524 - DNA, 25 bp, Homo sapien
atcctacagtgctaggcctaagcct

SEQ ID NO: 33525 - DNA, 25 bp, Homo sapien
tcctgcctctcaaggacgctctgtt

SEQ ID NO: 33526 - DNA, 25 bp, Homo sapien
tatggctaaatgtaggtggacaaga

SEQ ID NO: 33527 - DNA, 25 bp, Homo sapien
gcaaaggagatcagaagggtcatat

SEQ ID NO: 33528 - DNA, 25 bp, Homo sapien
gctggtctgctctgaaatgtaagca

SEQ ID NO: 33529 - DNA, 25 bp, Homo sapien
ggagtgccttgtgtctgccgctcag

SEQ ID NO: 33530 - DNA, 25 bp, Homo sapien
tcagccctcctgccctgtcagcaca

SEQ ID NO: 33531 - DNA, 25 bp, Homo sapien
agtgccttgtgtctgccgctcagcc

SEQ ID NO: 33532 - DNA, 25 bp, Homo sapien
ctcccgaagttcaagcgatttttct

SEQ ID NO: 33533 - DNA, 25 bp, Homo sapien
aacacgaaatcctgtctctgggccc

SEQ ID NO: 33534 - DNA, 25 bp, Homo sapien
gaggaggctaacacgaaatcctgtc

SEQ ID NO: 33535 - DNA, 25 bp, Homo sapien
tgatgctctgaaacttaagactggc

SEQ ID NO: 33536 - DNA, 25 bp, Homo sapien
cacgaaatcctgtctctgggcccag

SEQ ID NO: 33537 - DNA, 25 bp, Homo sapien
gctaacacgaaatcctgtctctggg

SEQ ID NO: 33538 - DNA, 25 bp, Homo sapien
cgaggaggctaacacgaaatcctgt

SEQ ID NO: 33539 - DNA, 25 bp, Homo sapien
agctgcaggaccagggtgagtacca

SEQ ID NO: 33540 - DNA, 25 bp, Homo sapien
aacagtgaggtagggaataagaaaa

SEQ ID NO: 33541 - DNA, 25 bp, Homo sapien
attgtaagcgtgagccatgacgccc

SEQ ID NO: 33542 - DNA, 25 bp, Homo sapien
agccatgacgcccagccaagaacag

SEQ ID NO: 33543 - DNA, 25 bp, Homo sapien
ctaaaaagagatgagtaacagaaga

SEQ ID NO: 33544 - DNA, 25 bp, Homo sapien
cagaagaaactagcatattatgaag

SEQ ID NO: 33545 - DNA, 25 bp, Homo sapien
taagaaaagacggaccaaacagaca

SEQ ID NO: 33546 - DNA, 25 bp, Homo sapien
gagatgagtaacagaagaaactagc

SEQ ID NO: 33547 - DNA, 25 bp, Homo sapien
tgacgcccagccaagaacaggaaaa

SEQ ID NO: 33548 - DNA, 25 bp, Homo sapien
ataaataaaacagtgaggtagggaa

SEQ ID NO: 33549 - DNA, 25 bp, Homo sapien
ttgaattcttgtctcacaccgaaag

SEQ ID NO: 33550 - DNA, 25 bp, Homo sapien
gtctcacaccgaaagaaattccaac

SEQ ID NO: 33551 - DNA, 25 bp, Homo sapien
tggctactgtgaaatggtactgcta

SEQ ID NO: 33552 - DNA, 25 bp, Homo sapien
ttggctactgtgaaatggtactgct

SEQ ID NO: 33553 - DNA, 25 bp, Homo sapien
gtttgaggtctcacaacaaagggac

SEQ ID NO: 33554 - DNA, 25 bp, Homo sapien
tcccagatcccacccacatcccacg

SEQ ID NO: 33555 - DNA, 25 bp, Homo sapien
gattgcttctcttttggctactgtg

SEQ ID NO: 33556 - DNA, 25 bp, Homo sapien
ggtttgaggtctcacaacaaaggga

SEQ ID NO: 33557 - DNA, 25 bp, Homo sapien
atcccagatcccacccacatcccac

SEQ ID NO: 33558 - DNA, 25 bp, Homo sapien
ttttggctactgtgaaatggtactg

SEQ ID NO: 33559 - DNA, 25 bp, Homo sapien
ggctactgtgaaatggtactgctat

SEQ ID NO: 33560 - DNA, 25 bp, Homo sapien
ggattgcttctcttttggctactgt

SEQ ID NO: 33561 - DNA, 25 bp, Homo sapien
tttggctactgtgaaatggtactgc

SEQ ID NO: 33562 - DNA, 25 bp, Homo sapien
gttgaatgagtgagtgcatatgcaa

SEQ ID NO: 33563 - DNA, 25 bp, Homo sapien
cttgggatcgcaggcccttagcaca

SEQ ID NO: 33564 - DNA, 25 bp, Homo sapien
caggcagggtcaaagtctgttgaat

SEQ ID NO: 33565 - DNA, 25 bp, Homo sapien
aagtcacatgcttggcttggagaca

SEQ ID NO: 33566 - DNA, 25 bp, Homo sapien
taacagcatctgaggtggtggccct

SEQ ID NO: 33567 - DNA, 25 bp, Homo sapien
tctggcctggacaactaacagcatc

SEQ ID NO: 33568 - DNA, 25 bp, Homo sapien
ttccaggtcctccatggtatggctc

SEQ ID NO: 33569 - DNA, 25 bp, Homo sapien
tgcatatgcaaagggcctagacaca

SEQ ID NO: 33570 - DNA, 25 bp, Homo sapien
tgggaatgggattgtgtcatctcct

SEQ ID NO: 33571 - DNA, 25 bp, Homo sapien
acaggagtgcgatacaatcaatgct

SEQ ID NO: 33572 - DNA, 25 bp, Homo sapien
agacagggatttatcttgggatcgc

SEQ ID NO: 33573 - DNA, 25 bp, Homo sapien
tttgcccaatcctaaacttgtgctc

SEQ ID NO: 33574 - DNA, 25 bp, Homo sapien
tctagcataatgttcctaaaatgac

SEQ ID NO: 33575 - DNA, 25 bp, Homo sapien
tgctctagcataatgttcctaaaat

SEQ ID NO: 33576 - DNA, 25 bp, Homo sapien
gcataatgttcctaaaatgacaatt

SEQ ID NO: 33577 - DNA, 25 bp, Homo sapien
gagagagaacaccaatgcaatctta

SEQ ID NO: 33578 - DNA, 25 bp, Homo sapien
gcccaatcctaaacttgtgctctag

SEQ ID NO: 33579 - DNA, 25 bp, Homo sapien
ccaatgcaatcttaaaaatcaactc

SEQ ID NO: 33580 - DNA, 25 bp, Homo sapien
ttgcccaatcctaaacttgtgctct

SEQ ID NO: 33581 - DNA, 25 bp, Homo sapien
taaaaatcaactcttttgcccaatc

SEQ ID NO: 33582 - DNA, 25 bp, Homo sapien
ttttgcccaatcctaaacttgtgct

SEQ ID NO: 33583 - DNA, 25 bp, Homo sapien
tcttttgcccaatcctaaacttgtg

SEQ ID NO: 33584 - DNA, 25 bp, Homo sapien
gttgaaacgcccaacacaagtgctc

SEQ ID NO: 33585 - DNA, 25 bp, Homo sapien
agaacaagctacttttcgtaccagt

SEQ ID NO: 33586 - DNA, 25 bp, Homo sapien
ataaatgtccaccatattgaaacac

SEQ ID NO: 33587 - DNA, 25 bp, Homo sapien
ctcctgttgaaacgcccaacacaag

SEQ ID NO: 33588 - DNA, 25 bp, Homo sapien
gatatatgaactagaacaagctact

SEQ ID NO: 33589 - DNA, 25 bp, Homo sapien
gaaacgcccaacacaagtgctcaat

SEQ ID NO: 33590 - DNA, 25 bp, Homo sapien
gtgcaaatgatatatgaactagaac

SEQ ID NO: 33591 - DNA, 25 bp, Homo sapien
agcaaagtgcaaatgatatatgaac

SEQ ID NO: 33592 - DNA, 25 bp, Homo sapien
tgaaacacatttaagagagaacact

SEQ ID NO: 33593 - DNA, 25 bp, Homo sapien
attgaaacacatttaagagagaaca

SEQ ID NO: 33594 - DNA, 25 bp, Homo sapien
ttatacaagttaagcaaagtgcaaa

SEQ ID NO: 33595 - DNA, 25 bp, Homo sapien
cttgtgcggcaaggacagtgtccaa

SEQ ID NO: 33596 - DNA, 25 bp, Homo sapien
tgttcaaagaggttcaagctgctgt

SEQ ID NO: 33597 - DNA, 25 bp, Homo sapien
acgcccagcgaatttaacttttgtc

SEQ ID NO: 33598 - DNA, 25 bp, Homo sapien
agtttaactagtgggtaattagctg

SEQ ID NO: 33599 - DNA, 25 bp, Homo sapien
ggcaaggacagtgtccaaatgaaaa

SEQ ID NO: 33600 - DNA, 25 bp, Homo sapien
tctcgactcttgttcaaagaggttc

SEQ ID NO: 33601 - DNA, 25 bp, Homo sapien
tcttgttcaaagaggttcaagctgc

SEQ ID NO: 33602 - DNA, 25 bp, Homo sapien
ctgctgtgcttgtgcggcaaggaca

SEQ ID NO: 33603 - DNA, 25 bp, Homo sapien
tgcggcaaggacagtgtccaaatga

SEQ ID NO: 33604 - DNA, 25 bp, Homo sapien
tcaaagaggttcaagctgctgtgct

SEQ ID NO: 33605 - DNA, 25 bp, Homo sapien
aaaactacaaatcagtcatctgtcc

SEQ ID NO: 33606 - DNA, 25 bp, Homo sapien
gtaagcaggtgctgccaacagtcaa

SEQ ID NO: 33607 - DNA, 25 bp, Homo sapien
gaggctgaagtgtcatcttgcacca

SEQ ID NO: 33608 - DNA, 25 bp, Homo sapien
tggtaagtaagcaggtgctgccaac

SEQ ID NO: 33609 - DNA, 25 bp, Homo sapien
caggtggcagcatcctctaaggatg

SEQ ID NO: 33610 - DNA, 25 bp, Homo sapien
cttgcaccatgagtggtaagtaagc

SEQ ID NO: 33611 - DNA, 25 bp, Homo sapien
gtgtcatcttgcaccatgagtggta

SEQ ID NO: 33612 - DNA, 25 bp, Homo sapien
caccatgagtggtaagtaagcaggt

SEQ ID NO: 33613 - DNA, 25 bp, Homo sapien
gcggaggctgaagtgtcatcttgca

SEQ ID NO: 33614 - DNA, 25 bp, Homo sapien
gtgctgccaacagtcaagcaacaag

SEQ ID NO: 33615 - DNA, 25 bp, Homo sapien
ctgctggctggaaggtgagcatttt

SEQ ID NO: 33616 - DNA, 25 bp, Homo sapien
gcatcctctaaggatggacgccatg

SEQ ID NO: 33617 - DNA, 25 bp, Homo sapien
ctgctggctggaaggtgagcatttt

SEQ ID NO: 33618 - DNA, 25 bp, Homo sapien
gtgtcatcttgcaccatgagtggta

SEQ ID NO: 33619 - DNA, 25 bp, Homo sapien
cggaggctgaagtgtcatcttgcac

SEQ ID NO: 33620 - DNA, 25 bp, Homo sapien
gcatcctctaaggatggacgccatg

SEQ ID NO: 33621 - DNA, 25 bp, Homo sapien
gtgctgccaacagtcaagcaacaag

SEQ ID NO: 33622 - DNA, 25 bp, Homo sapien
gtgactgggttctgaccaacaggat

SEQ ID NO: 33623 - DNA, 25 bp, Homo sapien
cttgcaccatgagtggtaagtaagc

SEQ ID NO: 33624 - DNA, 25 bp, Homo sapien
caccatgagtggtaagtaagcaggt

SEQ ID NO: 33625 - DNA, 25 bp, Homo sapien
aggttcaggtggcagcatcctctaa

SEQ ID NO: 33626 - DNA, 25 bp, Homo sapien
gtaagcaggtgctgccaacagtcaa

SEQ ID NO: 33627 - DNA, 25 bp, Homo sapien
tggtaagtaagcaggtgctgccaac

SEQ ID NO: 33628 - DNA, 25 bp, Homo sapien
atcgtgcatggtccagctatttccc

SEQ ID NO: 33629 - DNA, 25 bp, Homo sapien
ggagtggtcagctgcccatcactgc

SEQ ID NO: 33630 - DNA, 25 bp, Homo sapien
tctttacaatcgtgcatggtccagc

SEQ ID NO: 33631 - DNA, 25 bp, Homo sapien
tctgagggagtggtcagctgcccat

SEQ ID NO: 33632 - DNA, 25 bp, Homo sapien
cagctgtgacatgtggtagagagtt

SEQ ID NO: 33633 - DNA, 25 bp, Homo sapien
ccagctgtgacatgtggtagagagt

SEQ ID NO: 33634 - DNA, 25 bp, Homo sapien
tttacaatcgtgcatggtccagcta

SEQ ID NO: 33635 - DNA, 25 bp, Homo sapien
ccagctcctgtctgagggagtggtc

SEQ ID NO: 33636 - DNA, 25 bp, Homo sapien
gtcttctttacaatcgtgcatggtc

SEQ ID NO: 33637 - DNA, 25 bp, Homo sapien
agggagtggtcagctgcccatcact

SEQ ID NO: 33638 - DNA, 25 bp, Homo sapien
ttacaatcgtgcatggtccagctat

SEQ ID NO: 33639 - DNA, 25 bp, Homo sapien
tcttcgagagcttcttcacggcctc

SEQ ID NO: 33640 - DNA, 25 bp, Homo sapien
gtttattcaggaacagcaaggggat

SEQ ID NO: 33641 - DNA, 25 bp, Homo sapien
agcagcttccacactcctatgatga

SEQ ID NO: 33642 - DNA, 25 bp, Homo sapien
cgaagttcacaggtcacagcagctc

SEQ ID NO: 33643 - DNA, 25 bp, Homo sapien
tactgttcaccgcaggagtggccgt

SEQ ID NO: 33644 - DNA, 25 bp, Homo sapien
ctcctggcaggaggcagtactgttc

SEQ ID NO: 33645 - DNA, 25 bp, Homo sapien
taagctgctctagaacgaagttcac

SEQ ID NO: 33646 - DNA, 25 bp, Homo sapien
atgcgtgctacactggaaggcattt

SEQ ID NO: 33647 - DNA, 25 bp, Homo sapien
tgagttctgctacaggcaggtcttc

SEQ ID NO: 33648 - DNA, 25 bp, Homo sapien
gaagtccatgtaagctgctctagaa

SEQ ID NO: 33649 - DNA, 25 bp, Homo sapien
gcagtcaggatatgcgtgctacact

SEQ ID NO: 33650 - DNA, 25 bp, Homo sapien
atgaacaagaaagataaatggatac

SEQ ID NO: 33651 - DNA, 25 bp, Homo sapien
atgtttgggcaataaagatatgaaa

SEQ ID NO: 33652 - DNA, 25 bp, Homo sapien
taataatatcacgagagatgtggtc

SEQ ID NO: 33653 - DNA, 25 bp, Homo sapien
ctgtaagggtacataaagcaaagta

SEQ ID NO: 33654 - DNA, 25 bp, Homo sapien
tatcagtgagttccctacgttcaaa

SEQ ID NO: 33655 - DNA, 25 bp, Homo sapien
tgaaaatccgattaaagatgaaaat

SEQ ID NO: 33656 - DNA, 25 bp, Homo sapien
gccatgtcgcgtgggctgttctcaa

SEQ ID NO: 33657 - DNA, 25 bp, Homo sapien
tgaaacagaatttatggcattactt

SEQ ID NO: 33658 - DNA, 25 bp, Homo sapien
atcaaactgtcattaatggccattt

SEQ ID NO: 33659 - DNA, 25 bp, Homo sapien
gagatgtggtctagggtttatgtat

SEQ ID NO: 33660 - DNA, 25 bp, Homo sapien
atctaaatgtgccaaaatttggaca

SEQ ID NO: 33661 - DNA, 25 bp, Homo sapien
aaatctgtatttaaatagaccaagg

SEQ ID NO: 33662 - DNA, 25 bp, Homo sapien
atttaaatagaccaaggtggttcaa

SEQ ID NO: 33663 - DNA, 25 bp, Homo sapien
caagggtcagctgtattgtatgtat

SEQ ID NO: 33664 - DNA, 25 bp, Homo sapien
cacgcccagctctgcattaacgttt

SEQ ID NO: 33665 - DNA, 25 bp, Homo sapien
cccagctctgcattaacgttttata

SEQ ID NO: 33666 - DNA, 25 bp, Homo sapien
tatgtattgcatatgtccgattgta

SEQ ID NO: 33667 - DNA, 25 bp, Homo sapien
ttttcagtgtttctaggccatgcca

SEQ ID NO: 33668 - DNA, 25 bp, Homo sapien
ttgcatatgtccgattgtacacgtg

SEQ ID NO: 33669 - DNA, 25 bp, Homo sapien
tctaggccatgccacttacctattt

SEQ ID NO: 33670 - DNA, 25 bp, Homo sapien
catatgtccgattgtacacgtgggg

SEQ ID NO: 33671 - DNA, 25 bp, Homo sapien
taaatgttccagtgtgtttactgaa

SEQ ID NO: 33672 - DNA, 25 bp, Homo sapien
aaacttagtattacaggccatctgc

SEQ ID NO: 33673 - DNA, 25 bp, Homo sapien
atcaaacttagtattacaggccatc

SEQ ID NO: 33674 - DNA, 25 bp, Homo sapien
gatcaaacttagtattacaggccat

SEQ ID NO: 33675 - DNA, 25 bp, Homo sapien
ccagcaaaataattacaatggagag

SEQ ID NO: 33676 - DNA, 25 bp, Homo sapien
cagcaaaataattacaatggagaga

SEQ ID NO: 33677 - DNA, 25 bp, Homo sapien
atacagtggcaaaattatacctcaa

SEQ ID NO: 33678 - DNA, 25 bp, Homo sapien
ggattgtgggacaatttacaagaca

SEQ ID NO: 33679 - DNA, 25 bp, Homo sapien
caaacttagtattacaggccatctg

SEQ ID NO: 33680 - DNA, 25 bp, Homo sapien
aatacagtggcaaaattatacctca

SEQ ID NO: 33681 - DNA, 25 bp, Homo sapien
tcaaacttagtattacaggccatct

SEQ ID NO: 33682 - DNA, 25 bp, Homo sapien
ccagcaaaataattacaatggagag

SEQ ID NO: 33683 - DNA, 25 bp, Homo sapien
aaacttagtattacaggccatctgc

SEQ ID NO: 33684 - DNA, 25 bp, Homo sapien
cagcaaaataattacaatggagaga

SEQ ID NO: 33685 - DNA, 25 bp, Homo sapien
atcaaacttagtattacaggccatc

SEQ ID NO: 33686 - DNA, 25 bp, Homo sapien
aggatacatcacctatgcagtattt

SEQ ID NO: 33687 - DNA, 25 bp, Homo sapien
gatcaaacttagtattacaggccat

SEQ ID NO: 33688 - DNA, 25 bp, Homo sapien
agggatcctccaaattcagcctcct

SEQ ID NO: 33689 - DNA, 25 bp, Homo sapien
ggattgtgggacaatttacaagaca

SEQ ID NO: 33690 - DNA, 25 bp, Homo sapien
tcaaacttagtattacaggccatct

SEQ ID NO: 33691 - DNA, 25 bp, Homo sapien
aatacagtggcaaaattatacctca

SEQ ID NO: 33692 - DNA, 25 bp, Homo sapien
atacagtggcaaaattatacctcaa

SEQ ID NO: 33693 - DNA, 25 bp, Homo sapien
gcattgcctctttaaatgtacagca

SEQ ID NO: 33694 - DNA, 25 bp, Homo sapien
ggggagctcctgagactcagtccag

SEQ ID NO: 33695 - DNA, 25 bp, Homo sapien
caattcagcatgagaacattcttca

SEQ ID NO: 33696 - DNA, 25 bp, Homo sapien
aatgagttagaacctacataatccc

SEQ ID NO: 33697 - DNA, 25 bp, Homo sapien
aaggaatgtcacgaggtcagttgtt

SEQ ID NO: 33698 - DNA, 25 bp, Homo sapien
tgtcacgaggtcagttgttcagtta

SEQ ID NO: 33699 - DNA, 25 bp, Homo sapien
ctgacagtgcccttgttaaaatgag

SEQ ID NO: 33700 - DNA, 25 bp, Homo sapien
acataatcccagtagcattgcctct

SEQ ID NO: 33701 - DNA, 25 bp, Homo sapien
ggcttagaggcctgacagtgccctt

SEQ ID NO: 33702 - DNA, 25 bp, Homo sapien
tagaggcctgacagtgcccttgtta

SEQ ID NO: 33703 - DNA, 25 bp, Homo sapien
ttaaggcaggaactgcctattttgc

SEQ ID NO: 33704 - DNA, 25 bp, Homo sapien
cccagtggtgttacagcctcgaacc

SEQ ID NO: 33705 - DNA, 25 bp, Homo sapien
agtcccatgatggaaagggaggcta

SEQ ID NO: 33706 - DNA, 25 bp, Homo sapien
gtgcgctcgagcaggatttcctccc

SEQ ID NO: 33707 - DNA, 25 bp, Homo sapien
tacagcctcgaacccagtttccaga

SEQ ID NO: 33708 - DNA, 25 bp, Homo sapien
ttataaaagcgacatatcatcctgg

SEQ ID NO: 33709 - DNA, 25 bp, Homo sapien
atcatcctggaaaacaggtgcgctc

SEQ ID NO: 33710 - DNA, 25 bp, Homo sapien
agtttccagacctaagtcaccgccg

SEQ ID NO: 33711 - DNA, 25 bp, Homo sapien
actccgccgcaattcctgacttgta

SEQ ID NO: 33712 - DNA, 25 bp, Homo sapien
tttctcaaagggacctgcagccatt

SEQ ID NO: 33713 - DNA, 25 bp, Homo sapien
tttgtagaggcggtttttcgccatg

SEQ ID NO: 33714 - DNA, 25 bp, Homo sapien
ggaaggaccttgcaccactgctgca

SEQ ID NO: 33715 - DNA, 25 bp, Homo sapien
tgaagtgcggttacacgatcgtgct

SEQ ID NO: 33716 - DNA, 25 bp, Homo sapien
gcaagaaatctcatgtctgtatctc

SEQ ID NO: 33717 - DNA, 25 bp, Homo sapien
ttgtgagcactaagttttctttcaa

SEQ ID NO: 33718 - DNA, 25 bp, Homo sapien
ctaattgtttaaagcaagaaatctc

SEQ ID NO: 33719 - DNA, 25 bp, Homo sapien
ctctgttattaggtttgtgactttt

SEQ ID NO: 33720 - DNA, 25 bp, Homo sapien
gtctgtatctctaatggttacccta

SEQ ID NO: 33721 - DNA, 25 bp, Homo sapien
tgcacctggctattaccctaaaact

SEQ ID NO: 33722 - DNA, 25 bp, Homo sapien
cacaaggtgattattgatacatttc

SEQ ID NO: 33723 - DNA, 25 bp, Homo sapien
acttgggcctctattttgtttgata

SEQ ID NO: 33724 - DNA, 25 bp, Homo sapien
tcttggtaggttgtgtattttaatc

SEQ ID NO: 33725 - DNA, 25 bp, Homo sapien
tagaagaatttaactcacaaggtga

SEQ ID NO: 33726 - DNA, 25 bp, Homo sapien
tcagggatgccagctttcttgacct

SEQ ID NO: 33727 - DNA, 25 bp, Homo sapien
aacacacagtggacaaaatgcttag

SEQ ID NO: 33728 - DNA, 25 bp, Homo sapien
cttagtgatgaatgactgaaagctt

SEQ ID NO: 33729 - DNA, 25 bp, Homo sapien
tcggcaaactaggaataaaatggac

SEQ ID NO: 33730 - DNA, 25 bp, Homo sapien
aaaggcaatcttaagacaaacacac

SEQ ID NO: 33731 - DNA, 25 bp, Homo sapien
atgcagaaaaagatgtggccaaatt

SEQ ID NO: 33732 - DNA, 25 bp, Homo sapien
aataaaaattctcggcaaactagga

SEQ ID NO: 33733 - DNA, 25 bp, Homo sapien
agttcatggaacgtgtctaaagaca

SEQ ID NO: 33734 - DNA, 25 bp, Homo sapien
catgactcatctgtggcagcgctga

SEQ ID NO: 33735 - DNA, 25 bp, Homo sapien
ccagtgcagtaaggaaaagaaatac

SEQ ID NO: 33736 - DNA, 25 bp, Homo sapien
aggtccagaccctgccggtgctgtt

SEQ ID NO: 33737 - DNA, 25 bp, Homo sapien
tggaagaggcattcacaggcagatc

SEQ ID NO: 33738 - DNA, 25 bp, Homo sapien
gaagaggcattcacaggcagatcac

SEQ ID NO: 33739 - DNA, 25 bp, Homo sapien
tgaactggtggggcatggtagctca

SEQ ID NO: 33740 - DNA, 25 bp, Homo sapien
ggaagaggcattcacaggcagatca

SEQ ID NO: 33741 - DNA, 25 bp, Homo sapien
ttcttccttcaagaatgaactggtg

SEQ ID NO: 33742 - DNA, 25 bp, Homo sapien
aagaggcattcacaggcagatcact

SEQ ID NO: 33743 - DNA, 25 bp, Homo sapien
aatgaactggtggggcatggtagct

SEQ ID NO: 33744 - DNA, 25 bp, Homo sapien
tgaggaagtgttgatctatgcctat

SEQ ID NO: 33745 - DNA, 25 bp, Homo sapien
ttggaagaggcattcacaggcagat

SEQ ID NO: 33746 - DNA, 25 bp, Homo sapien
tttggaagaggcattcacaggcaga

SEQ ID NO: 33747 - DNA, 25 bp, Homo sapien
atgaactggtggggcatggtagctc

SEQ ID NO: 33748 - DNA, 25 bp, Homo sapien
ggaaatgtgacatgagatactaatg

SEQ ID NO: 33749 - DNA, 25 bp, Homo sapien
gtgaggaaatgtgacatgagatact

SEQ ID NO: 33750 - DNA, 25 bp, Homo sapien
taaggaactgatggtttctctatcc

SEQ ID NO: 33751 - DNA, 25 bp, Homo sapien
aagcagggtgaggaaatgtgacatg

SEQ ID NO: 33752 - DNA, 25 bp, Homo sapien
tctatgcctatgatataaatgcata

SEQ ID NO: 33753 - DNA, 25 bp, Homo sapien
ggtgaggaaatgtgacatgagatac

SEQ ID NO: 33754 - DNA, 25 bp, Homo sapien
atatccaaatccctttaaggaactg

SEQ ID NO: 33755 - DNA, 25 bp, Homo sapien
ctctatcctaacttgtcataaaagc

SEQ ID NO: 33756 - DNA, 25 bp, Homo sapien
tctgctttgaaaagagctttcttcc

SEQ ID NO: 33757 - DNA, 25 bp, Homo sapien
tatcctaacttgtcataaaagcagg

SEQ ID NO: 33758 - DNA, 25 bp, Homo sapien
ccaaatccctttaaggaactgatgg

SEQ ID NO: 33759 - DNA, 25 bp, Homo sapien
gaagaggcattcacaggcagatcac

SEQ ID NO: 33760 - DNA, 25 bp, Homo sapien
ttggaagaggcattcacaggcagat

SEQ ID NO: 33761 - DNA, 25 bp, Homo sapien
gtgaggaaatgtgacatgagatact

SEQ ID NO: 33762 - DNA, 25 bp, Homo sapien
ggaagaggcattcacaggcagatca

SEQ ID NO: 33763 - DNA, 25 bp, Homo sapien
ttcttccttcaagaatgaactggtg

SEQ ID NO: 33764 - DNA, 25 bp, Homo sapien
ttttgaggaagtgttgatctatgcc

SEQ ID NO: 33765 - DNA, 25 bp, Homo sapien
tgaggaagtgttgatctatgcctat

SEQ ID NO: 33766 - DNA, 25 bp, Homo sapien
tttggaagaggcattcacaggcaga

SEQ ID NO: 33767 - DNA, 25 bp, Homo sapien
cagcactttggaagaggcattcaca

SEQ ID NO: 33768 - DNA, 25 bp, Homo sapien
tgcttttgaggaagtgttgatctat

SEQ ID NO: 33769 - DNA, 25 bp, Homo sapien
aagaggcattcacaggcagatcact

SEQ ID NO: 33770 - DNA, 25 bp, Homo sapien
gatggggctcagcaatcagcatttt

SEQ ID NO: 33771 - DNA, 25 bp, Homo sapien
ggggctctcaaaagtgtgatgctcc

SEQ ID NO: 33772 - DNA, 25 bp, Homo sapien
actgtaccagtaaaatgaagcaaac

SEQ ID NO: 33773 - DNA, 25 bp, Homo sapien
gcaggatgacagaagtaagataact

SEQ ID NO: 33774 - DNA, 25 bp, Homo sapien
ttagactgcctatcgaactgtagac

SEQ ID NO: 33775 - DNA, 25 bp, Homo sapien
tccagattctttcaactaggggctc

SEQ ID NO: 33776 - DNA, 25 bp, Homo sapien
caagacatgttagaaactctgggat

SEQ ID NO: 33777 - DNA, 25 bp, Homo sapien
cacactcaaatgagtcaggcaggat

SEQ ID NO: 33778 - DNA, 25 bp, Homo sapien
acccaagtcctggagctgatctggc

SEQ ID NO: 33779 - DNA, 25 bp, Homo sapien
ctgtagacatctgacgaacaaatcc

SEQ ID NO: 33780 - DNA, 25 bp, Homo sapien
tttgggtaattctgatgcacgcttt

SEQ ID NO: 33781 - DNA, 25 bp, Homo sapien
gtaggacatccagagcaagacattc

SEQ ID NO: 33782 - DNA, 25 bp, Homo sapien
atataagctggagtctaagagtgac

SEQ ID NO: 33783 - DNA, 25 bp, Homo sapien
cagactgagacatgttgaattttgc

SEQ ID NO: 33784 - DNA, 25 bp, Homo sapien
agagcaagacattcagctggctgtc

SEQ ID NO: 33785 - DNA, 25 bp, Homo sapien
aaagtcacacagaaccagtgaattt

SEQ ID NO: 33786 - DNA, 25 bp, Homo sapien
gttgagcatttaagagggagtacat

SEQ ID NO: 33787 - DNA, 25 bp, Homo sapien
agagtgacgtttgagctgaaaatac

SEQ ID NO: 33788 - DNA, 25 bp, Homo sapien
agggagtacatgatggattcagact

SEQ ID NO: 33789 - DNA, 25 bp, Homo sapien
taattagagataggggcatcataag

SEQ ID NO: 33790 - DNA, 25 bp, Homo sapien
gttgtggtagggttaattagagata

SEQ ID NO: 33791 - DNA, 25 bp, Homo sapien
ataaggaaaaggctgttgagcattt

SEQ ID NO: 33792 - DNA, 25 bp, Homo sapien
aagtcaaacatttaggttggatttg

SEQ ID NO: 33793 - DNA, 25 bp, Homo sapien
aaataccactaataatcccaacggc

SEQ ID NO: 33794 - DNA, 25 bp, Homo sapien
atttaggttggatttgttgttgctt

SEQ ID NO: 33795 - DNA, 25 bp, Homo sapien
acttggaagacagaagttgtggtga

SEQ ID NO: 33796 - DNA, 25 bp, Homo sapien
aacttggaagacagaagttgtggtg

SEQ ID NO: 33797 - DNA, 25 bp, Homo sapien
ataccactaataatcccaacggcat

SEQ ID NO: 33798 - DNA, 25 bp, Homo sapien
acatttaggttggatttgttgttgc

SEQ ID NO: 33799 - DNA, 25 bp, Homo sapien
taccactaataatcccaacggcatt

SEQ ID NO: 33800 - DNA, 25 bp, Homo sapien
taataatcccaacggcattagttaa

SEQ ID NO: 33801 - DNA, 25 bp, Homo sapien
atcccaacggcattagttaaaacta

SEQ ID NO: 33802 - DNA, 25 bp, Homo sapien
ctattaatagaacccaagtaaattc

SEQ ID NO: 33803 - DNA, 25 bp, Homo sapien
gttaggataaataccactaataatc

SEQ ID NO: 33804 - DNA, 25 bp, Homo sapien
aacttggaagacagaagttgtggtg

SEQ ID NO: 33805 - DNA, 25 bp, Homo sapien
atcccaacggcattagttaaaacta

SEQ ID NO: 33806 - DNA, 25 bp, Homo sapien
taccactaataatcccaacggcatt

SEQ ID NO: 33807 - DNA, 25 bp, Homo sapien
acttggaagacagaagttgtggtga

SEQ ID NO: 33808 - DNA, 25 bp, Homo sapien
tcttatttagaaataggctgggcac

SEQ ID NO: 33809 - DNA, 25 bp, Homo sapien
aagtcaaacatttaggttggatttg

SEQ ID NO: 33810 - DNA, 25 bp, Homo sapien
aaataccactaataatcccaacggc

SEQ ID NO: 33811 - DNA, 25 bp, Homo sapien
taataatcccaacggcattagttaa

SEQ ID NO: 33812 - DNA, 25 bp, Homo sapien
ctattaatagaacccaagtaaattc

SEQ ID NO: 33813 - DNA, 25 bp, Homo sapien
catttaggttggatttgttgttgct

SEQ ID NO: 33814 - DNA, 25 bp, Homo sapien
gcaacaccggccctggtcgagaacc

SEQ ID NO: 33815 - DNA, 25 bp, Homo sapien
tgaggagcaccctcgtgtctaccca

SEQ ID NO: 33816 - DNA, 25 bp, Homo sapien
gcaacagtagcaactcccgcatcat

SEQ ID NO: 33817 - DNA, 25 bp, Homo sapien
acagtagcaactcccgcatcatgac

SEQ ID NO: 33818 - DNA, 25 bp, Homo sapien
ttcaggtaggatgttgaggagcacc

SEQ ID NO: 33819 - DNA, 25 bp, Homo sapien
tgttgaggagcaccctcgtgtctac

SEQ ID NO: 33820 - DNA, 25 bp, Homo sapien
aacagtagcaactcccgcatcatga

SEQ ID NO: 33821 - DNA, 25 bp, Homo sapien
aggtaggatgttgaggagcaccctc

SEQ ID NO: 33822 - DNA, 25 bp, Homo sapien
gtaggatgttgaggagcaccctcgt

SEQ ID NO: 33823 - DNA, 25 bp, Homo sapien
ttgaggagcaccctcgtgtctaccc

SEQ ID NO: 33824 - DNA, 25 bp, Homo sapien
gatgttgaggagcaccctcgtgtct

SEQ ID NO: 33825 - DNA, 25 bp, Homo sapien
attataactaggactcattaaggtc

SEQ ID NO: 33826 - DNA, 25 bp, Homo sapien
aggactcattaaggtcttaggccac

SEQ ID NO: 33827 - DNA, 25 bp, Homo sapien
tgtcaagaaacacaggggctctttc

SEQ ID NO: 33828 - DNA, 25 bp, Homo sapien
cttcaatatgaggaaatcagctgtc

SEQ ID NO: 33829 - DNA, 25 bp, Homo sapien
aaaggggttgttgctgaccagccca

SEQ ID NO: 33830 - DNA, 25 bp, Homo sapien
cagcccagggtttcttatttggggc

SEQ ID NO: 33831 - DNA, 25 bp, Homo sapien
ctgtcacccggtttgctcgtcctta

SEQ ID NO: 33832 - DNA, 25 bp, Homo sapien
cttaggccacttccatgtcaagaaa

SEQ ID NO: 33833 - DNA, 25 bp, Homo sapien
ggtttgctcgtccttacagacatct

SEQ ID NO: 33834 - DNA, 25 bp, Homo sapien
ttatttggggccggatcattcttcc

SEQ ID NO: 33835 - DNA, 25 bp, Homo sapien
atatgaggaaatcagctgtcacccg

SEQ ID NO: 33836 - DNA, 25 bp, Homo sapien
ttccaccatgggctccaggagttct

SEQ ID NO: 33837 - DNA, 25 bp, Homo sapien
tgccctgtgcctgaaaaaatgacgt

SEQ ID NO: 33838 - DNA, 25 bp, Homo sapien
ttcatcaaagtgtcagtcatctgcc

SEQ ID NO: 33839 - DNA, 25 bp, Homo sapien
tttggcagaaactgttcttgctgtt

SEQ ID NO: 33840 - DNA, 25 bp, Homo sapien
ttacttgtcctagggatgtctttcc

SEQ ID NO: 33841 - DNA, 25 bp, Homo sapien
tatttgggatttggcaaggtgttta

SEQ ID NO: 33842 - DNA, 25 bp, Homo sapien
tccaggaaaggcttcattatgacaa

SEQ ID NO: 33843 - DNA, 25 bp, Homo sapien
acacttataagcaggtaagcattcc

SEQ ID NO: 33844 - DNA, 25 bp, Homo sapien
gtctgggatgacaaagtgtttcttc

SEQ ID NO: 33845 - DNA, 25 bp, Homo sapien
tcatgagcaatgaagcttccaccat

SEQ ID NO: 33846 - DNA, 25 bp, Homo sapien
aattagtaagatgggcttcaagcac

SEQ ID NO: 33847 - DNA, 25 bp, Homo sapien
ttccaagttccctaagcggagcagt

SEQ ID NO: 33848 - DNA, 25 bp, Homo sapien
cagcctgtgccttgccttttcaatt

SEQ ID NO: 33849 - DNA, 25 bp, Homo sapien
atccagaaagaagttcacataaatc

SEQ ID NO: 33850 - DNA, 25 bp, Homo sapien
gtttagtaggttgtagtggtatctc

SEQ ID NO: 33851 - DNA, 25 bp, Homo sapien
gtttcttgccaacacctggttagtc

SEQ ID NO: 33852 - DNA, 25 bp, Homo sapien
taagcggagcagttttgtttcattc

SEQ ID NO: 33853 - DNA, 25 bp, Homo sapien
tccagcagtgtgagagtctcagtgt

SEQ ID NO: 33854 - DNA, 25 bp, Homo sapien
tgtgagagtctcagtgtccctgttt

SEQ ID NO: 33855 - DNA, 25 bp, Homo sapien
tgctggtttgcatgataggtctatt

SEQ ID NO: 33856 - DNA, 25 bp, Homo sapien
ttttgtataatccagaaagaagttc

SEQ ID NO: 33857 - DNA, 25 bp, Homo sapien
caacacctggttagtctgattaatt

SEQ ID NO: 33858 - DNA, 25 bp, Homo sapien
cacccggccgtgacttgaatacttt

SEQ ID NO: 33859 - DNA, 25 bp, Homo sapien
tgtagccgaatttgccacatacctg

SEQ ID NO: 33860 - DNA, 25 bp, Homo sapien
tgactactcgtacctgcggcagctt

SEQ ID NO: 33861 - DNA, 25 bp, Homo sapien
ctatgactacgtgttcgactggaac

SEQ ID NO: 33862 - DNA, 25 bp, Homo sapien
ggctgtaccatatagggagtgtctc

SEQ ID NO: 33863 - DNA, 25 bp, Homo sapien
ggcagagacaccttgagtcgcagtt

SEQ ID NO: 33864 - DNA, 25 bp, Homo sapien
ggaatctgttccatcgccagggctt

SEQ ID NO: 33865 - DNA, 25 bp, Homo sapien
tgtaagtcgcactgccagcacgttc

SEQ ID NO: 33866 - DNA, 25 bp, Homo sapien
tcgcagttgggtttcatgagttagc

SEQ ID NO: 33867 - DNA, 25 bp, Homo sapien
ctcaaggcttcaggtcttagaaatc

SEQ ID NO: 33868 - DNA, 25 bp, Homo sapien
gcgttttgacgacaagcctgactac

SEQ ID NO: 33869 - DNA, 25 bp, Homo sapien
taggccaaacattttgcatagcgca

SEQ ID NO: 33870 - DNA, 25 bp, Homo sapien
agtgaagtgtgcaagaatgcccttt

SEQ ID NO: 33871 - DNA, 25 bp, Homo sapien
ttgaactcctcgacttacacgattc

SEQ ID NO: 33872 - DNA, 25 bp, Homo sapien
caaagtgctgggcatagccattatg

SEQ ID NO: 33873 - DNA, 25 bp, Homo sapien
tagttccaggctcctcctactcagg

SEQ ID NO: 33874 - DNA, 25 bp, Homo sapien
aagtagaattgctaggccaaacatt

SEQ ID NO: 33875 - DNA, 25 bp, Homo sapien
ttaatccaggtgagtggcatgcacc

SEQ ID NO: 33876 - DNA, 25 bp, Homo sapien
agtggcatgcaccagcttctcagga

SEQ ID NO: 33877 - DNA, 25 bp, Homo sapien
tgcatagcgcattgacagatttttc

SEQ ID NO: 33878 - DNA, 25 bp, Homo sapien
aataccagtttaagccaggcacatt

SEQ ID NO: 33879 - DNA, 25 bp, Homo sapien
cccactccctgaaaagtgataaaaa

SEQ ID NO: 33880 - DNA, 25 bp, Homo sapien
cagacctgaactgagtgaaactggt

SEQ ID NO: 33881 - DNA, 25 bp, Homo sapien
cctttctgccgtgggaggagtctcc

SEQ ID NO: 33882 - DNA, 25 bp, Homo sapien
ggtctggctacctggcaactctgca

SEQ ID NO: 33883 - DNA, 25 bp, Homo sapien
aatggccactcagaggcacaggact

SEQ ID NO: 33884 - DNA, 25 bp, Homo sapien
aactggtggcctcacgtggtgcctt

SEQ ID NO: 33885 - DNA, 25 bp, Homo sapien
ctctccaagggtcaatggccactca

SEQ ID NO: 33886 - DNA, 25 bp, Homo sapien
ttggaagagggtccatagctttcat

SEQ ID NO: 33887 - DNA, 25 bp, Homo sapien
actgtgtcaatacccgctgtgggaa

SEQ ID NO: 33888 - DNA, 25 bp, Homo sapien
ttacaactctgaaggtgcccagctc

SEQ ID NO: 33889 - DNA, 25 bp, Homo sapien
gtgcccagctgtggatgtgcatttt

SEQ ID NO: 33890 - DNA, 25 bp, Homo sapien
gctcttgagcacagctggtgacact

SEQ ID NO: 33891 - DNA, 25 bp, Homo sapien
tgtcatgcatcatcacagaatcaat

SEQ ID NO: 33892 - DNA, 25 bp, Homo sapien
catcacagaatcaatgagagctccc

SEQ ID NO: 33893 - DNA, 25 bp, Homo sapien
agacagcggacaaccagggtagctt

SEQ ID NO: 33894 - DNA, 25 bp, Homo sapien
aatgctcttctgtcatgcatcatca

SEQ ID NO: 33895 - DNA, 25 bp, Homo sapien
atgggtccacgcagggagatcccac

SEQ ID NO: 33896 - DNA, 25 bp, Homo sapien
gcgtatacgagtgtccacgtccgga

SEQ ID NO: 33897 - DNA, 25 bp, Homo sapien
agcggacaaccagggtagcttccca

SEQ ID NO: 33898 - DNA, 25 bp, Homo sapien
actcaagcctgcctggcaacagagc

SEQ ID NO: 33899 - DNA, 25 bp, Homo sapien
tgggcgtatacgagtgtccacgtcc

SEQ ID NO: 33900 - DNA, 25 bp, Homo sapien
tgtccacgtccggagggccgttcaa

SEQ ID NO: 33901 - DNA, 25 bp, Homo sapien
agatcccacgcagggtgggcgtata

SEQ ID NO: 33902 - DNA, 25 bp, Homo sapien
aatgcagagtggcagaaactttatc

SEQ ID NO: 33903 - DNA, 25 bp, Homo sapien
tgaagagatgactgtggcacttagc

SEQ ID NO: 33904 - DNA, 25 bp, Homo sapien
gtgaggcccacccagtagacacttc

SEQ ID NO: 33905 - DNA, 25 bp, Homo sapien
tggaaccttctgtgaggcccaccca

SEQ ID NO: 33906 - DNA, 25 bp, Homo sapien
gcatgagaaggtccgtgcttgaaaa

SEQ ID NO: 33907 - DNA, 25 bp, Homo sapien
ctgtggcacttagcagggaattcct

SEQ ID NO: 33908 - DNA, 25 bp, Homo sapien
gaaaccgagtggtgaagagatgact

SEQ ID NO: 33909 - DNA, 25 bp, Homo sapien
gcagagtggcagaaactttatcgga

SEQ ID NO: 33910 - DNA, 25 bp, Homo sapien
gtccgtgcttgaaaaaggcctaaca

SEQ ID NO: 33911 - DNA, 25 bp, Homo sapien
agagactgagcatgagaaggtccgt

SEQ ID NO: 33912 - DNA, 25 bp, Homo sapien
tgaaaaaggcctaacagtgggatct

SEQ ID NO: 33913 - DNA, 25 bp, Homo sapien
tccagctgatgaaataacgttgcat

SEQ ID NO: 33914 - DNA, 25 bp, Homo sapien
cagggatacactgtactgggtactg

SEQ ID NO: 33915 - DNA, 25 bp, Homo sapien
atctattgagatgaccatgttgttt

SEQ ID NO: 33916 - DNA, 25 bp, Homo sapien
ttccagccgtccacaatctattgag

SEQ ID NO: 33917 - DNA, 25 bp, Homo sapien
ctggtgaagttacagagaaaaagga

SEQ ID NO: 33918 - DNA, 25 bp, Homo sapien
ttcagtctgttgcactaatcatttc

SEQ ID NO: 33919 - DNA, 25 bp, Homo sapien
actgggtactggtgtacattcctgt

SEQ ID NO: 33920 - DNA, 25 bp, Homo sapien
cagcccatggctattacaaagtcaa

SEQ ID NO: 33921 - DNA, 25 bp, Homo sapien
tgcattccagggatacactgtactg

SEQ ID NO: 33922 - DNA, 25 bp, Homo sapien
aaaacagattctggtgaagttacag

SEQ ID NO: 33923 - DNA, 25 bp, Homo sapien
actgttggtaggagtattaggatta

SEQ ID NO: 33924 - DNA, 25 bp, Homo sapien
tacttcacaaaatccatacaacctg

SEQ ID NO: 33925 - DNA, 25 bp, Homo sapien
aaaatccatacaacctgagaacgcc

SEQ ID NO: 33926 - DNA, 25 bp, Homo sapien
cattaaggaattaagacacctagga

SEQ ID NO: 33927 - DNA, 25 bp, Homo sapien
aaactatgtcaatgacgacagcggg

SEQ ID NO: 33928 - DNA, 25 bp, Homo sapien
tagaaaacgcatctttggagacgtc

SEQ ID NO: 33929 - DNA, 25 bp, Homo sapien
gagaacgcctcgactcattaaggaa

SEQ ID NO: 33930 - DNA, 25 bp, Homo sapien
agacgtcagtagcattctccattac

SEQ ID NO: 33931 - DNA, 25 bp, Homo sapien
atctttggagacgtcagtagcattc

SEQ ID NO: 33932 - DNA, 25 bp, Homo sapien
cggggtgatttccttagaaaacgca

SEQ ID NO: 33933 - DNA, 25 bp, Homo sapien
aagacacctaggatttagtccagac

SEQ ID NO: 33934 - DNA, 25 bp, Homo sapien
atacaacctgagaacgcctcgactc

SEQ ID NO: 33935 - DNA, 25 bp, Homo sapien
aatatgtacatggttattcaaaagg

SEQ ID NO: 33936 - DNA, 25 bp, Homo sapien
aaatctgtgatctgactgactagca

SEQ ID NO: 33937 - DNA, 25 bp, Homo sapien
tacatagggctataaaatactttta

SEQ ID NO: 33938 - DNA, 25 bp, Homo sapien
aaagacgaagactactgcctcagat

SEQ ID NO: 33939 - DNA, 25 bp, Homo sapien
tgcctcagatgtccctctcaataag

SEQ ID NO: 33940 - DNA, 25 bp, Homo sapien
ttaaaaccaaagcaccaatctgccc

SEQ ID NO: 33941 - DNA, 25 bp, Homo sapien
aattaaagacgaagactactgcctc

SEQ ID NO: 33942 - DNA, 25 bp, Homo sapien
tcacattcaagatgaatatgcaata

SEQ ID NO: 33943 - DNA, 25 bp, Homo sapien
caaaaattaaagacgaagactactg

SEQ ID NO: 33944 - DNA, 25 bp, Homo sapien
gtgatctgactgactagcattattc

SEQ ID NO: 33945 - DNA, 25 bp, Homo sapien
caacagtaaattcacattcaagatg

SEQ ID NO: 33946 - DNA, 25 bp, Homo sapien
acatggaaaaaagtctgacaacacc

SEQ ID NO: 33947 - DNA, 25 bp, Homo sapien
cctccataaggcagatgtgctgagc

SEQ ID NO: 33948 - DNA, 25 bp, Homo sapien
tgtctgaagtgttcaagtgggagca

SEQ ID NO: 33949 - DNA, 25 bp, Homo sapien
ttgtgggatctacaggatgagattt

SEQ ID NO: 33950 - DNA, 25 bp, Homo sapien
tcccagagaaatgcacaggtgccac

SEQ ID NO: 33951 - DNA, 25 bp, Homo sapien
aaaggtaagtaggagcaagtcacat

SEQ ID NO: 33952 - DNA, 25 bp, Homo sapien
gggtggtaccactgtatgtaatggc

SEQ ID NO: 33953 - DNA, 25 bp, Homo sapien
gaacagcatgggaaatacccatctc

SEQ ID NO: 33954 - DNA, 25 bp, Homo sapien
ctaagagagagcttgtgtcaggaaa

SEQ ID NO: 33955 - DNA, 25 bp, Homo sapien
ccatatcaggcagcaagggtggtac

SEQ ID NO: 33956 - DNA, 25 bp, Homo sapien
tgtgctgagctgaagacctgctata

SEQ ID NO: 33957 - DNA, 25 bp, Homo sapien
tgtgtggcgtcagctgatccagcaa

SEQ ID NO: 33958 - DNA, 25 bp, Homo sapien
gctggttaagttagctctctttcac

SEQ ID NO: 33959 - DNA, 25 bp, Homo sapien
caagtgcggggtctgcaacatgtct

SEQ ID NO: 33960 - DNA, 25 bp, Homo sapien
aacaagatggagctggttaagttag

SEQ ID NO: 33961 - DNA, 25 bp, Homo sapien
aatcagtctcctcgagaattcgggg

SEQ ID NO: 33962 - DNA, 25 bp, Homo sapien
ctcctcgagaattcggggagcagaa

SEQ ID NO: 33963 - DNA, 25 bp, Homo sapien
agtttatccatctgtgtggcgtcag

SEQ ID NO: 33964 - DNA, 25 bp, Homo sapien
tcagctgatccagcaagtgcggggt

SEQ ID NO: 33965 - DNA, 25 bp, Homo sapien
atccatctgtgtggcgtcagctgat

SEQ ID NO: 33966 - DNA, 25 bp, Homo sapien
gcggggtctgcaacatgtctcaagc

SEQ ID NO: 33967 - DNA, 25 bp, Homo sapien
cttgcgcttcgtcagttcccgggtg

SEQ ID NO: 33968 - DNA, 25 bp, Homo sapien
acttaagaaacatgtcagagaccac

SEQ ID NO: 33969 - DNA, 25 bp, Homo sapien
ctttaaggtgtcctatgatgaggaa

SEQ ID NO: 33970 - DNA, 25 bp, Homo sapien
tcttttgtgagatgagggttttgct

SEQ ID NO: 33971 - DNA, 25 bp, Homo sapien
ctatgatgaggaaaagttctaagct

SEQ ID NO: 33972 - DNA, 25 bp, Homo sapien
tttagcgtagctgaatttattagtc

SEQ ID NO: 33973 - DNA, 25 bp, Homo sapien
cagagaccactcatcctgaccaata

SEQ ID NO: 33974 - DNA, 25 bp, Homo sapien
ccaaccttccttgaagttgcagtgg

SEQ ID NO: 33975 - DNA, 25 bp, Homo sapien
agaaaagagttgtaaattaataagc

SEQ ID NO: 33976 - DNA, 25 bp, Homo sapien
ttggggaaaatgtagtcttgagtat

SEQ ID NO: 33977 - DNA, 25 bp, Homo sapien
aagagtaatgaaaatgccatatacc

SEQ ID NO: 33978 - DNA, 25 bp, Homo sapien
tgaaaatgccatataccaagccttg

SEQ ID NO: 33979 - DNA, 25 bp, Homo sapien
actagttctgagacttgggcaagtt

SEQ ID NO: 33980 - DNA, 25 bp, Homo sapien
accaagtgctcattaagtggcaagc

SEQ ID NO: 33981 - DNA, 25 bp, Homo sapien
gacagccagggattgaattctcatt

SEQ ID NO: 33982 - DNA, 25 bp, Homo sapien
ttcactcatgggtaagatggggata

SEQ ID NO: 33983 - DNA, 25 bp, Homo sapien
gagatgctgcacaggccctgactgc

SEQ ID NO: 33984 - DNA, 25 bp, Homo sapien
ttgtgtagtgttactggagccagac

SEQ ID NO: 33985 - DNA, 25 bp, Homo sapien
catagtatacaaaaaggaacacggc

SEQ ID NO: 33986 - DNA, 25 bp, Homo sapien
aagtggcaagcaccatttgtgtagt

SEQ ID NO: 33987 - DNA, 25 bp, Homo sapien
tcccagtcagagatcccatctaata

SEQ ID NO: 33988 - DNA, 25 bp, Homo sapien
ctggagaactaactcagaggtcgac

SEQ ID NO: 33989 - DNA, 25 bp, Homo sapien
tgactgccctgatcatgctcaccat

SEQ ID NO: 33990 - DNA, 25 bp, Homo sapien
gtgcaccatggcacccggtctgttt

SEQ ID NO: 33991 - DNA, 25 bp, Homo sapien
tggtgttcaaaggccttcgccatcg

SEQ ID NO: 33992 - DNA, 25 bp, Homo sapien
cgtgcaccatggcacccggtctgtt

SEQ ID NO: 33993 - DNA, 25 bp, Homo sapien
tgcaccatggcacccggtctgtttt

SEQ ID NO: 33994 - DNA, 25 bp, Homo sapien
agctgaagtgatccgctcactttgg

SEQ ID NO: 33995 - DNA, 25 bp, Homo sapien
gagctgaagtgatccgctcactttg

SEQ ID NO: 33996 - DNA, 25 bp, Homo sapien
ggcgtgcaccatggcacccggtctg

SEQ ID NO: 33997 - DNA, 25 bp, Homo sapien
gtgttcaaaggccttcgccatcgcc

SEQ ID NO: 33998 - DNA, 25 bp, Homo sapien
ggtgttcaaaggccttcgccatcgc

SEQ ID NO: 33999 - DNA, 25 bp, Homo sapien
ctggtgttcaaaggccttcgccatc

SEQ ID NO: 34000 - DNA, 25 bp, Homo sapien
gcgtgcaccatggcacccggtctgt

SEQ ID NO: 34001 - DNA, 25 bp, Homo sapien
gctgcggcaacaatgggcagaagct

SEQ ID NO: 34002 - DNA, 25 bp, Homo sapien
ctgcagaagaaatccgggcgcctca

SEQ ID NO: 34003 - DNA, 25 bp, Homo sapien
gtcaccaatctctaaaaaccaagcg

SEQ ID NO: 34004 - DNA, 25 bp, Homo sapien
ttcatgcataaatctcacttcccac

SEQ ID NO: 34005 - DNA, 25 bp, Homo sapien
tgcggcctcttcacagctgtcctgc

SEQ ID NO: 34006 - DNA, 25 bp, Homo sapien
ccctgctagacatcctgtcttggct

SEQ ID NO: 34007 - DNA, 25 bp, Homo sapien
tgacgacatctgtcacccgtgctca

SEQ ID NO: 34008 - DNA, 25 bp, Homo sapien
ttctcttgagacgtcggaagctctg

SEQ ID NO: 34009 - DNA, 25 bp, Homo sapien
aaccaagcggtttctttcatgcata

SEQ ID NO: 34010 - DNA, 25 bp, Homo sapien
tcttggctcccttctgcctgcagaa

SEQ ID NO: 34011 - DNA, 25 bp, Homo sapien
ttctgcctgcagaagaaatccgggc

SEQ ID NO: 34012 - DNA, 25 bp, Homo sapien
gaaaataaagtggaagcagaattac

SEQ ID NO: 34013 - DNA, 25 bp, Homo sapien
ggaagcagaattactttaatcaact

SEQ ID NO: 34014 - DNA, 25 bp, Homo sapien
actcctgggatcaaagaatagtccc

SEQ ID NO: 34015 - DNA, 25 bp, Homo sapien
gttgttgttttagagatggtctcaa

SEQ ID NO: 34016 - DNA, 25 bp, Homo sapien
tttaatcaactaacaagcaataatg

SEQ ID NO: 34017 - DNA, 25 bp, Homo sapien
caactaacaagcaataatgaaacaa

SEQ ID NO: 34018 - DNA, 25 bp, Homo sapien
ttattcagtgtagcaattagtgtct

SEQ ID NO: 34019 - DNA, 25 bp, Homo sapien
cagtgtagcaattagtgtctttgaa

SEQ ID NO: 34020 - DNA, 25 bp, Homo sapien
gggatcaaagaatagtcccacctca

SEQ ID NO: 34021 - DNA, 25 bp, Homo sapien
ttgaaaataaagtggaagcagaatt

SEQ ID NO: 34022 - DNA, 25 bp, Homo sapien
tgcggtggtgcgatcataccccact

SEQ ID NO: 34023 - DNA, 25 bp, Homo sapien
ttttaggtgaagtctctcagggccc

SEQ ID NO: 34024 - DNA, 25 bp, Homo sapien
ttctgggcaaagcatccgtgctctc

SEQ ID NO: 34025 - DNA, 25 bp, Homo sapien
ataaaacaggaaagaccagtgggtc

SEQ ID NO: 34026 - DNA, 25 bp, Homo sapien
aagccatttggccactgaagtctag

SEQ ID NO: 34027 - DNA, 25 bp, Homo sapien
tggccagtcccaagctgtgctgata

SEQ ID NO: 34028 - DNA, 25 bp, Homo sapien
ctacatacacacacgggtggggaat

SEQ ID NO: 34029 - DNA, 25 bp, Homo sapien
acagaccttcctcggttgcagagat

SEQ ID NO: 34030 - DNA, 25 bp, Homo sapien
agaccagtgggtctcctgaagccat

SEQ ID NO: 34031 - DNA, 25 bp, Homo sapien
ttgcagagattctgggcaaagcatc

SEQ ID NO: 34032 - DNA, 25 bp, Homo sapien
ctcatgagattatcctggggagatt

SEQ ID NO: 34033 - DNA, 25 bp, Homo sapien
gtctacagagacacctacatacaca

SEQ ID NO: 34034 - DNA, 25 bp, Homo sapien
cagccatataaacagcacctggcac

SEQ ID NO: 34035 - DNA, 25 bp, Homo sapien
caccctgataagctcactgcaagac

SEQ ID NO: 34036 - DNA, 25 bp, Homo sapien
tgcaagacccatctacagaggcatt

SEQ ID NO: 34037 - DNA, 25 bp, Homo sapien
tacccttgaaaacctgaacagagcg

SEQ ID NO: 34038 - DNA, 25 bp, Homo sapien
tcaccagtctgtaaggtccttgaag

SEQ ID NO: 34039 - DNA, 25 bp, Homo sapien
cagggactgtgttttattcatcatt

SEQ ID NO: 34040 - DNA, 25 bp, Homo sapien
gcggggagaatgcatatacctacaa

SEQ ID NO: 34041 - DNA, 25 bp, Homo sapien
acagcagcaccctgataagctcact

SEQ ID NO: 34042 - DNA, 25 bp, Homo sapien
cagaggcatttgaccacactgtctc

SEQ ID NO: 34043 - DNA, 25 bp, Homo sapien
tattcatcattgcacacccagccat

SEQ ID NO: 34044 - DNA, 25 bp, Homo sapien
ctctaggccaggctttctcagcttt

SEQ ID NO: 34045 - DNA, 25 bp, Homo sapien
gaggatctatagagagctcgtgaca

SEQ ID NO: 34046 - DNA, 25 bp, Homo sapien
agctgttaccagcaggtctttgttc

SEQ ID NO: 34047 - DNA, 25 bp, Homo sapien
cagttgggcttatccagctgttacc

SEQ ID NO: 34048 - DNA, 25 bp, Homo sapien
tgttagttgtttgccacacacaggc

SEQ ID NO: 34049 - DNA, 25 bp, Homo sapien
aggcctaaggagtgttagttgtttg

SEQ ID NO: 34050 - DNA, 25 bp, Homo sapien
cagctacaaagcagttgggcttatc

SEQ ID NO: 34051 - DNA, 25 bp, Homo sapien
tagagagctcgtgacatttctgacc

SEQ ID NO: 34052 - DNA, 25 bp, Homo sapien
aaatatattattgccagtatcaggc

SEQ ID NO: 34053 - DNA, 25 bp, Homo sapien
tgctcccaagatggcggcaagactt

SEQ ID NO: 34054 - DNA, 25 bp, Homo sapien
tgatgaaacaacaacaacccagatg

SEQ ID NO: 34055 - DNA, 25 bp, Homo sapien
ggccactcccaagatgggatgggct

SEQ ID NO: 34056 - DNA, 25 bp, Homo sapien
tgattgtatgcactggtcaaaattg

SEQ ID NO: 34057 - DNA, 25 bp, Homo sapien
gcatactttataaagggcacattgt

SEQ ID NO: 34058 - DNA, 25 bp, Homo sapien
tcattggctgcctattacttctagc

SEQ ID NO: 34059 - DNA, 25 bp, Homo sapien
aaagggcacattgtactgtatacta

SEQ ID NO: 34060 - DNA, 25 bp, Homo sapien
ctttataaagggcacattgtactgt

SEQ ID NO: 34061 - DNA, 25 bp, Homo sapien
ttctggactctgctttaactctctt

SEQ ID NO: 34062 - DNA, 25 bp, Homo sapien
ttaattgcattttctggactctgct

SEQ ID NO: 34063 - DNA, 25 bp, Homo sapien
ggtcaaaattgatagatctgcatac

SEQ ID NO: 34064 - DNA, 25 bp, Homo sapien
acgactggcccgacaactttttatc

SEQ ID NO: 34065 - DNA, 25 bp, Homo sapien
tgacatttttcattggctgcctatt

SEQ ID NO: 34066 - DNA, 25 bp, Homo sapien
actctcttagctaatcttgtatcac

SEQ ID NO: 34067 - DNA, 25 bp, Homo sapien
ctgagtaactgagaacacaggcgtg

SEQ ID NO: 34068 - DNA, 25 bp, Homo sapien
ttcccgagtagctggtgccaccatg

SEQ ID NO: 34069 - DNA, 25 bp, Homo sapien
gtaactgagaacacaggcgtgtgct

SEQ ID NO: 34070 - DNA, 25 bp, Homo sapien
cacacctagctaacttttgtgggtt

SEQ ID NO: 34071 - DNA, 25 bp, Homo sapien
gcagcgtctacctcctgcgctcaag

SEQ ID NO: 34072 - DNA, 25 bp, Homo sapien
tgcagcgtctacctcctgcgctcaa

SEQ ID NO: 34073 - DNA, 25 bp, Homo sapien
aactgagaacacaggcgtgtgctac

SEQ ID NO: 34074 - DNA, 25 bp, Homo sapien
cctgagtaactgagaacacaggcgt

SEQ ID NO: 34075 - DNA, 25 bp, Homo sapien
taactgagaacacaggcgtgtgcta

SEQ ID NO: 34076 - DNA, 25 bp, Homo sapien
ctagctaacttttgtgggttttgta

SEQ ID NO: 34077 - DNA, 25 bp, Homo sapien
tcacacccagccatattaccatttt

SEQ ID NO: 34078 - DNA, 25 bp, Homo sapien
catgtgggaaactatgacaacattc

SEQ ID NO: 34079 - DNA, 25 bp, Homo sapien
tcaggatgggatgtgttataatgtt

SEQ ID NO: 34080 - DNA, 25 bp, Homo sapien
ttgtacagaattccagtagtgacac

SEQ ID NO: 34081 - DNA, 25 bp, Homo sapien
ccagtagtgacacaaaaagatgcaa

SEQ ID NO: 34082 - DNA, 25 bp, Homo sapien
ttctttgttcaggatgggatgtgtt

SEQ ID NO: 34083 - DNA, 25 bp, Homo sapien
tccttggataggtttgtcaataatt

SEQ ID NO: 34084 - DNA, 25 bp, Homo sapien
tttggctcctaaaccacgtcattta

SEQ ID NO: 34085 - DNA, 25 bp, Homo sapien
cacgtcatttagctccttggatagg

SEQ ID NO: 34086 - DNA, 25 bp, Homo sapien
atgaagtacaattttctggatccta

SEQ ID NO: 34087 - DNA, 25 bp, Homo sapien
tggatcctatatccagaaggccatg

SEQ ID NO: 34088 - DNA, 25 bp, Homo sapien
atgtttctagagacgttttggctcc

SEQ ID NO: 34089 - DNA, 25 bp, Homo sapien
cggtcaaggcgcagctggaaccgct

SEQ ID NO: 34090 - DNA, 25 bp, Homo sapien
tagcggaaatgcacggaggccaacc

SEQ ID NO: 34091 - DNA, 25 bp, Homo sapien
tggaaccgctgcaaaaggcctccgg

SEQ ID NO: 34092 - DNA, 25 bp, Homo sapien
cccacctagcggaaatgcacggagg

SEQ ID NO: 34093 - DNA, 25 bp, Homo sapien
ctcacaggaagaaactgggacgctg

SEQ ID NO: 34094 - DNA, 25 bp, Homo sapien
tgaccgagacccagaggtccgcttc

SEQ ID NO: 34095 - DNA, 25 bp, Homo sapien
ttctcacaccagagccgtgaccgag

SEQ ID NO: 34096 - DNA, 25 bp, Homo sapien
ctgcaccgtgcgtaccgggaacggt

SEQ ID NO: 34097 - DNA, 25 bp, Homo sapien
tgcggacgcggaactggccagaccc

SEQ ID NO: 34098 - DNA, 25 bp, Homo sapien
taccgggaacggtcaaggcgcagct

SEQ ID NO: 34099 - DNA, 25 bp, Homo sapien
tgtttattctcacaccagagccgtg

SEQ ID NO: 34100 - DNA, 25 bp, Homo sapien
cacctaccgggctagagacccagga

SEQ ID NO: 34101 - DNA, 25 bp, Homo sapien
ccagaagccctgtctccatgaacgg

SEQ ID NO: 34102 - DNA, 25 bp, Homo sapien
gttcaatgccctttggatgtcccat

SEQ ID NO: 34103 - DNA, 25 bp, Homo sapien
atgtcccatgcaaattggagctcac

SEQ ID NO: 34104 - DNA, 25 bp, Homo sapien
tgtcatccagagctgtcagttcttc

SEQ ID NO: 34105 - DNA, 25 bp, Homo sapien
atatttagtggagacggcgtttcat

SEQ ID NO: 34106 - DNA, 25 bp, Homo sapien
aggctgaagtcccaagctccagacc

SEQ ID NO: 34107 - DNA, 25 bp, Homo sapien
atatcagtggtgactttctgcaagc

SEQ ID NO: 34108 - DNA, 25 bp, Homo sapien
tagagacccaggagccggccttgta

SEQ ID NO: 34109 - DNA, 25 bp, Homo sapien
accgcacccggctataggttccatt

SEQ ID NO: 34110 - DNA, 25 bp, Homo sapien
tttctgcaagctaggctgaagtccc

SEQ ID NO: 34111 - DNA, 25 bp, Homo sapien
ttccatacgataggtgaggacatct

SEQ ID NO: 34112 - DNA, 25 bp, Homo sapien
ttgtaacccggcatccagaaccttc

SEQ ID NO: 34113 - DNA, 25 bp, Homo sapien
agagtctgcacttaacgctaccgct

SEQ ID NO: 34114 - DNA, 25 bp, Homo sapien
gtgcgactcaaatgcagataagggt

SEQ ID NO: 34115 - DNA, 25 bp, Homo sapien
tagctaacagttatggagcacttgg

SEQ ID NO: 34116 - DNA, 25 bp, Homo sapien
ggggccttgcctgggactacaactc

SEQ ID NO: 34117 - DNA, 25 bp, Homo sapien
cctcaaactaacactggaaggcagt

SEQ ID NO: 34118 - DNA, 25 bp, Homo sapien
taagcaggtgatagaataggattca

SEQ ID NO: 34119 - DNA, 25 bp, Homo sapien
tggccgcgcgagtcagttgtaaccc

SEQ ID NO: 34120 - DNA, 25 bp, Homo sapien
aagtggcttcattccagagtctgca

SEQ ID NO: 34121 - DNA, 25 bp, Homo sapien
agaaccttctccgtaggggccttgc

SEQ ID NO: 34122 - DNA, 25 bp, Homo sapien
taatcctgatgaaactaaaagcttt

SEQ ID NO: 34123 - DNA, 25 bp, Homo sapien
aaattctaaccacagacacagagag

SEQ ID NO: 34124 - DNA, 25 bp, Homo sapien
ttttccattgcagtagattgcctca

SEQ ID NO: 34125 - DNA, 25 bp, Homo sapien
acatgcaaatgtacatctgtgaaat

SEQ ID NO: 34126 - DNA, 25 bp, Homo sapien
ctttaagcagagcattgttattttc

SEQ ID NO: 34127 - DNA, 25 bp, Homo sapien
cttggcaaaataattgaagttagat

SEQ ID NO: 34128 - DNA, 25 bp, Homo sapien
cacctggaaatgaggtcaaacagga

SEQ ID NO: 34129 - DNA, 25 bp, Homo sapien
attgcctcataaggcccacagtgaa

SEQ ID NO: 34130 - DNA, 25 bp, Homo sapien
gaggtcaaacaggaagccatttgtt

SEQ ID NO: 34131 - DNA, 25 bp, Homo sapien
tcctagcaaagttcaacaagtacat

SEQ ID NO: 34132 - DNA, 25 bp, Homo sapien
aattgagtccttcctagcaaagttc

SEQ ID NO: 34133 - DNA, 25 bp, Homo sapien
gttttgccatgtcaattccatttcc

SEQ ID NO: 34134 - DNA, 25 bp, Homo sapien
cagttcatagggagcatgagcagaa

SEQ ID NO: 34135 - DNA, 25 bp, Homo sapien
atttccaaatgcctccctaggagga

SEQ ID NO: 34136 - DNA, 25 bp, Homo sapien
tacctggctctatgcttaaataggc

SEQ ID NO: 34137 - DNA, 25 bp, Homo sapien
tatgcttaaataggctgacctttac

SEQ ID NO: 34138 - DNA, 25 bp, Homo sapien
gatggaagtaaagcatccttggggt

SEQ ID NO: 34139 - DNA, 25 bp, Homo sapien
catagggagcatgagcagaaaacca

SEQ ID NO: 34140 - DNA, 25 bp, Homo sapien
aggagccattgggttcagcccatct

SEQ ID NO: 34141 - DNA, 25 bp, Homo sapien
aggaggatggttacagttacagttt

SEQ ID NO: 34142 - DNA, 25 bp, Homo sapien
cagaaaaccaggagatggaagtaaa

SEQ ID NO: 34143 - DNA, 25 bp, Homo sapien
ctccctaggaggatggttacagtta

SEQ ID NO: 34144 - DNA, 25 bp, Homo sapien
tgcacggtcactccagaaggcaaat

SEQ ID NO: 34145 - DNA, 25 bp, Homo sapien
ctgtgtgctgcagaaatctatctcc

SEQ ID NO: 34146 - DNA, 25 bp, Homo sapien
tagccatataacatagaagccacag

SEQ ID NO: 34147 - DNA, 25 bp, Homo sapien
agaaggcaaataattactggtatgc

SEQ ID NO: 34148 - DNA, 25 bp, Homo sapien
tataacatagaagccacagcacagc

SEQ ID NO: 34149 - DNA, 25 bp, Homo sapien
tctgcaaggccagatcctgtgcgca

SEQ ID NO: 34150 - DNA, 25 bp, Homo sapien
tgccaggttagggtgaaaatcataa

SEQ ID NO: 34151 - DNA, 25 bp, Homo sapien
atgttaacataagaatggaaaagaa

SEQ ID NO: 34152 - DNA, 25 bp, Homo sapien
atcctgtgcgcagtgctcctgtgtg

SEQ ID NO: 34153 - DNA, 25 bp, Homo sapien
tatctccaggtccatgttagccata

SEQ ID NO: 34154 - DNA, 25 bp, Homo sapien
actggtatgctattctctgcaaggc

SEQ ID NO: 34155 - DNA, 25 bp, Homo sapien
agtaggtgagctataagcatgcact

SEQ ID NO: 34156 - DNA, 25 bp, Homo sapien
tcccaagtaggtgagctataagcat

SEQ ID NO: 34157 - DNA, 25 bp, Homo sapien
tgagctataagcatgcactatcata

SEQ ID NO: 34158 - DNA, 25 bp, Homo sapien
tctcccaagtaggtgagctataagc

SEQ ID NO: 34159 - DNA, 25 bp, Homo sapien
tctgatcacaactcccagggaagag

SEQ ID NO: 34160 - DNA, 25 bp, Homo sapien
ggctcctatttcttccaggctggag

SEQ ID NO: 34161 - DNA, 25 bp, Homo sapien
tacaagatcttagctcactatagcc

SEQ ID NO: 34162 - DNA, 25 bp, Homo sapien
atcacaactcccagggaagagtcag

SEQ ID NO: 34163 - DNA, 25 bp, Homo sapien
atttctgatcacaactcccagggaa

SEQ ID NO: 34164 - DNA, 25 bp, Homo sapien
acaactcccagggaagagtcagcca

SEQ ID NO: 34165 - DNA, 25 bp, Homo sapien
aggtgagctataagcatgcactatc

SEQ ID NO: 34166 - DNA, 25 bp, Homo sapien
gtgctttggtatggatattgtcttc

SEQ ID NO: 34167 - DNA, 25 bp, Homo sapien
actattgtcaccctatattgcactt

SEQ ID NO: 34168 - DNA, 25 bp, Homo sapien
ttcctaatttgagttgctgcacttt

SEQ ID NO: 34169 - DNA, 25 bp, Homo sapien
cagctaagaatactattaaaccctc

SEQ ID NO: 34170 - DNA, 25 bp, Homo sapien
cctctccgagattccaattataagt

SEQ ID NO: 34171 - DNA, 25 bp, Homo sapien
ctttcaggattcatgtgataattta

SEQ ID NO: 34172 - DNA, 25 bp, Homo sapien
taacagtgtcccatttgtctcttac

SEQ ID NO: 34173 - DNA, 25 bp, Homo sapien
agattattgtaaactattgtcaccc

SEQ ID NO: 34174 - DNA, 25 bp, Homo sapien
acagatacacatactttcaggattc

SEQ ID NO: 34175 - DNA, 25 bp, Homo sapien
tttaattgatgcataacagatacac

SEQ ID NO: 34176 - DNA, 25 bp, Homo sapien
attttagacttttaacagtgtccca

SEQ ID NO: 34177 - DNA, 25 bp, Homo sapien
catgagaatcaccaagcgcagtggc

SEQ ID NO: 34178 - DNA, 25 bp, Homo sapien
gcaaatcaagcctacaatgagctat

SEQ ID NO: 34179 - DNA, 25 bp, Homo sapien
tgtcgcacctgccatgagaatcacc

SEQ ID NO: 34180 - DNA, 25 bp, Homo sapien
agcaatgcacagcatgggaaaatat

SEQ ID NO: 34181 - DNA, 25 bp, Homo sapien
tattgcaaagcaatgcacagcatgg

SEQ ID NO: 34182 - DNA, 25 bp, Homo sapien
atactcgagagaactaattattagc

SEQ ID NO: 34183 - DNA, 25 bp, Homo sapien
agatggtgtaaaatggccaaaaagc

SEQ ID NO: 34184 - DNA, 25 bp, Homo sapien
acatccattaggatagccactatca

SEQ ID NO: 34185 - DNA, 25 bp, Homo sapien
tgggcaagtacaatgtcgcacctgc

SEQ ID NO: 34186 - DNA, 25 bp, Homo sapien
tggagtgattagaaacctagtaagc

SEQ ID NO: 34187 - DNA, 25 bp, Homo sapien
ctagtaagctattggtgggcaagta

SEQ ID NO: 34188 - DNA, 25 bp, Homo sapien
caacatggagagaccattttagtct

SEQ ID NO: 34189 - DNA, 25 bp, Homo sapien
aattaaatgtacattggctgggtgt

SEQ ID NO: 34190 - DNA, 25 bp, Homo sapien
aaaatagtatagatagcacttcgat

SEQ ID NO: 34191 - DNA, 25 bp, Homo sapien
tctattgcactttgataattagtac

SEQ ID NO: 34192 - DNA, 25 bp, Homo sapien
ttcttaaaggaagacaggatctttc

SEQ ID NO: 34193 - DNA, 25 bp, Homo sapien
taaaaacctctattggccgggcaca

SEQ ID NO: 34194 - DNA, 25 bp, Homo sapien
ttccataaaatagtatagatagcac

SEQ ID NO: 34195 - DNA, 25 bp, Homo sapien
aaggaagacaggatctttcaaaaat

SEQ ID NO: 34196 - DNA, 25 bp, Homo sapien
acaacaaaacctctattgcactttg

SEQ ID NO: 34197 - DNA, 25 bp, Homo sapien
atagcacttcgataattaaatgtac

SEQ ID NO: 34198 - DNA, 25 bp, Homo sapien
gtatagatagcacttcgataattaa

SEQ ID NO: 34199 - DNA, 25 bp, Homo sapien
caccacacccagcataaataagtta

SEQ ID NO: 34200 - DNA, 25 bp, Homo sapien
cttgggcgagttcatattaattagt

SEQ ID NO: 34201 - DNA, 25 bp, Homo sapien
aaaatgacctagactgtggtggtgt

SEQ ID NO: 34202 - DNA, 25 bp, Homo sapien
aaaggggtgattctactgtatgtaa

SEQ ID NO: 34203 - DNA, 25 bp, Homo sapien
gaaaaatgtaacttgggcgagttca

SEQ ID NO: 34204 - DNA, 25 bp, Homo sapien
ctgaagtcccagaacactaggctaa

SEQ ID NO: 34205 - DNA, 25 bp, Homo sapien
ttctgtcacctcaactggcccttaa

SEQ ID NO: 34206 - DNA, 25 bp, Homo sapien
tggtgtatgtgtttgctgaagtccc

SEQ ID NO: 34207 - DNA, 25 bp, Homo sapien
gtcagtctcctgcatcatcacaatc

SEQ ID NO: 34208 - DNA, 25 bp, Homo sapien
aatacaggtagttcatcttcttgtc

SEQ ID NO: 34209 - DNA, 25 bp, Homo sapien
acactaggctaaaaggggtgattct

SEQ ID NO: 34210 - DNA, 25 bp, Homo sapien
agaggctgctgtcttacccagtgcc

SEQ ID NO: 34211 - DNA, 25 bp, Homo sapien
atttgaaagttcagcccaagactgc

SEQ ID NO: 34212 - DNA, 25 bp, Homo sapien
aaagccaggccaagaagatcagagg

SEQ ID NO: 34213 - DNA, 25 bp, Homo sapien
tacccagtgcccagaagggtggtgc

SEQ ID NO: 34214 - DNA, 25 bp, Homo sapien
gagaggccgtccataaggaaagagc

SEQ ID NO: 34215 - DNA, 25 bp, Homo sapien
gatcagaggctgctgtcttacccag

SEQ ID NO: 34216 - DNA, 25 bp, Homo sapien
tctgaagctccctgaggaaactcat

SEQ ID NO: 34217 - DNA, 25 bp, Homo sapien
tagagcacccatgctgggaaagcca

SEQ ID NO: 34218 - DNA, 25 bp, Homo sapien
taggttaaaacagtagggtagagca

SEQ ID NO: 34219 - DNA, 25 bp, Homo sapien
taaggaaagagctctgaagctccct

SEQ ID NO: 34220 - DNA, 25 bp, Homo sapien
taaaacagtagggtagagcacccat

SEQ ID NO: 34221 - DNA, 25 bp, Homo sapien
gataaagttgttttggaggatgccc

SEQ ID NO: 34222 - DNA, 25 bp, Homo sapien
agtcaggaacttgataaagttgttt

SEQ ID NO: 34223 - DNA, 25 bp, Homo sapien
ctgaagagaagcaagcgagactccc

SEQ ID NO: 34224 - DNA, 25 bp, Homo sapien
gtagtcggcaataagctggctttca

SEQ ID NO: 34225 - DNA, 25 bp, Homo sapien
ccctacagggagtaatggttcagcg

SEQ ID NO: 34226 - DNA, 25 bp, Homo sapien
gtgaaggtccatttcgttttgcatc

SEQ ID NO: 34227 - DNA, 25 bp, Homo sapien
tgtgtgaaggtccatttcgttttgc

SEQ ID NO: 34228 - DNA, 25 bp, Homo sapien
cccagctgtgtgaaggtccatttcg

SEQ ID NO: 34229 - DNA, 25 bp, Homo sapien
aaggtccatttcgttttgcatctga

SEQ ID NO: 34230 - DNA, 25 bp, Homo sapien
cagctgtgtgaaggtccatttcgtt

SEQ ID NO: 34231 - DNA, 25 bp, Homo sapien
cagcggggcaaggtttgaaaaccca

SEQ ID NO: 34232 - DNA, 25 bp, Homo sapien
cttgatattatagccacctaagcat

SEQ ID NO: 34233 - DNA, 25 bp, Homo sapien
attggggaaactgacaccttgaaaa

SEQ ID NO: 34234 - DNA, 25 bp, Homo sapien
tctgtcacatgtaggtatataaacc

SEQ ID NO: 34235 - DNA, 25 bp, Homo sapien
gctctgaaatctatggtgtcttgat

SEQ ID NO: 34236 - DNA, 25 bp, Homo sapien
ggcaccatgtattcaagaccatcct

SEQ ID NO: 34237 - DNA, 25 bp, Homo sapien
ataccactatattggggaaactgac

SEQ ID NO: 34238 - DNA, 25 bp, Homo sapien
taaacctggaattgatttttgtgtc

SEQ ID NO: 34239 - DNA, 25 bp, Homo sapien
attcagttgacctggcaccatgtat

SEQ ID NO: 34240 - DNA, 25 bp, Homo sapien
cccaaggtatgaagatattctgtat

SEQ ID NO: 34241 - DNA, 25 bp, Homo sapien
atttttgtgtcgtgaggggaaatca

SEQ ID NO: 34242 - DNA, 25 bp, Homo sapien
taaagacattgtacaggccaggtgc

SEQ ID NO: 34243 - DNA, 25 bp, Homo sapien
cttaacagttctctgggccaggtgt

SEQ ID NO: 34244 - DNA, 25 bp, Homo sapien
atcaggaactgtcaaagtggggttc

SEQ ID NO: 34245 - DNA, 25 bp, Homo sapien
acagttcttaacagttctctgggcc

SEQ ID NO: 34246 - DNA, 25 bp, Homo sapien
tgacgccagcacattcctcaacttg

SEQ ID NO: 34247 - DNA, 25 bp, Homo sapien
ggttcccggtcctcagttcaggaga

SEQ ID NO: 34248 - DNA, 25 bp, Homo sapien
gaggaagcctgtggttagaataaca

SEQ ID NO: 34249 - DNA, 25 bp, Homo sapien
aagcctgtggttagaataacagttc

SEQ ID NO: 34250 - DNA, 25 bp, Homo sapien
cctccagctgcacatattttgtatt

SEQ ID NO: 34251 - DNA, 25 bp, Homo sapien
atgctgcctcctgacgccagcacat

SEQ ID NO: 34252 - DNA, 25 bp, Homo sapien
ctcaacttgagatcaggaactgtca

SEQ ID NO: 34253 - DNA, 25 bp, Homo sapien
cccggtcctcagttcaggagagaga

SEQ ID NO: 34254 - DNA, 25 bp, Homo sapien
tctttcaccagcagaaggcgggcaa

SEQ ID NO: 34255 - DNA, 25 bp, Homo sapien
cagggtgagaggacttcaaagcaca

SEQ ID NO: 34256 - DNA, 25 bp, Homo sapien
agcctcagggtgagaggacttcaaa

SEQ ID NO: 34257 - DNA, 25 bp, Homo sapien
ctcagggtgagaggacttcaaagca

SEQ ID NO: 34258 - DNA, 25 bp, Homo sapien
ttctttcaccagcagaaggcgggca

SEQ ID NO: 34259 - DNA, 25 bp, Homo sapien
ggtgagaggacttcaaagcacattt

SEQ ID NO: 34260 - DNA, 25 bp, Homo sapien
agcttctttcaccagcagaaggcgg

SEQ ID NO: 34261 - DNA, 25 bp, Homo sapien
cttctttcaccagcagaaggcgggc

SEQ ID NO: 34262 - DNA, 25 bp, Homo sapien
gggtgagaggacttcaaagcacatt

SEQ ID NO: 34263 - DNA, 25 bp, Homo sapien
gcaagcctcagggtgagaggacttc

SEQ ID NO: 34264 - DNA, 25 bp, Homo sapien
caagcctcagggtgagaggacttca

SEQ ID NO: 34265 - DNA, 25 bp, Homo sapien
ccttgtcttaggattcgtcactact

SEQ ID NO: 34266 - DNA, 25 bp, Homo sapien
tgctaggactcgatgggcacatttc

SEQ ID NO: 34267 - DNA, 25 bp, Homo sapien
agggcacgcctgtgtgcgctcgcac

SEQ ID NO: 34268 - DNA, 25 bp, Homo sapien
atggtaaaaggtgctaggactcgat

SEQ ID NO: 34269 - DNA, 25 bp, Homo sapien
ggaaaactggcgcacgtgaaaccaa

SEQ ID NO: 34270 - DNA, 25 bp, Homo sapien
ccgcagtagtggagatcccttgtct

SEQ ID NO: 34271 - DNA, 25 bp, Homo sapien
actcgatgggcacatttcaggtgga

SEQ ID NO: 34272 - DNA, 25 bp, Homo sapien
tggacgcctgtttacacctgactgc

SEQ ID NO: 34273 - DNA, 25 bp, Homo sapien
cacgtgaaaccaagggcacgcctgt

SEQ ID NO: 34274 - DNA, 25 bp, Homo sapien
agccctccggtgctttccgggaagc

SEQ ID NO: 34275 - DNA, 25 bp, Homo sapien
tgcaggtccttgattggacgcctgt

SEQ ID NO: 34276 - DNA, 25 bp, Homo sapien
tagatcaatctaccggtacatgcaa

SEQ ID NO: 34277 - DNA, 25 bp, Homo sapien
acaaaggagcacgaggaaattctct

SEQ ID NO: 34278 - DNA, 25 bp, Homo sapien
acttagcaataaaatagatcaatct

SEQ ID NO: 34279 - DNA, 25 bp, Homo sapien
aatgtccaaaaatgactacatgaac

SEQ ID NO: 34280 - DNA, 25 bp, Homo sapien
gcacgaggaaattctctggggtgat

SEQ ID NO: 34281 - DNA, 25 bp, Homo sapien
gataaaaattggatcaagggttgcc

SEQ ID NO: 34282 - DNA, 25 bp, Homo sapien
tcttcataggtggtgtttacactca

SEQ ID NO: 34283 - DNA, 25 bp, Homo sapien
ctaaactggcaaaactaatctagtg

SEQ ID NO: 34284 - DNA, 25 bp, Homo sapien
catgttgagtcaaagaagccaaata

SEQ ID NO: 34285 - DNA, 25 bp, Homo sapien
gtacatgcaaccaaataaatgaatc

SEQ ID NO: 34286 - DNA, 25 bp, Homo sapien
gagactgaccacaaaggagcacgag

SEQ ID NO: 34287 - DNA, 25 bp, Homo sapien
tcccttcggccggaacgggtgcgcc

SEQ ID NO: 34288 - DNA, 25 bp, Homo sapien
ggcgcacccgttccggccgaaggga

SEQ ID NO: 34289 - DNA, 25 bp, Homo sapien
ttccttcagagaggttgtcacaacc

SEQ ID NO: 34290 - DNA, 25 bp, Homo sapien
caagctatttacatggctggcttct

SEQ ID NO: 34291 - DNA, 25 bp, Homo sapien
tatcagtttccggaagacacccatc

SEQ ID NO: 34292 - DNA, 25 bp, Homo sapien
ttcagcctggaaagctcttatccaa

SEQ ID NO: 34293 - DNA, 25 bp, Homo sapien
cagcatatctgagccactctgactt

SEQ ID NO: 34294 - DNA, 25 bp, Homo sapien
ttatcttagctcaattaggccgttc

SEQ ID NO: 34295 - DNA, 25 bp, Homo sapien
atgtcaactccttacagagacccta

SEQ ID NO: 34296 - DNA, 25 bp, Homo sapien
taccaggggacatatcagcatatct

SEQ ID NO: 34297 - DNA, 25 bp, Homo sapien
ttaaaaaataccaggggacatatca

SEQ ID NO: 34298 - DNA, 25 bp, Homo sapien
taggccgttccttgctctagtcact

SEQ ID NO: 34299 - DNA, 25 bp, Homo sapien
cctctaggcctgtgtatttccattc

SEQ ID NO: 34300 - DNA, 25 bp, Homo sapien
ttgttttcatgacagtaccatgctg

SEQ ID NO: 34301 - DNA, 25 bp, Homo sapien
aatcaggtagtatgatgcttcaagc

SEQ ID NO: 34302 - DNA, 25 bp, Homo sapien
atttgaggtggtttcatacgaattt

SEQ ID NO: 34303 - DNA, 25 bp, Homo sapien
gaccctaaagatgtggattaatttc

SEQ ID NO: 34304 - DNA, 25 bp, Homo sapien
tgtgtattgtacgagataagggtct

SEQ ID NO: 34305 - DNA, 25 bp, Homo sapien
ttggtaccttcgttgtagatcattt

SEQ ID NO: 34306 - DNA, 25 bp, Homo sapien
ccctaccaatatcaagaagcttttt

SEQ ID NO: 34307 - DNA, 25 bp, Homo sapien
attgctgtgggtgctatggaaattt

SEQ ID NO: 34308 - DNA, 25 bp, Homo sapien
aatctacaaattgctgtgggtgcta

SEQ ID NO: 34309 - DNA, 25 bp, Homo sapien
tgctcgagattggagtatttgaggt

SEQ ID NO: 34310 - DNA, 25 bp, Homo sapien
acgagataagggtctaatttcattc

SEQ ID NO: 34311 - DNA, 25 bp, Homo sapien
agtaaggacctgatatgatttagtt

SEQ ID NO: 34312 - DNA, 25 bp, Homo sapien
gagtccagggagagcttagagttca

SEQ ID NO: 34313 - DNA, 25 bp, Homo sapien
gcagtatggaattttagtaaggacc

SEQ ID NO: 34314 - DNA, 25 bp, Homo sapien
ttcctgagctgttcttgcgaaagtg

SEQ ID NO: 34315 - DNA, 25 bp, Homo sapien
taattcttatgcttgtagagcttgg

SEQ ID NO: 34316 - DNA, 25 bp, Homo sapien
cagtaaatcataaagtttcataggc

SEQ ID NO: 34317 - DNA, 25 bp, Homo sapien
aagtttcataggcagtatggaattt

SEQ ID NO: 34318 - DNA, 25 bp, Homo sapien
gagagcttagagttcagagatagtt

SEQ ID NO: 34319 - DNA, 25 bp, Homo sapien
aggcgagcgctactacgctcagcta

SEQ ID NO: 34320 - DNA, 25 bp, Homo sapien
ctgttcttgcgaaagtgaataactt

SEQ ID NO: 34321 - DNA, 25 bp, Homo sapien
taattcctatctgtcatgggaggga

SEQ ID NO: 34322 - DNA, 25 bp, Homo sapien
ttctctatatagctcacatgtattt

SEQ ID NO: 34323 - DNA, 25 bp, Homo sapien
ctggttgtttttgatggttgctgac

SEQ ID NO: 34324 - DNA, 25 bp, Homo sapien
ttgctgactctttgctcaacgtttt

SEQ ID NO: 34325 - DNA, 25 bp, Homo sapien
tgatggttgctgactctttgctcaa

SEQ ID NO: 34326 - DNA, 25 bp, Homo sapien
tcttgtttctgctgagtcttgcaaa

SEQ ID NO: 34327 - DNA, 25 bp, Homo sapien
ccaatgttataaggcatgggggatg

SEQ ID NO: 34328 - DNA, 25 bp, Homo sapien
ctgagtcttgcaaattttggcttat

SEQ ID NO: 34329 - DNA, 25 bp, Homo sapien
gggatgtagatctgtgtttcttgtt

SEQ ID NO: 34330 - DNA, 25 bp, Homo sapien
agccactgttcctggcccacttact

SEQ ID NO: 34331 - DNA, 25 bp, Homo sapien
atgtgtaatacccttttaacctatc

SEQ ID NO: 34332 - DNA, 25 bp, Homo sapien
tttctatatgcagtattctgcaccc

SEQ ID NO: 34333 - DNA, 25 bp, Homo sapien
cttgccgagttctgttgtatgatta

SEQ ID NO: 34334 - DNA, 25 bp, Homo sapien
tgattactaatgaggttgaccagcc

SEQ ID NO: 34335 - DNA, 25 bp, Homo sapien
atgggataggtgagtgtttaacttt

SEQ ID NO: 34336 - DNA, 25 bp, Homo sapien
tggtggtggtatgagttactctttt

SEQ ID NO: 34337 - DNA, 25 bp, Homo sapien
aagagctcattgaagtcttttggct

SEQ ID NO: 34338 - DNA, 25 bp, Homo sapien
tctggttggtttgtataagggataa

SEQ ID NO: 34339 - DNA, 25 bp, Homo sapien
taaaggtgtctcttcactaacagaa

SEQ ID NO: 34340 - DNA, 25 bp, Homo sapien
ttttcggccatttggatatcttctc

SEQ ID NO: 34341 - DNA, 25 bp, Homo sapien
attactagctagtggctggcctttc

SEQ ID NO: 34342 - DNA, 25 bp, Homo sapien
caacagaacagtttcccaaagtggt

SEQ ID NO: 34343 - DNA, 25 bp, Homo sapien
tgtataagggataaatgtattgatc

SEQ ID NO: 34344 - DNA, 25 bp, Homo sapien
ttttgacctagcatatcgtctattc

SEQ ID NO: 34345 - DNA, 25 bp, Homo sapien
actgttaaatgtactgacacctgtt

SEQ ID NO: 34346 - DNA, 25 bp, Homo sapien
attctgctactgtttggtggagtgc

SEQ ID NO: 34347 - DNA, 25 bp, Homo sapien
tttcatctaacccaaagtatttgct

SEQ ID NO: 34348 - DNA, 25 bp, Homo sapien
tcatgccattgtgctcagagaacgt

SEQ ID NO: 34349 - DNA, 25 bp, Homo sapien
gtgctcagagaacgtatttagtatt

SEQ ID NO: 34350 - DNA, 25 bp, Homo sapien
tatcgtctattctggagaatgtttc

SEQ ID NO: 34351 - DNA, 25 bp, Homo sapien
ttggtggagtgcatcatagatgtct

SEQ ID NO: 34352 - DNA, 25 bp, Homo sapien
ttaccataacacatgttagccagga

SEQ ID NO: 34353 - DNA, 25 bp, Homo sapien
ctactgtttggtggagtgcatcata

SEQ ID NO: 34354 - DNA, 25 bp, Homo sapien
tcttaaggcagaaatataggttatt

SEQ ID NO: 34355 - DNA, 25 bp, Homo sapien
ctattccagtgtgtggctgtgccac

SEQ ID NO: 34356 - DNA, 25 bp, Homo sapien
agcttccatagttcccatcagggtg

SEQ ID NO: 34357 - DNA, 25 bp, Homo sapien
agtaccgtatcatgtggagtcgttc

SEQ ID NO: 34358 - DNA, 25 bp, Homo sapien
tgacagctgtagaatgacgtgtttc

SEQ ID NO: 34359 - DNA, 25 bp, Homo sapien
atttaggaatatccacctgaggttc

SEQ ID NO: 34360 - DNA, 25 bp, Homo sapien
tttagtacagagacttcccataccc

SEQ ID NO: 34361 - DNA, 25 bp, Homo sapien
atcagggtgcactcttggtgtgtac

SEQ ID NO: 34362 - DNA, 25 bp, Homo sapien
gggtggtgcgtttgttagaatccat

SEQ ID NO: 34363 - DNA, 25 bp, Homo sapien
tggagtcgttccacagccctgaatt

SEQ ID NO: 34364 - DNA, 25 bp, Homo sapien
gtggttgaaattatgcagccttctc

SEQ ID NO: 34365 - DNA, 25 bp, Homo sapien
tgtcagtccctggtccacggatctt

SEQ ID NO: 34366 - DNA, 25 bp, Homo sapien
ttgcagcctggctttttatgtgtac

SEQ ID NO: 34367 - DNA, 25 bp, Homo sapien
agacaggcctgttggcatatattgc

SEQ ID NO: 34368 - DNA, 25 bp, Homo sapien
ttatttggcatgaacacatgcctgg

SEQ ID NO: 34369 - DNA, 25 bp, Homo sapien
cagatgtttgctggtttggagccca

SEQ ID NO: 34370 - DNA, 25 bp, Homo sapien
ttaagagtcccacttgcagcctggc

SEQ ID NO: 34371 - DNA, 25 bp, Homo sapien
ttcctggagctccacaaagctcgca

SEQ ID NO: 34372 - DNA, 25 bp, Homo sapien
aaagctcgcaatgtcttgctgcata

SEQ ID NO: 34373 - DNA, 25 bp, Homo sapien
ttgctgcatagttgctaagggagct

SEQ ID NO: 34374 - DNA, 25 bp, Homo sapien
acctgcacagcaagtctctggctct

SEQ ID NO: 34375 - DNA, 25 bp, Homo sapien
tgctaagggagctgcctcacctgca

SEQ ID NO: 34376 - DNA, 25 bp, Homo sapien
gttggcatatattgcttcctggagc

SEQ ID NO: 34377 - DNA, 25 bp, Homo sapien
ataaaaaacaaagcgcatgattaag

SEQ ID NO: 34378 - DNA, 25 bp, Homo sapien
aaaaaacaaagcgcatgattaagca

SEQ ID NO: 34379 - DNA, 25 bp, Homo sapien
aaatagagataaagacaggaagtga

SEQ ID NO: 34380 - DNA, 25 bp, Homo sapien
cataaaaaacaaagcgcatgattaa

SEQ ID NO: 34381 - DNA, 25 bp, Homo sapien
aaagaaaatagagataaagacagga

SEQ ID NO: 34382 - DNA, 25 bp, Homo sapien
gaaaatagagataaagacaggaagt

SEQ ID NO: 34383 - DNA, 25 bp, Homo sapien
gcataaaaaacaaagcgcatgatta

SEQ ID NO: 34384 - DNA, 25 bp, Homo sapien
aaaaacaaagcgcatgattaagcaa

SEQ ID NO: 34385 - DNA, 25 bp, Homo sapien
aatagagataaagacaggaagtgaa

SEQ ID NO: 34386 - DNA, 25 bp, Homo sapien
taaaaaacaaagcgcatgattaagc

SEQ ID NO: 34387 - DNA, 25 bp, Homo sapien
aaaatagagataaagacaggaagtg

SEQ ID NO: 34388 - DNA, 25 bp, Homo sapien
aagacaggaagtgaatgcataaaaa

SEQ ID NO: 34389 - DNA, 25 bp, Homo sapien
aatagagataaagacaggaagtgaa

SEQ ID NO: 34390 - DNA, 25 bp, Homo sapien
aaaaacaaagcgcatgattaagcaa

SEQ ID NO: 34391 - DNA, 25 bp, Homo sapien
aaatagagataaagacaggaagtga

SEQ ID NO: 34392 - DNA, 25 bp, Homo sapien
ataaaaaacaaagcgcatgattaag

SEQ ID NO: 34393 - DNA, 25 bp, Homo sapien
gataaagacaggaagtgaatgcata

SEQ ID NO: 34394 - DNA, 25 bp, Homo sapien
gaaaatagagataaagacaggaagt

SEQ ID NO: 34395 - DNA, 25 bp, Homo sapien
taaagacaggaagtgaatgcataaa

SEQ ID NO: 34396 - DNA, 25 bp, Homo sapien
aaaatagagataaagacaggaagtg

SEQ ID NO: 34397 - DNA, 25 bp, Homo sapien
gcataaaaaacaaagcgcatgatta

SEQ ID NO: 34398 - DNA, 25 bp, Homo sapien
aaagaaaatagagataaagacagga

SEQ ID NO: 34399 - DNA, 25 bp, Homo sapien
caaagggaaatctagcaaggcaatt

SEQ ID NO: 34400 - DNA, 25 bp, Homo sapien
ttagaaagacaaattggtatctctc

SEQ ID NO: 34401 - DNA, 25 bp, Homo sapien
ggaaatctagcaaggcaattctaac

SEQ ID NO: 34402 - DNA, 25 bp, Homo sapien
aaaaacattagataacagtgatgtt

SEQ ID NO: 34403 - DNA, 25 bp, Homo sapien
aaacagcagtcatgcaactttggtg

SEQ ID NO: 34404 - DNA, 25 bp, Homo sapien
cagtgatgttatacagcaaagggaa

SEQ ID NO: 34405 - DNA, 25 bp, Homo sapien
tgagattacaggtgcttttgtgttt

SEQ ID NO: 34406 - DNA, 25 bp, Homo sapien
gttatacagcaaagggaaatctagc

SEQ ID NO: 34407 - DNA, 25 bp, Homo sapien
ggtatctctcaaacagcagtcatgc

SEQ ID NO: 34408 - DNA, 25 bp, Homo sapien
aagggaaatctagcaaggcaattct

SEQ ID NO: 34409 - DNA, 25 bp, Homo sapien
atactccaaatttcaataacgtcta

SEQ ID NO: 34410 - DNA, 25 bp, Homo sapien
gttgtggctggaccagacatactgc

SEQ ID NO: 34411 - DNA, 25 bp, Homo sapien
ccaggcaccggctccatgtgaggtt

SEQ ID NO: 34412 - DNA, 25 bp, Homo sapien
caccggctccatgtgaggttgtggc

SEQ ID NO: 34413 - DNA, 25 bp, Homo sapien
tccaggcaccggctccatgtgaggt

SEQ ID NO: 34414 - DNA, 25 bp, Homo sapien
tgaggttgtggctggaccagacata

SEQ ID NO: 34415 - DNA, 25 bp, Homo sapien
caggcatgccggctgcagcagacag

SEQ ID NO: 34416 - DNA, 25 bp, Homo sapien
aggttgtggctggaccagacatact

SEQ ID NO: 34417 - DNA, 25 bp, Homo sapien
tccatgtgaggttgtggctggacca

SEQ ID NO: 34418 - DNA, 25 bp, Homo sapien
accggctccatgtgaggttgtggct

SEQ ID NO: 34419 - DNA, 25 bp, Homo sapien
ctccatgtgaggttgtggctggacc

SEQ ID NO: 34420 - DNA, 25 bp, Homo sapien
ttgtggctggaccagacatactgca

SEQ ID NO: 34421 - DNA, 25 bp, Homo sapien
ggtgcctttgcccaagtgttgctcg

SEQ ID NO: 34422 - DNA, 25 bp, Homo sapien
gaacaccacatatacagcttgccaa

SEQ ID NO: 34423 - DNA, 25 bp, Homo sapien
tatctgagcagcatagtacaaagct

SEQ ID NO: 34424 - DNA, 25 bp, Homo sapien
ctgccatgggtgaaccagatgtgca

SEQ ID NO: 34425 - DNA, 25 bp, Homo sapien
agctgtgccagtttatagtagtgtc

SEQ ID NO: 34426 - DNA, 25 bp, Homo sapien
gtcatgggattcttgggatgtcact

SEQ ID NO: 34427 - DNA, 25 bp, Homo sapien
gcttgtgctactggcctggattcca

SEQ ID NO: 34428 - DNA, 25 bp, Homo sapien
cacctctagcagagagaactacctc

SEQ ID NO: 34429 - DNA, 25 bp, Homo sapien
atagcacaaaactcccagccctagg

SEQ ID NO: 34430 - DNA, 25 bp, Homo sapien
ccagccctaggttctaagctatggc

SEQ ID NO: 34431 - DNA, 25 bp, Homo sapien
tgttgctcgggctcactgtgtttgt

SEQ ID NO: 34432 - DNA, 25 bp, Homo sapien
tgaccggcgtttccaggagccacca

SEQ ID NO: 34433 - DNA, 25 bp, Homo sapien
ccacatgattgagagtaatggcctt

SEQ ID NO: 34434 - DNA, 25 bp, Homo sapien
caaggcatttcactggttgcacaag

SEQ ID NO: 34435 - DNA, 25 bp, Homo sapien
gcgatgctatagtccacaggtaaaa

SEQ ID NO: 34436 - DNA, 25 bp, Homo sapien
cctctcgggcagtaggcgatgctat

SEQ ID NO: 34437 - DNA, 25 bp, Homo sapien
ctatcatgcttaggggctgagagct

SEQ ID NO: 34438 - DNA, 25 bp, Homo sapien
tggttgacccaagaaactatcatgc

SEQ ID NO: 34439 - DNA, 25 bp, Homo sapien
tgtgacatacttacagaacaccttc

SEQ ID NO: 34440 - DNA, 25 bp, Homo sapien
aatctctctgtcctcagggaaaccc

SEQ ID NO: 34441 - DNA, 25 bp, Homo sapien
tcagctgactgcagatgtgacatac

SEQ ID NO: 34442 - DNA, 25 bp, Homo sapien
gtgaaaaattggctcagacaaggtg

SEQ ID NO: 34443 - DNA, 25 bp, Homo sapien
ttttactgcattagctaggatgtcc

SEQ ID NO: 34444 - DNA, 25 bp, Homo sapien
tatgatcggggtaatgttggcctct

SEQ ID NO: 34445 - DNA, 25 bp, Homo sapien
ctaggatgtccagtatgatgttgaa

SEQ ID NO: 34446 - DNA, 25 bp, Homo sapien
tctagtttgctgagaacatgtaatt

SEQ ID NO: 34447 - DNA, 25 bp, Homo sapien
aaggctgttgcctgggcttatgatc

SEQ ID NO: 34448 - DNA, 25 bp, Homo sapien
ttggtcgtggtgtataatgtgattt

SEQ ID NO: 34449 - DNA, 25 bp, Homo sapien
cattaggtatggtgtttgctgtaag

SEQ ID NO: 34450 - DNA, 25 bp, Homo sapien
gaacctaccttgcatacttggaata

SEQ ID NO: 34451 - DNA, 25 bp, Homo sapien
ggaatatactctacttggtcgtggt

SEQ ID NO: 34452 - DNA, 25 bp, Homo sapien
tgttcctgatcctacggggaaagga

SEQ ID NO: 34453 - DNA, 25 bp, Homo sapien
agaagggaagtccttgccttgttcc

SEQ ID NO: 34454 - DNA, 25 bp, Homo sapien
gtatgtctgaagattgagaagctgc

SEQ ID NO: 34455 - DNA, 25 bp, Homo sapien
ttgagaagctgcacgcgccctacac

SEQ ID NO: 34456 - DNA, 25 bp, Homo sapien
aactactgcagtgaatggaggagaa

SEQ ID NO: 34457 - DNA, 25 bp, Homo sapien
cacatttgtgtctaggggagattgc

SEQ ID NO: 34458 - DNA, 25 bp, Homo sapien
atggccctgagggacaaatttgcct

SEQ ID NO: 34459 - DNA, 25 bp, Homo sapien
tctgggctagagactcctttgcttt

SEQ ID NO: 34460 - DNA, 25 bp, Homo sapien
ttggatgttcagtagcctccctgac

SEQ ID NO: 34461 - DNA, 25 bp, Homo sapien
taccgactggattcataacatgccg

SEQ ID NO: 34462 - DNA, 25 bp, Homo sapien
gatggaagccagacctcaggaacta

SEQ ID NO: 34463 - DNA, 25 bp, Homo sapien
gtgtggctccggctgttcttgaaat

SEQ ID NO: 34464 - DNA, 25 bp, Homo sapien
aaatttgcctgtagttgagaacctc

SEQ ID NO: 34465 - DNA, 25 bp, Homo sapien
taaattcatggtgtttgactcgcac

SEQ ID NO: 34466 - DNA, 25 bp, Homo sapien
catctgaaatatctaagagtgttat

SEQ ID NO: 34467 - DNA, 25 bp, Homo sapien
catggtgtttgactcgcacttagaa

SEQ ID NO: 34468 - DNA, 25 bp, Homo sapien
tgactcgcacttagaaggaccttct

SEQ ID NO: 34469 - DNA, 25 bp, Homo sapien
gtatataggagggagtcagctttat

SEQ ID NO: 34470 - DNA, 25 bp, Homo sapien
atataggagggagtcagctttatta

SEQ ID NO: 34471 - DNA, 25 bp, Homo sapien
cctttaaattcatggtgtttgactc

SEQ ID NO: 34472 - DNA, 25 bp, Homo sapien
tgtttgactcgcacttagaaggacc

SEQ ID NO: 34473 - DNA, 25 bp, Homo sapien
aggagggagtcagctttattagttt

SEQ ID NO: 34474 - DNA, 25 bp, Homo sapien
attgccagtgtgtaatttgtatttc

SEQ ID NO: 34475 - DNA, 25 bp, Homo sapien
ataataattgccagtgtgtaatttg

SEQ ID NO: 34476 - DNA, 25 bp, Homo sapien
acggtgcctggccaatatactgagt

SEQ ID NO: 34477 - DNA, 25 bp, Homo sapien
gattgcatcaacttttgggtaggat

SEQ ID NO: 34478 - DNA, 25 bp, Homo sapien
taggatgtgtttagaggcactgatc

SEQ ID NO: 34479 - DNA, 25 bp, Homo sapien
aggacttcaacttactaggacttaa

SEQ ID NO: 34480 - DNA, 25 bp, Homo sapien
agtaattcttactaggacttcaacc

SEQ ID NO: 34481 - DNA, 25 bp, Homo sapien
ttagaggcactgatccatgtggaga

SEQ ID NO: 34482 - DNA, 25 bp, Homo sapien
gggagagaagtgattgcatcaactt

SEQ ID NO: 34483 - DNA, 25 bp, Homo sapien
tcaacctctgctaatggagctggga

SEQ ID NO: 34484 - DNA, 25 bp, Homo sapien
caaaagctcggagattggcctggct

SEQ ID NO: 34485 - DNA, 25 bp, Homo sapien
actgatccatgtggagatgcctttg

SEQ ID NO: 34486 - DNA, 25 bp, Homo sapien
taggacttaatatctccacatatga

SEQ ID NO: 34487 - DNA, 25 bp, Homo sapien
atgataggtcctattatagagacac

SEQ ID NO: 34488 - DNA, 25 bp, Homo sapien
aggagctggtgttaacttactggca

SEQ ID NO: 34489 - DNA, 25 bp, Homo sapien
tcataggtgcatcccaagaggttga

SEQ ID NO: 34490 - DNA, 25 bp, Homo sapien
taacttactggcagaaacagccatt

SEQ ID NO: 34491 - DNA, 25 bp, Homo sapien
ctgatgtaagtgactttgccttgtc

SEQ ID NO: 34492 - DNA, 25 bp, Homo sapien
atcattggtcacagggtctgatgca

SEQ ID NO: 34493 - DNA, 25 bp, Homo sapien
gttcttgtgagggtggcttatctga

SEQ ID NO: 34494 - DNA, 25 bp, Homo sapien
aacagccattgctaggcaagtgttc

SEQ ID NO: 34495 - DNA, 25 bp, Homo sapien
aatgctgcagtcttgaggaattttt

SEQ ID NO: 34496 - DNA, 25 bp, Homo sapien
caaaaagaagtccatgcaagctgtt

SEQ ID NO: 34497 - DNA, 25 bp, Homo sapien
tgtaaagacaaaaagaagtccatgc

SEQ ID NO: 34498 - DNA, 25 bp, Homo sapien
tcttgagcctctttatggagctccc

SEQ ID NO: 34499 - DNA, 25 bp, Homo sapien
gcactcttgttcctcggcaatcagg

SEQ ID NO: 34500 - DNA, 25 bp, Homo sapien
ctgctggcttcttggagaattaatt

SEQ ID NO: 34501 - DNA, 25 bp, Homo sapien
cctcggcaatcagggtgtgcttcat

SEQ ID NO: 34502 - DNA, 25 bp, Homo sapien
atacactgctggcttcttggagaat

SEQ ID NO: 34503 - DNA, 25 bp, Homo sapien
gggtgtgcttcatgcggccactaaa

SEQ ID NO: 34504 - DNA, 25 bp, Homo sapien
tgcgcccggcctcttgagcctcttt

SEQ ID NO: 34505 - DNA, 25 bp, Homo sapien
tttcttagctttgcactcttgttcc

SEQ ID NO: 34506 - DNA, 25 bp, Homo sapien
tcatctttgggggtcagataaggaa

SEQ ID NO: 34507 - DNA, 25 bp, Homo sapien
ttcatgcggccactaaagccacctt

SEQ ID NO: 34508 - DNA, 25 bp, Homo sapien
gttcctcggcaatcagggtgtgctt

SEQ ID NO: 34509 - DNA, 25 bp, Homo sapien
tgaaaggcctgctgttcacataagc

SEQ ID NO: 34510 - DNA, 25 bp, Homo sapien
aagtggaagttctgtccttgaggac

SEQ ID NO: 34511 - DNA, 25 bp, Homo sapien
cagcatcaacagcatcctcggcgtt

SEQ ID NO: 34512 - DNA, 25 bp, Homo sapien
ttgggagaaaaagccaagcttgttc

SEQ ID NO: 34513 - DNA, 25 bp, Homo sapien
aaaggctctccatcatccgaatgaa

SEQ ID NO: 34514 - DNA, 25 bp, Homo sapien
gttagatcctcatgatggccaaaaa

SEQ ID NO: 34515 - DNA, 25 bp, Homo sapien
caaattatggaaatgatgcaggagg

SEQ ID NO: 34516 - DNA, 25 bp, Homo sapien
ccgaatgaagatgccaatcaaggac

SEQ ID NO: 34517 - DNA, 25 bp, Homo sapien
atcaccaaggaaaagccacttctct

SEQ ID NO: 34518 - DNA, 25 bp, Homo sapien
taagcaaacactaccacaaaggctc

SEQ ID NO: 34519 - DNA, 25 bp, Homo sapien
tccttgaggacacccaaaattatgc

SEQ ID NO: 34520 - DNA, 25 bp, Homo sapien
atatttacccagatattggccattt

SEQ ID NO: 34521 - DNA, 25 bp, Homo sapien
cttaccagtttgattgtgatgtgat

SEQ ID NO: 34522 - DNA, 25 bp, Homo sapien
ccctcgtttctggtgagaaacccat

SEQ ID NO: 34523 - DNA, 25 bp, Homo sapien
tttagtatttcctgttgagtagcac

SEQ ID NO: 34524 - DNA, 25 bp, Homo sapien
agcactgctgcccatgacttcgctt

SEQ ID NO: 34525 - DNA, 25 bp, Homo sapien
ttgtgatgtgatatgtttgggattc

SEQ ID NO: 34526 - DNA, 25 bp, Homo sapien
tttctggtgagaaacccatagtaat

SEQ ID NO: 34527 - DNA, 25 bp, Homo sapien
cattcgagaaggtctttattttgcc

SEQ ID NO: 34528 - DNA, 25 bp, Homo sapien
gttgagtagcactgctgcccatgac

SEQ ID NO: 34529 - DNA, 25 bp, Homo sapien
gagaaacccatagtaatttggatcc

SEQ ID NO: 34530 - DNA, 25 bp, Homo sapien
aagttgctctcctccagcggaagaa

SEQ ID NO: 34531 - DNA, 25 bp, Homo sapien
acagctcactgtgtttttgatttgc

SEQ ID NO: 34532 - DNA, 25 bp, Homo sapien
gactaaggatgctgagactcttcat

SEQ ID NO: 34533 - DNA, 25 bp, Homo sapien
atatttgtcatgaagatttgtccct

SEQ ID NO: 34534 - DNA, 25 bp, Homo sapien
ttgtacatatttgtcatgaagattt

SEQ ID NO: 34535 - DNA, 25 bp, Homo sapien
ttttgcatatgaggtaaggttaggg

SEQ ID NO: 34536 - DNA, 25 bp, Homo sapien
ctaatgactaaggatgctgagactc

SEQ ID NO: 34537 - DNA, 25 bp, Homo sapien
ttgtcatgaagatttgtccctgttt

SEQ ID NO: 34538 - DNA, 25 bp, Homo sapien
atgactaaggatgctgagactcttc

SEQ ID NO: 34539 - DNA, 25 bp, Homo sapien
atttgtccctgttttcttctatgag

SEQ ID NO: 34540 - DNA, 25 bp, Homo sapien
taatgactaaggatgctgagactct

SEQ ID NO: 34541 - DNA, 25 bp, Homo sapien
atatgaggtaaggttagggtccaac

SEQ ID NO: 34542 - DNA, 25 bp, Homo sapien
aaaaaattaatgcagaacgactatg

SEQ ID NO: 34543 - DNA, 25 bp, Homo sapien
ggggctccaaactgactgcaacttt

SEQ ID NO: 34544 - DNA, 25 bp, Homo sapien
aatgcagaacgactatgtgatttat

SEQ ID NO: 34545 - DNA, 25 bp, Homo sapien
ttcattcttttcacgtggatatcca

SEQ ID NO: 34546 - DNA, 25 bp, Homo sapien
gcagacacaaaagggtagcattctt

SEQ ID NO: 34547 - DNA, 25 bp, Homo sapien
catcatgtgtagcaaaaaagcagag

SEQ ID NO: 34548 - DNA, 25 bp, Homo sapien
atttattgagagaccatcctttccc

SEQ ID NO: 34549 - DNA, 25 bp, Homo sapien
gtcaaaaatcaatttggccgcagac

SEQ ID NO: 34550 - DNA, 25 bp, Homo sapien
atttggccgcagacacaaaagggta

SEQ ID NO: 34551 - DNA, 25 bp, Homo sapien
caaaagggtagcattcttcaatcac

SEQ ID NO: 34552 - DNA, 25 bp, Homo sapien
attattactgaaatgtacaagtgaa

SEQ ID NO: 34553 - DNA, 25 bp, Homo sapien
ccttggcgttcgtgtccttggactc

SEQ ID NO: 34554 - DNA, 25 bp, Homo sapien
cctacaaatgggcaatgatagctgg

SEQ ID NO: 34555 - DNA, 25 bp, Homo sapien
tggactcctaccctgaatagggctg

SEQ ID NO: 34556 - DNA, 25 bp, Homo sapien
cagtgatccttactccttggcgttc

SEQ ID NO: 34557 - DNA, 25 bp, Homo sapien
atgggcaatgatagctggctgtatt

SEQ ID NO: 34558 - DNA, 25 bp, Homo sapien
ttcatcacttgttctgggggaatcc

SEQ ID NO: 34559 - DNA, 25 bp, Homo sapien
tcatagccgactctaagatgagccc

SEQ ID NO: 34560 - DNA, 25 bp, Homo sapien
agatgtgatggcacgtgacttctga

SEQ ID NO: 34561 - DNA, 25 bp, Homo sapien
tgatggcacgtgacttctgaagctg

SEQ ID NO: 34562 - DNA, 25 bp, Homo sapien
tgtattaacagctgtcatagccgac

SEQ ID NO: 34563 - DNA, 25 bp, Homo sapien
tgacttctgaagctggcggtaaaga

SEQ ID NO: 34564 - DNA, 25 bp, Homo sapien
agcaaataagaagccatgtgaggtt

SEQ ID NO: 34565 - DNA, 25 bp, Homo sapien
gagacaccgaatccagggcatcagt

SEQ ID NO: 34566 - DNA, 25 bp, Homo sapien
ttaggaaagctaatctggctctggt

SEQ ID NO: 34567 - DNA, 25 bp, Homo sapien
tgtcctccaggtttagagcagtggc

SEQ ID NO: 34568 - DNA, 25 bp, Homo sapien
tcagtggaaacgaaccaagattttc

SEQ ID NO: 34569 - DNA, 25 bp, Homo sapien
atgtgcccaagagacattcagtgga

SEQ ID NO: 34570 - DNA, 25 bp, Homo sapien
cccggccatagcttcttaaaaggat

SEQ ID NO: 34571 - DNA, 25 bp, Homo sapien
ctggctctggtaggaaggatataca

SEQ ID NO: 34572 - DNA, 25 bp, Homo sapien
gagaaagatggttattaggaaagct

SEQ ID NO: 34573 - DNA, 25 bp, Homo sapien
aaggaccttaaaaggatatggcctc

SEQ ID NO: 34574 - DNA, 25 bp, Homo sapien
ccatgtgaggttttgagcaagagaa

SEQ ID NO: 34575 - DNA, 25 bp, Homo sapien
ctggaaggcataggggtagaattca

SEQ ID NO: 34576 - DNA, 25 bp, Homo sapien
ttcatcttgtgtctgcctggcaaaa

SEQ ID NO: 34577 - DNA, 25 bp, Homo sapien
gggtagaattcagggaaagctgctt

SEQ ID NO: 34578 - DNA, 25 bp, Homo sapien
ctaggtgataaaagtggtcaagtga

SEQ ID NO: 34579 - DNA, 25 bp, Homo sapien
ttgggatggcaatagttgcagctaa

SEQ ID NO: 34580 - DNA, 25 bp, Homo sapien
aaagtgttgcaataattagagtagt

SEQ ID NO: 34581 - DNA, 25 bp, Homo sapien
caaaaagtgtgctgttggaaactgt

SEQ ID NO: 34582 - DNA, 25 bp, Homo sapien
tctgtccaatgagatgtaactggaa

SEQ ID NO: 34583 - DNA, 25 bp, Homo sapien
ctcaatgaactagaatggcagacac

SEQ ID NO: 34584 - DNA, 25 bp, Homo sapien
gaatggcagacactaccagctacct

SEQ ID NO: 34585 - DNA, 25 bp, Homo sapien
agtcagaatttcatgcaatatgcag

SEQ ID NO: 34586 - DNA, 25 bp, Homo sapien
gttcgacagactataaacacagttg

SEQ ID NO: 34587 - DNA, 25 bp, Homo sapien
tatggacaatctagtgagaccctgt

SEQ ID NO: 34588 - DNA, 25 bp, Homo sapien
acagttgttcagaatgtctccgatt

SEQ ID NO: 34589 - DNA, 25 bp, Homo sapien
atgtctccgatttatgaagtgtttc

SEQ ID NO: 34590 - DNA, 25 bp, Homo sapien
cttggtgaggttgtcacactctcgt

SEQ ID NO: 34591 - DNA, 25 bp, Homo sapien
caatcatatgtggtaggtgtaactt

SEQ ID NO: 34592 - DNA, 25 bp, Homo sapien
tatggatgaagaacttaaggcttgg

SEQ ID NO: 34593 - DNA, 25 bp, Homo sapien
gccaggactgtgctaaatatgctac

SEQ ID NO: 34594 - DNA, 25 bp, Homo sapien
ctggaagtcaaagccaagtcagtct

SEQ ID NO: 34595 - DNA, 25 bp, Homo sapien
gagttcaagagcagtatggacaatc

SEQ ID NO: 34596 - DNA, 25 bp, Homo sapien
tctcgtgggttttggtagtagagct

SEQ ID NO: 34597 - DNA, 25 bp, Homo sapien
aaccaagggcaaaagcaacctttca

SEQ ID NO: 34598 - DNA, 25 bp, Homo sapien
gactttggtgtatcaaggaaacttc

SEQ ID NO: 34599 - DNA, 25 bp, Homo sapien
aactgccaaggtgaaaagactttac

SEQ ID NO: 34600 - DNA, 25 bp, Homo sapien
ctactggtgtagactttggtgtatc

SEQ ID NO: 34601 - DNA, 25 bp, Homo sapien
aagtatggaatggtgttaagtgcaa

SEQ ID NO: 34602 - DNA, 25 bp, Homo sapien
agacagataataaacaaagaagacg

SEQ ID NO: 34603 - DNA, 25 bp, Homo sapien
cagaaaggagacctccgggtttcga

SEQ ID NO: 34604 - DNA, 25 bp, Homo sapien
gttccagtaacaactctaggcattt

SEQ ID NO: 34605 - DNA, 25 bp, Homo sapien
aacctttcaggttggaagacagcca

SEQ ID NO: 34606 - DNA, 25 bp, Homo sapien
caagaaagagggataaaaactgcca

SEQ ID NO: 34607 - DNA, 25 bp, Homo sapien
ggttcatgtgtacagaccacctact

SEQ ID NO: 34608 - DNA, 25 bp, Homo sapien
ccctaaaggtgttcaatgcagattg

SEQ ID NO: 34609 - DNA, 25 bp, Homo sapien
ttctagaaggctttgttgaactgtc

SEQ ID NO: 34610 - DNA, 25 bp, Homo sapien
cagagatgtctgtaaggtgtttcag

SEQ ID NO: 34611 - DNA, 25 bp, Homo sapien
ttccattaatcagcaagaggcttat

SEQ ID NO: 34612 - DNA, 25 bp, Homo sapien
agcaagaggcttattcctatgagtc

SEQ ID NO: 34613 - DNA, 25 bp, Homo sapien
aggagtgactcctgagaccagcctg

SEQ ID NO: 34614 - DNA, 25 bp, Homo sapien
ggctgggctggatttcctgctaaaa

SEQ ID NO: 34615 - DNA, 25 bp, Homo sapien
taaggtgtttcagaggaagttttca

SEQ ID NO: 34616 - DNA, 25 bp, Homo sapien
ctaacatgccgttcaggggctgggc

SEQ ID NO: 34617 - DNA, 25 bp, Homo sapien
ttgaagtcttaaatgacaggttccc

SEQ ID NO: 34618 - DNA, 25 bp, Homo sapien
tttcctgctaaaagggtcagaggac

SEQ ID NO: 34619 - DNA, 25 bp, Homo sapien
acccggccagaattgacactcaaaa

SEQ ID NO: 34620 - DNA, 25 bp, Homo sapien
taggtctcaatgcacaggcatgttc

SEQ ID NO: 34621 - DNA, 25 bp, Homo sapien
ctcagtgggaaagggacacactttt

SEQ ID NO: 34622 - DNA, 25 bp, Homo sapien
agctggaccacaacagtctcgcttt

SEQ ID NO: 34623 - DNA, 25 bp, Homo sapien
ccttgtggacaaggactgtgttgtc

SEQ ID NO: 34624 - DNA, 25 bp, Homo sapien
acactcaaaacacacctggggtcct

SEQ ID NO: 34625 - DNA, 25 bp, Homo sapien
ttgcaacaacagtggttttggtgat

SEQ ID NO: 34626 - DNA, 25 bp, Homo sapien
gtccaacagttgtcagagtgttccc

SEQ ID NO: 34627 - DNA, 25 bp, Homo sapien
ctcttctgggtcttggcatgtggta

SEQ ID NO: 34628 - DNA, 25 bp, Homo sapien
gaggatgcttttgctcagtgggaaa

SEQ ID NO: 34629 - DNA, 25 bp, Homo sapien
gttgtcgatcatggccacaccacag

SEQ ID NO: 34630 - DNA, 25 bp, Homo sapien
tgcagacaggccaaggatccatgca

SEQ ID NO: 34631 - DNA, 25 bp, Homo sapien
aaggcatggcttattagccactgct

SEQ ID NO: 34632 - DNA, 25 bp, Homo sapien
cagggctccaggttgatagaaattt

SEQ ID NO: 34633 - DNA, 25 bp, Homo sapien
agttacacatgtacaagaggttgat

SEQ ID NO: 34634 - DNA, 25 bp, Homo sapien
acatggtcctactcaccaaggacaa

SEQ ID NO: 34635 - DNA, 25 bp, Homo sapien
agatggtgaatagaacgcaagccca

SEQ ID NO: 34636 - DNA, 25 bp, Homo sapien
tttacaggagtaaaccatgatgacc

SEQ ID NO: 34637 - DNA, 25 bp, Homo sapien
aatctcacagctcgaagactattgc

SEQ ID NO: 34638 - DNA, 25 bp, Homo sapien
ccatcaagatggtgaatagaacgca

SEQ ID NO: 34639 - DNA, 25 bp, Homo sapien
tgggaggtgggttctctcatcattc

SEQ ID NO: 34640 - DNA, 25 bp, Homo sapien
agactattgctatccacatcatggg

SEQ ID NO: 34641 - DNA, 25 bp, Homo sapien
ccgtgatttcggtaaaaagcagctc

SEQ ID NO: 34642 - DNA, 25 bp, Homo sapien
tagaggaaatggcttaaactgaggc

SEQ ID NO: 34643 - DNA, 25 bp, Homo sapien
cagagagctgccattttccgtgatt

SEQ ID NO: 34644 - DNA, 25 bp, Homo sapien
ttatggtggatgtgagtaaatctct

SEQ ID NO: 34645 - DNA, 25 bp, Homo sapien
aaactgaggccagaagcattatggt

SEQ ID NO: 34646 - DNA, 25 bp, Homo sapien
agagattaaaaattgggatgggtac

SEQ ID NO: 34647 - DNA, 25 bp, Homo sapien
attgaggtcctgaaatctatacttg

SEQ ID NO: 34648 - DNA, 25 bp, Homo sapien
aaattgggatgggtaccttattgag

SEQ ID NO: 34649 - DNA, 25 bp, Homo sapien
tcatgggaaacaaagaaataaccca

SEQ ID NO: 34650 - DNA, 25 bp, Homo sapien
attcaccgctctcatcacttgggca

SEQ ID NO: 34651 - DNA, 25 bp, Homo sapien
aaccttaaagcatcagagagctgcc

SEQ ID NO: 34652 - DNA, 25 bp, Homo sapien
catagtacccaataagtgcacgccc

SEQ ID NO: 34653 - DNA, 25 bp, Homo sapien
agtattctgtagtgtatatgttcca

SEQ ID NO: 34654 - DNA, 25 bp, Homo sapien
atggctgtattgcatgtctgaggct

SEQ ID NO: 34655 - DNA, 25 bp, Homo sapien
tatgtctgtgtgtattcaacgtttc

SEQ ID NO: 34656 - DNA, 25 bp, Homo sapien
gggcacctaggttgactccatattt

SEQ ID NO: 34657 - DNA, 25 bp, Homo sapien
tgcagcaaaggacagcctaaggctg

SEQ ID NO: 34658 - DNA, 25 bp, Homo sapien
gggtacaaatgatcctgtcagatag

SEQ ID NO: 34659 - DNA, 25 bp, Homo sapien
gcctaaggctgcgtagtattctgta

SEQ ID NO: 34660 - DNA, 25 bp, Homo sapien
tgttcttgcataaattcgcttagga

SEQ ID NO: 34661 - DNA, 25 bp, Homo sapien
tattgcatgtctgaggcttggggta

SEQ ID NO: 34662 - DNA, 25 bp, Homo sapien
tcattgaagggcacctaggttgact

SEQ ID NO: 34663 - DNA, 25 bp, Homo sapien
agatcacatggcaagcaagaaagca

SEQ ID NO: 34664 - DNA, 25 bp, Homo sapien
ttttgcagagaactgacttcttagc

SEQ ID NO: 34665 - DNA, 25 bp, Homo sapien
tggaaggggtcaaacaaactatatc

SEQ ID NO: 34666 - DNA, 25 bp, Homo sapien
ttacgacccatctccaacactggaa

SEQ ID NO: 34667 - DNA, 25 bp, Homo sapien
ataaaaattaagtatgggccctcta

SEQ ID NO: 34668 - DNA, 25 bp, Homo sapien
ttgaaatcagcttgcccatgtctac

SEQ ID NO: 34669 - DNA, 25 bp, Homo sapien
aaaagcccacttttgtgattctgat

SEQ ID NO: 34670 - DNA, 25 bp, Homo sapien
caagaagcatggtgtcagtatttgc

SEQ ID NO: 34671 - DNA, 25 bp, Homo sapien
ggggagccagctgtacagagatcac

SEQ ID NO: 34672 - DNA, 25 bp, Homo sapien
aagtatgggccctctaaagttgtac

SEQ ID NO: 34673 - DNA, 25 bp, Homo sapien
ttttggctatgctaaggtcctttac

SEQ ID NO: 34674 - DNA, 25 bp, Homo sapien
ttataacaacaccacagactgggta

SEQ ID NO: 34675 - DNA, 25 bp, Homo sapien
gttataacaacaccacagactgggt

SEQ ID NO: 34676 - DNA, 25 bp, Homo sapien
attacaaagggattgttttagtcca

SEQ ID NO: 34677 - DNA, 25 bp, Homo sapien
gcgcccggccctaaatcatctatta

SEQ ID NO: 34678 - DNA, 25 bp, Homo sapien
ataagcagaaatttgtttggctcat

SEQ ID NO: 34679 - DNA, 25 bp, Homo sapien
gcagaaatttgtttggctcatagtt

SEQ ID NO: 34680 - DNA, 25 bp, Homo sapien
atctattaattcaatgcaacctcat

SEQ ID NO: 34681 - DNA, 25 bp, Homo sapien
tcaatgcaacctcatgaaaaattac

SEQ ID NO: 34682 - DNA, 25 bp, Homo sapien
taataagcagaaatttgtttggctc

SEQ ID NO: 34683 - DNA, 25 bp, Homo sapien
gttgttataacaacaccacagactg

SEQ ID NO: 34684 - DNA, 25 bp, Homo sapien
tgttataacaacaccacagactggg

SEQ ID NO: 34685 - DNA, 25 bp, Homo sapien
taataagcagaaatttgtttggctc

SEQ ID NO: 34686 - DNA, 25 bp, Homo sapien
aagtggaatgagcacacatatcatg

SEQ ID NO: 34687 - DNA, 25 bp, Homo sapien
gcgcccggccctaaatcatctatta

SEQ ID NO: 34688 - DNA, 25 bp, Homo sapien
ttataacaacaccacagactgggta

SEQ ID NO: 34689 - DNA, 25 bp, Homo sapien
tcaatgcaacctcatgaaaaattac

SEQ ID NO: 34690 - DNA, 25 bp, Homo sapien
attacaaagggattgttttagtcca

SEQ ID NO: 34691 - DNA, 25 bp, Homo sapien
gcagaaatttgtttggctcatagtt

SEQ ID NO: 34692 - DNA, 25 bp, Homo sapien
gttgttataacaacaccacagactg

SEQ ID NO: 34693 - DNA, 25 bp, Homo sapien
acaaaagaaaagtggaatgagcaca

SEQ ID NO: 34694 - DNA, 25 bp, Homo sapien
tgttataacaacaccacagactggg

SEQ ID NO: 34695 - DNA, 25 bp, Homo sapien
atctattaattcaatgcaacctcat

SEQ ID NO: 34696 - DNA, 25 bp, Homo sapien
aaaaaaaccataaggaatgaagaca

SEQ ID NO: 34697 - DNA, 25 bp, Homo sapien
cttaaaaaattgagaggccaggcgc

SEQ ID NO: 34698 - DNA, 25 bp, Homo sapien
acgaccttaaaaaattgagaggcca

SEQ ID NO: 34699 - DNA, 25 bp, Homo sapien
caaataatctaacaaagggttagta

SEQ ID NO: 34700 - DNA, 25 bp, Homo sapien
aatataacaaaagatgtaccaaatc

SEQ ID NO: 34701 - DNA, 25 bp, Homo sapien
taacaaagggttagtatataatata

SEQ ID NO: 34702 - DNA, 25 bp, Homo sapien
aagatgtaccaaatcctaatacaga

SEQ ID NO: 34703 - DNA, 25 bp, Homo sapien
tatagaacaatacagcccccaccaa

SEQ ID NO: 34704 - DNA, 25 bp, Homo sapien
tataacaaaagatgtaccaaatcct

SEQ ID NO: 34705 - DNA, 25 bp, Homo sapien
aacaaaagatgtaccaaatcctaat

SEQ ID NO: 34706 - DNA, 25 bp, Homo sapien
gcttacatatcaagaagaaaaagtt

SEQ ID NO: 34707 - DNA, 25 bp, Homo sapien
gttgtttaaaagcacgtggcatctc

SEQ ID NO: 34708 - DNA, 25 bp, Homo sapien
tttgtgtgtaaatgaagacattctc

SEQ ID NO: 34709 - DNA, 25 bp, Homo sapien
caccatgattggaggcttctcgagg

SEQ ID NO: 34710 - DNA, 25 bp, Homo sapien
caggcagatgcctcctaaatggctt

SEQ ID NO: 34711 - DNA, 25 bp, Homo sapien
agaagcacagctcatggtataaagc

SEQ ID NO: 34712 - DNA, 25 bp, Homo sapien
tcctaaatggcttggtgctctcctt

SEQ ID NO: 34713 - DNA, 25 bp, Homo sapien
aaatgaacacacgaagccttccgca

SEQ ID NO: 34714 - DNA, 25 bp, Homo sapien
gtttctgatacagtctggatgtccc

SEQ ID NO: 34715 - DNA, 25 bp, Homo sapien
ctgagaacctctgctgagtgtcttg

SEQ ID NO: 34716 - DNA, 25 bp, Homo sapien
acactgatcggcaccctgtgggtca

SEQ ID NO: 34717 - DNA, 25 bp, Homo sapien
agacattctctgcacactgatcggc

SEQ ID NO: 34718 - DNA, 25 bp, Homo sapien
atccagattggctaaatgtcctcac

SEQ ID NO: 34719 - DNA, 25 bp, Homo sapien
gtgtgttcctagatccaaaggtctc

SEQ ID NO: 34720 - DNA, 25 bp, Homo sapien
aaaactcaaacaggagaagtggcag

SEQ ID NO: 34721 - DNA, 25 bp, Homo sapien
aatgctgcaggaccaaggaaattca

SEQ ID NO: 34722 - DNA, 25 bp, Homo sapien
aaggagtagaaccaccacaggacta

SEQ ID NO: 34723 - DNA, 25 bp, Homo sapien
agattggacaatggattgggtaaat

SEQ ID NO: 34724 - DNA, 25 bp, Homo sapien
cttaagggcttgatcagtgtgttcc

SEQ ID NO: 34725 - DNA, 25 bp, Homo sapien
cacaggactaagagtcagaagacct

SEQ ID NO: 34726 - DNA, 25 bp, Homo sapien
tgccgtattgaaaggaggaacattt

SEQ ID NO: 34727 - DNA, 25 bp, Homo sapien
tacatttgcatgactgaagattgga

SEQ ID NO: 34728 - DNA, 25 bp, Homo sapien
cttgggcaaagtccagttcctacat

SEQ ID NO: 34729 - DNA, 25 bp, Homo sapien
tcatcattgcaaagatccctcatgc

SEQ ID NO: 34730 - DNA, 25 bp, Homo sapien
acatcctaatgcctggcaaccacta

SEQ ID NO: 34731 - DNA, 25 bp, Homo sapien
tgacattgatataatccacaacctc

SEQ ID NO: 34732 - DNA, 25 bp, Homo sapien
agcataattactttgggatctattc

SEQ ID NO: 34733 - DNA, 25 bp, Homo sapien
ttgtgtcacttcaagaatgttatag

SEQ ID NO: 34734 - DNA, 25 bp, Homo sapien
tatagtactccatgggatgagtgta

SEQ ID NO: 34735 - DNA, 25 bp, Homo sapien
agatacagaactgcttcatcattgc

SEQ ID NO: 34736 - DNA, 25 bp, Homo sapien
tagaaatggaagtatacagtatgtc

SEQ ID NO: 34737 - DNA, 25 bp, Homo sapien
aaagatccctcatgctacctgttta

SEQ ID NO: 34738 - DNA, 25 bp, Homo sapien
attacataagcacagttcaatatca

SEQ ID NO: 34739 - DNA, 25 bp, Homo sapien
tccatgggatgagtgtatcacattt

SEQ ID NO: 34740 - DNA, 25 bp, Homo sapien
ctataccaccttgttgagagctttt

SEQ ID NO: 34741 - DNA, 25 bp, Homo sapien
agtcatctgtagaaagagacaattt

SEQ ID NO: 34742 - DNA, 25 bp, Homo sapien
aatttgctgatgttggattttgtca

SEQ ID NO: 34743 - DNA, 25 bp, Homo sapien
tgcacatgttgaattccttggaaat

SEQ ID NO: 34744 - DNA, 25 bp, Homo sapien
tcgtgatcttagaggaaaatctttc

SEQ ID NO: 34745 - DNA, 25 bp, Homo sapien
tgagagcttttatcatgaagattgt

SEQ ID NO: 34746 - DNA, 25 bp, Homo sapien
ttgcatctactgagatgaccatata

SEQ ID NO: 34747 - DNA, 25 bp, Homo sapien
atcacctttatggatttgcacatgt

SEQ ID NO: 34748 - DNA, 25 bp, Homo sapien
acttgatcatggtgaataatcctct

SEQ ID NO: 34749 - DNA, 25 bp, Homo sapien
cattgcattcctggagtgaatccca

SEQ ID NO: 34750 - DNA, 25 bp, Homo sapien
ttctgttaatgtagtatatcacctt

SEQ ID NO: 34751 - DNA, 25 bp, Homo sapien
tcaacagcatcataaacaataaata

SEQ ID NO: 34752 - DNA, 25 bp, Homo sapien
gaaaacagtattattaagatgccaa

SEQ ID NO: 34753 - DNA, 25 bp, Homo sapien
tgaacaaattcaacaatagatgtgc

SEQ ID NO: 34754 - DNA, 25 bp, Homo sapien
atatttacaggtgacatgatcttgt

SEQ ID NO: 34755 - DNA, 25 bp, Homo sapien
atgtttctaaacactagcaatgaac

SEQ ID NO: 34756 - DNA, 25 bp, Homo sapien
catgtttgtggattggaaaacagta

SEQ ID NO: 34757 - DNA, 25 bp, Homo sapien
caggtgacatgatcttgtatacagc

SEQ ID NO: 34758 - DNA, 25 bp, Homo sapien
taataagcaagttcagcaaggtggc

SEQ ID NO: 34759 - DNA, 25 bp, Homo sapien
aacaatagatgtgcaaaagtcatac

SEQ ID NO: 34760 - DNA, 25 bp, Homo sapien
ttaagatgccaatacagccaggcgc

SEQ ID NO: 34761 - DNA, 25 bp, Homo sapien
acagcaaatcctaaataatccacta

SEQ ID NO: 34762 - DNA, 25 bp, Homo sapien
tggattatcaatgtaaggtattatc

SEQ ID NO: 34763 - DNA, 25 bp, Homo sapien
ttgagacgcagtttttgcccaggct

SEQ ID NO: 34764 - DNA, 25 bp, Homo sapien
accgtgtccagcctcggaaaactct

SEQ ID NO: 34765 - DNA, 25 bp, Homo sapien
ccagcctcggaaaactcttaattgc

SEQ ID NO: 34766 - DNA, 25 bp, Homo sapien
ctgtcgactcacttctaaaatagat

SEQ ID NO: 34767 - DNA, 25 bp, Homo sapien
aaaaagcaagatcacagaagggttt

SEQ ID NO: 34768 - DNA, 25 bp, Homo sapien
cacagaagggtttataacaaaaagc

SEQ ID NO: 34769 - DNA, 25 bp, Homo sapien
tgtaaggtattatctgtcgactcac

SEQ ID NO: 34770 - DNA, 25 bp, Homo sapien
aaaatagatcaggatttaacactcc

SEQ ID NO: 34771 - DNA, 25 bp, Homo sapien
tgcaagtaactaaaaaagcaagatc

SEQ ID NO: 34772 - DNA, 25 bp, Homo sapien
tgtggaaactattcattggattatc

SEQ ID NO: 34773 - DNA, 25 bp, Homo sapien
agtgatgaaaaaactggccacagtt

SEQ ID NO: 34774 - DNA, 25 bp, Homo sapien
aaggcctaaggtgatgctctcatga

SEQ ID NO: 34775 - DNA, 25 bp, Homo sapien
tctcatgacagttctggggaagcct

SEQ ID NO: 34776 - DNA, 25 bp, Homo sapien
gagtacgatgaccttacaatccgca

SEQ ID NO: 34777 - DNA, 25 bp, Homo sapien
ctgtggatttccaaatgtggtggct

SEQ ID NO: 34778 - DNA, 25 bp, Homo sapien
aatgagaggaagcatcagtttaaac

SEQ ID NO: 34779 - DNA, 25 bp, Homo sapien
cgatgtggcccaggttacatgtaat

SEQ ID NO: 34780 - DNA, 25 bp, Homo sapien
gagccctgaccatgggccagtctct

SEQ ID NO: 34781 - DNA, 25 bp, Homo sapien
ttggccataaacaccgagtacgatg

SEQ ID NO: 34782 - DNA, 25 bp, Homo sapien
tcatgtgtaaaaggattgctactac

SEQ ID NO: 34783 - DNA, 25 bp, Homo sapien
cagtgagcggatattaaattggcca

SEQ ID NO: 34784 - DNA, 25 bp, Homo sapien
atacaacacgaggaaaaacaaagat

SEQ ID NO: 34785 - DNA, 25 bp, Homo sapien
agggatagatcatatatggccacac

SEQ ID NO: 34786 - DNA, 25 bp, Homo sapien
tggagcaatgctttatgaggaaaat

SEQ ID NO: 34787 - DNA, 25 bp, Homo sapien
gtactggacctgcaaatgaggatca

SEQ ID NO: 34788 - DNA, 25 bp, Homo sapien
tttaggaagatgatacaacacgagg

SEQ ID NO: 34789 - DNA, 25 bp, Homo sapien
tgtgggcctcagacaagtactagac

SEQ ID NO: 34790 - DNA, 25 bp, Homo sapien
tgcttcacagtggagatagaatttc

SEQ ID NO: 34791 - DNA, 25 bp, Homo sapien
caaattcataagacttgggccctgc

SEQ ID NO: 34792 - DNA, 25 bp, Homo sapien
agggaataaatgcagtgacttcaga

SEQ ID NO: 34793 - DNA, 25 bp, Homo sapien
tactagacactatgcagacacaaat

SEQ ID NO: 34794 - DNA, 25 bp, Homo sapien
atggccacaccatgataatgcttca

SEQ ID NO: 34795 - DNA, 25 bp, Homo sapien
gttggtaatgtcttagatggaaatc

SEQ ID NO: 34796 - DNA, 25 bp, Homo sapien
tccagaaagcattcaatgaacaggc

SEQ ID NO: 34797 - DNA, 25 bp, Homo sapien
tttaaatctgagtagcccattcata

SEQ ID NO: 34798 - DNA, 25 bp, Homo sapien
taacatgcagtccaaaacaaatata

SEQ ID NO: 34799 - DNA, 25 bp, Homo sapien
gtgtaaaacctgtaattcatgcctc

SEQ ID NO: 34800 - DNA, 25 bp, Homo sapien
tagccagctccttagtagcccaact

SEQ ID NO: 34801 - DNA, 25 bp, Homo sapien
actagttgtattggtttctgatcac

SEQ ID NO: 34802 - DNA, 25 bp, Homo sapien
cttggtgcccggatttagaaatact

SEQ ID NO: 34803 - DNA, 25 bp, Homo sapien
catgcctcagttgctatgttggtaa

SEQ ID NO: 34804 - DNA, 25 bp, Homo sapien
agaaagaaagagaggtatacaatta

SEQ ID NO: 34805 - DNA, 25 bp, Homo sapien
agatggaaatcttggcactcactat

SEQ ID NO: 34806 - DNA, 25 bp, Homo sapien
ttaagagtgctttaggatatgaggg

SEQ ID NO: 34807 - DNA, 25 bp, Homo sapien
tccctaagtgcacgctccgtggaag

SEQ ID NO: 34808 - DNA, 25 bp, Homo sapien
caaaggtataggagtagctgcaccc

SEQ ID NO: 34809 - DNA, 25 bp, Homo sapien
tggctaggcgtgtgtgctcttcttc

SEQ ID NO: 34810 - DNA, 25 bp, Homo sapien
atgatacactctccaaacaagctct

SEQ ID NO: 34811 - DNA, 25 bp, Homo sapien
tctttgagcaaaggtataggagtag

SEQ ID NO: 34812 - DNA, 25 bp, Homo sapien
cacgctccgtggaagaggtcgtccc

SEQ ID NO: 34813 - DNA, 25 bp, Homo sapien
gatctggctgagacgtctgttaccc

SEQ ID NO: 34814 - DNA, 25 bp, Homo sapien
cccagagaagaggaccagtctttga

SEQ ID NO: 34815 - DNA, 25 bp, Homo sapien
ctttaggatatgagggtgatctggc

SEQ ID NO: 34816 - DNA, 25 bp, Homo sapien
ctattgatcgccagggttgattcgg

SEQ ID NO: 34817 - DNA, 25 bp, Homo sapien
taaaatgctgttcttcttcgggctt

SEQ ID NO: 34818 - DNA, 25 bp, Homo sapien
gtggatcatcataacagcaaacatt

SEQ ID NO: 34819 - DNA, 25 bp, Homo sapien
caggagtagagactgtcttgtgctc

SEQ ID NO: 34820 - DNA, 25 bp, Homo sapien
ttccgtagtagcactcgtcaggtta

SEQ ID NO: 34821 - DNA, 25 bp, Homo sapien
caaaagatgaaacggaggttaagta

SEQ ID NO: 34822 - DNA, 25 bp, Homo sapien
cttcgggcttctcaagttggtcata

SEQ ID NO: 34823 - DNA, 25 bp, Homo sapien
ctcaaggacccagatattattaaca

SEQ ID NO: 34824 - DNA, 25 bp, Homo sapien
ttacattcgtgagaatcaggcagga

SEQ ID NO: 34825 - DNA, 25 bp, Homo sapien
ttgctctaggctacacagcttgtat

SEQ ID NO: 34826 - DNA, 25 bp, Homo sapien
ggtctcagttcactcaggaaacgtt

SEQ ID NO: 34827 - DNA, 25 bp, Homo sapien
ggttattcactgagccttcgggtct

SEQ ID NO: 34828 - DNA, 25 bp, Homo sapien
aagagaaacttaaataatgctacat

SEQ ID NO: 34829 - DNA, 25 bp, Homo sapien
agtggaaaggaatagggacaattta

SEQ ID NO: 34830 - DNA, 25 bp, Homo sapien
agagtggaaaggaatagggacaatt

SEQ ID NO: 34831 - DNA, 25 bp, Homo sapien
gttatatgcaccaaagttgttcttc

SEQ ID NO: 34832 - DNA, 25 bp, Homo sapien
atttgaaatggtgaaatgcaggtac

SEQ ID NO: 34833 - DNA, 25 bp, Homo sapien
aataatgctacatgtggacagtagt

SEQ ID NO: 34834 - DNA, 25 bp, Homo sapien
tatgtgtgtgttatatgcaccaaag

SEQ ID NO: 34835 - DNA, 25 bp, Homo sapien
tgaaatggtgaaatgcaggtacttt

SEQ ID NO: 34836 - DNA, 25 bp, Homo sapien
tatatttgaaatggtgaaatgcagg

SEQ ID NO: 34837 - DNA, 25 bp, Homo sapien
tgctacatgtggacagtagtaggtg

SEQ ID NO: 34838 - DNA, 25 bp, Homo sapien
aacttaaataatgctacatgtggac

SEQ ID NO: 34839 - DNA, 25 bp, Homo sapien
tgagcctagagatttcactacagaa

SEQ ID NO: 34840 - DNA, 25 bp, Homo sapien
actggtgaagctacctgagcctaga

SEQ ID NO: 34841 - DNA, 25 bp, Homo sapien
tcataaatagaactggcccacaatt

SEQ ID NO: 34842 - DNA, 25 bp, Homo sapien
tttccactctccagataggcttgta

SEQ ID NO: 34843 - DNA, 25 bp, Homo sapien
ttttaaattatggattcagactttc

SEQ ID NO: 34844 - DNA, 25 bp, Homo sapien
tggtatcaaggttattctggtagca

SEQ ID NO: 34845 - DNA, 25 bp, Homo sapien
tctggtagcaaaacatgttggaatg

SEQ ID NO: 34846 - DNA, 25 bp, Homo sapien
aattcactggtgaagctacctgagc

SEQ ID NO: 34847 - DNA, 25 bp, Homo sapien
ctcaactacaagtggatatctaaat

SEQ ID NO: 34848 - DNA, 25 bp, Homo sapien
tgttgatttaaaatagatgcctaat

SEQ ID NO: 34849 - DNA, 25 bp, Homo sapien
tccagataggcttgtatatggctgt

SEQ ID NO: 34850 - DNA, 25 bp, Homo sapien
tagtggcttgttactggcttctttc

SEQ ID NO: 34851 - DNA, 25 bp, Homo sapien
ttatgaacattgatgtacaagtgtt

SEQ ID NO: 34852 - DNA, 25 bp, Homo sapien
cccatttacgcaagccctaggcaat

SEQ ID NO: 34853 - DNA, 25 bp, Homo sapien
tgtgttgtagcatgtaagagaggta

SEQ ID NO: 34854 - DNA, 25 bp, Homo sapien
ttcactcagcataccgtttttaagg

SEQ ID NO: 34855 - DNA, 25 bp, Homo sapien
tatatagtatgtagtggcttgttac

SEQ ID NO: 34856 - DNA, 25 bp, Homo sapien
ttgaatctatacctaggagtgaaat

SEQ ID NO: 34857 - DNA, 25 bp, Homo sapien
caagccctaggcaatcaataatcta

SEQ ID NO: 34858 - DNA, 25 bp, Homo sapien
aagaaatgccatacccaatagccat

SEQ ID NO: 34859 - DNA, 25 bp, Homo sapien
catgtaagagaggtagttcactgtt

SEQ ID NO: 34860 - DNA, 25 bp, Homo sapien
ttaaggtttgtctgtgttgtagcat

SEQ ID NO: 34861 - DNA, 25 bp, Homo sapien
taccagataattatgagatagtcat

SEQ ID NO: 34862 - DNA, 25 bp, Homo sapien
ttcatttcaagatgtcaaggttatc

SEQ ID NO: 34863 - DNA, 25 bp, Homo sapien
ttaaatcattacgaactgagaccac

SEQ ID NO: 34864 - DNA, 25 bp, Homo sapien
tatatgaaagcaactaatgaagtac

SEQ ID NO: 34865 - DNA, 25 bp, Homo sapien
atgaagtactatttgaatcaagtgt

SEQ ID NO: 34866 - DNA, 25 bp, Homo sapien
ttacgaactgagaccacatttggac

SEQ ID NO: 34867 - DNA, 25 bp, Homo sapien
ggaactaatgaaaatccatggacaa

SEQ ID NO: 34868 - DNA, 25 bp, Homo sapien
gaaaatccatggacaagatcctgtt

SEQ ID NO: 34869 - DNA, 25 bp, Homo sapien
tcattttaattaagacagtcagggg

SEQ ID NO: 34870 - DNA, 25 bp, Homo sapien
cattatgttttcattggaagcattc

SEQ ID NO: 34871 - DNA, 25 bp, Homo sapien
ttaaatacaggccatacaggaacta

SEQ ID NO: 34872 - DNA, 25 bp, Homo sapien
accacaacctgtaccaaacacgtaa

SEQ ID NO: 34873 - DNA, 25 bp, Homo sapien
ttacgtgtttggtacaggttgtggt

SEQ ID NO: 34874 - DNA, 25 bp, Homo sapien
ttttggtactatcttgttctttcat

SEQ ID NO: 34875 - DNA, 25 bp, Homo sapien
tttagaggttacttaagattgttca

SEQ ID NO: 34876 - DNA, 25 bp, Homo sapien
tgctcctactcttgctgtgtgattc

SEQ ID NO: 34877 - DNA, 25 bp, Homo sapien
tctgttgctcctactcttgctgtgt

SEQ ID NO: 34878 - DNA, 25 bp, Homo sapien
ctcatgctgaaatgggactcccagt

SEQ ID NO: 34879 - DNA, 25 bp, Homo sapien
ttggtggtaagtgagttcttgctca

SEQ ID NO: 34880 - DNA, 25 bp, Homo sapien
attgtgcaatacttggccttctgtt

SEQ ID NO: 34881 - DNA, 25 bp, Homo sapien
tctctgttgctcctactcttgctgt

SEQ ID NO: 34882 - DNA, 25 bp, Homo sapien
gttgctcctactcttgctgtgtgat

SEQ ID NO: 34883 - DNA, 25 bp, Homo sapien
ctcctactcttgctgtgtgattcac

SEQ ID NO: 34884 - DNA, 25 bp, Homo sapien
aaaagtctgggacctccaccacttc

SEQ ID NO: 34885 - DNA, 25 bp, Homo sapien
atgcagggagattagtgtttgtttt

SEQ ID NO: 34886 - DNA, 25 bp, Homo sapien
aacgaaattgtgtggatgttaggac

SEQ ID NO: 34887 - DNA, 25 bp, Homo sapien
aaaggtctagccttgagagtgctac

SEQ ID NO: 34888 - DNA, 25 bp, Homo sapien
aactgagaagagataagcctgcttc

SEQ ID NO: 34889 - DNA, 25 bp, Homo sapien
tcacgacctgggagtttagaactca

SEQ ID NO: 34890 - DNA, 25 bp, Homo sapien
tggtgaggcaatgatgacacaaaat

SEQ ID NO: 34891 - DNA, 25 bp, Homo sapien
atgttaggaccctgctcccggtgtc

SEQ ID NO: 34892 - DNA, 25 bp, Homo sapien
gatgcctgagtgctttgtgcccaac

SEQ ID NO: 34893 - DNA, 25 bp, Homo sapien
cttaggagactaacgagacattaga

SEQ ID NO: 34894 - DNA, 25 bp, Homo sapien
caaaatgggaacttgtcacgacctg

SEQ ID NO: 34895 - DNA, 25 bp, Homo sapien
tgcagtagcaggctttcaggatttc

SEQ ID NO: 34896 - DNA, 25 bp, Homo sapien
accatgcctggtcaaattgcacctt

SEQ ID NO: 34897 - DNA, 25 bp, Homo sapien
gaaacaggaaccaggcagacccatc

SEQ ID NO: 34898 - DNA, 25 bp, Homo sapien
cttcctggcagtgttgggccatcaa

SEQ ID NO: 34899 - DNA, 25 bp, Homo sapien
tcccgaattccacagtagagacagc

SEQ ID NO: 34900 - DNA, 25 bp, Homo sapien
aacctgtgcttccagagagcagctc

SEQ ID NO: 34901 - DNA, 25 bp, Homo sapien
tgtcctcatagaaggaaacaggaac

SEQ ID NO: 34902 - DNA, 25 bp, Homo sapien
gtagagacagcctgccctcctgctt

SEQ ID NO: 34903 - DNA, 25 bp, Homo sapien
gggttaggaaagtcactagagcttc

SEQ ID NO: 34904 - DNA, 25 bp, Homo sapien
ccatcaaggcttcccatgtggggcc

SEQ ID NO: 34905 - DNA, 25 bp, Homo sapien
gccagaaggctgaccagacttaaac

SEQ ID NO: 34906 - DNA, 25 bp, Homo sapien
tatgtgccaaaagtgtacatcccac

SEQ ID NO: 34907 - DNA, 25 bp, Homo sapien
tataatataatacccacctttgagg

SEQ ID NO: 34908 - DNA, 25 bp, Homo sapien
ttaaaggacatcttcaatgtaagaa

SEQ ID NO: 34909 - DNA, 25 bp, Homo sapien
cacctttgagggttattactagaac

SEQ ID NO: 34910 - DNA, 25 bp, Homo sapien
ttgaagaccaagagacctcatttca

SEQ ID NO: 34911 - DNA, 25 bp, Homo sapien
aagttgctccagaatcttaaaggac

SEQ ID NO: 34912 - DNA, 25 bp, Homo sapien
tactagaaccataaacaatggatgc

SEQ ID NO: 34913 - DNA, 25 bp, Homo sapien
tggtcagactgctctcgatctcctt

SEQ ID NO: 34914 - DNA, 25 bp, Homo sapien
ggatgcttagcatactacctcacat

SEQ ID NO: 34915 - DNA, 25 bp, Homo sapien
acctggcccagtcttaatctctatg

SEQ ID NO: 34916 - DNA, 25 bp, Homo sapien
cctgccctttagaaaatatatgaac

SEQ ID NO: 34917 - DNA, 25 bp, Homo sapien
cataaacaatggatgcttagcatac

SEQ ID NO: 34918 - DNA, 25 bp, Homo sapien
tgggcactcgcctaacataatcagt

SEQ ID NO: 34919 - DNA, 25 bp, Homo sapien
aaacgcctaagaattaacagcattt

SEQ ID NO: 34920 - DNA, 25 bp, Homo sapien
tacagtaaagctgcatatggagcat

SEQ ID NO: 34921 - DNA, 25 bp, Homo sapien
aatgtccgacctcaaaacgcctaag

SEQ ID NO: 34922 - DNA, 25 bp, Homo sapien
tatggagcatgggaactacaaccaa

SEQ ID NO: 34923 - DNA, 25 bp, Homo sapien
aatgtactggctggattttggtgag

SEQ ID NO: 34924 - DNA, 25 bp, Homo sapien
ggtattccaccaagagacaatgtcc

SEQ ID NO: 34925 - DNA, 25 bp, Homo sapien
caaagtggttcttgatgccataagc

SEQ ID NO: 34926 - DNA, 25 bp, Homo sapien
actaatcagtaaggtggtattccac

SEQ ID NO: 34927 - DNA, 25 bp, Homo sapien
acagtatttgaaattgggcactcgc

SEQ ID NO: 34928 - DNA, 25 bp, Homo sapien
agttttcaatgtccaggtgatacct

SEQ ID NO: 34929 - DNA, 25 bp, Homo sapien
ctgtaaaacagcgataataatgata

SEQ ID NO: 34930 - DNA, 25 bp, Homo sapien
ataaagaccactcgcggtggctcat

SEQ ID NO: 34931 - DNA, 25 bp, Homo sapien
ctacttctgtcaccataagcaggtc

SEQ ID NO: 34932 - DNA, 25 bp, Homo sapien
tcaccataagcaggtctctgtgcct

SEQ ID NO: 34933 - DNA, 25 bp, Homo sapien
gaacttcaggataaattagaccagc

SEQ ID NO: 34934 - DNA, 25 bp, Homo sapien
aatgataaagaccactcgcggtggc

SEQ ID NO: 34935 - DNA, 25 bp, Homo sapien
ttatcttgagcgatcatatccactc

SEQ ID NO: 34936 - DNA, 25 bp, Homo sapien
aacagcgataataatgataaagacc

SEQ ID NO: 34937 - DNA, 25 bp, Homo sapien
tgtattgctatcttgaacttcagga

SEQ ID NO: 34938 - DNA, 25 bp, Homo sapien
attagaccagctagattcaaatctc

SEQ ID NO: 34939 - DNA, 25 bp, Homo sapien
ctgcgcccggccaagagatttatct

SEQ ID NO: 34940 - DNA, 25 bp, Homo sapien
tttcacacgtgagaggtttgaggta

SEQ ID NO: 34941 - DNA, 25 bp, Homo sapien
accagtagagctttcacacgtgaga

SEQ ID NO: 34942 - DNA, 25 bp, Homo sapien
aatatttagttaggccagttaaaga

SEQ ID NO: 34943 - DNA, 25 bp, Homo sapien
gtttattaaatacctcctatgagcc

SEQ ID NO: 34944 - DNA, 25 bp, Homo sapien
aatataattaactctagggctaacc

SEQ ID NO: 34945 - DNA, 25 bp, Homo sapien
taactctagggctaaccagtagagc

SEQ ID NO: 34946 - DNA, 25 bp, Homo sapien
taattaactctagggctaaccagta

SEQ ID NO: 34947 - DNA, 25 bp, Homo sapien
tagagctttcacacgtgagaggttt

SEQ ID NO: 34948 - DNA, 25 bp, Homo sapien
aaatacctcctatgagccaagcaat

SEQ ID NO: 34949 - DNA, 25 bp, Homo sapien
cctcctatgagccaagcaatacaat

SEQ ID NO: 34950 - DNA, 25 bp, Homo sapien
ctctagggctaaccagtagagcttt

SEQ ID NO: 34951 - DNA, 25 bp, Homo sapien
attgggaacctcaacgctggcgaca

SEQ ID NO: 34952 - DNA, 25 bp, Homo sapien
atcacgctgctcattgggaacctca

SEQ ID NO: 34953 - DNA, 25 bp, Homo sapien
caaaatgatcgtggccaaggcatga

SEQ ID NO: 34954 - DNA, 25 bp, Homo sapien
tactgtaaacaaaagcatggtggtg

SEQ ID NO: 34955 - DNA, 25 bp, Homo sapien
ggatggcgttaaagtcagctgtttt

SEQ ID NO: 34956 - DNA, 25 bp, Homo sapien
ccgtggtgtctcatcgaaggcactc

SEQ ID NO: 34957 - DNA, 25 bp, Homo sapien
tgccaggtgtcccatcagggccgca

SEQ ID NO: 34958 - DNA, 25 bp, Homo sapien
gattagccagctgaacgtactcatc

SEQ ID NO: 34959 - DNA, 25 bp, Homo sapien
gcgacaggatgaagatcatgaccat

SEQ ID NO: 34960 - DNA, 25 bp, Homo sapien
ctaccgagggcgctcttgtttttca

SEQ ID NO: 34961 - DNA, 25 bp, Homo sapien
ttccctatgcagctgtgggcaccca

SEQ ID NO: 34962 - DNA, 25 bp, Homo sapien
cacccatgatgatgggcacagacac

SEQ ID NO: 34963 - DNA, 25 bp, Homo sapien
cggcacccagggctagctcacttag

SEQ ID NO: 34964 - DNA, 25 bp, Homo sapien
actgcgccattgagaccagggtgct

SEQ ID NO: 34965 - DNA, 25 bp, Homo sapien
gatggatgtgcctacgttgacaccc

SEQ ID NO: 34966 - DNA, 25 bp, Homo sapien
atgagactgctgttagtggcgttgc

SEQ ID NO: 34967 - DNA, 25 bp, Homo sapien
aagccctctgaaattcatcccggtc

SEQ ID NO: 34968 - DNA, 25 bp, Homo sapien
accagcactgtgagccagttgaaga

SEQ ID NO: 34969 - DNA, 25 bp, Homo sapien
gccgcaccagtgcttaatgagactg

SEQ ID NO: 34970 - DNA, 25 bp, Homo sapien
actgctcatgatcatgtcggagtcc

SEQ ID NO: 34971 - DNA, 25 bp, Homo sapien
gccagttgaagatcccgtgcaccgc

SEQ ID NO: 34972 - DNA, 25 bp, Homo sapien
tgttcttctctgtgcacgggccgaa

SEQ ID NO: 34973 - DNA, 25 bp, Homo sapien
cttctaaaagacttatgtaaagcag

SEQ ID NO: 34974 - DNA, 25 bp, Homo sapien
tgtgagctactacactcggcctctg

SEQ ID NO: 34975 - DNA, 25 bp, Homo sapien
actcggcctctgtcagcattttcaa

SEQ ID NO: 34976 - DNA, 25 bp, Homo sapien
aaagatggccaaaatgcagtataga

SEQ ID NO: 34977 - DNA, 25 bp, Homo sapien
actacactcggcctctgtcagcatt

SEQ ID NO: 34978 - DNA, 25 bp, Homo sapien
catatcatttaaagtcccaagctaa

SEQ ID NO: 34979 - DNA, 25 bp, Homo sapien
cctgtcttggggtggttttgatcca

SEQ ID NO: 34980 - DNA, 25 bp, Homo sapien
gatggccaaaatgcagtatagaaat

SEQ ID NO: 34981 - DNA, 25 bp, Homo sapien
tcaatcctgtcttggggtggttttg

SEQ ID NO: 34982 - DNA, 25 bp, Homo sapien
tggggtggttttgatccacatttac

SEQ ID NO: 34983 - DNA, 25 bp, Homo sapien
ggccaaaatgcagtatagaaatgtt

SEQ ID NO: 34984 - DNA, 25 bp, Homo sapien
tgcccagtcacaggcattaagccta

SEQ ID NO: 34985 - DNA, 25 bp, Homo sapien
ttggtcttacaagaagcagacatgt

SEQ ID NO: 34986 - DNA, 25 bp, Homo sapien
ggcattaagcctaggatgattcatt

SEQ ID NO: 34987 - DNA, 25 bp, Homo sapien
cctgcacctgcttgggctactgtaa

SEQ ID NO: 34988 - DNA, 25 bp, Homo sapien
tttccttgtcttggtaaaagctcat

SEQ ID NO: 34989 - DNA, 25 bp, Homo sapien
tgcttgggctactgtaagctgttaa

SEQ ID NO: 34990 - DNA, 25 bp, Homo sapien
attgccctgtattactctgtgtctc

SEQ ID NO: 34991 - DNA, 25 bp, Homo sapien
agcagacatgtaggcattattgccc

SEQ ID NO: 34992 - DNA, 25 bp, Homo sapien
ttgtctgactagcataaagttgttc

SEQ ID NO: 34993 - DNA, 25 bp, Homo sapien
taaaagctcattaggttcattggtc

SEQ ID NO: 34994 - DNA, 25 bp, Homo sapien
taggatgattcatttcagacttgtc

SEQ ID NO: 34995 - DNA, 25 bp, Homo sapien
catagattttatgttgctcagtttt

SEQ ID NO: 34996 - DNA, 25 bp, Homo sapien
cacacaaaagaaaggcctgagagga

SEQ ID NO: 34997 - DNA, 25 bp, Homo sapien
ccagactactgttaggccaagagac

SEQ ID NO: 34998 - DNA, 25 bp, Homo sapien
agagactcaaagaagtactacaatg

SEQ ID NO: 34999 - DNA, 25 bp, Homo sapien
agtagcattgcccagactactgtta

SEQ ID NO: 35000 - DNA, 25 bp, Homo sapien
ggcagagcaggaagatacccgatct

SEQ ID NO: 35001 - DNA, 25 bp, Homo sapien
attgcccagactactgttaggccaa

SEQ ID NO: 35002 - DNA, 25 bp, Homo sapien
tactgttaggccaagagactcaaag

SEQ ID NO: 35003 - DNA, 25 bp, Homo sapien
gattagccactaattcattctctct

SEQ ID NO: 35004 - DNA, 25 bp, Homo sapien
agagcaggaagatacccgatctctg

SEQ ID NO: 35005 - DNA, 25 bp, Homo sapien
agactactgttaggccaagagactc

SEQ ID NO: 35006 - DNA, 25 bp, Homo sapien
acgagcggggagttcctcttttaca

SEQ ID NO: 35007 - DNA, 25 bp, Homo sapien
accgtacaggacaattgtgctatca

SEQ ID NO: 35008 - DNA, 25 bp, Homo sapien
tcaaatggacgacggtgtgttatta

SEQ ID NO: 35009 - DNA, 25 bp, Homo sapien
ggggttcctctagactgacttagca

SEQ ID NO: 35010 - DNA, 25 bp, Homo sapien
acagctggggcctcatagcctagcc

SEQ ID NO: 35011 - DNA, 25 bp, Homo sapien
atctgggtgtacttggcaattggta

SEQ ID NO: 35012 - DNA, 25 bp, Homo sapien
tacccttctggctgtgatacgagcg

SEQ ID NO: 35013 - DNA, 25 bp, Homo sapien
caggctcagcgccaaatacggccaa

SEQ ID NO: 35014 - DNA, 25 bp, Homo sapien
aggaaggtctgcctaaggcttaccc

SEQ ID NO: 35015 - DNA, 25 bp, Homo sapien
ttgttaagcaggaagaccgtacagg

SEQ ID NO: 35016 - DNA, 25 bp, Homo sapien
atcagcgtcaagactgtcacgataa

SEQ ID NO: 35017 - DNA, 25 bp, Homo sapien
ctgacagtgtggaacagaaaaaggc

SEQ ID NO: 35018 - DNA, 25 bp, Homo sapien
gtggaacagaaaaaggcagcagtac

SEQ ID NO: 35019 - DNA, 25 bp, Homo sapien
ccctgacagtgtggaacagaaaaag

SEQ ID NO: 35020 - DNA, 25 bp, Homo sapien
tccctgacagtgtggaacagaaaaa

SEQ ID NO: 35021 - DNA, 25 bp, Homo sapien
tgtggaacagaaaaaggcagcagta

SEQ ID NO: 35022 - DNA, 25 bp, Homo sapien
acagtgtggaacagaaaaaggcagc

SEQ ID NO: 35023 - DNA, 25 bp, Homo sapien
cagtgtggaacagaaaaaggcagca

SEQ ID NO: 35024 - DNA, 25 bp, Homo sapien
tggaacagaaaaaggcagcagtacc

SEQ ID NO: 35025 - DNA, 25 bp, Homo sapien
ttccctgacagtgtggaacagaaaa

SEQ ID NO: 35026 - DNA, 25 bp, Homo sapien
ggaaaaaatgccttctacggcattc

SEQ ID NO: 35027 - DNA, 25 bp, Homo sapien
tgacagtgtggaacagaaaaaggca

SEQ ID NO: 35028 - DNA, 25 bp, Homo sapien
tgaaaatgatagcagcattacatgc

SEQ ID NO: 35029 - DNA, 25 bp, Homo sapien
atattccatatgtccggccacgtgc

SEQ ID NO: 35030 - DNA, 25 bp, Homo sapien
gctccgtgtcgtgagcaatgaaaaa

SEQ ID NO: 35031 - DNA, 25 bp, Homo sapien
gacttaaaagaacacaggccatggt

SEQ ID NO: 35032 - DNA, 25 bp, Homo sapien
atgcaaattctacttggcagctctc

SEQ ID NO: 35033 - DNA, 25 bp, Homo sapien
cagggcctgttttattgggagagca

SEQ ID NO: 35034 - DNA, 25 bp, Homo sapien
ggcagctctctgactccaaggcagc

SEQ ID NO: 35035 - DNA, 25 bp, Homo sapien
ccagcaacaccgatctgagaagatt

SEQ ID NO: 35036 - DNA, 25 bp, Homo sapien
gggctcccggggtctgaatccacac

SEQ ID NO: 35037 - DNA, 25 bp, Homo sapien
tcctcagcacaaggtgaaacatttg

SEQ ID NO: 35038 - DNA, 25 bp, Homo sapien
ttaagcctaaggagacatacatttc

SEQ ID NO: 35039 - DNA, 25 bp, Homo sapien
tgagtatccagagtgctaacatcac

SEQ ID NO: 35040 - DNA, 25 bp, Homo sapien
tagaggagggtgattgcctctttat

SEQ ID NO: 35041 - DNA, 25 bp, Homo sapien
gagtcatgtatgttgggtgcctaaa

SEQ ID NO: 35042 - DNA, 25 bp, Homo sapien
tcaacatataatagggaatcaatgc

SEQ ID NO: 35043 - DNA, 25 bp, Homo sapien
gcctaaaagtatcagacagcaataa

SEQ ID NO: 35044 - DNA, 25 bp, Homo sapien
ttacttcagctaatggcgggagtca

SEQ ID NO: 35045 - DNA, 25 bp, Homo sapien
tttctgtacagactgcaccaggggt

SEQ ID NO: 35046 - DNA, 25 bp, Homo sapien
tctgatgagttagtagatctagtac

SEQ ID NO: 35047 - DNA, 25 bp, Homo sapien
ctgcaccaggggtaatcacctagta

SEQ ID NO: 35048 - DNA, 25 bp, Homo sapien
tcacaaaaacagagataaccaggct

SEQ ID NO: 35049 - DNA, 25 bp, Homo sapien
atagaagtacagaatctagcatttc

SEQ ID NO: 35050 - DNA, 25 bp, Homo sapien
gtatcaggagtaatctatcatgcaa

SEQ ID NO: 35051 - DNA, 25 bp, Homo sapien
tcaaagacagagatagggaacaatt

SEQ ID NO: 35052 - DNA, 25 bp, Homo sapien
gctcgaccactctgctgcatttcaa

SEQ ID NO: 35053 - DNA, 25 bp, Homo sapien
agagcaattttcatgtatcaggagt

SEQ ID NO: 35054 - DNA, 25 bp, Homo sapien
aaatgaaacttctggcaattagtca

SEQ ID NO: 35055 - DNA, 25 bp, Homo sapien
ctggcaattagtcaaagacagagat

SEQ ID NO: 35056 - DNA, 25 bp, Homo sapien
acacataatagtaggtatcatatac

SEQ ID NO: 35057 - DNA, 25 bp, Homo sapien
tggtaattccaacatgctaaactat

SEQ ID NO: 35058 - DNA, 25 bp, Homo sapien
gaaagagattattttatagagcaat

SEQ ID NO: 35059 - DNA, 25 bp, Homo sapien
agagatagggaacaattggtaattc

SEQ ID NO: 35060 - DNA, 25 bp, Homo sapien
tagttatacttgtggtcatctcata

SEQ ID NO: 35061 - DNA, 25 bp, Homo sapien
tgggcagatgtcctggcataagttt

SEQ ID NO: 35062 - DNA, 25 bp, Homo sapien
tttgccatcaggcaggcatacaaat

SEQ ID NO: 35063 - DNA, 25 bp, Homo sapien
atgtgagagccctttctttatggcc

SEQ ID NO: 35064 - DNA, 25 bp, Homo sapien
ctgaaattgtggtttttgtagcatc

SEQ ID NO: 35065 - DNA, 25 bp, Homo sapien
gcgcccagcctgacaaaggttttta

SEQ ID NO: 35066 - DNA, 25 bp, Homo sapien
ccagtccgagtttagataggcagct

SEQ ID NO: 35067 - DNA, 25 bp, Homo sapien
gcaggcatacaaatgtgagagccct

SEQ ID NO: 35068 - DNA, 25 bp, Homo sapien
tcaataataagggtgttgccagtcc

SEQ ID NO: 35069 - DNA, 25 bp, Homo sapien
tttgtgtataaggttgcaatggcct

SEQ ID NO: 35070 - DNA, 25 bp, Homo sapien
ctgggctctattagtcaaagttttc

SEQ ID NO: 35071 - DNA, 25 bp, Homo sapien
ctttatggccttcctgggctctatt

SEQ ID NO: 35072 - DNA, 25 bp, Homo sapien
tcaagtgataacagttgcctcaagc

SEQ ID NO: 35073 - DNA, 25 bp, Homo sapien
gaaggcagtgatacacagtgtttaa

SEQ ID NO: 35074 - DNA, 25 bp, Homo sapien
tgctgggacaagagctctctgcttc

SEQ ID NO: 35075 - DNA, 25 bp, Homo sapien
gtctgctgtgggtctctgccataca

SEQ ID NO: 35076 - DNA, 25 bp, Homo sapien
agaaaggaaccacatacaaagaaat

SEQ ID NO: 35077 - DNA, 25 bp, Homo sapien
ccaaggatgcttgtaacagacatta

SEQ ID NO: 35078 - DNA, 25 bp, Homo sapien
aaagatcaacgaaaacagaaaggaa

SEQ ID NO: 35079 - DNA, 25 bp, Homo sapien
caaagaaattagaggtctgctgtgg

SEQ ID NO: 35080 - DNA, 25 bp, Homo sapien
ttgcctcaagcatccagtgagatcc

SEQ ID NO: 35081 - DNA, 25 bp, Homo sapien
tctaagagatgattgagcttcactc

SEQ ID NO: 35082 - DNA, 25 bp, Homo sapien
atcagaggaattttagtatagcaca

SEQ ID NO: 35083 - DNA, 25 bp, Homo sapien
gtaaccatcataatgaagaagtcat

SEQ ID NO: 35084 - DNA, 25 bp, Homo sapien
caagtactctgccagttactgacaa

SEQ ID NO: 35085 - DNA, 25 bp, Homo sapien
gggccttagcatcaagttccacgat

SEQ ID NO: 35086 - DNA, 25 bp, Homo sapien
ttccacaaatatatgttgagcacct

SEQ ID NO: 35087 - DNA, 25 bp, Homo sapien
ttccacgattagcatacaagtactc

SEQ ID NO: 35088 - DNA, 25 bp, Homo sapien
tcaaagtgcactaatgtaaccatca

SEQ ID NO: 35089 - DNA, 25 bp, Homo sapien
tactgacaatactagcatccggatc

SEQ ID NO: 35090 - DNA, 25 bp, Homo sapien
aggtgtttggggtacatcaatgaat

SEQ ID NO: 35091 - DNA, 25 bp, Homo sapien
ctctgtctcccaagagctagaatta

SEQ ID NO: 35092 - DNA, 25 bp, Homo sapien
agcctctagtgctgtttcaaagtgc

SEQ ID NO: 35093 - DNA, 25 bp, Homo sapien
aggaattttaagctgggccttagca

SEQ ID NO: 35094 - DNA, 25 bp, Homo sapien
ttaaagataaaaccaacatgtctag

SEQ ID NO: 35095 - DNA, 25 bp, Homo sapien
cctgtcacgaattgtcatgtcatgg

SEQ ID NO: 35096 - DNA, 25 bp, Homo sapien
cttatgcttggtaatcgtccgttca

SEQ ID NO: 35097 - DNA, 25 bp, Homo sapien
agtgctatccttatgcttggtaatc

SEQ ID NO: 35098 - DNA, 25 bp, Homo sapien
gggcctgtcacgaattgtcatgtca

SEQ ID NO: 35099 - DNA, 25 bp, Homo sapien
aaaaccaacatgtctagtgctatcc

SEQ ID NO: 35100 - DNA, 25 bp, Homo sapien
ttcaaagggcctgtcacgaattgtc

SEQ ID NO: 35101 - DNA, 25 bp, Homo sapien
tcccaagtagccaggcacctgccac

SEQ ID NO: 35102 - DNA, 25 bp, Homo sapien
cttggtaatcgtccgttcaaagggc

SEQ ID NO: 35103 - DNA, 25 bp, Homo sapien
agaacagtggcctgatctcgggtca

SEQ ID NO: 35104 - DNA, 25 bp, Homo sapien
ggcctgtcacgaattgtcatgtcat

SEQ ID NO: 35105 - DNA, 25 bp, Homo sapien
tcctgagaagttcatggttggctcc

SEQ ID NO: 35106 - DNA, 25 bp, Homo sapien
tccaccactgttgaggctgtctgct

SEQ ID NO: 35107 - DNA, 25 bp, Homo sapien
cagtcttgaaagaaatgcaggtctt

SEQ ID NO: 35108 - DNA, 25 bp, Homo sapien
ttacggcctgtagcaggacagaatt

SEQ ID NO: 35109 - DNA, 25 bp, Homo sapien
tgccttgaaggaagcacaggtcact

SEQ ID NO: 35110 - DNA, 25 bp, Homo sapien
aaatgcaggtcttagaaggatacac

SEQ ID NO: 35111 - DNA, 25 bp, Homo sapien
aatgccaaaacctgtgagacaacaa

SEQ ID NO: 35112 - DNA, 25 bp, Homo sapien
gtgagacaacaatccagacagctgt

SEQ ID NO: 35113 - DNA, 25 bp, Homo sapien
tgccaaacaccggttctgagccatt

SEQ ID NO: 35114 - DNA, 25 bp, Homo sapien
atgggctacaaaatggacaggatca

SEQ ID NO: 35115 - DNA, 25 bp, Homo sapien
aaggatacacataacagaaactgcc

SEQ ID NO: 35116 - DNA, 25 bp, Homo sapien
cctatgtacttattagcacagattt

SEQ ID NO: 35117 - DNA, 25 bp, Homo sapien
tttatcaaaaacaggtgaggtgtgg

SEQ ID NO: 35118 - DNA, 25 bp, Homo sapien
ttgggatgaaaatgaatgtaagaaa

SEQ ID NO: 35119 - DNA, 25 bp, Homo sapien
ggtgtggagcaaaaagcaaatttca

SEQ ID NO: 35120 - DNA, 25 bp, Homo sapien
caacagtcagcatgtcttattagtt

SEQ ID NO: 35121 - DNA, 25 bp, Homo sapien
taataagatatgcaatgcaaggaac

SEQ ID NO: 35122 - DNA, 25 bp, Homo sapien
tcactagcaaggaataaaaagtcat

SEQ ID NO: 35123 - DNA, 25 bp, Homo sapien
taaatttagagctgacaacagtcag

SEQ ID NO: 35124 - DNA, 25 bp, Homo sapien
ctcagtgcagcatataaattgtaca

SEQ ID NO: 35125 - DNA, 25 bp, Homo sapien
ttagttgcatgtaggaaatatcttt

SEQ ID NO: 35126 - DNA, 25 bp, Homo sapien
gcaatgcaaggaacaatcaatggat

SEQ ID NO: 35127 - DNA, 25 bp, Homo sapien
tacacccatgggagagacatgcttc

SEQ ID NO: 35128 - DNA, 25 bp, Homo sapien
aaatctgcacaagggttcaagagtc

SEQ ID NO: 35129 - DNA, 25 bp, Homo sapien
catcagcagcagagatatttgcacc

SEQ ID NO: 35130 - DNA, 25 bp, Homo sapien
ggaaaaatgctgagtgtggatctta

SEQ ID NO: 35131 - DNA, 25 bp, Homo sapien
aacaactcaggaagacaataagccc

SEQ ID NO: 35132 - DNA, 25 bp, Homo sapien
atagagagaataactggcacatcca

SEQ ID NO: 35133 - DNA, 25 bp, Homo sapien
acagcaagaccttccctctgggaga

SEQ ID NO: 35134 - DNA, 25 bp, Homo sapien
aaatgcatagagtgactaccaggtc

SEQ ID NO: 35135 - DNA, 25 bp, Homo sapien
tgcagcactcagagagtacacccat

SEQ ID NO: 35136 - DNA, 25 bp, Homo sapien
ttataaaagcagtggcagatgcaag

SEQ ID NO: 35137 - DNA, 25 bp, Homo sapien
tttgaggagctgctgaatagtacct

SEQ ID NO: 35138 - DNA, 25 bp, Homo sapien
gtcccagatgtcaagacagaaccat

SEQ ID NO: 35139 - DNA, 25 bp, Homo sapien
gggcctcaataggtagctgttgaag

SEQ ID NO: 35140 - DNA, 25 bp, Homo sapien
acgagggacaaactgcagctaccag

SEQ ID NO: 35141 - DNA, 25 bp, Homo sapien
cccgagtcactgagaaatgctaaac

SEQ ID NO: 35142 - DNA, 25 bp, Homo sapien
aaagtacaaagatgactgttcccag

SEQ ID NO: 35143 - DNA, 25 bp, Homo sapien
agaaatgctaaactgctcctctgag

SEQ ID NO: 35144 - DNA, 25 bp, Homo sapien
ctgctgtcccagatgtcaagacaga

SEQ ID NO: 35145 - DNA, 25 bp, Homo sapien
cagctgccattttctaaagtacaaa

SEQ ID NO: 35146 - DNA, 25 bp, Homo sapien
tcctctgagcttgtgtgggaaggca

SEQ ID NO: 35147 - DNA, 25 bp, Homo sapien
aactgcagctaccagacaaggtcat

SEQ ID NO: 35148 - DNA, 25 bp, Homo sapien
acaaggtcatgtgcgaggacctccc

SEQ ID NO: 35149 - DNA, 25 bp, Homo sapien
actgctgtccatgcacacggggagc

SEQ ID NO: 35150 - DNA, 25 bp, Homo sapien
ttgctcttgcgctgatggcctgcgt

SEQ ID NO: 35151 - DNA, 25 bp, Homo sapien
ggcctgcgtggctcctgttgtcctc

SEQ ID NO: 35152 - DNA, 25 bp, Homo sapien
gcgtctgtgttcctgcaaggagcca

SEQ ID NO: 35153 - DNA, 25 bp, Homo sapien
acggggagcgttgcaaattgtgctt

SEQ ID NO: 35154 - DNA, 25 bp, Homo sapien
cctggatgggtctgcactgctgtcc

SEQ ID NO: 35155 - DNA, 25 bp, Homo sapien
gttaagccacgagacgaggcatgca

SEQ ID NO: 35156 - DNA, 25 bp, Homo sapien
acgacatcatcgacctggaacagac

SEQ ID NO: 35157 - DNA, 25 bp, Homo sapien
tacatctttgggagccgcctggacc

SEQ ID NO: 35158 - DNA, 25 bp, Homo sapien
tctctggcaggtttatggagccgta

SEQ ID NO: 35159 - DNA, 25 bp, Homo sapien
attgtgcttcccagcccatagtgcc

SEQ ID NO: 35160 - DNA, 25 bp, Homo sapien
tattctaggcttgcatgtcacatag

SEQ ID NO: 35161 - DNA, 25 bp, Homo sapien
tgttctagaatgtcgggccttatgc

SEQ ID NO: 35162 - DNA, 25 bp, Homo sapien
ccttatgctggtatctgggtagcgt

SEQ ID NO: 35163 - DNA, 25 bp, Homo sapien
cctgttctagaatgtcgggccttat

SEQ ID NO: 35164 - DNA, 25 bp, Homo sapien
agtaagtattctaggcttgcatgtc

SEQ ID NO: 35165 - DNA, 25 bp, Homo sapien
accggccaaagaaaagtaggccatg

SEQ ID NO: 35166 - DNA, 25 bp, Homo sapien
attcttagcttaccggccaaagaaa

SEQ ID NO: 35167 - DNA, 25 bp, Homo sapien
aatgtcgggccttatgctggtatct

SEQ ID NO: 35168 - DNA, 25 bp, Homo sapien
taggcttgcatgtcacataggtctc

SEQ ID NO: 35169 - DNA, 25 bp, Homo sapien
tggtatctgggtagcgtgtgattaa

SEQ ID NO: 35170 - DNA, 25 bp, Homo sapien
gccaaagaaaagtaggccatgagct

SEQ ID NO: 35171 - DNA, 25 bp, Homo sapien
tggggggccttctcccaatatgtcc

SEQ ID NO: 35172 - DNA, 25 bp, Homo sapien
atgctactgtttgtggtttaagaat

SEQ ID NO: 35173 - DNA, 25 bp, Homo sapien
aatgaagggatggcctgaaataaag

SEQ ID NO: 35174 - DNA, 25 bp, Homo sapien
tggccagattttggggggccttctc

SEQ ID NO: 35175 - DNA, 25 bp, Homo sapien
aacgcagcttcgtcacggtgagcta

SEQ ID NO: 35176 - DNA, 25 bp, Homo sapien
atggcctgaaataaaggggtgggtc

SEQ ID NO: 35177 - DNA, 25 bp, Homo sapien
caaacgcagcttcgtcacggtgagc

SEQ ID NO: 35178 - DNA, 25 bp, Homo sapien
cttgccttcattccggtaaacccaa

SEQ ID NO: 35179 - DNA, 25 bp, Homo sapien
acgcagcttcgtcacggtgagctac

SEQ ID NO: 35180 - DNA, 25 bp, Homo sapien
agcaaacgcagcttcgtcacggtga

SEQ ID NO: 35181 - DNA, 25 bp, Homo sapien
ctactgtttgtggtttaagaatgcc

SEQ ID NO: 35182 - DNA, 25 bp, Homo sapien
aatgaagggatggcctgaaataaag

SEQ ID NO: 35183 - DNA, 25 bp, Homo sapien
ctactgtttgtggtttaagaatgcc

SEQ ID NO: 35184 - DNA, 25 bp, Homo sapien
agcaaacgcagcttcgtcacggtga

SEQ ID NO: 35185 - DNA, 25 bp, Homo sapien
tggccagattttggggggccttctc

SEQ ID NO: 35186 - DNA, 25 bp, Homo sapien
atgctactgtttgtggtttaagaat

SEQ ID NO: 35187 - DNA, 25 bp, Homo sapien
acgcagcttcgtcacggtgagctac

SEQ ID NO: 35188 - DNA, 25 bp, Homo sapien
tttaagtggttttctgccctgggca

SEQ ID NO: 35189 - DNA, 25 bp, Homo sapien
cttgccttcattccggtaaacccaa

SEQ ID NO: 35190 - DNA, 25 bp, Homo sapien
aatgcctttaagtggttttctgccc

SEQ ID NO: 35191 - DNA, 25 bp, Homo sapien
tggggggccttctcccaatatgtcc

SEQ ID NO: 35192 - DNA, 25 bp, Homo sapien
gcacagatcgctcatgctactgttt

SEQ ID NO: 35193 - DNA, 25 bp, Homo sapien
ttattgagtgataaaacagttttca

SEQ ID NO: 35194 - DNA, 25 bp, Homo sapien
ccctgtggctcagctgtgtgacatc

SEQ ID NO: 35195 - DNA, 25 bp, Homo sapien
gtagtattagagaaggcaacattca

SEQ ID NO: 35196 - DNA, 25 bp, Homo sapien
ttattgagtgatacaataggtgggg

SEQ ID NO: 35197 - DNA, 25 bp, Homo sapien
caacattcaactggttaaaagcatt

SEQ ID NO: 35198 - DNA, 25 bp, Homo sapien
acagttttcaacagagaggcgattt

SEQ ID NO: 35199 - DNA, 25 bp, Homo sapien
taaaacagttttcaacagagaggcg

SEQ ID NO: 35200 - DNA, 25 bp, Homo sapien
tggctcagctgtgtgacatcgactc

SEQ ID NO: 35201 - DNA, 25 bp, Homo sapien
ctagagtgagctgcatttctgggtc

SEQ ID NO: 35202 - DNA, 25 bp, Homo sapien
ggacctggggaaagctttcaccaca

SEQ ID NO: 35203 - DNA, 25 bp, Homo sapien
gtggagattttattgagtgatacaa

SEQ ID NO: 35204 - DNA, 25 bp, Homo sapien
cgcacctggccattaagctataatt

SEQ ID NO: 35205 - DNA, 25 bp, Homo sapien
gcacctggccattaagctataattt

SEQ ID NO: 35206 - DNA, 25 bp, Homo sapien
tcatctacatagagtcacagtatac

SEQ ID NO: 35207 - DNA, 25 bp, Homo sapien
agtatacactctttaacacgtggtt

SEQ ID NO: 35208 - DNA, 25 bp, Homo sapien
tctacatagagtcacagtatacact

SEQ ID NO: 35209 - DNA, 25 bp, Homo sapien
tgattattttcacctgtcctagaat

SEQ ID NO: 35210 - DNA, 25 bp, Homo sapien
ccattttaagtgtactggttagtaa

SEQ ID NO: 35211 - DNA, 25 bp, Homo sapien
ttttcacctgtcctagaatttcatc

SEQ ID NO: 35212 - DNA, 25 bp, Homo sapien
cactgcaaaaagttcccttatggcc

SEQ ID NO: 35213 - DNA, 25 bp, Homo sapien
gaatttcatctacatagagtcacag

SEQ ID NO: 35214 - DNA, 25 bp, Homo sapien
ctttaacacgtggtttctttcactc

SEQ ID NO: 35215 - DNA, 25 bp, Homo sapien
ttgacttggcctcccatgtggaata

SEQ ID NO: 35216 - DNA, 25 bp, Homo sapien
aatcatcttgcgttgacttggcctc

SEQ ID NO: 35217 - DNA, 25 bp, Homo sapien
cggtggcgctaatgtggctcactgc

SEQ ID NO: 35218 - DNA, 25 bp, Homo sapien
atgtggaatacagcatgagtgttga

SEQ ID NO: 35219 - DNA, 25 bp, Homo sapien
ccgcgcctggctcttatatctctta

SEQ ID NO: 35220 - DNA, 25 bp, Homo sapien
acctctggaggaattctcatcactt

SEQ ID NO: 35221 - DNA, 25 bp, Homo sapien
atgggtgcctcaggtgctttaccaa

SEQ ID NO: 35222 - DNA, 25 bp, Homo sapien
tgtcccagattgtaatgggtgcctc

SEQ ID NO: 35223 - DNA, 25 bp, Homo sapien
atacagcatgagtgttgatgtcctc

SEQ ID NO: 35224 - DNA, 25 bp, Homo sapien
gctttaccaagcatgaagttttctc

SEQ ID NO: 35225 - DNA, 25 bp, Homo sapien
cttcagcttctagtgtagctggaac

SEQ ID NO: 35226 - DNA, 25 bp, Homo sapien
acttagacggcccagtgtccttcac

SEQ ID NO: 35227 - DNA, 25 bp, Homo sapien
tatctgggcctctgacttagacggc

SEQ ID NO: 35228 - DNA, 25 bp, Homo sapien
ctgcagccagctaaagtactaattt

SEQ ID NO: 35229 - DNA, 25 bp, Homo sapien
acccatattcgaccaagctgttcag

SEQ ID NO: 35230 - DNA, 25 bp, Homo sapien
aatacgttaatacaaacaggcttcc

SEQ ID NO: 35231 - DNA, 25 bp, Homo sapien
ggatgagaaaaagggtcatcactct

SEQ ID NO: 35232 - DNA, 25 bp, Homo sapien
cccaaataggtgagatcacaggcaa

SEQ ID NO: 35233 - DNA, 25 bp, Homo sapien
acagggttcaaaatggatagaattc

SEQ ID NO: 35234 - DNA, 25 bp, Homo sapien
tctcatagacactggactgggcctc

SEQ ID NO: 35235 - DNA, 25 bp, Homo sapien
gtctagcctgctccataaagtcatc

SEQ ID NO: 35236 - DNA, 25 bp, Homo sapien
tccaaaggctgcatatctgggcctc

SEQ ID NO: 35237 - DNA, 25 bp, Homo sapien
ctatatactggagagaataccaact

SEQ ID NO: 35238 - DNA, 25 bp, Homo sapien
aagctaagtgccaagtcctctgatt

SEQ ID NO: 35239 - DNA, 25 bp, Homo sapien
taggatgaaaagctaagtgccaagt

SEQ ID NO: 35240 - DNA, 25 bp, Homo sapien
aggaaatctttgaggtacacattgc

SEQ ID NO: 35241 - DNA, 25 bp, Homo sapien
cgtgggcactgactttaggaaatct

SEQ ID NO: 35242 - DNA, 25 bp, Homo sapien
acattgcaagttttaggtgatgcac

SEQ ID NO: 35243 - DNA, 25 bp, Homo sapien
ggtgccaggctcagagttctgaata

SEQ ID NO: 35244 - DNA, 25 bp, Homo sapien
gagagaataccaactgcatacaatc

SEQ ID NO: 35245 - DNA, 25 bp, Homo sapien
tgtcttcagccacctcttgagggcc

SEQ ID NO: 35246 - DNA, 25 bp, Homo sapien
ctaaaagctagtttctcgtgggcac

SEQ ID NO: 35247 - DNA, 25 bp, Homo sapien
aaaagctctctgctaggtgccaggc

SEQ ID NO: 35248 - DNA, 25 bp, Homo sapien
tagggaatcagggttttctcaatac

SEQ ID NO: 35249 - DNA, 25 bp, Homo sapien
ggcaataaattggaaactgaagtta

SEQ ID NO: 35250 - DNA, 25 bp, Homo sapien
tcccgagcttgcaaggtaactgttt

SEQ ID NO: 35251 - DNA, 25 bp, Homo sapien
ctaatggaagatttaggctagagga

SEQ ID NO: 35252 - DNA, 25 bp, Homo sapien
gtttcacattgttagcgatatcagc

SEQ ID NO: 35253 - DNA, 25 bp, Homo sapien
gcattacacgctgaaatctaacata

SEQ ID NO: 35254 - DNA, 25 bp, Homo sapien
attggtcctccaaatcgcaggctta

SEQ ID NO: 35255 - DNA, 25 bp, Homo sapien
gaagttaaagaagattgcagctgtc

SEQ ID NO: 35256 - DNA, 25 bp, Homo sapien
ttaaaggaaaacatcccgagcttgc

SEQ ID NO: 35257 - DNA, 25 bp, Homo sapien
cgcaggcttaccaattaaaaaatgt

SEQ ID NO: 35258 - DNA, 25 bp, Homo sapien
ggctagaggaagctatcattggtcc

SEQ ID NO: 35259 - DNA, 25 bp, Homo sapien
aaatgttttggaaatgtgcaataat

SEQ ID NO: 35260 - DNA, 25 bp, Homo sapien
aatgtgcaataatttgaaaaaactc

SEQ ID NO: 35261 - DNA, 25 bp, Homo sapien
tggataacagcaggccattagtagt

SEQ ID NO: 35262 - DNA, 25 bp, Homo sapien
tgttattggtaaggcctctggataa

SEQ ID NO: 35263 - DNA, 25 bp, Homo sapien
gaaaaaactcgcagataaactgtct

SEQ ID NO: 35264 - DNA, 25 bp, Homo sapien
gcagataaactgtctagcctagaaa

SEQ ID NO: 35265 - DNA, 25 bp, Homo sapien
aatctatttatgtgtgaagcaactg

SEQ ID NO: 35266 - DNA, 25 bp, Homo sapien
ttcaactgcacagggcagatgtcag

SEQ ID NO: 35267 - DNA, 25 bp, Homo sapien
attggtaaggcctctggataacagc

SEQ ID NO: 35268 - DNA, 25 bp, Homo sapien
ttatgtgtgaagcaactgtttatgt

SEQ ID NO: 35269 - DNA, 25 bp, Homo sapien
cctctggataacagcaggccattag

SEQ ID NO: 35270 - DNA, 25 bp, Homo sapien
cgtagaatgactaaactaagccagt

SEQ ID NO: 35271 - DNA, 25 bp, Homo sapien
agtctgactaaaattttgcaccctt

SEQ ID NO: 35272 - DNA, 25 bp, Homo sapien
agttaggctgagtgcatatctgttt

SEQ ID NO: 35273 - DNA, 25 bp, Homo sapien
ttgaacttatccctccagtctgact

SEQ ID NO: 35274 - DNA, 25 bp, Homo sapien
caccatgatggactgtagatctttt

SEQ ID NO: 35275 - DNA, 25 bp, Homo sapien
tctgagttcatccacgttgtcacag

SEQ ID NO: 35276 - DNA, 25 bp, Homo sapien
ggtcatgcagcatgtgtctgttcct

SEQ ID NO: 35277 - DNA, 25 bp, Homo sapien
tcctgtgagttcatcttttcgagat

SEQ ID NO: 35278 - DNA, 25 bp, Homo sapien
cattcagtgatggacagttaggctg

SEQ ID NO: 35279 - DNA, 25 bp, Homo sapien
tcctagcctttgacaaccatcattc

SEQ ID NO: 35280 - DNA, 25 bp, Homo sapien
tcgagattctatacataagtgaggt

SEQ ID NO: 35281 - DNA, 25 bp, Homo sapien
tgctgaatgttcactatatacgaag

SEQ ID NO: 35282 - DNA, 25 bp, Homo sapien
agtgactccgtatatattttagccc

SEQ ID NO: 35283 - DNA, 25 bp, Homo sapien
attaagcccataaaagttgccaatt

SEQ ID NO: 35284 - DNA, 25 bp, Homo sapien
cccaagtggaaattgcacccaaatg

SEQ ID NO: 35285 - DNA, 25 bp, Homo sapien
tctaggtgttaagtcaaatagtgac

SEQ ID NO: 35286 - DNA, 25 bp, Homo sapien
ataacaatgtttccatcaacgatgg

SEQ ID NO: 35287 - DNA, 25 bp, Homo sapien
attgcacccaaatggaaggaaggct

SEQ ID NO: 35288 - DNA, 25 bp, Homo sapien
atatacgaagcatatacagtcatgt

SEQ ID NO: 35289 - DNA, 25 bp, Homo sapien
tattttagcccaattaagcccataa

SEQ ID NO: 35290 - DNA, 25 bp, Homo sapien
catcaacgatggaccacatatacaa

SEQ ID NO: 35291 - DNA, 25 bp, Homo sapien
tcccataagattatactgctgtatt

SEQ ID NO: 35292 - DNA, 25 bp, Homo sapien
aactggagcgcggttccagatccgt

SEQ ID NO: 35293 - DNA, 25 bp, Homo sapien
tgaggcaccgcgtccggccaccttt

SEQ ID NO: 35294 - DNA, 25 bp, Homo sapien
gttccagatccgtgttgagaatatc

SEQ ID NO: 35295 - DNA, 25 bp, Homo sapien
aggtgccattctgattttttatagt

SEQ ID NO: 35296 - DNA, 25 bp, Homo sapien
ggtggataggggtttatataatgac

SEQ ID NO: 35297 - DNA, 25 bp, Homo sapien
tactagagttctggaactggagcgc

SEQ ID NO: 35298 - DNA, 25 bp, Homo sapien
ttaaggatattgtccctctgtcttc

SEQ ID NO: 35299 - DNA, 25 bp, Homo sapien
tccatgattgtgtttgggtggatag

SEQ ID NO: 35300 - DNA, 25 bp, Homo sapien
ataggggtttatataatgacaatcc

SEQ ID NO: 35301 - DNA, 25 bp, Homo sapien
cgcggttccagatccgtgttgagaa

SEQ ID NO: 35302 - DNA, 25 bp, Homo sapien
ctattgtttagaattcaggtgccat

SEQ ID NO: 35303 - DNA, 25 bp, Homo sapien
ccaccaccaaggatgagccatctga

SEQ ID NO: 35304 - DNA, 25 bp, Homo sapien
atgagtaaaatctggaaggtaatcc

SEQ ID NO: 35305 - DNA, 25 bp, Homo sapien
actgctgctgccatgagtaaaatct

SEQ ID NO: 35306 - DNA, 25 bp, Homo sapien
caggaagcctgcctccaagtgctca

SEQ ID NO: 35307 - DNA, 25 bp, Homo sapien
caccataggctgaaacatggagcta

SEQ ID NO: 35308 - DNA, 25 bp, Homo sapien
aatttaagctgttgtggccatacca

SEQ ID NO: 35309 - DNA, 25 bp, Homo sapien
aaataagctgcccaaggaaccttcc

SEQ ID NO: 35310 - DNA, 25 bp, Homo sapien
atggagctaaatgcatcacatacat

SEQ ID NO: 35311 - DNA, 25 bp, Homo sapien
attaggggctaaaatccacctggcc

SEQ ID NO: 35312 - DNA, 25 bp, Homo sapien
catttgacagaagggaaaactgatg

SEQ ID NO: 35313 - DNA, 25 bp, Homo sapien
gaaaactgatggcacagagctttta

SEQ ID NO: 35314 - DNA, 25 bp, Homo sapien
aacagaccgagtttggagaataact

SEQ ID NO: 35315 - DNA, 25 bp, Homo sapien
cagaatgtgaggtacaattaggcct

SEQ ID NO: 35316 - DNA, 25 bp, Homo sapien
tatcagcactctagaagcaggcata

SEQ ID NO: 35317 - DNA, 25 bp, Homo sapien
caaagggaatttgctcaccaatgtt

SEQ ID NO: 35318 - DNA, 25 bp, Homo sapien
tttgtgtgtgaaaactaagaagaca

SEQ ID NO: 35319 - DNA, 25 bp, Homo sapien
aacagagtaatgtacgctgctccac

SEQ ID NO: 35320 - DNA, 25 bp, Homo sapien
attaggccttgtagataaattactc

SEQ ID NO: 35321 - DNA, 25 bp, Homo sapien
taaagtctacagaggtcaggtatat

SEQ ID NO: 35322 - DNA, 25 bp, Homo sapien
cacccagggtgattcaaagggaatt

SEQ ID NO: 35323 - DNA, 25 bp, Homo sapien
aggtgaaacaatacttacagagatt

SEQ ID NO: 35324 - DNA, 25 bp, Homo sapien
acagaagcaaaaaggtgaaacaata

SEQ ID NO: 35325 - DNA, 25 bp, Homo sapien
ttttaaatctgtgaagccctccttc

SEQ ID NO: 35326 - DNA, 25 bp, Homo sapien
gcatcttctgggaatctgaattttc

SEQ ID NO: 35327 - DNA, 25 bp, Homo sapien
gccaggcacatagggaatgcccttt

SEQ ID NO: 35328 - DNA, 25 bp, Homo sapien
tacgtggctgactctacagtggtga

SEQ ID NO: 35329 - DNA, 25 bp, Homo sapien
cccatcatgagatgggtgtgggata

SEQ ID NO: 35330 - DNA, 25 bp, Homo sapien
tttttcgtagactggggtttcagca

SEQ ID NO: 35331 - DNA, 25 bp, Homo sapien
gtgggatagatgtggaattaccttc

SEQ ID NO: 35332 - DNA, 25 bp, Homo sapien
ttcctgttgccaggcacatagggaa

SEQ ID NO: 35333 - DNA, 25 bp, Homo sapien
tgtggatactagagatgttaaaata

SEQ ID NO: 35334 - DNA, 25 bp, Homo sapien
gttaaaataattacgtggctgactc

SEQ ID NO: 35335 - DNA, 25 bp, Homo sapien
tattaatgtggatactagagatgtt

SEQ ID NO: 35336 - DNA, 25 bp, Homo sapien
taaatgcaaagatagcagagagcac

SEQ ID NO: 35337 - DNA, 25 bp, Homo sapien
cttatccaaccctgggaaaataatg

SEQ ID NO: 35338 - DNA, 25 bp, Homo sapien
ctgagtaattgtgttcatgtgttcc

SEQ ID NO: 35339 - DNA, 25 bp, Homo sapien
tcatgtgttccaatagggcttatcc

SEQ ID NO: 35340 - DNA, 25 bp, Homo sapien
aggggaacctgaaccagccttgaat

SEQ ID NO: 35341 - DNA, 25 bp, Homo sapien
aaataatggcatctgacccaataag

SEQ ID NO: 35342 - DNA, 25 bp, Homo sapien
gggcttgtgaggatgttgtaaataa

SEQ ID NO: 35343 - DNA, 25 bp, Homo sapien
ctactgctaccagccaaacatttgt

SEQ ID NO: 35344 - DNA, 25 bp, Homo sapien
ccttgaatgaacagacagggcttgt

SEQ ID NO: 35345 - DNA, 25 bp, Homo sapien
ctgtagtttaaatcagcctggcctc

SEQ ID NO: 35346 - DNA, 25 bp, Homo sapien
tggcctctgcctgttattgacatac

SEQ ID NO: 35347 - DNA, 25 bp, Homo sapien
tttcagaaagagttgaaaattcctc

SEQ ID NO: 35348 - DNA, 25 bp, Homo sapien
ctgcttggaataatagctcaaggtt

SEQ ID NO: 35349 - DNA, 25 bp, Homo sapien
tgtgtctttgcacctactggtctct

SEQ ID NO: 35350 - DNA, 25 bp, Homo sapien
tcagatcagtagtttgagactagcc

SEQ ID NO: 35351 - DNA, 25 bp, Homo sapien
taaataataccgtctctgagaagcc

SEQ ID NO: 35352 - DNA, 25 bp, Homo sapien
gaatcagcttaaataagccgggcat

SEQ ID NO: 35353 - DNA, 25 bp, Homo sapien
atttgtgcctctattattatgtatc

SEQ ID NO: 35354 - DNA, 25 bp, Homo sapien
agcttaaataataccgtctctgaga

SEQ ID NO: 35355 - DNA, 25 bp, Homo sapien
accgtctctgagaagcctttatatc

SEQ ID NO: 35356 - DNA, 25 bp, Homo sapien
acctcagatcagtagtttgagacta

SEQ ID NO: 35357 - DNA, 25 bp, Homo sapien
acaaaaacaaaatcagcttaaataa

SEQ ID NO: 35358 - DNA, 25 bp, Homo sapien
tctgtgaatttgatgactctcgtgt

SEQ ID NO: 35359 - DNA, 25 bp, Homo sapien
ctccagagaggaacgccatccatgt

SEQ ID NO: 35360 - DNA, 25 bp, Homo sapien
aaagtgcaaaagtgcgtgtgtctaa

SEQ ID NO: 35361 - DNA, 25 bp, Homo sapien
tgttgtcagccctctaggggccctc

SEQ ID NO: 35362 - DNA, 25 bp, Homo sapien
atatcacaggagaaagtgcaaaagt

SEQ ID NO: 35363 - DNA, 25 bp, Homo sapien
gttcaggagcatcaaggacattccc

SEQ ID NO: 35364 - DNA, 25 bp, Homo sapien
aggacattcccatggctgtgcagcc

SEQ ID NO: 35365 - DNA, 25 bp, Homo sapien
tcataagcacccagttcaggagcat

SEQ ID NO: 35366 - DNA, 25 bp, Homo sapien
ttcatttagcataacgtcctcgagc

SEQ ID NO: 35367 - DNA, 25 bp, Homo sapien
aagtgactatgaatcagaggccaaa

SEQ ID NO: 35368 - DNA, 25 bp, Homo sapien
aagcccgggagacgcctgtctatct

SEQ ID NO: 35369 - DNA, 25 bp, Homo sapien
acacggctgaccagatatccgacac

SEQ ID NO: 35370 - DNA, 25 bp, Homo sapien
cctgtggccaaggtcttcaagagcc

SEQ ID NO: 35371 - DNA, 25 bp, Homo sapien
aagaaaggcaggacatggtttgttc

SEQ ID NO: 35372 - DNA, 25 bp, Homo sapien
gagtcccaaactacacacacggctg

SEQ ID NO: 35373 - DNA, 25 bp, Homo sapien
gaaagcgaaaggataacaactacaa

SEQ ID NO: 35374 - DNA, 25 bp, Homo sapien
gtagacagattactgggcaaccaca

SEQ ID NO: 35375 - DNA, 25 bp, Homo sapien
tatccgacacctgaagtgcacaggc

SEQ ID NO: 35376 - DNA, 25 bp, Homo sapien
atgaaaacaggagcaggtagaaact

SEQ ID NO: 35377 - DNA, 25 bp, Homo sapien
ccaggggctcctatctgtaggcatt

SEQ ID NO: 35378 - DNA, 25 bp, Homo sapien
acgaaacacctgaaagcatgaaaac

SEQ ID NO: 35379 - DNA, 25 bp, Homo sapien
acaactacaaagaagaaagccacag

SEQ ID NO: 35380 - DNA, 25 bp, Homo sapien
atgtcccacaggtgatccctacttt

SEQ ID NO: 35381 - DNA, 25 bp, Homo sapien
gcttgataatatgatgctcctgcta

SEQ ID NO: 35382 - DNA, 25 bp, Homo sapien
gatgctcctgctacctattataata

SEQ ID NO: 35383 - DNA, 25 bp, Homo sapien
atgacatagtagatatgtggctaat

SEQ ID NO: 35384 - DNA, 25 bp, Homo sapien
agcacaaatatataagcataacctg

SEQ ID NO: 35385 - DNA, 25 bp, Homo sapien
aatacctatcttacctggatgctta

SEQ ID NO: 35386 - DNA, 25 bp, Homo sapien
ttgaaatgaaaacgataatacctat

SEQ ID NO: 35387 - DNA, 25 bp, Homo sapien
ataaatatatgtcccacaggtgatc

SEQ ID NO: 35388 - DNA, 25 bp, Homo sapien
ttcaaatttaacatgtacacacctc

SEQ ID NO: 35389 - DNA, 25 bp, Homo sapien
atgtggctaataagttttctaaaac

SEQ ID NO: 35390 - DNA, 25 bp, Homo sapien
ctggatgcttatgaggattaattca

SEQ ID NO: 35391 - DNA, 25 bp, Homo sapien
cgtttctccgtataaagcccgtgta

SEQ ID NO: 35392 - DNA, 25 bp, Homo sapien
ttcaacttagccagggtgtccgact

SEQ ID NO: 35393 - DNA, 25 bp, Homo sapien
ctctggaatgaggaccttcaactta

SEQ ID NO: 35394 - DNA, 25 bp, Homo sapien
aaagcccgtgtatatcctctggaat

SEQ ID NO: 35395 - DNA, 25 bp, Homo sapien
ttgcacatggctgtcacgcggtttc

SEQ ID NO: 35396 - DNA, 25 bp, Homo sapien
tatcctgagtcatttgagagtaagt

SEQ ID NO: 35397 - DNA, 25 bp, Homo sapien
tcccagtgagtgtggctggtttttt

SEQ ID NO: 35398 - DNA, 25 bp, Homo sapien
tgtccgactctcaggacaccgctgt

SEQ ID NO: 35399 - DNA, 25 bp, Homo sapien
agagtagtggcatactcacggctca

SEQ ID NO: 35400 - DNA, 25 bp, Homo sapien
tttaaggctcgtcactggtcccagt

SEQ ID NO: 35401 - DNA, 25 bp, Homo sapien
gttggaggcagtatgaccgtttctc

SEQ ID NO: 35402 - DNA, 25 bp, Homo sapien
caccaagaagcaggattcgactgga

SEQ ID NO: 35403 - DNA, 25 bp, Homo sapien
cccatgcagccatctaaatgagctc

SEQ ID NO: 35404 - DNA, 25 bp, Homo sapien
tggaaaaataaaattgtctggagtg

SEQ ID NO: 35405 - DNA, 25 bp, Homo sapien
taaatgagctcatcggctgggcaca

SEQ ID NO: 35406 - DNA, 25 bp, Homo sapien
tctgccatatcagggcaccaagaag

SEQ ID NO: 35407 - DNA, 25 bp, Homo sapien
aaaattgtctggagtggtttatttc

SEQ ID NO: 35408 - DNA, 25 bp, Homo sapien
gttggcaaattctgtgtgatctttt

SEQ ID NO: 35409 - DNA, 25 bp, Homo sapien
aagcaggattcgactggaagaagtt

SEQ ID NO: 35410 - DNA, 25 bp, Homo sapien
atctaaatgagctcatcggctgggc

SEQ ID NO: 35411 - DNA, 25 bp, Homo sapien
ttcgactggaagaagttgggtgcca

SEQ ID NO: 35412 - DNA, 25 bp, Homo sapien
tctggagtggtttatttcaggggct

SEQ ID NO: 35413 - DNA, 25 bp, Homo sapien
tggtgaaaactaggactcaagctga

SEQ ID NO: 35414 - DNA, 25 bp, Homo sapien
cttgaccagagatagctagctagta

SEQ ID NO: 35415 - DNA, 25 bp, Homo sapien
tgaggctcaagcaaggtaagtgact

SEQ ID NO: 35416 - DNA, 25 bp, Homo sapien
ttaatgtgccagtaaactctatgtg

SEQ ID NO: 35417 - DNA, 25 bp, Homo sapien
cgtgcaaaaggacagctaacattct

SEQ ID NO: 35418 - DNA, 25 bp, Homo sapien
gctagctagtagctggtgaaaacta

SEQ ID NO: 35419 - DNA, 25 bp, Homo sapien
ttttgccgtgcaaaaggacagctaa

SEQ ID NO: 35420 - DNA, 25 bp, Homo sapien
gtaagtgacttgaccagagatagct

SEQ ID NO: 35421 - DNA, 25 bp, Homo sapien
ctcaagctgagataatgtggctgca

SEQ ID NO: 35422 - DNA, 25 bp, Homo sapien
atgtggcttctcagttaatcttccc

SEQ ID NO: 35423 - DNA, 25 bp, Homo sapien
tcggatgtatagattgggaagattt

SEQ ID NO: 35424 - DNA, 25 bp, Homo sapien
cttgaactctcaaagcattgggcgt

SEQ ID NO: 35425 - DNA, 25 bp, Homo sapien
agcctcagagaagacaatctttcca

SEQ ID NO: 35426 - DNA, 25 bp, Homo sapien
agcaaactgccaactaatacaccac

SEQ ID NO: 35427 - DNA, 25 bp, Homo sapien
ggagcacgcaacctagatccttctt

SEQ ID NO: 35428 - DNA, 25 bp, Homo sapien
tttaagacacccagtttgtagtgct

SEQ ID NO: 35429 - DNA, 25 bp, Homo sapien
accacctaaatgctgatgattgcca

SEQ ID NO: 35430 - DNA, 25 bp, Homo sapien
ctttccacagatcagaagggttggg

SEQ ID NO: 35431 - DNA, 25 bp, Homo sapien
ccagtaccaatttgcagcccagggg

SEQ ID NO: 35432 - DNA, 25 bp, Homo sapien
agttcacatagggtttgcgctccta

SEQ ID NO: 35433 - DNA, 25 bp, Homo sapien
agtaatgcttgctcatcctgctcac

SEQ ID NO: 35434 - DNA, 25 bp, Homo sapien
ttctgctatgccacctggttcctac

SEQ ID NO: 35435 - DNA, 25 bp, Homo sapien
aaatgtcccgagtgtgtctgtattc

SEQ ID NO: 35436 - DNA, 25 bp, Homo sapien
ctgaaaagcgctcagaggctatgtt

SEQ ID NO: 35437 - DNA, 25 bp, Homo sapien
tctgagtaagagaaactgaaaagcg

SEQ ID NO: 35438 - DNA, 25 bp, Homo sapien
caaaaacgggcttccaaatgatttc

SEQ ID NO: 35439 - DNA, 25 bp, Homo sapien
tgtgttacacatcctgaagaaagtt

SEQ ID NO: 35440 - DNA, 25 bp, Homo sapien
gttccagtagattatgacagtcata

SEQ ID NO: 35441 - DNA, 25 bp, Homo sapien
ctgaagaaagtttccgaaaacacac

SEQ ID NO: 35442 - DNA, 25 bp, Homo sapien
ggctatgttgaagaataccgggatc

SEQ ID NO: 35443 - DNA, 25 bp, Homo sapien
cttgggtaatttgagaaaatccatt

SEQ ID NO: 35444 - DNA, 25 bp, Homo sapien
tgtatgaaagacacaaaaacgggct

SEQ ID NO: 35445 - DNA, 25 bp, Homo sapien
agtgtcccttacgtacatctgagta

SEQ ID NO: 35446 - DNA, 25 bp, Homo sapien
aaattggccagtaattgagagaaat

SEQ ID NO: 35447 - DNA, 25 bp, Homo sapien
tgctttagcaggcttggatctgacc

SEQ ID NO: 35448 - DNA, 25 bp, Homo sapien
tcagaccctccatggttgaaatctt

SEQ ID NO: 35449 - DNA, 25 bp, Homo sapien
ctgggacatggactctgagccctct

SEQ ID NO: 35450 - DNA, 25 bp, Homo sapien
agagtgtaaccttgtcctgggacat

SEQ ID NO: 35451 - DNA, 25 bp, Homo sapien
tctacgaatgtatgagtgatttctt

SEQ ID NO: 35452 - DNA, 25 bp, Homo sapien
aatatgcagcctagaaattggccag

SEQ ID NO: 35453 - DNA, 25 bp, Homo sapien
tagaccagataacatatcgaggctc

SEQ ID NO: 35454 - DNA, 25 bp, Homo sapien
gtgtcctcagctagtacaattgcca

SEQ ID NO: 35455 - DNA, 25 bp, Homo sapien
attcctagtgcatggtacttattcc

SEQ ID NO: 35456 - DNA, 25 bp, Homo sapien
tgagccctctactgatagaccagat

SEQ ID NO: 35457 - DNA, 25 bp, Homo sapien
ttgctaatatccacagaataacctg

SEQ ID NO: 35458 - DNA, 25 bp, Homo sapien
atagtaaaagtactgaaattgggta

SEQ ID NO: 35459 - DNA, 25 bp, Homo sapien
attctgggtcttttacctctcctta

SEQ ID NO: 35460 - DNA, 25 bp, Homo sapien
tactgtggctttatagtaaaagtac

SEQ ID NO: 35461 - DNA, 25 bp, Homo sapien
tactgaaattgggtactatgggtcc

SEQ ID NO: 35462 - DNA, 25 bp, Homo sapien
attgggtactatgggtcctccaacc

SEQ ID NO: 35463 - DNA, 25 bp, Homo sapien
tatccacagaataacctgctgagtt

SEQ ID NO: 35464 - DNA, 25 bp, Homo sapien
gttttttgaccaataccacactgcc

SEQ ID NO: 35465 - DNA, 25 bp, Homo sapien
tgaaattgggtactatgggtcctcc

SEQ ID NO: 35466 - DNA, 25 bp, Homo sapien
tatgggtcctccaaccttgctcttc

SEQ ID NO: 35467 - DNA, 25 bp, Homo sapien
tttgaccaataccacactgccttga

SEQ ID NO: 35468 - DNA, 25 bp, Homo sapien
acctgcctgagcacaaaatcacttt

SEQ ID NO: 35469 - DNA, 25 bp, Homo sapien
atctgaggaagagacagcatgacac

SEQ ID NO: 35470 - DNA, 25 bp, Homo sapien
cattctggagaacaaacgggactta

SEQ ID NO: 35471 - DNA, 25 bp, Homo sapien
caaacgggacttacacataagaggc

SEQ ID NO: 35472 - DNA, 25 bp, Homo sapien
agacagcatgacacccaaggcagaa

SEQ ID NO: 35473 - DNA, 25 bp, Homo sapien
ttgatttagacaaccctcaggcttc

SEQ ID NO: 35474 - DNA, 25 bp, Homo sapien
ataagaggccaaaatgcaacaatgc

SEQ ID NO: 35475 - DNA, 25 bp, Homo sapien
tagcgacggctaatggctacaaaaa

SEQ ID NO: 35476 - DNA, 25 bp, Homo sapien
gcgcctggccaaggattgatttaga

SEQ ID NO: 35477 - DNA, 25 bp, Homo sapien
aaaatagaatcaatgaataaggcct

SEQ ID NO: 35478 - DNA, 25 bp, Homo sapien
tgggtgttaaaagcagcattctgga

SEQ ID NO: 35479 - DNA, 25 bp, Homo sapien
aaaaaccgtgactatgggcaagtta

SEQ ID NO: 35480 - DNA, 25 bp, Homo sapien
gtgtgaatgtgttgtttatgcttaa

SEQ ID NO: 35481 - DNA, 25 bp, Homo sapien
agacaaagatacttaccgcacccgg

SEQ ID NO: 35482 - DNA, 25 bp, Homo sapien
actccgttttgtgtcatctgaaatt

SEQ ID NO: 35483 - DNA, 25 bp, Homo sapien
atccttgcacaaactaatagaaata

SEQ ID NO: 35484 - DNA, 25 bp, Homo sapien
cccgcctctggtgtaagacaaagat

SEQ ID NO: 35485 - DNA, 25 bp, Homo sapien
attacaaaaaccgtgactatgggca

SEQ ID NO: 35486 - DNA, 25 bp, Homo sapien
gcacccggcccttagtcttgttatc

SEQ ID NO: 35487 - DNA, 25 bp, Homo sapien
ctgaacagaactaaagcaatccttg

SEQ ID NO: 35488 - DNA, 25 bp, Homo sapien
accatcccagcttcacaaattacaa

SEQ ID NO: 35489 - DNA, 25 bp, Homo sapien
attaaaataccgaactgaacagaac

SEQ ID NO: 35490 - DNA, 25 bp, Homo sapien
aatagatgtgcaagtagagtgttac

SEQ ID NO: 35491 - DNA, 25 bp, Homo sapien
tgtggaagagtggtctttgaactca

SEQ ID NO: 35492 - DNA, 25 bp, Homo sapien
tggagccagatgttagtgttgaatt

SEQ ID NO: 35493 - DNA, 25 bp, Homo sapien
gaactggttagcttggacataggat

SEQ ID NO: 35494 - DNA, 25 bp, Homo sapien
aaggagagacactaatccagcctgt

SEQ ID NO: 35495 - DNA, 25 bp, Homo sapien
acataggatgcattacaaggagtaa

SEQ ID NO: 35496 - DNA, 25 bp, Homo sapien
taccaggtgatgagatgtttcagca

SEQ ID NO: 35497 - DNA, 25 bp, Homo sapien
attgttatcaagatagagcggaggc

SEQ ID NO: 35498 - DNA, 25 bp, Homo sapien
ccaagagttgcaagattgagatcac

SEQ ID NO: 35499 - DNA, 25 bp, Homo sapien
aagtaacagcaaccggaactggtta

SEQ ID NO: 35500 - DNA, 25 bp, Homo sapien
ctaggagagagatttctgtgtctgt

SEQ ID NO: 35501 - DNA, 25 bp, Homo sapien
tctctatcctgaaaagctcctgcga

SEQ ID NO: 35502 - DNA, 25 bp, Homo sapien
gtggctgatggaaaacatgaaagct

SEQ ID NO: 35503 - DNA, 25 bp, Homo sapien
ttatactgacagagtggcatccggc

SEQ ID NO: 35504 - DNA, 25 bp, Homo sapien
gaaagctggctacagctccactaaa

SEQ ID NO: 35505 - DNA, 25 bp, Homo sapien
gtaccggcatggaccacaacacctg

SEQ ID NO: 35506 - DNA, 25 bp, Homo sapien
ctttaaagacaaataccatggtaga

SEQ ID NO: 35507 - DNA, 25 bp, Homo sapien
tcaagtacctgggagtaccggcatg

SEQ ID NO: 35508 - DNA, 25 bp, Homo sapien
tagcctcactgggatttatactgac

SEQ ID NO: 35509 - DNA, 25 bp, Homo sapien
aaagctcctgcgaaacatctaaatc

SEQ ID NO: 35510 - DNA, 25 bp, Homo sapien
tagaaagaaggaagaccatcatctt

SEQ ID NO: 35511 - DNA, 25 bp, Homo sapien
aatgagccttaaatccacgtgaaat

SEQ ID NO: 35512 - DNA, 25 bp, Homo sapien
gggtgccctgcttgcaaatggaaaa

SEQ ID NO: 35513 - DNA, 25 bp, Homo sapien
taagaaggttttactcagggtcata

SEQ ID NO: 35514 - DNA, 25 bp, Homo sapien
ggcacaggggcttacttaaacataa

SEQ ID NO: 35515 - DNA, 25 bp, Homo sapien
ccacaacaaagagtaggaagtgatt

SEQ ID NO: 35516 - DNA, 25 bp, Homo sapien
cctattcttcaagggcacaggggct

SEQ ID NO: 35517 - DNA, 25 bp, Homo sapien
attcagatagttggggatctgtccc

SEQ ID NO: 35518 - DNA, 25 bp, Homo sapien
tggaaaactgccacagagcagactt

SEQ ID NO: 35519 - DNA, 25 bp, Homo sapien
ctggggagaacaaagagactttccc

SEQ ID NO: 35520 - DNA, 25 bp, Homo sapien
tcaaagacatgaacacctaagacac

SEQ ID NO: 35521 - DNA, 25 bp, Homo sapien
acttaactgcagcaagcaggtgaca

SEQ ID NO: 35522 - DNA, 25 bp, Homo sapien
acaacttaactggaagggtgccctg

SEQ ID NO: 35523 - DNA, 25 bp, Homo sapien
taggtgcaacagagatggtatgacc

SEQ ID NO: 35524 - DNA, 25 bp, Homo sapien
tgacagaactgaatataacaatcac

SEQ ID NO: 35525 - DNA, 25 bp, Homo sapien
gggccaaatgcagtccactacctat

SEQ ID NO: 35526 - DNA, 25 bp, Homo sapien
taaatagcctgaatactgcagtatt

SEQ ID NO: 35527 - DNA, 25 bp, Homo sapien
aactatggatctgtgggccaaatgc

SEQ ID NO: 35528 - DNA, 25 bp, Homo sapien
tatagtctacaaggcaataggtatt

SEQ ID NO: 35529 - DNA, 25 bp, Homo sapien
tttagaaattggcaaactatggatc

SEQ ID NO: 35530 - DNA, 25 bp, Homo sapien
atctggtcctttacgcaaaaatgtc

SEQ ID NO: 35531 - DNA, 25 bp, Homo sapien
tacaatagttgaatagagcagtaat

SEQ ID NO: 35532 - DNA, 25 bp, Homo sapien
tggctgttctcatgctacaaggtgc

SEQ ID NO: 35533 - DNA, 25 bp, Homo sapien
cagagatggtatgacctgcaaaatc

SEQ ID NO: 35534 - DNA, 25 bp, Homo sapien
aaacgcagctgcctctcaggattag

SEQ ID NO: 35535 - DNA, 25 bp, Homo sapien
aaggttcaaggcctggtgatctcca

SEQ ID NO: 35536 - DNA, 25 bp, Homo sapien
ccattccagagggaattccagagcg

SEQ ID NO: 35537 - DNA, 25 bp, Homo sapien
attagaaagtggagcagcaaccgga

SEQ ID NO: 35538 - DNA, 25 bp, Homo sapien
aattccagagcggaatacggattcc

SEQ ID NO: 35539 - DNA, 25 bp, Homo sapien
cctcggtttgcggtctgtgaaatgg

SEQ ID NO: 35540 - DNA, 25 bp, Homo sapien
agttgaggtcccaaggttcaaggcc

SEQ ID NO: 35541 - DNA, 25 bp, Homo sapien
tctccttgcatctaagacgggtggg

SEQ ID NO: 35542 - DNA, 25 bp, Homo sapien
aggctcgtggcgaaaccactggaaa

SEQ ID NO: 35543 - DNA, 25 bp, Homo sapien
gagccttggcaaggcgctgctcttc

SEQ ID NO: 35544 - DNA, 25 bp, Homo sapien
gcccataggttgcagaaacgcagct

SEQ ID NO: 35545 - DNA, 25 bp, Homo sapien
gatatgaagtatatacaggagaccc

SEQ ID NO: 35546 - DNA, 25 bp, Homo sapien
tgtcagcttcataatcatgtgagtc

SEQ ID NO: 35547 - DNA, 25 bp, Homo sapien
taggctataagagttgtctgcaagt

SEQ ID NO: 35548 - DNA, 25 bp, Homo sapien
tcaggtcttcggtcttgtcagcttc

SEQ ID NO: 35549 - DNA, 25 bp, Homo sapien
aagtggatccatgcagtttaaacct

SEQ ID NO: 35550 - DNA, 25 bp, Homo sapien
gtctaaaaataagtggatccatgca

SEQ ID NO: 35551 - DNA, 25 bp, Homo sapien
cacacacagctgaaaacctgattat

SEQ ID NO: 35552 - DNA, 25 bp, Homo sapien
cctgaagcatacaagggttggggca

SEQ ID NO: 35553 - DNA, 25 bp, Homo sapien
gtacacatgcacataaggagattca

SEQ ID NO: 35554 - DNA, 25 bp, Homo sapien
catgtgagtcagttccttatagtaa

SEQ ID NO: 35555 - DNA, 25 bp, Homo sapien
acctaaatgaaaatagcccactgtt

SEQ ID NO: 35556 - DNA, 25 bp, Homo sapien
gggacaggccagaactaagcctact

SEQ ID NO: 35557 - DNA, 25 bp, Homo sapien
ggcagctgcgtcaagggaaaatcct

SEQ ID NO: 35558 - DNA, 25 bp, Homo sapien
cttctgcgcagtgagttcagggagt

SEQ ID NO: 35559 - DNA, 25 bp, Homo sapien
cttcttcctagacgtgcgaacaggg

SEQ ID NO: 35560 - DNA, 25 bp, Homo sapien
ccactccatgaatcgccagagctat

SEQ ID NO: 35561 - DNA, 25 bp, Homo sapien
tcttacagtgacctcttaccgtgcc

SEQ ID NO: 35562 - DNA, 25 bp, Homo sapien
aagcctactgctttcagggtttcca

SEQ ID NO: 35563 - DNA, 25 bp, Homo sapien
tcaagggaaaatcctgggccctctc

SEQ ID NO: 35564 - DNA, 25 bp, Homo sapien
gcagtgagttcagggagtctcctcc

SEQ ID NO: 35565 - DNA, 25 bp, Homo sapien
aatcgccagagctattcgtccctaa

SEQ ID NO: 35566 - DNA, 25 bp, Homo sapien
atttcaaaccttgcgcaatgtccct

SEQ ID NO: 35567 - DNA, 25 bp, Homo sapien
tgttaaaactatgtctaagtatttc

SEQ ID NO: 35568 - DNA, 25 bp, Homo sapien
atacaattgattggcgagtgtggtg

SEQ ID NO: 35569 - DNA, 25 bp, Homo sapien
ttcactggggttgcacggaatccaa

SEQ ID NO: 35570 - DNA, 25 bp, Homo sapien
ggggttgcacggaatccaaaaatca

SEQ ID NO: 35571 - DNA, 25 bp, Homo sapien
gctgttgtacatgatattgtaatca

SEQ ID NO: 35572 - DNA, 25 bp, Homo sapien
aaatcaatttgagcagaaagaaaca

SEQ ID NO: 35573 - DNA, 25 bp, Homo sapien
aatatggtttgttgttagttcttag

SEQ ID NO: 35574 - DNA, 25 bp, Homo sapien
gaaatacaattgattggcgagtgtg

SEQ ID NO: 35575 - DNA, 25 bp, Homo sapien
ttcatataaagatcttgcacatatt

SEQ ID NO: 35576 - DNA, 25 bp, Homo sapien
actggggttgcacggaatccaaaaa

SEQ ID NO: 35577 - DNA, 25 bp, Homo sapien
tttttcactggggttgcacggaatc

SEQ ID NO: 35578 - DNA, 25 bp, Homo sapien
aaaatttaggagaggatagacaatc

SEQ ID NO: 35579 - DNA, 25 bp, Homo sapien
ataaaatttaggagaggatagacaa

SEQ ID NO: 35580 - DNA, 25 bp, Homo sapien
atttaggagaggatagacaatcctt

SEQ ID NO: 35581 - DNA, 25 bp, Homo sapien
aggagaggatagacaatccttgggt

SEQ ID NO: 35582 - DNA, 25 bp, Homo sapien
aaataaaatttaggagaggatagac

SEQ ID NO: 35583 - DNA, 25 bp, Homo sapien
aaatttaggagaggatagacaatcc

SEQ ID NO: 35584 - DNA, 25 bp, Homo sapien
ctgactatgtagcaagaatattaga

SEQ ID NO: 35585 - DNA, 25 bp, Homo sapien
ccgccaccgccgacaatccttgggt

SEQ ID NO: 35586 - DNA, 25 bp, Homo sapien
tagaaataaaatttaggagaggata

SEQ ID NO: 35587 - DNA, 25 bp, Homo sapien
aacctgactatgtagcaagaatatt

SEQ ID NO: 35588 - DNA, 25 bp, Homo sapien
tttaggagaggatagacaatccttg

SEQ ID NO: 35589 - DNA, 25 bp, Homo sapien
aacctgactatgtagcaagaatatt

SEQ ID NO: 35590 - DNA, 25 bp, Homo sapien
aaaatttaggagaggatagacaatc

SEQ ID NO: 35591 - DNA, 25 bp, Homo sapien
atggctcccggcagctgaataaata

SEQ ID NO: 35592 - DNA, 25 bp, Homo sapien
caactaccaggtgttttatagacac

SEQ ID NO: 35593 - DNA, 25 bp, Homo sapien
ctgaataaatagcatgcatgtatct

SEQ ID NO: 35594 - DNA, 25 bp, Homo sapien
aaataaaatttaggagaggatagac

SEQ ID NO: 35595 - DNA, 25 bp, Homo sapien
tcctgaatgataatcgtgtcttaat

SEQ ID NO: 35596 - DNA, 25 bp, Homo sapien
atgaagtagtcaaactgtaaacagc

SEQ ID NO: 35597 - DNA, 25 bp, Homo sapien
tttaggagaggatagacaatccttg

SEQ ID NO: 35598 - DNA, 25 bp, Homo sapien
ctgtaaacagcatgaatcctgaatg

SEQ ID NO: 35599 - DNA, 25 bp, Homo sapien
accgccgacaatccttgggtgtatg

SEQ ID NO: 35600 - DNA, 25 bp, Homo sapien
agttttatataaggtgcaaaccctg

SEQ ID NO: 35601 - DNA, 25 bp, Homo sapien
caagaacagcctactgcaacaaagt

SEQ ID NO: 35602 - DNA, 25 bp, Homo sapien
tgttgggcccactggctcattccta

SEQ ID NO: 35603 - DNA, 25 bp, Homo sapien
cagtaccaagacacttaagccattg

SEQ ID NO: 35604 - DNA, 25 bp, Homo sapien
ctcttatgacaggagactcttggaa

SEQ ID NO: 35605 - DNA, 25 bp, Homo sapien
tataaggtgcaaaccctgttgggcc

SEQ ID NO: 35606 - DNA, 25 bp, Homo sapien
tctttcacctgagaaggaaaaggct

SEQ ID NO: 35607 - DNA, 25 bp, Homo sapien
taagccattgtagttcagaataagt

SEQ ID NO: 35608 - DNA, 25 bp, Homo sapien
ctaaaataacagtaccaagacactt

SEQ ID NO: 35609 - DNA, 25 bp, Homo sapien
acactcagtgtcgtgcacctgtagt

SEQ ID NO: 35610 - DNA, 25 bp, Homo sapien
tttaaactcttatgacaggagactc

SEQ ID NO: 35611 - DNA, 25 bp, Homo sapien
tggtaacgcaagcttcaaacaaaga

SEQ ID NO: 35612 - DNA, 25 bp, Homo sapien
tctctgtagtaagccagggttagtt

SEQ ID NO: 35613 - DNA, 25 bp, Homo sapien
caagctgagacaatcccagaatttt

SEQ ID NO: 35614 - DNA, 25 bp, Homo sapien
atttttactgtaggagaatcttctc

SEQ ID NO: 35615 - DNA, 25 bp, Homo sapien
atttctttagtagaagcgaggtttc

SEQ ID NO: 35616 - DNA, 25 bp, Homo sapien
taacgccaatagaaatggtaacgca

SEQ ID NO: 35617 - DNA, 25 bp, Homo sapien
gtgtggacataacgccaatagaaat

SEQ ID NO: 35618 - DNA, 25 bp, Homo sapien
tttgttccctagttgtatcgcgata

SEQ ID NO: 35619 - DNA, 25 bp, Homo sapien
tccataaaacaagctgagacaatcc

SEQ ID NO: 35620 - DNA, 25 bp, Homo sapien
gtatcgcgatagttctgtacaatcc

SEQ ID NO: 35621 - DNA, 25 bp, Homo sapien
ttcaggctcatcttgtgtggacata

SEQ ID NO: 35622 - DNA, 25 bp, Homo sapien
tctaagtctttgaagccgaactata

SEQ ID NO: 35623 - DNA, 25 bp, Homo sapien
aaagataaagtgatgggattctaag

SEQ ID NO: 35624 - DNA, 25 bp, Homo sapien
acagaactaggcttgaagccttgtc

SEQ ID NO: 35625 - DNA, 25 bp, Homo sapien
tgatacattgttagcttggataatt

SEQ ID NO: 35626 - DNA, 25 bp, Homo sapien
ataaagtgatgggattctaagtctt

SEQ ID NO: 35627 - DNA, 25 bp, Homo sapien
ccatgatgttaattggtgagacata

SEQ ID NO: 35628 - DNA, 25 bp, Homo sapien
aaagacaaaatccatgcaagaccaa

SEQ ID NO: 35629 - DNA, 25 bp, Homo sapien
tgatgttcacgctaaccaacctaac

SEQ ID NO: 35630 - DNA, 25 bp, Homo sapien
ttataaaatctgctttaagagacag

SEQ ID NO: 35631 - DNA, 25 bp, Homo sapien
agaccaaataagtaactattgatac

SEQ ID NO: 35632 - DNA, 25 bp, Homo sapien
taattggtgagacatattgatgttc

SEQ ID NO: 35633 - DNA, 25 bp, Homo sapien
agtggcatgactgaggccttgacct

SEQ ID NO: 35634 - DNA, 25 bp, Homo sapien
catcaggatgctctgacttagactt

SEQ ID NO: 35635 - DNA, 25 bp, Homo sapien
tgacttagactttgacggcccatcc

SEQ ID NO: 35636 - DNA, 25 bp, Homo sapien
acacctcgatccactccagttgatt

SEQ ID NO: 35637 - DNA, 25 bp, Homo sapien
gtaaccaatgtctagctgcttaatc

SEQ ID NO: 35638 - DNA, 25 bp, Homo sapien
catctgtttctcctgcttggtgcac

SEQ ID NO: 35639 - DNA, 25 bp, Homo sapien
atccagttctccacccaaacggttg

SEQ ID NO: 35640 - DNA, 25 bp, Homo sapien
ctgcttggtgcaccctagttctacc

SEQ ID NO: 35641 - DNA, 25 bp, Homo sapien
attacacatatgagcctggtccact

SEQ ID NO: 35642 - DNA, 25 bp, Homo sapien
ccatcttagcctgggaccacaggta

SEQ ID NO: 35643 - DNA, 25 bp, Homo sapien
ctgtcactcaagcagtggcatgact

SEQ ID NO: 35644 - DNA, 25 bp, Homo sapien
tgtgcaatacaagctggcaaacgtt

SEQ ID NO: 35645 - DNA, 25 bp, Homo sapien
ttcttggctcagagtcaggctgagt

SEQ ID NO: 35646 - DNA, 25 bp, Homo sapien
caagctggcaaacgtttagaactcc

SEQ ID NO: 35647 - DNA, 25 bp, Homo sapien
tgagcgttataagtggatgtgtcca

SEQ ID NO: 35648 - DNA, 25 bp, Homo sapien
tccttgggtctaagctccaaagctt

SEQ ID NO: 35649 - DNA, 25 bp, Homo sapien
tccacttttactaccaggcaaactc

SEQ ID NO: 35650 - DNA, 25 bp, Homo sapien
tcaggctgagtgaccttgaggaagt

SEQ ID NO: 35651 - DNA, 25 bp, Homo sapien
ttcaagtgagcgttataagtggatg

SEQ ID NO: 35652 - DNA, 25 bp, Homo sapien
tatacaattggaatgaatgggagct

SEQ ID NO: 35653 - DNA, 25 bp, Homo sapien
aatgaatgggagctgtgcaatacaa

SEQ ID NO: 35654 - DNA, 25 bp, Homo sapien
accttgaggaagttacgtagctatc

SEQ ID NO: 35655 - DNA, 25 bp, Homo sapien
ccatgagggtccattgatataatat

SEQ ID NO: 35656 - DNA, 25 bp, Homo sapien
attctgaattcctaaaaggaaggta

SEQ ID NO: 35657 - DNA, 25 bp, Homo sapien
gtttatgacttcagaaaagatttcc

SEQ ID NO: 35658 - DNA, 25 bp, Homo sapien
ttgttcataggacaataacaatgaa

SEQ ID NO: 35659 - DNA, 25 bp, Homo sapien
taataaaaacacttccatgagggtc

SEQ ID NO: 35660 - DNA, 25 bp, Homo sapien
ggatttggagatagatatttgttca

SEQ ID NO: 35661 - DNA, 25 bp, Homo sapien
ctttatggaactgaattatggaatc

SEQ ID NO: 35662 - DNA, 25 bp, Homo sapien
agagagaaaaaagctagggaataaa

SEQ ID NO: 35663 - DNA, 25 bp, Homo sapien
aaaatgtagcagtcttttcactcaa

SEQ ID NO: 35664 - DNA, 25 bp, Homo sapien
agctagggaataaaaaatgtagcag

SEQ ID NO: 35665 - DNA, 25 bp, Homo sapien
attatggaatcgatagtttatgact

SEQ ID NO: 35666 - DNA, 25 bp, Homo sapien
tcagcagtcagaaaagggacttatt

SEQ ID NO: 35667 - DNA, 25 bp, Homo sapien
ttacagttttggaggtcagcagtca

SEQ ID NO: 35668 - DNA, 25 bp, Homo sapien
gctaggaaggtgtgctagtttccta

SEQ ID NO: 35669 - DNA, 25 bp, Homo sapien
tttagaggcttcttgcattccttgg

SEQ ID NO: 35670 - DNA, 25 bp, Homo sapien
caggaaggacatgggttgccatttt

SEQ ID NO: 35671 - DNA, 25 bp, Homo sapien
acgtggagtttactttctggtggaa

SEQ ID NO: 35672 - DNA, 25 bp, Homo sapien
aaaaaacatggaagggagataggaa

SEQ ID NO: 35673 - DNA, 25 bp, Homo sapien
acttattgggttaaaatcagtgtcc

SEQ ID NO: 35674 - DNA, 25 bp, Homo sapien
attttagataggatggctaggaagg

SEQ ID NO: 35675 - DNA, 25 bp, Homo sapien
ctaggggagaatttgtgtcctgaca

SEQ ID NO: 35676 - DNA, 25 bp, Homo sapien
ttaaaatcagtgtccataaacctgg

SEQ ID NO: 35677 - DNA, 25 bp, Homo sapien
tgctgagctctcttgtaggttctaa

SEQ ID NO: 35678 - DNA, 25 bp, Homo sapien
ctgagctctcttgtaggttctaaaa

SEQ ID NO: 35679 - DNA, 25 bp, Homo sapien
ataatcatctgtagttgaatattaa

SEQ ID NO: 35680 - DNA, 25 bp, Homo sapien
agcatccttgctgagctctcttgta

SEQ ID NO: 35681 - DNA, 25 bp, Homo sapien
ttgtatccagcatccttgctgagct

SEQ ID NO: 35682 - DNA, 25 bp, Homo sapien
atagatttatcttttgtcaccacaa

SEQ ID NO: 35683 - DNA, 25 bp, Homo sapien
tgcgtgccattatgcccagcgaaat

SEQ ID NO: 35684 - DNA, 25 bp, Homo sapien
gatttctgggtattcatttgtatcc

SEQ ID NO: 35685 - DNA, 25 bp, Homo sapien
tgccattatgcccagcgaaattttt

SEQ ID NO: 35686 - DNA, 25 bp, Homo sapien
aaaatttggtgatttctgggtattc

SEQ ID NO: 35687 - DNA, 25 bp, Homo sapien
gtgcgtgccattatgcccagcgaaa

SEQ ID NO: 35688 - DNA, 25 bp, Homo sapien
cccggcccgccatcttttttctaca

SEQ ID NO: 35689 - DNA, 25 bp, Homo sapien
acacaccagatgttatggcgttgtt

SEQ ID NO: 35690 - DNA, 25 bp, Homo sapien
acacgcatacaaagttaacagaggc

SEQ ID NO: 35691 - DNA, 25 bp, Homo sapien
tacacacaccagatgttatggcgtt

SEQ ID NO: 35692 - DNA, 25 bp, Homo sapien
tacacaccaacacacgcatacaaag

SEQ ID NO: 35693 - DNA, 25 bp, Homo sapien
tttctacacacaccagatgttatgg

SEQ ID NO: 35694 - DNA, 25 bp, Homo sapien
ttaacagaggctaatctggggtcct

SEQ ID NO: 35695 - DNA, 25 bp, Homo sapien
catacaaagttaacagaggctaatc

SEQ ID NO: 35696 - DNA, 25 bp, Homo sapien
agaggctaatctggggtcctagaac

SEQ ID NO: 35697 - DNA, 25 bp, Homo sapien
tatggcgttgtttttggagaaagag

SEQ ID NO: 35698 - DNA, 25 bp, Homo sapien
aacaggttagcagcttttattcttc

SEQ ID NO: 35699 - DNA, 25 bp, Homo sapien
acacaccagatgttatggcgttgtt

SEQ ID NO: 35700 - DNA, 25 bp, Homo sapien
tacacaccaacacacgcatacaaag

SEQ ID NO: 35701 - DNA, 25 bp, Homo sapien
aacaggttagcagcttttattcttc

SEQ ID NO: 35702 - DNA, 25 bp, Homo sapien
tcttgttgctgagactagagtgcag

SEQ ID NO: 35703 - DNA, 25 bp, Homo sapien
ttctacacacaccagatgttatggc

SEQ ID NO: 35704 - DNA, 25 bp, Homo sapien
catacaaagttaacagaggctaatc

SEQ ID NO: 35705 - DNA, 25 bp, Homo sapien
acacgcatacaaagttaacagaggc

SEQ ID NO: 35706 - DNA, 25 bp, Homo sapien
gaaagagaaacaggttagcagcttt

SEQ ID NO: 35707 - DNA, 25 bp, Homo sapien
ttaacagaggctaatctggggtcct

SEQ ID NO: 35708 - DNA, 25 bp, Homo sapien
agaggctaatctggggtcctagaac

SEQ ID NO: 35709 - DNA, 25 bp, Homo sapien
tatggcgttgtttttggagaaagag

SEQ ID NO: 35710 - DNA, 25 bp, Homo sapien
tgtggggaatgataattgtgccatc

SEQ ID NO: 35711 - DNA, 25 bp, Homo sapien
gcccagggcatcatgctgcctgaaa

SEQ ID NO: 35712 - DNA, 25 bp, Homo sapien
ttacttgtggataataggcatggga

SEQ ID NO: 35713 - DNA, 25 bp, Homo sapien
ctgggaaaagttatgaggaacattc

SEQ ID NO: 35714 - DNA, 25 bp, Homo sapien
tgtaggttatctgtgctccagggct

SEQ ID NO: 35715 - DNA, 25 bp, Homo sapien
gcggatgtgattgatagaaactagt

SEQ ID NO: 35716 - DNA, 25 bp, Homo sapien
tgatgaaacagcatgcggatgtgat

SEQ ID NO: 35717 - DNA, 25 bp, Homo sapien
tgaaacagcagattcagtccagatc

SEQ ID NO: 35718 - DNA, 25 bp, Homo sapien
aggcatgggactctaaaaattactg

SEQ ID NO: 35719 - DNA, 25 bp, Homo sapien
agaaactagtgggaccaacatgtca

SEQ ID NO: 35720 - DNA, 25 bp, Homo sapien
acatgtcatggagagttcagcagag

SEQ ID NO: 35721 - DNA, 25 bp, Homo sapien
ccatgcccagccgggattagtctat

SEQ ID NO: 35722 - DNA, 25 bp, Homo sapien
aagagaagtttgatggacttacagt

SEQ ID NO: 35723 - DNA, 25 bp, Homo sapien
atgcccagccgggattagtctattt

SEQ ID NO: 35724 - DNA, 25 bp, Homo sapien
cagtttcattaaactggggaggact

SEQ ID NO: 35725 - DNA, 25 bp, Homo sapien
tacagtttcattaaactggggagga

SEQ ID NO: 35726 - DNA, 25 bp, Homo sapien
agaagtttgatggacttacagtttc

SEQ ID NO: 35727 - DNA, 25 bp, Homo sapien
gaaagagaagtttgatggacttaca

SEQ ID NO: 35728 - DNA, 25 bp, Homo sapien
acagtttcattaaactggggaggac

SEQ ID NO: 35729 - DNA, 25 bp, Homo sapien
caccatgcccagccgggattagtct

SEQ ID NO: 35730 - DNA, 25 bp, Homo sapien
tttcattaaactggggaggactcac

SEQ ID NO: 35731 - DNA, 25 bp, Homo sapien
gagaagtttgatggacttacagttt

SEQ ID NO: 35732 - DNA, 25 bp, Homo sapien
catttcattggttttggggtggcat

SEQ ID NO: 35733 - DNA, 25 bp, Homo sapien
tatctggcttggtgtgactttctgt

SEQ ID NO: 35734 - DNA, 25 bp, Homo sapien
ttgctactactgtaccagaggtcac

SEQ ID NO: 35735 - DNA, 25 bp, Homo sapien
cgacaacttgaatattatctggctt

SEQ ID NO: 35736 - DNA, 25 bp, Homo sapien
ttagacatgtgttagactgcttgct

SEQ ID NO: 35737 - DNA, 25 bp, Homo sapien
ttcctaggaactcacttagacatgt

SEQ ID NO: 35738 - DNA, 25 bp, Homo sapien
attaaagttctttgacagctcctcc

SEQ ID NO: 35739 - DNA, 25 bp, Homo sapien
ggggtggcatttgtccttgatgaac

SEQ ID NO: 35740 - DNA, 25 bp, Homo sapien
tttatgactgattttcgacaacttg

SEQ ID NO: 35741 - DNA, 25 bp, Homo sapien
cagaggtcaccaagggtttatttgt

SEQ ID NO: 35742 - DNA, 25 bp, Homo sapien
cttgatgaacaaccagcagtcattc

SEQ ID NO: 35743 - DNA, 25 bp, Homo sapien
aagagcaagataaaatgtctatttt

SEQ ID NO: 35744 - DNA, 25 bp, Homo sapien
gggagtgtgaagaatatattgagtt

SEQ ID NO: 35745 - DNA, 25 bp, Homo sapien
gtaatggcaacaggaggatgatttt

SEQ ID NO: 35746 - DNA, 25 bp, Homo sapien
cataagttgaagagtgtaatggcaa

SEQ ID NO: 35747 - DNA, 25 bp, Homo sapien
ttaggccactaggaatagctaaacc

SEQ ID NO: 35748 - DNA, 25 bp, Homo sapien
tgagggacatctgggtatacagtta

SEQ ID NO: 35749 - DNA, 25 bp, Homo sapien
tgttgctgtaatgaaagtgtttcaa

SEQ ID NO: 35750 - DNA, 25 bp, Homo sapien
aacatgctgcttagagttaacagaa

SEQ ID NO: 35751 - DNA, 25 bp, Homo sapien
ttaccactgcaggatgttaaactgt

SEQ ID NO: 35752 - DNA, 25 bp, Homo sapien
tttaaagtaagcagggagtgtgaag

SEQ ID NO: 35753 - DNA, 25 bp, Homo sapien
aaacatatatatgaaattgagggac

SEQ ID NO: 35754 - DNA, 25 bp, Homo sapien
ataatctctgctatctctgtggccc

SEQ ID NO: 35755 - DNA, 25 bp, Homo sapien
cactagactgcaagctactcaaggc

SEQ ID NO: 35756 - DNA, 25 bp, Homo sapien
ggccactgagcctcgctggctgttt

SEQ ID NO: 35757 - DNA, 25 bp, Homo sapien
tttcaagtttgcaccactagactgc

SEQ ID NO: 35758 - DNA, 25 bp, Homo sapien
tcggacctcctgatggggtcaaccc

SEQ ID NO: 35759 - DNA, 25 bp, Homo sapien
gagcccaccatcatgtctggttaat

SEQ ID NO: 35760 - DNA, 25 bp, Homo sapien
agatgaacagaagctactatgtgac

SEQ ID NO: 35761 - DNA, 25 bp, Homo sapien
tagcactgtgcctggaagatgaaca

SEQ ID NO: 35762 - DNA, 25 bp, Homo sapien
gcaagctactcaaggcagaaacgct

SEQ ID NO: 35763 - DNA, 25 bp, Homo sapien
atccttcggctctcagctaacagtc

SEQ ID NO: 35764 - DNA, 25 bp, Homo sapien
agctaacagtcacaactcggacctc

SEQ ID NO: 35765 - DNA, 25 bp, Homo sapien
ggggctctactagctcttggctcat

SEQ ID NO: 35766 - DNA, 25 bp, Homo sapien
gcatgaggcaaagaggaaacacaga

SEQ ID NO: 35767 - DNA, 25 bp, Homo sapien
ctcatctagactggccttggtggca

SEQ ID NO: 35768 - DNA, 25 bp, Homo sapien
gccaaagcaaggcacgagccctgct

SEQ ID NO: 35769 - DNA, 25 bp, Homo sapien
ggtggcacgactcggatcttctcca

SEQ ID NO: 35770 - DNA, 25 bp, Homo sapien
ttccatcctccggtagcttgggtgt

SEQ ID NO: 35771 - DNA, 25 bp, Homo sapien
cctgctcagattcaaggggtagaga

SEQ ID NO: 35772 - DNA, 25 bp, Homo sapien
cggtagcttgggtgtgttctcctca

SEQ ID NO: 35773 - DNA, 25 bp, Homo sapien
ctgaattctagtggccaaagcaagg

SEQ ID NO: 35774 - DNA, 25 bp, Homo sapien
aatatccggggctctactagctctt

SEQ ID NO: 35775 - DNA, 25 bp, Homo sapien
gaaacacagagggtcttcagagctg

SEQ ID NO: 35776 - DNA, 25 bp, Homo sapien
acagcctacgaagtggcagaactgc

SEQ ID NO: 35777 - DNA, 25 bp, Homo sapien
taagatgatttgtcaattgccagtc

SEQ ID NO: 35778 - DNA, 25 bp, Homo sapien
tcttcctgggagacattgatgattt

SEQ ID NO: 35779 - DNA, 25 bp, Homo sapien
tagaagatctccactggggcacaaa

SEQ ID NO: 35780 - DNA, 25 bp, Homo sapien
tgattttagatgacagccgaaaatt

SEQ ID NO: 35781 - DNA, 25 bp, Homo sapien
attgatgattttagatgacagccga

SEQ ID NO: 35782 - DNA, 25 bp, Homo sapien
aaaagcctttctaagatgatttgtc

SEQ ID NO: 35783 - DNA, 25 bp, Homo sapien
gtagaagatctccactggggcacaa

SEQ ID NO: 35784 - DNA, 25 bp, Homo sapien
acgaagtggcagaactgcatctctc

SEQ ID NO: 35785 - DNA, 25 bp, Homo sapien
ttcctgggagacattgatgatttta

SEQ ID NO: 35786 - DNA, 25 bp, Homo sapien
cctacgaagtggcagaactgcatct

SEQ ID NO: 35787 - DNA, 25 bp, Homo sapien
cctacgaagtggcagaactgcatct

SEQ ID NO: 35788 - DNA, 25 bp, Homo sapien
acagcctacgaagtggcagaactgc

SEQ ID NO: 35789 - DNA, 25 bp, Homo sapien
tagaagatctccactggggcacaaa

SEQ ID NO: 35790 - DNA, 25 bp, Homo sapien
attgatgattttagatgacagccga

SEQ ID NO: 35791 - DNA, 25 bp, Homo sapien
tcttcctgggagacattgatgattt

SEQ ID NO: 35792 - DNA, 25 bp, Homo sapien
gctggataaaccaaaagtcagagag

SEQ ID NO: 35793 - DNA, 25 bp, Homo sapien
taagatgatttgtcaattgccagtc

SEQ ID NO: 35794 - DNA, 25 bp, Homo sapien
aaaagcctttctaagatgatttgtc

SEQ ID NO: 35795 - DNA, 25 bp, Homo sapien
acgaagtggcagaactgcatctctc

SEQ ID NO: 35796 - DNA, 25 bp, Homo sapien
tgattttagatgacagccgaaaatt

SEQ ID NO: 35797 - DNA, 25 bp, Homo sapien
tggacccatgtagaagatctccact

SEQ ID NO: 35798 - DNA, 25 bp, Homo sapien
aagtatgcaataatgggtggaggta

SEQ ID NO: 35799 - DNA, 25 bp, Homo sapien
aataccagttaagcagtccaagagc

SEQ ID NO: 35800 - DNA, 25 bp, Homo sapien
ggtaaaagatgatgtgtgcagtttt

SEQ ID NO: 35801 - DNA, 25 bp, Homo sapien
ttatagaagaggaacttgaagatca

SEQ ID NO: 35802 - DNA, 25 bp, Homo sapien
acatgccaaagaataccagttaagc

SEQ ID NO: 35803 - DNA, 25 bp, Homo sapien
aactgggactacatcatagcgtcac

SEQ ID NO: 35804 - DNA, 25 bp, Homo sapien
gagcaataggaccacaggatttctg

SEQ ID NO: 35805 - DNA, 25 bp, Homo sapien
agtgagaccattaatgaaagtatgc

SEQ ID NO: 35806 - DNA, 25 bp, Homo sapien
tccaagagctgtatttaagccagat

SEQ ID NO: 35807 - DNA, 25 bp, Homo sapien
ggatatgatggttgtgaaagatctg

SEQ ID NO: 35808 - DNA, 25 bp, Homo sapien
accagttaggtagctagtgagacca

SEQ ID NO: 35809 - DNA, 25 bp, Homo sapien
atattaagcatatcaggggcaaaca

SEQ ID NO: 35810 - DNA, 25 bp, Homo sapien
aggggcaaacagaagtgaaactatt

SEQ ID NO: 35811 - DNA, 25 bp, Homo sapien
tgcagaattgtagatataaggtctc

SEQ ID NO: 35812 - DNA, 25 bp, Homo sapien
ctctgtacatatgggtgaggtcata

SEQ ID NO: 35813 - DNA, 25 bp, Homo sapien
aaggttttactagtcaaacatgttc

SEQ ID NO: 35814 - DNA, 25 bp, Homo sapien
catagagggcaaagtaaaggtttta

SEQ ID NO: 35815 - DNA, 25 bp, Homo sapien
aactattgaggacaaggatgatgtt

SEQ ID NO: 35816 - DNA, 25 bp, Homo sapien
gtgggactgtctcagagcagatatt

SEQ ID NO: 35817 - DNA, 25 bp, Homo sapien
ttcaactatccatgcaaatacagac

SEQ ID NO: 35818 - DNA, 25 bp, Homo sapien
gtgaggtcatagagggcaaagtaaa

SEQ ID NO: 35819 - DNA, 25 bp, Homo sapien
atccatgcaaatacagacactagaa

SEQ ID NO: 35820 - DNA, 25 bp, Homo sapien
gagtctgaacatggcatatttctcc

SEQ ID NO: 35821 - DNA, 25 bp, Homo sapien
ccaggtagggtactatatccagagc

SEQ ID NO: 35822 - DNA, 25 bp, Homo sapien
tgaaggagacagtgagtctgaacat

SEQ ID NO: 35823 - DNA, 25 bp, Homo sapien
tgtagctgactgatcctccacgtgg

SEQ ID NO: 35824 - DNA, 25 bp, Homo sapien
ttgttagagtcctaggtacttgata

SEQ ID NO: 35825 - DNA, 25 bp, Homo sapien
tttgtttgtagctgactgatcctcc

SEQ ID NO: 35826 - DNA, 25 bp, Homo sapien
tgatcctccacgtggaagaactgga

SEQ ID NO: 35827 - DNA, 25 bp, Homo sapien
aagtttcagtcttccctctagagat

SEQ ID NO: 35828 - DNA, 25 bp, Homo sapien
cttgggttccaggtagggtactata

SEQ ID NO: 35829 - DNA, 25 bp, Homo sapien
atactgacatttgtttgtagctgac

SEQ ID NO: 35830 - DNA, 25 bp, Homo sapien
cagtacttgggttccaggtagggta

SEQ ID NO: 35831 - DNA, 25 bp, Homo sapien
ccatccaggccaacgtcctggggta

SEQ ID NO: 35832 - DNA, 25 bp, Homo sapien
gggagaatgcataagggatagaaac

SEQ ID NO: 35833 - DNA, 25 bp, Homo sapien
tacatacacttaaagctgggagggg

SEQ ID NO: 35834 - DNA, 25 bp, Homo sapien
tgggcaatcctgcagcagacgtctc

SEQ ID NO: 35835 - DNA, 25 bp, Homo sapien
tggggtacactcacagtcatctgtt

SEQ ID NO: 35836 - DNA, 25 bp, Homo sapien
tgcactttctgttagaaggacaccc

SEQ ID NO: 35837 - DNA, 25 bp, Homo sapien
ctgaagacggaaaaatccagagtat

SEQ ID NO: 35838 - DNA, 25 bp, Homo sapien
aaatagcagatgttacaaaatgggg

SEQ ID NO: 35839 - DNA, 25 bp, Homo sapien
tttgagcactgttctgaagacggaa

SEQ ID NO: 35840 - DNA, 25 bp, Homo sapien
gatcagggcagcttcagcagttctc

SEQ ID NO: 35841 - DNA, 25 bp, Homo sapien
gactagagcacatggtctgtcacca

SEQ ID NO: 35842 - DNA, 25 bp, Homo sapien
ggggaagatacgaatccatcatgac

SEQ ID NO: 35843 - DNA, 25 bp, Homo sapien
aaggaaggactgtatctggtcacca

SEQ ID NO: 35844 - DNA, 25 bp, Homo sapien
ctactcactgaatgcctgcggctct

SEQ ID NO: 35845 - DNA, 25 bp, Homo sapien
ttatatgtaaatgtggaagccttcc

SEQ ID NO: 35846 - DNA, 25 bp, Homo sapien
tcaagccagtgagttgtgagctgaa

SEQ ID NO: 35847 - DNA, 25 bp, Homo sapien
ggcctaaggtaggactgcacatcct

SEQ ID NO: 35848 - DNA, 25 bp, Homo sapien
cctccttgtaggtggctgggacttc

SEQ ID NO: 35849 - DNA, 25 bp, Homo sapien
ctgggacttctggttagctcaagcc

SEQ ID NO: 35850 - DNA, 25 bp, Homo sapien
gctctctgtctactgggcctaaggt

SEQ ID NO: 35851 - DNA, 25 bp, Homo sapien
tgtatctacaaccaccagcatggcc

SEQ ID NO: 35852 - DNA, 25 bp, Homo sapien
atgaaagcctccttgtgggctactc

SEQ ID NO: 35853 - DNA, 25 bp, Homo sapien
gaggaaaagtggctatagcttgtac

SEQ ID NO: 35854 - DNA, 25 bp, Homo sapien
tggatgcgccattgtgtaaattgat

SEQ ID NO: 35855 - DNA, 25 bp, Homo sapien
ccctccatcagggaatgagagttcc

SEQ ID NO: 35856 - DNA, 25 bp, Homo sapien
tgggtcctaccttaagtgcatgtct

SEQ ID NO: 35857 - DNA, 25 bp, Homo sapien
ccattgatggctattgggctgtttc

SEQ ID NO: 35858 - DNA, 25 bp, Homo sapien
agcctttggtggacataagtctgcc

SEQ ID NO: 35859 - DNA, 25 bp, Homo sapien
tggtgtgcacaggtagtttgttctt

SEQ ID NO: 35860 - DNA, 25 bp, Homo sapien
tagaagcagaatttctgggtcctac

SEQ ID NO: 35861 - DNA, 25 bp, Homo sapien
cagccagtctgacctgatgacctct

SEQ ID NO: 35862 - DNA, 25 bp, Homo sapien
caattatgaggatgtctgcatgaac

SEQ ID NO: 35863 - DNA, 25 bp, Homo sapien
aggcatggtcatggttgaagtctct

SEQ ID NO: 35864 - DNA, 25 bp, Homo sapien
ggagatgatgagtgatttaaacacc

SEQ ID NO: 35865 - DNA, 25 bp, Homo sapien
tgctaggcaccatgctgacataatc

SEQ ID NO: 35866 - DNA, 25 bp, Homo sapien
gtacccagcccaattcacttctaat

SEQ ID NO: 35867 - DNA, 25 bp, Homo sapien
ttcatgtgtcagctacttctaaggc

SEQ ID NO: 35868 - DNA, 25 bp, Homo sapien
tctatcttcagaaatggaaacttga

SEQ ID NO: 35869 - DNA, 25 bp, Homo sapien
tatctccagggagtgctaggcacca

SEQ ID NO: 35870 - DNA, 25 bp, Homo sapien
actgaatttcctaccatgatgataa

SEQ ID NO: 35871 - DNA, 25 bp, Homo sapien
ggtctgagctactgtacccagccca

SEQ ID NO: 35872 - DNA, 25 bp, Homo sapien
gtggaaggtgtagacttgaattcat

SEQ ID NO: 35873 - DNA, 25 bp, Homo sapien
acttaggattgatacgtggaaggtg

SEQ ID NO: 35874 - DNA, 25 bp, Homo sapien
attatgcacatttatctccagggag

SEQ ID NO: 35875 - DNA, 25 bp, Homo sapien
gagtctcgctttgctgccctggctc

SEQ ID NO: 35876 - DNA, 25 bp, Homo sapien
ttctagtaaattgtcaggtgatgct

SEQ ID NO: 35877 - DNA, 25 bp, Homo sapien
tgctgatgttactgatttggagacc

SEQ ID NO: 35878 - DNA, 25 bp, Homo sapien
atgttactgatttggagaccattac

SEQ ID NO: 35879 - DNA, 25 bp, Homo sapien
cctggccaaccgtggacctctttga

SEQ ID NO: 35880 - DNA, 25 bp, Homo sapien
ggtgatgctgatgttactgatttgg

SEQ ID NO: 35881 - DNA, 25 bp, Homo sapien
agaatattaaaacacagactacaga

SEQ ID NO: 35882 - DNA, 25 bp, Homo sapien
ttctctatgtctagaatggggacca

SEQ ID NO: 35883 - DNA, 25 bp, Homo sapien
atttggagaccattactttgaagag

SEQ ID NO: 35884 - DNA, 25 bp, Homo sapien
gcatttctagtaaattgtcaggtga

SEQ ID NO: 35885 - DNA, 25 bp, Homo sapien
ttgcttgcagaatattaaaacacag

SEQ ID NO: 35886 - DNA, 25 bp, Homo sapien
tgcacggagagaactagtcatattt

SEQ ID NO: 35887 - DNA, 25 bp, Homo sapien
atcatgggccctgttgaaagccact

SEQ ID NO: 35888 - DNA, 25 bp, Homo sapien
aagctgacaggctcactcacactac

SEQ ID NO: 35889 - DNA, 25 bp, Homo sapien
cactgtgagcacagatgatgtcccg

SEQ ID NO: 35890 - DNA, 25 bp, Homo sapien
acaattttagggagtcgggatacta

SEQ ID NO: 35891 - DNA, 25 bp, Homo sapien
cggggtaacctgtcaagaactgtca

SEQ ID NO: 35892 - DNA, 25 bp, Homo sapien
actggtcaagcccaaaggaaaaata

SEQ ID NO: 35893 - DNA, 25 bp, Homo sapien
aggaaattacactcagatgcacgga

SEQ ID NO: 35894 - DNA, 25 bp, Homo sapien
ggacaaaagctctgcccaacactgc

SEQ ID NO: 35895 - DNA, 25 bp, Homo sapien
atgggaaaaaggatcactgtgagca

SEQ ID NO: 35896 - DNA, 25 bp, Homo sapien
taaagaaatcagcacgattgacacc

SEQ ID NO: 35897 - DNA, 25 bp, Homo sapien
ggcactcatagcagttctcagccat

SEQ ID NO: 35898 - DNA, 25 bp, Homo sapien
tcctcattgcccttagtccagttac

SEQ ID NO: 35899 - DNA, 25 bp, Homo sapien
cctctttcaaggctcaagtttcatc

SEQ ID NO: 35900 - DNA, 25 bp, Homo sapien
tatgcagcttgatgtagttgacacc

SEQ ID NO: 35901 - DNA, 25 bp, Homo sapien
gcagcccacgtgctgatctcttctt

SEQ ID NO: 35902 - DNA, 25 bp, Homo sapien
ctcagagcattgtgtctcctggtgc

SEQ ID NO: 35903 - DNA, 25 bp, Homo sapien
tctcagagcattgtgtctcctggtg

SEQ ID NO: 35904 - DNA, 25 bp, Homo sapien
ctctatgcagcttgatgtagttgac

SEQ ID NO: 35905 - DNA, 25 bp, Homo sapien
tctttcaaggctcaagtttcatccc

SEQ ID NO: 35906 - DNA, 25 bp, Homo sapien
atctctctatgcagcttgatgtagt

SEQ ID NO: 35907 - DNA, 25 bp, Homo sapien
tgcagcttgatgtagttgacacctc

SEQ ID NO: 35908 - DNA, 25 bp, Homo sapien
cggcctcccaaagaacatttaatgt

SEQ ID NO: 35909 - DNA, 25 bp, Homo sapien
gcagattcatgatggcaacctagct

SEQ ID NO: 35910 - DNA, 25 bp, Homo sapien
tacagtggaagaactggcactgcta

SEQ ID NO: 35911 - DNA, 25 bp, Homo sapien
cagagacctgggaactcttccagta

SEQ ID NO: 35912 - DNA, 25 bp, Homo sapien
ttcatgatggcaacctagctatccc

SEQ ID NO: 35913 - DNA, 25 bp, Homo sapien
ctgagggtggatcatcttgattgct

SEQ ID NO: 35914 - DNA, 25 bp, Homo sapien
actcagaatctgagggtggatcatc

SEQ ID NO: 35915 - DNA, 25 bp, Homo sapien
ctgaaatctacagagacctgggaac

SEQ ID NO: 35916 - DNA, 25 bp, Homo sapien
ggcactgctagaaaagttgatcatt

SEQ ID NO: 35917 - DNA, 25 bp, Homo sapien
tttagagatttgtacagtggaagaa

SEQ ID NO: 35918 - DNA, 25 bp, Homo sapien
gtcacatgtcatcaacactcagaat

SEQ ID NO: 35919 - DNA, 25 bp, Homo sapien
ttctgttaaccttttggagatgcac

SEQ ID NO: 35920 - DNA, 25 bp, Homo sapien
caattaagcaaaagagagatggagc

SEQ ID NO: 35921 - DNA, 25 bp, Homo sapien
ctaagtgcaattaagcaaaagagag

SEQ ID NO: 35922 - DNA, 25 bp, Homo sapien
ccgatttcggaaaatgcatgacata

SEQ ID NO: 35923 - DNA, 25 bp, Homo sapien
ataagttattgggttacaggtggta

SEQ ID NO: 35924 - DNA, 25 bp, Homo sapien
gatggagcccgatttcggaaaatgc

SEQ ID NO: 35925 - DNA, 25 bp, Homo sapien
ttttggagatgcacttccctttttc

SEQ ID NO: 35926 - DNA, 25 bp, Homo sapien
aatacacccacaccctaagtgcaat

SEQ ID NO: 35927 - DNA, 25 bp, Homo sapien
tttaaatacagacatgcccagactc

SEQ ID NO: 35928 - DNA, 25 bp, Homo sapien
ctttccatggccaaaacccttatta

SEQ ID NO: 35929 - DNA, 25 bp, Homo sapien
tgcatgacataaacaaagttgatct

SEQ ID NO: 35930 - DNA, 25 bp, Homo sapien
gatggggtgtacatgatagcttctt

SEQ ID NO: 35931 - DNA, 25 bp, Homo sapien
tcttggtaggcagaacctcacggaa

SEQ ID NO: 35932 - DNA, 25 bp, Homo sapien
taggcgaactcattcatatggacac

SEQ ID NO: 35933 - DNA, 25 bp, Homo sapien
tcgggttaaagctcattgcacaggt

SEQ ID NO: 35934 - DNA, 25 bp, Homo sapien
gagcattttgaaaggatcacacacc

SEQ ID NO: 35935 - DNA, 25 bp, Homo sapien
atatggacacaaaaaggactcattt

SEQ ID NO: 35936 - DNA, 25 bp, Homo sapien
agatggagctgcctagtgcatattc

SEQ ID NO: 35937 - DNA, 25 bp, Homo sapien
gtgcatattctcagacagggccttt

SEQ ID NO: 35938 - DNA, 25 bp, Homo sapien
ctgtgtgatgttggagaagttacta

SEQ ID NO: 35939 - DNA, 25 bp, Homo sapien
acatgccggccagtagagcattttg

SEQ ID NO: 35940 - DNA, 25 bp, Homo sapien
gttttaggatgacagttcagggact

SEQ ID NO: 35941 - DNA, 25 bp, Homo sapien
tgaccctctaaattggaagagactt

SEQ ID NO: 35942 - DNA, 25 bp, Homo sapien
ttggaggtcggcctaattcctgtcc

SEQ ID NO: 35943 - DNA, 25 bp, Homo sapien
ctgtcccagtctttcgggtcaaagg

SEQ ID NO: 35944 - DNA, 25 bp, Homo sapien
tgaataccgccaacagccgtaagct

SEQ ID NO: 35945 - DNA, 25 bp, Homo sapien
taagctcactacttcctgggcagac

SEQ ID NO: 35946 - DNA, 25 bp, Homo sapien
tgttggacagatctgccagctagaa

SEQ ID NO: 35947 - DNA, 25 bp, Homo sapien
aaatacttgccactgaaggtaaagc

SEQ ID NO: 35948 - DNA, 25 bp, Homo sapien
atattgaactgaaatctgctgtccc

SEQ ID NO: 35949 - DNA, 25 bp, Homo sapien
acaggcgtgagtcaatgcacctcac

SEQ ID NO: 35950 - DNA, 25 bp, Homo sapien
agaagggtctctcaaaaatgctggg

SEQ ID NO: 35951 - DNA, 25 bp, Homo sapien
gtcaaaggggacctcaaagtctatc

SEQ ID NO: 35952 - DNA, 25 bp, Homo sapien
ccttgcaagtttgtggggaaaattg

SEQ ID NO: 35953 - DNA, 25 bp, Homo sapien
tcctttaatgtgagaaacactgaat

SEQ ID NO: 35954 - DNA, 25 bp, Homo sapien
tgaaagagtgtgatcagagtaaaac

SEQ ID NO: 35955 - DNA, 25 bp, Homo sapien
ggggaaaattgatcaccataatact

SEQ ID NO: 35956 - DNA, 25 bp, Homo sapien
gctaacatgaagtgctctgtgctca

SEQ ID NO: 35957 - DNA, 25 bp, Homo sapien
tttgtggggaggtcagttgtttctc

SEQ ID NO: 35958 - DNA, 25 bp, Homo sapien
tcctcaaataaaaaactcatgcgtt

SEQ ID NO: 35959 - DNA, 25 bp, Homo sapien
ccataatacttgaaagagtgtgatc

SEQ ID NO: 35960 - DNA, 25 bp, Homo sapien
tacagccagagcatgattctgaact

SEQ ID NO: 35961 - DNA, 25 bp, Homo sapien
attcctgttacagccagagcatgat

SEQ ID NO: 35962 - DNA, 25 bp, Homo sapien
atatctgaaatgactgtttgatctc

SEQ ID NO: 35963 - DNA, 25 bp, Homo sapien
cccttgaatctgagtgaacttgtta

SEQ ID NO: 35964 - DNA, 25 bp, Homo sapien
gtgcccaggctgtactttccaaata

SEQ ID NO: 35965 - DNA, 25 bp, Homo sapien
gccatctaagcagtttgaccatcat

SEQ ID NO: 35966 - DNA, 25 bp, Homo sapien
ataaagtacggcagatgtgatagct

SEQ ID NO: 35967 - DNA, 25 bp, Homo sapien
ttggagcctaagctgccatctaagc

SEQ ID NO: 35968 - DNA, 25 bp, Homo sapien
agaagtgaccaccatgtgtgaggaa

SEQ ID NO: 35969 - DNA, 25 bp, Homo sapien
ctccacaattaagtgtcagggctta

SEQ ID NO: 35970 - DNA, 25 bp, Homo sapien
agtattgcagtggtgcaacatgcct

SEQ ID NO: 35971 - DNA, 25 bp, Homo sapien
gaccatcatgtaagaagtgaccacc

SEQ ID NO: 35972 - DNA, 25 bp, Homo sapien
tgagtcattaaaggcaatgcatctt

SEQ ID NO: 35973 - DNA, 25 bp, Homo sapien
gtggtgcaacatgcctcactgcagt

SEQ ID NO: 35974 - DNA, 25 bp, Homo sapien
tgctttatctgtggccaagagagac

SEQ ID NO: 35975 - DNA, 25 bp, Homo sapien
tcaccaagatggtctgctttatctg

SEQ ID NO: 35976 - DNA, 25 bp, Homo sapien
ccaagagagactgaagttacctgga

SEQ ID NO: 35977 - DNA, 25 bp, Homo sapien
caaagtaacagagggctcattccat

SEQ ID NO: 35978 - DNA, 25 bp, Homo sapien
tttatctgtggccaagagagactga

SEQ ID NO: 35979 - DNA, 25 bp, Homo sapien
taacagagggctcattccatttctc

SEQ ID NO: 35980 - DNA, 25 bp, Homo sapien
tttacaaagtaacagagggctcatt

SEQ ID NO: 35981 - DNA, 25 bp, Homo sapien
agagactgaagttacctggagagga

SEQ ID NO: 35982 - DNA, 25 bp, Homo sapien
atgacacactcatcatgcccttaac

SEQ ID NO: 35983 - DNA, 25 bp, Homo sapien
tcctggcttgaggtcatattctgaa

SEQ ID NO: 35984 - DNA, 25 bp, Homo sapien
cctcctcctggcttgaggtcatatt

SEQ ID NO: 35985 - DNA, 25 bp, Homo sapien
tgctttatctgtggccaagagagac

SEQ ID NO: 35986 - DNA, 25 bp, Homo sapien
agtaacagagggctcattccatttc

SEQ ID NO: 35987 - DNA, 25 bp, Homo sapien
tttacaaagtaacagagggctcatt

SEQ ID NO: 35988 - DNA, 25 bp, Homo sapien
ccaagagagactgaagttacctgga

SEQ ID NO: 35989 - DNA, 25 bp, Homo sapien
agagactgaagttacctggagagga

SEQ ID NO: 35990 - DNA, 25 bp, Homo sapien
tcaccaagatggtctgctttatctg

SEQ ID NO: 35991 - DNA, 25 bp, Homo sapien
atgacacactcatcatgcccttaac

SEQ ID NO: 35992 - DNA, 25 bp, Homo sapien
attctgaaatattggggctcccgta

SEQ ID NO: 35993 - DNA, 25 bp, Homo sapien
tcctggcttgaggtcatattctgaa

SEQ ID NO: 35994 - DNA, 25 bp, Homo sapien
attctgaaatattggggatcccgta

SEQ ID NO: 35995 - DNA, 25 bp, Homo sapien
tttatctgtggccaagagagactga

SEQ ID NO: 35996 - DNA, 25 bp, Homo sapien
gggctgaacgttagcagcaacatct

SEQ ID NO: 35997 - DNA, 25 bp, Homo sapien
cttgcggctctaccaacagaggagt

SEQ ID NO: 35998 - DNA, 25 bp, Homo sapien
acattgggtcttctgtcctcggaga

SEQ ID NO: 35999 - DNA, 25 bp, Homo sapien
ttactagttggcctcccacaagcct

SEQ ID NO: 36000 - DNA, 25 bp, Homo sapien
tcctcggagaagtgcggttttccat

SEQ ID NO: 36001 - DNA, 25 bp, Homo sapien
tcctattggacatggcgtcagggct

SEQ ID NO: 36002 - DNA, 25 bp, Homo sapien
ccaacctgggaggagttgacctctt

SEQ ID NO: 36003 - DNA, 25 bp, Homo sapien
tccggcccgcgtttctgagagtgaa

SEQ ID NO: 36004 - DNA, 25 bp, Homo sapien
gtgaagggccgttcctattggacat

SEQ ID NO: 36005 - DNA, 25 bp, Homo sapien
agcgaatgaacacgatgcccagatc

SEQ ID NO: 36006 - DNA, 25 bp, Homo sapien
aggtgcaaaagacctccacggtttc

SEQ ID NO: 36007 - DNA, 25 bp, Homo sapien
tgctgattagcaacatataatacag

SEQ ID NO: 36008 - DNA, 25 bp, Homo sapien
agggaggatttgaggttctgtaact

SEQ ID NO: 36009 - DNA, 25 bp, Homo sapien
cacattgctaaacacaaaagtcaaa

SEQ ID NO: 36010 - DNA, 25 bp, Homo sapien
acagttgactgcctccttgtcctta

SEQ ID NO: 36011 - DNA, 25 bp, Homo sapien
gattgacacccacattgctaaacac

SEQ ID NO: 36012 - DNA, 25 bp, Homo sapien
ctgagacatcttacatgatctgttg

SEQ ID NO: 36013 - DNA, 25 bp, Homo sapien
ccaccaaaattgttgttatcaaggt

SEQ ID NO: 36014 - DNA, 25 bp, Homo sapien
ttctcatcttggtttgctgattagc

SEQ ID NO: 36015 - DNA, 25 bp, Homo sapien
tcacttggcatctgagacatcttac

SEQ ID NO: 36016 - DNA, 25 bp, Homo sapien
tataatacagttgactgcctccttg

SEQ ID NO: 36017 - DNA, 25 bp, Homo sapien
ttataatgattgacacccacattgc

SEQ ID NO: 36018 - DNA, 25 bp, Homo sapien
tgtggagaacctgacatctgagctt

SEQ ID NO: 36019 - DNA, 25 bp, Homo sapien
ctagttgtcattcagcagcgttgga

SEQ ID NO: 36020 - DNA, 25 bp, Homo sapien
ggagaacctgacatctgagcttgcc

SEQ ID NO: 36021 - DNA, 25 bp, Homo sapien
tatagaaaatacttaagcagaccgg

SEQ ID NO: 36022 - DNA, 25 bp, Homo sapien
aataagcttctagttgtcattcagc

SEQ ID NO: 36023 - DNA, 25 bp, Homo sapien
cttctctcagagcatttttactttc

SEQ ID NO: 36024 - DNA, 25 bp, Homo sapien
aatacttaagcagaccggatgcggt

SEQ ID NO: 36025 - DNA, 25 bp, Homo sapien
gagcttgccagaattctctcaaaac

SEQ ID NO: 36026 - DNA, 25 bp, Homo sapien
attcagcagcgttggaggctttgaa

SEQ ID NO: 36027 - DNA, 25 bp, Homo sapien
gctttgaagggttcacggtgaactc

SEQ ID NO: 36028 - DNA, 25 bp, Homo sapien
cgtatgtggagaacctgacatctga

SEQ ID NO: 36029 - DNA, 25 bp, Homo sapien
agccactgtgctaggccttcctaag

SEQ ID NO: 36030 - DNA, 25 bp, Homo sapien
cttgacttcaaaataaggccacctt

SEQ ID NO: 36031 - DNA, 25 bp, Homo sapien
taaggccaccttactccatacattg

SEQ ID NO: 36032 - DNA, 25 bp, Homo sapien
ttagtctgttgctctattctggaat

SEQ ID NO: 36033 - DNA, 25 bp, Homo sapien
aggtcataacttagtctgttgctct

SEQ ID NO: 36034 - DNA, 25 bp, Homo sapien
atgatctggcctatcctctctcacc

SEQ ID NO: 36035 - DNA, 25 bp, Homo sapien
cccacccaggtcataacttagtctg

SEQ ID NO: 36036 - DNA, 25 bp, Homo sapien
tccatacattgtgctctcttctctg

SEQ ID NO: 36037 - DNA, 25 bp, Homo sapien
tgtctttcccaccagtcatgctaac

SEQ ID NO: 36038 - DNA, 25 bp, Homo sapien
ggattacggacacctaccaccaggc

SEQ ID NO: 36039 - DNA, 25 bp, Homo sapien
actgtgctaggccttcctaagtttt

SEQ ID NO: 36040 - DNA, 25 bp, Homo sapien
tgaagggcgataactcactcaaggt

SEQ ID NO: 36041 - DNA, 25 bp, Homo sapien
gctctggacccattaagcaaataat

SEQ ID NO: 36042 - DNA, 25 bp, Homo sapien
cagagagagataacctaagtggcta

SEQ ID NO: 36043 - DNA, 25 bp, Homo sapien
aacacttgagcctatgaagggcgat

SEQ ID NO: 36044 - DNA, 25 bp, Homo sapien
aatagatactcagacggacacatcc

SEQ ID NO: 36045 - DNA, 25 bp, Homo sapien
acatacacaaaccagctgcaagctc

SEQ ID NO: 36046 - DNA, 25 bp, Homo sapien
taagtggctaggtttaggttccagc

SEQ ID NO: 36047 - DNA, 25 bp, Homo sapien
aactggacgtataactcaggccttc

SEQ ID NO: 36048 - DNA, 25 bp, Homo sapien
ctttagacatcagaacacttgagcc

SEQ ID NO: 36049 - DNA, 25 bp, Homo sapien
tttccaattggcaaagtgctttccc

SEQ ID NO: 36050 - DNA, 25 bp, Homo sapien
tgctagtcactggaaaactggacgt

SEQ ID NO: 36051 - DNA, 25 bp, Homo sapien
acactatggaaaaactgatagaaat

SEQ ID NO: 36052 - DNA, 25 bp, Homo sapien
ttgtgtgcatcattagctaacaatt

SEQ ID NO: 36053 - DNA, 25 bp, Homo sapien
cttgtgaatctatggagttgagggt

SEQ ID NO: 36054 - DNA, 25 bp, Homo sapien
atgttcaagacatcatcagtttgtt

SEQ ID NO: 36055 - DNA, 25 bp, Homo sapien
gatacaaattgcaatggaaaacagc

SEQ ID NO: 36056 - DNA, 25 bp, Homo sapien
gagttgagggttgctgtcctttcac

SEQ ID NO: 36057 - DNA, 25 bp, Homo sapien
caataatttcctgataaaagctgta

SEQ ID NO: 36058 - DNA, 25 bp, Homo sapien
ctgctagaagacacacgatgcaccc

SEQ ID NO: 36059 - DNA, 25 bp, Homo sapien
actcagcttcatagtttatggtcaa

SEQ ID NO: 36060 - DNA, 25 bp, Homo sapien
ttttctgctagaagacacacgatgc

SEQ ID NO: 36061 - DNA, 25 bp, Homo sapien
gataaaagctgtaagatcctaattt

SEQ ID NO: 36062 - DNA, 25 bp, Homo sapien
aaaagccagcactggaggttgtaat

SEQ ID NO: 36063 - DNA, 25 bp, Homo sapien
cttcaagaacatgacagccacagag

SEQ ID NO: 36064 - DNA, 25 bp, Homo sapien
ttggggaatactttcaaacaatagc

SEQ ID NO: 36065 - DNA, 25 bp, Homo sapien
gttgtaatgcaggagtcaggtgctt

SEQ ID NO: 36066 - DNA, 25 bp, Homo sapien
aatccagtcacgaaagcagtccttg

SEQ ID NO: 36067 - DNA, 25 bp, Homo sapien
caagaagtattgagagcaaaagatc

SEQ ID NO: 36068 - DNA, 25 bp, Homo sapien
atgaggacttttgtgcagcatcatc

SEQ ID NO: 36069 - DNA, 25 bp, Homo sapien
gagcatggcatctgatgaggacttt

SEQ ID NO: 36070 - DNA, 25 bp, Homo sapien
caaaggttttgtaacgaagtcactc

SEQ ID NO: 36071 - DNA, 25 bp, Homo sapien
atacacatttagcacagaaatgctc

SEQ ID NO: 36072 - DNA, 25 bp, Homo sapien
tgacaacacataaactttggggaat

SEQ ID NO: 36073 - DNA, 25 bp, Homo sapien
catgagctgataaaagccggcctcc

SEQ ID NO: 36074 - DNA, 25 bp, Homo sapien
tgccctgacctctcagaacgatctt

SEQ ID NO: 36075 - DNA, 25 bp, Homo sapien
gaaccagaaacacataccctgccag

SEQ ID NO: 36076 - DNA, 25 bp, Homo sapien
tgacctctcagaacgatcttccaag

SEQ ID NO: 36077 - DNA, 25 bp, Homo sapien
cctccagtcgcccagtgaaagggag

SEQ ID NO: 36078 - DNA, 25 bp, Homo sapien
tgagctgataaaagccggcctccta

SEQ ID NO: 36079 - DNA, 25 bp, Homo sapien
ctgtcctccagtcgcccagtgaaag

SEQ ID NO: 36080 - DNA, 25 bp, Homo sapien
tgcctggctgactgttattttactt

SEQ ID NO: 36081 - DNA, 25 bp, Homo sapien
ccaagcatcactcaacagaaccaga

SEQ ID NO: 36082 - DNA, 25 bp, Homo sapien
tttttaaaagctcatgagctgataa

SEQ ID NO: 36083 - DNA, 25 bp, Homo sapien
tcagaacgatcttccaagcatcact

SEQ ID NO: 36084 - DNA, 25 bp, Homo sapien
aagctcatgagctgataaaagccgg

SEQ ID NO: 36085 - DNA, 25 bp, Homo sapien
tgcctggctgactgttattttactt

SEQ ID NO: 36086 - DNA, 25 bp, Homo sapien
gaaccagaaacacataccctgccag

SEQ ID NO: 36087 - DNA, 25 bp, Homo sapien
tgccctgacctctcagaacgatctt

SEQ ID NO: 36088 - DNA, 25 bp, Homo sapien
cgggagctgccctgacctctcagaa

SEQ ID NO: 36089 - DNA, 25 bp, Homo sapien
catgagctgataaaagccggcctcc

SEQ ID NO: 36090 - DNA, 25 bp, Homo sapien
tgagctgataaaagccggcctccta

SEQ ID NO: 36091 - DNA, 25 bp, Homo sapien
tccaagagaagggatctctccctgt

SEQ ID NO: 36092 - DNA, 25 bp, Homo sapien
tctcagaacgatcttccaagcatca

SEQ ID NO: 36093 - DNA, 25 bp, Homo sapien
ctgtcctccagtcgcccagtgaaag

SEQ ID NO: 36094 - DNA, 25 bp, Homo sapien
ccaagcatcactcaacagaaccaga

SEQ ID NO: 36095 - DNA, 25 bp, Homo sapien
aaagcctcttgctatgtttgaagac

SEQ ID NO: 36096 - DNA, 25 bp, Homo sapien
catcagtgaacaactgctcacatca

SEQ ID NO: 36097 - DNA, 25 bp, Homo sapien
gtcttggatgataggtaggtaactg

SEQ ID NO: 36098 - DNA, 25 bp, Homo sapien
aagactatgaaacaccctaacagag

SEQ ID NO: 36099 - DNA, 25 bp, Homo sapien
gcattagaatcatcagtgaacaact

SEQ ID NO: 36100 - DNA, 25 bp, Homo sapien
ttacgacactaatgttgggagcacc

SEQ ID NO: 36101 - DNA, 25 bp, Homo sapien
ttgggagcacccaaaaggactcaag

SEQ ID NO: 36102 - DNA, 25 bp, Homo sapien
atacttttaatgatgcaatgctatt

SEQ ID NO: 36103 - DNA, 25 bp, Homo sapien
aacaccctaacagagaaacaatgaa

SEQ ID NO: 36104 - DNA, 25 bp, Homo sapien
ttggatacccagtatttaaagcctc

SEQ ID NO: 36105 - DNA, 25 bp, Homo sapien
cccaaaaggactcaagcgaggtctt

SEQ ID NO: 36106 - DNA, 25 bp, Homo sapien
cttctccaagggttgccaggtgttt

SEQ ID NO: 36107 - DNA, 25 bp, Homo sapien
caatcgagtgtacgagtatgtgcat

SEQ ID NO: 36108 - DNA, 25 bp, Homo sapien
tggctgtgaaaagatctagtaggca

SEQ ID NO: 36109 - DNA, 25 bp, Homo sapien
atgtacagcacaacctaaagactac

SEQ ID NO: 36110 - DNA, 25 bp, Homo sapien
atccttgtactgctacgtgccaata

SEQ ID NO: 36111 - DNA, 25 bp, Homo sapien
actacttcaaagtccagtcctgcta

SEQ ID NO: 36112 - DNA, 25 bp, Homo sapien
taggcacagagtacgcttcaatcga

SEQ ID NO: 36113 - DNA, 25 bp, Homo sapien
tatgtgcatttgagacgatccaatc

SEQ ID NO: 36114 - DNA, 25 bp, Homo sapien
atgtgtacaagctaaactgtgattt

SEQ ID NO: 36115 - DNA, 25 bp, Homo sapien
ctttcaagtgcctagctgtctgccc

SEQ ID NO: 36116 - DNA, 25 bp, Homo sapien
agccaccgtgcctagtttaaaatat

SEQ ID NO: 36117 - DNA, 25 bp, Homo sapien
aaactaacacaggaccaggaatacc

SEQ ID NO: 36118 - DNA, 25 bp, Homo sapien
aatgtgatgcatgtacagcatggta

SEQ ID NO: 36119 - DNA, 25 bp, Homo sapien
aaataaatggaaaagcagctaatat

SEQ ID NO: 36120 - DNA, 25 bp, Homo sapien
aagtaattttagagatgagcgggca

SEQ ID NO: 36121 - DNA, 25 bp, Homo sapien
tcctttgtagcaacatggagggagt

SEQ ID NO: 36122 - DNA, 25 bp, Homo sapien
aacacaggaccaggaataccaaata

SEQ ID NO: 36123 - DNA, 25 bp, Homo sapien
ctattcacaattgcagatatatgga

SEQ ID NO: 36124 - DNA, 25 bp, Homo sapien
acacagccatgtaaaagaacaatat

SEQ ID NO: 36125 - DNA, 25 bp, Homo sapien
acagcatggtatgctacacagccat

SEQ ID NO: 36126 - DNA, 25 bp, Homo sapien
aagcagctaatatttacggaaaaaa

SEQ ID NO: 36127 - DNA, 25 bp, Homo sapien
cattattgtaagcaaactaacacag

SEQ ID NO: 36128 - DNA, 25 bp, Homo sapien
tatacatgccatgctgggaagtctt

SEQ ID NO: 36129 - DNA, 25 bp, Homo sapien
acaaacaatataggtggcacatccc

SEQ ID NO: 36130 - DNA, 25 bp, Homo sapien
agtccgtagatgcatgtggtcttcc

SEQ ID NO: 36131 - DNA, 25 bp, Homo sapien
tctgttcagcagaaagacttgtctt

SEQ ID NO: 36132 - DNA, 25 bp, Homo sapien
caaggcacgttccatggcatcagac

SEQ ID NO: 36133 - DNA, 25 bp, Homo sapien
ctacatagacttgagagcaaggcac

SEQ ID NO: 36134 - DNA, 25 bp, Homo sapien
cttcaggttcaggtcatagatctat

SEQ ID NO: 36135 - DNA, 25 bp, Homo sapien
taatatggattctgtgtgcaccttc

SEQ ID NO: 36136 - DNA, 25 bp, Homo sapien
tcagaccatgattgactgcccagtc

SEQ ID NO: 36137 - DNA, 25 bp, Homo sapien
ctgctgggtcattaaaagatgcctc

SEQ ID NO: 36138 - DNA, 25 bp, Homo sapien
atgcctcatatgtgcagtgcgttcc

SEQ ID NO: 36139 - DNA, 25 bp, Homo sapien
gtgctcagagatcagtgcccacctc

SEQ ID NO: 36140 - DNA, 25 bp, Homo sapien
aggaaccaaccatgtaattagagag

SEQ ID NO: 36141 - DNA, 25 bp, Homo sapien
tctagtgaatctgaggggatgtaaa

SEQ ID NO: 36142 - DNA, 25 bp, Homo sapien
agcatgattgtacgtaaagcacttt

SEQ ID NO: 36143 - DNA, 25 bp, Homo sapien
tcctgataggggtgtctgatttcat

SEQ ID NO: 36144 - DNA, 25 bp, Homo sapien
ttcactgagctgttcatgggtttcc

SEQ ID NO: 36145 - DNA, 25 bp, Homo sapien
tgggagcttgttgccagaggaacca

SEQ ID NO: 36146 - DNA, 25 bp, Homo sapien
gtgtaatgaggcctagataaaaact

SEQ ID NO: 36147 - DNA, 25 bp, Homo sapien
ccctgggaggtgttctagtgaatct

SEQ ID NO: 36148 - DNA, 25 bp, Homo sapien
tttaccctaatgaggtgactcttgg

SEQ ID NO: 36149 - DNA, 25 bp, Homo sapien
aaatctgcagttgtcaggagtgagt

SEQ ID NO: 36150 - DNA, 25 bp, Homo sapien
ttgactgaccagcattaggaatctc

SEQ ID NO: 36151 - DNA, 25 bp, Homo sapien
aagtcataaataagggtgctgtcca

SEQ ID NO: 36152 - DNA, 25 bp, Homo sapien
aaggtaagttggctagaactagcaa

SEQ ID NO: 36153 - DNA, 25 bp, Homo sapien
tctctgtaactactagtggaagccc

SEQ ID NO: 36154 - DNA, 25 bp, Homo sapien
aaagcaagatgtagtacaatgtgtc

SEQ ID NO: 36155 - DNA, 25 bp, Homo sapien
tcttgggttgaacaaagattcacct

SEQ ID NO: 36156 - DNA, 25 bp, Homo sapien
gtggaagcccaaattagtacagccc

SEQ ID NO: 36157 - DNA, 25 bp, Homo sapien
ctttaaggagtgaaactaggatctt

SEQ ID NO: 36158 - DNA, 25 bp, Homo sapien
taagatgtgagccattgactgacca

SEQ ID NO: 36159 - DNA, 25 bp, Homo sapien
agtacagcccttgtgaaggtaagtt

SEQ ID NO: 36160 - DNA, 25 bp, Homo sapien
catgcccaaggaggtctctaatgtt

SEQ ID NO: 36161 - DNA, 25 bp, Homo sapien
agagcgcgcttttccgtccgcctga

SEQ ID NO: 36162 - DNA, 25 bp, Homo sapien
ctcaagtctgctcaagtaaagtggt

SEQ ID NO: 36163 - DNA, 25 bp, Homo sapien
tcgctggggttaagccactctcttc

SEQ ID NO: 36164 - DNA, 25 bp, Homo sapien
gtggtgttaaccgacaatgacaaac

SEQ ID NO: 36165 - DNA, 25 bp, Homo sapien
ggaatgcatgagaaactcaagtctg

SEQ ID NO: 36166 - DNA, 25 bp, Homo sapien
cttcaccgggctcacaaacacttag

SEQ ID NO: 36167 - DNA, 25 bp, Homo sapien
ctcaagtaaagtggtgttaaccgac

SEQ ID NO: 36168 - DNA, 25 bp, Homo sapien
gggctcacaaacacttagctcgcgc

SEQ ID NO: 36169 - DNA, 25 bp, Homo sapien
ccgacaatgacaaacaataagaaga

SEQ ID NO: 36170 - DNA, 25 bp, Homo sapien
ttctcccgctcgctggggttaagcc

SEQ ID NO: 36171 - DNA, 25 bp, Homo sapien
ttttccgtccgcctgaggagccgaa

SEQ ID NO: 36172 - DNA, 25 bp, Homo sapien
ggtgacgtcactagccatgaatatt

SEQ ID NO: 36173 - DNA, 25 bp, Homo sapien
ccagagcctcattcttgatcatgtc

SEQ ID NO: 36174 - DNA, 25 bp, Homo sapien
ctggcttcttggttccttgctgtct

SEQ ID NO: 36175 - DNA, 25 bp, Homo sapien
agtagcctcctctatggcacctcag

SEQ ID NO: 36176 - DNA, 25 bp, Homo sapien
gctggtggctcacagttttcctctc

SEQ ID NO: 36177 - DNA, 25 bp, Homo sapien
ctaaacctttggctggtggctcaca

SEQ ID NO: 36178 - DNA, 25 bp, Homo sapien
tctagcaatgctaaacctttggctg

SEQ ID NO: 36179 - DNA, 25 bp, Homo sapien
taaaaatcacacttggtgacgtcac

SEQ ID NO: 36180 - DNA, 25 bp, Homo sapien
tgcacccgaccttgtcttcctgtat

SEQ ID NO: 36181 - DNA, 25 bp, Homo sapien
aggctctcatgctctggatattatc

SEQ ID NO: 36182 - DNA, 25 bp, Homo sapien
cttgctccactgaggctctcatgct

SEQ ID NO: 36183 - DNA, 25 bp, Homo sapien
tgttgacaaagttgaagctgatgat

SEQ ID NO: 36184 - DNA, 25 bp, Homo sapien
tctcaccgggttgtgtgtcatatcc

SEQ ID NO: 36185 - DNA, 25 bp, Homo sapien
ttacaggggcaatccaccatgtctg

SEQ ID NO: 36186 - DNA, 25 bp, Homo sapien
accatgtctgggaaaagtatgaatc

SEQ ID NO: 36187 - DNA, 25 bp, Homo sapien
gtcagggactatagggttctcatca

SEQ ID NO: 36188 - DNA, 25 bp, Homo sapien
ctcggcaaactgtaacacaaggtac

SEQ ID NO: 36189 - DNA, 25 bp, Homo sapien
ccatattaagggtgtgttgacaaag

SEQ ID NO: 36190 - DNA, 25 bp, Homo sapien
tcaagtgatctgagttgctggggct

SEQ ID NO: 36191 - DNA, 25 bp, Homo sapien
caggaaacaatcagtcagggactat

SEQ ID NO: 36192 - DNA, 25 bp, Homo sapien
tgtgaaagtgctcggcaaactgtaa

SEQ ID NO: 36193 - DNA, 25 bp, Homo sapien
gatgatggccaggaaacaatcagtc

SEQ ID NO: 36194 - DNA, 25 bp, Homo sapien
gtgttgtgtattcttgtggtgctaa

SEQ ID NO: 36195 - DNA, 25 bp, Homo sapien
tccttcagtactgcgttggctattc

SEQ ID NO: 36196 - DNA, 25 bp, Homo sapien
acgttaagtagtgccagtcctctgg

SEQ ID NO: 36197 - DNA, 25 bp, Homo sapien
taagtcttgacgttaagtagtgcca

SEQ ID NO: 36198 - DNA, 25 bp, Homo sapien
tccacaaaataactctgtaggattt

SEQ ID NO: 36199 - DNA, 25 bp, Homo sapien
catcaagttgggaagaactgacatc

SEQ ID NO: 36200 - DNA, 25 bp, Homo sapien
actgtcgtgattactgtcgctttac

SEQ ID NO: 36201 - DNA, 25 bp, Homo sapien
atatatacatcaagttgggaagaac

SEQ ID NO: 36202 - DNA, 25 bp, Homo sapien
actgtcgctttacggtaagtcttga

SEQ ID NO: 36203 - DNA, 25 bp, Homo sapien
cactgaactattggtagaggtctat

SEQ ID NO: 36204 - DNA, 25 bp, Homo sapien
ctatccatgaatgttgaatatctct

SEQ ID NO: 36205 - DNA, 25 bp, Homo sapien
ctcccaaactgtcgggatcgcaggc

SEQ ID NO: 36206 - DNA, 25 bp, Homo sapien
gcaagggcacaaagtcggccctggt

SEQ ID NO: 36207 - DNA, 25 bp, Homo sapien
ccctgagaacgaatcagggctgtcc

SEQ ID NO: 36208 - DNA, 25 bp, Homo sapien
gcaagtgacatgtccaggcagtcat

SEQ ID NO: 36209 - DNA, 25 bp, Homo sapien
ccacgccaagctaactattgtattc

SEQ ID NO: 36210 - DNA, 25 bp, Homo sapien
gtggggaaaccctgagaacgaatca

SEQ ID NO: 36211 - DNA, 25 bp, Homo sapien
ctgggcccacgggattcacctgcct

SEQ ID NO: 36212 - DNA, 25 bp, Homo sapien
atctgcaagtctgggtcagcttagc

SEQ ID NO: 36213 - DNA, 25 bp, Homo sapien
gaatcacatctgcaagtctgggtca

SEQ ID NO: 36214 - DNA, 25 bp, Homo sapien
gcagtcatgaaattccaacctcact

SEQ ID NO: 36215 - DNA, 25 bp, Homo sapien
ctgtccaagtgtgaggcaagtgaca

SEQ ID NO: 36216 - DNA, 25 bp, Homo sapien
atagcaatacaaggctgatgcatgc

SEQ ID NO: 36217 - DNA, 25 bp, Homo sapien
ctcagttaagaagtctgtgctgctc

SEQ ID NO: 36218 - DNA, 25 bp, Homo sapien
cattcgtcaggtaagcacgagtgac

SEQ ID NO: 36219 - DNA, 25 bp, Homo sapien
caatacaaggctgatgcatgcatcc

SEQ ID NO: 36220 - DNA, 25 bp, Homo sapien
tcattgaactgagagctaaagctgc

SEQ ID NO: 36221 - DNA, 25 bp, Homo sapien
gtttacagaaagctcagttaagaag

SEQ ID NO: 36222 - DNA, 25 bp, Homo sapien
ctaaagctgcattcgtcaggtaagc

SEQ ID NO: 36223 - DNA, 25 bp, Homo sapien
cacgagtgacgtgagataagattat

SEQ ID NO: 36224 - DNA, 25 bp, Homo sapien
tgtgtgggagctcctatagcaatac

SEQ ID NO: 36225 - DNA, 25 bp, Homo sapien
ataagattatgtgtgggagctccta

SEQ ID NO: 36226 - DNA, 25 bp, Homo sapien
acatacatacagacgaagggaggga

SEQ ID NO: 36227 - DNA, 25 bp, Homo sapien
atgcagcagacatctcatgttactg

SEQ ID NO: 36228 - DNA, 25 bp, Homo sapien
tctcagacagggaatgtactgctcc

SEQ ID NO: 36229 - DNA, 25 bp, Homo sapien
aaaaagcctccttggctggcgcggt

SEQ ID NO: 36230 - DNA, 25 bp, Homo sapien
acagacgctgtttaatgcagcagac

SEQ ID NO: 36231 - DNA, 25 bp, Homo sapien
tgtctacccttcagaaaaagcctcc

SEQ ID NO: 36232 - DNA, 25 bp, Homo sapien
aacatcagtttgcagtaacataatc

SEQ ID NO: 36233 - DNA, 25 bp, Homo sapien
ttcaccagtctcagacagggaatgt

SEQ ID NO: 36234 - DNA, 25 bp, Homo sapien
aaagcaatttggacatccgcactgc

SEQ ID NO: 36235 - DNA, 25 bp, Homo sapien
ggtctcatggggagtaaagcaattt

SEQ ID NO: 36236 - DNA, 25 bp, Homo sapien
tgctggaaacacattagaggtgcct

SEQ ID NO: 36237 - DNA, 25 bp, Homo sapien
tgcaacttgatccacagacgctgtt

SEQ ID NO: 36238 - DNA, 25 bp, Homo sapien
attgaaaatataggctcacacctgt

SEQ ID NO: 36239 - DNA, 25 bp, Homo sapien
gttacacctatatatccaccttcag

SEQ ID NO: 36240 - DNA, 25 bp, Homo sapien
ttgataattgaaaatataggctcac

SEQ ID NO: 36241 - DNA, 25 bp, Homo sapien
accacagacactagccaccacgact

SEQ ID NO: 36242 - DNA, 25 bp, Homo sapien
atgtatatataccagtaccttcaac

SEQ ID NO: 36243 - DNA, 25 bp, Homo sapien
ctgtaatccaccactaaggggccga

SEQ ID NO: 36244 - DNA, 25 bp, Homo sapien
actcttaaaaggctattgataattg

SEQ ID NO: 36245 - DNA, 25 bp, Homo sapien
ttcaacttctgagcctttctgggat

SEQ ID NO: 36246 - DNA, 25 bp, Homo sapien
ccaccttcagggatatatatataca

SEQ ID NO: 36247 - DNA, 25 bp, Homo sapien
ctttgtaagtttaaccactgcaccc

SEQ ID NO: 36248 - DNA, 25 bp, Homo sapien
gggattctgtggtttgactcagttt

SEQ ID NO: 36249 - DNA, 25 bp, Homo sapien
tgaaccatcctcacgttccaggaat

SEQ ID NO: 36250 - DNA, 25 bp, Homo sapien
ttttgttgagggattttgcatcaag

SEQ ID NO: 36251 - DNA, 25 bp, Homo sapien
ctgtaggtttagttagagcttcttt

SEQ ID NO: 36252 - DNA, 25 bp, Homo sapien
gagatgatcacatggtttttgccca

SEQ ID NO: 36253 - DNA, 25 bp, Homo sapien
tcctgctgagagatccacttataat

SEQ ID NO: 36254 - DNA, 25 bp, Homo sapien
caggtgttcctgctgagagatccac

SEQ ID NO: 36255 - DNA, 25 bp, Homo sapien
tgaaagaatgagctcagttctgctg

SEQ ID NO: 36256 - DNA, 25 bp, Homo sapien
ctaatgtgttatggatttggtttgc

SEQ ID NO: 36257 - DNA, 25 bp, Homo sapien
tcttctcttgtaaagcaggtgttcc

SEQ ID NO: 36258 - DNA, 25 bp, Homo sapien
aatttaggttggtgatttgagatct

SEQ ID NO: 36259 - DNA, 25 bp, Homo sapien
aagagtttgagaagattagtttgtc

SEQ ID NO: 36260 - DNA, 25 bp, Homo sapien
cctcgactcgcgccgcggggctctg

SEQ ID NO: 36261 - DNA, 25 bp, Homo sapien
cagagccccgcggcgcgagtcgagg

SEQ ID NO: 36262 - DNA, 25 bp, Homo sapien
aaccagcttgagtctaagttgccta

SEQ ID NO: 36263 - DNA, 25 bp, Homo sapien
cagcatcacggtaaatgacttcaac

SEQ ID NO: 36264 - DNA, 25 bp, Homo sapien
atttagcaggtctttggttaagttc

SEQ ID NO: 36265 - DNA, 25 bp, Homo sapien
attttccacttctgccatgaggcta

SEQ ID NO: 36266 - DNA, 25 bp, Homo sapien
actgggattcagttttagtgatctc

SEQ ID NO: 36267 - DNA, 25 bp, Homo sapien
tctttgggttaagccaaccagcttg

SEQ ID NO: 36268 - DNA, 25 bp, Homo sapien
caagcacacgctttcgaagattttc

SEQ ID NO: 36269 - DNA, 25 bp, Homo sapien
aagttgcctattgtgagactcttga

SEQ ID NO: 36270 - DNA, 25 bp, Homo sapien
tgccatgaggctagagtttccacat

SEQ ID NO: 36271 - DNA, 25 bp, Homo sapien
gatttaaatgtagctgggtgcactc

SEQ ID NO: 36272 - DNA, 25 bp, Homo sapien
tagctgggtgcactcagatttactc

SEQ ID NO: 36273 - DNA, 25 bp, Homo sapien
tgagagagaaagcattaacacatat

SEQ ID NO: 36274 - DNA, 25 bp, Homo sapien
agtctgaaatgacagctgaggagct

SEQ ID NO: 36275 - DNA, 25 bp, Homo sapien
ccaaagaggatatgactaaaatagt

SEQ ID NO: 36276 - DNA, 25 bp, Homo sapien
acctctgtttcaagaagtagcactt

SEQ ID NO: 36277 - DNA, 25 bp, Homo sapien
ttaagaccattagaaaaactcaaga

SEQ ID NO: 36278 - DNA, 25 bp, Homo sapien
ttctggaaagtaggcagatttttct

SEQ ID NO: 36279 - DNA, 25 bp, Homo sapien
gaatgataggtaccaaagaggatat

SEQ ID NO: 36280 - DNA, 25 bp, Homo sapien
ctgtaagtgacttcaaaatgtgctc

SEQ ID NO: 36281 - DNA, 25 bp, Homo sapien
ttttgcctgaataacactacctctg

SEQ ID NO: 36282 - DNA, 25 bp, Homo sapien
ctcaagaggcaattccaaggagtta

SEQ ID NO: 36283 - DNA, 25 bp, Homo sapien
tcttgaaaatagcaggaatctcatt

SEQ ID NO: 36284 - DNA, 25 bp, Homo sapien
aaaaaagactatgaggagccactca

SEQ ID NO: 36285 - DNA, 25 bp, Homo sapien
aagcctctgagaaagagactatgag

SEQ ID NO: 36286 - DNA, 25 bp, Homo sapien
cactcagaagtgtagtttcatggcc

SEQ ID NO: 36287 - DNA, 25 bp, Homo sapien
acatgaagccaaagcctctgagaaa

SEQ ID NO: 36288 - DNA, 25 bp, Homo sapien
tctgagattcgttctaggcttccat

SEQ ID NO: 36289 - DNA, 25 bp, Homo sapien
ttcatggcccaactcgaatgtccct

SEQ ID NO: 36290 - DNA, 25 bp, Homo sapien
aggcttccattctgactgctaggca

SEQ ID NO: 36291 - DNA, 25 bp, Homo sapien
agagaccattcccacatgaagccaa

SEQ ID NO: 36292 - DNA, 25 bp, Homo sapien
cagggatgaggttcaaagtcctgcc

SEQ ID NO: 36293 - DNA, 25 bp, Homo sapien
ttcagactaggagacctttaatatc

SEQ ID NO: 36294 - DNA, 25 bp, Homo sapien
cccttattggggacaatacggcagg

SEQ ID NO: 36295 - DNA, 25 bp, Homo sapien
aacttgaagctcatactgatgtttc

SEQ ID NO: 36296 - DNA, 25 bp, Homo sapien
gatctgagtgctaggcgcacttgtt

SEQ ID NO: 36297 - DNA, 25 bp, Homo sapien
gctaggcgcacttgttgtcactgag

SEQ ID NO: 36298 - DNA, 25 bp, Homo sapien
tctctgacagtgagcaacctgcttc

SEQ ID NO: 36299 - DNA, 25 bp, Homo sapien
ctgaggtgtccctgtttctatgtcc

SEQ ID NO: 36300 - DNA, 25 bp, Homo sapien
gtttccaaatctaatcaagcaccac

SEQ ID NO: 36301 - DNA, 25 bp, Homo sapien
aaataatgctagctccagccagggg

SEQ ID NO: 36302 - DNA, 25 bp, Homo sapien
ctttcggcagacagattcaggaaac

SEQ ID NO: 36303 - DNA, 25 bp, Homo sapien
aagcaccacatattttcctccaggc

SEQ ID NO: 36304 - DNA, 25 bp, Homo sapien
agtttctcaggttgcttctgtgtcc

SEQ ID NO: 36305 - DNA, 25 bp, Homo sapien
tgtgtccttttgacgcggcccaact

SEQ ID NO: 36306 - DNA, 25 bp, Homo sapien
ctcaggtgcacagctcataaaggga

SEQ ID NO: 36307 - DNA, 25 bp, Homo sapien
aaagccaggtgtaaattgcatcatc

SEQ ID NO: 36308 - DNA, 25 bp, Homo sapien
ctgtggggcagagcttatttcttct

SEQ ID NO: 36309 - DNA, 25 bp, Homo sapien
atcatctggctgaatgaggcgctca

SEQ ID NO: 36310 - DNA, 25 bp, Homo sapien
cccagagaggctgtgcaatttgcct

SEQ ID NO: 36311 - DNA, 25 bp, Homo sapien
atttatgaaaccaaggtgccgagct

SEQ ID NO: 36312 - DNA, 25 bp, Homo sapien
tttatagatgagagtaagggtaaca

SEQ ID NO: 36313 - DNA, 25 bp, Homo sapien
aggtgccgagctatatacgtttaca

SEQ ID NO: 36314 - DNA, 25 bp, Homo sapien
atcttgacaccagtcctgtggggca

SEQ ID NO: 36315 - DNA, 25 bp, Homo sapien
ctacaggtgaaaaattgaagcccag

SEQ ID NO: 36316 - DNA, 25 bp, Homo sapien
ttccatgtgaggaaaaggctaatat

SEQ ID NO: 36317 - DNA, 25 bp, Homo sapien
tggctcagctgtgtgacatcgactc

SEQ ID NO: 36318 - DNA, 25 bp, Homo sapien
ggctcagctgtgtgacatcgactcc

SEQ ID NO: 36319 - DNA, 25 bp, Homo sapien
ccctgtggctcagctgtgtgacatc

SEQ ID NO: 36320 - DNA, 25 bp, Homo sapien
gggcaggatgtcacgccccatccag

SEQ ID NO: 36321 - DNA, 25 bp, Homo sapien
ggacctggggaaagctttcaccaca

SEQ ID NO: 36322 - DNA, 25 bp, Homo sapien
ctagagtgagctgcatttctgggtc

SEQ ID NO: 36323 - DNA, 25 bp, Homo sapien
tgtggctcagctgtgtgacatcgac

SEQ ID NO: 36324 - DNA, 25 bp, Homo sapien
ctgtggctcagctgtgtgacatcga

SEQ ID NO: 36325 - DNA, 25 bp, Homo sapien
gtggctcagctgtgtgacatcgact

SEQ ID NO: 36326 - DNA, 25 bp, Homo sapien
cccgccacaccctcgggggcaggat

SEQ ID NO: 36327 - DNA, 25 bp, Homo sapien
gctagagtgagctgcatttctgggt

SEQ ID NO: 36328 - DNA, 25 bp, Homo sapien
gctgtggtcagtttaaagataaccc

SEQ ID NO: 36329 - DNA, 25 bp, Homo sapien
cagtggaaaagggaaggattattaa

SEQ ID NO: 36330 - DNA, 25 bp, Homo sapien
ccgacttggccggaagtttgagcaa

SEQ ID NO: 36331 - DNA, 25 bp, Homo sapien
ttaggagaggcagcatacagacgca

SEQ ID NO: 36332 - DNA, 25 bp, Homo sapien
tagtgtcacaaatcagtggaaaagg

SEQ ID NO: 36333 - DNA, 25 bp, Homo sapien
atatattagaaagctgtggtcagtt

SEQ ID NO: 36334 - DNA, 25 bp, Homo sapien
agtctataggaaatgttaatgaaac

SEQ ID NO: 36335 - DNA, 25 bp, Homo sapien
ataatgaattaggagaggcagcata

SEQ ID NO: 36336 - DNA, 25 bp, Homo sapien
gaagtttgagcaagttgcagtggta

SEQ ID NO: 36337 - DNA, 25 bp, Homo sapien
ccagggcaagaataagtaaccaaaa

SEQ ID NO: 36338 - DNA, 25 bp, Homo sapien
agggaaggattattaaatgacagta

SEQ ID NO: 36339 - DNA, 25 bp, Homo sapien
tgcgtgccgtgacttatccaacctg

SEQ ID NO: 36340 - DNA, 25 bp, Homo sapien
accctttgctgatgaagaaaataat

SEQ ID NO: 36341 - DNA, 25 bp, Homo sapien
ataagtggaactatttgcatctatg

SEQ ID NO: 36342 - DNA, 25 bp, Homo sapien
aacctgtgaactgattgtgatctgc

SEQ ID NO: 36343 - DNA, 25 bp, Homo sapien
aagtacattttctggcctgcgtgcc

SEQ ID NO: 36344 - DNA, 25 bp, Homo sapien
ttgtgatctgcttggtaacttggtt

SEQ ID NO: 36345 - DNA, 25 bp, Homo sapien
attgtgcctatgatgagagaaatct

SEQ ID NO: 36346 - DNA, 25 bp, Homo sapien
gaggactgcttaaagccggaagtta

SEQ ID NO: 36347 - DNA, 25 bp, Homo sapien
ttggaggctctcaatggatcttcta

SEQ ID NO: 36348 - DNA, 25 bp, Homo sapien
gtgtaaactgctcttaaccctttgc

SEQ ID NO: 36349 - DNA, 25 bp, Homo sapien
aagccggaagttaaagactaggctg

SEQ ID NO: 36350 - DNA, 25 bp, Homo sapien
acatgggacaaaactcaactggtat

SEQ ID NO: 36351 - DNA, 25 bp, Homo sapien
tgcacctggtcaagtattatggttt

SEQ ID NO: 36352 - DNA, 25 bp, Homo sapien
ataaaagggtatgcaggagaaaaaa

SEQ ID NO: 36353 - DNA, 25 bp, Homo sapien
atacatcacgtgcatatatcctgtc

SEQ ID NO: 36354 - DNA, 25 bp, Homo sapien
acgtgcatatatcctgtcagtcaat

SEQ ID NO: 36355 - DNA, 25 bp, Homo sapien
ctaaactcaattatggttgcctgtt

SEQ ID NO: 36356 - DNA, 25 bp, Homo sapien
gaatttataaatacatcacgtgcat

SEQ ID NO: 36357 - DNA, 25 bp, Homo sapien
gtatgcacacatgggacaaaactca

SEQ ID NO: 36358 - DNA, 25 bp, Homo sapien
taatgagttatgctagttgttgcct

SEQ ID NO: 36359 - DNA, 25 bp, Homo sapien
caactggtataaaagggtatgcagg

SEQ ID NO: 36360 - DNA, 25 bp, Homo sapien
ttttaatagtatgcacacatgggac

SEQ ID NO: 36361 - DNA, 25 bp, Homo sapien
tggggactgtccgtaagagttatta

SEQ ID NO: 36362 - DNA, 25 bp, Homo sapien
tgcaccattgcaaagtagaaaaatc

SEQ ID NO: 36363 - DNA, 25 bp, Homo sapien
agatccgggctgagatccagacttc

SEQ ID NO: 36364 - DNA, 25 bp, Homo sapien
gttattaacagaggattggaatggg

SEQ ID NO: 36365 - DNA, 25 bp, Homo sapien
attgggtagtaaggaataaagagaa

SEQ ID NO: 36366 - DNA, 25 bp, Homo sapien
agggaacagccgatatgggcttttc

SEQ ID NO: 36367 - DNA, 25 bp, Homo sapien
tgaaaaatagaggtcgtatgagtac

SEQ ID NO: 36368 - DNA, 25 bp, Homo sapien
tccagacttcgtgtgagaggacaca

SEQ ID NO: 36369 - DNA, 25 bp, Homo sapien
acacagctgtgaaagacagaggttt

SEQ ID NO: 36370 - DNA, 25 bp, Homo sapien
ggctgagacagaacaactcaaagaa

SEQ ID NO: 36371 - DNA, 25 bp, Homo sapien
actcaaagaagaaagctcagggctg

SEQ ID NO: 36372 - DNA, 25 bp, Homo sapien
agatccagccatgaaggaaagatgt

SEQ ID NO: 36373 - DNA, 25 bp, Homo sapien
aagagccagagtaaaatggagactt

SEQ ID NO: 36374 - DNA, 25 bp, Homo sapien
gccagagtaaaatggagacttgtgt

SEQ ID NO: 36375 - DNA, 25 bp, Homo sapien
gttgatgagttagcatcgaaggagt

SEQ ID NO: 36376 - DNA, 25 bp, Homo sapien
caagagtacaagttgatgagttagc

SEQ ID NO: 36377 - DNA, 25 bp, Homo sapien
gatgagttagcatcgaaggagtgaa

SEQ ID NO: 36378 - DNA, 25 bp, Homo sapien
agcagcatttaaggatccaagtctc

SEQ ID NO: 36379 - DNA, 25 bp, Homo sapien
gagaagagccagagtaaaatggaga

SEQ ID NO: 36380 - DNA, 25 bp, Homo sapien
atgtggggtttcaaagaaagaacca

SEQ ID NO: 36381 - DNA, 25 bp, Homo sapien
tggtgagccagacatggccatattc

SEQ ID NO: 36382 - DNA, 25 bp, Homo sapien
caagagtggtgagccagacatggcc

SEQ ID NO: 36383 - DNA, 25 bp, Homo sapien
ctatggacattttcttgtaggaata

SEQ ID NO: 36384 - DNA, 25 bp, Homo sapien
ggtatgagttccaagggcccgatca

SEQ ID NO: 36385 - DNA, 25 bp, Homo sapien
ctgggataaccaacataaaactgat

SEQ ID NO: 36386 - DNA, 25 bp, Homo sapien
aatggagacttctttagtgaaactc

SEQ ID NO: 36387 - DNA, 25 bp, Homo sapien
taaaaccacccttgggcagtcacac

SEQ ID NO: 36388 - DNA, 25 bp, Homo sapien
caggcatcagaattgttagagcttt

SEQ ID NO: 36389 - DNA, 25 bp, Homo sapien
acccactacacatcggtggagaagg

SEQ ID NO: 36390 - DNA, 25 bp, Homo sapien
agggcccgatcagctatgagattat

SEQ ID NO: 36391 - DNA, 25 bp, Homo sapien
agtgaaaatccactgggataaccaa

SEQ ID NO: 36392 - DNA, 25 bp, Homo sapien
tgggcagtcacacgtggaatcactt

SEQ ID NO: 36393 - DNA, 25 bp, Homo sapien
tgaactcaggcatcagaattgttag

SEQ ID NO: 36394 - DNA, 25 bp, Homo sapien
aaaaggaatgctcaaccgcatttgt

SEQ ID NO: 36395 - DNA, 25 bp, Homo sapien
ctttcctggtgtctgaaatcacatc

SEQ ID NO: 36396 - DNA, 25 bp, Homo sapien
tttagtgtgattaagctcattgcac

SEQ ID NO: 36397 - DNA, 25 bp, Homo sapien
agtgtcattaagctttcctggtgtc

SEQ ID NO: 36398 - DNA, 25 bp, Homo sapien
atcatttagtgtcattaagctttcc

SEQ ID NO: 36399 - DNA, 25 bp, Homo sapien
gaaaatctgattaaccactccagta

SEQ ID NO: 36400 - DNA, 25 bp, Homo sapien
taagctcattgcactcattaatcat

SEQ ID NO: 36401 - DNA, 25 bp, Homo sapien
atcacatcaactaggcatttatctt

SEQ ID NO: 36402 - DNA, 25 bp, Homo sapien
atatctttggttactagtgatctcc

SEQ ID NO: 36403 - DNA, 25 bp, Homo sapien
ggttactagtgatctccataatgac

SEQ ID NO: 36404 - DNA, 25 bp, Homo sapien
aagaaaaaaggaatgctcaaccgca

SEQ ID NO: 36405 - DNA, 25 bp, Homo sapien
agaaactagagccagtaaggacact

SEQ ID NO: 36406 - DNA, 25 bp, Homo sapien
catctgtagtgaagattagatcttt

SEQ ID NO: 36407 - DNA, 25 bp, Homo sapien
taggttgccagccttaaccaaggct

SEQ ID NO: 36408 - DNA, 25 bp, Homo sapien
tctgggtatcagtgacatctgtagt

SEQ ID NO: 36409 - DNA, 25 bp, Homo sapien
tcaccatactggtcaggccaggctc

SEQ ID NO: 36410 - DNA, 25 bp, Homo sapien
cttaaccaaggctgtaaccatagat

SEQ ID NO: 36411 - DNA, 25 bp, Homo sapien
aaggctgtaaccatagattgtatct

SEQ ID NO: 36412 - DNA, 25 bp, Homo sapien
atgcccagccagtctaaacaattat

SEQ ID NO: 36413 - DNA, 25 bp, Homo sapien
ggttaagctattatcctggaagtcc

SEQ ID NO: 36414 - DNA, 25 bp, Homo sapien
atttcttaagaaactagagccagta

SEQ ID NO: 36415 - DNA, 25 bp, Homo sapien
tagattgtatctgggtatcagtgac

SEQ ID NO: 36416 - DNA, 25 bp, Homo sapien
ggagctgaaatgaaatggactatgc

SEQ ID NO: 36417 - DNA, 25 bp, Homo sapien
atggactatgcggtgtatgtcttcc

SEQ ID NO: 36418 - DNA, 25 bp, Homo sapien
gtcagatgccatcaggagctgaaat

SEQ ID NO: 36419 - DNA, 25 bp, Homo sapien
tctgctggcccaggtcatgaatgac

SEQ ID NO: 36420 - DNA, 25 bp, Homo sapien
tcaggagcagaaacaacgtgtggtt

SEQ ID NO: 36421 - DNA, 25 bp, Homo sapien
cggtcagatgccatcaggagctgaa

SEQ ID NO: 36422 - DNA, 25 bp, Homo sapien
aaatcatcacaagggtccatgacct

SEQ ID NO: 36423 - DNA, 25 bp, Homo sapien
caggtcatgaatgacaggcacagct

SEQ ID NO: 36424 - DNA, 25 bp, Homo sapien
aatgcgagtctgctggcccaggtca

SEQ ID NO: 36425 - DNA, 25 bp, Homo sapien
cccaaatcatcacaagggtccatga

SEQ ID NO: 36426 - DNA, 25 bp, Homo sapien
aaatgaaatggactatgcggtgtat

SEQ ID NO: 36427 - DNA, 25 bp, Homo sapien
atattctgaggtcagtaagcaaaat

SEQ ID NO: 36428 - DNA, 25 bp, Homo sapien
ggaaagaatgatacacagaatggcc

SEQ ID NO: 36429 - DNA, 25 bp, Homo sapien
acataaatccggcagtggcactgat

SEQ ID NO: 36430 - DNA, 25 bp, Homo sapien
cagtaagcaaaatgacaagaagatg

SEQ ID NO: 36431 - DNA, 25 bp, Homo sapien
tgtgccaatagtttaaatgccaaga

SEQ ID NO: 36432 - DNA, 25 bp, Homo sapien
tctcaaacatgccagaagctgaacc

SEQ ID NO: 36433 - DNA, 25 bp, Homo sapien
actgatgtaattatgggcttagacc

SEQ ID NO: 36434 - DNA, 25 bp, Homo sapien
agctgaaccacagtccttatgggaa

SEQ ID NO: 36435 - DNA, 25 bp, Homo sapien
atgatacacagaatggcccacctat

SEQ ID NO: 36436 - DNA, 25 bp, Homo sapien
agtttaaatgccaagaggcaccagg

SEQ ID NO: 36437 - DNA, 25 bp, Homo sapien
caagaaggtgcacagacataaatcc

SEQ ID NO: 36438 - DNA, 25 bp, Homo sapien
cttggcatttaaactattggcacag

SEQ ID NO: 36439 - DNA, 25 bp, Homo sapien
aagcccataattacatcagtgccac

SEQ ID NO: 36440 - DNA, 25 bp, Homo sapien
atcagtgccactgccggatttatgt

SEQ ID NO: 36441 - DNA, 25 bp, Homo sapien
gccggatttatgtctgtgcaccttc

SEQ ID NO: 36442 - DNA, 25 bp, Homo sapien
aatataatttccatgataatgcttc

SEQ ID NO: 36443 - DNA, 25 bp, Homo sapien
ttcccataaggactgtggttcagct

SEQ ID NO: 36444 - DNA, 25 bp, Homo sapien
ggtctaagcccataattacatcagt

SEQ ID NO: 36445 - DNA, 25 bp, Homo sapien
cctggataggaataggtgggccatt

SEQ ID NO: 36446 - DNA, 25 bp, Homo sapien
ataggtgggccattctgtgtatcat

SEQ ID NO: 36447 - DNA, 25 bp, Homo sapien
ttcttggcctggtgcctcttggcat

SEQ ID NO: 36448 - DNA, 25 bp, Homo sapien
tgtcattttgcttactgacctcaga

SEQ ID NO: 36449 - DNA, 25 bp, Homo sapien
cccaccaacagtatgtaaaggttcc

SEQ ID NO: 36450 - DNA, 25 bp, Homo sapien
caacagtatgtaaaggttcccttta

SEQ ID NO: 36451 - DNA, 25 bp, Homo sapien
gagcatcttttcataaaccacttgg

SEQ ID NO: 36452 - DNA, 25 bp, Homo sapien
tatttgctttcgatatatacacaga

SEQ ID NO: 36453 - DNA, 25 bp, Homo sapien
tttcataaaccacttggccattgta

SEQ ID NO: 36454 - DNA, 25 bp, Homo sapien
tttatccacatccacaccaatcttg

SEQ ID NO: 36455 - DNA, 25 bp, Homo sapien
ttccataatagatgtaccaattcac

SEQ ID NO: 36456 - DNA, 25 bp, Homo sapien
tggcaacagccatcccaacaggtat

SEQ ID NO: 36457 - DNA, 25 bp, Homo sapien
gattttttggcaacagccatcccaa

SEQ ID NO: 36458 - DNA, 25 bp, Homo sapien
tcccaacaggtataaggtaatatct

SEQ ID NO: 36459 - DNA, 25 bp, Homo sapien
agccatcccaacaggtataaggtaa

SEQ ID NO: 36460 - DNA, 25 bp, Homo sapien
ttcgtgtaaggaagaaataagcttc

SEQ ID NO: 36461 - DNA, 25 bp, Homo sapien
tggcctgcccagaactgcctggttc

SEQ ID NO: 36462 - DNA, 25 bp, Homo sapien
ttccaggcctttcgtgtaaggaaga

SEQ ID NO: 36463 - DNA, 25 bp, Homo sapien
gacatcttagaccatgcagggccat

SEQ ID NO: 36464 - DNA, 25 bp, Homo sapien
ggaggatgcatcagtagctcattct

SEQ ID NO: 36465 - DNA, 25 bp, Homo sapien
atacgtaccctagcgatggtggaga

SEQ ID NO: 36466 - DNA, 25 bp, Homo sapien
ttcttatggctgaatgagagtctat

SEQ ID NO: 36467 - DNA, 25 bp, Homo sapien
gagtagtgctgctatgaatgtgcac

SEQ ID NO: 36468 - DNA, 25 bp, Homo sapien
ggacaagcctctagcggacatctta

SEQ ID NO: 36469 - DNA, 25 bp, Homo sapien
tatataaacagttggcaaatgccct

SEQ ID NO: 36470 - DNA, 25 bp, Homo sapien
ctcggtcatgttggaggatgcatca

SEQ ID NO: 36471 - DNA, 25 bp, Homo sapien
aattgaatttgcctgggatgggtct

SEQ ID NO: 36472 - DNA, 25 bp, Homo sapien
atggggacagcaacaccattttgat

SEQ ID NO: 36473 - DNA, 25 bp, Homo sapien
tgggtctcagaccaatagaacattc

SEQ ID NO: 36474 - DNA, 25 bp, Homo sapien
ataacgcaggtgaaatgcttagctc

SEQ ID NO: 36475 - DNA, 25 bp, Homo sapien
tgccctgaccatagggtgtctaggc

SEQ ID NO: 36476 - DNA, 25 bp, Homo sapien
ttgatattgcgtaagtgacttcacc

SEQ ID NO: 36477 - DNA, 25 bp, Homo sapien
atgggatcccaacagtattagtttc

SEQ ID NO: 36478 - DNA, 25 bp, Homo sapien
ctcttaggaagagaagtccttctgt

SEQ ID NO: 36479 - DNA, 25 bp, Homo sapien
cttggggtcatatctggtcaggcaa

SEQ ID NO: 36480 - DNA, 25 bp, Homo sapien
agcagcccattaaaagctcaaagcc

SEQ ID NO: 36481 - DNA, 25 bp, Homo sapien
taagaggtcctcaatagcagcccat

SEQ ID NO: 36482 - DNA, 25 bp, Homo sapien
tagtcctaaacaagcagttggcaat

SEQ ID NO: 36483 - DNA, 25 bp, Homo sapien
atggtgtgccgttctccacgcggtc

SEQ ID NO: 36484 - DNA, 25 bp, Homo sapien
ttcatagtcctaaacaagcagttgg

SEQ ID NO: 36485 - DNA, 25 bp, Homo sapien
cgcgcccggggctcccaccgacctc

SEQ ID NO: 36486 - DNA, 25 bp, Homo sapien
gttctccacgcggtccgatgggaaa

SEQ ID NO: 36487 - DNA, 25 bp, Homo sapien
cccttagcgactcgtggcttctgca

SEQ ID NO: 36488 - DNA, 25 bp, Homo sapien
ttagcgactcgtggcttctgcagcc

SEQ ID NO: 36489 - DNA, 25 bp, Homo sapien
ctaaacaagcagttggcaatggtgt

SEQ ID NO: 36490 - DNA, 25 bp, Homo sapien
tctggaaaagtgaccccttcatagt

SEQ ID NO: 36491 - DNA, 25 bp, Homo sapien
ttggcaatggtgtgccgttctccac

SEQ ID NO: 36492 - DNA, 25 bp, Homo sapien
ccatgtgggctttgctagctcggga

SEQ ID NO: 36493 - DNA, 25 bp, Homo sapien
cccacaggttcatacccaggaatgt

SEQ ID NO: 36494 - DNA, 25 bp, Homo sapien
ggcccagaggattccgcgctttttc

SEQ ID NO: 36495 - DNA, 25 bp, Homo sapien
ctttgacaccggaggcctctgcttc

SEQ ID NO: 36496 - DNA, 25 bp, Homo sapien
tgtctctttgacaccggaggcctct

SEQ ID NO: 36497 - DNA, 25 bp, Homo sapien
taaatagggcctgaggtctctgaaa

SEQ ID NO: 36498 - DNA, 25 bp, Homo sapien
ctgtgggagtctcctcctctcactt

SEQ ID NO: 36499 - DNA, 25 bp, Homo sapien
tctcacttcttgcaggcccagagga

SEQ ID NO: 36500 - DNA, 25 bp, Homo sapien
tttgcaggagggacgtggaacaccc

SEQ ID NO: 36501 - DNA, 25 bp, Homo sapien
atacccaggaatgtggtgctccctt

SEQ ID NO: 36502 - DNA, 25 bp, Homo sapien
gcttctgaggtaaatagggcctgag

SEQ ID NO: 36503 - DNA, 25 bp, Homo sapien
tgaggtctctgaaacccacaggttc

SEQ ID NO: 36504 - DNA, 25 bp, Homo sapien
cttaaagtattagtaaccatgtctg

SEQ ID NO: 36505 - DNA, 25 bp, Homo sapien
ttgagcatttgtgtcacaggagagg

SEQ ID NO: 36506 - DNA, 25 bp, Homo sapien
caggagaggattcatggcttttgtt

SEQ ID NO: 36507 - DNA, 25 bp, Homo sapien
agaaaggaaagccaatctagagtaa

SEQ ID NO: 36508 - DNA, 25 bp, Homo sapien
gccaatctagagtaaaaacttaggc

SEQ ID NO: 36509 - DNA, 25 bp, Homo sapien
ctatagagtcagctgttgagcattt

SEQ ID NO: 36510 - DNA, 25 bp, Homo sapien
atttgtgtcacaggagaggattcat

SEQ ID NO: 36511 - DNA, 25 bp, Homo sapien
aaaggccatcgctatagagtcagct

SEQ ID NO: 36512 - DNA, 25 bp, Homo sapien
agtaaccatgtctgaaacaaaggcc

SEQ ID NO: 36513 - DNA, 25 bp, Homo sapien
tgaaacaaaggccatcgctatagag

SEQ ID NO: 36514 - DNA, 25 bp, Homo sapien
aaacatagtctcgtattttcatgca

SEQ ID NO: 36515 - DNA, 25 bp, Homo sapien
cataaattcaagtccagagtaaatc

SEQ ID NO: 36516 - DNA, 25 bp, Homo sapien
aagctaccaacttactaaataggcc

SEQ ID NO: 36517 - DNA, 25 bp, Homo sapien
cctatagctgtaattgctaggtcaa

SEQ ID NO: 36518 - DNA, 25 bp, Homo sapien
tcttgaccacaaaaacatatgcacc

SEQ ID NO: 36519 - DNA, 25 bp, Homo sapien
gttatccagacttacattatccagg

SEQ ID NO: 36520 - DNA, 25 bp, Homo sapien
gtctaaggtagacagtttgtcaatt

SEQ ID NO: 36521 - DNA, 25 bp, Homo sapien
cgtgataatcttgggtctgtcttga

SEQ ID NO: 36522 - DNA, 25 bp, Homo sapien
aaaatttctgcaaagctagggagga

SEQ ID NO: 36523 - DNA, 25 bp, Homo sapien
aagtccagagtaaatcagatacacc

SEQ ID NO: 36524 - DNA, 25 bp, Homo sapien
ctagggaggaaacaggtttcatagt

SEQ ID NO: 36525 - DNA, 25 bp, Homo sapien
acaacaactaaaacccagcaatatt

SEQ ID NO: 36526 - DNA, 25 bp, Homo sapien
aagcaagaaactaaatcatatcacc

SEQ ID NO: 36527 - DNA, 25 bp, Homo sapien
ggctgagtggatgaaaaaacaatat

SEQ ID NO: 36528 - DNA, 25 bp, Homo sapien
gttgaaggatgaagttaaggcatat

SEQ ID NO: 36529 - DNA, 25 bp, Homo sapien
tcatatcaccagaaaaaactacctt

SEQ ID NO: 36530 - DNA, 25 bp, Homo sapien
aataagatatacatagaaacaggaa

SEQ ID NO: 36531 - DNA, 25 bp, Homo sapien
agcttcacggtgatctcaaacaaaa

SEQ ID NO: 36532 - DNA, 25 bp, Homo sapien
ggaggagaagaccagaaaacaaata

SEQ ID NO: 36533 - DNA, 25 bp, Homo sapien
ataaagacacatatagactacaaat

SEQ ID NO: 36534 - DNA, 25 bp, Homo sapien
aaaagatggtatttgcaagcttcac

SEQ ID NO: 36535 - DNA, 25 bp, Homo sapien
acaaaatggccagagtaagccctta

SEQ ID NO: 36536 - DNA, 25 bp, Homo sapien
acacagtgttaagtagttatcggat

SEQ ID NO: 36537 - DNA, 25 bp, Homo sapien
ctcccaaagtgcattttgatggtct

SEQ ID NO: 36538 - DNA, 25 bp, Homo sapien
ttggacaatagagccttgacagaaa

SEQ ID NO: 36539 - DNA, 25 bp, Homo sapien
aaggctgcggaccactgctctgaaa

SEQ ID NO: 36540 - DNA, 25 bp, Homo sapien
tagattgtaactcttatgcagtcat

SEQ ID NO: 36541 - DNA, 25 bp, Homo sapien
agtggcatagggctatgagtattta

SEQ ID NO: 36542 - DNA, 25 bp, Homo sapien
tgaaaaatatttggacaatagagcc

SEQ ID NO: 36543 - DNA, 25 bp, Homo sapien
tatgggctcattttcttagattgta

SEQ ID NO: 36544 - DNA, 25 bp, Homo sapien
agggctcactgcaggtcacaacctc

SEQ ID NO: 36545 - DNA, 25 bp, Homo sapien
tttgtttaggtggaagagtggcata

SEQ ID NO: 36546 - DNA, 25 bp, Homo sapien
tttgtggcagtctcagtctgtcttc

SEQ ID NO: 36547 - DNA, 25 bp, Homo sapien
gtatcaaaaaggctgcggaccactg

SEQ ID NO: 36548 - DNA, 25 bp, Homo sapien
ggggacaactgagatgcctcaacat

SEQ ID NO: 36549 - DNA, 25 bp, Homo sapien
atgagtctgaaaatcttgagggttt

SEQ ID NO: 36550 - DNA, 25 bp, Homo sapien
tatgctaagaagtatatgtgctgcc

SEQ ID NO: 36551 - DNA, 25 bp, Homo sapien
ctttgtagaggtcctgggacacctt

SEQ ID NO: 36552 - DNA, 25 bp, Homo sapien
tcttccagttagtgctaggctttga

SEQ ID NO: 36553 - DNA, 25 bp, Homo sapien
acatcacaggaggagtttttctgct

SEQ ID NO: 36554 - DNA, 25 bp, Homo sapien
aagtttcgatccacctgaggatgcc

SEQ ID NO: 36555 - DNA, 25 bp, Homo sapien
tttactgaaaatagaggggttgtga

SEQ ID NO: 36556 - DNA, 25 bp, Homo sapien
taggctttgagataaacacacccac

SEQ ID NO: 36557 - DNA, 25 bp, Homo sapien
agcagaaagacaggatttgttcttc

SEQ ID NO: 36558 - DNA, 25 bp, Homo sapien
tgaggatgcccaatgtgcctttgcc

SEQ ID NO: 36559 - DNA, 25 bp, Homo sapien
tcatcagaaactatggaggtgagaa

SEQ ID NO: 36560 - DNA, 25 bp, Homo sapien
atcttgtgagtagccagagaataat

SEQ ID NO: 36561 - DNA, 25 bp, Homo sapien
atttggtgaaagacgtaaacctaca

SEQ ID NO: 36562 - DNA, 25 bp, Homo sapien
cattgtgaatgactacagagtgctc

SEQ ID NO: 36563 - DNA, 25 bp, Homo sapien
aatagtagaatggaaatgagagaaa

SEQ ID NO: 36564 - DNA, 25 bp, Homo sapien
tcagcaaactctaaacaggataaac

SEQ ID NO: 36565 - DNA, 25 bp, Homo sapien
tctgaacatagaaaagagattggaa

SEQ ID NO: 36566 - DNA, 25 bp, Homo sapien
gaaacacagtaacagagataaaacc

SEQ ID NO: 36567 - DNA, 25 bp, Homo sapien
attagagtctcagaaagagaggaaa

SEQ ID NO: 36568 - DNA, 25 bp, Homo sapien
ctcagcgacctgtgcgacaataatt

SEQ ID NO: 36569 - DNA, 25 bp, Homo sapien
gaggaaaaaagtatagcgcagaaaa

SEQ ID NO: 36570 - DNA, 25 bp, Homo sapien
ttgctaatatgttgtcgaggatttt

SEQ ID NO: 36571 - DNA, 25 bp, Homo sapien
agtgcaatgtttagaagtggtgaga

SEQ ID NO: 36572 - DNA, 25 bp, Homo sapien
aatcctgtttggtcatggcatatac

SEQ ID NO: 36573 - DNA, 25 bp, Homo sapien
tttattaggttgaggaagcagcctt

SEQ ID NO: 36574 - DNA, 25 bp, Homo sapien
agatactgtcatgtacaaagtgttt

SEQ ID NO: 36575 - DNA, 25 bp, Homo sapien
ttatcatgaaatggtaactggattt

SEQ ID NO: 36576 - DNA, 25 bp, Homo sapien
aattggtgagtgtaggccatcttca

SEQ ID NO: 36577 - DNA, 25 bp, Homo sapien
ttgactaattccctgagtgcaatgt

SEQ ID NO: 36578 - DNA, 25 bp, Homo sapien
tttctgtgtcttgcgatgatcatat

SEQ ID NO: 36579 - DNA, 25 bp, Homo sapien
ttcatgaaggatattggtctagttt

SEQ ID NO: 36580 - DNA, 25 bp, Homo sapien
ggtgagaggggatatccacattatt

SEQ ID NO: 36581 - DNA, 25 bp, Homo sapien
ctggagtgccagctttatgaactgt

SEQ ID NO: 36582 - DNA, 25 bp, Homo sapien
tcaccacaagtgtccgcggcttcat

SEQ ID NO: 36583 - DNA, 25 bp, Homo sapien
cctgaagacagcgagaccacgaagg

SEQ ID NO: 36584 - DNA, 25 bp, Homo sapien
agcgagaccacgaagggagaccacc

SEQ ID NO: 36585 - DNA, 25 bp, Homo sapien
tgctcactttttggggctgcgctaa

SEQ ID NO: 36586 - DNA, 25 bp, Homo sapien
agggacgaacaactctggagtgcca

SEQ ID NO: 36587 - DNA, 25 bp, Homo sapien
gctgttgctcactttttggggctgc

SEQ ID NO: 36588 - DNA, 25 bp, Homo sapien
ttggggctgcgctaatctttatgag

SEQ ID NO: 36589 - DNA, 25 bp, Homo sapien
gctttatgaactgtaaccctcaccg

SEQ ID NO: 36590 - DNA, 25 bp, Homo sapien
gcacttcactcctgaagacagcgag

SEQ ID NO: 36591 - DNA, 25 bp, Homo sapien
ttctcagtgactcttgctgttgctc

SEQ ID NO: 36592 - DNA, 25 bp, Homo sapien
tgggtaagagcagatcctcccacct

SEQ ID NO: 36593 - DNA, 25 bp, Homo sapien
tcgcagtcactaggactcagggata

SEQ ID NO: 36594 - DNA, 25 bp, Homo sapien
taacgcttatgtgtggcgccctgtc

SEQ ID NO: 36595 - DNA, 25 bp, Homo sapien
tctggccatgtcacaagacaccctt

SEQ ID NO: 36596 - DNA, 25 bp, Homo sapien
actcagggatacaaggtcagaacaa

SEQ ID NO: 36597 - DNA, 25 bp, Homo sapien
tttcatggataaagctcacactagt

SEQ ID NO: 36598 - DNA, 25 bp, Homo sapien
tgactgcagaggatattgggcatat

SEQ ID NO: 36599 - DNA, 25 bp, Homo sapien
cttcaagtcaaagctctaggaaaga

SEQ ID NO: 36600 - DNA, 25 bp, Homo sapien
ctgttaatatggtgaaagctgcttt

SEQ ID NO: 36601 - DNA, 25 bp, Homo sapien
attacgataaggagtccacgcaaac

SEQ ID NO: 36602 - DNA, 25 bp, Homo sapien
aaaacgcacaacacaggtgaacatg

SEQ ID NO: 36603 - DNA, 25 bp, Homo sapien
ctctcaggtcatgcaatgtgggtgt

SEQ ID NO: 36604 - DNA, 25 bp, Homo sapien
agagtcaaggagagatattatgtaa

SEQ ID NO: 36605 - DNA, 25 bp, Homo sapien
ctgctgatcaaacctctagaggagc

SEQ ID NO: 36606 - DNA, 25 bp, Homo sapien
gagcaaagaaaagtaccagagtcaa

SEQ ID NO: 36607 - DNA, 25 bp, Homo sapien
agaaagtaggagtggctatattgat

SEQ ID NO: 36608 - DNA, 25 bp, Homo sapien
tatagggtcagtccaccaaaaagac

SEQ ID NO: 36609 - DNA, 25 bp, Homo sapien
tagaaaatatgaactgcgtatatgc

SEQ ID NO: 36610 - DNA, 25 bp, Homo sapien
tgtgtctgcaccaaataacagctgc

SEQ ID NO: 36611 - DNA, 25 bp, Homo sapien
ataaagcatacttcagagcaaagaa

SEQ ID NO: 36612 - DNA, 25 bp, Homo sapien
tctagaggagcatacaaatgggcaa

SEQ ID NO: 36613 - DNA, 25 bp, Homo sapien
cagctgcaaactagtgaaacaggaa

SEQ ID NO: 36614 - DNA, 25 bp, Homo sapien
agccctgttttagctgtgtcataaa

SEQ ID NO: 36615 - DNA, 25 bp, Homo sapien
taacctaacatatgctataactttc

SEQ ID NO: 36616 - DNA, 25 bp, Homo sapien
cttatagccctgttttagctgtgtc

SEQ ID NO: 36617 - DNA, 25 bp, Homo sapien
cagtaaagagatataagagtaaatt

SEQ ID NO: 36618 - DNA, 25 bp, Homo sapien
ttgatggctgaaaaatcacattatc

SEQ ID NO: 36619 - DNA, 25 bp, Homo sapien
aattacgtttgatggctgaaaaatc

SEQ ID NO: 36620 - DNA, 25 bp, Homo sapien
aaggagacagtaaagagatataaga

SEQ ID NO: 36621 - DNA, 25 bp, Homo sapien
tataaaaaggagacagtaaagagat

SEQ ID NO: 36622 - DNA, 25 bp, Homo sapien
tctaaattacgtttgatggctgaaa

SEQ ID NO: 36623 - DNA, 25 bp, Homo sapien
acgcctggcccttgagttttctaaa

SEQ ID NO: 36624 - DNA, 25 bp, Homo sapien
ttatctgatgtgattctaaatgtat

SEQ ID NO: 36625 - DNA, 25 bp, Homo sapien
ctggtgctggcactacctgacaaac

SEQ ID NO: 36626 - DNA, 25 bp, Homo sapien
agaactgtaatacttaccgcaaggg

SEQ ID NO: 36627 - DNA, 25 bp, Homo sapien
aatgcttcaaggagcaatgacaagc

SEQ ID NO: 36628 - DNA, 25 bp, Homo sapien
aatacctgccaatgccaagacgaca

SEQ ID NO: 36629 - DNA, 25 bp, Homo sapien
acaaaaagacaatacctgccaatgc

SEQ ID NO: 36630 - DNA, 25 bp, Homo sapien
ggagcaatgacaagcacccttaaaa

SEQ ID NO: 36631 - DNA, 25 bp, Homo sapien
ttttaaagcagccacgacaaaatgc

SEQ ID NO: 36632 - DNA, 25 bp, Homo sapien
gaaccaagtctcagccaaaaacagt

SEQ ID NO: 36633 - DNA, 25 bp, Homo sapien
ccaatgccaagacgacactggtgct

SEQ ID NO: 36634 - DNA, 25 bp, Homo sapien
caaatgaaccaagtctcagccaaaa

SEQ ID NO: 36635 - DNA, 25 bp, Homo sapien
gctggcactacctgacaaacatttt

SEQ ID NO: 36636 - DNA, 25 bp, Homo sapien
caaagtagcgatccatgaaagaaat

SEQ ID NO: 36637 - DNA, 25 bp, Homo sapien
tcaagacagtatggtattggtcaac

SEQ ID NO: 36638 - DNA, 25 bp, Homo sapien
gttggacgactgatgctactcgacc

SEQ ID NO: 36639 - DNA, 25 bp, Homo sapien
tctagacatagacgttataccctcc

SEQ ID NO: 36640 - DNA, 25 bp, Homo sapien
aatggtgctgacaactagattttta

SEQ ID NO: 36641 - DNA, 25 bp, Homo sapien
tggatacaacaccaaagtagcgatc

SEQ ID NO: 36642 - DNA, 25 bp, Homo sapien
atattgaagtcaaaagttggacgac

SEQ ID NO: 36643 - DNA, 25 bp, Homo sapien
ttaccttgggtatggcaatgacttt

SEQ ID NO: 36644 - DNA, 25 bp, Homo sapien
gaagcaaaggcaatacaatggggta

SEQ ID NO: 36645 - DNA, 25 bp, Homo sapien
attggtcaacaaacagagaaataga

SEQ ID NO: 36646 - DNA, 25 bp, Homo sapien
acaatggggtagacagtattttcaa

SEQ ID NO: 36647 - DNA, 25 bp, Homo sapien
acaactcaacacttgaggctgggca

SEQ ID NO: 36648 - DNA, 25 bp, Homo sapien
ctgtgaaaacggcaaattttgttat

SEQ ID NO: 36649 - DNA, 25 bp, Homo sapien
agtgaaacaagccagacacaaacaa

SEQ ID NO: 36650 - DNA, 25 bp, Homo sapien
atgaggtaccttgaataggccaatt

SEQ ID NO: 36651 - DNA, 25 bp, Homo sapien
gtagaaggaatagggagctattatt

SEQ ID NO: 36652 - DNA, 25 bp, Homo sapien
tacaataagaaaggttaacaactca

SEQ ID NO: 36653 - DNA, 25 bp, Homo sapien
cgttgtgaatgtgcttaatgttgct

SEQ ID NO: 36654 - DNA, 25 bp, Homo sapien
gccacaacatggatcttgaaagtat

SEQ ID NO: 36655 - DNA, 25 bp, Homo sapien
ataaagtagaacagaggttgccaca

SEQ ID NO: 36656 - DNA, 25 bp, Homo sapien
caggggaatcgacccaagtatccat

SEQ ID NO: 36657 - DNA, 25 bp, Homo sapien
atgaaaagttctggaaagggatacg

SEQ ID NO: 36658 - DNA, 25 bp, Homo sapien
tatgtctttctaggttgatcaaacc

SEQ ID NO: 36659 - DNA, 25 bp, Homo sapien
cagttgcagaaataactcatggctc

SEQ ID NO: 36660 - DNA, 25 bp, Homo sapien
gatcagggtgaagacacttcggttt

SEQ ID NO: 36661 - DNA, 25 bp, Homo sapien
agagatggtaacaaagatcagggtg

SEQ ID NO: 36662 - DNA, 25 bp, Homo sapien
ctcccggcccagaactttatgtctt

SEQ ID NO: 36663 - DNA, 25 bp, Homo sapien
tcaaaccattagatcagttgcagaa

SEQ ID NO: 36664 - DNA, 25 bp, Homo sapien
aataactcatggctctaggatcttc

SEQ ID NO: 36665 - DNA, 25 bp, Homo sapien
taacaaagatcagggtgaagacact

SEQ ID NO: 36666 - DNA, 25 bp, Homo sapien
atggctctaggatcttcagagagat

SEQ ID NO: 36667 - DNA, 25 bp, Homo sapien
gcaacctctgctaccaaagtccaag

SEQ ID NO: 36668 - DNA, 25 bp, Homo sapien
tgctaccaaagtccaagcgattctc

SEQ ID NO: 36669 - DNA, 25 bp, Homo sapien
ctaacggttccgagcttggttgtgc

SEQ ID NO: 36670 - DNA, 25 bp, Homo sapien
aactgcgcgtgctgctcgctgattc

SEQ ID NO: 36671 - DNA, 25 bp, Homo sapien
ctactaagtataacggagtggctgc

SEQ ID NO: 36672 - DNA, 25 bp, Homo sapien
tagctgtgtcggagcgccacttccc

SEQ ID NO: 36673 - DNA, 25 bp, Homo sapien
aatcccgctgggtcctcgcaaattc

SEQ ID NO: 36674 - DNA, 25 bp, Homo sapien
gatgatacccgagacaacagaattc

SEQ ID NO: 36675 - DNA, 25 bp, Homo sapien
ctgcacagaatgattgagccgcccg

SEQ ID NO: 36676 - DNA, 25 bp, Homo sapien
gctgataacagtaccggcaaccaaa

SEQ ID NO: 36677 - DNA, 25 bp, Homo sapien
ctgattctcgctcggacactggggc

SEQ ID NO: 36678 - DNA, 25 bp, Homo sapien
ctgctgcaacctacggggtgtactt

SEQ ID NO: 36679 - DNA, 25 bp, Homo sapien
ctgtgcagccattaagacgaacaat

SEQ ID NO: 36680 - DNA, 25 bp, Homo sapien
gtatcatctccaccggcgcggtcgt

SEQ ID NO: 36681 - DNA, 25 bp, Homo sapien
tgttcgtcttaatggctgcacagta

SEQ ID NO: 36682 - DNA, 25 bp, Homo sapien
tgttatcagccagggaatttgcgag

SEQ ID NO: 36683 - DNA, 25 bp, Homo sapien
aatttgcgaggacccagcgggattt

SEQ ID NO: 36684 - DNA, 25 bp, Homo sapien
ttatggagctgcagagttggagtct

SEQ ID NO: 36685 - DNA, 25 bp, Homo sapien
attctgttgtctcgggtatcatctc

SEQ ID NO: 36686 - DNA, 25 bp, Homo sapien
gaagtcaccctacattagtgcatat

SEQ ID NO: 36687 - DNA, 25 bp, Homo sapien
aatggctgcacagtattccactgta

SEQ ID NO: 36688 - DNA, 25 bp, Homo sapien
acccagcgggatttatggagctgca

SEQ ID NO: 36689 - DNA, 25 bp, Homo sapien
ttggttgccggtactgttatcagcc

SEQ ID NO: 36690 - DNA, 25 bp, Homo sapien
cgcaaccggcccaacgctgttttta

SEQ ID NO: 36691 - DNA, 25 bp, Homo sapien
cagggcggcgggaggcctctccgag

SEQ ID NO: 36692 - DNA, 25 bp, Homo sapien
ctcggagaggcctcccgccgccctg

SEQ ID NO: 36693 - DNA, 25 bp, Homo sapien
ggaggcctctccgagcccacggccg

SEQ ID NO: 36694 - DNA, 25 bp, Homo sapien
cggccgtgggctcggagaggcctcc

SEQ ID NO: 36695 - DNA, 25 bp, Homo sapien
gtcattccgagaaaattaccatttt

SEQ ID NO: 36696 - DNA, 25 bp, Homo sapien
aaaatggtaattttctcggaatgac

SEQ ID NO: 36697 - DNA, 25 bp, Homo sapien
agacgaatccttcatggtccgagag

SEQ ID NO: 36698 - DNA, 25 bp, Homo sapien
ctctcggaccatgaaggattcgtct

SEQ ID NO: 36699 - DNA, 25 bp, Homo sapien
gatcccctgtaagaaacgttactta

SEQ ID NO: 36700 - DNA, 25 bp, Homo sapien
taagtaacgtttcttacaggggatc

SEQ ID NO: 36701 - DNA, 25 bp, Homo sapien
acactctaaatatacaagaagacat

SEQ ID NO: 36702 - DNA, 25 bp, Homo sapien
atgtcttcttgtatatttagagtgt

SEQ ID NO: 36703 - DNA, 25 bp, Homo sapien
gaagagtgtaggttgagacctttta

SEQ ID NO: 36704 - DNA, 25 bp, Homo sapien
taaaaggtctcaacctacactcttc

SEQ ID NO: 36705 - DNA, 25 bp, Homo sapien
gaacaaattatttacagaaaaggtg

SEQ ID NO: 36706 - DNA, 25 bp, Homo sapien
caccttttctgtaaataatttgttc

SEQ ID NO: 36707 - DNA, 25 bp, Homo sapien
aaaactcgaacaaattatttacaga

SEQ ID NO: 36708 - DNA, 25 bp, Homo sapien
tctgtaaataatttgttcgagtttt

SEQ ID NO: 36709 - DNA, 25 bp, Homo sapien
tatatcatgaaacccgtcctaagac

SEQ ID NO: 36710 - DNA, 25 bp, Homo sapien
gtcttaggacgggtttcatgatata

SEQ ID NO: 36711 - DNA, 25 bp, Homo sapien
gggacacggatacgagacccgtcac

SEQ ID NO: 36712 - DNA, 25 bp, Homo sapien
gtgacgggtctcgtatccgtgtccc

SEQ ID NO: 36713 - DNA, 25 bp, Homo sapien
tcccggagatggtacaccccgacgg

SEQ ID NO: 36714 - DNA, 25 bp, Homo sapien
ccgtcggggtgtaccatctccggga

SEQ ID NO: 36715 - DNA, 25 bp, Homo sapien
gtgtttccattcctccactcagtcg

SEQ ID NO: 36716 - DNA, 25 bp, Homo sapien
cgactgagtggaggaatggaaacac

SEQ ID NO: 36717 - DNA, 25 bp, Homo sapien
cctgagggtttggtcccgaggtgta

SEQ ID NO: 36718 - DNA, 25 bp, Homo sapien
tacacctcgggaccaaaccctcagg

SEQ ID NO: 36719 - DNA, 25 bp, Homo sapien
agcattaaaggtagagcggacgttg

SEQ ID NO: 36720 - DNA, 25 bp, Homo sapien
caacgtccgctctacctttaatgct

SEQ ID NO: 36721 - DNA, 25 bp, Homo sapien
acactatacaaagggtctgtacacc

SEQ ID NO: 36722 - DNA, 25 bp, Homo sapien
ggtgtacagaccctttgtatagtgt

SEQ ID NO: 36723 - DNA, 25 bp, Homo sapien
tcagttgtctctctgtaaggtactc

SEQ ID NO: 36724 - DNA, 25 bp, Homo sapien
gagtaccttacagagagacaactga

SEQ ID NO: 36725 - DNA, 25 bp, Homo sapien
gtaaactacataatcctatacgggt

SEQ ID NO: 36726 - DNA, 25 bp, Homo sapien
acccgtataggattatgtagtttac

SEQ ID NO: 36727 - DNA, 25 bp, Homo sapien
gtacccccgtcggcgcctctccgac

SEQ ID NO: 36728 - DNA, 25 bp, Homo sapien
gtcggagaggcgccgacgggggtac

SEQ ID NO: 36729 - DNA, 25 bp, Homo sapien
tacccccgtcggcgcctctccgacc

SEQ ID NO: 36730 - DNA, 25 bp, Homo sapien
ggtcggagaggcgccgacgggggta

SEQ ID NO: 36731 - DNA, 25 bp, Homo sapien
gtctcgaagcctctaagtaaacaag

SEQ ID NO: 36732 - DNA, 25 bp, Homo sapien
cttgtttacttagaggcttcgagac

SEQ ID NO: 36733 - DNA, 25 bp, Homo sapien
tccgaggtccgccacaggggtcgca

SEQ ID NO: 36734 - DNA, 25 bp, Homo sapien
tgcgacccctgtggcggacctcgga

SEQ ID NO: 36735 - DNA, 25 bp, Homo sapien
aaaattatcaacagtaaagaacaag

SEQ ID NO: 36736 - DNA, 25 bp, Homo sapien
cttgttctttactgttgataatttt

SEQ ID NO: 36737 - DNA, 25 bp, Homo sapien
taacagaaccactggtgaacaacgt

SEQ ID NO: 36738 - DNA, 25 bp, Homo sapien
acgttgttcaccagtggttctgtta

SEQ ID NO: 36739 - DNA, 25 bp, Homo sapien
cgcggcgagggccgagaggtggcgg

SEQ ID NO: 36740 - DNA, 25 bp, Homo sapien
ccgccacctctcggccctcgccgcg

SEQ ID NO: 36741 - DNA, 25 bp, Homo sapien
aggacaaattctgggcgtccgggct

SEQ ID NO: 36742 - DNA, 25 bp, Homo sapien
agcccggacgcccagaatttgtcct

SEQ ID NO: 36743 - DNA, 25 bp, Homo sapien
ctcttggtgatgaaaacttcgaact

SEQ ID NO: 36744 - DNA, 25 bp, Homo sapien
agttcgaagttttcatcaccaagag

SEQ ID NO: 36745 - DNA, 25 bp, Homo sapien
tacgctacgggactgtacccaacgg

SEQ ID NO: 36746 - DNA, 25 bp, Homo sapien
ccgttgggtacagtcccgtagcgta

SEQ ID NO: 36747 - DNA, 25 bp, Homo sapien
tgaagaaacgatacggtacttaacc

SEQ ID NO: 36748 - DNA, 25 bp, Homo sapien
ggttaagtaccgtatcgtttcttca

SEQ ID NO: 36749 - DNA, 25 bp, Homo sapien
tggcgaacgggtgggcgtgggcgca

SEQ ID NO: 36750 - DNA, 25 bp, Homo sapien
tgcgcccacgcccacccgttcgcca

SEQ ID NO: 36751 - DNA, 25 bp, Homo sapien
cctactggttcgcccgcgcccgcgg

SEQ ID NO: 36752 - DNA, 25 bp, Homo sapien
ccgcgggcgcgggcgaaccagtagg

SEQ ID NO: 36753 - DNA, 25 bp, Homo sapien
gcctactggttcgcccgcgcccgcg

SEQ ID NO: 36754 - DNA, 25 bp, Homo sapien
cgcgggcgcgggcgaaccagtaggc

SEQ ID NO: 36755 - DNA, 25 bp, Homo sapien
ctacctttgagcttcagattcacag

SEQ ID NO: 36756 - DNA, 25 bp, Homo sapien
ctgtgaatctgaagctcaaaggtag

SEQ ID NO: 36757 - DNA, 25 bp, Homo sapien
aaagtgagaagagtatcagcaaaag

SEQ ID NO: 36758 - DNA, 25 bp, Homo sapien
cttttgctgatactcttctcacttt

SEQ ID NO: 36759 - DNA, 25 bp, Homo sapien
ttacctgatcccttgacaacaaatt

SEQ ID NO: 36760 - DNA, 25 bp, Homo sapien
aatttgttgtcaagggatcaggtaa

SEQ ID NO: 36761 - DNA, 25 bp, Homo sapien
cggattgccaaaacgcgtcggtaaa

SEQ ID NO: 36762 - DNA, 25 bp, Homo sapien
tttaccgacgcgttttggcaatccg

SEQ ID NO: 36763 - DNA, 25 bp, Homo sapien
cctgacgtaagggatattcgtccag

SEQ ID NO: 36764 - DNA, 25 bp, Homo sapien
ctggacgaatatcccttacgtcagg

SEQ ID NO: 36765 - DNA, 25 bp, Homo sapien
tgtctttaatagagggtgtaacccg

SEQ ID NO: 36766 - DNA, 25 bp, Homo sapien
cgggttacaccctctattaaagaca

SEQ ID NO: 36767 - DNA, 25 bp, Homo sapien
agtagaggttgtcccattcaagacg

SEQ ID NO: 36768 - DNA, 25 bp, Homo sapien
cgtcttgaatgggacaacctctact

SEQ ID NO: 36769 - DNA, 25 bp, Homo sapien
ggcggtccggccctctgtccgtctc

SEQ ID NO: 36770 - DNA, 25 bp, Homo sapien
gagacggacagagggccggaccgcc

SEQ ID NO: 36771 - DNA, 25 bp, Homo sapien
cagtgtcgtcctgttagagaccgtc

SEQ ID NO: 36772 - DNA, 25 bp, Homo sapien
gacggtctctaacaggacgacactg

SEQ ID NO: 36773 - DNA, 25 bp, Homo sapien
tttatggtagatttattgttatcaa

SEQ ID NO: 36774 - DNA, 25 bp, Homo sapien
ttgataacaataaatctaccataaa

SEQ ID NO: 36775 - DNA, 25 bp, Homo sapien
ccacgtcgcgccgtccgaccccacc

SEQ ID NO: 36776 - DNA, 25 bp, Homo sapien
ggtggggtcggacggcgcgacgtgg

SEQ ID NO: 36777 - DNA, 25 bp, Homo sapien
cggactcgaccctagacgtaagtga

SEQ ID NO: 36778 - DNA, 25 bp, Homo sapien
tcacttacgtctagggtcgagtccg

SEQ ID NO: 36779 - DNA, 25 bp, Homo sapien
gtgtcttgctccttgggcccggaac

SEQ ID NO: 36780 - DNA, 25 bp, Homo sapien
gttccgggcccaaggagcaagacac

SEQ ID NO: 36781 - DNA, 25 bp, Homo sapien
atagatgaaaatgcatttatctcat

SEQ ID NO: 36782 - DNA, 25 bp, Homo sapien
atgagataaatgcattttcatctat

SEQ ID NO: 36783 - DNA, 25 bp, Homo sapien
cggtcatataccctacgacgaattt

SEQ ID NO: 36784 - DNA, 25 bp, Homo sapien
aaattcgtcgtagggtatatgaccg

SEQ ID NO: 36785 - DNA, 25 bp, Homo sapien
agtctactcgttgacgagtctaggg

SEQ ID NO: 36786 - DNA, 25 bp, Homo sapien
ccctagactcgtcaacgagtagact

SEQ ID NO: 36787 - DNA, 25 bp, Homo sapien
tagaaagatgatgtcccgacaaaag

SEQ ID NO: 36788 - DNA, 25 bp, Homo sapien
cttttgtcgggacatcatctttcta

SEQ ID NO: 36789 - DNA, 25 bp, Homo sapien
ctgtcggacacagagcccggtttct

SEQ ID NO: 36790 - DNA, 25 bp, Homo sapien
agaaaccgggctctgtgtccgacag

SEQ ID NO: 36791 - DNA, 25 bp, Homo sapien
tcctgcgtcgccatcaaccgcgggt

SEQ ID NO: 36792 - DNA, 25 bp, Homo sapien
acccgcggttgatggcgacgcagga

SEQ ID NO: 36793 - DNA, 25 bp, Homo sapien
tcgaggggttcttcctctgacagtg

SEQ ID NO: 36794 - DNA, 25 bp, Homo sapien
cactgtcagaggaagaacccctcga

SEQ ID NO: 36795 - DNA, 25 bp, Homo sapien
tcttctgttatagtttgaaaaagtc

SEQ ID NO: 36796 - DNA, 25 bp, Homo sapien
gactttttcaaactataacagaaga

SEQ ID NO: 36797 - DNA, 25 bp, Homo sapien
atgtctattgaagttagtaatgtaa

SEQ ID NO: 36798 - DNA, 25 bp, Homo sapien
ttacattactaacttcaatagacat

SEQ ID NO: 36799 - DNA, 25 bp, Homo sapien
tccaagagttgtacttcgtcgtcct

SEQ ID NO: 36800 - DNA, 25 bp, Homo sapien
aggacgacgaagtacaactcttgga

SEQ ID NO: 36801 - DNA, 25 bp, Homo sapien
cgggacctgtgcacttagggtaact

SEQ ID NO: 36802 - DNA, 25 bp, Homo sapien
agttaccctaagtgcacaggtcccg

SEQ ID NO: 36803 - DNA, 25 bp, Homo sapien
actcagtggcaaaaatgtcgaaacc

SEQ ID NO: 36804 - DNA, 25 bp, Homo sapien
ggtttcgacatttttgccactgagt

SEQ ID NO: 36805 - DNA, 25 bp, Homo sapien
ctgggactctgtccccactttagtc

SEQ ID NO: 36806 - DNA, 25 bp, Homo sapien
gactaaagtggggacagagtcccag

SEQ ID NO: 36807 - DNA, 25 bp, Homo sapien
gacgagtgggccgaggcttaggtgg

SEQ ID NO: 36808 - DNA, 25 bp, Homo sapien
ccacctaagcctcggcccactcgtc

SEQ ID NO: 36809 - DNA, 25 bp, Homo sapien
taagtcgttagaaacataattaatg

SEQ ID NO: 36810 - DNA, 25 bp, Homo sapien
cattaattatgtttctaacgactta

SEQ ID NO: 36811 - DNA, 25 bp, Homo sapien
ggctggcggcttgcgcagggccgac

SEQ ID NO: 36812 - DNA, 25 bp, Homo sapien
gtcggccctgcgcaagccgccagcc

SEQ ID NO: 36813 - DNA, 25 bp, Homo sapien
acacgacaccatgtttggacacggt

SEQ ID NO: 36814 - DNA, 25 bp, Homo sapien
accgtgtccaaacatggtgtcgtgt

SEQ ID NO: 36815 - DNA, 25 bp, Homo sapien
cacgccgtcttaaggcggtcgcggg

SEQ ID NO: 36816 - DNA, 25 bp, Homo sapien
cccgcgaccgccttaagacggcgtg

SEQ ID NO: 36817 - DNA, 25 bp, Homo sapien
tggttcagaccactgtcctgttacc

SEQ ID NO: 36818 - DNA, 25 bp, Homo sapien
ggtaacaggacagtggtctgaacca

SEQ ID NO: 36819 - DNA, 25 bp, Homo sapien
cgcgatctggacaattcggtttgtg

SEQ ID NO: 36820 - DNA, 25 bp, Homo sapien
cacaaaccgaattgtccagatcgcg

SEQ ID NO: 36821 - DNA, 25 bp, Homo sapien
gggcgggccgcgacttcggcggagc

SEQ ID NO: 36822 - DNA, 25 bp, Homo sapien
gctccgccgaagtcgcggcccgccc

SEQ ID NO: 36823 - DNA, 25 bp, Homo sapien
cgggccgcgacttcggcggagccgg

SEQ ID NO: 36824 - DNA, 25 bp, Homo sapien
ccggctccgccgaagtcgcggcccg

SEQ ID NO: 36825 - DNA, 25 bp, Homo sapien
gcgggccgcgacttcggcggagccg

SEQ ID NO: 36826 - DNA, 25 bp, Homo sapien
cggctccgccgaagtcgcggcccgc

SEQ ID NO: 36827 - DNA, 25 bp, Homo sapien
ggcgggccgcgacttcggcggagcc

SEQ ID NO: 36828 - DNA, 25 bp, Homo sapien
ggctccgccgaagtcgcggcccgcc

SEQ ID NO: 36829 - DNA, 25 bp, Homo sapien
gagtcggtactgttcaggacgtgcc

SEQ ID NO: 36830 - DNA, 25 bp, Homo sapien
ggcacgtcctgaacagtaccgactc

SEQ ID NO: 36831 - DNA, 25 bp, Homo sapien
gtctctccctaaggacggcggggta

SEQ ID NO: 36832 - DNA, 25 bp, Homo sapien
taccccgccgtccttagggagagac

SEQ ID NO: 36833 - DNA, 25 bp, Homo sapien
ttcgaaggccttcttaaacgagtga

SEQ ID NO: 36834 - DNA, 25 bp, Homo sapien
tcactcgtttaagaaggccttcgaa

SEQ ID NO: 36835 - DNA, 25 bp, Homo sapien
gcctcctgacacccgaggacagcgg

SEQ ID NO: 36836 - DNA, 25 bp, Homo sapien
ccgctgtcctcgggtgtcaggaggc

SEQ ID NO: 36837 - DNA, 25 bp, Homo sapien
gtagaatccaaacttagtcaacgac

SEQ ID NO: 36838 - DNA, 25 bp, Homo sapien
gtcgttgactaagtttggattctac

SEQ ID NO: 36839 - DNA, 25 bp, Homo sapien
aaacatagaccacgagcggtacaaa

SEQ ID NO: 36840 - DNA, 25 bp, Homo sapien
tttgtaccgctcgtggtctatgttt

SEQ ID NO: 36841 - DNA, 25 bp, Homo sapien
ccgacagaggttctcgcgaccggtt

SEQ ID NO: 36842 - DNA, 25 bp, Homo sapien
aaccggtcgcgagaacctctgtcgg

SEQ ID NO: 36843 - DNA, 25 bp, Homo sapien
atgtttttactcctatcgttgacag

SEQ ID NO: 36844 - DNA, 25 bp, Homo sapien
ctgtcaacgataggagtaaaaacat

SEQ ID NO: 36845 - DNA, 25 bp, Homo sapien
tggtgacgggtgaacaaccgtcaac

SEQ ID NO: 36846 - DNA, 25 bp, Homo sapien
gttgacggttgttcacccgtcacca

SEQ ID NO: 36847 - DNA, 25 bp, Homo sapien
aatgtgtaacataactacaataaag

SEQ ID NO: 36848 - DNA, 25 bp, Homo sapien
ctttattgtagttatgttacacatt

SEQ ID NO: 36849 - DNA, 25 bp, Homo sapien
aaatgactctacattcaaacttact

SEQ ID NO: 36850 - DNA, 25 bp, Homo sapien
agtaagtttgaatgtagagtcattt

SEQ ID NO: 36851 - DNA, 25 bp, Homo sapien
gacgggacctttgaaagcctctacg

SEQ ID NO: 36852 - DNA, 25 bp, Homo sapien
cgtagaggctttcaaaggtcccgtc

SEQ ID NO: 36853 - DNA, 25 bp, Homo sapien
gtcaatatgtacattttgtctatat

SEQ ID NO: 36854 - DNA, 25 bp, Homo sapien
atatagacaaaatgtacatattgac

SEQ ID NO: 36855 - DNA, 25 bp, Homo sapien
ttagtcaatatgtacattttgtcta

SEQ ID NO: 36856 - DNA, 25 bp, Homo sapien
tagacaaaatgtacatattgactaa

SEQ ID NO: 36857 - DNA, 25 bp, Homo sapien
tcattatcggagtaacctttaggga

SEQ ID NO: 36858 - DNA, 25 bp, Homo sapien
tccctaaaggttactccgataatga

SEQ ID NO: 36859 - DNA, 25 bp, Homo sapien
ccgaggcgctagtgccagcgccggg

SEQ ID NO: 36860 - DNA, 25 bp, Homo sapien
cccggcgctggcactagcgcctcgg

SEQ ID NO: 36861 - DNA, 25 bp, Homo sapien
cgagccgaggcgctagtgccagcgc

SEQ ID NO: 36862 - DNA, 25 bp, Homo sapien
gcgctggcactagcgcctcggctcg

SEQ ID NO: 36863 - DNA, 25 bp, Homo sapien
cgaacctctggcaagtctccgtcgg

SEQ ID NO: 36864 - DNA, 25 bp, Homo sapien
ccgacggagacttgccagaggttcg

SEQ ID NO: 36865 - DNA, 25 bp, Homo sapien
cggtgaagcacgacgcacggtccga

SEQ ID NO: 36866 - DNA, 25 bp, Homo sapien
tcggaccgtgcgtcgtgcttcaccg

SEQ ID NO: 36867 - DNA, 25 bp, Homo sapien
aagagattgtagtatcttatccacg

SEQ ID NO: 36868 - DNA, 25 bp, Homo sapien
cgtggataagatactacaatctctt

SEQ ID NO: 36869 - DNA, 25 bp, Homo sapien
acattggcgatgaaagactgtacag

SEQ ID NO: 36870 - DNA, 25 bp, Homo sapien
ctgtacagtctttcatcgccaatgt

SEQ ID NO: 36871 - DNA, 25 bp, Homo sapien
cgccacatcaacaggcgctgcagtt

SEQ ID NO: 36872 - DNA, 25 bp, Homo sapien
aactgcagcgcctgttgatgtggcg

SEQ ID NO: 36873 - DNA, 25 bp, Homo sapien
actcgaacccggctggtttgcgacc

SEQ ID NO: 36874 - DNA, 25 bp, Homo sapien
ggtcgcaaaccagccgggttcgagt

SEQ ID NO: 36875 - DNA, 25 bp, Homo sapien
agccacgtcgaaccttgtcctatta

SEQ ID NO: 36876 - DNA, 25 bp, Homo sapien
taataggacaaggttcgacgtggct

SEQ ID NO: 36877 - DNA, 25 bp, Homo sapien
ggtgctccccgaggtcgtgggggct

SEQ ID NO: 36878 - DNA, 25 bp, Homo sapien
agcccccacgacctcggggagcacc

SEQ ID NO: 36879 - DNA, 25 bp, Homo sapien
ggcgcgccagagtccgcgtgcgtgg

SEQ ID NO: 36880 - DNA, 25 bp, Homo sapien
ccacgcacgcggactctggcgcgcc

SEQ ID NO: 36881 - DNA, 25 bp, Homo sapien
gctggtctaacgaacccggtagcct

SEQ ID NO: 36882 - DNA, 25 bp, Homo sapien
aggctaccgggttcgttagaccagc

SEQ ID NO: 36883 - DNA, 25 bp, Homo sapien
cgaggagctcgggtgagacgtggac

SEQ ID NO: 36884 - DNA, 25 bp, Homo sapien
gtccacgtctcacccgagctcctcg

SEQ ID NO: 36885 - DNA, 25 bp, Homo sapien
gtagattgtattctcgatacttaac

SEQ ID NO: 36886 - DNA, 25 bp, Homo sapien
gttaagtatcgagaatacaatctac

SEQ ID NO: 36887 - DNA, 25 bp, Homo sapien
tttaattcatttagtaacttgtgtt

SEQ ID NO: 36888 - DNA, 25 bp, Homo sapien
aacacaagttactaaatgaattaaa

SEQ ID NO: 36889 - DNA, 25 bp, Homo sapien
agtataattagctgttatgtaaaag

SEQ ID NO: 36890 - DNA, 25 bp, Homo sapien
cttttacataacagctaattatact

SEQ ID NO: 36891 - DNA, 25 bp, Homo sapien
tcacagagaacaccgagaacaggaa

SEQ ID NO: 36892 - DNA, 25 bp, Homo sapien
ttcctgttctcggtgttctctgtga

SEQ ID NO: 36893 - DNA, 25 bp, Homo sapien
aaaattgtagtagttgattgtcaag

SEQ ID NO: 36894 - DNA, 25 bp, Homo sapien
cttgacaatcaactactacaatttt

SEQ ID NO: 36895 - DNA, 25 bp, Homo sapien
cggccctcggcgtcgcgagtgagta

SEQ ID NO: 36896 - DNA, 25 bp, Homo sapien
tactcactcgcgacgccgagggccg

SEQ ID NO: 36897 - DNA, 25 bp, Homo sapien
ctcgaccgggccctgtcggtcccgc

SEQ ID NO: 36898 - DNA, 25 bp, Homo sapien
gcgggaccgacagggcccggtcgag

SEQ ID NO: 36899 - DNA, 25 bp, Homo sapien
ttccttcgtctaaccatagattagt

SEQ ID NO: 36900 - DNA, 25 bp, Homo sapien
actaatctatggttagacgaaggaa

SEQ ID NO: 36901 - DNA, 25 bp, Homo sapien
ccgaagacatcaggaggcgctaggt

SEQ ID NO: 36902 - DNA, 25 bp, Homo sapien
acctagcgcctcctgatgtcttcgg

SEQ ID NO: 36903 - DNA, 25 bp, Homo sapien
actcgtggtagacaacgaccgttac

SEQ ID NO: 36904 - DNA, 25 bp, Homo sapien
gtaacggtcgttgtctaccacgagt

SEQ ID NO: 36905 - DNA, 25 bp, Homo sapien
ttatatcagatcatgtaatttttgt

SEQ ID NO: 36906 - DNA, 25 bp, Homo sapien
acaaaaattacatgatctgatataa

SEQ ID NO: 36907 - DNA, 25 bp, Homo sapien
ccctagacacctaggtcggccgtcc

SEQ ID NO: 36908 - DNA, 25 bp, Homo sapien
ggacggccgacctaggtgtctaggg

SEQ ID NO: 36909 - DNA, 25 bp, Homo sapien
cccgggttcacacctcaggaacgga

SEQ ID NO: 36910 - DNA, 25 bp, Homo sapien
tccgttcctgaggtgtgaacccggg

SEQ ID NO: 36911 - DNA, 25 bp, Homo sapien
gaaggcacgggtggcaggtcagcgg

SEQ ID NO: 36912 - DNA, 25 bp, Homo sapien
ccgctgacctgccacccgtgccttc

SEQ ID NO: 36913 - DNA, 25 bp, Homo sapien
ggctcgcgtcgaccctagcgtctcg

SEQ ID NO: 36914 - DNA, 25 bp, Homo sapien
cgagacgctagggtcgacgcgagcc

SEQ ID NO: 36915 - DNA, 25 bp, Homo sapien
gttatcgtgggtgtgaagacactga

SEQ ID NO: 36916 - DNA, 25 bp, Homo sapien
tcagtgtcttcacacccacgataac

SEQ ID NO: 36917 - DNA, 25 bp, Homo sapien
cttgtcgcaagagaggtagaccgag

SEQ ID NO: 36918 - DNA, 25 bp, Homo sapien
ctcggtctacctctcttgcgacaag

SEQ ID NO: 36919 - DNA, 25 bp, Homo sapien
gtctttcccgcccggtgaaggcaca

SEQ ID NO: 36920 - DNA, 25 bp, Homo sapien
tgtgccttcaccgggcgggaaagac

SEQ ID NO: 36921 - DNA, 25 bp, Homo sapien
aacctcctcgcatcgcagtcagtga

SEQ ID NO: 36922 - DNA, 25 bp, Homo sapien
tcactgactgcgatgcgaggaggtt

SEQ ID NO: 36923 - DNA, 25 bp, Homo sapien
gtttcactcatgggtgtttgactct

SEQ ID NO: 36924 - DNA, 25 bp, Homo sapien
agagtcaaacacccatgagtgaaac

SEQ ID NO: 36925 - DNA, 25 bp, Homo sapien
aaacttaagcgaaaaccaagatata

SEQ ID NO: 36926 - DNA, 25 bp, Homo sapien
tatatcttggttttcgcttaagttt

SEQ ID NO: 36927 - DNA, 25 bp, Homo sapien
tagtttatcacgagtataagaaagt

SEQ ID NO: 36928 - DNA, 25 bp, Homo sapien
actttcttatactcgtgataaacta

SEQ ID NO: 36929 - DNA, 25 bp, Homo sapien
ggacccgacgccgactgagggacgg

SEQ ID NO: 36930 - DNA, 25 bp, Homo sapien
ccgtccctcagtcggcgtcgggtcc

SEQ ID NO: 36931 - DNA, 25 bp, Homo sapien
cggtggagcggggacccgacgccga

SEQ ID NO: 36932 - DNA, 25 bp, Homo sapien
tcggcgtcgggtccccgctccaccg

SEQ ID NO: 36933 - DNA, 25 bp, Homo sapien
gatacagagaacaggaagaacctgt

SEQ ID NO: 36934 - DNA, 25 bp, Homo sapien
acaggttcttcctgttctctgtatc

SEQ ID NO: 36935 - DNA, 25 bp, Homo sapien
ctacggaaacagtcaccacaagaac

SEQ ID NO: 36936 - DNA, 25 bp, Homo sapien
gttcttgtggtgactgtttccgtag

SEQ ID NO: 36937 - DNA, 25 bp, Homo sapien
aacttactctgtctttactcgggta

SEQ ID NO: 36938 - DNA, 25 bp, Homo sapien
tacccgagtaaagacagagtaagtt

SEQ ID NO: 36939 - DNA, 25 bp, Homo sapien
gtttcttcctgtcccgccgccacgt

SEQ ID NO: 36940 - DNA, 25 bp, Homo sapien
acgtggcggcgggacaggaagaaac

SEQ ID NO: 36941 - DNA, 25 bp, Homo sapien
gaacagtttttaacgttagtattga

SEQ ID NO: 36942 - DNA, 25 bp, Homo sapien
tcaatactaacgttaaaaactgttc

SEQ ID NO: 36943 - DNA, 25 bp, Homo sapien
ggcggcgcggtacggcccggacgac

SEQ ID NO: 36944 - DNA, 25 bp, Homo sapien
gtcgtccgggccgtaccgcgccgcc

SEQ ID NO: 36945 - DNA, 25 bp, Homo sapien
agcgcgaccggaagcgcctccgggg

SEQ ID NO: 36946 - DNA, 25 bp, Homo sapien
ccccggaggcgcttccggtcgcgct

SEQ ID NO: 36947 - DNA, 25 bp, Homo sapien
gagacccaggattccacgtccctag

SEQ ID NO: 36948 - DNA, 25 bp, Homo sapien
ctagggacgtggaatcctgggtctc

SEQ ID NO: 36949 - DNA, 25 bp, Homo sapien
gggtcaagtaattatcatgaacttt

SEQ ID NO: 36950 - DNA, 25 bp, Homo sapien
aaagttcatgataattacttgaccc

SEQ ID NO: 36951 - DNA, 25 bp, Homo sapien
attttcctatccgttagaaatacaa

SEQ ID NO: 36952 - DNA, 25 bp, Homo sapien
ttgtatttctaacggataggaaaat

SEQ ID NO: 36953 - DNA, 25 bp, Homo sapien
gacgaaggtcagagaaataaggttg

SEQ ID NO: 36954 - DNA, 25 bp, Homo sapien
caaccttatttctctgaccttcgtc

SEQ ID NO: 36955 - DNA, 25 bp, Homo sapien
aagacatacagactctttacaacaa

SEQ ID NO: 36956 - DNA, 25 bp, Homo sapien
ttgttgtaaagagtctgtatgtctt

SEQ ID NO: 36957 - DNA, 25 bp, Homo sapien
gttgagggacttcattactcgtctc

SEQ ID NO: 36958 - DNA, 25 bp, Homo sapien
gagacgagtaatgaagtccctcaac

SEQ ID NO: 36959 - DNA, 25 bp, Homo sapien
agattatgactcacatatgtcatat

SEQ ID NO: 36960 - DNA, 25 bp, Homo sapien
atatgacatatgtgagtcataatct

SEQ ID NO: 36961 - DNA, 25 bp, Homo sapien
cacgaggcctctgtgttaaggttgt

SEQ ID NO: 36962 - DNA, 25 bp, Homo sapien
acaaccttaacacagaggcctcgtg

SEQ ID NO: 36963 - DNA, 25 bp, Homo sapien
ggttgggacgcctggcgcggtccgt

SEQ ID NO: 36964 - DNA, 25 bp, Homo sapien
acggaccgcgccaggcgtcccaacc

SEQ ID NO: 36965 - DNA, 25 bp, Homo sapien
cctcttggaacggacgaatatcccg

SEQ ID NO: 36966 - DNA, 25 bp, Homo sapien
cgggatattcgtccgttccaagagg

SEQ ID NO: 36967 - DNA, 25 bp, Homo sapien
ggccgggcctgacccagggtagcgg

SEQ ID NO: 36968 - DNA, 25 bp, Homo sapien
ccgctaccctgggtcaggcccggcc

SEQ ID NO: 36969 - DNA, 25 bp, Homo sapien
tcgtagagactttgggaccacagta

SEQ ID NO: 36970 - DNA, 25 bp, Homo sapien
tactgtggtcccaaagtctctacga

SEQ ID NO: 36971 - DNA, 25 bp, Homo sapien
ccacacagggactatgtgactttag

SEQ ID NO: 36972 - DNA, 25 bp, Homo sapien
ctaaagtcacatagtccctgtgtgg

SEQ ID NO: 36973 - DNA, 25 bp, Homo sapien
cagggtaacggggagactcacctta

SEQ ID NO: 36974 - DNA, 25 bp, Homo sapien
taaggtgagtctccccgttaccctg

SEQ ID NO: 36975 - DNA, 25 bp, Homo sapien
ggaagaagaaactatcaacttaata

SEQ ID NO: 36976 - DNA, 25 bp, Homo sapien
tattaagttgatagtttcttcttcc

SEQ ID NO: 36977 - DNA, 25 bp, Homo sapien
tggacaacgagtaaatagtccaagt

SEQ ID NO: 36978 - DNA, 25 bp, Homo sapien
acttggactatttactcgttgtcca

SEQ ID NO: 36979 - DNA, 25 bp, Homo sapien
gaatggacaacgagtaaatagtcca

SEQ ID NO: 36980 - DNA, 25 bp, Homo sapien
tggactatttactcgttgtccattc

SEQ ID NO: 36981 - DNA, 25 bp, Homo sapien
ggtgcaacgcttaaacattaacact

SEQ ID NO: 36982 - DNA, 25 bp, Homo sapien
agtgttaatgtttaagcgttgcacc

SEQ ID NO: 36983 - DNA, 25 bp, Homo sapien
aattcaggataagatcattaattcg

SEQ ID NO: 36984 - DNA, 25 bp, Homo sapien
cgaattaatgatcttatcctgaatt

SEQ ID NO: 36985 - DNA, 25 bp, Homo sapien
ttttcatttcgtggtttcgataacg

SEQ ID NO: 36986 - DNA, 25 bp, Homo sapien
cgttatcgaaaccacgaaatgaaaa

SEQ ID NO: 36987 - DNA, 25 bp, Homo sapien
tatgtcagtgtaaacacaaataaac

SEQ ID NO: 36988 - DNA, 25 bp, Homo sapien
gtttatttgtgtttacactgacata

SEQ ID NO: 36989 - DNA, 25 bp, Homo sapien
ttagaaaattgagttgacaaagttt

SEQ ID NO: 36990 - DNA, 25 bp, Homo sapien
aaactttgtcaactcaattttctaa

SEQ ID NO: 36991 - DNA, 25 bp, Homo sapien
ctaaggtccttcattggggtccgac

SEQ ID NO: 36992 - DNA, 25 bp, Homo sapien
gtcggaccccaatgaaggaccttag

SEQ ID NO: 36993 - DNA, 25 bp, Homo sapien
acaccaatgtctcaccagtcgaccc

SEQ ID NO: 36994 - DNA, 25 bp, Homo sapien
gggtcgactggtgagacattggtgt

SEQ ID NO: 36995 - DNA, 25 bp, Homo sapien
ggggcggggcgtgtctgaggtggcc

SEQ ID NO: 36996 - DNA, 25 bp, Homo sapien
ggccacctcagacacgccccgcccc

SEQ ID NO: 36997 - DNA, 25 bp, Homo sapien
ctcgtccctacgagcggacattact

SEQ ID NO: 36998 - DNA, 25 bp, Homo sapien
agtaatgtccgctcgtagggacgag

SEQ ID NO: 36999 - DNA, 25 bp, Homo sapien
ataaaaccgtaatgtagaaagagtg

SEQ ID NO: 37000 - DNA, 25 bp, Homo sapien
cactctttctacattacggttttat

SEQ ID NO: 37001 - DNA, 25 bp, Homo sapien
tacccttccacacggaaaagaagtg

SEQ ID NO: 37002 - DNA, 25 bp, Homo sapien
cacttcttttccgtgtggaagggta

SEQ ID NO: 37003 - DNA, 25 bp, Homo sapien
tcggtgtctttcgaagagtggacgg

SEQ ID NO: 37004 - DNA, 25 bp, Homo sapien
ccgtccactcttcgaaagacaccga

SEQ ID NO: 37005 - DNA, 25 bp, Homo sapien
acagaacaaattacgatcaaacaga

SEQ ID NO: 37006 - DNA, 25 bp, Homo sapien
tctgtttgatcgtaatttgttctgt

SEQ ID NO: 37007 - DNA, 25 bp, Homo sapien
ggtaagagtatcttgactgaccgat

SEQ ID NO: 37008 - DNA, 25 bp, Homo sapien
atcggtcagtcaagatactcttacc

SEQ ID NO: 37009 - DNA, 25 bp, Homo sapien
tcccggtcgcgcgtgcgcctcgcag

SEQ ID NO: 37010 - DNA, 25 bp, Homo sapien
ctgcgaggcgcacgcgcgaccggga

SEQ ID NO: 37011 - DNA, 25 bp, Homo sapien
agactcacccatcaatacccgtggg

SEQ ID NO: 37012 - DNA, 25 bp, Homo sapien
cccacgggtattgatgggtgagtct

SEQ ID NO: 37013 - DNA, 25 bp, Homo sapien
cgtcgctcagcccttccggccgggt

SEQ ID NO: 37014 - DNA, 25 bp, Homo sapien
acccggccggaagggctgagcgacg

SEQ ID NO: 37015 - DNA, 25 bp, Homo sapien
ccaaacattaaatcaccgtcattcg

SEQ ID NO: 37016 - DNA, 25 bp, Homo sapien
cgaatgacggtgatttaatgtttgg

SEQ ID NO: 37017 - DNA, 25 bp, Homo sapien
aaaggtgggaactcagagactggta

SEQ ID NO: 37018 - DNA, 25 bp, Homo sapien
taccagtctctgagttcccaccttt

SEQ ID NO: 37019 - DNA, 25 bp, Homo sapien
tttgtttctgtggttgttcactctt

SEQ ID NO: 37020 - DNA, 25 bp, Homo sapien
aagagtgaacaaccacagaaacaaa

SEQ ID NO: 37021 - DNA, 25 bp, Homo sapien
aattaacattagatcgaacagagaa

SEQ ID NO: 37022 - DNA, 25 bp, Homo sapien
ttctctgttcgatctaatgttaatt

SEQ ID NO: 37023 - DNA, 25 bp, Homo sapien
tcccgtcggaatagacacggtggtg

SEQ ID NO: 37024 - DNA, 25 bp, Homo sapien
caccaccgtgtctattccgacggga

SEQ ID NO: 37025 - DNA, 25 bp, Homo sapien
agaagagtggtaccgggtgtaggag

SEQ ID NO: 37026 - DNA, 25 bp, Homo sapien
ctcctacacccggtaccactcttct

SEQ ID NO: 37027 - DNA, 25 bp, Homo sapien
ggacgggccgcccggggtcctcagc

SEQ ID NO: 37028 - DNA, 25 bp, Homo sapien
gctgaggaccccgggcggcccgtcc

SEQ ID NO: 37029 - DNA, 25 bp, Homo sapien
cctcagccgagagccctccgtcatc

SEQ ID NO: 37030 - DNA, 25 bp, Homo sapien
gatgacggagggctctcggctgagg

SEQ ID NO: 37031 - DNA, 25 bp, Homo sapien
agttcccctcttgacgagtaggtat

SEQ ID NO: 37032 - DNA, 25 bp, Homo sapien
atacctactcgtcaagaggggaact

SEQ ID NO: 37033 - DNA, 25 bp, Homo sapien
aggtgtcgacgttgagctaccgaag

SEQ ID NO: 37034 - DNA, 25 bp, Homo sapien
cttcggtagctcaacgtcgacacct

SEQ ID NO: 37035 - DNA, 25 bp, Homo sapien
cccaccccgtgagcgggcgacctcg

SEQ ID NO: 37036 - DNA, 25 bp, Homo sapien
cgaggtcgcccgctcacggggtggg

SEQ ID NO: 37037 - DNA, 25 bp, Homo sapien
tcccaccccgtgagcgggcgacctc

SEQ ID NO: 37038 - DNA, 25 bp, Homo sapien
gaggtcgcccgctcacggggtggga

SEQ ID NO: 37039 - DNA, 25 bp, Homo sapien
gctcccaccccgtgagcgggcgacc

SEQ ID NO: 37040 - DNA, 25 bp, Homo sapien
ggtcgcccgctcacggggtgggagc

SEQ ID NO: 37041 - DNA, 25 bp, Homo sapien
tactcacgccgggtggtaacacagt

SEQ ID NO: 37042 - DNA, 25 bp, Homo sapien
actgtgttaccacccggcgtgagta

SEQ ID NO: 37043 - DNA, 25 bp, Homo sapien
gacacgaataaaagtgagcctctct

SEQ ID NO: 37044 - DNA, 25 bp, Homo sapien
agagaggctcacttttattcgtgtc

SEQ ID NO: 37045 - DNA, 25 bp, Homo sapien
agagagacggttagctaccctttct

SEQ ID NO: 37046 - DNA, 25 bp, Homo sapien
agaaagggtagctaaccgtctctct

SEQ ID NO: 37047 - DNA, 25 bp, Homo sapien
gcaacgacgggaacgatactcgaat

SEQ ID NO: 37048 - DNA, 25 bp, Homo sapien
attcgagtatcgttcccgtcgttgc

SEQ ID NO: 37049 - DNA, 25 bp, Homo sapien
aagtcattctgtgtagttcgtaaag

SEQ ID NO: 37050 - DNA, 25 bp, Homo sapien
ctttacgaactacacagaatgactt

SEQ ID NO: 37051 - DNA, 25 bp, Homo sapien
agttatcaccagagagagtaataat

SEQ ID NO: 37052 - DNA, 25 bp, Homo sapien
attattactctctctggtgataact

SEQ ID NO: 37053 - DNA, 25 bp, Homo sapien
acacccaagaccagatgaccactgg

SEQ ID NO: 37054 - DNA, 25 bp, Homo sapien
ccagtggtcatctggtcttgggtgt

SEQ ID NO: 37055 - DNA, 25 bp, Homo sapien
tagagtatgggcttcgtcatcaatc

SEQ ID NO: 37056 - DNA, 25 bp, Homo sapien
gattgatgacgaagcccatactcta

SEQ ID NO: 37057 - DNA, 25 bp, Homo sapien
ttatctaaacacaaacacgatattt

SEQ ID NO: 37058 - DNA, 25 bp, Homo sapien
aaatatcgtgtttgtgtttagataa

SEQ ID NO: 37059 - DNA, 25 bp, Homo sapien
gtgaagattcgcgactaataaaaat

SEQ ID NO: 37060 - DNA, 25 bp, Homo sapien
atttttattagtcgcgaatcttcac

SEQ ID NO: 37061 - DNA, 25 bp, Homo sapien
gaccccgcacgtcggtgagccgtgc

SEQ ID NO: 37062 - DNA, 25 bp, Homo sapien
gcacggctcaccgacgtgcggggtc

SEQ ID NO: 37063 - DNA, 25 bp, Homo sapien
tagaaacggtcatacttttaataaa

SEQ ID NO: 37064 - DNA, 25 bp, Homo sapien
tttattaaaagtatgaccgtttcta

SEQ ID NO: 37065 - DNA, 25 bp, Homo sapien
aatacaactgaacatatttctcaat

SEQ ID NO: 37066 - DNA, 25 bp, Homo sapien
attgagaaatatgttcagttgtatt

SEQ ID NO: 37067 - DNA, 25 bp, Homo sapien
agtacgtcatgaacaacaagacgtg

SEQ ID NO: 37068 - DNA, 25 bp, Homo sapien
cacgtcttgttgttcatgacgtact

SEQ ID NO: 37069 - DNA, 25 bp, Homo sapien
actatgtaaattaggtataaatcaa

SEQ ID NO: 37070 - DNA, 25 bp, Homo sapien
ttgatttatacctaatttacatagt

SEQ ID NO: 37071 - DNA, 25 bp, Homo sapien
gggtccggaagagttcggcggagtg

SEQ ID NO: 37072 - DNA, 25 bp, Homo sapien
cactccgccgaactcttccggaccc

SEQ ID NO: 37073 - DNA, 25 bp, Homo sapien
aatgtagaagattatacattcacgg

SEQ ID NO: 37074 - DNA, 25 bp, Homo sapien
ccgtgaatgtataatcttctacatt

SEQ ID NO: 37075 - DNA, 25 bp, Homo sapien
attgactattcgtcttgtcaaaagg

SEQ ID NO: 37076 - DNA, 25 bp, Homo sapien
ccttttgacaagacgaatagtcaat

SEQ ID NO: 37077 - DNA, 25 bp, Homo sapien
acgtcggtccgtgtcccaccctctg

SEQ ID NO: 37078 - DNA, 25 bp, Homo sapien
cagagggtgggacacggaccgacgt

SEQ ID NO: 37079 - DNA, 25 bp, Homo sapien
atgagaccattgtgtttagtattat

SEQ ID NO: 37080 - DNA, 25 bp, Homo sapien
ataatactaaacacaatggtctcat

SEQ ID NO: 37081 - DNA, 25 bp, Homo sapien
accgtctcgtattccaaacgagatt

SEQ ID NO: 37082 - DNA, 25 bp, Homo sapien
aatctcgtttggaatacgagacggt

SEQ ID NO: 37083 - DNA, 25 bp, Homo sapien
gacccctcgtgacttacgggagagt

SEQ ID NO: 37084 - DNA, 25 bp, Homo sapien
actctcccgtaagtcacgaggggtc

SEQ ID NO: 37085 - DNA, 25 bp, Homo sapien
acaagattgtcttcggaagttctac

SEQ ID NO: 37086 - DNA, 25 bp, Homo sapien
gtagaacttccgaagacaatcttgt

SEQ ID NO: 37087 - DNA, 25 bp, Homo sapien
aatcgaatatgtaaagatctgaaag

SEQ ID NO: 37088 - DNA, 25 bp, Homo sapien
ctttcagatctttacatattcgatt

SEQ ID NO: 37089 - DNA, 25 bp, Homo sapien
accgacaccgtaagcacctaaatct

SEQ ID NO: 37090 - DNA, 25 bp, Homo sapien
agatttaggtgcttacggtgtcggt

SEQ ID NO: 37091 - DNA, 25 bp, Homo sapien
ctgtctaaacattcacaggtaaagg

SEQ ID NO: 37092 - DNA, 25 bp, Homo sapien
cctttacctgtgaatgtttagacag

SEQ ID NO: 37093 - DNA, 25 bp, Homo sapien
gtcgaaatgactacgttttccggaa

SEQ ID NO: 37094 - DNA, 25 bp, Homo sapien
ttccggaaaacgtagtcatttcgac

SEQ ID NO: 37095 - DNA, 25 bp, Homo sapien
tacaagataaatctttgcgtaaaaa

SEQ ID NO: 37096 - DNA, 25 bp, Homo sapien
tttttacgcaaagatttatcttgta

SEQ ID NO: 37097 - DNA, 25 bp, Homo sapien
ttcgtaaggggcttcactacacaag

SEQ ID NO: 37098 - DNA, 25 bp, Homo sapien
cttgtgtagtgaagccccttacgaa

SEQ ID NO: 37099 - DNA, 25 bp, Homo sapien
cctcggtcagtgacatcaccactga

SEQ ID NO: 37100 - DNA, 25 bp, Homo sapien
tcagtggtgatgtcactgaccgagg

SEQ ID NO: 37101 - DNA, 25 bp, Homo sapien
tccgattggcaacagacagaaggaa

SEQ ID NO: 37102 - DNA, 25 bp, Homo sapien
ttccttctgtctgttgccaatcgga

SEQ ID NO: 37103 - DNA, 25 bp, Homo sapien
gtgactttctctaggtaacctaaat

SEQ ID NO: 37104 - DNA, 25 bp, Homo sapien
atttaggttacctagagaaagtcac

SEQ ID NO: 37105 - DNA, 25 bp, Homo sapien
tacacgaactgtatctcgacgaaaa

SEQ ID NO: 37106 - DNA, 25 bp, Homo sapien
ttttcgtcgagatacagttcgtgta

SEQ ID NO: 37107 - DNA, 25 bp, Homo sapien
cttcctatatgactctactaagtta

SEQ ID NO: 37108 - DNA, 25 bp, Homo sapien
taacttagtagagtcatataggaag

SEQ ID NO: 37109 - DNA, 25 bp, Homo sapien
tctactaagttacggtctttgaccc

SEQ ID NO: 37110 - DNA, 25 bp, Homo sapien
gggtcaaagaccgtaacttagtaga

SEQ ID NO: 37111 - DNA, 25 bp, Homo sapien
ccgttcctacaaggatagaccaccc

SEQ ID NO: 37112 - DNA, 25 bp, Homo sapien
gggtggtctatccttgtaggaacgg

SEQ ID NO: 37113 - DNA, 25 bp, Homo sapien
agtattccttctcccagatcgtcga

SEQ ID NO: 37114 - DNA, 25 bp, Homo sapien
tcgacgatctgggagaaggaatact

SEQ ID NO: 37115 - DNA, 25 bp, Homo sapien
ggcctgtgtcctggccagggtccta

SEQ ID NO: 37116 - DNA, 25 bp, Homo sapien
taggaccctggccaggacacaggcc

SEQ ID NO: 37117 - DNA, 25 bp, Homo sapien
caccaaattttgtcgatgatagtca

SEQ ID NO: 37118 - DNA, 25 bp, Homo sapien
tgactatcatcgacaaaatttggtg

SEQ ID NO: 37119 - DNA, 25 bp, Homo sapien
attgtgagtctatgcattaagaaaa

SEQ ID NO: 37120 - DNA, 25 bp, Homo sapien
ttttcttaatgcatagactcacaat

SEQ ID NO: 37121 - DNA, 25 bp, Homo sapien
tcggaggcctcgagcgggttcggcg

SEQ ID NO: 37122 - DNA, 25 bp, Homo sapien
cgccgaacccgctcgaggcctccga

SEQ ID NO: 37123 - DNA, 25 bp, Homo sapien
gggactctcttgtcccaccggcgaa

SEQ ID NO: 37124 - DNA, 25 bp, Homo sapien
ttcgccggtgggacaagagagtccc

SEQ ID NO: 37125 - DNA, 25 bp, Homo sapien
cagtcccggtggaattcgagcaagt

SEQ ID NO: 37126 - DNA, 25 bp, Homo sapien
acttgctcgaattccaccgggactg

SEQ ID NO: 37127 - DNA, 25 bp, Homo sapien
attaataaacagtgtgtccacagac

SEQ ID NO: 37128 - DNA, 25 bp, Homo sapien
gtctgtggacacactgtttattaat

SEQ ID NO: 37129 - DNA, 25 bp, Homo sapien
gcccttgcgccctcctccgccgcgg

SEQ ID NO: 37130 - DNA, 25 bp, Homo sapien
ccgcggcggaggagggcgcaagggc

SEQ ID NO: 37131 - DNA, 25 bp, Homo sapien
ggcccttgcgccctcctccgccgcg

SEQ ID NO: 37132 - DNA, 25 bp, Homo sapien
cgcggcggaggagggcgcaagggcc

SEQ ID NO: 37133 - DNA, 25 bp, Homo sapien
tcttttatttcttaacgacggacat

SEQ ID NO: 37134 - DNA, 25 bp, Homo sapien
atgtccgtcgttaagaaataaaaga

SEQ ID NO: 37135 - DNA, 25 bp, Homo sapien
gaacaaagtcgtaaattcaaaagaa

SEQ ID NO: 37136 - DNA, 25 bp, Homo sapien
ttcttttgaatttacgactttgttc

SEQ ID NO: 37137 - DNA, 25 bp, Homo sapien
gatagtcccttttcaaaaaagagac

SEQ ID NO: 37138 - DNA, 25 bp, Homo sapien
gtctcttttttgaaaagggactatc

SEQ ID NO: 37139 - DNA, 25 bp, Homo sapien
cggccgtgctcgtcgaagtgggacg

SEQ ID NO: 37140 - DNA, 25 bp, Homo sapien
cgtcccacttcgacgagcacggccg

SEQ ID NO: 37141 - DNA, 25 bp, Homo sapien
agagagccgcgcgagtacggccttt

SEQ ID NO: 37142 - DNA, 25 bp, Homo sapien
aaaggccgtactcgcgcggctctct

SEQ ID NO: 37143 - DNA, 25 bp, Homo sapien
ctcgacaaactaccgccgtctcccc

SEQ ID NO: 37144 - DNA, 25 bp, Homo sapien
ggggagacggcggtagtttgtcgag

SEQ ID NO: 37145 - DNA, 25 bp, Homo sapien
tcccgccccggggtcgcctcgtcgc

SEQ ID NO: 37146 - DNA, 25 bp, Homo sapien
gcgacgaggcgaccccggggcggga

SEQ ID NO: 37147 - DNA, 25 bp, Homo sapien
tttgactgttgtagaaagagcaagt

SEQ ID NO: 37148 - DNA, 25 bp, Homo sapien
acttgctctttctacaacagtcaaa

SEQ ID NO: 37149 - DNA, 25 bp, Homo sapien
gattaagtaaaaattgtacgttgta

SEQ ID NO: 37150 - DNA, 25 bp, Homo sapien
tacaacgtacaatttttacttaatc

SEQ ID NO: 37151 - DNA, 25 bp, Homo sapien
tacctttactgaccgggagttggac

SEQ ID NO: 37152 - DNA, 25 bp, Homo sapien
gtccaactcccggtcagtaaaggta

SEQ ID NO: 37153 - DNA, 25 bp, Homo sapien
ttagttggacttatacatgaaatag

SEQ ID NO: 37154 - DNA, 25 bp, Homo sapien
ctatttcatgtataagtccaactaa

SEQ ID NO: 37155 - DNA, 25 bp, Homo sapien
acgacgtggtctaagactacttgga

SEQ ID NO: 37156 - DNA, 25 bp, Homo sapien
tccaagtagtcttagaccacgtcgt

SEQ ID NO: 37157 - DNA, 25 bp, Homo sapien
actggaattaacgtttgaaacacac

SEQ ID NO: 37158 - DNA, 25 bp, Homo sapien
gtgtgtttcaaacgttaattccagt

SEQ ID NO: 37159 - DNA, 25 bp, Homo sapien
gaacaccacatccaaggttagtaga

SEQ ID NO: 37160 - DNA, 25 bp, Homo sapien
tctactaaccttggatgtggtgttc

SEQ ID NO: 37161 - DNA, 25 bp, Homo sapien
cattctttctcttacacgactaaag

SEQ ID NO: 37162 - DNA, 25 bp, Homo sapien
ctttagtcgtgtaagagaaagaatg

SEQ ID NO: 37163 - DNA, 25 bp, Homo sapien
tcattctttctcttacacgactaaa

SEQ ID NO: 37164 - DNA, 25 bp, Homo sapien
tttagtcgtgtaagagaaagaatga

SEQ ID NO: 37165 - DNA, 25 bp, Homo sapien
gctcaggccccgccatcccccgacg

SEQ ID NO: 37166 - DNA, 25 bp, Homo sapien
cgtcgggggatggcggggcctgagc

SEQ ID NO: 37167 - DNA, 25 bp, Homo sapien
tcacggtcatctccgggacactcca

SEQ ID NO: 37168 - DNA, 25 bp, Homo sapien
tggagtgtcccggagatgaccgtga

SEQ ID NO: 37169 - DNA, 25 bp, Homo sapien
cactggtgttcaagaaaggtggact

SEQ ID NO: 37170 - DNA, 25 bp, Homo sapien
agtccacctttcttgaacaccagtg

SEQ ID NO: 37171 - DNA, 25 bp, Homo sapien
acatctttgcccaaccgtttgttgt

SEQ ID NO: 37172 - DNA, 25 bp, Homo sapien
acaacaaacggttgggcaaagatgt

SEQ ID NO: 37173 - DNA, 25 bp, Homo sapien
agttcaggaactctccgctatgtcg

SEQ ID NO: 37174 - DNA, 25 bp, Homo sapien
cgacatagcggagagttcctgaact

SEQ ID NO: 37175 - DNA, 25 bp, Homo sapien
actcgcaggccgagcctggaccatt

SEQ ID NO: 37176 - DNA, 25 bp, Homo sapien
aatggtccaggctcggcctgcgagt

SEQ ID NO: 37177 - DNA, 25 bp, Homo sapien
gagcgcctcccgttgcgactcgcag

SEQ ID NO: 37178 - DNA, 25 bp, Homo sapien
ctgcgagtcgcaacgggaggcgctc

SEQ ID NO: 37179 - DNA, 25 bp, Homo sapien
gttagtaaccaactactggtcactt

SEQ ID NO: 37180 - DNA, 25 bp, Homo sapien
aagtgaccagtagttggttactaac

SEQ ID NO: 37181 - DNA, 25 bp, Homo sapien
cccggcgacccgaccaggtcacgcg

SEQ ID NO: 37182 - DNA, 25 bp, Homo sapien
cgcgtgacctggtcgggtcgccggg

SEQ ID NO: 37183 - DNA, 25 bp, Homo sapien
acgtcccgggcatcggaccacccta

SEQ ID NO: 37184 - DNA, 25 bp, Homo sapien
tagggtggtccgatgcccgggacgt

SEQ ID NO: 37185 - DNA, 25 bp, Homo sapien
ttccaccgcggctgggaggtccctg

SEQ ID NO: 37186 - DNA, 25 bp, Homo sapien
cagggacctcccagccgcggtggaa

SEQ ID NO: 37187 - DNA, 25 bp, Homo sapien
ccgtgacacattcgtgacacattct

SEQ ID NO: 37188 - DNA, 25 bp, Homo sapien
agaatgtgtcacgaatgtgtcacgg

SEQ ID NO: 37189 - DNA, 25 bp, Homo sapien
tccgaacaaatatttattcgataaa

SEQ ID NO: 37190 - DNA, 25 bp, Homo sapien
tttatcgaataaatatttgttcgga

SEQ ID NO: 37191 - DNA, 25 bp, Homo sapien
cacgtctaagaaacctgaaattatg

SEQ ID NO: 37192 - DNA, 25 bp, Homo sapien
cataatttcaggtttcttagacgtg

SEQ ID NO: 37193 - DNA, 25 bp, Homo sapien
tatttttatatagcttaactcaaca

SEQ ID NO: 37194 - DNA, 25 bp, Homo sapien
tgttgagttaagctatataaaaata

SEQ ID NO: 37195 - DNA, 25 bp, Homo sapien
ttttatatagcttaactcaacaaga

SEQ ID NO: 37196 - DNA, 25 bp, Homo sapien
tcttgttgagttaagctatataaaa

SEQ ID NO: 37197 - DNA, 25 bp, Homo sapien
tttttatatagcttaactcaacaag

SEQ ID NO: 37198 - DNA, 25 bp, Homo sapien
cttgttgagttaagctatataaaaa

SEQ ID NO: 37199 - DNA, 25 bp, Homo sapien
atttttatatagcttaactcaacaa

SEQ ID NO: 37200 - DNA, 25 bp, Homo sapien
ttgttgagttaagctatataaaaat

SEQ ID NO: 37201 - DNA, 25 bp, Homo sapien
gcgaagagttcttggcccagagcct

SEQ ID NO: 37202 - DNA, 25 bp, Homo sapien
aggctctgggccaagaactcttcgc

SEQ ID NO: 37203 - DNA, 25 bp, Homo sapien
agtgcgccacagatcgacgtaccag

SEQ ID NO: 37204 - DNA, 25 bp, Homo sapien
ctggtacgtcgatctgtggcgcact

SEQ ID NO: 37205 - DNA, 25 bp, Homo sapien
aggttcatctaatatcaaaagttat

SEQ ID NO: 37206 - DNA, 25 bp, Homo sapien
ataacttttgatattagatgaacct

SEQ ID NO: 37207 - DNA, 25 bp, Homo sapien
ccatctgtgaggatgagaaatactt

SEQ ID NO: 37208 - DNA, 25 bp, Homo sapien
aagtatttctcatcctcacagatgg

SEQ ID NO: 37209 - DNA, 25 bp, Homo sapien
cgtcatcgtgtgcaccgaagtaaag

SEQ ID NO: 37210 - DNA, 25 bp, Homo sapien
ctttacttcggtgcacacgatgacg

SEQ ID NO: 37211 - DNA, 25 bp, Homo sapien
ggtccgaggactcgagggcggtgcg

SEQ ID NO: 37212 - DNA, 25 bp, Homo sapien
cgcaccgccctcgagtcctcggacc

SEQ ID NO: 37213 - DNA, 25 bp, Homo sapien
tatttaacactgagtcccgacctgg

SEQ ID NO: 37214 - DNA, 25 bp, Homo sapien
ccaggtcgggactcagtgttaaata

SEQ ID NO: 37215 - DNA, 25 bp, Homo sapien
aaggagggtatctacgagagggagg

SEQ ID NO: 37216 - DNA, 25 bp, Homo sapien
cctccctctcgtagataccctcctt

SEQ ID NO: 37217 - DNA, 25 bp, Homo sapien
gactaagtcctaacagagacgatat

SEQ ID NO: 37218 - DNA, 25 bp, Homo sapien
atatcgtctctgttaggacttagtc

SEQ ID NO: 37219 - DNA, 25 bp, Homo sapien
cacttcggggacgacccaggactgt

SEQ ID NO: 37220 - DNA, 25 bp, Homo sapien
acagtcctgggtcgtccccgaagtg

SEQ ID NO: 37221 - DNA, 25 bp, Homo sapien
tttatttagacttaacactagttgg

SEQ ID NO: 37222 - DNA, 25 bp, Homo sapien
ccaactagtgttaagtctaaataaa

SEQ ID NO: 37223 - DNA, 25 bp, Homo sapien
tgtttcgacctttctaccacggacg

SEQ ID NO: 37224 - DNA, 25 bp, Homo sapien
cgtccgtggtagaaaggtcgaaaca

SEQ ID NO: 37225 - DNA, 25 bp, Homo sapien
tacgacaaaaacagggtagaaggtg

SEQ ID NO: 37226 - DNA, 25 bp, Homo sapien
caccttctaccctgtttttgtcgta

SEQ ID NO: 37227 - DNA, 25 bp, Homo sapien
gctgcccgctcccaacacacccaca

SEQ ID NO: 37228 - DNA, 25 bp, Homo sapien
tgtgggtgtgttgggagcgggcagc

SEQ ID NO: 37229 - DNA, 25 bp, Homo sapien
gacgggcgaccgcggctctcgtcga

SEQ ID NO: 37230 - DNA, 25 bp, Homo sapien
tcgacgagagccgcggtcgcccgtc

SEQ ID NO: 37231 - DNA, 25 bp, Homo sapien
aacatctactaccactcccatccgt

SEQ ID NO: 37232 - DNA, 25 bp, Homo sapien
acggatgggagtggtagtagatgtt

SEQ ID NO: 37233 - DNA, 25 bp, Homo sapien
cccactataagagttgtaggtagtc

SEQ ID NO: 37234 - DNA, 25 bp, Homo sapien
gactacctacaactcttatagtggg

SEQ ID NO: 37235 - DNA, 25 bp, Homo sapien
gttctgggcggcaggcgtacgtcgg

SEQ ID NO: 37236 - DNA, 25 bp, Homo sapien
ccgacgtacgcctgccgcccagaac

SEQ ID NO: 37237 - DNA, 25 bp, Homo sapien
cgtttcaccccgacgcgtgaggagg

SEQ ID NO: 37238 - DNA, 25 bp, Homo sapien
cctcctcacgcgtcggggtgaaacg

SEQ ID NO: 37239 - DNA, 25 bp, Homo sapien
ttcttcatcatcatgaccatcattt

SEQ ID NO: 37240 - DNA, 25 bp, Homo sapien
aaatgatggtcatgatgatgaagaa

SEQ ID NO: 37241 - DNA, 25 bp, Homo sapien
cgtatgggcttagaaggtcaatcgt

SEQ ID NO: 37242 - DNA, 25 bp, Homo sapien
acgattgaccttctaagcccatacg

SEQ ID NO: 37243 - DNA, 25 bp, Homo sapien
gtgttttaaccagaggtgtgacggt

SEQ ID NO: 37244 - DNA, 25 bp, Homo sapien
accgtcacacctctggttaaaacac

SEQ ID NO: 37245 - DNA, 25 bp, Homo sapien
ttttgccaaaagatactagaactgt

SEQ ID NO: 37246 - DNA, 25 bp, Homo sapien
acagttctagtatcttttggcaaaa

SEQ ID NO: 37247 - DNA, 25 bp, Homo sapien
gctttattgtaatgtccaacacaaa

SEQ ID NO: 37248 - DNA, 25 bp, Homo sapien
tttgtgttggacattacaataaagc

SEQ ID NO: 37249 - DNA, 25 bp, Homo sapien
agtcccatgccgtcccttcggcgac

SEQ ID NO: 37250 - DNA, 25 bp, Homo sapien
gtcgccgaagggacggcatgggact

SEQ ID NO: 37251 - DNA, 25 bp, Homo sapien
ccatgccgtcccttcggcgacgctg

SEQ ID NO: 37252 - DNA, 25 bp, Homo sapien
cagcgtcgccgaagggacggcatgg

SEQ ID NO: 37253 - DNA, 25 bp, Homo sapien
ggacagtggtccctatacggtgaac

SEQ ID NO: 37254 - DNA, 25 bp, Homo sapien
gttcaccgtatagggaccactgtcc

SEQ ID NO: 37255 - DNA, 25 bp, Homo sapien
ccttgtaaaggacgattgttagaat

SEQ ID NO: 37256 - DNA, 25 bp, Homo sapien
attctaacaatcgtcctttacaagg

SEQ ID NO: 37257 - DNA, 25 bp, Homo sapien
gtatcaagctactaacctttataag

SEQ ID NO: 37258 - DNA, 25 bp, Homo sapien
cttataaaggttagtagcttgatac

SEQ ID NO: 37259 - DNA, 25 bp, Homo sapien
gcgactcgcgtgcttgggagagcga

SEQ ID NO: 37260 - DNA, 25 bp, Homo sapien
tcgctctcccaagcacgcgagtcgc

SEQ ID NO: 37261 - DNA, 25 bp, Homo sapien
cgacgcggcctcaggagttcaccgg

SEQ ID NO: 37262 - DNA, 25 bp, Homo sapien
ccggtgaactcctgaggccgcgtcg

SEQ ID NO: 37263 - DNA, 25 bp, Homo sapien
ccccgtaggtgagagatggacagaa

SEQ ID NO: 37264 - DNA, 25 bp, Homo sapien
ttctgtccatctctcacctacgggg

SEQ ID NO: 37265 - DNA, 25 bp, Homo sapien
aatgggtgacttggttgtcgttgac

SEQ ID NO: 37266 - DNA, 25 bp, Homo sapien
gtcaacgacaaccaagtcacccatt

SEQ ID NO: 37267 - DNA, 25 bp, Homo sapien
gccgaggtcccactgcccttcctgt

SEQ ID NO: 37268 - DNA, 25 bp, Homo sapien
acaggaagggcagtgggacctcggc

SEQ ID NO: 37269 - DNA, 25 bp, Homo sapien
gtcgtatgagggtaattaggactgt

SEQ ID NO: 37270 - DNA, 25 bp, Homo sapien
acagtcctaattaccctcatacgac

SEQ ID NO: 37271 - DNA, 25 bp, Homo sapien
tcgtatgagggtaattaggactgtc

SEQ ID NO: 37272 - DNA, 25 bp, Homo sapien
gacagtcctaattaccctcatacga

SEQ ID NO: 37273 - DNA, 25 bp, Homo sapien
tggagactcaaacaggtacaaataa

SEQ ID NO: 37274 - DNA, 25 bp, Homo sapien
ttatttgtacctgtttgagtctcca

SEQ ID NO: 37275 - DNA, 25 bp, Homo sapien
gagccaacggggaacgtcgactaac

SEQ ID NO: 37276 - DNA, 25 bp, Homo sapien
gttagtcgacgttccccgttggctc

SEQ ID NO: 37277 - DNA, 25 bp, Homo sapien
ggaggtgcggacacggtagactccc

SEQ ID NO: 37278 - DNA, 25 bp, Homo sapien
gggagtctaccgtgtccgcacctcc

SEQ ID NO: 37279 - DNA, 25 bp, Homo sapien
ccacgaaggccttgccgtagggtcg

SEQ ID NO: 37280 - DNA, 25 bp, Homo sapien
cgaccctacggcaaggccttcgtgg

SEQ ID NO: 37281 - DNA, 25 bp, Homo sapien
ctgcaagtcagggaacctactaggt

SEQ ID NO: 37282 - DNA, 25 bp, Homo sapien
acctagtaggttccctgacttgcag

SEQ ID NO: 37283 - DNA, 25 bp, Homo sapien
aacatttcggtgttcgagacggtgg

SEQ ID NO: 37284 - DNA, 25 bp, Homo sapien
ccaccgtctcgaacaccgaaatgtt

SEQ ID NO: 37285 - DNA, 25 bp, Homo sapien
acagtgtagtaatcggttcttaacc

SEQ ID NO: 37286 - DNA, 25 bp, Homo sapien
ggttaagaaccgattactacactgt

SEQ ID NO: 37287 - DNA, 25 bp, Homo sapien
gataactggagatacaagaaaaagt

SEQ ID NO: 37288 - DNA, 25 bp, Homo sapien
actttttcttgtatctccagttatc

SEQ ID NO: 37289 - DNA, 25 bp, Homo sapien
acttagttggtcttccgtggccgga

SEQ ID NO: 37290 - DNA, 25 bp, Homo sapien
tccggccacggaagaccaactaagt

SEQ ID NO: 37291 - DNA, 25 bp, Homo sapien
cttttaaggtattcttgttaagatg

SEQ ID NO: 37292 - DNA, 25 bp, Homo sapien
catcttaacaagaataccttaaaag

SEQ ID NO: 37293 - DNA, 25 bp, Homo sapien
gccggccgtcgaagcccgcggtcca

SEQ ID NO: 37294 - DNA, 25 bp, Homo sapien
tggaccgcgggcttcgacggccggc

SEQ ID NO: 37295 - DNA, 25 bp, Homo sapien
gaaaacacttaactcatagagggag

SEQ ID NO: 37296 - DNA, 25 bp, Homo sapien
ctccctctatgagttaagtgttttc

SEQ ID NO: 37297 - DNA, 25 bp, Homo sapien
acgtgttgacggaattgactaaatt

SEQ ID NO: 37298 - DNA, 25 bp, Homo sapien
aatttagtcaattccgtcaacacgt

SEQ ID NO: 37299 - DNA, 25 bp, Homo sapien
aagagtcctatgtgactgggtcact

SEQ ID NO: 37300 - DNA, 25 bp, Homo sapien
agtgacccagtcacataggactctt

SEQ ID NO: 37301 - DNA, 25 bp, Homo sapien
agttacttctattcagggcacttat

SEQ ID NO: 37302 - DNA, 25 bp, Homo sapien
ataagtgccctgaatagaagtaact

SEQ ID NO: 37303 - DNA, 25 bp, Homo sapien
tcactttcaatacctcaaaagagag

SEQ ID NO: 37304 - DNA, 25 bp, Homo sapien
ctctcttttgaggtattgaaagtga

SEQ ID NO: 37305 - DNA, 25 bp, Homo sapien
gccctccctcgtccacgcagggcga

SEQ ID NO: 37306 - DNA, 25 bp, Homo sapien
tcgccctgcgtggacgagggagggc

SEQ ID NO: 37307 - DNA, 25 bp, Homo sapien
gccgggacgtcacgcgggtcgtgac

SEQ ID NO: 37308 - DNA, 25 bp, Homo sapien
gtcacgacccgcgtgacgtcccggc

SEQ ID NO: 37309 - DNA, 25 bp, Homo sapien
tccgcagaatctatcaacaaaacag

SEQ ID NO: 37310 - DNA, 25 bp, Homo sapien
ctgttttgttgatagattctgcgga

SEQ ID NO: 37311 - DNA, 25 bp, Homo sapien
gatttcgtagtcgtttttgaacgac

SEQ ID NO: 37312 - DNA, 25 bp, Homo sapien
gtcgttcaaaaacgactacgaaatc

SEQ ID NO: 37313 - DNA, 25 bp, Homo sapien
ggacgggttggccacaattcagacc

SEQ ID NO: 37314 - DNA, 25 bp, Homo sapien
ggtctgaattgtggccaacccgtcc

SEQ ID NO: 37315 - DNA, 25 bp, Homo sapien
aactctttatgaaagaccaattatt

SEQ ID NO: 37316 - DNA, 25 bp, Homo sapien
aataattggtctttcataaagagtt

SEQ ID NO: 37317 - DNA, 25 bp, Homo sapien
tcccttagaaacttcttctcataag

SEQ ID NO: 37318 - DNA, 25 bp, Homo sapien
cttatgagaagaagtttctaaggga

SEQ ID NO: 37319 - DNA, 25 bp, Homo sapien
ggcctccgcggccgcgctccaggag

SEQ ID NO: 37320 - DNA, 25 bp, Homo sapien
ctcctggagcgcggccgcggaggcc

SEQ ID NO: 37321 - DNA, 25 bp, Homo sapien
ggtaccttggagacacatccttcaa

SEQ ID NO: 37322 - DNA, 25 bp, Homo sapien
ttgaaggatgtgtctccaaggtacc

SEQ ID NO: 37323 - DNA, 25 bp, Homo sapien
ccaggcaggtgtggatgtgagtcct

SEQ ID NO: 37324 - DNA, 25 bp, Homo sapien
aggactcacatccacacctgcctgg

SEQ ID NO: 37325 - DNA, 25 bp, Homo sapien
ctgttgcggcggctttccttccgct

SEQ ID NO: 37326 - DNA, 25 bp, Homo sapien
agcggaaggaaagccgccgcaacag

SEQ ID NO: 37327 - DNA, 25 bp, Homo sapien
tggacggaaggcgttcgtcgctctc

SEQ ID NO: 37328 - DNA, 25 bp, Homo sapien
gagagcgacgaacgccttccgtcca

SEQ ID NO: 37329 - DNA, 25 bp, Homo sapien
catcccacgggtcctctcgccctcg

SEQ ID NO: 37330 - DNA, 25 bp, Homo sapien
cgagggcgagaggacccgtgggatg

SEQ ID NO: 37331 - DNA, 25 bp, Homo sapien
aatcagataaaaaccgttactaaca

SEQ ID NO: 37332 - DNA, 25 bp, Homo sapien
tgttagtaacggtttttatctgatt

SEQ ID NO: 37333 - DNA, 25 bp, Homo sapien
gaagtcccgatactcgcacgagtcg

SEQ ID NO: 37334 - DNA, 25 bp, Homo sapien
cgactcgtgcgagtatcgggacttc

SEQ ID NO: 37335 - DNA, 25 bp, Homo sapien
tctcgtgcgggtgcattgtccgtgc

SEQ ID NO: 37336 - DNA, 25 bp, Homo sapien
gcacggacaatgcacccgcacgaga

SEQ ID NO: 37337 - DNA, 25 bp, Homo sapien
ggaccgtgacggtagtgaacagcct

SEQ ID NO: 37338 - DNA, 25 bp, Homo sapien
aggctgttcactaccgtcacggtcc

SEQ ID NO: 37339 - DNA, 25 bp, Homo sapien
caccagtgacgttattaactgactt

SEQ ID NO: 37340 - DNA, 25 bp, Homo sapien
aagtcagttaataacgtcactggtg

SEQ ID NO: 37341 - DNA, 25 bp, Homo sapien
cggtctaaactttctgtcgtaagta

SEQ ID NO: 37342 - DNA, 25 bp, Homo sapien
tacttacgacagaaagtttagaccg

SEQ ID NO: 37343 - DNA, 25 bp, Homo sapien
tctcccggtccgcacgcgggtcccg

SEQ ID NO: 37344 - DNA, 25 bp, Homo sapien
cgggacccgcgtgcggaccgggaga

SEQ ID NO: 37345 - DNA, 25 bp, Homo sapien
agtctctcccggtccgcacgcgggt

SEQ ID NO: 37346 - DNA, 25 bp, Homo sapien
acccgcgtgcggaccgggagagact

SEQ ID NO: 37347 - DNA, 25 bp, Homo sapien
aattattaaaataaccacacgagta

SEQ ID NO: 37348 - DNA, 25 bp, Homo sapien
tactcgtgtggttattttaataatt

SEQ ID NO: 37349 - DNA, 25 bp, Homo sapien
agtaaaagtaacaaagtctattgag

SEQ ID NO: 37350 - DNA, 25 bp, Homo sapien
ctcaatagactttgttacttttact

SEQ ID NO: 37351 - DNA, 25 bp, Homo sapien
tagaagtttatagtctagttaacat

SEQ ID NO: 37352 - DNA, 25 bp, Homo sapien
atgttaactagactataaacttcta

SEQ ID NO: 37353 - DNA, 25 bp, Homo sapien
ctgaccggacgttctcagtagggcc

SEQ ID NO: 37354 - DNA, 25 bp, Homo sapien
ggccctactgagaacgtccggtcag

SEQ ID NO: 37355 - DNA, 25 bp, Homo sapien
aagagccgatcgacccgctactctg

SEQ ID NO: 37356 - DNA, 25 bp, Homo sapien
cagagtagcgggtcgatcggctctt

SEQ ID NO: 37357 - DNA, 25 bp, Homo sapien
cagttcgtcttggaccttatgatcc

SEQ ID NO: 37358 - DNA, 25 bp, Homo sapien
ggatcataaggtccaagacgaactg

SEQ ID NO: 37359 - DNA, 25 bp, Homo sapien
aactcctttaaccttcacatcgact

SEQ ID NO: 37360 - DNA, 25 bp, Homo sapien
agtcgatgtgaaggttaaaggagtt

SEQ ID NO: 37361 - DNA, 25 bp, Homo sapien
gaggacccgtctcctggtaccccta

SEQ ID NO: 37362 - DNA, 25 bp, Homo sapien
taggggtaccaggagacgggtcctc

SEQ ID NO: 37363 - DNA, 25 bp, Homo sapien
gtcgtgccgaggacccgtctcctgg

SEQ ID NO: 37364 - DNA, 25 bp, Homo sapien
ccaggagacgggtcctcggcacgac

SEQ ID NO: 37365 - DNA, 25 bp, Homo sapien
aacagagaccgagacaccttcttcg

SEQ ID NO: 37366 - DNA, 25 bp, Homo sapien
cgaagaaggtgtctcggtctctgtt

SEQ ID NO: 37367 - DNA, 25 bp, Homo sapien
gtcccgtcacgtacgtcggtcgaga

SEQ ID NO: 37368 - DNA, 25 bp, Homo sapien
tctcgaccgacgtacgtgacgggac

SEQ ID NO: 37369 - DNA, 25 bp, Homo sapien
ttatacaagcgacattttacaatat

SEQ ID NO: 37370 - DNA, 25 bp, Homo sapien
atattgtaaaatgtcgcttgtataa

SEQ ID NO: 37371 - DNA, 25 bp, Homo sapien
acaggtatcaaggaaacctaacaaa

SEQ ID NO: 37372 - DNA, 25 bp, Homo sapien
tttgttaggtttccttgatacctgt

SEQ ID NO: 37373 - DNA, 25 bp, Homo sapien
ttcgagaacgtgaacttgtgacgga

SEQ ID NO: 37374 - DNA, 25 bp, Homo sapien
tccgtcacaagttcacgttctcgaa

SEQ ID NO: 37375 - DNA, 25 bp, Homo sapien
attaccctttgaagaccctgagaag

SEQ ID NO: 37376 - DNA, 25 bp, Homo sapien
cttctcagggtcttcaaagggtaat

SEQ ID NO: 37377 - DNA, 25 bp, Homo sapien
gccgcagaagcttacgccggattcc

SEQ ID NO: 37378 - DNA, 25 bp, Homo sapien
ggaatccggcgtaagcttctgcggc

SEQ ID NO: 37379 - DNA, 25 bp, Homo sapien
gttattccgttaaactctctattag

SEQ ID NO: 37380 - DNA, 25 bp, Homo sapien
ctaatagagagtttaacggaataac

SEQ ID NO: 37381 - DNA, 25 bp, Homo sapien
ggtacgcccggttcgcgctctgccg

SEQ ID NO: 37382 - DNA, 25 bp, Homo sapien
cggcagagcgcgaaccgggcgtacc

SEQ ID NO: 37383 - DNA, 25 bp, Homo sapien
acttccacgtcacaatgtctttttg

SEQ ID NO: 37384 - DNA, 25 bp, Homo sapien
caaaaagacattgtgacgtggaagt

SEQ ID NO: 37385 - DNA, 25 bp, Homo sapien
gggagccgacagtcgtcggtcgtgg

SEQ ID NO: 37386 - DNA, 25 bp, Homo sapien
ccacgaccgacgactgtcggctccc

SEQ ID NO: 37387 - DNA, 25 bp, Homo sapien
ggtcggggagccgacagtcgtcggt

SEQ ID NO: 37388 - DNA, 25 bp, Homo sapien
accgacgactgtcggctccccgacc

SEQ ID NO: 37389 - DNA, 25 bp, Homo sapien
accctagaggtccggggtccacaca

SEQ ID NO: 37390 - DNA, 25 bp, Homo sapien
tgtgtggaccccggacctctagggt

SEQ ID NO: 37391 - DNA, 25 bp, Homo sapien
ttcctcatattttgaacctgtttat

SEQ ID NO: 37392 - DNA, 25 bp, Homo sapien
ataaacaggttcaaaatatgaggaa

SEQ ID NO: 37393 - DNA, 25 bp, Homo sapien
cgtgaagaggtagtaccgtgagtgg

SEQ ID NO: 37394 - DNA, 25 bp, Homo sapien
ccactcacggtactacctcttcacg

SEQ ID NO: 37395 - DNA, 25 bp, Homo sapien
accagggtccttcggctgacattcg

SEQ ID NO: 37396 - DNA, 25 bp, Homo sapien
cgaatgtcagccgaaggaccctggt

SEQ ID NO: 37397 - DNA, 25 bp, Homo sapien
tacatatcatcaaacaagaaatttt

SEQ ID NO: 37398 - DNA, 25 bp, Homo sapien
aaaatttcttgtttgatgatatgta

SEQ ID NO: 37399 - DNA, 25 bp, Homo sapien
gttttattcgtttacatagaaccat

SEQ ID NO: 37400 - DNA, 25 bp, Homo sapien
atggttctatgtaaacgaataaaac

SEQ ID NO: 37401 - DNA, 25 bp, Homo sapien
ttatcggtgacaatccctggtccat

SEQ ID NO: 37402 - DNA, 25 bp, Homo sapien
atggaccagggattgtcaccgataa

SEQ ID NO: 37403 - DNA, 25 bp, Homo sapien
ataggtgtgaactattacctatagt

SEQ ID NO: 37404 - DNA, 25 bp, Homo sapien
actataggtaatagttcacacctat

SEQ ID NO: 37405 - DNA, 25 bp, Homo sapien
gtccgtgtcgtcgggtagaaagtca

SEQ ID NO: 37406 - DNA, 25 bp, Homo sapien
tgactttctacccgacgacacggac

SEQ ID NO: 37407 - DNA, 25 bp, Homo sapien
ctgaaaactccagtaccgttgggac

SEQ ID NO: 37408 - DNA, 25 bp, Homo sapien
gtcccaacggtactggagttttcag

SEQ ID NO: 37409 - DNA, 25 bp, Homo sapien
aaaacaacgtcaaatcctactcaat

SEQ ID NO: 37410 - DNA, 25 bp, Homo sapien
attgagtaggatttgacgttgtttt

SEQ ID NO: 37411 - DNA, 25 bp, Homo sapien
ccctctccggtgtcagtgggagtcc

SEQ ID NO: 37412 - DNA, 25 bp, Homo sapien
ggactcccactgacaccggagaggg

SEQ ID NO: 37413 - DNA, 25 bp, Homo sapien
cgtggacgagtcaatggacaccccg

SEQ ID NO: 37414 - DNA, 25 bp, Homo sapien
cggggtgtccattgactcgtccacg

SEQ ID NO: 37415 - DNA, 25 bp, Homo sapien
gtagtcagtgaactcttgtaaatca

SEQ ID NO: 37416 - DNA, 25 bp, Homo sapien
tgatttacaagagttcactgactac

SEQ ID NO: 37417 - DNA, 25 bp, Homo sapien
aattactatgaacgtatcattaagg

SEQ ID NO: 37418 - DNA, 25 bp, Homo sapien
ccttaatgatacgttcatagtaatt

SEQ ID NO: 37419 - DNA, 25 bp, Homo sapien
aaagaacttctattcgctatttaat

SEQ ID NO: 37420 - DNA, 25 bp, Homo sapien
attaaatagcgaatagaagttcttt

SEQ ID NO: 37421 - DNA, 25 bp, Homo sapien
agtaaagacgtctcaatggctcccg

SEQ ID NO: 37422 - DNA, 25 bp, Homo sapien
cgggagccattgagacgtctttact

SEQ ID NO: 37423 - DNA, 25 bp, Homo sapien
gtaactcgcgtaaatgccttcattg

SEQ ID NO: 37424 - DNA, 25 bp, Homo sapien
caatgaaggcatttacgcgagttac

SEQ ID NO: 37425 - DNA, 25 bp, Homo sapien
aaggtcttagttgtaaagattccat

SEQ ID NO: 37426 - DNA, 25 bp, Homo sapien
atggaatctttacaactaagacctt

SEQ ID NO: 37427 - DNA, 25 bp, Homo sapien
cttccacacccgagtggtccgtcga

SEQ ID NO: 37428 - DNA, 25 bp, Homo sapien
tcgacggaccactcgggtgtggaag

SEQ ID NO: 37429 - DNA, 25 bp, Homo sapien
atgatgaaacctactaatctcataa

SEQ ID NO: 37430 - DNA, 25 bp, Homo sapien
ttatgagattagtaggtttcatcat

SEQ ID NO: 37431 - DNA, 25 bp, Homo sapien
tgataatgatgaaacctactaatct

SEQ ID NO: 37432 - DNA, 25 bp, Homo sapien
agattagtaggtttcatcattatca

SEQ ID NO: 37433 - DNA, 25 bp, Homo sapien
acgtcagtcgagtctggaaagaagg

SEQ ID NO: 37434 - DNA, 25 bp, Homo sapien
ccttctttccagactcgactgacgt

SEQ ID NO: 37435 - DNA, 25 bp, Homo sapien
actcagtgggttctcggtagcgtcc

SEQ ID NO: 37436 - DNA, 25 bp, Homo sapien
ggacgctaccgagaacccactgagt

SEQ ID NO: 37437 - DNA, 25 bp, Homo sapien
cccgtggtgtcattaggcgtaggcc

SEQ ID NO: 37438 - DNA, 25 bp, Homo sapien
ggcctacgcctaatgacaccacggg

SEQ ID NO: 37439 - DNA, 25 bp, Homo sapien
aaaagacaattaaccttcaatagtg

SEQ ID NO: 37440 - DNA, 25 bp, Homo sapien
cactattgaaggttaattgtctttt

SEQ ID NO: 37441 - DNA, 25 bp, Homo sapien
gtcgggtagtgatacagccttacac

SEQ ID NO: 37442 - DNA, 25 bp, Homo sapien
gtgtaaggctgtatcactacccgac

SEQ ID NO: 37443 - DNA, 25 bp, Homo sapien
agcagaagcacgacacgagtgttcc

SEQ ID NO: 37444 - DNA, 25 bp, Homo sapien
ggaacactcgtgtcgtgcttctgct

SEQ ID NO: 37445 - DNA, 25 bp, Homo sapien
ggaatctcagccgaagatttcgcag

SEQ ID NO: 37446 - DNA, 25 bp, Homo sapien
ctgcgaaatcttcggctgagattcc

SEQ ID NO: 37447 - DNA, 25 bp, Homo sapien
gcttcaaagtgtagttcctcgttgt

SEQ ID NO: 37448 - DNA, 25 bp, Homo sapien
acaacgaggaactacactttgaagc

SEQ ID NO: 37449 - DNA, 25 bp, Homo sapien
gtctcggcgccccacgccgtcacga

SEQ ID NO: 37450 - DNA, 25 bp, Homo sapien
tcgtgacggcgtggggcgccgagac

SEQ ID NO: 37451 - DNA, 25 bp, Homo sapien
aatcgagaacggaagggagaacgta

SEQ ID NO: 37452 - DNA, 25 bp, Homo sapien
tacgttctcccttccgttctcgatt

SEQ ID NO: 37453 - DNA, 25 bp, Homo sapien
aagagagagttcctccgagcctccg

SEQ ID NO: 37454 - DNA, 25 bp, Homo sapien
cggaggctcggaggaactctctctt

SEQ ID NO: 37455 - DNA, 25 bp, Homo sapien
gaatgttaattaatgtaaacggaaa

SEQ ID NO: 37456 - DNA, 25 bp, Homo sapien
tttccgtttacattaattaacattc

SEQ ID NO: 37457 - DNA, 25 bp, Homo sapien
cgggtataggacaaattgggtgact

SEQ ID NO: 37458 - DNA, 25 bp, Homo sapien
agtcacccaatttgtcctatacccg

SEQ ID NO: 37459 - DNA, 25 bp, Homo sapien
tcgactcagggttgtccaccccggt

SEQ ID NO: 37460 - DNA, 25 bp, Homo sapien
accggggtggacaaccctgagtcga

SEQ ID NO: 37461 - DNA, 25 bp, Homo sapien
tgattacattccaacgaagactggg

SEQ ID NO: 37462 - DNA, 25 bp, Homo sapien
cccagtcttcgttggaatgtaatca

SEQ ID NO: 37463 - DNA, 25 bp, Homo sapien
tgttactgtgtcttttaaacctatt

SEQ ID NO: 37464 - DNA, 25 bp, Homo sapien
aataggtttaaaagacacagtaaca

SEQ ID NO: 37465 - DNA, 25 bp, Homo sapien
catcgagcggacgtggcggtgactc

SEQ ID NO: 37466 - DNA, 25 bp, Homo sapien
gagtcaccgccacgtccgctcgatg

SEQ ID NO: 37467 - DNA, 25 bp, Homo sapien
gggactccggtctgccgtccgtcgt

SEQ ID NO: 37468 - DNA, 25 bp, Homo sapien
acgacggacggcagaccggagtccc

SEQ ID NO: 37469 - DNA, 25 bp, Homo sapien
cacgggactccggtctgccgtccgt

SEQ ID NO: 37470 - DNA, 25 bp, Homo sapien
acggacggcagaccggagtcccgtg

SEQ ID NO: 37471 - DNA, 25 bp, Homo sapien
gaacagtcggtggacgtgacacggt

SEQ ID NO: 37472 - DNA, 25 bp, Homo sapien
accgtgtcacgtccaccgactgttc

SEQ ID NO: 37473 - DNA, 25 bp, Homo sapien
ctccctgaccgactcgccgggcgtc

SEQ ID NO: 37474 - DNA, 25 bp, Homo sapien
gacgcccggcgagtcggtcagggag

SEQ ID NO: 37475 - DNA, 25 bp, Homo sapien
attatcgtaggaaaatcaagtcggt

SEQ ID NO: 37476 - DNA, 25 bp, Homo sapien
accgacttgattttcctacgataat

SEQ ID NO: 37477 - DNA, 25 bp, Homo sapien
acgtcctgtcgcctactcgacgaag

SEQ ID NO: 37478 - DNA, 25 bp, Homo sapien
cttcgtcgagtaggcgacaggacgt

SEQ ID NO: 37479 - DNA, 25 bp, Homo sapien
accggacgtgcgacgtacaggtgtg

SEQ ID NO: 37480 - DNA, 25 bp, Homo sapien
cacacctgtacgtcgcacgtccggt

SEQ ID NO: 37481 - DNA, 25 bp, Homo sapien
cctttaaggccgacgtctcaagtcc

SEQ ID NO: 37482 - DNA, 25 bp, Homo sapien
ggacttgagacgtcggccttaaagg

SEQ ID NO: 37483 - DNA, 25 bp, Homo sapien
ttgtagactgtaataatcgcgaaaa

SEQ ID NO: 37484 - DNA, 25 bp, Homo sapien
ttttcgcgattattacagtctacaa

SEQ ID NO: 37485 - DNA, 25 bp, Homo sapien
taagaacgactagagtctacaaaat

SEQ ID NO: 37486 - DNA, 25 bp, Homo sapien
attttgtagactctagtcgttctta

SEQ ID NO: 37487 - DNA, 25 bp, Homo sapien
ggacccaagggttacgtctttgcac

SEQ ID NO: 37488 - DNA, 25 bp, Homo sapien
gtgcaaagacgtaacccttgggtcc

SEQ ID NO: 37489 - DNA, 25 bp, Homo sapien
gggagtcgacctgcccggcagggag

SEQ ID NO: 37490 - DNA, 25 bp, Homo sapien
ctccctgccgggcaggtcgactccc

SEQ ID NO: 37491 - DNA, 25 bp, Homo sapien
tcgggagtcgacctgcccggcaggg

SEQ ID NO: 37492 - DNA, 25 bp, Homo sapien
ccctgccgggcaggtcgactcccga

SEQ ID NO: 37493 - DNA, 25 bp, Homo sapien
ctcggagtactcgactatggtgggc

SEQ ID NO: 37494 - DNA, 25 bp, Homo sapien
gcccaccatagtcgagtactccgag

SEQ ID NO: 37495 - DNA, 25 bp, Homo sapien
gtcggtcgagagaagagggaagggt

SEQ ID NO: 37496 - DNA, 25 bp, Homo sapien
acccttccctcttctctcgaccgac

SEQ ID NO: 37497 - DNA, 25 bp, Homo sapien
ccgggtgccccgagagccgtggcgt

SEQ ID NO: 37498 - DNA, 25 bp, Homo sapien
acgccacggctctcggggcacccgg

SEQ ID NO: 37499 - DNA, 25 bp, Homo sapien
ggccctggacttggtacggttccgc

SEQ ID NO: 37500 - DNA, 25 bp, Homo sapien
gcggaaccgtaccaagtccagggcc

SEQ ID NO: 37501 - DNA, 25 bp, Homo sapien
ccccggaagtgaacacgactaggga

SEQ ID NO: 37502 - DNA, 25 bp, Homo sapien
tccctagtcgtgttcacttccgggg

SEQ ID NO: 37503 - DNA, 25 bp, Homo sapien
aaagataactactgtccgaaagaaa

SEQ ID NO: 37504 - DNA, 25 bp, Homo sapien
tttctttcggacagtagttatcttt

SEQ ID NO: 37505 - DNA, 25 bp, Homo sapien
ggttacctacatctacaccaagctg

SEQ ID NO: 37506 - DNA, 25 bp, Homo sapien
cagcttggtgtagatgtaggtaacc

SEQ ID NO: 37507 - DNA, 25 bp, Homo sapien
cggtccgaccgcacctccacagggc

SEQ ID NO: 37508 - DNA, 25 bp, Homo sapien
gccctgtggaggtgcggtcggaccg

SEQ ID NO: 37509 - DNA, 25 bp, Homo sapien
ccgcggggcaggtccgtcgaaccca

SEQ ID NO: 37510 - DNA, 25 bp, Homo sapien
tgggttcgacggacctgccccgcgg

SEQ ID NO: 37511 - DNA, 25 bp, Homo sapien
gtgacattattacggtcactgtaaa

SEQ ID NO: 37512 - DNA, 25 bp, Homo sapien
tttacagtgaccgtaataatgtcac

SEQ ID NO: 37513 - DNA, 25 bp, Homo sapien
gctcgggtcagctcggcgcgagtgg

SEQ ID NO: 37514 - DNA, 25 bp, Homo sapien
ccactcgcgccgagctgacccgagc

SEQ ID NO: 37515 - DNA, 25 bp, Homo sapien
cgggtcagctcggcgcgagtggagc

SEQ ID NO: 37516 - DNA, 25 bp, Homo sapien
gctccactcgcgccgagctgacccg

SEQ ID NO: 37517 - DNA, 25 bp, Homo sapien
ttacttgtgttatgtgaacctatga

SEQ ID NO: 37518 - DNA, 25 bp, Homo sapien
tcataggttcacataacacaagtaa

SEQ ID NO: 37519 - DNA, 25 bp, Homo sapien
ttttacttgtgttatgtgaacctat

SEQ ID NO: 37520 - DNA, 25 bp, Homo sapien
ataggttcacataacacaagtaaaa

SEQ ID NO: 37521 - DNA, 25 bp, Homo sapien
gcaccgtcgcatcgtacctacagaa

SEQ ID NO: 37522 - DNA, 25 bp, Homo sapien
ttctgtaggtacgatgcgacggtgc

SEQ ID NO: 37523 - DNA, 25 bp, Homo sapien
gcttgaggcgagaagacgaacccaa

SEQ ID NO: 37524 - DNA, 25 bp, Homo sapien
ttgggttcgtcttctcgcctcaagc

SEQ ID NO: 37525 - DNA, 25 bp, Homo sapien
gggggtgtctcaccgggcgcccgga

SEQ ID NO: 37526 - DNA, 25 bp, Homo sapien
tccgggcgcccggtgagacaccccc

SEQ ID NO: 37527 - DNA, 25 bp, Homo sapien
gataacgaagttcaaccgacgttta

SEQ ID NO: 37528 - DNA, 25 bp, Homo sapien
taaacgtcggttgaacttcgttatc

SEQ ID NO: 37529 - DNA, 25 bp, Homo sapien
ttaggatcgaggatggtattctcgt

SEQ ID NO: 37530 - DNA, 25 bp, Homo sapien
acgagaataccatcctcgatcctaa

SEQ ID NO: 37531 - DNA, 25 bp, Homo sapien
gtcatttcaacgattgttctcccag

SEQ ID NO: 37532 - DNA, 25 bp, Homo sapien
ctgggagaacaatcgttgaaatgac

SEQ ID NO: 37533 - DNA, 25 bp, Homo sapien
tatcacaggtagactagaccgcgat

SEQ ID NO: 37534 - DNA, 25 bp, Homo sapien
atcgcggtctagtctacctgtgata

SEQ ID NO: 37535 - DNA, 25 bp, Homo sapien
taaaatacacataaattcctacaat

SEQ ID NO: 37536 - DNA, 25 bp, Homo sapien
attgtaggaatttatgtgtatttta

SEQ ID NO: 37537 - DNA, 25 bp, Homo sapien
tttacaaaacattactcattgagta

SEQ ID NO: 37538 - DNA, 25 bp, Homo sapien
tactcaatgagtaatgttttgtaaa

SEQ ID NO: 37539 - DNA, 25 bp, Homo sapien
ggtgtataacggttactacctgtgt

SEQ ID NO: 37540 - DNA, 25 bp, Homo sapien
acacaggtagtaaccgttatacacc

SEQ ID NO: 37541 - DNA, 25 bp, Homo sapien
gaggtcgggtattccacttgtggac

SEQ ID NO: 37542 - DNA, 25 bp, Homo sapien
gtccacaagtggaatacccgacctc

SEQ ID NO: 37543 - DNA, 25 bp, Homo sapien
taaacaagatcgaccacacgtgaac

SEQ ID NO: 37544 - DNA, 25 bp, Homo sapien
gttcacgtgtggtcgatcttgttta

SEQ ID NO: 37545 - DNA, 25 bp, Homo sapien
ccacggtctggggtcgctgccccgt

SEQ ID NO: 37546 - DNA, 25 bp, Homo sapien
acggggcagcgaccccagaccgtgg

SEQ ID NO: 37547 - DNA, 25 bp, Homo sapien
gatgacatctactaaatgtggtcgt

SEQ ID NO: 37548 - DNA, 25 bp, Homo sapien
acgaccacatttagtagatgtcatc

SEQ ID NO: 37549 - DNA, 25 bp, Homo sapien
taaagtctattaggaggagacggtg

SEQ ID NO: 37550 - DNA, 25 bp, Homo sapien
caccgtctcctcctaatagacttta

SEQ ID NO: 37551 - DNA, 25 bp, Homo sapien
ccaagtaatagtcaaagtttattaa

SEQ ID NO: 37552 - DNA, 25 bp, Homo sapien
ttaataaactttgactattacttgg

SEQ ID NO: 37553 - DNA, 25 bp, Homo sapien
gtagggaactcgaaagtattgagaa

SEQ ID NO: 37554 - DNA, 25 bp, Homo sapien
ttctcaatactttcgagttccctac

SEQ ID NO: 37555 - DNA, 25 bp, Homo sapien
ggtggccaccctcgtgcccgaggga

SEQ ID NO: 37556 - DNA, 25 bp, Homo sapien
tccctcgggcacgagggtggccacc

SEQ ID NO: 37557 - DNA, 25 bp, Homo sapien
ggtcagaccgtcttaggagtttcaa

SEQ ID NO: 37558 - DNA, 25 bp, Homo sapien
ttgaaactcctaagacggtctgacc

SEQ ID NO: 37559 - DNA, 25 bp, Homo sapien
cagtcttaacgggagggtgtccatg

SEQ ID NO: 37560 - DNA, 25 bp, Homo sapien
catggacaccctcccgttaagactg

SEQ ID NO: 37561 - DNA, 25 bp, Homo sapien
gtctcggccacttagaccgccgaag

SEQ ID NO: 37562 - DNA, 25 bp, Homo sapien
cttcggcggtctaagtggccgagac

SEQ ID NO: 37563 - DNA, 25 bp, Homo sapien
tgacgcggcacgcacgtcaaggctc

SEQ ID NO: 37564 - DNA, 25 bp, Homo sapien
gagccttgacgtgcgtgccgcgtca

SEQ ID NO: 37565 - DNA, 25 bp, Homo sapien
gtacaaaccgacaacacgttcttct

SEQ ID NO: 37566 - DNA, 25 bp, Homo sapien
agaagaacgtgttgtcggtttgtac

SEQ ID NO: 37567 - DNA, 25 bp, Homo sapien
tcggtgccctcccaccgtggaagtt

SEQ ID NO: 37568 - DNA, 25 bp, Homo sapien
aacttccacggtgggagggcaccga

SEQ ID NO: 37569 - DNA, 25 bp, Homo sapien
tactattggtacttatcgatgtttg

SEQ ID NO: 37570 - DNA, 25 bp, Homo sapien
caaacatcgataagtaccaatagta

SEQ ID NO: 37571 - DNA, 25 bp, Homo sapien
atacaagccagacttcgatccccat

SEQ ID NO: 37572 - DNA, 25 bp, Homo sapien
atggggatcgaagtctggcttgtat

SEQ ID NO: 37573 - DNA, 25 bp, Homo sapien
tgcgggcctcccacgttcacccgga

SEQ ID NO: 37574 - DNA, 25 bp, Homo sapien
tccgggtgaacgtgggaggcccgca

SEQ ID NO: 37575 - DNA, 25 bp, Homo sapien
agattccttgtctctatgtatttat

SEQ ID NO: 37576 - DNA, 25 bp, Homo sapien
ataaatacatagagacaaggaatct

SEQ ID NO: 37577 - DNA, 25 bp, Homo sapien
gacagacttctatcggacccccgag

SEQ ID NO: 37578 - DNA, 25 bp, Homo sapien
ctcgggggtccgatagaagtctgtc

SEQ ID NO: 37579 - DNA, 25 bp, Homo sapien
cgggtcacgtcagcgacgggaggtc

SEQ ID NO: 37580 - DNA, 25 bp, Homo sapien
gacctcccgtcgctgacgtgacccg

SEQ ID NO: 37581 - DNA, 25 bp, Homo sapien
gatgtttacttctccaggaccgtcg

SEQ ID NO: 37582 - DNA, 25 bp, Homo sapien
cgacggtcctggagaagtaaacatc

SEQ ID NO: 37583 - DNA, 25 bp, Homo sapien
cgggctacacggtgatccacttgat

SEQ ID NO: 37584 - DNA, 25 bp, Homo sapien
atcaagtggatcaccgtgtagcccg

SEQ ID NO: 37585 - DNA, 25 bp, Homo sapien
gtgacctaaggttcccacgagtccc

SEQ ID NO: 37586 - DNA, 25 bp, Homo sapien
gggactcgtgggaaccttaggtcac

SEQ ID NO: 37587 - DNA, 25 bp, Homo sapien
ccggtggaggctgcggtgggcgtca

SEQ ID NO: 37588 - DNA, 25 bp, Homo sapien
tgacgcccaccgcagcctccaccgg

SEQ ID NO: 37589 - DNA, 25 bp, Homo sapien
tggtctgtaatagtagtattaagga

SEQ ID NO: 37590 - DNA, 25 bp, Homo sapien
tccttaatactactattacagacca

SEQ ID NO: 37591 - DNA, 25 bp, Homo sapien
caaccactacggatgtgtttcgtgg

SEQ ID NO: 37592 - DNA, 25 bp, Homo sapien
ccacgaaacacatccgtagtggttg

SEQ ID NO: 37593 - DNA, 25 bp, Homo sapien
ggcaccgcgcgtcggtcgcgcgagc

SEQ ID NO: 37594 - DNA, 25 bp, Homo sapien
gctcgcgcgaccgacgcgcggtgcc

SEQ ID NO: 37595 - DNA, 25 bp, Homo sapien
ccgccactctcccaggtggccgagg

SEQ ID NO: 37596 - DNA, 25 bp, Homo sapien
cctcggccacctgggagagtggcgg

SEQ ID NO: 37597 - DNA, 25 bp, Homo sapien
atggaaccttaagtgtagtaaacac

SEQ ID NO: 37598 - DNA, 25 bp, Homo sapien
gtgtttactacacttaaggttccat

SEQ ID NO: 37599 - DNA, 25 bp, Homo sapien
taataggttcaacacgtaaacttct

SEQ ID NO: 37600 - DNA, 25 bp, Homo sapien
agaagtttacgtgttgaacctatta

SEQ ID NO: 37601 - DNA, 25 bp, Homo sapien
ccgcaacgaagattccgaaacttcg

SEQ ID NO: 37602 - DNA, 25 bp, Homo sapien
cgaagtttcggaatcttcgttgcgg

SEQ ID NO: 37603 - DNA, 25 bp, Homo sapien
gtcacgtgtcaggtttcatcagtac

SEQ ID NO: 37604 - DNA, 25 bp, Homo sapien
gtactgatgaaacctgacacgtgac

SEQ ID NO: 37605 - DNA, 25 bp, Homo sapien
catagaccgtacttgttagtggtgt

SEQ ID NO: 37606 - DNA, 25 bp, Homo sapien
acaccactaacaagtacggtctatg

SEQ ID NO: 37607 - DNA, 25 bp, Homo sapien
aagacccaacacttcggtctgggat

SEQ ID NO: 37608 - DNA, 25 bp, Homo sapien
atcccagaccgaagtgttgggtctt

SEQ ID NO: 37609 - DNA, 25 bp, Homo sapien
agccacccggactggcacaggactt

SEQ ID NO: 37610 - DNA, 25 bp, Homo sapien
aagtcctgtgccagtccgggtggct

SEQ ID NO: 37611 - DNA, 25 bp, Homo sapien
tcacctactttgtttcgacagtaag

SEQ ID NO: 37612 - DNA, 25 bp, Homo sapien
cttactgtcgaaacaaagtaggtga

SEQ ID NO: 37613 - DNA, 25 bp, Homo sapien
accagtgaatcaacctacaatatct

SEQ ID NO: 37614 - DNA, 25 bp, Homo sapien
agatattgtaggttgattcactggt

SEQ ID NO: 37615 - DNA, 25 bp, Homo sapien
ttccttggcttacccgactgagtca

SEQ ID NO: 37616 - DNA, 25 bp, Homo sapien
tgactcagtcgggtaagccaaggaa

SEQ ID NO: 37617 - DNA, 25 bp, Homo sapien
caaacagaaaaagcagtaatgatct

SEQ ID NO: 37618 - DNA, 25 bp, Homo sapien
agatcattactgctttttctgtttg

SEQ ID NO: 37619 - DNA, 25 bp, Homo sapien
ttatacgattgtaagggtatacaat

SEQ ID NO: 37620 - DNA, 25 bp, Homo sapien
attgtatacccttacaatcgtataa

SEQ ID NO: 37621 - DNA, 25 bp, Homo sapien
gttccagtactcaagatttcattga

SEQ ID NO: 37622 - DNA, 25 bp, Homo sapien
tcaatgaaatcttgagtactggaac

SEQ ID NO: 37623 - DNA, 25 bp, Homo sapien
gataactcagtctagtactttaaga

SEQ ID NO: 37624 - DNA, 25 bp, Homo sapien
tcttaaagtactagactgagttatc

SEQ ID NO: 37625 - DNA, 25 bp, Homo sapien
gaactcgaagcgaacaaggtccagg

SEQ ID NO: 37626 - DNA, 25 bp, Homo sapien
cctggaccttgttcgcttcgagttc

SEQ ID NO: 37627 - DNA, 25 bp, Homo sapien
agacgacagtaaccgggaatcgacg

SEQ ID NO: 37628 - DNA, 25 bp, Homo sapien
cgtcgattcccggttactgtcgtct

SEQ ID NO: 37629 - DNA, 25 bp, Homo sapien
gacgcccgggttccacgccgccaca

SEQ ID NO: 37630 - DNA, 25 bp, Homo sapien
tgtggcggcgtggaacccgggcgtc

SEQ ID NO: 37631 - DNA, 25 bp, Homo sapien
agggtctggtactccaactctggag

SEQ ID NO: 37632 - DNA, 25 bp, Homo sapien
ctccagagttggagtaccagaccct

SEQ ID NO: 37633 - DNA, 25 bp, Homo sapien
tttataaacgtcactgagtcccttc

SEQ ID NO: 37634 - DNA, 25 bp, Homo sapien
gaagggactcagtgacgtttataaa

SEQ ID NO: 37635 - DNA, 25 bp, Homo sapien
atcatgttatttataaggatatgta

SEQ ID NO: 37636 - DNA, 25 bp, Homo sapien
tacatatccttataaataacatgat

SEQ ID NO: 37637 - DNA, 25 bp, Homo sapien
ggctcttgttctccgacgagtaaat

SEQ ID NO: 37638 - DNA, 25 bp, Homo sapien
atttactcgtcggagaacaagagcc

SEQ ID NO: 37639 - DNA, 25 bp, Homo sapien
ataaagagaacgtccttcattgacg

SEQ ID NO: 37640 - DNA, 25 bp, Homo sapien
cgtcaatgaaggacgttctctttat

SEQ ID NO: 37641 - DNA, 25 bp, Homo sapien
cgctcccggcgtcacgctggtcgta

SEQ ID NO: 37642 - DNA, 25 bp, Homo sapien
tacgaccagcgtgacgccgggagcg

SEQ ID NO: 37643 - DNA, 25 bp, Homo sapien
accgctcccggcgtcacgctggtcg

SEQ ID NO: 37644 - DNA, 25 bp, Homo sapien
cgaccagcgtgacgccgggagcggt

SEQ ID NO: 37645 - DNA, 25 bp, Homo sapien
acgctggactaggacgccgggacac

SEQ ID NO: 37646 - DNA, 25 bp, Homo sapien
gtgtcccggcgtcctagtccagcgt

SEQ ID NO: 37647 - DNA, 25 bp, Homo sapien
agagactctacagatattttctatt

SEQ ID NO: 37648 - DNA, 25 bp, Homo sapien
aatagaaaatatctgtagagtctct

SEQ ID NO: 37649 - DNA, 25 bp, Homo sapien
gcggtaacgccaggagtaaaacgac

SEQ ID NO: 37650 - DNA, 25 bp, Homo sapien
gtcgttttactcctggcgttaccgc

SEQ ID NO: 37651 - DNA, 25 bp, Homo sapien
tcctcccagtcgggggaaccaccag

SEQ ID NO: 37652 - DNA, 25 bp, Homo sapien
ctggtggttcccccgactgggagga

SEQ ID NO: 37653 - DNA, 25 bp, Homo sapien
ccatctgacctccaccatagtaaat

SEQ ID NO: 37654 - DNA, 25 bp, Homo sapien
atttactatggtggaggtcagatgg

SEQ ID NO: 37655 - DNA, 25 bp, Homo sapien
gcaccccgagccatccacgacggcg

SEQ ID NO: 37656 - DNA, 25 bp, Homo sapien
cgccgtcgtggatggctcggggtgc

SEQ ID NO: 37657 - DNA, 25 bp, Homo sapien
gtatacttgaatccgagatcacggt

SEQ ID NO: 37658 - DNA, 25 bp, Homo sapien
accgtgatctcggattcaagtatac

SEQ ID NO: 37659 - DNA, 25 bp, Homo sapien
aaggtcccagtgactcagtcccacg

SEQ ID NO: 37660 - DNA, 25 bp, Homo sapien
cgtgggactgagtcactgggacctt

SEQ ID NO: 37661 - DNA, 25 bp, Homo sapien
aagaaatcttatacatccttcataa

SEQ ID NO: 37662 - DNA, 25 bp, Homo sapien
ttatgaaggatgtataagatttctt

SEQ ID NO: 37663 - DNA, 25 bp, Homo sapien
agaaatcttatacatccttcataaa

SEQ ID NO: 37664 - DNA, 25 bp, Homo sapien
tttatgaaggatgtataagatttct

SEQ ID NO: 37665 - DNA, 25 bp, Homo sapien
tgtcagtcgttgtcgagaagggcct

SEQ ID NO: 37666 - DNA, 25 bp, Homo sapien
aggcccttctcgacaacgactgaca

SEQ ID NO: 37667 - DNA, 25 bp, Homo sapien
tttggagtaaaactagtgtagaaaa

SEQ ID NO: 37668 - DNA, 25 bp, Homo sapien
ttttctacactagttttactccaaa

SEQ ID NO: 37669 - DNA, 25 bp, Homo sapien
ggtcctaacactgagtcacgtacga

SEQ ID NO: 37670 - DNA, 25 bp, Homo sapien
tcgtacgtgactcagtgttaggacc

SEQ ID NO: 37671 - DNA, 25 bp, Homo sapien
gacccagaggcgtccgacaccctcg

SEQ ID NO: 37672 - DNA, 25 bp, Homo sapien
cgagggtgtcggacgcctctgggtc

SEQ ID NO: 37673 - DNA, 25 bp, Homo sapien
gaaaatatactaaaccatagacttc

SEQ ID NO: 37674 - DNA, 25 bp, Homo sapien
gaagtctatggtttagtatattttc

SEQ ID NO: 37675 - DNA, 25 bp, Homo sapien
tcaccattatcagaagattaaagaa

SEQ ID NO: 37676 - DNA, 25 bp, Homo sapien
ttctttaatcttctgataatggtga

SEQ ID NO: 37677 - DNA, 25 bp, Homo sapien
gtcgggcggtcctctcacgctacgg

SEQ ID NO: 37678 - DNA, 25 bp, Homo sapien
ccgtagcgtgagaggaccgcccgac

SEQ ID NO: 37679 - DNA, 25 bp, Homo sapien
agttaagaagatttgtcactgtgac

SEQ ID NO: 37680 - DNA, 25 bp, Homo sapien
gtcacagtgacaaatcttcttaact

SEQ ID NO: 37681 - DNA, 25 bp, Homo sapien
cgggtgtcgggcgcgaccgtgggcg

SEQ ID NO: 37682 - DNA, 25 bp, Homo sapien
cgcccacggtcgcgcccgacacccg

SEQ ID NO: 37683 - DNA, 25 bp, Homo sapien
cgggcgcgaccgtgggcgcaccgga

SEQ ID NO: 37684 - DNA, 25 bp, Homo sapien
tccggtgcgcccacggtcgcgcccg

SEQ ID NO: 37685 - DNA, 25 bp, Homo sapien
tgtcgggcgcgaccgtgggcgcacc

SEQ ID NO: 37686 - DNA, 25 bp, Homo sapien
ggtgcgcccacggtcgcgcccgaca

SEQ ID NO: 37687 - DNA, 25 bp, Homo sapien
aagaagaagttaaggcaatcgttaa

SEQ ID NO: 37688 - DNA, 25 bp, Homo sapien
ttaacgattgccttaacttcttctt

SEQ ID NO: 37689 - DNA, 25 bp, Homo sapien
ggacgtcgaccaacagattctcaac

SEQ ID NO: 37690 - DNA, 25 bp, Homo sapien
gttgagaatctgttggtcgacgtcc

SEQ ID NO: 37691 - DNA, 25 bp, Homo sapien
aaaagaattcgagagacaagggaag

SEQ ID NO: 37692 - DNA, 25 bp, Homo sapien
cttcccttgtctctcgaattctttt

SEQ ID NO: 37693 - DNA, 25 bp, Homo sapien
agactcccgtcctggataagaaggt

SEQ ID NO: 37694 - DNA, 25 bp, Homo sapien
accttcttatccaggacgggagtct

SEQ ID NO: 37695 - DNA, 25 bp, Homo sapien
agtcggtccagggtgcacttacgtc

SEQ ID NO: 37696 - DNA, 25 bp, Homo sapien
gacgtaagtgcaccctggaccgact

SEQ ID NO: 37697 - DNA, 25 bp, Homo sapien
gaaatttctgggagaggtcgggctg

SEQ ID NO: 37698 - DNA, 25 bp, Homo sapien
cagcccgacctctcccagaaatttc

SEQ ID NO: 37699 - DNA, 25 bp, Homo sapien
tttacaaagtcctatgaacttgcgc

SEQ ID NO: 37700 - DNA, 25 bp, Homo sapien
gcgcaagttcataggactttgtaaa

SEQ ID NO: 37701 - DNA, 25 bp, Homo sapien
cgaattaaaacattggtatatgtac

SEQ ID NO: 37702 - DNA, 25 bp, Homo sapien
gtacatataccaatgttttaattcg

SEQ ID NO: 37703 - DNA, 25 bp, Homo sapien
ctgtcccgacaaaaacgcccactcc

SEQ ID NO: 37704 - DNA, 25 bp, Homo sapien
ggagtgggcgtttttgtcgggacag

SEQ ID NO: 37705 - DNA, 25 bp, Homo sapien
ttccattttgaacctctgaagactc

SEQ ID NO: 37706 - DNA, 25 bp, Homo sapien
gagtcttcagaggttcaaaatggaa

SEQ ID NO: 37707 - DNA, 25 bp, Homo sapien
tgaccttttcactactacactctgg

SEQ ID NO: 37708 - DNA, 25 bp, Homo sapien
ccagagtgtagtagtgaaaaggtca

SEQ ID NO: 37709 - DNA, 25 bp, Homo sapien
atgtcgtgtgactaggaggatttac

SEQ ID NO: 37710 - DNA, 25 bp, Homo sapien
gtaaatcctcctagtcacacgacat

SEQ ID NO: 37711 - DNA, 25 bp, Homo sapien
gccgttttgcccctcgtctctctct

SEQ ID NO: 37712 - DNA, 25 bp, Homo sapien
agagagagacgaggggcaaaacggc

SEQ ID NO: 37713 - DNA, 25 bp, Homo sapien
aagaaggactttgttaatgtagtat

SEQ ID NO: 37714 - DNA, 25 bp, Homo sapien
atactacattaacaaagtccttctt

SEQ ID NO: 37715 - DNA, 25 bp, Homo sapien
ctcattcagacaaccaattcttcgt

SEQ ID NO: 37716 - DNA, 25 bp, Homo sapien
acgaagaattggttgtctgaatgag

SEQ ID NO: 37717 - DNA, 25 bp, Homo sapien
tccggaagtcacagtcgtaccttat

SEQ ID NO: 37718 - DNA, 25 bp, Homo sapien
ataaggtacgactgtgacttccgga

SEQ ID NO: 37719 - DNA, 25 bp, Homo sapien
cgaccgtttgcgaggatggagattc

SEQ ID NO: 37720 - DNA, 25 bp, Homo sapien
gaatctccatcctcgcaaacggtcg

SEQ ID NO: 37721 - DNA, 25 bp, Homo sapien
gtacatcaattaataacctccttct

SEQ ID NO: 37722 - DNA, 25 bp, Homo sapien
agaaggaggttattaattgatgtac

SEQ ID NO: 37723 - DNA, 25 bp, Homo sapien
aattagtgattagtctaaaaggcct

SEQ ID NO: 37724 - DNA, 25 bp, Homo sapien
aggccttttagactaatcactaatt

SEQ ID NO: 37725 - DNA, 25 bp, Homo sapien
tctgggaattaacaatggtgtcgac

SEQ ID NO: 37726 - DNA, 25 bp, Homo sapien
gtcgacaccattgttaattcccaga

SEQ ID NO: 37727 - DNA, 25 bp, Homo sapien
tgtctagactaagacgggacggaag

SEQ ID NO: 37728 - DNA, 25 bp, Homo sapien
cttccgtcccgtcttagtctagaca

SEQ ID NO: 37729 - DNA, 25 bp, Homo sapien
gtagcaggacgaaaggccgtgattt

SEQ ID NO: 37730 - DNA, 25 bp, Homo sapien
aaatcacggcctttcgtcctgctac

SEQ ID NO: 37731 - DNA, 25 bp, Homo sapien
ttcgcctaacagttctcacagacgt

SEQ ID NO: 37732 - DNA, 25 bp, Homo sapien
acgtctgtgagaactgttaggcgaa

SEQ ID NO: 37733 - DNA, 25 bp, Homo sapien
aaaattcgagtactctccgtgcagg

SEQ ID NO: 37734 - DNA, 25 bp, Homo sapien
cctgcacggagagtactcgaatttt

SEQ ID NO: 37735 - DNA, 25 bp, Homo sapien
tcacaacaactggtttaacacgtat

SEQ ID NO: 37736 - DNA, 25 bp, Homo sapien
atacgtgttaaaccagttgttgtga

SEQ ID NO: 37737 - DNA, 25 bp, Homo sapien
cttggcggcgcttctgctacctgtc

SEQ ID NO: 37738 - DNA, 25 bp, Homo sapien
gacaggtagcagaagcgccgccaag

SEQ ID NO: 37739 - DNA, 25 bp, Homo sapien
gtcctatgacgttcgcctcggcctg

SEQ ID NO: 37740 - DNA, 25 bp, Homo sapien
caggccgaggcgaacgtcataggac

SEQ ID NO: 37741 - DNA, 25 bp, Homo sapien
atgataattacatcatgtatgagtc

SEQ ID NO: 37742 - DNA, 25 bp, Homo sapien
gactcatacatgatgtaattatcat

SEQ ID NO: 37743 - DNA, 25 bp, Homo sapien
aatgataattacatcatgtatgagt

SEQ ID NO: 37744 - DNA, 25 bp, Homo sapien
actcatacatgatgtaattatcatt

SEQ ID NO: 37745 - DNA, 25 bp, Homo sapien
cccgaagagttctccgtcatccaaa

SEQ ID NO: 37746 - DNA, 25 bp, Homo sapien
tttggatgacggagaactcttcggg

SEQ ID NO: 37747 - DNA, 25 bp, Homo sapien
ggtatggttataagtaactatcacc

SEQ ID NO: 37748 - DNA, 25 bp, Homo sapien
ggtgatagttacttataaccatacc

SEQ ID NO: 37749 - DNA, 25 bp, Homo sapien
agagacgacactattactttgacat

SEQ ID NO: 37750 - DNA, 25 bp, Homo sapien
atgtcaaagtaatagtgtcgtctct

SEQ ID NO: 37751 - DNA, 25 bp, Homo sapien
tttcttcaatccacaccaaagtagt

SEQ ID NO: 37752 - DNA, 25 bp, Homo sapien
actactttggtgtggattgaagaaa

SEQ ID NO: 37753 - DNA, 25 bp, Homo sapien
attcgacgaaatctggtaacagtct

SEQ ID NO: 37754 - DNA, 25 bp, Homo sapien
agactgttaccagatttcgtcgaat

SEQ ID NO: 37755 - DNA, 25 bp, Homo sapien
ggacgatccctgagttaaagtaaca

SEQ ID NO: 37756 - DNA, 25 bp, Homo sapien
tgttactttaactcagggatcgtcc

SEQ ID NO: 37757 - DNA, 25 bp, Homo sapien
gtctctccggtctgtggttgcgtca

SEQ ID NO: 37758 - DNA, 25 bp, Homo sapien
tgacgcaaccacagaccggagagac

SEQ ID NO: 37759 - DNA, 25 bp, Homo sapien
ggattatggtccctcaccaatggac

SEQ ID NO: 37760 - DNA, 25 bp, Homo sapien
gtccattggtgagggaccataatcc

SEQ ID NO: 37761 - DNA, 25 bp, Homo sapien
ccttttctgtacttcaaaatacata

SEQ ID NO: 37762 - DNA, 25 bp, Homo sapien
tatgtattttgaagtacagaaaagg

SEQ ID NO: 37763 - DNA, 25 bp, Homo sapien
aggtccccctatgcggttaatgagt

SEQ ID NO: 37764 - DNA, 25 bp, Homo sapien
actcattaaccgcatagggggacct

SEQ ID NO: 37765 - DNA, 25 bp, Homo sapien
ttttactggcgcctgacgggagcta

SEQ ID NO: 37766 - DNA, 25 bp, Homo sapien
tagctcccgtcaggcgccagtaaaa

SEQ ID NO: 37767 - DNA, 25 bp, Homo sapien
cattgtggctgtacggaggtggcgt

SEQ ID NO: 37768 - DNA, 25 bp, Homo sapien
acgccacctccgtacagccacaatg

SEQ ID NO: 37769 - DNA, 25 bp, Homo sapien
acgaaaaactaatacaaccaattca

SEQ ID NO: 37770 - DNA, 25 bp, Homo sapien
tgaattggttgtattagtttttcgt

SEQ ID NO: 37771 - DNA, 25 bp, Homo sapien
gcaccacccaaatgtggtgctttct

SEQ ID NO: 37772 - DNA, 25 bp, Homo sapien
agaaagcaccacatttgggtggtgc

SEQ ID NO: 37773 - DNA, 25 bp, Homo sapien
cgagacttcgtacgcgaggtcccac

SEQ ID NO: 37774 - DNA, 25 bp, Homo sapien
gtgggacctcgcgtacgaagtctcg

SEQ ID NO: 37775 - DNA, 25 bp, Homo sapien
ctttaattattaggtcagttctctt

SEQ ID NO: 37776 - DNA, 25 bp, Homo sapien
aagagaactgacctaataattaaag

SEQ ID NO: 37777 - DNA, 25 bp, Homo sapien
cggtcgctcgtgaacggctcgggtg

SEQ ID NO: 37778 - DNA, 25 bp, Homo sapien
cacccgagccgttcacgagcgaccg

SEQ ID NO: 37779 - DNA, 25 bp, Homo sapien
aacttttacaagagatgcattgact

SEQ ID NO: 37780 - DNA, 25 bp, Homo sapien
agtcaatgcatctcttgtaaaagtt

SEQ ID NO: 37781 - DNA, 25 bp, Homo sapien
acacctctgtaatggtttcacccag

SEQ ID NO: 37782 - DNA, 25 bp, Homo sapien
ctgggtgaaaccattacagaggtgt

SEQ ID NO: 37783 - DNA, 25 bp, Homo sapien
tccgggtgtccttgccccgggacac

SEQ ID NO: 37784 - DNA, 25 bp, Homo sapien
gtgtcccggggcaaggacacccgga

SEQ ID NO: 37785 - DNA, 25 bp, Homo sapien
gtccggccggctcctccccactcca

SEQ ID NO: 37786 - DNA, 25 bp, Homo sapien
tggagtggggaggagccggccggac

SEQ ID NO: 37787 - DNA, 25 bp, Homo sapien
gagaaataatgagaacaacttttat

SEQ ID NO: 37788 - DNA, 25 bp, Homo sapien
ataaaagttgttctcattatttctc

SEQ ID NO: 37789 - DNA, 25 bp, Homo sapien
aacccggtcaccgtcgcagcccatg

SEQ ID NO: 37790 - DNA, 25 bp, Homo sapien
catgggctgcgacggtgaccgggtt

SEQ ID NO: 37791 - DNA, 25 bp, Homo sapien
tgacgtcagcatctacaccaccgaa

SEQ ID NO: 37792 - DNA, 25 bp, Homo sapien
ttcggtggtgtagatgctgacgtca

SEQ ID NO: 37793 - DNA, 25 bp, Homo sapien
ggactgaagttagaaatgaccttaa

SEQ ID NO: 37794 - DNA, 25 bp, Homo sapien
ttaaggtcatttctaacttcagtcc

SEQ ID NO: 37795 - DNA, 25 bp, Homo sapien
atctgaactaagcttaagtctgtaa

SEQ ID NO: 37796 - DNA, 25 bp, Homo sapien
ttacagacttaagcttagttcagat

SEQ ID NO: 37797 - DNA, 25 bp, Homo sapien
actattgttatgagataaaggacac

SEQ ID NO: 37798 - DNA, 25 bp, Homo sapien
gtgtcctttatctcataacaatagt

SEQ ID NO: 37799 - DNA, 25 bp, Homo sapien
agtttttcgcgatgtagacatcgga

SEQ ID NO: 37800 - DNA, 25 bp, Homo sapien
tccgatgtctacatcgcgaaaaact

SEQ ID NO: 37801 - DNA, 25 bp, Homo sapien
tcaagtccctcccatgtaaaagagg

SEQ ID NO: 37802 - DNA, 25 bp, Homo sapien
cctcttttacatgggagggacttga

SEQ ID NO: 37803 - DNA, 25 bp, Homo sapien
ccactaaacaaacctgcaaacttat

SEQ ID NO: 37804 - DNA, 25 bp, Homo sapien
ataagtttgcaggtttgtttagtgg

SEQ ID NO: 37805 - DNA, 25 bp, Homo sapien
gaatgttttattctattagttttag

SEQ ID NO: 37806 - DNA, 25 bp, Homo sapien
ctaaaactaatagaataaaacattc

SEQ ID NO: 37807 - DNA, 25 bp, Homo sapien
tttatatttccaaggacagggactc

SEQ ID NO: 37808 - DNA, 25 bp, Homo sapien
gagtccctgtccttggaaatataaa

SEQ ID NO: 37809 - DNA, 25 bp, Homo sapien
gacagacacaactgagtgacggact

SEQ ID NO: 37810 - DNA, 25 bp, Homo sapien
agtccgtcactcagttgtgtctgtc

SEQ ID NO: 37811 - DNA, 25 bp, Homo sapien
cgcggccccgcgtgctcccgtggta

SEQ ID NO: 37812 - DNA, 25 bp, Homo sapien
taccacgggagcacgcggggccgcg

SEQ ID NO: 37813 - DNA, 25 bp, Homo sapien
gtcgcggccccgcgtgctcccgtgg

SEQ ID NO: 37814 - DNA, 25 bp, Homo sapien
ccacgggagcacgcggggccgcgac

SEQ ID NO: 37815 - DNA, 25 bp, Homo sapien
tcgcgtcgccggtggggcggcccga

SEQ ID NO: 37816 - DNA, 25 bp, Homo sapien
tcgggccgccccaccggcgacgcga

SEQ ID NO: 37817 - DNA, 25 bp, Homo sapien
tccgtccgccctcggcaggagtcgt

SEQ ID NO: 37818 - DNA, 25 bp, Homo sapien
acgactcctgccgagggcggacgga

SEQ ID NO: 37819 - DNA, 25 bp, Homo sapien
gacggattctccgtccgccctcggc

SEQ ID NO: 37820 - DNA, 25 bp, Homo sapien
gccgagggcggacggagaatccgtc

SEQ ID NO: 37821 - DNA, 25 bp, Homo sapien
cccgaagataacttcactaaagtaa

SEQ ID NO: 37822 - DNA, 25 bp, Homo sapien
ttactttagtgaagttatcttcggg

SEQ ID NO: 37823 - DNA, 25 bp, Homo sapien
taatactatttctaccttcaagtct

SEQ ID NO: 37824 - DNA, 25 bp, Homo sapien
agacttgaaggtagaaatagtatta

SEQ ID NO: 37825 - DNA, 25 bp, Homo sapien
tggttatgtgttcctacgaaaaacc

SEQ ID NO: 37826 - DNA, 25 bp, Homo sapien
ggtttttcgtaggaacacataacca

SEQ ID NO: 37827 - DNA, 25 bp, Homo sapien
cggcggacgagagcgtggacgagcg

SEQ ID NO: 37828 - DNA, 25 bp, Homo sapien
cgctcgtccacgctctcgtccgccg

SEQ ID NO: 37829 - DNA, 25 bp, Homo sapien
tcagggtcgtatgtgtagaggacac

SEQ ID NO: 37830 - DNA, 25 bp, Homo sapien
gtgtcctctacacatacgaccctga

SEQ ID NO: 37831 - DNA, 25 bp, Homo sapien
atccgtttgtcgtgcgtcgtcttac

SEQ ID NO: 37832 - DNA, 25 bp, Homo sapien
gtaagacgacgcacgacaaacggat

SEQ ID NO: 37833 - DNA, 25 bp, Homo sapien
ccagcccgcgcggctcttcgcgggt

SEQ ID NO: 37834 - DNA, 25 bp, Homo sapien
acccgcgaagagccgcgcgggctgg

SEQ ID NO: 37835 - DNA, 25 bp, Homo sapien
tccgtccgcgcccagcccgcgcggc

SEQ ID NO: 37836 - DNA, 25 bp, Homo sapien
gccgcgcgggctgggcgcggacgga

SEQ ID NO: 37837 - DNA, 25 bp, Homo sapien
ccgtccgcgcccagcccgcgcggct

SEQ ID NO: 37838 - DNA, 25 bp, Homo sapien
agccgcgcgggctgggcgcggacgg

SEQ ID NO: 37839 - DNA, 25 bp, Homo sapien
cgacacgacaacctggctctttaca

SEQ ID NO: 37840 - DNA, 25 bp, Homo sapien
tgtaaagagccaggttgtcgtgtcg

SEQ ID NO: 37841 - DNA, 25 bp, Homo sapien
actcgaggacctccgaaagggtatg

SEQ ID NO: 37842 - DNA, 25 bp, Homo sapien
cataccctttcggaggtcctcgagt

SEQ ID NO: 37843 - DNA, 25 bp, Homo sapien
gaactagaaggaactaggaggtcgt

SEQ ID NO: 37844 - DNA, 25 bp, Homo sapien
acgacctcctagttccttctagttc

SEQ ID NO: 37845 - DNA, 25 bp, Homo sapien
cgtccaggtgaatggggaagacctc

SEQ ID NO: 37846 - DNA, 25 bp, Homo sapien
gaggtcttccccattcacctggacg

SEQ ID NO: 37847 - DNA, 25 bp, Homo sapien
agtattatcacttgttggtgaagaa

SEQ ID NO: 37848 - DNA, 25 bp, Homo sapien
ttcttcaccaacaagtgataatact

SEQ ID NO: 37849 - DNA, 25 bp, Homo sapien
tcctctatgaaccacggaggaagtg

SEQ ID NO: 37850 - DNA, 25 bp, Homo sapien
cacttcctccgtggttcatagagga

SEQ ID NO: 37851 - DNA, 25 bp, Homo sapien
gtctcctagaaatccatcaacctcg

SEQ ID NO: 37852 - DNA, 25 bp, Homo sapien
cgaggttgatggatttctaggagac

SEQ ID NO: 37853 - DNA, 25 bp, Homo sapien
gtcgagaaacaagagcgaccaaaag

SEQ ID NO: 37854 - DNA, 25 bp, Homo sapien
cttttggtcgctcttgtttctcgac

SEQ ID NO: 37855 - DNA, 25 bp, Homo sapien
ctcagggagctataatctacgtttt

SEQ ID NO: 37856 - DNA, 25 bp, Homo sapien
aaaacgtagattatagctccctgag

SEQ ID NO: 37857 - DNA, 25 bp, Homo sapien
aaatgattattcgagtatattctct

SEQ ID NO: 37858 - DNA, 25 bp, Homo sapien
agagaatatactcgaataatcattt

SEQ ID NO: 37859 - DNA, 25 bp, Homo sapien
gacccacctactcctggcagtctga

SEQ ID NO: 37860 - DNA, 25 bp, Homo sapien
tcagactgccaggagtaggtgggtc

SEQ ID NO: 37861 - DNA, 25 bp, Homo sapien
tcccgcagaaaagagaggcgtaggt

SEQ ID NO: 37862 - DNA, 25 bp, Homo sapien
acctacgcctctcttttctgcggga

SEQ ID NO: 37863 - DNA, 25 bp, Homo sapien
gacacgttacctaccctcgaactcc

SEQ ID NO: 37864 - DNA, 25 bp, Homo sapien
ggagttcgagggtaggtaacgtgtc

SEQ ID NO: 37865 - DNA, 25 bp, Homo sapien
tcggcccagtctggtcgttgggtcc

SEQ ID NO: 37866 - DNA, 25 bp, Homo sapien
ggacccaacgaccagactgggccga

SEQ ID NO: 37867 - DNA, 25 bp, Homo sapien
aggttgtattttacaagtacattga

SEQ ID NO: 37868 - DNA, 25 bp, Homo sapien
tcaatgtacttgtaaaatacaacct

SEQ ID NO: 37869 - DNA, 25 bp, Homo sapien
acagtagctccgagagactaccagg

SEQ ID NO: 37870 - DNA, 25 bp, Homo sapien
cctggtagtctctcggagctactgt

SEQ ID NO: 37871 - DNA, 25 bp, Homo sapien
acctctcgtcactgttgcaacggac

SEQ ID NO: 37872 - DNA, 25 bp, Homo sapien
gtccgttgcaacagtgacgagaggt

SEQ ID NO: 37873 - DNA, 25 bp, Homo sapien
tcaacctcggaggtaccctgggcga

SEQ ID NO: 37874 - DNA, 25 bp, Homo sapien
tcgcccagggtacctccgaggttga

SEQ ID NO: 37875 - DNA, 25 bp, Homo sapien
tccggtcggagccggtcggacatgt

SEQ ID NO: 37876 - DNA, 25 bp, Homo sapien
acatgtccgaccggctccgaccgga

SEQ ID NO: 37877 - DNA, 25 bp, Homo sapien
ggtgtatcccgttgctaagttaata

SEQ ID NO: 37878 - DNA, 25 bp, Homo sapien
tattaacttagcaacgggatacacc

SEQ ID NO: 37879 - DNA, 25 bp, Homo sapien
gacgaggttcaagcttgggggcccg

SEQ ID NO: 37880 - DNA, 25 bp, Homo sapien
cgggcccccaagcttgaacctcgtc

SEQ ID NO: 37881 - DNA, 25 bp, Homo sapien
tacccgggtatcttcctggtagtcg

SEQ ID NO: 37882 - DNA, 25 bp, Homo sapien
cgactaccaggaagatacccgggta

SEQ ID NO: 37883 - DNA, 25 bp, Homo sapien
ctggtatcttcaggaaggtccaagt

SEQ ID NO: 37884 - DNA, 25 bp, Homo sapien
acttggaccttcctgaagataccag

SEQ ID NO: 37885 - DNA, 25 bp, Homo sapien
gggaaatatatcctgaccggtccac

SEQ ID NO: 37886 - DNA, 25 bp, Homo sapien
gtggaccggtcaggatatatttccc

SEQ ID NO: 37887 - DNA, 25 bp, Homo sapien
aaagtgacgttccacgtgccgggac

SEQ ID NO: 37888 - DNA, 25 bp, Homo sapien
gtcccggcacgtggaacgtcacttt

SEQ ID NO: 37889 - DNA, 25 bp, Homo sapien
aaattattatagacggagagcatgg

SEQ ID NO: 37890 - DNA, 25 bp, Homo sapien
ccatgctctccgtctataataattt

SEQ ID NO: 37891 - DNA, 25 bp, Homo sapien
aatagactattcacaggaagttaag

SEQ ID NO: 37892 - DNA, 25 bp, Homo sapien
cttaacttcctgtgaatagtctatt

SEQ ID NO: 37893 - DNA, 25 bp, Homo sapien
actgtccagtacgagttattcactt

SEQ ID NO: 37894 - DNA, 25 bp, Homo sapien
aagtgaataactcgtactggacagt

SEQ ID NO: 37895 - DNA, 25 bp, Homo sapien
attcaatattagtctatcctgtatg

SEQ ID NO: 37896 - DNA, 25 bp, Homo sapien
catacaggatagactaatattgaat

SEQ ID NO: 37897 - DNA, 25 bp, Homo sapien
gaagaccttaggttatcggagacgg

SEQ ID NO: 37898 - DNA, 25 bp, Homo sapien
ccgtctccgataacctaaggtcttc

SEQ ID NO: 37899 - DNA, 25 bp, Homo sapien
tgactgtactaacggcgacgtggcc

SEQ ID NO: 37900 - DNA, 25 bp, Homo sapien
ggccacgtcgccgttagtacagtca

SEQ ID NO: 37901 - DNA, 25 bp, Homo sapien
tcccggtacagggtactggacacgg

SEQ ID NO: 37902 - DNA, 25 bp, Homo sapien
ccgtgtccagtaccctgtaccggga

SEQ ID NO: 37903 - DNA, 25 bp, Homo sapien
ttttcaacacgtaagtcgaagtagg

SEQ ID NO: 37904 - DNA, 25 bp, Homo sapien
cctacttcgacttacgtgttgaaaa

SEQ ID NO: 37905 - DNA, 25 bp, Homo sapien
ctcccccactctagcgagaggaggg

SEQ ID NO: 37906 - DNA, 25 bp, Homo sapien
ccctcctctcgctagagtgggggag

SEQ ID NO: 37907 - DNA, 25 bp, Homo sapien
ggagacgtacctttagcggtgacga

SEQ ID NO: 37908 - DNA, 25 bp, Homo sapien
tcgtcaccgctaaaggtacgtctcc

SEQ ID NO: 37909 - DNA, 25 bp, Homo sapien
aagaaggtataatttaacaggagac

SEQ ID NO: 37910 - DNA, 25 bp, Homo sapien
gtctcctgttaaattataccttctt

SEQ ID NO: 37911 - DNA, 25 bp, Homo sapien
ctttgtagtagtcccaatattttct

SEQ ID NO: 37912 - DNA, 25 bp, Homo sapien
agaaaatattgggactactacaaag

SEQ ID NO: 37913 - DNA, 25 bp, Homo sapien
aagactctaccttttagacatttac

SEQ ID NO: 37914 - DNA, 25 bp, Homo sapien
gtaaatgtctaaaaggtagagtctt

SEQ ID NO: 37915 - DNA, 25 bp, Homo sapien
taagactctaccttttagacattta

SEQ ID NO: 37916 - DNA, 25 bp, Homo sapien
taaatgtctaaaaggtagagtctta

SEQ ID NO: 37917 - DNA, 25 bp, Homo sapien
ttaattaaggtaggactcgggatat

SEQ ID NO: 37918 - DNA, 25 bp, Homo sapien
atatcccgagtcctaccttaattaa

SEQ ID NO: 37919 - DNA, 25 bp, Homo sapien
ccaccggtcacctctgtgacacccg

SEQ ID NO: 37920 - DNA, 25 bp, Homo sapien
cgggtgtcacagaggtgaccggtgg

SEQ ID NO: 37921 - DNA, 25 bp, Homo sapien
aaactacgattgtattttcatgaaa

SEQ ID NO: 37922 - DNA, 25 bp, Homo sapien
tttcatgaaaatacaatcgtagttt

SEQ ID NO: 37923 - DNA, 25 bp, Homo sapien
tcttatctattactatcatgtatta

SEQ ID NO: 37924 - DNA, 25 bp, Homo sapien
taatacatgatagtaatagataaga

SEQ ID NO: 37925 - DNA, 25 bp, Homo sapien
ttcttatctattactatcatgtatt

SEQ ID NO: 37926 - DNA, 25 bp, Homo sapien
aatacatgatagtaatagataagaa

SEQ ID NO: 37927 - DNA, 25 bp, Homo sapien
tttcttatctattactatcatgtat

SEQ ID NO: 37928 - DNA, 25 bp, Homo sapien
atacatgatagtaatagataagaaa

SEQ ID NO: 37929 - DNA, 25 bp, Homo sapien
tatctccgggtatttgacttcttgt

SEQ ID NO: 37930 - DNA, 25 bp, Homo sapien
acaagaagtcaaatacccggagata

SEQ ID NO: 37931 - DNA, 25 bp, Homo sapien
aacatttgaagtaataatggtacta

SEQ ID NO: 37932 - DNA, 25 bp, Homo sapien
tagtaccattattacttcaaatgtt

SEQ ID NO: 37933 - DNA, 25 bp, Homo sapien
taagtatgtgtacgtttgcgtgtgt

SEQ ID NO: 37934 - DNA, 25 bp, Homo sapien
acacacgcaaacgtacacatactta

SEQ ID NO: 37935 - DNA, 25 bp, Homo sapien
tctcattcgctaacttcctatttta

SEQ ID NO: 37936 - DNA, 25 bp, Homo sapien
taaaataggaagttagcgaatgaga

SEQ ID NO: 37937 - DNA, 25 bp, Homo sapien
tgtctccacgtcttacgatcgttat

SEQ ID NO: 37938 - DNA, 25 bp, Homo sapien
ataacgatcgtaagacgtggagaca

SEQ ID NO: 37939 - DNA, 25 bp, Homo sapien
ctagtatatgactgtactctaattc

SEQ ID NO: 37940 - DNA, 25 bp, Homo sapien
gaattagagtacagtcatatactag

SEQ ID NO: 37941 - DNA, 25 bp, Homo sapien
gtgacgggtgcggcgtggtcgtcgg

SEQ ID NO: 37942 - DNA, 25 bp, Homo sapien
ccgacgaccacgccgcacccgtcac

SEQ ID NO: 37943 - DNA, 25 bp, Homo sapien
cggacctgcacagagggtcctcagt

SEQ ID NO: 37944 - DNA, 25 bp, Homo sapien
actgaggaccctctgtgcaggtccg

SEQ ID NO: 37945 - DNA, 25 bp, Homo sapien
tacgtccgtctcaacgacgagtacc

SEQ ID NO: 37946 - DNA, 25 bp, Homo sapien
ggtactcgtcgttgagacggacgta

SEQ ID NO: 37947 - DNA, 25 bp, Homo sapien
tccagcgccggtgcggcccacccct

SEQ ID NO: 37948 - DNA, 25 bp, Homo sapien
aggggtgggccgcaccggcgctgga

SEQ ID NO: 37949 - DNA, 25 bp, Homo sapien
ctccagcgccggtgcggcccacgcc

SEQ ID NO: 37950 - DNA, 25 bp, Homo sapien
ggcgtgggccgcaccggcgctggag

SEQ ID NO: 37951 - DNA, 25 bp, Homo sapien
tagcgtctgggttcagaccagtggc

SEQ ID NO: 37952 - DNA, 25 bp, Homo sapien
gccactggtctgaacccagacgcta

SEQ ID NO: 37953 - DNA, 25 bp, Homo sapien
ggaaagaccttaagatatttgtgtc

SEQ ID NO: 37954 - DNA, 25 bp, Homo sapien
gacacaaatatcttaaggtctttcc

SEQ ID NO: 37955 - DNA, 25 bp, Homo sapien
atgcaggtataacctgcggtcgtcc

SEQ ID NO: 37956 - DNA, 25 bp, Homo sapien
ggacgaccgcaggttatacctgcat

SEQ ID NO: 37957 - DNA, 25 bp, Homo sapien
cgaccgtatcgggaggtgctcctcg

SEQ ID NO: 37958 - DNA, 25 bp, Homo sapien
cgaggagcacctcccgatacggtcg

SEQ ID NO: 37959 - DNA, 25 bp, Homo sapien
cggcccaacaccccgccctgacgac

SEQ ID NO: 37960 - DNA, 25 bp, Homo sapien
gtcgtcagggcggggtgttgggccg

SEQ ID NO: 37961 - DNA, 25 bp, Homo sapien
gactgccggtgcccttgttctccgg

SEQ ID NO: 37962 - DNA, 25 bp, Homo sapien
ccggagaacaagggcaccggcagtc

SEQ ID NO: 37963 - DNA, 25 bp, Homo sapien
gtacttttatttcctgagtatctat

SEQ ID NO: 37964 - DNA, 25 bp, Homo sapien
atagatactcaggaaataaaagtac

SEQ ID NO: 37965 - DNA, 25 bp, Homo sapien
agactcacggccgattcatcgacag

SEQ ID NO: 37966 - DNA, 25 bp, Homo sapien
ctgtcgatgaatcggccgtgagtct

SEQ ID NO: 37967 - DNA, 25 bp, Homo sapien
tgccgcacccacctaccctccggga

SEQ ID NO: 37968 - DNA, 25 bp, Homo sapien
tcccggagggtaggtgggtgcggca

SEQ ID NO: 37969 - DNA, 25 bp, Homo sapien
acatccacccttatttcatagaagc

SEQ ID NO: 37970 - DNA, 25 bp, Homo sapien
gcttctatgaaataagggtggatgt

SEQ ID NO: 37971 - DNA, 25 bp, Homo sapien
gacgttacatattcttcattcttga

SEQ ID NO: 37972 - DNA, 25 bp, Homo sapien
tcaagaatgaagaatatgtaacgtc

SEQ ID NO: 37973 - DNA, 25 bp, Homo sapien
tgtcggacccacctgggcgggccgg

SEQ ID NO: 37974 - DNA, 25 bp, Homo sapien
ccggcccgcccaggtgggtccgaca

SEQ ID NO: 37975 - DNA, 25 bp, Homo sapien
gtgtcggacccacctgggcgggccg

SEQ ID NO: 37976 - DNA, 25 bp, Homo sapien
cggcccgcccaggtgggtccgacac

SEQ ID NO: 37977 - DNA, 25 bp, Homo sapien
ggtgtcggacccacctgggcgggcc

SEQ ID NO: 37978 - DNA, 25 bp, Homo sapien
ggcccgcccaggtgggtccgacacc

SEQ ID NO: 37979 - DNA, 25 bp, Homo sapien
ttgtagttttaagacctgcaaactg

SEQ ID NO: 37980 - DNA, 25 bp, Homo sapien
cagtttgcaggtcttaaaactacaa

SEQ ID NO: 37981 - DNA, 25 bp, Homo sapien
cccatgtgtgtagcggaagacgaac

SEQ ID NO: 37982 - DNA, 25 bp, Homo sapien
gttcgtcttccgctacacacatggg

SEQ ID NO: 37983 - DNA, 25 bp, Homo sapien
acattataaatcaccgttgctgttc

SEQ ID NO: 37984 - DNA, 25 bp, Homo sapien
gaacagcaacggtgatttataatgt

SEQ ID NO: 37985 - DNA, 25 bp, Homo sapien
tagggtctttggaagtgacaccgaa

SEQ ID NO: 37986 - DNA, 25 bp, Homo sapien
ttcggtgtcacttccaaagacccta

SEQ ID NO: 37987 - DNA, 25 bp, Homo sapien
accctactagcgtcgtcgtacttag

SEQ ID NO: 37988 - DNA, 25 bp, Homo sapien
ctaagtacgacgacgctagtagggt

SEQ ID NO: 37989 - DNA, 25 bp, Homo sapien
gaaccactctaagtagaccaccgta

SEQ ID NO: 37990 - DNA, 25 bp, Homo sapien
tacggtggtctacttagagtggttc

SEQ ID NO: 37991 - DNA, 25 bp, Homo sapien
acaaccatatctttctagtcaaagt

SEQ ID NO: 37992 - DNA, 25 bp, Homo sapien
actttgactagaaagatatggttgt

SEQ ID NO: 37993 - DNA, 25 bp, Homo sapien
ggcgcgcgacggtcgtctaccgctg

SEQ ID NO: 37994 - DNA, 25 bp, Homo sapien
cagcggtagacgaccgtcgcgcgcc

SEQ ID NO: 37995 - DNA, 25 bp, Homo sapien
atatcgttttaaacattcatgtaaa

SEQ ID NO: 37996 - DNA, 25 bp, Homo sapien
tttacatgaatgtttaaaacgatat

SEQ ID NO: 37997 - DNA, 25 bp, Homo sapien
aacctctctgcgagtctgggtatcg

SEQ ID NO: 37998 - DNA, 25 bp, Homo sapien
cgatacccagactcgcagagaggtt

SEQ ID NO: 37999 - DNA, 25 bp, Homo sapien
aggcggcgggcacgcgagaccgcgc

SEQ ID NO: 38000 - DNA, 25 bp, Homo sapien
gcgcggtctcgcgtgcccgccgcct

SEQ ID NO: 38001 - DNA, 25 bp, Homo sapien
tcctcggtcgccggtgcgggtagtc

SEQ ID NO: 38002 - DNA, 25 bp, Homo sapien
gactacccgcaccggcgaccgagga

SEQ ID NO: 38003 - DNA, 25 bp, Homo sapien
tcaggtcgtcgggtacgccggcaca

SEQ ID NO: 38004 - DNA, 25 bp, Homo sapien
tgtgccggcgtacccgacgacctga

SEQ ID NO: 38005 - DNA, 25 bp, Homo sapien
aggggagcgcgagcgggtctgagcc

SEQ ID NO: 38006 - DNA, 25 bp, Homo sapien
ggctcagacccgctcgcgctcccct

SEQ ID NO: 38007 - DNA, 25 bp, Homo sapien
gtgtcgacagagaccctattacata

SEQ ID NO: 38008 - DNA, 25 bp, Homo sapien
tatgtaatagggtctctgtcgacac

SEQ ID NO: 38009 - DNA, 25 bp, Homo sapien
ttatttttgacctttctaacttctc

SEQ ID NO: 38010 - DNA, 25 bp, Homo sapien
gagaagttagaaaggtcaaaaataa

SEQ ID NO: 38011 - DNA, 25 bp, Homo sapien
tagttaatattcaaaatactctatg

SEQ ID NO: 38012 - DNA, 25 bp, Homo sapien
catagagtattttgaatattaacta

SEQ ID NO: 38013 - DNA, 25 bp, Homo sapien
gtagttaatattcaaaatactctat

SEQ ID NO: 38014 - DNA, 25 bp, Homo sapien
atagagtattttgaatattaactac

SEQ ID NO: 38015 - DNA, 25 bp, Homo sapien
tgtagttaatattcaaaatactcta

SEQ ID NO: 38016 - DNA, 25 bp, Homo sapien
tagagtattttgaatattaactaca

SEQ ID NO: 38017 - DNA, 25 bp, Homo sapien
atacctcgcacacggaggcacacac

SEQ ID NO: 38018 - DNA, 25 bp, Homo sapien
gtgtgtgcctccgtgtgcgaggtat

SEQ ID NO: 38019 - DNA, 25 bp, Homo sapien
ctgactgtcccgaaggtctacctgt

SEQ ID NO: 38020 - DNA, 25 bp, Homo sapien
acaggtagaccttcgggacagtcag

SEQ ID NO: 38021 - DNA, 25 bp, Homo sapien
accctcaccccgtctcctctgtcct

SEQ ID NO: 38022 - DNA, 25 bp, Homo sapien
aggacagaggagacggggtgagggt

SEQ ID NO: 38023 - DNA, 25 bp, Homo sapien
gggccgtcggtctggagcgggtgcg

SEQ ID NO: 38024 - DNA, 25 bp, Homo sapien
cgcacccgctccagaccgacggccc

SEQ ID NO: 38025 - DNA, 25 bp, Homo sapien
gagacagaggtcttagctcctgcct

SEQ ID NO: 38026 - DNA, 25 bp, Homo sapien
aggcaggagctaagacctctgtctc

SEQ ID NO: 38027 - DNA, 25 bp, Homo sapien
gggacacctgaaacacatcctggac

SEQ ID NO: 38028 - DNA, 25 bp, Homo sapien
gtccaggatgtgtttcaggtgtccc

SEQ ID NO: 38029 - DNA, 25 bp, Homo sapien
gggttatgtatatcgccaagggtac

SEQ ID NO: 38030 - DNA, 25 bp, Homo sapien
gtacccttggcgatatacataaccc

SEQ ID NO: 38031 - DNA, 25 bp, Homo sapien
ttcataatgactattaaaagtgtcc

SEQ ID NO: 38032 - DNA, 25 bp, Homo sapien
ggacacttttaatagtcattatgaa

SEQ ID NO: 38033 - DNA, 25 bp, Homo sapien
acggacattcataatgactattaaa

SEQ ID NO: 38034 - DNA, 25 bp, Homo sapien
tttaatagtcattatgaatgtccgt

SEQ ID NO: 38035 - DNA, 25 bp, Homo sapien
cacggtccatctccgccgacagggt

SEQ ID NO: 38036 - DNA, 25 bp, Homo sapien
accctgtcggcggagatggaccgtg

SEQ ID NO: 38037 - DNA, 25 bp, Homo sapien
cggtgccaccatagctccgactcgc

SEQ ID NO: 38038 - DNA, 25 bp, Homo sapien
gcgagtcggagctatggtggcaccg

SEQ ID NO: 38039 - DNA, 25 bp, Homo sapien
gacctcttgtccacggtaacggact

SEQ ID NO: 38040 - DNA, 25 bp, Homo sapien
agtccgttaccgtggacaagaggtc

SEQ ID NO: 38041 - DNA, 25 bp, Homo sapien
ggagatcgtggggtcgggacacagg

SEQ ID NO: 38042 - DNA, 25 bp, Homo sapien
cctgtgtcccgaccccacgatctcc

SEQ ID NO: 38043 - DNA, 25 bp, Homo sapien
gtacacaaggtgttttagtagagac

SEQ ID NO: 38044 - DNA, 25 bp, Homo sapien
gtctctactaaaacaccttgtgtac

SEQ ID NO: 38045 - DNA, 25 bp, Homo sapien
aaagtaagaaaagagatacgacgta

SEQ ID NO: 38046 - DNA, 25 bp, Homo sapien
tacgtcgtatctcttttcttacttt

SEQ ID NO: 38047 - DNA, 25 bp, Homo sapien
cctgcggatggagtccgtaggccct

SEQ ID NO: 38048 - DNA, 25 bp, Homo sapien
agggcctacggactccatccgcagg

SEQ ID NO: 38049 - DNA, 25 bp, Homo sapien
gtccttccactgagccgaccgtagg

SEQ ID NO: 38050 - DNA, 25 bp, Homo sapien
cctacggtcggctcagtggaaggac

SEQ ID NO: 38051 - DNA, 25 bp, Homo sapien
ggagaacgagagagtttccgaaagt

SEQ ID NO: 38052 - DNA, 25 bp, Homo sapien
actttcggaaactctctcgttctcc

SEQ ID NO: 38053 - DNA, 25 bp, Homo sapien
gaagactgaacaagcaccccttggt

SEQ ID NO: 38054 - DNA, 25 bp, Homo sapien
accaaggggtgcttgttcagtcttc

SEQ ID NO: 38055 - DNA, 25 bp, Homo sapien
cgagagggaaacatctcgggagtct

SEQ ID NO: 38056 - DNA, 25 bp, Homo sapien
agactcccgagatgtttccctctcg

SEQ ID NO: 38057 - DNA, 25 bp, Homo sapien
gtttattcctacttaagtgtattct

SEQ ID NO: 38058 - DNA, 25 bp, Homo sapien
agaatacacttaagtaggaataaac

SEQ ID NO: 38059 - DNA, 25 bp, Homo sapien
gacgaggacctctcgtttcagggta

SEQ ID NO: 38060 - DNA, 25 bp, Homo sapien
taccctgaaacgagaggtcctcgtc

SEQ ID NO: 38061 - DNA, 25 bp, Homo sapien
gggatccatcgaaaaccgagtcttt

SEQ ID NO: 38062 - DNA, 25 bp, Homo sapien
aaagactcggttttcgatggatccc

SEQ ID NO: 38063 - DNA, 25 bp, Homo sapien
cgacccacgacggaagaccggagac

SEQ ID NO: 38064 - DNA, 25 bp, Homo sapien
gtctccggtcttccgtcgtgggtcg

SEQ ID NO: 38065 - DNA, 25 bp, Homo sapien
aattcacatgatagtagatacttaa

SEQ ID NO: 38066 - DNA, 25 bp, Homo sapien
ttaagtatctactatcatgtgaatt

SEQ ID NO: 38067 - DNA, 25 bp, Homo sapien
tcttgtcgagtcaacggttcaatac

SEQ ID NO: 38068 - DNA, 25 bp, Homo sapien
gtattgaaccgttgactcgacaaga

SEQ ID NO: 38069 - DNA, 25 bp, Homo sapien
gtcggtgtctgttcattcactggtc

SEQ ID NO: 38070 - DNA, 25 bp, Homo sapien
gaccagtgaatgaacagacaccgac

SEQ ID NO: 38071 - DNA, 25 bp, Homo sapien
gacttaaacggtatcttcagttggt

SEQ ID NO: 38072 - DNA, 25 bp, Homo sapien
accaactgaagataccgtttaagtc

SEQ ID NO: 38073 - DNA, 25 bp, Homo sapien
gaagtacttttctcacagccctcgg

SEQ ID NO: 38074 - DNA, 25 bp, Homo sapien
ccgagggctgtgagaaaagtacttc

SEQ ID NO: 38075 - DNA, 25 bp, Homo sapien
ttcgttactacacaaaacagaccct

SEQ ID NO: 38076 - DNA, 25 bp, Homo sapien
agggtctgttttgtgtagtaacgaa

SEQ ID NO: 38077 - DNA, 25 bp, Homo sapien
cttcggaccgtcaggattcgactta

SEQ ID NO: 38078 - DNA, 25 bp, Homo sapien
taagtcgaatcctgacggtccgaag

SEQ ID NO: 38079 - DNA, 25 bp, Homo sapien
gacctctgcgtcggccctccttctc

SEQ ID NO: 38080 - DNA, 25 bp, Homo sapien
gagaaggagggccgacgcagaggtc

SEQ ID NO: 38081 - DNA, 25 bp, Homo sapien
tcggtgcctcctctttcccgccggc

SEQ ID NO: 38082 - DNA, 25 bp, Homo sapien
gccggcgggaaagaggaggcaccga

SEQ ID NO: 38083 - DNA, 25 bp, Homo sapien
gccgcccggcggtcgtcaccggtgg

SEQ ID NO: 38084 - DNA, 25 bp, Homo sapien
ccaccggtgacgaccgccgggcggc

SEQ ID NO: 38085 - DNA, 25 bp, Homo sapien
ccggacaccgtcacgggccgtcgta

SEQ ID NO: 38086 - DNA, 25 bp, Homo sapien
tacgacggcccgtgacggtgtccgg

SEQ ID NO: 38087 - DNA, 25 bp, Homo sapien
tgacacacggggctccgaggtcggg

SEQ ID NO: 38088 - DNA, 25 bp, Homo sapien
cccgacctcggagccccgtgtgtca

SEQ ID NO: 38089 - DNA, 25 bp, Homo sapien
tactgttgtgacatacctacctagt

SEQ ID NO: 38090 - DNA, 25 bp, Homo sapien
actaggtaggtatgtcacaacagta

SEQ ID NO: 38091 - DNA, 25 bp, Homo sapien
ctaaatatcttaccaaaactatact

SEQ ID NO: 38092 - DNA, 25 bp, Homo sapien
agtatagttttggtaagatatttag

SEQ ID NO: 38093 - DNA, 25 bp, Homo sapien
gacaggagcggaaccccatttcctg

SEQ ID NO: 38094 - DNA, 25 bp, Homo sapien
caggaaatggggttccgctcctgtc

SEQ ID NO: 38095 - DNA, 25 bp, Homo sapien
ctccgactgtccgacgggacatggg

SEQ ID NO: 38096 - DNA, 25 bp, Homo sapien
cccatgtcccgtcggacagtcggag

SEQ ID NO: 38097 - DNA, 25 bp, Homo sapien
tcaaatccaccttgtgaccacgaat

SEQ ID NO: 38098 - DNA, 25 bp, Homo sapien
attcgtggtcacaaggtggatttga

SEQ ID NO: 38099 - DNA, 25 bp, Homo sapien
aagttattataaaccattatgaagt

SEQ ID NO: 38100 - DNA, 25 bp, Homo sapien
acttcataatggtttataataactt

SEQ ID NO: 38101 - DNA, 25 bp, Homo sapien
gaagttattataaaccattatgaag

SEQ ID NO: 38102 - DNA, 25 bp, Homo sapien
cttcataatggtttataataacttc

SEQ ID NO: 38103 - DNA, 25 bp, Homo sapien
agttattataaaccattatgaagtc

SEQ ID NO: 38104 - DNA, 25 bp, Homo sapien
gacttcataatggtttataataact

SEQ ID NO: 38105 - DNA, 25 bp, Homo sapien
gcggcccctgagtgtctggcccttg

SEQ ID NO: 38106 - DNA, 25 bp, Homo sapien
caagggccagacactcaggggccgc

SEQ ID NO: 38107 - DNA, 25 bp, Homo sapien
agacgtatcgtacctcgtggtttcg

SEQ ID NO: 38108 - DNA, 25 bp, Homo sapien
cgaaaccacgaggtacgatacgtct

SEQ ID NO: 38109 - DNA, 25 bp, Homo sapien
cccgtcgtctgtcgtaattattccc

SEQ ID NO: 38110 - DNA, 25 bp, Homo sapien
gggaataattacgacagacgacggg

SEQ ID NO: 38111 - DNA, 25 bp, Homo sapien
gggtcgaggtgagccctgcccggtc

SEQ ID NO: 38112 - DNA, 25 bp, Homo sapien
gaccgggcagggctcacctcgaccc

SEQ ID NO: 38113 - DNA, 25 bp, Homo sapien
ctaacaccaagaaataatctctcat

SEQ ID NO: 38114 - DNA, 25 bp, Homo sapien
atgagagattatttcttggtgttag

SEQ ID NO: 38115 - DNA, 25 bp, Homo sapien
ggatggcgacgaaacctgtcccgaa

SEQ ID NO: 38116 - DNA, 25 bp, Homo sapien
ttcgggacaggtttcgtcgccatcc

SEQ ID NO: 38117 - DNA, 25 bp, Homo sapien
aacttctcaaacctaaaaggagatc

SEQ ID NO: 38118 - DNA, 25 bp, Homo sapien
gatctccttttaggtttgagaagtt

SEQ ID NO: 38119 - DNA, 25 bp, Homo sapien
ggtagcgaaggcgttcggacgtcgg

SEQ ID NO: 38120 - DNA, 25 bp, Homo sapien
ccgacgtccgaacgccttcgctacc

SEQ ID NO: 38121 - DNA, 25 bp, Homo sapien
ggttgaggatgtcagcgataatggg

SEQ ID NO: 38122 - DNA, 25 bp, Homo sapien
cccattatcgctgacatcctcaacc

SEQ ID NO: 38123 - DNA, 25 bp, Homo sapien
tgacatttttcaggatggttatcat

SEQ ID NO: 38124 - DNA, 25 bp, Homo sapien
atgataaccatcctgaaaaatgtca

SEQ ID NO: 38125 - DNA, 25 bp, Homo sapien
gaggtcagaacacccctcggtaagg

SEQ ID NO: 38126 - DNA, 25 bp, Homo sapien
ccttaccgaggggtgttctgacctc

SEQ ID NO: 38127 - DNA, 25 bp, Homo sapien
gcccccgaagtgggacgacctcgtg

SEQ ID NO: 38128 - DNA, 25 bp, Homo sapien
cacgaggtcgtcccacttcgggggc

SEQ ID NO: 38129 - DNA, 25 bp, Homo sapien
gcacaggcgtagacgggcggcccgc

SEQ ID NO: 38130 - DNA, 25 bp, Homo sapien
gcgggccgcccgtctacgcctgtgc

SEQ ID NO: 38131 - DNA, 25 bp, Homo sapien
cactcagtctgaggtactttgtgta

SEQ ID NO: 38132 - DNA, 25 bp, Homo sapien
tacacaaagtacctcagactgagtg

SEQ ID NO: 38133 - DNA, 25 bp, Homo sapien
ctgtgacagactgggaggtcacgac

SEQ ID NO: 38134 - DNA, 25 bp, Homo sapien
gtcgtgacctcccagtctgtcacag

SEQ ID NO: 38135 - DNA, 25 bp, Homo sapien
gggcgggttccctggctctcccgct

SEQ ID NO: 38136 - DNA, 25 bp, Homo sapien
agcgggagagccagggaacccgccc

SEQ ID NO: 38137 - DNA, 25 bp, Homo sapien
aatgggtgtcataaagagtttctag

SEQ ID NO: 38138 - DNA, 25 bp, Homo sapien
ctagaaactctttatgacacccatt

SEQ ID NO: 38139 - DNA, 25 bp, Homo sapien
ttgcggttccgagattcaccgggac

SEQ ID NO: 38140 - DNA, 25 bp, Homo sapien
gtcccggtgaatctcggaaccgcaa

SEQ ID NO: 38141 - DNA, 25 bp, Homo sapien
gggaacgggaggaccttcgtcagta

SEQ ID NO: 38142 - DNA, 25 bp, Homo sapien
tactgacgaaggtcctcccgttccc

SEQ ID NO: 38143 - DNA, 25 bp, Homo sapien
tccgatgaccgtgtgggcagtccat

SEQ ID NO: 38144 - DNA, 25 bp, Homo sapien
atggactgcccacacggtcatcgga

SEQ ID NO: 38145 - DNA, 25 bp, Homo sapien
tggtctacgggtgttccgactacgg

SEQ ID NO: 38146 - DNA, 25 bp, Homo sapien
ccgtagtcggaacacccgtagacca

SEQ ID NO: 38147 - DNA, 25 bp, Homo sapien
ttaagacgatagtgtcttgaggtgg

SEQ ID NO: 38148 - DNA, 25 bp, Homo sapien
ccacctcaagacactatcgtcttaa

SEQ ID NO: 38149 - DNA, 25 bp, Homo sapien
ccgtctatggtgtcagcgtttgggt

SEQ ID NO: 38150 - DNA, 25 bp, Homo sapien
acccaaacgctgacaccatagacgg

SEQ ID NO: 38151 - DNA, 25 bp, Homo sapien
tgacatacttagacatcgtacttta

SEQ ID NO: 38152 - DNA, 25 bp, Homo sapien
taaagtacgatgtctaagtatgtca

SEQ ID NO: 38153 - DNA, 25 bp, Homo sapien
ggtaatgtacgctcgaattaaaaaa

SEQ ID NO: 38154 - DNA, 25 bp, Homo sapien
ttttttaattcgagcgtacattacc

SEQ ID NO: 38155 - DNA, 25 bp, Homo sapien
aaaatttctcacactacaccggtcg

SEQ ID NO: 38156 - DNA, 25 bp, Homo sapien
cgaccggtgtagtgtgagaaatttt

SEQ ID NO: 38157 - DNA, 25 bp, Homo sapien
atgacatctgtaactggaagtaaac

SEQ ID NO: 38158 - DNA, 25 bp, Homo sapien
gtttacttccagttacagatgtcat

SEQ ID NO: 38159 - DNA, 25 bp, Homo sapien
atactgaagactaactatagtttag

SEQ ID NO: 38160 - DNA, 25 bp, Homo sapien
ctaaactatagttagtcttcagtat

SEQ ID NO: 38161 - DNA, 25 bp, Homo sapien
atactaatcggagtctagatgtcgt

SEQ ID NO: 38162 - DNA, 25 bp, Homo sapien
acgacatctagactccgattagtat

SEQ ID NO: 38163 - DNA, 25 bp, Homo sapien
gaaaataatggatttacactcgaga

SEQ ID NO: 38164 - DNA, 25 bp, Homo sapien
tctcgagtgtaaatccattattttc

SEQ ID NO: 38165 - DNA, 25 bp, Homo sapien
tgttttaatgattcaactcaccttg

SEQ ID NO: 38166 - DNA, 25 bp, Homo sapien
caaggtgagttgaatcattaaaaca

SEQ ID NO: 38167 - DNA, 25 bp, Homo sapien
ggtctcgcgcgagggtcgttggcgc

SEQ ID NO: 38168 - DNA, 25 bp, Homo sapien
gcgccaacgaccctcgcgcgagacc

SEQ ID NO: 38169 - DNA, 25 bp, Homo sapien
gcacccgcagcctttaggagtcttt

SEQ ID NO: 38170 - DNA, 25 bp, Homo sapien
aaagactcctaaaggctgcgggtgc

SEQ ID NO: 38171 - DNA, 25 bp, Homo sapien
taacatgctagtttaaaaaattcgt

SEQ ID NO: 38172 - DNA, 25 bp, Homo sapien
acgaattttttaaactagcatgtta

SEQ ID NO: 38173 - DNA, 25 bp, Homo sapien
cagataacatgctagtttaaaaaat

SEQ ID NO: 38174 - DNA, 25 bp, Homo sapien
attttttaaactagcatgttatctg

SEQ ID NO: 38175 - DNA, 25 bp, Homo sapien
aacatcagataacatgctagtttaa

SEQ ID NO: 38176 - DNA, 25 bp, Homo sapien
ttaaactagcatgttatctgatgtt

SEQ ID NO: 38177 - DNA, 25 bp, Homo sapien
gtgcaccgcccctcggccgacgacg

SEQ ID NO: 38178 - DNA, 25 bp, Homo sapien
cgtcgtcggccgaggggcggtgcac

SEQ ID NO: 38179 - DNA, 25 bp, Homo sapien
cgtgcaccgcccctcggccgacgac

SEQ ID NO: 38180 - DNA, 25 bp, Homo sapien
gtcgtcggccgaggggcggtgcacg

SEQ ID NO: 38181 - DNA, 25 bp, Homo sapien
ggccgacgacgggaccagcggaggc

SEQ ID NO: 38182 - DNA, 25 bp, Homo sapien
gcctccgctggtcccgtcgtcggcc

SEQ ID NO: 38183 - DNA, 25 bp, Homo sapien
agcataaacaggagtattggaacag

SEQ ID NO: 38184 - DNA, 25 bp, Homo sapien
ctgttccaatactcctgtttatgct

SEQ ID NO: 38185 - DNA, 25 bp, Homo sapien
taccgggtttggttgaagtacagga

SEQ ID NO: 38186 - DNA, 25 bp, Homo sapien
tcctgtacttcaaccaaacccggta

SEQ ID NO: 38187 - DNA, 25 bp, Homo sapien
gctcagaccggccgtacccctcgtc

SEQ ID NO: 38188 - DNA, 25 bp, Homo sapien
gacgaggggtacggccggtctgagc

SEQ ID NO: 38189 - DNA, 25 bp, Homo sapien
acccgataaaccctcgctcagtagt

SEQ ID NO: 38190 - DNA, 25 bp, Homo sapien
actactgagcgagggtttatcgggt

SEQ ID NO: 38191 - DNA, 25 bp, Homo sapien
gtcatgacacccctacgtcgtttac

SEQ ID NO: 38192 - DNA, 25 bp, Homo sapien
gtaaacgacgtaggggtgtcatgac

SEQ ID NO: 38193 - DNA, 25 bp, Homo sapien
gagcagtttgctactccaagcccag

SEQ ID NO: 38194 - DNA, 25 bp, Homo sapien
ctgggcttggagtagcaaactgctc

SEQ ID NO: 38195 - DNA, 25 bp, Homo sapien
agactatattccagtttaaaaccat

SEQ ID NO: 38196 - DNA, 25 bp, Homo sapien
atggttttaaactggaatatagtct

SEQ ID NO: 38197 - DNA, 25 bp, Homo sapien
atttcgaaatgtagagactttaaaa

SEQ ID NO: 38198 - DNA, 25 bp, Homo sapien
ttttaaagtctctacatttcgaaat

SEQ ID NO: 38199 - DNA, 25 bp, Homo sapien
cccaggaccagtcgtccggccggta

SEQ ID NO: 38200 - DNA, 25 bp, Homo sapien
taccggccggacgactggtcctggg

SEQ ID NO: 38201 - DNA, 25 bp, Homo sapien
gggatgtaagagtgaacgatgaaac

SEQ ID NO: 38202 - DNA, 25 bp, Homo sapien
gtttcatcgttcactcttacatccc

SEQ ID NO: 38203 - DNA, 25 bp, Homo sapien
ccgaagacacgaggttgccgggaca

SEQ ID NO: 38204 - DNA, 25 bp, Homo sapien
tgtcccggcaacctcgtgtcttcgg

SEQ ID NO: 38205 - DNA, 25 bp, Homo sapien
cagagaggtgtcgcgtccgacctcc

SEQ ID NO: 38206 - DNA, 25 bp, Homo sapien
ggaggtcggacgcgacacctctctg

SEQ ID NO: 38207 - DNA, 25 bp, Homo sapien
ttctcgactcttaagtagaactgac

SEQ ID NO: 38208 - DNA, 25 bp, Homo sapien
gtcagttctacttaagagtcgagaa

SEQ ID NO: 38209 - DNA, 25 bp, Homo sapien
tgactttagcggagcgtctgtgtag

SEQ ID NO: 38210 - DNA, 25 bp, Homo sapien
ctacacagacgctccgctaaagtca

SEQ ID NO: 38211 - DNA, 25 bp, Homo sapien
cggtgtccggcggccggagacgaac

SEQ ID NO: 38212 - DNA, 25 bp, Homo sapien
gttcgtctccggccgccggacaccg

SEQ ID NO: 38213 - DNA, 25 bp, Homo sapien
cttattattgacagtatcttcaatt

SEQ ID NO: 38214 - DNA, 25 bp, Homo sapien
aattgaagatactgtcaataataag

SEQ ID NO: 38215 - DNA, 25 bp, Homo sapien
ttaacctctattacactggaacaag

SEQ ID NO: 38216 - DNA, 25 bp, Homo sapien
cttgttccagtgtaatagaggttaa

SEQ ID NO: 38217 - DNA, 25 bp, Homo sapien
cttctcccgaagtgtggggtactac

SEQ ID NO: 38218 - DNA, 25 bp, Homo sapien
gtagtaccccacacttcgggagaag

SEQ ID NO: 38219 - DNA, 25 bp, Homo sapien
actcttcaacttgtagatcattata

SEQ ID NO: 38220 - DNA, 25 bp, Homo sapien
tataatgatctacaagttgaagagt

SEQ ID NO: 38221 - DNA, 25 bp, Homo sapien
tggttcaaagaacattactcaaacg

SEQ ID NO: 38222 - DNA, 25 bp, Homo sapien
cgtttgagtaatgttctttgaacca

SEQ ID NO: 38223 - DNA, 25 bp, Homo sapien
ggtcccacacaagattatgcagtcg

SEQ ID NO: 38224 - DNA, 25 bp, Homo sapien
cgactgcataatcttgtgtgggacc

SEQ ID NO: 38225 - DNA, 25 bp, Homo sapien
gtataggtataacgcttctttgttt

SEQ ID NO: 38226 - DNA, 25 bp, Homo sapien
aaacaaagaagcgttatacctatac

SEQ ID NO: 38227 - DNA, 25 bp, Homo sapien
cccgaacgcgttccgggagacacga

SEQ ID NO: 38228 - DNA, 25 bp, Homo sapien
tcgtgtctcccggaacgcgttcggg

SEQ ID NO: 38229 - DNA, 25 bp, Homo sapien
agatttgtcttcgtcttaggtaaaa

SEQ ID NO: 38230 - DNA, 25 bp, Homo sapien
ttttacctaagacgaagacaaatct

SEQ ID NO: 38231 - DNA, 25 bp, Homo sapien
agttagagtgttgggtgcacgtcga

SEQ ID NO: 38232 - DNA, 25 bp, Homo sapien
tcgacgtgcacccaacactctaact

SEQ ID NO: 38233 - DNA, 25 bp, Homo sapien
gatccgccgttctttcgcggccgag

SEQ ID NO: 38234 - DNA, 25 bp, Homo sapien
ctcggccgcgaaagaacggcggatc

SEQ ID NO: 38235 - DNA, 25 bp, Homo sapien
ctgcactcaacgagcaagactgaag

SEQ ID NO: 38236 - DNA, 25 bp, Homo sapien
cttcagtcttgctcgttgagtgcag

SEQ ID NO: 38237 - DNA, 25 bp, Homo sapien
tcgtgttatcaagaatttaagtgat

SEQ ID NO: 38238 - DNA, 25 bp, Homo sapien
atcacttaaattcttgataacacga

SEQ ID NO: 38239 - DNA, 25 bp, Homo sapien
cacccacgggccaccctcggtggag

SEQ ID NO: 38240 - DNA, 25 bp, Homo sapien
ctccaccgagggtggcccgtgggtg

SEQ ID NO: 38241 - DNA, 25 bp, Homo sapien
tcccgacggccgctccacccgcgcc

SEQ ID NO: 38242 - DNA, 25 bp, Homo sapien
ggcgcgggtggagcggccgtcggga

SEQ ID NO: 38243 - DNA, 25 bp, Homo sapien
ctgctcgcgggccactcccactccc

SEQ ID NO: 38244 - DNA, 25 bp, Homo sapien
gggagtgggagtggcccgcgagcag

SEQ ID NO: 38245 - DNA, 25 bp, Homo sapien
acagaagtccacgagcgggaacggt

SEQ ID NO: 38246 - DNA, 25 bp, Homo sapien
accgttcccgctcgtggacttctgt

SEQ ID NO: 38247 - DNA, 25 bp, Homo sapien
gcggacagtactccaattcatcgtc

SEQ ID NO: 38248 - DNA, 25 bp, Homo sapien
gacgatgaattggagtactgtccgc

SEQ ID NO: 38249 - DNA, 25 bp, Homo sapien
tctcgacagtaatactagaaacact

SEQ ID NO: 38250 - DNA, 25 bp, Homo sapien
agtgtttctagtattactgtcgaga

SEQ ID NO: 38251 - DNA, 25 bp, Homo sapien
gactagtccttctaaaaattttaca

SEQ ID NO: 38252 - DNA, 25 bp, Homo sapien
tgtaaaatttttagaaggactagtc

SEQ ID NO: 38253 - DNA, 25 bp, Homo sapien
gccgccagcaggagaggcgccgtcg

SEQ ID NO: 38254 - DNA, 25 bp, Homo sapien
cgacggcgcctctcctgctggcggc

SEQ ID NO: 38255 - DNA, 25 bp, Homo sapien
acgacggcgggacggctcgcgggcg

SEQ ID NO: 38256 - DNA, 25 bp, Homo sapien
cgcccgcgagccgtcccgccgtcgt

SEQ ID NO: 38257 - DNA, 25 bp, Homo sapien
gccagcaggagaggcgccgtcgacg

SEQ ID NO: 38258 - DNA, 25 bp, Homo sapien
cgtcgacggcgcctctcctgctggc

SEQ ID NO: 38259 - DNA, 25 bp, Homo sapien
atagtatattgattcttttatccag

SEQ ID NO: 38260 - DNA, 25 bp, Homo sapien
ctggataaaagaatcaatatactat

SEQ ID NO: 38261 - DNA, 25 bp, Homo sapien
taactaacagtgatagtatattgat

SEQ ID NO: 38262 - DNA, 25 bp, Homo sapien
atcaatatactatcactgttagtta

SEQ ID NO: 38263 - DNA, 25 bp, Homo sapien
tcgacaagaccctctaatgtggtct

SEQ ID NO: 38264 - DNA, 25 bp, Homo sapien
agaccacattagagggtcttgtcga

SEQ ID NO: 38265 - DNA, 25 bp, Homo sapien
aggttggttcgtcaagaagtagtaa

SEQ ID NO: 38266 - DNA, 25 bp, Homo sapien
ttactacttcttgacgaaccaacct

SEQ ID NO: 38267 - DNA, 25 bp, Homo sapien
gaagaagtcttaatacggtataaaa

SEQ ID NO: 38268 - DNA, 25 bp, Homo sapien
ttttataccgtattaagacttcttc

SEQ ID NO: 38269 - DNA, 25 bp, Homo sapien
gtcctttggtctcctcttttccctg

SEQ ID NO: 38270 - DNA, 25 bp, Homo sapien
cagggaaaagaggagaccaaaggac

SEQ ID NO: 38271 - DNA, 25 bp, Homo sapien
aagtacactcagtctaaactgtaag

SEQ ID NO: 38272 - DNA, 25 bp, Homo sapien
cttacagtttagactgagtgtactt

SEQ ID NO: 38273 - DNA, 25 bp, Homo sapien
ctttttatattgaagtagtaagtgt

SEQ ID NO: 38274 - DNA, 25 bp, Homo sapien
acacttactacttcaatataaaaag

SEQ ID NO: 38275 - DNA, 25 bp, Homo sapien
tctgttcggcggtgttcctcaagaa

SEQ ID NO: 38276 - DNA, 25 bp, Homo sapien
ttcttgaggaacaccgccgaacaga

SEQ ID NO: 38277 - DNA, 25 bp, Homo sapien
agtctctcacccagattcaagaagt

SEQ ID NO: 38278 - DNA, 25 bp, Homo sapien
acttcttgaatctgggtgagagact

SEQ ID NO: 38279 - DNA, 25 bp, Homo sapien
gcccctgtcgcggggagaccgaccc

SEQ ID NO: 38280 - DNA, 25 bp, Homo sapien
gggtcggtctccccgcgacaggggc

SEQ ID NO: 38281 - DNA, 25 bp, Homo sapien
atcatattttagcatagaaattagg

SEQ ID NO: 38282 - DNA, 25 bp, Homo sapien
cctaatttctatgctaaaatatgat

SEQ ID NO: 38283 - DNA, 25 bp, Homo sapien
tatcatattttagcatagaaattag

SEQ ID NO: 38284 - DNA, 25 bp, Homo sapien
ctaatttctatgctaaaatatgata

SEQ ID NO: 38285 - DNA, 25 bp, Homo sapien
ctcgcacgaagaacttctatgagtc

SEQ ID NO: 38286 - DNA, 25 bp, Homo sapien
gactcatagaagttcttcgtgcgag

SEQ ID NO: 38287 - DNA, 25 bp, Homo sapien
ataaaaccatcagtatgtgtacttt

SEQ ID NO: 38288 - DNA, 25 bp, Homo sapien
aaagtacacatactgatggttttat

SEQ ID NO: 38289 - DNA, 25 bp, Homo sapien
ggcacagtccagatggtaacgacgt

SEQ ID NO: 38290 - DNA, 25 bp, Homo sapien
acgtcgttaccatctggactgtgcc

SEQ ID NO: 38291 - DNA, 25 bp, Homo sapien
acccctggggcctgacgattcgcgg

SEQ ID NO: 38292 - DNA, 25 bp, Homo sapien
ccgcgaatcgtcaggccccaggggt

SEQ ID NO: 38293 - DNA, 25 bp, Homo sapien
atgtgagattttccatttattacta

SEQ ID NO: 38294 - DNA, 25 bp, Homo sapien
tagtaataaatggaaaatctcacat

SEQ ID NO: 38295 - DNA, 25 bp, Homo sapien
ttactatccccgtcttttattgtaa

SEQ ID NO: 38296 - DNA, 25 bp, Homo sapien
ttacaataaaagacggggatagtaa

SEQ ID NO: 38297 - DNA, 25 bp, Homo sapien
ccggcctccactgcgaccggcgtcg

SEQ ID NO: 38298 - DNA, 25 bp, Homo sapien
cgacgccggtcgcagtggaggccgg

SEQ ID NO: 38299 - DNA, 25 bp, Homo sapien
tccgactaccgtacgtcgtacagag

SEQ ID NO: 38300 - DNA, 25 bp, Homo sapien
ctctgtacgacgtacggtagtcgga

SEQ ID NO: 38301 - DNA, 25 bp, Homo sapien
tctgagccacccgagccgacgtggt

SEQ ID NO: 38302 - DNA, 25 bp, Homo sapien
accacgtcggctcgggtggctcaga

SEQ ID NO: 38303 - DNA, 25 bp, Homo sapien
cgtcccagtaccctctcggacaccg

SEQ ID NO: 38304 - DNA, 25 bp, Homo sapien
cggtgtccgagagggtactgggacg

SEQ ID NO: 38305 - DNA, 25 bp, Homo sapien
cgcgaagggtcgtctgccgtgcctt

SEQ ID NO: 38306 - DNA, 25 bp, Homo sapien
aaggcacggcagacgacccttcgcg

SEQ ID NO: 38307 - DNA, 25 bp, Homo sapien
atgaaagatagtgagtttagtttaa

SEQ ID NO: 38308 - DNA, 25 bp, Homo sapien
ttaaactaaactcactatctttcat

SEQ ID NO: 38309 - DNA, 25 bp, Homo sapien
ggtccgaaacaccaacgatgatttt

SEQ ID NO: 38310 - DNA, 25 bp, Homo sapien
aaaatcatcgttggtgtttcggacc

SEQ ID NO: 38311 - DNA, 25 bp, Homo sapien
cgcggacgaggcccggacaggacgg

SEQ ID NO: 38312 - DNA, 25 bp, Homo sapien
ccgtcctgtccgggcctcgtccgcg

SEQ ID NO: 38313 - DNA, 25 bp, Homo sapien
ccgccgcggacgaggcccggacagg

SEQ ID NO: 38314 - DNA, 25 bp, Homo sapien
cctgtccgggcctcgtccgcggcgg

SEQ ID NO: 38315 - DNA, 25 bp, Homo sapien
cactggtcgacccattccatcgtac

SEQ ID NO: 38316 - DNA, 25 bp, Homo sapien
gtacgatggaatgggtcgaccagtg

SEQ ID NO: 38317 - DNA, 25 bp, Homo sapien
tgaaacaatgtttagtggtgtcaac

SEQ ID NO: 38318 - DNA, 25 bp, Homo sapien
gttgacaccactaaacattgtttca

SEQ ID NO: 38319 - DNA, 25 bp, Homo sapien
gtatatgacgatattgaagaagtag

SEQ ID NO: 38320 - DNA, 25 bp, Homo sapien
ctacttcttcaatatcgtcatatac

SEQ ID NO: 38321 - DNA, 25 bp, Homo sapien
cattcaccatgattatagacgacgg

SEQ ID NO: 38322 - DNA, 25 bp, Homo sapien
ccgtcgtctataatcatggtgaatg

SEQ ID NO: 38323 - DNA, 25 bp, Homo sapien
cacttataggttttgtatccagaaa

SEQ ID NO: 38324 - DNA, 25 bp, Homo sapien
tttctggatacaaaacctataagtg

SEQ ID NO: 38325 - DNA, 25 bp, Homo sapien
tcgacgatgagcgttgccaccgtcg

SEQ ID NO: 38326 - DNA, 25 bp, Homo sapien
cgacggtggcaacgctcatcgtcga

SEQ ID NO: 38327 - DNA, 25 bp, Homo sapien
atcttcctatctacggttttagagg

SEQ ID NO: 38328 - DNA, 25 bp, Homo sapien
cctctaaaaccgtagataggaagat

SEQ ID NO: 38329 - DNA, 25 bp, Homo sapien
gcggcaggggcacttctcgggtcgg

SEQ ID NO: 38330 - DNA, 25 bp, Homo sapien
ccgacccgagaagtgcccctgccgc

SEQ ID NO: 38331 - DNA, 25 bp, Homo sapien
tttctaggacaatgacctcaataaa

SEQ ID NO: 38332 - DNA, 25 bp, Homo sapien
tttattgaggtcattgtcctagaaa

SEQ ID NO: 38333 - DNA, 25 bp, Homo sapien
tccagggtccctatgggactcaacc

SEQ ID NO: 38334 - DNA, 25 bp, Homo sapien
ggttgagtcccatagggaccctgga

SEQ ID NO: 38335 - DNA, 25 bp, Homo sapien
cagagcagttccattgtcgggcggc

SEQ ID NO: 38336 - DNA, 25 bp, Homo sapien
gccgcccgacaatggaactgctctg

SEQ ID NO: 38337 - DNA, 25 bp, Homo sapien
acggcacaacgacaggcgacccggt

SEQ ID NO: 38338 - DNA, 25 bp, Homo sapien
accgggtcgcctgtcgttgtgccgt

SEQ ID NO: 38339 - DNA, 25 bp, Homo sapien
acggtggtctgtttaactccggcag

SEQ ID NO: 38340 - DNA, 25 bp, Homo sapien
ctgccggagttaaacagaccaccgt

SEQ ID NO: 38341 - DNA, 25 bp, Homo sapien
catctcgaacgtgcgtacgactcgt

SEQ ID NO: 38342 - DNA, 25 bp, Homo sapien
acgagtcgtacgcacgttcgagatg

SEQ ID NO: 38343 - DNA, 25 bp, Homo sapien
tcagttaataacgactgactcagac

SEQ ID NO: 38344 - DNA, 25 bp, Homo sapien
gtctgagtcagtcgttattaactga

SEQ ID NO: 38345 - DNA, 25 bp, Homo sapien
acaaaaagagtcgaactatacctat

SEQ ID NO: 38346 - DNA, 25 bp, Homo sapien
ataggtatagttcgactctttttgt

SEQ ID NO: 38347 - DNA, 25 bp, Homo sapien
aggtgcccctcagcccgacaccttc

SEQ ID NO: 38348 - DNA, 25 bp, Homo sapien
gaaggtgtcgggctgaggggcacct

SEQ ID NO: 38349 - DNA, 25 bp, Homo sapien
caggggtcctgacgaggacaaggac

SEQ ID NO: 38350 - DNA, 25 bp, Homo sapien
gtccttgtcctcgtcaggacccctg

SEQ ID NO: 38351 - DNA, 25 bp, Homo sapien
atactaccgttttcctgccactaaa

SEQ ID NO: 38352 - DNA, 25 bp, Homo sapien
tttagtggcaggaaaacggtagtat

SEQ ID NO: 38353 - DNA, 25 bp, Homo sapien
ccttgacacaccagggcaagacagt

SEQ ID NO: 38354 - DNA, 25 bp, Homo sapien
actgtcttgccctggtgtgtcaagg

SEQ ID NO: 38355 - DNA, 25 bp, Homo sapien
ttgttaagtaatctttcggtcccta

SEQ ID NO: 38356 - DNA, 25 bp, Homo sapien
tagggaccgaaagattacttaacaa

SEQ ID NO: 38357 - DNA, 25 bp, Homo sapien
gtcgaatcacgtacacagttcatgg

SEQ ID NO: 38358 - DNA, 25 bp, Homo sapien
ccatgaactgtgtacgtgattcgac

SEQ ID NO: 38359 - DNA, 25 bp, Homo sapien
cttattatttgttgactggtcttag

SEQ ID NO: 38360 - DNA, 25 bp, Homo sapien
ctaagaccagtcaacaaataataag

SEQ ID NO: 38361 - DNA, 25 bp, Homo sapien
tcatcgtgagacaagccgggaccgg

SEQ ID NO: 38362 - DNA, 25 bp, Homo sapien
ccggtcccggcttgtctcacgatga

SEQ ID NO: 38363 - DNA, 25 bp, Homo sapien
gaatcctctcttgtattcactttgt

SEQ ID NO: 38364 - DNA, 25 bp, Homo sapien
acaaagtgaatacaagagaggattc

SEQ ID NO: 38365 - DNA, 25 bp, Homo sapien
cgacgcccacgcgctcggcgcgcga

SEQ ID NO: 38366 - DNA, 25 bp, Homo sapien
tcgcgcgccgagcgcgtgggcgtcg

SEQ ID NO: 38367 - DNA, 25 bp, Homo sapien
tcgacgcccacgcgctcggcgcgcg

SEQ ID NO: 38368 - DNA, 25 bp, Homo sapien
cgcgcgccgagcgcgtgggcgtcga

SEQ ID NO: 38369 - DNA, 25 bp, Homo sapien
atcgacgcccacgcgctcggcgcgc

SEQ ID NO: 38370 - DNA, 25 bp, Homo sapien
gcgcgccgagcgcgtgggcgtcgat

SEQ ID NO: 38371 - DNA, 25 bp, Homo sapien
gagcgccggcggtggaggacacgca

SEQ ID NO: 38372 - DNA, 25 bp, Homo sapien
tgcgtgtcctccaccgccggcgctc

SEQ ID NO: 38373 - DNA, 25 bp, Homo sapien
tgtgacatagtgacgtcacgaagac

SEQ ID NO: 38374 - DNA, 25 bp, Homo sapien
gtcttcgtgacgtcactatgtcaca

SEQ ID NO: 38375 - DNA, 25 bp, Homo sapien
gcggtgtcggccgagactattcgcc

SEQ ID NO: 38376 - DNA, 25 bp, Homo sapien
ggcgaatagtctcggccgacaccgc

SEQ ID NO: 38377 - DNA, 25 bp, Homo sapien
ataaccatgagctatttactactag

SEQ ID NO: 38378 - DNA, 25 bp, Homo sapien
ctagtagtaaatagctcatggttat

SEQ ID NO: 38379 - DNA, 25 bp, Homo sapien
aacgaccacgggacgtgtccacacg

SEQ ID NO: 38380 - DNA, 25 bp, Homo sapien
cgtgtggacacgtcccgtggtcgtt

SEQ ID NO: 38381 - DNA, 25 bp, Homo sapien
ggagcccgaggatgactatgaaagt

SEQ ID NO: 38382 - DNA, 25 bp, Homo sapien
actttcatagtcatcctcgggctcc

SEQ ID NO: 38383 - DNA, 25 bp, Homo sapien
ggagtaagagccgtggttgggcgtc

SEQ ID NO: 38384 - DNA, 25 bp, Homo sapien
gacgcccaaccacggctcttactcc

SEQ ID NO: 38385 - DNA, 25 bp, Homo sapien
tctagtcttttgcagaattaaaatt

SEQ ID NO: 38386 - DNA, 25 bp, Homo sapien
aattttaattctgcaaaagactaga

SEQ ID NO: 38387 - DNA, 25 bp, Homo sapien
acggcgtcagggacttttactggtc

SEQ ID NO: 38388 - DNA, 25 bp, Homo sapien
gaccagtaaaagtccctgacgccgt

SEQ ID NO: 38389 - DNA, 25 bp, Homo sapien
cggtgcagggtgacgcccttcggga

SEQ ID NO: 38390 - DNA, 25 bp, Homo sapien
tcccgaagggcgtcaccctgcaccg

SEQ ID NO: 38391 - DNA, 25 bp, Homo sapien
ggaaaacatcactcggtcgtcccgc

SEQ ID NO: 38392 - DNA, 25 bp, Homo sapien
gcgggacgaccgagtgatgttttcc

SEQ ID NO: 38393 - DNA, 25 bp, Homo sapien
ccaaaggtcaggacttccaggatgt

SEQ ID NO: 38394 - DNA, 25 bp, Homo sapien
acatcctggaagtcctgacctttgg

SEQ ID NO: 38395 - DNA, 25 bp, Homo sapien
gggaagtgacacaatcgtaccgtga

SEQ ID NO: 38396 - DNA, 25 bp, Homo sapien
tcacggtacgattgtgtcacttccc

SEQ ID NO: 38397 - DNA, 25 bp, Homo sapien
actcgtcgtcgacatgtgtagtcgg

SEQ ID NO: 38398 - DNA, 25 bp, Homo sapien
ccgactacacatgtcgacgacgagt

SEQ ID NO: 38399 - DNA, 25 bp, Homo sapien
gtagtcagggtgcctcgtcggacgc

SEQ ID NO: 38400 - DNA, 25 bp, Homo sapien
gcgtccgacgaggcaccctgactac

SEQ ID NO: 38401 - DNA, 25 bp, Homo sapien
actgaagactgttgacaaaagaatg

SEQ ID NO: 38402 - DNA, 25 bp, Homo sapien
cattcttttgtcaacagtcttcagt

SEQ ID NO: 38403 - DNA, 25 bp, Homo sapien
cttcacaacaactactcccgaacgt

SEQ ID NO: 38404 - DNA, 25 bp, Homo sapien
acgttcgggagtagttgttgtgaag

SEQ ID NO: 38405 - DNA, 25 bp, Homo sapien
ccggtagggagcaggacatcgacac

SEQ ID NO: 38406 - DNA, 25 bp, Homo sapien
gtgtcgatgtcctgctccctaccgg

SEQ ID NO: 38407 - DNA, 25 bp, Homo sapien
ggacttagaaagataatttctgagt

SEQ ID NO: 38408 - DNA, 25 bp, Homo sapien
actcagaaattatctttctaagtcc

SEQ ID NO: 38409 - DNA, 25 bp, Homo sapien
gacaaagtgcctcgtgcccctgcgt

SEQ ID NO: 38410 - DNA, 25 bp, Homo sapien
acgcaggggcacgaggcactttgtc

SEQ ID NO: 38411 - DNA, 25 bp, Homo sapien
gggaggttccaggcgtctaagtcct

SEQ ID NO: 38412 - DNA, 25 bp, Homo sapien
aggacttagacgcctggaacctccc

SEQ ID NO: 38413 - DNA, 25 bp, Homo sapien
aggtgatccaagaaccgactttgga

SEQ ID NO: 38414 - DNA, 25 bp, Homo sapien
tccaaagtcggttcttggatcacct

SEQ ID NO: 38415 - DNA, 25 bp, Homo sapien
gatagacgggatgtgtaccaggcgt

SEQ ID NO: 38416 - DNA, 25 bp, Homo sapien
acgcctggtacacatcccgtctatc

SEQ ID NO: 38417 - DNA, 25 bp, Homo sapien
cccttcggcgtctggtcggacgacg

SEQ ID NO: 38418 - DNA, 25 bp, Homo sapien
cgtcgtccgaccagacgccgaaggg

SEQ ID NO: 38419 - DNA, 25 bp, Homo sapien
ccgtaactctacacgtacctctctg

SEQ ID NO: 38420 - DNA, 25 bp, Homo sapien
cagagaggtacgtgtagagttacgg

SEQ ID NO: 38421 - DNA, 25 bp, Homo sapien
taaaagagacaattcgcaataaaat

SEQ ID NO: 38422 - DNA, 25 bp, Homo sapien
attttattgcgaattgtctctttta

SEQ ID NO: 38423 - DNA, 25 bp, Homo sapien
tcttacacccgggacagtggtatgg

SEQ ID NO: 38424 - DNA, 25 bp, Homo sapien
ccataccactgtcccgggtgtaaga

SEQ ID NO: 38425 - DNA, 25 bp, Homo sapien
cggagccgcggagccatggggcgac

SEQ ID NO: 38426 - DNA, 25 bp, Homo sapien
gtcgccccatggctccgcggctccg

SEQ ID NO: 38427 - DNA, 25 bp, Homo sapien
tttcttcgaagatgagagaaggaga

SEQ ID NO: 38428 - DNA, 25 bp, Homo sapien
tctccttctctcatcttcgaagaaa

SEQ ID NO: 38429 - DNA, 25 bp, Homo sapien
aactttgtataaaaccatttcatat

SEQ ID NO: 38430 - DNA, 25 bp, Homo sapien
atatgaaatggttttatacaaagtt

SEQ ID NO: 38431 - DNA, 25 bp, Homo sapien
actccatattaaactttgtataaaa

SEQ ID NO: 38432 - DNA, 25 bp, Homo sapien
ttttatacaaagtttaatatggagt

SEQ ID NO: 38433 - DNA, 25 bp, Homo sapien
taacgattttaataactccatatta

SEQ ID NO: 38434 - DNA, 25 bp, Homo sapien
taatatggagttattaaaatcgtta

SEQ ID NO: 38435 - DNA, 25 bp, Homo sapien
ataacgattttaataactccatatt

SEQ ID NO: 38436 - DNA, 25 bp, Homo sapien
aatatggagttattaaaatcgttat

SEQ ID NO: 38437 - DNA, 25 bp, Homo sapien
tcctatttgctatcttgtaggtaag

SEQ ID NO: 38438 - DNA, 25 bp, Homo sapien
cttacctacaagatagcaaatagga

SEQ ID NO: 38439 - DNA, 25 bp, Homo sapien
acgattaagttataggaatctttgt

SEQ ID NO: 38440 - DNA, 25 bp, Homo sapien
acaaagattcctataacttaatcgt

SEQ ID NO: 38441 - DNA, 25 bp, Homo sapien
ccttcctccagtggtggggacgtgt

SEQ ID NO: 38442 - DNA, 25 bp, Homo sapien
acacgtccccaccactggaggaagg

SEQ ID NO: 38443 - DNA, 25 bp, Homo sapien
gtccttgtcatccagaagattttgt

SEQ ID NO: 38444 - DNA, 25 bp, Homo sapien
acaaaatcttctggatgacaaggac

SEQ ID NO: 38445 - DNA, 25 bp, Homo sapien
gtcgtggtgataaccttttattaat

SEQ ID NO: 38446 - DNA, 25 bp, Homo sapien
attaataaaaggttatcaccacgac

SEQ ID NO: 38447 - DNA, 25 bp, Homo sapien
cgctcgcggcttgccggcccccgag

SEQ ID NO: 38448 - DNA, 25 bp, Homo sapien
ctcgggggccggcaagccgcgagcg

SEQ ID NO: 38449 - DNA, 25 bp, Homo sapien
aagtgacaatagaggatagtgacag

SEQ ID NO: 38450 - DNA, 25 bp, Homo sapien
ctgtcactatcctctattgtcactt

SEQ ID NO: 38451 - DNA, 25 bp, Homo sapien
tcgcggtggagaggcacccagacct

SEQ ID NO: 38452 - DNA, 25 bp, Homo sapien
aggtctgggtgcctctccaccgcga

SEQ ID NO: 38453 - DNA, 25 bp, Homo sapien
gtccctccccgttttcggcggcaca

SEQ ID NO: 38454 - DNA, 25 bp, Homo sapien
tgtgccgccgaaaacggggagggac

SEQ ID NO: 38455 - DNA, 25 bp, Homo sapien
tctcttagagtattgattacaataa

SEQ ID NO: 38456 - DNA, 25 bp, Homo sapien
ttattgtaatcaatactctaagaga

SEQ ID NO: 38457 - DNA, 25 bp, Homo sapien
cgtcgtcaaccctctggtttttgag

SEQ ID NO: 38458 - DNA, 25 bp, Homo sapien
ctcaaaaaccagagggttgacgacg

SEQ ID NO: 38459 - DNA, 25 bp, Homo sapien
acgaaggggagcatcgggattacac

SEQ ID NO: 38460 - DNA, 25 bp, Homo sapien
gtgtaatcccgatgctccccttcgt

SEQ ID NO: 38461 - DNA, 25 bp, Homo sapien
actatatgtcgtatcaaaagaaacg

SEQ ID NO: 38462 - DNA, 25 bp, Homo sapien
cgtttcttttgatacgacatatagt

SEQ ID NO: 38463 - DNA, 25 bp, Homo sapien
acgcgtagaacggtttgtgctaaag

SEQ ID NO: 38464 - DNA, 25 bp, Homo sapien
ctttagcacaaaccgttctacgcgt

SEQ ID NO: 38465 - DNA, 25 bp, Homo sapien
gaaaatgattttatacgtgaaacta

SEQ ID NO: 38466 - DNA, 25 bp, Homo sapien
tagtttcacgtataaaatcattttc

SEQ ID NO: 38467 - DNA, 25 bp, Homo sapien
actcactccccagcggctccagcgg

SEQ ID NO: 38468 - DNA, 25 bp, Homo sapien
ccgctggagccgctggggagtgagt

SEQ ID NO: 38469 - DNA, 25 bp, Homo sapien
ttcaaatctctaaccccaggcagac

SEQ ID NO: 38470 - DNA, 25 bp, Homo sapien
gtctgcctggggttagagatttgaa

SEQ ID NO: 38471 - DNA, 25 bp, Homo sapien
gggtctgcgccgacgggacgagggc

SEQ ID NO: 38472 - DNA, 25 bp, Homo sapien
gccctcgtcccgtcggcgcagaccc

SEQ ID NO: 38473 - DNA, 25 bp, Homo sapien
tggacccagacaccctcgggaggtt

SEQ ID NO: 38474 - DNA, 25 bp, Homo sapien
aacctcccgagggtgtctgggtcca

SEQ ID NO: 38475 - DNA, 25 bp, Homo sapien
agcacgagtcggctcgaccctcatg

SEQ ID NO: 38476 - DNA, 25 bp, Homo sapien
catgagggtcgagccgactcgtgct

SEQ ID NO: 38477 - DNA, 25 bp, Homo sapien
gatcgccggccgatcgtcatgtccg

SEQ ID NO: 38478 - DNA, 25 bp, Homo sapien
cggacatgacgatcggccggcgatc

SEQ ID NO: 38479 - DNA, 25 bp, Homo sapien
cagaaaggggtatcgacaggtaacg

SEQ ID NO: 38480 - DNA, 25 bp, Homo sapien
cgttacctgtcgatacccctttctg

SEQ ID NO: 38481 - DNA, 25 bp, Homo sapien
tccttgtccttcttacctgtgaaca

SEQ ID NO: 38482 - DNA, 25 bp, Homo sapien
tgttcacaggtaagaaggacaagga

SEQ ID NO: 38483 - DNA, 25 bp, Homo sapien
cgacggcctccgtgaccgtgtacag

SEQ ID NO: 38484 - DNA, 25 bp, Homo sapien
ctgtacacggtcacggaggccgtcg

SEQ ID NO: 38485 - DNA, 25 bp, Homo sapien
tgatcatacttcctctccggattat

SEQ ID NO: 38486 - DNA, 25 bp, Homo sapien
ataatccggagaggaagtatgatca

SEQ ID NO: 38487 - DNA, 25 bp, Homo sapien
ggcgtcgaagcgtctcgggaccgcg

SEQ ID NO: 38488 - DNA, 25 bp, Homo sapien
cgcggtcccgagacgcttcgacgcc

SEQ ID NO: 38489 - DNA, 25 bp, Homo sapien
acgatatgactatgaagtgttccaa

SEQ ID NO: 38490 - DNA, 25 bp, Homo sapien
ttggaacacttcatagtcatatcgt

SEQ ID NO: 38491 - DNA, 25 bp, Homo sapien
tctcttccctcggtggagttgtctc

SEQ ID NO: 38492 - DNA, 25 bp, Homo sapien
gagacaactccaccgagggaagaga

SEQ ID NO: 38493 - DNA, 25 bp, Homo sapien
tcctgcggccccagggtacccgccg

SEQ ID NO: 38494 - DNA, 25 bp, Homo sapien
cggcgggtaccctggggccgcagga

SEQ ID NO: 38495 - DNA, 25 bp, Homo sapien
gagagcctcctgcggccccagggta

SEQ ID NO: 38496 - DNA, 25 bp, Homo sapien
taccctggggccgcaggaggctctc

SEQ ID NO: 38497 - DNA, 25 bp, Homo sapien
taacctcggcctcgactctttgtcg

SEQ ID NO: 38498 - DNA, 25 bp, Homo sapien
cgacaaagagtcgaggccgaggtta

SEQ ID NO: 38499 - DNA, 25 bp, Homo sapien
ctgggaggtcggacgcgtcgcccgt

SEQ ID NO: 38500 - DNA, 25 bp, Homo sapien
acgggcgacgcgtccgacctcccag

SEQ ID NO: 38501 - DNA, 25 bp, Homo sapien
ggtcgggtggtgtcgccgccctcgc

SEQ ID NO: 38502 - DNA, 25 bp, Homo sapien
gcgagggcggcgacaccacccgacc

SEQ ID NO: 38503 - DNA, 25 bp, Homo sapien
gtcggactgcgggaggcggcgccgc

SEQ ID NO: 38504 - DNA, 25 bp, Homo sapien
gcggcgccgcctcccgcagtccgac

SEQ ID NO: 38505 - DNA, 25 bp, Homo sapien
gggcgcgcgtcggactgcgggaggc

SEQ ID NO: 38506 - DNA, 25 bp, Homo sapien
gcctcccgcagtccgacgcgcgccc

SEQ ID NO: 38507 - DNA, 25 bp, Homo sapien
gtactcctaaacttcacttgacatg

SEQ ID NO: 38508 - DNA, 25 bp, Homo sapien
catgtcaagtgaagtttaggagtac

SEQ ID NO: 38509 - DNA, 25 bp, Homo sapien
gtgaccccgtccctgactgacccgg

SEQ ID NO: 38510 - DNA, 25 bp, Homo sapien
ccgggtcagtcagggacggggtcac

SEQ ID NO: 38511 - DNA, 25 bp, Homo sapien
agggtctttgtctcgtggcacgtct

SEQ ID NO: 38512 - DNA, 25 bp, Homo sapien
agacgtgccacgagacaaagaccct

SEQ ID NO: 38513 - DNA, 25 bp, Homo sapien
accgtcgggagtcacctaccgacag

SEQ ID NO: 38514 - DNA, 25 bp, Homo sapien
ctgtcggtaggtgactcccgacggt

SEQ ID NO: 38515 - DNA, 25 bp, Homo sapien
gcccgacaatttttgtcgagggagg

SEQ ID NO: 38516 - DNA, 25 bp, Homo sapien
cctccctcgacaaaaattgtcgggc

SEQ ID NO: 38517 - DNA, 25 bp, Homo sapien
tggttacgtgcgaaacatttcaacg

SEQ ID NO: 38518 - DNA, 25 bp, Homo sapien
cgttgaaatgtttcgcacgtaacca

SEQ ID NO: 38519 - DNA, 25 bp, Homo sapien
gtcctaactgtaacgtgactttgaa

SEQ ID NO: 38520 - DNA, 25 bp, Homo sapien
ttcaaagtcacgttacagttaggac

SEQ ID NO: 38521 - DNA, 25 bp, Homo sapien
gagtacatgttccaaatccaaaaac

SEQ ID NO: 38522 - DNA, 25 bp, Homo sapien
gtttttggatttggaacatgtactc

SEQ ID NO: 38523 - DNA, 25 bp, Homo sapien
tgcctatacgcacttatggtaatac

SEQ ID NO: 38524 - DNA, 25 bp, Homo sapien
gtattaccataagtgcgtataggca

SEQ ID NO: 38525 - DNA, 25 bp, Homo sapien
tcttatacgacaacacataaaacat

SEQ ID NO: 38526 - DNA, 25 bp, Homo sapien
atgttttatgtgttgtcgtataaga

SEQ ID NO: 38527 - DNA, 25 bp, Homo sapien
agtattcttcatttcaagttttaac

SEQ ID NO: 38528 - DNA, 25 bp, Homo sapien
gttaaaacttgaaatgaagaatact

SEQ ID NO: 38529 - DNA, 25 bp, Homo sapien
gaagagcatctctcgaagatatgtg

SEQ ID NO: 38530 - DNA, 25 bp, Homo sapien
cacatatcttcgagagatgctcttc

SEQ ID NO: 38531 - DNA, 25 bp, Homo sapien
ttataaatcgttttagtagtaaatg

SEQ ID NO: 38532 - DNA, 25 bp, Homo sapien
catttactactaaaacgatttataa

SEQ ID NO: 38533 - DNA, 25 bp, Homo sapien
gatcagaaacttacgtcttgggtct

SEQ ID NO: 38534 - DNA, 25 bp, Homo sapien
agacccaagacgtaagtttctgatc

SEQ ID NO: 38535 - DNA, 25 bp, Homo sapien
ggcaagacggcgccggcgccacagg

SEQ ID NO: 38536 - DNA, 25 bp, Homo sapien
cctgtggcgccggcgccgtcttgcc

SEQ ID NO: 38537 - DNA, 25 bp, Homo sapien
gacccggcaagacggcgccggcgcc

SEQ ID NO: 38538 - DNA, 25 bp, Homo sapien
ggcgccggcgccgtcttgccgggtc

SEQ ID NO: 38539 - DNA, 25 bp, Homo sapien
cccaggtccgacgaaagagccgtaa

SEQ ID NO: 38540 - DNA, 25 bp, Homo sapien
ttacggctctttcgtcggacctggg

SEQ ID NO: 38541 - DNA, 25 bp, Homo sapien
ggccgacggactcaggggtagcgtg

SEQ ID NO: 38542 - DNA, 25 bp, Homo sapien
cacgctacccctgagtccgtcggcc

SEQ ID NO: 38543 - DNA, 25 bp, Homo sapien
tcgacggcctcaaaatgcggtgtcc

SEQ ID NO: 38544 - DNA, 25 bp, Homo sapien
ggacaccgcattttgaggccgtcga

SEQ ID NO: 38545 - DNA, 25 bp, Homo sapien
gacctttgtggttccggagcctcag

SEQ ID NO: 38546 - DNA, 25 bp, Homo sapien
ctgaggctccggaaccacaaaggtc

SEQ ID NO: 38547 - DNA, 25 bp, Homo sapien
ccgtcggccacggcccttcggcctg

SEQ ID NO: 38548 - DNA, 25 bp, Homo sapien
caggccgaagggccgtggccgacgg

SEQ ID NO: 38549 - DNA, 25 bp, Homo sapien
gtaaaggagacgtaaggtattacat

SEQ ID NO: 38550 - DNA, 25 bp, Homo sapien
atgtaataccttacgtctcctttac

SEQ ID NO: 38551 - DNA, 25 bp, Homo sapien
agtaatactgaaggtggcagtcgtg

SEQ ID NO: 38552 - DNA, 25 bp, Homo sapien
cacgactgccaccttcagtattact

SEQ ID NO: 38553 - DNA, 25 bp, Homo sapien
actgcctaccgaaaaacattacacg

SEQ ID NO: 38554 - DNA, 25 bp, Homo sapien
cgtgtaatgtttttcggtaggcagt

SEQ ID NO: 38555 - DNA, 25 bp, Homo sapien
acgcgaaagccaccaaggtcaaggg

SEQ ID NO: 38556 - DNA, 25 bp, Homo sapien
cccttgaccttggtggctttcgcgt

SEQ ID NO: 38557 - DNA, 25 bp, Homo sapien
tccccggcgcgagcctgtggtcccc

SEQ ID NO: 38558 - DNA, 25 bp, Homo sapien
ggggaccacaggctcgcgccgggga

SEQ ID NO: 38559 - DNA, 25 bp, Homo sapien
cttccccggcgcgagcctgtggtcc

SEQ ID NO: 38560 - DNA, 25 bp, Homo sapien
ggaccacaggctcgcgccggggaag

SEQ ID NO: 38561 - DNA, 25 bp, Homo sapien
ccgacttactttgcgggactagttc

SEQ ID NO: 38562 - DNA, 25 bp, Homo sapien
gaactagtcccgcaaagtaagtcgg

SEQ ID NO: 38563 - DNA, 25 bp, Homo sapien
agacaaccttcattagaaactaaac

SEQ ID NO: 38564 - DNA, 25 bp, Homo sapien
gtttagtttctaatgaaggttgtct

SEQ ID NO: 38565 - DNA, 25 bp, Homo sapien
ggactcgtgcctgggtcctcttacg

SEQ ID NO: 38566 - DNA, 25 bp, Homo sapien
cgtaagaggacccaggcacgagtcc

SEQ ID NO: 38567 - DNA, 25 bp, Homo sapien
acacaacaacattggaggtcccggt

SEQ ID NO: 38568 - DNA, 25 bp, Homo sapien
accgggacctccaatgttgttgtgt

SEQ ID NO: 38569 - DNA, 25 bp, Homo sapien
cgccgaaggccctacgggcgtctcg

SEQ ID NO: 38570 - DNA, 25 bp, Homo sapien
cgagacgcccgtagggccttcggcg

SEQ ID NO: 38571 - DNA, 25 bp, Homo sapien
tatccgcgttggtgagacctgatct

SEQ ID NO: 38572 - DNA, 25 bp, Homo sapien
agatcaggtctcaccaacgcggata

SEQ ID NO: 38573 - DNA, 25 bp, Homo sapien
tgaggaaagcggcacgcaccacctc

SEQ ID NO: 38574 - DNA, 25 bp, Homo sapien
gaggtggtgcgtgccgctttcctca

SEQ ID NO: 38575 - DNA, 25 bp, Homo sapien
cagcgcgaagcccacgaccccagac

SEQ ID NO: 38576 - DNA, 25 bp, Homo sapien
gtctggggtcgtgggcttcgcgctg

SEQ ID NO: 38577 - DNA, 25 bp, Homo sapien
tgcgtttagggttgtctgtccgatt

SEQ ID NO: 38578 - DNA, 25 bp, Homo sapien
aatcggacagacaaccctaaacgca

SEQ ID NO: 38579 - DNA, 25 bp, Homo sapien
gcgacctccagggacttgggccgca

SEQ ID NO: 38580 - DNA, 25 bp, Homo sapien
tgcggcccaagtccctggaggtcgc

SEQ ID NO: 38581 - DNA, 25 bp, Homo sapien
ccccgtgcagttcctgctccacggt

SEQ ID NO: 38582 - DNA, 25 bp, Homo sapien
accgtggagcaggaactgcacgggg

SEQ ID NO: 38583 - DNA, 25 bp, Homo sapien
gtcggggagctcgaccgaggtcccg

SEQ ID NO: 38584 - DNA, 25 bp, Homo sapien
cgggacctcggtcgagctccccgac

SEQ ID NO: 38585 - DNA, 25 bp, Homo sapien
gagtcggggagctcgaccgaggtcc

SEQ ID NO: 38586 - DNA, 25 bp, Homo sapien
ggacctcggtcgagctccccgactc

SEQ ID NO: 38587 - DNA, 25 bp, Homo sapien
tccctaggccactgggactccgggg

SEQ ID NO: 38588 - DNA, 25 bp, Homo sapien
ccccggagtcccagtggcctaggga

SEQ ID NO: 38589 - DNA, 25 bp, Homo sapien
ctgtccctacaaccccccgagactg

SEQ ID NO: 38590 - DNA, 25 bp, Homo sapien
cagtctcggggggttgtagggacag

SEQ ID NO: 38591 - DNA, 25 bp, Homo sapien
gatacctgaacttggtctccgttac

SEQ ID NO: 38592 - DNA, 25 bp, Homo sapien
gtaacggagaccaagttcaggtatc

SEQ ID NO: 38593 - DNA, 25 bp, Homo sapien
tcgccggcccggctggagcgggctg

SEQ ID NO: 38594 - DNA, 25 bp, Homo sapien
cagcccgctccagccgggccggcga

SEQ ID NO: 38595 - DNA, 25 bp, Homo sapien
gtgggggcggtcgacgggcctcgga

SEQ ID NO: 38596 - DNA, 25 bp, Homo sapien
tccgaggcccgtcgaccgcccccac

SEQ ID NO: 38597 - DNA, 25 bp, Homo sapien
tataagaaacagattggaaagtaca

SEQ ID NO: 38598 - DNA, 25 bp, Homo sapien
tgtactttccaatctgtttcttata

SEQ ID NO: 38599 - DNA, 25 bp, Homo sapien
aagggattaggtatgtctggtatgt

SEQ ID NO: 38600 - DNA, 25 bp, Homo sapien
acataccagacatacctaatccctt

SEQ ID NO: 38601 - DNA, 25 bp, Homo sapien
gtcgtttcaggttagacagaagtat

SEQ ID NO: 38602 - DNA, 25 bp, Homo sapien
atacttctgtctaacctgaaacgac

SEQ ID NO: 38603 - DNA, 25 bp, Homo sapien
actactccacgactcgacaaaccgg

SEQ ID NO: 38604 - DNA, 25 bp, Homo sapien
ccggtttgtcgagtcgtggagtagt

SEQ ID NO: 38605 - DNA, 25 bp, Homo sapien
ggcctcgcgggcgcgcctggggctc

SEQ ID NO: 38606 - DNA, 25 bp, Homo sapien
gagccccaggcgcgcccgcgaggcc

SEQ ID NO: 38607 - DNA, 25 bp, Homo sapien
gcgggcgcgcctggggctcggggta

SEQ ID NO: 38608 - DNA, 25 bp, Homo sapien
taccccgagccccaggcgcgcccgc

SEQ ID NO: 38609 - DNA, 25 bp, Homo sapien
cctttgagaacgacgacatttgggc

SEQ ID NO: 38610 - DNA, 25 bp, Homo sapien
gcccaaatgtcgtcgttctcaaagg

SEQ ID NO: 38611 - DNA, 25 bp, Homo sapien
gctaagctcgggtccggcaaacgga

SEQ ID NO: 38612 - DNA, 25 bp, Homo sapien
tccgtttgccggacccgagcttagc

SEQ ID NO: 38613 - DNA, 25 bp, Homo sapien
ggtctcgtaagtaggtccctgagac

SEQ ID NO: 38614 - DNA, 25 bp, Homo sapien
gtctcagggacctacttacgagacc

SEQ ID NO: 38615 - DNA, 25 bp, Homo sapien
ggtgccgccagtgcccgttccacgg

SEQ ID NO: 38616 - DNA, 25 bp, Homo sapien
ccgtggaacgggcactggcggcacc

SEQ ID NO: 38617 - DNA, 25 bp, Homo sapien
cccgactcgacttaggcaaaagtga

SEQ ID NO: 38618 - DNA, 25 bp, Homo sapien
tcacttttgcctaagtcgagtcggg

SEQ ID NO: 38619 - DNA, 25 bp, Homo sapien
tatttgagtcagttgtttaattttc

SEQ ID NO: 38620 - DNA, 25 bp, Homo sapien
gaaaattaaacaactgactcaaata

SEQ ID NO: 38621 - DNA, 25 bp, Homo sapien
tcgggtgctgtcagcgccagtggcg

SEQ ID NO: 38622 - DNA, 25 bp, Homo sapien
cgccactggcgctgacagcacccga

SEQ ID NO: 38623 - DNA, 25 bp, Homo sapien
ccggtcgggtgctgtcagcgccagt

SEQ ID NO: 38624 - DNA, 25 bp, Homo sapien
actggcgctgacagcacccgaccgg

SEQ ID NO: 38625 - DNA, 25 bp, Homo sapien
caccgtacgaagagacaagttcttt

SEQ ID NO: 38626 - DNA, 25 bp, Homo sapien
aaagaacttgtctcttcgtacggtg

SEQ ID NO: 38627 - DNA, 25 bp, Homo sapien
aaacaacaagaagaacagtcaacgt

SEQ ID NO: 38628 - DNA, 25 bp, Homo sapien
acgttgactgttcttcttgttgttt

SEQ ID NO: 38629 - DNA, 25 bp, Homo sapien
gaaacaacaagaagaacagtcaacg

SEQ ID NO: 38630 - DNA, 25 bp, Homo sapien
cgttgactgttcttcttgttgtttc

SEQ ID NO: 38631 - DNA, 25 bp, Homo sapien
ggaggtggtacgtcgggttgaggtg

SEQ ID NO: 38632 - DNA, 25 bp, Homo sapien
cacctcaacccgacgtaccacctcc

SEQ ID NO: 38633 - DNA, 25 bp, Homo sapien
gatggacgaacctcgtgaacgaggg

SEQ ID NO: 38634 - DNA, 25 bp, Homo sapien
ccctcgttcacgaggttcgtccatc

SEQ ID NO: 38635 - DNA, 25 bp, Homo sapien
accttatcgacgtcctggactgaac

SEQ ID NO: 38636 - DNA, 25 bp, Homo sapien
gttcagtccaggacgtcgataaggt

SEQ ID NO: 38637 - DNA, 25 bp, Homo sapien
ccattcgaggccttgacgtaaccaa

SEQ ID NO: 38638 - DNA, 25 bp, Homo sapien
ttggttacgtcaaggcctcgaatgg

SEQ ID NO: 38639 - DNA, 25 bp, Homo sapien
ggaccgtcgttgccgctaccggcct

SEQ ID NO: 38640 - DNA, 25 bp, Homo sapien
aggccggtagcggcaacgacggtcc

SEQ ID NO: 38641 - DNA, 25 bp, Homo sapien
cgtgacaccccggtcacgggccaaa

SEQ ID NO: 38642 - DNA, 25 bp, Homo sapien
tttggcccgtgaccggggtgtcacg

SEQ ID NO: 38643 - DNA, 25 bp, Homo sapien
taaactaacacttttgagctttccg

SEQ ID NO: 38644 - DNA, 25 bp, Homo sapien
cggaaagctcaaaagtgttagttta

SEQ ID NO: 38645 - DNA, 25 bp, Homo sapien
acggtcggcttcagcaagttcccgc

SEQ ID NO: 38646 - DNA, 25 bp, Homo sapien
gcgggaacttgctgaagccgaccgt

SEQ ID NO: 38647 - DNA, 25 bp, Homo sapien
cttcccggccctgcctcgagggact

SEQ ID NO: 38648 - DNA, 25 bp, Homo sapien
agtccctcgaggcagggccgggaag

SEQ ID NO: 38649 - DNA, 25 bp, Homo sapien
gcgggtcacgacagcgccggcactg

SEQ ID NO: 38650 - DNA, 25 bp, Homo sapien
cagtgccggcgctgtcgtgacccgc

SEQ ID NO: 38651 - DNA, 25 bp, Homo sapien
tcacgacagcgccggcactggtctg

SEQ ID NO: 38652 - DNA, 25 bp, Homo sapien
cagaccagtgccggcgctgtcgtga

SEQ ID NO: 38653 - DNA, 25 bp, Homo sapien
gacaatattcgtctctgtcaaagga

SEQ ID NO: 38654 - DNA, 25 bp, Homo sapien
tcctttgacagagacgaatattgtc

SEQ ID NO: 38655 - DNA, 25 bp, Homo sapien
cacacgacccgtgggcctcctctcc

SEQ ID NO: 38656 - DNA, 25 bp, Homo sapien
ggagaggaggcccacgggtcgtgtg

SEQ ID NO: 38657 - DNA, 25 bp, Homo sapien
ccgggtccacgcgtgggccggcgcg

SEQ ID NO: 38658 - DNA, 25 bp, Homo sapien
cgcgccggcccacgcgtggacccgg

SEQ ID NO: 38659 - DNA, 25 bp, Homo sapien
gccgggtccacgcgtgggccggcgc

SEQ ID NO: 38660 - DNA, 25 bp, Homo sapien
gcgccggcccacgcgtggacccggc

SEQ ID NO: 38661 - DNA, 25 bp, Homo sapien
gggtccacgcgtgggccggcgcgcc

SEQ ID NO: 38662 - DNA, 25 bp, Homo sapien
ggcgcgccggcccacgcgtggaccc

SEQ ID NO: 38663 - DNA, 25 bp, Homo sapien
cgggtccacgcgtgggccggcgcgc

SEQ ID NO: 38664 - DNA, 25 bp, Homo sapien
gcgcgccggcccacgcgtggacccg

SEQ ID NO: 38665 - DNA, 25 bp, Homo sapien
agggagtgccgtagacaaagaaaag

SEQ ID NO: 38666 - DNA, 25 bp, Homo sapien
cttttctttgtctacggcactccct

SEQ ID NO: 38667 - DNA, 25 bp, Homo sapien
ttaaaacattttgcactgaagtgtc

SEQ ID NO: 38668 - DNA, 25 bp, Homo sapien
gacacttcagtgcaaaatgttttaa

SEQ ID NO: 38669 - DNA, 25 bp, Homo sapien
gtctttgtacacatagaaagaactt

SEQ ID NO: 38670 - DNA, 25 bp, Homo sapien
aagttctttctatgtgtacaaagac

SEQ ID NO: 38671 - DNA, 25 bp, Homo sapien
acgtgctacctgaatcgcgtgccag

SEQ ID NO: 38672 - DNA, 25 bp, Homo sapien
ctggcacgcgattcaggtagcacgt

SEQ ID NO: 38673 - DNA, 25 bp, Homo sapien
cactaaatacactgctttttgtaaa

SEQ ID NO: 38674 - DNA, 25 bp, Homo sapien
tttacaaaaagcagtgtatttagtg

SEQ ID NO: 38675 - DNA, 25 bp, Homo sapien
taatgcccattctcgaaacatttgt

SEQ ID NO: 38676 - DNA, 25 bp, Homo sapien
acaaatgtttcgagaatgggcatta

SEQ ID NO: 38677 - DNA, 25 bp, Homo sapien
aaactagatacttgaaagagttcat

SEQ ID NO: 38678 - DNA, 25 bp, Homo sapien
atgaactctttcaagtatctagttt

SEQ ID NO: 38679 - DNA, 25 bp, Homo sapien
gggcggtggccctgcctctcgcggg

SEQ ID NO: 38680 - DNA, 25 bp, Homo sapien
cccgcgagaggcagggccaccgccc

SEQ ID NO: 38681 - DNA, 25 bp, Homo sapien
gggattacatatagaaagactttat

SEQ ID NO: 38682 - DNA, 25 bp, Homo sapien
ataaagtctttctatatgtaatccc

SEQ ID NO: 38683 - DNA, 25 bp, Homo sapien
gaccgcccccgaggcggcgcgggtg

SEQ ID NO: 38684 - DNA, 25 bp, Homo sapien
cacccgcgccgcctcgggggcggtc

SEQ ID NO: 38685 - DNA, 25 bp, Homo sapien
tatctgcccgtccactgggcactgg

SEQ ID NO: 38686 - DNA, 25 bp, Homo sapien
ccagtgcccagtggacgggcagata

SEQ ID NO: 38687 - DNA, 25 bp, Homo sapien
gactgaataccagacacattataag

SEQ ID NO: 38688 - DNA, 25 bp, Homo sapien
cttataatgtgtctggtattcagtc

SEQ ID NO: 38689 - DNA, 25 bp, Homo sapien
agacactcgggaagagcggttcggt

SEQ ID NO: 38690 - DNA, 25 bp, Homo sapien
accgaaccgctcttcccgagtgtct

SEQ ID NO: 38691 - DNA, 25 bp, Homo sapien
acgttgtatcatctacgattaaaat

SEQ ID NO: 38692 - DNA, 25 bp, Homo sapien
attttaatcgtagatgatacaacgt

SEQ ID NO: 38693 - DNA, 25 bp, Homo sapien
cgtgaaaaatcaggtacagaagaaa

SEQ ID NO: 38694 - DNA, 25 bp, Homo sapien
tttcttctgtacctgatttttcacg

SEQ ID NO: 38695 - DNA, 25 bp, Homo sapien
acatgaccgaggcttcacctgggtg

SEQ ID NO: 38696 - DNA, 25 bp, Homo sapien
cacccaggtgaagcctcggtcatgt

SEQ ID NO: 38697 - DNA, 25 bp, Homo sapien
gcgccgccgagttacgcgctgtgca

SEQ ID NO: 38698 - DNA, 25 bp, Homo sapien
tgcacagcgcgtaactcggcggcgc

SEQ ID NO: 38699 - DNA, 25 bp, Homo sapien
gcccgcggcgcagccgcgccaaggt

SEQ ID NO: 38700 - DNA, 25 bp, Homo sapien
accttggcgcggctgcgccgcgggc

SEQ ID NO: 38701 - DNA, 25 bp, Homo sapien
gcgcccgcggcgcagccgcgccaag

SEQ ID NO: 38702 - DNA, 25 bp, Homo sapien
cttggcgcggctgcgccgcgggcgc

SEQ ID NO: 38703 - DNA, 25 bp, Homo sapien
gtcgccgggctcgcgcgcccgcggc

SEQ ID NO: 38704 - DNA, 25 bp, Homo sapien
gccgcgggcgcgcgagcccggcgac

SEQ ID NO: 38705 - DNA, 25 bp, Homo sapien
tgaaggtcatagagatgtcgacgac

SEQ ID NO: 38706 - DNA, 25 bp, Homo sapien
gtcgtcgacatctctatgaccttca

SEQ ID NO: 38707 - DNA, 25 bp, Homo sapien
ctcccgggcgctcgaggcaccccag

SEQ ID NO: 38708 - DNA, 25 bp, Homo sapien
ctggggtgcctcgagcgcccgggag

SEQ ID NO: 38709 - DNA, 25 bp, Homo sapien
cggctcccgggcgctcgaggcaccc

SEQ ID NO: 38710 - DNA, 25 bp, Homo sapien
gggtgcctcgagcgcccgggagccg

SEQ ID NO: 38711 - DNA, 25 bp, Homo sapien
aagacgaccccgtgcgaagtcaaga

SEQ ID NO: 38712 - DNA, 25 bp, Homo sapien
tcttgacttcgcacggggtcgtctt

SEQ ID NO: 38713 - DNA, 25 bp, Homo sapien
ggtcctcaccgttcctgtccatggg

SEQ ID NO: 38714 - DNA, 25 bp, Homo sapien
cccatggacaggaacggtgaggacc

SEQ ID NO: 38715 - DNA, 25 bp, Homo sapien
ttttcctatttaactacaagtgtaa

SEQ ID NO: 38716 - DNA, 25 bp, Homo sapien
ttacacttgtagttaaataggaaaa

SEQ ID NO: 38717 - DNA, 25 bp, Homo sapien
gtattagagatatctcaactacatt

SEQ ID NO: 38718 - DNA, 25 bp, Homo sapien
aatgtagttgagatatctctaatac

SEQ ID NO: 38719 - DNA, 25 bp, Homo sapien
cgtgtctacgtctcagaaagtcgaa

SEQ ID NO: 38720 - DNA, 25 bp, Homo sapien
ttcgactttctgagacgtagacacg

SEQ ID NO: 38721 - DNA, 25 bp, Homo sapien
aagtaaatcaagtcgtatggaaagg

SEQ ID NO: 38722 - DNA, 25 bp, Homo sapien
cctttccatacgacttgatttactt

SEQ ID NO: 38723 - DNA, 25 bp, Homo sapien
ctgacaatcaaaactggagagaatt

SEQ ID NO: 38724 - DNA, 25 bp, Homo sapien
aattctctccagttttgattgtcag

SEQ ID NO: 38725 - DNA, 25 bp, Homo sapien
ttcctcttgggttcgatggaccccg

SEQ ID NO: 38726 - DNA, 25 bp, Homo sapien
cggggtccatcgaacccaagaggaa

SEQ ID NO: 38727 - DNA, 25 bp, Homo sapien
cgtgcgcgggcggagtctttgtggc

SEQ ID NO: 38728 - DNA, 25 bp, Homo sapien
gccacaaagactccgcccgcgcacg

SEQ ID NO: 38729 - DNA, 25 bp, Homo sapien
cctagacgtcttagttataaattga

SEQ ID NO: 38730 - DNA, 25 bp, Homo sapien
tcaatttataactaagacgtctagg

SEQ ID NO: 38731 - DNA, 25 bp, Homo sapien
cgaccccagccaccgaatccctcgg

SEQ ID NO: 38732 - DNA, 25 bp, Homo sapien
ccgagggattcggtggctggggtcg

SEQ ID NO: 38733 - DNA, 25 bp, Homo sapien
ccccagtaccccaccagtcgaagtc

SEQ ID NO: 38734 - DNA, 25 bp, Homo sapien
gacttcgactggtggggtactgggg

SEQ ID NO: 38735 - DNA, 25 bp, Homo sapien
tggtggtccagaggtcaggactcgg

SEQ ID NO: 38736 - DNA, 25 bp, Homo sapien
ccgagtcctgacctctggaccacca

SEQ ID NO: 38737 - DNA, 25 bp, Homo sapien
gacggtggacggccggcttgccgtc

SEQ ID NO: 38738 - DNA, 25 bp, Homo sapien
gacggcaagccggccgtccaccgtc

SEQ ID NO: 38739 - DNA, 25 bp, Homo sapien
tctgaggtaaactctcagtattgac

SEQ ID NO: 38740 - DNA, 25 bp, Homo sapien
gtcaatactgagagtttacctcaga

SEQ ID NO: 38741 - DNA, 25 bp, Homo sapien
tcggcaggaaccctatccgacctgg

SEQ ID NO: 38742 - DNA, 25 bp, Homo sapien
ccaggtcggatagggttcctgccga

SEQ ID NO: 38743 - DNA, 25 bp, Homo sapien
agtgaggttcggaacggctcggtgg

SEQ ID NO: 38744 - DNA, 25 bp, Homo sapien
ccaccgagccgttccgaacctcact

SEQ ID NO: 38745 - DNA, 25 bp, Homo sapien
cacgccggacagtggcgagacagac

SEQ ID NO: 38746 - DNA, 25 bp, Homo sapien
gtctgtctcgccactgtccggcgtg

SEQ ID NO: 38747 - DNA, 25 bp, Homo sapien
gggccctcctcgtcctgcgcggccc

SEQ ID NO: 38748 - DNA, 25 bp, Homo sapien
gggccgcgcaggacgaggagggccc

SEQ ID NO: 38749 - DNA, 25 bp, Homo sapien
cgggccctcctcgtcctgcgcggcc

SEQ ID NO: 38750 - DNA, 25 bp, Homo sapien
ggccgcgcaggacgaggagggcccg

SEQ ID NO: 38751 - DNA, 25 bp, Homo sapien
tcgggccgggccctcctcgtcctgc

SEQ ID NO: 38752 - DNA, 25 bp, Homo sapien
gcaggacgaggagggcccggcccga

SEQ ID NO: 38753 - DNA, 25 bp, Homo sapien
cggcgccgccccatctccatcgccg

SEQ ID NO: 38754 - DNA, 25 bp, Homo sapien
cggcgatggagatggggcggcgccg

SEQ ID NO: 38755 - DNA, 25 bp, Homo sapien
gtgtctccgccggaacctgggttcg

SEQ ID NO: 38756 - DNA, 25 bp, Homo sapien
cgaacccaggttccggcggagacac

SEQ ID NO: 38757 - DNA, 25 bp, Homo sapien
cttgtcttcagtagtgatattgtac

SEQ ID NO: 38758 - DNA, 25 bp, Homo sapien
gtacaatatcactactgaagacaag

SEQ ID NO: 38759 - DNA, 25 bp, Homo sapien
gattaatgtctacgtttcttaatct

SEQ ID NO: 38760 - DNA, 25 bp, Homo sapien
agattaagaaacgtagacattaatc

SEQ ID NO: 38761 - DNA, 25 bp, Homo sapien
acacgtgaacactccgattataaac

SEQ ID NO: 38762 - DNA, 25 bp, Homo sapien
gtttataatcggagtgttcacgtgt

SEQ ID NO: 38763 - DNA, 25 bp, Homo sapien
cctgtaggtgccacctgtgcaaaac

SEQ ID NO: 38764 - DNA, 25 bp, Homo sapien
gttttgcacaggtggcacctacagg

SEQ ID NO: 38765 - DNA, 25 bp, Homo sapien
acgtttgtcttaaatctcattatgt

SEQ ID NO: 38766 - DNA, 25 bp, Homo sapien
acataatgagatttaagacaaacgt

SEQ ID NO: 38767 - DNA, 25 bp, Homo sapien
ctcctgtacgtttgtcttaaatctc

SEQ ID NO: 38768 - DNA, 25 bp, Homo sapien
gagatttaagacaaacgtacaggag

SEQ ID NO: 38769 - DNA, 25 bp, Homo sapien
agaaatcgttaattcaatcagtttg

SEQ ID NO: 38770 - DNA, 25 bp, Homo sapien
caaactgattgaattaacgatttct

SEQ ID NO: 38771 - DNA, 25 bp, Homo sapien
tgtcgttgaacttgtttccacagta

SEQ ID NO: 38772 - DNA, 25 bp, Homo sapien
tactgtggaaacaagttcaacgaca

SEQ ID NO: 38773 - DNA, 25 bp, Homo sapien
gggtccatggtgattcggcgacccc

SEQ ID NO: 38774 - DNA, 25 bp, Homo sapien
ggggtcgccgaatcaccatggaccc

SEQ ID NO: 38775 - DNA, 25 bp, Homo sapien
gtttcgccgcggcatcggcggccgg

SEQ ID NO: 38776 - DNA, 25 bp, Homo sapien
ccggccgccgatgccgcggcgaaac

SEQ ID NO: 38777 - DNA, 25 bp, Homo sapien
ggtcctccggtctcgctcggtccga

SEQ ID NO: 38778 - DNA, 25 bp, Homo sapien
tcggaccgagcgagaccggaggacc

SEQ ID NO: 38779 - DNA, 25 bp, Homo sapien
attagttccctttattctactgtat

SEQ ID NO: 38780 - DNA, 25 bp, Homo sapien
atacagtagaataaagggaactaat

SEQ ID NO: 38781 - DNA, 25 bp, Homo sapien
ggagaagtaggtgtctcccactcct

SEQ ID NO: 38782 - DNA, 25 bp, Homo sapien
aggagtgggagacacctacttctcc

SEQ ID NO: 38783 - DNA, 25 bp, Homo sapien
cgtccgtagacgttcacacgggtgt

SEQ ID NO: 38784 - DNA, 25 bp, Homo sapien
acacccgtgtgaacgtctacggacg

SEQ ID NO: 38785 - DNA, 25 bp, Homo sapien
ggtgctcccactgcgtgacgaggtc

SEQ ID NO: 38786 - DNA, 25 bp, Homo sapien
gacctcgtcacgcagtgggagcacc

SEQ ID NO: 38787 - DNA, 25 bp, Homo sapien
aagttatgtacgtattactttatcg

SEQ ID NO: 38788 - DNA, 25 bp, Homo sapien
cgataaagtaatacgtacataactt

SEQ ID NO: 38789 - DNA, 25 bp, Homo sapien
accatgaactctggaggagaaacat

SEQ ID NO: 38790 - DNA, 25 bp, Homo sapien
atgtttctcctccagagttcatggt

SEQ ID NO: 38791 - DNA, 25 bp, Homo sapien
gagatcgaaagacagaggaaccaca

SEQ ID NO: 38792 - DNA, 25 bp, Homo sapien
tgtggttcctctgtctttcgatctc

SEQ ID NO: 38793 - DNA, 25 bp, Homo sapien
gggaactaaagaagggccggtgaca

SEQ ID NO: 38794 - DNA, 25 bp, Homo sapien
tgtcaccggcccttctttagttccc

SEQ ID NO: 38795 - DNA, 25 bp, Homo sapien
ggaccagtctcagtacagaacgttg

SEQ ID NO: 38796 - DNA, 25 bp, Homo sapien
caacgttctgtactgagactggtcc

SEQ ID NO: 38797 - DNA, 25 bp, Homo sapien
gaaagacctacacaaaatatctgaa

SEQ ID NO: 38798 - DNA, 25 bp, Homo sapien
ttcagatattttgtgtaggtctttc

SEQ ID NO: 38799 - DNA, 25 bp, Homo sapien
gacaagtcaataactaaaccattaa

SEQ ID NO: 38800 - DNA, 25 bp, Homo sapien
ttaatggtttagttattgacttgtc

SEQ ID NO: 38801 - DNA, 25 bp, Homo sapien
ggaccgtcaaactgtaatggtgaat

SEQ ID NO: 38802 - DNA, 25 bp, Homo sapien
attcaccattacagtttgacggtcc

SEQ ID NO: 38803 - DNA, 25 bp, Homo sapien
tcattggattattgttaggaaacat

SEQ ID NO: 38804 - DNA, 25 bp, Homo sapien
atgtttcctaacaataatccaatga

SEQ ID NO: 38805 - DNA, 25 bp, Homo sapien
tacctgtagtggaccgcagaggcca

SEQ ID NO: 38806 - DNA, 25 bp, Homo sapien
tggcctctgcggtccactacaggta

SEQ ID NO: 38807 - DNA, 25 bp, Homo sapien
gaccgccaggcgtcgttccgggact

SEQ ID NO: 38808 - DNA, 25 bp, Homo sapien
agtcccggaacgacgcctggcggtc

SEQ ID NO: 38809 - DNA, 25 bp, Homo sapien
actgacgtcttaaggggtcgtactc

SEQ ID NO: 38810 - DNA, 25 bp, Homo sapien
gagtacgaccccttaagacgtcagt

SEQ ID NO: 38811 - DNA, 25 bp, Homo sapien
gagacccccaccagccgcgcgggga

SEQ ID NO: 38812 - DNA, 25 bp, Homo sapien
tccccgcgcggctggtgggggtctc

SEQ ID NO: 38813 - DNA, 25 bp, Homo sapien
cgaggcaaaccggacaccaggtctg

SEQ ID NO: 38814 - DNA, 25 bp, Homo sapien
cagacctggtgtccggtttgcctcg

SEQ ID NO: 38815 - DNA, 25 bp, Homo sapien
ctccgtggaccgtggctcgggggct

SEQ ID NO: 38816 - DNA, 25 bp, Homo sapien
agcccccgagccacggtccacggag

SEQ ID NO: 38817 - DNA, 25 bp, Homo sapien
cagatgacccaactcaaacaaagtt

SEQ ID NO: 38818 - DNA, 25 bp, Homo sapien
aactttgtttgagttgggtcatctg

SEQ ID NO: 38819 - DNA, 25 bp, Homo sapien
agagagctccctcgtcgggctggac

SEQ ID NO: 38820 - DNA, 25 bp, Homo sapien
gtccagcccgacgagggagctctct

SEQ ID NO: 38821 - DNA, 25 bp, Homo sapien
ctctttgaaggtacctacgaggacc

SEQ ID NO: 38822 - DNA, 25 bp, Homo sapien
ggtcctcgtaggtaccttcaaagag

SEQ ID NO: 38823 - DNA, 25 bp, Homo sapien
gaacctgaagtgttccccagattcc

SEQ ID NO: 38824 - DNA, 25 bp, Homo sapien
ggaatctggggaacacttcaggttc

SEQ ID NO: 38825 - DNA, 25 bp, Homo sapien
attgtgcttccggtggagtctccga

SEQ ID NO: 38826 - DNA, 25 bp, Homo sapien
tcggagactccaccggaagcacaat

SEQ ID NO: 38827 - DNA, 25 bp, Homo sapien
tttactctagatctcaaaaccaaag

SEQ ID NO: 38828 - DNA, 25 bp, Homo sapien
ctttggttttgagatctagagtaaa

SEQ ID NO: 38829 - DNA, 25 bp, Homo sapien
agtatactatcactgttacatctag

SEQ ID NO: 38830 - DNA, 25 bp, Homo sapien
ctagatgtaacagtgatagtatact

SEQ ID NO: 38831 - DNA, 25 bp, Homo sapien
tcccctgtctcgtcccttcggtccc

SEQ ID NO: 38832 - DNA, 25 bp, Homo sapien
gggaccgaagggacgagacagggga

SEQ ID NO: 38833 - DNA, 25 bp, Homo sapien
tcaagtcttggtattgataaagtct

SEQ ID NO: 38834 - DNA, 25 bp, Homo sapien
agactttatcaataccaagacttga

SEQ ID NO: 38835 - DNA, 25 bp, Homo sapien
cgtatctatatttaatgttgtgtaa

SEQ ID NO: 38836 - DNA, 25 bp, Homo sapien
ttacacaacattaaatatagatacg

SEQ ID NO: 38837 - DNA, 25 bp, Homo sapien
atgagttaatactgttttcaatcgt

SEQ ID NO: 38838 - DNA, 25 bp, Homo sapien
acgattgaaaacagtattaactcat

SEQ ID NO: 38839 - DNA, 25 bp, Homo sapien
tttatgagttaatactgttttcaat

SEQ ID NO: 38840 - DNA, 25 bp, Homo sapien
attgaaaacagtattaactcataaa

SEQ ID NO: 38841 - DNA, 25 bp, Homo sapien
tgggacccgtgtggagagttagagg

SEQ ID NO: 38842 - DNA, 25 bp, Homo sapien
cctctaactctccacacgggtccca

SEQ ID NO: 38843 - DNA, 25 bp, Homo sapien
tggcacatgttccttgtcctaaaat

SEQ ID NO: 38844 - DNA, 25 bp, Homo sapien
attttaggacaaggaacatgtgcca

SEQ ID NO: 38845 - DNA, 25 bp, Homo sapien
gggaagtgaaacactctttcggtct

SEQ ID NO: 38846 - DNA, 25 bp, Homo sapien
agaccgaaagagtgtttcacttccc

SEQ ID NO: 38847 - DNA, 25 bp, Homo sapien
gtctgtagtttctagtctgtcctat

SEQ ID NO: 38848 - DNA, 25 bp, Homo sapien
ataggacagactagaaactacagac

SEQ ID NO: 38849 - DNA, 25 bp, Homo sapien
gggtcggtcccgctgctcggtgggc

SEQ ID NO: 38850 - DNA, 25 bp, Homo sapien
gcccaccgagcagcgggaccgaccc

SEQ ID NO: 38851 - DNA, 25 bp, Homo sapien
aaggacatgtcgagcgtcccctcgg

SEQ ID NO: 38852 - DNA, 25 bp, Homo sapien
ccgaggggacgctcgacatgtcctt

SEQ ID NO: 38853 - DNA, 25 bp, Homo sapien
cctataccaggtgtcgctctgggag

SEQ ID NO: 38854 - DNA, 25 bp, Homo sapien
ctcccagagcgacacctggtatagg

SEQ ID NO: 38855 - DNA, 25 bp, Homo sapien
cgtcgcaggaatcaccggttccggt

SEQ ID NO: 38856 - DNA, 25 bp, Homo sapien
accggaaccggtgattcctgcgacg

SEQ ID NO: 38857 - DNA, 25 bp, Homo sapien
accaaaccaaagatacgaggtatcg

SEQ ID NO: 38858 - DNA, 25 bp, Homo sapien
cgatacctcgtatctttggtttggt

SEQ ID NO: 38859 - DNA, 25 bp, Homo sapien
tccaagtaaacacaaactattaaat

SEQ ID NO: 38860 - DNA, 25 bp, Homo sapien
atttaatagtttgtgtttacttgga

SEQ ID NO: 38861 - DNA, 25 bp, Homo sapien
gtccacagtaaccacgtaaccattt

SEQ ID NO: 38862 - DNA, 25 bp, Homo sapien
aaatggttacgtggttactgtggac

SEQ ID NO: 38863 - DNA, 25 bp, Homo sapien
gagacacgttcactcctttagtccg

SEQ ID NO: 38864 - DNA, 25 bp, Homo sapien
cggactaaaggagtgaacgtgtctc

SEQ ID NO: 38865 - DNA, 25 bp, Homo sapien
acccggaagatccaaacagtactca

SEQ ID NO: 38866 - DNA, 25 bp, Homo sapien
tgagtactgtttggatcttccgggt

SEQ ID NO: 38867 - DNA, 25 bp, Homo sapien
ttctactcatctatatcgggtgcac

SEQ ID NO: 38868 - DNA, 25 bp, Homo sapien
gtgcacccgatatagatgagtagaa

SEQ ID NO: 38869 - DNA, 25 bp, Homo sapien
aattcagacgttccaatcttgataa

SEQ ID NO: 38870 - DNA, 25 bp, Homo sapien
ttatcaagattggaacgtctgaatt

SEQ ID NO: 38871 - DNA, 25 bp, Homo sapien
gtctcgtcccgataacgggtgcccg

SEQ ID NO: 38872 - DNA, 25 bp, Homo sapien
cgggcacccgttatcgggacgagac

SEQ ID NO: 38873 - DNA, 25 bp, Homo sapien
aaaatagtagaaagttacctcctga

SEQ ID NO: 38874 - DNA, 25 bp, Homo sapien
tcaggaggtaactttctactatttt

SEQ ID NO: 38875 - DNA, 25 bp, Homo sapien
ggacgcccacgtcctttactctccg

SEQ ID NO: 38876 - DNA, 25 bp, Homo sapien
cggagagtaaaggacgtgggcgtcc

SEQ ID NO: 38877 - DNA, 25 bp, Homo sapien
aggttatgacttggaaaccggacca

SEQ ID NO: 38878 - DNA, 25 bp, Homo sapien
tggtccggtttccaagtcataacct

SEQ ID NO: 38879 - DNA, 25 bp, Homo sapien
aaatacaacattatataacggtttc

SEQ ID NO: 38880 - DNA, 25 bp, Homo sapien
gaaaccgttatataatgttgtattt

SEQ ID NO: 38881 - DNA, 25 bp, Homo sapien
ccgtagcgccgccagcgccggaacc

SEQ ID NO: 38882 - DNA, 25 bp, Homo sapien
ggttccggcgctggcggcgctacgg

SEQ ID NO: 38883 - DNA, 25 bp, Homo sapien
ggcggagacgcaggcgcgcagcgac

SEQ ID NO: 38884 - DNA, 25 bp, Homo sapien
gtcgctgcgcgcctgcgtctccgcc

SEQ ID NO: 38885 - DNA, 25 bp, Homo sapien
gaaattaccagagtatagaaggact

SEQ ID NO: 38886 - DNA, 25 bp, Homo sapien
agtccttctatactctggtaatttc

SEQ ID NO: 38887 - DNA, 25 bp, Homo sapien
gacgtctccgccgtctaaccgcgag

SEQ ID NO: 38888 - DNA, 25 bp, Homo sapien
ctcgcggttagacggcggagacgtc

SEQ ID NO: 38889 - DNA, 25 bp, Homo sapien
agtaaataagacatgggcaagttgt

SEQ ID NO: 38890 - DNA, 25 bp, Homo sapien
acaacttgcccatgtcttatttact

SEQ ID NO: 38891 - DNA, 25 bp, Homo sapien
ctgtggttctgaggacttagaagag

SEQ ID NO: 38892 - DNA, 25 bp, Homo sapien
ctcttctaagtcctcagaaccacag

SEQ ID NO: 38893 - DNA, 25 bp, Homo sapien
gcacccgtgacccttcagagacggt

SEQ ID NO: 38894 - DNA, 25 bp, Homo sapien
accgtctctgaagggtcacgggtgc

SEQ ID NO: 38895 - DNA, 25 bp, Homo sapien
accgacgtgacgtctaaaggaggta

SEQ ID NO: 38896 - DNA, 25 bp, Homo sapien
tacctcctttagacgtcacgtcggt

SEQ ID NO: 38897 - DNA, 25 bp, Homo sapien
gtgcacagacgtacttcgagggagt

SEQ ID NO: 38898 - DNA, 25 bp, Homo sapien
actccctcgaagtacgtctgtgcac

SEQ ID NO: 38899 - DNA, 25 bp, Homo sapien
cctcgacgggcaggtccgcccctca

SEQ ID NO: 38900 - DNA, 25 bp, Homo sapien
tgaggggcggacctgcccgtcgagg

SEQ ID NO: 38901 - DNA, 25 bp, Homo sapien
gagccacggctcctgcgagctcacc

SEQ ID NO: 38902 - DNA, 25 bp, Homo sapien
ggtgagctcgcaggagccgtggctc

SEQ ID NO: 38903 - DNA, 25 bp, Homo sapien
gagtacacacccattccgaagtggt

SEQ ID NO: 38904 - DNA, 25 bp, Homo sapien
accacttcggaatgggtgtgtactc

SEQ ID NO: 38905 - DNA, 25 bp, Homo sapien
ggagtgacatggagagtcacgaggc

SEQ ID NO: 38906 - DNA, 25 bp, Homo sapien
gcctcgtgactctccatgtcactcc

SEQ ID NO: 38907 - DNA, 25 bp, Homo sapien
gcgtccgctggaacgcggtcacggg

SEQ ID NO: 38908 - DNA, 25 bp, Homo sapien
cccgtgaccgcgttccagcggacgc

SEQ ID NO: 38909 - DNA, 25 bp, Homo sapien
aaaggtattcacttaaaggtatgta

SEQ ID NO: 38910 - DNA, 25 bp, Homo sapien
tacatacctttaagtgaataccttt

SEQ ID NO: 38911 - DNA, 25 bp, Homo sapien
tgaaaacggcaacaatagtcatagg

SEQ ID NO: 38912 - DNA, 25 bp, Homo sapien
cctatgactattgttgccgttttca

SEQ ID NO: 38913 - DNA, 25 bp, Homo sapien
taacgaacatatcaagtgaaaaaat

SEQ ID NO: 38914 - DNA, 25 bp, Homo sapien
attttttcacttgatatgttcgtta

SEQ ID NO: 38915 - DNA, 25 bp, Homo sapien
attggtcccatcgataccggtgtaa

SEQ ID NO: 38916 - DNA, 25 bp, Homo sapien
ttacaccggtatcgatgggaccaat

SEQ ID NO: 38917 - DNA, 25 bp, Homo sapien
tctacaacgtgtactaaaggtttta

SEQ ID NO: 38918 - DNA, 25 bp, Homo sapien
taaaacctttagtacacgttgtaga

SEQ ID NO: 38919 - DNA, 25 bp, Homo sapien
tctccgctagagtgtcccgaagaga

SEQ ID NO: 38920 - DNA, 25 bp, Homo sapien
tctcttcgggacactctagcggaga

SEQ ID NO: 38921 - DNA, 25 bp, Homo sapien
gcgggatcgggtgcggccgcggacg

SEQ ID NO: 38922 - DNA, 25 bp, Homo sapien
cgtccgcggccgcacccgatcccgc

SEQ ID NO: 38923 - DNA, 25 bp, Homo sapien
tcgacggcgcgggatcgggtgcggc

SEQ ID NO: 38924 - DNA, 25 bp, Homo sapien
gccgcacccgatcccgcgccgtcga

SEQ ID NO: 38925 - DNA, 25 bp, Homo sapien
gggccgggtcgacggcgcgggatcg

SEQ ID NO: 38926 - DNA, 25 bp, Homo sapien
cgatcccgcgccgtcgacccggccc

SEQ ID NO: 38927 - DNA, 25 bp, Homo sapien
ccgagggcgacggaactggccacaa

SEQ ID NO: 38928 - DNA, 25 bp, Homo sapien
ttgtggccagttccgtcgccctcgg

SEQ ID NO: 38929 - DNA, 25 bp, Homo sapien
gccctggaccgaccgagcctggtgt

SEQ ID NO: 38930 - DNA, 25 bp, Homo sapien
acaccaggctcggtcggtccagggc

SEQ ID NO: 38931 - DNA, 25 bp, Homo sapien
acaattgtccatcaagtcccctgat

SEQ ID NO: 38932 - DNA, 25 bp, Homo sapien
atcaggggacttgatggacaattgt

SEQ ID NO: 38933 - DNA, 25 bp, Homo sapien
tgtcttcggaggtcgccggaaccct

SEQ ID NO: 38934 - DNA, 25 bp, Homo sapien
agggttccggcgacctccgaagaca

SEQ ID NO: 38935 - DNA, 25 bp, Homo sapien
acctgacacgaggtcatcgtggtcc

SEQ ID NO: 38936 - DNA, 25 bp, Homo sapien
ggaccacgatgacctcgtgtcaggt

SEQ ID NO: 38937 - DNA, 25 bp, Homo sapien
ggagtccgtccgacccgtcgtcgta

SEQ ID NO: 38938 - DNA, 25 bp, Homo sapien
tacgacgacgggtcggacggactcc

SEQ ID NO: 38939 - DNA, 25 bp, Homo sapien
atattcagtgataagaactaagaga

SEQ ID NO: 38940 - DNA, 25 bp, Homo sapien
tctcttagttcttatcactgaatat

SEQ ID NO: 38941 - DNA, 25 bp, Homo sapien
gtctccattcaatttaaacacgagt

SEQ ID NO: 38942 - DNA, 25 bp, Homo sapien
actcgtgtttaaattgaatggagac

SEQ ID NO: 38943 - DNA, 25 bp, Homo sapien
tggacattcgaagagaatagtgaag

SEQ ID NO: 38944 - DNA, 25 bp, Homo sapien
cttcactattctcttcgaatgtcca

SEQ ID NO: 38945 - DNA, 25 bp, Homo sapien
ctataccggctgaaaaggaacaact

SEQ ID NO: 38946 - DNA, 25 bp, Homo sapien
agttgttccttttcagccggtatag

SEQ ID NO: 38947 - DNA, 25 bp, Homo sapien
tggtccccataacgacataaaatat

SEQ ID NO: 38948 - DNA, 25 bp, Homo sapien
atattttatgtcgttatggggacca

SEQ ID NO: 38949 - DNA, 25 bp, Homo sapien
ttctagtctattaaaatgatcgtag

SEQ ID NO: 38950 - DNA, 25 bp, Homo sapien
ctacgatcattttaatagactagaa

SEQ ID NO: 38951 - DNA, 25 bp, Homo sapien
gacgtccacgtgagtccccgacctc

SEQ ID NO: 38952 - DNA, 25 bp, Homo sapien
gaggtcggggactcacgtggacgtc

SEQ ID NO: 38953 - DNA, 25 bp, Homo sapien
attggggtgaccctcactgacgtag

SEQ ID NO: 38954 - DNA, 25 bp, Homo sapien
ctacgtcagtgagggtcaccccaat

SEQ ID NO: 38955 - DNA, 25 bp, Homo sapien
ttgacccactgtgtgttaactccac

SEQ ID NO: 38956 - DNA, 25 bp, Homo sapien
gtggagttaacacacagtgggtcaa

SEQ ID NO: 38957 - DNA, 25 bp, Homo sapien
gacttttattggtaattcaactaaa

SEQ ID NO: 38958 - DNA, 25 bp, Homo sapien
tttagttgaattaccaataaaagtc

SEQ ID NO: 38959 - DNA, 25 bp, Homo sapien
caaagagagaaagtgagttacggtg

SEQ ID NO: 38960 - DNA, 25 bp, Homo sapien
caccgtaactcactttctctctttg

SEQ ID NO: 38961 - DNA, 25 bp, Homo sapien
gacgcctgcgggtccccgaggaggt

SEQ ID NO: 38962 - DNA, 25 bp, Homo sapien
acctcctcggggacccgcaggcgtc

SEQ ID NO: 38963 - DNA, 25 bp, Homo sapien
tgactcgagggtacgacccgaagag

SEQ ID NO: 38964 - DNA, 25 bp, Homo sapien
ctcttcgggtcgtaccctcgagtca

SEQ ID NO: 38965 - DNA, 25 bp, Homo sapien
ctttctcaagacacgtaagtttaag

SEQ ID NO: 38966 - DNA, 25 bp, Homo sapien
cttaaacttacgtgtcttgagaaag

SEQ ID NO: 38967 - DNA, 25 bp, Homo sapien
caccgggaatagtggcccatgcacg

SEQ ID NO: 38968 - DNA, 25 bp, Homo sapien
cgtgcatgggccactattcccggtg

SEQ ID NO: 38969 - DNA, 25 bp, Homo sapien
cgaggtgccgcgactaggaaaggta

SEQ ID NO: 38970 - DNA, 25 bp, Homo sapien
tacctttcctagtcgcggcacctcg

SEQ ID NO: 38971 - DNA, 25 bp, Homo sapien
accttcggactcgacgccagtcccg

SEQ ID NO: 38972 - DNA, 25 bp, Homo sapien
cgggactggcgtcgagtccgaaggt

SEQ ID NO: 38973 - DNA, 25 bp, Homo sapien
atatcgaggaaatttcattgaaggt

SEQ ID NO: 38974 - DNA, 25 bp, Homo sapien
accttcaatgaaatttcctcgatat

SEQ ID NO: 38975 - DNA, 25 bp, Homo sapien
ggcggcggaccgagcgcgtagaggg

SEQ ID NO: 38976 - DNA, 25 bp, Homo sapien
ccctctacgcgctcggtccgccgcc

SEQ ID NO: 38977 - DNA, 25 bp, Homo sapien
taaaagagatctgaggtattattat

SEQ ID NO: 38978 - DNA, 25 bp, Homo sapien
ataataatacctcagatctctttta

SEQ ID NO: 38979 - DNA, 25 bp, Homo sapien
tctttagtaattaacttatgaaact

SEQ ID NO: 38980 - DNA, 25 bp, Homo sapien
agtttcataagttaattactaaaga

SEQ ID NO: 38981 - DNA, 25 bp, Homo sapien
tccgaagggttaatatcatagacaa

SEQ ID NO: 38982 - DNA, 25 bp, Homo sapien
ttgtctatgatattaacccttcgga

SEQ ID NO: 38983 - DNA, 25 bp, Homo sapien
aaacccatgggagaggcgtccggat

SEQ ID NO: 38984 - DNA, 25 bp, Homo sapien
atccggacgcctctcccatgggttt

SEQ ID NO: 38985 - DNA, 25 bp, Homo sapien
ttagcagttctaaaaggatacttat

SEQ ID NO: 38986 - DNA, 25 bp, Homo sapien
ataagtatccttttagaactgctaa

SEQ ID NO: 38987 - DNA, 25 bp, Homo sapien
gaattagcagttctaaaaggatact

SEQ ID NO: 38988 - DNA, 25 bp, Homo sapien
agtatccttttagaactgctaattc

SEQ ID NO: 38989 - DNA, 25 bp, Homo sapien
gtggtacgccactccaacccaacgt

SEQ ID NO: 38990 - DNA, 25 bp, Homo sapien
acgttgggttggagtggcgtaccac

SEQ ID NO: 38991 - DNA, 25 bp, Homo sapien
cgtgtcgccggggatgaccatttcg

SEQ ID NO: 38992 - DNA, 25 bp, Homo sapien
cgaaatggtcatccccggcgacacg

SEQ ID NO: 38993 - DNA, 25 bp, Homo sapien
tatttacttgacttgtaaggactta

SEQ ID NO: 38994 - DNA, 25 bp, Homo sapien
taagtccttacaagtcaagtaaata

SEQ ID NO: 38995 - DNA, 25 bp, Homo sapien
gggtcctatccacccgttctactcg

SEQ ID NO: 38996 - DNA, 25 bp, Homo sapien
cgagtagaacgggtggataggaccc

SEQ ID NO: 38997 - DNA, 25 bp, Homo sapien
gaacgcgaccgttgtggtccccgaa

SEQ ID NO: 38998 - DNA, 25 bp, Homo sapien
ttcggggaccacaacggtcgcgttc

SEQ ID NO: 38999 - DNA, 25 bp, Homo sapien
tgtaagtgctattaaacaaattaca

SEQ ID NO: 39000 - DNA, 25 bp, Homo sapien
tgtaatttgtttaatagcacttaca

SEQ ID NO: 39001 - DNA, 25 bp, Homo sapien
gaagtcacatccctatgttttatcc

SEQ ID NO: 39002 - DNA, 25 bp, Homo sapien
ggataaaacatagggatgtgacttc

SEQ ID NO: 39003 - DNA, 25 bp, Homo sapien
gaactcacaactctaagaacagaat

SEQ ID NO: 39004 - DNA, 25 bp, Homo sapien
attctgttcttagagttgtgagttc

SEQ ID NO: 39005 - DNA, 25 bp, Homo sapien
gcccgtgcctcggaacaggagattc

SEQ ID NO: 39006 - DNA, 25 bp, Homo sapien
gaatctcctgttccgaggcacgggc

SEQ ID NO: 39007 - DNA, 25 bp, Homo sapien
gacccctcctgagtaacagtacagg

SEQ ID NO: 39008 - DNA, 25 bp, Homo sapien
cctgtactgttactcaggaggggtc

SEQ ID NO: 39009 - DNA, 25 bp, Homo sapien
tctgaagaactctactacgtctgag

SEQ ID NO: 39010 - DNA, 25 bp, Homo sapien
ctcagacgtagtagagttcttcaga

SEQ ID NO: 39011 - DNA, 25 bp, Homo sapien
gtaccccacagaaacgatctcagtt

SEQ ID NO: 39012 - DNA, 25 bp, Homo sapien
aactgagatcgtttctgtggggtac

SEQ ID NO: 39013 - DNA, 25 bp, Homo sapien
taaccctaagcacccgtggtgaacg

SEQ ID NO: 39014 - DNA, 25 bp, Homo sapien
cgttcaccacgggtgcttagggtta

SEQ ID NO: 39015 - DNA, 25 bp, Homo sapien
tcacgacaagggacgagccccggga

SEQ ID NO: 39016 - DNA, 25 bp, Homo sapien
tcccggggctcgtcccttgtcgtga

SEQ ID NO: 39017 - DNA, 25 bp, Homo sapien
agtcgtcggggcactgtccctggac

SEQ ID NO: 39018 - DNA, 25 bp, Homo sapien
gtccagggacagtgccccgacgact

SEQ ID NO: 39019 - DNA, 25 bp, Homo sapien
tatttgaagttaactggtcgttcac

SEQ ID NO: 39020 - DNA, 25 bp, Homo sapien
gtgaacgaccagttaacttcaaata

SEQ ID NO: 39021 - DNA, 25 bp, Homo sapien
tccggtccgtggaccacttcgggtg

SEQ ID NO: 39022 - DNA, 25 bp, Homo sapien
cacccgaagtggtccacggaccgga

SEQ ID NO: 39023 - DNA, 25 bp, Homo sapien
cctccggtcgcccttcgtggacgtg

SEQ ID NO: 39024 - DNA, 25 bp, Homo sapien
cacgtccacgaagggcgaccggagg

SEQ ID NO: 39025 - DNA, 25 bp, Homo sapien
cgcctccggtcgcccttcgtggacg

SEQ ID NO: 39026 - DNA, 25 bp, Homo sapien
cgtccacgaagggcgaccggaggcg

SEQ ID NO: 39027 - DNA, 25 bp, Homo sapien
tggtcgactgaaacacatactttag

SEQ ID NO: 39028 - DNA, 25 bp, Homo sapien
ctaaagtatgtgtttcagtcgacca

SEQ ID NO: 39029 - DNA, 25 bp, Homo sapien
aagatgatatgaacttacaaaatcg

SEQ ID NO: 39030 - DNA, 25 bp, Homo sapien
cgattttgtaagttcatatcatctt

SEQ ID NO: 39031 - DNA, 25 bp, Homo sapien
aaggacgcacgatgggttcctcacg

SEQ ID NO: 39032 - DNA, 25 bp, Homo sapien
cgtgaggaacccatcgtgcgtcctt

SEQ ID NO: 39033 - DNA, 25 bp, Homo sapien
acaaaatttaaatctcgaatagtgc

SEQ ID NO: 39034 - DNA, 25 bp, Homo sapien
gcactattcgagatttaaattttgt

SEQ ID NO: 39035 - DNA, 25 bp, Homo sapien
ggacagggagccctggcgcgcacgg

SEQ ID NO: 39036 - DNA, 25 bp, Homo sapien
ccgtgcgcgccagggctccctgtcc

SEQ ID NO: 39037 - DNA, 25 bp, Homo sapien
gtcgggcggtccacgcgacgggctg

SEQ ID NO: 39038 - DNA, 25 bp, Homo sapien
cagcccgtcgcgtggaccgcccgac

SEQ ID NO: 39039 - DNA, 25 bp, Homo sapien
tacacgagggaacctgctccggaag

SEQ ID NO: 39040 - DNA, 25 bp, Homo sapien
cttccggagcaggttccctcgtgta

SEQ ID NO: 39041 - DNA, 25 bp, Homo sapien
ttaaaaactatgtaacagctccttt

SEQ ID NO: 39042 - DNA, 25 bp, Homo sapien
aaaggagctgttacatagtttttaa

SEQ ID NO: 39043 - DNA, 25 bp, Homo sapien
gactgtctacccctacgagaatcgg

SEQ ID NO: 39044 - DNA, 25 bp, Homo sapien
ccgattctcgtaggggtagacagtc

SEQ ID NO: 39045 - DNA, 25 bp, Homo sapien
aaagttaatcaaatcgtactcaaag

SEQ ID NO: 39046 - DNA, 25 bp, Homo sapien
ctttgagtacgatttgattaacttt

SEQ ID NO: 39047 - DNA, 25 bp, Homo sapien
cacattgacctattaaaacggaaag

SEQ ID NO: 39048 - DNA, 25 bp, Homo sapien
ctttccgttttaataggtcaatgtg

SEQ ID NO: 39049 - DNA, 25 bp, Homo sapien
agtgatatagaaactgtgctagcaa

SEQ ID NO: 39050 - DNA, 25 bp, Homo sapien
ttgctagcacagtttctatatcact

SEQ ID NO: 39051 - DNA, 25 bp, Homo sapien
tgaattcctcaacggttttgatggt

SEQ ID NO: 39052 - DNA, 25 bp, Homo sapien
accatcaaaaccgttgaggaattca

SEQ ID NO: 39053 - DNA, 25 bp, Homo sapien
attagagtaatttaagtccttcgaa

SEQ ID NO: 39054 - DNA, 25 bp, Homo sapien
ttcgaaggacttaaattactctaat

SEQ ID NO: 39055 - DNA, 25 bp, Homo sapien
gtctgagaactcattttgttcgtat

SEQ ID NO: 39056 - DNA, 25 bp, Homo sapien
atacgaacaaaatgagttctcagac

SEQ ID NO: 39057 - DNA, 25 bp, Homo sapien
aacccaactttcaagatgaaagtct

SEQ ID NO: 39058 - DNA, 25 bp, Homo sapien
agactttcatcttgaaagttgggtt

SEQ ID NO: 39059 - DNA, 25 bp, Homo sapien
cctctaattcaccagcaagtaaaat

SEQ ID NO: 39060 - DNA, 25 bp, Homo sapien
attttacttgctggtgaattagagg

SEQ ID NO: 39061 - DNA, 25 bp, Homo sapien
cccaagccgagatcgttttaagact

SEQ ID NO: 39062 - DNA, 25 bp, Homo sapien
agtcttaaaacgatctcggcttggg

SEQ ID NO: 39063 - DNA, 25 bp, Homo sapien
aaacatttgtaactgatgattcgac

SEQ ID NO: 39064 - DNA, 25 bp, Homo sapien
gtcgaatcatcagttacaaatgttt

SEQ ID NO: 39065 - DNA, 25 bp, Homo sapien
cgagggcccgccacaggcgttgttc

SEQ ID NO: 39066 - DNA, 25 bp, Homo sapien
gaacaacgcctgtggcgggccctcg

SEQ ID NO: 39067 - DNA, 25 bp, Homo sapien
gcgccaggtccggaggcctgacgtc

SEQ ID NO: 39068 - DNA, 25 bp, Homo sapien
gacgtcaggcctccggacctggcgc

SEQ ID NO: 39069 - DNA, 25 bp, Homo sapien
gccttgggtcagacctgggctcgcc

SEQ ID NO: 39070 - DNA, 25 bp, Homo sapien
ggcgagcccaggtctgacccaaggc

SEQ ID NO: 39071 - DNA, 25 bp, Homo sapien
tataaatcgaaacaactctaagaag

SEQ ID NO: 39072 - DNA, 25 bp, Homo sapien
cttcttagagttgtttcgatttata

SEQ ID NO: 39073 - DNA, 25 bp, Homo sapien
gattagtgtcggaagatctgtgaag

SEQ ID NO: 39074 - DNA, 25 bp, Homo sapien
cttcacagatcttccgacactaatc

SEQ ID NO: 39075 - DNA, 25 bp, Homo sapien
gagacaacatttaggacaagtctgg

SEQ ID NO: 39076 - DNA, 25 bp, Homo sapien
ccagacttgtcctaaatgttgtctc

SEQ ID NO: 39077 - DNA, 25 bp, Homo sapien
cggtggacgctcgagtcgcggcccg

SEQ ID NO: 39078 - DNA, 25 bp, Homo sapien
cgggccgcgactcgagcgtccaccg

SEQ ID NO: 39079 - DNA, 25 bp, Homo sapien
cccggtggacgctcgagtcgcggcc

SEQ ID NO: 39080 - DNA, 25 bp, Homo sapien
ggccgcgactcgagcgtccaccggg

SEQ ID NO: 39081 - DNA, 25 bp, Homo sapien
ccccggtggacgctcgagtcgcggc

SEQ ID NO: 39082 - DNA, 25 bp, Homo sapien
gccgcgactcgagcgtccaccgggg

SEQ ID NO: 39083 - DNA, 25 bp, Homo sapien
cgaactagaaactccttcaactaag

SEQ ID NO: 39084 - DNA, 25 bp, Homo sapien
cttagttgaaggagtttctagttcg

SEQ ID NO: 39085 - DNA, 25 bp, Homo sapien
taacagtcctgcaggaactcttcct

SEQ ID NO: 39086 - DNA, 25 bp, Homo sapien
aggaagagttcctgcaggactgtta

SEQ ID NO: 39087 - DNA, 25 bp, Homo sapien
tataacaacaaatatttcagggaat

SEQ ID NO: 39088 - DNA, 25 bp, Homo sapien
attccctgaaatatttgttgttata

SEQ ID NO: 39089 - DNA, 25 bp, Homo sapien
tcctatcctgcgttagataatagag

SEQ ID NO: 39090 - DNA, 25 bp, Homo sapien
ctctattatctaacgcaggatagga

SEQ ID NO: 39091 - DNA, 25 bp, Homo sapien
aggtaacacctttgatcacagtttc

SEQ ID NO: 39092 - DNA, 25 bp, Homo sapien
gaaactgtgatcaaaggtgttacct

SEQ ID NO: 39093 - DNA, 25 bp, Homo sapien
gaccccggagagactccgtcaccgg

SEQ ID NO: 39094 - DNA, 25 bp, Homo sapien
ccggtgacggagtctctccggggtc

SEQ ID NO: 39095 - DNA, 25 bp, Homo sapien
gtccttaatatcacactttttttta

SEQ ID NO: 39096 - DNA, 25 bp, Homo sapien
taaaaaaaagtgtgatattaaggac

SEQ ID NO: 39097 - DNA, 25 bp, Homo sapien
gtgcgcgggagaggcggtggtccta

SEQ ID NO: 39098 - DNA, 25 bp, Homo sapien
taggaccaccgcctctcccgcgcac

SEQ ID NO: 39099 - DNA, 25 bp, Homo sapien
gccgggcgtctgtcggccgtgcgcg

SEQ ID NO: 39100 - DNA, 25 bp, Homo sapien
cgcgcacggccgacagacgcccggc

SEQ ID NO: 39101 - DNA, 25 bp, Homo sapien
cggcgccgggcgtctgtcggccgtg

SEQ ID NO: 39102 - DNA, 25 bp, Homo sapien
cacggccgacagacgcccggcgccg

SEQ ID NO: 39103 - DNA, 25 bp, Homo sapien
atattttatctacaggtacactttc

SEQ ID NO: 39104 - DNA, 25 bp, Homo sapien
gaaagtgtacctgtagataaaatat

SEQ ID NO: 39105 - DNA, 25 bp, Homo sapien
gagggccaacatggtgacgtctcag

SEQ ID NO: 39106 - DNA, 25 bp, Homo sapien
ctgagacgtcaccatgttggccctc

SEQ ID NO: 39107 - DNA, 25 bp, Homo sapien
gactgtactcgttgttgctctgaat

SEQ ID NO: 39108 - DNA, 25 bp, Homo sapien
attcagagcaacaacgagtacagtc

SEQ ID NO: 39109 - DNA, 25 bp, Homo sapien
aggacgtaatgacacattttgtgac

SEQ ID NO: 39110 - DNA, 25 bp, Homo sapien
gtcacaaaatgtgtcattacgtcct

SEQ ID NO: 39111 - DNA, 25 bp, Homo sapien
agtctgtctccgactgaccggggac

SEQ ID NO: 39112 - DNA, 25 bp, Homo sapien
gtccccggtcagtcggagacagact

SEQ ID NO: 39113 - DNA, 25 bp, Homo sapien
acgtctcgcagacccgtgttggctc

SEQ ID NO: 39114 - DNA, 25 bp, Homo sapien
gagccaacacgggtctgcgagacgt

SEQ ID NO: 39115 - DNA, 25 bp, Homo sapien
tgaccgtagaccgactcgacttcaa

SEQ ID NO: 39116 - DNA, 25 bp, Homo sapien
ttgaagtcgagtcggtctacggtca

SEQ ID NO: 39117 - DNA, 25 bp, Homo sapien
accaatctcaccctgtaaccagttt

SEQ ID NO: 39118 - DNA, 25 bp, Homo sapien
aaactggttacagggtgagattggt

SEQ ID NO: 39119 - DNA, 25 bp, Homo sapien
atagtgttaatctgactagtgaccc

SEQ ID NO: 39120 - DNA, 25 bp, Homo sapien
gggtcactagtcagattaacactat

SEQ ID NO: 39121 - DNA, 25 bp, Homo sapien
tagtgactgagttcaccgacaagac

SEQ ID NO: 39122 - DNA, 25 bp, Homo sapien
gtcttgtcggtgaactcagtcacta

SEQ ID NO: 39123 - DNA, 25 bp, Homo sapien
gaaagagaccaggagcctctggtag

SEQ ID NO: 39124 - DNA, 25 bp, Homo sapien
ctaccagaggctcctggtctctttc

SEQ ID NO: 39125 - DNA, 25 bp, Homo sapien
gggtccattgttccgcttgaggttg

SEQ ID NO: 39126 - DNA, 25 bp, Homo sapien
caacctcaagcggaacaatggaccc

SEQ ID NO: 39127 - DNA, 25 bp, Homo sapien
attcacacacagtctaattaatgag

SEQ ID NO: 39128 - DNA, 25 bp, Homo sapien
ctcattaattagactgtgtgtgaat

SEQ ID NO: 39129 - DNA, 25 bp, Homo sapien
gtacatgtgcagacacgtgcacaag

SEQ ID NO: 39130 - DNA, 25 bp, Homo sapien
cttgtgcacgtgtctgcacatgtac

SEQ ID NO: 39131 - DNA, 25 bp, Homo sapien
cattcttcaaatacaagtatttcat

SEQ ID NO: 39132 - DNA, 25 bp, Homo sapien
atgaaatacttgtatttgaagaatg

SEQ ID NO: 39133 - DNA, 25 bp, Homo sapien
acatgaggtcgtcttcataatttaa

SEQ ID NO: 39134 - DNA, 25 bp, Homo sapien
ttaaattatgaagacgacctcatgt

SEQ ID NO: 39135 - DNA, 25 bp, Homo sapien
tctttccacgatctcttttatggtt

SEQ ID NO: 39136 - DNA, 25 bp, Homo sapien
aaccataaaagagatcgtggaaaga

SEQ ID NO: 39137 - DNA, 25 bp, Homo sapien
tattcggtttaagaaggtagtgaag

SEQ ID NO: 39138 - DNA, 25 bp, Homo sapien
cttcactaccttcttaaaccgaata

SEQ ID NO: 39139 - DNA, 25 bp, Homo sapien
aagagaccgcatccataaaagtccg

SEQ ID NO: 39140 - DNA, 25 bp, Homo sapien
cggacttttatggatgcggtctctt

SEQ ID NO: 39141 - DNA, 25 bp, Homo sapien
gttcccgaaacggacgacgcactac

SEQ ID NO: 39142 - DNA, 25 bp, Homo sapien
gtagtgcgtcgtccgtttcgggaac

SEQ ID NO: 39143 - DNA, 25 bp, Homo sapien
cgaagccgcagaacctagaatcgtt

SEQ ID NO: 39144 - DNA, 25 bp, Homo sapien
aacgattctaggttctgcggcttcg

SEQ ID NO: 39145 - DNA, 25 bp, Homo sapien
gcgtccacgtcaagccggcggcgtg

SEQ ID NO: 39146 - DNA, 25 bp, Homo sapien
cacgccgccggcttgacgtggacgc

SEQ ID NO: 39147 - DNA, 25 bp, Homo sapien
tctgggaccacggaagttgtccgaa

SEQ ID NO: 39148 - DNA, 25 bp, Homo sapien
ttcggacaacttccgtggtcccaga

SEQ ID NO: 39149 - DNA, 25 bp, Homo sapien
aaacttcagctccacactagatgta

SEQ ID NO: 39150 - DNA, 25 bp, Homo sapien
tacatctagtgtggagctgaagttt

SEQ ID NO: 39151 - DNA, 25 bp, Homo sapien
cgtctcactgttcacctgggagccc

SEQ ID NO: 39152 - DNA, 25 bp, Homo sapien
gggctcccaggtgaacagtgagacg

SEQ ID NO: 39153 - DNA, 25 bp, Homo sapien
ccggggtcagcgacggtactggccg

SEQ ID NO: 39154 - DNA, 25 bp, Homo sapien
cggccagtaccgtcgctgaccccgg

SEQ ID NO: 39155 - DNA, 25 bp, Homo sapien
ctaagtaacattggtcctcgttcaa

SEQ ID NO: 39156 - DNA, 25 bp, Homo sapien
ttgaacgaggaccaatgttacttag

SEQ ID NO: 39157 - DNA, 25 bp, Homo sapien
gtccgcggcgtctaggcccaaacgg

SEQ ID NO: 39158 - DNA, 25 bp, Homo sapien
ccgtttgggcctagacgccgcggac

SEQ ID NO: 39159 - DNA, 25 bp, Homo sapien
gatgcaggttcccttttacggaggc

SEQ ID NO: 39160 - DNA, 25 bp, Homo sapien
gcctccgtaaaagggaacctgcatc

SEQ ID NO: 39161 - DNA, 25 bp, Homo sapien
tggactccaaggagttcccggcccg

SEQ ID NO: 39162 - DNA, 25 bp, Homo sapien
cgggccgggaactccttggagtcca

SEQ ID NO: 39163 - DNA, 25 bp, Homo sapien
tgacaccttaaggatccacccggag

SEQ ID NO: 39164 - DNA, 25 bp, Homo sapien
ctccgggtggatccttaaggtgtca

SEQ ID NO: 39165 - DNA, 25 bp, Homo sapien
cacagtcccgtcgacgcgggaaccg

SEQ ID NO: 39166 - DNA, 25 bp, Homo sapien
cggttcccgcgtcgacgggactgtg

SEQ ID NO: 39167 - DNA, 25 bp, Homo sapien
taggacaccgacaagggggctctgt

SEQ ID NO: 39168 - DNA, 25 bp, Homo sapien
acagagcccccttgtcggtgtccta

SEQ ID NO: 39169 - DNA, 25 bp, Homo sapien
gtagtattatcgtcaggattattac

SEQ ID NO: 39170 - DNA, 25 bp, Homo sapien
gtaataatcctgacgataatactac

SEQ ID NO: 39171 - DNA, 25 bp, Homo sapien
agacgcgggcgcgtgttccatgacc

SEQ ID NO: 39172 - DNA, 25 bp, Homo sapien
ggtcatggaacacgcgcccgcgtct

SEQ ID NO: 39173 - DNA, 25 bp, Homo sapien
ggtgggacgggcacacggccacggt

SEQ ID NO: 39174 - DNA, 25 bp, Homo sapien
accgtggccgtgtgcccgtcccacc

SEQ ID NO: 39175 - DNA, 25 bp, Homo sapien
tctcttagactcgaacgtgttcgag

SEQ ID NO: 39176 - DNA, 25 bp, Homo sapien
ctcgaacacgttcgagtctaagaga

SEQ ID NO: 39177 - DNA, 25 bp, Homo sapien
cggtttgtaacttcttaactatcac

SEQ ID NO: 39178 - DNA, 25 bp, Homo sapien
gtgatagttaagaagttacaaaccg

SEQ ID NO: 39179 - DNA, 25 bp, Homo sapien
ctcagggaccggcggcgaccctccc

SEQ ID NO: 39180 - DNA, 25 bp, Homo sapien
gggagggtcgccgccggtccctgag

SEQ ID NO: 39181 - DNA, 25 bp, Homo sapien
taaacgattttattacttactcaaa

SEQ ID NO: 39182 - DNA, 25 bp, Homo sapien
tttgagtaagtaataaaatcgttta

SEQ ID NO: 39183 - DNA, 25 bp, Homo sapien
ataaacgattttattacttactcaa

SEQ ID NO: 39184 - DNA, 25 bp, Homo sapien
ttgagtaagtaataaaatcgtttat

SEQ ID NO: 39185 - DNA, 25 bp, Homo sapien
aataaacgattttattacttactca

SEQ ID NO: 39186 - DNA, 25 bp, Homo sapien
tgagtaagtaataaaatcgtttatt

SEQ ID NO: 39187 - DNA, 25 bp, Homo sapien
gtcagttctcgcgaatcttcgtcct

SEQ ID NO: 39188 - DNA, 25 bp, Homo sapien
aggacgaagattcgcgagaactgac

SEQ ID NO: 39189 - DNA, 25 bp, Homo sapien
agaagctgagaggacggtgtgggcg

SEQ ID NO: 39190 - DNA, 25 bp, Homo sapien
cgcccacaccgtcctctcagcttct

SEQ ID NO: 39191 - DNA, 25 bp, Homo sapien
tacttgtcttaaaattttgttagaa

SEQ ID NO: 39192 - DNA, 25 bp, Homo sapien
ttctaacaaaattttaagacaagta

SEQ ID NO: 39193 - DNA, 25 bp, Homo sapien
acacactactgaactgacgagggac

SEQ ID NO: 39194 - DNA, 25 bp, Homo sapien
gtccctcgtcagttcagtagtgtgt

SEQ ID NO: 39195 - DNA, 25 bp, Homo sapien
ctgggttcgtgtaggtcacccgtcc

SEQ ID NO: 39196 - DNA, 25 bp, Homo sapien
ggacgggtgacctacacgaacccag

SEQ ID NO: 39197 - DNA, 25 bp, Homo sapien
ccattacttaaagagtccctacgcg

SEQ ID NO: 39198 - DNA, 25 bp, Homo sapien
cgcgtagggactctttaagtaatgg

SEQ ID NO: 39199 - DNA, 25 bp, Homo sapien
accccgtatatgacccagttgatag

SEQ ID NO: 39200 - DNA, 25 bp, Homo sapien
ctatcaactgggtcatatacggggt

SEQ ID NO: 39201 - DNA, 25 bp, Homo sapien
gacggtttggagttgtcccgtgtat

SEQ ID NO: 39202 - DNA, 25 bp, Homo sapien
atacacgggacaactccaaaccgtc

SEQ ID NO: 39203 - DNA, 25 bp, Homo sapien
accctcgtacttccagagaccgaga

SEQ ID NO: 39204 - DNA, 25 bp, Homo sapien
tctcggtctctggaagtacgagggt

SEQ ID NO: 39205 - DNA, 25 bp, Homo sapien
tccggtctactcttgtgaccccgaa

SEQ ID NO: 39206 - DNA, 25 bp, Homo sapien
ttcggggtcacaagagtagaccgga

SEQ ID NO: 39207 - DNA, 25 bp, Homo sapien
ccagtacagtctgtgtcaggatcgg

SEQ ID NO: 39208 - DNA, 25 bp, Homo sapien
ccgatcctgacacagactgtactgg

SEQ ID NO: 39209 - DNA, 25 bp, Homo sapien
aatttgtggtagaagatgtagacac

SEQ ID NO: 39210 - DNA, 25 bp, Homo sapien
gtgtctacatcttctaccacaaatt

SEQ ID NO: 39211 - DNA, 25 bp, Homo sapien
cgtgcaccggcgggacaggaccggt

SEQ ID NO: 39212 - DNA, 25 bp, Homo sapien
accggtcctgtcccgccggtgcacg

SEQ ID NO: 39213 - DNA, 25 bp, Homo sapien
agatttcccgtcaaataatctttag

SEQ ID NO: 39214 - DNA, 25 bp, Homo sapien
ctaaagattatttgacgggaaatct

SEQ ID NO: 39215 - DNA, 25 bp, Homo sapien
gtttttatagatttcccgtcaaata

SEQ ID NO: 39216 - DNA, 25 bp, Homo sapien
tatttgacgggaaatctataaaaac

SEQ ID NO: 39217 - DNA, 25 bp, Homo sapien
aggtcccaacttatagatttatagt

SEQ ID NO: 39218 - DNA, 25 bp, Homo sapien
actataaatctataagttgggacct

SEQ ID NO: 39219 - DNA, 25 bp, Homo sapien
caccggtatagatgatacccctagg

SEQ ID NO: 39220 - DNA, 25 bp, Homo sapien
cctaggggtatcatctataccggtg

SEQ ID NO: 39221 - DNA, 25 bp, Homo sapien
ctacaaccagcaaataaagtcaagg

SEQ ID NO: 39222 - DNA, 25 bp, Homo sapien
ccttgactttatttgctggttgtag

SEQ ID NO: 39223 - DNA, 25 bp, Homo sapien
cgattcagactccaatctattttga

SEQ ID NO: 39224 - DNA, 25 bp, Homo sapien
tcaaaatagattggagtctgaatcg

SEQ ID NO: 39225 - DNA, 25 bp, Homo sapien
atcgttattgtaatggtattattat

SEQ ID NO: 39226 - DNA, 25 bp, Homo sapien
ataataataccattacaataacgat

SEQ ID NO: 39227 - DNA, 25 bp, Homo sapien
gaatcgttattgtaatggtattatt

SEQ ID NO: 39228 - DNA, 25 bp, Homo sapien
aataataccattacaataacgattc

SEQ ID NO: 39229 - DNA, 25 bp, Homo sapien
agaatcgttattgtaatggtattat

SEQ ID NO: 39230 - DNA, 25 bp, Homo sapien
ataataccattacaataacgattct

SEQ ID NO: 39231 - DNA, 25 bp, Homo sapien
atccgcgggcgtagacacgacccgc

SEQ ID NO: 39232 - DNA, 25 bp, Homo sapien
gcgggtcgtgtctacgcccgcggat

SEQ ID NO: 39233 - DNA, 25 bp, Homo sapien
tccatgagtacctgtcaatccaatt

SEQ ID NO: 39234 - DNA, 25 bp, Homo sapien
aattggattgacaggtactcatgga

SEQ ID NO: 39235 - DNA, 25 bp, Homo sapien
aggaactcggcactccaagcctact

SEQ ID NO: 39236 - DNA, 25 bp, Homo sapien
agtaggcttggagtgccgagttcct

SEQ ID NO: 39237 - DNA, 25 bp, Homo sapien
tccagagtcttgttattactcacaa

SEQ ID NO: 39238 - DNA, 25 bp, Homo sapien
ttgtgagtaataacaagactctgga

SEQ ID NO: 39239 - DNA, 25 bp, Homo sapien
ttgtaaatcatcaaggaccatccat

SEQ ID NO: 39240 - DNA, 25 bp, Homo sapien
atggatggtccttgatgatttacaa

SEQ ID NO: 39241 - DNA, 25 bp, Homo sapien
taagggtaccaggggcgagacctgt

SEQ ID NO: 39242 - DNA, 25 bp, Homo sapien
acaggtctcgcccctggtaccctta

SEQ ID NO: 39243 - DNA, 25 bp, Homo sapien
cctctctcaagatcggaaacatttg

SEQ ID NO: 39244 - DNA, 25 bp, Homo sapien
caaatgtttccgatcttgagagagg

SEQ ID NO: 39245 - DNA, 25 bp, Homo sapien
cgtcggcgttcgacctaagcaaggt

SEQ ID NO: 39246 - DNA, 25 bp, Homo sapien
accttgcttaggtcgaacgccgacg

SEQ ID NO: 39247 - DNA, 25 bp, Homo sapien
ttgaaggagtcgatacggttacgag

SEQ ID NO: 39248 - DNA, 25 bp, Homo sapien
ctcgtaaccgtatcgactccttcaa

SEQ ID NO: 39249 - DNA, 25 bp, Homo sapien
ctgaaccgttgcacagggcgccata

SEQ ID NO: 39250 - DNA, 25 bp, Homo sapien
tatggcgccctgtgcaacggttcag

SEQ ID NO: 39251 - DNA, 25 bp, Homo sapien
gtaagtttaatagaccacattatta

SEQ ID NO: 39252 - DNA, 25 bp, Homo sapien
taataatgtggtctattaaacttac

SEQ ID NO: 39253 - DNA, 25 bp, Homo sapien
tcgtacaaatccgtattattcttat

SEQ ID NO: 39254 - DNA, 25 bp, Homo sapien
ataagaataatacggatttgtacga

SEQ ID NO: 39255 - DNA, 25 bp, Homo sapien
atattttcgtacaaatccgtattat

SEQ ID NO: 39256 - DNA, 25 bp, Homo sapien
ataatacggatttgtacgaaaatat

SEQ ID NO: 39257 - DNA, 25 bp, Homo sapien
gttcgggagacaccaaccggctaag

SEQ ID NO: 39258 - DNA, 25 bp, Homo sapien
cttagccggttggtgtctcccgaac

SEQ ID NO: 39259 - DNA, 25 bp, Homo sapien
gaaaccgtggagaaaatcgaaaata

SEQ ID NO: 39260 - DNA, 25 bp, Homo sapien
tattttcgattttctccacggtttc

SEQ ID NO: 39261 - DNA, 25 bp, Homo sapien
gacgacggcggtgacagacgaggta

SEQ ID NO: 39262 - DNA, 25 bp, Homo sapien
tacctcgtctgtcaccgccgtcgtc

SEQ ID NO: 39263 - DNA, 25 bp, Homo sapien
agccacgtggtcacaagtatgtcat

SEQ ID NO: 39264 - DNA, 25 bp, Homo sapien
atgacatacttgtgaccacgtggct

SEQ ID NO: 39265 - DNA, 25 bp, Homo sapien
ctccgagtcgtgtcgtgcgaagtgc

SEQ ID NO: 39266 - DNA, 25 bp, Homo sapien
gcacttcgcacgacacgactcggag

SEQ ID NO: 39267 - DNA, 25 bp, Homo sapien
aatcagtcgtttgagtcgacgaggg

SEQ ID NO: 39268 - DNA, 25 bp, Homo sapien
ccctcgtcgactcaaacgactgatt

SEQ ID NO: 39269 - DNA, 25 bp, Homo sapien
aacttctagaaaagtgattgtcctt

SEQ ID NO: 39270 - DNA, 25 bp, Homo sapien
aaggacaatcacttttctagaagtt

SEQ ID NO: 39271 - DNA, 25 bp, Homo sapien
gtgtcgtcatcctgcgggggcgcgt

SEQ ID NO: 39272 - DNA, 25 bp, Homo sapien
acgcgcccccgcaggatgacgacac

SEQ ID NO: 39273 - DNA, 25 bp, Homo sapien
gtctgtgtcagaaactggaagactc

SEQ ID NO: 39274 - DNA, 25 bp, Homo sapien
gagtcttccagtttctgacacagac

SEQ ID NO: 39275 - DNA, 25 bp, Homo sapien
agtacgttcactgagctcggactcc

SEQ ID NO: 39276 - DNA, 25 bp, Homo sapien
ggagtccgagctcagtgaacgtact

SEQ ID NO: 39277 - DNA, 25 bp, Homo sapien
gaccaactcgatggagacacagacg

SEQ ID NO: 39278 - DNA, 25 bp, Homo sapien
cgtctgtgtctccatcgagttggtc

SEQ ID NO: 39279 - DNA, 25 bp, Homo sapien
gaacaccttggaccatcggtgttta

SEQ ID NO: 39280 - DNA, 25 bp, Homo sapien
taaacaccgatggtccaaggtgttc

SEQ ID NO: 39281 - DNA, 25 bp, Homo sapien
aagattagactgaactgacttctgc

SEQ ID NO: 39282 - DNA, 25 bp, Homo sapien
gcagaagtcagttcagtctaatctt

SEQ ID NO: 39283 - DNA, 25 bp, Homo sapien
tccggggacggctcaagaggcattc

SEQ ID NO: 39284 - DNA, 25 bp, Homo sapien
gaatgcctcttgagccgtccccgga

SEQ ID NO: 39285 - DNA, 25 bp, Homo sapien
cgtaaaggaaagattgaacgaacat

SEQ ID NO: 39286 - DNA, 25 bp, Homo sapien
atgttcgttcaatctttcctttacg

SEQ ID NO: 39287 - DNA, 25 bp, Homo sapien
acataaaacaattaagtatcagtaa

SEQ ID NO: 39288 - DNA, 25 bp, Homo sapien
ttactgatacttaattgttttatgt

SEQ ID NO: 39289 - DNA, 25 bp, Homo sapien
tattcttgaattaggaattacttac

SEQ ID NO: 39290 - DNA, 25 bp, Homo sapien
gtaagtaattcctaattcaagaata

SEQ ID NO: 39291 - DNA, 25 bp, Homo sapien
gacccgagatacgacatactcgact

SEQ ID NO: 39292 - DNA, 25 bp, Homo sapien
agtcgagtatgtcgtatctcgggtc

SEQ ID NO: 39293 - DNA, 25 bp, Homo sapien
acccctattcaactcaaaatctctg

SEQ ID NO: 39294 - DNA, 25 bp, Homo sapien
cagagattttgagttgaataggggt

SEQ ID NO: 39295 - DNA, 25 bp, Homo sapien
cttaagcgtcaagggtctggcgact

SEQ ID NO: 39296 - DNA, 25 bp, Homo sapien
agtcgccagacccttgacgcttaag

SEQ ID NO: 39297 - DNA, 25 bp, Homo sapien
gcggacatgaacctatacaagaaag

SEQ ID NO: 39298 - DNA, 25 bp, Homo sapien
ctttcttgtataggttcatgtccgc

SEQ ID NO: 39299 - DNA, 25 bp, Homo sapien
gccagtcgggaaaacctctgtgcca

SEQ ID NO: 39300 - DNA, 25 bp, Homo sapien
tggcacagaggttttcccgactggc

SEQ ID NO: 39301 - DNA, 25 bp, Homo sapien
tggcgaaatcggaaagaacaagtag

SEQ ID NO: 39302 - DNA, 25 bp, Homo sapien
ctacttgttctttccgatttcgcca

SEQ ID NO: 39303 - DNA, 25 bp, Homo sapien
agtctacttaaggagaaggcagaac

SEQ ID NO: 39304 - DNA, 25 bp, Homo sapien
gttctgccttctccttaagtagact

SEQ ID NO: 39305 - DNA, 25 bp, Homo sapien
agtcagagggactgaccacgagagt

SEQ ID NO: 39306 - DNA, 25 bp, Homo sapien
actctcgtggtcagtccctctgact

SEQ ID NO: 39307 - DNA, 25 bp, Homo sapien
aataaagattagaactgaaccactt

SEQ ID NO: 39308 - DNA, 25 bp, Homo sapien
aagtggttcagttctaatctttatt

SEQ ID NO: 39309 - DNA, 25 bp, Homo sapien
acgaacagttgaacaaatttaagta

SEQ ID NO: 39310 - DNA, 25 bp, Homo sapien
tacttaaatttgttcaactgttcgt

SEQ ID NO: 39311 - DNA, 25 bp, Homo sapien
tcgtgtccgtctgcccacccgaggg

SEQ ID NO: 39312 - DNA, 25 bp, Homo sapien
ccctcgggtgggcagacggacacga

SEQ ID NO: 39313 - DNA, 25 bp, Homo sapien
cccctcaagcaggagtgtgagtcaa

SEQ ID NO: 39314 - DNA, 25 bp, Homo sapien
ttgactcacactcctgcttgagggg

SEQ ID NO: 39315 - DNA, 25 bp, Homo sapien
gggactcttccgcatcgttggaagt

SEQ ID NO: 39316 - DNA, 25 bp, Homo sapien
acttccaacgatgcggaagagtccc

SEQ ID NO: 39317 - DNA, 25 bp, Homo sapien
ctgagtccggagcgggcgcgagccc

SEQ ID NO: 39318 - DNA, 25 bp, Homo sapien
gggctcgcgcccgctccggactcag

SEQ ID NO: 39319 - DNA, 25 bp, Homo sapien
cctctgcggcagcctcccgtcctcc

SEQ ID NO: 39320 - DNA, 25 bp, Homo sapien
ggaggacgggaggctgccgcagagg

SEQ ID NO: 39321 - DNA, 25 bp, Homo sapien
atagttactagtctaaacaacagta

SEQ ID NO: 39322 - DNA, 25 bp, Homo sapien
tactgttgtttagactagtaactat

SEQ ID NO: 39323 - DNA, 25 bp, Homo sapien
cgagggaaccccacagacgaagttc

SEQ ID NO: 39324 - DNA, 25 bp, Homo sapien
gaacttcgtctgtggggttccctcg

SEQ ID NO: 39325 - DNA, 25 bp, Homo sapien
cccctcctcgacttgttgacacagg

SEQ ID NO: 39326 - DNA, 25 bp, Homo sapien
cctgtgtcaacaagtcgaggagggg

SEQ ID NO: 39327 - DNA, 25 bp, Homo sapien
tcgccggggacggagctcccagtcg

SEQ ID NO: 39328 - DNA, 25 bp, Homo sapien
cgactgggagctccgtccccggcga

SEQ ID NO: 39329 - DNA, 25 bp, Homo sapien
accaagggacacagcgcgaggaatt

SEQ ID NO: 39330 - DNA, 25 bp, Homo sapien
aattcctcgcgctgtgtcccttggt

SEQ ID NO: 39331 - DNA, 25 bp, Homo sapien
gaggacgccccgcaggtcgtgagcg

SEQ ID NO: 39332 - DNA, 25 bp, Homo sapien
cgctcacgacctgcggggcgtcctc

SEQ ID NO: 39333 - DNA, 25 bp, Homo sapien
cgacagggggtcctggcgcctcggc

SEQ ID NO: 39334 - DNA, 25 bp, Homo sapien
gccgaggcgccaggaccccctgtcg

SEQ ID NO: 39335 - DNA, 25 bp, Homo sapien
cctgttccatcacagacgaagctac

SEQ ID NO: 39336 - DNA, 25 bp, Homo sapien
gtagcttcgtctgtgatggaacagg

SEQ ID NO: 39337 - DNA, 25 bp, Homo sapien
cgggacggccctcagggtagacgtg

SEQ ID NO: 39338 - DNA, 25 bp, Homo sapien
cacgtctaccctgagggccgtcccg

SEQ ID NO: 39339 - DNA, 25 bp, Homo sapien
agatatacaaactatgttaacataa

SEQ ID NO: 39340 - DNA, 25 bp, Homo sapien
ttatgttaacatagtttgtatatct

SEQ ID NO: 39341 - DNA, 25 bp, Homo sapien
tctgtctctctgcaacttaccctac

SEQ ID NO: 39342 - DNA, 25 bp, Homo sapien
gtagggtaagttgcagagagacaga

SEQ ID NO: 39343 - DNA, 25 bp, Homo sapien
gttctgtaaggattcacttgccaat

SEQ ID NO: 39344 - DNA, 25 bp, Homo sapien
attggcaagtgaatccttacagaac

SEQ ID NO: 39345 - DNA, 25 bp, Homo sapien
acgtcggacctagactgttacgaag

SEQ ID NO: 39346 - DNA, 25 bp, Homo sapien
cttcgtaacagtctaggtccgacgt

SEQ ID NO: 39347 - DNA, 25 bp, Homo sapien
ttcgtactacaagtattaaggtaat

SEQ ID NO: 39348 - DNA, 25 bp, Homo sapien
attaccttaatacttgtagtacgaa

(The sequence listing continues in the following parts.)
